(19) United States
(12) Patent Application Publication
(10) Pub. No.: US 2013/0129668 A1
(43) Pub. Date: May 23, 2013

(54) Diagnosis and treatment of arthritis using epigenetics

(71) Applicants: Gary Firestein, Del Mar, CA (US); Kazuhisa Nakano, San Diego, CA (US)

(72) Inventors: Gary Firestein, Del Mar, CA (US); Kazuhisa Nakano, San Diego, CA (US)

(73) Assignee: The Regents of the University of California, Oakland, CA (US)

(21) Appl. No.: 13/573,233

(22) Filed: Aug. 31, 2012

Related U.S. Application Data
(60) Provisional application No. 61/530,072, filed on Sep. 1, 2011.

(51) Int. Cl. C12Q 1/68

(52) U.S. Cl. CPC C12Q 1/6883
USPC 424/85.1; 435/6.11; 514/16.6; 514/44 A; 514/44 R

(57) ABSTRACT

Embodiments of the present invention include methods, compositions and kits for evaluating a diagnosis, prognosis, or response to treatment of a subject with a disorder such as rheumatoid arthritis or osteoarthritis. Some embodiments include identifying a therapeutic agent for treating a disorder such as rheumatoid arthritis or osteoarthritis.

### RELATED APPLICATIONS

[0001] This application claims the benefit of U.S. Provisional Application No. 61/530,072 entitled “DIAGNOSIS AND TREATMENT OF ARTHRITIS USING EPIGENETICS” filed on Sep. 1, 2011, which is incorporated herein by reference in its entirety.

### REFERENCE TO SEQUENCE LISTING

[0002] The present application is being filed along with a Sequence Listing in electronic format. The Sequence Listing is provided as a file entitled UCSD055_{—}001A.TXT, created Aug. 24, 2012, which is approximately 135,386 KB in size. The information in the electronic format of the Sequence Listing is incorporated herein by reference in its entirety.

### FIELD OF THE INVENTION

[0003] Embodiments of the present invention include methods, compositions and kits for evaluating a diagnosis, prognosis, or response to treatment of a subject with a disorder such as rheumatoid arthritis or osteoarthritis. Some embodiments include identifying a therapeutic agent for treating a disorder such as rheumatoid arthritis or osteoarthritis.

### BACKGROUND OF THE INVENTION

[0004] Rheumatoid arthritis is an immune-mediated disease marked by symmetric inflammation in diarthrodial joints and destruction of the extracellular matrix. Genomics has rapidly advanced our understanding of susceptibility and severity of RA, and many associated polymorphisms in key genes have been described. However, identical twins have a concordance rate of only 12-15% suggesting that other influences can affect either the onset or progression of disease, such as epigenetic regulation of gene expression. One of the most widely studied epigenetic mechanisms, especially in oncology, is DNA methylation, which plays a key role regulating and silencing gene expression and could potentially contribute to immune dysregulation.

[0005] The pathogenesis of Rheumatoid arthritis (RA) is complex and involves numerous cell types that contribute through adaptive and innate immune responses (Firestein G S. Evolving concepts of rheumatoid arthritis. Nature, 423:356-361, 2003). Fibroblast-like synoviocytes (FLS), which form the synovial intimal lining, play an integral role by producing key cytokines (e.g., IL-6), small molecule mediators (e.g., prostanoids), and proteases (e.g., metalloproteinases). While osteoclasts are the primary effectors of bone erosions in arthritis, FLS are responsible for cartilage damage by virtue of their ability to adhere to and invade cartilage extracellular matrix. This capacity requires homotypic aggregation mediated by the adhesion molecule cadherin-11, which directs intimal lining formation and supports an invasive phenotype (Kiener H P et al. Cadherin 11 promotes invasive behavior of fibroblast-like synoviocytes. Arthritis Rheum. 2009 May; 60(5):1305-10). A well-defined relationship has long been recognized between synovial tissue histology and function and peripheral blood cell characteristics in diseases like RA, most likely because the circulating cells actively traffic between the synovium, lymph nodes, and peripheral blood (Malone D G et al. Immune function in severe, active rheumatoid arthritis. A relationship between peripheral blood mononuclear cell proliferation to soluble antigens and synovial tissue immunohistologic characteristics. J Clin Invest., 74(4):1173-1185, 1984; Firestein, G S. Etiology and pathogenesis of rheumatoid arthritis, In: Textbook of Rheumatology, G S Firestein, et al. eds., Elsevier, Philadelphia, 8th edition, 2009, pp. 1035-86). Understanding the precise molecular mechanisms that regulate FLS and peripheral blood cell activation in inflammatory arthritis could provide insights into the pathogenesis of RA and lead to novel therapeutic strategies.

### SUMMARY OF THE INVENTION

[0006] Some embodiments of the methods, compositions and kits provided herein include a method for diagnosing rheumatoid arthritis or osteoarthritis, determining a rheumatoid arthritis or osteoarthritis prognosis, or determining or predicting a response to treatment for rheumatoid arthritis or osteoarthritis in a subject comprising determining whether at least 2 nucleic acid loci or at least 2 genes in a sample from said subject have methylation states indicative of rheumatoid arthritis, osteoarthritis, a rheumatoid arthritis or osteoarthritis prognosis, or a response to treatment for rheumatoid arthritis or osteoarthritis.

[0007] Some embodiments also include comprising comparing the methylation states of the at least 2 loci or at least 2 genes in the sample from said subject with the methylation states of the loci or genes in normal tissue, tissue from a subject without said known rheumatoid arthritis or osteoarthritis prognosis, or tissue from a subject without said known response to treatment for rheumatoid arthritis or osteoarthritis.

[0008] In some embodiments, an increase or decrease in the extent of methylation of at least 2 loci or at least 2 genes compared to the extent of methylation of the loci or genes in normal tissue, tissue from a subject without said known rheumatoid arthritis or osteoarthritis prognosis, or tissue from a subject without said known response to treatment for rheumatoid arthritis or osteoarthritis is indicative of the presence or absence of rheumatoid arthritis, osteoarthritis, a rheumatoid arthritis or osteoarthritis prognosis, or response to treatment for rheumatoid arthritis or osteoarthritis for the subject.

[0009] In some embodiments, the methylation states of said at least 2 loci or at least 2 genes are determined in fibroblasts from said subject. In some embodiments, the methylation state of said at least 2 loci or at least 2 genes is determined in synoviocytes from said subject. In some embodiments, the methylation states of said at least 2 loci or at least 2 genes are determined in fibroblast-like synoviocytes from said subject. In some embodiments, the methylation states of said at least 2 loci or at least 2 genes are determined in rheumatoid arthritis fibroblast-like synoviocytes from said subject. In some embodiments, the methylation states of said at least 2 loci or at least 2 genes are determined in osteoarthritis fibroblast-like synoviocytes from said subject.

[0010] In some embodiments, the methylation states of said at least 2 loci or at least 2 genes are determined in macrophage from said subject.

[0011] In some embodiments, the methylation states of said at least 2 loci or at least 2 genes are determined in peripheral blood cells from said subject. In some embodiments, the peripheral blood cell is selected from the group consisting of white blood cell, neutrophil, eosinophil, basophil, lymphocyte, B cell, plasma cell, T cell, natural killer cell, monocyte, and dendritic cell.

[0012] In some embodiments, the sample is selected from the group consisting of a tissue sample, a frozen tissue sample, a biopsy specimen, a surgical specimen, a cytological specimen, whole blood, bone marrow, cerebral spinal fluid, peritoneal fluid, lymph fluid, serum, plasma, urine, stool, and nipple aspirate.

[0013] In some embodiments, the at least 2 loci are selected from the group consisting of SEQ ID NO.s 1-485512. In some embodiments, the at least 2 loci are selected from the group consisting of the loci listed in TABLE 6. In some embodiments, the at least 2 loci are selected from the group consisting of the loci listed in TABLE 7. In some embodiments, the at least 2 loci are selected from the group consisting of the loci listed in TABLE 8. In some embodiments, the at least 2 loci are selected from the group consisting of the loci listed in TABLE 3.

[0014] In some embodiments, the methylation states of at least 5 nucleic acid loci or at least 5 genes in said sample are determined. In some embodiments, the methylation states of at least 10 nucleic acid loci or at least 10 genes in said sample are determined. In some embodiments, the methylation states of at least 20 nucleic acid loci or at least 20 genes in said sample are determined. In some embodiments, the methylation states of at least 50 nucleic acid loci or at least 50 genes in said sample are determined. In some embodiments, the methylation states of at least 100 nucleic acid loci or at least 100 genes are determined.

[0015] In some embodiments, the subject is a mammal. In some embodiments, the subject is a human.

[0016] In some embodiments, the nucleic acid loci are selected from the group consisting of the loci listed in TABLE 6. In some embodiments, the nucleic acid loci are selected from the group consisting of the loci listed in TABLE 7. In some embodiments, the nucleic acid loci are selected from the group consisting of the loci listed in TABLE 8.

[0017] Some embodiments of the methods, compositions and kits provided herein include a method for diagnosing rheumatoid arthritis or osteoarthritis, determining a rheumatoid arthritis or osteoarthritis prognosis, or determining or predicting a response to treatment for rheumatoid arthritis or osteoarthritis in a subject comprising determining the methylation states of a plurality of nucleic acid loci or the methylation states of a plurality of genes in a sample of said subject to obtain a methylation profile; and determining whether said methylation profile is indicative of rheumatoid arthritis, osteoarthritis, a rheumatoid arthritis or osteoarthritis prognosis, or a response to treatment for rheumatoid arthritis or osteoarthritis.

[0018] Some embodiments also include comparing the methylation state of the plurality of nucleic acid loci or the methylation state of the plurality of genes in the sample from said subject with the methylation state of the plurality of nucleic acid loci or the methylation state of the plurality of genes in normal tissue, tissue from a subject without said known rheumatoid arthritis or osteoarthritis prognosis, or tissue from a subject without said known response to treatment for rheumatoid arthritis or osteoarthritis.

[0019] In some embodiments, an increase or decrease in the extent of methylation of plurality of nucleic acid loci or of the methylation state of the plurality of genes compared to the extent of methylation of the plurality of nucleic acid loci or the extent of methylation of the plurality of genes in normal tissue, tissue from a subject without said known rheumatoid arthritis or osteoarthritis prognosis, or tissue from a subject without said known response to treatment for rheumatoid arthritis or osteoarthritis is indicative of the presence or absence of rheumatoid arthritis, osteoarthritis, a rheumatoid arthritis or osteoarthritis prognosis, or response to treatment for rheumatoid arthritis or osteoarthritis for the subject.

[0020] In some embodiments, the methylation state of said plurality of nucleic acid loci or said plurality of genes is determined in fibroblasts from said subject. In some embodiments, the methylation state of said plurality of nucleic acid loci or said plurality of genes is determined in synoviocytes from said subject. In some embodiments, the methylation state of said plurality of nucleic acid loci or said plurality of genes is determined in fibroblast-like synoviocytes from said subject. In some embodiments, the methylation state of said plurality of nucleic acid loci or said plurality of genes is determined in rheumatoid arthritis fibroblast-like synoviocytes from said subject. In some embodiments, the methylation state of said plurality of nucleic acid loci or said plurality of genes is determined in osteoarthritis fibroblast-like synoviocytes from said subject.

[0021] In some embodiments, the methylation state of said plurality of nucleic acid loci or said plurality of genes is determined in macrophage from said subject.

[0022] In some embodiments, the methylation state of said plurality of nucleic acid loci or said plurality of genes is determined in peripheral blood cells from said subject. In some embodiments, the peripheral blood cell is selected from the group consisting of white blood cell, neutrophil, eosinophil, basophil, lymphocyte, B cell, plasma cell, T cell, natural killer cell, monocyte, and dendritic cell.

[0023] In some embodiments, the sample is selected from the group consisting of a tissue sample, a frozen tissue sample, a biopsy specimen, a surgical specimen, a cytological specimen, whole blood, bone marrow, cerebral spinal fluid, peritoneal fluid, lymph fluid, serum, plasma, urine, stool, and nipple aspirate.

[0024] In some embodiments, the plurality of nucleic acid loci is selected from the group consisting of SEQ ID NO.s 1-485512. In some embodiments, the plurality of nucleic acid loci is selected from the group consisting of the loci listed in TABLE 6. In some embodiments, the plurality of nucleic acid loci is selected from the group consisting of the loci listed in TABLE 7. In some embodiments, the plurality of nucleic acid loci is selected from the group consisting of the loci listed in TABLE 8.

[0025] In some embodiments, the plurality genes is selected from the group consisting of the loci listed in TABLE 3.

[0026] In some embodiments, the methylation states of at least 5 nucleic acid loci or at least 5 genes in said sample are determined. In some embodiments, the methylation states of at least 10 nucleic acid loci or at least 10 genes in said sample are determined. In some embodiments, the methylation states of at least 20 nucleic acid loci or at least 20 genes in said sample are determined. In some embodiments, the methylation states of at least 50 nucleic acid loci or at least 50 genes in said sample are determined. In some embodiments, the methylation states of at least 100 nucleic acid loci or at least 100 genes are determined.

[0027] In some embodiments, the subject is a mammal. In some embodiments, the subject is a human.

[0028] Some embodiments of the methods, compositions and kits provided herein include a method of identifying a methylation profile indicative of rheumatoid arthritis, osteoarthritis, a rheumatoid arthritis or osteoarthritis prognosis, or a response to treatment for rheumatoid arthritis or osteoarthritis comprising determining the methylation states of a plurality of nucleic acid loci or the methylation states of a plurality of genes in a sample from a test subject with rheumatoid arthritis, osteoarthritis, a particular rheumatoid arthritis or osteoarthritis prognosis, or a particular response to treatment for rheumatoid arthritis or osteoarthritis; determining the methylation states of said plurality of nucleic acid loci or said plurality of genes in a sample from a control subject without rheumatoid arthritis, without osteoarthritis, without said rheumatoid arthritis or osteoarthritis prognosis or without said response to treatment for rheumatoid arthritis or osteoarthritis; and identifying loci or genes which are hypermethylated or hypomethylated in said sample from said test subject relative to said sample from said control subject to identify said methylation profile indicative of rheumatoid arthritis, osteoarthritis a rheumatoid arthritis or osteoarthritis prognosis, or a response to treatment for rheumatoid arthritis or osteoarthritis.

[0029] Some embodiments also include storing data representing said loci or said genes which are hypermethylated or hypomethylated in said sample from said test subject relative to said sample from said control subject on a non-transitory computer readable medium.

[0030] Some embodiments also include comparing the methylation states of a plurality of nucleic acid loci or the methylation states of a plurality of genes in a sample from a test subject with rheumatoid arthritis, osteoarthritis, a particular rheumatoid arthritis or osteoarthritis prognosis, or a particular response to treatment for rheumatoid arthritis or osteoarthritis with the methylation states of said plurality of nucleic acid loci or the methylation states of said plurality of genes in a sample from a control subject without rheumatoid arthritis, without osteoarthritis, without said rheumatoid arthritis or osteoarthritis prognosis or without said response to treatment for rheumatoid arthritis or osteoarthritis.

[0031] In some embodiments, the methylation state of said plurality of nucleic acid loci or said plurality of genes in a sample from said test subject or said control subject is determined in fibroblasts from said test subject or said control subject. In some embodiments, the methylation state of said plurality of nucleic acid loci or said plurality of genes in a sample from said test subject or said control subject is determined in synoviocytes from said test subject or said control subject. In some embodiments, the methylation state of said plurality of nucleic acid loci or said plurality of genes in a sample from said test subject or control subject is determined in fibroblast-like synoviocytes from said test subject or said control subject. In some embodiments, the methylation state of said plurality of nucleic acid loci or said plurality of genes in a sample from said test subject or control subject is determined in rheumatoid arthritis fibroblast-like synoviocytes from said test subject or control subject. In some embodiments, the methylation state of said plurality of nucleic acid loci or said plurality of genes in a sample from said test subject or control subject is determined in osteoarthritis fibroblast-like synoviocytes from said test subject or control subject.

[0032] In some embodiments, the methylation state of said plurality of nucleic acid loci or said plurality of genes in a sample from said test subject or control subject is determined in macrophage from said test subject or control subject.

[0033] In some embodiments, the methylation state of said plurality of nucleic acid loci or said plurality of genes in a sample from said test subject or control subject is determined in peripheral blood cells from said test subject or control subject. In some embodiments, the peripheral blood cell is selected from the group consisting of white blood cell, neutrophil, eosinophil, basophil, lymphocyte, B cell, plasma cell, T cell, natural killer cell, monocyte, and dendritic cell.

[0034] In some embodiments, the sample is selected from the group consisting of a tissue sample, a frozen tissue sample, a biopsy specimen, a surgical specimen, a cytological specimen, whole blood, bone marrow, cerebral spinal fluid, peritoneal fluid, lymph fluid, serum, plasma, urine, stool, and nipple aspirate.

[0035] In some embodiments, the methylation states of at least 5 nucleic acid loci or at least 5 genes are determined. In some embodiments, the methylation states of at least 10 nucleic acid loci or at least 10 genes are determined. In some embodiments, the methylation states of at least 20 nucleic acid loci or at least 20 genes are determined. In some embodiments, the methylation states of at least 50 nucleic acid loci or at least 50 genes are determined. In some embodiments, the methylation states of at least 100 nucleic acid loci or at least 100 genes are determined.

[0036] In some embodiments, the subject is a mammal. In some embodiments, the subject is a human.

[0037] Some embodiments of the methods, compositions and kits provided herein include a method for diagnosing rheumatoid arthritis or osteoarthritis, determining a rheumatoid arthritis or osteoarthritis prognosis, or determining or predicting a response to treatment for rheumatoid arthritis or osteoarthritis in a subject comprising accessing first data representing the methylation status of nucleic acid loci or the methylation status of at least one gene which are differentially methylated in individuals with rheumatoid arthritis, osteoarthritis a rheumatoid arthritis or osteoarthritis prognosis, or a response to treatment for rheumatoid arthritis or osteoarthritis wherein said data is stored on a non-transitory computer readable medium; instructing a computer to compare said first data to second data representing the methylation status of said nucleic acid loci or said at least one gene in a sample taken from said subject, wherein said data representing the methylation status of said nucleic acid loci or said at least one gene in a sample taken from said subject is stored on a non-transitory computer readable medium; and instructing said computer to provide an output indicating whether said comparison indicates that said subject has rheumatoid arthritis or osteoarthritis, has a positive or negative prognosis for rheumatoid arthritis or osteoarthritis prognosis, or indicates a positive or negative prediction for the subject's response to treatment for rheumatoid arthritis or osteoarthritis.

[0038] Some embodiments also include diagnosing rheumatoid arthritis or osteoarthritis, determining a rheumatoid arthritis or osteoarthritis prognosis, or determining or predicting a response to treatment for rheumatoid arthritis or osteoarthritis in said subject if said first data representing the methylation status of said nucleic acid loci or said at least one gene in a sample taken from said subject are significantly similar to said second data representing nucleic acid loci or genes which are differentially methylated in individuals with rheumatoid arthritis, osteoarthritis a rheumatoid arthritis or osteoarthritis prognosis, or a response to treatment for rheumatoid arthritis or osteoarthritis.

[0039] Some embodiments of the methods, compositions and kits provided herein include a method for diagnosing rheumatoid arthritis or osteoarthritis, determining a rheumatoid arthritis or osteoarthritis prognosis, or determining or predicting a response to treatment for rheumatoid arthritis or osteoarthritis in a subject comprising: determining the methylation states of at least 2 loci selected from the group consisting of SEQ ID NO.s 1-485512 in a sample obtained from the subject.

[0040] Some embodiments also include comparing the methylation states of the at least 2 loci in the sample with the methylation states of the loci in normal tissue, tissue from a subject with a known prognosis, or tissue from a subject with a known response to treatment.

[0041] In some embodiments, an increase or decrease in the extent of methylation of at least 2 loci compared to the extent of methylation of the loci in normal tissue, tissue from a subject with a known prognosis, or tissue from a subject with a known response to treatment is indicative of the presence or absence of rheumatoid arthritis, prognosis, or response to treatment for the subject.

[0042] In some embodiments, the methylation states of said at least 2 loci are determined in fibroblasts from said subject. In some embodiments, the methylation states of said at least 2 loci are determined in synoviocytes from said subject. In some embodiments, the methylation states of said at least 2 loci are determined in fibroblast-like synoviocytes from said subject. In some embodiments, the methylations state of said at least 2 loci are determined in rheumatoid arthritis fibroblast-like synoviocytes from said subject. In some embodiments, the methylation states of said at least 2 loci are determined in osteoarthritis fibroblast-like synoviocytes from said subject.

[0043] In some embodiments, the methylation states of said at least 2 loci are determined in macrophage from said subject.

[0044] In some embodiments, the methylation states of said at least 2 loci are determined in peripheral blood cells from said subject. In some embodiments, the peripheral blood cell is selected from the group consisting of white blood cell, neutrophil, eosinophil, basophil, lymphocyte, B cell, plasma cell, T cell, natural killer cell, monocyte, and dendritic cell.

[0045] In some embodiments, the sample is selected from the group consisting of a tissue sample, a frozen tissue sample, a biopsy specimen, a surgical specimen, a cytological specimen, whole blood, bone marrow, cerebral spinal fluid, peritoneal fluid, lymph fluid, serum, plasma, urine, stool, and nipple aspirate.

[0046] In some embodiments, the at least 2 loci are selected from the group consisting of the loci listed in TABLE 6. In some embodiments, the at least 2 loci are selected from the group consisting of the loci listed in TABLE 7. In some embodiments, the at least 2 loci are selected from the group consisting of the loci listed in TABLE 8. In some embodiments, the methylation states of at least 5 loci selected from the group consisting of the loci listed in TABLE 6, TABLE 7, and TABLE 8 are determined. In some embodiments, the methylation states of at least 10 loci selected from the group consisting of the loci listed in TABLE 6, TABLE 7, and TABLE 8 are determined. In some embodiments, the methylation states of at least 20 loci selected from the group consisting of the loci listed in TABLE 6, TABLE 7, and TABLE 8 are determined. In some embodiments, the methylation states of at least 50 loci selected from the group consisting of the loci listed in TABLE 6, TABLE 7, and TABLE 8 are determined. In some embodiments, the methylation states of at least 100 loci selected from the group consisting of the loci listed in TABLE 6, TABLE 7, and TABLE 8 are determined.

[0047] In some embodiments, the subject is a mammal. In some embodiments, the subject is a human.

[0048] Some embodiments of the methods, compositions and kits provided herein include a method for identifying a therapeutic agent for treating rheumatoid arthritis or osteoarthritis comprising contacting a cell with a test agent; and determining the methylation states in the contacted cell of at least 2 loci which have differential extents of methylation in individuals with rheumatoid arthritis or osteoarthritis relative to individuals without rheumatoid arthritis or osteoarthritis.

[0049] Some embodiments also include comparing the methylation states of the at least 2 loci in the contacted cell with the methylation states of the loci in a cell which was not contacted with the test agent; and selecting a test agent that increases or decreases the extent of methylation of the at least 2 loci in the cell contacted with the test agent compared to the extent of methylation of the at least 2 loci in a cell which was not contacted with the test agent such that the extent of methylation of the at least 2 loci in the cell contacted with the test agent is a methylation states associated with the absence of rheumatoid arthritis or osteoarthritis or with a reduction in the symptoms associated with rheumatoid arthritis osteoarthritis.

[0050] In some embodiments, the at least 2 loci are selected from the group consisting of SEQ ID NO.s 1-485512. In some embodiments, the at least 2 loci are selected from the group consisting of the loci listed in TABLE 6. In some embodiments, the at least 2 loci are selected from the group consisting of the loci listed in TABLE 7. In some embodiments, the at least 2 loci are selected from the group consisting of the loci listed in TABLE 8.

[0051] In some embodiments, the methylation states of at least 5 loci selected from the group consisting of the loci listed in TABLE 6, TABLE 7, and TABLE 8 are determined. In some embodiments, the methylation states of at least 10 loci selected from the group consisting of the loci listed in TABLE 6, TABLE 7, and TABLE 8 are determined. In some embodiments, the methylation states of at least 20 loci selected from the group consisting of the loci listed in TABLE 6, TABLE 7, and TABLE 8 are determined. In some embodiments, the methylation states of at least 50 loci selected from the group consisting of the loci listed in TABLE 6, TABLE 7, and TABLE 8 are determined. In some embodiments, the methylation states of at least 100 loci selected from the group consisting of the loci listed in TABLE 6, TABLE 7, and TABLE 8 are determined.

[0052] In some embodiments, the cell comprises a fibroblast. In some embodiments, the cell comprises a synoviocyte. In some embodiments, the cell comprises a fibroblast-like synoviocyte. In some embodiments, the cell comprises a rheumatoid arthritis fibroblast-like synoviocyte. In some embodiments, the cell comprises an osteoarthritis fibroblast-like synoviocyte.

[0053] In some embodiments, the cell comprises a macrophage.

[0054] In some embodiments, the cell comprises a peripheral blood cell. In some embodiments, the peripheral blood cell is selected from the group consisting of white blood cell, neutrophil, eosinophil, basophil, lymphocyte, B cell, plasma cell, T cell, natural killer cell, monocyte, and dendritic cell.

[0055] In some embodiments, the cell is mammalian. In some embodiments, the cell is a human.

[0056] In some embodiments, a sample comprises the cell, the sample selected from the group consisting of a tissue sample, a frozen tissue sample, a biopsy specimen, a surgical specimen, a cytological specimen, whole blood, bone marrow, cerebral spinal fluid, peritoneal fluid, lymph fluid, serum, plasma, urine, stool, and nipple aspirate.

[0057] Some embodiments of the methods, compositions and kits provided herein include a kit for diagnosing rheumatoid arthritis or osteoarthritis, determining a rheumatoid arthritis or osteoarthritis prognosis, or determining or predicting a response to treatment for rheumatoid arthritis or osteoarthritis in a subject comprising: a reagent for determining the methylation states of at least 2 loci which have differential extents of methylation in individuals with rheumatoid arthritis or osteoarthritis relative to individuals without rheumatoid arthritis or osteoarthritis.

[0058] In some embodiments, the at least 2 loci are selected from the group consisting of SEQ ID NO.s 1-485512. In some embodiments, the at least 2 loci are selected from the group consisting of the loci listed in TABLE 6, TABLE 7, and TABLE 8.

[0059] Some embodiments also include at least one polynucleotide primer comprising a sequence hybridizing to at least a portion of the at least 2 loci selected from the group consisting of the loci listed in TABLE 6, TABLE 7, and TABLE 8.

[0060] In some embodiments, the reagent comprises a restriction enzyme.

[0061] In some embodiments, the at least 2 loci are selected from the group consisting of the loci listed in TABLE 6. In some embodiments, the at least 2 loci are selected from the group consisting of the loci listed in TABLE 7. In some embodiments, the at least 2 loci are selected from the group consisting of the loci listed in TABLE 7. In some embodiments, the reagent can determine the methylation states of at least 5 loci selected from the group consisting of SEQ ID NO.s 1-485512. In some embodiments, the reagent can determine the methylation states of at least 5 loci selected from the group consisting of the loci listed in TABLE 6, TABLE 7, and TABLE 8. In some embodiments, the reagent can determine the methylation states of at least 10 loci selected from the group consisting of the loci listed in TABLE 6, TABLE 7, and TABLE 8. In some embodiments, the reagent can determine the methylation states of at least 20 loci selected from the group consisting of the loci listed in TABLE 6, TABLE 7, and TABLE 8. In some embodiments, the reagent can determine the methylation states of at least 50 loci selected from the group consisting of the loci listed in TABLE 6, TABLE 7, and TABLE 8. In some embodiments, the reagent can determine the methylation states of at least 100 loci selected from the group consisting of the loci listed in TABLE 6, TABLE 7, and TABLE 8.

[0062] Some embodiments of the methods, compositions and kits provided herein include a method for determining whether an individual suffers from rheumatoid arthritis or osteoarthritis comprising determining the methylation states of at least 2 loci which have differential extents of methylation in individuals with rheumatoid arthritis or osteoarthritis relative to individuals without rheumatoid arthritis or osteoarthritis, wherein the individual is diagnosed with rheumatoid arthritis if the methylation state of said at least 2 loci are associated with rheumatoid arthritis and the individual is diagnosed with osteoarthritis if the methylation states of said at least 2 loci are associated with osteoarthritis.

[0063] In some embodiments, the at least 2 loci are selected from the group consisting of SEQ ID NO.s 1-485512. In some embodiments, the at least 2 loci are selected from the group consisting of the loci listed in TABLE 6. In some embodiments, the at least 2 loci are selected from the group consisting of the loci listed in TABLE 7. In some embodiments, the at least 2 loci are selected from the group consisting of the loci listed in TABLE 8.

[0064] In some embodiments, the methylation states of at least 5 loci selected from the group consisting of the loci listed in TABLE 6, TABLE 7, and TABLE 8 are determined. In some embodiments, the methylation states of at least 10 loci selected from the group consisting of the loci listed in TABLE 6, TABLE 7, and TABLE 8 are determined. In some embodiments, the methylation states of at least 20 loci selected from the group consisting of the loci listed in TABLE 6, TABLE 7, and TABLE 8 are determined. In some embodiments, the methylation states of at least 50 loci selected from the group consisting of the loci listed in TABLE 6, TABLE 7, and TABLE 8 are determined. In some embodiments, the methylation states of at least 100 loci selected from the group consisting of the loci listed in TABLE 6, TABLE 7, and TABLE 8 are determined.

[0065] Some embodiments of the methods, compositions and kits provided herein include a method for diagnosing rheumatoid arthritis or osteoarthritis, determining a rheumatoid arthritis or osteoarthritis prognosis, or determining or predicting a response to treatment for rheumatoid arthritis or osteoarthritis in a subject comprising: determining the methylation states of at least 2 genes selected from the group consisting of the genes listed in TABLE 3 in a sample obtained from the subject.

[0066] Some embodiments also include comparing the methylation states of the at least 2 genes in the sample with the methylation states of the genes in normal tissue, tissue from a subject with a known prognosis, or tissue from a subject with a known response to treatment.

[0067] In some embodiments, an increase or decrease in the extent of methylation of at least 2 genes compared to the extent of methylation of the of the genes in normal tissue, tissue from a subject with a known prognosis, or tissue from a subject with a known response to treatment is indicative of the presence or absence of rheumatoid arthritis, prognosis, or response to treatment for the subject.

[0068] In some embodiments, the methylation states of said at least 2 loci are determined in fibroblasts from said subject. In some embodiments, the methylation states of said at least 2 loci are determined in synoviocytes from said subject. In some embodiments, the methylation states of said at least 2 loci are determined in fibroblast-like synoviocytes from said subject. In some embodiments, the methylation states of said at least 2 loci are determined in rheumatoid arthritis fibroblast-like synoviocytes from said subject. In some embodiments, the methylation states of said at least 2 loci are determined in osteoarthritis fibroblast-like synoviocytes from said subject.

[0069] In some embodiments, the methylation states of said at least 2 loci are determined in macrophage from said subject.

[0070] In some embodiments, the methylation states of said at least 2 loci are determined in peripheral blood cells from said subject. In some embodiments, the peripheral blood cell is selected from the group consisting of white blood cell, neutrophil, eosinophil, basophil, lymphocyte, B cell, plasma cell, T cell, natural killer cell, monocyte, and dendritic cell.

[0071] In some embodiments, the sample is selected from the group consisting of a tissue sample, a frozen tissue sample, a biopsy specimen, a surgical specimen, a cytological specimen, whole blood, bone marrow, cerebral spinal fluid, peritoneal fluid, lymph fluid, serum, plasma, urine, stool, and nipple aspirate.

[0072] In some embodiments, the methylation states of at least 5 genes selected from the group consisting of the genes listed in TABLE 3 are determined. In some embodiments, the methylation states of at least 10 genes selected from the group consisting of the genes listed in TABLE 3 are determined. In some embodiments, the methylation states of at least 20 genes selected from the group consisting of the genes listed in TABLE 3 are determined. In some embodiments, the methylation states of at least 50 genes selected from the group consisting of the genes listed in TABLE 3 are determined.

[0073] In some embodiments, the subject is a mammal. In some embodiments, the subject is a human.

[0074] Some embodiments of the methods, compositions and kits provided herein include a method for identifying a therapeutic agent for treating rheumatoid arthritis or osteoarthritis comprising contacting a cell with a test agent; and determining the methylation states of at least 2 genes selected from the group consisting of the genes listed in TABLE 3 in the contacted cell.

[0075] Some embodiments also include comparing the methylation states of the at least 2 genes in the contacted cell with the methylation states of the genes in a cell which was not contacted with the test agent; and selecting a test agent that increases or decreases the extent of methylation of the at least 2 genes in the cell contacted with the test agent compared to the extent of methylation of the at least 2 genes in a cell which was not contacted with the test agent such that the extent of methylation of the at least 2 genes in the cell contacted with the test agent is a methylation states associated with the absence of rheumatoid arthritis or osteoarthritis or with a reduction in the symptoms associated with rheumatoid arthritis or osteoarthritis.

[0076] In some embodiments, the methylation states of at least 5 genes selected from the group consisting of the genes listed in TABLE 3 are determined. In some embodiments, the methylation states of at least 10 genes selected from the group consisting of the genes listed in TABLE 3 are determined. In some embodiments, the methylation states of at least 20 genes selected from the group consisting of the genes listed in TABLE 3 are determined. In some embodiments, the methylation states of at least 50 genes selected from the group consisting of the genes listed in TABLE 3 are determined.

[0077] In some embodiments, the cell comprises a fibroblast. In some embodiments, the cell comprises a synoviocyte. In some embodiments, the cell comprises a fibroblast-like synoviocyte. In some embodiments, the cell comprises a rheumatoid arthritis fibroblast-like synoviocyte. In some embodiments, the cell comprises an osteoarthritis fibroblast-like synoviocyte.

[0078] In some embodiments, the cell comprises a macrophage.

[0079] In some embodiments, the cell comprises a peripheral blood cell. In some embodiments, the peripheral blood cell is selected from the group consisting of white blood cell, neutrophil, eosinophil, basophil, lymphocyte, B cell, plasma cell, T cell, natural killer cell, monocyte, and dendritic cell.

[0080] In some embodiments, the cell is mammalian. In some embodiments, the cell is a human.

[0081] In some embodiments, a sample comprises the cell, the sample selected from the group consisting of a tissue sample, a frozen tissue sample, a biopsy specimen, a surgical specimen, a cytological specimen, whole blood, bone marrow, cerebral spinal fluid, peritoneal fluid, lymph fluid, serum, plasma, urine, stool, and nipple aspirate.

[0082] Some embodiments of the methods, compositions and kits provided herein include a kit for diagnosing rheumatoid arthritis or osteoarthritis, determining a rheumatoid arthritis or osteoarthritis prognosis, or determining or predicting a response to treatment for rheumatoid arthritis or osteoarthritis in a subject comprising: a reagent for determining the methylation states of at least 2 genes selected from the group consisting of the genes listed in TABLE 3.

[0083] Some embodiments also include at least one polynucleotide primer comprising a sequence hybridizing to at least a portion of the at least 2 genes selected from the group consisting of the genes listed in TABLE 3.

[0084] In some embodiments, the reagent comprises a restriction enzyme.

[0085] In some embodiments, the reagent can determine the methylation states of at least 5 genes selected from the group consisting of the genes listed in TABLE 3. In some embodiments, the reagent can determine the methylation states of at least 10 genes selected from the group consisting of the genes listed in TABLE 3. In some embodiments, the reagent can determine the methylation states of at least 20 genes selected from the group consisting of the genes listed in TABLE 3. In some embodiments, the reagent can determine the methylation states of at least 50 genes selected from the group consisting of the genes listed in TABLE 3.

[0086] Some embodiments of the methods, compositions and kits provided herein include a method for identifying a therapeutic agent for treating rheumatoid arthritis or osteoarthritis comprising contacting a cell with a test agent; and determining the methylation states of at least 2 genes selected from a gene encoding a protein that acts in a pathway that includes a protein encoded by a gene that is differentially methylated in a rheumatoid arthritis cell or that is differentially methylated in a osteoarthritis cell compared to a normal cell.

[0087] Some embodiments also include comparing the methylation states of the at least 2 genes in the contacted cell with the methylation states of the genes in a cell which was not contacted with the test agent; and selecting a test agent that increases or decreases the extent of methylation of the at least 2 genes in the cell contacted with the test agent compared to the extent of methylation of the at least 2 genes in a cell which was not contacted with the test agent such that the extent of methylation of the at least 2 genes in the cell contacted with the test agent are methylation states associated with the absence of rheumatoid arthritis or methylation states associated with the absence of osteoarthritis with a reduction in the symptoms associated with rheumatoid arthritis.

[0088] In some embodiments, the pathway is selected from the group consisting of the pathways listed in TABLE 5.

[0089] In some embodiments, the methylation states of at least 5 genes selected from genes encoding proteins that act in a pathway that includes a protein encoded by a gene that is differentially methylated in a rheumatoid arthritis cell compared to a normal cell or that is differentially methylated in a osteoarthritis cell compared to a normal cell. In some embodiments, the methylation states of at least 10 genes selected from genes encoding proteins that act in a pathway that includes a protein encoded by a gene that is differentially methylated in a rheumatoid arthritis cell compared to a normal cell or that is differentially methylated in a osteoarthritis cell compared to a normal cell.

[0090] In some embodiments, the cell comprises a fibroblast. In some embodiments, the cell comprises a synoviocyte. In some embodiments, the cell comprises a fibroblast-like synoviocyte. In some embodiments, the cell comprises a rheumatoid arthritis fibroblast-like synoviocyte. In some embodiments, the cell comprises an osteoarthritis fibroblast-like synoviocyte.

[0091] In some embodiments, the cell comprises a macrophage.

[0092] In some embodiments, the cell comprises a peripheral blood cell. In some embodiments, the peripheral blood cell is selected from the group consisting of white blood cell, neutrophil, eosinophil, basophil, lymphocyte, B cell, plasma cell, T cell, natural killer cell, monocyte, and dendritic cell.

[0093] In some embodiments, the cell is mammalian. In some embodiments, the cell is a human.

[0094] In some embodiments, a sample comprises the cell, the sample selected from the group consisting of a tissue sample, a frozen tissue sample, a biopsy specimen, a surgical specimen, a cytological specimen, whole blood, bone marrow, cerebral spinal fluid, peritoneal fluid, lymph fluid, serum, plasma, urine, stool, and nipple aspirate.

[0095] Some embodiments of the methods, compositions and kits provided herein include a method for identifying therapeutic agents for treating rheumatoid arthritis or osteoarthritis comprising contacting a cell with a test agent; and determining the activity of a protein encoded by a gene differentially methylated in a rheumatoid arthritis cell or that is differentially methylated in an osteoarthritis cell compared to a normal cell.

[0096] Some embodiments also include comparing the activity of the protein in the contacted cell with the activity of the protein in a cell which was not contacted with the test agent; and selecting a test agent that increases or decreases the activity of protein in the cell contacted with the test agent compared to the activity of the protein in a cell which was not contacted with the test agent such that the activity of the protein in the cell contacted with the test agent is an activity associated with the absence of rheumatoid arthritis or an activity associated with the absence of osteoarthritis with a reduction in the symptoms associated with rheumatoid arthritis.

[0097] In some embodiments, the protein is encoded by a gene selected from the group consisting of the genes listed in TABLE 3.

[0098] In some embodiments, the cell comprises a fibroblast. In some embodiments, the cell comprises a synoviocyte. In some embodiments, the cell comprises a fibroblast-like synoviocyte. In some embodiments, the cell comprises a rheumatoid arthritis fibroblast-like synoviocyte. In some embodiments, the cell comprises an osteoarthritis fibroblast-like synoviocyte.

[0099] In some embodiments, the cell comprises a macrophage.

[0100] In some embodiments, the cell comprises a peripheral blood cell. In some embodiments, the peripheral blood cell is selected from the group consisting of white blood cell, including neutrophil, eosinophil, basophil, lymphocyte, B cell, plasma cell, T cell, natural killer cell, monocyte, and dendritic cell.

[0101] In some embodiments, the cell is mammalian. In some embodiments, the cell is a human.

[0102] Some embodiments of the methods, compositions and kits provided herein include a method of determining the methylation status of a plurality of human nucleic acid loci comprising contacting a nucleic acid sample from a human subject with a reagent capable of providing an indication of the methylation status of said loci, wherein said loci comprise at least 5 which have differential extents of methylation in individuals with rheumatoid arthritis or osteoarthritis relative to individuals without rheumatoid arthritis or osteoarthritis.

[0103] In some embodiments, said reagent is a restriction enzyme.

[0104] In some embodiments, said reagent is a primer.

[0105] In some embodiments, said reagent is a probe.

[0106] In some embodiments, said reagent comprises sodium bisulfate.

[0107] In some embodiments, the at least 5 loci are selected from the group consisting of SEQ ID NO.s 1-485512. In some embodiments, the at least 5 loci are selected from the group consisting of the loci listed in TABLE 6, TABLE 7, and TABLE 8.

[0108] Some embodiments of the methods, compositions and kits provided herein include a nucleic acid array consisting essentially of nucleic acids useful for diagnosing rheumatoid arthritis or osteoarthritis, determining a prognosis of rheumatoid arthritis or osteoarthritis, or determining or predicting a response to treatment of a subject being evaluated for or suffering from rheumatoid arthritis or osteoarthritis, wherein said nucleic acids comprise at least 5 loci which have differential extents of methylation in individuals with rheumatoid arthritis or osteoarthritis relative to individuals without rheumatoid arthritis or osteoarthritis.

[0109] In some embodiments, said nucleic acids comprise at least 5 loci selected from the group consisting of SEQ ID NO.s 1-485512. In some embodiments, said nucleic acids comprise at least 5 loci selected from the group consisting of the loci listed in TABLE 6, TABLE 7, and TABLE 8. In some embodiments, said nucleic acids comprise at least 10 loci selected from the group consisting of the loci listed in TABLE 6, TABLE 7, and TABLE 8. In some embodiments, said nucleic acids comprise at least 20 loci selected from the group consisting of the loci listed in TABLE 6, TABLE 7, and TABLE 8. In some embodiments, said nucleic acids comprise at least 50 loci selected from the group consisting of the loci listed in TABLE 6, TABLE 7, and TABLE 8.

[0110] Some embodiments of the methods, compositions and kits provided herein include a method of ameliorating rheumatoid arthritis or osteoarthritis comprising evaluating the methylation status of a plurality of human nucleic acid loci in a nucleic acid sample from a human subject having symptoms of rheumatoid arthritis or osteoarthritis, wherein said loci comprise at least 5 loci which have differential extents of methylation in individuals with rheumatoid arthritis or osteoarthritis relative to individuals without rheumatoid arthritis or osteoarthritis; and administering a treatment for rheumatoid arthritis or osteoarthritis if said at least 5 loci have a methylation status indicative of rheumatoid arthritis or osteoarthritis.

[0111] In some embodiments, said nucleic acids comprise at least 5 loci selected from the group consisting of SEQ ID NO.s 1-485512. In some embodiments, said nucleic acids comprise at least 5 loci selected from the group consisting of the loci listed in TABLE 6, TABLE 7, and TABLE 8. In some embodiments, said nucleic acids comprise at least 10 loci selected from the group consisting of the loci listed in TABLE 6, TABLE 7, and TABLE 8. In some embodiments, said nucleic acids comprise at least 20 loci selected from the group consisting of the loci listed in TABLE 6, TABLE 7, and TABLE 8. In some embodiments, said nucleic acids comprise at least 50 loci selected from the group consisting of the loci listed in TABLE 6, TABLE 7, and TABLE 8.

[0112] Some embodiments of the methods, compositions and kits provided herein include a mixture comprising a plurality of human nucleic acid loci from a human subject having symptoms indicative of potential rheumatoid arthritis or osteoarthritis and a reagent capable of providing an indication of the methylation status of said loci, wherein said loci comprise at least 5 loci which have differential extents of methylation in individuals with rheumatoid arthritis or osteoarthritis relative to individuals without rheumatoid arthritis or osteoarthritis.

[0113] In some embodiments, said nucleic acids comprise at least 5 loci selected from the group consisting of SEQ ID NO.s 1-485512. In some embodiments, said nucleic acids comprise at least 5 loci selected from the group consisting of the loci listed in TABLE 6, TABLE 7, and TABLE 8. In some embodiments, said nucleic acids comprise at least 10 loci selected from the group consisting of the loci listed in TABLE 6, TABLE 7, and TABLE 8. In some embodiments, said nucleic acids comprise at least 20 loci selected from the group consisting of the loci listed in TABLE 6, TABLE 7, and TABLE 8. In some embodiments, said nucleic acids comprise at least 50 loci selected from the group consisting of the loci listed in TABLE 6, TABLE 7, and TABLE 8

### BRIEF DESCRIPTION OF THE DRAWINGS

[0114] FIG. 1 depicts DNA methyltranserases (DNMTs) function. DNMTs transfer methyl groups from SAM to deoxycytodine. DNMT function can be affected by changes in methyl donors in the diet or by DNMT inhibitors, like 5-aza-2′-deoxycytidine (5-azaC). The analog 5-azacytidine is also incorporated into RNA and can interfere with many other cellular processes.

[0115] FIG. 2 depicts an ILLUMINA array analysis of DNA methylation in RA and OA FLS, and the hierarchical clustering and heatmap of differentially methylated loci. The methylation levels at the 1,859 significantly differentially methylated loci were used for hierarchical clustering. The clustering of the sample is shown by the dendrogram at the top and the clustering of the loci is shown by the dendrogram on the left. The methylation levels at the loci are shown in the heatmap.

[0116] FIG. 3 depicts hypomethylation of several genes in RA FLS basal expression compared to OA FLS. Gene expression was determined by PCR in 6 to 13 separate OA and RA FLS lines for 7 genes that were significantly hypomethylated (CHI3L1, COL1A1, MYEF2, ITG4A, SYNJ2, STK24, MAP3K5). As a group, expression of hypomethylated genes in RA was significantly greater than OA (P<0.01); expression of genes that were normally methylated in RA was similar to OA, e.g., AXIN, IKKE, TBK1, NANOG, POU5F1, MAP2K6, IRF3.

[0117] FIG. 4 depicts an analysis of the focal adhesion pathway, with differentially methylated genes (ECM=extracellular matrix). Differentially methylated genes are present in key locations, most notably RTK, ITGA and ITGB.

[0118] FIG. 5 depicts a Cytoscape analysis to evaluate the networks affected by differential methylation and determine the most likely targets for subsequent analysis.

[0119] FIG. 6 depicts basal expression of DNMTs. DNMT expression was examined in resting cultured FLS. Synoviocytes were isolated from RA and OA synovium at the time of total joint replacement. 4^{th} through 6^{th} passage cells were evaluated by qPCR (graph shows relative expression units using the standard curve method).

[0120] FIG. 7 depicts decreased DNMT1 gene expression after IL-1 stimulation. FLS were stimulated with IL-1 for 24 hr and DNMT expression was determined by qPCR.

[0121] FIG. 8 depicts the decrease in DNMT function in FLS in response to IL-1. FLS were stimulated with 1 ng/ml of IL-1 for 14 days and extracts were assayed using the DNMT Activity/Inhibition Assay (Active Motif Co., Carlsbad, Calif.), which is an ELISA-based method that measures methylation of a CpG-enriched DNA substrate. A significant decline in total DNMT function (p<0.05) was observed.

### DETAILED DESCRIPTION

[0122] Abnormalities in DNA methylation have been implicated in autoimmunity. The mechanism of the aggressive rheumatoid phenotype is uncertain, although several studies implicate abnormal tumor suppressor gene structure and function. Differential DNA methylation might lead to altered gene expression, synoviocyte function, and peripheral blood cell function. Global DNA methylation patterns in RA FLS were evaluated and compared to FLS derived from individuals with non-inflammatory joint disease. The data show that the RA FLS display a DNA methylome signature that distinguishes them from osteoarthritis (OA) FLS, with differentially methylated genes that are critical to cell trafficking, inflammation, and cell-extracellular matrix interactions. This signature could define risk factors for developing RA or represent imprinting due to the synovial milieu. A relationship exists between the immunopathologic status of the synovial milieu and peripheral blood mononuclear cell immune function (See e.g., Malone, et al., J Clin Invest., 74(4):1173-1185, 1984; Firestein, G S. Etiology and pathogenesis of rheumatoid arthritis, In: Textbook of Rheumatology, G S Firestein, et al. eds., Elsevier, Philadelphia, 8th edition, 2009, pp. 1035-86). Peripheral blood mononuclear cells in patients with rheumatoid arthritis demonstrate global methylation abnormalities that parallel those found in cultured fibroblast-like synoviocytes, confirming that peripheral blood cells reflect synovial biology and synoviocyte function. Methylation of the IL-10 promoter has been studied in patients with RA (Fu L. H. et al., Methylation status of the IL-10 gene promoter in the peripheral blood mononuclear cells of rheumatoid arthritis patients. Yi Chuan. 2007 November; 29(11):1357-61). However, no previous data has identified patterns of specific combinations of loci or a distinctive methylome signature that can be used to diagnose RA or provide information on the potential response to therapy (Liu C C, et al. Global DNA methylation, DNMT1, and MBD2 in patients with rheumatoid arthritis. Immunol Lett. 2011; 135:96-9; Karouzakis E, et al. DNA hypomethylation in rheumatoid arthritis synovial fibroblasts. Arthritis Rheum. 2009; 60:3613-22).

[0123] Data implicating low DNA methylation in FLS is especially intriguing in the context of RA, where pathogenic FLS exhibit many features of partially transformed cells. DNMT regulation and the methylation status of FLS were examined in view of the association of DNA hypomethylation and an aggressive phenotype in cancer. As shown in this application, differences in basal RA vs. OA DNMT expression previously described were not confirmed. This may have been because conditions in the examples of this application were rigorously controlled by discontinuing methotrexate treatment up to a month before surgery. Furthermore, it was found that IL-1 significantly decreased DNMT1, DNMT3a, and DNMT3b gene expression within hours. The change in DNMT expression was accompanied by decreased DNMT function in nuclear extracts and global hypomethylation. More striking, as described in this application, an ILLUMINA methylation array study of RA and OA cells showed 100% concordance between DNA methylation patterns and the presence of RA, indicating that RA cells are imprinted with a distinctive methylation pattern that contributes to the pathogenesis of disease.

[0124] The unique pattern of DNA methylation in RA or OA, either taken in toto or when considered based on individual loci, genes, or pathways with differential methylation, has several implications. The pattern can be used for several applications, including: diagnosis of RA or OA; assessment of disease activity and prognosis of RA or OA; identification of novel therapeutic targets useful for the development of novel therapies for RA or OA; and the development of novel therapies that increase or decrease DNA methylation and alter the pattern, such as through DNMT inhibitors or activators.

[0125] Embodiments of the present invention include methods, compositions and kits for evaluating a diagnosis, prognosis, or response to treatment of a subject with a disorder such as rheumatoid arthritis or osteoarthritis. Some embodiments include identifying a therapeutic agent for treating a disorder such as rheumatoid arthritis or osteoarthritis.

[0126] Like peripheral blood mononuclear cells, rheumatoid FLS exhibit an abnormal phenotype that contributes to disease pathogenesis (Firestein, G S. Invasive fibroblast-like synoviocytes in rheumatoid arthritis: Passive responders or transformed aggressors? Arthritis Rheum 39:1781-1790, 1996). Functional studies suggest that RA FLS are imprinted in situ and maintain these features after many passages in tissue culture. For example, RA FLS, unlike OA or normal synoviocytes, adhere to and invade cartilage explants in SCID mice (Müller-Ladner U et al. Synovial fibroblasts of patients with rheumatoid arthritis attach to and invade normal human cartilage when engrafted into SCID mice. Am J. Pathol. 1996 November; 149(5):1607-15). RA FLS can grow under anchorage-independent conditions and are less susceptible to contact inhibition. Apoptosis of RA synoviocytes in situ appears to be defective, which contributes to intimal lining hyperplasia (Baier A et al. Apoptosis in rheumatoid arthritis. Curr Opin Rheumatol. 2003 May; 15(3):274-9). Data in a SCID mouse model show that RA synoviocytes can migrate from one site to another, thereby serving as a mechanism to spread the RA phenotype and cartilage damage to distant joints (Lefèvre S et al. Synovial fibroblasts spread rheumatoid arthritis to unaffected joints. Nat. Med. 2009 December; 15(12):1414-20). Despite these findings, RA FLS are not truly transformed, as they senesce in culture after 10 to 15 passages.

[0127] Several mechanisms have been implicated in the rheumatoid phenotype. For instance, resistance to apoptosis can be due, in part, to defective expression of Phosphatase and tensin homolog (PTEN) expression, high levels of sentrin, or preferential shunting of stressed cells to DNA repair rather than programmed cell death (Pap T et al. Activation of synovial fibroblasts in rheumatoid arthritis: lack of Expression of the tumour suppressor PTEN at sites of invasive growth and destruction. Arthritis Res. 2000; 2(1):59-64; Franz J K et al. Expression of sentrin, a novel antiapoptotic molecule, at sites of synovial invasion in rheumatoid arthritis. Arthritis Rheum. 2000 March; 43(3):599-607; and You X et al. PUMA-mediated apoptosis in fibroblast-like synoviocytes does not require p53. Arthritis Res Ther. 2006; 8(6):R157). Somatic mutations of regulatory genes have been identified in cultured FLS, including the p53 tumor suppressor gene (Firestein G S et al. Somatic mutations in the p53 tumor suppressor gene in rheumatoid arthritis synovium. Proc Natl Acad Sci USA, 94: 10895-10900, 1997; Igarashi H et al. TP53 mutations coincide with the ectopic expression of activation-induced cytidine deaminase in the fibroblast-like synoviocytes derived from a fraction of patients with rheumatoid arthritis. Clin Exp Immunol. 2010 Jul. 1; 161(1):71-80; Inazuka M et al. Analysis of p53 tumour suppressor gene somatic mutations in rheumatoid arthritis synovium. Rheumatology (Oxford). 2000 March; 39(3):262-6; and Rème T et al. Mutations of the p53 tumour suppressor gene in erosive rheumatoid synovial tissue. Clin Exp Immunol. 1998 February; 111(2):353-8). Similar somatic mutations have also been described in peripheral blood mononuclear cells and synovial cells, confirming that these cell populations share many structural DNA characteristics that are either caused by RA or a result of the toxic synovial microenvironment (Cannons J L, et al. HPRT-mutant T cells in the peripheral blood and synovial tissue of patients with rheumatoid arthritis. Arthritis Rheum. 1998; 41:1772-82).

[0128] The abnormal cells are more invasive and produce increased amounts of cytokines and metalloproteinases. Microdissection of rheumatoid synovium shows islands of mutant cells residing in the intimal lining that produce prodigious amount of IL-6 (Yamanishi Y et al. p53 regulates apoptosis, synovitis and joint destruction in collagen-induced arthritis. Amer J Pathol, 160:123-30, 2002). Microsatellite instability has also been identified in RA synovium, in part due to decreased DNA repair function (Lee S—H et al. Microsatellite instability and suppressed DNA repair enzyme expression in rheumatoid arthritis. J Immunol, 170:2214-20, 2003). Somatic mutations in several other genes, including mitochondrial DNA and structural proteins like vimentin, have also been reported (Bang H et al. Mutation and citrullination modifies vimentin to a novel autoantigen for rheumatoid arthritis. Arthritis Rheum. 2007 August; 56(8):2503-11; Da Sylva T R et al. Somatic mutations in the mitochondria of rheumatoid arthritis synoviocytes. Arthritis Res Ther. 2005; 7(4):R844-51). Most of these and other aggressive features appear to be result of imprinting by rheumatoid synovial environment. Thus, they serve as amplifying mechanisms that alters the natural history of disease and enhance extracellular matrix destruction and cytokine production, leading to a signature in the systemic circulation due to cellular trafficking that can be detected in peripheral blood cells, for example.

[0129] While the focus on gene sequences, mutations, and aggressive behavior has provided useful information, other mechanisms can change cell phenotype. Epigenetics, for instance, can profoundly influence cell activation and gene expression and include DNA methylation, histone modification, and microRNAs. Histone acetylation by histone acetyltransferases (HATs) can remodel chromatin and enhance gene expression while deacetylation by histone deacetylases (HDACs) has the opposite effect. The histone deacetylase HDAC1 is overexpressed in RA FLS and HDAC inhibitors decrease synoviocyte proliferation in culture and joint damage in collagen-induced arthritis (Horiuchi M et al. Expression and function of histone deacetylases in rheumatoid arthritis synovial fibroblasts. J. Rheumatol. 2009 August; 36(8):1580-9; Saouaf S J et al. Deacetylase inhibition increases regulatory T cell function and decreases incidence and severity of collagen-induced arthritis. Exp Mol Pathol. 2009; 87(2):99-104). MicroRNAs are another epigenetic mechanism that contribute to DNA accessibility and chromatin remodeling by directly targeting individual genes. Expression of some individual microRNAs like microRNA-124a, are decreased in RA compared with OA cells, leading to enhanced chemokine expression (Nakamachi Y et al. MicroRNA-124a is a key regulator of proliferation and monocyte chemoattractant protein 1 secretion in fibroblast-like synoviocytes from patients with rheumatoid arthritis. Arthritis Rheum 60:1294, 2009; Stanczyk J et al. Altered expression of microRNA-203 in rheumatoid arthritis synovial fibroblasts and its role in fibroblast activation. Arthritis Rheum. 2011 February; 63 (2): 373-81).

[0130] DNA methylation is especially relevant to RA in terms of epigenetic mechanisms by virtue of its role in neoplasia as well as embryonic growth and development. Normal ontogeny relies on a carefully orchestrated sequence of DNA methylation to repress regulatory genes by methylating cytosine in CpG islands after they have completed their programmed role in early development (Christophersen N S and Helin K. Epigenetic control of embryonic stem cell fate. J Exp Med. Oct. 25, 2010; 207(11):2287-95). Methylation abnormalities have been associated with a variety of diseases, most notably cancer where hypomethylation and renewed expression of embryonic genes can allow cells to de-differentiate and escape from normal homeostatic controls (Kulis M and Esteller M. DNA methylation and cancer. Adv Genet. 2010; 70:27-56). Hypermethylation has also been associated with certain malignancies (Ren J et al. DNA hypermethylation as a chemotherapy target. Cell Signal. Feb. 21, 2011).

[0131] DNA methyltransferases (DNMTs) are responsible for initiating and maintaining CpG methylation in the human genome by converting cytosine to methylcytosine (FIG. 1) (Turek-Plewa J and Jagodzinski P P. The role of mammalian DNA methyltransferases in the regulation of gene expression. Cell Mol Biol Lett. 2005; 10(4):631-47). In mammalian cells, DNMT1, DNMT3a, and DNMT3b are the primary enzymes responsible for CpG methylation. DNMT3a and DNMT3b mainly regulate de novo methylation while DNMT1 maintains methylation, especially during cell division. Thus, DNMT1 plays a greater role perpetuating methylation patterns in proliferating cells. Decreased DNMT expression is associated with global hypomethylation as well as suppressed methylation of individual genes that participate in malignant transformation (Shukla V et al. BRCA1 affects global DNA methylation through regulation of DNMT1. Cell Res. 2010 November; 20(11):1201-15). DNMT expression and DNA methylation is not fixed but can be influenced by the environment and modify gene expression throughout life. The DNMTs can also maintain the methylation pattern during cell division, thereby allowing daughter cells to reflect the environmental influences of the parent cells.

[0132] DNMTs can also permit vertical transmission of parental DNA methylation (Ko Y G et al. Stage-by-stage change in DNA methylation status of Dnmt1 locus during mouse early development. J Biol. Chem. 2005 Mar. 11; 280(10):9627-34). This process allows relatively rapid responses to environmental stress that can persist over many cell divisions and even across generations (Rosenfeld. Animal models to study environmental epigenetics. Biol Reprod. 2010, 82:473-88; Kaati G et al. Transgenerational response to nutrition, early life circumstances and longevity. Eur J Hum Genet. 2007 July; 15(7):784-90). For instance, pregnant mice fed a diet rich in methyl donors like folate have increased levels of DNA methylation for at least 2 subsequent generations. Methylation of the Runx3 gene, in particular, is increased by the high methyl donor diet and leads to enhanced Th2 lymphocyte differentiation and increased airway reactivity in murine asthma (Hollingsworth J W et al. In utero supplementation with methyl donors enhances allergic airway disease in mice. J Clin Invest. 2008 October; 118(10):3462-9). Increased disease severity and airway remodeling can even be observed in F2 progeny and demonstrates how the environment can have multigenerational effects (Miller R L. Prenatal maternal diet affects asthma risk in offspring. J Clin Invest. 2008. 118:3265-8).

[0133] Abnormalities in DNA methylation have been implicated in autoimmunity. In addition to the murine model of airway disease, T cells can be affected by DNA methylation and influence Th2 differentiation (Gamper C J et al. Identification of DNA methyltransferase 3a as a T cell receptor-induced regulator of Th1 and Th2 differentiation. J Immunol. 2009 Aug. 15; 183(4):2267-76). The DNMT inhibitor 5′-aza-2′-deoxycytidine (5-azaC) (Fandy T E. Development of DNA methyltransferase inhibitors for the treatment of neoplastic diseases. Curr Med. Chem. 2009; 16(17):2075-85) affects expression of many T cell genes, including IFNα, IL-4, CD70, and LFA-1. 5-azaC enhances autoreactivity and induces robust responses to normally sub-threshold stimulation (Richardson B. DNA methylation and autoimmune disease. Clin Immunol. 2003 October; 109(1):72-9). T and B cell interactions are also affected, in part due to altered expression of surface receptors like CD70 (Oelke K et al. Overexpression of CD70 and overstimulation of IgG synthesis by lupus T cells and T cells treated with DNA methylation inhibitors. Arthritis Rheum. 2004 June; 50(6):1850-60). Decreased DNA methylation in Th1 and Th2 cell genomic DNA is also associated with production of anti-dsDNA antibodies in vivo (Richardson B et al. Murine models of lupus induced by hypomethylated T cells. Methods Mol Med. 2004; 102:285-94). Hypomethylation has been described in peripheral blood mononuclear cells in patients with RA (Liu C C et al. Global DNA methylation, DNMT1, and MBD2 in patients with rheumatoid arthritis. Immunol Lett. Mar. 30, 2011; 135(1-2):96-9. Epub Oct. 16, 2010). Despite some evidence of abnormal global methylation, there is no information on specific loci, patterns of loci, genes, or pathways that are abnormally methylated in rheumatoid arthritis.

[0134] Evidence of hypomethylation is not restricted to adaptive immunity in rheumatic disease. Like peripheral blood cells, global genomic hypomethylation was recently reported in RA cultured fibroblast-like synoviocytes (FLS) compared with Osteoarthritis (OA) FLS (Karouzakis E et al. DNA hypomethylation in rheumatoid arthritis synovial fibroblasts. Arthritis Rheum. 2009 December; 60(12):3613-22). This observation was associated with relatively low levels of DNMT1 gene expression that were unaffected by in vitro stimulation with IL-1 or TNF. DNMT3a or DNMT3b were not examined, and no studies were performed to determine whether DNMT function was abnormal. Culturing FLS in the presence of 5-azaC for 3 months to block DNA methylation increased expression of several genes implicated in RA. However, it is not certain which genes were hypomethylated and which ones were affected secondary to decreased methylation of other regulatory genes.

[0135] DNMT regulation and the methylation status of FLS were examined in view of the association of DNA hypomethylation and an aggressive phenotype in cancer. As shown in this application, it was found that IL-1 significantly decreased DNMT1, DNMT3a, and DNMT3b gene expression within hours. The change in DNMT expression was accompanied by decreased DNMT function in nuclear extracts and global hypomethylation. More striking, an ILLUMINA methylation array study of RA and OA cells showed 100% concordance between DNA methylation patterns and the presence of RA.

[0136] The unique patterns of DNA methylation in RA or OA have several implications. The patterns can be used for several applications, including: diagnosis of RA or OA; assessment of disease activity and prognosis of RA or OA; identification of novel therapeutic targets useful for the development of novel therapies for RA or OA; and the development of novel therapies that increase or decrease DNA methylation and alter the pattern, such as though DNMT inhibitors or activators.

### DEFINITIONS

[0137] As used herein, “methylation” refers to cytosine methylation at positions C5 or N4 of cytosine, the N6 position of adenine or other types of nucleic acid methylation. In particular embodiments, “methylation” refers to cytosine methylation at positions C5 of cytosine, namely, 5-methly cytosine. In vitro amplified DNA is unmethylated because in vitro DNA amplification methods do not retain the methylation pattern of the amplification template. However, “unmethylated DNA” or “methylated DNA” can also refer to amplified DNA whose original template was unmethylated or methylated, respectively.

[0138] A “methylation profile” refers to a set of data representing the methylation states of two or more loci within a molecule of DNA from e.g., the genome of an individual or cells or tissues from an individual. The profile can indicate the methylation state of every cytosine base in an individual, can comprise information regarding a subset of the base pairs (e.g., the methylation state of specific restriction enzyme recognition sequence) in a genome, or can comprise information regarding regional methylation density of each locus.

[0139] As used herein, “methylation status” refers to the presence, absence and/or quantity of methylation at a particular nucleotide, or nucleotides within a portion of DNA. Determination of the methylation status of a particular DNA sequence (e.g., a locus, a DNA biomarker or DNA region as described herein) can involve determination of the methylation state of every cytosine in the sequence or can involve determination of the methylation state of a subset of the cytosines (such as the methylation state of cytosines in one or more specific restriction enzyme recognition sequences) within the sequence, or can involve determining regional methylation density within the sequence without providing precise information of where in the sequence the methylation occurs. The methylation status can optionally be represented or indicated by a “methylation value.” A methylation value can be generated, for example, by quantifying the amount of intact DNA present following restriction digestion with a methylation dependent restriction enzyme. In this example, if a particular sequence in the DNA is quantified using quantitative PCR, an amount of template DNA approximately equal to a mock treated control indicates the sequence is not highly methylated whereas an amount of template substantially less than occurs in the mock treated sample indicates the presence of methylated DNA at the sequence. Accordingly, a value, i.e., a methylation value, for example from the above described example, represents the methylation status and can thus be used as a quantitative indicator of methylation status. This is of particular use when it is desirable to compare the methylation status of a sequence in a sample to a threshold value.

[0140] As used herein, “methylation-dependent restriction enzyme” refers to a restriction enzyme that cleaves or digests DNA at or in proximity to a methylated recognition sequence, but does not cleave DNA at or near the same sequence when the recognition sequence is not methylated. Methylation-dependent restriction enzymes include those that cut at a methylated recognition sequence (e.g., DpnI) and enzymes that cut at a sequence near but not at the recognition sequence (e.g., McrBC). For example, McrBC's recognition sequence is 5′ RmC(N40-3000) RmC 3′ where “R” is a purine and “mC” is a methylated cytosine and “N40-3000” indicates the distance between the two RmC half sites for which a restriction event has been observed. McrBC generally cuts close to one half-site or the other, but cleavage positions are typically distributed over several base pairs, approximately 30 base pairs from the methylated base. McrBC sometimes cuts 3′ of both half sites, sometimes 5′ of both half sites, and sometimes between the two sites. Exemplary methylation-dependent restriction enzymes include, e.g., McrBC (see, e.g., U.S. Pat. No. 5,405,760), McrA, MrrA, BisI, GlaI and DpnI. One of skill in the art will appreciate that any methylation-dependent restriction enzyme, including homologs and orthologs of the restriction enzymes described herein, is also suitable for use in the present embodiments.

[0141] As used herein, “methylation-sensitive restriction enzyme” refers to a restriction enzyme that cleaves DNA at or in proximity to an unmethylated recognition sequence but does not cleave at or in proximity to the same sequence when the recognition sequence is methylated. Exemplary methylation-sensitive restriction enzymes are described in, e.g., McClelland et al., Nucleic Acids Res. 22(17):3640-59 (1994) and http://rebase.neb.com. Suitable methylation-sensitive restriction enzymes that do not cleave DNA at or near their recognition sequence when a cytosine within the recognition sequence is methylated at position C5 include, e.g., Aat I I, Aci I, Acd I, Age I, Alu I, Asc I, Ase I, AsiS I, Bbe I, BsaA I, BsaH I, BsiE I, BsiW I, BsrF I, BssH II, BssK I, BstB I, BstN I, BstU I, Cla I, Eae I, Eag I, Fau I, Fse I, Hha I, HinP1 I, HinC II, Hpa II, Hpy99 I, HpyCH4 IV, Kas I, Mbo I, Mlu I, MapA1 I, Msp I, Nae I, Nar I, Not I, Pml I, Pst I, Pvu I, Rsr II, Sac II, Sap I, Sau3A I, Sfl I, Sfo I, SgrA I, Sma I, SnaB I, Tsc I, Xma I, and Zra I. Suitable methylation-sensitive restriction enzymes that do not cleave DNA at or near their recognition sequence when an adenosine within the recognition sequence is methylated at position N6 include, e.g., Mbo I. One of skill in the art will appreciate that any methylation-sensitive restriction enzyme, including homologs and orthologs of the restriction enzymes described herein, is also suitable for use in the present invention. One of skill in the art will further appreciate that a methylation-sensitive restriction enzyme that fails to cut in the presence of methylation of a cytosine at or near its recognition sequence may be insensitive to the presence of methylation of an adenosine at or near its recognition sequence. Likewise, a methylation-sensitive restriction enzyme that fails to cut in the presence of methylation of an adenosine at or near its recognition sequence may be insensitive to the presence of methylation of a cytosine at or near its recognition sequence. For example, Sau3AI is sensitive (i.e., fails to cut) to the presence of a methylated cytosine at or near its recognition sequence, but is insensitive (i.e., cuts) to the presence of a methylated adenosine at or near its recognition sequence. One of skill in the art will also appreciate that some methylation-sensitive restriction enzymes are blocked by methylation of bases on one or both strands of DNA encompassing of their recognition sequence, while other methylation-sensitive restriction enzymes are blocked only by methylation on both strands, but can cut if a recognition site is hemi-methylated.

### Evaluating a Diagnosis, Prognosis, or Response to Treatment

[0142] Some embodiments provided herein relate to methods for diagnosing, determining a prognosis, or determining or predicting a response to treatment. As used herein, diagnosing can include determining whether a methylation status of 1 or more loci is indicative of a disorder, such as rheumatoid arthritis. As used herein, determining a prognosis can include determining whether methylation status of 1 or more loci is indicative of a likelihood of improvement in symptoms of a disorder, such as rheumatoid arthritis. As used herein, determining or predicting a response to treatment can include determining whether methylation status of 1 or more loci after treatment is more similar to a normal status before treatment or earlier in the treatment regimen. In some embodiments of the methods and compositions provided herein, the 1 or more locus or 1 or more gene is a locus or gene with no known association with RA.

[0143] In some such embodiments, the methylation state of at least 1 locus or at least one gene selected from a locus or gene described herein in a sample obtained from a subject is determined. Examples of loci for which the methylation state may be evaluated include the loci listed in TABLE 6, TABLE 7, and TABLE 8. In some embodiments, loci for which the methylation state may be evaluated include SEQ ID NO.s:1-485512. In each sequence provided in SEQ ID NO.s 1-485512, the “C” which is potentially methylated is at position 61. Examples of genes for which the methylation state may be evaluated include the loci listed in TABLE 3. The nucleic acid sequences of the loci listed in TABLE 6, TABLE 7, and TABLE 8 and the genes listed in TABLE 3 are incorporated herein by reference. In some embodiments, additional loci and genes useful for the methods and compositions provided herein can be further identified using the methods described herein. In some embodiments, additional loci and genes useful for the methods and compositions provided herein are identified by conducting methylation analyses in additional samples, thereby providing an increased number of data points which could assist in the identification of further genes or loci having statistically significant differences in their methylation states. The sample can comprise an in vivo sample, an in vitro sample, or an ex vivo sample. It will be understood, that in some embodiments of the compositions or methods provided herein, a sample or cell can be in vivo. In some embodiments of the compositions or methods provided herein, a sample or cell can be ex vivo. Methods to determine the methylation state of at least one locus or at least one gene are well known in the art and examples are provided herein. In some embodiments, the subject is a mammal, such as a human. In some embodiments, the methylation states of at least about 1, 2, 3, 4, 5, 10, 20, 30, 40, 50, 60, 70, 80, 90, 100, 200, 300, 400, 500 loci or more than 500 loci are determined. Some embodiments also include comparing the methylation state of the at least 1 locus in the sample with the methylation state of the locus in a normal cell, cell from a subject with a known prognosis, or cell from a subject with a known response to treatment. In some embodiments, the methylation states of at least about 1, 2, 3, 4, 5, 10, 20, 30, 40, 50, 60, 70, 80, 90, 100, 200, 300, 400, 500 genes or more than 500 genes are determined. Some embodiments also include comparing the methylation state of the at least 1 gene in the sample with the methylation state of the gene in a normal cell, cell from a subject with a known prognosis, or cell from a subject with a known response to treatment.

[0144] In some embodiments, an increase or decrease in the methylation state of the at least 1 locus compared to the methylation state of the locus in normal cell, cell from a subject with a known prognosis, or cell from a subject with a known response to treatment is indicative of the diagnosis, prognosis, or response to treatment for the subject. In some embodiments, an increase or decrease in the methylation state of a locus selected from the group consisting of the loci listed in TABLE 6 is indicative of the diagnosis, prognosis, or response to treatment for the subject. In some embodiments, an increase or decrease in the methylation state of a locus selected from the group consisting of the loci listed in TABLE 7 is indicative of the diagnosis, prognosis, or response to treatment for the subject. In some embodiments, an increase or decrease in the methylation state of a locus selected from the group consisting of the loci listed in TABLE 8 is indicative of the diagnosis, prognosis, or response to treatment for the subject. In some embodiments, an increase or decrease in the methylation state of the at least 1 gene compared to the methylation state of the gene in a normal cell, cell from a subject with a known prognosis, or tissue from a subject with a known response to treatment is indicative of the diagnosis, prognosis, or response to treatment for the subject. In some embodiments, an increase or decrease in the methylation state of a gene selected from the group consisting of the genes listed in TABLE 3 is indicative of the diagnosis, prognosis, or response to treatment for the subject. In some embodiments, the increase or decrease in methylation occurs in a cell, such as a synoviocyte, such as a fibroblast-like synoviocyte, for example, a rheumatoid arthritis fibroblast-like synoviocyte or an osteoarthritis fibroblast-like synoviocyte. In some embodiments, the cell comprises macrophage. In some embodiments, the cell comprises a peripheral blood cell. As used herein, ‘peripheral blood cell’ can include a cellular component of blood which contains DNA. Examples of peripheral blood cells include white blood cells, including neutrophils, eosinophils, basophils, lymphocytes, B cell, plasma cells, T cells, natural killer cells, monocytes, and dendritic cells. In some embodiments, the cell is mammalian, e.g., human. In some embodiments, the loci and genes which are differentially methylated in fibroblast-like synoviocytes from individuals with rheumatoid arthritis or osteoarthritis and the loci and genes which are differentially methylated in individuals with rheumatoid or osteoarthritis in cell types other than fibroblast-like synoviocytes may partially overlap. However, it is likely that there will be loci and genes which exhibit differential methylation in individuals with rheumatoid arthritis or osteoarthritis in one cell type which are not differentially methylated in other cell types from individuals with rheumatoid arthritis or osteoarthritis. Such differences in differential methylation may be a reflection of the fact that methylation patterns vary among different cell lineages. For example, differentially methylated loci and genes identified in T cells and in B cells types from individuals with rheumatoid arthritis or osteoarthritis can include loci and genes that are different in each cell type. Differentially methylated loci and genes in different cell types from individuals with rheumatoid arthritis or osteoarthritis can be identified using the methods described herein.

[0145] Some embodiments include methods of ameliorating rheumatoid arthritis or osteoarthritis in a subject. Some such embodiments include evaluating the methylation status of a plurality of human nucleic acid loci in a nucleic acid sample from a human subject having symptoms of rheumatoid arthritis or osteoarthritis. In some embodiments, the loci comprise at least about 5 loci, at least about 10 loci, at least about 15 loci, at least about 20 loci, at least about 25 loci, at least about 50 loci, and at least about 100 loci. In some embodiments the loci are selected from the group consisting of the loci listed in TABLE 6, TABLE 7, or TABLE 8. In some embodiments, the loci may be selected from SEQ ID NO.s:1-485512. Some embodiments also include administering a treatment for rheumatoid arthritis or osteoarthritis if the loci have a methylation status indicative of rheumatoid arthritis or osteoarthritis.

[0146] Some embodiments include a mixture comprising a plurality of human nucleic acid loci from a human subject having symptoms indicative of potential rheumatoid arthritis or osteoarthritis and a reagent capable of providing an indication of the methylation status of said loci. In some embodiments, the loci comprise at least about 5 loci, at least about 10 loci, at least about 15 loci, at least about 20 loci, at least about 25 loci, at least about 50 loci, and at least about 100 loci. In some embodiments the loci are selected from the group consisting of the loci listed in TABLE 6, TABLE 7, or TABLE 8. In some embodiments, the loci are selected from SEQ ID NO.s:1-485512

### Methods to Determine Methylation State of a Locus

[0147] In some embodiments, the methylation state of more than one DNA region, e.g., gene, locus or portion thereof is determined. In some embodiments, the methylation status of 1, 2, 3, 4, 5, 6, 7, 8, 9, 10, 11, 12, 13, 14, 15, 16, 17, 18, 19, 20, 21, 22, 23, 24, 25, 26, 27, 28, 29, 30, 31, 32, 33, 34, 35, 36, 37, 38, 39, 40, 41, 42, 43, 44, 45, 46, 47, 48, 49, 50, 51, 52, 53, 54, 55, 56, 57, 58, 59, 60, 61, 62, 63, 64, 65, 66, 67, 68, 69, 70, 71, 72, 73, 74, 75, 76, 77, 78, 79, 80, 81, 82, 83, 84, 85, 86, 87, 88, 89, 90, 91, 92, 93, 94, 95, 96, 97 or more than 97 of the DNA regions is determined.

[0148] In some embodiments, the methylation state of a DNA region or portion thereof is determined and then normalized (e.g., compared) to the methylation state of a control locus. Typically the control locus will have a known, relatively constant, methylation status. For example, the control sequence can be previously determined to have no, some or a high amount of methylation, thereby providing a relative constant value to control for error in detection methods, etc., unrelated to the presence or absence of a disorder. In some embodiments, the control locus is endogenous, i.e., is part of the genome of the individual sampled. For example, in mammalian cells, the testes-specific histone 2B gene (hTH2B in human) gene is known to be methylated in all somatic tissues except testes. Alternatively, the control locus can be an exogenous locus, i.e., a DNA sequence spiked into the sample in a known quantity and having a known methylation status.

[0149] A DNA region comprises a nucleic acid including one or more methylation sites of interest (e.g., a cytosine, a “microarray feature,” or an amplicon amplified from select primers) and flanking nucleic acid sequences (i.e., “wingspan”) of up to 4 kilobases (kb) in either or both of the 3′ or 5′ direction from the amplicon. This range corresponds to the lengths of DNA fragments obtained by randomly fragmenting the DNA before screening for differential methylation between DNA in two or more samples (e.g., carrying out methods used to initially identify differentially methylated loci). In some embodiments, the wingspan of the one or more DNA regions is about 0.5 kb, 0.75 kb, 1.0 kb, 1.5 kb, 2.0 kb, 2.5 kb, 3.0 kb, 3.5 kb or 4.0 kb in both 3′ and 5′ directions relative to the sequence represented by the microarray feature. The DNA region of interest can comprise and/or be immediately adjacent to a locus selected from the group consisting of the loci listed in TABLE 6, TABLE 7, or TABLE 8, or a gene selected from a gene listed in TABLE 3. In some embodiments, the locus may be selected from SEQ ID NO.s:1-485512. The nucleic acid sequences of the loci listed in TABLE 6, TABLE 7, and TABLE 8 are available, for example, in the Illumina CpG database, and included in SEQ ID NO.s:1-485512.

[0150] The methylation sites in a DNA region can reside in non-coding transcriptional control sequences (e.g., promoters, enhancers, etc.) or in coding sequences, including introns and exons of the loci listed in TABLE 6, TABLE 7, or TABLE 8, and genes listed in TABLE 3. In some embodiments, the methods comprise detecting the methylation status in the promoter regions (e.g., comprising the nucleic acid sequence that is about 1.0 kb, 1.5 kb, 2.0 kb, 2.5 kb, 3.0 kb, 3.5 kb or 4.0 kb 5′ from the transcriptional start site through to the translational start site) of one or more of the locus identified in TABLE 6, TABLE 7, TABLE 8, or TABLE 3. In some embodiments, the locus may be selected from SEQ ID NO.s:1-485512.

[0151] Any method for detecting DNA methylation can be used in the methods provided herein. In some embodiments, an array can be used to determine the methylation state of at least one locus, such as the ILLUMINA HumanMethylation 450 BeadChip. DNA is treated with bisulfite to convert unmethylated cytosines to uracil, methylated cytosines are protected and remain cytosine. After the conversion step, a determination step is performed to identify whether a base at a particular locus was converted. Methylation status of the interrogated site is calculated as the ratio of the signal from a methylated probe relative to the sum of both methylated and unmethlylated probes. This value, known as β, ranges continuously from 0 (unmethlylated) to 1 (fully methylated). Arrays, such as the ILLUMINA HumanMethylation 450 BeadChip, include genes and CpG islands and other sequences.

[0152] In some embodiments, methods for detecting methylation include randomly shearing or randomly fragmenting the genomic DNA, cutting the DNA with a methylation-dependent or methylation-sensitive restriction enzyme and subsequently selectively identifying and/or analyzing the cut or uncut DNA. Selective identification can include, for example, separating cut and uncut DNA (e.g., by size) and quantifying a sequence of interest that was cut or, alternatively, that was not cut. See, e.g., U.S. Pat. No. 7,186,512. Alternatively, the method can encompass amplifying intact DNA after restriction enzyme digestion, thereby only amplifying DNA that was not cleaved by the restriction enzyme in the area amplified. See, e.g., U.S. patent application Ser. Nos. 10/971,986; 11/071,013; and 10/971,339. In some embodiments, amplification can be performed using primers that are gene specific. Alternatively, adaptors can be added to the ends of the randomly fragmented DNA, the DNA can be digested with a methylation-dependent or methylation-sensitive restriction enzyme, intact DNA can be amplified using primers that hybridize to the adaptor sequences. In this case, a second step can be performed to determine the presence, absence or quantity of a particular gene in an amplified pool of DNA. In some embodiments, the DNA is amplified using real-time, quantitative PCR.

[0153] In some embodiments, the methods comprise quantifying the average methylation density in a target sequence within a population of genomic DNA. In some embodiments, the method comprises contacting genomic DNA with a methylation-dependent restriction enzyme or methylation-sensitive restriction enzyme under conditions that allow for at least some copies of potential restriction enzyme cleavage sites in the locus to remain uncleaved; quantifying intact copies of the locus; and comparing the quantity of amplified product to a control value representing the quantity of methylation of control DNA, thereby quantifying the average methylation density in the locus compared to the methylation density of the control DNA.

[0154] The quantity of methylation of a locus of DNA can be determined by providing a sample of genomic DNA comprising the locus, cleaving the DNA with a restriction enzyme that is either methylation-sensitive or methylation-dependent, and then quantifying the amount of intact DNA or quantifying the amount of cut DNA at the DNA locus of interest. The amount of intact or cut DNA will depend on the initial amount of genomic DNA containing the locus, the amount of methylation in the locus, and the number (i.e., the fraction) of nucleotides in the locus that are methylated in the genomic DNA. The amount of methylation in a DNA locus can be determined by comparing the quantity of intact DNA or cut DNA to a control value representing the quantity of intact DNA or cut DNA in a similarly-treated DNA sample. The control value can represent a known or predicted number of methylated nucleotides. Alternatively, the control value can represent the quantity of intact or cut DNA from the same locus in another (e.g., normal, non-diseased) cell or a second locus.

[0155] By using at least one methylation-sensitive or methylation-dependent restriction enzyme under conditions that allow for at least some copies of potential restriction enzyme cleavage sites in the locus to remain uncleaved and subsequently quantifying the remaining intact copies and comparing the quantity to a control, average methylation density of a locus can be determined. As used herein, ‘methylation density’ can refer to the number of methylated C-residues within a region. If the methylation-sensitive restriction enzyme is contacted to copies of a DNA locus under conditions that allow for at least some copies of potential restriction enzyme cleavage sites in the locus to remain uncleaved, then the remaining intact DNA will be directly proportional to the methylation density, and thus may be compared to a control to determine the relative methylation density of the locus in the sample. Similarly, if a methylation-dependent restriction enzyme is contacted to copies of a DNA locus under conditions that allow for at least some copies of potential restriction enzyme cleavage sites in the locus to remain uncleaved, then the remaining intact DNA will be inversely proportional to the methylation density, and thus may be compared to a control to determine the relative methylation density of the locus in the sample. Such assays are disclosed in, e.g., U.S. patent application Ser. No. 10/971,986.

[0156] Quantitative amplification methods (e.g., quantitative PCR or quantitative linear amplification) can be used to quantify the amount of intact DNA within a locus flanked by amplification primers following restriction digestion. Methods of quantitative amplification are disclosed in, e.g., U.S. Pat. Nos. 6,180,349; 6,033,854; and 5,972,602, as well as in, e.g., Gibson et al., Genome Research 6:995-1001 (1996); DeGraves, et al., Biotechniques 34(1):106-10, 112-5 (2003); Deiman B, et al., Mol. Biotechnol. 20(2):163-79 (2002). Amplifications may be monitored in “real time.”

[0157] Additional methods for detecting DNA methylation can involve genomic sequencing before and after treatment of the DNA with bisulfite. See, e.g., Frommer et al., Proc. Natl. Acad. Sci. USA 89:1827-1831 (1992). When sodium bisulfite is contacted to DNA, unmethylated cytosine is converted to uracil, while methylated cytosine is not modified.

[0158] In some embodiments, restriction enzyme digestion of PCR products amplified from bisulfite-converted DNA is used to detect DNA methylation. See, e.g., Sadri & Hornsby, Nucl. Acids Res. 24:5058-5059 (1996); Xiong & Laird, Nucleic Acids Res. 25:2532-2534 (1997).

[0159] In some embodiments, a MethyLight assay is used alone or in combination with other methods to detect DNA methylation (see, Eads et al., Cancer Res. 59:2302-2306 (1999)). Briefly, in the MethyLight process genomic DNA is converted in a sodium bisulfite reaction (the bisulfite process converts unmethylated cytosine residues to uracil). Amplification of a DNA sequence of interest is then performed using PCR primers that hybridize to CpG dinucleotides. By using primers that hybridize only to sequences resulting from bisulfite conversion of unmethylated DNA, (or alternatively to methylated sequences that are not converted) amplification can indicate methylation status of sequences where the primers hybridize. Similarly, the amplification product can be detected with a probe that specifically binds to a sequence resulting from bisulfite treatment of a unmethylated (or methylated) DNA. If desired, both primers and probes can be used to detect methylation status. Thus, kits for use with MethyLight can include sodium bisulfite as well as primers or detectably-labeled probes (including but not limited to Taqman or molecular beacon probes) that distinguish between methylated and unmethylated DNA that have been treated with bisulfite. Other kit components can include, e.g., reagents necessary for amplification of DNA including but not limited to, PCR buffers, deoxynucleotides; and a thermostable polymerase.

[0160] In some embodiments, a Ms-SNuPE (Methylation-sensitive Single Nucleotide Primer Extension) reaction is used alone or in combination with other methods to detect DNA methylation (see, Gonzalgo & Jones, Nucleic Acids Res. 25:2529-2531 (1997)). The Ms-SNuPE technique is a quantitative method for assessing methylation differences at specific CpG sites based on bisulfite treatment of DNA, followed by single-nucleotide primer extension (Gonzalgo & Jones, supra). Briefly, genomic DNA is reacted with sodium bisulfite to convert unmethylated cytosine to uracil while leaving 5-methylcytosine unchanged. Amplification of the desired target sequence is then performed using PCR primers specific for bisulfite-converted DNA, and the resulting product is isolated and used as a template for methylation analysis at the CpG site(s) of interest.

[0161] Typical reagents (e.g., as might be found in a typical Ms-SNuPE-based kit) for Ms-SNuPE analysis can include, but are not limited to: PCR primers for specific gene (or methylation-altered DNA sequence or CpG island); optimized PCR buffers and deoxynucleotides; gel extraction kit; positive control primers; Ms-SNuPE primers for a specific gene; reaction buffer (for the Ms-SNuPE reaction); and detectably-labeled nucleotides. Additionally, bisulfite conversion reagents may include: DNA denaturation buffer; sulfonation buffer; DNA recovery regents or kit (e.g., precipitation, ultrafiltration, affinity column); desulfonation buffer; and DNA recovery components.

[0162] In some embodiments, a methylation-specific PCR (“MSP”) reaction is used alone or in combination with other methods to detect DNA methylation. An MSP assay entails initial modification of DNA by sodium bisulfite, converting all unmethylated, but not methylated, cytosines to uracil, and subsequent amplification with primers specific for methylated versus unmethylated DNA. See, Herman et al., Proc. Natl. Acad. Sci. USA 93:9821-9826, (1996); U.S. Pat. No. 5,786,146.

[0163] Additional methylation detection methods include, but are not limited to, methylated CpG island amplification (see, Toyota et al., Cancer Res. 59:2307-12 (1999)) and those described in, e.g., U.S. Patent Publication 2005/0069879; Rein, et al. Nucleic Acids Res. 26 (10): 2255-64 (1998); Olek, et al. Nat. Genet. 17(3): 275-6 (1997); and PCT Publication No. WO 00/70090.

[0164] Some embodiments provided herein include methods of determining the methylation status of a plurality of human nucleic acid loci. Some such embodiments include contacting a nucleic acid sample from a human subject with a reagent capable of providing an indication of the methylation status of said loci. In some embodiments, the loci comprise at least about 5 loci, at least about 10 loci, at least about 15 loci, at least about 20 loci, at least about 25 loci, at least about 50 loci, and at least about 100 loci. In some embodiments the loci are selected from the group consisting of the loci listed in TABLE 6, TABLE 7, or TABLE 8. In some embodiments, the reagent is a restriction enzyme. In some embodiments, the reagent is a primer. In some embodiments, the reagent is a probe. In some embodiments, the reagent comprises sodium bisulfite.

### Identifying Therapeutic Agents

[0165] Some embodiments provided herein relate to methods for identifying therapeutic agents. Some such embodiments for identifying therapeutic agents which may be used to treat rheumatoid arthritis or osteoarthritis, can include contacting a cell with a test agent; and determining the methylation state of at least 1 locus selected from the loci listed in TABLE 6, TABLE 7, or TABLE 8 or at least one gene listed in Table 3 in the contacted cell. In some embodiments, the at least one locus may be selected from SEQ ID NO.s:1-485512. Some methods also include comparing the methylation state of the at least 1 locus, or at least 1 gene in the contacted cell with the methylation state of the locus or the gene in the cell not contacted with the test agent, and selecting a test agent that increases or decreases the methylation state of the at least 1 locus or the at least 1 gene in the cell contacted with the test agent compared to the methylation state of the locus or the gene in a cell not contacted with the test agent. For example, if a locus, a gene group of loci or group of genes are hypermethylated in individuals with RA, agents which reduce the level of methylation at the locus, the gene, group of loci or group of genes may be useful as therapeutic agents. Likewise, if a locus, a gene, group of loci or group of genes are hypomethylated in individuals with RA, agents which increase the level of methylation at the locus, the gene group of loci or group of genes may be useful as therapeutic agents. Likewise, agents which produce a methylation profile in cells contacted with the agent having a greater similarity to the methylation profile of individuals who do not suffer from RA relative to the methylation profile in cells which have not been contacted with the agent may be useful as therapeutic agents. Examples of test agents and potential therapeutic agents include small molecules (including but not limited to organic chemical compounds which have been obtained from natural sources or synthesized), nucleic acids (including but not limited to antisense nucleic acids, ribozymes, or siRNAs), peptides and proteins (including but not limited to cytokines TNF-α, and DMNTs).

[0166] In some embodiments, at least 1 locus is selected from the group consisting of the loci listed in TABLE 6. In some embodiments, at least 1 locus is selected from the group consisting of the loci listed in TABLE 7. In some embodiments, the at least one locus may be selected from SEQ ID NO.s:1-485512. In some embodiments, at least 1 gene is selected from the group consisting of the gene listed in TABLE 3.

[0167] In some embodiments, the methylation states of at least about 5, 10, 20, 30, 40, 50, 60, 70, 80, 90, or 100 loci selected from the group consisting of the loci listed in TABLE 6, TABLE 7, or TABLE 8 are determined. In some embodiments, the methylation states of at least about 5, 10, 20, 30, 40, 50, 60, 70, 80, or 100 loci selected from the group consisting of the loci of SEQ ID NO.s:1-485512. In some embodiments, the methylation states of at least about 1, 5, 10, 20, 30, 40, 50 genes selected from the group consisting of the genes listed in TABLE 3 are determined

[0168] In some embodiments, the cell comprises a synoviocyte, such as a fibroblast-like synoviocyte, for example, a rheumatoid arthritis fibroblast-like synoviocyte or an osteoarthritis fibroblast-like synoviocyte. In some embodiments, the cell comprises a macrophage. In some embodiments, the cell comprises a peripheral blood cell. In some embodiments, the peripheral blood cell is selected from the group consisting of white blood cell, including neutrophil, eosinophil, basophil, lymphocyte, B cell, plasma cell, T cell, natural killer cell, monocyte, and dendritic cell. In some embodiments, the cell is mammalian, e.g., human.

[0169] More embodiments of methods for identifying therapeutic reagents include identifying agents that modulate methylation of genes encoding proteins that act in the same pathway as other proteins encoded by genes that are differentially methylated in rheumatoid arthritis or osteoarthritis or agents which modulate the activity of proteins in the same pathway as proteins encoded by genes which are differentially methylated in rheumatoid arthritis or osteoarthritis. Some methods for identifying a therapeutic agent for treating rheumatoid arthritis or osteoarthritis include contacting a cell with a test agent, and determining the methylation state of at least 1 gene selected from a gene encoding a protein that acts in a pathway that includes a protein encoded by a gene that is differentially methylated in a rheumatoid arthritis cell or osteoarthritis cell compared to a normal cell. Some methods also include comparing the methylation state of the at least 1 gene in the contacted cell with the methylation state of the gene in a cell which was not contacted with the test agent, selecting a test agent that increases or decreases the extent of methylation of the at least 1 gene in the cell contacted with the test agent compared to the extent of methylation of the at least 1 gene in a cell which was not contacted with the test agent such that the extent of methylation of the at least 1 gene in the cell contacted with the test agent is a methylation state associated with the absence of rheumatoid arthritis or osteoarthritis or with a reduction in the symptoms associated with rheumatoid arthritis or osteoarthrities. In some embodiments, the pathway is selected from focal adhesion, glycosphingolipid biosynthesis—lacto and neolacto series, arrhythmogenic right ventricular cardiomyopathy (ARVC), ECM-receptor interaction, amoebiasis, leukocyte transendothelial migration, protein digestion and absorption, cell adhesion molecules (CAMs), nitrogen metabolism, ErbB signaling pathway, African trypanosomiasis, primary bile acid biosynthesis, Fc epsilon RI signaling pathway, mTOR signaling pathway, and adipocytokine signaling pathway.

### Kits

[0170] Some embodiments provided herein relate to kits. Some such kits can be useful for diagnosing, determining a prognosis, or determining a response to treatment of a subject with a disorder, such as rheumatoid arthritis, comprising: a reagent for determining the methylation state of at least one locus selected from the group consisting of the loci listed in TABLE 6, TABLE 7, or TABLE 8. In some embodiments, the at least one locus may be selected from SEQ ID NO.s:1-485512. In some embodiments, the kit also includes at least one polynucleotide primer comprising a sequence hybridizing to at least a portion of the at least one locus selected from the group consisting of the loci listed in TABLE 6, TABLE 7, or TABLE 8. In some embodiments, the locus may be selected from SEQ ID NO.s:1-485512. In some embodiments, the kit can include one or more of methylation-dependent restriction enzymes, methylation-sensitive restriction enzymes, amplification (e.g., PCR) reagents, probes and/or primers. In some embodiments a reagent can determine the methylation states of at least about 1, 5, 10, 20, 30, 40, 50, 60, 70, 80, 90, 100 or more than 100 loci selected from the group consisting of the loci listed in TABLE 6, TABLE 7, or TABLE 8. In some embodiments, the at least about 1, 5, 10, 20, 30, 40, 50, 60, 70, 80, 90, 100 or more than 100 loci may be selected from SEQ ID NO.s:1-485512.

[0171] Some embodiments include kits for diagnosing, determining a prognosis, or determining or predicting a response to treatment of a subject with rheumatoid arthritis or osteoarthritis, comprising a reagent for determining the methylation state of at least one gene selected from the group consisting of the genes listed in TABLE 3. Some kits also include at least one polynucleotide primer comprising a sequence hybridizing to at least a portion of the at least one gene selected from the group consisting of the genes listed in TABLE 3. In some embodiments, the reagent comprises a restriction enzyme. In some embodiments a reagent can determine the methylation states of at least about 1, 5, 10, 20, 30, 40, 50, or more genes selected from the group consisting of the genes listed in TABLE 3.

[0172] Some embodiments include a nucleic acid array consisting essentially of nucleic acids useful for diagnosing rheumatoid arthritis or osteoarthritis, determining a prognosis of rheumatoid arthritis or osteoarthritis, or determining or predicting a response to treatment of a subject being evaluated for or suffering from rheumatoid arthritis or osteoarthritis. In some such embodiments, the nucleic acids comprise at least about 5 loci, at least about 10 loci, at least about 15 loci, at least about 20 loci, at least about 25 loci, at least about 50 loci, and at least about 100 loci. In some embodiments the loci are selected from the group consisting of the loci listed in TABLE 6, TABLE 7, or TABLE 8. In some embodiments, the loci may be selected from SEQ ID NO.s:1-485512.

### Computer-Based Methods

[0173] The calculations for the methods described herein can involve computer-based calculations and tools. For example, a methylation value for a DNA region or portion thereof can be compared by a computer to a threshold value, as described herein. The tools are advantageously provided in the form of computer programs that are executable by a general purpose computer system (referred to herein as a “host computer”) of conventional design. The host computer may be configured with many different hardware components and can be made in many dimensions and styles (e.g., desktop PC, laptop, tablet PC, handheld computer, server, workstation, mainframe). Standard components, such as monitors, keyboards, disk drives, CD and/or DVD drives, and the like, may be included. Where the host computer is attached to a network, the connections may be provided via any suitable transport media (e.g., wired, optical, and/or wireless media) and any suitable communication protocol (e.g., TCP/IP); the host computer may include suitable networking hardware (e.g., modem, Ethernet card, WiFi card). The host computer may implement any of a variety of operating systems, including UNIX, Linux, Microsoft Windows, MacOS, or any other operating system.

[0174] Computer code for implementing aspects of the present invention may be written in a variety of languages, including PERL, C, C++, Java, JavaScript, VBScript, AWK, or any other scripting or programming language that can be executed on the host computer or that can be compiled to execute on the host computer. Code may also be written or distributed in low level languages such as assembler languages or machine languages.

[0175] The host computer system advantageously provides an interface via which the user controls operation of the tools. In the examples described herein, software tools are implemented as scripts (e.g., using PERL), execution of which can be initiated by a user from a standard command line interface of an operating system such as Linux or UNIX. Those skilled in the art will appreciate that commands can be adapted to the operating system as appropriate. In other embodiments, a graphical user interface may be provided, allowing the user to control operations using a pointing device. Thus, the present invention is not limited to any particular user interface.

[0176] Scripts or programs incorporating various features of the present invention may be encoded on various computer readable media for storage and/or transmission. Examples of suitable media include magnetic disk or tape, optical storage media such as compact disk (CD) or DVD (digital versatile disk), flash memory, and carrier signals adapted for transmission via wired, optical, and/or wireless networks conforming to a variety of protocols, including the Internet.

[0177] Some embodiments include methods for diagnosing rheumatoid arthritis or osteoarthritis, determining a rheumatoid arthritis or osteoarthritis prognosis, or determining or predicting a response to treatment for rheumatoid arthritis or osteoarthritis in a subject comprising accessing first data representing nucleic acid loci which are differentially methylated in individuals with rheumatoid arthritis, osteoarthritis a rheumatoid arthritis or osteoarthritis prognosis, or a response to treatment for rheumatoid arthritis or osteoarthritis wherein said data is stored on a non-transitory computer readable medium. Some embodiments also include instructing a computer to compare said first data to second data representing the methylation status of said nucleic acid loci in a sample taken from said subject, wherein said data representing the methylation status of said nucleic acid loci in a sample taken from said subject is stored on a non-transitory computer readable medium. Some embodiments also include diagnosing rheumatoid arthritis or osteoarthritis, determining a rheumatoid arthritis or osteoarthritis prognosis, or determining or predicting a response to treatment for rheumatoid arthritis or osteoarthritis in said subject if said first data representing the methylation status of said nucleic acid loci in a sample taken from said subject are significantly similar to said second data representing nucleic acid loci which are differentially methylated in individuals with rheumatoid arthritis, osteoarthritis a rheumatoid arthritis or osteoarthritis prognosis, or a response to treatment for rheumatoid arthritis or osteoarthritis.

[0178] While the present invention has been described in some detail for purposes of clarity and understanding, one skilled in the art will appreciate that various changes in form and detail can be made without departing from the true scope of the invention.

### EXAMPLES

### Example 1

### Methylation of Loci in RA and OA Patients

### Methods: Fibroblast-Like Synoviocytes

[0179] FLS were isolated from synovial tissues obtained from RA and OA patients at the time of joint replacement as described previously. The diagnosis of RA conformed to the American College of Rheumatology 1987 revised criteria. The protocol was approved by the UCSD Human Subjects Research Protection Program. Synovial tissues were minced and incubated with 0.5 mg/ml collagenase VIII (Sigma) in serum-free RPMI (Mediatech, VA) for 1.5 h at 37° C., filtered through a 0.22 μm cell strainer, extensively washed, and cultured in DMEM supplemented with 10% FCS (endotoxin content<0.006 ng/ml; Gemini Biosciences, CA), penicillin, streptomycin, gentamicin and L-glutamine in a humidified 5% CO₂ incubator. After overnight culture, nonadherent cells were removed, and adherent cells were trypsinized, split at a 1:3 ratio, and cultured. Synoviocytes were used from passage 4 through 9, when FLS were a homogeneous population with <1% CD11b, <1% phagocytic, and <1% FcR II positive cells.

[0180] Patient Phenotype

[0181] Synovial tissues were obtained at the time of clinically indicated total knee or hip joint replacement surgery except for one patient with RA who had wrist surgery. The mean ages of RA and OA patients were 53±9 and 68±16, respectively. Additional information on four patients (2 RA and 2 OA) was limited because the samples were de-identified. The erythrocyte sedimentation rates for the remaining RA and OA patients were 38±15 and 19±10, respectively. Of the 4 RA patients with clinical information, 3 were seropositive for serum rheumatoid factor or anti-CCP antibody and all were treated with low dose prednisone, 2 with methotrexate, 2 with a TNF blocker, and 1 with leflunomide. OA was mainly treated with acetaminophin and narcotics for pain.

[0182] Isolation of Genomic DNA and qPCR Analysis

[0183] RA and OA FLS were grown to 80% confluence and harvested. Genomic DNA of 10⁶ FLS was isolated using the MagMAX™ DNA Multi-Sample Kit (Applied Biosystems). DNA quality and quantity was assessed with a NanoDrop ND-2000 spectrometer (NanoDrop Technologies, Wilmington, Del., USA). mRNA from cultured FLS was isolated using RNA-STAT (Tel-Stat, TX) and cDNA was prepared, according to manufacturer's instructions using GeneAmp 2400 (Applied Biosystems). Quantitative real-time PCR was performed using Assays On Demand (Applied Biosystems) to determine relative mRNA levels using the GeneAmp 5700 Sequence Detection System (Applied Biosystems) as described previously. Standard curves for human MMP1 and GAPDH were generated. Sample Ct values were used to calculate the number of cell equivalents in the test samples. The data were then normalized to GAPDH expression to obtain relative cell equivalents.

[0184] Infinium HumanMethylation450 Chip Analysis

[0185] Genomic DNA was isolated from female RA and OA FLS as described. The Infinium HumanMethylation450 chip was processed as described by the manufacturer (Illumina, San Diego, Calif.). This chip covers 96% of RefSeq genes and provides comprehensive gene region coverage, targeting multiple sites with promoter, 5□ UTR, 1st exon, gene body and 3□ UTR. Initial analysis was performed with the Genome Studio methylation module, and then further analysed as described herein. The methylation level of a loci is measured as:

β=M/(U+M+100)

[0186] M is the fluorescence level of the methylation probe and U is the methylation level of the unmethylated probe. A constant value of 100 is added to prevent division by a small number (or 0) when background subtraction was used. The β values varied from 0 (completely unmethylated) to 1 (completely methylated). To measure the difference in methylation at a loci between OA and RA the average β levels were compared.

[0187] Method for Determining Enrichment of Multiple Methylated Loci

[0188] To avoid taking a single P-value cut-off when identifying genes that are enriched with differentially methylated (differentially methylated) loci, a variable cut-off scheme was used. Loci were ranked by their differentially methylated P-values. Then a P-value cut-off was taken. Those loci with P-value beneath the cut-off were taken to be differentially methylated and the rest were taken as not being differentially methylated. While doing this all P-value cut-offs beneath 0.05 were tried. Then for each gene, with loci beneath the P-value cut-off, the level which its loci were enriched beneath the cut-off was calculated as its enrichment factor (EF).

EF=(number of loci from gene A beneath cut-off/total loci from gene A)/(total number of loci beneath cut-off/total number of loci)

[0189] If EF is greater than 1 then it means the genes loci are enriched with differentially methylated loci. For those genes with an EF greater than 1, a P-value for the level of enrichment was calculated using the hypergeometric distribution. The resulting P-values were corrected with the Benjamini-Hochberg correction. Genes with enrichment P-values beneath <0.05 were recorded. If a gene was found to be enriched at multiple loci differentially methylated levels then only the level with the lower enrichment P-value was reported.

### Pathway and Gene Ontology Analyses

[0190] Pathway enrichment was carried out using the KEGG human pathways and modules (www.genome.jp/kegg/download). The enrichment analysis of 1859 loci was performed by mapping pathway to loci via the loci gene annotations, the EF of loci being enriched in KEGG pathway as calculated. If EF was greater than 1 then P-value for the level of enrichment was calculated using the hypergeometric distribution. The resulting P-values were corrected with the Benjamini-Hochberg correction. As the KEGG pathways represent groups of related bimolecular pathways a P-value cut-off of <0.1 was used as it would allow enrichment within individual bimolecular pathways to be identified. A P-value cut-off of <0.1 has been used previously during KEGG pathway analysis (Xu et al. 2010-Revealing parasite influence in metabolic pathways in Apicomplexa infected patients, BMC Bioinformatics 2010, 11(Suppl 11):S13; Shen et al. 2006—Sepsis Plasma Protein Profiling with Immunodepletion, Three-Dimensional Liquid Chromatography Tandem Mass Spectrometry, and Spectrum Counting, J. Proteome Res., 2006, 5 (11), pp 3154-3160, each incorporated by reference in their entireties). Gene ontology (GO) analysis was carried using human GO term associations (www.geneontology.org). GO term enrichment analysis was carried out using model-based gene set analysis which uses probabilistic inference to identify the active GO terms (Bauer, et al. 2010 GOing Bayesian: model-based gene set analysis of genome-scale data. Nucleic Acids Res. 2010; 38:3523-32, incorporated by reference in its entirety). This approach naturally deals with overlapping GO categories and avoids the need for multiple testing correction. Marginal probability values>0.50 were considered significantly enriched.

### Initial Probe and Data Filtering

[0191] The DNA methylome in RA and control (OA) FLS was evaluated. The Infinium HumanMethylation450 chip (Illumina, Inc.) was used to determine the methylation status of 485,512 loci from FLS isolated from 11 female patients at the time of total joint replacement surgery (6 RA; 5 OA). Loci were removed from subsequent analysis if any of the probes for a locus could not be disguised from background with a P-value<0.01 or if enough beads present upon the chip for accurate measurement of their methylation level. After filtering, 476,331 loci were available for further analysis.

### Global Methylation Status

[0192] To assess global methylation status of RA and OA FLS, the methylation scores over all filtered loci within a sample were summed. The difference between the two samples was assessed using Student's t-test. Initial analysis included all loci and was then repeated for only loci located in promoters. There were no significant differences between RA and OA (P-values 0.528 and 0.627, respectively). Therefore, globally hypo- or hypermethylation is not associated with RA when compared to OA. These results were confirmed using an antibody-based method to determine methylcytosine levels (Active Motif, Inc., Carlsbad, Calif.) where global methylation were similar for RA and OA (RA=0.85±0.32; OA=1.00±0.24; n=10 RA and 9 OA lines; P>0.05).

### Analysis of Differentially Methylated Individual Loci

[0193] Although global methylation are not different for RA and OA, there were differentially methylated (differentially methylated) loci that cluster to the two diseases. To identify the autosomal loci that are differentially methylated between OA and RA two filters were used: (i) an average difference in methylation level was greater than 0.1; and (ii) a P-value<0.05 that calculated using the Student's t-test and corrected for multiple testing with the Benjamini-Hochberg adjustment. 1,859 loci in 1206 different genes were identified as significantly differentially methylated in RA FLS. TABLE 1 shows example numbers of hypermethylated and hypomethylated sites.

TABLE 1

| | No. of loci | No. of loci |
|---|---|---|
| | hypomethylated | hypermethylated |
| | in RA | in RA |
| differentially methylated loci* | 732 | 1127 |
| differentially methylated genes** | 63 | 144 |
| differentially methylated KEGG | 10 | 6 |
| pathways | | |
| differentially methylated GO | 138 | 242 |
| terms | | |

*differentially methylated = Differentially methylated; Difference between OA and RA > 0.1, with P < 0 after Benjamini-Hochberg adjustment.
**6 additional genes had both hypo- and hypermethylated loci (ADAMTS2, C7orf50, DIP2C, FRMD SH3PXD2A)

[0194] Examples of genes identified with statistically significant differences between RA and OA at an individual locus using the ILLUMINA dataset are shown in TABLE 2. A mean value of OA methylation minus RA methylation; A P-value cut-off of <0.05 was used for determining significance. Where the RA minus OA value was positive the locus in RA was hypermethylated; where the RA minus OA value was negative, the locus in RA was hypomethylated.

TABLE 2

| | RA minus OA | Gene | Description |
|---|---|---|---|
| Hyper- | −0.34417 | PHLPP1 | PH domain and leucine rich repeat protein phosphatase 1 |
| methylated* | −0.34108 | RXRA | retinoid X receptor, alpha |
| | −0.30861 | CYFIP1 | cytoplasmic FMR1 interacting protein 1 |
| | −0.30363 | ADAMTS2 | ADAM metallopeptidase with thrombospondin type 1 motif, 2 |
| | −0.2964 | CD55 | CD55 molecule, decay accelerating factor for complement |
| | −0.27459 | CABLES1 | Cdk5 and Abl enzyme substrate 1 |
| | −0.26569 | HAS1 | hyaluronan synthase 1 |
| | −0.25362 | ITGB8 | integrin, beta 8 |
| | −0.25333 | HBEGF | heparin-binding EGF-like growth factor |
| | −0.23299 | PTPN14 | protein tyrosine phosphatase, non-receptor type 14 |
| | −0.23228 | COL4A2 | collagen, type IV, alpha 2 |
| | −0.23122 | COL4A1 | collagen, type IV, alpha 1 |
| | −0.21314 | TGFBR2 | transforming growth factor, beta receptor II (70/80 kDa) |
| | −0.20915 | EGF | epidermal growth factor |
| | −0.20692 | ITGBL1 | integrin, beta-like 1 (with EGF-like repeat domains) |
| | −0.20006 | TIMP2 | TIMP metallopeptidase inhibitor 2 |
| | −0.19768 | MAP3K1 | mitogen-activated protein kinase kinase kinase 1 |
| | −0.19005 | FOXO1 | forkhead box O1 |
| Hypo- | 0.365 | CHI3L1 | Chitinase 3-like 1 (cartilage glycoprotein-39) |
| methylated | 0.337 | WISP3; | WNT1 inducible signaling pathway protein 3 |
| | | WISP3 | |
| | 0.333 | STK24 | serine/threonine kinase 24 |
| | 0.329 | MMP20 | matrix metallopeptidase 20 |
| | 0.322 | EGFLAM | EGF-like, fibronectin type III and laminin G domain |
| | 0.318 | PTGIS | prostaglandin I2 (prostacyclin) synthase |
| | 0.301 | DCBLD1 | discoidin, CUB and LCCL domain containing 1 |
| | 0.299 | MAP3K5 | mitogen-activated protein kinase kinase kinase 5 (ASK1) |
| | 0.297 | MGMT | O-6-methylguaninE−DNA methyltransferase |
| | 0.282 | CDK14 | Cyclin-dependent kinase 14 |
| | 0.272 | STAT3 | signal transducer and activator of transcription 3 |
| | 0.270 | ADAM32 | ADAM metallopeptidase domain 32 |
| | 0.264 | RASGRF2 | Ras protein-specific guanine nucleotidE−releasing factor 2 |
| | 0.253 | CASP1 | caspase 1, apoptosis-related cysteine peptidase |
| | 0.225 | P2RX6 | purinergic receptor P2X, ligand-gated ion channel, 6 |
| | 0.195 | TRAF2 | TNF receptor-associated factor 2 |
| | 0.185 | MEFV | Mediterranean fever |

[0195] CpG methylation was significantly different in a number of genes implicated in RA. Several genes implicated in inflamation and immune responses are differentially methylated in RA.

[0196] A list of 1,859 loci is shown in TABLE 6 and TABLE 7. TABLE 6 and TABLE 7 list loci which are differentially methylated in RA compared to OA; a positive OA-RA value represents a loci which is hypomethylated in RA FLS (TABLE 6), a negative OA-RA value represents a loci which is hypermethylated in RA FLS (TABLE 7).

[0197] Permutation analysis was carried out to assess the significance of loci identified as differentially methylated. The 11 samples were randomly assigned to OA and RA while maintaining the same number of OA and RA labels, i.e., 5 OA and 6 RA. The permutation analysis was repeated 1,000 times. The average number of significant loci during the permutation analysis was 4.9, compared to 1,859 for the correct disease identification. The permutation analysis strongly supports these loci as truly differentially methylated and not as a result of random chance.

[0198] To assess the ability of the 1,859 loci to distinguish OA from RA, the methylation patterns of the loci across the 11 samples were hierarchically clustered (FIG. 2). The clustering of the samples distinguishes OA from RA, which clearly segregate according to disease type. The clustering of the loci also shows that groups of loci have similar patterns of differentially methylated across the samples.

Analysis of Genes with Multiple Differentially Methylated Loci

[0199] To examine genes that were significantly differentially methylated between OA and RA, genes that were enriched with multiple differentially methylated loci were identified (see Methods). This analysis was carried using all 1,859 differentially methylated loci identified in differentially methylated loci section. The data demonstrated that many genes have multiple CpGs that are hyper- or hypo-methylated. For example, COL1A1 has 41 loci, and 4 are hypomethylated in RA (P<10⁻⁶) giving a “relative enrichment” of 79-fold compared to OA. Relative enrichment for MEFV (pyrin) hypomethylation is nearly 200-fold. Of interest, 4 of 16 loci in the TNF promoter are hypermethylated in RA (relative enrichment-451; P<10⁻⁹), suggesting that TNF regulation might be under the control of DNMTs in some patients. 207 genes were either enriched for multiple hyper- or hypomethylated loci (TABLE 1). Representative examples of hypomethylated- (hypo-) and hypermethylated- (hyper-) differentially methylated genes are shown in TABLE 3.

TABLE 3

| | | No. of | | | |
|---|---|---|---|---|---|
| | | differentially | Total | | |
| | | methylated | loci | | Enrich- |
| Status | | loci beneath | on | P-value for | ment |
| in RA | Gene | cut-off | array | enrichment | factor |
| hypo | LOC146880 | 9 | 32 | 9.96E−18 | 245.34 |
| hypo | SH3D20 | 6 | 15 | 5.58E−14 | 487.22 |
| hypo | TACC2 | 7 | 70 | 4.60E−11 | 87.23 |
| hypo | KCNJ9 | 4 | 15 | 1.95E−08 | 251.27 |
| hypo | FUT4 | 4 | 20 | 4.90E−08 | 200.26 |
| hypo | ARHGAP27 | 4 | 25 | 2.45E−07 | 130.45 |
| hypo | OLFML3 | 3 | 9 | 2.97E−07 | 439.51 |
| hypo | ACTN1 | 4 | 42 | 3.73E−07 | 116 |
| hypo | TRIM15 | 4 | 82 | 3.79E−07 | 115.32 |
| hypo | PDZRN3 | 4 | 50 | 9.44E−07 | 88.29 |
| hypo | COL1A1 | 4 | 41 | 1.26E−06 | 79.55 |
| hypo | CD93 | 3 | 15 | 2.44E−06 | 200.26 |
| hypo | ITGA4 | 3 | 18 | 4.52E−06 | 157.79 |
| hypo | NFE2L3 | 3 | 19 | 7.74E−06 | 128.74 |
| hypo | HRNBP3 | 5 | 189 | 8.88E−06 | 25.05 |
| hypo | POMC | 3 | 26 | 1.00E−05 | 115.53 |
| hypo | SKAP1 | 3 | 27 | 1.09E−05 | 111.26 |
| hypo | T | 3 | 31 | 1.21E−05 | 106.8 |
| hypo | RHOJ | 2 | 9 | 2.16E−05 | 525.33 |
| hypo | COL22A1 | 3 | 36 | 2.26E−05 | 83.44 |
| hypo | BOC | 3 | 35 | 2.32E−05 | 81.15 |
| hypo | SCUBE1 | 2 | 23 | 6.91E−05 | 273.55 |
| hypo | ROBO4 | 2 | 15 | 7.76E−05 | 252.46 |
| hypo | HUNK | 2 | 16 | 8.36E−05 | 236.68 |
| hypo | AUTS2 | 3 | 114 | 8.36E−05 | 49.83 |
| hypo | FPR2 | 2 | 11 | 9.00E−05 | 221.46 |
| hypo | CASZ1 | 4 | 174 | 9.41E−05 | 21.76 |
| hypo | MEFV | 2 | 11 | 9.64E−05 | 200.66 |
| hypo | MXRA8 | 2 | 18 | 9.64E−05 | 210.38 |
| hypo | ARMC3 | 2 | 12 | 9.64E−05 | 203.01 |
| hypo | STX1B | 2 | 15 | 9.64E−05 | 199.51 |
| hypo | USP54 | 2 | 9 | 9.64E−05 | 193.85 |
| hypo | PLCH2 | 3 | 64 | 0.000112844 | 40.89 |
| hypo | FXYD7 | 2 | 17 | 0.000112844 | 176.04 |
| hypo | INSM1 | 2 | 13 | 0.000113996 | 169.79 |
| hypo | MYEF2 | 2 | 13 | 0.000113996 | 169.79 |
| hypo | P2RY6 | 2 | 21 | 0.000156705 | 142.51 |
| hypo | CA4 | 2 | 15 | 0.000227225 | 116.31 |
| hypo | AXIN2 | 2 | 37 | 0.000287729 | 102.35 |
| hypo | SPSB1 | 2 | 46 | 0.000287729 | 102.78 |
| hypo | KANK4 | 2 | 21 | 0.000316358 | 95.36 |
| hypo | APCDD1 | 2 | 20 | 0.000419791 | 81.53 |
| hypo | B3GNTL1 | 3 | 158 | 0.000474472 | 23.13 |
| hypo | ANGPT1 | 2 | 24 | 0.000585029 | 67.95 |
| hypo | PRRX1 | 2 | 27 | 0.000625725 | 64.62 |
| hypo | COL6A1 | 2 | 33 | 0.000696287 | 60.68 |
| hypo | LRIG1 | 2 | 46 | 0.000726192 | 59.28 |
| hypo | GLIS1 | 2 | 50 | 0.000828923 | 54.54 |
| hypo | ST14 | 2 | 43 | 0.000921733 | 51.33 |
| hypo | SYT7 | 2 | 54 | 0.001010062 | 48.83 |
| hypo | PHC2 | 2 | 34 | 0.001014634 | 47.96 |
| hypo | PLXNC1 | 2 | 34 | 0.001014634 | 47.96 |
| hypo | PKNOX2 | 2 | 63 | 0.001243393 | 43.29 |
| hypo | ODZ4 | 2 | 148 | 0.001280632 | 42.51 |
| hypo | MYO7A | 2 | 45 | 0.001280907 | 42.08 |
| hypo | EBF2 | 2 | 47 | 0.001382296 | 40.29 |
| hypo | NXN | 3 | 193 | 0.002031781 | 12.67 |
| hypo | PRKAR1B | 3 | 224 | 0.002535422 | 11.68 |
| hypo | SYNJ2 | 2 | 68 | 0.002651843 | 27.84 |
| hypo | MAML2 | 2 | 70 | 0.002780925 | 27.05 |
| hypo | GAS7 | 2 | 72 | 0.003896102 | 22.65 |
| hypo | MYT1L | 2 | 170 | 0.006150038 | 17.6 |
| hypo | SMOC2 | 2 | 164 | 0.01010976 | 13.46 |
| hyper | LOC90834 | 8 | 11 | 7.31E−18 | 375.88 |
| hyper | BRD1 | 8 | 42 | 1.65E−12 | 98.45 |
| hyper | C6orf25 | 5 | 42 | 1.90E−09 | 208.6 |
| hyper | PCSK6 | 7 | 65 | 2.09E−09 | 55.66 |
| hyper | LOC100292680 | 4 | 13 | 2.07E−08 | 291.99 |
| hyper | PPM1L | 5 | 37 | 6.18E−08 | 88.51 |
| hyper | FERMT3 | 4 | 21 | 1.05E−07 | 180.76 |
| hyper | TES | 4 | 21 | 3.42E−07 | 132.58 |
| hyper | PHYHD1 | 3 | 9 | 1.09E−06 | 316.32 |
| hyper | IGSF6 | 3 | 6 | 1.21E−06 | 275.53 |
| hyper | UACA | 3 | 22 | 2.44E−06 | 238.95 |
| hyper | TNF | 4 | 27 | 2.66E−06 | 71.05 |
| hyper | PRMT7 | 3 | 24 | 2.98E−06 | 219.03 |
| hyper | SEC14L3 | 3 | 9 | 3.07E−06 | 197 |
| hyper | HSD3B7 | 3 | 17 | 3.07E−06 | 208.59 |
| hyper | APP | 2 | 19 | 3.30E−06 | 2002.59 |
| hyper | MYPN | 3 | 11 | 3.44E−06 | 189.82 |
| hyper | HBEGF | 3 | 10 | 3.74E−06 | 177.3 |
| hyper | SLC22A1 | 3 | 13 | 3.74E−06 | 182.93 |
| hyper | LOC100271831 | 3 | 9 | 5.20E−06 | 151.33 |
| hyper | GPR1 | 3 | 14 | 6.06E−06 | 149.15 |
| hyper | NINJ2 | 4 | 39 | 6.06E−06 | 53.01 |
| hyper | GDPD3 | 3 | 10 | 6.90E−06 | 136.2 |
| hyper | C21orf34 | 3 | 16 | 8.70E−06 | 130.5 |
| hyper | KHDRBS3 | 3 | 17 | 1.24E−05 | 115.58 |
| hyper | TRERF1 | 4 | 50 | 1.49E−05 | 41.35 |
| hyper | COL4A2 | 5 | 139 | 1.53E−05 | 22.99 |
| hyper | MIRLET7C | 2 | 4 | 2.05E−05 | 591 |
| hyper | SPATA18 | 3 | 27 | 3.95E−05 | 77.34 |
| hyper | SEMA6D | 3 | 22 | 5.67E−05 | 65.4 |
| hyper | METTL9 | 3 | 25 | 5.67E−05 | 66.13 |
| hyper | TIMP2 | 4 | 64 | 5.67E−05 | 28.37 |
| hyper | KIAA1949 | 4 | 100 | 6.11E−05 | 27.84 |
| hyper | NRM | 2 | 43 | 8.35E−05 | 299.71 |
| hyper | NSMCE2 | 3 | 32 | 0.000105867 | 51.66 |
| hyper | SLC9A1 | 3 | 27 | 0.000109957 | 50.44 |
| hyper | C17orf99 | 2 | 10 | 0.000113832 | 236.4 |
| hyper | MIR1301 | 2 | 6 | 0.000143314 | 197 |
| hyper | PLXNA2 | 3 | 45 | 0.00015859 | 43.66 |
| hyper | GALNT12 | 2 | 9 | 0.00018091 | 176.15 |
| hyper | STX2 | 3 | 38 | 0.000181317 | 40.8 |
| hyper | CPT1A | 3 | 59 | 0.000185452 | 40.31 |
| hyper | EHD4 | 3 | 36 | 0.000185452 | 39.97 |
| hyper | MYH15 | 2 | 14 | 0.000191884 | 168.86 |
| hyper | FGL2 | 2 | 6 | 0.000226795 | 144.6 |
| hyper | RPH3AL | 4 | 154 | 0.000226795 | 18.08 |
| hyper | SCARA5 | 3 | 39 | 0.000253629 | 34.92 |
| hyper | BTC | 2 | 14 | 0.000270028 | 135.57 |
| hyper | CETN1 | 2 | 11 | 0.00029116 | 126.55 |
| hyper | NPL | 2 | 8 | 0.000332725 | 113.5 |
| hyper | LARP4 | 2 | 20 | 0.000332725 | 118.2 |
| hyper | NADK | 3 | 47 | 0.000334772 | 30.61 |
| hyper | ITPK1 | 3 | 65 | 0.000345734 | 30.23 |
| hyper | ZEB2 | 3 | 59 | 0.000346791 | 30.05 |
| hyper | CCDC25 | 2 | 12 | 0.000360628 | 106.54 |
| hyper | TMOD4 | 2 | 9 | 0.000360628 | 106.58 |
| hyper | EGF | 2 | 13 | 0.000360628 | 107.08 |
| hyper | SLC1A2 | 2 | 32 | 0.000360628 | 109.52 |
| hyper | ADCK5 | 2 | 22 | 0.000364838 | 107.45 |
| hyper | RNF165 | 2 | 16 | 0.000413716 | 99.09 |
| hyper | CSNK1G2 | 3 | 53 | 0.000425925 | 27.15 |
| hyper | ERRFI1 | 2 | 20 | 0.000448119 | 94.9 |
| hyper | ESCO2 | 2 | 14 | 0.000464905 | 91.32 |
| hyper | CHST11 | 3 | 55 | 0.000464905 | 26.16 |
| hyper | MUC6 | 3 | 56 | 0.00047946 | 25.69 |
| hyper | ITGB8 | 2 | 13 | 0.00050411 | 84.78 |
| hyper | ST5 | 3 | 71 | 0.00050411 | 24.97 |
| hyper | FANCA | 2 | 28 | 0.000525004 | 84.43 |
| hyper | MYF6 | 2 | 11 | 0.00055928 | 78.87 |
| hyper | SETD1A | 2 | 30 | 0.000588655 | 78.8 |
| hyper | RUFY3 | 2 | 17 | 0.000595625 | 77.05 |
| hyper | MYOM1 | 2 | 12 | 0.000597351 | 75.67 |
| hyper | ARL4D | 2 | 15 | 0.000638325 | 73.47 |
| hyper | NXPH2 | 2 | 21 | 0.000774146 | 66.29 |
| hyper | MGAT3 | 2 | 18 | 0.000776579 | 65.67 |
| hyper | AKT3 | 2 | 30 | 0.000841298 | 63.26 |
| hyper | RELL1 | 2 | 23 | 0.000896152 | 60.52 |
| hyper | CARS | 2 | 23 | 0.000896152 | 60.52 |
| hyper | TRAPPC9 | 4 | 215 | 0.000916221 | 11 |
| hyper | LZTS1 | 2 | 22 | 0.000916221 | 59.54 |
| hyper | PPP2R5C | 2 | 59 | 0.000924708 | 59.4 |
| hyper | DLX3 | 2 | 16 | 0.000963235 | 56.75 |
| hyper | AMBRA1 | 2 | 28 | 0.000986075 | 56.62 |
| hyper | SDCBP2 | 2 | 24 | 0.001039634 | 54.58 |
| hyper | LMBRD1 | 2 | 17 | 0.00105958 | 53.41 |
| hyper | ARHGAP1 | 2 | 18 | 0.00106039 | 53.29 |
| hyper | TBCD | 5 | 352 | 0.001086318 | 7.34 |
| hyper | ACSL1 | 2 | 30 | 0.001086318 | 52.85 |
| hyper | PLCB3 | 2 | 26 | 0.001238237 | 49.17 |
| hyper | MAP3K1 | 2 | 24 | 0.001394061 | 45.92 |
| hyper | LRRFIP1 | 2 | 76 | 0.001408026 | 46.11 |
| hyper | BAI2 | 2 | 36 | 0.001513586 | 44.04 |
| hyper | ZNRF1 | 2 | 26 | 0.001594799 | 42.39 |
| hyper | ITGBL1 | 2 | 23 | 0.001628294 | 41.71 |
| hyper | SPPL2B | 2 | 38 | 0.001642638 | 41.72 |
| hyper | PIGV | 2 | 23 | 0.001779686 | 39.48 |
| hyper | KLF12 | 2 | 40 | 0.001784969 | 39.63 |
| hyper | FOXO1 | 2 | 32 | 0.002026288 | 36.94 |
| hyper | C1QTNF1 | 2 | 39 | 0.002125118 | 35.69 |
| hyper | NCK2 | 2 | 53 | 0.002125118 | 35.81 |
| hyper | CYTH1 | 2 | 37 | 0.002143776 | 35.4 |
| hyper | APOLD1 | 2 | 34 | 0.002203548 | 34.76 |
| hyper | HTRA1 | 2 | 38 | 0.002233352 | 34.47 |
| hyper | CCDC146 | 2 | 28 | 0.002665635 | 30.98 |
| hyper | CRYL1 | 2 | 42 | 0.002665635 | 31.19 |
| hyper | COL4A1 | 2 | 71 | 0.003503044 | 26.73 |
| hyper | GPR133 | 3 | 165 | 0.003819221 | 10.75 |
| hyper | PHACTR2 | 2 | 40 | 0.004172106 | 23.98 |
| hyper | ANK3 | 2 | 38 | 0.004173533 | 23.89 |
| hyper | RPTOR | 5 | 432 | 0.004520935 | 5.02 |
| hyper | CACNA2D3 | 2 | 76 | 0.005405541 | 20.86 |
| hyper | LHFPL2 | 2 | 44 | 0.005447591 | 20.64 |
| hyper | TG | 2 | 47 | 0.00554287 | 20.41 |
| hyper | KANK2 | 2 | 45 | 0.005602318 | 20.18 |
| hyper | SRPK2 | 2 | 45 | 0.005602318 | 20.18 |
| hyper | PITPNM2 | 2 | 48 | 0.005684708 | 19.98 |
| hyper | ADAM12 | 2 | 52 | 0.005720838 | 19.88 |
| hyper | MICAL3 | 2 | 47 | 0.005961209 | 19.32 |
| hyper | FILIP1L | 2 | 45 | 0.005961209 | 19.28 |
| hyper | GALNS | 2 | 73 | 0.006100028 | 19.07 |
| hyper | ARHGAP26 | 2 | 61 | 0.006687473 | 18.07 |
| hyper | ARHGEF7 | 2 | 74 | 0.006937548 | 17.7 |
| hyper | WIPI2 | 2 | 64 | 0.007267014 | 17.22 |
| hyper | PTPN14 | 2 | 59 | 0.00801136 | 16.26 |
| hyper | CUX1 | 2 | 215 | 0.00801136 | 16.3 |
| hyper | SORBS2 | 2 | 81 | 0.00806007 | 16.17 |
| hyper | HPCAL1 | 2 | 60 | 0.008172002 | 15.99 |
| hyper | DNMT3A | 2 | 77 | 0.00881667 | 15.35 |
| hyper | TNS3 | 2 | 79 | 0.009173569 | 14.96 |
| hyper | SLC6A3 | 2 | 69 | 0.009173569 | 14.98 |
| hyper | PTPRG | 2 | 96 | 0.01090562 | 13.64 |
| hyper | MIR548G | 2 | 65 | 0.01127773 | 13.35 |
| hyper | ASAP2 | 2 | 70 | 0.01183843 | 12.97 |
| hyper | C3orf26 | 2 | 67 | 0.01183843 | 12.95 |
| hyper | NAV1 | 2 | 68 | 0.01212126 | 12.76 |
| hyper | CREB5 | 2 | 82 | 0.01424866 | 11.7 |
| hyper | CTBP2 | 2 | 102 | 0.02110821 | 9.4 |
| hyper | TCERG1L | 2 | 105 | 0.02218092 | 9.14 |
| hyper | SHANK2 | 3 | 262 | 0.02489354 | 4.97 |
| hyper | CMIP | 2 | 113 | 0.02508337 | 8.49 |
| hyper | BAT2 | 2 | 161 | 0.02704674 | 8.14 |
| hyper | EIF2C2 | 2 | 117 | 0.02919953 | 7.76 |
| hyper | RPS6KA2 | 2 | 244 | 0.02919953 | 7.78 |
| hyper | PRKCZ | 2 | 263 | 0.03328032 | 7.22 |

### Correlation of Gene Expression and Methylation Status

[0200] Functional analysis of the differentially methylated was performed by evaluating expression of several representative genes with hypo- and normally methylated loci in RA FLS by qPCR. FIG. 3 shows the results for several hypomethylated genes. These genes included ITGA4, COL1A1, MYEF2, SYNJ2, CHI3L1, STK24, and MAP3K5. As a group, expression of genes with hypomethylated loci was significantly greater in RA than OA FLS (n=7 genes; P<0.01). On the other hand, expression of normally methylated genes was similar in RA and OA FLS (n=7 genes; P>0.10).

[0201] Higher expression in RA was demonstrated for most hypomethylated genes, and the differences were significant when the genes were evaluated as a group (P<0.01 for RA vs. OA). Some genes, such as STK24, were not significantly different in RA and could reflect more than methylation in vitro. Nevertheless, these data demonstrated that methylation is reflected in gene expression patterns in RA and could contribute to production of inflammatory mediators in RA.

### Pathway and Gene Ontology Analyses

[0202] Biological pathways and gene ontologies that are enriched with differentially methylated loci were evaluated. Loci were mapped to pathways via their relationships to genes within pathways for KEGG pathways and for GO using all 1,859 differentially methylated loci identified (TABLE 1). Pathway analysis showed that interactions between cells and the matrix and cell recruitment were especially prominent in the differentially methylated group, including focal adhesion, mTOR signaling, cell adhesion molecules, leukocyte transendothelial interactions, and ECM-receptor interactions. FIG. 4 depicts the pathway ‘Focal adhesion’, which was enriched with loci that are significantly less methylated in RA. A list of differential GO terms and an analysis of hypomethylated and hypermethylated terms in RA with marginal probability>0.5 is shown in TABLE 4.

TABLE 4

| | | Marginal | |
|---|---|---|---|
| | ID | probability | Name |
| RA | GO: 0003713 | 0.99836 | Transcription coactivator activity |
| Hypomethylated | GO: 0051117 | 0.98512 | ATPase binding |
| | GO: 0031519 | 0.95603 | PcG protein complex |
| | GO: 0045944 | 0.92189 | Positive regulation of transcription |
| | | | from RNA polymerase II promoter |
| | GO: 0019897 | 0.81989 | Extrinsic to plasma membrane |
| | GO: 0008134 | 0.81119 | Transcription factor binding |
| | GO: 0015467 | 0.78847 | G-protein activated inward rectifier |
| | | | potassium channel activity |
| | GO: 0017157 | 0.76244 | Regulation of exocytosis |
| | GO: 0007369 | 0.74990 | Gastrulation |
| | GO: 0035257 | 0.70985 | Nuclear hormone receptor binding |
| | GO: 0004221 | 0.59229 | Ubiquitin thiolesterase activity |
| | GO: 0004629 | 0.55446 | Phospholipase C activity |
| | GO: 0009897 | 0.53595 | External side of plasma membrane |
| | GO: 0015629 | 0.52284 | Actin cytoskeleton |
| | GO: 0022610 | 0.51076 | Biological adhesion |
| RA | GO: 0005794 | 0.77055 | Golgi apparatus |
| Hypermethylated | GO: 0007166 | 0.76581 | Cell surface receptor linked |
| | | | signaling pathway |
| | GO: 0005488 | 0.60305 | Binding |

[0203] Of interest, the number of GO terms associated with hypomethylated DNA in RA was greater than for hypermethylated DNA (15 vs. 3). Thus, hypomethylated terms clustered with hypomethylation in RA, especially related to membrane and transcription factor biology. This analysis can be used to identify novel therapeutic targets for RA. More examples of pathways useful to identify novel therapeutic targets for RA are shown in TABLE 5.

TABLE 5

| | | | | DM | | |
|---|---|---|---|---|---|---|
| | | | | loci | Total | |
| Status | | | Enrichment | in | loci in | |
| in RA | Path group | Path name | factor | path | path | P-value |
| hypo | Cell Communication | Focal adhesion | 2.615457643 | 20 | 6226 | 0.007005624 |
| hypo | Glycan Biosynthesis | Glycosphingolipid | 9.88097044 | 5 | 412 | 0.007005624 |
| | and Metabolism | biosynthesis - lacto | | | | |
| | | and neolacto series | | | | |
| hypo | Cardiovascular | Arrhythmogenic right | 3.862390722 | 10 | 2108 | 0.007378046 |
| | Diseases | ventricular | | | | |
| | | cardiomyopathy | | | | |
| | | (ARVC) | | | | |
| hypo | Signaling Molecules | ECM-receptor | 3.303009997 | 12 | 2958 | 0.007378046 |
| | and Interaction | interaction | | | | |
| hypo | Infectious Diseases | Amoebiasis | 3.278225332 | 11 | 2732 | 0.01087908 |
| hypo | Immune System | Leukocyte | 3.339589681 | 10 | 2438 | 0.01366817 |
| | | transendothelial | | | | |
| | | migration | | | | |
| hypo | Digestive System | Protein digestion | 3.090564183 | 9 | 2371 | 0.03435163 |
| | | and absorption | | | | |
| hypo | Endocrine System | Adipocytokine | 3.505131458 | 7 | 1626 | 0.04363638 |
| | | signaling pathway | | | | |
| hypo | Signaling Molecules | Cell adhesion | 2.542760663 | 10 | 3202 | 0.06198887 |
| | and Interaction | molecules (CAMs) | | | | |
| hypo | Energy Metabolism | Nitrogen metabolism | 6.691988748 | 3 | 365 | 0.08527128 |
| hyper | Signal Transduction | ErbB signaling | 2.295320174 | 18 | 2272 | 0.0580967 |
| | | pathway | | | | |
| hyper | Infectious Diseases | African | 4.05913013 | 8 | 571 | 0.0580967 |
| | | trypanosomiasis | | | | |
| hyper | Lipid Metabolism | Primary bile acid | 5.625639088 | 4 | 206 | 0.0950006 |
| | | biosynthesis | | | | |
| hyper | Immune System | Fc epsilon RI | 2.345183916 | 13 | 1606 | 0.0950006 |
| | | signaling pathway | | | | |
| hyper | Signal Transduction | mTOR signaling | 2.295464506 | 14 | 1767 | 0.0950006 |
| | | pathway | | | | |
| hyper | Endocrine System | Adipocytokine | 2.316337866 | 13 | 1626 | 0.0950006 |
| | | signaling pathway | | | | |

### Network Analysis

[0204] Cytoscape was used to evaluate networks affected by differential methylation and to determine likely targets for subsequent analysis. In a preliminary study, interactions between hypomethylated genes and their neighbors were evaluated. A portion of the Cytoscape analysis is shown in FIG. 5. Significant nodes included key hypomethylated loci (e.g., STAT3, MAP3K5, CHI3L1, STK24) (circle size indicates degree of hypomethylation). FIG. 5 depicts how these loci interact with each other and with multiple additional pathways, and describes how the methylated genes might regulate inflammatory responses in RA. This map shows only a fraction of the interactions and provides an unbiased view of how methylation affects synoviocyte function.

### Basal Expression of DNMTs

[0205] After discovering that RA FLS are differentially methylated, DNMT expression in resting cultured FLS was examined. Synoviocytes were isolated from RA and OA synovium at the time of total joint replacement. 4^{th} through 6^{th} passage cells were evaluated by qPCR. FIG. 6 depicts graphs of relative expression of DNMT1, DNMT3a, and DNMT3b in OA FLS and RA FLS. Unexpectedly, expression levels of DNMTs in RA and OA were found to be similar. In view of these findings, changes in DNMT expression in FLS was examined, and the role of cytokines, e.g., IL-1, in RA, that may contribute to a DNMT profile was examined.

Decreased DNMT1 Gene Expression after IL-1 Stimulation

[0206] FLS were stimulated with IL-1 for 24 hr and DNMT expression was determined by qPCR. Unexpectedly, DNMT1 and DNMT3a gene expression significantly decreased after exposure to modest concentrations of IL-1 (FIG. 7). After noting that IL-1 decreased DNMT mRNA, time course experiments were performed to assess the kinetics of the effect. Cells were stimulated with 1 ng/ml of IL-1 for various time periods and qPCR was performed. DNMT mRNA levels begin to decrease within 2 to 8 hrs after exposure to the cytokine (data not shown).

### IL-1 Decreases DNMT Function in FLS

[0207] A functional assay was performed to determine if IL-1 suppresses DNA methylation activity of the DNMTs. FLS were stimulated with 1 ng/ml of IL-1 for 14 days and extracts were assayed using the DNMT Activity/Inhibition Assay (Active Motif Co., Carlsbad, Calif.), which is an ELISA-based method that measures methylation of a CpG-enriched DNA substrate. As shown in FIG. 8, a significant decline in total DNMT function (p<0.05) was observed.

### Discussion

[0208] FLS form the synovial intimal lining and play an integral role in the pathogenesis of RA by producing key cytokines, small molecule mediators, and proteases. While osteoclasts are the primary effectors of bone erosions in arthritis, FLS are responsible for cartilage damage by virtue of their ability to adhere to and invade the cartilage extracellular matrix. This capacity requires homotypic aggregation mediated by the adhesion molecule cadherin-11, which directs intimal lining formation and supports an invasive phenotype. Understanding the molecular mechanisms that regulate FLS activation could provide insights into the pathogenesis of RA and lead to novel therapeutic strategies. In the present application, the epigenetic profile of RA was evaluated by exploring a newly discovered DNA methylation signature that could potentially affect adaptive and innate immune functions, through their effects on synoviocytes and immune cells in the blood and joint.

[0209] Rheumatoid FLS exhibit a unique aggressive phenotype that contributes to the cytokine milieu and joint destruction. Functional studies suggest that RA cells are imprinted in situ and maintain these features after many passages in tissue culture. For example, RA FLS, unlike OA or normal synoviocytes, adhere to and invade cartilage explants in SCID mice. RA FLS can grow under anchorage-independent conditions, are less susceptible to contact inhibition, resistant to apoptosis. RA synoviocytes can potentially “metastasize” and transfer the invasive phenotype from one joint to another.

[0210] Several mechanisms have been implicated in this persistently aggressive phenotype, including abnormal sentrin or PTEN expression, preferential shunting of stressed cells to DNA repair rather than programmed cell death., and somatic mutations of regulatory genes. Microsatellite instability has also been identified in RA synovium, in part due to decreased DNA repair. These genetic modifications potentially serve to amplify disease severity.

[0211] While the focus on gene sequences in FLS and in disease association studies has provided important insights, other mechanisms can change cell phenotype. Epigenetics, for instance, can profoundly influence cell activation and gene expression through a variety of mechanisms, including DNA methylation, histone modification, and microRNA production. DNA methylation could be especially relevant in RA, in light of role in neoplasia and embryonic growth. Normal ontogeny relies on a carefully orchestrated sequence of DNA methylation to repress regulatory genes by methylating cytosine in CpG loci, either in promoters or in genes themselves. Methylation abnormalities have been associated with many diseases, most notably cancer where renewed expression or inappropriate suppression of genes allows cells to escape normal homeostatic controls. Hypomethylation and hypermethylation are associated with many malignancies and can contribute to transformation.

[0212] DNA methyltransferases (DNMTs) are responsible for initiating and maintaining CpG methylation in the human genome by converting cytosine to methylcytosine. In mammalian cells, DNMT1, DNMT3a, and DNMT3b are the primary enzymes responsible for CpG methylation. DNMT3a and DNMT3b mainly regulate de novo methylation while DNMT1 maintains methylation, especially during cell division. DNMT expression and DNA methylation are not immutable but are influenced by the environment and modify gene expression throughout life and even in progeny. For instance, pregnant mice fed a diet rich in methyl donors give birth to pups with increased levels of DNA methylation and increased airway reactivity in murine asthma for at least two subsequent generations.

[0213] Global hypomethylation has been described in peripheral blood mononuclear cells of patients with RA, although the specific genes involved are not known. Modest global hypomethylation was also reported in cultured RA FLS when compared to OA cells. In contrast, our studies showed that global methylation levels are similar in OA and RA FLS using two different techniques (ELISA-based and chip based). Thus, RA FLS do not appear to be hypomethylated overall, but like neoplasia, display a pattern of hypermethylated and hypomethylated genes.

[0214] The ILLUMINA chip analysis identified distinct methylation profiles of OA and RA FLS involving 1859 loci located in 1206 genes. Cluster analysis showed that the two types of FLS could be easily distinguished based solely on the methylation patters. The results were confirmed using a variety of additional analyses that reduced the possibility of random chance as an explanation. Additional analysis identified 207 genes with multiple hyper- or hypomethylated loci. Many of these genes play a key role in inflammation, matrix regulation, leukocyte recruitment and immune responses. Gene expression levels correlated with methylation status, with high expression in hypomethylated genes in RA FLS and normal expression in genes that were not differentially methylated. Given the number of influences that can potentially alter gene expression in vitro, the general concordance between methylation and mRNA levels was striking.

[0215] The data described herein provide evidence that epigenetic changes are present in RA synoviocytes and that they persist in culture. Imprinting could potentially occur before clinical disease and contribute to susceptibility. Alternatively, and perhaps more likely, the changes can be induced after initiation of synovitis. In the latter situation, the inflammatory milieu could potentially imprint synoviocytes and affect their function for many passages. Thus, local inflammation could potentially alter expression of enzymes responsible for initiating and maintaining DNA methylation. This process imprints synoviocytes, peripheral blood cells that are present in synovium for a short period of time, and immune cells, alters their behaviour, and ultimately changes the natural history of disease.

[0216] The ability to distinguish RA and control cells based solely on the DNA methylome could provide major insights into how the epigenetic profile of various tissues contribute to the pathogenesis of RA. In addition to identifying novel targets among the differentially methylated genes, it could also lead to interesting diagnostic or personalized medicine applications after sufficient data are available to correlate the methylome to phenotype.

### Example 2

### Methylation of Loci in Peripheral Blood Cells

[0217] Isolation of Genomic DNA from Peripheral Blood Cells

[0218] Approximately 6-8 ml of blood was drawn into a DB CPT tube (BD cat#362760) and inverted 10 times. Four tubes per patient were drawn. The tubes were stored at room temperature until processed. Processing was performed in less than four hours after being drawn. The tubes were spun 30 minutes at 3000 rpm. The mononuclear cell layer was carefully removed and washed in at least 10 volumes of cold PBS with 0.1% BSA (Buffer 1: PBS Invitrogen cat#14190, BSA Gemini cat#700-100P). Mononuclear cells were then spun at 1600 rpm for 10 minutes. Cells were then resuspended in 3 ml of cold PBS supplemented with 0.1% BSA and 2 mM EDTA (Buffer 2: Buffer 1 plus EDTA Invitrogen cat#15575020). Cells were then counted and divided into 2 ml eppendorf tubes as follows: 0.5 ml for T-cell isolation, 1.5 ml for B-cell isolation, 0.75 ml for monocyte isolation, and 0.25 ml for whole PBMCs. These were spun again at 1600 rpm for 10 minutes and supernatants were discarded. The whole PBMC fraction was frozen while the others continued the specific cell type separation.

Separation of PBMCs into Specific Cell Types

[0219] Cells in the PBMC preparation above were separated into B cell preparations, T cell preparations and monocyte preparations as follows. Dynabeads magnetic beads (CD19 pan B Invitrogen cat#111-43D, CD2 pan T Invitrogen cat#111-59D, CD14 monocyte Invitrogen cat#111-49D) were used for the specific cell-type isolation. The magnetic bead mixtures were added to 1 ml of cold Buffer 2 according to the number of cells (50 μl T-cell bead isolation mixture per 10⁷ cells, 25 μl B-cell bead isolation mixture per 2.5×10⁷ cells, and 25 μl monocyte isolation bead mixture per 10⁷ cells), mixed well and applied to the magnet for 3 minutes to wash the beads. Supernatants were discarded. Mononuclear cell pellets were then gently resuspended in 1.5 ml of cold buffer 2 and added to their appropriate bead isolation mixture. The bead/cell mixture was incubated at 4° C. while turning end-over-end for 20 minutes. The bead/cell mixture was then applied to the magnet for 3 minutes and supernatants were discarded. The bead/cell mixture was then washed 3 times by removing from the magnet, adding 1 ml cold Buffer 2, gently mixing, reapplying to the magnet, and discarding the supernatant. The cell/bead mixture was then frozen until DNA Isolation was performed. The DNA isolation was performed with DNeasy Blood and tissue Kit (Qiagen cat#69504). The protocol for cultured cells was followed and included the recommendation of RNase A (Qiagen cat#19101) treatment. DNA eluents were then concentrated using Amicon ultra 30K filers (Millipore cat# UFC503096). Concentrated DNA was then quantified using Quant-it Picogreen reagent (Invitrogen cat# P7589). Concentrations were then standardized to 100 ng/μl.

[0220] PBMC preparations may also be separated into other cell types, such as white blood cells, neutrophils, eosinophils, basophils, lymphocytes, plasma cells, natural killer cells, and dendritic cells using procedures such as those described above or other methods familiar to those skilled in the art. Macrophages may be separated from other cell types using methods well known in the art. In some embodiments, particular cell types can be enriched and/or isolated using a variety of methods, such methods are well known in the art and include immunological methods, fluorescent activated cell sorting (FACS) methods, and affinity chromatography methods. For example, cells such as eosinophils can be enriched/isolated using antibodies specific to specific receptors on the cell surface such as L-selectin, and VLA-4 (Sriramarao P., et al., (1994) J. Immunol. 153:4238-46, incorporated by reference in its entirety) Neutrophils may be isolated using density gradients or using antibodies specific to other cell surface receptors (Firestein G. S., et al., (1995) J. Immunol. 154:326-34, incorporated by reference in its entirety).

Analysis of Methylation States of Loci in PBMCs or Specific Cell Types Separated from PBMC Preparations in Individuals with RA or OA

[0221] Samples of genomic DNA are obtained from peripheral blood mononuclear cells or specific cell types separated from PBMC preparations as described above. The samples are obtained from individuals with RA, individuals with OA, individuals with a known prognosis for rheumatoid arthritis or osteoarthritis, individuals with a known reponse to treatment for rheumatoid arthritis or osteoarthritis and control subjects without rheumatoid arthritis, without osteoarthritis, without the known prognosis for rheumatoid arthritis or osteoarthritis, or without the known response to treatment for rheumatoid arthritis or osteoarthritis using methods described herein. The methylation states of loci for each set of genomic DNA is determined as described herein for genomic DNA from FLS cells.

[0222] Hypomethylated and hypermethylated loci in individuals with RA, individuals with OA, individuals with a known prognosis for rheumatoid arthritis or osteoarthritis, individuals with a known response to treatment for rheumatoid arthritis or osteoarthritis are identified by comparing the methylation states of the loci to the methylation states of the loci in control subjects without rheumatoid arthritis, without osteoarthritis, without the known prognosis for rheumatoid arthritis or osteoarthritis, or without the known response to treatment for rheumatoid arthritis or osteoarthritis respectively using the methods described herein for FLS cells.

[0223] In some embodiments, hypomethylated and hypermethylated loci in RA genomic DNA relative to the methylation state of loci in OA genomic DNA are identified. In other embodiments hypomethylated and hypermethylated loci in RA genomic DNA relative to the methylation state of loci in genomic DNA from control subjects without RA are identified. In some embodiments, hypomethylated and hypermethylated loci in OA genomic DNA relative to the methylation state of loci in genomic DNA are identified from control subjects without OA are identified.

[0224] Genes with multiple differentially methylated loci are analyzed as described herein for genomic DNA from FLs cells, Gene expression and methylation status are analyzed as described herein for genomic DNA from FLs cells, Pathway analyses and gene ontology analyses are performed as described herein for genomic DNA from FLs cells. Network and DNMT analyses as described herein for genomic DNA from FLs cells.

### Example 3

### Evaluation of a Subject for RA,OA, Individuals with RA, a Particular Prognosis for Rheumatoid Arthritis or Osteoarthritis, or a Particular Response to Treatment for Rheumatoid Arthritis or Osteoarthritis

[0225] Genomic DNA is obtained from a subject and the methylation states of one or more loci having differential methylation in individuals with individuals with RA, individuals with OA, individuals with a particular prognosis for rheumatoid arthritis or osteoarthritis, or individuals with a particular response to treatment for rheumatoid arthritis or osteoarthritis is determined.

[0226] In some embodiments, the methylation state of the one or more differentially methylated loci in the genomic DNA from the subject is compared with the methylation state of the one or more differentially methylated loci in normal tissue, tissue from a subject with a known prognosis, or tissue from a subject with a known response to treatment. In other embodiments, the methylation state of the one or more differentially methylated loci in the genomic DNA from the subject is compared with a methylation state of the one or more differentially methylated loci known to be indicative of RA or a lack thereof, OA or a lack thereof, a particular prognosis for rheumatoid arthritis or osteoarthritis or a lack thereof, or a particular response to treatment for rheumatoid arthritis or osteoarthritis or a lack thereof.

[0227] The genomic DNA may be obtained from any desired cell type, including the cell types listed herein. For example, the genomic DNA may be obtained from FLS cells, a peripheral blood sample or a specific cell type separated from a PBMC sample obtained from a subject. If the methylation state of the one or more differentially methylated loci is a methylation state known to be indicative of RA, a particular prognosis for rheumatoid arthritis or osteoarthritis, or a particular response to treatment for rheumatoid arthritis or osteoarthritis the subject is determined to have RA, the particular prognosis for rheumatoid arthritis or osteoarthritis, or the particular response to treatment for rheumatoid arthritis or osteoarthritis. A treatment regimen consistent with this determination may then be administered.

### Example 4

### Evaluation of a Methylation State of Loci in Control Subjects Compared to Methylation State of Loci in RA FLS and OA FLS

[0228] Genomic DNA is obtained from a subject without RA and a subject without OA and the methylation states of one or more loci having differential methylation in RA FLS and OA FLS cells, respectively, is determined.

[0229] In some embodiments, the methylation state of the one or more differentially methylated loci in RA FLS and OA FLS cells is compared to a methylation state of the one or more differentially methylated loci in the genomic DNA from a subject without RA and in the genomic DNA from a subject without OA, respectively. In some embodiments, the methylation state of loci indicative of the absence of RA or OA in a subject are determined.

[0230] The genomic DNA may be obtained from any desired cell type, including the cell types listed herein. For example, the genomic DNA may be obtained from FLS cells, a peripheral blood sample or a specific cell type separated from a PBMC sample obtained from a subject. If the methylation state of the one or more differentially methylated loci is a methylation state known to be indicative of RA, a particular prognosis for rheumatoid arthritis or osteoarthritis, or a particular response to treatment for rheumatoid arthritis or osteoarthritis the subject is determined to have RA, the particular prognosis for rheumatoid arthritis or osteoarthritis, or the particular response to treatment for rheumatoid arthritis or osteoarthritis. A treatment regimen consistent with this determination may then be administered.

### Example 5

### Evaluation of Methylation State of Loci in Peripheral Blood Mononuclear Cells (PBMCs)

[0231] The methylation states of loci in PBMCs were determined with methods substantially similar to those described herein using the ILLUMINA HumanMethylation 450 BeadChip. Differentially methylated loci (DML) were identified with average methylation differences between OA and RA of >0.10. RA/OA differential methylation was conducted using a t-test. P-values were converted to q-values to account for multiple hypothesis testing, and DML with q-values<0.25 were considered to be potential PBMC biomarkers. TABLE 8 lists about 2544 RA/OA PBMC DML with associated data including the OA-RA average methylation difference, CG identifier associated with the Illumina 450K beadchip (Locus), associated genes, and the genomic location of the potentially methylated C of the CpG (+ strand) determined using the UCSC hg19 reference genome. The CpG* column of Table 8 lists values for “chromosome:chromosome co-ordinate.”

TABLE 6

| OA − | | | SEQ |
|---|---|---|---|
| RA | Locus | Associated gene | ID No. |
| 0.39071 | cg20114732 | T | 361932 |
| 0.37096 | cg03044684 | HUNK | 62005 |
| 0.36569 | cg20824939 | | 372791 |
| 0.36469 | cg19081101 | CHI3L1 | 345293 |
| 0.36368 | cg13225830 | | 243918 |
| 0.36153 | cg27244773 | ARHGAP27; ARHGAP27; | 475250 |
| | | ARHGAP27 | |
| 0.34388 | cg02792136 | DIP2C | 56847 |
| 0.33702 | cg12557114 | WISP3; WISP3 | 233566 |
| 0.33333 | cg06043820 | ZNF592 | 119061 |
| 0.33296 | cg07804470 | STK24 | 151872 |
| 0.33037 | cg12578486 | UBAC2; UBAC2; UBAC2 | 233879 |
| 0.32914 | cg18886274 | | 342488 |
| 0.32889 | cg12651286 | MMP20 | 235219 |
| 0.32591 | cg10035831 | RPTOR; RPTOR | 191245 |
| 0.32183 | cg12476044 | EGFLAM; EGFLAM; EGFLAM; | 232241 |
| | | EGFLAM; EGFLAM | |
| 0.32154 | cg16214653 | | 298250 |
| 0.32018 | cg06550177 | | 127813 |
| 0.31828 | cg06357305 | PTGIS | 124318 |
| 0.31549 | cg27250435 | | 475334 |
| 0.31524 | cg24203758 | SH3D20 | 425444 |
| 0.31391 | cg18675043 | SH3PXD2A | 338965 |
| 0.30767 | cg11173579 | HUNK | 210693 |
| 0.30665 | cg21514164 | | 383094 |
| 0.30602 | cg21670717 | | 385687 |
| 0.30248 | cg09182085 | | 176526 |
| 0.30113 | cg09230154 | MACF1; MACF1 | 177251 |
| 0.30097 | cg27642470 | DCBLD1 | 482028 |
| 0.2993 | cg23413809 | SIX2 | 412582 |
| 0.29885 | cg07474842 | MAP3K5 | 1415804 |
| 0.29665 | cg23004031 | MGMT | 405673 |
| 0.29622 | cg02727484 | KCNMA1; KCNMA1; KCNMA1; | 55565 |
| | | KCNMA1 | |
| 0.29494 | cg07227049 | VRK2; VRK2; VRK2; VRK2; | 141396 |
| | | VRK2; VRK2 | |
| 0.28978 | cg06223539 | SHANK2 | 122219 |
| 0.28958 | cg19674091 | IDH2 | 354510 |
| 0.28897 | cg06966660 | TACC2; TACC2; TACC2; TACC2 | 136119 |
| 0.28527 | cg22778178 | | 401834 |
| 0.28511 | cg12427162 | SFT2D2 | 231416 |
| 0.28455 | cg16854917 | NCRNA00085 | 309652 |
| 0.28177 | cg03834767 | CDK14 | 77306 |
| 0.28129 | cg17820022 | PLCH2 | 324801 |
| 0.27987 | cg05040219 | GLIS1 | 100492 |
| 0.27931 | cg00807684 | RBMS3; RBMS3; RBMS3 | 17055 |
| 0.27912 | cg10536999 | NFE2L3 | 200194 |
| 0.27826 | cg22458832 | | 396980 |
| 0.2773 | cg09257635 | GJC2 | 177820 |
| 0.27706 | cg24576026 | SEPT9; SEPT9 | 431206 |
| 0.27474 | cg01999051 | BRP44L | 40997 |
| 0.27386 | cg10820084 | COL1A1 | 204937 |
| 0.27361 | cg07696516 | LIMCH1; LIMCH1; LIMCH1; | 149907 |
| | | LIMCH1; LIMCH1; LIMCH1; | |
| | | LIMCH1 | |
| 0.27349 | cg10937408 | HRNBP3 | 206779 |
| 0.2732 | cg07021447 | ACTN1; ACTN1; ACTN1 | 137188 |
| 0.27261 | cg13644549 | C7orf50; C7orf50; C7orf50 | 252081 |
| 0.27247 | cg26787787 | | 467264 |
| 0.27222 | cg10881749 | | 205937 |
| 0.27192 | cg24718015 | STAT3; STAT3; STAT3 | 433677 |
| 0.27022 | cg03780701 | ADAM32 | 76382 |
| 0.26961 | cg13735018 | SYNJ2 | 254007 |
| 0.26932 | cg19391924 | HRNBP3 | 349887 |
| 0.26888 | cg13551141 | PSMB7 | 250097 |
| 0.2674 | cg14370520 | FAM188B | 267054 |
| 0.26591 | cg01660999 | ANGPT1 | 34240 |
| 0.26415 | cg13626830 | RASGRF2 | 251743 |
| 0.26352 | cg20441502 | FXYD7; FXYD1; FXYD1 | 366782 |
| 0.26348 | cg01833196 | SH3PXD2A | 37634 |
| 0.26334 | cg00369056 | | 7795 |
| 0.26334 | cg13683667 | | 252916 |
| 0.26327 | cg19576241 | | 352883 |
| 0.26302 | cg21983607 | | 390212 |
| 0.26214 | cg03666350 | | 74131 |
| 0.26137 | cg05166871 | SKAP1; SKAP1 | 102879 |
| 0.2612 | cg15366684 | ADAMTS2; ADAMTS2 | 284322 |
| 0.26116 | cg25885684 | | 451999 |
| 0.26059 | cg17290488 | C5orf45; C5orf45 | 316572 |
| 0.25763 | cg19954341 | T | 359498 |
| 0.25735 | cg20668662 | SH3PXD2A | 370194 |
| 0.25696 | cg24657523 | MYEF2 | 432522 |
| 0.25675 | cg03537386 | COL16A1 | 71519 |
| 0.25598 | cg25616600 | | 448034 |
| 0.25566 | cg20201270 | | 363196 |
| 0.25559 | cg01229787 | | 25802 |
| 0.25515 | cg08145723 | ST14 | 158133 |
| 0.25468 | cg07878514 | INSM1; INSM1 | 153203 |
| 0.25399 | cg06189394 | LRIG1 | 121568 |
| 0.25382 | cg08830502 | | 170348 |
| 0.25298 | cg05979619 | MERTK | 117911 |
| 0.25278 | cg16402635 | CASP1; CARD16; CASP1; CASP1; | 301579 |
| | | CASP1; CASP1; CARD16 | |
| 0.25223 | cg17007374 | | 311924 |
| 0.25189 | cg26681770 | PMEPA1; PMEPA1; PMEPA1; | 465572 |
| | | PMEPA1 | |
| 0.25166 | cg04649852 | | 92984 |
| 0.25103 | cg16282024 | DERL1; DERL1 | 299433 |
| 0.25043 | cg01392518 | T | 28927 |
| 0.24945 | cg05590156 | TRIO | 110699 |
| 0.24922 | cg24174557 | TMEM49 | 425007 |
| 0.24886 | cg00225902 | LRIG1 | 4852 |
| 0.24875 | cg03401875 | ADAMTS2; ADAMTS2 | 68835 |
| 0.24859 | cg23489226 | | 413717 |
| 0.24854 | cg15745401 | P2RY6; P2RY6 | 290636 |
| 0.24785 | cg24752267 | | 434286 |
| 0.24696 | cg09527270 | POMC; POMC | 182597 |
| 0.24687 | cg00145961 | NTRK3; NTRK3; NTRK3 | 3269 |
| 0.24685 | cg15323840 | SYNJ2 | 283724 |
| 0.24679 | cg11261412 | B3GNTL1 | 212263 |
| 0.24671 | cg04723534 | C2CD2 | 94311 |
| 0.2467 | cg03771840 | TRIM15 | 76209 |
| 0.24643 | cg03472954 | PRKAR1B; PRKAR1B; PRKAR1B; | 70250 |
| | | PRKAR1B; PRKAR1B; PRKAR1B | |
| 0.24643 | cg23533513 | MYO7A; MYO7A; MYO7A | 414506 |
| 0.24628 | cg19010441 | MED12L; GPR171 | 344302 |
| 0.24604 | cg06186245 | TMEM45A | 121509 |
| 0.24529 | cg23834919 | | 419111 |
| 0.24525 | cg00037856 | | 943 |
| 0.24513 | cg27338607 | | 476928 |
| 0.24455 | cg05287372 | C3orf64 | 105151 |
| 0.24329 | cg14905634 | TRHDE | 277082 |
| 0.24298 | cg11692307 | PLCH2 | 219166 |
| 0.24275 | cg04677410 | MAML2 | 93491 |
| 0.24251 | cg16561266 | LOC146880; LOC146880 | 304457 |
| 0.24244 | cg09461792 | | 181455 |
| 0.24119 | cg00548708 | | 11644 |
| 0.24101 | cg11120154 | | 209834 |
| 0.24078 | cg14587335 | HRNBP3 | 271586 |
| 0.23936 | cg09650180 | GMEB2 | 184694 |
| 0.23799 | cg09379935 | P2RY6; P2RY6 | 180013 |
| 0.23797 | cg21680719 | FHL3 | 385790 |
| 0.23791 | cg24917131 | | 437034 |
| 0.23723 | cg12097883 | LOC146880; LOC146880 | 226317 |
| 0.23698 | cg03558269 | | 71975 |
| 0.2367 | cg08870914 | | 171157 |
| 0.23667 | cg14501219 | LOC146880; LOC146880 | 269672 |
| 0.2365 | cg09180564 | OLFM3 | 176500 |
| 0.23608 | cg02477603 | | 50448 |
| 0.23603 | cg14260695 | | 264921 |
| 0.23574 | cg08613122 | PRKAR1B; PRKAR1B; PRKAR1B; | 166544 |
| | | PRKAR1B; PRKAR1B; PRKAR1B | |
| 0.23559 | cg25577130 | CA4 | 447341 |
| 0.23548 | cg08718098 | | 168443 |
| 0.23462 | cg17896243 | | 326150 |
| 0.23435 | cg09385667 | PDZRN3 | 180096 |
| 0.2343 | cg09529093 | ANGPT1 | 182630 |
| 0.23254 | cg10960920 | PGCP | 207207 |
| 0.23124 | cg07107756 | CARD14; CARD14 | 138866 |
| 0.23111 | cg07480647 | GPR153 | 145935 |
| 0.23044 | cg11218619 | | 211494 |
| 0.23008 | cg05721365 | LOC146880; LOC146880 | 113082 |
| 0.22965 | cg21531685 | PDZRN3 | 383375 |
| 0.22946 | cg12854371 | LOC146880; LOC146880 | 238254 |
| 0.22905 | cg04028695 | | 81035 |
| 0.22873 | cg05665651 | ANKRD11 | 112125 |
| 0.22861 | cg09259235 | | 177859 |
| 0.2273 | cg15341866 | | 283990 |
| 0.22729 | cg03019360 | | 61484 |
| 0.22691 | cg19409546 | | 350194 |
| 0.22689 | cg26098164 | BMP7 | 455309 |
| 0.22559 | cg23965931 | STOX2 | 421288 |
| 0.22486 | cg27292547 | | 475989 |
| 0.22459 | cg10094238 | ARHGAP27; ARHGAP27; | 192273 |
| | | ARHGAP27 | |
| 0.22433 | cg26938118 | NEDD4L; NEDD4L; NEDD4L; | 470085 |
| | | NEDD4L; NEDD4L; NEDD4L; | |
| | | NEDD4L; NEDD4L; NEDD4L | |
| 0.22395 | cg12741645 | AEN | 236560 |
| 0.22392 | cg11189268 | ARHGAP27; ARHGAP27 | 210952 |
| 0.22268 | cg10481134 | C2orf58 | 199061 |
| 0.22247 | cg25213720 | MXD3; MXD3 | 441707 |
| 0.22232 | cg07357716 | | 143726 |
| 0.22207 | cg10975897 | JARID2 | 207446 |
| 0.22204 | cg10177197 | DHCR24 | 193879 |
| 0.22183 | cg26215428 | PKD2 | 457374 |
| 0.2215 | cg01451808 | | 30240 |
| 0.22132 | cg24186459 | | 425188 |
| 0.2211 | cg14910684 | | 277182 |
| 0.21926 | cg01040786 | | 21929 |
| 0.21871 | cg07146912 | PDZRN3 | 139702 |
| 0.21843 | cg01359469 | TRIP4 | 28275 |
| 0.2181 | cg07459478 | VOPP1 | 145466 |
| 0.21793 | cg06012804 | | 118540 |
| 0.21771 | cg25335841 | | 443510 |
| 0.21765 | cg26303870 | ACTN1; ACTN1; ACTN1 | 458957 |
| 0.21683 | cg01095004 | | 23112 |
| 0.21596 | cg13369952 | JAKMIP2 | 246290 |
| 0.21555 | cg26159368 | | 456463 |
| 0.21526 | cg10328583 | PLEKHG5; PLEKHG5; PLEKHG5; | 196553 |
| | | PLEKHG5 | |
| 0.21524 | cg22041190 | PKNOX2 | 391040 |
| 0.21505 | cg13717446 | LOC146880; LOC146880 | 253646 |
| 0.215 | cg20134287 | AUTS2; AUTS2 | 362245 |
| 0.21488 | cg16755214 | | 308115 |
| 0.21465 | cg00599219 | MEFV | 12810 |
| 0.21458 | cg13470462 | BOC | 248426 |
| 0.21391 | cg13027183 | JARID2 | 240842 |
| 0.21382 | cg14467181 | | 268995 |
| 0.21371 | cg04674201 | | 93425 |
| 0.2137 | cg16936561 | RAB11FIP5 | 310943 |
| 0.21339 | cg13393580 | MXRA8 | 246755 |
| 0.21294 | cg00813162 | ACTN1; ACTN1; ACTN1 | 17174 |
| 0.21281 | cg21687563 | TTC28 | 385895 |
| 0.21199 | cg07076816 | | 138253 |
| 0.21196 | cg10195336 | ARHGEF10 | 194213 |
| 0.21167 | cg26588688 | | 463998 |
| 0.21129 | cg14524975 | ITGB7 | 270223 |
| 0.21125 | cg05373161 | TMEM231; TMEM231; TMEM231 | 106877 |
| 0.21109 | cg10283505 | FUT4; FUT4 | 195763 |
| 0.2109 | cg27190145 | DAAM2 | 474406 |
| 0.21048 | cg23403980 | SMG6; SMG6 | 412406 |
| 0.21047 | cg10734665 | ATP10A | 203498 |
| 0.2102 | cg01071185 | | 22591 |
| 0.20996 | cg13313047 | CABLES1; CABLES1; CABLES1 | 245295 |
| 0.20986 | cg18325315 | GTF2IRD1; GTF2IRD1 | 333329 |
| 0.2097 | cg24478420 | | 429606 |
| 0.20967 | cg20489026 | KCNJ9 | 367521 |
| 0.20958 | cg09119854 | AXIN2 | 175345 |
| 0.2095 | cg02186748 | COL1A1 | 44750 |
| 0.20938 | cg08223717 | EEPD1 | 159595 |
| 0.20902 | cg17265829 | FAT4 | 316130 |
| 0.20884 | cg04158862 | KIAA0247 | 83588 |
| 0.2087 | cg01521220 | MIR1203; SKAP1; SKAP1 | 31528 |
| 0.20851 | cg20472384 | DIP2C | 367281 |
| 0.2085 | cg01322214 | C7orf31 | 27599 |
| 0.20824 | cg22972806 | LYPD6B | 405136 |
| 0.20805 | cg12531838 | DIP2C | 233187 |
| 0.20773 | cg06946797 | | 135711 |
| 0.20742 | cg11394820 | | 214445 |
| 0.2069 | cg06132400 | | 120606 |
| 0.20684 | cg13505393 | LRRC32; LRRC32 | 249183 |
| 0.20661 | cg02931762 | | 59687 |
| 0.20651 | cg23367392 | GLI3 | 411874 |
| 0.20651 | cg21699330 | NFE2L3 | 386040 |
| 0.20618 | cg09532095 | THUMPD2; THUMPD2 | 182672 |
| 0.20597 | cg02955287 | | 60173 |
| 0.20575 | cg07980854 | | 155098 |
| 0.20548 | cg21838924 | CLDN4 | 388015 |
| 0.20493 | cg09703910 | | 185605 |
| 0.20481 | cg03179435 | FRMD4A | 64565 |
| 0.20458 | cg25946605 | CYS1 | 452893 |
| 0.20455 | cg12473775 | RHOD | 232200 |
| 0.20401 | cg05467716 | LOC146880 | 108495 |
| 0.20331 | cg18476176 | CNTF; ZFP91-CNTF | 335848 |
| 0.20322 | cg18362448 | SSBP4; SSBP4 | 333911 |
| 0.20314 | cg19245980 | | 347655 |
| 0.20291 | cg27342781 | | 476987 |
| 0.20279 | cg08011255 | B3GNTL1 | 155601 |
| 0.2027 | cg25252585 | FXYD7 | 442281 |
| 0.20218 | cg08170227 | ACTN1; ACTN1; ACTN1 | 158605 |
| 0.20196 | cg01700462 | C20orf123 | 34874 |
| 0.20185 | cg08920174 | | 172096 |
| 0.20181 | cg06180729 | LDLRAD3 | 121411 |
| 0.20165 | cg03144232 | STX1B | 63872 |
| 0.20053 | cg05302100 | COL1A1 | 105438 |
| 0.20037 | cg01572653 | | 32559 |
| 0.20024 | cg00509485 | | 10852 |
| 0.20012 | cg02077068 | GPRC5B | 42649 |
| 0.19965 | cg08797704 | | 169751 |
| 0.19946 | cg25674613 | | 448920 |
| 0.19907 | cg14236519 | C7orf50; C7orf50; C7orf50 | 264409 |
| 0.19873 | cg09371059 | | 179858 |
| 0.19866 | cg07250758 | VWCE | 141804 |
| 0.19825 | cg14463068 | MYT1L | 268912 |
| 0.19821 | cg27638057 | C18orf45 | 481936 |
| 0.19814 | cg19764489 | KCNQ1; KCNQ1 | 356206 |
| 0.19799 | cg05501859 | C11orf17; C11orf17 | 109151 |
| 0.19792 | cg02108623 | PRDM1 | 43306 |
| 0.19791 | cg18229049 | NXN | 331759 |
| 0.1975 | cg15557036 | | 287330 |
| 0.19749 | cg03284879 | | 66524 |
| 0.19681 | cg23899450 | | 420132 |
| 0.19665 | cg16896313 | | 310257 |
| 0.19654 | cg11738198 | | 219981 |
| 0.19638 | cg25104234 | | 439983 |
| 0.19612 | cg08863777 | FUT4 | 171018 |
| 0.19591 | cg03143849 | CDKN1C; CDKN1C; CDKN1C | 63866 |
| 0.19551 | cg27608563 | CMIP | 481430 |
| 0.19548 | cg15601264 | | 288057 |
| 0.19518 | cg25712088 | DIP2C | 449437 |
| 0.19493 | cg14003265 | TRAF2 | 259423 |
| 0.19481 | cg16926213 | | 310774 |
| 0.19467 | cg15339026 | | 283944 |
| 0.19466 | cg16429975 | ACOT7; ACOT7 | 302121 |
| 0.19451 | cg19780308 | MAML3 | 356489 |
| 0.19435 | cg01741688 | SH3RF3 | 35665 |
| 0.19412 | cg15465501 | | 285947 |
| 0.19412 | cg08639948 | | 167048 |
| 0.19403 | cg12453623 | | 231887 |
| 0.19394 | cg19093370 | PLD6 | 345512 |
| 0.19388 | cg10331829 | SLC1A2 | 196611 |
| 0.19382 | cg01806382 | | 37024 |
| 0.1935 | cg20953052 | MIR548F2; ERBB4; ERBB4 | 374498 |
| 0.19341 | cg20917077 | CPA5; CPA5; CPA5 | 373937 |
| 0.19321 | cg16434331 | SLC39A11; SLC39A11 | 302207 |
| 0.19286 | cg06581409 | | 128362 |
| 0.1925 | cg13229078 | | 243978 |
| 0.19228 | cg07044938 | | 137615 |
| 0.19221 | cg22853713 | CASZ1; CASZ1 | 403146 |
| 0.19142 | cg23878906 | | 419768 |
| 0.19138 | cg10469520 | | 198872 |
| 0.19133 | cg24229188 | HMG20B | 425784 |
| 0.19107 | cg27185501 | | 474347 |
| 0.19077 | cg03556869 | UST | 71956 |
| 0.19047 | cg03179447 | | 64567 |
| 0.18988 | cg15457718 | | 285805 |
| 0.18981 | cg27169559 | | 474039 |
| 0.1897 | cg00660305 | PRKAR1B; PRKAR1B; PRKAR1B; | 13970 |
| | | PRKAR1B; PRKAR1B; PRKAR1B | |
| 0.1891 | cg20142501 | NXN | 362369 |
| 0.18892 | cg15298286 | C17orf72 | 283380 |
| 0.18871 | cg25954269 | | 453043 |
| 0.18845 | cg25418528 | P2RX6; P2RX6 | 444919 |
| 0.18829 | cg27132535 | | 473446 |
| 0.18828 | cg15449664 | THY1 | 285660 |
| 0.18804 | cg09109656 | | 175197 |
| 0.18788 | cg04070601 | FMNL3; FMNL3 | 81748 |
| 0.18776 | cg20882260 | CACNA1C; | 373464 |
| 0.18756 | cg18267489 | CD93 | 332434 |
| 0.1875 | cg20463302 | SH3D20 | 367133 |
| 0.18746 | cg22020227 | OLFML3 | 390677 |
| 0.18628 | cg11419575 | | 214920 |
| 0.18581 | cg23369564 | PLEKHO1 | 411901 |
| 0.18537 | cg04768998 | WIPF1; WIPF1 | 95158 |
| 0.18526 | cg06605053 | | 128746 |
| 0.18519 | cg05008070 | DACT1; DACT1 | 99885 |
| 0.18519 | cg16030113 | | 295289 |
| 0.18514 | cg00472879 | SORBS1; SORBS1; SORBS1; | 10022 |
| | | SORBS1; SORBS1; SORBS1; | |
| | | SORBS1 | |
| 0.18466 | cg14832378 | | 275849 |
| 0.18464 | cg27438889 | TACC2; TACC2; TACC2; TACC2 | 478571 |
| 0.18403 | cg04098052 | | 82284 |
| 0.184 | cg26275647 | MDFIC; MDFIC | 458453 |
| 0.18384 | cg05757757 | | 113669 |
| 0.18333 | cg01198994 | MXRA8 | 25206 |
| 0.1833 | cg16104139 | | 296436 |
| 0.18322 | cg09868374 | | 188450 |
| 0.18317 | cg17797591 | AXIN2 | 324404 |
| 0.18247 | cg00250409 | | 5354 |
| 0.18239 | cg09976669 | SWAP70 | 190212 |
| 0.18236 | cg22231400 | SLC17A7 | 393823 |
| 0.18227 | cg02351674 | | 48045 |
| 0.18188 | cg11676636 | ARHGAP22 | 218912 |
| 0.18152 | cg00831127 | EPHB2; EPHB2 | 17525 |
| 0.18147 | cg14054883 | SYK; SYK; SYK; SYK | 260571 |
| 0.1814 | cg05147262 | ENAM | 102478 |
| 0.1812 | cg21242079 | ADAMTS7 | 379397 |
| 0.18059 | cg26523175 | PDZK1IP1 | 462775 |
| 0.18031 | cg04778236 | SPSB1 | 95348 |
| 0.18026 | cg01820962 | NT5DC1 | 37371 |
| 0.18025 | cg12315995 | | 229820 |
| 0.17993 | cg17250262 | LBH | 315917 |
| 0.17965 | cg14227785 | | 264238 |
| 0.17877 | cg10882304 | TACC2; TACC2; TACC2; TACC2 | 205944 |
| 0.17828 | cg07047570 | INSM1; INSM1 | 137657 |
| 0.17808 | cg07286123 | CD93 | 142424 |
| 0.17794 | cg14089493 | | 261291 |
| 0.17787 | cg07997634 | SLC25A13; SLC25A13; SLC25A13 | 155378 |
| 0.1776 | cg18628732 | | 338265 |
| 0.17747 | cg12239557 | TACC2; TACC2 | 228662 |
| 0.17737 | cg06376402 | INPP5A | 124706 |
| 0.17726 | cg09642857 | | 184563 |
| 0.17704 | cg17099048 | COL22A1 | 313414 |
| 0.17689 | cg10819733 | | 204928 |
| 0.17667 | cg26477792 | | 462022 |
| 0.17575 | cg00373436 | TAGLN3; TAGLN3; TAGLN3 | 7897 |
| 0.17567 | cg15029402 | | 279170 |
| 0.17558 | cg19080233 | | 345285 |
| 0.17527 | cg00157016 | PFN4 | 3525 |
| 0.17525 | cg02278646 | ANO6; ANO6; PLEKHA9; ANO6 | 46492 |
| 0.17489 | cg14684457 | NFE2L3 | 273413 |
| 0.17474 | cg09125999 | DSCAML1 | 175477 |
| 0.17462 | cg04940251 | | 98587 |
| 0.17444 | cg07135032 | LMX1A | 139425 |
| 0.17437 | cg03491895 | | 70579 |
| 0.17348 | cg07459019 | | 145455 |
| 0.17324 | cg03762242 | GAS7; GAS7; GAS7 | 76010 |
| 0.17305 | cg23585686 | | 415170 |
| 0.17287 | cg00400827 | | 8476 |
| 0.17285 | cg02284273 | FRMD4A | 46611 |
| 0.17232 | cg03560973 | POMC; POMC | 72034 |
| 0.17213 | cg22304543 | | 394846 |
| 0.17212 | cg24147392 | LOC440461 | 424521 |
| 0.17206 | cg14251267 | ZBTB46 | 264704 |
| 0.1718 | cg20052079 | JARID2 | 360990 |
| 0.17144 | cg19161251 | LMO4 | 346462 |
| 0.17138 | cg01364478 | PRRX1; PRRX1 | 28365 |
| 0.17129 | cg14255700 | IPPK | 264808 |
| 0.17113 | cg07067577 | SH3D20 | 138069 |
| 0.17078 | cg27345989 | NXN | 477039 |
| 0.17062 | cg21029769 | ST14 | 375731 |
| 0.17054 | cg26821721 | KLHL29 | 467947 |
| 0.17025 | cg13890428 | | 257013 |
| 0.17003 | cg15134506 | USP54 | 280991 |
| 0.17002 | cg21142398 | GLIS1 | 377429 |
| 0.16954 | cg08533336 | USP2; USP2 | 165172 |
| 0.16947 | cg18006637 | FAM13A; FAM13A | 327818 |
| 0.16924 | cg23692500 | | 417116 |
| 0.16901 | cg01093786 | MAML2 | 23085 |
| 0.169 | cg00285394 | SQLE | 6012 |
| 0.16825 | cg20673819 | C6orf176; C6orf176 | 370286 |
| 0.16804 | cg03676578 | | 74324 |
| 0.168 | cg21946195 | ATOH8 | 389751 |
| 0.16791 | cg10346364 | LOC100130987; CLCF1; CLCF1 | 196856 |
| 0.16785 | cg08935841 | | 172361 |
| 0.16779 | cg02216727 | GJD3; GJD3 | 45257 |
| 0.16775 | cg13088556 | | 241806 |
| 0.16685 | cg20860726 | MYT1L | 373230 |
| 0.16671 | cg11927233 | NPM1; NPM1; NPM1 | 223346 |
| 0.16655 | cg17842189 | TBC1D22A | 325238 |
| 0.16649 | cg23508201 | | 414035 |
| 0.16631 | cg18772205 | KLHL6 | 340567 |
| 0.16625 | cg18402987 | | 334557 |
| 0.16616 | cg10350880 | EPHB4 | 196929 |
| 0.16606 | cg03943115 | SPRR2D | 79303 |
| 0.16531 | cg03967266 | | 79784 |
| 0.16529 | cg09099242 | MMRN2 | 175043 |
| 0.16453 | cg08302650 | LRRC24; LRRC14 | 161144 |
| 0.1644 | cg08049717 | AMOTL2 | 156270 |
| 0.16429 | cg03764092 | TBXAS1; TBXAS1; TBXAS1; | 76037 |
| | | TBXAS1; TBXAS1; TBXAS1 | |
| 0.16421 | cg07275179 | ATXN7; ATXN7 | 142217 |
| 0.16413 | cg05529123 | | 109677 |
| 0.16411 | cg14103872 | OLFML2A | 261610 |
| 0.16404 | cg19996406 | | 360145 |
| 0.16364 | cg16568084 | | 304587 |
| 0.16364 | cg13165983 | | 242911 |
| 0.16332 | cg00409696 | | 8667 |
| 0.16319 | cg11733958 | MPRIP; MPRIP | 219898 |
| 0.16308 | cg08458711 | BSND | 163781 |
| 0.16261 | cg18861112 | WDFY2 | 342032 |
| 0.16254 | cg21293455 | | 380108 |
| 0.16247 | cg06526620 | FUT4 | 127302 |
| 0.16242 | cg12303623 | USP54 | 229638 |
| 0.16225 | cg06501835 | | 126864 |
| 0.16225 | cg05243389 | MYEF2 | 104339 |
| 0.1619 | cg15372959 | TACC2; TACC2; TACC2; TACC2 | 284406 |
| 0.16187 | cg08879365 | | 171347 |
| 0.16183 | cg00802386 | | 16940 |
| 0.16175 | cg16224163 | LPP | 298398 |
| 0.16119 | cg02276070 | ARSI | 46431 |
| 0.16116 | cg00702126 | VWA1; VWA1 | 14846 |
| 0.1611 | cg04674421 | | 93433 |
| 0.16107 | cg08333931 | SH3D20 | 161705 |
| 0.16089 | cg27177158 | | 474183 |
| 0.16083 | cg04948016 | | 98755 |
| 0.1607 | cg19144071 | | 346231 |
| 0.1607 | cg10628617 | SCUBE1 | 201790 |
| 0.16063 | cg19542987 | ARMC3 | 352374 |
| 0.16049 | cg27265404 | | 475561 |
| 0.16007 | cg03756522 | | 75895 |
| 0.15976 | cg19856845 | RIN3 | 357783 |
| 0.15961 | cg09492169 | ARHGAP27; ARHGAP27 | 181962 |
| 0.15953 | cg27458177 | | 478888 |
| 0.1592 | cg03303857 | GRIK4 | 66884 |
| 0.15887 | cg11845549 | | 221989 |
| 0.15871 | cg15246712 | EBF2 | 282686 |
| 0.15867 | cg08009487 | KRT4; KRT4 | 155576 |
| 0.15857 | cg21429516 | | 381785 |
| 0.15832 | cg13552867 | KCNJ9 | 250134 |
| 0.15799 | cg22044408 | | 391096 |
| 0.1579 | cg13440947 | GFRA1; GFRA1; GFRA1 | 247730 |
| 0.15763 | cg14363469 | | 266959 |
| 0.15736 | cg08005872 | | 155513 |
| 0.1573 | cg00094585 | | 2207 |
| 0.15729 | cg04944536 | | 98671 |
| 0.15686 | cg04658243 | RPTOR; RPTOR | 93139 |
| 0.15641 | cg11454459 | | 215415 |
| 0.15627 | cg11084571 | KANK4 | 209299 |
| 0.15582 | cg26227310 | TLX1NB | 457602 |
| 0.15574 | cg05541311 | | 109868 |
| 0.15565 | cg00095431 | | 2233 |
| 0.15534 | cg08548284 | | 165445 |
| 0.15493 | cg03919650 | MEFV | 78874 |
| 0.15488 | cg05786009 | | 114191 |
| 0.15461 | cg04024827 | FLJ12825 | 80948 |
| 0.15448 | cg15653254 | | 289035 |
| 0.1544 | cg04649598 | ODZ4 | 92979 |
| 0.15426 | cg08615354 | | 166583 |
| 0.15398 | cg05909702 | | 116481 |
| 0.15394 | cg08785724 | | 169563 |
| 0.15382 | cg00990769 | MATN2; MATN2 | 20836 |
| 0.15381 | cg08734931 | FRMD4A | 168749 |
| 0.15277 | cg05277096 | PDZRN3 | 104972 |
| 0.15274 | cg25169706 | ST5; ST5; ST5 | A441040 |
| 0.15273 | cg24572745 | BOC | 431168 |
| 0.15262 | cg21176130 | HLA-E | 378075 |
| 0.15251 | cg00514353 | PCDH1 | 10956 |
| 0.15225 | cg25515269 | ITGA4 | 446437 |
| 0.15211 | cg25653204 | FPR2 | 448621 |
| 0.15196 | cg25349820 | | 443748 |
| 0.15173 | cg11401293 | COL6A1 | 214569 |
| 0.15074 | cg14036069 | NEK6; NEK6; NEK6; NEK6 | 260162 |
| 0.15059 | cg14110685 | | 261719 |
| 0.15038 | cg11673092 | ARMC3 | 218848 |
| 0.15033 | cg24098326 | TACC2; TACC2; TACC2; TACC2 | 423638 |
| 0.15015 | cg17783086 | LOC146880; LOC146880 | 324191 |
| 0.14948 | cg17332379 | LOC146880; LOC146880 | 317320 |
| 0.14904 | cg26697605 | | 465886 |
| 0.1489 | cg16637224 | | 305900 |
| 0.14883 | cg19793499 | AUTS2; AUTS2 | 356717 |
| 0.14862 | cg13698865 | COL5A1 | 253254 |
| 0.14823 | cg14955976 | | 277886 |
| 0.1482 | cg24537942 | KANK4 | 430673 |
| 0.14803 | cg22958076 | | 404890 |
| 0.14799 | cg02079741 | POMC; POMC | 42708 |
| 0.14778 | cg12055422 | | 225496 |
| 0.14773 | cg13947999 | | 258288 |
| 0.1477 | cg13121428 | TGFB3 | 242270 |
| 0.14752 | cg25651608 | | 448592 |
| 0.14738 | cg03573945 | EBF2 | 72279 |
| 0.14713 | cg07922154 | ARG2 | 154039 |
| 0.14713 | cg06516502 | | 127100 |
| 0.14685 | cg26719062 | | 466225 |
| 0.14673 | cg00020474 | | 497 |
| 0.14661 | cg07015554 | | 137042 |
| 0.1466 | cg02095937 | TRIM59 | 43034 |
| 0.14648 | cg22111167 | PTPRJ; PTPRJ | 392026 |
| 0.14639 | cg16892553 | PRR15L; PRR15L | 310202 |
| 0.14634 | cg00512602 | SH3D20 | 10920 |
| 0.14595 | cg27359636 | | 477238 |
| 0.14577 | cg23325335 | | 411144 |
| 0.14539 | cg15671996 | TRIM15 | 289301 |
| 0.14536 | cg14725580 | C6orf106; C6orf106 | 274100 |
| 0.14511 | cg13724550 | FGF1; FGF1; FGF1; FGF1; FGF1; | 253793 |
| | | FGF1; FGF1 | |
| 0.14497 | cg19399514 | RFTN1 | 349989 |
| 0.14495 | cg11790417 | | 220854 |
| 0.14482 | cg15152115 | | 281271 |
| 0.1445 | cg11474182 | CNTNAP3 | 215691 |
| 0.14435 | cg05123976 | | 101999 |
| 0.1441 | cg03009240 | FZR1 | 61309 |
| 0.14404 | cg09359810 | FRMD6 | 179634 |
| 0.14388 | cg23931919 | | 420690 |
| 0.14388 | cg10321236 | MYO7A; MYO7A; MYO7A | 196418 |
| 0.1436 | cg11222217 | CASZ1; CASZ1 | 211555 |
| 0.14337 | cg21487363 | FOXP1; FOXP1 | 382660 |
| 0.14296 | cg23522194 | PLA2G4C; PLA2G4C; PLA2G4C | 414285 |
| 0.14295 | cg26871180 | | 468843 |
| 0.14284 | cg16139517 | CNTN4 | 297000 |
| 0.14275 | cg15371815 | CRIM1 | 284394 |
| 0.14258 | cg24118856 | PPAN-P2RY11; P2RY11 | 423968 |
| 0.14258 | cg15400997 | PLXNC1 | 284893 |
| 0.14257 | cg26950531 | DPF1; DPF1; DPF1 | 470304 |
| 0.14252 | cg23270841 | PARD3B; PARD3B; PARD3B | 410288 |
| 0.1418 | cg00542975 | CLASP1; CLASP1; CLASP1 | 11524 |
| 0.14168 | cg06644998 | | 129612 |
| 0.14118 | cg04567302 | SLC44A4 | 91475 |
| 0.14106 | cg26002568 | | 453787 |
| 0.14087 | cg04289208 | LGR6; LGR6 | 86168 |
| 0.14072 | cg13085980 | PLXNC1 | 241773 |
| 0.14055 | cg18124852 | | 329967 |
| 0.14042 | cg13214162 | | 243716 |
| 0.14037 | cg07103748 | | 138784 |
| 0.14016 | cg04756252 | SLA; SLA; TG; SLA | 94952 |
| 0.13944 | cg17253459 | OLFML3 | 315956 |
| 0.1392 | cg04601228 | AUTS2; AUTS2 | 92149 |
| 0.13894 | cg10005270 | C10orf90 | 190712 |
| 0.13871 | cg13948956 | | 258313 |
| 0.1387 | cg01211852 | | 25460 |
| 0.13832 | cg01654566 | | 34124 |
| 0.13826 | cg09528501 | | 182620 |
| 0.13793 | cg21688152 | B3GNTL1 | 385901 |
| 0.13778 | cg25472296 | DOCK1 | 445774 |
| 0.13777 | cg21951457 | TACC2; TACC2; TACC2; TACC2 | 389827 |
| 0.13769 | cg08102611 | GAS7 | 157232 |
| 0.13766 | cg13008631 | IRS1 | 240565 |
| 0.13745 | cg20535425 | | 368163 |
| 0.13721 | cg04689880 | | 93734 |
| 0.13713 | cg04768479 | | 95139 |
| 0.13705 | cg20438277 | CD93 | 366734 |
| 0.13663 | cg10301879 | C6orf105; C6orf105 | 196052 |
| 0.13653 | cg19582200 | SCUBE1 | 352974 |
| 0.13647 | cg25967170 | | 453238 |
| 0.13638 | cg06620993 | SH3PXD2A | 129075 |
| 0.13588 | cg12812165 | NIN; NIN; NIN | 237654 |
| 0.13581 | cg13053992 | | 241251 |
| 0.13547 | cg14598213 | NGFR | 271799 |
| 0.13528 | cg19193956 | | 346894 |
| 0.13503 | cg06021990 | FLT1 | 118695 |
| 0.13498 | cg01715025 | RNF115 | 35160 |
| 0.13498 | cg05787209 | STX1B | 114223 |
| 0.13486 | cg14206273 | CASZ1; CASZ1 | 263709 |
| 0.13472 | cg25599473 | SMOC2; SMOC2 | 447739 |
| 0.13467 | cg23200466 | FBXW11; FBXW11; FBXW11 | 408900 |
| 0.13452 | cg09868780 | LVRN | 188458 |
| 0.13444 | cg05246303 | ITGA4 | 104393 |
| 0.13439 | cg03213259 | TRADD | 65187 |
| 0.13426 | cg07067982 | SLC43A3; SLC43A3; SLC43A3; | 138080 |
| | | SLC43A3 | |
| 0.13383 | cg24960118 | PKHD1; PKHD1 | 437734 |
| 0.13373 | cg06942124 | | 135615 |
| 0.13373 | cg06443678 | | 125849 |
| 0.13342 | cg18674487 | | 338954 |
| 0.13337 | cg11268280 | | 212378 |
| 0.13318 | cg08681473 | COL1A1 | 167753 |
| 0.13306 | cg03143046 | | 63849 |
| 0.13304 | cg06842253 | | 133582 |
| 0.13286 | cg26363935 | NWD1 | 460109 |
| 0.13282 | cg24250588 | CLDN19; CLDN19 | 426051 |
| 0.13272 | cg01579600 | | 32722 |
| 0.13255 | cg20567368 | | 368674 |
| 0.13204 | cg20054157 | SFTA1P | 361020 |
| 0.13169 | cg16052198 | FPR2 | 295658 |
| 0.13115 | cg12888521 | | 238770 |
| 0.13102 | cg21322248 | PSTPIP1 | 380448 |
| 0.13082 | cg23418965 | PKNOX2 | 412666 |
| 0.13073 | cg10193441 | HRNBP3 | 194174 |
| 0.13072 | cg25566312 | TGFBI | 447171 |
| 0.13053 | cg00334821 | LIMK1 | 7073 |
| 0.13046 | cg18132405 | LEPREL1; LEPREL1 | 330109 |
| 0.13036 | cg13893782 | PDE7B | 257077 |
| 0.13034 | cg12575928 | GAS2 | 233842 |
| 0.13018 | cg03669949 | DDX43; DDX43 | 74206 |
| 0.13012 | cg19528338 | BMP2 | 352128 |
| 0.13001 | cg15878619 | TUBB | 292734 |
| 0.1298 | cg07187808 | KCNJ9 | 140601 |
| 0.1297 | cg06641357 | | 129537 |
| 0.12946 | cg06618298 | MYO10 | 129012 |
| 0.12929 | cg04332927 | | 87001 |
| 0.12922 | cg11041060 | SMOC2; SMOC2 | 208580 |
| 0.12875 | cg19264571 | APCDD1 | 347991 |
| 0.12861 | cg00832547 | RAGE | 17556 |
| 0.12794 | cg05376469 | | 106960 |
| 0.1279 | cg10331500 | TGFA; TGFA | 196606 |
| 0.12762 | cg06983052 | LRRC8D; LRRC8D | 136433 |
| 0.12762 | cg12019475 | | 224847 |
| 0.12739 | cg16900264 | | 310326 |
| 0.12733 | cg01055696 | | 22251 |
| 0.12706 | cg00652846 | BOC | 13828 |
| 0.12699 | cg17265419 | ITGA4 | 316124 |
| 0.12692 | cg07570498 | PHC2; PHC2 | 147621 |
| 0.12659 | cg17504145 | CRYBB2 | 320177 |
| 0.12646 | cg00872354 | | 18374 |
| 0.12628 | cg08504407 | HRNBP3 | 164658 |
| 0.12625 | cg19072083 | | 345194 |
| 0.12581 | cg22660447 | C16orf7 | 399970 |
| 0.12507 | cg18169095 | LAD1 | 330752 |
| 0.12494 | cg24167667 | | 424904 |
| 0.12488 | cg02281167 | TRIM15 | 46550 |
| 0.12477 | cg18771659 | SPRR1B | 340554 |
| 0.12456 | cg13197521 | SPSB1 | 243430 |
| 0.12441 | cg23733123 | MARVELD1; MARVELD1 | 417794 |
| 0.12439 | cg19681793 | THBS2 | 354639 |
| 0.12435 | cg22373687 | | 395848 |
| 0.12435 | cg01838728 | | 37759 |
| 0.12422 | cg03083517 | COL22A1 | 62783 |
| 0.12417 | cg01149239 | MFI2; MFI2 | 24207 |
| 0.12417 | cg05593669 | | 110779 |
| 0.12379 | cg00348891 | | 7377 |
| 0.12362 | cg19125999 | C1orf172 | 345998 |
| 0.12359 | cg26221801 | C20orf195 | 457494 |
| 0.12334 | cg01325188 | BANP; BANP | 27654 |
| 0.12301 | cg08066024 | NRXN1; NRXN1 | 156540 |
| 0.12289 | cg04344730 | DAB1 | 87247 |
| 0.12282 | cg03467555 | | 70136 |
| 0.12254 | cg22124564 | AMZ1 | 392246 |
| 0.12211 | cg09882901 | | 188677 |
| 0.1218 | cg26472922 | | 461941 |
| 0.12177 | cg22810790 | CA4 | 402441 |
| 0.1217 | cg20396299 | | 366115 |
| 0.1215 | cg01399485 | CASZ1; CASZ1 | 29081 |
| 0.12144 | cg27423739 | | 478314 |
| 0.12144 | cg11857093 | | 222224 |
| 0.12129 | cg04004513 | SKAP1; SKAP1 | 80529 |
| 0.12105 | cg16731157 | RCAN3 | 307717 |
| 0.12064 | cg04757806 | FUT4 | 94983 |
| 0.12052 | cg10930901 | | 206696 |
| 0.12044 | cg09728333 | | 185957 |
| 0.12032 | cg22159835 | NRXN2; NRXN2; NRXN2 | 392801 |
| 0.12007 | cg10168635 | C2orf88; C2orf88; C2orf88; C2orf88 | 193705 |
| 0.1198 | cg12891678 | | 238813 |
| 0.11957 | cg06382546 | LRP1B | 124829 |
| 0.11923 | cg16118803 | MOG; MOG; MOG; MOG; MOG; | 296688 |
| | | MOG; MOG; MOG; MOG; MOG; | |
| | | MOG | |
| 0.11879 | cg24642523 | HSPA2 | 432315 |
| 0.11842 | cg05280131 | FAM128A; LOC150776 | 105029 |
| 0.11823 | cg23693749 | | 417137 |
| 0.11821 | cg25255713 | EVPLL | 442316 |
| 0.11814 | cg23257225 | ADORA1; ADORA1 | 410054 |
| 0.11813 | cg12536891 | CLPB | 233264 |
| 0.11771 | cg08922201 | SYT7 | 172124 |
| 0.11744 | cg16274954 | DPCR1 | 299319 |
| 0.11728 | cg04011829 | SLCO4A1 | 80684 |
| 0.11703 | cg16143578 | ROBO4; ROBO4 | 297069 |
| 0.11698 | cg09966895 | ODZ4 | 190045 |
| 0.11691 | cg24113950 | | 423878 |
| 0.11646 | cg19119609 | | 345922 |
| 0.11612 | cg05663064 | COL6A1 | 112083 |
| 0.1161 | cg19388972 | | 349838 |
| 0.11582 | cg05979400 | LOC100128731 | 117903 |
| 0.11568 | cg01311341 | KIAA1671 | 27416 |
| 0.11546 | cg06825512 | APCDD1 | 133201 |
| 0.11466 | cg26292150 | ZDHHC19 | 458748 |
| 0.1146 | cg06282247 | | 123104 |
| 0.11404 | cg17438457 | | 319053 |
| 0.11398 | cg06427611 | PARVB | 125571 |
| 0.11372 | cg11386098 | SYT7 | 214308 |
| 0.11358 | cg13188382 | | 243299 |
| 0.11315 | cg03409151 | ALDH7A1 | 68983 |
| 0.11311 | cg18771300 | RHOJ | 340543 |
| 0.11298 | cg15320349 | | 283665 |
| 0.11293 | cg03840259 | GRAP2 | 77400 |
| 0.11242 | cg03779072 | | 76349 |
| 0.11235 | cg00795584 | | 16819 |
| 0.11176 | cg06938705 | | 135549 |
| 0.11144 | cg04263215 | NDUFS2; ADAMTS4 | 85649 |
| 0.11144 | cg09296742 | | 178512 |
| 0.11107 | cg18804920 | CNTNAP2 | 341118 |
| 0.11103 | cg12835313 | CACNA2D3 | 237974 |
| 0.11083 | cg07157030 | RHOJ; RHOJ | 139948 |
| 0.11062 | cg19725553 | BLVRA | 355438 |
| 0.11045 | cg13777287 | CNKSR3 | 254763 |
| 0.11016 | cg26048630 | PRRX1; PRRX1 | 454529 |
| 0.10972 | cg02666837 | | 54361 |
| 0.10966 | cg11073796 | | 209086 |
| 0.10936 | cg04554928 | TRIM15 | 91220 |
| 0.10888 | cg17963461 | | 327141 |
| 0.1087 | cg15580417 | KCNJ9 | 287721 |
| 0.10863 | cg21602520 | BCL2; BCL2 | 384588 |
| 0.10849 | cg21817750 | MRPS27 | 387694 |
| 0.10849 | cg21306949 | | 380293 |
| 0.10796 | cg09126995 | PHC2; PHC2 | 175501 |
| 0.10783 | cg23931734 | CA12; CA12 | 420686 |
| 0.10741 | cg03679504 | LRRC2; LRRC2; TDGF1 | 74369 |
| 0.10704 | cg05272790 | TMPRSS13 | 104903 |
| 0.10702 | cg10512203 | COL9A2 | 199691 |
| 0.10677 | cg17848515 | SMPD4; SMPD4; SMPD4; SMPD4; | 325326 |
| | | SMPD4; SMPD4; SMPD4; | |
| | | FAM128B | |
| 0.10643 | cg06824523 | PLCH2 | 133178 |
| 0.10623 | cg24833464 | KRTAP3-1 | 435563 |
| 0.1062 | cg01619846 | UHRF1; UHRF1 | 33506 |
| 0.10589 | cg00089821 | | 2084 |
| 0.1058 | cg02506908 | HPD | 51094 |
| 0.10525 | cg24248680 | FAM24B | 426016 |
| 0.10495 | cg22261895 | PLBD1 | 394295 |
| 0.10453 | cg25638443 | ST8SIA1 | 448399 |
| 0.10437 | cg08770647 | ROBO4 | 169334 |
| 0.10378 | cg10663897 | | 202375 |
| 0.10325 | cg09075327 | PSD3 | 174665 |
| 0.10321 | cg11505113 | VASH2; VASH2; VASH2 | 216106 |
| 0.10291 | cg24251135 | USP38 | 426061 |
| 0.1029 | cg26824174 | OLFML3 | 467994 |
| 0.10284 | cg11912513 | | 223148 |
| 0.10264 | cg03887520 | | 78268 |
| 0.1024 | cg21674153 | B4GALT6 | 385733 |
| 0.10236 | cg17147466 | | 314205 |
| 0.10181 | cg21931864 | SH3D20 | 389527 |
| 0.10134 | cg09469870 | | 181594 |
| 0.10132 | cg06294384 | | 123314 |
| 0.10127 | cg22693493 | | 400543 |
| 0.10127 | cg05492433 | COL22A1 | 108970 |
| 0.10066 | cg06915112 | | 135102 |
| 0.10002 | cg14320626 | | 266136 |

TABLE 7

| | | | SEQ |
|---|---|---|---|
| OA − RA | Locus | Associated gene | ID No. |
| −0.10022 | cg00490976 | | 10388 |
| −0.10038 | cg00082140 | | 1884 |
| −0.10076 | cg04080530 | | 81955 |
| −0.10083 | cg25035059 | CHD7 | 438996 |
| −0.10092 | cg09944434 | | 189753 |
| −0.10117 | cg14538532 | PBX2 | 270543 |
| −0.10144 | cg27165033 | | 473953 |
| −0.10204 | cg03110300 | CPLX4 | 63236 |
| −0.10239 | cg14729148 | CUGBP2; CUGBP2; CUGBP2; | 274152 |
| | | CUGBP2 | |
| −0.10249 | cg15730121 | DLGAP4; DLGAP4; DLGAP4 | 290375 |
| −0.10256 | cg24037389 | SCARA5 | 422606 |
| −0.10268 | cg20933239 | | 374167 |
| −0.10274 | cg10627737 | COL4A2 | 201776 |
| −0.1028 | cg19006947 | PLCB3 | 344239 |
| −0.10299 | cg08613239 | | 166546 |
| −0.10305 | cg15645757 | UBE2Q1 | 288883 |
| −0.10316 | cg19056664 | CLPTM1L | 345033 |
| −0.10356 | cg03741475 | | 75606 |
| −0.10398 | cg26332797 | CTTNBP2 | 459481 |
| −0.10398 | cg07447015 | ANKRD11 | 145230 |
| −0.10414 | cg06823060 | CMIP; CMIP | 133147 |
| −0.10436 | cg05150973 | EHD1 | 102541 |
| −0.10453 | cg05587232 | C7orf50; C7orf50; C7orf50 | 110657 |
| −0.10463 | cg26949393 | AGAP3 | 470288 |
| −0.10493 | cg07266910 | ZMAT3; ZMAT3 | 142085 |
| −0.10509 | cg01993576 | SLC29A1; SLC29A1 | 40885 |
| −0.10514 | cg22907277 | C7orf50; C7orf50; C7orf50 | 404094 |
| −0.10515 | cg12544243 | GRIN3B | 233359 |
| −0.10541 | cg23078123 | GPR177 | 407010 |
| −0.10541 | cg09545918 | COL8A1; MIR548G; COL8A1 | 182887 |
| −0.1056 | cg15067032 | | 279802 |
| −0.10586 | cg24781973 | FMN1 | 434762 |
| −0.1059 | cg07576033 | C16orf11 | 147740 |
| −0.10596 | cg02256384 | | 46036 |
| −0.10602 | cg08371643 | CA4 | 162329 |
| −0.10751 | cg10985158 | NAV1 | 207637 |
| −0.10791 | cg06531624 | | 127430 |
| −0.10813 | cg25570929 | COLEC12 | 447236 |
| −0.1085 | cg00997264 | | 20997 |
| −0.10866 | cg18494399 | SLC1A2 | 336159 |
| −0.10876 | cg21406461 | IFI16 | 381503 |
| −0.10879 | cg24395452 | SPATA18 | 428258 |
| −0.109 | cg10903916 | ASAP2; ASAP2 | 206293 |
| −0.1093 | cg06330375 | TSC2; TSC2; TSC2 | 123883 |
| −0.10957 | cg00779797 | CAPN2; CAPN2 | 16482 |
| −0.11024 | cg18145505 | GREM1 | 330327 |
| −0.11042 | cg26883033 | | 469090 |
| −0.11044 | cg25334834 | VGLL4; VGLL4; VGLL4; VGLL4 | 443491 |
| −0.11048 | cg18565130 | C7orf50; C7orf50; C7orf50 | 337296 |
| −0.11085 | cg06067955 | MYPN | 119469 |
| −0.11124 | cg11147154 | FLNC; FLNC | 210249 |
| −0.11125 | cg14473823 | | 269143 |
| −0.11142 | cg18324583 | | 333319 |
| −0.11152 | cg24917359 | C1QTNF1; C1QTNF1; C1QTNF1 | 437035 |
| −0.11155 | cg22346073 | CLASP1; CLASP1; CLASP1 | 395428 |
| −0.1116 | cg04958191 | ASPH; ASPH; ASPH; ASPH; | 98926 |
| | | ASPH | |
| −0.11187 | cg12160741 | BRF1 | 227383 |
| −0.11193 | cg01821635 | | 37390 |
| −0.11205 | cg03131767 | ABCB9; ABCB9; ABCB9 | 63648 |
| −0.11209 | cg26576937 | EBF4 | 463815 |
| −0.11214 | cg15142477 | RNF165 | 281126 |
| −0.1125 | cg13893427 | | 257066 |
| −0.11262 | cg17527422 | C12orf68; C12orf68 | 320633 |
| −0.1128 | cg08642731 | C10orf71; C10orf71 | 167107 |
| −0.11281 | cg15006627 | GPRC5A | 278771 |
| −0.11292 | cg12626411 | PRG4; PRG4; PRG4; MIR548F1; | 234784 |
| | | PRG4 | |
| −0.1131 | cg22851557 | PRDM16; PRDM16 | 403103 |
| −0.11319 | cg26803803 | DNMT3A; DNMT3A; MIR1301; | 467585 |
| | | DNMT3A | |
| −0.11355 | cg18746826 | SCARA5 | 340084 |
| −0.11368 | cg26186331 | DAB2 | 456925 |
| −0.11378 | cg15696968 | KIAA1949; NRM; KIAA1949 | 289755 |
| −0.11389 | cg11014810 | SH3PXD2A | 208137 |
| −0.11393 | cg14190889 | HLA-H | 263376 |
| −0.11407 | cg17655346 | CACNA2D3 | 322379 |
| −0.11414 | cg24777564 | ADAMTS12 | 434703 |
| −0.11439 | cg04156383 | PDE4DIP; PDE4DIP; PDE4DIP; | 83534 |
| | | PDE4DIP | |
| −0.11448 | cg02296376 | MIR1286; RTN4R | 46872 |
| −0.11454 | cg00145875 | | 3263 |
| −0.11464 | cg21862126 | | 388401 |
| −0.11468 | cg12181407 | | 227738 |
| −0.11476 | cg21733013 | RAPGEF5 | 386423 |
| −0.11485 | cg25379549 | ADARB2 | 444296 |
| −0.11508 | cg07815521 | MIR641; AKT2 | 152123 |
| −0.11512 | cg03037030 | TNF | 61825 |
| −0.11515 | cg14930864 | YWHAQ | 277519 |
| −0.11516 | cg23980760 | ACCSL; ACCSL | 421559 |
| −0.11517 | cg26858414 | CDSN; PSORS1C1 | 468630 |
| −0.11524 | cg10831642 | SH3PXD2A | 205142 |
| −0.11537 | cg03901836 | C2orf57 | 78575 |
| −0.11539 | cg16705287 | POLR2E | 307214 |
| −0.11541 | cg05557262 | FAM180A | 110128 |
| −0.11544 | cg03860038 | | 77780 |
| −0.11546 | cg20989591 | C7orf50; C7orf50; C7orf50 | 375141 |
| −0.1157 | cg03627771 | GRAMD1B | 73371 |
| −0.1158 | cg02145701 | BANP; BANP | 43968 |
| −0.11616 | cg13093380 | ALK | 241873 |
| −0.11621 | cg10239022 | GPR133 | 195020 |
| −0.1167 | cg17753942 | | 323769 |
| −0.11676 | cg21540399 | PTPRG | 383531 |
| −0.11688 | cg16538359 | | 304039 |
| −0.11692 | cg01320211 | SEMA6D; SEMA6D; SEMA6D; | 27561 |
| | | SEMA6D; SEMA6D; SEMA6D | |
| −0.11693 | cg02020821 | PPP2R5C; PPP2R5C; PPP2R5C; | 41450 |
| | | PPP2R5C; PPP2R5C | |
| −0.11698 | cg06873401 | LHFPL2 | 134232 |
| −0.11705 | cg15671083 | UCN3 | 289292 |
| −0.1173 | cg00102093 | | 2393 |
| −0.11732 | cg21356710 | MFSD2B | 380867 |
| −0.11738 | cg21205282 | | 378649 |
| −0.11761 | cg07723948 | OSGIN1; OSGIN1; OSGIN1 | 150463 |
| −0.1177 | cg16500916 | | 303286 |
| −0.11772 | cg24634422 | SLC1A2 | 432160 |
| −0.11788 | cg06755262 | | 131696 |
| −0.11803 | cg24698488 | MMP14 | 433309 |
| −0.11805 | cg01675953 | MCF2L; MCF2L | 34463 |
| −0.11814 | cg15547672 | RPTOR; RPTOR | 287142 |
| −0.11827 | cg23850174 | | 419365 |
| −0.1184 | cg05429527 | | 107954 |
| −0.11845 | cg27437823 | MAP3K14 | 478553 |
| −0.11865 | cg15470365 | SORBS2; SORBS2; SORBS2; | 286032 |
| | | SORBS2; SORBS2 | |
| −0.1187 | cg24577455 | PRKCZ; PRKCZ; PRKCZ | 431245 |
| −0.11873 | cg18458739 | BCAS3; BCAS3 | 335553 |
| −0.11874 | cg11335264 | CAPZB | 213463 |
| −0.11901 | cg00961940 | TIMP2 | 20220 |
| −0.11901 | cg04712892 | NRAP; NRAP | 94119 |
| −0.11917 | cg27582168 | FANCA | 481016 |
| −0.11931 | cg17294136 | CACNA2D1 | 316631 |
| −0.11937 | cg13932122 | | 257954 |
| −0.11937 | cg10637688 | | 201971 |
| −0.11938 | cg05384139 | PITPNM2 | 107123 |
| −0.11954 | cg04554240 | ESYT3 | 91205 |
| −0.11954 | cg22429169 | ZNF335 | 396572 |
| −0.11965 | cg03917297 | | 78835 |
| −0.11967 | cg19408740 | IGSF8 | 350178 |
| −0.11986 | cg09745791 | CTRB1 | 186257 |
| −0.12011 | cg06521562 | JRK; JRK | 127195 |
| −0.12013 | cg19678029 | KCNQ1OT1; KCNQ1; KCNQ1 | 354576 |
| −0.12018 | cg09915421 | | 189251 |
| −0.12024 | cg15827092 | | 291857 |
| −0.12026 | cg25827666 | SH2D2A; SH2D2A; NTRK1; | 451242 |
| | | NTRK1; SH2D2A; SH2D2A; | |
| | | SH2D2A | |
| −0.12033 | cg14166209 | | 262818 |
| −0.12033 | cg06647382 | PDK2 | 129663 |
| −0.12099 | cg13543096 | LOC100271831; GDPD3 | 249930 |
| −0.12099 | cg06679262 | | 130241 |
| −0.12103 | cg05514932 | RETSAT | 109417 |
| −0.12105 | cg22624391 | | 399439 |
| −0.12109 | cg19480385 | | 351330 |
| −0.12113 | cg08325842 | ZFP91; ZFP91-CNTF | 161555 |
| −0.12122 | cg15368872 | KLRK1 | 284353 |
| −0.12175 | cg27313492 | WFIKKN1 | 476470 |
| −0.12203 | cg05182583 | BAT2 | 103165 |
| −0.12205 | cg22193013 | CHRNA7 | 393284 |
| −0.12211 | cg16209444 | ACOX2 | 298173 |
| −0.12214 | cg20577102 | | 368824 |
| −0.12217 | cg06326425 | GPC6 | 123816 |
| −0.1226 | cg24353272 | RRP15 | 427604 |
| −0.12271 | cg06306791 | | 123517 |
| −0.12281 | cg11253913 | CALD1; CALD1; CALD1; | 212154 |
| | | CALD1; CALD1 | |
| −0.12285 | cg08352422 | | 161993 |
| −0.12293 | cg16044109 | HEG1 | 295491 |
| −0.12298 | cg23198815 | | 408873 |
| −0.12305 | cg23922753 | | 420530 |
| −0.12305 | cg15442583 | CDGAP | 285507 |
| −0.12317 | cg02248749 | TNXB | 45883 |
| −0.12323 | cg13455257 | TMOD4 | 248067 |
| −0.12337 | cg00740389 | ITGB7 | 15652 |
| −0.12369 | cg08448751 | SEMA3G | 163578 |
| −0.1237 | cg20663448 | FILIP1 | 370104 |
| −0.12374 | cg00819141 | | 17296 |
| −0.12375 | cg00161791 | | 3633 |
| −0.12376 | cg01569083 | TNF | 32491 |
| −0.12392 | cg00254017 | MAP3K1 | 5441 |
| −0.12398 | cg24885556 | ITGA7 | 436558 |
| −0.12399 | cg21082141 | PRDM8 | 376504 |
| −0.12415 | cg01785514 | TATDN3; TATDN3; TATDN3; | 36554 |
| | | TATDN3; TATDN3 | |
| −0.12442 | cg14771877 | C17orf99 | 274788 |
| −0.12455 | cg02866149 | C20orf117 | 58258 |
| −0.12464 | cg02667577 | WIPI2; WIPI2; WIPI2; WIPI2; | 54375 |
| | | WIPI2 | |
| −0.12507 | cg19973338 | C17orf99 | 359782 |
| −0.12517 | cg13709561 | SCARA5 | 253479 |
| −0.12585 | cg14118850 | HPCAL1; HPCAL1 | 261879 |
| −0.1259 | cg03728674 | | 75338 |
| −0.12611 | cg25340361 | COMMD1 | 443580 |
| −0.12613 | cg07347019 | | 143506 |
| −0.12631 | cg16000393 | TNK2; TNK2 | 294736 |
| −0.12649 | cg02898239 | | 58930 |
| −0.12655 | cg16323245 | ZBTB20; ZBTB20 | 300173 |
| −0.12655 | cg00907661 | ZDHHC20 | 19059 |
| −0.12665 | cg23986495 | | 421674 |
| −0.12691 | cg13720395 | YWHAG | 253710 |
| −0.12696 | cg00643876 | TBC1D24 | 13650 |
| −0.12697 | cg14781826 | BPTF; BPTF | 275014 |
| −0.12748 | cg01476807 | FBXO30 | 30709 |
| −0.1277 | cg19659642 | CD9 | 354321 |
| −0.12785 | cg21455901 | CRYL1 | 382161 |
| −0.1279 | cg01876531 | PLXNA2 | 38448 |
| −0.12817 | cg03925072 | | 78966 |
| −0.12858 | cg24267275 | | 426255 |
| −0.12861 | cg10356210 | KCNK3 | 197004 |
| −0.1289 | cg12145349 | NAA40 | 227108 |
| −0.12904 | cg11820824 | S100A16 | 221475 |
| −0.12906 | cg26989053 | NTAN1 | 471015 |
| −0.12914 | cg09119494 | E2F2 | 175337 |
| −0.12918 | cg18904855 | | 342756 |
| −0.12918 | cg00572560 | | 12164 |
| −0.12919 | cg25242423 | RTBDN; RTBDN | 442118 |
| −0.12926 | cg26745520 | GRK5 | 466632 |
| −0.12934 | cg07044523 | S100A5 | 137607 |
| −0.12938 | cg10048215 | APOLD1; APOLD1 | 191451 |
| −0.12949 | cg10471743 | | 198906 |
| −0.12978 | cg00767886 | EHD4 | 16225 |
| −0.12983 | cg26562772 | DUSP10; DUSP10; DUSP10 | 463554 |
| −0.13012 | cg00877958 | | 18503 |
| −0.13016 | cg21230535 | FTCD | 379161 |
| −0.13031 | cg09664445 | KIAA0664 | 184948 |
| −0.13045 | cg06708731 | DBH | 130785 |
| −0.13094 | cg11585805 | | 217365 |
| −0.13101 | cg10626556 | KIAA0406 | 201746 |
| −0.13101 | cg09982224 | ALDH3B1 | 190313 |
| −0.13118 | cg09437523 | | 181003 |
| −0.13123 | cg06769258 | MFSD7 | 132014 |
| −0.13123 | cg05299140 | | 105372 |
| −0.1315 | cg25735648 | | 449823 |
| −0.13164 | cg20865778 | TCIRG1; TCIRG1 | 373291 |
| −0.13179 | cg12450872 | | 231834 |
| −0.13196 | cg00154554 | RERE; RERE | 3460 |
| −0.1321 | cg10006897 | PCBP3; PCBP3 | 190741 |
| −0.13211 | cg14602234 | | 271884 |
| −0.13235 | cg08917489 | EYA4; EYA4; EYA4 | 172050 |
| −0.13261 | cg24088438 | FERMT3; FERMT3; FERMT3; | 423490 |
| | | FERMT3 | |
| −0.13277 | cg07325692 | | 143137 |
| −0.13288 | cg08013109 | ULK1 | 155629 |
| −0.13289 | cg09337391 | ZMYND8; ZMYND8; ZMYND8 | 179281 |
| −0.13298 | cg12430302 | SPSB1 | 231458 |
| −0.13311 | cg22912818 | TMCO3 | 404171 |
| −0.13319 | cg08338281 | WIBG | 161768 |
| −0.13321 | cg10097651 | | 192354 |
| −0.13345 | cg08122070 | NADK | 157631 |
| −0.13393 | cg10723746 | SPPL2B; SPPL2B | 203334 |
| −0.13398 | cg21656522 | | 385493 |
| −0.134 | cg24598094 | SLC30A1 | 431596 |
| −0.13423 | cg03466066 | | 70093 |
| −0.13424 | cg19503826 | EPN1; EPN1; EPN1 | 351690 |
| −0.13442 | cg18330041 | YWHAH | 333416 |
| −0.13456 | cg25707745 | | 449371 |
| −0.13486 | cg09018904 | ANO10 | 173744 |
| −0.13517 | cg07908868 | PLXNA2 | 153755 |
| −0.13522 | cg01364674 | | 28371 |
| −0.13527 | cg24995976 | PEAR1 | 438225 |
| −0.13549 | cg17802464 | SEC14L3 | 324476 |
| −0.13562 | cg23941016 | TBC1D2B; TBC1D2B | 420855 |
| −0.13568 | cg14504636 | AP2A2 | 269745 |
| −0.13571 | cg17846466 | MCOLN2 | 325303 |
| −0.13574 | cg16950726 | NLGN2 | 311097 |
| −0.13588 | cg07466788 | SLC16A3; SLC16A3; SLC16A3 | 145619 |
| −0.13613 | cg00767135 | ODZ3 | 16210 |
| −0.13616 | cg01336162 | TGFBR3 | 27842 |
| −0.13632 | cg05007126 | SDCBP2 | 99869 |
| −0.13637 | cg12045511 | EHD4 | 225319 |
| −0.13667 | cg18028470 | PIGV | 328228 |
| −0.13671 | cg15773893 | DOCK10 | 291034 |
| −0.13693 | cg05652528 | DNMT3A; DNMT3A; DNMT3A; | 111855 |
| | | MIR1301 | |
| −0.13703 | cg19931529 | UGP2; UGP2 | 359121 |
| −0.1372 | cg22488568 | SLC9A1 | 397378 |
| −0.13723 | cg14904034 | HPCAL1; HPCAL1 | 277047 |
| −0.13747 | cg27027230 | ARID5B | 471633 |
| −0.1377 | cg06607384 | C14orf159; C14orf159; C14orf159; | 128776 |
| | | C14orf159; C14orf159 | |
| −0.13773 | cg09766355 | NPL | 186590 |
| −0.13778 | cg17015522 | C1QTNF1; C1QTNF1; C1QTNF1 | 312055 |
| −0.13789 | cg19494960 | RPTOR; RPTOR | 351529 |
| −0.13793 | cg07366462 | ADCY5 | 143859 |
| −0.138 | cg04075247 | LGALS12; LGALS12; LGALS12; | 81844 |
| | | LGALS12; LGALS12 | |
| −0.13801 | cg01174811 | PDE4D; PDE4D; PDE4D | 24728 |
| −0.13825 | cg15536489 | C7orf50; C7orf50; C7orf50 | 286952 |
| −0.13832 | cg00622170 | C4orf10; NOP14 | 13248 |
| −0.13853 | cg08743794 | KIAA1949; NRM; KIAA1949 | 168897 |
| −0.13873 | cg21370522 | TNF | 381016 |
| −0.13878 | cg06047674 | FRMD4A | 119120 |
| −0.13896 | cg12225794 | | 228457 |
| −0.13921 | cg05905731 | | 116408 |
| −0.13924 | cg03407594 | MUC6 | 68950 |
| −0.13938 | cg26605914 | SKI | 464218 |
| −0.1394 | cg07359991 | HSD3B7; HSD3B7; HSD3B7; | 143753 |
| | | SETD1A | |
| −0.13946 | cg14780449 | | 274978 |
| −0.13949 | cg16843799 | FLJ39653; FLJ39653 | 309488 |
| −0.13957 | cg26805263 | TNFRSF19; TNFRSF19 | 467622 |
| −0.13961 | cg13460740 | MGC16703; P2RX6; P2RX6 | 248181 |
| −0.13977 | cg05488681 | | 108898 |
| −0.13998 | cg17810878 | ANO6; ANO6; ANO6 | 324639 |
| −0.14009 | cg12416561 | C4orf22 | 231221 |
| −0.14014 | cg03649589 | CSGALNACT1; CSGALNACT1; | 73790 |
| | | CSGALNACT1 | |
| −0.14031 | cg07877964 | USP7 | 153196 |
| −0.14044 | cg17499955 | | 320108 |
| −0.14047 | cg17407629 | PAM; PAM; PAM; PAM | 318547 |
| −0.14048 | cg04305228 | MICAL3 | 86473 |
| −0.14066 | cg24499411 | TNS3 | 429956 |
| −0.14066 | cg17125990 | | 313833 |
| −0.14069 | cg16608018 | | 305379 |
| −0.14074 | cg15053322 | SEC14L3 | 279556 |
| −0.14077 | cg11263420 | FCGRT; FCGRT | 212295 |
| −0.14081 | cg11437140 | TIMP2 | 215182 |
| −0.14083 | cg07328796 | | 143190 |
| −0.14111 | cg00528616 | ZNRF1 | 11235 |
| −0.14116 | cg13619044 | C7orf41 | 251590 |
| −0.14119 | cg03277153 | | 66388 |
| −0.14128 | cg22321646 | LZTS1 | 395060 |
| −0.14131 | cg11462252 | SLIT3 | 215511 |
| −0.14143 | cg02711975 | SNTG2 | 55231 |
| −0.14153 | cg18890417 | RHOBTB2; RHOBTB2; | 342552 |
| | | RHOBTB2 | |
| −0.14155 | cg19704102 | | 355015 |
| −0.14158 | cg01982724 | | 40687 |
| −0.14161 | cg01506917 | TRERF1 | 31222 |
| −0.14162 | cg13868106 | | 256590 |
| −0.14164 | cg27121538 | SV2B; SV2B | 473253 |
| −0.14179 | cg18657389 | EVPL | 338738 |
| −0.14191 | cg07044115 | | 137597 |
| −0.14228 | cg26775558 | TCF7L2; TCF7L2; TCF7L2; | 467042 |
| | | TCF7L2; TCF7L2; TCF7L2 | |
| −0.14233 | cg01860954 | | 38147 |
| −0.14249 | cg23951190 | CPNE4 | 421020 |
| −0.14255 | cg20721467 | MYST4 | 371233 |
| −0.14265 | cg12138483 | CLPP | 227002 |
| −0.14272 | cg11478024 | ANKS1A | 215738 |
| −0.14274 | cg16289449 | FERMT3; FERMT3; FERMT3; | 299541 |
| | | FERMT3 | |
| −0.14274 | cg14050363 | | 260484 |
| −0.14285 | cg03905247 | NCOR2; NCOR2 | 78635 |
| −0.14288 | cg08993079 | ADAM12; ADAM12 | 173319 |
| −0.14309 | cg16224727 | FBRSL1 | 298403 |
| −0.14309 | cg06385449 | FERMT3; FERMT3 | 124889 |
| −0.1432 | cg17594351 | MYF6 | 321588 |
| −0.14328 | cg12464631 | | 232068 |
| −0.14333 | cg04244932 | | 85279 |
| −0.14351 | cg04955877 | ZHX2 | 98883 |
| −0.14362 | cg07618453 | KCNQ1; KCNQ1 | 148575 |
| −0.14384 | cg27121309 | ACER3 | 473247 |
| −0.14384 | cg14807945 | ZEB2; ZEB2 | 275475 |
| −0.14392 | cg04142988 | PCSK6; PCSK6; PCSK6; PCSK6; | 83265 |
| | | PCSK6; PCSK6; PCSK6; | |
| | | PCSK6 | |
| −0.14429 | cg00925950 | PSKH1 | 19464 |
| −0.14432 | cg21933359 | KHDRBS3 | 389559 |
| −0.14433 | cg11287400 | MITF; MITF; MITF | 212678 |
| −0.14465 | cg00926267 | MKL1 | 19470 |
| −0.14468 | cg16098340 | MIR548C; RASSF3 | 296333 |
| −0.14478 | cg08630040 | | 166875 |
| −0.14489 | cg25880242 | | 451900 |
| −0.145 | cg09706277 | CD276; CD276 | 185655 |
| −0.14524 | cg07062388 | LMBRD1 | 137963 |
| −0.14533 | cg02470874 | PPM1L | 50305 |
| −0.14552 | cg00997251 | ARHGAP26; ARHGAP26 | 20995 |
| −0.1456 | cg16996242 | ZMYM4 | 311738 |
| −0.14564 | cg12316142 | DPYSL3 | 229823 |
| −0.14568 | cg05624853 | HSD3B7; HSD3B7; HSD3B7 | 111349 |
| −0.14588 | cg05433460 | ARHGAP1; ZNF408 | 108004 |
| −0.1463 | cg01226417 | | 25743 |
| −0.14632 | cg00063979 | | 1516 |
| −0.14661 | cg00498804 | ST5; ST5; ST5 | 10580 |
| −0.14682 | cg22132509 | PPM1L | 392374 |
| −0.14711 | cg22166248 | NXPH2 | 392926 |
| −0.14724 | cg02563600 | KIAA0182; KIAA0182 | 52166 |
| −0.14756 | cg12681001 | TNF | 235670 |
| −0.14759 | cg23590159 | UBXN11; UBXN11; UBXN11 | 415243 |
| −0.14761 | cg21528927 | SLC6A12; SLC6A12; SLC6A12 | 383331 |
| −0.1477 | cg02742775 | C12orf34 | 55869 |
| −0.14778 | cg10273072 | C21orf34 | 195585 |
| −0.14801 | cg22927076 | | 404363 |
| −0.14817 | cg03070550 | HTRA1 | 62547 |
| −0.14858 | cg18791929 | MYH15 | 340884 |
| −0.14861 | cg05991539 | C6orf25; C6orf25; C6orf25; | 118154 |
| | | C6orf25; C6orf25; C6orf25 | |
| −0.14869 | cg02092181 | DOT1L | 42966 |
| −0.1488 | cg13798679 | | 255238 |
| −0.14883 | cg17073306 | MYL5; MYL5 | 312976 |
| −0.1489 | cg17015179 | PPT1; PPT1 | 312048 |
| −0.14935 | cg01343936 | | 27981 |
| −0.14948 | cg11258484 | | 212233 |
| −0.14951 | cg13971140 | LASS4 | 258695 |
| −0.14961 | cg07282201 | TBC1D10C | 142343 |
| −0.14982 | cg12424504 | MACC1 | 231361 |
| −0.14985 | cg01312762 | CCDC134 | 27446 |
| −0.15027 | cg09568355 | | 183338 |
| −0.15031 | cg08800856 | NRXN2; NRXN2 | 169806 |
| −0.15034 | cg23617530 | | 415668 |
| −0.15048 | cg02076598 | KIAA1671 | 42633 |
| −0.15058 | cg18375707 | PLCB3 | 334103 |
| −0.1507 | cg15833565 | ERI3 | 291986 |
| −0.15079 | cg04101009 | | 82356 |
| −0.15089 | cg09302355 | FERMT3; FERMT3 | 178600 |
| −0.15093 | cg06191091 | | 121594 |
| −0.1512 | cg07812957 | | 152057 |
| −0.15121 | cg11724147 | HIBADH | 219728 |
| −0.15134 | cg27402999 | SLC9A9 | 477987 |
| −0.15154 | cg02814691 | NPL | 57253 |
| −0.15199 | cg03907570 | PRKAR1B; PRKAR1B; | 78679 |
| | | PRKAR1B; PRKAR1B; | |
| | | PRKAR1B; PRKAR1B | |
| −0.15217 | cg13166875 | SEC14L3 | 242924 |
| −0.15227 | cg26048923 | TRAPPC9; TRAPPC9 | 454532 |
| −0.15243 | cg12884495 | WBP2; UNC13D | 238717 |
| −0.15272 | cg23558764 | | 414863 |
| −0.15282 | cg05648614 | ARL8B | 111782 |
| −0.15283 | cg07449758 | C6orf25; C6orf25; C6orf25; | 145282 |
| | | C6orf25; C6orf25; C6orf25 | |
| −0.15287 | cg19642408 | | 354063 |
| −0.15303 | cg14831085 | PCSK6; PCSK6; PCSK6; PCSK6; | 275823 |
| | | PCSK6; PCSK6; PCSK6; | |
| | | PCSK6 | |
| −0.15304 | cg01882991 | | 38611 |
| −0.15305 | cg20848130 | GJC2 | 373060 |
| −0.15327 | cg16032111 | PPP2R1B; PPP2R1B | 295322 |
| −0.15331 | cg12268531 | HSP90B3P | 229089 |
| −0.15337 | cg08287887 | OR7E37P | 160856 |
| −0.15355 | cg14526997 | EHMT1; EHMT1 | 270270 |
| −0.15364 | cg06569229 | FAT3 | 128143 |
| −0.15382 | cg26485376 | | 462139 |
| −0.15389 | cg15513221 | | 286669 |
| −0.15389 | cg08577912 | | 165952 |
| −0.15392 | cg05778820 | SLC9A1 | 114033 |
| −0.15397 | cg02222066 | CYTH1; CYTH1 | 45356 |
| −0.15413 | cg02112681 | C7orf50; C7orf50; C7orf50 | 43376 |
| −0.15419 | cg02913511 | CNNM4 | 59256 |
| −0.15421 | cg25368116 | | 444093 |
| −0.15435 | cg01357135 | PPM1L | 28229 |
| −0.15439 | cg26139338 | KLF12 | 456089 |
| −0.15451 | cg19351617 | SIGIRR; SIGIRR; SIGIRR | 349235 |
| −0.15453 | cg22852065 | SPATA18 | 403114 |
| −0.15478 | cg14455925 | | 268761 |
| −0.15478 | cg00594561 | DLX3 | 12719 |
| −0.15482 | cg26114961 | C6orf25; C6orf25; C6orf25; | 455644 |
| | | C6orf25; C6orf25; C6orf25 | |
| −0.15511 | cg09996076 | HSD3B7; HSD3B7; HSD3B7; | 190546 |
| | | SETD1A | |
| −0.15544 | cg07821417 | ARVCF | 152230 |
| −0.1557 | cg23991482 | LSM7 | 421773 |
| −0.15611 | cg00751386 | CTNNA2; CTNNA2 | 15883 |
| −0.15614 | cg02316852 | RPA1 | 47305 |
| −0.15619 | cg21350115 | CALCRL; CALCRL | 380795 |
| −0.15672 | cg12526091 | | 233088 |
| −0.1568 | cg02481950 | METTL9; IGSF6; METTL9 | 50548 |
| −0.157 | cg19019345 | ST5 | 344432 |
| −0.15712 | cg13552337 | NDOR1; NDOR1; NDOR1; | 250119 |
| | | NDOR1 | |
| −0.15733 | cg19321263 | TRIM26 | 348840 |
| −0.15767 | cg07506749 | | 146418 |
| −0.15773 | cg26197679 | | 457116 |
| −0.15792 | cg03680790 | STX2; STX2 | 74392 |
| −0.15802 | cg05744888 | EIF2C2; EIF2C2 | 113460 |
| −0.1583 | cg00433709 | ZNRF1 | 9174 |
| −0.15835 | cg22856279 | | 403194 |
| −0.15845 | cg15256491 | FOXK1 | 282829 |
| −0.15854 | cg20171297 | MYF6; MYF6 | 362835 |
| −0.15858 | cg11244402 | FOXO1 | 211986 |
| −0.15879 | cg14510322 | | 269863 |
| −0.15902 | cg24236839 | KDM4B | 425869 |
| −0.15907 | cg01353907 | GPR133 | 28172 |
| −0.15926 | cg23935522 | ZDHHC17 | 420759 |
| −0.15938 | cg01893068 | | 38791 |
| −0.15944 | cg20432350 | KCND3; KCND3 | 366636 |
| −0.15948 | cg07453773 | ST5; ST5; ST5 | 145358 |
| −0.15956 | cg11370814 | | 214057 |
| −0.15957 | cg07820423 | | 152210 |
| −0.15972 | cg00550928 | MGAT3; MGAT3 | 11698 |
| −0.15977 | cg16576811 | NEDD4L; NEDD4L; NEDD4L; | 304754 |
| | | NEDD4L; NEDD4L; NEDD4L; | |
| | | NEDD4L; NEDD4L; NEDD4L | |
| −0.15996 | cg03285617 | NT5E | 66533 |
| −0.1605 | cg08145262 | FRS2; FRS2 | 158124 |
| −0.16083 | cg07791897 | | 151636 |
| −0.16096 | cg13127591 | KRTAP9-9; KRTAP9-8 | 242341 |
| −0.1612 | cg00029979 | | 743 |
| −0.1613 | cg18702278 | PDE6B; PDE6B; PDE6B | 339372 |
| −0.16132 | cg25683744 | NINJ2 | 449043 |
| −0.16135 | cg13675051 | RNF19A; RNF19A | 252709 |
| −0.16155 | cg20364025 | GALNS | 365624 |
| −0.16174 | cg22649800 | OGDH; OGDH | 399813 |
| −0.16179 | cg07692929 | OLFML1 | 149840 |
| −0.16208 | cg02903929 | | 59057 |
| −0.16229 | cg10447977 | ADAMTS9 | 198519 |
| −0.1623 | cg05383524 | MGRN1; MGRN1; MGRN1; | 107108 |
| | | MGRN1 | |
| −0.16237 | cg25902666 | CSNK1G2 | 452187 |
| −0.16237 | cg07662964 | BRD1; LOC90834 | 149327 |
| −0.16243 | cg14299931 | ARHGEF7; ARHGEF7; | 265726 |
| | | ARHGEF7; ARHGEF7; | |
| | | ARHGEF7; ARHGEF7 | |
| −0.16257 | cg02017814 | NSMCE2 | 41390 |
| −0.16265 | cg01703196 | | 34921 |
| −0.16293 | cg02119955 | ITGBL1 | 43511 |
| −0.16305 | cg17987982 | | 327555 |
| −0.1631 | cg02449461 | ARRB1; ARRB1 | 49866 |
| −0.16315 | cg03928874 | LY86 | 79027 |
| −0.16339 | cg07735586 | | 150671 |
| −0.1634 | cg21089930 | DTX4 | 376611 |
| −0.16371 | cg25105578 | | 440013 |
| −0.16389 | cg04021454 | TAF12; TAF12 | 80874 |
| −0.16408 | cg21126020 | TRIM10; TRIM10 | 377162 |
| −0.16417 | cg27395226 | SRPK2 | 477869 |
| −0.16428 | cg09141623 | PRKG1; PRKG1 | 175757 |
| −0.16437 | cg16746362 | C6orf25; C6orf25; C6orf25; | 307984 |
| | | C6orf25; C6orf25; C6orf25 | |
| −0.16464 | cg03273420 | SMCR7; SMCR7; SMCR7 | 66322 |
| −0.16496 | cg04221461 | AKT3; AKT3 | 84805 |
| −0.16524 | cg13573761 | C4orf23 | 250625 |
| −0.1653 | cg17807913 | | 324584 |
| −0.16531 | cg19506253 | CYTIP | 351732 |
| −0.16538 | cg00895231 | | 18812 |
| −0.16547 | cg00671823 | GTF3C1 | 14204 |
| −0.16584 | cg23632029 | OR10A5 | 415943 |
| −0.16593 | cg04345118 | PAX8; PAX8; LOC654433; | 87257 |
| | | PAX8; PAX8; PAX8; LOC440839 | |
| −0.16595 | cg09228831 | GPRIN3 | 177227 |
| −0.16609 | cg05910124 | TRAPPC9; TRAPPC9 | 116485 |
| −0.16622 | cg15124432 | CDC34 | 280793 |
| −0.16631 | cg03199366 | | 64930 |
| −0.16651 | cg21524538 | SDCBP2 | 383268 |
| −0.16652 | cg22950982 | MAPKAPK3 | 404771 |
| −0.1666 | cg26807536 | LOC100271831; GDPD3 | 467662 |
| −0.16661 | cg16618389 | | 305550 |
| −0.16665 | cg18347607 | | 333691 |
| −0.16674 | cg24828746 | ZBTB7A | 435490 |
| −0.16708 | cg01386735 | LMBRD1 | 28819 |
| −0.16723 | cg12214366 | ANTXR2; ANTXR2 | 228267 |
| −0.16727 | cg04132452 | PPM1L | 83027 |
| −0.1674 | cg17923377 | BRD1; LOC90834 | 326503 |
| −0.1675 | cg00659931 | PCSK6; PCSK6; PCSK6; PCSK6; | 13955 |
| | | PCSK6; PCSK6; PCSK6; | |
| | | PCSK6 | |
| −0.16751 | cg01412400 | RPTOR; RPTOR | 29361 |
| −0.16763 | cg18507146 | ZNF236 | 336390 |
| −0.16773 | cg17001765 | PGBD2; PGBD2 | 311841 |
| −0.16781 | cg23683146 | | 416923 |
| −0.16815 | cg22688687 | C19orf42 | 400457 |
| −0.16825 | cg10969245 | DAGLA | 207350 |
| −0.16826 | cg15637527 | ARHGAP1 | 288736 |
| −0.16829 | cg11903920 | TCERG1L | 223003 |
| −0.1685 | cg15268191 | | 283001 |
| −0.16862 | cg03204322 | SAMD13; SAMD13; SAMD13 | 65015 |
| −0.16866 | cg09906928 | LHFPL2 | 189108 |
| −0.1688 | cg23808165 | | 418718 |
| −0.16903 | cg15594550 | ZNF696 | 287945 |
| −0.16921 | cg08462367 | | 163870 |
| −0.16922 | cg07412186 | ATXN1; ATXN1 | 144647 |
| −0.16923 | cg02988730 | AMPD2; AMPD2; AMPD2 | 60882 |
| −0.16929 | cg20090290 | AMBRA1 | 361565 |
| −0.16937 | cg25296103 | ZEB2; ZEB2 | 442878 |
| −0.1694 | cg25124489 | PRKCE | 440332 |
| −0.1695 | cg07739478 | C6orf25; C6orf25; C6orf25; | 150742 |
| | | C6orf25; C6orf25; C6orf25 | |
| −0.16956 | cg10090414 | | 192177 |
| −0.16978 | cg08937102 | NADK | 172382 |
| −0.16999 | cg10785394 | | 204327 |
| −0.17008 | cg05425699 | TNS3 | 107909 |
| −0.1701 | cg12987138 | | 240257 |
| −0.17028 | cg04558553 | UGT2B7 | 91298 |
| −0.17028 | cg21764632 | WIPI2; WIPI2; WIPI2; WIPI2; | 386908 |
| | | WIPI2 | |
| −0.17032 | cg01306151 | C16orf7 | 27295 |
| −0.17039 | cg22718891 | | 400997 |
| −0.17042 | cg21346154 | TGFA; TGFA | 380741 |
| −0.17048 | cg21241151 | | 379374 |
| −0.17049 | cg25091527 | COL4A1 | 439775 |
| −0.17072 | cg26581714 | SPATA18 | 463898 |
| −0.17077 | cg04771838 | COL4A2 | 95213 |
| −0.17083 | cg04988694 | TBCD | 99510 |
| −0.17083 | cg05697734 | | 112662 |
| −0.17096 | cg25221919 | | 441857 |
| −0.17096 | cg18071202 | LOC100292680 | 328953 |
| −0.17113 | cg19184688 | | 346756 |
| −0.17114 | cg13740185 | C10orf105; CDH23 | 254087 |
| −0.17123 | cg05801329 | | 114496 |
| −0.17126 | cg26576576 | PTPN14 | 463811 |
| −0.17157 | cg14692453 | ANKRD23 | 273553 |
| −0.17158 | cg10143416 | | 193223 |
| −0.17163 | cg05856321 | | 115416 |
| −0.17167 | cg00230120 | LOC100292680 | 4919 |
| −0.17176 | cg24152251 | | 424608 |
| −0.17178 | cg18030453 | LARS2 | 328261 |
| −0.17206 | cg25749107 | | 450067 |
| −0.17211 | cg26457569 | KANK2; KANK2 | 461638 |
| −0.17223 | cg08890627 | SEC14L1; SEC14L1; SEC14L1; | 171586 |
| | | SEC14L1; SEC14L1 | |
| −0.17237 | cg22481643 | C3orf26; FILIP1L; MIR548G; | 397283 |
| | | FILIP1L; FILIP1L | |
| −0.17247 | cg08791347 | FRMD4A | 169648 |
| −0.17248 | cg08656333 | | 167353 |
| −0.17277 | cg14121740 | | 261943 |
| −0.17277 | cg05514531 | GBE1 | 109409 |
| −0.17287 | cg00045902 | PWWP2B; PWWP2B | 1131 |
| −0.17294 | cg20584712 | BAT2 | 368914 |
| −0.17333 | cg09305096 | GULP1 | 178661 |
| −0.17333 | cg09156542 | | 176059 |
| −0.17338 | cg05660874 | SPPL2B; SPPL2B | 112045 |
| −0.17344 | cg01397912 | C19orf51; TNNI3 | 29052 |
| −0.17357 | cg19164997 | CAPN5 | 346507 |
| −0.17408 | cg26110562 | AGAP1; AGAP1 | 455549 |
| −0.17424 | cg19583934 | RASA3 | 352999 |
| −0.17429 | cg20319604 | PPM1B; PPM1B; PPM1B; | 364994 |
| | | PPM1B; PPM1B | |
| −0.17454 | cg02955940 | CORIN | 60186 |
| −0.17456 | cg05426956 | HTRA1 | 107922 |
| −0.17468 | cg00128100 | KIAA1949; NRM; KIAA1949 | 2929 |
| −0.17519 | cg01786151 | | 36566 |
| −0.17536 | cg20788482 | | 372245 |
| −0.17539 | cg04724873 | KIAA1751 | 94344 |
| −0.17547 | cg11473240 | KRT31 | 215681 |
| −0.17547 | cg10539122 | NAV1; MIR1231; NAV1 | 200240 |
| −0.17549 | cg02123534 | ADAP1 | 43564 |
| −0.17597 | cg05776861 | ARHGEF7; ARHGEF7; | 113995 |
| | | ARHGEF7; ARHGEF7; | |
| | | ARHGEF7 | |
| −0.17599 | cg01104590 | CARS; CARS; CARS; CARS | 23322 |
| −0.17623 | cg24888581 | AGAP1; AGAP1 | 436607 |
| −0.17625 | cg18805457 | TCERG1; TCERG1 | 341130 |
| −0.17669 | cg08189139 | | 158940 |
| −0.17672 | cg17644903 | ZDBF2 | 322224 |
| −0.17677 | cg20725334 | | 371301 |
| −0.1769 | cg00851627 | | 17937 |
| −0.177 | cg05891054 | STAT5B | 116105 |
| −0.17702 | cg13609694 | | 251374 |
| −0.17731 | cg19482843 | EIF2C2; EIF2C2 | 351362 |
| −0.17753 | cg19975759 | B3GNTL1 | 359813 |
| −0.17754 | cg24864413 | SLC22A1; SLC22A1 | 436118 |
| −0.1776 | cg10592521 | MEX3D | 201161 |
| −0.17783 | cg21548131 | NLGN1 | 383703 |
| −0.178 | cg02971328 | RAC1; RAC1 | 60519 |
| −0.17804 | cg04857881 | ITFG1 | 96921 |
| −0.17826 | cg16653138 | PRKCZ; PRKCZ; PRKCZ | 306192 |
| −0.17831 | cg22146612 | | 392580 |
| −0.17849 | cg17627813 | PRDM10; PRDM10; PRDM10; | 322003 |
| | | PRDM10 | |
| −0.17863 | cg24522085 | LASS6 | 430348 |
| −0.17898 | cg02374207 | MACROD1 | 48511 |
| −0.17927 | cg01286133 | APP; APP; APP; APP; APP | 26850 |
| −0.17931 | cg04644504 | SENP8; MYO9A | 92888 |
| −0.17974 | cg01923312 | SLC22A3 | 39391 |
| −0.1805 | cg25541708 | | 446789 |
| −0.1806 | cg15852553 | | 292348 |
| −0.18062 | cg18722504 | HBEGF | 339716 |
| −0.18072 | cg20440552 | | 366770 |
| −0.18085 | cg12979590 | CUGBP1 | 240142 |
| −0.18112 | cg18664915 | C7orf50; C7orf50; C7orf50 | 338829 |
| −0.18131 | cg18080303 | LAMA4; LAMA4; LAMA4; | 329086 |
| | | LAMA4; LAMA4 | |
| −0.18135 | cg12496975 | RAPGEF3; RAPGEF3; RAPGEF3 | 232622 |
| −0.18167 | cg25677376 | | 448951 |
| −0.18198 | cg06476926 | TBCD | 126410 |
| −0.18258 | cg16161418 | KIAA1949; KIAA1949 | 297331 |
| −0.18265 | cg14661139 | UBE2J2; UBE2J2; | 273045 |
| | | LOC100128842; UBE2J2; | |
| | | UBE2J2 | |
| −0.18273 | cg07930874 | SLAIN1; SLAIN1 | 154214 |
| −0.18302 | cg13912858 | SORT1 | 257507 |
| −0.18327 | cg06059810 | RUFY3; RUFY3; RUFY3; | 119317 |
| | | RUFY3; RUFY3 | |
| −0.18359 | cg01822532 | LRP5 | 37414 |
| −0.18366 | cg05059607 | PITPNC1; PITPNC1 | 100893 |
| −0.18367 | cg07547798 | NSMCE2 | 147165 |
| −0.18371 | cg04761972 | | 95031 |
| −0.18382 | cg15932980 | STX2; STX2 | 293635 |
| −0.18394 | cg17425351 | | 318837 |
| −0.18398 | cg09777237 | ELN; ELN; ELN; ELN; ELN | 186754 |
| −0.18403 | cg04068914 | MTHFSD; MTHFSD; MTHFSD; | 81718 |
| | | MTHFSD; MTHFSD; MTHFSD; | |
| | | MTHFSD; FLJ30679 | |
| −0.18411 | cg07224918 | ARHGEF10L; ARHGEF10L | 141354 |
| −0.1845 | cg24269082 | TBCD | 426275 |
| −0.18457 | cg00646241 | SHANK2 | 13697 |
| −0.18467 | cg24290996 | | 426537 |
| −0.18474 | cg13690679 | | 253081 |
| −0.18479 | cg18926409 | | 343073 |
| −0.18495 | cg19589494 | | 353114 |
| −0.18496 | cg12806353 | PLA1A | 237540 |
| −0.1853 | cg00237010 | NINJ2 | 5072 |
| −0.18559 | cg04144521 | MFSD6 | 83296 |
| −0.18565 | cg07833951 | | 152463 |
| −0.18583 | cg04056576 | PPM1L | 81465 |
| −0.18583 | cg14837896 | THBS4 | 275954 |
| −0.18588 | cg22330533 | BRD1; LOC90834 | 395190 |
| −0.18592 | cg03659680 | LYN; LYN | 73997 |
| −0.18618 | cg06795960 | ARL4D | 132561 |
| −0.1862 | cg14679230 | LIPE | 273341 |
| −0.18622 | cg00873517 | KHDRBS3 | 18398 |
| −0.18626 | cg13613044 | | 251444 |
| −0.18636 | cg20021790 | RPH3AL | 360547 |
| −0.1866 | cg08279097 | DCLRE1B | 160695 |
| −0.18672 | cg13613439 | PHYHD1; PHYHD1; PHYHD1; | 251453 |
| | | PHYHD1; PHYHD1 | |
| −0.18676 | cg25331919 | LIPG | 443459 |
| −0.18684 | cg16046833 | SNX7; SNX7 | 295544 |
| −0.18685 | cg02535674 | | 51638 |
| −0.18728 | cg27554156 | GSG1; GSG1; GSG1; GSG1 | 480508 |
| −0.18728 | cg24940885 | | 437453 |
| −0.1873 | cg02360002 | | 48201 |
| −0.18738 | cg04912273 | SLC9A1 | 98039 |
| −0.18751 | cg18321354 | CARD11 | 333265 |
| −0.18756 | cg10453419 | PCSK6; PCSK6; PCSK6; PCSK6; | 198614 |
| | | PCSK6; PCSK6; PCSK6; | |
| | | PCSK6 | |
| −0.18757 | cg04833731 | GDPD3; GDPD3; LOC100271831 | 96391 |
| −0.18789 | cg16872841 | COL4A2 | 309904 |
| −0.18796 | cg08176694 | PITPNM2 | 158725 |
| −0.1881 | cg08426898 | | 163219 |
| −0.18822 | cg02813863 | APOLD1; APOLD1 | 57236 |
| −0.1885 | cg02959282 | NCK1 | 60268 |
| −0.1885 | cg11458974 | HMOX1 | 215460 |
| −0.18885 | cg01156373 | ERBB4; ERBB4 | 24354 |
| −0.18902 | cg08405910 | NCK2; NCK2; NCK2 | 162877 |
| −0.18904 | cg06445944 | PIK3R1; PIK3R1; PIK3R1 | 125887 |
| −0.18909 | cg19623595 | | 353718 |
| −0.18909 | cg05145297 | HIP1 | 102438 |
| −0.18938 | cg11626175 | JARID2 | 218013 |
| −0.18939 | cg05310046 | THSD4 | 105621 |
| −0.18981 | cg26005086 | JAG1 | 453833 |
| −0.18991 | cg09990852 | RUFY3; RUFY3; RUFY3; | 190465 |
| | | RUFY3; RUFY3 | |
| −0.19005 | cg23413567 | FOXO1 | 412578 |
| −0.19014 | cg11815008 | CETN1 | 221367 |
| −0.19024 | cg14883993 | NFIC; NFIC | 276772 |
| −0.1905 | cg27302175 | ZSWIM6 | 476195 |
| −0.19064 | cg05647929 | CFC1B; CFC1 | 111770 |
| −0.19077 | cg00859622 | VSTM2L | 18096 |
| −0.19081 | cg25940447 | GNPDA1 | 452774 |
| −0.19085 | cg00213052 | | 4580 |
| −0.19087 | cg03057216 | VPS72; TMOD4 | 62283 |
| −0.19087 | cg01932663 | C3orf26; FILIP1L; FILIP1L | 39583 |
| −0.19118 | cg25026329 | APLP2; APLP2; APLP2; APLP2; | 438829 |
| | | APLP2; APLP2 | |
| −0.1912 | cg06758827 | TRIO | 131795 |
| −0.19133 | cg09353563 | UACA; UACA; UACA | 179511 |
| −0.19136 | cg20629021 | CPT1A; CPT1A | 369542 |
| −0.19145 | cg07823562 | CYTH1; CYTH1 | 152263 |
| −0.19146 | cg23429240 | CORO1C | 412803 |
| −0.19147 | cg03320743 | | 67233 |
| −0.19215 | cg10407488 | ARHGEF12 | 197843 |
| −0.19222 | cg19876649 | MYOM1; MYOM1 | 358154 |
| −0.19233 | cg13148151 | LIMD1 | 242630 |
| −0.19234 | cg24073770 | | 423219 |
| −0.19257 | cg08010094 | NXPH2 | 155586 |
| −0.19262 | cg01742357 | RAPGEF4; RAPGEF4 | 35676 |
| −0.19263 | cg05957190 | CHST11 | 117447 |
| −0.19286 | cg07394266 | C9orf71 | 144374 |
| −0.19326 | cg00689612 | TIMP2 | 14559 |
| −0.19327 | cg12131324 | RPTOR; RPTOR | 226898 |
| −0.19329 | cg07155381 | RPH3AL | 139908 |
| −0.1934 | cg13189271 | JARID2 | 243319 |
| −0.19379 | cg03447908 | CLEC3B | 69735 |
| −0.1938 | cg19185706 | LDB3; LDB3; LDB3 | 346776 |
| −0.19452 | cg12744888 | MYH15 | 236621 |
| −0.19464 | cg04081835 | | 81973 |
| −0.1948 | cg05297666 | ETS1 | 105349 |
| −0.19506 | cg19252218 | ARL4D | 347770 |
| −0.19508 | cg11668573 | FNIP2 | 218773 |
| −0.19509 | cg07879785 | CRYL1 | 153222 |
| −0.19518 | cg04005958 | | 80561 |
| −0.19522 | cg01617074 | SLC45A4; SLC45A4 | 33454 |
| −0.19532 | cg12560421 | | 233610 |
| −0.19534 | cg00498089 | | 10560 |
| −0.19543 | cg17622952 | | 321946 |
| −0.1955 | cg05541460 | | 109873 |
| −0.19558 | cg02073224 | MEGF6 | 42570 |
| −0.19569 | cg07983363 | PCSK6; PCSK6; PCSK6; PCSK6; | 155143 |
| | | PCSK6; PCSK6; PCSK6; | |
| | | PCSK6 | |
| −0.19582 | cg00989315 | CDCA7L; CDCA7L; CDCA7L | 20808 |
| −0.19585 | cg11634496 | | 218142 |
| −0.19592 | cg14887955 | | 276836 |
| −0.19603 | cg10345724 | C7orf50; C7orf50; C7orf50 | 196843 |
| −0.1963 | cg14002578 | GALNT12 | 259402 |
| −0.19635 | cg02670123 | ITGA6; ITGA6 | 54419 |
| −0.19673 | cg12056017 | ANKRD44 | 225506 |
| −0.19679 | cg03462604 | C2orf18 | 70013 |
| −0.1968 | cg02800733 | CD320; CD320 | 57003 |
| −0.19696 | cg18835549 | TRIM40 | 341642 |
| −0.19701 | cg08079387 | LOC90834; BRD1 | 156793 |
| −0.19706 | cg22251117 | RPH3AL | 394137 |
| −0.19709 | cg02382878 | | 48672 |
| −0.1974 | cg14710529 | ASAP2; ASAP2 | 273872 |
| −0.19767 | cg01891925 | BTC | 38772 |
| −0.19768 | cg20439101 | MAP3K1 | 366753 |
| −0.19769 | cg06709178 | INPP5B | 130792 |
| −0.19814 | cg07573020 | ANKH | 147681 |
| −0.19821 | cg08373573 | MUC6 | 162363 |
| −0.19832 | cg27396760 | CMIP; CMIP | 477898 |
| −0.19891 | cg05796178 | LZTS1 | 114384 |
| −0.19909 | cg25345520 | | 443680 |
| −0.19912 | cg21562035 | KANK2; KANK2 | 383932 |
| −0.19945 | cg06136573 | | 120675 |
| −0.19954 | cg18756557 | LOC100292680 | 340244 |
| −0.19966 | cg06049177 | GSR | 119151 |
| −0.19972 | cg24536145 | SORBS2 | 430636 |
| −0.19978 | cg16875057 | STK39 | 309942 |
| −0.20006 | cg01698392 | TIMP2 | 34835 |
| −0.2003 | cg12251803 | LRRFIP1; LRRFIP1; LRRFIP1; | 228847 |
| | | LRRFIP1; LRRFIP1 | |
| −0.20035 | cg21007971 | PLA2G6; BAIAP2L2; PLA2G6 | 375427 |
| −0.20045 | cg04142824 | ATP11A; ATP11A | 83262 |
| −0.20048 | cg00435616 | C7orf50; C7orf50; C7orf50 | 9208 |
| −0.20064 | cg04094923 | | 82221 |
| −0.20076 | cg13496793 | ZBTB34 | 249014 |
| −0.20101 | cg23659250 | BRD1; LOC90834 | 416462 |
| −0.20138 | cg15690822 | RFFL; RFFL | 289648 |
| −0.2019 | cg02019508 | ATF7; ATF7; ATF7 | 41425 |
| −0.20196 | cg08577298 | | 165938 |
| −0.20213 | cg25238480 | GALNTL4 | 442087 |
| −0.20221 | cg12294678 | NOS3 | 229476 |
| −0.20232 | cg21881338 | AACS | 388735 |
| −0.2025 | cg24901662 | PARD3 | 436800 |
| −0.20251 | cg11407540 | EGF | 214668 |
| −0.20269 | cg07069839 | | 138124 |
| −0.20308 | cg21931263 | | 389515 |
| −0.20316 | cg11561301 | C4orf6 | 216983 |
| −0.20337 | cg07795513 | ATF6 | 151706 |
| −0.20362 | cg04589673 | | 91937 |
| −0.20374 | cg06418113 | RNF165 | 125411 |
| −0.20385 | cg01471802 | TRIM6- | 30616 |
| | | TRIM34; TRIM6; TRIM6 | |
| −0.20416 | cg15884713 | NINJ2 | 292821 |
| −0.2046 | cg22043118 | TMED7- | 391069 |
| | | TICAM2; TICAM2; TMED7- | |
| | | TICAM2 | |
| −0.20502 | cg07593326 | PCCA; PCCA | 148106 |
| −0.20504 | cg12800012 | SH3PXD2A | 237419 |
| −0.20507 | cg04667640 | ZFHX3; ZFHX3 | 93314 |
| −0.20511 | cg00527307 | | 11212 |
| −0.2055 | cg13300630 | ROBO1; ROBO1; ROBO1; | 245107 |
| | | ROBO1 | |
| −0.20558 | cg25888386 | | 452027 |
| −0.2057 | cg03571277 | ACCN1 | 72232 |
| −0.20574 | cg19660729 | KIF26A | 354335 |
| −0.206 | cg13689563 | ZNF136 | 253055 |
| −0.20627 | cg27585074 | CSNK1G2 | 481080 |
| −0.20638 | cg25266816 | | 442457 |
| −0.20669 | cg15984712 | | 294427 |
| −0.2068 | cg08124461 | CGNL1 | 157691 |
| −0.20692 | cg12555652 | ITGBL1 | 233545 |
| −0.20701 | cg06707286 | PCSK6; PCSK6; PCSK6; PCSK6; | 130749 |
| | | PCSK6; PCSK6; PCSK6; | |
| | | PCSK6 | |
| −0.20713 | cg12758625 | RNF24; RNF24; RNF24 | 236809 |
| −0.20719 | cg16241878 | FRMD5 | 298677 |
| −0.20733 | cg06389019 | SLC9A3R1 | 124935 |
| −0.20737 | cg02803847 | BUB3; BUB3 | 57065 |
| −0.20737 | cg07376547 | | 144035 |
| −0.20746 | cg20625588 | MUC6 | 369496 |
| −0.20756 | cg05415840 | ARC; ARC | 107735 |
| −0.2077 | cg00311751 | TRERF1 | 6568 |
| −0.20775 | cg02465887 | DCHS2 | 50200 |
| −0.20799 | cg02392737 | ADCY9 | 48895 |
| −0.20804 | cg13043815 | C21orf63 | 241083 |
| −0.20812 | cg06232466 | CACNA1H; CACNA1H | 122343 |
| −0.20827 | cg08490246 | | 164404 |
| −0.20838 | cg05964487 | | 117593 |
| −0.20854 | cg15891850 | KLF12 | 292938 |
| −0.20874 | cg20218678 | FAM10A4 | 363445 |
| −0.20882 | cg01569709 | | 32505 |
| −0.20902 | cg15044010 | SRPK2; SRPK2 | 279419 |
| −0.20915 | cg10269431 | EGF | 195527 |
| −0.20964 | cg01064758 | TG; SLA; SLA | 22444 |
| −0.21022 | cg12597325 | STX2; STX2 | 234249 |
| −0.21045 | cg20263733 | ATP2C1; ATP2C1; ATP2C1; | 364115 |
| | | ATP2C1 | |
| −0.21084 | cg02872914 | CTBP2; CTBP2; CTBP2 | 58381 |
| −0.21116 | cg14153069 | PHYHD1; PHYHD1; PHYHD1; | 262529 |
| | | PHYHD1; PHYHD1 | |
| −0.21127 | cg21617357 | HTATIP2; HTATIP2; HTATIP2; | 384851 |
| | | HTATIP2; HTATIP2 | |
| −0.2114 | cg23723013 | KCNAB1; KCNAB1; KCNAB1 | 417619 |
| −0.21172 | cg02497428 | METTL9; IGSF6; METTL9 | 50892 |
| −0.2118 | cg12018521 | TES | 224833 |
| −0.21202 | cg02773403 | ANK3 | 56524 |
| −0.21204 | cg00765737 | COL4A2 | 16178 |
| −0.21216 | cg06432487 | | 125644 |
| −0.21225 | cg13447820 | | 247908 |
| −0.21276 | cg04470324 | FSTL4 | 89614 |
| −0.21292 | cg26295272 | FLNB; FLNB; FLNB; FLNB | 458803 |
| −0.21314 | cg05450916 | TGFBR2; TGFBR2 | 108229 |
| −0.21317 | cg04893454 | | 97666 |
| −0.21341 | cg22219255 | | 393632 |
| −0.21349 | cg23198558 | ARHGAP26; ARHGAP26 | 408866 |
| −0.21367 | cg19353947 | ZEB2; ZEB2; ZEB2 | 349264 |
| −0.21373 | cg04208996 | | 84534 |
| −0.2138 | cg02534659 | | 51624 |
| −0.21385 | cg04266607 | JAZF1 | 85718 |
| −0.21392 | cg07042532 | CREB5; CREB5; CREB5 | 137576 |
| −0.21393 | cg09130535 | ADRBK1 | 175551 |
| −0.21397 | cg24919468 | | 437059 |
| −0.21428 | cg00058644 | | 1391 |
| −0.2144 | cg06127541 | RRAS2; RRAS2 | 120526 |
| −0.21446 | cg16497661 | CKB | 303238 |
| −0.21492 | cg02712587 | EIF2AK4 | 55252 |
| −0.21494 | cg00232092 | FBXL18 | 4975 |
| −0.21509 | cg13679772 | FOXN3 | 252820 |
| −0.21555 | cg01915822 | ADCK5 | 39234 |
| −0.21558 | cg11460562 | TNPO1; TNPO1 | 215482 |
| −0.21561 | cg14375985 | CTBP2; CTBP2; CTBP2 | 267187 |
| −0.21562 | cg04267284 | PYGB | 85734 |
| −0.21585 | cg19093405 | CACNA2D3 | 345515 |
| −0.21621 | cg02668218 | | 54387 |
| −0.21671 | cg25286715 | | 442752 |
| −0.21697 | cg14772660 | SLC5A7 | 274806 |
| −0.21707 | cg01495332 | GRB10; GRB10; GRB10 | 31016 |
| −0.21758 | cg00446697 | HCCA2 | 9405 |
| −0.21821 | cg03844838 | DIP2C | 77475 |
| −0.21834 | cg25799348 | FOXK1 | 450816 |
| −0.21849 | cg08702689 | PRRX1; PRRX1 | 168159 |
| −0.21863 | cg13495373 | CREB5; CREB5; CREB5 | 248982 |
| −0.21887 | cg11165960 | | 210588 |
| −0.21906 | cg24721647 | ACSL1 | 433758 |
| −0.21922 | cg15380511 | | 284521 |
| −0.21944 | cg07739826 | OSBP | 150749 |
| −0.21962 | cg18780243 | EEF1DP3 | 340687 |
| −0.21966 | cg13289202 | ABTB2 | 244906 |
| −0.21972 | cg00684423 | GPER; C7orf50; C7orf50; GPER; | 14439 |
| | | C7orf50 | |
| −0.21994 | cg06013113 | RAB40C | 118547 |
| −0.21999 | cg18129282 | | 330053 |
| −0.22012 | cg26325949 | SYNPO2; SYNPO2; SYNPO2 | 459352 |
| −0.22027 | cg07091154 | SHANK2 | 138518 |
| −0.22031 | cg27584112 | | 481064 |
| −0.22034 | cg20203400 | TMEM182 | 363230 |
| −0.22065 | cg14125542 | FAM49A | 262013 |
| −0.22071 | cg00380924 | RPS6KA2; RPS6KA2 | 8060 |
| −0.22081 | cg18887296 | PPFIA3 | 342507 |
| −0.22107 | cg17858500 | C20orf27 | 325500 |
| −0.22142 | cg04974647 | | 99207 |
| −0.22165 | cg20334115 | PYCR2 | 365215 |
| −0.22175 | cg16523645 | ITPK1; ITPK1; ITPK1 | 303721 |
| −0.22212 | cg12525096 | | 233069 |
| −0.22213 | cg20131219 | PHLDB2; PHLDB2; PHLDB2; | 362199 |
| | | PHLDB2 | |
| −0.22244 | cg21750426 | MIRLET7C; C21orf34; C21orf34; | 386667 |
| | | MIR99A | |
| −0.22263 | cg17918796 | | 326430 |
| −0.22269 | cg14165772 | | 262803 |
| −0.22294 | cg14081251 | ST6GALNAC4; ST6GALNAC4 | 261114 |
| −0.22318 | cg01824625 | EPHA3; EPHA3 | 37465 |
| −0.22327 | cg20080845 | BRD1; LOC90834 | 361454 |
| −0.2235 | cg15016481 | LRRFIP1; LRRFIP1; LRRFIP1; | 278955 |
| | | LRRFIP1; LRRFIP1 | |
| −0.22429 | cg04112058 | SHCBP1 | 82595 |
| −0.22434 | cg17879450 | MACF1 | 325874 |
| −0.2244 | cg12399224 | ZBTB46 | 230928 |
| −0.22443 | cg22909677 | ARMC2 | 404123 |
| −0.22448 | cg25874123 | MYOM1; MYOM1 | 451828 |
| −0.22451 | cg18720326 | ADAMTS2; ADAMTS2 | 339675 |
| −0.2246 | cg16230121 | APBB1; APBB1 | 298473 |
| −0.22463 | cg21848191 | RAD51L1; RAD51L1; RAD51L1 | 388170 |
| −0.22463 | cg19026231 | GALK1 | 344545 |
| −0.22483 | cg07080231 | | 138324 |
| −0.22528 | cg17531430 | BIN1; BIN1; BIN1; BIN1; BIN1; | 320696 |
| | | BIN1; BIN1; BIN1; BIN1; BIN1 | |
| −0.22531 | cg07807373 | | 151942 |
| −0.22568 | cg09038971 | CHST11 | 174071 |
| −0.22576 | cg16624521 | | 305662 |
| −0.22583 | cg10031769 | CREM; CREM; CREM; CREM; | 191189 |
| | | CREM; CREM; CREM; CREM; | |
| | | CREM; CREM; CREM; | |
| | | CREM; CREM; CREM; CREM; | |
| | | CREM; CREM; CREM; | |
| | | CREM; CREM | |
| −0.22674 | cg15853771 | | 292370 |
| −0.22677 | cg05242915 | | 104329 |
| −0.22727 | cg09264140 | FMNL1 | 177950 |
| −0.22741 | cg24977338 | RGPD8; RGPD5 | 437964 |
| −0.22749 | cg27469810 | CETN1 | 479043 |
| −0.22788 | cg00653025 | | 13831 |
| −0.22788 | cg05285759 | TBCK; TBCK; TBCK; TBCK | 105125 |
| −0.22818 | cg12642431 | UACA; UACA | 235055 |
| −0.22826 | cg09169413 | P11 | 176276 |
| −0.22856 | cg23079012 | | 407020 |
| −0.2289 | cg23904501 | PTPRS; PTPRS; PTPRS; PTPRS | 420216 |
| −0.22901 | cg07631435 | ZBTB16; ZBTB16 | 148813 |
| −0.22976 | cg13752933 | DAPK1 | 254331 |
| −0.22984 | cg19173502 | MIRLET7C; C21orf34; C21orf34 | 346603 |
| −0.22995 | cg21502482 | SPATA7; SPATA7 | 382912 |
| −0.22997 | cg03144446 | | 63874 |
| −0.23001 | cg01164141 | | 24508 |
| −0.23003 | cg27314273 | PTPRG | 476489 |
| −0.23018 | cg13879937 | EHD4 | 256817 |
| −0.23035 | cg11168687 | ACSL1 | 210627 |
| −0.23037 | cg22905866 | | 404070 |
| −0.23047 | cg19788250 | APP; APP; APP; APP; APP | 356630 |
| −0.23055 | cg19478371 | PPP2R5C; PPP2R5C; PPP2R5C; | 351294 |
| | | PPP2R5C; PPP2R5C | |
| −0.23081 | cg08153404 | | 158265 |
| −0.23098 | cg11945474 | | 223676 |
| −0.23103 | cg07470830 | | 145712 |
| −0.23116 | cg09537792 | ANKRD11 | 182760 |
| −0.23122 | cg17880118 | COL4A1 | 325886 |
| −0.2315 | cg07468585 | | 145653 |
| −0.23177 | cg00108038 | LOC100292680 | 2509 |
| −0.23183 | cg23560676 | NSMCE2 | 414881 |
| −0.23213 | cg11063877 | LARP4; LARP4; LARP4; LARP4; | 208898 |
| | | LARP4; LARP4; LARP4 | |
| −0.23228 | cg19735406 | COL4A2 | 355626 |
| −0.23258 | cg09259797 | | 177870 |
| −0.23286 | cg05314142 | SLC22A1; SLC22A1 | 105694 |
| −0.23299 | cg06519061 | PTPN14 | 127144 |
| −0.23315 | cg26983411 | | 470886 |
| −0.23331 | cg01417625 | LAMC2; LAMC2 | 29483 |
| −0.23345 | cg06112923 | STEAP2; STEAP2; STEAP2 | 120290 |
| −0.23386 | cg22416916 | SLC22A1; SLC22A1 | 396454 |
| −0.23403 | cg10492417 | FANCA | 199244 |
| −0.23409 | cg02540833 | SHANK2 | 51760 |
| −0.2342 | cg09329079 | TMEM184A | 179139 |
| −0.23446 | cg08135718 | CUX1; CUX1; CUX1 | 157939 |
| −0.23468 | cg20724690 | CAB39; CAB39; CAB39 | 371287 |
| −0.23494 | cg20192387 | RPS6KA2; RPS6KA2 | 363087 |
| −0.23519 | cg09169739 | GFPT2 | 176289 |
| −0.23558 | cg22396663 | MAD1L1; MAD1L1; MAD1L1 | 396208 |
| −0.23597 | cg02923628 | | 59493 |
| −0.23632 | cg03109660 | RELL1; RELL1 | 63223 |
| −0.23648 | cg06562964 | RELL1; RELL1 | 128035 |
| −0.23857 | cg17133045 | AKT3; AKT3 | 313972 |
| −0.23937 | cg03606098 | NADK | 72963 |
| −0.23938 | cg18771195 | RPH3AL | 340542 |
| −0.23963 | cg10013121 | TRERF1 | 190859 |
| −0.23979 | cg02781060 | | 56673 |
| −0.23996 | cg22117968 | | 392140 |
| −0.2401 | cg11520719 | ARID1B; ARID1B; ARID1B | 216320 |
| −0.24011 | cg04126956 | TRAPPC9; TRAPPC9 | 82912 |
| −0.24087 | cg01312265 | TCERG1L | 27436 |
| −0.24102 | cg09873409 | PLXNA4; PLXNA4 | 188543 |
| −0.24159 | cg00089451 | | 2073 |
| −0.24161 | cg27446233 | PFKM; PFKM; PFKM; PFKM; | 478685 |
| | | PFKM | |
| −0.24161 | cg07251141 | ADAM12; ADAM12 | 141811 |
| −0.24173 | cg02773698 | FCHSD2 | 56533 |
| −0.2419 | cg11028872 | | 208387 |
| −0.24214 | cg06865642 | BRD1; LOC90834 | 134034 |
| −0.24269 | cg18000216 | ERC2 | 327710 |
| −0.24279 | cg14558716 | ATF1 | 270966 |
| −0.24303 | cg06165742 | FOXP2; FOXP2; FOXP2 | 121155 |
| −0.24317 | cg07491828 | MKL2 | 146139 |
| −0.24321 | cg05495611 | EXT2; EXT2 | 109044 |
| −0.24432 | cg00264129 | HBEGF | 5659 |
| −0.24487 | cg20539449 | | 368227 |
| −0.24494 | cg07877629 | | 153192 |
| −0.24502 | cg00026412 | ANK3 | 645 |
| −0.24505 | cg25089903 | NINJ2 | 439753 |
| −0.24567 | cg23708624 | CCDC146; FGL2 | 417387 |
| −0.24585 | cg25838968 | PLXNA2 | 451397 |
| −0.24656 | cg02724461 | GALNS | 55487 |
| −0.24687 | cg23669855 | LYSMD4 | 416659 |
| −0.24737 | cg19547694 | BRD1; LOC90834 | 352451 |
| −0.24757 | cg13962170 | | 258544 |
| −0.24861 | cg17798857 | UACA; UACA | 324425 |
| −0.24871 | cg09741789 | FBN1 | 186193 |
| −0.24879 | cg04721825 | PRKCA | 94264 |
| −0.24908 | cg01556677 | SEMA3C | 32186 |
| −0.24945 | cg19450056 | | 350853 |
| −0.24949 | cg25141441 | RORA; RORA; RORA; RORA | 440625 |
| −0.24973 | cg04265492 | BAI2 | 85697 |
| −0.2506 | cg03870329 | | 77949 |
| −0.25077 | cg25206802 | SACS | 441606 |
| −0.25093 | cg25483191 | TRIM55; TRIM55; TRIM55; | 445943 |
| | | TRIM55 | |
| −0.25124 | cg08535361 | NTN4 | 165209 |
| −0.25143 | cg04425710 | ESCO2; CCDC25 | 88827 |
| −0.25168 | cg08464954 | | 163934 |
| −0.25182 | cg13661832 | | 252443 |
| −0.25199 | cg10259111 | GNG2 | 195382 |
| −0.25214 | cg24331722 | | 427189 |
| −0.25249 | cg26529437 | ITGB8 | 462893 |
| −0.25283 | cg25706447 | PIGV | 449350 |
| −0.25296 | cg26131670 | SLC4A4; SLC4A4 | 455944 |
| −0.25313 | cg11274148 | RPTOR; RPTOR | 212468 |
| −0.25324 | cg14571004 | GALNT12 | 271226 |
| −0.25333 | cg26306638 | HBEGF | 459010 |
| −0.25362 | cg08412699 | ITGB8 | 162975 |
| −0.25409 | cg12208381 | CSNK1G2 | 228165 |
| −0.25453 | cg11611676 | | 217803 |
| −0.25457 | cg13665060 | | 252509 |
| −0.25472 | cg16784943 | ITPK1; ITPK1; ITPK1 | 308597 |
| −0.25501 | cg24534767 | | 430608 |
| −0.25576 | cg03778207 | ME3; ME3; ME3 | 76334 |
| −0.25579 | cg09088836 | | 174888 |
| −0.25665 | cg26543192 | | 463160 |
| −0.2568 | cg14457429 | | 268785 |
| −0.25731 | cg16834726 | DCTN2 | 309390 |
| −0.25741 | cg14523881 | VASH2; VASH2; VASH2 | 270202 |
| −0.25788 | cg05208056 | NCK2; NCK2; NCK2 | 103597 |
| −0.25817 | cg07525751 | SLC6A3 | 146753 |
| −0.25823 | cg03855388 | CPT1A; CPT1A | 77697 |
| −0.25832 | cg22308453 | DPYSL2 | 394900 |
| −0.25865 | cg07911905 | CHST11 | 153817 |
| −0.25865 | cg05196076 | FBXO31; FBXO31 | 103393 |
| −0.25949 | cg18371976 | TRERF1 | 334048 |
| −0.25957 | cg16878214 | PLEKHF2 | 309991 |
| −0.25958 | cg20655877 | | 369984 |
| −0.26099 | cg21197233 | ARHGAP20 | 378484 |
| −0.26155 | cg15568998 | AGMAT | 287517 |
| −0.26178 | cg27511861 | | 479747 |
| −0.26219 | cg12564175 | ESCO2; CCDC25 | 233667 |
| −0.26237 | cg16090790 | | 296212 |
| −0.2632 | cg12552626 | CCDC146; FGL2 | 233502 |
| −0.26416 | cg11072779 | ANXA4 | 209068 |
| −0.26569 | cg22352504 | HAS1 | 395515 |
| −0.26608 | cg07263759 | | 142020 |
| −0.26615 | cg18022344 | METTL9; IGSF6; METTL9 | 328111 |
| −0.2662 | cg24033633 | | 422524 |
| −0.26675 | cg05310185 | TACC2; TACC2; TACC2; TACC2 | 105623 |
| −0.26683 | cg02606505 | NKTR | 53079 |
| −0.26684 | cg05899338 | ZNF239; ZNF239; ZNF239 | 116275 |
| −0.26725 | cg06385757 | PRKAR1B; PRKAR1B; | 124893 |
| | | PRKAR1B; PRKAR1B; | |
| | | PRKAR1B; PRKAR1B | |
| −0.26763 | cg14178899 | ERRFI1 | 263095 |
| −0.2679 | cg03372385 | LRRC16A | 68299 |
| −0.26797 | cg25072766 | CARS; CARS; CARS; CARS | 439518 |
| −0.26865 | cg20608783 | BAI2 | 369275 |
| −0.26917 | cg07776993 | ADCK5 | 151365 |
| −0.27071 | cg01295631 | | 27066 |
| −0.27154 | cg06836480 | DHRS9; DHRS9; DHRS9 | 133449 |
| −0.27159 | cg01957599 | FAM13AOS | 40119 |
| −0.2728 | cg17478992 | SLC12A8 | 319759 |
| −0.27286 | cg12884466 | MRPL3 | 238716 |
| −0.27379 | cg13200640 | | 243476 |
| −0.27391 | cg12619262 | | 234658 |
| −0.27459 | cg26551026 | CABLES1; CABLES1 | 463331 |
| −0.27512 | cg03078520 | MICAL3; MICAL3; MICAL3 | 62698 |
| −0.27559 | cg19295451 | PCSK6; PCSK6; PCSK6; PCSK6; | 348451 |
| | | PCSK6; PCSK6; PCSK6; | |
| | | PCSK6 | |
| −0.2759 | cg01359165 | | 28268 |
| −0.27611 | cg03389789 | FBXW8; FBXW8 | 68597 |
| −0.27642 | cg27199697 | DLX3 | 474550 |
| −0.27828 | cg19995595 | ITPK1; ITPK1; ITPK1 | 360131 |
| −0.2796 | cg19600494 | | 353349 |
| −0.28011 | cg22801134 | PRICKLE2 | 402255 |
| −0.28065 | cg20140333 | | 362329 |
| −0.28088 | cg00101350 | MGAT3; MGAT3 | 2375 |
| −0.28176 | cg10784341 | PHACTR2; PHACTR2 | 204295 |
| −0.28206 | cg23338380 | CUX1; CUX1; CUX1 | 411370 |
| −0.28216 | cg22122925 | ERRFI1 | 392216 |
| −0.28241 | cg06235645 | SEMA6D; SEMA6D; SEMA6D; | 122412 |
| | | SEMA6D; SEMA6D; SEMA6D | |
| −0.28268 | cg16474725 | CLIC5; CLIC5 | 302879 |
| −0.28421 | cg14054582 | | 260566 |
| −0.2851 | cg19926144 | DIP2C | 359006 |
| −0.28525 | cg26214026 | ATXN2 | 457353 |
| −0.28725 | cg18030133 | PHACTR2; PHACTR2; | 328254 |
| | | PHACTR2; PHACTR2 | |
| −0.28771 | cg22716599 | DNM3; DNM3 | 400952 |
| −0.28822 | cg00745735 | MYPN | 15768 |
| −0.28884 | cg02071553 | MIR216B | 42524 |
| −0.28893 | cg01756899 | | 35949 |
| −0.28929 | cg05928904 | | 116850 |
| −0.28962 | cg01598421 | TG | 33081 |
| −0.28997 | cg02131142 | TBC1D9B; TBC1D9B | 43723 |
| −0.29156 | cg03412557 | RUNDC2A | 69042 |
| −0.29166 | cg17947992 | | 326928 |
| −0.29212 | cg00855685 | SEMA5A | 18020 |
| −0.29231 | cg08672203 | PPAP2A; PPAP2A | 167602 |
| −0.29315 | cg17613911 | STK32A | 321844 |
| −0.29506 | cg23666374 | AUTS2; AUTS2; AUTS2 | 416583 |
| −0.29533 | cg16666745 | GALNT10 | 306478 |
| −0.2964 | cg26826631 | CD55; CD55 | 468043 |
| −0.29748 | cg17919396 | ALDH1A3 | 326446 |
| −0.29758 | cg01574912 | | 32628 |
| −0.29814 | cg14334389 | SPARCL1; SPARCL1 | 266428 |
| −0.29818 | cg04304338 | ANKRD33B | 86451 |
| −0.29932 | cg02847703 | BTC | 57849 |
| −0.30181 | cg23155767 | GPR1; GPR1 | 408172 |
| −0.30344 | cg09819635 | KHDRBS3 | 187501 |
| −0.30363 | cg25131079 | ADAMTS2; ADAMTS2 | 440427 |
| −0.30642 | cg12754854 | PHYHD1; PHYHD1 | 236759 |
| −0.30675 | cg08943696 | GPR133 | 172510 |
| −0.30689 | cg03983715 | PRMT7 | 80095 |
| −0.30824 | cg09287328 | | 178354 |
| −0.30861 | cg03713317 | CYFIP1; CYFIP1 | 74995 |
| −0.31349 | cg23666829 | TBCD | 416590 |
| −0.31884 | cg26253868 | | 458047 |
| −0.32034 | cg03700279 | PREPL; PREPL; PREPL; PREPL; | 74742 |
| | | PREPL; PREPL; PREPL | |
| −0.32126 | cg12894142 | | 238844 |
| −0.32278 | cg16689609 | UTRN | 306875 |
| −0.32343 | cg12359895 | LOC100216001; LOC338588 | 230357 |
| −0.32409 | cg19244380 | AMBRA1; AMBRA1 | 347620 |
| −0.32631 | cg01928411 | LARP4; LARP4; LARP4; LARP4; | 39500 |
| | | LARP4; LARP4; LARP4 | |
| −0.32706 | cg25254949 | | 442307 |
| −0.32836 | cg23159678 | NOVA1; NOVA1; NOVA1 | 408237 |
| −0.33031 | cg11520439 | LOC286367 | 216313 |
| −0.33087 | cg11937508 | GPR1; GPR1 | 223523 |
| −0.33212 | cg12205433 | TES; TES | 228120 |
| −0.33433 | cg18901940 | MYPN; MYPN | 342719 |
| −0.34043 | cg10362527 | GPR1; GPR1 | 197111 |
| −0.34108 | cg14570632 | RXRA | 271222 |
| −0.34414 | cg03361973 | SEMA6D; SEMA6D; SEMA6D; | 68105 |
| | | SEMA6D; SEMA6D; SEMA6D | |
| −0.34417 | cg05073720 | PHLPP1 | 101171 |
| −0.34459 | cg16087541 | TES; TES | 296173 |
| −0.34847 | cg09835421 | PRMT7 | 187811 |
| −0.34934 | cg21161187 | SLC6A3 | 377787 |
| −0.35195 | cg02666566 | | 54356 |
| −0.35418 | cg18262591 | CPT1A; CPT1A | 332336 |
| −0.37588 | cg16808481 | TES; TES | 309027 |
| −0.38211 | cg14604584 | | 271938 |
| −0.40768 | cg05110241 | PRMT7 | 101782 |
| −0.41512 | cg20071744 | TRAPPC9; TRAPPC9 | 361314 |
| −0.43386 | cg15853299 | TBCD | 292363 |

TABLE 8

| | Associated | | | |
|---|---|---|---|---|
| OA − RA | gene | CpG* | Locus | SEQ ID No. |
| −0.603 | LIMS1 | 2: 109251064 | cg10879348 | 205889 |
| −0.603 | | 15:97311928 | cg04875706 | 97278 |
| −0.572 | | 17:35161825 | cg11331837 | 213402 |
| −0.563 | ACOT11 | 1:55014160 | cg01802772 | 36934 |
| −0.552 | GNAS | 20:57463991 | cg09885502 | 188727 |
| −0.527 | | 11:28642652 | cg26387458 | 460494 |
| −0.511 | HDAC11 | 3:13555664 | cg26845082 | 468403 |
| −0.506 | | 3:22422855 | cg20979384 | 374956 |
| −0.484 | | 1:204556835 | cg13232075 | 244024 |
| −0.478 | AP2A2 | 11:1001560 | cg16999994 | 311801 |
| −0.463 | ALS2CR12 | 2:202163482 | cg07227024 | 141394 |
| −0.463 | | 4:82273176 | cg07454933 | 145378 |
| −0.456 | CPO | 2:207803547 | cg17600943 | 321671 |
| −0.455 | FAM19A5 | 22:48896579 | cg11019791 | 208228 |
| −0.452 | FHIT | 3:60420416 | cg16140565 | 297019 |
| −0.443 | | 6:75775380 | cg15706692 | 289960 |
| −0.439 | ATP11A | 13:113539522 | cg21463262 | 382273 |
| −0.435 | PDHA2 | 4:96760945 | cg10590622 | 201120 |
| −0.433 | CNTNAP5 | 2:124971544 | cg01013522 | 21327 |
| −0.432 | COLEC11 | 2:3675155 | cg10724632 | 203346 |
| −0.432 | RD3 | 1:211667751 | cg22481673 | 397284 |
| −0.424 | RBM28 | 7:127950724 | cg03119308 | 63402 |
| −0.423 | | 13:21896301 | cg13730219 | 253914 |
| −0.423 | | 8:142283564 | cg04123498 | 82844 |
| −0.421 | MYOCD | 17:12562530 | cg14192979 | 263428 |
| −0.421 | SLFN12 | 17:33734664 | cg20086657 | 361521 |
| −0.417 | | 2:150845309 | cg15958422 | 293993 |
| −0.409 | IFT43; TGFB3 | 14:76443578 | cg21193926 | 378403 |
| −0.405 | FAM101A; NCOR2; | 12:124810173 | cg13127920 | 242348 |
| | ZNF664- | | | |
| | FAM101A | | | |
| −0.403 | SLC2A9 | 4:10009916 | cg21795255 | 387383 |
| −0.403 | ATXN7L1 | 7:105306555 | cg11957130 | 223895 |
| −0.403 | TRIM64C | 11:49073835 | cg06445586 | 125882 |
| −0.400 | HLA-A | 6:29906977 | cg26739327 | 466540 |
| −0.394 | SCN4B | 11:118022607 | cg22251955 | 394153 |
| −0.392 | LINC00254 | 16:1939295 | cg10051493 | 191486 |
| −0.391 | MIR4457; TERT | 5:1300309 | cg14597862 | 271789 |
| −0.390 | | 14:22279816 | cg16423096 | 302000 |
| −0.384 | RPL27A; SNORA3; | 11:8714324 | cg15828613 | 291887 |
| | SNORA45; | | | |
| | ST5 | | | |
| −0.382 | MXRA7 | 17:74679597 | cg03810198 | 76895 |
| −0.378 | CD82 | 11:44649802 | cg21974656 | 390131 |
| −0.377 | BPIFA2 | 20:31755943 | cg05840533 | 115130 |
| −0.377 | CCDC109B | 4:110524473 | cg17082366 | 313142 |
| −0.375 | TRIM24 | 7:138229989 | cg12743416 | 236587 |
| −0.374 | RPTOR | 17:78935070 | cg17906851 | 326284 |
| −0.371 | KDM2B | 12:121893769 | cg07741840 | 150784 |
| −0.370 | HCG4B | 6:29895204 | cg26121931 | 455779 |
| −0.369 | NSMCE4A | 10:123731471 | cg19360212 | 349382 |
| −0.369 | NMNAT3 | 3:139397901 | cg15295200 | 283344 |
| −0.366 | | 12:25454990 | cg25134647 | 440489 |
| −0.365 | | 6:55778951 | cg11290949 | 212735 |
| −0.361 | MRPL23 | 11:1985287 | cg06258939 | 122771 |
| −0.351 | | 4:8569129 | cg06991380 | 136538 |
| −0.350 | CDH4; MIR1257 | 20:60520624 | cg16423285 | 302003 |
| −0.349 | MAST2 | 1:46420220 | cg22337626 | 395319 |
| −0.346 | KIAA1908; PSMG3 | 7:1616229 | cg23403836 | 412403 |
| −0.346 | SUMO3; UBE2G2 | 21:46220161 | cg00272795 | 5810 |
| −0.337 | OR10K1 | 1:158435277 | cg01463139 | 30452 |
| −0.337 | SLCO2B1 | 11:74861433 | cg20704148 | 370892 |
| −0.329 | SPATS2L | 2:201289756 | cg17174466 | 314712 |
| −0.327 | SFT2D3; WDR33 | 2:128453335 | cg03738707 | 75556 |
| −0.325 | HLA-DRB1 | 6:32555411 | cg00598125 | 12786 |
| −0.323 | CCHCR1; PSORS1C2 | 6:31107186 | cg07414487 | 144678 |
| −0.322 | HLA-A | 6:29913343 | cg19585676 | 353041 |
| −0.320 | LOC100628307 | 14:80858152 | cg07572984 | 147668 |
| −0.318 | PSORS1C3 | 6:31148606 | cg01982166 | 40677 |
| −0.313 | PTGER3; ZRANB2- | 1:71511514 | cg11418303 | 214891 |
| | AS1 | | | |
| −0.313 | | 10:131209556 | cg02372404 | 48486 |
| −0.310 | | 7:158750985 | cg00413089 | 8734 |
| −0.307 | HCG4B | 6:29894152 | cg25644740 | 448500 |
| −0.305 | | 2:5605864 | cg23233416 | 409551 |
| −0.305 | SLC47A2 | 17:19620263 | cg08102564 | 157230 |
| −0.302 | SYS1; SYS1- | 20:44007674 | cg17811452 | 324650 |
| | DBNDD2; TP53TG5 | | | |
| −0.301 | COL4A2 | 13:111115558 | cg07618759 | 148582 |
| −0.300 | CDCA8; EPHA10 | 1:38180356 | cg06437931 | 125736 |
| −0.300 | RPTOR | 17:78809403 | cg20502501 | 367732 |
| −0.299 | NDRG4 | 16:58534681 | cg00758881 | 16033 |
| −0.296 | ITIH1; ITIH3 | 3:52828628 | cg05393861 | 107345 |
| −0.296 | DPM2; FAM102A | 9:130705120 | cg01681863 | 34567 |
| −0.295 | TTC34 | 1:2710376 | cg21783012 | 387180 |
| −0.292 | HCG4B | 6:29895175 | cg23681866 | 416899 |
| −0.290 | HCG4B | 6:29895187 | cg15411272 | 285048 |
| −0.288 | PSMD9; WDR66 | 12:122356390 | cg21171335 | 377993 |
| −0.286 | BOC | 3:112927486 | cg27187580 | 474373 |
| −0.286 | MCF2L | 13:113688132 | cg15388766 | 284663 |
| −0.285 | B4GALNT4 | 11:364752 | cg25497175 | 446150 |
| −0.283 | | 8:92570895 | cg11420142 | 214927 |
| −0.281 | | 7:158751184 | cg12744031 | 236605 |
| −0.279 | | 13:27077539 | cg03531388 | 71371 |
| −0.278 | CASP7 | 10:115465924 | cg01128042 | 23762 |
| −0.278 | HCG4B | 6:29895260 | cg24838316 | 435648 |
| −0.278 | | 2:69440951 | cg02444957 | 49778 |
| −0.277 | OR51A2; OR51A4 | 11:4976263 | cg25641451 | 448448 |
| −0.274 | FRMD4A | 10:13972210 | cg07629776 | 148782 |
| −0.274 | | 22:25571929 | cg19707653 | 355076 |
| −0.272 | ATHL1; NLRP6 | 11:285037 | cg22280068 | 394534 |
| −0.269 | SORBS2 | 4:186549051 | cg09120722 | 175360 |
| −0.267 | | 11:5384517 | cg26567385 | 463630 |
| −0.265 | MRPL44; WDFY1 | 2:224813276 | cg15176306 | 281664 |
| −0.265 | | 19:29218101 | cg04546413 | 91043 |
| −0.264 | | 10:47964834 | cg16435686 | 302231 |
| −0.264 | | 7:158750244 | cg12954512 | 239779 |
| −0.263 | | 16:14380714 | cg03940883 | 79274 |
| −0.262 | B4GALT6 | 18:29205358 | cg11986743 | 224388 |
| −0.261 | FBRSL1 | 12:133078117 | cg23836570 | 419138 |
| −0.259 | LOC440905 | 2:130795582 | cg18480627 | 335932 |
| −0.257 | SLC27A1 | 19:17600122 | cg02707854 | 55128 |
| −0.257 | | 5:54117761 | cg25997988 | 453719 |
| −0.257 | ATOH1 | 4:94759825 | cg05893845 | 116159 |
| −0.256 | LOC100289473 | 20:1757570 | cg03299990 | 66803 |
| −0.252 | COL18A1 | 21:46921982 | cg05638648 | 111601 |
| −0.251 | | 7:1923695 | cg12169700 | 227539 |
| −0.250 | C1orf86; PRKCZ | 1:2121039 | cg26227225 | 457598 |
| −0.248 | | 5:31106255 | cg12908908 | 239081 |
| −0.247 | FAM157B | 9:141105974 | cg04824555 | 96218 |
| −0.247 | | 7:1976457 | cg03075889 | 62651 |
| −0.246 | SLC6A3 | 5:1420305 | cg07664579 | 149363 |
| −0.245 | ADAMTS2 | 5:178565001 | cg01387905 | 28837 |
| −0.243 | | 7:136832262 | cg05364766 | 106693 |
| −0.241 | | 19:13276344 | cg19225953 | 347327 |
| −0.241 | PSMD9; WDR66 | 12:122356400 | cg22618164 | 399325 |
| −0.239 | | 4:9479622 | cg01394167 | 28957 |
| −0.239 | | 12:125411922 | cg07877257 | 153188 |
| −0.238 | | 7:158750607 | cg00815399 | 17228 |
| −0.238 | RNF213 | 17:78264297 | cg11606607 | 217718 |
| −0.237 | TMEM39B | 1:32535981 | cg10312513 | 196231 |
| −0.234 | LPIN1 | 2:11888753 | cg00523161 | 11124 |
| −0.234 | SGK110 | 19:56061334 | cg18795732 | 340965 |
| −0.232 | LOC154822; VIPR2 | 7:158821175 | cg25909532 | 452273 |
| −0.231 | | 7:158750384 | cg11945929 | 223689 |
| −0.229 | | 1:161410551 | cg22730047 | 401169 |
| −0.228 | PLEC | 8:145003776 | cg18000391 | 327713 |
| −0.227 | | 17:80849463 | cg14195178 | 263473 |
| −0.226 | HOXA3; HOXA4; | 7:27170394 | cg19142026 | 346203 |
| | LOC100133311 | | | |
| −0.225 | | 6:16962712 | cg19300401 | 348504 |
| −0.225 | FAM66A | 8:12237626 | cg10206627 | 194443 |
| −0.223 | HTATIP2 | 11:20384377 | cg26155681 | 456393 |
| −0.221 | AP2A2 | 11:970389 | cg12893697 | 238836 |
| −0.220 | COL4A2 | 13:111111172 | cg19218082 | 347212 |
| −0.218 | PAPLN | 14:73712902 | cg14834903 | 275901 |
| −0.218 | OSBPL5 | 11:3174092 | cg06120313 | 120406 |
| −0.217 | C1orf86; PRKCZ | 1:2120985 | cg20300514 | 364680 |
| −0.217 | | 7:1367727 | cg23896876 | 420086 |
| −0.216 | EGLN2; MIA- | 19:41307778 | cg21653913 | 385460 |
| | RAB4B; RAB4B; | | | |
| | RAB4B- | | | |
| | EGLN2 | | | |
| −0.216 | | 13:80755568 | cg00750481 | 15862 |
| −0.216 | | 5:176099987 | cg11583351 | 217324 |
| −0.215 | | 5:125171542 | cg12599971 | 234303 |
| −0.215 | MYO1D | 17:31149877 | cg01050010 | 22131 |
| −0.213 | DPYSL4; JAKMIP3 | 10:134001728 | cg10144198 | 193247 |
| −0.213 | | 19:21863715 | cg26562263 | 463546 |
| −0.213 | NDRG4 | 16:58533979 | cg27113419 | 473118 |
| −0.212 | BMP4 | 14:54410717 | cg16720578 | 307533 |
| −0.210 | | 5:134388224 | cg03827835 | 77177 |
| −0.209 | C1orf86; PRKCZ | 1:2121349 | cg05337761 | 106096 |
| −0.209 | SFT2D3; WDR33 | 2:128453445 | cg11059159 | 208817 |
| −0.208 | APOA1; APOC3; | 11:116708413 | cg09558982 | 183152 |
| | SIK3 | | | |
| −0.207 | SFT2D3; WDR33 | 2:128453484 | cg25277809 | 442618 |
| −0.206 | | 7:158750417 | cg10079374 | 191993 |
| −0.205 | | 10:43522343 | cg08461752 | 163848 |
| −0.205 | LASP1 | 17:37024042 | cg20826740 | 372827 |
| −0.204 | NSUN4 | 1:46807113 | cg17806798 | 324558 |
| −0.204 | | 1:149145082 | cg16661522 | 306375 |
| −0.204 | PTP4A3 | 8:142427117 | cg04687040 | 93680 |
| −0.204 | | 5:92414398 | cg18783429 | 340738 |
| −0.203 | FLJ37453 | 1:16154831 | cg21385522 | 381217 |
| −0.203 | | 12:132869069 | cg05948955 | 117271 |
| −0.202 | RADIL | 7:4854126 | cg08799816 | 169789 |
| −0.202 | | 1:34615965 | cg21440084 | 381930 |
| −0.201 | ARHGEF40; C14orf176; | 14:21567333 | cg00968545 | 20358 |
| | ZNF219 | | | |
| −0.200 | | 7:1948755 | cg16178271 | 297641 |
| −0.199 | TNS1 | 2:218707806 | cg17588704 | 321484 |
| −0.198 | HLA-C | 6:31241294 | cg05338672 | 106118 |
| −0.197 | SLC27A1 | 19:17599784 | cg17132030 | 313955 |
| −0.196 | | 11:19699299 | cg18593660 | 337773 |
| −0.196 | | 16:1797050 | cg07869343 | 153029 |
| −0.195 | GAS2L2; RASL10B | 17:34067305 | cg23633026 | 415965 |
| −0.195 | | 7:158790006 | cg09640425 | 184513 |
| −0.195 | LRRC27 | 10:134150581 | cg25076597 | 439582 |
| −0.194 | LOC440905 | 2:130795350 | cg25180228 | 441163 |
| −0.194 | ZC3H12D | 6:149785754 | cg24131442 | 424218 |
| −0.193 | CES1 | 16:55867072 | cg03744383 | 75666 |
| −0.193 | ACSF3 | 16:89152443 | cg00324979 | 6844 |
| −0.192 | | 16:56000067 | cg00991179 | 20841 |
| −0.192 | AP2A2 | 11:970664 | cg06064525 | 119407 |
| −0.192 | CHTOP; S100A1; | 1:153599704 | cg11343894 | 213623 |
| | S100A13 | | | |
| −0.190 | DBNL; PGAM2; | 7:44104860 | cg07075347 | 138233 |
| | POLM | | | |
| −0.189 | MYO10 | 5:16895511 | cg02288345 | 46701 |
| −0.189 | | 19:29218262 | cg14983838 | 278359 |
| −0.189 | EIF2D | 1:206786180 | cg21936179 | 389599 |
| −0.189 | FN3K; TBCD | 17:80708632 | cg02398342 | 49038 |
| −0.188 | TM7SF4 | 8:105342491 | cg04554929 | 91221 |
| −0.187 | NXN | 17:707141 | cg20403644 | 366219 |
| −0.187 | NFATC1 | 18:77292443 | cg06675417 | 130167 |
| −0.186 | KIAA1751 | 1:1886501 | cg06090818 | 119880 |
| −0.185 | LOC100507055 | 12:133180238 | cg26621607 | 464484 |
| −0.185 | SLC9A3 | 5:502291 | cg14137381 | 262235 |
| −0.184 | CLDN22; CLDN24; | 4:184250312 | cg14241748 | 264522 |
| | WWC2 | | | |
| −0.184 | MMD2 | 7:5000111 | cg02276823 | 46453 |
| −0.184 | COL5A1 | 9:137691430 | cg13889467 | 257004 |
| −0.184 | | 6:30000187 | cg01915885 | 39235 |
| −0.184 | SLC47A2 | 17:19627822 | cg12434897 | 231546 |
| −0.183 | KRTAP4-7 | 17:39240789 | cg23827950 | 418999 |
| −0.182 | | 19:29218302 | cg12756686 | 236783 |
| −0.182 | GAB2 | 11:78052863 | cg24769381 | 434565 |
| −0.182 | | 13:33854227 | cg15405588 | 284964 |
| −0.182 | | 13:112978703 | cg19891452 | 358388 |
| −0.180 | C11orf53 | 11:111148753 | cg27649396 | 482130 |
| −0.179 | | 19:29218774 | cg03161606 | 64225 |
| −0.178 | ADAP1; COX19 | 7:1003645 | cg08735705 | 168762 |
| −0.178 | MTG1; PAOX | 10:135202877 | cg06080948 | 119697 |
| −0.177 | NEUROG3 | 10:71339632 | cg02330874 | 47587 |
| −0.177 | C10orf96 | 10:118084587 | cg02721176 | 55417 |
| −0.177 | BAI1 | 8:143546858 | cg02048922 | 41986 |
| −0.176 | | 8:119750651 | cg26711508 | 466113 |
| −0.176 | GPR50 | X:150351493 | cg20071203 | 361302 |
| −0.175 | LARS2 | 3:45429626 | cg13510812 | 249280 |
| −0.175 | TUBG2 | 17:40808068 | cg24417155 | 428624 |
| −0.175 | OR12D2 | 6:29364799 | cg25786333 | 450628 |
| −0.174 | RASA3 | 13:114872606 | cg27086157 | 472626 |
| −0.174 | C21orf128; UMODL1 | 21:43529162 | cg02489157 | 50718 |
| −0.174 | MYT1L | 2:2119533 | cg26383138 | 460416 |
| −0.174 | | 10:125751386 | cg00502035 | 10662 |
| −0.174 | | 7:102134668 | cg17207545 | 315260 |
| −0.173 | NRG1 | 8:32579253 | cg20127899 | 362151 |
| −0.173 | CHTOP; S100A1; | 1:153599671 | cg13946767 | 258256 |
| | S100A13 | | | |
| −0.173 | APOA1BP; IQGAP3; | 1:156551787 | cg09319828 | 178942 |
| | TTC24 | | | |
| −0.172 | ATP11A | 13:113413587 | cg08484560 | 164316 |
| −0.171 | NKX2-3 | 10:101287609 | cg10947831 | 206964 |
| −0.171 | | 5:171057282 | cg10881242 | 205925 |
| −0.171 | ADAP1; COX19 | 7:1003710 | cg12575883 | 233841 |
| −0.171 | CRAMP1L; HN1L | 16:1722957 | cg04245870 | 85306 |
| −0.170 | ADAMTS7 | 15:79107452 | cg23450377 | 413109 |
| −0.170 | PCSK6 | 15:101932559 | cg27370471 | 477437 |
| −0.170 | | 19:1737123 | cg08692111 | 167944 |
| −0.170 | C5orf38; IRX2 | 5:2743124 | cg18803147 | 341088 |
| −0.169 | BAI1 | 8:143581481 | cg26953288 | 470357 |
| −0.169 | STK32B | 4:5374425 | cg14422932 | 268145 |
| −0.168 | | X:152584950 | cg03201165 | 64963 |
| −0.168 | POU5F1; PSORS1C3 | 6:31146845 | cg20073472 | 361344 |
| −0.168 | NDRG4 | 16:58534708 | cg04484415 | 89876 |
| −0.168 | FAM20C | 7:194798 | cg12042135 | 225245 |
| −0.167 | EDN1 | 6:12292676 | cg27565517 | 480713 |
| −0.167 | C1QTNF8 | 16:1152511 | cg06394109 | 125022 |
| −0.167 | KLK5; KLK6 | 19:51456308 | cg00768359 | 16234 |
| −0.166 | ADAP1 | 7:961457 | cg06589239 | 128495 |
| −0.166 | | 11:134892703 | cg21757617 | 386803 |
| −0.166 | HOXA3; HOXA4; | 7:27170892 | cg14359292 | 266882 |
| | HOXA5; LOC100133311 | | | |
| −0.165 | LCP1 | 13:46757415 | cg06477663 | 126420 |
| −0.165 | SPAG11A | 8:7720259 | cg23703303 | 417310 |
| −0.165 | | 19:21767566 | cg19051117 | 344954 |
| −0.165 | OR10R2 | 1:158450237 | cg04132017 | 83014 |
| −0.165 | LOC284661 | 1:4481995 | cg20252997 | 363933 |
| −0.164 | FHOD3 | 18:34327498 | cg21367586 | 380971 |
| −0.164 | PCDHB4 | 5:140501812 | cg06048354 | 119137 |
| −0.164 | HLA-DQB2 | 6:32729174 | cg04418355 | 88678 |
| −0.164 | | 6:28447087 | cg26968378 | 470632 |
| −0.163 | BAI1 | 8:143580965 | cg09544050 | 182856 |
| −0.163 | LOC440905 | 2:130794753 | cg25239986 | 442097 |
| −0.163 | SPINK5 | 5:147473666 | cg04829448 | 96297 |
| −0.163 | ZNF718 | 4:124342 | cg12717203 | 236185 |
| −0.163 | TIAM2 | 6:155464712 | cg24207161 | 425489 |
| −0.162 | PACS2 | 14:105830721 | cg19499452 | 351610 |
| −0.162 | MCTS1 | X:119738550 | cg00357087 | 7563 |
| −0.162 | RASA3 | 13:114900021 | cg06611532 | 128857 |
| −0.161 | | 4:187984958 | cg19632603 | 353880 |
| −0.160 | ITGA11 | 15:68713677 | cg02454536 | 49961 |
| −0.160 | ACAP1; KCTD11; | 17:7253720 | cg02676175 | 54546 |
| | TMEM95 | | | |
| −0.160 | HAAO | 2:43023945 | cg14631114 | 272427 |
| −0.160 | WWP2 | 16:69830414 | cg03424554 | 69244 |
| −0.160 | PGRMC2 | 4:129212177 | cg02096220 | 43042 |
| −0.159 | SHISA6 | 17:11142733 | cg23474049 | 413465 |
| −0.159 | | 6:28447107 | cg12584458 | 233995 |
| −0.159 | ZP2 | 16:21222939 | cg18249108 | 332126 |
| −0.159 | CLCNKA; HSPB7 | 1:16349079 | cg08231696 | 159747 |
| −0.158 | SPINK7 | 5:147699718 | cg08859406 | 170938 |
| −0.158 | GNAS | 20:57463503 | cg11480267 | 215775 |
| −0.158 | STX2 | 12:131303247 | cg11011512 | 208090 |
| −0.158 | ADCK4 | 19:41208803 | cg07615236 | 148518 |
| −0.158 | | 6:148540308 | cg21796170 | 387391 |
| −0.158 | NDRG4 | 16:58534157 | cg05725404 | 113149 |
| −0.157 | ANXA9; CERS2 | 1:150954826 | cg13320146 | 245435 |
| −0.157 | SAMD3 | 6:130504413 | cg24048806 | 422810 |
| −0.157 | TCL6 | 14:96129574 | cg05093429 | 101497 |
| −0.157 | | 6:55761410 | cg17273096 | 316241 |
| −0.156 | B3GNTL1 | 17:81008971 | cg17652174 | 322327 |
| −0.156 | RNF219 | 13:79234251 | cg01819759 | 37343 |
| −0.156 | GGNBP2; MYO19; | 17:34891843 | cg02097479 | 43078 |
| | PIGW | | | |
| −0.156 | | 7:79964738 | cg22110839 | 392010 |
| −0.156 | HOXA3; HOXA4; | 7:27170412 | cg11410718 | 214730 |
| | LOC100133311 | | | |
| −0.155 | | 6:58777827 | cg26951520 | 470325 |
| −0.155 | KIRREL3- | 11:126872863 | cg17273911 | 316252 |
| | AS3 | | | |
| −0.155 | NRXN1 | 2:51260399 | cg00345522 | 7288 |
| −0.155 | | 14:106025958 | cg27055313 | 472099 |
| −0.155 | | 4:60001000 | cg11281224 | 212579 |
| −0.154 | | 4:9479947 | cg12006118 | 224679 |
| −0.154 | IL12RB1 | 19:18170383 | cg26642774 | 464790 |
| −0.154 | | 1:22599443 | cg07371337 | 143948 |
| −0.154 | ZNF845 | 19:53828996 | cg22256944 | 394221 |
| −0.154 | | 13:112705636 | cg01896130 | 38843 |
| −0.154 | HOTAIR; HOXC12 | 12:54354590 | cg05573844 | 110417 |
| −0.154 | | 13:61758710 | cg15508935 | 286618 |
| −0.154 | MICA | 6:31382027 | cg20144487 | 362399 |
| −0.153 | | 6:156983263 | cg05282260 | 105071 |
| −0.153 | MIR1283- | 19:54199538 | cg26325497 | 459342 |
| | 1; MIR518B; MIR518F; | | | |
| | MIR519B; | | | |
| | MIR519C; | | | |
| | MIR520A; MIR520B; | | | |
| | MIR523; | | | |
| | MIR525; MIR526A1; | | | |
| | MIR526B | | | |
| −0.153 | MKX | 10:28030033 | cg13806489 | 255420 |
| −0.153 | | 10:53639124 | cg06976598 | 136324 |
| −0.153 | CHTOP; S100A1; | 1:153600156 | cg07898899 | 153567 |
| | S100A13 | | | |
| −0.152 | | 11:24346161 | cg05202300 | 103488 |
| −0.152 | LOC728613 | 5:1641766 | cg08769156 | 169313 |
| −0.152 | LOC100506388; | 17:184106 | cg15996459 | 294655 |
| | RPH3AL | | | |
| −0.151 | PALMD | 1:100111849 | cg24603803 | 431699 |
| −0.151 | HCG4B | 6:29895116 | cg15671450 | 289296 |
| −0.151 | | 8:88760082 | cg05893029 | 116145 |
| −0.150 | GPR158 | 10:25620462 | cg01006048 | 21182 |
| −0.150 | | 14:95155784 | cg16462006 | 302671 |
| −0.150 | PALM2; PALM2- | 9:112562314 | cg13690280 | 253070 |
| | AKAP2 | | | |
| −0.150 | LOC100507055; | 12:133185615 | cg18833933 | 341613 |
| | P2RX2 | | | |
| −0.150 | IGF2; IGF2- | 11:2154132 | cg11717189 | 219595 |
| | AS; INS- | | | |
| | IGF2; MIR483 | | | |
| −0.149 | MYO16 | 13:109833854 | cg10697882 | 202881 |
| −0.149 | SUMO3 | 21:46239952 | cg22595657 | 398990 |
| −0.149 | EME2; MRPS34; | 16:1822124 | cg09540102 | 182804 |
| | NME3; SPSB3 | | | |
| −0.149 | TTLL10 | 1:1118157 | cg16366262 | 300931 |
| −0.149 | | 7:158269409 | cg17429772 | 318912 |
| −0.149 | | 12:133003907 | cg04741728 | 94673 |
| −0.148 | SHANK2 | 11:70493931 | cg05794931 | 114366 |
| −0.148 | CRTAC1 | 10:99734513 | cg19421526 | 350393 |
| −0.148 | PXDN | 2:1734344 | cg12760299 | 236833 |
| −0.148 | | 6:28447115 | cg21903646 | 389050 |
| −0.148 | GGNBP1; LINC00336 | 6:33561099 | cg04329454 | 86936 |
| −0.148 | CLGN | 4:141317067 | cg22901919 | 403995 |
| −0.147 | COL11A2; RXRB | 6:33158020 | cg16507569 | 303394 |
| −0.147 | | 7:93960063 | cg01827933 | 37531 |
| −0.147 | LHX6 | 9:124983482 | cg13832372 | 255929 |
| −0.147 | ISL1 | 5:50688913 | cg26293019 | 458765 |
| −0.147 | DBNL; PGAM2; | 7:44105050 | cg16627090 | 305718 |
| | POLM | | | |
| −0.147 | | 3:193587490 | cg21197336 | 378486 |
| −0.147 | | 14:107095056 | cg07958169 | 154668 |
| −0.147 | SNED1 | 2:241975140 | cg09991306 | 190473 |
| −0.147 | HOXA3; HOXA4; | 7:27170755 | cg03724423 | 75252 |
| | HOXA5; LOC100133311 | | | |
| −0.147 | SEPT3; WBP2NL | 22:42395067 | cg22189786 | 393238 |
| −0.147 | | 2:208541770 | cg03716125 | 75048 |
| −0.146 | | 5:66541588 | cg11553311 | 216848 |
| −0.146 | KTN1; KTN1- | 14:56046098 | cg16907514 | 310470 |
| | AS1 | | | |
| −0.146 | FAM116B; PLXNB2 | 22:50753068 | cg20435485 | 366698 |
| −0.146 | HOXA3; HOXA4; | 7:27170388 | cg07317062 | 142981 |
| | LOC100133311 | | | |
| −0.145 | HLA-A | 6:29911295 | cg09535358 | 182715 |
| −0.145 | ARNTL | 11:13302098 | cg13286116 | 244869 |
| −0.145 | MSH5; MSH5- | 6:31731881 | cg03392100 | 68641 |
| | SAPCD1; SAPCD1; | | | |
| | VWA7 | | | |
| −0.145 | IL31; LRRC43 | 12:122651623 | cg14874216 | 276626 |
| −0.145 | MSH5; MSH5- | 6:31734192 | cg13187827 | 243288 |
| | SAPCD1; SAPCD1; | | | |
| | VWA7 | | | |
| −0.144 | SERPINB6 | 6:2972435 | cg08155050 | 158293 |
| −0.144 | DLGAP2 | 8:1455764 | cg10636144 | 201951 |
| −0.144 | SAMD11 | 1:869368 | cg13692836 | 253138 |
| −0.144 | RPH3AL | 17:146926 | cg04172345 | 83843 |
| −0.144 | | 1:228743235 | cg12437277 | 231594 |
| −0.143 | | 17:79455736 | cg09841001 | 187897 |
| −0.143 | C11orf53; C11orf92 | 11:111155021 | cg03554573 | 71909 |
| −0.143 | ATXN1 | 6:16413624 | cg11291305 | 212741 |
| −0.143 | FEM1A | 19:4785374 | cg14818248 | 275598 |
| −0.143 | HLA-A | 6:29912713 | cg18349863 | 333730 |
| −0.143 | TP73 | 1:3600879 | cg17471939 | 319626 |
| −0.143 | | 1:2863815 | cg25137787 | 440554 |
| −0.143 | ARNT2 | 15:80824318 | cg19708986 | 355104 |
| −0.143 | | 13:99084682 | cg03040740 | 61905 |
| −0.143 | | 6:28446840 | cg01792601 | 36700 |
| −0.142 | LRRC15 | 3:194091167 | cg07048348 | 137676 |
| −0.142 | | 1:37231474 | cg21952052 | 389839 |
| −0.142 | DFNA5 | 7:24742552 | cg25709790 | 449401 |
| −0.142 | PACS2 | 14:105830606 | cg12425861 | 231390 |
| −0.142 | INPP5K; LOC100306951; | 17:1412950 | cg07185664 | 140562 |
| | PITPNA | | | |
| −0.141 | LOC100506388; | 17:184131 | cg24871089 | 436253 |
| | RPH3AL | | | |
| −0.141 | DDX58 | 9:32525315 | cg14286514 | 265460 |
| −0.141 | | 7:158789849 | cg19418458 | 350346 |
| −0.141 | ARHGAP30; PVRL4 | 1:161042063 | cg00862398 | 18157 |
| −0.141 | IKZF3; ZPBP2 | 17:38024146 | cg16810031 | 309049 |
| −0.141 | | 17:21416281 | cg00007215 | 167 |
| −0.141 | | 8:23605601 | cg03324961 | 67319 |
| −0.141 | PDE6B | 4:645781 | cg01132407 | 23844 |
| −0.140 | HHIPL1 | 14:100130465 | cg18678107 | 339014 |
| −0.140 | MTG1; PAOX | 10:135202906 | cg24644436 | 432348 |
| −0.140 | CES1 | 16:55866757 | cg03880033 | 78129 |
| −0.139 | TLX1NB | 10:102872719 | cg17034508 | 312397 |
| −0.139 | PCDHB17; PCDHB6 | 5:140530410 | cg23247945 | 409860 |
| −0.139 | TMEM100 | 17:53800484 | cg18040354 | 328429 |
| −0.139 | PRKG2 | 4:82075193 | cg22772235 | 401742 |
| −0.139 | SEL1L2 | 20:13830102 | cg17971895 | 327285 |
| −0.139 | | 5:74908142 | cg19683494 | 354666 |
| −0.139 | | 2:131010647 | cg27624826 | 481683 |
| −0.139 | HIPK4; PRX | 19:40904691 | cg24923931 | 437130 |
| −0.138 | SCN7A | 2:167350883 | cg14771658 | 274784 |
| −0.138 | | 15:98196247 | cg19459332 | 350984 |
| −0.137 | PMPCA; SDCCAG3; | 9:139299357 | cg14108380 | 261681 |
| | SNAPC4 | | | |
| −0.137 | | 16:62984521 | cg02248103 | 45873 |
| −0.137 | CYB5D2; ZZEF1 | 17:4043867 | cg04417708 | 88669 |
| −0.137 | CST11; CSTL1 | 20:23433608 | cg11657817 | 218579 |
| −0.137 | CTC1; LINC00324 | 17:8124867 | cg20250341 | 363887 |
| −0.137 | CNR2; FUCA1 | 1:24195143 | cg24792360 | 434918 |
| −0.137 | PKNOX2 | 11:125170859 | cg23418965 | 412666 |
| −0.137 | PAX2 | 10:102592366 | cg03286031 | 66537 |
| −0.137 | TEX2 | 17:62341028 | cg18312782 | 333101 |
| −0.137 | | 2:226913713 | cg05293897 | 105270 |
| −0.136 | TMEM72-AS1 | 10:45374906 | cg20638675 | 369712 |
| −0.136 | HLA-DQB2 | 6:32729130 | cg07180897 | 140474 |
| −0.136 | ALK | 2:29751968 | cg01412762 | 29371 |
| −0.136 | | 19:29218732 | cg12667521 | 235503 |
| −0.136 | TOX2 | 20:42548586 | cg20889774 | 373555 |
| −0.136 | RECK | 9:36036514 | cg13392078 | 246714 |
| −0.136 | MIR593 | 7:127720749 | cg20426275 | 366531 |
| −0.136 | ODZ4 | 11:78948859 | cg12642289 | 235052 |
| −0.136 | MTERF | 7:91510405 | cg16284459 | 299467 |
| −0.136 | RBFOX3 | 17:77302162 | cg08223357 | 159591 |
| −0.136 | | 18:44770781 | cg24371990 | 427906 |
| −0.136 | CACNA1C | 12:2696048 | cg08166587 | 158536 |
| −0.136 | DAB1 | 1:58089001 | cg00026909 | 659 |
| −0.135 | | 6:156983304 | cg08839808 | 170533 |
| −0.135 | MTG1; PAOX | 10:135202839 | cg17143376 | 314138 |
| −0.135 | PIP5K1A; VPS72 | 1:151170427 | cg24720336 | 433732 |
| −0.135 | ANKS3; C16orf71; | 16:4793770 | cg00605362 | 12928 |
| | ZNF500 | | | |
| −0.135 | | 11:91950460 | cg20506843 | 367791 |
| −0.135 | RTN4RL1 | 17:1835482 | cg23676314 | 416771 |
| −0.135 | | 2:10984512 | cg00442205 | 9317 |
| −0.134 | ZDHHC13 | 11:19138045 | cg00161556 | 3630 |
| −0.134 | PAPLN | 14:73712491 | cg09636214 | 184437 |
| −0.134 | CTRB2 | 16:75242114 | cg08467866 | 163985 |
| −0.133 | ZNF718 | 4:125112 | cg10197305 | 194260 |
| −0.133 | IGF2; IGF2- | 11:2154113 | cg13165070 | 242895 |
| | AS; INS- | | | |
| | IGF2; MIR483 | | | |
| −0.133 | | 2:38099030 | cg02752932 | 56067 |
| −0.133 | TACC2 | 10:123873748 | cg23828763 | 419014 |
| −0.133 | | 7:115116310 | cg04544267 | 91006 |
| −0.133 | CES1 | 16:55866997 | cg23196985 | 408839 |
| −0.133 | CCDC105 | 19:15121385 | cg18739061 | 339959 |
| −0.133 | | 19:43203368 | cg24333150 | 427217 |
| −0.132 | FXYD2; FXYD6- | 11:117696743 | cg11820026 | 221463 |
| | FXYD2 | | | |
| −0.132 | DAB2IP | 9:124363848 | cg21234082 | 379229 |
| −0.132 | LOC100289187 | 7:99195819 | cg12290671 | 229416 |
| −0.132 | OCA2 | 15:28014040 | cg15194100 | 281887 |
| −0.132 | NAV1 | 1:201644923 | cg24253904 | 426103 |
| −0.132 | SLC24A6 | 12:113773298 | cg12583184 | 233973 |
| −0.131 | | 3:42265641 | cg18812386 | 341259 |
| −0.131 | GREB1; MIR4429 | 2:11680020 | cg11534680 | 216555 |
| −0.131 | TXNRD1 | 12:104676774 | cg15775217 | 291055 |
| −0.131 | CCBL2; RBMXL1 | 1:89459529 | cg11309454 | 213030 |
| −0.131 | GPR12 | 13:27338713 | cg14339397 | 266524 |
| −0.131 | | 9:34810228 | cg13923371 | 257761 |
| −0.131 | IFI44; IFI44L | 1:79114976 | cg07107453 | 138862 |
| −0.130 | | 5:171057196 | cg07871442 | 153079 |
| −0.130 | OVCH2 | 11:7709186 | cg25833922 | 451333 |
| −0.130 | PSMD11 | 17:30770961 | cg09309269 | 178739 |
| −0.130 | DEFA4; DEFA6 | 8:6783521 | cg02932321 | 59694 |
| −0.130 | TEPP | 16:58016655 | cg01479664 | 30752 |
| −0.130 | IL28B | 19:39737768 | cg04722177 | 94275 |
| −0.130 | IL20RA | 6:137366545 | cg08823985 | 170226 |
| −0.130 | PA2G4; RPL41; | 12:56509603 | cg18500368 | 336269 |
| | ZC3H10 | | | |
| −0.129 | | 14:26338282 | cg16725552 | 307629 |
| −0.129 | ATHL1; NLRP6 | 11:281516 | cg06432119 | 125636 |
| −0.129 | GIMAP4 | 7:150264767 | cg08960815 | 172781 |
| −0.129 | KLHL29 | 2:23839710 | cg01387450 | 28832 |
| −0.129 | | 12:114701413 | cg10233830 | 194930 |
| −0.129 | | 2:62521325 | cg22770637 | 401725 |
| −0.129 | ALK | 2:30142677 | cg00643897 | 13652 |
| −0.129 | SEMA5B | 3:122712271 | cg11160908 | 210504 |
| −0.129 | TTF2 | 1:117604726 | cg19319037 | 348805 |
| −0.129 | C20orf54 | 20:741798 | cg19037007 | 344707 |
| −0.129 | | 12:69725435 | cg22375663 | 395880 |
| −0.129 | | 8:41585554 | cg17182837 | 314877 |
| −0.128 | | 3:118144311 | cg20207443 | 363278 |
| −0.128 | LINC00299 | 2:8444004 | cg18854004 | 341911 |
| −0.128 | | 11:106239635 | cg01152624 | 24270 |
| −0.128 | GNAS; GNAS- | 20:57431202 | cg09437522 | 181002 |
| | AS1 | | | |
| −0.128 | | 13:112978683 | cg20923605 | 374019 |
| −0.128 | MITF | 3:69915302 | cg03831180 | 77231 |
| −0.128 | PTN | 7:137029097 | cg15284177 | 283213 |
| −0.128 | | 1:149155792 | cg27554973 | 480528 |
| −0.127 | ENTPD1; LOC728558 | 10:97624891 | cg09217157 | 177016 |
| −0.127 | ZFPM1 | 16:88536950 | cg05183538 | 103174 |
| −0.127 | CCDC64B; HCFC1R1; | 16:3079953 | cg07063883 | 137997 |
| | THOC6; | | | |
| | TNFRSF12A | | | |
| −0.127 | APOA1BP; IQGAP3; | 1:156551873 | cg01010328 | 21258 |
| | TTC24 | | | |
| −0.127 | NRG1 | 8:32076032 | cg23964820 | 421269 |
| −0.127 | MTG1; PAOX | 10:135203102 | cg18563886 | 337268 |
| −0.127 | | 13:112984840 | cg27260867 | 475484 |
| −0.127 | AKAP8; AKAP8L | 19:15488902 | cg22765626 | 401667 |
| −0.127 | | 18:37379468 | cg15612221 | 288285 |
| −0.127 | | 17:21416258 | cg10674575 | 202559 |
| −0.127 | | 13:100583872 | cg07223206 | 141319 |
| −0.126 | KLK1; KLK15 | 19:51334890 | cg26325285 | 459337 |
| −0.126 | GALNT9; LOC100130238 | 12:132859608 | cg10173694 | 193804 |
| −0.126 | ATG4C | 1:63249199 | cg24082680 | 423369 |
| −0.126 | | 7:102330635 | cg06322601 | 123757 |
| −0.126 | | 3:73723546 | cg02131018 | 43720 |
| −0.126 | HIPK4; PRX | 19:40904851 | cg00478479 | 10159 |
| −0.126 | GNAT1; SLC38A3 | 3:50242325 | cg15335139 | 283889 |
| −0.126 | CYP4F30P | 2:131451149 | cg14204395 | 263669 |
| −0.126 | | 16:88804051 | cg26748794 | 466680 |
| −0.126 | HUNK | 21:33242495 | cg15636421 | 288718 |
| −0.125 | KLHL29 | 2:23840282 | cg17129809 | 313908 |
| −0.125 | MEIS1 | 2:66657913 | cg10835286 | 205203 |
| −0.125 | NUP98; PGAP2 | 11:3817849 | cg19247588 | 347686 |
| −0.125 | MIR4287; SCARA5 | 8:27735178 | cg04214878 | 84655 |
| −0.125 | SPINK7 | 5:147699892 | cg13022905 | 240779 |
| −0.125 | PTH1R | 3:46936655 | cg02527881 | 51488 |
| −0.125 | GIMAP4 | 7:150264987 | cg00323915 | 6821 |
| −0.125 | PTHLH | 12:28120054 | cg20389635 | 366021 |
| −0.125 | EIF2D | 1:206786174 | cg16966520 | 311311 |
| −0.124 | | 7:27475596 | cg10070328 | 191836 |
| −0.124 | | 1:161409970 | cg00975746 | 20506 |
| −0.124 | KCNK10 | 14:88791298 | cg02883668 | 58609 |
| −0.124 | | 15:34788847 | cg10767425 | 203961 |
| −0.124 | | 8:49044542 | cg11491002 | 215895 |
| −0.124 | DLGAP4 | 20:35064637 | cg01463540 | 30456 |
| −0.124 | HSP90B3P | 1:92099858 | cg04090794 | 82132 |
| −0.124 | NOSIP; PRRG2 | 19:50084626 | cg21913888 | 389236 |
| −0.124 | ISL1 | 5:50692281 | cg24549912 | 430883 |
| −0.124 | STC2 | 5:172751331 | cg01984743 | 40717 |
| −0.124 | | 2:72079276 | cg07258910 | 141932 |
| −0.123 | PKD1L2 | 16:81254169 | cg03406106 | 68931 |
| −0.123 | ANO4 | 12:101187093 | cg25027699 | 438862 |
| −0.123 | TRIM21 | 11:4415203 | cg07244098 | 141703 |
| −0.123 | MRPL38; TRIM65 | 17:73892097 | cg01453052 | 30258 |
| −0.123 | BTN3A3 | 6:26442290 | cg12537337 | 233273 |
| −0.123 | LOC100129620; | 1:99469634 | cg24373253 | 427922 |
| | LPPR5 | | | |
| −0.123 | FYN | 6:112165062 | cg26846943 | 468428 |
| −0.123 | ASB1 | 2:239334832 | cg08773314 | 169376 |
| −0.123 | FAM163A | 1:179713788 | cg14748380 | 274436 |
| −0.122 | KIAA1143; KIF15 | 3:44802604 | cg09333631 | 179217 |
| −0.122 | MAP3K7 | 6:91297516 | cg18683523 | 339091 |
| −0.122 | | 4:9382953 | cg02136252 | 43830 |
| −0.122 | | 5:141616065 | cg24749559 | 434242 |
| −0.122 | | 15:101389733 | cg07035436 | 137452 |
| −0.122 | | 5:72510846 | cg26653990 | 465004 |
| −0.122 | | 17:78955599 | cg11521079 | 216324 |
| −0.122 | | 2:227476235 | cg08982961 | 173162 |
| −0.122 | LRRC27 | 10:134150542 | cg22586726 | 398883 |
| −0.122 | EXOC7; GALR2; | 17:74073876 | cg07909178 | 153763 |
| | SRP68; ZACN | | | |
| −0.121 | TAF3 | 10:7859768 | cg09994553 | 190530 |
| −0.121 | CDK12; MED1 | 17:37608096 | cg15445000 | 285571 |
| −0.121 | HLA- | 6:33043849 | cg22483030 | 397307 |
| | DPA1; HLA- | | | |
| | DPB1 | | | |
| −0.121 | NUBP1 | 16:10837135 | cg09079882 | 174735 |
| −0.121 | TSLP | 5:110407538 | cg15739437 | 290539 |
| −0.121 | PSMD9; WDR66 | 12:122356598 | cg21016266 | 375557 |
| −0.121 | DOK7 | 4:3487436 | cg15652666 | 289019 |
| −0.121 | OR6B3; PRR21 | 2:240985618 | cg10906826 | 206344 |
| −0.121 | FBLN7 | 2:112898400 | cg09982942 | 190323 |
| −0.120 | CXCR7 | 2:237478664 | cg03626672 | 73351 |
| −0.120 | MBTPS2 | X:21858304 | cg21195120 | 378430 |
| −0.120 | NLRP3; OR2B11 | 1:247616686 | cg14830002 | 275801 |
| −0.120 | CTAGE11P | 13:75814496 | cg17109374 | 313605 |
| −0.120 | | 5:177395755 | cg11264997 | 212321 |
| −0.120 | GAS7; RCVRN | 17:9805074 | cg26853458 | 468546 |
| −0.120 | GAD2 | 10:26531942 | cg23052437 | 406538 |
| −0.120 | LCE2A | 1:152670843 | cg13697387 | 253231 |
| −0.120 | SPDYC | 11:64936920 | cg23079866 | 407032 |
| −0.119 | SPTBN2 | 11:66487938 | cg04883026 | 97440 |
| −0.119 | HOTTIP; HOXA11- | 7:27236674 | cg01363170 | 28338 |
| | AS1; HOXA13 | | | |
| −0.119 | SYS1; SYS1- | 20:43991402 | cg00385441 | 8134 |
| | DBNDD2 | | | |
| −0.119 | ZNF876P | 4:204382 | cg00569896 | 12104 |
| −0.119 | CCDC71; KLHDC8B | 3:49203081 | cg18590502 | 337716 |
| −0.119 | GRAMD2 | 15:72448319 | cg12252008 | 228855 |
| −0.119 | | 16:76228294 | cg06827491 | 133242 |
| −0.119 | LOC116437 | 12:131645153 | cg07374109 | 143989 |
| −0.119 | CACNG4 | 17:64973939 | cg23968154 | 421320 |
| −0.119 | NAV1 | 1:201619295 | cg04179952 | 83989 |
| −0.119 | | 12:58934471 | cg01919941 | 39316 |
| −0.119 | | 13:21893289 | cg21970626 | 390084 |
| −0.119 | ANXA9; FAM63A | 1:150969592 | cg21859421 | 388363 |
| −0.119 | | 1:10895517 | cg17480077 | 319783 |
| −0.118 | LRRC27 | 10:134150489 | cg21370255 | 381012 |
| −0.118 | POTEA | 8:43147397 | cg26969150 | 470647 |
| −0.118 | HOXA3; HOXA4; | 7:27170313 | cg04317399 | 86720 |
| | LOC100133311 | | | |
| −0.118 | C1orf86; PRKCZ | 1:2121449 | cg08200543 | 159156 |
| −0.118 | | 8:81143546 | cg16745033 | 307963 |
| −0.118 | | 7:136362483 | cg11678250 | 218935 |
| −0.118 | SPIN2B | X:57147918 | cg12074688 | 225883 |
| −0.118 | | 8:144152376 | cg17001448 | 311828 |
| −0.118 | ASPHD1; KCTD13; | 16:29912700 | cg10093648 | 192261 |
| | SEZ6L2 | | | |
| −0.118 | EIF2D | 1:206786178 | cg16639185 | 305935 |
| −0.118 | PXN | 12:120688744 | cg22564731 | 398621 |
| −0.118 | MIR4757; OSR1 | 2:19553950 | cg00954878 | 20061 |
| −0.118 | PROX1 | 1:214152805 | cg26054764 | 454613 |
| −0.117 | CDH3 | 16:68691561 | cg09821218 | 187538 |
| −0.117 | LPP | 3:188115336 | cg23651889 | 416316 |
| −0.117 | | 5:72666838 | cg11316517 | 213156 |
| −0.117 | DSCR3 | 21:38630506 | cg18380783 | 334168 |
| −0.117 | | 7:136190456 | cg03439301 | 69540 |
| −0.117 | TMEM100 | 17:53800554 | cg03233426 | 65601 |
| −0.117 | PSMD11 | 17:30770932 | cg20190559 | 363067 |
| −0.117 | | 5:171057078 | cg11620716 | 217943 |
| −0.117 | FN3K; TBCD | 17:80708513 | cg00809820 | 17098 |
| −0.117 | SECTM1 | 17:80285515 | cg05744064 | 113450 |
| −0.117 | NCOA1 | 2:24806444 | cg23648923 | 416268 |
| −0.117 | LOC100128398; | 19:58515046 | cg09577391 | 183474 |
| | ZNF606 | | | |
| −0.117 | LOC100289187 | 7:99195788 | cg24024660 | 422355 |
| −0.117 | | 16:77535527 | cg06794141 | 132525 |
| −0.117 | | 2:192792315 | cg01836906 | 37718 |
| −0.117 | LELP1 | 1:153175842 | cg00298977 | 6302 |
| −0.117 | ODF1 | 8:103556749 | cg27000960 | 471198 |
| −0.117 | GCK | 7:44229319 | cg16476432 | 302901 |
| −0.117 | | 11:2211939 | cg19586845 | 353065 |
| −0.117 | HCG4; LOC554223 | 6:29761905 | cg25193571 | 441364 |
| −0.117 | CTNND2 | 5:11588971 | cg01937840 | 39702 |
| −0.116 | MYOM2 | 8:1994478 | cg20219329 | 363455 |
| −0.116 | | 15:30337018 | cg14398295 | 267622 |
| −0.116 | RASAL1 | 12:113574368 | cg16890739 | 310176 |
| −0.116 | | 15:36699121 | cg02763009 | 56272 |
| −0.116 | BIRC7; FLJ16779; | 20:61878032 | cg12649455 | 235197 |
| | MIR3196; | | | |
| | NKAIN4 | | | |
| −0.116 | | 7:1250246 | cg07034004 | 137422 |
| −0.116 | | 5:170763642 | cg23036405 | 406232 |
| −0.116 | NCR1 | 19:55417647 | cg12952132 | 239747 |
| −0.116 | | 1:22591361 | cg13048466 | 241145 |
| −0.115 | GLP1R | 6:39015339 | cg19772011 | 356340 |
| −0.115 | RGMA | 15:93615146 | cg21079003 | 376460 |
| −0.115 | PGM5P2 | 9:69148624 | cg18861917 | 342052 |
| −0.115 | ZBED4 | 22:50250283 | cg20618087 | 369398 |
| −0.115 | LARS2 | 3:45429742 | cg04459086 | 89409 |
| −0.115 | TACC2 | 10:123886914 | cg26111575 | 455575 |
| −0.115 | ST8SIA2 | 15:92939006 | cg08289525 | 160900 |
| −0.115 | ANO7 | 2:242147702 | cg00255732 | 5474 |
| −0.115 | LRRC34; LRRIQ4 | 3:169531864 | cg10994914 | 207829 |
| −0.115 | | 14:88097221 | cg26252794 | 458035 |
| −0.115 | DGKB | 7:14415317 | cg03229767 | 65553 |
| −0.114 | LRRC27 | 10:134150690 | cg02535060 | 51631 |
| −0.114 | LOC100131138 | 12:111374169 | cg09792970 | 187023 |
| −0.114 | CNNM2 | 10:104676907 | cg15439196 | 285445 |
| −0.114 | CCNYL1 | 2:208572165 | cg18757817 | 340266 |
| −0.114 | PRRX1 | 1:170631847 | cg22693806 | 400548 |
| −0.114 | | 11:44489577 | cg03708694 | 74912 |
| −0.114 | DKFZp434L192 | 7:56563820 | cg21216010 | 378877 |
| −0.114 | NRP1 | 10:33612892 | cg17425818 | 318845 |
| −0.114 | TFCP2 | 12:51570174 | cg21570277 | 384054 |
| −0.114 | LHX6 | 9:124982834 | cg17930194 | 326612 |
| −0.114 | MMP17 | 12:132317128 | cg01830463 | 37580 |
| −0.114 | LRRC27 | 10:134150567 | cg07119315 | 139090 |
| −0.114 | | 8:67317506 | cg02934300 | 59732 |
| −0.114 | DBNL; PGAM2; | 7:44105721 | cg21088488 | 376592 |
| | POLM | | | |
| −0.114 | | 1:113425263 | cg10541466 | 200276 |
| −0.114 | AGAP1 | 2:236774164 | cg03785646 | 76466 |
| −0.114 | | 7:73424891 | cg09076650 | 174691 |
| −0.114 | | 6:1449399 | cg18182981 | 331002 |
| −0.114 | NDUFA12 | 12:95397704 | cg22141781 | 392510 |
| −0.114 | HOXA3; HOXA4; | 7:27170880 | cg04321618 | 86813 |
| | HOXA5; LOC100133311 | | | |
| −0.113 | MIR4283- | 7:63085215 | cg10945855 | 206928 |
| | 1; MIR4283-2 | | | |
| −0.113 | PPIL2 | 22:22020076 | cg04983276 | 99379 |
| −0.113 | | 2:72079413 | cg24516106 | 430249 |
| −0.113 | | 10:125222790 | cg11653519 | 218499 |
| −0.113 | | 7:21209781 | cg08701183 | 168131 |
| −0.113 | MTG1; PAOX | 10:135202522 | cg10902549 | 206273 |
| −0.113 | NR2F1 | 5:92927796 | cg26067259 | 454804 |
| −0.113 | | 2:218048915 | cg00549040 | 11649 |
| −0.113 | GRK4 | 4:3043527 | cg01807241 | 37046 |
| −0.113 | TNXB | 6:32066446 | cg14011987 | 259623 |
| −0.113 | SNED1 | 2:241975756 | cg26707709 | 466046 |
| −0.113 | | 6:28446794 | cg03350138 | 67869 |
| −0.113 | C6orf48; HSPA1B; | 6:31806478 | cg17794996 | 324365 |
| | SNORD48; | | | |
| | SNORD52 | | | |
| −0.113 | CBX7 | 22:39545030 | cg18708252 | 339475 |
| −0.113 | UPF2 | 10:12085641 | cg00513208 | 339475 |
| −0.113 | | 17:80860250 | cg04497611 | 90135 |
| −0.112 | DMD | X:31285129 | cg06746884 | 131521 |
| −0.112 | FGF4 | 11:69587473 | cg26765567 | 466900 |
| −0.112 | | 6:30419373 | cg03507875 | 70857 |
| −0.112 | | 19:29217858 | cg25267487 | 442467 |
| −0.112 | | 16:84953424 | cg01765164 | 36115 |
| −0.112 | DGKG | 3:185912486 | cg18172135 | 330799 |
| −0.112 | | 13:111451972 | cg22731513 | 401204 |
| −0.112 | FZD1 | 7:90895894 | cg08714590 | 168374 |
| −0.112 | CLCN7 | 16:1524255 | cg08008072 | 155549 |
| −0.112 | CRX | 19:48324309 | cg06945747 | 135695 |
| −0.112 | | 1:91227319 | cg08895590 | 171690 |
| −0.112 | KALRN | 3:124232190 | cg06690085 | 130439 |
| −0.112 | | 9:128799328 | cg13946341 | 258251 |
| −0.112 | IL34; MTSS1L | 16:70688171 | cg02602352 | 52989 |
| −0.112 | TMEM171 | 5:72431891 | cg01170694 | 24642 |
| −0.112 | | 17:42706084 | cg14836839 | 275934 |
| −0.112 | RASGEF1C | 5:179634671 | cg12408990 | 231108 |
| −0.112 | DOK7 | 4:3486116 | cg00752263 | 15898 |
| −0.112 | ANAPC2; GRIN1; | 9:140062197 | cg03206445 | 65043 |
| | LRRC26; | | | |
| | MIR3621 | | | |
| −0.111 | OR6Q1; OR9Q1 | 11:57792403 | cg18886347 | 342489 |
| −0.111 | BAI1 | 8:143580823 | cg05758861 | 113684 |
| −0.111 | | 2:121280002 | cg00314115 | 6610 |
| −0.111 | MUC22 | 6:30980847 | cg27292220 | 475981 |
| −0.111 | AGAP1 | 2:236773924 | cg15981851 | 294380 |
| −0.111 | | 6:55774999 | cg19318364 | 348791 |
| −0.111 | ITIH1; ITIH3 | 3:52824283 | cg18404041 | 334584 |
| −0.111 | PDE6B | 4:648752 | cg17643796 | 322207 |
| −0.111 | TRIM7 | 5:180614858 | cg25606201 | 447878 |
| −0.111 | | 8:141490124 | cg15842218 | 292164 |
| −0.111 | IPMK | 10:59949191 | cg09039685 | 174085 |
| −0.111 | CCDC129 | 7:31685368 | cg02943305 | 59917 |
| −0.111 | | 5:1645640 | cg11628972 | 218045 |
| −0.111 | CDHR3 | 7:105596715 | cg27099486 | 472857 |
| −0.111 | DCX | X:110654011 | cg11031647 | 208426 |
| −0.111 | PLA2G4D | 15:42371967 | cg02760164 | 56222 |
| −0.111 | ANKRD34C | 15:79576704 | cg14577319 | 271361 |
| −0.110 | | 1:161391807 | cg00056433 | 1344 |
| −0.110 | FHL3; SF3A3 | 1:38460950 | cg05202204 | 103487 |
| −0.110 | | 5:72485634 | cg14727987 | 274140 |
| −0.110 | | 11:41481578 | cg24638253 | 432227 |
| −0.110 | | 6:27521330 | cg26264769 | 458241 |
| −0.110 | | 5:177592761 | cg25087499 | 439729 |
| −0.110 | | 14:103783717 | cg10559742 | 200586 |
| −0.110 | ARL4C | 2:235406291 | cg05308656 | 105595 |
| −0.110 | HHIP; LOC646576 | 4:145566595 | cg02524475 | 51415 |
| −0.110 | C11orf9 | 11:61545187 | cg07136108 | 139453 |
| −0.110 | PCDHA1; PCDHA10; | 5:140238079 | cg18906028 | 342772 |
| | PCDHA11; | | | |
| | PCDHA2; | | | |
| | PCDHA3; PCDHA4; | | | |
| | PCDHA5; | | | |
| | PCDHA6; | | | |
| | PCDHA7; PCDHA8; | | | |
| | PCDHA9 | | | |
| −0.110 | LOC151171 | 2:239463229 | cg10182060 | 193967 |
| −0.110 | | 14:22385890 | cg16138400 | 296975 |
| −0.110 | MAGIX; PLP2; | X:49027884 | cg22366498 | 395712 |
| | PRICKLE3 | | | |
| −0.110 | COL1A1 | 17:48288538 | cg06769994 | 132032 |
| −0.110 | FAM70A | X:119443941 | cg26583344 | 463923 |
| −0.110 | CXCR2 | 2:219001517 | cg10819992 | 204935 |
| −0.110 | | 16:66162203 | cg26798936 | 467489 |
| −0.110 | CCHCR1; PSORS1C2 | 6:31105872 | cg03034365 | 61773 |
| −0.110 | | 3:36675685 | cg12870891 | 238511 |
| −0.110 | DEFB135; DEFB136 | 8:11838843 | cg12807628 | 237566 |
| −0.110 | MDC1; TUBB | 6:30684572 | cg10925640 | 206607 |
| −0.110 | CLDN4; WBSCR27 | 7:73256416 | cg03781731 | 76399 |
| −0.110 | SNRPN | 15:25123381 | cg08560373 | 165668 |
| −0.109 | FBXL16; METRN | 16:757149 | cg07644125 | 149038 |
| −0.109 | EIF2D | 1:206786170 | cg21155316 | 377647 |
| −0.109 | | 8:135726252 | cg00057272 | 1361 |
| −0.109 | | 13:112979998 | cg20620751 | 369432 |
| −0.109 | DHRS7 | 14:60629192 | cg06898279 | 134753 |
| −0.109 | EFS; IL25 | 14:23835595 | cg17205324 | 315223 |
| −0.109 | PALMD | 1:100111727 | cg07960762 | 154721 |
| −0.109 | | 10:79470169 | cg19094530 | 345528 |
| −0.109 | ARHGEF6 | X:135863582 | cg01134144 | 23879 |
| −0.109 | DUS3L | 19:5799340 | cg20467412 | 367204 |
| −0.109 | RGMA | 15:93633408 | cg04697454 | 93855 |
| −0.109 | VWA5B1 | 1:20608736 | cg16713551 | 307396 |
| −0.109 | | 14:106791268 | cg14042931 | 260352 |
| −0.109 | | 19:1673498 | cg10697737 | 202878 |
| −0.109 | GPR4; OPA3 | 19:46097075 | cg16620032 | 305585 |
| −0.109 | LOC388630 | 1:48452740 | cg07202054 | 140866 |
| −0.108 | HK3; UNC5A | 5:176314628 | cg06783121 | 132285 |
| −0.108 | | 6:12342070 | cg03519011 | 71096 |
| −0.108 | C12orf73; TDG | 12:104350162 | cg22927789 | 404375 |
| −0.108 | CDH22 | 20:44882514 | cg25558663 | 447055 |
| −0.108 | | 6:18752614 | cg00664117 | 14044 |
| −0.108 | ARHGEF25; B4GALNT1; | 12:58011837 | cg00700412 | 14808 |
| | DTX3; | | | |
| | SLC26A10 | | | |
| −0.108 | SHANK2 | 11:70564414 | cg13080721 | 241684 |
| −0.108 | LOC154449 | 6:170571686 | cg18698681 | 339306 |
| −0.108 | KCNH2 | 7:150644459 | cg01559770 | 32264 |
| −0.108 | TMEM132D | 12:130384734 | cg08261450 | 160299 |
| −0.108 | DUOX1; DUOXA1 | 15:45427034 | cg14918338 | 277309 |
| −0.108 | DNAJB13 | 11:73661250 | cg02070028 | 42486 |
| −0.108 | PSMD7 | 16:74331618 | cg09313046 | 178793 |
| −0.108 | LGR6 | 1:202172778 | cg04811114 | 95994 |
| −0.108 | | 13:69557960 | cg18586262 | 337639 |
| −0.108 | | 1:201316444 | cg26233753 | 457728 |
| −0.108 | | 1:37139265 | cg20745381 | 371614 |
| −0.108 | | 10:121837310 | cg10087780 | 192116 |
| −0.108 | | 15:98196234 | cg08064292 | 156507 |
| −0.107 | GUCY2E; LRRC32 | 11:76381800 | cg19752094 | 355941 |
| −0.107 | LOC440910 | 2:132057004 | cg07051654 | 137739 |
| −0.107 | NAPSA | 19:50861262 | cg12273319 | 229159 |
| −0.107 | TRIM69 | 15:45028270 | cg10439456 | 198368 |
| −0.107 | CHTOP; S100A1; | 1:153599831 | cg02331910 | 47613 |
| | S100A13 | | | |
| −0.107 | | 5:132938694 | cg19005955 | 344221 |
| −0.107 | ACOT11; FAM151A | 1:55096622 | cg22619910 | 399357 |
| −0.107 | CRYBA2; FEV; | 2:219851181 | cg18664514 | 338819 |
| | LOC151300 | | | |
| −0.107 | C10orf96 | 10:118084504 | cg13836550 | 255997 |
| −0.107 | SORCS3 | 10:106749483 | cg26349484 | 459830 |
| −0.107 | ZEB2; ZEB2- | 2:145273345 | cg04640885 | 92836 |
| | AS1 | | | |
| −0.107 | GALNT6 | 12:51786489 | cg15127250 | 280846 |
| −0.107 | | 3:137187558 | cg24821307 | 435362 |
| −0.107 | ADORA1 | 1:203086869 | cg18811731 | 341246 |
| −0.107 | OR1J4; OR1N1 | 9:125289357 | cg14598387 | 271804 |
| −0.107 | CARTPT | 5:71012177 | cg11927345 | 223348 |
| −0.107 | HCRT; KCNH4 | 17:40330907 | cg06514003 | 127062 |
| −0.107 | SNRPN | 15:25093366 | cg02171545 | 44484 |
| −0.107 | C2orf28; CAD; | 2:27434262 | cg14242246 | 264531 |
| | SLC5A6 | | | |
| −0.107 | HOXA3; HOXA4; | 7:27170552 | cg16651126 | 306141 |
| | LOC100133311 | | | |
| −0.107 | | 15:20562413 | cg03344283 | 67729 |
| −0.106 | PLA2G7 | 6:46703670 | cg12854458 | 238255 |
| −0.106 | MAG | 19:35790951 | cg25443560 | 445295 |
| −0.106 | HLA-DRB1 | 6:32552022 | cg10765922 | 203924 |
| −0.106 | FAM83H; MAPK15 | 8:144801088 | cg05626536 | 111385 |
| −0.106 | | 3:193987757 | cg16282892 | 299443 |
| −0.106 | POU4F2 | 4:147573410 | cg05710982 | 112882 |
| −0.106 | DKFZp434J0226 | 19:46712075 | cg00537984 | 11421 |
| −0.106 | GPR31 | 6:167571630 | cg25285053 | 442729 |
| −0.106 | PCDHA1; PCDHA10; | 5:140248610 | cg25024993 | 438807 |
| | PCDHA11; | | | |
| | PCDHA12; | | | |
| | PCDHA2; PCDHA3; | | | |
| | PCDHA4; | | | |
| | PCDHA5; | | | |
| | PCDHA6; PCDHA7; | | | |
| | PCDHA8; | | | |
| | PCDHA9 | | | |
| −0.106 | SGPP2 | 2:223288637 | cg11300809 | 212887 |
| −0.106 | DLC1 | 8:13373090 | cg00933411 | 19610 |
| −0.106 | PRSS55 | 8:10386222 | cg10657228 | 202268 |
| −0.106 | ZIC1; ZIC4 | 3:147120248 | cg13897134 | 257142 |
| −0.106 | DKFZp434L192 | 7:56563742 | cg17876758 | 325825 |
| −0.106 | C11orf10; C11orf9 | 11:61548003 | cg19617373 | 353600 |
| −0.106 | | 6:99075228 | cg05593122 | 110762 |
| −0.106 | | 14:104787388 | cg05210671 | 103662 |
| −0.106 | HHLA2 | 3:108041508 | cg24769830 | 434575 |
| −0.106 | LOC100506012; | 19:46999055 | cg03969996 | 79829 |
| | PNMAL2 | | | |
| −0.106 | BEX5 | X:101411275 | cg03993934 | 80323 |
| −0.106 | | 15:98196333 | cg11023328 | 208285 |
| −0.105 | ZIC5 | 13:100605441 | cg10523198 | 199939 |
| −0.105 | TIGIT | 3:114009756 | cg05943254 | 117166 |
| −0.105 | CTNND2 | 5:11589049 | cg17415451 | 318667 |
| −0.105 | MGC27382 | 1:78693899 | cg22559013 | 398527 |
| −0.105 | DLC1 | 8:13372483 | cg08768218 | 169300 |
| −0.105 | F10; F7 | 13:113783990 | cg25796986 | 450780 |
| −0.105 | SOX2-OT | 3:181417613 | cg06283493 | 123126 |
| −0.105 | | 13:54898133 | cg18817396 | 341362 |
| −0.105 | KIAA1143; KIF15 | 3:44802566 | cg17546649 | 320901 |
| −0.105 | CRYAA | 21:44593708 | cg21895314 | 388915 |
| −0.105 | FOXS1 | 20:30437731 | cg05366561 | 106738 |
| −0.105 | FIBIN | 11:27015592 | cg02565993 | 52210 |
| −0.105 | CLC | 19:40228820 | cg04764056 | 95048 |
| −0.105 | | 15:84974881 | cg06813100 | 132909 |
| −0.105 | FBXO47 | 17:37123767 | cg10600889 | 201304 |
| −0.105 | C14orf23; FOXG1 | 14:29240992 | cg03472898 | 70248 |
| −0.105 | STK10 | 5:171541827 | cg11334870 | 213456 |
| −0.105 | HLA- | 6:33041697 | cg00798281 | 16870 |
| | DPA1; HLA- | | | |
| | DPB1 | | | |
| −0.105 | P2RX5 | 17:3598755 | cg13375828 | 246413 |
| −0.105 | LOC100506012; | 19:46998383 | cg06484000 | 126528 |
| | PNMAL2 | | | |
| −0.105 | CMBL | 5:10308785 | cg26878318 | 468990 |
| −0.105 | MYO7A | 11:76903134 | cg24852442 | 435899 |
| −0.105 | DKFZp434L192 | 7:56555482 | cg21720373 | 386268 |
| −0.105 | | 22:50482250 | cg10146330 | 193299 |
| −0.105 | PKD1L2 | 16:81254209 | cg07091758 | 138538 |
| −0.104 | | 2:75136334 | cg12269972 | 229112 |
| −0.104 | | 6:30433749 | cg07017214 | 137090 |
| −0.104 | SLC38A4 | 12:47226005 | cg08005660 | 155507 |
| −0.104 | XPNPEP1 | 10:111683631 | cg17201651 | 315167 |
| −0.104 | MYH11 | 16:15931580 | cg03737209 | 75526 |
| −0.104 | FLOT1; TUBB | 6:30696029 | cg22024120 | 390747 |
| −0.104 | | 5:170763941 | cg26497768 | 462323 |
| −0.104 | KCNK3 | 2:26916575 | cg20955989 | 374545 |
| −0.104 | TRIM31 | 6:30080230 | cg17048834 | 312621 |
| −0.104 | ABCA7; HMHA1 | 19:1064938 | cg26576206 | 463804 |
| −0.104 | PRKCB | 16:23850404 | cg26562691 | 463553 |
| −0.104 | GAPDHS; LOC100506469; | 19:36024313 | cg25681177 | 449001 |
| | SBSN | | | |
| −0.104 | CDSN; PSORS1C1; | 6:31096204 | cg03880216 | 78131 |
| | PSORS1C2 | | | |
| −0.104 | MORC2; MORC2- | 22:31316184 | cg26278151 | 458506 |
| | AS1 | | | |
| −0.104 | PCDHB5 | 5:140515736 | cg15120855 | 280719 |
| −0.104 | | 6:68849256 | cg09531389 | 182666 |
| −0.104 | WNT10A | 2:219763642 | cg16582803 | 304901 |
| −0.104 | | 14:56471704 | cg05314124 | 105693 |
| −0.104 | MMRN2; SNCG | 10:88717623 | cg07436701 | 145067 |
| −0.104 | | 1:31280493 | cg25204088 | 441555 |
| −0.104 | RFTN2 | 2:198540621 | cg08373610 | 162365 |
| −0.104 | C1QTNF8 | 16:1152474 | cg04004158 | 80525 |
| −0.104 | LOC100507463; | 6:32805692 | cg26685246 | 465648 |
| | PSMB8; TAP1; | | | |
| | TAP2 | | | |
| −0.104 | THOC2 | X:122867073 | cg08100265 | 157187 |
| −0.104 | PDLIM4 | 5:131589552 | cg14815361 | 275561 |
| −0.103 | HHATL; KBTBD5 | 3:42727489 | cg25129124 | 440393 |
| −0.103 | LOC84931 | 2:121223847 | cg21406402 | 381501 |
| −0.103 | MACROD2 | 20:15177509 | cg09937190 | 189621 |
| −0.103 | FAM163A | 1:179713828 | cg24460126 | 429325 |
| −0.103 | LOC100506012; | 19:46988034 | cg14128773 | 262082 |
| | PNMAL2 | | | |
| −0.103 | ABHD8; DDA1; | 19:17420304 | cg10664184 | 202380 |
| | MRPL34 | | | |
| −0.103 | SLC9A3 | 5:501938 | cg22572362 | 398700 |
| −0.103 | C1QTNF8; LOC146336; | 16:1133074 | cg03327829 | 67387 |
| | SSTR5 | | | |
| −0.103 | HCN4 | 15:73639105 | cg11831431 | 221705 |
| −0.103 | | 3:27638612 | cg14143723 | 262354 |
| −0.103 | BST2 | 19:17516712 | cg01329005 | 27706 |
| −0.103 | | 4:115649889 | cg14855679 | 276322 |
| −0.103 | TMEM136 | 11:120187999 | cg09120934 | 175365 |
| −0.103 | IRS4 | X:107980846 | cg21111568 | 376933 |
| −0.103 | | 7:55072042 | cg13490352 | 248855 |
| −0.103 | NCKAP5 | 2:134326172 | cg18984282 | 343881 |
| −0.103 | NCR1 | 19:55417496 | cg17804112 | 324505 |
| −0.103 | FHL3; SF3A3 | 1:38461687 | cg17077180 | 313040 |
| −0.102 | SEMA5B | 3:122712224 | cg04830808 | 96325 |
| −0.102 | SLCO1B1 | 12:21324585 | cg04579507 | 91754 |
| −0.102 | | 22:39323204 | cg07123855 | 139180 |
| −0.102 | | 5:134881662 | cg12613020 | 234541 |
| −0.102 | | 2:220352476 | cg20456243 | 367005 |
| −0.102 | BAI1 | 8:143581070 | cg25473866 | 445797 |
| −0.102 | PCDHB17; PCDHB6 | 5:140528785 | cg26866168 | 468766 |
| −0.102 | GABBR2 | 9:101192792 | cg14523238 | 270180 |
| −0.102 | | 5:74908170 | cg00601450 | 12858 |
| −0.102 | OCA2 | 15:28053339 | cg24943998 | 437498 |
| −0.102 | DPF1 | 19:38721070 | cg23480284 | 413571 |
| −0.102 | TRAPPC12; TSSC1 | 2:3383257 | cg12447832 | 231782 |
| −0.102 | FGF8; NPM3 | 10:103532798 | cg16079364 | 296042 |
| −0.102 | CHRND; PRSS56 | 2:233384489 | cg25571880 | 447246 |
| −0.102 | APCDD1 | 18:10456115 | cg14623989 | 272309 |
| −0.102 | | X:119151476 | cg22956922 | 404868 |
| −0.102 | | 5:88991074 | cg04117076 | 82698 |
| −0.102 | | 2:131010522 | cg13302869 | 245147 |
| −0.102 | | 13:19243756 | cg08628006 | 166844 |
| −0.102 | GCM2; SYCP2L | 6:10881782 | cg18187244 | 331085 |
| −0.102 | | 7:158243632 | cg23859303 | 419493 |
| −0.102 | C16orf91; CCDC154 | 16:1478718 | cg09615056 | 184112 |
| −0.102 | LRRC10B; MIR4488; | 11:61273282 | cg15263021 | 282930 |
| | SYT7 | | | |
| −0.102 | FBXO7 | 22:32870150 | cg21023126 | 375623 |
| −0.102 | | 13:112985463 | cg17655970 | 322387 |
| −0.102 | | 15:74060182 | cg26579616 | 463866 |
| −0.102 | | 6:28781594 | cg00176718 | 3961 |
| −0.102 | PLK5 | 19:1542897 | cg00392196 | 8275 |
| −0.102 | | 6:156983315 | cg00269725 | 5770 |
| −0.102 | LOC100506776 | 7:38403507 | cg05460050 | 108373 |
| −0.102 | | 5:15385947 | cg00105403 | 2447 |
| −0.102 | CKMT1A | 15:43984922 | cg26247942 | 457947 |
| −0.102 | | 1:14462810 | cg16164607 | 297377 |
| −0.102 | CDH22 | 20:44838981 | cg07296387 | 142575 |
| −0.102 | | 10:133156015 | cg09005971 | 173513 |
| −0.101 | CHRDL1 | X:110038954 | cg07653640 | 149177 |
| −0.101 | | 6:79339334 | cg11074783 | 209107 |
| −0.101 | C1orf159 | 1:1052600 | cg10126324 | 192906 |
| −0.101 | RINL; SIRT2 | 19:39360313 | cg02711397 | 55211 |
| −0.101 | ZFP41 | 8:144339106 | cg19504605 | 351705 |
| −0.101 | | 16:85981336 | cg10274029 | 195601 |
| −0.101 | | 11:2212225 | cg08241307 | 159919 |
| −0.101 | | 15:98196022 | cg00744413 | 15733 |
| −0.101 | | 5:9119047 | cg17608082 | 321764 |
| −0.101 | DPYSL5 | 2:27068081 | cg08806184 | 169893 |
| −0.101 | GP6 | 19:55526208 | cg27154418 | 473807 |
| −0.101 | C16orf61; CENPN | 16:81039227 | cg08265926 | 160397 |
| −0.101 | LOC100129620; | 1:99471295 | cg03593336 | 72666 |
| | LPPR5 | | | |
| −0.101 | HLA- | 6:33040610 | cg20617328 | 369385 |
| | DPA1; HLA- | | | |
| | DPB1 | | | |
| −0.101 | CD3EAP; ERCC1; | 19:45901453 | cg08884571 | 369385 |
| | PPP1R13L | | | |
| −0.101 | NALCN | 13:102060580 | cg22191606 | 393258 |
| −0.101 | MGLL | 3:127473936 | cg15694422 | 289708 |
| −0.101 | | 2:121279886 | cg23405152 | 412432 |
| −0.101 | DNAH17; PGS1 | 17:76417995 | cg22290140 | 394680 |
| −0.101 | PALM2; PALM2- | 9:112593847 | cg13893012 | 257062 |
| | AKAP2 | | | |
| −0.101 | CHAT; SLC18A3 | 10:50816262 | cg04730768 | 94454 |
| −0.101 | CCBL2; RBMXL1 | 1:89459658 | cg23627354 | 415857 |
| −0.101 | | 21:10888524 | cg19433175 | 350575 |
| −0.101 | WDSUB1 | 2:160142643 | cg00168785 | 3783 |
| −0.101 | CYP26B1 | 2:72357937 | cg15160709 | 281412 |
| −0.101 | | 6:74965323 | cg11654562 | 218523 |
| −0.101 | AAAS; SP7 | 12:53715148 | cg23032316 | 406156 |
| −0.101 | ZNF718 | 4:124693 | cg15792688 | 291287 |
| −0.101 | | 11:120387302 | cg06995068 | 136607 |
| −0.101 | | 7:147500722 | cg17372101 | 317966 |
| −0.101 | | 2:3044737 | cg11902863 | 222986 |
| −0.101 | | 14:77519601 | cg13576669 | 250680 |
| −0.101 | PDE11A | 2:178770927 | cg04628174 | 92633 |
| −0.101 | CCDC64B; HCFC1R1; THOC6; | 16:3079708 | cg07868599 | 153015 |
| | TNFRSF12A | | | |
| −0.101 | HLA- | 6:33044510 | cg00750366 | 15857 |
| | DPA1; HLA- | | | |
| | DPB1 | | | |
| −0.101 | ZNF767 | 7:149323101 | cg08744726 | 168908 |
| −0.100 | LOC100506012; | 19:46999224 | cg11410682 | 214729 |
| | PNMAL2 | | | |
| −0.100 | SDC3 | 1:31368797 | cg00658151 | 13923 |
| −0.100 | CILP2; NDUFA13; | 19:19643534 | cg09935271 | 189575 |
| | YJEFN3 | | | |
| −0.100 | HOXD3; LOC401022 | 2:177028804 | cg10304824 | 196084 |
| −0.100 | PCDHGA1; PCDHGA10; PCDHGA11; PCDHGA12; PCDHGA2; | 5:140807225 | cg21929183 | 389472 |
| | PCDHGA3; | | | |
| | PCDHGA4; | | | |
| | PCDHGA5; | | | |
| | PCDHGA6; | | | |
| | PCDHGA7; | | | |
| | PCDHGA8; PCDHGA9; | | | |
| | PCDHGB1; | | | |
| | PCDHGB2; | | | |
| | PCDHGB3; | | | |
| | PCDHGB4; | | | |
| | PCDHGB5; | | | |
| | PCDHGB6; PCDHGB7; | | | |
| | PCDHGB8P | | | |
| −0.100 | SCN7A | 2:167350889 | cg06038864 | 118973 |
| −0.100 | CEBPZ; LOC100505876; | 2:37424015 | cg23687288 | 417012 |
| | SULT6B1 | | | |
| −0.100 | | 15:101389354 | cg25878441 | 451879 |
| 0.100 | | 20:690915 | cg12338552 | 230066 |
| 0.100 | KIRREL3- | 11:126873181 | cg08668551 | 167552 |
| | AS3 | | | |
| 0.100 | MLNR | 13:49795541 | cg06476591 | 126402 |
| 0.100 | ZNF542 | 19:56879662 | cg03146949 | 63935 |
| 0.100 | KY | 3:134369987 | cg12307306 | 229684 |
| 0.100 | TMEM200B | 1:29449356 | cg00866556 | 18256 |
| 0.100 | ERICH1 | 8:687384 | cg01200640 | 25242 |
| 0.100 | HOXA5; HOXA6; | 7:27187372 | cg04265576 | 85698 |
| | HOXA7; LOC100133311 | | | |
| 0.100 | LOC386758; ZNF582 | 19:56904901 | cg09568464 | 183339 |
| 0.100 | ISM1 | 20:13200973 | cg06262436 | 122823 |
| 0.100 | | 10:100109635 | cg23078268 | 407013 |
| 0.100 | AQPEP | 5:115298720 | cg25044651 | 439130 |
| 0.100 | AJAP1 | 1:4714672 | cg12475759 | 232236 |
| 0.100 | | 15:78112847 | cg09369863 | 179831 |
| 0.100 | HOXC4 | 12:54441509 | cg10366797 | 197193 |
| 0.100 | C7orf50; CYP2W1 | 7:1029594 | cg22505411 | 397678 |
| 0.100 | SLC22A3 | 6:160769116 | cg07883823 | 153297 |
| 0.100 | CDH8 | 16:62070086 | cg06831576 | 133330 |
| 0.100 | CCDC164; EPT1 | 2:26625047 | cg13255216 | 244382 |
| 0.100 | GHSR | 3:172167445 | cg04851268 | 96789 |
| 0.100 | | 2:213402433 | cg08042975 | 156156 |
| 0.100 | TCHH | 1:152081002 | cg05523911 | 109583 |
| 0.100 | ERBB2 | 17:37856378 | cg26111030 | 455565 |
| 0.100 | | 9:13278626 | cg14655855 | 272946 |
| 0.100 | EPGN; MTHFD2L | 4:75174080 | cg07643762 | 149031 |
| 0.100 | ISL2; SCAPER | 15:76634887 | cg02245004 | 45800 |
| 0.100 | UGGT2 | 13:96705123 | cg08797194 | 169739 |
| 0.100 | TBL1XR1 | 3:176827739 | cg22160300 | 392814 |
| 0.100 | LMO3 | 12:16762831 | cg05355757 | 106496 |
| 0.101 | | 17:25676440 | cg07143451 | 139627 |
| 0.101 | MYF5; MYF6 | 12:81110706 | cg14067873 | 260821 |
| 0.101 | EVX2; HOXD13 | 2:176948693 | cg01749491 | 35793 |
| 0.101 | OR7G3 | 19:9238958 | cg03494634 | 70624 |
| 0.101 | PON2; PON3 | 7:95025905 | cg15927196 | 293537 |
| 0.101 | TP73; WRAP73 | 1:3567986 | cg24073122 | 423203 |
| 0.101 | | 1:148854572 | cg11818631 | 221440 |
| 0.101 | ASCL2 | 11:2292000 | cg13930892 | 257925 |
| 0.101 | CNGB1 | 16:57915850 | cg07029201 | 137333 |
| 0.101 | HTR4 | 5:148033708 | cg12825070 | 237836 |
| 0.101 | C1orf201; NIPAL3 | 1:24741723 | cg21298759 | 380184 |
| 0.101 | | 7:158286570 | cg23618588 | 415687 |
| 0.101 | | 5:4942612 | cg11468819 | 215620 |
| 0.101 | | 5:56595244 | cg19985056 | 359969 |
| 0.101 | FLJ23152 | 6:17102678 | cg05312353 | 105662 |
| 0.101 | TCHH | 1:152080543 | cg04938315 | 98550 |
| 0.101 | DCC | 18:49868477 | cg01839464 | 37773 |
| 0.101 | FAM155A | 13:108519752 | cg06446668 | 125897 |
| 0.101 | LOC285548; | 4:13546151 | cg27438798 | 478567 |
| | NKX3-2 | | | |
| 0.101 | | 6:29818300 | cg22473097 | 397165 |
| 0.101 | PSKH2 | 8:87082023 | cg20982735 | 375026 |
| 0.101 | UTP14A | X:129065551 | cg02699127 | 54944 |
| 0.101 | FAM169A | 5:74161231 | cg07222505 | 141302 |
| 0.101 | PLS1 | 3:142314493 | cg00063773 | 1512 |
| 0.101 | RUNX1T1 | 8:93115504 | cg01806520 | 37028 |
| 0.101 | | 2:133106819 | cg12792250 | 237266 |
| 0.101 | LOC654342 | 2:91848218 | cg24829460 | 435500 |
| 0.101 | | 5:2915236 | cg21081803 | 376494 |
| 0.101 | THRB | 3:24536252 | cg02333852 | 47654 |
| 0.101 | SNAP91 | 6:84418789 | cg16334314 | 300384 |
| 0.101 | SGK1 | 6:134497247 | cg03400131 | 68781 |
| 0.101 | LOC729852; | 7:7726202 | cg26804611 | 467608 |
| | RPA3 | | | |
| 0.101 | ILF2; NPR1 | 1:153651568 | cg04484579 | 89880 |
| 0.101 | LOC643714; TOX3 | 16:52581551 | cg02709321 | 55162 |
| 0.101 | EYA4 | 6:133562475 | cg20787173 | 372221 |
| 0.101 | DBNDD2; PIGT | 20:44035850 | cg03172947 | 64447 |
| 0.101 | PAK3 | X:110187421 | cg06455967 | 126034 |
| 0.101 | HCN1 | 5:45695922 | cg06498267 | 126802 |
| 0.101 | ZIC4 | 3:147111120 | cg27606499 | 481395 |
| 0.101 | MAGI2-AS3 | 7:79082531 | cg14592474 | 271684 |
| 0.101 | WTIP | 19:34972358 | cg11869770 | 222476 |
| 0.101 | UCP1 | 4:141490153 | cg19346645 | 349167 |
| 0.101 | COL23A1 | 5:178017853 | cg26996818 | 471137 |
| 0.101 | ZC3H12C | 11:109964976 | cg11758932 | 220367 |
| 0.101 | SYT9 | 11:7273498 | cg08185661 | 158874 |
| 0.101 | | 8:41004167 | cg09091657 | 174922 |
| 0.101 | | 14:28733613 | cg01840183 | 37791 |
| 0.101 | CDK6 | 7:92442568 | cg05278074 | 104986 |
| 0.101 | FLJ42875; PRDM16 | 1:2990490 | cg17001566 | 311833 |
| 0.102 | | 7:53286906 | cg10502121 | 199449 |
| 0.102 | IQGAP3; TTC24 | 1:156542103 | cg12262564 | 229022 |
| 0.102 | DEAF1; DRD4 | 11:640606 | cg20411756 | 366324 |
| 0.102 | | 12:29303160 | cg23787937 | 418459 |
| 0.102 | FOXF1; LOC400550 | 16:86548895 | cg08589354 | 166151 |
| 0.102 | | 18:44787492 | cg18074954 | 329008 |
| 0.102 | KANK3 | 19:8398300 | cg17490089 | 319937 |
| 0.102 | PRDM12 | 9:133534961 | cg13465477 | 248295 |
| 0.102 | GLRA1 | 5:151304817 | cg25352328 | 443801 |
| 0.102 | GRIA2 | 4:158141570 | cg00699993 | 14796 |
| 0.102 | ADNP2; LOC100130522; | 18:77905119 | cg18973878 | 343754 |
| | PARD6G | | | |
| 0.102 | TBL1X | X:9432900 | cg10839723 | 205305 |
| 0.102 | LOC255480; TBX5 | 12:114845868 | cg21907579 | 389107 |
| 0.102 | TDRD5 | 1:179555658 | cg17138852 | 314056 |
| 0.102 | GPR176 | 15:40212781 | cg17497271 | 320059 |
| 0.102 | CHST3 | 10:73724697 | cg19731268 | 355545 |
| 0.102 | SNAP91 | 6:84418659 | cg15950068 | 293877 |
| 0.102 | PDXK | 21:45147292 | cg02253535 | 45973 |
| 0.102 | | 5:168728149 | cg15927720 | 293550 |
| 0.102 | PRDM13 | 6:100061111 | cg17302155 | 316788 |
| 0.102 | DLL4 | 15:41219238 | cg16069079 | 295915 |
| 0.102 | PDGFRA | 4:55100025 | cg24799620 | 435038 |
| 0.102 | FAM190A | 4:91049007 | cg17275700 | 316281 |
| 0.102 | FUT9 | 6:96463959 | cg25114913 | 440174 |
| 0.102 | MOXD2P; PRSS58 | 7:141951023 | cg12970830 | 240011 |
| 0.102 | HPS4; SRRD | 22:26875563 | cg27087377 | 472647 |
| 0.102 | | 17:25676386 | cg05977781 | 117874 |
| 0.102 | | 15:96905554 | cg00221709 | 4765 |
| 0.102 | RARRES1 | 3:158450208 | cg03269060 | 66248 |
| 0.102 | KDR | 4:55991701 | cg25722465 | 449597 |
| 0.102 | SOX17 | 8:55370579 | cg26059468 | 454690 |
| 0.102 | | 14:95330880 | cg18939596 | 343247 |
| 0.102 | DLC1 | 8:13134166 | cg20536983 | 368192 |
| 0.102 | | 2:44312696 | cg08613504 | 166550 |
| 0.102 | ESR1 | 6:152085619 | cg17741339 | 323560 |
| 0.102 | CPLX2 | 5:175299035 | cg06833732 | 133382 |
| 0.102 | | 21:42218932 | cg09880551 | 188645 |
| 0.102 | CCDC108; CRYBA2; | 2:219858146 | cg24374738 | 427940 |
| | FEV; MIR375 | | | |
| 0.102 | FBXL15; NFKB2; | 10:104170217 | cg26089160 | 455163 |
| | PSD | | | |
| 0.102 | PTPRZ1 | 7:121513695 | cg10948929 | 206989 |
| 0.102 | | 5:87979504 | cg12991050 | 240324 |
| 0.102 | RNF180 | 5:63461566 | cg16485558 | 303034 |
| 0.102 | ZDBF2 | 2:207140303 | cg00410106 | 8675 |
| 0.103 | CACNA1B | 9:140917413 | cg11827453 | 221623 |
| 0.103 | CUL4B | X:119694554 | cg22267947 | 394373 |
| 0.103 | DUOX1; DUOXA1 | 15:45422054 | cg24505618 | 430070 |
| 0.103 | RUNX1T1 | 8:93114294 | cg07622493 | 148653 |
| 0.103 | GBX2 | 2:237078733 | cg07014673 | 137017 |
| 0.103 | HOXD4; MIR10B | 2:177014949 | cg27160395 | 473893 |
| 0.103 | GLRB | 4:157997363 | cg09688546 | 185354 |
| 0.103 | DENND4C | 9:19298547 | cg19584733 | 353015 |
| 0.103 | CASC4 | 15:44579510 | cg00093643 | 2177 |
| 0.103 | | 6:9399379 | cg20876760 | 373416 |
| 0.103 | GBX2 | 2:237076171 | cg20804191 | 372465 |
| 0.103 | LY6H | 8:144240945 | cg00831710 | 17537 |
| 0.103 | | 6:28853021 | cg24867279 | 436176 |
| 0.103 | ALKBH7; CLPP | 19:6362787 | cg16848221 | 309550 |
| 0.103 | | 5:1107837 | cg22172143 | 393020 |
| 0.103 | ZNF729 | 19:22469860 | cg15413034 | 285081 |
| 0.103 | TP73; WRAP73 | 1:3567412 | cg16823083 | 309243 |
| 0.103 | KBTBD11 | 8:1949342 | cg25021970 | 438735 |
| 0.103 | KLF16 | 19:1851995 | cg11434705 | 215145 |
| 0.103 | PEX5L | 3:179670323 | cg18765712 | 340436 |
| 0.103 | NFIX | 19:13107252 | cg06197482 | 121707 |
| 0.103 | | 2:9235972 | cg04575202 | 91657 |
| 0.103 | PCDHGA1; PCDHGA2 | 5:140712459 | cg21722795 | 386305 |
| 0.103 | | 1:32237923 | cg04878000 | 97320 |
| 0.103 | | 12:130422172 | cg01448115 | 30160 |
| 0.103 | RBFOX3 | 17:77454437 | cg25258515 | 442358 |
| 0.103 | EPB41L3 | 18:5543945 | cg16304950 | 299805 |
| 0.103 | | 13:112759355 | cg15415452 | 285112 |
| 0.103 | PPYR1 | 10:47083426 | cg02394955 | 48953 |
| 0.103 | ANKRD20A8P | 2:95522902 | cg08721908 | 168505 |
| 0.103 | C2orf65 | 2:74813369 | cg02102114 | 43172 |
| 0.103 | MIR137; MIR2682 | 1:98519101 | cg09896412 | 188935 |
| 0.103 | NR1D1; THRA | 17:38255871 | cg09161455 | 176141 |
| 0.103 | RPTOR | 17:78815421 | cg02363653 | 48276 |
| 0.103 | LOC100505806; | 5:9545976 | cg11011938 | 208099 |
| | SNORD123 | | | |
| 0.103 | GRIN2A | 16:10051500 | cg06880615 | 134389 |
| 0.103 | | 16:85369038 | cg05877550 | 115832 |
| 0.103 | CAPN1; SPDYC | 11:64949878 | cg25363789 | 444004 |
| 0.103 | | 4:1407989 | cg26860935 | 468675 |
| 0.103 | THSD7A | 7:11871690 | cg26748945 | 466682 |
| 0.103 | NEURL; SH3PXD2A | 10:105344174 | cg16311536 | 299928 |
| 0.103 | FREM3 | 4:144621385 | cg04514249 | 90444 |
| 0.103 | CRNDE; IRX5 | 16:54965084 | cg02056682 | 42152 |
| 0.104 | POLR1B; TTL | 2:113298655 | cg12937159 | 239513 |
| 0.104 | PRKD1 | 14:30396845 | cg08608974 | 166464 |
| 0.104 | LAIR1 | 19:54876795 | cg20117742 | 361985 |
| 0.104 | CNTNAP2 | 7:145814152 | cg16254309 | 298913 |
| 0.104 | CRMP1 | 4:5894930 | cg15448975 | 285648 |
| 0.104 | ASIP | 20:32857151 | cg09775533 | 186730 |
| 0.104 | RBFOX1 | 16:6623787 | cg04671611 | 93373 |
| 0.104 | PCDHA1; PCDHA2; | 5:140207609 | cg16987900 | 311601 |
| | PCDHA3; | | | |
| | PCDHA4; | | | |
| | PCDHA5; PCDHA6; | | | |
| | PCDHA7 | | | |
| 0.104 | TGIF1 | 18:3452302 | cg12899157 | 238913 |
| 0.104 | ADRBK2 | 22:25961523 | cg15154002 | 281307 |
| 0.104 | FBP1 | 9:97402452 | cg14211930 | 263861 |
| 0.104 | GABRG2 | 5:161494500 | cg08566437 | 165741 |
| 0.104 | SMAD2 | 18:45458243 | cg03294491 | 66702 |
| 0.104 | SHISA6 | 17:11143830 | cg08169394 | 158589 |
| 0.104 | ADAMTSL3 | 15:84322946 | cg14230666 | 264293 |
| 0.104 | TRIM67 | 1:231296818 | cg08855395 | 170825 |
| 0.104 | RBP4 | 10:95361223 | cg25793377 | 450725 |
| 0.104 | EDIL3 | 5:83679941 | cg07201620 | 140856 |
| 0.104 | C10orf114; MIR1915 | 10:21789124 | cg00580562 | 12369 |
| 0.104 | CAMK1G | 1:209759145 | cg14034757 | 260152 |
| 0.104 | NET1 | 10:5488500 | cg14426660 | 268226 |
| 0.104 | ACTL6B | 7:100253914 | cg08572611 | 165841 |
| 0.104 | TEKT1 | 17:6734940 | cg20663042 | 370096 |
| 0.104 | LOC100271702 | 12:2030223 | cg08621624 | 166700 |
| 0.104 | OCRL | X:128674222 | cg27633753 | 481846 |
| 0.104 | ANKRD53; TEX261 | 2:71205891 | cg18006568 | 327816 |
| 0.104 | RAB32 | 6:146864752 | cg23833452 | 419083 |
| 0.104 | NCAM1 | 11:112833773 | cg12040830 | 225223 |
| 0.104 | C3orf26; FILIP1L | 3:99595145 | cg22092811 | 391783 |
| 0.104 | | 14:95331232 | cg00814780 | 17210 |
| 0.104 | LOC100507043 | 14:96342365 | cg01718322 | 35254 |
| 0.104 | CPLX1 | 4:789505 | cg12792086 | 237263 |
| 0.104 | LINC00327 | 13:24062873 | cg08381620 | 162504 |
| 0.104 | OLFM2 | 19:10024282 | cg06911487 | 135026 |
| 0.104 | FLJ41350; LBX1 | 10:102987257 | cg12646649 | 235126 |
| 0.104 | DUSP27 | 1:167090974 | cg17801546 | 324462 |
| 0.104 | PCDHA1; PCDHA10; | 5:140346199 | cg25500080 | 446199 |
| | PCDHA11; | | | |
| | PCDHA12; | | | |
| | PCDHA13; | | | |
| | PCDHA2; PCDHA3; | | | |
| | PCDHA4; | | | |
| | PCDHA5; | | | |
| | PCDHA6; PCDHA7; | | | |
| | PCDHA8; | | | |
| | PCDHA9; | | | |
| | PCDHAC1; PCDHAC2 | | | |
| 0.104 | ABCC3; CACNA1G | 17:48712370 | cg00081975 | 1883 |
| 0.104 | ZBTB16 | 11:113953621 | cg20268992 | 364195 |
| 0.104 | TMEM179 | 14:105070864 | cg10281977 | 195739 |
| 0.104 | ASB10; GBX1 | 7:150870036 | cg12649727 | 235202 |
| 0.105 | | 11:79151811 | cg09673208 | 185113 |
| 0.105 | CA10 | 17:50235965 | cg22702328 | 400704 |
| 0.105 | SOX17 | 8:55371013 | cg08044097 | 156179 |
| 0.105 | PIWIL1 | 12:130822603 | cg24838063 | 435641 |
| 0.105 | SLC7A14 | 3:170303721 | cg21884231 | 388773 |
| 0.105 | GRIN2D; GRWD1 | 19:48946564 | cg04419610 | 88694 |
| 0.105 | STK24 | 13:99218657 | cg17176619 | 314752 |
| 0.105 | FAM159B | 5:63986733 | cg14004073 | 259441 |
| 0.105 | LOC728723; SNORA47; | 5:76373719 | cg03163459 | 64262 |
| | ZBED3 | | | |
| 0.105 | ZNF536 | 19:30866192 | cg03758150 | 75925 |
| 0.105 | PCDHA1; PCDHA10; | 5:140346394 | cg21537235 | 383480 |
| | PCDHA11; | | | |
| | PCDHA12; | | | |
| | PCDHA13; | | | |
| | PCDHA2; PCDHA3; | | | |
| | PCDHA4; | | | |
| | PCDHA5; | | | |
| | PCDHA6; PCDHA7; | | | |
| | PCDHA8; | | | |
| | PCDHA9; | | | |
| | PCDHAC1; PCDHAC2 | | | |
| 0.105 | | 11:43569269 | cg13201808 | 243496 |
| 0.105 | GLDN | 15:51634039 | cg09495418 | 182011 |
| 0.105 | UGGT1 | 2:128953231 | cg11873311 | 222541 |
| 0.105 | TBX3 | 12:115129446 | cg10297792 | 195985 |
| 0.105 | GPR123 | 10:134902278 | cg07779444 | 151406 |
| 0.105 | IRX1 | 5:3592435 | cg19814981 | 357062 |
| 0.105 | HOTAIRM1; HOXA1; | 7:27142682 | cg09871315 | 188506 |
| | HOXA2; | | | |
| | HOXA3 | | | |
| 0.105 | PLK2 | 5:57756539 | cg07479092 | 145902 |
| 0.105 | TBX3 | 12:115123875 | cg18573327 | 337428 |
| 0.105 | ACTN2 | 1:236849994 | cg20482698 | 367438 |
| 0.105 | LOC388499; LRRC8E | 19:7953281 | cg27615578 | 481540 |
| 0.105 | THRB | 3:24536889 | cg26146027 | 456200 |
| 0.105 | GRIA2 | 4:158141542 | cg10410142 | 197887 |
| 0.105 | FN3K; FN3KRP | 17:80693076 | cg03077331 | 62673 |
| 0.105 | OPA3; VASP | 19:46032528 | cg26958124 | 470450 |
| 0.105 | HOXD1; LOC401022 | 2:177053274 | cg03450948 | 69796 |
| 0.105 | VWC2 | 7:49813088 | cg01893212 | 38794 |
| 0.105 | | 1:241520331 | cg13849378 | 256225 |
| 0.105 | DLX6-AS1 | 7:96622709 | cg18502142 | 336304 |
| 0.105 | | 4:180979631 | cg12950911 | 239731 |
| 0.105 | DNAH8 | 6:38683221 | cg03166753 | 64319 |
| 0.105 | NETO1 | 18:70536461 | cg13644317 | 252077 |
| 0.105 | FLJ12825; HOXC4 | 12:54454163 | cg04024827 | 80948 |
| 0.105 | | 6:125855124 | cg02612397 | 53198 |
| 0.105 | TP73; WRAP73 | 1:3567646 | cg07382920 | 144177 |
| 0.105 | | 4:165304540 | cg21300373 | 380200 |
| 0.105 | PRDM8 | 4:81118588 | cg26299084 | 458882 |
| 0.106 | ASIP | 20:32857072 | cg16655240 | 306231 |
| 0.106 | TBX18 | 6:85474093 | cg02106850 | 43270 |
| 0.106 | THBD | 20:23030250 | cg09279949 | 178245 |
| 0.106 | HOXD8; LOC100506783 | 2:177004015 | cg18516557 | 336519 |
| 0.106 | AQPEP | 5:115298704 | cg22010052 | 390518 |
| 0.106 | WNT3A | 1:228248013 | cg26841013 | 468320 |
| 0.106 | C14orf23; FOXG1 | 14:29236008 | cg02681442 | 54626 |
| 0.106 | COL4A1; COL4A2 | 13:110959428 | cg06659727 | 129920 |
| 0.106 | LOC100192378; | 8:77590322 | cg09938511 | 189649 |
| | ZFHX4 | | | |
| 0.106 | MAGI2-AS3 | 7:79083753 | cg07448060 | 145248 |
| 0.106 | CHRDL1 | X:110039536 | cg00619443 | 13187 |
| 0.106 | FAM174B | 15:93199037 | cg25864024 | 451730 |
| 0.106 | CNPY1 | 7:155301734 | cg05944137 | 117184 |
| 0.106 | PIGZ | 3:196695320 | cg23484358 | 413640 |
| 0.106 | WNT7B | 22:46372742 | cg17179568 | 314808 |
| 0.106 | TMPRSS3; UBASH3A | 21:43824071 | cg00134539 | 3054 |
| 0.106 | EPHA5; LOC100144602 | 4:66534218 | cg23193365 | 408770 |
| 0.106 | DGKI | 7:137125473 | cg13734282 | 253993 |
| 0.106 | UNC5C | 4:96470286 | cg11723848 | 219719 |
| 0.106 | | 10:35256135 | cg16738929 | 307860 |
| 0.106 | NRG1 | 8:32504919 | cg14663451 | 273089 |
| 0.106 | HOTTIP; HOXA13 | 7:27246799 | cg25720795 | 449560 |
| 0.106 | LMF1; SOX8 | 16:1030619 | cg05520409 | 109522 |
| 0.106 | CRMP1 | 4:5894923 | cg07963234 | 154775 |
| 0.106 | HOTAIR; HOXC12; | 12:54349169 | cg26931862 | 469970 |
| | HOXC13 | | | |
| 0.106 | FOXI2 | 10:129535186 | cg25539045 | 446751 |
| 0.106 | | 1:41350014 | cg13472192 | 248463 |
| 0.106 | | 6:39740405 | cg14173968 | 262984 |
| 0.106 | | 20:690693 | cg02217786 | 45276 |
| 0.106 | PRSS3 | 9:33750687 | cg14369648 | 267044 |
| 0.106 | ZNF362 | 1:33721234 | cg03767970 | 76126 |
| 0.106 | FGFR1OP; MIR3939 | 6:167409842 | cg02634327 | 53695 |
| 0.106 | PCDH8 | 13:53419963 | cg07847863 | 152703 |
| 0.106 | HS6ST3 | 13:96742421 | cg08612100 | 166526 |
| 0.106 | ARMS2; HTRA1 | 10:124220367 | cg09576143 | 183453 |
| 0.106 | | 3:64430940 | cg11236526 | 211855 |
| 0.106 | CHST9 | 18:24765490 | cg21895526 | 388922 |
| 0.106 | C14orf132 | 14:96505722 | cg16539629 | 304057 |
| 0.106 | | 5:72596646 | cg01050429 | 22138 |
| 0.106 | | 8:61823275 | cg06011086 | 118514 |
| 0.106 | ST6GAL2 | 2:107502679 | cg19412467 | 350247 |
| 0.106 | CHAT; SLC18A3 | 10:50818299 | cg11389172 | 214354 |
| 0.106 | SLC6A1 | 3:11033866 | cg00375819 | 7950 |
| 0.107 | CLEC2L | 7:139208852 | cg08832906 | 170404 |
| 0.107 | CCDC27; TP73- | 1:3663435 | cg10634619 | 201918 |
| | AS1 | | | |
| 0.107 | ZNF90 | 19:20188803 | cg03317517 | 67181 |
| 0.107 | GBP1 | 1:89523325 | cg11083157 | 209272 |
| 0.107 | OSR2 | 8:99961874 | cg01581084 | 32753 |
| 0.107 | KCNA7; NTF4 | 19:49575475 | cg26923490 | 469807 |
| 0.107 | ISL1 | 5:50678925 | cg01587896 | 32872 |
| 0.107 | NEFH | 22:29876945 | cg23353952 | 411659 |
| 0.107 | | 7:149744935 | cg15058253 | 279644 |
| 0.107 | DDX25; HYLS1; | 11:125774406 | cg19792599 | 356708 |
| | PUS3 | | | |
| 0.107 | CBWD1; FOXD4 | 9:113530 | cg01237333 | 25956 |
| 0.107 | MIR1253 | 17:2659081 | cg08457011 | 163741 |
| 0.107 | TAS2R1 | 5:9623366 | cg01984802 | 40719 |
| 0.107 | TBX18 | 6:85474090 | cg07028914 | 137326 |
| 0.107 | ARL5C; CACNB1 | 17:37321631 | cg20555674 | 368474 |
| 0.107 | CNTNAP2 | 7:145813413 | cg05749717 | 113523 |
| 0.107 | | 2:165698949 | cg21639287 | 385195 |
| 0.107 | DNAJC6 | 1:65775570 | cg26885220 | 469135 |
| 0.107 | LILRA2 | 19:55084269 | cg16893868 | 310220 |
| 0.107 | CRNDE; IRX5 | 16:54965100 | cg06191898 | 121610 |
| 0.107 | PRKAR1B | 7:751962 | cg12441126 | 231659 |
| 0.107 | ARHGEF10; | 8:1772116 | cg22880677 | 403671 |
| | MIR596 | | | |
| 0.107 | | 5:143978290 | cg02030403 | 41637 |
| 0.107 | CBLN4 | 20:54579084 | cg01729827 | 35479 |
| 0.107 | HOXD10; HOXD8; | 2:176989349 | cg09173768 | 176359 |
| | HOXD9 | | | |
| 0.107 | MIR196A1 | 17:46713962 | cg13769834 | 254628 |
| 0.107 | CRAMP1L | 16:1665094 | cg06810647 | 132860 |
| 0.107 | ANGPT1 | 8:108511174 | cg09443479 | 181117 |
| 0.107 | DRD1 | 5:174871289 | cg18190187 | 331134 |
| 0.107 | | 1:227729906 | cg11846112 | 221996 |
| 0.107 | TGFBI | 5:135364556 | cg03625177 | 73315 |
| 0.107 | TRMT2B | X:100307142 | cg11708328 | 219456 |
| 0.107 | HOXD4; MIR10B | 2:177014966 | cg12215739 | 228288 |
| 0.107 | | X:39548267 | cg11712793 | 219521 |
| 0.107 | DEAF1; DRD4; | 11:637035 | cg23501406 | 413927 |
| | SCT | | | |
| 0.107 | ZNF578 | 19:52956683 | cg14582763 | 271490 |
| 0.107 | KITLG | 12:88974161 | cg25741452 | 449928 |
| 0.107 | BIRC5; TMEM235 | 17:76228233 | cg09473315 | 181656 |
| 0.107 | DMRTA2 | 1:50884480 | cg10512745 | 199703 |
| 0.107 | TMEM132C | 12:128752040 | cg04475027 | 89694 |
| 0.107 | INPP5A; NKX6-2 | 10:134600675 | cg15304699 | 283459 |
| 0.107 | FGF8; MGEA5; | 10:103536342 | cg25209842 | 441648 |
| | NPM3 | | | |
| 0.108 | SLC22A20 | 11:64993335 | cg23930334 | 420666 |
| 0.108 | DIP2C | 10:601816 | cg06279296 | 123066 |
| 0.108 | PRKD1 | 14:30396515 | cg01588388 | 32879 |
| 0.108 | EYA4 | 6:133562332 | cg01328892 | 27704 |
| 0.108 | PTPRM | 18:7566781 | cg16474170 | 302867 |
| 0.108 | FAM129C | 19:17650009 | cg12585966 | 234024 |
| 0.108 | CD247 | 1:167409054 | cg06900257 | 134801 |
| 0.108 | DRD5 | 4:9783206 | cg04597433 | 92065 |
| 0.108 | ISCA2; LTBP2 | 14:74959018 | cg26195881 | 457091 |
| 0.108 | HOXC4; HOXC5; | 12:54408091 | cg14569644 | 271205 |
| | HOXC6; HOXC8 | | | |
| 0.108 | FAM5C | 1:190447290 | cg23010538 | 405785 |
| 0.108 | LRP12 | 8:105601696 | cg00662122 | 14007 |
| 0.108 | SFRP1 | 8:41166990 | cg24319902 | 427005 |
| 0.108 | | 13:24270087 | cg10885151 | 205995 |
| 0.108 | SVEP1 | 9:113341525 | cg13606569 | 251311 |
| 0.108 | | 3:181444563 | cg04859466 | 96950 |
| 0.108 | GABRA2 | 4:46391392 | cg25145765 | 440699 |
| 0.108 | KLF16 | 19:1851882 | cg13382072 | 246526 |
| 0.108 | CATSPER2P1; | 15:44035561 | cg15437748 | 285428 |
| | PDIA3 | | | |
| 0.108 | TRAF3IP2; TRAF3IP2- | 6:111926749 | cg15772366 | 291005 |
| | AS1 | | | |
| 0.108 | PCDHA1; PCDHA10; | 5:140345966 | cg04454086 | 89312 |
| | PCDHA11; | | | |
| | PCDHA12; | | | |
| | PCDHA13; | | | |
| | PCDHA2; PCDHA3; | | | |
| | PCDHA4; | | | |
| | PCDHA5; | | | |
| | PCDHA6; PCDHA7; | | | |
| | PCDHA8; | | | |
| | PCDHA9; | | | |
| | PCDHAC1; PCDHAC2 | | | |
| 0.108 | VWC2 | 7:49813486 | cg18206027 | 331413 |
| 0.108 | | 6:157264715 | cg16455339 | 302565 |
| 0.108 | FAM110C | 2:46465 | cg14255256 | 264798 |
| 0.108 | ZNF148 | 3:125076480 | cg22895305 | 403903 |
| 0.108 | ADAMTS16 | 5:5139874 | cg16508480 | 303412 |
| 0.108 | LOC100506757; | X:133678716 | cg19112977 | 345819 |
| | MGC16121; | | | |
| | MIR424; MIR450A1; | | | |
| | MIR450A2; | | | |
| | MIR450B; | | | |
| | MIR503; MIR542 | | | |
| 0.108 | SNX9 | 6:158243833 | cg26845300 | 468408 |
| 0.108 | TMEM181 | 6:158957433 | cg00590036 | 12606 |
| 0.108 | | 3:75661206 | cg24573207 | 431170 |
| 0.108 | PSKH2 | 8:87082014 | cg04470072 | 89611 |
| 0.108 | C10orf140; MLLT10 | 10:21814313 | cg03891590 | 78352 |
| 0.108 | MIR1258; ZNF385B | 2:180726035 | cg24575676 | 431204 |
| 0.108 | UBD | 6:29521501 | cg20723129 | 371254 |
| 0.108 | | 13:112759386 | cg21054521 | 376149 |
| 0.108 | NTNG2 | 9:135118406 | cg14408447 | 267814 |
| 0.108 | PTPRT | 20:41818356 | cg13168820 | 242965 |
| 0.109 | SOX1 | 13:112722333 | cg15466862 | 285977 |
| 0.109 | RSPO1 | 1:38100467 | cg13448605 | 247923 |
| 0.109 | FGF8; MGEA5; | 10:103536348 | cg06169131 | 121199 |
| | NPM3 | | | |
| 0.109 | HOXB2; HOXB3 | 17:46618919 | cg21780393 | 387140 |
| 0.109 | SYT7 | 11:61335254 | cg03200166 | 64948 |
| 0.109 | SPATA18 | 4:52918471 | cg17031543 | 312329 |
| 0.109 | C3orf25; MBD4 | 3:129147397 | cg17468185 | 319549 |
| 0.109 | SRCIN1 | 17:36718549 | cg20090283 | 361564 |
| 0.109 | LOC400657 | 18:72263688 | cg20276402 | 364322 |
| 0.109 | C14orf23; FOXG1 | 14:29237480 | cg16804284 | 308960 |
| 0.109 | GABRG2 | 5:161494515 | cg09220361 | 177083 |
| 0.109 | | 8:72468820 | cg24809973 | 435221 |
| 0.109 | | 7:87974722 | cg27221053 | 474880 |
| 0.109 | NXPH2 | 2:139537745 | cg10989763 | 207734 |
| 0.109 | SGPL1 | 10:72594465 | cg09140723 | 175742 |
| 0.109 | FGF18 | 5:170848123 | cg01392179 | 28917 |
| 0.109 | ZNF300 | 5:150284796 | cg21228005 | 379112 |
| 0.109 | ZNF329; ZSCAN18 | 19:58629828 | cg03145999 | 63909 |
| 0.109 | LOC255480 | 12:114852091 | cg01184975 | 24931 |
| 0.109 | LPHN3 | 4:62383028 | cg16225703 | 298417 |
| 0.109 | | 7:156409058 | cg16771407 | 308382 |
| 0.109 | UNCX | 7:1271236 | cg18629009 | 338270 |
| 0.109 | | 6:28945500 | cg24126967 | 424128 |
| 0.109 | MSX1 | 4:4860061 | cg15092343 | 280260 |
| 0.109 | SOX1 | 13:112721789 | cg02547394 | 51873 |
| 0.109 | CHST8 | 19:34112991 | cg19594305 | 353222 |
| 0.109 | BMP4 | 14:54413548 | cg27302539 | 476206 |
| 0.109 | FUT9 | 6:96463902 | cg01758512 | 35982 |
| 0.109 | | 2:240153778 | cg25746499 | 450027 |
| 0.109 | CCDC50; UTS2D | 3:191047240 | cg25235397 | 442049 |
| 0.109 | PAX1 | 20:21686282 | cg08448701 | 163575 |
| 0.110 | UBQLN2 | X:56589768 | cg02587153 | 52704 |
| 0.110 | | 10:13425015 | cg18675735 | 338977 |
| 0.110 | | 18:6414958 | cg22058122 | 391310 |
| 0.110 | CSMD1 | 8:4852036 | cg12258042 | 228965 |
| 0.110 | ASPG; MIR203; | 14:104583067 | cg23960324 | 421202 |
| | MIR3545 | | | |
| 0.110 | RACGAP1 | 12:50426901 | cg19796532 | 356768 |
| 0.110 | | 13:20875915 | cg14472366 | 269103 |
| 0.110 | | 14:95330984 | cg19453488 | 350906 |
| 0.110 | ZNF385D | 3:21792857 | cg26077378 | 454997 |
| 0.110 | MBNL2 | 13:98002933 | cg03372334 | 68296 |
| 0.110 | ENO4 | 10:118608698 | cg01035689 | 21828 |
| 0.110 | CRHBP | 5:76249502 | cg04306063 | 86503 |
| 0.110 | ODZ1 | X:124097806 | cg24761295 | 434425 |
| 0.110 | | 6:78359965 | cg10264012 | 195459 |
| 0.110 | | 7:4921827 | cg04816699 | 96082 |
| 0.110 | MDGA1 | 6:37616598 | cg03062252 | 62373 |
| 0.110 | GJD2 | 15:35046760 | cg21053529 | 376133 |
| 0.110 | RLF; TMCO2; | 1:40714009 | cg06776907 | 132164 |
| | ZMPSTE24 | | | |
| 0.110 | HS3ST6 | 16:1968232 | cg14936269 | 277598 |
| 0.110 | DKFZp434J0226 | 19:46713473 | cg21629821 | 385058 |
| 0.110 | ANO1 | 11:69934109 | cg05846633 | 115247 |
| 0.110 | KIAA1755 | 20:36889364 | cg14003035 | 259413 |
| 0.110 | CORIN; NFXL1 | 4:47840011 | cg26018901 | 454082 |
| 0.110 | GLT1D1 | 12:129337897 | cg04054313 | 81425 |
| 0.110 | | 9:13279482 | cg06202228 | 121794 |
| 0.110 | CADM1 | 11:115069145 | cg05125455 | 102021 |
| 0.110 | DPYS | 8:105479058 | cg10303487 | 196069 |
| 0.110 | KDM2B | 12:122019080 | cg17452615 | 319270 |
| 0.110 | FOXI2 | 10:129535509 | cg09614415 | 184092 |
| 0.110 | ARHGEF4 | 2:131673894 | cg12910906 | 239117 |
| 0.110 | CPNE7 | 16:89654085 | cg10499753 | 199387 |
| 0.110 | CBLN1 | 16:49315302 | cg08464190 | 163914 |
| 0.110 | ADAM33; ATRN; | 20:3641641 | cg25164624 | 440992 |
| | GFRA4 | | | |
| 0.110 | LIMK2 | 22:31644160 | cg15504662 | 286549 |
| 0.110 | FLT3 | 13:28673762 | cg26472910 | 461940 |
| 0.110 | BANK1 | 4:102712397 | cg14855874 | 276324 |
| 0.110 | | 12:34500585 | cg19457237 | 350958 |
| 0.110 | KDM2B | 12:122018897 | cg09151742 | 175965 |
| 0.111 | | 2:130763641 | cg08857994 | 170896 |
| 0.111 | PAX6 | 11:31819380 | cg26029734 | 454240 |
| 0.111 | HMGCLL1 | 6:55443868 | cg06401021 | 125152 |
| 0.111 | ZNF578 | 19:52956832 | cg25763393 | 450297 |
| 0.111 | TRPC4 | 13:38444134 | cg15696906 | 289754 |
| 0.111 | PLEKHA6 | 1:204256846 | cg25407979 | 444757 |
| 0.111 | C5orf38; IRX2 | 5:2743601 | cg26195356 | 457077 |
| 0.111 | EP400; PUS1 | 12:132433838 | cg26147845 | 456245 |
| 0.111 | MLLT3 | 9:20339790 | cg21222426 | 379016 |
| 0.111 | CTTNBP2 | 7:117513348 | cg17112089 | 313639 |
| 0.111 | EFHD1 | 2:233499460 | cg06842071 | 133579 |
| 0.111 | TMEM131 | 2:98613076 | cg02995664 | 61036 |
| 0.111 | DLX5; DLX6; DLX6- | 7:96647021 | cg23262036 | 410160 |
| | AS1 | | | |
| 0.111 | RAX | 18:56940333 | cg06676637 | 130191 |
| 0.111 | COLEC12 | 18:500979 | cg19461621 | 351026 |
| 0.111 | MIR618 | 12:81331486 | cg23441441 | 412989 |
| 0.111 | | 7:64407743 | cg24002887 | 421987 |
| 0.111 | ST6GALNAC5 | 1:77334045 | cg23243867 | 409762 |
| 0.111 | MIR618 | 12:81331469 | cg17061244 | 312814 |
| 0.111 | LAMA1 | 18:7117680 | cg07846220 | 152681 |
| 0.111 | LOC100506012; | 19:46975062 | cg21988244 | 390260 |
| | PNMAL1 | | | |
| 0.111 | FGF12 | 3:192127330 | cg16376000 | 301109 |
| 0.111 | | 4:85403915 | cg25174438 | 441100 |
| 0.111 | GALR1 | 18:74961968 | cg20872937 | 373368 |
| 0.111 | LRIT1; RGR | 10:86001254 | cg14034858 | 260156 |
| 0.111 | LAG3; PTMS | 12:6888035 | cg11429292 | 215067 |
| 0.111 | PDE1C | 7:32110523 | cg14604568 | 271937 |
| 0.111 | ZNF503; ZNF503- | 10:77156218 | cg20659435 | 370034 |
| | AS2 | | | |
| 0.111 | CDH8 | 16:62069337 | cg02172312 | 44501 |
| 0.111 | ISL1 | 5:50678913 | cg17412886 | 318628 |
| 0.111 | THRB | 3:24537469 | cg08123277 | 157665 |
| 0.111 | HOXD10; HOXD11; | 2:176972068 | cg05500840 | 109127 |
| | HOXD12 | | | |
| 0.111 | ADAMTS16 | 5:5140003 | cg03209854 | 65125 |
| 0.111 | | 2:200524012 | cg27211284 | 474729 |
| 0.111 | SLC16A2 | X:73641955 | cg06805513 | 132754 |
| 0.111 | HOXC4; HOXC5; | 12:54424964 | cg10005224 | 190710 |
| | HOXC6; MIR615 | | | |
| 0.111 | PTPRZ1 | 7:121513058 | cg05931096 | 116896 |
| 0.111 | SOX17 | 8:55370434 | cg15186181 | 281779 |
| 0.112 | ZNF536 | 19:30866194 | cg06000994 | 118339 |
| 0.112 | | 1:17199104 | cg20168927 | 362799 |
| 0.112 | STAC2 | 17:37381475 | cg14328457 | 266291 |
| 0.112 | CLMP | 11:123008408 | cg12995113 | 240381 |
| 0.112 | CADPS | 3:62860224 | cg13514230 | 249338 |
| 0.112 | TAPBPL; VAMP1 | 12:6572482 | cg22129323 | 392333 |
| 0.112 | | 13:112849184 | cg20681688 | 370443 |
| 0.112 | OR51A2; OR51A4 | 11:4977924 | cg07589078 | 148007 |
| 0.112 | | 11:110627909 | cg04297660 | 86337 |
| 0.112 | DNMT3A | 2:25474327 | cg10749994 | 203678 |
| 0.112 | | 19:23185714 | cg24911113 | 436942 |
| 0.112 | CCT8L2; TPTEP1 | 22:17083482 | cg00816224 | 17246 |
| 0.112 | SLC35F3 | 1:234040781 | cg09424759 | 180776 |
| 0.112 | EPHB2; MIR4684 | 1:23038177 | cg27573841 | 480859 |
| 0.112 | HOXC8; HOXC9 | 12:54398518 | cg08254359 | 160184 |
| 0.112 | PRDM8 | 4:81118794 | cg06307913 | 123528 |
| 0.112 | | 22:33454324 | cg05206884 | 103569 |
| 0.112 | CR1L | 1:207842927 | cg20264068 | 364122 |
| 0.112 | DNAAF2; LRR1; | 14:50085410 | cg24149364 | 424560 |
| | MGAT2; RPL36AL | | | |
| 0.112 | MAPK14 | 6:36076933 | cg20559215 | 368537 |
| 0.112 | ISL2 | 15:76630209 | cg23513966 | 414134 |
| 0.112 | F10; PROZ | 13:113807384 | cg10067723 | 191777 |
| 0.112 | C1orf229; ZNF124; | 1:247275344 | cg23695504 | 417170 |
| | ZNF669 | | | |
| 0.112 | HOOK1 | 1:60280809 | cg23996071 | 421845 |
| 0.112 | ZNF83 | 19:53142304 | cg17132967 | 313971 |
| 0.112 | TACR1 | 2:75292272 | cg14054283 | 260559 |
| 0.112 | | 15:29862568 | cg13942157 | 258175 |
| 0.112 | | 4:165305050 | cg10453719 | 198622 |
| 0.112 | SPAG6 | 10:22634218 | cg12377139 | 230587 |
| 0.112 | GRM6 | 5:178422071 | cg23003783 | 405665 |
| 0.112 | AQP12A; AQP12B | 2:241623436 | cg08049592 | 156267 |
| 0.112 | | 16:15219673 | cg04381865 | 87943 |
| 0.112 | KIAA0182 | 16:85648263 | cg07301329 | 142673 |
| 0.112 | HOXC4; HOXC5; | 12:54413384 | cg15772924 | 291010 |
| | HOXC6; HOXC8 | | | |
| 0.112 | TCF15 | 20:591083 | cg25984671 | 453527 |
| 0.112 | C5orf38; IRX2 | 5:2751550 | cg18371475 | 334040 |
| 0.113 | ST6GAL2 | 2:107503672 | cg21649258 | 385387 |
| 0.113 | PTPRT | 20:41818574 | cg27625055 | 481684 |
| 0.113 | PRKCG | 19:54402455 | cg02849693 | 57883 |
| 0.113 | | 8:41754181 | cg17331296 | 317296 |
| 0.113 | SOX11 | 2:5836231 | cg18897632 | 342660 |
| 0.113 | | 17:55213656 | cg11030264 | 208410 |
| 0.113 | DPP6 | 7:153584597 | cg14523847 | 270200 |
| 0.113 | NLRP14; ZNF214 | 11:7041549 | cg22867063 | 403403 |
| 0.113 | | 6:28921805 | cg22489957 | 397412 |
| 0.113 | AMPD3; MIR4485; | 11:10531596 | cg18489034 | 336073 |
| | MTRNR2L8; | | | |
| | RNF141 | | | |
| 0.113 | PALLD | 4:169525923 | cg24784416 | 434791 |
| 0.113 | KHDRBS2 | 6:62996119 | cg26715952 | 466174 |
| 0.113 | PTGER2 | 14:52780158 | cg21502048 | 382905 |
| 0.113 | CTNNA2 | 2:79739863 | cg08119884 | 157578 |
| 0.113 | PRKAR1B | 7:751833 | cg00356183 | 7541 |
| 0.113 | GPR125 | 4:22517094 | cg08141192 | 158041 |
| 0.113 | SLC6A17 | 1:110693237 | cg11885396 | 222730 |
| 0.113 | FAT1 | 4:187645120 | cg27475132 | 479115 |
| 0.113 | KIAA0748 | 12:55371892 | cg24536818 | 430655 |
| 0.113 | TRIM31 | 6:30071394 | cg23642250 | 416154 |
| 0.113 | DPP6 | 7:153584582 | cg06495961 | 126761 |
| 0.113 | | 8:142276422 | cg25461290 | 445593 |
| 0.113 | MRPS15; OSCP1 | 1:36912487 | cg26030770 | 454254 |
| 0.113 | EPPK1 | 8:144952929 | cg18153977 | 330494 |
| 0.113 | | 3:184231385 | cg15718583 | 290162 |
| 0.113 | HAND2; NBLA00301 | 4:174453166 | cg15234400 | 282488 |
| 0.113 | EGLN3 | 14:34420292 | cg24665290 | 432653 |
| 0.113 | HOXD1; LOC401022 | 2:177053297 | cg19180624 | 346696 |
| 0.113 | LINC00472 | 6:72130209 | cg10039188 | 191305 |
| 0.113 | DMRTA2 | 1:50886949 | cg25191628 | 441334 |
| 0.113 | KIT | 4:55524199 | cg10087973 | 192117 |
| 0.114 | | 15:87892167 | cg02693157 | 54811 |
| 0.114 | NXPH1 | 7:8482235 | cg12597389 | 234250 |
| 0.114 | CACNG6; CACNG8; | 19:54486058 | cg02574502 | 52401 |
| | MIR935 | | | |
| 0.114 | HOXD11; HOXD12; | 2:176964720 | cg03964958 | 79739 |
| | HOXD13 | | | |
| 0.114 | | 7:127910927 | cg08234689 | 159796 |
| 0.114 | SPAG6 | 10:22634226 | cg18247055 | 332095 |
| 0.114 | FAM104B | X:55187561 | cg15824287 | 291790 |
| 0.114 | FOXQ1 | 6:1313211 | cg26422161 | 461072 |
| 0.114 | | 11:91957992 | cg07603330 | 148311 |
| 0.114 | UTF1; VENTX | 10:135050619 | cg25577463 | 447348 |
| 0.114 | ARL9; SRP72 | 4:57371607 | cg06922635 | 135243 |
| 0.114 | MACROD2; SEL1L2 | 20:13976143 | cg06571075 | 128176 |
| 0.114 | CNN3; LOC729970 | 1:95393096 | cg18344652 | 333645 |
| 0.114 | DUSP27 | 1:167090757 | cg11236550 | 211856 |
| 0.114 | MEGF6 | 1:3447348 | cg17163527 | 314497 |
| 0.114 | | 20:12809929 | cg12505343 | 232775 |
| 0.114 | CHST8 | 19:34112683 | cg27058486 | 472166 |
| 0.114 | PUS1; ULK1 | 12:132410932 | cg24221398 | 425685 |
| 0.114 | C14orf23; FOXG1 | 14:29244278 | cg21195256 | 378436 |
| 0.114 | | 1:88928467 | cg02664812 | 54315 |
| 0.114 | SLC44A2 | 19:10713016 | cg05567294 | 110272 |
| 0.114 | LOC100129794 | 14:37641462 | cg25051529 | 439230 |
| 0.114 | CRNDE; IRX5 | 16:54966471 | cg16642791 | 305999 |
| 0.114 | STAT3; STAT5A | 17:40464780 | cg25500196 | 446200 |
| 0.114 | FGF18 | 5:170878209 | cg02125316 | 43605 |
| 0.114 | | 7:127775630 | cg19871348 | 358070 |
| 0.114 | | 7:158380884 | cg22282410 | 394574 |
| 0.114 | | 16:1048069 | cg11978890 | 224277 |
| 0.114 | RGAG4 | X:71352048 | cg03056321 | 62257 |
| 0.114 | ZNF83 | 19:53142146 | cg25793430 | 450728 |
| 0.114 | FRYL; SLC10A4; | 4:48492304 | cg14249348 | 264663 |
| | ZAR1 | | | |
| 0.115 | HES6; LOC151174; | 2:239140182 | cg23497383 | 413854 |
| | LOC643387 | | | |
| 0.115 | | 6:28911938 | cg25005112 | 438404 |
| 0.115 | RBFOX1 | 16:6070188 | cg08015447 | 155664 |
| 0.115 | CHST8 | 19:34113214 | cg06399302 | 125117 |
| 0.115 | PRKG1 | 10:52752476 | cg11175150 | 210715 |
| 0.115 | CRNDE; IRX5 | 16:54965142 | cg09641689 | 184540 |
| 0.115 | EMX2; EMX2OS | 10:119303225 | cg15373239 | 284408 |
| 0.115 | ATOH1 | 4:94749865 | cg00335712 | 7088 |
| 0.115 | DSC3 | 18:28622474 | cg14719951 | 274021 |
| 0.115 | IDH1; PIKFYVE | 2:209128590 | cg06177665 | 121341 |
| 0.115 | CAMKK2; P2RX4 | 12:121678558 | cg09297514 | 178526 |
| 0.115 | GABRB3 | 15:27018037 | cg18026588 | 328201 |
| 0.115 | GNA15 | 19:3136430 | cg01032675 | 21764 |
| 0.115 | DPP6 | 7:153749736 | cg18940047 | 343252 |
| 0.115 | | 7:52156489 | cg18793404 | 340916 |
| 0.115 | KCNK18 | 10:118976677 | cg27455890 | 478852 |
| 0.115 | UPK3A | 22:45680879 | cg07021644 | 137193 |
| 0.115 | SLC6A2 | 16:55689865 | cg10362591 | 197113 |
| 0.115 | | 4:104918078 | cg05123845 | 101996 |
| 0.115 | PON2; PON3 | 7:95025836 | cg08828819 | 170325 |
| 0.115 | PROX1 | 1:214160860 | cg17954152 | 327012 |
| 0.115 | THRB | 3:24536562 | cg24120841 | 424012 |
| 0.115 | CDK5R2 | 2:219826870 | cg27638196 | 481940 |
| 0.115 | TMEM17 | 2:62732892 | cg10848792 | 205426 |
| 0.115 | RBFOX1 | 16:6533163 | cg14642432 | 272661 |
| 0.115 | PSMD14; TBR1 | 2:162270993 | cg08184652 | 158859 |
| 0.115 | FKBP5 | 6:35654363 | cg03546163 | 71700 |
| 0.115 | LOC100188947 | 10:93058376 | cg17402294 | 318468 |
| 0.115 | KIF26B | 1:245820634 | cg11424312 | 214996 |
| 0.115 | ELAVL4 | 1:50513766 | cg05697849 | 112668 |
| 0.115 | KIAA0748 | 12:55376897 | cg25486399 | 445985 |
| 0.115 | VAX1 | 10:118896755 | cg11398452 | 214514 |
| 0.115 | RFX8 | 2:102091269 | cg12291728 | 229438 |
| 0.115 | | 6:28677112 | cg14234426 | 264370 |
| 0.115 | MTNR1A | 4:187476455 | cg25107254 | 440048 |
| 0.115 | ID2 | 2:8817010 | cg21946006 | 389750 |
| 0.115 | HTR1A | 5:63257847 | cg09698471 | 185520 |
| 0.115 | SORCS3 | 10:106401319 | cg10778841 | 204179 |
| 0.116 | | 14:74100987 | cg14527456 | 270289 |
| 0.116 | FLRT2 | 14:85996499 | cg01711160 | 35095 |
| 0.116 | SHANK1 | 19:51198381 | cg07060551 | 137922 |
| 0.116 | ALLC; COLEC11 | 2:3699195 | cg13452994 | 248021 |
| 0.116 | GRM6 | 5:178421711 | cg12483476 | 232367 |
| 0.116 | | 3:22413960 | cg06062984 | 119382 |
| 0.116 | LRRC36; TPPP3; | 16:67427339 | cg07355841 | 143680 |
| | ZDHHC1 | | | |
| 0.116 | HOTAIR; HOXC12 | 12:54355476 | cg19188855 | 346817 |
| 0.116 | TACSTD2 | 1:59042275 | cg24851854 | 435890 |
| 0.116 | NPY2R | 4:156130016 | cg21512644 | 383071 |
| 0.116 | KIRREL3-AS3 | 11:126873379 | cg00373707 | 7906 |
| 0.116 | HS6ST3 | 13:96743087 | cg27176138 | 474164 |
| 0.116 | UBD | 6:29521228 | cg15814717 | 291599 |
| 0.116 | CBWD2; FOXD4L1 | 2:114256781 | cg10602757 | 201345 |
| 0.116 | HES6; LOC151174; | 2:239140024 | cg13957874 | 258474 |
| | LOC643387 | | | |
| 0.116 | OPRK1 | 8:54164296 | cg13405783 | 247011 |
| 0.116 | NKX2- | 14:36992233 | cg04224064 | 84867 |
| | 1; SFTA3 | | | |
| 0.116 | CCNA1 | 13:37005273 | cg24297049 | 426624 |
| 0.116 | | 2:91671535 | cg02109405 | 43319 |
| 0.116 | | 15:32607923 | cg00943360 | 19827 |
| 0.116 | PTPRG | 3:61547130 | cg09472360 | 181640 |
| 0.116 | GLRB | 4:157998201 | cg10146199 | 193292 |
| 0.116 | C1orf53; LHX9 | 1:197875080 | cg12578211 | 233875 |
| 0.116 | NPTX2 | 7:98246006 | cg08315202 | 161360 |
| 0.116 | GDF7 | 2:20871195 | cg10553204 | 200490 |
| 0.116 | | 8:61835848 | cg06445016 | 125876 |
| 0.116 | PRMT8 | 12:3600106 | cg27316886 | 476555 |
| 0.116 | ADAMTS16 | 5:5139878 | cg04136610 | 83123 |
| 0.116 | ZNF503; ZNF503- | 10:77163383 | cg18510056 | 336418 |
| | AS2 | | | |
| 0.116 | | 6:28911902 | cg13293729 | 244984 |
| 0.116 | DMRT1; DMRT3 | 9:971480 | cg07173635 | 140295 |
| 0.116 | | 6:170686343 | cg01061164 | 22368 |
| 0.116 | | 5:4942469 | cg18101138 | 329470 |
| 0.116 | FBN2 | 5:127874466 | cg25532099 | 446652 |
| 0.116 | PPM1L | 3:160475090 | cg04056576 | 81465 |
| 0.116 | 11-Mar | 5:16179210 | cg03705912 | 74857 |
| 0.116 | SOX11 | 2:5837057 | cg15989068 | 294511 |
| 0.116 | INTU | 4:128544255 | cg16654911 | 306224 |
| 0.116 | FAM20C | 7:193262 | cg08782337 | 169501 |
| 0.116 | SLC15A3 | 11:60719947 | cg26980692 | 470832 |
| 0.116 | RBFOX1 | 16:6068835 | cg19378133 | 349684 |
| 0.116 | | 14:95826734 | cg05162306 | 102773 |
| 0.116 | SOX1 | 13:112717244 | cg09469566 | 181584 |
| 0.117 | PRPH | 12:49689463 | cg14029489 | 260043 |
| 0.117 | MLXIPL | 7:73038859 | cg10092878 | 192247 |
| 0.117 | ATP4A | 19:36048943 | cg19715414 | 355233 |
| 0.117 | MANEAL; YRDC | 1:38261057 | cg24433287 | 428889 |
| 0.117 | KCNA4 | 11:30038677 | cg15310492 | 283522 |
| 0.117 | | 3:54119792 | cg03494612 | 70623 |
| 0.117 | MMP17 | 12:132312461 | cg03570417 | 72216 |
| 0.117 | ADAT1; KARS | 16:75661691 | cg01921773 | 39352 |
| 0.117 | FIGLA | 2:71017541 | cg22650617 | 399823 |
| 0.117 | CNPY1 | 7:155324691 | cg09090582 | 174907 |
| 0.117 | BDNF | 11:27740876 | cg05733135 | 113285 |
| 0.117 | LINC00467 | 1:211590292 | cg20802616 | 372441 |
| 0.117 | OXTR | 3:8813493 | cg08449558 | 163593 |
| 0.117 | DNAJB13 | 11:73668626 | cg20737388 | 371474 |
| 0.117 | SLC34A2 | 4:25657365 | cg19766441 | 356236 |
| 0.117 | LINC00461; MIR9-2 | 5:87968528 | cg14636534 | 272541 |
| 0.117 | PIWIL1 | 12:130822286 | cg13861644 | 256478 |
| 0.117 | DSC3 | 18:28622593 | cg15439862 | 285459 |
| 0.117 | UBD | 6:29521046 | cg18342026 | 333604 |
| 0.117 | GABRA2 | 4:46391929 | cg23160016 | 408245 |
| 0.117 | DUSP8; MOB2 | 11:1575607 | cg05280206 | 105032 |
| 0.117 | PHACTR2 | 6:143998958 | cg26846959 | 468429 |
| 0.117 | FAM47E; SCARB2 | 4:77134471 | cg19050061 | 344935 |
| 0.117 | SPG7 | 16:89600764 | cg08905080 | 171867 |
| 0.117 | BBX | 3:107244746 | cg02321062 | 47394 |
| 0.117 | ALDH1L1 | 3:125899370 | cg01566526 | 32429 |
| 0.117 | | 3:4856199 | cg08998950 | 173407 |
| 0.117 | LTBP3 | 11:65325158 | cg08965235 | 172854 |
| 0.118 | | 16:85203635 | cg00942219 | 19808 |
| 0.118 | PIPOX | 17:27369780 | cg06144905 | 120806 |
| 0.118 | LMNB2 | 19:2446487 | cg18087306 | 329215 |
| 0.118 | GUSBP4 | 6:58263193 | cg17976157 | 327360 |
| 0.118 | ISL1 | 5:50679149 | cg08734740 | 168746 |
| 0.118 | BAALC; C8orf56 | 8:104153627 | cg18168101 | 330737 |
| 0.118 | | 1:65534742 | cg20301308 | 364692 |
| 0.118 | | 9:136474735 | cg03262554 | 66122 |
| 0.118 | ZC3H8 | 2:113012627 | cg27242549 | 475215 |
| 0.118 | ZNF148 | 3:125076233 | cg12508343 | 232821 |
| 0.118 | MGC45800 | 4:183064388 | cg00053393 | 1279 |
| 0.118 | NRG2; PSD2 | 5:139223811 | cg08682153 | 167769 |
| 0.118 | HOXA5; HOXA6; | 7:27187269 | cg06237983 | 122446 |
| | HOXA7; LOC100133311 | | | |
| 0.118 | CADPS | 3:62861055 | cg15957055 | 293976 |
| 0.118 | KCNQ1DN | 11:2891082 | cg25203481 | 441543 |
| 0.118 | ZFPM2 | 8:106332119 | cg10868817 | 205750 |
| 0.118 | | 3:171543413 | cg11639615 | 218225 |
| 0.118 | PXDN | 2:1748112 | cg12164282 | 227454 |
| 0.118 | TIGD7; ZNF75A | 16:3355553 | cg05540369 | 109851 |
| 0.118 | SP8 | 7:20824770 | cg27618240 | 481572 |
| 0.118 | | 15:96905729 | cg11157253 | 210450 |
| 0.118 | ADRA1D | 20:4202378 | cg04293085 | 86242 |
| 0.118 | LOC100130298 | 8:61880392 | cg04882213 | 97419 |
| 0.118 | DYNLT1; SYTL3 | 6:159068210 | cg27278961 | 475791 |
| 0.118 | PCDHA1; PCDHA2; | 5:140201656 | cg11781306 | 220669 |
| | PCDHA3; | | | |
| | PCDHA4; | | | |
| | PCDHA5; PCDHA6 | | | |
| 0.119 | DPP6 | 7:153584416 | cg22620221 | 399362 |
| 0.119 | ZNF468 | 19:53361164 | cg08531263 | 165137 |
| 0.119 | CNTNAP5 | 2:124782831 | cg08790440 | 169635 |
| 0.119 | FBN2 | 5:127873106 | cg17564775 | 321142 |
| 0.119 | CDH8 | 16:62070184 | cg01718742 | 35267 |
| 0.119 | COX19; CYP2W1 | 7:1018969 | cg01823585 | 37440 |
| 0.119 | LPHN2 | 1:82267931 | cg02243785 | 45777 |
| 0.119 | LOC100130155; | 8:65290484 | cg07792478 | 151647 |
| | MIR124-2 | | | |
| 0.119 | LHX8 | 1:75595970 | cg22694818 | 400568 |
| 0.119 | LOC339529; ZNF238 | 1:244213616 | cg19698993 | 354930 |
| 0.119 | OLFML2A | 9:127531952 | cg14046477 | 260419 |
| 0.119 | EPHA1; LOC285965 | 7:143108841 | cg16618979 | 305561 |
| 0.119 | AZU1; LPPR3; | 19:822086 | cg21928701 | 389466 |
| | MIR3187 | | | |
| 0.119 | OSBPL3 | 7:25005464 | cg07110009 | 138907 |
| 0.119 | | 7:52155829 | cg11342198 | 213584 |
| 0.119 | PREX2 | 8:68864769 | cg06617456 | 128991 |
| 0.119 | CHRNA4 | 20:61992494 | cg01743841 | 35695 |
| 0.119 | ISLR2; LOC283731 | 15:74425552 | cg01178680 | 24810 |
| 0.119 | UNC5D | 8:35092823 | cg08000065 | 155421 |
| 0.119 | PRKAR1B | 7:751830 | cg27331241 | 476807 |
| 0.119 | MAP7 | 6:136847359 | cg18421949 | 334865 |
| 0.119 | EPHA6 | 3:96533511 | cg11410023 | 214721 |
| 0.119 | HOXA5; HOXA6; | 7:27188364 | cg19816811 | 357110 |
| | HOXA7; LOC100133311 | | | |
| 0.119 | PDGFC | 4:157892765 | cg22451233 | 396868 |
| 0.119 | HCG4B | 6:29895005 | cg01519225 | 31476 |
| 0.119 | ATP2C2 | 16:84402160 | cg08974450 | 173017 |
| 0.119 | | 4:187037318 | cg05379002 | 107021 |
| 0.119 | TRIM71 | 3:32860178 | cg12338417 | 230063 |
| 0.119 | POU6F2 | 7:39125198 | cg02367316 | 48362 |
| 0.119 | RBP1 | 3:139258295 | cg12497564 | 232636 |
| 0.119 | EFS; IL25 | 14:23834909 | cg13011388 | 240610 |
| 0.119 | MYRIP | 3:39851788 | cg07892785 | 153449 |
| 0.119 | RAB38 | 11:87908783 | cg01568784 | 32481 |
| 0.119 | TBX4 | 17:59532306 | cg14823851 | 275680 |
| 0.119 | TOX2 | 20:42544794 | cg03011535 | 61343 |
| 0.120 | DLC1 | 8:13134144 | cg03304380 | 66890 |
| 0.120 | SNED1 | 2:241938436 | cg08233654 | 159775 |
| 0.120 | KIF25 | 6:168436019 | cg12003941 | 224653 |
| 0.120 | C1orf35; MRPL55 | 1:228297864 | cg22163199 | 392875 |
| 0.120 | CTNNA2 | 2:79739278 | cg18806140 | 341143 |
| 0.120 | ALOX5 | 10:45869702 | cg27243389 | 475225 |
| 0.120 | NAALAD2 | 11:89867976 | cg21500966 | 382886 |
| 0.120 | NLRP2 | 19:55477755 | cg17760849 | 323892 |
| 0.120 | AIM1 | 6:106957995 | cg20796467 | 372352 |
| 0.120 | ZFPM2 | 8:106331995 | cg15449956 | 285663 |
| 0.120 | ISL1 | 5:50679290 | cg11711420 | 219504 |
| 0.120 | C3orf15 | 3:119422161 | cg08145590 | 158129 |
| 0.120 | | 4:82965250 | cg04643822 | 92882 |
| 0.120 | FGFR1 | 8:38323059 | cg13278539 | 244735 |
| 0.120 | SRRM4 | 12:119591747 | cg27010159 | 471336 |
| 0.120 | UGP2 | 2:64069682 | cg19915305 | 358803 |
| 0.120 | GLI4 | 8:144361073 | cg11240062 | 211921 |
| 0.120 | TOX2 | 20:42544792 | cg13459498 | 248157 |
| 0.120 | AQP4; CHST9- | 18:24445692 | cg12445775 | 231741 |
| | AS1 | | | |
| 0.120 | NKX6-1 | 4:85418265 | cg12076463 | 225925 |
| 0.121 | PCDHGA12; PCDHGC3; | 5:140871385 | cg24619378 | 431928 |
| | PCDHGC4; | | | |
| | PCDHGC5 | | | |
| 0.121 | HOXA10; HOXA10- | 7:27204894 | cg27009703 | 471328 |
| | HOXA9; HOXA7; | | | |
| | HOXA9; LOC100133311; | | | |
| | MIR196B | | | |
| 0.121 | DLG5 | 10:79622515 | cg11063088 | 208886 |
| 0.121 | KDM2B | 12:122019076 | cg15234492 | 282489 |
| 0.121 | IRF6 | 1:209979733 | cg21951975 | 389837 |
| 0.121 | ACTL6B | 7:100254149 | cg16024950 | 295200 |
| 0.121 | ONECUT2 | 18:55095177 | cg05735180 | 113314 |
| 0.121 | WDR17 | 4:176987020 | cg08095852 | 157102 |
| 0.121 | CLEC14A | 14:38725312 | cg08139247 | 158007 |
| 0.121 | HOXD4; MIR10B | 2:177014555 | cg19519747 | 352000 |
| 0.121 | UTRN | 6:144608500 | cg15785898 | 291201 |
| 0.121 | MFSD7; MYL5 | 4:682834 | cg24693053 | 433212 |
| 0.121 | GABRA5 | 15:27112430 | cg10652393 | 202197 |
| 0.121 | PLSCR2 | 3:146187706 | cg02128651 | 43681 |
| 0.121 | PENK | 8:57358590 | cg21694941 | 385984 |
| 0.121 | FBN2 | 5:127873283 | cg05209584 | 103634 |
| 0.121 | PAX1 | 20:21686293 | cg01783070 | 36501 |
| 0.121 | | 18:6414602 | cg08336641 | 161747 |
| 0.121 | NRG1 | 8:31497464 | cg24946597 | 437530 |
| 0.121 | FBXO39; XAF1 | 17:6679564 | cg02374745 | 48515 |
| 0.121 | WNT2 | 7:116963259 | cg07697895 | 149945 |
| 0.121 | | 8:142413013 | cg06830360 | 133304 |
| 0.121 | SNORA76; SNORD104; | 17:62222808 | cg20969675 | 374778 |
| | TEX2 | | | |
| 0.121 | EHBP1; LOC100132215; | 2:63275602 | cg27344587 | 477023 |
| | OTX1 | | | |
| 0.121 | IRX1 | 5:3599686 | cg01294808 | 27051 |
| 0.121 | CADM2 | 3:85008587 | cg13331200 | 245621 |
| 0.121 | FAT1 | 4:187647690 | cg12769506 | 236972 |
| 0.121 | | 10:131762052 | cg11757357 | 220344 |
| 0.122 | ADAM12 | 10:128077307 | cg05237641 | 104212 |
| 0.122 | CLVS2 | 6:123317569 | cg08194879 | 159033 |
| 0.122 | | 12:127940654 | cg16065021 | 295854 |
| 0.122 | SLC6A3 | 5:1446208 | cg14502484 | 269687 |
| 0.122 | ASPG; MIR203; | 14:104583071 | cg03401997 | 68837 |
| | MIR3545 | | | |
| 0.122 | CCDC146 | 7:76747831 | cg02901065 | 58990 |
| 0.122 | ZFP42 | 4:188916581 | cg15718581 | 290161 |
| 0.122 | | 2:225306901 | cg10193763 | 194181 |
| 0.122 | HOXD10; HOXD11; | 2:176972581 | cg24633978 | 432153 |
| | HOXD12 | | | |
| 0.122 | ENTPD6 | 20:25177340 | cg00926318 | 19472 |
| 0.122 | TSHZ1; ZADH2 | 18:72917387 | cg22088248 | 391726 |
| 0.122 | POLG | 15:89879190 | cg24365117 | 427793 |
| 0.122 | | 7:43291318 | cg02964324 | 60381 |
| 0.122 | NETO1 | 18:70534298 | cg23883696 | 419843 |
| 0.122 | POU4F1 | 13:79170283 | cg24221648 | 425692 |
| 0.122 | GNAS; GNAS- | 20:57427650 | cg02890368 | 58752 |
| | AS1 | | | |
| 0.122 | PDE2A | 11:72301724 | cg26268145 | 458304 |
| 0.122 | ARL9; SRP72 | 4:57372356 | cg14775423 | 274866 |
| 0.122 | HLCS | 21:38353114 | cg22777062 | 401811 |
| 0.122 | TP73; WRAP73 | 1:3568210 | cg20677901 | 370380 |
| 0.122 | | 2:190192866 | cg25550823 | 446916 |
| 0.122 | SNX31 | 8:101661788 | cg10715223 | 203178 |
| 0.122 | ARHGEF10; MIR596 | 8:1771973 | cg10964367 | 207265 |
| 0.122 | B3GNT4; DIABLO; | 12:122688787 | cg23445859 | 413050 |
| | LRRC43 | | | |
| 0.122 | TRPC4 | 13:38444227 | cg16409955 | 301745 |
| 0.122 | KCNA1 | 12:5020693 | cg08832227 | 170388 |
| 0.122 | EXT2 | 11:44118094 | cg24662154 | 432585 |
| 0.123 | ADAMTSL3 | 15:84363061 | cg14598478 | 271807 |
| 0.123 | STK32B | 4:5053504 | cg08323075 | 161506 |
| 0.123 | DKFZp434J0226 | 19:46713446 | cg21100328 | 376752 |
| 0.123 | RNF180 | 5:63461803 | cg09839635 | 187877 |
| 0.123 | CYB561D2; NPRL2; | 3:50383175 | cg00460268 | 9723 |
| | RASSF1; | | | |
| | TMEM115; ZMYND10 | | | |
| 0.123 | RNF207; RPL22 | 1:6269448 | cg25286333 | 442745 |
| 0.123 | | 17:2627661 | cg12187586 | 227838 |
| 0.123 | P2RY12 | 3:151058783 | cg13229867 | 243994 |
| 0.123 | DUSP4 | 8:29210592 | cg05128656 | 102084 |
| 0.123 | HTR4 | 5:148034045 | cg04091563 | 82145 |
| 0.123 | TMEM164 | X:109246494 | cg04926827 | 98346 |
| 0.123 | C1QL1 | 17:43044660 | cg24042242 | 422692 |
| 0.123 | PCDHGA1; PCDHGA2 | 5:140711852 | cg05580809 | 110540 |
| 0.123 | VSTM5 | 11:93583693 | cg14291919 | 265581 |
| 0.123 | ZFP2; ZNF454 | 5:178367827 | cg24843380 | 435721 |
| 0.123 | KLHDC10 | 7:129781152 | cg07026433 | 137279 |
| 0.123 | SLIT2 | 4:20257590 | cg19940312 | 359283 |
| 0.123 | IRF6 | 1:209979665 | cg22029157 | 390830 |
| 0.123 | | 11:71350975 | cg13009111 | 240573 |
| 0.123 | PITX1 | 5:134367394 | cg23064601 | 406786 |
| 0.123 | PLSCR2 | 3:146187740 | cg21569635 | 384039 |
| 0.124 | SKAP2 | 7:26897685 | cg03730533 | 75381 |
| 0.124 | CABYR; TTC39C | 18:21719433 | cg26349976 | 459840 |
| 0.124 | TSHZ1; ZADH2 | 18:72916776 | cg02750262 | 56023 |
| 0.124 | ZNF835 | 19:57183118 | cg08146323 | 158144 |
| 0.124 | TBX15 | 1:119535928 | cg24035245 | 422569 |
| 0.124 | OSGIN1 | 16:83986941 | cg07978099 | 155051 |
| 0.124 | PRKD1 | 14:30396444 | cg10501704 | 199443 |
| 0.124 | SCRT2 | 20:644758 | cg12590600 | 234112 |
| 0.124 | TRPM4 | 19:49713828 | cg10951975 | 207052 |
| 0.124 | | 5:53564 | cg22807585 | 402379 |
| 0.124 | DUOX2; DUOXA1; | 15:45405103 | cg04222582 | 84830 |
| | DUOXA2 | | | |
| 0.124 | | 14:99584667 | cg23683254 | 416925 |
| 0.124 | FEZF1; LOC154860 | 7:121940216 | cg27393010 | 477821 |
| 0.124 | NELF; PNPLA7 | 9:140348828 | cg14384158 | 267359 |
| 0.124 | PTPN13 | 4:87515467 | cg15543566 | 287079 |
| 0.124 | KCTD14; NDUFC2- | 11:77734206 | cg16769152 | 308350 |
| | KCTD14 | | | |
| 0.124 | GBX2 | 2:237076811 | cg21426003 | 381745 |
| 0.124 | PON2; PON3 | 7:95025829 | cg08520743 | 164919 |
| 0.124 | CPEB1 | 15:83316223 | cg27578811 | 480950 |
| 0.124 | NTM | 11:131780492 | cg15617814 | 288391 |
| 0.124 | ATP9A | 20:50385371 | cg01900832 | 38931 |
| 0.124 | | 13:36705475 | cg25724283 | 449620 |
| 0.124 | | 10:21462441 | cg17426273 | 318854 |
| 0.124 | ALX1 | 12:85674296 | cg07780095 | 151415 |
| 0.124 | | 6:106441441 | cg03942932 | 79300 |
| 0.125 | HECW1 | 7:43152254 | cg08039116 | 156084 |
| 0.125 | | 8:61823027 | cg20904475 | 373766 |
| 0.125 | PRDM8 | 4:81118188 | cg03463411 | 70030 |
| 0.125 | INSR | 19:7294093 | cg26532951 | 462966 |
| 0.125 | HOXD4; MIR10B | 2:177014959 | cg17104824 | 313519 |
| 0.125 | PON2; PON3 | 7:95025740 | cg23230584 | 409500 |
| 0.125 | TFAP4 | 16:4324280 | cg00021532 | 522 |
| 0.125 | CRNDE; IRX5 | 16:54965087 | cg05870072 | 115671 |
| 0.125 | | 14:103673450 | cg26579556 | 463863 |
| 0.125 | NXPH2 | 2:139537824 | cg18150439 | 330428 |
| 0.125 | | 13:42002627 | cg25532201 | 446653 |
| 0.125 | KLHL4 | X:86772364 | cg15554694 | 287280 |
| 0.125 | MALL; NPHP1 | 2:110873396 | cg01615704 | 33421 |
| 0.125 | HAAO | 2:43020264 | cg17246140 | 315873 |
| 0.125 | DPP6 | 7:153584609 | cg27032232 | 471703 |
| 0.125 | LHFPL4 | 3:9594385 | cg04061117 | 81564 |
| 0.125 | EGFL7 | 9:139551542 | cg13900767 | 257221 |
| 0.125 | COX16; SYNJ2BP; | 14:70827109 | cg13099429 | 241974 |
| | SYNJ2BP- | | | |
| | COX16 | | | |
| 0.125 | LHX6 | 9:124990456 | cg13817952 | 255647 |
| 0.125 | KCNK16; KCNK17 | 6:39281885 | cg08315770 | 161367 |
| 0.125 | CCT8L2; TPTEP1 | 22:17082770 | cg14505585 | 269757 |
| 0.125 | FAM135B | 8:139509672 | cg23294090 | 410690 |
| 0.125 | GDA | 9:74764428 | cg21170041 | 377969 |
| 0.126 | IL1RAPL1 | X:28604661 | cg06927864 | 135328 |
| 0.126 | CIDEA | 18:12254551 | cg07204280 | 140912 |
| 0.126 | NPAS3 | 14:33403862 | cg08117309 | 157524 |
| 0.126 | ENPP2 | 8:120650994 | cg02534163 | 51618 |
| 0.126 | | 7:156400711 | cg16561657 | 304460 |
| 0.126 | STXBP5L | 3:120627406 | cg05293820 | 105268 |
| 0.126 | CNTN1 | 12:41086680 | cg14625113 | 272330 |
| 0.126 | IRF6 | 1:209979283 | cg25192855 | 441351 |
| 0.126 | CAST | 5:96038614 | cg24742349 | 434137 |
| 0.126 | FBN2 | 5:127874463 | cg11965976 | 224052 |
| 0.126 | ATXN2 | 12:112035212 | cg08273772 | 160571 |
| 0.126 | PDE4D | 5:59189120 | cg03323696 | 67297 |
| 0.126 | TOX2 | 20:42544663 | cg06779449 | 132219 |
| 0.126 | BCOR | X:40005177 | cg12737514 | 236481 |
| 0.126 | KIAA1530 | 4:1366597 | cg23921777 | 420508 |
| 0.126 | CXCL2 | 4:74965262 | cg23244559 | 409786 |
| 0.126 | MIR1469; NR2F2 | 15:96884187 | cg07016184 | 137060 |
| 0.126 | EGLN2; RAB4B- | 19:41319790 | cg01282508 | 26784 |
| | EGLN2 | | | |
| 0.126 | TMEM132C | 12:128751460 | cg03530754 | 71358 |
| 0.126 | PDZRN4 | 12:41582349 | cg21926708 | 389441 |
| 0.126 | EFCAB1 | 8:49647734 | cg08258526 | 160240 |
| 0.126 | PIN4 | X:71401384 | cg23905908 | 420234 |
| 0.126 | RP11- | 1:111813690 | cg07197785 | 140790 |
| | 165H20.1 | | | |
| 0.126 | LOC645249 | 7:156814491 | cg00024086 | 585 |
| 0.126 | ATHL1; IFITM5; | 11:288305 | cg08829299 | 170335 |
| | NLRP6 | | | |
| 0.126 | GALR1 | 18:74961966 | cg03659519 | 73996 |
| 0.126 | | 1:2738746 | cg10105681 | 192507 |
| 0.126 | RGAG4 | X:71351980 | cg20347665 | 365414 |
| 0.126 | RNF180 | 5:63461574 | cg14591786 | 271667 |
| 0.127 | EOMES | 3:27772805 | cg11642106 | 218279 |
| 0.127 | HOXB9; MIR196A1 | 17:46711017 | cg23690166 | 417069 |
| 0.127 | ARMC5; TGFB1I1 | 16:31484032 | cg10995380 | 207836 |
| 0.127 | PON2; PON3 | 7:95025855 | cg04685170 | 93636 |
| 0.127 | PRSS3 | 9:33749216 | cg22410499 | 396383 |
| 0.127 | CPNE4 | 3:131246097 | cg08151596 | 158229 |
| 0.127 | GABRG3 | 15:27216529 | cg11651237 | 218458 |
| 0.127 | B4GALNT2 | 17:47209827 | cg20233029 | 363633 |
| 0.127 | MSX1 | 4:4864488 | cg21538208 | 383498 |
| 0.127 | ARHGEF4 | 2:131673771 | cg09015973 | 173696 |
| 0.127 | PCDHA1; PCDHA10; | 5:140261663 | cg02051771 | 42046 |
| | PCDHA11; | | | |
| | PCDHA12; | | | |
| | PCDHA13; PCDHA2; | | | |
| | PCDHA3; | | | |
| | PCDHA4; | | | |
| | PCDHA5; PCDHA6; | | | |
| | PCDHA7; | | | |
| | PCDHA8; | | | |
| | PCDHA9 | | | |
| 0.127 | ASPG; MIR203; | 14:104583048 | cg13673833 | 252679 |
| | MIR3545 | | | |
| 0.127 | MAGI2-AS3 | 7:79083507 | cg02523844 | 51402 |
| 0.127 | IRX2 | 5:2739602 | cg21573200 | 384101 |
| 0.127 | NUP210 | 3:13431720 | cg17336044 | 317388 |
| 0.128 | | 2:132088801 | cg14001664 | 259383 |
| 0.128 | CCDC130; MRI1 | 19:13875137 | cg14272688 | 265161 |
| 0.128 | | 2:71115370 | cg10954469 | 207096 |
| 0.128 | ZNF347; ZNF415 | 19:53635967 | cg18301583 | 332927 |
| 0.128 | SNED1 | 2:241938321 | cg21384492 | 381197 |
| 0.128 | VSTM2A | 7:54614477 | cg06584494 | 128412 |
| 0.128 | MEIS2 | 15:37388540 | cg00691830 | 14602 |
| 0.128 | NLRP14; ZNF214 | 11:7041930 | cg17228942 | 315646 |
| 0.128 | KCNV1 | 8:110988043 | cg23291534 | 410667 |
| 0.128 | MAGI2-AS3 | 7:79081666 | cg06809544 | 132847 |
| 0.128 | FBXO39; XAF1 | 17:6679348 | cg00376544 | 7966 |
| 0.128 | PTF1A | 10:23481176 | cg22746058 | 401390 |
| 0.128 | TAL1 | 1:47691160 | cg10810752 | 204761 |
| 0.128 | FBRSL1 | 12:133137479 | cg03621470 | 73255 |
| 0.128 | CCDC36; LOC646498 | 3:49236946 | cg03540175 | 71588 |
| 0.128 | CXXC4 | 4:105412800 | cg22604213 | 399113 |
| 0.128 | MSX1 | 4:4864902 | cg11078084 | 209175 |
| 0.128 | FLJ45983; GATA3 | 10:8097641 | cg17124583 | 313810 |
| 0.128 | ADRA1B | 5:159343549 | cg07011172 | 136949 |
| 0.128 | UBD | 6:29521272 | cg22762215 | 401614 |
| 0.128 | TGFBI | 5:135364568 | cg15146621 | 281189 |
| 0.128 | CHST8 | 19:34112825 | cg26565021 | 463587 |
| 0.128 | JPH1 | 8:75234269 | cg23599843 | 415405 |
| 0.128 | ACSS1 | 20:25039707 | cg03321508 | 67252 |
| 0.128 | BASP1; LOC285696 | 5:17218778 | cg14306451 | 265851 |
| 0.128 | | 11:79148502 | cg05454619 | 108297 |
| 0.128 | NLRP14; ZNF214 | 11:7041752 | cg11838299 | 221836 |
| 0.128 | | 2:9235898 | cg20610452 | 369302 |
| 0.129 | PCDHA1; PCDHA10; | 5:140346236 | cg12832313 | 237924 |
| | PCDHA11; | | | |
| | PCDHA12; | | | |
| | PCDHA13; PCDHA2; | | | |
| | PCDHA3; | | | |
| | PCDHA4; | | | |
| | PCDHA5; PCDHA6; | | | |
| | PCDHA7; | | | |
| | PCDHA8; | | | |
| | PCDHA9; PCDHAC1; | | | |
| | PCDHAC2 | | | |
| 0.129 | C8orf42 | 8:495736 | cg05142982 | 102391 |
| 0.129 | | 11:70962935 | cg11263364 | 212293 |
| 0.129 | CDH12 | 5:21751337 | cg23404351 | 412413 |
| 0.129 | LOC100507055; | 12:133195094 | cg00058329 | 1387 |
| | P2RX2; POLE | | | |
| 0.129 | CCDC164; EPT1 | 2:26624934 | cg14273450 | 265175 |
| 0.129 | ISM1 | 20:13200929 | cg22588144 | 398900 |
| 0.129 | EGR2 | 10:64578919 | cg22903908 | 404041 |
| 0.129 | GSDMD; ZC3H3 | 8:144626190 | cg09422696 | 180737 |
| 0.129 | KCNK9 | 8:140715802 | cg21415530 | 381621 |
| 0.129 | | 3:94243571 | cg16274205 | 299307 |
| 0.129 | UNC80 | 2:210636539 | cg24938830 | 437420 |
| 0.129 | CABLES2; RPS21 | 20:60958108 | cg14168305 | 262866 |
| 0.129 | | 11:124324477 | cg03252499 | 65933 |
| 0.129 | FAT1 | 4:187645144 | cg24410535 | 428521 |
| 0.129 | PPP1R14A; SPINT2 | 19:38747378 | cg02571816 | 52340 |
| 0.130 | ASIP | 20:32856898 | cg05267394 | 104806 |
| 0.130 | CCDC144A | 17:16593885 | cg02879122 | 58511 |
| 0.130 | CRISPLD1 | 8:75896720 | cg15953602 | 293925 |
| 0.130 | KAL1 | X:8700172 | cg18396832 | 334461 |
| 0.130 | CELF1 | 11:47528955 | cg13308137 | 245225 |
| 0.130 | HOXC4; HOXC5; | 12:54404315 | cg13545297 | 249972 |
| | HOXC6; HOXC8; | | | |
| | HOXC9 | | | |
| 0.130 | DOCK1; FAM196A | 10:128994608 | cg25984344 | 453521 |
| 0.130 | LOC100507266 | 4:4577273 | cg07914772 | 153870 |
| 0.130 | KCNS2 | 8:99440279 | cg14486338 | 269395 |
| 0.130 | | 5:3093070 | cg20428720 | 366575 |
| 0.130 | HOXA10; HOXA10- | 7:27204981 | cg26521404 | 462738 |
| | HOXA9; HOXA7; | | | |
| | HOXA9; LOC100133311; | | | |
| | MIR196B | | | |
| 0.130 | RNF180 | 5:63461582 | cg06776999 | 132168 |
| 0.130 | MTRNR2L4; OR2C1 | 16:3415077 | cg09999114 | 190605 |
| 0.130 | PENK | 8:57358312 | cg12877723 | 238608 |
| 0.130 | NETO1 | 18:70534767 | cg18448581 | 335334 |
| 0.130 | TTC40 | 10:134650467 | cg25403174 | 444670 |
| 0.130 | ASXL3 | 18:31158234 | cg24880056 | 436440 |
| 0.130 | DEAF1; DRD4; | 11:637038 | cg15861585 | 292487 |
| | SCT | | | |
| 0.130 | GLT1D1 | 12:129337910 | cg06419750 | 125449 |
| 0.130 | LOC643714; TOX3 | 16:52580987 | cg26817217 | 467846 |
| 0.131 | UNCX | 7:1265851 | cg15591276 | 287897 |
| 0.131 | RARRES1 | 3:158450251 | cg14226182 | 264214 |
| 0.131 | PRDM8 | 4:81118500 | cg19409579 | 350194 |
| 0.131 | DQX1; PCGF1; | 2:74742786 | cg19656282 | 354267 |
| | TLX2 | | | |
| 0.131 | STL | 6:125283245 | cg24822696 | 435377 |
| 0.131 | CPNE4 | 3:131756545 | cg12981577 | 240178 |
| 0.131 | UBD | 6:29521407 | cg03402459 | 68848 |
| 0.131 | HLCS | 21:38362725 | cg14785464 | 275096 |
| 0.131 | SHROOM2 | X:9753940 | cg26318441 | 459244 |
| 0.131 | FTSJ2; NUDT1; | 7:2289054 | cg17467898 | 319545 |
| | SNX8 | | | |
| 0.131 | PCDHB10; PCDHB16; | 5:140562738 | cg21081817 | 376495 |
| | PCDHB7; | | | |
| | PCDHB8; | | | |
| | PCDHB9 | | | |
| 0.131 | NOS1 | 12:117798954 | cg04883903 | 97454 |
| 0.131 | CHL1 | 3:238615 | cg07746943 | 150879 |
| 0.131 | SGPP2 | 2:223289277 | cg00043095 | 1074 |
| 0.131 | TUSC1 | 9:25678015 | cg13985784 | 259065 |
| 0.131 | NKX2-8 | 14:37051417 | cg10530851 | 200070 |
| 0.132 | FRYL; SLC10A4; | 4:48492225 | cg22773661 | 401769 |
| | ZAR1 | | | |
| 0.132 | LOC402160; RNF4 | 4:2464050 | cg21722242 | 386297 |
| 0.132 | CHL1 | 3:239207 | cg21145524 | 377484 |
| 0.132 | | 18:73167671 | cg12975230 | 240067 |
| 0.132 | SALL1 | 16:51188697 | cg00683332 | 14419 |
| 0.132 | FAM19A5 | 22:48972349 | cg06273376 | 122999 |
| 0.132 | GRM6 | 5:178422128 | cg00582971 | 12427 |
| 0.132 | RTBDN | 19:12936512 | cg07583894 | 147890 |
| 0.132 | HOXA10- | 7:27192656 | cg23263937 | 410186 |
| | HOXA9; HOXA5; | | | |
| | HOXA6; HOXA7; | | | |
| | HOXA9; | | | |
| | LOC100133311 | | | |
| 0.132 | TMEM45B | 11:129685751 | cg27274706 | 475714 |
| 0.132 | NRK | X:105066526 | cg07674139 | 149532 |
| 0.132 | NRG1 | 8:31497829 | cg26267340 | 458285 |
| 0.132 | NAALAD2 | 11:89867653 | cg01577414 | 32669 |
| 0.132 | SMTNL2 | 17:4488345 | cg07888347 | 153363 |
| 0.132 | CHRNB1; FGF11; | 17:7341641 | cg25563256 | 447126 |
| | TMEM102 | | | |
| 0.132 | NEFM | 8:24771326 | cg07552803 | 147256 |
| 0.132 | HMGCLL1 | 6:55443757 | cg11907729 | 223067 |
| 0.132 | WNT2B | 1:113051846 | cg27181253 | 474270 |
| 0.132 | RADIL | 7:4869981 | cg00469380 | 9930 |
| 0.132 | NRXN1 | 2:50574196 | cg14875171 | 276641 |
| 0.133 | CTNNA2 | 2:79740208 | cg04670857 | 93356 |
| 0.133 | DOCK1; FAM196A | 10:128994605 | cg12204732 | 228111 |
| 0.133 | | 12:132146956 | cg24533007 | 430572 |
| 0.133 | CBLN2 | 18:70209432 | cg13478228 | 248599 |
| 0.133 | PIEZO2 | 18:11149470 | cg03686593 | 74481 |
| 0.133 | NELL1 | 11:20690957 | cg17371081 | 317950 |
| 0.133 | SLC34A2 | 4:25657381 | cg03738352 | 75550 |
| 0.133 | | 3:74663796 | cg00735667 | 15563 |
| 0.133 | | 5:132947501 | cg23236554 | 409620 |
| 0.133 | LRRC4C | 11:40315392 | cg17949440 | 326949 |
| 0.133 | CHST9 | 18:24765485 | cg16933181 | 310893 |
| 0.133 | | 6:168147405 | cg07147204 | 139710 |
| 0.134 | CNTNAP2 | 7:145813417 | cg11592503 | 217489 |
| 0.134 | ENTPD2; NPDC1 | 9:139943146 | cg14024893 | 259944 |
| 0.134 | MAGI2-AS3 | 7:79083445 | cg04652097 | 93018 |
| 0.134 | TACR3 | 4:104640662 | cg18538958 | 336883 |
| 0.134 | NXNL2 | 9:91150537 | cg14347199 | 266666 |
| 0.134 | COX6B2; FAM71E2; | 19:55866087 | cg20106459 | 361820 |
| | IL11; SUV420H2 | | | |
| 0.134 | DPRXP4; RNF135 | 17:29297391 | cg01347228 | 28034 |
| 0.134 | GPR6 | 6:110300573 | cg26252167 | 458027 |
| 0.134 | MAN1C1 | 1:25944514 | cg10706230 | 203035 |
| 0.135 | TJP1 | 15:30114474 | cg19965221 | 359674 |
| 0.135 | SSPO | 7:149484798 | cg16516272 | 303562 |
| 0.135 | C3orf25; MBD4 | 3:129147541 | cg14779951 | 274962 |
| 0.135 | | 13:50701501 | cg23104954 | 407495 |
| 0.135 | LRP3 | 19:33685817 | cg10276227 | 195631 |
| 0.135 | HOXD10; HOXD8; | 2:176994448 | cg14473102 | 269120 |
| | HOXD9; | | | |
| | LOC100506783 | | | |
| 0.135 | SNAP91 | 6:84418433 | cg24190603 | 425243 |
| 0.135 | ISL1 | 5:50679147 | cg16318053 | 300061 |
| 0.135 | PCDHA1; PCDHA10; | 5:140261653 | cg19876814 | 358160 |
| | PCDHA11; | | | |
| | PCDHA12; | | | |
| | PCDHA13; PCDHA2; | | | |
| | PCDHA3; | | | |
| | PCDHA4; | | | |
| | PCDHA5; PCDHA6; | | | |
| | PCDHA7; | | | |
| | PCDHA8; | | | |
| | PCDHA9 | | | |
| 0.135 | SSTR1 | 14:38678420 | cg18443253 | 335246 |
| 0.136 | KCNQ4 | 1:41248881 | cg16294363 | 299640 |
| 0.136 | DUSP27 | 1:167090646 | cg17104258 | 313508 |
| 0.136 | | 4:170696239 | cg18912209 | 342859 |
| 0.136 | CXCL5 | 4:74864165 | cg27109129 | 473022 |
| 0.136 | LHX8 | 1:75602412 | cg08146483 | 158147 |
| 0.136 | CCR6 | 6:167559913 | cg16338365 | 300452 |
| 0.136 | KIF17; SH2D5 | 1:21044101 | cg09793172 | 187028 |
| 0.136 | ANKRD26P3; | 13:19918586 | cg06722407 | 131065 |
| | LINC00421 | | | |
| 0.136 | ZFP42 | 4:188916875 | cg10242602 | 195098 |
| 0.136 | UBD | 6:29521430 | cg15818307 | 291669 |
| 0.136 | HOXD1; LOC401022 | 2:177053292 | cg05099387 | 101608 |
| 0.136 | ISM1 | 20:13200944 | cg14060111 | 260677 |
| 0.136 | NMBR | 6:142409507 | cg20747266 | 371647 |
| 0.137 | | 7:1287065 | cg12560987 | 233619 |
| 0.137 | STL | 6:125283953 | cg10621825 | 201643 |
| 0.137 | FAM181B | 11:82444798 | cg09617579 | 184158 |
| 0.137 | DACH2 | X:85402643 | cg16259355 | 299014 |
| 0.137 | | 13:21872234 | cg11317459 | 213174 |
| 0.137 | IRX4 | 5:1882885 | cg14507560 | 269807 |
| 0.137 | FGD3 | 9:95737070 | cg14263098 | 264963 |
| 0.137 | | 7:157477846 | cg04207084 | 84494 |
| 0.137 | AATF; LHX1 | 17:35300010 | cg19760241 | 356113 |
| 0.137 | HES6; LOC151174; | 2:239149859 | cg24127874 | 424152 |
| | LOC643387; | | | |
| | PER2 | | | |
| 0.137 | HOXD4; MIR10B | 2:177014962 | cg00014998 | 368 |
| 0.137 | C5orf63 | 5:126409308 | cg21113900 | 376968 |
| 0.137 | SLC16A11; SLC16A13 | 17:6946059 | cg19639560 | 354003 |
| 0.137 | ZBTB44 | 11:130185651 | cg14482569 | 269324 |
| 0.137 | ARHGEF4 | 2:131674140 | cg07815799 | 152125 |
| 0.137 | DAXX; TAPBP; | 6:33280424 | cg26083458 | 455084 |
| | ZBTB22 | | | |
| 0.137 | DPP10; LOC389023 | 2:115919829 | cg01718116 | 35249 |
| 0.137 | OR2H1 | 6:29427519 | cg05111645 | 101800 |
| 0.137 | HAS1; LINC00085 | 19:52206667 | cg17519645 | 320492 |
| 0.137 | TGFBI | 5:135364580 | cg09873933 | 188549 |
| 0.138 | NAALAD2 | 11:89867637 | cg16886581 | 310118 |
| 0.138 | | 14:95331190 | cg03459776 | 69950 |
| 0.138 | FOXF2 | 6:1390622 | cg12221475 | 228386 |
| 0.138 | THRB | 3:24537050 | cg27526665 | 479998 |
| 0.138 | | 7:156400779 | cg18584424 | 337608 |
| 0.138 | MIR3663 | 10:118922493 | cg24234899 | 425848 |
| 0.138 | PITX1 | 5:134364387 | cg00396667 | 8373 |
| 0.138 | DRD5 | 4:9783198 | cg03045635 | 62021 |
| 0.138 | SIK3 | 11:116857794 | cg09458566 | 181396 |
| 0.138 | | 13:109147921 | cg03994318 | 80330 |
| 0.138 | IGF2BP1 | 17:47075880 | cg02745847 | 55935 |
| 0.138 | SKINTL | 1:48559803 | cg08871545 | 171173 |
| 0.138 | LMX1A | 1:165204796 | cg09118258 | 175320 |
| 0.138 | GATA6 | 18:19756877 | cg12615165 | 234584 |
| 0.138 | CYB561D2; NPRL2; | 3:50383079 | cg20881888 | 373460 |
| | RASSF1; | | | |
| | TMEM115; ZMYND10 | | | |
| 0.138 | NXNL1; TMEM221 | 19:17559217 | cg18380550 | 334165 |
| 0.138 | C12orf53 | 12:6818384 | cg23877043 | 419727 |
| 0.138 | TAL1 | 1:47691158 | cg10380348 | 197448 |
| 0.139 | ALPK3 | 15:85360664 | cg20318166 | 364967 |
| 0.139 | VSTM2A | 7:54614620 | cg06139908 | 120728 |
| 0.139 | | 15:26108391 | cg03419058 | 69144 |
| 0.139 | OPCML | 11:132813563 | cg18710784 | 339517 |
| 0.139 | HOXA5; HOXA6; | 7:27187560 | cg14044640 | 260386 |
| | HOXA7; LOC100133311 | | | |
| 0.139 | | 6:27525678 | cg20494374 | 367603 |
| 0.139 | KDM1A; MIR3115 | 1:23361764 | cg25002551 | 438359 |
| 0.139 | RLF | 1:40626599 | cg18646240 | 338570 |
| 0.139 | NRSN2 | 20:328035 | cg21192095 | 378373 |
| 0.139 | MSX1 | 4:4864430 | cg24840099 | 435675 |
| 0.139 | FLJ16779; NKAIN4 | 20:61886079 | cg08111446 | 157414 |
| 0.139 | DUSP4 | 8:29210154 | cg13635007 | 251899 |
| 0.139 | MAGI2-AS3 | 7:79083509 | cg24021956 | 422308 |
| 0.139 | H2AFY | 5:134735637 | cg15613420 | 288307 |
| 0.139 | PLD3 | 19:40871823 | cg08360726 | 162147 |
| 0.140 | KIRREL3; ST3GAL4 | 11:126286828 | cg12804791 | 237513 |
| 0.140 | ASIP | 20:32856846 | cg16440058 | 302309 |
| 0.140 | NKAIN3 | 8:63161609 | cg15858239 | 292441 |
| 0.140 | SMAD3 | 15:67396487 | cg19193595 | 346888 |
| 0.140 | ALPK3 | 15:85360655 | cg25895948 | 452116 |
| 0.140 | C8orf83 | 8:93977794 | cg16560711 | 304445 |
| 0.140 | MSX1 | 4:4864532 | cg09748975 | 186296 |
| 0.140 | ACTN3; CTSF | 11:66326798 | cg05475524 | 108647 |
| 0.141 | DPP6 | 7:153584873 | cg14564076 | 271091 |
| 0.141 | CTNNA2 | 2:79740185 | cg19707040 | 355066 |
| 0.141 | SOX1 | 13:112721325 | cg24604013 | 431705 |
| 0.141 | DOCK1; FAM196A | 10:128994297 | cg06525651 | 127283 |
| 0.141 | SLC6A18; SLC6A19 | 5:1222847 | cg04248937 | 85368 |
| 0.141 | C14orf23; FOXG1 | 14:29236898 | cg07489048 | 146092 |
| 0.141 | NANS | 9:100819928 | cg13527921 | 249630 |
| 0.141 | | 11:44545144 | cg13759632 | 254444 |
| 0.141 | LRP12 | 8:105601036 | cg24098951 | 423650 |
| 0.141 | COL23A1 | 5:178004091 | cg08475953 | 164148 |
| 0.141 | ASGR1 | 17:7077709 | cg03975755 | 79935 |
| 0.141 | | 11:133837265 | cg23152235 | 408116 |
| 0.141 | SIM2 | 21:38070671 | cg26938272 | 470089 |
| 0.141 | SCN2B; SCN4B | 11:118023765 | cg18718634 | 339649 |
| 0.141 | FZD5 | 2:208631684 | cg15714846 | 290094 |
| 0.141 | DOCK1 | 10:128593946 | cg23665778 | 416569 |
| 0.141 | INPP5A; NKX6-2 | 10:134600701 | cg17996619 | 327663 |
| 0.141 | ONECUT2 | 18:55095249 | cg15222899 | 282298 |
| 0.141 | ZDHHC4 | 7:6616423 | cg19149522 | 346313 |
| 0.141 | OR10AD1 | 12:48592721 | cg23748340 | 417996 |
| 0.142 | NLRP2 | 19:55477759 | cg19689876 | 354758 |
| 0.142 | NXPH2 | 2:139537845 | cg00804628 | 16987 |
| 0.142 | FAIM3; IL24 | 1:207082828 | cg06528575 | 127352 |
| 0.142 | ZC3H3 | 8:144599125 | cg13071618 | 241523 |
| 0.142 | FAM84A | 2:14775046 | cg05602862 | 110952 |
| 0.142 | FAM84A | 2:14773973 | cg16846645 | 309527 |
| 0.142 | HMX3 | 10:124897048 | cg15396686 | 284826 |
| 0.142 | RNF207; RPL22 | 1:6269260 | cg15731815 | 290408 |
| 0.142 | LOC100188947 | 10:93058549 | cg04285822 | 86104 |
| 0.142 | HOOK1 | 1:60280812 | cg15900248 | 293091 |
| 0.142 | DRD5 | 4:9783196 | cg23847712 | 419333 |
| 0.142 | CNTN4 | 3:2140256 | cg04222358 | 84827 |
| 0.142 | | 3:159818742 | cg07617768 | 148563 |
| 0.142 | GLRB | 4:157997367 | cg16269431 | 299215 |
| 0.143 | | 2:68917482 | cg18670846 | 338907 |
| 0.143 | | 8:41624841 | cg07162571 | 140077 |
| 0.143 | MTUS2 | 13:30055092 | cg05122437 | 101967 |
| 0.143 | FAM110B | 8:59058254 | cg13247663 | 244256 |
| 0.143 | | 2:92027943 | cg27311294 | 476418 |
| 0.143 | TNR | 1:175568559 | cg24932457 | 437299 |
| 0.143 | TNIP3 | 4:122078348 | cg26832294 | 468154 |
| 0.143 | C5orf63 | 5:126409007 | cg10200291 | 194305 |
| 0.143 | BCOR | X:40012100 | cg06548617 | 127783 |
| 0.143 | | 11:32008961 | cg20019985 | 360529 |
| 0.143 | OCRL | X:128674224 | cg05032353 | 100321 |
| 0.143 | CHST8 | 19:34113010 | cg16190732 | 297843 |
| 0.143 | UBD | 6:29520774 | cg08065408 | 156530 |
| 0.143 | PCDHGA1; PCDHGA10; | 5:140787430 | cg07613945 | 148493 |
| | PCDHGA2; | | | |
| | PCDHGA3; | | | |
| | PCDHGA4; | | | |
| | PCDHGA5; | | | |
| | PCDHGA6; | | | |
| | PCDHGA7; PCDHGA8; | | | |
| | PCDHGA9; | | | |
| | PCDHGB1; | | | |
| | PCDHGB2; | | | |
| | PCDHGB3; | | | |
| | PCDHGB4; | | | |
| | PCDHGB5; PCDHGB6; | | | |
| | PCDHGB7 | | | |
| 0.143 | SYT15 | 10:46970625 | cg09373037 | 179902 |
| 0.143 | FOXI2 | 10:129535669 | cg07918545 | 153959 |
| 0.144 | LOC649133; POU2F3 | 11:120110882 | cg26357587 | 459979 |
| 0.144 | CSMD1 | 8:4849827 | cg23495279 | 413823 |
| 0.144 | OSTalpha; ZDHHC19 | 3:195934355 | cg26292150 | 458748 |
| 0.144 | PITX1 | 5:134363877 | cg04223420 | 84848 |
| 0.144 | PDZRN4 | 12:41582362 | cg16896079 | 310254 |
| 0.144 | SH2D4B | 10:82295864 | cg15642854 | 288829 |
| 0.144 | UNC80 | 2:210636560 | cg04100532 | 82347 |
| 0.144 | CYB561D2; NPRL2; | 3:50383118 | cg11270070 | 212403 |
| | RASSF1; | | | |
| | TMEM115; ZMYND10 | | | |
| 0.144 | DPP6 | 7:153749756 | cg15549927 | 287181 |
| 0.144 | HCN1 | 5:45695643 | cg18273840 | 332528 |
| 0.144 | LHX8 | 1:75602167 | cg08272731 | 160551 |
| 0.145 | UBD | 6:29521420 | cg22305167 | 394855 |
| 0.145 | ADAMTS20 | 12:43945892 | cg19619405 | 353636 |
| 0.145 | HAGH | 16:1863053 | cg00935504 | 19660 |
| 0.145 | ISM1 | 20:13200931 | cg04432319 | 88934 |
| 0.145 | ANKS1B | 12:99288805 | cg03609960 | 73052 |
| 0.145 | LHX3 | 9:139085579 | cg04455058 | 89330 |
| 0.145 | | 6:10382103 | cg20906291 | 373785 |
| 0.145 | FAM110B | 8:59058273 | cg12615766 | 234593 |
| 0.145 | CYP1A1 | 15:75018852 | cg20004910 | 360290 |
| 0.145 | CACNB2 | 10:18429703 | cg02456226 | 50000 |
| 0.145 | SNTG2 | 2:1134065 | cg16519574 | 303633 |
| 0.145 | DPYS | 8:105478855 | cg16783744 | 308581 |
| 0.145 | | 19:57618136 | cg18384778 | 334232 |
| 0.145 | | 2:200524189 | cg20711639 | 371065 |
| 0.145 | HLA- | 6:33053608 | cg01991743 | 40852 |
| | DPA1; HLA- | | | |
| | DPB1 | | | |
| 0.146 | GNG12; LOC100289178 | 1:68299409 | cg13184736 | 243235 |
| 0.146 | NAALAD2 | 11:89867679 | cg18540157 | 336897 |
| 0.146 | | 1:241520286 | cg14156405 | 262603 |
| 0.146 | | 18:4455337 | cg25627226 | 448224 |
| 0.146 | PLSCR2 | 3:146187126 | cg24092307 | 423558 |
| 0.146 | MAD2L1BP; RSPH9 | 6:43612908 | cg17536595 | 320768 |
| 0.146 | GALNT10 | 5:153569246 | cg13372456 | 246337 |
| 0.146 | KCNA4 | 11:30038675 | cg08490115 | 164399 |
| 0.146 | | 7:158380886 | cg27392792 | 477814 |
| 0.146 | KY | 3:134369661 | cg24675998 | 432827 |
| 0.146 | IRF6 | 1:209979624 | cg09509183 | 182272 |
| 0.147 | | 7:156400881 | cg27483342 | 479249 |
| 0.147 | ZSCAN1 | 19:58545333 | cg27391267 | 477779 |
| 0.147 | NAALAD2 | 11:89867704 | cg21817737 | 387693 |
| 0.147 | NID1 | 1:236228741 | cg07157830 | 139963 |
| 0.147 | TCHH | 1:152079713 | cg16689481 | 306872 |
| 0.147 | ZBTB44 | 11:130185670 | cg05227350 | 103986 |
| 0.147 | AGAP1 | 2:236412034 | cg11045331 | 208636 |
| 0.147 | KDM2B | 12:122019006 | cg07793808 | 151670 |
| 0.147 | KIF12 | 9:116860650 | cg14326196 | 266248 |
| 0.148 | FAM150A | 8:53477881 | cg09442654 | 181101 |
| 0.148 | ADAP1 | 7:968552 | cg05904016 | 116371 |
| 0.148 | DOCK1; FAM196A | 10:128994644 | cg03129384 | 63592 |
| 0.148 | MAML2 | 11:95969587 | cg05270552 | 104870 |
| 0.148 | SP8 | 7:20824932 | cg23093589 | 407294 |
| 0.148 | | 12:119212248 | cg22125805 | 392264 |
| 0.148 | ZSCAN18 | 19:58609618 | cg22721334 | 401040 |
| 0.148 | FOSB | 19:45976195 | cg12542255 | 233333 |
| 0.148 | ZSCAN18 | 19:58609602 | cg25784220 | 450602 |
| 0.148 | GALR1 | 18:74962672 | cg06360427 | 124375 |
| 0.148 | | 5:168728081 | cg07136998 | 139473 |
| 0.148 | ANKRD18A; FAM201A | 9:38622559 | cg21189438 | 378326 |
| 0.148 | CSGALNACT2; | 10:43633030 | cg07178550 | 140402 |
| | RET | | | |
| 0.148 | | 13:53775410 | cg13974192 | 258762 |
| 0.149 | DIAPH1; PCDHGA12; | 5:140892822 | cg08860070 | 170948 |
| | PCDHGC3; | | | |
| | PCDHGC4; | | | |
| | PCDHGC5 | | | |
| 0.149 | DNAAF2; LRR1; | 14:50084155 | cg22857670 | 403218 |
| | MGAT2; RPL36AL | | | |
| 0.149 | MACROD2; SEL1L2 | 20:13976096 | cg01552272 | 32076 |
| 0.149 | MYH13 | 17:10220829 | cg13984289 | 259022 |
| 0.149 | | 22:20284604 | cg00192046 | 4240 |
| 0.149 | CCDC148; PKP4 | 2:159312727 | cg14426788 | 268232 |
| 0.149 | | 1:23544995 | cg19743168 | 355780 |
| 0.150 | GLRB | 4:157997360 | cg22065614 | 391410 |
| 0.150 | | 16:51671357 | cg07302051 | 142686 |
| 0.150 | ZFP42 | 4:188916943 | cg14189571 | 263343 |
| 0.150 | UBD | 6:29520752 | cg11935738 | 223492 |
| 0.150 | CPSF3; IAH1 | 2:9614225 | cg08047252 | 156223 |
| 0.150 | GP9 | 3:128787213 | cg20264543 | 364127 |
| 0.150 | CCR6 | 6:167559851 | cg02524205 | 51410 |
| 0.150 | EFCAB1 | 8:49647809 | cg11469098 | 215629 |
| 0.150 | IRX4 | 5:1876397 | cg14451382 | 268670 |
| 0.150 | ARHGAP23 | 17:36666642 | cg15825321 | 291821 |
| 0.150 | CLEC14A | 14:38724648 | cg16404157 | 301618 |
| 0.150 | CACNA2D3 | 3:54155663 | cg18143243 | 330278 |
| 0.151 | BTG4; C11orf88; | 11:111383624 | cg23211240 | 409137 |
| | MIR34B; MIR34C | | | |
| 0.151 | GTF3A; MTIF3 | 13:28016624 | cg26772116 | 467001 |
| 0.151 | | 16:49499006 | cg01517680 | 31431 |
| 0.151 | CTTN | 11:70262058 | cg16629523 | 305772 |
| 0.151 | CCDC106; U2AF2; | 19:56159485 | cg08496742 | 164543 |
| | ZNF580; | | | |
| | ZNF581 | | | |
| 0.152 | DQX1; PCGF1; | 2:74743009 | cg07203423 | 140895 |
| | TLX2 | | | |
| 0.152 | KCNIP1 | 5:169960825 | cg10931884 | 206704 |
| 0.152 | MAL2 | 8:120220856 | cg02225716 | 45426 |
| 0.152 | GDF6 | 8:97173034 | cg21859781 | 388371 |
| 0.152 | HOXC4; HOXC5; | 12:54424203 | cg13826247 | 255805 |
| | HOXC6; MIR615 | | | |
| 0.152 | NCAM1 | 11:112831501 | cg21727486 | 386364 |
| 0.152 | ZNF503; ZNF503- | 10:77156697 | cg25023298 | 438769 |
| | AS2 | | | |
| 0.152 | MDGA1 | 6:37616803 | cg24442454 | 429044 |
| 0.152 | SHROOM2 | X:9754927 | cg05782106 | 114103 |
| 0.152 | | 4:1515011 | cg08480901 | 164253 |
| 0.153 | NXPH2 | 2:139537826 | cg14923640 | 277390 |
| 0.153 | BDNF | 11:27740813 | cg13974632 | 258776 |
| 0.153 | | 3:74663689 | cg24346629 | 427487 |
| 0.153 | | 4:1400189 | cg24496475 | 429912 |
| 0.153 | | 14:97058777 | cg11871960 | 222513 |
| 0.154 | ATP2C2 | 16:84402158 | cg07507755 | 146441 |
| 0.154 | | 7:32358540 | cg27511599 | 479742 |
| 0.154 | INTU | 4:128544375 | cg26114043 | 455622 |
| 0.154 | PNLIPRP2 | 10:118387207 | cg18699744 | 339327 |
| 0.154 | WIPI2 | 7:5271480 | cg26660312 | 465112 |
| 0.154 | GALNTL6 | 4:172734431 | cg22153181 | 392677 |
| 0.154 | MSI2 | 17:55362836 | cg07249730 | 141786 |
| 0.154 | LIN9; MIXL1 | 1:226411057 | cg18564989 | 337293 |
| 0.154 | GPR125 | 4:22520573 | cg13702087 | 253322 |
| 0.155 | MMP16 | 8:89340139 | cg12818557 | 237751 |
| 0.155 | 11-Mar | 5:16179660 | cg09017434 | 173718 |
| 0.155 | | 5:143978357 | cg11527001 | 216436 |
| 0.155 | ADAMTS16 | 5:5140001 | cg22954449 | 404825 |
| 0.155 | PITX1 | 5:134365728 | cg18606375 | 337970 |
| 0.155 | | 10:109674526 | cg00157668 | 3542 |
| 0.155 | TSHZ1; ZADH2 | 18:72916393 | cg11568697 | 217092 |
| 0.155 | | 2:240135921 | cg18121901 | 329904 |
| 0.155 | LYPD1; NCKAP5 | 2:133427612 | cg25571189 | 447240 |
| 0.155 | NAALAD2 | 11:89867809 | cg12403137 | 230998 |
| 0.155 | HOXC8; HOXC9 | 12:54396990 | cg22679316 | 400266 |
| 0.155 | ANKRD36B | 2:98206733 | cg23224356 | 409392 |
| 0.156 | NKAIN3 | 8:63161589 | cg08855288 | 170823 |
| 0.156 | RPS7P5 | 1:240161445 | cg21854408 | 388273 |
| 0.156 | | 12:116354837 | cg20169823 | 362815 |
| 0.156 | GABRA5 | 15:27112902 | cg03462380 | 70010 |
| 0.156 | UNCX | 7:1267228 | cg11715858 | 219570 |
| 0.156 | TNIP3 | 4:122078167 | cg10061361 | 191660 |
| 0.156 | CDH11 | 16:65157428 | cg07537692 | 146986 |
| 0.156 | DNAJB6 | 7:157192974 | cg25039694 | 439065 |
| 0.156 | DOCK1; FAM196A | 10:128994432 | cg03242819 | 65770 |
| 0.156 | ADAMTSL1 | 9:18514052 | cg14470762 | 269062 |
| 0.157 | CPNE9; MTMR14 | 3:9745610 | cg02741521 | 55842 |
| 0.157 | KIF25 | 6:168436099 | cg18319852 | 333241 |
| 0.157 | PIN4 | X:71401206 | cg26578373 | 463841 |
| 0.157 | ANKRD36BP2 | 2:89065379 | cg02646394 | 53977 |
| 0.157 | PXDN | 2:1748132 | cg25181651 | 441181 |
| 0.158 | GPR78 | 4:8582227 | cg18901644 | 342716 |
| 0.158 | ADAMTS16 | 5:5139797 | cg16670809 | 306536 |
| 0.158 | | 18:6414974 | cg18556788 | 337142 |
| 0.158 | GRM7 | 3:6903019 | cg27199820 | 474552 |
| 0.158 | CBWD2; FOXD4L1 | 2:114261369 | cg23850283 | 419371 |
| 0.158 | DPP10; LOC389023 | 2:115919006 | cg03753331 | 75826 |
| 0.158 | MIR4634 | 5:174178693 | cg12398645 | 230921 |
| 0.159 | SEMA3C | 7:80548456 | cg03823904 | 77109 |
| 0.159 | DHRS4L2 | 14:24476559 | cg10926857 | 206629 |
| 0.159 | WBSCR17 | 7:70597058 | cg02300154 | 46944 |
| 0.159 | | 11:2367787 | cg20805368 | 372479 |
| 0.159 | NTM | 11:131781257 | cg19717586 | 355276 |
| 0.159 | FLJ31485; FZD10 | 12:130647004 | cg21885046 | 388782 |
| 0.160 | CBLN1 | 16:49316197 | cg03389653 | 68591 |
| 0.160 | GBX2 | 2:237076815 | cg19761848 | 356155 |
| 0.160 | BCOR | X:40035961 | cg00016934 | 407 |
| 0.160 | HS3ST2 | 16:22825046 | cg09191731 | 176695 |
| 0.160 | ZNF148 | 3:125076372 | cg02970696 | 60506 |
| 0.160 | PROZ | 13:113819073 | cg00898013 | 18847 |
| 0.160 | | 2:130971164 | cg08566455 | 165743 |
| 0.160 | | 7:32467657 | cg18961681 | 343589 |
| 0.160 | | 7:152621979 | cg08202754 | 159199 |
| 0.161 | FEZF1; LOC154860 | 7:121946036 | cg10485664 | 199138 |
| 0.161 | NKAIN3 | 8:63161579 | cg01906015 | 39032 |
| 0.161 | PROCA1; RAB34; | 17:27044629 | cg21816330 | 387671 |
| | RPL23A; | | | |
| | SNORD42A; SNORD42B; | | | |
| | SNORD4A; | | | |
| | SNORD4B; | | | |
| | TLCD1 | | | |
| 0.161 | DOCK1 | 10:128593922 | cg06128198 | 120545 |
| 0.161 | HTR4 | 5:148033882 | cg11438011 | 215195 |
| 0.161 | PITX1 | 5:134363973 | cg07274716 | 142211 |
| 0.161 | UHRF1BP1 | 6:34760872 | cg07306190 | 142760 |
| 0.161 | IRX4 | 5:1887300 | cg07565505 | 147521 |
| 0.161 | SOX17 | 8:55370429 | cg11214140 | 211422 |
| 0.161 | GRHL2 | 8:102505986 | cg03650674 | 73811 |
| 0.162 | ABCB11; G6PC2 | 2:169769616 | cg05703053 | 112745 |
| 0.162 | | 18:6729810 | cg02824202 | 57399 |
| 0.162 | GALR1 | 18:74962000 | cg17911318 | 326333 |
| 0.162 | KCNA4 | 11:30038672 | cg15044957 | 279439 |
| 0.162 | CNTNAP2 | 7:145813421 | cg21126583 | 377176 |
| 0.162 | NID1 | 1:236228744 | cg04837025 | 96465 |
| 0.162 | THRB | 3:24536474 | cg20985755 | 375077 |
| 0.162 | COBL | 7:51384371 | cg12988534 | 240269 |
| 0.162 | GDF7 | 2:20870362 | cg07755735 | 151051 |
| 0.162 | ARHGAP33; C19orf55 | 19:36265700 | cg18805164 | 341126 |
| 0.163 | | 8:143070187 | cg06573787 | 128217 |
| 0.163 | ERG | 21:40033163 | cg12884169 | 238711 |
| 0.163 | PON2; PON3 | 7:95025736 | cg07121856 | 139138 |
| 0.163 | HOXD10; HOXD11; | 2:176972563 | cg11546137 | 216732 |
| | HOXD12 | | | |
| 0.164 | NSUN4 | 1:46814106 | cg15580309 | 287719 |
| 0.164 | CYB561D2; NPRL2; | 3.50383167 | cg09682796 | 185261 |
| | RASSF1; | | | |
| | TMEM115; ZMYND10 | | | |
| 0.164 | CHL1 | 3:239665 | cg10603275 | 201352 |
| 0.164 | MYOG; PPFIA4 | 1:203045044 | cg00805880 | 17008 |
| 0.165 | GNAI1 | 7:79764178 | cg25744767 | 449994 |
| 0.165 | LOC649133; POU2F3 | 11:120110887 | cg17176573 | 314750 |
| 0.165 | 11-Mar | 5:16179633 | cg23479922 | 413567 |
| 0.165 | PSMB9; TAP1 | 6:32829303 | cg05062939 | 100976 |
| 0.165 | TMEM229A | 7:123673331 | cg17025835 | 312249 |
| 0.165 | CEND1; PDDC1; | 11:783889 | cg01741372 | 35661 |
| | SLC25A22 | | | |
| 0.166 | DOCK1 | 10:128593943 | cg22665692 | 400049 |
| 0.166 | ATP6V1A | 3:113502832 | cg19924544 | 358964 |
| 0.166 | C6orf147; KHDC1 | 6:74024628 | cg02447304 | 49827 |
| 0.166 | | 22:43168851 | cg24694833 | 433260 |
| 0.167 | FAT1 | 4:187645118 | cg01244944 | 26097 |
| 0.167 | LILRB3 | 19:54728037 | cg23679434 | 416846 |
| 0.167 | SYT14 | 1:210111561 | cg19922137 | 358920 |
| 0.167 | ZNF844 | 19:12175935 | cg26827373 | 468055 |
| 0.167 | EVX2; HOXD12; | 2:176957842 | cg04415176 | 88629 |
| | HOXD13 | | | |
| 0.167 | | 10:131762462 | cg07045241 | 137620 |
| 0.167 | KLF8 | X:56259243 | cg06457357 | 126059 |
| 0.168 | C5orf63 | 5:126408756 | cg14340928 | 266559 |
| 0.168 | MAGI2-AS3 | 7:79083408 | cg22280038 | 394533 |
| 0.168 | | 4:21950567 | cg00688962 | 14541 |
| 0.169 | SHISA6 | 17:11144043 | cg13330559 | 245613 |
| 0.169 | ARSG; SLC16A6 | 17:66287032 | cg11879514 | 222640 |
| 0.169 | RNF180 | 5:63461654 | cg17370163 | 317926 |
| 0.169 | DACH1 | 13:72439698 | cg05510902 | 109333 |
| 0.169 | | 7:55516724 | cg03357999 | 68033 |
| 0.169 | EPB41L3 | 18:5543801 | cg00027083 | 665 |
| 0.170 | | 11:67499431 | cg02666610 | 54357 |
| 0.170 | CCT8L2; TPTEP1 | 22:17082772 | cg01660911 | 34237 |
| 0.171 | UBTD1 | 10:99278449 | cg10989317 | 207724 |
| 0.171 | | 18:6414976 | cg14352983 | 266773 |
| 0.171 | WBSCR17 | 7:70597065 | cg03044249 | 61987 |
| 0.171 | MYO16 | 13:109352806 | cg24702069 | 433391 |
| 0.171 | ANKRD36 | 2:97778927 | cg12623145 | 234729 |
| 0.171 | | 7:152622022 | cg15818671 | 291676 |
| 0.171 | SP8 | 7:20824706 | cg01003961 | 21140 |
| 0.172 | CTTNBP2 | 7:117513101 | cg05951860 | 117342 |
| 0.172 | NAT2 | 8:18244861 | cg12174804 | 227617 |
| 0.172 | WBSCR17 | 7:70597921 | cg07143083 | 139618 |
| 0.172 | THRB | 3:24536478 | cg13790603 | 255057 |
| 0.172 | | 16:85368973 | cg02418439 | 49379 |
| 0.173 | UBD | 6:29521356 | cg21632158 | 385088 |
| 0.173 | ADAMTSL3 | 15:84322584 | cg04138185 | 83155 |
| 0.173 | RAB32 | 6:146864885 | cg26252281 | 458030 |
| 0.174 | CLEC14A | 14:38724675 | cg05057720 | 100847 |
| 0.174 | DOCK1; FAM196A | 10:128994603 | cg03070297 | 62543 |
| 0.174 | MDGA1 | 6:37618009 | cg26720545 | 466246 |
| 0.174 | BAIAP2L1 | 7:98029266 | cg08684580 | 167809 |
| 0.174 | LRRC4C | 11:40314978 | cg19849428 | 357643 |
| 0.174 | | 8:7079106 | cg08498719 | 164579 |
| 0.174 | FAM43B | 1:20879547 | cg12768681 | 236962 |
| 0.174 | SEMA5B | 3:122694286 | cg07733481 | 150639 |
| 0.175 | SGPP2 | 2:223289306 | cg07357987 | 143728 |
| 0.175 | | 8:76320150 | cg26220018 | 457454 |
| 0.175 | CDH2 | 18:25757710 | cg14312538 | 265980 |
| 0.175 | CR1L | 1:207842917 | cg17822947 | 324851 |
| 0.175 | NOVA1 | 14:27067372 | cg20478129 | 367360 |
| 0.176 | CACNA1B | 9:140917431 | cg13610307 | 251390 |
| 0.176 | TRAF3 | 14:103367591 | cg10920224 | 206529 |
| 0.176 | IRX1 | 5:3596207 | cg10530883 | 200071 |
| 0.176 | BTBD3 | 20:11871384 | cg23944804 | 420919 |
| 0.177 | | 10:111216962 | cg16664405 | 306435 |
| 0.177 | | 10:125751413 | cg20250269 | 363883 |
| 0.178 | IRS2 | 13:110438578 | cg02320481 | 47382 |
| 0.178 | EVX2; HOXD13 | 2:176948732 | cg15133351 | 280970 |
| 0.178 | PKDCC | 2:42275740 | cg12630082 | 234855 |
| 0.179 | IL5RA | 3:3152916 | cg21594961 | 384489 |
| 0.179 | C5orf63 | 5:126408806 | cg17848407 | 325324 |
| 0.179 | GDF7 | 2:20870812 | cg14780466 | 274979 |
| 0.179 | HOXA10; HOXA10- | 7:27206073 | cg15506609 | 286583 |
| | HOXA9; HOXA7; | | | |
| | HOXA9; MIR196B | | | |
| 0.179 | TMCC3 | 12:94995915 | cg09162806 | 176158 |
| 0.179 | LOC91149; RAPGEF4 | 2:173600676 | cg00997611 | 21009 |
| 0.179 | PHACTR1 | 6:12749978 | cg13246235 | 244239 |
| 0.180 | GCK; MYL7 | 7:44184403 | cg03812172 | 76924 |
| 0.181 | | 9:98981500 | cg21167269 | 377918 |
| 0.181 | GDF7 | 2:20870087 | cg09074113 | 174642 |
| 0.181 | KCNE1 | 21:35832028 | cg07321776 | 143076 |
| 0.181 | KCNK2 | 1:215256262 | cg18794839 | 340940 |
| 0.181 | GPR123 | 10:134910540 | cg13750264 | 254277 |
| 0.182 | FTSJ2; NUDT1; | 7:2289097 | cg12017558 | 224816 |
| | SNX8 | | | |
| 0.182 | KLF16 | 19:1852127 | cg07355926 | 143681 |
| 0.182 | | 2:154143768 | cg18771570 | 340550 |
| 0.183 | | 6:77563066 | cg21291856 | 380079 |
| 0.184 | | 17:54858770 | cg07973125 | 154969 |
| 0.184 | FGF12 | 3:192127457 | cg08002883 | 155463 |
| 0.185 | ILDR1 | 3:121714668 | cg20356878 | 365522 |
| 0.185 | SLC17A3 | 6:25882590 | cg03517284 | 71065 |
| 0.186 | FHOD3 | 18:34325827 | cg07495405 | 146206 |
| 0.186 | C1orf106 | 1:200860534 | cg00909514 | 19113 |
| 0.186 | HOXA5; HOXA6; | 7:27187502 | cg03529432 | 71326 |
| | HOXA7; LOC100133311 | | | |
| 0.186 | SH2D4B | 10:82295502 | cg08506606 | 164700 |
| 0.186 | KNDC1; UTF1; | 10:135044114 | cg09053680 | 174307 |
| | VENTX | | | |
| 0.186 | GSC2 | 22:19137874 | cg23774356 | 418306 |
| 0.186 | CLCA1 | 1:86968087 | cg19807991 | 356943 |
| 0.187 | SCTR | 2:120281999 | cg07176264 | 140350 |
| 0.187 | PITX1 | 5:134363562 | cg02037307 | 41774 |
| 0.187 | FTSJ2; NUDT1; | 7:2288716 | cg13550401 | 250077 |
| | SNX8 | | | |
| 0.188 | | 8:7543899 | cg12174280 | 227610 |
| 0.189 | CLCA1 | 1:86968543 | cg04896168 | 97717 |
| 0.190 | NAALAD2 | 11:89867911 | cg14304817 | 265815 |
| 0.190 | LHX6 | 9:124989294 | cg21469772 | 382370 |
| 0.190 | KLF16 | 19:1852165 | cg05006231 | 99848 |
| 0.191 | CLCA1 | 1:86968255 | cg26829098 | 468093 |
| 0.191 | HLA-A | 6:29910755 | cg11808100 | 221232 |
| 0.192 | | 19:22444593 | cg03692651 | 74585 |
| 0.192 | SERTM1 | 13:37248244 | cg09907509 | 189121 |
| 0.193 | CNTN4 | 3:2140699 | cg06598836 | 128644 |
| 0.193 | | 15:29862517 | cg04283162 | 86040 |
| 0.193 | | 4:56023751 | cg10360906 | 197083 |
| 0.193 | KIAA1217; PRINS | 10:24535410 | cg04122385 | 82818 |
| 0.194 | C5orf63 | 5:126409211 | cg10812634 | 204796 |
| 0.194 | LOC91149; RAPGEF4 | 2:173600362 | cg14379854 | 267268 |
| 0.195 | ZNF471 | 19:57019069 | cg00674365 | 14254 |
| 0.195 | AFG3L1P; DBNDD1 | 16:90070038 | cg16380389 | 301186 |
| 0.195 | SH2D4B | 10:82296072 | cg09981929 | 190306 |
| 0.196 | C21orf67; ITGB2; | 21:46349496 | cg02464073 | 50169 |
| | LOC100505746 | | | |
| 0.196 | NPTX2 | 7:98246633 | cg18952796 | 343455 |
| 0.197 | LHX6 | 9:124990276 | cg00142257 | 3190 |
| 0.197 | GDF7 | 2:20871401 | cg04082016 | 81976 |
| 0.197 | CR1L | 1:207842833 | cg03408135 | 68966 |
| 0.198 | DKFZP686I15217; | 6:2991147 | cg06195525 | 121679 |
| | NQO2 | | | |
| 0.199 | PCDH7 | 4:30723855 | cg26133769 | 455996 |
| 0.199 | IFITM1; IFITM3 | 11:320956 | cg14885742 | 276796 |
| 0.199 | GNAS; GNAS- | 20:57414274 | cg23732978 | 417791 |
| | AS1 | | | |
| 0.201 | NAALAD2 | 11:89867819 | cg05500015 | 109117 |
| 0.202 | CPNE4 | 3:131246020 | cg01966816 | 40359 |
| 0.204 | EFHA2 | 8:16885000 | cg12097222 | 226305 |
| 0.204 | CRMP1 | 4:5894691 | cg03544320 | 71665 |
| 0.205 | UNC5D | 8:35092876 | cg06010588 | 118507 |
| 0.206 | WTIP | 19:34972145 | cg10771931 | 204037 |
| 0.207 | DNAH2; EFNB3; | 17:7613764 | cg22098780 | 391853 |
| | WRAP53 | | | |
| 0.207 | CR1L | 1:207843084 | cg21106486 | 376853 |
| 0.207 | CR1; CR2 | 1:207669922 | cg10021878 | 191017 |
| 0.207 | | 13:21872349 | cg14456004 | 268764 |
| 0.207 | LOC645249 | 7:156814480 | cg09858188 | 188213 |
| 0.208 | | 13:50701619 | cg01803928 | 36963 |
| 0.208 | GALR1 | 18:74962133 | cg03502002 | 70747 |
| 0.210 | | 1:239550283 | cg13985485 | 259057 |
| 0.210 | | 9:96623674 | cg13679303 | 252812 |
| 0.210 | DRD5 | 4:9783192 | cg26296488 | 458826 |
| 0.210 | NETO1 | 18:70535005 | cg18651870 | 338661 |
| 0.211 | MDGA1 | 6:37617124 | cg00807871 | 17056 |
| 0.212 | FAM75C1 | 9:90531866 | cg21265404 | 379726 |
| 0.213 | TNS3 | 7:47621692 | cg06352730 | 124250 |
| 0.214 | | 2:16484904 | cg23905015 | 420220 |
| 0.214 | | 7:32358064 | cg13207630 | 243593 |
| 0.216 | PROZ | 13:113819100 | cg18105134 | 329535 |
| 0.216 | TSHZ1; ZADH2 | 18:72917101 | cg18449964 | 335368 |
| 0.217 | C5orf63 | 5:126409310 | cg15405432 | 284960 |
| 0.218 | ZNF468 | 19:53361448 | cg15721243 | 290213 |
| 0.219 | FAT1 | 4:187644739 | cg16248329 | 298797 |
| 0.220 | CTTNBP2 | 7:117513835 | cg16913250 | 310581 |
| 0.220 | HES6; LOC151174; | 2:239139911 | cg06102419 | 120125 |
| | LOC643387 | | | |
| 0.221 | MAL2 | 8:120220882 | cg06822816 | 133139 |
| 0.222 | C5orf63 | 5:126409227 | cg02304092 | 47036 |
| 0.224 | LHX6 | 9:124988720 | cg04282082 | 86021 |
| 0.226 | HCG4; LOC554223 | 6:29759078 | cg11036359 | 208507 |
| 0.229 | C5orf63 | 5:126409061 | cg18710053 | 339507 |
| 0.229 | GPR78 | 4:8582249 | cg01829241 | 37555 |
| 0.229 | LHX6 | 9:124989337 | cg13571460 | 250561 |
| 0.230 | C5orf63 | 5:126409198 | cg22905511 | 404065 |
| 0.231 | | 2:154143677 | cg07563363 | 147470 |
| 0.233 | FCRLA | 1:161675579 | cg04888234 | 97564 |
| 0.233 | FAM160B1 | 10:116634877 | cg14964115 | 278020 |
| 0.235 | PM20D1 | 1:205819251 | cg14893161 | 276892 |
| 0.235 | GDF7 | 2:20871279 | cg07021052 | 137180 |
| 0.237 | ANKRD27; RGS9BP | 19:33165484 | cg27413643 | 478153 |
| 0.238 | MDGA1 | 6:37617864 | cg20053110 | 361003 |
| 0.240 | | 18:6414978 | cg17688525 | 322822 |
| 0.244 | ATP8B5P; RUSC2 | 9:35490515 | cg15271616 | 283055 |
| 0.244 | GDF7 | 2:20871002 | cg10687131 | 202734 |
| 0.248 | | 2:181987552 | cg20685672 | 370518 |
| 0.252 | ARHGAP33; C19orf55 | 19:36264029 | cg16569309 | 304609 |
| 0.252 | LHX6 | 9:124990165 | cg03363289 | 68128 |
| 0.253 | GDF7 | 2:20870211 | cg05481257 | 108752 |
| 0.253 | SH2D4B | 10:82295723 | cg24440658 | 429013 |
| 0.254 | GDF7 | 2:20869434 | cg27141850 | 473604 |
| 0.254 | TSNARE1 | 8:143376371 | cg24849373 | 435844 |
| 0.254 | AGAP1 | 2:236579469 | cg03451670 | 69806 |
| 0.255 | | 1:41350183 | cg08870646 | 171150 |
| 0.255 | LHX6 | 9:124989915 | cg13862711 | 256498 |
| 0.256 | IGF1R | 15:99193247 | cg03437748 | 69502 |
| 0.256 | SDK1 | 7:4118583 | cg22535849 | 398182 |
| 0.257 | PM20D1 | 1:205819492 | cg24503407 | 430027 |
| 0.258 | CLCA1 | 1:86968184 | cg10760651 | 203838 |
| 0.259 | WDR17 | 4:176987009 | cg11923920 | 223292 |
| 0.261 | ACAN | 15:89354338 | cg02401352 | 49110 |
| 0.266 | TSHZ1; ZADH2 | 18:72917163 | cg03972071 | 79876 |
| 0.269 | MDGA1 | 6:37617956 | cg24796644 | 434985 |
| 0.272 | C5orf63 | 5:126409153 | cg27097438 | 472827 |
| 0.275 | C11orf67; RSF1 | 11:77532707 | cg22741595 | 401343 |
| 0.275 | | 6:167195910 | cg06330797 | 123893 |
| 0.276 | COL9A1 | 6:71022072 | cg23974730 | 421453 |
| 0.276 | INPP5A | 10:134411480 | cg12501287 | 232697 |
| 0.277 | PM20D1 | 1:205818956 | cg17178900 | 314798 |
| 0.277 | FAM181A; FAM181A- | 14:94385395 | cg20022541 | 360557 |
| | AS1 | | | |
| 0.279 | | 3:120151283 | cg06378561 | 124751 |
| 0.280 | LOC255411 | 12:49113738 | cg00007810 | 182 |
| 0.280 | CHAF1B | 21:37761363 | cg22871721 | 403496 |
| 0.281 | ASB1 | 2:239330383 | cg13295614 | 245013 |
| 0.282 | TNFSF8 | 9:117694183 | cg14361804 | 266932 |
| 0.284 | DISC1 | 1:231820076 | cg07134368 | 139412 |
| 0.285 | DIP2C | 10:593275 | cg06051619 | 119189 |
| 0.286 | ULK4P1; ULK4P2 | 15:30861172 | cg23804921 | 418678 |
| 0.287 | TPO | 2:1426786 | cg01957222 | 40112 |
| 0.288 | PM20D1 | 1:205819463 | cg07167872 | 140186 |
| 0.290 | PM20D1 | 1:205819179 | cg14159672 | 262672 |
| 0.290 | LOC200772 | 2:241896910 | cg06193597 | 121647 |
| 0.291 | PM20D1 | 1:205819406 | cg11965913 | 224049 |
| 0.292 | PPP2R2B | 5:146253830 | cg10926851 | 206628 |
| 0.294 | LOC100133461 | 4:3683268 | cg03965172 | 79742 |
| 0.297 | AVL9; LSM5 | 7:32526065 | cg26856631 | 468599 |
| 0.300 | PM20D1 | 1:205819088 | cg26354017 | 459920 |
| 0.300 | MIR182; MIR183; | 7:129412730 | cg16069065 | 295914 |
| | MIR96 | | | |
| 0.301 | SCN1A | 2:166930521 | cg00881894 | 18574 |
| 0.305 | RPSAP58; ZNF681 | 19:23941859 | cg25958450 | 453100 |
| 0.305 | CCDC130; MRI1 | 19:13875111 | cg25755428 | 450171 |
| 0.317 | PML | 15:74345103 | cg11399582 | 214535 |
| 0.318 | C1orf109; CDCA8 | 1:38156652 | cg06917450 | 135153 |
| 0.324 | CELF4 | 18:34917603 | cg20094343 | 361624 |
| 0.325 | CLEC4F | 2:71033156 | cg02479782 | 50493 |
| 0.343 | EHMT2; NEU1; | 6:31838544 | cg20370184 | 365714 |
| | SLC44A4 | | | |
| 0.344 | NCOR2 | 12:124827315 | cg23878260 | 419752 |
| 0.349 | PCCA | 13:100989375 | cg20536971 | 368191 |
| 0.351 | ANKRD26P3; | 13:19918525 | cg08801017 | 169810 |
| | LINC00421 | | | |
| 0.355 | PPYR1 | 10:47083392 | cg11861387 | 222311 |
| 0.358 | | 5:5887642 | cg26690407 | 465769 |
| 0.363 | | 13:79694063 | cg24941469 | 437468 |
| 0.366 | ALLC | 2:3753297 | cg05971102 | 117729 |
| 0.378 | MIR3663 | 10:118931160 | cg17723206 | 323281 |
| 0.388 | SERPINB9 | 6:2888212 | cg19577958 | 352915 |
| 0.399 | NCOR2 | 12:124831017 | cg07474670 | 145798 |
| 0.404 | | 14:22370643 | cg12819537 | 237764 |
| 0.408 | SLC37A1 | 21:43989949 | cg08407901 | 162897 |
| 0.413 | MRPL1 | 4:78852682 | cg15897435 | 293045 |
| 0.417 | C7orf26; ZNF853 | 7:6653510 | cg08693140 | 167967 |
| 0.431 | | 14:22361282 | cg16702660 | 307151 |
| 0.432 | ITIH4; MUSTN1; | 3:52869263 | cg24629711 | 432072 |
| | TMEM110; TMEM110- | | | |
| | MUSTN1 | | | |
| 0.442 | MAGI2-AS3 | 7:79083056 | cg14464244 | 268938 |
| 0.586 | PPP1R16B | 20:37438823 | cg18674961 | 338963 |

*UCSC hg19 Cytosine Coordinate of CpG (+strand)

[0232] The term “comprising” as used herein is synonymous with “including,” “containing,” or “characterized by,” and is inclusive or open-ended and does not exclude additional, unrecited elements or method steps.

[0233] All numbers expressing quantities of ingredients, reaction conditions, and so forth used in the specification are to be understood as being modified in all instances by the term “about.” Accordingly, unless indicated to the contrary, the numerical parameters set forth herein are approximations that may vary depending upon the desired properties sought to be obtained. At the very least, and not as an attempt to limit the application of the doctrine of equivalents to the scope of any claims in any application claiming priority to the present application, each numerical parameter should be construed in light of the number of significant digits and ordinary rounding approaches.

[0234] The above description discloses several methods and materials of the present invention. This invention is susceptible to modifications in the methods and materials, as well as alterations in the fabrication methods and equipment. Such modifications will become apparent to those skilled in the art from a consideration of this disclosure or practice of the invention disclosed herein. Consequently, it is not intended that this invention be limited to the specific embodiments disclosed herein, but that it cover all modifications and alternatives coming within the true scope and spirit of the invention.

[0235] The following references are incorporated herein by reference in their entireties.

### REFERENCES

[0236] 1 Firestein G S. Evolving concepts of rheumatoid arthritis. Nature, 423:356-361, 2003
[0237] 2 Lee differentially methylated, Kiener H P, Agarwal S K, Noss E H, Watts G F, Chisaka O, Takeichi M, Brenner M B. 2007. Cadherin-11 in synovial lining formation and pathology in arthritis. Science. 315:1006
[0238] 3 Kiener H P, Niederreiter B, Lee differentially methylated, Jimenez-Boj E, Smolen J S, Brenner M B. Cadherin 11 promotes invasive behavior of fibroblast-like synoviocytes. Arthritis Rheum. 2009 May; 60(5):1305-10
[0239] 4 Firestein, G S. Invasive fibroblast-like synoviocytes in rheumatoid arthritis: Passive responders or transformed aggressors? Arthritis Rheum 39:1781-1790, 1996
[0240] 5 Müller-Ladner U, Kriegsmann J, Franklin B N, Matsumoto S, Geiler T, Gay R E, Gay S. Synovial fibroblasts of patients with rheumatoid arthritis attach to and invade normal human cartilage when engrafted into SCID mice. Am J Pathol. 1996 November; 149(5):1607-15
[0241] 6 Lafyatis R, Remmers E F, Roberts A B, Yocum D E, Sporn M B, Wilder R L. 1989. Anchorage-independent growth of synoviocytes from arthritic and normal joints. Stimulation by exogenous platelet-derived growth factor and inhibition by transforming growth factor-beta and retinoids. J Clin Invest. 83:1267
[0242] 7 Baier A, Meineckel I, Gay S, Pap T. Apoptosis in rheumatoid arthritis. Curr Opin Rheumatol. 2003 May; 15(3):274-9
[0243] 8 Lefèvre S, Knedla A, Tennie C, Kampmann A, Wunrau C, Dinser R, Korb A, Schnäker E M, Tamer I H, Robbins P D, Evans C H, Stürz H, Steinmeyer J, Gay S, Schölmerich J, Pap T, Müller-Ladner U, Neumann E. Synovial fibroblasts spread rheumatoid arthritis to unaffected joints. Nat Med. 2009 December; 15(12):1414-20
[0244] 9 Pap T, Franz J K, Hummel K M, Jeisy E, Gay R, Gay S. Activation of synovial fibroblasts in rheumatoid arthritis: lack of Expression of the tumour suppressor PTEN at sites of invasive growth and destruction. Arthritis Res. 2000; 2(1):59-64
[0245] 10 Franz J K, Pap T, Hummel K M, Nawrath M, Aicher W K, Shigeyama Y, Müller-Ladner U, Gay R E, Gay S. Expression of sentrin, a novel antiapoptotic molecule, at sites of synovial invasion in rheumatoid arthritis. Arthritis Rheum. 2000 March; 43(3):599-607
[0246] 11 You X, Boyle D L, Hammaker D, Firestein G S. PUMA-mediated apoptosis in fibroblast-like synoviocytes does not require p53. Arthritis Res Ther. 2006; 8(6):R157
[0247] 12 Firestein G S, F Echeverri, M Yeo, N J Zvaifler, and D R Green. Somatic mutations in the p53 tumor suppressor gene in rheumatoid arthritis synovium. Proc Natl Acad Sci USA, 94: 10895-10900, 1997
[0248] 13 Igarashi H, Hashimoto J, Tomita T, Yoshikawa H, Ishihara K. TP53 mutations coincide with the ectopic expression of activation-induced cytidine deaminase in the fibroblast-like synoviocytes derived from a fraction of patients with rheumatoid arthritis. Clin Exp Immunol. 2010 Jul. 1; 161(1):71-80
[0249] 14 Inazuka M, Tahira T, Horiuchi T, Harashima S, Sawabe T, Kondo M, Miyahara H, Hayashi K. Analysis of p53 tumour suppressor gene somatic mutations in rheumatoid arthritis synovium. Rheumatology (Oxford). 2000 March; 39(3):262-6
[0250] 15 Rème T, Travaglio A, Gueydon E, Adla L, Jorgensen C, Sany J. Mutations of the p53 tumour suppressor gene in erosive rheumatoid synovial tissue. Clin Exp Immunol. 1998 February; 111(2):353-8
[0251] 16 Bang H, Egerer K, Gauliard A, Lüthke K, Rudolph P E, Fredenhagen G, Berg W, Feist E, Burmester G R. Mutation and citrullination modifies vimentin to a novel autoantigen for rheumatoid arthritis. Arthritis Rheum. 2007 August; 56(8):2503-11
[0252] 17 Da Sylva T R, Connor A, Mburu Y, Keystone E, Wu G E. Somatic mutations in the mitochondria of rheumatoid arthritis synoviocytes. Arthritis Res Ther. 2005; 7(4):R844-51
[0253] 19 Lee S-H, D K Chang, A Goel, C R Boland, W Bugbee, D L Boyle, and G S Firestein. Microsatellite instability and suppressed DNA repair enzyme expression in rheumatoid arthritis. J Immunol, 170:2214-20, 2003
[0254] 19 Christophersen N S, Helin K. Epigenetic control of embryonic stem cell fate. J Exp Med. Oct. 25, 2010; 207(11):2287-95
[0255] 20 Kulis M, Esteller M. DNA methylation and cancer. Adv Genet. 2010; 70:27-56
[0256] 21 Ren J, Singh B N, Huang Q, Li Z, Gao Y, Mishra P, Hwa Y L, Li J, Dowdy S C, Jiang S W. DNA hypermethylation as a chemotherapy target. Cell Signal. Feb. 21, 2011. [Epub ahead of print]
[0257] 22 Turek-Plewa J, Jagodzinski P P. The role of mammalian DNA methyltransferases in the regulation of gene expression. Cell Mol Biol Lett. 2005; 10(4):631-47
[0258] 23 Hollingsworth J W, Maruoka S, Boon K, Garantziotis S, Li Z, Tomfohr J, Bailey N, Potts E N, Whitehead G, Brass differentially methylated, Schwartz D A. In utero supplementation with methyl donors enhances allergic airway disease in mice. J Clin Invest. 2008 October; 118(10):3462-9
[0259] 24 Miller R L. Prenatal maternal diet affects asthma risk in offspring. J Clin Invest. 2008. 118:3265-8
[0260] 25 Liu C C, Fang T J, Ou T T, Wu C C, Li R N, Lin Y C, Lin C H, Tsai W C, Liu H W, Yen J H. Global DNA methylation, DNMT1, and MBD2 in patients with rheumatoid arthritis. Immunol Lett. Mar. 30, 2011; 135(1-2):96-9. Epub Oct. 16, 2010
[0261] 26 Karouzakis E, Gay R E, Michel B A, Gay S, Neidhart M. DNA hypomethylation in rheumatoid arthritis synovial fibroblasts. Arthritis Rheum. 2009 December; 60(12):3613-22
[0262] 27 Lee B H et al. Procainamide is a specific inhibitor of DNA methyltransferase 1. J Biol Chem. Dec. 9, 2005; 280(49):40749-56
[0263] 28 Schipper R G et al. Polyamines and DNA methylation in childhood leukaemia. Biochem Soc Trans. 2007 April; 35(Pt 2):331-529 Fu L. H. et al., Methylation status of the IL-10 gene promoter in the peripheral blood mononuclear cells of rheumatoid arthritis patients. Yi Chuan. 2007 November; 29(11):1357-61.

[0264] All references cited herein, including but not limited to published and unpublished applications, patents, and literature references, are incorporated herein by reference in their entirety and are hereby made a part of this specification. To the extent publications and patents or patent applications incorporated by reference contradict the disclosure contained in the specification, the specification is intended to supersede and/or take precedence over any such contradictory material.

The application's sequence listing, which the Patent Office published only in electronic form, follows.

SEQUENCE LISTING (485512 sequences)

SEQ ID NO: 1 - DNA, 122 bp, Homo sapiens
ttttttagataaggatatccaggcgatgaggaagttttacttctgggaacagcctggatacgaaaccttcacacgtcagtgtcttttggacattttctcgtcagtacagccctgttgaatgt

SEQ ID NO: 2 - DNA, 122 bp, Homo sapiens
tccattttgaaggaaaaaaatgaaggctctgaaagtgtaaatcgcttactgaagggcacacggccaggatgacagcggagccaggatcaccccaggtctgtctcattgcatatgtcatggct

SEQ ID NO: 3 - DNA, 122 bp, Homo sapiens
gccttagtcctgaatgagccatttctctaagaagtcctggcttcttttttaatagagaatcgtatttagaagccaagatctgtgggggggtacatgtgcctgttagtattgcagttgtgcct

SEQ ID NO: 4 - DNA, 122 bp, Homo sapiens
ctaagtgcagtcaggatctgttagtacagtggcttttgatggaacagctgaggcacacatcgcccgtggcatggactccggggccgaacgctcacgaccaagacttttgcccttttgaaatg

SEQ ID NO: 5 - DNA, 122 bp, Homo sapiens
ctcagcgacagtgtagcgtcatgttagaggagacgatctgacccaccagtttgtacatcacgtcctgcatgtcccacaccattttttcatgaccttgtaatatactggtctctgtgctatag

SEQ ID NO: 6 - DNA, 122 bp, Homo sapiens
caagtgagctagcaaacacacatgcaccaatgtgccttttgacaagagtaccccctaccccgactcccacaccaaaatggacatgagattggagaaatgaatacagcagatggaacagatag

SEQ ID NO: 7 - DNA, 122 bp, Homo sapiens
tggggtgagtgagaccacgggcctcaccccggaccaagttaagcggaatctggagaaatacggcctcaatggtaagtgtcccttggaagagcggctggtaattaatgccctcctgcaccccc

SEQ ID NO: 8 - DNA, 122 bp, Homo sapiens
gaggtctgcttgtaaatacccagtgggcctggctgggctccctggaaggcgaggcgaaggcgcagttggagctgtttgctgtgagcagcacctctccaggtggggccgcccatggtggccct

SEQ ID NO: 9 - DNA, 122 bp, Homo sapiens
ctgcccaatcggtcccttccttcactcctccccattcttaacaagagatctggaatggcgcggacagggaaagtttctcagattaaggagaaaactaagccaagtcaagacgccgcgggtgg

SEQ ID NO: 10 - DNA, 122 bp, Homo sapiens
cctagggccggcgccggaaaacctaggcgcggctaaatgacgcaagaggcctcgcgcgcacgcgcagtgccgcaccacgtacaccccgcccccggggctctctcccgccgggttccggttcc

SEQ ID NO: 11 - DNA, 122 bp, Homo sapiens
ttacattcacgctggtgcaggcatgcaggtcggtggtgttacacacaacgctgttgcaggcgtgcaggtcagtggtacacacattcacgctattgcaggcgtgcaggccggtggtgttacat

SEQ ID NO: 12 - DNA, 122 bp, Homo sapiens
agagcgccttggcagctgaggcccgggagacccgtcgtcaggagctcctggagaagattacggagggccaggctgctaagaagcagaaactagaacaggcttcaggggccagctcaagccag

SEQ ID NO: 13 - DNA, 122 bp, Homo sapiens
gtacactgtctttttctccccgttttcactctttatctcagcagctctaaactttcatggcggtatttccaagaagaaaattttgattaccccttattaaacatatatttgttaaactacat

SEQ ID NO: 14 - DNA, 122 bp, Homo sapiens
gggcgggcctcctctgccctaagcctgcggcctggggtgcggccgtggcgccgaaagacccgcatgctcggcgacccagctttccaggacgaagaaaggacagaagtgtcgtccgacagcgg

SEQ ID NO: 15 - DNA, 122 bp, Homo sapiens
tcccgccaaaactcctgcccggtgcggagaggcgcccggagcccagggcgctgtgcggagcgggtgtaactccccaggcctgccccgccgcctgcctccaccgtcccgcggacgcctttcct

SEQ ID NO: 16 - DNA, 122 bp, Homo sapiens
agccgcaggtgcgcgcaagggacccgtcacaagcatcttgccctgtggcctcctgagaagcgagtgagtggaccacagaggtcatttcccagccacgtggccaggcccagcccgaggcagga

SEQ ID NO: 17 - DNA, 122 bp, Homo sapiens
gaacacgtccttaaggcacagattgctcatgctattgttgtggcttaggaacacgttaagcggttttctgccctgggtgggccaggtgttccttgccctcattccagtaaacccacaacctt

SEQ ID NO: 18 - DNA, 122 bp, Homo sapiens
atgggcctcttctgccctctgctgggcctaagagccaagcacattaatgcatatcagcaccggagctgaggagcaaatggcacttcccgtcagcctgaggtggcaatgagggtggtctgcat

SEQ ID NO: 19 - DNA, 122 bp, Homo sapiens
tatagacccggaatccgatccttgggacgcggccaggaactcggacctcgaccctggccacgctgtccataaggtgcagatgggagcgcactgcccaggccaggctgcactgctgacgcctg

SEQ ID NO: 20 - DNA, 122 bp, Homo sapiens
ctccttgggtgggaaggcactgggccagcggggctggggcgggcagcccccaggcaaggccgccagcacttcgccagcactgcgacctggccctgcacctagccttgcacccagcccccggc

SEQ ID NO: 21 - DNA, 122 bp, Homo sapiens
tcctgcaggcgcacagacctcatccgctccagcttacgcctgcgggtggcatccgactcgcggctgacgtcctggggccccttgccctgccgggcatgggtcagtagcatggcagccagctc

SEQ ID NO: 22 - DNA, 122 bp, Homo sapiens
ggttgtagaagatttacatctcaaaagggcagagaaagggggagatcagtgcctatcatccgaaagaaccctgtccaaaattgagtcaagctgaagggaacctcgaggcggtcttggccagg

SEQ ID NO: 23 - DNA, 122 bp, Homo sapiens
ggctcagatattgcagggtgcggcggatggggaagcggcccttcatgggcatggcggcaacggtggcggggccgaccccacgggccgcgagccgagcagcgacgagaaaggactagctagca

SEQ ID NO: 24 - DNA, 122 bp, Homo sapiens
tttgtgggggaactagagatgacctttagcctcttaaatgggccagccctgaaagagcttcgaagagcaggagagtagttacaagctggccaacaggacattcacctcttgatgaattcagt

SEQ ID NO: 25 - DNA, 122 bp, Homo sapiens
cctgggacgtgctgggagggagggaacgcggtcccccggggagtcacatgcccccattcccggggtcacccagggacaacgggcaggaatagacaggtaaggaccctgcagctgagcgagcc

SEQ ID NO: 26 - DNA, 122 bp, Homo sapiens
agcccagggcagccttcaggtgcagaatgatctggccccaaatgtcagtcaagccaaggtcgagggaccctggtccgggggcacagacaccaaataggacaagccaatgaactcaaaccgtg

SEQ ID NO: 27 - DNA, 122 bp, Homo sapiens
ccacctcacccgcaaggcggcacgagccggaatcttccagtctcaggctgtttgttcccccgcggggcaatgcgactgcgcgtcgcttcctgattggccgagagttgcgggctgcgtgcgca

SEQ ID NO: 28 - DNA, 122 bp, Homo sapiens
gcctactatgagccagtttgatatggatcgcttatgtgatgagcacctgagagcaaagcgcgcccgggttgagaatataattcggggtatgagccattcccccagtgtggcattaaggggca

SEQ ID NO: 29 - DNA, 122 bp, Homo sapiens
taggtcaggagaatggaggtcattagcaagggggaccccatcagagggtagccctggatccggggatctatgaataagggtcaaaggaatcaggaagagtcacagggttcgaagggtcttca

SEQ ID NO: 30 - DNA, 122 bp, Homo sapiens
tgaggacggggacacagccgcaaatagacctggtgccttcctgagtcagcccctttcaggcgagggtgaccgtgggctcctcctccctctcagagcctccccatggggtctccctccctcct

SEQ ID NO: 31 - DNA, 122 bp, Homo sapiens
tatctagtaaattcctactcatcctataaggctcaaaacaaatgcctctatgaaaccttccgtgattccctcaggcagagttaagagcttcctttcctgggcctctatctccttccattagt

SEQ ID NO: 32 - DNA, 122 bp, Homo sapiens
cggcggcgcggggccctttggaaatagaatagccaatgtaatctgacacttcaacttgctcggctccgggcgagttgattcacttactcaccccctaacgccgagttccttttcactgtctg

SEQ ID NO: 33 - DNA, 122 bp, Homo sapiens
cgccgttgggtagcaggaggtagagcctaggcgagagcctggtgcgcccacgggtttcgccgaagagtgcccgggggagtgcgggcagggtcccggctgcgcagacctgcgggtgcccgccc

SEQ ID NO: 34 - DNA, 122 bp, Homo sapiens
gtcaagactcaattgcctgggtgctgggtattcacttcagtctgaatatgctgtctacagcgtatgtttgcccagtctagtctagtctcccttaggctcctctagctggccaccagcttgat

SEQ ID NO: 35 - DNA, 122 bp, Homo sapiens
tgaagcccaggcctgggccactacggccgccgccggcccgctgccatggtcgccgccggccgccttgcagtccctcagccagctcccggcgcacacactcccgcgcggccgcccgtctccgg

SEQ ID NO: 36 - DNA, 122 bp, Homo sapiens
cctggcttcctttgagcatttgaatcacaggctgctcagctgggtgggaggtgaggaagccgcactcacaagtcgcactaacgcaggctgcctcctccagggcgacggccggggactgcctg

SEQ ID NO: 37 - DNA, 122 bp, Homo sapiens
acctggcgggccctagggtggagacccgggcggggttggggggtactcgcgaatctgctgcgggcgcagcgttggggtgtctggtccctgcccagccggtaggccgcgtccgccgtcccact

SEQ ID NO: 38 - DNA, 122 bp, Homo sapiens
aaatgggagaactctttagaagcaagaaccttaggtcttcttgcttctaaaatggaaaatcgtgatggaaaaaagagctcccacagtatattaagcatgtgtgtggtacaaacattgagcaa

SEQ ID NO: 39 - DNA, 122 bp, Homo sapiens
caagctttcattgtctctctccccctcccctcttcctgcccttatttttaacagcaggaacgaatttcatatacacctccagagagcccagtgccgagttacgcttcctcgacgccacttca

SEQ ID NO: 40 - DNA, 122 bp, Homo sapiens
ctctctttcaggccagcgccaggcaggtggacagtgtttccagtggccttcctgtggcctcgacatggtcagctcccgggctgcctctgtggctagctctgggaccttcccaggtgccacat

SEQ ID NO: 41 - DNA, 122 bp, Homo sapiens
tttagatggtgtaaggcaagtctggccaccaggtgacttgatttacattcgttttagtttcgctcagaaagtatgctgtgcatctaccaagtgctatgatgtacagaggcctggtccgggga

SEQ ID NO: 42 - DNA, 122 bp, Homo sapiens
cacaacaggaaggtagctctgttgtgagcaaacacaagtaatggatactgtaacttcacccgaacaggacaaactcacaaagtttaagaaagtgattatttctctgaggactggaacagaat

SEQ ID NO: 43 - DNA, 122 bp, Homo sapiens
agtgtaacaaaccacccaaagacttagtggcttaaaatagtcaccattggccaggcacagcggttcatgcctcccagtgctttgggaggccaaggcaggaggatcacttgaggacagtagtt

SEQ ID NO: 44 - DNA, 122 bp, Homo sapiens
cagaggcaccgccccaagtttgttgtgaccggcgggggacgccggtggtggcggcagcggcggctgcgggggcaccgggccgcggcgccaccatggcggtgcgacaggcgctgggccgcggc

SEQ ID NO: 45 - DNA, 122 bp, Homo sapiens
gcgcggcgcgggtaactgtggctctggaatagtgccccgtagtccccgtcgaacgaatagcgctgctgcggcctcggccgggccgcggctcccccaggaactagagctagagtagggggcgc

SEQ ID NO: 46 - DNA, 122 bp, Homo sapiens
cccacacttgctgctatggagaaaagtgaaaggaaaagtggggtgaccagatatagacaccgcaataactagggagagatgatggtggctttgataggattatagtggtcaagttggtgagc

SEQ ID NO: 47 - DNA, 122 bp, Homo sapiens
gggtaatctcagggtgagacgaggctagcgcgaggtacggctagagcgtcatttccggctcgaatgcccggcagccgtggcggctagagcgttcctccccagctcgaatgcccggcggccga

SEQ ID NO: 48 - DNA, 122 bp, Homo sapiens
tggagccatagtcagtcagggagaattccaccttcacaggtggcatgctggcattgtccacggactcagagggcgcgtgctgcacaactgccactctggcgaagtgctgggaggccttggga

SEQ ID NO: 49 - DNA, 122 bp, Homo sapiens
gcacctggggaaagtctggccactacccttgtaagatgactgggcaccaaatctcagggccgggcagagctaaaacagaagaaaagcaagataaatggctggaaaaatctagagactggacc

SEQ ID NO: 50 - DNA, 122 bp, Homo sapiens
cggggttctggaagcagggagggcagaggctggcccagcctatgggagaccctgcagaggcgtggcctccaggctaatcctaccccagctgccccagggcgggatttcttttcttttttcct

SEQ ID NO: 51 - DNA, 122 bp, Homo sapiens
gcaacgcctgcgctcaccaggagtaggagtcattacgtgagcccttcgcggccccagcgtcgccaggagagcttccagcctctctagaatcactactgcgcacttcctggacagcagtctcc

SEQ ID NO: 52 - DNA, 122 bp, Homo sapiens
ctcgccgggccccggcagacccaggacctggcgctctcgccaccccgttcctccctgctccgaactcccaattccgtgtggtgagccccaactgtcccgggctgtgtacaacttagagggcc

SEQ ID NO: 53 - DNA, 122 bp, Homo sapiens
ccgctgtcgaccagcgcagaataatgccacttttgattgcaaagtgctatcaaggaaccacgctctcgtctggtttgatcacaagacgggcaaggtaatgtcaccacattgtccagcggcat

SEQ ID NO: 54 - DNA, 122 bp, Homo sapiens
tagccagaaccctatccaagcccaagagatcacagactgagtatttggggatggtgtctccgtaagctgaacaaatgactgtgatagtttgcagtagtgatagaaggtgaaaccatctcttg

SEQ ID NO: 55 - DNA, 122 bp, Homo sapiens
tcttcgtcctgggagaaggcgaagcaacttccaggaggaaacgggcgtttccttcccacgcgctcgagcgagccctgggtcctggcctcggaactccacccagcccctccccaccctctggg

SEQ ID NO: 56 - DNA, 122 bp, Homo sapiens
ttcgttagttagagacagtccttgtgtgctggctttcccagatcctggttgtagcagttacgtacttggtgtgtgggaaggtttactgtctcctacagggttggaatggcaggaatctcttt

SEQ ID NO: 57 - DNA, 122 bp, Homo sapiens
cctccccgccgggcgcagagtggccccgggaagggccgggacctcggagagggacgcagacgctctgatcctaagagccaggcgtctctgagggtgtcagtggggaaacaggcccagagcgg

SEQ ID NO: 58 - DNA, 122 bp, Homo sapiens
ggagttacttcaggagccttcacatgagccctggcttgggctcaggcatggaggtgctgccggacaggtcctctggacgcaggtgagataaccaggtttatctgggtggagctctgagtctc

SEQ ID NO: 59 - DNA, 122 bp, Homo sapiens
tactctacctccccaacacgatgtcctcctcagagacggacttgctttaattctcactagcgaagaagtggagatggacatggcaagagcatgtttggcttttcactgggcagttgctggct

SEQ ID NO: 60 - DNA, 122 bp, Homo sapiens
aggcgggcagctaccggcaaaacccaggtgagccgccttcccggcaggcgggggtgggaacgcagcaggggagggtcctgccaagtcctgactctgagaccagagcccacagggtacaagac

SEQ ID NO: 61 - DNA, 122 bp, Homo sapiens
acactttccttgcgtggaagagctataacccagggacctgagtgcctctctgggaatagtcgggggaacctatttgtgggcattgaaaaagttttttcactttctatggtgatgggagcctg

SEQ ID NO: 62 - DNA, 122 bp, Homo sapiens
acctttatggcagagacggtggattcgagaatgcctatattctcatgctgctgcaaacagcgggtctccctccacattgccctccctgatcctaccacgcacaggaaaggattaatccatcc

SEQ ID NO: 63 - DNA, 122 bp, Homo sapiens
cctctttttgcctcagctcgggagtgtcacctcgctatcccactccaggcggccgccagtcgctggagcagccccaacccgtagacccgagtggtcctcaccttgcgcattcctaacccgac

SEQ ID NO: 64 - DNA, 122 bp, Homo sapiens
ggaccacactgccatggcaacagcgtgcctctgcgtcctccatccgggcctctctaactacgagagcgacaaaaatctgcgcaggcgcatgcaatatcctcagaccaccgacccctcccggc

SEQ ID NO: 65 - DNA, 122 bp, Homo sapiens
gtccagttttctaattgtttgctatagaaatgaaagtctagtatccgttacttcatccgccgtgagacagaaaaccttcagccatagaccaggatccctaacccatgctcccacaagagttg

SEQ ID NO: 66 - DNA, 122 bp, Homo sapiens
aggggctgacagggaggcccgggtggacaggcaagaagagctcatcctctcccaggctggcggctgagagaggcctgcgctgggggccggaatgtgtctcaaggcacagcccgtggggagac

SEQ ID NO: 67 - DNA, 122 bp, Homo sapiens
tggtactagaggcccagctccgtgcctgtcagcagaacaggggttactgagaaccaaggacgcctggcttacagtgcgcagccagaaggagatgtggcaatgtgattccttttgtaatctga

SEQ ID NO: 68 - DNA, 122 bp, Homo sapiens
ccaggtgcatcacctggtcctggaacatggcgccaccgaaggcccagaagcaggtgaacacgaagtacagctcgtacagctccctgggggagtcggggggcacggtcttctccgtgagcagg

SEQ ID NO: 69 - DNA, 122 bp, Homo sapiens
gcagcagccaccctggttttgaaatttactttgtacactcacccagtggcccctttcagacgccgcgacacgacctccccccatctcggactccctgcctctgggttctctcggcggttgac

SEQ ID NO: 70 - DNA, 122 bp, Homo sapiens
aagaatgcttagatcgtgagagcatcctgccctgggaccaaggatttgagaatgagggcacgagtcggggtgctacttccttccttgttcatatcacctatttccttcttaggtgcctggta

SEQ ID NO: 71 - DNA, 122 bp, Homo sapiens
cctgcgtctctgcttgcgccatttcctccagcctggagtgtctccgcccttcccgcctcccgtctccgagcttcttaaacacaggccttgggcctacggctctgggggtacttgggggggcg

SEQ ID NO: 72 - DNA, 122 bp, Homo sapiens
cagtgccctgcacacaacagacacacaatattgattgattgattcattgagatggaatctcgttctgttacccaggctggagtgcaggggtgcaatcttggctcactgcaacctccacctct

SEQ ID NO: 73 - DNA, 122 bp, Homo sapiens
cttccccgccgtcacagttgcagctgacggccccgcggatccagccaactagaaccccaacgggtgcactacacctgagaacaggttcccacagcttcctgttggggacaacgtgagggatg

SEQ ID NO: 74 - DNA, 122 bp, Homo sapiens
caccatggccgcgaatgtgagtatccccgggccagccgggccacacccaggcttccccgtcgccctggggcttttccccggggtcctctaggtccatttcgccgcctggagctcctccgtgc

SEQ ID NO: 75 - DNA, 122 bp, Homo sapiens
tgcctcctagaaatgttgaggactctaaggatgggtaaccaaaccaagccattcaaatcacgggcattccttgggttgtttttgttgtttgttggggagttggtgtggtgtgtgttaggcaa

SEQ ID NO: 76 - DNA, 122 bp, Homo sapiens
ggtgtgatctgccactcaagttaattatcacaggctgcttatacacaggaagagaggaagcgggaaagaactcatgaccttgcacagggatgttttataaaattctctaaaatttaaactac

SEQ ID NO: 77 - DNA, 122 bp, Homo sapiens
tgcaaagtggagcgggggtggggcggggtagcggaactcatgcgctgggcgtcagaaacccggcaggggaatggggtcccagattccgggcacgtgcacatgggtgaagaagctgttgaaaa

SEQ ID NO: 78 - DNA, 122 bp, Homo sapiens
ggagctcagctcagctctgggagggaatggcactgagtcagcggcatcaaatggaattcccgcgttggcctggagaggcgctgcagaggaccctgcacatctggtcgttctcagtacttcca

SEQ ID NO: 79 - DNA, 122 bp, Homo sapiens
tcggtgtgtccgggtgcgagatcatgtcggtgaacctggggttgtccgcggcgtgcgggccggcgagcggcggttccagcgctcccagcggcgtcgagccggggccagaggccgccaggaag

SEQ ID NO: 80 - DNA, 122 bp, Homo sapiens
gacctctccgcgtttgtatcgcggcgattggcaacataactgccttatttacattaaatacgccacaaggttacagcgcggatcaacgtcatttgatcgctgatgactcccttaaacgcccg

SEQ ID NO: 81 - DNA, 122 bp, Homo sapiens
ctggaaggctgggctggcccatatggctgggaatacgttgccagcaagggcaagtgctcacgcgagcccggcagccggctgtgacagcttcacgctcgccaaccaggcctctggcttgctcc

SEQ ID NO: 82 - DNA, 122 bp, Homo sapiens
atctttgccttgaggacacctgagaccccaaagccaggccacagtgaggaccttcatgcccgggactcaagggatggaagtccaatgccataatctcttctgatcttgagtccctgggccca

SEQ ID NO: 83 - DNA, 122 bp, Homo sapiens
agtacatacctttatcatcagcttgacaacctccacagtttcatctgctgaaacatcaaacggttcaaaagatccttcaaaggcgatgaaaatcctcattgtacaattaccttttcaaacaa

SEQ ID NO: 84 - DNA, 122 bp, Homo sapiens
gagttggcagctgaagtgtgtggtggccgcaccgtcctgtcagcctgcaacaaaggaggccggcctggcccggccctcacgccaaacggctcccctcccagggacagctccgaaggctgcct

SEQ ID NO: 85 - DNA, 122 bp, Homo sapiens
cgtgcgcacaccccccacaaagggccggggccggggtgggagtcggcttacagggcacagcgcggcgcaggcccgccctggaatggccgtgaacttgttgtttttccacgtcatttgctctc

SEQ ID NO: 86 - DNA, 122 bp, Homo sapiens
tagtgagcatagtaacggacaggtagttttttgaccctcaccgtcctcccaccctccacccgtaagcagccccgctgtctgttgttgctctctttgtgtccaagtgtactcaatgtttagct

SEQ ID NO: 87 - DNA, 122 bp, Homo sapiens
cacgtcctgtgaaaggaagtgctcctctgatgaccaatcagcggcgagaagctcttttaacgtccgtccttctttcacgcctccttccccgcgctttggttcgtgcgtccgcgccccagtgt

SEQ ID NO: 88 - DNA, 122 bp, Homo sapiens
agcggattgcttgagtcccggaagctgttcaagaccagcctggctaaaatgacgaaactccgggcgggcgcggtggctcacacctgtaatcccagcactttgggaggccgaggcggacggat

SEQ ID NO: 89 - DNA, 122 bp, Homo sapiens
ggagaggtgtgacaaattacctaaaatcttagcagtttaaagcaaccatttcattgtgctcgtggaatctgtgaggtcaggaattcagataaggcacagaggagatggctgatgtctgctcc

SEQ ID NO: 90 - DNA, 122 bp, Homo sapiens
aaggagcctgaaattctattaacttaaggtggttctttgggacattagtcaccatcttctcggtttgctgagtttctgaaagaaacttgccttccttaccccaacaccttgtttctcaactt

SEQ ID NO: 91 - DNA, 122 bp, Homo sapiens
gagttcttttgggggctcataaagtttccctttttcccccaccattctcagctaatctttcgatcttgtctcctcatggtcacaaggtagaaggtgccacatcctcagcccagaccctgagc

SEQ ID NO: 92 - DNA, 122 bp, Homo sapiens
ccctgcagcctacaggggtcacctctcacattctactctccagcgtatgacaaccctggacgaaaggcaaatgtagccctggagcctgcatgtggcagccgcagccactcagggctgggtgt

SEQ ID NO: 93 - DNA, 122 bp, Homo sapiens
ggtggtggtggtggtggtggtggtgccccctgtgatgctggctggcaaacatgccctcttcgttggggtatcccgcgattatgcaagatgaggaagaagtagagagctcggggtaagacata

SEQ ID NO: 94 - DNA, 122 bp, Homo sapiens
atgctgcggctggtgaggccgggccgcggagggcgggaggctgatgaagctgctggggggcgggagatgtgggtgtgaagtgcaaagctgaacgcctgtttgcttttcaacctcgctttgat

SEQ ID NO: 95 - DNA, 122 bp, Homo sapiens
agaatgtaatatacacaatcaggatgctaaaccaacatgaggtgttcctcttagatataacgtgcctgcgatttgctcaaacctggcaaggaaggtaaaggcaaggaaaagtgaatttttac

SEQ ID NO: 96 - DNA, 122 bp, Homo sapiens
gcatgacccaccgcgcctggcccaccattattcttagtaagaagctgctccttggccgggcgcagtggctcaagcctgtaatcccagcactttgggaggccgaggcgggtggatcacgaggt

SEQ ID NO: 97 - DNA, 122 bp, Homo sapiens
cgacttctgtctctccagtccctgaccgtagagacagagaaccctaaaaccgaagcaatccggacttccaggtcaactttgcccggtttctccagttgtgaaactggagatcccgacgcgtg

SEQ ID NO: 98 - DNA, 122 bp, Homo sapiens
cacgctcttttttgagaaaccagaaaccatcatcagtagccacaaagtacaggagctgctcgcctggggtccttcctttgggtcaacataaacatgccttactgttggtttcctcttctatt

SEQ ID NO: 99 - DNA, 122 bp, Homo sapiens
gaggatcgccccccaccccaccccgggacttccgaagccccctctcatctagtctcccaacgttctcccaggacacccgccctccagccgcaagaactgtcatcccccgcccctgtccccgt

SEQ ID NO: 100 - DNA, 122 bp, Homo sapiens
tgccaccggcatgcctaggagccacagggagcatgcgggctgggcagtgatgggaatgaacgtgaactccagtcctgccccaagaagtcctccggcccctccttctcaattcagggcacaaa

SEQ ID NO: 101 - DNA, 122 bp, Homo sapiens
cgaagcccagctggcggcaagccactgtggcctcctggatagcaaagttgtcatcacacacggtgccccactggccctggtgcagcacctccaggcggccctcctctggcttgctctctggg

SEQ ID NO: 102 - DNA, 122 bp, Homo sapiens
cgcgtgggcgcatcgcgggcgggcagggcctgaagtgcaggtgcgggcagcggaccctggcgggggctgggaggacaggcgtggggtcccggcagtgaagcgggttctagaggcgcaggagc

SEQ ID NO: 103 - DNA, 122 bp, Homo sapiens
atctgagtcacggaaacccctttgagtttggttgtgatggaaatctggggttccaggtcccgctcctggtagccttttttggcgaggagcgcccacctgggaaggagaagatgggcagtgtg

SEQ ID NO: 104 - DNA, 122 bp, Homo sapiens
tccatacagttcttaaaggaccataataactgaaagccctttctaactctcctttgccagcgccagttcccaggttaccaacatacaccttggtttctgtttaaaaacgcaaatagaagaat

SEQ ID NO: 105 - DNA, 122 bp, Homo sapiens
tgagcaaattcgattcacggtgtctggggtacagccctgagggttcactggccacctctgcgcaaggaccagtctccgccgctcccctcatctccacgcagattcttgcccacacacctccc

SEQ ID NO: 106 - DNA, 122 bp, Homo sapiens
ggcacctgagtggcttgccgcccacagttgtcacacagtggcggatttgggaggcttcctcgttctgtggccccctttccgcacagtagtggagtgatccttgtcagaaggagttggctcag

SEQ ID NO: 107 - DNA, 122 bp, Homo sapiens
gacgctgaaggccagagtgggccagagagctcgccactcactgacctgccagaggagaggcgcactttcccaagaaggggaactggggtggtccaggccaagccttcagaggttcaatcggt

SEQ ID NO: 108 - DNA, 122 bp, Homo sapiens
tctgtttgcaggggagtgtggccctgtggcctgggtggagcagtcatcctcccccttccccgtgcagggagcaggaaatcagtgctgggggtggtgggcggacaataggatcactgcctgcc

SEQ ID NO: 109 - DNA, 122 bp, Homo sapiens
gtggtgtcatctcccctgggctcccatcttggccgtgtggcctcatctctcccgggctcccgtcttggtcatgtggagtcatctcccctgtgcacagacagagaaatccattgtgcaaaaag

SEQ ID NO: 110 - DNA, 122 bp, Homo sapiens
cttgagccaagagtaaagaattcagaaggcctgtcaggtgaagtcttcagcctcccacagcgcagggtcccagcatctccacgcgcgcccgtgggaggtgggtccggccggagaggcctccc

SEQ ID NO: 111 - DNA, 122 bp, Homo sapiens
gaggccaggagaaccggagccctgccatctgctgagagggtggtggcttctcctccattgcgttggcctccctcctgctctggcccctgccccgccccagccaattaattgctcactagtat

SEQ ID NO: 112 - DNA, 122 bp, Homo sapiens
tgctgtaacgttgacttttcaggagtggcagtagccactggaatagagagtctcccctgccgtttccttggcaaatcatgttattttccaggctaaaactccactttccctagcacttggaa

SEQ ID NO: 113 - DNA, 122 bp, Homo sapiens
aaatgagaagtgctttgctctctgagctctggtgatacagcttcccatggggcaggctggcgaaattcgagtggagcctgccactcgggacaggaaagtgactgcttaggttaataagttcc

SEQ ID NO: 114 - DNA, 122 bp, Homo sapiens
cttcttaacaaccctaacaaaaagacaacatcattgtccctgtttcccagtggagaaaaccgagacactacgagattaagtgacttggcccaggctgcacaggttgagggacccggatgtaa

SEQ ID NO: 115 - DNA, 122 bp, Homo sapiens
gaagcaggggcccgggccctcccgtgactacagccactctacaagactatccaggacctgcggtacaagattcttggtgccaccattgagaactccaggattgtcctggagatcgacaacgc

SEQ ID NO: 116 - DNA, 122 bp, Homo sapiens
gaagagaagaggagagaagagaagagaaagctaaagaaacctgaggaacactaacatttgcgggtcaaaaagaagaactcaaaaattagacaaaaatgattcaaatattttcctactgactc

SEQ ID NO: 117 - DNA, 122 bp, Homo sapiens
gtctgcctgtgtgagccctgccccatgtgccccgttcactaggctgtgagctccagcaagcgtgtcttctcagcacctagtccagcacccagcacacaatagatggtcaatcagtgcccact

SEQ ID NO: 118 - DNA, 122 bp, Homo sapiens
ttataaagaacagaccaggagcctggaagacgcaagagctcgagtatcgagtgcccaacacgtttcagcactgcttttggtgcaagcgttagagcagtgagaaaatccccgccctctcctct

SEQ ID NO: 119 - DNA, 122 bp, Homo sapiens
cacagctttttgtagcacttcctctcattataaatccctgagctggaagaaaaacagaaacggcctatgtaccctctacctagcacactgaagtgcagcttcctgcacctccagggcaagac

SEQ ID NO: 120 - DNA, 122 bp, Homo sapiens
atccagggtgtttgtgaaaatactcatttataagctgtaccccagacctacttagaatctcgaaagctggatataaggaatttgcatttttttcctactaattcagttgatttttatgcatc

SEQ ID NO: 121 - DNA, 122 bp, Homo sapiens
gggccccccgcagagggcgctcaccggaaatgccggcctcggcccgccgtgtgcagcagccgcccgtcgggcagcaccacctccaggttgagcacgttgtcccgcatggtgccgtagcggac

SEQ ID NO: 122 - DNA, 122 bp, Homo sapiens
ccagcggggtcggctttcatttgtctcctctgcccgaaatggatggcccccactttaactcggctgctgcccctcgcttgttctgctgctgccctccagccgtctgttgcttccctcccccg

SEQ ID NO: 123 - DNA, 122 bp, Homo sapiens
tcggcttctgggccgagtcccactcagggccattcaaacgcggccgcgcgcgcggcctgccgggatagctgggaaaagtcttaacaagccaattagctcctcagaatgcctacagaatcccc

SEQ ID NO: 124 - DNA, 122 bp, Homo sapiens
ggagttcagggtcctagagggacagcccgagcccaccatcctctcctcccacagcacctgcgcctgtcgctgacagagcggggccagtgccgtgtgcagcacctccactttccctcggtcgt

SEQ ID NO: 125 - DNA, 122 bp, Homo sapiens
ttgccctctttatttagctccaactgaactgagagatagagatacaaagcatccattatgcggtaccatttccctattgatggtattaacagtagttggtgccattgttagcgttaggcctc

SEQ ID NO: 126 - DNA, 122 bp, Homo sapiens
cccaggacctcccgcagcgctgacaggcggggcgggtgcaaagacggggcggggtctctgcgcccggccccctcccctgactatcaaagcagcggccggctgttggggtccaccacgccttc

SEQ ID NO: 127 - DNA, 122 bp, Homo sapiens
aaagaaagagagagaaaaagaaaaagggagaaaggcaacagaggagaaggtcaggaaagccgggaacaagtcagcagccagaaactctccagcgatctgccaagggggagagggtagttgcg

SEQ ID NO: 128 - DNA, 122 bp, Homo sapiens
acccagaagcccggggtcgggctgtggctcagccctgactctggcccatttctcatcctgcgcaccggagggacgctcaggaaatcgctggtgtgtgtggagaaagcagaggagacacacac

SEQ ID NO: 129 - DNA, 122 bp, Homo sapiens
tccaaaacctcccacctcggggtctcctgaacgtcccaacaagctccttgggcccttaggcgttaggccaaccccaggcctcggctggccccgcccactctccgcggccggaagtggcggcg

SEQ ID NO: 130 - DNA, 122 bp, Homo sapiens
ggttgggggggacgccgaggtggagggaggagggccgggccccagccaggaagctctgggcgtgggcagggcttgtgggaatgatttcattggaaaggcctgcgatattttttcccctcctg

SEQ ID NO: 131 - DNA, 122 bp, Homo sapiens
aaaaaacaagttaaaaaattagccagacatggtggagatttcagtgagccatgatcacaccgttgcacttcagcctgggcgacagagcaagaccctgtctcaaaaaaaaaaaaaaaaaaaaa

SEQ ID NO: 132 - DNA, 122 bp, Homo sapiens
aagcatcactaatgtcttaagatgaccaggcagaggaaagcaagggctacacagaaaacacggaagagccccatatctcaacaaaggaagtgatactgcaaaggatttcatgacagaatttc

SEQ ID NO: 133 - DNA, 122 bp, Homo sapiens
tgttcacttattttcttccaatcaccattttctctttctcctttttttttggttttagatcgttataagttttacaatggactctcttgttacagcaaacaccaaattttgctttgatcttt

SEQ ID NO: 134 - DNA, 122 bp, Homo sapiens
cgcgggggtagcgacacgggttaccgaggcccggggcagtaatgccagcttgcccaaaatcgccgccgctgtcaccccgccgggaaacccgagagccccgtgcggacccggaccccccggcg

SEQ ID NO: 135 - DNA, 122 bp, Homo sapiens
gtggtggtggtagtggtggtggtggcggccgagacggcggcggccattttggtgaggcctcgggagcggcagcggcggttcgctgggagtagcgtctgccctttttcccacccaccgtccgc

SEQ ID NO: 136 - DNA, 122 bp, Homo sapiens
ctgggcgctgcctatggcacagccaagagcggtaccggcattgcggccatgtctgtcatgcggccggagcagatcatgaagtccatcatcccagtggtcatggctggcatcatcgccatcta

SEQ ID NO: 137 - DNA, 122 bp, Homo sapiens
ctgctatttacagaagtttcttcagtaggcagacgaagagtgtgttggggcaaaggggctcggttggaggcatttcccataagactgagccctctcatgggggttttgagtttgtagtgctg

SEQ ID NO: 138 - DNA, 122 bp, Homo sapiens
tgggtactcagggtgcgatgtgtacacagatctgaatgcagacgcacgtgcccatgagcacgcacgtccagagagacgcacgtctgcttatccacaaggtgcacgcgtgtctggatccgcac

SEQ ID NO: 139 - DNA, 122 bp, Homo sapiens
gacgcccaccgcctccccttcaccgccggcggtcaaacgccctagccagtcccgcgagggcggaagtctcccacctgcgcctcgtacggtaggaagtgcccgccagggctccaaagcgcctg

SEQ ID NO: 140 - DNA, 122 bp, Homo sapiens
agcaggcccagcaaggaggcagacaacactgtcaagatggccacacaggcccctggtagtcggggctccctgggtgactctgatggcaagcatggtaagtgtatgtgtttcccagaggtcag

SEQ ID NO: 141 - DNA, 122 bp, Homo sapiens
tgacctgcctgggcttggaacaaacattgcaagggtgaggcaacaccccaaggtgtgggccggacggagctgccacagacatcctcccctgctctgtcctccctgcctcacatcctcccctg

SEQ ID NO: 142 - DNA, 122 bp, Homo sapiens
cacctccaccttaatcaagggatcaagatgagcatcaccagtcctggcacaaactggcatcgcatgccacctggttcttttgtgatgccaaaaaaagaatccagcttcacccctgggttgct

SEQ ID NO: 143 - DNA, 122 bp, Homo sapiens
tctaattgagtaataggctaagaggacctgtgcggagctgaagacagacgcctcaaatcgcgggggcacagggagagcggtcagatgtcctgcaggcagaaccccaggggaaccactcccag

SEQ ID NO: 144 - DNA, 122 bp, Homo sapiens
tgtttatgtaccaataatgactcttacccagcgcatgtctttatcagtgtgtactcgtgacgatttgtgtgaaaatagacttgatgtttataattaataccattacaactgtataataaaag

SEQ ID NO: 145 - DNA, 122 bp, Homo sapiens
acttcagtatgaagtaccacccgttacatgaaaaccgatcattggccttcaaatttatggcgctttaatggggcaagcccagtgccttaaatacagggtgcattacagtattgagttatctg

SEQ ID NO: 146 - DNA, 122 bp, Homo sapiens
ttgcttgaggcccaggaccaaactaaagagggtcctgccccaagaacagggagatggctgcggattttcagcataccttgggttctccaatggggcaggggtgcctggcttgccagggagca

SEQ ID NO: 147 - DNA, 122 bp, Homo sapiens
cattgaggaacagaagactgtaccactaaaaaacaaaaatatgccactaaaaacggaaaacgagaatttcttcaggttgaaaaagattatagtctaaggctttacaggataagaaatgtcag

SEQ ID NO: 148 - DNA, 122 bp, Homo sapiens
cggcctctctgtcatagtagccaccgttctgccactcatgcagctttctaagacacctctcggttccccagcgctttcagtggggcggccggccattcccgagggttgcaagaggaggcccg

SEQ ID NO: 149 - DNA, 122 bp, Homo sapiens
cattcataaaggtgggagcacagagaccccatactccaagtagctgggtccctctcttgtcgcttttaaaggacggggtgctgggtttggggggccagtgagagggataagaggaggggatt

SEQ ID NO: 150 - DNA, 122 bp, Homo sapiens
atttcttggtttctcagtgcatagaaaacctatgattacactatactgtggtctactaagcgtgcaatagtattatgtctaagaaaacaaggtgcataacttaattaaaaatactttgttgc

SEQ ID NO: 151 - DNA, 122 bp, Homo sapiens
agtacagcggtgtgggctcatctccaggacctctctctacggggtacgcccctcatcttgcggtgatcagtgttccttccagacctctcagtccggactgagttgggcaccgcgtcagcgtc

SEQ ID NO: 152 - DNA, 122 bp, Homo sapiens
gtgtgggtggtggtttgtgaggtgggaaagctaaaatgaagaaatgcgtgctcatactgacgttcttgaaaatgcgtagtgacatttttttaaagctttattgagatataattcacatacca

SEQ ID NO: 153 - DNA, 122 bp, Homo sapiens
cgcatcactgggtggggcctggccctgggacgacctatcccaggagggccttttggcagccgggcaggggctggaaagcggcgggagggcgccgcgaggcgcggggctgcggggctcacgcg

SEQ ID NO: 154 - DNA, 122 bp, Homo sapiens
atgcatggagaacagatgtccctgctcccccgctccccgcccccacccagggccagcccccgcccccagctcccgaggggttcccagatccctctgccaatggctgcctggcctggctgttt

SEQ ID NO: 155 - DNA, 122 bp, Homo sapiens
tattaaacagacggggtctggctgttgcccaggctggagggcagtggctattcacaggcgcgatcccactaacgatcagcactggggttttgccctgctcggtttccgagctgggccggttc

SEQ ID NO: 156 - DNA, 122 bp, Homo sapiens
aaaacatctttatattcatttgatatactctatgagtgcatttgcagcctttaaaagagacggttgcttaagctgacactgcagagcattgcaagaagtgttgattaaaatctccacatttg

SEQ ID NO: 157 - DNA, 122 bp, Homo sapiens
ttaagtttgttggccagggtcccacgcaaaaccagaaacaacaacaggaggcggtgtagacgcaagaagaaaaagagcccgaagcctcggcgtcttgatgacgccggacagccagtcatggc

SEQ ID NO: 158 - DNA, 122 bp, Homo sapiens
gtttttgatggtttctaaacacagatcgcaggaaacagcagcagctgagtgatccaaggccggcttcccttccctaaaaggcttcacggcaggtgttatttgaacgcctccagccaccacac

SEQ ID NO: 159 - DNA, 122 bp, Homo sapiens
tctctaattcccacctcctccccggtgcaatcagtcagccaggaggctccaaactgttagcgacaaaaacgcagctctcggtcactcccactaccctcccacccgcactccaggcatatttt

SEQ ID NO: 160 - DNA, 122 bp, Homo sapiens
ctgtgctgtttcttccccctccttcactcctctgtccccaatagtcaccagcttctgaaacgttaccttacacacacatctgctggggatcttgttaaactgtagattctgatttaggagac

SEQ ID NO: 161 - DNA, 122 bp, Homo sapiens
ctggcccccgagtgcgggaagggccggcagggaggcggagcggaagccgagtgcgagggacgagcggagtaaaatctccacaagctgggaacaaacctcgtcccaactcccacccaccggcg

SEQ ID NO: 162 - DNA, 122 bp, Homo sapiens
caagcccagaggcgcgcccggccccaccgccccctccgcccgcccgcctccggggctccccgcgcggctcggagattatgcaaatccccggcggctccttaattaaatccctaacgaggcgc

SEQ ID NO: 163 - DNA, 122 bp, Homo sapiens
caggggagggctgggagcggccgcgcacccagaggagagcaggctgtccttttagggagccggcattggtaaatgctctgtggttatgcgactattgatttgcctcaccctgaggactccag

SEQ ID NO: 164 - DNA, 122 bp, Homo sapiens
gtcggcctcgtcgcagcagccgttgctagtgccgccggcacccgccgagagcagccaggccgtcatgtcgctgcccaagctgcagcaggtgccggggctgcatccacaggcggtgccgcagc

SEQ ID NO: 165 - DNA, 122 bp, Homo sapiens
gatttcttattgactctacaccaagtattagcaggtagctcagacccctggtacttatagcgcccctgatccttggcacctttaacaggctctgtgcagcctgaatatagttattgtttaga

SEQ ID NO: 166 - DNA, 122 bp, Homo sapiens
gggactcagaaggacctggccgctgccttcattgagtttaaagggacaggattgcccttccgtcaagaaagtatgtaagtgttggactgcacaaattaatgtttttcccacaaccgagactt

SEQ ID NO: 167 - DNA, 122 bp, Homo sapiens
ttgaagtccactctgggtggggagctggcccgggaggcgctggggagtctgtcccctgctcggcagctcacggttccactcacgcctgccagggagccccgaggtgggaatgcgacccgagg

SEQ ID NO: 168 - DNA, 122 bp, Homo sapiens
ggagggggtggttgggtgttggtgaaggaatttggcggggcagagttagactgcagcaaacggaaactagctacacatcttttactgggaagtgtatggatacgcagcaaaatactagccct

SEQ ID NO: 169 - DNA, 122 bp, Homo sapiens
cacgcccgtgcccatgaacctgttcgccacctgggaggtggacggctccagccccagctgcgtgcccaggtacgcgccgcccgccgcgctttgttcccgccgggcacctgctgggggtgtcc

SEQ ID NO: 170 - DNA, 122 bp, Homo sapiens
tttggcagttttatgagattaaagagggtgtagacaggaaattggtagaggatggaaaatcgattaagattagggacaactgtgaggaggaagacaaaggagacagaatctgagagccctga

SEQ ID NO: 171 - DNA, 122 bp, Homo sapiens
ctgattggagaattctccagtccgtccccctagcgcccttgattgggcagggctccgcttcggattaacgtctctgattggacagttccctaggccccgcccctgcctgtcctgattggata

SEQ ID NO: 172 - DNA, 122 bp, Homo sapiens
cagcgtggagctcacccgcgagttgcaaggtacgaggctgcctcggtctctgggacgccccgtccgggagcatcccagacccagcgcgttcctccccgtggtgcatcccagcccggtgtctc

SEQ ID NO: 173 - DNA, 122 bp, Homo sapiens
ttggtttttaggcgagtccggctgtgaagttaccgtcggtggcggccccggggccacctccgctgtcacctcctccaccggcgcccgctacattcaaccggcccaagccgtcggggctggcc

SEQ ID NO: 174 - DNA, 122 bp, Homo sapiens
gccacatgcggtactggaagctctgcttgttctgcggcatgtgtcgggtcagcggcttggcgctgatggcgaaatcaatgcaggccctctgcgggagagaggccagtggtgagagcggcaga

SEQ ID NO: 175 - DNA, 122 bp, Homo sapiens
attctattgttgcaaacacactgcacttagatcctcctaaggccatttcttaatagataacgacaagtgacccagagcattttgggagacaaatgtttttccctcccagcaccggtttaatt

SEQ ID NO: 176 - DNA, 122 bp, Homo sapiens
ggaaggaggaagggaaggagcgctggccaggcagatggagagacgcacagttaccacctccgcccaggctacttccgggcgtgccacaggggcccggccctgccttcagcatctccagaggt

SEQ ID NO: 177 - DNA, 122 bp, Homo sapiens
ttcgggcagagctcggcgctgctgcagcaccagcgcacacacacggccgagcgcccctaccgctgcccccactgcggcaaagccttcgggcagagctccaacttgcaacaccacctgcgcat

SEQ ID NO: 178 - DNA, 122 bp, Homo sapiens
tggagccatgcattttggctataagggaagtagaaccatgtggtggcccctgattcaaagcgtatatggaatcctgtaaaatagagtccatctttcctgggtattgccactcagtcttttgc

SEQ ID NO: 179 - DNA, 122 bp, Homo sapiens
cgttgccacccaggtaagcaggttgcattacggcccgcacagtgtcctgctctccagctgcgcgagagaggccagccgggccgtggcgggtgcacgtatgctgatggggaaaccggttggca

SEQ ID NO: 180 - DNA, 122 bp, Homo sapiens
ccctttgtgttgtttgatggagttcctaatagaaacagtcttccttggggctctccttgacgtcaaagtctgtttttcttttagaaacttctaaaattactagatttaatgtgctcagctct

SEQ ID NO: 181 - DNA, 122 bp, Homo sapiens
gcccagcccatcagggcagtggagtccctgggactcatgactgggacccaagtgcagccccgacatcttctgaagtggaggcaggcaccacagcacatgccctggggcaggagggggcagct

SEQ ID NO: 182 - DNA, 122 bp, Homo sapiens
tgtttgtggcttttccaggtaaatggtgcaagctgtcaatggagctaccattctgggatccggaggaccatggccctcttctcacagctccatgaggcagtggcccagtagggattctgtgt

SEQ ID NO: 183 - DNA, 122 bp, Homo sapiens
ggccgaagccccggcacagctcgcggatcattccgccgccgccggggccgggacccgagacgggctcgctgccccatggcaccccgtcgccctccatcgcctctgcccgctctgtctttgcg

SEQ ID NO: 184 - DNA, 122 bp, Homo sapiens
agcccacggagcccaagttcaaggggctgcgactggagctggctgtggacaagatggtcacgtgcattgcggtggggctgcccctgctgctcatctcgctggccttcgcgcaggagatctcg

SEQ ID NO: 185 - DNA, 122 bp, Homo sapiens
cacggctgcccgctctgccctcgccgcttccgggatgcgggtgagctggcccagcacagccgggtgcactctggggaacgcccgtttcagtgtccacactgccctcgccgctttatggagca

SEQ ID NO: 186 - DNA, 122 bp, Homo sapiens
cacaagcggggagatggcttggcagggagagtcgggaggcacccctcgcccggagacccccgtggggcttggcaaaaaaaaaaaaacccatctcgggcgctgctgggggcggaaaggcgtca

SEQ ID NO: 187 - DNA, 122 bp, Homo sapiens
tcccagagtcgccttatttattccttccagaattttaggcacttggttctccgaaagccccgacgttaagattgactccacctacagcagagggaaggcccttcttctctcttaaggaaaat

SEQ ID NO: 188 - DNA, 122 bp, Homo sapiens
aataggaacacagaggagcccttcgggaggctctcgaggcagtctctttccagtggatagcgacacaccctggtccctaagattctcatgctctccgaattttccgtcctggacccgatctg

SEQ ID NO: 189 - DNA, 122 bp, Homo sapiens
cagacgtggtcgacaggtgcccaggggtggcgggagggcggccctacggtgcaggaaggccgaggcgaggcgtgcgtggccgtcccccgccaacttcgcggtgcattccgccctcccgctcc

SEQ ID NO: 190 - DNA, 122 bp, Homo sapiens
ctgcttttcttttctctcttactccacaaatgcccagtaaaggctaccagaggatgagcacgccactgctctcatgctaactttttgatgtggctgcttcccttgtgcttcaggatttaatc

SEQ ID NO: 191 - DNA, 122 bp, Homo sapiens
acgcccgcctggccgccggcagttcttggtccctccggctgaccgtccaacgctaggcgccgaggccggtgcaagagacagccaatagaaagctgtcttagttggaggtctagtagaggaat

SEQ ID NO: 192 - DNA, 122 bp, Homo sapiens
gcggccggcctgcgcgtcgtccctgcgcaccgcggtggcagtagtcattgaggtagaggtcgccgtcctctgccagccgctgccacagcaccaggtagtaggtgaggttcccattgcgctgg

SEQ ID NO: 193 - DNA, 122 bp, Homo sapiens
tgtcactggggaatcctcacagaccttctacacaaatggaaccaatcttaagaaaatacacgtgtcccctgacttcaaaacatatgtgactgtggataatcttggtattttatatattttac

SEQ ID NO: 194 - DNA, 122 bp, Homo sapiens
tgagtaggcgggagccttgcaggtctgtgggtttctttctcaaaggaaaattgctgggctcgtgaggaacagcctcgggcacttgctctacttggaaagggtgaagagcgcgggctttggaa

SEQ ID NO: 195 - DNA, 122 bp, Homo sapiens
cgccagcggcccctgtctgccgcggtgagttgaggcccagccatcatggtgggcgggaagcgcgtggccctggcggggcgccccgacgggtggggagaagggaggacacggcgtgcaggcct

SEQ ID NO: 196 - DNA, 122 bp, Homo sapiens
aaggcacctaagccagcacgcactctttgattctggctccgagtgggcacccccatggaccgcagccactcctgagccctgggtgtcctttggggacctcaagctccttctcacatacaacc

SEQ ID NO: 197 - DNA, 122 bp, Homo sapiens
cttaagtgatctgcccaccttggcttcccaacaggctgggattacaggcatgagccacagcgttggcctagcaatagacttctgtaaatgtttctagcaacattttggaagttggagagaag

SEQ ID NO: 198 - DNA, 122 bp, Homo sapiens
aaagtttcattttatgacacccaaataaacagccaacctcggaaaaaaatgcagcaattacgggataaactctctgtatcttgggaagatacttcataataaaattaactaaataaatgcag

SEQ ID NO: 199 - DNA, 122 bp, Homo sapiens
cttgtcctgtgtacatttaatgggattttaatcaggccataatgccaaatttctttacttcggaaggatctttatggtgatggtttcagaaagaaattaaagcagagtaacagtggttagca

SEQ ID NO: 200 - DNA, 122 bp, Homo sapiens
tcccctttaaagtcctgccatacaaaaattcttctcttctaagccccaagaaactgtcttcgattaatgtttttcttcatatctcctagaagaaagctacgaatacattctacatattgtta

SEQ ID NO: 201 - DNA, 122 bp, Homo sapiens
gccgggaacgggggcctcccctgtgcctagggaacagcgagggcgaggtgaggcggcggccgaggctcccgccccaccgtcatgctactactcccagctccacccccgccccactcccagct

SEQ ID NO: 202 - DNA, 122 bp, Homo sapiens
tggagtcaggagttcactgggttccttcttcagaggctactctggcactgccaagcaggccgtggcaagctcttaccaccggacacacatggtaggtgccctactggcccccaaagcgccca

SEQ ID NO: 203 - DNA, 122 bp, Homo sapiens
tggggtgccccttcccctcagctttagcaagatcctgtgttttgatgcggtaggcaggtgcgtggttcagtcatgcccaatgctcagaccactcctcacttttcacatccaggaggaggagc

SEQ ID NO: 204 - DNA, 122 bp, Homo sapiens
ctagccacctgagtggtgtcatttcaggaacctaagaataatttcctctcaatttcctgccgtaatgcttgatttttgccctcagaaatgaattcctaagtgtcttgaagactttttgtttt

SEQ ID NO: 205 - DNA, 122 bp, Homo sapiens
gcgcgcttgacccagaacagtacggagttctgcacgagccgggggtggggcctgtctcagcgcgcggcggtggggcggggcttggacacgggcccggctcaacttgagggaggcggggctcg

SEQ ID NO: 206 - DNA, 122 bp, Homo sapiens
cccgtggtgcttgtggagctggtgctgcttgcgcagcttgtagaaggccacgagcatcaccgcggccatgaacgtgatggccacgaagcagccgatgatgattttggtggtcttcatgacgt

SEQ ID NO: 207 - DNA, 122 bp, Homo sapiens
cgaagtccagagaaggtggagagctgtgagcagccagagcgagggctgcaggatggtcagcggcagcctctgctttcctccactccacagacactactcctgtctcttaacttgcccatggg

SEQ ID NO: 208 - DNA, 122 bp, Homo sapiens
tctacaccgagagctacattcctcccgagttttaaatttgtggaccgttgaatatcactccgcctttcataaagttacaaataccttccgtcggtggcgggaacagagtttggaaaattaca

SEQ ID NO: 209 - DNA, 122 bp, Homo sapiens
tggtactgctcaggccacccagggcaggccactcaggccaggcgggcaagggggccgccccgcgagcggagaccgccttccacctggcctctggcaggatgtcccttctgaggggtattttg

SEQ ID NO: 210 - DNA, 122 bp, Homo sapiens
cagcagagtcttcgcaccgaccccgcgtttcgattccccagagcgccgcgagctcccgcccggcctcacacaacttcctccgggtggcacagactgcagcaacagtgactctcctcagcatt

SEQ ID NO: 211 - DNA, 122 bp, Homo sapiens
cacccgggggcctacccaggggaggggtcccgctgcgtgaagggaccctagggagggcgacgtggaccacgacagacaaacgggcactcgaagacccccgaaaatcggccccagcgagccgc

SEQ ID NO: 212 - DNA, 122 bp, Homo sapiens
cctaatcccacacctcagccttggaaatgcacagttcaagtccctctggttctgtgggctcgtggtcccctcagtcagggtaaatccctcattcttgccccagaggcttgtgttcaaacttg

SEQ ID NO: 213 - DNA, 122 bp, Homo sapiens
tggcccgcgaacttgcccgaagccctcgttccctgtcggctctaaccgctggtgtagtggcggagcacgcgaacttagcaagggctaagcgatcaggaataagaacagcaggaaagccagag

SEQ ID NO: 214 - DNA, 122 bp, Homo sapiens
atcagtgctgggctgggtaatgaaactttgtacacttgcctggcacagcagtctcagcaccgcaccccgacccccatttacacggttacatttccccacatcagtgccctgtgcactgagca

SEQ ID NO: 215 - DNA, 122 bp, Homo sapiens
tatataaactcacagcttcaacaggggaaaaatagcatcctcctactgaagtaagaagctcgaaaatgaatgcactatatgatgagttagaaaaaaatcacctccacctgatagacttttta

SEQ ID NO: 216 - DNA, 122 bp, Homo sapiens
cgagtgtgggtagcagagggaggcacggctctcctgccagggccgcacactctgcagtggcgcagagcgcccggggtgctctgagcgcagggcccccagacatcgcggggcatcctgcacag

SEQ ID NO: 217 - DNA, 122 bp, Homo sapiens
tgggaagagacccctgccaggagatgctctctgcataggattggctaagagctctgtgggcggggctcgggaaaaatggggagccgttgccccgcccactcgatacaagttggttggatccc

SEQ ID NO: 218 - DNA, 122 bp, Homo sapiens
ccatggctcaatctgattagatcatggcttataccatgtatctacttcttaattctgttccggttctttggtctgagcatttaggttgcgcctgtggttgcatgcttggttcttctgggcac

SEQ ID NO: 219 - DNA, 122 bp, Homo sapiens
gcagtagaaaacggaaatttgttggctggcttggaggatgcttccactgtgttcttcacacgagccccgggcctgcctgttgggccggttgcgcaccccgggcgcgcgctctcccgcgccca

SEQ ID NO: 220 - DNA, 122 bp, Homo sapiens
gagactcatctgcaagaggagacacaggcagtacagatcaataagcaatctgcactacttcgcagagcattgcatatttatgagcatggtgaggaggttatataggatttgggaaggaggga

SEQ ID NO: 221 - DNA, 122 bp, Homo sapiens
aggccgaacccggcacgttcgcgccgcttgtctttgcacctaagcttttactcttgtatgcggaaggagtaggaaagggttagattattatcttcctgccttttcgttcactctagctcgct

SEQ ID NO: 222 - DNA, 122 bp, Homo sapiens
ggaaccgccctacgaggagaggctgggaggctccgaaaacctggggtagggggagcgcaccggggctttagagggcgcagcggccaagggcaagaaagtttacactcccagaagcttccgca

SEQ ID NO: 223 - DNA, 122 bp, Homo sapiens
aaggtggtgaacgaggagtgccccaccatcacccgcacttacagcctgggcaagagctcacgaggcctcaagatctatgccatggagatctcagacaaccctggggagcatgaactgggtga

SEQ ID NO: 224 - DNA, 122 bp, Homo sapiens
tatacaccatatgaagaatgtttagagagggggatgagcatcaaataggaagccaatcgtcgtcctggctaggatctagcatctcagtgcaaaatgggctatgtaagtgtgcctctgggaat

SEQ ID NO: 225 - DNA, 122 bp, Homo sapiens
agactgccatctatgaaccaggaagcaggccctcaccagacatgagatcttccagcccctcgatcttagacttcccagccttcagaaccatgagaaataaatttccattgttttagtcacac

SEQ ID NO: 226 - DNA, 122 bp, Homo sapiens
ttgggccgccgcgggctgtgggatccccggctgcgctttgcaaattgttccgatgaccgccgcgggccgccgcagcccgagagcagtgaactgtgtgtgacccgggccggccggccctccgc

SEQ ID NO: 227 - DNA, 122 bp, Homo sapiens
aggcaagccctgtagccgagttctgcttgcggttgtttttctttttcctgttctcaggcgcgctgcgggcacctctcggacaaggccccagccgtcgcgggttgccgggcagagtcggacgc

SEQ ID NO: 228 - DNA, 122 bp, Homo sapiens
ttctaggcacttgttgggcagaatgtcacacctgccgatgaaactcctgcgtaagaagatcgagaagcggaacctcaaattgcggcagcggaacctaaagtttcagggtgagatgcgttgac

SEQ ID NO: 229 - DNA, 122 bp, Homo sapiens
gtttcccagcacagcccttctccctctcctctctccacccgatccactaaagagggagcccgaagtgcccagactggcacttaaagagtgaagaaaggcagcagaggggtgagcgccgggcc

SEQ ID NO: 230 - DNA, 122 bp, Homo sapiens
tatgaccatggaacagaaagaaacttctaaattgcaccaagaacctggccacattgacagcgtgccctcactaaatggaatggccagcctagttgacacaggtgaagacaatgtcaaaaaca

SEQ ID NO: 231 - DNA, 122 bp, Homo sapiens
tctctgttgagattcacatcctgacttctgtccgtgggctccactaaaacctgcaggctccggggtccattgccagtcacatagtgacttcaatgagcgttgctgccggcatcctgagcggg

SEQ ID NO: 232 - DNA, 122 bp, Homo sapiens
gtacttgttatggagatctttcttttttcaatggtacctccctatccagaagcaagggaacgatgagattcatttcccataatgctcaaacctctgagccatagtttggagtatacaatggt

SEQ ID NO: 233 - DNA, 122 bp, Homo sapiens
tcaagttactgcttcagatagcgaaataaggctaacaacattatcaactatttaaatatacggtatctcaagaatgcattgtattcaggaaattccagaggtgtagttcagtagacagcact

SEQ ID NO: 234 - DNA, 122 bp, Homo sapiens
cctcacacacccacacccactctagcggaaactgaggcaggcaggctttggaccaggtcccgccgcctgaaggctcgcagctgggatggaacccggactgcgagacgccttccgcctcacag

SEQ ID NO: 235 - DNA, 122 bp, Homo sapiens
ggtttaagtcacatcagttgctgtagcaggatgagccgcagacaaaatctctcaagacaccgagttgtagaaggaagggctttattcagctgggagcatcagcaaactactgccttaaaatc

SEQ ID NO: 236 - DNA, 122 bp, Homo sapiens
aactcttggcatccaagttaaaagctggatcacttcctccaaatagtcttcactcacttccgggagtgggttgtattcacctttagctctgttcacgagacactcgtgggatattcctagcc

SEQ ID NO: 237 - DNA, 122 bp, Homo sapiens
acctctgacccctggaggccgagtcggcagggcggggcacggcgcgcttcagcagctttgcgtgggggcgaggaggtggaggagggcgaggaggtggagaagggcggggaggtgtagcgtgg

SEQ ID NO: 238 - DNA, 122 bp, Homo sapiens
acaatcctttatatgtacttaatgccaaataatttcttgggtaaatagagtaacaaatagcgaggtgtttttcactgaactggttataatttcgctcaatcaatggaactctcttgttagca

SEQ ID NO: 239 - DNA, 122 bp, Homo sapiens
agctccacattttgtcttgaacctgctttcacttggcacctccctgtgggctgagccgagcggaactgcccgtgtttgtcccctgacctgcagacccggggaaccagtgggaccacccgggc

SEQ ID NO: 240 - DNA, 122 bp, Homo sapiens
ggccacactcagctagggattgccaggagaggacggttggcatttacagcctggaactaacggcagttgattggataagtccccccagaccccctttggatggtggaggagcccccgtgtgc

SEQ ID NO: 241 - DNA, 122 bp, Homo sapiens
ccccatggcggacagggccagggccctgctcagctcgcaaacacctttcctctggggaggcggcggggctggggacccgggccgaggagcgccagggccgcccggagaccggagagggcggg

SEQ ID NO: 242 - DNA, 122 bp, Homo sapiens
gtacttgatgaccgcgatgttgaccggcgctgtacaagtgactgccgccagcggcttctccgaggccatggtcccaccgcgcagtgaccccagctccacagccacttacggcccgcgatccc

SEQ ID NO: 243 - DNA, 122 bp, Homo sapiens
ttttcccccacggtgggtccgacccaccttacttcccccatgcctggcatgcagctgagacgcacacactggctctgacaacctccatgtgaatcagacctccaggaaccaaatgattccag

SEQ ID NO: 244 - DNA, 122 bp, Homo sapiens
tgaatgttggagggacacaaacacgcaaaacactgcaaccctgatgcgaaaataagcacacgcaggcaccacgagagaagaaagtcccgggcaggcctgagatccacaccgacgtgcgtggc

SEQ ID NO: 245 - DNA, 122 bp, Homo sapiens
tggggcggggttaggcaggtgagtgacaggctccagggggccggcccctgcctggtgccccgagcgagccgggagtagctgcggcggtgcccgccccctctctccgcccctccagcggagct

SEQ ID NO: 246 - DNA, 122 bp, Homo sapiens
actccagaagcgcaagcggtcagggagttccctttcctagtcaaagaaaggggtgacagacggcaactggaaaatcgggtcgctcccacccgaatactgcgcttttccgacgggcttaaaaa

SEQ ID NO: 247 - DNA, 122 bp, Homo sapiens
catgccgggagccgccggccgccggtgtccggaccgctcgcccccgtttggacccgacttcggttcttctggggtgttgatgctcctaaagcccgagagcacgtgtccagaccctagcctgt

SEQ ID NO: 248 - DNA, 122 bp, Homo sapiens
ccgtggcggccgtgccgaacactagcacctgggggattctctggatcctgaccctctggtcggggctggctcgggccgggagccgggacagtggctcgaagaccactttctgctgcggcagg

SEQ ID NO: 249 - DNA, 122 bp, Homo sapiens
tcccagtctccctccgagcccccttcacgtcccgcccctttctgctcttaaccctgcctccgctccagtatcccacccaccccaggctgtggctgaagtgttcccaagccctcctggcccgg

SEQ ID NO: 250 - DNA, 122 bp, Homo sapiens
gtccaactccgggtctcctgcttttggccactcaggattggacctgggactgatactggtcggccctgcaggcgctgcggacaggggaagcacagagattccccgccgcgttccctggactc

SEQ ID NO: 251 - DNA, 122 bp, Homo sapiens
aggcgtaggatgggtatactcttgcctacatatagcaggacgtgaacaccagagtgggttcggtaagagaagaaagatgagaggtggattgtagagaaacctgtttcaagagcagtcaacca

SEQ ID NO: 252 - DNA, 122 bp, Homo sapiens
gacacaactttttttcttttatgcaaaaagtaggggtggaaagaaaaaagatgcggggggcggggggagttaaaaaaatttctgagaaaactcggaacttgcgctccaggaacgactgcgca

SEQ ID NO: 253 - DNA, 122 bp, Homo sapiens
aaataaacaaagcaccgagagtgctacccccaaccacagcaccctaaccaggtgaacttacggcttctggcattaggtgatcccctgggtccttgcaactccagcctgattgctctgccctc

SEQ ID NO: 254 - DNA, 122 bp, Homo sapiens
taggcagattcccctgggctcagtctactttccacctcttttctcctggggctttgctctcgagactctgctagtctcagactccgctctggagtttctccaggactcagcctccatttcca

SEQ ID NO: 255 - DNA, 122 bp, Homo sapiens
aggacaaaaaggtgcatctcctacctgaagagcaacctggattctgcagactgagggaggcggctctgcttcagggctctgcagtctctgaagtaaaatgagattcaaagctgggaggagaa

SEQ ID NO: 256 - DNA, 122 bp, Homo sapiens
tagcaatgggaaactgatccttatttagtaaatgtttactgagctcctaaatagtaccagcgactcttctgggcactgggaattcaagtatgaacaagtctaacaaattccttgtcctcaga

SEQ ID NO: 257 - DNA, 122 bp, Homo sapiens
aataattatcatcatgtttttaaggggttgctgagcctctggagatctcagtgcacagagcgaagcaggagaggcttaaaaaggaaggctctgctgctgatgctgtgatgaccaaggcagcc

SEQ ID NO: 258 - DNA, 122 bp, Homo sapiens
ccatatcctatgctccattgtagcgctgcaggcattaaccttagtcctaatggttagagtcgtccctgttagcaaaacgactctggtttctaggcgattaagtttctccaagatgggtggga

SEQ ID NO: 259 - DNA, 122 bp, Homo sapiens
gggggccccaaggaccgccctggcagcacgggcgttgcaccagcagagtaaattaaaacacggattagagcaagtatgattggggatgacaagcggggcgggtgtagccgcggaatgagccg

SEQ ID NO: 260 - DNA, 122 bp, Homo sapiens
ggcggaatccgggctccctccgcgggaggaaagacgtcccgcgctctgaagctcgcccagcggggagaggccctcgctaacacggcttctccctgacctcttaatttcaggaggtaggctct

SEQ ID NO: 261 - DNA, 122 bp, Homo sapiens
aacctcaaaacaaggcaatgtaaagatgaataatcatactctgtaggtgatctgcatccacgccaaattttgagatgcgttgaaagaggaagttctttacctctctgccttcaattatttat

SEQ ID NO: 262 - DNA, 122 bp, Homo sapiens
gctccgtaaggcaagagaacccactaggggatgagcccgaactagggatgtgacagagcgcgagacccagcctaaagagagcccggagccagcgtgggaggccgctgccgtcgcgcgccttg

SEQ ID NO: 263 - DNA, 122 bp, Homo sapiens
ggggagggcgggggagggcctgctgcagcttgggttctaactgcccctgcgcaaggagaccgggagaagctggctgcaagggctgggctggccaaggctggggcagttgcaaagggtgggag

SEQ ID NO: 264 - DNA, 122 bp, Homo sapiens
gcaccaacgacggcaaggccctgctgcccgccgtccgcacgctcaagccgccgggccgagcggacctcctctacgccgccgattcgcccgacttctgcgcccccaaccgacgcaccggctcc

SEQ ID NO: 265 - DNA, 122 bp, Homo sapiens
cacagctgtcttcctccctctgtgctgttctggactttaatctgtgtgcacagcttagtgcgtcacaaatagtaactgagtgaggctgttgtgaaagaagcctgtttttttcaggagggcca

SEQ ID NO: 266 - DNA, 122 bp, Homo sapiens
cggagcgggatagaaggaagccgcagaaaagacgctgaaagttggcgctcgctgacgccccgacgcgctccctccatgacgcatgcgcccaccggccgtgagcgcgggtccggtctccggtg

SEQ ID NO: 267 - DNA, 122 bp, Homo sapiens
gccgacccggatgtagacacatgcccccatttgtcactaggatcaggactgtggctacctcgagggctttttggtcaccccgggcattgcacaggactcctgttgttgttgcgatccgggtg

SEQ ID NO: 268 - DNA, 122 bp, Homo sapiens
cagctttcctcacacttgtccggcggctgcggtaattaaagctccgagcgtcatttccagcgctccgcggtctccagctgcagcccacagagaaattaataagactccagaaaaaaaaaaaa

SEQ ID NO: 269 - DNA, 122 bp, Homo sapiens
aggaggagagcactgggaaggaggggagttttggggaaccagggaatgctgaaggagtggcgaacactgaggaggaaggggctccatcaggatgggagaagccggccccactggggagcctg

SEQ ID NO: 270 - DNA, 122 bp, Homo sapiens
ccactgcagcaccacagcccatggagaggcctttcccacacagcttttccccgaaacctacgcacagctcggagaagggcagcctgaaagggagacagtagaccatttctctcatggaactc

SEQ ID NO: 271 - DNA, 122 bp, Homo sapiens
cacccaggagaagagcccccactaacctttcacaaagtagtccctgttgggcccaatgagcgcgttgtaggggtagccgtagtaggccagtgtgtaggggtcgcaggagtacacgtagctgg

SEQ ID NO: 272 - DNA, 122 bp, Homo sapiens
cacctaaaattgactcttcctgcgctcttgagaatgccaagagcacccagtacctgcaaccgccggcatgagtggggcctgcggggagccgccagagctgcggacaggccccctgcccactg

SEQ ID NO: 273 - DNA, 122 bp, Homo sapiens
gggggctctggctgctgccacagctctggaggctgctgctgacctgggccatgaggagcacggaggagaaggactggcagatcccaggtgctgaagatgtgtgtcagcctgaggcttctttt

SEQ ID NO: 274 - DNA, 122 bp, Homo sapiens
tcctccggcagcacctctccttcctccctgcagagcccggctctcgtgctgagcaagcagcgttcccagctcccagacaggccccccagaagtcggcctttctgttcaaaagcttccagctg

SEQ ID NO: 275 - DNA, 122 bp, Homo sapiens
gagaggactgagtgtgctgagcccccccgggacgaacccccggctgatggagctctgaagcgggcagaggagctcaagactcaggccaatgactacttcaaaggtgcgcccgcctggcaggg

SEQ ID NO: 276 - DNA, 122 bp, Homo sapiens
gggcactgaaaggctgaaatgggatgacgtgtgcagatttagctcagctagctaagggctcgggattgctgtattgattaagtctcactcgaagacacatgtgcttgccactgtgtcggcct

SEQ ID NO: 277 - DNA, 122 bp, Homo sapiens
gtttcacatcggccactttctggcgtgtcttagaccagccgcctgattccctttcccggacggcgagcgccaggaatgtgccatccgcattccactttatcttgtatctccctgggctccca

SEQ ID NO: 278 - DNA, 122 bp, Homo sapiens
ccccccacgaggactgggctccatgctgacggagggccgggatcagggccggagaactcacgggacatggcacctgtccactccagcccaccagctcctcccctggcccactcgaccccctg

SEQ ID NO: 279 - DNA, 122 bp, Homo sapiens
gaagtcgtttatttcatttttgctttcacattatgttccgatacaatcaaaactcctggacgaacctcttgaataaagtcctgtgaatgagcggaatcataggtcctgggcgcccgagtatg

SEQ ID NO: 280 - DNA, 122 bp, Homo sapiens
gcagcatctgcatcacccggagcttgtcagacacgcagatgctcgggccccgcccaggcccgccaaatcaaaagctgcatgttaagagggtcctcaggtgatgcatatgaagtttgaggagc

SEQ ID NO: 281 - DNA, 122 bp, Homo sapiens
aggatttaatcagggggtttcagtactcatgatgaagaggtgaccagttgccttcagctgcgttggccagggaggttctctctctctttctctctctctgtgtgtgtgtgtgtatgtgtgtg

SEQ ID NO: 282 - DNA, 122 bp, Homo sapiens
cagcgcctctttgaagtgggttcatcagcaacctgtgacttggcgtgaagccaagttcagcgctgaggtgcagactgtaatcacagggctgagtttaaccaagactctggttttgtcaggcg

SEQ ID NO: 283 - DNA, 122 bp, Homo sapiens
gctggcgcactgggacgttcagcttctcggagaccagctgcttcagcgtggacaccagctcgtcctctggcacctggccgcgcggagggtgggaggcaagggttgagcccgcggcccccaga

SEQ ID NO: 284 - DNA, 122 bp, Homo sapiens
caattcctaatgacagagcaggtcgggaggacagcgcgaggaagtgaatgtcgcccaacccgtttgaggccaggaggctttggcgttgcccagggggttggcagctgctggagtcaggtgat

SEQ ID NO: 285 - DNA, 122 bp, Homo sapiens
cgtcctctggaggcaggggcgccggcacaccctcttcagccatcaggatctggcagaagacgatggtgagcagcagaaagagaagccttttggctgggttcggttcctcgactggcagctgg

SEQ ID NO: 286 - DNA, 122 bp, Homo sapiens
atcaccgccgggaaaaggcggggacacagttccggaacaaagccccaaggggaaacctcccggccccatacccgacccgacgccagcggcccgagcagcccccgccgctcggctcccaacgg

SEQ ID NO: 287 - DNA, 122 bp, Homo sapiens
tatgaaactaaaacttctagaagaacaccaaagagaagatctctgtgacctggggttaggcgaagatttcttagaaatggcaacaaaacatggcctatagtggaaaaaatggatgaactaga

SEQ ID NO: 288 - DNA, 122 bp, Homo sapiens
taacaggcaattagtgtccattcccaatcacttaaaagaggcattcatatactttgaaaacgggactatctatcctttgcagacaccagcagaaaaacaaattgtacccgagtaatcctttt

SEQ ID NO: 289 - DNA, 122 bp, Homo sapiens
gcaccttgccagtggttattacagccataatctgggccatgtatattctaaggaggctttcgatttaagaacctagattttttgagaggcatgcaatagtcaatgtatctctatgcataaga

SEQ ID NO: 290 - DNA, 122 bp, Homo sapiens
gctctcagcccagacccgagcaggacccagacacccggggctgcaccgtcctcacccgggcgtggatgagcttgttgacctgcttcttgacgccacctgtgaagttctcaaaggtggggtca

SEQ ID NO: 291 - DNA, 122 bp, Homo sapiens
gcgcaggaagtgaggacatcagggagcccgggcctaagcctggaggcccgccctctccggcgttcacagttgcgcagtcagaattgtgtgcgtcccaccgcctcagcccccagttctccgac

SEQ ID NO: 292 - DNA, 122 bp, Homo sapiens
cgggttcaggcttcgggggccaggtcggttgggtgggtgggtgtctccacagtctgcgtgcgtgggccagcgcgttcgtcttacccttccctccaccccggcccctctccccttctccccta

SEQ ID NO: 293 - DNA, 122 bp, Homo sapiens
cctttagtttggtaaaattgagctgaagttacacacagtaacaccttgacttgttgctgacggtgtgctttgtggggatagttggtgtctgatctcaactgtggagaaacaggaagtttctg

SEQ ID NO: 294 - DNA, 122 bp, Homo sapiens
ctcctttctggatgccagatgtgtgtgtgtcgatttatctgggtgcaggtctcagcactacgtacctaccaggtgacactaaatcagtatactcaaaacatcacagcagggtccttaaactg

SEQ ID NO: 295 - DNA, 122 bp, Homo sapiens
ggagatcaagatccctttgtggctgacaagcagccacctgaacttttgattcagtgtcaccgcactgggtgggtctttccctggcctccctgagctcctcgcctgcccagccccatttcagg

SEQ ID NO: 296 - DNA, 122 bp, Homo sapiens
aggtcataaggttgtttgtctccaaagcttgtttatgttgggccctggtctccggccactcgcatccgcccacacacactctaaccgctcctcccagcagagaagcacagggtctggcaaat

SEQ ID NO: 297 - DNA, 122 bp, Homo sapiens
tgtgctctttggggttcgagttgtattcctggaccccacagtttgcaactggtacaaccacgtctcctgaaatgaaaggcacggtccatgccatctccctgggccccgtcctcactccaaac

SEQ ID NO: 298 - DNA, 122 bp, Homo sapiens
aaagctcttggcatcacccttggtacatggtaggtactgcacaatgtcagctaatattatcgtcatgtgtgctgcctggagaaatttttaagtggaaaacaaaacaaacaaacaaaaacaca

SEQ ID NO: 299 - DNA, 122 bp, Homo sapiens
gcccgggcggcagcagcgtcgcggcggcggcggcagcggccgctccgcgcctcgcctcaccggcctcgctggcctcacctcgccgcgcccggacccgccacccccgcctccccgcccgacct

SEQ ID NO: 300 - DNA, 122 bp, Homo sapiens
gccccgttgtgcaaagcagggtgtcagagactctctttttccccagggcaactctttacccggcaatgccggacctcgactttggggtgagggtgaaaacgaggggtgagcattagagtgaa

SEQ ID NO: 301 - DNA, 122 bp, Homo sapiens
tgtcccggcccttttccaggcccaactgggtttgttaaagcgacaggcctctcggcgagccggtgccccatcgggtaccgcacggctgccgcggcggccttaccctgccgcgagcgcctgtg

SEQ ID NO: 302 - DNA, 122 bp, Homo sapiens
agaacgcccggggagggtgctgcgtgcagagccgggacctcacttcccgggttccgattccgcctcgaggacgcgggtgcggcagacacggcccagagccctcgagggccacgaggcacaga

SEQ ID NO: 303 - DNA, 122 bp, Homo sapiens
tctgtggacctctccaggaagtgttttccctgggagtccttccctagaagcccagcatcacgggagtaggcagccttcagagggacctgctcagtttcttggtggctcactttgacacagta

SEQ ID NO: 304 - DNA, 122 bp, Homo sapiens
catttactgttattataatcaccatcatagccatctccctgggcccaggctgcttgtagtcgaagttcaccacctttgcaagggtaatggcaggcagcctcagcaccaggacccagcagtcg

SEQ ID NO: 305 - DNA, 122 bp, Homo sapiens
caggggacactgaggtcgctgggccagtgtccccgcctggttgcaggtccctaacccctccgggagtgcagagctgcgggcaggccacactcaccctgacccttcctgctccccaggaaggg

SEQ ID NO: 306 - DNA, 122 bp, Homo sapiens
ctagcttgagacatgcttgtaaactggctggtcctgaaggacagccttatgcccacctgccgttagaaggcaaccaagatttgcttcaggcactttttttcccctttttaggaaatcatgct

SEQ ID NO: 307 - DNA, 122 bp, Homo sapiens
tgagtgagttggtcgccattaaagtgaggctcccggcccggagcagcgcagagaccaggacgcgcagcctcgcctgcagcactcggccctacctctaccccgccgctacctctaccccgccg

SEQ ID NO: 308 - DNA, 122 bp, Homo sapiens
cgcccgccgcggggcgccgcgccgagcgcaggccccgccccgcgcgttcccaatggccggcgccgttcacccggccggagcgcccaggcctgcagccccctattggcccgcggaggtcccca

SEQ ID NO: 309 - DNA, 122 bp, Homo sapiens
ggcgccgcctgggagatgaggctgtgctgggatccaccaggaactatagccctgacactccgtacccttgataatgaggtgcgctgagcccgcagtccccagggagtccctcttcttgctgc

SEQ ID NO: 310 - DNA, 122 bp, Homo sapiens
ctcggcagtcacccgccagcgttcctgtagggcccagggcaggactgagagcgtggttcccgccctgaggatcacgcctggccactccctgagaagctgcatgaacccaccagtgtctccca

SEQ ID NO: 311 - DNA, 122 bp, Homo sapiens
ttctgatccatcgggctggccgcttcccgtgtcataggtggacattttttttctttatatcgcttctgtttcttttttttttttctcctcgaaaaaatgctgcttaaacggcaccgacttga

SEQ ID NO: 312 - DNA, 122 bp, Homo sapiens
cgcgggggttctgtgaacttggaacctggcggtgcgaggttctcgccggggatgcggcggcggcagctgcttcctggtttgaagctcgccgagtgggggagagcgtgagccttcggaggcgg

SEQ ID NO: 313 - DNA, 122 bp, Homo sapiens
aaattattatttctgtgtgggaaagctgaataaggtgatacttaaaattgagtagtttatcgtaaagttaataatgaagagagaaagaaagtagcataagaaaaggtgagtgtacagatcaa

SEQ ID NO: 314 - DNA, 122 bp, Homo sapiens
tcgctgagtaccatcttcattggcactgtagcccgtttgacccaaggctagaatccagcccgggcggggacaatgctttctggctggcacccaaagcaacaggtgggagagctctggtggga

SEQ ID NO: 315 - DNA, 122 bp, Homo sapiens
agtcctggcccacggccgccacgactccttcttcttcgttcacatgcacgggtaggtaggcggagttattcacatgaccttcgtactgtgttacacatttagtggccctcaagtcccacagc

SEQ ID NO: 316 - DNA, 122 bp, Homo sapiens
aagtaagagtctggtacttataacagaaatctcgactggagatgtaaatgtagggattgccgtcatatgcatgctaattaaggccactggtgtggataagaatgcatagaaatcagtctagc

SEQ ID NO: 317 - DNA, 122 bp, Homo sapiens
agagtgcctgccgctgtataatgccaggaactcatctttacaggaactatgtgcttaggacgctgtgtgatgcagatatactagctactctttctttttcagaaatgagtgtcccacaccac

SEQ ID NO: 318 - DNA, 122 bp, Homo sapiens
cccacatggctgcagtaaaaggcatatggctaagtatattaggatctgaggctgaagaggcgattgaggccttatcatggggtgctgtaaattctttgcttaggagtttgaatgttattctt

SEQ ID NO: 319 - DNA, 122 bp, Homo sapiens
aggttccttcccggccatttgggtcagcccctagccctggggatccgtggggcttgaggacgggcggtagaagctagagggtgagctggtgaaggtgccttctcaactctgatcctgacgcc

SEQ ID NO: 320 - DNA, 122 bp, Homo sapiens
ccacctcgtggcttttccgagctcttttcttgggggacccaccccctctctatttggaagcgaatatagcctgagaaacctcgagagtgagtgtgagtcctgtgactacttggcccctgcgg

SEQ ID NO: 321 - DNA, 122 bp, Homo sapiens
aggctggccccgttcggcacgaaggaggcactcatcgtccctcacagcagccgccgccggcgccacaacccaccatccgccattaccgccgcctccgaccagagagagaaacacagacaccg

SEQ ID NO: 322 - DNA, 122 bp, Homo sapiens
cttcattctctgggtagtggtgaacagccggttctttcaggccttccagcgccggagcctcgggcgtgggcaaaaagcgtccatacgcagcctgagccacttgggagcccccagtttccgag

SEQ ID NO: 323 - DNA, 122 bp, Homo sapiens
agggacagcatcaaacaagccaggtcttaccttagatcagcttctggaaagtatagagagcgctttgaagcatgccaacattcaagcctttcctcccctctcacccctccccctccaagagg

SEQ ID NO: 324 - DNA, 122 bp, Homo sapiens
agctcaggggaggagccgagcctttctcctgtccaagagcgagatctgggctacgccgggcgcccggagccctagtccagcccccggccatcgcggccgccgcccagccaggtgcaaaatgc

SEQ ID NO: 325 - DNA, 122 bp, Homo sapiens
gaggtgtgagggtgggggcggggaagccttgccgcgggggcaatggtcgtaggcacggagcgcacatccctctccttcctgattggccgagcgggggtgtgcgtgatgccacgctccgcccg

SEQ ID NO: 326 - DNA, 122 bp, Homo sapiens
caggcatgtgccaccacgtccggctaattttgtattttcagtagagatggggtttctccacgttagtcaggttggtcttgaactcccgacctcaggtgatccgcccgcctcggcctccccaa

SEQ ID NO: 327 - DNA, 122 bp, Homo sapiens
cagcattcgccgagaggaaccgggatctgagatgcatccaccagctgccgggggtaacgccgagcttctcctggagagattccgccgtgtttctttcagtgccttccttaagaaattttgca

SEQ ID NO: 328 - DNA, 122 bp, Homo sapiens
tctcacggtgctcccaaaactgtgatgtttggaaattctctgccctcagggatccctgaccgcttctctggctcaaagtctgggaccacagcctccctgactatctcgggcctctagcctga

SEQ ID NO: 329 - DNA, 122 bp, Homo sapiens
ccctccccaccgccccctgggaggtgcagaggctccggctgggcgggcgttcgagtggggcgggggcggggcggggcggggcggggccgggcccgacagcactgcgtcctgtaggctgtact

SEQ ID NO: 330 - DNA, 122 bp, Homo sapiens
tgcctgagtgtggagcaggggacaagtgcccagtccctctggccaccagggcacagccttcggcagagcctcactgccagagacgaggcgtgttggcctagaggtcattcgccagcctcagc

SEQ ID NO: 331 - DNA, 122 bp, Homo sapiens
tagtttgccatttgaacctccctccccacggttaggagtgctcctcctccatgtcggttacgctgttaagtcttagtcgtaacttaatttagacatacatgcttagtgacgtacttaagtgt

SEQ ID NO: 332 - DNA, 122 bp, Homo sapiens
agaacactgtcactgtgtgacaaggactaggagccacccagacccatagagtattcccttcgtttcagcaaatctgtattttgaggctgccactgaagggtgaatcatggatgtggcgtgtc

SEQ ID NO: 333 - DNA, 122 bp, Homo sapiens
ccagtatcacaccagcaacattagttaacagcaactggtctttaataatgttctagtatccggtcagtgctaaattccattaattaaaaaaaaagtcatcttgtagttaatttgtttgaatt

SEQ ID NO: 334 - DNA, 122 bp, Homo sapiens
tatttttttccctgtaagtcagaaacctgtacttttccttctaggcgtctggcgccctgccgtatgagagtctcagctcttgctggggtcatttcttccatcttcctttccttctttcctct

SEQ ID NO: 335 - DNA, 122 bp, Homo sapiens
gggctggagggccctcgtgtgagcatgctgccatccggcgtggggccagagtacgcagagcgccccgaggtggctcgccgggacagcgcccccaccgagaaccggctggccaagagcgatgt

SEQ ID NO: 336 - DNA, 122 bp, Homo sapiens
gtccctcctgctaccttgtttgagaaccttcttcctggcctccttgtcagttaccaggggcgctgggggccgtttgacatcttcggagaaaggattcggggagctgccagagaatagtccca

SEQ ID NO: 337 - DNA, 122 bp, Homo sapiens
cacaagattcagatttaaggaaatctatttccacaagtcctcaccagcacaaaatgctatcgctagtttgctctaataaaaactaccatcagccgggcgcggtggctcacgcctgtaatccc

SEQ ID NO: 338 - DNA, 122 bp, Homo sapiens
ctccagggggaattctcaaccacaacctctgtatccggtagtggcagatggaaagagaaacggttagaaaagcgtggttcttgcgcaggaaagttggagcaaagaagagttcagaagtgggc

SEQ ID NO: 339 - DNA, 122 bp, Homo sapiens
agacagacttggggggcctggaggagctcagcaccggcgcgttggcccagaggaccggggcgggtgcatgatggtttggagtcgtttgtcaacctaaaaaactaggaggtttcccgtgaaaa

SEQ ID NO: 340 - DNA, 122 bp, Homo sapiens
ctgtgcctgctgcctgccctgcatcctgaccctgcaggtacaacgcgtaccgcacaccaacgtttccacagtttcggacgcagtatatccgccggcgcagccagctgctgcgggagaatgcc

SEQ ID NO: 341 - DNA, 122 bp, Homo sapiens
cccagcaggagcctgcgacccggcttccctggccctaggccaccgggcgctcagccccaccgcttctccctgcagcccgattcgccgctgccttctgtgtcacctgcactgtcaccagtccg

SEQ ID NO: 342 - DNA, 122 bp, Homo sapiens
tccaccacagaccccagtccccgccccacacacccacctccccaacaccaggttcatgggcgtggtcccttcagctcctgaggtccaggcctgagccccagaccttatgcagctcctgccgg

SEQ ID NO: 343 - DNA, 122 bp, Homo sapiens
tgagtttctctggggctttattttcgttttgttggttgttttttctccacgctggggctgcggaggggtggggggtttacagtcccgcaccctcgcactgcactgtctctctgccccagggg

SEQ ID NO: 344 - DNA, 122 bp, Homo sapiens
ctctggatctgagctggaggctctcagcctcactgcctcagccctggcctctgtcacccccgggcccacagcacagcccagggccatgctcctgttctcagtgttgctgctcctgtccctgg

SEQ ID NO: 345 - DNA, 122 bp, Homo sapiens
ggaacgggcacggtgctaagctaacctcaccctagggggtgcggtgggggaacccagaggcgtcccgcgcgtcccccagtaactggcagcatcctggagcggccaggagtccagccctgcac

SEQ ID NO: 346 - DNA, 122 bp, Homo sapiens
ttggcatctaatgatcaggtctttgcctattgatcatgcaccagcagggggctcttctctcgtttccttggaagggacacacgcactcacacacacccttctggtaaatcccctcctggagg

SEQ ID NO: 347 - DNA, 122 bp, Homo sapiens
ctaaatgagcagccagcgccgcagacacgtgccaagggaagggtagttcactgcgtggggcggggggacatgcaataagacaagagaccgcacggaaatagctccgtgcccgtctgctgcac

SEQ ID NO: 348 - DNA, 122 bp, Homo sapiens
ccatataggcgtgtcagaagaccagaaattaaaggttttaggctcaagacgtggaatccccggttaaaccagtggtccccccagccaggaacgaggcttctggcagggacaccaaaggtgat

SEQ ID NO: 349 - DNA, 122 bp, Homo sapiens
tgtattttgaagtggtgcctttgtccactagacatggaactcttttttgagcccagatgccgatggggaccctagaatcaagaccccctagctgccctgtgcttctcctgctccctgttgca

SEQ ID NO: 350 - DNA, 122 bp, Homo sapiens
ccccaagcacagccagccaccaggttggggttttagtcctgcctctgaagtggacaacctcgcttccccaggccttgtcttctctttttttttttttttttttttgagacaatctcgctctg

SEQ ID NO: 351 - DNA, 122 bp, Homo sapiens
tggtggtttggtcctagtgggaagggcctctcaccagcctagagtggaaaagggagttcccgactctagtctcaatacctgtctgccccagtggctcagcccttactagttacaccagctaa

SEQ ID NO: 352 - DNA, 122 bp, Homo sapiens
ggtcactccctgagctgagaaggaagctctcatttatgagagggaccatgatggaccacgcgccatttatgagctgctcaccgcggacagaccgtgtgtccaaatcggggcctccagggccc

SEQ ID NO: 353 - DNA, 122 bp, Homo sapiens
ttggagagctcccctcacccttctgtgtgtggttacagggagaagagtgctatattagtccgttctcatgctgctgtgaagaaatacctgaaaccaggtcatttataaagaaacgaggttta

SEQ ID NO: 354 - DNA, 122 bp, Homo sapiens
aattaaacttagtgacttaattagtcactgccttgctaactttgctgtaatttttttaaacgtcttgtttttaatatagcaaactatctcaatactggctggattaggttaaataaagaatt

SEQ ID NO: 355 - DNA, 122 bp, Homo sapiens
gccactttccatggtgtagatgctaccaccccgcccaatctcaagctgctgaggtgacgtcgctgaacaggagtggagaggagcagcagccagcgctgagcggcacctctgccccgcaggta

SEQ ID NO: 356 - DNA, 122 bp, Homo sapiens
ccctgaggaccgagagcagcaggaggtcatggtggggagcaaaaacgggaaaagtgattccgcctgagactgagggagagagaacccaggtgagaccctgaggactgtgagcagcaggaggt

SEQ ID NO: 357 - DNA, 122 bp, Homo sapiens
tgacaggctgcctctcggagcagctcagggtggggaggcacttcagcgctccagggctgacgttgagtcctcagagggcaatggagggatcacttgggaagtagggctgagggaggccatga

SEQ ID NO: 358 - DNA, 122 bp, Homo sapiens
gaaacatcttcctataaaaactagacagaataattctcagaatctgctttgtgatgtgtgcgttcaactcatagagtaaaacttttcttttgatagagcagttttgaaacactctttttgta

SEQ ID NO: 359 - DNA, 122 bp, Homo sapiens
gctgccattctgctgcgctagaaatgtggcacgcactgaggcggaggtaacctggcagcccggggttgggaggaggagctgctcttaggcccgtcttctggcccttgcaatacccggaatat

SEQ ID NO: 360 - DNA, 122 bp, Homo sapiens
aggacaaagggagagggaggtgcaggtcgctcagggaggagactcggacctgcccagccccggggccctcactggctccaggaaacccgctggtgttgactgtgggcagtccagcctctccc

SEQ ID NO: 361 - DNA, 122 bp, Homo sapiens
ctcatggtcaataaatcactgattgtaaacaagcatcatgtgtgatatgccttttgcaagcgtagctacgaagtcctgtatcccatttccaaagtatagcatccatcattcccttggggaca

SEQ ID NO: 362 - DNA, 122 bp, Homo sapiens
gagaggccgggagaagcgaaatcacccaggggctggggtcgtcgcagccaggagagactccggccctcaccaccacctgggcgagatcacgctgcaaacggggccccttcccggtgcagccc

SEQ ID NO: 363 - DNA, 122 bp, Homo sapiens
tgcggagagccacggattcccccggacgggctgaggggagtctgccccagcggcctcccacgcccacctctatcccagccaggtgggttccccagttggggaagggcctttgcaggaacggt

SEQ ID NO: 364 - DNA, 122 bp, Homo sapiens
ttacatgcactaccttacgtaattgccataggaatcccataaggtagatacactatcattcgttttacagatgagaaatcggggcttagggaagcaactcgcccaacaaacaggtcgtgagg

SEQ ID NO: 365 - DNA, 122 bp, Homo sapiens
ataggatccgtctctgtcctgtcctggcactggcacaagctcagcacatgcccagtaatgcgtgttgtttggctgatggaataaagggcttagggacttccctgaggcctctggacccatct

SEQ ID NO: 366 - DNA, 122 bp, Homo sapiens
ccgcgcggacgccggcgctgccaacggaagggcgggtagggcggtgcgtgattaggttggcgaaggtgcgagggcgcagggggtggggcggcggccgttggaggcggagcctacgcgcccct

SEQ ID NO: 367 - DNA, 122 bp, Homo sapiens
gggccgcgccaggaccacgtggccagtgcgcgcagggcgatgggcggcagtgcgcaggcgcgcacctgctgcggtggatggggccccgcgcccgtccctcacttgctccctccttccttccc

SEQ ID NO: 368 - DNA, 122 bp, Homo sapiens
aaattgtcgccaagcccattaggctacctgaactgtctcagaaagtgcgggtggctgcgtcgaacggtggtggctcagaggaagagattggggccggcagcgacctaggtacctcactctgg

SEQ ID NO: 369 - DNA, 122 bp, Homo sapiens
ctcagcaggtgagtggcctaactggattggtcactgcagtgatccaccttacaatttctccggcgctctctgccgacctcagccggcgatcaggccggcttcgcagtaggtggcggctgagc

SEQ ID NO: 370 - DNA, 122 bp, Homo sapiens
ttctctggcgagtaccagtgctgggaggctgtttatctgtgtcctggtgctgggacaggacgcaatccaattccagctctcggtcggttctgccgctctgtccccggttctgcagcgcactc

SEQ ID NO: 371 - DNA, 122 bp, Homo sapiens
actctgacaaactcctcagtctagcactcaaggcttttccctcaactgcatttctagcctcgtcttctccttacgtaccacccaggtgctctccagtttctgggcctttgcttaggctattc

SEQ ID NO: 372 - DNA, 122 bp, Homo sapiens
gaagcgagcagtagctctctgcttgcgcctgacgccctgtgactggcgcatgcgcattcgcgaggcaggctcgggcgcctggctgtcaaggctgtcaacctgcctaagcagaagaaaatggt

SEQ ID NO: 373 - DNA, 122 bp, Homo sapiens
tgccgagtgcctgcgattgcaggcgcgcgccaccaggcctgactggttttcgtattttttcggtggagacggggtttcgctgtgttggccgggctggtctccagctcctaaccatgagtgat

SEQ ID NO: 374 - DNA, 122 bp, Homo sapiens
ccgcctcccactcagcgttaattaaaacttgcgagatggagaggctggcgcggacggctccgttttatttgcagcatctttcatgctgctgacgatcgtaaagggctttaatattgaaatat

SEQ ID NO: 375 - DNA, 122 bp, Homo sapiens
aagaagatacttgcaagcactgacctcacctttgactatttgtctgtctccacagttcttcgcagatattactgagcatcaccatagatgtccttcttcacctctttatccacaactgaagt

SEQ ID NO: 376 - DNA, 122 bp, Homo sapiens
ggagaagggtggcttcactcttgtcctcacccctagacatttactcatgggtgagggcaacggggccaccttggtgcaggaagtgagtgttgatggatggcagggagtgagcccttcaagga

SEQ ID NO: 377 - DNA, 122 bp, Homo sapiens
attcgcccgccttggcctcccaaagtgctaggattacaggcatgagccaccgcgcccggccgggagtattttcaaaacaactctaaagcagaatgctgttcaagtcacctaatttctgcctc

SEQ ID NO: 378 - DNA, 122 bp, Homo sapiens
gaagctaacggaagagaaaggaactccgagggagcaggtgagggggcctgaggtctgagccggcatagcaggagctccaccggccggagctccagcacacacagggaagacgcttccctgag

SEQ ID NO: 379 - DNA, 122 bp, Homo sapiens
tgacaacatgctagcagccctcacagcctttgctcgctctccgcgcctcctcggccttggcgcccactctggtcgcgcttaagaggcccttcagcccgcggctgcactgtgggagccccctt

SEQ ID NO: 380 - DNA, 122 bp, Homo sapiens
tcccacatgggcgttacactctcctttgaaatggaccaatgtgcatttccacgtagaaggcgtctcctgcagtcgcatcctgtcgtcctagttcttaagcctaggggcagctgccctgacgt

SEQ ID NO: 381 - DNA, 122 bp, Homo sapiens
gggaactctgttccttccttctgggcctcaagggacattgaaatctaatcaccaccagtccgtcggagacacttttgtaactggcctcatatgccctctgctttctctcaccttttccctgt

SEQ ID NO: 382 - DNA, 122 bp, Homo sapiens
gggcctcaggtggacaaggcctcctccttggccgggcgctgggcgggaggcgggagcgagcgtgctagccaagcatgtgggccgcgctgaggcttgacgaggccggcgtcccttttcctgag

SEQ ID NO: 383 - DNA, 122 bp, Homo sapiens
tgcaccccgggaggttcgggaaaggagagcagctcagggatcaaacccacgataaagaggcgggaagccaaagcactgggagactcgatctcagtgaccaaaaaatgttcgcggttcaaata

SEQ ID NO: 384 - DNA, 122 bp, Homo sapiens
tcattttcaatatcattaatcccagacactctattttccatgcctgcgcagccaggcccccgagtgtgcgccgtgtaaagtgacacatattcatcaccagctcgtggcgccggcgccgacgc

SEQ ID NO: 385 - DNA, 122 bp, Homo sapiens
cggcgagcggtcggggcctgcttctcgaggtgcctgcgagcgcctcatgcccctccccaccggccccaactccgtcccgcctcacccgaccgcgggctttgtccacccgccgcggtgcggct

SEQ ID NO: 386 - DNA, 122 bp, Homo sapiens
gcctagcagggtgacgaggtaaacaaccagaaacagcacaaaaagcagagactggagttccgggcaatctgtgagcccaagtaaaatgaattctgtgattgcactgccatttgtgttggaca

SEQ ID NO: 387 - DNA, 122 bp, Homo sapiens
acgggaggcctgagcgggtgggaagagctgcctgagccctggacctggagggattggagccgcggggggagccggtggcgtgaagggggaggagacgagcggcctgaagcgtctggggcgtg

SEQ ID NO: 388 - DNA, 122 bp, Homo sapiens
ggcggcagcaagcaactcaccagagcccagggagaggcagggctggggacggcggagagccgcagacgccccttcggccagtagtctcgacttgaaggctggcgaagccccggcggcggcag

SEQ ID NO: 389 - DNA, 122 bp, Homo sapiens
acacaaaaccatttccaacgtgtaacgcaaaggagatttcgtgtgcactgtttgcacagacgaaacgctcatttcctatgaaaatatcacaggttcccatcctagccactcttctccagcag

SEQ ID NO: 390 - DNA, 122 bp, Homo sapiens
agatcgattcagtgtgcctaccccagaagtagtgaaactatgtataagacaccaggtaaacgtttccttacaagctttgcatctctggaagtgcacaaagtgctggctttattggaagtgtt

SEQ ID NO: 391 - DNA, 122 bp, Homo sapiens
attttttttttttattttctttgtagtttgcctttgtcacattggcatgcagggtgagctcgggtcccagcaaatatccccaggatggtaaaattagtccagaagagaagttttattttgat

SEQ ID NO: 392 - DNA, 122 bp, Homo sapiens
ttactgggtgtactgaagttccagtaagtttcaggttgaggatggcaatcaggaggacttcgaatacttagatcttggattcccacaactaggaaagttgaattgcaggactggctctcttc

SEQ ID NO: 393 - DNA, 122 bp, Homo sapiens
aaggcccgggccagcaaggtagaagcagcacaccgtcttgccggacacgcgtctctggagcggtacgaaggcctggcgcacagcagcagcaagggccgggaagcccctgggcggcctccccg

SEQ ID NO: 394 - DNA, 122 bp, Homo sapiens
caatttctcacccctagcttccctcattagtgcttattaactagtattgggaggaccaagcgaagagtaaagctagggtagcagaggccataagctaattgcaaaggacagagctaaagaaa

SEQ ID NO: 395 - DNA, 122 bp, Homo sapiens
gagaaagattacttggctccgaccacggttcggcagctgatggcacagcaagaacttgatcgtataaagaaagcttcagacgtgctgggcttgacggtacagcagccaggcatgatggacag

SEQ ID NO: 396 - DNA, 122 bp, Homo sapiens
aggctccggcctccacttccgcctttcagccgctccggatccggatctccacctccgccccgcccctcaatactcccaggtgattgacagtgcggagaccaatgggaggcactcttggccga

SEQ ID NO: 397 - DNA, 122 bp, Homo sapiens
tgcctaagcaagtaagaagtgaatctgctgcaaaaattatattagagctttatagacgcacgcatcgtttgaggcgaagtgggttgcgactggttttgaaacagatacaccagatcttcaca

SEQ ID NO: 398 - DNA, 122 bp, Homo sapiens
aggcatcgggaaagatctgaggcttgaagccctgcaggatggagtccaccagcaggcgtgcgcggtcctcgtcacggtggctgcagcggatgccctgcaccaggccgctgtcctctactccc

SEQ ID NO: 399 - DNA, 122 bp, Homo sapiens
ggagaaggtgacactgcacttgttcccaggcgagaactgtacactgacaccgctgccgggcgtggctcgcgtggtgcactccaaggccttctgcacagtgcactggcaggagggcggccggt

SEQ ID NO: 400 - DNA, 122 bp, Homo sapiens
cttgagaccctgacattgccctagttaaggtcttcgttgtttctcattgtttttcttcaccgtactgcttgaatctagttgcagctctcctccatccacttcagagagtgattttactagaa

SEQ ID NO: 401 - DNA, 122 bp, Homo sapiens
gaaggcagagcctcctcctgatgtggtagtcaatggcagtgccccacagctgctgtgagccgtagaaggaaagtcggaagcagctgcgttaatagcacactgagcccacccactcctcagca

SEQ ID NO: 402 - DNA, 122 bp, Homo sapiens
acctcacagcctttggccccagtttccatgatgaaccgcgacacaccatagcaggccctccgcacagcaagccctcctaggagtttgtaaggcagagactctgcctgggcaatggcacacag

SEQ ID NO: 403 - DNA, 122 bp, Homo sapiens
taaattttagaagcctccaattttagaactaaaagaaccatattgtagagatttcatgatcgccaagtttaatccttcctcttacctatgagaatgcctgtaggttgcttgtattttatttt

SEQ ID NO: 404 - DNA, 122 bp, Homo sapiens
ctgtgtgggtacctgaagctgacgcccatgtttctcatggtcatgccaggcatgatcagccgcattctgtacccaggtaacatccctgccccgcccctttcctgtgccagcaaccgggcgcc

SEQ ID NO: 405 - DNA, 122 bp, Homo sapiens
tgcccctgggagccattcctgcccccaaaggcacactggtgggaaagccctaggatgacccgtgccaagaggacaagcaaggaccaagctatgggcaagccagaggtcaaatggaggctgag

SEQ ID NO: 406 - DNA, 122 bp, Homo sapiens
cagggggaggcagcattcccggtgcccagtatggtctaggaggcattgaaattccagggccgaagtcctgagacaaagatcataatgagacaggaaggtggcaaaggaaggagcccatttgc

SEQ ID NO: 407 - DNA, 122 bp, Homo sapiens
tggctcccacaccggtccctccataactcgcgctcctccctcgctccgggctcggggagccgctcgctcccagcgcccagagtcagccggttccaccttcggctgcgagagccgccgccccg

SEQ ID NO: 408 - DNA, 122 bp, Homo sapiens
cctagaaatgcttctggatcccagctgtgaattctgttcccactcctaggtctgacttggcgcataggatatttacctacacgcgtatctcctttccctgtaagggagctgaggaggtggga

SEQ ID NO: 409 - DNA, 122 bp, Homo sapiens
actaaacggggagcgcagctgtgggagcgggcgggctcttggtggaaactttgtggaagccgggtgggagagccccggcgagtgcagtgtcccggtggctcctcttagggtgcccagtgccc

SEQ ID NO: 410 - DNA, 122 bp, Homo sapiens
ctggggtccggcggcggagagtgacctgggcggggcaggaggtggcagcgggggtcctcccggctcaccagagagacgagcggccgtgctcctagagaggcagggaacccgccagactccgc

SEQ ID NO: 411 - DNA, 122 bp, Homo sapiens
cgttagccatggaaaccgagagctggcccgggcggggccgcggtgagctcgttattcggccgccgcagcttttctgcctccgcattcgggcactaaccaacctcccggcgggagcgcccagc

SEQ ID NO: 412 - DNA, 122 bp, Homo sapiens
cacaaccatgctcattcattatgcattgtctatgactgattttgtgttacacagcagttgcgtagttgcaacaaaagccatctggctcacaaaaccttaaatatttgttcactggaccttta

SEQ ID NO: 413 - DNA, 122 bp, Homo sapiens
cctccgtgcccaatcaattagcacatgagtaataccaagcccattaggacaaactgatgccgggggagttatgtcatctgctatagaaatgattgcttaatataccagttggctccgaggag

SEQ ID NO: 414 - DNA, 122 bp, Homo sapiens
ctgccttgcgaagaccagatcatcctcctgaaggggtgctgcatggagatcatgtccctgcgggcggctgtccgctacgaccctgagagcgacaccctgacgctgagtggggagatggctgt

SEQ ID NO: 415 - DNA, 122 bp, Homo sapiens
ttttaaaagagaatgcaatttctgaggctgtccttccttgaaggacactttttattccctcggcagaatgtgtactggggattgggctatagaaaaaaatcttctgtgcctctgttttattt

SEQ ID NO: 416 - DNA, 122 bp, Homo sapiens
caggacgaagccggagtgtaggcggcagaggattcgctcccagagcagctgcggccaggtcggaaagaggccggggcggctgggtcagtcgctgaaatgacctgcggacctgagtgggaggg

SEQ ID NO: 417 - DNA, 122 bp, Homo sapiens
agctgccgctgcttctccagcgcggcctccacctcggccagccgctcgcgctcctctgcccgctgctgctcagccagcctctgtggccacagcagagagaagaagagaagcagagagagtgt

SEQ ID NO: 418 - DNA, 122 bp, Homo sapiens
gtctctccacgcgctgccgcctagcaaaggcgcatctttaggtcggtagtgaggtgcggccgggacgctgcaactcgctccgggacttgtaaacctggcaggtgttcgaagagggccactgg

SEQ ID NO: 419 - DNA, 122 bp, Homo sapiens
ctgtcatagagctgcagggtggattgttacagcttcgctggaaacctctggaggtcatctcggctgttcctgagaaataaaaagcctgtcatttcaaacactgctgtggaccctactgggtt

SEQ ID NO: 420 - DNA, 122 bp, Homo sapiens
taagagacctgaccaaactctagcttggctaccagcagcttaaggccatgaccccagtcccgcttaaaatgcctgcctgagaaagctccatgctaccaaaatttattccagaccaaaccagg

SEQ ID NO: 421 - DNA, 122 bp, Homo sapiens
gatgttcccctagtctagcgagagggactgacgcggaacagagacactttccattgaacgcggttgtgtcaagacggagctcgaggcgggacacttagctgagctctggggttgagagaagg

SEQ ID NO: 422 - DNA, 122 bp, Homo sapiens
atctttctttccctccctgtgtttatttaattggctccatgatttgtttcccattgctgccgtaacaagttagcatgaacttagaagcttaaaataacacaaatttatgatcttgcagtctg

SEQ ID NO: 423 - DNA, 122 bp, Homo sapiens
agcgtgcccaggaacgcgctgcccgccagcacccgcagcagtccccggccgcacagcgcgcgcacacagccccccgggtgcggcgccccctgctccactaccgtctggaagtcctccatggc

SEQ ID NO: 424 - DNA, 122 bp, Homo sapiens
cctgcgcgcaggtgcggagctgcgatccccgccccgaggcggagccagcccggcccccagcggcccagcccccgcgtctagtctgccgcaccagccaggcgtctgtccctgcgtccgtgtgt

SEQ ID NO: 425 - DNA, 122 bp, Homo sapiens
catcttccttcttgagtgcccttcctgccctctcgccggggctgttgggacatctgtgagcggaaaccaccgggctctgggcacagagccagacgcaggctggcagccccgagattgtggtt

SEQ ID NO: 426 - DNA, 122 bp, Homo sapiens
ggccggctggtcggtgaagacatagtagtggacacggtggcccaccatgaagtgcttctccgccgtctccaggaacagcttcaggaaagccacgtatctgcaaggcaggcggacgggggctg

SEQ ID NO: 427 - DNA, 122 bp, Homo sapiens
tctgaatctggtttttcaagtggcttgggtgggtctgcatatgaatttgaccaacctctgcgcgcgctcctgggagcgcgcatctgtgtgtggtccagggagccaaccgcgtttgtgaatgg

SEQ ID NO: 428 - DNA, 122 bp, Homo sapiens
ctaggttgaagtgaccagatgagtgagaagtgattgcattctgcatttatttcaaaaatacggattcaatggagggtatgagagaaagaaagagggtgtgagtcaaagatgattttctggtt

SEQ ID NO: 429 - DNA, 122 bp, Homo sapiens
agactagagtgtaagggatgaggctggggctggggatactcagagaagccagggtatctgcgcggcctcgggcatttggacacaggaccactaaatgtacccaggggtcctctctggggctg

SEQ ID NO: 430 - DNA, 122 bp, Homo sapiens
caccaggcagctctaaatttatgtgttttataagccaaggttcacacaaaaaagaaaattcgctgggggaaaaaaacagtttctatggcttaaaaaaaagtctgaagaccaccagtctattt

SEQ ID NO: 431 - DNA, 122 bp, Homo sapiens
ctaaggagttaaaacttaaaacacggcgagtcgacttcagatctggggacaaggctcctccgagtccaccctgcagggctgtgagccgatcctttatttctgcttggttgtcattgttcagt

SEQ ID NO: 432 - DNA, 122 bp, Homo sapiens
actttgctacaaaaccccaggttgtatcatgccctctaacaattctggacgtggccaggacgtggtgccaagtctcaggggcaagacagaagaggcagaagcacatttagttcttgtgttta

SEQ ID NO: 433 - DNA, 122 bp, Homo sapiens
gcatcttctccgactcggcttctaagtccggctctttttgtgtgggttccagggccctgccgtgggggcaaagaggatggagttgcttacccaccatttcctcttggctggcgggctgctta

SEQ ID NO: 434 - DNA, 122 bp, Homo sapiens
cccctgaccttcctctctccctgcaggtcagtgagagcccaagccaattgctctaggccccgtggctggctacttatggggcactgtcctgaccagctctgctaagatgctcctggcccctc

SEQ ID NO: 435 - DNA, 122 bp, Homo sapiens
aggtactgtgatgctaatcatctctgtgggagcagttcctctctccagtacacctcagatcgcagtaaaaagtgacctcttgagattcttgagtatgttttgttgtgtttagtgcagtacca

SEQ ID NO: 436 - DNA, 122 bp, Homo sapiens
gccccctcgcccccctccagcgtccgttttcgttttgtgcaggtcgaggcggggacttggcgccgtcggccgctcctggatggcggcttggaaaagccacctgcggccaaactccggggcag

SEQ ID NO: 437 - DNA, 122 bp, Homo sapiens
ttctgaggaataacaaagcagataccgagtcatccatactttgcttccaagtattctatacgtttttataaacctctttgagatttgttaacagcctaggtgtgccaagttgccatttattt

SEQ ID NO: 438 - DNA, 122 bp, Homo sapiens
caagtacagcctggcacacacaggttaacgcaagagcttttctcttttcttttttgagaccgagtctcactctgttgcccaggctagagtgcagtggtgagatctcggcttactgcaacctc

SEQ ID NO: 439 - DNA, 122 bp, Homo sapiens
tgtgcgttttaaggcttagggctcggggcctgcccacggcacctttcctaaataccaagccggtgggaaaaagctttctatttgttttcgtcgctggtcacccgggccacctttgaggtggc

SEQ ID NO: 440 - DNA, 122 bp, Homo sapiens
tttcccaccagctacttccttagaggtctgtcctaccaacatagaagaacagccccaccccgtggcaggccggcttctgatgctgcttggttgaatgcttctaggtaatcaagggttaatgc

SEQ ID NO: 441 - DNA, 122 bp, Homo sapiens
accaaacaaaaccaagctgatgccagttttttattaggagttaaataggccctttcccatcgtggtctcattggtgcacgctctgctgagcctcgagggcctcagagcagatcccgcctcct

SEQ ID NO: 442 - DNA, 122 bp, Homo sapiens
ggccaagaggctgctgcccagaggtccaggccaggggaattctggcaaggagagccctgccgtgtttctgacttggtgattaaaggctttaggggtaccctgaagagacttgggaaaggagt

SEQ ID NO: 443 - DNA, 122 bp, Homo sapiens
cagtgagtatactactgtgatttttggaggagctctgaaaaacctatgtccacagaacagcggggaaacaaagtagataaaggtcacttggggacatactcagaaaagacttcataaagcag

SEQ ID NO: 444 - DNA, 122 bp, Homo sapiens
gtacacaatgccgaagaaaaccactgccaagtcttaaaagcaaccatctcccagtgggttcggtagaccccggtccttcccaaagcaagccataagggaactcacatagagaagggggaaag

SEQ ID NO: 445 - DNA, 122 bp, Homo sapiens
tgctgcgcccccgccccctcaggcgaaaactcgcctctgcccaaggctgtgcggggcgtccgcccccgcacttcgctgattggccgcactagcccgctcgtcacgctcttttgtctcagctg

SEQ ID NO: 446 - DNA, 122 bp, Homo sapiens
gtacaaaagagtcaaggcgggaaaaaaacggtttaaaatcccaatggaggaaaacttggacgaccacaccatcggataaaacgggagagcttttgaaaagccaggggagccgggctttctcc

SEQ ID NO: 447 - DNA, 122 bp, Homo sapiens
tgacgagtctcctattcttgtgtgcagtttggaggtgaagcagctcctgcaggcgaaggccgacctggagaaggagctggagtgcgcgagggagggcgaggaggagaggagagagcgagagg

SEQ ID NO: 448 - DNA, 122 bp, Homo sapiens
tcactgcgcagcgagtccctccgctgcctcctcccagcccaaaatggcggcgatggccgccgagcttctcgtcgccttcctcaaaggccaaggatccctccgcgcctgctgccccgcccacc

SEQ ID NO: 449 - DNA, 122 bp, Homo sapiens
tttgctgtgctagaccacggggcttgttgtgggttttggtcgcattctctctggagtattcggattgctatcactggctgatgctattgagaatgtttgtaaaacggcaatttgggacattg

SEQ ID NO: 450 - DNA, 122 bp, Homo sapiens
cctccgtaactatgatcttccatatacagttcaagttgtttccgtatggctcagggtagccgggggacaggattgtacctcttcgttgagtgaaattgccactgcagggtactaaaagacac

SEQ ID NO: 451 - DNA, 122 bp, Homo sapiens
ttttttgctggtggtggttctctgatgagatgaaatttcggtgataggagcacagatctacgctaattatcgagattcggcatttatgatgaagttctcttttggttaagaaattgatatgt

SEQ ID NO: 452 - DNA, 122 bp, Homo sapiens
ctactttgcaccccagccccaccctggaccacctgggctccttgttgagctgctccccctcggccccgcccccagcatgatggagtactcgttggacggacacaacgtgagcctctcggcta

SEQ ID NO: 453 - DNA, 122 bp, Homo sapiens
ggcgacagggtccttcctatttagcaggaccgcagggttggcagacagcagggcctgggccggcggggctctgcggtgcccattcgagtctctccagggcttccctctgtggctgtccctcg

SEQ ID NO: 454 - DNA, 122 bp, Homo sapiens
tactgccttcactctctccccctctgcccagcccagccccatggaccctgggaaagtacacgaacaatacctggggaaggggatcaggtatcctggccaggcactggcctctacaaaacaca

SEQ ID NO: 455 - DNA, 122 bp, Homo sapiens
gctcttccttgtgcctgttccaggctttcccctaggttcctgtgtggctctctctccttccggtctcctctgaaacatcacctggtcagaggagcctgcctggcacccccaggaaaagagct

SEQ ID NO: 456 - DNA, 122 bp, Homo sapiens
aaagccattgtatgtagctttagctcagcgcaaagaagagcgccaggcttacctcactaacgagtatatgcagagaatggcaagtgtacgagctgtgcccaaccagcgagcacctccttcag

SEQ ID NO: 457 - DNA, 122 bp, Homo sapiens
tgtgaccatctaattctagaacatttgggtcacccctaagagaacctcggttgcatttgccgtcagctcccacgccctcccccagcccccggcggccgctgtctgctttctgcctctgtaga

SEQ ID NO: 458 - DNA, 122 bp, Homo sapiens
aacaacatccatgagtggagttctctctcttaaccaggttggcgaaaagcactcttgcagcgattacagctgagttttgatgcaactctacaagccagaggggattgcccccattttataca

SEQ ID NO: 459 - DNA, 122 bp, Homo sapiens
ggagtcaatggaccaatggaagaatgccgtgggctgcgtcaagccaatagggtcgcgcggcgaggggcggggccggcgggagcagggcggggcctgagcactaggcggcggcggctggcgtg

SEQ ID NO: 460 - DNA, 122 bp, Homo sapiens
aagtgtagtctacgagggtgggggggggagggagccgccgaacgcctcctcacccagctccgaagccacgccccccatagcaacagttgcgaggaaaggaaagctccctttcccttgctttg

SEQ ID NO: 461 - DNA, 122 bp, Homo sapiens
tgaacataccacgtgcacacaggatacaccacacacacgcacacacgtgcacactccccccgtgggctcctggcagcaggggctgttcccatcactctggtgcttgcccctgctggggaacc

SEQ ID NO: 462 - DNA, 122 bp, Homo sapiens
ggcgggggcgggggcgggggcaggggcggggccggggctagcctgacccgctggacagaccgcccgcccggagcgggactcggcgcccgacacgatgccgaggcctggcaccagcggccgcc

SEQ ID NO: 463 - DNA, 122 bp, Homo sapiens
agtaacctgtttcagtagcttctaagtaaactccttgcagataatcctttagtatttgagcgaggaaagtagtttggtctttaacctgactccacacatcatatttgtatcattaataccct

SEQ ID NO: 464 - DNA, 122 bp, Homo sapiens
tctccatttattaattgacttaatttaacatgagagcctttcttaatgccctggcaagaacgtaaagcgtttaagccgccaaatagtacaacaccccgctccaaagtaggcagatggataac

SEQ ID NO: 465 - DNA, 122 bp, Homo sapiens
acaatcattcagcattcactaattcagtgtgcacagaaaattcacagaacctaactaccacgagtaacaattcactgcatataaatgtacatgtgtacatgtgcacatgtgttaagtatttc

SEQ ID NO: 466 - DNA, 122 bp, Homo sapiens
gccgcttaattcgtccgttgcccaaatgacccctccgcgctccagagcggagatcgcggccgtacattttagaagagtgccatcaataccctcagagttgagctggggttaccactctgcag

SEQ ID NO: 467 - DNA, 122 bp, Homo sapiens
caactcttttccaaggtcaacagagagtcctagaccatagaccagaaagtccattctacccgacactgggctacaagaaatgtatatttgtggggatcagccacactgggagaaagatagct

SEQ ID NO: 468 - DNA, 122 bp, Homo sapiens
gagcacagtcgaccttgtcactgtcatgacccaaggtgtcctctgtgactggacatggggcggggtgcgttacgtagatgactcgttaagctctagtggctaactcagtgcgtccatgaagg

SEQ ID NO: 469 - DNA, 122 bp, Homo sapiens
ttacgggcccagcaatggatgcaaaagctacatgaccaacttgagctgcagcacttcctccgagactgccacgaggtaggaactccaggtgtgctggggacggagacatcccctttagtcgg

SEQ ID NO: 470 - DNA, 122 bp, Homo sapiens
gatgctcattttcaacactcaagtgagaaagtgaatatcttactaaagttaaggtggttgcgttgggactcagtgctgacattctcagtaggtaatccgcgtggctactgtgagtgagcctg

SEQ ID NO: 471 - DNA, 122 bp, Homo sapiens
atgttgaacgcataatcaccaaagaaaattaaataatgagctttgtgacacctttcagttcgccaacagactgataaaaccagtacaaagggggagggccgggaccgagggggcgggacggt

SEQ ID NO: 472 - DNA, 122 bp, Homo sapiens
tgtttgctgatgccagcctgcttaaatagctgggctggctgacgcaggctgctgatagcacgtttatttacgcctatgagcacacactcgagcaaggacctgaaaaacctgcagcgtgggca

SEQ ID NO: 473 - DNA, 122 bp, Homo sapiens
atctaagcagcgttcccacagccccctctagattcttggagttccgcagagcttactatacgcggtctgtcctaatctttgtggtgttcgctatctcttgtgtcaaatctggtgaacgctac

SEQ ID NO: 474 - DNA, 122 bp, Homo sapiens
cagggttgccaagaacaagaaccgtaatacgtgacgtcgtaagcacactgctggatcctacgaactgtgtgaccgtgtcagctcgccccgtgtctggtgttagtgagatcagagctcgcccc

SEQ ID NO: 475 - DNA, 122 bp, Homo sapiens
atccatgcaaaccttattgcattgcagaaaaacgattaagaaaaagcctccacaaaacaacgaactcaacagcactcatcaagaaaattgaactcagattataaacttaaaaaaatctgttt

SEQ ID NO: 476 - DNA, 122 bp, Homo sapiens
taagagcagagaaagtgtgtgttcgggtcattaggagaagccaggccccagtctatgcagcgagcattttccctgctcttctaccaagctctctagctagattaacaggtcaataaatatcg

SEQ ID NO: 477 - DNA, 122 bp, Homo sapiens
ataaagccgaccggggcagtttggaaaccacattcagaccaaatgacccttccccaccaccgcgggcgccgcagccctctctacctgcagcagcctctgggcctctcaccaagtaggccgca

SEQ ID NO: 478 - DNA, 122 bp, Homo sapiens
cgccagcggggcaccggtgaggcccctcggtgtggagaggctcaccggggcgttggagcccgcaggaatggtcctggagttgagtgtttgtggtttcatttgctgattgatttccccccgtg

SEQ ID NO: 479 - DNA, 122 bp, Homo sapiens
acgctctcaccacggccgccgcttcatccaagaccggccgcaaaccagcaagatggcgtccggccggcagtgacgtcacagggacccacgccccgcccctcccgctgcaagccctgggaaaa

SEQ ID NO: 480 - DNA, 122 bp, Homo sapiens
tcacccagctgtgactggtgggcctggagcccaggcccagggcaggtgcagtgaagaccccgcccagacccaggtccccacacacactggccacacccctgccctgggcatggcctgggccg

SEQ ID NO: 481 - DNA, 122 bp, Homo sapiens
atcaaaacctttttacaatgtttagatcctttaatcaagcaattccacgcacaggaatagcggctgacgacaatcaggcaggtgggaagcaggcttactagaggctcaaaatggtgtttttc

SEQ ID NO: 482 - DNA, 122 bp, Homo sapiens
catctcccgcgccctgaagctctgcaccaagcccgaggacctgccggacaataaactgggcgacctcaatggtgcgtgcatccccgagcaccctggcgacctcgtgcagaccgaggccttct

SEQ ID NO: 483 - DNA, 122 bp, Homo sapiens
ctggtccaatctgacaaaccagaaacagggctaactttatcctcccatgatgggtggcaccgagtgcaccagctccctctttgtttgttaacaatacttgtaaagcatatacaatttttcga

SEQ ID NO: 484 - DNA, 122 bp, Homo sapiens
ttctagtggcttagttatgaagttatgggcgtcggttggactgatggtcctttaaggacccgattgtgcatagcatgcttgccactgtgtggtacgagctggttgtgacgacccttcacttt

SEQ ID NO: 485 - DNA, 122 bp, Homo sapiens
aaatctgtagcatctgatcctaagcaagtgctttgtactctaaagtgttgcaacttaaggcgttatgaggaatagatcacatttatttccatcttacatttgtctccctgtcttaatgcata

SEQ ID NO: 486 - DNA, 122 bp, Homo sapiens
tggcccgcaggccgccgcgcagatccgcgcagctgggggcgagggagttaatcctgtttacgcaccacaatccccttcagctggggaagcggacatttaggctcctcctagaacagccccgg

SEQ ID NO: 487 - DNA, 122 bp, Homo sapiens
tctcagggctggtgctgcagttcagtctaccttcctccgccagtggggactttctggaaacgcctttgcgttgggccaaggggctgctccaaggacttgtgcacggggaggcatttggactc

SEQ ID NO: 488 - DNA, 122 bp, Homo sapiens
cggtcccagcttttcaaaaacccacagctggcgaacccacacacatcgaaactcctaggtcgctgttgcagtctgggcatgctcagtatcagggtaggttttgattgagagtaaaaaaaaaa

SEQ ID NO: 489 - DNA, 122 bp, Homo sapiens
cccacgggaatatacagagaggcctcgggtcacagacttaaagctgtaaaagggaggaggcgacggtctggtcccagtcaccgaccagccaccgactactagggcccgaacccgggactgca

SEQ ID NO: 490 - DNA, 122 bp, Homo sapiens
ctggccgcttctcctctcactgagtatttctttcccttttccgcttccctgtgtgagcgtcgctcctttacaccttcactaattaattcccgtggacgagacactcacaggtggcgtcacgg

SEQ ID NO: 491 - DNA, 122 bp, Homo sapiens
ctcctcctttggtgagctgcaggcccttctgtatggccccttcctcatgctttatcttctcgccttcatgggaaacaccatcatcatagttatggtcatagctgacacccacctacatacac

SEQ ID NO: 492 - DNA, 122 bp, Homo sapiens
acgaggccgtccccggaagtggcgttacgcgcagcttccggttccgcctgttccggcgcacgtaatcgccgagggcacgtgcatgccccctggttaagagttgcaggtagcggtagcgatgg

SEQ ID NO: 493 - DNA, 122 bp, Homo sapiens
tctcctgcaatgattcttttgtcttttttgataaaatgcaggcttctctgccaacactctcgtatcctctccacacacatcatcctaaatggggatgtacccttgctgctcccagtacctgg

SEQ ID NO: 494 - DNA, 122 bp, Homo sapiens
actactgttgtctctcattaggttgcaagttctatgtgaactgtctttaactgtctgttacgtgcccttgcctaatagtgcctgggacatagcactcaataaacatcaacacctgtggaacg

SEQ ID NO: 495 - DNA, 122 bp, Homo sapiens
ttccattggaccatgaggggcatgatgggaggcctgagttagggtgaccttttttgtgagcgtctcatttgaattttatcttcactgggtcatagatgtagcagcccacatcgccaatgttc

SEQ ID NO: 496 - DNA, 122 bp, Homo sapiens
acggcggcaatcagcagtggtggatggtgagtgaaagctcagctcgagctggaacaaacacggcggagaagactgtgcagttgtaagatgtaatagagtgaaaacagagctcccatataacg

SEQ ID NO: 497 - DNA, 122 bp, Homo sapiens
agctcgtggtctgagctgtcaggaatgacggatgagcagctgcttttgccggcgcctccgcggcagctaaggtagcgctcacaggactgtctacaccatggactcagtgttcaggtgttcag

SEQ ID NO: 498 - DNA, 122 bp, Homo sapiens
aggatggccaccagctccacctgccccgagaagcccccagaagcttggggtgagaggggccgattagtcatttgtcaatgggatgtggaagaaaacattagactggatcctgtatttatctt

SEQ ID NO: 499 - DNA, 122 bp, Homo sapiens
gtgcgcgtgccagcgcgggtgtgcgagggagtgcgcgcgggtgggagcgccaggggctggcggggcccgcgccctgggacgagcccctcgtgctccggctctgcgctcccgcagcgcccacg

SEQ ID NO: 500 - DNA, 122 bp, Homo sapiens
ggcgtgactgtgagccggaggcgtagccgtgtctcgggagcctggcggtgtccgcaggagcgatgctgtgaccgttgcatttgaagcattccttctagttcccggatcccagggagggggca

SEQ ID NO: 501 - DNA, 122 bp, Homo sapiens
gagcaggcgcggaggtcgctgtcgcgtacccagcggagccgggcgggcggggagcaggggcgctgattcgctggagaagggatcttctcgaggtttgactttactggcttcttagctcttga

SEQ ID NO: 502 - DNA, 122 bp, Homo sapiens
gaaatgttttccatttctgtgctgaattgttttgggacctctactgaaaatcaattgagacgcagtcttattaaacacagtcttattctagctttgtttttcttttgcaaggttaatttggc

SEQ ID NO: 503 - DNA, 122 bp, Homo sapiens
cctcctcagccctgtggtcccactatttcaagcatgggtgggttcctggaagcggctgcccggactctcctcccacaaggagatggccattgaggagcaacagccctctcagcccaagtcct

SEQ ID NO: 504 - DNA, 122 bp, Homo sapiens
aagtctcgctctcctcaggatctgtatggggtacccattcagaagccacctgtgtggcctcgttgtttttttcaaggtttgaataacaaaggcagctttttgttgtttgttttgtgactgct

SEQ ID NO: 505 - DNA, 122 bp, Homo sapiens
ttctccctaaactcaatgaagagttatattcacaaaatgactaatccattcataataagccggaaataaaaaaccctgaagtttaaatgcaataaaaaagaatttggcagaacaaagttcaa

SEQ ID NO: 506 - DNA, 122 bp, Homo sapiens
gggttataaataaaatgagattaaaaaacaacagatctttgcctcagaatcccgacccaccgcagccccagcgaggcgcaggcgcaggcgcaggcgcgcgctcgctggttccgcccatgcgc

SEQ ID NO: 507 - DNA, 122 bp, Homo sapiens
gggcagctggaggcacctcttccacatggcagttggcaaaatatctcccactgaggggctcgatgccctcttgtagagcacaatacaggggtgtctgggcaccccctcttggtgcccggagc

SEQ ID NO: 508 - DNA, 122 bp, Homo sapiens
cagctcttaaaggcagcgcagacccaaagagtgaatagcagcaagatttatttcgaagagcgaaagaacaaagctttcacagcatggaagaggacccgagcgggttgccactgctggctcag

SEQ ID NO: 509 - DNA, 122 bp, Homo sapiens
gccccgaggcccggccccgggggcgcggccgcccgggcctccgtgtgccccagggggctccgggccgcgagccgctgccgaatggcttttgacaaaaaaacccttgaccaccaaggccagcc

SEQ ID NO: 510 - DNA, 122 bp, Homo sapiens
gctggaaaccgcgggatagctcggtggagagagggcgctcctgctccgcaagcctccctacgacggcaggcctacccggtcctgctcctgccggctctgggcatctggtttctgccgctcca

SEQ ID NO: 511 - DNA, 122 bp, Homo sapiens
aatgcctttaaggccggaaacacgtcggaggcggaaaaccctgggcccgcctggcctgggcgcagatcccaggcccgcggtgcatggcggcctccagctggcctaggccccgccccgccccc

SEQ ID NO: 512 - DNA, 122 bp, Homo sapiens
cattgaaagatgaaatcaggagatgtggctaaatacctgttgatgtgttcccgagtgttccgcgagaggtgaggagcttatttattcaccttttagcacaggaagacatcacccacctccac

SEQ ID NO: 513 - DNA, 122 bp, Homo sapiens
tgagctgacgttttcctttatttgcatggcttaaagctagccattttctacaccacgcgccgccgggcttgtacatgcccgtgtgcctgtgacaccgaggcaattgtttctccttaaaaagg

SEQ ID NO: 514 - DNA, 122 bp, Homo sapiens
gcgagttcctgcgctcgccgaggagtgggtccggaagcggcgccggagcgggtccggaagcgggcggtggagaagtccagttgccccaaaattcttagggtgagcgaaccgagtttctggcg

SEQ ID NO: 515 - DNA, 122 bp, Homo sapiens
aagacgagcctgcagggcaggcagaggctgagaaatctgagaggctcagcactacctatacgggcacttctcaattagaagtgtgcataggaatcccatgggaatgccgttaaaatgcagat

SEQ ID NO: 516 - DNA, 122 bp, Homo sapiens
gataaaacagtcgccaacctcgtttttgtggtttctgtctcttggtgagatctagggtaacgactgagatggggactgtggggagacgctgcttgaagagccagccgtcaaaagggtaattt

SEQ ID NO: 517 - DNA, 122 bp, Homo sapiens
ccctcatggatgactttgaggggtttaagacttcagtggaggaagtaactgtagatgtgacggaaagagcaagagaactacaattagaagcagagctaaaacttgaacagatgaaaagttgc

SEQ ID NO: 518 - DNA, 122 bp, Homo sapiens
aaaaccagtcccttggctggttgaaaggaacacttgattctttgtcagaaagcagccttgcgcttctaaggggtctgctgtctgaaagaagccttcgaggctcgcagacctggggaagaact

SEQ ID NO: 519 - DNA, 122 bp, Homo sapiens
tgtgcggggcctgaaagtgaaggcctgctgggcccagcctcacggggtgtaattaccccacggggggctgtcagggggaaggggcggattggtgcttgaaccgggacccagcagaaaattca

SEQ ID NO: 520 - DNA, 122 bp, Homo sapiens
cgggccatgtgtctggtgtcagccccagcttccgcagctgcccacagggtccgctggccccgggatccttctgggtctcatctgggctccacgctgacaccggctaacttggtgaccttggg

SEQ ID NO: 521 - DNA, 122 bp, Homo sapiens
gtagggaaagaaaggctttgcataaccaaatactctgtgtttataaggtccctcctctttcgtttcctaaccgcaaattccatcacacccaataaagtgagaaataggattgtaaataagac

SEQ ID NO: 522 - DNA, 122 bp, Homo sapiens
atagttactgttattattgggaaatattgttattagatgttgccagcacccggtggatgccgagcagttttgcttacacgctctccaatccttgaagcaacctgttaggcagtttctctaag

SEQ ID NO: 523 - DNA, 122 bp, Homo sapiens
ccctctcgcgggtaggaactttgagccccgcctctcggctcgtccaagctccgccttccccgtccacctgtgtgcccagcccctgacgttaccggtcggcttcagcggcctgcaggattccg

SEQ ID NO: 524 - DNA, 122 bp, Homo sapiens
ctctggcccaggctctagtccccattaatcacaccgcgcgggctgcgacccctttaagtccggcttggatgacccagatccaaagtcatcgactctctagctgctatctctatggtaagtta

SEQ ID NO: 525 - DNA, 122 bp, Homo sapiens
tctgtgtctaaggtgtcctgtgtccaggagataggaggaaggagaaggaagagaggtgatcgatgttacactgcttaccctgcctctgtgtcttgcagcaagggaagaattaacatggggaa

SEQ ID NO: 526 - DNA, 122 bp, Homo sapiens
aatgctgtgtggctccgactagggcccgccctccagcaaagagatgctggtgggtgctctcggttcacccccgcactcgccccaggggggctcgcgggccacctggagctcccgcccctcgg

SEQ ID NO: 527 - DNA, 122 bp, Homo sapiens
ctcccctccccctcccccgcgcccgccccccccccgcccccgcccccccacccggcccggcggctccgcgctcgctccctcgctcgctccctcgctgtgtctggcaggctgcggccgccgct

SEQ ID NO: 528 - DNA, 122 bp, Homo sapiens
ccggccagagcagggggagctctagagtgccacactcgcaggcacacattcacacactcacgcactcgcttacgcacgcacacacagccagagacacacccatgcagccaaaccatcccctc

SEQ ID NO: 529 - DNA, 122 bp, Homo sapiens
ctagctgtcgtgagcttgtcctccctggagaagagtgctggagcagaaggcaacaaaccccgatccattctggctttgcctgttgggttatctcaggctcagtttgcccatctgcaaaatgc

SEQ ID NO: 530 - DNA, 122 bp, Homo sapiens
gtccattatgaaaggaagaaaacttgtcgggggctaaagcaagaacctgtcctagctggccggttgttggcctggggatgttttgtatcccaacctccctgcagtagttccccagagcctac

SEQ ID NO: 531 - DNA, 122 bp, Homo sapiens
ggaggggcggcgggggacagagttgcggggcaagggggtgggggcacaagcgctgacttccgtcggaaatcccggccacttggcgctgaatgtttcaagaccatcttttaaaaataactgct

SEQ ID NO: 532 - DNA, 122 bp, Homo sapiens
tactaagctcaacactagacatttatgtctcatttaacctgtacagctctgggaggcatgcggtactgccaggtttcacagggaagactcctgagactcatagtaagctatttcccgattga

SEQ ID NO: 533 - DNA, 122 bp, Homo sapiens
gatcacttatctgaagccggtgttatgcttccttcccgggcagtccctgggtgcagcttccggacgggctagcttgggaggcattcctttccctggctgatgcaggaaggtgggtttgtctg

SEQ ID NO: 534 - DNA, 122 bp, Homo sapiens
cctttattcgattggatagtcggaatgctacttttcacggtgcaaagctatgattggctgcgcgcggcagggctcgcgcagttaccaggcagcgggctagactgaggctagttaccacgtca

SEQ ID NO: 535 - DNA, 122 bp, Homo sapiens
gagccgtggagtttgtgggggaagcgggagcaagtgggagtcggggtattggggttggggcgtctccggagtcagccctgagggatcccagtggtcggtggtcagagtctgtccagagcaac

SEQ ID NO: 536 - DNA, 122 bp, Homo sapiens
tgcaagttctgacattttaaatataggtgtacacacacagacacatgcacaatatgatatcgattatgtaaaatagagcatgctaaaaagcataaaggcaatacaccaaaacattggctgtc

SEQ ID NO: 537 - DNA, 122 bp, Homo sapiens
ggcgcccggcgcggggctcccagcctgtctgtacctggtcgagacaccccgtgccagaggcggaacatgtatgaaatgccaggtgcccagaggacccaggcagtccgtcattcacataccaa

SEQ ID NO: 538 - DNA, 122 bp, Homo sapiens
ccagggccttggacaggttctgggaggcctcctcctccttacaggtggggacacagaccccgagatgaaagctgtaaccttccccatctgcaagacccggagtctagggctgtcttcagagc

SEQ ID NO: 539 - DNA, 122 bp, Homo sapiens
gcagccttcctatgagggatgttactgggctgtggtcctgtacccagaggtcccagggatcggctcctggcccctcgggtgacccttcccacacaccagccacagataggcctgccactggt

SEQ ID NO: 540 - DNA, 122 bp, Homo sapiens
gcattgccaaaatcataattggtagaaagttagcaagaaagaaggattagctcatcgagccgtggcctagcaaattgtaatgggctcaagtagttttgtggcttgttgagaaaatgatacag

SEQ ID NO: 541 - DNA, 122 bp, Homo sapiens
gggctgccgggtctcgtccacgctcccttttgagcacctacagtgagcgtaggattgccacggatagcccaatccacaagtgagtcaagctgccagggctccaagaaagacccatggaggga

SEQ ID NO: 542 - DNA, 122 bp, Homo sapiens
gcgacactttggataaaacttccttcattttggatgtgactctggacacttcctggtcttcgtacactgcagacatgaagtgtcatccagcggcatgtgctggactggggcacccttggtgt

SEQ ID NO: 543 - DNA, 122 bp, Homo sapiens
cggctctgcccccatgctccttgggtcccagttacggatctctgtgggccttggcaaacccggcaggacagtgtcagtaacacctgcaagcttgggctgctggggaggagtggccaagggcg

SEQ ID NO: 544 - DNA, 122 bp, Homo sapiens
ctactccctccgctgacaaccagagagcaccacctccccagcccctcaccacacagggtgcggccaggcctccgatccgtggtggtctcactgccgcaaggccccactctagtgaccagcat

SEQ ID NO: 545 - DNA, 122 bp, Homo sapiens
tcagctgaggcagcacctggtgcacagaagacagaagagatactcagctaaggctgcacccgatacacagaagacagaagacatactcagctaagcctgcaccccatacacagcagacagaa

SEQ ID NO: 546 - DNA, 122 bp, Homo sapiens
ctgcccgacgctaagaagatgccctggcaaccgccgcgcccctcacccgctcctttctgacgctgtggtggttttcgttcgcagcccagaacattgcggaagtttctctacccatgcggtgt

SEQ ID NO: 547 - DNA, 122 bp, Homo sapiens
catttgccccaggtgttgcccagtgacctcctgcgcgtgcgccgcgtctgtccagctgcgcgggaagctcaggggagggaaggccaggttccatccattcagtcactccagacctggcaccc

SEQ ID NO: 548 - DNA, 122 bp, Homo sapiens
ggtcgcaggccgcctgccaatcagggccgggggaagggaggaggctggggactagcgccgcgagtgccacctggagggaccccggcccccacccttggctccgcccggcccacggacctgtt

SEQ ID NO: 549 - DNA, 122 bp, Homo sapiens
ccaatctcccagtccagcacccaccctgccctggttgggaggctcaatgttcagaaatgccgattaaagagttccagcctctcagctgatataggggcaccactgccccaaacttgaatgta

SEQ ID NO: 550 - DNA, 122 bp, Homo sapiens
aataccggggaacgcggagtgcctattaatgggtaagggtttcgttttggaatcagacagcggcgatggctgcacaactttgtgaattttctaagaatcactgaactgtgcaccttaaagga

SEQ ID NO: 551 - DNA, 122 bp, Homo sapiens
ctccttcccacgtgcacctctttgatcaagtttgtggctgaaatcagactctagttagatcgctgtaaaaataaaaataaattttccccaaatgattgaaacgaatttcaccctagactacg

SEQ ID NO: 552 - DNA, 122 bp, Homo sapiens
ccttttgggcaaacctgagaaacttgcgggtttgacccgccctgagatagcctgtggctccgcaccccgccctatgctgctgttatattcctgggagtagagcacttggcttgtatgtggga

SEQ ID NO: 553 - DNA, 122 bp, Homo sapiens
aaaattaaaaccaggaagtgaagtccccgagcacgttagaaagcctgacatggcctgactcgggacagctcagagcagggcagaactggggacactctgggccggccttctgcctgcatgga

SEQ ID NO: 554 - DNA, 122 bp, Homo sapiens
aaccgcacaccaaggggccctcattgtgctccgtggcccccgcccccgcctgtcttcccgcgccccctcctcggtggaatcatttctgcattgcccgggggctctgctttcgctcagttctg

SEQ ID NO: 555 - DNA, 122 bp, Homo sapiens
gcccccagctcccgagggggacctcggatgctcagaggccttgacggacctgctgcctggcgagtgtggaacctgaaccacctgtggggccgactgagggacttctaccaggtaaggggtct

SEQ ID NO: 556 - DNA, 122 bp, Homo sapiens
gttttcctgggtgatggagcaacatgctcatggctcatggcacctgcctaatgtgtccttcgcctcctgtgcctgcaggcccttctccttctggggctgaaccccgtctctgcctccctcca

SEQ ID NO: 557 - DNA, 122 bp, Homo sapiens
atcttaactttctgagccctttagtgtgtaaatcattctttacttcaccaaggaaatccacgaaaattgtcagtgaaagccaaacacatagattcattcattcattcattcattcattcaac

SEQ ID NO: 558 - DNA, 122 bp, Homo sapiens
gcccagagcgcgccgggaccgagggccgcccgagcgcacacctggggggcgggcacggggcgctcagtccagcctcccagccttggcttttcggaggcctggctccctcccgggcctgcctt

SEQ ID NO: 559 - DNA, 122 bp, Homo sapiens
ttttattttaggttcaaggggtacatgtgcaggtttgttacacgagtaaactgcatgttgcgcgagtttggcttacagataattttgtcacccaggtaatcagcaagtaacactttcctagt

SEQ ID NO: 560 - DNA, 122 bp, Homo sapiens
ccctgagaggtccgggaggacttgctgtggaattcaagcgaccgtgggccttgagggaaccggggggcaagacacccacccagcattcgcggaatatttcctcgaattatttcggggagggg

SEQ ID NO: 561 - DNA, 122 bp, Homo sapiens
ttgcctgatacagcaagcggtttacagtcctgggccaaacaggaaggcgacagcgctagacgcagccggcaggtccgcaaggttgaggtgcagcggtgccgcaggtgtcacctcgagagtgc

SEQ ID NO: 562 - DNA, 122 bp, Homo sapiens
tctggatttagggttgcttctgaggagcttttaaaactagacacaaaaagaagttccagccgattcagagaagcagtccagtcagcacagcagctcgcggttttcccaggttcatcttgacg

SEQ ID NO: 563 - DNA, 122 bp, Homo sapiens
gagaaggcattgccacctcccttcagacaggggatttccgctagttgctttctgtcatttcgtctctattctgcactcagtcccttgttctgtctggaggttcctgttttcctgtacccaac

SEQ ID NO: 564 - DNA, 122 bp, Homo sapiens
cgtttcgcctttgtgctttgtaagagaaagccttttcttccagggcacaacaaacttgggcggagagcttccgtgtggccccccgggcgaggccgcccacggtggtgaggccatccgagggg

SEQ ID NO: 565 - DNA, 122 bp, Homo sapiens
ggcggtactgttctgtttttcccccaactccagcattctgtgatatgtagtccggagttccgtgtagtcgcgcatagctcagctgcagtaaggctgtaaatgtttcccctgcggaatcctgg

SEQ ID NO: 566 - DNA, 122 bp, Homo sapiens
atgcctcatcccctactcctgtccccctggaggacatctgtctctctttcctggtctagtcgtgcctggcctggtctcggttcccctcctgctctgaggcaaacagatcgccccagcagaca

SEQ ID NO: 567 - DNA, 122 bp, Homo sapiens
agcggtcatctgtgagtcagaagatttcgccgtggcctgatttcccaccctttctgcccgcgcaagccgaaagcgctcatgttggcttttcctttgccacttttccaacttgccagttccat

SEQ ID NO: 568 - DNA, 122 bp, Homo sapiens
cccgcggggccgcagcccacgcccgggacagccgcccgcagtctacgcagggaggggccgcggggctctggtttctgcaagttctgaattgtctccaaggagcatattccaacgtcagaata

SEQ ID NO: 569 - DNA, 122 bp, Homo sapiens
tggaagatggaaaaccgcacttctccgaggacagaagacccaatgtaatatttacataaacgatgttgcttgattcattatcgaagcttttcttttccgtcttccgtctccgatctgggcat

SEQ ID NO: 570 - DNA, 122 bp, Homo sapiens
tctcacagtgtttacattacaggaaagaaaacacataaacacaaatataatgtcaagtatcgataagtggtcagggtgcagtggctcaggcctgtaacccaacccttgaggaagccgagccc

SEQ ID NO: 571 - DNA, 122 bp, Homo sapiens
ggcttatttgcggccatcttgtgttgtagttctcaccaacaggttaggaagaatctgcaccgtgagccagtccgccgccccgagggctccggaagcagcgggtgctcggcccacgtcgcctg

SEQ ID NO: 572 - DNA, 122 bp, Homo sapiens
cagatacatccaggcacggggaccggggctccacggctctgggggaaaaagtgccaacggcggtgtttcagacaccgtggcaggctgatggatggaccattggagggattaacaaatgacga

SEQ ID NO: 573 - DNA, 122 bp, Homo sapiens
gtgtacctaaaatgagtatgaaatttagcattttaagttaattgtgtagtcatatagttgcgacatggtaaagtatactatatatgttgtgctgtgtgggttatataactatattgctttaa

SEQ ID NO: 574 - DNA, 122 bp, Homo sapiens
atactgggggcacatagtgggcctcggcactccacctgccagcaaaatcattttctataacgccgcaagcctaaaaatgggccgataaacacaaaccagaccctgaaccagatcgttgttaa

SEQ ID NO: 575 - DNA, 122 bp, Homo sapiens
cgccccctcctgcgcacccggagggagaggccgcgcgcgcccgcccgctctttctgcgcgcggccctccccgctgcccccgccctcgcgccctgtttggagggagccaccctgacgtcggag

SEQ ID NO: 576 - DNA, 122 bp, Homo sapiens
agcttgtccaacctccagcccagggaccacatgcagccaaggacggcttggaatacagcccgacacaaattcataaactttcttaaaacattatgagattttttcacattttttttttttag

SEQ ID NO: 577 - DNA, 122 bp, Homo sapiens
aatcccgagttgagtgttgtccgatgcagacacccttggctgatgacctcagacttgcctcggaaccctggctttatgacccaactgtgtgctatggtccaaatgtgtgtgtctccctcaaa

SEQ ID NO: 578 - DNA, 122 bp, Homo sapiens
cggcggcgcgctgaggacaaactgttagcctcgcgtcccgccttgtctctggtcaggtgacgtgcagctgccatcctgtaagtaggaatggaggcgagggaggagcaaccgaccgtgatctt

SEQ ID NO: 579 - DNA, 122 bp, Homo sapiens
tagatgggactataggtgcatgccaccttgcctagctaattcttttattttttgtagagtcggggatcttgctatatcagcctagggtggtctcaaactcccaggctcaagctatcctccta

SEQ ID NO: 580 - DNA, 122 bp, Homo sapiens
gcatatgctcgtgtgtgggtgccgctgtccttctcctggctgaccatgaccccctgcatgcgttcaccacatctatggagccatttgtccacccagaggcatctgtgacaccttcacctttt

SEQ ID NO: 581 - DNA, 122 bp, Homo sapiens
agaagcgggcactattgtcacgcacccaggggccactgaggcccacgccagtgaggaggccgacccttgtcccacggtcactgcgtgtggagtgagattcatgacagacaggctggcccaga

SEQ ID NO: 582 - DNA, 122 bp, Homo sapiens
gccgcctgctcctgcgcagggctgtggccgaggaacgcttccgcctggagttcttcgtgccgcccaaagtgagttaccccataatcccacctagcctggggggaccagaggaggcacctggg

SEQ ID NO: 583 - DNA, 122 bp, Homo sapiens
ctggctgggctggacccggtccctaggctgtgaccgccgaactccactgcaacagacgggcgccaccaaagccaggccctgaggcctgggagtcctggactgagaaagggggttcctgggcc

SEQ ID NO: 584 - DNA, 122 bp, Homo sapiens
gaagagggtaattggagtgagggagagggcgcctcagcggagggagcgtggtcctggtcccggggctcctctgcacagtcggtacctgcagacccatttaaaaaaccctttctcccagatgc

SEQ ID NO: 585 - DNA, 122 bp, Homo sapiens
gctgcctcgccccgcgttttcctagcgggggatggcggctccccgtgtccgcatcgctgccgggccctgccaccccaaccccggccgcagtggctggaagccgtggccttttccgggctccg

SEQ ID NO: 586 - DNA, 122 bp, Homo sapiens
ttggccgtgcgctctcgttccagccgctgcagccgtacttccaaaggctcattctgtcgacgtagagcccacttgcgtacactgggagtctgggcttccagcagtttacggtaggcagcaca

SEQ ID NO: 587 - DNA, 122 bp, Homo sapiens
attccacatgacctagatcagtcctgtaaaatattagctagtagtatctgctcagaatgacgagagtgtgattatgttccctgggcaatttgattgtgagttaacaacgtaaagaaacgaat

SEQ ID NO: 588 - DNA, 122 bp, Homo sapiens
gggaagcctctcggtgactggcagccgcagtatggtccctgtgcttggcacccatgcaggcggtgtggggagcccccagccacaaggccaatcccatgggtcaggaccctcctccaatgctc

SEQ ID NO: 589 - DNA, 122 bp, Homo sapiens
agatattactcccaatatcgcaggaggtatacacccccttgttatattattcctatatcccgggggggagacgatgatactagtggcaatatcgcaggggctgtatacacctcctgtgacat

SEQ ID NO: 590 - DNA, 122 bp, Homo sapiens
gtctccagggtctaaagctgagtgtcgcatccagcgtgggggtgcctctatacacgtccccgcagaccccccccccatatgtgtcctccaggccgacgcccccttccggcagggggccgact

SEQ ID NO: 591 - DNA, 122 bp, Homo sapiens
cagggattaaagaattcgtccagggccgcccaagcgaatatgtcaggctcagggacccagcggaatgccagcccgcacccccgcaccccctcctccttccagcgcgagcaggcggcgcgctc

SEQ ID NO: 592 - DNA, 122 bp, Homo sapiens
cggttccacgtgtctctgggaaatttttttcccctttcttcctaataagcctgcgtggaacgcagagcctgcgcaatagccccggtgaagttgtcgatgccctgaactctggtttttttact

SEQ ID NO: 593 - DNA, 122 bp, Homo sapiens
tgggcccttgactgttctgccctgatggcacttggtgagagatccattgagagccctttccgtgccttcctgaatattgatatgttttccagcctctcctcctgcgctggcccaaggactca

SEQ ID NO: 594 - DNA, 122 bp, Homo sapiens
tccagatggagccgggaagtgctaggaggccagtgaggccagtctgtgcagcagggcaaacgagtggtatcctgctgggatgcaactcaaatgccttcactgggaactgctcccccaccagc

SEQ ID NO: 595 - DNA, 122 bp, Homo sapiens
agggaggaggctctaggctctgacttgcccttgcagagcttggaatccaggagtgtcagacggtggtagagataaaaagctgtgtgtctgagaggtgagggcgtgggctttggggccctaaa

SEQ ID NO: 596 - DNA, 122 bp, Homo sapiens
gactacactggtcattgccttgagagatttttcccagccacagaagtcttctggtgaagacggtctttagactggcagggtttcaaagtaaatataagtaaaataattggcaagtctgatat

SEQ ID NO: 597 - DNA, 122 bp, Homo sapiens
agggacggagcgggtgtgcccctacccgggctggcggtggctacgtctcggggtgcagagcgccggggcgcactaggcggggacccttcctggccgcgcgcagctctggctacgcaggcggg

SEQ ID NO: 598 - DNA, 122 bp, Homo sapiens
tgtacgtgttgcagtcctttcatttgccacaacatatggattccataaatgcagacatgccgaagtgcatctgtctgggtagttaacatgatctaaacatccctcttcgttccgctaactcc

SEQ ID NO: 599 - DNA, 122 bp, Homo sapiens
acattgtattcctgccaaaaatgtttaatctgaacctaatggtgaggaaacaattgggcacgttcaaattgagaagtattttgcaaaacagctggcttaggctcttcaaaaatgtcaatgca

SEQ ID NO: 600 - DNA, 122 bp, Homo sapiens
ctccgcctggactgcaggaaaaggctgcttaaacagcctgccttttcctgctgcctgactcgcgccatctgcggccacctgtctcgtttcttccccctggctggcgcacccttccttcctaa

SEQ ID NO: 601 - DNA, 122 bp, Homo sapiens
attagcaaggccgtgggccccgtgccgaggcttcctgcgggcgggatccgcgggcacggccggcccagccgccaggtgagcctgagcccttcccggcacctgcatcctccgccgccacaaaa

SEQ ID NO: 602 - DNA, 122 bp, Homo sapiens
tggagtcggaaaaaaaaaagttttacggggccaccgctcgctttcgtacacgctaagaagcgttttcacttagcacaagcacggatctctgcgcgtcagggcaagctgtgagggagccggtg

SEQ ID NO: 603 - DNA, 122 bp, Homo sapiens
gggggccggtagctaagggagttactggatgcaactcgttctctgctgtgactgaattcccgcgcgttgtcactttggggaagtaaggtaagggtggcttcggtatttcaggctttagacat

SEQ ID NO: 604 - DNA, 122 bp, Homo sapiens
ctatctcagaagagtgaattccaagagagagggcgcggaacccgttaaacctgccaaccccgggcaggcgtgatgccattatgcagtttacatgccctggtctcttccacccgggtggcctt

SEQ ID NO: 605 - DNA, 122 bp, Homo sapiens
gcatcgacaagattcagtttcctcctcctccctccctcctaaaatatacaggcatcttgtcgccacagaactcagcacctaggaaaccacataagccactacagaaacgattgcattctagt

SEQ ID NO: 606 - DNA, 122 bp, Homo sapiens
aggcagccgagaagcgctctggagggctccatggagcggccgatccatagggtgcggggccgccgccgcccgcaggagccgccgccgcctattgttcatgcgcctccgcagagctgggagga

SEQ ID NO: 607 - DNA, 122 bp, Homo sapiens
ctcctcacttcctagatgggaggtgagcgcctagaggcgctcctcatttcccagactgggcggctgggcagaagggctcctcacatcccagaggatgggcggccaggcagagactctcctca

SEQ ID NO: 608 - DNA, 122 bp, Homo sapiens
catgagtgctacggctcttaaggtggcgtgtttggagttattcgtttctcccggtgggtccgtgatgtggctggctttaagaacgaagctgcagaccttcacggtgagcgttacagctcata

SEQ ID NO: 609 - DNA, 122 bp, Homo sapiens
ggcatgggtctcttggctcaggttggatcagctgactggttacctcctcctcaagttccacgtgcccacctgcaacaacagtggggccagtaggtgaatggtggtggtcttggccagggagc

SEQ ID NO: 610 - DNA, 122 bp, Homo sapiens
ccgagtcagagtacccctgaggggtaatgctctgcaagtaagcccggttcatcagcagctcggtgggttccaagtgccctttctcgcgcgcctcgcgctccgccgcttcccgctcctccgcc

SEQ ID NO: 611 - DNA, 122 bp, Homo sapiens
agccctccttgactctctcttgcagacaggtatcctgcaacatggatccctaaaacatggcgatgccctcaggaggcactgtccatctgcagcctgctgcccaaagcacaaaccggttgatc

SEQ ID NO: 612 - DNA, 122 bp, Homo sapiens
taaaggccatagcttcctggagtcacctgagccacactggaggtttgcagagaaggccatcggtgggacagccacagggtgggggatggaagctctgataccttcaaatgagggattcttgg

SEQ ID NO: 613 - DNA, 122 bp, Homo sapiens
tctcatctccctgtccttgtggggagtgtggagcccagcacagccaccagtggagggggccggggagaggtgggtgggggctgatcccagagcttcccaggcttgtccagggagacagagct

SEQ ID NO: 614 - DNA, 122 bp, Homo sapiens
ggctctaacagcgacgttcagaggatctacagatatctgcggtagacacgcccacgaagtcgcctctgtgcctacctatcgggtcctgtgaccacaggcgacctcagtccccgaaccatctt

SEQ ID NO: 615 - DNA, 122 bp, Homo sapiens
ctcccagctgtcaggagttgtcaaggggattaagcggattctctttgccgttcatgggaacggcagcgggattagctggggcctcctaccgaggagggggtgggctcgggttagcacagacg

SEQ ID NO: 616 - DNA, 122 bp, Homo sapiens
gctccaactcagctcacatggctctgctcccactcgggggcgggcgcgtgggaggaccaacgaagagggaggaggtgggcacgcagcccacagaaatctcagcttcccccagttctgctccg

SEQ ID NO: 617 - DNA, 122 bp, Homo sapiens
agggtttcccacaagatatctgtgtacatggctgtcttgctgtcattgttttatccaggacgttctctaccattcaggatctgtaagtgtgccctggaaatagcacagggctgagagctgtg

SEQ ID NO: 618 - DNA, 122 bp, Homo sapiens
gggcggctccaggcacttcttcccttgagtgggtggactactgaggtcccctgggcacggcgtcatggtgcggaacgtggatgacctggatttccacctgccctcgcatgcccaggacatgc

SEQ ID NO: 619 - DNA, 122 bp, Homo sapiens
accaccttctctgagagtgagcaatgaacaggccccagggagtcatgactgaacccctagcgcctccctcctccccttccatcccccaccaccaccacctgccacctccaggaccacaagcc

SEQ ID NO: 620 - DNA, 122 bp, Homo sapiens
gcctgcatggtgcaggatgctgaaggggagacagaaagagaaggtctggcggcctgggggcggccatgcgtgtagccctccccggtatgtttttgtgcacagagttggcgccagggcagcgc

SEQ ID NO: 621 - DNA, 122 bp, Homo sapiens
cagcctagttatcttctctgttctttctctcacaatttgatctcacctagtcccaaataacgacagtaaattcacctgcaatctccatcctagtatccatgcaactgctaactactcaacat

SEQ ID NO: 622 - DNA, 122 bp, Homo sapiens
catgaattgcaagagaaatatttaccttgtgcgggtgacaagtctacctgcagatgagcccgggggcttgtccagtgcttgtgagcatgatgcagaaatatcaactaagttctcgaagaatg

SEQ ID NO: 623 - DNA, 122 bp, Homo sapiens
tctccacctggccactagcttggccacaagatgcacgatgcaaggagagcctgctcagagcgcaccctcctggagggaggggcccggctgccagcgaagagagtggggtcaatagctaaggc

SEQ ID NO: 624 - DNA, 122 bp, Homo sapiens
ggggcataggaaggggctgtggaagtcggatgcaggccccctgtgctggctctggggctccgggcttatgcgaccacacgggcactcaccccaaggccatgagggccctcgtggcaccatgc

SEQ ID NO: 625 - DNA, 122 bp, Homo sapiens
gaaaaggtggacatggatggcaggggagccccaggaccttctttgccaaacaagtgttcccgggaacctatctgactgacggacctggcgtccaagtggcctccaccacagtgacaagccct

SEQ ID NO: 626 - DNA, 122 bp, Homo sapiens
gggtcaggcccacgcgggccaccagccgcactactcttccgcttcccaagtcggcacacacggcgcccgtgcctccacgctgctgactgctgcaagtcgaatccctctcaactcctgtccgc

SEQ ID NO: 627 - DNA, 122 bp, Homo sapiens
ggcacggtcctcggcatgctcatgctgcagtgaatgagcgagtgagagtgaactgacaggcgcggggaggaagaggctgaagcacgcttcacttgcccgcagttttgtgagggcggggtctg

SEQ ID NO: 628 - DNA, 122 bp, Homo sapiens
ccccttgggacaatgcgtaggggacctccgcgtccccgacacccgactgggacacggccgcgggctccttcgtccctcaccgccagccagggaggctctgcatgcccacgtccacttcacag

SEQ ID NO: 629 - DNA, 122 bp, Homo sapiens
ctaaatgaagccagctgcttccagtgactcttagtcactggaagttctgcttctcagaaccgcccccgttgtcttcatcatcaccttcctctgtctccacacatcctccccagtctgttgca

SEQ ID NO: 630 - DNA, 122 bp, Homo sapiens
gccccgcgcgagggaaggggcggggcatcaggagggagaccacgcccactctgcgccgaccggctgggcctggcacccgcgggcggccccagcctcagtctccagctacctttgcctcctgc

SEQ ID NO: 631 - DNA, 122 bp, Homo sapiens
atccagggctttcggctgctggggccccaggggcacaggaagggggggaaatggggagaccgtaccagcctttttgcccgggatctgaaaggtctcagggccacggagcaacactagcctga

SEQ ID NO: 632 - DNA, 122 bp, Homo sapiens
catttatttttttttgagatgggggctggatggtgggggggaggggcggtcttgctctatcgcccaggatggagtgcagtcactacctaggctggtcttgaactcccggcttcaagggatcc

SEQ ID NO: 633 - DNA, 122 bp, Homo sapiens
ctctcttctgaaaccatagctgctgagaagctgcagagggagcctgcgccgtctggattacgtggcagtgacccgatggtcctgccacacaggtcaagttcctttaaaagtcttgtccttga

SEQ ID NO: 634 - DNA, 122 bp, Homo sapiens
ccgacactacaacaaagacgagaggatgattccgctcatggagcgcatcgcctgggaaatcgctgagagagtctgccgagtggtcaacctgcggactttgttcaagtaagaagccatggcgt

SEQ ID NO: 635 - DNA, 122 bp, Homo sapiens
gtgagatccttcaacagggtgatgaacacctctctggtttcctagagaagcctaagaccacgccatggccagggcgcatcagaaaatgtaggtcaagctgtgctgagtaaaagagtgttttc

SEQ ID NO: 636 - DNA, 122 bp, Homo sapiens
ggcagacggtctggggctgaaaccgccacaggccggaaaggtgcgggcgtgaacgtcctgcgcgccgacgtccccccgcgccggtctcccctcaatcctcctgctcccctcctccgcgtccc

SEQ ID NO: 637 - DNA, 122 bp, Homo sapiens
caggctgggagtctagcgggaggggccgctcggggctgctggcttgcagccacccacacgcggtgtgtccctgccacagccacggagagctttgtccccgcgcagggtgtggcgggcgtggc

SEQ ID NO: 638 - DNA, 122 bp, Homo sapiens
gtgctgaccgactggggaagcccggagtgtggggactgaggaggggagtggcctggggcgcgctggagcctgcgaggaaggcgccgcctcggatcccccgccccccattccccttcccgaat

SEQ ID NO: 639 - DNA, 122 bp, Homo sapiens
acctgagaggtctgacctgagggctggcaggacttcctcttcttaggctggagtgcaatacgtgaagctttcagaggctgaaatcttccaatgcaaagggtgtttttaaagacacacggtgt

SEQ ID NO: 640 - DNA, 122 bp, Homo sapiens
catatgtgatacctccccggggtctgcagtgctgctttcctcacgctgaatccctcttcacggtggccaggcccaggcatgtcatcttcgcaggcagagggtgagcaactgtgtgccaggca

SEQ ID NO: 641 - DNA, 122 bp, Homo sapiens
ataatgactcgtgaatttcagatcagttttaggttcacagcaaaatggagcataaagtaccgagagttcccatatacccccaccctccccgacacacagcctcccccactatcaacatcctg

SEQ ID NO: 642 - DNA, 122 bp, Homo sapiens
ctgtcagtggcagggtaggggtacccagagccatggcaggaaccaccccctgcccgcccccgactagaggctcagcttccctgcgtgcacctagctcaggaagccttcctttctagtctcta

SEQ ID NO: 643 - DNA, 122 bp, Homo sapiens
ggcggggggcggggcttcccggagagattttcccccttccctctaaacttcccggcaccccgatccggggctccagctccggctggacaatagctcggggacccagtccccctcgagtgtcg

SEQ ID NO: 644 - DNA, 122 bp, Homo sapiens
gaggggctggagtattgggaccaggagacacggaacgccaagggccacgcgcagatttaccgagtgaacctgcggaccctgctccgctattacaaccagagcgaggccggtgagtgaccctg

SEQ ID NO: 645 - DNA, 122 bp, Homo sapiens
aggccttagctgaactcactccaaattacatcacaggcaaaacatatctagagtccggatcggaacaaaacagaaaggacagtccattgtcctacacatatttaactcaagtgatccgtagt

SEQ ID NO: 646 - DNA, 122 bp, Homo sapiens
gcacagagccctccacacccctggaccagggcatccgggccctagaaattccacagctcccgtcctggccaccctggaagctcatcaggccaagacccggacagagcttcagaggagtgttg

SEQ ID NO: 647 - DNA, 122 bp, Homo sapiens
tctccattggtgtgcttaaagcgatctcctctacacgaacgctagggcagagcacattttcgcacaggcagcgccgcagcttgccctggatcttgtcgattgagttgaagtcggacacgtgg

SEQ ID NO: 648 - DNA, 122 bp, Homo sapiens
taataaatcaccttacctggtcagtgatgctcttactagattttggacagatatttgcatcgggatgacatctgtgttggtgaggtatgagtagtagatttttgtagtcaaaacatctgtat

SEQ ID NO: 649 - DNA, 122 bp, Homo sapiens
tgtgagaaccgacctaagaagtgtctgtctgataaagctgttgtgatgagttagtgaattcgtacacatagaacctttagaactgtctttgacatgtagtaagtcagctgtgtagatggtgg

SEQ ID NO: 650 - DNA, 122 bp, Homo sapiens
agcgatggcaccatagactttcgggagttcatcattgcgctgagcgtgacctcgcgcggccgcctggagcagaagctcatgtgggccttcagcatgtatgacctggacggcaacggctacat

SEQ ID NO: 651 - DNA, 122 bp, Homo sapiens
ctcccattcttttaaacatggttgtgagtctttcagacctctgtttcctaatgtttctcacgggtcatacaggttggctgagagtaaatggcaaggaagggcctgagagactccgggcacag

SEQ ID NO: 652 - DNA, 122 bp, Homo sapiens
acagcagaaatgcagctactgtctgccatttagctaaccctgtcacagccttcaggccagcgaggtccagctcacaccttcagggggcactacatgtcctttgtcatttaatcgaatgcatt

SEQ ID NO: 653 - DNA, 122 bp, Homo sapiens
tgactcggttttctagcaaaggagctgctaggctcgcactaagtatcagaatttactgttcgctttgcctctgcgcttcattttgcaaccttgtgcaactgacagccaggcaggcagggagg

SEQ ID NO: 654 - DNA, 122 bp, Homo sapiens
acacgcccctcgcggagagcccgccccagctgggcgccgctccctgcgtgaaaatgggcccgggggctgagctagaagcccgctccccaccaccatcgcaggtcactgcaaaacctgctgga

SEQ ID NO: 655 - DNA, 122 bp, Homo sapiens
acaacctatcagaactccagcctttcgtggccttttcatgctgtactagctgtcatatgccgtatcagctgccttaccgtttaaaattttattatctccttcacctcctccatttaggcatt

SEQ ID NO: 656 - DNA, 122 bp, Homo sapiens
aggaggggttaggttcaggggttttctcactgcagtcaggttcaggcccctggaatttgacggtgaaggttttccattgcctgagttatttctaggccggatcttgaggggagtttaatacc

SEQ ID NO: 657 - DNA, 122 bp, Homo sapiens
attgtctcgacttgagatgatagacgggagccgggagactgcaactcccgtcaggccgtgcgccactggtgggggggatttcgagaccacaggcgggcgaggtgcccaaggtggtggaaagc

SEQ ID NO: 658 - DNA, 122 bp, Homo sapiens
gggtatatgaaagaagtgagtgaaactgactccaagattctgcccctcacagtggtatcccgccactcccaggagcttccagctatcctggatgatacaactttgagtggatcagatagaaa

SEQ ID NO: 659 - DNA, 122 bp, Homo sapiens
ctccaaattaactcatacgcccctgtctcttcttcagcaccgaggcaggaaggtctctgtcgaatttgttgaactccttagacaagcacaggttaaatacacatgccaggatggtggtctag

SEQ ID NO: 660 - DNA, 122 bp, Homo sapiens
ccaccacacccggctccatatcttttttaattttggatttttaatcacctttacaggcagcggtaattgatgaagtaagtcctgaccaacataaaaacacatttttgcaatgaggtgctaaa

SEQ ID NO: 661 - DNA, 122 bp, Homo sapiens
tgcctgatcctgtcagctctccaggtgggcagaggctgcttgcagagcctgaaagggatgcggacaccgagccagggccggatgccggcctgtcacttgcttctggcacacctgatgatctg

SEQ ID NO: 662 - DNA, 122 bp, Homo sapiens
ctcccgggctcacttaccgagcgtgtggatgggagcgcaggccgggggcacctgggagcacggcgggccgaacagtcgagccgcagctccgctgcagccgacgccggggcagcgagtcgcca

SEQ ID NO: 663 - DNA, 122 bp, Homo sapiens
ccgaggcggtggccacgaccccaggcttcccgtccgcccgccccacgtcgaggaagtggtcgtcaccaactctggctggcactccccgaggacgctcgagcccgcgtaacgtctgtctccgg

SEQ ID NO: 664 - DNA, 122 bp, Homo sapiens
accggagacacacaagccggcatgcttgagaaatgtatcagcatcttgagtgcagcagagcgtcctctgcccccgccgccccgtctttaagcaggcacttgacgatgaggctgatggattcc

SEQ ID NO: 665 - DNA, 122 bp, Homo sapiens
ccccggccgcgccgggcgcggggctcgggattcgggagaccgcgcggcgccgaagccacgcgtcagccccactgtcccgcgcgcctcgccccaggcctcgggctcttcctccgcacctcgta

SEQ ID NO: 666 - DNA, 122 bp, Homo sapiens
gaaatagcagaaaaattatgtaagtgctgtgacatcttactcagagttaatggggtttctcgtatacctgctatgtgccaggcatggtgctggaggccataaagtcatgtgaccttgaagga

SEQ ID NO: 667 - DNA, 122 bp, Homo sapiens
aagcctcatgatgttagaaattaccatcagctcaacctccctaagtttttattctgaagacgctgtatattatgcattcaaaataagttttatattcttaaatttttgtagcctgtggtttg

SEQ ID NO: 668 - DNA, 122 bp, Homo sapiens
gaattagagtaggggctcctggaagctgtgcccagctgccctgggcagggtacaagggaacgaatttctgccacgtccaaaagcctgttttccaggtggttacttagccagatcgtgccaca

SEQ ID NO: 669 - DNA, 122 bp, Homo sapiens
aggcaggatgcacccagatcccgtccacccgttcacaacagctgaaaggtgaaagcaacccgtgtgtctatcaacaggtgacggataagcgcaatgtggtatccacataccagggaatattt

SEQ ID NO: 670 - DNA, 122 bp, Homo sapiens
aaggaagggagagaaacctaaccaaagaaacatgggaagctggaaagtcgagggcacagccggaataaaggcacagatgggcaccccacaggaggggccttggccaggttgggatgcagaga

SEQ ID NO: 671 - DNA, 122 bp, Homo sapiens
gcatccctgcgcattgatacgcagaccaggcaaatgcagctcctggaagcctcctcggtccgctcttttttccctaagccatagtctgtctgcccccacccccttcccgtggaatctttgcc

SEQ ID NO: 672 - DNA, 122 bp, Homo sapiens
gaagcagaggagagctacttgtttaaaaatccacattcttggacccaatcctcagatgcacggattcagtcttcaggggaaactctgttttaaggggtatgttgtaatctaaagtaattggt

SEQ ID NO: 673 - DNA, 122 bp, Homo sapiens
gaagccttgacaacttgggcctgcccataccagttcttaaagagactacttccgttcacccggatttcggcaagagttacaatggaatcagaaaggctgggagtatataaccccctacctgg

SEQ ID NO: 674 - DNA, 122 bp, Homo sapiens
ccagtaaacccaacttccgggtcccattccaggcctccaagcccacgtgacaacaagctccgccctctgctgtcccgcagatgccactcggtgattggccgcgtctgaagccgcgccccggc

SEQ ID NO: 675 - DNA, 122 bp, Homo sapiens
ggaatcatggtgcagtgggggtagccagagacgagagcaggatcaacagtgcagaaacaccgagacaaggggctgcttaagggaaatgctcaggaacagatattgtgtggcttcgggcaact

SEQ ID NO: 676 - DNA, 122 bp, Homo sapiens
acagaaacggtgctagtgaacatgcagacccacttagaacccatggcaaacattcgaaaccgtaacaatgagtgagtacttagctgaaaaccactgagaaaaatgagacccggcactgcatc

SEQ ID NO: 677 - DNA, 122 bp, Homo sapiens
cgaaggagaaaagaacaatacagattgcaggtgtgaaaatattagcgtcccggtgcatcacggagcaccctgagtgtctgcttggggagggaggaaacacacaacccagattaagcagctat

SEQ ID NO: 678 - DNA, 122 bp, Homo sapiens
ggaaatgacacaaaaagggaaagttgctattctgtttttccaggttgtaattacagcaaacgattgattggaaaacatttaaatagcaaaacgtgtctgtgtaagagacacatgtttttgta

SEQ ID NO: 679 - DNA, 122 bp, Homo sapiens
ctggactatggtgtatgtgtcaaaggccaggccggacaattcctccttgtgatggaaagccggatgactctatccccttccagtcttggcgtctgaacttcagcagagatgggggctcagtc

SEQ ID NO: 680 - DNA, 122 bp, Homo sapiens
agagctgttttcacctgtgaccctggccacaaacttgtgaggtgtggatcttattttccacgttttgcttgcgagaaaactgattgtgaaaaagtactctgcgggagatggccggtgaaagg

SEQ ID NO: 681 - DNA, 122 bp, Homo sapiens
aaggcagagtctttgatacggcagagccctcggcagcaaatgccaggctctcatcatgagcgactgcgaggtgtgagttccaacagctgctttgagctgctgaaggcctgatctcttctagt

SEQ ID NO: 682 - DNA, 122 bp, Homo sapiens
acgcggtctcagctggacgcgggcggggagggcgccgggccacgaggccccgcccacagccggaggccccgcccctaaagactatcttggtgccccgcctcttcagactccgcccgattcca

SEQ ID NO: 683 - DNA, 122 bp, Homo sapiens
tgtgcgtccacaggtatgacaggtgcgagggctggagcccactagcatcaccacgctgggcgggctcccgatcctggagctcagggagtggcagacgctgcaagcgtgtgcctggcaggact

SEQ ID NO: 684 - DNA, 122 bp, Homo sapiens
ggggagggcgcatacccgagacgattgtatgaagaaaatatggaggaactgttacatgttcggtactaagtcattttcaggggattgaaagactattgctggatttcatgatgctgactggc

SEQ ID NO: 685 - DNA, 122 bp, Homo sapiens
ggcaggtctgtggcttggctgggaactccagggactgagggagcactgcagctgtgggaccggcgcatagctaaaagccggcgggccatagggccccgcggaggaggccccagcaggcggac

SEQ ID NO: 686 - DNA, 122 bp, Homo sapiens
tgtatgactgaaaaaaaaaaaaaaaaaaaaaaaagcttgattttcctagtactcctgcaacgataaggcaggccaggaccttccagaagttaaaaaacaggctccactgaaacctgtgataa

SEQ ID NO: 687 - DNA, 122 bp, Homo sapiens
gcaattagacaaaaatatcaaggcacagaagccagtcaaagcattttctactactttattcgttgactcaaacaataacatcacaatatagccacactgattttagtcctctgctagtgagc

SEQ ID NO: 688 - DNA, 122 bp, Homo sapiens
aaggtcaaaaatgaagggtcagcccacttcctttgtacataaaacacctgcacttgttaacggccccataggctcttggctggactgcaagtgacttgcactgcttggccatagacactggc

SEQ ID NO: 689 - DNA, 122 bp, Homo sapiens
tgggagatggcaatacccacccagataggagagagatattgtgggtctgactccggggttcgctacttagtagttatgtccttgagcatgttatttaacctgagccatctgtaaaatgggac

SEQ ID NO: 690 - DNA, 122 bp, Homo sapiens
tcctgatgaaccagaatgccctagccacggccatgatagagcgagcccccacccaccacccgactactgcttgttgaggacttggtgatgcggtgtgttttatctacttactctttctgctc

SEQ ID NO: 691 - DNA, 122 bp, Homo sapiens
gacaaaatcctagtcccccaacaaaaagcaggcaagggcaggaggagggggaaactggcccggcagccccagtattacctggacctgcaggccggagtactggaattggaggctccatgggc

SEQ ID NO: 692 - DNA, 122 bp, Homo sapiens
aaaggagagataacttaggctccggagaagagggattttcagttaatttatggaatccaccgtcacactctctccgagcagccagctccccgcttaacggggaaattgaagcagacagcctt

SEQ ID NO: 693 - DNA, 122 bp, Homo sapiens
ccagaccaactcaaaattacagttttccagagcttatctaccttctaagctctatgtctacgtgtaagtgtgcattcatctcaagacgtaagtgatgaacttctcttcatctataacgaagg

SEQ ID NO: 694 - DNA, 122 bp, Homo sapiens
ctataatgcacaggatatcccacaatcaacaaggaattatccagtccaaaatgtcaatagcgtgacactgagaaacctagtatgaaggattaaatatcttaagtacttagcagagggggtgg

SEQ ID NO: 695 - DNA, 122 bp, Homo sapiens
gccacctgttaattgccataaatcctcccctgtggacatagttattcagcctgttacagacgtaattcacctttacataatttctgaaaaaatacatgcaaatcgaattttgtaaattgtat

SEQ ID NO: 696 - DNA, 122 bp, Homo sapiens
ttctggctcagcttcctcaattccctaccgaccctcctccatttcaagatccaggcatctcgcaaaacaatccagtttaggagggagttagagggggagaggaccccccccccaaaaaaacc

SEQ ID NO: 697 - DNA, 122 bp, Homo sapiens
gtacacatgagcatgttcagtgggcacacgcaggagaggggaggatgcatgtgtgctgagcgtgagtgcacagagcagaggcaaggagcatgtgagccttggcgaaaagaatgagctcccaa

SEQ ID NO: 698 - DNA, 122 bp, Homo sapiens
ggacagggacagaggctagggagcagcgtgcgcggacaccttgcctgcggggaaggcctacggaggccttgcagacagcgtctcagccgacacacagggccctttaagaaaagaggcaccgt

SEQ ID NO: 699 - DNA, 122 bp, Homo sapiens
atcactggcggtacaggaccagtgctgagaaagactggtgggtggtggggtggggcgggacgagcctgcctgcagggcatggccacccgctgtgttctgcgactagtgaactgtcatccgcc

SEQ ID NO: 700 - DNA, 122 bp, Homo sapiens
ggcctaagtttccatcacgctgcaaagcagaaccatctgttggtggcttctctgttagcccgtggctgtgaagagagcatttaacaatgaagagctggggccagagacacgagtccttggct

SEQ ID NO: 701 - DNA, 122 bp, Homo sapiens
ttttaaaactgccttacccttttggatgtatttggattccataaaggtgagtacaatcaacgagaaactgaagtgggagattctacgactgcccagaggcagcagcatgcatggggctggtt

SEQ ID NO: 702 - DNA, 122 bp, Homo sapiens
ctaatggcgctgggcgtagccccctgtgaacctgaaaacctctgcttgagctcgggaggccgagcgggggcgaaggagagattgacccttccccgcccaccccttggggggctcgtgggggt

SEQ ID NO: 703 - DNA, 122 bp, Homo sapiens
catcccggttccagacaattccagggctttggaatcatgcctcagactttctggcgctctcgcctccacaacctaaaaacagagacgctaggagagaggctgaaagacgcgcaagtcccgcc

SEQ ID NO: 704 - DNA, 122 bp, Homo sapiens
atgctgtaacaaggcagtggttagtggacttgctgggcactggggcagcaagaggtgtcccgtgggtcacatggatgccaggcgtgtccccaccctgtcctggagcagcagccctggcccca

SEQ ID NO: 705 - DNA, 122 bp, Homo sapiens
ctctagcctacagatcactcttcacatctccaagatagtgagggcaaagattattgtacccgtgaacagactagaagagtgaggcttattcaggtcaggtgacatcttacctaaggtcacac

SEQ ID NO: 706 - DNA, 122 bp, Homo sapiens
cctccttgccagcaagatctggaccccagacacgttcttccacaacgggaagaagtccatcgctcacaacatgaccacgcccaacaagctgctgcggctggaggacgacggcaccctgctct

SEQ ID NO: 707 - DNA, 122 bp, Homo sapiens
ctccctgcgccccgctgccgcgtctttgcttgcaacctgacctcacctttcctcgctaagcggtttgagatcctcaagtgtaaacaggactctccctggaggctgctcctccgggcccctcc

SEQ ID NO: 708 - DNA, 122 bp, Homo sapiens
tcatgagggaggaatccgcatggtctaaccacctcttaaaagcaacacatcctggccaggcgcggtggctcacgcatgtaatcccagcactttgggaggccgaggcaggcaaatcacgaggt

SEQ ID NO: 709 - DNA, 122 bp, Homo sapiens
gacaggactgcagggccggcaggagcggggcacacggggacctcaggggatcttggtagccgagggccttcctctgagagctgcaacgcaaagagactcaaaacaacggagaaaaaactcag

SEQ ID NO: 710 - DNA, 122 bp, Homo sapiens
ggggcgcacgggtctggaggcgcagctcaggtttttgcgttggtcaccctgccctccgcacgtggagagggcaggcataaagcaccttgaaaggaaggtgctgtcaatgctatccgacgacc

SEQ ID NO: 711 - DNA, 122 bp, Homo sapiens
ctagagtctcaccctagctcctccccagtccggatgtctcgggaactgaagaaggcgatgcgtggaaatcgcaggtcttggtgcagcatgaagacccggacgggaatgatgttggggtcaca

SEQ ID NO: 712 - DNA, 122 bp, Homo sapiens
ttacctacgcccagcccttgctgcgcttcattcatttaatccagctgggccaggcctggccggccgaagaggtggctgctgttatggcagtttgaaagatgagaaaatgtaggctgacatag

SEQ ID NO: 713 - DNA, 122 bp, Homo sapiens
tactcaacctgagtgcttggaccctgtgccaccttgacccttctccctcctgtggctggtcgacctgcctgccctactcccaggtcatccccagagcacaccaccattctgaggggaggcgt

SEQ ID NO: 714 - DNA, 122 bp, Homo sapiens
gcaccagggttttggggccaaagcaagcagtgcctctgtgtttggggtggagcttcttcacggtctgtgaacactacgcgcaagccctcgggcgcggtatgggcgagtgccctgccctggcg

SEQ ID NO: 715 - DNA, 122 bp, Homo sapiens
ctcgggcgtgcgcaaagctccgggttcagtttcccgcgctggaactttttcaatagtaaacgagcaaagctccgcgcgcccaggtggcgcgagcactaggatctgtcggttggggtcctact

SEQ ID NO: 716 - DNA, 122 bp, Homo sapiens
cggcggcggcggcagcagccgggctctcgggagcctgggtgaattatgatgcacatccaccgcggctgctaaaaaaagggcagtgactcaccaccggccgcggaaacttccacgagcgccgg

SEQ ID NO: 717 - DNA, 122 bp, Homo sapiens
tttgggattggggtggggattctgttttgatgatttagatttgggaaaactttgggttctcgtgtcagcaggggccatgctgtgggaaacctgaaggctgatttgaagcagaatatagaact

SEQ ID NO: 718 - DNA, 122 bp, Homo sapiens
gcactacggcctctgcagtcagccgtggaactcagagccagacagcgccagcagtgaacccggtggacagagcaaggccaaacacctccgccgccattgggccgaattgctgttgggccaag

SEQ ID NO: 719 - DNA, 122 bp, Homo sapiens
attctaagatgaagcctcagagggcaaggcagtaacaatagctaacactcagatgccagacgcagccttaagcgctttacatatgtttaatcttctgcatgacttatgacgcagatgtactg

SEQ ID NO: 720 - DNA, 122 bp, Homo sapiens
caactagtttttgtattttttagtagagacggggtttcaccatgttggccaggctggtcccgaactcctgacatcaggtgaaccacccacctcggcctcccgaagttctgggatcataggcc

SEQ ID NO: 721 - DNA, 122 bp, Homo sapiens
aaatcttcacctcattgaggctggagacctgcatggcgccgcacaacactgttcaagtcccgggtcctttcccaccagcgtgctcgagcaccgtaatcccgggacctccgagcccctgctcc

SEQ ID NO: 722 - DNA, 122 bp, Homo sapiens
cggcacgcctggagttggggccaacaggcaggatcaacaatccagaaactttcaatggatcgcgccggctaggagggggagaagggagggcgccagggctgggggtgtggggagggggctcg

SEQ ID NO: 723 - DNA, 122 bp, Homo sapiens
tgcagaacatgagcaagcaggagctcatcaaggagtacctggaactggagaagtgcctctcgcgcatggaggacgagaacaaccggctgcggctggagagcaagcggctgggtggcgacgac

SEQ ID NO: 724 - DNA, 122 bp, Homo sapiens
ttgctgaatttagctatgacactcgctgagtcactgcagtgggcaagaagaaatgcagtccgatagttctctgcttcaaaaaacaggggagatcttatcctggtgaaggtgggtcagcacac

SEQ ID NO: 725 - DNA, 122 bp, Homo sapiens
gcttctgctgctgccgctgccaccggcgctgcgggggacgagtgaagacagagcacaaggcgctggcctgtgagcgcgcggccctcatggtcttcctgctgctgaccaccctcttgctgctg

SEQ ID NO: 726 - DNA, 122 bp, Homo sapiens
ttgggaaattgatcacaatcaatgatcgatccggtttacagaaagcggctctggctgccacgttgctctcttggcaatgggggttttccctctttttctccctgcagagcagagagagggga

SEQ ID NO: 727 - DNA, 122 bp, Homo sapiens
tgggatttcggggtaggctccgggagggtctgggactccctctgcagggtcagagggtttcgcaccgtggcatctgcgggcccagcccactccagagactgggcggctccacaggggaggcc

SEQ ID NO: 728 - DNA, 122 bp, Homo sapiens
ggtgttcgggtaggggagaggctgggttcgggtcccgggctaaggcggcggcaaagggagcggcagatgagcaggaagtctcgcgacagcagtagcacagcagaagggtaaagcaaaagtcg

SEQ ID NO: 729 - DNA, 122 bp, Homo sapiens
ccttttctgtgctgggcactgtgcagggcaccctgtacattcattccctcagttcaccctcgaaaccacccttccaaatcagaattatgtgccatattttacaggctggagaagctctagga

SEQ ID NO: 730 - DNA, 122 bp, Homo sapiens
cgcaggatgcagattgcagacgctcatcgtctcgcaggcagctccagctcgagtggtggccgtgctgggtctgtgcccggggccttcccccgtatgctttcgctttctagtgtctgcgatga

SEQ ID NO: 731 - DNA, 122 bp, Homo sapiens
aggtggcccaggaagtgcacggtgtggattctccagcttctggtctgaggtccagccaggcggcagcatgttttagagatggggctggtgcttgcccaaggtgaccaggcgaacaaagacgc

SEQ ID NO: 732 - DNA, 122 bp, Homo sapiens
gaagaatgagaacgccctgcttcgagcccagctgcagcagcacaacctggagatggtgggcgagggcacccggcagtgacgcccgccaccaccacgcagccgccgccgcccacgccggcctc

SEQ ID NO: 733 - DNA, 122 bp, Homo sapiens
tctcctgacaaagacttcagtggaaaagacgggtccaggcctgcgtcttaacaccctgcccggggatcagcatcaataccacacagcgcagccacctgacgctgagaatgcggtcgggtctg

SEQ ID NO: 734 - DNA, 122 bp, Homo sapiens
catattcgaataagtccacacaagtgtgtgcacatgagcatatgcatctgttgattgaggcgggaaaagaaatctacatgaccttagaattggagaggctccctaagatagactgggaaaat

SEQ ID NO: 735 - DNA, 122 bp, Homo sapiens
ggagcgagggaaacgcgcccccctcctgactcacggccaacgctgcggccgccccgcggccgcccgagccccccgcggctccattgagaaactgagcgtctcattcacaagctggcggcgag

SEQ ID NO: 736 - DNA, 122 bp, Homo sapiens
acgcgcgtggtgacggcagggctgggcttgcacatcctcagcaggctgacctgtttccttcgcagggcgccttctggggactcatcgggggcctgctgatgggcctggcacgcctgattccc

SEQ ID NO: 737 - DNA, 122 bp, Homo sapiens
aagcgcacactcaccagcccaccaaaacggagagggaaagaaagtggagagacaggaagtcgccttgggaagtgtcttcagaacctgattggctaatgagttcaagaggattccctcctcct

SEQ ID NO: 738 - DNA, 122 bp, Homo sapiens
ggagaggggaggaggagcgggcctggcgggcaggcgcaggaagctctcggtggagaggcccgggagagcagcgctgagccggctaactgggagtggacggtgctaccggggatgggagaaga

SEQ ID NO: 739 - DNA, 122 bp, Homo sapiens
ggtggtttctttgctatacaactttaagacaaattccctggctgtcccaataagttgccccgtttaactcctttatagaaattctagagccatgactgcttgctggttggttttccagagaa

SEQ ID NO: 740 - DNA, 122 bp, Homo sapiens
ccagcctggccaacatagtggaaccccccatctctaccaaaaacacaaaaagtagctggtcgtggtggtgggcgcctgtaatcccagctactcgggaggctgaggcaggagaatcgctggaa

SEQ ID NO: 741 - DNA, 122 bp, Homo sapiens
gcttccctcggggacggggaggccagaggatctgggaaaaacactgctcccttcactgaacgccactacgtagcagagtccaccaaaagagataaagtgacgaaacgttgaaagctgcgggg

SEQ ID NO: 742 - DNA, 122 bp, Homo sapiens
accccgggcagtgggagggcagagactgtcatacccattttacaggtgagaaatgtgtgacgctgggcaattagacaaccgataattagataattgcccaggccgcacgttggtctaggcat

SEQ ID NO: 743 - DNA, 122 bp, Homo sapiens
cctggcccagcccggcccacctggggacaggtccgaacaagcccaggtagaacaggaggccggcctaggagggcccagggcctgggctgggcatgagcttggggccacctctctctagggac

SEQ ID NO: 744 - DNA, 122 bp, Homo sapiens
ttacacacacattcctttgaattctcaacacatcctgtaaggttgaaactcttttccccacgtcacagatggagaaaactcagccagatcaaagtcatgttgctagaaagtgacctaactgg

SEQ ID NO: 745 - DNA, 122 bp, Homo sapiens
gacctacttacccagcctctgagccgcagtgccctcctctgtaaagtgggtatatcagagcgccaagtgcctggattacaggaaagggctgcgtttagctgcgcacccggccacggctggga

SEQ ID NO: 746 - DNA, 122 bp, Homo sapiens
aagcaaactgcctgcgggggtgggggggttctcggcgggagttgggggtggagggaaaggcgctttacagcagcactccctccacagggagaccagagctctgcctcttcctccccaccgtg

SEQ ID NO: 747 - DNA, 122 bp, Homo sapiens
cgcccaggcacagggggtccagggtgggcagctggtagatggccaggctgttggggttttcgccgccggtggccagaagcgtcttggagggattcagctcgatggcatggatgccgcagccc

SEQ ID NO: 748 - DNA, 122 bp, Homo sapiens
tctcacacccatctagaggatgtctgtctgcgacgtggggtcggacgggcgcctactccgcgggtatcaccagcttgcttacgatggcaaggattacatcgtcctgaacgaggacctgtgct

SEQ ID NO: 749 - DNA, 122 bp, Homo sapiens
gggtgaccgggggaaggtgggtggcgttgacctcaccttgcttggggagggtcggggactcggggagtgagtttctctctctctactccccggggtctctcctcgacccccatctcctgggg

SEQ ID NO: 750 - DNA, 122 bp, Homo sapiens
agtgacttccttcctgtccctgctgggtggccttgagcaagccacttggcagctctgggccgcagttccgtcatctgcaaggtgaggggtgggagcggcacggcccctaggcagcgccccca

SEQ ID NO: 751 - DNA, 122 bp, Homo sapiens
cccccagccgcctccagcctggagccgccatccctgcacccgcaggcgggggacgcggaccgaataaatacttttagtgtactgcgactgggcgcggtggctcactcctgtatcccagcact

SEQ ID NO: 752 - DNA, 122 bp, Homo sapiens
agagaaaggcaaggcggaaggggtgaggccggaagccgaagtgccgcagggagttagcggcgtctcggttgccatggagaccaggagctccaaaacgcggaggtctttagcgtcccggacca

SEQ ID NO: 753 - DNA, 122 bp, Homo sapiens
gcggggcaaacttggagaggcgctgcgtcgggggacggggctacaagccgtcgctgggggcggggcttgcggcccacctgtaggtcccggtgccacctcgtcagtgtcccgagagatcccca

SEQ ID NO: 754 - DNA, 122 bp, Homo sapiens
tggccgaatccagtgattcatttctgtcttaatctctcctggcctttcggcagcgtttaacgtgtgcgacccctcccttctcctgtcttcagccttcctcgggatccgcgaggcgccctctc

SEQ ID NO: 755 - DNA, 122 bp, Homo sapiens
cgcaatccttcctgtgaggatgggcgccttcgggtgttgaagcctgagtggtttcggggccgggacgtcctagatctgggctgcaatgtgggccatctgaccctgagcattgcctgcaagtg

SEQ ID NO: 756 - DNA, 122 bp, Homo sapiens
tggcagtcttgaaaacgggtggttacgtcttgagcgccatcacgatttgtgtgcacatgccgaaaataggtgagtgatgggccaggcagcgttgctgtttgcatcttccccgtcgtcatgga

SEQ ID NO: 757 - DNA, 122 bp, Homo sapiens
ttaaatcctgagtcatcaacataggaaaagggtaaaaatataatgaggcggatcacctttcgaaagctttgaagaagtaaattcagatggcttgtagatagcccaaataagaatggagaatt

SEQ ID NO: 758 - DNA, 122 bp, Homo sapiens
agggggaacatcctatgtcttctctctgggttccaccagggaggcatggttaccatgcaccgagcctgctctgtctccacggggctggaggggcctcccccgtcccccatcccccgtccccc

SEQ ID NO: 759 - DNA, 122 bp, Homo sapiens
tcagagaagtggcccaatggcaggctgcccaagtccagtactccttctgcctcccacgtgcgttgcctgctctaggaacatctgtggttgccgcccgctgttgatgtctgcgcgctcctccc

SEQ ID NO: 760 - DNA, 122 bp, Homo sapiens
aatcatctttttaattatttaaactctgtggatttctctattaatataagattagcattgcgagcttaacctggaccagttgggaagaggtattgcattttaaaattgtgccaccattgtct

SEQ ID NO: 761 - DNA, 122 bp, Homo sapiens
cctggggcgtgatttattagcggtggcacaggcccgggtggagtgcaagggaaggcaaggcgttttctagatgtttaaggtggaggagagggaccaggacacttgttacaaacgctgacaag

SEQ ID NO: 762 - DNA, 122 bp, Homo sapiens
gggaggaacttcctggcctcctccagcttctggtggctctggcgtcccttgggttgtggccgcctcctgcttctgcctgtcttccctcgcccttctctccgtcttctcttgcgcctcgagtc

SEQ ID NO: 763 - DNA, 122 bp, Homo sapiens
taattagaagatggattagacacaaagcgccgtttctttttcttagagcagggaacctgacgcagggctctgcagccgctgcgggcttgccgaccgtcgcctggttgtaatcaccatgactt

SEQ ID NO: 764 - DNA, 122 bp, Homo sapiens
ggacctgctgtcagctttgccctctctagaattcccttattcaagaatcttctggctgggcgcggtggctcacatctgtaatcccagcactttgggaggctgaggcaggttgatcacctgag

SEQ ID NO: 765 - DNA, 122 bp, Homo sapiens
gcccagggtggccagctctgtcctctgctctgcaggctggggctggaggtctgcagactacgcttcccaggctgccgtgcctgggctgccggcaggctctgcctgtagggggtgccagaggg

SEQ ID NO: 766 - DNA, 122 bp, Homo sapiens
gcacttggcgacggtgtccggcggggaggcggcggcttccggtctgggacggagctgtagcggcactgtaactgcgagggcagcgccgcgtgtgtaacggcgggggcgtgtcggcgggaagg

SEQ ID NO: 767 - DNA, 122 bp, Homo sapiens
ttgagaaactgagggataccacgttcctcatggtgagtcaaggtggtgaggactcggggtcgtggggacactgctcctcactctcacaggtgctctaggtttcctcacaggtgctcacagtt

SEQ ID NO: 768 - DNA, 122 bp, Homo sapiens
atggatgatttagcttgcgatctgttcaagatggccacagaaacacttccggtatctttccgcactaggcccgccccaatttgcgtgtttttaccgtgcagagggagggatttagagttagc

SEQ ID NO: 769 - DNA, 122 bp, Homo sapiens
ttaatttattacatgttttcacttgtgattgtcacataaatcccgtaagatatgcagtttcggctgacattgacaagttgatcttgaggaaatgcagaaaaaccttaacagtcttgaataag

SEQ ID NO: 770 - DNA, 122 bp, Homo sapiens
gggccagggcctcactggggcagggacaccccggggtgagtttctctggggctttattttcgttttgttggttgttttttctccacgctggggctgcggaggggtggggggtttacagtccc

SEQ ID NO: 771 - DNA, 122 bp, Homo sapiens
tgctgtggggaggcaaagcatgtagggtaccccatcgggaggggcaacgggggcccgaggcgcttctggagagtggaggcgggggtcacaaggtcaggcccataagagcctaggaccccaca

SEQ ID NO: 772 - DNA, 122 bp, Homo sapiens
ctctctgttcatcctctgagccacatacctgagcttctgtccccgcagattgcacatagccgtttgccagccccagggccacctggagggggtggacagtgcaggccccggacccctaagac

SEQ ID NO: 773 - DNA, 122 bp, Homo sapiens
ggcttaatctgtccctgacttctgtgtctattgctggctggtggctctcctgacaggccccgtatgtctcactttatatctctgggagtctgtggttgaaccctgccctaattcccctagga

SEQ ID NO: 774 - DNA, 122 bp, Homo sapiens
ggggctgagagctctgggcttccgcgcgggtccttgggggtcccgggcatgatgggctgccgcccagtgcccccgcctatgttgcgccagccaaatctgtgagcgcgcagctccttggacag

SEQ ID NO: 775 - DNA, 122 bp, Homo sapiens
cccaccacaagcagttgccaaattcaaataatttttccttcaatgcctctcccgtgtgaccgctccttttctttcaaaagtaaatcctatgtctgggaggtaacccgatcaccgcggaaaga

SEQ ID NO: 776 - DNA, 122 bp, Homo sapiens
tgttcagcggacaaaagctgcagttgagttcccacagaaggtgagaccccaaagggagagcgaaaggagtttactagatggaagcagcagaaggaacagcactcttgggagagggaacagta

SEQ ID NO: 777 - DNA, 122 bp, Homo sapiens
ggagtccgagctcccgaggtcgcctaagtgcaagcagaagtgagcgtggcttccgggcagcgccctcctcaggggcgcggcttctttctcagttcaaagcctttccccgaatctctggcaag

SEQ ID NO: 778 - DNA, 122 bp, Homo sapiens
gtcaggggcttttctggctaatattaccttaaaatatataaagaaggaatatccatgaaacgaaaagagcagttcagtgttaagcctgacagtgactcactgtacaatggaatgctgacatt

SEQ ID NO: 779 - DNA, 122 bp, Homo sapiens
taggagtaggcggccaagggccaaggcgcgcggctgggctgaggcgcgtgcggcgactggcgacctcagagcgacaccacttccgcctctgccggggcagggccaggcgttaccgccgcttc

SEQ ID NO: 780 - DNA, 122 bp, Homo sapiens
gcgtgggcatggggaagaacctgaggcccggaagaggcagcaccgagaggcggagactagcgcggcgggcctgggtatgattgggctgcccgcaggaggggggcggggcctagccccagact

SEQ ID NO: 781 - DNA, 122 bp, Homo sapiens
gggggccaaagccccagcatcttccccacaacaggtcctcttatgacccctcccccagcccgaggcactgctggggaccccaggaaactacaggacatcccccattagctcaactccagctt

SEQ ID NO: 782 - DNA, 122 bp, Homo sapiens
tgccaggacctgaacagagaatgatgatgaccctctccagaaggataagaacctgccaaccgcaaggcagggaaaggaggggaatcttagccccttagggcaggcacttagaggtcatttac

SEQ ID NO: 783 - DNA, 122 bp, Homo sapiens
gagggactgcggtgcgactaggagtgaataatttaaaggggccgtgcctgcggagccgggcggaacgctagcggtgttggcgcggagtggaccccggctgcggcccctgggtgagtctgggt

SEQ ID NO: 784 - DNA, 122 bp, Homo sapiens
tgagcgtctctgattggccgccagctcagcttggaacgctggggtgcgtggcgtcatatccgccgggcccgccatcttgttcccaggggcagttggcggaagagatcgagctccctggctgc

SEQ ID NO: 785 - DNA, 122 bp, Homo sapiens
gcacatgtttccgtgtttgtcatctcattttaattgcaagaacctggatggtgctttagacgtctttgtaatccccaggcctctcatcaaaggaccttttgtaactttattttggggtagca

SEQ ID NO: 786 - DNA, 122 bp, Homo sapiens
gggtagaacatggtagacatcatctgtcccacagccctgcagggagacaaagctgttaaccggcaccgccccagctgtccatcttctcaaggggctgaccccggccgggcgcagtggctcac

SEQ ID NO: 787 - DNA, 122 bp, Homo sapiens
ttccatccaattctctgtctctgcagtatctctgatactgtgtgtgtttatcgccatcatcgatgctgatgcactgtacagcaaggccaccatcatccctgtgtacttactgagatcagttt

SEQ ID NO: 788 - DNA, 122 bp, Homo sapiens
gtcctggcccgctaagatggcgatggctgcggtagcagcggcggcggctgttgcctggcccggtaccctggggacgggggccgagtagcgccttccccgggccccgtgaaccggctgcgggt

SEQ ID NO: 789 - DNA, 122 bp, Homo sapiens
agccatatcaatgtcaatgttattgactttgtcaactgccaatgtcaattgacactgactcgtcattgtcaatgacttatctaaattgccacagtttctcaggcctccttgccttctcaatt

SEQ ID NO: 790 - DNA, 122 bp, Homo sapiens
gtgtgtgtgtgtgtgtttggaatgaccacatcacgcgatgctttttaagggtgcacagcgcgcagtagtggaaacagtgcatttctgcaccctggcgacacaaaggctcgttaggatcttgg

SEQ ID NO: 791 - DNA, 122 bp, Homo sapiens
cagatactgacggttgggatgcctgacaaggaatttcctttcgccacactgagaaatacccgcagcggcccacccaggcctgacttccgggtggtgcgtgtgctgcgtgtcgcgtcacggcg

SEQ ID NO: 792 - DNA, 122 bp, Homo sapiens
tcttcctaagaggggaaattccatgcccggggaagttctggaagaagagcattttttccccgcccttcagtgaactaggtcattgctgaagctggagaatatattttagcatccctgtgatg

SEQ ID NO: 793 - DNA, 122 bp, Homo sapiens
gatcacatagcgcgtatgtgccgctgccagggctcacactggagcctggcttggccatcacgtgctttttttttttttttttttttttttagtaacttaccagcctcactactgccccataa

SEQ ID NO: 794 - DNA, 122 bp, Homo sapiens
caaagagcatgacgagttcttccaggcttgggaaagcacgggtaaatgcccgcggtcctgcgcgccagcggggagcagtagagacttccggcgtcggctgctcgcagggctagagcgtcgaa

SEQ ID NO: 795 - DNA, 122 bp, Homo sapiens
gagtctgcttttactgacagcccacttcctccctttccccccaaagaaaacacagagaatcggcaaatctggcgctagcaaggagcttgcctgctggctgtgcctggagaccctccgcagct

SEQ ID NO: 796 - DNA, 122 bp, Homo sapiens
cgacttgcacgggttccttcgactccttgatttcccaggactccgggctaccagatcggccgtccagctggaatcaaccgatggaggctccgctgcaaactggaatggtaaggggtggggcg

SEQ ID NO: 797 - DNA, 122 bp, Homo sapiens
ttcaattcatgcattaattcatgtgttaattgaattcatgtgttaattcaaaattggctccgttacatagtgagtggggttttatggggcagcagtgacccaaatggaataaaagcactttg

SEQ ID NO: 798 - DNA, 122 bp, Homo sapiens
agtttctctgatatgcgctcgcgggggtgctgccatttcatctcttccgcgcgggctcatcgtgctctcagggtctcgttgaacaaggcaacgctaagagccatcaccacctgtcccccatc

SEQ ID NO: 799 - DNA, 122 bp, Homo sapiens
tccaaccagccacgttcccaggcccggccggctaccgccccttccgcatgcgcgtgagaacgcgccccgcccacttccgccatgctgacggcagccgccaggccccaatcccggtcccgccc

SEQ ID NO: 800 - DNA, 122 bp, Homo sapiens
tcacatccaatgcctcctcaacctcttttacgtgcagcactatcctctagccccactgcccgtatataggcctgggctatatcaccattgtccgcccttgagcctggaaggaaaatgagctg

SEQ ID NO: 801 - DNA, 122 bp, Homo sapiens
atgaccaagaccaaaggcaatttgaccaacaggccctggaagaacatttctgaaatgatacgaaggtctcaatgatacaaactaagctaaggctgttttgtgaagcttctgctcttctttca

SEQ ID NO: 802 - DNA, 122 bp, Homo sapiens
tctcccggtagtgttccacgaagtgcacctccaggccctcggtgatgaaggctgccaggtcgtagaagtccttcttgttctcggctggcaggacgatgcacgtcacccctgcgcgcttggcc

SEQ ID NO: 803 - DNA, 122 bp, Homo sapiens
tgagccttgcgcgctgacccggttcctacacttaacttttccggcttcgggtttaagacgcgtgcgcgcacactccgctgctgtgggcgggcattggggcggggcgataccgggggcccact

SEQ ID NO: 804 - DNA, 122 bp, Homo sapiens
gcgaggaagcgcagcgggcagctgtgaacgtgtctaacgggggctgtgagcttcagaagtcggggaagtgctgaggttcaaggaagaaccggggttcattggccaagagagccacaggtggg

SEQ ID NO: 805 - DNA, 122 bp, Homo sapiens
atccagtcaactaacaaggtgtgtcacctagagcaaggtacttctgctcactcaggtgcacgggtaaaaaaaaatcggatgtgacagctagaccaatggtttgcggttccactatgagacac

SEQ ID NO: 806 - DNA, 122 bp, Homo sapiens
catatgaggactggcagctgacatggtcggtcctggctagcatcgagtgtttgcctgtgccgggcgccgttctgaaccattcgctctctgcacgtcgcttgtgtccctttcgtctctgcccg

SEQ ID NO: 807 - DNA, 122 bp, Homo sapiens
tgcagctgccgcaccagctccttggccttggcttctttccgccccaaggggacaatctatcgggcagaaacccacaaactccactagggtcacagccacagaactcgcccatcgtgtcgatt

SEQ ID NO: 808 - DNA, 122 bp, Homo sapiens
aaactttcaaatcctgaagtccctgcttagctggtctctaaacttaaaagtctttcaggccgggcaccatggctcacacctataatcccagcactattgtgaggcccaggtgggcatgagcc

SEQ ID NO: 809 - DNA, 122 bp, Homo sapiens
tcagagaacagaggaagttttcctgaatctcactgcatatcacacaaaagcaaatccagacgtaggacccagatatcatacttgtaggcccagtgttattttagtcacatgaagctgctcct

SEQ ID NO: 810 - DNA, 122 bp, Homo sapiens
gccggagcctgctctgggggtcgcggaggtgtctcgagagttgaggacccgacccgggcgcgcgcgggcgcaggtatggggagggcgcggcggctcctggccggtcctaggagcctgcgggg

SEQ ID NO: 811 - DNA, 122 bp, Homo sapiens
caacagtcctcccatctccatccagacatccggcctgatgacacaggcagggatcccaatcgccagggtctcgaacagaaggggcagcatggctgtcagctgggctggggcgcatggggatg

SEQ ID NO: 812 - DNA, 122 bp, Homo sapiens
ggcaagagcaactcctgccggggttatcggaactgaaatcacagtggggatgcagcacgccgggcataccttgaaagagaaaggctttcgtcccattatgcagccccgggacctgacgcact

SEQ ID NO: 813 - DNA, 122 bp, Homo sapiens
ttctcggcccctggttctgcatagaggaagagcgagccgggagctcaccactgcgccccgcgttggagtgtggtcctcattaagggtccaagctcggacttctgagtctccgcatccggtcg

SEQ ID NO: 814 - DNA, 122 bp, Homo sapiens
ctctcgcccaggagggcggttgcagggaaccgaaatcggacacaacagttgcagtgaacccgactcagggttgagcgcatcagcgctaaacccaagacaaaggctgccctgtgtcttccgta

SEQ ID NO: 815 - DNA, 122 bp, Homo sapiens
cgcctgagcgcgctaagggagcacggcattctgggagttgtggttttgactccccagagacgcctaactgggcaactttttgaagacataattctagaaatttaggccactaagttcagaga

SEQ ID NO: 816 - DNA, 122 bp, Homo sapiens
ggcagtcgtccacactcagaccgtgaggctcggctctgctggcctggagcactgtggaatcgaaccaagtggaccaccggggccacggagcatgcaagagacacaagtgggcggtgtggggc

SEQ ID NO: 817 - DNA, 122 bp, Homo sapiens
acacacagctcaccttctactcagagcctggacacacagtgaacatgctcagtcagtatccgggcttcgtataccttttcttttagtctactcaacacctttgtgagataggtatcactact

SEQ ID NO: 818 - DNA, 122 bp, Homo sapiens
ccacggggggattgtgggtggggggcaagggaagggaagccccaggaactgcgaggggagcgagtacttctctccgcagcctgtcactttccgaggctcccgccaggcagccctcgttaata

SEQ ID NO: 819 - DNA, 122 bp, Homo sapiens
caagatggcgatactcctgctctgtcaattataattcaaaatgagatttgggtggggacacggaaccaaaccatatcaggctgttacaacaaataccagagagtgtggcttaaacatcagaa

SEQ ID NO: 820 - DNA, 122 bp, Homo sapiens
cgcctcccgggttcaagccaattctcctgtctcagcctcctgagtagctgcgattacagtcgcgtgccaccgcacccggctgatttttgtatttttagtagagacggggtttccccatgttg

SEQ ID NO: 821 - DNA, 122 bp, Homo sapiens
cagcagtggctcttccgccctgctgcaggcggaggtgctggatctggacgaggacgaggacgacctggaggtgttcagcaaggtgagggcggcggcggcgagtcccgggaaacttccaaggc

SEQ ID NO: 822 - DNA, 122 bp, Homo sapiens
ctgtgggggtctgtgctagctccaggcattagcatcagaatcgaattgaattgctgacaccggttggtgtagaagaactgatgtaataacacatatttggtgtcagagaaaaaccacatact

SEQ ID NO: 823 - DNA, 122 bp, Homo sapiens
gaagatagtaaatcatcgtcataattgcctagacctatctagtcaactggcttaataagacgggaagtaggttgctgagaaagaggaatgacgttttaacaagacgactcaaatcaaactat

SEQ ID NO: 824 - DNA, 122 bp, Homo sapiens
acaaatgtttgagaaatgttccctttgcttccacagaaaaacaaaagaaaggcattttctcgtgtttgacaaaccatgttaaaaaaatattcttggccaggcacaggggcccagcactttgg

SEQ ID NO: 825 - DNA, 122 bp, Homo sapiens
agccctgcttggggagtgcggtgggcgccggggtgggaggcaccctctggacagtctgtgcgtccaatctgcccggacatcacagagcagcccggacatcacggagcaggggcagcgccagg

SEQ ID NO: 826 - DNA, 122 bp, Homo sapiens
ggcgctactgcgcatgcccgggagccgcctggagtttggaactccacattctttcagacccggcccgctgcggggcgttcctggggggtagcctcaaggccagcggggttccttcggctgcg

SEQ ID NO: 827 - DNA, 122 bp, Homo sapiens
acacccggcctggaatgctgtctattgaggaaaggaagaggctgtactggggagtgccagcgttgaagttcaagcaagtgtaaaactctggccttaactgaatcacaagtaggaaacaagtt

SEQ ID NO: 828 - DNA, 122 bp, Homo sapiens
aggtccaggctgtggtccgtgattctgctgtgatacagactgagtgatagataatgttcacgggcaccacacactcctgggcctgatgtcctggctttaattctctctgatttcacccagga

SEQ ID NO: 829 - DNA, 122 bp, Homo sapiens
ttgttcctgagtaaagtggaggagacgttccagtgtatctgctgtcaggagctggtgttccggcccatcacgaccgtgtgccagcacaacgtgtgcaaggtgagtagagatggccgcgggag

SEQ ID NO: 830 - DNA, 122 bp, Homo sapiens
agccgctttcggcgacgcgcgggagatccgtacctggtgaggcgaggacgcagagtgtgtcgctcacttccgtctggaggtagggcgtagcgccctactcttttcccctatagtaggccagc

SEQ ID NO: 831 - DNA, 122 bp, Homo sapiens
ttatgcttcacaggtttgttgtggcctgttcagcctggaaatcctgtcccgagactgatgcggaaaagctagttcagctgactttttgtgcttttcatgatatgatacagctgatgaactct

SEQ ID NO: 832 - DNA, 122 bp, Homo sapiens
ggcaattgggattggaggcagcatcccattctcggttctggagcccaggagctgccagggcgtctggatcctccggggcaggagaaatgagctggtcgggtttggagagtcttcctgggggc

SEQ ID NO: 833 - DNA, 122 bp, Homo sapiens
aaaggaggaaggaggagacaaagtgatggtcgcaggtcgcctgaggtcccaccccggccacgtgcggcttctgtgatgacaagtctagaggggcggggcctcggccggcaggctgctagcct

SEQ ID NO: 834 - DNA, 122 bp, Homo sapiens
gcatccaccgcggtgccgtgtcgcgctctgactcggggctgcagatctgctgtgggtgtccggggatctgggatcgtctgtcccaagagggacacagcgtatttggcacagttagggagtcc

SEQ ID NO: 835 - DNA, 122 bp, Homo sapiens
attactccttgatccatgggctgcagaatggatgttgtgttagcaggcatgaaaaccccacgttaatctccttgtagatctccatcagagttcttgggtgaccaagtgtattgtccatgagc

SEQ ID NO: 836 - DNA, 122 bp, Homo sapiens
gcccggcatgactcgcgcgataggcggccgcgggtcttgctgggaaatgaagtcccaaagcgtcagtgtttcttgcgagaccgcccagagcgctgaaagtaactcggccgccagggtcacaa

SEQ ID NO: 837 - DNA, 122 bp, Homo sapiens
ggccctttggaggcccaggcatccctacaggagcagctccctgaggatgaggtcggggggcgcggggcaagtccagggcaagttcccaggcacgagatgatggaaggcgcgaaagtggcatg

SEQ ID NO: 838 - DNA, 122 bp, Homo sapiens
aggcgaagtggccggtgaggccgggtgggcgggagagggaccggaggaaaggagacggggcgctgcgccaagttatcaaggccgcgatcaaagtcggaccaaggcagcgagtcgacagcagg

SEQ ID NO: 839 - DNA, 122 bp, Homo sapiens
cacttagtataaactaggtagtaattctttatctgatttcttatgaccaatatttgccctcgtttttgtttcttaaggtttcttcctcttgcattgcccttatttatttacttatttacttt

SEQ ID NO: 840 - DNA, 122 bp, Homo sapiens
gtcacttgttctgtagggcaagtctcacatgaagctactcatcatttgcttcgtgtcctccgagctccgagagttggcaaagctgatgaaggagcagtagacagcgacccaagcacaccact

SEQ ID NO: 841 - DNA, 122 bp, Homo sapiens
tgggcccctccagacagacggagggagggttggaggataggggacggaggccgggccggccgggcactgtggccctcacacggacttacttggtgccggctggctccagccaggagctggcg

SEQ ID NO: 842 - DNA, 122 bp, Homo sapiens
gagtcccgtccagggaggcgctcagccccagctgctgtctgtgcatgaagcagtgcccggcggccctcgcccccagctcctgtgatcaggacctgcccgtctggcctcagtcctgcttccct

SEQ ID NO: 843 - DNA, 122 bp, Homo sapiens
ctccacgttcttctgagcgtgtctctgggacatggttaaggttaagaagcggcctctgaacgagggagaatgtactgaaattgcctaagtgaacttcaaacacaggaagaagcgctcagtcg

SEQ ID NO: 844 - DNA, 122 bp, Homo sapiens
ctgtgcagttgtgaagaaaaaaaattaatgcatagcatacacagggtttggtactatcctcgatttcaggcatcaaccaggcatcttgaaatgtagtccccatggttaagggcaggctactt

SEQ ID NO: 845 - DNA, 122 bp, Homo sapiens
aatcggagcctcgcgtccacttcgatgctagaattctgttcgagtgctgatgaccaggggcggctaaacaccatgccctgccatctctgggtcttagagtcaccctaacatctgatctagat

SEQ ID NO: 846 - DNA, 122 bp, Homo sapiens
cgagggggcctacaaggcggccgtggacagcttcctccagcagcagcatgtgctgggggccgggggtggtcctggcccgactcaaggggaggaacagccaccccagcccccgctggaccccc

SEQ ID NO: 847 - DNA, 122 bp, Homo sapiens
ccaaccgactgggcttcggaaaaccaaggggcgcacgccgccccgccccgccccgccccgcgactacaagtcccatcgcgccccgcgctcgcgcacactacgccagaacaagatggccgacg

SEQ ID NO: 848 - DNA, 122 bp, Homo sapiens
gcccggcagggtgggaggcgctctgagctcaaggagaggctgagctcgctcagcaggaggcggggattgcggaaaagaagaaccaataggaacaaaggttccccgcccctttgatttgatgg

SEQ ID NO: 849 - DNA, 122 bp, Homo sapiens
ccaagtttttctagcatgcgatcgttctgtagacaaggcgctgtgtctcggagtccgcggcgaccgtgcccgctgggagcgtctcccaagtccagcaaaatgtgcaactggttttatggaaa

SEQ ID NO: 850 - DNA, 122 bp, Homo sapiens
tcaagtcctctcatgcactctgggcccactttgggctcttggtccggacctgctcggcctcgcccttcgcccctcgctcctcgctcctcgcccctcgcggcggccgtcggggaaccgcgtac

SEQ ID NO: 851 - DNA, 122 bp, Homo sapiens
gggcgcgcagctgcttggggctgaagagccgcacccaggcctgaggtccagcttgggccccggcgacccgcgggtgggcgggctcatgggcgccctctggtgcttcgctccctggctttgcg

SEQ ID NO: 852 - DNA, 122 bp, Homo sapiens
gagaagaaagcccacttcatgggggtgatgggaaaatccttttaaatgacgcatgaggcacgtttagctcatagtaagcactcaacaaatactgccaaatgttattagctcccctctttcct

SEQ ID NO: 853 - DNA, 122 bp, Homo sapiens
tggagctgttaagactcggccctcgcctgctcccgggcacctcagggccatcgaagggcgcgtgcacctgagatgctgcggtgctcgcgtcacgcaatgaccccgcagcaggcaccagccac

SEQ ID NO: 854 - DNA, 122 bp, Homo sapiens
ggggcgcggcctgccagtgcctcctgcagtacagccctggagggcgtggggacttgggggcggtgaaatagccgctgtaggtccgcctctttcattgaagaaatttaagttcgtgtggtttt

SEQ ID NO: 855 - DNA, 122 bp, Homo sapiens
cgacgaggtttcagctgtctcttactttcaaccactgcaactgacctgcccgtgaagaggcggacataatacaacaagacgagaagaccatatggagcttcaatttaccaatgcaaacaaca

SEQ ID NO: 856 - DNA, 122 bp, Homo sapiens
actcgacccacagagccgatcgcggagcggattctgcttttaggagtacccgccaacaagcgggaccgagcaggaatccgtatctgggaacaggtgagagaggatgtgtgctgggccttgga

SEQ ID NO: 857 - DNA, 122 bp, Homo sapiens
ctccgctcggcctccagccctgcttgtactgctggcttcaagtttcctccgagaggcgggcgtgcacagctgcagtggcggcggcagcggccaccaagcgcccggcggcgcttcgccaccca

SEQ ID NO: 858 - DNA, 122 bp, Homo sapiens
ctgtggtcacgaaggagtagccacgctcagtgaggatcttcatcaggtagtcggtgagatcgcggcccgccaggtccaggcgcatgatggcgtgcggcagcgcgtagccctcataaatgggc

SEQ ID NO: 859 - DNA, 122 bp, Homo sapiens
cgccgagggggcgcgccgcagatttggggaccccgaatctggggtcaaagggcagtttgacgctcgtttctcctgcggggccgaaggagtgccggaatttcagctaaaccctggttacaagg

SEQ ID NO: 860 - DNA, 122 bp, Homo sapiens
tcataatcggaggctttggcaactgactagttcccctaataatcggtgcccccgatatggcgtttccccgcataaacaacataagcttctgactcttacccccctctctcctactcctgctt

SEQ ID NO: 861 - DNA, 122 bp, Homo sapiens
ccaggctcttctagaaattccaggaggccagtcagtctggcgggagatggacgtagtcaacgaaaaaagaagtccatctcatagcaggttgaaatgaagtgggagaaaaatctctggtcatc

SEQ ID NO: 862 - DNA, 122 bp, Homo sapiens
ggtacggagagaatctctacaaccaggcctccttatcaacccccaagacaactctctccccgctgggcccacctgctgcccaccctggagagcaaaaggcaaagctgtcatgcggcctctga

SEQ ID NO: 863 - DNA, 122 bp, Homo sapiens
tagttggatttggccagagaattttaaaaagagagtctgggatactccaatgatgtttttcgcctgaacaaaaatagttaaacttcccatttgctgagctggtgaagactgcaagaggagaa

SEQ ID NO: 864 - DNA, 122 bp, Homo sapiens
aaataaaaaaacattttacacattgaggacggaagagagaagattacggccaaccaaccccgtgcacttccccgcccaggttcatggagtctgagccctctggcctcctgagcctctgggct

SEQ ID NO: 865 - DNA, 122 bp, Homo sapiens
tcagtgtacagccgccacgcgccacccagccgcaggctccgagtgccggcgcgggccacccgggtggtgcagaagctgccctcactggccctgccgctctaccagtacaccagtgagtccac

SEQ ID NO: 866 - DNA, 122 bp, Homo sapiens
gcaacaaaacgggcacgtgggtgcccagcacacgtcaggtgatgttctaagccccttgcgcgtacccagtcacttaccgttcactgcagccccgggatgagctctgcgatgagcatcctttt

SEQ ID NO: 867 - DNA, 122 bp, Homo sapiens
gttagatgactttgcctaactgtaggctaatgtaagtgttctgagcacgtttgaggtaggcgaggctaagctaggatgttcagtaggtgaggtgtattaaatgaatgctcgacttatgatat

SEQ ID NO: 868 - DNA, 122 bp, Homo sapiens
tcgacttattcacccagcaaatgttgactgtgctcccatggtgtgtcagcaggagggttacggggtgagcgcaggggttggggagacagaaggggaagcacgaacggacgcagagatcctca

SEQ ID NO: 869 - DNA, 122 bp, Homo sapiens
tgccgtgcgcaggctggcagcagttcagctgaggactaaacgcttggctcaagttcaacacggctgccaagatttggcaaccagagagttgcagggaagcagcaggctgctaaaccctttca

SEQ ID NO: 870 - DNA, 122 bp, Homo sapiens
gagtctcgtccagctctgtcctgacccaggagacccggggacccggctcggagtttgcagcgcccagaggcggccggggtctcgggaaacggagcgccccccgcgggtctccgctccgatgc

SEQ ID NO: 871 - DNA, 122 bp, Homo sapiens
tgccttttgaaaaagaatcagactttaaacagagtcacaactatttaaacgtggccgccgcgtgcagggactggggatccatatggtaaaaatttcaaggagaaaatgtttgggatctgatt

SEQ ID NO: 872 - DNA, 122 bp, Homo sapiens
tgccctcctgtcccctccccgcaggggcacagtggagacgcaggggctctgggcccgtaccgccaactcgggtcacacctgaacgctgctgccagccgatgccccagccctgcacgccaccc

SEQ ID NO: 873 - DNA, 122 bp, Homo sapiens
ccggaggaccccaccgcgctgccgagtttccctctcaatggtgagctccatgtggccacacggtggactgtgacacacacaccccgtcaagactgaggatagccacttgcggtcacccagcc

SEQ ID NO: 874 - DNA, 122 bp, Homo sapiens
agaattcctgggtgtcacatcccctaggattttggggtcctagcaatgccaacacctagacgaaggtcaggcatggccacagaggccaccctagctataggaaaactctctgaaagcttcga

SEQ ID NO: 875 - DNA, 122 bp, Homo sapiens
ggagctgggcacgcggggttgcgccggtgacgctccaccgagtctcggacgcgctcctcgcgcccgccgcgccctcggaagcttgcccccgagcaccacagctagcagggttcgcggacggc

SEQ ID NO: 876 - DNA, 122 bp, Homo sapiens
ttgtgggagcaaaaccaacgcctggctcggagcagcagcctctgaggtgagggcgaggggcgcgggccggtgtgggccgcagagacgttggagccggcgggggctggggactggcctcgggg

SEQ ID NO: 877 - DNA, 122 bp, Homo sapiens
gcgtcctcaggaatgaagctcctgcagttgaggttcagtgaacgctgcgtcagggatctgcgcagcacgtgtggaacccaatgagagtccttgctgtgcaggcaccgggatgctcacatagt

SEQ ID NO: 878 - DNA, 122 bp, Homo sapiens
caagtcaggatcgcgctcgcaggctgggccaacccacaaggagctaggggtagctgaaatcgctcgccagcctgcagcatctctgaggccgtctggggttttcggaaatttgcatttggtgt

SEQ ID NO: 879 - DNA, 122 bp, Homo sapiens
ggtaattcttactgtttgtcacaattcggccccaagaagacctctggggccagcccagcccgtctaggtgttgtgatggccactcctgcgtcggctccgcgtgtactgggggccgaggggga

SEQ ID NO: 880 - DNA, 122 bp, Homo sapiens
ggtgcccacatttgtagcaccaggatagggaacaacagtccccacatcaaagggtgttgacgggatgaaatcacacaatataggtgaggccctcagcaggatcctggcacacagtaagcact

SEQ ID NO: 881 - DNA, 122 bp, Homo sapiens
gggggagcgggacgtccttagctccgtgtgtgggggtggggagcgggacgtccttagctccgtgtgtgggggtggggagcgggacgtccttagctcctggtgttgcggggagcaggacgtcc

SEQ ID NO: 882 - DNA, 122 bp, Homo sapiens
gtgctgagcagctccggtggaggccgtcagtggacttgagttttaaaaaggctcctgcggcgtggtcctggccagcttctctgctgctccgtggaaaggcctccgggacagtggcctgagct

SEQ ID NO: 883 - DNA, 122 bp, Homo sapiens
cctgcttgaggcagtggacacggcacggctttgtgcttgacgaggggccttttgactgagcgctactcacttcaggttccctggcctggctgtagccttctgcccggtgtgtctgggaggag

SEQ ID NO: 884 - DNA, 122 bp, Homo sapiens
ttccacagaactaggacagacagttcacattgtatttaacgtatagtttgctaaagttagcgtgtggataattcatagaaaatgtgctaaccaggccccaaaatactagcatacggctcata

SEQ ID NO: 885 - DNA, 122 bp, Homo sapiens
gtttccggaagcccgctctcccgtttccggaatccccgcaggcgctgggtctgcagatggcgtccaggtacacagtggcgagtgtgattccgcagtcttgggctgtttggccaagcgcccgc

SEQ ID NO: 886 - DNA, 122 bp, Homo sapiens
ccctcctttgagccgtggtggaggtgggcgctggaactccgactacatttttctatgaggcgccattttgtgctggaaatgctcttggacccacgtcctgtattgctaaggctcaaagatca

SEQ ID NO: 887 - DNA, 122 bp, Homo sapiens
tgctctcctgggccacataggatttgtttgttctgcacaggtagggatgtctgaaaaactcgattattattgttattatcactattactactactactatgacataattttaagcacttacg

SEQ ID NO: 888 - DNA, 122 bp, Homo sapiens
cccctgaagcctggtacgcgtgggcaccggcgcacggcggtgccccggaaacgcagccatcgcctcagggcagccactcaccgatgcggtaatgccccaacggggcgtttcattggccagct

SEQ ID NO: 889 - DNA, 122 bp, Homo sapiens
ctgttctccattgctttcagcatctatgctggagggggccaggggttcttctgacagtaacgatggtgacactatgcgtcctttgttttgctgctcccctgaagatctgctgatctgtttgc

SEQ ID NO: 890 - DNA, 122 bp, Homo sapiens
acgggtggccgattactgcgagaacaactacatacaggtgcgaagcatccccagctgggccgcgtcggggacccccccgccgggggccgcgcgcctcggggcgtggggccgaggccgcctcg

SEQ ID NO: 891 - DNA, 122 bp, Homo sapiens
attgttgtgacaattaaatgagagcatccatttaaacaagggattgcctgacacaatattcgatcaataaacatcagccattaataccctgataattgcctctcgggtcttcagctaccttc

SEQ ID NO: 892 - DNA, 122 bp, Homo sapiens
aatccaaagatgatggaggagtgcccgctcatgatgtgaagtacctgctcagctggaaaccgaatttgagataaattcaagggtctatgtggacaagactgctagtgtctctctctggattg

SEQ ID NO: 893 - DNA, 122 bp, Homo sapiens
tcctaatgataatggcccccaagcctgtgctatcacctgtcttagaattttgccaggtatcggccttaatgtttgacacaggaatcatcttaggattaaatttcagatttttcatctgcagt

SEQ ID NO: 894 - DNA, 122 bp, Homo sapiens
aagcagatggtggctctgtagggagacaaggcttaccttgctccagggactctgaggagacgctgtgcagggaggctgcccccagcaggagacatggaaggtgagggcagaaggaacagcgg

SEQ ID NO: 895 - DNA, 122 bp, Homo sapiens
agtttgcaatatgtttagactgagtctgagatgagggttcaagtgaataagtacaggaaacgtggcattttgttatatggctcactccattctggaaaatgttaggcacaaatgataatatg

SEQ ID NO: 896 - DNA, 122 bp, Homo sapiens
aggctcgcaatcgtcactgggggtagcaaggctaccttctgccccagaactccccaaaaacgtatcccatagaagaaactattaacttggctaaactagcatcctctcccctccccctgcac

SEQ ID NO: 897 - DNA, 122 bp, Homo sapiens
ctccttggagccagcttgaacctttttctcacagatgctttgtgcttcctgtcccctaaccgccttactcacccttccccatgctcaacttttggaaagtccccttggcctcacttgtttga

SEQ ID NO: 898 - DNA, 122 bp, Homo sapiens
gacaggtgaggagctgctgcgtgttcagaccggaaacctgagctcatcagcacgccagcccgggctcttctggggtatcatgttttgagaatatttgtctttgaaattttaaactctcttcc

SEQ ID NO: 899 - DNA, 122 bp, Homo sapiens
actgcccttatatatactcagaaacattctaattggccttgttgattttcaaaagacccgcgcaacaaaaccattggctgaagagtccaacgatgtgattggtgaattactggaaaatctga

SEQ ID NO: 900 - DNA, 122 bp, Homo sapiens
agcaatcatttcctgctcccaccctgggctgacagcacctgtgtactagactgttttcaccggcagttcaagaggaaatcaactgtcactgcacgtcaaaggtaatttctgatcacaagtac

SEQ ID NO: 901 - DNA, 122 bp, Homo sapiens
aggagaacccagggcctgttccacgcccacagactttggtcaggcaaagcggccgcagggcgtctgggctaaacgcaaccaggaacacattggcaaacttttgcgcctgcgcccaccgggcg

SEQ ID NO: 902 - DNA, 122 bp, Homo sapiens
ctgtggcagacacaggaaactcctacctcatcacggcagctgcatgtgtgggtaagcccacggtgatgatgacttctgtactggctgtttttactccttgctttaatgatattagctcacgt

SEQ ID NO: 903 - DNA, 122 bp, Homo sapiens
cttatcggaaatgcacctggcccccgcttcggaaaatgactggccgctctctccttgcagcgtgttccgcagctgtaggcacctgtcgtcctgccttcgatggctcctccctccgtccccct

SEQ ID NO: 904 - DNA, 122 bp, Homo sapiens
cggccagtgcgggaagcgacaccaggatggccccgatgcagtgacgtggtagccagccggcgatccactccagcaggcgcttggtgcaggccatgacgtcctccaggaagaacaccatcctg

SEQ ID NO: 905 - DNA, 122 bp, Homo sapiens
aggcctggcctctcctttcccacggcccggcaccccgcggggctccgccggggacatcaccgcggagggtttctctgtgagaaactgccctactgcgtgccgtcatcaggcttagggccgtg

SEQ ID NO: 906 - DNA, 122 bp, Homo sapiens
acacacacacacacacacacagagtctgctccaatgcttctccctgtgcctcgccacccccgtacgggaacccactcctctgatctcagggagccagaatcctaaaagcaaagacatctgca

SEQ ID NO: 907 - DNA, 122 bp, Homo sapiens
tgtgtgtgtgcatgtatgtgtgtgtgtgtgtgtggagtggccaccctagctgggctctgccggcctctgctcttcacggcaggactgccgagccaccccatgggactctccgtgcgcacctg

SEQ ID NO: 908 - DNA, 122 bp, Homo sapiens
agaaagaagaagagcaggaaagacacctcgaggaactgctcggcctccacatcccaaggtcgcaaggccagcacggcccctggggcggagggtgaggaccacaggcatcggggagaggaggc

SEQ ID NO: 909 - DNA, 122 bp, Homo sapiens
aataggataataaccgcattatagcaaaaggactcagatcccaacccccctgggacactgcgccctaggcgggctcacgccctcctcccccgcccatttcgaagacttgggttttcctctgg

SEQ ID NO: 910 - DNA, 122 bp, Homo sapiens
tcagttgaacttttggagtttgctttttccacctaaatattgtttctaaaattttaggggcggagttgaaaaccaccaatgctggtaattttataaggtattttaaaattaagacctcttgg

SEQ ID NO: 911 - DNA, 122 bp, Homo sapiens
ctgatccattccttcccacccttgctctcgcttcaagctggggcgcccagattaggagtccgcctgcctgcccgccctggggcccggttaccggtgaggaggggcttcgggctgcgggtctt

SEQ ID NO: 912 - DNA, 122 bp, Homo sapiens
gagaagatgcggcccctaataatgtgtttggtttaacctgcggggtgtgggtatttgctgcgctttcttgggtgagggttgggccccttcccttccaccttcctccactcctgtgcatgata

SEQ ID NO: 913 - DNA, 122 bp, Homo sapiens
tcggcgacctcccggagcgagggacagggaaggagccggccctcaccagtgccccgcatacgggatcctgggcctggcttcgcacggagcctgcccgctcccaacctgcccgctcccaacat

SEQ ID NO: 914 - DNA, 122 bp, Homo sapiens
gaaagggaagaaggcaaaggccacacgcacaggccggcccggccgcacgcgcctgctggacggcacttcagggcacaacccacacgcgtctttggacttgcagacattccgcgaggcttctg

SEQ ID NO: 915 - DNA, 122 bp, Homo sapiens
cagccctcccctccctctaggcctctgaacggcagcacctgcgagaatcccaacgaaggacgaagccaggaggcagggatcttgttttcagaaggaatatgaaccaaaatatggtcagaaca

SEQ ID NO: 916 - DNA, 122 bp, Homo sapiens
gtctttgatcagtgtgttaccttcagtcccactcttcattaagatttaaccacaccctctcgctgcttccccattagggggattagtactcttggagacaaagggcccactgcactgaaatg

SEQ ID NO: 917 - DNA, 122 bp, Homo sapiens
gacaccagcctactgtgtggggatgtcggtattttagcagagtccagatctgaacgatgccgtgtccagtttgcgaagtcctattcccctcctcctgtcgtgtgcctttgttcaggtgggga

SEQ ID NO: 918 - DNA, 122 bp, Homo sapiens
gatctgctcaccttggcctcctaaagttctgcgattacaggtgtgagccccttcgcccagcgtatatttgattctatagtgctgatatttttggtttgaaatgaacaggttggtaacctaat

SEQ ID NO: 919 - DNA, 122 bp, Homo sapiens
gagcgaggcccgtcctgggggaggtggcctctggccgcggggccaggttgccctcagaggcgcaggcggccaagagagttcccagccgccgccgcccccctccttccccttgggcccgtcca

SEQ ID NO: 920 - DNA, 122 bp, Homo sapiens
ggagcagatggagctggtatttctgtaacacaggattgccctcaggggaatctcttgctccgcaaatgagaagcaacatctggagaagggtacctgcactagaagaggaacacagacgatgg

SEQ ID NO: 921 - DNA, 122 bp, Homo sapiens
tgtcttgtttatttgtgtttgtgaccaagcagcctctcccttcacccaggtttatggcctcgttttcacttgtatatttttcacactgtaaatttcttgtacaaacccaaagaaaaaattaa

SEQ ID NO: 922 - DNA, 122 bp, Homo sapiens
tcctgcaagctttgaaggccggcgaaagggctcccccgtcggtggcgccggagggagaagcgtttagtcactgtttcattaggcactatttgaaccttgcaacatgtggtaatttctggggc

SEQ ID NO: 923 - DNA, 122 bp, Homo sapiens
agcccctcccccacatccctggcgggagtgggagataaggctcatggccacagacatctgcgtcagagataggaggtctcaatgccacgggcaggggcaactcggactgtggggcgtggaaa

SEQ ID NO: 924 - DNA, 122 bp, Homo sapiens
gatctggccgggagcagcttccacagtgccaggacctgtccacctctcctgctctgcagacgccatttggggctaatgatccattctcagctgctgtctgagctggcattcagtgctgtcgc

SEQ ID NO: 925 - DNA, 122 bp, Homo sapiens
gggcggtctcagagcccaggtcccctgatgacaaagacaaatacattaaaattcttgcctcggagaagaatgcaggatagggagagcatttcataatctgcaataacagtagcagggtggga

SEQ ID NO: 926 - DNA, 122 bp, Homo sapiens
cggctgagcccacctgtgcccaggggcaggatggccacagaaggctccgggcaggccagtcggtaccgtgtctcctccagggcgccaagcacccagcccacagtgccatcgccaccacacac

SEQ ID NO: 927 - DNA, 122 bp, Homo sapiens
aagctggcagctctgcgagcggcgggggcttccgcccgggcgtggacagcctggacgaaccgcccaacagccgcatcttccttgtgatcagcaagtacacacctgagtcggtgctgagggag

SEQ ID NO: 928 - DNA, 122 bp, Homo sapiens
gcttttagtccctgctttcgaacggcgaattccacaacctccacctcctacgtccggatgcgcactgagggactacgttagcagacgcgtcaaaagtaccagaagctggcccccggcgcatg

SEQ ID NO: 929 - DNA, 122 bp, Homo sapiens
cttgtgcaagtgtgtgtgtatgtgtgtgtgtgtgtgtgtgtgtatgagagagtgtgcgagcgagttactggggtcaaaatttccttggctttaaatgtcaccatttgtgacaaagttaacaa

SEQ ID NO: 930 - DNA, 122 bp, Homo sapiens
catggcgacgcagatagcgccgcagccattttccctatctccccagagtctattatacggcgggattagctcatctccaggcaggtcaaacccaaagtcacacaacctgcgacgcgggcccc

SEQ ID NO: 931 - DNA, 122 bp, Homo sapiens
gatccggattaggaggccacgcactcgtagtccggactcggactttagggtttccgccgccgctgctgctgcagccaccgccttctcagcccgcactgggctctggctccagagccgcctat

SEQ ID NO: 932 - DNA, 122 bp, Homo sapiens
aacctgtcccctcggttgtgttgaagtcccctggacagtgggcaggggtggcagaggacacgagcagccactgcccgtaccccctctcctctctgtaagcccatgccctgtcttcccaggga

SEQ ID NO: 933 - DNA, 122 bp, Homo sapiens
caaagcctgtgccatccacgcggttgggcaggcggtaggtggtggtgtggcgggcggccacgtagtcctcccacgaggcatactcagtcagtgtgtccgtgcggtaggggatccagggcatc

SEQ ID NO: 934 - DNA, 122 bp, Homo sapiens
gcactccctccgactgcactagtgcctcgtttcttccgagtaagacaatctttcatgatgcggattggagttgctgatcaatgagagctgctaagttctttatggctttctcggtgaagaga

SEQ ID NO: 935 - DNA, 122 bp, Homo sapiens
agcgggcgcgctgaggccagtggggcgcaaggcggggccccccggagctggggctcagctcggggtcagggttgggggttaccaggtctgggggtggggtgtccagagctgtggggagaggc

SEQ ID NO: 936 - DNA, 122 bp, Homo sapiens
gttcagatggggaaactgaggcccaaggcaggattggggttcaagggcttctggtgcccccggctcggggccacgttcggtcatgagggtccccctgctggggcgggattcctgccagaggc

SEQ ID NO: 937 - DNA, 122 bp, Homo sapiens
ccgccccgggctggggctccgctggggaaccggccgagcggcgcgcgcggaggtgtccggcggccaggaggatggccaaggtcccggagctggaagacaccttcctgcaggcgcagcctgcg

SEQ ID NO: 938 - DNA, 122 bp, Homo sapiens
gcgcgcccagcgctggagcgcgcctaagaggcgccctgcagtgtggctccggggtgtgggcggggcccggagaaggcccccgccttgggaggggttgggcctcgcgttcaaactccgcctcg

SEQ ID NO: 939 - DNA, 122 bp, Homo sapiens
gtctttggaaaacgaggcagctgaaagcaacagaccccatcgcaaaggcagcggaggttgcgggccgcacccgcggaggagtggatgtgaaggacgagagcggaccgctatgcggtgctgag

SEQ ID NO: 940 - DNA, 122 bp, Homo sapiens
aagcacagcagcacccagaggctaacctatttcccctatagcccaagctctgagatctcccgtctggtcacaatgatctacaggagaggaagaaagctatctagggacgagatctagaatca

SEQ ID NO: 941 - DNA, 122 bp, Homo sapiens
tcaccatcaagcagtctggggaccagaaggtgtcccgtgctggaaaaaatagcaaagccacgaaggaggaagaaagaagccactccaaaaagaaggtaggaagccctgtcttatggttgttt

SEQ ID NO: 942 - DNA, 122 bp, Homo sapiens
gacacttgcctaaggaagacttcccatccctgcactgctcccggctaaccagtcctttctcgggactcctggaaacctcccactctcagagaggtgtagggtataaaaatcacaagctgatg

SEQ ID NO: 943 - DNA, 122 bp, Homo sapiens
agggtcctggtacccctggcaggggctggcgggaagctgcacttctgtcattgcccatggcggctttggaggagatgacagagcatggcgaattctgcctcccactcctgacccctctgctg

SEQ ID NO: 944 - DNA, 122 bp, Homo sapiens
tgccttcctgctgctagacctatgttcacatgaggaataaactcctcatatcaaaacaaacgcactatcccaacaaatgcaccctttaatagtgccatttaagtcttacctattccttaagg

SEQ ID NO: 945 - DNA, 122 bp, Homo sapiens
ttctgaaccaagagttggtttaaatatagatgatctgcctttctggcaacttggaggctgcggtgggacttgttgtaccttttataagacaagtgaggaaagatgttggcacctgtacttgc

SEQ ID NO: 946 - DNA, 122 bp, Homo sapiens
gtccattaaacctctttctctgtataaattacccactcttgggtaagtgtttatcagcaacgtgaaaacagactaatacatcatctaagagctcattagaatctatttggtctgcttctttt

SEQ ID NO: 947 - DNA, 122 bp, Homo sapiens
ttcttctggtgtccagtgcctcattcactgtccacattgcttccatctcgtgtacaaatgcgcttatgtgcacaaaaactcttataacatcctcaagtgcttattgttaatgcgtacatgag

SEQ ID NO: 948 - DNA, 122 bp, Homo sapiens
tcaggctgagcctcccggcttctctccccagcatcccggcggcgcaggcgcagaggagagcgagctgcaggcctacatcgcacagtgccaggacagccccacctccggcaagttccgccgcg

SEQ ID NO: 949 - DNA, 122 bp, Homo sapiens
catgaaccttgatgctctctggatcatttgggaggtcgtgggaatcccattatggagttgcgctgagattcttacctgctctgagagaccaaggacaagccctttgaaagcaggcagtagtg

SEQ ID NO: 950 - DNA, 122 bp, Homo sapiens
cctggccggtggactgcagggagcggctgcgaggtttccggcggtacagctccccagcaccgctggccaacacaagaaagccgccgatgatggcaactgtgcgcgagtacatacggacctag

SEQ ID NO: 951 - DNA, 122 bp, Homo sapiens
catttcgatatatgtatacacctctgaaacactgccatcaagagagtaaatatggccaggcgtggtggctcacacctgtaatcccagcactttgggaggctgaggtgggtggatcacctgag

SEQ ID NO: 952 - DNA, 122 bp, Homo sapiens
gagccgctgaatgtctccactttggggaattctgagttaatgagaaccccactgtggcaccgagtcctgggaaggggactggctatggacccggcagccctgatcctaccccagtcctaggc

SEQ ID NO: 953 - DNA, 122 bp, Homo sapiens
caaggaaggcggcctggggttcgcgcttggggcttctgctttttcaccattgcagctgcacggagcggagcctctccggtgtgctcccttcgagccgagcccagggccccctggaaacttgc

SEQ ID NO: 954 - DNA, 122 bp, Homo sapiens
tgaaagaggccaatgccccactggcagcatcttcacttctaaatgcatatcctgagccatcggtgaaactaacagataagcaagagagatgttttggggactcatttcattcctaacacagc

SEQ ID NO: 955 - DNA, 122 bp, Homo sapiens
caaactcctggactcaagtcatcttcccgcctcagcctcccaaagtcctgggatcacaggcgagagcgaccacaccagggtatttattcatttttgacataggatctctctgggttggcctg

SEQ ID NO: 956 - DNA, 122 bp, Homo sapiens
agagctaaatctataactgaaaaaaatcaaaaaagaaaataagcatgttatttagaaatacggtagaatatataaaaatgaacagttaaatgaattgaagagggttgcatctgggaagcaga

SEQ ID NO: 957 - DNA, 122 bp, Homo sapiens
tgaggctccaatggttcagaaagtgaaagtgaagagagtctgcgctggggctgggtccaacgtgtgagtctgaaagttactgtttctagtgggtggcgctgtcggccacacctggctcaatg

SEQ ID NO: 958 - DNA, 122 bp, Homo sapiens
cgcgtgagtgcatgcgtgtgagcttgtgcttgtgcctctgctgggcacgactgtgcgcgccggtgctcacctgtctctgcacgggcacatgcactcactgccttgtggaggcgcttcggcgt

SEQ ID NO: 959 - DNA, 122 bp, Homo sapiens
gaggccgccgcctccgccgccccccagcgaagctttggctgctaaggaactcgaggctgccggaggggccaaagagggcctcgacttgaaggtgattttacacagcaggctcagaccggact

SEQ ID NO: 960 - DNA, 122 bp, Homo sapiens
cctgcagggggagtagatgaggtcagtcttttgcaaacctggttccttcttgccacgccccgcccacagccccactgtgtgtgaaccaagagagttggaaggccttctgcagacggacccat

SEQ ID NO: 961 - DNA, 122 bp, Homo sapiens
gggccaaacttctcctggtgtctctgtccccaggtggctcttttggattttggggcaacgcgggaatatgacagatccttcaccgacctctacattcaggtaactggagaggggccctggcc

SEQ ID NO: 962 - DNA, 122 bp, Homo sapiens
taactggaaagaagggaaaatattcaaactttgaacaagaggattgcagtttaaaataagcgggctgatggagcctccacagttgcacacgttaacagtcccagaatggagcaaaagctata

SEQ ID NO: 963 - DNA, 122 bp, Homo sapiens
ttttccagttccaggtgtgcagaagtgtcctctccccacgcgcggcgggctgcacttggtcgctggctccgagatcgcgcggggccgccggaagcccaagacggtaccgggggccgcagccg

SEQ ID NO: 964 - DNA, 122 bp, Homo sapiens
gctctgtgagagcaaggactttgttcactgctgggtccccagagcagggaccagaacaggcgctgggaaaacatctgttgaatgccccaggtactccaaagcccttgctcttttcaatccca

SEQ ID NO: 965 - DNA, 122 bp, Homo sapiens
aacagagttcctgtgtgcccttgtccccacacatgcccaccttcctccagtgtcgacatccgtcagcacagtgcagccttccatttgacccttctagtgaacaggcagagcatgtccctatg

SEQ ID NO: 966 - DNA, 122 bp, Homo sapiens
accctcagagagtgcaacagccatgagccatttggttgagagcagaaacacgagcagctgcgtgaccgcctcattagccggtcggtccttacgggcatgagcggcatcacgtgccagcacct

SEQ ID NO: 967 - DNA, 122 bp, Homo sapiens
ggccctggcagcaggagtggcagtcaagacacggccaggagcagagaatctcagggcagccgtgccagcttcccaggctgggcttcccaacttctctgcaagtttcctgggaagagtcccct

SEQ ID NO: 968 - DNA, 122 bp, Homo sapiens
ggaggtagcagctgcaatgagctataattgtgcccctgcactctagcctgggagacagagcgagactttgtctccaaaaaagtgtttgtggttgttggtacccttactgaaaatgggactag

SEQ ID NO: 969 - DNA, 122 bp, Homo sapiens
ggtacaggagagttgatctcaaaggccacacgtcacacggagaaacaaccccaggaagagcggcctcttcttacctgggtggcagccacgtgattagaaaacagcgcgcaccatgtgacagt

SEQ ID NO: 970 - DNA, 122 bp, Homo sapiens
ctttgccattttaggcaagttgctaaatctctctcagttgttgtaaagactggtgagccacgcatgcccagcacttgggcgcataaaaggcataaaagaaacgtgtattcccttccagccac

SEQ ID NO: 971 - DNA, 122 bp, Homo sapiens
acgcctgcgggcaaggggcggcgaggtgagcggcctgcagtcccgctcgtggccacaagacggcgggcgagagcagcagacgctccttcaaatcccagaaaaattcctcacggggataataa

SEQ ID NO: 972 - DNA, 122 bp, Homo sapiens
cttcgtttttataaacgtcccgcgatgagctaacctgttggagggcaggcgggccggaggcgggaggctcacagagggagagagggctagaggaagagggcgggagcgagcgaaccagagag

SEQ ID NO: 973 - DNA, 122 bp, Homo sapiens
ccaaggcggcagggcagacaccctcacctgtgagagcggggtggcgagggccggcctgggcggagaagggcccgcgcatcggggcttaagcctggacgctcaggccgcactccccgccccag

SEQ ID NO: 974 - DNA, 122 bp, Homo sapiens
cgatggtgcggtcacttttctgccgctgaagaagatcccagatggccctcctggagatggcgtccatgcccgaggtgggctcgtccagtatcagcacctggagggagagacacagtctcgcg

SEQ ID NO: 975 - DNA, 122 bp, Homo sapiens
gaggccaggacagggcagcctggctggggcagctgagccactgggcgtcctgtacccgggcgtgatggtgcccacagtgactcccgtttttcagaagaattggtggcctgcccgaagtcaca

SEQ ID NO: 976 - DNA, 122 bp, Homo sapiens
aatgtatgagtaacattgaaagaattgaggttgtgtggactgaagcagagatgactcaggcggagactattcccaaatgaggctgcaggggactgcagggggagcttcaggagctggggctc

SEQ ID NO: 977 - DNA, 122 bp, Homo sapiens
gccaccttcccggcccgcggcgcggagttggcggtcatatcccgcgtgagcaccaggtggcgctagggccccgcgcttgtcctggagccccggcagctgctgcgcttcccccaattaatctc

SEQ ID NO: 978 - DNA, 122 bp, Homo sapiens
ctagtcccgaccgacttgcactcctggcttagggaatctgtggctagagtttagcgtgcgcgcgcgcgcgtacaccttattagtaaaaaattgagcttagcgtgcgtctgtgtgggtgtgtg

SEQ ID NO: 979 - DNA, 122 bp, Homo sapiens
ttccccagcgccggctccgggcagtcccggaagggctcaagggctgggcgactggctgatcgagaccgtccgggtcctggctctcgggtcacttgcagaggcctgagcagagcgtagggagg

SEQ ID NO: 980 - DNA, 122 bp, Homo sapiens
cagttcccgccccaggcccgcgcgcccgacgtcccgtgtcacagcgcctcggggcccttgcgcgcccactgttccggcgagcgcagctctcccacgggccacgtcctcccaaccctgcttgc

SEQ ID NO: 981 - DNA, 122 bp, Homo sapiens
gcaggatttagtagtggagagtctcaaaagccgctacggactcgggggcagctgccccgacgaggtgaagccgccgcctgaggtccgcgggtgggctcctgctgctggggggcggcccgctc

SEQ ID NO: 982 - DNA, 122 bp, Homo sapiens
ccaacgtctgccagtccgcgtggattccgagcccggctccggaaaccagtctgaccacttcgcccatttcccaagcctccccgggcggcggccggccagcttccatggtgcggtgagccagg

SEQ ID NO: 983 - DNA, 122 bp, Homo sapiens
tggaagctcgaggatggtgctttcctgtcatttcctttcatttattgctttatcagtggccgtaagtgtttccatcaccaaccgaacagcatatgtaaacctgcacactctgaaaaaaattc

SEQ ID NO: 984 - DNA, 122 bp, Homo sapiens
cgcagggcccatgctaatcttctctgtatcgttccaatgttaatacatgtgctgtcgaagcgagcactgccctgctatttagggacagacttttcctgttctcttcacacttctcaaaaaga

SEQ ID NO: 985 - DNA, 122 bp, Homo sapiens
ctctccctcctccccccgccggcgccgaggcgcagtgcaccaagggttttgtagtccgtccgggaacagcggaaaagggaccgcatgaacctccggaactttgattcccagaaagccacagg

SEQ ID NO: 986 - DNA, 122 bp, Homo sapiens
tccacgccggtattgggcaccaactccttcgctgtccgggacgacagtagcggcggggggcgcaaccctctccaactgcccttcaatttcacctggccggtgagcacagcctgggcgcactg

SEQ ID NO: 987 - DNA, 122 bp, Homo sapiens
ttatgcctacccttcccatctccctgggtacaggcacaaatgaaaagaataacgtgtacacgcccgcgaagcagagcagcaagtggataccgagcattattacgccgtgcgttcggccgccc

SEQ ID NO: 988 - DNA, 122 bp, Homo sapiens
agtatagcatattgctaaatgacgcatcatgtcttccctggtggtctagtggttaggattcggcgctctcaccgccgcggcccgggttcgattcccggtcaggaaagtaagccgttttaaaa

SEQ ID NO: 989 - DNA, 122 bp, Homo sapiens
agtagctgggactacaggcatatgccaccacactgggctaatattttttcttagtagagacggaatctcactgtgttgtccgagctagtctcgaactcctgggctcaagtgatcctgctgcc

SEQ ID NO: 990 - DNA, 122 bp, Homo sapiens
ccacaaattttcaacataaaaataaaggcatcatcaaaataatgtgtaaaaagataatgacgatatgcaaaacagtaaatgaaaagctaagatttaaaagttgtcaaagaatcggccaggca

SEQ ID NO: 991 - DNA, 122 bp, Homo sapiens
ataaatacagggaaagaggaggctattatttagatatgtaacaaaaatcgctttatagttcggaaccaagattatgattatcttcaggaagggataacagaatatgaaatgaactacctttt

SEQ ID NO: 992 - DNA, 122 bp, Homo sapiens
ggcagcttcagcgcaggagcctgacccacctcaccccctccacccacctacctgggagctcggtgtctaccttccagctgagggctggactcaataacaacagcatcccaggaccaagactt

SEQ ID NO: 993 - DNA, 122 bp, Homo sapiens
tggggtttcctggccccgctggcggcccaggaatgagctttgtttgggatggagagaatccgcttttggcatccagttccaggaggcaaaactgcagggaattctgcatgatctcatccagt

SEQ ID NO: 994 - DNA, 122 bp, Homo sapiens
aattgagtgcaagaagcaagccctattgtctctctggaagatgtgcccaaattcaacctccgtccttcagacatcgctccctcttcccattccctcctctttcttagccttccctcacccca

SEQ ID NO: 995 - DNA, 122 bp, Homo sapiens
ctgttaattcgctcgcccgccggcctcagggtgagagctggagcaggctccaagcgctcccgcgcctgccggccccctgcaagcccccagccctctgcactcgccttccccggagcccaggc

SEQ ID NO: 996 - DNA, 122 bp, Homo sapiens
ctcttaatgcattaacttcagacacacgcagggttctcccaaagcctgccttctattggtcgtgacttcagtgtgctacaaccagtgacactgcacactgtgaagagcatttctggattgac

SEQ ID NO: 997 - DNA, 122 bp, Homo sapiens
agtaatcggaagtggttaggagtgagagagctgctggatatgcggagggactgggcgggtcggcttccgaatggaagaggtctgtgagaagttaacctggtgataccgatccgaagagccta

SEQ ID NO: 998 - DNA, 122 bp, Homo sapiens
caaggtaaccctctcaacatggtgacgcatatgtgtcacaactaacagttaaagaccttccgaaaatggcagctcccttgtctccccactgcggcggatcaaagtaagacgttccaaacatg

SEQ ID NO: 999 - DNA, 122 bp, Homo sapiens
caagcggcccgtgcaccggggtccaggctgatcaccggcggccggccgcctggaagggggcgctgggccagtctctgtgggcttgggtgtggtcagcctgtccccagctcctgggttcggaa

SEQ ID NO: 1000 - DNA, 122 bp, Homo sapiens
tcactggtcttgtctcccctccttttaggtaagatttattatgatacttaatcatacaatcgccctccttcctgccagcacccagtccagagtattggattggatactctgtttccctgaac

SEQ ID NO: 1001 - DNA, 122 bp, Homo sapiens
agccccagaagtggaaagaacaggccttggctctcacccagttaacaagcgtttatccagcgcacgtgttgcggtcggaccccatgcgaaggagctaaggacacaaaggtgagcagcagaga

SEQ ID NO: 1002 - DNA, 122 bp, Homo sapiens
acatccaggaagggattggtcagtctcctgtgccaggtccctgggggaccctgagcccagcggtataaagggcggctgtgggaggactggtacagcctctcccagccccagcaagcgacctg

SEQ ID NO: 1003 - DNA, 122 bp, Homo sapiens
agccgagccgcctccacctgccggatgcggttgcggcccaggtgcaggatagccagggtccggggcaggccggcgggcactgtggtcagctggttgtgggagagatccaggtattcaaggct

SEQ ID NO: 1004 - DNA, 122 bp, Homo sapiens
ggcccggcggccgcttggcggtgccagccggctgagctaaaccgtgctccttgcccactccgagctggggaattagggctactccccgccccaccctgcgcgcctactttccccggcgcacc

SEQ ID NO: 1005 - DNA, 122 bp, Homo sapiens
tgcgcaccagcaccagctgctggtccaggggcagcacctggaagcagggcaagtacttgacgaagcgcagcgtcttcaacaggcccgctgaggctgcctcgcagaccacctgtggactcttg

SEQ ID NO: 1006 - DNA, 122 bp, Homo sapiens
gctctgcaggtgtcccgatgcccagcccagctccagactctcagggctacaagctgagggcgccggagcgcgagcctgggccggggggctctgtcctcgcgtctctagaacgaggagccggt

SEQ ID NO: 1007 - DNA, 122 bp, Homo sapiens
aatgtgtgtatatttcaactaagcaaatatgtacctaggaatttatcctaaggaagtaatcgcagatgattcaaaagatctgacacaaggttgttcattggaataaaattgaaactacccaa

SEQ ID NO: 1008 - DNA, 122 bp, Homo sapiens
tttgttgggttacccatgacctgcaaagctggggctaatttctttgtctttgacaagacccgcaaagctggggctaatttctttgtctttgacaacttgaccagagggtccaaacaaaacag

SEQ ID NO: 1009 - DNA, 122 bp, Homo sapiens
atgtagtgacgtgagcttcaatttctcagttcattaatttcaacaatattaatttatctccgactcaccgttacaactttacggtttggaagccctgtgcgtacacaccgcgtaggaggtgc

SEQ ID NO: 1010 - DNA, 122 bp, Homo sapiens
aaatccacagaggataactccagacgccacctgttgagtgatgcactctttcttaaaaaacgggtcaggcatagtccaagaacagcctcctttcctgcaggaatcagaaagaagagccaggc

SEQ ID NO: 1011 - DNA, 122 bp, Homo sapiens
caggcctgagagctaatgaatagcaccacagggcccagcctttcagcctacagcttgtctcggtttcacccttttttcatttctttacaatgaaaattctaaatagttgatcacagtgccag

SEQ ID NO: 1012 - DNA, 122 bp, Homo sapiens
caggctctcgtagaggtggcagtagtgatggtgcaggttgcaggtgtacagccccgcgtccgtctcctccaccgctgcgcacccaggaggaagccgcgcgtgagccttgcggtgcccccgac

SEQ ID NO: 1013 - DNA, 122 bp, Homo sapiens
gcgggccgaagccctgggccacttcatttccacaggtacatcctggactggtggagccagcgagaggctggagctggagcctatcggctgggccccgcctcgcctcaggggacactgctcgg

SEQ ID NO: 1014 - DNA, 122 bp, Homo sapiens
atttaagaaaataaaaagtgtgagcaagaactccatttctatggcaacccgcgcggcagccgcctctttgttctggagcggcggccacgccccctccagtgtgaaaggctgcgtttccggcc

SEQ ID NO: 1015 - DNA, 122 bp, Homo sapiens
ggcttgtccctctctacacaaaactgcccttgtcagggttcccagtgacctatgcactgccgaatccagtggtttgttcttcaccctcactgcctaggcagcattcaatgcttgctcccctt

SEQ ID NO: 1016 - DNA, 122 bp, Homo sapiens
gactcaagcgatcttcttgccttggcctcccaaagtgctggaattacaggtgtcagccaccgtgcctagccctaagctgattattttgaggaatagcagacacaggagaggctccaaaacca

SEQ ID NO: 1017 - DNA, 122 bp, Homo sapiens
gattcccttggatgggcaaacggtattcaggcaggactaccatttccgggagggggagaccgggggaagcaggtcaggacttgaggctcataaccatgctgcactgatttgtttaaaagtaa

SEQ ID NO: 1018 - DNA, 122 bp, Homo sapiens
ctgggtttatttgaaatttttaaagagggggtaccgacagcgggagcctcctcaccttcgcggcctccctggaactttacccggatcgtcttgtcgatgtacttggacaagtccaagatgct

SEQ ID NO: 1019 - DNA, 122 bp, Homo sapiens
aggctcagagttgtagagcgagtcatcggtgggcctgggagctgcacccaacccaatcctcggaagattaacagcccctttttcacagggtatttaactgtgaaagtaagagggaggaaaat

SEQ ID NO: 1020 - DNA, 122 bp, Homo sapiens
agtctgtagggactaggcaatccaggaaagcttcctggaggagtagggtgtttggaatcgcgtgctatttgttcactttgtcgtgtgcgctctaacggcctgtgttctccatcacagtttat

SEQ ID NO: 1021 - DNA, 122 bp, Homo sapiens
gttgggaggacgttactccaaattactgtttggggtacagggtccttggtgttggtccgtcgaccaagcactcacttctgaagtttgtcagtcttgaaggtttagtggaagcggaaaccgag

SEQ ID NO: 1022 - DNA, 122 bp, Homo sapiens
ggcgggagcgagtctcgtggccgcagaacatgcgcgagtctcttttgttctggaacgggccgagccccaggaagtggagctgcggagctgaggcctcaccgtgtcttggcccaccctgctca

SEQ ID NO: 1023 - DNA, 122 bp, Homo sapiens
agtataagcccgctgggtaactggcaacttgcacactttctagaaaagacagtagaggaacggcccaagcctttgaaaattccatttatcctttgggtaccatgggaggacaggaatctggt

SEQ ID NO: 1024 - DNA, 122 bp, Homo sapiens
cttcagtttctgttcacaattgttttaaaacaattctcatctatccagtctgctctcccacgcctcagatgagggaagccaatggtcaatgctctgtgatagcccaagtaggatccaatcta

SEQ ID NO: 1025 - DNA, 122 bp, Homo sapiens
ccccacacgcacgcacgtgtgcacatcctctgactgctcacgcgccactcccttccccaccgcaccccaccccgacacccacgatgccacgcttcaggcggggctctaagacaaggcctttc

SEQ ID NO: 1026 - DNA, 122 bp, Homo sapiens
cccgccgcgccccgcctccgggcgccccgacgctgccggcgcggacgccattgctgcggccgctgtttgttattaaactgcccagagaaagggcttcgagtaaaaacaccaactttccagtc

SEQ ID NO: 1027 - DNA, 122 bp, Homo sapiens
gaatcatcgatcagctcatatcactgagccaaatgcttgtcattggctttgggggggcaacgtagggcccacagttcccctcatcatcctcagagttgacactccccagtgcctcacagaga

SEQ ID NO: 1028 - DNA, 122 bp, Homo sapiens
atggaaaaaaatcataatatattgtaaatgaagttacaaatagaacacagacgtgagggacggggtgagaaaccaagagggctacaacatcagaccaatgaatcagttacctatatgaggat

SEQ ID NO: 1029 - DNA, 122 bp, Homo sapiens
gcctgcgggaactacggagcttggaggagaccggggtagtcaagggttacaatgtagctacgccttgaggctaaagctgtactaaaagccaactttcctgagtgatcactatgggccagaca

SEQ ID NO: 1030 - DNA, 122 bp, Homo sapiens
aggtactacttctaagcctccatcattgacagaaatggtacctgcaggtactggcaggagcgttcttgctgacacgactcggacttcaccatggcctggtccatgttcaccgaggccttctg

SEQ ID NO: 1031 - DNA, 122 bp, Homo sapiens
cagagcatgctgaaggctgtggtttactgacttcatcacaagccctagaggaaattagtacgtaaccaccttctgtggtcacataacacagccatcatctcactccagggccctagtgcctt

SEQ ID NO: 1032 - DNA, 122 bp, Homo sapiens
agcacgaaggcaaggggcgcccgggccggaaaccgtgcaaccccagataccctctagacccggtccatcgcccccgctcgcagcctgggccagggtgcctgctcacctgggttatgcgcttg

SEQ ID NO: 1033 - DNA, 122 bp, Homo sapiens
aatagcacaacccccaccatcatcggcacgctgcatgtcccctcaccggaatgaaagctccgtgaaggatgggattttgtctgtgttgttcccggatgcatttccattgccagaacctgata

SEQ ID NO: 1034 - DNA, 122 bp, Homo sapiens
gtgtaattgcaaattcgaggtttacaaagcctccccctggaggccccacgtgagtgtgagcgaggccccagcccacccctgtggccccaagaaggctctgcgacaaaatatccatgagtgcc

SEQ ID NO: 1035 - DNA, 122 bp, Homo sapiens
gagggagggatggccagcgggcagcagggggcgccgggggccagcgcgactgactgcagccgcttgctccccaggccacgcgcccaccctctgttgctggacatcacacaaaagcctgtccc

SEQ ID NO: 1036 - DNA, 122 bp, Homo sapiens
gcggcagcccggctggtcacacacagtgcacacaccttcaggttgagaacctcctgaacccgcacatcatccattatggtccccaagaccacggccattttgttttcccggccaggaagctt

SEQ ID NO: 1037 - DNA, 122 bp, Homo sapiens
agcagaaatcacttcagagaaaaatatcttgactttagagttgtggttctcaaatggaggcgattttgccccctaggagaaatctggcaatgtatagagacatttttggttgtcataactag

SEQ ID NO: 1038 - DNA, 122 bp, Homo sapiens
gcctgagaattcctgctccgaaagggccatctggctgaccaggttctccaaacagctctgcgtttggaatacactgtcttcccactgcttccagtcggcacgcagggcctgcatctccgtgt

SEQ ID NO: 1039 - DNA, 122 bp, Homo sapiens
tgtactccaggaagcccaaccttctccctgcgcctcagtttctcccgacgtcctcgatggcgccatggcgccacactaggtaccttcgggttcgacctcccgagcagctccacacgctgagg

SEQ ID NO: 1040 - DNA, 122 bp, Homo sapiens
ttcaggtgatccatctgcctctgcctcccaaagtgctaggattacagccgtgagccaccgcgcccagctgtaacaaggtatttcttatgtgtcccataaattaaatctaggggaaaaaacta

SEQ ID NO: 1041 - DNA, 122 bp, Homo sapiens
tagctgcgttcaaccaggctcaggaggtccttcaagatcttggcttccttttcctgactccgcgcccggcgcggttaattatagccccaccccgcgactacctgcttcgctcccacccgcgc

SEQ ID NO: 1042 - DNA, 122 bp, Homo sapiens
tcgatctcctgacctcgtgatccacctgccttgacctcccaaagtgctgggatgccactgcgcctggcctacattctttacactggtagggcttctctctggcatgtgtcttgtgatgacac

SEQ ID NO: 1043 - DNA, 122 bp, Homo sapiens
cggccgcgtgttgctcgtggggtgaggacaggtttggtgcgtgggacctgtggtactgagcgacactccaatacctcatcagccatcagccctgggcccagtggctttgtcaggtcttggag

SEQ ID NO: 1044 - DNA, 122 bp, Homo sapiens
ggggctcggacgataccaacgggaatcctacggggggaagcaggggagtcgggaggaagccgaaggaacctggccctcaaagcgactgtgccacagccaagaaaactgggagcttctgcaaa

SEQ ID NO: 1045 - DNA, 122 bp, Homo sapiens
taaaaatacctgcttccctctgagatgcggcagctgccacgcagcaacttttacccacgccgtttgtcataatctgacactgctaaggagtgtccacagggccgtgcgtctgcaagaatcgg

SEQ ID NO: 1046 - DNA, 122 bp, Homo sapiens
aaaatgcagcccagtttctacctagaaggggtttatgacacatttccggaggctacttggcggcctggcttctaaccaatatgcaacagggatttagaggggcagacacacattaacccagc

SEQ ID NO: 1047 - DNA, 122 bp, Homo sapiens
cacatataatagatgccgctatgcctgaaccatactcagtaacagatatcaatatttaagcgtacaacagcacatgtcgtaagcaaaggcagtaaatagtaggccaaagacctggattcatt

SEQ ID NO: 1048 - DNA, 122 bp, Homo sapiens
gttagaatcactagctaggcagccttactgcgcgccggaagtttgggccaccgtgcggcccgccctttccggccagactgaacgcggccccatctgtcggcttaggaactgggaagggcgga

SEQ ID NO: 1049 - DNA, 122 bp, Homo sapiens
ttccggtgggggcgctggctcctgccccaccccagcatctataccctgagtctgataggacgagaaggaacatttcagccagccctgattgggtcatattatccaatcagagttgttttgca

SEQ ID NO: 1050 - DNA, 122 bp, Homo sapiens
ctgcggcgcagctggcgctcccggcaggcgcgcatgatgaaggccagcagcgagatgatgcgctccaggaagaggttgaagaacaggatggtcccagcgcagccgaacagcccgtaggcgat

SEQ ID NO: 1051 - DNA, 122 bp, Homo sapiens
caatcataagccaatattgaataattgaaaagtgtcaggcgtgatgctatgcactttccacgcacttcttcacgataatttaaaaaagcagatacatactactattattgctatttacagac

SEQ ID NO: 1052 - DNA, 122 bp, Homo sapiens
acccagccagggttgtagggtgagggccggtgggtgggcgccgcctggcgggcgggcggacggggggctggcagcggggagggggcgcaggtcacgtgccggcgggcgggtgggcgcgtaca

SEQ ID NO: 1053 - DNA, 122 bp, Homo sapiens
agcctgggcaacaaggagaaaccctgtctctacgaaaaacacaaaaaatgagctggacatcgtggcccatgcttctagtcccagctacctgggaggctgaatggaaaggatagcttgagctt

SEQ ID NO: 1054 - DNA, 122 bp, Homo sapiens
ctctcaataggggtttcaggcagagtcatgggcttcagggattggaaacaaaagaacaaccggaggctccaagtgggtgtctcaccatgaaaaggtcaaggctagtactaaagctgaggcca

SEQ ID NO: 1055 - DNA, 122 bp, Homo sapiens
gggggttggctaaccctcgtgttccccgacccctctctctccaccccccacccccgcccccgcttctgtctccctagggactggtgattgcagctggaagtgcccatgaccgagctggcgtc

SEQ ID NO: 1056 - DNA, 122 bp, Homo sapiens
ggaagtcgagggcatcgccagggggccgagttgggcccgggtgtggagaacgaagccgaacgctgggctctggattctcctccagagcgctccgccggcctaagcacggccgccccaccccc

SEQ ID NO: 1057 - DNA, 122 bp, Homo sapiens
ccgggggcggggaggtgtcaaaaagaaattgtgtttgaccaaaggaggaagaaagtaaagcggggaaaaagatcacctcttagggcaagtcattaaaaagtgattcaataatctggcatgag

SEQ ID NO: 1058 - DNA, 122 bp, Homo sapiens
ggcgtgggggtgctggacggtgtccctgtgctggacggtgtcccgctggctcagaaccggcgcggggcctgggtcggggccgccctcgcttccggcctcccagtcgggccctgtcgctggcg

SEQ ID NO: 1059 - DNA, 122 bp, Homo sapiens
aatacgaataaaagttagaagcaggggaaagaatattccaggcaagggaaaatgcatttacgaagagtttgagaagttcagttcaattaacaaagatctgagagggtgagaggttaaaggaa

SEQ ID NO: 1060 - DNA, 122 bp, Homo sapiens
actccgggctgcagcgtgccacccgcctcctgcatgtgtggagtagatggtttcgaactccgtggcggaagggaaatttaagaggccaccggggctccatctctttgtacggccatgtgact

SEQ ID NO: 1061 - DNA, 122 bp, Homo sapiens
ttgaccacattcccttaaggcctcttccaatttcaagagctgtgctttaccatgacaaaacgaacctagctcttttcccaattttgcaacgtcagaaaaaggaggaaggggaaatagctgtg

SEQ ID NO: 1062 - DNA, 122 bp, Homo sapiens
gcggaggagcgcatccagctgcgctaccactgccgtgaggaccacatcacggcctccaagcgcgagttcctgcggcgcaccgaggtggacagcaaaggcaacaagatcatcatgacgcccga

SEQ ID NO: 1063 - DNA, 122 bp, Homo sapiens
gctacaccctccacgtggtggacagccccactgtgaaaccatcgcgggacaatcattttgcgattttcatcagtgagttgggattgctccctctcttccctggaggggctggcttacagggg

SEQ ID NO: 1064 - DNA, 122 bp, Homo sapiens
ggctatttccaatctccctttttctaaacacctctttatggagataatttttcctagtttcgcattatttcctttggtgagattctcaaaagtagaaatcttggggcagagcataaactttt

SEQ ID NO: 1065 - DNA, 122 bp, Homo sapiens
gaggggagcagggatgggcagggtgccctccccagttctcttaccctagctggaagaggacgttcaagtgggggttgcccagggaagtgggagttggtgattccttcctctttttagaactc

SEQ ID NO: 1066 - DNA, 122 bp, Homo sapiens
aggggttaactcaggcgctaggcggccggggcggggccgcggcctccgcgggcgcgcgcgcgcgttgctgactcagcggcgattccagagatcttggatggagggttccaggtcggtcccca

SEQ ID NO: 1067 - DNA, 122 bp, Homo sapiens
actgagatttgggtgacatctgtccctttttgagttttgacccaagttaaccttttaagacgctctttatttcttccccttttgcctcagttcacgttcctcccccttctccttacatgcct

SEQ ID NO: 1068 - DNA, 122 bp, Homo sapiens
acattaataatctggggataagaagtagcaaacttaaaaaatatcaaagttggatggggacgaaattatggggaactgtaggtaaatttaacctctggaaacttagggacaggactgatttt

SEQ ID NO: 1069 - DNA, 122 bp, Homo sapiens
agggacgaagggcctccagtgggagtcactgatgggaggcagtccagtgggaggcagccgcgtggggaagccgccaccgcggcatcagggtggcccagggtcactcaccttgagctgcctga

SEQ ID NO: 1070 - DNA, 122 bp, Homo sapiens
ccgtgcgcagggccaccagagcattactttctcccgtggaggtcacctgctaggtgtggccgcccgggctctggcaaggctctgggagctggtgttgggtaagagcgagtccccgcagtgcc

SEQ ID NO: 1071 - DNA, 122 bp, Homo sapiens
gtccaaagcctagggtatctcttgctaacacaagggaaatgaaaattgtgtggccatatccgaatggtgatttaggttcgtttgcattcactgtgtatatgaatcctctccccctgctgcaa

SEQ ID NO: 1072 - DNA, 122 bp, Homo sapiens
gaatctcctttgtgctcaaacagcgttatctttaacttgtcggagaataaccagtgggagcgtgcttaactaggagcctgcatgtctgaccacattgtagtgattcaaaggagtgtctttct

SEQ ID NO: 1073 - DNA, 122 bp, Homo sapiens
cctgaacttttccttcctctcatggccagcaatgctagttttccattgaagacagcaatgcgccgggcacggtggctcacacctgtaatcccagcactttgggaggcagaggcgggcagatc

SEQ ID NO: 1074 - DNA, 122 bp, Homo sapiens
ccgcccggagtgcgggatcggcgggggcgaggcgggagtggcggtgccagcggagggcaccggcccggcgtggcagcggcggcggagcgcggccccgggcacaccatggccgagctgctgcg

SEQ ID NO: 1075 - DNA, 122 bp, Homo sapiens
gtttaaccccttccttctttggcacacacttcacaaaagaagacaccaggtgaacaagcacgcagagacatattcaagatcgtcggtgataaagaaatgcgcatgaacatgatttttaagcc

SEQ ID NO: 1076 - DNA, 122 bp, Homo sapiens
cagccaccccttctgggagggaggtggggggtcagcccctgcccggccacccgccccgtacgggagagagatgggggttcagacccagcccggccagccgccacctccaggagggaggtggg

SEQ ID NO: 1077 - DNA, 122 bp, Homo sapiens
ggccgctggggctgttgtaagtcttgctggatgttcccctgttcctgagccttaacccctcgcacagccatccccccccccgtcctgccatccccccccgccgtcctgccttccccacccca

SEQ ID NO: 1078 - DNA, 122 bp, Homo sapiens
cagaaacaagccacaatctccagattctactattcctgggccacgtgaggagcgcccacccgtctggcgctgcgttccccggggcgtcccagcctctcccgcccagcccgccgccctcctcc

SEQ ID NO: 1079 - DNA, 122 bp, Homo sapiens
gctctgaaaggtcccctacccgcccctcccccgccccctcccccagaccaattatgcctccgaaaattatagaccgaggccttgaggaggccgccccaggccctgtcaccccctcccgctcc

SEQ ID NO: 1080 - DNA, 122 bp, Homo sapiens
actccatgaaatggcatttgtcaaagttgcgatccttctctccctgttgggaaagagagccgatactggaaagctgagagaatcagcttcagcatgaaaataggacgggacttgctaggaca

SEQ ID NO: 1081 - DNA, 122 bp, Homo sapiens
ttttaaaacactttagtgattacagccctcttcctttcagggaaaaaacagtttaagcgccgtccattttccgacttggtaaaataatacgaaaccttgggaatagagaagcaacgaaaaca

SEQ ID NO: 1082 - DNA, 122 bp, Homo sapiens
gagagtaaagacgattctggctttgaaggccaggtcgcttgcgtcataaccacgcaactccgctgctgctattctgaacgcagtcacagtcgacacttacatgaatgcctgcgtactgataa

SEQ ID NO: 1083 - DNA, 122 bp, Homo sapiens
actcgcatttgtctggcttaactttctccagcctcagtttccacttctgaatgggaccatcgagggcagtgtggcgaggattcaccaacatcgtccaggtgaaattggcagacacagaatgg

SEQ ID NO: 1084 - DNA, 122 bp, Homo sapiens
cccaacacactgggcctctggcctgtaagagacaccggagggacccccaagtgcaaagtacgaatcatgagtggatcttgacatattaagaagtcaaccggcagggcgtggtggctcatgcc

SEQ ID NO: 1085 - DNA, 122 bp, Homo sapiens
cgcagcactccgaagccttgtcaacaacccgcgatacaggtgaggggtgggccctgcctgcgggtttttcttagctggctctgtgggccccaggactctaaggaggccctggtgagaagagg

SEQ ID NO: 1086 - DNA, 122 bp, Homo sapiens
gctagtgcgcccgtcggaaagcgagtcccggccggtcatggttccttagcaagcaaggcgcgagcctctctggatcccgtttgcggagggcccagcttagaggaagctttataggattgggc

SEQ ID NO: 1087 - DNA, 122 bp, Homo sapiens
taaatgctccatgcttcagtttctccaaatctaaatccggaagatttgctccaggtcacacgcagaccaagtggaagtggagctgatgggagggacctagcctgtgggctccctgcttggac

SEQ ID NO: 1088 - DNA, 122 bp, Homo sapiens
gaaataatgcactaaaagaaagtttgcacttttaaaagagagaacttttagacctaaaggcgatttactctgttttcttgcctgagagggtcaccacccaggcataatcataaatgcatgga

SEQ ID NO: 1089 - DNA, 122 bp, Homo sapiens
ctgggagactggaagcttggaaagctggattccagatattcacaggaccccagaagacaacgtacacagagctttttgttcctaggtcctactcagtatctgccttgcggatttcatagata

SEQ ID NO: 1090 - DNA, 122 bp, Homo sapiens
gtgcccgacgcgcgcgcaccgcacgcccgcgggtctggaatgcggcgaaacccgggccagcggggcgcgtggctgagtttacagaattaaaaatcctctaaaaaataccggaaccaagtaca

SEQ ID NO: 1091 - DNA, 122 bp, Homo sapiens
gaaatctgctgactttgactggaaacctaagcagcctctgcacagctccaaacagccacgcgagctgcgctagcccagggccccgtgcagggcaggacacttgcacgaccaggcatgcttat

SEQ ID NO: 1092 - DNA, 122 bp, Homo sapiens
ctcttccctgctgcccgccgagaagttgccgaggccagattcgatcttgttgttgacactcgaacgggggcggggcgggtctggccctcctccgggcctctgcccctgcgggtccccgcttg

SEQ ID NO: 1093 - DNA, 122 bp, Homo sapiens
agctcccagatgggaaggggctgccatgtcctcgtttgtcctgcctgcttcaaggacacacgaggcctcatattttccaggaatccaaagggtggctaaactgggaaggccaccagcaccag

SEQ ID NO: 1094 - DNA, 122 bp, Homo sapiens
tccgctcgggctccaccggcacgatgaagggctcgcgctcaggcaggtaggccccgccctcgggcacgtaaggctctgtccgattcaacattacaattatggcatgatttggaaggcacaca

SEQ ID NO: 1095 - DNA, 122 bp, Homo sapiens
caccggagctttcagtttgttccgctgtttgaaattggcgccggcggagcgttaaggtcacgtgacggaacgtcgccaatcggcgccggccttgtctcggcattccgggctcgaaggctgtg

SEQ ID NO: 1096 - DNA, 122 bp, Homo sapiens
gggggcggggagccggcgggggagggtcgcccggcgccggaggcgcggccggcagcgccgcggacgagctggcttgtgcaggtagacatctaaataaataagtcagaacaaactttgctttc

SEQ ID NO: 1097 - DNA, 122 bp, Homo sapiens
ggtgaacggtggagcttttgagggcaagaccctgcacctcacagcccaggcattgacaaacgggaaatcggacttttattttcaggtttgagctcagtttaattcttccatacagctaaata

SEQ ID NO: 1098 - DNA, 122 bp, Homo sapiens
aagggttacttgattcaaatatgtcttaagtaactgcttcctttacatttacagtgttctcgcagtctttgccttataaaactcatgcattcaatgaagagcggctgcaagagtgagctaat

SEQ ID NO: 1099 - DNA, 122 bp, Homo sapiens
aggagcagggatggtctgcagaggggccagggctcccctccagccctaacaggacctccgcgtccctccacttgctgggccgtcctgtggactgtgcggtcccctgcagattgtccagtacc

SEQ ID NO: 1100 - DNA, 122 bp, Homo sapiens
ttctcacacagcaagcacagcaatagagatttattttatcttattttttagacagagtctcgctctgttgctcaggctcgagtgcaacggcacgatctcggcttactgcaacctccgccttc

SEQ ID NO: 1101 - DNA, 122 bp, Homo sapiens
atccttttctctgccaggtgtgtttggagacattttcctggcctttacatcacagccaggcgtgactcacaagcagatgactcagtggcaaaagtgaccaatgagctaggggaaaatgagaa

SEQ ID NO: 1102 - DNA, 122 bp, Homo sapiens
gccaatgagcctgtgagtgtgtgtgtgtgtgtgtgtgtgtgtgtgtgtgtgtgtacataacggtacaaccccaagaaaatttattctgcttttgcaaaccgcagactgaagcccttcacagt

SEQ ID NO: 1103 - DNA, 122 bp, Homo sapiens
gctcagcggcattctgtccttacagatccctcccatggctcaactgttcccaggatgagacgccgggggtgacatgggcagcctcaggtcctcccgggacccacaggcaggcacagggatgg

SEQ ID NO: 1104 - DNA, 122 bp, Homo sapiens
ttctaggtgccgtctgtctcccctttctttgactaggaaagggaactccctgaccccttgcgcttccggagtgaggcaatgcctcgccctgcttcggcttgcccacggtgcgctgcacccac

SEQ ID NO: 1105 - DNA, 122 bp, Homo sapiens
ggaaagtgaaagcaaagtcccgggaaagcgggagatgattcagcccggggttctgcccctcgcccctccagcagcctctacagttagggagctcttgaactgttctcagcaggggcccccaa

SEQ ID NO: 1106 - DNA, 122 bp, Homo sapiens
gcagggtccagtgccagccctctgtggagacagccatccggggccgaggcagccgcccaccgcagggcctgcctatctgcagccagcccagccctcacaaaggaacaataacaggaaaccat

SEQ ID NO: 1107 - DNA, 122 bp, Homo sapiens
atctgaattgaatcttaaaggatgacagggagttcactggatagacaaagtagaggaggacgtaagaggcaaaggacacatcatgtgtaaaggcatgaaagctgagccagcctattatcttg

SEQ ID NO: 1108 - DNA, 122 bp, Homo sapiens
gggaaatgctcctgcggaagctggagctctgcgcgcttgaccacttcggggtgaagcttccgtccgcccatccttccttcgaggggccttggggagaggagaaatgctccaggacgatgccc

SEQ ID NO: 1109 - DNA, 122 bp, Homo sapiens
acccttccacgaagtccctacacagatcccaccaggctgggcacggaagaacagaaactgcgaaaagaaagggactggatgagtcctggggaatcacagcgcctccacttgcacaggacaag

SEQ ID NO: 1110 - DNA, 122 bp, Homo sapiens
gaaggaatgggtggcactcacacagcatcaggatcaccttctgcagctcgccctgcttcacggacaggtacaactgccgagggtggaaacggagcttcttccgcctgccaagggagcacggg

SEQ ID NO: 1111 - DNA, 122 bp, Homo sapiens
ccaggggcgtgggggccgcgctctgactctccggggagctcccagaggagactggcccctcgcccgcccccactctggttttgagcatctcagcgctcattccaaagggttccgcgctcagt

SEQ ID NO: 1112 - DNA, 122 bp, Homo sapiens
gaccattttagctcaagggatcccaaatccttactgggatgctggtgagaatgagtgctccgctgccgcaccgcgatttcgactgcaaagctttccaacacaaggtccactgcgcggggagc

SEQ ID NO: 1113 - DNA, 122 bp, Homo sapiens
ttgaatcttctggaaagctgagcttgtgcctaccatagaattctgaatgtacctatatgacgtctttgcaaacttaaaacctgaatctttgtagtataaatcccttgaaatgcatgtaggct

SEQ ID NO: 1114 - DNA, 122 bp, Homo sapiens
gtgctgtggtcttgtctggaggtaggctttagttgcttgaggtttcaataattttcataacgaacaagggctacaagtaggtaagccttatttacttttggtaagtagacatttggggggat

SEQ ID NO: 1115 - DNA, 122 bp, Homo sapiens
ccactcagggtcctctgatcagcctgcaagctcaatgaacatgatagacaggagcattcccgttaactcttgctattccttcagtcctcaacatgtcctttacttactctacactttccata

SEQ ID NO: 1116 - DNA, 122 bp, Homo sapiens
caggggaaggaaagaaggaaggctgtgaagaaccgtggtgcctgcctgcacagccctcctcgcgtgcgagcattagttggctaaagtcgcctgtctcgacagtctcccctgcggggtatctg

SEQ ID NO: 1117 - DNA, 122 bp, Homo sapiens
agtgactgagtttatactgctgggcttcaccacagacccaggaatgcagctgggcctcttcgtggtgttcctgggcgtgtactctctcactgtggtaggaaatagcaccctcatcgtgttga

SEQ ID NO: 1118 - DNA, 122 bp, Homo sapiens
gtccccgcccccgcccccaatgtggtggaaagacactcaattccggtacagcgtggagagcgctttgatggaggaaatacaagccgatgtagtgttcccgggaaaacctgatccagaaggct

SEQ ID NO: 1119 - DNA, 122 bp, Homo sapiens
tgaaagactaaggaacgcaccccgccgactctgctcccgttacccgggcaactggaggcccgacccggaagtcctactagctcacctaggcgccggcggccgcttccaagatggaggctgca

SEQ ID NO: 1120 - DNA, 122 bp, Homo sapiens
gaagacaggaatttattcattgagcgaatagttattaagcgcccactctattccagacaccgttctaggcattaggtgaacagcagtgaacaaaacagacggaaatctgtgtctacttgtag

SEQ ID NO: 1121 - DNA, 122 bp, Homo sapiens
ctcaagtgatccgcccgccttggcctcccaaagtgctgggattataggcgtgagccgccacgcccagcctgggtttctatattagaataatcctaggcaagacaaccttctgagccttgcca

SEQ ID NO: 1122 - DNA, 122 bp, Homo sapiens
gtccggcctcatgccctccggtcccgtccctgcgtggcgtcctgctgtgcgcccacagtgcgagtattccccagattgttcggggatgccaggtgggtcatcagggcagaacccccactcgg

SEQ ID NO: 1123 - DNA, 122 bp, Homo sapiens
aggaccctggcaagaaattgtgtcctgtgtctcgtggcccagcctggcactcgccctcctcgccccgctcagctttagggggcaggaagcagtgcagctccttaacccacttcctgttagag

SEQ ID NO: 1124 - DNA, 122 bp, Homo sapiens
aaacgcaccaaacttaagcctttcaacaggtagttcatttttcctaaaaacaaacaaattcggcaaccagatatctcaggaagaacctgtgtttggccctgagcaccgcaaaagggtagaaa

SEQ ID NO: 1125 - DNA, 122 bp, Homo sapiens
atcagctataaatatcgagaggacttgtctgcacatctcatggtagctggctgggaccaacgtgaaggaggtcaggtgagtttctcccaaagcactctctcctctgggcttccccactctcc

SEQ ID NO: 1126 - DNA, 122 bp, Homo sapiens
cccgaggggtggcctggtccttccctcctggcctgtgtggactctgatggggctgttggacgcggtggccttcaacctggggcccgttggccagagctcggcctctcagagaccgctgcagg

SEQ ID NO: 1127 - DNA, 122 bp, Homo sapiens
gactacaggcgtgtgccaccgcgccaggcgggaaaaggatcttcatatctcaccagcagccggttccactgactctgactgtgaaaaggttatcttgactttcatgcattagtaccaccact

SEQ ID NO: 1128 - DNA, 122 bp, Homo sapiens
gcacatgaacaaacctttttaagagatatttcaaaaaaaaaaaaagtctgtgtcaaacaacgttaacccagaaagatgcagaaatgtcagagacattacatgggcaggacttgcggttggca

SEQ ID NO: 1129 - DNA, 122 bp, Homo sapiens
tccggatgtcgatccccctcccttggatctgaccttacatttgctaccaggacaggctctcgacagggcattgagatgcatctcttcagggtggagacacatcgggatctgtcatcctggac

SEQ ID NO: 1130 - DNA, 122 bp, Homo sapiens
acacccaccactggttctccccatactccagccccacagacccgccctgcacgacccacacgtccaccctggcacccttcacccagctggccctgcagctccatgtccctgaaacctgtcac

SEQ ID NO: 1131 - DNA, 122 bp, Homo sapiens
agaagcttcctgaggtttgtgggtgtctgctgcctgaggcacttgtcaaggagcagtcaccgcaggcaccacgagatcggctccgttgcagggacactgagcccagcatctacccatgagag

SEQ ID NO: 1132 - DNA, 122 bp, Homo sapiens
aacaggtgcttaataaatgtgtgttacagacatgaacatcgtgcttctttaaggcagccacgttttctatgaaataactcaaaatcagagaaagctgatccatagaaaatgaaaaggatgaa

SEQ ID NO: 1133 - DNA, 122 bp, Homo sapiens
gaatgcggcgggcagagcagcttcggcgctggcggggctcgctgacagagcaggagcctgcggagcgacgaggcgcggggcggcagccgctgaccaggcgcgggagccccagggtccgcttc

SEQ ID NO: 1134 - DNA, 122 bp, Homo sapiens
gaaagatccgagacttatgatccagattaaggctgagtttctcctaaatggaatgagatgcgatggagtggttaaaatggaaggagtggaaaggacatcatttctcacttttctctctcttt

SEQ ID NO: 1135 - DNA, 122 bp, Homo sapiens
ctgtgggccacattgagggtcacctccagcttggcaccctcagggctgctcctgtcctgtcgtgggggccgccctgctcaaggtataggcccggctggttgcagcccgttctcacctgctcc

SEQ ID NO: 1136 - DNA, 122 bp, Homo sapiens
gcgagcctgcctccttgagcacgcccgtgggcgtcacgaagatgcccgagctcatgatggcgaccacgatgacggccacgcccttgagtagcgtgatgttcccctgcagggtcacgccctcg

SEQ ID NO: 1137 - DNA, 122 bp, Homo sapiens
cagatgcccgcagacaaaattttggcttgcaagtaaggtatatggccgcaccagtcgacccgccgcttcttcccggtcatttccccgtcctccttctccctcctccgctatttccttaacta

SEQ ID NO: 1138 - DNA, 122 bp, Homo sapiens
agaaatgggatcacgggactgacgcagccaggaccagtagaaatgggatcacgggattgacgcagccaggaccagtagaaatgggatcagcttctggcacttgctgcgtgagctcactcctc

SEQ ID NO: 1139 - DNA, 122 bp, Homo sapiens
ccccacacaaatgcagacatctggttggaagtccacacagcacatagtctctcctggctacggttgtactgacatcattgttgttgattttgtttttgtgtttgtttctgttttaagcaact

SEQ ID NO: 1140 - DNA, 122 bp, Homo sapiens
tggtggtgacgctgctagtgctgctgatcgctgccactttcctgtggaacctgctggttccggtcaccatcccgcgggtccgtgccttccaccgcgtgccgcataacttggtggcctcgacg

SEQ ID NO: 1141 - DNA, 122 bp, Homo sapiens
aaaagtgttatcttttccttaaatatccctctagaggtatttttcctaagtggtattgtacggtgtatactgttcttcagcttgtcttctctgtgtaacatatttttgagattgtcccatgt

SEQ ID NO: 1142 - DNA, 122 bp, Homo sapiens
tgtgagacaatatccttggccaccaccgatatggaaaactaagtcgctcgcgacggaaagcgatccccatgcccctgacttttgaaaggagaagcatttagtagtaaaggtttcgcagccaa

SEQ ID NO: 1143 - DNA, 122 bp, Homo sapiens
aaccctgtcagatcggttccgtttagtgtctccatttcacagatgaagatgctcaggccccgcctaagtttgcgcttctgatacgtggcagaagcctgtctctctgacgccaaagcccagtc

SEQ ID NO: 1144 - DNA, 122 bp, Homo sapiens
aagtcgtggcgcgcgcacaggggatgtgtctcgttctgggttgtttcctagggtgtgtttcggagtctggaggacccctgattccagacgttggtgtttaaaagttaaggcgaatgtggaaa

SEQ ID NO: 1145 - DNA, 122 bp, Homo sapiens
acaaaaaataatttgtttttattatcactacttttctctccctaagaaggcctatgtgatcggccagtttattttatgaatttatatcgaatgtatggcctcatatcaacaaaagggccttg

SEQ ID NO: 1146 - DNA, 122 bp, Homo sapiens
ggctcctggcctcgcctcagcggctgcaggctcttcgtcgcgggccgggctgcacgcgagcgccctccgggcagactttcgtcccccacccccgggagcgcggaaggctcactcgcagcgca

SEQ ID NO: 1147 - DNA, 122 bp, Homo sapiens
ttaacacctaaaaatctccagcgaccagcggtcacatgcctgaaaagaacttactatgaacgccagtaagaactttaccaaaccaaaactacaagccaccgtatcgagcagtacttaaattc

SEQ ID NO: 1148 - DNA, 122 bp, Homo sapiens
tcaactgaaatgcaagtcaaaaccactacctcatacctattagaatggctactagaaaaacgaaaaacaggccgggcacaatggctcatgcctgtaatcccacactttgagaggccaaggag

SEQ ID NO: 1149 - DNA, 122 bp, Homo sapiens
gctttagacaggacagtctagacagtccaggcccgcgtctgcaggttgcccggcaacaggcgccgcagcgcagggcttctgattacactctgacctccagggacgaaaaggtcgtcggccca

SEQ ID NO: 1150 - DNA, 122 bp, Homo sapiens
aagaggcagtgctgcaaattcaaaacagactttcaaaataaactcagcagggcagcactccgggggtgcttccagagccagcccccaccccacccccagttctcagttctaggtgtttgaaa

SEQ ID NO: 1151 - DNA, 122 bp, Homo sapiens
cacgccgcccgggtacccggcagatcgcgaggtggaacgggccgtcgctgcgggggacagcgttccgaggcagttggtcctctccgggatgccgtaggcatcagctgaccggcccagcccac

SEQ ID NO: 1152 - DNA, 122 bp, Homo sapiens
aggcatgggcaaccacgtccagcccaatgtattttcaaatagttcctttatgtatttgttcgtgctgttttcttctatacacaattcatggccctgtctcacctgaacatccctccctatac

SEQ ID NO: 1153 - DNA, 122 bp, Homo sapiens
attcctgaatagaaatattaagagtcatcacgcttgtgcagtcaacacatatttactgggcgcattctatgcacgagttattgaagacagctgttgtaagcatttcaggacaatgcacctcc

SEQ ID NO: 1154 - DNA, 122 bp, Homo sapiens
caggaccgttggttgtcctgctcagctttctggtgggttccagaaaagttgttaactcaccgtttatttggggttttgctgttgttgtaaggctagaagtgacactcatttcttctgtcttc

SEQ ID NO: 1155 - DNA, 122 bp, Homo sapiens
tgctccatgccttctttccatagtatgctaaatttctgattttacacacatacacacacacgcagaggagaaaatgtaagctacctaacataaaacaaatgtcttcatatagaaaatgtttt

SEQ ID NO: 1156 - DNA, 122 bp, Homo sapiens
atgttgaatttgaaatgccagtggaacagccagctgaaactgcatgggagcgcagtgaggcgtgtgggtatggaccccaggtatggtctgaagaccctgatttgagagtcatcagcacaaat

SEQ ID NO: 1157 - DNA, 122 bp, Homo sapiens
gggagtgggggcgtggtcctggggctgcgccctctggtgtccgcagcttgaaggacgggccgcatttgggccttatttataggtgttgccccacgagacgtcagtgactgcgcccccgtcac

SEQ ID NO: 1158 - DNA, 122 bp, Homo sapiens
attttatattcttatatattatgtacacacaaaatactcttctaaacacagagaatactccgatatcacctagggtgtgtgtgcgtgtgcgtgtgtgtgcgtgtgtgtgtggttcttttctg

SEQ ID NO: 1159 - DNA, 122 bp, Homo sapiens
cgtggggccagccactctggcccgtgtccccacgtccttcaggcctagccacccccgccccgccctcaccaggaacctgacacctactcccaaatcggggtcggggaaaaacgtggggcgag

SEQ ID NO: 1160 - DNA, 122 bp, Homo sapiens
gcctggatgccttggtggccgccaccatcaacctgggggacctgcccagcgacagcccaccggaccctcagcccccagcggcctctgggccccccagcacagtccccctgcctcatagctca

SEQ ID NO: 1161 - DNA, 122 bp, Homo sapiens
cgcctccttgatgatcctggtgatcacggcattgggcaggtttaggtcctcgggcctctccgccattgccgccgctggggcttaaactccccttcgcctccgcttcagggagctactgcgtc

SEQ ID NO: 1162 - DNA, 122 bp, Homo sapiens
agttaaatgagttgtgagctgattagcttgttaatcaagatctcattggaaagtttcatacgtagttatgtttgtgttactgtaagcaaagaattaaagtacatctaacctggacattctta

SEQ ID NO: 1163 - DNA, 122 bp, Homo sapiens
gctgggtgtggtggcatgtgcctgtggtcccagctgcttgggaaggtgaggcaggaggatcgcttgggactgggaggcagatgttgcattgaggtgagatcatgccactgcactccagcctg

SEQ ID NO: 1164 - DNA, 122 bp, Homo sapiens
gccttcctctttcactaatcctcctcagcacagaccctttatgggaatcagccttggggacggtcaggtcaggtcccttcccacaaggccatgtctcaggctgtctctctcagtggggggaa

SEQ ID NO: 1165 - DNA, 122 bp, Homo sapiens
cagagatcaataaaacaatggccctttttatctggggccccaccatctgtgtctacctaccgaatatgcctttagcaaatagagatcgattataaagctgagtctaagctgcactgggtaga

SEQ ID NO: 1166 - DNA, 122 bp, Homo sapiens
ttcattttgacattacaagacaaaaagcacagcatgttgcgatgggactggccgttactgcggtgccattcaacagggtttacgattttcctggagcctctcggccgggtgatgccagagag

SEQ ID NO: 1167 - DNA, 122 bp, Homo sapiens
aatcatagctcactgcagcctcgaacttccaggctcaagggatcctcctgctttaacttccggagaagctcagactacaggccgtggccaccacacctggttcttattgttgttagtctctg

SEQ ID NO: 1168 - DNA, 122 bp, Homo sapiens
aagcacaggactcccgggaatgcactgggtgcaacagcaccagctcacatgagggtcggccgtcaacatccaggctggggaagcagaaggtaccccagccataagcaagagaggggcggcct

SEQ ID NO: 1169 - DNA, 122 bp, Homo sapiens
aagagttctattatggataaaatgctatcaaataacatcacctgttacagacaagtatttcgtgaaaggaagagttaattgatatggcagactttatgttgtcttattttaagaaattgtca

SEQ ID NO: 1170 - DNA, 122 bp, Homo sapiens
gcgggggccgcccggcccgaggttgccctttgtttacacgcccgcgggtgcagagctgggcggccccccgcgccagaacctcctcggctgccgcgccgcgctccccccaacccccgtcccgg

SEQ ID NO: 1171 - DNA, 122 bp, Homo sapiens
ccttggcctggggtaggtgaggggacccggcgaggtgcgaacagccgataataataacctcggctcccggagcgtttcttgcgtgctgagcatcatactaacgcctttccaggtattgtccc

SEQ ID NO: 1172 - DNA, 122 bp, Homo sapiens
ttgctcatgcctctgaggttatggtaatattttatccatctttcttcatgaagacacagtcgctgctgctattgacaaccggaggccagcactgaggagtgacgtgggcagggggccagggg

SEQ ID NO: 1173 - DNA, 122 bp, Homo sapiens
ggccatgtgaagacagagtagagaatgattcgaagatgctagccttgaagactagagcgacgcagccgcaacacaagcgatgccagcacccaccagaggttgggagaggcaaggaatggatt

SEQ ID NO: 1174 - DNA, 122 bp, Homo sapiens
cactggctttttttttttttttaattcgttccgctgcttggtttggggtctcttcccttccgcagcttggtcttgttgctgctcttgagtgtgacaaactgcaagtcgagagctcttgtcca

SEQ ID NO: 1175 - DNA, 122 bp, Homo sapiens
aactccatcttaaaaaatccactgccttaagtgacagaagctctggctttaggccaggcacggtggcacaagcctgcagtcccagctctttgggaggctgaggcaggtggatcacttgaggt

SEQ ID NO: 1176 - DNA, 122 bp, Homo sapiens
caagaggcgttaagttcataataggataaaaacgtaagcctgtggcagcaggaaagtgtgcggagagaatggggtgtagttactgctcttagcacatggtgggtattgtggatcttgtaaat

SEQ ID NO: 1177 - DNA, 122 bp, Homo sapiens
caactctaagcgaaaatcaggactccatccggatttccagttctgcggctacacaaaacccggcagataccacaaacctgctcccaggctgcagcaaaactcagcctctttcttctaaggaa

SEQ ID NO: 1178 - DNA, 122 bp, Homo sapiens
gcttccgccccacgccgaggaaacgcctgcgcccgccgccaggaaggaccccgcagacgccgctgtcgcctttctgcccgggaggacaaccctctgcctgaggaccagttccgaggtatgcc

SEQ ID NO: 1179 - DNA, 122 bp, Homo sapiens
cccaagcccacgtgagagggcaggacgcctgagagcttgaggccacacgaggctgtggagcggcgtgactcaaacgtggcgcgcatcagctcgcacacttccaaacctcgcgatagctactg

SEQ ID NO: 1180 - DNA, 122 bp, Homo sapiens
tctaaatccagtagccaatttcctacctgccagaactctttcctaccatccgtcaccattcgtgactctgcaagacacggggacttagacatatgtgtgggagtgtgtgtgtgagggagaga

SEQ ID NO: 1181 - DNA, 122 bp, Homo sapiens
ctccaattttccggcagttactcccagtcatgcccgagccctcaaagtccgctcctgccccgaagaaaggctccaagaaggcagtgacaaaggcccagaagaaggacggcaagaagcgcaag

SEQ ID NO: 1182 - DNA, 122 bp, Homo sapiens
gggtgcggtagacgtagccctgaaggatgaacccaggctggtagtagggcggcgggagggcggggggacctgtcagtcaagtccaaagcagaaacgcggcgccggatcccagtcagaggccg

SEQ ID NO: 1183 - DNA, 122 bp, Homo sapiens
gacttcccagagatcggacacttgttacttgttgaaaaggcgccaccttccctgacaaagcgaaggcgcagcgaaacagtacgagtttggtcgaggccggctttgacggctttgcgggactg

SEQ ID NO: 1184 - DNA, 122 bp, Homo sapiens
tgtatttgggcaagagatgcgcttatgtacacaaagcgagaacagcacactgactcctggcggcaaaccaaacaaatccagagttatctggggaaggttcactccggcgcacggaaacagcg

SEQ ID NO: 1185 - DNA, 122 bp, Homo sapiens
actacacactaaccatccccacttacactatgtattttaagaactatggatctttttgttcgcttttctgaaatgccccttgttcctggcattttcgtctcaattaagcatctttctggatt

SEQ ID NO: 1186 - DNA, 122 bp, Homo sapiens
gccatcgccatttctctccgggtctcacgcactcactgtcactatcggcgccgcagccgccgcggctgtctagacccacccaaggccaaccgagctcctgggctgaggaagcaggaatggga

SEQ ID NO: 1187 - DNA, 122 bp, Homo sapiens
ccccagacccgtcgagcgagctcccctccctgaaatcctcgccccgagatctccggccggcgagctccgccccctgaagtccccatcccaagatccggggccggcgagctccgcctcccgaa

SEQ ID NO: 1188 - DNA, 122 bp, Homo sapiens
cagagcagctgctgggccccaccatccacttaaggactggccgtgattcttggcaagctccgcccgccaggccacctctcacccagccagggcaccccgggcgacctccgcgccaggtgcga

SEQ ID NO: 1189 - DNA, 122 bp, Homo sapiens
aggacccagctccattaaagctctcgggcagtggtcccctctacccactgaagcgatagccgggagggtattcctaagccaccactacaaccacccctcaattccggaacgcccccaatacc

SEQ ID NO: 1190 - DNA, 122 bp, Homo sapiens
attttaaaactattgaataaatatatataaatgtgtagtgtgaattacaaatcaacaaaacgtacacaagaaatatgactgaaaactgaagaaatggagaagcagtaggattcctaaatgcc

SEQ ID NO: 1191 - DNA, 122 bp, Homo sapiens
gaagagcccagcctcctcttcctgaacaccaatgaggaaaccagaagagcacatgggggacgtggcttccctgaaagcctgtcagagtctgcacatgctctttgtgacagaggtgccaaatt

SEQ ID NO: 1192 - DNA, 122 bp, Homo sapiens
tcaatcacagcatctgccacggccagcttgtagcgagcagtgttcatgcccgcgctgcggcgcaccacttcctccacggagagccccgtcaccgcggcatgcaccgccactatgttggacac

SEQ ID NO: 1193 - DNA, 122 bp, Homo sapiens
ccccttagtccgggcgagcctctgatcttggccgcaagggtgactagagcccccatgctgcggggctgggggtgggagccggcaccggggacgagggccatcctctggcacagacaccctct

SEQ ID NO: 1194 - DNA, 122 bp, Homo sapiens
atcatttttttccatgtatcatttttaaaccacaggcccaagacctcatcttaaaagtatcgaggtattacaccaaaaaatgacaacacttttccaactaactccaacaataccctctcaaa

SEQ ID NO: 1195 - DNA, 122 bp, Homo sapiens
ggatgtcaaattcaggaaacaggtaaaggctacatcccaaaagttcctctccaaaaagaacgccaaaatattaataaaaagagtcttctttttgaagtttttcgtcccctagtgtcctcgag

SEQ ID NO: 1196 - DNA, 122 bp, Homo sapiens
ccagcatttgcttccggatggtctacagaacttggagagttggaatttatccatccctcccgatttgtttgaaatcagccttctggaaatctgcagttggaaaaaggtggttcgccgtacaa

SEQ ID NO: 1197 - DNA, 122 bp, Homo sapiens
acctggaactaggaggaggcgccagcgccccggctggctcaggctccacaaggtcatccccggctccatctgaccttgagattaatcctgcagcctgcgccagcccggccaccatcagcgcc

SEQ ID NO: 1198 - DNA, 122 bp, Homo sapiens
tatttccccccagaaaggttaacatactgaggacagagagggcatgtgtaggcggcagggcgcacttttcatttagtctggttcgcaggtgcggtcaagacgattccttattgtcttggagc

SEQ ID NO: 1199 - DNA, 122 bp, Homo sapiens
ggcgcgtggagggtgggaggatccggccgctgccgggcggatgggagctgcgcgaggagacgggcgcgcgtggagagggcgcgggagttggcattcggtggtcctggcagttagctgagcac

SEQ ID NO: 1200 - DNA, 122 bp, Homo sapiens
accacaatcctggcaccccataaggccctgcttgaggggcaagatgaccttcctttctttcgctgaccttatttttttttttttttttttcccagacagagtctcactctgtcagccaggct

SEQ ID NO: 1201 - DNA, 122 bp, Homo sapiens
cgcttctcatccctgatatttagacttatgggccaatttgggggtattttctccttctgccgtgatgaatgcttctatgaaacaatgtcatcacaagtcacctacctgccctgtcagctcag

SEQ ID NO: 1202 - DNA, 122 bp, Homo sapiens
cccctgggtttctgctacccccagttggaccctgaggtcgtactcaccccaacagctcagcgccccctctccagcgccgccataagcagcacggcccggtacgtaggaataaatctcgcttc

SEQ ID NO: 1203 - DNA, 122 bp, Homo sapiens
tttaaggacgtgcctgccttgggcgatgggcgggtagaaacctcacacaccaaagcccatcgagctaaactcaaggttgcgaaccccaaccccggtgggaacacggtctgcagacacgctcc

SEQ ID NO: 1204 - DNA, 122 bp, Homo sapiens
cccccaccccactgtgccccacccgcgtctgatgatcctcccggtctgtaaaccttggcccggccgactttaagcaattgtcagttatgtactcacttctgcctccaagacgtcagtcagcc

SEQ ID NO: 1205 - DNA, 122 bp, Homo sapiens
tgtcacctgattattcctaccccttccctgatccctgagagcccagagcacagagcaggccgcctcccaggacccaacagctgccaactttgaggcagggcctgccaggagcctgctgggcc

SEQ ID NO: 1206 - DNA, 122 bp, Homo sapiens
atttatggtttctccccatttatgtttaattaaatcacagcttgctgatgttcagcttaacgattatttgttgaatgtttactttgtgcaaggcaccatgctagatgtggaaaacacagggt

SEQ ID NO: 1207 - DNA, 122 bp, Homo sapiens
atgagcgggagaggcgtggcaggagcacaccctcaggcgtagagctttagagatgccccccgccctgcccctccgggctgctctcattccgagtttctctgtgtttcgaccatgcttttgtg

SEQ ID NO: 1208 - DNA, 122 bp, Homo sapiens
cgagctccgtggcagccgctgcactccttccggccctgccgcggcgtcacctcgcgcctgcgcacagcgccccctcccgactaaggacaggaagaaccatagaggcactccgggtactgcgg

SEQ ID NO: 1209 - DNA, 122 bp, Homo sapiens
tcccggttcgagaggaacccgggttccgtcccagcgctgatctctgcaggggcggggctgcgtgtgcggcgtcatgacgtaagcgcacgccggcgcgccggaggggaggaatgcggcaggcg

SEQ ID NO: 1210 - DNA, 122 bp, Homo sapiens
attatgcaacaattcattaatgggtttatccaggtagctttacattgactctgtgacacacggaaagcactaaatggaaatctagagagaaaataatatgatgctggccagtatgttttaat

SEQ ID NO: 1211 - DNA, 122 bp, Homo sapiens
aaccgagggagaagccggatgtttgcaaacaagcgaggagacgacttgcggaccagacggcgcgggtgcgagcaggagctccccggacatccgccgccagccaagcccctgggaccctcccg

SEQ ID NO: 1212 - DNA, 122 bp, Homo sapiens
gagctgcacgcgcaatatgcggagggtggtgctcctcctgggcctcttgaatgaggatgacgcgtgccacggtatgagcctccccacccctcttgcccctgcccccacgtgggctcttcctg

SEQ ID NO: 1213 - DNA, 122 bp, Homo sapiens
ctctgaggatttgggttctgcgacggacaggggaaggaaagaaggaaggctgtgaagaaccgtggtgcctgcctgcacagccctcctcgcgtgcgagcattagttggctaaagtcgcctgtc

SEQ ID NO: 1214 - DNA, 122 bp, Homo sapiens
gctcagattccaggggtcacaagtcaacatgatcaattcagagaatggaatataaagcagcgatgtgatagagagcaagaggctggctggtctgtgacctggcaaaggcttcgaggatgaga

SEQ ID NO: 1215 - DNA, 122 bp, Homo sapiens
ctgagctgcgaactcgccccccgcccttgggacaagaagacccagtcacatcactgcacccgtcctgtgtcctcaccattgctatgcaaagtgattcttgttgtacataagatttaaataat

SEQ ID NO: 1216 - DNA, 122 bp, Homo sapiens
atggaattgtgagaaataataaaatgtctgttctaaataagccactaaattctcctgaagcggattttgtaacactaagtagtactatctaaatatttaagtttgttcatactaacattcta

SEQ ID NO: 1217 - DNA, 122 bp, Homo sapiens
ccttctaatgaaagtaacacacagcacaggagggcggccctgggcgcggggctgcgtccccgagaaatgcttgttactgtggaatgagggacagagcaaatcccctgaatcgggcagagctg

SEQ ID NO: 1218 - DNA, 122 bp, Homo sapiens
gtctcaggacgtggccaaccgcttcgcccgcaaaggggcgctgaggcagaagaacgtgcacgaggtgaaggaccacaaattcatcgcgcgcttcttcaagcagcccaccttctgcagccact

SEQ ID NO: 1219 - DNA, 122 bp, Homo sapiens
gaagtttgtaatgtgaaagtaagttattcaaatttggggaaatatttactgagcatttgtcgtgtgctgggcccttcctaaacatgccttgtgcactcgtgggagcagcaggctcactagta

SEQ ID NO: 1220 - DNA, 122 bp, Homo sapiens
agaatccaaaggcaggaacgcagctggatcttagaaacagcccagaaccaggcctcaactcgcagagctctctgcttctgtgtgcctctctccctgtatttgcctggttctcttctctctgt

SEQ ID NO: 1221 - DNA, 122 bp, Homo sapiens
ccgagcacggcctcggaggctgagaggcctgggaggcagggccgcgtcctgcgggctccacgagagccctgtgaaatgccagtcagatcctggcccagtgccccaggtcctcccgcagcctc

SEQ ID NO: 1222 - DNA, 122 bp, Homo sapiens
acctcacactgaaggacttttgtactttttcgagctgtgttttctgagatcttccgtgggcgacggcttgtcgtttccacttgcagttaattgcattagcaggtattttccccccgcccctc

SEQ ID NO: 1223 - DNA, 122 bp, Homo sapiens
tcgtcctgtaagaggacccctctgagtgctgtgggatgtagttgtctgagggtcagaactcgttccatcctgaggctgtgtgcaggtgtgtgtgacctcaggcaagtgatcactcctgagtc

SEQ ID NO: 1224 - DNA, 122 bp, Homo sapiens
gcagagccggctccggaatccgagttccgggttcgagcacagctccgccgctacctcgggcgtgaccttggccggagcctggtcccctctgagcctcagtttcccggtctgggatgccggaa

SEQ ID NO: 1225 - DNA, 122 bp, Homo sapiens
cggcagcagcagcagcagcaggaggtgggggcctctgccaggtaccgggcggggcaggcacggaggtgcccaggttcccgcggaggccacctcttccctggagtgcgtgagagaggggaagg

SEQ ID NO: 1226 - DNA, 122 bp, Homo sapiens
cacccagtcattcaaaacaatggctggtgtgcccatttcgcagatgaggcaatgaggctgcgagaggtagagtgattttccctcggtgactcaactgggacgtagcaggtcgggcagtcaag

SEQ ID NO: 1227 - DNA, 122 bp, Homo sapiens
gagttgagcagggccttaggggagggtaggtcattaggtagaaagttgggcattgcaaggcgagaaaacagtgtatgagctgctgtgaaagacatgggaaggggagaagctcaggctgtttc

SEQ ID NO: 1228 - DNA, 122 bp, Homo sapiens
aggtgacagtgggacacacaaatggaaacctactgtgaccagctgtagacataagaccagcgggaagagcatccctggcccctccatccatcctccagctgaggcatgtctgcagggcagac

SEQ ID NO: 1229 - DNA, 122 bp, Homo sapiens
gtgctcccacttacttgaacatctcgctcctctctatggtggcgagccaaaagctgtaagcgtttgcgtagtaattgcaggtcccacggccgtgacactcgatgaatggcgcacttctaaac

SEQ ID NO: 1230 - DNA, 122 bp, Homo sapiens
gggcagcttataaaaagctttccttggttgcagctccaaggaggaggtagcacctgaaaacggcttctcttggcgcccttatctacatttccttgatgaaacaatgggtactcactgaagat

SEQ ID NO: 1231 - DNA, 122 bp, Homo sapiens
tatctctgtctggcgaggaggcaacgcacaactgtggtggtttttggagtgggtggaccccggccaagacggcctgggctgaccagagacgggaggcagaaaaagtgggcaggtggttgcag

SEQ ID NO: 1232 - DNA, 122 bp, Homo sapiens
taaccattgtcttgttctgtgatgaggggaggggggcacatgctgagtctcccaaggctgcgtctggaggggcccctgcttctccagcctggacccccagctttgcccaacaccagcccctg

SEQ ID NO: 1233 - DNA, 122 bp, Homo sapiens
taacccttctacccctctcctttttctccggagggcgctaagtccgtgagcggtggcagtcgcgaccgcgggtgcatccagtttctgcgcccaggtaagagaccgtccccacctctggctct

SEQ ID NO: 1234 - DNA, 122 bp, Homo sapiens
agctctctgggtggcaagagatgggcctgggagggaccgtgtccccagcaccgccagccgcggaacttgccttctctggggtggcagtggaaaccgatactgttttccaccttgaggcaagc

SEQ ID NO: 1235 - DNA, 122 bp, Homo sapiens
ttgggtgccattaccctgttttttgaatactaagaaacgctccattccttccttgatttacgtggctacagccggggcccttccggcttgccactgacatgccgggggaagctgttattcat

SEQ ID NO: 1236 - DNA, 122 bp, Homo sapiens
actctgcaagacacggggacttagacatatgtgtgggagtgtgtgtgtgagggagagaggcgagacgagtgctctccccacacgtgtaaccctgcatctcccagtttcagagcttgcgttca

SEQ ID NO: 1237 - DNA, 122 bp, Homo sapiens
ctgggcctcgggccctgaactggagcccatatgttggcctgaaatctgatttaccttggacgtggaacaagttaaatatttgtctaactcagtacgttgtattttccgctattcttcacaag

SEQ ID NO: 1238 - DNA, 122 bp, Homo sapiens
acctacatcactcctgccttgaggcatgtgctcctgctggacagctggtagctgaccactcggttctcaggaattctcttggaaacaaagaacatgcagcagggagaggggatgaccacaga

SEQ ID NO: 1239 - DNA, 122 bp, Homo sapiens
taacctgaagcgaaaaatgtagctttggaaatggtgtttatagcaggcccatgggcaaaacgtttcaaccgggcaaaactgaagcaatcaccagattatggagccgtatttctgtttcttta

SEQ ID NO: 1240 - DNA, 122 bp, Homo sapiens
agatgggaggatcccttgaggtcagcagtttgagaccagcttggccaagatggtgaaatccgtctctactgaaaaaaatttttgttaaaaaaatgccgggcctggtggcgggtgcctgtaat

SEQ ID NO: 1241 - DNA, 122 bp, Homo sapiens
gccctggctctccccgctccagcgctcagggagtctcctctgcaccccgcccgggagctgcggcttcactcaggtaccccgcgccctccagcccagcccagccctggcccggccccacccgc

SEQ ID NO: 1242 - DNA, 122 bp, Homo sapiens
tggcccaggtgcagggagcctgtcacattggggggtgggatgcacatcatgaagacacctcggggatttgctgctgacacattaggacgctgatggtggagaaggatggcacatgtttaagg

SEQ ID NO: 1243 - DNA, 122 bp, Homo sapiens
aggctttttcccccgtcgctggctctgcccgaagtttctagagttttctgaccttcaaggcgagaactgctgtgtcattcttagggacactccccaacaaactgcgccacccgagtctctcc

SEQ ID NO: 1244 - DNA, 122 bp, Homo sapiens
gtttatcttttgttagaatcctcaagcagtgcatctagtcattcatttagcaaacatatacggacgacattgctctaggtgccagaggttcagtcaaaacatatcatggtcctttccccttt

SEQ ID NO: 1245 - DNA, 122 bp, Homo sapiens
aggaaatttagaacaaatacgatgatatctttaaagaaaatggctttgtgtaagtattgtcgttagtgatctagtaatgtgtatctttctggttgtatttagaccttcaactcaaatgtcag

SEQ ID NO: 1246 - DNA, 122 bp, Homo sapiens
agtgttctcaaaggggctggctggtttaagtcagggctgtttcagatcctatggaaagggcgcctggagctgtcttcctggcccctactcacaccatcctgccccttcagagaaccctgtgg

SEQ ID NO: 1247 - DNA, 122 bp, Homo sapiens
ggcggccacgccgggccagccctggcggccctgcggccaaggtggttcgcttagcaggcccggctgctttctggcaggaaatgaatagctcccagatgagctcaggcaacctgagaggtcgt

SEQ ID NO: 1248 - DNA, 122 bp, Homo sapiens
tctccgggcccagctcttgtctcgcgtcggcctccccgggacacatttccccctgcctcgcggcagccccgaaagacccagctcctgcctcctgatggcctctttaggctcatctcatgcct

SEQ ID NO: 1249 - DNA, 122 bp, Homo sapiens
gctccttagggagaaggcaaatctagaattccttgacctcataaggaaacagcttggatccgtatggggaggggtggcatgggggaggatggagcagcacttagtacacagaggcctctggg

SEQ ID NO: 1250 - DNA, 122 bp, Homo sapiens
gccaaatatacccacagccctcctcacacaccctttcccttcctccctgtgtgccaagttcgcccccggagtcgtcgtttccttctttcccggcagctgcagcgacgacccacggcctgaga

SEQ ID NO: 1251 - DNA, 122 bp, Homo sapiens
tttgcacacagaaggccaggggcaggagcacaagaagctaagggaagctgaagctgaaggcgctgccaaggccttgggaggggtcctggcaatcatctgttgagacttgttaaatccttttc

SEQ ID NO: 1252 - DNA, 122 bp, Homo sapiens
tcttaacctattgatcactgtaactactatcatttaatcctgtgttgaatgtctggaaagcggctaaaggcacacaagagagagtgctttagcactgagaaatatggccaaagcttcaaaat

SEQ ID NO: 1253 - DNA, 122 bp, Homo sapiens
ggcgcggcgcactccctcccacggagcatgcgcgacccgcggtcgccggcgcggagggggcgtgctcccaggcttagaaacagtgagggagagcaaattcgcgcacctgatgtctgcttaag

SEQ ID NO: 1254 - DNA, 122 bp, Homo sapiens
caagttgcaaagtaactgagcgctgccactgggactcaaatgcaggctctcacagggccccggtctgggctcctgtgaccaaattagagcagaagagagctctcagctcctcaggtgtgcca

SEQ ID NO: 1255 - DNA, 122 bp, Homo sapiens
tgcgccggtggcggcaggatacagcggcttctgcgcgacttataagagctccttgtgcggcgccattttaagcctctcggtctgtggcagcagcgttggcccggccccgggagcggagagcg

SEQ ID NO: 1256 - DNA, 122 bp, Homo sapiens
ctattgtgaagaaaacccggctcctcttgtgagacaacggagcaagcgcgccaggtgtcccgccctttctgagaggggaggatgaaaaccaaatcgctgagactgagggtcccccaaagcag

SEQ ID NO: 1257 - DNA, 122 bp, Homo sapiens
gagttgtcaaatcttttccgggctctgtactgggcttagggaattgtaaagattaagacacgttgccggccaggtgtggtggctcacgcctgtaatcccagcactttgggaagctgaggtgg

SEQ ID NO: 1258 - DNA, 122 bp, Homo sapiens
gctcccccggaagtgaaagtgcggggatccgccggcccaggagacgcggcttctagcgcccggttcccgggaagctctgtgacgcgctaagccccgcccccacccgtcacctgacccagcgc

SEQ ID NO: 1259 - DNA, 122 bp, Homo sapiens
tgggggaggggctggttggaaccggccggaaccggctgtggagggacctaggcctccctgcggcgactccggggtctgggacccgagttccctcggccgcaaggtggggctgggccaggagc

SEQ ID NO: 1260 - DNA, 122 bp, Homo sapiens
ggggctggaacaggctagtagttgctaggcaagttaaagtaattcagcgtccttgccaaacgtctgccaggcaaatagggaactttcagagaaggggagtgagatggtggtgtgtgttggtt

SEQ ID NO: 1261 - DNA, 122 bp, Homo sapiens
cagggaaggcctttcctcagcaggagagagacggtgctctgggcaagtacccgctggccccggggctgtgggattccgctgccagcaccacccacggtccctgtagtctgctcttcagtggc

SEQ ID NO: 1262 - DNA, 122 bp, Homo sapiens
cccagggcctgcccccgcgtcacggccccgggtcagtcttcgctccccaccgcctccggacgcatctccaaggcctcgccccgcccccaggagtcgctcttgcgtcaccgccccgccctcag

SEQ ID NO: 1263 - DNA, 122 bp, Homo sapiens
gctgtgagagattaaagggggtgggggtggggcatccatgtaaacatttcacctagtggacgaagtaaatgctcaatgaaagctaggatttttgttgttactatcaccagtggctgaaaggt

SEQ ID NO: 1264 - DNA, 122 bp, Homo sapiens
gcctcccaatcctatccccccaaccttaaatattagagataatgcatgtgaagtgcctagcgtggaggttgttttgtggtgatgtcaagcagaatgagtcacgtccacccctcccatctcct

SEQ ID NO: 1265 - DNA, 122 bp, Homo sapiens
ctgaactggtatcagagctggtcttgcgagggggccgttgggggcaatgggagagaagcacggaaccccagagagaggctgagcaggaaggaggccaggttttgcacagcgaggaagtgcct

SEQ ID NO: 1266 - DNA, 122 bp, Homo sapiens
catcctggacccggctaacccttactcatgctgtatctgtctgtgtaaatggcatttcctcggacaggctttcttgactccctcctccgaagtataccaggcccctttgtaatcatcacaaa

SEQ ID NO: 1267 - DNA, 122 bp, Homo sapiens
aaaaggtacaactatgacttgaacaaaggttttaaaggaactgtgtccaagcaatcagcacggtgtcataattgaacttcagacgtcattagagtttcaatctttttggtaagactattgtc

SEQ ID NO: 1268 - DNA, 122 bp, Homo sapiens
ttgcctctataaagtgggcataacaaggtctgactcactgacctggggtctcaggtgtggcgcccaaaccagcactatcagcatttcctgtaactttactaaaacgcatattttctggcccc

SEQ ID NO: 1269 - DNA, 122 bp, Homo sapiens
aaaagattttggatattgggttgctgatttctgagaaattcagaagctgtgttcctgttccgcttaattcaacacgcttttttttaagaactcagtgcccatcattgtactaggcctgtgga

SEQ ID NO: 1270 - DNA, 122 bp, Homo sapiens
ctagccgcgcgccccggaggccgcggttgccatggcgacggcggggccgcctgctgtcgccgagcacgctgtctcgcccgctcagtgattacctccatctccgcagtgttcgccatacggcc

SEQ ID NO: 1271 - DNA, 122 bp, Homo sapiens
aataactgcattctataaataatttcaaggaaagttttcttttcatgtctccctggagatcgtacttgagtcagggagaaaaagtaaagcagtaaagtcaagaacataggctgaagccagag

SEQ ID NO: 1272 - DNA, 122 bp, Homo sapiens
ggtgaccccgccaggccctctgtccagcctcaccacagcggatgggccaccgtgaagcgccgctgcaggcggatgctctgattcaccaaaagcttcctgaagagcccgggggagccgcgcgg

SEQ ID NO: 1273 - DNA, 122 bp, Homo sapiens
gtaagggttgcggggcttggagaacaagcacgcgtccctgtgaagcccgcagggtgctggcggcccaccaatcgcctggactacagtgaggagcattgtgtgactccgcggtggatttccat

SEQ ID NO: 1274 - DNA, 122 bp, Homo sapiens
cgctcaggaagacatcaggacagaggtctagacgcttacaaccctgagagacacactggacgctgcgcgcaagagccctgtgcatatggactccgattgacgccatcagattcgcccacaag

SEQ ID NO: 1275 - DNA, 122 bp, Homo sapiens
ggaggagaggacaggagaccatggtagctcctaggcccctctctccagaggcaaacttgccggcagcacctggaaggaggcttgtgcctccagtgtcctcctgcagtctgggtttctgggca

SEQ ID NO: 1276 - DNA, 122 bp, Homo sapiens
catcaagggcccccagtcccgggtgccgcggggacagtgtagggtcattagctgttgagccgccccgggcgggcccaagcctttggatctcaggtgaccggcacaggcggccgcggggtccg

SEQ ID NO: 1277 - DNA, 122 bp, Homo sapiens
aggactcagaaatggtctctatggggaaagctttcattaaacagaaaaacataaaagaggcgacagtcctgccctgagagggtaatggccaatttgacctattaggtgtttactgcatcaag

SEQ ID NO: 1278 - DNA, 122 bp, Homo sapiens
ttcagcgcgcggcgcccccgcttctccgcaaccccccgccccgcgcccggactcgccccgcgccaccaagatggtcatccagaaagagaagaagagctgcgggcaggtggttgaggagtgga

SEQ ID NO: 1279 - DNA, 122 bp, Homo sapiens
aagtggggagtggagccttcggaggactcccgggtccgcccctggccaggtgatgcggggcggaggcctaggtgcttgaacctggggggcagacaattgttctgctgcagtgcccaccaggg

SEQ ID NO: 1280 - DNA, 122 bp, Homo sapiens
cgactggcagaggcgggtgcagggaacccgcggctcggcgggagcgtgggaaaaagctgacgcgcagtcgcgagttcctacttagggaacttaaaaggagagtttcaatttttcttccctgc

SEQ ID NO: 1281 - DNA, 122 bp, Homo sapiens
attacaggtgtgagccactgctcccagtcttttctttcttctttttttgagacggagtctcgctgtgttacccaggctggagtgcagcggttcgattaggaacactgcgagctccgcttccc

SEQ ID NO: 1282 - DNA, 122 bp, Homo sapiens
ctggccgagtttgtgttttgctggctcgcggagttttctcctggctacaggcgagggctgcgcgtttcaggaaaaaccgagcgggcactgtttttttgttgttgttgttttttctgataggg

SEQ ID NO: 1283 - DNA, 122 bp, Homo sapiens
tctggcgccggccgcaggcctcggtcacgcccccagcggcccgttggtttccgggtcccgcggggtgcccccgcccacacgctatgccttaaattgggccaggctgaggcgctgctgctgga

SEQ ID NO: 1284 - DNA, 122 bp, Homo sapiens
ggtacgtgggtggccaagcagggctgccatgtgatctggaagagcggggtcagtgggagccgcgagggagccgctggtataatagatgctggcagggaccggccgtgcagagaagccagcta

SEQ ID NO: 1285 - DNA, 122 bp, Homo sapiens
ccaaaaaaggagagatatgggatgatattggaacaaaggctagcaacagataaaagaggacgttataagccaaggtagacactggattttatgccccattattgtcagaatcatatgagatg

SEQ ID NO: 1286 - DNA, 122 bp, Homo sapiens
ggtggggccagataagaataaaagcaggctgcctgaggttgcggtggtaacatgtttcggcgtccttccacactgtcgcggcttatgttgttttgctgtttgggtttgcactgtctttttga

SEQ ID NO: 1287 - DNA, 122 bp, Homo sapiens
tagtgctggcaaggcaaaaataacgaaagtggtaggaggtccggggattatgtgagagaacgcatgacaaatgtttagcacagagccgggcacacacagtgagggctcaattcacggtggat

SEQ ID NO: 1288 - DNA, 122 bp, Homo sapiens
cacagcacagcggctggggtcccgctcccagcagggcagcttcaacggtgaggacatctgcggctacatcaaccgcagctttgccttctggaaggagaaggaagctgagatgttcaactttg

SEQ ID NO: 1289 - DNA, 122 bp, Homo sapiens
ttgggtctaatgaccctggcctgtctcgcagggtcatcctgagaaatagctgatgtcagacgacgagcgtgagcagctgttctccatttgcactcaacaagagaaaagggccttaaatttca

SEQ ID NO: 1290 - DNA, 122 bp, Homo sapiens
ctctgtgactcaggcttctactaccaggctcatccgaggacggaggctgtcgttatacaacgcgcaagtgtggtctctgtcacagatgtggctgtcgcagagagtgctgcctcctctcccgt

SEQ ID NO: 1291 - DNA, 122 bp, Homo sapiens
gcctactccctccccagttgctgagtccagtcaaccctcctgctacagtatcccctatagcgccattcacctgccctcctctgctcccttggccaacatctaggttcagaacctcattgtct

SEQ ID NO: 1292 - DNA, 122 bp, Homo sapiens
aaggtttggcttttggagggacgaggagagcacggcctggggtgggagctgccctgctttcgtggccttcacactgtggacctctgacctctgggagcggcctggatgacgaagaggttttc

SEQ ID NO: 1293 - DNA, 122 bp, Homo sapiens
gagcgactctgcttgtccctcaagatgcttgtgaaggtgcccgctgcgctctgacaccggcgatctcttaggtacgacccagcggggttgggctggcggcagaaaccggcggagtgcgcgac

SEQ ID NO: 1294 - DNA, 122 bp, Homo sapiens
ctgcttaggaggctgaggtgggaggatcgcttcagcccaggagtttgaggctgagtgagccgtgattgtgccactgtactcctgatgggtgacagggtaagaacttgtctcaataaataaat

SEQ ID NO: 1295 - DNA, 122 bp, Homo sapiens
gctcaggtcctccacctggccgcccaggtccttcacttggctctccagcgctgacgaaggcgcctggcccacgcccctgcgcttctcccggggcgcccccttgggcacctccttgggcgcgg

SEQ ID NO: 1296 - DNA, 122 bp, Homo sapiens
tgagtgtccgccaggctgaggtcggcaggtgggcaggggaggcagatgggcagaccctcacggctctgtgccacccccagttctacctgtggacagatgggctcagtgccttgctgggcagt

SEQ ID NO: 1297 - DNA, 122 bp, Homo sapiens
acctcgcaccctccagaggtaccggcacctgctgtccaacctcgcaccctccagaggtaccggcacctgctgtccaacctcgcaccctccagaggtaccggcacctgcggggcatgacacca

SEQ ID NO: 1298 - DNA, 122 bp, Homo sapiens
cgcctggagggggagcagtggagcagagaccccaaaagactgcagggagggcattccaggcgggggcgccacctgggcaaaggccgggagatgggagcgtgcagggcccgtgggagggtgga

SEQ ID NO: 1299 - DNA, 122 bp, Homo sapiens
aagagttgtgaaaatgccacaggtacaaacacctgcaggccactcccacagggacagctccgtgaggcggtgccgctcattcccacaacctcctgccacaggcaacacttaacacttagaca

SEQ ID NO: 1300 - DNA, 122 bp, Homo sapiens
catctttctgcaggtttcccggtcctctggcgaggatcctccaaggcgtctcacatgaaccggctcagaaacgccaaaatctacgtggagagagctgtcaaggtcagaggaggggcaggggc

SEQ ID NO: 1301 - DNA, 122 bp, Homo sapiens
attccctcccacaaccgggggcgcggagctcatgtgccaggacttggaggtccctctcctcggcagagtgcccctggatccgctcataggtgggtgaccccagtgtggggcggcacctcact

SEQ ID NO: 1302 - DNA, 122 bp, Homo sapiens
cctagccccgcccccaggagatttccggcttctcggtactggcctagccgtaaagggctccgctccgcccctagagcaaccgtttcctcctcagtcggaccagagtgattgattagtttgtt

SEQ ID NO: 1303 - DNA, 122 bp, Homo sapiens
cgcggctgggcggagacccgcatctgtagggtgcagggctgtcccggagccttctgcccccgccctctctagccacgccgaggcataggaggggccctgcccggcagccccagcccaggcgg

SEQ ID NO: 1304 - DNA, 122 bp, Homo sapiens
atttcaggtgatcttcccatcttggcctcccaaagtgctgggattacaagcattagccaccgtgcctgaccaaaaatgtgtttaaggaatgatcacagagttaattcacccatataaacctc

SEQ ID NO: 1305 - DNA, 122 bp, Homo sapiens
gtcttttctcactgagccagcactgcacctgtgcctctgctgaaagaaactttcaacaaacgaaaaatttagactcaagatctgcactctggtttattttgtcccatgaggtgttcccctga

SEQ ID NO: 1306 - DNA, 122 bp, Homo sapiens
catgagcctcacattagtggacagagtccaaaaaaaaagtgacaacgtaatgcgctactgcgacacaaagcaaagcaaggtgggcaagcaacactagttctttattcccgcacgccctaatc

SEQ ID NO: 1307 - DNA, 122 bp, Homo sapiens
tccgtcgccaccaggacagaggtcccagtcactgactcgcctttcggctttacaacagcccgctcagctcggaccctcagctccagtgagctccaggtgctgggcgcctctgggctgcggcg

SEQ ID NO: 1308 - DNA, 122 bp, Homo sapiens
gacctgccaacaatgctgccccaacgaagagctgtgagagactgcattcctggaaggctacgcagccaaactccgattttctcagtctgcccagaggatgacaggggaatcccaggagagga

SEQ ID NO: 1309 - DNA, 122 bp, Homo sapiens
ctcaggtgatccacctgcctcagcctcccaaagcattgggattacaggcgtgagccaccacgccaggcctgttcaacatcttagatttcattttggatgttcctgtgaggactgcgtgtccc

SEQ ID NO: 1310 - DNA, 122 bp, Homo sapiens
cgagcgagcgggaggcgggagggcaggggcttcagtgacgcccccagggcccgggctgggcgcgaggtggagccgctcagggctcccgggctgcggttcgcccgctgtgcgaggagctcccc

SEQ ID NO: 1311 - DNA, 122 bp, Homo sapiens
atgccaagaaatgcaagtctttggagataaattcttggtgaaattcagctctatgagaggcggaagcacattggggtcacagctattcatgtatcatgtgcaagctcagtaagtgtccgatc

SEQ ID NO: 1312 - DNA, 122 bp, Homo sapiens
gcaatggtaccctgccctaggtgcacaagtgtgcaggagggatcaatcgcagagcctttccgagagaaggggcccaaagcgagtcaacttctctactgagcttcccatgaggatgctggatc

SEQ ID NO: 1313 - DNA, 122 bp, Homo sapiens
cagggactatctctaagcaggaaggtttagcatgtggacctgctgtgggcaagacaatggcgccatgagaaaagtgacttggtcaggaagcctggattcctgccctgcctccccactcacac

SEQ ID NO: 1314 - DNA, 122 bp, Homo sapiens
tgcacataagaaaagacgtggcagcaaaccatcctcccgacatgacgtgctgcgttggtgcgtttacgtccctgttccttctgaaagactcaaaattgtgttggagctactggtgcaccttt

SEQ ID NO: 1315 - DNA, 122 bp, Homo sapiens
gcgcccacgtagcccctgctctgttctgggttgtaggcgaggcctagtgtggcccggcaccgcagccacatcctaacctgcccctccacctctgggttccccattgactctttctcctccac

SEQ ID NO: 1316 - DNA, 122 bp, Homo sapiens
tggccgaggtgccggaggaagcgtggtcggggcagaagtgttaatgggcctccttcctgccgtgccctgcccgtgccagctcctcggtgctcatcccggctccctgaaatgctcgcttccac

SEQ ID NO: 1317 - DNA, 122 bp, Homo sapiens
tctgcgcgcgaactaattcgcggccgcataatttaataacatcgtccttccatttggccgcgactgctctggaaaattggttcagtagtaaacagaattctagcaggtggaacaagaacagg

SEQ ID NO: 1318 - DNA, 122 bp, Homo sapiens
ctctcccatgtgtttttctgcccatatccaggggcctgggctgtggctaccagatgtccacgctgaaggataatcggtgtctcgggcgtcgtgcaggaggggtgagggcacagaacgacgtc

SEQ ID NO: 1319 - DNA, 122 bp, Homo sapiens
ctccatttcctttctctgttctcaggcacagccagctgctactgtttctgctccttctcccgacaggcgaatgtttaatgtctctttctcctgtcccctttctatacatttggtatcaacat

SEQ ID NO: 1320 - DNA, 122 bp, Homo sapiens
agtagcaacagggcacacgctcctggtgagctgggcgggaggtggcaacaagggaggggccgcctgggcaagtggcctgcagctgggcagacaaggtcagggatctcccctacacgcgcaag

SEQ ID NO: 1321 - DNA, 122 bp, Homo sapiens
acccccgtgtggggtggcgctgacccccgtgtgggtggcgctgactcccgtgtgggggggcgctgactcccgtgtgggggggcgctgactcccgtgtgggtggcgctgactcccgtgtgggg

SEQ ID NO: 1322 - DNA, 122 bp, Homo sapiens
atcactccccacttggtacaaggcatagagaacctcatggggccgatgtgttgggactctcgcatctcaaattcctgtagaagcaaaaatggactgactattgagatttcaggtgctgttct

SEQ ID NO: 1323 - DNA, 122 bp, Homo sapiens
cgttctaaattattgagttctggaccagtgtctctagaagtgtgatccacaacctgcatgcggcatcaacatcatttgggaatattgtttgaaatgcaaatgattgtttgaaatgcaaatgt

SEQ ID NO: 1324 - DNA, 122 bp, Homo sapiens
tcatgaatattgtagatcttcccagaagccctagcgggaaggaggttcccccccgcctcccgcctccccgctttatgaatagcaagagagccagctcccatggtgccctccgtctcatgaat

SEQ ID NO: 1325 - DNA, 122 bp, Homo sapiens
agcagggagcaacagacaagcccaaattgctgtgtttaaaggagcagggctgtctgtttgcgtggggctgtctccctgtaatgagaaccaccgctgagagctgtttagacaaacgggctcag

SEQ ID NO: 1326 - DNA, 122 bp, Homo sapiens
tgccctccaccctccccagagccacttcgggtgcgcgctcttgggtaaagggggggtcaccggctgtctgggatggcttccaattttaatgacatagtgaagcaagggtacgtgaggatccg

SEQ ID NO: 1327 - DNA, 122 bp, Homo sapiens
cctttctcctttatccacaaaaatttgattgccctggggattttgccatgctttgtcactcgactgaagatttgagggtgtcatggggagggatcacaggttttgccaactttatagactgc

SEQ ID NO: 1328 - DNA, 122 bp, Homo sapiens
tgtctgaggccccctccccttcccacggccacacagcacgccggcacactccaacatgcacgcacagtcctcagagatccccacacacaggctcacacctgcacacgtgcacacgcgggccc

SEQ ID NO: 1329 - DNA, 122 bp, Homo sapiens
gcggagctgcgacctcgggcagctggaagcctgtgggctgctgcttctccaggcaggcggcggagggatgcaggcaggatgagcggcggtcccttcgccgccacccggagaaccgcggctgg

SEQ ID NO: 1330 - DNA, 122 bp, Homo sapiens
cagcctgcaacacacgccgccagctttagagcatcacgcttcctcaccacaaaagtcactcgtgctattctagagaactgagaagacaagctgaggggaaaaaagcaccccaggatgtgcct

SEQ ID NO: 1331 - DNA, 122 bp, Homo sapiens
actagtgaagcatcagtgtgtccaaaacagagacaatggtgagtgcggggggataaagaacgccaagagaactggacagcacacagaagagatcgtggacgcggaataacagagtcagttcc

SEQ ID NO: 1332 - DNA, 122 bp, Homo sapiens
tctagaaaaagtggcattatttatggatttatagtagcttctggccagattaggtgacaccgaatgagaaggcagaagaatcaagagaaagaatgtcagctgaatgggagtgataccctcta

SEQ ID NO: 1333 - DNA, 122 bp, Homo sapiens
tatattattatgctaataatcagctgaaaaggtcttggttataccagaaaacctcaactgcgtgatctttttctgcatcctcactaatgctatgattaacagcacaactttctgttgacttc

SEQ ID NO: 1334 - DNA, 122 bp, Homo sapiens
cggaggctggagctgagtttcattagtgtttttggagctgccaggcatttccaggggggtcgccttcctagaggccccctttccccagcttaaccctcggctttgcaggagggtgcgtgggg

SEQ ID NO: 1335 - DNA, 122 bp, Homo sapiens
gcctttaggaggccccaggttctgctcagggtggacctcagtaaaggggcactcagggagcgacccccaaaacagaagtggacgggaagccagcactgccactttgtggcctcgttgccatt

SEQ ID NO: 1336 - DNA, 122 bp, Homo sapiens
aaggggtggacaggaggtgctggcagaggtgtgctggctggggcgcccttgggccgcacacgtgcttccaggcctgtatcccaaagagacacttaggtctgtgagcacagatgtggtgtgtg

SEQ ID NO: 1337 - DNA, 122 bp, Homo sapiens
cttcaagggcccctggcttcctgcggcataaggcaccgggctgacagcaagcagcagaggcgtcccttatcacaaagagcagccgcaaaaacaacttgtttagagttgtttcttctccttcc

SEQ ID NO: 1338 - DNA, 122 bp, Homo sapiens
tctgggtcatcttttaggtgggagccacttccatgaggccagaattattctgctgtggggcgggggctccgtggggagtgacggcgtgagttattgtggggcggggtctccgtggggagtga

SEQ ID NO: 1339 - DNA, 122 bp, Homo sapiens
ggccccgtggccggtaacccccaacttgcaggacgctcaagacacaggccaccgccctgccggccaggaacgctggctccgcgcttacctcgcaggccttgagcttgtcaccatctccctca

SEQ ID NO: 1340 - DNA, 122 bp, Homo sapiens
catcgcggtttctctggaaggggtgatgggctttctcagaaccacctttagtttctgtaccgtaatcggccaaaaaggcgcaggcgctgctgctcctggcagctgcgtaacaggctctcaga

SEQ ID NO: 1341 - DNA, 122 bp, Homo sapiens
gggcctgtcagtttcagtccgctgcgggcgggcggagtggaaccgtcaggcagagggggacggaagagggagaaggaaccctgcagccctgcatccggccgcgcccaccccggcacgcctct

SEQ ID NO: 1342 - DNA, 122 bp, Homo sapiens
atgattttgctgccctccaacagaaagcctcaggaagagatggtttaacctccttaagtccgctcccatccccaaggacagacattcactttccttgaattggaagtagagccacttgttgc

SEQ ID NO: 1343 - DNA, 122 bp, Homo sapiens
ctctaaaccaaagtataaaagaaaagctagccccttatccggggccgagagaatttcgtgcgttagccatctctcagtcgctggctaataaaggactcctgaactcgtctcaaagtgtggcg

SEQ ID NO: 1344 - DNA, 122 bp, Homo sapiens
gttttcaagactgacttcaggatcatctgggagaggttgaaaggcacatgcagtgttcaccgccttgaactgaagatcactgaacatggctttggtggaaaccactgcagtgatatcagaaa

SEQ ID NO: 1345 - DNA, 122 bp, Homo sapiens
gcacgctggcagcgcgggaggctggcgctgcgccgggccccgggccccgatggccccgaccgcgtgctggagctcttcgacccacccaaggtaagtaagccctgcccgcggggttgcgcact

SEQ ID NO: 1346 - DNA, 122 bp, Homo sapiens
taccaggagtgcccgaggcacagtgcacagatgggctggtacagggtcctgggagcactgcgggaccgggcagggctctgctgagcctcaggagagggagggcgctggttcccgcatcctgt

SEQ ID NO: 1347 - DNA, 122 bp, Homo sapiens
gagagccgcgcctctgcctgtcctctctcatgggaagtctgggaccctcagaccgaaagacgacgtgcagcttccaccgggggcgccttcaggacaggggcctcggcctcgtgggcgcttta

SEQ ID NO: 1348 - DNA, 122 bp, Homo sapiens
tgttttggaccagttcgcactgctgtaaggctttttgcaaactcagaggctgctgctcctcgcttttcgtcatgttttcctcatccatcgcttgctctgcaacccccttcccctcctcctcc

SEQ ID NO: 1349 - DNA, 122 bp, Homo sapiens
gaagcgcaggacgcgggcgtccaaaggccccgacgctcccaggctgaggaggcactttgtcgtctctcccacgctctggccgtcgtcctaggcctgacagtggccagctgccttgcacaagc

SEQ ID NO: 1350 - DNA, 122 bp, Homo sapiens
gctgtcgcgagggcgggggtcggggctgcaggcggggcagggctgggtgggggcgcgcgacgcacctgcctgcttcctgcacgggtggtccccaagcactgcggggccccagcccaaagcgg

SEQ ID NO: 1351 - DNA, 122 bp, Homo sapiens
ttaccttgcgtgacggccaagaggcagtagtgaagcagaaagcctccaggtgtgttgcagcgctggagacattgaggatggaagttcctccagccgtaagacccctcctcaaactcggacag

SEQ ID NO: 1352 - DNA, 122 bp, Homo sapiens
ccggcccccggggtggttagcgcttccggggtcgaagggtgcgcggggttgaaagcaggccgctccgccccgtccccctcccagaccagcagaggcagcagccggagcagccgcagcctgcg

SEQ ID NO: 1353 - DNA, 122 bp, Homo sapiens
tcccggtaacagtggctgggccaggtctgactggatattccttgctggtcttttgcccaccgggaccttcctagtcctagttccactgaggtgacatcaccaacacaacttctcccccaaca

SEQ ID NO: 1354 - DNA, 122 bp, Homo sapiens
aaagctgccaagagctagcatgacaagggactggccctgggctgcggtgaggaaacccagcgtcctgaccacactgctgggtcagcgaggcgtccctcagagaccggaaacgcggacttcag

SEQ ID NO: 1355 - DNA, 122 bp, Homo sapiens
ccatgtgacccgcgagctgcggagagaccgcggcccccaaagcggcttggggaaaaaggacggcaaaaggcgccaactgatgggcagccagggaaaagcaggagtcgcccccaagtcacgca

SEQ ID NO: 1356 - DNA, 122 bp, Homo sapiens
aaatcaccaggtcagaactcacctttacttgacctgtccacaacatttgacaaagcttaccgatgactccttgaaacttgactttatttggtttatagagtaccacaccttttggttttctc

SEQ ID NO: 1357 - DNA, 122 bp, Homo sapiens
cacccccagggctctgttcctgctctagcccttcctgaagaattccagctacagaccgggcgcagtggctcatacctgtaatcccagcactctgggaggccgaggcgggctcatcacttgag

SEQ ID NO: 1358 - DNA, 122 bp, Homo sapiens
ctcctgggttcaagccatcctcctgtctcaccctcctgagtagctgagactacaggcatgcgccacccatctggctaattttttaaaatttttagtagtgatgggggtctctctatgttgcc

SEQ ID NO: 1359 - DNA, 122 bp, Homo sapiens
cctcgcggaaattgctgcggccaatggatgaggagccatccagtaagaacacaatgtcagcggcgtaaaggcgcgtgcaggtcactggggcgggcaggagagatcagggcctcttctgggag

SEQ ID NO: 1360 - DNA, 122 bp, Homo sapiens
gcagaatctgataatgacctcatcaacatccagtctctcattcatccttagataaaaaaccgcggtataaccggagggagggccatgcccagctaaaagaatacacttggcagcctcccttg

SEQ ID NO: 1361 - DNA, 122 bp, Homo sapiens
catgagtaatgagttgatgtggtccatgttctaaggtcattttctgttcatgacaaataacgtttttcacttacagtagtcatataaagtttttaaattgttcgtttacattttcaaaaatc

SEQ ID NO: 1362 - DNA, 122 bp, Homo sapiens
acccgtctcggcggccgggtagcaccgtccccgccaaggtcacttacgctgcggtggccccgggtccccagcactcacccagcgctgcagccgagagcctgcagcccagcctgcgcgcagcg

SEQ ID NO: 1363 - DNA, 122 bp, Homo sapiens
gggctgatatgttaattttgtgaaaggattctgatacttaagtggatagtttagtggaggcgaagagtggggaaaggcagaagatggaatggcattatggcattcaataaatgtttcctaga

SEQ ID NO: 1364 - DNA, 122 bp, Homo sapiens
gccacggtaggaaccgcgaaacctccggcttccctaaatagagctggtctcgggggagggcgccggggagttcggagcccggagggacatttttgccaagaccgagcggaagccgagcccgt

SEQ ID NO: 1365 - DNA, 122 bp, Homo sapiens
ccgttgcaccgtatgcccgcgccagagacgctctgcgcccgcgctgggttccacccgccccggccacctgctgctttccgctcggcccctcccgggaaacacttttattcaactttgcatct

SEQ ID NO: 1366 - DNA, 122 bp, Homo sapiens
ctctggccggacggccaatgggctgcctgggccccgaagccaagccctttccagctcctccgatgaaggcagcccctgccctggcatgggggggccactagatgcacctgggagccccctgg

SEQ ID NO: 1367 - DNA, 122 bp, Homo sapiens
tacagacagcgagccaaagatcttgaagaagaattggagagaactattcattattatcaacggcagattatttcccatgagaaaaaggcacatcataactggttggcagcttgggctgctga

SEQ ID NO: 1368 - DNA, 122 bp, Homo sapiens
tcgccaagtcgcggctcccagtttttccctgggcctccttcctttcccctctagggaatccggcatctagtaccgctggcactgcttgctgcttagcccacgcctctcatttgaaaatatat

SEQ ID NO: 1369 - DNA, 122 bp, Homo sapiens
agaaggaggccttcgtttccagtctttttgccttttctaatggagccctgcttttccttccgtgtcccttcaggctacttctgccaggtttctatttttcattctttattatgactttgccc

SEQ ID NO: 1370 - DNA, 122 bp, Homo sapiens
tcccagctaccagggaggctgaggtgggaggatcacttgagctcagaagttcaaggacagcgtggacaatacagccagaccctgtctcttgaaaaaacaaagtcttggcacttccagagccc

SEQ ID NO: 1371 - DNA, 122 bp, Homo sapiens
ttttaaaacgagcgcggcctacctcccgtgccccttgcctcccagtcctctcccgctccgcgccctctttggagttggctcacgccacccgactgccctccaggcctcaaaggtagataacg

SEQ ID NO: 1372 - DNA, 122 bp, Homo sapiens
tgagtgtgacccgaatttgagctctcaaatccaaagagctcccagaaacctcaatcacagcgccaaaaccattccataccagggatggaggtgcaagtccttcctggcccttctccccggaa

SEQ ID NO: 1373 - DNA, 122 bp, Homo sapiens
tgataggcccttttatacctttgatgtggttgaggcatctaagtgtcatctaaaaggcctcggtcactcactttgaaacatttttgcttcttggtctatccacacactctggcatgtgctgg

SEQ ID NO: 1374 - DNA, 122 bp, Homo sapiens
gggacgggctgcggccgccgtctggggtgagaggcccacccagagctctgggccagggctcgcggctctcgtgcagatgctgggccgggaggtgtggggagggggcttcccaggcggggcaa

SEQ ID NO: 1375 - DNA, 122 bp, Homo sapiens
gtgggcggggccttgctcgggtaactcccaggggctggctagagacccagaggcgcagagcggagaggcctgcggcgaggatggagggcctggcagtgcggttgctgcgcggcagcaggctg

SEQ ID NO: 1376 - DNA, 122 bp, Homo sapiens
tataaagcaaagggcatgctttttgctcatgtacttgtgggggcagggagcgggagccaccggaccaaggagaatgaaggactgagagtttccacctctcacgcagttttgtacctagtttc

SEQ ID NO: 1377 - DNA, 122 bp, Homo sapiens
ccggcccctcccaccagaagcccatggtgagtgcctggctgttctcaggctcctgaggggcggggccagggcctcgatgcctctgccctgcttccccgtcctcagcaggaactcatttagga

SEQ ID NO: 1378 - DNA, 122 bp, Homo sapiens
acctcgtgatccgcctgccttggcctcccaaagtgctggaattataggcgtgagccaccacgcctggcccagaactaggtcttgaagagtgaatgggacctgaagccagggaggatgtggga

SEQ ID NO: 1379 - DNA, 122 bp, Homo sapiens
cagtgctgttagtagtgctttctactttatgggtgactgcactgtctgtctgtccgtcggcgtgtactcttcaggctgcccaggcctcctgactcctgctccaagagccccccagccctcct

SEQ ID NO: 1380 - DNA, 122 bp, Homo sapiens
ctcgatcctggcacccttcatcagcagcatgtgcaccacttcgtatttctggcagtgcgccgccaggatgatgggggtgatgtccggcgagaagcgcgtgccgtcctcgtcgtaagcgtaga

SEQ ID NO: 1381 - DNA, 122 bp, Homo sapiens
cttttcccatcgtgaacctgacataaagtatacttacctgcttacttgtccatacccctccggtccctgagcttcttgagggcaaggcttgagtcctgcccattctaaattatcctaaatgt

SEQ ID NO: 1382 - DNA, 122 bp, Homo sapiens
gccgtgatccagcggcatcgcagctcgggcaaggaaagccggctgtcagggttctggaaacgtcctgccctgagggcctgcgactttctgtatggagccttggatcgcgtccctggaaaggg

SEQ ID NO: 1383 - DNA, 122 bp, Homo sapiens
cacagagggcgatgagccctgagatggagcacagcttcagcttgcctttcaccaccaccacgtcgttcttgcgcctcttcttggctttccgcttgcgcttgggtatctggcttggggggcgg

SEQ ID NO: 1384 - DNA, 122 bp, Homo sapiens
atatgtatgtacttgtaagaagcagctgggtggttccttcagcaatctgctgagctgtggcgattacatcacacactggtgcaaaggccttgaaccattaatgtgctgcctctgcgagggtg

SEQ ID NO: 1385 - DNA, 122 bp, Homo sapiens
agcagagagcgtcctgaattatttccagccctttctgggccgcatcgaaatcatgggaagcgccaaacgcatcgagagggtctattttgaaatcagtgagtccagccgaacccagtgggaga

SEQ ID NO: 1386 - DNA, 122 bp, Homo sapiens
ccgcaccactctcgcaagtcaccaggtggggcaaggatcggcgggccaagaaggttggggcggacaatgtcacgaatcataaataacttctgccccgagtcccttcccttggggcagaagcg

SEQ ID NO: 1387 - DNA, 122 bp, Homo sapiens
cggcgggacttcccatgtctttctcctcgagctcggaaaaagttcccacccggggaatcccgaccctccaacttcgagaccgccggttccgcgctcggcccccacctggaccaagagctggg

SEQ ID NO: 1388 - DNA, 122 bp, Homo sapiens
gcttgcttgcttgctcgctcgcttgcttgtggggagaaatcctcacatatttgggggtctcggaagttttctgtgttgaagtttgtggtgttgacaccacagcagaggaaaaatggttgaga

SEQ ID NO: 1389 - DNA, 122 bp, Homo sapiens
aagcacttgccgcagatgccgcacgagtgtgacttgacaccacgatgcacgttcatgtggcggttgaggttgctgctgtggttgaactgcttgccacagcgagggcacatgaagatgaagtg

SEQ ID NO: 1390 - DNA, 122 bp, Homo sapiens
gacttctctctctcaaaaaaaaggaaaaataaaaacagaaagatgcaactctttagtgtccgttagagagggaagagaaagacttagggacatgggctacattggttcagcatctgtcatcc

SEQ ID NO: 1391 - DNA, 122 bp, Homo sapiens
cagagagcagaccccctgcctggcatgggcctgctcaggccttgctccaacaccgaggcccgggccaagggcacctgcttggggataacctgactctaactcactgcactggtgacattttc

SEQ ID NO: 1392 - DNA, 122 bp, Homo sapiens
aaggcagccgggatttgtccacatcgtgagtacaggcaggtcagctaactatttgcgaggcgaagaactggaatttagagggtctgggcctgaccttgtcacagctaacgacgggggcatcc

SEQ ID NO: 1393 - DNA, 122 bp, Homo sapiens
ccaagctagtcacccgggggtgggcaggaatagaccacttaccagcagagccaatgagagcggacgaaggggggaaggagggcaaatggccagaatagcttccgagtcagccggaagtgacc

SEQ ID NO: 1394 - DNA, 122 bp, Homo sapiens
ggccgccgggaggaagggagggaggaagggagggagtgatcgagagagctagcaagccggcgagcaaaggactgggggctctggctttgctctcaccgagctcagggtggctctgccgggct

SEQ ID NO: 1395 - DNA, 122 bp, Homo sapiens
ctgaggtgccccgacctggggccctgtggctgcacctgtcaggccgtctgtgcaacatcccgcagcccacggtgggggggcagcagcagctctgagccgagcctctcctcttctcttccagc

SEQ ID NO: 1396 - DNA, 122 bp, Homo sapiens
aagtatcatagaccacaggagctgtggactcaagggacaggtccagttcatccaaatccacgtgaggtgtgcaacaggctctgcactgaagatgccgtgttcccccctcccttaggcacaaa

SEQ ID NO: 1397 - DNA, 122 bp, Homo sapiens
gaccctcagcagcctctcgctcacctccctcttctgcccgccgcccccgccgccagcccccggcctcacgcccgccaggaagttcagcagcaccagcagcctggccgcccccggccgccccc

SEQ ID NO: 1398 - DNA, 122 bp, Homo sapiens
aaactttgatacagtgtacagtagaaccgcctgttacacacaggagggagacgcgtccttcgtcaccatgcaaagccagccttaacacaacataggaaaatgtggcaggtctctaattacgg

SEQ ID NO: 1399 - DNA, 122 bp, Homo sapiens
ctcagccctgaatttctgcatgtccacagctacaagcaagaaggctgccacacagcctcacgctcaggtcactgtgcggccctgctccaaactcctggaccccatccaggtcatcagctatt

SEQ ID NO: 1400 - DNA, 122 bp, Homo sapiens
caagcttcccaaattcaaatccctgcttactttctcactagtggtatgacttagacagctcgcttaaactacctggaactctgtatcctcatcagtaacatggcacaataatatcaccttta

SEQ ID NO: 1401 - DNA, 122 bp, Homo sapiens
gattcttgcctggtaactttttactgaaaatacaagaatttcgtactgcatttgcatctccgagattagggagcacctgtcaggatatgttgttctatcagggttacttctgttgactacct

SEQ ID NO: 1402 - DNA, 122 bp, Homo sapiens
ggcggctagggtgccaggcactggggctttcgtgcacggggctaggacgggacgcgggtgcgttgggcccactcacgttgaatttagggtaaggaggggctcggatactaaactccctccgt

SEQ ID NO: 1403 - DNA, 122 bp, Homo sapiens
taaccaaagctctctcgtgcttgagcggggcagcctgacttacgagaacaccatttcctacgagaccactgccgctgggtgcatattcaattcaagcctccttaagctgtcggatttccccc

SEQ ID NO: 1404 - DNA, 122 bp, Homo sapiens
tgtccctctgtcttgccggaatgcaaaaaggtagagagacccttcctggtcttcttccctcgagttcttaactctgcgctaaaacccctaccccacggcgtaggcagcaaagctttataaat

SEQ ID NO: 1405 - DNA, 122 bp, Homo sapiens
tttagaatttaaccatatgaccttccaggcaccacgtactgttccactttaagtctaagacgtttcatttacattttgttcttactgatttagaaaagtttattgttttcattttctcacat

SEQ ID NO: 1406 - DNA, 122 bp, Homo sapiens
aagtgttccaggacaccagccacgggaagatagaggaagtagttcttcctcaggttgagccgggccagggatgtgccagcaaaggcgtctgttggcagagtcctcagtaagttattattgag

SEQ ID NO: 1407 - DNA, 122 bp, Homo sapiens
ccacccagagcagagacctgttctaggccatgcccaagagtcaccctgctaaggaggtgccggaaggatttccccacgacctcctcgaccttttgcttggtccccacagcatctgtgggcat

SEQ ID NO: 1408 - DNA, 122 bp, Homo sapiens
gcggcggctgcgaggcgtttcagcaccacggagagcgtccagacctgcttttcaggagcgcgaagagtattgctgtttgttaaactccagcgtgtctgttggctccctgcggcgctggggag

SEQ ID NO: 1409 - DNA, 122 bp, Homo sapiens
acctgccttctgttttgcagaccaattgcaacgtagctgtcatcaacgtgggggcacccgcggctgggatgaacgcagccgtacgctcagctgtgcgcgtgggcattgccgacggccacagg

SEQ ID NO: 1410 - DNA, 122 bp, Homo sapiens
atggttggtgcaagggatgtagacagtttccttcagctgtgaaggaatggagagggaaggcggttggaacagaatttgttctgttttggtgggactgcagtgtggaccccctacttccagag

SEQ ID NO: 1411 - DNA, 122 bp, Homo sapiens
tgtgttccatatggaatcacggccgtgcgcgtgtggcacaagtcacacgggcttgcaggccgttcctcagatggccctgtcatcactgtggctgctggtttgattgattgttaacacttgct

SEQ ID NO: 1412 - DNA, 122 bp, Homo sapiens
tgccaagccccagggagtggtttctatgacaaccctgggaatcgctgtgatggggagaagcggctcgctcctcgcgcatgcgcattgacttggccaagtcttgcgtagctcctggaagtcag

SEQ ID NO: 1413 - DNA, 122 bp, Homo sapiens
cgctcgggaatgtctcctggccaggcctggagattgcaggaggccgggcgaggagccccgcgtctcccccgtttccgggccgttgttttcttggctggattttgaggagggttaagtgtccc

SEQ ID NO: 1414 - DNA, 122 bp, Homo sapiens
aacgtggatatacaggcttttctgtaatcaccctgatgacgattcattgactgtgagcctcgttgcatgttgggacggagaggggcggaaggcttagggacagcgcggtgccttctgggatg

SEQ ID NO: 1415 - DNA, 122 bp, Homo sapiens
gcagtggccgggtgtttggaggttgtttatgctgtttcagccatctccaggagaggctaacgggtaactggtggtaggattggagtcaggggcgctatcttccaccggcctttctcctccca

SEQ ID NO: 1416 - DNA, 122 bp, Homo sapiens
tcccagcccctttccatgcctttcactccatttggcaagctctgagggggagcctggggacgggtttgggtccccaggaggagagccttgggtataatctatttttctaggagcctcttgcc

SEQ ID NO: 1417 - DNA, 122 bp, Homo sapiens
taaataaacctatttctgtattcttacaggcgtgcctatgaatccatgaggctacagtcacgatggcatacttggcaagctcagggcactgttatcttttgaattaattttgtgacctgtta

SEQ ID NO: 1418 - DNA, 122 bp, Homo sapiens
cttcacgttgtcggggaaggtccggttcaggtctgtgggaaattcagaaggaatcacccacgggtttctgttccacaagcctcccacccctccagctgccccgagggtggccacctgggttc

SEQ ID NO: 1419 - DNA, 122 bp, Homo sapiens
tcataattttgcagaggtggcttcactcatagcatgagaacctttgtgtcagaagcactccgtcctgcttctctgacctcttttatctgcctactctcattcaccatttcacctttatgctt

SEQ ID NO: 1420 - DNA, 122 bp, Homo sapiens
aaaaaaataaggagaataataacagtatcttggaaaagtataaattaaaagggcagccaccggctatctgaaaggtcagaggaataaaagagggtcttctgagaatcactggtttcagagcg

SEQ ID NO: 1421 - DNA, 122 bp, Homo sapiens
taccctggagactgctcatttgtttagcagattactatatcttagactcccctgaaccatcgttgttatcaaaatagaacttgccttgacccaaaattgcttggtttgcattgtttacagta

SEQ ID NO: 1422 - DNA, 122 bp, Homo sapiens
agtggtaatgccgccggctggcatccggttggctgcgcgctgggaacgccagcgaggcagcgccaccggcttgaggagggtgaaagttcaattcttggcccctgaagttagcggaagggaac

SEQ ID NO: 1423 - DNA, 122 bp, Homo sapiens
cagctggcggaaagcagcgggaggaggcacctagccctggggttgagatcccagttcccgcgtgcgcaaaccacgcccctgtagattctcgctgctgcgtgttcgcgcgcgtcccggagtgc

SEQ ID NO: 1424 - DNA, 122 bp, Homo sapiens
caggtcagcctccctccaccgggccacccgcaccaggttgcctcccatcgtttgcaggagcggaagacccgatggagcaggtttcacagtgccctcgctgctgcctcccgtttcatctgcac

SEQ ID NO: 1425 - DNA, 122 bp, Homo sapiens
ccatagaggtcagccttttggggtaggggaagtgtgagaatagaggaacagagggacaaccgaaaataactagcctgtttgataaggacactaagtcccacaacagattggtgactaaagcc

SEQ ID NO: 1426 - DNA, 122 bp, Homo sapiens
gagccggcctcgagccaacgtgaggcagcgaagcagcgtccttcttcctccgcctgggctcgggacctttcctggaccaaggacaggaggagagcaaagtgctgcccgctccccatctaagc

SEQ ID NO: 1427 - DNA, 122 bp, Homo sapiens
gaccacaggcaggcaatgcgggctgctccttgtgcacggtgggcttggcagctggcttggcgtctgccctgtggcccctctgtgcagcgcgctcatcggtggtgccccgagcaaccccgctg

SEQ ID NO: 1428 - DNA, 122 bp, Homo sapiens
tcctcggcaggtggatggcctaccgctgttctggagtctgtgggcgtgctcttccacgggcgtgctcttccacgggcgtgctcttccacgggcgtgctcttctgttggcatgctccctcgat

SEQ ID NO: 1429 - DNA, 122 bp, Homo sapiens
gccactaggtgtcgggcaacgctaagcaatggggccggggcggggccgacctcaccggcccgactacctctttaagaggcttgggctgccccatccctggctttactttccagatctagagg

SEQ ID NO: 1430 - DNA, 122 bp, Homo sapiens
tgttcccaaccccagtaagagttaatctgcctgttaatcaaggcactaaggggctcaatgcgagttttattagcgacaggagaacagaggcggcagccagggatcaaaagccgggatcccat

SEQ ID NO: 1431 - DNA, 122 bp, Homo sapiens
gagggcgctcccccgccgctggagccgcagggcgctgcttttcgctgactctgccaaacacgccattagggcccgcctgggagggcgctaccctaatgaagcggctctaagtcacctttgaa

SEQ ID NO: 1432 - DNA, 122 bp, Homo sapiens
ggggtctcaggcacaggcccggcgctggcggagagtctgttgctgccaccagcatgaagccgagccccgggcctcggatcccgccctggtctccacgggacggggctacaccggaggggcac

SEQ ID NO: 1433 - DNA, 122 bp, Homo sapiens
agttaaactgcagaaagttgttccctagaatgactgcctactcccaagaggaagcgtgggcgagcggtgttctgcaaaatgggctctccggcagcggatctgcgcagaagcgttccgtgcgt

SEQ ID NO: 1434 - DNA, 122 bp, Homo sapiens
gtcctggcacaggagttgtgcatgggcgggactctgggttctcatgccctggggagcgcccgcgcctggggcagggctccgtagactcctttgtcacccctcagcttcgccgtgaggaaaat

SEQ ID NO: 1435 - DNA, 122 bp, Homo sapiens
gagggactcgaaggacacggaggattatatcactgaaggcataagattcagaggtgcccgcggtctagcatcccccagtttgggcggaaagtcgaactgctcacaacggcggtcctcgcgag

SEQ ID NO: 1436 - DNA, 122 bp, Homo sapiens
tggctatgatactgccactgagcaaatctccactccattttttttcttgagacagagtctcgctctgtcacccaggctggagtgcaatggcgtgttctcagctcactgcaacctctgcctcc

SEQ ID NO: 1437 - DNA, 122 bp, Homo sapiens
tctcatgtaggtgagaggcggctgaagagttgctgtattctgggaatgggcagggtcactcgtccgaacagagtcctatcctacgcggcggaagagtgtgccctttgacttgcatcgtctac

SEQ ID NO: 1438 - DNA, 122 bp, Homo sapiens
acgagaaggactgggaccagaaaagccatgatgtgagtaccgactcctcgtttgaagagtcgtctctgtttgagaaagagctggagaagtttgacacactgcgatttggtcagctccggaag

SEQ ID NO: 1439 - DNA, 122 bp, Homo sapiens
atcctgggcttggtctctggtaaacctggtgaatggtgggttaacactccctccctcactcggtgttgctgggaggataagacagaacatgtggcgagcaggtgtccaatagctgcctcttg

SEQ ID NO: 1440 - DNA, 122 bp, Homo sapiens
gagttggagtagaaatgctgttggaaacagtacagtttgctatggcttccagctcaagagcgagtcaaatgttggctgctgctcaaggtcaaaacttgggcagaggagcagaattaggtctt

SEQ ID NO: 1441 - DNA, 122 bp, Homo sapiens
accgcggcggtgggcgaagccagcggccccaccccgttccctggcgctgccgttccctggcgtttcctagctaggatctgtagggatcccgcctacggagtggccctggggcggaggtaggg

SEQ ID NO: 1442 - DNA, 122 bp, Homo sapiens
tcgctcgcccagtgaacctgttctcgcctgggtatgcatggtatataagcccggccatttcgtcaatatctgttatttgccaggattcttaccagggggcgggggggtcctgcgttcggttg

SEQ ID NO: 1443 - DNA, 122 bp, Homo sapiens
atctgtataaaagcagggacaatacttcctttattaagcaaatatcttctgtctgcctaccgtatgcttgaccctgtgcaaatgaacaagacaaacaggagacaggatctctgccgccctgg

SEQ ID NO: 1444 - DNA, 122 bp, Homo sapiens
atcaacatcaagtaaaatgctcattttcatcatttgcttctgttcatgttttcttgaacacgtcttcaattttccttccaaaatgctgcatgccacacctccaaaacaaagtcagaaaccac

SEQ ID NO: 1445 - DNA, 122 bp, Homo sapiens
ggttgggcgggcggccctggcctggctctgccccgctgggcggcgccggggattcggcggcgaagtgatgagggccctagttgcttctcgcccagacctcctaaccctgagtgcctcctcgg

SEQ ID NO: 1446 - DNA, 122 bp, Homo sapiens
tctctcccaggccagcgcgcgcgccgggttgcatcacccgcctcgcacgggccggcggggcgggggtttggtggctgccctcagtattgcctgcacaaatatctaccaggtctgcgacgaat

SEQ ID NO: 1447 - DNA, 122 bp, Homo sapiens
tgattggcgaagtgaaagttgcccagttccaaaatggccaccaccgcactttcctggcgtcggagcgactacgtagtgacagaaggaccatcagcaggtgggtgctcacagggactgtgcca

SEQ ID NO: 1448 - DNA, 122 bp, Homo sapiens
ctttcttctcaagcagtcatcctctcattgctcgcgcgcccttgcatgtgcgttaccaaacgcagaccgaaatcacagtcgcatctcagccgggctgccatcaccccatgcttccaggagga

SEQ ID NO: 1449 - DNA, 122 bp, Homo sapiens
ccccgccgcggcgttttctgtatttgtttctttaacaaagagcacagcctgtccggtgcgcgcggggctccttttgctcccctccagggctcctgcagcctcgccgcgatggacctggcacc

SEQ ID NO: 1450 - DNA, 122 bp, Homo sapiens
atggtgggctgtggagtcagacctatctgggtgtaaatcctagctctgcttcttgctggacgtgcagcttaagattcctgagctcctcatctgtaaaatgattaaattatcacctacttcag

SEQ ID NO: 1451 - DNA, 122 bp, Homo sapiens
aaactgactgggcaagagccaggctcttaggagctgtctgtactttgcttcccatccgtccgctctcccccagcagccaaagtctcctccctccattatattgcaaatcaatgaatccatta

SEQ ID NO: 1452 - DNA, 122 bp, Homo sapiens
ctttgctatcagtattcttgtgtacgacctttggaccccttccctcgcccgggacgttcccgggagacttaggcggtgagggaggtgcagctccacggctggctttcgcagagcagcgaagc

SEQ ID NO: 1453 - DNA, 122 bp, Homo sapiens
gcggcttccctggtcccggcggtcccccagcccgaggcggacaacctgacgctgcggtaccggtccctggtgtaccagctgaactttgatcagaccctgaggaatgtagataaggctggcac

SEQ ID NO: 1454 - DNA, 122 bp, Homo sapiens
ccttccccacggcagcgccgccctcccaggccccgctcacatgccagcgcgccttgtcctcgcttctctccaggttgcactgcatctggatgacctgcagcgggggaaggctgggactcaca

SEQ ID NO: 1455 - DNA, 122 bp, Homo sapiens
tcgcagatcccaatttgctgtatctcctgacctgccttctaagggaagtctaaatttgctcgcttttcacattcacggtgcataatcagcctgtgatactccactttgctaattgatttaca

SEQ ID NO: 1456 - DNA, 122 bp, Homo sapiens
aaggttggaagccaaactttgcagatgagaacaggagattccaggctgcctcacttcctccgtgaaaagtttttttcctaaactagggacctgaagttcttgatgtgtagttcctctttgcc

SEQ ID NO: 1457 - DNA, 122 bp, Homo sapiens
aagagcaccaatggcatttagagatgtaagtcctttatgtgttcctatagtttctgagaacggactcattcagagcgtggaaacagccctgctaaccagcgatgggtgccaatgggcgggca

SEQ ID NO: 1458 - DNA, 122 bp, Homo sapiens
ttttgaagatggggcacggtctgaggagttaaattgcttgctgagcattctttttgccaccgatccatattcccctggggccctccagcccagctctctccttctaaagggaaaactgactc

SEQ ID NO: 1459 - DNA, 122 bp, Homo sapiens
cttattggtgaaaggaatgaattggaaacagaaagttcttttttacctttattaaataaacgtgaagtcataagaactactaaaagaaaatgggtgggataaaagtaaaactaaatatgaaa

SEQ ID NO: 1460 - DNA, 122 bp, Homo sapiens
aaacctctttcttatgtaaagtgctcagtctcgggtatgtctttatcagcagcatgaaaacggactaatacaggccatcgcagagacacacattaaactctcactatggctactttgggagg

SEQ ID NO: 1461 - DNA, 122 bp, Homo sapiens
gcgctggctggtgcgggttggggtcaggtggagaagccgctctttgttaaggtgacagaacgtgctgggggtgggggccggggccagggccggtgcaactagggggccgctgccctttcctg

SEQ ID NO: 1462 - DNA, 122 bp, Homo sapiens
ctagcaaggaaggacggtgacccgagggtgcgggctggggaggaagtggagacagcagggcgggacaccaggtgagcagaaaggggctgagtcatggcccaagcttgtgccagccggggcag

SEQ ID NO: 1463 - DNA, 122 bp, Homo sapiens
ctggttcccacactctgattccatcttctttaagcacttgcagcaggattggtaatcattcgcattcctttcttccagttagtacccctaaaggaggaaaaaatggttttgcttaacatgga

SEQ ID NO: 1464 - DNA, 122 bp, Homo sapiens
tcaacaaatgagagacattgaagaactaattcactactatttggttactttattttccatcgaagaaaacctctttttaaaaactaacacataaataaaatgaacgaagaacaaactaaacg

SEQ ID NO: 1465 - DNA, 122 bp, Homo sapiens
cttccacctctgtatttttctgtctgtccgtctgtctgtatcctgcctccctgcccctctcgctccaccccccgcaggtcgggcctgccttcaccttctcccatttccttccccttccccac

SEQ ID NO: 1466 - DNA, 122 bp, Homo sapiens
cccaaagtatactccatcgcgcctggccactccaccctcgaccctctacccagcggaatacgacatatccctggaaacccagcaggcgcaagccgagcggttggccataagagcacagctga

SEQ ID NO: 1467 - DNA, 122 bp, Homo sapiens
ggatcgagggcggcctagcgcccctctgccggccggtggttggaggccgcggcggctgcgcgttgagtcgtttcctgccggatgacccgacccttttttgcagtctcaggacgggcgctttg

SEQ ID NO: 1468 - DNA, 122 bp, Homo sapiens
cagatccgtttggtgggggtccacatggaggtccaggtttctgaatgacaaactcaaggacgtgtgttaagatgttatctttagttcctaaaactaaacatctccggactctaacttccttg

SEQ ID NO: 1469 - DNA, 122 bp, Homo sapiens
cttgggggaacttcacggcttgctctttcctcctccgcctctaggcattgaagttgatatcgatgtggagcacggagggaaaagaagccgcctgacccccgtctctccagagagttccagca

SEQ ID NO: 1470 - DNA, 122 bp, Homo sapiens
cgtggccaggcaggtgggcggcccttctgggggcgtggccaggcaggtgggcggcccttccgggggcgtggccaggcaggtgggcggcccttccgggggcgtgggcaggtgggcgacccttg

SEQ ID NO: 1471 - DNA, 122 bp, Homo sapiens
actggaacccaagtgtgtgtcacactgacctcatgcttgtccatcactccacacagccttcgatgcaggaaataggctggtttctgatgcacctggtgtctgagagaagctttggttctttc

SEQ ID NO: 1472 - DNA, 122 bp, Homo sapiens
cgtggatcagatcggagcgaccgcctgcacaaacatcgtcaccaccagcacaggcgttcccgggacttactaaaagctaaacagaccgaaaaagaaaaaagccaagaagtctccagcaagtc

SEQ ID NO: 1473 - DNA, 122 bp, Homo sapiens
gactagactatttcctgctcaatcccctaaagctgttcttctgtaagccctttcatccaccgctatctgagccagagattgttttacttaacaccgacatccaatcagagtctacctgtagg

SEQ ID NO: 1474 - DNA, 122 bp, Homo sapiens
gaccagcctggccaacatggtgaaaccctgtctctactaaaaatacaaaaattagccgggcgtggtggcagctattctggaggctgagacaggacaatagcttgaaccaggaggcggaggtt

SEQ ID NO: 1475 - DNA, 122 bp, Homo sapiens
acgccacggtacccgctcagctgtgcctcacaactgggccagcaggggcttctgcctggacggctctcccagacctggccccgtgcagggtggcccggctctcccctcacctggccttagcc

SEQ ID NO: 1476 - DNA, 122 bp, Homo sapiens
gcgagtcccacaggagtcccgagttgcggtcccggggcggcggggctcccgccccctccccgcccccgcggatatccccacgcaccacgaagatccccacgcgccctgcgcaacgcggctgc

SEQ ID NO: 1477 - DNA, 122 bp, Homo sapiens
taggcggtgggttggccggcaggggtggccatggaggctcccacaggggcaggacctgaccgtctgcggtgggcggtgaccctcggggtgctggaagtctggaatggcggtgttaccccagt

SEQ ID NO: 1478 - DNA, 122 bp, Homo sapiens
cagccaggccttgttcctgtccaaaatcttcccttgggccttgaaccacaatccacatcacggcaaccctacccttcactgcagaggaccccaaaattaccaggttctgacaaggttgccaa

SEQ ID NO: 1479 - DNA, 122 bp, Homo sapiens
ctattttctatttagtaggactaagcatcatttattgaaaagactattatctctttgctgcgctgcattgcaacttctactgtttgtcacaaatccagtgactatgttagtctggctctgga

SEQ ID NO: 1480 - DNA, 122 bp, Homo sapiens
tccgcgggcctcgccccccgggggcctggcggaaccgccggggtccgcagggcctcaggccggccctactgtcgtgcctgggtctgcgacccccatggaaactggaatagcagagactccgg

SEQ ID NO: 1481 - DNA, 122 bp, Homo sapiens
tccgtataataattgtttgttttgcaacaagcatttaataactttcaccggcactgcgcacgctacctatctgcctcaatactccgcccggcggtgggcaggatataatgcaagagacgtct

SEQ ID NO: 1482 - DNA, 122 bp, Homo sapiens
aatgcctgcagaggggccaggcaggtcagacaataggggatgatggggcctgtggggatgcgcctttaggcattacattcaaagacttaagtctactgtgcagaggtggtaagaatgataca

SEQ ID NO: 1483 - DNA, 122 bp, Homo sapiens
tgctccaataggcagcctagtcccagcaggtgctgggcaggcacagggcagctaaggggacgggtaaggagtcctggctcttggccccagcaaggacctgggagatgaccttggcaccgacc

SEQ ID NO: 1484 - DNA, 122 bp, Homo sapiens
ccggcgctcgccagaagtatcctcacttcctgtgttgacgcctaatgatgatataatagccgacctctggcccagaactcaagacgacaggggctcgctctgtgcggcacttcctgtgtctg

SEQ ID NO: 1485 - DNA, 122 bp, Homo sapiens
cttttgtcatggggcttttgtacatgttgttctccctgcctaatatgtatatctcatactcgagtttgagtatgagacacatcctcaggggagcctttcctgaaccataaatttaattcaga

SEQ ID NO: 1486 - DNA, 122 bp, Homo sapiens
agcctgtgtgacagaggtagacaccgtctcaaaaaaaaaaaaaaaaagagagagagagagcgggagaccagagacctcgcggcctcactgtacacatctcgcttacaagaaacttaaaagag

SEQ ID NO: 1487 - DNA, 122 bp, Homo sapiens
ccgagggaatctcccggtctgtgggtggtgaagaccatgcgaaaagtgtagtatccgggccggaatgctccgttcctcatggcacagtccctcatggcttcccttggctaggggaggtagtt

SEQ ID NO: 1488 - DNA, 122 bp, Homo sapiens
ccacttctgggattttttgctcagctgctcgtggacactcccacggggatgttcggccgacgccaccatagaggaagtcgtagaggtgttgtccttcaggatccccttgaggggccgttgcg

SEQ ID NO: 1489 - DNA, 122 bp, Homo sapiens
tcagacccggtgcagtgagtgtgacctggcgtagtaagacccggtgcagtgagtgtgacccggtgtagtaagacccggtgcagtgagtgtgacccggtgtagtcagaccaggtgcagtgagt

SEQ ID NO: 1490 - DNA, 122 bp, Homo sapiens
tggcggcggattcgaacgttcggactgaggtttttctgcctgaagaagcgtcatacggaccggattgttttcgctggcccagtgtccccggagcttgtgtgcgatacagagagcacctcgga

SEQ ID NO: 1491 - DNA, 122 bp, Homo sapiens
ccgaaggagccttcccatccaccgcgggtgcccaggaaaggcctgtggggctctcctccccgcgctccacacgccctcgcatcccaccgaggggccagcttctgcctgcacgttgctgaaac

SEQ ID NO: 1492 - DNA, 122 bp, Homo sapiens
gttttattactcggttactctgccgtccacactatttcctcagtaagatgtgcgctgttccgtaatacacgacatgtatgggttaactttctgtttacccttcactacactgtaagctcaat

SEQ ID NO: 1493 - DNA, 122 bp, Homo sapiens
gaagagtcccttctcccataaaattctttacttgggcttcttgctaagtcaggactcctccgcagacagtccacccatgaaatcagagttctgtggtaggccttcaaagaggctacacagtc

SEQ ID NO: 1494 - DNA, 122 bp, Homo sapiens
gccctcacctctttcactctagacacctccagaacactcgccccccgcgcgccggagccccgggtcgccaccaaccgcccgcggagccagacctcccagctctgcgccccaggaccgcgcgg

SEQ ID NO: 1495 - DNA, 122 bp, Homo sapiens
aggctgaggcaggagaatcactcgaacctgggaagcggaggttgcagtgagccgagatcgcgctactgcactccagcagcctgatggagactagggaggcaggcaccaaatttggcaatcaa

SEQ ID NO: 1496 - DNA, 122 bp, Homo sapiens
ctgaaggcactttcagatttacagaacggagcaggaagtacagggattccctgcacgcctcgcacatagctgcacagtttcttgagtctgattaattcaggtttcggggttaaagataaaaa

SEQ ID NO: 1497 - DNA, 122 bp, Homo sapiens
gcccatcctgtggattctcagaagtctgacatccttccttcattttgtcccatctctgttcgaatcagttcaagctagcagcatttcctctggtataaaggtctcaaaaactttgtcccatg

SEQ ID NO: 1498 - DNA, 122 bp, Homo sapiens
cagcctcaatttccagtttgtactttcatccataccttggtttccttcactaagagtctccgtatcctcccattttccaccttgggactttcagaggaccatcctggtccccagtaagtcta

SEQ ID NO: 1499 - DNA, 122 bp, Homo sapiens
gtcagagaaataacttgcataaaattacatgggaaatgggagcttggacagatgtggaaccgagatctgccagctggcaaggctgtgtgccctttccatcatatcctggttctaggagaaaa

SEQ ID NO: 1500 - DNA, 122 bp, Homo sapiens
ctaaaagcacactagcatttttgccttaaataaaccttccataaaaggtgcttggcaggccgggcatggtggctcaagccggtaatcccagcaccttgggaggccgaggcaggtggatcatc

SEQ ID NO: 1501 - DNA, 122 bp, Homo sapiens
tagacccgtgggtggggggcggagcggaccggtggaggtgggcagagaccggcggcaagtcgacccacggctgtgggtggcttcctcctgttgctcagtatcagggagaggcgggggaggac

SEQ ID NO: 1502 - DNA, 122 bp, Homo sapiens
ctcctgtacttgttcattaaataatgattccttggatataccaagtctggatagcggattcgatggaagcatttttgtaaatatacgttcagtattttgtgtggaagaacacaatctagctg

SEQ ID NO: 1503 - DNA, 122 bp, Homo sapiens
gcgagctgccaggaagccaaggaagccacgtgcccaggctggaaccccagcacactgaggcgtggacagagagcccctcgctgccccttgcagatctacgcgacgcccttgaggatgggggc

SEQ ID NO: 1504 - DNA, 122 bp, Homo sapiens
gacctcccactggagccgcctctacttcatgaccttttacattgtgaccatggtaggtcccggaccacagaacgctctttgtccttcgtcttccacatcaccagctgcccctgctcttcagc

SEQ ID NO: 1505 - DNA, 122 bp, Homo sapiens
actggtcctctgcggcctcctggaggcgtccggcggcggccgagcccttcctcaactcagcgatgacatccctttccgagtcaactggcccggcaccgagttctctctggtcagtgccctca

SEQ ID NO: 1506 - DNA, 122 bp, Homo sapiens
aggccgtgggcctcgcgcgccgccgcccgccccaagcccagcgcctcggaggtgctgacgcggcatctgctgcagcggcgcctgccgcactggacctccttctgcgtgccctacagcgccgt

SEQ ID NO: 1507 - DNA, 122 bp, Homo sapiens
cttacacaaatccctcactttacagatgagaggggaaaacatcatttcaaaggcagcacacggtttctccaagctaaagcagacactgagtagctgcaataccttgttctcctcttctactg

SEQ ID NO: 1508 - DNA, 122 bp, Homo sapiens
gggagctcagcctcagggctagccgcagccccccacaccccggggctgcggtgggctgcgcggtggatcagcctcagcagcccctgctccagcctgtagggtgaaccggccgctttcccagc

SEQ ID NO: 1509 - DNA, 122 bp, Homo sapiens
gggaaaactgaggtccccagacaggcactgcattgcccagggacacccaggacataaattcgctgcagaaccaggattggaaacgatctcccagtgatcaccatagagcaagcatgaagaag

SEQ ID NO: 1510 - DNA, 122 bp, Homo sapiens
ggcggcggtcagtactgcaggaggcgccgagggcccgggagcccccaaagccgggaggggcgccccagagggaggtgagcggcgccgaggctcactataccgcagctcccacacacccgtct

SEQ ID NO: 1511 - DNA, 122 bp, Homo sapiens
aaccgtcctgtcttctcttggcgctctttccttccacctttcccaagagtcctggttgcacgttttaagtcatatattttcgtccccctgaaaatgatggcaagcccagtttctcctgagca

SEQ ID NO: 1512 - DNA, 122 bp, Homo sapiens
tctcagggttggttgggtgcctattctgtattggatattgtgttaggcgcagaaggggcacgtgggactttgagttaaaggggcagcaaaaccttgttctgttctctggactgagttggaca

SEQ ID NO: 1513 - DNA, 122 bp, Homo sapiens
aaaagccacagccagaaccccagctgcaggtgggcagggcagctccctcttgaagggctgcgtgtgaggacatgaatgaattcacgaaagcacttcgcccagccagctgccccataagtgtt

SEQ ID NO: 1514 - DNA, 122 bp, Homo sapiens
agcccccaccccacgcctccgcatagctcagtccactctctactcagggtggaggtgggccgggcacactcaccccttgatctgctgtccctgtggggaggcagggccagctctggccagac

SEQ ID NO: 1515 - DNA, 122 bp, Homo sapiens
cgggaggaagcccaagtgtcacttgaattccacccaaggagcgggcgcctgggatcagagcgtcctgtttagcaataacggctggagcacgtcctacaagttacgggagagtcggctgtgaa

SEQ ID NO: 1516 - DNA, 122 bp, Homo sapiens
gcatcacgttgttggggaaaattaaatgtaaattagataattaaaaacgaagctgatgcccgctgcttggtgctattacctcttattaaaagttatgagaggtggccctgggtggaggctgg

SEQ ID NO: 1517 - DNA, 122 bp, Homo sapiens
ggcttctttggagagaatgagtcactctgtcttgttcagttctgcaggatttaccactatcgcctcacttgatcacattgtgttgtaattgcttatttatgaatcttctccctcaccagatt

SEQ ID NO: 1518 - DNA, 122 bp, Homo sapiens
tctgaggtcttcttttaccctgcccccgcctgtcctaggtctgttctcagagcgatgggccgcggagactgatctgccgccatgattggaggcttattcatctataatcacaagggggaggt

SEQ ID NO: 1519 - DNA, 122 bp, Homo sapiens
ccagctgcgtcctcggacgtccccaaagcccagggcggcgactggcacgactgtcaggggcgcgtctgttaagaggacagggggtcccgccccggcacagccgtctcctccaggacccctcc

SEQ ID NO: 1520 - DNA, 122 bp, Homo sapiens
cttttctaagagcacacagcaagtgatggaccccctgggtctggcacccaaatcacctagcgcctcacctggtgtttctccctctacattatattaactacaatgtaacaattagtgactta

SEQ ID NO: 1521 - DNA, 122 bp, Homo sapiens
agcccgggagggacgcggccgccgctcgggccaggtaggaccaggagcccgggtgggccccgctgccacccagagtggactttgcggagctgagatcaagagcccagcgcctctacctctga

SEQ ID NO: 1522 - DNA, 122 bp, Homo sapiens
aggtaaaggaaatcgcagccgtttgtaagtcacatacttctttcgcggtagtgtgagaaacgtagccttaaccaacagtcacatttcccgacaggtatgtgatggtttcccaaagcatcgat

SEQ ID NO: 1523 - DNA, 122 bp, Homo sapiens
tcccctgcgttgaccaaagaaggagcgggttggcccggtcccaggtaacgcgggccgggccgtatatggagtgtctccctagcgggtttgcccctcctgacccgacccagttgcccgccgga

SEQ ID NO: 1524 - DNA, 122 bp, Homo sapiens
cgcgggcgggcgcttctcctaactttagttttggcgtttgaggcgagtttctgtctcagtcgggcgcagccgccgccagggaaaagaaagggaggaaggaaggaacaagaaaaggaaataaa

SEQ ID NO: 1525 - DNA, 122 bp, Homo sapiens
tacccttgtttatttctcgagagttactgcttaacatagactaactatattgtctccaagcgtccaaaagttccttaaaattccgaaatgcaagacttcttcccattactaatctgtgaagc

SEQ ID NO: 1526 - DNA, 122 bp, Homo sapiens
ttgctgacaagttgcaggtggtccgctgccagtccgcttggagaattctgctcccgctcacgccggactgaactggctgctgcccagcctaccacggtctccgtccgtcttctctggcaggg

SEQ ID NO: 1527 - DNA, 122 bp, Homo sapiens
gggctgtggaggcgggggcaggggcgctgcgggcccgaaggttcgcagggtcgcggggggcgtctcttctccccggaggggctacggctcgccgctcgccggctctttgtgaggaaagatct

SEQ ID NO: 1528 - DNA, 122 bp, Homo sapiens
ggccctccagctgtgactactaacacacacccctgccaagccgggggtgctgcttggtcgcgggagaagaatgaccacccggagcttctgctttcaccttgctctctggtgccctctcgtgg

SEQ ID NO: 1529 - DNA, 122 bp, Homo sapiens
ggtcagtaagtccctccccatatgctgcacatctgttccgaggagaccgcaggggaagctcgggcagcgcctccacacacgggcagacctggcaggggcaggggcggttgaaacaaccccga

SEQ ID NO: 1530 - DNA, 122 bp, Homo sapiens
cggttcatgaaggtgcactgggttcacctttaagggcacatggtacaccttccaacatgccgtacctgcttaacctgccttgtctcaccctcccttctctgctgtgggacaacctggatccc

SEQ ID NO: 1531 - DNA, 122 bp, Homo sapiens
gctaagctcctgacagatgttacacaggtcagggatgtttgggcaaacctctcaccgtggcgttggagtgcagtccagctctgtcactaatgcttaaccttcctatgggctcagttttctca

SEQ ID NO: 1532 - DNA, 122 bp, Homo sapiens
gtcctgttctttgaaaccgccctgtgcaaagaccggattcttgttggggagaattctgtgcggagaaagtagtaagttagggactggctgtctggctttttggccttccattgttacaataa

SEQ ID NO: 1533 - DNA, 122 bp, Homo sapiens
tttctgcctggcagaatttggccgaggatccaaacccggagcagcctccagagagcgtgtcgttcacgcggccagcatatgctcagagacctcagaggctcagagacctcagggctggtggt

SEQ ID NO: 1534 - DNA, 122 bp, Homo sapiens
attggaggttaagaggggcttttctccatcactgaggaccagatcgggactggccttactcgagttctcacagccagttgacttcagactgctgtcaccagagccactggacatggatcaca

SEQ ID NO: 1535 - DNA, 122 bp, Homo sapiens
tggaaaagccaccgatcgttccagctgccgagcagctcttaaagctttggattcggctgtcgtggagataacgggcaccagaaaaacttgtaggagtagcaacagctatttggtcggatgga

SEQ ID NO: 1536 - DNA, 122 bp, Homo sapiens
cacgcagcctgtgccccacaggcaggccttcaccgccggctgctcggcgacctgggcgggcgactgcgtgccctgagccagggcctcaagggtctcctgggtgatgatgccagcatccagca

SEQ ID NO: 1537 - DNA, 122 bp, Homo sapiens
gggagggggtgggtgggctggcagcctgcgatccgggaggagctcccttgggcagcgagacggcgccgggtccctgaattagacagaggcgaagagagcggctccgtgatcaagtgcgcgcc

SEQ ID NO: 1538 - DNA, 122 bp, Homo sapiens
atttcttccctgacattcttttacctaaaataaggcaactgtgcggccactgcccaaacccggttacactcatattatatgtgcctatcaccctgaggagtaatttgattcaggtgttctag

SEQ ID NO: 1539 - DNA, 122 bp, Homo sapiens
cctgagctcctgagatagccaatgtttgagccacctcctcagaagtttgagcctcaacaccgtgggatcccttctttgtgctccagagatccagtaacagccagccatcaccctctcttcat

SEQ ID NO: 1540 - DNA, 122 bp, Homo sapiens
agcgtgggcaacatggtgagaccctgtctgtaccaaacatacctgtaccggatgtggtggcggaggcctgtaatcccagctacaagggaggctgaggtgggtggattgcttaagcccaggag

SEQ ID NO: 1541 - DNA, 122 bp, Homo sapiens
caatgtgtccagcttcagaaatggcatgcaagatggtggccaaacagcctaagagttgcacgctaggtcccatcaagctgtgtcccagcacatcctggggaggaagccacagtcaggagagc

SEQ ID NO: 1542 - DNA, 122 bp, Homo sapiens
tattatttacttcctatagagagaggaggtgctaagcggacaggacagctggacaacacgcgcaataagggcaatggtcctatctattctaagggaggaggacatggaatattggtgtggtt

SEQ ID NO: 1543 - DNA, 122 bp, Homo sapiens
ggggagggggtcaggtgggcgggcactattgttgtaggagccggcgccagattcctcagccgcgctcggggtgggaccggctgggtttgggggggtggggtggggggagcggtgatctgagc

SEQ ID NO: 1544 - DNA, 122 bp, Homo sapiens
gtcagcatttgctttactctttctttatgattgcatctgaccgcaccaaggtgggccatgcgttgtttggtcttatacctgatgaagaaatggcaacagctgacagaaatgggtacagctca

SEQ ID NO: 1545 - DNA, 122 bp, Homo sapiens
agctggcgggaagaggccagggctgggggacccgtcgggtggggctgttacctttccacacggcccgttggcgcagtgcacacggtccgccagcgtatttaacaggccgcccagagcctctt

SEQ ID NO: 1546 - DNA, 122 bp, Homo sapiens
tgagtccccgcgggactgctgcgcggggcccgccgcggccagccggacccagcatccgaccgcactttgggcgagctgctgacttgagaccagcccaaacggggggctttccatctccagca

SEQ ID NO: 1547 - DNA, 122 bp, Homo sapiens
tggacacctcgacttgcagacggccacagcgggcctgtggccctgggcctggggaacaaccgcaggcctgtggggtcgcgactgggtttttgtgcctcttccggccaaatgccaaccgcgct

SEQ ID NO: 1548 - DNA, 122 bp, Homo sapiens
gaatagtggctccagacgcggtcggcgcctgccgtaccctggtcagactctgggtcagagcgctaagtttcaaggaggcggcgctaaacaggccctctagccgggagcctgtcgcgacccga

SEQ ID NO: 1549 - DNA, 122 bp, Homo sapiens
tataccacgtcaataaaatcagaagatcgcctacatcctaagaatagccagagaatacaacgttcaattcgaaacttttcttttgtaaacagcagtggaaaccggcgtgggaagcgcaccga

SEQ ID NO: 1550 - DNA, 122 bp, Homo sapiens
agggcggagcctgctctggagcctgactgctcggttaggacctcggagagcgccaggcgccgcgaccagagggcccagagaagcggccggagcccgcctacctcggccccctcagcttcccg

SEQ ID NO: 1551 - DNA, 122 bp, Homo sapiens
tgcgacgacccgcacagcttcttcccctacgagcacagctacatgtggtggctcaggtaccgtccctggccctcaccctaccttgaaccccactccagtctcagcgccttcaccccagcctc

SEQ ID NO: 1552 - DNA, 122 bp, Homo sapiens
tgagggacttagcacccgggccagcggctgcggagggtgtactgggtcccccagcagtgccggcccaccggtgctgcgctcgatttctcactgagccttagctaccttcccacggggcaggg

SEQ ID NO: 1553 - DNA, 122 bp, Homo sapiens
aggaaaagaggggaccccagtgtgggccacagcttcttcacagagctatgaagcaaactgcgagcaaaagcttccagtgctgaagcagagcttctgggaattctagaacctcagaagtaacc

SEQ ID NO: 1554 - DNA, 122 bp, Homo sapiens
ttaggcggtttatataaagcttagtaacaaacaagacttggaggtgatatgattattaatcgtattttacagatgaggaaactgagacccagagatggaactgggattcaaaacaatgtcta

SEQ ID NO: 1555 - DNA, 122 bp, Homo sapiens
gaagtgcctggcaggctcggcagtctgagtgtcgcgttacagagtcccctgggcagtcaccgctgaagggcgggggacgcgggaaaggcattttggggacacaggagagctgcgagggcgaa

SEQ ID NO: 1556 - DNA, 122 bp, Homo sapiens
gctggggagctgtaggagtggaattatgcaaagcatggcatgtcgcccgtaacagacttccgggccaccgtggtggtgccgacacaggccggccggggcgtgcgtggggtctggctttgtct

SEQ ID NO: 1557 - DNA, 122 bp, Homo sapiens
tattttgtggtagtcattttgcttaatggaagtgttttccagatgttgcctaagtctagtcgtctgggcccttttccaataaatgaggaaagtttgatttcataggttgtcactgttgattt

SEQ ID NO: 1558 - DNA, 122 bp, Homo sapiens
ctgtgcagacaccttcctgtggaagagttggtctctggtcactgtttcaagtctctgctgcggccacagctttcttatctctcactttggggatctcaggaaatgagacaccaggaggtgtc

SEQ ID NO: 1559 - DNA, 122 bp, Homo sapiens
ctgcccacgtgggccacgtctctgggcacagtgacttgtacctggggacaggaatgcacgcggctcccaccccagtcagcagcctgccctggggaccccaatcagctttctctgggcacctg

SEQ ID NO: 1560 - DNA, 122 bp, Homo sapiens
aggctcacgggaagcaggtcacaactgcgaacaccctggaactactagaaggccatgaagcgaagggcgaggtgcctggacagcaaaaatccgagggtcctgcagttagagagaggggcgcc

SEQ ID NO: 1561 - DNA, 122 bp, Homo sapiens
tgagctgtcccccgggcccccgaagccggctggccgggaagtggagccggccccagtaggcggggagcatccctcggctgcagccccaggcccgggcaagcataagaagcggcggggcgcaa

SEQ ID NO: 1562 - DNA, 122 bp, Homo sapiens
gagggcagatgctgggtgtccacgccccggccccacagcagccagaggaagataccagcccgcgcacccgtcgccatggcaacctcaaccccactcctggaccctagctcggaagggggcag

SEQ ID NO: 1563 - DNA, 122 bp, Homo sapiens
tactatacccttcctctgaggtttagttttcatcacattatgttcaagattccatatctccgtaaattacagctaattacagggcattgttccatggttattaaaaatcagagtttattaaa

SEQ ID NO: 1564 - DNA, 122 bp, Homo sapiens
gtaactatgtaagggaatggatgtattaacttgattgtggcagtcatttcacaatgcacccgtatatcaaatcatgcacaccttaaatacatgatttctgtcaatcatacctcaataaaact

SEQ ID NO: 1565 - DNA, 122 bp, Homo sapiens
gaggccccagcctgcggccctggagcgctacaaggcgcggcgttcagacgccatggacaccgagtcccagtactcgggctattcctacaagtcgggccactcccgcagctcccgcaagcaca

SEQ ID NO: 1566 - DNA, 122 bp, Homo sapiens
tctttctcttttccctcactatgaaaagaactgattggaatttttttttgtagatgaggccgtgtaaaatgggagacagtgctttggcctgtgacagatctgagctttaattccagatcagc

SEQ ID NO: 1567 - DNA, 122 bp, Homo sapiens
cccagttcctgggcaggatgccagctggcgaagtgagggggaaggcaggaggagccctggcggtgactgaaaggacctgccacagtcagagcccatggcctggagcctggtctcttgttagt

SEQ ID NO: 1568 - DNA, 122 bp, Homo sapiens
tcgcttcctagatgggatggcggccgggaagaggcgctcctcatttcctagacgggatggcggccgggcagagacgctcctcactttccagactgggcagccaggcagaggggctcctcaca

SEQ ID NO: 1569 - DNA, 122 bp, Homo sapiens
cagcggcggcagccgccctggggggcgatcattccgcaggcattctcagagctaggagtccgggagctctagagagtgggttgggctgcagtgggcgctggccgcggtgctgaagcgcctcc

SEQ ID NO: 1570 - DNA, 122 bp, Homo sapiens
tgctcatgaataccagcacatacactgagagacggtaaatacatgatcaacacacagttccgttcagttcaggggaccaagtcagaccacggcaatctcatctaacacacactccgcctctt

SEQ ID NO: 1571 - DNA, 122 bp, Homo sapiens
cctgctcataggctggccgctcaggcctggccggcctcggggcctcgggattcgcggcggcgctgccaatcaggcgatcgggccccgcccccccggagttgggtgaaatagaggcgggcgtc

SEQ ID NO: 1572 - DNA, 122 bp, Homo sapiens
cagagaggagggcagcacccctcccacatgcctccctcccccggtgaccgctaaacctaccggccgcaaacatcacgaaatagaattaaacactggcgcctactaaggaccactccacccag

SEQ ID NO: 1573 - DNA, 122 bp, Homo sapiens
cttaacttctgcaaaaaattaaaaccataaatagctggcaatatttccagaaaggattatcgttccacttcagtcttctgaaggacagagtggaacatcagtgggtggttattgttgactat

SEQ ID NO: 1574 - DNA, 122 bp, Homo sapiens
gatattaaggcagatgcacagatccacgtagattaatccccttcactagtagcaggggcccgatgaggtagctgatgaggaagagcccccgagaccaggcccagcgtggggccacggccttg

SEQ ID NO: 1575 - DNA, 122 bp, Homo sapiens
tcatttcatttgcacacaaatctatggccctaggggctccgtgcagatgcacaggaatagcggaataaagatatctctcgtggtggaatttcaagttgctaagaggtatgcaaaggtgtaca

SEQ ID NO: 1576 - DNA, 122 bp, Homo sapiens
atattttgctttttataacaagggtttgttcatattgatgccatttttgcaggatttcttcgtgatttctgtccatatgaaaatgctgacattaaacattaacacatggagaccgtgccctg

SEQ ID NO: 1577 - DNA, 122 bp, Homo sapiens
tccttgggccccaggtactgactgtttccttgcagccgcccgtccccaccagccgcctgccgggcgccctgaggatcagtcacttagccattgctccggagactcccgggaataggccagga

SEQ ID NO: 1578 - DNA, 122 bp, Homo sapiens
tgagtaacttctccctcatcatgctggttcccatccctgaagaagatgggccaagacaggcgaaagagggcatgagctgaagacacgcactgagcagttgcctctcatcttgctgtgagtgg

SEQ ID NO: 1579 - DNA, 122 bp, Homo sapiens
catcgaacccctcctgctccctcagcggctgcggcccttcccgtcctcctgctcacagagcgcacgagaaccagggaaagctgtgtggctagaaagagccccctctcacagctgcagactgc

SEQ ID NO: 1580 - DNA, 122 bp, Homo sapiens
gaaaacacaagcccagtgagatgttggcctcctcatctgctaccctcgccgtcacctctgcgcaccaagccttctgtcccggagaagaagccgtatttggtctccctcgatgggcgagaccg

SEQ ID NO: 1581 - DNA, 122 bp, Homo sapiens
atcctggcatcccattaaggtgaaagctctctgaggcaggaaccttttctcagatttcttcgagtcttccacagcaccccacatttgacacacatctgctacttcgcaaatgtgtgctgcct

SEQ ID NO: 1582 - DNA, 122 bp, Homo sapiens
cggggtgggggtgggggggacgcgctgtcgtctggggtgtctccgcgtactcctgttgggcgaaccctggctctccggtgttggttgtcacttgagcaactgatgggcttccaggggaagta

SEQ ID NO: 1583 - DNA, 122 bp, Homo sapiens
cgcctgactgggtgggcagagggagggccggtaccgttgatggctctgctgcggttggagcgctccaccaggatgtccagatgggctttgattgcggcgatgccggccagcccgccctgcgg

SEQ ID NO: 1584 - DNA, 122 bp, Homo sapiens
gtccgctcctgcccggtcacgtcctcatgcagcgcttcatgccgttcccattcctcaccccggtcatcgtcctaaaaggcagggagaggtgatttgcctgagcttcctgacctcatgccccg

SEQ ID NO: 1585 - DNA, 122 bp, Homo sapiens
tgatgttgaccaggaggaggtgagtgggagtgcggagccgctggaacttgtagtagaggacgagcaccagcaggttgttgccgacgcccagcagcccaatggagcccagcagcagcgccagg

SEQ ID NO: 1586 - DNA, 122 bp, Homo sapiens
atcacatttgcataatgaagaaataaaccaaactaaaaggtccagaatatgagaggtctccgaccccatggagcagacgatcaacaagagaactaataagcaaaagctaatactggtacttc

SEQ ID NO: 1587 - DNA, 122 bp, Homo sapiens
ttccagcctggcatcccagcacccagtataatattagagctcaataactatgtcaatcaacggataagcaaggacatctttgaacaagccattttagatcttctgcccagagaactctacat

SEQ ID NO: 1588 - DNA, 122 bp, Homo sapiens
ttgctctagcaatctgtctacctgtctactatttcctgtctttgagcaactttagtcaaacggtgttatttattttccagacacttttattcatttgcttacattatttattgatataatgt

SEQ ID NO: 1589 - DNA, 122 bp, Homo sapiens
tgtgctacagggccagggatggcccagaggatcccaagccgcctcctctgggcttcgcaccgtctcgtacactgacatccttagtgctgtttggcataggctgctgttacgctgtctgctct

SEQ ID NO: 1590 - DNA, 122 bp, Homo sapiens
gttttgtaaacaatgttttacactgagcctgatttactttatatacaccaaaagcttccacgtggtatgattgttaagggccagcctcttcccactccacccacaaagatacattgaaatgc

SEQ ID NO: 1591 - DNA, 122 bp, Homo sapiens
ggccccgcccatccactgaggggtgtgggtaggggcgtggcccgttcccttgctggtcggcgcccggaaggcgtccgcgtcagccggagctcgacgcggtgacggtgtgcgtcgacgtaagt

SEQ ID NO: 1592 - DNA, 122 bp, Homo sapiens
gggacaacttgggggtggcaagaaagccccttccgcctccctcggaactgggattaggaacgagttccaggatgcggtttccccggccagcggaccacctcctccattcacatcctcttccc

SEQ ID NO: 1593 - DNA, 122 bp, Homo sapiens
gcccagagccggaaacttgatgttttcttgatgtctatccagggccctgcatccaatgagcgccccaaaaatctttttttttttttttgtacagacgggtcgggggtgggggcgatctacac

SEQ ID NO: 1594 - DNA, 122 bp, Homo sapiens
actcactgtgtactgcaacaccaacacataacaaagctggaggtttggttctgctgagagcgtcaggaaaagccactgagggtggccagatttgagctggaccttgatgaatgcataggagt

SEQ ID NO: 1595 - DNA, 122 bp, Homo sapiens
agatagtcaatactatttgccttccctttccagttatttgcttcggtgggcagaaaacaacggctaactaacacacatctgtcctgtgtgtaggttaaaggtgacctctatgacgtttttct

SEQ ID NO: 1596 - DNA, 122 bp, Homo sapiens
gctgggattacaggcgtgaccgaagccctttttatctgcataggtctgctctaaaccttccgctggggcaggagctcctgcgcttgccagtcccacactcacccacctgtgacacactggcg

SEQ ID NO: 1597 - DNA, 122 bp, Homo sapiens
cgtggtggtcggcgacggggcggtgggcaagacgtgcctactcatgagctatgccaacgacgccttcccggaggagtacgtgcccaccgtcttcgaccactacgcaggtaagcctcggaact

SEQ ID NO: 1598 - DNA, 122 bp, Homo sapiens
ctcctgaacagccttcccggggcggcggagtcctgcaggcggccgtgcctggcgcacacgcgtggctccaacacgaactagcctatggcctcaccaagcctcagtttccccttttgcataat

SEQ ID NO: 1599 - DNA, 122 bp, Homo sapiens
aggccaaaccacaagactggtcatgggttgaaagacaaatgaaaatggtgagttggaccccgtgaaggttgcctttacctgcgttcaccattaaaccagcaagcactcaattcaaaaggcac

SEQ ID NO: 1600 - DNA, 122 bp, Homo sapiens
gtgattctgcagtcatttccatggcaaccgacccatggcccaggtatgagtctgtgccttcgccatagtactgttcaagagaaaaggcctttattaaagctgagtgccagcagtttccctcc

SEQ ID NO: 1601 - DNA, 122 bp, Homo sapiens
gagccgggactagctcccgatcctagcagttgctctcgagatcatcccgggagttattggcgagttctgggcctctggaggtttccctgtcagcctccccggccgccgagggggcgcgcgcc

SEQ ID NO: 1602 - DNA, 122 bp, Homo sapiens
ttttgatttgtccttgtgagctcttccattccattgaattcagccttgcctaattgtggccgattgccaaatccctagcatgtttcctcttctgaatcacagaccagggtttcatcagccac

SEQ ID NO: 1603 - DNA, 122 bp, Homo sapiens
tcactatcgtcttccagactattggaggtattgctgttcatttctgactcagtcctggcccggtaggctgcatcctcagcgattttgccgaggtttaacaatgacttggccaccagttcatc

SEQ ID NO: 1604 - DNA, 122 bp, Homo sapiens
tgcactgcaaacttgattttgcagagattataatcactgcattacacagaaaaagtgctccgctgccctggctgcttgcttgtttttagctgactcatccaatctggcagagggtacgtttg

SEQ ID NO: 1605 - DNA, 122 bp, Homo sapiens
ttcaatgtagttccaacattggtgggagtagccttgccattaaggaatgtataatttccccgggggcgccaggatcgtgagatgagtaatgttggtggagtgagacagtgctatgaagagct

SEQ ID NO: 1606 - DNA, 122 bp, Homo sapiens
ggggcggggcctgggagaaatggggcggggccggacgcgggcgccgagcacgtcacgccgcgacaggcctaccagcccgcacgcactgggcgaccagcctgaggccccgcccctcggccggc

SEQ ID NO: 1607 - DNA, 122 bp, Homo sapiens
ttcagtgcgccccgctcacccagcaccagccagggctttccttaaaggcgtggaaaggagcgcgcacaaggcgcgcattgaggtctattcgagcgcagtgctggttaatatacataatctgg

SEQ ID NO: 1608 - DNA, 122 bp, Homo sapiens
tgtgaacacaccgacctccaactctaagaccagcatcaactcctcctatcacagccagcacgggccacacctctatgcaaagagtcctcagctgcagctctgagaggtcagcgaggccatgc

SEQ ID NO: 1609 - DNA, 122 bp, Homo sapiens
ggagggaaagattagggaggacaaaaagaattaaaatgaagagaaagaatgtggtgaggacggtacaggttgcatgcgtcagttcttctgtagttcagcatttcctgttcatgactcagtag

SEQ ID NO: 1610 - DNA, 122 bp, Homo sapiens
agcagggattaaccctccacggcccgtggcattctcccagctcgctgaccctgggggaaccggggcctgctgagctgagccctttgttaatacagacgaaaaaggcattaacctgccggtcc

SEQ ID NO: 1611 - DNA, 122 bp, Homo sapiens
ccctgctcactttgttttagctcagaaaactagaagctgctttagcaatcccctgagttccgccaaattttatgaacaccctccccctaccccaccaccacaaaagagataacacagaaggg

SEQ ID NO: 1612 - DNA, 122 bp, Homo sapiens
cttgatttagatctccaagtgcttggtctccatctccactctagggtggagcggtcgtatcgcggcgcgggtgtggggggaatgggagttacactttttggcactcaccaaagaaaacttct

SEQ ID NO: 1613 - DNA, 122 bp, Homo sapiens
gaggcgaggctgctcagagccatcccactcccagaaacgaatgacacaagcagcttttcccgtgtgccagccatttcagacctcacatttgaacagcgtgcatgcaacacggaccgggaggg

SEQ ID NO: 1614 - DNA, 122 bp, Homo sapiens
agagaaacactcgtatccacagcctctccccactttccctcacgcacggctctagaaagacggggatagggcgcggcttaggctttatacaccttgccagccaatgaccgcgccgtctcctt

SEQ ID NO: 1615 - DNA, 122 bp, Homo sapiens
tcgttttgcatcgttagcaagaagcaaagagtagatcttaaacctctttaaacttctctgcgtcctattcaaaaattaggataccacttaactctgcactttaaaaaaggatttcaagtgtg

SEQ ID NO: 1616 - DNA, 122 bp, Homo sapiens
ttctccactggggccggaagaggagctctcggacccctccctcctgccctcagccctctccgaagagctcagaaacatctccgattggaacacgacacagaccatccttcccagagcagcag

SEQ ID NO: 1617 - DNA, 122 bp, Homo sapiens
tacttcaatctaactcaagctctttctcagcatcacttttaactctggacagcagggaaccgaagaaaacgggggcgagctctctctgattggctttcattcagtgcttctgattaagggga

SEQ ID NO: 1618 - DNA, 122 bp, Homo sapiens
gcagccaggaggaagttaggtcggactcaggtccccctgagactcatatccgtgctgccccggacccctgtgactggcccgggcttccgggagctaccctggcatcgtgaagcaggcaggcg

SEQ ID NO: 1619 - DNA, 122 bp, Homo sapiens
tcccggcaggactcgaggtccaggcgaggggccctccgtgtcttcttccccttggcgccacgtgggtcttttgctaacagaacacagccccttcccagctgggcggtccccgcagtccaggc

SEQ ID NO: 1620 - DNA, 122 bp, Homo sapiens
agtacagttgtcccttggtacccagaatctgtggggaattggttctagaaccctcccatacgaaaatccatggctgctccagtcccttatacaaaatgtcatagtgtttgctataacctttg

SEQ ID NO: 1621 - DNA, 122 bp, Homo sapiens
ggggacctgcccgcggcgctgtcctcaggtggcctctcgggctaggggtgtcagtaggcgcgggacacaggcagagctcctccatcccggactccagaccccgcaccctggaccctggcagc

SEQ ID NO: 1622 - DNA, 122 bp, Homo sapiens
tcttggaatttctaagcttaacaattggggtcctggtataatgcacctggatgcttccttcgagtttttgcctgcttggaatgaagggccacacgtacagttgattcatttaacaattgggc

SEQ ID NO: 1623 - DNA, 122 bp, Homo sapiens
aactgttgaaattcgtgctccactccagcaactgctttcaatcggagttccatcctccgccgcagtatgccctaacgcagcgttatcttcagagctaccaccagcttccgaaacctttcgga

SEQ ID NO: 1624 - DNA, 122 bp, Homo sapiens
tttcccggtccgctaagtagcaggtgtttttccttgacaccgacgctaccgctagaccaccgtccgctcagcaacgggcgtcttcccagacgctggcgttaccgctagaccaaggagccgtt

SEQ ID NO: 1625 - DNA, 122 bp, Homo sapiens
ccgtccctaccattcccacctggcccgctgctgcctgtgccccagggtttccgggcactccgagcttccctggcaggcaacaaagctctcatccctggatcttgcggatctcgcgcccgggc

SEQ ID NO: 1626 - DNA, 122 bp, Homo sapiens
gccttcgcatctagagcaagcgctgcaagaattcacagaacggccagaagttccccatcccgctggtggcactcactgcgttaggcgctcagcctccagtccgggccgctttggcttgaaga

SEQ ID NO: 1627 - DNA, 122 bp, Homo sapiens
tgatgtacacgcagaagtgttttgacaaatgaagaaggtcctcattcttggaacatgtgccggttctccgagggaactcctaaaatggcataaggtcacctttttaaaggctgtaagctcat

SEQ ID NO: 1628 - DNA, 122 bp, Homo sapiens
tcatatagtttacctattttctatcttacactcactagaatttaaacttcataagaacagcgatcttgctagtctttcttaccattgtattcacaatgcctaaaacaacgcctgacaaagta

SEQ ID NO: 1629 - DNA, 122 bp, Homo sapiens
cgcgtcgcgttcgaagggcagcagccacgacggccagtggtagtgccaggagtgcagctgcgccaccgactcggccagcgcctcgggcccaaaagtgccgctgaagtgctggtccacgtcca

SEQ ID NO: 1630 - DNA, 122 bp, Homo sapiens
tttggcctgatctgataccaccagaagtattgggattcctcattaacagctttgcaagagcgttaatctagattccccactcaacttttgctggtgtggggccacagtttttttctgtggtg

SEQ ID NO: 1631 - DNA, 122 bp, Homo sapiens
ctgttagtaggtcctcgggattcattatggggcacattgggagtcttccgtcagagaaatcgacctcggaggagaccttgctgactcagggatccagtgcagttacgtgaaaatagctgatt

SEQ ID NO: 1632 - DNA, 122 bp, Homo sapiens
cctaagaagttagacacgaggaatctcgggcagcgaggtgcctgcaagcccgggggcgggcgggagcagcctgcacgcgtggggaagggcacgcgggagcgggtggcgccttccgggccggg

SEQ ID NO: 1633 - DNA, 122 bp, Homo sapiens
aaagcagtgtcggaagccagagctacagtccctttctaggacttagccctttagagccagcggcctctgtatacagatgagaaaacttagcagaatggtggataagcctcaactgtggcaga

SEQ ID NO: 1634 - DNA, 122 bp, Homo sapiens
caccgaagtagtcctccctggcctctggctcccgcatccgggcccgggcggcctccggaacgaaaggacctggtggctcctccagacccgacggctcaatccccgagggttctccgcgggct

SEQ ID NO: 1635 - DNA, 122 bp, Homo sapiens
aacgcccactgagcggtagctcttgtctccttgacatctgagccctgggaattaaactcacgctacataaaacggtgggcaccagacccccttgagaatctggggcggtgagggatgcccga

SEQ ID NO: 1636 - DNA, 122 bp, Homo sapiens
aaatgacaacattgtaagactggacaatagaagacagtaacaactgtgtgttcatgacagcgtaggtattagagcctcagaaaaacttttaaatgcgatttcttctaatgataatgggaaaa

SEQ ID NO: 1637 - DNA, 122 bp, Homo sapiens
aacttcatgttgctcccgtgtttgaaggaggacaataaaagtcccaccgggcaaaattttcgtaacctctgcggtagaaaacgtcaggtatcttttaaatcgcgatagttttcgctgtgtca

SEQ ID NO: 1638 - DNA, 122 bp, Homo sapiens
atttgggaggaagaaaaagatgaacttggttttgatccaagtaacctcagagaataatgacgtgggagcattttacaatgcaaacaataaatggaaaagcatgaatttatgtactgtatgtg

SEQ ID NO: 1639 - DNA, 122 bp, Homo sapiens
ggagggagctcagcctcctgcgtgttccggggggtccctgctaccccttccaggccctcccgcacattccctgcctgttcgccctactggggtgattctcaggtccctgtgaggcccgcctg

SEQ ID NO: 1640 - DNA, 122 bp, Homo sapiens
tgagacattcaaatatcagggattgctgtcacatatctttcgccttcaaaaatgcttttgcggcatttttgttcactacttcaaaataagactctgaataagctaaaaataagtctgttaaa

SEQ ID NO: 1641 - DNA, 122 bp, Homo sapiens
aggcggacgccctgcaagctcagtgaccaagcaagcagctgtttcattcatgggagaagccgccccttctccccaactcccaccctaaaatttcaggggggatgccggggaggcctgaagag

SEQ ID NO: 1642 - DNA, 122 bp, Homo sapiens
actatgttctacacaacatacagtccccacagtataccctttgtgaacaggaatagttaccgttgctccattttatctttttcaaaatataaacggcaatttttgttaggataagagtaaga

SEQ ID NO: 1643 - DNA, 122 bp, Homo sapiens
gtggaatggggttgcctgcacttgcgttagtctggagctaaccgtcggtgctggggatgccggggcagggccccaagttccactgtggacgtgcgtggggcttacctatgggcagcccctcc

SEQ ID NO: 1644 - DNA, 122 bp, Homo sapiens
gctgtagttgtgctcccgctcttcccctgccctcgctccacgccgcgccgctctgtgcggcggctgcctcctcttacggccggaatgcctaatcaccatggtgagaaaacggacaccgcagc

SEQ ID NO: 1645 - DNA, 122 bp, Homo sapiens
tggccaccacgttccacttcttgagctagaacatcttgtcgcctcccgacttggagcctgcgctcctggagtgagaggtcagggcgtagggttcctcgccgtcttccacgtcggccatggta

SEQ ID NO: 1646 - DNA, 122 bp, Homo sapiens
tttttttttgtgaaagtgaagtggaaattgtacatgtttgatgcacatacaggtgacttgcgctgctatttttgaaggcctttaagaatactgtgttaaccaagaaatgcacacttttgttc

SEQ ID NO: 1647 - DNA, 122 bp, Homo sapiens
tctctgggcttcagtttgttgaactctaaaacgggctagcgtgggagcctgcagagaaggcgtgtggggctctgcgggagaaggacgggcagcgcgtgggcggaactgcaggggctggcagg

SEQ ID NO: 1648 - DNA, 122 bp, Homo sapiens
ggtaacgaaccgctggaactccatctcttccatggctgagagcacatcactggcattcagcgtcttccgctttcctttcattgcaaagttgttagcactgagagaagagaaaggctgtcaga

SEQ ID NO: 1649 - DNA, 122 bp, Homo sapiens
ttaattagcaatggccagtgatttcatcagtcttgtctatgaaatagaacctccagctcacgttccctattagtgggtgaacaatccaacgcttggtgaattctgcttcacaatgataggaa

SEQ ID NO: 1650 - DNA, 122 bp, Homo sapiens
tgccaaggagtttgcatccaccccactgctatttgaggccatgcttgctgtgagtttctccgattcctctccctgcttcacccactccttctgaaaaacacagctaattgatggtcaatttg

SEQ ID NO: 1651 - DNA, 122 bp, Homo sapiens
ggctcgggggtgcccacaggcagggccggcttctgctcagagcgcagcttccagcaagcccgccggacctgctttctggcattttctcaccagccgcttggcctggggctcctcgccttgca

SEQ ID NO: 1652 - DNA, 122 bp, Homo sapiens
ccccccgcccccgggcgacgcggctttttgccccctgtcgccgcggttttttgccggacgcgggtttttgccccccgcccccaggactttctgcccgccgcggctttttgccccctgccgcc

SEQ ID NO: 1653 - DNA, 122 bp, Homo sapiens
gtcccgggtcccggcacagacccgggaggagggcgcggaccaagacttggggggaggggacgggggcagaggggtggggagaagttattccacttgaactccccaaggctctactagtgtag

SEQ ID NO: 1654 - DNA, 122 bp, Homo sapiens
gccagcctcctggaggatgtgagaccgcagggagagagaccccagctgcccaagtcctcccggctatcctatctgcgacaacagtaaatgaggccatcctagaccaaccagccctatccaag

SEQ ID NO: 1655 - DNA, 122 bp, Homo sapiens
tccccctcctcccgcctaaatgtacagagcaagacttgaagtcaaaagatagatagcgatcgtgctgaaagtcaggtggaaaacaagactgctaattttatgaaacaacctatcaacccact

SEQ ID NO: 1656 - DNA, 122 bp, Homo sapiens
ccaggaggcagaattcctgactaacagtggcacacaaagcaggtgttcagtttcctcccacgccaaagcctggagacagggagcctgcggccccgctgccctctccacagccacgagggtcc

SEQ ID NO: 1657 - DNA, 122 bp, Homo sapiens
ataagaaaatagttgtcaagcagtagaactggtcctgactgaatttattaagtgttacctcgtaatctattccttcctttacaaacttttacattattacactaagaaaatacaggtgtcta

SEQ ID NO: 1658 - DNA, 122 bp, Homo sapiens
ctggtcaaccttctgcacttggtcatggttgagctccttgaagaagtaggcaagcaaatgcgaggcaaccatcctgccgcgacccgacggcgcagagttggaaaaccgaggcgggggcacga

SEQ ID NO: 1659 - DNA, 122 bp, Homo sapiens
actcgagtggccgcgccctgggtcctgcaccgtgaggctggggggaccaggaccggcgggcgcccaccttggtcctgagcccagctgccgacgctgggccagcaccctctccaccgccgccc

SEQ ID NO: 1660 - DNA, 122 bp, Homo sapiens
gaggtggaagttgcagtgagcagagattaggccactgcactccagcctgggcaacaagagcgagactgtctcaaaagaaaagaaaagaaaagaaaagaaaaatgatctgacctacattgttt

SEQ ID NO: 1661 - DNA, 122 bp, Homo sapiens
gccgggtggacccagggtggggaactacctcttcctctccacgcggttgagaagaccggtcggcctgggcaacctgcgctgaagatgccgggaaaactccgtagtgacgctggtttggaatc

SEQ ID NO: 1662 - DNA, 122 bp, Homo sapiens
cgtgcagaacaagaacagcagctactttgtggaatggatccccaacaatgtcaagacagccgtctgtgacatcccacctcgtggcctcaagatggcagtcaccttcattggcaatagcacag

SEQ ID NO: 1663 - DNA, 122 bp, Homo sapiens
cggttgttgtccagcgtgcggctggagaagtagcggtcgaagcctggcagggaaccaggacgtcagggcctcactggccttcttccccaccagccccagccctccccgcctcccccaggata

SEQ ID NO: 1664 - DNA, 122 bp, Homo sapiens
tgagcccctctctgggaactctcctcccctgatcgggtctccctgctccaggagcggcagcgcatgtctgaccgtctggaggacaccagcctgcggctcaaagatgagatggacctgtacaa

SEQ ID NO: 1665 - DNA, 122 bp, Homo sapiens
gcctcctgcctacagcatctgcggacgctcagccccaagagatgcgagctgctcggggaccgccctgagtttctgagagtcctggggcgatggcacctgggtcctgtgcagatggcactggg

SEQ ID NO: 1666 - DNA, 122 bp, Homo sapiens
gcatgctggcttcgtcccctaaataagcttcatcatgcatggataggctggcagcaatcccgaggccatatgcagatacacagccaactgggaaatgggacacaattcttctccactcctcc

SEQ ID NO: 1667 - DNA, 122 bp, Homo sapiens
agtgtgcagtgcccttcagaggccctgcgtctccatcttttctccacggcatcctgcgaccgtgctcctcaggtgtgccccacgggcccgggaatgtccttcttggatgcgcccgatggtcc

SEQ ID NO: 1668 - DNA, 122 bp, Homo sapiens
cgcttggcactccgcagccaccgggatgaggctgagcgccggttttcggcctcgtggcgccgctggggccacagcctgacttcaccaccccgtcgcccaagtcctgtgatgggcaggtgtga

SEQ ID NO: 1669 - DNA, 122 bp, Homo sapiens
tagcagtgagcccactgtgaagaggcaggagaagaaattgaccccaaacatcatctgcaccgatgacatcttataggcaaacagggcatcctgccagtttgaggtgaagctgtcaaaagcaa

SEQ ID NO: 1670 - DNA, 122 bp, Homo sapiens
atggctataaacaccccactcttccctctagaggaagaatgtaagcttctcagtcttttccggattcctgaggtccaccttattctctggtgtccatgatttatgctttgtcactgggagaa

SEQ ID NO: 1671 - DNA, 122 bp, Homo sapiens
ccagctggggaggaggcacataagcaaagccacctgggccccctagactgccctgcctgacgcccccctgtgccctgctgcagaaccccatcatcacccagttcttccccaccctgctgctg

SEQ ID NO: 1672 - DNA, 122 bp, Homo sapiens
taagaggaagcccacatccatggctctgtcattggagtttaactctttggggaaactacccgcaaacctcttagccaaaggcagtccattaaacctacccactcattcagaggattcccttt

SEQ ID NO: 1673 - DNA, 122 bp, Homo sapiens
ggtcctacaggactagtaaaagaggacggtatatacaaaggcaaagcataactcatgtggcgacctcctacattgtagtgtggctagaacctaacaagtccgtcagagagagcagtaaaaga

SEQ ID NO: 1674 - DNA, 122 bp, Homo sapiens
atggaaactctataagagagatccagcttgcctcctcttgagcagtcagcaacagggtcccgtccttgacacctcagcctctacaggactgagaagaagtaaaaccgtttgctggggctggc

SEQ ID NO: 1675 - DNA, 122 bp, Homo sapiens
ccaagagcacctctgcaaggtcttaccactggaaaagtctccacacactgccagtggctccgtgtgggcccaaaaccatccctggctgagaagtattgatctgaagtgtttgggttttctgg

SEQ ID NO: 1676 - DNA, 122 bp, Homo sapiens
agaccctgggctgcttgctcagtgaccgatgagaggcagaagcatttatgcatcatcgtacgatttcagatgcggggaactggcgactgtgttagctcccatgctgcgtccccgtccaggac

SEQ ID NO: 1677 - DNA, 122 bp, Homo sapiens
gctgtgaaaaggttcactgaatgaaggaataaatgaccccatctctcactgatgaaaaaacgtcacagcccactttagactcacttgtcagagaaggcatcagtggccatcctaaggtctgg

SEQ ID NO: 1678 - DNA, 122 bp, Homo sapiens
ctacaggctaggttcaaatcccaattctgctctttactgctgaaaggctttgggcatgttcgttaatctcattttctcttctgaaaaagagacaatcttgaaaagattgaccttccgtgaag

SEQ ID NO: 1679 - DNA, 122 bp, Homo sapiens
gtgagcccagcgggccaaacaaggctgcaggcagaggtcacggtggccacagagatttcccgctgacaaagcagcaccgaaggaatcctgtaacatttcagatgagatcagcatctgaatta

SEQ ID NO: 1680 - DNA, 122 bp, Homo sapiens
gcttccaccagcgacgggatcttacggggcaacggaacagggtacctaccgggcaggggtcgtgtgctgtcttcctggagccgagcttttgtgagcatccaggaagagatggcagaagatcc

SEQ ID NO: 1681 - DNA, 122 bp, Homo sapiens
ggggcgcaggcgcggtagcgcggcctcccgagctgttgtaagcaccaggttgcggtggaacgtgcaccttcagttgggctgcacggaaaagtggtctccgcataaacagttgcacttgcccc

SEQ ID NO: 1682 - DNA, 122 bp, Homo sapiens
agaaaaacccaaagcagtgctttcagtaaacttaaaataaaaattctaagtgctaagaagcgtaatggtacataatgtgagttttataatcattggcagattagatgaactatgttaactat

SEQ ID NO: 1683 - DNA, 122 bp, Homo sapiens
gcggctacaggagggactgacaaagccccacggcacgccgctccctacttatagcaccggcgggtcgccatggagacgcaccagctcaaaccagccacgatcggttccggccgggacaccgc

SEQ ID NO: 1684 - DNA, 122 bp, Homo sapiens
tggctccagcgttcttgttgatgatggtccgcacgtaggagatggcaggcgtccgctggccggatctccgcttcgtgaccaccaggacacctctgccatgggctgccggctccacgcccaca

SEQ ID NO: 1685 - DNA, 122 bp, Homo sapiens
tcactttaaccctagctgtgcatgagcttcatctaggttgctttagaaaatgcagatgcccgggccccacccacaggtgctgattgaggtcctctgggtacagcctgggcattgggattctt

SEQ ID NO: 1686 - DNA, 122 bp, Homo sapiens
agtcagaacttgaagaattcagcatagaattccacacgctttttaacggctctgttgcctcgccgcaccccgctgtagcctatgtttgaccaattctctcattttataaagggtggacccac

SEQ ID NO: 1687 - DNA, 122 bp, Homo sapiens
cttcgtagctcggggagcctgggagagagcaatgagcctccatggaggggccctgtacaccgggaggtgcctgggcaactcccatggctcatctcaaccacagtcctcggcggtttgttttc

SEQ ID NO: 1688 - DNA, 122 bp, Homo sapiens
gcgcactactaaagcccggctagcagagctgggaggcaaaccagaccgtcagcaccagggcggcccacgcctgcttccgcccattggctgcccgcgtttcaagacccgcccccatattggag

SEQ ID NO: 1689 - DNA, 122 bp, Homo sapiens
tcgagaccagcctggccaacatggcgaaatccgtctttacttaaagtacaaaaattagcccggcatggtggcgggtgcctgtaatcccaactactctggaggctgaggcaggagaattgctt

SEQ ID NO: 1690 - DNA, 122 bp, Homo sapiens
gagaagccagtgagcaaggtggagaccagggatgctgtgaccaaagcagagaggaatgggcggggtggtgctgacaccccagccccgttctgcctgccagagccccacttaccaggcccgag

SEQ ID NO: 1691 - DNA, 122 bp, Homo sapiens
gtagagacagagagaagagacgcaagttggggacctgcaagtagggttccagtccaggtccgcgtgcgcaggccgggcgccctcaggtttagcggccacgcccttgcgttccttccgggttg

SEQ ID NO: 1692 - DNA, 122 bp, Homo sapiens
ccatatgctaccatgtgcgtgtgtcgcacggcatccccagataatgacttacgtgggcaccgtgcctttcctctagaaccatcttaatgctattttaaaatccgactctcatttgcatggaa

SEQ ID NO: 1693 - DNA, 122 bp, Homo sapiens
ttaaatacccgagaattcacctcctgtgtccacagctctccacgcccctcagccctgccccgcagccctgtagcagaagtacttagtgctttgcattctgcgcgccaccctaccccggcctc

SEQ ID NO: 1694 - DNA, 122 bp, Homo sapiens
gatcgcagccagtcacagatgccgatgggaacgagcctccccgcggctgctatttgacttcgcaggcttccagctgcgcggcggagcgacgtcaccctgtgccagtggtggctcgcggcggc

SEQ ID NO: 1695 - DNA, 122 bp, Homo sapiens
cccccgcccggcacggccccgccgcccgcccaccgccgcgggcgcacaatggggtgcgagcgctacctcgatccctgcgctccaggtactcggccgcctccagcaggatcagcagggagttc

SEQ ID NO: 1696 - DNA, 122 bp, Homo sapiens
cgggacggccggggctgggaccggagctgggctcgctgggcgacggcggaaggggcggtgcgcgccgggccggccaccggccggaagtgcacggccgccgggcccgtcctcccggccgcttg

SEQ ID NO: 1697 - DNA, 122 bp, Homo sapiens
aatcagtatggaaatggagaaatggcttaccatgcatgtccttctccccaggagggaggtcgtggtgcaggcgagcagacgccagactcctggacacttgccgcctgcgttatggaggctta

SEQ ID NO: 1698 - DNA, 122 bp, Homo sapiens
gggggcaacagtgcaagactcctcaaaaaaaaaaaaaaaaaaattagccagacatgttggcgtgtttctgtggtcctagctcctagctctacagaggctgaggtgggaggatagcttgagcc

SEQ ID NO: 1699 - DNA, 122 bp, Homo sapiens
tcattcttctgagcttgctcagcctggcccctccctccctgcaccatcctgcggcagggacggcaccgcggtggaggtttgagcctgctccctggctggttcaaatcccaggtctgcagctc

SEQ ID NO: 1700 - DNA, 122 bp, Homo sapiens
ggagcagaatgaatacaagttgagaaaacggagtggttctaggtgaagtggactcctgaacgacttttctaaaaagatgttgtgctgaagagtatactcagtgtggtcagaaatgtcaggag

SEQ ID NO: 1701 - DNA, 122 bp, Homo sapiens
cttcgagcatttacctggataccactcttctgaatctgacttatcattcttagtttccctcgttctctccctgcttaccaagctgggtacccctcgagggcctggtgggcctggagtgacaa

SEQ ID NO: 1702 - DNA, 122 bp, Homo sapiens
cgcagaaaccaacagctgtaacctaccgcattaaaaccacaaaactgtctccctgtagagcgaggctccctcctgcgggagtggcgagatacttgggcattctcgggcaggcttcctggtga

SEQ ID NO: 1703 - DNA, 122 bp, Homo sapiens
cgcgacagtgagttcagcatgttcaccatcacttcgcgctctgctcccgcgggtccccagcgcaggagacccaaagacagatgcacagggatgggaagaggccgagtcacggacagagtgag

SEQ ID NO: 1704 - DNA, 122 bp, Homo sapiens
ctcggaggtgagccagcaggtgcgggcggacaggtggggcgcacctgagtatatgtagggcgtcgggggcgcggcccgcgcgccccgggagcgcgggagggggaggcgggaccggaggggcg

SEQ ID NO: 1705 - DNA, 122 bp, Homo sapiens
cttactgctatggggaattcacttcttcaaagcaggacctatttggagcattacgatccacgattattgatgttgacatgtccatgtagtaatttttcttcaagtctgtaaatcttaaaata

SEQ ID NO: 1706 - DNA, 122 bp, Homo sapiens
ggctccaacccttgagggtacgacccttggcgcagagaggagagccaggagagccaggagcgcacagggttcccggtgctgtttctcttggcgctcgcctccccgcccttccttcccgccct

SEQ ID NO: 1707 - DNA, 122 bp, Homo sapiens
tggggtgtgtctgtggcagaagcattgatcttaaacattaaataagtggaattcacttgacggactgttattccaagaagttttgaatggctctctggctgatggaatcagtgcagttgtga

SEQ ID NO: 1708 - DNA, 122 bp, Homo sapiens
ggcaaaataattgtgctggattctcacacacacagaaatatcgaccatcaccctcccccgcgtgaactgggatgcaagttgctaaccgatgtgaacgcaaaatgccttgttcattattcctg

SEQ ID NO: 1709 - DNA, 122 bp, Homo sapiens
cggggccgtctctaattacctcctgacccccggcggcctgtgaataatggctactgagggcgctcgcaggggctgctaagaaggaaacgcggggcgcgagaggcgcggcgcgcgcgggagcg

SEQ ID NO: 1710 - DNA, 122 bp, Homo sapiens
ttctgggcttctggaactctgggctgccctgggaggcgcggctcccgctgacacagcacgcgtgcccaccccagggacatgagtcacagcaccaggcatggacacatatgctctgtgggtcc

SEQ ID NO: 1711 - DNA, 122 bp, Homo sapiens
accagacactcaggagagtctctttttgaatagcggagggaggtgcaacctgggtgagaccggatgggggccaggtgtggccccctcattagccacacaaagagccagccatgccggtccct

SEQ ID NO: 1712 - DNA, 122 bp, Homo sapiens
cacggcttctcggtgaccctcctggggttctgcagtgagtggccaagggtctgggagggacgatgctctctcagccgttgatcctcggttctaaccgccccggggagtcgaggcggaagtgc

SEQ ID NO: 1713 - DNA, 122 bp, Homo sapiens
ttcttctatatatcactgtctggctctgaatgttttcttttggctgttatggcttatgaccgctatattgctatttgccaccctctaagatataccaatctcatgaatcctaaaatttgtgg

SEQ ID NO: 1714 - DNA, 122 bp, Homo sapiens
agaagttctcctgcctccagctgagaagatgatcagattctagctgctcctggggaaagtcggtactcacagctggacacaaacatagcttgcaggaggaagagtgtcagagcaagagacag

SEQ ID NO: 1715 - DNA, 122 bp, Homo sapiens
gttccccagtgcaatattagcaatttaaatgcctctttgccaggcctgatggagctgattcggttgtgatcctgggcatatggatggcatatttgctgcgagctaggtgagacgcgtcccag

SEQ ID NO: 1716 - DNA, 122 bp, Homo sapiens
gagtcacccagaaatgaacctctggaggcaggatgcaaacccagcagggcctcagggtcacgctgttttttcccctagggttgagagagcgggatccgggtggacactggagttcctccgag

SEQ ID NO: 1717 - DNA, 122 bp, Homo sapiens
caccaagtcttctaaatctgtgtattttacactaccagcaccttccaattccgacagccacgactgcccagcccttgggtgtggcccgtggcccccactggtcagcacaggtgggtctgaag

SEQ ID NO: 1718 - DNA, 122 bp, Homo sapiens
tgcgcagcgagcaggagcacatgcggggggactcacagaccatgctgctgcagaggatggcgtgcgaggtcgccgcggggctggccgccatgcacaagctgcacttcctgcacaggtgggta

SEQ ID NO: 1719 - DNA, 122 bp, Homo sapiens
ataaaagttaccaccctcatggctccaaggccaaagcttctagcttctgcaacaccaaagcgtgctgacaagccaggaggcactgactgctgaccgtgagtcgctgtcttcccctcgcttaa

SEQ ID NO: 1720 - DNA, 122 bp, Homo sapiens
ctcctgagcccgccggcctgtacctgagctcaggcccctcggtcgcctcctctggcgggacgagaagagtccttgtccgcccttgctgacgagaagactgaggcccgaaaaggaaaagtctg

SEQ ID NO: 1721 - DNA, 122 bp, Homo sapiens
agctcgccccaggctgccagcagaaaaaagctaccgtggcacgtgccccggggagtgatgcggtggcccggtttgcacggagagcgggacaccgcctggggagccgcgctcgtagcctgggg

SEQ ID NO: 1722 - DNA, 122 bp, Homo sapiens
aggcataatgaaaacaaaaagtgttatgcaaaatgagacgttagaggaagcccggcccggcgcgtgccttgcatacccaacacgctggctgggaacagcgcgcaggttttccacgctggccc

SEQ ID NO: 1723 - DNA, 122 bp, Homo sapiens
ccaagccctcctctgcctttccgatctcaaactaacccgtaatggagctggcaagtgggacgaacgggacagcctaaagcgtcgttggcccggccaagaggggctcaacgcctgtcaccccg

SEQ ID NO: 1724 - DNA, 122 bp, Homo sapiens
ttctgggctggggctcctaccgctgcgcggggggctatacatgggggtgggcaggattcacgttgttgatgaccggccaaactcaaccctttattgccactattttacatatttgcccaact

SEQ ID NO: 1725 - DNA, 122 bp, Homo sapiens
gtgcacgtgcactcagatactcacacaaagccgcgtggagggacgaaaagatcaaccacccgatcgacgaggataggtttgatcttttcgattacctcagtgtgccagtgtatattcccggc

SEQ ID NO: 1726 - DNA, 122 bp, Homo sapiens
ggcgttccaggcggtgggggagatgggcatctaccagatgtacttgtgcttcctgctggccgtgctgctgcaggtaagtccccgcggccccgcagccgcatttccctcttcagggccgcccg

SEQ ID NO: 1727 - DNA, 122 bp, Homo sapiens
ctacctcttccagatggttccacacgggacctctaggagctcaaaggaccctgggccctccgaagtcgtctcttcttgcagcccgttgctaagtggcgccgcaggaccagcccaggtcccat

SEQ ID NO: 1728 - DNA, 122 bp, Homo sapiens
agtttttcagtatgtattatcacatttagaaatgtaaaaatcacaagatctcaggaaatgcgcccttgtgatatgttaataccagattgctgtttacactaattccatatacatgataatac

SEQ ID NO: 1729 - DNA, 122 bp, Homo sapiens
attttttttaaaaaatacgcaccctttccacaaccttgaagagttggggaagccacctgacgttgggtaatagtgagatggaacaaaagcaggagctgagccttagccacttccaaggcaaa

SEQ ID NO: 1730 - DNA, 122 bp, Homo sapiens
ccaagcttacacgttgggcatggacagggatgggaaatagatcagagttacgaggaagtacggggcctgttcaagaaggtattggagctgacgagttctcttgagcgctaatttaaaacctg

SEQ ID NO: 1731 - DNA, 122 bp, Homo sapiens
ttttcggctttcctggacctcggaggtgagagtaggtccggctcggacaagggtgggggtcgtctgaggggagcttgacccctacgtcttatttttggaaaaacatcctctgtcccactcct

SEQ ID NO: 1732 - DNA, 122 bp, Homo sapiens
tcccttagttcttcctaaggggagagctgggaaggggtagggctcccccggaaggcgtcccggccctcacccaggaaggtgcacatcctggaaacaaaagaggaaggtggtggatcaggagt

SEQ ID NO: 1733 - DNA, 122 bp, Homo sapiens
gagcgtggagcctccgaggccgaggactcggtcccagtttggacagatagaagatgcgagcgctctccctctccctctccctctccctctccctctccgtctccctctccctctccccacgg

SEQ ID NO: 1734 - DNA, 122 bp, Homo sapiens
aaagaagtaaaaaggccaggcgcagtggctcatgcctgtaattccagcactttgggaggacgaggtgggccgatcacttgaacccaagagctcgagactagcctggccaacatggtgaaacc

SEQ ID NO: 1735 - DNA, 122 bp, Homo sapiens
caattctcttaaggtagcagagtcattgagtcacttaatactatccactgaattgatcctcgtttaaaattcaaaattcagtattcatcaagattcttaggttatgtacaatgtaattattt

SEQ ID NO: 1736 - DNA, 122 bp, Homo sapiens
agctagaccagcttatgtgccccaaatccctatcagaaaagaattctaacaatgaagtggcgtgtaagaagactaaaataaagaaaacttgcagaaggattatacctccaaagatgaaaaac

SEQ ID NO: 1737 - DNA, 122 bp, Homo sapiens
ggtgcaggtcagctacagcctggtcctgggctacctgggcagctgcctcctgctgctgggcggcttctcgctggcgctcagcttcgcgccctggtgcgacgagcgttgtcgccgccgccgca

SEQ ID NO: 1738 - DNA, 122 bp, Homo sapiens
cccccagatcgcccacggccgtattgcctgccctccttaaagcctgcgtcccagtctgtgcgaatgattcggtcatccagacgcgtcccatttatgtaccgcatggcgttttccgcatctgc

SEQ ID NO: 1739 - DNA, 122 bp, Homo sapiens
aacgggggtctagggaggagaggctgcagatcgcccaggtatcagggaagacaagctcggcgcgtccgacagcgtgaaaagagttgacaggactactcatatacccgactagcttccgcttc

SEQ ID NO: 1740 - DNA, 122 bp, Homo sapiens
cattttctttcacatcaaaagtactgccagtatttttccccctgtttcctaagatggaatcgtcttgctcttaaagttattgaatctaggaaagttgccaatttgggaagttccaagcagtg

SEQ ID NO: 1741 - DNA, 122 bp, Homo sapiens
gaattatcctttttattttttctgagtggttttccacccacagctggctgaatccaggaacgtggaacccatggatatggagggccagctgtattggctgtgccttacaaatgaagtgcacc

SEQ ID NO: 1742 - DNA, 122 bp, Homo sapiens
ccatgtttattgagggcacctggcttctcccgcttgcgccgccgggtgagcctgaaggcgcgcacccacctggctccaggaagagggaccgagctcgcgtgctgggcctcactcccactggg

SEQ ID NO: 1743 - DNA, 122 bp, Homo sapiens
agaaatgataaagaagcagtcccttaagggaaacccaaatggaacatagtggccccagcccgcgcagagccccacaccaccgtgaggatgggcttggagttcctcttggacccggggcgcgg

SEQ ID NO: 1744 - DNA, 122 bp, Homo sapiens
ggcctcaagcaatcctcccgactcagcctccccaggattacaggcgtgaaccagcacgcccggtggagactcaattataaggggctcacagataacatctaattcttacagaggagtaaact

SEQ ID NO: 1745 - DNA, 122 bp, Homo sapiens
gccaagctccccaagctgcggcaattccactgtccccttccactttcactgggcagagaccgcgtggcgcgcattgggctgggcgtgatcctgaacctggcgaaggaacgcgaacccgtaga

SEQ ID NO: 1746 - DNA, 122 bp, Homo sapiens
agagtcacggcggtgagagggctgagtgacgggttaccccaaaccatgtggctggaggcgcgagctggggtgtgggcgaggttcaggagggggttcctgggtgtcgcggaggggccggggac

SEQ ID NO: 1747 - DNA, 122 bp, Homo sapiens
tcactcagagtctccattcacacttgatacagaatagtatatttggctgcctggtttccccgcatacagcagatcagaagaagaaaataactaagagctaaaaactagccacaaacagccaa

SEQ ID NO: 1748 - DNA, 122 bp, Homo sapiens
ctgcccaggccgatctccgctgtcaccagatttgcctgcagatccactcgcaccaggactcggggagcagggatctgcaaggcttgaggtttcactgtagtccactgtaccttcattgtcat

SEQ ID NO: 1749 - DNA, 122 bp, Homo sapiens
gtaagtatgttatttttaaaaattacaataaaggtagattaagttaaaaaaataacgatgcggcacctagattctgagtaaatagattggagtgagtggggcattgacattttcaaaacctc

SEQ ID NO: 1750 - DNA, 122 bp, Homo sapiens
tcgcagagaacccccgtttctcataaagtgatagaaaagcggaggagggacaggatcaaccgctgcttgaacgagctgggcaagacagtgcccatggccttggcgaagcaggtaacgttggc

SEQ ID NO: 1751 - DNA, 122 bp, Homo sapiens
agtcatgtgagcagattttttagaagggataggagacacacgcgcacacacacacacacacgaaacttgaaatggctttgctttggctgtcgtcttctgccgtgtgccagatgagcttgtga

SEQ ID NO: 1752 - DNA, 122 bp, Homo sapiens
ctcctcactctctccgctctgtaacattactctccagccagcgcggctcctattggctaccgccaactcacggggctcgctcattggcccgatacctcccattgtcctgaccagagcccgtt

SEQ ID NO: 1753 - DNA, 122 bp, Homo sapiens
tccttacttcccagacggggtggccgggcagaggggccccccacctcccagatggggtggcggccgggcagaggggctcctcacctcccagacggggcggctgggcagaggcgccccccacc

SEQ ID NO: 1754 - DNA, 122 bp, Homo sapiens
cttcagttctcagctccaccaaagtacccttttcctggatgacagctgtcatttatatggcgttgaactgtgtgcctagcgctgcacaagtgtttgcactttctccttgaatccccacagct

SEQ ID NO: 1755 - DNA, 122 bp, Homo sapiens
tcacataagaaggcggtggggctgagtccgaggccggatgtgaggggtggactctgtaaacggagcctccctgagtcagaggagactgcaccgaaaggtgccctctcaaaaggactgtgcaa

SEQ ID NO: 1756 - DNA, 122 bp, Homo sapiens
ggtgtggccaggagccacccccacccccgcacctgacttcacacacatacctgccttcagcgcctgccccagagctcccaagcccctgcccgccacatctgcagtgccgcacacagacagga

SEQ ID NO: 1757 - DNA, 122 bp, Homo sapiens
gacatgttcaccagacagtggggagaacgatccagagagaatgtaaggctcccacagacacgaaatagggcactgccttccccacaaaaaccctgtgattttcagctgtgtgaggggaaggc

SEQ ID NO: 1758 - DNA, 122 bp, Homo sapiens
gagccagcaagggggcgccgggcgtacccgagagcgctcccaccgagcgtgggcaggcctcgggcccctcaggctccgccctgtcacgtgacaccaagcgctggccgcctcccgccccccgc

SEQ ID NO: 1759 - DNA, 122 bp, Homo sapiens
aagaagggcggaatcgggaggccactttgtgtcattgcgcgtctagatgtttccgaattgcgtgtgtgtgtgtgactgtgcaatatggttgtgtatgcttgcaatgccgttgtgcctatgag

SEQ ID NO: 1760 - DNA, 122 bp, Homo sapiens
acaaaagcagtgccgagactttaataaagatactttctttaactgtaaacttttcttgatcgaaaaatcttttcattctcaccacaaaagcagtgcatgttcattgtagaaaaagtagtcag

SEQ ID NO: 1761 - DNA, 122 bp, Homo sapiens
ggcccaggctgttccggctgcggcacgccaggggatgtggttagccctgagcctggaggccgaaggtgggcaggcaacactcccaccatgtttcggaggagaatacactaggctagcctaac

SEQ ID NO: 1762 - DNA, 122 bp, Homo sapiens
gtgtgtcaggaagtccccagcctctctgatttgttcttgaggtgtgacgtacctgcagtccgacacgtgtgactgacagctggtggctccggcaggtggggtcttccagcagctgagacggc

SEQ ID NO: 1763 - DNA, 122 bp, Homo sapiens
tgtgctcgggagccagactttgtggccttggggaaaggactgaatatttctgtgcttcgtcgtttgcatctgtggaatgcaggtgatactgagctcttccttgtgggattattgcctggaaa

SEQ ID NO: 1764 - DNA, 122 bp, Homo sapiens
tggaagaaagccggggcgcgaagccgccgcccgctcttctgcctggggacgcgactctgccgccaggctccctcgggtcagctcggcacccgcccgagcccccccagttccaggccctctcc

SEQ ID NO: 1765 - DNA, 122 bp, Homo sapiens
tcagaatgatcgtcaaagcccagctttcagtctgtattcgcactgaaaatcacgatcaagcgagcttttgcccttctgctccacaagaggtttctgtcctccctgagctctccttaggacac

SEQ ID NO: 1766 - DNA, 122 bp, Homo sapiens
ggagcccctgtttcccagcgcaggttcctttttcttctcagttccttgggctgttgaagccgggttctgggtagatagagactggggccgtggggagagcgccaggctgcttttgcctttcc

SEQ ID NO: 1767 - DNA, 122 bp, Homo sapiens
agggggcgggcgcggtcctgtcgctagtgactgcagatttcctctgcggggcacttcctacggcctttgatctttccccaggaactgccgagggccgcgtttgcctctaagtttattccctc

SEQ ID NO: 1768 - DNA, 122 bp, Homo sapiens
agtgtgacaaagaggctggcgtaggaaaagagaggtcaggacaaagtcccaggccccaggcgtggctctctgggtctcaggccccaagagcgatgactgcactggggagtcacagggttggg

SEQ ID NO: 1769 - DNA, 122 bp, Homo sapiens
cagaagtttttccacagccttggagaggggctttgactgagggctgggggccctgggctccgtttccttcacattccagctggcccggatccctctgtggcacagggccctgcccgtcacat

SEQ ID NO: 1770 - DNA, 122 bp, Homo sapiens
gctcgggggagagtgtcctggccgaacgttgaggtcccagcgccctttgaatttgtatggcgctccgtgggttggtaccccgaatctgggcttcctcttgcctgcccacccccgtcttccct

SEQ ID NO: 1771 - DNA, 122 bp, Homo sapiens
aatgtccagacaaggtaagctaccattttcactgcagtttttctctttttccctcctattcggccttcatcaaaatatttcctgggagaacttaagaaagctccttgtaaagaaatggggga

SEQ ID NO: 1772 - DNA, 122 bp, Homo sapiens
ggaatttgggtgcggtgtgaggcagcatacaattctcagaggacccctgggctgcctgtgcgtcgtgagcagtgggctgggggagagagctcccatcctaaaggctttgtagcttgcaaggc

SEQ ID NO: 1773 - DNA, 122 bp, Homo sapiens
ttgggctgggggcagattcatggatagggcaggctatcagcttccagtggagtcagatcacgggaggggaggcagataaggttggagtgggatctgtggggaacaggcctcttacagtgcat

SEQ ID NO: 1774 - DNA, 122 bp, Homo sapiens
tacaaaagcacactgcacatcttaaaatgccgtacaaaccgtagatgtttattaataaaccggagtccgtgtcttccctcccctcaggcacgtctcgtcccgacccctccctcctcccagcc

SEQ ID NO: 1775 - DNA, 122 bp, Homo sapiens
tttgtattttatgccggtgaggacaatactgacctattgtggcaggtttcatgtgaaagccggtaagtcttgaggtaatcagagaatcagcacgatcaagtgcaactagacacctgagatcc

SEQ ID NO: 1776 - DNA, 122 bp, Homo sapiens
tctcaaattcctggactcaagtgatacggctccctcagcctcccaaagtgctgggcttaccggcatgagccactgcactgggccagattgttctttcagtctaggcatgcccccttctagct

SEQ ID NO: 1777 - DNA, 122 bp, Homo sapiens
tgggtccacgcctctgaaatacacttctgcgcaaaaaggcacctgagggtcgggaagttccggaggtgtccgcatagacgcggggcgcgagtacgccgtctctccacagaaacgcccctcag

SEQ ID NO: 1778 - DNA, 122 bp, Homo sapiens
tctcgctccttcggcccttgggcctccaaacaccagtccccggcagctcgttgcgcattgcgctctccccgccaccaggatgccggtaaccgagaaggatctagctgaggacgcgccttgga

SEQ ID NO: 1779 - DNA, 122 bp, Homo sapiens
ccagaccataaaatgctcccacgagcgatcggtgcaccttttcatcgactccttgctgcacgccggcacgcagagcatggcctacccgtgtggtgacatgaacagcttcagccagggcctgt

SEQ ID NO: 1780 - DNA, 122 bp, Homo sapiens
cttgagccacttctgtagtctggcatcagtaagcccacacacttgcactactcccctctgcgtgccagatgcttcattttcttgcagctgaatccattgggcgcagtgctcatgaggccaaa

SEQ ID NO: 1781 - DNA, 122 bp, Homo sapiens
ggaaatccctttcatcctgcagagagatccaaacagcccagatctgggccctccaccccacggcaacctctaggtgaacttgcttgatttgaatttgggtgcaggatcccttttcatttctg

SEQ ID NO: 1782 - DNA, 122 bp, Homo sapiens
atgcctgtaatcccagctactccggagcctgaggcaggagaatcgcttgaacccaggaggcggagtttgcagtgaaccgagacagcgcaaccgcactccagcctggacgacagaatgagact

SEQ ID NO: 1783 - DNA, 122 bp, Homo sapiens
cccgggcaggcgcccggaacctcgctggtccccgggcaggcatccggaccctcgtcagcccggctgctgcttcccaaaggtcctctccacccaggaccctaacacgtgctgggcaacccggc

SEQ ID NO: 1784 - DNA, 122 bp, Homo sapiens
cctcacattaaaagcaacaccagtgtcctcatcgtgaaactagacgcccgatcttatcctcgaagcaatgaatgctcaacaggacctgctgctcagcaggatggcaggagccggagacgtgg

SEQ ID NO: 1785 - DNA, 122 bp, Homo sapiens
aacgtggcccaggacatgccctcacacgtaacgtggcccaggacatgccctcacacgtaacgtggccccggacatgccctcacacatctttcaatgcatcccagcaaataaaataattctga

SEQ ID NO: 1786 - DNA, 122 bp, Homo sapiens
tgggcggtggccaagcaggccatgttttagaattctttccaggcgggtcgcattggctcacgcctgtgatcctaacactttgggaggcggagacggggctgggggtggggggatcgcttgag

SEQ ID NO: 1787 - DNA, 122 bp, Homo sapiens
gggaaataaggagccaataaaccagaccatctcaggcagttctggattccctgttttccgcgtgcaatctgtctgattaattcagctaatgtgttattggctgataacaatacctcatttcc

SEQ ID NO: 1788 - DNA, 122 bp, Homo sapiens
ttcgcggcaaagaacaccagcatctgattgatcactttgaaataggtcatcagtatgagacgcacgacaaggaaggggccatcttgtatgaagacgctgattccgatgttccacagatcggc

SEQ ID NO: 1789 - DNA, 122 bp, Homo sapiens
gcatagttaatgtgatttttagcctgtaataagtgatataagaaaaaggaacagatgttacgagaaagaatcagtaggtagttagggaggtcttctagaaaagcaacatgaaagaggaaacc

SEQ ID NO: 1790 - DNA, 122 bp, Homo sapiens
gacagcgagcgaggggcacagaccccacagaggacagtgagcagtggggatagaccccaccgaggacagcgagccggggggacagaccccacagaggacagacagtgagcgaggggcacaga

SEQ ID NO: 1791 - DNA, 122 bp, Homo sapiens
tatgtcagccagagcggctcgttaagagagcgaaggccaggggctgcacaggtcgcatcccgtgagcatgaggtcagagaacctgcccctggggcaaaccgcgaggggtgggacgggtgggt

SEQ ID NO: 1792 - DNA, 122 bp, Homo sapiens
cattagaaaagcatcatttgcagctcctaatgaaataacaaatccagtcaatagtatcagcgctgctaaaattattgagtgaaaaaatactgggaactttatgcactgacataccctaaatc

SEQ ID NO: 1793 - DNA, 122 bp, Homo sapiens
caggaggaggccagggctggcctgtggggctctggtgttggctataggtgaggtggaccccgcagacattagcgcagcagggcagggcactcaggtggctgccgtggggtggatggacccgg

SEQ ID NO: 1794 - DNA, 122 bp, Homo sapiens
acatccccctcctggggtcctcccagcttccaggggatgctgggcatcaggacagctccccgtagagcctgtgtcctgtgggattttttttttttttttttttgagacagagtctcgctctg

SEQ ID NO: 1795 - DNA, 122 bp, Homo sapiens
attgaatctctgtgcaagtaagtgctcaggaatccttctggcattctatttctagctctacgttggagagcaatttacaagtcattaacttctctagacctaggctcctaaacataaaatta

SEQ ID NO: 1796 - DNA, 122 bp, Homo sapiens
caacgggggcttagatgataaacggagacccctgttccctaccggttgaaactgtgtctgcggcaacagtaagcacccggccgagacacccacacccccatgtcgtgcgctcaggaccaggg

SEQ ID NO: 1797 - DNA, 122 bp, Homo sapiens
ttaggttattctcctgattcagacatttttgtggtgtgaaatcatctccgcccagccagccgaagctgggagctcactccagcccactgcagcttgctggccctccctttccctgccacgtc

SEQ ID NO: 1798 - DNA, 122 bp, Homo sapiens
gcaagcagactctggttctgcctgtgccagccccatcacactggggagagcccagctctgcgcctccctgctgtgcacccttgggccagtcgcgccccctctctggacctcattctcctccg

SEQ ID NO: 1799 - DNA, 122 bp, Homo sapiens
tttctaagacggtcggccgtcactccctgaacttccacagcacctgcttcggtggaaacccggttctgcagtccctgctgggggaacccctgcctcaaagcccaagatgcccaagcgctgtt

SEQ ID NO: 1800 - DNA, 122 bp, Homo sapiens
ggacgacctgggatgggggcagcgggcggcggcgcagggagtgggccgggggccggtgtgcgcgggcgggacggggcccggggtcgggagaccaccgctcggaagatggggccgggagaggc

SEQ ID NO: 1801 - DNA, 122 bp, Homo sapiens
cctcgcgactttgcttcctaggaataggggccagggccccctactgagcgtgacctcagccggaagcaccgggtcttgagaagtggagtagttagaacagttggggcagttgctccgttttt

SEQ ID NO: 1802 - DNA, 122 bp, Homo sapiens
tcaactcttttaagaccaggtgcttggagaggaaatagttgtatacttcctctaagctttcggggcaggtggtttactctcatttatgaattttgtctgagagctgcattgggtctcatctc

SEQ ID NO: 1803 - DNA, 122 bp, Homo sapiens
cattgttgggctaaacactaagagtggtcattaaataaattatacggatttccaaagaggcgtttacaaaacagaacacagggtggttcctgtagaggaatttcaaatatgtgtgaagtaga

SEQ ID NO: 1804 - DNA, 122 bp, Homo sapiens
aaaagaaagccactgagcttcaggagcgtgggaccctccctgctcggagtatggactccccggcccccgtggcccctgcctctgctcttcgcacactaccacgggctcagcccacagggctg

SEQ ID NO: 1805 - DNA, 122 bp, Homo sapiens
atgtaaagttctaaactagtttctatttgaactgtatctttaaaacatttccattgaagacgttaaagctctttcgaaaatacaagaatggttcaagaaatctctatgaatcatcactatca

SEQ ID NO: 1806 - DNA, 122 bp, Homo sapiens
tggctgattgaaactcactgcaaaatcaccacgactctttcacctactgagatgattgaccgaggtttggccttccatttttactgagatttggcgagaccgaatggaagcgtccgcacagt

SEQ ID NO: 1807 - DNA, 122 bp, Homo sapiens
ggcggtctttgtaaacaacttttggacacatctgggcagttgctaagggctcttgccaagcgtctaggtaagcctttggcaaacagctacaggggtcgtttttgctaatgtaggactttggg

SEQ ID NO: 1808 - DNA, 122 bp, Homo sapiens
agtataactaattagatgaggacaaaagggcagacctgtggtgactccagttacccttcccgtaactacagaggtgcccagtcacctgcttggttatgtcaccctggggagtaaaagaatgg

SEQ ID NO: 1809 - DNA, 122 bp, Homo sapiens
cctgcctgtcccacttgggttccggaagaggtgcccttgccttgtattttagacatggggcgccggctgctggggctgccaggtgccaggagacgcctccctcgggcctgccccggcgcccg

SEQ ID NO: 1810 - DNA, 122 bp, Homo sapiens
tagcctagctctgtggtgggaggtgtgcagagcatggctggtgacccaccagagaaagcacgtggccctgcagccccaagctgtgatttccagtacatgcttagagagggcatcttgatgtg

SEQ ID NO: 1811 - DNA, 122 bp, Homo sapiens
taggggtctggaaggccgggtggagcttggtcaacagctcgggctcctcaccctgggccccgcttttcccggaggcctcgggggcacccagcgggtaggcctccctggcccggccggtcctg

SEQ ID NO: 1812 - DNA, 122 bp, Homo sapiens
tgttgagtacagggccacgtagccgatgccagtgggtccttgggaatcgtgctgcccctccgtgagcattcgagggcaccagggtagcggcatctacgtgatctggccaaagggctctgtcc

SEQ ID NO: 1813 - DNA, 122 bp, Homo sapiens
gccagatgcgcactatacaacactgttgcataacctggcctttcctctgcctgtgacccccgtgtccccaccatgaggtcctggagttggttcaattaattgtagacagcatactataaatt

SEQ ID NO: 1814 - DNA, 122 bp, Homo sapiens
aggatgagagcagtgaagtttgtggatctgcagagtgaggtcctacatcctgccccctggcgagcagcaagagaaaaatgtggctcagccagttttattggagggagacagagatggctttg

SEQ ID NO: 1815 - DNA, 122 bp, Homo sapiens
ccagcgactctttgagatgcttggacgaaaatgcttggtgagctggggatctcctgcccccgccccgtccccaccgtttcttcctcttcctctcctccttctctctcttcccctcctcccgc

SEQ ID NO: 1816 - DNA, 122 bp, Homo sapiens
gtgagggaggacggcacctccaaggccaccagtgcgtgcgcgtggggaggaggccctgcccggctcacaaggtgggcaggacacagcacaggatgggctgcagagaccaggggaggcccagg

SEQ ID NO: 1817 - DNA, 122 bp, Homo sapiens
cgcggcccgcgctctccccctccgcccggcgccgctgccgagtgaactggaaccagtcctcgcggccggcttcccacaatgcacagcgcgccgctcgtcacatcccttcgcggccccgagcg

SEQ ID NO: 1818 - DNA, 122 bp, Homo sapiens
ggcctggcgcgcggcgcatacttccaggttgctatgactggcctgcgctcgcctaatcaccgactagggggaaattcatataaaatatcgccggccattgtgggcctaactcggcgtgacag

SEQ ID NO: 1819 - DNA, 122 bp, Homo sapiens
accctgtgtcaaaaagaaaaaaaagagagagacatttgcattagatctttgaactgtttccgcttggcgtcttagaaaccttactcaacccagacagaaccctctcggggtgaagcttgcgc

SEQ ID NO: 1820 - DNA, 122 bp, Homo sapiens
tccttccagaaaggaagaagagtgggctagggtctgaatgctcacagggcctggttcatccgcagagctggccagcaactcaggctgggctcagccctgagcagggtgccccccttccccaa

SEQ ID NO: 1821 - DNA, 122 bp, Homo sapiens
taaaaatgatcatttctgcttacgtttacagctcatttcatattctgcaaaatgttttcccgtctgctatcaccgccgccatcctcacagcagcctgggagaaaggcagagccaaaagtctc

SEQ ID NO: 1822 - DNA, 122 bp, Homo sapiens
tgcaaccttcggccatctggcaggtggctacgacgcccagtactacgggtacctgtggagcgaggtgtattccatggacatgttccacacgcgcttcaagcaggagggtgtcctgaacagca

SEQ ID NO: 1823 - DNA, 122 bp, Homo sapiens
gctcggtgtcactcccgctccggctcctcctcgccgcggccgaaggggggaaaatggctccggctccagcgtcgcctcttaaagggcctgaaacaccggccgggaaatcccaccgcacaggc

SEQ ID NO: 1824 - DNA, 122 bp, Homo sapiens
gtctgtaactctgggctccctctctccactccccactcccctactgcaggcttctaaatccgttccattccactgcgaagcggagcaggacctaagaattggagagaaaattaaacgtcata

SEQ ID NO: 1825 - DNA, 122 bp, Homo sapiens
aacctgtccccttccccccaccaaaaaaagaaaaagacaaacacaaataaaatatctgagcggaactgtgcctttggcccaggctgcctctgtctgctttgtcctgccgcctagcctccccg

SEQ ID NO: 1826 - DNA, 122 bp, Homo sapiens
gagagaaccaagccttagttctctgtccgccggagtgcgtagggtctccccaggccgggccgctcacaaaactgcctggtgcatcctccccagcgagcagctgatgcagctgtacagtgcgc

SEQ ID NO: 1827 - DNA, 122 bp, Homo sapiens
gaccttgtgtcaacccaaatgtctacagatgtatcatcccagagcagcccgaattgggggcgatgcccatagctggtgcctgatggaataagagtgcctgaactgattggtgtgggtgatac

SEQ ID NO: 1828 - DNA, 122 bp, Homo sapiens
tgcatggatggacaacaagaatacattagtgcatttgggagaaaactaatgagggaaaaccgtgacagcttctgcctacccgaatgtcccaagagggtagactccattatcttggagcacta

SEQ ID NO: 1829 - DNA, 122 bp, Homo sapiens
cacgagttccgggtgggagtgggctcggcaggctccgcactcggagaggccagccggccccgcccaccagggcagtgaggggcttagcacctgggcaagcagctgctgtgctcgacttcttg

SEQ ID NO: 1830 - DNA, 122 bp, Homo sapiens
attccacagtgaggggtggttaggagctataggccgggatggctccttgggaagggaagtcgggatcccaggctaggaggaagctggcagccccgtccccactgggcccacagtgtgagtcg

SEQ ID NO: 1831 - DNA, 122 bp, Homo sapiens
tgagtaccccagtttcctctgacatcccagagtgtgcctgttaggtaactggtatgtttacgtggtcccagtgcaagtaaatgtgggtgtgtgtgagtgtgccaggcaatgggatggcatcc

SEQ ID NO: 1832 - DNA, 122 bp, Homo sapiens
gcggctccacgcccttagcgctgggcgaagccgggcccgggtgtggctgcctgccacgcgcgctgccataggatccaccaacgtttcgcctggtcgatcgccatttcgcctaacgggctgct

SEQ ID NO: 1833 - DNA, 122 bp, Homo sapiens
gtgtataagatatccagaaaggacaaattactgaggaagaagtacattggagtttgcaggcgatgatcaatccatatcagggagatgatggtgatgtttcctgttgctgttaatgtgtaagt

SEQ ID NO: 1834 - DNA, 122 bp, Homo sapiens
aaagtccctctctctaacctggcactgcgtcgctggcttggagacaggtgacggtccctgcgggccttgtcctgattggctgggcacgcgtttaatataagtggaggcgtcgcgctggcggg

SEQ ID NO: 1835 - DNA, 122 bp, Homo sapiens
aattaccaagacatactaggtgctgtggctcctcccactaatcccagcactgtgggaggtcgaggcaggtggatcccttgagctcaggagttcgagaccagcctggccaacatggcgaatcc

SEQ ID NO: 1836 - DNA, 122 bp, Homo sapiens
ttccaccttgttaaactacccggtagctttctccatgggaggcgccttcttcacagtactcggacccagttacacttgtggccttccccggcttctgctgggccggctatggtcgacgccgc

SEQ ID NO: 1837 - DNA, 122 bp, Homo sapiens
ggcgggcccggccggagcggggcggtcgcgctgactcagagctcaggaatgcgcgccgcccgcctgcccggcccaagtcacctcctcccggaaggccgccgggctcccttctccccagggtc

SEQ ID NO: 1838 - DNA, 122 bp, Homo sapiens
aaaaacttttaaatcagaaaatttcttatatcagctctttctttctaacaccactttcagcgtaaagaccacctagccacatccatttatttcttggcattgcctctttagtatttcataag

SEQ ID NO: 1839 - DNA, 122 bp, Homo sapiens
ttgcatttctatcttcaaggaagaattaggttatgaatagttccgtgaatagtcaggaagcgctgtcctccaagttcaagattaaggaaacgtggcatgcacagctaaagcaagaggtgacg

SEQ ID NO: 1840 - DNA, 122 bp, Homo sapiens
ggtctcctttgtcccgcgcgccctggccgcgtcccgcccttcggcgtagcccatgggaggcgccctgagggcagggcccttctgattccccacctggcctcgagtgaggacgcgctcaacaa

SEQ ID NO: 1841 - DNA, 122 bp, Homo sapiens
cagaagtgtggtggctggatccagtgagaccaccttggaatgtatagccagtgccaggtacgaggcgcgtctcctgtgagactcctagtaaatattccatgacctgtgacgagccgacgata

SEQ ID NO: 1842 - DNA, 122 bp, Homo sapiens
ggcgtggggacgctctgctctgcgtttgtggaaaccaggcactcgcctggcacagggtctcgcaccccggtctcggtgcagccttgtgtggttctggtgcttgggagggcgtgttccccacg

SEQ ID NO: 1843 - DNA, 122 bp, Homo sapiens
atacatatacaatgtgtgtatggatacatgtacatacatattacacttatgtgtatgttacgcacgtttgttaaaatgaggtcataatgttcatgctgtttcataacccactttctttcaat

SEQ ID NO: 1844 - DNA, 122 bp, Homo sapiens
gcccactaaatgcgtcggagcatctccgcgcccaggcggctcctcctcactgcggcaacccgggaaaacttgtgaactaatcagaaaaagtggaaggcgggagatcttggggcgctgtccaa

SEQ ID NO: 1845 - DNA, 122 bp, Homo sapiens
gtcccggctgagggctcggccctaattggcagtttggtatcctacgaaagcctagaaattcgaacctaggggctgaaccccgccctcagaccaaccaggaagaggtgacgtgattggtcccg

SEQ ID NO: 1846 - DNA, 122 bp, Homo sapiens
cgttattccagcgggaggtggtggggactggggagggcccaggggtcagcctgagaatctcgcccttggattaaaagccaccaatgctctgggtcaagtctcaatgggaggctggggatgta

SEQ ID NO: 1847 - DNA, 122 bp, Homo sapiens
ttatttttccatgagttgacaagaagctcccagctaaatttccagcccaactttattaaccgttatagatgatctgagtattccttctttctgataccttcctattctgtctatatttttaa

SEQ ID NO: 1848 - DNA, 122 bp, Homo sapiens
gtcctctaagaggggttggttgtgtacaacaacagcagatgctgaactccaagggctggccgaggcagcctgggccaaagaaattgggccctcctccccctaaatgagagtgcaaatgaaca

SEQ ID NO: 1849 - DNA, 122 bp, Homo sapiens
caggctgagtaacctgtattgttccttatccagttgagccttaagccatttcaatagagccgaattttatgaacatagtgaatttaaacacttattcactcttactcactcactcatgcaac

SEQ ID NO: 1850 - DNA, 122 bp, Homo sapiens
cggggaaaggccagaactgctgccttaaatacgcttttgcatcatccggttgctaacctccggccacagcattccccactccaaaatgccacttttccaggtgtgtttgcctaaatttaccc

SEQ ID NO: 1851 - DNA, 122 bp, Homo sapiens
ctgcacagacttgtcattgaacagcagccaaaacttgaggctcctcaaccttgaggctgtcggccaagtggccctgctagcttccctcccctgagtcctgccagcacttcctgtttctgttc

SEQ ID NO: 1852 - DNA, 122 bp, Homo sapiens
gcaaagatggtggctaaatggccaccactaaaggtcccagttcagggaaagcacaggagccggaagcggtggcatgggcagcatttcttactcagtcctccagcacactctgtgaagtgccc

SEQ ID NO: 1853 - DNA, 122 bp, Homo sapiens
gtctctgagttccagccctgctgaaatgcccgtctgaataaacaggggccactgccatcccggctgcgcatgcacaggcctccgagcggcagaaagcagggatgacaccaatgtggctttaa

SEQ ID NO: 1854 - DNA, 122 bp, Homo sapiens
tggtggtgggggagcctatgcaggaagtcaagaagtctcttcagcacaaaccagttaaggcgaggggctcttacctggcctgactgctgggggtggggtgggggtcacccctgctgattggc

SEQ ID NO: 1855 - DNA, 122 bp, Homo sapiens
aataaattatttcttcctctgttggatccctactttgttgttacacatctattcattgagcgctctgtgcccgacactgtgctggtttcctaaaactcatccaagcctcttgctttctgcct

SEQ ID NO: 1856 - DNA, 122 bp, Homo sapiens
agcacgtatagatatctgatgataattgcacacagtctttattacaccctcaaggcaatgcgacaagataatgggagttgaaatggaactctctgaattcatttgactccaacggttttcct

SEQ ID NO: 1857 - DNA, 122 bp, Homo sapiens
tcacggcatcagtctgaggtggatctcctcactcctctgtgcaaaccctcagacaactcccgcgactgacattgtttccacccctccctgcctgcgttctaaccacactggtctccctgctg

SEQ ID NO: 1858 - DNA, 122 bp, Homo sapiens
gactgcggtgtggaggctgttatcaggggcccagccgggcagccaggagggaagaatggccgctgccctgcgatggccttaaccgtgagcccccgcctgctttgcagctggcagagccaggt

SEQ ID NO: 1859 - DNA, 122 bp, Homo sapiens
actatgttgcccgggatggctaccaattcctggccccaaatgatcctcctgtatcagcctcgcaaagcactggcattacacgcctgagccactgcgcctggccttaaaaatggttttaaaat

SEQ ID NO: 1860 - DNA, 122 bp, Homo sapiens
aggccgggaggaaatgttgggggcacagtggagcctcggagaccacgctctgcctaggggcgcggggttgggggggactcgaaacgatctcagtccctggaggtgacggaaccatctgccga

SEQ ID NO: 1861 - DNA, 122 bp, Homo sapiens
gaacagcaagtataagggggcaggcatggttaaaagatctgtcccttcacaccttgcactcggggaggtgggagtggtcttctctgtgtcctcacagtagggatccaccagtcactttaata

SEQ ID NO: 1862 - DNA, 122 bp, Homo sapiens
tggagtgtgtcaagaaaggttgtgagagggagagaggagtagagacatggctagcaaaggcggtcttgttatgtagatgaaacctcacagataactgctctgagaaagaatagatggtagcc

SEQ ID NO: 1863 - DNA, 122 bp, Homo sapiens
aagctccccaggcccagctcaggcctcacggtggcctctccaggatgagctcctgccctccgatggcatctgcaggccccaaatggactccggtcggtgggctcctccacgccaagcttggg

SEQ ID NO: 1864 - DNA, 122 bp, Homo sapiens
tgccgccgccgggttcaaaacttcgggttggttttgaaagtccgactttggactggctgccgcagcgccacctgggaaactgaggtcgcctcttgcgaacacaaccggcgatggaggcggtg

SEQ ID NO: 1865 - DNA, 122 bp, Homo sapiens
gggagtagagggtagggaggttggggagtaggggcagaaaagcccagggaagggagagctcgtttccgtcaggcctgggcttaagtcaggcctgagtagggacagacactgagattgaggcc

SEQ ID NO: 1866 - DNA, 122 bp, Homo sapiens
ctggcctggcctctgtgcctcaccccacgccctgtcctcggcacggggtcctcacctgtgcgcacaccagcttggctgagcagcagcggcaggctccgcaccttgtcgaaggagttgaagtg

SEQ ID NO: 1867 - DNA, 122 bp, Homo sapiens
aatttatttatgtgatttgctgtacaaaccgttttcatatttcttggcttaagtctttcacgtgatccacacagggactgagaaactcagtaatgaatgccactttgccttcagtcaatgcg

SEQ ID NO: 1868 - DNA, 122 bp, Homo sapiens
ctcttactcccacatttagtgcaatcccttacaatactaaggataggtcagatttttgcccgtcccctgcattaaacctacaagtagatcagatttcaggataagcaacaagcaaaaaagga

SEQ ID NO: 1869 - DNA, 122 bp, Homo sapiens
cacgcaccccttcctgcagcccctctagcatcctcctttccagcctcaccaagggctgcacgtggtttctcaaggagtttagaccccaggaaaaagtagttgtgcaaaaaactcacaggaga

SEQ ID NO: 1870 - DNA, 122 bp, Homo sapiens
aggccggcagggggcagcagaccccacattttgccctcgcctcccgtgggagggagtgcccggctcccaaaatcctgtggcgggttttgtcccaagcgacttcagccagcagatagttcgtg

SEQ ID NO: 1871 - DNA, 122 bp, Homo sapiens
gctcctgcagacacggggctgaggtgtatacagtaggtaatagaggggctcctgcagacacgggactgaggtgtatacagtaggtaatagaggggctccagcagacacggggctgaggtgta

SEQ ID NO: 1872 - DNA, 122 bp, Homo sapiens
tcgcccagggcccaggacgccccgagatggccttgggcagggaaccagttgtggatttcccgggggcagggttgggggcagtccctggaaccgggcctagcccgtctgggagcggtggggta

SEQ ID NO: 1873 - DNA, 122 bp, Homo sapiens
ttcccagagaccagttagatttctaagaaagaatccatctctataggcccacagcgtccccgcattggttggctgggtgggccgaggaacagtggcaacatctgtgtttgtgcggcttctcc

SEQ ID NO: 1874 - DNA, 122 bp, Homo sapiens
agtccacttgagggcgctgtggcaacagctagcgccgggaggcaggaagccgatcgggggcggggatcgaaggcctcagacgtcgacgccggcgtgggcgcgagcacggtgcactctgggag

SEQ ID NO: 1875 - DNA, 122 bp, Homo sapiens
tttggattccttccaacttttgccactgccatctgctagaaactggttaaaactggcaaccggccaagagagatacatccactcttaaaacccatgcccggaagtgatgcacattatttaca

SEQ ID NO: 1876 - DNA, 122 bp, Homo sapiens
aggcgaggggatggcgcccgccggccggttcttccgggcttccgccaccttcaccagcaccgccaccaggaacaaggacagggaaagcttccagaacatcctgcaaacgagaaaagagaggg

SEQ ID NO: 1877 - DNA, 122 bp, Homo sapiens
cgctgaaagcaccctgtccctgcagcgaggggatgggagccaggggagtcagaagctacccgtcccctccactggccaaaaacccaacagctcttggcgcatcgatcctaagcgacaaggca

SEQ ID NO: 1878 - DNA, 122 bp, Homo sapiens
tacctattgaaaggagaatctttcaaatccttaacagttattttcaccatgtaaaaaaggcgacattgccagggaacatcaagtaaagagacaaatgctcaggtaagcttttaaatcatatg

SEQ ID NO: 1879 - DNA, 122 bp, Homo sapiens
tgctgcaaactgctgcagcaggcaacttcattttcttttttcttttttttgagacagtttcgcttttgttgcccagactccaggctggagtgcaacggcgtgatctcagctcactgcagcct

SEQ ID NO: 1880 - DNA, 122 bp, Homo sapiens
ctccgagccaggtgcgggatataatctcgtggtgcgctgcagtccgaaaagcgcaatattcgggtgggagtgacccgattttccaggtgcgtccgtcacccctttctttgactcggaaaggg

SEQ ID NO: 1881 - DNA, 122 bp, Homo sapiens
tgagaagcaagctggagacagctgagtgatgagggcagaaatcaatgcaggtggggtcaccgagcaggtgagtggcccagagtaaccctctggaggaccagccaccatctgaactctgtgag

SEQ ID NO: 1882 - DNA, 122 bp, Homo sapiens
ggtgcggggcccgggcaccgagcgaagtggggtcctccaggggatggctccgaggaagaccgtttcagaaagggagtaacccggggccggcaagggtttccgactgtgtgaccccgtgcacc

SEQ ID NO: 1883 - DNA, 122 bp, Homo sapiens
tgcggttccggggagctcggctccaagttctgggtaaggcgcggggctccggggtcactgcgcgggggccagggtcggccggcttcgcccggtccccgccgcctgccttcccgcggggccgg

SEQ ID NO: 1884 - DNA, 122 bp, Homo sapiens
tgagtaagtcagaggctgtctgagccgggaggacggctgtgcagcccaggagggaggaaacgatggttctgtgtcagagcctcgtaaacaagcatgacctcacgctcgtcccgcacacaccc

SEQ ID NO: 1885 - DNA, 122 bp, Homo sapiens
ggtcagcctggttggcgttggagatgtaggggcagttgtcctggttgttctggtggccgtcgtcatctatgtcctcgttgttgtcacactggtccccaacaaggtcattgtccacgtcggtc

SEQ ID NO: 1886 - DNA, 122 bp, Homo sapiens
tcgaggtgtggagggcagtgatttctcaggtgcggagggcagtgatttctcaggtgcggccgggagaactgggggcgtgggggcgctgtcccgagagccgcctggcctcagccactcccctt

SEQ ID NO: 1887 - DNA, 122 bp, Homo sapiens
ggtcccgtccccctgctaagtgcggcaggtggagtaaactctggattagaggacggttgacggaggctcccgggccctccccgggatgccgatgggatcgggcgagactctaggcgtgcggg

SEQ ID NO: 1888 - DNA, 122 bp, Homo sapiens
agcgcggatctcgggcgtgatggtgtcgatctggacgcccaccccatccgggtgcacccacgacaagccaggcccttgcaccagagtgggctccagtcccggcccgagccggcgggcgtgcg

SEQ ID NO: 1889 - DNA, 122 bp, Homo sapiens
cccacggtgatgaggctcctgaccgagctcccagagctcattatggaaaaccgtggggtccgctgggacctctctgctggtcgggctaattacagaccgtttgtcgtttcattatgggctct

SEQ ID NO: 1890 - DNA, 122 bp, Homo sapiens
tgctcgctattaggaccattatcaggtcctctcgagccgccaaggaccagccacctttcccggagctttgcctatgatatctattcttcgactactgcggatagtagccacaactggtccaa

SEQ ID NO: 1891 - DNA, 122 bp, Homo sapiens
tgcctgttgcttccagcctgattcccgagaagggagcctgcttgcgaaggaactggcactcgggcctgcctgaagggggcgctgtccagacaacacccagcctcccgtcgtggcaggcgctg

SEQ ID NO: 1892 - DNA, 122 bp, Homo sapiens
gtgcagtgggtgagactggccagcttgggctgggctggctttgaactcaggtccatgtaacgcattgatgattgtcctgaccagcaccttttgtgaaactagtgcagggggcctttatcatt

SEQ ID NO: 1893 - DNA, 122 bp, Homo sapiens
ggtgaaaaacaagtcgctacaaggcgaaagactgctccttaggttgtgtgggcaatcgcccgcttcattcaggaaaaacacacctcattagggcccgccctcccctcgcttcccacccgaac

SEQ ID NO: 1894 - DNA, 122 bp, Homo sapiens
cgagcactaggatctgtcggttggggtcctacttttacataacgcccccacaatgcccttcgccttcctcaacgtggcccccgctccaagcccattttctggagccaggaatccactctgtg

SEQ ID NO: 1895 - DNA, 122 bp, Homo sapiens
gggcctggaggaaggagacgggcagtcattccatcctctccgctccacctctccggtgggcgcccccgcagcctggagcggcccccaacgccttggtcctgcagccgctggcagtctcccgc

SEQ ID NO: 1896 - DNA, 122 bp, Homo sapiens
tctgaccagggcagcgggcatgccacaactcctcaggacacatgtgggccaagtagagagcgccggcccctcaaggaccatggcctgagcctggtggacgcccttccctctggtcggttgtg

SEQ ID NO: 1897 - DNA, 122 bp, Homo sapiens
agcttgcagcaagcctagtttgcgccgctgcactccagcctgggcgacagaacaagactccgtctcaaaaaaaaaggtgggggggagaaaatgtggcacatatacaccatggaatactatgc

SEQ ID NO: 1898 - DNA, 122 bp, Homo sapiens
cctgtgatggagcccgggacctgcccgcccgaggccgcctcggcgaacttcgttttccctcgaatctccagccaccgttcagcagcctgtcggtgtgctccccaatgccgtaaaaaaatcag

SEQ ID NO: 1899 - DNA, 122 bp, Homo sapiens
gggcgaccccgcgtatgcgtgtgtgtgtcacgcgtttaatcgcacagagtaattcccagacgtgcaagacaaagcatttcaagcaaagatggtccagagttcaaattggaaagcacatctcg

SEQ ID NO: 1900 - DNA, 122 bp, Homo sapiens
tgttggatgagcagggcctgggctgccctgtagactccaggaggctgcagactcactccccggctgcaaactgcagcataaccccttcctccatctcacagactctggccttgctttgtttt

SEQ ID NO: 1901 - DNA, 122 bp, Homo sapiens
taattgatccactcagttttcagtagatgtggaatccaacaagagtaacaccaccctccacgccccactcttttttctttctttctttctttctttttctttctctctctctctctcttttt

SEQ ID NO: 1902 - DNA, 122 bp, Homo sapiens
gagaggcttaggtcaaatgtcagctctccactttgtggctgagtatccatgggcaagttacgtaacctttgagcctccagctgtaaaatggggatcaacaccacctcccttgcagagttgct

SEQ ID NO: 1903 - DNA, 122 bp, Homo sapiens
aggccaggcacgtgctgctgcccctggaggcgggtgggggtgcctccgcgctggaggacacggggtgcactgaggcttcccattggtgatgggggaatgtggtgatgaggggatgcggtgcc

SEQ ID NO: 1904 - DNA, 122 bp, Homo sapiens
gcgcggggccacctagttgcagggtctcgggccaggaagcccctattcctgtcccctgagcgccacccgcccccgcgaaggaggaggcgcttgggagggggtgtgaaaggcagaggggaggg

SEQ ID NO: 1905 - DNA, 122 bp, Homo sapiens
ccatcagtggatctttttcctgctccaaggggcctggtctggagccagaggggccccaagcgctgtgctggggaacggggtggggagaactgtgctggggagcagggtggggagaagccttg

SEQ ID NO: 1906 - DNA, 122 bp, Homo sapiens
gccttgctgcctctgctctgacccgcagaaatggtccagggtaagttcaccataaattttcgtggcttgctcagagactggggcttctgtgatgaatttttcttccatccccgaggtgatgg

SEQ ID NO: 1907 - DNA, 122 bp, Homo sapiens
ctccccacccctgtcctgccccgcctcgcggtccctgggagcggggagagaaagcgcgcgcggaggcctctgcacccaggtccgccccacctgactgggagcaaggcccagattcgcggggc

SEQ ID NO: 1908 - DNA, 122 bp, Homo sapiens
cagttcaagcatgtgcaactggtacagttcagtagtacataaacgactcaaacaaatgtacgacaggtcagaaacttaagttacaaaatagagtcaatattacaattaacacagagaagtaa

SEQ ID NO: 1909 - DNA, 122 bp, Homo sapiens
gcagatacctggagaacgggaaggagacgctgcagcgcacgggtaccaggggccacggggcgcctccctgatcgcctgtagatctcccgggctggcctcccacaaggaggggagacaattgg

SEQ ID NO: 1910 - DNA, 122 bp, Homo sapiens
ggaatcccccctggccccttctttatgcagcccgtttgaaatggtctcttgagcccagtgcgcctggcctgttcccgcttagcctcacttaaatctcctcgcgaatctgagctggccaactt

SEQ ID NO: 1911 - DNA, 122 bp, Homo sapiens
ttcgaggagatttgaagaaccctcaaaccaacttttcctaaactagagattaaataactgcggaaaattccgaaggagtaagataagacacttatggtcttttctaaaaaaagacgtgttgg

SEQ ID NO: 1912 - DNA, 122 bp, Homo sapiens
ccagcagggagtttgcagcgtgacattcaatggcttcttccttctccttcttgagctccccgcggccaggctgccccgctcttcttactcgagtttttcttcactttggccattttctctcc

SEQ ID NO: 1913 - DNA, 122 bp, Homo sapiens
cgcagtcccgcgtggccttgtgggagctgtagtacgctccctgtgcccactttcctgggccggggtagcgctctagggcagaagggtaaactcaggtaaggaacggggttcttttccttcca

SEQ ID NO: 1914 - DNA, 122 bp, Homo sapiens
gtcagggtgccggggacgcggggaggtgggagggccggcagttggccaccgcgcagtctgcgcctcccgggtcgccatcagcagtttcaggaacccagtgtggatacctttccttctggaaa

SEQ ID NO: 1915 - DNA, 122 bp, Homo sapiens
ggctgcagctgttccgtcagctgccgctcctcctcccagacgcagagcgccgctctgccccgccccccgcgcaggctgccgtccctacatccgggtaccgactccagccgcctagacgctgg

SEQ ID NO: 1916 - DNA, 122 bp, Homo sapiens
cttccttgatcatctcttcactcttaccacatacacacacgcacgcacaccacaggaaaacgcatcagatgaagaacttccccagtccagtgcagatttaagaaagaggacactgacatagg

SEQ ID NO: 1917 - DNA, 122 bp, Homo sapiens
tgccatgaccttcactatgagaaagcacaggctgtaaaaggccagcctggctccctgctccgtggttaaatattgatgatattgggcaatagagacctggagtgggcacactacatatcccc

SEQ ID NO: 1918 - DNA, 122 bp, Homo sapiens
ccttgcccagggactgcggagttagttttggaatcgctctgttgaggctgagagacgctacggtgcgtgagcgccagtgttttcctgcagtataattccaccaggtttcgagaacgccgaag

SEQ ID NO: 1919 - DNA, 122 bp, Homo sapiens
cagccccaagccccctggctgggggtcattttaagtggcgggaaatgctgaccgcaggcccgcagcccaggacggggtggcagggttgacccaggccttcctgccgcagtcaggggtcaggt

SEQ ID NO: 1920 - DNA, 122 bp, Homo sapiens
tggtagagcacttccacattcataactattccattcctcttgtgggctcacgcgcatcctcgttcaatgctgcgttgttaggttagtacttccttaggaacaggtaggacaggtccacccag

SEQ ID NO: 1921 - DNA, 122 bp, Homo sapiens
ggtggaggaactgcctccttttccaggggctctggcccagcaaaggcttcacagtcaacacgagctcctctatctccgcgctgtctctcctctgcccttacccctggttgtcctcttcacag

SEQ ID NO: 1922 - DNA, 122 bp, Homo sapiens
aggagctgaagaagttctgttcccggatctgtaaactgctgcaggcggaggacttggggccggacaccctcgactccctgcagaggctcttcctcatcatctcagccacgaagtacagccgg

SEQ ID NO: 1923 - DNA, 122 bp, Homo sapiens
ggacgcagcgcaccatctctcctaacagagaccaagtctgagcttcaaagcttgcgcagacgacaggcacgtgcaagcctctcctctccagcaggagagcccggagcaggacacagcgactc

SEQ ID NO: 1924 - DNA, 122 bp, Homo sapiens
gggtgtgtccgggggcctcctgccaacactcaggggcactgtctgctggcagcctggttccggaaggtgctggtgctcaccctggagggtgacatccttcccagcctgctgctctcgggcgc

SEQ ID NO: 1925 - DNA, 122 bp, Homo sapiens
cctcacttcctagatgggatgacggccgggaagaggcaatcctcacttcacagactgcgccgctgggcagaggggctcctcacatcccagacgatgggcggccaggcagagacgctcctcac

SEQ ID NO: 1926 - DNA, 122 bp, Homo sapiens
tctgtgccttcaagcagcaccaacggttttgccgaggccagagccgacaagtagccactgcgaccgggactgtgaatccggggggggcacagtctgcacaccctccccacccgctctaaacc

SEQ ID NO: 1927 - DNA, 122 bp, Homo sapiens
aggggtgggggtttggggtgctcctggtcatggaaggcaacacccttgtgctgatggacacgtggacctacacacgtaataatgttgcatgggacgtgcatgtgccgtcttttcacgcacac

SEQ ID NO: 1928 - DNA, 122 bp, Homo sapiens
ggagcaccacggcaggaaggaccgggatcttcatggcgtcaagtttggggtgctctgaggcggggcctcagtgcttgctctttatattgccaaggaggcagatgagcacagaaatggggtcc

SEQ ID NO: 1929 - DNA, 122 bp, Homo sapiens
cctcactgcctggggccgctccgagtgcaggtccctcagagcccaagcccacccagaactcgcgctggccctcaagcaccgggcgcagccccagttcccacccctgcctctccctccacacc

SEQ ID NO: 1930 - DNA, 122 bp, Homo sapiens
agcactggcccattcctgtctggctgttgctcagcctggacaaagagtgggtatagtgaacgcctcctgcaagcccagcctttcaggatttccccaggaaacagagagtgctgtggttaaac

SEQ ID NO: 1931 - DNA, 122 bp, Homo sapiens
ccacctctacggacggaggaggaatcatggtgtccgggaaccagacagagagtcccacagcgacgttaccttccacagacttcgggaagaagcaccagggcacttcaaagatgaagttggag

SEQ ID NO: 1932 - DNA, 122 bp, Homo sapiens
ctctgggaattgggaggcgcgggcgcgcggcggacgggcggggcccgggggcggagccggcgcgcacctcccgagccgcctgtgcctgccggagccagagcagagcttccccgagagctgcc

SEQ ID NO: 1933 - DNA, 122 bp, Homo sapiens
caccagatataacagcgacgcctggatggaacgcgcttccacattccatcacaacagaagcgatcatttttagcagacgccccgtaggcggcaggcccaaaggttgtgcaactgagggaggg

SEQ ID NO: 1934 - DNA, 122 bp, Homo sapiens
ctgtgtggtagaggcaggcgcgtcacacacctccccgatcgtcccactccccaccgcccccgcccggcccatgctggcaacacctctgcacccttcagccgccgctcatcagaatcgtccgt

SEQ ID NO: 1935 - DNA, 122 bp, Homo sapiens
cccctcctggcccccgtgccgtggtccttcgcctcccaccgcgcctccttcttccctccgcgggggtaacttttggcacctggagccagactcaggggcttcatgtcgtccccgtcccaggt

SEQ ID NO: 1936 - DNA, 122 bp, Homo sapiens
gccctgcgggaagggactggggttgggaggacgctgggcctctgggtttaggcctcactccgccggagagggggagacaaacaggccagactctcttcccagagcaggagcgacccctcccc

SEQ ID NO: 1937 - DNA, 122 bp, Homo sapiens
ggctgtccttagctgctagagctgctttcagtttcttgccatgtggcctcccaacagggccgcctgcttcatcaaagccagtagtggagatcagttttttttcaagacagaggtcacaattt

SEQ ID NO: 1938 - DNA, 122 bp, Homo sapiens
ccaaaaataatctgaaagtccccaagatattttgcccaccaaagttctgccacaagcccccgccacgtgtcagatgaaggatgattggaaattacaacagccgttctggagggcaatttagc

SEQ ID NO: 1939 - DNA, 122 bp, Homo sapiens
cgaagtcggccaccgccccacactttagtcagttgggtgacctggccggccctgggaggacgcctcattcagctgaagctcatccacatccacgtcagggggctccttggtgtcccggagat

SEQ ID NO: 1940 - DNA, 122 bp, Homo sapiens
gggaggtgacacagagctaggttcctaggctgtcttatgtgtcatttcagactccaaattcgactaaatcatctgatagacactgaaagctttgtgctttcagatcaccaggccctccctga

SEQ ID NO: 1941 - DNA, 122 bp, Homo sapiens
aatactttcatgctgacagaggtagacgcacacgcactggtatatgcagttacaaatactcgcataaaatggaaaccattatttcatatataaattaattaatcacaaatgctctccatggc

SEQ ID NO: 1942 - DNA, 122 bp, Homo sapiens
gatgaactttcaagatgaagcaagagtccaaattcctagccctctttcaaagacaaatatcgacaagccagatccccatcttggaatgacgtcacaatgacaaaatcaaagatcactgactg

SEQ ID NO: 1943 - DNA, 122 bp, Homo sapiens
gggcggggaagagtcaagctggggcccaggctcctccctggctctgcccaaactcctcaacgtgaccaatgaatggacaggtcacctgctgctccctgggagctatgtcaagggccagctgg

SEQ ID NO: 1944 - DNA, 122 bp, Homo sapiens
actgcatttcccaccttcctgtgggccttgcggcatcttcatcactgaggcacctggttacgcttcacctcttgtttcctgccctcactgcattccctcacctctacctttttatccttcca

SEQ ID NO: 1945 - DNA, 122 bp, Homo sapiens
ccccacctcctcacacacacccctcgcgtgtacacacacacacacacacacacacgcacacgcaccccttccgccaatgggagccggcgggtgtccctgcgcctatccccggagagatctaa

SEQ ID NO: 1946 - DNA, 122 bp, Homo sapiens
catcctcatcatgaaagggtacaaagagctgaactggaaaacagccaagggcgtgatgtccgacccgaatttcctgcggtctctgatggagattgattttgattcgattacccagagccaag

SEQ ID NO: 1947 - DNA, 122 bp, Homo sapiens
ctctggccacagagaaactgcacaccctgaggtggtactgagggcatctaggagccagcccggcacagcccatccaggaagtggcacagatacttgccgccgtctctggacctggctttctc

SEQ ID NO: 1948 - DNA, 122 bp, Homo sapiens
ggtgctgatccatctgctgggccgtcacctcccgagagagcgtgtgttcctccaaccacgcgtgtcttagcaccagtctctggcaggagccaggagatggggaagacaatttaaatgattca

SEQ ID NO: 1949 - DNA, 122 bp, Homo sapiens
cgagggtgccgcctacccacaggacgagctggccatgtccaagttcaaccagcagaaatacgacgagatcgccgaggagctgcgtgccgtgctgctgcgggctgaccgagaggacatccaag

SEQ ID NO: 1950 - DNA, 122 bp, Homo sapiens
ttactcttcctcatgtaccctttccagagctgaaaaacccaccctgtggcttgcagggcccgtggactttgtgaccttgttctcctgctatagatggggactttcaaccccaagaggatgag

SEQ ID NO: 1951 - DNA, 122 bp, Homo sapiens
cgacacacattcactccctccgcctaataatcccaacccagatcccctggagtatcatctcgtagttcattaaaccatcacctctgtgtccctgaggcaagcttgcagtctgttgagatttt

SEQ ID NO: 1952 - DNA, 122 bp, Homo sapiens
tttcaaacaccatgctgagaactcagtccttgttttggggagggatgcacttggaagattcgagctaaggtacaatcctccctaggtatccgcgggtcattgttttcaggacccccacagat

SEQ ID NO: 1953 - DNA, 122 bp, Homo sapiens
cctggcctccgcctgcggagccggcggaacccgcttcccgcctccacggggcagcgccagcggcctggtcctttcaccggcagctccgtgccgacgctctcaccgctcttcctatcgccggg

SEQ ID NO: 1954 - DNA, 122 bp, Homo sapiens
ttccaggacctgacagaacctggtatatagtaggcattcaataagcatgtcccaaatgaacgaacaagcagaaatttaataagtattccagctttaacaaattctgcaaaaaaaaaaaaaaa

SEQ ID NO: 1955 - DNA, 122 bp, Homo sapiens
ttatctatctgcctacactagactgtaagctccaggtggtatgctcagtgcctgtaatggcgcctggcacgtggaagagggtcaatgttaattaaaggaatgagggtgacttgcacacgccg

SEQ ID NO: 1956 - DNA, 122 bp, Homo sapiens
cagagggtcgcccccggcggggatgatgggcagcccagctagtccacggaacagagaacgcggcgccgagaccccctcggggtgtgagagcatcacagtgatccaaagcaggagcagtcccc

SEQ ID NO: 1957 - DNA, 122 bp, Homo sapiens
cgggagctctggttcaaggcggtccctggattccagacagagcagatccgcaagaggctgcgctgccgcaggaagacggtcctggtgctcatgtgcatcctcaccgcctacgtgctatgctg

SEQ ID NO: 1958 - DNA, 122 bp, Homo sapiens
gaatgtgacagagttgcagctaagcctcctgctgactggttccattggtgctgagagccgcgtggctggatttttggcatatcctagctgtggtattcactggtatctttatatctgcctgt

SEQ ID NO: 1959 - DNA, 122 bp, Homo sapiens
accgcgcgctaatctgacggggcgcggcgtggcgggggtaggagctagggaaaagtgtcacgtttgggggggcaaccaggtgggaactcctgcatggttaaggatcctccgatcggacgctg

SEQ ID NO: 1960 - DNA, 122 bp, Homo sapiens
cactcacccccggctgcttggccagcagcttgacgatgggcaggtggccctgccaggcagcgtagtgcagtggcagccaggcatccttgccctgcaggctcacgtccacgcctcggcgcagc

SEQ ID NO: 1961 - DNA, 122 bp, Homo sapiens
gaccgacctgcagctcccccactcggtttctccgcggtattcagaactctctccaccacccggtgactatctcagcccagcccagcccagcccaccccagcccaggagcgctgtgggcgggg

SEQ ID NO: 1962 - DNA, 122 bp, Homo sapiens
cctgcaccagcgcttccgggctgggtcagaaaaacaggtcgtcctcgccgcccgcgccggcgcctgcagcaggttcctcttctgggagccagcacgcagccagagctccagggaggggggtg

SEQ ID NO: 1963 - DNA, 122 bp, Homo sapiens
tggaacccagttaggaaattattgcaataatccaagtgagtgtgaatggtgacctgaatccgtgaaaagaaggtaagaagtagctgcttccaaatacattttagagatagagaaaccagaat

SEQ ID NO: 1964 - DNA, 122 bp, Homo sapiens
atcaccctctgggaccaaaaccatgggatgtgacccacatcagctgctaagcagccaatgcgtgatgtgaattgttccagggggcctggccctaagaggatatttaccatttaaccatagag

SEQ ID NO: 1965 - DNA, 122 bp, Homo sapiens
attcctagagccgggcagaaacccctgctcagttgtgtcctgccagccagtcaggggccccgggagctgtgtgctgcctccagaccctgcgggtgcccatgggtcgggaactgagctgccaa

SEQ ID NO: 1966 - DNA, 122 bp, Homo sapiens
gcggggcccatcagtcatccctgagcacagactccgcttgccctgcacttacagccgtcacgtcgctaaatggctctgcctgttaccgcagcgcaaatacatgatcctttcactttgcagat

SEQ ID NO: 1967 - DNA, 122 bp, Homo sapiens
ctgcggcctccacaaggctcttctgggagctgtagtccggtcagcgggcttccggctctgcgcatgcgaggtagccagcgcgaccctcgccccaaatccggttgcacacctggctcacggcg

SEQ ID NO: 1968 - DNA, 122 bp, Homo sapiens
tcatcatctaaaaccaatctcatgtctgcacctgggaaggtagtgtgtgtcctggttaaccgcaagggcgccagagtcagataaccaaggctggatatccgcttgctaactggtgaggagac

SEQ ID NO: 1969 - DNA, 122 bp, Homo sapiens
tactccctcacctttaggctttctcaggctgaaatagtttttcccatcccatttatcagacgagctaagcttcaggtctcaccttagatgtcacctcttctgggaagtctttcccaactcat

SEQ ID NO: 1970 - DNA, 122 bp, Homo sapiens
cttctgggggtgctgtcttgggcagagcgccagccccagtggtaccactgctggggagcccgctggggtccgagtccgcccactgtggggatgttgtctgctcttgccgttagccccgcacg

SEQ ID NO: 1971 - DNA, 122 bp, Homo sapiens
atctatctatgtttatttagatgactggataaaagagtcatgattcctcctagtctatcacgtggtaatgccaaggtcagaaaaatcatttgttatgatctatcttatgtaaaagcctgtgg

SEQ ID NO: 1972 - DNA, 122 bp, Homo sapiens
ttcactgtcttgccggcagccagctgagagcaatgggaaatggggagtcccagctgtcctcggtgcctgctcagaagctgggttggtttatccaggaatacctgaagccctacgaagaatgt

SEQ ID NO: 1973 - DNA, 122 bp, Homo sapiens
cccagtagctttgttaacacagtaaacagacactgagacacagagatgcttgccaacccccgaagttatcttcagagacacctctggtttatgataacccttttgatagttaacaaatatcc

SEQ ID NO: 1974 - DNA, 122 bp, Homo sapiens
aaaacatgctggggtctctctctgatccttggaagcataaccctctcaatgggtcacaggcgatttagagaaggaagagccgggaggaggagccaaatttttccactgaacgaaaggcatga

SEQ ID NO: 1975 - DNA, 122 bp, Homo sapiens
gactgtttgaccccgagctggcagcggatccccgctgcccccaaaccctcaactattttgcgggggtcatttgcccagatcacagcaggagtgagccaacccttgggccgccatcccgcaga

SEQ ID NO: 1976 - DNA, 122 bp, Homo sapiens
ctatcgctcctacctgatcgtgttcttcgtgcccattctcctgctgcctctgcccatcctcgtccccagtaaggtaaggacttggtgttctgagcacagataactccagggggcagaggagg

SEQ ID NO: 1977 - DNA, 122 bp, Homo sapiens
agtgcaggacatacgagtgagctgtgtgcaacagatgagcacgcgacatgcacccacaggcgcggagatgcagcgggatccgggtttctcccccagccagcctcccttctccaaacaagccc

SEQ ID NO: 1978 - DNA, 122 bp, Homo sapiens
cagctcaatcaaaccctttaaggtgacaggttgcagcaccgcctcctccctccaagcctccgcactgggagcctgctccgccctgctgagggctcacttctcaagagcatcaggatatgcca

SEQ ID NO: 1979 - DNA, 122 bp, Homo sapiens
ttttgctgcatcagaatgctacaggccgtcaactccctaacatgcgcaaaagcgggcagccgattatccagggtagtggattatccaggagagtggattatccagagtagcaggtctggcgc

SEQ ID NO: 1980 - DNA, 122 bp, Homo sapiens
tttttttttcttttgagacagagtcttgctttgtcacccacccaagctgggctgcagtggcgtgatctcagctcactgcaacctccgtctcccgggttcaagtgattctcctgcctcagcct

SEQ ID NO: 1981 - DNA, 122 bp, Homo sapiens
gagacctcagaaaaagaatggcgggagaaaggaggagggaggttccttccccacttacctcggggaccctagcaaaaatcaatagccacaatttggttttaataaggcacagtttgatagca

SEQ ID NO: 1982 - DNA, 122 bp, Homo sapiens
ccagtcccaactaaaaggcataaaggtaggccccagagggatgtcaccaaggagaaacaacggaatcaatagattatctaggcagccactccaaatctattctagaatcttcgagttctggt

SEQ ID NO: 1983 - DNA, 122 bp, Homo sapiens
agagcctcaaccatggagccccgtgctggggaaccccacagaatggggacagggacccctcggctcagcacaccccacctggctggcttcaggtgtgaaactcaccatgggctgcaggcctg

SEQ ID NO: 1984 - DNA, 122 bp, Homo sapiens
gactgcagggcccgggaggggctcagcccagtggaggtgcagacacagagcgggggcggacggtcccgaggtgcccacggctgcccacgcgcacgccctccacccggggcggccgcacaggg

SEQ ID NO: 1985 - DNA, 122 bp, Homo sapiens
ctgacactgttgaataagaagagtccgtacctctttcccctcactctgcacccagaataccggctgctaggtcgacacttcaccaagcaggagattggaacaaaaacaatctggccagccca

SEQ ID NO: 1986 - DNA, 122 bp, Homo sapiens
cttggtatttgagggactttacacatcgtattaagggtttgagcttcaacttggggtcgtcgggagccattgaaggttttttgttgtttgttttttgagacggggttttgctcttgttgccc

SEQ ID NO: 1987 - DNA, 122 bp, Homo sapiens
gggattagagtgacgacaagagaacgtgacagtgtggccacactggtgacctccaccaaccgctctcctgggaccggggttcacctgctgggaatggccatcgccaggcatcacaccccagg

SEQ ID NO: 1988 - DNA, 122 bp, Homo sapiens
actgggggcccctgatggtcgctgtcactcctcagcgaaggcagagactggctaaggggtcgccggctgctgtggctcggagccatgccctcccgagcgtgtgggcaccgggacgtggtggg

SEQ ID NO: 1989 - DNA, 122 bp, Homo sapiens
agaactagcatttttgctcacgttctggaagctttctccgtttatttggtcaggtgactgcggtggtatggaaagaaggggcctgtttgttgaagccaaggtgctggaagaactgcctgtgt

SEQ ID NO: 1990 - DNA, 122 bp, Homo sapiens
gaggctgggtccttttaagcactggtaatttctacctgtaattccagccctttgggaggccgaggcaggcaggtcacctgaggtcaggagttcgagaccagcctggtcaacatggtgaaacc

SEQ ID NO: 1991 - DNA, 122 bp, Homo sapiens
tggggaaaatatgggtgaaaatattttcagacatttggattcccctttggtgagctgtctcgtttcttcccgctggtcagggatgtggctgcttgaacagctgggcgcggtgaccaatgtgt

SEQ ID NO: 1992 - DNA, 122 bp, Homo sapiens
ctcccaggtagccgggatgggtcacagagaagccgctgtgccggatctgctcggtccagtcgagctggctgaggctgtgttcccccaggcgcacccagtacctgctgccggtggcgacggct

SEQ ID NO: 1993 - DNA, 122 bp, Homo sapiens
ctcgatctcttcgatgggagagagagcttgcgacccctgtgggaacaggtgcaagggttccgagaggctgtggtccccatcatggcaaaggcccctcaaggggtgcatctcatctgctactc

SEQ ID NO: 1994 - DNA, 122 bp, Homo sapiens
agtggagcgaacaagggggatgctgataccgacctcctggttggaaagcctgtagagcagcgcggatgacagtggaacagcgggtcaggcggtgggcgcctgagcgaggggctagagcggga

SEQ ID NO: 1995 - DNA, 122 bp, Homo sapiens
ctttaagaactttccttcacagtctattatgtcaccagccactctcctctcttctttcctcgtctctaaggattgcagtcaaggaatttgcctgggtgatcagtagtaatgactaaggttgc

SEQ ID NO: 1996 - DNA, 122 bp, Homo sapiens
ccagctcccgagtctcccgcaccaggaagatgtcctggcagagcttgaggatgcggtccacgcacggcagctcctcgaacataatggagtgcgagatctcgctgaagaatccgcgcacgaac

SEQ ID NO: 1997 - DNA, 122 bp, Homo sapiens
gggctcgcagggcagtccggtgaagagctacgactacctgctcaagttcctgctggtgggcgacagcgacgtgggcaagggcgagatcctggagagcctgcaggacggcgcggcagagtccc

SEQ ID NO: 1998 - DNA, 122 bp, Homo sapiens
gttaatactttgtgaaaaacaggagccacggtagcccgtaaaaactgctcacaatcaccccgccacccagagctcactagtgcgactatttttgtgcaatttcttttggcaacacgtttctc

SEQ ID NO: 1999 - DNA, 122 bp, Homo sapiens
ttcccgtctttcacttgcgctcccggggagccgcgcgggatcccccgccggcaggggcagcgcccctggggaccgagagccgctcacgccccgacttccccacggaacccctcttctccgcg

SEQ ID NO: 2000 - DNA, 122 bp, Homo sapiens
agcccagaaatgaagaaatctcgcatttcttcaaggcggagcaggtctctctcttcaccacggtccaaagcaaaatctcgcttgtctttgaggcgcagcctttcagggtcttccccatgccc

SEQ ID NO: 2001 - DNA, 122 bp, Homo sapiens
atagaagagcgggaaggggctgaaccagggagagctggggaggtgaagaactgcaaaaagcgtgaagaagggttggtccttgtggaatctcggtttgccaactggcggtcatagaagtgagg

SEQ ID NO: 2002 - DNA, 122 bp, Homo sapiens
caagcaatcctcctgccacagcctcccaaagtagtactttggtaatacaggcatgagccacgtcacccaggctacacatttctttctataaaatatctctggaaggatacgttagaaaacag

SEQ ID NO: 2003 - DNA, 122 bp, Homo sapiens
gaggctccagccttgccgcccttcttcctgatcgcgcaagcgagagctggttcgcagcaacgcagtgtcttttgtagactgatattctggtcctttttattaatgggaaggagggaatttag

SEQ ID NO: 2004 - DNA, 122 bp, Homo sapiens
taaaaaataattcattgcctttccaccttccagcatagtacttcaagttgagatgctcaccggggcctcctaacccctctctttggatgcaacccctttcttcctaggtggtccatcctaca

SEQ ID NO: 2005 - DNA, 122 bp, Homo sapiens
ctcgatctcctgacctcgtgatccgcccacctcggcctcccaaagtgctgggattacaggcgtaaaccaccgcgcccggcctttttgagacggagtctagctctgtcgcccaggctggagtg

SEQ ID NO: 2006 - DNA, 122 bp, Homo sapiens
cctgggtaccgagcatgggcgctgcgtcagtgcgcgctggcgcaaggttggtggaagtcgcgttgtgcaggttcgtgcccggctggcgcggcgtgggtaagctgcctgtcggctacggttcc

SEQ ID NO: 2007 - DNA, 122 bp, Homo sapiens
caatcaattcattggctggttctcatccctggctgcagatcacagaccccggggagccttcgccccaccccagggccattgcaacaatccctccggggtggggcatgggcttgaagccacca

SEQ ID NO: 2008 - DNA, 122 bp, Homo sapiens
aagtaggtcagcctcttctgttaggtagatgggctgggctgcaggcgtgcgcctaaggctcgtgggaacatggtggttgcagccattctggtctacccacagagggtgctgctgcctcacag

SEQ ID NO: 2009 - DNA, 122 bp, Homo sapiens
cagggccaatgagaaatgcagccctgccacattcacaaagtgcacactcacgctgacacacgctcacgctcacacgctcacgctcacactcacgctcacactcacacgctcacactcacact

SEQ ID NO: 2010 - DNA, 122 bp, Homo sapiens
cgcggcggtcgcggggcttcgcagcgccccctcccgccgccgccccgcaactcaccccggcggccccgaagtctcagcctcggccacccgatccccgcctccccgcgtcgggccccaagtca

SEQ ID NO: 2011 - DNA, 122 bp, Homo sapiens
gttgattagtgccccccccttccccccgcccgccccgaaaagcgacccctagtggtgcaccggtgcggaccagaaaattgcacgctttcttgaaagaggcatttaccgagcgcccaatgtat

SEQ ID NO: 2012 - DNA, 122 bp, Homo sapiens
ggaaattggaaggtttggatagaaaggaaagcacagtttacatacatatgcatactgtgacggatcagggcaaggactccagtgtcaccatcttcctgtatctgtagaccttgtacaatgca

SEQ ID NO: 2013 - DNA, 122 bp, Homo sapiens
cctttccggccctgcccacccacctggagtccagaaagatgagcttcatgtccaggctggcgcggaacataaacatattgctgtgtagcttgatctccgtgacggcgctgggaggcagcgag

SEQ ID NO: 2014 - DNA, 122 bp, Homo sapiens
gcatctggttgaggtttagacagaagagaagcagttaacagacaccgactgtatacacagcggtctgccggcacactgcaaaaaagccgatacgccttacaggctcaggaagttgactaacc

SEQ ID NO: 2015 - DNA, 122 bp, Homo sapiens
aggcctcacccctcagaaactggcccagggacggacatacaacgggtctggaacaaagaccgtctggatgaaaccctgggaggctctggatgctctcccgtagggaagggctcgagggctaa

SEQ ID NO: 2016 - DNA, 122 bp, Homo sapiens
attagagtctcaacccccaataaatataggactggagatgtctgaggctcattctgccctcgagcccaccgggaacgaaagagaagctctatctcccctccaggagcccagctatgaactcc

SEQ ID NO: 2017 - DNA, 122 bp, Homo sapiens
cttccatgtgagccaggtgattcccaggaggatcatttacagatagagcggctacaccagcggcgccgcctcctagccgggttctgcaagctgttgctttatggggtgctggagatggatgc

SEQ ID NO: 2018 - DNA, 122 bp, Homo sapiens
cctccttctacctctcgaatggggtgacttctggtctttccttaacccacacctgttcaccgcccatagatgttttctaatgcggtggcatccttgcatttacgcattgaagcacatatttt

SEQ ID NO: 2019 - DNA, 122 bp, Homo sapiens
tcagctatgtgcaggacaagaggaaggtggcgaagcccgggactccagcgggcttttcctcgctctgccagaggataggactgtctatagtctgggagcctgactgtggtctcctccagccg

SEQ ID NO: 2020 - DNA, 122 bp, Homo sapiens
tggccctggcacctccacgccccgtcccgaggctccgtgcctctgggctctgagcgcacgcgttgtgtgtagtggctgcaggtggagcagctgcatgaacacagagtgcaccaggagaagtt

SEQ ID NO: 2021 - DNA, 122 bp, Homo sapiens
taaccacaaagagtcctgatgggatttggagttacactgcctgggttcgaatctcaattccgccactgccattcgcgcgttttctattgccagccaccttactctcccctggcctcagtttc

SEQ ID NO: 2022 - DNA, 122 bp, Homo sapiens
agaaataaggggtgacccagtccccaaagagtccaccccccagggtgaagacccccgctccgcaaggatcacaggtgggtgttccaaggcatccacactctggttttgttttttttttttgt

SEQ ID NO: 2023 - DNA, 122 bp, Homo sapiens
cacccccaactgtcccttcatgatcatcctttctcgctgcacatcgaggtccctacctggcgatctccttggcgaccttctcgttggggcaagtaacaaaggctgcagagaccgagcccgga

SEQ ID NO: 2024 - DNA, 122 bp, Homo sapiens
gccttggctaccttcatgtccttctaagaacggggccaccgcgtttggggcttctcctcccgcagaagggaactcaaaccctgtctctttccccaggtctcggaggaggctttggatacgtg

SEQ ID NO: 2025 - DNA, 122 bp, Homo sapiens
cgcgccgccacgcctgactggttttcgtatttttttggtggagacggggtttcgctgagtcggccagcctggtctccagctcctgaccatgagtgatccgccagcctcagcctcctgaggtg

SEQ ID NO: 2026 - DNA, 122 bp, Homo sapiens
atcctcttgggtctcagggtgtgaggattcataataagtacacgtccatccagtacatggcgaagaccattgtaagccacccctggaaacacatacaagacagatgggcacgcagttcacag

SEQ ID NO: 2027 - DNA, 122 bp, Homo sapiens
accgggaaagtccccgggtcgccccgcacccatgcgctctcttcccaacccttgcggtcacgttcagcaagtgtgagcacctactgtctgcagggggccagaagaactcgcatctgctctcg

SEQ ID NO: 2028 - DNA, 122 bp, Homo sapiens
gccacttacccgctgggcagcctctgcaacaaaacagaccaatcttcttgtggaagtcaccggcacagtcacacctggggctacgagtgccgccctgggcccgggcccccagcagcaccagg

SEQ ID NO: 2029 - DNA, 122 bp, Homo sapiens
gagccaccgcacctggccatattacgtttaattttataacctaaaaatgtgtgggccaggcgcagtggctcacgcctgtaatcccaacactttgggaggccgaggcgggcagatcatctgag

SEQ ID NO: 2030 - DNA, 122 bp, Homo sapiens
gacccccgggcgacgcgcggggccagggagcgctacgatggaggcgctaatggcccggggcgcgctcacgggtcccctgagggcgctctgtctcctgggctgcctgctgagccacgccgccg

SEQ ID NO: 2031 - DNA, 122 bp, Homo sapiens
aataaagaacatgttgacctctctgggttgaggcccagtttaagtcagattatataaccccgcagcatcaggaactccccagcaatgtggctctcagctgcctgaaaaaacgtgactgcatt

SEQ ID NO: 2032 - DNA, 122 bp, Homo sapiens
gaaacagaactgcctcatgcacagataacaatgcctgacacccattacactttacatgcacgttcacatctgccttttggataaagggcaagaagaaaggaacatttaccattgagaaagaa

SEQ ID NO: 2033 - DNA, 122 bp, Homo sapiens
tcctcctccacctgggaactcggtggaagatgcggagtgcgcgggtggaaggcttagccccggtgctcattggaaggtgcttatgagcagtccctactctgggcttcatagaccctcaccct

SEQ ID NO: 2034 - DNA, 122 bp, Homo sapiens
cgcgcgcgcgtgcgagagtgcccgggcgccccgcctggccccgcctactggtcttgggggcgagtcctgagatcgctccgcccatccgcgggccacacctcccctgcatcggctgggggctg

SEQ ID NO: 2035 - DNA, 122 bp, Homo sapiens
gggcgcctctccaagggagctgattcattgtctggtaggccctctgcagggcccagctggcggcccagtggcaaagcgccgttggtcctccgtttgaaaaccatgatcgcggttagtggaaa

SEQ ID NO: 2036 - DNA, 122 bp, Homo sapiens
acaaatttgatagagaaggcaacgtaagtttctgagtagtagcagagagggcggagaacgcgacattttccgattaagtttgcagtactgccgcaatatgggattaggtgaggattagcgct

SEQ ID NO: 2037 - DNA, 122 bp, Homo sapiens
agatggtgatgatgatgatgaccatggtggtggtggtggtggttggtggtggtctcataacgataaccaaacaagcaaagagtacaagggatgtgcgaataggtacagcccacattaagtaa

SEQ ID NO: 2038 - DNA, 122 bp, Homo sapiens
ggattctctctgagcctgcagagaaatgcaagctttatctgcatgtgctgcttctccgtccgtccttggatgatgatggatgctatggggcttaagggtaggattttacatccatctccact

SEQ ID NO: 2039 - DNA, 122 bp, Homo sapiens
accgaccctggttgcgatacaccgtgagactccgctgtagggccgctgcagaaggggcaccgggaagagccccatacccagcctctaggctcttcttacggtatgaacatttgtggagtaaa

SEQ ID NO: 2040 - DNA, 122 bp, Homo sapiens
acctcaggtgatccgcctgccttgaactctcaaagcattgggcgttacaggcgtgagccacgtgcccagcctcagagaagacaatctttccacagatcagaagggttgggggtgagggtgat

SEQ ID NO: 2041 - DNA, 122 bp, Homo sapiens
ggttgagctgtttctcatcgtctcagtggcatttttcctagggctgttccgagagaacagcggggattgaagggacggaggcaaggagatgcacaatccgggcagctctcgctcttctcgga

SEQ ID NO: 2042 - DNA, 122 bp, Homo sapiens
aggtaggcggggccaagtcggccggtgggtgggcgcggcctgttgagaacgcagtggggccgcgagcggcaaaaaacaggcttgggaaaggcgaagccagcaaagtcgaagacaccagagtg

SEQ ID NO: 2043 - DNA, 122 bp, Homo sapiens
cacgttcctgtcactgctctgtggcaggaccctgggtgactgacacaccctcagtcccctcggggtcagagtgagagtggttgagagcccggggtcgcttcagcccttggcttcccgagctt

SEQ ID NO: 2044 - DNA, 122 bp, Homo sapiens
gccgcccccggaggctacttcgaggtaagcggcggcagcgggcaggggtcgatggcggtacgcggttgccgttccctcgcgccttggcggagctcggcctcccgctgtcggccccgggcctg

SEQ ID NO: 2045 - DNA, 122 bp, Homo sapiens
cggagggatgggcaatctcaacttctgattctgctgataccgcttctgcaatgttccatgcggtgtgaggctgaagggggccatcaagggatgggagcggggtgcagcttgccctgagtaac

SEQ ID NO: 2046 - DNA, 122 bp, Homo sapiens
ctgactctgattggttggacaatgttttccaggcagtataaaaacgctggtgtctctccgcggaaactccgagaggagcagaggtctgtagaggtagagacgtaggcttcggatcttttaga

SEQ ID NO: 2047 - DNA, 122 bp, Homo sapiens
agaacccctggcactgtgactgcagcctcacctatctgcgcctctggctggaggaccgcacgcccgaggccctgctgcaggtccgctgtgccagccccagcctcgctgcccatggcccgctg

SEQ ID NO: 2048 - DNA, 122 bp, Homo sapiens
aagaaaagtaatggcaaaaaccgcaattacttttgcaccagtgtaataattagcatcttccgctaatctttttctagaaatttgagagagacttcagctgagttaaattcatgtctctgaca

SEQ ID NO: 2049 - DNA, 122 bp, Homo sapiens
taaactcagggccaacatagacatgctccgtaggttggatgacacggagccactttcccgcgagtggctcaaagctactcgccaagcagctcctgcagcagtgccctcagccagcccctcca

SEQ ID NO: 2050 - DNA, 122 bp, Homo sapiens
agctgcaggtggtgaaaatggaaatgaagggttaaaaggaaaccttttgaaaatctgcaccgccagccatccccgaaatcgctgcctctggggaactggagagcacagcacattcctgtcag

SEQ ID NO: 2051 - DNA, 122 bp, Homo sapiens
gagttctcatcctcttagcggcatccccatggcccagggtgcacgggggaattagcctctcgcggagtcatcacgcatcgactgaattccctggtgaaaactgagttagccagttgttccta

SEQ ID NO: 2052 - DNA, 122 bp, Homo sapiens
gctaagaatagtctgctttaaatacccatcgctccttggatctgctctcaggatggtcaacggcacctttccaggacccccttggggagcagctactccatgaacccaactcatgcatctcc

SEQ ID NO: 2053 - DNA, 122 bp, Homo sapiens
gctcagacccccgcgggggcccaaatctcagttcctaccccagattgggagcagcctagtcgccgcacctgccacgtcgccctctgctggccgagggctgcccagcggccgcctcccatccc

SEQ ID NO: 2054 - DNA, 122 bp, Homo sapiens
cctcagttccctgcaaagtgaggaagctagactaagtaatcgttaggctcccttccagaccgaccaatctgatggtattagatgcaattgctcctgaattagggcatgaaatgaattcagct

SEQ ID NO: 2055 - DNA, 122 bp, Homo sapiens
tactttctccctttttcatgggatccctaagtgctcttcctggatgctgaatgcccatcccgtaaatgaaaaagctagttaatgatattgtacataagtaatgttttaactgtagattgtgt

SEQ ID NO: 2056 - DNA, 122 bp, Homo sapiens
atgaggacccggctgagaaaactcttctgtgccccagtgaacaaatgctgtagtccagtgcgtgtcgtgtttgtctgcagtcagctgagctaaaaagctgttgatcactgttgttttttgaa

SEQ ID NO: 2057 - DNA, 122 bp, Homo sapiens
gttagggacagtatcacgggggaggtctacgccccctgcgacattgggagtcatatcatccgctcccacccaggatattaggaaaaaagatgaccgaaggggtgtatacccactgcgatatt

SEQ ID NO: 2058 - DNA, 122 bp, Homo sapiens
aatggaaaatgaatattaacagcacctattcatggagttatgtagggttgggggaagacacgtgctgttccacacaaatcgagtgctcagtaaatataagccacttctgccaaccagtacag

SEQ ID NO: 2059 - DNA, 122 bp, Homo sapiens
ggcctcatgaggatggtcgattccctcattcgttattcacgatttattagggatggcggccgcgtctgtccctccagagagctcgattatccatccggccagcagcgccattaagcgcactg

SEQ ID NO: 2060 - DNA, 122 bp, Homo sapiens
ccaccgagggagggagaggcggccgggaccaaggaatggggcctcttggttccccattaacgcacgctgaagaaatctgctgcgctcctgacggccgctcaccgggttcgagccccgtcctc

SEQ ID NO: 2061 - DNA, 122 bp, Homo sapiens
aaaattagctgggtgtggtagcgcacacttgtaaccccagctacttggaaggctgaggcacgagagtcacttgaaccccagaaggtggagattgctgtgagctgagatcgtgccactgcact

SEQ ID NO: 2062 - DNA, 122 bp, Homo sapiens
cagtctgtccgccccggagccccctgggccccacctcctcgtcccgctctcggaggcctgcggcttcacggccagacagaaccaggacagaacaaccccagcccgttaccgctacctggcgc

SEQ ID NO: 2063 - DNA, 122 bp, Homo sapiens
atggggtcttggcttctgtgacattcccttccccatgtcagaagcacagcgggggccggacgtggtggctcacgcctgtaatctcagcactttgggaggctgaggtgggcagatcacctgag

SEQ ID NO: 2064 - DNA, 122 bp, Homo sapiens
ctcatttttaaaacggggaagacaccattgctcagaattgtgaagattaagctagaaggccgggcaggatggctcacttctataattccagcactgtgggaggctgaggtgggaggattgct

SEQ ID NO: 2065 - DNA, 122 bp, Homo sapiens
ggctgcacagaagagctggaatacagtgcggggaccttggtgttgctttaacatgagcctcgtgttgaatggaatacaaaccaagcagttttgctatgggataatttcttttttgagacaga

SEQ ID NO: 2066 - DNA, 122 bp, Homo sapiens
ctcctctcccttcgtccgagccgctccttagcgcccagttgcgcaaatcaaattctttcccgttctatttactcctgatcaagaggggctgtcagtccaaccctccagctgtaggctcgtgc

SEQ ID NO: 2067 - DNA, 122 bp, Homo sapiens
tggcaactctgaagcctcaagactgagtgggtcaccataagcagcaggaagttgaggtgccgggatggggtgtgatgcttccactcctccctggaactttgcaatacttccctagccaggcc

SEQ ID NO: 2068 - DNA, 122 bp, Homo sapiens
cacctgctgatcgctctccggagtctcgagggggcacccccggagggaccgcgcgggcgccggcgcccctgaactctcccgctcaccgcggcagacccgcccagcgcaactttaacttgatt

SEQ ID NO: 2069 - DNA, 122 bp, Homo sapiens
gactgtcaccggagaccccctcggaggatggcgccccgtcccagaccgctcggaggccgtcgtaaaccccctacacgaacaggcgggcgcgcccccaatccgcccgtccccaccccgtactc

SEQ ID NO: 2070 - DNA, 122 bp, Homo sapiens
aaggcctgattgtgctgaatccttctctttggtcattattcagactggttcccagcatgccgcagtccagaggaaaaggtccaagttctgtttaaaaatcagagactaaagagcttactcag

SEQ ID NO: 2071 - DNA, 122 bp, Homo sapiens
gggagctggcccaggcttacaagagcgacttgtgctggctgagggaacggcaggtccaggcgggcagcgctgtccggcgcctacctttctgcggtgccggaatctgctcgtctgcaaccgtc

SEQ ID NO: 2072 - DNA, 122 bp, Homo sapiens
tgccgggagcgccccacgcctagccccaccgcgctcccggcgcggcctccgccctggtcccgccccccgggagtcgcccgccctgacatcatcccggttatgtaagagccgcggcttccggt

SEQ ID NO: 2073 - DNA, 122 bp, Homo sapiens
tgataattgttgcctctccctttcccagtcattacactactttatttttgtgtgtcattgcgttggccacaatatccagaaaaaaatgtcaaatgattgcagtgccactgggatttattcct

SEQ ID NO: 2074 - DNA, 122 bp, Homo sapiens
cctggtttcccacaggctgggctgcagccacttccctagagcaggcactctcagggttagcgataccccaacctggtgggggtcccaggatcccacccccacccctcactctcccaacctgc

SEQ ID NO: 2075 - DNA, 122 bp, Homo sapiens
ccaccccatcaagctgactgtcattcgcttgttctttccaggacacacttacagaagagacgaggcctggttattcttccaacacactcccctcagccgcgcacagcgttactggctatgtg

SEQ ID NO: 2076 - DNA, 122 bp, Homo sapiens
tactccagtgtcccctgggtctccgaaactcgcttagggtaggcttatttccccggaccccgggaacccccttctgcaggaatgtggccgtctcccctgggaactgggctgaaatggtatat

SEQ ID NO: 2077 - DNA, 122 bp, Homo sapiens
cctcccaacgctgtcaagactgttccctcagtccggcactgagacgcacactgtgctgcgcgggagggtttgaatcgcacacactgctcactgcacaggagggtttgatgtgcactgctcgc

SEQ ID NO: 2078 - DNA, 122 bp, Homo sapiens
tgcatgaggtgggcatgactgtgctacgagcataactaagaacgtcttcatcttagtgagcgggtgttttatgagagtgtgcactaagatgagaaatcatccacagcatccactaaaagagg

SEQ ID NO: 2079 - DNA, 122 bp, Homo sapiens
gtcctcgtccaagtctgggccaagagcagcggcccagggggcggggccggccagagggagcggggagaggctgaggggcggtgccagcgccggaccctgccattggctggagattacaggag

SEQ ID NO: 2080 - DNA, 122 bp, Homo sapiens
ctgctcgattctgatcctcactcattccaggcctcctcatctggttgaatcctcaggatccggcttcacttccaaggccaaagggtgttacttgtccattgtcctggctacagtggtcttgt

SEQ ID NO: 2081 - DNA, 122 bp, Homo sapiens
agtcaaggaagtactgtttatggccaccagcagctgcaacttgcccatacagtcctccagcgccgcctccgggtggtctcccagtcgcaagtccacgggccgcgagacccgcagcatgcggt

SEQ ID NO: 2082 - DNA, 122 bp, Homo sapiens
ccgccgtcaccatccaggggcatagggaaccgaagtctggtgctgtgtgatcgtggagggcggcgtgtgagtgtggccctgagcgtgcgagtgtgcgcgcgcgtgtgtggatgtgtttcctc

SEQ ID NO: 2083 - DNA, 122 bp, Homo sapiens
ttaatctctgctaggagtttggcaagaggctattcactgcctttagacaattagacatctcgagggacagacatttttttggagcctctagttcccagctgcatgtgggtgggccttttatt

SEQ ID NO: 2084 - DNA, 122 bp, Homo sapiens
atgaagctcctttcttacctttgttgacctacagtggctaacaaaacccagttgcagacccgggaggagcaagaagcactttccttttatgtctgcagccctaagtaatcctcctcccagag

SEQ ID NO: 2085 - DNA, 122 bp, Homo sapiens
ggggttgtccacagcccacagctgacatggccaagttcctcttctgtgggaaatcaattgcgggggagagaaaacaggaaaattccttttaaaatgtctcaaatctcctgggttgtgttgtt

SEQ ID NO: 2086 - DNA, 122 bp, Homo sapiens
ccgtagtgggtagggggtgggggtgggagtgttttgggggattgggtcctgcctgggccccgcgcttaggcttggcaccagcaggttgctcttacgcctcccataggaaagaaggccctctg

SEQ ID NO: 2087 - DNA, 122 bp, Homo sapiens
gggaaggggctgtgtatttggtgacaagcgggaggcgatgggggtggaggggaatggggacgggaaataggttctgtgtgctctccgggggtattgtgtcaggagatgcaggctggctacca

SEQ ID NO: 2088 - DNA, 122 bp, Homo sapiens
tcagggttttcctgcttgttcttgcttgattgttcctctgagttgactttatattcaactcgaagagagacctttaaaggtctaaaaatggtattttttatctacagataccattttttccc

SEQ ID NO: 2089 - DNA, 122 bp, Homo sapiens
aggggaggagcagcaaggaaagcaccattagcaaaggttgctgtgtggggtcctgctacacggctgttattaaggctaatacctgttccccttacagtgagatctttgttttgccttcacga

SEQ ID NO: 2090 - DNA, 122 bp, Homo sapiens
atgtacatctattatgtgtaataaaaataaatcaaaactttttaaagaataaaaagcggtcgcacatctaaacagggcttatggagtctgaggctttctctgggtgtttattgcatgttgga

SEQ ID NO: 2091 - DNA, 122 bp, Homo sapiens
gggcctcagctgggagtggctcggtctggcccagggcggccagctgccttcgagcctcttcggcctcacgctccagcagtgcccgggcctgctcactctcccggagccgggcctccaggctg

SEQ ID NO: 2092 - DNA, 122 bp, Homo sapiens
aacagcatagaacaagttaacacaaaaacactccttattttttccactgtttatctcatgcggtgcattactgctatgcattaatcataagctgattggcagtcacatgagtattgcatact

SEQ ID NO: 2093 - DNA, 122 bp, Homo sapiens
gagccgctctgaggtgcggagaggctgctgagtggcggaactattcatgccctttctggccggcctcctcgccctcggggctggggtccagggactgaatgctcctctggaagctcaccacc

SEQ ID NO: 2094 - DNA, 122 bp, Homo sapiens
catgaactgcatccgccaggcccaccatgtggccctgctgcgcagtggtggaggggccgacgccctcgtggtgctgctcagtggcctcgtgctgctggtcaccggcctgaccctggccgggc

SEQ ID NO: 2095 - DNA, 122 bp, Homo sapiens
cacccggaaggggcgccctggagacgcctgtgtccctcgagactccactggcagcgaattcgttactgtggtgaccgctgctcaggtccgttattcctccactacagcccgccagcaacggc

SEQ ID NO: 2096 - DNA, 122 bp, Homo sapiens
cagctattttaagtgtgtggtttgctttttgacacatacctacgactgtatacccacccccgtcgcccctgaacccccgagctcctgtgcaccccctgcacccctccggctgacacatacct

SEQ ID NO: 2097 - DNA, 122 bp, Homo sapiens
accccctcatgaataatcatgtaagactctctagcgccagtccgatccttagaagcagcccgactggaactctctctctcagagtataatgtctattctgcacctaacttacaaaatattct

SEQ ID NO: 2098 - DNA, 122 bp, Homo sapiens
tcacagttctggggctgcaagttggagatccaggtgtgggtagggcctgctccctccagacgttcttggggatcgtcccgccgcctctcccagctcccaggggctcggaattcctggtgttt

SEQ ID NO: 2099 - DNA, 122 bp, Homo sapiens
ctcatgcccaccgctcacccggagtccagacccaagcaccatgctgcgtagttcctaatacggcaaaactatccagcatttttggtgaaattggctggaatgcttcacttagtccgtttttc

SEQ ID NO: 2100 - DNA, 122 bp, Homo sapiens
ggggtggcctagatttatcaacacctgaggagcaaactgacacccacagaggcatgttcccgctcctgggtgatgcccaggcccagagtgtgctccacaaacacagagacttaaactgagca

SEQ ID NO: 2101 - DNA, 122 bp, Homo sapiens
tttacagatgaggaaactgaggttcaggcaactcaagcaacttgttcaaggttacacagccgagaaaacattgagaccctaggctcaggctgtagccactaccctgcctctgcagcatgaag

SEQ ID NO: 2102 - DNA, 122 bp, Homo sapiens
gttgacactccaagtcgacctggtggtggtcactgtgccctggcaggttttattactgaacgtggaatgagcccagcaaacctgaccacttgggtgcgctgtgcattcctgttgctgggtgg

SEQ ID NO: 2103 - DNA, 122 bp, Homo sapiens
ttcgtcttcatgacattcccctactagagaagcatgggtccacacaaagcccccaaaattcgaagtatgggatttggccccgagggttgcctctgctgcccaggaggaattgggattctatc

SEQ ID NO: 2104 - DNA, 122 bp, Homo sapiens
ggcgtaggaccctccgagccaggtgtgggatatactctcgtggtgcgccgttttttaagccggtctgaaaagtgcaatattcgggtgggagtgacccgattttccaggtgcgtccatcaccc

SEQ ID NO: 2105 - DNA, 122 bp, Homo sapiens
gtggctgccgcttctgtgtgtccccggccaccctggcgcccagagcccccacctcgcccccgcccccggcccggcccccgcctccagccgcccgcccacagccaccgaagggaaaccccacc

SEQ ID NO: 2106 - DNA, 122 bp, Homo sapiens
cagataaggcggcagagcacggggcgaggcgttgctaggagaagttgctagggcggggctcgagggaccggctataaaaggctggcgctgggttaggtttcgagcttcctggccgtaagcga

SEQ ID NO: 2107 - DNA, 122 bp, Homo sapiens
gagccttaactttcttccttgtggcatctgcatcactcagagtccttttataaatagatacgctgtttaacaaagacaaggtagttgttaaaggcccagtagggatcactttacacagggaa

SEQ ID NO: 2108 - DNA, 122 bp, Homo sapiens
gattgcaagattttcctgatccatgcaattactttcgctgccctctacgaggctgaaactcgccctcaggatgtgggacgtctggactcttctctccgtccccttgtagccccccactcccc

SEQ ID NO: 2109 - DNA, 122 bp, Homo sapiens
ccaggacagcccgagacttcacaccccagccaggggccagcagaggcccctgcagaccctcgagatgctagcggtgaagcccagactcccagggacgatgagagaattccagaaggagctag

SEQ ID NO: 2110 - DNA, 122 bp, Homo sapiens
agtgggcggtgtccaggctgcagaggctccatcgctgtcaccaggcccagaggctgtggacggctgcgagtggcccgtgcggcttttagaagcacagacaggagatggggtggacgaggcgg

SEQ ID NO: 2111 - DNA, 122 bp, Homo sapiens
acttgtagttcttgtccctctaacagacggcccgggtagctccagaaaaactacaaatcccggaagaaaccgcatccaggcgacgccagcccggcttgttgacggagcccaaggcgcctgcg

SEQ ID NO: 2112 - DNA, 122 bp, Homo sapiens
agtccttggcgaactgagcagccgcctagtatatctctgaagcctcctgcggagacttcacggcttgtcccaggagcttctacaacagcctggcattgagagtagagttgtaatattttccg

SEQ ID NO: 2113 - DNA, 122 bp, Homo sapiens
tcaagacaaaaaaaagtaatatttttacaccgtattatcatcaataaaccagacccaggccgctaaattccatcagagatgaccagtcttaggtagtgaaacaaaggatacgtttccaaaag

SEQ ID NO: 2114 - DNA, 122 bp, Homo sapiens
cgcatgcaaatctgccgggcgccggggcggggagcaggaagccggggcgggctgggtctccgcgcccaggaaagccccgcgcggcgcgggccagggaagggccacccaggggtcccccactt

SEQ ID NO: 2115 - DNA, 122 bp, Homo sapiens
ctggatggactgccagctggcaggcaccgacggagcagcagccacctttgcttgtcttctcgtgatcatgtacggcgccagcgtggtgctggccctgcgtagctaccgagaacagaagcgct

SEQ ID NO: 2116 - DNA, 122 bp, Homo sapiens
gcggtgggaggggcggggcctcactgggcgatcgtagtggacgagaacctagactggaaccggtccgaagaaaaaaaggcagccctcattgggctgtcgcctggaacaggagaccaggccgg

SEQ ID NO: 2117 - DNA, 122 bp, Homo sapiens
gcctctccatcgctccctccgactcctccaagctctgggcggaacttgattctgcctcaccggcttcaggcatcccaggacctgagtgctgttagaataaagggtatgaggcaccggtggca

SEQ ID NO: 2118 - DNA, 122 bp, Homo sapiens
attatctttgtacagcataaacctgaacatagggatctctaaggacccttccagatttaacgctccaggataccatggttcaagtatcctgttaataacatcgctctcacaaagacagtcct

SEQ ID NO: 2119 - DNA, 122 bp, Homo sapiens
tgtctaggggaagggtgtggcaggcccacgggatgccatgccctagaacaacggcctgagcgcttgtggaattaaaatgggagatgtggggccgaggtgggcgaattgggatccctccaggt

SEQ ID NO: 2120 - DNA, 122 bp, Homo sapiens
gggtcttttcaatgtgcccagcagagcacattgaagatcataaaacagtctccagagcttcgttctgtgtgtatttggcaagcacaaaagagctgaccgctatgcgtggaagaccagttctt

SEQ ID NO: 2121 - DNA, 122 bp, Homo sapiens
gaggtccctgcggcctttcgcagtgcactgtgtacctggttaatcgagaatggagaatggcgatgacttttaccaagcatactgcctgcaaacaaatggttaacaagccacatcctgcacag

SEQ ID NO: 2122 - DNA, 122 bp, Homo sapiens
tgctggcctctcacgctactggggttggaggaggaagagtgagacctcgcacgtgctgagcggatggagtgaacctgggcttcccagcagcaatgcgccatgggtcccccgagcggggcccg

SEQ ID NO: 2123 - DNA, 122 bp, Homo sapiens
atagctgttccagtgaaactttctttaaagataagcaataccagttacatttcttttacccgcatcacctgcagtgattgggaggatgtggtgagattcctatgctggtcccacgtggggtt

SEQ ID NO: 2124 - DNA, 122 bp, Homo sapiens
ccggctgcggagtcgatacctgggtgagcgggggccccggggcggaggcgctgaggtcgccgcctagagtgggggagggggcacgctgccgggtctgttggaggtgggacggcgtctcggtg

SEQ ID NO: 2125 - DNA, 122 bp, Homo sapiens
cacagttcagaccatcacaggcagtgatcccagggaagccatctttgacaccctttgcaccgatgacagctctgaagaggcaaagacactcacaatggacatattgacattggctcacacct

SEQ ID NO: 2126 - DNA, 122 bp, Homo sapiens
gaatccgaaaagaaaatatgcgttcctgagagacccgccacacttccgatctggaagttccgcggggacccagcccccgggcccccgccccctccccatctcggccgccaagtctggttgcg

SEQ ID NO: 2127 - DNA, 122 bp, Homo sapiens
cagggtgaggccacccacagagccatttaattatccctgagtgcaaggccatgccgcaggcgcatgaaacaggaaggaaaaacaagacctgcagctgcactatgatgtcagcgatggggcag

SEQ ID NO: 2128 - DNA, 122 bp, Homo sapiens
tggagttcatggtgagtttcatttcatgtttcttgccacaagtgttaccatggagttagacgagactagtgttagttgatcacaaagttttgggtgacttggctttgaattctgagaagaaa

SEQ ID NO: 2129 - DNA, 122 bp, Homo sapiens
tctttgacctcccacgcccacggctggggctgccgaaagtgaagaaactagatttgcagacgccactgctagttggttatgaagctccgggcaacagcgtaaaataaactgccccgacctta

SEQ ID NO: 2130 - DNA, 122 bp, Homo sapiens
tactcgggaggctgaggcatgagaatcgcttgagcccaggagacagaggttgcagtgagccgagatcgcaccactgtactccagaattggtgacagagtgagactcttaaaaaaaaacaaaa

SEQ ID NO: 2131 - DNA, 122 bp, Homo sapiens
tccccctcgcccacataggctccggtgggttctcagggcaaggcctggctccctcctctccgacttcaggtacaggtgagtgtggagggaactgaaagaggaaaggtgaagtgctgtttggc

SEQ ID NO: 2132 - DNA, 122 bp, Homo sapiens
tagcctgcagtgagtcctcaatgcagctgctttggctcacccggctgtcggctcagacgccgacccatttcaatcatcaggagaggagaagacacacagggccgccccaaggaccccgtcac

SEQ ID NO: 2133 - DNA, 122 bp, Homo sapiens
ccgattggccaacactccctgatcacgcacggccttcctgcgcccacccacgcgtgggagcgccaatgaaatgactcagtgaccatctacaacaaatcagcaagaagcagggctcgcagctg

SEQ ID NO: 2134 - DNA, 122 bp, Homo sapiens
gggtcacggcagcagggcagcggggcaccgggaagtgggcgcagggccgggaagaccggccggcgtggggaaggctgctgtgggttctacagtgcattgtcccgggtgaggtggcggccgcc

SEQ ID NO: 2135 - DNA, 122 bp, Homo sapiens
ctcctcctctgctgacatgtcactaggattggcaccacagtccaccttgccttacttccacgccccccgctttgtatagcaatatgttaatatgcttaattcaattccagaaaataccacta

SEQ ID NO: 2136 - DNA, 122 bp, Homo sapiens
agaaaagaaagagacacagagacaaagtatagagaaagaaaagtgggcccaagggaccggcgctcagcatgtggaggacccgcgcccgccggcaaaggtctctgagttccctcagtatttat

SEQ ID NO: 2137 - DNA, 122 bp, Homo sapiens
actaagcatatggaaggggcccaagagctatttttgaatgaaacatcaacgtacttcacacgtgcaaagcatgatgataatgatgacagtgatactttaaaggtaaactgcaggctggggca

SEQ ID NO: 2138 - DNA, 122 bp, Homo sapiens
aacccacgcgtgcagagcacaatggattagcagtccatcgccttaaccactcggccacctcgtcccggtaagttactgtttcctgattgctatagggagtaatatcaaggggctgtgacgca

SEQ ID NO: 2139 - DNA, 122 bp, Homo sapiens
atgggccccgccctagaagtctcccggggtgggagcactatcctcaggccagggcggggccgcgcgcccctggacttggccctctctctgccaggtcgcactggccaatcttagccaaagca

SEQ ID NO: 2140 - DNA, 122 bp, Homo sapiens
tctgggcaccctgggaggccccggctccatcccccattccagctctccgcgaggaggggtcgggtttcctgtggcgccttccacgcgcctcctccaggccagctccccacccggccgtgggc

SEQ ID NO: 2141 - DNA, 122 bp, Homo sapiens
gcaacggcagaggagacagaaagaaaagaaactaacaccatatctcagggaaaacttctgcgccgggctgaaagtgaacttagctacagcactgaaggaaatctcctggggctcaggctggt

SEQ ID NO: 2142 - DNA, 122 bp, Homo sapiens
tctcattgccctgtacagcaggtccagtttctttttcgttctcctgatagaaggactgtacgcctaaatattcagcacatatccccaaattgatgttttacctaaattgtttcttaattggc

SEQ ID NO: 2143 - DNA, 122 bp, Homo sapiens
cccgctgggggcggcgggcagcatctgaaagcaggcccccagcagacacaagaccacccccgagggcctcctcagcagccagtatagacagagaccgagcagcaggaaatccattagcgaga

SEQ ID NO: 2144 - DNA, 122 bp, Homo sapiens
tggcattagaaccccttatcaatgtggagatgggcggggaagactaacagagcggaacaacggaagacaaccctgaaggcagctcttccatcaaatgagttctgctttagatttcacaactc

SEQ ID NO: 2145 - DNA, 122 bp, Homo sapiens
tcgctcaacccggtgcgagacctgacttagagattatttctttctccagggccctggacccgtccccgcaaccccccgccccgtctcactggcccgggttccgggctggcctgtggagaacc

SEQ ID NO: 2146 - DNA, 122 bp, Homo sapiens
cgctgcctcctgcagaagcgccgcgggagagctgcggggtcttcctgaggaggtggccctcgcaggaacagctgggttccccgcgaaaagaaaaagacagtgaaaaagaaaactgctttaac

SEQ ID NO: 2147 - DNA, 122 bp, Homo sapiens
acggcagtgcttctcaaactctgcggtgcacacaccaactgggagtgtcattcaaatgcacgttctgattcagcgaggtcaggggagaggcctatgattctgcattcctaacgagctcctgg

SEQ ID NO: 2148 - DNA, 122 bp, Homo sapiens
cactcagggaaccccctccctgtctttaaggctgatttcctcggtgcgttccccgggctgcgtgggccatggcggataacccgcctgaccccttccactcggctgtcggtacccacctgtca

SEQ ID NO: 2149 - DNA, 122 bp, Homo sapiens
gcagtaaccaggggaactgcaaacagtgtagaggccgcttccggttcgagctcccggaaccgccgcctctagggatggacggtgagtgtctgtgggcccctccgggaggtcgggctgttatt

SEQ ID NO: 2150 - DNA, 122 bp, Homo sapiens
accaagccaggaaggtttgcagatgagccaccacagaatagtgactgcaatttctgcctccgctggtacaggcaactttcgaaaaatggttttttaggctgggagtggtggctcatgcctgt

SEQ ID NO: 2151 - DNA, 122 bp, Homo sapiens
aagtgggggaaaagccccttataaaaccatcagattatcctgagaactcatttactgtcacgagaaaagtatggaggtaaccacccccgtgattcagtgacctccccccagttcccttccat

SEQ ID NO: 2152 - DNA, 122 bp, Homo sapiens
tggtgggcacgcttcggtttacctcccccgcgggtgacagcccagtgcttccaccacaaccgatgtcaactctcctagcgcccctccgctcaccggtaaaccaggacagtggaggggcgccc

SEQ ID NO: 2153 - DNA, 122 bp, Homo sapiens
ttcctcaggaaaacatgcagggttcctcacagctgcttgagccaggctctgtccttccttcgcagattgccccgtggctgcctgcctcttcactctcctaaagctttttggctttaccttcc

SEQ ID NO: 2154 - DNA, 122 bp, Homo sapiens
ctctaacagggaggccacagcgacacttttggcctccagtatcaaggtccactcacatcccgcgtccatttgtcctcaaaatctctggattttcccagcgtgcagccagctgagtgagtgac

SEQ ID NO: 2155 - DNA, 122 bp, Homo sapiens
gggccgcggccggagagctcgcccgagagcaccccctcccgctgcgcctctgggcgcacgcgcagccgctgcagcctcccttatttagtccgcgatggcttccctcgcgccccaccgtcctc

SEQ ID NO: 2156 - DNA, 122 bp, Homo sapiens
gttatcaacagtacagacacataatactattctaacttgttcttttgtttttcagagtttcgtaaaaaggagcaacaaattaaacaatgcaagggcacagcaggacaagcactcattaagga

SEQ ID NO: 2157 - DNA, 122 bp, Homo sapiens
aacagactaggatttgtgaatattttaggtaaggtgatgaggaaagcctctccaaggagacgatgtttgaggagagatctaaatgattagaaaagatgggccaaaggggaatgacaaaaggt

SEQ ID NO: 2158 - DNA, 122 bp, Homo sapiens
caggggcaccgcgccctgctgtccctgggttgataatcctgtggtggggggtgaagcacacgtgtgggacctggcagggctctgcctcccctcctggagctcccagcccccgggaacacact

SEQ ID NO: 2159 - DNA, 122 bp, Homo sapiens
agcttgaaggagaaggcagatcttccttcatcacactcccattctcctggagttctgctgcgcagagttgctggtcctgggttgatgaatataacccttccattgagatgcccctgtcctcc

SEQ ID NO: 2160 - DNA, 122 bp, Homo sapiens
cgccccttggagcgcccccgggcccgcggaatcagccgctgagcagcagccgggaaggggcgagggagccccactccatgccaggcactggctcacgcctgctgccctgaccctggaggccc

SEQ ID NO: 2161 - DNA, 122 bp, Homo sapiens
gccatcttgtgaactgccctgtgggtaggtctatgtgtcaaagaacagatgactaatcaacggctagcaaggacttgaggacttctaacagctgtgagtgagcttgaaagtagatcctcccc

SEQ ID NO: 2162 - DNA, 122 bp, Homo sapiens
ggcctgagctcagcctctgcccgtcccttaatcggctgtttgtcaaggcccctgtggtgccgtgaagcaatggccgctcggcctgccagggcgccaggaccctgcgctgtccgccgtggccg

SEQ ID NO: 2163 - DNA, 122 bp, Homo sapiens
tgtgatccgcttatcccccaagtttatcataattcttaagagtgcactgtgttttagatgcgaagcaacatttagcttgaagaaggctctgcttttgtttataattgcttccttagcctact

SEQ ID NO: 2164 - DNA, 122 bp, Homo sapiens
ccctataaatgcccacaacccagcctccccagaggccttgagaaagagagcgatagagtgcgagagcgagtgcccggagcatcctggccctgagacagctgggccagccccgcagggctctg

SEQ ID NO: 2165 - DNA, 122 bp, Homo sapiens
ggtggcaggaaccttgctctccgtcacctttgggtcgccttagattggctgagacactcccgggggacctgctgcctcgactggccatcaaaaccccatcaccatgcccacaagggagcacc

SEQ ID NO: 2166 - DNA, 122 bp, Homo sapiens
acaaagtaaaacaaacagaaacttagacgaggtccccatttcctaatatacagtggaaaacgctgaaattgaatgcccagctaggctatctctttgagttggatacattgtcagagagataa

SEQ ID NO: 2167 - DNA, 122 bp, Homo sapiens
atgggaaaaaaaccgctgaggtttaaagaattgaagaagagctttgtggagtatacagcacgggagccttcaaggataggaaggatagataagaggacatttcaagtatggtaaagctatct

SEQ ID NO: 2168 - DNA, 122 bp, Homo sapiens
ccaggtgaggatcaagctcattataacttgcccagcattacagcgttacagtgaaacctgcggatgtggagattaccataatttcagaacctaccaaggaggcagaatcttctccatcccag

SEQ ID NO: 2169 - DNA, 122 bp, Homo sapiens
ggggtaggttctgttgctgtgggaagggggcggagagaaggaaaccttatttcagccgtgcgctagattagacacagctagaatgtctccattgtgacgggggctgagggacaagggggtgc

SEQ ID NO: 2170 - DNA, 122 bp, Homo sapiens
atgcacacatgggttcacccacatacacgtgcatgcttacatgcacaaacactgcacacacgcacgttgacacttcaaggggtggagggtgctggctctggtcccggctgacccaggcaggg

SEQ ID NO: 2171 - DNA, 122 bp, Homo sapiens
ctgctgcccacgggtggagccaggtccgggtggctcaggaaactgcgaccctttctgggacggtgctgtcccccgagtgagaccatcgagagggcactccgcgtgtagagcattcccgtctc

SEQ ID NO: 2172 - DNA, 122 bp, Homo sapiens
acattgcttctgtaaagtagatgatacttattttcattacccccttctttcttgtgtgtgcgtgcgcgtgccagagtctgtcgcccaggcaggagtgcagtggcacaatcctggctctctgt

SEQ ID NO: 2173 - DNA, 122 bp, Homo sapiens
ccaaggagctcccgcgccacaggaggctggaaggggcaggaaggaccctccctggccccccggagggagtggggccctgagacgcctggatttctgacttctgaccccagaactttgaggga

SEQ ID NO: 2174 - DNA, 122 bp, Homo sapiens
gaccagccaagctgcacaggccccaggtgggcagggtgaagccaggggccagggcaggtgcggtggggccaggaggcagggtctctgcagtggccgccttctgtgctgaccgagtggctggc

SEQ ID NO: 2175 - DNA, 122 bp, Homo sapiens
tcacatggctctcccagggctgtcacaccccaggccaacattcacctgtcctgactatcccggggccaggtatcagacaaaaagggcagcccctatcctgagagccactgaaattactcaag

SEQ ID NO: 2176 - DNA, 122 bp, Homo sapiens
ccccgactcggctgctcatggtgcccgcgggcgcagaaaggctcagggcgcaggtccgcccgcccgccgccgcctggccttgtatccgctgccgcctggttgtgcctcctgggccagatgtt

SEQ ID NO: 2177 - DNA, 122 bp, Homo sapiens
tggttttctgtactgcatctgagagagtaatcattgttctttgaagatgcaataattctacgctactacgggacttagggaaataatttttgaggataggaagcacagaataattaagatga

SEQ ID NO: 2178 - DNA, 122 bp, Homo sapiens
tgcgctggatgggggtggagtgggggattctctcttttcagcctggccctgctggggtgccgaggggcattattaaacccagacgctcaggccaggagttggggccatgcggaaaagattta

SEQ ID NO: 2179 - DNA, 122 bp, Homo sapiens
cagctcctggaggaggccagcccagcaggaaagtctgtgagcaggaccccattcaccctgcggcagacgggcaccgtactggccacgggctgacgccggccacacttcccctccgagggcca

SEQ ID NO: 2180 - DNA, 122 bp, Homo sapiens
cccttgtagtgcaaatggttgggggtggcaggatggaccagtgtggactcctgggactgacgctggcagtgctggcaagacaggtacactgctagggtcaggagcccagagcccaagaagca

SEQ ID NO: 2181 - DNA, 122 bp, Homo sapiens
agataaagaaattgaggctcagaatctgggcaagagtattttgccaaaggtcccgtagcacgtggtgttgtgggatttgaaccaaggctgtctgtgttcagagccagagctctgatccacta

SEQ ID NO: 2182 - DNA, 122 bp, Homo sapiens
gggattgagaaggctgaggctgctagagatgccagctatggaaaaccagtcatttcccaccgaaaggcacaagtgcggtctgcgggcgctgcacgggtctgcccgaaacctcgaccccacgt

SEQ ID NO: 2183 - DNA, 122 bp, Homo sapiens
aatcattcagagctggagggtgggaatttggctaaagccaatggattaattcttttgtcccgcctactgctggtatcctcctgtgtggctttgaggtatagtctcagacacattccttcttg

SEQ ID NO: 2184 - DNA, 122 bp, Homo sapiens
gagataaagttagagaaaatgtcacattataagtggttctgcattccaagttaaagcattcgggctttattctgtggacaattaaaagatttaggaaaatcatatgattagattaggaaaat

SEQ ID NO: 2185 - DNA, 122 bp, Homo sapiens
tgggtctgtcgggagggtgtgctcggtccccctcacctctgtgcaattacagactaggctcgtcccgggtgcagatggctgctgcgaaaagaggttttactctggcgcacaccgtcgcccgg

SEQ ID NO: 2186 - DNA, 122 bp, Homo sapiens
agggcccgcgcgccggcaggacacccccctagacgccggaagagacgcaggactgttgggcgtctacgtccctagcgccgcgccgcccaacgtcactcgcaaaatccccggggggcgggcct

SEQ ID NO: 2187 - DNA, 122 bp, Homo sapiens
gactgtttatcagttgtataggtgaagcatgctaagaaaggtctgtattttggaggtgatcgcatctttctgaaagaacacagcctgcaggactgggatctcagcagcagcttccacaacat

SEQ ID NO: 2188 - DNA, 122 bp, Homo sapiens
cccaactcttctacctatggcagacattgctaatcaatcacaggtcctactcatctcagacggctctcagaatccttctccacatggaaaccaagacaacccctgctgattcctcacagctg

SEQ ID NO: 2189 - DNA, 122 bp, Homo sapiens
caaggagcccaaggaagacgctggctgcatctgcagaattcatcaggcggcttgatgggtcgccgttaaacaaagatgggataaggttacatgtgttttccgtgggagtcggctccgatttc

SEQ ID NO: 2190 - DNA, 122 bp, Homo sapiens
aaccttagccctccgtccggggatccgcccgacaattgcctcgtttcccttctttcctaacggactgggtcggtgcggtcttaccctactcggacaccaagcggcctctgctccccaacttc

SEQ ID NO: 2191 - DNA, 122 bp, Homo sapiens
tgtcacccagagtctgatggacctgagatgagaaaccagaactcctgcccctagttcccccggctttcctcaggctggggagtgagtgcggtgagatagaaagggcaagccctcctgctgtt

SEQ ID NO: 2192 - DNA, 122 bp, Homo sapiens
aaaggtggaggagggaaaaccgtaaaatcaagtgagaggcttggaatagggtggctgcgtcgccggatggatgagtggagagagatttaggagataggatttacagcattagataactggaa

SEQ ID NO: 2193 - DNA, 122 bp, Homo sapiens
aagacttctgtgaccagatgtatgggcatatttccccacacaccaagcaagcaatcagttcggcagtggacatcagctcagagtcgtcaagttcagttcagttctaacactatctacctgag

SEQ ID NO: 2194 - DNA, 122 bp, Homo sapiens
ccgtgccccggcccgggggctctttccgaaggccgaattccgcagatctctgccgggccccgcccctatgggcaaggaccaatggtctctctctgggcggggctgctgttggacggcctggg

SEQ ID NO: 2195 - DNA, 122 bp, Homo sapiens
cctactataacttgtatcaacaagctaataaaagtattcacctaagcacatttgtgcagacgagggtaaaggttgggttttgatatgcactaaggagtgtcttaggtagttagtgggtgttt

SEQ ID NO: 2196 - DNA, 122 bp, Homo sapiens
acaaaaatgcatgactatgaatctacccaagtcagaaattcaaggccctgtctaaagacacgtaagtgtttataaaaatactggtgagctatgtaacatctacagaacaaagcccattttat

SEQ ID NO: 2197 - DNA, 122 bp, Homo sapiens
cacctgccaggtgggaaagcctggccttttcctggatcctggctagcactgggatttacacgcctgctcatcacgcactgtcaggaggctgcttccctgaacagccttatctcagcagtaag

SEQ ID NO: 2198 - DNA, 122 bp, Homo sapiens
ttgtcgctgaagcctaccccataaacccctaccgtccctttgcccacagcagagaatttccgggaaaacgggaaaggtatgcaagcatgcccacacacgtgcacacacgggttcccaaaaga

SEQ ID NO: 2199 - DNA, 122 bp, Homo sapiens
cgtccccaccgcggcgctcctcgcccggccgaggccgttcaccccgccgaggcccctccccggcctgctcagactcctccacgctcgccctgatccactccgccctgcacaagcgccagctg

SEQ ID NO: 2200 - DNA, 122 bp, Homo sapiens
aatccccacttcatttccattcctttcagtaagccttcaggactgggcatgagtttatcacgtgggagctacgggctttggggaagctcactgactgctttgagctcagcttgctcatttat

SEQ ID NO: 2201 - DNA, 122 bp, Homo sapiens
acttgatcaccagcggctcctccaactacgcgtatgtgaacttccagcatacgaaggacgcggagcatgctctggacaccatgaattttgatgttataaagggcaagccagtacgcatcatg

SEQ ID NO: 2202 - DNA, 122 bp, Homo sapiens
accattttgttttcctaccagaaatgaaaaagagttcccgttgctccacgtcctcaccagcgtttaggattttaatcctttgaataggcatgtagtgttatctcattagtattttcatttgc

SEQ ID NO: 2203 - DNA, 122 bp, Homo sapiens
ggagagactgcagggacccctggagctggagctttcgggagtaacgaagctgcagctcctcgaaaataggatgggttccccaaaataagagctcttagggatctgaggcttgtattcccttg

SEQ ID NO: 2204 - DNA, 122 bp, Homo sapiens
gaaataaagaaagcactctggagcctgcttacctcccactgaggcctgacatttgggacacggtgggaagttggagaagggggagccaggggaagctgttggaatctgaagaaccagcagtc

SEQ ID NO: 2205 - DNA, 122 bp, Homo sapiens
gaacctgaaggaaaaggccggctgacgggtgctgatgccactgactatacaagaacacaccgggtcaactcatcattgacagcgagagacacactactgctcctcctggctgatgccaaggc

SEQ ID NO: 2206 - DNA, 122 bp, Homo sapiens
ggtctggacggagcacgggatcgggtcggagaagccggacgaggcgcgtggagcttcccccgagttctcccaggagccctcgccagagctgccgcgcaagtccgcccagacgcttgcagcca

SEQ ID NO: 2207 - DNA, 122 bp, Homo sapiens
cgttcgtagtttacccccttggtttattaagtaatagttgtaaaagtttataacaggtcacgaattggcggcacctttgtattgattggcactcaaagtgacttacaaaaacttggcttaat

SEQ ID NO: 2208 - DNA, 122 bp, Homo sapiens
ctcagccaataagagcttctgggaacaaaagcaattcttttgtgtgagatactcaacccacgtcaaaacagcttcaggctgtagaaatgattttggttgagctttaacaaggtaataatgca

SEQ ID NO: 2209 - DNA, 122 bp, Homo sapiens
agccctcctcaggcagcatcaagggacccaagcccctctcccccttcccttcctccttcccggctgatcccagcagcccttccctggtggcggcgctcccagagccctgcagtttttcccct

SEQ ID NO: 2210 - DNA, 122 bp, Homo sapiens
ttgtgccgagtgtctgccaccctgcatgcccacactgaatccgtgcagggccctcccggccgcctgctcagctgtggacacggagctccggcacagccaagtcctgaatgacatgcagccaa

SEQ ID NO: 2211 - DNA, 122 bp, Homo sapiens
cggggcagccctccctcgcgccctcccacgctcgggcccctgcgcgcccctcctcccccccgttgccagcacttgctcctggcctggggggtctggaatctccctttgcccccgctccgttc

SEQ ID NO: 2212 - DNA, 122 bp, Homo sapiens
gtctcaggcagtctggagactcaggctagtgactgagtgttccctcagctgaatacaacccgaccacagccagctacagccccagggcttgacccactggggacaccccaagaccacctgcc

SEQ ID NO: 2213 - DNA, 122 bp, Homo sapiens
gatatgaagtgtggaattttccacttaaaagctgatctgaggctctggacatgtctgtagcgggaagtggtggtgtgaaaaacacacaccctaagactaataagcactttttcaggaggctc

SEQ ID NO: 2214 - DNA, 122 bp, Homo sapiens
agttagagggtagtttatactctggcctaagaaaggcttcactgttagtaggcgtgaggtcgtagtgaggtagtttaactgctttagaactttgtgcttggaacattcttagccaccgaagt

SEQ ID NO: 2215 - DNA, 122 bp, Homo sapiens
gccgggaattgtagtcctgcctttgttaaccgggttctggcaggttgctaatgcctttcccggtcccccagtccgggaggcgcctccctcatccgcatgccaccccttgagtgactgctgag

SEQ ID NO: 2216 - DNA, 122 bp, Homo sapiens
tggcgagcctcccccgcctccccgagatcccggattcccttcctcatcccaggggacccccgagcccagatttcacaccccaaccccggggactcaggcgtgcccctcccggcgcccagagt

SEQ ID NO: 2217 - DNA, 122 bp, Homo sapiens
gggcaacagctgctcccaaccccaacctccccagggaccctccagtcgccctcgctgacccgcggcttagggtccggaaaattaaactgcgaaaagataaacattatttccagtcggctttg

SEQ ID NO: 2218 - DNA, 122 bp, Homo sapiens
gggggaggcatgaagaggcactgaagaagaggaaactgggagtctgacagcaaaattcaacggctccccagtccgcgcagggtctcttcccgggactcaagactcaactgggaccggcacga

SEQ ID NO: 2219 - DNA, 122 bp, Homo sapiens
tgttggtctacgatgacacctgccatttgtgagagttcctgtgcttcctctctgcccacacgtggcacttcctgctttttgccatttctatgaaagatatctcagcatgattttaacttttc

SEQ ID NO: 2220 - DNA, 122 bp, Homo sapiens
caggtgaagtgctcccccgccatggcttctgccttggagcaggagccccgacagtatagacggtgctgcagtgacccaggggttggtctccctgaccactgagggactgagcatgcctttgc

SEQ ID NO: 2221 - DNA, 122 bp, Homo sapiens
tcatccctgattggatagtgctccaggtcccgccccttggtggctgattgacagaagaagcgatctcacagtgctgagtggagccggatgaacaggttccaggcacgacccttggcaaggcg

SEQ ID NO: 2222 - DNA, 122 bp, Homo sapiens
tgcagtagctgagtgaggtggcagaggtggaggaatgggcaggttcctgcttgaaatacacggtagaggaagaacagatcttgggggaaagataacgaactccattttggacactttacttt

SEQ ID NO: 2223 - DNA, 122 bp, Homo sapiens
tcgctccctgccgagctcttgtcgcccgcccgagcctttgccaggggatgaggtgggaggcgctagaaaccacttagctacagccaaccgcccaatgcagcactcgctcgctccccccgcca

SEQ ID NO: 2224 - DNA, 122 bp, Homo sapiens
tatttgattaatgtgtctctaccataatagatggaatgtcataagagatttttctttcctcgccattgagcatccattgcctgttacatagtagatcctcaataaatgttttgcaactgaat

SEQ ID NO: 2225 - DNA, 122 bp, Homo sapiens
cgcagccttcagtctgtggctgaaggcccgagatcccccggcagatcgctggtgtgagcccgagtctagaagctgaagaacttggagtccaatgttggagggcgcaacgggctctgctgcgc

SEQ ID NO: 2226 - DNA, 122 bp, Homo sapiens
cggagccccgcggcccttcaccgtcacagggaaagctggatcggcggcaggaaaagcccgcggccaagccgctcctgccctggagggactagaccctttgtctccacgtcgggcgttgggtg

SEQ ID NO: 2227 - DNA, 122 bp, Homo sapiens
ctggggtcacaggcatgagccactgcccttggccttcttcatctttctttacagcactgtcgtgaagatttatagcctaactgtgttctccagaaactgttatctccagaaaaacaggaaga

SEQ ID NO: 2228 - DNA, 122 bp, Homo sapiens
ctcaaaatacatttaaaaatacaacatgtggtttaattttgttgttttagttcagtcctacgtaaagagaggaagagtataaataagtaacctttctaagttcttggatccctgtgtcaaga

SEQ ID NO: 2229 - DNA, 122 bp, Homo sapiens
cgcagcagtcgcagaggcctccgtgcagacagacctcaacccggaggacaactttacgagcggggagcaagaacaccagggccttaggaccccttttatgccaatcagtgccacacagaaca

SEQ ID NO: 2230 - DNA, 122 bp, Homo sapiens
cacagtgagagctgttaaaatgctaaacgaccaggtcaagcctccatatccctcgagaggcgtttatgcattttactggaacactctggcatgaagcgttccctgaaacaattaaaaagata

SEQ ID NO: 2231 - DNA, 122 bp, Homo sapiens
ccctcccccggccttgtgtaatgtcatcaaatgggagtggagagaggcaaggaaagagagcgggctgaagttgaagatccaagttcagatagttccatggagcttttcagagccgaggctgg

SEQ ID NO: 2232 - DNA, 122 bp, Homo sapiens
gagactctaagatgggcagtggctcttggtgtccgagctggtctcatgaggtggccgccccgggtagagctctgagacctccgtcctcagagggaagactccccaaattcccacagagctct

SEQ ID NO: 2233 - DNA, 122 bp, Homo sapiens
tacctttttccttgtcaacacaataacaaacatgaatgcagctgagtaactggttgcaaacgggagatcctgctctgctggaatctgagatggggcacaaaacaaccccctactctgccttt

SEQ ID NO: 2234 - DNA, 122 bp, Homo sapiens
gacagaggcacagaaggcccaggtctgggaggttggatcacctccggctggatgttgagccgggtgggagcccaaacagcagggggcccacaggaggccggcccaggcagcctcgcgtccac

SEQ ID NO: 2235 - DNA, 122 bp, Homo sapiens
tagagcttagcccgggctcctggactctgactggcctgccggtgtctgagggagcggattcgaggccattctgaccctcgccccttgtcctgcagtgaccattgtcagtggccttctcatgc

SEQ ID NO: 2236 - DNA, 122 bp, Homo sapiens
ggcacccgcatttgtcaccttaaatctacaagtcacgaaggtgctgggccctgcaggctgcggtagctgaccctcgtagggactgctgctcccgcgagtcatggcctttgtccttgtagacg

SEQ ID NO: 2237 - DNA, 122 bp, Homo sapiens
ggaggattactctcctcgctcccagcaagtaaaattagcctccactcggctccccgctgccgggcctgagcttctgaggccaggcagctgtcattccacccagcccagccagtgacttccca

SEQ ID NO: 2238 - DNA, 122 bp, Homo sapiens
cagcccaatggccgcgagggggagggcgaggggcgaagccgaacctcccgccttgggcgccggtgcctgcgattctcgaaaccagcccgactcccagcgaacggcgcctccgggagggggag

SEQ ID NO: 2239 - DNA, 122 bp, Homo sapiens
agttcatctagcccgggctatggacaaggccgtgtgcgtccagacggggccgccagagggcgcgcgtctgcggccgcgggaggcccagcggggcctgagaagtgggcggagccagccccggc

SEQ ID NO: 2240 - DNA, 122 bp, Homo sapiens
ccacagcttctctgagattcttcaggaggtggagggagtcctcacttcactccctgagaccgaggtcagtgtgggaactaagtttgctcacagagtgaatcagactggaattaagtgctaca

SEQ ID NO: 2241 - DNA, 122 bp, Homo sapiens
ggcccggtcccctcggcctcggccccgccaggcgcccgcgggggcttttgtttgtttactcgcctcggggggcttcaacttggctgagtttccccacgacccgcacctcccccgcccccggg

SEQ ID NO: 2242 - DNA, 122 bp, Homo sapiens
tcgatgccggcaaagagcgggttgtcttcggagcacttcaggaagttcctctgggggcaccgtggcaggtcagagagagcggcaggtcaggcgaggggctggtgggtgggaggagggaagcc

SEQ ID NO: 2243 - DNA, 122 bp, Homo sapiens
cgcgcggagatgcgatcgccgtccctgcgaggccccggggcccgcgctcgccgccagccacgcctgctccaaggctcctcctcgccagtctggccctggaacgggagaaaccaggagaggag

SEQ ID NO: 2244 - DNA, 122 bp, Homo sapiens
atgatgccgttgagaaggtcgtttattactcagcttctgagaggagacctcctcttgcctcgcggggccatgcgggcaagcgccgggtgggttggaggcagggggatgtgtgggtggggcct

SEQ ID NO: 2245 - DNA, 122 bp, Homo sapiens
ctattttttaaaactgcatctaaacgtagcaagcttgtgtgcccaccacccaaggcaagccgaacccgagataccattttccgtttgcaggggcctggagatccacacgagggcgcgctcac

SEQ ID NO: 2246 - DNA, 122 bp, Homo sapiens
gcctgcgtcaggtactgctgtgtgagtctataaatgctgttacctcctctgtgcagcccacgtcaggtactgctgtgtgttgctataaatgctgttaactctgcattcacattgtagacgtg

SEQ ID NO: 2247 - DNA, 122 bp, Homo sapiens
aaaagctctcccacagtctgctccatctctatcttatttcccacaactccccagtttccacggttcagttaggctggtcttacagctatgcccaccattacctaatttcattgtctttgctt

SEQ ID NO: 2248 - DNA, 122 bp, Homo sapiens
atgggggggcttccacgctggggggtgcgctcggcacccaggtgcgcggggtgcaggggacgccgcttgaggactcccagcagcgtgggacgtgagcacccctgcagccgccgtgctgggca

SEQ ID NO: 2249 - DNA, 122 bp, Homo sapiens
agggctgcggaggggctggcttccctgggagtgctgggcagcccgaggcagtgaaacgagcgacccacattcagcacctctgggtgctggggaagcacacgtggcagtgccaggccttgggc

SEQ ID NO: 2250 - DNA, 122 bp, Homo sapiens
cttccatggttgctttccttccggggacagacaaaggactggtcaggggcagcctttccacgtgccatcagccgtgcagtcagcagagcctctggacagccccactcccctaacgcacattg

SEQ ID NO: 2251 - DNA, 122 bp, Homo sapiens
gaacgctcacccatgtcggagtgctggccggtccaagccccacccccatggcctgatgcacgccaccagcctcccgctgaaaggtgacactctgccagctgggttcccttagtcaccctgtg

SEQ ID NO: 2252 - DNA, 122 bp, Homo sapiens
tgcctaaaaaaactataattatatcagactggagacatgggctcagagaaatgtgcacagcggtaaacctgttacgttgaagccgtattaccaagatttccagagaacatgtcaagatgcaa

SEQ ID NO: 2253 - DNA, 122 bp, Homo sapiens
gccaattatggcgaatgtagtaggagcaacatctaggattctccgtttgggtttctaatccggggccggcacctgtctcggcgtcctgccgctgtcccaggccggtggtgctggattccgcg

SEQ ID NO: 2254 - DNA, 122 bp, Homo sapiens
ctatacatagataccaacagacaagccattataagccataattattcacaaagtcaaatacgtgtaataaaacacacaactaaaaaacttcctatagccaagtattggttatccacattaac

SEQ ID NO: 2255 - DNA, 122 bp, Homo sapiens
aacatggcaaatggtttggggctgagagggtctttccctaagtccaactttaataatagtcggccaggcgcggtggctcacgcctgtaatcccagcactttgggaggctgaggcgggcggat

SEQ ID NO: 2256 - DNA, 122 bp, Homo sapiens
gatcagtgactttcccagaccccgcgggcgagcccgcgcttgggacccggcagctctgcgcgggctggttttggagggggtggtgttcgtttgtttaaattccagttgttatttggcagcat

SEQ ID NO: 2257 - DNA, 122 bp, Homo sapiens
tgcaaaacctactgtacatcatgataaagaaagaagagaggttcataaatctatttggaacgtatttttgttgtcatgttggtaatttctacacaggttactgatttccatagttgcatagc

SEQ ID NO: 2258 - DNA, 122 bp, Homo sapiens
tctcatgtccgatccagtgctccacgtttctcttcctgcccgtgaagaaattgtccaccacggtcacctcgtggccgtccatcatgagtttgtcagttagatgggagcccacgaaccctgcg

SEQ ID NO: 2259 - DNA, 122 bp, Homo sapiens
taacagaagggaacagctgataaaagaagccctcctttgttctacatttcctgcccaggtcgctcaagttctgtttgctttgactgtctctggagtgcttgctgggtgaggtcaaggaaggg

SEQ ID NO: 2260 - DNA, 122 bp, Homo sapiens
gctaaccagctctcttgcctgtctgaccagggccagtcagtgcagttctcattctgaatgcgtgaggccctgcaggaatagattttatgctttacttgagaaatgaaaattgctttttgctc

SEQ ID NO: 2261 - DNA, 122 bp, Homo sapiens
ccttttgctcgcagggataatggagcaggggccattccttgcttaacacatcactgtgcacgtacactagtgcacctaccagataattgcctagccgaggcatggtagtaaaatctatgggt

SEQ ID NO: 2262 - DNA, 122 bp, Homo sapiens
cgagggagggatggctcgggaatgggggtgcaaagatccgaggagcctggcaagttccctcgggaataaactggaggctggaggcggcggcggctgctgcagcccggggcaggggtggggcg

SEQ ID NO: 2263 - DNA, 122 bp, Homo sapiens
aaggctgtgggtctcctagcttctcctgtcctcccaccctcagtctgtgcctgtggctcccgttgtccaaacccagccaaaagccagctgacaagggagcctgggaaatgcagcctgcctgg

SEQ ID NO: 2264 - DNA, 122 bp, Homo sapiens
ggaagggcccggggtagctgcaaaaggcctctctttccccaaattggttcagggccttttcgtctctaacgaaagcaccaagaggcctaaaagcccccttcccaacataaactactttgcaa

SEQ ID NO: 2265 - DNA, 122 bp, Homo sapiens
aatccctcctctccctccatttgtcagtcaacatgtacttagtaagggctcacaggacatcgaatactagaagagatagctgaatacttaattccactctgcagttatctaggcctgtcatt

SEQ ID NO: 2266 - DNA, 122 bp, Homo sapiens
tcccttgttgacctctcaattcctatttgggacatataaaaacactggattcttaacaagcgcccggagcagtaggagcacagcttggatggactcaggacttgtggcagggagcacgtggg

SEQ ID NO: 2267 - DNA, 122 bp, Homo sapiens
gttactcttcctgtagacaacacagcatggggtcaggagtggggtctggagtcggacgcacgttcagaagctggggccaccactcccaaactgtgtgctctaggtccagcttttgcacccct

SEQ ID NO: 2268 - DNA, 122 bp, Homo sapiens
aagagtataaccatgtttcggaatagtctcaagatgctgcttactggtgggaaatcaagtcgtaaaaacaggtcaagtggtaagtgactatgctacatttattgtgcgtgatattttacaaa

SEQ ID NO: 2269 - DNA, 122 bp, Homo sapiens
tctgacccaggaattccatttcagaacagtaacggcctccactggcaacacatcccaggccggtgatgcctggggcagggagagcatcctaccccggcctgtgccccgcccccggccccgcc

SEQ ID NO: 2270 - DNA, 122 bp, Homo sapiens
gacagcaaggacaggtgctggccgcgatcttttggagcggggcttcctgcctgcgctgtccggccccacctagaggatatttacatttcatcttgtgactgcggttatgtttatttataaat

SEQ ID NO: 2271 - DNA, 122 bp, Homo sapiens
ctccggccggctgactgctggctgaggcgcagcacagccttggttaaatccttaattgcgcgcttacgcacagcggggtggatctggttctattggccagggcctcgggagcaacagtaaca

SEQ ID NO: 2272 - DNA, 122 bp, Homo sapiens
ctatataaagttttcatcctagttttaaaaatggatagattgacttttatgcttattaagcgagcgcagagttctcagtcatcattatttgtatcttttatgaccatagcttgaaaaagtgg

SEQ ID NO: 2273 - DNA, 122 bp, Homo sapiens
caaccccacagtcagcttgagaacctcctgagcataccagtagcacacgctcccatcccccgttgctcccgtacccccgggtaccatcaagctgcttcctgtctctgtggatttacctactc

SEQ ID NO: 2274 - DNA, 122 bp, Homo sapiens
tcttagccgccagcacttcagccgctgctcgcggggagacgccggcaagagctccagctccggagcgacgccaagcctagcgggcccgccctctcgcgatatcttaccttggtttaaattct

SEQ ID NO: 2275 - DNA, 122 bp, Homo sapiens
caaaatacttatctgtgtttagatttcccaaaattcatttcttcataataatactgtcagcgttcagtgttgtgatcataacattcactagtgtgacttaaaaaggggaggcaccatgtgtt

SEQ ID NO: 2276 - DNA, 122 bp, Homo sapiens
tcggcttcttccagccctgcccctcggatcctggccgagtacctcaagcccctcccctggcgaccaggcccctccatcacccagggcccgcccctgcctgcccgcctggggcggtctgcagt

SEQ ID NO: 2277 - DNA, 122 bp, Homo sapiens
gagctggacggagaaactgggctaatgtgacagacagcaacaagagtaaggcagttgcttcgctattgagagaaagaaccatatgagtaagacaaaaactgttgctcttgaggaactggcac

SEQ ID NO: 2278 - DNA, 122 bp, Homo sapiens
ttgaaaacaaacccagactaacacatagcaccaaaatatatacagcagtccccctttatccgaggagggtatgttccaagaccaccccagtaggtgcctgaaaccacagacagtaccaaact

SEQ ID NO: 2279 - DNA, 122 bp, Homo sapiens
cggctgccccacgcacggctcggcagagtcgccgtccacggcggccagcccgaccaccagcgtgtccagcctgacggagcgcgcagacaccggcacctccatcctctcggtaacctccagcg

SEQ ID NO: 2280 - DNA, 122 bp, Homo sapiens
cctcgggcgcggcctcgcctcccgggcccggcgcctgcctcagcacagcggacagcgccgcgccccttgcctggacccagccgcccgcccgcccccggcccacctgagcccgggcccgcggc

SEQ ID NO: 2281 - DNA, 122 bp, Homo sapiens
gagtgttaaaagagtaccgggaatatatttggcttgtcctgttctgtcagttctgtaggccggtggattaagctgatagaaatgctttttggttgatttaaaccagatgctccgactatttt

SEQ ID NO: 2282 - DNA, 122 bp, Homo sapiens
tcgcttgaggggagggattgggggctttcgcccggcgcctgcagggaggccgagggcgggcgcgggcctgagggaggcgtgtcccgcccgggccacacccgaggacccgacacctgggctgg

SEQ ID NO: 2283 - DNA, 122 bp, Homo sapiens
gcacgcgggctaccccgcctggagggggcgaggagtggggctttgcccatcctcgggtgccgctgcccacctcccaccccgggctgggatcatgggctcccctaggccccgcggagtcgcaa

SEQ ID NO: 2284 - DNA, 122 bp, Homo sapiens
aagcagtgttttttgactcctagtgcaacaagtgaccctctcaagcggctcttgaaaccacgcagcccgcaactcggggatccacctcgcgtgcgcccgaggagcacagcaggctggacaca

SEQ ID NO: 2285 - DNA, 122 bp, Homo sapiens
caaggggaagccaactccacggatggcgggggtccattaggctgcaggtcttctccctgccgatagatggcgctgttgcaccgcgcctgggtttgcctctgcccgcagccatgcagggccca

SEQ ID NO: 2286 - DNA, 122 bp, Homo sapiens
tccctaatacagttaggccagattcttgttgattattatttttctagcttttctagctttcgggaattaactctggaaagttctgtgattaatagttcatttctgtctgcaggttggctgtg

SEQ ID NO: 2287 - DNA, 122 bp, Homo sapiens
gaactgctcaccatcctcagaagcaattcatgtcctgtctcaccctctctaatggttcttcggactcctttttccggagctgagaaaccctaaaacatagcacccgtttacgtctagacatg

SEQ ID NO: 2288 - DNA, 122 bp, Homo sapiens
caaaggtggaaactgaacgtgggccaggtggcaaagttccccagtgggttcagcttccgccgggtggaggaggtgggaggcatggctggaggcctggcatcaggctggatgaggtggacccc

SEQ ID NO: 2289 - DNA, 122 bp, Homo sapiens
aattcttcctttccatccccgctcctaggactctcgcctctcaaggcttcatgctaccgtcgatcttaatgccacaaggaaacagatgagtgctgattgtcagtttattgggtaatggatct

SEQ ID NO: 2290 - DNA, 122 bp, Homo sapiens
ctattctagacattttatataaatggaatcatacaatacgtggccttttgtgactggtttcgtttacttagcatgatgttttcaaggattgaagcttcatccatgttattgcatgtacttca

SEQ ID NO: 2291 - DNA, 122 bp, Homo sapiens
cagtaaacagggcttgagcgccggggcctgccgggcagggctgagtgtctgaggacaaggcgctggctttgctaatcacatcacaagaccttgagccagggccaaaggcgcggagtggcgcg

SEQ ID NO: 2292 - DNA, 122 bp, Homo sapiens
cggtttatttgtccttttgcagtgtatgcggagccccactgtgtggcacgcacttgcttccggcagagatcctgcccttcaggagcaactaaacttgttgcaaataaagtgctgtgaaagtt

SEQ ID NO: 2293 - DNA, 122 bp, Homo sapiens
taagcccaggagaaatcagctaggaaccccagcccacccacaggaccctaagagaggatgcgtcattggtctctgttttgtgctggctggttatagagcataggctaaccgaaggcagagaa

SEQ ID NO: 2294 - DNA, 122 bp, Homo sapiens
catccccgcgcagcccaccccacaccctggactgccggggcgcccttccgttttgcgctgcgggcccttcccaccgaccccccgtgcgcccccggcatcctccccatcgtgcgacaccctcc

SEQ ID NO: 2295 - DNA, 122 bp, Homo sapiens
ctccttcccaccaagaattcccactcccatcattgaggactaacgaggcaatgtggtctccgactgagagcggtggactagccagtgaatgtcaacgcgtccctaaggcgatatccgcagcc

SEQ ID NO: 2296 - DNA, 122 bp, Homo sapiens
atccgcccgcctcagcctcccaaactgttgggattacaggcgtaagccaccgcgcccggccgggaccattcttccatgtgcttctcctgagctatcagcgacaagatggtgtcagaggaagg

SEQ ID NO: 2297 - DNA, 122 bp, Homo sapiens
atatcgcttcgggcccggcgggggggcacccggacgggggaccggggagccgagctcacgcgcccccaatcgcttcttgcccgcggactcgggcccaactggttggctgccggtggcaaacg

SEQ ID NO: 2298 - DNA, 122 bp, Homo sapiens
ggtctgggggcctggatgtcagggcatgcggacctgtcttgcaccttggtttgctccagccggggagaaccacttttcttctagaacctaccatctccacatctcacagctgatgaaggcag

SEQ ID NO: 2299 - DNA, 122 bp, Homo sapiens
tgatgagcaggttccccagcaccgtgaccaggtacatggacaggaacagcccaaagaggacgggctgcagttcaggatcatctgagagtcccaggaggagaaattttgataattctgtaagg

SEQ ID NO: 2300 - DNA, 122 bp, Homo sapiens
tgctgtgtttctccactcttgggctctgcagtgacttgaggggtcaagtctatgatcccacgggaggctgggctaatgaggggaccagagacctcagtgctgtgcagggagtcctgaaccac

SEQ ID NO: 2301 - DNA, 122 bp, Homo sapiens
actagtgacccggcttcctgaccctctgtactctcagtgccccatattgtctggtttccccgcgtgtcctgagctcatctttcagcctcactttttcggctcaggttttaccgctgctatct

SEQ ID NO: 2302 - DNA, 122 bp, Homo sapiens
gggtaaaaactgcagccagatcttgcgtgactccaggcggtggcatctgaagtcaggcaccgtggcgctgcaccgcacgtggacgggtgctggcgattacatgcggggaagaagagcgagcc

SEQ ID NO: 2303 - DNA, 122 bp, Homo sapiens
ctgaaggcataagattcagaggtgcccgcggtctagcatcccccagtttgggcggaaagtcgaactgctcacaacggcggtcctcgcgagcgcctagcacagcggctgcaatgcctcgtccg

SEQ ID NO: 2304 - DNA, 122 bp, Homo sapiens
tgctcttgcacatagtcatagggggggttgggaacagtagctcccttggcagggtgaccacgctgttctctggtttggggcctcccactgctctgggttggatagaaggatggttcagtgtg

SEQ ID NO: 2305 - DNA, 122 bp, Homo sapiens
cgttctcaaggctgtcctggagcttccttcatggtacccagggcttcctggagcttccttcgtggtacccagggccgtcccggggcttccttcatggttctcagggccgtcccggggcttcc

SEQ ID NO: 2306 - DNA, 122 bp, Homo sapiens
cctggagcagcgtgcccttctgaaaacctgtggctaaatgtctcttctgtttatatcaggcgtgttacaccttcacacgcactagggatccaggtaagcccagcggcccgaacgtcattact

SEQ ID NO: 2307 - DNA, 122 bp, Homo sapiens
agaaccatttccagtcagggaagcatcaatcagagcggctcccagaaccatttccggtcacggaaccatcactcagagcggctcccagaaccatttccggtcacggaagcggcactcagagc

SEQ ID NO: 2308 - DNA, 122 bp, Homo sapiens
gacacccgggcggccgctccggtcgccgccgccatcgcggctccattgtggggcggccggcgccggccccctcaagcggcagcactcgcacaccagcggcgctgcccccgtgctcgccccgg

SEQ ID NO: 2309 - DNA, 122 bp, Homo sapiens
ctctcccgcgtacttgaaccaacttatctggcacttgcccccacccccattaattgctggcgttcgggggaatggggtgattgttgcggggcggaaagagagctcccagtgtcgagggcaga

SEQ ID NO: 2310 - DNA, 122 bp, Homo sapiens
tcctcagcatcattgtgtaatgtgcctaagaataacttgggggccacacatggtggctcacgcctgtaatcccagcactttgggaggctgaggtgggctgatcacgaggtcaggagttcgag

SEQ ID NO: 2311 - DNA, 122 bp, Homo sapiens
ctgcccacaaggaaaacatggcccaggcggttactggcgggggcaggcaggggacagagacggcatcgaggactcccagggagcaccctgggggtccgtccagggtacaccctcccacctgc

SEQ ID NO: 2312 - DNA, 122 bp, Homo sapiens
tggggaacgccatcctcttctgcctgctcatcgagcagagcctggtgagtggccccccaacgccgcccctccccgccccagcccaccccaccccaccccaccggccaggggagggctttctt

SEQ ID NO: 2313 - DNA, 122 bp, Homo sapiens
gcagtggatgggaccgggtgccatggagcagggggcggctcttgtcggggaggttcaggccgcacaggcgcccacggtggcggcggggaggctcaggcatggtgggctgcaggtgccgagcc

SEQ ID NO: 2314 - DNA, 122 bp, Homo sapiens
ctgcggcccctgggtgagtctgggtttccgttagcctcgcaggggtgtcccttcgagggtcgttagcgagcctccgctttcccacgatctgtcctccgattcctgttaactctagactttct

SEQ ID NO: 2315 - DNA, 122 bp, Homo sapiens
ggcaggtggagcctcgagacgggtgctgtcgtggtgatggaggcgcacgctcgcttcccacgcagtttggcctttttgacgtccctggctgttgtgggcaaccgatttggttggtcgcgctg

SEQ ID NO: 2316 - DNA, 122 bp, Homo sapiens
ctgtggaagaaaacgtcttgcaatctctttacccttgttaaaaacgtggtgcagctattgcggtaataaaatctttaatgcactcggtttgagggtgagctgttagtttgacattctctact

SEQ ID NO: 2317 - DNA, 122 bp, Homo sapiens
gcaccccactttatcatctggccattctgtcatcctgggggcctcaagtctgagtaggttcggcctggcctggctttgatggaagcagtcatttgttggagtggcactagtcataggagaga

SEQ ID NO: 2318 - DNA, 122 bp, Homo sapiens
cacgtgtaatcacacatgtgactcggttagtgtctgtctctcaccactagaggtcagtcccgtgagggcgggcacattcattcgagcgaccacagctgtactgccgacatcaagcatagccc

SEQ ID NO: 2319 - DNA, 122 bp, Homo sapiens
tccaacctcccatctccagctcccaccaacctccagcctaggagaatttcactctttccccgcctctgggcttccagagcccccagagcaaccccatcgatgtgggggagggtgctcatgga

SEQ ID NO: 2320 - DNA, 122 bp, Homo sapiens
atgggactctgcagtgagagtgtcacagccctgggcagagactgctcccagcagtggaagcgccaagtgacccaggagggtgggagcggctgccaccgaaggggaaggggctctgagcaggg

SEQ ID NO: 2321 - DNA, 122 bp, Homo sapiens
tccacattccccggaaaggaagtttctgggcgcagcggagaaagggagatgccgagaccccgacgtcagtggatttgacacctgaagtgcaggcgcccagacagcctcaggcgcgcgcactc

SEQ ID NO: 2322 - DNA, 122 bp, Homo sapiens
ggaatggttactaagacgtaggccacacgtggagaatgaagcttttaagacctctgggttcggcttgccccaggtttacgaagagcccagttcccagaaagacccacaccccccacgtgact

SEQ ID NO: 2323 - DNA, 122 bp, Homo sapiens
gaggctgggctggggcgtcttgacttttggggggaattaggaaagaggtgtctaaagccgcgttgtacacaatagaaaaacaaaattccctttgtgctagtgtggtgtccctcggtttgggt

SEQ ID NO: 2324 - DNA, 122 bp, Homo sapiens
gcaattgcaatgttagatgaacccggggggctctgctgatgtttagactgagactccaaacgtggcatcgctggaagaaggtctggtggtccctggcaaaggacgtcggctccaagaaaggt

SEQ ID NO: 2325 - DNA, 122 bp, Homo sapiens
tggaatagtcatctcacttctttgggcctcagtttccactcttagaaaatatcctgggctcggtttggtggctcacacttgtagttccaacactttgggaggccaaggcaggtggatcgctg

SEQ ID NO: 2326 - DNA, 122 bp, Homo sapiens
aaataaataaaatttttttaaaaagttcattcatgggtccaccgtttgaaaacagcaccccgttaacattctgtcctacttccgccaatggtttcttctccctgtgcctgtatgtatgatgg

SEQ ID NO: 2327 - DNA, 122 bp, Homo sapiens
caaatgtgtttgcaaaagaaaaattaacataggatacgtgcgggcgttctcagttgaactcggtcttactgttccacgcgagcaccccatgactcagagcccaaatctcagcggaacagccc

SEQ ID NO: 2328 - DNA, 122 bp, Homo sapiens
cacagcgacacagacttcttctcagctgggtccacctgcttgcctcggggcgacagagggcgccacggcgtccgcgacggaccccgcccccaggcagtgcgccgcgctcccgtgacgtattt

SEQ ID NO: 2329 - DNA, 122 bp, Homo sapiens
agcgccgtggcagacacgcacgtggccaggccccaggggagctgttcacactcttgtccacgtttgcaatgtgcacgggtgcagctctgtgcagccactctgccgggcgaccctttcccggc

SEQ ID NO: 2330 - DNA, 122 bp, Homo sapiens
agtgctgaattacaggcatgagctaccaaacccagctccctttctgaattttctgtaaggcggctgagggcttttctactggagtggggttagagttcctaagtcctgcctgaacttggccc

SEQ ID NO: 2331 - DNA, 122 bp, Homo sapiens
aggcagacaatgctggctgtgtccagaccctccaggggaacaggctgtgttctatgtccccgccaggaaacaggccatctgagtagtgcctttgtccactcaggaggcagccccgccgctgg

SEQ ID NO: 2332 - DNA, 122 bp, Homo sapiens
acctttattgtgagcctcctgtaagtggggtttcttttttccatcactcactgaaaccggcgcatggtatcttctctggaaaactaggactttaggcaacatcaatcctgcaacagggaagc

SEQ ID NO: 2333 - DNA, 122 bp, Homo sapiens
cgcgccggcgcagccagattttccccgcaggaacctattgagagctgagtattcgcccctcgggaactctcagtggttcgccgtccgaacgttcttaagacaagtgtcgatttaaaataaca

SEQ ID NO: 2334 - DNA, 122 bp, Homo sapiens
gctggctgagccccgggacgggggaagtatatctctgcacctctggcctgagaagaggggcgcagacgtccccatcaggggccggagaactcggaaacgactggctcagccggggcgtcggg

SEQ ID NO: 2335 - DNA, 122 bp, Homo sapiens
aactgacggggagttgacgagggtgcagggggcactggaggcctccattttttccgcagacgcagcggaacgtgcagaaggcagggctgctctatcagggtccctcctcctgggcctccccc

SEQ ID NO: 2336 - DNA, 122 bp, Homo sapiens
tgtaggaaaatgagatttggtccgcgctggatggctcctctgggaggcaggcgtgggggtcgggtgtcggaggccccgtgcgcccccccaccccccaccagagcccacggcgctcacggagc

SEQ ID NO: 2337 - DNA, 122 bp, Homo sapiens
cgccccggtctaggagtgcgctgggcagggccgagcggggtggggccgagcgagctggggcggagctccgcctcctgccggtcaggtggttccagggccgccatgttgcggagactctcaga

SEQ ID NO: 2338 - DNA, 122 bp, Homo sapiens
ggagcccagttagctaataattctgggtcccaggagtgtctagacgcccctcggggagtgcgaagaatgcagtgtccttggaatccacctttgggaaagtcagctgacctcccggacctcag

SEQ ID NO: 2339 - DNA, 122 bp, Homo sapiens
accaggaacggaagccagaagaccagttaaaaggctatcgcatggctggccaggcgtgcacgcctgtaattccagctacgtggaaggctgagaggcaggagaatcgcttgaacccgggaggc

SEQ ID NO: 2340 - DNA, 122 bp, Homo sapiens
cccctactctctgctggggttagctgataatcatgtcactgatcggtctcattgatgtgtcgtgtcaggtaggagtaaatgttagaccctacctgtcctgagtggcaggtctgattataaat

SEQ ID NO: 2341 - DNA, 122 bp, Homo sapiens
caggctgtcgctgtcacccaagcacaagtgcagtgacaatcctcgctacgaatttcctcgcggctccatacctgaaataagtatcactgtattatcacagctctgtggaaatccccaccttt

SEQ ID NO: 2342 - DNA, 122 bp, Homo sapiens
agccgcaacaaagcggcagtgtctgtgtctcacctttggccatcttgttgagaaccatgtcgatcaggacgtaggtgccgctccggcctgcaccgtcactgccaacagaaggagagaaatga

SEQ ID NO: 2343 - DNA, 122 bp, Homo sapiens
cgtcgctccaaccgttgcagctccacgctccagcccaaccgcggctctgaaggattgacccgccctggcgtgccctgctctccactttggctttggccaaacttttcggtcagaacccgaac

SEQ ID NO: 2344 - DNA, 122 bp, Homo sapiens
aacctgagacacctggggatggtggagccaggggagatgccgcgggcctgaaggaggatgcgaagctccagggtgccccctgctgcctccggagcgtgctgcagtcatggccgacgtggacc

SEQ ID NO: 2345 - DNA, 122 bp, Homo sapiens
gccttccaggagaggtgccatgcggtgccctttagtggcagcacggcaaggttctggaggcgggggaagccaccaagagacagtgacagggtcagcgggggcagacgccacatggcaaagag

SEQ ID NO: 2346 - DNA, 122 bp, Homo sapiens
gacagggagtggggccttggctgccactttggaaagattgccagttccttcatttcagctcggaggccatcacatttgcctaaagtgtcactttttatattttccagttcattgtgcaccaa

SEQ ID NO: 2347 - DNA, 122 bp, Homo sapiens
gtttaacagccgctttctattgacctttccaagtgaccttacagtaaaggaacttttgctcgcttctgagggaaactaaaaaaagtttaacctctctggaatactaaaaggctctcaacttc

SEQ ID NO: 2348 - DNA, 122 bp, Homo sapiens
tccaactctgtcctgcccctgatgtcacaggcacaacttcctgaatctggctcgccgttccgcccgctccaggggctcggcccaggctttccaccctgggccagcccacctcgggtgcctct

SEQ ID NO: 2349 - DNA, 122 bp, Homo sapiens
cggctacagcctgggcaacatctccagcaacctgatctccttcaccgaggtggacgatgccgagaccctccacaagtccaccagctgcctcgagctcaccaaggacctggtcgtccagcagc

SEQ ID NO: 2350 - DNA, 122 bp, Homo sapiens
ccctccacacatggctgcagtcgcgcggctgtccttcgtgcgccccgctgggagcgtccacgcagggacccaaccctgcccatccaggggcctggagagcttcccagcggcgaccccccgga

SEQ ID NO: 2351 - DNA, 122 bp, Homo sapiens
ccgcggcgctttccgcgcgggccactcccctctgccgcgacgcccaggaggcgacgacgccgggccctaggtccaggagctcctaagccatccccgtcctcagccggtggcccggtcccctt

SEQ ID NO: 2352 - DNA, 122 bp, Homo sapiens
gatgttccaggcagaagcccaggaggcctccaggaaccgccagaccggcaggaggaacgtcgaggtccaaggcacaagtcagaggttcctggtctgcaggggcccaaggcctgcgtcactac

SEQ ID NO: 2353 - DNA, 122 bp, Homo sapiens
gctttccgccattgtttagtcgtgatgctctcattttctctgaatcaacaattttctgctcggctccgcgccgaccggcgaacgcggggcttttcctcgcccgcctgatgacagcagagcgg

SEQ ID NO: 2354 - DNA, 122 bp, Homo sapiens
ggagttgagctcagagaaaggcccagggaagctttattagcacctgtagtctccagagttcggggatgctcagatcttaggggtgccaccagaggtctcaggaggcactggtatgagtgtcc

SEQ ID NO: 2355 - DNA, 122 bp, Homo sapiens
cctctcctcctctttctaagctcttcacattgaggcaaaggagaccccggcacctgcctccgcggcagccaggaccacactgccatggcaacagcgtgcctctgcgtcctccatccgggcct

SEQ ID NO: 2356 - DNA, 122 bp, Homo sapiens
gcgcggattttgcttttgcagctgcagctcctggcaactggtcaagcaggcagcgtccagcgcacccgcgaacaccaggtccggcagcatctgtcttttcccgcagcgtgcagcgcctgacc

SEQ ID NO: 2357 - DNA, 122 bp, Homo sapiens
tttcctgtgaaaatgtaaacaagctttgtgtttattttaatcactttttcctcctgttttcgggctgtagacaaccccagcccttactcaaattctggtggttagagtagaacacaaccaag

SEQ ID NO: 2358 - DNA, 122 bp, Homo sapiens
taccatcctaacaaggcctttcctgagcatcacctatccctggctagccactgtctcttacggtcttgtcttctcccctcactggcacacacaaaaaataccaactttatctacctggctgg

SEQ ID NO: 2359 - DNA, 122 bp, Homo sapiens
cagggtggggaaggatcacaggaattgagtgtgcacaggctggcctgctcatgtgcgcagcgtacagcctgggtggacactaagcccttttagatgtctgtctgtatgacagggtggggctg

SEQ ID NO: 2360 - DNA, 122 bp, Homo sapiens
gcatggaggccggcgtgggcagtccccgctccgagaaggagcagagcagaagccactcggcgcagctcgagccaaccaagagctcgggaccaggagagatgcgcatcttcacttcatacttg

SEQ ID NO: 2361 - DNA, 122 bp, Homo sapiens
ccctttcacaggaaaccaggcgttggggcgaatgccctttgcagggtcactgcgtgtggccgagcaggccaggaacccgggcttatctcacttttagtccctggcatgaatggctagttcgt

SEQ ID NO: 2362 - DNA, 122 bp, Homo sapiens
agcatggttaagatagctaagatctagtactgtcactccagtatgtcccaattctacctacgtttattgaagggtcaacagttctgatctcagcattgggtaaagggtgggacattcagatt

SEQ ID NO: 2363 - DNA, 122 bp, Homo sapiens
tgggaagagacagaagaaaatgaaaaaaaccaccattgtgtgtattcgcatgcgtgtgggcgtcctctcagggggaagtggccctgtctttgcactgcccccattccaagtagatcaggaaa

SEQ ID NO: 2364 - DNA, 122 bp, Homo sapiens
tctttctttctttttttccttcctctctgctgcacgttgttgttgttattagaaaggcttcgcgcaccccctggtgctccggcgttttgtgtggcaggagaagattgtcttccttctctctt

SEQ ID NO: 2365 - DNA, 122 bp, Homo sapiens
agtgatcctcccaccttggtctcccaaagtgctgggattacaggcatgagccacagcgcccggccaggattcacttttataattatcaggaaaactgtaggaagtgttaataggtaaaagga

SEQ ID NO: 2366 - DNA, 122 bp, Homo sapiens
gggcggaacttgtaaagggaggggccatcaccagcaccaagtctgccaccgccggacccgcgcccccgaagcccacccccaccaagatcgcgcctccgaccggcgggaggggcgcgcagggg

SEQ ID NO: 2367 - DNA, 122 bp, Homo sapiens
gattctaacatgaagccgagtctgagagacatgactgcagactctcacagacactcactgcggatagaacagggaggaatggagatgctgcctaactggctgtttcttggcagtgaggacgg

SEQ ID NO: 2368 - DNA, 122 bp, Homo sapiens
ctcataatccattgctcttctccagaaatcttaccaattctcctgcttaaatataagctacgtgtagtaggcattgttttttcttagcagatacgaaactcaggaagattgtcctatgataa

SEQ ID NO: 2369 - DNA, 122 bp, Homo sapiens
tgtcgggctgagccgcagcgccgagacgcgggctgtttgatctgggctggtggccctgggcgtcggtcctgttccccgatggtaacccgaagtttgtttttttttgttttgtctccccgttt

SEQ ID NO: 2370 - DNA, 122 bp, Homo sapiens
cttggcggagggtggtgagaagactgtcaggcagtgcacaggtaagaactgagccctagacggggcaggagcaatgaatgtggggaggcgcgggagacgggagattggtttcggagccaggt

SEQ ID NO: 2371 - DNA, 122 bp, Homo sapiens
cccgttcttggggttgatcttgaacttggccccatgaggcctatagtgcacgggagtgggcgtccgctcctcctccagggagcgcaggtagtggccgggcaggcgggaacagatgccctccc

SEQ ID NO: 2372 - DNA, 122 bp, Homo sapiens
taatgtgggctgcattacagacttcttgagatgaccaagtcctatgggagtttttttccccgcacctcccttcatcctgtgcgattcttcccagacagaagtttttctccactggactattt

SEQ ID NO: 2373 - DNA, 122 bp, Homo sapiens
ctcctgccttcttttacccctcaggattggaatcacagatgctccacgcttcattggaaccgtcctgagacagacaggaaacatgtcagcagtgggtctcaatagggttagtgccctctgtt

SEQ ID NO: 2374 - DNA, 122 bp, Homo sapiens
gactttgctagcgtgagctccaggaaggcgggcctgtccgtgttcaccgctgagcccgcccggaaggcaccgtttacgaagcaccttgcacatccggctccattctgcaccctggcttcctc

SEQ ID NO: 2375 - DNA, 122 bp, Homo sapiens
aagggctatgggagcacggcggtgtcctcagtgctggggctttcaggggccttggtaccgcgagttgactcttgggggcaggaggtcactccatgcaggggcagcaggtgctggccaccaca

SEQ ID NO: 2376 - DNA, 122 bp, Homo sapiens
tagttaagaatgcccagattatcctctttttgtcggtgtcaagaatttaatcctccctggcgccataccaacctccaccatacctgtttgtttttatgtgaatatgtaaaaattaacacccc

SEQ ID NO: 2377 - DNA, 122 bp, Homo sapiens
cccaggccgcacgggaggcggggcggcgggggtggtgcccgagccttaaaggagccgctgcgctgccgcgtccacgccgcccgctgcgaggctgacccgcccagccaggcgcggcgtccggc

SEQ ID NO: 2378 - DNA, 122 bp, Homo sapiens
acccgcagagagctgcattccttaggagaacaggagcacggcagcggaaccacagtcagacggcagtgatctcctgcgcttgatccccgtgtgacaggaactctcaaaatgaaatccagctg

SEQ ID NO: 2379 - DNA, 122 bp, Homo sapiens
tccaagttaaaagagaattcaaatgaggtcaatattttgtttcactctttcacatgttaacgtgagacctaattttcattttcagaccaccagagtaagatattggttttagcatttatatt

SEQ ID NO: 2380 - DNA, 122 bp, Homo sapiens
acagaacaagtacaagtgattacttatcaaatacctttattagacttggattcaagccagcgacctaaaataaatactttttgctatgatcctgtactttacaaaagctttcaaaagtgtgt

SEQ ID NO: 2381 - DNA, 122 bp, Homo sapiens
atgccagagatgactcaggcactgaataaatacttgttggattaactaagtgcattcttgcgtacgtgcttgaatgaatgaaggaatgagcgaatgaaaaaaaaaccaatgagtcagttcat

SEQ ID NO: 2382 - DNA, 122 bp, Homo sapiens
ctgagtctggtcgacactttcagagtagacgtttccaagagatgattaaggacacacatccgcgcgtctgtacgtgcaaactcgagcaatacaacataaagcactgaagatggcgccactca

SEQ ID NO: 2383 - DNA, 122 bp, Homo sapiens
ggttttacaggaccctctgtctccggccgtcctccaaggggtgaaggcgagaaaggagcacgtactcggctgcccactggatgaggtcctgcggctgcaccctaatggcggctttggcaaac

SEQ ID NO: 2384 - DNA, 122 bp, Homo sapiens
ttacatggtaaaatgctatgagatagtgaccattttagttaaaacatacaaacctaagcacgtactcaaagccactgactatttattcagaagagcaagtgcctggatcctcacaaaatttg

SEQ ID NO: 2385 - DNA, 122 bp, Homo sapiens
ttcttgaacaagtgtcttctcaggactcctctcagttcctgaatttcacaaaactgctaccgacgttttaccagttagaaaaatgtccaaaataggataacccagaattggggatggtggag

SEQ ID NO: 2386 - DNA, 122 bp, Homo sapiens
agaaagaaaggagtgggtaggtcctgatgggaatgaagctagagaaaaggaggaaatgtccgctagaagatggcacgccatatctggagtctgagctttaagaccttgatcgagcctgaggg

SEQ ID NO: 2387 - DNA, 122 bp, Homo sapiens
cgccccggggcgcccagccgcccgcttccctccgcagagcgtcttccctgacggtgaaaccgcgcgggacacaacccaccgcggctcatcacccacttacaaatagctgtcgctaggattcc

SEQ ID NO: 2388 - DNA, 122 bp, Homo sapiens
gccggcgggactcaccggcattctgatctcggggccagaggtagtatgtcgccgggatcacgatgagccccacgaaggaggtgaggaagtagaagaaggtgttcccactgtcatcgtactgg

SEQ ID NO: 2389 - DNA, 122 bp, Homo sapiens
agcacgtcctcagagggcagacccagcgaggcgtcgtggcagctgcggccgcggagacgccggctccgcctcttgcacacgccccctcgcctgaggccccgccccgcccgcgatgcccccgc

SEQ ID NO: 2390 - DNA, 122 bp, Homo sapiens
ctttgggtttggcactgtgttaacgacagatttctgcttcccttgcaaggcctggcctctcggggagcgcgccagcagcagcagccctctcctggctcgagggagagctccccccagccgcc

SEQ ID NO: 2391 - DNA, 122 bp, Homo sapiens
ttcggctccggagcggtccctccgccttccccgctcgaggccacgcccccgtgctcctgccgccttattttccccggagagtcccgaggcgccgcgccttggccctgcctacagcccgaggc

SEQ ID NO: 2392 - DNA, 122 bp, Homo sapiens
gccgccccgccagccgccggccgcccccgcgcccgccttgcggacggccccagccccttccgcaccctggcccgcgcttacctgcagcctggcacaggcacagacactgccgtgggttcccc

SEQ ID NO: 2393 - DNA, 122 bp, Homo sapiens
tctctcacactattttctgcatatccccaagagacaataattttgtacaaaattttcctacgggtagaaagtggatagactttttcaaactacatgagcctcaccttccccctgagattctg

SEQ ID NO: 2394 - DNA, 122 bp, Homo sapiens
aaaatatgaaaggcaggctaactgactgacatgataggacattaaggacatgatagacctcgggtttgaaccagctcaactgtatactggcccggccgcgatcctgggcgagttcctggcca

SEQ ID NO: 2395 - DNA, 122 bp, Homo sapiens
acagcaggtaggaggagactcctggcacagaaatctcttctaaatagggctgctgtcctccgctgcatgttgcccgtggtagcaggcatctcgtgggagggatctgctaaatcaacctaacc

SEQ ID NO: 2396 - DNA, 122 bp, Homo sapiens
atgcaagcatcacgaagatggttctgagaatgcttctgtttacgtaggtgagttctctcccgtatccaacgaaatcctcagagcggtccgaatctccacttgcagattctacaaaaagtgtg

SEQ ID NO: 2397 - DNA, 122 bp, Homo sapiens
taggaacccagatggctgccttcatctccgcagctctgagacgcgcctccatggatggagcgcatagagggctgctttcatctccgcagctctgagacacgcctctgtggacggagggcaca

SEQ ID NO: 2398 - DNA, 122 bp, Homo sapiens
gcggtgggcagcgctggctttcaggatcactatccagcagcagctccgacttccagattccgcggctgagcggcgagtccccgcgaagggtgcacaggaaggtgccaccggcccaggacgct

SEQ ID NO: 2399 - DNA, 122 bp, Homo sapiens
gtcgtccagagagcaagagcgtcgctccccctcgccttctcggccgccctcccggtttaccgccccctgtgtccagagtaagaaaaggctagggttgcgcttccctcccaagttgactaggg

SEQ ID NO: 2400 - DNA, 122 bp, Homo sapiens
tgtgctcggggtcaggctcccagggccacgtaagcctggccactgccccagaccaccaggcggccctgaggagggcaggtgggcacacaggcagccactgcctacctggaagacaccttgtg

SEQ ID NO: 2401 - DNA, 122 bp, Homo sapiens
gcggagtggggactggacaacctctgaaagagcgccttctgcttttgtggagtgcagtggcgtgatctcggctcactgtaagctccgcctcctgggttcacaccattctccggcctcagcct

SEQ ID NO: 2402 - DNA, 122 bp, Homo sapiens
ggcctccccctgacctctcgaaggccaagggctgcccatgaacgccgaggctccgccccgcggcccgccgattggccccagccgccctggtgactcgacgcacttccgccccgggcgcggct

SEQ ID NO: 2403 - DNA, 122 bp, Homo sapiens
gttgattttaaattctgtctccctgttgcctttgcctgggagctggagctcaggggagtgcggcctgaggctggggatctgacagtgtccagccgggctccaggactgaaagcgtttgggct

SEQ ID NO: 2404 - DNA, 122 bp, Homo sapiens
actgtttcaggttcttcctcaagttcttcctcaaatgcaaccagaactgcctgaagaatgcggggaatcccagagacatgcgccgcttccaggtgggtctggagagagggtttccccttgca

SEQ ID NO: 2405 - DNA, 122 bp, Homo sapiens
tgggcccctgtggaccctgtgcaagggcggtcggcggcccgggcctggctgtgggcccttcgcagttgtcccggtttgcaggaaagggcaaaaaacggaatcgtaggctcttcccaaatgag

SEQ ID NO: 2406 - DNA, 122 bp, Homo sapiens
cggccaggagcccgcacagccttgcaggtgttgtagtaattctctggcacagccaccacgcgttgagacttgatgagcattgccaggttgctggggtaactcctctgggattggagacctgg

SEQ ID NO: 2407 - DNA, 122 bp, Homo sapiens
aaagaggcagcaagagatttgtcctggggatccagaaacccatgataccctactgaacaccgaatcccctggaagcccacagagacagagacagcaagagaagcagagataaatacactcac

SEQ ID NO: 2408 - DNA, 122 bp, Homo sapiens
ctaggtccccgccttgccctcgcagggaccccgacaatgtgaccttctgtgtgctggctgcgggtgaggaggacgagggcgacatcgcgctgcagatccattttacgctgatccaggctttc

SEQ ID NO: 2409 - DNA, 122 bp, Homo sapiens
gctgggatacaggcgtgagccaccgcacccggcctaaaaggtgaatagctaagtttctaacgcagagcacactgaaacacaacgtctataactttgctagttctaccactacaaaaatccat

SEQ ID NO: 2410 - DNA, 122 bp, Homo sapiens
ggcggggtctcggctggccacgcccctccctcaagccctccctcagagtagccagtcaaccgtcaactcctgataaacgaggtagtggaattgcccaattagcgctaggaatgccacgtggt

SEQ ID NO: 2411 - DNA, 122 bp, Homo sapiens
gacattctaagcgccgagtctgacatttccttctcactccatcagggcccacctcacagacggtctcctccttatagccaaggccacaggtgacagtacaggttgtggcattgatgataact

SEQ ID NO: 2412 - DNA, 122 bp, Homo sapiens
caccaactgcagctgcacatatttttgttttacagtcacagttcctatcacattaaatcgcgttcccttgaagcttcaaagtggatgacagttctacactacaaccttttcattgcacgtaa

SEQ ID NO: 2413 - DNA, 122 bp, Homo sapiens
agcggtgtacccgagcccagtgctttgcttggcattcggggtgtgaagtggacagaccctcgcgcgtcctggggaggacagccaaatgcctggcgcagctaagggccaaagcaaggcatggt

SEQ ID NO: 2414 - DNA, 122 bp, Homo sapiens
gcctgtaatcccagcactttgggaggtcagtgcgggcagtatcacttgaggtcaagagttcgagaccagcctggacaacatagctgtacaaaattagccaggcatggtgtcacatgcctgta

SEQ ID NO: 2415 - DNA, 122 bp, Homo sapiens
agtgattaacttggatatttagctgaagagatttccaaggaaagtgttgagggtgcgagccgattcttcttgctgctttataataaaatgcaagaggagagagaaattgagtgaagaagttt

SEQ ID NO: 2416 - DNA, 122 bp, Homo sapiens
caaggaattcagagccaggactgaggcacaggggaaaaaatctggtacaactgcagggggcgccaatttcgtggactacaacgagaataccctcccgagttacgcaatgagtctgtcttgtc

SEQ ID NO: 2417 - DNA, 122 bp, Homo sapiens
gggtcgtagcactgcatcaccatggtctccttgccagccagggagccgatggcatagagccggccacggcacgcagtggtggagcagttgtccatggggtaggtcatgggctgcagggcctc

SEQ ID NO: 2418 - DNA, 122 bp, Homo sapiens
gagcgtcgttctcagaaaagtacaagttcttctttgaaggagctccagaaaagcctctcccgcccctccccggctccccaagggcagggctggaccgagctgcagagttggccggacactga

SEQ ID NO: 2419 - DNA, 122 bp, Homo sapiens
agtcgtccatcttgtcccgcttctcctccgggatgcccttctggctgttccagttctctgcgacaggccgccccagttccgtaactgcctggaactcctccacgttgctgtcgaagcgcagg

SEQ ID NO: 2420 - DNA, 122 bp, Homo sapiens
tacagtactaacctcacggaatgtagtacagaataaatgaaataaagtaagtgtgtaaaacgtttagcacagtgcttggcacagaatgtttcatagttataaattattattgtcgcctgtga

SEQ ID NO: 2421 - DNA, 122 bp, Homo sapiens
cgaggcggacggaccgcttaaacggctgctcgtgccgattcttttacctgagaaatgctacgaccaacttttcgttcagtgggacttgcttcacggtgagttttattcagcatccgatccaa

SEQ ID NO: 2422 - DNA, 122 bp, Homo sapiens
ttaccgtcatccaggagggtgtctacacgttgccatggaaactggctttactgctacctccgcccctcccaagtgaagccataggcggagtagactgggagcgactagttagcagccctttc

SEQ ID NO: 2423 - DNA, 122 bp, Homo sapiens
cacattttccttgaactgaatacaatcacatcaaactttcccagaattgaaacactcgaccgtccacacacccattataaccatgggaccagcccaaatgggccgtactttgttgataacaa

SEQ ID NO: 2424 - DNA, 122 bp, Homo sapiens
gtacaatggcgcagtctcggctcacggcaacctctcccaatttttgagctgaaaaaaaaccgaggctcagaggtgtcaacttcccgaagctcacaaagttaatgatcaatgtccatataaag

SEQ ID NO: 2425 - DNA, 122 bp, Homo sapiens
tgtacaaggatcgattcccgtggagagcgccctgggtctgggatggctgggtcacaataacgctatgtctcactttttggggaacctccagactgtttaccacagtggctataccatttcac

SEQ ID NO: 2426 - DNA, 122 bp, Homo sapiens
agccactcagtgtgtgggggcaggggccctgctgacttagaaacaagtggcacattgatccgcattcaaacttgccagccaatcaaccacagccccgcgcacagactctcccaggtgggact

SEQ ID NO: 2427 - DNA, 122 bp, Homo sapiens
gtcggaaaggaaaggaaagaaaagcaggaaaaaaaaaaaaagtcaggggaacatttttgtcggctgcgcgactcgactacttttgtctcctgcgggccactgttgagccttcacgagacgtc

SEQ ID NO: 2428 - DNA, 122 bp, Homo sapiens
ttccaagaagccacatgacatagcagggaggacaaggacttggagtcagaagagggtgcccgaggcttgttggctctgtcactggctctatgaatttgagtaactactcaacatgctgagct

SEQ ID NO: 2429 - DNA, 122 bp, Homo sapiens
ttttttaaatgagacagggtctccctctgtcacccaggctagagtgtagtggtgcagtcacggggctcactgtagcctcaacctgctgggctcaagggactctcccaatttcagccttccga

SEQ ID NO: 2430 - DNA, 122 bp, Homo sapiens
agaccgggtggggtcggtgtcgcgcctgcgcccgcccggacgcctcgggcccgcccgctccgcaccctggaaacccctgcactcagccccccggcgtccccacgctctcggccctgctgcgc

SEQ ID NO: 2431 - DNA, 122 bp, Homo sapiens
tgaagatgaaagagcgggaggcaggttggaaaacagacaattcatggggctgtcagagctcgatttgaatttcattcacaccaggccgagccggggcggggggagcggggcttgaggtcttt

SEQ ID NO: 2432 - DNA, 122 bp, Homo sapiens
ctgggacgggaactgagcgcccggcgctactctcttcgtgatcaggtccagaggagaggacgcttgtgcccaggactccgctgccagaagaatctagacaatccaagcaaaacgggtacctt

SEQ ID NO: 2433 - DNA, 122 bp, Homo sapiens
catttcattccaaattttcatctagataaaaatgtggttccagaggaaactagcctcggacgggagggatgagcttatttgtgccatgccccaacaaatactgcagagttctaaaacctcct

SEQ ID NO: 2434 - DNA, 122 bp, Homo sapiens
ggtgagaactagagatgttaagcagcaagttcccacagggctgaaggaggtgagtggtagcgtcaagatgtgaaccactgttactgcacactgaatcataccactatggccgatcacagagg

SEQ ID NO: 2435 - DNA, 122 bp, Homo sapiens
gcgtttccaaactgcttctgcctgtcggcgcctgtgtggaaactgcgacgagtctgggagcggctgccggagaggcggggcagaggtgtgacgtcatcgccgcggggcggaggcgacagtgt

SEQ ID NO: 2436 - DNA, 122 bp, Homo sapiens
gttcccagtgcagatctcatagcctagcacctgaacttgctcctggagagctacatggtccgttcttgggactgcagcaggggctcctgctgagaagagctattgatgcttccgtgctggcc

SEQ ID NO: 2437 - DNA, 122 bp, Homo sapiens
agcaaggttcacggatatccgtgtgtcttgtctgtggccaccaggcacaggtttggcttccggtcagtgtcccgacactgtgcgggaggtgacaacagagcaaagcagcgcaggggtcaggg

SEQ ID NO: 2438 - DNA, 122 bp, Homo sapiens
cgcagccgtctgtccttgatctgcccgcggcggcccgtgttgtgttttgtgctgtgtccacgcgctaaggcgaccccctcccccgtactgacttctcctataagcgcttctcttcgcatagt

SEQ ID NO: 2439 - DNA, 122 bp, Homo sapiens
ttccggtgattttctaggaaaggcgtcaactctctggtctaggcgttcccttaaactctccgccctcctcctcgcggctcagccttctaggagtttgcgtgcgtttatggcctgtgcaaagg

SEQ ID NO: 2440 - DNA, 122 bp, Homo sapiens
ttcagtgtctgaatggatcccacctccccttcaattttactttcaaggcatttccctttccgaagttgagcagcagctaaaattctttcatgcccttggtagaaaatgtaaggcttcaggct

SEQ ID NO: 2441 - DNA, 122 bp, Homo sapiens
tatccctcagccccagacctgtgcactgcctccgggtggccgcagctctgctgccccgcccgcctctcccggcacattccttggcacaagtggaggggctgggccagctgggcaggcggagc

SEQ ID NO: 2442 - DNA, 122 bp, Homo sapiens
gacagtgacccccgactggtggacccatccttctcccttcgtagtgaggtcgggggggcccgtggccctcatcatggtaatggctgtggtacccaccgtggggccctccatattctgcgggg

SEQ ID NO: 2443 - DNA, 122 bp, Homo sapiens
aagccttccctgatccccagggcaaccaaggagttccactgccaagagggtcggattgggcgggcgggaaggatggggcccagcaatgcttccttgaaaggatgagtggtgccccctcagat

SEQ ID NO: 2444 - DNA, 122 bp, Homo sapiens
cttccctcagatctgtgtttccgactagttgctgctttagcttcttccctccctacatttcgtgactctgcttcctcttcatttttagtctttgggcctgaccaccaccagcaaaaatcctg

SEQ ID NO: 2445 - DNA, 122 bp, Homo sapiens
cagagaggtgtccgtgaaatgattaaacaccaagggaaggctgccttcccagtccgtgaccggcgccggagttttgggtccacggataaaacgtgtcttctttgtctctcccagaaaatgaa

SEQ ID NO: 2446 - DNA, 122 bp, Homo sapiens
cccttggccggtccaccttgctcggcggacacaaagactacaggcgctggggtggtcggtcgtgggtagctctgcagggccagggctgcccgctgttccaccagggccaccatctcggccac

SEQ ID NO: 2447 - DNA, 122 bp, Homo sapiens
tgcaacattcggggtaaaaacaggagtgcccgttttcacttaggtccgcgggcacaggcccgagggtggagccctcaccacggacccccgcccttctctaccccgcacttccctgccccttc

SEQ ID NO: 2448 - DNA, 122 bp, Homo sapiens
cggagcccgcccaccgcgcgcacccacccaggtagttctcccgctgcttgtcagtcttcacgtcctcccagttgaactggtcctgcccgccgcgcacgcctccacgactggagccgaacatg

SEQ ID NO: 2449 - DNA, 122 bp, Homo sapiens
atctggctgggttccccgctcaggcagttcacgcgcacagaccgccccctggaagaactgcggctggaatgagcaattctcctgagaaagcaaagacacggactcacaagggagttctgggc

SEQ ID NO: 2450 - DNA, 122 bp, Homo sapiens
atggaggatgaggagagtgggaagagttcaagtttgagaggtgcctggagacatggagagcgtttagggggaggtgggtgggtctccagccacagcaggaactgcacattgagttaataaat

SEQ ID NO: 2451 - DNA, 122 bp, Homo sapiens
gccaccctgagcgcctctaacatcccgggagccccgcggccgttccgggcgggccgccaccgcacctgctcatttgcataccgcgctcccattggccggccgggagccccggcagagccgcg

SEQ ID NO: 2452 - DNA, 122 bp, Homo sapiens
catcacgcgagttattgggactgaacacgccgccgcgtgttttgacagcccagaaccattcgcgggggtcggggtgtgtctgggtttgggggctgggggatgtctagccactctagagaaac

SEQ ID NO: 2453 - DNA, 122 bp, Homo sapiens
cagcatgcagccccaggagagccacgtccactatagtaggtgggaggacggcagcagggacggagtcagcctaggggctgtgtccagcacagaagaggcctcacgctgccgcaggtgagggg

SEQ ID NO: 2454 - DNA, 122 bp, Homo sapiens
accgggaaacagatttaacccagaatgtaaccaggagaccccgcgtccccgccccgcacacgcctgaggtctgacagctcggcttctacggtggcctggtgtccatctcattctaatggccc

SEQ ID NO: 2455 - DNA, 122 bp, Homo sapiens
gaccccaccccacgaccggcctggccacctttcagggcctccgggtttgggaggagcacacgcagggcagcccaccgagcccctctgtggcatgggggtgacgcgttccatctgcgcccagc

SEQ ID NO: 2456 - DNA, 122 bp, Homo sapiens
cagtgctgagcaggcaggagccaagagaggggaagcttgagcctcacgcagttaggggtgcgctggagagggtggggcccgactccgccacaccccaacggtccttccccctcctcaccact

SEQ ID NO: 2457 - DNA, 122 bp, Homo sapiens
gcgccggcgcagttcgcgtgggagggacgcagggctggcgcgcagagggtggtgtgagtgcgcggaacgcggcgcgcctgagggctatagctagcgcaggccgacgcgcaggtgaatgggag

SEQ ID NO: 2458 - DNA, 122 bp, Homo sapiens
cccaatacgttcattccccgtatgatcgtcctggttggaaccctcggttctgcatcatctcggggaaccagctgctcatgctggatgaggatgaggtgagtgtggtgagaaggctgggaaaa

SEQ ID NO: 2459 - DNA, 122 bp, Homo sapiens
attcgcaaagtacatagagaaagaaattgcgctgggcgaaacctaactcgggcagagaagcggcttcaaaacctgaaagggagaaaacgagtcaggtcgttgctccagaaatttccgagcgc

SEQ ID NO: 2460 - DNA, 122 bp, Homo sapiens
caggccaccccttgcttttgctgatgctgagtaactggtagtgaggttaaccaggagggacgaggagaggagacatccggataagagaagataaactggcctgacccaaccagtctgagaag

SEQ ID NO: 2461 - DNA, 122 bp, Homo sapiens
atcctaagactaacggagaaaggagccgactcaaagataccacaccccaaggggggctttcgacatctctgcctcagaccacagttcacagaccccagaagaaggaaaaggagataaaaacc

SEQ ID NO: 2462 - DNA, 122 bp, Homo sapiens
tggcctcacagggcagggagaggggcctgggagggccgaccgcagagccgggcctttgaccgcccacaggttccctggttattatttgggtcgaatgcgccaattaaggtggtggctgcgaa

SEQ ID NO: 2463 - DNA, 122 bp, Homo sapiens
agtggcctatggaagacgttcttgtggaactcatgattgatgaagcactgttccaggcagcgaggatgcagtggcctactgaagacgctcttgcggaactcaagattgatcaagcactgttc

SEQ ID NO: 2464 - DNA, 122 bp, Homo sapiens
aagactggagctggtctctttcaacgccttgggagactgggtgaaaggcgagcttggttacgcttaaaatgatcgcctacaagcggttctcttggctcaaaacgcctctttcagggctctta

SEQ ID NO: 2465 - DNA, 122 bp, Homo sapiens
cccaggacggtcggcggcctgccgggctggcgccgtcccagaggggcggacgggaacacacgaggtcctggccctcgaaacagcaaacgaaggccaggaagcccacagtgccgacctcccca

SEQ ID NO: 2466 - DNA, 122 bp, Homo sapiens
ggagagcagagacaacagcggctcattccttagcctcctttaagatagttatccttaaggcgtctttacttcgaccttcagcccttagaacatgcagtcttgcggtgggctgattcaagatc

SEQ ID NO: 2467 - DNA, 122 bp, Homo sapiens
aggtcccggaagctgctccctcctttcgcggcgcgcttgagagtacagtccccttcccagcgcccgattggacagggccttaggccccgccccttcagtcctgagtgacgggagatgcaatc

SEQ ID NO: 2468 - DNA, 122 bp, Homo sapiens
ctgaccccgtttccctggaccccactcaccgcgcggcgcgccgcatcccgccaatccccgcgcgcctgccccgcccatcgccgcaactcgctaatccccgcgcggcttccccgcccatcgcc

SEQ ID NO: 2469 - DNA, 122 bp, Homo sapiens
acccggaagttacgttttaggcccgcgtcacgggggcgggagtcagctgagctgccggggcgaggttgggatcacctggcaccggctgaagggagcctgtgatttttttgtagcgggggcgg

SEQ ID NO: 2470 - DNA, 122 bp, Homo sapiens
ctggtaaatcctctcacaacccaacacagagccacacatctgcagcttctcacctgcactcgtcccttacccagcctcacaactgagcccacgagtctgacactgaggatgagaaccagaaa

SEQ ID NO: 2471 - DNA, 122 bp, Homo sapiens
tcccctcacatcctcccgcccagcttctcacacacccgcacctcccgtggttgggggaggcggagactccaggacccccaggcaggggcttcacgcagtccccacagtgggagccactcctt

SEQ ID NO: 2472 - DNA, 122 bp, Homo sapiens
gccttgggcacagctggcacttggggccccccatgtggcacagcctcagacagacacccacgcaggcagagttgtgcacatccaaccatctcagtgtctccctgtgtgacgcacggctgtgg

SEQ ID NO: 2473 - DNA, 122 bp, Homo sapiens
ttcagtatcactcccaagcaagctggtgacatattttccaggccttgataatttttataccgttaccagatctcggttactaagattcatgaacaaaaccctttcttgcgctaattttttaa

SEQ ID NO: 2474 - DNA, 122 bp, Homo sapiens
caggttgatgtgtttgtgcttccttctacagccaatatgaaaaggcctagtaagtggggtcgggaggcgggcgtggagggacccacgtctggaagttgctgcagccaccacgacgctcttct

SEQ ID NO: 2475 - DNA, 122 bp, Homo sapiens
gagaagctggttctggaaaggcagatccaggagttcctgagattctggcagaaggaaagccgcttcagcagaagaaccctgtctagaaagcccatgtctttaaggaggactttttttttttt

SEQ ID NO: 2476 - DNA, 122 bp, Homo sapiens
ctgaccttgggttgccccagccaggctgcgggcccgagacccccgggcctccctgccccccgcgccgccccgatttgccctcagagagggtatcgatcttatttctgggtctacggcaaact

SEQ ID NO: 2477 - DNA, 122 bp, Homo sapiens
cttatcaagtaagtctgcattgggatctgaggatttgcatctctaacaaaaattcctaggcgatgctcacactgttggtgtaagggtgagtacaaattagaaataaaactatttaattctgc

SEQ ID NO: 2478 - DNA, 122 bp, Homo sapiens
ttttttttaatatttgaggctactaagacacccagcggtcagagccaaggcaggcccagccgtgggactggctcctaatcagcgatgcctgcgtggagcactctccaaacggaaccccgcct

SEQ ID NO: 2479 - DNA, 122 bp, Homo sapiens
ggccgcagcggacagacagggattgggtttcgtgtgcctgccacaccaggcaggctcttgcggctcccaactaggcggccttgcactccgtgtgcactggccacacatccttgcctcctcca

SEQ ID NO: 2480 - DNA, 122 bp, Homo sapiens
agattgtgcttctcagtctgcccagggaactgtaaactccctttcaaaaacatctgtccccgctctaggtttagatttatatgcaggtatatgatgcaaagtatttttttttcacagattaa

SEQ ID NO: 2481 - DNA, 122 bp, Homo sapiens
tggggccccctggggcaggaaggccactgaggccagggagactcccaggcccactcacggcgcaggccccacaggagctggctggaggctatgggtgcggggcgtgggcctgccgggggttg

SEQ ID NO: 2482 - DNA, 122 bp, Homo sapiens
tccagcttaaaaaagatgtgcacattatttttcttggtttactcttcctataatcgataccgtttagtgtagaaaagccttctccttgctccattgttttgaaagaattaatatagactgcc

SEQ ID NO: 2483 - DNA, 122 bp, Homo sapiens
gagaggcccagcagggggcggggacgccgggaggcggggcctggccgagctgcgcacacccgggtggttctggctacgggtacccggacctgcccaacgaccgttctccattcccgacctcc

SEQ ID NO: 2484 - DNA, 122 bp, Homo sapiens
cagccgccgggccggaccacgcgtaggggtgggggctgccgagaagcaactagtggcaagcgggactcagagccgcgcgggaggggagctagtggtgacggaacagagcacagtaagaaaag

SEQ ID NO: 2485 - DNA, 122 bp, Homo sapiens
tgaccaggaagcaggaaaggccaagccccctggcattttctctggctctgcttccaggaccgagtcatatccgccactcacaaggacagccaggaagtgactcttcctcccccagtggccag

SEQ ID NO: 2486 - DNA, 122 bp, Homo sapiens
ctgtgtgctgaatgttgtccaggggctattgagtagtcgcccaacaaacacttgggcgaccgcctactaagtgctggcactggggatacagtgatgaaaacagcacagttcctgcccctctg

SEQ ID NO: 2487 - DNA, 122 bp, Homo sapiens
ccacatgccctcggtgaagagcaggcagcggccgcggaagtcgtggccgttctcggacagcgggaccaccaccacgaagctgaacaggaaggccaagaagtagcaggcgcactgagcgaaaa

SEQ ID NO: 2488 - DNA, 122 bp, Homo sapiens
tgttcccctctgggcctcaggattcaaggatgcgccctcttgcaaacagtccgtggcctgcgacagaaagaaaacccctgggagcggtcggggtggggacccacaaaacgctgtggctaaac

SEQ ID NO: 2489 - DNA, 122 bp, Homo sapiens
ggagagaagtaagtgtgtcgttttgttgatttgccactttccgtggggtggaatctctagcgtcctcccaccttggactcaaagaaagcagaggctgaccagctcccgagacagctgtcgcc

SEQ ID NO: 2490 - DNA, 122 bp, Homo sapiens
tgggaagggagggttggcccctgtgaaaccaactgatctgggtttgccactggggcttaccgaagtcaggcccccaacctcccacagagactgggagacaggggccccatcctcaggtgttg

SEQ ID NO: 2491 - DNA, 122 bp, Homo sapiens
tggtccctgttgtacaggcccaggtggggtacaggtcaggcctgctgaggacctctgcaccgtggggcccctctccctgtaactcatcccaccggctggttccacagcagctcccaggaagc

SEQ ID NO: 2492 - DNA, 122 bp, Homo sapiens
tgagcatgcccttgccgctggctcagctgcagatgatggggaggccactggaccacagcccgggctgaatacgtactcttggtcgtgcactgtgttcttatccaggcccatgctgccgggtt

SEQ ID NO: 2493 - DNA, 122 bp, Homo sapiens
ggaaactataggagcttagatgctgtttaactagatcaagaaaggtttcatggacaaaggcgaagttattgaggctggccctaaaaatgaatgtaggattcattgattttgaaatgcaaagg

SEQ ID NO: 2494 - DNA, 122 bp, Homo sapiens
gaggtgggtgggtctggagctttctttgtagaattctgttcactgcactggagaagtgatcgttcagccgatccacaccccgccctccccacagacaccggggccgaagttcccagagaaga

SEQ ID NO: 2495 - DNA, 122 bp, Homo sapiens
cagctgtcactggcgatgacacccacatctatcactggcgatgttttgttaatttaacctcgagacttccctgattatccgcataatccgtcctcaaatcccctcgttgtcactgcattttg

SEQ ID NO: 2496 - DNA, 122 bp, Homo sapiens
tccggggacttctgctacgttggggagcagtactgtgtagccaggatgctggtgagtgctcgtaggggcacgccgccccctgctggtggagccagtagccgcagcccttccgggaacgtggg

SEQ ID NO: 2497 - DNA, 122 bp, Homo sapiens
tcattgtgcactctgtgtttacacacaaacagtggaagaccaacacaaataaaaatcccacgtctccctacacagctcctgctatacccagccatctggtgactacctcgctagccaaatcc

SEQ ID NO: 2498 - DNA, 122 bp, Homo sapiens
aacgcagcctttcatgggcataaacaagggccactgtgctctggcatacctgtggaccggcgacgtggcctgagagccatgcgtgttcacagtgctccctcttttcacgcacagaaacttac

SEQ ID NO: 2499 - DNA, 122 bp, Homo sapiens
ggggcaccagcaggcggggagcgcctggagcggggccgggtgctctgccctctccaggcgcggcgctgcttgctctgcctgagctgccttcccgcccagtgcatcccgcttctcccccggga

SEQ ID NO: 2500 - DNA, 122 bp, Homo sapiens
ccaaaagccaagttcccggatgctggctggggatcacccggatgctggctggggattacccggatgctggctggggatcacccggatgctggctggggatcacccggatgctggctggggct

SEQ ID NO: 2501 - DNA, 122 bp, Homo sapiens
cctctctctaaatgttagaaaattgtgccatctacccgctatgctgagtactgtcacactcggagacctcggggacctccgggcaggcttcaatgctgcagtgtcaggggccgcgggcagca

SEQ ID NO: 2502 - DNA, 122 bp, Homo sapiens
cggagcccgaagtcttccccaccgctggcaggagagccccgcgagctctcccggacgtgtcgggtcctaaaggggagagctgagcagccacttcagggattgcactccgaggtggccgaggc

SEQ ID NO: 2503 - DNA, 122 bp, Homo sapiens
aagacggcggacggggaagacgttctttctgactgcccttttcctacttatcttggaggacgatgcggagtttaagctccttaacatttcgggaatggcgcggtccaaccgcgtcagtcttt

SEQ ID NO: 2504 - DNA, 122 bp, Homo sapiens
gtggtatggctcagcgtgctttgtctgtaatgttggcactggatcctggtgagcttttcacgtcatcagatggtattatggccgaggaccctgaaatgcctgaagcctgcttgtgggattct

SEQ ID NO: 2505 - DNA, 122 bp, Homo sapiens
cattctgtcccctcagttccgatgcctcaaccgctcagccgccggaatcgcagccactgccggcttcacagacgcctgcctccaaccagccgaaacgacccccagcagcccccgaggtacct

SEQ ID NO: 2506 - DNA, 122 bp, Homo sapiens
ctgacattcttcatatgaaaaattaaaaaacgaaacaaataaaagctcaggctctccgggcgcatcagcctgatgtgcagttagcactgaaagccgcgtctgtctgggcgtcgcaggagcgg

SEQ ID NO: 2507 - DNA, 122 bp, Homo sapiens
tgaatttgcatggggttgggctgcggtccagctgtgtcgccccggcatatacacagttcccggggtagagggaaacccagaggaactggttgtaaagaggaatgggccccagctgaccccct

SEQ ID NO: 2508 - DNA, 122 bp, Homo sapiens
ccacggagaccacaatgccacagaggcggctccctcaccacggcaaccaccgtcactcagcgccgcctggacaacagctccctccacgtggccgccaccaacacagcctcggtgacagcccc

SEQ ID NO: 2509 - DNA, 122 bp, Homo sapiens
tattactatgattttattcttcagggttgtgggaatctgcatcttgacttggacctggcccgtgtgcaggatgtaatgggctgatgtgcctggactcctccctctgcatttgtgcagtgctc

SEQ ID NO: 2510 - DNA, 122 bp, Homo sapiens
tgtgtcctacagggggcgccagacgcatttccactcggcttggaggtggatttagtgccacgtgcccgaaagtcttaaattgggtgacctgagctgtgcaatgataatgcggcgattttgta

SEQ ID NO: 2511 - DNA, 122 bp, Homo sapiens
gcccgagctctcttcttgtgaataaaagggataactgcctccttggctcaagtggaaccacgtttgctgcttttggccaaaggccacttcaaagcttacagagcagggaacactcttaagaa

SEQ ID NO: 2512 - DNA, 122 bp, Homo sapiens
gcccacagctgcatggtccaccataacaacaatgggggcaacaacccacgcgtccatcaacggacacacaaaacgtggtctttctgcacagtgcagtgcagctcagccacagggaaggaggc

SEQ ID NO: 2513 - DNA, 122 bp, Homo sapiens
gacaaaaaccacgcgcccgccgggccgcgctcaggccttcgccctcagggacttcggaaccgccccgtcctcaagatcgaaaagcccagagccccgcggcggctccaagcacggtgttgggg

SEQ ID NO: 2514 - DNA, 122 bp, Homo sapiens
cattgccgggccccgggctgcctgtttttcgtctgaaaggcgggcggcggatgagtttcccggatgagctccggctgcgtgagctccccgcgggcaggcgcagcgccccctcggtgcggcgg

SEQ ID NO: 2515 - DNA, 122 bp, Homo sapiens
gcggggcgcggctgccagatgtcggggcggcggcggcgggagctacggagagcgaggagtcgcgcaggcaggcggaggctgagggcgccgctggccggccctcccagccctctccgcgcggc

SEQ ID NO: 2516 - DNA, 122 bp, Homo sapiens
agcggagctcctggcagcccgagccgctctgcccccgcctggggtttgttttccagaaggcgttgcctccactgaggacctttctggaggacgcaagtcataaaaacgtccccacccttgac

SEQ ID NO: 2517 - DNA, 122 bp, Homo sapiens
gcagcgcctgggaccggagcagtgagtgagcgtgggtgggagctgcggcctgggtccctgcgcccgactgccccgaaggcaggtgtggtgggggggttgggggggtgggggtggggtgtgag

SEQ ID NO: 2518 - DNA, 122 bp, Homo sapiens
aggctggtgagctcggccttcaaagcgtgtgtgaagcagtgtcggtcttctttgtagtaacggggaaagcagagattcacaacagggcttgggggatggcgccccagcggtgccaggaggtc

SEQ ID NO: 2519 - DNA, 122 bp, Homo sapiens
gctcaggtggatgctgaaaggcgctgagcatgcagaagagtgagcaggtgtcgctttgggcgtttgtgaattcctgtgtgtatgcagagctccaccatctgggtgagccagtgttaattaaa

SEQ ID NO: 2520 - DNA, 122 bp, Homo sapiens
gggctctgcctgctctgcgtccacgccagcataagccccagccggctccgtctcccctaacgactctaattaccagccaagctcggctccccaaggcccaggcgccagaactgatgacttta

SEQ ID NO: 2521 - DNA, 122 bp, Homo sapiens
cggggcggggcgggggcagcgcgggtctcaaagctgcctgcagggggcgcccgtgagcggcgcggccggagccggagacccagcggccgccgagacagcgggagccggcgtgcgagcggcag

SEQ ID NO: 2522 - DNA, 122 bp, Homo sapiens
cccgcacaacttggggaaatgcggggctgtgggcgtggagctgtcccgggagggctggagcgagccaaagtcaccgaccagggaccaggcgatactggacgcccgggctcccggcggccgcc

SEQ ID NO: 2523 - DNA, 122 bp, Homo sapiens
actgcagctgggcatggccacattttataggccctcattaagttccatcatgtgagggtccgctcacttcttcaaatactcagattctcatcattggcagtggctggtgatcaggtggtaag

SEQ ID NO: 2524 - DNA, 122 bp, Homo sapiens
ttgcaggggccccagctctaagactccaggggatccctgtctcagccacaaccccagtgccgatgacaaagcaggagctgccaggccagagggccagggaagccccacagtgtgcctggcag

SEQ ID NO: 2525 - DNA, 122 bp, Homo sapiens
cctaccttgtacccctgcactgcctcctcggcgggcagcaccctgtgcagccggtgctcccgggactccctgcacaccacacagatggggctctggtccttctggcagaaaagcttgagggg

SEQ ID NO: 2526 - DNA, 122 bp, Homo sapiens
gcatgagccacacaggcatttatggaacagagggtatgaattcttggagatcagcctacacgcaacaattaacaaattttacacgtactgtgcaaaactaagatttgtgacagaatgtcttt

SEQ ID NO: 2527 - DNA, 122 bp, Homo sapiens
ggcctgggggaggaagggcaggcactgccctaggaagcaccatgggctcccactcagggccgtggccaggagaagctgtcagctggtgtctccaggacacaccatccatagcatctgacccc

SEQ ID NO: 2528 - DNA, 122 bp, Homo sapiens
atttttcatatcatggacattgaatagggtttattgaatcaggaaggtaaggggaagaaccgggcacatatgtgttggaatactgtgggtttgacacctggttgaaaacaacttattggaca

SEQ ID NO: 2529 - DNA, 122 bp, Homo sapiens
gtgtggagtgtgtgtgactgtgtaaccatgtccaggcagggtgtgggagtggagagggtacgggacgggagctgcagacaacatccgagccggctgaagcccacagagcaggccccgtgttg

SEQ ID NO: 2530 - DNA, 122 bp, Homo sapiens
ccttccgggaggcgggacaaggcttgcttgcgtcctccgtagattggcaggtcactgggacggccagcgcgtgcgcactggcctgtcagcggccggtggaccatggaggccgcaaggccctt

SEQ ID NO: 2531 - DNA, 122 bp, Homo sapiens
tcgctgcccagttgaatagggggttgggcatactggagctcccacttgcagtggccaccgcgtgccctttgatgggacgttacattgcatttcagcagcacccagctgcttccaggtgtctg

SEQ ID NO: 2532 - DNA, 122 bp, Homo sapiens
tgaggaagcagatttctagtactatatgcatcctaaagctaaaagctacagatccaagaacgccagagcagcttagcatcaaccaagaagcacttactgcatgtgtttttctaagacactct

SEQ ID NO: 2533 - DNA, 122 bp, Homo sapiens
agtaatggttagattagcatattgagaagatcactttggcaattgttggaatgcagtttacgagagggccaagaatggaagcagcaatccctgttagaagtgtagtgttttggagtgcggtg

SEQ ID NO: 2534 - DNA, 122 bp, Homo sapiens
ctgtgcttcgctcctagaagagcccctggcaggtggtgagtgttccgtgagtgcgggctgcggttatcatgattaatattaccattaatattgctgagaagtcaagactggccagggcagac

SEQ ID NO: 2535 - DNA, 122 bp, Homo sapiens
gagtgctgtctttgtagaacccaaccggaacgaatatctggagttaaaagcaaaactaaacgttgagccggactacctcgaagtgctggaaaaacagaccacgtttagccagttctaaaagc

SEQ ID NO: 2536 - DNA, 122 bp, Homo sapiens
tctttctccagagaaaccatggctgctgacctgagatgctggctcctaaccccaaggatgcgtgctgctggctgaagcctgaagtgcatgaatcagggaagcggtggtggcaggagaggctg

SEQ ID NO: 2537 - DNA, 122 bp, Homo sapiens
acagacattgttgcacctactcctagagctcccaaggtggctcttcaactgggctgtggccggcgtacttcctgcagtagggcaggcagcaggctgagggaaggctgcttctcctggaagac

SEQ ID NO: 2538 - DNA, 122 bp, Homo sapiens
attcgtgtttaactcactgaatgaatacgtgggtttgggtgggaatcatccctgtgtctacgatcatctcaaggagaccagagaagggaaggcacaaccaatcaaagcagtttccccaatta

SEQ ID NO: 2539 - DNA, 122 bp, Homo sapiens
cggcgccgcggtcacctccgccgctgcctcggcggggccgggagaggattcgtctgacagcgaagcggagcaagagggaccccagaaactgatccgcaaagtgtctacctcggggcagatcc

SEQ ID NO: 2540 - DNA, 122 bp, Homo sapiens
gggtggccggtggccgcgcggtgcctagcacctcctgtgtcgtcggtgtggaggagggaccgtcagcattttcagaagcagggtggaaaatggccagcagtggacctgggagggcacatctt

SEQ ID NO: 2541 - DNA, 122 bp, Homo sapiens
cctcgttaacccccttcctgtggctgcaccacgtcatggaacattcccggaacgggccaacgttccacccacttcagggaacagacataaaggcgcagacccagttccccacagtgcacagc

SEQ ID NO: 2542 - DNA, 122 bp, Homo sapiens
tgaccccgtgccttggctggagcgccgtttccctggacgactgtggctgggatggcctcccggcagtaatcttgcgcaaacaccctgccacgcgcaaggacgccagctcagacacgcagcgc

SEQ ID NO: 2543 - DNA, 122 bp, Homo sapiens
tctcagcttcgagcatggcttttggctgtcagggcagctgtacaatagtgggtaagtcaccggcctttgggctcagttttctcatccatcaaatggacattaatgatttctacaatgagagc

SEQ ID NO: 2544 - DNA, 122 bp, Homo sapiens
ccgcgacgcccaggaggcgacgacgccgggccctaggtccaggagctcctaagccatccccgtcctcagccggtggcccggtccccttagggactgccttatgagttgcactcgctgatgga

SEQ ID NO: 2545 - DNA, 122 bp, Homo sapiens
ggagctcaggcccacctttagccctgccttctcccggccctccgccttctcctcactcgccgaggcctctgaccctggccctccgcgggccagcctgagggccaagaccagcccagaggggg

SEQ ID NO: 2546 - DNA, 122 bp, Homo sapiens
tcttctgcgcccttttgccgctgcgtgctcggatctaggactatacatcccagaaggctgcgcgcaaggagggcggggaagagggcgtccgtgacggcggcctcaccgcggcatcctgggag

SEQ ID NO: 2547 - DNA, 122 bp, Homo sapiens
cccgccccctccccccgagaagtgaccctcggctcccacgtacccgctagggtctctcgccggccctgccctccgacccccgccgagctgaaccccgcgactagcagcccccgccctctcgg

SEQ ID NO: 2548 - DNA, 122 bp, Homo sapiens
tgtacatctcatcctcgcccgacgaggtggcgctggtcgaaggtgtccagaggtacgtcgcgggccaagggtctgcctgggtttcctgatgtgactcagcccctccccagccccagtcaggg

SEQ ID NO: 2549 - DNA, 122 bp, Homo sapiens
atgtatggctccggcctcaggcggccagggcgggacaagcacgcctgactctcttggtcccgactggactagagctggtagcaccctccctcagggtcctaagagacctgtggctcccagag

SEQ ID NO: 2550 - DNA, 122 bp, Homo sapiens
ggaggaggcttgcagacctgcagggcggggcctgactgagagcggggcgggatctccttccgggctggggaacagatgccctggcgtccttggcactgggttggctggtccctctccgtcct

SEQ ID NO: 2551 - DNA, 122 bp, Homo sapiens
caaatattattgaggagcttttatggcctaacctgtggtctatcctggaggttgtttgtgcgtacaatacatagtcttcaatatcttttttttttttttcattttttgagagggagtttcgc

SEQ ID NO: 2552 - DNA, 122 bp, Homo sapiens
ggtcacgggcctggggggctcaaatgccagggagctctctcttgacagagctgaccagcccggccccttaggtcacgggcctggggggctcaaatgccagggaacagagctgaccagcccgt

SEQ ID NO: 2553 - DNA, 122 bp, Homo sapiens
cgaatcccggtgttggagtgtgctgcctcctggcttcaggtactgctcaagagagaccctcggccgggtgcggtggctcatgcctgtaatcccagcactttgggaagctgaggtgggcggat

SEQ ID NO: 2554 - DNA, 122 bp, Homo sapiens
ttagaatagtgcctggcacaaagtaagcactatgtgtttttttcatgcaagtaatttggccgggtgcactggctcatgcctgtaatctcaccactctgggaggccaagatgtgaggatcatc

SEQ ID NO: 2555 - DNA, 122 bp, Homo sapiens
gtaagggccaccctctgctaagccatcaagagtttgtaagcagtggtggtggggagagggcggcaccgcaagctttagaacaagactggagcatagtgaatatgtgtttgggaaggttccat

SEQ ID NO: 2556 - DNA, 122 bp, Homo sapiens
cgccaacgttggcttttgagcagcgggataggtgggcctggtggtaggtgcttcggcagccgggcagccgcagggacttcctccctcgggattaaacctgagtcgggagttggagggcaaca

SEQ ID NO: 2557 - DNA, 122 bp, Homo sapiens
cgcgcctccgcggaggtagccgttccctgacctagccatggcacagaacactgaaaaccacgaccctgtcggatccatcttaatccaggtgggaaacgggcttcccccggccctgccctgcc

SEQ ID NO: 2558 - DNA, 122 bp, Homo sapiens
cttcacattaggataagcaggaagatgaacttggaaggtagaatgtaatgaacaaaaattcgcattatgaactacaaatgctgttggagatcaagagacagagttagaaaaaacttcctgaa

SEQ ID NO: 2559 - DNA, 122 bp, Homo sapiens
ctttcccaggccatggggtgtttctgttttctattagacactgtctcttagttatataaacgtggctgctctcagaagttctccacacctttgtttcctggaagaggaaatggcatttcctg

SEQ ID NO: 2560 - DNA, 122 bp, Homo sapiens
cccgcaggcctggtgtgagcctggggtccgttctcacagctggatctggggtctgaatgccgcgccctctggagagccacagatgggtctccgctgatgcttctctcaatttcctctaagag

SEQ ID NO: 2561 - DNA, 122 bp, Homo sapiens
tctgcaccgcgcgccgtgcccagcagagggcgctgcctcacctgctcctccagcatcatgcgcaccgagcgctccttgtccagctgctgccgcagctcaatcatctcccgccgcaggtcctc

SEQ ID NO: 2562 - DNA, 122 bp, Homo sapiens
gactcttcttaacaaagctatagaaattccgagctgaaaagacccataaagactctaccgcgaacattttttgctccagacattgtaaaggattcccagacatcgtaaacgctttgctccag

SEQ ID NO: 2563 - DNA, 122 bp, Homo sapiens
gaaagcccaaggagaaggagccagcaggcctctgagcgtgtgagcgcgtgtgcgtgtcagcgcgtacatgggggtgttttcctcttcgggaagtgttatcaaacagtaatagctaccctcga

SEQ ID NO: 2564 - DNA, 122 bp, Homo sapiens
acgatggggcaggggcgcgacggtctggcggctccggggcattgtctaagcgggacggggcggggcttcttcgggccacgcccattccgccctgctaagcctcgcccattacatccagactg

SEQ ID NO: 2565 - DNA, 122 bp, Homo sapiens
ttccaagaacacagacaaccgagacgagaacacagcagtgtgtgccaggaggaaacgccgcgtcaggcactgatccatcagaggccggcagggaagggtgtaaactcagcgacggccgccag

SEQ ID NO: 2566 - DNA, 122 bp, Homo sapiens
gcgctacaagggcgaattctggacgtatctacacagtcaccgcggagtctgcaatcgccgcgacgtcccctggcatttcttggccaggctgcaactttggtgacggtgtatgtagttacatc

SEQ ID NO: 2567 - DNA, 122 bp, Homo sapiens
tcaccagggagtgccagatagtgggcgcaggacagtgggtgcagcgcaccgtgcgccagccgaagcagggcgaggcattgcctcacttgggaagcacaagggatcagggagttccctttcct

SEQ ID NO: 2568 - DNA, 122 bp, Homo sapiens
ggcgggctggggtggggggggctcaccttggagatgaagatgccctcgtctgtggggtcgcgggggttgccagcgtggcccctggcacccccgcggatgctgatgcccagcctctccccagg

SEQ ID NO: 2569 - DNA, 122 bp, Homo sapiens
gacactacagaaattttagtccccacttaaggaaatgtttaagtaatagacactcttagacgtttataggatactttataaaaattgtctaagtttaggattatagagcccttggtcatttg

SEQ ID NO: 2570 - DNA, 122 bp, Homo sapiens
taacaacgggacaaacagtatgaaatcaaaaccgtttaccctcctcccaccagcggtttgcgtagggccttgggtgcactagcaaaacaaacttattttgaacactcagctcctagcgtgcg

SEQ ID NO: 2571 - DNA, 122 bp, Homo sapiens
aaggcctgggagggtgggggctgagtgccagcctggatgtggaggctggggcctgacctccgcgccctccccacctccagctcagcctcaacaacaagcagctgtcacagatgctcaagtcc

SEQ ID NO: 2572 - DNA, 122 bp, Homo sapiens
agtaaaagccctagcaagtaaaagccctgaggcactagggtgtcggttaggggtcacaggcggagaggtggggcgcctgggggtttcggtagggagccacccacagataactcagacagcca

SEQ ID NO: 2573 - DNA, 122 bp, Homo sapiens
ttattccagggcaatagacttgcttcattctggctcagtcttgaagtctatagacccaggcggatctctgcagttttgcgagatgaacctcctagcaacctgctaataccattcattctgca

SEQ ID NO: 2574 - DNA, 122 bp, Homo sapiens
ctccctgccagggctggcggggctggctggtggctccgactgtggggccctctgagcccacgcccacccgaaacttgtgctggcccgcaagcgcaatgcagcagccccggttcccgcccacg

SEQ ID NO: 2575 - DNA, 122 bp, Homo sapiens
tcgcgcgattccgcagctcccaggcgccgacccggacccccggccgcggcacctacgccccgccccagtcgctccacgccaaagcccattggtcggcaacctgtccctcctgctcatgtgat

SEQ ID NO: 2576 - DNA, 122 bp, Homo sapiens
accaacaagcagcacaccccagccttccatcttcccctttgcaagaaacatttgaaacatcgcttacaatgtcgccagggcaacactcagtttccacttccaacgcgcagctccctgtcttc

SEQ ID NO: 2577 - DNA, 122 bp, Homo sapiens
aacgcgacaagtggaggagagcgggcttttagcgccagaagcttccatgatgcccaggtccgcgggcagggcgagggcacgggccggggaagcaagcgttgccgcgccgctaccgtcggggg

SEQ ID NO: 2578 - DNA, 122 bp, Homo sapiens
tagccatagggtacaatcaacggtcgatggttttgattttaattccaaactcaccgacagcgttgaatgttcactgaagcaacctcaaaactcagaattctactcactttacagtatctgta

SEQ ID NO: 2579 - DNA, 122 bp, Homo sapiens
ctggagtctcccgtccacagccggggactgcttcacacctggtgcccacattctgcctctcgttaaacattgcatgcgattcctgcgagttctctggcatgagacgatgacctagtaatggg

SEQ ID NO: 2580 - DNA, 122 bp, Homo sapiens
ccaccgctctccggtcctctctgcaccggctgggaggtgaattaggcagaatcccccagtcgccgcgggagcagcgcctgccgagcagccgtgcccggagcccgccccatgcaggagcagag

SEQ ID NO: 2581 - DNA, 122 bp, Homo sapiens
aatccctgtcgcttcattggctctggtgaccggcctcccgaaagtcggcttcctattggtcgtcgtggccgccgctctgcgcttttaccggggcacgcggcgagcgtgaccacgccccttac

SEQ ID NO: 2582 - DNA, 122 bp, Homo sapiens
ctcctccgagagaccgccgaggtgcgggctgtgagagagggagcgtggagcctccgaggccgaggactcggtcccagtttggacagatagaagatcctgccgagtgcctgtgattgcaggca

SEQ ID NO: 2583 - DNA, 122 bp, Homo sapiens
ggccggcggcacttgctggccgcgatctcctccaccttcatgatctgaatggagtgggcccggccgccgtgccgggcgctcatgtctcggtagcaccgggtgacagcgcctgcggtggtcag

SEQ ID NO: 2584 - DNA, 122 bp, Homo sapiens
gtaggcgtggaagaagctccactcctcacactgggagaaggcggccgccccgatgcacagcgtccccatgcaggagaagaagcccacagtcaccatgttctccatagacacgtcagtgttgc

SEQ ID NO: 2585 - DNA, 122 bp, Homo sapiens
gggtcccctgtctgtgagggccccggtcggtgagggtcccctgttggtgagggtcccggtcggtgagggtcccctgtcggtgagggccccggtcggtgagggccccggtcggtgagggtccc

SEQ ID NO: 2586 - DNA, 122 bp, Homo sapiens
tggtgaagaaccacgaccacctggaccagcgtgagggtgaccgcggcagcaagatggtctcggagatctacttgacacggctactggccaccaaggtgggcctggctggcagatgggggcag

SEQ ID NO: 2587 - DNA, 122 bp, Homo sapiens
gatttgagaggagaagaaggtcacggatgctgacgttccatcagttcactgattgacccacggccccgggtcgcaggcgttccgctagtggccagcgcatcatcagccacgttcttggcgtg

SEQ ID NO: 2588 - DNA, 122 bp, Homo sapiens
aaaccttttgcctcggtaattctgcgctccatgggtgtctctttacatctattcacagtacggctgctgcccacggacggcttgccctgtgacagtgctggtgactctacgctcggctcgcc

SEQ ID NO: 2589 - DNA, 122 bp, Homo sapiens
ggtgcgcccggcctgccagcacaagcagcggcgctgcagcctggccagtgtggagatgagcgccgtggcgccgccgcccgccagcaacgggaacctgctgtacatcggcttccgcggcctgg

SEQ ID NO: 2590 - DNA, 122 bp, Homo sapiens
gcagggcctctgcaagtgagatgcagatccagcctgttggccacttagcacttgcttggccgcctgcagatcacctgacctctgctcacctgtaaatgggggttgcagcagcacttaccttc

SEQ ID NO: 2591 - DNA, 122 bp, Homo sapiens
gctgcttttatgagccgtaacactcaccgcgaagatatgcagcttcactcctgagcccagcgagactaccagcccaccgggaggaacgaacgactccagacgcgctgccttaggagctgtaa

SEQ ID NO: 2592 - DNA, 122 bp, Homo sapiens
tcataaaagctgcaccttcagacgccagccatgaagctaaggatggatgtgcttgcctggcgagagcaagggagtggggggctcacagcccttgggaaagcggatgtgtagctgggccggga

SEQ ID NO: 2593 - DNA, 122 bp, Homo sapiens
ccctcagggcctcaggtggaaggcgtcgggaagtggagcaggtatgtgcctggaggtgggcgtccagcaccaaagtcgccccgtacgcgtgagggtctcgggacaacagaacaaacagcaga

SEQ ID NO: 2594 - DNA, 122 bp, Homo sapiens
agcctcgcggaccctggctggggacggggcaaatccaggcatggggcgctccaggtgagacgaggagtcctcaccccagtgaactgtgaggccaagggaccctgggacagggcgggctctgg

SEQ ID NO: 2595 - DNA, 122 bp, Homo sapiens
ttcgtagtccgggaacgatgaagggagactgccacctatgggccaggttccagggacgcccgcacgtggcgttctgcgggacagacgcagtcttaaggtagaagggaaggcgtcttcatggg

SEQ ID NO: 2596 - DNA, 122 bp, Homo sapiens
tgtctgtcgataattgtatctttgtgtccgagtggtcgggtcagccttcattttaggctacgatttcatggacatccaggaagcacagctactggactctagcataagcaagtaagtatggg

SEQ ID NO: 2597 - DNA, 122 bp, Homo sapiens
tcgggcagtggtcagctctccctggggtccagcagctttggaggactgagctgctgtgaccggagaacacgagctgggcaggcgtgggggcagcactggcagtgggggagggaagttggtta

SEQ ID NO: 2598 - DNA, 122 bp, Homo sapiens
tgcatacacacctatgcctcagtgacacatgttagtgagtgctggccatgtgctaggcatcgtgctggattttagtgatacagtgaagagcaaaatagacttagtgcctagaattatgaaag

SEQ ID NO: 2599 - DNA, 122 bp, Homo sapiens
gtggggcagcggttagaagcagaggctgttaaaggtaactctagaggctgcggaaaaacacgaagattttcacagagcgtgagaacccaggagactggagaccacgggccaatctctgctaa

SEQ ID NO: 2600 - DNA, 122 bp, Homo sapiens
ccactcacgccccccacagcctcacctggggaccaagaccgggcaccgcagggccctccccgcacgggtgccctccctgctcatgccgcccacagcctcacctggggaccaagaccgggcag

SEQ ID NO: 2601 - DNA, 122 bp, Homo sapiens
ttcctcaaaagctcgtggagatcaggtgtttcctgagatggagctgaactgagttctttccgtcgctcggcctgtctgcgcagataatcttctcagataatcttctcatgttccttgaaaag

SEQ ID NO: 2602 - DNA, 122 bp, Homo sapiens
ccagccggccccggggcaggagcggtgctaggcaggggtggggtggccgggcccagggaccgggagccggggagggagccgggcaccgagcagagggcgggggaagcggcgccgaagtttgc

SEQ ID NO: 2603 - DNA, 122 bp, Homo sapiens
gccacatcccccagttatcagggaatcgcaggatgatgatgagagtttgtcagccttctgcgctcgttggctggaatgctttcctatgaaggagcgttccctcgtcagctgttggcgacgtg

SEQ ID NO: 2604 - DNA, 122 bp, Homo sapiens
cagctcttctcctacagcactgcatgtggggcaaggcacaggaagcatctgcccaggaaacggacaaatccctgctgcatccgcatgctctctcacctgccccgccagcacagccagcctgc

SEQ ID NO: 2605 - DNA, 122 bp, Homo sapiens
gatgatctggaatgagaattgcgctggaaagtaagaagttgttcacgttaagtttttctgcgtagtcctttaacacgtgctcagtgacggcacaaattatgaagtcactgtatggtggggag

SEQ ID NO: 2606 - DNA, 122 bp, Homo sapiens
cggggcagtgagtccacccgcccgccgaggtccgcccgcccgccgagacccgcccgccgccgctgccatggccgaagtgcgcaaattcaccaaacggctcagcaagcctggcacggcggctg

SEQ ID NO: 2607 - DNA, 122 bp, Homo sapiens
aaaggcaggccctctatacactcgttgaccaagcacctctccccctgcatttcagttagccgtgaggtatcagtgtctaagagtagtttctgtctagcatctcccccacccaacagtaagct

SEQ ID NO: 2608 - DNA, 122 bp, Homo sapiens
tcatttaaaatcatgttggtcagggagccagacagtcagatggctacctcagtgccccaccgcaagtttccgcaaagcactcagggcacaaaccccagaatgctgatgagacttcatgcaca

SEQ ID NO: 2609 - DNA, 122 bp, Homo sapiens
gctgtaaatcacgcccagagctaattccccagggctctggggcaccagatgtgcagccggcgtaatgagctctctcctggggcctctcgggtgtctggccacgtggcgcacgcgctaattga

SEQ ID NO: 2610 - DNA, 122 bp, Homo sapiens
gtggtgcttggggctacacaagggcccagagacaaagccaccctcagttaaatctcacaacgccaacatacttaaaaaagacatcatttgtcatttaccaggccagcaggacacaccaagaa

SEQ ID NO: 2611 - DNA, 122 bp, Homo sapiens
cctcagccttctgaggagctgggaccacaggcgtgtgccaccatgcccaggtaaatttgccgtgttgcccaagctagtctcaaactcctgagctcagcagtctgcctgccttgacctcccaa

SEQ ID NO: 2612 - DNA, 122 bp, Homo sapiens
cttccgggaagagggggaagagtgacgcttgggtgtgggggcacatccccagcaaccggacgaggccgccacccccaaggccctcctgggcttcggatcccgcgccaacccctcgcccaggt

SEQ ID NO: 2613 - DNA, 122 bp, Homo sapiens
ccctataaaaaaaaaaaccatatatttttcctattctccttaattaagctaacctgaagtcgttgcttactattgtaaacagtcaacaaaatacttcactaagttggtctttcacatgtgta

SEQ ID NO: 2614 - DNA, 122 bp, Homo sapiens
tccccctttatcctctctgctggactccatcaataatgcagcttcaagttctggggagaccgcagggggccccccagctggctccccaggccttggctctaactcccaccctcctcccagcc

SEQ ID NO: 2615 - DNA, 122 bp, Homo sapiens
aaatagtgattgcattactaaagagactgttttacaagatgcacattcacctaagagccacgagctttccaaagccaaccttctctcaaaggagaaaatactattatttctcctagtactta

SEQ ID NO: 2616 - DNA, 122 bp, Homo sapiens
caggaccccacaaaaccagaaaactaacaggaccccttgtagaccagtctctttgtgcaacgtagggagaaagggcgggggggactaaagaacctcccaaaaggtattaaaaatagcaacat

SEQ ID NO: 2617 - DNA, 122 bp, Homo sapiens
tcaggcctgctggagagggggcaatcccgcctccagggcggcgtcggacgcctcccgaatcgcagtcagtctccctaaggccctctcagaccaagctctaagcgccctcagcactctgggcg

SEQ ID NO: 2618 - DNA, 122 bp, Homo sapiens
cagaaatccggcaatcgacctgaggacttgcgagccgctcagctcccgggacgtttggtgcgtcttctaagggcgtgggcgagtttacgcgggccagttgttgctggtcgcatgggtaacga

SEQ ID NO: 2619 - DNA, 122 bp, Homo sapiens
gttgcccttgcggagcaaccggtgcacgcggcccacggggaactgcagccccgcgcgcgacgagcgcgacttagccttggcgcgcgccttgccaccctgcttaccacgaccggacatttccg

SEQ ID NO: 2620 - DNA, 122 bp, Homo sapiens
agcgacattgctccatgtctgccgtaatctcttgttagagatgaatgactaagtccagcccgcactcaggggcgggagaattaagctctccgtcttgagaagcagagtgcccaggaatttgc

SEQ ID NO: 2621 - DNA, 122 bp, Homo sapiens
ctgacaagagaagagttaaggagaatagggtcggcgccccagcatgaaactgtagtgctgcggcagaaagttattcatataaggtgggaggctgcagcccatttacacctaggccactccag

SEQ ID NO: 2622 - DNA, 122 bp, Homo sapiens
ataatttatgaaggatttttattcttgatttggtaccttatgcatagactgtaaaactaacggagatctgctcagcttacatgttgcaacaggtgttccctgctgccccagttgatgttctg

SEQ ID NO: 2623 - DNA, 122 bp, Homo sapiens
atgtttggcctcaagtgggcaggtcccatgggacatgagtagccgaccatgacctggctgcgtactggcccaccaagcattcgactggcgtgcccagccactctccgtcatcgcagagaagt

SEQ ID NO: 2624 - DNA, 122 bp, Homo sapiens
cctccctgcaatacaggccaacttcctgtttgtgcctgtgggtgggactttatgagtcttcgagaagcccagccatgccccgtgggggtcagaacccgcaggcctgctcacctgggcagata

SEQ ID NO: 2625 - DNA, 122 bp, Homo sapiens
tgagccgggccggggagcccgggcccctgccccgtccccgccgctccgtccctgtcgggccgctggggtctccaccgtctttgctgagccacctctttgcctcggcagctggtacaggacga

SEQ ID NO: 2626 - DNA, 122 bp, Homo sapiens
cagagagaaagcagaaccattcaacttctatattgcttccacctttgctatcaagacaaacgatcaccgtgttgaaaagaagaggaaaacatgaagcccaagacaagtgaggagatcccaag

SEQ ID NO: 2627 - DNA, 122 bp, Homo sapiens
gacacagagtgtgcagaggccctgtggcaggaagatcatattgaagcaggtaaaatttatcgttttcttagtttagaggtgtggcaaccaagtctaggagacagatagtgatttgttcacct

SEQ ID NO: 2628 - DNA, 122 bp, Homo sapiens
tgggccaaaagtatgggcaggcgactggcttcctgtccaggcaccggggaagggcaggcacggcctacagctgagggctttgttttagcttttagggtttgctttttccggagaggagaggc

SEQ ID NO: 2629 - DNA, 122 bp, Homo sapiens
ggtgggggtgcgcacaagggaggggcaggggactgggaccccctcttcttcggggtgcttcgggccgtttctccagaggctggtggtgtccccgacccaagcagctcagccccgctcgcgag

SEQ ID NO: 2630 - DNA, 122 bp, Homo sapiens
tatggtcgttaactgttaactatagctctccaataagtggtaattgactgtctaggataccgagaataaaagcacattctagcaaatgattccagaccatgtaaagattttttaattatctt

SEQ ID NO: 2631 - DNA, 122 bp, Homo sapiens
aagcccacggtgaagttggagagccagtgcacactgccccccaccatgaaggcagatggccgagaggactgcaggaagatctcagtgatgagcagcgcgggtatgggacctgtagggggagg

SEQ ID NO: 2632 - DNA, 122 bp, Homo sapiens
cctacatgcaggagcatggtgctctctggccgggcagcctcacctccagtggaagctaagcgttgtgcccgggcagggggcgcaggcaggagggctgagcttccctggttatcccctgaggc

SEQ ID NO: 2633 - DNA, 122 bp, Homo sapiens
gacaccctcctgtagatctgatggaggagatacccttctgtttaactcataccatagactcgaagctccaggagcacggagccttgcagcgcctcctgcatgaggaaaggaaggaatgagtg

SEQ ID NO: 2634 - DNA, 122 bp, Homo sapiens
tcaagctggagaagtaacacacggctgcacggggctctactccatgcccctccccctccccgtgcaatagtccagcgcccaccgactcctgctcccagcgccagccatccgcacggggcgcc

SEQ ID NO: 2635 - DNA, 122 bp, Homo sapiens
cggccgcgggccgggtggggatgcctctgcacgtgaagtggccgttccccgcggtgccgccgctcacctggaccctggccagcagcgtcgtcatgggcttggtgggcacctacagctgcttc

SEQ ID NO: 2636 - DNA, 122 bp, Homo sapiens
ggctggtggcttggactttaggatggcgaggaaacgtgtgtggaagtgagagatggcttacggggcctctttctggtttttgagtctttcaggtgtgttgaagcccaaaccacacagcatct

SEQ ID NO: 2637 - DNA, 122 bp, Homo sapiens
ctcaggccccgaaggcggtgtatggattggggatgccccgccttagggattcgccacctccgcagtttctcttcttctcacaacctgcgacgggtccttcttccttgatactcacgaagcgg

SEQ ID NO: 2638 - DNA, 122 bp, Homo sapiens
ctggaccctccctgcctgggggcagccaggcctcggccccccatgtggcctgagcacatgcgcccagctgtgctctgacccccacctgctccagaaggctctgctcctccctgaagcctcca

SEQ ID NO: 2639 - DNA, 122 bp, Homo sapiens
gcgtttgtaggcagtgatgtcacagagtgccttcatgctcctcgggtctccggttctccccggacctctgtagtcctcattgccaaagttgtaccccctggggagtgcaccctgcctgcatt

SEQ ID NO: 2640 - DNA, 122 bp, Homo sapiens
tggccgccgcgcagggaggcggggctgctccaagtccgggcaggagcggggcggggacgccgtcggcggagccagcgcgcaggcgcgggccgcgtgggccccggatggaggagctgaggttc

SEQ ID NO: 2641 - DNA, 122 bp, Homo sapiens
agtaaacaagggatcacaaagcagtgataaatgctgtgataagaatacacatctagtgctcgagttatcaagcattagatgctgtgggagtacagaagggcagttgcctaagtctttaagga

SEQ ID NO: 2642 - DNA, 122 bp, Homo sapiens
tggcttcccggcgggatggggggcggggcctttctgaagttgaaggctgtggccggcgagcgcagagacgcagtgggtgaggctcgcggccctgcctgggtcctgggcccgcgcccgactcc

SEQ ID NO: 2643 - DNA, 122 bp, Homo sapiens
caccttaccaactgcacggcgatactgaggaactttgcttttgattggacagaattggtgcgggataaggaaggggcgggccagcatgtactaagggtggcgggtgtgcggagtgggcggga

SEQ ID NO: 2644 - DNA, 122 bp, Homo sapiens
ttttttccttcgccagaaaaaaaaatgctgtaaggtcctacatacacttgaagctccttccggaacccccgagcccaccacacccccatgcaatagcttagctgcctgccaggccttcctgc

SEQ ID NO: 2645 - DNA, 122 bp, Homo sapiens
tttttgctgaaagcccggttcagagttctcatgtgtgttttggggacccagggcatttaccgaacccggtgagggctggaaattccagtctcagaaagtcagagtcgcacaggatcggggaa

SEQ ID NO: 2646 - DNA, 122 bp, Homo sapiens
ttgcccttctgtccccaccagcagatagatgactttttatgtgaggtcccatctctgattcgactctcctgtggagatacctcctacaatgaaatccagttggctgtgtccagtgtcatctt

SEQ ID NO: 2647 - DNA, 122 bp, Homo sapiens
ggggcggaccagtcagcgaagggagtaccgccaggcctctgcccaaacatctgccatgggcggcagccgtggaagacggaccctgcaggtggtggtggtggggatatggggggtgggaatat

SEQ ID NO: 2648 - DNA, 122 bp, Homo sapiens
ctgctgccggccatgttccctctgcccagtcatgttgacaattgtggccaaattcaacatcgggcctgtttcctgcacccacgttggcacacactgagttcaagacagtttctgcagaaatg

SEQ ID NO: 2649 - DNA, 122 bp, Homo sapiens
attgtgccgaggtgattggaatctttggcgccttggtttcagaggtgggcgcatgatgagcgggtacagagaccaatgaaaaggcgggaaggcggatcccgcgcgtggggcgcgaagagttg

SEQ ID NO: 2650 - DNA, 122 bp, Homo sapiens
gatactccacccagtctgaagtgactgcaaatctgcggcaatcttggctgactgggacctcgccagactcttaagccatggaaatggatcgcccctcattaattcaggggcaggttcatcac

SEQ ID NO: 2651 - DNA, 122 bp, Homo sapiens
cctggcatagccagtcccctcccttcctgagtcacttcatttgcataaactatcaggcaccggctcagaggcccaccatgaataacaaagacactcttatcactctgaaaatttcaagggtt

SEQ ID NO: 2652 - DNA, 122 bp, Homo sapiens
gcacctctgccccgccgccccgtctgagatgtgaagagcacctctgcccggccgcgaccccgtctgggaactgaggagtgtgtctgccccaccaccaccccatctgggaggtgaggagcgtc

SEQ ID NO: 2653 - DNA, 122 bp, Homo sapiens
tagcaggtgggcggcagggggctgaaggtacctggacacccagcaggtggagctcccgctcgaaggctgtgtgcacccggtggaaggactcggccgtgctggcgtccagccccacgtcctcg

SEQ ID NO: 2654 - DNA, 122 bp, Homo sapiens
gaggtaccgggttcatctcactagggagtgtcagacagcgcgcgcaggtcagtgggtgcgcgcaccatgcgtgagccgaagcagggagaggcattgcctcacctgggaagcgcaaggggtca

SEQ ID NO: 2655 - DNA, 122 bp, Homo sapiens
ctgctgctgctgcggcggctgcaccggcggcgccgaggccgagatcgaggccggggtgcgcgcttcgcaaacgtgccctatccgtgcggcttggctgcgccagcccttgcggccacccgggc

SEQ ID NO: 2656 - DNA, 122 bp, Homo sapiens
aagcaagacatggccagccttggcaccacgttacctcagcagctccatctcatgacagcacggcttgttggtgaatgacaagttggctcagactccaagctcccacccccttccaatcctgg

SEQ ID NO: 2657 - DNA, 122 bp, Homo sapiens
catattctgtatcctccacagcccttaatgccctgtgctcctttcctcatatggctgctgcgcaacaaatgcccatggaatgaatgaaagggcagcagtcttggagatttgctgaacctccg

SEQ ID NO: 2658 - DNA, 122 bp, Homo sapiens
gctgctgctgcttgcctcttgaactgtaatcccagcactgggatttgaccatttttcaggcgccccagatctcatcctgagacccctctttttacagccacaactgccgcaggggagcttgg

SEQ ID NO: 2659 - DNA, 122 bp, Homo sapiens
caggaagtgtgtaggacaccgtcgaggccccctagccattgtaaaccaggcgctgaggctcgtgcccagttgtacccttcccgcgcagcgctcaggagcgacaaacctggaggctattcggt

SEQ ID NO: 2660 - DNA, 122 bp, Homo sapiens
agagaggtgcgtgagcgcccgggcagatgtggcttaggtagcagggatggactgggtgtccgtggtgcgccgccgggcaccgcgggctgcggtgagagtcgggtcaggagggggccgggagg

SEQ ID NO: 2661 - DNA, 122 bp, Homo sapiens
gggcacgagaaagagcagatgaggtgtttgtggtaaagcctaagccagtgcagccatccccgtcgccatggcaaccccagcgcggttggggaggacccgctcctccggcgccccctcccatt

SEQ ID NO: 2662 - DNA, 122 bp, Homo sapiens
cttcattctcagaaggttacataccttcacagcgacactcactttaggatgggtgcccatcgcataagtgactggaaataaaatacttagatcttctcattaacttataatactggatgtga

SEQ ID NO: 2663 - DNA, 122 bp, Homo sapiens
ccgcgcggattggctggggcggggcggcgcggctgcagtaggctagagagtccgcacctgcgccgcggccgtggggagagagggtgcgtcccggcagtcccgcacgacgggccccgcctccc

SEQ ID NO: 2664 - DNA, 122 bp, Homo sapiens
aggcggggggaggggacggccccgagcaacccacgtgaccgccgacaaccgagcgcgtgacgcaaagcggcgggcccaacgctcgccttgtcttttgggaaacgtagttctgatggcagcca

SEQ ID NO: 2665 - DNA, 122 bp, Homo sapiens
gctgtatctccgaagtctgtgcaaaggagaactcagctccgccctcgcaaaggcacacagcgccggcgtggcggagaggcggacagcggcggagaggcggacagcggcggagaggcggacag

SEQ ID NO: 2666 - DNA, 122 bp, Homo sapiens
aaaatgccactgccttcagccactagaatggcctttttgatattcgtgtgattcatgccccggtgatttatgagtcagtaatttataagataatattcttagattcgtgatcttatgagatc

SEQ ID NO: 2667 - DNA, 122 bp, Homo sapiens
cagccagaataaccgtttcctttgagttaacaacgcaggtgccgtcatcctcctgtgagccgcggctgctcagggaccacaggggagggagcgcggggcctctgaatcgggcatcactttct

SEQ ID NO: 2668 - DNA, 122 bp, Homo sapiens
ggcaaatctactagtatgtaatttttggcaaatcctgtttcttcttctgtaaaatggggccgtgccacctacttcctagggctgttgtaaggattacataaaataatccctgttacagagaa

SEQ ID NO: 2669 - DNA, 122 bp, Homo sapiens
ccccgtcccccggcctgctggggcgcagctaggccctgcccaaggaagagctcgaggcctcgccctgctcatcccgcggaggcggccctgcgccccgcctgtccccagcgccccagctctag

SEQ ID NO: 2670 - DNA, 122 bp, Homo sapiens
acctctggtgatccacctgcctcggcctcccaaagtgctgggattacaggtgtaagcctccgcgcccagcctgcttgcatcattttaaatgaatgtctagtattctactgtatgaatagacc

SEQ ID NO: 2671 - DNA, 122 bp, Homo sapiens
cctgtccaccctgggtaacggaaccagcatcgcggtagggacatcctcgctaggcccggccggaccattcctcagggtgggccctttccgaagccgggaccgctcctgcttgtcggcatcgc

SEQ ID NO: 2672 - DNA, 122 bp, Homo sapiens
aagcgaggtgggtcagagctcggggtcaacttaccgggggtcctttcggtccaggaaacccgttgggaccctgaggtccagggaggccctagagacagaggtggggggagtcaggagaatgg

SEQ ID NO: 2673 - DNA, 122 bp, Homo sapiens
ctcccgtcattcctcccgtccccccttcccccgatcaaaaccatcaccacctcaccctcccgcttacttcactgccgacagcctgaaacctcaggggcggatgacaacagccagtgtgaacg

SEQ ID NO: 2674 - DNA, 122 bp, Homo sapiens
cccaggcagcccaccaaccctcaggggtggtccctctccaccatagctcttgctaccacacgcaaggcctgccctcatgaaatgtgacttttgttatcccctagagtcagggtttcactgtg

SEQ ID NO: 2675 - DNA, 122 bp, Homo sapiens
ggggaagacgggtgagagggagaccccactgaagtaatcaagccacatgagtttagctcccgacttaagacaaaagcatttctgctgccatcttgttcccagaataagccatgaaccattac

SEQ ID NO: 2676 - DNA, 122 bp, Homo sapiens
gtgggcctgtctcgggccgtctgttatggcgcctggctctttctatttcggtaggttttgcgctgtctgtcgcttgtgcgctgtctgtccctctcttccccgtataaacgaaatagtgtggc

SEQ ID NO: 2677 - DNA, 122 bp, Homo sapiens
acaaactcctctgtgttggaaagttttttttctacagctgttgatgccccacaggactcacgatcctgctcccatctttggagagattggagagcagttgtgagacattgacccagggtgta

SEQ ID NO: 2678 - DNA, 122 bp, Homo sapiens
ctctgcgccggcaggagccttagtcttggtcccagccaagagccggctcctggtggggggcgcgggccgagaactcctgttcccactcacaaaaggccacgcttccaaacgcttccatcctc

SEQ ID NO: 2679 - DNA, 122 bp, Homo sapiens
cggaatacaagagactgaactgtatctgcctctatttccaaaagactcacgttcaactttcgctcacacaaagccgggaaaattttattagtcctttttttaaaaaaagttaatataaaatt

SEQ ID NO: 2680 - DNA, 122 bp, Homo sapiens
gagaaagaggtgagaagaagaggtgagaagagggaggtctaagacacagcgagccggccccgggcctgacagccatggaaaaccagggcccggcaccccttctgtgtctctgcacctccctg

SEQ ID NO: 2681 - DNA, 122 bp, Homo sapiens
gagaactctccctgtgccccttggtctttattctcaattaagaaaaacagtcacatgtcacgacaaaccaatcaatctttatgagatattcctgtatccataccccagcttgtttgcaattt

SEQ ID NO: 2682 - DNA, 122 bp, Homo sapiens
agctttctaatgtcttgttatatttgccaagtgatttataggacagaaaattatagtttgcgtgtgtaaagttcagagatattttagagcttggagcagaggagaggagaggttttagggtt

SEQ ID NO: 2683 - DNA, 122 bp, Homo sapiens
gccgattggccccagccgccccggcgctaagactcaatttcacactacgcgcccaggccacgcccacctgtcatgcggccctggaaactgtgagtttggggattgttgtgtccactaaccgg

SEQ ID NO: 2684 - DNA, 122 bp, Homo sapiens
agctgaacctggtacgctcgcccaccaaactgccgtgctcggggcttagtatctcacgcgcggcagttcaagaacatcagacacgctcaacaaacacttgttgcttgactgatacattatgg

SEQ ID NO: 2685 - DNA, 122 bp, Homo sapiens
aggaaatccagagtattgcgcatgcgtgctgtccagaaggcgcttgaactcggcggcttccgtagcgggagggcgaaagatggcggcggcagtactgggacagttgggtaaggatttcttag

SEQ ID NO: 2686 - DNA, 122 bp, Homo sapiens
gtaattatccctggatagagaaaccaatctggctgggagaggcccctctgcaattgccggcggcggcggcggtgcgcgggcccgcgcagaggccggggacttcgggcgcttgctaggtcacc

SEQ ID NO: 2687 - DNA, 122 bp, Homo sapiens
ggagcagccttaccatgcacagggggctccccctttggggttctagggcaatttgttcttcgggctcccggtgaaacatggcaggaaaaaaaacgttttactccttttcattggatttttta

SEQ ID NO: 2688 - DNA, 122 bp, Homo sapiens
ttagcagcttattcagtgtccgattctgattccggcaaggatccaagcatggaatgctgccgtcgggcaactcctggcacactgctcctctttctggctttcctgctcctggtaaatgcctt

SEQ ID NO: 2689 - DNA, 122 bp, Homo sapiens
agcccctctattgcgtagagaaaaatcagaatgagggtttctttcctcatttcaagagatcgctggctctgcagcccagctcaaaagcccatcctccaggccacttccccggctgagccaga

SEQ ID NO: 2690 - DNA, 122 bp, Homo sapiens
atggtggcaatgttgacgtgctaattctgattctagacctcaagagacctcgcacatctccggccactctattgaaacacaaccagctgccatgaacaggcccaggttaagtctgctggagg

SEQ ID NO: 2691 - DNA, 122 bp, Homo sapiens
cgcggccgaactgcagcacgatatagtcggctatggacacaagacggggtgggggcggcccgagacctccttggacccccatcctggcagacagtgccctcaaccttgggggcagtctgtcc

SEQ ID NO: 2692 - DNA, 122 bp, Homo sapiens
cagtccgcccggagcccgcccagtcgccgcgctgcacgcccggggtgaaccctctgccctcgctgggacagagggccccgcagccgtcatgctttccgccatctacacagtcctggcgggac

SEQ ID NO: 2693 - DNA, 122 bp, Homo sapiens
atggttgcagcccaggggtacaggcttattatagaactgagacccaatcatagcattgttcggtggctcttttccttcaacacctttccaccacatcagtagggctcctgtataataacatg

SEQ ID NO: 2694 - DNA, 122 bp, Homo sapiens
tgcctaagtcccagtcccagggactggtgggctgtgagggaacagaggaggcttgtgttccgggctgggctctcagggcaggaaatcacccggaggaatatgtttgtgctttgattgctgac

SEQ ID NO: 2695 - DNA, 122 bp, Homo sapiens
ctgcagagcacgggcgacgtgaccacagctgtcggggctaactctggaatgccgggtgctcggaggagcctccccagctggggccaagcagcgtccaagcaggtgaaaaggatgcgcccctg

SEQ ID NO: 2696 - DNA, 122 bp, Homo sapiens
ttggctttttggaggcgttgaaatgcttcttgaccaggaaggagcgcggcatcttgccagcgggtctggcgggcgcccggcgcggataacggtccggcgggaggacacggcggtccctacag

SEQ ID NO: 2697 - DNA, 122 bp, Homo sapiens
aggggtcagggagttccctttctgagtcaaagaaaggggtgagggacacacctggaaaatcgggtcactcccacccgaatattgcgtttttcaaacgggcttaaaaacggcgcaccacgaga

SEQ ID NO: 2698 - DNA, 122 bp, Homo sapiens
acccagaccagcgaggggaggtcagctcgtcgcggggtgtggctcccgtccggggactcccgagctcattacgggtggccgtgtgtagccaagttcaagctctccctccgggaatgcctgcc

SEQ ID NO: 2699 - DNA, 122 bp, Homo sapiens
ttcatcctttgccctcggcgtctccacctgtcttaggacatttactactctctatattatcggtgtgcacacaggtcttctctctcctgacacaggacaagctccatgaaggcaaacaccat

SEQ ID NO: 2700 - DNA, 122 bp, Homo sapiens
tgagaccagcctgggcaatatgatgaaacaccatctctaaagattagctgggcatggtggcgtgtgcctgtaattccagctactcaggaggctgtggtgggaggatcacctgagcctgggga

SEQ ID NO: 2701 - DNA, 122 bp, Homo sapiens
aaaaagcctctcgatttattttttaatattacacgatcctagttttttcttcccagaaaacgtgccacaaagtttgcaagaaagagcttttggggcggagccctggctgcttaggtcctttc

SEQ ID NO: 2702 - DNA, 122 bp, Homo sapiens
gaggctagaaggggcctgaccacacctgggcgtttccaccataagaacacaaaagccctgcgagcagagaagagagcactgcagtacagaaatcaggaaggcagagttgtaagcactgattg

SEQ ID NO: 2703 - DNA, 122 bp, Homo sapiens
gaggggcatttctaggtcttcgagcgtccggaagcataggggttggccgaggccgagggtcggcgttgacctgtcccctcttgcgcgcaggccgcggcccctccccgctcgcgggccctagc

SEQ ID NO: 2704 - DNA, 122 bp, Homo sapiens
tgttcttttgtaattgaagggcattgttctgtgcccagtcctgctggtagacctgctccccggtggctgggttacctgtctcctgaagcatctggtcttcatcgatgtcatagaggttcccc

SEQ ID NO: 2705 - DNA, 122 bp, Homo sapiens
gggcaggtgtacagggtggagccttcctgatcccagggctgaaggatggcggtcctggcccgccagctgcagcgtctcctctggaccgcttgcaagaaaaaggagagggagaaggaggggag

SEQ ID NO: 2706 - DNA, 122 bp, Homo sapiens
atccgcaaggacgacgaggtccaggtacgtctccctccggcgctagtggcgctcggacaccgttgcctaagaacgtcatgcgtggagcagtcacagactcacatgcctcaggactctggaaa

SEQ ID NO: 2707 - DNA, 122 bp, Homo sapiens
tgcagccgccggatctctgccacatagagcgccagcagctgctccaaacgctggatctgccgccgggaaccacgggtccttggagactgagaggcagtgttttcagcatttgtggggtccaa

SEQ ID NO: 2708 - DNA, 122 bp, Homo sapiens
ccgggatttcggcagcgctgccgtcagcctgcaggtggccggtgagcaccaggagggcgacgccttccccttggttcaccctccattccctctgcagcccaccctctgctgcaccactgctc

SEQ ID NO: 2709 - DNA, 122 bp, Homo sapiens
catgtgacgctgcgacggggcgtcccgggggtgacactggcatgtgacgctgcgacggggcgtcccggggcagggccctgccaagggacccccaacaaacacgactgaaactcagcctggat

SEQ ID NO: 2710 - DNA, 122 bp, Homo sapiens
gagaagctcttccacctctagccatgcagcatcagtctccctcctgctggcagagaggggcgctgagcctttcatatttacatagaaagcatggcagcagcctcagtgttggaacctgccac

SEQ ID NO: 2711 - DNA, 122 bp, Homo sapiens
cgggttaggggggcgcaaaaccccatccgcccatttccgcaccaacgtctctacgcaaggcgccccaaaacccaggtggagcggggcaaccccgttaaaagtcattcctgcagggcgcatcc

SEQ ID NO: 2712 - DNA, 122 bp, Homo sapiens
agatgggatccagcccctaccagctgacatgagcaagcaaagaaagtttgtagaacataacgaacaggtggctcctgctgaggcaaatttgatgagggagaaaacctggagagaactttaat

SEQ ID NO: 2713 - DNA, 122 bp, Homo sapiens
gtccagacggcacccgcactccgtcctccgccccggggtggaaaagcagacggtggttcccggtctgtgttgtttccagagatagtggagttatgttgcttccacacagtgaccagtcatgc

SEQ ID NO: 2714 - DNA, 122 bp, Homo sapiens
tcacatactgtccagggttttctaactaaaattgccatttctagaggctggtacctgcatcggtctcactttcagagcacttagccttatccaacttttttaaacaaaattttattccaggc

SEQ ID NO: 2715 - DNA, 122 bp, Homo sapiens
cccgcgccacccgccggctcccggcgccgccgcttcctcagggccggttccgggtccgagcgcgcccccgggctcgggtcgtcatgagcctggactgcaccagccatatcgcgctgggtgcc

SEQ ID NO: 2716 - DNA, 122 bp, Homo sapiens
tgggaggggcaggtgctgctgctgaaagacggaaatcctgggccagggcttgcagcaccacggagaggggtgggcaggaaggcccataaaaagctggaccttccccttcccacccctcagtc

SEQ ID NO: 2717 - DNA, 122 bp, Homo sapiens
actgctctcaaaggccaaacttaatggatggacgagcagcgcgctactgcagctttcttccgccttaggaaggtggcggccagggatgaggaggcccctaagcaagtgcggaatggagccgg

SEQ ID NO: 2718 - DNA, 122 bp, Homo sapiens
cgcctcacccgcgttatcaagcgcccgcggaaaaagcgcgggaagggattcgccaagtgtcgcgagaagagagcgagacgcggcaagcgcggagccgttccttagcaacgagttgttgacat

SEQ ID NO: 2719 - DNA, 122 bp, Homo sapiens
tcacaattagacaatatcctaactaaattaacagcatattcaatatcggagtgaacagggcgcttcacgctttccaccccgccccgccccgccccttttgttggtcctgcgaggcctccgtc

SEQ ID NO: 2720 - DNA, 122 bp, Homo sapiens
gaccaaaatacctcttcctccccaactacccaactgcaataccaagctccaatgacacttcgcaaagtaaaaggaccagttcttttacaaatcttggaactagggaagaccaccaaaaacac

SEQ ID NO: 2721 - DNA, 122 bp, Homo sapiens
gcatcactgctccaggcagctgtgcacccagccggccctggcgtcccggcccccagcctccgcctccctcgccgacagcttcccggggctctgcctggaggcagcctcgctttatcccgcag

SEQ ID NO: 2722 - DNA, 122 bp, Homo sapiens
gcaattttctccctctggacctcatcttcagctttatatttctcagcatccagaaccatgcgctcaatctcctccttgctcaggcggcccttgtcattggtgatggtgatcttgttcacctt

SEQ ID NO: 2723 - DNA, 122 bp, Homo sapiens
tgcttcattgaagagtttgaatctcagtcactttgtagattctgatatctagagtggcaccgtccaacaaaaatataatacaagccacatatgtaagcttgatgtttctagtagtcgtatta

SEQ ID NO: 2724 - DNA, 122 bp, Homo sapiens
ctagcagggtcggagctgggaccctggctagcagaacgcaagagttctccttcacgaagacgcgcagagtagcttctccagcctgagaaatccggtccggctgcgtagagtggcagccgtgg

SEQ ID NO: 2725 - DNA, 122 bp, Homo sapiens
cacaagaagaagaaagagacaaaagaataaacaccaccctgggatgaagcatgaagctgccgcagaccctctgaaagaagtcactttcctgacttgcccatcagccggcacctgctcatgct

SEQ ID NO: 2726 - DNA, 122 bp, Homo sapiens
agcacagggccccccagcacagggatccccccagcacagggatgcccccggcacagggcccgcagcacagagccccccagcacaggcacagggacccccccacagtacagggatcccgccag

SEQ ID NO: 2727 - DNA, 122 bp, Homo sapiens
tcagaaattttgcagtcaactccaagtgtggtcctcccacccgcgggagcagcggcagcccggggacttggaagaaatgcacattctccactccggaaacgctggagtggcggcagcagtct

SEQ ID NO: 2728 - DNA, 122 bp, Homo sapiens
tctaagagaattccaattcccggcatgccaacatatacattaaactcaaaatgtgttgcacgttatgagttatgtttctttgttactagcagatggtaaaaatttctatcatctgcaaagtt

SEQ ID NO: 2729 - DNA, 122 bp, Homo sapiens
acgctgaagtcaggatgataaaggtcagcttgccccatggctcagcactgggtcccctatcgctccccgactcctcacctgagcacggtgagctgccctcagtgagctcgggtctgggaagg

SEQ ID NO: 2730 - DNA, 122 bp, Homo sapiens
ctgccatccccagggtccagggagcccagattccagggaagggttgcattagctcccactcggagtcctgatgcagcagagacagacagaggccctgggagaagtgagcatgaattattaag

SEQ ID NO: 2731 - DNA, 122 bp, Homo sapiens
tcactggaaagaggcgggcgggcgcggggagccttcctgaggttcctggttctcaagagccgggtgtaaggaaggaaaatcaaagattgaatttagatgtatgtattggaggggaatattgg

SEQ ID NO: 2732 - DNA, 122 bp, Homo sapiens
ggtgcagggagaaaaccaattcagtgaggagcggaggcgcaggactgtggagtgtgcatccggggccatggaaacaaatgttaatccaagctgtcagcttagaatagtccctatctgaaagc

SEQ ID NO: 2733 - DNA, 122 bp, Homo sapiens
gcaccctccgcagctgctggcccgggtgctaagcccctcactgcctggggccggcagccccggccagccactgggagtgcggggcccactgagcccacgcccacccagaactggcgctggcc

SEQ ID NO: 2734 - DNA, 122 bp, Homo sapiens
acttagtcagtgtacccgaaaacaaccctcctggggcctccatcgcgcaagtctgcgcctcggacctggacttggggttgaacggccaagtctcctactctatcatggccagcgacctagag

SEQ ID NO: 2735 - DNA, 122 bp, Homo sapiens
gaaacgagactgaagaagagagcaaggtgggaggggcgcgctggggagcttcggcgcatgcgcgctgaggcctgcctgaccgaccttcagcagggctgtggctaccatgttctctcgcgcgg

SEQ ID NO: 2736 - DNA, 122 bp, Homo sapiens
gctctctgcaatgcaaaaacgcagcagcatcgtcctccagccctctcctgggggatcgcacggtgcaaccaaccccaaaaacgaagctgcgcgacgccccctcagccccgcgggcttcccat

SEQ ID NO: 2737 - DNA, 122 bp, Homo sapiens
aaagccacatagcatcacactttttacccaaggttttactatactgcagacttttgtgtacgttttgagaacatccaagacataaacctgaccagagaagaagggagattgtatccaagaat

SEQ ID NO: 2738 - DNA, 122 bp, Homo sapiens
gcctctcctggtccacacagatttctgccttcttcgggaaatgtcactaaggacctccaccgcttttgtattccttaccccaccccaaccacagagggctcggagcactcacacctgtgaag

SEQ ID NO: 2739 - DNA, 122 bp, Homo sapiens
gaagcttctgcatgccgcgcgcggcacgtcgggactcgtagttccggcgcggaggacgtgcgtcgcggcactctcgcctgaccgtctccacgtgactctcgcacctccggaagtgacgtaag

SEQ ID NO: 2740 - DNA, 122 bp, Homo sapiens
tgaatggccattgtgtttgtccagctactgatacctgcgcttttgtggaggaaagaaggccggggccacgacatcggcgcagcacaagcatccctctgtgcggatgcccagagcgggtcccg

SEQ ID NO: 2741 - DNA, 122 bp, Homo sapiens
gtgtccggccggcagcagccccggccctggccctgcgctggcgtctcggctgagtcgagccggaaggccacccccacaggcgctgtcctgaccccccgccgtccggtcacccccagcccacg

SEQ ID NO: 2742 - DNA, 122 bp, Homo sapiens
ccccctcctttggggggaagctgtgttccctgacactgtgggatgagctcctccctctgccggcagtatttcctctctgggggacctctggggaggtggccttgcagttgggcacacctggc

SEQ ID NO: 2743 - DNA, 122 bp, Homo sapiens
actattgtgtgacctccccctgccagcctcagccctcatccctgaagcacctgtccaacacgcacacactagggggtcctggggaccaagcctcttcccagttgctcagccctgcagggatg

SEQ ID NO: 2744 - DNA, 122 bp, Homo sapiens
ctgggaagtccctctgggcccctcgccctccacccagactcaccggcacctttgagacgccgcctcaccacgcccagccgccacttgagtgacaccgccagcattgtgccctcctgccctcc

SEQ ID NO: 2745 - DNA, 122 bp, Homo sapiens
tcacattagtaacaagactaaaagggttagctttcatttgcaactttccattttttgaaacgaaattctcaatccaaaataccatttccccaacagttcccacgctcaccaattgctatgta

SEQ ID NO: 2746 - DNA, 122 bp, Homo sapiens
caagaaatttccgaaacagaaagtttgtctgcaacagcgcgccgtactgacgtagcagtgcgcaggcgcagtcccggctcctggcggcgtgttcctcttttcctcggttcccagtgttctgg

SEQ ID NO: 2747 - DNA, 122 bp, Homo sapiens
ttatttggctccactgcatacagggcaccgtgcaggggtcctctgaaatcccgggaggcccgtggagcagacctctgcttcgtgctttgctgaagtgggtgtggaaacagcaggcgcaaggt

SEQ ID NO: 2748 - DNA, 122 bp, Homo sapiens
agtttccttccagaactgctgctgtggcacaaccaattcacatcaaggaatcctctgggacgtgagctgcgggcctggcgacgcgcaacacaagcagggcagggcattcattgttcatcggc

SEQ ID NO: 2749 - DNA, 122 bp, Homo sapiens
tcaaacctccctgcagaccaatggacaccttctaagagtttggcgagtcagtgactgaagcgcccgtccattccaaggtgtgtgcacggcgttttcttctttgacagctccggagtggggga

SEQ ID NO: 2750 - DNA, 122 bp, Homo sapiens
agaaaaatccaactcaaaacttccaatgacaggcttgtctgtattcaaaccagttcatctcgttcgcagacttttttgaagctataagcacagagcaagctttctgggcggggctcagaagt

SEQ ID NO: 2751 - DNA, 122 bp, Homo sapiens
gggttgacacctgctctgagtaactcacggaaaacaagttccagctgggaagcccttggacgcgccacacctccctacccgcagcccgtcctgtggcgcccgggactccagagtgcgtttag

SEQ ID NO: 2752 - DNA, 122 bp, Homo sapiens
ccccgggcgccaagaagcccaaggccatccgcaagctgcacttcgaggacgaggtgaccacgtcgcccgtgctggggctcaagatcaaggagggcccggtggaggcgccgcggggccgcgcg

SEQ ID NO: 2753 - DNA, 122 bp, Homo sapiens
accaccggaggaggcggaatgcagctctcactccaggcaggatcgtgtgtcatggtgccacgtgtgttctccatatgtgtgcaacaaagacggccacccagagcagccagaaagtggaacgg

SEQ ID NO: 2754 - DNA, 122 bp, Homo sapiens
gagccatcaactccagccgcctgcctggccgcgcaaggcgggaaagtgggggcgcttttgcgcctcacgttaagtttagggtcacgagcactcttgtggagatcgggagcggttgggctagg

SEQ ID NO: 2755 - DNA, 122 bp, Homo sapiens
tgcatatggccaggtagtggtcaaaggccataactgtcaagagacacacctcacagatgccggtggaatggaagaaatacatctgcaggagacaaccattgaaggaaatgctcctctcacta

SEQ ID NO: 2756 - DNA, 122 bp, Homo sapiens
gccaggaggccgaacgcggactcgccacccgggtaagccaaactcgggcgagtgggggcccggcaggggacgcgtggcccaagtcctgccgcccagccctccgcaccccctccagccccact

SEQ ID NO: 2757 - DNA, 122 bp, Homo sapiens
caaagaaggggctggacctggactcagacccaagttttagaaaagcaggtccatgctggccgctgagtcccctgcccatcgagagccacatggaaatgttttgctggtggaagcccgtgcac

SEQ ID NO: 2758 - DNA, 122 bp, Homo sapiens
gaaacggctgaggtggcacttggaagttaggaaccaagttaatcctctcctaggtttccccgtgcttctaagcctgtgttgtccccgcccgggctgaagggggagctctgggctcaatttag

SEQ ID NO: 2759 - DNA, 122 bp, Homo sapiens
gccttgaggaaggggagaggaccagagttagtggcctttccccaccctgagggtcagccccgggcagggcgggtcactgagtcttgggggacctgatgcctgtgcccttgatggtggcccgc

SEQ ID NO: 2760 - DNA, 122 bp, Homo sapiens
aacagtctactctcccggccaagccaattgcccctgggattttctgctcctccaagatcccgtgcatagccctggtggtggctcatgcccttaatccttagttactctagatgctgaggcag

SEQ ID NO: 2761 - DNA, 122 bp, Homo sapiens
cccaacgaaggtccagctctttctgggtgcttcctgctgaaagccaccccaaacccctcccggctgacctccagtgccttctaggggttggctgctccatctgcttccggccttccacgtag

SEQ ID NO: 2762 - DNA, 122 bp, Homo sapiens
attcacattgccctggatcccagacacatacaaacgcacagtggacggtgtgagaggacgcgttgggggtgactttggaaatgtgggcttggattctacagaacctctccttcgcaggctcc

SEQ ID NO: 2763 - DNA, 122 bp, Homo sapiens
gtagctcctacccccgtgacattggccataaaactgacacccgtttgtgctgtgctttcacgtacatcgcacctgtgatcctccgatcaccctgcgagttacgaggcctgctttacaagcct

SEQ ID NO: 2764 - DNA, 122 bp, Homo sapiens
ttttccctgttctggaatagttattactatttctctgaattagtgttgccttcaagctaccgtatagactccttccccagtcctgagattctccactatacaactgagagtgattttctctg

SEQ ID NO: 2765 - DNA, 122 bp, Homo sapiens
ccgtaggagatagcagagctagcgacagattcctgtctcagtcgcagttatacatcagcacgtcccaagtccctgttagcgtgtccaaacagaagtctttctctagaagacagggagttgga

SEQ ID NO: 2766 - DNA, 122 bp, Homo sapiens
tcgtaatgtccagaaggcgagaggatgatattactttccatatcgtggaaggcgtacactcgcctgttacatgcttcggaatatctgggagaagaggataatattactccccatattgcggg

SEQ ID NO: 2767 - DNA, 122 bp, Homo sapiens
tcaaaagggaaggagaggggagaaccacagcataaacagctggcagaggcagggaaagaccggcagaaaggaaagagagaaagagacagaaagtgtgagagagagaaagaggaagtgacaga

SEQ ID NO: 2768 - DNA, 122 bp, Homo sapiens
acacgtgcatggggctccctggaggctgagggagtgtggttggtatgctgtgccaacacacgacagagcagttacaaccattcggaaatcatgctgtgtagagcagagcaaggaggaagcac

SEQ ID NO: 2769 - DNA, 122 bp, Homo sapiens
gtgggggtgggagtggggacagggccgggggtgggggtgcttggggacagatcagggagccggagatggggagaccaaggcgagtctcagggcccagcccacctgcatcagtcggggtgagg

SEQ ID NO: 2770 - DNA, 122 bp, Homo sapiens
tgccacgcggcgggggcggggcggggccgcgcgccgggcggggcgggggctccggggtctcggcccccgacctgcgtcctgggcccgcaggggagtcctgccccatgctcccgggcggggcc

SEQ ID NO: 2771 - DNA, 122 bp, Homo sapiens
ctatcttgcttatttgtcctaacagagaaaccagcacgcgcgggcggtggcggaggggggcgggcgggcgggtggaggcgggggggggcgggcggggagatgggtactcctagcctgcgcct

SEQ ID NO: 2772 - DNA, 122 bp, Homo sapiens
gactccccaagtccaggcatcttcttgttaccttacggagcttacactaaggccagaaggcgatttcttctgactcttagatggttgggtgggcacccctgggggctcaccctagtggggag

SEQ ID NO: 2773 - DNA, 122 bp, Homo sapiens
ccaggctacctgggagatgcagcgttcaggagcagtccacaggaccgccctcacttttgacgccaattgcgagttcagaggccctcgagaccacccttaggttcgacgatttgctggaaaga

SEQ ID NO: 2774 - DNA, 122 bp, Homo sapiens
agatctgcttccttctcattacagaggaagcttggctggatgatctgtaaatgcctttcccgcttttatgatctataatttgattttacattggtaatctctgctaatcacaaacaagtcct

SEQ ID NO: 2775 - DNA, 122 bp, Homo sapiens
ttggcctcgccgtgggagggttctcacgctctggctctcgcctgccaaaaaccgactggacgccacttcccgcgctcggccccgcggcccttcaccgaggcggcgacccaggcttagttggg

SEQ ID NO: 2776 - DNA, 122 bp, Homo sapiens
gcagatggacgacgcagcgtcccactggtgctcttcctggggtaggaagcgtcatggacccgggctcatcttcagtgtcctgaaccaagaggcagctagagccaggtgtcggccctcaaagg

SEQ ID NO: 2777 - DNA, 122 bp, Homo sapiens
acatgtacacagcctttgtgcctgctgatgtatgggctactcaggaagttcacatgaacacgtaattcaaactataatccaggaaaatctgtaagattaccactacaatctgaagatacttc

SEQ ID NO: 2778 - DNA, 122 bp, Homo sapiens
tattttcaggtgcacagggaacattcatgaaaatgtaccatatcttaggccacacaaatgcgtgcacacacacacatctcagtaaagtccaaagagttgaaataatatcaatagtacttcct

SEQ ID NO: 2779 - DNA, 122 bp, Homo sapiens
ccccagagatgtcaaacattccctcctccctacccatatactgccttggagactctaccccgctcctaacttggaagagagagtactacctgccatgtgactgtgccccatcagtctcagtt

SEQ ID NO: 2780 - DNA, 122 bp, Homo sapiens
aagaagcctaaccaatttaaaattcctgactttagtctcatatatcttgtcagactgtctcggttcaaattccaaacctaccatcttcagttgtgcgaccttgggcatgctacctaatctct

SEQ ID NO: 2781 - DNA, 122 bp, Homo sapiens
acctgtgatttccagcctagggacacaccttctgcaccctcggccagcaccagcagggctcggggaccaccactggcaccaggtgaccaagtagatcaaaataataccaccaagactgaatg

SEQ ID NO: 2782 - DNA, 122 bp, Homo sapiens
aggaagtatactatgcacacaaagttattatgatagagctatgggaaccaggggaggagacgcctaattctacccagcatgtgggacaatgcaggaggggaagcaggaaaggcttctcagag

SEQ ID NO: 2783 - DNA, 122 bp, Homo sapiens
ccatctctaccgtcccttccggcctgaggatgagcatccatgtccagcagccccacttgccggcacccttggcagttagctcaggggagggactgggctcctgagtcccaagcaccctccgc

SEQ ID NO: 2784 - DNA, 122 bp, Homo sapiens
cctcagcctcccaaagtgctgggattacaggcatgagccgtggcgcccggccttgctcagcgtttttatcttggttgttagatttgttaagtgctttttctgtgtttattgaaataatcatg

SEQ ID NO: 2785 - DNA, 122 bp, Homo sapiens
agagagcggcacacaagaaatctacacagtcttcccaacatgtacacaccctgacatgcccggatgcatctcacacttagataaacacacacgcacacagtcagaggcacggtcccgcagct

SEQ ID NO: 2786 - DNA, 122 bp, Homo sapiens
cgaaactgctggggtaaaatctgaaaccataactgttcaaaggttcaaatggagttttcccggcgctgagaaggcagaaaaacctcgacctctctctcccagctctggaaatgaaggcagcc

SEQ ID NO: 2787 - DNA, 122 bp, Homo sapiens
tgcagacgctgcccaccagctaccctgctacagggaccgaagccccagtgtaacaaggcacgtggccccagggacactgctgccaccctcctgctggtgacacaggtagcttctgaccgtgc

SEQ ID NO: 2788 - DNA, 122 bp, Homo sapiens
ggcagagatgtttctgcttccagagatcgtgggatggagtttttcttaccgtgaagacatcgaccctgtgtacaccttgtgccttcacttgtactgtctccttctccttttgctgcaagact

SEQ ID NO: 2789 - DNA, 122 bp, Homo sapiens
aaatcacctgcccaccgggcagagggtccctcccactccctgtgtttgagacccgccaggcggattcagtgaagggccagacttagccttttaagaccagtctgcaacctcctactccagta

SEQ ID NO: 2790 - DNA, 122 bp, Homo sapiens
accatagcccggccggggtgtaggtgaacgccccctccttgtctgcccctcggaagtgtacgtttcttaccgcgccctttgtggagcccggactggagttctcgcagggagggcagggtcag

SEQ ID NO: 2791 - DNA, 122 bp, Homo sapiens
tgcgcggggaagaagagggtttgactgctgttctcgacccccagcgccaaacctccaccccggtgcgcgcccctccaggctcctgctggtcccactcgccggtaattaggtctccggtcagc

SEQ ID NO: 2792 - DNA, 122 bp, Homo sapiens
gcatttaaggtttttgaggaaaataccttgaaaccgtcggtaggactagataggtgacaacgtgtgacaggaaaggctgtcaggccaagcgcaggcggggctcccagcctcatgataacgtg

SEQ ID NO: 2793 - DNA, 122 bp, Homo sapiens
cctcccacctcactgagtgctctctccaccaaggccacagagccacactccccgccaccacgtgtgggtgcagacagtgaaaactgagggacggccctgaagaaattacaagccaccggtca

SEQ ID NO: 2794 - DNA, 122 bp, Homo sapiens
ctaatcaacacaggtgtgggctatggttctgagacaccattcatctcacacgaggtacggcgatacgcgacaccacccagtacaacagctctctctccacctggaacccggacccagcttga

SEQ ID NO: 2795 - DNA, 122 bp, Homo sapiens
ccaattatccttccccttccctcctggtctcggaggaccccatcctagcccgacctgtctcggcccgcaacttccccgaaggcgtcggtgccactcccagtccatgtgggcccccgcgggct

SEQ ID NO: 2796 - DNA, 122 bp, Homo sapiens
agtatctttcccctccggaaagaatgggatatgcctgtgtccaaaggacaagaagatgcgcgccagcaagcctaagttaaccacagcgcggaagttgagcccaaagcaagagcgtgccgggc

SEQ ID NO: 2797 - DNA, 122 bp, Homo sapiens
cgcacgcgcagccctgggagcgggttctcgcgcatagggaccacaactcccagggtgctccgcgtcctcgccgctgtcgccgccgcggagacaaagatggctgcgagtaagtgcaggttccg

SEQ ID NO: 2798 - DNA, 122 bp, Homo sapiens
gttcagtttctatgcattctggttggcaatggttagctgttcttttctgagaagcaagggcgaagggcctgagactcttggcttcctgcagagacagaagggatggaatgggagaaggtgga

SEQ ID NO: 2799 - DNA, 122 bp, Homo sapiens
atttcagcgctagagccaggacgtgctgatggattgaatgtaggggtcgagtgaaagggacgagtcagatgactcctgtgatttggcttgagcaatggtgggggtgcatttactaggatgag

SEQ ID NO: 2800 - DNA, 122 bp, Homo sapiens
ccgccgtccaggtggatggtgcccactcccagggtcacacctcacgcccacccctcccgccgcccaggtggatggtgcccactcccagggtcacacctcacacccacccctcccgcccaccc

SEQ ID NO: 2801 - DNA, 122 bp, Homo sapiens
ggagcagatgtacacgctgcacacacagctggacttcagcaaggtcaaggtaggtggccccggacatcagggccactcggaccacttcccactcagccctccctgctggcctgcgtgtgagg

SEQ ID NO: 2802 - DNA, 122 bp, Homo sapiens
gtctcaggagctttacagaacaaccaataatgtcacagatcctgtaaccacttgaaagatcgctaggggaaattaactacttcaagtgcctaatgtttctttcataattagaaaaaaattag

SEQ ID NO: 2803 - DNA, 122 bp, Homo sapiens
agactgtggcagcacgttgagttgccaaggccagggctggggaggcagctgggatttctccggaagtttggcttggtcctgaggctgctggttcctagacagttgtgtgcctgtggggccgg

SEQ ID NO: 2804 - DNA, 122 bp, Homo sapiens
tttcaccaccagctcctgcgctggccgcatcctactccttgaccgggtgaggcccctttgcgcctgtccatcgcctgccttctagtgcgaaacttcaggagccctgttcccatccagtgacg

SEQ ID NO: 2805 - DNA, 122 bp, Homo sapiens
ccttcatactcagccctgtgctgcagcctgaagggcctggccccacccaggtggggaagccggcggcccctacgctgacggtgaacatcgtgggcactctgcctgtcctgtcgccgggcctg

SEQ ID NO: 2806 - DNA, 122 bp, Homo sapiens
tcaggcctgttaagttccagaccagtgttctttccactaaagaccttctctgcccagtcacggccaatcacaccccgtgcccaaacacaaccctacagcgccatcgcccatcacggatgcca

SEQ ID NO: 2807 - DNA, 122 bp, Homo sapiens
aggtgaatgaagagactaatgggagtggcttgcaagccaggtactgtgccctacaactctcgcgctgccacaaaaagccaattaacgaagcaaactgttttatcttttcctctccccagaag

SEQ ID NO: 2808 - DNA, 122 bp, Homo sapiens
ccgtggactcctctcctgcccccggtcgcaaagggcgaccggggactcttctcctgccctcgtttctgggcgccccaaacctctggccacagctggggttcccaggggcccccctcccgcct

SEQ ID NO: 2809 - DNA, 122 bp, Homo sapiens
agagcaccttcagtgaatggggtctccggcttccgggatggatcaagcagagctccaggtcgggactgagaggcagaggggcaggttcccactgcgggagggttggcacgcccccaggctcc

SEQ ID NO: 2810 - DNA, 122 bp, Homo sapiens
gcggcgggagggcgctcggggcccggcccagggagggtggtgcccgcagcccgctcgccccggccttgggctctgaaactcatgccctggagcccagagcagaggagggcggcgggcccggg

SEQ ID NO: 2811 - DNA, 122 bp, Homo sapiens
tgtagggtttgagtaacattataaaacaattccgttcccttcccacaatttataacatctcgtaaaccctttggggaaataacttttcactttaaaatcataccatcccattcaccatttcc

SEQ ID NO: 2812 - DNA, 122 bp, Homo sapiens
gagtggagatggaagccatcagcactattggtgagacctgattcacaggggtgcaaaggccgcagctgaatgccaacgggcagcctgagcaggaaggcttcctcccattttgtctgagtata

SEQ ID NO: 2813 - DNA, 122 bp, Homo sapiens
agggccaccgcccccgcccgcagctctgcagcccaggcccggggagggcgggtgcctgggcggagaggtcacctaggacttcaaagagtcccgccccagaatccccactcctcagccttctg

SEQ ID NO: 2814 - DNA, 122 bp, Homo sapiens
tccgtggctgtgataggagccccgttctcacaagggcaggtgagaactggcacctggaaccgccgggcaggatcctccgccccctagaacctggagacagcggcggtagggtgcgggggacc

SEQ ID NO: 2815 - DNA, 122 bp, Homo sapiens
tgcctgcggctggtagtacatgccaatctgagcatgtgttcgcgaccacgatgagtgtgccgcacttccggccagatcgccggatttccgctgagtgacccttacaagtccttcttgatcct

SEQ ID NO: 2816 - DNA, 122 bp, Homo sapiens
agttttcagacacaaattaggttcgagggaggaaacggagaggaaagggaaaacttgagacggaggcgggactaaggaaacggcagcttgcattggtttattagaggccaaggggcggctct

SEQ ID NO: 2817 - DNA, 122 bp, Homo sapiens
tgcttcagctgtgcttgaagtggcatgcctcctctgctgcagggctcccccacccccacacggcctctaaagatgtttatttccttatagactgattaaagtcagccattctttttcctcaa

SEQ ID NO: 2818 - DNA, 122 bp, Homo sapiens
agagcgctaaaaggggacgctatagcgggattctcagctctcctgggctagtgggacccccggtgcgccgccgccgatggggtcttagggcctgtctgtctgggctagagccggcccgggag

SEQ ID NO: 2819 - DNA, 122 bp, Homo sapiens
ggaaaacttcatagacatggtaacatttcagttgtttcagagggaaggaggggaaaagaacggcttagggcaagatgtagattagggagggcacactgttttcaggggcagtgagaagtttg

SEQ ID NO: 2820 - DNA, 122 bp, Homo sapiens
gctccagcaccaaacggcttctgaccaatgagcagagacggcaaacagcaaatgcgttaccgtggctttcacgtgtcatgaaggtgatgctgtaacctgagcctcagagctcattttatttg

SEQ ID NO: 2821 - DNA, 122 bp, Homo sapiens
ttcctgctcattgatgctaccagctgggactggtggatggagagttaatcaaaacaactacgtaaatctacaggttctcatccttcctctgcaaaaggttgtctatgcaccagaacaagcca

SEQ ID NO: 2822 - DNA, 122 bp, Homo sapiens
ttattgcataagtgtgtttatgtgcgtaggtgtgtatgtgcatacatctgaatgaatatacgcatgtattccgcaccttgttcccacaaagggaattaaagatggctaaggaagctacgtaa

SEQ ID NO: 2823 - DNA, 122 bp, Homo sapiens
agtaagtaaaacgttttccttctgagctgtgaaatgtgttcaaaattaaaccagcaatgccgctctttccctatcggggagcactgcaggataaataggtctgtgttttagttactgttgct

SEQ ID NO: 2824 - DNA, 122 bp, Homo sapiens
agtgcctgcaggcaaagcagcatggagcagccttcggtgggaggagggtattggcaggctcgtgcttttccacagggatcactgtggttggagcactctgcctgtcagcaccttgtcagtgc

SEQ ID NO: 2825 - DNA, 122 bp, Homo sapiens
ggccccagctgtcttgaattcaggtcagaaggtgggcccagtctggccctaacttaagatcgatttctgattataatcataatcagattttgtggcttccttatggtccctcaaccatgcca

SEQ ID NO: 2826 - DNA, 122 bp, Homo sapiens
ctcccgagaaaggaaaatccgtctacagtccagcggctgacatttcccagtcagccgtagcgccgcccgcttccgcctccccgcctaccccgtgggccgaccagtcccgctcccgcgggggg

SEQ ID NO: 2827 - DNA, 122 bp, Homo sapiens
ggtgggagagcagaggtggacgcggccgagagccctacagagaagctggctggtaggacccgcagggaccagctgaccaggcttgtgctcagagaagcagacaaaacaaagattcaaggttt

SEQ ID NO: 2828 - DNA, 122 bp, Homo sapiens
gactagcaccgtcctgggctggctacttaacctgtgtcaggtgccctgggctctgccaaccgccagctcccgactcggggcgtcgtccctcacccattcccgcagcccctacctgaagcggt

SEQ ID NO: 2829 - DNA, 122 bp, Homo sapiens
gagacccctgcaggttctggatgccgaaggccaatcgaaagacttagatcccctggaaggcgggcgccttggtttaggggggtccaatcggtttcaaggggttgcagcggggcggggagatg

SEQ ID NO: 2830 - DNA, 122 bp, Homo sapiens
attacagaaagaactgctggcttcctccgtaatctctttacaaggccccttggggtgggccgttccgagctggttccactcatccgcttactcacagtggcaggagggttagccactaagct

SEQ ID NO: 2831 - DNA, 122 bp, Homo sapiens
ccccacacagagcagagcgtccaacagctgggactgattaatccagacggccgactattacgtcatgtgttggattacaaccaaatgagtggctaaaagctcctagcaagttcaggccaaca

SEQ ID NO: 2832 - DNA, 122 bp, Homo sapiens
tcttggaaatggcaggcttgggtgaaatggcagttaatgaaaccagttccacaatgggcgcgttaatgagcaagactgaagtgcctagggtgtcattctggtcacagggtcatcaccagact

SEQ ID NO: 2833 - DNA, 122 bp, Homo sapiens
ggtagcggaactcatgcgctgggcgtcagaaacccggcaggggaatggggtcccagattccgggcacgtgcacatgggtgaagaagctgttgaaaatacagctacaatctttttctgctctc

SEQ ID NO: 2834 - DNA, 122 bp, Homo sapiens
gagtcccgtatccggcggccgatgaacgctttcatggtgtgggctaaggacgagcgcaagcggctggcgcagcagaatccagacctgcacaacgccgagttgagcaagatgctgggtgagtc

SEQ ID NO: 2835 - DNA, 122 bp, Homo sapiens
ttatcactgcaaacccattactccactacaataaacaccttagaacagagttttgaatcacgtctgtctacctgaaagctcaggggtggaatgaggcaaatacccacaaaaacaaacacaaa

SEQ ID NO: 2836 - DNA, 122 bp, Homo sapiens
aatggaattatttgagacataaaagagatagcaatactttgctggatgttctccattagtcgagattgttacagaggagaaatttttgccactgtttatcaaatattttttcctctagttaa

SEQ ID NO: 2837 - DNA, 122 bp, Homo sapiens
cactgaacgtcagcgccgactgctcttacttaacaggggagagccacagactctgcagtgcgtggcaggcagggcctgtcactgtctactgttgtcgctgtggctgtagcagtggaggtggc

SEQ ID NO: 2838 - DNA, 122 bp, Homo sapiens
tgcggccaatcacagcacgggccctggcctattggctgtctgtccaccaatccaaagagacgcacagtccgcaaggtcgcgaggctggcgtcacaacactactggcgccgcgggctcgcccc

SEQ ID NO: 2839 - DNA, 122 bp, Homo sapiens
gtctgtcctgaattcactgaaggaatctatttgtgactttcaaaaggcggctggtgtgcgcgctctttctcagtgacatggtgcgatgctggttcttagaaatgcggaggtccgaatggata

SEQ ID NO: 2840 - DNA, 122 bp, Homo sapiens
agtctgttgtccgggtgtctagtgacccctggggtaggggcagatgccagtctgggaagccggattgtttgaagaccaactttaaagttgggagcagtgcccagagcggggccgatgtctgc

SEQ ID NO: 2841 - DNA, 122 bp, Homo sapiens
tcagctgcccagcacccctaccctctgtccccacagcttctggtcccttacccacgcctccgaccaccagcagcttcccaaagaacagcagcaggtctgtgactttgtccaggacgaccacc

SEQ ID NO: 2842 - DNA, 122 bp, Homo sapiens
tatgttcagaacaatcccaaaggggagtgtttgtgcatgtatgtgtggatctatgagaggcgtgagattggtattgtatcaccattttcctgatgaggaaattgagtgacacagattatgtg

SEQ ID NO: 2843 - DNA, 122 bp, Homo sapiens
catagttctattacccagagataaatactgtacacatttgcatgtgtcctctagtcttttcgctataagtaatcatttgttttttaaaattgcactttaggagctttttttttttttttttt

SEQ ID NO: 2844 - DNA, 122 bp, Homo sapiens
gacacggcagatggactcgaaagtcagagaatatggggcgtatctcagatgtgaccgcagcgagcgcgcagcctgagttttggtagaatcgtgagccctgaacagagtttactgcccacttg

SEQ ID NO: 2845 - DNA, 122 bp, Homo sapiens
cagagtgagggtgacacccacagatgctgacggggcccagtgatgctgggggacaggacccgactcaggagcacaccctaacagtcgggtgcttaggattttgtgtcgacgtgtagaaagag

SEQ ID NO: 2846 - DNA, 122 bp, Homo sapiens
atctcttctcaacctcctatgtcctcgccccccgtaaaagatgcgcaggacctcgatggacgagcccacccctgaccctctcaaggaaagacaatgccaggctggttttcgagtttattgtc

SEQ ID NO: 2847 - DNA, 122 bp, Homo sapiens
aactgccggctgggtttacctattggtgctcgtgtgggactagcagattcgagaaaccagcgggactggaacctagtacacttcggcagttgagaaatgacttaccaggacaaatactgctt

SEQ ID NO: 2848 - DNA, 122 bp, Homo sapiens
gttcccacggtggggagccccggctagggataagctggggggcggggcctggaacctggacggagccaagagtcccgggacacaccttggcgccccagaccttctggcaggtgaccgccctc

SEQ ID NO: 2849 - DNA, 122 bp, Homo sapiens
ggctcgggtttcatggtgcccaaacctccaaaggggctcttcttgccacagccaccagggcgcacggccacggcgtcccgggcaaagctgccactgtactttataaggctctgcatggccga

SEQ ID NO: 2850 - DNA, 122 bp, Homo sapiens
ctatgggaccacctgctagtggcttccagcagccatgggctcctctgttccgacctttcccgtgccctgcagttttctagggcgcactgaggctcgaccacggaaggtccgtgccactctcg

SEQ ID NO: 2851 - DNA, 122 bp, Homo sapiens
cggcttaaaccgcttctttgaaaatggaacgcgactttcagacaaggcgaacgtggacgccgaggcggaggccaggctgcggaaatctgagggctacagaatagggttgggtctggggtact

SEQ ID NO: 2852 - DNA, 122 bp, Homo sapiens
aagacgccaccggcctacaggcagagtcagcggaaccagcctgggctggatctccccctgcgaggcccccaggcaacgcccgcgccgggccggggagatcacgtcccgtgcgtcgggaggcg

SEQ ID NO: 2853 - DNA, 122 bp, Homo sapiens
gggggtgccccatctagctgggtgcaggggtcactgcttgtcagctcagggccctgtgcccgcttgcctgttcccctacatctgtgcctgcacatccagaactgcctccttgccgctgcctc

SEQ ID NO: 2854 - DNA, 122 bp, Homo sapiens
ggatagggtacccacaccacgtccgtggtgaagccaatgcccagttgagcggggggcgcgcgcttcagagcacccgagaagctggcagatggagtgggaagaggtgactcttgatttcaggg

SEQ ID NO: 2855 - DNA, 122 bp, Homo sapiens
tcctccaggcccacagtttcttaaaggtctattcatcaacatgttaataatagattcttacgggagtaatgatatataataatgacagtaataagacctctttgtacttacaccctgtgttg

SEQ ID NO: 2856 - DNA, 122 bp, Homo sapiens
gaagacaaccctgagatagcagctgcgattgaggaagagcgagccagcgcccggagcaagcggagctcccccaagagccggaaaggtaggagccccccggcccgcccgcccggccccggcgc

SEQ ID NO: 2857 - DNA, 122 bp, Homo sapiens
cgtgctcatagacacagtgacagctcggtcccaggcctccttgcttcaggcagccctgggcggctcccgccctgctgtgccctcagagccccgccccggccccatgctggggctgcagcacc

SEQ ID NO: 2858 - DNA, 122 bp, Homo sapiens
tcattaggactaagccagtcccatggagccccaagaggagaagaggccaatgagccaagccgttcctgcctgtggcctggaaatcagagctgcttcgagcaagctctgcgcgggctctttaa

SEQ ID NO: 2859 - DNA, 122 bp, Homo sapiens
tgggccagctggacatctggacaactcatctcatgcctgagtccacagtaaggccatttccggaagaacatcaagttctttgttggaaatcaaacccaagagcaagagccccagaatgggca

SEQ ID NO: 2860 - DNA, 122 bp, Homo sapiens
ttaagaggtttagccacgctacggggctgctgggagcccggcagtctggccacaggaggtcggtttcacggaagggcaggatgtggcggcatctcctgaatttaaggagtcttgggggcgcg

SEQ ID NO: 2861 - DNA, 122 bp, Homo sapiens
aagttttctgtggaatcagctgcccttgtggctttctctacttcctcttactcatgtggccggaagaaaaaagtgaacccatatgaagaagtggaccaagaaaaatactctaatttagttca

SEQ ID NO: 2862 - DNA, 122 bp, Homo sapiens
atggaaagaaacagcaagaaacagaggccctgagtccagcagcttgcgaggaactaaatacgggcaacacctatgtgaatgagcatggaagtggatccttcagtcccaggccagtcttgaga

SEQ ID NO: 2863 - DNA, 122 bp, Homo sapiens
cacccagatctggccggccctggcgacggggctgcaaacgcttcgtagacctcagaacagcgcaacggcggaccggcggaccggcacgaaacatagcagccccaccacaaacatttcccttc

SEQ ID NO: 2864 - DNA, 122 bp, Homo sapiens
cgtgttgcggtcggaccccatgcgaaggagctaaggacacaaaggtgagcagcagagacgcggttccagctctcccccggctcccactccagcgggataggtagataatttcggtaaatttc

SEQ ID NO: 2865 - DNA, 122 bp, Homo sapiens
gattgtagcgaaggccaaagcttacctaaacagggagagcgcgtatggcggcagcaacagcgacgaaggagggaaatctgccttcacttccggttgcaggcttccctctactccagcctccc

SEQ ID NO: 2866 - DNA, 122 bp, Homo sapiens
ggtagggggcgcgggggccagccgcgtgtgagtgggtccgagtgtgcgtgagtgtgagtgcgtgtgtgtgtgtccacggcgcgggccggagcactcaccatctcgccgggggagcgaggcca

SEQ ID NO: 2867 - DNA, 122 bp, Homo sapiens
gggtgcaggtgaaagtctgtagctctcctattcagaagactggtctagtcagaagacttacgtattgccagacacactgattagctcactcagggctgtgctgtgtgctaggccccagaaga

SEQ ID NO: 2868 - DNA, 122 bp, Homo sapiens
tcctcgatgtacttccggctggcctgggactcaggctgaacattggttctctgtgcggggcggtggcggggattggagggcgggagctgtgctgacttaggattggcaaaatcgctatcagc

SEQ ID NO: 2869 - DNA, 122 bp, Homo sapiens
ccaagcaaggctgagtgatcctcactcgggagttggaagaaagggctgggggctgcatgccgccccgccctgaacacaaacgctccctggcttccagacctcacgcaattgtggccgaggta

SEQ ID NO: 2870 - DNA, 122 bp, Homo sapiens
gcaatttccagtagatggcatcctctttgccaggtcacacagagttaatggagacagactcgacttccagtctgcacttggctgaaaattgaactggtgcacctttggccagctgcttaact

SEQ ID NO: 2871 - DNA, 122 bp, Homo sapiens
caggcttgcgcgcctttcccccctcgggacttcccgaggacacccctgcagcagtgagcccgagtcctggctttggctgcatgttaagaaatattaatcaaaatgaatgcgtgccctttaag

SEQ ID NO: 2872 - DNA, 122 bp, Homo sapiens
ttaaaaaatatttttaaaaaacagcagatggatatccctactgcatttgagacctggtttcggttcgacctcctctggggaagctcacaagcaacactagaatctcagctctctctgttcgc

SEQ ID NO: 2873 - DNA, 122 bp, Homo sapiens
gcatgtgctccccgcccccgagaggcctgcgtcatgcggtctcgcccgctctgcgccaggcgtcctgctaacgtgtcctggagggactctcagttcctcccgcccgcatcctgcgcgggaac

SEQ ID NO: 2874 - DNA, 122 bp, Homo sapiens
gggcgcttgctagcgaatgttcagcaccgctatctacaagaaagtcaacgtctccacccccgactgtcattctgagcagaggctctttggggacgcttgagcccggtctccctcagtccaag

SEQ ID NO: 2875 - DNA, 122 bp, Homo sapiens
tttatccagttctacacgagccagtcatctccttcatgtattcaagcaacatttacgaatcggtcaccgtgccctgggagctgggaggccacagagaaccacgacaatctggaccaaaaaaa

SEQ ID NO: 2876 - DNA, 122 bp, Homo sapiens
gaagcttctgccactcagacttgtatgcagtctctccctgttctggggatctggccccaccggagaccacaacgcaccagtctagacatctcaggagcctgccccagctctcagggggtggg

SEQ ID NO: 2877 - DNA, 122 bp, Homo sapiens
gccccttccagcccttcccggccgggaaggacctatcacatccagagagcgaacgtgggccgggaaaccccaactccagaggggggaacctgtgagacccgcccctgcccattccgccgcct

SEQ ID NO: 2878 - DNA, 122 bp, Homo sapiens
gccactgcagggacatggcgatgaagacagtacggcaggggtccgcctcacccgagcaatcgagcccagtgctgccctcccctggaaacccgcccgcaccttgcgctccccagccccagcag

SEQ ID NO: 2879 - DNA, 122 bp, Homo sapiens
gacataaggccctactctgtctttatgaacatttagccgtggatgtggaaggtagatttccgcaggcctgacgtagtccctgatacacagcccccccctcaaataaacacgcaagggcagga

SEQ ID NO: 2880 - DNA, 122 bp, Homo sapiens
acacgggcgagaagccctacacctgccccgcctgccggaagagcttcagccaccactccacgctgattcagcaccagcgcatccacaccggagagaagccctacgtgtgcgaccgctgcgcc

SEQ ID NO: 2881 - DNA, 122 bp, Homo sapiens
caaggttaaagatgccgcatgagattgtgccatgacacacatgatccatgacacacaccacgtggagcacacgagtgccggcaaagaacgtttctgcctagtttatacaatcgtatatagaa

SEQ ID NO: 2882 - DNA, 122 bp, Homo sapiens
gggcgccgggccgacgactcctgggtgaggcctggctcctgccggcagggggcgcagggccgcctgggctcctgggtgcgggtgccggagggcgggagagaccgcaggtccggagacggggt

SEQ ID NO: 2883 - DNA, 122 bp, Homo sapiens
ttccctttctactgaactgggccagagtatactgatctgtggaatgggacttccctctctcggtacaaagcatgtggcccacagtggctgcagcgtgagaatgaggagtgtggtccctcact

SEQ ID NO: 2884 - DNA, 122 bp, Homo sapiens
atggaagatcaaatttcctaaattcctactgactaggcttaatttagagagatctctgggcgtaattgaaaatggcccaagtaggcaattcttctctcctgtgtgttctcttggttctggct

SEQ ID NO: 2885 - DNA, 122 bp, Homo sapiens
tattaaatcgcctgcggatcgctgcctggcatcaccgtacacgtgtgagaacacctccagcgcctgtgctcaccagacaggaatgctaggatcactcggggcgattgtgcatctcctaatcc

SEQ ID NO: 2886 - DNA, 122 bp, Homo sapiens
cgccaagctaggggacttctgggtgctccaaaagcagtgaccacaatgaaggaagtggatcggggcatacagtagtctaaacttgaaaactctcctaagttgcatctcacatcagaagttct

SEQ ID NO: 2887 - DNA, 122 bp, Homo sapiens
cgaactcttgggctcaagcgatcctgcttcttcagcctgtccactagctaggcttacaagcgtgggaccccgcgcctggctgaagagaggtatcattaaggacgagacccccttggccaggg

SEQ ID NO: 2888 - DNA, 122 bp, Homo sapiens
gctgccgcgccatgtcctgcttggccggctggagggcggcctccagctcggacagcttggcgttggcacccttaactgccagctcctcaggctgctcggcatctgtgatggcggcctccagg

SEQ ID NO: 2889 - DNA, 122 bp, Homo sapiens
cagaagggcttagggtgtcaggttgcatggaaggtgatattacagggcttgtcatgtagtcgtgtttactgagaagcctataattttcgctttgactgtatattgatttggaggctttggta

SEQ ID NO: 2890 - DNA, 122 bp, Homo sapiens
cccctcccgagcccagcgcggagcagccgggtttgaggatgtcagcgagcagccaatcagcgcccgcggcctaaggtaagagatgagtctgtagttcagcctgtcaatcacgcgcccctccc

SEQ ID NO: 2891 - DNA, 122 bp, Homo sapiens
tcggagaaacagataaacaagacaccgcctcatcagataagaacgtctccttcgatgtcacggatttcaagaggtagctggagaaactgacgtcaggagtgtcctgtgaatgaacatcgccc

SEQ ID NO: 2892 - DNA, 122 bp, Homo sapiens
tcatgtcactgcagtctagcctgagcaacagagtgagaccctgtgtcaaaaaaaaaggtacgtgttggtgagaaaacaaaaatcagaccctcatatatgactgatgggaatataaattggtg

SEQ ID NO: 2893 - DNA, 122 bp, Homo sapiens
ctcgttgccctgcaagcgtgaccctgatggacatccagtctctccaattaactaacaaagcggttgccgacgaccaatagtaaggcagtaggatgaggctccggcataaggcccacctccta

SEQ ID NO: 2894 - DNA, 122 bp, Homo sapiens
aactgttggttctggggctgtttcccattctccagagaaagtgcaggcccggggtgtgcccgagaaaagtgatgagcagttgacctccccttctcaacttggtctggaggcttcatcatatt

SEQ ID NO: 2895 - DNA, 122 bp, Homo sapiens
gcgccagggcgggtggtggagctccgcgcaggccggggggaaccgcaagaggagccggggcgggcggcggccccgggcgggtcaggggcggcgcgagcccacacagagcggtgaaactacca

SEQ ID NO: 2896 - DNA, 122 bp, Homo sapiens
tgacctgctgttcaccacacaaagcttccagcagccccagggctccctgccctggaacttcgcccctacactttgctgcagacactcacctgcacgcaggggctcaccagacacttgctacc

SEQ ID NO: 2897 - DNA, 122 bp, Homo sapiens
accaattatgattctcactttttctctctcctagaatgctggtgacttactgaacaggtacgagctgtcccttcttctttcccacatgtgcatataaacccacacaacacagacatgcacag

SEQ ID NO: 2898 - DNA, 122 bp, Homo sapiens
ggggaacagcgacacggggggaataccaacacgggaggaacagcaacacgcagggaatatcgacatgggtgatgcctgcaaagcacagcatcaatcccaagtgactcctgtacagggcggcc

SEQ ID NO: 2899 - DNA, 122 bp, Homo sapiens
taggtgacaggtttttagagaagccaatcagcgtcgccgcggtcctggttctaaagtcctcgctcacccacccggactcattctccccagacgccaaggatggtggtcatggcgccccgaac

SEQ ID NO: 2900 - DNA, 122 bp, Homo sapiens
acccccactttgagaaggttgtgtccctggagcctcaactgatagaccccacatcaccttcgctcctcccacctactgttctgacttctgattggccaaatggagttcactaactgccctga

SEQ ID NO: 2901 - DNA, 122 bp, Homo sapiens
gttaccacgaggttggcacagcttccacacagtcctttaataagccagctctgaccctggcgacatttggcctggtacagctcaaggcaggtagcctacaccctggcctagccaggcctttc

SEQ ID NO: 2902 - DNA, 122 bp, Homo sapiens
agacggagcctgagacttggagcagggcacagcacaggaatacaacacttttcaccagaacgacattccgacctctgaatcaaccctggaaaggcccttccattgaacttcttgtgatggag

SEQ ID NO: 2903 - DNA, 122 bp, Homo sapiens
tcttttagtctgcatcctgatggacagtggtgcgtcaacagctctgtcagccgcttgccccgcatcagcccatggctccagggctggctcagtcccactgctgcttctgtcacatggggtgg

SEQ ID NO: 2904 - DNA, 122 bp, Homo sapiens
aggccatctgccagcagctcccagggagccacacagaaatgtgttggagaagcctttgagcggtggagaatcacacagccaggcagagtaacgcaggttctgtctgaacacacttggcatgc

SEQ ID NO: 2905 - DNA, 122 bp, Homo sapiens
agggccggtggggctgggcaggccgcctctcccctgaggctctgtcctccacgggctcctcgctcagctcaggctctgagtcaaagccgaatgcagggatgtcatactcaggctcctcatac

SEQ ID NO: 2906 - DNA, 122 bp, Homo sapiens
ggctagggagcacaccccttctgggggctcgagacctccctgggtggagcagaactgcagcggctgcaggtcccggagagtctgggagaggtcgaggttgacagaggaggtgggtagggggc

SEQ ID NO: 2907 - DNA, 122 bp, Homo sapiens
gcagggagaccggacccagaggcactggggtagggctcggcagggcgggtccgggcggagcgcggggtgcggagggcggaggcggctccggcgcccgctctgcccgccgctgggtccgaccg

SEQ ID NO: 2908 - DNA, 122 bp, Homo sapiens
tgattcccctcacccataaatccacccccttctccttgttgtagttagagttgagccctccgctattgcactaggtgcaatagtcttgagtaaagttttccttaccattttaacaagtatca

SEQ ID NO: 2909 - DNA, 122 bp, Homo sapiens
aaatagtatgtattattagcagtaatatggaaccttagctgtactactacttactagtagcgagctcttgagttaaccatttttaggttctgggcctcagtttccctgtgaatgaaatggcg

SEQ ID NO: 2910 - DNA, 122 bp, Homo sapiens
gcagagttgctcagccttgagtgcccaaccgtgagaatggagcgtgccctgccgagggggcgctgcctccccttgggaaaaggtgggttgtgactgcttcgctccctgtacgcagctccagc

SEQ ID NO: 2911 - DNA, 122 bp, Homo sapiens
agaaaatggtcccaagccctaactcagccacatactatttattacctttgtagatgcactcgatgtgatgaagcagtatgatctgaaatatagctgtgttttagttttagatattcttttgt

SEQ ID NO: 2912 - DNA, 122 bp, Homo sapiens
aaatacaactttggtcctcatcagggagacttctcttttcttacctcaggtttattacaacgcaacttttaagaacttgagctattccaggcagaaggtcacatccttgaggtaaccagaga

SEQ ID NO: 2913 - DNA, 122 bp, Homo sapiens
ggcggcgccggtgcggcccggaggtgggagcccgcggagccactgcagtagctggagtcccgccgagtccccagccccaaggcagggcaggagcgcgcaccggccggaggtccatgctgagc

SEQ ID NO: 2914 - DNA, 122 bp, Homo sapiens
gcataccccacgaagctgcaatgctaaaggcgataatgggtgggggtggaggaggcggggcgccaagaccagaataagaatagtcccagcagaaagtgaatggcccatttccctgcagcttc

SEQ ID NO: 2915 - DNA, 122 bp, Homo sapiens
cgcgcccttcattgaagcggcggtggccgggctgggcgccggtagtggaaagcgacggcgcggctggaaaatgccagtccattcccgaggggataagaaggagaccaaccatcacgatgaga

SEQ ID NO: 2916 - DNA, 122 bp, Homo sapiens
ttttagttaattcaattggaaaagaaaaaaaaaaaaagacctgctaaagacctacttactcgaaagatttagaaacaaaagcccaggactgtggcagcacagggaccaagtgatcataactg

SEQ ID NO: 2917 - DNA, 122 bp, Homo sapiens
aaagaaaacacatgtcaccccttccaaaggggctctggggaattcactcaggccttgctacggctcctgccagcccagtgagcgacgggcacagccccggaatgaggctccccctcctccat

SEQ ID NO: 2918 - DNA, 122 bp, Homo sapiens
ccaggcctcgcggaaccccccgccccggtctcgtccccaggcctgcgcaccgccccgacccgaccccagcctaccccggcctctccgcgggcgcgccacaagcctacgcagccctggcgact

SEQ ID NO: 2919 - DNA, 122 bp, Homo sapiens
catgtttgagcttcctaaacagctcaaagcacccctggggtgatgggtttttatctgggccgcttgattggggtttcagacaggcctggcatcctcttgggggcatggctcctcaggagtga

SEQ ID NO: 2920 - DNA, 122 bp, Homo sapiens
aaagaaaaaaaaaaaaaagattgcagggcgcaagtgtgttgcagggcagcctcctcccgccgggtctggggcagcactcccttttcccgtgaattggcagcgtgtgtacgttaatattttaa

SEQ ID NO: 2921 - DNA, 122 bp, Homo sapiens
gctaaatcaacctcagcaaccggatagtttgttggaggcgggaaggtacgccgtgggttccgccgcagccagcgctggggctaggcacacgcccgttgccatggagacggggcggggcaggc

SEQ ID NO: 2922 - DNA, 122 bp, Homo sapiens
ccaacatgtccgcctccgaggaggtatacgatctagctctgcatgtctatggtagcacagcgcccgccccacgaggcgcgtgcgccggccggagattaatttgaaaagtagagggcgggggt

SEQ ID NO: 2923 - DNA, 122 bp, Homo sapiens
acgtgactgaccctaccgcactccgcaccccggccccacccccagggcccctcctcggtccgggtcccaatcccctggcgccggatcccagctcggagccctttaagattaagccgccccca

SEQ ID NO: 2924 - DNA, 122 bp, Homo sapiens
ctggaagcagcgggccggcaggacacggggacatcagcacctgtgtcagtgcccaggaggcgcgggtcagccctgctcttcaatggctggggcctgccctatgctgccctttggccccagca

SEQ ID NO: 2925 - DNA, 122 bp, Homo sapiens
aacttctttgggtaaataccaaggatcgtgactgctggagcgtgcggtaagagcatgttccgttttgtaggaaactttcggactgtcctccagagcggctgtgcccctgtgcattcccgtga

SEQ ID NO: 2926 - DNA, 122 bp, Homo sapiens
cgtggccccctccccgcctccgccgcgccccctccgcactcgcacggccccacccgcaggcgccccccgtgcggaggaagcggatctgccaggatcatttttgttgtgtcggaggatgaggt

SEQ ID NO: 2927 - DNA, 122 bp, Homo sapiens
attgggaatgaatcgtctccctatcaatggagagtttcattaacttgggtttattgggttcgctaaaacagtcccattatttaagcactcaaaaagttcttcagtcagagacatcttatgtc

SEQ ID NO: 2928 - DNA, 122 bp, Homo sapiens
cgttgcctcctgatgctggggtgcgactctgttttagccattcccgaggcccttggggtccgcgtgggcctcccgtggctgccctctgcctgcattccttgctgagctgccggcttgtcatc

SEQ ID NO: 2929 - DNA, 122 bp, Homo sapiens
gcagaccctggtccaccttcttggagtggaagccagcggtgcagaaggggacccctgaggcgcagaggcaagtaacagtgccaggggagtggtcagggcagatcctttccttctcaggaggc

SEQ ID NO: 2930 - DNA, 122 bp, Homo sapiens
cacccccgcgcgcccggtgcgcacccgtttcggcgggtgcacgagtccagagcatgtgcgcgcttccggctgccccctcctggctttgacccagcactgctggacccatctagtccgttcct

SEQ ID NO: 2931 - DNA, 122 bp, Homo sapiens
actggctggttgggcactcccccccctccccccccccgagttccgccgctgggactacagcgtttggctgcacggggagttctcgtatgtctagaacgatggcctttctgcggtgtctgcga

SEQ ID NO: 2932 - DNA, 122 bp, Homo sapiens
agacagagaagttgagagaggtggagaacgagggggagggggagggggtcgagagggagtcgaggagggattccagctccagtttgggtaaatccagctcgcgttttgtctctcgctcaact

SEQ ID NO: 2933 - DNA, 122 bp, Homo sapiens
tgccgctgccgcatgagacgtgggggcgtggcctggtacgctagtcctttggccagagggcggattccgcctgctaaggtatccccagagttatttcaactggggaaagagaccaatagcag

SEQ ID NO: 2934 - DNA, 122 bp, Homo sapiens
gcttctgagcacggctgggtctgtggggcctgagcagaggtgacccgcgatccggcgccacggcaggcaggactccccacccttgctgctgcctacacccccagggcagccccagagtcggg

SEQ ID NO: 2935 - DNA, 122 bp, Homo sapiens
gaggcaggtagcccagcctgcgccaggacacccgtggcgggcggaacccgccaaggaccgcgaagtccagagaaaggaagctgaggagctgcccgcccgcccccggctgcagccccagcagg

SEQ ID NO: 2936 - DNA, 122 bp, Homo sapiens
ggacccgctgcgcctctgtgcacagggagaggcactgatggcagcccggtgcgggggacacgcagaggccaggcccgccttgggggcagcgtggctggcggtgcggagcagagagcagctgg

SEQ ID NO: 2937 - DNA, 122 bp, Homo sapiens
gtaaagtgtgacggccgtggcagcggcttccaagggaccaagctcctgcacgaagtgaggcggcggctgggcttgctggaggagaaggaccagatggaggccgtgcggtgagcacccgccca

SEQ ID NO: 2938 - DNA, 122 bp, Homo sapiens
ataagtttgagaactgttgttacaggaattctcagaacatttaaaacacaaatcctcatccgcagggatcttcaggagggagatggctgatgcagcacaactttctttcacagaagtatctt

SEQ ID NO: 2939 - DNA, 122 bp, Homo sapiens
tggccctattttttttcatagaccctaactctacctttctgctttaaagcaaagtaaactcggtggcctcttcttctccacccctcaaaatgatagcaatctctgccgtcagcagtgcactc

SEQ ID NO: 2940 - DNA, 122 bp, Homo sapiens
ccatcggagaatatgcgagcgctcggtgaccccctggtgaaccggaggggccaggcctgccggcaggtgcagctggagcagtctcaatgtgacattcaccgcgatcctttgtgccctgctga

SEQ ID NO: 2941 - DNA, 122 bp, Homo sapiens
tgttcgctgttactttggggaaatgtggttctgcgccaccttgtgaacttgctctcacagcgcctagttttttctctctgtgtgtcggcatttatgcaagtattatgtatctttggtttgtg

SEQ ID NO: 2942 - DNA, 122 bp, Homo sapiens
cagatacacaacctcatgggaagaaacaaaaactgccacttttatccattccaggtgctacgaagaaagaaaagtatgtcagagaaataagggaaatggctggtatctcagttattcttcct

SEQ ID NO: 2943 - DNA, 122 bp, Homo sapiens
ctcagtctcagcactactgactggggaccagatcactgttttactgtggggctgcccatacgtcgcagactcgggaccagatcactgttttactgtggggctgcccatacgtcgcagactcg

SEQ ID NO: 2944 - DNA, 122 bp, Homo sapiens
tttacttacagcgaaggtcaggaacccctgtaactctcacaccgcaccactgtgggtaagcgatgtctgcagggacccctgacggccactgggaggccaggagagaagagggagaggaaagg

SEQ ID NO: 2945 - DNA, 122 bp, Homo sapiens
gaacaggcctctgggccccagacctcggagggattgagcctttcccagaaggctttgcagcgccgcggagaactctgggatacaaatggatacacaaatccaaagcaaaagtctagacctgg

SEQ ID NO: 2946 - DNA, 122 bp, Homo sapiens
cctgggctctccatgcccttgtggcgtctccaccccatgcttccctctcccttcccagcacgccagaaaaacaagtgtgagaaggaggatgtgaattatggtcacgtgaataaggggattta

SEQ ID NO: 2947 - DNA, 122 bp, Homo sapiens
tcactcgactgctgattctttcgcttggcatcgcgtcaggggagttagctttccttcagccgggtctggctagttattgggcgccgggtagatgcatatatatatatttttttctaactata

SEQ ID NO: 2948 - DNA, 122 bp, Homo sapiens
attctagaaagaaggagtggtccacaccttgcaacttccatcttggacacaagatcatcccggaccaaaagaaaaatcacaaagaccctttttgtgtctggtcctcaggggattgagctatt

SEQ ID NO: 2949 - DNA, 122 bp, Homo sapiens
gaggctaatgggacccgggggctctagagtgaggatggggaagatacacaagcgtgaagacgaagtgctgctcctgagcttaggctattcgagggtcccctgatcacctgccctctgcacgg

SEQ ID NO: 2950 - DNA, 122 bp, Homo sapiens
tttcagattaattaacacattcattcagtcaataaatatttattgagagcttacttactacgtgtcaggagctgttctagcgctggggatacagccatgaacaaaataaccagggtccttgt

SEQ ID NO: 2951 - DNA, 122 bp, Homo sapiens
gtattagtttgctggggttaccataacaaaatactacagaccagtggcttcaacaacagacgtattttctcacagttctggaggctggaagtccaagatcaaggtgtcggcagggttggttt

SEQ ID NO: 2952 - DNA, 122 bp, Homo sapiens
tgagcggcagacaaacagttaaaacagaggagtggggtaagtgatgacctaacccagccccgctgctctagttttgttaaacacctcatctgctatcacggtctggcgaaaccctggagaaa

SEQ ID NO: 2953 - DNA, 122 bp, Homo sapiens
aggtcactcaacacagcacctggccccaccggtggccgggacagccaccccaaagtcacgcgcaggccagagacccaggcagcccgaaaccagggctcaggcctgcgcctgccccacagcac

SEQ ID NO: 2954 - DNA, 122 bp, Homo sapiens
tccggcgctttcttttccgaatggagggtggagaagcccgggaaggtaggaggccgggcgcgacaggtgtaattaacatgtactgagagcttctgcaggccaggaaggaattttaaaatgcc

SEQ ID NO: 2955 - DNA, 122 bp, Homo sapiens
cccaaacagtgtaaccaaacaatcaatatggacgccctcattaaaatcccccagtagctgcgagtttgattttcagcagggtctggacaggaataatagatttggtggcctggaggaacatt

SEQ ID NO: 2956 - DNA, 122 bp, Homo sapiens
ctctatattttcaccaaagataatgcaatcataccaagctcctgcttacaaaaccttcaacggctccccatgcatgcagcatgaagtccaaattcctcagcaagttcttctcagaggtatac

SEQ ID NO: 2957 - DNA, 122 bp, Homo sapiens
ggcgtagtgcgcctgcgcggacgtcgatgggtttgtgggcgcagggcgcgaggcgcgaggcggtagctgggctagtcctgttccctggcgtctgggcctttctgctctccgcaaggagctgg

SEQ ID NO: 2958 - DNA, 122 bp, Homo sapiens
gcttctctggactgctcctaggctatgccgtgctgcggctccggcactggtgggtgattgcggtaagatgccactttcctggcagcttctgggccctggcagggctggtggaagggatggga

SEQ ID NO: 2959 - DNA, 122 bp, Homo sapiens
cggccggccactgaaaatgggggcaggggccgctgcggagcgatgaatcctttcctcagccgcgctcgggctgccggttcggcggccacaggcctggcaggcgcgttagagacctagacccg

SEQ ID NO: 2960 - DNA, 122 bp, Homo sapiens
acgggcgggcaaggcgctgcagggagggactccaaagacacacgcgcgcagccctcctcccgcccgcagcccttcagctgctacagtggccacagctattccgaggtctattccggcctcgc

SEQ ID NO: 2961 - DNA, 122 bp, Homo sapiens
caatggggtctactcacctcaagcccatgcctatatgctttatcatgttgcttagggagacgttgttagcttgaaagggtttcctcttctctgtaaactcatgagccagacagatgcgccag

SEQ ID NO: 2962 - DNA, 122 bp, Homo sapiens
ccgcggctttttgcccccgccccggcggctttcttccgccgcggctttttgccccgccgccgcccatttttgccgccgcggctttttgcccccgccgcctaagctttttgcccgcgccgccg

SEQ ID NO: 2963 - DNA, 122 bp, Homo sapiens
cctctgcctcccagggttaagcgattctcctgcctcagtctccccaagtagctgggattgcggtgtgcaccagcacacccggctaatgtttgtaattttagtagaggcagggtttcgccatg

SEQ ID NO: 2964 - DNA, 122 bp, Homo sapiens
gccagaccgggaaccccagcggactcgggaaacaccgcgtcccagccccggaggcgggcccgccaagttccagaaaaactctggggatctatcgagagggcagttggcgggactgggcactc

SEQ ID NO: 2965 - DNA, 122 bp, Homo sapiens
tcctgtgtaattgtaaaaagaggaaagctgaatacccagacgaccagtatagaatctcttcgagacagcagattgggcaagagacgggctttttttcgcaatacaaggataaacacatcctg

SEQ ID NO: 2966 - DNA, 122 bp, Homo sapiens
gcgaggtcacgcactgggtggccaccgaagtgctgctctgcgaggccccgggcaagcgcgcgcagctgctcaagaagttcatcaagatcgcggccctgtgagtgcggccgtcggcgggatgg

SEQ ID NO: 2967 - DNA, 122 bp, Homo sapiens
agcagttgtgcggggaaaatgtcttcagtactttttttataccgggcttctctgcgcttccggggcccagagcggcacgttcgccacaccctcctcatctgcatagggcgccgccccctctg

SEQ ID NO: 2968 - DNA, 122 bp, Homo sapiens
gactagagacataggtaggaaacttggacccaaagcaggtacttgggaagagtgttcagccgccccaccggggaagaaacttgtctagcccccaagaaccaaacttgcctggggcgggatca

SEQ ID NO: 2969 - DNA, 122 bp, Homo sapiens
ctgcggtgtggacgggcctctccagtgtgtgccagcctccaatacagtcttgtccttcaacgaggtcttagggacaaggtacaggggcaattatcttgcattcacagcaacaaataagtcag

SEQ ID NO: 2970 - DNA, 122 bp, Homo sapiens
tgcctgccttgctcagcattgcctgctgggcttcaaatgcagttctctgcagctgtttctcgggtttttcacttctcaaaattgcaagttaaaactgaaaatcaaaagccgggagaatgtag

SEQ ID NO: 2971 - DNA, 122 bp, Homo sapiens
tcagctctcccactgctgactctgatttctttctttcctttcactccctccttccttcttcgtggtgggggtgtggtatttaaactttatgagctccagtgtcattacatgtagaatggtaa

SEQ ID NO: 2972 - DNA, 122 bp, Homo sapiens
gaacccagaccacttggaatctgggcccaacatgcttattcctcctgcaccagccaggcgcggtggcttacacctataattctagcactttgggaggctgaggcaggcaagtcacctgaggt

SEQ ID NO: 2973 - DNA, 122 bp, Homo sapiens
gtagctcacgtacatggtggcgagggtccgggagcagacctcaccatgctgcctggggaccgacgctggaggctgccggggggcacgaagggaaaggggcgaggggactcgaggagcggcgg

SEQ ID NO: 2974 - DNA, 122 bp, Homo sapiens
gtccctccgtttggcatcttgcctgctgtccctcacaggctgtggcatcaacaaccttgtcgtcacatcgccgcgcattcgcaggctctgctggtccgtggctagtttcttaaacacccata

SEQ ID NO: 2975 - DNA, 122 bp, Homo sapiens
gactcaagtctcacgttgaattttactttactaaatctctagacaggcttggatcttctgcggaagccaaaggaatttctctgagcaataacagcaatctgcaaacaagctgggatgaaaaa

SEQ ID NO: 2976 - DNA, 122 bp, Homo sapiens
tgttaagagtcaggtcgtcctgttactgaaatgcaccgtgcctcttccctctgacgcacgcgtttccgtgagacttagttctgttctgctcttttacaggcagtgtgtgaagaaaccctgaa

SEQ ID NO: 2977 - DNA, 122 bp, Homo sapiens
gccgtggctttttgccccccaagcgccaaggctttttgaccaccgcggctttttgaccttcgccactgcgaattttgccgccatggctttttgcccgccgcggctttgtgcccccccagcgc

SEQ ID NO: 2978 - DNA, 122 bp, Homo sapiens
tggcctctgccctagggtgcccgggcgcgtggggtctgtgtgcccaggaacgccttcgggcgggaggcaagccagagtggcctgtctttgaattctggaaccactggtctggggtgagggct

SEQ ID NO: 2979 - DNA, 122 bp, Homo sapiens
cggaggctatgcgaccctgcgcgtcgcatcccctcggtggactacactccccagagtcctcgggagtcgtccaggtacacgccccagaatattggtcatagcggtccacccgggactgcgcg

SEQ ID NO: 2980 - DNA, 122 bp, Homo sapiens
atgaggtttccactttctaggcactcacagtcctggaaggaagctggcgaggcaggcagacgctttggtaagggggtgccgcagcagcgagccggcagaacgtgctgcctgcatctcactcc

SEQ ID NO: 2981 - DNA, 122 bp, Homo sapiens
acttactcaccggcagacggcacacacgaagcagtcggggtggtaggtcttgcccagcgccgacaccacctcaccctcaatgaactggtcgcagctgaagcagcgggtgccgtagagcctct

SEQ ID NO: 2982 - DNA, 122 bp, Homo sapiens
ctatgattcttgtgattgctggttccagaatgcaccagtgactgagaggaagaggatgttcgagaggcctgggatgaggccctttgaagctctattctcttagggcttctcactgtggcttt

SEQ ID NO: 2983 - DNA, 122 bp, Homo sapiens
ttcgacctcccaggctcaatctattctcccatgtcagcctccccagtagctgggaccatacgcacacacaaccatgctcagctaatttttgtatttttttatagagacagggttttaccatg

SEQ ID NO: 2984 - DNA, 122 bp, Homo sapiens
ccctaggaagcaaccccattaagtctaagatgcccagtcgggactggggaaatcccacctcgagaaccaatttagcagatatcacctccctctggacacccagtgactgtaaagaccatact

SEQ ID NO: 2985 - DNA, 122 bp, Homo sapiens
aatatgtttttggagaacagaacaactaactcaccagattcttcccaatatgctcattcacgactcagaataacagcaaagtggccactgttgtaaatgaggaaatagcctcaaagtggctg

SEQ ID NO: 2986 - DNA, 122 bp, Homo sapiens
tgtcccatttcttccaagtcaaagggtctggaggtggcagaaggctcccatcttaccccccgccaaggcccatgatctgggaggatggggagacccctgtcatcactccaggaggctctagg

SEQ ID NO: 2987 - DNA, 122 bp, Homo sapiens
cccattagccctcagcttgtcctcttgtctttgctctgtgctagaccagcagtgtgatatcgtatgcatgtatatatgtctctccaagaggactggaagctttttgaaggcagaggtttaat

SEQ ID NO: 2988 - DNA, 122 bp, Homo sapiens
tcatctagggtctgatacatccctgtggtgagagctcagttcctagtctaggggctgctgcgtgcagggaccctggaggaagaatgcttgtttaggggtcaggcctcagcctcccactggct

SEQ ID NO: 2989 - DNA, 122 bp, Homo sapiens
ctgcacagtgtctgagcgtagggccttcttgtctctctgctccaggtctgtggggtgtggcgggcagtgcctcggttgtctctgcggctccttagggcagaacagctgcatgtggcacttgt

SEQ ID NO: 2990 - DNA, 122 bp, Homo sapiens
ttcaaactttcaggcgagaatatagcgtattatgtcgccgtataatggatccaccctttccgcccatgcaacatcacatctttaattgctctactttatgaagtgataaagacaaaagataa

SEQ ID NO: 2991 - DNA, 122 bp, Homo sapiens
tcctgtcacctcttgattttcaattatgtggagtaccattctgtgacttgattatatttgcgcagactcattttatagtttggtgcaatttaggatacccccaaagtgcaaacgaagggtct

SEQ ID NO: 2992 - DNA, 122 bp, Homo sapiens
cacactgaccattaagcacttagcatttatgaagcacttcctacgacctctccttcatctcgctgcggccctgcgaggccgatagtgtttattattctcatttacagaggaggaaggtgagt

SEQ ID NO: 2993 - DNA, 122 bp, Homo sapiens
agtggagtgaaggacgggctattttatgtacggccatcagagaaggccttgtcaacaagacggcatttgggcagagatctgaagaaggttaggaggtaaacaactgagccacggttatcttc

SEQ ID NO: 2994 - DNA, 122 bp, Homo sapiens
ccttttatatgtggattttcactactatcatgaagaatgtatacaaataatctgtgtccacgttaggaacctatttagacatcacagtctctcatagttagtgacctaaattcagccccacc

SEQ ID NO: 2995 - DNA, 122 bp, Homo sapiens
ggtgggtgcttgtgactttgtgtacagtggtgggtgtgtgactgtgaagcattgggtgtgcgtggagttgagactgtgtttgtgtgtctttgaccaaatgtcacacatagtcatatgtgaga

SEQ ID NO: 2996 - DNA, 122 bp, Homo sapiens
gcgggaacctcaagctgtacctttctcctttccccatgtcccttgatctttctttggaaacgtgcacccccttggagtgcgcagcaggaggcccctgaatagagagaataaagctaaggggt

SEQ ID NO: 2997 - DNA, 122 bp, Homo sapiens
gactcccctcagccagcgcacgcctcaccccaatgcgcttccatctgaagtagttccatgcggcgccctcactgtgacctgatggcaactgcctctccaggactggatttgaagacccggga

SEQ ID NO: 2998 - DNA, 122 bp, Homo sapiens
cgccgccctctacagatgggtgcgccacgatggcaacgggcaatgcaaagccacacacgccggccacatgtggacagacatcgttttgtctgcatcctgtgacactggtgaacttcatcaga

SEQ ID NO: 2999 - DNA, 122 bp, Homo sapiens
ctgcggcccagggggcgaggcgtgctcgggtctattccgggagcggctctgaggggcgggcgcgggcgcgggcggggcgggggctgccggcgagcatcctgtctgggggaggggaccgcaga

SEQ ID NO: 3000 - DNA, 122 bp, Homo sapiens
gtcgtcagattctaacctttttgtttccgcctcagatgacaaaaccttgaagatacgggacgtgagctcgggaaagtgtctgaaaaccctgaagggacacagtaattatgtcttttgctgta

SEQ ID NO: 3001 - DNA, 122 bp, Homo sapiens
cttttttccttgaagctaagtgaacctgcaaaactctcttcttatttgggtgtttgatcacggctcccctctgcctggcttcctctgatcgcccttcctccgggtgcccggctggtggagga

SEQ ID NO: 3002 - DNA, 122 bp, Homo sapiens
aaacaccatacgcttcaactgctggttaatttttgctctaaaaacttgatggaggccaggcgcggtgactcacgcctgtaatctcagcactttgggaggctgaagcgggcggatcacctgag

SEQ ID NO: 3003 - DNA, 122 bp, Homo sapiens
tgggaactttatgcactgacataccctaaatccattagtcaatcttaaaattgctaagagcgaggaaaattgacgttctattcctccggatcctgctcgagaagctgggggactcgggtccg

SEQ ID NO: 3004 - DNA, 122 bp, Homo sapiens
ttaaacatatttcccaaagagacgcgcaccccaagttagggaagcgccgccctgggataacgaggaccaacaggacaagactgagaggcaggagcacaacccacggcggaaagcacgacacc

SEQ ID NO: 3005 - DNA, 122 bp, Homo sapiens
caaggggccccaggctcttggagaggcgtgggggcggcccgagctgggtcccgtgttgaccgggggcacccccgagccacccggcatgctgggccctgcagcgccccaacccttctctggcc

SEQ ID NO: 3006 - DNA, 122 bp, Homo sapiens
ggcactagacggggacatctttcagaggcccttgcactctctgcgtcccttggcagggggcgttctaggccagttaagacaagcccaggagtgtgaggaacacagcctcagaagggccagcc

SEQ ID NO: 3007 - DNA, 122 bp, Homo sapiens
tgccccgccccttcgctttccctttggttccaccgagcttgacagagcggaaagtcccttcggccggcgccgggctggcagccattggaggaaggtctgtcacagggaggcccaatcacggc

SEQ ID NO: 3008 - DNA, 122 bp, Homo sapiens
ccaccttcgtgaaccgcatgaagagtaaccacatgcggggccgcagcatcaccaatgactcggccgtgctctcactcttccagtccatcaacggcatgcacccgcagctgctggagctgctc

SEQ ID NO: 3009 - DNA, 122 bp, Homo sapiens
ctctaagcttcatcccagccctcaccctctgtcaccccctccaatccctgatgggcaaggcgggggcagtcctcctgggactgatcccagagagcctgaactccaggcagcccctgaggcca

SEQ ID NO: 3010 - DNA, 122 bp, Homo sapiens
cgctctcttttttttttttttttttggtcggaggaaagaaaacagccctgcgcccggatgcgtagagagccgacaagtggaaacagggacacaccctcccgtgagcccgcccaagctggagc

SEQ ID NO: 3011 - DNA, 122 bp, Homo sapiens
aacaggcaccaagaacaaatcccagcgtaaggctccctttaagtgcggctcccagggttacgtattcccattgcctacaggcgaggccgcgggtctgtaaacaagcgactgccgctgcaacc

SEQ ID NO: 3012 - DNA, 122 bp, Homo sapiens
accccaggatttgggggaagtgtcgacaagcccccgcgcgggagggcacccagggaataccgggtgcatctgacttttcttggcttactgcgcgcccgcagcactgaagtttttttccgcgc

SEQ ID NO: 3013 - DNA, 122 bp, Homo sapiens
ttcacaacaacgctgtgaaacaaatactgtatccccattaatacagtacctgttgttctgcggactcaagaaaacagctattttgggaaacagtcacagtccattgttcaactctaatgctt

SEQ ID NO: 3014 - DNA, 122 bp, Homo sapiens
gggagcgagcctcatagtggccaccagggggaatgcggagctcaccttgggccgcttccgcggggagctctaaagggagctggggcacttcctcttagagatctcacttgggtaacatcgaa

SEQ ID NO: 3015 - DNA, 122 bp, Homo sapiens
tcagtgggactgggtttctgtagccaagccagacttgactgtttctgtagagcactatctcgggcaggccattctgtgccttttccctctgttccatgactttgctttgtgttggcaaccac

SEQ ID NO: 3016 - DNA, 122 bp, Homo sapiens
attcaatgtcttcagaaccctagagatgatggcatcaaggccatgtgtcacatctgagatcgtatttttcttcttctgaaatattacctgtctcatcccttgtaccaagcatcacactctct

SEQ ID NO: 3017 - DNA, 122 bp, Homo sapiens
gtggggcagtcacacattcatcgatcagcttcacctctcgtgggtgctctgaaacgatgacggcagccacaccaaaggtcactgacacagactgccatcacgtgagaatcgtgaaaaagttt

SEQ ID NO: 3018 - DNA, 122 bp, Homo sapiens
ctggaagatgctcctagggatgaccccactccccacccacaactgttaatcaggaaataacggatatgaaagtagctctgcgaactgaggagccgtggagaatgtacaaaacagattcctaa

SEQ ID NO: 3019 - DNA, 122 bp, Homo sapiens
ccccaccccttttattttttacaattctattttcagcaatacagggatccttgaattcatcgacttcctgtggtgcacagtaaacctggcatacatgatttttaccctttaaatactttatt

SEQ ID NO: 3020 - DNA, 122 bp, Homo sapiens
tgtccttgcagccaaggtaggtaacgatcgtacctaccacatgaggtggtcatgagaaaacgacactcacgaagcactcgagcgcacctggctcatactgaagccacggaaggcttcctatg

SEQ ID NO: 3021 - DNA, 122 bp, Homo sapiens
ctctcgactcgattaaaggagcgagaaaaacaaaccacacgaaagctgggcctgcgcgtccgctgggctatgccttgaagtctggggataccaggcagccccaccattgtgcctctcctacc

SEQ ID NO: 3022 - DNA, 122 bp, Homo sapiens
tcgccgcgctcccgggaggacgccggaggtgagcccgctgtcactgggcgccggggcggccgcctcccttcggctctgtcatttcatgtgtgaccgcagttctgcgggctcccctcctcagc

SEQ ID NO: 3023 - DNA, 122 bp, Homo sapiens
gccttttcccctccaatcgccaaggctccggtggtttccaggagtaacgaggggacctggcgggctcctgccccgttaggcgtccccgcgcatgcgcaccgcttcccgtggcaacccggcgc

SEQ ID NO: 3024 - DNA, 122 bp, Homo sapiens
tggaaggtggtgcacccagggaaggcatggaaactccacatcttttcccacagaatctcacgctgtgcatctctccatccatatcctgtgtaatattctttataataaccagtaaaagtaaa

SEQ ID NO: 3025 - DNA, 122 bp, Homo sapiens
cagtcaactttaccaagaagtcctggatttccaagatccgcgtctgaaagtgcagtacatcgtttgtacctgaaactgccgccacatgcactcctccaccgctgagagttgaatagcttttc

SEQ ID NO: 3026 - DNA, 122 bp, Homo sapiens
atatatataatgatgatacggcaaagttactggcaatctggcttctgccctgaacctctacgaccaagttctggccttatcgcacacagaaaagcaatgccttccacccttcgggggcattt

SEQ ID NO: 3027 - DNA, 122 bp, Homo sapiens
ggtgcttctatggtgtgtggggttttttgttgcctccctctagaagtgttaccgttttcacgtcctattaatgtcctctggttgttaaattacagcagcacattacagtgcactgggttccc

SEQ ID NO: 3028 - DNA, 122 bp, Homo sapiens
gggaaactcagagagatggagtcagatctgtgcccctcactggcccctggtgtccagccacggcctgggccttgcccctccctcacattctgtcctttaatgggaggagatgggcttccaag

SEQ ID NO: 3029 - DNA, 122 bp, Homo sapiens
tggggacaagagggcacccctctccaggggtggggacatgagggcacccctctccgggggcggggacaagagggcacccctctccagggcagggacaagagggtacccctctccggagctag

SEQ ID NO: 3030 - DNA, 122 bp, Homo sapiens
ggagctcccgattcttcttgttacgaggaggccctggagaggctccggctgtggtcggaacggtctcttcctcccagtatcgccgcggtttctacaggcacatcaggaactccgcactcacg

SEQ ID NO: 3031 - DNA, 122 bp, Homo sapiens
tcagtatcacgggggtgaaccgcctgtgaaatggttcataatatccaagctggaagaggacgttactcccaatatcgcagagggtgtaccccctctgttatatggttcataacatacaagag

SEQ ID NO: 3032 - DNA, 122 bp, Homo sapiens
tgcagtaaacttcccagaaggctgagcattataaactcttcaaaatggcaagcctgctaccgaaaatacagtccccacttaggaggttttctggacaccagaaccagtctccattgtcagga

SEQ ID NO: 3033 - DNA, 122 bp, Homo sapiens
tagcaacagccccatgtggctggcagctaccaaagtggacggttgcagacgagcagattccggcaccgcagaaaggtaggcgccggacagcgctgcccgcctggacctgccgttccctcagc

SEQ ID NO: 3034 - DNA, 122 bp, Homo sapiens
gtacactgccggccgcttccaaatgccccggccgtgactccaagcctctgccaccctcagcgggcactgggcctacagagaggagaccgttccttccaacacacagggcgagggcaaagcat

SEQ ID NO: 3035 - DNA, 122 bp, Homo sapiens
taatttcaactgattaaaaatggtcacttatcctgcgaaagcagtacttgatggagacagcgtttttgtttgaagagtccaatggctgtttattctgcaagaaagaggtgataagtacctgt

SEQ ID NO: 3036 - DNA, 122 bp, Homo sapiens
ttttttctctctctattctttccttctgggggcttcctcagctggatcttgcctccctaacgcggctttcctgttgctcattccatccgtggtttccctgggtcagggattctgtctttcgt

SEQ ID NO: 3037 - DNA, 122 bp, Homo sapiens
tctttaaataagcatctttgtcttttcattgtattctctgtcatctaacataggacctgacgtataaatgtttggatgaatcctctaatcatattaggtatgtaaatcgtgtgcctggaact

SEQ ID NO: 3038 - DNA, 122 bp, Homo sapiens
tctgggcgggacctgacgcgtgggtccttggcgaggaagcggggttgggtcccgagatcacgtaccagctcagagtggccctcacgcagcccgctgcagccgtgcggcctcctccaacatgc

SEQ ID NO: 3039 - DNA, 122 bp, Homo sapiens
cacatgtatcatctaattctcaaaagaagcctgtcagctaggcatgggaaaattaagactcgggttggttaagtcaactgcccaaggtcacacaagctaatgagaggaagtgctgggttttg

SEQ ID NO: 3040 - DNA, 122 bp, Homo sapiens
gtattttgttaaggatatttgtttgtatgtttattcagtatacttacataaaaattatttcgccatcagccaaaactcagtaatcatgacagctgtctgttgttttatgaagtttatttctc

SEQ ID NO: 3041 - DNA, 122 bp, Homo sapiens
tcaatctggggctgactgagcgggaagatgcagggcaactcgaggatggcccggggcagccgccctgggtcgcggaagcccacgcccctgttttgggcgccgggcagcagggacttctccag

SEQ ID NO: 3042 - DNA, 122 bp, Homo sapiens
ggcaagtcaggtagatgcccaagggagctggcaggcacacgtgggtgcttcctgctccaccgggttctgtctgaggaacccagagatggttctccctctctctcatgtgtctcccagcatgc

SEQ ID NO: 3043 - DNA, 122 bp, Homo sapiens
aaccacctcttggagaaggaagatctgagctagcagggccgtgcatcttcccgaaagctccgtgttcctgcttcaaggctatgcttcccaagaaagcagatcacggggttattttcctgacg

SEQ ID NO: 3044 - DNA, 122 bp, Homo sapiens
gtgggtgaatgcgcttttgcaggccccgggtctggagcgggcatgggggcagatctgtcccgtgttgaagcttaacgaagccaccggccggcgctgggaggttagcggggtctcgggtcctg

SEQ ID NO: 3045 - DNA, 122 bp, Homo sapiens
atatcttcagttgtgggtttatcaaacattcaaaaaaattgaccacacatgttgaaggtgcgaggtaattggcaatccataggaaggactgtggaagccaatgtggcaaccacatccaacaa

SEQ ID NO: 3046 - DNA, 122 bp, Homo sapiens
tagcggatgcacccacgctgggcgcccagcggcctctaaccgccgccccagcccagtccccggacatctctatccctaggatgggaatcttccggcctcactcagacccccttaaacaacgt

SEQ ID NO: 3047 - DNA, 122 bp, Homo sapiens
cagggccttcagagacacacactatgggttccccagtgaccatccaacaaagaccccaggcggtaactctagtggccccacaacagcctccagaaacacctgaccacagactccacagactg

SEQ ID NO: 3048 - DNA, 122 bp, Homo sapiens
gaacactgagtcctgagggcaaaggcgagaataaacaccgcgcaccctcagccggggccccgtgttcctccgtgatgttccacttttggaaaggaagctggcacttgggtatgcaacaacct

SEQ ID NO: 3049 - DNA, 122 bp, Homo sapiens
ctattggagcttcgtttgacttttgcagacagaaacacatcacgactcctgaaggaatgccgatcatcagagcagactgcatgcatgactcattcactcacaggctactactgcaccgcaac

SEQ ID NO: 3050 - DNA, 122 bp, Homo sapiens
atgcaaatcccttattagttgtaggaaacagatctcaaacagcagttttgttgacaagaccgcaggaaaacgtgggaactgtgctgctggcttagagaaggcgcggtcgaccagacggttcc

SEQ ID NO: 3051 - DNA, 122 bp, Homo sapiens
gacttcaaaaacaaattttgacctattgtgcctaacaaacttcccaattgcctttaccatcgactacacagacttccttactgccttccaaatatgatactcctctgcaaactttaagtcat

SEQ ID NO: 3052 - DNA, 122 bp, Homo sapiens
tggccttcatcagctccccaagtactgataacgtcgtcaacatggacttcacgccatgatcgtccacaacggtggcctctgtctcttaccttctgagggagaacatcagtgccgtctgtctg

SEQ ID NO: 3053 - DNA, 122 bp, Homo sapiens
atggagccgcaaagacatgcttttatatccacatattcacacacccatcccaaatacacacgtacaccaatatatgcatgccaggcacacggacacacacacacaccagtgtacatataccc

SEQ ID NO: 3054 - DNA, 122 bp, Homo sapiens
atttctgtgtgcaggcgagcttcttggcctaagggcaggaagagatggcagcgggggagacgcagctctacgccaaggtctccaacaagctcaagagccgcagcagcccctcgctcctggag

SEQ ID NO: 3055 - DNA, 122 bp, Homo sapiens
cagatttaagaaaggacatcgattctaacagtattctcggtatcgagtcggcgctcaccacggattaaagaaaggtggattctaacagtgttcttggtatcgaatcggcgctcaccacagat

SEQ ID NO: 3056 - DNA, 122 bp, Homo sapiens
tcttaagctcacagagggaatgagagagttatttcagtttcttaaatggaagtacaaccccgaaaataaaaaataaaaggcttgttgatgcagaggcttgaaagcctgtgtgagattgaggg

SEQ ID NO: 3057 - DNA, 122 bp, Homo sapiens
actaaaatggaggtgtggaaagaatgccagttaataaacataaaaggcatgatactattgcggaatcacttataactcctaatgtaacaacagattcagtgaaggactgtatcaaggagttg

SEQ ID NO: 3058 - DNA, 122 bp, Homo sapiens
acagagaagatcgatcttccatctgcagacatgccagcttaacaaattagattcttgtttcgtgcaggtgatttggtgacagttggggaattagaagtaataagttgttgtgtttgagcccg

SEQ ID NO: 3059 - DNA, 122 bp, Homo sapiens
tcagagctggtgcctgacttcccaaggctgttcgctgacaagttggtgctttccaaatgccggcttctaccttaaggaaggtccctcctgggtccacagtcagctgacggattgcctctccc

SEQ ID NO: 3060 - DNA, 122 bp, Homo sapiens
ctcctatctctagaaagggacctgctccggctgcgagagaggcttcttcttggagatctacgacgaggtggaagactcctcctatgataatcatctcaaggacgatgaccccaagagggagg

SEQ ID NO: 3061 - DNA, 122 bp, Homo sapiens
cagatgcgtgccattagtggagacaagctctgcatggagctggtggcctaatggggaccacgctcgccctaatgcgaagcagccgccgcaccgcggccgagcctcttcctactgggcatgag

SEQ ID NO: 3062 - DNA, 122 bp, Homo sapiens
cccctagcaccactaggcgctgctctagtgtgcgcctggcgccctccccagaccagtcgacgcagaacgcccagagacccagccaagggcaagacccttagcgacgcccgtcagtcctctcc

SEQ ID NO: 3063 - DNA, 122 bp, Homo sapiens
ggggaccttaatcatctactacttttcaaaaactattaactactctcatgagtagaagaccgtgagaaagaactcacgtagatcatccaggctgcgtagcgctctttgaggttgtacagcac

SEQ ID NO: 3064 - DNA, 122 bp, Homo sapiens
ccggccccggccccggccccgccccggctcttcttggctgggtcgcgcggttcgggaggacgcctgcctttcaagcccggaagaggatccttaagaggtcttgcccggcgtctctccgtgac

SEQ ID NO: 3065 - DNA, 122 bp, Homo sapiens
ggagccaagcgtgacggtgctagagcccctgcgccgcatcctttcctccgcgacctgtgacgagtgactgcaggaatgcaggccacctggcgcccttacggatttaacgggccggcttccga

SEQ ID NO: 3066 - DNA, 122 bp, Homo sapiens
ctctctggcactgtcagagcaaatagatttttactcatcagaacgccaaaccagcaaagtcgcaagacgtaactcaccccttctgacatcttgccctggttggtccctgctctggtctctgg

SEQ ID NO: 3067 - DNA, 122 bp, Homo sapiens
tcccgtgcgcccactcgcttccctctcgctcactcgcacgcactctctcgctaggaaacacggaaggtattttgtgtttggagctagtaaccttggtcaaacgattcctccgaagagtcgct

SEQ ID NO: 3068 - DNA, 122 bp, Homo sapiens
tgcgcgattcctggaagttcttctgactttcatttcttcagtgttcctccatttttgcctcgcactgtgaggcagctggcaggactgtgaagtaaggagtggagtttcctggtttcccgcct

SEQ ID NO: 3069 - DNA, 122 bp, Homo sapiens
gcattttgggaggccaagtcaggcaggtattttgagctcaggaactctagactggtgacacggtaaaatgtctagatcatcctgtctctaaaaatacttatataaatttaaaaaaaaaaaaa

SEQ ID NO: 3070 - DNA, 122 bp, Homo sapiens
tccaactcattcatttcccaacatagcaattgtgctcaagttcaaagcatcctaaaataccgccaaaatatcaaagattgctaacctggagaattatctggacctacagcagacctggcttt

SEQ ID NO: 3071 - DNA, 122 bp, Homo sapiens
cacggatggtttcacattgtcaacacggctggaaaaggacacggtctacaagtggaggctcgaaggtggctgagagttatggcacctgggctttccagaagttggcttgaaataattggtca

SEQ ID NO: 3072 - DNA, 122 bp, Homo sapiens
agacacacgaggtcctagcagagcacccgatgctttacacagcacttctcacgtcctggacgctgacttcgtctcacagtcatccggggaaaaagggggaaatggaagcagagacagggcct

SEQ ID NO: 3073 - DNA, 122 bp, Homo sapiens
cagagggaagcaatggggaggtggccttgccggctctcctgctctgggcagtgcacaagccggtcgtctcccggcctgcagcggcgtcctcatgcggcggaggccagcccgcaggatcctga

SEQ ID NO: 3074 - DNA, 122 bp, Homo sapiens
agtatctaggatcttgctgctcacacttcatgcaccagaccacgactggattccaggaaacggcgccacctcgctcgctctccatttctctctaggcactgcactcacacagaaatgttcaa

SEQ ID NO: 3075 - DNA, 122 bp, Homo sapiens
cgaccaccctgcggggacactgtagctgtcattccttcttctgcaggcgggtaggggaagcggtggccaaagtgggagtcgaccgctcagcacagtctgtctgagtgttgaccaggaaagtc

SEQ ID NO: 3076 - DNA, 122 bp, Homo sapiens
ttaccaggtaggaactattactgttctcgttttgaagaccaggaaacctaggctcagagacgttaagtaatttgcccaagacagcacaggtggcacagaagtggatgaatccacatctgtca

SEQ ID NO: 3077 - DNA, 122 bp, Homo sapiens
cgacatcgctaatgaggacaccatacaaggcatcggtaatgaggacgttgtatatgacatcgctaacaaggacactctacaagccgtcgctaacaaggacactgtacacaacatcgctaatg

SEQ ID NO: 3078 - DNA, 122 bp, Homo sapiens
tgatcgagtcgacataatagctgctaagcgtcccagaaatggacattctcagacattatccgggcgcttgcagggggaagggaagcgctcgcgcggcggcgcccaagcagggagaggtggca

SEQ ID NO: 3079 - DNA, 122 bp, Homo sapiens
tctcagagccgcaaacctcggaccatttgaagctggcggtcctggggcttcctttcctctcgataacatgtttacatccaaactcacttccttcctctctttcttctccctgctaatcctgg

SEQ ID NO: 3080 - DNA, 122 bp, Homo sapiens
acactcctacaatggccaacaagatgctacatatactggcatcttctacctacatcatctcgacatgatctcctctcatggagggcagagactatgatgttcagagctgtattaccagcccc

SEQ ID NO: 3081 - DNA, 122 bp, Homo sapiens
ggaacaaactctgccggggagagcgggagggaacgtctcctgcttcctgagggggtgggacgaggctagagggaagcccagaggaagagctcccaactggaattctgtcctctattccttac

SEQ ID NO: 3082 - DNA, 122 bp, Homo sapiens
acaccacgtggacccacatgcgcctttgcgatcgtcacgctgggtgtccaccatggaagccgtcctggaacttctaacatggccccatctcgttgcggctgtctgctgtttctgtccccatg

SEQ ID NO: 3083 - DNA, 122 bp, Homo sapiens
gagctgagctgggatccacttacccggttgggcaggcgaccaagagaaaactgccccctgcgtcgagactgtgccatagacggtactataatgccatgaatatttttgtgcataaaaccttc

SEQ ID NO: 3084 - DNA, 122 bp, Homo sapiens
caactggaagtgtgtccagcctaaaggcattcaaattttacaattttaaaaccttgtgctcgcaaatcaaacatatctacaggccaaattcagcctgagggccacgagtttgcaatctccac

SEQ ID NO: 3085 - DNA, 122 bp, Homo sapiens
cgggaagggcgcatgcgcagtggcagcgactaaggtttagtgaggcggcaccgcgcggcccgaggcgggtcttgaagcactcgttttcccactcgttttccggggttcccccgcggtgggac

SEQ ID NO: 3086 - DNA, 122 bp, Homo sapiens
ccaaaagaaaaaaaagcttccagtacagaacaaaacgcgaacaagttactgccgctagttcgggcagcctgcttttattctcttatctggccccacccgcatcctgctgattggtagagccc

SEQ ID NO: 3087 - DNA, 122 bp, Homo sapiens
aaccctgtctctactaaaaatacaaaattagccaggtgtggtggcgcatgcctgtaatctcggcttctcagcaggctgagtcaagatgaatgcttgaatcaaggaggcggaggttgcagtga

SEQ ID NO: 3088 - DNA, 122 bp, Homo sapiens
ctctccatgttgccaggactggatctcataagtaccaacagtagagctagaccttggtctcgttttcacttcagcttgactgagaacaggttgtcagttaagctacctatttattcatcctt

SEQ ID NO: 3089 - DNA, 122 bp, Homo sapiens
gtggtgccaggggcagcttggtgtgtgaggggaaggagggttcccactcctgctgggccccggggcctgggctgaagaaaaggccccaccatccatccatggtgaggctcctgggggaggaa

SEQ ID NO: 3090 - DNA, 122 bp, Homo sapiens
tgcaacacacagcaaataatatgctgataactattcaaaagaatctagcctaaagccattcgtttgctagctgaggtttgccttttgtagcttgtattaaaaccctacaagtatgaacaaag

SEQ ID NO: 3091 - DNA, 122 bp, Homo sapiens
ttttaattgctctgaggaccgctgccaaagaaacgcagtagatccgctccctcttgggggcggggagaaagaacgggttgtgtccgccatgttggtgaagtcaagcgaaggcgactagagct

SEQ ID NO: 3092 - DNA, 122 bp, Homo sapiens
agacacatgcttctcgttcactgtgcccagggcctaagagagtgtccagcagctagtgggcgctccaccgagtagttgaattaatgttgtgttatgtccaagataacacgaaagaacctggt

SEQ ID NO: 3093 - DNA, 122 bp, Homo sapiens
gagagcaaaagagagggagagaggaaagtgtcatcttcataagctgaaggccagtgccaccgtcaccactggcagagctccccagattctacaaagggaaactgttcctccatatggagtaa

SEQ ID NO: 3094 - DNA, 122 bp, Homo sapiens
atttaaagagagaagggacctggtagtctgatctcagtttacagagacccttatatttttcgacttatccttactggaaggggtactaactgatttgtttgtaaacatggatcatagacaat

SEQ ID NO: 3095 - DNA, 122 bp, Homo sapiens
tgtttctgtgacaacatctgaaagaattaagctttatccaagtcaccagaaaagggcttacgttaactgttttcactaagactctacgtttcaatactaacacttacggacaagtggaaggt

SEQ ID NO: 3096 - DNA, 122 bp, Homo sapiens
ttgcagcctcagctcttctccctccctctctcgatgacccgggcaatgccaacctcctttcgggattgaaagctctaaatccaaggtgctaagttgatgggcggtctttgctctcacccctc

SEQ ID NO: 3097 - DNA, 122 bp, Homo sapiens
ggctggcagagtccctcttgcacacctgctggaaagctgggtgggaagatattctaagctcgctgtgaatttcattacgcctctctccagccaaagccactcaagggtgtggtggtgtaatg

SEQ ID NO: 3098 - DNA, 122 bp, Homo sapiens
tcttgtcaagttgaactgatttaagtcaaaatcgatttttgcgagcctggtggactccatcgggtcttgccagtgaggctgaagccagttaaggctgaagttactcagtagtcagggaacta

SEQ ID NO: 3099 - DNA, 122 bp, Homo sapiens
agccaggcgccggcgggaaacgaaacccggagggagccaggcgccagcgggaaacgaaagcgaagcgttgcggggaaacgaaagccggaggcccaggcggggcaggagccctggggctgggg

SEQ ID NO: 3100 - DNA, 122 bp, Homo sapiens
aactcagtttccgggtttgggatctgtgatttaaaaagctctccaggtgattctgatccacgctcaagtttgagaactgctgtgctaaactcattcccagggtgtaggtggtcatctttaga

SEQ ID NO: 3101 - DNA, 122 bp, Homo sapiens
cggctgggtgagattcagcagtctggtttcagaattgaattcaggctgggtgagctttagcgggctcctagtcgtttgcgtggagttctagccgggactgagcctcgaactttactttgcct

SEQ ID NO: 3102 - DNA, 122 bp, Homo sapiens
agaaggctgtgtccgaccgcagcttcgccttcaccgctgccaagctctgcgacaagatggcgctctttatggtggaggggaccaagttccggagcctgctcctcaacatgctgcaggtaact

SEQ ID NO: 3103 - DNA, 122 bp, Homo sapiens
gagcgggaaggggtgaggccatcgggcggctgcagagagctccagcgcaagggtggggggcgatgcgccagggtgggctgcgctgggcgctacctttcacaaaagaccagggaccccaacgc

SEQ ID NO: 3104 - DNA, 122 bp, Homo sapiens
cggtgatcgcggcgcgtctggggacgcccggcctgagggaggctgcctgtcccaaggagacgcccatcggggccggacccgaacgcctcggagaagactcccagcggggaggggctcctcgg

SEQ ID NO: 3105 - DNA, 122 bp, Homo sapiens
tgagggaggtaggacctctgaggccacaccctagagcagggacttgcccccttggggactcgcacctggcgggaagcagaggggacaggcagagagtccagagcctgtgtggacacccaatg

SEQ ID NO: 3106 - DNA, 122 bp, Homo sapiens
aatgccgcagacgccagtcctggctgatgtcattgaagctggagggaactggcatgtccacggtggggcctgactgtggagagaagagccgggctcagctcctaggcccccaaaagggtcca

SEQ ID NO: 3107 - DNA, 122 bp, Homo sapiens
cgttcacaggcctggggcgggactgccatcccaaaaccatccgccagcgagaaaagcctccggtcagggacctagaagccgcaataaaggtttaaatgctgtaacctcaccacggccactct

SEQ ID NO: 3108 - DNA, 122 bp, Homo sapiens
aagctcagcagaagtggactttctccccgttctctctccgcaggagatgccgtgcactggcggttctgcaggtgccacgcctgtcactccccagcgctgatttcgtcccagcaccttcctga

SEQ ID NO: 3109 - DNA, 122 bp, Homo sapiens
tgaccagcaccacctaatcccttgcttggagggcttcacgctagacagtggtctgggctccgggggtccaggcttcatggcatctgtggcctcaccccacctcccacctctgctcaacgtcg

SEQ ID NO: 3110 - DNA, 122 bp, Homo sapiens
gttcgagaccaacctgaccaacatggagaaacccgtctctactaaaaatacaaaattatccggtcatggtggcacgcgcctatgatcccacctactcgggaggctaaggcaagagaattgct

SEQ ID NO: 3111 - DNA, 122 bp, Homo sapiens
taaaaaaccaaaaagatctgtcccaaaattcaagggctgcttacaccattggaaatgatccgtaaggcagtttgaggactttttattttttatttttctttttaagtttgcctcaagcttcc

SEQ ID NO: 3112 - DNA, 122 bp, Homo sapiens
cgcgcaccggttaattctgccaatcatgcgtctgggcctcccatcgtgtgggccaagccccgccccaaccacccgctggcggaggcgcgcgcgcagtcccaccgctctgagtcgctgagtga

SEQ ID NO: 3113 - DNA, 122 bp, Homo sapiens
gccagaacggcgtgggatgtgtcccagatgctgtcctccccaatggccgcgatgtagccacgctgaagcccggtaccccacagaccctgccctggccgagtcctgggatgccctctgctgtg

SEQ ID NO: 3114 - DNA, 122 bp, Homo sapiens
ggattaaaagaaattttgacccaagattgaaaacagatgctcaatcacttcaggtcccaacggttgctttgtaagcaagggacactggattctgtgccttcaaaaatgttttccccaacttc

SEQ ID NO: 3115 - DNA, 122 bp, Homo sapiens
cccagggttcttcctgcggaggctggatccagaggcgcagcaccgaggctgcagggtgaccggcccagaagcctcgagactgggctggggaccacatgagaactgtccccagatggccagaa

SEQ ID NO: 3116 - DNA, 122 bp, Homo sapiens
gttgataatatttgaaatgcctgggtgtgattgactcttagctattgttttagaagtatgcgggtatttgtgcctgggtcagggaggcctggctcccagatgtctggctattctggtaggag

SEQ ID NO: 3117 - DNA, 122 bp, Homo sapiens
gaataccctcaggcacctgagttgggctaagctttcgagttaggtagagcttcctagctacgaggcttgctggatcacaaagtggtctctagtgaaaaaggatgcctttaacctcctgcagg

SEQ ID NO: 3118 - DNA, 122 bp, Homo sapiens
tccttatttattctaacagggagacaacagataaagtctagcgttggtaaattaagaaatcgcagcatgagcatattattttgaagtatgagggtaaatgccagaaaatacaggtaaaagtg

SEQ ID NO: 3119 - DNA, 122 bp, Homo sapiens
caagtcattagcatcagctgctgcactaaaggggcaagtcagcgcctctaagtggcttagcgcacaaacgaggctcccgagacggcctcggcaactccatcccctcctccaccacccgctgg

SEQ ID NO: 3120 - DNA, 122 bp, Homo sapiens
ggcgccgccgccgcgctaccctggcagcctggacgggcccggcgcgggcggcgacggcgacgactacaagagcagcagcgaggagaccggtagcagcgaggaccccagcccgcctggcggcc

SEQ ID NO: 3121 - DNA, 122 bp, Homo sapiens
agccacagccagcactaggtcaggacccaggccccggcccaggagtggggcaatacccagcgtctaccccagatggcaccctgctgtgaactgggcgccctcagcccctgccttgaggaagg

SEQ ID NO: 3122 - DNA, 122 bp, Homo sapiens
agaggcgtccgctcggccagtgtcgaaggaaggtggccatttgagccggtcgctccgcatcgaaaaagccctaccagagagaggggcctccgcagggcccgggttccatccgagtgtcaggt

SEQ ID NO: 3123 - DNA, 122 bp, Homo sapiens
cattctcctacatggccacaatacaactgtcacactcaggagatctaacattgccaggcacggtggctcacgcctgtaatcctagcacgttgggaggccaaggcaggtggatcacttgaggt

SEQ ID NO: 3124 - DNA, 122 bp, Homo sapiens
ctgctgaattactgccactcttcttggtgggggctcctagctgtggctgggggctccaggcgcccctgtgattacctcctactgccaccatggcgctcattcagattccccactctcactaa

SEQ ID NO: 3125 - DNA, 122 bp, Homo sapiens
agtgctgggattacaggtgtgagccatcgtgcctggctccaaattatagcatatttcatacgtatatatacattttaggatggtttgacttaggattgatacatatttatacagtacaagtg

SEQ ID NO: 3126 - DNA, 122 bp, Homo sapiens
atgttggtcgtatctttatctggtctgcggctctgtccctgtttcctggataggagactacgtctgtatcttgtatcacaggaggcaccttcttcctgtttcctggcacagacttgtaagtg

SEQ ID NO: 3127 - DNA, 122 bp, Homo sapiens
ctcctcagtcagcaaagcacctgcttggatttggcctgggcggccgtagggcccttcttgcgcagcaccgtcaccgtgtcccagtcgctctcggccatggcgggcgaagacgagcgtccgtc

SEQ ID NO: 3128 - DNA, 122 bp, Homo sapiens
ggtcccggcctcgggaggagggcttcggcttcttttcacacgcactcgaaacttggtgctcggctggatgggcggaacagatcgagggctcaggccgagaggagctggtcttcaggtttact

SEQ ID NO: 3129 - DNA, 122 bp, Homo sapiens
cttctgcaggacgggggcaaaaaaactaggttccggggtgcggagcggggtgtctgtgcccgagacaacaccaagttaggaaaaagaagttagaaaaaaaaagaaaaaggcattttgatttg

SEQ ID NO: 3130 - DNA, 122 bp, Homo sapiens
caaagccaggaccgctaagcacagtggccaggtaggagccgccgggtgctgtccagttggcgaagggccttggttatctccatgtgaacttagggatgtgtctcatacgcaatggaaaggct

SEQ ID NO: 3131 - DNA, 122 bp, Homo sapiens
ggcctgaaggagccgggagctcctgcagcttcatcgcgttactaagagacgcgagggtcgcgaagggcacaacacttggcctctcgctggccctgctcgcggatcccgagtagagaacgcaa

SEQ ID NO: 3132 - DNA, 122 bp, Homo sapiens
cttggactaatggaggtttgggaattgtctgaagagtaaatgatctatactaccaaccatcgctgctgctgcacttgtctctgacacattctcagcattcacctgtaactaaaaggccaaag

SEQ ID NO: 3133 - DNA, 122 bp, Homo sapiens
gctatgaacgatcccgcctttgagcgcagccacaggcctgctctggtcacaatgtggggtcgccccgcggacaccggtgaccagtgggagcatgaccaggaggtgattaccttctaatcacc

SEQ ID NO: 3134 - DNA, 122 bp, Homo sapiens
tacttcgcaaagtctcagaaacccatccccgggcaacagtgtcaatcactacgaccaaagcggaggctcaggccttgcgcatgcgcactggcaaggccgactcccagcttgcttcggagagt

SEQ ID NO: 3135 - DNA, 122 bp, Homo sapiens
ccgtgcttctcccatattctctcactgagtgctcgcagcgactctgtaacacactcgcaccgtccttgttatcgggccccttttacaaatgagggatgaagagaacagctgtttctaccaga

SEQ ID NO: 3136 - DNA, 122 bp, Homo sapiens
ttctgccagcactagccacacccctgacagccccagatggggacacggaggggcggggcccgtcccaagtgcccctcaggatcttcccctgccgctgcctgagggagctgcccgggactcgg

SEQ ID NO: 3137 - DNA, 122 bp, Homo sapiens
ccgctggcctgctctgtttcaggattcctactgcagcctctgttgggtgcttggagtgaccggtgtacctcaaggtttggaaggagacgccctttcattcttgtcctggctataggtctgtt

SEQ ID NO: 3138 - DNA, 122 bp, Homo sapiens
aactcctgggcaatcctcccacctcagcctccggagtagatggaactacaagaggcaccacgaccagctgattttaaattttttgtgtagagacaagatctctctatgttgcccaggctggt

SEQ ID NO: 3139 - DNA, 122 bp, Homo sapiens
gtaatacgctcgcatacacctagttaaaattccaatcgtgcttggtccagggcttaaacccggaagcgcgtgtgtctaggaggcctttcttcttcccaagcctctttttggccagcatggtt

SEQ ID NO: 3140 - DNA, 122 bp, Homo sapiens
agtgggaaagtagaaagtagtgctctctgcccccctccgctgccgccgctgccggagccgcgccgcggccgctcgctctccctgaaccgttatgtctcttacctggtctctctccgcctagc

SEQ ID NO: 3141 - DNA, 122 bp, Homo sapiens
acagtatctcatttgcatagagcgcgctggttggctactgtcatcatagtaccactccgccgggaagcggccgggccccattggctagccctccgtacccacgggcccgaacttgctgcttt

SEQ ID NO: 3142 - DNA, 122 bp, Homo sapiens
gatgaagctaccagcgcgctggatgcagagtccgagcgggttgtacaggaggccctggaccgggccagtgcaggccgcacggtgctggtaattgcccaccggctcagcactgtccgtggggc

SEQ ID NO: 3143 - DNA, 122 bp, Homo sapiens
ctcactctcatctccagaaaagtctgccccttgtgatccatgggaaccctgtgtcttgaacggaatatccttagccatgtggctttgtgatttgttcagctgggatgaagaggttttggttc

SEQ ID NO: 3144 - DNA, 122 bp, Homo sapiens
acctagtgtctacaaatatttccaggcttcaccacaatttacttcattagttttgcagtacgtaagacatatgattaatttcacttcatggtattaggtctcaaaagccccgtattccaccc

SEQ ID NO: 3145 - DNA, 122 bp, Homo sapiens
ctacttagtgttatttctgtagtctatttttatacagcttctgtttctgtattttaaatgcgttcagaatttacagctttaaaaactaaatatgaaccatgcagagggccacaaggaccaaa

SEQ ID NO: 3146 - DNA, 122 bp, Homo sapiens
tcctgagctatcattatactgtactgtttccacgcctcccttacaacatgtcttcctttgcgggaacagaactggaacacactggaaacttatacatatctgacccatatttttggagctat

SEQ ID NO: 3147 - DNA, 122 bp, Homo sapiens
gggcgaccacgccctggctttttggttcacagcccttcctatgctcctgagagatatgcgcggacggcattttctttttctttttctttcttttttttttttttttttaattttactttaag

SEQ ID NO: 3148 - DNA, 122 bp, Homo sapiens
tggaaatgaaggtggcagtaagctgaattgtaacttggaactggctgtggccagcctccacgtgaccaattttgtaatttattattaactttatgcagctacacacaaaagggagtgaagat

SEQ ID NO: 3149 - DNA, 122 bp, Homo sapiens
cccaaagccgccctctgccccctgcaaacctcccatgccccgtaccttcttcagccactgcgtgttgttctgcagtgcctgctccagctgtttcacctgctgggtgggcaacttccccaggt

SEQ ID NO: 3150 - DNA, 122 bp, Homo sapiens
ctaattagctgcaggcttactggtaaatcttagaaccataatcaaacccagtgtggaaaacgctgcattggtctcccagccccacatgagaatataccaccattttcagaaaaagtctacaa

SEQ ID NO: 3151 - DNA, 122 bp, Homo sapiens
caagaggccaggagatttggtgcagtcctcactttactccccgccccctaagtctccagccgcctttgctctcgcaggctctaggcggctagagaggctccagagcgccctgcagatgggtt

SEQ ID NO: 3152 - DNA, 122 bp, Homo sapiens
ccagacatccagagcaaatacgtgtcacatagcgggggcagctggcgcgagggcactcaccggcttctccaccggcactctgttgtagtagcggatgcagtccttccccaggaagtcaaatt

SEQ ID NO: 3153 - DNA, 122 bp, Homo sapiens
cgtgggcttcgccgtgggcttgggcaacgtgtggcgcttcccctacctgtgctacaagaacggcggaggtgagttcccccgcccgccgcggcctcctcccccagcaggccgccggcccccgc

SEQ ID NO: 3154 - DNA, 122 bp, Homo sapiens
atagcgcgccgcctgcgcctcgtcagggctggccttgcccccgttgacgctgcccttggacggcccctccagggagtgcgacttggtgaagagcttctggaccgagtgcaccaggtggcgga

SEQ ID NO: 3155 - DNA, 122 bp, Homo sapiens
tggctttgacacctaggagggtgaccgtggctgcatcacttcaccctgcagagctgctgtcggatctgtaaagtggggccaaccgtgcttgctgactctgcttccttggctgttggggaggg

SEQ ID NO: 3156 - DNA, 122 bp, Homo sapiens
agagaccggaggcggagcgggacctgtcatcccgggcgggaaacaaaagcccagtgaggacgggcgggcgcgacccgcctcgcctctgccgggagaggccggcgggggcggagagcggcgcc

SEQ ID NO: 3157 - DNA, 122 bp, Homo sapiens
accaatcggaagcggtggcaacgtgggcggctgcgtgacagacaggcggcaggacgctgtcgccgcagcttcttccggctagctgggggacgccgaggctgcggagtgcacgcctgggctcc

SEQ ID NO: 3158 - DNA, 122 bp, Homo sapiens
ccctagtatggataggagaagctaacttagacctgcttgccgatgaggattttaggctgacgctactccgagtcatgaagagcctgattgactttgctcttctgtgagtacttacattctgg

SEQ ID NO: 3159 - DNA, 122 bp, Homo sapiens
tggtgcgctagcctcggcctcccaaagtgaacactttacattttacaaactcatttatatcgccgggtgcagtggctcactcctgtaatcccagcactttgggaggccgaggcaggtggatc

SEQ ID NO: 3160 - DNA, 122 bp, Homo sapiens
gcggctgcagcgggtgggactggcttgggcgcgggcgcgagctacgggtctgcagcggaccgggaccgggacccggacccggaccgcgccgggcggaggctgcgggttctctctggccatct

SEQ ID NO: 3161 - DNA, 122 bp, Homo sapiens
cccacagtgagtctggtttctgagttgtcccggtctagccactttcgtttcccctggggccgggtggaggctggggcagaaagcggaactgagcccgcgtgttctgaggccagggcagggct

SEQ ID NO: 3162 - DNA, 122 bp, Homo sapiens
ggaggtgcccccgccaccggggcggggcggggcgaggtcctagctagctgggttagtaagcggcgcgagcgtgcgagtttctgacgcgcccgcgtcgtcccagctccctggactaccagtat

SEQ ID NO: 3163 - DNA, 122 bp, Homo sapiens
agtaaggcgtccgcaagtgtcactgtaacgcaggcaagccgtgaacagtagtaaggcgtccgcgggtgtgtcgctgtgacgcgggtaagccgtgaacagtagtaaggcattcgcaagtgtgt

SEQ ID NO: 3164 - DNA, 122 bp, Homo sapiens
cgcaagcgctcggtgtctctctgaaaagaacttcatcatactgcctcctggctgacggagcgcagcgcaacgcatgcgccttgaagacttatggaacttatttcacgctcagggcggcggtg

SEQ ID NO: 3165 - DNA, 122 bp, Homo sapiens
atggtcggggagggggagagcccacggcagctgagcggagggtctggcgcggtgacgctgcgcatccgggccgcgccgcgctcgccccgaccctaaaccctcacctgaaccctaaccccgct

SEQ ID NO: 3166 - DNA, 122 bp, Homo sapiens
gtctcaaaaaaaaaaagaccactttctctttggggtgctgaaatgaggatcagcccatttcgccggcaaggagatggaagcagggagaggtcccttgacctgtgtgactggcagagctggtc

SEQ ID NO: 3167 - DNA, 122 bp, Homo sapiens
agggggctggtgtctcgagggcggagtatgatggagaggttttccaccactcgcgcctctcgggctgaggggcaacgtagttctctctggcggtcgcagggggcactgaggagcgtccccta

SEQ ID NO: 3168 - DNA, 122 bp, Homo sapiens
cgacccccggatgttgatatgtcgtctgccccggaaacggtgacaggaggctcaagggggcggaggcggcgttgccgggctctccggaaggagacgtggcggcggttgggccggtgataccc

SEQ ID NO: 3169 - DNA, 122 bp, Homo sapiens
tactgggtagtgtatctccacgattgtggtcttctaaaaattctgaatgaggatggaagacgagagggagagcattgttcaatgacaaaagtatgacaagaggatttaggaataacatgaaa

SEQ ID NO: 3170 - DNA, 122 bp, Homo sapiens
gccgcgggacccgtccctcttcagtcccagccgccggcagccgcgcctgcctcctccctccgctaggtttcaaattgaaattccctgactggggccgtcagaggactctgagggccggcccc

SEQ ID NO: 3171 - DNA, 122 bp, Homo sapiens
cccctgtgcaggacgaaattccagagccccgggtctagtctaattccctcttcctctatacgggaagattgaggcccagagaggtttgtcattttccggggtcacacagctggctgcccagg

SEQ ID NO: 3172 - DNA, 122 bp, Homo sapiens
gcaaataggtagaactgcccgaagaatgcctacgctgcgtggtgcggacgaaacgcttcccggggcctttggattggtctgtctagccacctcatttgcatgacgtaatataataactggaa

SEQ ID NO: 3173 - DNA, 122 bp, Homo sapiens
caccgaagaattaacccaagccagaggacgggcatcaccacccagcaatgccagtgtcaccgaagaattaacccaagccagaggacgggcatcgccatgccttcatcttcggacactctcaa

SEQ ID NO: 3174 - DNA, 122 bp, Homo sapiens
ccgactccctctctggctgctgccacttcggagtgagaaactgagctgctgcttcagttccgtattcaggttttcgtcatttcctgccaccccatcctcacagctacttcctgaaatttgag

SEQ ID NO: 3175 - DNA, 122 bp, Homo sapiens
gaacccaagggttctggcacctccctttctaggttgcccagcagggtggacctccagagccgcctgcacgaggcccctcccaccgtgccgcccgcccgggaccccgccctgcgctccgcccc

SEQ ID NO: 3176 - DNA, 122 bp, Homo sapiens
aaataaaaccgattttgatgagacttcatcgattaatacggcaatcagtgacgccaccaccggagacgagggaaacactgaaatggaaagcaccacaggaagttccggagatgtgaaaccgg

SEQ ID NO: 3177 - DNA, 122 bp, Homo sapiens
attacagatctgagccaccgggcccagcccaattactttcttcagtctgagtatgagcgccggaagaaaagctcctacctgcatctattttttttagacacagggtctccctctgtcaccca

SEQ ID NO: 3178 - DNA, 122 bp, Homo sapiens
tctgctggcttgtccagggtcacttcctcctctgcttccttgagagtgccaagggtgagccgaggcccttcagcacaggcatgggggctcggggagttggctgaagaaggggagtgaaggga

SEQ ID NO: 3179 - DNA, 122 bp, Homo sapiens
catcactgtctttctgccggccaagccatcggggcagcagaagagtctcaaacagaaacccggctcagctcttgtttctcacctccttgtttcagcaaaattctccccaaaaggtggctata

SEQ ID NO: 3180 - DNA, 122 bp, Homo sapiens
gagtctagatctaaccccacttggtccccatggacttgccagaggacttcacactatccacgcctcaagaagcccttctcccgtgaagaccaagttcaggaaatctgaaagcctgacacttg

SEQ ID NO: 3181 - DNA, 122 bp, Homo sapiens
ttcaatagtgaggctgcatccttctagaaagcgctgttgagaggtgtgaggaggctgccacgcaggccgcgccgccccgaatggcaggtggaaggcggctgagtggagccgcagcaaatgca

SEQ ID NO: 3182 - DNA, 122 bp, Homo sapiens
tactgccctagacactcttacctcaggccgttatagtgagtccatacacttaaaaataagcgtctttccaagtactttaaagattcaaaatgatagtggatctgaaatgccgcctgagtccc

SEQ ID NO: 3183 - DNA, 122 bp, Homo sapiens
aaaaagaagctcaaaaaattgttctttccttaccaggtgttgccctggttcctgccatatcgctccccaaaggtgctgtaggagccatcatagtgtttgtagttcaactgtctctggtaacc

SEQ ID NO: 3184 - DNA, 122 bp, Homo sapiens
ttatttgtagtccatcctcttttcaaggatccaggggagtgttaacacattgaagcgcaccgcatatcatttacattttaaaccagtgttaagggaaaatgaccataacttttaagacttct

SEQ ID NO: 3185 - DNA, 122 bp, Homo sapiens
ttgggacgcacatcgctcatataaatctcacgaagcccgagtttgggcagtaatccaaaccgtcttcacaaaaacacggtttgggatgagcaatgatttcggtgggaaacgtaacaactgag

SEQ ID NO: 3186 - DNA, 122 bp, Homo sapiens
ggggcggggccagggtctcacacccatctagaggatgtctgtctgcgacgtggggtcggacgggcgcctactccgcgggtatcaccagcttgcttacgatggcaaggattacatcgtcctga

SEQ ID NO: 3187 - DNA, 122 bp, Homo sapiens
gaggctgtcaggccagggcgctttgactatcccctgcctgcccctgaacgcggccaagcccgaggccttagccaagccctgcagcctcaggcttggcgcccggcccagcctttctttagcct

SEQ ID NO: 3188 - DNA, 122 bp, Homo sapiens
tcaaatgatgacaagtgtgagatctcaacatgaggttccctcaattatcaaagaagcaggcgggaggaggtgtcaccgcccccggctccatttgttgcaggattctaaagggaccccgcaaa

SEQ ID NO: 3189 - DNA, 122 bp, Homo sapiens
gtggcagcgtgagctcccccgtgcccaggaactgggtggccgggcctccttctgccccatcgcctctgcctgcaccttctgctggtccagctcagacaaaagtaaacccggacctcacccca

SEQ ID NO: 3190 - DNA, 122 bp, Homo sapiens
attttttctctctccacccgcccccccaccccactccccttcctcgctcccttctcctctcggcacaaaatgcaaaaaggagaaaagagagaaagaaagaaaataaaaaagagatgggtgag

SEQ ID NO: 3191 - DNA, 122 bp, Homo sapiens
cctggccttatttcgcaagagagtgatagagcccatttccagatgtgcgggaggacggcccgggacccagtgctggcaggagagctggcgccctctgctgtcccggctaggaaacactgcaa

SEQ ID NO: 3192 - DNA, 122 bp, Homo sapiens
cactgtctcacttaagcaacatgttgaatgttagtgagcctagggctcttctagagagaccgttttcatctgccatagtattttagtgtttatatcattttctatctggaagaatgaaaaga

SEQ ID NO: 3193 - DNA, 122 bp, Homo sapiens
atgttgtgccgggaggtaggggaggaggagccgctagatcgtggctgcacctattgcattcgaaggcatttgacggtattggtgattctgcacgtaattagtggagttgtctcaaacctttg

SEQ ID NO: 3194 - DNA, 122 bp, Homo sapiens
gtataatcgcctgctcattaatcatcttaacactgcccaggggaactggttttccccctgcgctttcctaacgtgtagcacgcagagtctcaagtccaccactgtgttcccccagtctaact

SEQ ID NO: 3195 - DNA, 122 bp, Homo sapiens
tgcagtagcctctgccttggagcagaaataggaaatgcccctccagccaatagtccagctcggtcactgtttttgtgccatgggagcctctgagtctaggaatgcctatcactctcttctca

SEQ ID NO: 3196 - DNA, 122 bp, Homo sapiens
gggggtccgcctggcgtggccccgcagggtccggggcctggaggcctttgtctgtctgtccgcgggaaggggtccggggtggggtccgcgcgcggggcggccgcggggagctagcggggcgg

SEQ ID NO: 3197 - DNA, 122 bp, Homo sapiens
tctgcccttcgtattccgtaggttcctcatccacagttcaatcgacctggaggctcctcccgccgccgctgctgctgctgccgcagggacctcggccgtcgcccccgccgcctccgccacca

SEQ ID NO: 3198 - DNA, 122 bp, Homo sapiens
gccccagggccctttcatccgcgccgcgcctcgctcccgcccccgtgactcgaggcgcagcgtgcgtggtgatcccggcccatggggacttccccgcttgctcctcgccaagatggcggcct

SEQ ID NO: 3199 - DNA, 122 bp, Homo sapiens
tctgggtgcttccgcctccccttctcctgcttctccagcctcttcggcctcctcgcccgccgcgggaacccgagaccccagtgtatgccccacccctgaccccgctcgcgacatgtccaccc

SEQ ID NO: 3200 - DNA, 122 bp, Homo sapiens
tcaccatctccccagcactgaggggtgtttgcaaaaagcctgctctgagactgccagtgtcggccccagatgggtatccggggatccaactaactccctgggtcagggcaggggctgggggt

SEQ ID NO: 3201 - DNA, 122 bp, Homo sapiens
gccgcccggcccgcgatgtcaccattgttcagctgggtggccaaggtaggcggcgtcgggcgggcgcccgttaccggagcggagcggcaggcgcggggctggaacatttgtaaccttcgggc

SEQ ID NO: 3202 - DNA, 122 bp, Homo sapiens
gaccacctgcaccagaagatcctgaagatcaccgagcagatcaagattgagcaggaggctcgcgacgacaatgtggcagagtatctgaaactggccaacaacgcggacaagcagcaggtgtc

SEQ ID NO: 3203 - DNA, 122 bp, Homo sapiens
gcccagccaaagcaacctatccagacccatctcttaaaaaaaatatttctctgccaggtgcggtggttcatgcctgtaatcccagcactttgggaggccaaggtgggcggatcatttgaagt

SEQ ID NO: 3204 - DNA, 122 bp, Homo sapiens
aaggggggcggcggcgggcgcctcactgggtgttgagcttcttagtgtactcctcgagagcgctcaggaagctgaccttgaagctctccagcacgggcagcaggccttggcggaggtcctcg

SEQ ID NO: 3205 - DNA, 122 bp, Homo sapiens
acagccttggggccatcagtgccctggccactcgcagcctggtaccacagttatgccacacgcatccagggctgtccagaggttgaccagggagggtgcctgctccagctctgccacactca

SEQ ID NO: 3206 - DNA, 122 bp, Homo sapiens
ccaaaggccaggcagaggtcactgtactcttctagcttgatggatgattaaagagtttgtcgggggagggtgcggtcagctgaaagtttcagaggaactgggacacacgagctctgcgtgtc

SEQ ID NO: 3207 - DNA, 122 bp, Homo sapiens
agtcgggacccccggaaagtggctgatgggtgggtcccatctcccctggccttggaggcccgggatctccgagggagcctgggcctggggagaggctgggtcctgagccgggggctgggagg

SEQ ID NO: 3208 - DNA, 122 bp, Homo sapiens
ctcagcagcaaaccccagagctgggctggagctccgtgggagctaggactatgtccccaacgacccaggccggggacttttctacccgcgccctccgtctgcggaggaagggtcagggcagc

SEQ ID NO: 3209 - DNA, 122 bp, Homo sapiens
ctaatatccactctatgaatttaggacctactattactcccattttaaagataagtacaccgaggtttaccaagattaactgacttgccaagggtcacacactggagtaagggcagaacctt

SEQ ID NO: 3210 - DNA, 122 bp, Homo sapiens
ctacagggtccatgcgcgggcagagccccacgcggccgggacacaggtcacggtgcatggcgtgcagcgcgtggcccatggcgtacacggcatcgatcacaaactgcaccttcccctcctgc

SEQ ID NO: 3211 - DNA, 122 bp, Homo sapiens
attgcattgactgttgtgttgacaacagactacagagggggcatagagagctgttgggaacggttgtaattaccagaaaaaagaaaaattatgatggcttgagtagaagctataaagtcagc

SEQ ID NO: 3212 - DNA, 122 bp, Homo sapiens
cttcaaagatgggctgtgcatgtgcccgggctttctcggagaggacgggcctgtgggattcggtttgtctgccctgcggtctcagctcccttatgagctcaagaaaagtgatgatgtcagtg

SEQ ID NO: 3213 - DNA, 122 bp, Homo sapiens
ccacaagttgattcttttttctgttttctgtcacctgaactgttcagtctccatatttgacgcccttggcactgccagttctggggttccctctcctctattgagccccacacccttcctcc

SEQ ID NO: 3214 - DNA, 122 bp, Homo sapiens
ctgcggccgcccgccccgaagcaaggccccgggaggcgggaagcgaggcctcacgtgcggcgcagcggctgcgccgaaggcctgccaggctactcactgagccacagctccagcgacgctgc

SEQ ID NO: 3215 - DNA, 122 bp, Homo sapiens
acgcccagcctgtgttgggctgggcaccttagaggacctgtttcaggactgcgtgactggcgttttgctgggagtagcccaggtgttttaaccacttcctgaagaacaaggttcggtaaaaa

SEQ ID NO: 3216 - DNA, 122 bp, Homo sapiens
ggtgtgtctctgtatgcaatttaattactgtactttggttctgtatcattccaacagatacgctttaatgtaacccatgtcctggggagtggagggccagagcaggtggctgctgcagttcc

SEQ ID NO: 3217 - DNA, 122 bp, Homo sapiens
aagcgtcccgtctcctttaagagtgatccgcgagggggtgtggcttgcggagagcaggcccgaaagggggtgcggctcctttaagtatccgccggcccgaggcgcggaggcctccggccggc

SEQ ID NO: 3218 - DNA, 122 bp, Homo sapiens
ccctcctcgctgcagttgaggtccattatgtaacccagcttgcgaaatgcaggaaaggcccggctggctacagcccggctaacggctcagaaagggcgcccctgataggaatacccccacct

SEQ ID NO: 3219 - DNA, 122 bp, Homo sapiens
gggccgcaggggcggggaggggtggcctgccccagtggtacctgacagcatcccacgtcacggccgcgatccccctcggcctcccacaccactcctccaccctcttacctcctcgcaggccg

SEQ ID NO: 3220 - DNA, 122 bp, Homo sapiens
tttgtgctctcaaaaatgttttcctaccctttccttcaaacttctcctgaacttacgcctcgccgaggaccccaaatacctaccatgctctccctatttcttatttagatttataaggaaca

SEQ ID NO: 3221 - DNA, 122 bp, Homo sapiens
cgtagtctgtacccaccacctgcaggcaagtcccagctgtcagcccccgggcgcagaccccgcccttcctgggcacgatcccatgggccggtgccagagctgagcccacgccaggactgacc

SEQ ID NO: 3222 - DNA, 122 bp, Homo sapiens
gcactgtggcagctgtgagataaagtctggttcctccccagctggctcaggaaatgttcgcggatacaacggcggccccctctgggcatacctgcctgtggagcggagagtggacggtgtga

SEQ ID NO: 3223 - DNA, 122 bp, Homo sapiens
ccccgcagtgaactggagcagctccctggactgaggggcgtcaggggcccaggggtgttgcgcggggcgccacgagccgagggcagggatctttgtgcaagcagaggtggtcgcgagggaaa

SEQ ID NO: 3224 - DNA, 122 bp, Homo sapiens
cgcgcgtttctgtttggagagactcagccatcatgccagacccgtccaaatcggctcctgcgcccaagaagggttctaaaaaggctgtcaccaaggcacagaagaaggacggcaagaagcgc

SEQ ID NO: 3225 - DNA, 122 bp, Homo sapiens
ggcttaggaggagggtctgggagctgcagggttgccttgtccacccttctgtcgggggagcgattgcggggttcccaaggacggacatgggcttcgtgtgcagccgcgttcctgcttctttc

SEQ ID NO: 3226 - DNA, 122 bp, Homo sapiens
tgctcctctttccccaggccgtttggcctgtacgtctccccacactctgggttctgcaagcgcatctacacggtgcacacctgcatgtctccgtacactctggattgtgtgagcgcgtccac

SEQ ID NO: 3227 - DNA, 122 bp, Homo sapiens
tgtggctccaggatgatggagacagagcgacttggtgagggggaggggagggaaatggaacggagtagccgatatggaatgaactttgacccctgacttttgacctttccccgtagtgctac

SEQ ID NO: 3228 - DNA, 122 bp, Homo sapiens
ggtcccctctctctacagagtgtacgcggcaacacgcacaagcaagcagtttatacacagcgacagaacagacacactgcttcatgttcagagcaatagcttctttctctctttcctgctct

SEQ ID NO: 3229 - DNA, 122 bp, Homo sapiens
tgccgggggtgagctggccaacctcagccaggcggagctggtggacctagtacaatggaccgacttaatccttttcgactacctgacggccaacttcgaccggctcgtaagcaacctcttca

SEQ ID NO: 3230 - DNA, 122 bp, Homo sapiens
tctgaagagggaactaagcagaggtgaacagcgctgcgatccatccctggagctttggagcgcagactctcgggcgtgcggcggtgtcagagccgcgcttgcgggaggactgcgcggggcac

SEQ ID NO: 3231 - DNA, 122 bp, Homo sapiens
ggttgccagctttgatgccagccgctcctgcctcccccacctgcctctgtgcctacagcccgcttctgcctcaagatcacacagcgggcttgtgaggccaggggtctccgctgctgctcaag

SEQ ID NO: 3232 - DNA, 122 bp, Homo sapiens
tgtgtcttgtagaatgtcgtactctcaggaggctccaccatgttcagggatttcggacgccgactgcagagggatttgaagagagtggtggatgctaggctgaggctcagcgaggagctcag

SEQ ID NO: 3233 - DNA, 122 bp, Homo sapiens
ggcccggggaggtgggtcagacccagggttcggaggaggagttccagcgcgccggcatgacgtcactccccgggggcgggctcagtaagtggagctccaccgtcattggtccggggccccgc

SEQ ID NO: 3234 - DNA, 122 bp, Homo sapiens
catccttaggaagcaaagtgacccctaagcctagacaaagctctcgaaagcccaaagcctcgggcccaccggccagctccccaccccgctgctgggccggacaggtgtaggggaggcggacc

SEQ ID NO: 3235 - DNA, 122 bp, Homo sapiens
tgctccctcccttaattccctgaccagggccctgggacccaccgcacagctgagctggcccgagctgaagagttgttggagcagcagctggagctgtaccaggccctccttgaagggcagga

SEQ ID NO: 3236 - DNA, 122 bp, Homo sapiens
gtttcaaataaatctctatttaaattcctatttgttagttattgaaacacaacagacaatcgcaaacacaagttgacctttttgtgttccttgagtccagtcgggaagggcccttgtgactg

SEQ ID NO: 3237 - DNA, 122 bp, Homo sapiens
cttttggacggaggcaaaagtcttcctccagagttccagtctcagaagctgcgattccgccggtggtgacgctccagttaccctacggtgatcacacgtgtgctgatatacctcttgtgccc

SEQ ID NO: 3238 - DNA, 122 bp, Homo sapiens
agctggcgggcctggatcaggacgcttagtaccttgaacttcccccgggggctgaagtgccgcacttcctccaccaagtactgctggaagaaggggtgtgccaaggcctcttccgctgtgta

SEQ ID NO: 3239 - DNA, 122 bp, Homo sapiens
caggtccctagattactaactctggtttttgtatcatgaatttttgcttttcttaagcctcgccccactttgtaaacttttcaaaagttctcctcaattacccagtcttagggtgccattta

SEQ ID NO: 3240 - DNA, 122 bp, Homo sapiens
cgcctgcccgctctggacagggcctcaggacccagagcccccactgaggaagaggagtcccgcccatcccttcggagcctgggttgcggtcccagctctgccactcactgcctgcctgaacc

SEQ ID NO: 3241 - DNA, 122 bp, Homo sapiens
gtaaaagctggactcttttctcatccctaggaaatttgaagacctactgtatagaaatgccggttaaaatagttacatgttgagatgaaaataaacactgaatttgagagggaattttaacc

SEQ ID NO: 3242 - DNA, 122 bp, Homo sapiens
agcatgctgtgcccagctctgcggttagttcacagtattttacaaagcgtcgtttccaaacgctcaggaaacaccagctacctataataacgcgtgacacgcaccttcttcaacactcagca

SEQ ID NO: 3243 - DNA, 122 bp, Homo sapiens
caaaggaatcctggctttatgcccacgggacagggccttcctcagtcagccgggtggccacgttctgcaattctgctgaatctgctcactgtggacagccccaggcgctcacccagcccttg

SEQ ID NO: 3244 - DNA, 122 bp, Homo sapiens
cggggccaaggaggctgcatgtgagcctgccccattaggacacaaggcccgaggagctctcgcgacagggttcccggggtgactgcctgtaaggggccacagctcagtgaggtcgagaagga

SEQ ID NO: 3245 - DNA, 122 bp, Homo sapiens
gtttttcttcctgctttatattctggctctgctggcagctgattagacagtgtccacccacgttaagggtgggtctgcctttcccagcccactaatgcaaaagttaatctcctttggcaaca

SEQ ID NO: 3246 - DNA, 122 bp, Homo sapiens
ccaatgcagtggacgctaggaccctgcgggccgcgggcgccgcgactgcaccggcgccgccgcattataaatacttctccaaaatgcggcgcagctccctgcgcgcgccccggccgcccgcc

SEQ ID NO: 3247 - DNA, 122 bp, Homo sapiens
ggagcgggggacgaggactcgtgctcctcctcggccccgctgtccccgtcgtcctcgccccggtccatggcctcgggctccggctgccctcctggcaagtgtgtgtgcaacagttgcggcct

SEQ ID NO: 3248 - DNA, 122 bp, Homo sapiens
cagttcgctcgcgcctaggttggcgcgggctgggaggtgttccagccctttaagatgttgcgcgtggtgagctggaacatcaatgggattcggagacccctgcaaggggtggcaaatcagga

SEQ ID NO: 3249 - DNA, 122 bp, Homo sapiens
gggacagtgcggccagcatgtgtggggaaggaagcaggctgacggaggcaaagcagattccgaagaacaaaagcagctttagtttgcctgggcaacaggctcaacttctgtctccacttcag

SEQ ID NO: 3250 - DNA, 122 bp, Homo sapiens
tcgcagtgggattctacggcaacggggagaccagtgatggcatccatagggccacctactcgctccgccacgccaaccgcacggtggccggggtccaggaccgcgtgagtggccgcggagtt

SEQ ID NO: 3251 - DNA, 122 bp, Homo sapiens
tcccaccccggtgccccgcgtccacccggcaggctcccaccccagtgccccgtgtccacccggcaggctcccaccccggtgccccgcgtccacccagcaggctcccaccccagtgccccgtg

SEQ ID NO: 3252 - DNA, 122 bp, Homo sapiens
acttcgattctgctaacaggagccttgtttttgcaagataggtccagtctcgagcctttccgctccacagggctcggtccctgaacgctgcccagggcctccccacacggagatttctcttt

SEQ ID NO: 3253 - DNA, 122 bp, Homo sapiens
ccagcggcctccgcgaacaaaaagcgaccggtcggaaggtgctggcccagccgcccctggcgctcgagcccgaatccggccacagaccatgaagggacgcccggcaccacgtgcgcggggat

SEQ ID NO: 3254 - DNA, 122 bp, Homo sapiens
ccccaggcgtgcaattcacctctgcccccgccggtccgctcggcactcgcgcgggggacacggggctgcccattcctagcgcactcgggagatgcatcccaagcgtgctggggaacgtgggg

SEQ ID NO: 3255 - DNA, 122 bp, Homo sapiens
caggttaaagacgtgccccgtttggacggggagctcctggattccagcaggacggtggggcggggctctcttggtaccctaatcttgaactagggtgagaaactatggggggcggggtggta

SEQ ID NO: 3256 - DNA, 122 bp, Homo sapiens
acatcttcccagaggtcaatggcttaaccgccagcctatggtacttgaacttctttcgtgcggacccagagaactgagttaggacccaagacagaaactacacgttttaaccaatattaacc

SEQ ID NO: 3257 - DNA, 122 bp, Homo sapiens
ctgatggcctctcgtgtctctcccaggtctaccggtaaaaatttgaagaacacatcacttcggggaatgcttttgagactttacatgatagccccatcactggggctctttgcctttgtttt

SEQ ID NO: 3258 - DNA, 122 bp, Homo sapiens
cctgtggtgggggccgagtttttgtcacctcctgatgacagcgagggacacagcactaaccgggacagcctcttgctcaggggagcagctgcaccagcaccgaagcccaggccgggtgggga

SEQ ID NO: 3259 - DNA, 122 bp, Homo sapiens
gtgggggcgaaaggagcgttatggggagttttcctgtgagcctcttgcttttgccttcctcggccgctgccaacgccaccgccagagggggccgtgacgctctcccccccttggagaaactc

SEQ ID NO: 3260 - DNA, 122 bp, Homo sapiens
tcagccctgcctgcgggagggcgaggacaagccgtgctccggccgtggggagtgccagtgcgggcactgtgtgtgctacggcgaaggccgctacgagggtcagttctgcgagtatgacaact

SEQ ID NO: 3261 - DNA, 122 bp, Homo sapiens
tcagggcggcgttccagccgagtgcggcgtcggaaacccgttcggttgcgcccgaaccttcggtcagaggccagcgctggaagcccagaccacagcacccgggtttaaacaggagcggaggc

SEQ ID NO: 3262 - DNA, 122 bp, Homo sapiens
taagacccttaactttaattacatgagcaaaatccattttgccatgtaatatgatatattcgtaattacaaaatatgtcatataatttataacacaatcacaggttccagggattaggatgt

SEQ ID NO: 3263 - DNA, 122 bp, Homo sapiens
atgtgatttattctgaccaagcgcaacagggagtttttttagcaggactccctgagacctcgcagaggctgagagaccatccactccccgctctgctgggttgtagcaactcggtccattca

SEQ ID NO: 3264 - DNA, 122 bp, Homo sapiens
ggcctggagtagggaaggtgggcaggtgtggcctcgggcagcctgccctcgcaggggactcggtccccggggacctcagagccactggccaggtgtgtgcctgccaggtcaggccctggccc

SEQ ID NO: 3265 - DNA, 122 bp, Homo sapiens
aaggcccagcacacgcctgagtggactgaagcctccgcctgttgacctgaccctggtgtccggtcagagcgggtggtggtccctgaacccacacgggctcccagaccatgtctgtgtttctt

SEQ ID NO: 3266 - DNA, 122 bp, Homo sapiens
cgaagtcaaggtcaaaaaaacaagtcagggacgtaaacccaacccacagcttcggattctcggttcaatactttatgcagctaaataatgtgaaaatgtgcctggatgctgcctgatagagg

SEQ ID NO: 3267 - DNA, 122 bp, Homo sapiens
gatggcgggggtccattaggctgcaggtcttctccctgccgatagatggcgctgttgcaccgcgcctgggtttgcctctgcccgcagccatgcagggcccatcacgggctatgcctaccgcg

SEQ ID NO: 3268 - DNA, 122 bp, Homo sapiens
gctggctgagtcctcctcaccactgatgacagccacgggacctgcacacaccaagagagacgcaggacctggtgacgtcacatccggccagtttccagccctgtccacagacaacccccaac

SEQ ID NO: 3269 - DNA, 122 bp, Homo sapiens
cactgtgcagggcaggaacgcggtgcagaccacctggtcattcggacacgtgcacgagtgcgtctcttctgaaaagctgcctaggaggccgttctcattgcagtagagaaaagactggatgc

SEQ ID NO: 3270 - DNA, 122 bp, Homo sapiens
accgcacctgcaacgccagccagggcttcaagcgctgggagtgcaaccggccgcacgccccgcacagccccatcaagttctcggagaagttccagcgctacagcgccttctctctgggctac

SEQ ID NO: 3271 - DNA, 122 bp, Homo sapiens
tttagggatttcttaaggcaaatcttaagaactaaaacatcaacaagaaaagtcaattatcgaagaagctaatgcaaaatgactagcaagagtgtaaaatgctacttctagaaaagtggttt

SEQ ID NO: 3272 - DNA, 122 bp, Homo sapiens
ggaactgaacctgttgtaggggacccccagtgtgccctggtttctggggctgattcattacgtcacttagtttctactattctcatgccaccccgccaattactagacataaaacgttccca

SEQ ID NO: 3273 - DNA, 122 bp, Homo sapiens
atcatactgatagagtgatgcactaagcctgtatttattttcagatcgatttctagataacgagcacaagctcatattgtgaggagcagctagacaacagatgataatcagggtgtgtgctt

SEQ ID NO: 3274 - DNA, 122 bp, Homo sapiens
aatcaatcaatttggcaccatctgcagtggagaggaatatagacaaaggtaaagatgcagcgttcaatcattcctgcccatggttaactggagcacatagtgtgacatgggtttctgagtaa

SEQ ID NO: 3275 - DNA, 122 bp, Homo sapiens
ctgcaaggcccggcgcacggtggcggggtcccaggtgctgacgtaggtagtgcttgagaccgccagaagctcggaaaagcgatccaggtgctgcagaagggattccatgaggtgcgcgaagg

SEQ ID NO: 3276 - DNA, 122 bp, Homo sapiens
gggaatttgtctcagcctcatattctaagaggagtttctcaggcagcactggacatgggccgccctgaatattctttgctcctgaggacaccatttgcggggctgacttgtgtacatacacg

SEQ ID NO: 3277 - DNA, 122 bp, Homo sapiens
ggcacagagcaagtgctccacggtgggccactgttgttgtgtggtccctatcaccacctccgccgctgccaccatcatcatcctcctcctcaccatcaccaccaccgctgcctgtagtcttc

SEQ ID NO: 3278 - DNA, 122 bp, Homo sapiens
gcccaaaccagaagccgctcctgaatccctgaccccaggatcagtgtgaaacaaagcccacgacccaaggaccccgcagtcagcagccgcacagacggagccagcactggagcccgtctcag

SEQ ID NO: 3279 - DNA, 122 bp, Homo sapiens
ggtgatccgccctcctcagcctcccaaagtgctggtattacagacgtgagccaccatgcccggccccagcctgtatctcacaaatgttaacacacacattagtgggagaccaatcattacaa

SEQ ID NO: 3280 - DNA, 122 bp, Homo sapiens
cagggaactgacaacattctttggagagacactgaaacaaccagccccactctatcctctcgaaatgcctccaaggatcccagacttttgtgaaaggaggtagtcgaaggactctagggacg

SEQ ID NO: 3281 - DNA, 122 bp, Homo sapiens
ccctgcgtacctgggctcggtagaggctgcaacaccggctgcagcctgctcagctcctcgcgggtgagctgggtcaccctctcagagatgacctgttggacggtccccagctggcgaaaggt

SEQ ID NO: 3282 - DNA, 122 bp, Homo sapiens
gtttacatatgcacaggtccaagcaggaccaggttatgcgttgcgtagctggggccttaccgcgccaccaaagctagtgcatcgcgacctccaagactgtttctggaggcttgagtcaagca

SEQ ID NO: 3283 - DNA, 122 bp, Homo sapiens
taaatacttttaatatcagataaatcattaagaaattgcattctgtacttgatgaccacacgggaaccttgctagagtcaagagaacttgtcactagtaattatgaagacacctttacggtg

SEQ ID NO: 3284 - DNA, 122 bp, Homo sapiens
atttcctgataattattttttttttccattaacagtatagatcaccttggctttaagtgccgtttacaggattcaattaaggatggcagattacaatgtcaggagtctggggagaaggagtg

SEQ ID NO: 3285 - DNA, 122 bp, Homo sapiens
acaacggtgaggccgacccgcggccgcacctggggggctcgtgcagcctccgccgctggccgcccctgcccacccgccaggccaagtcctccgggccacccatgccgcatgccccagaccag

SEQ ID NO: 3286 - DNA, 122 bp, Homo sapiens
gaaagtgcaagaaagagagcactaatcgctgaaccaggagacaaacacgattaccagctccgagccttgagtcagaaagtctcatagactttaagatgttaatccccagcataatccttcct

SEQ ID NO: 3287 - DNA, 122 bp, Homo sapiens
ggaacctggccgtcaggtttcccctgggatcctgggacggtatcaggcggggaatctgtgcggccgcggcgaggtaggtgaggtgaggcggggcgaggtgggcgaggggggcgaggtgaggc

SEQ ID NO: 3288 - DNA, 122 bp, Homo sapiens
cctgcagacctggcccctccttggccctaggggacccctgccgatgcccactcggtgccacgtggggcggccccaagggagatgcaccatcccccaaaccaagcgctttggaaaagaaactg

SEQ ID NO: 3289 - DNA, 122 bp, Homo sapiens
gaggtgggcacttcaccgactgccagtgctgtctgccaggcccagcctgtccctcgccagcggtgtggcccccaagaccctgggtagtacctggctcccttgcttatctgggaagtggagct

SEQ ID NO: 3290 - DNA, 122 bp, Homo sapiens
cagcccgggagccgggggcgtggggaggctgcgctttgctggcttccaggaagacgcacacgctgtgtgtggccagagaccggggcacctctttgttggcggccccattgacttaggggcga

SEQ ID NO: 3291 - DNA, 122 bp, Homo sapiens
ttagcttggtgaaaatatgttcctctgtgttcacaatcctctgaccagaactggtcacaccgccctacccagccacaagagcaggtgttcagtattcagtgcgctgggtggaaacaagaggt

SEQ ID NO: 3292 - DNA, 122 bp, Homo sapiens
ccctcccccacggcccaagggcgcacctcgcggcccccctccctcggcgcccgccggccccggcactcaccaggcagaagaggttacagtgacaatcttccaggctggccccgttcggcacg

SEQ ID NO: 3293 - DNA, 122 bp, Homo sapiens
agagggtgccaacaacgaagaaaacaaccctggataaagctttcatctctttcacatctccgcagatctctcaccagaccctagccagggatgaactgttatcaatcaccaaaaaaaaaaaa

SEQ ID NO: 3294 - DNA, 122 bp, Homo sapiens
gcccaggaactcccgcgggagggtcgggacggggcggggcttgggggcggggcggctcagcgcgcaggcgcggggccaggcgcctcgcgcggccaggggcgggcggccgcagagcagcaccg

SEQ ID NO: 3295 - DNA, 122 bp, Homo sapiens
aaaaattttgagggaaagcaaaatgtaaattaagctctgaagtatgagtagtggttgtctcgaagaacaaagagatgaaaagagctttctaagcataacgaatgacagatgcaaaggaggga

SEQ ID NO: 3296 - DNA, 122 bp, Homo sapiens
gacaggctttagcgagttattaaaaacttaggggcgctcttgtcccccacagggcccgaccgcacacagcaaggcgatggcccagctgtaagttggtagcactgagaactagcagcgcgcgc

SEQ ID NO: 3297 - DNA, 122 bp, Homo sapiens
gcagtctccgtgcgtacgtgcgttaagcccgcgcttttacacaaaccacagcttctcctacgtggccaatgaagagccggagactttctcccagtatgccctgaaaccatggagtttgcgta

SEQ ID NO: 3298 - DNA, 122 bp, Homo sapiens
agcatccctatccccaaggaccccaagtacctttctcctccttgtcgcccccttagcacccggcacagcctcacacaccagactgatggcctccctggggaaagaggggtactcagacccag

SEQ ID NO: 3299 - DNA, 122 bp, Homo sapiens
tccgcccaggacccagcccggcccctccttaggcctgggctctgggagcggaaattccggcgacagcagggcaaaacaggagctgattcgagctggcagagctgggccatggaaccggtaga

SEQ ID NO: 3300 - DNA, 122 bp, Homo sapiens
tgctttgtgtctcgccccggccagctgggcccgcgagggacgtgccagctcggccggcggcgtccccgcgccagcgcccctcgcccatgctaatcagcctggcagcgcgtctgggcgggcgg

SEQ ID NO: 3301 - DNA, 122 bp, Homo sapiens
agggaggctcaagccgcgcaggagcccagcgtggggggtgggttggagatgcaggcatggcggactgcaggtcccgagccctgccccgcagggaggcagctaaggcccggcgagaaaccgac

SEQ ID NO: 3302 - DNA, 122 bp, Homo sapiens
atttagcctggaagttaaaatcgctgaagcagtttatagaaacagcagagtgagccgccgcgcacaatcagtaggcaggatccagagacgatggcataaatgtttcaaatgtgctcagggta

SEQ ID NO: 3303 - DNA, 122 bp, Homo sapiens
caaagggatcttacaatttagtggtaagattttgttggaaaggctggattcaaacatgagcgactgtcaaaactttaatgacaggtatgaaatgacgccaacctatcagaacatgtgttggc

SEQ ID NO: 3304 - DNA, 122 bp, Homo sapiens
cttggtgaactgccgcagcttggtctcgatgctgcggtggcgcatgcacatgcgtgtgagcgccgagccgatgtccctcgtggcccctggcgaggcaagcgcggggtgggaaggggcccgct

SEQ ID NO: 3305 - DNA, 122 bp, Homo sapiens
gccaatatccacaaatatggcagaaaatggaagaaactgggagacatggaggaaatgcggcgttgggttggccctgcaaagcactcccacatgctcagtactcatcttggggagctagtgcc

SEQ ID NO: 3306 - DNA, 122 bp, Homo sapiens
ataacaggtttggtggttccaagactttattttctcttacatattaaaaaaaactcttaacgaaagagctatgtgagagataaagtgggtatttcctcatgataaaagggtgcaaccagaag

SEQ ID NO: 3307 - DNA, 122 bp, Homo sapiens
aaccctgacgtccctgggttccgggctggggcgcgcgaggaactcccgaaggctccacatcgacctccagtgcggcgctcctcccgcgcaacttcgagtttaaagaaaaccgggggccgggc

SEQ ID NO: 3308 - DNA, 122 bp, Homo sapiens
ccccaaggccccccgggggacgtcttaatcccagatcagctcctctgccaggagtcccgccggagacccactgcccacccagcagacctggaggaaagaggggagggtgtgtccttggcgcc

SEQ ID NO: 3309 - DNA, 122 bp, Homo sapiens
ttttgcaacatcaaacagtgaggagtggaaggttccagatcacggcccagggacccctggcgttcagtttgcagacattctcttgccaggcagccagctttgcttcctgtctgacttttgct

SEQ ID NO: 3310 - DNA, 122 bp, Homo sapiens
tctgttgttcaactgcaagaaaattcagtctccgtagagactgtcaaaaattgccagtgccgactatattgcaagtcgtcacggcggggtattgggaaaagttttcaattagcaataatcgc

SEQ ID NO: 3311 - DNA, 122 bp, Homo sapiens
gggaggtggagcctgtagtgagccgagatcatgccagtgtgatattgagtcttgcaaatccgttaacatgttacaatgtcttatttagatctgtaatttgcttcagcaatgttttgtggttt

SEQ ID NO: 3312 - DNA, 122 bp, Homo sapiens
aggggaagctgggctggggggactggcttggatgtgttctcaaaccatctctgccagcagcgtgctgggtcctgccccatctgtacaatgaggggaaccccgctcgagggtggtgggggtgg

SEQ ID NO: 3313 - DNA, 122 bp, Homo sapiens
ggggccgtcctggtgggcgtcactccccacccacgctgcacaccggccccagggccctgccgcctgggcctccacacccatccctgcacgtggcagctttgtctctgttgagaatggactct

SEQ ID NO: 3314 - DNA, 122 bp, Homo sapiens
caattccagaccctgggaatggcaagtaggtgcgcgaggacgctgaggcaggcggggctgcgggctggggccgagctccgagcccgggaatactggtgggctgctgtttgccgggccgctcg

SEQ ID NO: 3315 - DNA, 122 bp, Homo sapiens
aggactctgagccaggggcccggcttacctgccgcatcctccttcaccttttcaagacaccgcagctcaatccttgccagtctgatggaagtaagtgaccctgatctgaaccagccaacagt

SEQ ID NO: 3316 - DNA, 122 bp, Homo sapiens
aaggcctttcaatagctcctagcacatagctattatttcttcagcaactactgtataccacgctctgtcccaggcactgcagagacagaagtgattgagagccatggtccttgccctccagg

SEQ ID NO: 3317 - DNA, 122 bp, Homo sapiens
atgcgcagcttgaggctgaagttctccttcttcaggtcattgaggtgctgggacagagtgcgatatccattagacatgatgggcaacccatggggaggagcgtgcccgattgccccctcaac

SEQ ID NO: 3318 - DNA, 122 bp, Homo sapiens
agccccgccttccctttacctgctcagatatggtctctgcacaagccctacctctgtctccgagccccaccttctctttaaccactcagatgtggaggtctctgctcaagccccaccaccac

SEQ ID NO: 3319 - DNA, 122 bp, Homo sapiens
aaaatttggctttgtaaagcagggagcaaggcagaaagccttcaaagctttagcagttggcgtggcaaggaacagaaaagcagcattttacagtatcaaataccagaagtagccctcataac

SEQ ID NO: 3320 - DNA, 122 bp, Homo sapiens
aaaaatttcccttgcgcccccggctatggctacaatttccacttttgtcttcttcttagccggctcgggtcctagtcacgagccgcggtctcgcgtagtcccgcgtgagcgcctaccacctc

SEQ ID NO: 3321 - DNA, 122 bp, Homo sapiens
atgatcactcacccagatacttagtatatgtgtaagctttttcagggttgcaaacctattcgagttaaaattgaactcccagtggagttgagtctttcccatttcattcacttcatcctctc

SEQ ID NO: 3322 - DNA, 122 bp, Homo sapiens
tcaaaccaggggcctctgccaggaaaacgcgtgtgcagataatcccaggagatgcctggacgctggagcccacccttgactcccggggggtgggggtgggggcttctactgtcccctcagcg

SEQ ID NO: 3323 - DNA, 122 bp, Homo sapiens
aggggcgcccgggcctggcatttcctcctaggaaggctcggtgagactgggatgggcatgcggctctccgctcgagcccaactccggtgccacctgcaccacggaggggtgaccccagggtc

SEQ ID NO: 3324 - DNA, 122 bp, Homo sapiens
gctggttttctgttggagtgagcattgagcccccgtgggttttggtgtgagcacacgtcacggctctgttctccccgatggttttctgtttttcatgagcattgagcccctgtgggttttgg

SEQ ID NO: 3325 - DNA, 122 bp, Homo sapiens
ccagcccagcccaggttgcgctcagcagtggctcactggcccctctgccatccttgccaccgatgcccagccttatttatttggggtatttctgggccattccacccactcctcttgagggc

SEQ ID NO: 3326 - DNA, 122 bp, Homo sapiens
agacacagtgtgagacccttgctcacccgtggccgggaggccggccccgaaagccagggtcggagtggcctctgtgcctcagtttgaccatctgccaaggatgacaccagctgtggtcaagc

SEQ ID NO: 3327 - DNA, 122 bp, Homo sapiens
cctagagcaccccaggccagatctggggtgcgcctggcttggaggccatgtccttgctgccgcctctcctggggcctgcgtctgctcccaccctgccgcatgggccttagcaatcacttagc

SEQ ID NO: 3328 - DNA, 122 bp, Homo sapiens
gaaacagtgcttggcacaaatgaataaatgtaatgcaagctgctattaatacatcatctccgaattgggagaatcattgcgatcacatcgttgtgattacacaaaagcctctgtcatgtaat

SEQ ID NO: 3329 - DNA, 122 bp, Homo sapiens
ggtgggcagatcacttgaggccaggagttcgagaccagcctggccaacatggagaaactccgtctctactaaaaaaagatagaaaaattagcaaggcagggtggcacatgcctgtaatccca

SEQ ID NO: 3330 - DNA, 122 bp, Homo sapiens
tggtaccttctaagttagaagatttttccatacagattaaataatcagatggttatttggcgaaataaagcaaagagattaagagagtcttggaggacatttcatgtaggttgtgaggtaac

SEQ ID NO: 3331 - DNA, 122 bp, Homo sapiens
tgtcatgctgcccatttcacagatcgggagaccaggaatggcgtggcttacccaaggtcacgagttgaagctagaactcacccaggcctgctgactcaaactgttgtaattatttctattta

SEQ ID NO: 3332 - DNA, 122 bp, Homo sapiens
agttcacccaccaccacaaacacgactgcctcacacatttatacctgtccacccgaggcccgactctgggactttagaatattagaaaacagtcctgacccacggccagtgggcaccctcca

SEQ ID NO: 3333 - DNA, 122 bp, Homo sapiens
gtcagtgcagaataaacatttgttgagtgaatggtgacagagccctccattttcagaacacgctggcctgggcagagtccaggtggacctatgggcttctgcaggaagttgatcactaagtc

SEQ ID NO: 3334 - DNA, 122 bp, Homo sapiens
acacacagtggagcgggggctgggggtgtgtagaccgccgggattccgagtttcccggcacgcctaggagagggagaggcaggcaatgtcagggaaattgggcaggcaagacgccagggacg

SEQ ID NO: 3335 - DNA, 122 bp, Homo sapiens
gaaggaaaaaaaaagcggcacggcagaggtcccctaaaggacgaaactgcctcccaaccacgcatgcacggggccctgtagatcctgggcttccctggttcatggccacaaagcatatcagg

SEQ ID NO: 3336 - DNA, 122 bp, Homo sapiens
gggcaaccgggcttaagcagccgagtgactatttaatctataaggtgcacttgaatccctcgcaaatcctctcagtgtggagcggaggcacccagacagggacagatggtgcagaacccctt

SEQ ID NO: 3337 - DNA, 122 bp, Homo sapiens
ccaaacaggggaatccagaggcagtatctgcaaggtcccgccaagcatcactcacaataacgccgcctcccccgcacagcgcgtccctccgggaactccccccgcccccacgtcagtgagct

SEQ ID NO: 3338 - DNA, 122 bp, Homo sapiens
agggccaggaagaaccgctctcgcatacccttgctccgtaagcgtcggttccagttaggccgttccatgaacccgagggccaggaagtaccgctctcgcatacccttggtccgtaagcgtcg

SEQ ID NO: 3339 - DNA, 122 bp, Homo sapiens
gctcgggggtgtggccagacgcatgggcggtgccaagcgtaggaagatggttgggaactgcgtctcccccaaggctccgcagggcgccgctgactggcggaagcgagggcggggacagcgga

SEQ ID NO: 3340 - DNA, 122 bp, Homo sapiens
gccgcgggcctcactccactcgtgtctgcttttgtgcagcggtccagacagtggcgactgcgctgacagaacgtgattctcgtgcctttattttgaaagagatgtttttcccaagaggcttg

SEQ ID NO: 3341 - DNA, 122 bp, Homo sapiens
ctccctttctatgactcagactgggatttgccattcattccaggtcccctgggcctttcccgctccctgtgacttgttgggagaagctgctcagagccggtgttctcctgtcgccccaacat

SEQ ID NO: 3342 - DNA, 122 bp, Homo sapiens
gggaatcacagggtctataagcattacatcgtagttggtttcctgtagcttcttcataagcgtctgattgtagataaagctctcacacatcatttttaaagttcctcttatttcaacaaaaa

SEQ ID NO: 3343 - DNA, 122 bp, Homo sapiens
gcttctttccttagctgtctccaggaaccggatgttgcagattctctgagcagttctctccggtaagtcttcttggattgcaaagaaaagatgtttcattggatcactcctcaaatttggca

SEQ ID NO: 3344 - DNA, 122 bp, Homo sapiens
tccactgcgcctcgggaccgcgaggtgagcagaggctggtcgggaagtttcccggaggctcgccccgggaaccccgccccgccgccctggaagcccctgtctgctcgctggcttacccctag

SEQ ID NO: 3345 - DNA, 122 bp, Homo sapiens
ccagacctgccgatggacatttatatcacgtctgcttttttggccgctgaaacaagcagccgaggtgcctttgggcctgtatctttgcccaccttctgattgttttctggacaaatccccga

SEQ ID NO: 3346 - DNA, 122 bp, Homo sapiens
tcctcagcctccggtccctcagttcctagagcggagcgtggctcccccgagaggaggcggcgtccctggcacgccgtgggccccgagtgtcagtcagaaaagctagacaccccgagtgattc

SEQ ID NO: 3347 - DNA, 122 bp, Homo sapiens
gaaccattcaggaaagactgtgatggtagaccccctaaacacacgcactgacactgtgtgcgcatgagcagataggctggagtcttcagctcacaaacttcttccacgttcccgattaccca

SEQ ID NO: 3348 - DNA, 122 bp, Homo sapiens
agatgcagctgtcttccgtgactcacggcctctgggccagttgtgtgaggaaggtcctttcgggagttcccaacccaccgttttatggctgtttttctctcttgacccttcctgatctttac

SEQ ID NO: 3349 - DNA, 122 bp, Homo sapiens
gctcaagaggatgggtgtggcctggcagcgcaggcgcactagaggcctgtagggtcggggcgcctgcgcagtcgctcttcctcaggcggcggccatggcgggacaggaggatccggtgcagc

SEQ ID NO: 3350 - DNA, 122 bp, Homo sapiens
ccgcggttctccacctgggatgtgcggaatctcctggagagctttcctgagcttcctccccgagagtgagcgcatcggtcaacagtgggtgacgctgggccactgcatttctaaacgcccag

SEQ ID NO: 3351 - DNA, 122 bp, Homo sapiens
agacagacagacacctcaggcagctctcgtcactaagcgcagatgtttgcctgcgggtgacgtgctgggagccaacacaagcacacaattttgcggcgagaggcagcacgaagcaagaatgg

SEQ ID NO: 3352 - DNA, 122 bp, Homo sapiens
ggttcactcccgggactgtggagggtgcggatcgctcctggggctgtggagggtgcggatcgctccaggtgtgattttcatgggaatggaactggctccctaggtggtgttcatttcctctg

SEQ ID NO: 3353 - DNA, 122 bp, Homo sapiens
ctggtgtgagttcaagccccaggtcacagatgtccctgcccgcgtgccgccgccgccacccgcccaccctgaggttgaaagatgaaccagataactgagactcccccatcttgtttccaaag

SEQ ID NO: 3354 - DNA, 122 bp, Homo sapiens
aggatccttccaggatttaaaagctgctgggatcccctctttgatctcccatctgaaatacggacggttattgtttcgcgtttccccccactccccccgacccgcactccagtgacaattat

SEQ ID NO: 3355 - DNA, 122 bp, Homo sapiens
gtgccctggcctggggactgagctaaggtctcagaagggtcagctagccaagctcttcaccggacaacccctgaattaaccagacacatcacagatgcagactgttgattccagggaaccca

SEQ ID NO: 3356 - DNA, 122 bp, Homo sapiens
ggcagccccctcccggcagtcaccccgtccgggaggtgcggggcgcctctgcccagccgccgccccgtctgggaggtgtgcccaacagctccttgagagcgggccatgatgacgatggcggt

SEQ ID NO: 3357 - DNA, 122 bp, Homo sapiens
ctcgttctgtcccagcaactccatgatcttctcacacacggtcgactggagacacagaagcgggattcccgcctggaaccgctcgtcctgtgacaggcacggggccggcttctggagacact

SEQ ID NO: 3358 - DNA, 122 bp, Homo sapiens
ccccagcagcccgggccgcgtttgaccactagtagggcagaaccactgaccggcaggcggcgctccccggggctcccggctcgagccccagggcaccgggaggagtaaggaccccgagcggg

SEQ ID NO: 3359 - DNA, 122 bp, Homo sapiens
gcccgggaaactgggaaactagctccgcgcacaccgaggcacctcgcagacgcacaaatgcgggtgcccaaggcaaagtcgcccccaaggcttctcacaaactttgcttcctgtgcgtctcc

SEQ ID NO: 3360 - DNA, 122 bp, Homo sapiens
tggccagggtggcgggctgcgtggcgggctgggtggcgggctgggtggcgggctgcgtggcgggctgcgtggcgggctgggtggcgggctgcgtggagggctgcgtggcgggctgggtggcg

SEQ ID NO: 3361 - DNA, 122 bp, Homo sapiens
gactcactgaactaacgatggctgtcacgcaccacacacctgcagctcccctcagacgctcgcgcccccactctagcttgggagcagctgtgagagctgtgctaatgttgtgcttgagaaga

SEQ ID NO: 3362 - DNA, 122 bp, Homo sapiens
gccgggccccgggcaggcgggaggggagggcaggccgggcctgggggagctgggccgccgcgtgtcaggcacacacctggcgctgcccaggctcctggcccatgccaattagaaactcactt

SEQ ID NO: 3363 - DNA, 122 bp, Homo sapiens
ggccaggcttggtgcgtcacactggtaatcccagcactttgggaggccagggcaggagatcgcttgagcccaggtattcgagaccagactaggggctggactgtaggagctgtatcttactc

SEQ ID NO: 3364 - DNA, 122 bp, Homo sapiens
cctggacatgtgtcttccctgctctgtccctggctctaggcccagtgacctggggaagaacgcaggggacacgctgcctcaggaggacctgccgctgacgaagcccgagatgtttgagaacc

SEQ ID NO: 3365 - DNA, 122 bp, Homo sapiens
aatttattttctcatagctctggaggttagaaagtccaaaatcaaggtctggtagcattccgcttctggtgagggcttttctccaggcttgcagatggtctttctttggtccaaccacatgg

SEQ ID NO: 3366 - DNA, 122 bp, Homo sapiens
tttactctgtagttaactttgcatagagcagcttcatagggaggatctctgcggtggacccggctctctcttcttattacccgttgcaaaggcctctttcttgttctaacctgggggtttgt

SEQ ID NO: 3367 - DNA, 122 bp, Homo sapiens
gtggactcttcttagacttgtaagtaaaaaagttgtttcttcccctaaaagggaactgtgcgccttagacctggaattgctgggaaactgaaacattctgtagacttacttgtttccaactg

SEQ ID NO: 3368 - DNA, 122 bp, Homo sapiens
cctcggaagtctcgaccctcagccgcagccccagtcccatctcagctcacgcctaagccccgccgattcgccccaccccgtattcatcctgcagaccagtcctgagcacccagccaaagctc

SEQ ID NO: 3369 - DNA, 122 bp, Homo sapiens
agcgggatctgcacagcaagtgaaattcccgtcggatcgataaagccgaaacgctggcggcgacgggtcgatggttttatctgtctcggccccgccgcgcccggcgcgctgacagttggacc

SEQ ID NO: 3370 - DNA, 122 bp, Homo sapiens
agcttcaccaggcccagccatgaggaatgcagtgtggactcctggatctctcggggtaaccgggttaataagtgaccacagagcagagcatctctgtgatataaaatatcacaacccaggct

SEQ ID NO: 3371 - DNA, 122 bp, Homo sapiens
gccggaacggtcgccggccgatgctctctgcgacggaaagaaagccgccggacccacttccggtgcgttttacaatgaactccgggcactcgagtcgctccccggaaactatagttctgctt

SEQ ID NO: 3372 - DNA, 122 bp, Homo sapiens
tggtcacagggccaaaacggtagtgccaattatgatttcagtgccttatacacattacgtcgccaacagtctttttaaaaatatctaatttatttattattggctagggtgggcatattaaa

SEQ ID NO: 3373 - DNA, 122 bp, Homo sapiens
tccacagactccctttctctgtgaccatggctttacctcacttgccctttcaagagttcacgcaacagaagaggaatgtgctgagcgcacagaccaggagccccgcggtattgcctgcagac

SEQ ID NO: 3374 - DNA, 122 bp, Homo sapiens
ccaagtagctgggactacagaagcacaccatcacgcctggctaattttttttagcagacacgggctttcactatattgccaaggctggtctcaagtgatccacccaactcagcctcccgaag

SEQ ID NO: 3375 - DNA, 122 bp, Homo sapiens
tgaaaagagaccaggaatgggaggatgggggccaaggaagtgagaagggctaagctaagccgggggcagcagcaattgcggtgtctcctgtccaggagccctcccttgaaactgacatcctg

SEQ ID NO: 3376 - DNA, 122 bp, Homo sapiens
aatcttttgtttcctaatttttggtcatcagccattttctccttaccaataggaaggctccggtttgaactctacctgttcatggggacagatgctgagacctggaggggaagagggaaggt

SEQ ID NO: 3377 - DNA, 122 bp, Homo sapiens
gcagggggctcccgagctgcgcccagccgggagcggccccaccctcgttcccgcgcgctccgctggcctcctctcagtcactgggactgtgcattttgcccgctcagaccatggctatgcta

SEQ ID NO: 3378 - DNA, 122 bp, Homo sapiens
tgaacgagctccggacggactgcagcgagcggctgggctcgggcgacgagggctggaagtcgatccgggtattttggaggtcgaggttcttgagcatggccacgatgagcgtgtgcagggcc

SEQ ID NO: 3379 - DNA, 122 bp, Homo sapiens
gcctccaccacctcccacgcttctgagaagaggttccaaattgggcttctgtgcccagagcgtccacagcaccattcccagtgtagactcccagtcttctccacattgctgtcatggcgtca

SEQ ID NO: 3380 - DNA, 122 bp, Homo sapiens
tgctcaatttataaggtcctctggcatagttcactctactgagtttggctgggctcacttcggaattattttaaacatagctttaagtctgcacgtcaaggtggatttctgttgctctgcgc

SEQ ID NO: 3381 - DNA, 122 bp, Homo sapiens
cttgagagccttgagagcatcactggacagccctggcatacagaccctttcactggggcccggccaataagcaagcttttcttttacacagaaatgtttgtggcagtctccaccaatctcac

SEQ ID NO: 3382 - DNA, 122 bp, Homo sapiens
gtgttaagcctgaattagttataataaagaacccctgcatcattgctactgagagtacatcgggccagtcattgtcactttgcaccaacttcgctgtaggggaagcagggaaatgtggaggg

SEQ ID NO: 3383 - DNA, 122 bp, Homo sapiens
ggggggtgaggcaccacccgcgatgcggggagtaagaaagagccagcccctcttcccccccggctcttaggacccccatcgcaaggcgggtgaggcacccaccacgatgcggggagtaagag

SEQ ID NO: 3384 - DNA, 122 bp, Homo sapiens
tcgaattccacggggttggggttgcgccttttccaaggcagccctgggtttgcgcagggacgcggctgctctgggcgtggttccgggaaacgcagcggcgccgaccctgggtctcgcacatt

SEQ ID NO: 3385 - DNA, 122 bp, Homo sapiens
agcaccgcctttgtcagcagcactgccataggtaagcctcagaaccctctggggtgagaccggtgtaaccattttactgatgaggaaaagtgaggcttacaggttaagtccttcgagcgcaa

SEQ ID NO: 3386 - DNA, 122 bp, Homo sapiens
tatataaggcaagaaagaccacacacttacttcctggacctaaagctacacagaaaccatcgttgttcaccaccccaccccacccaggccacttccccaccccatctccttctgactttgtc

SEQ ID NO: 3387 - DNA, 122 bp, Homo sapiens
caaagctgctctctctagaggggcctgctggcaaggctggccctggctggcctctgggaacgtggatttcagaagtgatcccaccattccctgatggacaagggtggttcactgtgcctgta

SEQ ID NO: 3388 - DNA, 122 bp, Homo sapiens
gccacgcgggggccaacctcacagacctgccaacaggccctgacaacacttctacctgctcgtctgcaccctggctgtcagtagagagatttagtgatctcactatgggaaaaaacatgaga

SEQ ID NO: 3389 - DNA, 122 bp, Homo sapiens
tcaggtatgtcagcactcaaaaagtttcagattttcaaacatttttggatttcagatttgcgagttagggatgcttaacctgtgttttgtctaatgaagcaggataaaaacaatatatagta

SEQ ID NO: 3390 - DNA, 122 bp, Homo sapiens
gccgcctttcgggtttgcatgggcccgggccgagcgcagcctcttagcccgggccctgcacgtacatcccggagggaggcagatgacgcctgtttgcaaacaagctttggcttccacgcgtc

SEQ ID NO: 3391 - DNA, 122 bp, Homo sapiens
agagagagagagagggagaaatttaaaagtattaagtcacccatcctacctgagcacccacgagctgcagcaatgctgagttcacagggaggagctcaatgtctgtattgatagtggtctgg

SEQ ID NO: 3392 - DNA, 122 bp, Homo sapiens
gaaaggggcggggcaaacgggggtctgtacaggtgtgtcctaggctcgaaaccccggcgacgaaagtccatagttagcggctttcttcctagcagaggctgatatagtggagctggggctgg

SEQ ID NO: 3393 - DNA, 122 bp, Homo sapiens
tgaccagtggggcggggcctgagccagctgtgtgcggatggggcggggctttggaggccgcgtgaccagcggcgggtcacgtgacgcggtgcctggcgccgagcctcccaagatggcggtgt

SEQ ID NO: 3394 - DNA, 122 bp, Homo sapiens
ctaaaggaggaggccgggctttgtggggcgcgtggccatctaggcgataaatgagggcatcgcccactcctgccctacgtgtacctgagtatttcacgtgcggagcacagagtctaaaggac

SEQ ID NO: 3395 - DNA, 122 bp, Homo sapiens
gcccggctgtagccaggttccctccatgcttccccaccccgtcgcagcctggtttttgtacgccttctctctgacggcggttgtgccaccttgagctgcggctcaagatggtgtccgccctt

SEQ ID NO: 3396 - DNA, 122 bp, Homo sapiens
tgattggatgaatcactagtcataaggctcagacatgtggctccaagtctctcaagaggtcgggctagtatcatggggcccaaagccccaacactctaatcacatggctgaccaacccccag

SEQ ID NO: 3397 - DNA, 122 bp, Homo sapiens
gaggacctccgaaagcagctggagcacctgcagctcctcaagctggaggccgagcagcggcggggccgcagcagcagcatgggcctgcaggagtaccacagccgcgcccgggagagcgagct

SEQ ID NO: 3398 - DNA, 122 bp, Homo sapiens
attatcactccctttagaaaggcaggtctttccaagttcagatctctgtacctgaagagccggtggccgacctgtagtaaggagcccctttcttttacgcaaggaaaaaacacgacggggca

SEQ ID NO: 3399 - DNA, 122 bp, Homo sapiens
gtcctggccccgccccggcggatcggaggaaggacggagcccgcgggaaggaggagggggcggttagcgccagccagtgccgccgtggccccgccctcacgctctgtaccggagtggggctc

SEQ ID NO: 3400 - DNA, 122 bp, Homo sapiens
ggaccccggacctaggcctttttctgtcggcccaacgcggcggggaggcgcggtctcctccgctcctcgccgatccctcgcgggccacctccagtcgcaccagctctgggtcgcccaaccag

SEQ ID NO: 3401 - DNA, 122 bp, Homo sapiens
ggcctcctccgtctcctccatccaggtgagtgaggactggaagtacgtcgccatggtgatcgaccgcctcttcctctggatctttgtctttgtctgtgtctttggcaccatcggcatgttcc

SEQ ID NO: 3402 - DNA, 122 bp, Homo sapiens
gcctttcttcagctcctccaagttacagctaaattcccgcagggagagtctggaggggtgcgaaggtcgaggccagggattaaagaattcgtccagggccgcccaagcgaatatgtcaggct

SEQ ID NO: 3403 - DNA, 122 bp, Homo sapiens
tgcccggctaattcctgtattttcatacttagttgtatttcctattagggccttggatcccgagtataattttgtactcaaatataatttataaataaggccttagcctcccaacaaggtca

SEQ ID NO: 3404 - DNA, 122 bp, Homo sapiens
ttgataactgtcttatctcacccacagcagagggcactttataatgccagctcctgtaatcgtggattttaagagccaccccaagcttcatacacagacacagccagatagtctcccctctg

SEQ ID NO: 3405 - DNA, 122 bp, Homo sapiens
attggacaacaatgtggcgcctgccattggccaggggaggcagacggcgctctgattggccgggcccgcgcccggggagccccgcattctgcagtgtccgaaagattcgaaactccaaaagc

SEQ ID NO: 3406 - DNA, 122 bp, Homo sapiens
aacactttatggtaaagatcttggcgctcactgagaatttccttgtgggcaaaatatgagcgaggtgtgtagcttttcatctggtagccatctcatttaaaaaccaagaggcaaggcagttt

SEQ ID NO: 3407 - DNA, 122 bp, Homo sapiens
tggtgaaccctcaggctggggggtgccccgcttggcgtgcaaggccctctttggagctgccgtgggacctggctatgcgtcctgtttctgtctggaggcggctggaacgcggtagttttcca

SEQ ID NO: 3408 - DNA, 122 bp, Homo sapiens
agggagggtctcccaacacagcctcctagttctgtttcaccaggggcagagcgtttaccacgaatgccattcaattttatcatgcaatcagttgatttttaattataatttaatttttaacc

SEQ ID NO: 3409 - DNA, 122 bp, Homo sapiens
caagaggcggaggtgaacgaggagagaggtgggaggtcagctcctgggccaacctgtagtcgtggatctgctcttggatctcaggcatggctgcctcttgagcttcacagagaacaccacgg

SEQ ID NO: 3410 - DNA, 122 bp, Homo sapiens
aataaacaaaagcagctaccacttctagaatgctccatgtgcgatgagaactattctaagcggctgtgagtagtaactgacacaatgcataagcagccagcaattccattctgctgggctgg

SEQ ID NO: 3411 - DNA, 122 bp, Homo sapiens
ggccgcggcgcaggggtcactcgggctcgcaggcgctggcaggcgggcagggcctcagggcgcggggcaccctggccaccaggccgtcggccacttgccccccccccaccccattaaccctc

SEQ ID NO: 3412 - DNA, 122 bp, Homo sapiens
ttgacaaagcgaagacaggtgtgcaaggctgagaggtctggaagagcatgcagtgctgtgcgaacagctcagaacttaagcacaggagcaaggagccagatggggctgaagaggcagctcct

SEQ ID NO: 3413 - DNA, 122 bp, Homo sapiens
actcccctcggagttccaggaggacgctaagcgcgagaagccaggctcagggaaactgaacgcccatacgctcctagtccctctcacctggatcctctgcgtcaggttacgtgcttgcgcta

SEQ ID NO: 3414 - DNA, 122 bp, Homo sapiens
catggccagacctgcacaaccctcattgcccacgggaacaccggtaagtgggcgtggggccgcagcacacgcacccccaggcggcgggaaagccaggggcccggaacagagccctgcagagc

SEQ ID NO: 3415 - DNA, 122 bp, Homo sapiens
caacttctcaaaggaagtctgatcactcagaaaagaaccactagtctatatatgaagaaccgctagtccatatgtcttcatactatttattgttcctagttcgatcaacgtttatttggcaa

SEQ ID NO: 3416 - DNA, 122 bp, Homo sapiens
gggtctactgtcgtccagccacgaactggcttgagatcccggataagtctctctgagcctcggtttccccttctgtcaagtagcctcgaaggtccccggcgctcggttcggtggcgagtttg

SEQ ID NO: 3417 - DNA, 122 bp, Homo sapiens
ctacttcctgacccgaggttcaggatgagacctccaagagagagctccctcccacggggccgcgagctgagccccagggaggcagcatcccgtgcttctgctcccagcatgacctgcgtcca

SEQ ID NO: 3418 - DNA, 122 bp, Homo sapiens
cggcccaggcgggcggcacagacgcatgccaatctcaggcctccccgccgtgacagccagcgagaggaccaattagtgctagctgtgatgtggagatgggttcgccaggatgagcacccctc

SEQ ID NO: 3419 - DNA, 122 bp, Homo sapiens
tagacaactgcagtataaataatcatccctacagtgctctgtcagggctgtaggggggcacgggacagtaagggaggaggctgaactgcgcgattttacctggcttctccagaagggtaagg

SEQ ID NO: 3420 - DNA, 122 bp, Homo sapiens
ggtcgcgagagaactgaaaaaggggaccggcctttcccggctgcctaagcacttgggttccggcctggaaggaggcccagggctcccacaaagagaaataagggacctatttggatggatcc

SEQ ID NO: 3421 - DNA, 122 bp, Homo sapiens
actcacaccccaatgtatacctctcatctgttcattttagtacacattgttcactcgatacgtatgttgtcaatgtgaatgtctttcacatctttttaaaactcttcctgcaatcaatgggg

SEQ ID NO: 3422 - DNA, 122 bp, Homo sapiens
ggtttgatatggacagccttttttacggagtgcttactgtgtgccgaacccgtgttatctcggtcagtccccgggacaatctgccttatttggtactttcattatgcccatttcacagaaga

SEQ ID NO: 3423 - DNA, 122 bp, Homo sapiens
tcgggggctcgttctgcagacccaggagggatcagggcagctgcaggaggtggcaggagccgcccccggggccttcccttcacaggccccgcagacaccagcccaggacccggaggccaccc

SEQ ID NO: 3424 - DNA, 122 bp, Homo sapiens
acgcggcggctgcgccagcggtgccaagaccgacaggcggcatcgatgcacaccgggcaccgagtctgcaaaaggggccctgagcggactgccggacatctcgcagacttcgggcagcgatc

SEQ ID NO: 3425 - DNA, 122 bp, Homo sapiens
gtcccgttgtggtgagcgcggggtgtgctgggagttgtagttctcagggaccgtttccgtcggttctcaggaggtgggaagggatgaattagcatctctaacccctgaaagcggcggtgagg

SEQ ID NO: 3426 - DNA, 122 bp, Homo sapiens
tcttagctgctgtccagggcacccactggaagtactttgaagatgctcctgtactgtattcggggcaggtctacatacaagacaaaataacgtttaggaatatttattaacagacttaatta

SEQ ID NO: 3427 - DNA, 122 bp, Homo sapiens
tatatttctactccgattcgccttttctgggttgagaagttcccccgtgacattttcttccgcacccggagagcagacattcgggagaagcggcctgggggaatactggagggattgcgggg

SEQ ID NO: 3428 - DNA, 122 bp, Homo sapiens
gtggaaggaggggaagaggcactggtcttttcctgtttgtcttctgtgggttgaccctcacggaggcactccgctccgggcatgacctcggactcttgaggagcctcagttcggctgtcttt

SEQ ID NO: 3429 - DNA, 122 bp, Homo sapiens
gcccggtggtgaacttgcccagagagcacctaaataccgcggagtggccaaaggcttgagcgcccagcgacagacaagtgtcctaagaattggtgcctcttctagggaaaaggaggcctggg

SEQ ID NO: 3430 - DNA, 122 bp, Homo sapiens
gcagccaggacccagaccggggcgctcggtcccccagccggcccccatccgtggagcctgcgccctgccgtaactttgggggtcggctccctgggcccccagctcacgatgcccgctaggag

SEQ ID NO: 3431 - DNA, 122 bp, Homo sapiens
cacctggtttgtgtcactttgctgtggcagccactagaaactaatacacccaactagatacgtatctttgtcacagttacaggaatctttattttatccaaaagcaaaagacactgaacttt

SEQ ID NO: 3432 - DNA, 122 bp, Homo sapiens
ggccgcgcgtccggggcgcgtctacccctcgctcccactcggctccgcgccgcgaccacgcgccgccctcctcgttctagaggcagcccgccagggcggggaccactcacccgcttccccgg

SEQ ID NO: 3433 - DNA, 122 bp, Homo sapiens
ctcccagcatattaggtggggcgggtaccactctgccccttcttccagggctgcgcctcgcgctggagcctggtgcatgctgggattgtagtcctgtagccctttgaccaaagggttgggag

SEQ ID NO: 3434 - DNA, 122 bp, Homo sapiens
gagcaaaagacttagctttgggcctatttcagctttcaacatgtcttcccctcatgtaatcgtttctattttttggttgaaagtgagaggcacgtgattcttccattcatgtgaacacttag

SEQ ID NO: 3435 - DNA, 122 bp, Homo sapiens
tttgagctggggcccagtgccctctgggtcctgctggctgcagctggccctcggggaacccgcacacacagcaggaggggcctgcccaggcccagtgctgactctctcctgccatgctctcg

SEQ ID NO: 3436 - DNA, 122 bp, Homo sapiens
gggtcgtgccctccaacctgctgtgcgttaccgcagccaagtttccaccgcccggcggagcgcattgtgaacagcagctgacaaattgttgtgttgcacacacacaccaaaaaaacccattc

SEQ ID NO: 3437 - DNA, 122 bp, Homo sapiens
ctcgggcttcgcggtggccaccgggggccgtggctcgggcggcctggcgggcggctcgggcgccgccaacagcgccttctgcctggcctccacgtcgcccacgtcgtccgccttcagcagcg

SEQ ID NO: 3438 - DNA, 122 bp, Homo sapiens
gtgcattactgacaggctcacttagtcctcaccctgtccagcctccctgaccccatgtcccgagggtgacctccctgactggtcagtgtggctttccctagcctggcctgtgaccagcagca

SEQ ID NO: 3439 - DNA, 122 bp, Homo sapiens
ataggacgcgctgagctcttcttggctgagttgctttatttcttttttttctttttgagacggagtctcgctctgtcgcccaggctggagtgcagtggcgggatctcggctcactgcaagct

SEQ ID NO: 3440 - DNA, 122 bp, Homo sapiens
cagggtcaccataggaatggcacttcagaaaaaagaaaccacactgagcacactgccttgcgggtgtgaccaggcacccacctgcggatatccctgaagagcaaattcaagatgctctgaac

SEQ ID NO: 3441 - DNA, 122 bp, Homo sapiens
ggttaaatgacttgctccgggccacacagagagtaggtgcaaggctgagattcaaaccctcgactgtcagattccagagctgtgctgtgaaacccacacatgtgaagctcagggactgttta

SEQ ID NO: 3442 - DNA, 122 bp, Homo sapiens
aatgaagaagagcaagcgtcagcctggagaaggcccagggtgtgaatggtgaaacaacaccgatgaatcccacaggcatgatgtggagcaaagcaagccgggtgtgtgtttccacttgtggg

SEQ ID NO: 3443 - DNA, 122 bp, Homo sapiens
ttccccctgggtgggggacagttgggggtgctatctgctatgtagggctgcactgctcgtcgtggggagggggttggggaccttaaggatccatggctgcactattgacggcatggagcagg

SEQ ID NO: 3444 - DNA, 122 bp, Homo sapiens
actgtctgagccacgagctgtaattgctgctgtccttctaagcaggggaaaagcagaccacgctttgtggcttcttaaaagccctgttcgttaatgaggtttcctaatttagggcagaagaa

SEQ ID NO: 3445 - DNA, 122 bp, Homo sapiens
ctccatgcccctccttgcttgcagcttcatccttggaaactgtttctcaaagtggtgcctcggcccgtctgcacgtggaaggcaagaatctgggggcctcaaaatctgcaggctgaaggagc

SEQ ID NO: 3446 - DNA, 122 bp, Homo sapiens
cggagcagcgaacgcgtgcctgccagggaaaagcagtcaccaggaacgcggcgttttggtcggctgcccatcgccagccctgtccgcgcgagatgccctgctccgaagctcttgtgagctcc

SEQ ID NO: 3447 - DNA, 122 bp, Homo sapiens
cccccatcaagaaagcgtgtgtttccggggcactcccaacagcagctggtctgaggacagcgcagaccccacagcgggggcccctggacagagataaggccccccacacccccagagggcag

SEQ ID NO: 3448 - DNA, 122 bp, Homo sapiens
tattggcttcagtggaactggaaggcgggacggcgagtgcgggagaaggtctccattggccgaccgctctagctgtagcggagacccccaagtagggaaattggggcaaaacgcggagcgct

SEQ ID NO: 3449 - DNA, 122 bp, Homo sapiens
cggctctggctgtgggggatgtggctctagctgctgtgtgcccatctgctgctgcaagcccgtgtgctgctgtgtgccagcctgttcctgctccagctgtggctcctgtgggggctccaagg

SEQ ID NO: 3450 - DNA, 122 bp, Homo sapiens
gctgcccagagcccccgtcgcgacccacccccaccccggccttacctgtgcgcccccacgcgccctcacccccactgcgcctgcgcctgcgcctcccgggcctagcgagcaggcccggagct

SEQ ID NO: 3451 - DNA, 122 bp, Homo sapiens
cagaatggcacctttcacctcaattttaacagataccaggaaccaagatcaccacacacacgcaatataatgatgaaatttcatgttcaaatcacataactaaatgctgatttgtgaacatt

SEQ ID NO: 3452 - DNA, 122 bp, Homo sapiens
gctcaataaagtggtggccattataaccgcaagcaatgagactacataaatagtaagaaacgaaatagaacaaggggcagcgggagcaaagagagaaacaagggcagctgaggaaggaagcc

SEQ ID NO: 3453 - DNA, 122 bp, Homo sapiens
gaagggaatgttagaatcccgagagagagctgttaagggtagcggctctgcagccgctcacgtgggttgaatctcagctcgtctagttttcccatctaaaatgaaaagttactgttttacca

SEQ ID NO: 3454 - DNA, 122 bp, Homo sapiens
cgaagcgcggcggcgagctgaagcggagacgctggccgggcgccgggcccggccgggacgcgctaggccgcaggctcggttaatattcatgagcggccccaggcgcccctcctccaaggctg

SEQ ID NO: 3455 - DNA, 122 bp, Homo sapiens
ctgcgccctgggtgggtgggtgaatgtgaagaggcggcgttgggctaggcccctgcagcccgctcggagcgtcctaggcccggggctgcgctgtgaaagacccagattctcatcccagaggc

SEQ ID NO: 3456 - DNA, 122 bp, Homo sapiens
aaaaccaaaacccgaaaaccaaaaaactccacagcgcgccgcttccccacttctctggggcgcagagaggtgaagtttggccctcacggtatttacttcccctggatcctcgcctcctgaga

SEQ ID NO: 3457 - DNA, 122 bp, Homo sapiens
ctccgaaatctaaatttagaagcttttctgcgagacccagacgcggggactgataccccccggtctgcacgcccacgcccatcctcccctcccccagctccacccaaggctgtcagacgccg

SEQ ID NO: 3458 - DNA, 122 bp, Homo sapiens
ggtggtctgagagtgatcagagggagcagcaaagacacttcaagatcccagaaactggcccggtgcggtagctcacgcctgtaatcccagcactttgggaggccgaggcgggcgggtcacct

SEQ ID NO: 3459 - DNA, 122 bp, Homo sapiens
actactacctccccgcaccataggccaaagcttcggcccggaggctggaggcggaagtgacgccaaagacgcgccggcccctcttccggcgccggccccgcctccgcctgtcttacagctga

SEQ ID NO: 3460 - DNA, 122 bp, Homo sapiens
aaaaaccaccttttaaagctgtaaaaacacagtcaattaaactagtagagttttatttcacgtaatgctgagaatgaaagagagccttctttggaccacggtaatctttaatatacaggaat

SEQ ID NO: 3461 - DNA, 122 bp, Homo sapiens
gggagtcagttgcaatgaactgagatgtggctgactgcaggaggaataagtagtaggaagcgggtccaggaggttgttttagccatgttaagtttaagatactttctaaaaatccaagtgga

SEQ ID NO: 3462 - DNA, 122 bp, Homo sapiens
ggaaagtagtcagggtgaatggcaccctgacagctaactgctttgagcagcagtggccctcgcctctgctctcatgagccactgctagtcacacggcccagccaccatcccatgcggcccat

SEQ ID NO: 3463 - DNA, 122 bp, Homo sapiens
tgtgagacaaagagaataaatatcccaggattgggtgctggtgggaaaatttgctggaagcgcagcattggttaccaattttgtgctcaacctctcagtaccagggtgaaagtggagacgca

SEQ ID NO: 3464 - DNA, 122 bp, Homo sapiens
tgaccccaagaaccagaaagccaggagcagctggggagggccctggcccgggagagacagcggtcctgtttctgaaccccatcccagccatggcctgtgtctgggccagcatccccgaccag

SEQ ID NO: 3465 - DNA, 122 bp, Homo sapiens
aaaggtccaaggaacaccctgaacaacagaacgacatcgcgccggaacaagagccagaaccgcctcttcatggaagcatcttattaatatcccgcggagcagcaagccatactgctcagacc

SEQ ID NO: 3466 - DNA, 122 bp, Homo sapiens
ttaaatcatgtatttcatgtggtgagaaacgtggcatgcgcgaacagacaccacgcgagacggaggagaaaggtggcatgcgtgaacagacactacacgagacagggaggagaaacgtggca

SEQ ID NO: 3467 - DNA, 122 bp, Homo sapiens
ttgaggatctcttttatgcctccaatggtcagtgcacttcctgtggtgagagggggctttcgaggtgggtataggatcatggaaagtctttgcaatactgatgcttttatttttcttaaaaa

SEQ ID NO: 3468 - DNA, 122 bp, Homo sapiens
ggtgcctgaatggaacaaacgcgccatgaatgaaccctaacgtaagctgtacacatccgacggcgatgtatgagtgcaggtacctggatggaacaaacgcgccatgaatgaaccctaacgta

SEQ ID NO: 3469 - DNA, 122 bp, Homo sapiens
cgtgtgacttctggctgtaccactcactcaccagctgggactctgggcaaatggccgactcggagtctcaagtcccagtctatgaaacaagggatgatgccatgattgtgttgaggataaaa

SEQ ID NO: 3470 - DNA, 122 bp, Homo sapiens
agaaagtcagggcccgtacctaccgccacagactcagaaacgcccctgcccccatctccccggaaatagccccccgcccagccccgcacagtcgctgccccaaccgagagccgcagcccggt

SEQ ID NO: 3471 - DNA, 122 bp, Homo sapiens
cggcccacttccaggtactagcttctttcaaccctgattagttatgggtgaccaggagcccgcctatgattggccagcttcgcgatccagctagaggctcactggccgcggtccctagtggt

SEQ ID NO: 3472 - DNA, 122 bp, Homo sapiens
cagtctgcagagaatctcgtactttttcgatcccagcttatctactccaggattatctaacggaggggagaatggaaggaacccccggctccgtgggagaagagatgggaccctgggaagtt

SEQ ID NO: 3473 - DNA, 122 bp, Homo sapiens
gccccacgcctaggagggacaaggctggctctccccctcggctggtgagagaccctcatgcgcccctccacaacagccaggccagggagctaggggtaccatctccaagggctttcaaaccc

SEQ ID NO: 3474 - DNA, 122 bp, Homo sapiens
tcaggtccactgagggcacagctggagggcgagctgcctgtctgcttcctccgatgcgtccgggggctactgcagagtctgttttctgcggcctctggggacagggcaagcgagggaggtct

SEQ ID NO: 3475 - DNA, 122 bp, Homo sapiens
ggtcactacgtcttcctccctcacttcgcttggcgaagggtgttgtacttgtgaggaagtcgcagctggagctgggagtccgctggagtttttctctgtttctaagaggaggcgaacggccg

SEQ ID NO: 3476 - DNA, 122 bp, Homo sapiens
ccctccctcacttctcctttcatgtaggacccccgcccccttgctttccttagccaggcccgctacatttatctgataattgagttattaaaagatttggtttccttgggcctataaatcaa

SEQ ID NO: 3477 - DNA, 122 bp, Homo sapiens
ctctaggctaactgtagattcccgggaaatcccaaacaagggatggtgaccccgcctcggcgtcagggtcaacacagcaaccagctaggcttcaactttgggctctgaagggccccaccggc

SEQ ID NO: 3478 - DNA, 122 bp, Homo sapiens
accagctcttccaacaccttagcccagattgattttacatgtgctatctagtgcgtgttacgtgtttgtttcagctagagaagtttctggagttaaccaagtttgcatgtgtgtctggggat

SEQ ID NO: 3479 - DNA, 122 bp, Homo sapiens
caacgtcaattcattctaagtgcctggtgaaggtagaaatcagaaaccgtgtctgtgtcacgttagtcgtgacaagctgcgtacctgcaatgacgtgatggaagcctcctcctcgggtccct

SEQ ID NO: 3480 - DNA, 122 bp, Homo sapiens
cgcatcaccgagtgggtcagcgtctgcaagtgagcggcccggggtcccctgggccctgatcgaggtcccctcctggagcctggccctctgaggcttacggtcttggcaaggcagcatcgcct

SEQ ID NO: 3481 - DNA, 122 bp, Homo sapiens
ctccgctcggcgttgcagcctcctctcacccttacttccgcctgctacgccctgaaataccggaactcaccaacccgcccggatgtgacgtccctctgccgcgccctcccaccgccaggcag

SEQ ID NO: 3482 - DNA, 122 bp, Homo sapiens
atgtcagaatctggctcggaggaatctcagtagggacaacaggcaggagaattatgggagcgcatttccccagggtaagacggatgcaggcttactgtctgataagatggttttgtctctct

SEQ ID NO: 3483 - DNA, 122 bp, Homo sapiens
ggaggagaaggggagtgcgattgcaacagagggtgggcgttcgaagtgcgacccagaatccgcagctccgagacttccacatgcaaattccacgccgagcgccgcgctcacaaatgattttt

SEQ ID NO: 3484 - DNA, 122 bp, Homo sapiens
cgtttagggtggggcacctgcgattaggttgggaagcctgcgattaggttgggaagcctgcgattagggtggcactttcgagcgctctggtgtgaatttcacgttcttttacctcatattgt

SEQ ID NO: 3485 - DNA, 122 bp, Homo sapiens
tagaagtcccagtcaattcagggtgaccttagcagacaaaggctggagcgccccaaaacccgcaacattcgcaaagataaaacatacctcacaggagtcgactcctacctcgaaaagacagt

SEQ ID NO: 3486 - DNA, 122 bp, Homo sapiens
cccttataaacgagcttctgtggtttccaccaaaaatgcccctgtgtgtctgaattctggcgacactcacttctcccagagtgttctgcaacgcagtttctaatgcgcccagagctaagctt

SEQ ID NO: 3487 - DNA, 122 bp, Homo sapiens
ttgtcagtttaattaactttggccgccagaggaggccattcttatctacaggacaagcaccgcggctgtaccagcctctgagttccgactcgggtcctgcaggtgtggcttcctggcgcacg

SEQ ID NO: 3488 - DNA, 122 bp, Homo sapiens
cgccacatcctccctaggcgaggcgaggcccgccccgccccgccccgcctcccccttacacggcccgctcccaccccaagtcaggggtgactcaccccggcccgccggcccgcagggaccgc

SEQ ID NO: 3489 - DNA, 122 bp, Homo sapiens
agcaaaggcggccagcactaaagtcaggatcgggccaaagcagcctgaagggggtcctcccgccaggtgcactccgggtgttcatacctgcgtgggcaaaggctagacgcacggacgatcac

SEQ ID NO: 3490 - DNA, 122 bp, Homo sapiens
cgccagggcaccttcctagtcactcaggctgcagcacaagccctggtgtccaatggttgtcgtggttccatcatcaacatcagtagcatcgtaggaaaggtcaggttgagttggacgaggtc

SEQ ID NO: 3491 - DNA, 122 bp, Homo sapiens
actcgtaaatgttcctaggagcctctgccatgcttgccaaggatgacttagctgtgggcacgagtttatttggcgactagggtcgtttgtgtttgagaagggcccttgttgaggtgtcagac

SEQ ID NO: 3492 - DNA, 122 bp, Homo sapiens
atgggaagccaggaaagggaacgtggggcccggccgttcaggacaggcctccacaggcagcggctaaacacgtcacccaggaagtgtgggtttcgagaatgcatacactgggtctggaagcc

SEQ ID NO: 3493 - DNA, 122 bp, Homo sapiens
gggggtgggatctaacggtttaaccccgttggacagggcaagattggacttggttacttccggcgaggaagtgttggggagtgtcggcttcggtttctctccgtgggaagaaccgcatcttc

SEQ ID NO: 3494 - DNA, 122 bp, Homo sapiens
gaagggaggctctcaggaacagagtttggagtgagcagaggttggagctgctgttgatggcggggtatttgatagaactgagataggagggtacctgaggccatgttttcctgtttggcaat

SEQ ID NO: 3495 - DNA, 122 bp, Homo sapiens
aacatacattctagtaaaattaccaaaaaaacacatgcggctcctaaccgagaacgtcaccgagaacggccacaccaacatacattccagtaacattaccaaaaaaacacacgcggctccta

SEQ ID NO: 3496 - DNA, 122 bp, Homo sapiens
aagttccagagccacatcatcatcaggtttgacctgaagacagagaccatcctcaagacccgcagcctggactatgccggttacaacaacatgtaccactacgcctggggtggccactcgga

SEQ ID NO: 3497 - DNA, 122 bp, Homo sapiens
tccgggtccgagaccctcgtagtgtggggaatttcctgggaggaagatactacgcggggccgggagcagaatttgctccaggcactgggccagtccatgagggctccaggatccaggggccc

SEQ ID NO: 3498 - DNA, 122 bp, Homo sapiens
cgccctcagcccctcccttcctgggcaccattggggcctccttgttggcagggctgtgctcgcaccggatccgaagcggactctgcattcaggctcacgcgctctggaagggaagggcgctg

SEQ ID NO: 3499 - DNA, 122 bp, Homo sapiens
ccagcacagacccgccatcgctgcagcaccctcggcgcctgctggcctctcaagagaccccgtccagttcatccacctgcccccaccacagggtcaggctggggcaggtacacagagacaca

SEQ ID NO: 3500 - DNA, 122 bp, Homo sapiens
gctgtgggcctggggcccgttactcaggtctccacacagggacgctgtgggcctgtggcccgttactcaggtgctccacacaggggcgctccacacaggggcgctgtgggcctggagcccgt

SEQ ID NO: 3501 - DNA, 122 bp, Homo sapiens
ggcggcggcggaggcggccgggtcctgccgcgggcagcgcgcgctgagcctgcgagcgcccgtcggctcctcttggcagccgctgaatgtggtgcagaaggagcccagctcgcgcccggagc

SEQ ID NO: 3502 - DNA, 122 bp, Homo sapiens
tggatttgcccctggcaaggcgaggctctccacgcaggtctcctgacttctccatctggccgttgctcggtgggggaggaagcagcccctctgacaagtgtactcatggatattgccaccag

SEQ ID NO: 3503 - DNA, 122 bp, Homo sapiens
gagtttcactttccctgtgacccagcccatatacaactatttcagaacataggctgggtgcggtggctcacacctgtaatcccagcactttgagaggctgaggcgggaggatcacaaggtca

SEQ ID NO: 3504 - DNA, 122 bp, Homo sapiens
agatgcttctgggtcgcggtgtgctaagcgaggagtccgagtgtgtgagcttgagagccgcgcgctagagcgacccggcgagggatggcggccaccgggaccgcggccgccgcagccacggg

SEQ ID NO: 3505 - DNA, 122 bp, Homo sapiens
tgtcatgtccaaacttgtcctggggctcaaagcttgtcagggattaaggagaatgaagcccgaaagtgccttagggacatcctgtcttcactgctgtcatagagccagggcctgggcagcac

SEQ ID NO: 3506 - DNA, 122 bp, Homo sapiens
gcccagatttgaaagcagacctccaagcccctgccagcatccatcctctcattcctgtcccgtcgcctgctttgagcctgtattcagctactcaactcagacaggaaataaccacttacttt

SEQ ID NO: 3507 - DNA, 122 bp, Homo sapiens
ggcgacgagggtctaaggaatccagactatgtgacaaagccatctcgcaggcaccaccttcgagataataaaggcggtgccacccgatggaactcacctggagttccagctcatgcttcagc

SEQ ID NO: 3508 - DNA, 122 bp, Homo sapiens
tgacctcgtgatccccccacctcggcctcccaaagtgctgggattacaggtgtgagccaccgcgcctggcctctatctagctttttgtaagggagcaaatgaaatatttgataagtgtgact

SEQ ID NO: 3509 - DNA, 122 bp, Homo sapiens
gatgcaggccgggagcgcccacgcctccacatttccttttcagctggagcccacctcctccggagcctccagtgagaagttttggaatattccagtctttctgaaaggaagctggttgggtg

SEQ ID NO: 3510 - DNA, 122 bp, Homo sapiens
gggctgaatttcaggacaattttctgggtccatccaagggaaggaagcacagattcagatcggaaggtgtagcaagggacaggaaagcctgttttatagtgagctctgagctttggtcattc

SEQ ID NO: 3511 - DNA, 122 bp, Homo sapiens
ggacctgcttcctccactggcttccctgggcctagtggtggtaagggtgcttcactctcacgagccctgagatattgcaccatctgatgagatttccatatactctgtgagcaccttcttca

SEQ ID NO: 3512 - DNA, 122 bp, Homo sapiens
tccacccagggggtcctgtggccccgctctgctggtgcctgtcgaaggggcagctgcagtcgaatcaccacgctgctccaagggagtctcccaagggctccaagggatggagcgtccgtaga

SEQ ID NO: 3513 - DNA, 122 bp, Homo sapiens
aatatcccccccttcctgtcactcccggggctgtccctgtactacacggtgccatggagccggggagagcggggaagtctctgcatccatgccacccaccccagtcgggtctcactttcctg

SEQ ID NO: 3514 - DNA, 122 bp, Homo sapiens
taaactcacagttgtgtggtgcaggtgtgccacttagtgagttgcagtacctgtgagggacggtgacagagtgaaaaatatttttcctcaacacatgtgacaaaagcctcaaattccaagga

SEQ ID NO: 3515 - DNA, 122 bp, Homo sapiens
agaattttgtggacactgcttcattttcttctaacatttagtgtttctgtaaaaagccttcggaggtggccgtggtgcacaggcgtgtgcctgtggtcccagctactcggaggctgaggtgg

SEQ ID NO: 3516 - DNA, 122 bp, Homo sapiens
caccgcccccagccacccaccactcaaggtggagcggacccagggaggcctgggtggggccggcttcatttagtgcaaacgtttgttccaggcttggtcccggggtgtagacagggccaaga

SEQ ID NO: 3517 - DNA, 122 bp, Homo sapiens
ggctcccaaaacttttatgggagcaagcgggacggcgacttggcatttcgcgagagcccacggatcgttgtcagcgcccagaaggtgaacctgcactcgttcatttaatcctcccgcagcta

SEQ ID NO: 3518 - DNA, 122 bp, Homo sapiens
cctccacagcctcccttcccccgcagggttattttgggaacccagagcctgaggggacctcggaggaatttctccctggtatgggaggtggggggagagaacccaggcgtcctgcccgcctc

SEQ ID NO: 3519 - DNA, 122 bp, Homo sapiens
tcttactggaaaaccggagacatgtcaaggagcatgatttgccttaaagctcagcttgatcgaatacttgtagggtgattcgctaacgaaaggtaaaaaggcatatttcagggtctctaatc

SEQ ID NO: 3520 - DNA, 122 bp, Homo sapiens
ggagcaaaaccactgaagggagaacaaatcatgaacaaagagagaaggatccagagtccacgtggccatcttcaaaagtttgcctttgccttgcaacttaaattgcctttctcatgagaagc

SEQ ID NO: 3521 - DNA, 122 bp, Homo sapiens
cgaaccgaggcgggagcggccacgggtgacagcggcagcggcggggccgggctgcgctcccgaaggcgttcctggagggccctgggatggactcagagatccccagagccccaggggacgga

SEQ ID NO: 3522 - DNA, 122 bp, Homo sapiens
ggggctggcaggcctgctctctggatagaatgtagcaaaaggcccgtggtcaaactgatacggggtggggaaggttggtgggctctcagccatcagccattctcatcttacacgtgaaaaac

SEQ ID NO: 3523 - DNA, 122 bp, Homo sapiens
actcagggaggcagcggagagaggacccacaactccacctgggccttagggcagctctgacgatgctgtaaggccagactgtagagactaacaatataggcatcacctggaagacttgaatg

SEQ ID NO: 3524 - DNA, 122 bp, Homo sapiens
ctcctaacttttattactctttaccttgtgaagtcatataaggctctaagtcaagtaagacggaaggaataagattagcacacttcctggtacagtgggcagtacgtgatagctatctgaaa

SEQ ID NO: 3525 - DNA, 122 bp, Homo sapiens
tcagctctcttcaaatcttgagcactcacatttttggcataaagagaatattcatctgcccggacacatctgtaatcttttcccttgaaatacagtccttctcttcgggcttgcaaagggtt

SEQ ID NO: 3526 - DNA, 122 bp, Homo sapiens
tactctgtttctgtaacgtctgtgcatttgcacagctgcaccccttgtagagaatggctgcgggtcccaggccaggagctccctgcagggcgggagctcccacgatcgtattgacctctgga

SEQ ID NO: 3527 - DNA, 122 bp, Homo sapiens
atctgcctttcatgaccttttcctttttttaattttattttttccaaattgggtcccaaacgttcaacaggtcaaggtggacactatgcagacaaaataactcatgtggtccacgctgtgtg

SEQ ID NO: 3528 - DNA, 122 bp, Homo sapiens
ctggggtgaggaagcaaatgtgattccccatggacgtgctgccctctgctgagacacacccgggctatgaccagactcatcatttcccccaagaaccggccccttatcccaaatacctccac

SEQ ID NO: 3529 - DNA, 122 bp, Homo sapiens
gtggaggctgagtgcagctgggccgcacgacccaggatgctggagcttcagggagcaatccggaggttctccagaagccgctgaggcctgggtccccctgccgccccccatcccccggccct

SEQ ID NO: 3530 - DNA, 122 bp, Homo sapiens
cgatcgtaaagggctttcatattgaaatatgggccattttcccagctccagccctcgccgcggctccccgcacccccacacccagccaccccgcgcttgatgaaagagcccctacaaatcca

SEQ ID NO: 3531 - DNA, 122 bp, Homo sapiens
tccatcatgaataattcagttaagagacctatgaagagcacacctcttttcccctttgaccgttctgctattggaaatggtcgaactttcagtccctgattaaagttttcaatttaccccac

SEQ ID NO: 3532 - DNA, 122 bp, Homo sapiens
gcagagctggtctcctggccggagctgccctggtcgcccccaagtcctagcctgtgcccccgccaccctggcagcagctgtgctcacactgtgggaactccaaagcccccactgcagaggga

SEQ ID NO: 3533 - DNA, 122 bp, Homo sapiens
tgagctcacagttgctcagaaactggggtctcagtgaggtcatgggactcatccacgtcacggggctggaagatgacccacctggccttgaaccctggttatctgtttcccaaatcagagtt

SEQ ID NO: 3534 - DNA, 122 bp, Homo sapiens
ggggagtctggtagatggggaacttcaggtgcaacaagtttgtgggggtgggagtggcagcggctccctctcaggaatgtttaggcaaactaaacatgcatccttcataatggaagtcaaaa

SEQ ID NO: 3535 - DNA, 122 bp, Homo sapiens
acgcagcagccatgcagcttcacggcacaggggcccggccgttctctctggattctggctcgaattttcacacgtgccaacctcactcggagggcctgatgggcccaggctgtgccggctcc

SEQ ID NO: 3536 - DNA, 122 bp, Homo sapiens
aaatatttctggtgtgaaacacagtgttttgatgctcgcggactcttggattcgaggctgcggtagtacggacaaacaccgtgcagcggcatctcatctccgccaacagccggcgatcaagc

SEQ ID NO: 3537 - DNA, 122 bp, Homo sapiens
agttctcattcccactaggtgtcgggtttctagagaagccaatcggtgccgccgcggtcccggttctaaagtccccacgcacccaccgggactcagattctccccagacgccgaggatggtg

SEQ ID NO: 3538 - DNA, 122 bp, Homo sapiens
agaacttgggcatgttgtaaagcagataatgcagtgcgccgtcatttccctcacaggtgccgtgtgcatcactaacgcagcttctccaccacatagctcaagtgcctgttcacatttcacaa

SEQ ID NO: 3539 - DNA, 122 bp, Homo sapiens
cagtctatccagcaaggcggccacttcagccatctccatcacgtccagcgacagcgagtgcgacatctgagttgcccatccaggatgctcagaagcagattccagtgtaaaaacgagaaaaa

SEQ ID NO: 3540 - DNA, 122 bp, Homo sapiens
tggagcctgaggctgggcccagatgggccactgtaatcacagctccttgtgtgccagcaccgtgctaggcgggcactcattgtgtcatttcctccccgtgacagtgtgctaagccgggtgct

SEQ ID NO: 3541 - DNA, 122 bp, Homo sapiens
gtggcacctcctgcgacagtcacaggcaccacgcagacaggagcaccacgaggggcctcacggcttgctcgtctgtgaatcacggtgaccatgtaacccataataccttctggttctaactt

SEQ ID NO: 3542 - DNA, 122 bp, Homo sapiens
aggagcagcaggagcccggtctcgcagtgccggcacggacagtactctgggggtctgggccgcgtgccacgaggagcagaggagccaccggagccgcttccgcagacgccctgacacggagg

SEQ ID NO: 3543 - DNA, 122 bp, Homo sapiens
aaaacaaacacaacagagatttttatcaaaggcaaagctgcaaaacccactggggctgagcgctgagctggtccggacacctgggtccggttcctggaccaggacagtcaacctctgcattc

SEQ ID NO: 3544 - DNA, 122 bp, Homo sapiens
aaaatgagagggttagacgaggggaggaacttcctcagccacttggcccggcacagcgaccgccccaagttcagaaccgctaagtcagtccggggcgctccggccccttcgtcccgcgcccc

SEQ ID NO: 3545 - DNA, 122 bp, Homo sapiens
cggggaagcagctgggccgctcagggcggtcagcgggcactggggtacctgagagaaggccgcggggcccgccaccgccgccctccgcgcccaggcagggccgccagccacaccgtccggcc

SEQ ID NO: 3546 - DNA, 122 bp, Homo sapiens
cctggagccaacaccttcgactgcccgatgctgggaggtctgggaactgggccgctggcgcgctgacgccctctgcgcctggtcttagctgtgtcccctgcgtccagaagaaagaatgctgg

SEQ ID NO: 3547 - DNA, 122 bp, Homo sapiens
tcccgggcagcggaggacacaaagcgccagctcctggggggcttgtgaggattgaacaagcgtggacgcgttgagtgccttggaagagtcccggggccccccaagaggctcggaaggtgttc

SEQ ID NO: 3548 - DNA, 122 bp, Homo sapiens
ttgctcttttatcttttgtcctgggtgacaggaactagataagctataccccagagaaagcgcctgcagcagtacggtgcctgggcccttgatagtccctcagcacatcattttcctttttc

SEQ ID NO: 3549 - DNA, 122 bp, Homo sapiens
gtcgctgtttctgcccgaaaacctagtgtaatcaggacgaaccaggcaaagctggcggcgcgcagcctgcagtcccaaggagctcgcacattgtagggactgtaatcaacaggcaggctgcc

SEQ ID NO: 3550 - DNA, 122 bp, Homo sapiens
catacaagcatactgtagttaaaaatattaaaagaccaagaaaagatatattgatgctcacggaactacggtggaagcttactggggcatgccttgcgcatgggatgaatgttttgaggcag

SEQ ID NO: 3551 - DNA, 122 bp, Homo sapiens
agaggttttccgcaggctggaacagcactacactgggctgggtatgaggaaaggaagcggcgataaggtctaggcgccgcccgctaggccccttcgcctggaagtcctcacaggccctggtg

SEQ ID NO: 3552 - DNA, 122 bp, Homo sapiens
gtcggcgccgcgcttcaccgtcgatccgcgccgaatgcatggccgcgccgccagcctgcccgcctggtgcagcaagatctccacgttgctcaagaacatggccacgctgctggctgcgctgg

SEQ ID NO: 3553 - DNA, 122 bp, Homo sapiens
gcagcggccaggcctctgcggcttctcggagtactgggtccactggagagcgaagagccgcggccgccaggattcccagcagcggccgcgtgttgagagcctagaagtggccccgaagccgt

SEQ ID NO: 3554 - DNA, 122 bp, Homo sapiens
agttctctccaagtcaaatgtcttctcgccctgggctttttgttccctaaaatgaaacttcgcctcccgccacaggatctggggtgctcctgctgcctccagagaagaagggggcgctgctc

SEQ ID NO: 3555 - DNA, 122 bp, Homo sapiens
agggggtcttgcctcccgcccagggcctggggcttgagccattttgatttgaaagtggggcgtgagcggggtggcgcggcggcggcggcgccgggtcgccatgctgcttcccgagacgccga

SEQ ID NO: 3556 - DNA, 122 bp, Homo sapiens
atacacatgaagaagtattctccagttcagccacaataaaccacggcttagttgttctcccggccttcgtgcctcagcccaggctgttctgcttcggaagcacctggtcatttcctgtttac

SEQ ID NO: 3557 - DNA, 122 bp, Homo sapiens
agtgttctcgcaacatttcagtgtcaagcaggagttggcctaggaatcaaaagaggtgagcggtggctccaaagcaccactgagtacttctagtgtgagtctaaccaatattcagtcagaaa

SEQ ID NO: 3558 - DNA, 122 bp, Homo sapiens
ggagacaacagccacagcaaccatacaccactgtctagaaatagtttgataagccagggacgcgccaacttcaaaaacaaataccaggcacgctcacgtttgacctcagacgggagcaaggc

SEQ ID NO: 3559 - DNA, 122 bp, Homo sapiens
gccaaagttgcacagggcgctgcctccggatcctgttccctcgcttcctgaagtgctcgacgatggcctctaaacctctttatccggctagaggcccagaggctaggaggggcccccaggcg

SEQ ID NO: 3560 - DNA, 122 bp, Homo sapiens
ccccacacgccaggcctccaacttcttcacaaaagtggggtgggtggcggagggctgtggcgggggcttggagctgctgagagccgagaggcgcagagcgcaagctggcaggctgggctgct

SEQ ID NO: 3561 - DNA, 122 bp, Homo sapiens
gttccttttttccgtggtgacctcctctccaggctctgcttggtgggcttctggtgtggccgcgccctgtgtgtgtctctctctgtgtcctgccagtggttttaccctatggtaggttacgt

SEQ ID NO: 3562 - DNA, 122 bp, Homo sapiens
tgactgttcatctaacaaaagggatcttcgcctctcaaacggagtcagctccaggatcctcgaccacgggcgtggcgtgaaatcgatttacaaacacgcgatttgtatctgcccatctagga

SEQ ID NO: 3563 - DNA, 122 bp, Homo sapiens
ataaattaatcattaatgcatctagatcgtaaaataggatgtgcattaaaatgctctcaccgcaacagctgatgtttcattgatacaggaaaggctcaaataatctggacagatgaagtggt

SEQ ID NO: 3564 - DNA, 122 bp, Homo sapiens
gcgcggccaccagaagccgcagcgtcatcctaggcagtaaaagccgtcagctaggacccccgcctctgtcccttgctcccccgtggccttggcaggtccgagcccagcgcccctccagcccg

SEQ ID NO: 3565 - DNA, 122 bp, Homo sapiens
gccagcttgcaccagctcacaaggattggacaaatctcttcccaaccttgtgttcagtgacgtcatgctggtagcctgaaataggccacggtgggagtatttacaccatggaaattggcaaa

SEQ ID NO: 3566 - DNA, 122 bp, Homo sapiens
gtgagcaggagtgtcgtctaacctgcgctggccactatgtgtgtcctctgagggttcctccgtaggtgcagctttaaaggaggaagttttagccaccgattaattcttttatattcacgaat

SEQ ID NO: 3567 - DNA, 122 bp, Homo sapiens
aggaagtgccagtctgaagccagcacagggagcctggatttagcctcagatttagggccacgatcagcctgggttgggggtttctgagtgtctgacacaagggtggactctcctgggggctg

SEQ ID NO: 3568 - DNA, 122 bp, Homo sapiens
gaagctccacaaagctccccgccgcctctctcggtctcggcggagaccccggtgtgtccccgggaggagagtatttactaaccagaacctcaggggctcccggctgcccagaccgccctctc

SEQ ID NO: 3569 - DNA, 122 bp, Homo sapiens
tttgttacgattctaagttctctgtttttcagtggttcaccgtcagaagcatgagtccaccgggagggcttcataaccaggaaaatagcatccttcaactgcagggacttatatttaaacag

SEQ ID NO: 3570 - DNA, 122 bp, Homo sapiens
accctctgcaaacagacagtcccgcagaggccctcgacgagtgtcactccatctgtttcgcgctcctaggagaggtgtagcagaaagcagtgccccaggcctccacgcgacggtgaagcagg

SEQ ID NO: 3571 - DNA, 122 bp, Homo sapiens
cctgtgttcactggctctaacggtgccatcacactgattagcaagcaaggcccggagcggcgggatcactcccaggccccaccttccacctctcctcttcctggaaggccaaaaaacagtcc

SEQ ID NO: 3572 - DNA, 122 bp, Homo sapiens
aggcacccacgcctccccagctctcacccatgaagaggaaagtgagcacatattggtaggcgcccactgcttctagatgctgcttctgcaaggttttggaagtggttgggggctgcagggtt

SEQ ID NO: 3573 - DNA, 122 bp, Homo sapiens
agatacttgggcaaaggtggctctaaataaccagagtgttcctaacgcaggacaaagtgacgctggagagcccacaacacaggactcaataggtattcacctcacattttctgaacaagctt

SEQ ID NO: 3574 - DNA, 122 bp, Homo sapiens
gttcctggcactgcggaaaaacccttgattttcccgccaccacccgctttgtgactttggcgcgaaaaagcaggttcgcgcagcagccagcgcgggcttttccgaaccgcgcgctcagctgg

SEQ ID NO: 3575 - DNA, 122 bp, Homo sapiens
agggcctgtcgcaggaatgagcttggtatgtttgggggacagaaagaagggcactgtggccgaagagcagtggatgaggagagagtggccaaagaaggtgtgtaaacaacctgagctttgtt

SEQ ID NO: 3576 - DNA, 122 bp, Homo sapiens
acatctttgtgcttggtatctatttctgcaagtgtctttgggcagtccgatttcctcttgcgtgtctgttcgttgcacgtgagctccgcccattgcgttcacagggttctggcgcctctagg

SEQ ID NO: 3577 - DNA, 122 bp, Homo sapiens
aaggcaaagccctagacacagggacacacctgtcaggctgcgcgagcccaggggtgggggcgagcccgaagtggccggggcggaccaagcctgctgaccttgtgcttcatggtgacggagtc

SEQ ID NO: 3578 - DNA, 122 bp, Homo sapiens
taggggaagcacagttcgcttactttgtatttttcttgggagcttgtggggcatcttaaacgggaccgttcggctcagaatcgcagtgttcgcctaccaataaaccggaccaagcaacattc

SEQ ID NO: 3579 - DNA, 122 bp, Homo sapiens
atcatgaatgaagatggtgctcaccaccactgtttccctgcagatcatgctcagtggtgccggtgccctcacccctcaggacattcaggccctggcctacgggctgtgcccaacccagccag

SEQ ID NO: 3580 - DNA, 122 bp, Homo sapiens
aagcggagcctcagccttgccgtgcgggcctttgtgagctactgcgtggcatgagcagtgcggctctcccgcggattctctagcgcctggttgcccttcagcaggaagaatcgactactcac

SEQ ID NO: 3581 - DNA, 122 bp, Homo sapiens
gggggcctgtggacagagctaggagatgtgggctggggtatttgcatctatgtggaccctcggggtgagggacagagtcagaaacggaaagagagtggaggatgggcagccccccacccata

SEQ ID NO: 3582 - DNA, 122 bp, Homo sapiens
cccagtgataataacacaactggtcgcgtacacagcggcccgaggaggacaccaggtactcggtgccacaacggcagcagaccctacaggaggagtcgccgggccccttcccctggccagtg

SEQ ID NO: 3583 - DNA, 122 bp, Homo sapiens
agagtgagcctcgcagctggtccctgctagagcagctgggcctggccggggcagacctggcggcccccggggtacagcagcagctggagctggagcgggagcggctgcggcgggaaatccgc

SEQ ID NO: 3584 - DNA, 122 bp, Homo sapiens
tgggtgcctgcttccattggcactgaaagcaaactcttgttgattcaggacctgcagccccgtgccccggcgctggccaggtgaggggtgcctgcttccgttggcactgaaagcaaacgctt

SEQ ID NO: 3585 - DNA, 122 bp, Homo sapiens
ccaggcagagaaccatctaagttcacactgcacctctagaagcagagggtctcattctcccggcttcttccccggcccctcgtgtttccttcaaggcatctgcgcagtgccgcgcatggcgt

SEQ ID NO: 3586 - DNA, 122 bp, Homo sapiens
tgtggatgtcacgtgacctttcctctttagcctatcattgtagttgggagttagttagcccgttgagcgtcattgaatttccagtgttgagccagccctgcgtgcccgggataaacccacct

SEQ ID NO: 3587 - DNA, 122 bp, Homo sapiens
ccacaagtaattacacttccaagaattttcctcacacagttgggaaaagctaaattggtacgtaagttctgaaaacactgattgacttctcctctctgagacaatgcagcccaccctcttgg

SEQ ID NO: 3588 - DNA, 122 bp, Homo sapiens
tcacatcccccatgatactaatgtgggctcccttacctccgcagtacggagtggacgtcacggcccgagatgcccacgggaacacagctctggcctacgcccggcaggcctccagccaggag

SEQ ID NO: 3589 - DNA, 122 bp, Homo sapiens
agactccctgaagagtactgtaaacagttgcaatggcggccctgaccagctagtgagactcgcatttattcagtaaagattaattgacaaagacttgagtcaacaccactacggggtaactg

SEQ ID NO: 3590 - DNA, 122 bp, Homo sapiens
atggattgtgtgctaatgtgctgaatactttacataaattcacacatccggtccttgtaacgtccttttgtgctgggaactactgttattcccatcttacagataaggaaactgagtcacag

SEQ ID NO: 3591 - DNA, 122 bp, Homo sapiens
ttcttggtagaacccctcttcctggcttagatggctgtcttcttgctgtgttctcatatgcgggtgggagggaacaagctgtctggcttttcttatcaatgcactaatcctatcatgaggac

SEQ ID NO: 3592 - DNA, 122 bp, Homo sapiens
tcccggcccaccgcctccttcctgcggcttccccggctccccaggccggaccgaggccagcgtttgactttcctggctcccagtctgctcccctagtgcccaagagcgagaacaccgcttcc

SEQ ID NO: 3593 - DNA, 122 bp, Homo sapiens
cttaactatgtgttccgcacataataatcatcttagcatagaggaacatgtcttctaatccgcacaagagatactatttttatcacgtcatagaggaggttaataaacttgcctaggtcata

SEQ ID NO: 3594 - DNA, 122 bp, Homo sapiens
gtgacattgatgtaccatagctccaggaaagagagatggccaaggaaaaagtacatgggacgatgaaggcttggagcaagccatattgtgaagacaataagtgcattctccaacaatgtcag

SEQ ID NO: 3595 - DNA, 122 bp, Homo sapiens
atattcatgcaaaagaatttagtagaaaataagcatgactttgagaggctttaacccttccgtgactgctttcttcatgtcatttgtccagtcatggtggtaaatgtactcactctggtaag

SEQ ID NO: 3596 - DNA, 122 bp, Homo sapiens
aatgagggagctgcaagaataagggagctaccgggggcttccaaagcctcactgcgccagcgagtccatcatagagagttgacccaaaccatctgccagaccggaaaacaggacaccagcca

SEQ ID NO: 3597 - DNA, 122 bp, Homo sapiens
agaaaagaaaagaagaaagagttgcccaaagatccagcagccacataagtgagagaaccacgattctaaaccagatttgtctgaccccaaagccagtatacttgaaaatttccctaaaaggc

SEQ ID NO: 3598 - DNA, 122 bp, Homo sapiens
gggaccggcctgtccaggggcagtaccggcagctggtaacacacttccattgaatacgcccgccctgcctccgcgcggcgcccgccctgccgcggccgccggcccctgcagtgggagggggc

SEQ ID NO: 3599 - DNA, 122 bp, Homo sapiens
caaaaccggttatcactgtgaaaaattgaaagacgccatgcgcagacactggttgctaaacgtgcttttgccctccaggggcagacgctgagatccggcctgggaaggagtacagctgtggc

SEQ ID NO: 3600 - DNA, 122 bp, Homo sapiens
ctaatgagacttgagaactgccaagaatccccggaggtctctgccccttgcgggccttcacgctaagtgaacagagcatctatttagtgtctgggaacctgacaacaaaccagatcttgcca

SEQ ID NO: 3601 - DNA, 122 bp, Homo sapiens
ttttcctttcgcttattaaactttcgctctaacctcacctttgtgtctgcgctcctttatcgtcttggaggcaggacaaagaactccgggcgttatctcagacaaagaaaggctgtttaatc

SEQ ID NO: 3602 - DNA, 122 bp, Homo sapiens
caaagatcttacagatggaggggcagggctgggtggaggaggagaagccccggtgagtcacgctgggaagacagcagccctgggtactggctgagcctccttggagccccccaccccttctc

SEQ ID NO: 3603 - DNA, 122 bp, Homo sapiens
agatcttacattaacagaacgctttaacagaagttagattctggttaattttccaagaagcgctgagatgcagacatatgcccttgttcctctttcatagacgcggaaactgagacccacag

SEQ ID NO: 3604 - DNA, 122 bp, Homo sapiens
agccatgccctgggacccagccccagcaaggacatccggagccgatgggtgacgtgtgcccgcagactcatgcccgccatgttccaggatccgggcacagcgctggctgcccccatggctag

SEQ ID NO: 3605 - DNA, 122 bp, Homo sapiens
tacatacgaatgcacaaagccagtctgagagacaaacacagagatgctcagagacataaacgtacgaagacacaggcacacacactctccagctcactgcacacaggctcaagggtgccaac

SEQ ID NO: 3606 - DNA, 122 bp, Homo sapiens
ccgtgttatgtatgcctttagttgatgctggccaaaattagacaacttagtggcagacgtcgagctagaatttttgtttgagatcctttttccctggtcgtctttccaaactgcgtgagtgc

SEQ ID NO: 3607 - DNA, 122 bp, Homo sapiens
caagctgtggcacctcgaccccgacacagagtatgagatcagcgtgctgctcacgcgtcccggagacggcggcactggccgccctgggccacccctcatcagccgcaccaaatgcgcaggtg

SEQ ID NO: 3608 - DNA, 122 bp, Homo sapiens
tctttttttttttttgagaccaagtttcgatctttttgcccaagatggtgtgcaatggcgcgatctaggctcacctcaatctccacctcccgggttcaagcgattctcctgcctcagcctcc

SEQ ID NO: 3609 - DNA, 122 bp, Homo sapiens
gcgcgaagttcgggcccgggaattccgaaggaggggtaggcgctgcccgcgcgcagaggccgcgcccctcctggccccggcttcttggctgtcaaacagatgcagcaacgtcggctcctgcc

SEQ ID NO: 3610 - DNA, 122 bp, Homo sapiens
gatgtccttgcagttcaccgtggccacgcgcctacgtcatagccaaggggaactgagtggcgctccctccagaggttgtctttccacgtggggcgtgggctcttctgggcattttggtttcc

SEQ ID NO: 3611 - DNA, 122 bp, Homo sapiens
ctctctgaccactcttacggtgtttgggggcaacaaactaaggatctagactcgctaaaccgctcgctgggtccttctctccccacaatgcaccggggccagcaggaaggccgctccgaccc

SEQ ID NO: 3612 - DNA, 122 bp, Homo sapiens
tttcaagagagaaagtacaatcattttttccatgggaaagtagagtttgtttagtaaaagcgttttgaccagatcaaaatatgaattcactagtagaatctgacagtccatgtcacaaatca

SEQ ID NO: 3613 - DNA, 122 bp, Homo sapiens
gttgttttcctttcttgagacttggttttcttatttgcaaaatggggctaatacacacctcgtctatttcatcagggtgttttgagggtcacaggtgataaagtgtaaacgagccctttata

SEQ ID NO: 3614 - DNA, 122 bp, Homo sapiens
aagtgggtggcttagaaatttattgtcttggccattttcctccggaagtgcggatcccagcggcggtcctgtagctgagcaggcctgtggcttggttctatgtccctgtggctatgtttcca

SEQ ID NO: 3615 - DNA, 122 bp, Homo sapiens
ccatgttagcccctaagttgcttcagtgagtactggctagtgataattgtttttttccttcgcagatttaattgttcaagctaaatctggcaccgggaaaacctgtgtgttctccaccatag

SEQ ID NO: 3616 - DNA, 122 bp, Homo sapiens
aaacccctgattccatctccagtctggccaatcagcactccccatttcccaagcctctaccggccaaattatctttaaaagctctgatccctgaatgctcggagagtctgatttcagtaata

SEQ ID NO: 3617 - DNA, 122 bp, Homo sapiens
tgacctcttgaattattctaagtaggggtttgccatgtaggggttgtcactgtaccatgacggatacagtgattggctgtgtatttttggaccctctagaaatagtctttaccctttccccc

SEQ ID NO: 3618 - DNA, 122 bp, Homo sapiens
tccttgactggggaactagatgatagggatgtgaagggtggttggtgagtcatgccttttcgtctactcattgtggcaggatgtgagctctgggggcaggcaaccgaacactgacctctcta

SEQ ID NO: 3619 - DNA, 122 bp, Homo sapiens
tcgcgaaccagctttgtggccccgcgtgccagcccgtgtcctcctgggctcggcggcgttcggctttatccacctcgcagttactcagtgaaccagacacgataagaggcgtgaaagggttt

SEQ ID NO: 3620 - DNA, 122 bp, Homo sapiens
gccaggcacaacatcattataaaaggcaagtacactgccttctggaaatttgcatccatccgtagttacacccgacacaagctacagctttgtttaaatttccagctgactgacacgcacac

SEQ ID NO: 3621 - DNA, 122 bp, Homo sapiens
cggcaacaatgggcagaagctgagcaggggccgccccaggcgtgaggcctgccggggtgacgacatctgtcacccgtgctcactgcctctgccttgggtcccgccccgtccccccttcccat

SEQ ID NO: 3622 - DNA, 122 bp, Homo sapiens
tgttaaaatgaggaagaagacaagctttcgctgcgcaagtagatccagggagcgtgcagccgggtggacgttctccccctcaggtctgcgcgcagtggttgcgcctgtccccgagcctgcgc

SEQ ID NO: 3623 - DNA, 122 bp, Homo sapiens
agcttacgcccgggggaggaagtgcgatttgcagccacctgcccctcagtgcactggaagcggggcagacctccagggcacagacaggacttggcatcaagcaagccaaatcccgagatgaa

SEQ ID NO: 3624 - DNA, 122 bp, Homo sapiens
gtggtgctgaagacaaggtgaccatctgtgagggagacgaagactccttccctgctatctcgcagaccctacaggcaccttcaggttaataactgcctgaaataaggtgaaaatgaacacag

SEQ ID NO: 3625 - DNA, 122 bp, Homo sapiens
gggcagtggaaaagtcaaacgaagagtcaagaatgtgctctgacgcctctcccccgggcccgacccttaccgtgcagcaagtgctcagtctcccgcagctcccgctccttctcgttcagcag

SEQ ID NO: 3626 - DNA, 122 bp, Homo sapiens
agggattcgggtaccgctgccagaaggcggcgaacacttggtcccaggaactccggagcacgctctggcccaggaaatacttaaccatcgtcctggccgaagtgggctcagcacccgcgcag

SEQ ID NO: 3627 - DNA, 122 bp, Homo sapiens
agtgatacttcactgcctggtagtcactagagcctgatcacaaaaagatctcattaagttcgtagaaactggagagaaatagtcttccaatgtagaaaattagaaatttaggggaaaatatt

SEQ ID NO: 3628 - DNA, 122 bp, Homo sapiens
cacgcagaggggcggcggggcgctgaccgaggtctaggtctcgattgccgccggtcgagccgcgcagtttgcctgcagacctcggtcccctgcccgcgcagcctcggctccatcaggcccgg

SEQ ID NO: 3629 - DNA, 122 bp, Homo sapiens
aggacttccggaataaagtggatgactacatcaaacgttatgccagatgataaaaggggacgattgcaggcccatggactgtgttacagtttgtctctaacatgaaacagcaagaggtagcc

SEQ ID NO: 3630 - DNA, 122 bp, Homo sapiens
tagaccttcaagctggacagggcttaaatgccagctcctccagtgccctccacaaagggtcgtggaggtcaggggggaggtgcacttcaagtgggaggctctcgcccactccccctctagcc

SEQ ID NO: 3631 - DNA, 122 bp, Homo sapiens
ctgtctttgaattgccttgggtgccacttcacactgctacttcaagcataccctaacagacgactgactaccccagtagaatgccctcctttcctaactacaactgtgaaatattgcccctt

SEQ ID NO: 3632 - DNA, 122 bp, Homo sapiens
gaataagcctgtggtggtttttccaatgagactggcaagcaaaactggccagtcttcaaccgtccattctgaagcattggtatccacttttaaatgaaaagaaaacaattttattttaaata

SEQ ID NO: 3633 - DNA, 122 bp, Homo sapiens
attccagctcagcagctgactctcctgccatgggacctcagacaaatcatgtgcccgcggcggctccagagaaaggggctgaggacacctgctcatggggcttgcaaggacttgaactgcat

SEQ ID NO: 3634 - DNA, 122 bp, Homo sapiens
cggcccagccttgtcccccggcccagccggattccagagctgcagccccggctggtgcagcgccttctacgaggccgactgcttcggggccgacgtccacaactacgtgaaggacctggggc

SEQ ID NO: 3635 - DNA, 122 bp, Homo sapiens
tcccgggtctcctggcggcggcggagtgaggctgacagcggggaacctgggagacccctccgccctccccgcggtggcagcggccgatccccggctccggcgcgagggacggccgcgatgcg

SEQ ID NO: 3636 - DNA, 122 bp, Homo sapiens
cacggccaaaggtacaggctggttaagggaccacagctactggacacttggaccctgacacgatggggcaatggaaagacactggcattgattctaatcttttattccttgtttgtaacact

SEQ ID NO: 3637 - DNA, 122 bp, Homo sapiens
gtcccacacgccaaacccgttcctccactacgaagcctcgtgacccccgccggccaccgtcggagcctgagcctacctttgggctgatccaagaatgtgagggcgtctccacgaacaccaat

SEQ ID NO: 3638 - DNA, 122 bp, Homo sapiens
aaacagacgcctagtgcggaatcctgtgcacgcctttaactcctccaaacgagcagggggcgtcatggattagcatgtcccggggttcgggaatcagcatttccgaggaaaggggcgctcag

SEQ ID NO: 3639 - DNA, 122 bp, Homo sapiens
atacagtacactgaaatttatttgtatttaggaactgtcaggctaagatgtcagtaaggtcgtctacttgagtctgtcattaaggagtgtaaactatagtgaatagcattcttttgtcatga

SEQ ID NO: 3640 - DNA, 122 bp, Homo sapiens
cccagggcttaggtgcccatcctagacccatttcatctgccgtcacctgcttcctggcatcgcatgtcatccagactggagtgtcagtggtgacaaagaagatcagagtgtctgctctggct

SEQ ID NO: 3641 - DNA, 122 bp, Homo sapiens
ccccactatataccagaggtggacacttcagacatatgtgtattttggcatcttttatcacgtggtttattccttattaaaactgtgggtgagcattatgagctcattttgcaggtgggaaa

SEQ ID NO: 3642 - DNA, 122 bp, Homo sapiens
gaggggagaatgtgccacaggtaaaatgcaggctggctgccagaggtcagcaccttttcccggttgaggctgtatgctcactcagctaggtggtatggcggcctttttatggacacctggct

SEQ ID NO: 3643 - DNA, 122 bp, Homo sapiens
cagaaggatcgtgaggccccgctttcacggtctgtattcgtactgaaaatcaagatcaagcgagcttttgcccttctgctccacgggaggtttctgtcctccctgagctcgccttaggacac

SEQ ID NO: 3644 - DNA, 122 bp, Homo sapiens
tgagccgccttctcggccgcctggtccctgcggcggctgcccggcggcccgggcgcgcggcgcttcgccatgtacaccttcgtggtacgcgatgagaacagcagcgtctacgccgaggtctc

SEQ ID NO: 3645 - DNA, 122 bp, Homo sapiens
cttgctgcttcgggaactgcgctccccttcttgcttttggtctctgcgtgtactccccggcgcgacaccgctcaccacggtagcctcgggcagtgcccattgggttctgagcacacgtcccc

SEQ ID NO: 3646 - DNA, 122 bp, Homo sapiens
cccccttggccccccacagaacacccaagaggctctcctgctcctggggtgggcaggccacgtgacttctccctccttgagggccccagccttgcccctccatcagcagcctgcctcagttg

SEQ ID NO: 3647 - DNA, 122 bp, Homo sapiens
cgtccggtgaaatccaagatggcggcgctaggctgaccctcctgctggtgagggctctggcgccgggggggacgggatccagcaggtgtgtgcagggtggagggtgtttggggctgtggaac

SEQ ID NO: 3648 - DNA, 122 bp, Homo sapiens
atccgagcccaccttccaccaatgcattcagactccgcagaaggggtttaaaaaaaaatacgcacactgagccaagaaggaccccagctccagccaaggggcccacctctgcccagactgga

SEQ ID NO: 3649 - DNA, 122 bp, Homo sapiens
aatatcctcttgtctcatggatcatgggaacaatatcagtggcgtggtgtacactttctgcggtattggtagtaagatcatcctctccgccttggaatattaaggacagtatcacaggccga

SEQ ID NO: 3650 - DNA, 122 bp, Homo sapiens
ggagatggagattgcagtgagccaagatcatgccactgtactccagcgtgggtgacagagcgagactccatccaaaaacaaaaagaaaacactggtccaggctgggggcagtggctcacacc

SEQ ID NO: 3651 - DNA, 122 bp, Homo sapiens
gcttccggtcgccgccaccccttagctcccagctctctctgcggctcttcaggcgcgtcccgaaactacaactcccgtcacaactcgcgattatgacctgagggtcccattggtcgctgcgg

SEQ ID NO: 3652 - DNA, 122 bp, Homo sapiens
gcctcagagcgtcacagggaacctcgggaatcgattgttctgcaagccagagctggatcccgggtgcagaatccatccgagcactctgtatgggggcacagctcggagcagggtctccggct

SEQ ID NO: 3653 - DNA, 122 bp, Homo sapiens
cccctaggaattgcttttatttttatgatcttatattttgttttgcttttatagcgctaacgtttagacacagtaaaatgcacacaatctgagtgtgcaattcgatgagttttgtaaagtgt

SEQ ID NO: 3654 - DNA, 122 bp, Homo sapiens
ttaaataagatagtgacttcgtagaatagggactgcagagtaagagtgttcagacccattcgagtttaatatagccctacctctaagaatcctttctgttcctcactcaaatgaactaattg

SEQ ID NO: 3655 - DNA, 122 bp, Homo sapiens
ttagcagagaagggggtggcagagtgctggcgctgaaggtcatgttgcatgggtaactgtcgtgttgtaggggcggggaagagggaggagacactgaccaccccagaggccgccccattagc

SEQ ID NO: 3656 - DNA, 122 bp, Homo sapiens
cttgagcccccggtgggctcctctgcctccttttgtcaccccgttcctcagctgtgtcttcgtcccccaccccggcctggtgccgagggaccgtccaaggggtccccgtccgcacctccctg

SEQ ID NO: 3657 - DNA, 122 bp, Homo sapiens
ccacacacacagaacagctggttcttaacatgcaccctttcaaacaaagctccctcaggacggccaattcagacagaatatcttattaggaagagagtgagagaatgttcacagacccaggg

SEQ ID NO: 3658 - DNA, 122 bp, Homo sapiens
actatcaacacctcatttgtcatttgtcctcacaaatgtaggagctactatcaacacctccgttataacagatacagtaacttgctcaaagtggtagaaataagtagtagaacgaagactga

SEQ ID NO: 3659 - DNA, 122 bp, Homo sapiens
caaaggttttagcgttgggattgtgaccgactcggtgaagagaggggacgatcaccaaaccgttagagcactggggctcttggcagtgtttgtcagttattttcaagtgataacttgaagtg

SEQ ID NO: 3660 - DNA, 122 bp, Homo sapiens
attgtcctctcccttcctggctattaggaacagtatcacagggtgggtgtccacagcatgcgatattgggagtcatatcaccctctccccctccggatattaggaacaatatcacagaaggg

SEQ ID NO: 3661 - DNA, 122 bp, Homo sapiens
ggtccagctccagggcgccgtagggcagcggagtgcagtgttcgggtaataggacgcagacggcggggtcgccgggggcttcggggtggcctcagccccaggccatccagccctgtggaccg

SEQ ID NO: 3662 - DNA, 122 bp, Homo sapiens
cggcgggggacgcacccgcctccgaggagctggctccgccgtcccagccccaccatctggcgcttctgactcggatctgttggtgtttacttcctgaaactttgcattcccagggtctgtgc

SEQ ID NO: 3663 - DNA, 122 bp, Homo sapiens
gtgacgaagcaaaaaactccagctagtcagccccagagcggttcccaagcccggggcaggcgcctgagaatctgggccctggactggacgtgggcctgaggttccctaccaccctctcccct

SEQ ID NO: 3664 - DNA, 122 bp, Homo sapiens
tagagcttaaagatagtctctcatttaaagggatatcgtccaatgtttaagtcttgtcctcgtgtctaatctcaagtgtgtcctggcagtcctccctttactaaggcagttccctgtctcgt

SEQ ID NO: 3665 - DNA, 122 bp, Homo sapiens
cctgtcgctgcagcgggagcagctcagcagctgcaaactgaggaacagcctggactccagcgactccgactcggccctgtaaggggcgccgcccgcgggggggacgcgcgcgtccgcggtcc

SEQ ID NO: 3666 - DNA, 122 bp, Homo sapiens
gctgtagccaggccatggctgccccactaagaatgacatttcctcaccagttataggacacgcatgaagctgaggtgggccacttccaaggctgggctttcacaatgctgcacgtgcccccc

SEQ ID NO: 3667 - DNA, 122 bp, Homo sapiens
tctaacagctgaggctgcttccatgttggggatggcagcagagccttgtaatgtccaagacgtcctggtgggaaggtgggaagtcagtagtagcagaagcgatactttagctctttaggcat

SEQ ID NO: 3668 - DNA, 122 bp, Homo sapiens
tccctcacagcaggctggggtttcttcatcctgcacccctgcaagtccaggacaggggcccggatttgaagcgtggatagtcctgtgacctttggataagttactaaatgtttacaaacctc

SEQ ID NO: 3669 - DNA, 122 bp, Homo sapiens
tttctggaataaggtagtttagcccatttgaaagaagctgtattgccttctcaaaaacaacgaaaacctactattgatcaatgaaggtaacaagatataacttcaacaaagtaaaacaacga

SEQ ID NO: 3670 - DNA, 122 bp, Homo sapiens
ggacaccgaggagaatgtcaagaggcgaacacacaacgtcttggagcgccagaggaggaacgagctaaaacggagcttttttgccctgcgtgaccagatcccggagttggaaaacaatgaaa

SEQ ID NO: 3671 - DNA, 122 bp, Homo sapiens
caaggggcggggaaacggcgcctgcgggactccaattggtcacgaacaataacgaggctgcgctccccagaggggtgtgtttttggggtctggaacgcaccctagtgtgtttgtcttggttg

SEQ ID NO: 3672 - DNA, 122 bp, Homo sapiens
acagttaatagagcagccaagtgatcaaatgtgagaatcctacaatgactgaaacttggtcgacattttcagacacgctgttggtctgaaacaacgttttacataagagcaaaagcattgag

SEQ ID NO: 3673 - DNA, 122 bp, Homo sapiens
tgagaattcacaccatgacactgacgggacttataatagtggttctaaagcctgcatgtgcgtcagaataatttggggatttgaggtgacttgttaaatgtacagtcactgggtagccccct

SEQ ID NO: 3674 - DNA, 122 bp, Homo sapiens
ctagctgcggagctggggttacttcctgaggggacttcgccttgggggctccttgccccccgcccggaagcgggccctctacgggaggggtagcggagttggtcttcccaccttccgcctgg

SEQ ID NO: 3675 - DNA, 122 bp, Homo sapiens
tctatggcacaagcttcaacctcatcaccaaacaattagctaactttataatacaaggtccgtaatgctgcggtattaccacacctacggctgtcaaacagcctttttaaaaaaggaatcat

SEQ ID NO: 3676 - DNA, 122 bp, Homo sapiens
ctgccatacttagaagaccatatagggaaaccacatacagatggagctgcctgaggaatccgagctatttgagtctttccagcccacgcattcaaataggagtgaaaaagcctttgaaatga

SEQ ID NO: 3677 - DNA, 122 bp, Homo sapiens
tgcctgcctcagtcatgtctggtctcgtttggccggcctgaggtgccaccagacaggagacgtagggaggagaggacagggatggaccccctggggaggggtccctaaatcacaacctgcag

SEQ ID NO: 3678 - DNA, 122 bp, Homo sapiens
agctggctggtgccacccactacccgctagaccggtgctgctatgggaaattcctgctgacgtcccacaggctggacccctggaagatgcaggaagcctggaagctggtgggtggctctgac

SEQ ID NO: 3679 - DNA, 122 bp, Homo sapiens
agcccttcagcccgctgctgcactgtgagaacctcttcctgggatgcctgaggacggagccggctccctcagccagcggggaggtgtggagggagacgcacctggcgggaacccggtctccc

SEQ ID NO: 3680 - DNA, 122 bp, Homo sapiens
acctccttgatcctcccgtgggcaggtctcacgtcccctttgcctctggttccctgtgtgcgtggctcactcaagccaatgggaaaaacccggaaactctacagagaagtaggtaaaatcca

SEQ ID NO: 3681 - DNA, 122 bp, Homo sapiens
gaccagcagacaccacacaccagggcttttcacttcaaggggcccatccaccacacacctcgagccctcacctgctggtcactgcctgtgggcctgaagccctccaactttccaggcagagc

SEQ ID NO: 3682 - DNA, 122 bp, Homo sapiens
tccatggatcaagttcaaatttcctagctttgtatacaaggctttgtatggtctggcctccgagagtatttccaaacacatcctcccaaatgtggagaaacaagctgtctctctgcttgctg

SEQ ID NO: 3683 - DNA, 122 bp, Homo sapiens
tggtaggaaagacatattaatgccccattatcaaggcttaaacaaaggtcctacatctgacgtttcacaggacattaaaaaaatttacctctagagcacaaacagaatgtggcccagatcgt

SEQ ID NO: 3684 - DNA, 122 bp, Homo sapiens
ctcaccccgcacgctcgggccggctgcagtcctcgggtgcggggagacctcgggtgcctgcgcccaacggcccgctccccgcagcctgcgctgccgcagccccccgccgtcttcccgaactc

SEQ ID NO: 3685 - DNA, 122 bp, Homo sapiens
gggacatggtctgctctgcctagttacatgcagaagctgctgccgctgctgctactgcctcgtaagagcagacccagtatcgcttatagtagtggagtgctgcatatgcatcgttgtaatac

SEQ ID NO: 3686 - DNA, 122 bp, Homo sapiens
tttctgatgcttttcaggggccagagtccagtctgcaacttggactcaaagaaccatgaccgtgtccctggcagagaccatagcccattggtgcaacacagccttagagtctagttccttag

SEQ ID NO: 3687 - DNA, 122 bp, Homo sapiens
acgttgcagtgagctgacatcgtatcgctgcactccagtgtgggagtcagagtgagactccgtctttaaaaaaaaaaaagaatcataagatttttcacttgagggcagtaattcaagaccag

SEQ ID NO: 3688 - DNA, 122 bp, Homo sapiens
cagttcgggaaggctgtaggacccgcagccagtgcaggcactctggacctctcagggtggcgatgaagtttccagcgcggagtaccaggggagcaaccaacaaaaaagcagagtcccgccag

SEQ ID NO: 3689 - DNA, 122 bp, Homo sapiens
gatttcccgccagctaaaatcacgagtggaaaattcctatctgtcctaagtctctgggtgcgaatgaggaacgtggaaggagagacggcggggtgagaggcggcggcccgcgcccgaggatc

SEQ ID NO: 3690 - DNA, 122 bp, Homo sapiens
gctgtgtgttctgggaaaatgacccaccttctctgtgcctccattttctcacctgtaaaacgggctcccaggctggtgggagggtttcaggtgtaagacatggagagtcctttagcgaacat

SEQ ID NO: 3691 - DNA, 122 bp, Homo sapiens
gccgccgccgccacccgcttcctgctccctcgctttcccgcgcgtccttcccgccgctggcgagtggaacccagccaccgccaccgagtccctagcgggccaggagcccccgcgcggccccc

SEQ ID NO: 3692 - DNA, 122 bp, Homo sapiens
tccacctggggtccaggtatccacttaggacctgatgtttacctggagtgtaggaattcacgtggggcctggtgtccaccttgagtgtgtgtatccaactgagtgctggtgtccacctggag

SEQ ID NO: 3693 - DNA, 122 bp, Homo sapiens
agctgcccccgcgaaggtggggcgaggggcggcttttccgggggaaactctctccctggacgcccctcctttccagcctcagctctggcctttctcggcatccccagcttgccttcagtttc

SEQ ID NO: 3694 - DNA, 122 bp, Homo sapiens
caaagtgatagtaaatgcattaagtgcttcatgagaaactctagagtcacagagacaggccgtcctccatctggatgtcactaggacataatgcatgctctctggctcacactgaggacaac

SEQ ID NO: 3695 - DNA, 122 bp, Homo sapiens
tgcaggcaaggcagccgatctttcccggaccgtgtgggccacctccagatatgcaggacacgtccttttccaggtcggctggagtcagggcaccttctaaccttacacttttaaaggacaca

SEQ ID NO: 3696 - DNA, 122 bp, Homo sapiens
gctggaggcgaacctccgagtcgctgcgccacgtctgggcccccaggctggccccgcccccgcccccgcccccactcccgctagaggcccagtcccgctggagaccacgcccccagcgctcg

SEQ ID NO: 3697 - DNA, 122 bp, Homo sapiens
aaagcacctaacgaaaagcatgtcctattcatgctagcaagaaatgaatcccaaaggacacgcaccaagaaccaaagtaaaagaatgtcagcaaaacaggacccatcttttatcatcccaaa

SEQ ID NO: 3698 - DNA, 122 bp, Homo sapiens
taaacctctacaacacgcggtgatccgaacctcaaccacacgcggtgatccgaacctctacgacacacggtgatccgaacctctacgacacgcggtgatccgaacctctacgacacgcggtg

SEQ ID NO: 3699 - DNA, 122 bp, Homo sapiens
acctccatggcaggggctcctctgtgcaggagcccagtgcccggcagatcggggtccctccgtgctgtagtccagggcacggcaaggtgtggatcctctgtgccctaaccagggggcggtgg

SEQ ID NO: 3700 - DNA, 122 bp, Homo sapiens
ctcggctggctgcgaaacgtggactgggtgatgcctcaggagaaaccaccctagtagttccgctccgagggcggaagtgcgcgtctcttgtttgtgcggctgaccagttggcgacatggtgg

SEQ ID NO: 3701 - DNA, 122 bp, Homo sapiens
ctgtcccacctctgggttgaggggtgagtctgtggtgctcctgccccacctctgggctaccggcccctccccgattgagactctgaggctgactggaggcaacgaggagggaccagacaagt

SEQ ID NO: 3702 - DNA, 122 bp, Homo sapiens
tccccgtcggcacacgctgctcgtggtacagccagagctctccctggccagtcccggggccgggctcttaaccctcgcggagcctccgttactgcacatgtgagctgggtgcgagtcccttg

SEQ ID NO: 3703 - DNA, 122 bp, Homo sapiens
aagcatcctctcccgcgcctgggagggcgaggtgcggatcttttcgccttggcagtccctcgctcaaatgtgcgtctctggcaagtcctgtctgctgatagttgatagtgctgccacagagc

SEQ ID NO: 3704 - DNA, 122 bp, Homo sapiens
tcattggaggctcaatctttgtcaatgtcaccatgttctcctcaggtgccaccctcaccccggcccctgactgaggtcaggacatggtgttcttgcccaatgcagacactccacccatgtga

SEQ ID NO: 3705 - DNA, 122 bp, Homo sapiens
atagcccaccctcgaaggtaggcgggtaatcgagctattggctggagccccgccccagggcgaggaggagaaggaggggcaggagggtttggttgagctgcagctgtttgtctgttcgacac

SEQ ID NO: 3706 - DNA, 122 bp, Homo sapiens
ggatggggtgtgggacgcgtgggtgggggacggtccccgcagtggggaggggaggtgccgcgcctggcctcatgggcactgcagccaccctgggtgcagctcctctgctttgggaccttggg

SEQ ID NO: 3707 - DNA, 122 bp, Homo sapiens
tccatctcaaaaaaaaaaaaaaaaaaaaaaaaaaaatcagaaaatgggggtggggaggtgcgcaggtgctagatcaagcaggactgtgttgaggattctggcttttctcctcatacaaagcc

SEQ ID NO: 3708 - DNA, 122 bp, Homo sapiens
ctcggcccgggcttccctaccccggcggcgccctccccaacgagggagaaccgtcaaaagcgaagaagccaggggtaaaccatgggaagtatttttcaagacagaaatatgaatagcacctt

SEQ ID NO: 3709 - DNA, 122 bp, Homo sapiens
catcacctgggttcaagctagcaccatctttctaattatagatgagatccctttcatgtgcgtctgtgtgaagagaccaccaaacaggctttgtgtgagcaacatggctgtttatttcaact

SEQ ID NO: 3710 - DNA, 122 bp, Homo sapiens
gcctgagagggaggaggaggggaggagtttgactgggctggtgtccaggtctccccaggtcgccccgtcgggccagattggtcagccccaggttgcccatcccttctgctgttcttccctct

SEQ ID NO: 3711 - DNA, 122 bp, Homo sapiens
ggcccggctctgcagcgagccggtgggagggcctagctgtggcccaggcggtgttgagcacgggccgggggcgtcatagccggggagggccgggcagcgagcgggtgggcgaggggcgagtc

SEQ ID NO: 3712 - DNA, 122 bp, Homo sapiens
ctgccctcgcgtcagaggagccgtgcaatggcagggggagggcaggtgtgtctgactgcacgcaggaatgggctgaaatgggaatccctctctgtaggcagaaatgaagagcagagctttgc

SEQ ID NO: 3713 - DNA, 122 bp, Homo sapiens
cgggctctgcctgggccctccaatcctaggccctctcgcggagtcccaatcacaggcccgcgcccgccggccacacctcccgccccgggccccgccctgctgccccgccttccctgccgcct

SEQ ID NO: 3714 - DNA, 122 bp, Homo sapiens
cactccgttgcatggaactggcagcctgacccctggcgttaccggggacccacccctttccgcccaggagcctgtgtggatcctgctgccattaacctgccatccacagtgcccatggcgcc

SEQ ID NO: 3715 - DNA, 122 bp, Homo sapiens
gcatgagctgacatcgctcttccttcaaatatttggaaggggcagtttccttattcactacggcctcgaagcagagaatgaggaatactggggcactaaaaggactgagtgtaacttaaaac

SEQ ID NO: 3716 - DNA, 122 bp, Homo sapiens
gggccgagtggccttggaacggtttgaccatccacagagcccagttggcttgtaggtgcccgtggacaattttgtattagcaaatccagtaagactatggttattcttggtggcggaaaccc

SEQ ID NO: 3717 - DNA, 122 bp, Homo sapiens
gcccacacatctcctttgtgtggcacgagaagctggtgaacctgcctattcccaatccagcgctgggtccccttgaggatcttgcgtcctcctctccgagttattaaggatgcaggacgtgt

SEQ ID NO: 3718 - DNA, 122 bp, Homo sapiens
tccagtgtgaactcaggaggggcaggtgtcagaactgggcaccaggactggagccccctccggagaccaaactcaccatccctcagtcctccccaacagggtactaggactgcagccccctg

SEQ ID NO: 3719 - DNA, 122 bp, Homo sapiens
gagcaggaccagagctctcctgccccaaggctgggcttcagctgctctttcagctttgaacgtcctttcccattctccatcatccacattcacctatcctgcctgccccagttaaaatcctg

SEQ ID NO: 3720 - DNA, 122 bp, Homo sapiens
tgcttgtgtcccctggattctccagctttcactttaataaacccagttttgccctccttgcggagcgattatgagttctagtgatgagaaattttttatttttctaagtaaagcgccagcag

SEQ ID NO: 3721 - DNA, 122 bp, Homo sapiens
tggtgtgcggcgtctcaagctcaacacggaggtgcgcagtgtgggtcccctcagcaagcgcggcttctacctggccttccaggacataggtgcctgcctggccatcctctctctccgcatct

SEQ ID NO: 3722 - DNA, 122 bp, Homo sapiens
ctccagccctgcctgtccactaccagtcaatccagagcctcagcaagcagcagctggaaacggggaagagggagcagacaggaagcgggaggtcagctgtacacccaggtaagtgggtgctc

SEQ ID NO: 3723 - DNA, 122 bp, Homo sapiens
cggagcggagcgggtcggaggagcgcgcgggacgggcgacagcagagagtggcctgcgagcgcgggcgccgccacaaaagcgaagaggccgcggggaggcggctcccgaggacgccgctccg

SEQ ID NO: 3724 - DNA, 122 bp, Homo sapiens
tcccacttactctgccattcggtgatggagatcatgccgcactcagcctggggggctttccgggtggaagcgggcaagtggagcgtggcccagaggacgcagctggtacatggtcacgggaa

SEQ ID NO: 3725 - DNA, 122 bp, Homo sapiens
ctgccgcgagagctgcgatccggaaggcgcgcgctaacaacactcccccgccattggctccgccctcaacaaacaagaacgcttggcctgtgcctgggtttgaacccggagacacatgcgca

SEQ ID NO: 3726 - DNA, 122 bp, Homo sapiens
aaccatgggctggggttttgtgagctactagtgccaagggttttctttccaccagaccaccgctgtaaatctcgagggtcttactcattagaagttagaattcacatttgacgtttaaagga

SEQ ID NO: 3727 - DNA, 122 bp, Homo sapiens
ctgtggggtgccgcaacagctgtgaccctggcttgattttgatgtagacttcaagggcgccgtccccagcggggagaacatttttacctcaggagcctattcacattggtagccttggcagg

SEQ ID NO: 3728 - DNA, 122 bp, Homo sapiens
aggcgcgcggcgacggctgcaccgaccttgctgtgggcaagatctggagcaagagcgaggcgggccgtcagggcaccaagatgaagctgacggtgagtgcgcagggtatccgcatggtgcac

SEQ ID NO: 3729 - DNA, 122 bp, Homo sapiens
tgctagatgagctggtggccctggtgaacaagcgcgatgcgctcgtcagggacctggacgcgcaggagaagcagtgagtgggcagtggggtcgggtcgaggctgggccacctgccgaggggc

SEQ ID NO: 3730 - DNA, 122 bp, Homo sapiens
atctggcaggataaattccatttcccaaagttcatgatgctagtgcaactagttttcttccgaagttcctgtaggacctgcatgttggccatttttagatggaatgttagaattcagagaaa

SEQ ID NO: 3731 - DNA, 122 bp, Homo sapiens
ccagcaaaaggcgtcaatctagaatacgcctaaccccggaggttcttccctttccattcccggatattagtaacacttctcgcgggaaaatgccgagataaacattggttggctctctgacg

SEQ ID NO: 3732 - DNA, 122 bp, Homo sapiens
aaaatgcaaatgatgtctggcctacactggctttacaaatatttttaaatatataaaacccggccgggcgcggtggctcacgtctgtatcccagcactttgggaggctgaggcaggtggatc

SEQ ID NO: 3733 - DNA, 122 bp, Homo sapiens
tgcttctctgtgctgataagaaggccacagccataaaatactctggccattccaaatagtcgtcccgtttcttgcaggaaacttcactcatgttgggtctagaagaaaaacatgacaaaaca

SEQ ID NO: 3734 - DNA, 122 bp, Homo sapiens
tgccctctccaggctcttgcctcaataccccagccccgtccagctccccaccccacaccacggccctggagcctcacccccaaatcctggagcctactgcctccaggccccaccccagctcc

SEQ ID NO: 3735 - DNA, 122 bp, Homo sapiens
tataaaagcatgtgtatatgcatgcatgctggtgtgtgtacacatgctggtgtgtgtacacgtggaggtgtgtgcaccctagaccttttttgctatactatccttagaggatgtgtttccaa

SEQ ID NO: 3736 - DNA, 122 bp, Homo sapiens
ttcatagaatcttcccgcttctctcccttctcagcgcgtaaagaatgttctggcagagcacggtggctaaagcctgtaattcttgtgctttgggaggctgagggtcacttaaacccaggagt

SEQ ID NO: 3737 - DNA, 122 bp, Homo sapiens
ggttacaggttttcaacctggtctctccattgtcatggcagcagatagtctaagcatgtccgcttaatttactaagttattagttaacccctatttgcaagaaggctctggttctagccttg

SEQ ID NO: 3738 - DNA, 122 bp, Homo sapiens
ccagaaaggggaggagacacgtgttccgctagcgccgagtcacgtggaaaacgaaacgaacggagcccactgcctcccgcgcatgcgcatcaagctctggcctggcgggagcggagggaaag

SEQ ID NO: 3739 - DNA, 122 bp, Homo sapiens
ggcccggggctcacctgctgaactctgagggtctcacgctccaaagtggcggccgctgttcgtggcgcctggcaaccgcctttgtgacccaggacggcagggcagcccgagccgcggcgggg

SEQ ID NO: 3740 - DNA, 122 bp, Homo sapiens
gcacagggcacggacgcctcccccactcactcggccgtgccagtcgccagcacacccacccgggagcacacaatccctcttgcaaagcgccttggtccatccgcctccctctcccggggccg

SEQ ID NO: 3741 - DNA, 122 bp, Homo sapiens
ccttccctaaagggctttgtagaatagaagccaccttcccctggcttttgtccctgccaccgcatcggactcgccagcttcaggaaggggcctcatccttccgggcggggccgtatggccgc

SEQ ID NO: 3742 - DNA, 122 bp, Homo sapiens
ctagaatctgttgtaacatcacttcacaagatttgttgtgagtgcttgagtcacagttggcgctcaagaaagatgcgttctccttttaaacacaaaaatgtccattgatacagcagattccg

SEQ ID NO: 3743 - DNA, 122 bp, Homo sapiens
ggcgcacacagcgggaggggagggagcccaggatgtgcacgcaccctctccctcatccaccgctgtcacctcctgctgctcttcctgctgctcgtgtactcgttaggtgcggacccgccacc

SEQ ID NO: 3744 - DNA, 122 bp, Homo sapiens
acatatgcagacgtgcactcacatccatacacagacacatgcacacacgtcacaaagacacgtctgcacacgtgcgttttatatgtatgtaaatcagaacaagaccatggagacagagaaag

SEQ ID NO: 3745 - DNA, 122 bp, Homo sapiens
ggcttggaggggtgaggggccctgttagtctgactttgaagaagaccagccttccagactcgcttggtgccctgacaggtatgtgtgctcttctctctcccacctaacagccccttttggga

SEQ ID NO: 3746 - DNA, 122 bp, Homo sapiens
ccttgaagtctctgaacagtctggggattcaggacctgattctaattgcttaaaacaactcggaggcaaaagatattttccaagaggagatgcatgctgtgtgcagtctcgatgtgactgca

SEQ ID NO: 3747 - DNA, 122 bp, Homo sapiens
tgtactgagttactggtctgaaacattatcaattgcactgtggtatgcatacagagcttccggcagagtgtgtatccagtgagtcatttgagaaatggggtgtctctgccaggcattctttt

SEQ ID NO: 3748 - DNA, 122 bp, Homo sapiens
cagtctgataccttgccagagttcaggaaatctaaacttgaagatttgtgtgtgtgtgcgcgtgtgtgtttagtatgttttgttggaaatttctgaatgcaaaactttgcccacattctttg

SEQ ID NO: 3749 - DNA, 122 bp, Homo sapiens
atttctatggaaaattggatttttaaataaaatacccacaatatcttgaaaatgcacacacggcaaaggcagtcactatgggagtgggaactaaagagagagcaaatgcctctgatgaagat

SEQ ID NO: 3750 - DNA, 122 bp, Homo sapiens
gccacaagcggaggggaggtgcgtgatggtcgcgaaacaggcgcgctttctcagactccccgcgactagggaggaagggtcccgcgcgggttgcccttttaagccgcagcttcctgcttgcc

SEQ ID NO: 3751 - DNA, 122 bp, Homo sapiens
ggtggggaaaggctgaggcacaatgtgtcagtatccatttccacattgtactgaaactctcggcactggaaattgtctcatcagaaggaacatactggaagggtaagacccgatgcaaggca

SEQ ID NO: 3752 - DNA, 122 bp, Homo sapiens
tttctcaactacacaaaagacagtctaaaaaattaagtctccatttcggttaagactgcccgtagtttcggtttttatgtagacccaagagggcaggctcggcgtccgcgtgccgcgtagtc

SEQ ID NO: 3753 - DNA, 122 bp, Homo sapiens
cgtgaccgtgagtgtgcgcgaccgtgtgtgagtgcgcggggggggacgctgctggatctgcgggggtgggggagcgcacctgcgcacaggctccgcgagctgcgccgtgcgtgggacccgaa

SEQ ID NO: 3754 - DNA, 122 bp, Homo sapiens
gtgtgtgtgtgtgtgtgtgtgtatcagagtgggtggcggcgtctctgctcggcagtggcgcgtgtggcccgccccgcgcgcgtgttctcgcgggccggggcagggcgtgggccccctccggc

SEQ ID NO: 3755 - DNA, 122 bp, Homo sapiens
cggtatcgtgggggtcctgagcccttcctgtgagatccgggccgactattgtatctgtgtcgcagcggctccgcacaaaatggcggcgggcagacggcgggggcgggaggaggttgggggac

SEQ ID NO: 3756 - DNA, 122 bp, Homo sapiens
tgtgtgaggtggtccttattaaattcttatcagaacacttcagaatatttgaactggccacgacctgattgcttactgatatctgagtgtcccttttccaagatagaaatgtagttccttgc

SEQ ID NO: 3757 - DNA, 122 bp, Homo sapiens
cactccaaggccctgcatggccgggagctgcgtgaccttgtcctgcagggacaccacacgcggctacacggctccccgggccacgccttcaccctcgttggccgtctggacagctgggaggt

SEQ ID NO: 3758 - DNA, 122 bp, Homo sapiens
cttaccggaacccccgggacgcgccggcagtctccgcgccgcgtccgcccgggacgcccgcgacgcccgccctgcgcgcccggctcggcccagctcgacccagcctcttctcggagcaactt

SEQ ID NO: 3759 - DNA, 122 bp, Homo sapiens
ggaagttaggaagttggcttaaggtcacacagcaagtcagccatgctggggcttgacccccgtccagatctgggcgggcctggctcagagtatgcggcgtcctgaaacttggcatctggtgc

SEQ ID NO: 3760 - DNA, 122 bp, Homo sapiens
acataaaacaataacatcagcatctattattttcatcaagcattatgcactgttgataatcgtatgttcacacccacatcaccacaaacatgtaagctctgtggtgtccaatgaatctgcct

SEQ ID NO: 3761 - DNA, 122 bp, Homo sapiens
ccacgctgatggttccaatgccactgagagcaggcttttcttttcctggtggtgctccagcggcactccccatcctgagggacacagcacggcttggcgtaaggagggaagccaagaactca

SEQ ID NO: 3762 - DNA, 122 bp, Homo sapiens
taaaatgtaaaataaacccctgaggaatgagatgtctatagggggtttgaaaagcttggacgaatccctgggaatctaaaaagccatgtgcatgtgcagggctacacacattcccaggaaag

SEQ ID NO: 3763 - DNA, 122 bp, Homo sapiens
ccctactgcgccgaatcccctcctcccagcccccagcccccagggaggggcctggactgacgggcctgggcgtagctcctacccccgtgacattggccataaaactgacacccgtttgtgct

SEQ ID NO: 3764 - DNA, 122 bp, Homo sapiens
ccaggctgggaggtggaggagcctcagggagcccatggggcccccagcgaccaccacccacgtcccacagctcccagcccaggactacacaggcaggtggacaggcatggctgggctgcctc

SEQ ID NO: 3765 - DNA, 122 bp, Homo sapiens
attgggtcagggtgtggactctagggtcaggcctgtgttcaaactccaactccaccactacgaccaccttgggaaagtcattgagcctctttgagcttcagtttcctcatctgtaaaatggg

SEQ ID NO: 3766 - DNA, 122 bp, Homo sapiens
gcctcggttcgctcttctgcaaggtgcgaatccagagcctccagctcgggagggacctgacgtgccggacgcgtccagctcagaactcgaggcgcggtagacactcagcaaaggcctccggc

SEQ ID NO: 3767 - DNA, 122 bp, Homo sapiens
tgtaaccaaggatggtcacccaggctctgcacccaaaggcctaacagggagacagacccacgtctgtgtggtcaggactgtgagagggcaaagaaggtgggccaggcacaggacccaagtcc

SEQ ID NO: 3768 - DNA, 122 bp, Homo sapiens
cccgccttgtccaaagggctcatcaaagccggtttaccggcggcccaggaaggaaatgaccgcccgccgcagccccgccgactgcctttcagttcagtgctttcgaaaccacaagggcgggc

SEQ ID NO: 3769 - DNA, 122 bp, Homo sapiens
attttgtcaagcctcagaggaaataggcagggcttctgcttcccaagagagacccccacccgccccatcacttcttttctctgatgccatttctttccgattcaaatttctaagccctttgg

SEQ ID NO: 3770 - DNA, 122 bp, Homo sapiens
ggcaccaagtgtagctgttttacttttttggaacacttttacagattctgcactgcacaccggtttgcttatggatgtaatttcagttgtgtataatcaccttaacagaacgggaaaaaccc

SEQ ID NO: 3771 - DNA, 122 bp, Homo sapiens
gctggcaatgcattccttttcgtcagagtcgagggcaaactcgctgaaatctgggtgacccgtgtccttttccggagagcaaagcagagaagcgagagcggccactagttcggcaggaaatt

SEQ ID NO: 3772 - DNA, 122 bp, Homo sapiens
ggccagcgggtggcctgagtgccagaggccgctggtccccactggccaggaacaaagtgccgctgggcgcccctggcgggaggccagacaccatggcctcgtggccctgctccctcccagct

SEQ ID NO: 3773 - DNA, 122 bp, Homo sapiens
gctccagggccctgccctgactcctgggtttgcaaccaggtggagcatgttctggaagaacgccgcgtctgctcgctctcatccactgcctccctggggctgcacacggcctgtgaggtcgg

SEQ ID NO: 3774 - DNA, 122 bp, Homo sapiens
gtacctgtgcacattgcgcatgtctctgtgtatgcatgtgctttgatgcatgttgatgtacgggtgtatctgtgtattgtgtatgcacacacgagcatatgtgtacatgaatttgtattgca

SEQ ID NO: 3775 - DNA, 122 bp, Homo sapiens
tgccgggggacgccggaagctcaggaggctgtggctgtcgtggggcaccacgggttctgacgctactggaggggtgtccatggcaaccgatgccgcgtgaggatttccgctgtttgctgcca

SEQ ID NO: 3776 - DNA, 122 bp, Homo sapiens
acacccaaactcagtcaatctcctcctgcatcatttcagggcggacatgcagatcgtggacggcagtgcccagtgtccaggcctagccagtgagaagcaggaggacgtggaggaggaggacg

SEQ ID NO: 3777 - DNA, 122 bp, Homo sapiens
agagatgttgcagatcagattgtgtccacagaaaaccaaaagaactggagacagagacaacgagcaaaagtgtgacctaatgttgactgcctggaagacccagtagggcacctttcccaatc

SEQ ID NO: 3778 - DNA, 122 bp, Homo sapiens
tatccactcctcatcttcctaaaactgatgcttctcttagtgttatggtctcaatgtttacgtacccccacaattcatatgttgaaatcttaacccccaagatgatggcattaaggggtgag

SEQ ID NO: 3779 - DNA, 122 bp, Homo sapiens
gcttggggggatggagagaggggcgcccgccgggggagttccgggagcctcggtgcctcccgccgcagctgcagcgttcctcccgggaggcggcccagcccttcatcctcgccgcctgagct

SEQ ID NO: 3780 - DNA, 122 bp, Homo sapiens
aggacctcactgaggagataacagtgaagcagagaactaaagggcaagaaagggcccacccggaaagattcaagccttccagacagaggaaacagaaaaggcaaagtggcagaatgagctct

SEQ ID NO: 3781 - DNA, 122 bp, Homo sapiens
tgcaccctaagattgtttttctgtgaaattgggtaaccactggtcttgacaagtttaaaacgtagttgaataattcgagtatatccataggaaaatcgatgtaaaagtatacaagtaactta

SEQ ID NO: 3782 - DNA, 122 bp, Homo sapiens
cgggctcacattaagcaatttacacatggtcatttggcaggaaggtggcatgggatcccacgtatgacacgcctcattctgtgatgaaacaccccctcagccacccccatctctgccccact

SEQ ID NO: 3783 - DNA, 122 bp, Homo sapiens
aggacctgccttggggtagggggggcggtgtgggcgttccctcgggcctcggctgtcacgcgaacagtaaattcccgggcacaccaggtcagttggccagcgtaaacacatgaatcccatct

SEQ ID NO: 3784 - DNA, 122 bp, Homo sapiens
gcgcagcctccagtgagcccgcggcatgccgcgcggcctccccacacacgatggcgatgtcgcaaccacagtagaaagagtggcgctctctactgtcccggaattcttgaggccggaagaat

SEQ ID NO: 3785 - DNA, 122 bp, Homo sapiens
gctggggaccgggttgaggtagggcaagtccctgtccacctgcctgccagtcaaaagatgcgaagccaagacaattacccgtggtcctagcgaaggaaacactagcggccacaggctgtggt

SEQ ID NO: 3786 - DNA, 122 bp, Homo sapiens
ctttgctttcttatctccagctcacacctttaagtcttatgtagttaaaggacatttatccgcctccttggagaacacagccctccagtgtctcctgcagcctggagcctgggacattctgg

SEQ ID NO: 3787 - DNA, 122 bp, Homo sapiens
atgttaggatttttgatgaaacgttatctgctaatcacaggaaaagcaaacctgaatctacgagtgttcctacaggcgggggatgtgggtaggcgccctcagttattttctctttcatttaa

SEQ ID NO: 3788 - DNA, 122 bp, Homo sapiens
atctgagggctctgtctccccagtggcctcaggacagagcaaggcccccagcaggtgcctcgagactgccacacacctgccagaagcattcagaggagtctgtgagccctgagcctgggctc

SEQ ID NO: 3789 - DNA, 122 bp, Homo sapiens
ctggcacatggtaagcatcaacaaatgtgagctgctacaaatgtcatgatgaggttgcttcgatctgtttgtggcttgtgtgcatctgggtctgacacactatctgttagtgtttgtgtctc

SEQ ID NO: 3790 - DNA, 122 bp, Homo sapiens
ctaacaggtgcgactatgggtcagtaataaacacacttttcaatatgtcaagtaataacacgatattcgcgctgacccaatcgcaccccacctctttcaacgccctgggctctcccctcgct

SEQ ID NO: 3791 - DNA, 122 bp, Homo sapiens
accttgggctgggactggctgagcctggcgggaggcggggtccgagtcaccgcctgccgccgcgcccccggtttctataaattgagcccgcagcctcccgcttcgctctctgctcctcctgt

SEQ ID NO: 3792 - DNA, 122 bp, Homo sapiens
ggggggcacacctttcatcccgcacccctacgacacctcatctgtaccccaggccgggggcggggaggagaccgcccaacagttctttttggaccccccaagggtctccttcttctagtccg

SEQ ID NO: 3793 - DNA, 122 bp, Homo sapiens
cccaggccacgccaacgcgggcgcagggctgagtatgcgggaagccacgcagcgactgggcgtactcctaagcttctggaaaggcattctcacgccctgctcctcctaccctcctccaaagt

SEQ ID NO: 3794 - DNA, 122 bp, Homo sapiens
cccaccatcacctccctcgttcaaaactgtaagaagcattcgacggagactttgatttgacgtagaaagatcgtgcctgctatggtgaggctgcaggcacgagccattaagtaaccgagtat

SEQ ID NO: 3795 - DNA, 122 bp, Homo sapiens
ctccgaggggctcaaccgcctccagggggagccgcacatggagcctgtgccgccgccggccggttgtggcctggaccccgctcccgggttagcccaggaggaattccccctgcaagtccgaa

SEQ ID NO: 3796 - DNA, 122 bp, Homo sapiens
aaacaaagcaacaaccaggtatgattgttcatacgtagcaacatggctggaaacacacaccgcaagcggctgactggccactgctgcggcctcccctggaccctccctccaggctctgggca

SEQ ID NO: 3797 - DNA, 122 bp, Homo sapiens
ggcctccgattggctgtcgggcctagagcccgcccagaattggaccgttcgcttgtcgctcgggtctggctccacccccagagggagcctagaacctggtcgcagtttttagagactaccct

SEQ ID NO: 3798 - DNA, 122 bp, Homo sapiens
cccgtcggtaccggctgggtttggtgccagctatggcgagtacagaagcctggccggtcccggggcaggcaggcgctcgctggatgttattcgactgactggatatttgctggaaacgttaa

SEQ ID NO: 3799 - DNA, 122 bp, Homo sapiens
acatgaagtgatgaacactctgtaaccacatcttaaacagaaagccattttctctgagaacgaactgattggtgatgtccaattaatacacatacacagcacttgtcacattgttgatgcct

SEQ ID NO: 3800 - DNA, 122 bp, Homo sapiens
cgtacaaaagccatgcctgcggggagagggagaaaatttcctacaggagcctcaagactgcgtttcaggaagccctaggacccactgatcctgcagctgcgcctctcactcgcctcaggttt

SEQ ID NO: 3801 - DNA, 122 bp, Homo sapiens
ctggccgagcgccggcccggcccccgagctccgttcctccgcgcccagcgccctccaggccgcggtgtgtccgcccctgccccatgctttgccttcggagctgctggagacaatttaatcca

SEQ ID NO: 3802 - DNA, 122 bp, Homo sapiens
ccaggactgtgagaagtcagcgtctgatgctgaagccccagtctgtgctactgtgtgacacggccccagccgacgaagacagtgcccaaaccagaagacgggcaggaggtggggcagggtgg

SEQ ID NO: 3803 - DNA, 122 bp, Homo sapiens
tggggtcgctagcaagatctgggacacgctgaaagttaataggaattggctgccctttgccggcgcaacccaacgtacaaagatgatcttttctgaggctccaccgccgcagagcccttcgc

SEQ ID NO: 3804 - DNA, 122 bp, Homo sapiens
ccagccagagccgcactggtctgagcgatcgggtgacacaggcttgaatttctcctgaagcgtttgtgttctctgcaggggagagagggatggtggagctggcatttgaaagacgctgttac

SEQ ID NO: 3805 - DNA, 122 bp, Homo sapiens
ctcactgagaggcgtcggccagcgtaagaggatacctcacagttatgcaacccgggccagcgaggatgggcccgcagcccggccagccaaaacaagcaccgtccggctccagagtgtgaaat

SEQ ID NO: 3806 - DNA, 122 bp, Homo sapiens
tccgcaggctggtggctggcaccgctccacccaacaaggagattagtatcctaatctccgcggcactaatgatttaggtgctgccaggacaccggcgtctgcaccaggcctgtctgaatgtg

SEQ ID NO: 3807 - DNA, 122 bp, Homo sapiens
aattaagtgaggggcagaggacaaggagaagggaacctttcgggagcgagaacagaggagcgagtgggggtcaattttacaattaggggagaaagctgggggtgaaacttacacaagagggg

SEQ ID NO: 3808 - DNA, 122 bp, Homo sapiens
tttatagaaggaggatgagcctgacggacacccgtgatttttatcatggctgggagtggacgccatgccctgccttggcagcatcctgccttcccacttgtagtgccgttcccaccacaccc

SEQ ID NO: 3809 - DNA, 122 bp, Homo sapiens
catcgcctcgtagctgcccccctcctcctcttccatgctttcctccatcctgctggcccccggcacccgcccgcctcacaggcacctgccgcctgtctcaaccccgggccagcgggcaccgc

SEQ ID NO: 3810 - DNA, 122 bp, Homo sapiens
cccacgtcgtccactgtgtcccctgggtgtgaactaaggtcacccttagggggcctttgccgagagtctgtttgcttttccctggaacctgcgaggttctggccagctcttgctggccatcc

SEQ ID NO: 3811 - DNA, 122 bp, Homo sapiens
aacctcccaatgagaactgtaacaacaacagcccagaaagctctctgctcccgagagctccggctctccctccaccacccagcgtggcgcccagcactggcgcagcccagtggaccgtgcct

SEQ ID NO: 3812 - DNA, 122 bp, Homo sapiens
ttgtctcgtgaccccaagtcaccttaacgtggctgggtggcggagtctgaggcacaggcccgctatgccccggaattttcgcgtccctccctcctgggccccgccccagcccggttgcctgt

SEQ ID NO: 3813 - DNA, 122 bp, Homo sapiens
gtttgccgcctgccgagcggttcggttctcggctccctggcagccggccttcaggtcgggcgtcttcgttggtgacttctgctttggccctcccggtgtggccgctggttgggctgcactgc

SEQ ID NO: 3814 - DNA, 122 bp, Homo sapiens
gatgacggccgtggcgcaaagcgttctggggctcgtggttcgcggggtccatggggaacgcggtgtcgctggttcagatctcgcagagctcagagtcctgcatgcctcagtcctcgcctcgc

SEQ ID NO: 3815 - DNA, 122 bp, Homo sapiens
tacaacactctcaaggggtacggtcatgaaagtctcagaaaactgtaagaactccctgctcgatggcccccttctcccggtagaacacctaggcagtgctggggtgatagcagggaaggccc

SEQ ID NO: 3816 - DNA, 122 bp, Homo sapiens
cttcccgccttgcagacaaatgcgctcattgtgccactccagtccctggatcctatgcagcgggcatttcctgcaaggagctgctgcatgcctgtttccctcgccgcctgccccaacccgaa

SEQ ID NO: 3817 - DNA, 122 bp, Homo sapiens
accccaaccaccctctcagtgaaggttaagaagtggggaaaaggcctttccctccacggacgctgtgcgtgccctgctggagcagcaagtacccacagtgcggtagcacggagaggaccact

SEQ ID NO: 3818 - DNA, 122 bp, Homo sapiens
tggctcattgagcaggctggagtcaggctctctgactgtgactgggtaactcttcctctgcgttaggagggctgagaagtgaaccgtggctaggccgggctccatttcagaacacgtagctg

SEQ ID NO: 3819 - DNA, 122 bp, Homo sapiens
agttgtagcatcttaagcaagttatttgatatctctgggcctgtttattcacctaaataacgtgtgcaggaatgccaccttggagccctgtgatgggaattcagtaatataatgagtgtaca

SEQ ID NO: 3820 - DNA, 122 bp, Homo sapiens
gtgggcactttcttaaaagcctgaagggaatgtagacattccgacatctggtaagggagacgctctccatcgcttcccccgggggcgtcaccgccccctgatgccccgccctcctcacgact

SEQ ID NO: 3821 - DNA, 122 bp, Homo sapiens
tacccatgtttgtgactcacacatacatgtccatggcaccttaatgtgtatgtgcacacacgggactcctgcattgttatggcatacatacatttgtaacctcacacacatgccacatatca

SEQ ID NO: 3822 - DNA, 122 bp, Homo sapiens
aagagagcaaagaacatgtggccaactttaatctacatacacctaaaccaacagatggagcgcctgggacacaacaactatccttagactttccacatcaacaatctcggaacacttaaggc

SEQ ID NO: 3823 - DNA, 122 bp, Homo sapiens
cccagaccacgtgcacacacagctgtttctgacatgatgcatcctgatcctgcaaaggcccgagccatctgcagaggttggggtgggaggtccagccccactcctgcacaggtgctcgcacc

SEQ ID NO: 3824 - DNA, 122 bp, Homo sapiens
ctcccattaaaaagtctagctctactgagtgacaagctgaatgactgtgatttaccaaaacgtatttgttatctacctatcaccaggtcattcactcatattgattgaagttttctgttctt

SEQ ID NO: 3825 - DNA, 122 bp, Homo sapiens
gggatcccatgtgcagattccactgctctgaatgattccaaaacaccacccaacccgacccgactttgtttctgaatggcccagctttgagagagcaagcatttgggaagtgagataagcta

SEQ ID NO: 3826 - DNA, 122 bp, Homo sapiens
atctcgtgtgcaggttcgcactccggctactttcaggcctctagggagcccaggtagcggcgcgcacgcgcacgcgcacacttctccctcgctggtcttcaggcccggcccgccctgtccag

SEQ ID NO: 3827 - DNA, 122 bp, Homo sapiens
cgctgctggtgctgtcccaggtccgggagcgcgaggttccgcccccggtgcggggcggggcgacagctgcctccagcaggcagtgagcaaaacccagcaccattttttggagcagggttgag

SEQ ID NO: 3828 - DNA, 122 bp, Homo sapiens
agcatggagatttatcagcaaaggacgacctggacaaatgtgcccacacatcctctcaggcgaggagaatcgacgggagagagaggccgacccgtgttccccgtgttgctgtgtacggagga

SEQ ID NO: 3829 - DNA, 122 bp, Homo sapiens
tacaaaagatacttaaaagggctcctggggtacacaagcccagcaggtcctgagtgaagccgtgggccctccaaatgctcgttttatagcaacctctctctaccctagttctccaaattcac

SEQ ID NO: 3830 - DNA, 122 bp, Homo sapiens
actctgaatactgcttggggagactccattgcaagtcccctgtcttgataaatgggctatcggtcagcagcaggcaaagtgaaccacaatattgggtggttacactcctaggatcaagcaat

SEQ ID NO: 3831 - DNA, 122 bp, Homo sapiens
ctggtaaccaggcacccatatcctagagtcagcgccgtaaacagctcacttggtgggagacgctcaagagagcaagatgttctcgtgttgcttctccactttgagaggttgctgcttcagga

SEQ ID NO: 3832 - DNA, 122 bp, Homo sapiens
ccgtgaaggaatgacattgctgaagactgagtttgcacttcacctctaccagagtgtggccgcgtgtagaaatgagacgaactttgtcatctctcctgctggtgtgtccctccccctggaga

SEQ ID NO: 3833 - DNA, 122 bp, Homo sapiens
cgaacttacatgctgttgtgttttccctccagccccagcggattggacacattcagaaggcgggtccgcctctttcctacttgctggttggcgaagctgacctccaagggcggtgcccggcc

SEQ ID NO: 3834 - DNA, 122 bp, Homo sapiens
gggtctcctggccttcctgccttcctgggaggtagctatttggcgacggtggaattttcccgggacaggcccctccctcctgggctgggattctcggttcttccccctcctcccagagctgg

SEQ ID NO: 3835 - DNA, 122 bp, Homo sapiens
accacagcttctgaagtcaccctccacatgcagctccagtgctttccaactcattctgttcgctcccacactgaaaagaggcctttctgggtgcaacatgaggccagccccctctgcacgtg

SEQ ID NO: 3836 - DNA, 122 bp, Homo sapiens
ggcatctagcagccgaagcgcctcctttcaatccagggtccacacatccagcagccgaagcgcctcctttcaatccagggtccacacatccagcaggtgccgactggggcaaaactcccaat

SEQ ID NO: 3837 - DNA, 122 bp, Homo sapiens
cccccggcgggtctggcgtaggtacaggggtctcaactgggcgactgaaggccgtagtagcgtcttggttggtccgtaagcttttttgagatagttgttagcgtctaaaaggtacgacgctt

SEQ ID NO: 3838 - DNA, 122 bp, Homo sapiens
atctccagcccttggcaccgtgtttaacacacagtaggtgtccagtaagtgcttgttaagcgcacaaatgagtaagtggcaataacccttgcagtcatttaatacagtccctctgggttctc

SEQ ID NO: 3839 - DNA, 122 bp, Homo sapiens
ttccagttcctcgtctgtttcacctttcctttcctctgacactttcttggtagttccctgcgtccccaagtaagcctgcgcagactgggaagtctgggaagtcggagaaggaaggcgctacc

SEQ ID NO: 3840 - DNA, 122 bp, Homo sapiens
gctcgttcagcagcagcttgttctggtcctcgagctcggcagaggagcgccgcagcagctcggcctcctcttcgacaaactgcaggtgtcgccgcagctctgccaagctctccccgcactct

SEQ ID NO: 3841 - DNA, 122 bp, Homo sapiens
ccttctcggccgctccctgctttcgggccctgacttctaagtgggcatctgggcccgagtcgtcagcgtcggggcggttgtgggatcctggcctcggcagcgtccacacccccgccgggaag

SEQ ID NO: 3842 - DNA, 122 bp, Homo sapiens
aacctacgccgcatgctctgcattacgccagtcccagggacaggataccttctgcagggccgaccaccgcggccccgcgcttccttccgaaaggaaacctcccctagccttccgcccgccgg

SEQ ID NO: 3843 - DNA, 122 bp, Homo sapiens
ttttcctcgggtgattcaggagctctgggtgtcattaggttgcattgctcattcccagatcgagcggaaatcccagcctggcgtctcccaccagcgctcacgtgcgtatctacagctcatac

SEQ ID NO: 3844 - DNA, 122 bp, Homo sapiens
gtgtttttcctgcctccccttactttttctctctaaaagattaacattaaaggaaagcatcggggttactttcatttacttatcaaacatgtgaacattgattttagttatttaacctttgc

SEQ ID NO: 3845 - DNA, 122 bp, Homo sapiens
caaaaacggatggacacggggcagcgtggccggcagggatgaaggagggagccggcctcccgctgcctacgcgggcttcagggagaccacacaagttctcggggtctcagttcccccacacg

SEQ ID NO: 3846 - DNA, 122 bp, Homo sapiens
accaggcagtgagcctagcaaccatacatcgaaggtgtcgccagcctcagtgccggtgggcgtctgcaccaggaatagctaaagccgacgacatctagccacctcgagcgccagggaagacg

SEQ ID NO: 3847 - DNA, 122 bp, Homo sapiens
tgcacacggggcggggccagtcgctagagactacaactcccggaatgcagcggggcctatcgggcttgcgattgcccggaggacggcatgctgggacgtgtggtttctaagcgactggtact

SEQ ID NO: 3848 - DNA, 122 bp, Homo sapiens
acgcctgtagtcccagctattcgggaggctgaggcaggagaagtgcttgaacccgggagacggaggttgcagtagctgagatctggccactgcactccagatggagcaacagagtgagactc

SEQ ID NO: 3849 - DNA, 122 bp, Homo sapiens
gcggcggcggcggcggaacgcgcgggcaggttgccctttcggtgggactaaattctgcggcggaaggacacagattcagagtcacattttaagaaacctgatgaccaatggggacgcggcgg

SEQ ID NO: 3850 - DNA, 122 bp, Homo sapiens
gttgcacacccgcgggttgggagattctggagccagaaggacagccgaatggccttcgcccgccctgcccctcgcctgcttcagaagcccccggaaacgccccagtctgcgacccgggcccg

SEQ ID NO: 3851 - DNA, 122 bp, Homo sapiens
cttggaaagtggaggactcggggattcgggagcgtttcaggcctggggaaatggaagggtcggggacctaggtgaaaggttatttgccagaaatgtcttggctttttcatttattctgtctt

SEQ ID NO: 3852 - DNA, 122 bp, Homo sapiens
tttgggagaactgagaaaatgataccaggcaagggaaggatgagacaagtaagccaagctcgtggtgaccctgtagcaaccacagcctcagagacctgctgggatgagaaaaagtagtcaaa

SEQ ID NO: 3853 - DNA, 122 bp, Homo sapiens
gaaggctcagcgtgatcagacaacacggacacttgatcttctgagatcccaatttgggaacgttaacacggaaaccctagccacgtgctgacaagcaggccctgggccacattctgccccag

SEQ ID NO: 3854 - DNA, 122 bp, Homo sapiens
cgaactcccggcctcaagtgatctgcccaccttggcctcccaaagtgctgggattacgggcgtgagccactgcacccagcctaatttacacacatttaaacacgcgtgtaaagggaggggag

SEQ ID NO: 3855 - DNA, 122 bp, Homo sapiens
ggaagttggcgagggagtcctcttccgttatccagcgagagcgctgctctggctgcctcccggttctaacctagtccctgcagaggagtgatgtaccggcagggacattggacagaggccgt

SEQ ID NO: 3856 - DNA, 122 bp, Homo sapiens
ctctgtccttacaatgaagtgctgaaccatactgtgactgggggaactttgaaaacatcacgttaagtgaaagaagccaaacacagaaggcttccatttatatgaaatgcctggaataggca

SEQ ID NO: 3857 - DNA, 122 bp, Homo sapiens
gagagagaaagaagatccaagcctgggacagggctcagggctgatgtcctgtacccgggacgggggctctccgcaggacacagagcccacccatgatgcctgtgaagtgggtaccagtgctt

SEQ ID NO: 3858 - DNA, 122 bp, Homo sapiens
gcagggtagcttgggcccagtgggcggtgcttctcctgtcagcatgtgggcggggtagggcggggaccagcagccgcagagccgtcctcggcggtggcgacgacgacgacgttgctcagtct

SEQ ID NO: 3859 - DNA, 122 bp, Homo sapiens
tgcgcgtgcgcgtttgggcgccttttccgcgtcactccgtaaccggaagtgaattggccccgaggctgatggctccggaaacaccaattcgctgtctccacgcatgaggagacgtgtagggg

SEQ ID NO: 3860 - DNA, 122 bp, Homo sapiens
aggagcgctttccatttggaggcagtgtgagcacacgctggagtgcagcgttccaaagtccgcccgaaatggatgctgcgtccacggccatcacctgtgcgggaacacctggtttccttaag

SEQ ID NO: 3861 - DNA, 122 bp, Homo sapiens
actggagactttgcttctctgttcaccccctccacagtttaccttcctgctctgggccagcggttgttctagaagtatggttggggaccactgggagttaccaagaccctttcagggggtcc

SEQ ID NO: 3862 - DNA, 122 bp, Homo sapiens
tacagtgaagattgtcttgtgttactttatatcccaacataaacctacgccaccctcagacgaagagggtatctaacactgaataaatgctgaacctatttagtagttaaagaaaaaagaga

SEQ ID NO: 3863 - DNA, 122 bp, Homo sapiens
cttcacacaaaatcaaataaaacgatatatatttttcttttacaaaaggcagtgaaaaagcggttaaagcatggattaaattgaaatttttcagtgagcctttgacattcaagaataactca

SEQ ID NO: 3864 - DNA, 122 bp, Homo sapiens
ctaatgactttgagtgctgagctgctcaccctgggaatttatggaaaccatgcacagaagcgtcacctggaggcacataaatattgtaggactggaggttgggctgtgtcagcactatttgg

SEQ ID NO: 3865 - DNA, 122 bp, Homo sapiens
ctcccacccacacccggccgagactcgggcttcccccgcgagcgccgactgcagcccgcgcgacgcgcgccccattcatgcaggccccgcctcccgcccagaggcctcacaggcggcccggc

SEQ ID NO: 3866 - DNA, 122 bp, Homo sapiens
agctcttccgaggtcccggccgggagcctgtcccctccaggtggcgcccccgcgtgactgcgctttacataatcgcggcctggagcgtcacagtggcgtactccaggccagaccgaatcaga

SEQ ID NO: 3867 - DNA, 122 bp, Homo sapiens
atagaatagctcggccgggatcacccagcttgtgagtgacaccgagcaggtactggaacccgggtttgtttgacctcagcgcacaggctctaaacctctgctccaactcaaagtatgcgcca

SEQ ID NO: 3868 - DNA, 122 bp, Homo sapiens
cgcctccatggagaccgcacagaacagcgttccggccgggtctggatctgagctcaggaacgcggggcagggctggggacagctcggtgacgcgacccagggtcaggataacatgcagggcg

SEQ ID NO: 3869 - DNA, 122 bp, Homo sapiens
accggttatgtctgcatctcacagagacagcggctcggggacctgccccaggtcacacagcggggagacagctgccaagcccactgaggttacatggttctctctttgggtggtggagtgcc

SEQ ID NO: 3870 - DNA, 122 bp, Homo sapiens
gtgaggacccctgtccggtcttggagatgcgcggggccctcggagccttggcctgggaggcgctcccgggggcggggaggcgggggtagcgggtgattggtgacacgcagaaggttgggtac

SEQ ID NO: 3871 - DNA, 122 bp, Homo sapiens
cacagttgaacaaacagacacggtgcaaaggaaacgccgcacacttccacctttccttcccgccagcgccccaccaaacaacctgatcggccacggcgcagcaaacttttcacgcacctggc

SEQ ID NO: 3872 - DNA, 122 bp, Homo sapiens
ctcaaaccccatgaaacatcccagaaatggtggtaggtacggtctaaagactcttcagtccggagtaatgagcaaactcgtcaagggcagtagaatactggtacatgagaagggagaggcca

SEQ ID NO: 3873 - DNA, 122 bp, Homo sapiens
tccctgggaggggctgggctgacccgggcacctgggctgggggggcactcacatggctaccggaggcccccacgtgcggcgccccgcggagacaggggttcgcgttcagagctggtggcgga

SEQ ID NO: 3874 - DNA, 122 bp, Homo sapiens
gtgttgcctaattcccagggccccgaagcacttatccaattgagacccagaactgtagatcgccaagacagtcaactcattcccttgtgcccaactcaatgtattgcacttctctccatctt

SEQ ID NO: 3875 - DNA, 122 bp, Homo sapiens
gattttgcaggtggagtggaggttgagaatttgcattttttcagggaatgctggtgctatcggtccagggaaaactctctgagaaccagctagtaaatatggagatggaagcaacttggcct

SEQ ID NO: 3876 - DNA, 122 bp, Homo sapiens
ggggacagaatatcggagacggccccattccggaaaatgctggcacatgcagctcagatccggaatttgactgtttattcctggaacccaggctccctctcacccgcattctcgaactccag

SEQ ID NO: 3877 - DNA, 122 bp, Homo sapiens
ggtgatccaaggggtagaagttgaccagctgcccgtgctgggcctcgagcgagagccacgcgtcgccgagtggcagtgcgcaggggaactcgtgggccacgtgcagctggaagacgcggccg

SEQ ID NO: 3878 - DNA, 122 bp, Homo sapiens
ctgttagcctctcgctggtcggcgggagaggggaggaggccagcgcctgatcggccacaccgctggagtcctgggctggcagcggtaaccttatccttgtgcaaaaatctgcttcgtatggc

SEQ ID NO: 3879 - DNA, 122 bp, Homo sapiens
gtacagtcatctcatagaaatgaagaaactttataggattcctgaggagtgctgagtgcccgcttgaggtttctgaattctgaatcagtcatcttggctttgtaactttcctcaacaaagtt

SEQ ID NO: 3880 - DNA, 122 bp, Homo sapiens
gaggggcaggagggtttggttgagctgcagctgtttgtctgttcgacacaggcttggggccgacgggggagacggagccccaggtaccgagctgatggagcccaaagggcaggggcggaagc

SEQ ID NO: 3881 - DNA, 122 bp, Homo sapiens
catttagctgggactacaggcatgtgccaccacatttggccaactttttaatttttttatcgagatgaggtctaactttgttgcccaggctggtctcaaactcctgggctcaagtgatcttc

SEQ ID NO: 3882 - DNA, 122 bp, Homo sapiens
gtgcttgggaagccacttctgtcaccgtctcaagggacagctcgccccccgctccctctccggtgggctccaccgcccccgtagccgccgtccttaccacagcactcgcacgaccagctcga

SEQ ID NO: 3883 - DNA, 122 bp, Homo sapiens
ccgacgtgctgttggcttccgcgacgtggtggagtctcgccagtccctgcagcgcttctgcgactctgaagataaagaggatcgtattttgagaaaagctcatggagcaaggagctcaagga

SEQ ID NO: 3884 - DNA, 122 bp, Homo sapiens
aagaaggcagtaagaatggctggggtggaagacactctttattctcattttatgaagaaacgtgatctagtaaaagtagcacacatttagtgagcatttacatgccaggttgttctgagcat

SEQ ID NO: 3885 - DNA, 122 bp, Homo sapiens
cccggatcctccgaggcgtcgtcgtccgagttgttctgcgggaggaacttctgctaaagccggtcctcgagtcccccccgcctcaggaggggcagcgcccggattgtcttaagtacaacact

SEQ ID NO: 3886 - DNA, 122 bp, Homo sapiens
gccctccaggtactggctgtagagctcgatgtcgttgtgcctggtgccctccacccacagcggctccaccgccttggggcagcgctcgtagagcgccagcccgtgcgagaagtcgatcacct

SEQ ID NO: 3887 - DNA, 122 bp, Homo sapiens
gcatttgcagggaatgttgtgtgtttctctccctgcatgtcttcactttcacttgtcatccgcttttaataattccatcagcttggtttaccagcttaggctactcccatccagatgcaggg

SEQ ID NO: 3888 - DNA, 122 bp, Homo sapiens
ctccagcgtggggaggcctaagtacctcaaggttcaggcccacggaaggagtcgggggagcgaggcccggtgatctacgtgtgaaggagcttggacaggacctcacaaacgccagggagacg

SEQ ID NO: 3889 - DNA, 122 bp, Homo sapiens
gccctggatccccttgccccgtcgcgccgtcgtccccccgctatccggttttgtgatggccgcgccgtggctgcctccctagagtccctcagggccctttaaataccgcgttgggggggaca

SEQ ID NO: 3890 - DNA, 122 bp, Homo sapiens
gaaacagaaacctatgttggggcaaggcagggcgtcaatggcagggcctagctcctcacccgcgaccggcgactggcccttcggcgtcccctctccgcccgcctcccgcggtcggctgcgac

SEQ ID NO: 3891 - DNA, 122 bp, Homo sapiens
tgtaaaactgttttaaataactcttgctaaagcagatagtaccagagagcagaaactcagcgcccaggtccttaatggttccttctctctaccctccttcccctcccaccccccacgtgtaa

SEQ ID NO: 3892 - DNA, 122 bp, Homo sapiens
cgaagctatcccctgccctcccttcctcgcgtggcttcccgggcgcgctctgcctgtctgcggggactccaggcgtccttgtgttttcagctcccggctcttgcccgcgcgtgtggcccggc

SEQ ID NO: 3893 - DNA, 122 bp, Homo sapiens
tgaggcagcagggggtaaaaagtggcgggccgggccctcccacggatgacagtgccttcccggaagccgctgcgcagggcccggcgtgtttgtggagtctctggcttgcacccagaatcgtg

SEQ ID NO: 3894 - DNA, 122 bp, Homo sapiens
cctcatccactccccagctgctgaggagagagaagaaccaaaggaagtacatacagaggacggtggcctcttgccagtgacctcagcatagggaccagcttcatgaggggactctgtaaacc

SEQ ID NO: 3895 - DNA, 122 bp, Homo sapiens
tgctaccgcgcggccctcacccttcagccgtcgcggaatccgggcagccccgaccgcctgcggggacctgactccacagatgaagcacaattgggggcgtttcacaaagggtggtgaggagt

SEQ ID NO: 3896 - DNA, 122 bp, Homo sapiens
agttgagccccgtccgggtcctggacccgcgtagtactgaccctggatccctgttcactgcgttctcgctccccgcgctccctgctggaccccgggatgccgggcatctccgcccgaggcct

SEQ ID NO: 3897 - DNA, 122 bp, Homo sapiens
aagttaggcagatagaggaaaggtaaagagaattctgggaagcaggtatagaatgttcaccgggcatcaaatggcaggatataatatggcaactgcaaggggaccattatgaatagaacagg

SEQ ID NO: 3898 - DNA, 122 bp, Homo sapiens
cataaaaacactcaatatttcatttggacaattattcagcaagcgttacttgaatgcctacgtgggctaggcaaattcttgcaagacattcttttttctctgtatgcttctctccccctttt

SEQ ID NO: 3899 - DNA, 122 bp, Homo sapiens
taactgtaggtgtgagtggggagggattagaaaggtgcttggacgtgcaaatttgggagacgtattttagcttttgtggtctttgggactaaacagtagtaaataatgttttgctcgtcttt

SEQ ID NO: 3900 - DNA, 122 bp, Homo sapiens
acaaacaaacaaacaaacaaaaaacttctccaggttacacagccaacatgtgcaggaactcgggcccacacccaactcttaattctaaaactgttgtttttttctgttcgaccacagctatt

SEQ ID NO: 3901 - DNA, 122 bp, Homo sapiens
actgtggaggcatctcggagcatcaagttctttatggaggacttcactgtgatgttggcccggacaatcacttccagggacttcacagctgagtactcctaagggaacagggaaggagaccc

SEQ ID NO: 3902 - DNA, 122 bp, Homo sapiens
cctgcatccagccacccctttccctcccaacgtaacaaacattatgttcccgacttcccacgggaaaggcaacccccgcaagccaccagacggcccccctagccacccatccccccagtgta

SEQ ID NO: 3903 - DNA, 122 bp, Homo sapiens
caggtacttggatgggagaacttaacgttgtgccctgactcatgccaccataccattttacgccagaatccccaccagtccacccatcacattgtatctgttcctcagaactctcacctggc

SEQ ID NO: 3904 - DNA, 122 bp, Homo sapiens
gcccaccttcttccctcgttctgaccccactacaacaaggcccatggcggtgccacctcacgaggagaaggacgatcaccttgagacccatcggcctctgaggccacggaccacgctgcccc

SEQ ID NO: 3905 - DNA, 122 bp, Homo sapiens
cgctcgccgcggggtttatttggctccgggtccctcggccgccgccattagggtccgcagcgcccgcggccgcctcccacacctcagtgcccccgccccccggggctccccagtctccgcgc

SEQ ID NO: 3906 - DNA, 122 bp, Homo sapiens
atttgacagttatgaaatgcatgtttattctgaaacttctaactagttgtacaactaatccgtgacaaattaccagattaattttactttatttcttcaggcctggggtttttcgatgactt

SEQ ID NO: 3907 - DNA, 122 bp, Homo sapiens
ctgtcagaaggtctgtctggcatcattaggggagctgtctgtctctctatccctggctggcgtggcccggcaggaggcgaggctgatattttcaggagacctggtgatttgacctgacacct

SEQ ID NO: 3908 - DNA, 122 bp, Homo sapiens
tctccttgagcttgagaggtggggcgtgggcatagggaatgggctgatcccctgctggggcgggcggtggtcgtctgggagggggttggccgcggttccattcttctgaaaccctcccgggc

SEQ ID NO: 3909 - DNA, 122 bp, Homo sapiens
cgcggctccgccagcggagagcctttggatttaccgtggcattacttttaattaactctgcggcgcggcgcggggagcgcagggtgggccctaatcccgggcccgcctgacgtcacctggga

SEQ ID NO: 3910 - DNA, 122 bp, Homo sapiens
agaggtgaccaaaagggaaagtcctgcctctcgtcccctacgagaagtgtaggtaagaaccgtttaggcgaggagaagcacgaagtgggaactgcgagtcgagctccccatcctcactcccc

SEQ ID NO: 3911 - DNA, 122 bp, Homo sapiens
ggcttttggcagtagggggctgtgttggtgggccctacgaagatgctcagtgctcgagatcgccgggaccggcaccctgaggagggggtagttgcagagctccagggcttcgcggtggacaa

SEQ ID NO: 3912 - DNA, 122 bp, Homo sapiens
gaacaggctgagtgaacctgaacctaggtttttgtttctgtgtggtctgaaagaggaccacgccctgtatttacagatggggaaactgacaccaagaattaggaaatgacctgtctaaggct

SEQ ID NO: 3913 - DNA, 122 bp, Homo sapiens
gcccctcctctgcagctgctccccagagagtgtgaatgcttaaacggccaatattttccccggctcagcacaaagcaccgtcattgcagggcagccaggaagggctgttagcttgattgggt

SEQ ID NO: 3914 - DNA, 122 bp, Homo sapiens
gtgttcagaacaatgttcagcacatattaagcttgatataactgttacctatgatgatgacgatgatgatgataatgataactgtacagtcactgtctttctgaagttgtttggtgatcaag

SEQ ID NO: 3915 - DNA, 122 bp, Homo sapiens
tttctccaggagagggaattatatcctcctgcaacttgaggtttttgctgatctgttcagcgtggtaatacatctaagggatgtttagtccccacttcaaacataaatagctattcctgata

SEQ ID NO: 3916 - DNA, 122 bp, Homo sapiens
tcagaacctactccctagtaccctctgatgactacctccagcaaaatgcacttgactcaccgtcttctgcactggggagctcaaattatctctgtgggggaggtggaggccttgccagacta

SEQ ID NO: 3917 - DNA, 122 bp, Homo sapiens
cctgtggtgctcgtgttgacatctgggtcccacaagcttataattctttggcccagggggcgttttccagggtggaagacattggtcccacgggatgttttaaactctgcctatgactgtgc

SEQ ID NO: 3918 - DNA, 122 bp, Homo sapiens
tcatcggcggacagaaggcgtgacggaagtacgtcatcaccgaggctctcactgtgctcacggcctcatgagcccataaagggaagcggacacgaaggcgggacggaagcgcgtcatcggcg

SEQ ID NO: 3919 - DNA, 122 bp, Homo sapiens
catatcatattatcatttttcatatcctatgatgtttcatgtcctattgtcattctcatccggctaggcacttctcggggacgctgtgtggtgttgaggttttacagggaaaatgctaacct

SEQ ID NO: 3920 - DNA, 122 bp, Homo sapiens
ggggctccactggtgtagctacaggagtgggctggccctgggctgggatccctggacccccgcatggctgcgcctgtgtgtgtggggggggggtggccagtggaggcaccgagcgagggcgc

SEQ ID NO: 3921 - DNA, 122 bp, Homo sapiens
ctcgggccgcgcaggcgcaccaggcgcggtccggaggccgagggcgaccacagcagcctccgcctcctgctgctcaggactattctgcgctgggctagtcggcggtgacccggactgcgccc

SEQ ID NO: 3922 - DNA, 122 bp, Homo sapiens
tgtgatatggtttggctgtgtccccacccaaatcttgtctttaattgtagttcccattgtcgtgtcatgtagtcccatgtgtcgtgggagggaccagatggagataactgaatcttggggcc

SEQ ID NO: 3923 - DNA, 122 bp, Homo sapiens
tttgaatcccggaagtccaggacacacccaaccttgattacagtgtccagaatgctggagcgtaggtgaaaggacaaaagccagacacatttcaacatgagggacccactgacagattgtcc

SEQ ID NO: 3924 - DNA, 122 bp, Homo sapiens
tattttttcaaagtgaaagtaagattattaagaaaataaaggaataaagaatggctactccgtaggcaaagcagcccacatcatcactttagagagttccactctggtcctcttccccatgg

SEQ ID NO: 3925 - DNA, 122 bp, Homo sapiens
cccccttcactgagcagatgttcacaggctgtgggatgcgaccataactaaacagcttgacgtcactttgccatcttgaatttattcacatattttgaaaggagtgccaccttgttagctag

SEQ ID NO: 3926 - DNA, 122 bp, Homo sapiens
cccacggcaggcccatcacctgccaccagcctaccttgcaagggacagtgtggggcttgccgatcttgttcccccagtagcctctgcgcacggggacgatggagagcttggccaggatgatg

SEQ ID NO: 3927 - DNA, 122 bp, Homo sapiens
attgccacgagcaaggcgcaccctccctttcaaaaccgttccaaccctctgagtgcactgcgtggaagccgaaaatctccctgttcctgtgcagaaccacgtcccgttggcagcccctgggg

SEQ ID NO: 3928 - DNA, 122 bp, Homo sapiens
taccatgttatcctgcccagcttgctggggtgtggtcaagggtggtttcacaggagagcacgagtggagctgtgactggaaggacaagtaggtgatcaccaaacaaacaaagaggaaaacac

SEQ ID NO: 3929 - DNA, 122 bp, Homo sapiens
aggagtggtggtacaagcctgtggtgccagatacttggaggctgaaggaggagcattgatcgcatgagcccaggaggtcgaggcttcagtgagtcatgaacgtgccacagcactccagctag

SEQ ID NO: 3930 - DNA, 122 bp, Homo sapiens
ccatcctggccgagttcgctggtgaagaagaagtgaatcgcttcttagcccaaggccaggcgctgccacccacttccagctggcagtccagcagcgcgtccagccagccgcggctcagcgca

SEQ ID NO: 3931 - DNA, 122 bp, Homo sapiens
acttgaagaaatggtttaccgtcccacatacattttgaatatgtatgtgggatggtaaaccgcttcttggtatccagcccagccatccaaacctccctggagaaagcctggagttagaggag

SEQ ID NO: 3932 - DNA, 122 bp, Homo sapiens
cagcggaagggctgtctcctcccggcggcgaggacaggaacccagtgagctgaacacatccgacattgtacggagcagcaggaacagctggtaagctagcaagcggcaacggcccagcgagg

SEQ ID NO: 3933 - DNA, 122 bp, Homo sapiens
catgctgctcagtggtgactgggggcggctgcaagtgcccagagaggctgacagagccatcggaatggtggcgcagggccgagagccacctctgcccctcggccttctgagagcggccccct

SEQ ID NO: 3934 - DNA, 122 bp, Homo sapiens
tcactttctaatcaccctacactccaacttactccatctctgggtttgagttagtctttccgaagtcccattttaagagtctaaggatttattaaaacacactccattatcatagttctgat

SEQ ID NO: 3935 - DNA, 122 bp, Homo sapiens
ctgcctctgccaccgaccgccggccctgcctctgccaccgaccgccgaccctgcctctgccgtttccttgccacccatcagctcttgaggcttttaggaagaagtgtggctgttttggccag

SEQ ID NO: 3936 - DNA, 122 bp, Homo sapiens
tgcaggggcttaagtcgtgacgagcgcagtggaaggcgcagatgctgagcgggtgccgcacgaaattccttgcctttgtgtattcacagcctcggctggctatagccaagacgtggcgttga

SEQ ID NO: 3937 - DNA, 122 bp, Homo sapiens
gctgctgaaatatatgatgattcaaatctgacctctttcttaccattttagtcctttcatcgctctttcatttcagataattctccactcagccatttggtaaagcatttccaaacaataga

SEQ ID NO: 3938 - DNA, 122 bp, Homo sapiens
aatgttaactagaagtgttcactgccatctcctcacacaaggctgtttgataccaacaaccgtactagttgccacctccaaattagattcaaatgtcatgctgaaaatttcccgttggtatt

SEQ ID NO: 3939 - DNA, 122 bp, Homo sapiens
gtagagcccagaggaccactgtgctgtgtccacagatctgcagtctgggcagggcgtggccgggaggggcctctctgccccggtgggggtggggccgctgtaaacagggctggccctggctc

SEQ ID NO: 3940 - DNA, 122 bp, Homo sapiens
tcctatactatcctacccctggccagcagtaccccaaggccaggccctcagctgtgggggcgtgtgctgagcaccaagcagagggagctgagcccggcgccagccttctccagttctgagca

SEQ ID NO: 3941 - DNA, 122 bp, Homo sapiens
gtgaggcacgaaaaagtacttcacagaaaaaagacaaaacccaaagacgacactgggacacgatgcgagaagatggacatgggacaccgccttacgcaggctctcacacagaaggttaattt

SEQ ID NO: 3942 - DNA, 122 bp, Homo sapiens
ggcgccgccacaaaagcgaagaggccgcggggaggcggctcccgaggacgccgctccgggcggccccacctagattccggtgactcagagcgcgcccgccccgacctgccctgccgggccgg

SEQ ID NO: 3943 - DNA, 122 bp, Homo sapiens
ataaacgcaggatgaagtgctcactcggaaagtgacagcatgatcagtggcggcagtaatcgcagagaatcgcgggctaaattattccataaccgtgatttgaggggacagcccagagcacc

SEQ ID NO: 3944 - DNA, 122 bp, Homo sapiens
agagcctctgagcttaagttagttttgtttccctgtcccggatacaagagttggtaagctcgctgcagtgggtggagagaggcctctagacttcagtttcagtttcctggctctgggcagca

SEQ ID NO: 3945 - DNA, 122 bp, Homo sapiens
cttccaagtagctgggggcggggccgcgcctggaggtgagcagcaggcggtgggcggggccgcgctccgtccgaggtgagagcgaggccgggtgcgaggccacaccccgaggtacgagagct

SEQ ID NO: 3946 - DNA, 122 bp, Homo sapiens
aagtggcttttcattggtaaaagagcttgagcacgaatggtgatatgtaatgagattatacgtgttgttcattggaatatatttagaaaaatcatggtaaagctctttgctttaggagaaaa

SEQ ID NO: 3947 - DNA, 122 bp, Homo sapiens
ccaaaaaggctgcacaatttaacagtcccaccaacaattatgtgagttccaagttctccacgtcctcactaatgtttgttattgtctgtcttttttattataaccattctactgggtgtgaa

SEQ ID NO: 3948 - DNA, 122 bp, Homo sapiens
gcttggagactgtcgcccagttccggagagcccagggtggctttcctctctctggtggcccgcctctggaaggcgtcggacctttccgtgagaaaacgaaacacttacggatggaaagcagg

SEQ ID NO: 3949 - DNA, 122 bp, Homo sapiens
gccgacctgaggtgaggcccgccccgaggggaggaagagagggcggaacccagagctcggcggcggtggccgtctcgttgccttacgttccttaccctgatttctcctatatgggagtcgtg

SEQ ID NO: 3950 - DNA, 122 bp, Homo sapiens
tggaggggcctccagtccagattcacccagcctgttctctagctgctcccttggaagagacggggtagacagagctgggaacaagtacccctgagcaccagagtctgagtctaggcccagag

SEQ ID NO: 3951 - DNA, 122 bp, Homo sapiens
acggggaggcgaggcgggtggggtgtgcaaagctgctcttgctcgcgtgctgcctactggcgcggcctgggtggccccctcctgacatctccccgtccacccgagcagccgcccagtactca

SEQ ID NO: 3952 - DNA, 122 bp, Homo sapiens
gccagtgtcgacaatttgacctccatctcctagctttgtctagtggttctcaaactacagcgtgcatcagtatccctggaggacctgcaaagcccagattgctgagcccacccggagtgctg

SEQ ID NO: 3953 - DNA, 122 bp, Homo sapiens
tccactgaggcatccacctcatcggcgggcctccctgtcctcctagaacagggactggaccgtccagcatccagggagccctagggttcattagcgacactgagggcagccatggggttctg

SEQ ID NO: 3954 - DNA, 122 bp, Homo sapiens
ttcataatgaaaaatcatattttctaaatgcctaaacacacaatgtttaacataacactacgtacgccgtacatgtataacatacaattaggtaaaaattatccacatggaaaacacctgga

SEQ ID NO: 3955 - DNA, 122 bp, Homo sapiens
ctagaaatctcgatggatcttggctttggtaaaagtgaggctcccatccccaacccagtccgggcccacacagcgtcctgggtagcagcgtccgcccgctgcgcgaggaggcagagggcaga

SEQ ID NO: 3956 - DNA, 122 bp, Homo sapiens
ggggacgacgaggtattaagattcagatgtctggcgtacctgcctgagtagatgctagcccgttggcattgctggaacattcaccccaattatatacagaaggcgagttactcaagggaaga

SEQ ID NO: 3957 - DNA, 122 bp, Homo sapiens
cctctagagagtacttttacctttgaatcactctactcagtatgttaaatcttaaaatagcgcactgacaaccacttatccatttgatgtttaaatgtttttttaagtattgctatggaata

SEQ ID NO: 3958 - DNA, 122 bp, Homo sapiens
tgggtgctgcccccgcttctcctcatggtcctcatctacctggaggtcttctacctaatccgcaagcagctcaacaagaaggtgtcggcctcctccggcgacccgcagaagtactatgggaa

SEQ ID NO: 3959 - DNA, 122 bp, Homo sapiens
ctctcccagcaatcgcaagtgtggccatttgtggtaaaagagtaatcctgagaaaaaggacgtccccaacagtcacaaaaagcagcggtgatggtccctagagttgcagacatgcatgcagc

SEQ ID NO: 3960 - DNA, 122 bp, Homo sapiens
ccgcgccagcggcggcagcacgtcactcggcggccacggggagtcagggagcgcggaacgcgggtttctgttgataagtgcaaagtacggccctctcggtgctaagtgcacagtaagtgcga

SEQ ID NO: 3961 - DNA, 122 bp, Homo sapiens
ataatagtgtgtgtgtgtgtttagccgtaaagagagaggagaatcattgtggcaaaatatcgggaattggtaaatatgagtaacttgtgtgtggcagttctttgtatcatttttgcaacttt

SEQ ID NO: 3962 - DNA, 122 bp, Homo sapiens
cctttggccctctcttgcagattatcgggaccattccactgatgcctaatccagggccatcgagccaagcagcaagcggcactcagggcttgcaagtgcagccaatcaccccccagctcctc

SEQ ID NO: 3963 - DNA, 122 bp, Homo sapiens
actctcctcattttgcagatgaggagcccaaggtgaaatggccactcagggagtgagtgccggcttcctcagggaagagcgcctggctgggactagacaccagtgctgggaggtgggggtga

SEQ ID NO: 3964 - DNA, 122 bp, Homo sapiens
ggtgagggggctggaggggggaccggggcctcctcggggccgggactcggcgccgaccgccgcctgaccctgtcaccccgcagcccctgccgcggcggctcagcctggttccgaaggcggcc

SEQ ID NO: 3965 - DNA, 122 bp, Homo sapiens
tatctggtgagagatttggcatataccttcaatgtgtgccctataacacaacattgtctccgatctcatctttctatcaaatgacttccaacactcttaagtctcaggtattcttaaatctg

SEQ ID NO: 3966 - DNA, 122 bp, Homo sapiens
ggaaagtgtttcctggacagatttccacccgacagcttcgtgcacatgtgtcaggacctgcgtgtgctcaatgctgttcgggactatcacatcgggatcccgctcacctatagccagtatcc

SEQ ID NO: 3967 - DNA, 122 bp, Homo sapiens
cccagccctccttgtggcttcctaagatccccccaaccctgccagggccccccgagggcccgccctgggccttgtgggcggtgactcagcatggcgccagacttgcctcctctacctccctc

SEQ ID NO: 3968 - DNA, 122 bp, Homo sapiens
ctcacacatggcatcgtgtctagttctctctcacatggcgccgtgtctagttatctcacacgtggcgtcgtgtctagttccctcacacatggcgttgtgtctcgttctctctcacgtggcat

SEQ ID NO: 3969 - DNA, 122 bp, Homo sapiens
ccaagctggaagagcagggaagtgctggcggacaaggcgggtgcgggtggccagggtgggcggccaccaacctggaaaggggccgtgttctcccagaaatggtctccaatggagcgtaaatg

SEQ ID NO: 3970 - DNA, 122 bp, Homo sapiens
acgactgcgaaggaagaacctgggtcgcggcccccggctacgtccgccccaagccgccgccgccaggtctgaggctccccgacaagcagccaaagctggctcctgtcacacccgcgtcccac

SEQ ID NO: 3971 - DNA, 122 bp, Homo sapiens
actcagacggctcgggggacaccctgccaggcctgggcagcccctcaactcttgtgtgtccgtcgcagggcgggaagatccccatccgctggacggccccagaggccatcgccttccgcacc

SEQ ID NO: 3972 - DNA, 122 bp, Homo sapiens
ctgacgtaatcctctgccactttctggaagagctcgtctggcaggaaaaatgatgatcagcgagggcccaatgccagtagccctgggatctcccagtgacccagccctctgtgccctattca

SEQ ID NO: 3973 - DNA, 122 bp, Homo sapiens
atggtatgtggatctcttttcttggagtgatcctcaggagatattcttggtgtccatttccgtaataactcctgaagatgggatagctcatcctggaggccagagattgtgggagctgagag

SEQ ID NO: 3974 - DNA, 122 bp, Homo sapiens
cctggaacctggggtacagaggcgaggccgcctctctgggtgaggtgcgttccctgcacccgtcccgggagtctgccttctagaccctagcatgtgcacctgtcctgggagtcggccttcta

SEQ ID NO: 3975 - DNA, 122 bp, Homo sapiens
attagcttggtatttattagtctgtgagcagtaacttactctgtcttcacagcaaccctgcggtcaggttttctacccattctttttgagggaggaagatgctgtggccggaagcagtgagg

SEQ ID NO: 3976 - DNA, 122 bp, Homo sapiens
cctgtttcaatgttgaataataatatattttaaagttagcaaagccatttcacctgcagtcgttgatttcttcaaaatctgagcatttaaatccattgccaatgtttgcttaaagaacactg

SEQ ID NO: 3977 - DNA, 122 bp, Homo sapiens
taaccagtgggcctgtttgttttgctcctagcaacaggtcccagctggtcccagcccagccgagtctgccagatgcttttcaagcatgttgtggtaatacagcctggtgatggcaacatcct

SEQ ID NO: 3978 - DNA, 122 bp, Homo sapiens
acatgtacgtgtgtgtgtgtctcccatctcactaactatacccttgccaacctgcattagcgtttattttttggttttttgttttttagtctttgctattttgattaggtaaacctggttat

SEQ ID NO: 3979 - DNA, 122 bp, Homo sapiens
gcgtgggcagggcagggcagggctgaaccccagcgactgaatctcgaaggcaggaggcctcggaggtcatcggcccagctcgcctgaaactgtccctgctcgtgccagggcgcgggcagagg

SEQ ID NO: 3980 - DNA, 122 bp, Homo sapiens
tccctttccccgaggcgttacgacgccaccacaaactgcgcagaagcgtactggggacggcgtccaattgggtaagagggttcggtttctacggtgcgtctccggcccaccggccaaccacc

SEQ ID NO: 3981 - DNA, 122 bp, Homo sapiens
atttggactcataattacacctctgggccatgtggcaaacaactctgattaccctctagacgggaggacagtgacaatttagggccaaagcaactaataaaattaggcaaaataagtggcac

SEQ ID NO: 3982 - DNA, 122 bp, Homo sapiens
tacctcggacattcccaggacaattagggctgaagttttcgggagaagcagccccgagcccgtgggataagggggcggcccggctccgcccaggacccctcccggacctcccccccggctgc

SEQ ID NO: 3983 - DNA, 122 bp, Homo sapiens
taccaagaaaataaattgaattagtacttgaaaatattcccacaaaaaaaatccaagccccgatggcttcactggtgaattctatcaaataactaaagaatgattaatgccaatccttcaca

SEQ ID NO: 3984 - DNA, 122 bp, Homo sapiens
ccgtttcccaggccacggcggtgttgggggcagggagcgcagccagtcaggagcacaaggcgcaggcgcaaggcaacctttgccctttaactggcgcggcgccttctcaccccacccctcca

SEQ ID NO: 3985 - DNA, 122 bp, Homo sapiens
atggagccaggtgcggaaagggttgcagcctcgcgggctgaggccggagggtgaaggcgccgctccttgaagtgaggaaaactccggtgaggaagaggctctttccaggtcctgtgcgtgtt

SEQ ID NO: 3986 - DNA, 122 bp, Homo sapiens
ttctgaggcgcggtggcctgagaaactggttgcagagcccgctcttcctagcctactgcccgaaaacgcagaatttggggaattggaactttggaggcgggagcgaaagacctctccttctc

SEQ ID NO: 3987 - DNA, 122 bp, Homo sapiens
aggaggagcggggcgggctgcaaggccagacaggccctctttctcaggccgggctggctgcgcgcctgcgatcctggggccgcccgggcgatcccaggagaaccggcgagcccatcggcgca

SEQ ID NO: 3988 - DNA, 122 bp, Homo sapiens
agaccctgacgtgacctccgcactggggtgacagagacgtgccactgcaggctcatccaccgtaatcaatgtcccactctggccggcgacacagacactgggggaggctgggagtgggggca

SEQ ID NO: 3989 - DNA, 122 bp, Homo sapiens
aattggcctcgttaccgaaaagctccaaccaatgacctctccgtgtctgtctccctcctccgatcctggaaactcattggctccgaggacttaggacctgttagcttggttgggcgactggc

SEQ ID NO: 3990 - DNA, 122 bp, Homo sapiens
ggaggggcagcgagcaggtgccacgtccacaccgggtgaggcgtgaggtgagggctcccccgcgccgccctggcgtccaggtggtgagggctgcacggaaacgtggacttcggcagaacatg

SEQ ID NO: 3991 - DNA, 122 bp, Homo sapiens
agccggacacggagcacgcaggtgcagcaggtgaggggcaaaggtctgcattgagcagtccgcagtgtcccgggaagtcgtaaagtcgggactgagaagaagcaggacctaactcaagttta

SEQ ID NO: 3992 - DNA, 122 bp, Homo sapiens
tctcgctccagctatgcctaagaaatctgtcttatcactgacatgcttgttgtccccactcgttccctgagcctccatccaacaagtcgctccaccacatgctggtggatctcgcttcctat

SEQ ID NO: 3993 - DNA, 122 bp, Homo sapiens
aacaaacaaaacaatgtgaaattaagccaaaagccatcacacgtgcatccaaaggacggccgctacccgcgaccccttcccaacgcacgcgggaggttgcgggatcagggacaggggcttca

SEQ ID NO: 3994 - DNA, 122 bp, Homo sapiens
gcgacttccgagagggggccttggggttctaggccacgaaagcatggaagtgcccccgagcgcagcctctagatcacactcccggtcgggctccatgaggcccggacaaaggctgccatgct

SEQ ID NO: 3995 - DNA, 122 bp, Homo sapiens
gttcactttttatcatttttaacaaagagagtaaaagagaaagctttaattgtaggttttcgtggaacttggtaaaaattgaggagcctttgtgtcatgacttgaagaaaatttcaatattt

SEQ ID NO: 3996 - DNA, 122 bp, Homo sapiens
cctgggtctgtcagatacagccacctacaaggtcaaagacagcagcgttggcaaaatgatcgggcaagcaactgcagcagaccaggagaaaaaccctgaaggtgatggcctccttgagtaca

SEQ ID NO: 3997 - DNA, 122 bp, Homo sapiens
accggccacacagcaactaacagcaccgaggaaacacaacagcctgtttaccttcagccccgccactaacccttggccaaagggaaaggggcaggacatcctcccgctctgagccacctccg

SEQ ID NO: 3998 - DNA, 122 bp, Homo sapiens
agcaaaaggagcacacatagaagagggggtgctttgggaaaatgtggtctgcacggcaggcggggagtgctcttccctgctggcaccatgcagagctagctgaggagaagggagcagggtgg

SEQ ID NO: 3999 - DNA, 122 bp, Homo sapiens
aaactcattagaccgattgtgaagagtgtcctcggagtggatttgggaaataaaatacgccgaagaaaaagtctagaagtggaaattaccttttgtctcaatgttaattactccttgcctcc

SEQ ID NO: 4000 - DNA, 122 bp, Homo sapiens
gtcttccagtgctgtctaagcagtgttgtcccaggtggcatcctatttttcataatttaccgaaggcccttggtaatataaatacagagaataacaggtgctgcactgagcagggggtctgt

SEQ ID NO: 4001 - DNA, 122 bp, Homo sapiens
gaggagggtggaaggcaacctcggggaaactgggaaaggcggcctggacttcgggaacaccgcgtacctgcgggggcacagccccacccgagcgaacgggctccaaaggggaggtcccgcgg

SEQ ID NO: 4002 - DNA, 122 bp, Homo sapiens
aatgaagaaaaccaaataacccaccataaactgaagaccctcaataaacggcacaatcagcgggaggcagagaaagccgtgccattattaccaaagcctcctcgagcaaccagaagacatgg

SEQ ID NO: 4003 - DNA, 122 bp, Homo sapiens
agacccgagtttttatccttctctggcgccgacactcggctgcggaatcgagtttgagctcggtgtagctgaagtttaaattgtagctgtttcaaaggtagaccccacctcacccccacccc

SEQ ID NO: 4004 - DNA, 122 bp, Homo sapiens
gagctccacctcctcctccgcactgcacttctcacatcctcagcatcgcgtccacgaggccgcccgccccgcctcagaaccgtaacctccaggagctgggttgaggaaggcgcggaggacag

SEQ ID NO: 4005 - DNA, 122 bp, Homo sapiens
ggaggcaggcaggagagggctgaggctgcagtgtggtctctggctgcaccccgggactgtcggctgaggaccacagcagtcccgcttgcctgagagctccgagtatgtcctgggaatggagg

SEQ ID NO: 4006 - DNA, 122 bp, Homo sapiens
cccgccgccgccgctgcagtctctcgggcagagcagagaaaagtccctgatctcggggggcggagcggcaggcgggaacccaggcacccgccctcacccatatccctgagaggtcgccgccc

SEQ ID NO: 4007 - DNA, 122 bp, Homo sapiens
tctgccctagcatccattcagagacccggctgtggtctctgtgcctcccttgtccacagccgcctgtcctcacctccatgtggttgccaggctcctcccaggcctggaaccctccccagggg

SEQ ID NO: 4008 - DNA, 122 bp, Homo sapiens
cagaccccctggccctaaagatgctcagtaagatacattgataatgtggaaaaatactcacgggataacatttgataataaaaataggatgcaaacttctggaagtgagggacatgtccatt

SEQ ID NO: 4009 - DNA, 122 bp, Homo sapiens
ggcctctgaggcgagccggatggacggacggcatcccctggaccctgccacccttgccaccgtgccacagtgaacacgtgtctgatttagaagtagacattggtctgacaggcatttgtttt

SEQ ID NO: 4010 - DNA, 122 bp, Homo sapiens
ttggtgataggtagaaagattggctcccagattgatagcgtcttgggtggattagtaaatcgatttgttaagagctggaattatataccttttgggtctaaaatttacctcacaacagctta

SEQ ID NO: 4011 - DNA, 122 bp, Homo sapiens
cctaaaatctcccctaccaggcagcttccttttcttcaggctctccttctcccagaactacgatctaagcttccttggtgaggagacacaggactagtgccctcacatttttagccttcaga

SEQ ID NO: 4012 - DNA, 122 bp, Homo sapiens
tcctgctgaatttgggttacatttaaaaccatactttaagtgttttcatagatcatgctgcggtccttgcattcatgtttgtatagtggctgccttgattctttttttaggaaaccaaccaa

SEQ ID NO: 4013 - DNA, 122 bp, Homo sapiens
acctggaaaatcgggtcactcccaccctaatactgcgcttttccgatgggcttaaaaaaacggcgaaccaggagattatatcccgcacctggcttcgagggtcctacgcccacagagtctcc

SEQ ID NO: 4014 - DNA, 122 bp, Homo sapiens
ggcactcccacccctgacatgggctcacttcgcattagccctgtgcttcactacccaacgcgtgggtctattgccttgtgtcctcagtcccaaggaaaatgggaactccttggggtgggcgg

SEQ ID NO: 4015 - DNA, 122 bp, Homo sapiens
cagacctcgctttcctggagttctctctctccgctgtcctataacctagacggtgacatccgtgggtgtttcttgaacacacgaatgaatgatctatccctcagagtacactggggctttac

SEQ ID NO: 4016 - DNA, 122 bp, Homo sapiens
tccctgaggtctctagagctgaccgcggcatctcagaaaagggatggggaacctacaagtcgccgtcgcctgcctggctcattctgtaccactgaatgtaactcctcacagcaagctggaaa

SEQ ID NO: 4017 - DNA, 122 bp, Homo sapiens
ggctgcgggcagctgagcctggagggtaccaataggctgtgcccttgcagctgggggaatcgtagtggggctggcccagcggcaggtcccggcagctcaggtgggcctgggctgcagctgcg

SEQ ID NO: 4018 - DNA, 122 bp, Homo sapiens
ggcgggcgggcccccagcgaaaaggcctgagaattgcttctggggggtggcttgggccaacgggggcgagggagccgcgcagagggcaggccccgacccttccccgccgcaccttgtgggtc

SEQ ID NO: 4019 - DNA, 122 bp, Homo sapiens
gtggagccactgcagagatcacaaagataattagccctacttatgggcccctcctgtgcacggggccctgtgctaagcactttgcatatattttctcttttaatcctccaataaccctatga

SEQ ID NO: 4020 - DNA, 122 bp, Homo sapiens
gtctggggatatgattgatacttagaggaggatatgtagttgtgtgtatgcatgtgcacacgcacgtgggtgcacatgtgtatgtgagtttgagatagaaaaatgggaagagttgaaggaaa

SEQ ID NO: 4021 - DNA, 122 bp, Homo sapiens
gaaggaaaaagagtcagagaggatgagagaggttttcagagacgagaagatagtatttagcgaaaatgcttgcagaatgatcagaagactaagaaaacatgagcaaaaggaagcagtgggaa

SEQ ID NO: 4022 - DNA, 122 bp, Homo sapiens
ctccgcgtgcctcctgctccgaccccgaggagaaactcccgtctgctccgacgactggcccgggccccttttatactgtcctgatggagagcagggaggaaccctgcccctcggagaggggg

SEQ ID NO: 4023 - DNA, 122 bp, Homo sapiens
accgccaactcacggggctcgctcattggcccgatacctcccattgtcctgaccagagcccgtttgctattggctgtctccggggacacgtcatcaaggattgaaacagcgcgcaaatctga

SEQ ID NO: 4024 - DNA, 122 bp, Homo sapiens
ctggcatgagcggatgcaagcaggaacagtcagggggtgagaagagccgagagctgtgagcgtgtacggggaacctgacctccccaggactgtttcggccggggaccacagccggccccagg

SEQ ID NO: 4025 - DNA, 122 bp, Homo sapiens
gcgtgagccacggcgcctggcctaaaacctttttttaccacaaaatggagacctgtaaggcgaagtgaggttggatggctggacggtgggggtggggtgcagtcctggatcagggccggagc

SEQ ID NO: 4026 - DNA, 122 bp, Homo sapiens
tggggagcagggaaggcgtgggagcgggacagaggggcagcccggagagcgctggccaatcggagcgcgctccgccagcggccaatcacgggccgcctagcccggcaaatctgcccggcagt

SEQ ID NO: 4027 - DNA, 122 bp, Homo sapiens
tgggaggcacccactgttgctggagctcattatttcttttgcaaaccatgtgctgctgtacgcgtaggtgggatctgcctgtccacgccctcaaggggcatgtggggagaaatgttccattt

SEQ ID NO: 4028 - DNA, 122 bp, Homo sapiens
aaacaacctcgcagagtggacaacgagcaaggaaagccagtttctagaacatgccaataacgtgacttttgcggcgctcagccgaagctgtgccggggcctaggcgcgcccagagggtgcca

SEQ ID NO: 4029 - DNA, 122 bp, Homo sapiens
ttcatggctacgtcccccgctgaagcggcttggccggaacggggttaccccgggcacaaacggctcccgggaagctcccgtcaaagctccgcccccaacaaatgccccttgtgataagtcgg

SEQ ID NO: 4030 - DNA, 122 bp, Homo sapiens
ccgccctaggagtcaggtggaggttctggcacgtgggtgggattcggcgatggtgcctggcgtacctgacaggccgctggtgacgagccccctcctcagggtggatgtgccacgttcctgtg

SEQ ID NO: 4031 - DNA, 122 bp, Homo sapiens
gaaggatgcactaacacagaactgcagctgggggtggtagcccggggaagatcgctttcccgggggtgatcccaagcctatggagtgcatggctcccctgccggtgcttcttgctaacgggc

SEQ ID NO: 4032 - DNA, 122 bp, Homo sapiens
ggagccaggaaagccagggataggtcccaaaagacaggtggtagtgaatgcccaaactggcgaactcatgattctgtggctgggccctggtagcaagctgtactatataaaggtggaagatg

SEQ ID NO: 4033 - DNA, 122 bp, Homo sapiens
ggtctcagttttcactgcactaccttcaaattcaaaacatggctgaagaattatgtcacgcgcttcccagtgaagacaccaccaaacaggctttgtgtgagcaacaaggctgtttatttcac

SEQ ID NO: 4034 - DNA, 122 bp, Homo sapiens
ccgctggaggccaggcgcggcggggggcgagcggcgggcgcgaccaggtcgttagccgcgcgtttctcattcattagtctcccagatccctgtggggaggacgggcgaggtagcggcgccca

SEQ ID NO: 4035 - DNA, 122 bp, Homo sapiens
agctggtgacacgcccagcccgtagccacctttcgccctgcgtgaacttggcaggggagtcgaccattaaatactgagcagaggctcaaaccgagagagaagcctgcccacgccgccacccc

SEQ ID NO: 4036 - DNA, 122 bp, Homo sapiens
catgacatctcggagtttgattgctcttccttccacttggcaaaaggagacaccatcagccggatcaggaggggtcatggtgagatggaacccaccgaggtggtgtacagagctggcgctgc

SEQ ID NO: 4037 - DNA, 122 bp, Homo sapiens
atactttaacatcttttatgcattagactctagggattcagacacagtaagagcttgccacgtcctgacacatgtcaaaatatcaccatcttgcctacaccagcccctccgaaagtctttat

SEQ ID NO: 4038 - DNA, 122 bp, Homo sapiens
ttgctctgggggaacattcctactcctatgtgatagaattagcagggagtggctgtccatcgtgactctcaaccttcccatagtcaaggtagagctggagggcgtaggggagagagtctgaa

SEQ ID NO: 4039 - DNA, 122 bp, Homo sapiens
tttcggaatctcggtcatgtgagctaacttaaaaggctcaagagtggttacctgcctacccgtcataatcacttcccaattccttgaaaacttcgggttcctcggccggccgccagcgccgg

SEQ ID NO: 4040 - DNA, 122 bp, Homo sapiens
acttgtgggaaaaagtaacgatttagtggatactggagctaatgctctgttttctccagtcgtcctccagaggagcgtcccccggggcttcccctgcctcccccacctcccagcagttctgc

SEQ ID NO: 4041 - DNA, 122 bp, Homo sapiens
gtagagataagtcagcccaggaagggtggcccacaggtgatgtggcttcacggtgcacttcgctttggggaaagcagcgggagacacagactaatgaagggccaactcctgtgccatgctca

SEQ ID NO: 4042 - DNA, 122 bp, Homo sapiens
tcgatcgaggttgggaacagttgctctaacctgggaagcacccgccacgatccagcagggcgcggtgggaggggaaactgaggcccggctaggcacccccgccgcgcccagcccgccgagag

SEQ ID NO: 4043 - DNA, 122 bp, Homo sapiens
cagcgctgcttcttatgcagcctcctgcttttagtaaacattgaagagtccatgtgtgcccgtactcacacggagcgcactctgatgccacaattccttatcactcctcctctgagtgcccc

SEQ ID NO: 4044 - DNA, 122 bp, Homo sapiens
acgccgagtgggcctggggcagcggttggtggggagagcggcgcaatgacgtcactggcgcggcgcgtggtggcctctcgagagtgcaggcgccgtggggcgtcagctggacaaaagccgac

SEQ ID NO: 4045 - DNA, 122 bp, Homo sapiens
gtattagggtattctaagattaagtttatctggaacagtgtaaataaaagcttgcagatgcgttgatttttatgtgagtgcttgatttcttagcagagtaatttagaatagaaactggttca

SEQ ID NO: 4046 - DNA, 122 bp, Homo sapiens
ctatctcaactttacgcagccaaccctgtgtacccaataatagctcaatttagtggcatccgctaaagtcttgtatagagaagttttccctctggatttcccctttactgaagaaaaatggg

SEQ ID NO: 4047 - DNA, 122 bp, Homo sapiens
cctggttatttttaccacttgaagctcactgtataggctcaggggccacaaactggcagccgcctgcggacacttgcttatgagccgcccagacactgccttcattccacagcggctgcttc

SEQ ID NO: 4048 - DNA, 122 bp, Homo sapiens
tggcagtctgtgtcattcaccgctctgcctctgccgcctggagacgtgccgggcacgtaccgggtccttggtaactgcggaattcgctaatgaatgggtggacgaattcccctcatacctgc

SEQ ID NO: 4049 - DNA, 122 bp, Homo sapiens
tttttcctccctgggctttgcctctctgcctctgggcttggctgggcatcggctgcaggtcgcgcttcctgcctttcctagtggcctgactttctcagggctcccctggaggttcggaaacg

SEQ ID NO: 4050 - DNA, 122 bp, Homo sapiens
caggtgaggctggtggccccatttttcagatgagaaatgtgagtccagactaagtcaccacgcggagggggcactgggaagcgcagacacaggggtgtccaggcggaggggagggggcgctg

SEQ ID NO: 4051 - DNA, 122 bp, Homo sapiens
agtttctaaaaagaagtgaaataattaagacctaaaaagcaaattcatcatggtggaagtcgttctagccttgggaaaaagcatcttctatggagaaaatgtgaggaataccctgtgggcac

SEQ ID NO: 4052 - DNA, 122 bp, Homo sapiens
agcggcaccttgacaggatagcccgaggcagcacggcgttcccgcagacgctgggcctgccgctgggcctcaactcgcttggcttgcagcttgcccagctcccgtgcagggtccaccagccc

SEQ ID NO: 4053 - DNA, 122 bp, Homo sapiens
gcagccactagggggccctaaaggcatctcaaagaggaagccaggaaacactctcacctccgtttttctgtgtgcctgatattaggaactggggaatctaaaggcacgttaagaacacagtg

SEQ ID NO: 4054 - DNA, 122 bp, Homo sapiens
ggcccaggacgcccagggccagcgcatcggccacttcgagttccatggtaggtctgggggcggggagggggatgaaggcgcgctggcccatcccgccggctgagtccgccggccgctcctcc

SEQ ID NO: 4055 - DNA, 122 bp, Homo sapiens
ggggtcttgactttttattttaagaaaatgtgcagaaacttcagaactctctttctactccggaaatgagactctctgcacgtaaaatataacaagtggcaggtaatccagaaccatgatac

SEQ ID NO: 4056 - DNA, 122 bp, Homo sapiens
cgctggtccccagatctgaaccctaaacaccggtggcctcgtggcctgtgcgatgcaggccgactccagccctgccagtcccaggggatttctccgccggcgccccactcttgggaaggtcg

SEQ ID NO: 4057 - DNA, 122 bp, Homo sapiens
accaaagccattagaaggattaagccattactatcctgtccagcaaacacacaatgctcacggggattgccttttttttttattttttggttgttgtttttatggatgaatcagggcccaat

SEQ ID NO: 4058 - DNA, 122 bp, Homo sapiens
cttgggcccaaacagcctgcggggggaatgtgaccaggatatgcctcagcgtcccaagagcgcttacatgagtgggagtttgccccaaccccgggctgagggccagagcggcccttctggac

SEQ ID NO: 4059 - DNA, 122 bp, Homo sapiens
catctctttgttttgatgcttggagagaggaagcagcttgagcaagtcgtagattgagtgcgtgcagtgtcaggaataaacccaagtcttgtcactagcctgtacacccctggggagagtgg

SEQ ID NO: 4060 - DNA, 122 bp, Homo sapiens
tgggagtccttttagctgagtactccacggcgtccgtgatggcccagtagcggtccagggcgatgacacagaggtgcaggatggaggcagtgcaacaagtgatgtccgacgacagccagaag

SEQ ID NO: 4061 - DNA, 122 bp, Homo sapiens
ccataggtgaatgaaagcttcctagagaaatttctgctgtttatgaactttgcagaccttcgtagttattgtccacatcactccagggagagctggggaatgcatttacattgtctgccatt

SEQ ID NO: 4062 - DNA, 122 bp, Homo sapiens
ggtgagtgttacagctcttaaagcggcgcatctggagttgcttgttcctcccgctgggctcgtggtctcactggcttcaggagtgaagctgcagacttttgtggtgagtgttacagctcata

SEQ ID NO: 4063 - DNA, 122 bp, Homo sapiens
cttgtccttcttccctgttccccattttggggaaacactggaaacacttttctctttatgcgcattcgcgtctcagcaccgagtgctccaagccctgcgcgcagcgccgggcttggaaggcg

SEQ ID NO: 4064 - DNA, 122 bp, Homo sapiens
agctcagcaagttgaggaccacgggcacgctgagccaggccagcaggacgcccagcgagacgttggctgcacgccgcaccacggagcctggcaggggagtgacatcttccaggtggggctcc

SEQ ID NO: 4065 - DNA, 122 bp, Homo sapiens
accaaacaaacgtctaagcacccttggtccaccagccttttggctaggtggacgggataccgggatgaatactgaagcctgtaccctcacagagcttacagcctgcttggagaaacagacca

SEQ ID NO: 4066 - DNA, 122 bp, Homo sapiens
cccgatctgtagggcgcaaagtcccctgtactgaggcgttcccagggcgcccgcctcccgcgtttacatttcttaggcaaaaaggcagcggagctaagcaggggtgtttggaaggcgcccgt

SEQ ID NO: 4067 - DNA, 122 bp, Homo sapiens
agtttctgatcaccaaacacagtaggagcccagtgtaaaacaggttctggatatctcccacgataaacttcccatgtccctggaagagctgtaccattgtagacacactttagcttcaggca

SEQ ID NO: 4068 - DNA, 122 bp, Homo sapiens
caggtggaggtgactctgtggctgaggcattggagaggctggcttcaggatcggggcccgcgctggcggcagacgcgggggtcttcttggggctctcggcctccctgccatctgggtagtga

SEQ ID NO: 4069 - DNA, 122 bp, Homo sapiens
ccggagagagtatgacacgggtgtagcataaatcacgggaatgtaaggagcgtgtctccacggagcttgtagagtgaagaagagacaatcaacccatggtaaacgtgttaacgttttgatgt

SEQ ID NO: 4070 - DNA, 122 bp, Homo sapiens
tttccaaaactgcctgctgaggactagccagagacaagccctctccctggcacaaggccacgtgctaagatgaatcagattgggccggctggagccagtgggtggaagacagaggacgcacc

SEQ ID NO: 4071 - DNA, 122 bp, Homo sapiens
cctaaaaaagtgtggagatatgaaatgtgtggcaaataagtttattttttatttattgaccgagagggtctcactgctgtgcaggttggcataaaatggcgccttcaaagctcactgcatcc

SEQ ID NO: 4072 - DNA, 122 bp, Homo sapiens
caccgcccccgcctcgatggccccgccccgtccccctcccgctggagccggcccggcccgcgctcctttaaggcagcgaacgggccaagagaagcgtgtttcgccccctccgacgccaccga

SEQ ID NO: 4073 - DNA, 122 bp, Homo sapiens
attctcctgtcttggcctcctaaagtgctgggattagaggtgtgagccaccatgccccatcggtacttgtgatttaggttcaaattttgatgagtttttatgaccaagcctgtggtctatcc

SEQ ID NO: 4074 - DNA, 122 bp, Homo sapiens
cgccggggttgatttgaacctctaaccaagtcctaatatgttcaagttgtcaaaaagttacggactttcattgttttctatactaccaatgatcaattttaaattatcgtgcttttctgcca

SEQ ID NO: 4075 - DNA, 122 bp, Homo sapiens
ggcgggggagggcggcgcggcgcggaaggggttaaggcgctgagcgcggagccatctggccgggttggctggttataaccgcgcagattctgttcacgggactcagagttgaagctcctctc

SEQ ID NO: 4076 - DNA, 122 bp, Homo sapiens
cgaggcggcggcagagttgttggcactgataagacccgtcttttgtgtcttgcccgatcccggagctgtgccaggccggggggagggagcggaagccactttatggctcgtggccccacctc

SEQ ID NO: 4077 - DNA, 122 bp, Homo sapiens
cgcgctctcgggtttcgaatcgcagggcaggtcttttgcgtcaggctccagaggcgtgtgcgccaggccaaagccctcgtctgcgtcggccatggtgcgcccagggccctgtgcccgcgcaa

SEQ ID NO: 4078 - DNA, 122 bp, Homo sapiens
cccaaaacgcggctcttccctcccatcagtttgtctttccactctcattggtcctcaggacgaccgtgactccgcccacctacaccacatttccaccactatccctgacttccaatggcccc

SEQ ID NO: 4079 - DNA, 122 bp, Homo sapiens
cggtgtggcgtctccgtcagcccagccggattctccccgcttcgctggagtggaaaataacggcttcaaactttgcagagaggagctggtgccagcactttaattaacagccatcttggcct

SEQ ID NO: 4080 - DNA, 122 bp, Homo sapiens
gatgggggtctcactatgttgcctgggctggtcttgaactcgtgacctcaagtgatcccccggccttggccttccagattactggaattacagatacgagccaccctacctggcccgctttt

SEQ ID NO: 4081 - DNA, 122 bp, Homo sapiens
aattcttgcttctaaagggagcagctgcaatgagcaatgcctgggaacacattattaactcgcaatacacagtgtggcccgctcttcctttctgtaaacagttacttggtgatcaacaacgt

SEQ ID NO: 4082 - DNA, 122 bp, Homo sapiens
ccacagggtccatgctgggccaggacgaaggcccttctgagcacctcaaagtaagcctggcgccagcccatctgtcccttccccaggagggcctgatctcctcaatgagaagccccctccca

SEQ ID NO: 4083 - DNA, 122 bp, Homo sapiens
agctcgcagtcccaccatcacacacacacacgcacacacagaggcacaggttggcccacacgcacagcctgcacaatgacgacacccgtacacacaggcagacacacacacaacacacagac

SEQ ID NO: 4084 - DNA, 122 bp, Homo sapiens
ggtagaggtgagggagttgagggggagcaagacagtggtcaaagatgagcccaggaaggtcgggagggatttaagagtccttgaaggattttacccaggaggcatgacatcaaatttgcgtt

SEQ ID NO: 4085 - DNA, 122 bp, Homo sapiens
ccgcgggccgcgctgcgtgcgcagggcagagctccttcaggaacacgagaggaataaagacggacccacccgagggaaaccgtgaggaatcgtagccacctgctctccaggagaggctgccg

SEQ ID NO: 4086 - DNA, 122 bp, Homo sapiens
agtgagaatgcgaaaacgcgcgcgcgccgggcagaggggcgctcggcgagagggtaggcgcggtgacaggggtaccccagcagccgaggagagacagcccaccccaccctttaagctaaaga

SEQ ID NO: 4087 - DNA, 122 bp, Homo sapiens
gctttaaacgtgttgaggttggaccctgcccagcccggctgaaccccactctgtaggaggcgcaggcatcagacgccggggacgtcatggtggaggagactacccgtgagcccggtgacgtc

SEQ ID NO: 4088 - DNA, 122 bp, Homo sapiens
tacggagcagatgggctctttatatagagtccaggtccggtccgccagagcagtgcaactcgtgcggcgcggcgggtgcggacgcccgctccccatcaccttccctttttctctctccctcc

SEQ ID NO: 4089 - DNA, 122 bp, Homo sapiens
atcaccaaccgactccctcactgtgaaattaaaccaagtactggaaacgtaactaaacagcgaaccatgtagcttcacctgactcagtgctgggggcctctaccatctactgtgcttgtgtc

SEQ ID NO: 4090 - DNA, 122 bp, Homo sapiens
aacacaaactcttgagctaaggcatggccaattgggccggggtagagaggaggggtgttgcggggaattttaaccaataaagagtagaggccggtggagactgtagtccctcttccaataag

SEQ ID NO: 4091 - DNA, 122 bp, Homo sapiens
ccgccccccgccggcttgctcacctcttcctccggctcctcctcctccttctcccgcagccgccgccacagccgccgggagcgtcacttccgctccagcaggcccatctcttccgcattgcg

SEQ ID NO: 4092 - DNA, 122 bp, Homo sapiens
agggtgctggctttgttccagctgacccgagagcagctcgtggacgtgcaggccaagatgcgggctgagctggagtatgggctgaagaagaagagccacgggctggccacggtcaggatgct

SEQ ID NO: 4093 - DNA, 122 bp, Homo sapiens
ccaccaacaacaaaaatccccccccaaaaaaacaagtaatgtctgcctggccctggctgccgggctcttgagaactgcagctgtgtggccatcctgccatgagtgataggccatggctactg

SEQ ID NO: 4094 - DNA, 122 bp, Homo sapiens
gggatatgaggagcccctctgcccggctgcccagtctgggaagtgaggagcgcctcttcccggccaccatcccttctaggaagtgaggagcgtctctgccgggccacccatcatctgagacg

SEQ ID NO: 4095 - DNA, 122 bp, Homo sapiens
tcagctgagagtcactatttttcatcactaaaggagtcagaggccgggcgtggtggctcacgcctgtaatcccagcactttgggaggccgaggtgggtggatcgcgaggtcaggagatcgag

SEQ ID NO: 4096 - DNA, 122 bp, Homo sapiens
ctacaggtttccccaaatatactacaaaaatctttgagtctcaaaaggggagactgtcgacggtgtgaagggaagtgttttcaaagataattcacctggacatttgcctaggagttttgcaa

SEQ ID NO: 4097 - DNA, 122 bp, Homo sapiens
acacaaagaaccaagaacaaaaacttgtgttccccagtaccattttgcatcctttgtatccggagtttttctttagctgttgtatatccttcctaacagtgtctttattttataaataacta

SEQ ID NO: 4098 - DNA, 122 bp, Homo sapiens
gtgagcagcacgctccttacttaggtcatgacctctgccgactaaaaaggctaaactcagcgtggattagggctataccaggtactggactcttctagagtactgtcacatcggtttggtct

SEQ ID NO: 4099 - DNA, 122 bp, Homo sapiens
tttgggcaggacttgaggagccgctgtttctcttgcctaatgtcgtcgattactagcaggcgcaacagcacatggtatatggagaggctgtgcacataggttactctagtgtctcccgctcc

SEQ ID NO: 4100 - DNA, 122 bp, Homo sapiens
gagggacgagcgcagagtcaggggtgtgtctttctgcgccgcgcggtgcgaggaaagaagcgtgcctggttggcatgataagaattttgtttagactttttagaaattttccagagactcag

SEQ ID NO: 4101 - DNA, 122 bp, Homo sapiens
ggcactgtaagagcacgtgttgcctccggggacccgcttgggagggggctagaggggaggcggggtgcagtctaaagaatgtaggcaaaacacacatcatctcaccctgcaagggacagcaa

SEQ ID NO: 4102 - DNA, 122 bp, Homo sapiens
ctcctgcagctgtgccgcattgctactgcctgggacctggtcatctgccagcaggatgaccgcgggagtaggaaacacagcgccctgtcatgacagacacatgggcgagcagcagtgtgcac

SEQ ID NO: 4103 - DNA, 122 bp, Homo sapiens
tccccggccggctcctaccgcagccgccgccgcccccgccgccggtgaggaggaagctcgcgctgctcttcgccatgctctgcgtctggctctatatgttcctgtactcgtgcgccggctcc

SEQ ID NO: 4104 - DNA, 122 bp, Homo sapiens
agacgctgcagctgctgcacatagcgacccagtccgttgtggagaacgctggccaagaagcggctcggagtcccgcgcgccgtcatagctacagcttggaggccgcggagcctaagcagcga

SEQ ID NO: 4105 - DNA, 122 bp, Homo sapiens
gaatcactaatgctcatcagtcttttacttaaagcaaacaaggtggagggtagctccttgcgaaacctaccacctgcctaaaagcgcagtggctcgggtggtccagtcccggagactttctt

SEQ ID NO: 4106 - DNA, 122 bp, Homo sapiens
ctcgtaaattgacgaagccactggtgctgcaagtgttcttttggggtagtgtctgggatccggtgcaagtcgaatcactgttcaaataaggtgtaattgaaaagtgatcctctcttcagagc

SEQ ID NO: 4107 - DNA, 122 bp, Homo sapiens
taagcaatgatggcggtgatgcagcaaagcctatttgtttgagatcctggctttttgatccgttggtgccacccacgctatgtgctggatgggggtaatcaatataccaccttctctgctac

SEQ ID NO: 4108 - DNA, 122 bp, Homo sapiens
tactccctctccccttcccccagtctcctccctccgctccggagactgctcgctgggcggcggggccggagtcgtcgcagccacctcattgcacaacccggcttcccaactgtttacacagc

SEQ ID NO: 4109 - DNA, 122 bp, Homo sapiens
agtttgggggctcctcaggaatgggatcaatgtccttataaaagaagcttcatggctgggcgtggtggctcacgcctgtaatcccaacactttgggaggctgaggccagtggattgcctgag

SEQ ID NO: 4110 - DNA, 122 bp, Homo sapiens
tctgcactcactataggctgggagctacactagggcctggggacatgaagacaggcgacacggtccctgggctcaagatgccagacagatgtgcaaacaagtgaaatctgatgtgatatgtg

SEQ ID NO: 4111 - DNA, 122 bp, Homo sapiens
cccgctctctcaggcgcatgtgccagttggggccccgcgggtagatgccggcaggccttccggaagaaaaagagccattggtttttgtagtattggggccctcttttagtgatactggattg

SEQ ID NO: 4112 - DNA, 122 bp, Homo sapiens
gacactaggtgtcctgcccctaatctcaccagagccacctcataaaccctgcaagctctgcgaagggcagctgggcacagctgaaagcccagccaccagcccatgtcctgggtgggactggg

SEQ ID NO: 4113 - DNA, 122 bp, Homo sapiens
tggctgctcttagacctgatatacacgctaggggtaagattttgtctgaattagtgattccgctggaaaaaataaagagacatgtaaagtgtgaaagtcactgattcagatggctgtaatga

SEQ ID NO: 4114 - DNA, 122 bp, Homo sapiens
ctgagtcaggagctgttctcctgggtaatttcagagaatccacctcattgctcacatgcacgtcattgcctttggattgtagcatgctggagggtttaaccagggagttgacaatgagtgtc

SEQ ID NO: 4115 - DNA, 122 bp, Homo sapiens
cagcagccccagggcagagtggctgaccttgacctctgagcacagtgcagtcagcccccacgtgcagggccgctcacctgtgtagcccggctcacaggcacactcgtagccatcgatcttgt

SEQ ID NO: 4116 - DNA, 122 bp, Homo sapiens
gttgaagctggggggtggggatctgtttctcagctctccctggttctgtccctctgcattcgcatgttgtctgtgactacgggattccagagttcggcttattaaagaaagcattttcgaac

SEQ ID NO: 4117 - DNA, 122 bp, Homo sapiens
ctcacccaggtccctctcgctcccccaccaccaggagccccaccttcaccagccccagcccgcttcactgcccggggtgggcgagtcttcactcccagaggggtgccatctcgccggggccg

SEQ ID NO: 4118 - DNA, 122 bp, Homo sapiens
agctgggccaaagggtgacttgactcacgacgctgccaccagcccacggcttgcccgaggcgtataaaggctgccagggccgcaggctgccaagccctgccctgcccaaggcgcatagagca

SEQ ID NO: 4119 - DNA, 122 bp, Homo sapiens
aaaaacgagaacctggcaccaccacacgcaagctttccgctcggccgctgccgccaacgccgccgccaccgccgcccctgccaaacggtttcaaatccttgcgggccgctgggtcgccgccg

SEQ ID NO: 4120 - DNA, 122 bp, Homo sapiens
gctggcgagccaaggagataaagaaccctcggtggggatgcccagagggtgcatgctccacgcccctcgaaaccgattctcattgctgctgctgcaaagcaacccgaagtgcgccacctacc

SEQ ID NO: 4121 - DNA, 122 bp, Homo sapiens
tgagatggagaaaaggaggtaacgcctgtataattgggacactgccctccgcctggtcagcggcccggactgatgccctggagtgcttgtccgcccactccccaatgtcccccaagatctgt

SEQ ID NO: 4122 - DNA, 122 bp, Homo sapiens
gagctgagaggtcatggaacaaaaaggctcacagaccaaatgtaaatgctcaaataacatcgtttattaaataaatgtaaaacacattctgagaagcaggaggcaggtgctggggtgggtca

SEQ ID NO: 4123 - DNA, 122 bp, Homo sapiens
ccaggactccggagtggggaattacataagtgcggccagcccacagccgggctcgggcttcggccacggcatagctgtaagtacctgccttcccctgccctcctgcctcctccttcctgacc

SEQ ID NO: 4124 - DNA, 122 bp, Homo sapiens
cacagcacaggtagcaccacccgggccttcccaggccccatggcaaggaggaggcccagccgcctggacgggcgagtctgcctgtcacaagtccccagcacccggcttcccctggcgagtct

SEQ ID NO: 4125 - DNA, 122 bp, Homo sapiens
attagctgagttctaacaagcatatcagttaaaacggcacatggacaaaaagcatttcaccgcaaacagcaaagactatcccacctttctattaacagtgccaagattataactgtttagtt

SEQ ID NO: 4126 - DNA, 122 bp, Homo sapiens
tttagcggcatgaggaatgggctcataagcccacagtggaatgcaggggttctacacaaacgtagcttaatctgagccctggagggtgactgagctctattagccagagaatccaaatcact

SEQ ID NO: 4127 - DNA, 122 bp, Homo sapiens
gtgactcacaaacagcctagaacagtgtctggcatctatatgtccttcatcactatttgccgcctcaataaatgaggcgcagtttgaccttaatttggagatgaggctactggggatggagc

SEQ ID NO: 4128 - DNA, 122 bp, Homo sapiens
gccccattcaaccgaggagggtgggtaaactgcttctccccgcgccccgtcccgcgcgagcgctcacaatgggctgcatagtcccgcaggggctgaagagttcaggaaacccagacttgcaa

SEQ ID NO: 4129 - DNA, 122 bp, Homo sapiens
cccattttagccaagcttatttaagatcacagtgaacttagtcctgttatagacgagaatcgaggtgctgttttagacatttatttctgtatgttcaactaggatcagaatatcacagaaaa

SEQ ID NO: 4130 - DNA, 122 bp, Homo sapiens
cactgccgggggcccgggcaggttgggcggagcacggacacccacccatcctggagtcgtcgatctagaaggagctcgggggcactctagagctcttccccaagccccttcgtcccttttac

SEQ ID NO: 4131 - DNA, 122 bp, Homo sapiens
agctacccacatcctctccaattcttgctccagtcaaccagacacagtttctattgcttgcggtggaagacatgcccatgcagaaggcgtcaaggctcttgggaagatggggagtggcatgt

SEQ ID NO: 4132 - DNA, 122 bp, Homo sapiens
ggtcccccacacccggggcgaaatcgctttgcattctggcttgtaaccctttccgcccggcggtggccaccgctgctctccggctgggagttgcaggctgctgtcattcacgaaaacccgag

SEQ ID NO: 4133 - DNA, 122 bp, Homo sapiens
agcacaggaccccccggagggcaggcgccggaaactacatatcccggcgtgccccgctcgcgagcacagtggagcctgccgccattcggttcacggcgctacgcattccctgagcgccgccg

SEQ ID NO: 4134 - DNA, 122 bp, Homo sapiens
ttgttgtttagcacaccgccgacatgccaccttcctttgtttgctttaatgttggactagcgggggttatatttgctcattccacgcgcatctccctccgcagcagaggcgcagagcacaca

SEQ ID NO: 4135 - DNA, 122 bp, Homo sapiens
gggctcctcgggcgtggccagagcggacgcccaggccgaggaggcgctgagagtgagtgacggctgcgtgggctgccacctgtcacccggcccgggagagcgcttccctcccagcgggcagc

SEQ ID NO: 4136 - DNA, 122 bp, Homo sapiens
ggccgtgtaagggtgagggcctggggcgtgagccattgggcagcttcggggtcctggggccgggaccccaattcgtgagccccggaggaaacctctcccggcctttccagttcggtccactg

SEQ ID NO: 4137 - DNA, 122 bp, Homo sapiens
tcagctagtaaatggtagagctggaactaaaacctatttcttcaatgccaagcaaatccacgtagtgtgctatacaggcgagcatgcaatcattcagtcctgcttttaattccagttcagcc

SEQ ID NO: 4138 - DNA, 122 bp, Homo sapiens
acagatcaccttggcacatagtgctcctttctttggaatcccaaccagccccaactaggacggttttgggcactcccttgtgtgaactcccctgccaccacttttgggggacaaaacagtac

SEQ ID NO: 4139 - DNA, 122 bp, Homo sapiens
aggggagggaagagtaaaagaaactccctctctctgtgtgtgtgtgtgtgtgtgtgtgtgcggttatatgcccactggaaaggtttagtatagcctactggcagcaccaggcagaaaatgaa

SEQ ID NO: 4140 - DNA, 122 bp, Homo sapiens
gctcgcgcccttccaggagcctttcccaccggagcctgcgaggagaggtccgtacttgctcgctaagtgtcagcttggcagcttggccccgtcacgagggtgtgggtgtgtttctgattagt

SEQ ID NO: 4141 - DNA, 122 bp, Homo sapiens
gggcccggcgggatcccccagcacaccgccggggccctcgcactacgagcaaatccggagcgggcggacccccagccttgcgtggtaactgataaccattcacggcctcccgggctgctgcg

SEQ ID NO: 4142 - DNA, 122 bp, Homo sapiens
caacatgaagtgttgacaatttcttctcatctgactatagtggcatctgagtggttcagacgatgatattagtgaaattctgtgtagaatcatcctttccatggaaaccctttagatctggg

SEQ ID NO: 4143 - DNA, 122 bp, Homo sapiens
ttccccaacctatctcatcttccttgcatagtgcagagagacatgtaggcagagatagatcgactcatccatccatctccactgcaagggacgtaataagcaaaggcatgaattcatgagtt

SEQ ID NO: 4144 - DNA, 122 bp, Homo sapiens
tgtaggcccactcctgccagatgcccgactcctccaagggatggctgcagctcaagagctcgcatcagcctggctacacttttcttggaaatgtgctcagccttagttcctttctacacaat

SEQ ID NO: 4145 - DNA, 122 bp, Homo sapiens
cccgatagctgaagcagcggtgctctcattggctggtagttcgtcctgacgaggcgggaccgcgcttgaggaagcctcctacaattggcaggaatctacgtccgtcaccttgcacccgcccc

SEQ ID NO: 4146 - DNA, 122 bp, Homo sapiens
agtccttccaccgaggccgggtccccgcgccttccctagcgccctgcctctctttggccgcgctcgcaggaccgcctgtaggagagtgaagccccagggtttccttgctgatggagtccccc

SEQ ID NO: 4147 - DNA, 122 bp, Homo sapiens
gtgggagcagtgcccgcttcgaggacccagccagcaacgtggccaccgcgcccaacccgccgacggcgccaagttcctgcgcctggggaacagtctctgctccgagtcacctgaggctgcgt

SEQ ID NO: 4148 - DNA, 122 bp, Homo sapiens
ccctaatggtggcccgtttcagtggctccgtgatttgggggtttggtgttgcccaggctccggcactagagggaagcagagaacccctgagtcatccttccgcagacaccccggaccccagc

SEQ ID NO: 4149 - DNA, 122 bp, Homo sapiens
gcgtgttcgctccctctgcccctcagcttcaggcccgtttctgagaagcaataggaaactcgcaggccataaaaaacgcacaggcccgtcccgagcccttcctgtgtcctaaaaatacagcg

SEQ ID NO: 4150 - DNA, 122 bp, Homo sapiens
gaagggaggacctgtgccctgcacagctgcttctcaaaggggtgccagcacctgtccatgcgtcactaacccaagctccatgccgggcacaggctgggcgtcagagccaccgaaacaccaac

SEQ ID NO: 4151 - DNA, 122 bp, Homo sapiens
aaacatcttcagctcctccagttatctcttgtggcatctgtcatgaagaaagtgctcgggcgtgtgtgtctctctttgaacacctttgctgagggatttgctctggtaccttaactccagag

SEQ ID NO: 4152 - DNA, 122 bp, Homo sapiens
ttatatttccttgcaacgcaattctgctctcagcaaacgttggcggcgccactggacacacgtccctccccaagagcacagccgggcatcccggccttggagctggactgagtcccggcgtc

SEQ ID NO: 4153 - DNA, 122 bp, Homo sapiens
cttgctcctgaaaaaaacattgattaactttcacaaaactgtttagatccatgccaatatcgtgcactctgaggcaatagaacaagttgaaaaattgtgataaacattcatttgaaatgcag

SEQ ID NO: 4154 - DNA, 122 bp, Homo sapiens
aggagactatttccaaaatggcttcattctccagtagggaatcctagagctaacctgtgacgtgccatttattcaaatagagagaagagagacccccaacccttagtgcttccttcagaaca

SEQ ID NO: 4155 - DNA, 122 bp, Homo sapiens
gccctggctgagcagctgcttcatcttcgtcatcatcatccagcacgatgatgctgttagcggtggccataggggatcaaatcccccggagggaggaagtggtggggatttcagaattcctg

SEQ ID NO: 4156 - DNA, 122 bp, Homo sapiens
cgcaggggtctcacttggttaggatatggttctgaaatacttcactgagaggggcatgggcgctggagtggagacaagttgggacctggactcattcagagttcattatggggaggagagat

SEQ ID NO: 4157 - DNA, 122 bp, Homo sapiens
actctctcttacatgctccttgttaaccccacatctatctcttaactagactgagaatttcggcattaatgtttataatatttctttcctgtttgtttcctaaggacagttttttttttcat

SEQ ID NO: 4158 - DNA, 122 bp, Homo sapiens
cgggagctggaagtggccgagccccctcggtcccctcaggggaatttttggaccaggtgccggtgcccattgggcgaggaggaggagaggagccctggagaggtgggggggcggccaatcag

SEQ ID NO: 4159 - DNA, 122 bp, Homo sapiens
gtctgaagctatcacaggcagtggggtgtggggagaacgagcccctcttgctgccctcgtcgctgctggggacaggcaggcagcctatgctaggcacttggctgatagcacagatctggact

SEQ ID NO: 4160 - DNA, 122 bp, Homo sapiens
gatattctcctaaaaaatttccaggttgattcaaataacttaggttaaactcaacttttacgtgttgggatggggaagagaagacttatttgtagccttcacacctttatgttcctgtttca

SEQ ID NO: 4161 - DNA, 122 bp, Homo sapiens
ttggtgggctgcgtcccagcttcgtcagccccacctggcctgaccccaccacacaggggtcggcttccatgcatcttggttctggggacccattctcagggaggtgggtcttggaaggagag

SEQ ID NO: 4162 - DNA, 122 bp, Homo sapiens
acacacacgcactttatatacagacattttaaacctccattcagataaaataaatatctacggcaacccagtcatccttaggttaaaaagaactgttattactttaactggaatggcagccc

SEQ ID NO: 4163 - DNA, 122 bp, Homo sapiens
atttacccgtggatgaccaaactgcacatgagccacggtaaactttaggacttcattttgcgctctcgggtccgcctgggttttataggccatgcggggcaaataaagaaaaaaaacctgcg

SEQ ID NO: 4164 - DNA, 122 bp, Homo sapiens
gagcgcggagagcgggcaggcagtgccacctgctgagagccactcaggccgagcaagcggcgggcagtgccacctgctataaataggccgccaaggacagggtgtgcgactgtacatcccgc

SEQ ID NO: 4165 - DNA, 122 bp, Homo sapiens
gaaggctaattgggaaggtggtggccccatagcccatctgctggccctgggctggatgagcgagcaggaagcagcagccagctctgggcaggtcgaggagggccaggcaggctcccgggtcc

SEQ ID NO: 4166 - DNA, 122 bp, Homo sapiens
gcattctgattcccataaagatctcacagttattcacaggacctcctgtgtcagaccttgcgctgggcactgggagcgcagaaatgaacctaagacggtctcagccttcaatgaccatttac

SEQ ID NO: 4167 - DNA, 122 bp, Homo sapiens
cgtaaaatgcacccaggcttcccgatgaagtcatctgagcatgcagagcagccacatcagcgtttcttcccgggtgctgccatggctgctcccggagagcccagatgtgcaggcaccttgat

SEQ ID NO: 4168 - DNA, 122 bp, Homo sapiens
ttacgcgcatctctttgcaagtgggaagtcggcactggagcacacaacagtggcatgggtcgagggtgtcccagggcccctcgcggttctccctcctttcctcccggcctgctccccttccc

SEQ ID NO: 4169 - DNA, 122 bp, Homo sapiens
tggcgctgctctgagttaatctccttgcccgtcagggggtgacaggaggtgtctgtcattcgaagctgaggccgtcagccttgccggctaattggggcgcgggcaccaggagcacgggaaat

SEQ ID NO: 4170 - DNA, 122 bp, Homo sapiens
gggggaccgcgcaagcgcagtgagtactgcacgttgtcgcgggccagtaacgtcatcagacgtgtgtgtgtccctgcggcgctaagaaggggagactgaggctgaggctggggaacatcggg

SEQ ID NO: 4171 - DNA, 122 bp, Homo sapiens
tagagacggagagacccgggcgccctgcagcagcagcctcccggcccagagccgggatgccggcaggacttctggaagggaaacctggaccagggccaccccgggcacagggaacgcggctg

SEQ ID NO: 4172 - DNA, 122 bp, Homo sapiens
cacgggcccctgctgactcacgcttatgaaagtgattttcctggccccgcccactgcctgcgccgcctcctccctccccgtgaaataccctcacttccctctggcctctcagagcctcttgg

SEQ ID NO: 4173 - DNA, 122 bp, Homo sapiens
ttttgacctttattcccaggaccgattctggggcgagtgcttggcgccagggcacgggggcgggggccctgactgcctcagccgaaaaatagtctgttgtgaggaattagcacctaggaggt

SEQ ID NO: 4174 - DNA, 122 bp, Homo sapiens
aataactttcctttgtctcctgtcctaaaccttcgggtttcatatctattatttgccttccgtgcagtgaagatatattaggcaaatgactgtttcctataatctttccttttttttccgtt

SEQ ID NO: 4175 - DNA, 122 bp, Homo sapiens
tgccaacactggctgagggcggaatgctgacggggcaaggatgaggcgcagccaggacttcgaaaaggaagctgatatcaatggagggaatttttcatctgatgcagcatttcatatactta

SEQ ID NO: 4176 - DNA, 122 bp, Homo sapiens
ctgctcctgactcaccgctgttcgctctcgccgccgaggaacaagtcggtcatgaagccgcgcagcagccatggcttttaaggataccggaaaagcacccgtggagccggaggtggcaattc

SEQ ID NO: 4177 - DNA, 122 bp, Homo sapiens
gatttcccgagtattttgcatgtccaactgaaaactgaagtaggtttatgagagaatgcacgcctacctggatgggtctggggagtgtgtcactgtcaccgcagataattgacaagggctga

SEQ ID NO: 4178 - DNA, 122 bp, Homo sapiens
cggcccgggtaagccggggttccagggaggtctctggccccgctggggctctggagggggcggcccggggagccgaggcctgagtgtcaggccccgcaggcctggtctacgtcacgcgctac

SEQ ID NO: 4179 - DNA, 122 bp, Homo sapiens
aaggccgtcgtaggcaggagacaaactgctggatgagctgagtgccagagaaccttgatgcgcaaacaaaggcgcggctgggtctggtccgccggccggcgctgctgggttcctgctgtgga

SEQ ID NO: 4180 - DNA, 122 bp, Homo sapiens
atcagaggctttgcagggttgggtccatgaggggtccaaagagaaacagttatgtctcaacgaggatgcagtgcatgagtggggcttggtaaaaactccatgtagtgaataaagggcttcac

SEQ ID NO: 4181 - DNA, 122 bp, Homo sapiens
cccagtagttcctctcagttccacttccagttgtttctatgccattaaattctttccaggcgagataaggggcccgcccttcccacccggggcgtgtcacgtgtactggtggtggggggcgg

SEQ ID NO: 4182 - DNA, 122 bp, Homo sapiens
atacactcatctttttcctttatagacttcttgattagtaccttaaatcccaagtaacatcgtcagtcttcagaggagcatcctgtcacataacacatggtttctctgttttcacagcctca

SEQ ID NO: 4183 - DNA, 122 bp, Homo sapiens
gaacatggcctgaaacaaagtttttctgagctctggggaaggtggcagtaaggtgaggggcggaatgtcactgtgaacaaaggttgtcttgttatgcagattgagcctcccaggtaatttct

SEQ ID NO: 4184 - DNA, 122 bp, Homo sapiens
ctgggtcgccgctacttgcagcccgcgggcgccgtagggctggcgcagggtgcggtggggcggttggtgatcatcctagcctgcggtagatggtgcgccctgccttccctgcccagacgtaa

SEQ ID NO: 4185 - DNA, 122 bp, Homo sapiens
ttctagaaaattctcaagagggggcaggacaatgctgctcgacccagtcccgcacagacgcgccagctcaaggactactggcagacgggaggaggtatagagccctttgtgtttgcttaggg

SEQ ID NO: 4186 - DNA, 122 bp, Homo sapiens
atggtagaacgactttgcaaactagcaccctattcacacgtaaggggttgctcttgtcaccgagactgttagaggcaacgtgagttaacagaaatagcttggattttgaagctaatggaatc

SEQ ID NO: 4187 - DNA, 122 bp, Homo sapiens
cccgagcggaagcgcggatggggcgtggcccggtagctgtggccgcgcccccaccgattgcgcatttcgattggcgttagtggccgtccgtcagcacgccccctccggtctcgcgtcccgat

SEQ ID NO: 4188 - DNA, 122 bp, Homo sapiens
aatgctgtttgagtttttccatgtctccacaattccattcgggtccaccaggcaaggcagcgcttctcgggaaagggtgcctggaaaatcagtggacctccaggcacttccagcgtgaccaa

SEQ ID NO: 4189 - DNA, 122 bp, Homo sapiens
tgtttttctctgcactaaagaggccctgcaggtggctgtggccaacttatgcagtggcttcgagtgaacgaacgtaattagtaattaagcaaagcgggcatccaggacattcagtttcatct

SEQ ID NO: 4190 - DNA, 122 bp, Homo sapiens
cccctgctttaccgcctttgcgccatccgggttgtctggccacgcctggggcggaaggggcggggagtaagagagagagaaagagagacagcactgtgcgtcatgtaccagcgccggaagtt

SEQ ID NO: 4191 - DNA, 122 bp, Homo sapiens
ccagctccatgttcctaagcctgcctcactggtttcggagggctggagagcagctcagctcgctagctgcgcgcttcccggcacaggcagtgccactgcgcaggttgatcagcgaaacagca

SEQ ID NO: 4192 - DNA, 122 bp, Homo sapiens
ctactttcttggccaccgcttcctggagcttgtgttcctggaagccagccataaataagccggccataaacgagggtaaacaggtgcctgagtaaacacaccagagcaaatgagtcatatgg

SEQ ID NO: 4193 - DNA, 122 bp, Homo sapiens
ccctctccagaagggccccagagacgctaagggcttgctcaaagagcgtcttctcttcctcgtcctcctctactttctcggagtcctcaaggcttttacatttcccttcgctgttttggttt

SEQ ID NO: 4194 - DNA, 122 bp, Homo sapiens
ccctccgcctcccgcggtccctccctcccgcacgccggcgctcccaggccgcgcttcctgcgtccccaacccggtccctgagagggcagtgcgccctctccaccactgcgttccctcggcta

SEQ ID NO: 4195 - DNA, 122 bp, Homo sapiens
aaacaatttctcataaatattttctcccaatgctgggaagagggagaggggaaggaggtacggaaactccatcaatcatttgaagggctgccttttatcagactgattttccgtagtgggtt

SEQ ID NO: 4196 - DNA, 122 bp, Homo sapiens
tctcacacgcctttcttattggataccggcttttcatggggccgagcgccgctgggtaggcggaagtagccgcaggcatggcggcggctatgccgcttgctctgctcgtcctgttgctcctg

SEQ ID NO: 4197 - DNA, 122 bp, Homo sapiens
tactaaagctgcatgtgtgccagttccactcctaagaaatgagtcctagaggccgggtgccgtggctcaacgcctgtaatcccagcactttgggaggccgaggtgggtggatcacctgaggt

SEQ ID NO: 4198 - DNA, 122 bp, Homo sapiens
cctgggagacagagactctgtctcaaaaaaaaaaaaaaaaagaaaaacaaaccacgtatacgaagtcacctccaattccggtggcatggctaggggtgtgaatgaactagatccaatggtgc

SEQ ID NO: 4199 - DNA, 122 bp, Homo sapiens
gtactgagatgcggaaggtaaggacgagaaaggcctcaagacggcagcgcaggcccctgccgtactctgggaaagaaaaattagtgaaaaaattaaggctcaagtccaggtctttgctgtaa

SEQ ID NO: 4200 - DNA, 122 bp, Homo sapiens
ggatgatactgacacacaagccaaataacatagaggggtctgtgccctctatgtggaaagcgagtgacttgctgtgtctgctcttctctcagcgttcagtagccctggttgttgattacagt

SEQ ID NO: 4201 - DNA, 122 bp, Homo sapiens
ctcctgtttgcttggacttaagtttgagtaccacaactctaacctgccacttcagctgcacgggcaggcttgtggggacccagcaactccgtccagagagcggctgagtcagccagccgtcc

SEQ ID NO: 4202 - DNA, 122 bp, Homo sapiens
ccccctttcggcctcgggccccttagagcagagcagagatctgtgcagcccccgtccatgcggtggaaggggaatgcaccatgggagggaaacctcaagtcatgggttttggagcttcaaac

SEQ ID NO: 4203 - DNA, 122 bp, Homo sapiens
aaagacagtgcttggtgggaacatttctgcactactggagtttctgaagcttcaaccccacgcaccaggcccacccacacccgggcccccgttcccccgcccgacccacccacaaccagcca

SEQ ID NO: 4204 - DNA, 122 bp, Homo sapiens
accttatatatatttttttaccttatattgcacagaattagtcttcctgaaacttccaaccgttagtcttcgtcctgccagttgcagccaaacagaacaaatttgtttatcagtcaagatag

SEQ ID NO: 4205 - DNA, 122 bp, Homo sapiens
gtttattttttttgaggaactgccattctgatttccacagcagctgttccattttacattcgcatcaacaatgcacatgggttccagtttctccacatccttctcaacactggctgttttct

SEQ ID NO: 4206 - DNA, 122 bp, Homo sapiens
accccccgccccgtctcactggcccgggttccgggctggcctgtggagaacccccgcgagcgcaccgcactccaatgtaaagccagccactgccggcccgcttcccaggtcgcttttctctg

SEQ ID NO: 4207 - DNA, 122 bp, Homo sapiens
aaacccacagccccatgggggcaccagcccctttctagtagttctttccccagtctctctcggcccctttgtttccagtaaagtttgaactccaggccctggactgaggccactgggtgccc

SEQ ID NO: 4208 - DNA, 122 bp, Homo sapiens
ttccacccaatcacctccacaaatcacaaccaggggtctttcaggcctatccctggggtgcggggtgggggcagggagcagaggagatggagtttgtaatttgaaatgggaccccatttgaa

SEQ ID NO: 4209 - DNA, 122 bp, Homo sapiens
gtttagtttaagagccaagcagccgggtctcagggaagatggtgacgctggtgaaacccgcgcagtttgttgtgccaccgttgctgcaggtggtccagacttggaaccttgacacaaggccc

SEQ ID NO: 4210 - DNA, 122 bp, Homo sapiens
acggcatccccatcagggacggccaggccgggacacacactcacttgtactgagactggtcgttgccgccgacatctggggatgttaacttctgcagcaaaattcgtataatactaatgaaa

SEQ ID NO: 4211 - DNA, 122 bp, Homo sapiens
acctctgcacaaggggagaaaaatgcaaatatggctgcttttcagtgcaaagtgtctttgcggccctcattccccaagttgaaagggagggtcataaagctctgcttttatttgggtaagat

SEQ ID NO: 4212 - DNA, 122 bp, Homo sapiens
ccctcacactttcttcagaaagggctgaaagggaaggggaagtaccttccctgaatcttccggtccctctagaggggactgaaggcctgatccaacccggaaacctctaagccccaccagcc

SEQ ID NO: 4213 - DNA, 122 bp, Homo sapiens
tattcgcagtccccttcctacgttctgcccattgtaaagaccagggtcagcgttgagcctcgcccttcttgctagaactacaactcccaggatgccccgcggcacgggagtgcgcacgcgcg

SEQ ID NO: 4214 - DNA, 122 bp, Homo sapiens
gctgtgaaggacacagtcagccggactttgcttagttcacctgtcggagccactcgttcacgtttatctctgtctggttgtcagaataaattgtttccaaccaggaaacaaggatatctctt

SEQ ID NO: 4215 - DNA, 122 bp, Homo sapiens
gcgagtggctattttggcaacttcattccaagcctaaccaatcaacttctgaataaacaccggcaacaccaattgtctttcaacggatgatggctataggatagggtgtacttatattgagg

SEQ ID NO: 4216 - DNA, 122 bp, Homo sapiens
ctggagtcgcgctgcccagcagccggacttttctccgaccacccctggccgaattcccctcgatggctgcgtcgttccaccatcgctggtctgccagtatctgctggtgtctcctggttggt

SEQ ID NO: 4217 - DNA, 122 bp, Homo sapiens
atttatttttcttttttttttcctctttctttttttaaactccatcctggtagtaggtggcgctgtaggtttttgtgtgccttactgaacattacctagatctagggcttaagcggcagatt

SEQ ID NO: 4218 - DNA, 122 bp, Homo sapiens
cgtggggacggccgagcacaactaggcacaaaggtagaaacgcaacatctgggcgggtcccggcgccacctccgagtctcagggcctccacgcgccccgggggccagacgctcagacctagg

SEQ ID NO: 4219 - DNA, 122 bp, Homo sapiens
tgcgggcctaagcgccccttgtggcccagctcggagaaagttacacagatagatgcctcacggggcaaaagcgcatccgcccttctcagctgatccatgccacactgtgagcactttgaagg

SEQ ID NO: 4220 - DNA, 122 bp, Homo sapiens
cgcggtcactgcgtctaatgtttgcttgtctattgtctgtaaccctcctttcccgacggacgggccaggctggagccaccggccgcgcctgcagctcagtgggcgccccaggtccccggaaa

SEQ ID NO: 4221 - DNA, 122 bp, Homo sapiens
gagtttattgtatttcctattgctgtaaatctagagcctgaaacagtatctagtatatatcggaaacccaaatgatattgttcaattaatgttgaatgaaatgaaactgaagaggtaatcca

SEQ ID NO: 4222 - DNA, 122 bp, Homo sapiens
agggccttgcactaggctgggggccaggcctccagctacaacctgcctcccgaatgcagacgcgggagagtctaggagcactcgggcaactcagtccctccctccaccgcttcacctgcttc

SEQ ID NO: 4223 - DNA, 122 bp, Homo sapiens
tggcaaaggaagatgggagatggaggagaccacattccctgaacatccccattcatccagcggccatgccattgctttacacttaacatttaactcccaaggtaggaaacatctcaagttgc

SEQ ID NO: 4224 - DNA, 122 bp, Homo sapiens
aaggctagactttatgaaatgtgctgcgtggatgcagtagtatctccaacccccctggaccgctctgccacgtacaatcttctatctttcagtccggaactcagtaacacccactccagggc

SEQ ID NO: 4225 - DNA, 122 bp, Homo sapiens
tgcgcaccccacccattcccggaaagagcagaccctagcgagcgcttcctgcgagccgtgcgctctgcctctgttggtagtgaatcttcccagcaactccacatggtagatattattatcct

SEQ ID NO: 4226 - DNA, 122 bp, Homo sapiens
tagtttttctcatagcattttcttctgtggaaatagaattctgtttgaactcttctatggcgtcaccattttcccctgctgagctttaggatttttataataaatgagaatggttttcttag

SEQ ID NO: 4227 - DNA, 122 bp, Homo sapiens
aggaaacctggactacagcgcagcagggtaaacctgacaaataaacgcgacggggaactccgtcccaagctgctgatctgtgagtagaaagaaaatgcagcttagaaaacttgatcgctaat

SEQ ID NO: 4228 - DNA, 122 bp, Homo sapiens
ttctgtgccctcaggatccagcgtgggactcgtgagaaccctccagagacagccacatttcgaagcaagtggcacaggctttgcagaaggcacactgggcccctctcaaaactcaagcagca

SEQ ID NO: 4229 - DNA, 122 bp, Homo sapiens
tttctaccgactaggaagagatccagtccaggttttgcctttgactcggcctgtgaatttcggctgtgcaatgtgtagcacgtttctttctcccccctcctttctccttccctcttgcctcc

SEQ ID NO: 4230 - DNA, 122 bp, Homo sapiens
ctccagtaagaaacgagggcagtcactgccaaggcctggccagagaggtgatagttcccccgacccaggctgtggcgcaggggcgaggcagaccctggggagctcaggggcagccctgagcc

SEQ ID NO: 4231 - DNA, 122 bp, Homo sapiens
agtgactgaactaagaagagcaaaacaacatgtgactcggcgttacgcaggcacacacagcgcggccgccccgccccgctgcctcgcattggcgccgcgccccccgacggacggcgcgctcg

SEQ ID NO: 4232 - DNA, 122 bp, Homo sapiens
ctacaagcatccttccctaggactgctgtaagctttgagcctctagcaggagacatgcctcggggacgaaagagtcggcgccgccgtaatgcgagagccgcagaagagaaccgcaacaatcg

SEQ ID NO: 4233 - DNA, 122 bp, Homo sapiens
ctcagagtgatcttaaaggaaacctttgacatggtggcgccgggaggaacccagaacccacgccaactccgcggagcaaccccacttcctccacggtgccggggaccacaccgccccactca

SEQ ID NO: 4234 - DNA, 122 bp, Homo sapiens
tatactgatttttgaatttgcttctttatttccatcttcttcaattaaagcacaagatatcgtactcaatttccatttgatcttccaaaagaaaagtactgaataatctacccctgaatttc

SEQ ID NO: 4235 - DNA, 122 bp, Homo sapiens
gcgacgctcctgctggcccagcaaccgccagactcgcaccccagcttgtgggccccttggcgggtccccagtcgaagcttccgggataacccgaccacagtttgaatgctgctgccctcccg

SEQ ID NO: 4236 - DNA, 122 bp, Homo sapiens
acttcccagaccaagaaaatgtccttccaaaaaattctccctgaccggatgaaggctgctcgggaccgagccaacaagaacctggtggacttcattgtgaatgcaaagggaacagagaacca

SEQ ID NO: 4237 - DNA, 122 bp, Homo sapiens
tacatgggaaaggggcactttcacttctgtcagccctaggtatggggagggcagtcacagcgcttgagaggcctggaaaaggagaaggaaagttctagattctcagggaatacagatagagg

SEQ ID NO: 4238 - DNA, 122 bp, Homo sapiens
cccttgaatcttgccaattccatgacagtgcctagaagtctgacgattctaaattgtccacgccaaattttgcaacaaaatttcactaataatgatgctcatttgcaaggatttagtttaga

SEQ ID NO: 4239 - DNA, 122 bp, Homo sapiens
cttcccgccacagacactcaaatcactccaagcaaaggacccgggactcacatgtcaggccgctgcacagcaccgacacagagacccctgggccgtccgggaccctccctcctcctgcttgt

SEQ ID NO: 4240 - DNA, 122 bp, Homo sapiens
gaggtcttgggccaggagcagatcagatcaacaggattatccagaaaatggcagtcatggcgagtattggctccagatggggagggttagggtcagggtcggctcttctcaccttcctgagc

SEQ ID NO: 4241 - DNA, 122 bp, Homo sapiens
cccgtgtactcactccctctctaggcctcggttttcccatctgtacagtgggacctaagccgtttccgaacccttgcaattgacgggtgcgccggggaggggtgaagggcgggggcgggggg

SEQ ID NO: 4242 - DNA, 122 bp, Homo sapiens
gtcctgctggcattgagagacaccctggtttgggggaagtcccctgagcaagcccacgtgcgcagctgctaggggcaggctgcgggaggccctcttcttcctgctgcctgttttggtggctg

SEQ ID NO: 4243 - DNA, 122 bp, Homo sapiens
tccaagaatgttctgtggctcgaggtgggccacgctccccttcatgctgaatcctgaatccgaggcctccaccgtgaccctcgcctccacccgggtgccggctgcagagacggggtttcctg

SEQ ID NO: 4244 - DNA, 122 bp, Homo sapiens
tgtgttccctctcagactatcctttctgaaggaagcctccccacttcaatgaccaactatcgtcatgcttattttcttcacagagtttaccacaattcattttcttacttatgtaacattca

SEQ ID NO: 4245 - DNA, 122 bp, Homo sapiens
ggcgaatgtcgtagcctttcaacagcttgtccaccgtctccttcacaaaggacatgttcccgggatcgttcacactgggggagggacggggagcacaaagagcggggtcaggggcggctcag

SEQ ID NO: 4246 - DNA, 122 bp, Homo sapiens
ttatttgctcagtctgccaacactggacccaaagcaccctggatctgtggatctcctctccgctggacccagtgggatccagggatggagcaaacgctaaagggccgaacttggctcttctg

SEQ ID NO: 4247 - DNA, 122 bp, Homo sapiens
cccgtttgggaagcgaggagcgcctctgctcggccgccccgtctgggaggaagtgaggagcgcctctaccccgttgccccaaatgggaagagaggaacgcctctgcccggccgccccatctg

SEQ ID NO: 4248 - DNA, 122 bp, Homo sapiens
gggaggcccagcgagacgcagtgacttgcttcagatcacacagcgagctgggggtgagcacggagatttcctgtccacagtttgtggtgggggttgcagacacctcagtacaaatccccact

SEQ ID NO: 4249 - DNA, 122 bp, Homo sapiens
aggcgagccactccggcagcgctgccaggttgcactccagcacctcacactcgcttctcccgggacttaaatttaaactcctcgagcgtcatgtccccatggctgtctggggccatcattgc

SEQ ID NO: 4250 - DNA, 122 bp, Homo sapiens
aagggggcagcagagacaaaaagcttcgcctgaaaaccatttgctaaagttctccacccacgaggtaaatcagttcccagtcctggctgcacactggattcacctggtgagctttaaacact

SEQ ID NO: 4251 - DNA, 122 bp, Homo sapiens
gaggcagcagtttcttggcaggcctgggacatttctgagccatgagcacaaggctgctggcgtccaactgctctgtctgccccagctcaggccagggcccctctccagtccccctccccagc

SEQ ID NO: 4252 - DNA, 122 bp, Homo sapiens
tgccgcggcggcggagggagccgcgatggagggcgctccgactgtccgtcaggtaagccgcgggcctcgctggggcaggttcccatctgtggctttagcctactttttctcacggtgattgc

SEQ ID NO: 4253 - DNA, 122 bp, Homo sapiens
attgtccagattgtgtaactatagagaggcaaggaggagctgctgggtaattgagaacagcgttcactcagtcctgccccttggggaccactcagtggatgaatagccatcatttctctcat

SEQ ID NO: 4254 - DNA, 122 bp, Homo sapiens
cgcatccccatcaccctctcctcctgacggccctgactagactgaaacgagcgtgcgagccgaccctcaggccctcagcgtggccccgcctcgcaggtccctggctgcacctggcttcgcga

SEQ ID NO: 4255 - DNA, 122 bp, Homo sapiens
ccgctgtgagccggcgacgcgaggctgggggagtgggaggcaaacccgctaacctgtcgtcgaatggccactcccagttctccgctcacgagggtggaaaggcagaaggcttgaaggcaagg

SEQ ID NO: 4256 - DNA, 122 bp, Homo sapiens
ccatactgtccagagccatacctaaggtaagcaacgcttcccgcatcctcagactccaggcgtccaaattcgcacgcttgcaggcattctattgattcacacttgagtccttcaacaggtag

SEQ ID NO: 4257 - DNA, 122 bp, Homo sapiens
ccagccaggcccgggctggtcagtgaatgaataaacgtggcccatttttctgcttttgtccggagcctccctggggcttcctgctgtcagccccagctgtggggaaggcggaatttgcctga

SEQ ID NO: 4258 - DNA, 122 bp, Homo sapiens
ccagagagctccgaaccttctgtgagtgggtgtggggaggagatggggacccagtggggtcggtcggtgtttaggaggtttagaggtagatacatctgaatgctgaccccgacttcaaccct

SEQ ID NO: 4259 - DNA, 122 bp, Homo sapiens
ctatctattagtctcatcagttacaagccttgattcttctgttctgaatgttctgtaaggcgtgtgcaaagtcctgtgtcttttaaggtaagacttgcctgtggatatctagaaaccacgcc

SEQ ID NO: 4260 - DNA, 122 bp, Homo sapiens
cccagatcaacatcactatcttgaaaggtcagatggctgcaaagacaagcacggggtggccgggctgctctgtgctgatccggaggaagggatggagtcgttagggtggggctaggcgagag

SEQ ID NO: 4261 - DNA, 122 bp, Homo sapiens
cgttacttgttttctgatctttaagccttgtcgcctgttttatttaagttttaatgcaatcgccctgtttgacactagttgacccctcatctgggtgtcacatgtgactctgtgaattttaa

SEQ ID NO: 4262 - DNA, 122 bp, Homo sapiens
gagaagccacagcagagctgcctgggttggtgtcagagcaacaggcagaagtgactgtgccgcccgtgggctgtcatccaccggtggctactgtgtcattctggaaaaactatgatgccatg

SEQ ID NO: 4263 - DNA, 122 bp, Homo sapiens
gactgctccggacagcagagatgaaactccttctgcttgtcttgtcctctcccacttatacgcgtcctcaggaaaggaaggccacagttaaaacgttgagaaaaacatgtcggtgtttctgc

SEQ ID NO: 4264 - DNA, 122 bp, Homo sapiens
cagcctggtcttaactcagtcaccagtgtgatcctaataaacctgttagacttgtggttccggaactgacagctctccaaaggcctctcgttttattcagagtaaaatccaaagaccttaaa

SEQ ID NO: 4265 - DNA, 122 bp, Homo sapiens
ccctgtgacaccattctgccaagccaactgtcacagagtcaggctttcatgatggatggccgggccttcttttttttttttcttttcctcccttcctcatttttttggagagcaaatgtttt

SEQ ID NO: 4266 - DNA, 122 bp, Homo sapiens
gtgcgccaccacctccacctccgccacctcccccaacgccacccccgctgcccccggcctcggttcttagtgacaaggcagtgaagcctcagctggctcccttgcacctcccgcccatcccg

SEQ ID NO: 4267 - DNA, 122 bp, Homo sapiens
ctcaacacaggggccagaccctgagaaactcgttctcactcctcgggccttgaggccccccggctgctctccgtggctggccctggcccattagtttattgatccccttgaccaatcattgg

SEQ ID NO: 4268 - DNA, 122 bp, Homo sapiens
atttttcacccctgctctaagacttgcctcggtctctccttcggcattatgctcctcaatcgaattctttccttctcctgaggaggcaagaattaatgttgctgcagactccttacagataa

SEQ ID NO: 4269 - DNA, 122 bp, Homo sapiens
gagagatcccgggtcgtcccacatggggctgtgctgcacctggaagcccggggtggtgggcgtcgggggcgaggagggcttgtagtaaaccgacccggagtgcggcatcatctcctcagact

SEQ ID NO: 4270 - DNA, 122 bp, Homo sapiens
ttattgtaaacccattttaccagtgatgtgaatgagccgcaatgaaggctaagggacttgcgcaaggtgacatatataagcaacaggcctgcgattggaatccaggccccagagtctgggca

SEQ ID NO: 4271 - DNA, 122 bp, Homo sapiens
aagccccgcccaagcttccggtcccagtcccccggggagactccgcctctacggaggccacgcccctgacaggcccattgctccgcccactgagttatgttagcttctttattcattcgttc

SEQ ID NO: 4272 - DNA, 122 bp, Homo sapiens
aagccttacagctatcttagatgcgatctgactcctgtgtgactgtggagcacccagggacgtggttttagagtctacctaatatgttaaggacaaggaaacctctgagtctacctaatatg

SEQ ID NO: 4273 - DNA, 122 bp, Homo sapiens
agggctgccctataggatccgccagaagacagaccggcatttcacgaagtgagcaaattccggaggaaataaaggatttccgttttaaggggttgggaggcaagagaaaaggctgagagggt

SEQ ID NO: 4274 - DNA, 122 bp, Homo sapiens
tagaaaggtttaagtgttactcggcgtcaggggacggagtggggggaaaccagacaagaacgcccatcatgaattgctccccacaaagaaaacatatttctaggaacttggccgttttcccc

SEQ ID NO: 4275 - DNA, 122 bp, Homo sapiens
aaaaaaaaagtgcaagatattactagaaaaacctgactgcacacacaatcctatcccctacgcaggagaaagaccgagtgctagcacccggggtgtgaaagcctgcaccaagggacccagga

SEQ ID NO: 4276 - DNA, 122 bp, Homo sapiens
cgccccggcggccgtccagcgggaggcggagcgagtccaaaatggcggctctcaggctggcgcgctccgtgctgctggggctttgaggtggtcgccgggggtccgggggaccctttccccgc

SEQ ID NO: 4277 - DNA, 122 bp, Homo sapiens
gtttcctcaccgaaggctcaggaggccagcccagtgagggatggaggtggctttagagggcgacagttgtgcagcactcatgagcaacagtgcccaggacttttgaagtcacgaagggctcc

SEQ ID NO: 4278 - DNA, 122 bp, Homo sapiens
ttcagatcacatcaatcaagcaggtaccaaatcctttctgaggtgctatgttacactctacgtgtgaccaaaaagcataagttgtgtctctcctcaagaaacgttttccattaaactacggg

SEQ ID NO: 4279 - DNA, 122 bp, Homo sapiens
agcccaaacctagctcctccccaagccgccgccagagacccctcttctcccaaagctcaccggggccccgcccctgactccgcccaccagagcccggtcctccagtcccgccccatcccggg

SEQ ID NO: 4280 - DNA, 122 bp, Homo sapiens
tggtggattggagaggatgtcctgagggccagacaccagccagggcggggttgggtgacccgtggggtttattctgtgatgtcacaacggcagtcaggggtctccctgttgctccctcagcc

SEQ ID NO: 4281 - DNA, 122 bp, Homo sapiens
tattatttccaaaaatatcttggacagacaaggaccaaaatgccaaaatctcagcggactcgataatctgcctgctgatgttccttctgtggctgtgtctattttcagttctgctctaacat

SEQ ID NO: 4282 - DNA, 122 bp, Homo sapiens
agcctccttgactaaatgtggccaaaaaacatactgctatttccagtatcaaattgaaatcgcttttccttttcaagaccctgctctagtttcagtaataatacctgttactttgcactaat

SEQ ID NO: 4283 - DNA, 122 bp, Homo sapiens
ccgttgcggcgcggcggagcagccaatggcgagccccacagtctcgcgagagtgctcaggcgctcttcgtggctgccctcttagctgctagcggagctcctcagggggcggccgggagccta

SEQ ID NO: 4284 - DNA, 122 bp, Homo sapiens
cagcctgagccccggtccatgctcactggatgagtctcacccgccagcctgagctccagtcgacgctcactggatgagggttctcatccggcagcctgagacccggttcacgctcactggat

SEQ ID NO: 4285 - DNA, 122 bp, Homo sapiens
ggcgttacttctggtcctttacacataacattcccactgcctgggacatccttcacacaccgccttctttgctacctgtccagccggtccttactcatcccttaaggtttcaactaaactcc

SEQ ID NO: 4286 - DNA, 122 bp, Homo sapiens
ctacgccggcgcccggagctgtgtcctgttgcctagcgacggcgcatgcgcactgactagcgcagccccctaaacatgcatccgcgcctgcgcagccgcgggtcgcccagggttgggatgtt

SEQ ID NO: 4287 - DNA, 122 bp, Homo sapiens
gaggagctgtggagagtggccctgccaggggcagtagccacagcaaaggcctggaggcagcgcaaggcctggacagaggccagtgctgggggagctcagggaagcaagaggaggaggagagt

SEQ ID NO: 4288 - DNA, 122 bp, Homo sapiens
cacaagccagccctgtcctcgggacgcaaggtaaccagtccggctggaggccgccacgcacgcctggtctctgcagttgtggcggattcccagggactctgcccaggaaatggaaacccgtg

SEQ ID NO: 4289 - DNA, 122 bp, Homo sapiens
tctccagcctcctcgccctcaatcttggtaacctggtctttggttaataatatcgcaactcgggacttcaacgctcagaccccctccaggccccagcctccgtattctcggagccctccact

SEQ ID NO: 4290 - DNA, 122 bp, Homo sapiens
tgaaggcccggtgggcatcgctgccagaacaaaaagagtaaggagctggacacggggccccgcgctccgatcctggtgctgcgctaactccctgcaagttcccgaaacaccgtgagtcctct

SEQ ID NO: 4291 - DNA, 122 bp, Homo sapiens
ttgggccccggcgctctggcccgcgccggtcttgggccccagggtagcggccactgcgggcggagcagagggaaacaccagagtctgtgactccagacaggacccactgtgtcctcttgaac

SEQ ID NO: 4292 - DNA, 122 bp, Homo sapiens
tgctggtgactcccaagtcaatttccagcccagacatcttctgagcttgaggctttggtccggttgcctactgggcatctccacctggatgccatggctcatgcctataaggccagcacttt

SEQ ID NO: 4293 - DNA, 122 bp, Homo sapiens
agaaaccaatgcctaccagccagacccacgggaggacaaccgatgtacaaaccagaaggccggtgtattaatttaaaatggaaagcagaactcccaagctggctgaatgcttcatttgcagg

SEQ ID NO: 4294 - DNA, 122 bp, Homo sapiens
ggttccactgctcgtcagtcgatagggggagtcggtagtctgtccgaccgtaccattaggcgcctgggccggaggaggggttttcagggtcgtaggacgccgttgggcaccacgctcggaga

SEQ ID NO: 4295 - DNA, 122 bp, Homo sapiens
cctcgctaatgcgtttcgcatggcgcgtcagtcaaacgcccttctaatgtccttaaagcacgcagaaaattgcatccttatgaaaaaggagaaaaaaagcaaattgcctggtggaagcggag

SEQ ID NO: 4296 - DNA, 122 bp, Homo sapiens
atgagactcagctgagtcttggtccaacatcaccacctggtggccagatgaaaaagtttccgaaggccacggcggccttatatgtgagctgcccggggtagggctagggggtccttctctcc

SEQ ID NO: 4297 - DNA, 122 bp, Homo sapiens
agggcacaggggcaggggagttcagagtagttgcccagggtacctttcccaaaagcaactcggctgctgactaggggtctaccggctcgctcgggctcttagacacgagcgcagaaacattt

SEQ ID NO: 4298 - DNA, 122 bp, Homo sapiens
caaatgtatttcagtcctaggtttaattctaggagaagattccttggagaagcctcattccggaagtctgcctgccaatttttggaggctttaaggcttgtttcctctctctcctccaggtt

SEQ ID NO: 4299 - DNA, 122 bp, Homo sapiens
acgccggggtcgcccaggccggcgcggggcagcaggcagcagggtgggggggtgccctcgcgcctgtgtccctcacgccgccccagctcctgcccaggtggctgtggctggcgttccgggac

SEQ ID NO: 4300 - DNA, 122 bp, Homo sapiens
atggcacggaacagggcagcggaaaaggcaggagtccgaggcccagggccctgcctctggcggctgggcgcccttggtcacattgttggtgctcagagcctcagttcccacagctgtgcagc

SEQ ID NO: 4301 - DNA, 122 bp, Homo sapiens
cgatcggcccctccttgttgtctatttaagacttaagacttcatttctctaagaaagccacgggtgggaactccctctcgccgccacccttttacctgcgcaaggtgtttctcaccagcgga

SEQ ID NO: 4302 - DNA, 122 bp, Homo sapiens
gggtctcgcacacctgccgagcagcgccgaagaaccccctcgcaggtgtcacgaggaagccggctaggacacgaggttcatttcagatgcagagtctcagcacatcaaacaatcgacacgcg

SEQ ID NO: 4303 - DNA, 122 bp, Homo sapiens
gcggggcagcgcgcctctctgccgagacagcgagaccttagcggggtggcccggagctgccgtgagctgcaggagcccctctgcatcttacagcgtttatggtcatcaagctggagtcgacg

SEQ ID NO: 4304 - DNA, 122 bp, Homo sapiens
ctaggtcggctcggtctttttacacgttgtagacagaggcagcataacagataacaaggacgctgacgtcagcctacctgtgatcgaatcccgactcagccattaagttacctctgtgactt

SEQ ID NO: 4305 - DNA, 122 bp, Homo sapiens
ttcgcagagtctcgcgcccaccccccaacctcccacctcgtttctcgctgctagggctcccgactcagcccacctctcctggcggtttagttagggatcagagctggagaggctgaacgcaa

SEQ ID NO: 4306 - DNA, 122 bp, Homo sapiens
gatcgctgggttaggggcgggttaacctaggggtcccagcctccaagtctggggaggatccgggttcacggggtcggagtccagaggaatccaggcacccaggtgtcctccagcccggctcg

SEQ ID NO: 4307 - DNA, 122 bp, Homo sapiens
aactttctccatttcacacagcagcacttttttaaagtaagcacagagcaaaaaagttcacgttccagtttaaagcttccaccatcaaggaagatcgagaatcaggaaatttaaaaactaat

SEQ ID NO: 4308 - DNA, 122 bp, Homo sapiens
acagacagcaaagcgtggggagagagatctagtttaagttcgagggaaaaaaataacagacgcaacttagataaaagaatactaccatcaaaaaaaggggggctagagccggcgatggcctt

SEQ ID NO: 4309 - DNA, 122 bp, Homo sapiens
gtaattcaggatcaagtgactcccttttaggaaagggagaaacaccttccagtggcttcccgttgttttaggatacagatcaggatcctcactgtggtctcccagggccactggcttcccac

SEQ ID NO: 4310 - DNA, 122 bp, Homo sapiens
gcgtctggcaaatgtcaacgataaaaaatacattttaatggcacatgatgcagctgctaccgtggggcgcagccaaatgaagcaggtttggagcagcaactactgtgagcggcccccggggg

SEQ ID NO: 4311 - DNA, 122 bp, Homo sapiens
taagtaggaagttcttagcccagtgtttggcacataataacaaaccataattaatattctcgtagatgaggagattgagtcccagaaaggagaaagggggagggctcgcccaaggtcagctc

SEQ ID NO: 4312 - DNA, 122 bp, Homo sapiens
tgggaacttaccacctgaagtgccctccaaattcatcttgggcagaagacctggactccacggagatcagcgagtaactgagcagctctcaaagacacaggctttatatagggtcaaggtga

SEQ ID NO: 4313 - DNA, 122 bp, Homo sapiens
aagatctacttggggaacaacacttctttgcttaatagaatctgtactgttgtttgcagacgtagatccttctctactagatctttttgcctttgcttcctgctatactttttatctcagtt

SEQ ID NO: 4314 - DNA, 122 bp, Homo sapiens
cccggcatgcttcgatttccagggtcttggccttgagcagacgacggctctcggacacctcgtccttggcggcgcgcacggcgtcggtgttcttggcggcgctctcggtcagcacggtgaag

SEQ ID NO: 4315 - DNA, 122 bp, Homo sapiens
cagctcacagcacatcgcctgccccatctgcagacgaggcatctacctgagctcccaccacggcagtgtggtcagtgcacagggcacccactggccacccaccctgggcacgaagcccatgc

SEQ ID NO: 4316 - DNA, 122 bp, Homo sapiens
agagatgtcagtcaatgtaacacatcttgtccatattctcaggtgaccaggagcaacaaccgagccatggagacgtgggtgaaccagtcctacacagatggcttcttcctcttaggcatctt

SEQ ID NO: 4317 - DNA, 122 bp, Homo sapiens
ggagggagggagggcaggggcgatgcctttgtttaccttcttccgacatggcctcccccgcgggtttcaagatgtgcctccaactggggccgtccactttctgcgatattttggagggggtg

SEQ ID NO: 4318 - DNA, 122 bp, Homo sapiens
aattcgaaccacagctccaggccttgcccccgcggcggtcgctgggagagactgagggcccggcgcctagaggccgcttatctgctcccaagcacgtgacccgatccctgggaccaatcgcc

SEQ ID NO: 4319 - DNA, 122 bp, Homo sapiens
aggtaaacttcccggcaggggacagtgaattgcttttaattacctgctgtggctcgtcgccgtggatattggactgacatttaagatagatttgtcaaaaaaaaaaaactctaagagctttc

SEQ ID NO: 4320 - DNA, 122 bp, Homo sapiens
aggccgagttgcgccgcgaagaccaccaacgccgccccgcgcgcctgactcgccaggcagcgcgctctaggttcttccgccggccggctggtccgacttccacgttagcctacggccgcgag

SEQ ID NO: 4321 - DNA, 122 bp, Homo sapiens
gactggctgccaacccctccggctacgggccccttaccgagctcccagactggtcatatgcgggtaagcgctgatctggcagttaactccactggggagattttcacctagagggaacgccc

SEQ ID NO: 4322 - DNA, 122 bp, Homo sapiens
agctgactcctaccagggtgaccggctgtcacctggaaggtcggggctgcagggctgcggcgcggtcagtcctcaggaaaggctccggcaactactccagtggaaaataacaaaaacaaaac

SEQ ID NO: 4323 - DNA, 122 bp, Homo sapiens
gctgctgaggcctctggagagtcaccccaaccccttcaggcccaggtgctggtgggtggacgggcgttttgtgagagggcgctgggagggtcagaggacggggccggcacagttctagttct

SEQ ID NO: 4324 - DNA, 122 bp, Homo sapiens
ctaagtaagcccacagaataccgcagtgatgacggctcatactccacgccaatgaccacacgcaaggcctgttcccaacgggctcgccttcgctgtcctacggccatcaggatcgtatggct

SEQ ID NO: 4325 - DNA, 122 bp, Homo sapiens
gtgtgaaaatggcagagcttccctctggggaagtgttggaccggctctggccagcctctacgcgggatggcagaggcgcgagtgactcaggaacctgccagtcacagcctagagcaagggcg

SEQ ID NO: 4326 - DNA, 122 bp, Homo sapiens
aatcctgggaagaggaggcgtgggtagggatgcttagcccgagatccgacagcagggaaccggagcgctccgggggaggggcttaatgctggggaagggatgtcttaaaagaggagaagctt

SEQ ID NO: 4327 - DNA, 122 bp, Homo sapiens
acttgccacaggcttccccaagcaggtaagtggctgagccaggtccagcactcagtcctgcgtttcaggcaggtgtctgtctctgtacccagccaacacatgggctccttcagcttgagggc

SEQ ID NO: 4328 - DNA, 122 bp, Homo sapiens
ctggtatttgacagggaaactgcctagtgcatctcacaagggcctggcagtcagcccgcacgtggcctgggcaggcgctccctggccaggtttcaggtcggcataaagtgattcatttttgt

SEQ ID NO: 4329 - DNA, 122 bp, Homo sapiens
gagatgagagaagggggtggggtaggaggaagccaaggacagagcccagctgctggtagccgacagctcttgcgcccagacgcaatggttacagactctgcataaacagacctcgctgtggt

SEQ ID NO: 4330 - DNA, 122 bp, Homo sapiens
cgatgaggggggacggccgggggctcggaggggactgctccccggccagtgtagtcagtccgactacggctacctacgtctcatctatagcttcttgaggggctggcggccggggcagcgta

SEQ ID NO: 4331 - DNA, 122 bp, Homo sapiens
agccagtcagaccccaaaatttaactccaaacctggactgttttttttcctaagtggggccgtcaaagtattgttataatttcccactttttggctgagaaacctgaggctcacagaggtaa

SEQ ID NO: 4332 - DNA, 122 bp, Homo sapiens
agcctgcccgatgacatctcagtaatcagggtggaggatagcttcaagggcgagcggtgccgctccaagaagatctgactggtacctatcgacttggtcaaattggagatccccagcccaac

SEQ ID NO: 4333 - DNA, 122 bp, Homo sapiens
atataccagactcagccacgtgcttcatgtgatgggaacccagtatactagatgcaggcacgtgcttcatgtgatgggaacccggtatattagatgcaggcacgtgcttcatgcagtaggaa

SEQ ID NO: 4334 - DNA, 122 bp, Homo sapiens
gtagtctcgcttctcccgggcccggctgtcccgcctcctctccttgctgtcctccttcaccgtctccaagatgagcttggccacagagtcgctcttcatgtccctgtagtctgtcactggcg

SEQ ID NO: 4335 - DNA, 122 bp, Homo sapiens
ccctctgcccccacactaacctctgctggggctgagccagggcgcgtcggacagtcagggcgacccagccagggcgaccgttggccccgctcctatggggcagcagggaccgacgtcagcag

SEQ ID NO: 4336 - DNA, 122 bp, Homo sapiens
aacaagccgagggaacaaagttccagacaccaaagcaggcttcttgccacaggcctcctccgtactcacacaactgcctgtcttcccccaatctacaagcacctctgggctccctttggaat

SEQ ID NO: 4337 - DNA, 122 bp, Homo sapiens
cgacctgtgggttgaaacccaggtacaaagagagcatgtgggtgcgtggcgtggtacgagcgctgagcaaagcatctgctctctgggtttgcagaccacagagccagcaagaggatgagagc

SEQ ID NO: 4338 - DNA, 122 bp, Homo sapiens
atttaatgaaatccaacatttattgggcactatgtgccaggcacacatttgaacataatacgtgacacacatacctcctctaatggtcacaacatccctatgacatggatactgctactatg

SEQ ID NO: 4339 - DNA, 122 bp, Homo sapiens
agctctgtaactgtggttcaggagagctctctaactttccctatcaagccagatgaccatcgactcccctctacgtctatgtcctatttcagtgtatccttcccactttccttccaccacac

SEQ ID NO: 4340 - DNA, 122 bp, Homo sapiens
tgggggaaggaggcctgtgccccccccaaggggagcagccctgaagatacactctgttcccgggtaacagataagatcatccaagaacatgcagaccttatatgatctcaacgcagcactgc

SEQ ID NO: 4341 - DNA, 122 bp, Homo sapiens
gtggagtagaaagagctttgtgtagatatgcttgtctcatttcgtaataataatacaacccgaaatgaactttttatttagtgactgaatgctttaacctatattattttttccttttcctc

SEQ ID NO: 4342 - DNA, 122 bp, Homo sapiens
ccagaccacagaaggatccaagcaggcttccctgaagctggaagattgagatgagatgcccggagggacttctaatgagaagggatgtgggactgagaagtatgcaagagaggtggcctgga

SEQ ID NO: 4343 - DNA, 122 bp, Homo sapiens
atgcgcccccgtcggggtactcgtctccttacagctaccacgatgggtacgagggcgaggcgcacccttatggctactacctggatccctatgcgccgtacgacgcgccatacccaccctat

SEQ ID NO: 4344 - DNA, 122 bp, Homo sapiens
tcgccctgtcctgccaccagctggaggacaggggctcctcagagcctcaggcccagagaacgggccccacgaccgggaagcgaatactccacagggcacagtctcccaatgcaaaatgggca

SEQ ID NO: 4345 - DNA, 122 bp, Homo sapiens
atatgtgctgtgggtgtgtattcacagagctgaacaagacaaacaaggcctgtgtcctcccggggcacacagacagatggggagacagacctacagcaagcaaagagtaaatgaagacgatc

SEQ ID NO: 4346 - DNA, 122 bp, Homo sapiens
cctcacagctgcccagtgtgatggctgtgtccagcccagctgatggattggccatttcaacgtgaatcccaggtactccagccttcctttgcaggtgccatttcccgacctgggttactcta

SEQ ID NO: 4347 - DNA, 122 bp, Homo sapiens
acctgacacagcccccagaccctgtctacgaatcccccagctggccgaaggggccgcggccgcacatgcgcagtcagtcccgttggttgtgcgctcagccccgcccccagaggcgccgcgct

SEQ ID NO: 4348 - DNA, 122 bp, Homo sapiens
gggtggggtccgagcagctgacggttagtgtggcagttgccgggacctaacatggaagaccgcagaatcttagggaatggggttctgagggatgcggcatatggctcagaagagaaaggagt

SEQ ID NO: 4349 - DNA, 122 bp, Homo sapiens
ttagttttaccggctggaagccccaagtttagaaaccttgagtgcctaagaagacggacccggagctggggcccttagagggacgtggaaggcggacttagaagactaatattgtcaaaaga

SEQ ID NO: 4350 - DNA, 122 bp, Homo sapiens
aatagcagcattcgtgctttcctatagccaagtctggagtgtagttcaactctccatacacgcttctcactgttgttttaaatttcctgaaaacattcttaaatcacttctattggaaaaac

SEQ ID NO: 4351 - DNA, 122 bp, Homo sapiens
ccgtcaccgccacaggcacagactctgccacagccgccgccgccgctgccgccgcccggtcgccgaagcagcaatacctcctggcttccgctccccgtcggtgtcccgcgagaacttctcca

SEQ ID NO: 4352 - DNA, 122 bp, Homo sapiens
tgcgcagtgcgccctctttgtgccaggctgcagcaagctggttgtttgtgtgtgtctacccgaagctgcggaggcggagcgagggggcgtggcctgccttgtcgcactctaattgggctttc

SEQ ID NO: 4353 - DNA, 122 bp, Homo sapiens
gcgagaaggcgcggtgcactgggacactgtcaaggcaaaactgcagcatgtagcggcacacgctgcccacgcggccgtacacgcagcgcgccttgtggacgtcccagtcctcgccgggcaca

SEQ ID NO: 4354 - DNA, 122 bp, Homo sapiens
gcagccgcggcagctgctcttctggctggcaccgtcacccctgcccgaccccaggccccgcgtgtgtcccggacggagcagtccctcctgggctcgcctcctgcccgctcgctctgtgtcag

SEQ ID NO: 4355 - DNA, 122 bp, Homo sapiens
tcctaaataaaggactgcttgaataaattgtagtacaacagtcaaaagacagcattacaacgaattagtttaaaaatcttaattgactcttattcgtgattctagaatcaaaaaacacctca

SEQ ID NO: 4356 - DNA, 122 bp, Homo sapiens
cgctacctgggctcactcaccacaccgacctgcgatgagaaggtcgtctggactgtgttccgggagcccattcagcttcacagagaacaggtgcacagggcctggggcagggcatgggctcc

SEQ ID NO: 4357 - DNA, 122 bp, Homo sapiens
aataattaataaaagagatgccacccaatctctagtgaagaaaggcaaagctcggtgatccgaaagtaaacccagcgcagataccgaactggtgtccttcattccagattgcaacacaaccc

SEQ ID NO: 4358 - DNA, 122 bp, Homo sapiens
aaagaacacaagcaatttcctagccaagtgatcaaaattaacatcacctgtcctgaaatacgatgcactgagaagggcacatgatcacatcattttgtagcatccttctcaataatgtatag

SEQ ID NO: 4359 - DNA, 122 bp, Homo sapiens
tttgggtggggacacagagccaaaccatatcagggaacaacccaggtgtttatcagtcgacgagtggataaacaaaatgtggtctgttcatgcagtggaatattattctaccataaaaagga

SEQ ID NO: 4360 - DNA, 122 bp, Homo sapiens
ctcgggttgttagtcttgacccaggagagtgcaagacaggcccaaggcctggggggattgcgttatgaatgtccaattctaaacacaaggtagagcacagacagtacatcctcacggctgga

SEQ ID NO: 4361 - DNA, 122 bp, Homo sapiens
caagccaactgagtcagtacctgattagaatggaatcgctgagcctgtgagtgttgggggcggggcagatgctgatagtggtgaggcctgccaatgccaggcttactgacagctgcaggaag

SEQ ID NO: 4362 - DNA, 122 bp, Homo sapiens
ctggctcgcctgcctgtctcattgactgttctcacatctgcttccttggctctttggctccgtgcctgtttctctccacccgtgcgcctctctccgcgcctccctcccccacgcagcccctt

SEQ ID NO: 4363 - DNA, 122 bp, Homo sapiens
taataactgctttacaggtatttactcatttactcattcatctgttcctttaaaactatacggaggcacatgtcctcagtacctcccgaggctgtgtcacaggcatgcatcctttaaaaaag

SEQ ID NO: 4364 - DNA, 122 bp, Homo sapiens
tttacaaacctgccctggctcccaagctaacttcagcagtgcccactgggggagctcaggcgtgtcattaatgctaattgttgtggctgccaaggaaaccttcacacagtttgcaaacaggc

SEQ ID NO: 4365 - DNA, 122 bp, Homo sapiens
ccccttttttacaaaaacaagttaagagtcagagaaggaaagaagaaatgggatttgcaccgtcatggactgatactgcctgggtgtagttgttttgcttggtgagcagaacttgctgtatt

SEQ ID NO: 4366 - DNA, 122 bp, Homo sapiens
tacatttcccacaggccacagcccagcctcccgtcttctaacagtcttcctagaaaggtgcgcatgttccgaccattagcacacggctggtgcgctcggtgcaggctatcggagcccgggac

SEQ ID NO: 4367 - DNA, 122 bp, Homo sapiens
cgcggcggcgggcctgtgtctgccgggctgggcgggggcggcgggccgatattcacttggcgaggcggggctacgcccccttccgcccggctgtggcggggcaggggcgaaggccgagggga

SEQ ID NO: 4368 - DNA, 122 bp, Homo sapiens
tgagaaattagggggcaacagaaaatagacttatcaatctaccatgtgctattgcaggcacgtggcgtgggactggcgggtagctccacctgcagccccggcatgggatccactaggtgaag

SEQ ID NO: 4369 - DNA, 122 bp, Homo sapiens
tgcaggctcaacttcacattgagacacttggacgtcacatgtgaagcctacgatcacttccgctcctgcctgcacgcgctggagcagctcgcagatggcaagctgcgcttcgtggtggagcc

SEQ ID NO: 4370 - DNA, 122 bp, Homo sapiens
gccgcgacccagtgtacagatgcgggcacagaggccggcgcggggtgggggccaggggtccgcgggcgggttcccccaccccaggtccgcagcttcctccgctctgggtttcacttctcccc

SEQ ID NO: 4371 - DNA, 122 bp, Homo sapiens
gagagagagacaggatcaggagcgatagagagcaggccctcagtgttgtactatttgtctcggtccttgtgtctaaggagcaatgcagaaaaaaaggtgaaataaatggaagagatagccat

SEQ ID NO: 4372 - DNA, 122 bp, Homo sapiens
gccattgctcctgatttccctcaggaaacatggccagggagctgctgtgagagttttccccgagtccccacctccctgagatgtacaatgagggaagggaagaggtatctcaccgacttctg

SEQ ID NO: 4373 - DNA, 122 bp, Homo sapiens
agcacagattgaataggctggggcgaccaggatgggaactagcattggctgtgaagccgccggggccctagggctgccttttgtccaaggagcttagaatggatcttaccacacaagaccag

SEQ ID NO: 4374 - DNA, 122 bp, Homo sapiens
cctgccgttcgggggcgcgtgtgcctgtgctgcccgactagcccaggatgtagtgagccccgcggctgccgctgcccgcttagacccaatcagagggtgagtgggaggtgacaccggtcagc

SEQ ID NO: 4375 - DNA, 122 bp, Homo sapiens
caatcaaatttttcaacacctggaaaattggcttatctatttgtagagagcacccagagacgagcgttagagcagcgctaccctggagtaccagttcttcggaatgttgaccgccggccacg

SEQ ID NO: 4376 - DNA, 122 bp, Homo sapiens
ttctcatgatctgacagaacactagggtttcccatattcaagtgcacacccttgttacaacgaccaccactcacagaagtccagcttcctatgaacccaggataatgttatgaaccaagtgc

SEQ ID NO: 4377 - DNA, 122 bp, Homo sapiens
tctccagcccgccagggcccggctttggcagacccgaggctcctcacccgccctgagggacgggttgtacttactgagaactgatgcttagtaagcttaaaagccccagaaaggaagtctgt

SEQ ID NO: 4378 - DNA, 122 bp, Homo sapiens
gtcttcaagcatcttttcccaacacaggcacctccgtcctggctctcccaatctcagccacgccagcccaccccgtgaggtccctgcagacagaggctgggcctcccccaggctgagggccc

SEQ ID NO: 4379 - DNA, 122 bp, Homo sapiens
aaaacaaaaaaagaaaaaatatggccagaatggtctagacatcacccacccagaggcatccgagacaaccagaatgccacatggcatgccacgaaccacttggaggtctgtgcaaaattcat

SEQ ID NO: 4380 - DNA, 122 bp, Homo sapiens
agcaaaccaccatggcacacgtttacccatgtaacacgcttacctgtctatgcaaacccacgtgttctgcgcgtgtaccccggaacttaaaataaaaaagaaaagaaacacagtgaaacccc

SEQ ID NO: 4381 - DNA, 122 bp, Homo sapiens
ggctacgattctcttggctcctgccctcgccttagtcgctctgcggggttggttcggtcccggcacttccagaggcctcagggtcctggtcttgtagagacttcctgaacggtggcgcctgt

SEQ ID NO: 4382 - DNA, 122 bp, Homo sapiens
gggtgacgggaagctggggtttcgggacatccaagctccagactcactgctaagctcccacgtccagccctgtcctcaatgtcccatgcttgggtgagccatccagccctattcactggttg

SEQ ID NO: 4383 - DNA, 122 bp, Homo sapiens
cactgtttaagtgaaggcctttccttttagaacactgctttacaatgcctaatcagccggcgctcaggttggtgcattcagagacccgagcgtttgtgttcctaataagtttgctagaatgt

SEQ ID NO: 4384 - DNA, 122 bp, Homo sapiens
cgaaaatgcctggagcggctgcaggggaagccgagccccaagggtaggctcaggcgacggcgccgcccacacagacccaccagccagtcacacacgtctcctttgctttatcctcaggatct

SEQ ID NO: 4385 - DNA, 122 bp, Homo sapiens
gggggctgtgtcgtgcctggaacccaggacggacctggagcccggtgaccatcgggatcgcgccccctgagcgtcaggagagcccctggagatcccctggacagagagcccgccccgcaggc

SEQ ID NO: 4386 - DNA, 122 bp, Homo sapiens
tctcccggcccactgtttggctatctgcaggggctggcctccaatgattggtcgctgccgcgagggccgccgggactcgcactcggcggttgttccagaagaaagagacagcgatggcggca

SEQ ID NO: 4387 - DNA, 122 bp, Homo sapiens
ccctcttaggcagacgagtacgcgcctccggtgcactggaaacctcaggcaaacgcccagcgtgcagggctagggttgcatattgacgcagactccaggctctccaggctgctgttgaccgt

SEQ ID NO: 4388 - DNA, 122 bp, Homo sapiens
aaaaggtttccttctctgggtgtatggtgcaaatgtttatttcttttgccatgggggccacggagtgcatgatcttaggcacgatggcactggaccgctatgtggccatctgctacccactg

SEQ ID NO: 4389 - DNA, 122 bp, Homo sapiens
tcctgtgtccgcagccctcatcctgccatacagcctcagccggcgccccagcctgcggtccgtgtgcaggggcgggagccactcactgcctccatgttggctgcagcacccccgcacggaac

SEQ ID NO: 4390 - DNA, 122 bp, Homo sapiens
ggcttcttcaccgtctcgccacggtcttgggtctgatgcgccgcgtgctcctccggctggcgtctgcacacgtctctgcatctgcgtgtacgtgggagtatgaacatgtctgtgtgcgccca

SEQ ID NO: 4391 - DNA, 122 bp, Homo sapiens
cctaatttttggagttctcaaatacgtcctgagtttcctctgtacctttagtaactctcccgttccctctctctccactcttccctgctcccagtcacccccacccacaacccccgctgatc

SEQ ID NO: 4392 - DNA, 122 bp, Homo sapiens
cggtagctcgccaggcgctctggggaaaagacctccagcttgctcttggccaggtgctcccgggcgtatctgataggtccctccaggtccctctgcgaccactcagggtccccgtacaggtg

SEQ ID NO: 4393 - DNA, 122 bp, Homo sapiens
gcacctaccttgtgccaggcgcagcggatcccacaatgtaaaagaagaggaaatacactgcgacatgtgatatggagagacatgaaacaaatcagcagaggcaagatcatggagtcactgaa

SEQ ID NO: 4394 - DNA, 122 bp, Homo sapiens
gccagctggggaccctcttggacggccatactaggtttcagatggggtattttagatgcccgaggtcttgcccatgctgacctcccccctctccctcctctcccgcaggaccctgccccagt

SEQ ID NO: 4395 - DNA, 122 bp, Homo sapiens
ataaggttgttatctagtgccgttttggtttataaagggaatgaaaaataagggtgcgtgcgtggttatgaaccctggttttgccacttgttaactgcatgatcttgggtaagtcaacctct

SEQ ID NO: 4396 - DNA, 122 bp, Homo sapiens
taggttctagacattctgacagccaactaaagagccagcaataacgtgtgcctaggagtgcgagagccttctccacctccgtgatgcctccgggttcgtgcatggccacttgtgctgcgtga

SEQ ID NO: 4397 - DNA, 122 bp, Homo sapiens
ggtatgcagaagcataaaatcatagcatttcatcgtgtgctgcttctgctgtttgtcctgcgttatgctgagtcaccaaattgtgtacgttcacagtcatttcagaattacatcaatgaggt

SEQ ID NO: 4398 - DNA, 122 bp, Homo sapiens
tgggtccctagagacgtgtggccccgcccccgcagcgtcgctccgacacgacggccgccgcgtctccatggaaacggcccaggcatccacccagccgagagcacgatggctactggggagct

SEQ ID NO: 4399 - DNA, 122 bp, Homo sapiens
ctctaggccttgtgaatcagattaatcatcacccccacccccatctccaccatggggtctcgcgccccctgccagcaggctccagatgcactaagagaccggtccaaacaggcccgggggcc

SEQ ID NO: 4400 - DNA, 122 bp, Homo sapiens
cgagaaggcgcccgcctaccagcgcttccatgccctggcccagcccggcctgccgggactcgtgctgccctacaagtaccaggtgctggcggagatgttccgcagcatggacaccatcgtgg

SEQ ID NO: 4401 - DNA, 122 bp, Homo sapiens
attcacccttccttattttctaagttttattaccacatgaaaatgtgtcgttaaacaacacggcttagtttcgttcgcgtttggcattacaaaaaattgtcccatagtctatgtagtgttct

SEQ ID NO: 4402 - DNA, 122 bp, Homo sapiens
ccccaaccctgtgcagagtgctgagctgggcacccagcagcaggggtggagattttgaaacgggtagaggtgactgtcttggcttgtccagtcagggattattattgtgccaccattgaggc

SEQ ID NO: 4403 - DNA, 122 bp, Homo sapiens
ggttggttccttccctctgaatttaggtccatttggtttgtcccggagtgcttgtcaacccgtcagagggcctgggaacggagcatcctgggaaagatagttcccagacgggcttcccgcgc

SEQ ID NO: 4404 - DNA, 122 bp, Homo sapiens
ccaaatgagttcacttacaatgttggatgggtttctcctttgacttcttttgaaatgtctcgtactgtagctgacagacttcccttaggagatgggtggagcttcttccacccaaactgtga

SEQ ID NO: 4405 - DNA, 122 bp, Homo sapiens
cgtccgggcccgcggaggagacggctgctgttcactcccgggtgtccgcggtggcacaggcgctgacgccgccccgctgctccgagagttccataagacaaatcagtatttgccgagctaat

SEQ ID NO: 4406 - DNA, 122 bp, Homo sapiens
tgtattcgcaacacaaacttccaaaatcccatcatacattttgtatattctcagtgtcaccgctaagccttcagtgcacaagtacacagtcacaatatctactacatatgcacaggtgctca

SEQ ID NO: 4407 - DNA, 122 bp, Homo sapiens
cggtaaccgagtcccaggctttactgccactccactccctgctgggttatttaagagatacgcggcttccgaggggttttcatcagaccccgcaagtgcgctcggctgggaaggatgcgctc

SEQ ID NO: 4408 - DNA, 122 bp, Homo sapiens
acaagattcgcttcgcagggggctgacccgcagcgttctgctctaattgccagcagggggcgctctgatgttagctctggactagacagcagagccactctgtgcttgcaagacaggcttgg

SEQ ID NO: 4409 - DNA, 122 bp, Homo sapiens
agcagcctcccccaggggttacctgtatggcgggctggagttcggcgccgagtgctactgcggccacaagatccaggcgacgaacgtgagcgaggcagagtgcgacatggagtgcaagggcg

SEQ ID NO: 4410 - DNA, 122 bp, Homo sapiens
gctgccacagaggcgaagcttcctagagcggcccggaagtgcccggctgaagcggccgggcgccgattggtgtctttgagtctagtctttgttcggggctgtccaaaggacgctagctgttg

SEQ ID NO: 4411 - DNA, 122 bp, Homo sapiens
cgccgccgccatcaggaccagggtcgcgtcaggagcctaggttgccaacttacagaacaccggacgggaccatagccggaacaggcggtgacaggaggctgaccgccccgccggcggggcaa

SEQ ID NO: 4412 - DNA, 122 bp, Homo sapiens
acctgggtgcgtgcctccctgtgctctcaggacctcggggtgcccgggcgcactgggctgcgtttgaggtttctcttggcttcctcagacagagaatggtgtgctgctgccatctcttcagt

SEQ ID NO: 4413 - DNA, 122 bp, Homo sapiens
caaaccagcagtttgctgaggagggagcactttaagaatcaggaagcgttttgttaaagacgctgcattccactgtagggtaggaattttttgcatgcatttctatctcttctgattattaa

SEQ ID NO: 4414 - DNA, 122 bp, Homo sapiens
aactactggtaattgtagtggttaggccgggccttgtgcctaactcctcccaggaggcaccgcgctgctagatatttagtcttgactcatgatcattagtagagctgccttactttcagaac

SEQ ID NO: 4415 - DNA, 122 bp, Homo sapiens
agaggtttgcccaaagtcaactgtccacccctttaaggaggaaggacccataactgacctcgctgccccccaccagtgttaaaatagatcagtctagtgatgctcaagtggatacgattcag

SEQ ID NO: 4416 - DNA, 122 bp, Homo sapiens
tcccgggcgaagaagctctgcggaactgtcattttccggaactggatgcttgcttcctggcggggttctgaaagcgaacaccgcggggcaagatggcggtagtgcgtcggctgctgccccgg

SEQ ID NO: 4417 - DNA, 122 bp, Homo sapiens
gaggcacctatatgagaagctttgtgatcccttttatttcaagaaggcttctatttgggacgtggagcttacggttaatccacatttcagagggtattattgcaaattagtcaacaaatctc

SEQ ID NO: 4418 - DNA, 122 bp, Homo sapiens
tggtgcagcaaagaggtgaccttttcctccagttcctgaatcctaccttgagcctgttcccgatctgccctttctgacatgaagtcatccttgtaagcgagaatctgctattccagtatctg

SEQ ID NO: 4419 - DNA, 122 bp, Homo sapiens
tccttaatgttgtttgtacttttgtgtgtgtgtgtgtgtgtgtgtgtgtgtgcgcgcgcgcgcatgcacgctcgcaaagaggttaaatgtcctttcataaactgcggtttcctctttccctt

SEQ ID NO: 4420 - DNA, 122 bp, Homo sapiens
gtgtgtgggggggcctgctcctgactggcctgtggggaggggtcctggtttcagcccacccggccatggaggcagctgcagttgaccgggccactctggacggcctggcgggtgggactgag

SEQ ID NO: 4421 - DNA, 122 bp, Homo sapiens
ttcagcatcttcatagccactttcacaaaggagccatcctcctgcttcagctgggcctaccgcactgaaccaaactctcctttgccctatatccagccagggtgaactgctgctctgggatg

SEQ ID NO: 4422 - DNA, 122 bp, Homo sapiens
gcaaggtccagctcctagctccggcccagctggggcaccgcgcgctcgggggcctctccgcggcctctgcttctctgcccatgagcaatctgcgggaaagacctgatgagcccggctcggcg

SEQ ID NO: 4423 - DNA, 122 bp, Homo sapiens
ttgtcatccttaccttgtagtccaggttgggggggatctgaaagccgggggccagcaggacgtctccctccagcatctccgtccggatgtattcagccaggtaggtcctgcacagccgacgg

SEQ ID NO: 4424 - DNA, 122 bp, Homo sapiens
gggctaaagcaggattacctggcaccagagttcatgttcttagcctggcgcagtggctcacgcctgtaatacaagcactttgggaggccgaggcaggcggatcacctgaggtcaggagttca

SEQ ID NO: 4425 - DNA, 122 bp, Homo sapiens
caatcccggcacctcgggaggcccaggctggcggatccctcgcggttaggagctggagaccggccaggccaacacagcgaaaccccgtctccaccaaaaaaaatacgaaaaccagtcaggcg

SEQ ID NO: 4426 - DNA, 122 bp, Homo sapiens
ttgccctgtccgcagctgtagcgtctcctgtttcctgggcgcctctattccattgttggccgagggggtcaggacccgccgccttctgcattattgatggtcctgtaaggcgggcacctcgg

SEQ ID NO: 4427 - DNA, 122 bp, Homo sapiens
cacgtaacttcccgggaaccggcggccgccaaggaacgcggcgtccgctggctcagccggcgccggcaactcagcggccacgcaaacctgccggcccggcccactgagcatgcccggcccgg

SEQ ID NO: 4428 - DNA, 122 bp, Homo sapiens
cagcattttcttatagtaaagaaagtgaaaccacgggttgttgaaagaaggaagaaagagcgtgaatcttggtaggaaaaagaaggaaagcaaaaggaaacaaaagcttccagctgtctggc

SEQ ID NO: 4429 - DNA, 122 bp, Homo sapiens
agagtttagaccaatgcctgacacatggcattcacccaataagtgtcaataattatgattcgttttggcattattatgtcagtaataactattagctatgattctcctctaatttgttccta

SEQ ID NO: 4430 - DNA, 122 bp, Homo sapiens
cccctgttctgggccgtggcggggaagcaagcggacttggcagtctgcccctccccagctcgccctctgcagcgcacctcttcgcaaacccttgagggcgcagggcctcgctctcctccccg

SEQ ID NO: 4431 - DNA, 122 bp, Homo sapiens
ttctagtttgtaatcactttgcctctgtctacttcttatttttctgtctcctacccagaccgtaaagtccaggagggcagggatggaccctggctggccggcccatcacatcactggtaggc

SEQ ID NO: 4432 - DNA, 122 bp, Homo sapiens
gcccctctcattgctctttagaagtaatttaaatttttctgctacattgtctgctcagctcgtattctggtcatagaggaacctgaagccagagaaactagacaaaaaggtaagagaaaacc

SEQ ID NO: 4433 - DNA, 122 bp, Homo sapiens
caatcccttcgcgaaaggcttccgggactgtgaccctgaggactggtgagtgtcctcccccgagagagtgagcgccgggcgcctggcgcaggcgccgccctgatccgcctcccgcccgcagg

SEQ ID NO: 4434 - DNA, 122 bp, Homo sapiens
tcttcgatattcccccgagtgatagaaggcaaagttgaccagatccgagccagagtggagcgtaacgcagtggtgagagccgggctggggagggcctcgtggcggtcagctcccctgctgtc

SEQ ID NO: 4435 - DNA, 122 bp, Homo sapiens
aaggaagacagcatccttatccttaggactagaagctgccagctaaagaatactgcagagcgtcactctaatctttttagtcacattttcaaagtttattcttctctgtttaatccagtatt

SEQ ID NO: 4436 - DNA, 122 bp, Homo sapiens
cctgagcagctcgtccctgtgccgggtgccctcagccgctgcctggagtcacagtgccggcgtatcaggaagggcggcagcagctgcacctctcaggatgcctgggcgcaggacagtggcag

SEQ ID NO: 4437 - DNA, 122 bp, Homo sapiens
ttgattttagaaacaccatttttacctactgcagttctcttaaagtcttattagtctctccgccaaacagagctttcttcatgttttaattcatgtatacatctctctaactgacacaattt

SEQ ID NO: 4438 - DNA, 122 bp, Homo sapiens
cttctaagagggtaactgcaaaggaagtctgggccgctgcgttttcgggaacagcaggtgcggtggccgatggataactcgggctgggctggagcggcccctggtggcagttcggtgaagag

SEQ ID NO: 4439 - DNA, 122 bp, Homo sapiens
ccctgggagccggaggatggctgcggtagcagccacagccccagaggaggcggtgcccgacgcccggggcgcccagcgcgcccagaccggcagtggccttcatggcgcaccagaacctaaac

SEQ ID NO: 4440 - DNA, 122 bp, Homo sapiens
tgggcagggacagtggtcactctgcagaccgggtgggccacggggctccaggggcttgcccggtcacagttccagacacagaactagaaccacacacacacacagggcttctgtccatgcat

SEQ ID NO: 4441 - DNA, 122 bp, Homo sapiens
gctggggctggcagcccggtctgcagagccaggcaggaggcggaacctgagaaatccacacgcggggacccctgtgcttgggcgttctctgttctctggtgctcccatgttccagaacacac

SEQ ID NO: 4442 - DNA, 122 bp, Homo sapiens
caagtgaaaaaaaaaacagtatggcatattttctaacaaacccagaatttctaatatttgcggtcttccttccatcttcctttctcttctcttcttcttttcctttcttttccttttttctc

SEQ ID NO: 4443 - DNA, 122 bp, Homo sapiens
ggaagaagttttcctccctctccgcccaggctccgggaaagaggagaggcggcacccctccgggctccaccccctgcccgcccacccttttgagcaggccaaggctgccagcccggcctctg

SEQ ID NO: 4444 - DNA, 122 bp, Homo sapiens
tcaagttcccccttcctttgctcggtttcattaattgggatacttgggaatctcagagcccggtgggaaccaggaactgagctcagaggctctggagccccaagtcgcaccccaccaggtct

SEQ ID NO: 4445 - DNA, 122 bp, Homo sapiens
gatggaggtggagtttttcagcccctacatatgcaaacacacacatagcatgtatctgagcggccacatgggctggccctgctattttcttatggcttctcagcctcccagccaccttctgc

SEQ ID NO: 4446 - DNA, 122 bp, Homo sapiens
gcttagaaacaagtttgaaaacctcttcaggtccagagcctttaaataatgcctgctatgcgctaagacagccctgggtatccagagttcacaaagcaaggactgatttcctttcgccttga

SEQ ID NO: 4447 - DNA, 122 bp, Homo sapiens
actggctgagatttgtacttcccttgaggaattctgggatttgtagtcctaagttaacctcgtggcttttgaagctgaggagcagctgactgctctgatctctctggccctatcaaggcttg

SEQ ID NO: 4448 - DNA, 122 bp, Homo sapiens
taatcccaaaagaacaaagtctccccacctttctcggatgcagggccagagtgacacagccgaaaaattgcagtttgtctgtacttctgtttgaactttccacgttgtcctgtttacaagtt

SEQ ID NO: 4449 - DNA, 122 bp, Homo sapiens
ccggcgcagaggccgtagggcagcccattgacgtcaagcttcaccaggtcctgcttgctgcggaactccttgaggcacagggcgcacttgtagagcttctgcagcccctggccattggggga

SEQ ID NO: 4450 - DNA, 122 bp, Homo sapiens
atgcaaaagacacaaacagctaatcaacactcaagagtcagcctgtccagattgagaattcgtatcaatctgtgagattaaggtgtctgttgtctataatttagagaaaaatggaaactgaa

SEQ ID NO: 4451 - DNA, 122 bp, Homo sapiens
aaccacgatctgggctcacacatagcaaagaggtatattaactaggatgccctacacaggcggtctgtggatgagaaatccctatgcccctcacttcaccagggctgaagagtacgcgatga

SEQ ID NO: 4452 - DNA, 122 bp, Homo sapiens
gcaggggaaagatggcggtgacgggctggttggagagtctgcggacagcccagaagactgcgctgctgcaggacggtaactcgagggtccccacgggctccttcgtttttttccctcagggt

SEQ ID NO: 4453 - DNA, 122 bp, Homo sapiens
tgcagcactacgcggccgccctgatggccgtaagcggcctcccgcagatgaagaactacacgtcggtggagacgctggagatcacgcagaacctcctcaactccccgaagcagtgcccctgc

SEQ ID NO: 4454 - DNA, 122 bp, Homo sapiens
cttttctcttttgcacagatactgcactgaagactcggaggggttgagccgctggagccacgcaaattcagacacctcttccgccccaggtcactctactcgcccacgctgcctgccacacc

SEQ ID NO: 4455 - DNA, 122 bp, Homo sapiens
acttctcaggccctcccacgtcctctgtatcttctgcatgcggaaagccccccaggtggacgttttaagttatctttatgctgagttaggaagaggcccttgcgttgcctgcagaatatacc

SEQ ID NO: 4456 - DNA, 122 bp, Homo sapiens
ggccgtggggagggaagaggcaggactgagcgcgcgcgtgggcttagggctgcagcccgccgcctatttcccaactgccagggggcgccatttcccacatttggcttccagatgaagaaact

SEQ ID NO: 4457 - DNA, 122 bp, Homo sapiens
gctctcccgggcaggaaatcaaatgtcaccagcactccggaaacagcccttatgaggaaacggcattctggccccgggggttttaactgactttacctggtgggccatgtggatcccctcag

SEQ ID NO: 4458 - DNA, 122 bp, Homo sapiens
aggccaggcccaggctcccctgaagtcaacatctgctggtggctcaaaccccgtggcatccgacctggaatgaggatctccgtctgcgccggacgttttctgtaatggaatcccgcacaaag

SEQ ID NO: 4459 - DNA, 122 bp, Homo sapiens
tctgccaacaactgcctggctgttggtggtattcatgatcctgctttattttctccacagcggttatcacactgatatgaccttcctcatttatttatttgttcatcctttatatctccctc

SEQ ID NO: 4460 - DNA, 122 bp, Homo sapiens
ggcacaatcagaactggcagtcagtggtagactgagcactgccagacaggaccacctaaacgcctgaagcagcccctcccagatgtctgaaatccatggacgagatcctccccgctgcccca

SEQ ID NO: 4461 - DNA, 122 bp, Homo sapiens
cccgggcgggcgcggcctcagggagccctcagggcttggggccaggaccatggccatccacgcgcttcggcctcgcactccccgggtatgctgcgggccctctccatccggggaggcggggt

SEQ ID NO: 4462 - DNA, 122 bp, Homo sapiens
gggccggtgggacccggtgtccagcgctccctgccctggccgtggggtgacaggggaccccggccctgcggtcactcagaggtcccctggatccaggaggcacacggttcccaccggcgtcc

SEQ ID NO: 4463 - DNA, 122 bp, Homo sapiens
gctgaagctccggatgtgcgaaatggctccgcagtgcgaccgagtgtgcaggggcctcggcggcgggagggacggaggggagacggcggcgccggggcgctcaccccgctagccagccgagc

SEQ ID NO: 4464 - DNA, 122 bp, Homo sapiens
gggaaaatattttgccaagtttaccaggctatttgaggttgaggcaaggtcacataagtacgagtgtctcattagcaaaaagctctataaaaatactatgaaagagcacaggagccaatgtg

SEQ ID NO: 4465 - DNA, 122 bp, Homo sapiens
cacagggctgcttgttgtccacaaacatgttaagtgtggtcctacctcaggcctttgtaccgcgcccccttcctcccagaatacttctgtttattcatacgctttcccttcgctttgtccag

SEQ ID NO: 4466 - DNA, 122 bp, Homo sapiens
ctcacaccagccacgcacatgttgtgagcaatcctgtgtggcctgctcccccctcctgaccggcccctcctgactggccccagcaccgcgtggaagaacatggaggagctcatctgtctgag

SEQ ID NO: 4467 - DNA, 122 bp, Homo sapiens
ttttttttttctttcacatatttgccctgagctctgatcaggggaagctctgactgccctcgccttcctgactgctgagtcacaggtttactccatccatagaactctttggatttaagtgg

SEQ ID NO: 4468 - DNA, 122 bp, Homo sapiens
cttctgggagcagaagaccatatcatttgtgggctgtgctgctcagttttttttctttgtcggcatgggtctgtctgagtgcctcctcctgactgctatggcatacgaccgatatgcagcca

SEQ ID NO: 4469 - DNA, 122 bp, Homo sapiens
atgagacatgtgtctccaggactcatgtctccattttctctgctacacttctctaacttgcgaggccctggctgctgggctgctcacaggacaggctgtccgtgcctccagcacactgtcta

SEQ ID NO: 4470 - DNA, 122 bp, Homo sapiens
cagagacagaggaaggggaggcacgggggcggggggcggggttagcgcagtgcctggacacgcccactgccccgaggaggccccgcccacaatctccgggccagcctgcagggaggacccgc

SEQ ID NO: 4471 - DNA, 122 bp, Homo sapiens
ttgtgagacagagtctcactctgtcaccaggatggagtgagtggcgcgatctcagctcatcgcaacctccccctccccggttcaagcaattctcctgcctcagcctcccaagtagctaggac

SEQ ID NO: 4472 - DNA, 122 bp, Homo sapiens
ttacagaagaggcacattggtgcatcttcaatgctacagacatatataatgcaatttccccgatatctgagctccccagcatgccaattgatttaattattcataaccaccatcaataacta

SEQ ID NO: 4473 - DNA, 122 bp, Homo sapiens
ttctggtcttatcctctcagaaaaggcactttccagcctgagcgctggtacagccgcacccggctccatctccgaccgggacagagccatggccaccagcaggtcctcggacggtgcctcgt

SEQ ID NO: 4474 - DNA, 122 bp, Homo sapiens
ggaaaacacggaagagtagccaggccaagctggggtttaactgtccctaaaagaaagaaacgaccatagcaggggtttaaccagaggtggccgaaggcctttccaggtgcccatttctcccg

SEQ ID NO: 4475 - DNA, 122 bp, Homo sapiens
ctttaactttggtaaggattggaataaaaagagagtaacattttcatgtttcctgttctccgtggctgtactgggatgggaagttagggatgtggaatcatgtctaagataaacttagccaa

SEQ ID NO: 4476 - DNA, 122 bp, Homo sapiens
cacatggcactgggtgagcttggagtttgccgctcacctggattagcgtcgtggcaggtgcggccgtggcaggtgtcgactgcattaaaccctgggctgtctctgctcgagacctgccggcg

SEQ ID NO: 4477 - DNA, 122 bp, Homo sapiens
cttccaaatcacacggaatgaatgcatgcgcaccaccaggcagggctgcccgggtgcaggcggtatctctggcagtggccagaatgacttccaccagcctacccacctacccaggttggcac

SEQ ID NO: 4478 - DNA, 122 bp, Homo sapiens
tgaggaggggtggggagatccaccatttaccaggcacctgcgatgacccaaggcgctcatcgatcacccacttaatatgtctgtgtgtggagaggagggtcccccccacccgcccgggggtc

SEQ ID NO: 4479 - DNA, 122 bp, Homo sapiens
ggccggagagccccctgcacgtgcccgaccggccccggcgcgcccctggcttccggctctcggcagagggtgcaggaccagcgcgcctcattctcagcacctttgtcctgcgtgcgggatgg

SEQ ID NO: 4480 - DNA, 122 bp, Homo sapiens
tgctggaggaaaggtctcttaatgtccccaactcatagaggaggaaatgtgtgttaaatgcgtaattattgtgagctgttctatacatgctgggggaggggcagacctcacaggctcacccc

SEQ ID NO: 4481 - DNA, 122 bp, Homo sapiens
tgaagtcggtgtctgctgcgttcacggcaggattcggttaggtgagtgtggcatcctcggcgtcagaggtctctgtcttcctcttctctctgcgctcctgatttagcggtctctagttagcg

SEQ ID NO: 4482 - DNA, 122 bp, Homo sapiens
cccgtggcctgctctgtggctgtgtcagagccagacccccagtgtctgggaaacagcagtcggtcctggggtgaggcgcaatttgagtggcccagagtggctctctgtgtcaggaggttctg

SEQ ID NO: 4483 - DNA, 122 bp, Homo sapiens
gctgtcgcccggggcacaggtgaggggcttcgctgggctgaggcatcaacaggtcaagcgcgtcattgaggaccgaggctctagaaaaagctctgaggcggcacgtggtgttttgagcagaa

SEQ ID NO: 4484 - DNA, 122 bp, Homo sapiens
gttctccaaactgaagatcacttgtattcatttggtgcaggtctaaggcgcagcgggctccgtaagagcaccccaggaacgcacagccctgagagcccgcccgggtcttccttttgcaccag

SEQ ID NO: 4485 - DNA, 122 bp, Homo sapiens
gcgccaagtctagggacatgctagctttgctaagttacatgagattgcctacatactaaacggaggtgggggacgggtccgaggatgcagcggtgctgccctgccccgacatggaagctccg

SEQ ID NO: 4486 - DNA, 122 bp, Homo sapiens
tccgcccaccccacccgtccatctgtgtgacacgggccctgtgtgagccgtgctccccagcgtgaggcttcgccacaacacactggctcttcctggagatgtccaaggtgggtaacgtgcta

SEQ ID NO: 4487 - DNA, 122 bp, Homo sapiens
accacccaccagctcctctccgtgccctccgccccgcgccacgcaaaccccagagggtcccgagcccattctgtgcactcttcttgagcagggtgcaagttccccttgatctccccggtctg

SEQ ID NO: 4488 - DNA, 122 bp, Homo sapiens
gaggccagcattccgagtgtcattaagcaccacgcctggcgggcggccgctgactggctgcgtgtgccccgcaggagcatctccgccctgagtctcatcactctgtccaccgtgttcaacct

SEQ ID NO: 4489 - DNA, 122 bp, Homo sapiens
cctggaagacacctttgagcagcgggacccgctggggtgtctgggcaggggtttgcccctcgtccagctctccggcacacggttcttgacctcgaggccccagctgaccacggcctcacagg

SEQ ID NO: 4490 - DNA, 122 bp, Homo sapiens
gccacaccgcctgccccccccccacaccccgggaacctcctgggccgccatcctgagctccggcaacacctcctgggcctgggtcctggcaaacccccgcggtctactcactttctcaaact

SEQ ID NO: 4491 - DNA, 122 bp, Homo sapiens
ccaggcatggggtgccctcagggcagggcctgggcagagggcaggctccgagaggggtcacgttcttgccgcctacctgacagcaggccttctagaaagttctctccagaagcagccaccgc

SEQ ID NO: 4492 - DNA, 122 bp, Homo sapiens
gggctagatgtgcggccaagcacccccggggcgtcgtccgcagacccgccgtcgggggcgcgccccgagctccccgcgactcaccccgcacgctacagtcgcctcgggctcccgggtccgca

SEQ ID NO: 4493 - DNA, 122 bp, Homo sapiens
cactgtagaaatcaaacaaaaatgttagtagggcagcgaggcaggagaatgtcagttacccgaatggtgccacaatggaaggagtcataaggctacagcattcaaagaatctgaagcattta

SEQ ID NO: 4494 - DNA, 122 bp, Homo sapiens
gagtggaggtgggagaggaaacagggaagtgaaatttgcctaccaggcaaaatggaaagccggaaaataattcctcacttgtggtccgagtatgacagttctgacactttccttataaccac

SEQ ID NO: 4495 - DNA, 122 bp, Homo sapiens
tatacttgtcaccctggtatctgtcaaaggaagagactcctgctccttgagccggtgctgcgccaggggctttcccaggcagcatacctctgagctccttccagtcctgatatcgttatggt

SEQ ID NO: 4496 - DNA, 122 bp, Homo sapiens
ctaaatgcagcaaaacactgcctgaaaacagaccggcccgcgcagcaagcagacatttcacggtgcgctggggaagcttcaaaatatatctgtgactctgtcttcgttgctcttcatcccca

SEQ ID NO: 4497 - DNA, 122 bp, Homo sapiens
cgaactgagaaagctggccaagaaacccctgtgcttcttccagatctgattcctagatttcgactgcccttacggatcggctcacataacgggcctgcgtttttggctgccatggtacagaa

SEQ ID NO: 4498 - DNA, 122 bp, Homo sapiens
cggttttaagcccagaactgatcgtgaagccggtccattaagctctgggtggataatgcacgctctctgcgactcccgcctgccggagcaggggtggaattgctccttccgttgtcagatct

SEQ ID NO: 4499 - DNA, 122 bp, Homo sapiens
acctgcgggcctgcgagcggctcgggagcggtcagccttgcaggctgaagcgtcttgccccggaaaaattcctgccccactgtccttcaggctggatgtcccgggggccacggaagcgagcg

SEQ ID NO: 4500 - DNA, 122 bp, Homo sapiens
ggggcgctgaggtcggggcggggcttaagggacagaggcgcatgcgttctgccgggggctcgcccttcaccaggaatgacggtttctcttgcacatgcgcttccaggccgcaagtgtccgga

SEQ ID NO: 4501 - DNA, 122 bp, Homo sapiens
agcctccagttcacactgcaactccccctttagttaattgctgagtattctgctttttctcgcgtatcctcagaaccaaaggtgtcgatatttggactacagagccaagcagttgcaggacg

SEQ ID NO: 4502 - DNA, 122 bp, Homo sapiens
gccccaggcgcccttaaagtggccctgtcgccagttctggcgcgtgggggagcagcaggccgctctgaggggtcaacgcggaacccgggtcgggggcctgcccgcgggggctactcaagctg

SEQ ID NO: 4503 - DNA, 122 bp, Homo sapiens
gtgccattgaaaacaaaaacaaaaaccaaccaacaaacaaaaaaacaaacaaaaagaaaacgatactcagtctttatagggaggttggccagtcaataggttactttatgagttgctaaccc

SEQ ID NO: 4504 - DNA, 122 bp, Homo sapiens
ccctctctttttcgcctctccttctgcctcccgctcacatcgcctccccactcccgccaccgtcccccgccggactgctagcctcctagaccgaagcccgaggacgtctctgcccgagcgat

SEQ ID NO: 4505 - DNA, 122 bp, Homo sapiens
tagcccaagatgaaagaccacatcccccgagagaatcaaaatattaacaccgcctccacgcgaagccatttgcatatgaagggcgtccttgtctagcctcactttcgggaggctttccagcc

SEQ ID NO: 4506 - DNA, 122 bp, Homo sapiens
tctcctacatctcatgtcaactttgcatcgcttacctcaccaccttctggcacttgtttccgtaccctaaaggaaacagtcactgaacacctcccccacacctatactcctgtatggagtac

SEQ ID NO: 4507 - DNA, 122 bp, Homo sapiens
gccgcgacgggagcgctgtgtactcacagtcgagtgagaccggccgtggggccggggcagcgcagggcgccgtcgggcacgcagttgcagggctcagggcagagcgcctcgcgcagcgctcg

SEQ ID NO: 4508 - DNA, 122 bp, Homo sapiens
aagggaatctctgttctccccggcacacgtgaaggcagacgctccactcaggctccacagcgaggggtgacccccaggaacccctcgctgcttgcagagaccctcaccaggagggtcgccag

SEQ ID NO: 4509 - DNA, 122 bp, Homo sapiens
cctggccggctcccctgcggggaccttaccttctggacattgccctggaagcagtggatgcggaccagggagaagtggtcccgggccagctcgtagtagtgcagcgcggcgtccatctcgcc

SEQ ID NO: 4510 - DNA, 122 bp, Homo sapiens
ggccttggccctcttattccccggggtgatactggccccatgtgtccagagagggagcctcgcacccggggaggaatctttgtcctctgctcctttctccttccactccccggcccccgagc

SEQ ID NO: 4511 - DNA, 122 bp, Homo sapiens
acttgtccttcctcccgttggctctgcggcctggacgacgttttgttattattatttgtgcgtcttctccagccctgccctcgccccacgcctttccctctctccacctgcggaaacgcctc

SEQ ID NO: 4512 - DNA, 122 bp, Homo sapiens
aaagtgggtggggactacggcacttcctctctcttaccggctgggattgcgttcaatgggcggggctgagagctgggagctccacccccactttgggtaaccgtgagttggggtggggtctt

SEQ ID NO: 4513 - DNA, 122 bp, Homo sapiens
gaagagtctcagccttggcttccaagatccctggggatcagggttccctctggggctaggcgaggactttaggcaagacggatgttggtggccaggctctcctgggctctcctctagtctag

SEQ ID NO: 4514 - DNA, 122 bp, Homo sapiens
ggagaatacacattgtcccaaagagaaacttgtttctaacatcttccctaagatggcaaacgggtccaagactttgtgcgtgtgtgtgtgtgtgtgtccccacctttaaacttcaaacccca

SEQ ID NO: 4515 - DNA, 122 bp, Homo sapiens
cagccggccagccctgctggccccgggcaatgagggacttagcaccctggccagcggctacggaggatgtgctgggtcccccagcagtgccagcccaccggcgctgcaatcgatttctcaca

SEQ ID NO: 4516 - DNA, 122 bp, Homo sapiens
gccaacatcttgactgcaacctccagagaccttgagccagaggcacccagctaagccctgcgcagctccctgacccatggaaactgtaaggtaataaatgtttgttttaagcttttaagttt

SEQ ID NO: 4517 - DNA, 122 bp, Homo sapiens
tcttcaagttccaggatcttggcctttaataccatgggtacctgcatcctctccagcccacgactaagcacattcccaatgccccaatcctacctatttttcaaggtacacaggccaatccc

SEQ ID NO: 4518 - DNA, 122 bp, Homo sapiens
ggggaggaccaccagggtagtgggcccaaaccctcccctgctgcctggggtcagacacaacgggcttgccttgaagcagaggggccaagggtccttccctacacctggagaaaccaaagccc

SEQ ID NO: 4519 - DNA, 122 bp, Homo sapiens
cccttaaggcattcatccagcacttttttggagaaatccccatttcaatctattcctatacgttagttattgaaaaacaacaattgcaaaaaaaaaagttgactttttgggttccttgagcc

SEQ ID NO: 4520 - DNA, 122 bp, Homo sapiens
ccacctttatctcactctttgtctttgtactagagggaacattataagcttgactggcatcggtttaacctaaagcaacgtctcaaggacaagcctctcctgtctgccctggactttgaaaa

SEQ ID NO: 4521 - DNA, 122 bp, Homo sapiens
ggactcagaggacatgagttacctgcggcttacgtacgagcggctgctgcagcagacaagcggggctgactggctcaacgacactcactgggtccatcacacaaatatcctgagtgtgggcg

SEQ ID NO: 4522 - DNA, 122 bp, Homo sapiens
ggggaatgtccccagaccagtgccaaaatacgcctttaggttgctatttacaaaccagggcgttggatgcctctagcaggcctgagaaaagcaggtatcatcatgtgaaccaaagcaaaaga

SEQ ID NO: 4523 - DNA, 122 bp, Homo sapiens
cacccctcacgctatgcccgcctccgacaccgccccggccggcggtgaggggaaccaccacgcctcaagtccgctgtatggccagaaccttgccaggacctcggtcactgcagttccagcag

SEQ ID NO: 4524 - DNA, 122 bp, Homo sapiens
gtgggtcatagcccagcggacaatttaagtataaatgatatacaccaagatagacaatctcgatagctgtatttagggtaccatccctttaggtattacgttttggtcgagtttggaaaaga

SEQ ID NO: 4525 - DNA, 122 bp, Homo sapiens
gggacgcttgccagattcttcccacagcacatgtggccattacaggccaagagacctccccgacacccttctccaaatatctgggcgcttcatgaggaccggggctgtgtctggagaacagg

SEQ ID NO: 4526 - DNA, 122 bp, Homo sapiens
gggcttgggagcaggtgctcggcagggctgagagttcggaggtggcccagggtttgggagcggggcaggccaaatgtgatggggacggctccttgtctgggctccgctctctgtcccctcag

SEQ ID NO: 4527 - DNA, 122 bp, Homo sapiens
cgtagaaatttggaattctttctgagctaataagacctggtggagggaggaatttacttccgccagaagtcgaagccaatccgcttttgggctatttccgcccgcgtttcttctactccgaa

SEQ ID NO: 4528 - DNA, 122 bp, Homo sapiens
aagaagtcccgcgttcccatgtcatcgcacttgccattccctttgccagaacattccccccgtgatagccccatgatggagcttcgagtcagtcagttctctgtgtggttgaggtctcccca

SEQ ID NO: 4529 - DNA, 122 bp, Homo sapiens
ctgcacctgttcagttctcagaacccaggagggttctagagcccaggctgccagcgggcccggcggcgtccttggggtgggcccggcaccacaacggcctgtgctgctgttgcagccgacgt

SEQ ID NO: 4530 - DNA, 122 bp, Homo sapiens
gtgtccgccgcaggaccgctctatcttctcgggtgaactctatggcagagcataggcattcgatttagagaagtgaagccgagatgggtgggaacccgaccacactagcgcgctagaagagt

SEQ ID NO: 4531 - DNA, 122 bp, Homo sapiens
tgtgtgaatgcctattcagatgcattatttgaaaaataaataaaccaggcaggcatccagcgtgttcataagcataaataattaatttcagattagaatggagaggttattctcctgcggta

SEQ ID NO: 4532 - DNA, 122 bp, Homo sapiens
acccacttagtgcctccgtgtaacccgctggttagagtccacctgctaggcagccagaagcggcaaaagcccagccccactgtcccattcttgacctggtcctccatgctcactgtgacagc

SEQ ID NO: 4533 - DNA, 122 bp, Homo sapiens
cgcgtttccggagagacctggctgctgtgtcccgcggcttgcgctccgtagtggactccgcgggccttcggcaggtcggtgcaggtctttggagagtattgtttttattttctgccactttt

SEQ ID NO: 4534 - DNA, 122 bp, Homo sapiens
agtaatgtgtgtggttctaagtgaggctcccataagtaggttgcaaggagtgaaacccaacggcctcctggggtgactgaggtggtcaccagccggtctttcaaggagagaggccagaaggc

SEQ ID NO: 4535 - DNA, 122 bp, Homo sapiens
cttctatctctacacctggctgcctctcccctgcagcattgggctcattctgtcattggtcggtgcttgaccggggctggagctgtgcggtgagctgattggctgtcagtatgcagagccca

SEQ ID NO: 4536 - DNA, 122 bp, Homo sapiens
ttattgaattaattgacgtacgaacccagaggcaaacagaaaggggcggcaaacactgggcggctcagatttatccttcggcctccgcagggcccggccggacgagatttactgggcctcga

SEQ ID NO: 4537 - DNA, 122 bp, Homo sapiens
gcgcctagccagttgcaggggcctcgggactttccatggcctcacccctcttctaggacacgtggccagcgtcctccaggccaccactggggatgagggtgctcgagcctcggtgcccagag

SEQ ID NO: 4538 - DNA, 122 bp, Homo sapiens
cagaaggggcaactaatccaggattggggtcagggaagtagtcagaaaataagtgatagacgtgacaaagcctgaagaatgaatgaaagtcagccaaagacgtggagaaggggaaagtaaag

SEQ ID NO: 4539 - DNA, 122 bp, Homo sapiens
caaaattggtgcctgggcccatcaacgtcttctggcctgcctggacctggagtagccggacgggtctggggccttctcagtccctcgtctcctccattcctgtgccccaggaaggccttccc

SEQ ID NO: 4540 - DNA, 122 bp, Homo sapiens
caaggctattctgtttcctgttgttctggccttgtcttcccagtagcggtaaccacccttcgccctccatctgggctgggttggctgctgggccccggtgcgtggctctgagatggggccac

SEQ ID NO: 4541 - DNA, 122 bp, Homo sapiens
tgggctcttgagtctagtggggactggaagaatctttatgtctggttaaaggattgtaaacgcaccaatcggcaccctgtcaaaacagaccaatcagctttctgtaaagtgggccaatcagc

SEQ ID NO: 4542 - DNA, 122 bp, Homo sapiens
aactcctgttgccgtttccctccaccggcctggagtctcccagtcttgtcccggcagtgccgccctccccactaagacctaggcgcaaaggcttgggtaagttgacctcctcgcttttctcc

SEQ ID NO: 4543 - DNA, 122 bp, Homo sapiens
acaagtcagccctcttccctgagtcattctgcaaaatggcacagcagattcctctgggtccgtcagaaaagaaaatcttttacacttttgtataactctatgcattaaaccataaattatta

SEQ ID NO: 4544 - DNA, 122 bp, Homo sapiens
acctgcaacccgccatgtctaacacccccgcggtgggctcccgcgcggcccaagcctccccggcaagtgccaccccctgcttctcggcgaccggtcccatcgaccgcccaacggctgaataa

SEQ ID NO: 4545 - DNA, 122 bp, Homo sapiens
tttaacagccacccacagacttgctacctggctgtctgacagcagtgccccttggtggagcgaagttgctctcccgggcttacctgaactgcctgcgccggggccgggcgggggccgggccg

SEQ ID NO: 4546 - DNA, 122 bp, Homo sapiens
tccaagcctgagacatccagcacctcatgggggacttagggtgggctggagaataacaggcgcaaaggcgtgggagggacagaggggtttcatcaaagacagcaggccctggcctgagaggt

SEQ ID NO: 4547 - DNA, 122 bp, Homo sapiens
ccctctcccgctgcagcctgaggaacgcgttccgaggaacccctagccacaagtcaggaccgcgtacaagatggcggcgcgtcacgtgggcagcgcggtgacgcaggacggcggcccgcgcg

SEQ ID NO: 4548 - DNA, 122 bp, Homo sapiens
gttttcctacttaacaggaaatgcagcggaatggctgggttccccgacaggggccccagccgcttcatgcacgtggcatatgaagctaggacaaggccagtgaccaagaggggtggccaaag

SEQ ID NO: 4549 - DNA, 122 bp, Homo sapiens
tcttggccctggagggagacattacctcatcctgcaaggttgctcgctacaaaaattatacggggaaatgagctgggttaagaggagtcaaggattggcagtcttggcacatccagcacgag

SEQ ID NO: 4550 - DNA, 122 bp, Homo sapiens
gcggcctcctgagaagacacggacagcgacgccaccatccggggctccctgagcggggtgcgggcgctggaaccttaaccggccccacccgcaacgcccaccacctgcagcccaggagctca

SEQ ID NO: 4551 - DNA, 122 bp, Homo sapiens
cgtgctgttcccgtgtcctcattgatttgctgcatagaattaaaatcaatagtataaactcgtcccagagtggacaagcttatctcatcctcaccgacctgatgggctgcctgagagcaaag

SEQ ID NO: 4552 - DNA, 122 bp, Homo sapiens
taagagacctaggtctcagatcagatctaagtttgaccagtgacttccctctccacgcttcggctcctccactgtaggatgggaagttcacagttcctactttacagggctgagaggactaa

SEQ ID NO: 4553 - DNA, 122 bp, Homo sapiens
ccatgtgcagcggggggccacgtgcagtgtgtgcctcttcttagccatgctggacagcgccgcccctgaaaagcagctccccggtttcacccagaaagccatccagaacctcctggaaaagg

SEQ ID NO: 4554 - DNA, 122 bp, Homo sapiens
aatgggtttaggaggagggagtgttttcatttgaaatagagtaattggggtagaccacaccgagaacatttgagcaaagacttggaggagatgagagcaatccctgaataacacatgaagaa

SEQ ID NO: 4555 - DNA, 122 bp, Homo sapiens
cttcactccttaagtcagcgagaccacgaacccccccggggaggaagaagcaattctggacgtgccacctttaagagcttaacactgtgaaggtctgcagcttcacttctgaagccggcgag

SEQ ID NO: 4556 - DNA, 122 bp, Homo sapiens
tagcgcagggcaagggcaggcccagggagaggccgatcctgcaactcaggaaataaaggtcgcttccattctttggtgagcctactgtgtgccggtctggaaatatctgcttaaacgatcag

SEQ ID NO: 4557 - DNA, 122 bp, Homo sapiens
gacggccccggagccattgtccacaaacacagaagcgtactgtccagcctgtaagaagcacggggacgtcacaaccgcagccacagcccagccactcggtggccaacgtctgcccacctgcc

SEQ ID NO: 4558 - DNA, 122 bp, Homo sapiens
ccagtgatatggttcccatgatccaagagagaagaggatgatgttactttcaatatcgcacgaggtggacacacccccagtgatattgttcctaatttcaacgtgggagggatgatactaca

SEQ ID NO: 4559 - DNA, 122 bp, Homo sapiens
agacagcccagtaaggagcaggaaggcagggcgtaggcactcagatcccctcaccatgtgcggtcactctccatagcactcatcaccgtctgacaaattgaacattcatgtgtttattttgt

SEQ ID NO: 4560 - DNA, 122 bp, Homo sapiens
acgccccctgactccttccttgtttcgacgcctcacctcgctctctattcctcagctcctcggaatgcgtgggggcttcctgcaacatcagtctccgccgccctccactaaatcgcgaccct

SEQ ID NO: 4561 - DNA, 122 bp, Homo sapiens
tctccaccactccacccgcataaggagacagagaggctaggaaagaggctctctgaagggcgcaagttctgccctggcaacaagtgatcagcctccaggaagaccagggattggctggactg

SEQ ID NO: 4562 - DNA, 122 bp, Homo sapiens
ggtgatctgggcaagggcgaggtcagttaaggacgcagttctggccccgccctcaaggcacgcctggccaatcaggaatcgctgattcaccaagcctctcctcctgcgctcgccctcttctg

SEQ ID NO: 4563 - DNA, 122 bp, Homo sapiens
cctgttttgtatcttcaggatgaagctttttgactgtgttgttcatgtcctatttcctggcgcctggcacacactgacactcacatatttgttgaataacatgtcattttttcctgatcttg

SEQ ID NO: 4564 - DNA, 122 bp, Homo sapiens
gaggccagcacacgcagagctggcgtctcatccccagccattggtgatcatcggcgaaggcggagttcaggtccatcgttcctgacgccgcaggtagtgcttgtctcactccatagccctgc

SEQ ID NO: 4565 - DNA, 122 bp, Homo sapiens
tgatccacctgcctcagcccccaaagtgctgggattacaggtgtgagccaccacacccagcgatgtctgttgcatttgtggaacccgcatgatggttttgatgtaaaagcgcattgatctga

SEQ ID NO: 4566 - DNA, 122 bp, Homo sapiens
ccattggcccgccccagttggccgcagggactgagcaagttatgcggtcgggaagacgtgcgttaaagggctgaaggggagggacggaactgacagtctctgtgacagctctgaggtgggag

SEQ ID NO: 4567 - DNA, 122 bp, Homo sapiens
aaacttaatgttttataatgttcatgttgtctatagaacacttaaggggaactttaatctcgtagcagggtctatgtgattctgaggcagcaggcgcaaaacactggtgaagtagctagtca

SEQ ID NO: 4568 - DNA, 122 bp, Homo sapiens
gccaggcagtggctttactgtattacactgtaggatgacgagctcactgcacggccttctcgactaggggaggggacactgcctgagtcccaggcatacttttctcacgtggatgatactgc

SEQ ID NO: 4569 - DNA, 122 bp, Homo sapiens
gcactgcctggaactggggctgcgcgcggcacttgcaggccagctagagttcccggtgggcgtgggcttggcgggctctgcactcggagcgacaggccggccctgcctgccaggccagcagc

SEQ ID NO: 4570 - DNA, 122 bp, Homo sapiens
gccgtccctccggggccgccttcccgtttttacctacagggggaagcagagagcacggagcgcccgggagcactgcgttccagccacccgggcggagatccctcagctgttaataacctagc

SEQ ID NO: 4571 - DNA, 122 bp, Homo sapiens
tttcattctagtggaaggagaataagtgataaataagtaaaactggaatatgtcagacaacgataaatactaaggaggaaaataagggtcaggctgttagggtttgcaattttaaataggtg

SEQ ID NO: 4572 - DNA, 122 bp, Homo sapiens
cagaagccagttcatcaggttcatcagggtgtgccatctacagttcttccagaacctattcgcctctcatcttttctgccatcatcctaatccagaccaccatcacctctaaggtggagact

SEQ ID NO: 4573 - DNA, 122 bp, Homo sapiens
acttcccccacggaagagggcggggtgctgacactgcctcctgtggatgggctgccagggcgtcctccatgcccccctggggctgaaagtggacctcagacaaagttctgttcagagatttc

SEQ ID NO: 4574 - DNA, 122 bp, Homo sapiens
tgaggaaacgagttaggagtttctccaccagtgccaacaagcaggtcaagtagcacacatcgggggtggagaggccgcccacaaaacacattatttagggtgctatgccaacctgtcagaga

SEQ ID NO: 4575 - DNA, 122 bp, Homo sapiens
gcaccaccggaagtgacgcaaggcaagggcggggactgagccctgattggagcgcactctcgttttctggcttgatggagccgatccagtgacgtcaggaatgcgggtggacattttggaag

SEQ ID NO: 4576 - DNA, 122 bp, Homo sapiens
gtggaatctagagaggacacgatgggaggtttgttcgcctaccgcttgtaagatcccttccgagggaatagatagttcccttgccctcccctcttgctccctaaccattggagagcggataa

SEQ ID NO: 4577 - DNA, 122 bp, Homo sapiens
cacctccccggccagctgcggtgttcgcggccagtgttgccgggcacttcctggttcccgcgcgccccgggtgcagctccctgcacccagtgctggcgctcctcagaagggagggggccaga

SEQ ID NO: 4578 - DNA, 122 bp, Homo sapiens
tctcttagcctctatctatgagaggtacgcccctcacccccgagagcagggtctcattggcggccatggtcccagcctcaaggggcctggttgaaacaggctgtgtcatgagcccccacagc

SEQ ID NO: 4579 - DNA, 122 bp, Homo sapiens
ctcctctggtctggggaccctgaagtgccccatggagggcatggcactggctcaccttgtcgatgaaggaggcaaacttgttgttgagggtcttgatctgttcacgctcctcagcccgcacc

SEQ ID NO: 4580 - DNA, 122 bp, Homo sapiens
taaaatcccgtctctctctgtctttagggtccgtttccttcctaaggcaggtgcagagcccggccttgctgcgccttcggggcgcgggcatctcccggcccagctccgccctcctcccgcgc

SEQ ID NO: 4581 - DNA, 122 bp, Homo sapiens
agcagcttgcaccgcagggcgactgcctccctgccacgccttccgcggaggggccgcccgcggtgtctttctgctggggttgggtcttttacctgggtcttttagccaggaaagctattttt

SEQ ID NO: 4582 - DNA, 122 bp, Homo sapiens
cttggcttacgtctcaaccagactcttgaacatggtggcataaaccagcaaaaatgaagccggccctctgtctttaacccgggcgcagccacatgacatgtctgctgatgcctgccaatggg

SEQ ID NO: 4583 - DNA, 122 bp, Homo sapiens
gtcgaagggtggcgggtgcgcgattgaataaggggatgcggtgcaaagggtctaggtctgcgtgtggcttctgcctgcgaggagaggcagcctgcatgtgtccgcattttcggtccacgcct

SEQ ID NO: 4584 - DNA, 122 bp, Homo sapiens
aagattcatctccctgccaaggaagaaaatgtgatccttgtgcggctctccaagatccagcgagatttgtatacacagttcatggatcgcttccgggactgtggtagcagcggttggctggg

SEQ ID NO: 4585 - DNA, 122 bp, Homo sapiens
gggggatgtaattcatgagaaagctgtgtaatttaaatactcataatttatttcagctaacgaataaaactgcagtactgcacttgccgcatctgggaactaactgcccaatgcggctgaaa

SEQ ID NO: 4586 - DNA, 122 bp, Homo sapiens
atgctaaagctcaaatttggacacacttactcagttgttaagggagatgaagagggccctcggatagtgtatatatgtgtttcaatacagttaagtacacaatcaagtgctcttatttcatc

SEQ ID NO: 4587 - DNA, 122 bp, Homo sapiens
gagaggcaccagttactttcccaggtgagttaatgtgccagtgtttccagaacttcgagtcgcttcatctttatccagcacccacccctcaccttccgcatcctgaagaagagagatgggca

SEQ ID NO: 4588 - DNA, 122 bp, Homo sapiens
ctctgagctctgagctctgccacttcttatctgtgagaacttgggcaaattcctaaaccacgctgagttccagttttctcacccgtaaaatagagataacaacactctccactgtctagggc

SEQ ID NO: 4589 - DNA, 122 bp, Homo sapiens
tggaataagtccagcccctgattagaaatgcaggccccagggaagctcagcaggcagaggcggggcctacccaggacagccctgcccacccctgacagaaggcgggattgttccagatgaga

SEQ ID NO: 4590 - DNA, 122 bp, Homo sapiens
aagcaaaattagacccacttagagcttgtgggtgtttctgggtccttgctattgatctcccgggtcaccaaaacaactcagcagctcctgcaggtgtgtcctccgaaggcatgggaagagag

SEQ ID NO: 4591 - DNA, 122 bp, Homo sapiens
tcccatttacaataaagatatttaccaggttctgatgactgaggcagaaggtgaagcaggcggccatcagcagcccaagcagcatgcccagaggagccatcctagatgaaggcaggctctgg

SEQ ID NO: 4592 - DNA, 122 bp, Homo sapiens
tacttggctcatggaaccttttctccatctttaaagtcagcaaggcggaatctctctgaccgtcttcatttttgacaacttctttgactacagctaagaatggggtggagtggaaatatttt

SEQ ID NO: 4593 - DNA, 122 bp, Homo sapiens
gccgggtcagggtcaggatctgacccgagtctgggtcaagccatggcgggcggcaggcagcggacggcggcgcccaggcagtgcgccctctgctggccactcgtgtacacgctggctccagc

SEQ ID NO: 4594 - DNA, 122 bp, Homo sapiens
atatggaacacctctgctctttcggccaccacagtattcctggaagcttgtgcaccccaccgacaagtactccaacaaggactgccccgacagcgctgaagagtacgagcgtgccacgcgct

SEQ ID NO: 4595 - DNA, 122 bp, Homo sapiens
ttcctcctggtgatgctggctgggagcgatgggggatcgcggctcctagttcagaaggaccgggctgttcctttctctctgggccttaggggggtctctctccctcctgtgtcctgaagggg

SEQ ID NO: 4596 - DNA, 122 bp, Homo sapiens
ctcaagttgcaatcgcagctcagactgggaagatacacagggctgttcttggaagaagggcggaaggcagtggtgttctgtatttttgcaccccagtggacatcagactctgcctcaaattt

SEQ ID NO: 4597 - DNA, 122 bp, Homo sapiens
gtcagatacgcattctggcttatctcctgacttactgagtgaacttgagcaggtccctttcgcccatgggcgtcggtttcttcatctgcaccaaggagacggaaaactggattacgtgtcgc

SEQ ID NO: 4598 - DNA, 122 bp, Homo sapiens
ctgccctagcctatgataaataatttctgagcccatcttgtctgggttgtctgcctttctcgggcttgttcacaaataaatctctctccgactgtgcgttctggtgcaactgagagctctgg

SEQ ID NO: 4599 - DNA, 122 bp, Homo sapiens
accagcaacttcaacgtggctacaaaaacaaccctaagtgtgatgtaaaggagctctggccgtgcggtcactgtgggaaaaggttagttcaccatcttttcatttacatgtctccccactcc

SEQ ID NO: 4600 - DNA, 122 bp, Homo sapiens
tctgtgggaccattttaacgcctggcaccgttttaacgatggaggttctgcaggagggggcgacctggggtaggaggcgtgctagtggtggatgacattgtggcagagatggaggtggtggc

SEQ ID NO: 4601 - DNA, 122 bp, Homo sapiens
cgcgagtttgtggcacagtgttggactgaacgagttaaggaacctgttcaaggagggactcgtggggccgctttgattggcggttgtgcctggtgctgccgctgtgttggtgacgagaactg

SEQ ID NO: 4602 - DNA, 122 bp, Homo sapiens
gggtgccctggccaaattcgtggggattgcagggaggcaacaagggaaatcagaatcggccggcttagtggagttcaaaagatgtaggtgaactctagactcttcccataaattgatgcggg

SEQ ID NO: 4603 - DNA, 122 bp, Homo sapiens
cggctccgctgttcactagagcccccggctcgccccgccgcttctctaggcgccaggccgcgcctccggacgcccagccacgccccctacgctcactgtcattggctattgcaaagggcgag

SEQ ID NO: 4604 - DNA, 122 bp, Homo sapiens
acctcccacgtccccgccccacattctgcctgagacccgcactctcagccgcataaacgccgcaccacctcaccagtgggcagtccacagcgacctcagactccgctcactgacaattcagt

SEQ ID NO: 4605 - DNA, 122 bp, Homo sapiens
cggggcctgggctggcatggtgggcggagcttagggtgagccaatgactcggtaaaggggcggagcttgggccgcagtgcagccagggcctaagggtgggccgtctgccttggtagggagga

SEQ ID NO: 4606 - DNA, 122 bp, Homo sapiens
aattgttggccatgtggttgagctcaatatctagccttcccagaagtcaggctggtagcccgtgtctcctgtctcaaagccccaaccctctagtagctagttggcctctctggcatcaccaa

SEQ ID NO: 4607 - DNA, 122 bp, Homo sapiens
agagaatggccttaagctgcgccctcttgtaagggtcaatgcagtagtcaggggcgttcgcgggcaccagcagccctggcctggccagaaaagtgggaggacccatattttgcctccagtcg

SEQ ID NO: 4608 - DNA, 122 bp, Homo sapiens
gcccggctggctcggctggcgcggctcggggacaggatcttccgtgcgccgagcagcaagcgagtgtgcccggggctcaccgcctcccgcaaggcctcccgcccccgcccccttccctcccc

SEQ ID NO: 4609 - DNA, 122 bp, Homo sapiens
tcatgttctgcctttggttctaggcgctttccaggcctagggaaaccgcactcggggacgcggggaactggggaacatgccgggttggggcggcgcgctccggggaacccgggacgttccga

SEQ ID NO: 4610 - DNA, 122 bp, Homo sapiens
aaggagctccgcttctagaggactcctaagttctattctcagctgctccaaggaggctaccgaggcctcagctggagttggcccctcctcggctcctatacgctctctcaaatgcctcccaa

SEQ ID NO: 4611 - DNA, 122 bp, Homo sapiens
gaggagctggaaggcgtgggccggtgtgattaacgagaaacacacacagtgaggacgacgcgtgggagcaggggaagtcatcttcctaggacaggtgccttcactcgcatcaaactactcat

SEQ ID NO: 4612 - DNA, 122 bp, Homo sapiens
cctaaccccagtttcaaggggcggggaacaaccagaatctttgtcaggtcctctacgccacgccccctcctcgccagagccccgcccagcctgacgtccccttcccccactagctcctcttg

SEQ ID NO: 4613 - DNA, 122 bp, Homo sapiens
tttccagatggccaacgtaaggttatttaattcagtaaaaaaacattgttttcctcctttcgagactctttctaaggaaattttccagctccacaggatgggacagagccttgatgtatttt

SEQ ID NO: 4614 - DNA, 122 bp, Homo sapiens
catgatgcaaggtctccatctaacaagtagagcagttggtgcagatgagatgagcctgatcgccaaccagcctggaggaaccatgagctctctctgcactccttgtcttcgcctttgcatgg

SEQ ID NO: 4615 - DNA, 122 bp, Homo sapiens
cgaaaacggcagcccgctttgttactgtggccggttcctggctgggaacaggctccttttcggcactacctacttgatacgtgtgatgttgtcacaaacatctagaaaaaacattagttctc

SEQ ID NO: 4616 - DNA, 122 bp, Homo sapiens
gcgccggcaggactagcttccgggccgcgctttgtgtgctgggctgcagtgtggcgcgggcgaggaagctggtagggcggttgtcgcaagctccagctgcagcctccgcctacgtgagaaga

SEQ ID NO: 4617 - DNA, 122 bp, Homo sapiens
gggtaattccagaaagttttcacaggagtgaggcagaagacagaaactgcaacaaaccgccggggggtgggattaacgtccaaagctcacaccggcttcaactgattggcaggaacgaagtg

SEQ ID NO: 4618 - DNA, 122 bp, Homo sapiens
taagcatccatgtcttcactgttaacttcatctgtgctgcattcacaatgtctaccaacacgcccttcattgcacctgaagaaacatgccaaaattgcaatcacacaaaacaaaaataattt

SEQ ID NO: 4619 - DNA, 122 bp, Homo sapiens
tgagaccagcctggtcaacatgttgaagccatctcactaaaaatacaaaacttagctgggcgtggtgacatgtacctgtaatcccagctactcgggaggctgaggcaggagaattgcttgaa

SEQ ID NO: 4620 - DNA, 122 bp, Homo sapiens
gaaagtgaacaggtgacagaagacgtgtgtgtgtgtgtgtgtgtgtacgtgcgcgcgcgccgtggctaaggatgctcgggtgctggaccgcccgctgtgcctccacacccctccgccccgcc

SEQ ID NO: 4621 - DNA, 122 bp, Homo sapiens
ccccttccccttgaacgcccaacaggctgggcgctgccaaacagaactcctggaaggcggcgcccaaaagcagaccctaggagtgggcgggcaccaactccccgccccagcacgcacctccc

SEQ ID NO: 4622 - DNA, 122 bp, Homo sapiens
tctggttattaagtcccccagtctatggtacttagttatggcagccacagaaagtgaattcgggcagcaaagaggaaatggcaccagttggccttacccacaggggtctttgagaaggataa

SEQ ID NO: 4623 - DNA, 122 bp, Homo sapiens
gtggagcgtccctgcaggggactccagtcagcctgagtgacgcgatccaaagaacgctcccgggtaggaaattgccccggtggaatgccttgccagagcagcgcatagcaggcccctgcaga

SEQ ID NO: 4624 - DNA, 122 bp, Homo sapiens
aagtagggagcctacatttcaccatctgtaggctctaaggatgtaagtcagtcccctgggcgaggtggtgtcagaggagactaagtagggaccaggactttcatcccctccaaacactggcc

SEQ ID NO: 4625 - DNA, 122 bp, Homo sapiens
cctctagccccagacgaggctgcatcatcacagtgagcctttcccgcgggtccaggcaagcgtgtctctgaagggatggcttgagcactggtgcatgcaggtcaggtgtgggagttctccag

SEQ ID NO: 4626 - DNA, 122 bp, Homo sapiens
atcgtttagcctagtcaagtcaacacataaaattaaccaacactcttatgtagaccaatccgtggggaaaaggcattttcaatgctggtggtaatataaatttgtaaactattttagaggtc

SEQ ID NO: 4627 - DNA, 122 bp, Homo sapiens
catgagccactgcaggagcctgaggtcacattgaaggacagacagaccctcacgggatgtcgtgactggttgcctctggctttttgggcgagcctagtcgggtggggaactccagcatcggg

SEQ ID NO: 4628 - DNA, 122 bp, Homo sapiens
cggcagaaagatcaggaaagtttcgaaatcgcggagttctcaagggatgggcagaacgggcgggtgagcagggccaagcgcctcctggacagtgaccatcccggagcctggggacgcgctgg

SEQ ID NO: 4629 - DNA, 122 bp, Homo sapiens
aagaagatcacgaggtcagagagcctgggagggtgagctgtggatgttcccccaggacagcgtgttctccccacagctgctgagttggcagaaccaaacttgccacccacccgtctcattta

SEQ ID NO: 4630 - DNA, 122 bp, Homo sapiens
tgggcgggtgcaataaaggagtgcggaagcttgggatcttctgagcggggagaaaatggacggtggggaacagtagacaaagttagctgttctactcaaagaagtacctttaaaaagtcaga

SEQ ID NO: 4631 - DNA, 122 bp, Homo sapiens
cattctcaactctaatagtaggggtgactagagcagtgacagtctacatatcagttttagcgtctagaatcatacagctttaagattttgcagttatgaatatttaccaaatgagtcaagta

SEQ ID NO: 4632 - DNA, 122 bp, Homo sapiens
gcctgaggggcaggagtccagtgttttagccttcgaaggaccatggtgcttccacgtcatcgtgttgtggcgctcccggctatggcagtaccgtagttttcctctcttctgcctgcggtgac

SEQ ID NO: 4633 - DNA, 122 bp, Homo sapiens
cccctgggggaggtcaccagcgccctggacgcagaggggcggcggcggacagacagaggccgcccatgcagggtcatggagaggccccacggacgctatccaggctcacgccctttgatccg

SEQ ID NO: 4634 - DNA, 122 bp, Homo sapiens
ttcatacccactccttccaaaaaaaaaagaaccaattagaaaattcgaatcaaagatcttcgggagatttcatgaaaaaaaaatcagggagaaaaaaactcagcaaagcaattctctcattt

SEQ ID NO: 4635 - DNA, 122 bp, Homo sapiens
agccgaacgaacaaaacgctcaggtccggtttgtgcgaggggctcgtcgcggggcgggagcggagggcccggggcctggcggtcgccctcggtgatctcctggtcctggtcttccgcgagct

SEQ ID NO: 4636 - DNA, 122 bp, Homo sapiens
ctatctacctacctacctacctgcatgctataggttctgtctctctggagaaccctaatacggttgggatgcaaattggaaggcacaccacctgttaagtagtcctgctgaaagaatcaatc

SEQ ID NO: 4637 - DNA, 122 bp, Homo sapiens
gtggcgggcggcgcgggcgcccttgcggggattcccggtctctcagcgcgccctagtggacgccctgcctttcgctggctccccgtgctcgttacaatctgcaatatattatttcttccgaa

SEQ ID NO: 4638 - DNA, 122 bp, Homo sapiens
gagggacccaaaagcaggggggaaggaaaaagagatgcacacttcccccagagaagcctccgagcgcggccgccattccgggcctcaagcccataaagaaaaaataccggagaggttctggc

SEQ ID NO: 4639 - DNA, 122 bp, Homo sapiens
caacctcaggcaggtttgactgggggtgaggtcagaacagtgtcctgattccctacctagcgggggtttgaacaaacacaaacctcaaggagggaatacaaaccacagagtggggcacgagc

SEQ ID NO: 4640 - DNA, 122 bp, Homo sapiens
ctgactgcttgcagtgtgtggcgcataaagcctcttcacaagttctgcaatatgcgcatgcgtagtgggcagcgaagacccactcctagttgtccgcccggcgttgggtggagcgagataca

SEQ ID NO: 4641 - DNA, 122 bp, Homo sapiens
cggataggattggaggggagaggagatcgcggagatgcctgaggcagaagctcggaaacccgagctgcacaggccaggatcttacttcctgtcgtcgcgcagcgatgacatcacccctaccg

SEQ ID NO: 4642 - DNA, 122 bp, Homo sapiens
tcctgaagaacatgcttctaacaaatatctgaagtcccttcctgggaatcaagtacataccgttactgttcacactgtctgccctaaaactcactcttggggaacatcatcttaatcctgtt

SEQ ID NO: 4643 - DNA, 122 bp, Homo sapiens
cttcaaagccatgagacagaatgagatcaccaggggaggaatgccgagggagaggagaagcgctccaaggactgagccctggggcctccaacatttataagtcagggagaagaggaggccca

SEQ ID NO: 4644 - DNA, 122 bp, Homo sapiens
atattataaccaagataactgtactcagattcataatatattctaggtttttgacttggccgaagggacagtggcttacctaagcatgagtgctgaaattaaatgaatggcagaagttcgtg

SEQ ID NO: 4645 - DNA, 122 bp, Homo sapiens
aaaaggaggccggggaggtgaaggctgcagtgagccgagatcttgtcactgtactccagccggggcaacggagcgagactccatctcaaaaaataaaaaaataaacccaaaaaggaggccta

SEQ ID NO: 4646 - DNA, 122 bp, Homo sapiens
actagggaaggtagcccaagaaagctaagatgctagaatccaaatttaaggtctacgagacgctgcagaaaacatttacagtcactagagggctctctctcccttaagcaaaaagcgcagca

SEQ ID NO: 4647 - DNA, 122 bp, Homo sapiens
ttaactggcccggcaggaaaagtttcccggtgaggtgacgatggacaagagtcgccccatcgtaagcgaaagtggactgagaggaagcacaaacgcatggactcaaccagctcgcccagatt

SEQ ID NO: 4648 - DNA, 122 bp, Homo sapiens
taatgagcaggagacggatgggcgcacgggtgtctgctggctgtgataaccaaggggctccgggcaccacaggggctgagcccagtgctgccctggccgccaatgaccacagccatagcccg

SEQ ID NO: 4649 - DNA, 122 bp, Homo sapiens
tggggttcatttaaccctttttgtgcctcagtcccaagaactttctttgttttccagcaccggggagagaggctgtcgggaagagtggggctggagtggccgggcagaggttcacactagag

SEQ ID NO: 4650 - DNA, 122 bp, Homo sapiens
agagaatggcgggcgcaaagaacctcaggaagatgaagctgctcactgcagtgtacctgacgtccgggtcatctgcgggagagagaagcagggtgaccgttttcctcgggcacaatggcctc

SEQ ID NO: 4651 - DNA, 122 bp, Homo sapiens
gcaaacccaatccttcactccagggacaaagaagacagctttccctataaagttaccccacgggattgcagagtttttctgtgggttcacctaagctctgtttatatccctgcaaacaaagg

SEQ ID NO: 4652 - DNA, 122 bp, Homo sapiens
gagggggggaataagaaagagagagaaggaaaggagagaaggcaggaagaaggcaagggacgagacaaccatgctgtgctgtatgagaagaaccaaacaggtagagctaaagattttttact

SEQ ID NO: 4653 - DNA, 122 bp, Homo sapiens
gccccactcagaccctaaagaatgtacgtaccacccctgcgggcagctggaccaggtggccggcggccagacggatcaggtagaccaggctgagggtgaaggcgcaggcgatcagcagcatg

SEQ ID NO: 4654 - DNA, 122 bp, Homo sapiens
ccgccggcttcccttactcatcctttacctgctcccctgccgctcgccttgcatccacgccgtagtggaactggcacaactcgggggccctgggtatcatcatagaagcttaggacaagagt

SEQ ID NO: 4655 - DNA, 122 bp, Homo sapiens
acacacagtgcagcctgaagggtgggagggaggtgcccctggccctcccagcccccaggccggcccctgttccctggcacaggggcagccagggtcacagcacatcgccctcctccatgctg

SEQ ID NO: 4656 - DNA, 122 bp, Homo sapiens
gtggggtgtgtcatattagagacaacagctgcttcaagttaataaaatctgaaatatcttcgctcggaacctgatcactagttttaagttggatttctgtgactatttctcatcttatgata

SEQ ID NO: 4657 - DNA, 122 bp, Homo sapiens
ttggtgaatacacgatttggtgcagccggggtttggtaccgagcggagaggagatgcacacggcactcgagtgtgaggtaactataaaaccccgatttgtttacattccctcccccagaacc

SEQ ID NO: 4658 - DNA, 122 bp, Homo sapiens
ggcatcttggagcgttctgttacagacttcctttgaacaacgggacatgaaataaaacctcgatactttttacttttgttttttaaaactagatacttttacaagaactctatttgcccagg

SEQ ID NO: 4659 - DNA, 122 bp, Homo sapiens
ggggcacggtcctgccctcaggaggctccacgtggacactgcgcagctggccttgaggcacgcgcgtgcgtgttcatgtgtgcgtgcgtgcatgtgcgtgcttgttcatgtgtgcgtgcgtg

SEQ ID NO: 4660 - DNA, 122 bp, Homo sapiens
ctggcccgggaagcgaggggaggggctggccccgctgcccctggacgcaggcgggggttgcgggatctcaagccagagacccttcctgggcgggaacccgccacactagaaggctgctgagg

SEQ ID NO: 4661 - DNA, 122 bp, Homo sapiens
agaggccaggaacacagtctaagcccagatttcaagtccaggcaggtccactcttggaggcggggtgtggggagcagctctgtgccatggagcctggtcctctcaactatccctctcctcca

SEQ ID NO: 4662 - DNA, 122 bp, Homo sapiens
gttaggacctggccatataaggtaaacaaagctggtcgcccaatgaagaggcggcgggggcgggcgctgggccggggaggccgggggcggagccgggggcggggcgaccgggcggtgtttac

SEQ ID NO: 4663 - DNA, 122 bp, Homo sapiens
ttatgaggcttgaatgagtccgtgtagtcatttattagctaattaagcatattccttgggcgcttactgtacccaagcgcagtgctaagggcaggtagagtcggtaacctgggtctgtccct

SEQ ID NO: 4664 - DNA, 122 bp, Homo sapiens
gcatctttaagatgggtgtaggaatcccagccctccctaactcacccggtgagctggcagcggaccgtgtgccaacagcgaccgcagctgctacgtgtggaaggcctgaagaacgccagggc

SEQ ID NO: 4665 - DNA, 122 bp, Homo sapiens
ggcgagacagtaaacgctccctgctcccccagagccggggcaacgccccacaacctgcttcgagtgtaaaaattcagtcggattatctcatgaactgtctggctgattagtttccaatcctg

SEQ ID NO: 4666 - DNA, 122 bp, Homo sapiens
ggcgcgctgcttgctgggaaatttagtttgggttcagatcgctaggggccggccaaagtgcgtaaaaactaccttcccatcaaccactgtggcaccggcgggagggggcggtaaggggccgt

SEQ ID NO: 4667 - DNA, 122 bp, Homo sapiens
cacacgcattagcggacgctccacacgcagccacggagacagtagagggaaaaccagtcgcgtttcccatcctaactgagccaagcctgttgacgccaatgtgcaggctactgtgacctgat

SEQ ID NO: 4668 - DNA, 122 bp, Homo sapiens
ttatgttgtccacgtgattcatggggacgtgtgggcacgttatgttgtccacgtgaaccacggggatgtgtgggcatgttatgatgtccacgtgatccacggggacgtgtgggcacgttatg

SEQ ID NO: 4669 - DNA, 122 bp, Homo sapiens
aacgacttagttttgggaatcgaatttcccaaatattgttcaatagaaaacaaggcatggcgatgacaggctagggactctgtggggctgttgcttcacatgcagtccctgactccaggctg

SEQ ID NO: 4670 - DNA, 122 bp, Homo sapiens
tgggaacaatactttgactagaggatgaggggctaatggaaaggcaggaacaacagaggccgaggcagaatgaggcctgtctcagtaatggcagagaatcaacaaactcctgctaatggggg

SEQ ID NO: 4671 - DNA, 122 bp, Homo sapiens
ttcttttgtgtgtgtgccttcttagtggagtggcccggaatctctggacacaacagagaccggcagggggcgcaagagcgccaggaagaagagtgggaaaacaagtagcagtgaagcccaag

SEQ ID NO: 4672 - DNA, 122 bp, Homo sapiens
gagcaccttccagggcccagacaatgacctagggtcagaaatgtgagccagggccgggcgcggttgctcacgcttgtagtcccagcactttgagaggctgaggtgggcgaatcaagaggtca

SEQ ID NO: 4673 - DNA, 122 bp, Homo sapiens
gtctttctggaaacaccgctttgatctcggcggtgcgggacaggtacctcccggctgctgcgggtgccctggatccagtcggctgcaccaggcgagcgagacccttccctggtggaggctca

SEQ ID NO: 4674 - DNA, 122 bp, Homo sapiens
gtagggtgactttttttcttttccctagcaaacagtagagcagtatgtagtttctccccccgcccagacggagtttcgctctttctcccaggctggagtacagtggcacgatctcggctccc

SEQ ID NO: 4675 - DNA, 122 bp, Homo sapiens
tggaggttcaccgcctcatgtcttcagtcttcctgctgttaactttggttgctgtctgtacgttcttcaccattttccatttgtctcatttctgagatctctagtagaaaatgtaggtaagt

SEQ ID NO: 4676 - DNA, 122 bp, Homo sapiens
acgcagcgcagtccctctgaggtcagcatgcgccgccactctccgcgagtggacttggagcggctcaacagcagcaccacgtgcttgagcagaatgaccgagtcatagagagccaggaagag

SEQ ID NO: 4677 - DNA, 122 bp, Homo sapiens
ataaaacctgccaggtgtagtggtgcgcgcctagagtcccagctattaaggaggctgaggcgaaaggattgcctgagccctggaatgtgaaaccagcctgggcaacatagagagacccccat

SEQ ID NO: 4678 - DNA, 122 bp, Homo sapiens
aacgctttcgactttgctgttcgccaaagcgatgcaaaatctcgcaccgaaaatgctaaacgttgaccacatgctttaattaggttagcattgtggccagagccaggaaatttaaatttaac

SEQ ID NO: 4679 - DNA, 122 bp, Homo sapiens
gcagtcggccacgggcagctgcaccagctgagagcgggagccggcaaagagcagcttctgcgagaaaagcggggcgcaggaggggggtcggccagggccacaccacgggaggggcggccgga

SEQ ID NO: 4680 - DNA, 122 bp, Homo sapiens
gttggggggagacaggcacagacagacattgggttgggacccgggaggccttgtttctctcgggccctggccgccaaagggccgtcgcaggcgtctggggacatcagctccatgcggctctg

SEQ ID NO: 4681 - DNA, 122 bp, Homo sapiens
aagatctccagcaaggcaatctttactttctgcagaaagggtgctcaatcgcagatggaacgatgtcgagagcacacctgaacaaaggaaaagcaaacatatttatcccttacgcatttggg

SEQ ID NO: 4682 - DNA, 122 bp, Homo sapiens
ccgctctcccgaggccgtgggtgcggatgcgcggctgacgactcgcagcaagagcaccgccgccggccccagcccgcagcatggcagccgccgcctatgtggaccacttcgccgccgagtgc

SEQ ID NO: 4683 - DNA, 122 bp, Homo sapiens
cgccctatggccttcctggtggctgggaccctgcggctggccacgcagatggcagacactcgagacagcctggggagaaaggtagcaggaggcaccgcctagcccagctgctcctgcctccc

SEQ ID NO: 4684 - DNA, 122 bp, Homo sapiens
taaataatctgtccaaggtcacacagatagtaagaggtagtggcccggcatggtggctcacgcctgtaatcccagcagtttgggaggccgaggtgggcggatcacctgaggtcgagagttgg

SEQ ID NO: 4685 - DNA, 122 bp, Homo sapiens
cactgagatacgcacgcattcatgctggggtactcacgctctcacacactgagatacgcacgcattcccgctggggtactcacactctcacacactgagatatgcacacattcccgctgggg

SEQ ID NO: 4686 - DNA, 122 bp, Homo sapiens
ccctgtggcagtggctgcacacttggtcgtaggtgttgggctgagccttcctggtcatatcgttttccccctttccatggggtttgtggtgagcaaggagggaccaggtagagtggaaggag

SEQ ID NO: 4687 - DNA, 122 bp, Homo sapiens
aggagtcctctgtgtcccaggaatggtcctgctttggtgtccctggtgtgacccatcacccgctgggaacagcctgagagaagtagggcctctgcaccaatgctgctgaggatgtcagagca

SEQ ID NO: 4688 - DNA, 122 bp, Homo sapiens
agaaggagtcattggtttcccttttcaaaggagcctgtctacttggcctcatcccagggtcgagagtagctcaatgattaaattcagtgacagaatgtagcagctcttcctgctggaacctt

SEQ ID NO: 4689 - DNA, 122 bp, Homo sapiens
acccactgcagctgcagccagccaggacatgacccagtgagggtagaagagccggggttgcggggggagctgcccctggagtccacaccccctggggctcagcctccatttcaccactgagc

SEQ ID NO: 4690 - DNA, 122 bp, Homo sapiens
ggaactcgagaaagaattccactttaaccgctacctcactcgccgcaggcgcatagagatcgccaacaacttgtgtctcaatgagagacagatcaagatctggttccagaaccgcaggatga

SEQ ID NO: 4691 - DNA, 122 bp, Homo sapiens
gagaagaatttttaaaaatatataattcatattagaagtatttctttcacagggagtcgtcggagtctgtctaaagtagataaaacaaaagactgatttgtaagcatataatttataagcaa

SEQ ID NO: 4692 - DNA, 122 bp, Homo sapiens
gtccggtttgtgcgaggggctcgtcgcggggcgggagcggagggcccggggcctggcggtcgccctcggtgatctcctggtcctggtcttccgcgagctcagtgctgcacagcgccccgcta

SEQ ID NO: 4693 - DNA, 122 bp, Homo sapiens
ctgctggcatattccaggtgcatccaggtgcgggcgtcatgctgggcttgggtctgagatcgtgtgggggtggcagctggaaacgttgtgggtgtcatccaagttttggctcagcaactcag

SEQ ID NO: 4694 - DNA, 122 bp, Homo sapiens
tcctgctccacaggattctccgggtaagctagggaaggaagaggcgcggcctcctgagcccgcatctcagagcgccacgtccctcctggctcagcctcccaccaggctccacagcttcggcc

SEQ ID NO: 4695 - DNA, 122 bp, Homo sapiens
tggggatggatttgcagcctccgtgtttgcccccacggttcgaaaaccggaatctaggcccggtctcctggcctgtgttctgtcgtgggatttctccagagcacggactgacttaacatttc

SEQ ID NO: 4696 - DNA, 122 bp, Homo sapiens
aattcatttactccatttgaatgctagagccactcacttttatttgtgtttctaatttaccgtttaaatttatttgtaaaaagttaagggagagttggtctttccctgatgttctttctggc

SEQ ID NO: 4697 - DNA, 122 bp, Homo sapiens
acaccgacccgggcttccgcggtgtgagccagtttcagcgaggagctagttggttatgaccggaacgtgccgtaggtggggtgggggaaatagcaaaaggcgaggttggagggattgaaaaa

SEQ ID NO: 4698 - DNA, 122 bp, Homo sapiens
ttgcaggcatgaagctgtggtccagctgtgctaactaaccagccccctctccaagtgtgccggggtctctcacgcccacttgggtcttgtcaggactcttcctggcctgtcctcctatccca

SEQ ID NO: 4699 - DNA, 122 bp, Homo sapiens
tgtttgtaattccttacggagccagtttatggaacttgagcacgtttcactgaatcacaccgctaggagctggtcttttcccttaacctcttagagaagcacgactcaggattgttagtcac

SEQ ID NO: 4700 - DNA, 122 bp, Homo sapiens
gctggctcttctgatgacagggcctggaagatgttgcaggccatttgctacacaaggccccggtggagaatgaagaagccaagttttagaggtttgtgatcttgggatgatgctggcaggca

SEQ ID NO: 4701 - DNA, 122 bp, Homo sapiens
ggggacaggagcgtgggtggaagcatcccctgacttgtatgcaaatgccttgcaagccagcgtcctgccctggaggctgctgaccctgcttccccacctccacccgccaggttactgcaacc

SEQ ID NO: 4702 - DNA, 122 bp, Homo sapiens
gacctctctcacctcatttccagagacaccagacctcttgggtcatgctgtttccttgcccgaaatgcttttccttccccttttggcttggagaactcctttttatcctttaagctccagtg

SEQ ID NO: 4703 - DNA, 122 bp, Homo sapiens
agagaggcgccagccgatgcccgcaccatgtggaagcccaggtcaaacagcagcaggtctcggggagaagggaaccccaaggggctcaggtgcctcaaatccccaacctccagtttggcagg

SEQ ID NO: 4704 - DNA, 122 bp, Homo sapiens
tgcagttgaactgcactaacaatactaccattggcaatactatctttggtaatgggcttgcgcgcagagatggatggctgttttatccctcagtcactgcagcagctgggggctgtccatag

SEQ ID NO: 4705 - DNA, 122 bp, Homo sapiens
gtaacaagttgaaaaaaaactaattaattcaaactttagttttttttaaatttgttacagcgctgagcagagctgccgaccccatgcaggacagcacacagaccaccaaggggaccacaggg

SEQ ID NO: 4706 - DNA, 122 bp, Homo sapiens
ctctttcctgccactgccaacacgaggttggaatttggcagaaaattgtgatctccagtccgtgtggtgatgctggtggtgcaggttttgtttgttcctttcgggtggtgacttcggccttt

SEQ ID NO: 4707 - DNA, 122 bp, Homo sapiens
gcgcgccaaggaggcagctgcgtcccttcccaagcaccagcaggtggagtctcccacaggcgcaggggcaggtggcgaccacaggtcccagcgcggacatgcggcctcccccgccaggccca

SEQ ID NO: 4708 - DNA, 122 bp, Homo sapiens
gatgtaggggctgataggtaggctcagagccatggcaaccggtggccacctcctccctgccggcgccaggagcggagactgcagagggaccgggacttagatgagagaggtctccccagcag

SEQ ID NO: 4709 - DNA, 122 bp, Homo sapiens
aaaagctttcaacattgcaagcatcttgagtcttcctccctcttccttatcactaacaagcggtagaaatacttgtatttgatttgtacttttgggggaaaatctttttatattaaaatgca

SEQ ID NO: 4710 - DNA, 122 bp, Homo sapiens
ggtaatcattctataggttggcaaacccacctcttctctcagttccttgacaaaccgcgacgcctgttaccagggtaaccagcctgggtacaacatctaattgggtccggggaacttcaggg

SEQ ID NO: 4711 - DNA, 122 bp, Homo sapiens
cctctcccgctgaagcgggttccaaggccaccgtgagggggaccatccatccaggtaaaacgtgttctttccttgttcctttgcgaatcgatggggatcaggcttccccaggtggtgaagtg

SEQ ID NO: 4712 - DNA, 122 bp, Homo sapiens
gtaaacaaaaattagaaatcaaaacttctgaattccactgaagagctcactttaagcaaacggggtgaaggtcggattagccactaacggtttgaaaagcacaacagggagggattgcctca

SEQ ID NO: 4713 - DNA, 122 bp, Homo sapiens
cttacttatttgacttgttcactgtggtgacgttttgcagacaatggtggttaaaagcgccggtggtttaacccaatcaaggcaggggcaccaaactgtattgctagtcaaagtacgcgtca

SEQ ID NO: 4714 - DNA, 122 bp, Homo sapiens
aaaatgacagaagcaaatcaagtaaaacagtttgagtctttggggattgagagatcagggcggtttcccagagattgggatgattctcattattctggaactcatactgggccattcttatt

SEQ ID NO: 4715 - DNA, 122 bp, Homo sapiens
taaaatggaccaatcagcaggatgtgggtggggccagataagggaataaaagcaggttaccggagttggccattgtaatttgttttgtcctgtttcacattgtggtggttttattttttact

SEQ ID NO: 4716 - DNA, 122 bp, Homo sapiens
gaacttccgcagtgtcgactccaccctttaattaattaattctccgtaaagcagctggagcgatttttgtaaaacagataatgcagtttgaaaatggccaaaggtagaacgcttttacactg

SEQ ID NO: 4717 - DNA, 122 bp, Homo sapiens
gtgggtcgcctcccccaatcaagctgccgaagacagccagccccgcttcaaaagcccgagcggcctggtacggtcgcccccacccaaattagcaaagcggcgtctggggccggtgggagcgc

SEQ ID NO: 4718 - DNA, 122 bp, Homo sapiens
aggagtccagtggtactcaactcttggcaataggcgatggactcaccgcttggcgataggcgatagtcccttcatggtcttcaaaatgtgtccggaattggtgggttcttggtctcactgac

SEQ ID NO: 4719 - DNA, 122 bp, Homo sapiens
tgctggccgggcacgctggctcacacctgtaatatcagcattttggtaggccaaggcgggcggatgacctgaggtcaggagttcgagaccaaactggccaacatggtaaaaccccgtctcta

SEQ ID NO: 4720 - DNA, 122 bp, Homo sapiens
attaagcccaccaggcggccgcgggctgcgcagagtgcgagtgcggggcctccaagcccacgccccggaacccgctgccgcagcgactgccttgtgcagccccagctcctgcctgcgactct

SEQ ID NO: 4721 - DNA, 122 bp, Homo sapiens
gtgagactgtctctacaaaaaatacaaattaaccgggctcgtgcctgtaatcccagtttacgtaatcccagattacaggctcgtgcctgtaatcccagctagggtaggccgaggtgggagga

SEQ ID NO: 4722 - DNA, 122 bp, Homo sapiens
cccaccctcccctgccttccagagcctcagcatggaggacacagtgggcagtccactcaacgtggacaagtacaggtttgaatgtgtcacctgcatcattgggctttggtgaaatgagacca

SEQ ID NO: 4723 - DNA, 122 bp, Homo sapiens
tcagcatgattctgagaactctgcgggtagctctggcctgcccctttccacgccctaccgcgatgtgcgcacaacagtattgtgacccttgtggtgtactgtagattttacctagttttgtt

SEQ ID NO: 4724 - DNA, 122 bp, Homo sapiens
taaggttggagctctggctgaagctcttgccgcactcggggcacttgtagggcttctcgccggtgtgcgtgcggcggtgctggataaggtgggagctgcggatgaagctcttgccgcagtcg

SEQ ID NO: 4725 - DNA, 122 bp, Homo sapiens
tttagaaccagtgtgtctctcctgcagcctccattctgggtgcctccacccccttgccgtcgtcatggtaactgatgagcagcatgtgaccgaaagctctctgcccccccaaccccataccc

SEQ ID NO: 4726 - DNA, 122 bp, Homo sapiens
ggccctgcagactcaacacgcggacctcagggctggggtcgtggaggccttgtgccagcacggtcaaggcagcttgtttgggaagcacctccagcaggacagggctgtagaggaactgaggt

SEQ ID NO: 4727 - DNA, 122 bp, Homo sapiens
agccaagaaggagacagagctcttgttgaagtgggggagggaatctgaggggctgggtagcgggtggggtgctgttgataatctccccatgttcccctacggcccctgttcctgcctccctt

SEQ ID NO: 4728 - DNA, 122 bp, Homo sapiens
aaaaaaatgttctgagactctgagatgcatgaggctgtggctggcaggcagaggggagcccgaaggagccttgagggacataggaccaaataccatctttgtaggaggcctggggaggggca

SEQ ID NO: 4729 - DNA, 122 bp, Homo sapiens
aaaattgagagtaacgttattttccgggatgtttcctaggtgtcagacctcgagcctcgacggccctgaagtcatagtgtttgtacaaagtggtggcaccagaccaggaggagctgagagcg

SEQ ID NO: 4730 - DNA, 122 bp, Homo sapiens
cagtacttacccttggctaagaactgcactgctttgtttaaaggactgcagaccaaggagcgagctttctctcagagcatgcttttctttattaaaattactgatgcagaacatttgattcc

SEQ ID NO: 4731 - DNA, 122 bp, Homo sapiens
aggcagagagagggcaggaactggcttgaggtcacaggcctaaagaggccaggcagaaaccggcttgccagcgcctccagctacccccagggactggctgcctagagggcgtggagtccagc

SEQ ID NO: 4732 - DNA, 122 bp, Homo sapiens
agcagcccgcgcctctccttaggaaacccagtgagacgctgggtattcgaatgtggtcgccggggaacgggcggcgcccacaccccccgcgctcggagaactccccagtcccgcctgaaacg

SEQ ID NO: 4733 - DNA, 122 bp, Homo sapiens
ttcactgtctccaactttgtggacaacctgtatggctacccggaaggcaaggatgtgcttcgggagaccatcaagtttatgtacacagactgggccgaccgggacaatggcgaaatgcgccg

SEQ ID NO: 4734 - DNA, 122 bp, Homo sapiens
aagccccaaggcccctgcagggcagcccagcagcgagtaggaggcaaggccaggacccagcggcgaggaggaggcagggccagggcccagcggcgaggaggaggcagggccagggcccagcg

SEQ ID NO: 4735 - DNA, 122 bp, Homo sapiens
cctgggcaacagagcgagactctgtctcaaaagaaacaaacaaaagaactggaggtggcccggcccctgcgtctaacagtcctgggccctccacaccagcacaggaactcaagcctgcagtc

SEQ ID NO: 4736 - DNA, 122 bp, Homo sapiens
caccactgcggctgctcagtaagccaagctagggcactctggtgtacagccagtccccgccgcggaggtgccggtggagcctgggaccgggcgagtctccgccccgcttttgcagctagggg

SEQ ID NO: 4737 - DNA, 122 bp, Homo sapiens
gcgaagctttcaaggacacgtctgcaccggcccggcggggtgcgtgtgcgtgagtgtgtccgcgtgcgtgggagtgtgcgcgggggtgctggaggggcgaccccgggcgtaccccccctgcg

SEQ ID NO: 4738 - DNA, 122 bp, Homo sapiens
aaaaagaatttgtgatatgtatgactgtctgcaaatgattacacaagtggtttttaacaccgtgatgtgcacttacaaatgagaaagctctcgagttcccacttctgtctgttacacgttca

SEQ ID NO: 4739 - DNA, 122 bp, Homo sapiens
ccccacagcttctttgcagataacatcctggccgtattatgcaactgaacccatattatccgggggaaacttaccctcctctgctctctaaatcttccttttccttctggttttggagaaag

SEQ ID NO: 4740 - DNA, 122 bp, Homo sapiens
agtgagttgaatgacctcaaagatgatatttttccaggcagccaagatgtggagtgtctccgtgtcaaatttctttccttatttctgagtaacattgaacagcagctatatttgagaggttc

SEQ ID NO: 4741 - DNA, 122 bp, Homo sapiens
gagccctgtgcaaacttgtgaatgggaacctgccagggaatagatgctattgctgggtcccgcagttgttttcggggtagttaggctggaaagtcccagccaacttcctctaagaggtgttc

SEQ ID NO: 4742 - DNA, 122 bp, Homo sapiens
caggactgggagaggatatatttccctcatttaagcctcccggtccatggcggtttgttgcggcagccctggcagactcacccggctgcaacgtgaccagtgggtggaagcggccaccacat

SEQ ID NO: 4743 - DNA, 122 bp, Homo sapiens
tctggccaaaggaaaaacctttgccaaataatgttcctgctgccatcccagctggcttttcgtttgtccaaatcgctctctagtcgttgtcttttcacttcataaacgccactgagaattgt

SEQ ID NO: 4744 - DNA, 122 bp, Homo sapiens
gtgaactccaaaacggcgaatcctcctttgctgtttccctctggtgcctttctgcagcctcggagtgagttcttggctgtagtcagttttcagtaccgttagtgacgagtccggtggggcgc

SEQ ID NO: 4745 - DNA, 122 bp, Homo sapiens
cagcgatcagcctcccgggaaaagctcgtgttttgtgactagccgggtgtcttcgggctccgtgaggggttgacagataaccatgctgccttctggaggtcggcgcttccccagccttgagg

SEQ ID NO: 4746 - DNA, 122 bp, Homo sapiens
tgattccctcgctccagggccctcccctctggcccaggctctagtccccattaatcacaccgcgcgggctgcgacccctttaagtccggcttggatgacccagatccaaagtcatcgactct

SEQ ID NO: 4747 - DNA, 122 bp, Homo sapiens
ggaagcagggggttgggcaagggcggggcggcgacctccgactgggaggggcgtatatggcggcgagtccctattggccagccatttgcgggaggcgggccctgattggccggggggatgcg

SEQ ID NO: 4748 - DNA, 122 bp, Homo sapiens
aaccagccgggacaacactgcaagaccccttctcattttaaaaaattagccaggcatgaccgggcgcggtggctcacacctataatctcagcactttgggaggctgaggcaggcggatcacg

SEQ ID NO: 4749 - DNA, 122 bp, Homo sapiens
tcgtcaacgacactgaccgctacctgacagctgagagcttcggcttcaaggtcaatgcctcggcacccagcctcaagaggaagcagacctgggtgctggaacccgacccaggacaaggcacg

SEQ ID NO: 4750 - DNA, 122 bp, Homo sapiens
ccgccgctgtgctgccgctgccggggaataatctgggcggcagcgggcggcctcggctagcggccacgagccacttctgcggctgcccagagaagcaaaggtcaccagtcccaagtcgtccc

SEQ ID NO: 4751 - DNA, 122 bp, Homo sapiens
atgaaaaaaagaaaagataaaaatggggagaaaaaggtgaatatttcaagggccacagggcgggagagatggagcaaattcccaaacctcaagtccaagttctagaagttgggtgatggggt

SEQ ID NO: 4752 - DNA, 122 bp, Homo sapiens
gactttgaaattatctgataaaacttttaaagcagctatttaagggcttcagcaaacaatcgaaagtactcttgaaagcaatgaaaaatagaaaatcttagcaaagaaacaagacattaagc

SEQ ID NO: 4753 - DNA, 122 bp, Homo sapiens
accccttggcaaggcagctgcggctgagacggaggtagccccccagaaccaagatctcctcggcagttgggtaccgcttcttcccagcccccgggactgcagcatcaactgtggctggagag

SEQ ID NO: 4754 - DNA, 122 bp, Homo sapiens
cgctgtccagcagctgtttctactgccaggtgctgcgtcccgcgatcgttataacacatgcgtacaaatgagcacaacgcgccataaaagtgttattgttattactattgttgctgatttgc

SEQ ID NO: 4755 - DNA, 122 bp, Homo sapiens
tgctgggcgcgggacctgggtctgctgcggtggcgaggccgctagcaggcgggcagccagcgactgggaagtgattccgccctcaggggagtgggggaccaaccggcagtgcggagccgagg

SEQ ID NO: 4756 - DNA, 122 bp, Homo sapiens
ttccgcctctgcctggtgctggggagcctggtgccttctcaggagcctcgccggaggaggcgtcatcaggggccgccctggctttgaaatatctcttcgacgcctgatttcgtttcccgtta

SEQ ID NO: 4757 - DNA, 122 bp, Homo sapiens
aatttaacggtgatcgtcaccccttgcctcagtcactttctgtccctcgcgcggccccggcgttcacggcggacgttcttgttctgtggagaataacggctgcacctggagattgacgcaga

SEQ ID NO: 4758 - DNA, 122 bp, Homo sapiens
agggggaagagaaggtaacgcggcagctgctgggtggggacggtgactgtgcccctagatcgctgcctcctgggtcctgaatcttgctccccgctccgtagagttcccgaaaccccgaaggc

SEQ ID NO: 4759 - DNA, 122 bp, Homo sapiens
atgcaccggaacgattctagctgctcttgccggaagtgtggctagcttagcgtgcaaagacgccgcgttgtgacctacgtgggcggagtcagccgtgcagacctagaacttagcgccggaag

SEQ ID NO: 4760 - DNA, 122 bp, Homo sapiens
gccacaggccgcgggggcggggaggacggcgcccggggacagagaacatgggacgcagagcggtccaaggccccggcgccctggtgaggcccaaacctcccgccatgccccggccccaacga

SEQ ID NO: 4761 - DNA, 122 bp, Homo sapiens
tctttgtaaatctacctggtttctcgatctctgttgttatttctgatctgggcctctcaacggtttaaaccaaagggattattcaaaacacagtaggaaattcaggagctttttcatgcctc

SEQ ID NO: 4762 - DNA, 122 bp, Homo sapiens
accgtgctagagattggcgcccccaattttctgatgagctaacggaggctcagagaggggcggccacctggtccaggtcacacagctgggaaatagccgtcgcgccctggaacctctgctca

SEQ ID NO: 4763 - DNA, 122 bp, Homo sapiens
acactttgtaaacctatggtttttacattattccttgtgattctttttttcctaataactcgttcactaggaaaaatcccagaggctctcagctctattctgagaaataggtcaaacaactg

SEQ ID NO: 4764 - DNA, 122 bp, Homo sapiens
tgggagaaaaggaggcgggaggccaggctgggacctggggccatgcagggcctgttcttccgcccaaattccaccttaagcaggcggcggcccctccctcccacctggccaggtgtccccgc

SEQ ID NO: 4765 - DNA, 122 bp, Homo sapiens
aaaggtagaaaaggggtcggatctgaaaaggggagaggcattcagccgctgcttttgatgcgctatctatattagaccgatgcgccgttcttaatcaggcctagtccgatttcctttcctct

SEQ ID NO: 4766 - DNA, 122 bp, Homo sapiens
ttcagatacatttattgcattgtaaaaccagccgtgttttctggcattttgaccagccctcggaaactgctgacatcatgatgtactccttgcctggtgtttccattttccccagcactgca

SEQ ID NO: 4767 - DNA, 122 bp, Homo sapiens
atgactgcaagcgccaaaaaagatgacatttctagcatgttctatttaaccttgagcagacgttgataaagtctgatcctcagttgacacacatgtaaagacattatactgtctgatcttta

SEQ ID NO: 4768 - DNA, 122 bp, Homo sapiens
ggaggggcggcgcggactccgcgtggtgctgaaggggacagcgccagatttgtcgcactgcgcaggcgcagaggcgcgaacaaagaggggagggggacgaggcgcgcggccggaggtggtgc

SEQ ID NO: 4769 - DNA, 122 bp, Homo sapiens
gggcatctctgtcatggtggaaagatggaattaggcctgggacacaccccgcccaccctacgggtgtatcccaaatgccgccggccgcacactcaggccgcaccatctgagccccctcctct

SEQ ID NO: 4770 - DNA, 122 bp, Homo sapiens
agatagacatatgtctctgtcttcaaggagcttacattatccagcataagagacattaaacgaggttgggtgtggtggctcacgcctgtaatccagccctttgagaggccgaggtgggcata

SEQ ID NO: 4771 - DNA, 122 bp, Homo sapiens
aagctgaacttatcaccagagggactatgcaggctgaagtttctgtttctgtttcggttacgtatagaagcagttgctttctaagaattgaaggacacctagtcatatccttttggtcagtg

SEQ ID NO: 4772 - DNA, 122 bp, Homo sapiens
gggctggccaaggccagagcaggctccctcagcttgcagggaggtgtggagcgagaggcgcgagcgggaaccggggctgcatgcagcgcttgcgggccagctggagttccgggtgggcatgg

SEQ ID NO: 4773 - DNA, 122 bp, Homo sapiens
gagtcagagatttatgtacacaggggaagaaagctggttatagcttcttcatatttttcacgtggacccagagttgtaaattgagggaagaaggatagcagagtaatctcaaagcacaaagt

SEQ ID NO: 4774 - DNA, 122 bp, Homo sapiens
gtccgactcccccagaggcctcggggcgcgggctgcggggtccgtccgagttggggaaggcgccggctcgcacccgcacgcccctccagtgcccgtccggctctgcggctccttctcgcctc

SEQ ID NO: 4775 - DNA, 122 bp, Homo sapiens
tattacaaaccttgctacaacaactttcatcttccattagttttcccatatattctccttcgcacaatttgttcccctaggaactgcaagcccctttcctttgtcttgtcacttctctatag

SEQ ID NO: 4776 - DNA, 122 bp, Homo sapiens
ctggcagcactggagggcaggcagggaaagtagggtgggtaacccagcctggcaaatgcacggcagctagaaaacctcttcaggttctggggtggctgggccatgagaggggaggccaggca

SEQ ID NO: 4777 - DNA, 122 bp, Homo sapiens
tcttgctccagatgcttagattttgctgaagagttttagtcctggaagagactgaagagccgggggatccagtgtggcgcagtcatctcataggtcctgtaactacccttaattggggcctg

SEQ ID NO: 4778 - DNA, 122 bp, Homo sapiens
actacattaaattaacatagtttggtactggtataaagttagacaaagactactccctcccgctcctcaatctgcccccatccctagaacgtgctggcagctttctccatccgatctgcaag

SEQ ID NO: 4779 - DNA, 122 bp, Homo sapiens
cttcctttgagatatactccaagaggaggcactgctgagcttcctgccttcatccttagccggggtcatggttaatccgtaagaacatggaggagcaagcaagcaggcttcaccaaagaggc

SEQ ID NO: 4780 - DNA, 122 bp, Homo sapiens
aactcctctaccaggttttccgccagcatctcggctgggtcttctaggggcagcggcccccgccgccgtcccgcctcagccgctgccccgggctcttccccggcccctccgccctcagccag

SEQ ID NO: 4781 - DNA, 122 bp, Homo sapiens
acaattaaggctgggagatggcattccacttaactgtcagactcggagcggtggcagccccgcagccacaaagagatgccttaaatgagaagaacatgtttctacaccgcatttgtgaaagt

SEQ ID NO: 4782 - DNA, 122 bp, Homo sapiens
gactctgcccttgagttcccagcgcaggccgcacgtcaccggccgccagcgcgcggaccgcgaagccaagtgtcccccaagcggggcttgctgtgttttcatcatttcccttgcctggcccg

SEQ ID NO: 4783 - DNA, 122 bp, Homo sapiens
cgggccaggccggtgagcaggcccgcagcccggggctgctgacagccgggcggaagggggcgcctgcggcatcccccagcacaggggcgacggctgcggctgccagggccccgcagcccccg

SEQ ID NO: 4784 - DNA, 122 bp, Homo sapiens
gagtaaaattgactctctaggagtgtatcattctatgaaagataacacatgtaggctaggcgtggtggctcacgcctgtaatctcagcacttcgggaggccgaggtgggcagatcacctaag

SEQ ID NO: 4785 - DNA, 122 bp, Homo sapiens
taaaaaaaattcatgtgaagttcctgatgaagggttcacgtcaccagcaccggctcctgtcgtgtgcccaactccaagttactgccaagatccagggagggatgtgctatgtcaccctgccc

SEQ ID NO: 4786 - DNA, 122 bp, Homo sapiens
cttagcatccagtcactctcacctccactgtctatcaggcagcccagaagctgtttcttccgctggtcccaggtgctgagatgggggatgatggtacagatgtcgaggtctgagaagttgca

SEQ ID NO: 4787 - DNA, 122 bp, Homo sapiens
gtgttcttcctgcgtccctgcatctacctgggctcagatactgactggcacagaagataccgaactggcccgggattcccgagtcacgttgttgggcatcgagagggtgcagcaggacacgc

SEQ ID NO: 4788 - DNA, 122 bp, Homo sapiens
gaacggcccgcgggtgtgtggagtctgcgcccctgtggcttcagctgcgtcgggggactgcgggaatcttccagactccagtttaaatcagagaggtgtgtccacgaaaagagtcaaactaa

SEQ ID NO: 4789 - DNA, 122 bp, Homo sapiens
cagaattttaggaagaaaggaaaaacctaagcactggctccaaatttttgtagaagcagacgcatggaaggagagctatatttattctgttttccaagggcaggactcaggccaacagtggc

SEQ ID NO: 4790 - DNA, 122 bp, Homo sapiens
ggtgaggggtcctctccgccgccaggcggagttgggagccggacgatcccgcacgcagcgcgaggcgggaccccggactgactacatttcccagtctccgtcgctccgcgcggcccacccct

SEQ ID NO: 4791 - DNA, 122 bp, Homo sapiens
gttttgcaccggccaaacttctccaatctaactctcccctcaccactgtgtcacttagtccgaggccaggaacagcggcgttatctgataaaagagttcatgtatatatccacatttatctc

SEQ ID NO: 4792 - DNA, 122 bp, Homo sapiens
accgtccatcaaccacctctcttcctggtcagggaaccaagaaatgaagcaggacagccgcggacaaaacccctcagacacccggctacgaaggatttggctttattgggctgtgagcctcg

SEQ ID NO: 4793 - DNA, 122 bp, Homo sapiens
tgttccccacagtcactcgtggaggtggttttgcagaggtgggggccaggcctcccttctcgatgcccagacatatctagaccagtggggtccagggctctgtgaacacccagacattgcaa

SEQ ID NO: 4794 - DNA, 122 bp, Homo sapiens
ctctaaagggtacttaaacccaagaagatttgtgcaactggggcccttgagccacttactcgagcccactcccactctgtggaatgtactttcacttcaataaatctatgctttcatcttcc

SEQ ID NO: 4795 - DNA, 122 bp, Homo sapiens
aaagattactcacgataaatacaccccagcagagtggctgatttccccgacacccacccccggcatcgagacctctgcaagcttcagcagacgagggcctgtctccagcgtgcctcccggcc

SEQ ID NO: 4796 - DNA, 122 bp, Homo sapiens
aactgcgagatggggctgtcccgtcttactgtgtgactgatgagtggaatcactgctctgcgtgtttcgctctccacaccttcggagcccgcacctctccgggccctgaataatagggtttg

SEQ ID NO: 4797 - DNA, 122 bp, Homo sapiens
aaatatactaattcctctttccctacccactgccaccaacaagcatactctccattgacccgtctgagtgactcacacagtttgctgtgatgcatctggagcttttcagattcctgcctgct

SEQ ID NO: 4798 - DNA, 122 bp, Homo sapiens
cgcccagctgcccgcccctgcgccaccccggcgcaccttaggggctggaggctggctcggcgaggttgtagctgggaccgcgaggttgccccccatctaatcagccccgcagtgcctcgcca

SEQ ID NO: 4799 - DNA, 122 bp, Homo sapiens
ccatctaactccgccgacctgcccgccgttccgccaccgtcggctggttgacccgggctgcggagagaggaggaaagacagaaaggcagtgactggctcctgtcccattcccgcgcgcctgg

SEQ ID NO: 4800 - DNA, 122 bp, Homo sapiens
cgtagacggttctgggggctcgggcctccaggacattcctgcgcctctggagtggggatgcggtggaccttacccactcctctggggctcttctatggctgctgggcactttcaccggtctc

SEQ ID NO: 4801 - DNA, 122 bp, Homo sapiens
agggagtgagggtaggggcggcctgtgctcggggatgtgtggagtggtggtcagctctaacgtgtcccttgcagactttcgcagctccatcattcgatgacaagattctggaggtggtcgcc

SEQ ID NO: 4802 - DNA, 122 bp, Homo sapiens
gtttctgcctggagcttttccaggggcagcacagggcagcagggatgaggtctgcccatccgagcggcctgcaggaggagcctggagcccgcccgccctccccagccagccccgcactgcat

SEQ ID NO: 4803 - DNA, 122 bp, Homo sapiens
agctgtgccaagcatattaacactgagtgaacaggaatgtgtcactttatggtactgtaacgtaaaataggctactaaagtagatgcaaagcactgcaaaatgaatgctacatatcagttcc

SEQ ID NO: 4804 - DNA, 122 bp, Homo sapiens
catcttaccactcgccacgtgaaacaattacttttttgggcactcacaaactacatatagcgagagatagtaggagcttcacaagagttggagtacctaagagactccaaagacacagtagg

SEQ ID NO: 4805 - DNA, 122 bp, Homo sapiens
atattatttccctctaaatgaaacccgggcattttaaagaaatggctgatttcatatctgcgataggaattgttcaatatattatataacaaggaagctatcaaaaactaggaggccaggct

SEQ ID NO: 4806 - DNA, 122 bp, Homo sapiens
attacatgccatgggatgaactatatctccccaacatttgtatgttgaaaccctaaccctcgggcctttgggaggtgattaggtttagatgaaatcgtgaagattgagccctcagatggaat

SEQ ID NO: 4807 - DNA, 122 bp, Homo sapiens
acacacaccaataataataacataacgaacaactcaggattcgagtctgggctcctgactcgaaagcctctcagtctccctcctccacacagtcctccgtggacttgtcacggcgaatccca

SEQ ID NO: 4808 - DNA, 122 bp, Homo sapiens
ctgtgaagtggggcacaggaaacccgcccgtcctgggtcacagggtgctgcaggagcagacgggagtgggttgtgccctgcgaaactctgcacctcgggaggcggcgcgtctctctcgcagc

SEQ ID NO: 4809 - DNA, 122 bp, Homo sapiens
gtccccctgccggccccgccctccctgcctctgaggtgttgtgtgcccttgacgtcagcccgtaccggctccgcctccgggcgagttgcgacattttcagtgcttcctgagaagagtttcgc

SEQ ID NO: 4810 - DNA, 122 bp, Homo sapiens
ccgttattaaattataccgtacggctccgctccggcccaggctaggaggatgagtgcgggcgagaaatgcaaactcatctgtgacttgacccaaggggcagccccgtgaacattcccttaag

SEQ ID NO: 4811 - DNA, 122 bp, Homo sapiens
tttccccgacattggctgtgcaaaaaggtctctccctttaaagggtacagccagcttcagcgaggctgagggaaactctaaggttggggcgggtgttgacaaaagagcacgtcccggactcc

SEQ ID NO: 4812 - DNA, 122 bp, Homo sapiens
gaaagaaaagaaaagaaaaaagaaaagaaaggcaaggcaaggcaaggaaatgaaatgaaacgaaacgaaacgaaaagaccctgccaaatgtggtaagaccacatcgctgtcacacagtgagc

SEQ ID NO: 4813 - DNA, 122 bp, Homo sapiens
gatcaattttgtggagagagggcatcatgtgggtaggcaatgttttagtgatggcaagtacgtgtcttgtgtactaggactgccatttttagtccagtgataatttataatagaatcctttt

SEQ ID NO: 4814 - DNA, 122 bp, Homo sapiens
ggactcttacaaagagaagagttactgcattatgacgtgtgcccagacctagagcacttccgtgtactttgcgtgtgaattttagtaagaaccactcctgtaaggtttgctcaggtaaaatt

SEQ ID NO: 4815 - DNA, 122 bp, Homo sapiens
taatatttcttgaagaaaaaaatagcgtacaaaagggtttgtgatgccaactcaatcagtcgtgctgttgatggagaattattcaagtgcaagccagaacaggcaaaaaaaattttcagaga

SEQ ID NO: 4816 - DNA, 122 bp, Homo sapiens
atggtcttttctgggcttatgtctctgtcttcctggccagctctcagcactggctcttgccgggtgggtggaatcctgtctgatgacccagctgggagtggcttgtccccctctggacactg

SEQ ID NO: 4817 - DNA, 122 bp, Homo sapiens
cggcaccagcagccccgaggcggtgaagaagctgctggagaatatgcagagcgacttgcgcgccttgtcactggagtgcaagaagaaattcccacctgtcaaagaggtaagcttcaggtgac

SEQ ID NO: 4818 - DNA, 122 bp, Homo sapiens
catagcatctatgcacctactgcactccctcaagagcccatgccatggttctcagcaaaacgccactcattcttctaaggatacccccagtatcaccctattcattgtttaactccaatacc

SEQ ID NO: 4819 - DNA, 122 bp, Homo sapiens
cacccagtttacagttcacccacacggttacttgggagaaatcaaagagctcagctcactcgccccagcacagggcagaatcataaaccgcccacttgctctccttcccgtctgtgaagcgc

SEQ ID NO: 4820 - DNA, 122 bp, Homo sapiens
gagacccgcgaggtttgtcgtgcgaccgttgctgcaggtggtccaggcttgggaccttgacgcgaggcgctgggtccgggcgctgcggcggagcccagtgaaagtggtgtttccttccggag

SEQ ID NO: 4821 - DNA, 122 bp, Homo sapiens
tctcgcgccaacgctgggggcggggctacgtcgcgaccgccccgggcgccagccccgccccggcaaggccctggcccccttcgctgtgccccgcccacgcactaactttcgcggccggtccc

SEQ ID NO: 4822 - DNA, 122 bp, Homo sapiens
taggtagagggatttaaggtgctttctcccagaattgggggtgaaaacgggtggattggacggtggggagaacgagaagtcagtttcctagaatcctctccaatagctacccaggattctct

SEQ ID NO: 4823 - DNA, 122 bp, Homo sapiens
aagcgtctaagggtagctgccaagcgggccatgacctgggctgggttttcgtctttacctcgggtagtttccttaagttcgtcataattaccagctttgtaagctgcctttttaagcccttc

SEQ ID NO: 4824 - DNA, 122 bp, Homo sapiens
ttttattttagtcattttaataggtgtgtagtgatatcattgtggttctaatgtacgtgacggataatgatattgaacatctttttcatgtgcttatttgtcatctgtatattttctttggt

SEQ ID NO: 4825 - DNA, 122 bp, Homo sapiens
agttgcagtcccagctctgtcactgtctctctgtgctttgctaaacagacttcgcccctccgtgggccgtctgtgaaaatagggcccagctcgatggcatataaaggccctctgacttccag

SEQ ID NO: 4826 - DNA, 122 bp, Homo sapiens
aagggtgttcagacagccctgatgccagctagtgcaaagactctttggtaattagaagagcgcacctctttaagctagttcattgctgaatcattgtagcaactctgcatctgtgatgccag

SEQ ID NO: 4827 - DNA, 122 bp, Homo sapiens
ttcgggccccaaaccggttctcccggtcccaccgcctctggccctaaggcctccaacccgcggcctgacaagccctcacatgaagcagctggagagaaagaaagaatcgagagaatggcatg

SEQ ID NO: 4828 - DNA, 122 bp, Homo sapiens
ccctgctccaggcctgtcctgcaaggagccctaaggccctgcaggttaacaagccccttgcgtgcttcctgtgcactgtgaggtatgaggcccattcctctgtcagatgactgctttgcccg

SEQ ID NO: 4829 - DNA, 122 bp, Homo sapiens
ggccgaccactcaccctcccctttccgcaagttagggggcggggcatcgggtttctggctcgtgatttgccggagctcctgcgctccccttctccaccccctccggctgtgtgagaggtcag

SEQ ID NO: 4830 - DNA, 122 bp, Homo sapiens
actccacagacgaggaaactgaggctcaaagaggcccgggtcgcctctggggcagactcccgagccgcgcactgccgggcacgtccagcaggtgggagtgggcgcccggggacggcgcggtc

SEQ ID NO: 4831 - DNA, 122 bp, Homo sapiens
caaggtcaaagctctggcccggccgctcatcagcttccagggctctgccctcggagtccacgctctgaagcggggtcgcgtcaggcatcgcatccccagcagctcaccgatcgcagttccca

SEQ ID NO: 4832 - DNA, 122 bp, Homo sapiens
agcccacctggcctcaaaggtccgctcctcttggacacctttctggatcctgggccctggcgctgggcactctgtatccacacggatgaaacagcggctgctggcggggccggttgcctgat

SEQ ID NO: 4833 - DNA, 122 bp, Homo sapiens
gctgggtcaggaactctggtagagggaaaccagtgccctgtctctgccgggctgggactccgcgagtcactcacctgtaggggaggtccgaggcccgcgcgggcgcaggggcggcgcctgtc

SEQ ID NO: 4834 - DNA, 122 bp, Homo sapiens
tctactctgggaagaaccagacagcaggcctcagttttttgagcagcttccagagccacccggagggggactcactgtgttggctttccacaacacattgggctaatgggccattggacctt

SEQ ID NO: 4835 - DNA, 122 bp, Homo sapiens
gggagctgcagtgccctgaattccccctcttactccaccccctcaatactgacacacagccgacactcaataaaagtttgttgaattgacaaaaataaatttgcggcttcttgcccagtact

SEQ ID NO: 4836 - DNA, 122 bp, Homo sapiens
ctgagctaaaggccaatttgcttggaagagtgcatctaattaaagtgagattagaaaggacgaaaggtgtcctttaggaaataaccacacatggcaagccactggtatgatgatgatcacca

SEQ ID NO: 4837 - DNA, 122 bp, Homo sapiens
tcggggctcggggaagcgcccccaccccgcttccgggacgcgggcccgcggcgcgccgcgcgcttacctcgcctctggcccttgggacccagccctcgtgcggtccccgtggtccggctcgc

SEQ ID NO: 4838 - DNA, 122 bp, Homo sapiens
gaccaggagcgcccgggacacaaggcgcagtcgatgtggagaccagcgtatgaatcacttcggccctcgcatgccagctagtgattgagtgtgctcggccccgtccggtcccgtcccgcccc

SEQ ID NO: 4839 - DNA, 122 bp, Homo sapiens
ctgaatgtcacacattcctactgtaggtcttttctaattccaacaaaaggcagatcctagcgtttttaggatttcaatcgaactaaattccaactataaatagtttgcctgccaccttctta

SEQ ID NO: 4840 - DNA, 122 bp, Homo sapiens
gtaacctccccctcccataggcctgcttttctcgcccaccatctgtcgttgtgtcctgtgcgggcatcacccaggatgagtttctgctgcacatgtctgaggatgactgggacaaagtcata

SEQ ID NO: 4841 - DNA, 122 bp, Homo sapiens
gtggagggggccacctgggtggcaggggccctggagctctattgacctggtacactgctccgggactcctcccccgccaccctccgcgcatagggtccttggtctggaccctgccccccaaa

SEQ ID NO: 4842 - DNA, 122 bp, Homo sapiens
ggggcggcgagtccctagagactcaccgtgtacactgagatagagctcagggtcgaggtccggccggggcggcggttcccccggtccctggcgcaacagcagtgcaccgggtctcttggcca

SEQ ID NO: 4843 - DNA, 122 bp, Homo sapiens
agtccggggtcgccgcagcccgggaggagtgtctggtctccggcctgcctgtgctgtccccgcgccctgtccactggactcccgagacccttggaacccaggtaacccggggcgggactccc

SEQ ID NO: 4844 - DNA, 122 bp, Homo sapiens
cagtagcttaatccatattctatggttttgtgattaaccctgagtatggaatcttagtgtcggtttcatatgagcctcattggaacataaagcacgtctctttgtttcatttacaatttctg

SEQ ID NO: 4845 - DNA, 122 bp, Homo sapiens
aggaagcaattccaactaataagacaactcagcaagatcactggattcaaggtcaatatacgaaaaccaattgtttttttcagataccagcaacagatagaaaatacagttaaaattatatc

SEQ ID NO: 4846 - DNA, 122 bp, Homo sapiens
ataggatgctttagaaacagatcttgtctctgtttttgccctaaatagatgccagcgcctcgcctgaaatgaatgggaaccgtagatggcagctcgaggcagcctggggccctgtcagagca

SEQ ID NO: 4847 - DNA, 122 bp, Homo sapiens
gactgctgactgggtcccaactctgcattcagtgacgtcatgttgcagcttcacattggtcgtgttagaggtaattatactggcaaacaggcaaatgttacagttaaaaccttttttctttt

SEQ ID NO: 4848 - DNA, 122 bp, Homo sapiens
aaggcagggggacctgcctgtccctcagggagcgtcctgggaacccgcgctcgccccacacgtcttggggcgcatctgccgcaccccttacttaggcacccgcaactgtggcgcgtatctcc

SEQ ID NO: 4849 - DNA, 122 bp, Homo sapiens
ggagagaaacacccaggatgccccgagctgtgggaaggctgtcttcttagaggaagaatgcgtagaggggcagggctgattaaataacaatactgttagcgagggaagaggattgacagctt

SEQ ID NO: 4850 - DNA, 122 bp, Homo sapiens
tgtgacaaatcttacagacactggtcatgctttcccaagttagtggctactgtaagactccgttaaacttgcagcctccttcaagcaaatacgcgttgcatcacagtaagccttgtgtaaat

SEQ ID NO: 4851 - DNA, 122 bp, Homo sapiens
acttgttcttcctgtatttaacctttcattcttggggtcggaaagaaacacacattaaaacgccagcctcgtacgcggagtacattcgcagctaaacccgggcaccagagcccttctgaaac

SEQ ID NO: 4852 - DNA, 122 bp, Homo sapiens
acaagagaggacagcaatcagaggccaacgctaagtgcttctgaccctctccctcacagccggttactagctgtttggacagatttgcccattcagccccaggacaactgggggggatggca

SEQ ID NO: 4853 - DNA, 122 bp, Homo sapiens
tttctgccctttcctttattcaggagtagatgtgcgcgattaccaccatttcttgcgtctcggaacaaaggaaatgtctggattattaatggggaaccaggactcgacctaaggcgagtcta

SEQ ID NO: 4854 - DNA, 122 bp, Homo sapiens
gaaaagctctaagcactcacgcagccggcaaacaagcggaatcatccagcaaggcaaacgcgaaatcggcagcacgccacctctggtactgcacctctgacggacaggagggcaaccaactg

SEQ ID NO: 4855 - DNA, 122 bp, Homo sapiens
gtcaggatcttccctgtcaggcccaggcctcgtttgcatgatgatgggagtagcttcccacggtctgggctctccttccccatgttctcctgttcccccaattcccatcacccagattccag

SEQ ID NO: 4856 - DNA, 122 bp, Homo sapiens
ccaactaggacccgtactcagggtcctgagccgggcgctgtgttccaggaccatgtaccgcgttatgtggcgggaggtgaggcgggaggttcagcagacccatgcagtgtgctgccagggct

SEQ ID NO: 4857 - DNA, 122 bp, Homo sapiens
gcagcgcggcagccgacgactgcgcagacgcagggcggcggccgcgcctctccaacgccccgcacccgcccccctcagaagcacgtgcgccttacgtaatttcctgttattcttcggtttgc

SEQ ID NO: 4858 - DNA, 122 bp, Homo sapiens
gtagttccaggacttgtgaggctttatctgaaaagtgtagctgttcaaccaccatgcctgcgatgcatacacccaacctcaaatatactgggaagtccagtgctctatttcttaagtaaatt

SEQ ID NO: 4859 - DNA, 122 bp, Homo sapiens
gtcaggtccgaacagattggcggagattcccggggctccgggctctgattgacatttctacggggcgcaagcccctcctctctgcgccgcgctccctcctctcggccgccggagctgcctct

SEQ ID NO: 4860 - DNA, 122 bp, Homo sapiens
agatttttaccaattaactactacccaaatgtcttctgataattggaatatagaaacaagcgaggttgtgttccagaaattagaaatacagcattagatctacactttaatggatctttgag

SEQ ID NO: 4861 - DNA, 122 bp, Homo sapiens
gccccgacgcgcgctttcgagcttgttccgcagcgggcgctgaagagaggcggccgcgtccggacgctctgatgcggttgcgtacgttttcagcgcttcccgctctccaccggttggactga

SEQ ID NO: 4862 - DNA, 122 bp, Homo sapiens
ttaaaagaaaaaacgaacaaaaatttcctaagtctgcccactcaaaagtcctagaagcagcgacaacccaataacaataaacactcctaggaacatagattgtattctctaaaaaatgcttc

SEQ ID NO: 4863 - DNA, 122 bp, Homo sapiens
tcatgggacagaaatttaaatgctctaccgagcagaagcataatttctacttagtgaggtcgatgacaaccttatccccagttaaagtactaaatcatacaaataagcatcaaaccatcaga

SEQ ID NO: 4864 - DNA, 122 bp, Homo sapiens
tttttggtccttcggagccgccgtccaggctcgggccgcgcagagtcgcttgtccctcggcggctgccgtgcctccctttacgtggcagctgcgggagcccgccaatccactgcgcccgcat

SEQ ID NO: 4865 - DNA, 122 bp, Homo sapiens
ttttctggctttcaattatagcgacttgttttcttgtttatttaatctttgtgttgtgctcgttgcctgattttgattgttggggctcacactagggactgggaaagctcctgaggagagaa

SEQ ID NO: 4866 - DNA, 122 bp, Homo sapiens
ggttctagcaatcttacccattcaaaacaaaagctttgtttgcttaactgactttgacatcgactcattcccagcttttgggagatccagaaatttctgttttacagcaattaattaaagaa

SEQ ID NO: 4867 - DNA, 122 bp, Homo sapiens
tttgttctccagatgtgaatagctccactataccagcctcgtcttccttccgggggacaacgtgggtcagggcacagagagatatttaatgtcaccctcttggggctttcatgggactccct

SEQ ID NO: 4868 - DNA, 122 bp, Homo sapiens
aatcatgaggccatttttcagtctggaaatagagggactggattataacttcatgatccccgaggcccctttcagctgacaaattttacaaatttgttaaggaaaaagggacataggcaaca

SEQ ID NO: 4869 - DNA, 122 bp, Homo sapiens
ggcatgtgaggccccaggggttcacagttactggagcgtgaagctgttccaggcacttcacgtaccaagagcaccgaggctcaggccctgcactccaggacacagaccaggttcagtggaga

SEQ ID NO: 4870 - DNA, 122 bp, Homo sapiens
gacccggcccgcgccttctgcccctgctgccggccgcgccatgcggtgagcgccccaggccgccagagcccacccgacccggcccgacgcccggacctgccgcccagacccgccaccgcacc

SEQ ID NO: 4871 - DNA, 122 bp, Homo sapiens
cagaaaggaacaggggtcaggccatcgccggatctactgaagacagacactgccttcaaacgttctgaggaaaaatgcttcaggctgggacttggatacccacgtccactgtcccactcagg

SEQ ID NO: 4872 - DNA, 122 bp, Homo sapiens
atcccagctactcaggaggctgaggcaggagaatcgcttgaacccgggaggaggaggttgcggtgagcagagattgcgccgttgcactccagcccggccaacaagagcaaaactccgtctca

SEQ ID NO: 4873 - DNA, 122 bp, Homo sapiens
acaatctccacagggggagatgatattactcacaatatgataaacatgctgtgagtccaccgcggaccctaagagccggggtgggcaagaggggctggctcttactccccgcatcgcgtggg

SEQ ID NO: 4874 - DNA, 122 bp, Homo sapiens
cgccctgcagacagaggctaaaaataccctccccacgtggccaccagaccagccctgccccgccctgcaggcctccgtgtcccctggctgccggctaggcagtcctgctctctcgggtctgt

SEQ ID NO: 4875 - DNA, 122 bp, Homo sapiens
ttgggatctgccggcctgaaggggatttcctggggccagccccattcccagccctgctgacgtcacccctggatgggtgcccagagttggaggggatgcccagagcagcactccagtgggaa

SEQ ID NO: 4876 - DNA, 122 bp, Homo sapiens
gctgagccgactcatctcctacaaagactgtgtctgccagcttttcttcttccatttcctcgggagcattgagtgcttcttgtttacggtgatggcctatgaccgcttcactgccatctgtt

SEQ ID NO: 4877 - DNA, 122 bp, Homo sapiens
cccagatgcggctgtgctggcccgtcaccctcagttcctgctcaactgcaccctcacttccgactaagtgccaggtcctgcactttcgctgggcctgccccggcccccaccagtgccctgca

SEQ ID NO: 4878 - DNA, 122 bp, Homo sapiens
ttgcaacgtattagaaaaatactcttttccagctaattagaagcctcctccgtggcaaggcgacaggcagaaccagttggctgacctaaccacctgtgcacccaaagtggcgagtctgggtt

SEQ ID NO: 4879 - DNA, 122 bp, Homo sapiens
cgcgccggcagccgctggcaggggcatggtgaggaggaaggtagggaaacttttatttcccgtcttgacagcggcggtgtttgtccctggtctgcagaaactgatacagtagcctccttcct

SEQ ID NO: 4880 - DNA, 122 bp, Homo sapiens
actccaagttacccgagagtggataaaatccactttctggagcactgacactcaacaaagcgtttgaaagtaagatctgttatagactgcagagatgttcataggctgccttaacaacacca

SEQ ID NO: 4881 - DNA, 122 bp, Homo sapiens
ctgcgatcgttcggcgactctgcctttcgccatggctgctgcaaggtgaagggagcggtgcggtgccgcgccccctaaacaacaaaactctgttgcaggctccttactacgccgaagcgcca

SEQ ID NO: 4882 - DNA, 122 bp, Homo sapiens
cagctaagcccaactttactcccagaaatgttgaggggaatctgcggactcgaggcccctcgcctcgggaccagcggcttctcttcgccgcagctcacgcatgatcggggtgggattccgtc

SEQ ID NO: 4883 - DNA, 122 bp, Homo sapiens
tggaagggttccgtccagcgtatccttcagatcttgctgtaggcctctggtgtctgtgcgcgcgcggcaggggcggcggcggcgacggccggaggtgtacggtgagaagccataaagacggg

SEQ ID NO: 4884 - DNA, 122 bp, Homo sapiens
gagttttccccttcctgccaagtgaggaaacagcacggagacaaccggtgaatgaggaagcgaagagccctcaccgtgcaccgagtcagctggtgccaccatcttggacttccagcctccac

SEQ ID NO: 4885 - DNA, 122 bp, Homo sapiens
gccatccttctcccgtctgtgccccatgggacagaggcctccagctgcaccaccactgctcgttaacagctgccatccacaccgaggaagcctcttcgagcccagggagtggaggatggggc

SEQ ID NO: 4886 - DNA, 122 bp, Homo sapiens
actccaccgacggcaggagagggtccgcgggggcccgggcccagggaaggttttacgctccgtccttaacccagcgtcctaacctgacccggctgggagagggggcggggccccggaacccc

SEQ ID NO: 4887 - DNA, 122 bp, Homo sapiens
actggggacccaacaggccgccggctactcagctggccccgcagcttccctgcggctcagcggcctcccacccaggagaaaaccacatttgatgagagttttgaatcaagccgagcgttccc

SEQ ID NO: 4888 - DNA, 122 bp, Homo sapiens
agttccatagtctttagggtaaggtgcagccaagacccccaaaagtcaagccctgtgtctcggctacacgaaaaactggcaatccttgtggagccggaaaggtggctgaatttagggagaag

SEQ ID NO: 4889 - DNA, 122 bp, Homo sapiens
ccccagcttcctcttgcagagtggctgtggcttgtaggggaggcagaaatggctgaggtgcggatacgagacctgagtcacttgagctgctgttgccacatgtcccctccctctccccctcc

SEQ ID NO: 4890 - DNA, 122 bp, Homo sapiens
accccacctaattgtgggctaagctgggctcccacaacccgtccccagcccaggggctcccggggccagctgtgcataagacccacccaaaagcttgttagaaatgccaattctaggccggg

SEQ ID NO: 4891 - DNA, 122 bp, Homo sapiens
ccttgagaaaatgaacatctgcaagccaaggagagaggcctcaggagaaaccaaatcggccgatacctttgatcatggacttccaatatccagactgcgggaaatggatttctgctatttaa

SEQ ID NO: 4892 - DNA, 122 bp, Homo sapiens
ggaggctgaggcaggaggattgcttgagcccagggagttgaggttgcagtgagccatgatcgtaccaccgcactcccctgtgggtgatagagcaagaccctgtctctaaataaaaataaaaa

SEQ ID NO: 4893 - DNA, 122 bp, Homo sapiens
gggtggtgccattgcccccggcctagcttctgtttgatcattagtttcaattcaagaaaacgttcttttgagggaattttaaaaatgaatcacgtgcacctcttaagaaaaccgagtgtcac

SEQ ID NO: 4894 - DNA, 122 bp, Homo sapiens
tcctcaagagaggtagggtccgttccccccggcggggccggttagctcagttggttagagcgtggcgctaataacgccaaggtcgcgggttcgatccccgtacgggccacaggcttttctaa

SEQ ID NO: 4895 - DNA, 122 bp, Homo sapiens
aggagactaaaggaagctttgctgtaacctataacttcatcaggacaaatggctttgtatcgcagtagcagctgtgtcctaggtagcctagaaggctatggttatagcactgtggcatatgc

SEQ ID NO: 4896 - DNA, 122 bp, Homo sapiens
ggccggccctggggtcagaggcctccacagcccctggagctgggaagcctgggggtccaccggcaggcacgggggtctctttccaggtaggtgggaacgcgtgcttgtgggtgtggacaggt

SEQ ID NO: 4897 - DNA, 122 bp, Homo sapiens
gagctcctgagcctgccaggtttctgggtggaggggttcgggggatgggggtgggaagtacgactgggagggctcacagcagggacacagataccagtggaggcttctggagttagacctga

SEQ ID NO: 4898 - DNA, 122 bp, Homo sapiens
acccgaccaccttggcctcccgaagtgctgggattacaggcgtgagctaccgcacctggccggcttagcgtttctttatcggccatgcaccagaccagccccacttcctagtggacgtgtcg

SEQ ID NO: 4899 - DNA, 122 bp, Homo sapiens
gtgtttcctagctccaggcactgggcttgactcactgggcagtgggaggcagatgccaggcgaaagggcttgtctgagaggaaggcctaaggttcctggggagaaacgatctcacttcctct

SEQ ID NO: 4900 - DNA, 122 bp, Homo sapiens
ttcccacgcatgtgtacaagtgtgggtgggcagcagccatgggtgctgatgaaccttctccgatgctggcaggtattttgcccacacactgccagtgtggcctgttgggagcaggaggaggc

SEQ ID NO: 4901 - DNA, 122 bp, Homo sapiens
ggttgtaaggggactccagctctgggcacagcaggggctgggaaccactgtgggactcttcggctttacagggggtcccatcctgctcccatccaggcgccctcgggcttggcagcatcatc

SEQ ID NO: 4902 - DNA, 122 bp, Homo sapiens
cggtgtagagggtgagactaagcagtgacagtaaaagctttcgacagtgcttgacccttccgcggagcgtattaagcaggagctccctgcgcaggcgcagaggagagagtgtctcccacccc

SEQ ID NO: 4903 - DNA, 122 bp, Homo sapiens
ggggtatgtggcgggggatgcgggaaccacgcagaagcttgtttggtggcatcgtgtgcgcggccgacatttacgcaggatctggctgcgttcccaaaagaagcgtgaatcgtgttttcggg

SEQ ID NO: 4904 - DNA, 122 bp, Homo sapiens
tggggtcaagcttcttcaggcatggcagagcacttagtgcccctctagggactgaccagccgggggtggaccctgttctatcctagaccccacttacctgaggggacaaggaccagtgccag

SEQ ID NO: 4905 - DNA, 122 bp, Homo sapiens
ctttcagggctgggagcctccaggacactccccttccaggctccgcccgcgcccgccccgcgcaaccctccccgcgcacccctctgcgctgatgtcacggcgccgcagcagccaatggccgt

SEQ ID NO: 4906 - DNA, 122 bp, Homo sapiens
gcgcctgcagggagcagcgggctcagtgggtcccgggagtgggtggggcttgcatgttgacgggcagcgcgaggggcgcggctttagtccagggggcggagcctgaccggacctgggttttt

SEQ ID NO: 4907 - DNA, 122 bp, Homo sapiens
ggagggaggccagagcgcggatgcttgccagtgggccgggcctgaccgctgcgtgggaggcgggctgcattatttcccgctagggccgcgctccagggaaggaaggggccagacacggccct

SEQ ID NO: 4908 - DNA, 122 bp, Homo sapiens
ccccgccggggaccagcgagccgggaggaggagcaggcgccacagccgccccgcgccccgcgcccgcttgtaatccggtccgctccttattcagccgccgggaactgcgaggaggcgtcatg

SEQ ID NO: 4909 - DNA, 122 bp, Homo sapiens
agcgctggggacagcagaagtgagtacgtgagcggcgcagcaagatcccagctcggaccccggacggcgcgcgcccccgaagccccggatcccagtcgggcccgcagctgaccgccagatta

SEQ ID NO: 4910 - DNA, 122 bp, Homo sapiens
ttcaggtgccccagggactggaagaaattacagtgcctacttggaaagaagaagagatagcgacttgccccagtccaaccccagagcgggtaaggtggcttccagtgacaggtttctggctg

SEQ ID NO: 4911 - DNA, 122 bp, Homo sapiens
actcctccccttctgatagggaccaaaccttctgctgagccttgtgtcacagtcagtccgcggcgccacaagcctcagtgtttacttctgccgcctgccagccgggcggggaaggggagtac

SEQ ID NO: 4912 - DNA, 122 bp, Homo sapiens
caccaaattgagcaatttgaccaagatttctagtagcagagccggtacctgctgagtgtccggcacacagaagacattagagatacattttcatgtatttgttttttccttttctgttcaca

SEQ ID NO: 4913 - DNA, 122 bp, Homo sapiens
actgattccccactcccctccttagaggcatctgctactaccagtgtctgctgatctcttcgggatagagtctatatcatgtgtatatcggttatagagaacactggcctcagtctgaggct

SEQ ID NO: 4914 - DNA, 122 bp, Homo sapiens
cgcaaagcccagctactccgatctcacagggatggtggcaggaaatgcgccattgttcggcgcagcgaaacagcccgcagtgcgctgtaggaaggtcacatgacagagggggaagacggtgg

SEQ ID NO: 4915 - DNA, 122 bp, Homo sapiens
ctgtagaaaagtttcaccttatgaagaatagcaggtaaaatacaagcctggaccacttcccgtgtggtatgcagggaacggttgatggggcaaagggccttgggctatatagccctaggaat

SEQ ID NO: 4916 - DNA, 122 bp, Homo sapiens
gccgagcttctggatcccttcatccctagagaggccagggagggtgggctcagtatcatccgtcagggaacaggaggtgctggaaagttctctggaagattctctgcccctaccccttctgt

SEQ ID NO: 4917 - DNA, 122 bp, Homo sapiens
ccccaggaaaaattctgcatttacaaaaatgactgagtctgccttgcactcacagccttgcgtctcctcccgtcacgtggcgagctacgtcccgtggatacagaggagtgttttagagctca

SEQ ID NO: 4918 - DNA, 122 bp, Homo sapiens
actggagggacggtgaagcccagaccactctgctcacatccctcttccttatataggatccggcacaaggggacggcaccccccttcctgcttggcctccctcccccactcagcctcctcca

SEQ ID NO: 4919 - DNA, 122 bp, Homo sapiens
ctctgcatttgtgcagtgctcccgtgccgggaacacaacccaggaacaaggacttccgtgcgacggtgccccggccaccaccacgcctcccgcagcagccaggcccgggccttgaggtcagc

SEQ ID NO: 4920 - DNA, 122 bp, Homo sapiens
gtggctcagctcgccaggtctgagttggcacttttccccctgcagagagcacaggtgtggcggtgggggcagttcccccagtgcccaggagatggcagtggcagccaggctgtgtgcgccca

SEQ ID NO: 4921 - DNA, 122 bp, Homo sapiens
gcacagcgtgttaagtgtcgtaagtaatctggggatggcgtagagcgcgttggggggcagcgtgcatagcttctgtgcagactcgacaccacttcatgtccgggacttgagcacctgtggat

SEQ ID NO: 4922 - DNA, 122 bp, Homo sapiens
agggggatggagcttctacacagggccccagcgctgtcgctgtggctgctgctgccgctacggcttagtgcaccagacgctgcatttcaggtgctcctacaaaagaggccactcctggaacg

SEQ ID NO: 4923 - DNA, 122 bp, Homo sapiens
cttcgatttggggaaggggtggcgggggagatcccacacaagcagccaatccagctgtcccggggaggaagaggaggagtcaaggcccgcccctggtctccgcactgctcactcccgcgcag

SEQ ID NO: 4924 - DNA, 122 bp, Homo sapiens
cctattttcccctactggtcgatcgaggttgggaacagttgctctaacctgggaagcacccgccacgatccagcagggcgcggtgggaggggaaactgaggcccggctaggcacccccgccg

SEQ ID NO: 4925 - DNA, 122 bp, Homo sapiens
ggctccgagatggccagatcgttggcatagactaggatgtagggcgcataggggctgggccggggcacccccgggtccctctcctcagaatccagctgggcggagaggagcagctcgccatc

SEQ ID NO: 4926 - DNA, 122 bp, Homo sapiens
agagtaccaatgtagaggagttgcatcagtcagctaaagaagtattcaaaagtgcccatacgccagtcatcatctctgtgctaaacagcagtaacatccttgggagtctggaatcttctctt

SEQ ID NO: 4927 - DNA, 122 bp, Homo sapiens
aacagaaaccaatttgtttagagaatgcagctccggtggcagccggctgctctgagccggcgtcccagcaacctgggagagttcacgacccccatgaccccgcccccacgaattccagccaa

SEQ ID NO: 4928 - DNA, 122 bp, Homo sapiens
ttttcttctccatctctcttcttcttcttttattccctcaggcaataaaggagcaagcagcgatgctgccacccctttcttctcctcctcactatttgagagagcctgaattccttcattta

SEQ ID NO: 4929 - DNA, 122 bp, Homo sapiens
aatcctcattttaccagatttccccagggaatccctatgtaagctcaggtttgagaagcacggctacaggatcctccccacaaaacagcaaggctacaatacaggtccaggtgaacacaatg

SEQ ID NO: 4930 - DNA, 122 bp, Homo sapiens
aggactgtaagatctaatggtacagataaaattaatacacatgaactcatacagaacaatcgagagtgagcaatgtggtgctgactttaagtataacaggtgtttgggacaaagtagagatt

SEQ ID NO: 4931 - DNA, 122 bp, Homo sapiens
gctcccggaggcgcttctcaatctgcaggcgcccaccgtagcgggtgaccccgtacaccacggtcatcactgtctgcttcaccaccttgcgggtgatgaaggcttccagcacctgtgccacc

SEQ ID NO: 4932 - DNA, 122 bp, Homo sapiens
gaagagcttgtgcccaggatttggggctggggaggaggcggagggacagcggagtaactacgaggacgaccacgaggatgctctcgggaaatcgtctaacaaacaccccaccgtgaagaagg

SEQ ID NO: 4933 - DNA, 122 bp, Homo sapiens
acaggctctgtcactaaaataggtctgtccagtcgtactttttcctcaccttgaactttccgtcacgggaatacacgatttggcttaggggccggggctctcctgaggagagagggtttgct

SEQ ID NO: 4934 - DNA, 122 bp, Homo sapiens
atcctagtgaaaactttagaggtgagtgccgggagggatgcagccagccccacaccgctgcgggctgagaacccgggggtccagttctcaaggtcagtggtcgcgagtcaggggtgtgtgtg

SEQ ID NO: 4935 - DNA, 122 bp, Homo sapiens
cagaaggatgttcaaggattgcaaatgacgttcccagtcaattagtacccattgggaagccgaggtacaccatgccaaaaaaaaaaatacctaaaaattctcagggcaagaatcttcctttg

SEQ ID NO: 4936 - DNA, 122 bp, Homo sapiens
aactcagcagagcagggccatcagtgtggtggccagcagttctgcatcccacgctaaccacggaggccacgcaggcctgtgttccgagtgggaatctttggtgctcccaacaatactgagta

SEQ ID NO: 4937 - DNA, 122 bp, Homo sapiens
aaaagcctttcatgttccaaaggaaagtgctgaacacatttcccagcacttctgaaagatcgaagagccaatctagaaacagaactctgtgtctagcatgatacatgcaatatgtgtgcaac

SEQ ID NO: 4938 - DNA, 122 bp, Homo sapiens
gcccttagctgacgaccgccctcacctcttctctcttcgcctgccgcggccttttacaaacggggccaaactgttcgctgtaacgacaatcgttattggtcagagccgcccacgcgcggcaa

SEQ ID NO: 4939 - DNA, 122 bp, Homo sapiens
ctccgaccagcaggtgtccccggggagccgcggagagactgccgctgccatggcaaccggcggaggcgtagctcgcccacgtgcccagtgacgtcatcggcttcctactcttccgaattagc

SEQ ID NO: 4940 - DNA, 122 bp, Homo sapiens
ggggcacctggcatggggaagcctggccctcccacctgggaggcagaagaggcagcctcacgagtgtcagcttgggggctgtgtgaccttggccaggtgacccctccttcctaagcctgaac

SEQ ID NO: 4941 - DNA, 122 bp, Homo sapiens
attcgcccatgccggaggtacggcgggggcggggcctggcggggggcggggccagcactgcggtcgctgcagctgcgcaacggcgcccgcccctccggccgctctaggggcgcgcgccgcct

SEQ ID NO: 4942 - DNA, 122 bp, Homo sapiens
ttgctcagtttccttatctgcaaggtgcctcattctggacatcctgaccaagataatgaacgtgaagagtgccaagcagtgtctggcacacgagaggcactcagtaaaagagagaccttctt

SEQ ID NO: 4943 - DNA, 122 bp, Homo sapiens
ggacaactgtctggggagaggaaagcttcttggaagggggagatgccgctttgataagggcgctactgacccagggtgttatcgaagaatcagaaagaaacaggcccccaaagttgtcattt

SEQ ID NO: 4944 - DNA, 122 bp, Homo sapiens
cggggcgaatggactatggctggattgggagaccacttcctcctctgtaaagatgacagacgagggagatctcacgttctgggggtgccctatagccctcttttggccagaagcggtggatc

SEQ ID NO: 4945 - DNA, 122 bp, Homo sapiens
ccttacaagtaagggttttctccttaacccaaacaagcctttcgggctgggtttttatcacgtccgctccaaaaccgaggaggttgagtgaacttcaccccacgaccccgactctccgcggc

SEQ ID NO: 4946 - DNA, 122 bp, Homo sapiens
ataatttttaaaaacttggtacaaaaggaactgaaagaggtcatttggttggcactacaacgtgggaaattgcaagaagtataaaatatggaaaatggctttgtgaggctgatgagataggc

SEQ ID NO: 4947 - DNA, 122 bp, Homo sapiens
tagttgtagaaagagaattccaacccaggcaggcgtgctccggaggatctttggctatcacgtccaactgtctctgtgctgggcaggctgtgctattctcacagatggtcttgaccagagat

SEQ ID NO: 4948 - DNA, 122 bp, Homo sapiens
actcatcttcactatcggcacgtccaacaccacgggcgagtcggacaccgtggtgtggaacgagatccaccacaagaccgagtttggatccaacctcacgggccacggctacccggacgcta

SEQ ID NO: 4949 - DNA, 122 bp, Homo sapiens
agctggactaatgtgaggcctcctgctgaggtcccaagccccgcttcagagaacaagccccgcttcagagaaaggtgaccttcgggtggcctgtaggatgacactcaggtgacctccacctt

SEQ ID NO: 4950 - DNA, 122 bp, Homo sapiens
ggctgcccgagcttgttgtggatgcggagctgttgaattctccaatcccattctctgaaacgcttgatacacgtgcttctccacgtgaagcaaatgcctccctttttgagattcgtccttca

SEQ ID NO: 4951 - DNA, 122 bp, Homo sapiens
aaatatctagaaacagccccaggacaataacaattacaccctcacagagaacatctcagtcgtcctcctatctcacatgacactgtatctgcctgtggatctccacagttgagaaggtgata

SEQ ID NO: 4952 - DNA, 122 bp, Homo sapiens
gcccaaccaagctttggctgccctatgcttaaatatacttaagatgtgtgtaaagacatacgtgtgtgtattgagacatgatgtaaaatgtatttcttaccgtgagctgagataaaaatttt

SEQ ID NO: 4953 - DNA, 122 bp, Homo sapiens
tgatttagaaccagtgtgtctctcctgcagcctccattctgggtgcctccacccccttgccgtcgtcatggtaactgatgagcagcatgtgaccgaaagctctctgcccccccaaccccata

SEQ ID NO: 4954 - DNA, 122 bp, Homo sapiens
ataaaataaacggggttaaaccagggaatccgccattcaaattcctggcccaagtgtctccggggtcgcggtgcccaaaggagggtgggcgaggctccctgggcctgcgctgcggcggcctg

SEQ ID NO: 4955 - DNA, 122 bp, Homo sapiens
ataatgaccagtcttcccggtatccttcagtacttttactcctggcaaaaccaagcagcacgccgcctgattttccggatcttcactgatctaacaaacaactctgccaagatgataaatgc

SEQ ID NO: 4956 - DNA, 122 bp, Homo sapiens
gggcaggaggggctgctggcacacacctgcacctgcgggacctctgatgagggcagggggcggctcctgggccggcctggggagtaaggagactctgtgctgaggccacgagctaggccctt

SEQ ID NO: 4957 - DNA, 122 bp, Homo sapiens
agtctttacatatctaaggatttatatcatagcgactatatggccacaaaatatatgaagcgaaaatgaacagaagtataagaagacaaagaaatctaccatcagagtaggtgatttttcac

SEQ ID NO: 4958 - DNA, 122 bp, Homo sapiens
gacttacgtggggagaagtgcctgttgcaggggcgaaggggctatgggtattttaaggtccgtagcgatccccagatcactggtacggagaagtgaggactgcaaagtgcacgtttaatcca

SEQ ID NO: 4959 - DNA, 122 bp, Homo sapiens
tgttcagaaacagactacattggccacactactcacttagatgtttctggaattagggcacgtgccccagaggtactcccgaccacgcagatgtccccttctggcaggaaaagcgcgtttct

SEQ ID NO: 4960 - DNA, 122 bp, Homo sapiens
gttttccttcagcacagctgaggtgaaacttctcagatttcttaactctgcacttggccacgccctgacaaggcaagctgtccttcgccggccctccctcccttcctcaagctaccacaata

SEQ ID NO: 4961 - DNA, 122 bp, Homo sapiens
gcgggggttgggggggctatcaaagggctggatttgtcacatgtccgctttgggctcctgcgtccttgtaaaggccttttaaatgtggaaaattctgcgggtgtgtgtgtgtgtgtgtgtgt

SEQ ID NO: 4962 - DNA, 122 bp, Homo sapiens
agccagcgcgtgaatggagagctgagggcccactagggagagaacctcttccccacccttcggtgcctgcaaaaagggacattggctatccaggggaaagtgcaagaaagagagcactaatc

SEQ ID NO: 4963 - DNA, 122 bp, Homo sapiens
aaggaatttgttcaagggtttcctgcagtagggtgttaggaagggagcaaaggctagaggcggtagtagtatttaggatcaggaaattgcacagtaaataaaagtatttgagggggtgtttc

SEQ ID NO: 4964 - DNA, 122 bp, Homo sapiens
ttgtggtggaatttgctgattggcctagcctgagtattgtgcaggatgggaaaattctgacggggttgggtgctggttttacatggtgttcccacagctgggaggacacccacatggtcggc

SEQ ID NO: 4965 - DNA, 122 bp, Homo sapiens
gcaggcgccctggagaagagcagggtgaccatggcagcggctcactgagagccgcacctgcgggggtggctgtttcagtgggaacagagcaggttcttacagtgtgtgcagcgcgtgcacca

SEQ ID NO: 4966 - DNA, 122 bp, Homo sapiens
cggggccgcgggctcctgggtgatgccggtggaggctgggggcgagtgtggcggcaccagcgcgggggccccggagcccgcgggccgcgagtccagcagttggcgcagttgggggcccaggc

SEQ ID NO: 4967 - DNA, 122 bp, Homo sapiens
aggaagagggctgaggccggacgccatcggggaacaccagaaagaacacttgcaggagcgcgagctgtggggtgcgcatggggcattcagggcctccgggtccgacgtaggcctccgcggtc

SEQ ID NO: 4968 - DNA, 122 bp, Homo sapiens
atctctgtactttaaagttattttagtcatgaaattttatatgcagagagaaaaagttaccgagacagaaaacaaatctaagggaaaggaatattatgggattaagctgagcaagcaattct

SEQ ID NO: 4969 - DNA, 122 bp, Homo sapiens
cagcaagggcctctgccggcctttggccaccccaggggactctcctgggtgaggtgcctgcgtttgggcaagcaggtgggaggtgccaaggaccagacccctggctccttggagaatccggg

SEQ ID NO: 4970 - DNA, 122 bp, Homo sapiens
caggtacgggctggggtctcggggcggcagccaagtgaggctgcccacagtggtgatggccgcggcggcggcctcgccacgtgacccggacgggcggaagcggaagtgccggcctggagccc

SEQ ID NO: 4971 - DNA, 122 bp, Homo sapiens
catcagtgagcagacaaggctctggcagggatgttttgggggagcagtggttccttacaacgtgagcctgaaggagtttccctcacttagccctcagctgggggcaaaccgtggatgctgga

SEQ ID NO: 4972 - DNA, 122 bp, Homo sapiens
ggacctcgtggacgcgggaaacgcgctgggccggcaggacggcctccccggacttgcgggcgccattcctggggtgcctggcccgccccggcctccatgtctgtgatcccagggcctcggat

SEQ ID NO: 4973 - DNA, 122 bp, Homo sapiens
atttcctacagaagcatcatattgtgcggcctgataagaaaatgtttagaggcttctgcccgactgttttcactagcatagtacatctagtttaacaaggtctttaaaacaaggttgtttgg

SEQ ID NO: 4974 - DNA, 122 bp, Homo sapiens
tgggcagcatcccgggactgcttggcgcgtccagcacagctggccacgttgctcccttgacggagggcctctgggttccttcagcaatgtcccttgagtacctgttgtgccccatcccgagc

SEQ ID NO: 4975 - DNA, 122 bp, Homo sapiens
tcaggaacagcccttcccccagtcctgtctatgagtataaattatgctgctggttaaaaccgcttgctcatgagaacaggacacccaggcgcgatcgtacacacgctaggatgcattcctgg

SEQ ID NO: 4976 - DNA, 122 bp, Homo sapiens
gagccctccaagctggggatgcttttcctctccccacggagagctccaccacgggcgtggcgggggctcctaccatcaccctgcctgtaggttctggagccactccggccgccccagcccct

SEQ ID NO: 4977 - DNA, 122 bp, Homo sapiens
gcaaccgctttggagccttgttatgcctgacccacggactcctcacgccgacccgtgcggcggggactgttgccaccccgttttattgctggagatggtgaggatcaggaaggctaaaagcc

SEQ ID NO: 4978 - DNA, 122 bp, Homo sapiens
gcctgtccgaaaaccccctttcaactgtgaagtggtgggcggcatgtttctcttctcggacgcccaagcgtctttcctctctgggcccttctcggtttggtcatcatctcagctcaggctgc

SEQ ID NO: 4979 - DNA, 122 bp, Homo sapiens
gtcctccacgctgcccttgatctgcacgatgagcttgtagatgggccccagctcctccagcgactgcttgctggtgacggagaacaccaggatgaaggcgtggcccttggagatggacaggc

SEQ ID NO: 4980 - DNA, 122 bp, Homo sapiens
aattcttcttgtcatttaaatcttcgttcaaaagtgatcctctcaagccaggcatccccccgtcactctctactgcgttacccagttgtgtttatttttttcacagcactcatctgaccggc

SEQ ID NO: 4981 - DNA, 122 bp, Homo sapiens
cattagctttttaaggagctgttaactgcaaacgtgggactcagagcttcggggactttccgtgttgagtgttccgccagcagtgcttgcatgtctcagcagcacagagctatttctgggga

SEQ ID NO: 4982 - DNA, 122 bp, Homo sapiens
acagactgacagtattagcgtgctgcagtttcatgatggcaagaaggaggttaccaaagccgttttcatacaccttaactcatgagtggtagtgagtggccccaggtgggaagcacaggtga

SEQ ID NO: 4983 - DNA, 122 bp, Homo sapiens
gatgaggggccagcaggctccagggagtcgggggtggccttgggcagggtttcttcactacgaggggtgtcccccaaagagccatgaactgtagaggaagagaaaaagttcagagctaaggg

SEQ ID NO: 4984 - DNA, 122 bp, Homo sapiens
cttgaaaacctgttgatgccgttttggtggctgttgccgggtttgggagtttggtctcaacgttgaaggcaagaacaatagatggtgaatgttctgcccactactgggcttttgttggggaa

SEQ ID NO: 4985 - DNA, 122 bp, Homo sapiens
aaatgccttcacatgcatgcacacatagtgacccaccccacacatgtgcatgcattctcacgcatgctccacacacacacgggggcacacacatacgcacaggccgcacatgcccacaccca

SEQ ID NO: 4986 - DNA, 122 bp, Homo sapiens
gccctgacaccctgacactggacatttctgggtgggtcataagaagtcacagcctgaggccgggcacggtggctcaggcctgtaatcccagcacttcgggaaggtgaggcaggagggtcact

SEQ ID NO: 4987 - DNA, 122 bp, Homo sapiens
ggagaggcgctggagggaaccagggctgcgcgtggcacttgcgggccagcgcgaattccacgtgggagtgggctcagcgggccccgcactcggagcggccagccggccccgggcactgagga

SEQ ID NO: 4988 - DNA, 122 bp, Homo sapiens
gtcccctgccctgttccagtccccacctcgtgcctgctggactcgggaggtgcttctctacgtgagcagctcacgggacactctgcttagacttggacagctcttaggttgcctgcccagat

SEQ ID NO: 4989 - DNA, 122 bp, Homo sapiens
agcgcgaggccccgggccccccagcagccgccgcgccgtcacagagatgctgcacagccgcggagccatgttggagccgcaaaggttgcaggaaggccccgcccccaagccctggtggcgga

SEQ ID NO: 4990 - DNA, 122 bp, Homo sapiens
ggaaggagaggaacgccggcccactagccgaccccagcgcaacccagcgcggttcccagacgctgccgggtaactgatgccgccggcacagcttctgttctcacttgtggagctttgtctcc

SEQ ID NO: 4991 - DNA, 122 bp, Homo sapiens
ccaccctcatggagcgcttgtgctcggatggcttcgcatttccccaataccccattaaaccgtatcatctgaagaggatccacagagctgtcttacatggtaatctagagaaactgaagtac

SEQ ID NO: 4992 - DNA, 122 bp, Homo sapiens
tttctgggctccgggtaggctcatcctttctttatccttccatccctatgggcgtagcagcgcctgcagttgctaatctttgggttttctcactttcttcttttcttccctttttcaacttt

SEQ ID NO: 4993 - DNA, 122 bp, Homo sapiens
ctgtgaggccgctgtgggagacaatctggcacttcatctgatggccccacacagggcgaccgtgtgcccagcaactccactgctgggctgtgcccccgggggacgaggaccgggccacgcca

SEQ ID NO: 4994 - DNA, 122 bp, Homo sapiens
tgaaaatgattgttaagtaaagaccaatcggggcccgcaggagttcggaggaggcctaaccgtgctgcctgtgtctttccgcagacccgagcccaccggcgcgcctcctggccacccggccg

SEQ ID NO: 4995 - DNA, 122 bp, Homo sapiens
gacaggttttgcaacaagctagaggatggtgtgtggagtaaataacaaatgcctcttggtcggaggctgtttgatcgcttcaggtgtccatgtggagggtcatcttgagaaagggacttggg

SEQ ID NO: 4996 - DNA, 122 bp, Homo sapiens
caccatgccctcgtgggcaaaacctgctatgatttgcccgtgtagccccctctctgtgaacgtaggagaagcgaagccattggctttctgagacttgctcatcagaagccttgctgctgcca

SEQ ID NO: 4997 - DNA, 122 bp, Homo sapiens
ggcggccccgagtctccgggtcacggtttggggattctcctcccgggtcctggcggagggcgaactcccggctcccgcagctgtcagtcgtggggggggagggagggaggacggacgggcgg

SEQ ID NO: 4998 - DNA, 122 bp, Homo sapiens
ctgggtagatatacagctgtcacaagagtctagatcagttagcacatgctttctactcttcgattattagtattattagctaatggtctttggcatgtttttgttttttatttctgttgaga

SEQ ID NO: 4999 - DNA, 122 bp, Homo sapiens
tctctttaaaaacaagtgatttgaaaaatgactatctttcatgtctaagtatagggtgggcgtgtgcagatgtaaaatgtacctgcagtactaaaactggggaaaaggcaaacacaggatga

SEQ ID NO: 5000 - DNA, 122 bp, Homo sapiens
aaaaaaatcttcactgctagataaccaaaggggatgtggaaaatgaagatattaaggaaacggcaaaggtagtggagaaggccccccacacctcacacacctcatgactcatagcacacaaa

SEQ ID NO: 5001 - DNA, 122 bp, Homo sapiens
cagggaccaccaggcggcgctgcagcctcagcctaggagcccggcagagcccaaaggttccgtggttactcccagtttcgccaacgcggggcctgccagcgtcccactccagtggaagcact

SEQ ID NO: 5002 - DNA, 122 bp, Homo sapiens
gtttggaaacccacctctttgacctaggcccggtcaacaccgataaaccctctgaatcaacgctggcgctcccaagcccactcacacgccgtcaggaagcagtttccgaaacaggccgggtg

SEQ ID NO: 5003 - DNA, 122 bp, Homo sapiens
tctgcactgcgcaggcgtgtagacgtgcatctgcctggatacctgtgtgcacagtacacacgtggatgtacccaggacatatacctccacatgcatggcacataactgcattttgtaggcct

SEQ ID NO: 5004 - DNA, 122 bp, Homo sapiens
ggggatgcgggcaccccctcagggacgccggagcctccgcccagccctgcggctggggcccggctgccatggctgccaccacctacctcagaaagcgctgccaccgggagtgcagctgccag

SEQ ID NO: 5005 - DNA, 122 bp, Homo sapiens
tgcgctgctgccatctgcatctgagtcggtcagggactgagagcacagcaggccggggagcgagcggctgccaaattacagagcaaggagcacttaggatggtgggagggggaggaaaggag

SEQ ID NO: 5006 - DNA, 122 bp, Homo sapiens
aggcgttaagcaacttgcccatacagacagtaagtgttgctggtgattcaaacccaggtccgtctggcttttggaactcatgtcctcacattcactggtctgcagagtagcaccaagtacct

SEQ ID NO: 5007 - DNA, 122 bp, Homo sapiens
gggggcctcagcaggtctggccttcgtgtttactcttctcatctggccacatctggcccccgtgctgagtcaccctctccatctgcctgtcctccctgttggacggtggccgtctccttcct

SEQ ID NO: 5008 - DNA, 122 bp, Homo sapiens
gcattgcccttgctgcactccgagcaacccagtggagtcttcaccaaaacaaaacaagagcgtatgtcaggccaggagcctggcttgtccctggcacaacatcatttctgtttctcaaggag

SEQ ID NO: 5009 - DNA, 122 bp, Homo sapiens
agaatcctttagtggtgacaaagaatgtgtccccagtaggaaccagtcactcaagaaaagcgatgtaagtctgagccatattaagttggagactggctagtaggtcaggaagcttgactcct

SEQ ID NO: 5010 - DNA, 122 bp, Homo sapiens
gcgagggccgcgcctacccgagtactatggggacagtagctcttgctgaagatcaccacccggctgcgctcgatgaggcccacgaggtggcggcgcagctcctcgcgggcctcggacgagcg

SEQ ID NO: 5011 - DNA, 122 bp, Homo sapiens
gtgggccgaggcggggcgtagacctgcggctggaggaagcagagcgggagtgagggagggcggctgtctcaggtgggttgtccagaagcgatcctgagactggagttctgctgcatgggact

SEQ ID NO: 5012 - DNA, 122 bp, Homo sapiens
atttcgagccacgggctggcagtgcgaaaacgtggagttggttagagaagcccaggagcgcgccgtgatgcatccttctatcacccagacaattggaccgattgtggtaaaatgtcattagg

SEQ ID NO: 5013 - DNA, 122 bp, Homo sapiens
gtgcacggtgatggagtcacctaaaggggctgggaggtgttttccaggcccagttcctctcgccacaggagcatccccagcgtcctggaaagggacagacatcgaggcctctctgagcggga

SEQ ID NO: 5014 - DNA, 122 bp, Homo sapiens
agaggagtgggggagggttaagaggttgcctccaacactgagtagcttctcaccaggaaacgcctgaaagtttgacagaaacaaaagaccagggaccagcagaactcttacccaggtagatt

SEQ ID NO: 5015 - DNA, 122 bp, Homo sapiens
ttctctgtggccaggtgccttcctgaacacagcttgggttcagccctgtccctccagctgcgcccagtctcctgcccctgccctggactggaatgtgggacatactggagttcataggcaat

SEQ ID NO: 5016 - DNA, 122 bp, Homo sapiens
tgatagagcaggtggtcacactagacctgatctggccagcttccactttaataagggctgcgtgtgtgtgtgtgtgtgtgtgtgtgtgtgtgtgtgtgtgtgtgtgtgtgtgttggtttcct

SEQ ID NO: 5017 - DNA, 122 bp, Homo sapiens
gcaaacccaaggaaaaacttgttatgtggtatgttgggtaagggacggaggatggggaggcgctagaattcattcccagagtagactggctttaccttccacgtggctgtttcctgactgct

SEQ ID NO: 5018 - DNA, 122 bp, Homo sapiens
agtacagaaattctctaaaagctctttaaaagatcttcctaggaatggaacagaccaccccgggtgtatgaatttccatttactagacacttaagcattggatctggcaacacatggcagga

SEQ ID NO: 5019 - DNA, 122 bp, Homo sapiens
cgacggcacacttctccgcaccgctggcccttaacaagcgtctactgttgctgtgagagtcgtcaacaggaaatgccagcagaagagcacaattggccacaaagaggccacaaggcacctag

SEQ ID NO: 5020 - DNA, 122 bp, Homo sapiens
aggaggcgctagcccggctgcgggagcaggcggcccgggtggggactcaggtggaggaggcggctgagggcgtcctccgggccctgctggcccagaagcaggaggtgctggggcagctacga

SEQ ID NO: 5021 - DNA, 122 bp, Homo sapiens
gagcagaatctcagcagctggcctggagctgagctgtatgggaaccctaccctgctggaccggggctggaccccaaggggcctttctatccctccaaatacaaaacagagttccctgaactc

SEQ ID NO: 5022 - DNA, 122 bp, Homo sapiens
ctagggtccagttaaaggcttgctgaccaaacgcaagaacaacaacacatcaccaagatccgaatagtttgttactgaatcaaagggtaacaacccagggagagaacacacacccccacaat

SEQ ID NO: 5023 - DNA, 122 bp, Homo sapiens
ctgctcgtaggaatacagtcaggaggccgactttaaaactccgatcctccgggaaggccacgcggaggtgaggaacaggtcctgccctggaggcgccagccgcaccgaccgggagatggaag

SEQ ID NO: 5024 - DNA, 122 bp, Homo sapiens
gtggattccgtccaagacgcccaacgtggctccgcgtagcaatcagcgctgcaatcctggcggttacctcagcggcggcgtctctctctgcgcctcacactcgcagcccgcggccctcccca

SEQ ID NO: 5025 - DNA, 122 bp, Homo sapiens
agaaggaaagaaacatgaaaggccatgtacaatttatttttacaactccaggagtttccccgactaccattttttttttttttatttgccagtggtgtgcatgtagaagaggaatgccatgt

SEQ ID NO: 5026 - DNA, 122 bp, Homo sapiens
tccgggagcgggggcgcgggccaggggacgcgaggagaggccaggccagggccgggtcctcgcggcccccgagccgcgggtcgtttcccagccgcactcgcctgccgcgtgtcgctcccgcc

SEQ ID NO: 5027 - DNA, 122 bp, Homo sapiens
ttccccccccacccaacaaaaaacattactcaatactcctttgctggagggctaagcacacgcttagtcagctttatagataatccagataatccagttctgcctcccatcctgcaaataat

SEQ ID NO: 5028 - DNA, 122 bp, Homo sapiens
ggtctaaggctcaggggcccgcccgcgggggtcccatccccgggaaggacgcagagttcacgcactcccggctcctggattcatggccagaggtcacaaggtcaccaagcggcttaggtctt

SEQ ID NO: 5029 - DNA, 122 bp, Homo sapiens
tccgtattcggtcctgcatccatcccagaggcgaacacaccatgggttttaggaaaccatcgttcctcctactccaagggacgccggccaggaccagagtcggggaagtggggcccgattca

SEQ ID NO: 5030 - DNA, 122 bp, Homo sapiens
tgctcctgcctcagagatcacggtttgacatgggaaaccaaggctcagagggggcagggccgggacttggactcagatgcgtccagtttcagagccagaagcctcctgggggcctcacccac

SEQ ID NO: 5031 - DNA, 122 bp, Homo sapiens
aaatctgctccacctggcacttgttagcaataccccacccagacccactgaatcagaatccgcacttgaacaagatccccaggtgattcatgtccacactgaagtttgagaggtgctgctcc

SEQ ID NO: 5032 - DNA, 122 bp, Homo sapiens
tccgcgcgctgcaggcgagagtggcagacggaggcagcccggggaagcgagccggagcggcgcccgcactgaggcggctgcagtgctgacaccactcagggcaagggtgtccgacggctgga

SEQ ID NO: 5033 - DNA, 122 bp, Homo sapiens
gtatggagcacttgtgtgggggagtctttcatacctgtcaggtttcacatctctgctttgcgtgaaaagctcatcatccacagcagtcagggatgtgcctttacttgctggggctgatctgt

SEQ ID NO: 5034 - DNA, 122 bp, Homo sapiens
ttaaaaacgagaaaagcattcttagctcaggcaccatagaaaacccggctgcaggctggacgtggactttggaacagtcggcgtgcgggtgaaggggcacagccgcggggcaggggcgggct

SEQ ID NO: 5035 - DNA, 122 bp, Homo sapiens
ggggagctctcgctgccatcacaagctgagaggcttacaagacacacattcatcccctcacggttctgcaggtcaggagcctgacaagggtcccactggggtaaaaaaccaaggcttggcca

SEQ ID NO: 5036 - DNA, 122 bp, Homo sapiens
actctgcgcagtccgcctgacctctcctcttgcggaccaagtgagagcaagtttcccgcacgtggcctttgacctgtcactacatcagcaggcatcccccagggcaccggcatcctccatcc

SEQ ID NO: 5037 - DNA, 122 bp, Homo sapiens
tgtatggcccatgacaattcttccagcgtggcccagagaagccaaaagattggacacccccgctttatagcattgtttgcaaactggtgattgccagggccccatgcagcattcagaaatat

SEQ ID NO: 5038 - DNA, 122 bp, Homo sapiens
cagcctttggaaaaagtaattagcgctgcggacaaacccaacgtggtaaaccccaagccccgccttcccctcggaaggcgggaggggattgggccctcgctttcctccgccccgcctcctcc

SEQ ID NO: 5039 - DNA, 122 bp, Homo sapiens
gattaaatacagatgtatcctgttataaattttttaaaattcaagtcttaggccggataccgttggctcccacctgtaatcctagcaatttgggaggccaaggctggaggatcacctgagtt

SEQ ID NO: 5040 - DNA, 122 bp, Homo sapiens
cattcagaatctgtggatggagaaacagctgatagagaaatgattaacctggaatgggtgcgagggaggaagagaccatgtgtaactttggaacaaaagtggtgtgcaaacctgggacagca

SEQ ID NO: 5041 - DNA, 122 bp, Homo sapiens
ctggcctcggagtgttgcaagtcctccggggccgggcagggctaggctcggctggggctccgcgccccgccccgtcgcgccggcctcgtggggcggggcctcagggcgccgccagggggcgc

SEQ ID NO: 5042 - DNA, 122 bp, Homo sapiens
aagcctagattcctgccggagctgcaagtgctgcggaaatgggggaagaaggtttctgggcgctttaaacaaatggctgcctcccagcgctctgagttaagggaccggctacctagcgtcta

SEQ ID NO: 5043 - DNA, 122 bp, Homo sapiens
gtggaaacaatctcagccctggaaccagcgcctgggaagtcccgcggtggatccgcgtcacgggggaggattggctcagcactggtcctgcggaatgtgtttttatcaatgacttgacgacg

SEQ ID NO: 5044 - DNA, 122 bp, Homo sapiens
ctctactgctggactgcactaactaatcaaccaagatacaaaagatagggccctggcagtcgttactctggggagcctcaggtataaactctgctgagctctgacaaatcctgttgatctgg

SEQ ID NO: 5045 - DNA, 122 bp, Homo sapiens
attatctccctgggaagggaaatagggaaacagggagagagatggaaggaggtgagactacggaaggatacacaggaaatgacgaaattagccataataatttgtattcccataaatacatc

SEQ ID NO: 5046 - DNA, 122 bp, Homo sapiens
ttgggtcgggcatgtgacataagctgagccaatcagagttcaccactgggacccaatgagcgcacagcttttcctgcggcctcctgcagctaacccgccacgttctcttctcccagcgctgg

SEQ ID NO: 5047 - DNA, 122 bp, Homo sapiens
gtttccctaaaggagtcttagaaatagggttggtctggaacctaaggggcggagccgacgcgtagagccgctttgcgcgtgcgcatcacctaggcggttagatttgaatacttcactgaggc

SEQ ID NO: 5048 - DNA, 122 bp, Homo sapiens
ctggaagaccctaaggcgaggccaacctgaccttgtggctggctggagctgcagaatttacgcaggtcatcagagccctcaggactcctgggaggttggcactgggaggcggagagctcggc

SEQ ID NO: 5049 - DNA, 122 bp, Homo sapiens
tgcaatttgaagtaagtagtaaatattcactgggacaataaaggaacaaataaatgaaaacgaaacaaatgttttgaatctaggcattctttatgaaggtgtgttgttgttttttaaaggta

SEQ ID NO: 5050 - DNA, 122 bp, Homo sapiens
tcacaattgtagaggctggcaagtccagcgtttgcaaggcaggcccataggctaaagacccggggaaaagctgatgttgaaggcagcctgaaggcaagattccctctttcttaggagaggtc

SEQ ID NO: 5051 - DNA, 122 bp, Homo sapiens
aacaaaggaagactggggagtttgtgttccttttgacatcacgtgatcaccatagatgtccgcctttaacctagggtggggccagtatttgttcagtctccattcctgtactattttaacag

SEQ ID NO: 5052 - DNA, 122 bp, Homo sapiens
ttcccctccctccagtcaataactgaaaataagtgtttgcaacacacacacgcgcacacacgcacatggctagtgcagtgggtttctgtgtaaatcactgtggacccctcgccctgttatcc

SEQ ID NO: 5053 - DNA, 122 bp, Homo sapiens
cggccctcggctggccctgggtctctcatcctgctcggggcactgcaatgtcagggtgagcgggaggtgcgggcttcaggggcttgcgcgcaccgggcagggagcactgaggccgtgcgggc

SEQ ID NO: 5054 - DNA, 122 bp, Homo sapiens
gtggaatctgttaacaagcaaaatgactgtcactgacttaggcaacttccacaacaactccgtttgaacaaactatagagagcaaagcttaaagagaaaacactagtattcacctgttgtca

SEQ ID NO: 5055 - DNA, 122 bp, Homo sapiens
tgcatgggtggccgctgctactcctacctgggaggacatcccgtggcaggggtagaggatcgcccggtcgccgtcctccgctccctggtccagacagtaggcactggctttgctgtttctca

SEQ ID NO: 5056 - DNA, 122 bp, Homo sapiens
aaacataaaactagaggggaaagaaaaaaacacacaagagaataaaatatttgtagaatccggggctaggcagagagttcttccataaaagaaaaaaactgataaactggactttatcaaaa

SEQ ID NO: 5057 - DNA, 122 bp, Homo sapiens
ccgggctaaggctgaatcagacaggcagcggctcaccgctgtgagacgctgacggacatgcgtaggccgcactgggtacagcttttatacaaatcaaagttggttctcggttccataaagac

SEQ ID NO: 5058 - DNA, 122 bp, Homo sapiens
ggaaatgcctgtgctctatgtgagatgattttcacctgatcaccatcataaactcctccccgtctacaggtgtgggcacttttttttttttctctccctcctgtttccactaagggctaatt

SEQ ID NO: 5059 - DNA, 122 bp, Homo sapiens
ccatctctcctcccggcccacttccctcactgcaacccggggaccgcctccggggatccacgccccttcccgagcctctgactcgcccagcccggccctgggaccacgcctcgggcggccct

SEQ ID NO: 5060 - DNA, 122 bp, Homo sapiens
caagaccctcagaagccaggccataggctgggcccaggcccctcagcaagcaagacatgccgtaggcttctccctcgtagagcattagttctgtgattcaaacccactgtgagttcttacat

SEQ ID NO: 5061 - DNA, 122 bp, Homo sapiens
aggtgaatggatcaggggagtggatttttcacaaatggcttcgcaccattcccttggtgccgtcctcacgatagtgagagttctctcgagatctgattgtttctaagcgtgcggcacctccc

SEQ ID NO: 5062 - DNA, 122 bp, Homo sapiens
cggtgacagcgtgagaggttcgcagagtgagtgcgtggccgctgagggaagccgcggcggcggccgcgcggggccgggcgccggctgaggggagcgggtggggtgcggcgaggcgcgggccg

SEQ ID NO: 5063 - DNA, 122 bp, Homo sapiens
cgataaaaacggcatctactttaggctgtgcgctgtggaggactccacattcctgccttgcgtgctcagtcacttaccatgtgcggcagctggatgttagccaggctgtggatcagagactg

SEQ ID NO: 5064 - DNA, 122 bp, Homo sapiens
gagggcgcggtaggcagccgagggtggcggggaggccacccctccacctccaggggcgggcggctcctccaggcaggtgacagcagcgggacaggagtgctttgccctccaggacctgcgca

SEQ ID NO: 5065 - DNA, 122 bp, Homo sapiens
gttttcattctccgtctatcactctctaccagtttccgtccgtgtgtgcgcgggtgcgtgcgtgtgttgggatgcatgggcaatgaagggcggtttcttgtaccttggcctttcttctggtg

SEQ ID NO: 5066 - DNA, 122 bp, Homo sapiens
ccactagacagaaagcataagcaaaaaatatgcactgatgtacaaagccactgagatcatcgagttatctgttacacagtgcagcctatccttctgactgctagataatttgctaaacttat

SEQ ID NO: 5067 - DNA, 122 bp, Homo sapiens
acctcctgctcccagtacgcagacccagtagctgacctgctggacaaatggggggccttccgggcccggctgtttcgagagtcctgcgtcttccaccgggggaactacgtgaaggacctgag

SEQ ID NO: 5068 - DNA, 122 bp, Homo sapiens
ggggacggctgcgcgggacggctctgtaggaaggaacttggttccccctccctcagcttccgccccaaaaggtatatgtgaatcccaggggctgttaaaaccacattttcttaaattactat

SEQ ID NO: 5069 - DNA, 122 bp, Homo sapiens
cttgcagcagcctaacccagaagcaggggggaatcctgaatcgagctgagagggcttccccggttctcctgggaaccccatcggccccctgccagcacacacctgagcaggtaggaccatgc

SEQ ID NO: 5070 - DNA, 122 bp, Homo sapiens
ggagttgcctgctggagacagaacggagagtggatggatatagcgggcgtggacggacagcgacagaagctgataacagcacagaagggcaaagtctgctcagcagcccccaaaataaactt

SEQ ID NO: 5071 - DNA, 122 bp, Homo sapiens
atctacggcggagactccacatttctaagaagctcccggctcgtgccgacggggctgctccgcggaccacttagagaatcccgttcagggtggctcatttcgctaccagaacaccaccatag

SEQ ID NO: 5072 - DNA, 122 bp, Homo sapiens
tttgagttggtagtgacagcatcattttcaccagtggctccagtgaccttccagtcccagcggagccatctgaggtcacccagcctgctttgagctagtagctttatgactggcaaagaaat

SEQ ID NO: 5073 - DNA, 122 bp, Homo sapiens
gggagaggccacgggcgggaaccatggctgcgcagggcgcttgcgggccagtgcaagttccgggtgggcgtgggctccgtcggcccctcaggccccccactctgagcggccggccggcccca

SEQ ID NO: 5074 - DNA, 122 bp, Homo sapiens
tgttagagcagaactgagtgagttcagatgctcctgctgagggggccgttctctgatgttcggtgcagccctgatttaggagcctggcgtgaggccgacagcctggggctgcagtgtagcgt

SEQ ID NO: 5075 - DNA, 122 bp, Homo sapiens
aaaccggatcttagtgtcagagccgcccccagccgggcgggcgcctcagccatggccctgcgcaaggaactgctcaagtccatctggtacgcctttaccgcgctggacgtggagaagagtgg

SEQ ID NO: 5076 - DNA, 122 bp, Homo sapiens
tgcctggcgcagatctccaacaccctcctcaagaactacagctataatgagatccacaaccgccgcgtggccctgggcatcacgtgcgtgcagtgcacgccggtacagctggagattctgcg

SEQ ID NO: 5077 - DNA, 122 bp, Homo sapiens
ccaaccaacagaagccagcaggaacctgccttagatgtggtaagtgatctagctaagcaccgtggacagagagagttgcaagaaaaatggtggcataaagtaactgatcctaacatttcacc

SEQ ID NO: 5078 - DNA, 122 bp, Homo sapiens
caggggagggaaagttcttcagctgccgagggcgggagtaggggctggagcagcaccctgcggcgaggccccacaggagaatcgatggttctgatgctgtcagcctctgggtgcaaattctg

SEQ ID NO: 5079 - DNA, 122 bp, Homo sapiens
atctgagaggggtctgagtgtggagccatcctccccacagcctgcgtgcacttgctggagcgcagagacccgcgtgtgagggcgaggagagcatgcgtgttcctgtcccggtgatccccggc

SEQ ID NO: 5080 - DNA, 122 bp, Homo sapiens
gcacctgaggatgttgtcagcataggtgagcagcagcttggaggcctccaaaaaggtctccggggtgttctggcagagctcagccacggccggggacgccgagcctgaggagctgcccaatg

SEQ ID NO: 5081 - DNA, 122 bp, Homo sapiens
aaaatagtaaaaaatcaaaataaaaatgaagatcattgtaaaatgaaatgtcagaatatgcgtgcattgaacgaaatcaacaaaacacagacctgagtaactttagaattttaatctccatg

SEQ ID NO: 5082 - DNA, 122 bp, Homo sapiens
agagacacacctcaaaggagaagggagacaatatggccaggaaatcagggataaaaaacacgactccatgataagttagcagagtcacctgtaagaaccccactgccgagcagcaaagatag

SEQ ID NO: 5083 - DNA, 122 bp, Homo sapiens
gacgcaccaataagagagcggattcgggggcgggccacaaggaagtagccaatgagagcgcggttggaagccagggctagagaggagtaaatccttctgtcgtccccgttctgccgcccccg

SEQ ID NO: 5084 - DNA, 122 bp, Homo sapiens
ttaaaaccaactccttacaggtttattcatcaccccactttccttccagttacggctttgcgagtctaggaaacaggctctcagtaaaggaaacacagcggccatcaacgcagtctagctgt

SEQ ID NO: 5085 - DNA, 122 bp, Homo sapiens
ccgctgcctgcatgtagaaagaggagagtaaaaccgatgcacactggactcacccaaaggcggaaaaggacaaggaacccaaaaaggaagatccagtgggcccacaggcagccctcctaatg

SEQ ID NO: 5086 - DNA, 122 bp, Homo sapiens
aaactaatactggtgagatgattcttaaaactctttataaatgtgtaatataataatagccgtttcattattgtaaataaccagctctaggggcaggtctaggaactcattgttttccaagc

SEQ ID NO: 5087 - DNA, 122 bp, Homo sapiens
agactgtgatgtgagtcaccactgccgcctctcggccatttccgtctccacagccacaaccgattctgtgccatcgctgggagatgggctcactggggacagcacccaagacccaaggggag

SEQ ID NO: 5088 - DNA, 122 bp, Homo sapiens
ttagcacctgggccagcggctgcagagggtgtactgggtcccccagcagtgccagcccaccggcgctgcgctcaattcctcgcctgtccttagctgccttcccgtggggcagggctcgggac

SEQ ID NO: 5089 - DNA, 122 bp, Homo sapiens
cgggctctggagtcaggcagagccggtattgaaagtgggctgtggagttctggggctgagcgctcttggcaaagtccggtacctctatgatcagctgtcacacctggcgataatgggcatca

SEQ ID NO: 5090 - DNA, 122 bp, Homo sapiens
cccggcttctaaagctgtcgggggccagggcccgggacaccggctctccccaccgccctgcgtggacttgcccaataaattccacttagtaatttcactgaggcaaaggagagccgttagtg

SEQ ID NO: 5091 - DNA, 122 bp, Homo sapiens
ctaaatgtgtcagcctctttcttctgccactcagtttcttgccctttggaggcaggtttgcgtaaacctgctcaccacagagcaatgaccccctaacaccctcaatgaacaacgctttcctg

SEQ ID NO: 5092 - DNA, 122 bp, Homo sapiens
aggaagagctgccctaaggcccctaagcctccgcctgaattggaaatcgaggcacagcctcgctggctcaccctggtcaagccctctctaagtggaaaggttcccagcatggtgaaaaggca

SEQ ID NO: 5093 - DNA, 122 bp, Homo sapiens
ctttgcacctcattcaaaaatgtcgcctttcatatcatctggttagtcggtcagaatggacgaactaggagctgactgaacaaagatttaaaacacaaaacagggagaattaggtaaaagaa

SEQ ID NO: 5094 - DNA, 122 bp, Homo sapiens
atctgcagcgtcgtctccagtgactggcacctcagacagccccacacccgcggcaggtcccgcctggcactcgggaagctcttgcatttaagagatctagaaatgttgacactttgcgtgga

SEQ ID NO: 5095 - DNA, 122 bp, Homo sapiens
gggttgtcatgcagggccaccaccaggctggagagaatctcagccccacagtcaggctgccggcatttctggtaggctggccagttcaggaagacactcttggatacaactgtaagcctatt

SEQ ID NO: 5096 - DNA, 122 bp, Homo sapiens
tattacagattcagggtgatgatctgagtgtccaccttgctgattactacggtacccccgcgtgtggcacagggtgtggcacacacagaagacaaggagatatgttaaagcccaaaggccag

SEQ ID NO: 5097 - DNA, 122 bp, Homo sapiens
ggaagggaggtagagtaccagattaggagtcaaaaggtctgtatcctagcctggaatctccgtccatgtcctcaagtgcctcagggcatcacaggctaccacccagcctccctgactctcca

SEQ ID NO: 5098 - DNA, 122 bp, Homo sapiens
cagtttcccctaagaggaaataggaacacagatttcctatataaactcatgtctcgtcaccgtgttcacagcagacccagttcaaagttggaattcttctagaaatcctttctcagctgtca

SEQ ID NO: 5099 - DNA, 122 bp, Homo sapiens
aggccatagaggaggaatctgtacttgcggccggcatccagaggggtgacagtgacagagcgctcatggccctccacgggcaccacctggggcccgtctttgtccttgaactggaccacaaa

SEQ ID NO: 5100 - DNA, 122 bp, Homo sapiens
tgaggacaggactggggcccatcagcctgaacactctagggcctagcacagtgcctggcacggagtaagaggaagatcacaagccgtggtgggtgcaggtgggagtcctgggagggtggggt

SEQ ID NO: 5101 - DNA, 122 bp, Homo sapiens
ttaaatacaatgacataaaatttaaaaatctgttctttagttgcgctagctacatttcaacggctcaatagccacatggagccagtggcttctgtattggacagaatggatagcaactattt

SEQ ID NO: 5102 - DNA, 122 bp, Homo sapiens
ccatctcaacaaataaaaaaaataaaaaaataaaaaaacctgtgtacttaactggtgaatcgtgtcttccagaggacaaatctggcctactccagcctattctagttggatggaacacctca

SEQ ID NO: 5103 - DNA, 122 bp, Homo sapiens
cattagaactgtattttctcagagctgtggaggctgaaagtctatgatcaaggtatcagccgattcagtttctggtgaaggctcttgtctatggaccaccttcccattgtgtactcacatga

SEQ ID NO: 5104 - DNA, 122 bp, Homo sapiens
aaaaaaaaaaaaaaaaggaaaaaaaagcagctctctctctcgggagagggaggggacttccgagaggaaaaggcctgcaagagcctttgggttaactgagaaagcacagcccggccaacgct

SEQ ID NO: 5105 - DNA, 122 bp, Homo sapiens
aacacaccttggtacatcacattatgggatgaggccattaaaactgatgacataaatctacgctgagctctgagcaggggaaactgagcttggagctggatcatctctattgtggggccgtc

SEQ ID NO: 5106 - DNA, 122 bp, Homo sapiens
cccaacaccagcgtgcactttgctcttccaggagtttcactggcaggagcagggcaggtgcggccaacatgacctctcatgtttctcaccctgggtgctgtcctggttccagaaactccgtg

SEQ ID NO: 5107 - DNA, 122 bp, Homo sapiens
ggaaccttcttggactacagggctgtcccctttctcttaaaaatagcattcatggccaggcgtggtggctcacgcctgtaatcccagcactgggaggctgaggtgggtggatcatttgagcc

SEQ ID NO: 5108 - DNA, 122 bp, Homo sapiens
gagataacagagcactcttatctgctagaagctgggagcttgcaggggagggagctggagcggtctcacagaggtgatatttcaactggtgttgaagacaagtaggtggccacaagtggtgc

SEQ ID NO: 5109 - DNA, 122 bp, Homo sapiens
gaataggttcatcgtgttccttcaaattaaaaaaataataaaaatgaataacatggcattcgaggactgtgttctgttactacacaaacaccagctgactgagacataatatatttcaaagt

SEQ ID NO: 5110 - DNA, 122 bp, Homo sapiens
tatcgcccctccgcctgtgcatccccacccccagccagcgccaacccagtccctgggccccgcacagcttcagccgccccctccaggaagcccgcagtccccgggctggcgcgccaccccca

SEQ ID NO: 5111 - DNA, 122 bp, Homo sapiens
gtctatgccacgtgtcagccctgccatccctcatgtcagcaccatttcagctccaggcctcgggtgtgaatctggcatttctcagtttctcagcaaatctcccacagggcccccagcagtgg

SEQ ID NO: 5112 - DNA, 122 bp, Homo sapiens
tcaagcagatgagcagggctctctgttccgcggggcttctggatgaccggggcagcgatgcgggcaccctggcctgggttgccaggccagaagactcacttcttgcttttgaacgtgcccag

SEQ ID NO: 5113 - DNA, 122 bp, Homo sapiens
ccatcacctccagccccagagttaccttttctgacccagagctgttcctgcctggcagaccgggggacctctagttagtgccagtttcctcagagcattcctgatggctcaggaaaagaata

SEQ ID NO: 5114 - DNA, 122 bp, Homo sapiens
gtcttcgatgtctgcccacacttgcggtagatgccctcggaggtcaggcctagggaggggcggggccaagcgttcggggcctgaggcatagagtcatggggcggggccgcgcagctctgggg

SEQ ID NO: 5115 - DNA, 122 bp, Homo sapiens
ttggttcaacaagttcctagtccgggaggatgcagctcagctcgtggagtccgagagtcacggcgtaaaattggcgcttcccgcacatgcagatctcgggctcccggggtgtcccggccgcc

SEQ ID NO: 5116 - DNA, 122 bp, Homo sapiens
atacaaagtgaatgaagccagtgactaagcttctgtttgttttgttattctcatggccttcgcttgcattatttgggccttcattcagatgaacttgaggtgccattttgttgcatatgtac

SEQ ID NO: 5117 - DNA, 122 bp, Homo sapiens
tccccaagctttccacccactgatttacagaggagaaatcccctccccagctctcttcaccgggccaagatttgagtagagggccgacagggcaccatgtaatgaaaatctctatctcgccc

SEQ ID NO: 5118 - DNA, 122 bp, Homo sapiens
acttccacttaataaaaccttgcacttattctccatgcccacgtgtgatccgattcttctcgtaaaccaaggcaagatccctgggatacagaaagtcctctgtctttgtgataaggcagggg

SEQ ID NO: 5119 - DNA, 122 bp, Homo sapiens
ccggcagcgggaccgaaagggtaaagcagaggctcccggctcgctgagtgacagcatggccggcggccggggagagccgaccaatcagggagggcgtacgcgacccacgtgcgtaaacggcc

SEQ ID NO: 5120 - DNA, 122 bp, Homo sapiens
aaaaggcgggttaatgtgaagggacggaagggacagaacttgcgggaggcacatgctggccgagaaagtcctggagttcggagcatacagtgtttttattaggtggaaacaaacgggctggg

SEQ ID NO: 5121 - DNA, 122 bp, Homo sapiens
gtgatgatggggaggtggccttctggaagtatcagcggcctgaaggcctctgagctacctcgactttggacagagtaatgactccccagaaaacgtcatataagactttaccagcccctgag

SEQ ID NO: 5122 - DNA, 122 bp, Homo sapiens
tacccatcgtaatcatagccgtcgcgaccatacaccgcgtcttccgcgtctctgcgggatcgcagaaagtaaaagggatgagaaacaccaggaggagaagctcgctcagttgggaaccagca

SEQ ID NO: 5123 - DNA, 122 bp, Homo sapiens
ctgttgaggccaccctggtggcaccaaagccctctcaggcaggcagacccagggcctccccgccacaccttgttcatggattttgtcgctggagccatcggaggtaacagacaggatggtgg

SEQ ID NO: 5124 - DNA, 122 bp, Homo sapiens
acttacaggttttactaaagacattgcagtcgttgaagattttgaattagagaagtgatacgctttaatctacattttaaaaatgctactttgagaatggattggagaaaggcaagggtgaa

SEQ ID NO: 5125 - DNA, 122 bp, Homo sapiens
tcaggcaagtgtggggcaacttctaggggccagcatatgtcactggtgtccccagcagggcgtctccaggggatcattagggtgtagtacttggctgaacacaaaagtagttgcatttgcca

SEQ ID NO: 5126 - DNA, 122 bp, Homo sapiens
ctctcaaaaaccttacagggtgacttgccttgtgtattttacctctgccctctgccaccccggtgtttacacaatgagctgatggatagcttgggtagcagggataggggataagtatggac

SEQ ID NO: 5127 - DNA, 122 bp, Homo sapiens
gggcaccgaggcacagacctacccagtgcagggcgagcagcccggagccgagtcggatggcgccctacagcacagccagtggccgctcaggtaggcggacgggtggtagacggtgaggcgct

SEQ ID NO: 5128 - DNA, 122 bp, Homo sapiens
tgcagagggtcctatcttgtcccacaggtagatctacatcaccactagccacccctccaacgtgcacaggcccctgccctcacggcgcccctcttaggtccggcagttcctgcctccttctg

SEQ ID NO: 5129 - DNA, 122 bp, Homo sapiens
ttcagatgactgccccgtgtcagcccggcggcaatcgttagtctccgggccaacccaggacgatgctttttggcgttttcaggcaccagcgctgccacctgctggcaaaaactttctctttc

SEQ ID NO: 5130 - DNA, 122 bp, Homo sapiens
tccagacctggtcaacatggcaaaaccctgtttgtacaaaaaatacaaccattagcttggcgtggtggtgtgcgcctgcagtcccagctactcgggaggctgaggtgggaggatcccctgag

SEQ ID NO: 5131 - DNA, 122 bp, Homo sapiens
tgacctcacccttgcttcttcctctccatccttagtcttcatctctttccaacttggttccgcgtttgaatcttccaggaaaatgccctgcccatttcaatcagcaaaatgcttttcagagc

SEQ ID NO: 5132 - DNA, 122 bp, Homo sapiens
tagcaccgcacaagagggcgggccatttagcgtcacaagcagtggtttctggtgacgtcacgggaggacgaccccggtggtctggagggtggcagggatcaggttctgtctgagcccccgag

SEQ ID NO: 5133 - DNA, 122 bp, Homo sapiens
gccttagtgatcagtgcaatgtgagctgtcacaccaagtaagttaaagtcttgaacatggcgttcccttttggcaataggagctattatctagaataaataaggcgatttgttctcttattg

SEQ ID NO: 5134 - DNA, 122 bp, Homo sapiens
ttttctcactgttgtgagcagggctgttcctttccagcaagatgaacaccggtgtaagcgcgtcttcgtgtccttccatggatgtttgtagaggtggagctactgtgtcgaaaggcatgtgt

SEQ ID NO: 5135 - DNA, 122 bp, Homo sapiens
gggtttctcgctgagggacatctggatggtcagcccttcctgcgctatgacaggcagaaacgcagggcaaagccccagggacagtgggcagaaaatgtcctgggagctaagacctgggacac

SEQ ID NO: 5136 - DNA, 122 bp, Homo sapiens
tccaggcatgtctgcccagaagattccgactccctggcctcatttgcctctctacttctccgaggcctttgtgagttggggccacctgtacttcccaggatgtgcttgcagggtacagctta

SEQ ID NO: 5137 - DNA, 122 bp, Homo sapiens
ccgcctttggagtgaggagggcgcagcccgcgtcagaacttagagggccaggcagggtcgcgcgcatggcctgggcgggctcgcggcgggtcccagctgggacgcgcgcggcagccgagcgc

SEQ ID NO: 5138 - DNA, 122 bp, Homo sapiens
gtgtccgaaggagcgagttagaacctgggacctggcggcaaagctgggtgttttcaaggacgtgggtccagcctcttcctcccccacatctgggcctgctgaagagtatctggcccaacggt

SEQ ID NO: 5139 - DNA, 122 bp, Homo sapiens
tctcataccatttgtagtttggtcagatttgaaagatgagttgattgtttttagatagtgcggcaaataggcagggacttggaatcctctctggctgtatgagtaattactgtctcatactt

SEQ ID NO: 5140 - DNA, 122 bp, Homo sapiens
tctaggaaccccactccgtctccactctccggaagcctgctcgcccagacctccatgtagcggcatctaaaggctgggaccctccccagctgcaaacgctctcctcgaggattctgcagcac

SEQ ID NO: 5141 - DNA, 122 bp, Homo sapiens
aggggactgctctagaagaggagatgggttcataaaaggtttagagggcagagggcctggcgatgtgttttctgttcttgatttcactccagtatttaaggagctcactttggtgcaaataa

SEQ ID NO: 5142 - DNA, 122 bp, Homo sapiens
gattggtctcagaccagtcagaacaacttaatgaggtggccacacttctctgagaaacctcggtccctcccacagagctttgtgcttctcaccgtagccacaaccacagctctgtttcaggc

SEQ ID NO: 5143 - DNA, 122 bp, Homo sapiens
cccggggcgccgggcccgcgatcggagccggaggcaccgcacagcggaaagagggctccgcggcggccaggctcagctttgccgggaaaatgctggatttaactcccagtctgcgccaatct

SEQ ID NO: 5144 - DNA, 122 bp, Homo sapiens
gttttgtgggacaggccctgggcctccttgctcctggcaggcctcaggtgccgcacgccgcgtcaccgtcaggactcgcaggctgtctggtcatttttgacgttgctgaaggtgagtgggaa

SEQ ID NO: 5145 - DNA, 122 bp, Homo sapiens
ctgttaattgcattttcagagacatagctacaaggtgaaactaatcatacacatgataaccgggcttcaccacctacagtgccctgctgctgcactctcactaatctgtattaaaacagccc

SEQ ID NO: 5146 - DNA, 122 bp, Homo sapiens
ttagaaacgtcaaactcaactttgctttatgaaggaactcaaagttaactcaccctggtacgtccaccctctccctgcgcgcaggggacagcggcctctcctccccaccgcgcagagtcgcg

SEQ ID NO: 5147 - DNA, 122 bp, Homo sapiens
atttttatttgcttagtgttactcccattttgtagatgaggacctcagaacagttaagtgcggtcacatagctttgaatagcaagcacagttaggatttgaacaaggtcttcttgattccaa

SEQ ID NO: 5148 - DNA, 122 bp, Homo sapiens
aggcaggattggactccatggcctctgggaggcgggcatgagcatggcagatgtccccctcgccaatatctccccctcgccaagagctccccctcgccaagatctcctcttgcctatgttca

SEQ ID NO: 5149 - DNA, 122 bp, Homo sapiens
gagagagttcttggagatgttgatgcttttcaccaggctttagaagcccctgattgaggccgggcacggtggctcacgcctgtaatcccagcactttgggaggccgaggcaggcagatcatg

SEQ ID NO: 5150 - DNA, 122 bp, Homo sapiens
cagtccggccggaggtcaggtgaccgcgggccagctggctccccattggcgcgcgcctcgcggcctcccgctcggtttatgtgcgaggagtgagtgattgactttatcagtccaaggacatt

SEQ ID NO: 5151 - DNA, 122 bp, Homo sapiens
gctaattactagatcattatgtttcttcttccagctgtagaatatcattgcccagcttctcgaacaaacttatttattaacaagtatttgagaacctactatgtggccaacgctaagtactg

SEQ ID NO: 5152 - DNA, 122 bp, Homo sapiens
gatccccagcaccgggaagtggaacgtgatgctggagtatgagcagtggtttcctaaaggcgcaaactggagggtcggcagctcccctcagcctaccttctttgaccatcccaacagccagg

SEQ ID NO: 5153 - DNA, 122 bp, Homo sapiens
ctttaatgtgcattcagatatgaggggaggtggcatccttttatttatttaaagaatgcacgtctttatgatttgccttcagaaagaggctctttactatcagcatgtcccaccttttgggg

SEQ ID NO: 5154 - DNA, 122 bp, Homo sapiens
gacgcaggcgatcattctcccgtccttacgtggcagacagggttatttgcgtagattgaccgagatgagtgtcctgcactctgaagaaccttggtggctcctccttcggaattgatttaagc

SEQ ID NO: 5155 - DNA, 122 bp, Homo sapiens
gagcccgcgaggtgtctgggagttgggcgagagctgcagacttggaggctcttatacctccgtgcaggcggaaagtttgggggcagcagtgtcattggcctgacgtgaggaggagggacttt

SEQ ID NO: 5156 - DNA, 122 bp, Homo sapiens
cacactgttgtgcctctctggacagtgtacttgaatctgctaatccacccagttaggaaccgaaagcataaaacgacgaggtgacccagaggccttacccctaaagataactgtgaatgcca

SEQ ID NO: 5157 - DNA, 122 bp, Homo sapiens
ggtgtctccggggttgggcacacgagagtagcgggcagaagccaacgcagggttgggatacgtggggccacagccagtctctgtggtccccgggtctaggcttagcaccagttacagcaacc

SEQ ID NO: 5158 - DNA, 122 bp, Homo sapiens
ttcaaactattttgatgatgatctacaatgtgaatacaatttgtattacagttcagtacacgagcatgttcatagcatatgtaacatagattttgtataccagtactttgccataagctcat

SEQ ID NO: 5159 - DNA, 122 bp, Homo sapiens
gataaaggctgtgcttacctgtctgctggtagaaagctgagtttgaggcaaagcagttgtcgaagctgggccgaggccttcacaggtgtgggcacagaggtgaagcaagtgagaaagtatca

SEQ ID NO: 5160 - DNA, 122 bp, Homo sapiens
cagcaggaatcttagcagacccagacacctgagtgtgagcctggctctccatctccctcccgactaccctggggatgccacccagccttctgtgcctgtttcctgctctgcacaatgggaat

SEQ ID NO: 5161 - DNA, 122 bp, Homo sapiens
gggagcaagtaaacagtcaggtgcaggagcgggggcgagtgcttttgggctgcagccccacggtagcatctaagatgggtgcctgtggctgccaaagccctattgggcatgttgcatttata

SEQ ID NO: 5162 - DNA, 122 bp, Homo sapiens
accaggaggcgggggaggggcgctcggactacagaggaccggacgggggcgagtgttccgcggggtgtgtggagtaagagctgggacggacctttgtagctttgcgaaattaaccgtttttc

SEQ ID NO: 5163 - DNA, 122 bp, Homo sapiens
aactttaagataccaggatggctttcgataaaataccattgaggctacatgtccattgcacgtccatatccttagtactttcctgagaagattccctagaagtgcgatttctgggtctaaag

SEQ ID NO: 5164 - DNA, 122 bp, Homo sapiens
ggcaggtaggtggagccacggtgcggggcagtcggatggtcgcacgcgggggcggggccgcgcctgcgcagaccgcctgttatggcggccgcctaagtcccacagagacgggagtcgggtgg

SEQ ID NO: 5165 - DNA, 122 bp, Homo sapiens
ctccacattccaatacctttgaaaacacacggggggaggaaagggaaaataaacaaatcacgggtgtttacagaatagcaaaaaaagtatgcagctagtaatgaaaaaacaagtcagcgtta

SEQ ID NO: 5166 - DNA, 122 bp, Homo sapiens
gttgtcatgatcacaagacaagtaaattgcatcatcaagccaggatcttcggatcactggcgtagctctctttccagtgcatcacagatgtccctcatccctggcttccactattcccatca

SEQ ID NO: 5167 - DNA, 122 bp, Homo sapiens
ttttctccctctctgggccttgtcctcaggtcagtgttgtgcctccagctcctgcagaggcgaactcagaggcggccgaatgaaaccaaatggatttggcttgaccccatcatctagcggtg

SEQ ID NO: 5168 - DNA, 122 bp, Homo sapiens
aataaatggaaggtggggcgggctgctgtggggatggggccgctgtgggggcggggctgccgtgggggcggggtcgctgtgggggcggggccttgtgagccagtgcttggacttccacgtca

SEQ ID NO: 5169 - DNA, 122 bp, Homo sapiens
cccagctggatgtggtgcactcgggcccccccacccccagccaggcattcccactgtcagcggggcacacttccgtttgcttgaagtaatgcacacccaagggcatttgtgctgccaagtgc

SEQ ID NO: 5170 - DNA, 122 bp, Homo sapiens
gaaaagaagatagggaaaggaggagaagggagaaaaagtgatatgtgggggttggagaaacgaaggcggaaaggacggatgaattaatgaattagggatagatgaaagaggggaggagcaag

SEQ ID NO: 5171 - DNA, 122 bp, Homo sapiens
gcgtctgaggagactctgagtccgggtgggtgcgtggggactttagaactgggaccgcggcgacgctgattggcttctctagatatccaatacccaatgggagtgggaagtggggacgcgtc

SEQ ID NO: 5172 - DNA, 122 bp, Homo sapiens
ggcctgccacatctatacggagctaggagagcattaacaccaaagaccaaggctcctttccgaagtgctctgtgcacttgggaatacgaatactcccaaagaaggactctgcatcatgagca

SEQ ID NO: 5173 - DNA, 122 bp, Homo sapiens
taatctctcccacataccctagcacagtgctgggcatgtacattacagtctcattaagtacgctggaaaataaatggaatcaaatttcctaaaattcaaagtctccaggaagttgctcaggg

SEQ ID NO: 5174 - DNA, 122 bp, Homo sapiens
ctggccaaggtcagacagaccctcatggctctcagtgtaccaccttagaggagccaggggcgcgtgggaaacacagagtcccttgttctctccgaagtgggaccctgactttaagcagtcgc

SEQ ID NO: 5175 - DNA, 122 bp, Homo sapiens
agtgcaccgcttggccgaggcaaggtgttgctggggcaaggctgctccgaagcgaagtcgcgcaaaaggaagagtctgggaggcaggcgacttaggagagtctagtcactgagagacagagg

SEQ ID NO: 5176 - DNA, 122 bp, Homo sapiens
aggcctcaagaccttgggctgggactggctgagcctggcgggaggcggggtccgagtcaccgcctgccgccgcgcccccggtttctataaattgagcccgcagcctcccgcttcgctctctg

SEQ ID NO: 5177 - DNA, 122 bp, Homo sapiens
caggcttgctgcttgcctttctgcacagcgtgtcatcagtgggaaaaaaaaatcatacggcgagattttacattttttaatgtgaagtccttgaaatccagtgtgtatttttatgcaccgga

SEQ ID NO: 5178 - DNA, 122 bp, Homo sapiens
gtccaatcctataaaatccagcgttgccaatgtccaaacttagtgacatttagtttagaacgaggtaacactttccttggttttttgaaaatgagataaaatacaacttgtcaaatacctaa

SEQ ID NO: 5179 - DNA, 122 bp, Homo sapiens
ggttcatctcactagggagtgccagacagtggcctcaggtcagtgagtgcgcgcactgtgcgcgagccgaagcagggcgaggcattgcctcacttgggaagcacaaggggtcagggagttcc

SEQ ID NO: 5180 - DNA, 122 bp, Homo sapiens
ccacgtgggcggcatggaagctccccaccccttccgggagacggcgccctgtgcctctcgcgtgtatccatttataattaactgcaaatgtgtttccctgagttccctgagccactcttgca

SEQ ID NO: 5181 - DNA, 122 bp, Homo sapiens
ccgtgtgcgttcggtagtggtcgatgagcttggagcgttcggtgaagcgcttctcacactcggtgcaggggaagggccgctcgccggtgtgcagcatgcgatggcggatgaggtgcgcgggg

SEQ ID NO: 5182 - DNA, 122 bp, Homo sapiens
gagggacgcgttccctttttcagtactttgttcgttcgggagtatagttggaaatgctggcgctgcctttgatcacattaagaagctgtcactttccttacttgggaacaagatttctctga

SEQ ID NO: 5183 - DNA, 122 bp, Homo sapiens
ctccctgggacgcttgcaagagcccagccaggcaaggggagagatcagaagacacctgtgcggatgtcgtggcttcgtacctttcttgtgaagtagtaataaggcacttccatccccaggag

SEQ ID NO: 5184 - DNA, 122 bp, Homo sapiens
actgagggaaggggactcgccctggcagtgaaacgggatgggcgctgggaccaggtgccccggcagatcctctcccaagcccagttccgctcccgctcagtcctcaaccttccccagctgga

SEQ ID NO: 5185 - DNA, 122 bp, Homo sapiens
tgaaatgctgaacactttctgtgggtctcctccctacgctgcgcctgaactcttccgggacgagcactacatcggcatttacgtggatatctgggccttgggggtgcttttgtacttcatgg

SEQ ID NO: 5186 - DNA, 122 bp, Homo sapiens
tccccaaaagcccggcaggcctccggatgccgttccgagacgcggcgcgaaggagttaagcgggccggcgggtgacatcacctcatttacataggagcgcccataaagctgcgcccgccgca

SEQ ID NO: 5187 - DNA, 122 bp, Homo sapiens
tccacgctaggaccccaaggcctgggaaccagcctgggtcaggggcagagaagtggtgaacgtggctccaaggggcactcctgaggtgcagaggaggatttgtgacagcccagaggatagag

SEQ ID NO: 5188 - DNA, 122 bp, Homo sapiens
gagcgcagtggcgccggcgggaaagggctgcggacctgcggcgccgcgttgtgcgttcgacgacgcggcaccggcttcgacgccctctgcccgctccagaagcaggtaaaggcggcgggtgg

SEQ ID NO: 5189 - DNA, 122 bp, Homo sapiens
actatgtgtctctgctcctgtgttccgcttctgcccagaagtcttcctccaaggctgggccgggcagtcctgcctcttcctggaaccttggcagccccagtgcagaggcgctggacaacggg

SEQ ID NO: 5190 - DNA, 122 bp, Homo sapiens
aggacccaaagggccagaagccagcaatctcagccactgccttccagggcatgaccaggacggccaccaagagatctgacacagccaaggagatgacaaagaagttggtcaccttggaccgc

SEQ ID NO: 5191 - DNA, 122 bp, Homo sapiens
tctggggtctggggcctagggctgctgggcccacgtaggcccctctgggcagggtcacagcgcccagcctggagccgcccgggctgcagctgcccctgtttccacatcggcagcagcaaggc

SEQ ID NO: 5192 - DNA, 122 bp, Homo sapiens
tacactccacagaagtggaatgtaggtgtgggagcaggcgaccaagcggctcaagaaccccgattacaatgttttttagggttttattaggttggtgcaaaagtaattgcggtttttgccat

SEQ ID NO: 5193 - DNA, 122 bp, Homo sapiens
taacctgaggagaaaagtctggtgagcttttaggagacagaagcatagctacagagtttacgagatgagctagggctgtgaagctagtgtatttgcctttgataaccctgaccttatcctca

SEQ ID NO: 5194 - DNA, 122 bp, Homo sapiens
cgcgcccgctgcaaagttggcattgaagtttgtgccgggatgtcccaaatcttgagggggcggggggcgcgagtgtgcagagaggcgggaggatggatgcagatggggagacagtgagggga

SEQ ID NO: 5195 - DNA, 122 bp, Homo sapiens
ctctaggcttatccttcttgtgtcagattccagaaaggctgaggaattacggtggcctgtcggagaggatttctcccagcctgccttgagagactatttgcttctgctctgttccaccctca

SEQ ID NO: 5196 - DNA, 122 bp, Homo sapiens
ctttgtggtcacttgcagctcgctggataacctttaaaattatacattgggtcggaatctcgggagtcagatctccaaacagctcatgccaagagcttccagcagggggcagcaaggcaccg

SEQ ID NO: 5197 - DNA, 122 bp, Homo sapiens
caaggcccaaacctgacaggaaaaataaaaaataaagccatgcaagcagaaaagccaactcgaccaaagacacggagggcccaagttaaagcaaggaaatgaaggggctgctgcagccctcc

SEQ ID NO: 5198 - DNA, 122 bp, Homo sapiens
gaagccaggataagtatttacggtggagaacatgagaggtgggatacacaggggaacgcccgtgcctgaacctaagaggtgtgactctaccaagtgggaaaggcaagcacgcatcatgccag

SEQ ID NO: 5199 - DNA, 122 bp, Homo sapiens
ctcactgcagcctcaacctcctgggctcaagtgatcctcccacctccccctccccagtagcggggaccacaggatctcatgaccaaacccagctaattactgagctttttggtaccccctca

SEQ ID NO: 5200 - DNA, 122 bp, Homo sapiens
ggttcagccaaacctccaaggggctctccttggggagttcagaagctgggctcagcttgtcgccgggggtgggggagggtggcccgctggcctctgtagcctcaggaatggcagggggcatg

SEQ ID NO: 5201 - DNA, 122 bp, Homo sapiens
gaaaaagaatgcggacggccgggcccgcggcgctccgagaatcggaggcatcctcaggcacggtccctccaggagaccgggaaagcggggctctgtcagccccaaagccccgacggcggcag

SEQ ID NO: 5202 - DNA, 122 bp, Homo sapiens
gttccccacgtgcccggggctcttcctggaatgcagtgttcctagactgcacagatgctccgtgtctcgtctgagatcccgtgacctgaggctgccccctgcactgttgctgccctgtggcc

SEQ ID NO: 5203 - DNA, 122 bp, Homo sapiens
ttttggccatccttgcagaaaagagcctaaaattgggtgatttacccacaaagtgaaagtcgagggaaaattcagtttccagtctctgaactctatgcgataatctcctatcattagggcta

SEQ ID NO: 5204 - DNA, 122 bp, Homo sapiens
aaagtcggttgggtgtgggtctgaggttgtgccagtggtggtagtctggtaaggcaaacccgcgtgtaattctgagggctaaccccttccctgtctagtcttttccacgctgcctgggtttt

SEQ ID NO: 5205 - DNA, 122 bp, Homo sapiens
agccacgcccctcagcacctgccctagtcctgctcacctttgggggctcttgttgatggacgtcaccttccaaggggatctggggaggccaggagtagccctatcaggcctgtccggatgca

SEQ ID NO: 5206 - DNA, 122 bp, Homo sapiens
cttctcagcatgcggtgtttaacggctcccaaataattggactgcactgagggggaaagtcgtcagcaaaccgcaggcttcactagaacctcccatccggccctcggtcagctcagtgtatt

SEQ ID NO: 5207 - DNA, 122 bp, Homo sapiens
cgacgtcgtttttaaagaccgaggctttatagcattgacattcttttctgtacccctaatcgcggcatctgtttccataatcttacgcttaacctcgtgctccttgccatccttttgcagca

SEQ ID NO: 5208 - DNA, 122 bp, Homo sapiens
ggttctgaaggttggtcaagaattgtcaaaactgcaagtatttaacttgtaaatgccaagcgttgctgtgataacagcccttgtgtgatttttgcgaactacagtaagcgaggcattgtgct

SEQ ID NO: 5209 - DNA, 122 bp, Homo sapiens
tggggtggggtggcaaaaagcaatccatgttagcaggtctcaaatactggaccccatacacgggtcaatctcaaaatgtgtatctggagctgggcacagtgtcttgtgcctgtcatcccagc

SEQ ID NO: 5210 - DNA, 122 bp, Homo sapiens
gacctatgttttctaatagggagcctgctgctctggccatcagcctttagtttttcccctcgctgggattttcagatacttaggacgcagcaaaggtgcccaggcgattataatggtgggag

SEQ ID NO: 5211 - DNA, 122 bp, Homo sapiens
actttatcttccaaagtttacagtctagttacttcagagatggtttatgtgccatctacacgtgtagaactgacatacccataaaaggaacagataataaaaagactagtaagtctggacct

SEQ ID NO: 5212 - DNA, 122 bp, Homo sapiens
tgtgattatttatgtcattagttgtttaacatctgccttcccccaacaggctttcaatttcgtaaattcatggctggtgtctacctcgttcacctgtctattcccagcacctagtacgtcat

SEQ ID NO: 5213 - DNA, 122 bp, Homo sapiens
ctcctgggttttagtgatccacctccctcagcctcctgagtcgctgggactacaggtgtgcgttaccataactagtttttaattttttatagagatgggatctggctatgttgctcatgctg

SEQ ID NO: 5214 - DNA, 122 bp, Homo sapiens
tttgccgactgctgcaaagcgccttacgactgaacccggaatcgacctatggccagcagtcgtccccgccctgcttcaaacatttgggtttcaggagccgggcggaggtgactgccgcgtgt

SEQ ID NO: 5215 - DNA, 122 bp, Homo sapiens
ccccacccttagagatgaatagggtgccgacgccgcaggctgttccctttaggtagaccgcgtggagcgcccagtggactcgatagcgctgtcctgggaacagaaccttcccggactgtgca

SEQ ID NO: 5216 - DNA, 122 bp, Homo sapiens
cgatcagcaccgtgaggttgtaggcctctggctcctcaggcacagccggggacaggaagacgaccttggtgtcattgtggaacacgtagtctgtacccaccacctgcaggcaagtcccagct

SEQ ID NO: 5217 - DNA, 122 bp, Homo sapiens
ttagaattgaaagtaaagaagctggaaccccattcctacatttcagccgccttttgaagtcgagtctgactgcctgctgttcactctctcctcacctggagcctccagaaattcccgcctcc

SEQ ID NO: 5218 - DNA, 122 bp, Homo sapiens
ctccttcccgccccactgtaatcattcgtctcaattacaaatgagacctatgaaaggacacgctgaagatgtaatcaacagttaaaattagcccggcgctgcgcaggcggccggcccggcct

SEQ ID NO: 5219 - DNA, 122 bp, Homo sapiens
agacccgctccctgcaagacccacgggcgtcgccctgctgagaacctggtcccacacctacgtggacccaggtttcctgaggacctccgctggacccgcagatcccgcactggccaaagggc

SEQ ID NO: 5220 - DNA, 122 bp, Homo sapiens
cggcgcctgtccagcgcgtcgagcccaggcggcctggacgcgggcctggtggagcccccgcggctgctgtcctcccccaacagtgcctcggtgctcaagatcaagacggagatctcagaacc

SEQ ID NO: 5221 - DNA, 122 bp, Homo sapiens
tccccttgctaactgggcaccctggggaagcttccctggggaagcttgggcaggaagtggcgggagtctgggggtggtttaatcaagccctctccccattctctccttccagccccaaaagg

SEQ ID NO: 5222 - DNA, 122 bp, Homo sapiens
gctccgcagaacagtcctccctgtaagagcctaaccattgccagggaaacctgccctgggcgctcccttcattagcagtattttttttaaattaatctgattaataattatttttcccccat

SEQ ID NO: 5223 - DNA, 122 bp, Homo sapiens
ttactggggcggcgcgtattggtgcagtctccacgttctttcagaagaacgcgggcgcatcgctggaccacgcgccagtgggcagccggcgcagcctccctgccccccatagtcccgatgct

SEQ ID NO: 5224 - DNA, 122 bp, Homo sapiens
gaacaagggagattagaagcagatttccaagcacagtgaccaggtagacacccaataatacgataaatagcagctgctcggtgtgtggcccatcagagagtcccagaaggaggaattctgtc

SEQ ID NO: 5225 - DNA, 122 bp, Homo sapiens
ttttaggaaatactaaaaaccaaaagaaaagctaaaacatatgcaaaccaaacagctgtacggcctctaggctagactgcctttagaagcatggctgaataatctgctggtaccatagcaca

SEQ ID NO: 5226 - DNA, 122 bp, Homo sapiens
cccaagggcaaggagcagcccgtggggcagcctcctgagcacagggctggacagagagggcgggggaatggacctggtggagagctaaccagtgagatgctcagaaaatgcttgctgagtgg

SEQ ID NO: 5227 - DNA, 122 bp, Homo sapiens
catcccctagcgttggtgtgcaattgcgtggggatccattgcttccgacgctactcctgccgggtcaccacaggcgcacgtgttccggcagggcgcggcttccggtgacccagctccgccct

SEQ ID NO: 5228 - DNA, 122 bp, Homo sapiens
tagttctaaaattctttaacccacccacttaacaaaaacggaggtaataggtaaacaaaacgccaggaaagatcgcacttaaaggaacaaaagcacccaaggaggaaaaagaggcctgagat

SEQ ID NO: 5229 - DNA, 122 bp, Homo sapiens
ggaggaaaccaagacacatcgaggatccaaggctctgggagcgtctgttggaaaaccccacgctcaagaccacaggcctgggcacggcagagggccaagccttgggcaggaaacctccagga

SEQ ID NO: 5230 - DNA, 122 bp, Homo sapiens
tgccctgggctccagggacacatcagtcaacgaacggaagggccctgctctcaagcagtgcgaaaagcagattataaacaagtcaacaaacgggattatctaaggtggtagtaagtgctgta

SEQ ID NO: 5231 - DNA, 122 bp, Homo sapiens
ttttttttttgagacagggtctcactcggtcacctaggttggagtatagtggtgcaatctcggttcactgtaacctctgcctgttgggctcaagcaattctcccacttcagcctcccgagta

SEQ ID NO: 5232 - DNA, 122 bp, Homo sapiens
tgagggtccgcatcggtgaggcagtggggctgcagcccacccgctggtccctgcgccactcgctcttcaagaagggccaccagctgctggacccctatctgacggtgagcgtggaccaggtg

SEQ ID NO: 5233 - DNA, 122 bp, Homo sapiens
tattttgttgtaaacaagttagttttgagggtatttcctcgtggtcctcctgccgtcactcgtccccatgttccaatgatgctgatcaactgctttattcagtttcccatctttcttcttgc

SEQ ID NO: 5234 - DNA, 122 bp, Homo sapiens
cgggcaaggggcggcgaggtgagcggcctgcagtcccgctcgtggccacaagacggcgggcgagagcagcagacgctccttcaaatcccagaaaaattcctcacggggataataattaataa

SEQ ID NO: 5235 - DNA, 122 bp, Homo sapiens
ctgttgatgatgagtgagttcttttgagatctggtcatttcacagtgtgtggcacctcctcgctctccctcttcctgttgctcccaacatgtgagatgcctcagtccccctttgccttctgc

SEQ ID NO: 5236 - DNA, 122 bp, Homo sapiens
ttactgtccccagtttatgcatgaacagagaaagctgagatacggagactagtgatccgtcgaggtaataaacggcacaggtggggtttgaactccatcagtttgattgcagaggcctggaa

SEQ ID NO: 5237 - DNA, 122 bp, Homo sapiens
gtcttgaactcctgacctcaagtgatctacctgtcttggcctcccagagtgttgggattacgccactgtacccagccttagactcagtttaaaatgggcttattgtaatgaaaaaaaatacg

SEQ ID NO: 5238 - DNA, 122 bp, Homo sapiens
gtgtctgccattgtcgctccccattttcgctgacgtttgtgtgtcccaagattaccacggcgtccaagctgtaagactgtctctgtttgcccaggtcccatagaacctgatgggaaagtttg

SEQ ID NO: 5239 - DNA, 122 bp, Homo sapiens
ggaaaatctgcagatttgtgaatgggagagagaggaaaggttggtattttagcttggccacgttaagtttgagatgcctctaagaaattcacattgagatgtggaggtggaggaggcagttg

SEQ ID NO: 5240 - DNA, 122 bp, Homo sapiens
tccctgtgcaggagctacggaggaggatccagtgtctgtatgtgagtgagggtggatgggcgaagggacaagtgacagagcttgacaagtgtcttccccaaagcactttaatgcattcacca

SEQ ID NO: 5241 - DNA, 122 bp, Homo sapiens
aactaataatcctgggtagtagtctggagacactcctagcggagtttactcgggagagggcggagaaatacatgacatgagcagtacaggctcatggttgggagctgagggaaggctgagaa

SEQ ID NO: 5242 - DNA, 122 bp, Homo sapiens
gcgcgggatgtggctctgagcttcggggtagtccgcgaggctgggttccgtgctgaggggcgtcgcgtctggccgtgcgctgcgggagcgcgcgggcctggcccgctgtcctggccgctgcg

SEQ ID NO: 5243 - DNA, 122 bp, Homo sapiens
gcgcccgcgcaaagcggggctggacgagcagcgagctccggggagcggatccgagagggccgagtcctcgaaagaggccttgaggcgacgggagacccgggatcgaagtcagctgccggagg

SEQ ID NO: 5244 - DNA, 122 bp, Homo sapiens
aggcagtgctgggtgggcagtgtggggcctgggacgtctaccttcaggccctctgactctcgctggattcgctgttccgggcagtgctgcagcgcaaaggcgccaggcctggcgtggaaccc

SEQ ID NO: 5245 - DNA, 122 bp, Homo sapiens
ctgtcttggaatgaatgatcgtcggaacggagcttgatcaaaccactcagcagtaggcgtcgcccactttcttattggttggttttggttctcaagagtaggaaagttaggtagtccgcgag

SEQ ID NO: 5246 - DNA, 122 bp, Homo sapiens
acttcccccgtcaatatttactccgaagtggggatgcgccagcggcctattgttctcttccgggaagggagggagccgaggtgcgagacaagcttttaacaaggtttaaaatttgagaaatt

SEQ ID NO: 5247 - DNA, 122 bp, Homo sapiens
ccagatttccccaacccctcctccccaacctggctgagctgcccaggattctggctgactcgctgcccattgcactggttagttttgcggtgtctgcctccctggcctccatccatgcagac

SEQ ID NO: 5248 - DNA, 122 bp, Homo sapiens
atgtctctgggcccctgcctcctgcatacagcccccgatatgttgaggctgcctggtacccgtggtgggtacgagagggcttcttcaaaccagaatatcaggttagtatctggcagggaggg

SEQ ID NO: 5249 - DNA, 122 bp, Homo sapiens
ctacccacgttggagggtatcaggaggctgccatgcatggttttcttccaaagaaggctccgccaactagggtgaggtgggaagtcccgagcccaggggtgtgaaatgatggagatactgca

SEQ ID NO: 5250 - DNA, 122 bp, Homo sapiens
ggaactcagacgctttggctctcggtgccacctttaaatgctaaaccaccggtaggtagtcgctaaatgggaaagtcgtgttctcccggttttcaggtgggaaaagctgaggctcccaggag

SEQ ID NO: 5251 - DNA, 122 bp, Homo sapiens
gagggtcccagggcttacccgcgcccaggaggctggccaggaggaagagggcgtacatagcgccgtctgactccgcagtctgcaatgcggagcgtcagctgatcccccgcagatataaatct

SEQ ID NO: 5252 - DNA, 122 bp, Homo sapiens
tactggccttgaccatctacttgaactggagtctcagtttcctcacctgtaaaatggagacgacattgtgtgctgaatgcctgcagtacctgtcacagggtaaatgttcaataaagaaaacc

SEQ ID NO: 5253 - DNA, 122 bp, Homo sapiens
cgagggtggaaaagtggctaactgcacattcggtcccctgctggcagaggagtgtggctgcggggaaaccgcgggccccagagtgtctgcccaggagcctggttcccttgagtgggagcgcg

SEQ ID NO: 5254 - DNA, 122 bp, Homo sapiens
aacaatgacttctatcgcgtgagcccgaaaaccaggctgatgcgtgctacggcatgcgtgcgtggtgcctgctccatgtgtgaactgtgtctgttccatgtgtgaaccgtgtctgttccatg

SEQ ID NO: 5255 - DNA, 122 bp, Homo sapiens
cccagagagaggcctcctcttcctgtcaaacacccggctctcctctccaccaggctcccacgcccaccacacagcctgtagccccggcggagctatgggctctgactccgcctctttccaaa

SEQ ID NO: 5256 - DNA, 122 bp, Homo sapiens
gtagcttgaatattaaagttacgtatgtaaacatttaaaagcaggtgagtttgttaacttcggcaagcttatcagtagacagggccttccagtgaaaagagcacttgactagaaattaggag

SEQ ID NO: 5257 - DNA, 122 bp, Homo sapiens
tccctgaattatcaaggcaagctgctgttcagggctctgattgttttctttatgacttcacgtatcaagaacattttacagaattattatatgcaatggtctgtgatcggttctaaaacgga

SEQ ID NO: 5258 - DNA, 122 bp, Homo sapiens
ggaggccgggaggggactgtcagcagtcctcctggggtgggggcgctacatgaagagcctcggcaagccatgcatgctaccggggcatgtgggccaaggagcacattcattcctcaaacact

SEQ ID NO: 5259 - DNA, 122 bp, Homo sapiens
tgcgattctccactactagttcatgtcatcacttttcctaaacaaatcgctagaggggctcggagaagggaggggcccgggaaactgggaaactagctccgcgcacaccgaggcacctcgca

SEQ ID NO: 5260 - DNA, 122 bp, Homo sapiens
ggaaatctgaagctgtttactgctcctttttgtacttttcacagtttgtagtgatacattcgtctgtgattatttgcctaacattccccactgaatcatgaactccataagggtggggacca

SEQ ID NO: 5261 - DNA, 122 bp, Homo sapiens
aaaacagagaagacttgaaggactgttttttatccactgtcttcagcagagatatttcatcgtgtgtgacattcctggaagttgctatcaaagtcccaaagtacgaaatgcgtctcgtaagt

SEQ ID NO: 5262 - DNA, 122 bp, Homo sapiens
aacctcctcctctgcagggtacagaaatgctgccaccccctccccctcctcttcccggagcgggcatacctcctccgccgcctctacccggagcaggcatactccctctgccccctctaccc

SEQ ID NO: 5263 - DNA, 122 bp, Homo sapiens
acccaagtatgtcggcagacaaaaatcaaagattcttgttccacaaaagacaaaactgcccgtaaaattagaaacttggagatgaaaataatcttcaaggccacccaaatcccaccttattg

SEQ ID NO: 5264 - DNA, 122 bp, Homo sapiens
agagcaatcacaggcgcggtcccaaaacgcctgctttgccaacagttcctcctggagcctcggatccagcagtgttggcacagagaaagaaaatgcacttttctcagcggagggaaggaatc

SEQ ID NO: 5265 - DNA, 122 bp, Homo sapiens
gtccccaagacactcctagaacgaatccgggaggtggaggccagcccaaccaggtctcatcgttccatacggaagagtagcaactaagacagtgagcggggacgcagggagagagacgctta

SEQ ID NO: 5266 - DNA, 122 bp, Homo sapiens
gcctgccaagggagaaagaggccgggacagcaccctagtgtgcagagagggatcccagaacgtgtggggggagtctgcggccgggaatggcgtgcgtcctgcactcccagctgacagtcaca

SEQ ID NO: 5267 - DNA, 122 bp, Homo sapiens
agggcttgcagtttctctgcctctgatccacaccttccatctatctcagtctctgcatgtcgggctgctgccctcccagggccgtcacctgctccctctcttttcttattaacattttactc

SEQ ID NO: 5268 - DNA, 122 bp, Homo sapiens
ttggattgctgaattcaaaaacagagcccattcttaagatcacttggtgccttaaagacacgcattccaaagtggaatgtggttgaagaaagtgggccaggtggttgaagaaagccatgtgg

SEQ ID NO: 5269 - DNA, 122 bp, Homo sapiens
cagtggcgggctccggagccccgggagaggtggacagcgccggcgctgaggtgaccagcgcgcttctcagccgggtgaccgcctcggcccctggccctgcggcccccgaccctccgggcact

SEQ ID NO: 5270 - DNA, 122 bp, Homo sapiens
aaaaagaaaaaagctcgaggacttgtgctctgaactatcaaaccgtttccttaatcaaaacggtttggtgttggatcctgtggtcaggattgaaaaataacaacattagaagagaaataatt

SEQ ID NO: 5271 - DNA, 122 bp, Homo sapiens
agaatggaagcctgatcttttgtcttatttacgacggcctcctctgccccacttaacaggcgagcatccaggagacaaatggaaggtctcaaagggacagggctccgtggggactgcaagac

SEQ ID NO: 5272 - DNA, 122 bp, Homo sapiens
attaggttccacgtggtcctttggggcgggaatcctggtgggtgagcttctggggcagcccgtggaggcccaggatgtccatgtgtcccgtgattggggcggtgttgtgtgctcagacggcc

SEQ ID NO: 5273 - DNA, 122 bp, Homo sapiens
gggcttgacttttatacatgcatcaggcaggggcaagtcgggtttttggcgcaaaacctgcgaggtgagaaagcagtcttacagaagcagaacaaaggcagttaatcataccgtgacaggtt

SEQ ID NO: 5274 - DNA, 122 bp, Homo sapiens
ggaatatctgtccaaggggtatggtttgttatggtcgtgtcatagatactggagaaggagcgatttgtgggtagtgtctcatggtacagtggaaacagctcagtcacagggtgtgaatttga

SEQ ID NO: 5275 - DNA, 122 bp, Homo sapiens
gagccagggaatcttgagctgactgttgtggtctcagccacacagtaccacctccctttgcggcctgttaccagccttggtaccttcaaggccaactgttggccaaactctctttggttggc

SEQ ID NO: 5276 - DNA, 122 bp, Homo sapiens
ggaggcaggaagcgctcccaggctcagccaggatcctgaattttcccctaaaggaagccacggcccagaccacgatctgctcagggtagacccgcgtcccaggcggccacatccgcagggct

SEQ ID NO: 5277 - DNA, 122 bp, Homo sapiens
tgatttccagcaagatcctgaacaccttagtcacgaattttatcgtgaaaatgttaagtgcgcttgttccatctatatgctgttgaccctaaaggtacacatccaactctgattactcttct

SEQ ID NO: 5278 - DNA, 122 bp, Homo sapiens
ggctcatatgagtgccattcacttaacagctctttcaaattccccagtcgatgagaagagcgaatttttcagactggcaatacgtaaggtagccactaccagcacctcaaaccagggcccca

SEQ ID NO: 5279 - DNA, 122 bp, Homo sapiens
gacgaaggtgagtgtaaatgaagggggttgggggagctacctgatgtcctccagcagatccgcctccctctgctgccaggtctgaaggatgctcagctgttccaggaagcgaagcttcacct

SEQ ID NO: 5280 - DNA, 122 bp, Homo sapiens
ttagtgttttgagatgctctatgcaaagtcctgcaagccggcactgtgccgtcccgctagcgggactggggatttgggctgctgtcccagctgggcctgaccttagtctgccatctcttcct

SEQ ID NO: 5281 - DNA, 122 bp, Homo sapiens
cctagcagcacctgtctgtggccagcaaggagaaaccagactctcacaatgaaacatcttcgtccccagttccctctcatcttggccatctactgcttctgcatgctacagattccctcctc

SEQ ID NO: 5282 - DNA, 122 bp, Homo sapiens
atccccgcccagactgcctcgggcggcagagcacgtggctccagccctggggagccatttcgctcctggagcagcgcggcaggaaaggggccacaggtcccaaacttgcgcacgccgtagaa

SEQ ID NO: 5283 - DNA, 122 bp, Homo sapiens
cagcttgctggagctgctggagccaggggcggaaggagccctaactctggacggtcccggcgagctccccggcccaccccgtccggagtgcctgtgctgcctcctgaggctgtggggcgggc

SEQ ID NO: 5284 - DNA, 122 bp, Homo sapiens
gcagtttcttcagtgcattcagatacgaggttttcctttgtttcttcagttttttgctgacgttggggtcactggctaggcggcgggcggcctccgtaatctgggactgaatggcaaactct

SEQ ID NO: 5285 - DNA, 122 bp, Homo sapiens
ctcccacatgccccacccttctggggccttcctgaccccactctgccctcctcctagctccgcctctgccagctactttgggggactaggttgggattctccacttttaccgaaggccttcc

SEQ ID NO: 5286 - DNA, 122 bp, Homo sapiens
ttcaatataagtcttcattctagaactgtaagaaaatcagacagtaattataatgtatctcgtttgttgttgtttcttggtactagagtccaacaacttataaagtatggaggtctgtgtca

SEQ ID NO: 5287 - DNA, 122 bp, Homo sapiens
ccaggtgcagaacacttaagggtcccaacatctgattgaaacacagcccacaccaaaccacgagatggcacctcatacacattagggtggctactattaacaagaacaaggatgtggagaaa

SEQ ID NO: 5288 - DNA, 122 bp, Homo sapiens
tctggagttcagcgattcctacttggacagcccagatttcagggagcgcttgcagtgtcacgagattgagctggagcgaaccaacaagttcatcaaggagctcattaaggacggctctctgc

SEQ ID NO: 5289 - DNA, 122 bp, Homo sapiens
gtgtaccccgggtcacagctgaaagtcactgtggacctgatgccaaagtctccaccgtggcgatggccgttcacagggatgcccgggtccaggcaggaatccgactcaagcgtcacacctgg

SEQ ID NO: 5290 - DNA, 122 bp, Homo sapiens
gagtgtcgcgtcgccacctccacatatccagttgcgagggcagcgctgggagccaggcagcgccggtgcccgcggaaagaggaatgagcccctgcggggccggggcgcccgcggctgggctg

SEQ ID NO: 5291 - DNA, 122 bp, Homo sapiens
agtcttcttcttttgactttggagggtaaaagaaggcttttaggcaaatgtgaagcagtgcggaagcatcctgtttggcttagacaagctagagtttacagggcactctgcatactcctgtg

SEQ ID NO: 5292 - DNA, 122 bp, Homo sapiens
agttcggcgacgctcggctaggttcggtgcggtctgggcgcggggctcggagggagtcggcggtgttcggagccgagtcggtgctccggcggagagagccgagccgcttcggagggggtcga

SEQ ID NO: 5293 - DNA, 122 bp, Homo sapiens
agctttgaaagcctgagcaaattagcaagacaggcctgcgggctcctggcacagggccaacgcttcacacttgcctggaatctgagtatttgtcctagtgttgatagtagaagaaaaggaaa

SEQ ID NO: 5294 - DNA, 122 bp, Homo sapiens
tgcctagcggacgggtgcaatccccggcaagcccgcagggggcgcgcagagcacgtcgtccggggagaactaaaactacatttcccagcatcccgcgcgccgcagacccacttccggagacc

SEQ ID NO: 5295 - DNA, 122 bp, Homo sapiens
tcggaaggggccgcgccgccgctgctgggagttgtagtccggccgtggttgggggagccgcggctcatgcgcggtgcacagaggcttgtttcacatctgtaacaacaggtgaattgggcttt

SEQ ID NO: 5296 - DNA, 122 bp, Homo sapiens
gacgggagctgggcggctgctgccggctgcagaccctccccggatgcggcggatgggtggcgtgtatccaaggctctccttgatattaactcagcctcacagtctccagcgtcccaggaagg

SEQ ID NO: 5297 - DNA, 122 bp, Homo sapiens
gggtgtgcaaagcacaactttaacagacacaatgatggggtctgactgcaaacacaaaatcgacagaatcacatgctcttgtcgtcagttactcttagcccaaaaaccgtttacttcttcct

SEQ ID NO: 5298 - DNA, 122 bp, Homo sapiens
cccaaaaatgatgttaattttcaggcttttctctccccccacacctccagcttgatgtagcggctttagcagtgaactcaaataagtctttgctttggaatacttttgttcctattcccgtt

SEQ ID NO: 5299 - DNA, 122 bp, Homo sapiens
tgttgaccgctggagtagagggtaagattgctgaaagagagaatataggtgctgagaggccggagtttggcatgcataatctatgtggctaagtaaagccatgaagaatgatggcagaagtg

SEQ ID NO: 5300 - DNA, 122 bp, Homo sapiens
taacacgttgtgatatgtgccagcttgtctgcccaggtactaacaaggcctccctgccaccgctcagtccctgccagagccaatctgcatcctcgtctccaccaattacagaggtggagacg

SEQ ID NO: 5301 - DNA, 122 bp, Homo sapiens
tgggagcaggaggggaaaggggagacaggtgcaatcagggtgggaagcttctaagtcctgcggtggaaaccagcagtcactgggtgtaagagactttccagggcttaaaaataaacaagcct

SEQ ID NO: 5302 - DNA, 122 bp, Homo sapiens
ccccaggattctgcaggtgctcatcgctctctggccggcggtcagcgctaccgctcgccacgggaaacctacccactgcatgaggcaccagctagccacgtgaggctgtttctgtacacccg

SEQ ID NO: 5303 - DNA, 122 bp, Homo sapiens
aaaggactaacaacttgattgacagaagacatcctgcaacaacaaaaaatggcaaaacaacgggctaatatctttaaagtactgtagttaaatatcattttaaaattaagaatgaaggtgta

SEQ ID NO: 5304 - DNA, 122 bp, Homo sapiens
tggtgaaaaagcaaggtgcggtgtacctggagcgaacaccatgatttcttccagccgctacgcccccagattaagagagaaagacaggcagacggaggatgggaagaaggccggacttggcg

SEQ ID NO: 5305 - DNA, 122 bp, Homo sapiens
tctcatcactcaggcgcccttagcgaatctggacagatcgaggggcgcagtcttggcttccggaccaggactttctttttttgagatctatttagctagtttagaaaaatacaccttatgcg

SEQ ID NO: 5306 - DNA, 122 bp, Homo sapiens
aattacttatattgctctcatttccactggaaatcgctagtatagtgaacaactgtatagcgaaaatagaaaataaaatatggagaccatgaactgctaagtctgtcagaggaataggtgaa

SEQ ID NO: 5307 - DNA, 122 bp, Homo sapiens
ctctgctttgtaattgttgtgaacgctgtcactgataagagtatcctagaaggtgagtatcgttatcattgctctcattttacagagagggttaaatgatttgcctgaggtcacactcccca

SEQ ID NO: 5308 - DNA, 122 bp, Homo sapiens
gtcactgaggcgagattcacctgtgctggggggacagcaaggctcctctgcaggtaggtacggactggcgcatgtttccaagtggaacttcgagacgtggaatgagccagaccaccacgact

SEQ ID NO: 5309 - DNA, 122 bp, Homo sapiens
aaagataaggccagaaaagtgggggctatttgactacagttgttttctgcctctctgggccgttcccgtccagccagccccttctctccttagctccaccgccccctcacccgcgtccctgg

SEQ ID NO: 5310 - DNA, 122 bp, Homo sapiens
ctactaagattaatataataatccttatctcgtacgctcttttaagaaccaactatttaacgtgtgaaaagtgccaggcagcaggtcctggaattgcagttaagattcttccggtcctccca

SEQ ID NO: 5311 - DNA, 122 bp, Homo sapiens
tgccgtccatcacccctttccttggctaggaaagggaatttcctgaccccttgcgcttcgcggctcaggctcggtgcactacacccactatcctgcacccactgtccaacaatcccaatgag

SEQ ID NO: 5312 - DNA, 122 bp, Homo sapiens
ccagtgctgcgctgtgcgcctgcgctcctcagcccttgggcggtagatgggatcgggtgccgcagagcagggggcagcactcatcggggagacttgggtcacacaggagcccaatgcaggag

SEQ ID NO: 5313 - DNA, 122 bp, Homo sapiens
ttttggaagccaaagctgccaacttggcctcttgcaaaacacacattccattcataagtgcgtttgtgcatttttcctcccacacccttctaggcagccagcgcagagctgccaaggcagct

SEQ ID NO: 5314 - DNA, 122 bp, Homo sapiens
cacagtcatcgctgcaaactgcaaactcgtaagcacagtcatcgctgcaaactgcaaactcgtgctccgagcgctgccctcccctgtggagcggaggaggggaggcctggggccgcggcggt

SEQ ID NO: 5315 - DNA, 122 bp, Homo sapiens
tggagggggctcaagggcattaggctgaattttaaaagttaatctctaaaggtcacatgccgcacaattccatttatacaaaattctcaaaatgacaaaatcacagagctgcagaacagctt

SEQ ID NO: 5316 - DNA, 122 bp, Homo sapiens
tgttacttcgccctgaggagtgcctttctgatcaagcactgtgagggttatcagagggtccgcggaggaaacattttgtccgcatctgtggcccgggcacgggaaacttacctgtgatataa

SEQ ID NO: 5317 - DNA, 122 bp, Homo sapiens
aaaaagaatgcaggctttttgtttacatagagttggcaggcatgcgttatccagcaaggccggaacggaagacactctcagcctcagctgcaaccacatctgggtatgcagaaaccttctaa

SEQ ID NO: 5318 - DNA, 122 bp, Homo sapiens
ccactcacgaggggccgacccgctcccttctgcgttttcatctgcatccctgggaattagcgagactttttcatcgcccatcttgacgtcaaatgaccagcctctggaacacctcttttacg

SEQ ID NO: 5319 - DNA, 122 bp, Homo sapiens
ggccattaagtgatattcaataatcaggcttccttcacccgaattcaagaaatttcctgccgtctttgtgtaataaacttttttcttccatgtgcattttaattttaacacccctccccgcc

SEQ ID NO: 5320 - DNA, 122 bp, Homo sapiens
cgccagatggtggcctccagacctggcaggggtgccctgcaaagattggatgtggccatccgtactcccaaggagtagaccctccccttccaggtgaccctgccctctagacacaccaaagc

SEQ ID NO: 5321 - DNA, 122 bp, Homo sapiens
ggttgaaaatgaagagatggtgacacgtgtctaaagctctaggggcctggaaccaagtgacgcagcgctcagagaagcagaaggagcggtggtttcttcatagagcagcaagtggtagtgac

SEQ ID NO: 5322 - DNA, 122 bp, Homo sapiens
agaaggcactttcccacccggccaggcagccacgagtacagcaccatggggagacacacccgagtcatggacacagacgcatggggccacacctggtacaggaacacgcacatgatttgcac

SEQ ID NO: 5323 - DNA, 122 bp, Homo sapiens
tgctgtggccacagccaactctctacagaccaactgcccccaacactgggtccacggaatcggtaacacagagatcaaaaccctcaataactctgcaaggaccctgacaggtttatcccaca

SEQ ID NO: 5324 - DNA, 122 bp, Homo sapiens
aggaacagtcaaggggagaaagtgcttggagagagggaaacttttacagggctctgttcccgtgaaaaagagctctggactagaaagtggaaacccagtaatcctttttcttgtccacaccc

SEQ ID NO: 5325 - DNA, 122 bp, Homo sapiens
ggctcagccccagcctctcctgcatggaatgggtaggagactgcacagccacgggtaacacggacatggctgccacttagcagaaactgtggctcctggggcctctgtgcggccagtgcctg

SEQ ID NO: 5326 - DNA, 122 bp, Homo sapiens
ttattcccacgttcgccccctttgttcagtccaccagggattgagggtggttacacgtggcgccctgaacagcgacagaatcgggcagtttacagcctgatccatctcactggggttaaatt

SEQ ID NO: 5327 - DNA, 122 bp, Homo sapiens
ttctcccgctctggcggaggctttgtcgctgcgggctgggccccagggtgtcccccatggcggggccgcgggtggaggtcgatggcagcatcatggaaggggtgagtacagagcgaagcggc

SEQ ID NO: 5328 - DNA, 122 bp, Homo sapiens
ggtggctggtcctggacagagtggtcgagggaccagggctcaggtcggttccgctgcgcccgccgtcgccgacagtgaagtaagtacagtgcgggcggcggctcccggtgagtcacttcgtg

SEQ ID NO: 5329 - DNA, 122 bp, Homo sapiens
aacctcggctctttaaagcaacacttctgataccagggttagggtttcagaaaatgcagccgccttaggagcctcattggcagctactttccactaaaacatcttccatttctctctctcag

SEQ ID NO: 5330 - DNA, 122 bp, Homo sapiens
cagaatataatgatacaaacaaacccagtgctttcagtgcttcccataggccaggtaaagcgtggtactgtattactatctctgacttacagatgaagagactgagggtcagagagatacca

SEQ ID NO: 5331 - DNA, 122 bp, Homo sapiens
ggagtccactctgcctgatcagctagtgaccaacgtagctgagcccagactcagaaaaaccgtccacagcagaggcccctgcattttctagggcgtgttctagaattttctttggtgggtgg

SEQ ID NO: 5332 - DNA, 122 bp, Homo sapiens
tcatgtcctggcaggcagcttggctggttccaggctggggccagcagactcacctgggggcgtctcggagctggggatgtaggaggaggcgggaaccacgctgggcgtggagggaaggtagc

SEQ ID NO: 5333 - DNA, 122 bp, Homo sapiens
tgcacagcgacacggcgaacagcaggaacatgcggaaggtgccgcccacctgcggggagccggcagggggtcttggccacagcccgtgcctgctcaccaccgggctctctgcactgacaggg

SEQ ID NO: 5334 - DNA, 122 bp, Homo sapiens
aacccaggcgaccctcctcctccttcatagtcactgctgaagctgggacaaagctctgtgcgccgtcactgtccccactgccccgacgtggaggtacgcatgcggcctgtccccgagagcag

SEQ ID NO: 5335 - DNA, 122 bp, Homo sapiens
agcagcgtgctggggtgctgtataaattctaaaatgccactttttggagggcatgcgttccgtccttaatctcattcctggccctcgggccagggttattttgggaggtccatggcgcctgc

SEQ ID NO: 5336 - DNA, 122 bp, Homo sapiens
gggaagcgagagagcggaggcgccgaggatccgattcactccctggggagacctatgggccgaagccgtgtaaatgcgttttaaggcgagtgcggaaagtggcctggggagcctcggggagc

SEQ ID NO: 5337 - DNA, 122 bp, Homo sapiens
tggatatacccattagaaagttattagagcaatgtctggccccccgacaaaggcgctccacgtttgcaatcatcatggcatgcctggaattgtgctggaagtattgcctagggtctcattca

SEQ ID NO: 5338 - DNA, 122 bp, Homo sapiens
agaggagccgtcaggggtccccggagtgaggatgggaaacagctagtttgaggggggcgccgctctgggggcttcccttgaggggcttctttagtgaagggacttcttggcgccttgttctc

SEQ ID NO: 5339 - DNA, 122 bp, Homo sapiens
actccgggaactcgggccccagatccttgttcgagctggtcttcagtttccccatctgtacgctgaagagcctggggtccagtaacccccatcatcacccagtttacagaagaggaaactga

SEQ ID NO: 5340 - DNA, 122 bp, Homo sapiens
cacccacaattcttttccttcctggttgagggattgtactcctcacctttcaatttggaccgaaccttgttggccgtcttcttgatgtctgcagtgagatcctccagctcctgtttggtctc

SEQ ID NO: 5341 - DNA, 122 bp, Homo sapiens
atagagatagtgatttggccagcgtcacaggcccagtaaaagggattgaaaatccaggtccgtccgaccctaaagcagggaactctgcctagtgtctcgctgtggaatgttagggatcctgg

SEQ ID NO: 5342 - DNA, 122 bp, Homo sapiens
gttcatgagggcgggacctcgacggctcctgcggcggctcagacacggctccgcggcgcccgcaggacatgctgttcctgggcgacttcaacgccgactgcagctatgtgcgggcgcaggac

SEQ ID NO: 5343 - DNA, 122 bp, Homo sapiens
agataaggggagaagcacccgaagtgggtcatttttattcttggctaacagctctggccacggcagatgctgccgcaaagccttggtttcctcataacagatatttgggcctcacttatttt

SEQ ID NO: 5344 - DNA, 122 bp, Homo sapiens
cggcggagcccccgaggagcagcagcagcagcaggaggggccggggggccatggcggggtcggggcgcaggagctgagcgctgcggccacggccccgggcccccgcaaggcccctttatggc

SEQ ID NO: 5345 - DNA, 122 bp, Homo sapiens
ccaaaccccgacccagaagcaggtcgtctctgagtgattcagcgccaggttccctacgaacgtgccttgtatgaagggcgtgggggtggctgccttttcggctgcaccccatttcccaggac

SEQ ID NO: 5346 - DNA, 122 bp, Homo sapiens
aagaacaaagatcccacagcacaaaaatcaatgctagcaggttgtcactgctgactggggcgggggtggtagccagcttttattcccttattcagccccgcccacatcctgctgattggccc

SEQ ID NO: 5347 - DNA, 122 bp, Homo sapiens
ctctgccctgctaaggatctgcagctaaggtgcaggcttagtgggagctgctgtcacagtcggtaataatattgctcctgtcagaaaatgagcacagtccctgggacacggcagacccccta

SEQ ID NO: 5348 - DNA, 122 bp, Homo sapiens
agccagaaatatggtgagctgcaaatcacttcaactacctacagtccacttgtctcaagccgtgaggagtccaagaaaagcagtccaacaataccaccaaagacccactcatcgtttttcta

SEQ ID NO: 5349 - DNA, 122 bp, Homo sapiens
ttaggtctcggcgagtttctctgatatgcgctcgcgggggtgctgccatttcatctcttccgcgcgggctcatcgtgctctcagggtctcgttgaacaaggcaacgctaagagccatcacca

SEQ ID NO: 5350 - DNA, 122 bp, Homo sapiens
cgcccagctccgggtcggaccctcgcccgggggactcgttcacgccctgcggccgttaggcgggaagagcacgacgccctgccctgccccgtcgtggcgtctgaccctctccgccacgtctg

SEQ ID NO: 5351 - DNA, 122 bp, Homo sapiens
aagggagggagacagagagaaatacttgcagagccagcaggtagctgggcagctccttcccggacggacggatggacagacgctggggaccctccactccatatggaaagtaagaggatgtc

SEQ ID NO: 5352 - DNA, 122 bp, Homo sapiens
cgtcctgggatgaataggacagcagtttgggcgccctgcgagccgcgttggccctggagacgaacctgaaccaggccctgctggatctgcacgccctgggcgcaaagcatgcagactctcac

SEQ ID NO: 5353 - DNA, 122 bp, Homo sapiens
cttttgtatttttagtagagacatggtcagccaggctggtcatgttggccaggctggtctcgaactcctggcttcaagtcatccactggcctcggcttcttaaagttttgggactgcagaca

SEQ ID NO: 5354 - DNA, 122 bp, Homo sapiens
tgggagagatccgtctcctttgacagactcaagattccaggccgaactttcccatgccaccgtccctcaaaatagccccagccgagctgtatttatagccgtgtgagactctaatgggccaa

SEQ ID NO: 5355 - DNA, 122 bp, Homo sapiens
tcctggggtccgagggcttcctggtcctgacccagtcctgcagggaggtcctgggagggtcgctagggtgaggacgctgagagcccatgtgctggaaaggacccaggaagagggctgaggtc

SEQ ID NO: 5356 - DNA, 122 bp, Homo sapiens
ggtggggtctcatcgcaggggcgccgggagcctccccgctccgctagctcaaccaaggaccgctcagaggggctctcaccctgaacctcggcttttctaaaggaagggcagaccccagattt

SEQ ID NO: 5357 - DNA, 122 bp, Homo sapiens
tggtccctgacggcggccggtgggtctttggatttctttgtgtttccccagagtgagggccgccaggctcaggccccagcgaagccccgagcgccatggccgacccgcaggctggctccgcg

SEQ ID NO: 5358 - DNA, 122 bp, Homo sapiens
atgtggccagtactcaactcactgtacttgtgagcgtctaagagttgaaatgcattttaacgcctggaattgggcatcagtttctggacctgccatgatttcaatctagccaaagccacaca

SEQ ID NO: 5359 - DNA, 122 bp, Homo sapiens
acaggcactactgtggcataaggctttcatctgctcttatcacaacactctcttgctaaccggccagggcagggttaggccctaaactgtgcacaggtcattggttgtttgaactcctaatc

SEQ ID NO: 5360 - DNA, 122 bp, Homo sapiens
agtcgcgcccccaaccccggaggcctcgggctgaaccgggtttcgcaggagggcacagggcggctcccttttcctcacctgggggtactctctttttaagtcataggaacagaagcatctgc

SEQ ID NO: 5361 - DNA, 122 bp, Homo sapiens
ctgcgccagcctataggaaggcggtagacagcctataggcgctgtctgcgggcgggggggcggagaccgcgctcgcgaagagcccgcggattggcaaggccgagggaggctgcgcgccggcc

SEQ ID NO: 5362 - DNA, 122 bp, Homo sapiens
ggagttggtggaccctgtctctgccccttacaaggagtgttgctgaggaaaccagagcaccgagcaaaggcacagggggaaaaggccaagcaatcgtattgacatcattccacacctggaga

SEQ ID NO: 5363 - DNA, 122 bp, Homo sapiens
atgcctgctaaaggcagatggtttggtactagtggcaactttaagctaaccacccatttccggaggtcttcttaactgcctgtttcccagctagaactcttttgaagactcttggtataagc

SEQ ID NO: 5364 - DNA, 122 bp, Homo sapiens
tcactgcatgcaaggcctggggcatgcagggtccacgtcagggccagctcgctgggggaacgcatgctgtcagcacgcagctaggacagagaccaccggatgttcccacctggccactgatg

SEQ ID NO: 5365 - DNA, 122 bp, Homo sapiens
tccttctggaaacttattgatggccaggctattcagtggaaatgggctgcctcttgtcttcggtttcagaaaccagtgcactaaacacgtgggatgaagcatcaatggaaagaaaatacacc

SEQ ID NO: 5366 - DNA, 122 bp, Homo sapiens
cacccggacccagccacacagtgagttatgccttccatgctgggcgtgtgagagcccagccggccttggtcttgggcaggcaggaggccaggacagtggcagcatattaccttgctctggaa

SEQ ID NO: 5367 - DNA, 122 bp, Homo sapiens
tgttttgccccaactacagcacactgggatgagaaattccaccacaagatggtggacaaccgtggcttcatggtgactcggtcctataccgtgggtgtcatgatgatgcaccggacaggtag

SEQ ID NO: 5368 - DNA, 122 bp, Homo sapiens
agcaggtggactgcagggccagcgagcctcccaccccagccctagtcccccaagactcaccggaacctggaactcctggactatggagtgagtcccagagtgcttgggtctggaaagagttg

SEQ ID NO: 5369 - DNA, 122 bp, Homo sapiens
ccataaaatgtgccacataaaacacttttgtataaaatgtcacattttagtaaaaataaacgaacaaagaaaaaacctaggctgaaagcaggaggtccaggttagagttttgatcctaccag

SEQ ID NO: 5370 - DNA, 122 bp, Homo sapiens
gccatggcccccgaccttcatcactgctgaggacacaggtgtctgttccccatccctggccgttgccccctggctggcatcactgctgaggacacagggtcccccatccctggctgtgaccc

SEQ ID NO: 5371 - DNA, 122 bp, Homo sapiens
cgtgcacacgccgccagctggctcgcgcgttttccacggagccctctggaggggagggagcgcggttcggactagcctctcccgaacaccaagtgccgctcttagccccgtccagcccgccc

SEQ ID NO: 5372 - DNA, 122 bp, Homo sapiens
catcgtattttcaaggagtcaagggcagattccacgtgccgtcttctgtattgcaatcaccgaaggtgtttggcggggagcccatggctctgtgtcttcctaagtttttgtgctttttcctg

SEQ ID NO: 5373 - DNA, 122 bp, Homo sapiens
taccgccgcgcccgcaaggtcagcgcgcccgcccagagcccgagacgtcggcccgtgccccgccactcacctgcagcccccgctgcgcgctccgccggcccggccctgacccactttccgcc

SEQ ID NO: 5374 - DNA, 122 bp, Homo sapiens
aacagaagaaatagcactgctatttgttagaactgctcgaccacatggcttcatttacatcgttacattgggctgagttgtggggctgaggttaaaagtttagtcttcagacaaaacaggtg

SEQ ID NO: 5375 - DNA, 122 bp, Homo sapiens
aacactaagtaaaagggtgctactattttgaacactgtaactacagaaatacagtcagttcgatacatttgtacacacaggcacgtgacagtcacggggaggtggctggtgggctctagcgg

SEQ ID NO: 5376 - DNA, 122 bp, Homo sapiens
gggcggtgccaagcgtaggaagatggttgggaactgcgtctcccccaaggctccgcagggcgccgctgactggcggaagcgagggcggggacagcggaatgacgttttaaggacgcttgcgc

SEQ ID NO: 5377 - DNA, 122 bp, Homo sapiens
cctcccacctcagcctcccaaagcgctgggactatataggcatgagccctcacacatggccgtcatccattcttttactcaggtatcaatgtccttatttttaaaatcaaagtaactaagac

SEQ ID NO: 5378 - DNA, 122 bp, Homo sapiens
ccgcgtcctgctccgccgttctgggacgtcggggacaaaagtggaggagacgggagagcccgggcagaaaaagcaggacgcgcgtcccaggtgcccacctcttcgctttgaggcgggggcgg

SEQ ID NO: 5379 - DNA, 122 bp, Homo sapiens
acgggcaccgagagcgtgcggggcgaggtggagcccagacgcagcgcccccaggcgcacgcggtactcagctggcagtgccctcctgcaggacaggagcgggggactacttccagcaccggg

SEQ ID NO: 5380 - DNA, 122 bp, Homo sapiens
gcgaagagcacgtgggaacaggcaggagctgggccgctggggctgggcctgccccaggggcgtctgctgggagcccttcgagtaaggctgggagggaggatgcggaccagcagtgctgcata

SEQ ID NO: 5381 - DNA, 122 bp, Homo sapiens
ctgactgtctggccaggacccaattctggctgctcagaagcctgctcaaatcactgaccacgtgtccctctcccagcatcccctaacacgccccaagacacctgccctgtacaaaagaggac

SEQ ID NO: 5382 - DNA, 122 bp, Homo sapiens
cggctccaaggctggcgcctgctcttcttcatctccctccccggcccttggcaggagcctcgccctacattggctcttcaagtccgggcgtccccttcatgtgggagacacagcccagacca

SEQ ID NO: 5383 - DNA, 122 bp, Homo sapiens
tcgccaagtgaggacagagggtctttctctggggtgtgctttatttcatatgtgctcagccggcctaccctggctcttctaatacatattaatgcttttctctccctgacttatgaggacag

SEQ ID NO: 5384 - DNA, 122 bp, Homo sapiens
ccaagatcagcctggagtttccgtgctcccattgggcccacagatgttaatcagagcagccggcgctcagctccgccctctcgggacgccccgcccctcctcccatcctccctgcccgcgcg

SEQ ID NO: 5385 - DNA, 122 bp, Homo sapiens
aagtcaaagaaaaagggcacctacaggaacagccaaaaaggtggcctcacaggtacctgccggagcgccagcagccaggttcaacagcacagagagtgaacgccagaacagtaagagagctg

SEQ ID NO: 5386 - DNA, 122 bp, Homo sapiens
gggtccagcacaggcctgtcctgggaacatgagcagcatggacaacgcggtacaacggggcgagagcgccaaccgcggacaacaggaagggcgtgagtgagggccaacgcacttccttcttg

SEQ ID NO: 5387 - DNA, 122 bp, Homo sapiens
atgaactggtttctatcgattctacagcacaaggtgcgtgacatggatgcgaccatctggcgtgtgaatgcacagatctgtctgtgtgtgtatgtttgcatcttggtcataataacactaag

SEQ ID NO: 5388 - DNA, 122 bp, Homo sapiens
cactatatcactacaacaccagggagagagagagagcccggggtttctttctcttgaaaacgaccagtcactggagcagagctgtttgcccatggagatgagttttatgtgagccaggttta

SEQ ID NO: 5389 - DNA, 122 bp, Homo sapiens
gcccagaatggaccattctccccagggtccacggaatcgcacaagtcacttaggttctcccggatccctgcagagtcggtggtgggtacagcaaatactcaggtcccctgcacttccctgag

SEQ ID NO: 5390 - DNA, 122 bp, Homo sapiens
atggatggagctggaggccatcatccttagcaaggtaatgcaggaatggaaaaccaaatccgcatgttctcacttataggtaggagctaaatgataagaacttatgaagacaaagaaggaaa

SEQ ID NO: 5391 - DNA, 122 bp, Homo sapiens
ctggcacggcaaagtcttgcctggttacaggcctgtgctctccaggcagaacaagcgcagcggcctggcccctctcccgccggtggacatcaggcggtgtccaggtaaagctgctgtgagca

SEQ ID NO: 5392 - DNA, 122 bp, Homo sapiens
ctttatcttagtctattcaagccactataaaaaaattaagactgagcggcttataaacaacgaacatttatttttcacagttctggaggctggaacatccaagatcaagacactggaagaag

SEQ ID NO: 5393 - DNA, 122 bp, Homo sapiens
actgccagactactttgtggcgctgggaagcctgtttcaaagtgctgggcacatgggccacgcctgtctgcgactgctcagtaaactgacttccagggcagagtgccctctttgaactttgg

SEQ ID NO: 5394 - DNA, 122 bp, Homo sapiens
aaattaaactggagaaggcactgagggtgcagcagagctctgagagcagcaccagctccccgtctcaacatgaggccactccaggggcaaggttgctactgcgaatcaccaaaagaacatgg

SEQ ID NO: 5395 - DNA, 122 bp, Homo sapiens
gagtgggtgcgcgtccaggaggcgctgcttctttgcgggagtttggctgctgcgttcattcgtcgtctgcgcttcagatgcacggcactgagacccttgcgtccgacggtgtcggggctgtg

SEQ ID NO: 5396 - DNA, 122 bp, Homo sapiens
atagaggcgggcgtcaagtgtcagtagtcgcggggcaggtacgtgcgctcgcggttctctcgcggaggtcggcggtggcgggagcgggctccggagagcctgagagcacggtggggcggggc

SEQ ID NO: 5397 - DNA, 122 bp, Homo sapiens
tcatcaaacagatgtatcctgttctgacatattaattaaggcatctaatcacattgctcacgtgccacacctatgctctgtgatcagtgatttaatctaataatattttaaattcattgaaa

SEQ ID NO: 5398 - DNA, 122 bp, Homo sapiens
aatgaaaaacccctgcgagccctgcggggcggggagggagacctggtgtgtggtgctggacgcttcctgagcacctccctgcacagcctgcctctggagtttctcgcgcatggcggtaagca

SEQ ID NO: 5399 - DNA, 122 bp, Homo sapiens
cccgcccaaggcctttgtctccagctgatagattctgctccatttctggcatcagtgaaacgcctgaacattccacagcccaaagccgaacactatgcatgagataaacttacctcaagctc

SEQ ID NO: 5400 - DNA, 122 bp, Homo sapiens
gcctggccgcagctggcttacagcctactgcctttacccaggtcttattcccaggaggtgcgtcagggccccttgcccaccgtggggctgcactgaaaaacagtggcccgggagcaagacag

SEQ ID NO: 5401 - DNA, 122 bp, Homo sapiens
tctggggacagtgacaaagcccacagaccctgatggtgtctttgatatacagccacaatacgcattttgacaccgagtagatgcttttagatgatgaaatcagtggtttgaattgaggcatt

SEQ ID NO: 5402 - DNA, 122 bp, Homo sapiens
caggaggccaaggcaggaggatctcttgagcccaggagttcctggctgtagtgtagtgtgcgatgttaatcaggtgtctgcactaagtttggcatcagtatggtgacctcttgggagcctga

SEQ ID NO: 5403 - DNA, 122 bp, Homo sapiens
actgccgcgaatgtgtgggacacccatcatcttaccacatcacatcgtcactgccgcgaacgtgtgggacacccatcatcttaccacatcacatcgtcactgccacgaacgtgtgggacacc

SEQ ID NO: 5404 - DNA, 122 bp, Homo sapiens
tgaggctacagagtggtgggtatgaattttcacggaagactgggactggggagaaagcaacgagctgtgccagaaggagccagaaaggtttcagaaaggatgttctgttggggatgctattc

SEQ ID NO: 5405 - DNA, 122 bp, Homo sapiens
cacatctcaagctgaggcaaatccactctccagcccaagcgcaaccctgaccctgatctccgaccccagaccacttggaggcccctggagcctcttcctgggctgttcagaggcatgatcca

SEQ ID NO: 5406 - DNA, 122 bp, Homo sapiens
ttctaggttaggaacaggtaaagcccagcaccatgaacatactgctgatctaccgcgcggcgctctatagactcccaggctcataggagcccatccaaagacgcgcgcttactcacacacac

SEQ ID NO: 5407 - DNA, 122 bp, Homo sapiens
caactctagacttcacggggacagtcgcagggtcactccctcagccaccacctctccagacgggacgagctaatgactcccgactcctgctccatgcctgcaccgcacagcctcgcagcgag

SEQ ID NO: 5408 - DNA, 122 bp, Homo sapiens
ggccttggcccccaaagaaagccactccgacgtgtttgagatgggcttagttcccggacccgtcctactgcccccaggcgctggacagcctcagaaagaggacaagtctgcatggaaagata

SEQ ID NO: 5409 - DNA, 122 bp, Homo sapiens
gccgcttgactggaaccagcggcaactctgggcccttacgcttctgctgttctatcatggcggcaaccggtctcttcagcgccgccactgaccgcgctgccgctctcaggcgccacgcaatt

SEQ ID NO: 5410 - DNA, 122 bp, Homo sapiens
cagcgagtgagtgggctccgtgcccagctgaagtctgggaggggcacttttccaggcggtcgcggctccccctggcggcggatgtgcctcgctggaggggcgcagtcaggcgttctccgcgg

SEQ ID NO: 5411 - DNA, 122 bp, Homo sapiens
agcaaagcttggttcataaagtgaagttgagtgatactgagcctaccacactggcctactcgccacctccagagctatctgaagtcagcactgcaggttctgtgaacatttgggaagctgtg

SEQ ID NO: 5412 - DNA, 122 bp, Homo sapiens
tgaacccaggaggtggaggttgcagtgagccgagatcgcaccattaaactccagcctgggcgacaagagggaaattccgtctcaggggaaaaaaagagaaagaaagaaaaagaggaagaaag

SEQ ID NO: 5413 - DNA, 122 bp, Homo sapiens
cctgaagcctccatgctggagagggcacatggagaaaccacacacacacacacacacgcgcgcgcacacacacacaaagatgcccaaggagcccagtggctccagccccaacagtttgtgtg

SEQ ID NO: 5414 - DNA, 122 bp, Homo sapiens
gcggggcgcagcgtcggcccggcccctcccgctgaatggctaccctccgtgctccaccagcgcccaccccaggccaaggctcccggcagaaaggagggaaagaggacgtactgccatctgct

SEQ ID NO: 5415 - DNA, 122 bp, Homo sapiens
tactctgctctgggtggtcattgtgaaaagcccgcaccaaccatgccagtggcagccagacgaggacacagcctggctctgggtcccagcaggaaaggcaatcccagaaaggcagggtcagg

SEQ ID NO: 5416 - DNA, 122 bp, Homo sapiens
ccgagcacccttgggctctagacctccatgttcttatttgtaaggcatagagaccattcccgccctgggctgtcacaaggatttaaccccatcgcctatgtgacatatacctcccaccccaa

SEQ ID NO: 5417 - DNA, 122 bp, Homo sapiens
ctagtttgtatttcctgcattggggaactgaggaagggtgtcaggaaggtgactgtcaaacgcatgtgcacaaaagggctggtgttcttgttggtttttcttatgtgcttcacacacagtag

SEQ ID NO: 5418 - DNA, 122 bp, Homo sapiens
atggtgggacggccttgacgccacggctgggtttgcatgctagcagcagctggcatggatcgagctcttaggatgtgccgggcaagggccgagcctacacatgcaagaacacatgcagtcct

SEQ ID NO: 5419 - DNA, 122 bp, Homo sapiens
cagcaaacagtattgatggattcggggaatgccatttgacagttacaggctcccgtgaggcggtgcaggctcctccgagccagggatggagctggggattgagtgacacaagactctttggg

SEQ ID NO: 5420 - DNA, 122 bp, Homo sapiens
taccagatgctgagcttcctagataagcacttctgtatgcccactactttgcacagtgcccgttagccagggatgctcactatgtgttgcttcaacaaataaatgaatgtggtggattgtag

SEQ ID NO: 5421 - DNA, 122 bp, Homo sapiens
tggagagtaaagagcacgctagcatcacgtgcggccaacctggccacgagctgctctccccgccctccccgcacacgtgtcccttcagggagggagaggaaggtcatgacctggctgcgctg

SEQ ID NO: 5422 - DNA, 122 bp, Homo sapiens
aacaagctgccggctccggtgttacggagccagcaccagcgtctccatttaaagggacagcgcacccagtggaaaggaaaataaataaatgacagaggtctgcacgcatataccacttgcca

SEQ ID NO: 5423 - DNA, 122 bp, Homo sapiens
cggaggccggggttgcaggcgccagggcctactcaccgggagctggctaagcgtgggagccgacgtgcgccccggcctgaggagtgggacgcggccacggcgcgcggccctacaccgggacc

SEQ ID NO: 5424 - DNA, 122 bp, Homo sapiens
gaagtccgaggggagcggctgggggcagctgccacagcacatgaggagggctgcaggcaccgctgctgctgtccatcaggcgggcaaacggacagagcccccacctccacacaccaggctta

SEQ ID NO: 5425 - DNA, 122 bp, Homo sapiens
ttgaaaaccaagtaaaccagttctcttctaaacatttctcaaaaaaaggcaatccagttacgtctgaggaaacctcagtgtggtttcctgtggcttttcacatgggtttgtagtggagggct

SEQ ID NO: 5426 - DNA, 122 bp, Homo sapiens
agttatatctgtattggaagattgtaatcaacctgttaatataatctctgactctgcttacgtattccaagctgccaaaatggtaaaaacagctttagtaaaacatatttctgatgatcagt

SEQ ID NO: 5427 - DNA, 122 bp, Homo sapiens
acggccaagctcttttcagtgccagactttgtaggtgatgcctgcaaagccatcgcatcccgggtgcggggggccgtggcctctgtcactttcgatgacttccataagaactcagcccgcat

SEQ ID NO: 5428 - DNA, 122 bp, Homo sapiens
acacctgctccttttctccagggctatgtgtcctctcctgctcacctctgtgtctcactgcgggcccctcctgtctatctctgctccccagtgtttggggtccccaactgtctgtcacccgt

SEQ ID NO: 5429 - DNA, 122 bp, Homo sapiens
aggcggcgggaggggcggtcagctgctgctgtcactcttcccccctcggatcctgagtgacggctcggcctgccacctcctcagccgcctgctcggaagtacacagcttcccgtcagagcgc

SEQ ID NO: 5430 - DNA, 122 bp, Homo sapiens
ccacacagcacactgatgcttgggcagggaatgagcagggagaagggatcttaatgacgacgggaccaactcagtgcaggcttgtttcctgagactcagcccctgggtcatacctgattgcc

SEQ ID NO: 5431 - DNA, 122 bp, Homo sapiens
caccctgaattactctaacattacagggcagacttccttgagaagagtcagaccctgcagcggggctctgccttcccactgtcagcctcggggtcatctagctttatcgatccccatggagc

SEQ ID NO: 5432 - DNA, 122 bp, Homo sapiens
cagggccacaagtgtcctcctccatgcccccttgtgacctgggacgccctgactagacctcgaacagtgcccagtggagcccagcaaggagctggggagtccacacactgtcccgtggccac

SEQ ID NO: 5433 - DNA, 122 bp, Homo sapiens
ccttgagcagcggtaaacggtcccatcgcaaaccggcatgtgtgtttggttaggccaggtcggcaggggtcagggctcacctgaggccagcggtgcggggccgacctgcctgagcgaggagt

SEQ ID NO: 5434 - DNA, 122 bp, Homo sapiens
aacgcgccaccctgggtgtctataggctcatctggccctgctgataggccctgcccaggacgggcgttcacagagcaaagtgtgttttagagttattgtcaaaaagaaggctctttgtactg

SEQ ID NO: 5435 - DNA, 122 bp, Homo sapiens
tcagaatacacaaaggagagatttccgtctaagttttgcctcctgatcatttcttcgaggcgttcttctctttcgtgcctaaattctggtactttcccagatcttgtcagaagaggacaagg

SEQ ID NO: 5436 - DNA, 122 bp, Homo sapiens
ggtgggtgctcaccctggtttcctggttacagcgtctctattccggacgccagttctctgcgcgcttgcttctgattggagagactttttgtttgtaatcagctgtgccacggcaaaaccgt

SEQ ID NO: 5437 - DNA, 122 bp, Homo sapiens
gtccatccttcacttccctttgatgatcttttgtgtgtgcggtactcattccagccagtgcgtttgaacggcgcttgcagtaaaagctgggagagttcgaggtcgccacctagtggccagca

SEQ ID NO: 5438 - DNA, 122 bp, Homo sapiens
ctcgtggttcgccgtttttttagccggtctgaaaagcacaatattcgggtgggagtaacccgattttccaagtgcgtccatcacccctttctttgactcgcaaaggggactccctgacccct

SEQ ID NO: 5439 - DNA, 122 bp, Homo sapiens
gccctcccctggaggcttcggagggagtgtggccctgcggacacctcgatctcaggcttgcggccccagggctggaggggtcgcgtttccgtggctttagctcccagttcgtggctctttgt

SEQ ID NO: 5440 - DNA, 122 bp, Homo sapiens
accccggccaccccggctctcggtttgggttgattcctctcctttttgctcttggttttccgacgggtacgaggctggcccggcaccctgtcccccgggagcctcactcttccagcaggacc

SEQ ID NO: 5441 - DNA, 122 bp, Homo sapiens
cctgtctgcttctccaggcccatctcagctcacacttgcccttgttccgtggcagggttgcgtgctttcatttcctcagactcactcactgccttcttctatagggccctcacatgctccct

SEQ ID NO: 5442 - DNA, 122 bp, Homo sapiens
agttcttctccatcttcagctagagggaggctggggatcccagctctttagaagccggcccgtggacgcccagagaatcccttcggagaccaggtcagggtcactgagcttgcccagcaggg

SEQ ID NO: 5443 - DNA, 122 bp, Homo sapiens
gtggccttcccaaagatccttagacgggtggagagctgaggggtaaggaagaacccaattcgaagtcttgatgataaaatttctcagcatggcttagaaggtttggagccatacagacctaa

SEQ ID NO: 5444 - DNA, 122 bp, Homo sapiens
cgcctgagacgcgcccactcctgcccggacttccagccccggaggcgccggacagagccgcggactccagcgcccaccatgcgcctcaacagctccgcgccgggaaccccgggcacgccggc

SEQ ID NO: 5445 - DNA, 122 bp, Homo sapiens
tgacagatacccctcctgccggcgcttagaaatatttactctccccccgacgccctcaaacggtgctccccgcgcacccggcaggatctcgcctgaccttgttttccttgcgagttcgggca

SEQ ID NO: 5446 - DNA, 122 bp, Homo sapiens
cgtctccgaagcccgtttcttgccgggatgcctggaggaagtggtttctgggtctgaatccggtgagcgcggcctcgtcctcttcccgccaactccccgccctcgaggagcgcccgcctccc

SEQ ID NO: 5447 - DNA, 122 bp, Homo sapiens
ttatttatttattttagaaacagggtctggctctgtcacccaggctggagtgtagtggtgcgaacatagctcattgaagctgcgaactcctgggcagtaaagatctcccacttaagctccta

SEQ ID NO: 5448 - DNA, 122 bp, Homo sapiens
acaggtgtgaaccaccacgtgtggcctttagcctttgcattcataattttagtttggaagcggtgaaattttgagatttggcataattctgtcatctttagaggcttgtatttagatttgtt

SEQ ID NO: 5449 - DNA, 122 bp, Homo sapiens
attccaatggatggtgatcaggtcatattggttgttaactatgttgaatatcccttcccacgaaacttccatcttcaattatagtcgctccataattctgttaaagaaataagtgttaaaga

SEQ ID NO: 5450 - DNA, 122 bp, Homo sapiens
gactttacagtttataaagtgatttctcatcctttctcctttcttgtattgcacaaatatcgaacgagaacctgcagtgtgccactgtgcagggtgcctagaataaaggagaaaagccactg

SEQ ID NO: 5451 - DNA, 122 bp, Homo sapiens
tgcagtaatcccagacatcggtgccccacggacgtcgccatcttgtctgctccttctcagcgtgccacgcccccttcacacgctgggcgcacgcttaaggcgtcacgagtctcgagttcagt

SEQ ID NO: 5452 - DNA, 122 bp, Homo sapiens
cggaaagaactaataaatgcatggggggatggaattagaaaatcgcggctgcttcatgcgcgtgcctgctcttaccaagtcacctcatgatggccagcaagcagcttcctgagggaggagag

SEQ ID NO: 5453 - DNA, 122 bp, Homo sapiens
ctgcatcctttctgtctctcccacccacttccaccgagatggaaaagtgaacatccagggcgggaaacgagtgtttctccgtgccggtattccagaggccttagcccagggagactcctttc

SEQ ID NO: 5454 - DNA, 122 bp, Homo sapiens
ggcctctccgctccgccgccgccgccgtgagcgagcacgtacgcacggaccgacgtcctgcgtcgcttcccagctaccccctgggctccgcccccaggaccgcgcgcgccaccacgtgctca

SEQ ID NO: 5455 - DNA, 122 bp, Homo sapiens
actctgccccacttggtcaccacactattgcgaccttctgcagagcttccccagctcctccgtatccaaaacagggctttgcacccagcaggctgtcagccctggtacaataacgttaagct

SEQ ID NO: 5456 - DNA, 122 bp, Homo sapiens
catacgaatacaaagtggtcaaatcgtctttccgaccactcgctcctttgtaaaccaaaccgaggcttccatgaggttgcgggtgatgcagatgctttgaaaatcacgtttctgtagcaact

SEQ ID NO: 5457 - DNA, 122 bp, Homo sapiens
agcgcagccgggtgggggtgccccggcagcagggccgggaggggcgtggtgggggggcctcggcagcgtggcagaggaggagggaccgcgctgagcggtggccgcggaagaggccaggcccc

SEQ ID NO: 5458 - DNA, 122 bp, Homo sapiens
aaagcatcctcataaaggtgcacacagtacccacaaagtaagccctgaatctctaagtgacggttggctaatggtgttggccgagtttacaaaaaaggaaagctgagcgcaggtgatggggt

SEQ ID NO: 5459 - DNA, 122 bp, Homo sapiens
gaaacctcctgaaggcaaggattgtgtctcaccattgccctatcttcccaggtccttggtcggcacacacccaggacaaatgacaagctcatggctcaccctcacacagcatggcaatggcc

SEQ ID NO: 5460 - DNA, 122 bp, Homo sapiens
ctttgatgcagctatggcggctcccaggccccggtgcagccccggatggtgtccgactggcggagcgcacacctgaacaaaaggttcccccggcggaaggttccgcagccccagagtcccct

SEQ ID NO: 5461 - DNA, 122 bp, Homo sapiens
agggggaggggagaggacggctgggcaagggaagggagggaggagggccctgggctttgtcgctttcagggaactctgctgccatagcaatgggcctttctaaggcctgactttgattccga

SEQ ID NO: 5462 - DNA, 122 bp, Homo sapiens
aggctaactgggtgggtttagatcttctccatttatgttcctgctgggcccaggctaaagcgggcagtggctgcttagggcatgctcttatggcaggccactggaatgcaagatccaagcca

SEQ ID NO: 5463 - DNA, 122 bp, Homo sapiens
gtctgctggctctgaaccatgtcctaaatggtttccactgcgcacagcttcctctcagcccgctctgagctggaagcagcatgtgggacctggccctgatcttcctcgcagcagcctgagtg

SEQ ID NO: 5464 - DNA, 122 bp, Homo sapiens
gaataaatacaactgcagtggggctgcttgtggtttccaaacgtcggcagaggctggagacggctctctagtgctgggtgtggagtgaggcaccacccttgccctgaagcctggggcactca

SEQ ID NO: 5465 - DNA, 122 bp, Homo sapiens
tcctctttaccgaaagaataccggcttagagaccatcaactcatccgttcactccacgagcgtccagggagccgcgctctgtgccagcctcgaggggcatccgggtgctgcctcccgatgtt

SEQ ID NO: 5466 - DNA, 122 bp, Homo sapiens
tccgattggccctcttggaggccctcttggaggcccggagcgcgtgacccgaacgggaagcggactggctggggtgaagaagggactggcaccatccttattgggctttttgattggccgcg

SEQ ID NO: 5467 - DNA, 122 bp, Homo sapiens
cccgccctctccgggctgaggtggctgctgaggctggggctgctcctgaggcttcagggccgcccgctgcacggctttctaccttcccaggttagccgcggtcaacttctgccaggcggagc

SEQ ID NO: 5468 - DNA, 122 bp, Homo sapiens
ctggggctcgagagctgacggactgccctttccaggctgccccaagggcctgggaggctgcggtaccgcctgtcggtcccggtcccgagcgcgcttgcttaagagttctcaaagacggggtt

SEQ ID NO: 5469 - DNA, 122 bp, Homo sapiens
ggactatgtggcagcctgcaagtcccagtgcggcgctgatttgtgtctaaattagctttccggaggactatttcaaattactaaagagataggaggcattgtttattatgtctctcccgaaa

SEQ ID NO: 5470 - DNA, 122 bp, Homo sapiens
gctgctggcacatcctggtggccaggtcaccccttcgctagacaaaggcccatggcagcacgcaggtgcattcaggacacccccgtcaccaccctcgtgtgtgaccgggaaggctcatgatg

SEQ ID NO: 5471 - DNA, 122 bp, Homo sapiens
tttccagacacatcagccacacaaggagctgacaagacctgctgtttctattatagagaacgtgagactttaaaaccacatcaaaagaaaatggtgggagcttttctgctatgcagagaatt

SEQ ID NO: 5472 - DNA, 122 bp, Homo sapiens
ggcagtgccagctacctttcgggaatcaccttgggcagaaggcctttttgcaaaaagactcggcagcccgggccccgtaggttcggcgcatgcgcagcgcgctcggcgcccgggttccttcc

SEQ ID NO: 5473 - DNA, 122 bp, Homo sapiens
ggttgcagtgagccgagattgtgccattgcactccagcctgagcgacaagagcaaaactccgtctcaaaaatagaaaaaagcagcaccctcacctgggcccccagccttcccctctcccacc

SEQ ID NO: 5474 - DNA, 122 bp, Homo sapiens
ggatgtttcctaggaccacaaatggggacttaaaacagcagaagcttattctcacaggcccggggccagagtccagaatcaagctgttggcaggcttggccacttctggggactcagcccca

SEQ ID NO: 5475 - DNA, 122 bp, Homo sapiens
ctcaggcaatcctctcacctcagcctcccagagtgttgggtttataagtgtgagccaatgcgcccagcttgtacagttgaaaagggtgaattttacagtgtgtaagttaaatgtcaatcatt

SEQ ID NO: 5476 - DNA, 122 bp, Homo sapiens
gcgggggactctggcaggctttagtgacgcgaaaagagcgctcccgggtagggaattgcccgggtggaatgcctctccagagcagggcatggtagggccccgcggaggattaacgcagcgga

SEQ ID NO: 5477 - DNA, 122 bp, Homo sapiens
acccaaacccacagtctaaccctgatgccggaagccttccccactcaacagcaggcattgcgtggagtgaaagaagccaggcatgatggacagcttcctgtctgaatcccctcatatgaacc

SEQ ID NO: 5478 - DNA, 122 bp, Homo sapiens
tttggaaaggacaggaatacaggaactaagcgagaagcaggcgagaatggcgaggcgcggcgggagaggacggaagttggtcactccctcgaattgccccctcgctgccggatgctaggcca

SEQ ID NO: 5479 - DNA, 122 bp, Homo sapiens
tcttcccgcgagtcagaagcttcgcgagggcccagagaggcggtggggtgggcgaccctacgccagctccgggcgggagaaagcccaccctctcccgcgccccaggaaaccgccggcgttcg

SEQ ID NO: 5480 - DNA, 122 bp, Homo sapiens
gggcccacttcagacgccggcgtaaacgaggatgcgcctcctctcgtccccgtgctcagccgcctccctggtgtctaagttcggagcacagcagcttaccctgcctgaaaagcggaacgaag

SEQ ID NO: 5481 - DNA, 122 bp, Homo sapiens
ggagaggcgcggcggcggcgggagcgcgaacggctggagctgggtgaggggcagtgccggcgcgggggcgggagcgggggcggagaggggcgcttctggaggggcggggtctacgcgagggg

SEQ ID NO: 5482 - DNA, 122 bp, Homo sapiens
gctaaatgtacgcttaccttgtgaccccagaaatttcacttcaagaggaatgagtgcatacgtccaccaaaggcatgtgcaagaatgtccatagcacgtttattcgtagtagtaaaaaactg

SEQ ID NO: 5483 - DNA, 122 bp, Homo sapiens
gttcaaaataatcaagttctgcagaacgaagctgggctgtggctggggtcctgaggcctccgcggggctctcaccccgtgcaggcagggggctgcaggcaggagtgaggcgcggagatgttt

SEQ ID NO: 5484 - DNA, 122 bp, Homo sapiens
caggctataaatagacacacccatgcaacattcgacttgccagtcactctacctccctcccgtagaggaaatgcatgggttaatcccattctggcgcattgcaatctgagtgctgtgaccaa

SEQ ID NO: 5485 - DNA, 122 bp, Homo sapiens
tggctcctcccggacgcaaaagcggcgccctcgctcgggctcctgaaaacctcgcggccccgcccacggaagggcccgcccacctgccaggccacgcccccgtctcggccacgccgcagctc

SEQ ID NO: 5486 - DNA, 122 bp, Homo sapiens
cccatcttcaggacccagagtttatgctaaagtaaaattgccggaggtactgggagcccacgctcgggccttctccaactttggccaatacttgagcgacgcgtgtcatagaaacattttgg

SEQ ID NO: 5487 - DNA, 122 bp, Homo sapiens
tgcagagaccgagcccggaacgtagccagagccggaatccgaggccggcgagggctgggtcggagggcttccagaggccatggtcagcaagactcggggtagcaacaaaaggcgggaggcca

SEQ ID NO: 5488 - DNA, 122 bp, Homo sapiens
catactctctatagctgcttttgtgctacaaaggaagagttaagagttaagcagctgtgacggagtttgcagatctctgagttagaactaaaaaagccaatatcagaaaggagaaacagcca

SEQ ID NO: 5489 - DNA, 122 bp, Homo sapiens
gactatataaccccagagggactgccccatgctgactccttgcttctttccagccggagccgctgccttgccccccggagactgaagacatggtgagtgagaatcctccaacccctgcccag

SEQ ID NO: 5490 - DNA, 122 bp, Homo sapiens
acagggctgctcggggtctggggtgccggcccccacctcagcagggacaccctgctccaccggccctgctgtttccatgcggcctccaaagcctccggcctccggggtcacccttcgggagg

SEQ ID NO: 5491 - DNA, 122 bp, Homo sapiens
gtctcaaacatgcgtacaaagaatattcagaagcagaagcaatttctgaagagcgaggcccgggactgagttggcgagactcccagttcgagtgagcgaagccagggtggagggctccggac

SEQ ID NO: 5492 - DNA, 122 bp, Homo sapiens
attcttaaagagacaggcgcctgcccaaccccgccgcccaagtttgggaacaaaacgcgacggtgttctagagctttccagagggagcactgtagattgcatatgcctcttttgtgttcggg

SEQ ID NO: 5493 - DNA, 122 bp, Homo sapiens
ctgaagtgagtaagggaggtaattgctgtttctgtcttatattatgaggaagctgaagctcggaaagactaagtaactttcccaaggccacacatgggttaaagacctgagctcaggtcttc

SEQ ID NO: 5494 - DNA, 122 bp, Homo sapiens
tccagtagcctccagggtatccatccctacttcccaccttgacccggagccgatcgagcacgcctctgacatctgcgcaggctgctgtgcctctagcttcctgctctctgactgcggctgcc

SEQ ID NO: 5495 - DNA, 122 bp, Homo sapiens
ccctttaaagaccgcctcacggggcctgccagcaacgcgctgtgtgcagcaggaagcccacgccaggtcctgacggctgcatcctgtgtgctctccggcctggccgcctcaagacacgccac

SEQ ID NO: 5496 - DNA, 122 bp, Homo sapiens
ggatgtcagggggccgggtaccgccgcatcccacactcggtccccgggtgtccacggtcacgctgctgcagaccccacactcagcctcgggggtgtccgcgtgacactcccggtgggagctt

SEQ ID NO: 5497 - DNA, 122 bp, Homo sapiens
gcagagacgggagctgtggcacggcagaggcgggagctgtggcatggcagagcaggactgcgggccaataagccaagcccaggatggtgtggacaccgcagatacaacaatgtacaaagtgc

SEQ ID NO: 5498 - DNA, 122 bp, Homo sapiens
ttctcatgggccaggggcagaggagctgtgggttcagagctacagcacgattctggccttcgctggcagtccaggctggcaggtcgccatctttgggatcctacaggtcatgaagaattact

SEQ ID NO: 5499 - DNA, 122 bp, Homo sapiens
ggtgacttttgccctcctggaataacaagaaaatgagtgtcgcctctgtttttgtcggtccgccgcagacccgcggcccccacgtgcgcactccgatgacctttccgcctcgggtgatctgg

SEQ ID NO: 5500 - DNA, 122 bp, Homo sapiens
ggatggccgcctcggtgggcagcgcctgccgccccttcacggccacccggtggaagccgccggcgaaccacatggtgcgcatgatggccttcagcaggaagtccacaaccctgcaaaagagg

SEQ ID NO: 5501 - DNA, 122 bp, Homo sapiens
ggtcgggtgctgctgttgggaggagtggccactcactcatggcaccagggattcatgaggcgatgtctgcagagtgttctatcagatatcctggattttccagaactgatttaaagaatgat

SEQ ID NO: 5502 - DNA, 122 bp, Homo sapiens
cctcactggctgcagctgatctgtttccttataccagatcctcagtctcactaaagacagcgatatgggagacacccaggggcctggcccgccagcccaaaagatggtcatcgggaagagaa

SEQ ID NO: 5503 - DNA, 122 bp, Homo sapiens
aactactatggggtgagtgtaccatttttatttaatgctgctgtgaagagacctgggggccggtactattgttcccttgtgcagatgaagaagctgaagctcagagaggctgagccacttac

SEQ ID NO: 5504 - DNA, 122 bp, Homo sapiens
ctctggcctcagtctccctatctgtacagtgagggggttgatcatttctagggctctccccgtctcctctcacagccaagctggcctcaccctatatgcacctgcagttttcttccttggaa

SEQ ID NO: 5505 - DNA, 122 bp, Homo sapiens
gtggggctcattttagcaaagtgaggatggttcaatattcaaacacgattatgctcctcacgctgtgaaccgtatcttgcggttgctattctcagggctggcgggtggctctcgccacccca

SEQ ID NO: 5506 - DNA, 122 bp, Homo sapiens
caaagcggttggttgcggcagggactacaccggtgtatcatgggagcggcccgggctacacgttaaaaacactaaggggagcgcgcgaagctgaacttggcgctcgatgggggccgttagcc

SEQ ID NO: 5507 - DNA, 122 bp, Homo sapiens
cggagcccgattgtcactcagctcctgcgccgggggcgacagagccgcaggcgcccgagtcgagtcccagccagctaccatccctctggagcttaccggccggccttggcttccccaggaat

SEQ ID NO: 5508 - DNA, 122 bp, Homo sapiens
gcccgcgagagtaggcgcgtggagggcgctcggccatctttgatcctgaccaggcgacttcgtcgcctgcggatcacggaagtggctgcggtcggcgccatgttatgttggggcagaaggga

SEQ ID NO: 5509 - DNA, 122 bp, Homo sapiens
cctcgggggagggcctcgtgctgctccacagcatggctgggaatcaaaggggccccctggcgagaggcagccgagcttgcctttataacagccgcgctcccgagagggtcgacccactcccg

SEQ ID NO: 5510 - DNA, 122 bp, Homo sapiens
ctgaccctatccttgagtcctggactcccccacatatatgcccctctttccctgtgggtacgccaagagcttgaaccccactatgctaaatgctttaggtaccttagccttttcttttcttt

SEQ ID NO: 5511 - DNA, 122 bp, Homo sapiens
ccatcagggtgccaaggtgcacacaggacaacaagggtgccggggtgctgtgggcacagccgctgttgccgcctacctgctgggcctgctgcagcagctccatgcgctcccgcaggatctgg

SEQ ID NO: 5512 - DNA, 122 bp, Homo sapiens
tactcgggaggctgaggcaggagaatcgcttgaacccaggaggcagaggttgcagtgagccgaaattgtgcccctgcacttcaacctgggcaagggagccagactcccatctcaaaaaaaaa

SEQ ID NO: 5513 - DNA, 122 bp, Homo sapiens
ctcggagcagccgcaccccatctgctccttccaggatgacttccaggagtttgagatgatcgatgacaatgaagaggaggacgatgaggacgaggaagaggaggaggaggaggaggagggag

SEQ ID NO: 5514 - DNA, 122 bp, Homo sapiens
gtgacactcagtcccccaccctccatcccaaggcccttacgggggaacgcaagagcgccgcgggcccgcggagcccccgctttgcctcggcatctgtcgtccccacttggccaccctgagct

SEQ ID NO: 5515 - DNA, 122 bp, Homo sapiens
taaggtagcacatgcccttgagcccttcagatgatactcacatacaaaaaattagctgggcgtggtggtgggcgcctgtagtcccagctacttgggaggctgaggcaggagaatggcgtgaa

SEQ ID NO: 5516 - DNA, 122 bp, Homo sapiens
gccgcgggcgcacaatggggtgcgagcgctacctcgatccctgcgctccaggtactcggccgcctccagcaggatcagcagggagttcagctccatcctcccgcccgcgcccgtccgccccg

SEQ ID NO: 5517 - DNA, 122 bp, Homo sapiens
aatgggttgtgacagaaaaagcgccggctaatggtaccacacaattactagtgcgaacagcggctcggtgcaatcaccgttctgcacggcaaaacggggttcaggaagttcctaggagatac

SEQ ID NO: 5518 - DNA, 122 bp, Homo sapiens
ctgaggggagggaggctcccggcccagtgtccttaataggctttggtctccatgggaacccgagggcaggggggatcgggcggggggaggggaggcggccgaggcctgctgaccagtaggag

SEQ ID NO: 5519 - DNA, 122 bp, Homo sapiens
tgaaatgagggattttcttgaaacaaccctcacgcaggtaccccttgggcagccttcaaccgctctggggaaggaggccccaggcatagacaactgcagtataaataatcatccctacagtg

SEQ ID NO: 5520 - DNA, 122 bp, Homo sapiens
aaccttctctatctagagcagattctgcagagaggcccctctttaattcatattctgaaacgtgcttgttattgttgacgtacaaaaacttatgaataattcaataaatgaatcttgaacca

SEQ ID NO: 5521 - DNA, 122 bp, Homo sapiens
ctggatcttactcagtccatggtgcccagcctctgccccaacatgccctctgcatgtgaccgtcatgccctggatggagccactcctggctcaccccacctgcactgcactgtccccagaga

SEQ ID NO: 5522 - DNA, 122 bp, Homo sapiens
ggcggtcgatctgcaaggcctgcaaggtgcccggacagaaacttgagcagatattggtgccgctgcccgagaagagctcagccgagtctccccgagcccagctatcggcatccgcgaaaaag

SEQ ID NO: 5523 - DNA, 122 bp, Homo sapiens
gcccacccgcgtgctcggcccccagagcctcagcgtcccccaggctttgagcatgcacctcggcatcctgtggccacgtctccataggtccggtctggacactggcggatggctgcagcgct

SEQ ID NO: 5524 - DNA, 122 bp, Homo sapiens
ccccgacttgggcagaaccgcacgcagcggctcggaggccaggcgtgtgccgggcgggatcgcgcgcccgctggggtgaaatcaaaagaaaagcaacaaagccccttccgcggaaaatgggg

SEQ ID NO: 5525 - DNA, 122 bp, Homo sapiens
ttctcctgggatccagggttggggtctgagctccctgtggtggtcattaagcccctcacacggcacctgccgaggtttgcagcaatgacgtttaatacttctggaatgattaggaatctgag

SEQ ID NO: 5526 - DNA, 122 bp, Homo sapiens
atactcttcaaggtccttaaatggtttgctgtttaaataaaaaatgaggacagttagacccgtgtgcctatgatattatcctgatcattgtcaggaaactgaactgtatccagagtgcccct

SEQ ID NO: 5527 - DNA, 122 bp, Homo sapiens
gcctgcagcattgggaatctaagtgttgacatctaaggtgagtgatataacaatgctgggcgcagggtgaaatggtagataagccaaaatgctaacatttttcttgaaagtgacttgagttt

SEQ ID NO: 5528 - DNA, 122 bp, Homo sapiens
cggccaccaacgcccggagggagaccggcgacgctctccgccgcgaccgaaagtctcacacgccctgagcagatgaaccggtccctcggtccggtctgccctcccgcaccggcgcctttggg

SEQ ID NO: 5529 - DNA, 122 bp, Homo sapiens
ccaaactatatcatagtgcaaaatctaaaaatactaaaagccagcccaccactattctgccggtgttgatttgctggattaaagtgaacggcttggtgtggcctttgatcccctctgctctc

SEQ ID NO: 5530 - DNA, 122 bp, Homo sapiens
ggggaatacatctgagagggcagcatactgagacactactgcctgacaggtttgttttcacgtgatggattggtcaggggatcaacaaggcagagatcagatatggtctaaacatccagctg

SEQ ID NO: 5531 - DNA, 122 bp, Homo sapiens
gagatgcattgcggagctcgctagttggggcgttggccttccttaggagtgtgagtctagcgttatcccttttttccggctggatcccgggttaccccaccagcccgacctcaacccactca

SEQ ID NO: 5532 - DNA, 122 bp, Homo sapiens
tccaacagatcagaagttcctcctctctgagcccacaaaaatagtgcagactttcctctacggaagtcaagatgaaacaaatgtgttccccatttcattaggcccctatgaacacccagatc

SEQ ID NO: 5533 - DNA, 122 bp, Homo sapiens
gtgtcaggtacaattctaagtcttctatatattacatatttaatccttgcagcaaccctgcgaagtagttattactattattcccattttaagatgaggaaactaaagcacagaaaagttaa

SEQ ID NO: 5534 - DNA, 122 bp, Homo sapiens
ctgctgccatctgcatctgagtcggtcagggactgagagcacagcaggccggggagcgagcggctgccaaattacagagcaaggagcacttaggatggtgggagggggaggaaaggaggaag

SEQ ID NO: 5535 - DNA, 122 bp, Homo sapiens
cactcactctcgcttttaactccgagaacccgctcttctccagttcagtctccatggccccgccgcctttgcacattgcacttcccggcagcctccgcgtgggcgccccctccaactcctgc

SEQ ID NO: 5536 - DNA, 122 bp, Homo sapiens
ggcgtgttccctcgccctctgccggccatggggttgcagcgcaagaggcttggcttctaccgcttagcgatggacctaagtctctcaatggctgaaattctggtttagattattcagtacct

SEQ ID NO: 5537 - DNA, 122 bp, Homo sapiens
aacaaggcttatttcattgtatagaaaaatatactgtagttccagctactcagaaggctgcggcaggaggactgagaccaggagctggaagctgtagtgcactgtgatcaggcctgtgaata

SEQ ID NO: 5538 - DNA, 122 bp, Homo sapiens
taagatttaattggttttcttttttcttctgtggtgtgtgtctattcatcagcctcttgccgctctaagtttttcctccctcccttaacccacatcctcaagaagaattgaagaattttcca

SEQ ID NO: 5539 - DNA, 122 bp, Homo sapiens
tagatgtccctttaaaaggctccactaacaatacaagaatattttttccatacgcagtgacgtgggtgggtcatgggtgtctcaatgacagtaacgttcccgaaccccggaccttagctgtc

SEQ ID NO: 5540 - DNA, 122 bp, Homo sapiens
cctgagaaagtgtgccctaggtagtcaggttacagttaagtattgtacattttaaagagacggacattacaggcaaagacataagtcaacacaggtaaggtatacactggttcagcctaaag

SEQ ID NO: 5541 - DNA, 122 bp, Homo sapiens
caccaagaggaaaccggttctgggaatccctttgcagcaccgcgcttgttttggttgttgcgcggggttgttgttggtagtggtggcggtgtgtgtgtgtatttacacttaaaaaataactg

SEQ ID NO: 5542 - DNA, 122 bp, Homo sapiens
ccctgcctgaggcacgtggggtcccgcaatcagagcgctggggcggcttctgtagcatgacggggtgcccggcccaggccctcgcactgacctgcagcccaatagcccagaggcctgggaaa

SEQ ID NO: 5543 - DNA, 122 bp, Homo sapiens
caataacaaagtcttgcaccactatcttcagtttaaaaaaaaagtttaatgtttgctctacgtttgaaatgcatgcaggtttaaaagacaagaaacaaaatgatgaaaaagtgtgaccggcc

SEQ ID NO: 5544 - DNA, 122 bp, Homo sapiens
ccgagagtggaaccggtacctcgaatctcgctcattccgggtcaattggaggcgcattagcggctgccttgcagtgcaacagaggctcgagtgacaggccacctgcctaagcgctggcgccc

SEQ ID NO: 5545 - DNA, 122 bp, Homo sapiens
ttcttcttcatacttttaaacttcagtgcaagtgtcttttccatatatgattctaaaatccggatcttaaaatccaagaggaaaaaaaaacaacatagaggttcagagacaaagggaggaag

SEQ ID NO: 5546 - DNA, 122 bp, Homo sapiens
ccaagcgcgtccccgccgcgagccgctaatcgtccgccgctcccgttaccggggcaaccgcggcgcctcctccgtgtcggccccgatcgtccctccgcgccattttcaaactgctctagcgc

SEQ ID NO: 5547 - DNA, 122 bp, Homo sapiens
gtctgagagcagggatgagattgttttgcctcagaaagcccagggcagaaacatttcccccgcacgatcaaggccttccgtggctgctcagaacacaccgcgttcccggccgcacacgcagt

SEQ ID NO: 5548 - DNA, 122 bp, Homo sapiens
aatgacccggccagggtcacacacggcccctgcccgctccgctgcggccatctccgcttccgcttccgcttccgccgaggcttctttccgactcaggcacggctctgtgccgtagctttcga

SEQ ID NO: 5549 - DNA, 122 bp, Homo sapiens
ggaagggtaattggacccctcccattccttcacagacaggaatgtattagccaaacctaccgcgattttgccgggaggacgccaaaaaagacgatcacgtgtcaaataaccatggaaacggg

SEQ ID NO: 5550 - DNA, 122 bp, Homo sapiens
acataaccatctccccaacgtagctacataaagagaccagccttctgtcctgaaaatggccgatttaagatcctcacctgctccactaggtctctaggtgatataattggtcatgagcttga

SEQ ID NO: 5551 - DNA, 122 bp, Homo sapiens
cgcgacgagcacttcctggctgtacccgcccaaccgcgccctcctggtctgttccggctccgcagttgcgtccagaggcctgatccttacgtccgcctggtcctccgggcctgtctctgcct

SEQ ID NO: 5552 - DNA, 122 bp, Homo sapiens
ggctcacttgtgcctccagcgcagcagtgagttcaggtagcatgtgtgcctgtctctgagcgggagcatcctcccccggctgtggcacctgggcaacgggacatcaattcctgctctttaat

SEQ ID NO: 5553 - DNA, 122 bp, Homo sapiens
gaggagcgcctctgtctggctgccaccccgtctgggaggtgaggagcgcctctgcccggccgccccatctgggaagtgagtagcgcctctgccaggccgccctgtcttggaagtgcacccaa

SEQ ID NO: 5554 - DNA, 122 bp, Homo sapiens
agaggtgggccttcggcgacgtcacaggcgagggcgttcggcgacgttactggggctgcacggtgcttgtagctgggcagtcttatcatcagagtggagcctggtaaccacgacctccccgc

SEQ ID NO: 5555 - DNA, 122 bp, Homo sapiens
ccttggaccctggagctgaggcccttagtggaagggaggaggagggcagtgtcacagctgcgagaagccgcagcaagcgattcacatcctcagctgagtgcagctcagccctcacagtgctc

SEQ ID NO: 5556 - DNA, 122 bp, Homo sapiens
gcttagcctgggatgtgtgcccgcaggagccgctggtgcagggaaaggtttctgcagacacggcatgcattcctgtctgtctctccactaccactgcccactgccctgggcttccttacatc

SEQ ID NO: 5557 - DNA, 122 bp, Homo sapiens
acagacgattcaggaaggaaaacaagaaactagggaccctggtgttcaggtaggcagctccggttgcagtctgcccctctgagtcactccaggcggtgacctcccccaacccgccctcattc

SEQ ID NO: 5558 - DNA, 122 bp, Homo sapiens
cctgcagccagcccaccccagcagggcctccgcaagccctgtgccctcctgccctctctacgatgctatgtgtggtctcaatcccacacctgggctgagggggaggacccccaggcgcctca

SEQ ID NO: 5559 - DNA, 122 bp, Homo sapiens
cttcagtgggagagcagggaagcaaatccatgtctctggagctgtttcctcaggccatggcggtgcctttctgctcggactcccctcccacagataagtagggtgtccactcttggagtttg

SEQ ID NO: 5560 - DNA, 122 bp, Homo sapiens
gatttctacatcccaaaacaatacctttaattgacttttattggcctcctctgtgaaggacggaaagcagatgccagaagccatgagaggctctggctctccgaccaacccgtggaagccac

SEQ ID NO: 5561 - DNA, 122 bp, Homo sapiens
ctgacactaattcctggcatatgtactttagttctcatttccacctgccttctcaggaaccgcacattgctgatcagtacatggtttctttcttcctttcttttttttttttttggagacag

SEQ ID NO: 5562 - DNA, 122 bp, Homo sapiens
atccccatgcctaaagccctgtaatggtcccctcagtcctcaaaatccaagccagatgcccggctacagccttcaagtgtgcacggtccccaggcccctctttcactcaccaccaaactccc

SEQ ID NO: 5563 - DNA, 122 bp, Homo sapiens
aattccgtctaacccatcaggcccctagaagggctaactatgccctttctgagtcttccacgcggtgggggcgaaggaggatggagctagaacgaagcctcagcgcgtgccccgcacaaaca

SEQ ID NO: 5564 - DNA, 122 bp, Homo sapiens
tcacccactggcctaagaaagagcaccaaaggcccttctgtgaataaactctcaggctaacgcaggctgggcttcatggaagggatggaagggaaggtagtccttggatgtttggttgaggc

SEQ ID NO: 5565 - DNA, 122 bp, Homo sapiens
cggccctgtcctcggttctgtctcgggtcacctgaggcatcttcaccgcggcagctcgggcgcgtgggatctgctctcagtgatgacctgggacgcatcctgcctctgtgcgccattcctgc

SEQ ID NO: 5566 - DNA, 122 bp, Homo sapiens
gacccctctattgtaacgacttatgatgctgttcaaaatgtgcattctgtgtggactctccggagagtcaaatcagaggtaaggagaaaggcaagtcacttctccttaataggaaagggtag

SEQ ID NO: 5567 - DNA, 122 bp, Homo sapiens
tggagtcccggggagcagcagagagcaaacggtccggctctacctcaccctgccagggggcgagtcccgcgctccctgcgtctacctggagctgcagggtccctatcccggggcgccgcccg

SEQ ID NO: 5568 - DNA, 122 bp, Homo sapiens
tgtagggaggagaggctgggggaccgggaggaaggtggatgggccgcaagatggccctggcgtctgcggaggagtagctgagtgagagagcaagagtctgccttctccacgacggtgatgtg

SEQ ID NO: 5569 - DNA, 122 bp, Homo sapiens
tctgagccgggtgcggacgtgctggtgctcggggaagtcgggggctttgacgcctgaaggcgcgggagccgggcgcctgggggaagggggtccggcgccgtcacctcccactcctcgcccgc

SEQ ID NO: 5570 - DNA, 122 bp, Homo sapiens
gacacagggctgtcgccaaggccccaggaagggttttgcagacgcttgtgggggtgggatcgcggctgacataaaagcgtgtaagtgggtcctatcctcctcactgtccgtctctactcggt

SEQ ID NO: 5571 - DNA, 122 bp, Homo sapiens
ttgatatacaaatgcagccagaggatgacgtgccagctctggggctttgaatcactcaggcgggccagaaaccccactgaaggcaaaagaggatgcagagctcagtctgaggttagagtgat

SEQ ID NO: 5572 - DNA, 122 bp, Homo sapiens
gacagcggataagtcctttgaaaatacagggcttgcgatttcagacatggggcaacctgacgacgatcaccaatgtggcgagaggcactcagattttcagcgcagataaaaagatgggaaaa

SEQ ID NO: 5573 - DNA, 122 bp, Homo sapiens
agtgacagggtaccaccttcttgaccggatcctggaacacaggagtgtcacctggcccctcgtcatcccaacttagcacccaaagtacccccgggccggggccatggctgggctggaactca

SEQ ID NO: 5574 - DNA, 122 bp, Homo sapiens
taaccttggtcaccaacagatgtgagggcacgtgacgttcgggctgcgccctccccgccccggccctgcacacagtagggccgcaccgcgctttgcaaacaggtggactcggcagaggcgcg

SEQ ID NO: 5575 - DNA, 122 bp, Homo sapiens
ggcaggggcaggggcccggagcatctgtggggttgagaaagtgggggaccaggaactgaacggggggttcctggaacctgcttaaaatcccctagggccccagcatgagggggctgtcctca

SEQ ID NO: 5576 - DNA, 122 bp, Homo sapiens
gcggggctagaggaggggctgggggcgggtttcccgatgaaggggcggccatggcagctgcgcagaggcaacgcaggctgctacggagcgcgcgcccggctttgaatgagcggggctgggag

SEQ ID NO: 5577 - DNA, 122 bp, Homo sapiens
ccgggaagactggggggtccaaggtcctcggcccgctcgcgcgcggtcggtcaccagccccggctcacccgagtgtgcccccggagcccacctcctgaagcgcgcgctcctgctccagcggc

SEQ ID NO: 5578 - DNA, 122 bp, Homo sapiens
gggagctgttatccccagagcagtctttgggagtactgagttaaaaagggaaacagctcccgatggagtgttctaggtgccaagaaacaagccgctctgggtgataattgtgccggaagaat

SEQ ID NO: 5579 - DNA, 122 bp, Homo sapiens
agctcttagggtctgggggccgcagcgcctccccggggctgcgtgaggatcacctgccatcgctttaccgactctaccctttaaagagtgtcagaggcttcagggagaggtccccgcgctct

SEQ ID NO: 5580 - DNA, 122 bp, Homo sapiens
ggggggacgcgtcaagaaaagttggctggtaagacgtgggtgaatgaggatgaggatgaacggggaatgaggttcactcaggacccccgagtgagtggggtggtttcactggacagcgggat

SEQ ID NO: 5581 - DNA, 122 bp, Homo sapiens
ggccaaaaggtccattttattgtcatacaatcgtggtcaccgtgacaaggagggtggcagcgtggccaggcacaggatgcacccaaggagagcagcacagtagcaaaaccagagctgcggaa

SEQ ID NO: 5582 - DNA, 122 bp, Homo sapiens
tatgtcttaaatactattatagtaggaaagggagaggagaaaattccccacccactcccccgatttggcccgtgtagcttccctttgagggtgtgtgacttgccatctgcaaaagtcatggc

SEQ ID NO: 5583 - DNA, 122 bp, Homo sapiens
ctcccgcctgcgctgtaacccgggctctcctgccctgctgggcctcagtttcctccttggcgaattgagaagaatagctctttcgtgcttctcctgcagaaggaatgcaggccccccgtgct

SEQ ID NO: 5584 - DNA, 122 bp, Homo sapiens
gggctctgagttcgatcatgtaatttgctttgatgaacagaaaattactacactttacatcgaaatttgagatgacctccacattaggctttcttgttcctttccggtttataatgagaaca

SEQ ID NO: 5585 - DNA, 122 bp, Homo sapiens
cccggaacggcccctaaagtaggacctagttctccaggttttacctgtttccactagtggcgcggggcggggtaatgaaacccagtcaagaaacccagtaaagggcttggcaggaccaggca

SEQ ID NO: 5586 - DNA, 122 bp, Homo sapiens
agctgcttggtccctggctggcagtcaggtctgtgagtggaatggaatggctgagaactgcgcctgttcttgaggcccccgcccccaccagcctccaggcaagcagccctgctggccagtgt

SEQ ID NO: 5587 - DNA, 122 bp, Homo sapiens
ccggaagcatcagccctaccgataccttgattttgcacttccagcctccagcacagtgagcgaatctgtttgtgctgttttacgctactcctccatctctggtgctgctccagcatgacccc

SEQ ID NO: 5588 - DNA, 122 bp, Homo sapiens
cgcgcttttgcacaatggaaatgcggcttccactgaagagcacgtagctttccagatgcacggttttgtggaacttgggggttggggggaaggggaagcattgcctccccccacgtgagcgc

SEQ ID NO: 5589 - DNA, 122 bp, Homo sapiens
ttcttctgcttcacgctgaatggcttcttcctcggcatggcccggaccagtcacctggcccgccctccgccgagctcccgccgcctcaactgactgccccccggggcagcccccgccgcagg

SEQ ID NO: 5590 - DNA, 122 bp, Homo sapiens
ggcccaacgagccgtgctgaaacgtggcgcctcggaggaggctgaggttggtttctcccacgcacggacacacccacacccactccgggcccgcctcctgggccgcggcctccctccccacg

SEQ ID NO: 5591 - DNA, 122 bp, Homo sapiens
gcctggggaccttctctgaagggaccctccacaagcctcatgtttcacttgagagattaccgcacagtttgcattctactttgtaacatatctacattcatttcaggctataaatcatgttt

SEQ ID NO: 5592 - DNA, 122 bp, Homo sapiens
agggcccgggcgccgcgacctcgcagccgggggcgggatggtggcggcgcccgggccccgcgtgctactcagagctcaggtcctaggtgcttggctcaactttctcccagcggggtcgggaa

SEQ ID NO: 5593 - DNA, 122 bp, Homo sapiens
agcgggactggggctgggggcagggcttatgcctgccagcccctgacacgcattgtgtctcgcagctgatgcggaacctccttggcacccacctgggccacagcgccatctacaacatgtgc

SEQ ID NO: 5594 - DNA, 122 bp, Homo sapiens
aagggagaagctacactgatctggatgggtgtgtgtgagtcctgcctctccaaggaataccgcccctgtgccaacccaggctgattcctgaattatccccatcccattttagggggatcctg

SEQ ID NO: 5595 - DNA, 122 bp, Homo sapiens
cctcagtgaataattgttgaatgaatgaatccaggttctttcttccctggctttctcgtacgccttgtagtttctttgccattaatccttctcaagaatcttgctctttagctccttatttg

SEQ ID NO: 5596 - DNA, 122 bp, Homo sapiens
ggtcgccgagccaggttgctaaggaagtgagcggccactgtctctccccatccggggcagcggggaatggctgagccaggggttcgccgcccccgccgccgccgccgccgccgccgccgccg

SEQ ID NO: 5597 - DNA, 122 bp, Homo sapiens
cttaaattcgtgattaaaaccgtgatggaggtttcttccatttccactttagtaacttagcgaattccctgcctgtctgtctcctgtctctctttcaaactaaatgcaaagaaggagaagga

SEQ ID NO: 5598 - DNA, 122 bp, Homo sapiens
accttgagaacactgtatgttcacttccctttgagcctcatgacgacctcagagaatgaacgctccccccacgctggaggctcgggtggctaaagccgtccccgggtggcgatactgggtgg

SEQ ID NO: 5599 - DNA, 122 bp, Homo sapiens
agaaaaaaccttagagctgctttaaaggcgagtttttcgcgattactggagctcatactccgtcctggggtacgcctccgcctccctccctaccgtgctgattcccgcgcctgtgtagacga

SEQ ID NO: 5600 - DNA, 122 bp, Homo sapiens
tcgtggatagactcatatctgtgaccagtgtccgccaccgcggatggcaagagacctgatcggaccggccctgccgcccggcttcaaggcccgcggaacagcggaggacgaagagcgggacc

SEQ ID NO: 5601 - DNA, 122 bp, Homo sapiens
ccttgtcctgcactcagccccagacactgtcagacacaccgccctccccgccatgcctctcgcagaccctcccagaaaaccaagcatctcccaggagtctccagggatctccaggactctgg

SEQ ID NO: 5602 - DNA, 122 bp, Homo sapiens
cctcgccaccgagtgtcattgggggctgaaatttgacacaagccttcctggcctccccgacgcagacaccgctgtcagccccctcctttcttcgcgcccctagcccctggcggcaagtttac

SEQ ID NO: 5603 - DNA, 122 bp, Homo sapiens
ttttcctctatattaggctccttcccactgccttcagctaggcttgcctttttctccatgcggtattcttcaaaagaagtagctaaagggatttatttatttaaagatagttaattaccctc

SEQ ID NO: 5604 - DNA, 122 bp, Homo sapiens
atattttatatatattttggagagacagggtctcaccacgttgcccaggcaggtcttgaacgcctggagttcaagcgatcctcccaacttgaccttcctcagcggtgggattatatgtgtga

SEQ ID NO: 5605 - DNA, 122 bp, Homo sapiens
ggggttagccggtatccctctgtcctgctgagcacacaccttgctccatggcaggccagacggtgtcggcagggtagccatactctgggaagccggggccactgctgaaattgctgcggtag

SEQ ID NO: 5606 - DNA, 122 bp, Homo sapiens
ggcaggtacaatggaactgtattttcccaaaatgttgcagatcagttacaacaaacagaacggcgaccgtcaaggaaaactgtcactctgggctcctttttgaccacagcagctatgcggaa

SEQ ID NO: 5607 - DNA, 122 bp, Homo sapiens
ggtgctggggcgcgcccgggtgtgctcgagcgtgcgctggcggcggcccgggctcccgggcgtctctcacgctgtgttttggcggcgcctggggtcttcgtttgcatatgagaagagccgaa

SEQ ID NO: 5608 - DNA, 122 bp, Homo sapiens
ctactcagatgtgagcgcccctcgacgtgtgggctcatggggtgatggcactggtctcgtcgctggcagaagacggtcataccgcgatgcccttggtttccaggatgaggctgggcacatgc

SEQ ID NO: 5609 - DNA, 122 bp, Homo sapiens
cctgacttttctgacaagggacaacggttcctgcgcagatctgcagtttctaaagttgatcgcgcgattggatttgctccccttagaagaaattagtgtctccctcattgcagatgcaaatg

SEQ ID NO: 5610 - DNA, 122 bp, Homo sapiens
cagctcccgcctcagtcacaagggaacgcccgcgtgggcaggcaatcgtccttggtgagccgggatctcctcaccccgagagccgcaggctccgctgacgccggtacaggtctcgctgcgac

SEQ ID NO: 5611 - DNA, 122 bp, Homo sapiens
aaaaaaaaaacaccttggcaggcagagcaagttggtccccatgacaagctccagctgtggcgtctggagcggggacaggctccgaactcgtgccaggggctcggccgggctgtgccgggagt

SEQ ID NO: 5612 - DNA, 122 bp, Homo sapiens
ctgtaaacacccagagactgtcatggagggggaggaggaggcggcggcggcgaagggaggcgtttggggccgcctccagggtccgctctgccattcctgaactggtccctcgtccccgtgac

SEQ ID NO: 5613 - DNA, 122 bp, Homo sapiens
gagaccccggcccagcgccgccggagaccgtgaggcccgcacttcaaagaccccgacccccgggagcccaactgttgacccaaggctcaaagttcccagcctgacccctgaccctcgccccg

SEQ ID NO: 5614 - DNA, 122 bp, Homo sapiens
gggagtgaaatccaccttaggaagacctgccaaaaagctgattcttcaaaaaagtgttctcgaaatcttagtgtaactggcaccaacacccatccccaatgcctcgttttttttccagcaga

SEQ ID NO: 5615 - DNA, 122 bp, Homo sapiens
tggtctcaaactcctgggctcaaacaaccgtgccttggcctcccaatgtgctgggattaccggtgtgagccactgtgcctggcctttattcatttctatgtggctgaacacatttggtatgg

SEQ ID NO: 5616 - DNA, 122 bp, Homo sapiens
cttctatgccaagcgtctgacgctcgaggagctgttggctgtggaggccggcgcaacacgcgccaaggaccacgggctggaggtgggaccagcctgggactctgtccctttcccaatttcct

SEQ ID NO: 5617 - DNA, 122 bp, Homo sapiens
gagagagggtggggcggggtggggggcccagagcctgccgctcgccagggaaacaggagccggtggctaaatgcagacacactgtcatggtgctgagggcctgagtcactgcccctggatgt

SEQ ID NO: 5618 - DNA, 122 bp, Homo sapiens
caggaaaccagagaccagcgccctgaaacctggcgggactggccgaatgtcagattagcccgagcagctacactgaacgctgcggaagatgcaccagaatcccggagtaggagccagatttc

SEQ ID NO: 5619 - DNA, 122 bp, Homo sapiens
ccattattctgttcttgggatacattttgagaagtggaattgttgggcaattcctcttaacgtatttctagagtgtttgataaatattgtctgattggcccaggaaaatgtttgccatttct

SEQ ID NO: 5620 - DNA, 122 bp, Homo sapiens
aaggtcccgcggcctcgggccccgccccgccccggggcctcgagcgccaggccggcccggcgaaccccgcccaaggccaacaaggagccttgtccgcgcattccagcggcagaaacggaatg

SEQ ID NO: 5621 - DNA, 122 bp, Homo sapiens
ttgatggctggagaatgcacatcctagctgtcactggggctacaggcaggtcagtgagcacgctaaaattttccttctcaattacacttcaaatagcaggcatattactcgtataagatgct

SEQ ID NO: 5622 - DNA, 122 bp, Homo sapiens
gccagtattttctcctctgtcttaggacggaggctgcccagggagtgctcggacagcggccggtaaaagcttccaccacctgtggccccaaggccagtgggccagcaagcccaggatgaatg

SEQ ID NO: 5623 - DNA, 122 bp, Homo sapiens
aaaatagcggtggcagcggccaggccgggagccaggtagagtctgagcaggcaggggggccgcgcaggactggcctgctgggccagggggctgggtgggggtcaagttgagtcgtcctgagg

SEQ ID NO: 5624 - DNA, 122 bp, Homo sapiens
aggggctctgtggggcctgaaggcccagctacctgagcaggtgtgagaccaggctggtcacgagtgacaggtcccccggattcctcttgagcttggccttccagtgcttcggccagtcctac

SEQ ID NO: 5625 - DNA, 122 bp, Homo sapiens
agcgaatccttctccagtactgacttcaaaggttctcagaatcgcggcgaaagcaccctacgcaaaatagcggaggtcggcgccaagaaaagcactgcaggttcagggcgcatgcgcatttc

SEQ ID NO: 5626 - DNA, 122 bp, Homo sapiens
tctaggcatagcttctgggaatggccatcactgacatctgtcgtaacctcccttgattgtcgggccctagctcagtctggctatctgtgttgcttctgttccagagaggtgccaagtgctct

SEQ ID NO: 5627 - DNA, 122 bp, Homo sapiens
ttgtgtgcggagcccagccccgggagaggacttgaggttgtggcgagtccctggcgctggcgtccgggctgcgggagcaccggtcagggggtggccccatggggtctctgaccagcggagct

SEQ ID NO: 5628 - DNA, 122 bp, Homo sapiens
ctcctcctcccattcactacccttccctgactagcaaagctgcctaaacccagctagctccgggttaaaggaaggcctggaacccaactacagtgcttcctgacagtctgaccctaccactg

SEQ ID NO: 5629 - DNA, 122 bp, Homo sapiens
tgtttggccacctttccctgcctttggccagaaggccacaggacaaaagcagagtcaggccgctccccatccactttctgacactggcccctccccaccccacaccaccccttgatacctct

SEQ ID NO: 5630 - DNA, 122 bp, Homo sapiens
cgctcggaagtgcgctgggttcccttagcggccagtgggttctggtgagaagggcaacagcgggaggaggcgccggtgcggagcgggaggccgggggcggggctgcggggctgcggggcggg

SEQ ID NO: 5631 - DNA, 122 bp, Homo sapiens
cttttatttcctaagaaatatgtaacttttgttttgtaagaaagtgaatatgcagaaaaccgaatgcttatatagttacagccttgaaaagtaaaagcaaagataaccaagtaaaaagagaa

SEQ ID NO: 5632 - DNA, 122 bp, Homo sapiens
gctttgcgggcccaggatcgccgctgggaggcccgtttcaggggccacactgcaggggaccgggggacactcacctttacagacgaagcacttgatgtggaagtacttgtcctgcacccgca

SEQ ID NO: 5633 - DNA, 122 bp, Homo sapiens
cacagccagcactgcccggtgcttgggaggctccccgaggtaatgtgtgtgctgggatcacgattaccacgagcctcactgctgagctctgcttgaaatgggtctcctggaagcagttctgt

SEQ ID NO: 5634 - DNA, 122 bp, Homo sapiens
gagtgtctgtgacgtcaccgaggaactcctcctgcttgagcgcggcccgctgtctgctgtcgcctacagctgaccaatagagggcttgggtccggaagtgatggactggaggcttgactaat

SEQ ID NO: 5635 - DNA, 122 bp, Homo sapiens
gaatgccgtcaactcacaggcactgcttgggtgacaaaggctggcaagcgcgaggacatccgcaggcagccaaaggagcaaggacttccgtgaagcagccgaagcgcgggcgcggggacttc

SEQ ID NO: 5636 - DNA, 122 bp, Homo sapiens
tggcgtgcgtcggggtggggtacagatcataatagtcccttactttcccactacgttctgcgatctattcggcgctttggggcagcaacactgttcgctcctggggtgggcggggtaggtag

SEQ ID NO: 5637 - DNA, 122 bp, Homo sapiens
agcccctgggtcattcaaaccacttcacgtttccaagcaccctaccccaggccttaaacgcggctccagctgcctgttccccacgcgctgctctggacacaggatcaagtcagagaccaggg

SEQ ID NO: 5638 - DNA, 122 bp, Homo sapiens
tgtagtgaatgtgaatagccactgcccattcctacttattttgggggctctgataaagaacgggaggaaatacacacactccctttgggagttcagcagagaggagatttattgtttcagtc

SEQ ID NO: 5639 - DNA, 122 bp, Homo sapiens
attaagccccagggaatataacactacatgtacctcacataagtttttgttattacccagcgcatcactggggaaattatatacttagcccaatgaagggtaatgactaccttcattgtctt

SEQ ID NO: 5640 - DNA, 122 bp, Homo sapiens
tgtggggtcccgtcccagcagggagttagttggggggcgtcccaggcagggtctgggggccgggcgcacgcaggcggggtgacgagctgggggggcggggggcggtgtcggagcaaatacgg

SEQ ID NO: 5641 - DNA, 122 bp, Homo sapiens
ccccctagggactgggacccgttgactctgagctgcttttgaggctggatcaggtaccagcggcctgggggtcgtacaggatgggagaggccggggcttgggatgttgccagatctacgttg

SEQ ID NO: 5642 - DNA, 122 bp, Homo sapiens
gcggccgcggtggcccgcggtggcagaagttgcaagagaggctcctggcctactcaggggcgccgcctctccgaggtggggcgtcctcaactttcctctttcttgagcccggcctgctccgg

SEQ ID NO: 5643 - DNA, 122 bp, Homo sapiens
aagataaagtactctttatgtgttttggggtaatgtttttggagtggtttctcaggaaatcgtataaagactggatttgaagaatctaataattcctattttggggttgtaataagaactac

SEQ ID NO: 5644 - DNA, 122 bp, Homo sapiens
tgccaagctatcaaaaaaagctcagactgacagcagagaactcaatagaaatgccccatccgactgttgaaactcaggcccaaactactgcaagagagtggagaactgtttctcctctgaaa

SEQ ID NO: 5645 - DNA, 122 bp, Homo sapiens
ttagagcatatacttcctatgtcatcagcttttcttttaattaaaaatgtttttgtattccgcctgcgactcggtcccggcgctgggctgaggggaggggttgtcttaaaagtctctccttc

SEQ ID NO: 5646 - DNA, 122 bp, Homo sapiens
agctgattgggaactgatcctcttaaaccctggtcacgctttctctgtgctgaagactcccgcttccttttggtttccccagcatcccggccacatctctgtatcttttcccatccttttat

SEQ ID NO: 5647 - DNA, 122 bp, Homo sapiens
ggcgatctgcctgcctcggcctcccaaagtgctgggattacaggcgtgagccaccgcgcccggccactctgtgtgattttcaatgaaaagtagtgaagctatcatagtgtggggtgaacatg

SEQ ID NO: 5648 - DNA, 122 bp, Homo sapiens
gctgagggccaaatgagcaggtcagttcttcgagcacgtgtgactattggaacagagcaacgacctaaggtttaagccttaaaaagggcattgaagttaagggactagacacagcagcccaa

SEQ ID NO: 5649 - DNA, 122 bp, Homo sapiens
tcaagttttttcttttttagcgcaaactagacgcgctctgagagccaaaattagcgtccgcgaaccccaccccattgcctccaacagacctagctctcctttccaccctcaaacagccgtta

SEQ ID NO: 5650 - DNA, 122 bp, Homo sapiens
acgtttgggagccgaaagactggagccgtttccttgtggctggagcgcttcccgtagcctcggggaaggagcaggatttagaggaccactagttggaccccatcctcgtgctggaggaacag

SEQ ID NO: 5651 - DNA, 122 bp, Homo sapiens
aaactactgatttgcttaaaagagaagaaagaagataaattaaagcccactaaataaatgcggtaaggtatgagagaagcagaagatactaagcatctccctttgcaaatgctccctcaagc

SEQ ID NO: 5652 - DNA, 122 bp, Homo sapiens
gcaggcggaaggtgacagctgagccggcagccagcaggatctgaaaatggaccagctgcccgggcgccaccaccttgctgctggcccacagcaccaggcccacgatgggctcctccgccgtg

SEQ ID NO: 5653 - DNA, 122 bp, Homo sapiens
gttgggaggaaaaatagaagccctctcaaaaccatctggtgtgcctgcggtggcgtggcgcggctcagcagcccacatggatgagcgcagcgggtgtgtcattgcctgggagggacgcaggc

SEQ ID NO: 5654 - DNA, 122 bp, Homo sapiens
atattttaaggctgtccgtgggcgctgccgagaaacaggaagtggcctcagtgacccctgcgcccggccgcgcggcttgttcgtacttggttgccgtgacaaccagacttcctagccccagg

SEQ ID NO: 5655 - DNA, 122 bp, Homo sapiens
acaggcatgagccaccatgcctggcccaaaatttttttaacaaaaattagcagggcaggccgggcgctgtggtagggaggctgaggtaggagaatggcgtgaacccgggagatggagcttgc

SEQ ID NO: 5656 - DNA, 122 bp, Homo sapiens
ggcagccctgcccatccctacctcggaccaggatccggcggcagtaatccgggtccgctgcggaattggatttacttttgttacaatcctcagcagcgcccgacgctgagaaggcgccctgc

SEQ ID NO: 5657 - DNA, 122 bp, Homo sapiens
cccgtacccgaggcccacccagtccatctgttcattggtagatacaccattccgccattccgccagtggctggtgcagagaaccaggaccaccacctttgaaaagacctaaatcaatactcc

SEQ ID NO: 5658 - DNA, 122 bp, Homo sapiens
tctggtttgtatcttgggccatctcaagacagttctaaaactcaggactagaaaaaggcccgaatgtggctaaggaaacattgccccataaagtttcccaacgaaaacctcaatcccaagat

SEQ ID NO: 5659 - DNA, 122 bp, Homo sapiens
agacaggtggatggaggaggccaacactgcacactttctagagatgtgcctgggcatctccgcatgtgttacctctattttatatataatagtcatttgatatgggaattagaactggcgcc

SEQ ID NO: 5660 - DNA, 122 bp, Homo sapiens
attaggtctcggccttattttacccagaacttattcaagatggagttgctctggttcaaacgtctctgacacctgttctgagttgtgagggctggaatgagataaatataagaatgtacatg

SEQ ID NO: 5661 - DNA, 122 bp, Homo sapiens
actggcatgttgaactacaaagtccatgatgcagtgcgggatcgcagaatgccgcgagtgcgccctggttaggttggagtcccttggccatcaaccttttcacccggtagagctggttgcct

SEQ ID NO: 5662 - DNA, 122 bp, Homo sapiens
aaatacgaaacaacgtgtcttggatgtcagacctcacaccctctgcagtgctgggagtcccgagggcctacgggccgccttcggccccgcccgggctcagaaaaaggcagccactggcttaa

SEQ ID NO: 5663 - DNA, 122 bp, Homo sapiens
ggcacctggacggacctggcttctccctgtgcctctgaagggcggacggcgttgtgtctgcgcagtcctgcaggcgggagaactggagtgctgctgtcttcatttgctcacagggttgagca

SEQ ID NO: 5664 - DNA, 122 bp, Homo sapiens
agtgccagacagggggcgcaggtcagtgggtgcacgcaccatgtgcgaaccgaagcagagcgaggcactgcctccctcgggaagcacaaggggtcagggagttccctttcctaatcaaagaa

SEQ ID NO: 5665 - DNA, 122 bp, Homo sapiens
taggtaggcccttagactccggcctttgagtccgcttctgcgcagggccggggctggaggcggggcgaaggggcggggccgcaggcgaacgcaagtcccgcttcgctctcgggggcggactc

SEQ ID NO: 5666 - DNA, 122 bp, Homo sapiens
cttcgctccccctcctccccggctgggctgtgtgaatgaagctctgccggctacgtggggcgctcactcaacttggtgtcctggacgccagagccgaccgagcgcgctgcccaccggcggcg

SEQ ID NO: 5667 - DNA, 122 bp, Homo sapiens
ggcgcggaggacaggaaccccagcgccggcagctaagcctccagacggagcccgcccctccggccggttcctgcctccaattggcccgcgagcccgtccgtctccaccgtgggccacgcctt

SEQ ID NO: 5668 - DNA, 122 bp, Homo sapiens
tcaggggtttggcttatttcagttcttgtcccattgaattctagggaccctgcctcctcccggacatgagccattggcggggtttccctgtcttgtgactcacccacctgtgattcaggctc

SEQ ID NO: 5669 - DNA, 122 bp, Homo sapiens
gggaactttctttactctggctttgacctccatccctcggaagcccgtggcttttcaaggcgagggagtagaggcagcttaagactacaaatgaggaggggccaaaattgtttttctttatg

SEQ ID NO: 5670 - DNA, 122 bp, Homo sapiens
gtgagcagacgcccttctcctaggaggccggaatttctgcctccatctcccaccggggtccggctggccagaggcaagcttcgagaccccccaccaaccaccaccaccgttgcgagggccgg

SEQ ID NO: 5671 - DNA, 122 bp, Homo sapiens
gcgcattgcctcagtctaagggcgggccaccgggagcgtcttagcggctcggggcggggtcggaggcggggtttgactgagcctgcgtcgggctctggataactgggggcgggcttgggagg

SEQ ID NO: 5672 - DNA, 122 bp, Homo sapiens
gttgtgcccccgaagaaggacagaggtccagcatggggtcagtgggctgaatccatcccccgaacatgccacagcccaggggaggccagcctgcctggcagctgacacccagccctcccccc

SEQ ID NO: 5673 - DNA, 122 bp, Homo sapiens
ctgaaactctctgcctgctcgtgccaccagcgcatgccaacagtaaggggtacggggtgtcgccagcctgcagtgctgtgggagagaaacaatctctgttctggtgctgtgtgggtgcccag

SEQ ID NO: 5674 - DNA, 122 bp, Homo sapiens
cgcaggcggccggcccggcctcgcgctggcgcgctctgctccgagtggcaggaaggggctcgcaggcgccccgcacgcgtctcgtcactattgtttaatcgagaatcagcaacgcctcccgc

SEQ ID NO: 5675 - DNA, 122 bp, Homo sapiens
ggggtgggctgcgcgcagacatccccttacaacccgaatttccatctggtccagccctctcgtcttgtaggtgaggaaaccaaaggcctgagggagaactgacttgccaggaacctctctta

SEQ ID NO: 5676 - DNA, 122 bp, Homo sapiens
cattgaggtctgcagggggctccacaatcaccggagcatagcatgtgaagtaattctggtcgagctctccaatgtacctcccctttagattgggaggagtgttacaccgggcacaacaagct

SEQ ID NO: 5677 - DNA, 122 bp, Homo sapiens
tggctggaagtgtgggggaagggaaagggaagaagggaggacatggccccagccacccaccgtgccattcctgggttttgattaaagaggaaaatattggctctgacattctcgatttgcaa

SEQ ID NO: 5678 - DNA, 122 bp, Homo sapiens
tgcagcctctatttgaatgtcttagttgataggcagctcactttctcccaaggcagccagcgccaccttggatggctgggacggttataaaaccactctcccctcatgtactgcccacatct

SEQ ID NO: 5679 - DNA, 122 bp, Homo sapiens
cctcaaaggtatggagcctgcggccatcttccctccccattaaggagacagctgtctttgcgggcatccaggagactggacagagagaagacaaaaaataaacatcactgagtgccagcctt

SEQ ID NO: 5680 - DNA, 122 bp, Homo sapiens
ctggcctttccttcttcttctcttccccggcagcacagtgtggctgtttgtctccttgcccgccaaagttctgcccagtccaacgactccacgcagctcgcccttggtaaggggtcggggag

SEQ ID NO: 5681 - DNA, 122 bp, Homo sapiens
gagggggggagcggaggaaaggggtagctccgccacctctgctggcggcggcggcggcggcgaaagaagaagaaagtcagggcccgtacctaccgccacagactcagaaacgcccctgcccc

SEQ ID NO: 5682 - DNA, 122 bp, Homo sapiens
cccagaggcagtggcaggaggtgactgagggcccactggagcttgaacctcaggctctgccggctccaccagccctgcagggggagcagccctgccagaggagcagctggtacaaccccttc

SEQ ID NO: 5683 - DNA, 122 bp, Homo sapiens
caaaacaaggagaccagccctgcaaagcagcgttgactttccactggacccaaaaagtgccgttttgacctcagccaagcattgcaggctgtgaacagcagagtcagcttttgaggatcctc

SEQ ID NO: 5684 - DNA, 122 bp, Homo sapiens
gccgccgccgccgccgccgtcgtccggacccgttagctcgcagctctctcgtccgcccgccgtgggctagtcccgcccttgcctggcccaaccctccccgagcgccgccgccgccgccgcct

SEQ ID NO: 5685 - DNA, 122 bp, Homo sapiens
gactgtcagatcaaagccatgctgcaggcagctgagacaggaacactgccgctgctgctgcgcccggctggccgcagccccacgctgtgggttagttctttgggggccctaaaggagagctg

SEQ ID NO: 5686 - DNA, 122 bp, Homo sapiens
ggccggccccggaggcgcaggcgggcggcggggagcgcagccgcagccagaggtgcagcgcggccccgagcacacacgggcacagcagcaccagccagtttcgcattggccgcccccgccgc

SEQ ID NO: 5687 - DNA, 122 bp, Homo sapiens
tctccacccgctggagcctgcaaatgtgctgggaccaccaaccagagtgtggacaagctgcgggagacccgtcggatccgggagaggccgcggcagcctagtctgcgggtgtcttgggcccc

SEQ ID NO: 5688 - DNA, 122 bp, Homo sapiens
caagagtgaatgagccaaacgacgcaaacgtgccctcgccaggctggcaactggtaggcacgcagtgtattagttgccctggagagaaacaccctggagagaaatacccaatttgtgaacta

SEQ ID NO: 5689 - DNA, 122 bp, Homo sapiens
actgagccttgcgcgctgacccggttcctacacttaacttttccggcttcgggtttaagacgcgtgcgcgcacactccgctgctgtgggcgggcattggggcggggcgataccgggggccca

SEQ ID NO: 5690 - DNA, 122 bp, Homo sapiens
agagtccacaacagatagttcttgtttctactttagtcagctgggctgggcgtggtcctgcgaggaggtgggcggggcgcactgtggggcggggccggtggggacgtgggcggggcgcattg

SEQ ID NO: 5691 - DNA, 122 bp, Homo sapiens
ccctttgaaaatctgaagacttgaggaaatgcttcccagaataaaacgcccagacacacacgtaaaatacaatttctaggggtcacgggtttccgaagccaggctgtggaccacagcttccc

SEQ ID NO: 5692 - DNA, 122 bp, Homo sapiens
ggcctggtccaggaggctgctgtactccagctcctcgcagagccgctgcagagtgttgagcggctcgttgagctgcacaggcattgacaccttggacaggtctttgccgatgttgttgcgca

SEQ ID NO: 5693 - DNA, 122 bp, Homo sapiens
cggccccgggcctgcagttgctgctcccgctgcagctggctcttgcgagcttcccgcagccgtcgcacctctgtcatcaagaattgggtcaggccctcaggcccctcctcatctgccaggac

SEQ ID NO: 5694 - DNA, 122 bp, Homo sapiens
gccgccagcaataagaacggttggtaggaaccgcggcttccgggtggcgcgggtgaatgacgtaagtggcaagcgcgctggccaaccaaatagccagttggggaggggcgggcctgagtgga

SEQ ID NO: 5695 - DNA, 122 bp, Homo sapiens
caaaaaacaaccaattccttcctcaagatcaggcttcagctttatgttttcttcactaaacgtttctgctgtctttgaaaatatgcccaacttctcattctatttccaatattttcctaatt

SEQ ID NO: 5696 - DNA, 122 bp, Homo sapiens
gcagtcggtcttcaggcctagcgggcttggctgggctgggtcggtggacccctgggctggcggcgggagcagagcatcgagcggcttttagctggggttcgggcggaggacctgggacaacc

SEQ ID NO: 5697 - DNA, 122 bp, Homo sapiens
caaggaagtggcaagcaacaactttgaggtgagcagcaagttgtgcacctcctctcaaggcgctggatcagcacccctgagctgcccccacagcacacactcccaatgcgaggcggcggcgg

SEQ ID NO: 5698 - DNA, 122 bp, Homo sapiens
tcacgcgcctggaatgtgagtggtgcaatcccggcaaagctccccgagaccccagtgccacgcggatgagaccgaaggggagcggagttgagccaggcgccgggctagtccacaacttggca

SEQ ID NO: 5699 - DNA, 122 bp, Homo sapiens
ccccgcgttcctcacctgccggcaaggcgaagaggctgagcgcgaggatggcgcagtccacgccgtggcgctcccaccaggagctcgtcctcaccacgtcctgcaccagcacctccagctcc

SEQ ID NO: 5700 - DNA, 122 bp, Homo sapiens
gtcctggctccgtggctgtgtggcccaccagcctgccgtatggaggcgggcacgcatgtgcgtgagacagttggcatgtcccaggcagagaaccatctaagttcacactgcacctctagaag

SEQ ID NO: 5701 - DNA, 122 bp, Homo sapiens
ccgcaggctgaaggaccagccctgtctcctgtggccaccaacagagctgtgcgccctccccgaaccctcactcatgctagggcccccaggtccaacctcctagggagaggggtccccaacct

SEQ ID NO: 5702 - DNA, 122 bp, Homo sapiens
actggtaaaaccagagaacagaagaattcctcagctcaggacaattcttatccctactgacgactcacaagacatccagtgagtaccccaaagttgtcctctggaagttgggctgtcagaag

SEQ ID NO: 5703 - DNA, 122 bp, Homo sapiens
cctgagggaatccctggggctttgaactcaaggaagggcacccgcatgaagatgggagctcggtgacacttctccaggtcaccaccctggtagatcatgtccagaatctggcttacccaggt

SEQ ID NO: 5704 - DNA, 122 bp, Homo sapiens
aattgtttaaacagttgctggcaccaagtgagcactcaggcatgttgactttgatcatcacgtgatgatgcagctggccggtgtgtgtcatctcgggacaggagagggaagtgtcagagacc

SEQ ID NO: 5705 - DNA, 122 bp, Homo sapiens
catacactgtatttctacaatagcactatcacagtgcttcatacagtagcaccccccatccgctaaagatacattcatacaggagtcccctcaatcctcaggagatgcattccaaaaccccc

SEQ ID NO: 5706 - DNA, 122 bp, Homo sapiens
ttagaacaccaggatgtcagaatcagaaaattcatggttacggccgggctcagtggctcacgcctgtaatcctagcactttgggaggccgaagtgagcagatcacctgaggtcaggagttcg

SEQ ID NO: 5707 - DNA, 122 bp, Homo sapiens
ttgcatggcgttcggggtttttggtaggtagagcagcccgtcactctggaaggccgggaccgcccactccacctcggtccacagctctcttcctgcgcagttcgcctctgcagcctctgcgg

SEQ ID NO: 5708 - DNA, 122 bp, Homo sapiens
gccagagagtggagagtgctgattggtcaggtcggagatgcaatcatagggagtggaagccgtcctcttgtgctgagtggatctctgggtgggggccacaaaaccggatgatccggtttctt

SEQ ID NO: 5709 - DNA, 122 bp, Homo sapiens
ctcccagggccagcatccactttcctttctcctctggcagttcatggcagtgccagtttccgtgtgcccccgccagccctgagtgttattttattttttattttttatttttttgagaggga

SEQ ID NO: 5710 - DNA, 122 bp, Homo sapiens
ttggccgatcaacggtgacgcctgtcagtggccagactccgattggtcagcgggtagtcccgccccccccccccccccccccccccccaaccgcgagtgtgggaattcggcgtcgcgggagc

SEQ ID NO: 5711 - DNA, 122 bp, Homo sapiens
ccctgggtctccggtttcctctgccctttctccaaaaacaattctatggggctgcaaaggcgtagcgggtcaggctggcggggcggccgctgtccgcggtgctgattccctggtcctcgcag

SEQ ID NO: 5712 - DNA, 122 bp, Homo sapiens
gtcactggccccctgccacaaacacggtggtggggcccgaggggctgtgctccccgccggcgcatgccacctgtcactagtagagatgggactcaggctcctcacacacccttccccgctca

SEQ ID NO: 5713 - DNA, 122 bp, Homo sapiens
caaattgaaattggagaataatagcgccggcagctgggggagtgcgtgcgcatattggagcggagatggggaatcgtggggcggaattttcatgagctgcactctttgtcagcgctcttgta

SEQ ID NO: 5714 - DNA, 122 bp, Homo sapiens
cgcagggcccacctgcaccctccagggtccctgggctacaggctctgatggttcctttcccgtgtccactggactgggccacagggtgcccaggcatctggttaagtgagattctgggcatt

SEQ ID NO: 5715 - DNA, 122 bp, Homo sapiens
aaagcggccttggcgcaggccggcgtgcccgtcgcaggcgcagccagagttctctcggggcggggaatacaccgcgtggctcccctgcgcctcctctaatagtcctacacgcagacaaatcc

SEQ ID NO: 5716 - DNA, 122 bp, Homo sapiens
ccatatccctcgtgtacacacacacacacatacacacagtgctcatgacctactaaacagcgcatgtgcctctcagcccttgccatgacaaccatgaggtctgcaggaaacacgtccataga

SEQ ID NO: 5717 - DNA, 122 bp, Homo sapiens
atcattgtggtcccattttacagataaggaagcaccttaccagcctaggcgtctagtaggcgcagaggccaggaaggaggtgccccagccgaccccgcctccagggctggccggttccagcg

SEQ ID NO: 5718 - DNA, 122 bp, Homo sapiens
acgaaaatagaaaatgaaaaactgtaggttctagaagattcaagcgttgccaactcatgccgggagacctgcgctctgtcataatgttgcttctccttttatacctgactctgccatctgat

SEQ ID NO: 5719 - DNA, 122 bp, Homo sapiens
catctaaactgctctgagacccaccaggcacaaagccaggcagcttggaaattggctggacgggcacagctgcctctgacccagctgccttgatctgcccttgacacgtactcttcatgcca

SEQ ID NO: 5720 - DNA, 122 bp, Homo sapiens
ggctcaagtgatccgcctgcctcggcctcccaaagcgctgggattacaggcgtgagccaccgcacccagccagtacaacaatatttaacatgctcagtgctgagcaacagacccctatgtca

SEQ ID NO: 5721 - DNA, 122 bp, Homo sapiens
catgcccaactggtcacatgggccgtggaacacagcctgcttgccagtaattagcagctacgttatggcaggagataaaccaaagttcactttgtgtttgcacccagaaaggtcagagctat

SEQ ID NO: 5722 - DNA, 122 bp, Homo sapiens
cacaactttttaaaaatgtttaaaaggtgaaactaaaattctatacaactataaagggtgcgtgtgtatgtttagagactgatattcaccagatagctgtataatgataatgtccttgggtc

SEQ ID NO: 5723 - DNA, 122 bp, Homo sapiens
ctggggaagggagacagctgtgcgacagctttcagagctcaagggtcacacctaaatccccgatttccccactgccagcagccccagttggagggtggaggtgaaggttgaaaggagggtgg

SEQ ID NO: 5724 - DNA, 122 bp, Homo sapiens
agattatattcccacactgaagattatggcacttcacctttctgtccatcccaactcctgcgatcatttgacctagatgatcaaaatatctaggtaaaagacccattcaacaccctaacctt

SEQ ID NO: 5725 - DNA, 122 bp, Homo sapiens
aggaagtgctatgaaccttggcttccctatatacatgccctagggaaggcctagaatcttcgtcagttaaatatcactatttgggatttctctccaaatgaagtaactatgcagaaaaacat

SEQ ID NO: 5726 - DNA, 122 bp, Homo sapiens
ggccaaaatccccgcgggttgggcggggagggggcggggctagctgggcggggctgactgcggggaccggctagggtctcacaccctccagggaatgaatggctgcgacatggggcccgacg

SEQ ID NO: 5727 - DNA, 122 bp, Homo sapiens
tctcatcttcatatctgaaagacagtgtactttttgtctccctaagccctgtgtctaggtcgtttgggaaacgccttggagagtcaagaataaatttgcaggtcaaacaatggatgactgga

SEQ ID NO: 5728 - DNA, 122 bp, Homo sapiens
tagagaatatattaatattagcatgactcgaagcgggcaagagctaatcgtagctcagaccgggtggttcagaacaagcagtacaggtttcagatagattctgcagacattttaacagtaga

SEQ ID NO: 5729 - DNA, 122 bp, Homo sapiens
ctttgggcattccaccccctcaccttgcttccccgcaggtggctgtgatggggccgtgcgcgtctgggacatcgtgcggcactacgggacacaccacttccgaggctcgcccggtgtcgtgc

SEQ ID NO: 5730 - DNA, 122 bp, Homo sapiens
agactattgtgtgggataatgttacattgtttcacagccctacaaagtttggccacaaaacgtgtgggcagattccgtaactcaaccggaaacgcgaaggactgaaacaaatcaacacacaa

SEQ ID NO: 5731 - DNA, 122 bp, Homo sapiens
cttctgcccccgcctctgtgaggcctctcgaggcagtgtctgtgtctggggcagcgacgccgacggcgctgggggcgcgaaggggctcacgctcctgcgttcccctggcgccggtgagtggc

SEQ ID NO: 5732 - DNA, 122 bp, Homo sapiens
attgcctgagcccttctagagaatgtttgctcactcctggcctagagttttgcctgcacacggtaggggctccatctatttgttgagtgaatgtgggcaggcatgcacatgtgttgaagtgg

SEQ ID NO: 5733 - DNA, 122 bp, Homo sapiens
tatgaggtcgaggagtcccctaagccgggaatcgaacttggtgaggggggttgggacggccgatggccaaatatatgccccctggcctgtgtttcatttctttgcagaactgagcaaggatg

SEQ ID NO: 5734 - DNA, 122 bp, Homo sapiens
ccgcccagggctacaccactcaccgaaaattgggaggcaggtctgggaggcggggttgagcgcccaccgccttgggcgcgcccgcgccccccgccatcgcggcccccgcgcccccggcccac

SEQ ID NO: 5735 - DNA, 122 bp, Homo sapiens
cccagcccgcccggagcccatgcccggcggctggccagtgctgcggcagaagggggggcccggctctgcatggccccggctgctgacatgacttctttgccactcggtgtcaaagtggagga

SEQ ID NO: 5736 - DNA, 122 bp, Homo sapiens
tggctgcagcatcccggggaagccagaggatctgcagagaggagaggtcagagaaagtggcgaagcttggaatgataacacgggagttgacaaggggccctgctgagggtactcagagctgg

SEQ ID NO: 5737 - DNA, 122 bp, Homo sapiens
ccccccgtcaccatgaggttggggttcaggccgttaggagcacagctggtagggtgcaggcgggccaggtcagccagctccttactctctctggaaggaggatcataggtgtcagcgacagc

SEQ ID NO: 5738 - DNA, 122 bp, Homo sapiens
agcatgaatccattagtttatggtatacaaaactctttcctgtccatacctcattgctcacgggatgttcctgtgagggaggtagggcaggtgcattgatatccatatttaagaggtaaaga

SEQ ID NO: 5739 - DNA, 122 bp, Homo sapiens
gtagataagacttgcaaattacagatgtggacggtgagggaacgggaatttcactgaaagcgcctgagaaccagtaagagacctgcaacagctttgtgctccactggcgaatgcttcctccc

SEQ ID NO: 5740 - DNA, 122 bp, Homo sapiens
cccgccccgcctgctgagcgcggcctgccccgcccgcacctctgtctaggcctctgggggcgccccggccccgcccccgccgccctcggccaatcagacgtgcgtctcctcggccccggggc

SEQ ID NO: 5741 - DNA, 122 bp, Homo sapiens
ccaggtggtgagggtatcaggcaggcagagaacagtgctgtcctttgccttggctcttaccgtctcttattcagcattcggaacccagttttataaatcccagggcacctacagatagacgc

SEQ ID NO: 5742 - DNA, 122 bp, Homo sapiens
cagatataaatgcaatttcattgtcttgaccgttaggaattctctgaaggtctgttactacgtaaattgtgtgaactccgaacagcagagttcaaacttgatcagaacaaaaaaggctagag

SEQ ID NO: 5743 - DNA, 122 bp, Homo sapiens
ggccgtcaccgagtcctctagcgagggtctgggagctgggagaagggtccgcttctcctccgcccctcaaatcaaaggcacccccttcggatgattcctagaaaggcaatcgcatcagtgtc

SEQ ID NO: 5744 - DNA, 122 bp, Homo sapiens
acccctgattaagtttaatgtctctaactctctacctaattaagtccagagttctatccccgggcttcacagattttcatcctatagcctctgcctattttctgagattttattctactttt

SEQ ID NO: 5745 - DNA, 122 bp, Homo sapiens
ccatccaggcgtgtacaaaagagtcggttgctgagccaggaaggctgtctccccgggctgcgcaagctccgggccgcctctcctgggctcaggagggcgggcaaggataagaaggcagaagc

SEQ ID NO: 5746 - DNA, 122 bp, Homo sapiens
agaaaaaaaccaccacgaaccttcctgagatcaagcgcagcctgtgctggttgtgtaagccgtggaacgtatgagaaagccaggaagaagagcacccccacgcccagcccgcagcatctcac

SEQ ID NO: 5747 - DNA, 122 bp, Homo sapiens
aaagaaaagcatctcttgaggagtaacttaggccagttccacgttgaagagaaaagtaaacgcctatcacagcagctctacaggattaggaaccggggcaatggggatggtggtggttccgg

SEQ ID NO: 5748 - DNA, 122 bp, Homo sapiens
ccggggccggggcctgggacgtgggtggagccggggcgggggcggggcccttcgcggtgccgtgaacgctgaggccacctcgctgcgcaggcgcggtcgtgagctcctcagacggggcgggg

SEQ ID NO: 5749 - DNA, 122 bp, Homo sapiens
ccaagcaagcaagtgtccagcacatgggaaaatcacacacacacaaggagccacagtcaccgtcagggctgaaggaattttggaaagcatgaagtggcaaagccaaagccaggatcacaggg

SEQ ID NO: 5750 - DNA, 122 bp, Homo sapiens
atataaagacactagcgtataaagagtgcccagttgaagaaacaggacatcaccagtcctcggaagcccgttagtgaccccttttagttattcctttcagttatgatcactgccgctgcctg

SEQ ID NO: 5751 - DNA, 122 bp, Homo sapiens
aaatgtatacctttaggattattggaagcaaggagcagtgtagacaaggcagaaccttcacgcaaacttctggtgcagcaaatggacaggtggtagcctgcagatgcactggggcaatcaga

SEQ ID NO: 5752 - DNA, 122 bp, Homo sapiens
agaagatcagaatcctctaggggtggatcctgaaatggtggtggaggaaagagagaccagcgatgtgatacagaagaccctgggcaaggggaagggaccataggcaaggccatttccacctc

SEQ ID NO: 5753 - DNA, 122 bp, Homo sapiens
attttgtatttttagtagagatggggtttctccatgttggtcaggctggtatcaaactcccgacctggtatctgcccaccttggcctcccagaatgttgggattacgggcatgagccacgac

SEQ ID NO: 5754 - DNA, 122 bp, Homo sapiens
aggaggtcccatgccctttttaaacaagcagatctcttgtgaactaactgagcgagagctcggttatcaccaagggggtggtgctaaaccattcatgagggatccacccccctgatgtagtc

SEQ ID NO: 5755 - DNA, 122 bp, Homo sapiens
tgggctgggcccggcttcagaagctttagagcgctgccctctgcgctcccgtctagaggccgcaccgttcacgccccacgtctgcgcccaggcgaggggatttcctgccaggcgaagtacag

SEQ ID NO: 5756 - DNA, 122 bp, Homo sapiens
ttgtaaagctatgcaaaatccaaagataatacagaagatgcatgtagtcctagcaaacatcgacctgaaatgatttgaatttatccccatttctcttctatcctgaaggaattgctcattaa

SEQ ID NO: 5757 - DNA, 122 bp, Homo sapiens
gctatagcccaacttttggtgggaaacatatgcagctcttctggtgatgctgtttgggcccgcatccctgtgacagtatttcccaaaagggactataaagataactcacaagccatgtagct

SEQ ID NO: 5758 - DNA, 122 bp, Homo sapiens
ttcccttggctcctcccctttgttccatttccactgagggacccaccaacccctcgctcacggagcctcctaactggagagaaccacttccaaactgttcagccatctcagtttctcctaca

SEQ ID NO: 5759 - DNA, 122 bp, Homo sapiens
cagacaggtggctgccagaggctaggggaggggaaatggggagaaactgcttgttgggtacgaggtttccatttagcatgataaagaatgtttttgagggccaggcctgatagctcacgcct

SEQ ID NO: 5760 - DNA, 122 bp, Homo sapiens
agtgcggtcggcagtagagcctggcggtgtcttggcttcggcgctttaaccctgtaggggcgtgcgactgcgtccttctcaagggggcgcccctcgagcggcgggctgagtggcgtccagcg

SEQ ID NO: 5761 - DNA, 122 bp, Homo sapiens
tttcctttccctggataaactacttttgtattgactgaaagtgcatttcatttccgacaccgagtccctgagcaaagaatggatgaaaagacatattatcatatgcagagtacagaaatgct

SEQ ID NO: 5762 - DNA, 122 bp, Homo sapiens
actgtttctgcagtggtataaaaatcacacgtcaaaaaatcatggtaaatgagcactgttcgaattccctttttctttctccacactctcttaatacgtaaggccgtagtgccttaggtcat

SEQ ID NO: 5763 - DNA, 122 bp, Homo sapiens
tagaaataactaaacctgttctcagctgagtcccaggagtgagcgggacacgccccaaaccgcgtgtccccacgtgctgaggagtgaccctggcactggcaccgcgtgaaagggtaggagca

SEQ ID NO: 5764 - DNA, 122 bp, Homo sapiens
agtttatgagctctgcggttgagtgggtagtgaatgtcgaccagagactccaccaatcagcgagcgctctcggaaggcccagttgagtgagacggcagggagggcggggactgaggcagtgg

SEQ ID NO: 5765 - DNA, 122 bp, Homo sapiens
tagaaaccagccccagtgcatgagcatgcgcgtgtagctgtggtcgggggtgacggccgccgcgcgcgcccacactgtggcgaccagccggggcggcgggaggggctggcgggagcccacag

SEQ ID NO: 5766 - DNA, 122 bp, Homo sapiens
aacactgaatctcacatccaattatatcaacagatatttatcgcctcttggtgacgtcaacgagccctaaaatggaagggcttcttatgacttgtccattgacaaaaattcttgaatgagat

SEQ ID NO: 5767 - DNA, 122 bp, Homo sapiens
gagcttccaatgtgaaatgttaagtttccaattgcaagaatatgtctaaactacaggccccgaaagccctgctttggtccttctgctggcacaggctggcttttttcatgctgtcaacttta

SEQ ID NO: 5768 - DNA, 122 bp, Homo sapiens
ccctgattttattgtcatcccccagggattgtttctgttctcccgcgttcccagagctttcggcgcattgctcaacacacggtgtgcgtacttgttgattttaatgtatgtgtgtttgcata

SEQ ID NO: 5769 - DNA, 122 bp, Homo sapiens
gcccgattcccgttctgctgtattccttaccccctgtgttggggagggaggagctgcagacgctctgcctcctgccctggcaccgaggggttttcccagcatgtgccaggtcagccctgggc

SEQ ID NO: 5770 - DNA, 122 bp, Homo sapiens
aagccgctcgcagagtgcgccctctaccggaggggtgaaggaacctcatcgtcccaggtccggtactgtggcactccgggaaatcagacgtcatctgaagtccaggaattcctgtttcacaa

SEQ ID NO: 5771 - DNA, 122 bp, Homo sapiens
caaagccacagatgggggaggtctttcaggaaagtgcactcttctcctgcaggtggtggacgtgaatgacaatcccccacaggtgaccatgtctgcactcaccagccccatcccagagaact

SEQ ID NO: 5772 - DNA, 122 bp, Homo sapiens
aggtcgaccttgtttgcctaccccaaatcagtgacatctcttcccatcatcctcccccatcgacctgagaaactaaaagtcattctggtggcaatgagttgtaagaaattcattttttcatc

SEQ ID NO: 5773 - DNA, 122 bp, Homo sapiens
accttggaggggccaggggctgaggaaggccggacccaggttccaggggcgcaggcagtgcggcttttggctgtgtacatagggtgctttattctccacagagtgatacatgctaaggtggg

SEQ ID NO: 5774 - DNA, 122 bp, Homo sapiens
ccgctggcaccggccagggtgacttcggccccaacagtgacggatccttccacgcctcgtcgtcactaacagtcaaaagtggcgatgagcaccactactgctgcattgtgcagcacgcgggg

SEQ ID NO: 5775 - DNA, 122 bp, Homo sapiens
agcatcttgccttcatccttcttcactgttaaccaaccctttactgtgtgactatttcaccgtctatttatttttctggcaaggatttttttttctgcctgttattggatccctaactcaca

SEQ ID NO: 5776 - DNA, 122 bp, Homo sapiens
agaccctgtctcacaacaaaacaaaacaaaacaaaacaaaaggataggaggttaagggagcgagcccaggcctggactctgccacagtcacctgagtttagaggtgaagggactttagagac

SEQ ID NO: 5777 - DNA, 122 bp, Homo sapiens
aggtagtgcgagatccgagcaggcagctccaccatcagagctgaggaaatgaaaccaactcggtcctgagttccaggaactcggaccgggccaccctcacccctggttcttcccatcaccgt

SEQ ID NO: 5778 - DNA, 122 bp, Homo sapiens
tatgcgataagcgagcgaagacgcctccaccctctctcccgccagaagtgacgtcagtcacgtgggaggacaatggtgagaagagggaacctaagaattcctggactctgactgggcgtgag

SEQ ID NO: 5779 - DNA, 122 bp, Homo sapiens
ccatcactatccagggcaaaactcactgaactcaaggattttcatgtcttctttcccattcgacttccctctcttgctccctaaccccctcaccacctcacatgagaaccgagcagacacac

SEQ ID NO: 5780 - DNA, 122 bp, Homo sapiens
gtttttctccgcagccatgtgtcgaagggcgattaacattcgctcgacaaaaccctgtcccgggccatttgggagttgcacgcgttcacacccggggctcagcccggtgcgccttcacgcgc

SEQ ID NO: 5781 - DNA, 122 bp, Homo sapiens
ccactggttggctgcatcccccactttgcattttctggggctccacatggatggggcctgcgatgtgtgcgcactctgcagtgtcctccccggcggggtgacttcggagcccgtccaaacag

SEQ ID NO: 5782 - DNA, 122 bp, Homo sapiens
tggcgggtaaagcatggctctgagcctcatggctgtgtttgagcctggttgtgcggttggcgagtttctagtcttgtgaacacctgtgaggtttctcacctgtgaggtcagaagcccagtgc

SEQ ID NO: 5783 - DNA, 122 bp, Homo sapiens
gctgaatggagcggaaccccggggtgcgggagaagtgcccgggctgggatcgtgggagcgcgcggcggataacagcgcgtccagacaccgggcgtgggtcttggcgggcggtcgcccaggag

SEQ ID NO: 5784 - DNA, 122 bp, Homo sapiens
agaaccagaacccacccaccttccgcggtgggaattgcagggcgcggctgggtttctgtgcggtgaaggttgctcaaaggtctgggagcctggggggccccagagtctcgtgaggatggtgg

SEQ ID NO: 5785 - DNA, 122 bp, Homo sapiens
ggctgctgtgagaacttgtgacccccgagatcagaacagccttcgggtcccagagcttcccgcatgatcgtgtgtggaacagaccgggagattccagcagatatgggttcaacgttgaccac

SEQ ID NO: 5786 - DNA, 122 bp, Homo sapiens
ttccctattcatgcccagcggttcccaatgacatcagtgaccacaaggtcatgatttccccggacattccctgcttgatcttccatgatgtcacctgctaacgcgtctcacctgatctttca

SEQ ID NO: 5787 - DNA, 122 bp, Homo sapiens
cgcccgcgccgtcagccttctgggcagcagcccgggctggctccctcccggggcggcgcgcgctacctggatctcgtggatgcggctgaagccgtccctgcagaagaactccgccaggttgg

SEQ ID NO: 5788 - DNA, 122 bp, Homo sapiens
ccctcccgcccgttcacttactggtgcccagcaccgggcactcagtgaggccttgcaatacggttcacttgttgaattgaattcgtcaattgttgagcgggccgtgctgccaggcaccgcac

SEQ ID NO: 5789 - DNA, 122 bp, Homo sapiens
tgggtcaccctggaaccggcactcatctcacccctgctttggggtctgcctacacctgaacggtgtcaataagtgcctccagaaagtgtcttcctaaatgcacctcaagcccccaacaccct

SEQ ID NO: 5790 - DNA, 122 bp, Homo sapiens
acttcatgaaacaccgcggcttgtgcgattttactctgatgttgttgggctggtgttgtccgatgtttattgggtgatgcaatcaggtgacgcctaaggggagggctgggaggagcatctgg

SEQ ID NO: 5791 - DNA, 122 bp, Homo sapiens
ctcccttgtctgtggaattctagctgtgtccttaccaccctgtgtaaagtaggtcacccccgctattctctgtcacagtagtctggctgtttcctacataccacttaactataattttaatt

SEQ ID NO: 5792 - DNA, 122 bp, Homo sapiens
ctttgaagagttcacaaggcaccctttgctgctttgtctggtttatcaagaaagtggctgcgcaattcacagagggggtaaaaagacctgaaaggagaattaagtcaggatgatagacagat

SEQ ID NO: 5793 - DNA, 122 bp, Homo sapiens
cagttagagccccatctctctggcgtggttgttaatagactggaaagtctgtgtctgtgtcgctcactagtaaccgtgagtttttaccacttcgtcacctgtcggcggcggccgggagcagg

SEQ ID NO: 5794 - DNA, 122 bp, Homo sapiens
cagatgaaaaagtctcttagaatgggcagggagtggcataacccagtagttaatgagggccgaccagcagacagcagtcaatgtcatggcagagcctggcagagcctagcagagcaggcact

SEQ ID NO: 5795 - DNA, 122 bp, Homo sapiens
gaacctcacacccattcctcctgggaagtccttccaggagtctagcccagttgttcttcacgtcactctgaagcatgttttcattcactgcgctcactgtctttaagccctggctccccctg

SEQ ID NO: 5796 - DNA, 122 bp, Homo sapiens
aatgaggaacagccattcccctccagcagggcctcggcaggtgggcccggcaggtgctcccgtgactctgcctccgcctccagccctggtctctgggatgcgaagatggatggaaagaccat

SEQ ID NO: 5797 - DNA, 122 bp, Homo sapiens
gaaaaaaggaaagcatgttgtcacttgagtgagactgctttagaaatgttaccaagttagcgttgggtgtttcctgttctttggaagagaacaggcctaaacagtaccttcctcctcctatg

SEQ ID NO: 5798 - DNA, 122 bp, Homo sapiens
cacctgatctctttgtaggaagctgtcataacataggtctaagaagccccatcctggccacgaatggtggctcacacctgtaatcccagcactttgggaagctgaagcaggcagattgcttg

SEQ ID NO: 5799 - DNA, 122 bp, Homo sapiens
cggcctttgaaagagggtgtcagcgcggggcagcgagacaaaggccaaaacacacacgggcggagagggacagatggggacgggcgagggaaaacaattaggccgcaagtgcgggggcgggg

SEQ ID NO: 5800 - DNA, 122 bp, Homo sapiens
ccgtctcctacccagctcagcctcttctcccccgctcagacaggggtccccatcacatgccgctctctgagcgacctctccataggccttcgctggcctcagagcccctccctgcgtgtcct

SEQ ID NO: 5801 - DNA, 122 bp, Homo sapiens
cgcggcctccttgtggtggcaccggcgtccccgctggagctgctggaggccacgcccaagcgtggcagctgctcctggcctgggaactgcaacaccaggcatacctatgtggctacggccag

SEQ ID NO: 5802 - DNA, 122 bp, Homo sapiens
ttcctgtccgacgccaggtttgttcaggcttctgcagtctcccaagttttcaggcttgtccgacacttcttgactgaagaatgataatgtttttggtaagactgtgccactgacagatgatc

SEQ ID NO: 5803 - DNA, 122 bp, Homo sapiens
ttctgtttataaaagattgccatggctgcacattgcatttgggtcaagagtggaggccgccgggaagtaggacgctattcccgagtccggtcacaagatggcggactggtccggcagaagac

SEQ ID NO: 5804 - DNA, 122 bp, Homo sapiens
tttggggaatatttcaaatctgaggggggaaatcttgagcgacagatgacaaggagtattcgcaaacactccaggctaatgttgcttgtatttggtcacaggtgtgccctgcttttgcgtac

SEQ ID NO: 5805 - DNA, 122 bp, Homo sapiens
ctggccagaagtgaatgcaccaacatccataactcctcggaaaagccggctgactcccctcgctcctttctcggatccgctgcctacgcctctggagcctcccggtaaatggtggacgtggg

SEQ ID NO: 5806 - DNA, 122 bp, Homo sapiens
cttttataaatggacaacctaagctgtgttaatctgacaagaaggctagaaagctcaatgcgtcttcctattactctgcatatcttatgtcttccatccaaaaagaatcaacttatcagata

SEQ ID NO: 5807 - DNA, 122 bp, Homo sapiens
cctgagctggagattcagctcgtcagggcacctgaggttgcgtctccaggatccaccctgcgtctgggtgaccgccgagctaggtgctcccggccgccggttcccgggcccgcagtccgctc

SEQ ID NO: 5808 - DNA, 122 bp, Homo sapiens
gccagaacagtggcagccgggccccaccaatcggccactgcgaggaccaccttgctccgccgcaaccacccccaaataccccacagacaggaggctgagccacgagccctccctgcagaaag

SEQ ID NO: 5809 - DNA, 122 bp, Homo sapiens
actgagggcgggggtctaagggcctgcaacaatgagatctgtcgccttggctaggactggcgccgagaggcgataggtctcgggagagcctggcgcagggtgtgggagattaggaatcccag

SEQ ID NO: 5810 - DNA, 122 bp, Homo sapiens
acttgtaaacttgtaaaaaatgcaagatctgcgaagtgaagctcaataaagcaaagcgcgcgggaaactgaggtgtgcctttatgttctgctttagcagacactaggtggcgagcgttattt

SEQ ID NO: 5811 - DNA, 122 bp, Homo sapiens
ggctagagcataccctctttggggaccaggacttccctccctgtagaactgagagggagtcgggagggggacttaattacccacaatgcatgccagcaaacctttactaactgcactatggg

SEQ ID NO: 5812 - DNA, 122 bp, Homo sapiens
tgtctttggagaaggatacccattgcatccgttttgatccgttaaggagtttccagagcccggacagctctttgctatacttcagtaaagcaatagttttcagatttctccggaaatgccat

SEQ ID NO: 5813 - DNA, 122 bp, Homo sapiens
tcacagagcaaggtgcaaattcctggcatctttactagttgcagccaatttcggcgatttcggcggtgacggggattctcagaggagccgcgtgcccgtgcgctcccgcctgtcggccccag

SEQ ID NO: 5814 - DNA, 122 bp, Homo sapiens
cctctctctctgactgcctgctggaaatgcccccatctccctttgagtcctcctcccgggcgactcctgtgacctgtaacctctgtcctgaaatcatcacaatggccagggtggcctcagct

SEQ ID NO: 5815 - DNA, 122 bp, Homo sapiens
acccacttcttctcctatctagactcctaaacgtgtctcctgtcccacccctctacactccgtgcatgactgtataaggctatggtctatacgactacatcatcttattcaccctgctgtta

SEQ ID NO: 5816 - DNA, 122 bp, Homo sapiens
tctgtcgcctgcgggcacggggcgagacgcagagaagcggacccctgaggccagcctgggcgtggactttccaggagtcgtccaccctcaggatacgcttgtcttcagagtccgtgtgaacc

SEQ ID NO: 5817 - DNA, 122 bp, Homo sapiens
ctaaggctgcctcctttcttgcataatttttctttgttttctgacccctggacccggctgcgcaggtgtgaaagatacagagcaagggatgaccccactgacctgcgtctgcaccgcttttc

SEQ ID NO: 5818 - DNA, 122 bp, Homo sapiens
cttggctgggcgactcctgctcagcttactttgaacaaacacagtgacctaaagcagagccgggcgctccaatcttttcatcaggaaagatttaatttattgggagcgcagagccacaaatc

SEQ ID NO: 5819 - DNA, 122 bp, Homo sapiens
aagaagcaggaatattcctatcgtgaccaacttcagggctcctcttagggcagaagaagccgatgtggagcaggtcacctgtcaggaggaacctgccttttctttcttttcttttttctttt

SEQ ID NO: 5820 - DNA, 122 bp, Homo sapiens
gcatacccatgcggtccccaggacaccagccattcgcggatggtgcgcagctgctggactcggggacaacagcatcttggggcttggcactccttgggcatttgagatgcccatcctcttct

SEQ ID NO: 5821 - DNA, 122 bp, Homo sapiens
gcccggctgcgggaggcagtggaggctgctggccaggagctggagtctgcgtcccaggaacgggaggcgctggtggaggcgctggcagcagcgggccgggagcggaggcagtgggagcgtga

SEQ ID NO: 5822 - DNA, 122 bp, Homo sapiens
agtcagcgaagccccaaaaaggctgtagtctcttgcaagcaaaagttaccaaggggctgccgagggtcttcaagcccgcaggacttaagaaattcccgagtgtttcaccaggaattgaggaa

SEQ ID NO: 5823 - DNA, 122 bp, Homo sapiens
atgactccgacagcgatttcggagcctctctcggcgtcagtcttgcgccggcacccgccacggccagcgcaaccaacacctgcctgaggactggcccgagctcggcccacgcccagcccagc

SEQ ID NO: 5824 - DNA, 122 bp, Homo sapiens
ttacctgtactctagtccctgcgcagtccccgcagctcctggacagtggataaagaggaccggggagtcactggtgcccaaggctctctgccgaaactgcctggacgatgatccgccggcct

SEQ ID NO: 5825 - DNA, 122 bp, Homo sapiens
gccttttatagacaacacgttacctttaaataattgtgcagaaagtccctgcttaaatcacgccctaattctttgcatgtttctgcactcattaattgagctaacattaaattcaccctcat

SEQ ID NO: 5826 - DNA, 122 bp, Homo sapiens
cctccgcagccgctggcccgggtgctaagcccctcattgcctggggccggcagggctggccggctgctccgagtgccaggcttgccaaacccacacccacccggaactccagctggcccgca

SEQ ID NO: 5827 - DNA, 122 bp, Homo sapiens
tagtggcttaaaacaacacaaatgtatcatctcacagttccagagggtggaagtccaaaccgggtctccctgagcgagggtcaaggtgttggcaggactgcttccttctggggcctcgaggg

SEQ ID NO: 5828 - DNA, 122 bp, Homo sapiens
gtgaacactattagcccatactgaaccactgctcctggagaaatacagggttagcttccacgcctctgatcactacatttttgtcatccaaccaatacatatttttgttttatgtgttttta

SEQ ID NO: 5829 - DNA, 122 bp, Homo sapiens
cctcccagtggcacggttagctcagatgggagaatgaggccaggatggactgggaaggcccgagcatctctctgtgctgggaagaaggcaggcctgacaagccacaactccctcaccagtag

SEQ ID NO: 5830 - DNA, 122 bp, Homo sapiens
gctctttcctccttggcctgccttccgctggctgcgtggggcagccaagaacaaagcctgcgagcttccatcaattgtaaagcaaagcaccctttacttgcctcttactagtgctctcatgt

SEQ ID NO: 5831 - DNA, 122 bp, Homo sapiens
ggcaggaagtcctgggctgcattggcacgagacacctcacctaaggctgctcggaaccgccgagaagaaccaggtccaaagtaggcggcaaagaggtcatcagcaaggagtgttcgaccctg

SEQ ID NO: 5832 - DNA, 122 bp, Homo sapiens
ggacgaccttcgtctgggatgcactcttcttctccttcacctacaaatgatagaggattacgaagaactatacggttggctcctctttcctttggccttaggtttctgacctcctgcagcct

SEQ ID NO: 5833 - DNA, 122 bp, Homo sapiens
tgtgtctgtgggtgatgaaatcgggtcggagtcgctctaaagtcatttttgtctcttgcgcgcctcagggaggatattaaaggcttttgtggatttcaaccgctaaagcctttcctcaaagt

SEQ ID NO: 5834 - DNA, 122 bp, Homo sapiens
ggcagggcacctaggggtagagtgttgcccagtagaatggcccagccagatccctggcctcgaagctcaccaggtcataagccccagccactaaaagcatctcactcttcaatgcagctgga

SEQ ID NO: 5835 - DNA, 122 bp, Homo sapiens
gtcctcatctgcctggcgcaactcggggagccggaactgcgggacagccgggatggtgagcgggtggtttgggctccccccggcctcgggcgccccgaggtgctcagggggcctgtccggtg

SEQ ID NO: 5836 - DNA, 122 bp, Homo sapiens
ccgttctaagccaatggacatctgccgagcctctggagaatcctggatactagctttggacgcctaaagtttcttcttctttttgttttattattattatcattttttggaggggggaccgg

SEQ ID NO: 5837 - DNA, 122 bp, Homo sapiens
tcagactgaatccgctccatccgttggcctccaaagcccactcttgctttttgcagcacacgctccctccagcgggtgggctacccaaggtcctggtgctagctcttcactgtccttgtagc

SEQ ID NO: 5838 - DNA, 122 bp, Homo sapiens
ctccacgtgaatctgaatagttcgtcctggcagtggcggtgaatttggcttgccaggacccgccctctgcctacactcagcggcaccccggctaaagccctttagctccatcgctacaggcc

SEQ ID NO: 5839 - DNA, 122 bp, Homo sapiens
ttgattcattctagccaaaccacctctcttaacaaaaaaaggaaactgaaccccgattggcgaaatgtcttgctcaagtccataaagcgagaccaccggctgatctggacccttagaatcta

SEQ ID NO: 5840 - DNA, 122 bp, Homo sapiens
gaggaaaataatatccgaatacatgacctcaatccgcaatggagatgtttcccggcagaacgttggcttcgtagaaccacctgattatgtcccggcttcctcgaagggttttttaggagcct

SEQ ID NO: 5841 - DNA, 122 bp, Homo sapiens
cattcatcgtcagggcaatgccatgctccaggcacggccgcgccttatctccctcgcccacgctgcgctcttgcagtgggagctggggctcagatcagaggcagagaccccccgctgaccct

SEQ ID NO: 5842 - DNA, 122 bp, Homo sapiens
gttcacactgattcacaaagtaagacgccacttccaatggtcatatcgtgaaggtttcctcgaaggatcgtgaaattccacgaagtccgcttgctttcctgggtgaataaacaccaggccgc

SEQ ID NO: 5843 - DNA, 122 bp, Homo sapiens
acgccccgcgagggaccgtcgttagtgccaagacagctgccgctcctgccggcctagggccgcagccggaatcccgggccacatcccctgccccgttgtgccttccacacctcgggcagtca

SEQ ID NO: 5844 - DNA, 122 bp, Homo sapiens
atagttactaacaaagtattctattcttgaaattcactgagagtagatgttaattgtactcgccacaaaaaagataagtatgtgaagtaatgcatatgttaattagcttgatccagtcattc

SEQ ID NO: 5845 - DNA, 122 bp, Homo sapiens
gaggggctctgccttcagtctggttcctgcgtaggtgcccgccagcctcagtgctggcaccgctgcacggtcacggatgtggcaatgcacccacagaatcaacaagccccggcacccacaac

SEQ ID NO: 5846 - DNA, 122 bp, Homo sapiens
tgtctcttctcttttcctcccactcctactagaaggagtagagctaaataatgcataattcgtgactgtgccagaagccataaaggagaatgagaattggagtgcagtgacccttgaccatt

SEQ ID NO: 5847 - DNA, 122 bp, Homo sapiens
catctccggagtggcatcacccgggtctgattggacgggagtccgctccgtgacagtgggcgggctccggggctggacacttgcccagctccgggactcccggctggcccaatcccccagga

SEQ ID NO: 5848 - DNA, 122 bp, Homo sapiens
agggccccagccttggggcctgttggggctgcgcgtctggctcgggcttgagttcgatgacgaggtcctgcatttccatctcgtcgtctgggttggcggcgggcgcgggctctactcggcgg

SEQ ID NO: 5849 - DNA, 122 bp, Homo sapiens
tccgcctgagaaggtctgtggggcgcctcctcctctgtccacccgagagggtctgcggggcgcctcctcctctgtccgcccaagagggtccgcggggcgcctcctcctgtgtccgcccgaga

SEQ ID NO: 5850 - DNA, 122 bp, Homo sapiens
atttctctgaaatgacactacatgaatgcctcaatgaatgcctcaagggggtcacacaaccggttctgagacttggtgaccattgtttgtgtctgtgttcaatttatttcaaaattaatatt

SEQ ID NO: 5851 - DNA, 122 bp, Homo sapiens
atctatttgtgtctcttgagtccttcaataatgcagaacataaaagtttcaaaaatgaatcgcaacaacagctatcaaaggaagtgggtttttttaaataatagccctaggctccaataaaa

SEQ ID NO: 5852 - DNA, 122 bp, Homo sapiens
acattctgaatgaaatactcccttagtgacaatgcttagatttcacttctttgagtgccccgctgatgttaactggggcctggatgaacactttatggagtatttctgaaacagaattagta

SEQ ID NO: 5853 - DNA, 122 bp, Homo sapiens
gaaacacctagagaaatagaggcatatcggtttgtttatactaactcctcccttctccaacgtatccaatcaggtttatagcaaataacagatgttgttaataatctagtaagaaccactat

SEQ ID NO: 5854 - DNA, 122 bp, Homo sapiens
gatgcccttcctagtcacctactgccggcgttcacgctgtgaaccagcgaactaggccaccggcctgacccagttttccctgtggcctgccaagccaaggagaagcagacgcggccggcgca

SEQ ID NO: 5855 - DNA, 122 bp, Homo sapiens
ctgtgtctggggggaccctgggcatccttgatgctggtgcctcacaactgggtgggatgccgggcacccatggtgccgatgccctgcgtctgcgtggaaccccaggcgtccgtggggctgat

SEQ ID NO: 5856 - DNA, 122 bp, Homo sapiens
gaataatagctaacacttgtagctggtaagggtcttataatggtctatacttgtgctgtccgagaaagtagccaccacctacatgtggctacttgaaatgcagctagtctgaactgagatgt

SEQ ID NO: 5857 - DNA, 122 bp, Homo sapiens
aagaaagccgccgtttctttcttcctgcagaaaatatagcagaaagcggaatacctcttgcgaatccttccgcactaggaagccataaaaattgggccttgagagacagtttgaggtaaggc

SEQ ID NO: 5858 - DNA, 122 bp, Homo sapiens
gctccttccatgactcacttaaagataggcttgtggtttttcatatgagcagggaccacacgaaatgcagatccctggccactggtgtggtcactctcccctgactaggacctgggctttcc

SEQ ID NO: 5859 - DNA, 122 bp, Homo sapiens
tctatgacatagttgcccaacatggcatttatctgctgcaacagaaagctgtaacactggcgggcatttcacagtatttgcgcatagtaaacttctgccattgttaaagtctgagttagaat

SEQ ID NO: 5860 - DNA, 122 bp, Homo sapiens
atttaagattccaggaggcggtgcgttgccacggagacggagcagggctactaggacgcacgcgcgagatagaacctctagtctcgtggagagattgaagatggcggcttctcaggcggtgg

SEQ ID NO: 5861 - DNA, 122 bp, Homo sapiens
tcaggatttctaagaggagaaggaccttgggggcggaaatcggtttggcacaggagtacccggagacctgctccgagaggacggacaaagtgcacatttacttggggtttattaccgggagg

SEQ ID NO: 5862 - DNA, 122 bp, Homo sapiens
gcagccgctggaactgtttctggttgatgatgtggcccaggtttggggagctctgggggtcgtcgccatagaaacgggtgatggtgctctgcagggcgggcagcagcctctcctgcatctcg

SEQ ID NO: 5863 - DNA, 122 bp, Homo sapiens
aaagaaaggaaggagtctcgccggagcctgctggggaccgcggcccgcgggtggccgccccggatgcctgaaaccgaggagttaaatacagtctccgaagacccgcgcatcgatgtgcataa

SEQ ID NO: 5864 - DNA, 122 bp, Homo sapiens
gtgagatttccctccagcttcctgctgtgggcaccccctccctcccaagctccagggccccggcagccaggcagggctcaccacagtgctcctcatccgagccgtccctgcagtcgggccgc

SEQ ID NO: 5865 - DNA, 122 bp, Homo sapiens
tgacagccgctccttgatccccgcccctaattaattattggcgtatgccataggccaggccgccgagcgggaaagcgcggggggcgggggtggcgcgtggggaggggcgtgaatgaagcaag

SEQ ID NO: 5866 - DNA, 122 bp, Homo sapiens
ccgcagcatcagcgtctgctccagctgaaagcagcaagctgcacagctgcaggcagcgggcggtggtggcctcggcatcggtgatggactggcagcggacgtcacaggcagccagcagtggg

SEQ ID NO: 5867 - DNA, 122 bp, Homo sapiens
tgtttcatttcaatgtctaccataattgtggattaggagtggtgcaagctctctgaattacgggggttaagaacaggaagaaatgctttccccaaaaattggaattattacttacatgaaga

SEQ ID NO: 5868 - DNA, 122 bp, Homo sapiens
tcgtttctcaaagcatgtcccactgaccacctgatgaaacaaacactagggtgcgccaggcgcggtggctcacgcctgtaatcccagcactttgggaggccgaggcgaggcgggtggatcac

SEQ ID NO: 5869 - DNA, 122 bp, Homo sapiens
cgctggcgctgaaccgctacctgtgcctggccgtgctgccgctcatcaccaagtgtgcgccgctctttgcgggcacagaacaccgcgccatcatggtggactctatgctgcataccgtgtac

SEQ ID NO: 5870 - DNA, 122 bp, Homo sapiens
tcgaaaccgaaacctccacctgcgcaaccctcccagatgggcttgaggttggggtgtggccgggacccgggcggggaggggtaggggtggagtgaaggcggggtctgggggggtgcgcgtgg

SEQ ID NO: 5871 - DNA, 122 bp, Homo sapiens
ctccacagtttttcccagatccagaatggagacaacatccgctagcacaatcaacagggtcgtcccacgggggccgctccatcaaggccgtggactgacaggatttggggcttggagggcaa

SEQ ID NO: 5872 - DNA, 122 bp, Homo sapiens
tctgcacagtgccctgagctttccacatttcatccctttcccccaccacctaggaaaatacgctgctaacccccagtgggccgtagattggtactatcaattgagtctgtcatttggagaga

SEQ ID NO: 5873 - DNA, 122 bp, Homo sapiens
acagcccagttgctgtcctgccagatgtcctccagttagaggatgaggccagaatttgggcgcatcagccaccgtttgatttcatgacatgattttacctctctcaggcatacagatctgac

SEQ ID NO: 5874 - DNA, 122 bp, Homo sapiens
aattaataagcaatgctgggaggagcggcctgtcgaaccaaccccccttcccctggatttcgcccactttagacgcctgactctacagcgctgcatttgcctgccagaggcaagactggcag

SEQ ID NO: 5875 - DNA, 122 bp, Homo sapiens
caagcaacctggagtatgaagaagagctctaatctgaagttgcagcctctacattcctgtcggagcctcacaaccagcagctgactttggagcagtcctttctaggagttgctccaacataa

SEQ ID NO: 5876 - DNA, 122 bp, Homo sapiens
aggcataaacccctccttgtggtgctgtgcttcagtggtcacgctccttgtccactttcacgttcctcccattctcctggttcctctttgaagttcttagtagatagcggtagaaggaatag

SEQ ID NO: 5877 - DNA, 122 bp, Homo sapiens
caatacagtcatcattgttcattatttgaggtaccagtcagtgtaggggacgtcagtgaccggctgtgtttacctggctggctgcacaaaccttagttctcagcttaccccgggcttttcca

SEQ ID NO: 5878 - DNA, 122 bp, Homo sapiens
ccaaagtgatgggattacaggcatgagccactgtgccgggctctaaatcatacttgactacgttatattgatacttgactacattatattgtaaacttttagagggcagaagttatgctcac

SEQ ID NO: 5879 - DNA, 122 bp, Homo sapiens
tcgttctctttggcctgggccaggatctcctcacgagaggcgcgggtgtcatccagctcgcgcatgcagtccttcatctgggcctggggtggggacagaggcttggcaccccacccagctcc

SEQ ID NO: 5880 - DNA, 122 bp, Homo sapiens
gttaggttcctctgcaggaagcccagggccacacctgcagactacttgatgtgtggtacacgttgtagttaccggcatcactattggcccgccggtgcacaccttccacggcgtgaacttcc

SEQ ID NO: 5881 - DNA, 122 bp, Homo sapiens
gtgtgagggagggggaaccggagctcaggagagggatctggccacaaagatgggtgggggcggtgcacagaggattctaaagacacagagtggcacagagggcagagagcctgtggagatga

SEQ ID NO: 5882 - DNA, 122 bp, Homo sapiens
tagctctgagtgactgtgctggggtaacacaggggtccacggtgcatgtacactctgtggcgggagccatggcagggtggtgcactgggtgtgcgttgtgtgaattgtgaggtgtgtgtttt

SEQ ID NO: 5883 - DNA, 122 bp, Homo sapiens
gtgccccccaaaagctcaactgtgcagggaattcctgagaggaggaggagagtattagatcgtagctgtgtcctgcccagaagactttccactcccaaggaggaaattagcttttcaggcct

SEQ ID NO: 5884 - DNA, 122 bp, Homo sapiens
aatgctaggagctcatgagttctatgtgcacgaatgttgcgtgtgtctcaacacacacagcgcagaaatctacccattctttctgagaaggtcatcccaactctgtcgcagaggctactgtg

SEQ ID NO: 5885 - DNA, 122 bp, Homo sapiens
gctcaggtgccttagcggccagttctgcggcatgtgtctggggctgacaggagggaccagcgacagccagctctgaggagcagagaccagacgatgaggccctgtctcagctctggaccttg

SEQ ID NO: 5886 - DNA, 122 bp, Homo sapiens
aggttccccaggaaaacgccatggcagttctcagccggggcctggccgcatggctaccgtcgaagctctgctgctggacctgaaacgccacggccccagtgcaagacaccatcagtgtgtgc

SEQ ID NO: 5887 - DNA, 122 bp, Homo sapiens
gtcagattagaagtggtttttatccttccccaaaaggctcatatttatgcatattggccacgtctacacgtggcaagagaggaaagcctatgattgattataagtgattatgtcattggagg

SEQ ID NO: 5888 - DNA, 122 bp, Homo sapiens
cagctctgcaagtgtttaacaagaaataacaagaaaacggctgtccccgagaagcagctgcgtgaactcaggacgctcctgagcagccgacgttttgagaaagccctcgccatcctgaaggc

SEQ ID NO: 5889 - DNA, 122 bp, Homo sapiens
ttgcttaagcaggcgacattagagttaggcctctccactgaagcttcccgaccgtcagcacgtggcagacaggatgcgcccatcattccgcaagggagaaccggagaggcccgggagagtcc

SEQ ID NO: 5890 - DNA, 122 bp, Homo sapiens
ggatacgacacgctctagggaaggtatttccagagggtgacctgagccctcagccaggctcggggttattaatagccaggccttagtgccccgctcggggagggcggctccagctcctggag

SEQ ID NO: 5891 - DNA, 122 bp, Homo sapiens
acgggtgtgagtcagcagcacgggtgggctcaccacagaatctgagcgaggcacctcccacggaacctccgtgccctcccaggatggaaaccccacggctccgctgctcccagggggccccg

SEQ ID NO: 5892 - DNA, 122 bp, Homo sapiens
ggaagggagtaagcagcgtgactcaggcctggcacagtgccagggacagacccagatagacgcacccctctgccctccagaaccagggcctcactcccaccctgcagcccccaaggattcag

SEQ ID NO: 5893 - DNA, 122 bp, Homo sapiens
attcagattgttggacactctccaggacaaaaggtctagattcttcaaaaacaacaacatcgaaaaaaaaaaactgccagaaagaaaaaatacagagggagaaggtaaattaaaagaaacat

SEQ ID NO: 5894 - DNA, 122 bp, Homo sapiens
aaagttgaatctagccaagtaccatatctctgtatgcactcacagatgaacgtaaatacacgttgtgcacataaggatctggagggctaatgatacctcctggtacaactgcaaaaagaaac

SEQ ID NO: 5895 - DNA, 122 bp, Homo sapiens
catcaccaccactctccaggtaccgggcagtgcctgtttctggattcaaactcacagcagcgaggaaatcctattttagcaaagtgatctactgttactgttgttagtgcacccctctcctg

SEQ ID NO: 5896 - DNA, 122 bp, Homo sapiens
ctaggagccgtgttggggggcccatgccccgggcggttgtcacagccgcgggtgggtctgcggggaggggacgaagccgcggatgaacggagacaaaaagttaagtggggggaatggggagg

SEQ ID NO: 5897 - DNA, 122 bp, Homo sapiens
cgcatccgccatgcggaacccctgcgtctcacccaccgcacccgccgtgcgggacccctgcgtctcacccgccgcacccgccgtgcgggacccctgcgtctcacccaccgcacccgccgtgc

SEQ ID NO: 5898 - DNA, 122 bp, Homo sapiens
gcagacccaatcctagcccgctggctagaccatggagggccgctgggtgcagccacagagcgcggggccccggcgaccccgccccgctccgcgtcactcggcgccctgcggcgcgcgatgag

SEQ ID NO: 5899 - DNA, 122 bp, Homo sapiens
gaattttccaccctcatcccctcttgaaaacagattcttcatgaaacctgtatcctgggtcgctcttttctgaaagaattatgtgattgcaccaactggcaacccctaggtcccccagctgc

SEQ ID NO: 5900 - DNA, 122 bp, Homo sapiens
ctcgagccttcccggagttcagggtccatttccacccttctgttggcttcatgcccctctcgccatcttccacaggcctctgctctgctgcctccactcctgcggaactgttgccttgggcc

SEQ ID NO: 5901 - DNA, 122 bp, Homo sapiens
aaaagcagacgttaataggtcgtccctaccattgtctaatttttcctctttgcctttttgcgcaatgactgaggacgcacgccctggccacagccccacccactcaagtccctgttaacttc

SEQ ID NO: 5902 - DNA, 122 bp, Homo sapiens
tagcctctatttttacatctgtcagccagaaagccacaaggagctggatgaagaaagggacgatggtttgccaaagatgatgtaaggacccagactggctcatattgtgcatacagccagca

SEQ ID NO: 5903 - DNA, 122 bp, Homo sapiens
atggaaataaaaataacttttttgttatttctaacacaaaagtctgggctgtgtggtgggcggggagctgggtgctctctgagcacctaggcttcaccatgctgctggtccactgtctcatg

SEQ ID NO: 5904 - DNA, 122 bp, Homo sapiens
cccccaacacagagacggtggggagcagggctggagctgcggagcaccagccgcacctggcgccaggtcccaggagccacacgaggaaaaggagaacttcatcatgggctaggaaacccact

SEQ ID NO: 5905 - DNA, 122 bp, Homo sapiens
gcgcaggcgaccgggcctcccctccatgggcgtcctttgggtgactcgccataaatcagccgcaaggatccttccctgtaaatttgacagtgccacatactgcggaccaagggactccaatc

SEQ ID NO: 5906 - DNA, 122 bp, Homo sapiens
cagatgcccgagggcctgcgctggaacgccccacgccgcaccggccgctcccctgtgctccgcggcctgggcctgcgccgctcagctctctggaaactagcgcctcagctgcgcggcgcgta

SEQ ID NO: 5907 - DNA, 122 bp, Homo sapiens
aatgcctttgaaaagctgttgaagtggcatcgttgtctggggtaaatacccagggttcatcgtcttgcactaagaagattaaggacacggacacatgtgggtgtgttaaggagcagagagtt

SEQ ID NO: 5908 - DNA, 122 bp, Homo sapiens
caggcgcctaggcaaggaacccctgagccaggagagctggaccaggggcccttgccaggacgccagtagagctggcagccgagtctgccgctcccgccctcagagccgcggcggcggggaca

SEQ ID NO: 5909 - DNA, 122 bp, Homo sapiens
ccagacagccgactcctgtgcgcaaatcaggcgtggagaaggaagaacgcccccaaacagcggttctgtttttgtttcgcgttaaaatcacctggaacgtttttaaacatcccagtgcccag

SEQ ID NO: 5910 - DNA, 122 bp, Homo sapiens
tggcggagctctgtgcctggatgtgcgcctcaaacatgcccactttctggttcacctgcacgttctgcaactcgcgctgcaagatccgcagcttcctcttggcctcctccggccctggcggg

SEQ ID NO: 5911 - DNA, 122 bp, Homo sapiens
tgagaccgacatgggggctagtgctggcaccaccggacatggggcatttcagacacagggcgagcacattccctagttaccagggttcattcgagtcagtcacgtcacaggctggcaatggg

SEQ ID NO: 5912 - DNA, 122 bp, Homo sapiens
tgcagtgttggaggtgggggcgggggtctacatagctgggacctggccctggggggtggacgtcttatcaggacggaggaaacagaggtcagaagttccggaggtgggcagtcctttgttaa

SEQ ID NO: 5913 - DNA, 122 bp, Homo sapiens
gaaaataaaacaaatctgcaaatagttaactgtagtcattgctcaagtccctttgagtatcgccttctttgggacacctccccgaggcctcccccacgctagctggcttcacagataggtcc

SEQ ID NO: 5914 - DNA, 122 bp, Homo sapiens
tagaaaagcagcagttgtaacttagaacaaaccatgacttgggtatgtctatatcactttcggtctcacacactccacacagggctgcattctgtggaagggtcttgtattatctatgaata

SEQ ID NO: 5915 - DNA, 122 bp, Homo sapiens
cgctgcacctcctcggggcatgaactggaggcagggccacgccaggctcgagggcatccccgagcagcgccaggcgcgtcttcaggctcatcctctccatgttgggcaggggcgtcggcggc

SEQ ID NO: 5916 - DNA, 122 bp, Homo sapiens
tgtaggtgtgcaggaaatgtttggtttttctcttttgagagagggtcttgctctgtcacccgggctggagtacagtggcacaatcatggctcaggcagccttgacttcccaggctccagcga

SEQ ID NO: 5917 - DNA, 122 bp, Homo sapiens
gcaggcccgcgccccgctcccgccccgcctgccgcgcctcccggggcgcccgcattaaagcgcatatgcaagccatgaattatcaactgaaaggagtcaattaccggctctaaaaacgagtg

SEQ ID NO: 5918 - DNA, 122 bp, Homo sapiens
acgggtttctgaactgttggagtgtgagcgagcaggtgcccagagctccatacctgagaccgcccctgtaaagtgtgtacaaagcaatccaggaaatggccacgctgctgtctttttaattc

SEQ ID NO: 5919 - DNA, 122 bp, Homo sapiens
gggtcggggtttctctgaggaccgcgcgctgcacctgcggagccgggtgaatggatgtcgcgaaggcaagggctgcccttacccctcggggccgacctcggagccctcgcccgtggttgcaa

SEQ ID NO: 5920 - DNA, 122 bp, Homo sapiens
gtccagaatgactgcggatgcccccttcccagccccatgttggagtctggggtcccagaacgggccggctctggaggagacacctctaggctccccgagtagggcaggcggcagaagttccc

SEQ ID NO: 5921 - DNA, 122 bp, Homo sapiens
cttttgaacgcgttctcacgtgtgttagggatcgtcctcctggaagagccttgatggccacgcggtgtcctcgcccctctctccgctggacccgaggccccttgccagcaagagctggcctg

SEQ ID NO: 5922 - DNA, 122 bp, Homo sapiens
aggttctatccctctttgcactatgaaatatcatctggcttagagccagccatgtagaaacggtttcatcatcaaactggagaatgagcaaatcagaaatggaattaatttacacctaggca

SEQ ID NO: 5923 - DNA, 122 bp, Homo sapiens
aatatagccaactttaatccactgccttaaatttgcttttggctcactttttatttagtacgtgccatcaaattagctcacctagtttaaatttgtctaaattgttaaaagctaaattcatt

SEQ ID NO: 5924 - DNA, 122 bp, Homo sapiens
gagccctgggagggtcaggtggagcaggggccgctctgtgagatgggagtaatccagtcccgcctcacaggtcctggggtccctgggacagacacagactcctgctgggtggttagcactgg

SEQ ID NO: 5925 - DNA, 122 bp, Homo sapiens
ggcagctgcccaaggtccacctgccaccagggctgccacttggactcccttgccagggggcgggcaggggctggctctgcctggggccaggcccatgttaacctgtgccccggcctgggggc

SEQ ID NO: 5926 - DNA, 122 bp, Homo sapiens
aatatagacaatttacttctctgttattgtttcctcagaatgagggcagtaacttgtagccgtctgaaaagattgttataagcatggagttagttgctgtatataaagcagttagaccagta

SEQ ID NO: 5927 - DNA, 122 bp, Homo sapiens
gagctcgggacctcgaggcggctggaagtcgagggcatcgccagggggccgagttgggcccgggtgtggagaacgaagccgaacgctgggctctggattctcctccagagcgctccgccggc

SEQ ID NO: 5928 - DNA, 122 bp, Homo sapiens
cttgagccagccagcatagaagaagaactgcagcagagtggtgagaggcacgtacatgtccgggtctcccagggctggggctggctcctggcctggcttcagaagcttctgaggtttggcag

SEQ ID NO: 5929 - DNA, 122 bp, Homo sapiens
tccccctgccgtgttctgtgctgcttgtgttgcatgtgctgggtcccggtgaacagccgccgctgctgcttccctcccggagccctcgctgtgtgcctgtgtccctcagctgcatgaagatg

SEQ ID NO: 5930 - DNA, 122 bp, Homo sapiens
agctccagggtagtctgtctttaagtctccactactccgctccaaggtgactcataaggtcggtccgtcaactctgcattatatggcctcaacaacgaaattaaaacacatactttaacctc

SEQ ID NO: 5931 - DNA, 122 bp, Homo sapiens
cgagagagggaacctgagaggagcttgaagcagaggatgggcccagaagtcgccggcgtccgcaccgaggtcgtacctcgatatactcttcctcgtccaggacccgctgcttgctcgtcgca

SEQ ID NO: 5932 - DNA, 122 bp, Homo sapiens
ttctcgaggaccaactgtagatgaagtgttgtacacacactgtcacaaaccttcacaaaccgaagctcctggaggcaaggtggcctatccaagggcactcagctagtaaatgcagaacaaag

SEQ ID NO: 5933 - DNA, 122 bp, Homo sapiens
ggcgggctggggactgaggagcagacacctgttgcacagtgctcattagctgcaggagggcgggacgcctcccagcctgaccaacctgttggatgatgtgggtgctcccgcccctcccccag

SEQ ID NO: 5934 - DNA, 122 bp, Homo sapiens
ttaagagagttctgggggccctcctgggcctttgtggccctctctgcaccaccctagggacgggatccaggcctgatgttacccgtaacccttcaggggtctcccacctcttcccgcctgcg

SEQ ID NO: 5935 - DNA, 122 bp, Homo sapiens
aaggtcattagagatggatcccaataaatacacacacacccatcagattagcagacccaacggtctccatggcaacaattggacaagcaagtcgcctgcaattggcattaatttaaaatatt

SEQ ID NO: 5936 - DNA, 122 bp, Homo sapiens
ataacagccaggcactgggctgagagcctcactcaggtaaaaaactatacagggcacaaccgggtcagggaaggcttcgccaaggaggagagactgggctgactctgagagcctgagaatga

SEQ ID NO: 5937 - DNA, 122 bp, Homo sapiens
cccgccgtgcgagcagccacagctcgcgcgccgcctggggtcccctcgccggccccgccgcgtgcaggcctcggccgccggccaggcagccccacttacccagctcttgcccgggctccggg

SEQ ID NO: 5938 - DNA, 122 bp, Homo sapiens
aatgggttctcaccctagcagtggcgacaggaagatcccaccccgctaacaacatgcttccgtcttcagtttatttacaactggtgtgattgatggtaagtttaaccaatagaaaatcggaa

SEQ ID NO: 5939 - DNA, 122 bp, Homo sapiens
aacacatattttagctcagccaccacccaacaaattaaaatgagtccttaaaaaataatacgctttaatatatcccattttccagcaaacaaaacaaaaatgaaataaaaataataaacctc

SEQ ID NO: 5940 - DNA, 122 bp, Homo sapiens
agtttattagcactgagatccctgaaagctatggccagttttaaattcttgcatcactttcgaaaatcaacataagggttgtccaatcaacttgaataacaaacaggatcatccctctggga

SEQ ID NO: 5941 - DNA, 122 bp, Homo sapiens
atgatagaattagaatcagaatcatagaatctcacagtgatgggaatctttcagtccaaccgtctaagtaacctggaccagagaaaaaacaagactaccatgtccagccagcagaatgctat

SEQ ID NO: 5942 - DNA, 122 bp, Homo sapiens
tctggcttgacaagcagcctggtctctcccagctgagtttagttccacagagccctccgacgtccggcttagaatgactgacatgctcttgaggctgaacccgagagagttctctctgactt

SEQ ID NO: 5943 - DNA, 122 bp, Homo sapiens
tgtctctttcctcccggtgcccacgatcgcaccgcccagaccaccctactctccctgccccggaagttacacactgccgacaccgggacgtaacttccgggaagggcttacttccaagacag

SEQ ID NO: 5944 - DNA, 122 bp, Homo sapiens
caccacgtctggcctctcgtcgtttttattttttaatttttgagtgggggctcgctccgtcgcccaggctgtgatgcagccgcgcgatcacgacctactgcatcctggacctcctgggctca

SEQ ID NO: 5945 - DNA, 122 bp, Homo sapiens
cacgaggggccatcgcaggtgcacgggcctcacagcttcacagagcagagccatgccaaacgctcgcggtgaaaggcagcctgtttcttcagtactgttccttcgacaggtcagtcctgagc

SEQ ID NO: 5946 - DNA, 122 bp, Homo sapiens
caggactgcagaactggcccagacctctgtattggaaaggtctttatggaccagggagtccggtgtcttttttacgggggacccctgggctgcgagttgcacagtccaattcgctgttgtta

SEQ ID NO: 5947 - DNA, 122 bp, Homo sapiens
gcgcgcattccagacggctctgacctgcctccgccggtctcgattattttatacatttctcggcgatacacttataaacaagtggaaattttgcatcctactgcaccattttatacatgatg

SEQ ID NO: 5948 - DNA, 122 bp, Homo sapiens
ccccttccccgactgccgcgtgtgcgcgcgcagtcactgcgctggccccgcgacccaggccgagggactcggttaccgaaagagtccccctcataagacccgcctggccgcgcccgcgggca

SEQ ID NO: 5949 - DNA, 122 bp, Homo sapiens
tgccgcagcgctcctgctatttttagcgtcctgctatctttagctgatagagtcaggccacggtgaggccagcaggccgctgaatctcacggaggcttcagaagttgtgatgctggcccctc

SEQ ID NO: 5950 - DNA, 122 bp, Homo sapiens
ttgtttccctccctgtgctccacacgggctctggtcctctaacacaatcttcctgggtcccgtgctctgcagggccaggtcagatgatttcctgagcagtgcgtatgtcctgtgatgtcctg

SEQ ID NO: 5951 - DNA, 122 bp, Homo sapiens
gtgaatcggccttaggttccctgcctccagactattctgcctcacctggcctagcagtgtcgctttctgttcattctgttcattctcttcctggttgtttaaccactggagaatccgtaact

SEQ ID NO: 5952 - DNA, 122 bp, Homo sapiens
gctctggaagcaggatgaggacggcctgagcctgcagagctttccaggagacactgcagccgatcagctccccaggccctcgtccgcccgagccatgagcggccacaccagcgccagcaact

SEQ ID NO: 5953 - DNA, 122 bp, Homo sapiens
cccgtcccctttctgcgccccgggatgaggcagagactgaacagccggcgagcaaatcaacggcatccagaaagccatgtcggactcggcgcccagcgcccaagcgctaacccgctgaaagt

SEQ ID NO: 5954 - DNA, 122 bp, Homo sapiens
caaagctccgggttcagtttcccgcgctggaactttttcaatagtaaacgagcaaagctccgcgcgcccaggtggcgcgagcactaggatctgtcggttggggtcctacttttacataacgc

SEQ ID NO: 5955 - DNA, 122 bp, Homo sapiens
ccctcggggcctcagggagccgcagccccagcggaaccaggagggcgccctccgcccagccgcgctgccacttccgggttgtttgctcccggagccataaccgcagctcagcgtgcgggcag

SEQ ID NO: 5956 - DNA, 122 bp, Homo sapiens
aaaactcaaaatatttcacatttaaaaaatctatatttctgtttttccctaaaaattggacgttgtgacatcattgggcctgtttatctttgtggcatcagtcaaaatcatcaactagacct

SEQ ID NO: 5957 - DNA, 122 bp, Homo sapiens
cctttccgcgttgagtgtaaaggggaaactcggaacccagccgtgggcctttccacgttgcgtgtaaaggggaaactcggaacccagccgtgggcttttccacgttgtgtgtaaaggggaaa

SEQ ID NO: 5958 - DNA, 122 bp, Homo sapiens
tgccccgagggcggggggtggggggtttcctcactcacttggttccggggtacaaggggtcgaagaagtcccgggtgatgttgaaggcgtaccaggagatggccaccatcccgcagatacct

SEQ ID NO: 5959 - DNA, 122 bp, Homo sapiens
ttccaggagccccccgtataaggaccccagggactcctctccccacgcggccgggccgcccgcccggcccccagcccggagagctgccaccgaccccctcaacgtcccaagccccagctctg

SEQ ID NO: 5960 - DNA, 122 bp, Homo sapiens
tatgaactgtaacactcactgcgaaggtctgcagcttcactcctgaagtccgcaagaccacgaacccaccaaaaggaaaaaactctggacatgttcgaacatcagaaggaacaaactccgga

SEQ ID NO: 5961 - DNA, 122 bp, Homo sapiens
gcccctccaggctgggtgcagctgaaacccatgcagacccctaggggtggtgcggatctgcgatgtctgtgcccaaaactcccgctcagaagcgacacctgtcgcagagcaggaaggagccg

SEQ ID NO: 5962 - DNA, 122 bp, Homo sapiens
gcccgggtgctaagcccatcattgcccggggccggcagggccggccggctgctccgagtgcggggccggccaagcccacgcccaccggaactccagctggcccgcaagcaccgcgcgcagcc

SEQ ID NO: 5963 - DNA, 122 bp, Homo sapiens
gacaaatgtgatgatcccagaaatgtggctgaaaactggacacacattcaagaccaggagcggggaggcacacggtgttcgagggtgaggccaggacaggcagggctgggcagggctgggga

SEQ ID NO: 5964 - DNA, 122 bp, Homo sapiens
aatcaaccgctacttcttccgtggagaggggcggtgggtgggggtgtgcgcatctcatcgcggcctgtgagtggaacaggctagaattatccccagcgtcttttttccatgtccaagtttcg

SEQ ID NO: 5965 - DNA, 122 bp, Homo sapiens
ggcgctgcccgcacatgggctaggctgccaggatgttcagcttcgaaggcgacttcaagacgcggcccaaggtgtcccttggcggcgcgagcaggaaggtgagggccgggctggcggggcgc

SEQ ID NO: 5966 - DNA, 122 bp, Homo sapiens
tcccaggctcgggaaagcccgcagttcgggcttgggactcgcttacaaagccccccaaggcgccagggacgcctctgcaggttgaattcctgctccgtatcacttcaattttaattaatctt

SEQ ID NO: 5967 - DNA, 122 bp, Homo sapiens
agatcccactttatagagaaggagcctggggaagcaaaggggagtaagtgacaccacagtcgagggcagagcagaaggaaaaccacaagatgtgatgtcccaacccaggcctttattccatc

SEQ ID NO: 5968 - DNA, 122 bp, Homo sapiens
ggctggggctggccccggatgtgacatcctccaggctcacctaccggccccacgaggctccgcagctgctgcccataggcgtcgatctccttctgcaggatgttgtgctcggcgatctgttg

SEQ ID NO: 5969 - DNA, 122 bp, Homo sapiens
atgaatctaatttccttgtctattgatttgcctattctggaaatctcatatgaatggaatcgtacccagtatgtggtcttttacatctggcttctctcactgagcatgttttcaaggttgac

SEQ ID NO: 5970 - DNA, 122 bp, Homo sapiens
gcgcgtgttgtcggggaagccaccgctggaaggccacatccccacctggggcttcaactccgtgcgtctgcccaccaaggactttgaggtggacctgctagaaagtgagcggacaccctacc

SEQ ID NO: 5971 - DNA, 122 bp, Homo sapiens
ttttcccacctggtcttcagtcacagatgggggctggggcggtggcaccgtcttcgtcgtcgaggtagaccctatggagccacaccgccctgccgggttctctgggtgcaataaataccagt

SEQ ID NO: 5972 - DNA, 122 bp, Homo sapiens
ccaggaatcagccccctccccggctcgcccagccaggacacagggacccggacgcggatgcggccacagaacggccaggcctgcagcgtcccagcaggacagcatgtgagcgtttccctatg

SEQ ID NO: 5973 - DNA, 122 bp, Homo sapiens
gagagagaaacttaggggttccctcttgactctcttttgcccttgtacaccaatcagtcacgaagacctgtcaattataactcatttatctctctcaagttctcaaatttcatcttcttctc

SEQ ID NO: 5974 - DNA, 122 bp, Homo sapiens
caactcttggcagctgaaagcttacacaatgcaagaaaaggaaggcctttcctgtgaactcgcgtgaggatttgcctacctatcgtggctgtgtttgactcctgcacacctagagagctacg

SEQ ID NO: 5975 - DNA, 122 bp, Homo sapiens
agctttgggctgagctaacaggaccaatggattaaactggcatttcagtccaaggaagctcgaagcaggtttaggaccaggtccccttgagaggtcagaggggcctctgtgggtgctgggta

SEQ ID NO: 5976 - DNA, 122 bp, Homo sapiens
ggtcaaacttctccgccatcgcctcggcccgtccccgacccacacagcctcaaccagcagcgccgcaggcgtggccctacgctcccgcttcctgcttccgtccggacagatacgacttccgt

SEQ ID NO: 5977 - DNA, 122 bp, Homo sapiens
tgtcttccacaagctcatagaagtgcatttcaccactgaaattggtactagaaaccgattcggatgcttcttcttccttgagagcagaatagagctcaccctccatcaagtcacctgaagaa

SEQ ID NO: 5978 - DNA, 122 bp, Homo sapiens
gtgagtgcacccacacccgcgggctctggcgctgccaccgagcccaacagagagccgggccgcagtccctcagctgctgtcaccgtcagcacgacaggcactggtgccgctgggtcccgctc

SEQ ID NO: 5979 - DNA, 122 bp, Homo sapiens
tgtgggaggtctcctgccttgttaaggtgactgagcccctcacccttgcagcccccacctcgttactgcacattgtcgagacactgaccacttggttatttgactgtgaggtatgccactag

SEQ ID NO: 5980 - DNA, 122 bp, Homo sapiens
ttcttccacatgctaaccaaaattaaaaccaattcccaaaggcaatgagtacttacatgacgattgcccattttcctttttctgagatggtttttctgtatttcatcaagagatcagtcctc

SEQ ID NO: 5981 - DNA, 122 bp, Homo sapiens
ccggcagtcaaaccaggtccagaccccggctgtgccgcccccaccccccagcagccctgccggctccccacccacacagctcccactgggaggtacctgacagtggtggtcccatctcaccc

SEQ ID NO: 5982 - DNA, 122 bp, Homo sapiens
ctggcccctaccttggggaccaggcccttgcgctgtggaaccaggtgggcatcctccttccgttcctccaaatgggaatcttgcttctctggtgggaccaggaagttctcagtccatttcct

SEQ ID NO: 5983 - DNA, 122 bp, Homo sapiens
cctgctagagctctgtgcaagcagagggtgccccagccagcaggtgcctccgaggcctggcgggggtggagcatgctgtcctcagcggcagtactcccgctcgatgctcgccatcagcccct

SEQ ID NO: 5984 - DNA, 122 bp, Homo sapiens
agttctcagaccacatcagctgcatctcggggatcttcaaattcaacaaaagcaaagccgcgagggtttctagcaacccacacactttggagtggtccatactagccaaaagcccgttccag

SEQ ID NO: 5985 - DNA, 122 bp, Homo sapiens
accataccagactctgcgctcgtctcctttcatgttttgcttccgttctgcctctcctcgcgtgtctctgccagcgcacatgcacacacctgctgctgttctccttagcagatcccacccta

SEQ ID NO: 5986 - DNA, 122 bp, Homo sapiens
ctgcacacgtggaacgcagcatttcgggttgtttatttatccaggcgggctttgaggttacggaatatttttaaacaaccaacagctggggccagggagccacctcttctctctcggatcct

SEQ ID NO: 5987 - DNA, 122 bp, Homo sapiens
tgcacatagacacagcaacgggattgacatgcccggctacacacagcaacatagacaagtcgcatgatgaaatcttgagtgacagaagccaaatgcaacagtacatactagatggttccagg

SEQ ID NO: 5988 - DNA, 122 bp, Homo sapiens
caaagggctgaagggctggacagtcccaggtcaacggcacccatgccccagctccttccacgctgacaggctcacgttgtttcacagagaagataaaagatgtgctccggaattaaaggtgc

SEQ ID NO: 5989 - DNA, 122 bp, Homo sapiens
agtgagctggagggagcgaggctctgaaagcagcagtctagcagagggagtttgggcctgcgcttacccctcagaaagtgtctggattgggaagggaagagaggaagctgccgagcgaaccc

SEQ ID NO: 5990 - DNA, 122 bp, Homo sapiens
gaccgccctggagctgcataccgagctgttagagagtggccgggagctgcctcggctgcgcgactacttctccaatccaggcaacttcgagaggcaaagtggaaccccgccggggatggggg

SEQ ID NO: 5991 - DNA, 122 bp, Homo sapiens
gaagcacgggaggcaggactgaaaaggaaagaggcacaggggctcacaaaacctgagggccgcgtcccagtgggtgacctgacccatcaaggtctaacacctggccgtggcaaagctgggcg

SEQ ID NO: 5992 - DNA, 122 bp, Homo sapiens
gggagggcggggctttattggagggcggggctttagggtcccgggcttggggcttggggacgggccgggcctagggttcggcgggctggggtccgcttgcggctcaaggaagggcggggagc

SEQ ID NO: 5993 - DNA, 122 bp, Homo sapiens
ctcctgtcgcggctgcagtcgttcggttatccgctgctgctgataccccagcctgggtttcggcttcgctttccctgccctactcggcgagctctggaaagcaggacctgctctcggatacc

SEQ ID NO: 5994 - DNA, 122 bp, Homo sapiens
gactcttaggtaggctttctgttgactcactcattttctgacatcatgaattttttcccccgcaggacagaggatattaatcaccaatctctgcttccactgtgggaaagaggtggtaggta

SEQ ID NO: 5995 - DNA, 122 bp, Homo sapiens
ctcagcaaatgaaatattcatgcagccagaaggcaggagatcagcagaggacttgccccccggggctgtggagctgcagtactggtggcagcagctgtagcccacccctctccctcaccctc

SEQ ID NO: 5996 - DNA, 122 bp, Homo sapiens
ggccgcccctccttccccgcggctccccgccccgcctccggccctgagtggcgagtggctcggccagaacccggacgtcctcacctgagcggggcccacagcatagcacctgcgggcggggc

SEQ ID NO: 5997 - DNA, 122 bp, Homo sapiens
cccctcaggactgcagagttcaaaggggtttattcattgtctcctccatagagttcagggcgtttattcattgtctcctcttcgtatggtggatgcgtctttgtctgtcctgttccccgagg

SEQ ID NO: 5998 - DNA, 122 bp, Homo sapiens
tgtccccaagaatgccagcaaggggaaccagcaggggcccaagtataacatcaatctgggcgagtcaccactgccccttgcagcaaccgatgcactggtccagccctcacgcaggcccgctc

SEQ ID NO: 5999 - DNA, 122 bp, Homo sapiens
cccaggcagcaggccaggaccacgccgcatgttcacaggctcagttatagccgtcgaccacgccacggcgcccaaccacgccacggagcccgaccacgcctcgaccatgccacggcgcctga

SEQ ID NO: 6000 - DNA, 122 bp, Homo sapiens
gggtggagagtcccgggccctactcgggcgggtgtggagagttctcgtgggattagaacccgggctctacccaggtgcagtgtgtttgtgaattttgaacttcagagtgaaggacaggcacg

SEQ ID NO: 6001 - DNA, 122 bp, Homo sapiens
cctctgggctctctgctccctcttaccagcttctgtccctggggctcagctgtcccccgccggtccacaaacatggtgtcaatctcattgccatcacaggccagcagctttgcccggcgccc

SEQ ID NO: 6002 - DNA, 122 bp, Homo sapiens
cgcacaagttccgccctaagggaccgcccctttaagcgcgggcactgcggtggaagcgcgcgctggtctggacatgacgtaaaccaatgggcaggcccggaagacagaggcgtttgcttccg

SEQ ID NO: 6003 - DNA, 122 bp, Homo sapiens
gcccacgtctgtgatgggccagtattccacatggatctcatcacatgggtccatggaaggcgagcatccctgagctggcacaccccaccttctgccagcatggaagggtgaggttgcatttg

SEQ ID NO: 6004 - DNA, 122 bp, Homo sapiens
gattgacctttctcccctaacagattggaaactcgtaatttcccgctttttggtgaaactcgttgacagacaccatctgctcgctactaccaggctgttgaaagcagatggtggctgaggtt

SEQ ID NO: 6005 - DNA, 122 bp, Homo sapiens
aatagcgaaaaggcaagtaaagttggtcaataaagatgttgcagaaccttcaatgtcagacgaaggaggtgcacatcttgctatagagaatagaaaatcatgccatatcattgagatgatca

SEQ ID NO: 6006 - DNA, 122 bp, Homo sapiens
gctccgaaagccagtgggagcgagcgcgctttgcaaagccttgggcgccgggccttggcgcgcctttgccggatccttccggccacgggcggggcgagcccagaggagaagagccgaggggc

SEQ ID NO: 6007 - DNA, 122 bp, Homo sapiens
actctgaaccgcaagcacagggtcttctgcagtgtgagacctgctgtcagcacaggcctacgggctcagggctgtgcagggacacaggggccagcaccactgggcaccctgtcctttcccag

SEQ ID NO: 6008 - DNA, 122 bp, Homo sapiens
cgcctgttcgccgtgttagtggccaatcggcagccaggcagggtgggcgcgcgtagggggcggggccgggcgcgcggcagggcgcgagagcgcacccgcggcggcggtggcggcgactgtgg

SEQ ID NO: 6009 - DNA, 122 bp, Homo sapiens
cactaaaaggagagctgcctctacctgtgagaagacttttcacaggtgcctcgtgagccccggggagtggcagggccccagcgtgtgggcacgcatcaggtgcaggtgacttgagcaccgca

SEQ ID NO: 6010 - DNA, 122 bp, Homo sapiens
tcatcataaaatgactttcatgctggtcttggctgataattaactgcatggcatcgcctgcgtattgtagagaggcaagggtgctgatttatgcatccgtttaattatctgaattgaaagac

SEQ ID NO: 6011 - DNA, 122 bp, Homo sapiens
aggtaggggggcggcgagtccctagagactcaccgtgtacactgagatagagctcagggtcgaggtccggccggggcggcggttcccccggtccctggcgcaacagcagtgcaccgggtctc

SEQ ID NO: 6012 - DNA, 122 bp, Homo sapiens
cccccctgaatcagaaaataaggagcagctcgaggccaggagggtaggttgatttcaaagcgggcagatgaatgtcttatttaggagtaggattgggttcactcaaatataagttttatttg

SEQ ID NO: 6013 - DNA, 122 bp, Homo sapiens
ccttccaatgtgtccatcatgctgctgccaaactctggaacttgtcaggcatgacctctccgtcctgtcacaacccacttttagagcctcatttgcttccacaccgactcacatacttcggc

SEQ ID NO: 6014 - DNA, 122 bp, Homo sapiens
catgactccaagttcccaatctagaggggagagcatcaaaggatatatttgagcacagcacgttcattagacaacagaggctgaaccaacccctgtagaagccaaaagagaaagggtggggg

SEQ ID NO: 6015 - DNA, 122 bp, Homo sapiens
tctgcctaagccaacgtgaaaaggctgtgcaaaggcatccctggtgccacatcctgacaccggcacatgacacagctgtgaagacttggtcttctcaagtgatattgttggccaaagaatgt

SEQ ID NO: 6016 - DNA, 122 bp, Homo sapiens
agtaagtgggatgtatgtcaggttttctctgtaccagttgtaatcagtacatgtggtaaccgcactgagatattctgactcgaggagatacttcacagctggtaaactgataagctagtcaa

SEQ ID NO: 6017 - DNA, 122 bp, Homo sapiens
tgacggccgcccccggcctgtggtcctgcttcccaccacctgctccactgggacctcccacgctcaggtcctggtcccccacagcccagggccccaggatttcccctcagcctgtaactgag

SEQ ID NO: 6018 - DNA, 122 bp, Homo sapiens
agcatggaccccctcagtctggcgcggtgcgaggctggcctggctggcagcgcctcccggcggcactgttgccctgtccgcagctgtagcgtctcctgtttcctgggcgcctctattccatt

SEQ ID NO: 6019 - DNA, 122 bp, Homo sapiens
ccatgcgactgcagcttttaatagtaactactgcgctctgatgaaaaagattgttgtttccgtaacgggaaaagtagctccaatccaaggacgctgccatagccctgaccaatgaatgtgga

SEQ ID NO: 6020 - DNA, 122 bp, Homo sapiens
aggacccacccagggagaccccacccccgtcggttccgtgccgcggctcactctggcctccggagttgagcagtcagctctcctactgggagtcacccaggacctcttcaccctgaacaaca

SEQ ID NO: 6021 - DNA, 122 bp, Homo sapiens
aagtgaggagcgcctcttcccggccgccatcccacctaggaagtgaggagcacctctgcccggccgcccatcatctgagatgtggggagcgcctctgccccacctccccgtctgggatgtga

SEQ ID NO: 6022 - DNA, 122 bp, Homo sapiens
tagctaaacacactttgacatgtgataattataaagtgagccacatatctgcaggaaatacgtgtgatgttttccactcttaacagctgacttggtggctcgcaacattattggcataccat

SEQ ID NO: 6023 - DNA, 122 bp, Homo sapiens
gtggtgctgccctctggtgggcgcggggcgcggcgcgggcggccaggggtgcagaaggggcgctcccagcctcatggtccgggctccggctccccgcatcgccctccctagccccgccctcc

SEQ ID NO: 6024 - DNA, 122 bp, Homo sapiens
aagacccaagtctgaaacggtttatctgtttatacttaatggctaaggtatacatgtacacgtattctatttgactaacatttgaggtaaaaaacatgggggaaaggagcagataacacata

SEQ ID NO: 6025 - DNA, 122 bp, Homo sapiens
gcgggggtagctagggaaacggaagatggcggcggcggccgggcacggggttccgggctccgctcgggcagagcccacccgctgaccaacgccgccgcccccgccgggcggtgctgtgtccc

SEQ ID NO: 6026 - DNA, 122 bp, Homo sapiens
actgtgcacactgcctctgttatattaattcatcaaatattgagggtccctttgatgccacgcactatccaccactggcaccctgacacttagaccctaacagatatggctgttgctcgtga

SEQ ID NO: 6027 - DNA, 122 bp, Homo sapiens
ttgagacaaggatctcccaggtttgggggctggcagcatgcacgtggccagccagacatgcggcccctggccccactgagctgtgacgtctgctgagctcctctcctcattgccacgacggc

SEQ ID NO: 6028 - DNA, 122 bp, Homo sapiens
cactctggccggggtaggggctgttgggcccatgctttgtgaggtcttctcagagggcatcggcggttgtagcaggagcgagtagaagggagcctggtgtcccagggtgaaagcagggaaga

SEQ ID NO: 6029 - DNA, 122 bp, Homo sapiens
tgtgcggagcgagacctgggcaaccggggcgtggccaggtgggggcgtggccagtgggagcggcaggtggggcggggctcgtcggtcggggcggagccaggtgaaggcggggccagttaggg

SEQ ID NO: 6030 - DNA, 122 bp, Homo sapiens
ggcagcgcccgaaggtcgtggtcaggacgttcagggcctgagtgaccttgggggtggccgcggagcacaaggactcttcaacgtgatccatgatcttctgggcacacgcgggccagtcaccc

SEQ ID NO: 6031 - DNA, 122 bp, Homo sapiens
gggcacaaaggagactctccagagggactcagagaaaggactccttgaacagataaggtacggagtagaaaagttaactacaggaaaggctctctagaatggttcttctttagcaaaacaca

SEQ ID NO: 6032 - DNA, 122 bp, Homo sapiens
tataaactgcttcaaattgaatcccaacgccagcctgcgatcatgttttcaaaatactgccgaggctttgaaactctctttgctacatatgatgtgcttcccaggcacatagcaggtgctca

SEQ ID NO: 6033 - DNA, 122 bp, Homo sapiens
agcgcacagctgagcagggcggctggcccagcaggaggggctccgcggggcaattgcacccggcctcccacccctgggtgtgcaactccagagcttctgttcggaaaacacaggccagccgg

SEQ ID NO: 6034 - DNA, 122 bp, Homo sapiens
tggggtttgtgggtggtctaaggaaagagttggggcactcaggggtctgctgtttttgcccgtggccttaactcatcaggggagggtttctgcagcagaatctcgggctcagggttggcggt

SEQ ID NO: 6035 - DNA, 122 bp, Homo sapiens
gctcacaggacaggctgtccgtgcctccagcacactgtctaggaggtggagtggtcagctcggagtggcccttttctctgccctctcgtccccaggcttggagaaatggatgatgggctaaa

SEQ ID NO: 6036 - DNA, 122 bp, Homo sapiens
gagaacagaatgggacgaaacggggcgcttagaggcccgggaatctgtgggtcttttaggcggagaggggcgaaggaggttattcgttttggggaaggtcatggaaacagcaaaggctcaga

SEQ ID NO: 6037 - DNA, 122 bp, Homo sapiens
gcggagcaggaggaggccggtggttctcagacctgggaacttgcggcttttgctgtgtaccgggactctcctgcttttatgatcacggtatcccgctagtgtccctggcacgtagtaggtgc

SEQ ID NO: 6038 - DNA, 122 bp, Homo sapiens
ggtcagcttgtcaaatccttcttctcagacagcatgaatgcagtgactcctgcattacaacgtactgtttcccaaggatgtgaatcgtccattttcttgcttctgtcagtgttccagtttgt

SEQ ID NO: 6039 - DNA, 122 bp, Homo sapiens
aggatagccagcagggtccgggcagaagtataggtggcatccttactagcccaagcctctcgcctcatctccacgtatgctgctgtgatgtagtcagccagagactctggcaccatgggctg

SEQ ID NO: 6040 - DNA, 122 bp, Homo sapiens
cccggcgcggacgcaggtgcagcggcctgcagcgccttggaggcggattcaggggatgcccggcggacccctgtgcccgaggggaacaccggaggcacaccatcaccagcggcgtggactgc

SEQ ID NO: 6041 - DNA, 122 bp, Homo sapiens
cactggctgttccttcctgtgagggctttccgctaggccggcgaaggctggtgagaaagccggctctgcgccctgccctgtgctggccgccctcacctggcgctttgtaccctgaggcagct

SEQ ID NO: 6042 - DNA, 122 bp, Homo sapiens
gtcacgcttgtggggcgcttggaggccagaagtgcgtcatgagcacggctgctctttctacggtgcaacttttccgcatctcggtgtttccgattgggagacatcctcttcctttccttgta

SEQ ID NO: 6043 - DNA, 122 bp, Homo sapiens
cgagagccaggcgggcgggaacgctccgggcttcctgcactggcaggcgcagccggcccacgcccgccccctgctgttaccacgaagctgacagttgcggtggtggtgagcgggggacggcc

SEQ ID NO: 6044 - DNA, 122 bp, Homo sapiens
ggttgacctaaggaaacgttatcctcggcagacagggtggagtagccggggctgcaagctcgcaaatccctaatgccggagagagactggaggggtcgcatatcgccccctccttcttctgc

SEQ ID NO: 6045 - DNA, 122 bp, Homo sapiens
gccgggcgcgcggagactgcgctgctccagcccgggaaaagttctagaatagaggcgcggcgcaagtcagggggccgccttggaaaccgcagcaagggctccttgtgggctccaggctgttg

SEQ ID NO: 6046 - DNA, 122 bp, Homo sapiens
tttgcgatcgtgcacttgtaggcacctgccccatagcagaccatacagcctgtgaagcaccgtgaattaatagggtttttaattccagtcattatatcctggaaaatataacgattaggcat

SEQ ID NO: 6047 - DNA, 122 bp, Homo sapiens
aaccacgtgtgtctgggctccgaccaatccgaaaaggtttccagtcactccagtgaagatcgttttcactagggggccatggggcttcaatctcagagaagaggctaaaacatgtagccagg

SEQ ID NO: 6048 - DNA, 122 bp, Homo sapiens
atgcctggagaaaaggtggggcagggcgaggaggcccacaggaaagacccgatgccgtgacgggcagcaggagggtgcacagctgcacacgacagcaatgcacggcttataaaaaataagca

SEQ ID NO: 6049 - DNA, 122 bp, Homo sapiens
gtctgtttgccaatcagagaagcaacatgccagcatggcagggaatccaggctttgggggcggacagttctgggtttgaaaatatccccacctctcactagctgtatgactatcagcaagtt

SEQ ID NO: 6050 - DNA, 122 bp, Homo sapiens
gatggctggcccccaccctctgcatttgccatccagcaggtctgggtgggtaccaggatgcggattcgtaacaggagaggctgatgctgccagtctgggtccacattttgagaagcattcct

SEQ ID NO: 6051 - DNA, 122 bp, Homo sapiens
gcccgccccacgcagggtgcccgcgccccgccgctccccagcctgccggccagccgggcccggccccgctcagctctctccgcggtcccgccgggccctgctcgccaaccccgtgctgggct

SEQ ID NO: 6052 - DNA, 122 bp, Homo sapiens
tccaagcccccaggcttgatccttaatgcccctctgattctgatcctcccatgtattaaccgagaggattgaaaaaaaaggaaagcaatcccttggcatggagacattaaagtgacagtgct

SEQ ID NO: 6053 - DNA, 122 bp, Homo sapiens
tctgcatacccctttgttcattctgtgtttgagatggatttgaggcgcaggtgtgattttcgtagaaagtggcatatagggcagcagaaaggaaaccattgtaaatctccccaaagggtatg

SEQ ID NO: 6054 - DNA, 122 bp, Homo sapiens
ccagaagagcaacacatgttcagcccctcaaaatgctggccaggggtttctctgggcaggcgagtggtaaaaattcctttatctgcatcataggacccttgctcgcttccgtatccatattc

SEQ ID NO: 6055 - DNA, 122 bp, Homo sapiens
cccattctacagccaacagagacgaagctgtgcgcacagcaggacgacgcacggggcaggcgagtggggccacgtgtgctgcctgcccctccgcaaacagccgtccagactcccacggcgga

SEQ ID NO: 6056 - DNA, 122 bp, Homo sapiens
gggcctgtgcatagggtggtatgtctcttaccacaccagctgcctgtgtggcacagtgcccgtaggcacctagtgcaatcttcccagtggtcagtgtggttagccacaggggaaacttgaga

SEQ ID NO: 6057 - DNA, 122 bp, Homo sapiens
gagtttgtgacgagccagcagtaggagagggggagggaaggacgcgggctcccgcggtcccggttccccgagggaggtggatctttcccacgcagcgaccctcttgtgatcctgccgcttcc

SEQ ID NO: 6058 - DNA, 122 bp, Homo sapiens
ggcggaagtggtcgcgttaccgcttgtttgtgcgcatgcgccactctcgtctggccgccgcgctttcaggaggtgcttttggttctctccggtcttgtccacgctagggggtgcacgtactc

SEQ ID NO: 6059 - DNA, 122 bp, Homo sapiens
ctgaatgcacacattcatctttgggcctgccaggcttgcactgattttgaaaatctggctcgctgtggctggtgaggactggggaggtgtagagaatttcaatttccctcaccaaatggcaa

SEQ ID NO: 6060 - DNA, 122 bp, Homo sapiens
tgcatctgtggggagagccacgtgctgcaccccacttgaagccactaacatgatgccttacggccacggtctctctaatactgaaagctagcttcagcgctgtgcagctccctgttaggatt

SEQ ID NO: 6061 - DNA, 122 bp, Homo sapiens
gcctggctctcaaggaagggagcttctccaggtggcttcctcctctgtcaaatgggcccacgaataccctattgatggtgagaattaagagatacgaaacccattcgttctttattatgatg

SEQ ID NO: 6062 - DNA, 122 bp, Homo sapiens
ggacggccgcggggggagggggctgcgccactgggggtttgtggcgcctttgtctgctggcgctgcgggctccaacagcctggtgggggtagaggaagaaggggaggctggggggcttggca

SEQ ID NO: 6063 - DNA, 122 bp, Homo sapiens
ccggcaatgacgtccactccaaccggcctgcatcagctgagcttccaacacaaacactggcgcagcagctaggtcgccacccactcagccccgccccgctccgcccccagcggaagtgacgc

SEQ ID NO: 6064 - DNA, 122 bp, Homo sapiens
aaggagttcattcttgcattgtccatctgtcactgagtgacctggtcctgcgaagcccggcgtgactgtgccaactttctcacttcctccatggggccggagaagaaaaatgatatgaatgt

SEQ ID NO: 6065 - DNA, 122 bp, Homo sapiens
cttcacaggacaccggacatcagttagagataaaaattttaatggattttcccccctgggcgtatgggtgagagacttaaataaaaacaatcctcttcaagccaaatagccttgactctgtg

SEQ ID NO: 6066 - DNA, 122 bp, Homo sapiens
gcactgtagcatgcccactggggctttgagagttgcagacacacatccctagactcctaacgtggggccagagccccaaaagcatttgcccaggctccctgcaccctgcccgtctgtgtgct

SEQ ID NO: 6067 - DNA, 122 bp, Homo sapiens
ctcattcccacattctattttcccccggtattctttagatcctagtatttggaaaacaatcggctaaccttgacatttctttttaccttcatatgccactatctcggtagttcaaaaaaatt

SEQ ID NO: 6068 - DNA, 122 bp, Homo sapiens
caggctccagcaaaatggcgccggcgccgccagaaatctcctggcctcctcagagcacgacgtaaagggggcgggcgtctctgtgacgtcacgaggctccacctcccgcgaggctttgtgtc

SEQ ID NO: 6069 - DNA, 122 bp, Homo sapiens
gaggccgagccggggttgcggcctcggcggagtggtggctactgctgctgcctctgctgccgctgctgccgctgcagctgctgctgctgccgcctccgggagggcccgggatgtgtcacaag

SEQ ID NO: 6070 - DNA, 122 bp, Homo sapiens
ctgtgactcactctccgcccacatcctctcactcccatcgcctgccttgcggcagagctccgactcagccgaacccatcactgcttgcgctggctcccaggccccttctagtcagacttctc

SEQ ID NO: 6071 - DNA, 122 bp, Homo sapiens
gcccgaactcctcagcccttgggtggtcgatgggattcggcgccgtggagcagggggtggcgctcctcggggaggctcgggcgcacaggagcccatggagagggtgggaggctcaggcatgg

SEQ ID NO: 6072 - DNA, 122 bp, Homo sapiens
aagagagtctataggaaattctgagcgttctttaagtcaaagtttagagcctagactccccgtttcctccaggtaatttttttattagtggtcttgttgcacttttctctctatgggccttt

SEQ ID NO: 6073 - DNA, 122 bp, Homo sapiens
tgtgcaaatgaatcaccctgggatctggttaaaatgcggatttcaattcagtgggtctggcgtgggaactgagactgcatttttaacaggctcccaggtaatgccttggctgctggttcctg

SEQ ID NO: 6074 - DNA, 122 bp, Homo sapiens
cccaagagccttagatagaacccataagcctgaaagaattgccatccctacaattgacagcgtttctcggccgttgccctggtgcatgtggctgcaaagctgcgagttgtgtgaattctgtg

SEQ ID NO: 6075 - DNA, 122 bp, Homo sapiens
aaaaaagcccgagctggaaacttcagagaggtttagtttcgtttcccagaagcatcagttcggtcccaaaacgctgcaaacgcgcgctgcctgcagtaggagagaggaaaccgcgaagcgcg

SEQ ID NO: 6076 - DNA, 122 bp, Homo sapiens
tttatcaattccagggaaacaccaagcttgcccagcctcagaaactctgcatttgctgttcgctctaccgtggacacgctcccccgggatcttcccagcgctggtcccttctcctttttgta

SEQ ID NO: 6077 - DNA, 122 bp, Homo sapiens
ctgcgcaagctcccggctctggttgctggtccacaaaatcgggaggctgaattagccggtcgggtggcccccagccttatagcttcgaattctgtgatcctattttagacccagacttgtcc

SEQ ID NO: 6078 - DNA, 122 bp, Homo sapiens
tccctgttctttcttacactttctcagggagattcttgactgtattttccaactttgtatcgaccattttacttttcctgccatattttcaatgtttactgatgtttctctgccctttcagt

SEQ ID NO: 6079 - DNA, 122 bp, Homo sapiens
acagcgggtcccttgctttgagtgctgcacagtttatccatctgctcttacaagaaagggcgcttagattgtctccaactcccagcaaccacagcaacacagcaaccaacatcctcctacat

SEQ ID NO: 6080 - DNA, 122 bp, Homo sapiens
atcccgattctccaaaaatccaaattgcaggtgggatcattttagaatgtacttcaatagcgttcttcatcctgcctcgcgtttttaaaaggactgagtggagagcggggaagaggtcgtaa

SEQ ID NO: 6081 - DNA, 122 bp, Homo sapiens
atctcttctaaaaattatctcatgagtctgacactttcaagtcctatacagaatggtagtcgggccagtaatatgcccttcaagcttaatatctggcctccaggttgtcagaatattataat

SEQ ID NO: 6082 - DNA, 122 bp, Homo sapiens
agccgctcccgcattaaaatttcatgggcgctgcagcagctacaaagacgacgccggctgcgctcgcgggaccagagggagggaggctgcggacgagtgcggggaggagtttgagatgggag

SEQ ID NO: 6083 - DNA, 122 bp, Homo sapiens
gcgacaccagctcaaaacggcctccccgccctccgcggacctgggtcgcgcccaggaatccgatccaaggctgtgaggcctgtccctttgggaagggtgggtgtttatttccgggatgcact

SEQ ID NO: 6084 - DNA, 122 bp, Homo sapiens
cctgtccctctgggctcagtgtcggcatctgtgaatggggacccccactcttctcctgagcgtgggagcgccccctctgtggtgtgactgtcctcccggagaccgccatggtgggtctgccc

SEQ ID NO: 6085 - DNA, 122 bp, Homo sapiens
aaggggcttttctgagcaatgtgtgccacgtactggatgggaagcgtcacaggctgataacgtgacctttgcgcgcagctcaattattgcgcgggctgggggcggggcctgcggggaaggga

SEQ ID NO: 6086 - DNA, 122 bp, Homo sapiens
tctagccacttcctcctgggcccctctcccttttctgtggctggctgcctgcccgcctggcgctggacctttcatgtaacgggaatcagcatgtatattctggtctggtctgtttctacact

SEQ ID NO: 6087 - DNA, 122 bp, Homo sapiens
agcgctcttctgcagtctccagccctccctggagggcgtgttggaccagcccctgatgggcgcccgggagccacgggatggggcgtgatgccagcctgggagagggatccactcgggggtcc

SEQ ID NO: 6088 - DNA, 122 bp, Homo sapiens
caaacactcaacctggggacactctggcagggagctctgagcagaacgagggatccaccacgctccctttgggaaacatgccgcgttcacatgaagacttttgcaggaagccaggacatcgt

SEQ ID NO: 6089 - DNA, 122 bp, Homo sapiens
agatgtggaggcgcgtgctcccagatgttgccggggtggcttcgtgagtgccctgatgcacgcgtgcgctgggggagaggggaaaggcaggctaagatggggagtggggtgtgggcacactg

SEQ ID NO: 6090 - DNA, 122 bp, Homo sapiens
cagacaccgctgtggtgtggctgcaacagatactctaaccatatgtctgtgtccacacctcgtgacaggaaaccagggtgacagaggagacaaaggcgcggcaggagcagggctggacgggc

SEQ ID NO: 6091 - DNA, 122 bp, Homo sapiens
attggggctccggaatgaacttctggagaaatctttcggctttccccgacgtgggctcggcggtctgttctcggggcggcacggctgacacccctttttcctccgcccagatgctggttgca

SEQ ID NO: 6092 - DNA, 122 bp, Homo sapiens
ggcacaaaccctaggggtgagctgggagtgtggaggagacgctggattagggagaagtctcggccatgtgttctggctcttttactgatgagctgtgtgggcctaggcaagttacttcactt

SEQ ID NO: 6093 - DNA, 122 bp, Homo sapiens
gtttcaggtggaggtggaggaagcgtccctgggatcgagaggatgggtcctggcattgaccgcctcgggggtgccggcatggagcgcatgggcgcgggcctgggccacggcatggatcgcgt

SEQ ID NO: 6094 - DNA, 122 bp, Homo sapiens
atcaggtgagtgagagaagggctgggcgctgggtaggacatgagggtgcaggtgcagacacgtgtgaggaggacaggaaccaagaagaacattttcctctgatctggttccctcactgaggg

SEQ ID NO: 6095 - DNA, 122 bp, Homo sapiens
agaccgctcaggaacaatcctaatttgcatactggaactcctgtagaagatactttgaaccgctttagatacaataggatcaggtaaaacggcgctgccttgccagccactgcaggttttca

SEQ ID NO: 6096 - DNA, 122 bp, Homo sapiens
accatccaggttgcacatcttttctgtctctattaactctatttgcacggtctcacacagcgcccaccgtctccaatccctcctatgcagagctttcgcagcaatcttgcgaatatgcaaaa

SEQ ID NO: 6097 - DNA, 122 bp, Homo sapiens
atagtgactggctcccaaaggaaagagtatcaaaatgatcagtatctggatgccgcctgccggctccgagcgcacttactcaggttctctgtgccacagcaacagcttggctttatttcatt

SEQ ID NO: 6098 - DNA, 122 bp, Homo sapiens
tgtgtgacttggatgccttaccttaaatatataaaccaaggcctaagtacagagagcccacgcggctcagccctgtgcacctcaggtactattaaggctggacgggcgtctgtattgtgctc

SEQ ID NO: 6099 - DNA, 122 bp, Homo sapiens
attttgagccaatgaaatgaaaatagtagtaatgattgttggaaaagttagtctcttaggcgaaagagaagagaaacaaatattattaaacaaaccagaaaatgggctgaagccttttaaat

SEQ ID NO: 6100 - DNA, 122 bp, Homo sapiens
cggcctcccaaagtgctgggattacaggcgtgagccagcgcgcccggcctaactgttttacgtggcttgcagtcaatgtaaaataactagcataattaaataattggtgctaaatattaata

SEQ ID NO: 6101 - DNA, 122 bp, Homo sapiens
cctccaccttcttcatggcacatcatcctcactggtccatgcagggctcttctcatattccgtgcatactttcatttgttcatttgttcgttcgttcattcatttatcgctttttttttttt

SEQ ID NO: 6102 - DNA, 122 bp, Homo sapiens
tgcccagggtgcaatatggatgcactcctttttaaggctggccctgcacttgcatgaccccgagcattaacactgccttgaattgtactcaccagcttcctcacacttagtccctactctgc

SEQ ID NO: 6103 - DNA, 122 bp, Homo sapiens
ggagtgcacaggcaggcaggtgtgagcgtggagatgccacacgtgtgaatgaaaacagcacgtgggaagacacgtgtgagcgacacaggtggggacaccagctgagatgagaaagtggaaat

SEQ ID NO: 6104 - DNA, 122 bp, Homo sapiens
attgtcagcagcttcacagtataacgtgcagagatgggtagttggagctacctggaaatgcggaattaacagaataaagaagtattttgacaccaatgtcgacatattctagataagaggtg

SEQ ID NO: 6105 - DNA, 122 bp, Homo sapiens
aatggaaagtgtgcaacactagatccaaaactacttttgacacttctgagactgtggccgcgcctctgtcaccttccaaaggccactaggcctttcctgagctggcattggcaacgcacact

SEQ ID NO: 6106 - DNA, 122 bp, Homo sapiens
ccctgtgagtgagagctgattattttcatctctttgatcttggctctctggattgcctggcgcacgaggcggcgtggggagtgggttgcagcccccacagtccggacccctagggtgggtct

SEQ ID NO: 6107 - DNA, 122 bp, Homo sapiens
agaagccggaccctgcctggcaaagtggagctgatgggagatgccaggcgcggagacgcacggcggggaagagtgtgggcagccggcacccatgtaggtcagcgtcttagggcagaaggcct

SEQ ID NO: 6108 - DNA, 122 bp, Homo sapiens
cggtttccgggacacttgggttgcggaggccggctggccggagtcacggttggggacgggcgcgcctcggagcgcacggctgcgctggaagccgcgtctggggcgcaggaccaacgggacct

SEQ ID NO: 6109 - DNA, 122 bp, Homo sapiens
cgaacgggggaggaggaagaggctccgggggagagccaaggaggcggggaagaggagcggcgtcccgggaaaggggatgctggagctcctgccgacgctccacctgtagccccgcccttgac

SEQ ID NO: 6110 - DNA, 122 bp, Homo sapiens
tgtcgtctgagtctccttctggctctgggtcgggctgcagctggggtgcagagcggacggcggacgccgctgcggggcgcaggttcggagggtgcagggcaggctccgcaaaagggtaaaag

SEQ ID NO: 6111 - DNA, 122 bp, Homo sapiens
atgtataaatagagggtttattattacctccgttttacagatagaggtgagaggtgacagcgtgctggcgccctcccagccctcactcgctctaggcgcctcctcggcgcccactctggcca

SEQ ID NO: 6112 - DNA, 122 bp, Homo sapiens
gcaggcccagctcccacctgccagtggcctcctcaggcccatggggctcattcctcacaacggcctttcccagcccagtttttcccgtccggcggcctctccgggcccagaagctcctcaag

SEQ ID NO: 6113 - DNA, 122 bp, Homo sapiens
ccacatcccaggtgactgcttgacatatgccatgtctctaaagccttgtagcatctagggcgcagggcaatgcttccattcgggaactttctgtgtcatcttgagaatgtcagtttaccttg

SEQ ID NO: 6114 - DNA, 122 bp, Homo sapiens
ccggtgtgtctctgcctggcagggctgtgcctggcacggtgcccgggccgtgcagtccatcgcctgggctgaccacgaggacaccccggtgaagagctgggcgtgcttgggccgagggctgc

SEQ ID NO: 6115 - DNA, 122 bp, Homo sapiens
ccgccgcaggtacaccctcgggagtgcacatcagagatggtcttagggctgctgtgcacgcgcctccgcatcctcgttcaggaacaatgtgttcctgcctgagaggcgagcaggagcgtggc

SEQ ID NO: 6116 - DNA, 122 bp, Homo sapiens
gggcgcaggctcctggcgctcctacctcgggaagccgctggggtggagagagacggggcacgggccagaatccagcagcggaaggaggggagagtcttcgaatccatctctcggtgggatct

SEQ ID NO: 6117 - DNA, 122 bp, Homo sapiens
ggcccagtggtcaagtgtgctccatgcgcatgtgcaaggcccagacctcgcaaatctcggcgactgggacgagccctgcgttcctgtcaaacaaatgtcggtgggagtctggctgagtgttc

SEQ ID NO: 6118 - DNA, 122 bp, Homo sapiens
tttcgttgtcaggagcgctggtggtttaggttctccacagacgcaggaaaacatcagtcacgaggcgaatgtcccagtcagtgtgcatgctgcacagacctgttgctgcacttgtctgttgt

SEQ ID NO: 6119 - DNA, 122 bp, Homo sapiens
ctctccctggggagccccgcacgcctcggcttgcttccctcgcagcggtcccagggctctcgcagcccgagcaggtggacttccaacttccctgctcaaacatgcacaaaaatgaatagatg

SEQ ID NO: 6120 - DNA, 122 bp, Homo sapiens
tgggccagggagcgtttacaaatcttcagtttcatttgcggaggcctagccgtgaccccgcgcccaccccaaacacggatctgattcccacttgacacactttcccactggtcttagtctca

SEQ ID NO: 6121 - DNA, 122 bp, Homo sapiens
attttgattcgccacccccccccccaaccccgccctatgccaatcgcccctagaccaagccggctaccaccagaacagtgtccacttaccagggccctttcctgcatgtccccggccccgta

SEQ ID NO: 6122 - DNA, 122 bp, Homo sapiens
caccccagctccccactctctctcctcttgaatagacaccagctcttagaatggctgcagcggccctcacaggcccaccaagcacttccattctggctctccctggacagcttgggaagagt

SEQ ID NO: 6123 - DNA, 122 bp, Homo sapiens
ttgaaagtatatagaacttcagaatgaaaacaccactttctcactgcacttccattttatcgtgccattgccatttctcatctgagccatcctacccttgagcttattctctgaggacagaa

SEQ ID NO: 6124 - DNA, 122 bp, Homo sapiens
cccgcgccgcccccaaccctgggccgggcaggtgcaattcctcaggcggcctacagagggcgatgtgcgccgccactgggccgcgcccctccggcgcgcgcttcctgtgaggtcaggtggga

SEQ ID NO: 6125 - DNA, 122 bp, Homo sapiens
ccgaggccttagggtgagttacccgagagggcagcagtgctgggctttccctcactcagccgaggcttaatggaagaactggttagcatttttttttttttgagggtacatcgggggagagg

SEQ ID NO: 6126 - DNA, 122 bp, Homo sapiens
tgagacagaggaagaaaagctcataggaatgggaagacagcctctcagatgagaggtgtgcggagtgattgctgtgaggaattgctcaataggaaagttagccaacctgaggacgtttctag

SEQ ID NO: 6127 - DNA, 122 bp, Homo sapiens
aactttcaattttcaacgcttccacactgcaaaatcatgaaatttcttcaagtcttttgacggtacataaccaatcagaatttgttcactagttttataactttcactttcactaagaggtc

SEQ ID NO: 6128 - DNA, 122 bp, Homo sapiens
ggcgcagcagctctgcaaaggtggtgacccaggacacctacccttctctgcagctcagcccgtgaatttgcaccacaaatttcaatgaagtcatcttaagaagatctcactttgttccttct

SEQ ID NO: 6129 - DNA, 122 bp, Homo sapiens
tctctgcctgcaggtcgtcactccttaaagatgaaagactcagggctggagaagcggggtcgcctccctcgctggcctcctgctgagaggtctcggcccttgccttgcctggacagccctgg

SEQ ID NO: 6130 - DNA, 122 bp, Homo sapiens
ggggctcgaacgagtggaagacggttgtgggcggtgccatgttcttcatcggtttcaccgcgctcgttatcatgtggcagaagcactatggtgagtagagagggaggaaggcatgggcgcct

SEQ ID NO: 6131 - DNA, 122 bp, Homo sapiens
tcctccctaggcaggagctgctgccactcaacccgggggtgccccgcccccaccatctgacgtaactattttgcatatcaactcgccgagaggtgaggggccgcccccttgactgggcttct

SEQ ID NO: 6132 - DNA, 122 bp, Homo sapiens
ccaagaagcccattgcctgaggaatccaccgtggcatctgggggatgtttagccttctctcgtgcccacagccaggccccaggctggggctctgcccacagtccccttgtgaccttcccaag

SEQ ID NO: 6133 - DNA, 122 bp, Homo sapiens
tgttattcccactgtgcagaacctcattctgcagaaaggtcccacggctggtgaatatggcgaaggtgagattcggatccagccagtctggtcccagtctctaaaccacaatgtccctcata

SEQ ID NO: 6134 - DNA, 122 bp, Homo sapiens
atgaatttcagttccggagtccccgactcagtggcccacctcagggatccgtcagtccttcgtgccaaggtcaggctcaactccagcctgcggtgccgctcagccgcactcctcgaagatgt

SEQ ID NO: 6135 - DNA, 122 bp, Homo sapiens
tgcatttcctctccggcctctctctcccaggcatgcagattccatccctctattcacacacgcatccagagcctaccctgtcctagcccctggggatagagcagtgctcaaaacaaagtccc

SEQ ID NO: 6136 - DNA, 122 bp, Homo sapiens
gcctggggcaggtcgccgggacaaccccaccgccccgcaagtccagcccggcctcgggcacggtagggtttgcggttaagcttgtgacctttagacttctgaatattcatatgtatgaaatg

SEQ ID NO: 6137 - DNA, 122 bp, Homo sapiens
actaaaaaaaaaaatacaaaattggctggatgtgctggcgcatgcctgtaaccagctactcgggaggctgaggcaggagaatcgcttgaacccgggaggcagaggttgcggtgagccgagat

SEQ ID NO: 6138 - DNA, 122 bp, Homo sapiens
gaggccgcttctagtggcaggtgcccctcctcacagggccctcgcagccccgccggcccccgcccggctccttctcagcatgatacaaccgcgtcggccctggacagcgcatgcgcgggcgc

SEQ ID NO: 6139 - DNA, 122 bp, Homo sapiens
caggtggcggctcccatccgctcgctccggggtcctggccgcctggccctgaggggagcgcggaggggaagagcagtgctacgcctccctgcgcacccaccctgcctgcccgggcctcttcg

SEQ ID NO: 6140 - DNA, 122 bp, Homo sapiens
cgatacccatagacttaactctgaagttatgcaactgcttacaggaagatgcggatgcttcggggaaggaggggccaggtccctgaagcctcgtattgctccctgccaattcctctccagta

SEQ ID NO: 6141 - DNA, 122 bp, Homo sapiens
ccgcagtcctaggccgtaactacggagatccctttcctttcattaaggggaacaaacaaacgcgcaggcacgcagcttgagcaccccagccgatggccgcgtcccgggctttgtggccccgt

SEQ ID NO: 6142 - DNA, 122 bp, Homo sapiens
atggggaagagggtgaccaggccactctctcctggggctcagccagggtttatccaagcccggggcgaggccgaagagccctctgaggactgcaggacgtcagcaccctgtccttagggaag

SEQ ID NO: 6143 - DNA, 122 bp, Homo sapiens
tccatcacggtgggtgaatccgaggccccaggatggcgtgtgagcgggatcagccgcatgcgctgttttcctctggcttctcccacccggcacaatggccttgacattcaccgcacttccgc

SEQ ID NO: 6144 - DNA, 122 bp, Homo sapiens
caggccccgcccagaacctccccgcccagtcaagccccgcccccaaactctgtctccccgcggtatcctctggggctctccaggccccgcctcggctcgggccccgcccctccaggccccgc

SEQ ID NO: 6145 - DNA, 122 bp, Homo sapiens
ctgaggctgcactagcctctgcccccttggcctggggttcctggctctcaggggtggctgcggccttcccttcctgagcagtgccctcgtcgctgcaggcaccgatctccccctgctcctgc

SEQ ID NO: 6146 - DNA, 122 bp, Homo sapiens
caaccggggcccaggcccaggtgggcgggcggctgaggagcgtggctgcgcccacaaagccgccgggggctgcggactacagcgaagccggcgcggggctcggccctcactacacgaggcct

SEQ ID NO: 6147 - DNA, 122 bp, Homo sapiens
ctgggaaacccaggctgccagtgtctgcagggccaggaacacccagagcagagtgggatccgccgagggagggcagggagacgggcccggcggcctgtgtgggtcagagccacggctggttt

SEQ ID NO: 6148 - DNA, 122 bp, Homo sapiens
aaaatcaatccaaacttttgttgacatgtgtttctttctccatataccaggttcccgcttcgtattagtaagattgaaattgaaataagtctattgctggtggatgaatttgtcactttcct

SEQ ID NO: 6149 - DNA, 122 bp, Homo sapiens
gctggggactttcgtgctccctctgaaaagtgagtcctggatgtttctcaaataccaaaacgtgaggacttccagatacccagatctggtgccgttagatgctgcaacctggagaaattcaa

SEQ ID NO: 6150 - DNA, 122 bp, Homo sapiens
ccccctccaaactgcagctggtctggcttactgttttgccgttcaaaaaggtcgcgaatccgtgggactgagcacggggacctcacccgctagccagcgtctgctgcacttgatcaggtggg

SEQ ID NO: 6151 - DNA, 122 bp, Homo sapiens
tcacaccgcagaacctttctgccttttactacttttcaaagtggacctaggctcctggctcgagcctgaggggatacaagggatcacgaggagcgccatcaccgtgcaaggtcgacagcttc

SEQ ID NO: 6152 - DNA, 122 bp, Homo sapiens
agagtttgtgaagctgaccggacacctgtggctcttatttcctaggtggcccgaggcagccgggatgacagctctccccaggaatcctgctgcctgctgagaaacatggtcagcaagtcccg

SEQ ID NO: 6153 - DNA, 122 bp, Homo sapiens
caaaacagaggaggaagaggaggaggaggagacggcggaggtggggagaggggccgaggccgaggcaggcgacttggagcagctgagcagcagcagcacgtccaccaagtccgccaagtcag

SEQ ID NO: 6154 - DNA, 122 bp, Homo sapiens
tgaaaaaaaaaaggtggtttataagactgatcttgctgggatgctataaagattagaaagcgtacttataatggacctggcacattgacgcagttaacagaacaagctgctgatagtgttaa

SEQ ID NO: 6155 - DNA, 122 bp, Homo sapiens
actgggcactgtactaggcgccggagatacaaagatggatgggtaaggtagttgttttcccggaaaagcttatagtttagtttgtgagacagacaggtaaacaaaagcctgtatgtctgata

SEQ ID NO: 6156 - DNA, 122 bp, Homo sapiens
tgctacatggtctcccttccttgtcagcagggatgataagcagtgttttctctgctggtacggagcaagacaatgatttggaagcatcatgccactgcgttgctgtacaccctttgcctcta

SEQ ID NO: 6157 - DNA, 122 bp, Homo sapiens
cttccggggaaggcccgggtggggccagggcctgtggttaagtcagtggccctctgcagacgcgcacgcagcaggagccacgccctggtccctgcccgggagtggcctggtctcccccagct

SEQ ID NO: 6158 - DNA, 122 bp, Homo sapiens
ggcgccgccacgcgtgaaggcccgcatcggctccctacgtgggggacgtgcaggatgatgcggggtcgggggggatttcgctgcgtcgcccgccccctttccggcgcaggagggagcggccg

SEQ ID NO: 6159 - DNA, 122 bp, Homo sapiens
gagaaacctacgccctcttgcctatgacagacttgtgaaagatgtgagggtggtgcccctcgtcccgcacctgtccccatcccagtctcatccaggcttggcctctccagtcatttcgacca

SEQ ID NO: 6160 - DNA, 122 bp, Homo sapiens
tgcagatcagaaccagagagggtgcatttagaaactcattgcaacctgacaaagttgcagcgttgtagcgcggggtcagcaacaggaattcgggttgggtggagtcggactcagggagtggt

SEQ ID NO: 6161 - DNA, 122 bp, Homo sapiens
gaagcccatgttgaagttctcggtgagcttcaaagcaaacccttaacacacacaaagccccggtgtcggacacacagcagtaatttcccagtcatagtcttcttttcaaatgttttgaacac

SEQ ID NO: 6162 - DNA, 122 bp, Homo sapiens
ctgatgatggctactagatgcctggtaaatgatccttcaagaagtgaatgaaccgggggccgtggctcacatgaagtcagcagttcgagagcagcctgaccaatatggtgaaaccccgtttc

SEQ ID NO: 6163 - DNA, 122 bp, Homo sapiens
cgacatggggagcgtctctagcgctggattatgacgctggattatgacgcaggcagtgggcgcggactctgcggttcgcttgactgacggcgcagcctccgggcctagccacagcagcaacg

SEQ ID NO: 6164 - DNA, 122 bp, Homo sapiens
tgaggggcacagagtgcccaggtaaccgctcctgggaacagtggggaactgtcagatgctcgaactttcgagagctgggctctgagcgtcctcgtggagctgccaactcggccaaaggagaa

SEQ ID NO: 6165 - DNA, 122 bp, Homo sapiens
tgcgtgtctactgctgcacggctgccagacgacagccattcagatgaagccattgaggcccgcagggctggggattatgtgtttctccctcgggatgccagatgcttttctggggctccaag

SEQ ID NO: 6166 - DNA, 122 bp, Homo sapiens
gacagttcattcgcagtagactaacaacaatgtcaggacccgaggctggctaggagacatcgtcttgaatccagtttaacttttctgagacgtgatcttctcggacaaatgaaagcaaggcg

SEQ ID NO: 6167 - DNA, 122 bp, Homo sapiens
agagaatcatgcagcgtttgggcaagaagagaggttgggaatcctccttgtggtacatgtcggtgaccctgaagcccagaaagggaaagggttttgttgtcagacacgcagcaaggctgcag

SEQ ID NO: 6168 - DNA, 122 bp, Homo sapiens
gcggcggagggcggctgagggctgctgagggtacgcgcagcggcctctcgtcgccctgcacgtgcctcgccaggcagtgcgcctgctcgcagcgaggacctagccctctggttgcagagacc

SEQ ID NO: 6169 - DNA, 122 bp, Homo sapiens
gtgcacagtcgcagagaaggcgtgcgggggcgtgcaggggcgcacaggcgcctgcctctgcgggtgggaaaggaaggaggtgcccgggtttccgctcccagggctcagcctgccttgggcac

SEQ ID NO: 6170 - DNA, 122 bp, Homo sapiens
cccagcagagggaggaggaggagctgagcctctcgggcaccaccccaggatgcctagaaccgtgtcccgtggctcaacagagtggactccaggagtcagggccacggccatgaggtctcatc

SEQ ID NO: 6171 - DNA, 122 bp, Homo sapiens
ggcattaaccatcagcctaatctcccataccagctcaccaggtctggggcccgggtgtttcggagaaggcattctgtagttataactaccatccaccatcaggtgactgtcggtaaaggagg

SEQ ID NO: 6172 - DNA, 122 bp, Homo sapiens
accactgatgaatcagtgccactcacatcctgggtaattctagggacactagttggacaacgctgacatctgaagaggtggcagggcggaacatggatccctttaaggctactttattgtcg

SEQ ID NO: 6173 - DNA, 122 bp, Homo sapiens
gcgtagttgaaccagacttgaaagcaaacatcatgatcataagccacctttctgccactgcgtgttgatggtatgaagataccatatatatatttacacatgcacacacaaaaaaggataaa

SEQ ID NO: 6174 - DNA, 122 bp, Homo sapiens
agtaagagtaggggcgtcggaggaatcgaagttgcagtgacatcaggctcggacagccggcggactcctcgcaaggtgatcggatacttccgagagccccacagtcctcctgggcctttgcc

SEQ ID NO: 6175 - DNA, 122 bp, Homo sapiens
gagctgtccgtctggtgtgaatatatgaagccagcgttctcttcctgtctcccagaagggcggctgcgtgtgacagcgtaaatgtgtgacagtatgtgaaaatgtttctgtaatcctgaaga

SEQ ID NO: 6176 - DNA, 122 bp, Homo sapiens
gggaccccagatgggctcagtgctgccacccagatcagatcacatgggaatgaggccctccgaccattggcagctccgcctctgggcctttccgcctcctcaccactgtgcctcaagttcct

SEQ ID NO: 6177 - DNA, 122 bp, Homo sapiens
cgttccttccgctggtgctaaaataatctgatgccccacagcaaggaggtagcccagccccgcgttcggctgctctcgaggaggccggagcccccggagacgatgcgccccgcgcagccgcc

SEQ ID NO: 6178 - DNA, 122 bp, Homo sapiens
ccattcactgcgcagacactggggacatgtcagttctctagtatctttattatccattcccgggggcactcctggctgcccaactcaggggtgcagatgtctccctgcaccatgccaggtgt

SEQ ID NO: 6179 - DNA, 122 bp, Homo sapiens
ctccggagatgagtattaattacccgaaggcaggccgggccaagctcattcattcccagccggtttcaagacccgggggaagcaggatcccgctgagggatacaggtggaaaggaaggatga

SEQ ID NO: 6180 - DNA, 122 bp, Homo sapiens
cccctaatggagcagaagacaagccctgcctgccttggcattgggaacaggcagcgcccgcgggtgccgcagctcatcctgcgtgtgggagacactgagtcacagccacggctcatgcccgc

SEQ ID NO: 6181 - DNA, 122 bp, Homo sapiens
cgagccaccatcgcgcctgcgtgcttacacccttccgccgcgaccagtcgcgtcagcgcgcgagggggcctagctccgcccagtttcgtgccccaccccgggcacacgaggcctccactgcg

SEQ ID NO: 6182 - DNA, 122 bp, Homo sapiens
agattctgagtctggctgctttcatttctgcttctggccaggacagattctgggccctgccgttcacttcctactggcatggggcattgaccccggagccagctgggagccatggcccagga

SEQ ID NO: 6183 - DNA, 122 bp, Homo sapiens
actgtaactaccaggtatagtcattaatagaactgcagacactaagactatggaaccttccgtcttcctaaccttttcctcaggccagccttaaaggcctgtgaagatctattaataacact

SEQ ID NO: 6184 - DNA, 122 bp, Homo sapiens
gcactcctcagcccttgggtggttgatgggactgggcgcagtggagcagggggtggcgctcgtcgaggaggctcgggccgcacaggagcccacggagggggtgggaggctcaggcatggcgg

SEQ ID NO: 6185 - DNA, 122 bp, Homo sapiens
ccgccgcttggtcccgcgctcctctgtccttatatacttgccgagctctcctggtgggcgcgggactttgaccttcccggcagcacaaggagcagctccccgggccaggggaaggggggccg

SEQ ID NO: 6186 - DNA, 122 bp, Homo sapiens
acccatgcttccctcagagtaaggtgataaactgagcatggcaacattccaagacaagctcggtacaatttgcctttgcagtgtgtcttggctttgctcctcttcgtggttaattttcaata

SEQ ID NO: 6187 - DNA, 122 bp, Homo sapiens
actaaaatgaacatttccatcaaattgagatttgtgagatggagatgaggaggaaccctccgattttttggcaggccctgttgtaggtttacagagtgtacccacaaacaatttgaggacca

SEQ ID NO: 6188 - DNA, 122 bp, Homo sapiens
caagggtctcccttccacctggccggaggtgggtgaaaatcccagcagatttcaacaacccgcctcccaccctacaccgcaagtaggtgcgcggagggactcaactgctggggcaggggctg

SEQ ID NO: 6189 - DNA, 122 bp, Homo sapiens
aaactcttgaaccccagtcacagttttccagaagtccatcaggatagaattttcactaatcgccaaatgcccaaagcttagttctttcttagaaggaaaagaagaggtcaaatggacaggag

SEQ ID NO: 6190 - DNA, 122 bp, Homo sapiens
acagaccgcttcttcactccagtgttcacttcctccagtcttcagccgagaggacatctgcggtcataaggccactcggatgcagtggtgcttgagtttgcaaggcaggactcctttgttca

SEQ ID NO: 6191 - DNA, 122 bp, Homo sapiens
aagcaacagcctgccaaaaactaagagggacggggaggggggacctttgcagactttcttcgttttcttagatttcaaacttgcaaggatcgcaaggatccagggccccaggaaaggagggg

SEQ ID NO: 6192 - DNA, 122 bp, Homo sapiens
aaccacgctgactgttcagagctatcagtgaagtctgatgactcatctcatgcagaggcacgatgtgaatgtcgacagaagatcagtatcctccctcttctattcaccattctccctgaaac

SEQ ID NO: 6193 - DNA, 122 bp, Homo sapiens
atgtctgaggctgaaggggagtgagttctcagttatttctgccttggagtggaaaacaggcggtcaccatgtaaagtgtcatgatttttatttagagtagttagtattaaatattgattcta

SEQ ID NO: 6194 - DNA, 122 bp, Homo sapiens
tgattttttcagggggccattcatcatctttccaatcacttatggctatgcttcgtttttcgcgggaagcatagactgggaagcccagacgttcacctgtttttatgggcagtaagaagaaa

SEQ ID NO: 6195 - DNA, 122 bp, Homo sapiens
atatttggttagatgaaatcaggagaccaaagtttattttaaagaagaataaaagagttccgttatactcggctcctttggctgttgaatatcacttttgttgtgaacaactgtgcctcttt

SEQ ID NO: 6196 - DNA, 122 bp, Homo sapiens
gctgccattagctgtgatgagatgtgagcagtgccaggcccacacaccatagcaggaaaacgccccaccgtacagctctggctggcatcttgcctttttcctacttggaaaagacatcttca

SEQ ID NO: 6197 - DNA, 122 bp, Homo sapiens
gaaaaacaacaggaagcagcttacaaactcggtgaacaactgagggaaccaaaccagagacgcgctgaacagagagaatcaggctcaaagcaagtggaagtgggcagagattccaccaggac

SEQ ID NO: 6198 - DNA, 122 bp, Homo sapiens
gggcggcggcggctcccggaggtggtggcttcactttccaggactcaggggcagccacagcgacagccgcgggcagcagcctcaggagccggagctggaacggccgggggcggcggcagcgg

SEQ ID NO: 6199 - DNA, 122 bp, Homo sapiens
cctgagacacgagtcttttttcctggctccaagggctagtgccaaagttcctccctccaccggggagggaggtgagacttgagtccctgagtgggtgtctgggtgttcacgtgtcctgctga

SEQ ID NO: 6200 - DNA, 122 bp, Homo sapiens
ctccttctcctcggcggccaagaatatcttcaggatgtttttcacggtgctcttcccggccgggtggccccagcggggcttctcgctgaggcagggctttggggccggctccttggtcttct

SEQ ID NO: 6201 - DNA, 122 bp, Homo sapiens
tcgtgcctggatccccatcagagcttcctgactgctctccctgctgctgctgctacaacacggatgcttgagtgatggctctaccccataaagctattcacagtcctctcttctaccaccac

SEQ ID NO: 6202 - DNA, 122 bp, Homo sapiens
gtggaggaacgatgtgtttactgtgtgaactctgacaacagtggccggaccgaaatccgccgggaagcctgggtctcctctagcttatttggtgtctccagagctgtccaggaatttggtct

SEQ ID NO: 6203 - DNA, 122 bp, Homo sapiens
caacttccctcaagcagaaaacagtggctttaagtactttatgcccaaatcctaaacatgcgagattaagcacgagtaattaaacgttacctgcaaatctacacatgtgcacagtaactact

SEQ ID NO: 6204 - DNA, 122 bp, Homo sapiens
aacggcgcctcccggcccgttcttaaattcttaggttgttagactcgtcgccttcactcccggaggttcagcggaaagcccagtgccccaggaacagacattgtctgctccttttatttcat

SEQ ID NO: 6205 - DNA, 122 bp, Homo sapiens
acactctactaatgtattcaaaaatctgaagctcttttttccctatggcacaggtgagggcgctgcataaaatcatggcccttttttctgctaacagcataggtgctatgaacaactctgac

SEQ ID NO: 6206 - DNA, 122 bp, Homo sapiens
ctccaggatcttctccttgacctgtgtcagcgtgtcggtgtccatggcccgcacgctcagcgagtccatgccacagccctggaaggacacgttcaggttctgcagggggagagtgggagaga

SEQ ID NO: 6207 - DNA, 122 bp, Homo sapiens
ccagtctggaaagtgaggagcgtctctgcccggccaccatcccatctaggaagtgaggagcgcctcttcccggccgccatcccatgtacgaagtgaggagcgtctctgcctggccgcccatc

SEQ ID NO: 6208 - DNA, 122 bp, Homo sapiens
attaaatccagaacccgtcacatgataattaagaaaaaacttcagttccgcctcctcaaacgactgcggtagaggatctctcagttctacctcagtgccgcgcccacatccggggctggttc

SEQ ID NO: 6209 - DNA, 122 bp, Homo sapiens
gctgctggcccaggtgctaagcccctcactgcctggggccggcggcgctggccggccgctcggagtgcggggcctgccaagcctgtgcccacctggaactcgccctggcccgtgagtgccac

SEQ ID NO: 6210 - DNA, 122 bp, Homo sapiens
cccgtccagatggtgcccccaaccagctgtggcgccatgatctgggcggctggtccagggcgtgggttgcggatcgtggagggaagaggggaacggcagtcgagaccctactccaagtaccc

SEQ ID NO: 6211 - DNA, 122 bp, Homo sapiens
aagcactgggaaaggcactgaagataacattttttaaaacatcaaaaagatgacctcttccgataatctagttaggaataaagagtatatgcaaaaataaaagatgaatagttcttcatcta

SEQ ID NO: 6212 - DNA, 122 bp, Homo sapiens
actcctgtggcgtgggtctgaggcgcggtggtccggtgcggtccctgggctggtggagagcgggagggcccgggcgtccacaatcccgagctgacctcgcccttggtcgtccagggttggag

SEQ ID NO: 6213 - DNA, 122 bp, Homo sapiens
atcttagcctcattggtggtgtgaggcaggcagggcacaggtcacactgatgaggacacccgggcccagagacatttagcaacctgcccaagggcatctgtagttcagtgagaggtggagct

SEQ ID NO: 6214 - DNA, 122 bp, Homo sapiens
gactcttgcctttggagtcactcatctgactgactgagtaaagccctacaacactgccaacgtttttatggaacccctgaatgtgttgatcattacaaactgtagaaatttaaatctaatca

SEQ ID NO: 6215 - DNA, 122 bp, Homo sapiens
gtctgcccgcctcggcctcccaaagtgctgggattacaggcctcagccaccatgcctggtcgattcacatcaaaatttaagaggtattcaattgcatatgaaacttgtaggcaaagtttatt

SEQ ID NO: 6216 - DNA, 122 bp, Homo sapiens
gccaggcgtgttggcgggcgcctgtaatcccaactacttgggaggctgaggcaggagaatcgctggaacccaggggtggaggttgcaataagctgagatcacaccagtgcactccagcctgg

SEQ ID NO: 6217 - DNA, 122 bp, Homo sapiens
gcagcccaataaccagtcagtcccaagtcctatcagcggtccctaaagatgctactcacacgttctcatacctggcaccaggccacaccccctaagaagcattgcctcccataagctcactg

SEQ ID NO: 6218 - DNA, 122 bp, Homo sapiens
attatttattctggagtaaggagggatggctgagggaatctgtctgtgggtccaacatggcgccgtcctgctccttgtatgagcctcaaagatggggacaaccatttgggggcagacatgtt

SEQ ID NO: 6219 - DNA, 122 bp, Homo sapiens
ccccagagctgcttgttggctttctggactcatcactgacagcgcctcgccgccaaaacacgggttgttaaaaatcccctggttcctcgtgataacccattcacagacaagtccctcctaaa

SEQ ID NO: 6220 - DNA, 122 bp, Homo sapiens
cttcttaacagccttagagattcttgagcctggagctgtgtgcccaacaggtagacggctcggtctgtgtacattgtataagtgtctggaatgcacacctctccactggtatccactgttta

SEQ ID NO: 6221 - DNA, 122 bp, Homo sapiens
cccgcttccttgcacctcttctcagtcgtctttagctaaagcagagaggctccttcactccggacttagctgggctggtttccccgagtttcataggtggtgagagcagttttccaagtctt

SEQ ID NO: 6222 - DNA, 122 bp, Homo sapiens
tatctatttgcctaaggatcaatgtccctaagggcagcccaagcacagttcagtgacatacgagaaacatactcagagcaataaccccaaacacagagtgtgcttgggaaaccctctgaggg

SEQ ID NO: 6223 - DNA, 122 bp, Homo sapiens
tggtaggaccctgagctgagtgtatccctgagaagcatggggaggcccaaatgcaggggccgagtgagcgtggcggggaggagagccccaggggctgcagagggcccgtgagatgggaagcc

SEQ ID NO: 6224 - DNA, 122 bp, Homo sapiens
cttacccagcccctagcccctattgggtgagctctgctgccaatcactttccccaccccccgcctcattgtttgcaatctgttgcattttgttccaggccatgtggcctgtgagtgaactag

SEQ ID NO: 6225 - DNA, 122 bp, Homo sapiens
ctttctttgcctgctggggtgattttggatgcaaaccttccgtgttaacgctctttcagacgtgctgttgaaagagtccaagtggacgaagatgttctttggagaaggccaggcctccctgt

SEQ ID NO: 6226 - DNA, 122 bp, Homo sapiens
agccagggatggcggctgaagcgggaggaacacgcgctcggacttgctgatgggctcttacgtgggcttttccccagctgaagaatgagttactaaatgtgttttaaaatgcaaaaatgtgt

SEQ ID NO: 6227 - DNA, 122 bp, Homo sapiens
ctgacagcccaggctgtcgcttgacttgatcttgggtttcaccaagccacgaaggactagcgtccctctctcctatcccaagggcattaagcctgtctggatgaagtaggagaggaaagatt

SEQ ID NO: 6228 - DNA, 122 bp, Homo sapiens
ccacagttgctccagagaccgctagagaccctgccacgacctttcacatttacaaggccacgtgctgggagctcagctagaaaaatagaagtctcaagaaatgagcctaaaagagctccaat

SEQ ID NO: 6229 - DNA, 122 bp, Homo sapiens
gagagcttcggcctgacctagcgcaggtctggtgcgcgcagagaacaactccaagcgcaccgacgcccgcgagctccttccaaacaccgaacgggatccagagcccgagcccacaggcggcg

SEQ ID NO: 6230 - DNA, 122 bp, Homo sapiens
cccagaggtcactacaatcttaggtgctgcaaacccacagggagaatctggcctgggacccgcagccattctctgcaaggggtgcagctgtgcaaatgctcagaggtgacagaaacagagta

SEQ ID NO: 6231 - DNA, 122 bp, Homo sapiens
tgagtaggcggggcatgcgggtggggcggggctccagccagggtgggtggggcctctgcacgaacacctgcctgtacttgggcccggagcttggatctctgcccagagagctccggcagccc

SEQ ID NO: 6232 - DNA, 122 bp, Homo sapiens
tctggggggtttgtgtgtataagtgcgtgggcagggaggccgcggaggcggcgccgcgggcgctctcacttgtaagctccttgaagaccaggacaccgtttaattcagcatcttactgttca

SEQ ID NO: 6233 - DNA, 122 bp, Homo sapiens
gctgcacaccatgggggcagagtgcccttcctcctttctcacaggcaatgaccccaaaaacggaagcaagtaagaaatgcagcatccaggttaaaaatgaattcacttatggtcagctgtgt

SEQ ID NO: 6234 - DNA, 122 bp, Homo sapiens
ggtagctgcccgcagggaggcccaacctgccgcggctggagcacggtttctgctagccgccgccgtcaacttgaacttcagtgagcctaggccggcttccttcgcgctcacctccatccacc

SEQ ID NO: 6235 - DNA, 122 bp, Homo sapiens
agaccgccgcccggaaggcgaggggcgcactacaactcccagcaggcaccgcgccaatcccgagatgggatttccacggtgtcccgtagttggcaaactgtaagcagacgcgttttcttcct

SEQ ID NO: 6236 - DNA, 122 bp, Homo sapiens
acagtagccgtgataacaggaagctctgaaagaaatggggtctcttaccctacgggaatgcggatggggtagggattgctgaggtttaagaaagttttcctgaaatcaatgcagtctaatct

SEQ ID NO: 6237 - DNA, 122 bp, Homo sapiens
cgaggtgcagagaggtttcagacctattgcggtggagctggagttcgagaaccaaccactcggtgctgagacgcgcttgcggaacgggcggcgggcgggggtgaagcggagtgaggggagag

SEQ ID NO: 6238 - DNA, 122 bp, Homo sapiens
tccgatttggcaccgaggtagcgacaagaacaaaagcagggacacaggcagggcagacaccgggcagcgccggagcagcggcccgcctccactccctcaccaccctctcccaagcgcggagc

SEQ ID NO: 6239 - DNA, 122 bp, Homo sapiens
tctctggtccagatggataaaggcacccaggagaaaaagcaccgcgggaagccgaggcagcgggtgtccaggtcctttcagcagaggccacgtggaagggactgttaaggggctggtggggg

SEQ ID NO: 6240 - DNA, 122 bp, Homo sapiens
agacctgcccctccttcagaggcagcttagccagaaacgccagcggcagagacaactgtgcgggtggggatgctgagcgcagagccggcagagcccgcgggcaggcagagaagcaccacaca

SEQ ID NO: 6241 - DNA, 122 bp, Homo sapiens
tgggtgcaagaagttgctaagtctgcagatgtcttagccatacgccagcatcaagtagcccggagaagtgaagcagaagattttcagcccaatttaaatttccacctgcccactacctgagt

SEQ ID NO: 6242 - DNA, 122 bp, Homo sapiens
gctccgcgactacagcgaggggactgagagccagccgccaggtggaaccccgcccggccccgccctccgcgcctgattggccagctccccacccctgcacgttccgattggtgtaaggaacc

SEQ ID NO: 6243 - DNA, 122 bp, Homo sapiens
ggccggccccgggagcgtgtcctctccttgcgccccacacagtgcagttcattcatgagccgcccgggcctgcgttggagggtgcggtggggaaaagattcagacgcgaaaccgagagtggg

SEQ ID NO: 6244 - DNA, 122 bp, Homo sapiens
catcttagcagccccgggcaccggcgatcggctgctggcccccgccacccttgtctgaaacgccctgtcctgcacccaaaggaaagggctcccctggcactctcagaaaatggttttaaaaa

SEQ ID NO: 6245 - DNA, 122 bp, Homo sapiens
catttaagataaagaaaactcagcaacattatgtctagttaccaagaaagatatgtgcaacgcgaaacctttccccaataccatatttactctgagaaacacagcaaaataaaattcacgat

SEQ ID NO: 6246 - DNA, 122 bp, Homo sapiens
cctccttctcctcctaaaaggccaaactgaagcagacggaggagactcggctgaggccagcgctgggggttggggctgtggttggccagggggctcaggagctgggtggctgtgaggatgtg

SEQ ID NO: 6247 - DNA, 122 bp, Homo sapiens
aacaggacctagccccgggctgcctgtcagacctcggcgagcacgccaggctctgcacaccgtctctcggagcagtcccgaagaggccgttcccaccagactccgggacctcctcagggcag

SEQ ID NO: 6248 - DNA, 122 bp, Homo sapiens
gcggcaggcgagtgtgcagtgcgcgcagccgccgatgggcggggagtgagggactcgcggcgcgccgccggcggggctagagggcgtcctgcgggctcagccgcgcgccgctcgccgcgctc

SEQ ID NO: 6249 - DNA, 122 bp, Homo sapiens
aaagcgggcgatttaaacatgccttcgaaacccgttaggaatgcgtcgtcatccggagaccgtttaaaaggagctttagcttgccttctagtaacgagagggctggcgccctgccttacttc

SEQ ID NO: 6250 - DNA, 122 bp, Homo sapiens
ctcgatggcacttccagcctccggaactgtgagcaggaaccatctggggtgggagccccccggtctgtggccctttgtcccagcctctgaaggctgaggccccccctttctgtgcctacaat

SEQ ID NO: 6251 - DNA, 122 bp, Homo sapiens
cggggcgtgcagaagccacctgcccgagtgccacggcgccgcgaacgcttctgcccattgcgttcaccccaggctgttttccgttcatccactttagggaccaggaggccactaaaccatga

SEQ ID NO: 6252 - DNA, 122 bp, Homo sapiens
tactcgctgggctgcgggctgacctgtggcctgagcttcctgcaggagggcgcccctcaccgcacgctgaacctgctgctgagcctcgggctggccacgctgctgggcctgggtgcccggcg

SEQ ID NO: 6253 - DNA, 122 bp, Homo sapiens
tgtttactgactcctcctggacactaggggtggcgggtggctttaggcgtctctagtcttcgagcgtttgaatacgttttagcccacaataatggggtaaaccttgaaggccaacaattctg

SEQ ID NO: 6254 - DNA, 122 bp, Homo sapiens
gatgcacaaagaagaaatcattcagttcttctcagtgttggaaatcccaagagttggcctcgcaggagttagctgagaggctctcggaaagcccaaggagaggacagggcacagagacatgg

SEQ ID NO: 6255 - DNA, 122 bp, Homo sapiens
atctctcatcctttctgggaatcaagtttttaaaagattccatggagattttatgttagacgaattccacagggggtgtgtcccatagtcctgtgacagagatactaagaacatgactcatt

SEQ ID NO: 6256 - DNA, 122 bp, Homo sapiens
gttgctgggcacacagggcagcacactttagtccagagttcccggtcttaaggaatgggccgcagaggtcatttggtttgttgtgcggctggtgcccacccctgctggcaacccctcagtca

SEQ ID NO: 6257 - DNA, 122 bp, Homo sapiens
tgatggtgggatcagatggtggagatgaactagacaactctcaaagtttcttcaaattggcgatgatatgattctgggcagtctgtcacagagtaggggggctgagctgagtcttgaaggat

SEQ ID NO: 6258 - DNA, 122 bp, Homo sapiens
aaggtaggcatcgtttaggcaagtgggaaaatgttcatgaatgcatggtggggggtggtgcgaagattcttgaaggagagatctacaaaatcagaagcatggagagtgagggaggaaagatt

SEQ ID NO: 6259 - DNA, 122 bp, Homo sapiens
cctgcgggttctaattgcaccgtctccgctgctgcatttggctgcacggccgtggtaaggcgggcagatcagctgcgcctcccgtgatgagagactgaggccaggacaggcaaggggttgct

SEQ ID NO: 6260 - DNA, 122 bp, Homo sapiens
gggtgggttttgttgtggttctggctcctccccttctagctccctcaagttggaagattccgaaaaatgctgtaaacctcatttttcttatgtgagtaatggaactaatgtcatatttgctg

SEQ ID NO: 6261 - DNA, 122 bp, Homo sapiens
tgtccttctgtcctgctgcagactaaaggtctggccaatgtcttgccccaccccgccagccgcgatacggcgcagttcctatattcatgttatttattgtgtactgactccatctgccccgt

SEQ ID NO: 6262 - DNA, 122 bp, Homo sapiens
gtcattgccaggccctcattttccatcagagcagtcctaattgatttaaatggtctgtttcgccttggtgcacgcatgatcacatcgtaagtggtctttaggactattttaattgccaagga

SEQ ID NO: 6263 - DNA, 122 bp, Homo sapiens
ggctctgcacctgtaggatattggaatgcacagggcaattgagggactgagccagaccttcggagagtaatgccaccagatcccctaggaaagaggaggcaaatggcactgcaggtgagaac

SEQ ID NO: 6264 - DNA, 122 bp, Homo sapiens
attttctattctttgtcttggccacagacattcctttccacatgtgctgaccttctgcttcgaggtctccttgaggacattgtctcagaaatctctgttgcaatatttgagcggatcactca

SEQ ID NO: 6265 - DNA, 122 bp, Homo sapiens
agtacccaaccttggggagacacagaaagggcccatgccaggcacttagctagaggcaagcgtagcttttgggccacaagacctgatggccactggggtactggcctggaaacaagtcctca

SEQ ID NO: 6266 - DNA, 122 bp, Homo sapiens
ccccgcgtcgcggcgggggcgggcggggaactcgggcggaggctgcggggcggggcggggcggggtgggggcgggcccgagtcttaagccggcgtccgcgggctccggccccagagcgcggc

SEQ ID NO: 6267 - DNA, 122 bp, Homo sapiens
aaattggaagacttggtggcgaacgagggtcaggacctgcatcctgcctcagagagttatcgacgtatccggaatgtgggatcagaggctggtgaggttggccctgttgcagcatctgcggg

SEQ ID NO: 6268 - DNA, 122 bp, Homo sapiens
ggaaagcaggtcccttgaacagattctcccaaagcagtgactttaggaacatctcgaaggcgacagattccagttgttaaggctacgatgaaatagcagaagactctgggaagcagcgtgca

SEQ ID NO: 6269 - DNA, 122 bp, Homo sapiens
cctcagatgcacagtgacacccaccttggagagtttctgtgtctcttaaatgaccgaatccgtgtagaaggcttattaccacaatctgtagctacttggtaaacggcagctcttattttgac

SEQ ID NO: 6270 - DNA, 122 bp, Homo sapiens
agctgtgcaatctgcagttcttcagactgcgtctttttgtttgggggccttcattcactccggggttcctgtatctaactcggagccattccgggccgctggacctgggcggctctgaagcg

SEQ ID NO: 6271 - DNA, 122 bp, Homo sapiens
tgctgtgtgcatcaagatcatctattacacgaaaaatgattccaccccctctactggcaacgccccagcatcgcgggtgagctgccaggatggactccccgctttcccctctccgtcttcct

SEQ ID NO: 6272 - DNA, 122 bp, Homo sapiens
ccccccggggcagggcagggggagagtcaggcatgtctctaacgggctccctagtagaaccgctaggaaagtggccttcaaccctaggcacctttgtggctttcaggtagttgggcgactaa

SEQ ID NO: 6273 - DNA, 122 bp, Homo sapiens
caggagcgcgatcctcgtgctggggcagctcctgctttacctgtggcgaggcctgcttcccgtagcgggtgaccccgggaccgaccaactcgctgggccgcacgtcccgtcccgccgcgccg

SEQ ID NO: 6274 - DNA, 122 bp, Homo sapiens
aggatgtgtgccccacggcacacaggaggcagggggttccccagatccgaggggttcagacgctggacggcccagcagagccagacaacatgtgccccacggcacaccgaagtgaaccacag

SEQ ID NO: 6275 - DNA, 122 bp, Homo sapiens
cccacaattcttctggatacctgggcgccttcaggccactggtatctggcccctcccctccggggtgaattgggttcgaacatttatagttcgtatcttagactgggaagggagaaggataa

SEQ ID NO: 6276 - DNA, 122 bp, Homo sapiens
ttccacggctcacctcctgcccgcacccgggccccacctctgcctccaaatcacccaccccgccagccccccttgcaggtcacaacccgtcccaggtgacaccccgcccccagcctcgcccc

SEQ ID NO: 6277 - DNA, 122 bp, Homo sapiens
gcaagccctgcaccacctcagccctgggctccacctcagccctgttgtgtcacgtgactgcgccctggagggatactcagaggggtgaagatgagcaaggcacctgcattccagcaacggag

SEQ ID NO: 6278 - DNA, 122 bp, Homo sapiens
agcaacccaggcaggttcgctcaatggaaatagtggatttttactgggtagcaggacctccgcgaccacccgctgcgcatgcgcttcacttgggcgtcacccggggaactgcgcctgcgcag

SEQ ID NO: 6279 - DNA, 122 bp, Homo sapiens
atcgtccaaaacacagtatacctgacaaagcattatttcacagttatattcattatttcccgtactcctcacaatggtcccatgtgaatgagattattattcttagtttgctgtgaagaaat

SEQ ID NO: 6280 - DNA, 122 bp, Homo sapiens
cgtgtaccgtttctcctcataagaggtatccgtgaactccaggagcaggcggatggcgtgcgccagctggggaagacagcggttcagcgactgcgcagctcccacccattcccaacccccgc

SEQ ID NO: 6281 - DNA, 122 bp, Homo sapiens
tcgtttcttttccaccagtacgggaattctaatgctgtattctgtgtaaataaatcattccggttggtcatcgtattatagtgggcatggtgccatgggaaatttattggagtaatttttaa

SEQ ID NO: 6282 - DNA, 122 bp, Homo sapiens
agtcagatagcatttagtaggaaaatagaaataattgttttcaagatacgataagttagacgtgtctgtaaaggacagtcgaaaagagtagcagtggggtattgattgctttttagagaaag

SEQ ID NO: 6283 - DNA, 122 bp, Homo sapiens
ggagaaaagaaaacttcgcgccaatcggcgtggccccgcccccagaccgtcccttcgttgcgacaccaactagctcgccccgcccactccgtacacctaagaggggcgcatgacgtacatcc

SEQ ID NO: 6284 - DNA, 122 bp, Homo sapiens
gcgaggtccggagaaataccttcaggtggggcaggcgtggaaactcctgccgcactgccccgttgccccatgtaggcccaggacgtgtccctgtcagcggggactagggagaacggtaccgg

SEQ ID NO: 6285 - DNA, 122 bp, Homo sapiens
gcgtgggtcctgacgccgagattaagacgagtggccatttaggaggatgtggaccctggacgctcgtggtgagttaaggatgagacggaggtaaggtaagaagcgccggactgagccgcccc

SEQ ID NO: 6286 - DNA, 122 bp, Homo sapiens
tctcatgagtgctttggaccctaaaacacctttcaggaatgtggccacagaacgtcagcacggggggcttgtatattacgttgagctcagggcgaggaggctccttctgcattttacctgga

SEQ ID NO: 6287 - DNA, 122 bp, Homo sapiens
tatcgtgacctggaggctcaggaaggtctatttttaacctcgtttcacggataaggtaaccgagtctgtaaagaggcgaagctgcttgcgcaaggcgcacagcgggcgggtgggcgagccga

SEQ ID NO: 6288 - DNA, 122 bp, Homo sapiens
aaaaggggtgggggtgcggcagggaagcgccacgtaccaggttgtgaggccagtccattccgccaagctgcaaggtcagcctgcagctgctgcccgcctggaaccccagatgccgccgagag

SEQ ID NO: 6289 - DNA, 122 bp, Homo sapiens
taatttttgaaaccaccagagggttaataaccacctagtctaggcaggcgctgtggctcacgcctgtaatcccagcactttggcaggtcgagataggaggatttctgggatcaagaagttcg

SEQ ID NO: 6290 - DNA, 122 bp, Homo sapiens
tgacgaaggactggggcgggaagctcctggtggtcacctcacagtagggcctctcatactcgccaggaggacacacgcagtggaagccgccgatgagcaggttcacgcaggtgcccccgttc

SEQ ID NO: 6291 - DNA, 122 bp, Homo sapiens
gacacaagtcatcgtttgtgatctgagacccgcggtgtggctgagagcgcacagagcgcacgtgcacatacctctgctagaaactcctgtcaaggcagcgagagctgatgcactcggacaga

SEQ ID NO: 6292 - DNA, 122 bp, Homo sapiens
gccttgcgcccgggtcagacattatttagctcttcggttgagcttcgattggtcaaacggcgccgcccccccccccccgccccccgccccccgctccccgctcgcccgcgctaccgataccc

SEQ ID NO: 6293 - DNA, 122 bp, Homo sapiens
ctccccggggggagactccagacacaaacgcggggcctgaggcgctgggaggcccctgtgcgagccggatggcggccagagaggacgtgtcagctcctcgtgggactgaagagcgcgaccag

SEQ ID NO: 6294 - DNA, 122 bp, Homo sapiens
ccccaacacttctgcagttgatgagcaggaaggttgtatgcacccagttttccccagtagcgacgttttgcataactataatacaataatatcacagccagaaaattgacactggtgcaatc

SEQ ID NO: 6295 - DNA, 122 bp, Homo sapiens
cgtgaagatccaagtcctcctccatctccagatcttgctcatggtccaggtctagatctacgtccgggagtcctcccccgacatccaagagggaatccaagtccaggtcgcgatccaagagt

SEQ ID NO: 6296 - DNA, 122 bp, Homo sapiens
ccggtttattgtgagcttacagtacagttcgcaaggtcccggccggtgacggcggcgaggcggcaacgtcgcctgtagcaaacctccgccctaaggcgttcccgccgggcctcgcgcggcgt

SEQ ID NO: 6297 - DNA, 122 bp, Homo sapiens
cggcgaagcccggcaggtgcgcttcgaagattacctgagggagccagcccagggggacctcgggtgcgggtccccgccccaccggcccccggcgccgtccagcccggagggacctggtgagc

SEQ ID NO: 6298 - DNA, 122 bp, Homo sapiens
ccgttgtgtcttacgctccaggtgctggtctacgcgggcctggacagtcaggggtaggagcgggagccgagaggaggcggaggagatggcgtcccagccgccacctccccccaaaccctggg

SEQ ID NO: 6299 - DNA, 122 bp, Homo sapiens
attagaatgtggacacatctttttcagggacacaattcaccccactgcagtgaccacagccggatcagactcgttcacccacttcagtgaccacagatggatcagactcgttcgctccctgc

SEQ ID NO: 6300 - DNA, 122 bp, Homo sapiens
gcccccctgggtctgactattagctttctccatttactaaattgatgtcaagcaccttcgcgcaaggccctacacggtaactgagctatgaggaagctgcgagtgagtcggaaatttgtaca

SEQ ID NO: 6301 - DNA, 122 bp, Homo sapiens
tcatcggctgtgtggtcaccatcattagtggaataatcaaaacaaccgacagccaggcagcgtgctaggcgatgcgtacttactcttcacggcaaccctagataacaggaattattactact

SEQ ID NO: 6302 - DNA, 122 bp, Homo sapiens
tattctggtgttcagggcttgttgtgctgggagctatggagtcacacaacaattgcccctcgatgatgctgcaatgacctcataagtggaggtcatttcccctgcccccacccccagcttcc

SEQ ID NO: 6303 - DNA, 122 bp, Homo sapiens
cgccccttcccatatttattcggaccccaagcatcgccccaataaagaccagcaagcaaccggctggggtgtccgtgcgtgttagggggcccgtgggacctcccttgccgtctctcctcgcg

SEQ ID NO: 6304 - DNA, 122 bp, Homo sapiens
tgaccaattaaaaacttgaatcgcggcccggtttacgcctccggatttgacagacagttccgagaccctatcgctctccagaagcgtcctattggcctggagccagccaacgggggagcggt

SEQ ID NO: 6305 - DNA, 122 bp, Homo sapiens
ttaataattaagtcacaatgggcccattaatttagtcttgttgaacttcaatttcctcatcggtaaaattagggttaacaaaaagtacctgccttacatatgaacattaaatcagatattgt

SEQ ID NO: 6306 - DNA, 122 bp, Homo sapiens
ataaaaatgataggtatctcctgttaaatacttgactggtttcagatctgtctaatgaaacgggttctatcattattctccctttacagatgaggaaactgaggtgcaaagcagttaagcaa

SEQ ID NO: 6307 - DNA, 122 bp, Homo sapiens
gcacgtgccagagagatcactgagacacacaccaagtactggggagacagccaagtgccgcgctcttcaagagcactaggcccttctgaggagaggcgagcgctcccgggaaatgcctcgtc

SEQ ID NO: 6308 - DNA, 122 bp, Homo sapiens
aggagagaaaaaggggcgcacagcctgagctcccaaccccgggagccaggtggggggtgccgcagtggtgcggggggggggcgtgcaggagcagagaggtgggcggggccgtcaccgggcct

SEQ ID NO: 6309 - DNA, 122 bp, Homo sapiens
cgtagagaaaaatgaagcaggctgaaagcagtgaggcatgtccacagattacaaaaggcacgtccaggaagtgggcgtgtaggcagtgagctgaaggcaaggtcattattaaagtcttatta

SEQ ID NO: 6310 - DNA, 122 bp, Homo sapiens
acagccaccttttcctaggcccctatcactgctactaattgccttcacctttgccctgatcgagcagcagagtagggtgggaaaagcacagaatctggagctaaactgcctccattgaaaac

SEQ ID NO: 6311 - DNA, 122 bp, Homo sapiens
ttgtagtctccgtgggcatatacccaccgcgcttgcgcaccggtgaggcgcgcaccgccccgctccacgcccctatcaggattcgggtcctcgtgaggagcagtccaggcgacagcgttcca

SEQ ID NO: 6312 - DNA, 122 bp, Homo sapiens
gccaaaatccctgccctgcccacctcttaggtctgcgggaaaatcccctaagagaaggagcggtccttgaggggtagaggtggctggtaccatcctgactgaaccctgttagaactgacagt

SEQ ID NO: 6313 - DNA, 122 bp, Homo sapiens
tcaaagttggggagtctgagctggttctgggcctagcaaggcaatctactctgttaaagtcgatagagggagaagctggggagaacactgcaattttttctatgagccctctgtagagggtg

SEQ ID NO: 6314 - DNA, 122 bp, Homo sapiens
caccaaatgcttcccccaagttcccctaaatcatagaaattctgcaggtgggagtgcctccgttatcatgttatgcacacctacctttaactaagccctttaaatttaaagactgacagggc

SEQ ID NO: 6315 - DNA, 122 bp, Homo sapiens
gatgccttgaccctaccaaatcacaggtaccctgccttgctgcctgtggactctagtatgcgggtccctagaagagaggggccctggctgtcctccaggtcctggttccaagtgtagaaggg

SEQ ID NO: 6316 - DNA, 122 bp, Homo sapiens
ccgtcccacccctccctgagcacgccaccccgccctctccctctctgagagcgagatacccggccagacaccctcacctgcggtgcccagctgcccaggctgaggcaagagaaggccagaaa

SEQ ID NO: 6317 - DNA, 122 bp, Homo sapiens
cagaggcgctggagtcgggtgtggcgctgctcatggaggccacgctgcccagtacagggtcgggactgacactgtggttgctggagtcgggctgccggtggctgtccaggtggcagtagaca

SEQ ID NO: 6318 - DNA, 122 bp, Homo sapiens
tggctggagccgaaactgcacaggccgcacttccagggcctatgcaggatgtgcaggtggcgttcgcgctccgccgaggtgcgaaacttgcctttgcagtaggggcaacggaaggcggacga

SEQ ID NO: 6319 - DNA, 122 bp, Homo sapiens
cctgataagctggacctgtcagcaccatggccacacctgctgtaggcagtgagcgccacccgcctcccctggccactcccactcacggcttcctgttccctgtgcacagccaagccctggcc

SEQ ID NO: 6320 - DNA, 122 bp, Homo sapiens
tccagagaatgaatgagttcctttaagtgccaccgccagcaagcccagaggcacacagtccgagtgcacccgcttagcctttacattcctctccaccgacaaaaggaaggggaaactcaatc

SEQ ID NO: 6321 - DNA, 122 bp, Homo sapiens
gatgatcttgaggtgcaacagtttcattccgaaaccatcctctgcctcatgcccaccccccgagccctgtggaaaattgtctttcacagaacagctccctggtgccaaaaaggtagaactgg

SEQ ID NO: 6322 - DNA, 122 bp, Homo sapiens
atcatgtaaaagccagaacgaagggcaaggcccttaggggcggggcttgagcgcaagaaccgaatatccagcagctgtgacgtgtggagcctgcaggccgggagagcagagcccacaacagc

SEQ ID NO: 6323 - DNA, 122 bp, Homo sapiens
ttagccgcccaggacagctagcttttcattttcgttctctcccggctgggtgtcctaccccgggcccagccctgttatcttgggcacgaacaatgcaccggtaggctggtgatcggtggcgg

SEQ ID NO: 6324 - DNA, 122 bp, Homo sapiens
cggcggcagacatttccctgcctgcttcctcaagctcctcatcccgccgcccgtcccgcgcgctccgcccccagacgaacccgcccccgtgtgcccgctccatcaatcgaaagcctgtcttc

SEQ ID NO: 6325 - DNA, 122 bp, Homo sapiens
cgccaacaccacacgggcctgtttctgcaggtcctcagtgacgcgtgtgattgtgatgatcgctatcctggcaggtgtgcagtggtggctttgactcccatgtctctgatgactgacagtgt

SEQ ID NO: 6326 - DNA, 122 bp, Homo sapiens
aggagaagcctgaggccccgactgagcagctggatgtcgcgtgcggccaggaaaacttgccggtgggcgcgtggcccccgggggccgcgccggcgcccttccaggtaggggcggggccaggc

SEQ ID NO: 6327 - DNA, 122 bp, Homo sapiens
ctaggaagcccccaaacagaattgactgttttctcctctgtgctctcaaaaccctttctacgtgactctactgaaaaactcctcattgcaaatcagaactacttgttataagtgtaatatct

SEQ ID NO: 6328 - DNA, 122 bp, Homo sapiens
gcctacgtagagccaaaggaagattattcccatgaccacgtggaccactatgcctcacaccgtgaccacaaccacagagacgagacccacgggagcagtgaccacagacacagggagtcccg

SEQ ID NO: 6329 - DNA, 122 bp, Homo sapiens
caacccagtgggaactcctgcctatggccatgccctagtctgagaggagagtgccatacacgcaaactttgaaataaagggaacttgatttgggggagagaagcccaggataggactgagac

SEQ ID NO: 6330 - DNA, 122 bp, Homo sapiens
cgaggacgttcctgatagtttgtgcctcttcttttcaaggcttcttctccttgcacaagacggtctggagaaaaacccgcatttccttccgtcacactgaccacatttaacttaaaatggga

SEQ ID NO: 6331 - DNA, 122 bp, Homo sapiens
agcccaggcccatgccatgtgcagactttggcagtttcccaatcttggtataaaggtaaacgattctcttcccaggggttcgggccggcctagtgctgttagaggctgtattctaggaaagc

SEQ ID NO: 6332 - DNA, 122 bp, Homo sapiens
cccagcacagaggcagaaaggagactctgtgactgggggtgtcagctgcatctggaccttcgtggtggggagggaggcacgcccaatagcccgtctgaacgggaggtggctcagggatcccc

SEQ ID NO: 6333 - DNA, 122 bp, Homo sapiens
gaaggtctcttttcttttctccctccccttcagcaaccttacaggataagttttaagtctcgagctacagcactatgaagacttttccaagaaaagagataccagggaagctggccgcctgt

SEQ ID NO: 6334 - DNA, 122 bp, Homo sapiens
ggttgggaaggtggcaaaattgcctcaagtgaaaaccactgctctaggtggccagtgcaacgtgatggctatgtttttataactccttccacagctttataactatatattaaaaggcatgc

SEQ ID NO: 6335 - DNA, 122 bp, Homo sapiens
gaagaaagggggtgggtattgtgtttgtgtgtgagttttgaactgagtcacctacggctgcgtctctataacagggaaacctcgagcaaacctgtgcctttaagactcagttgctatccaaa

SEQ ID NO: 6336 - DNA, 122 bp, Homo sapiens
taaaattgtgcgcagttagagggagctgtccgcgtgtgctccagctccgtggtggtgctgcgagccaacctctcctttcattcctggaggtgggggacccgccctcatctcaggcctgaaga

SEQ ID NO: 6337 - DNA, 122 bp, Homo sapiens
gctctgaaaatcagctatactttatcagggtttggtactgaaaacccagattctaaagtccgggtgatgaagccttttctgcatgcaggataatggtttctgaatagcaaatcgtctcatac

SEQ ID NO: 6338 - DNA, 122 bp, Homo sapiens
aggggggtggcgctgctcaccacacacaagtgttataggaggagtctggcccttgagtaccgggtacgcaggggtgcctcaaccacactccgtccacggactctccgttattttaggaggtg

SEQ ID NO: 6339 - DNA, 122 bp, Homo sapiens
cttccaattccgccccagctggaggcgtgcgggtcctcttgcaaaccagaccaaggatgtcgccccgatccccagatggtggaggctggttgagttcatgtcaccagcaaacaccgcgccag

SEQ ID NO: 6340 - DNA, 122 bp, Homo sapiens
gccagtggcactgccccctagcaggcgcgagatgccagagccctaggatgtctgaagggccgggcaggaggcggacgggcgtgggccaatggctgtcgcagtgcctcatcttgccgtctgtg

SEQ ID NO: 6341 - DNA, 122 bp, Homo sapiens
ttcctctcccgggcatccgtgagatgggggccagactgcaaggcacctgagacgcaggatcgcacaggttggaaaaggctccgcaaccgtaagaagctcttgcgaaccgcgatgctgggaga

SEQ ID NO: 6342 - DNA, 122 bp, Homo sapiens
gactgagctcacggtgccccctggtgggcgatgccagtggcgccagtgcagcttggagcccgcaatacaaggtgtggcttctagaaggtaccctggtttgagatgctgaggtgggaggatcc

SEQ ID NO: 6343 - DNA, 122 bp, Homo sapiens
ctggctgactgcacctccagagaagctctgcttgggccaaggccccattcctggatgcaccgcttcgccgcatataaaaagcaaacaaaccaaaccaaaaaacaaatcaacaaaactggaaa

SEQ ID NO: 6344 - DNA, 122 bp, Homo sapiens
ggtctgcctgccatctcaatggagtgcccggcgcacggtttcccagatgggcaccaccagcggcaccctgcgtccaccctcacggtggcatctccaggcttcagggcacagctcacccgggt

SEQ ID NO: 6345 - DNA, 122 bp, Homo sapiens
aaattgcccaggtccaaaattttggtatcttcttgactctttctcatatctcaaacccaacgtagtaataacttgtcagccctacttccagaatgtttcctgaatccagccatgtctttcca

SEQ ID NO: 6346 - DNA, 122 bp, Homo sapiens
ctggcgggctttggccttgggcgcggcccgcagatgcgtgcagcatgcggggctgtggagcgcttattggtttttctgtgtgaatctgggggttttcaaagaagggacaaggctggacagga

SEQ ID NO: 6347 - DNA, 122 bp, Homo sapiens
ggatgggcggggcaggcgtcagcttgcattcgctcaccgtccagcaccgccctctctgcgcgccacttagactggaaggcggggccacagaaggccacgcctccacatagcaacaaatagag

SEQ ID NO: 6348 - DNA, 122 bp, Homo sapiens
cagtgttaagaagagatggaagataagccaccccatcacggccccagcagagtcggccgccgaggcccgctccctaccaggttttggatcaaggcctccagctccttctgtgcctctcggac

SEQ ID NO: 6349 - DNA, 122 bp, Homo sapiens
gtgtactgtacccctgggtgtcagggtggcccccacaagcccagggaagacagccagctgcgtggtctgcaggccaggcgcacttgcggatgttgccacactgagcctgcctctcccgcact

SEQ ID NO: 6350 - DNA, 122 bp, Homo sapiens
cctttcctagtcaaagaaaggggtgatggacggcacctggaaaatcgggtcactcccacccgaatactgcacttttccgatgagcttaaaaaacggcgcagcacaagattatatcccgcacg

SEQ ID NO: 6351 - DNA, 122 bp, Homo sapiens
agaaaaacaaggaccccagaccaaaggtccaaagaatttaggtatacacatctggggaatcgacctggggcctatttgtatgaagaatatctactcatagcttgatctatttatctatctta

SEQ ID NO: 6352 - DNA, 122 bp, Homo sapiens
cgtcccttccaccttccctggttcattggcttggagccatgagcgcggccagtggctccgcggctcccggagggacgctgggggtttgccctgggagtagggtgcaggaggttccacggacg

SEQ ID NO: 6353 - DNA, 122 bp, Homo sapiens
gggccttgatggcgtacactgtgcacgtgaccatgagcaggaggctgtagcccaggcagccgatgagagacagatccgacatgtcgcacttgagcacccctctggcctgctcggggtccacc

SEQ ID NO: 6354 - DNA, 122 bp, Homo sapiens
aaaatgaccatataaaagtataatacgattcttaagaaacttggttacacttgaaactagcgtctgttttaaaaaagaaagaaagaaaaaagaaacttgggccagacaacctaggaggtcaa

SEQ ID NO: 6355 - DNA, 122 bp, Homo sapiens
tgtcgccgtgggtgagttctggtcccactgcctggcagtcgtcgctcgcctggctttctgcgctgggagagctcctgttttccgccccaacttcgttctcttcttgaaggccgctctcctta

SEQ ID NO: 6356 - DNA, 122 bp, Homo sapiens
ggagtgagcactgaacgcagagcgcttggacggtggcgcggcgttcacgacccggccccgcgcagactccagagactcctgcaggatagggagcagctcctaaaggccctttcctccttcct

SEQ ID NO: 6357 - DNA, 122 bp, Homo sapiens
gcaccatcaacatgcatggcttacttaccacgcaggccctgacatcacatagtagatcgtcggcctctggaagccattgaacgtagaggcagcagcaacagtgtaagcgcccatgttttcaa

SEQ ID NO: 6358 - DNA, 122 bp, Homo sapiens
gcccctctgctgcccatgagccccggccaggcccccattagcacagggattcccggcacccgcctggtgcccgtcccgcccctgacccggagctgccctcagcagccctctttgtccttagg

SEQ ID NO: 6359 - DNA, 122 bp, Homo sapiens
gtgccacggaggtcagagcggggccctggggtgagcctggtgggtcaaaaggtctatgagcgtgagaggcaggagcttctgccaagccttccccaggtgccactgcctgccccaggcgtggt

SEQ ID NO: 6360 - DNA, 122 bp, Homo sapiens
tctcggttactcagccccggttgcctcccttctgcccagcagttagttcctcaggactcacggcttccaggctcccctcgcctgtgagccggacccaagctcctctttggggctgaggagga

SEQ ID NO: 6361 - DNA, 122 bp, Homo sapiens
ctgcgccgccagcccaggccccgcagcctacgtcgggcgcagacgctccccctggcggggcgggcgggggctgccaggagaatcaccagtacccgcctcctcgccccgcatcctcgggcctg

SEQ ID NO: 6362 - DNA, 122 bp, Homo sapiens
gttgccagcggccaccagggaggacccttcagtgctccagcagcagccaaaacatgttaccgcaaattcttaacaagattcaggaggaaccaatgtggttgtctcgcaggcttgacgagcca

SEQ ID NO: 6363 - DNA, 122 bp, Homo sapiens
gcttataaatcacaattaaccacagagctacaaggggcctctgagattagactcaatccccgattttacaaatgaggcacaggaagtgctgggtagcacctgcgattcctggagcaccttta

SEQ ID NO: 6364 - DNA, 122 bp, Homo sapiens
cgatgatgagcagcttgaagaggtggtcgtagtcccgggccatggcgggcgggggcggtgcgcgcgggcgggcggggtcggtactggcctcgcgatccgcagctcccttcgggctgctccgg

SEQ ID NO: 6365 - DNA, 122 bp, Homo sapiens
cctggagtttgaagggagaaaccctagtctgttccttcctaaatgctaagaaatcaaacacgttctcaaaatgaggtgccatggttgtcatgaacttaaagcgagaccaagcaatgtggttt

SEQ ID NO: 6366 - DNA, 122 bp, Homo sapiens
catgagtgtgtgtgtgtgttaagagcacctgaaatctgctctcttggaaaatttccagtacgcagtggaacagtattagctacaatcctgctgtacattagatctctagaagtattcatccc

SEQ ID NO: 6367 - DNA, 122 bp, Homo sapiens
cttttaaaaatattataattttctcagaaagctaatcagctggctgggaaaggtggctcacgcctgtaatcccagcattttgggaggctgagacgagcggatcacctgaggtcaggagttcg

SEQ ID NO: 6368 - DNA, 122 bp, Homo sapiens
ggacgtgccgagggggtgagagcaacctggtcaccaaaccttccccaggtaatgagaattcgccttcgaaacctgggcccaggcaccccaagaccatgtggaacattctgagtcattcaaaa

SEQ ID NO: 6369 - DNA, 122 bp, Homo sapiens
atttgtaaatagctcccaggtgggtcaatttcggaaggcactcatttgggatctggctgacggctcctggctgcattattagagtatgttctgaaggtaagttcttggccgagatgggacct

SEQ ID NO: 6370 - DNA, 122 bp, Homo sapiens
gctgtctcccaaacagtgatttagaacatgggttacctggtgttttgaggctttgattaccgtataactgattttgtaattgtggtgcttaggtctattccaatccatgtaaatggagcatc

SEQ ID NO: 6371 - DNA, 122 bp, Homo sapiens
cctcaccaaacactcccaatgtatttcctggtgaagtggaaaatgacatcatttaaagagcgatgcaaaacaaacaggaagttggaactgggatccattcctgcggaggagggtggaggaag

SEQ ID NO: 6372 - DNA, 122 bp, Homo sapiens
ccagacaaatcgaaacggcttggcgtcatgatttaactttgtcaagccaaagagagggctcgtgtttcaatagttagcctcaccttgcatctatactgggccaagtcttctttccgtgaatc

SEQ ID NO: 6373 - DNA, 122 bp, Homo sapiens
tgcagtagttgtgagagcattagaagcagcagtcgataggaggatggaaggtctggatgccgccttggggagttaggagattggcagacttaccctgtaccactctagccctactcctttgc

SEQ ID NO: 6374 - DNA, 122 bp, Homo sapiens
gatccttctgcctctgcctcccaaagtgtcagagctgtgtaaaccagagcaactccatctcgagtggggctgggtaaaatgaggctgagacctactgggctgcattcccagacggttaaggc

SEQ ID NO: 6375 - DNA, 122 bp, Homo sapiens
ggcggggagcaggaggggtgtgtgttgtggtgaggaggagcggaagtcggaagctccagccgtcacagccacattcactgggcaagccgactgtgagccaggaagtgctcttggggagccca

SEQ ID NO: 6376 - DNA, 122 bp, Homo sapiens
acgcggggaatcctgcgggcctcgagggtctggcgctcccgccagtcgcccagtcctaggcgacaggctggtttctcgggcaaccgagttgtttttatttacagggattttgagaagcccga

SEQ ID NO: 6377 - DNA, 122 bp, Homo sapiens
ggagctccgcgatgtcctctcaacagagcgccgtttccgccaaaggcttttccaaggggtcgtcccagggccccgctccgtgtcccgccccggcgcccaccccggcgcccgcctcctcctcc

SEQ ID NO: 6378 - DNA, 122 bp, Homo sapiens
gggaggaggaggtgggacgccccgcggcctacgctcctggcctccccgccttggcctggccgtttaaccgattctttcgcccgcaggtcacaatccaaggtccggctcctccgcgtcccagg

SEQ ID NO: 6379 - DNA, 122 bp, Homo sapiens
tttaggaatctagtaatacagtcagcactgtatgtatttgagtttgtctcccgtatgttccggaattctggagttttgacattgtgaagcaacaatttaattttattgattcaattttacac

SEQ ID NO: 6380 - DNA, 122 bp, Homo sapiens
cgctagacctccccacacgtggcagagccgagcatgggtgagtcctgccttgggctctgtcgctggggcagtcagaggctctcctgagtgtccggctgcctcccactctgcaccccagcctc

SEQ ID NO: 6381 - DNA, 122 bp, Homo sapiens
gcatgcaccaggcagttgattctcttggctgtcggcactgaacactcagcatgctggcttcgtcccctaaataagcttcatcatgcatggataggctggcagcaatcccgaggccatatgca

SEQ ID NO: 6382 - DNA, 122 bp, Homo sapiens
gcaaaccgctcggctggaggtctaggctctgagctggctttaaagttgctgccttttccgcgcgtccctcctccgccgccgccgccttcactcctcctccgccgctgccgccagccccgccg

SEQ ID NO: 6383 - DNA, 122 bp, Homo sapiens
gctctgagagtcacaataaggccggaacacccctgcagttgtgagcccaaaatgtccttacggcacatgggccagagagtctcctccttcccgaaacagggtcttcgccaggcctttatatt

SEQ ID NO: 6384 - DNA, 122 bp, Homo sapiens
caagcagccaacccaaactgtacattttcagaagagctcattactcacagctgtacagcacgctgaaggccctctcgtctctgtcctctccgaaggcgggtatgttaaaggaaagtggcccc

SEQ ID NO: 6385 - DNA, 122 bp, Homo sapiens
taatcccatgattttttaatttggcacaaaactccttgcctggactattaccttacttcgcgaaacataaatcatagctcaccttatacatggtgaaataggaaaccacgtacaagcagtgc

SEQ ID NO: 6386 - DNA, 122 bp, Homo sapiens
ggaaagggaaagtcagtattgttttagccacattgagtctagtagcttttacaatagaaacgccagcatgaagtatcaggaatacttcaaatacatgactaggaacattttgtttagggata

SEQ ID NO: 6387 - DNA, 122 bp, Homo sapiens
tcctcctgtccccttgtagataagtcaaaaacctgctatgaggggaatggtcacttttaccgaggaaaggccagcactgacaccatgggccggccctgcctgccctggaactctgccactgt

SEQ ID NO: 6388 - DNA, 122 bp, Homo sapiens
cctcctcacatctaagaactaagtaagaggacaaaagtacaagacacggtgcatgtgtggcgagtgaagtggagcagtgcattcgtgtcatcacccacccgaccccggctgcgctcctccga

SEQ ID NO: 6389 - DNA, 122 bp, Homo sapiens
aaatggaaactgcagagtaatgcaaacaggaacttttcaggaaaacaggctccagattcacgagtgacttgatgagcccagggcatgaacatctcaagcatctgtcagcaaacagctgcttc

SEQ ID NO: 6390 - DNA, 122 bp, Homo sapiens
ttctcagagaaatcattgtctgtggcatttttttgtgttaatattatttttctctctcctcgttttaatattttctcttttcttgctcttccatacatggtgggtttaaactcaaagcatct

SEQ ID NO: 6391 - DNA, 122 bp, Homo sapiens
acgctgtgatctgcccacctcagcctcccaaagtgctgggattacaggcctgagccaccgcgcctggcctgaatttcctgcttctttggaaaatccaaagatgtggcaacgtgatccacatt

SEQ ID NO: 6392 - DNA, 122 bp, Homo sapiens
tcccagtagagtttatttaatgtgtcttttatagcttccttgtccttctctcttcctttccgcttttaaattctggaaaacctcaagctgacaaaagaagacattttaaaaatgcgaggata

SEQ ID NO: 6393 - DNA, 122 bp, Homo sapiens
gtgtgtgtgtgagggtgaggggtcccaggaagggtccccacacttcactcctgcacctctcgctccccacagcccccctccccttttctaactccaaaaagcccagaggcccagccgtgttt

SEQ ID NO: 6394 - DNA, 122 bp, Homo sapiens
gcttatctgcggtgatctgcttgctggcactctgcacctgcagcagcagcttgacccctccgtgggtgccaccgccatcttggagatggccgcggtcactccacctgccaggaagtccttgg

SEQ ID NO: 6395 - DNA, 122 bp, Homo sapiens
cagggggaggggaaagccatgagttgggtggcaggtcgacatgccgcagtcccagcactccgtggcgatggcgggcagggttggggtggggggcccagccggccggtggcaggcaggagtga

SEQ ID NO: 6396 - DNA, 122 bp, Homo sapiens
gatgggtagatcacttgaggccaggagttcgagaccaaccttgccaacatggtgaaaccccgtgtctactgaaaatacaaaaattaatggaagtggtggagtgtgcctgtagtcccagctac

SEQ ID NO: 6397 - DNA, 122 bp, Homo sapiens
tttcttttaaatgaagattaggaaggcccccaccaatatgctacagtgccctgatgcctacgtctactgctgagtaaatactcagctttgctcatgtaactggaccagcatatttgtctgga

SEQ ID NO: 6398 - DNA, 122 bp, Homo sapiens
gagagggcttttggagcaccctcaaatattctgtgattgaagccaaggagtgagagaattcgcagaaacaaacagaatcagaagaaaggaaagcctagaacaaaacccaaggaaaactaaaa

SEQ ID NO: 6399 - DNA, 122 bp, Homo sapiens
gccgacctttttggcccttacctcacgtcccagggtcctgcgggccctcaagttgtggggcgcccgcgctgctgtgtccagacagcgttccctgagagctccgggaagcgggaagacagccc

SEQ ID NO: 6400 - DNA, 122 bp, Homo sapiens
ctcctgtcacaccggctggcgggttgtggcggtgccagcctgtgtgtgcgagtgtgtctgcgtgcctgcgcctgggcggacagcccggagcggcagtgcgactcgccgggagaggcgtctcc

SEQ ID NO: 6401 - DNA, 122 bp, Homo sapiens
cagggcgaacctcaggaagcttgtaagtccagagccaagctcactgggtgcaccacagcccgggctgcagctgcggcaggccctgcctgcagccgcctgtggcctccatggacagacggccc

SEQ ID NO: 6402 - DNA, 122 bp, Homo sapiens
tccagagatcctaaacgcgttagcgctggagtgggctcccaggtgattctgatgagcaaccggatttgagaattattgctctaggccatggctgttccttctaaccttgagctacttactag

SEQ ID NO: 6403 - DNA, 122 bp, Homo sapiens
ggggagggagcaaggagggcggggggaggccggcgcggcccgaccgggccgggggcggaacgcactaatggagggtctcggcgacggaaagttcaaagctcagcagcgccccgggagcggcc

SEQ ID NO: 6404 - DNA, 122 bp, Homo sapiens
ctgcgggccgtgacccctgacccgtggcctcagtcccccgcaggacccttgccctgaccgcgcctctccccgggtgtctgtctccccgcagctctgggtctccatcacctcccaacccccgg

SEQ ID NO: 6405 - DNA, 122 bp, Homo sapiens
caggtggtagatgtggggcccagtttcgaacaacagatagtgagaatgcatgagttaagacgtgtaaagccctcagtggactgctttgatctagtaatgtcagcagatagtattttatggat

SEQ ID NO: 6406 - DNA, 122 bp, Homo sapiens
gccagagcagatcgcagctggtgaagcgccgcagccagcggcacacctgggccaggcggccgagggcccgcatgtccaggtaggagcagatgagcagcagcagctcctccggcaggcgccag

SEQ ID NO: 6407 - DNA, 122 bp, Homo sapiens
aaatactggtagattaatttcttgaatttccaaagccccatccaagacttagaatctgggcgtgtatgattctggatgtgtttccagaggagatggcgtggtgaaggaggctgtgaaaccga

SEQ ID NO: 6408 - DNA, 122 bp, Homo sapiens
tgtaatcctgcttgccttggggcccaccacccatatgattaaaaggaataacgggattaccgaggcctttaaaattttgtggtcaaggagataatataaaggagttttgtgtattaggaaga

SEQ ID NO: 6409 - DNA, 122 bp, Homo sapiens
cttcttatggccaaagacccagctgtttcataggctggagatgcactcttctagactgctcgagacagccagagacaggggaggagggaagaaggatactgtggaaagggatggcggggcaa

SEQ ID NO: 6410 - DNA, 122 bp, Homo sapiens
gcctccggcgccgcccttgaagcaggccgactcgtagtgcttgttgagataggacttgagcgcgaagctcttcttgcagcgcttgcactggaagtgcttgaaggccgaatgcgtctgcatgt

SEQ ID NO: 6411 - DNA, 122 bp, Homo sapiens
tagtacaatgtcctcagcaccaagcgtcagagacctccgcgcaattggcagcatcttctgcgtgtagctacaggtccctgagagagaccggcgcgcctctcccacaggggcgatcctccctc

SEQ ID NO: 6412 - DNA, 122 bp, Homo sapiens
gtccatggtgcctgcagccgcaacgggcccgcgctagtcggtgtaaacagcgcctcgggccgctttctccatggccccccgctcgggtccagactgggttccggacctccgcccctatctgg

SEQ ID NO: 6413 - DNA, 122 bp, Homo sapiens
atttcactttcttacctgctgggggccaggccttgatgtagcctgtgcagtggaccaccacgaagtgaggttccccatcctttacagagccaagtccattcctagaagagttacaggagttt

SEQ ID NO: 6414 - DNA, 122 bp, Homo sapiens
cccaccgagtgtcctctggttgggtttcaaatggttctcttggtttggggctctggttcccgtatcctgctcctcacctggaagaagggagcttggagcttgcgtatttgcacctcctgcct

SEQ ID NO: 6415 - DNA, 122 bp, Homo sapiens
tctaccgcggggagaacttacctaatccttgaatgttaaaaggctaaaaactccactagtcggaagtgacgtgccagcttagccccgcaggtccgccacgtaattggccgccgccacagcta

SEQ ID NO: 6416 - DNA, 122 bp, Homo sapiens
cagagtgatcccaggccatccattgcctgagttgaacgtatctagctagggtggaggtttcgggcgggggaggggtcgggtccctgcagtcacgcctgccggtgcgctgcacaaagcggaca

SEQ ID NO: 6417 - DNA, 122 bp, Homo sapiens
gcagatgtctttccagtaggagccccaggggacagggtgggtctcacagcccttgaagaccgagctcccgtaggagtttccaggtgtccaaacagggtcctcactgtgagtcttcaacagct

SEQ ID NO: 6418 - DNA, 122 bp, Homo sapiens
agtggtgagcacagctgcctttcaagcagttaacgcgggttcgattcccgggtaacgaaacgtttttgtctttccttctacgaaaaacttttctgagccggagcctccagcgcgctgtgtat

SEQ ID NO: 6419 - DNA, 122 bp, Homo sapiens
cgaagggtctcgcggtccccggcttcagccaatggggagtctgctgcgggaaggggtccccggccgtagccaatggaggggggcgcgcggcccacagtttggccaatggggagggagggact

SEQ ID NO: 6420 - DNA, 122 bp, Homo sapiens
ggcccggaaaccgttttccggtctttcgctttcggctggggcgtggaggccgcggtgctgcgtaggccgggccgggcgcaggaacagccccgtggcgccctctctggccgccgcccgggcgg

SEQ ID NO: 6421 - DNA, 122 bp, Homo sapiens
tgaagagtgaacaaatgaatgaatgcgcggcaacgggatcttcataaaccagaccctcctcggggatctaatgcgaacactcccgaggcccgggcccaggtacgctgagggcggctcgtggg

SEQ ID NO: 6422 - DNA, 122 bp, Homo sapiens
tagttaaaaaaaaaaaagtttaaggcctggtagacatatccttttggctgtcagggccctcgaaccatgtcatttcaaaataaaataatgtcatgatgctttgatgagatgagaattgaata

SEQ ID NO: 6423 - DNA, 122 bp, Homo sapiens
cgggcggcaaccatggtccgggggcagctgacttaggacagcctccctgtgacccgccctcgccggcacggcgccggctccgccccttaagccccctaagtcccgcctctgcgctcccgggg

SEQ ID NO: 6424 - DNA, 122 bp, Homo sapiens
cttggagaaggaagccctggagggcagcctgtttgaggtgcaagggcacctggttcagctcgaggcccgctgggatcagctggaagccgatgggcaggccctgctgttggccaaggagaccc

SEQ ID NO: 6425 - DNA, 122 bp, Homo sapiens
tctggacatcaagctggccctggacatggagatccacgcctaccgcaagctcttggagggcgaggaggagaggtgggctggggagacgtcggggaggtgctggcagtgtcctctggccggca

SEQ ID NO: 6426 - DNA, 122 bp, Homo sapiens
tccttgcagactctaaaatgcacagagaacagcattttgcaaacaggtggcatagccaaacgtgtaaaacaatactcatcttctgctttacatcagccttattgtcttctcattttctccac

SEQ ID NO: 6427 - DNA, 122 bp, Homo sapiens
gctggtacccaggggaagaaagcgggaggtctcgaagctggctttgtagccgcgccgcgacgggcagcccccgcgtggctcccagactgccctatcattacctagggcagggcaccgccccc

SEQ ID NO: 6428 - DNA, 122 bp, Homo sapiens
ctcagctctgcaaactcagtctcatgctcctggaataccttcaatagctgccttcctcaccgcagatgtttctgcctcttaaggatagatcttctgcaacagtcttgctgacaagctagagc

SEQ ID NO: 6429 - DNA, 122 bp, Homo sapiens
tctccctcccagcccccaaagaatccccctctctcatctacaggcagcgtcctcgctccacggaactctcatacctacaccagctctggaagggagcaagcccagggcgttccctatagacc

SEQ ID NO: 6430 - DNA, 122 bp, Homo sapiens
gtggccggggctgacggcggaagccgcgcagagactcgcttgccccgaagtcgctggattcgggcctggatcccagattatccgcagcctaggggagtggagagatgcccaaggttcctctg

SEQ ID NO: 6431 - DNA, 122 bp, Homo sapiens
acctggactctcctccacccccgtcccacctccttgcccccagcacacggtggcggagtgcgtggggccagcctggcgggggctttgctccccgacctgcacttagagaacagagcatccta

SEQ ID NO: 6432 - DNA, 122 bp, Homo sapiens
atggacccatgcatgggggtgggccgggcacctttcaaacgttcagcccccaggacggcccgtggcctccggattggacggcgcgagctgggtgtgtgtgggtcgctcaatcgctccggagc

SEQ ID NO: 6433 - DNA, 122 bp, Homo sapiens
tcctcccggtaggaaactccgggaccctgcaagggatgactcaccccagtgattcaaccgcgccaccgagcgcggagctgccctggaggacgcaggcgggtctagttgcccgggtcccccaa

SEQ ID NO: 6434 - DNA, 122 bp, Homo sapiens
cagggtttagtccttcctctgatttgacagtaaacaggaagaggcagagaagactctgtgcgtgttgtttgctgacggagtgtgtaacaggagagaagcttccatgtttcacagaaataaaa

SEQ ID NO: 6435 - DNA, 122 bp, Homo sapiens
gaggtcctgagagggcaagtgacttgcttcaggatacacaacctggtccaaaaacagcagcgtcaagccagtgcactgtggatcacacaaacggcctcctcaggccacttaagagctaacaa

SEQ ID NO: 6436 - DNA, 122 bp, Homo sapiens
gacttccgtaggagtgcgggtgtgcgtgcgtgccgcggaaatcccgccttctggcgcctgcggttgccccctggcctcagccggtaggctcccaagtaggaagataaaccgcattgcacgaa

SEQ ID NO: 6437 - DNA, 122 bp, Homo sapiens
cagagtccacagacagcgttagagccttgcctgtgactcagaggcaggcctttctcaagccgccgtgccgccgggtcggggggaggtctgggccatgtggctacatctgggagtccaagttc

SEQ ID NO: 6438 - DNA, 122 bp, Homo sapiens
tctcatccactctgagacgcaggcggaggacaccgacaaggtgttcagatgagggagcagcggggctggggctgggacagggggtggggggctggcctccaggtggcagctactgatggggc

SEQ ID NO: 6439 - DNA, 122 bp, Homo sapiens
ctaataatattaacatatagcattcttttagcacataaatagtttcatttgcatagtaagcgccaggctttgccatcgaatttgataaaataatccatgcttcatggtaccttagagatggg

SEQ ID NO: 6440 - DNA, 122 bp, Homo sapiens
gcctccttatacaccacctgaaagacacaaggtggccacgcccggctcaggacagggacccggaagccaaggatggacgtggcaaatgcccatgacagcgcatggtcaacaggtgtgcctgc

SEQ ID NO: 6441 - DNA, 122 bp, Homo sapiens
ttagaatccctggacgcttctggcccagggatccgcgctgctggtggcgctgacagggtccgggttggagcccctgctgccgcgtgccatgttcagatgagagctgcacctgagtccacggt

SEQ ID NO: 6442 - DNA, 122 bp, Homo sapiens
tcagaacctccttctagaattccaccctgtggctcccagcacggcttgggactccagtggcgtgaggccagccagactgtggtccccacacttgaaatactggaaggttgtgatcatctgca

SEQ ID NO: 6443 - DNA, 122 bp, Homo sapiens
acactgcctctaattgtctatctgcctatgactctataaaataacctgcaccttgggacacgaactgtggcttttattttgatccctatgccctcccagatatcccttctcctgtcctccat

SEQ ID NO: 6444 - DNA, 122 bp, Homo sapiens
gaaactctctcccactgctcagtagcagttttgggtcataacatttgcacctgcttggtacgtttccacctgtgatgtttcacttggcccctcagaaaaagcgctgccctgggatcttatga

SEQ ID NO: 6445 - DNA, 122 bp, Homo sapiens
gccataaggttgtcgatgtcggtgtccacccggccatggtcatgatgttgtcaatgtaggcgtccacccggccatggcgctgctgctggggcagcgggctgggctcgggctgcctgggctgg

SEQ ID NO: 6446 - DNA, 122 bp, Homo sapiens
ctcctagtgtgccctttcttagcatttacaccccagtgtgtacatccagtacacatggtgcgcacagcccccagtgagcaatccttcccccagtgtgcaatccttcccccagtgtgcacatg

SEQ ID NO: 6447 - DNA, 122 bp, Homo sapiens
acggcagcagagccatggtggcgccagccttggtcacacttggtaccagaggcagggggtcgtccagccagcaggcctccagggcactggggagcttcccgcgcggcgccgccctgcgcctc

SEQ ID NO: 6448 - DNA, 122 bp, Homo sapiens
ttctgtgaccctcagcaggttccttcactcttttgagcctcagtttccccaattgtataacgagggtaaaaaaccacgcctttctctcagggttattgtgggtattcattgagaagacgtgt

SEQ ID NO: 6449 - DNA, 122 bp, Homo sapiens
cccattacggaaggaggaaagttggggacaaataagggattcgtgcagaaggctgcactgcggccggccatgaagagaataagggtacttaagggagtgtgaagagaatgaacaagcctagg

SEQ ID NO: 6450 - DNA, 122 bp, Homo sapiens
gcttctcccaaccctccagtctgaagaggataaacagcttcaagatgaactggagatgctcgtggaacgactaggggtgagtcacgatgttaacatgattcggtgcatgtttggatctttcc

SEQ ID NO: 6451 - DNA, 122 bp, Homo sapiens
tgaatagcagttatcaaatgcaatttcttcacgtttcattctactgaagccaaccaatgacgacaatggtatcttgcttactcatctaacaaataatttacctttagaaaaatataaggata

SEQ ID NO: 6452 - DNA, 122 bp, Homo sapiens
ttcaaggaggctccttcctttcctcctcccacttgcttctcccaggctccctgactcctgcgctctgggatctgcaccccaccatggggtgaggaagctgaactgcatggtgaggcagctgc

SEQ ID NO: 6453 - DNA, 122 bp, Homo sapiens
gccgggcagtggccggcgttccccggagctcggaccggttggattggactccgacgctaccgctccctctgctgaactattccggatgtaaaacactagggatcggagtttttcttggtttt

SEQ ID NO: 6454 - DNA, 122 bp, Homo sapiens
atccacctcctcggtctgtgatgactcctctgtctccctctctgctcccgtaccccgaagcgctgctacgattcccagggggagcgcctctcacactgtgccctgatacttctctcccagat

SEQ ID NO: 6455 - DNA, 122 bp, Homo sapiens
atgagtaaaagatggaactgaaaatcttagcaaaccgagcccattgaaagtaaagtgagtcgtccaaatccacactactggccttgggcagactggagccagactgtcaagttttcggattc

SEQ ID NO: 6456 - DNA, 122 bp, Homo sapiens
ttgtgggcgccccgggaaatacttcctggcgttttccgcgcagcctgccgcccagctagccggcaagatgagccctctgtggcctagaatcaggatttaccaagctgaaacccgtccagatg

SEQ ID NO: 6457 - DNA, 122 bp, Homo sapiens
gcttcaattacttgagaacttcatggaagcctcgcattttgcagcaatgccgggtccgtgcgtaccatcgtctgtcctggttgtgtctctgtgttctccatgtgagagggcggggagggccg

SEQ ID NO: 6458 - DNA, 122 bp, Homo sapiens
aggagggagctgtggccgaggacgccgaggcctggagtgggtggtagccccgagctgggacgctcctccctccacaatctccccaggtctgcagggaccgagggcctacactgcctcctccc

SEQ ID NO: 6459 - DNA, 122 bp, Homo sapiens
agcttcaggccctgcgtgactttgcccagctgggcagtgcccacttctgggggatgatgacgctgggcggcctgtttggctttgccatcggctacgtgacaggactgcagatcaagttcacc

SEQ ID NO: 6460 - DNA, 122 bp, Homo sapiens
gggcactggccgcgggggtgccgggatggggatggagggagcggaaagaggggcggagggcggctggatctcccaaaggccaccttgagtggttagggctctctatttcttcagcgtacttt

SEQ ID NO: 6461 - DNA, 122 bp, Homo sapiens
tccgggccccagcggcgggcccggtggcggaggtggtggtggcggcggaggcggcggcaccgaggtaatccaggtgactaatgtctccccgagcgctagctctgagcagatgcggactctct

SEQ ID NO: 6462 - DNA, 122 bp, Homo sapiens
aagttagcccgtggccaggggaggtcagaggctggagtaagaggtgggcgctgcaggaaccgagtaaggaaggactcgtgcattacaggaagggggagaaatgctctgcccatgggatgtgg

SEQ ID NO: 6463 - DNA, 122 bp, Homo sapiens
agactattagggcctggctctcgagagtggccgtagaggggagtcactccaaatggaccccgctcacacaaagctccctttcaggtagaagcctgccatttttatgaccctgctgttaggac

SEQ ID NO: 6464 - DNA, 122 bp, Homo sapiens
ccatcttgccgccgagggttctcttagcgaccagcaacgcccgcttccattggtctttgtcgcaagggggggtgtggccacgggcctagtccctgagcccgcgcaatctctggagcgaagct

SEQ ID NO: 6465 - DNA, 122 bp, Homo sapiens
atacgggccgtcttcttgtgcgacatgagcgtctttgatgcctacatggaacctggtccccggagacagtccagcctctttcagtgggagaacagccgggccctgtgttctgcacctgcctg

SEQ ID NO: 6466 - DNA, 122 bp, Homo sapiens
cggggcggaaaggcgagaggtgtctcctccaccggagccaggggagacccgagcaagctccgtgacagcacgtcggccgccatgtcgccgagtggggctggaaacagacccggcgcccagcg

SEQ ID NO: 6467 - DNA, 122 bp, Homo sapiens
tttggagcggaaatattagcggcagggggttaacccccgaccctgtccgtctcggtgcaccgctcctcagttgcttcctggtcttcccaggagctggataagcctgaagttgctcagtttgg

SEQ ID NO: 6468 - DNA, 122 bp, Homo sapiens
tgcccaggccccacccccgtgaggcccctgcccagatggccctgcccaccatgcagataacgcaccatgtggctccaccgccccacgtggctctgcccaccgtgcagtcacccgccccgcca

SEQ ID NO: 6469 - DNA, 122 bp, Homo sapiens
caggctgggaccgaggctgtgtgcagaggcctttggtggctgcgcacgttggggaggggacgtagaactcagagtgattttgaggttggtgaaaaatgttggatgtgtaaccttagactgtg

SEQ ID NO: 6470 - DNA, 122 bp, Homo sapiens
ggggatttccagcaatctctttcacatgaccagctattctcataaattttcaaatcacagcgaattttgaattaagagatgaggctggctgaaaggccagcagtagatcagaggagcaggtg

SEQ ID NO: 6471 - DNA, 122 bp, Homo sapiens
aaagagataaacaaacaaaaaaattacatcctcatacagttgcaaacaggagtcccaggtcgctctagcggtagttctatgcttatttcctgctattgctgttgctattgctattgttgaag

SEQ ID NO: 6472 - DNA, 122 bp, Homo sapiens
gggagggcagggttggggaggggagggggtggggaggaaggggaggggggctctgggcaccggctggggacagaggaaaaggcaccgaaccctgctctcgggctctctccccccagcccgct

SEQ ID NO: 6473 - DNA, 122 bp, Homo sapiens
gcaggctcagatttgaagagggaaggttccagccaagtccaccttaagcctgagtttgggcgactacagaatccaggaagaaaatctagatggcatggtcgctccggtctcagttctacagg

SEQ ID NO: 6474 - DNA, 122 bp, Homo sapiens
agacagaggggttaagtaagctgtccaagattactcggtacattgacttgccagggctgccgtaacaagttaccgcaaactgagtggcttaaaccacagaaatttatagcctaattgttctg

SEQ ID NO: 6475 - DNA, 122 bp, Homo sapiens
cgaccgggcgggtggccgggcttgggcctcagctccgaataatgagaacaattgtctccccgcctggcatagccctccgccgctcctccgggttcgctgcccctctcatttctctagccctg

SEQ ID NO: 6476 - DNA, 122 bp, Homo sapiens
ccatatggtcacagtggggagagcacgctgcactcaagatgctagcaagcctgcagcaggcggcccagcgagacacggtcccccgcccggccaccaggcgcccgcgcacgcgcacagccgcg

SEQ ID NO: 6477 - DNA, 122 bp, Homo sapiens
cagagagcgcactccttggcagcgagcatttgtttgtgataattggttaccttttatttccgatggcatccccaccgagtctcactatggccagctcctagtagatgatgggctcctggaag

SEQ ID NO: 6478 - DNA, 122 bp, Homo sapiens
ccccttcgcgctcttcgaatgtcaagtgcaccagcttccaatccctcctctgggcgggcccggtctggctaatctcagctgcagattccagtacaaactcaggactctcccccgcccagccg

SEQ ID NO: 6479 - DNA, 122 bp, Homo sapiens
gtgtggcctgggcctccatgtcctccgtggtgcctctgctgtgggctgtcagggcgtgttcgggggagaggcagggctgtggaggtgggagtgagcactaaagcccatctatgtcaagcttc

SEQ ID NO: 6480 - DNA, 122 bp, Homo sapiens
gggaaaactcttcagcccaccgcagggccttgtgcgcggtgattggcgcgtcaacgaaagcgatggacgtctagaccaatcgtcagcaaaagaccctttggagcccgcgccccctcccccta

SEQ ID NO: 6481 - DNA, 122 bp, Homo sapiens
ggaagcttcaaacatcctcaactttctagaaagctcctaaatggaaccccaaagtagaaacgtttaaaaaaatttgtgatgaagccacttttgtcaactacagacatagtttaaataaaaaa

SEQ ID NO: 6482 - DNA, 122 bp, Homo sapiens
ttcgggatgggtggaaggctaagatgaacaaaggaagggtcaactgtgcctcttccaggccgctgagtcctccaacgcctagctgtgctcaaccttgactgggtgaagccaaggcagggcct

SEQ ID NO: 6483 - DNA, 122 bp, Homo sapiens
caagcccgtaaactttctgtggacacccctcaagttgcgcatagtgttgtcccttcactccggtctcagccagggcagaaagtagggtggggagagtgagtcacaagctctatcccgtcctg

SEQ ID NO: 6484 - DNA, 122 bp, Homo sapiens
agcagcagccctgctgggggactagcagccatcagattcgtcctttccaattctgtcaaccggtttgcttgatgtcaaagctagcagttttgtgtggccatgagaattagcaaagcaggttt

SEQ ID NO: 6485 - DNA, 122 bp, Homo sapiens
taggaccctccaagccacgtgcaggatataatgtcctggtgcaccgttttttaagcccgtcggaaaagtgcagtattcaggtgggagtgacccgattttccaggtgccatctgtcaccactt

SEQ ID NO: 6486 - DNA, 122 bp, Homo sapiens
acttatgtatgagtcttcaaacaagggctcaggaccaaacagccctaggaaatggggctacgctttagtatctgaggtgcagggatatccctgaagtggatgtttgtgcaggagaaaactga

SEQ ID NO: 6487 - DNA, 122 bp, Homo sapiens
ggctggagagacactgcgctcagggacggcttgatggtagccaggacctcctctctactgcgggggtgggcgggggcggaggatgggaactggctagtgagcactgaaatataaattctgaa

SEQ ID NO: 6488 - DNA, 122 bp, Homo sapiens
actggtgtggatcgctgctgcctgtactgtaattttggaaatgcaggagaaagtacggagcgtttagctttagctggcattttgtgtttattctgcaagtggtcatttgggacggggaagtt

SEQ ID NO: 6489 - DNA, 122 bp, Homo sapiens
agtacatttccagtgagataagccaatacacttctctgtcattgaggtacctctcttgtccgctttatacttttgtctctttcttgcataagtcaatttcttctgataaaaaaaaaaaaaga

SEQ ID NO: 6490 - DNA, 122 bp, Homo sapiens
caagtcagggagcccattgaaagccttttatcctgcatcggcgatttaaccccatgtaaacgccaagtgaacattctcttgtagagaccgatggtcctcattttcctgtaatcctgtaaagg

SEQ ID NO: 6491 - DNA, 122 bp, Homo sapiens
ttccccttctgcaatgattggatgctttctgaagccctcatcagaagcagatgctgctgccgtgcttcttgtacagtctgcagaactgtgagccaaataaacctctcttctttataaatgac

SEQ ID NO: 6492 - DNA, 122 bp, Homo sapiens
aggtcccgctggagctcatgagcttcttcttggcggcgtgcagctgggaggtcaggtaggcgatggtgctggcccgctgctccagctcgctagacagcagggtcagcttgtgactcttggcc

SEQ ID NO: 6493 - DNA, 122 bp, Homo sapiens
gcaacatgcaccacaggtaggggcactaccagggcaaaaagacttggtgaatgcgagggccgggcctgatcaaaggtgcgtatggtggtaccagagcaaggcggaacagctgctcagtggtc

SEQ ID NO: 6494 - DNA, 122 bp, Homo sapiens
cactccccctggagaggaagtttctggtacttaggcggtgcctaacgtgtgcgggccccacgcctgccgcactccccgtgaacgcctccgtgtgcccccacctgcagccccacttcccaggc

SEQ ID NO: 6495 - DNA, 122 bp, Homo sapiens
cgccgggccgcacaccttgccctgggccacccggtccaagacccagaccctctgcgggtgcgaagttggcctccttaagagatcaattaaactgaagaggccgaggaatggaattgggctgt

SEQ ID NO: 6496 - DNA, 122 bp, Homo sapiens
ttttttgcaccgcccggggctgggtgtggtcacgtgacaggttcagaccaatgggcaggccgcccgcggggggtcttctataaaagcgcctgtcgcgcgaccgccattacaacaaaaactgg

SEQ ID NO: 6497 - DNA, 122 bp, Homo sapiens
tctgggggttctggaccttgacagagaacctggtctggccctacaacctgcctgggctctcgctacgctcctccgtcgcaccaggctctgatggggtagagagagccagggacctagtcccc

SEQ ID NO: 6498 - DNA, 122 bp, Homo sapiens
cctcgctaagtctcccagccacccgcggggatgaggctgcctgaacccattttacagatgcgaggacgaaagcaggcgccgggcgccggctctcccgactaaggtcacccggccggggagcg

SEQ ID NO: 6499 - DNA, 122 bp, Homo sapiens
gaactgcttcccgggcttcaggtttcagttcagggagcctgctgtccagacaggtgcccccgctggtccacccgaccactgtccccctctctcagagcactcctcaagctataggtgaagga

SEQ ID NO: 6500 - DNA, 122 bp, Homo sapiens
agctccaacacagggccagtcaactgcggcaacagtgaggacagtagctccaggtctgggcggaaggtggtgcggtgaaaggtgcagggacagactgggttagaggccactcttggtcttat

SEQ ID NO: 6501 - DNA, 122 bp, Homo sapiens
tgaggagcgtctctgcccggccgcccatcgtctgagatgtggggagcacctctgccctgccgccctgtctgggatgtgaggaccgcctctgctgggccgcaaccctgtctgggaggtgagga

SEQ ID NO: 6502 - DNA, 122 bp, Homo sapiens
gctgactaaattatagagataatttgggagccattaaactgacttattatccctctaagtcgaacatttctgtcaccataattccacatcaactctgatcatatggaaatcttctccgttaa

SEQ ID NO: 6503 - DNA, 122 bp, Homo sapiens
gttcgaagaggtggagtgcagggtggaggtgttatttacccgagtcctggggacagtccccgggactctccgccaggcgcccagaccggcaggtcccgcaggcggcgcgcggtgtgtttgca

SEQ ID NO: 6504 - DNA, 122 bp, Homo sapiens
atgctactcccttgaagttaaatatggtcatgtgaattgcttaggccaaagaaatattagcgtatcacttgcagggagaaggtatcagagccagcacacagtcacgagtgctctctctctct

SEQ ID NO: 6505 - DNA, 122 bp, Homo sapiens
cgcagctgctggcccaggtgctaagcccctcactgcccagggctggcggtgccggccggccgctctgagtgtggggcacattgagcccatgcccacctggaactcgcactggtctgcgagca

SEQ ID NO: 6506 - DNA, 122 bp, Homo sapiens
ctacttctgaatgctgtcatttctcccagaccccaggttggaacaactctctccctttcccggagacagcagacaaggttgtttctatctggctggggactgtggctctctgactgagttcc

SEQ ID NO: 6507 - DNA, 122 bp, Homo sapiens
gagtggtatattaacataactaaaaggagataactatttttcattataaatgtagtgggacgctattgaagaattttgtgtggggtagccacatgacccattttgttttaacatctttaggc

SEQ ID NO: 6508 - DNA, 122 bp, Homo sapiens
cacagtatttctagatgcagaaactttagccctccttccgggctctgacaacacatggcccgctggggcctgtctccgggcagcagagcttgagcagtgacgaggaattaaaggcaggagcg

SEQ ID NO: 6509 - DNA, 122 bp, Homo sapiens
gggttgcttgcaaacttggcctcttcctggtcaccctccccttcatctcaccccttcccccggagacggagagcactttctcgggtgcaaatgcttgaccacatgcctgcttgaccatgctt

SEQ ID NO: 6510 - DNA, 122 bp, Homo sapiens
ctgagcagagcatagttcttccaggtctgtgctgacccgttcatgtctttcaatcacagtcgcacatcttgggagtggcatcaatacctagtccactgtcaaatataaatgatagcaagaag

SEQ ID NO: 6511 - DNA, 122 bp, Homo sapiens
caaggccggcccacaagcgcagggggagccaggcctcgggttacctgtgctcagggaggccgtgcttcctcgttcctttgtctcaagttcgcacctgggaacacctgccccagagatctgca

SEQ ID NO: 6512 - DNA, 122 bp, Homo sapiens
gtttagcttctgtgggcctcagtttccgcatctgtaaaatggagagagtcgtgtgtgctgcgttcgctgctccagccagcgctgtgaccggctcctactaatgcgacttctcccaccaccct

SEQ ID NO: 6513 - DNA, 122 bp, Homo sapiens
cagtgcgaatatagctgggaaactaatgccactcaccatacaggatggttaacatggacacgggcatgacaaggaaacccagcagcatatcagctatggcaagtgacatcaggaaatagttg

SEQ ID NO: 6514 - DNA, 122 bp, Homo sapiens
ccatatatacattccttggaaagctgaacaaaatgagtgaaaactctataccgtcatcctcgtcgaactgaggtccagcacattactccatcaggggctagacagagagggccaacattcgt

SEQ ID NO: 6515 - DNA, 122 bp, Homo sapiens
tgctgctcctccaccacggggaagcacttcttcagcgcctcctgcacggcaagcagaggccggtcttgagtcatcttctgctgaaaaagataaaaacagaaaataaccacgttggggtgcca

SEQ ID NO: 6516 - DNA, 122 bp, Homo sapiens
gaccggggccccttccagatttcggcaccagatgtaaggctcttgtatcagtttgaaccccgagagcgcgccaatgaacaccacaaggcggtgtggagcaacgcgctgttttaatgtgtgcc

SEQ ID NO: 6517 - DNA, 122 bp, Homo sapiens
aggtgacgcagcagcaaggttgttgagacgcagcttgagttcctgcagcgaaaaccaaagcgaagccggcaccctcctgccccagatggccaagtctccctcaatcatgacactgaccatct

SEQ ID NO: 6518 - DNA, 122 bp, Homo sapiens
tgtgagctgtctcagcaggggtggcatctcatcttaggtaggatagtcaatctctattcacggagaatttcaaagggatttcgtattctgtggctttctccatgcctgaaattattcctcca

SEQ ID NO: 6519 - DNA, 122 bp, Homo sapiens
gctgtgggaagatgggctacagactgcaccttcaagctctccttcctgctgaaataggagcgtgcacgcagccacttcaaaattcagactgtgcatgcagcaaggctggaaagggaaaacgg

SEQ ID NO: 6520 - DNA, 122 bp, Homo sapiens
agctctgacttcccttcccaacctctcttagtacatgcggaagatgagaacagtggacaacggctttgctaagccctgaattgttccgaagtttgaagttgtaacccatgagctacctcttt

SEQ ID NO: 6521 - DNA, 122 bp, Homo sapiens
ttacatatatttacataccacataccattctactaacgattacaaatcatagttgctttgcggaaagtctgtaggaaatggtggcagaagataagctttcagacagtttgattaggatgggc

SEQ ID NO: 6522 - DNA, 122 bp, Homo sapiens
tgtcaaaactcagattgtgtttcccctaaagtcagcttaaagtgcaatggtagaagagcacggtctctccccaagacggcctgagcttaaactgcagcgctgtcacttgctagctatgggac

SEQ ID NO: 6523 - DNA, 122 bp, Homo sapiens
acaggttggaaaactgagtctcctgggtcagatgacttacatgggggcgtacaggggacccgcggacggaggccatatcctggtcctgttctgtttcctgagtcctgcgcgagcctccaggg

SEQ ID NO: 6524 - DNA, 122 bp, Homo sapiens
cctaagctgggagctgcaagggagaattcctgtcattcctggcctcagttctgcagggaccgagggcgagacacgcctgggcccaggtgtggcgtctctgtccccatctggttttaggtaac

SEQ ID NO: 6525 - DNA, 122 bp, Homo sapiens
tcgagatttgcttttcattcttctggaaggctgtatgtagaaataaatacagtcatcagacgagttctttgtcagaccagatgtcctgggttggggtttggaaaacatgggcatcttaacaa

SEQ ID NO: 6526 - DNA, 122 bp, Homo sapiens
agcggctgcagtcgtatggcagtgagccgctgtctacccagcgagacggagagctcaggacgcaaccctatgagttggaagccgcaggaggcggaaccgggttgcgggatacgcgttgacgt

SEQ ID NO: 6527 - DNA, 122 bp, Homo sapiens
aagcggcggaaagctgcagctggcccggccatagctgtagaacaggacgcaccggaccaacgccgcccaggccacccaagaggccagccaatcccgaccgcccatgcaaataaggttcacag

SEQ ID NO: 6528 - DNA, 122 bp, Homo sapiens
tgtaaatgcgtcactttggtagcaggcgcagtaatgaagaaaaatacactttttttcattcgtgggggtaaacagctggaaaataatattagtaagggggaaaaacaaaagagaaggctggg

SEQ ID NO: 6529 - DNA, 122 bp, Homo sapiens
aggaaggagctgttgtcttgccagaacgttgccagttctgcggtttcaagcagtgttcgacgcaccttcatggggttgggggagatgaaatggcttgggtagaaggtctgaaaaatagtgga

SEQ ID NO: 6530 - DNA, 122 bp, Homo sapiens
cgaggtaaagagacatcacagccagcgagagtttggggcagactccccagactcggaggccggggcaaagtgggagccggggccaagtgggagccggggccgtgtggggtgggggggggggc

SEQ ID NO: 6531 - DNA, 122 bp, Homo sapiens
cagggtcttgttctgccatgcaggccagagtgcatgcaggccagagtgcagtggtgtgatcgtagcttactgcagccttgaattcctgggttcaagtgatcctccctcctctgcctcccaaa

SEQ ID NO: 6532 - DNA, 122 bp, Homo sapiens
ggcggcgcggacggcgccgtgttcgcagtgctcgaaatccccacgaccggcctcggacggcgaccccggccggcccagctcccactccaagcggggtgacgccagacgcccaggccccggga

SEQ ID NO: 6533 - DNA, 122 bp, Homo sapiens
cccacggggtgcctagagcctggcgggacgtcgcggggatgcggctggaggaatcggagccggccctgccctctcggcactcgcggtccggaccaggaaggcggcccgagcaggacgggtgg

SEQ ID NO: 6534 - DNA, 122 bp, Homo sapiens
ctgctttgcgcagcccccacgcggtgtgtggccgcgattgtcttttacaccactttctcccggtgtcgtgagccggccttggagggttagttgctcacttgttttcctaaattggataagtt

SEQ ID NO: 6535 - DNA, 122 bp, Homo sapiens
actgtgtgttgctggggtcaactgctggtacctgtcagcttggtccccctgctctgggcccgcctcactcagtaaagctggctccggcaatctttttccataggggctgcagctgagtgctc

SEQ ID NO: 6536 - DNA, 122 bp, Homo sapiens
gatcttcaggctcctgcagatggggcagggtggtcatatccccctcctctctctctcagtcgtgagtcctgccttcccccacctaaggcactagctcttcctgagcaccagcggcatccgtc

SEQ ID NO: 6537 - DNA, 122 bp, Homo sapiens
gcaggcagcagctcagtggaggctctgtccatagtggagaagagagagggagtgctggggcgggatgggggtggggactggctctccaggagcttcctgtcaaaagaatagaaggaaacaca

SEQ ID NO: 6538 - DNA, 122 bp, Homo sapiens
tcttgcctgcctttggtgaatacattagttgggctgataagcctgtaggccctcagaaaccgcttctcaatgtttcaagacctctgcatgcataagaaaaggaaatttgagatttgtcaaca

SEQ ID NO: 6539 - DNA, 122 bp, Homo sapiens
gttcaacaccccaggctcctctgctgagaagcctccttatgtagctgtactggacaagtgcggtagaaaagacagaacccagtggggatgacagaattctttaattgtctgcaaaagaggaa

SEQ ID NO: 6540 - DNA, 122 bp, Homo sapiens
ttgtttgagagaaacaataaacttaagggaatactttatcaaccatgtacataatacatacgagcatttacatcacttttcctctcaatcattatttttaaaaatggaaaaagaaaagcaga

SEQ ID NO: 6541 - DNA, 122 bp, Homo sapiens
ggcccggccatcgggtgggtggggccggggcccatcctgggcatggtggacatgcacccgcgtgcatgcgtgtgtgggaagccggggcacttccacaccatcgtggacacactctcagcctg

SEQ ID NO: 6542 - DNA, 122 bp, Homo sapiens
ccggccccgggcgcagcgcgcatgtgtcctgctataattatgattatcaataatgcattgcgattaatcatagaggggctctttgaaaggcgattggcaccgggccagcgctattcaaaccc

SEQ ID NO: 6543 - DNA, 122 bp, Homo sapiens
cctttccccggaacaaagagcaccagacaacttcctaccactagggggcactggggaccacgtcatcttcagacttggattctgaccacagccggcttcagcaccttctctctctcacactg

SEQ ID NO: 6544 - DNA, 122 bp, Homo sapiens
ctgtttctgctgaactaaaggaacaccagggggtccagtctctcgacaccccagggcccacgcacctgctgaggaaggcgctccttcattacaggcggcagcaccgagtacctgggctttac

SEQ ID NO: 6545 - DNA, 122 bp, Homo sapiens
caaacaagaaacagaagagccccagaacaataaatgtttttcctcacataataaaatacacgaatacattaaaactgctttttcttgtttgctttttctagtttttgttttacctgtcctct

SEQ ID NO: 6546 - DNA, 122 bp, Homo sapiens
cacatcatccacctcactacagtgtacttgtctcttctggacttggtctccccagcagcccgagctcctccacagcacagatcaagtctgatttgctgttgggtccctggcccctggtccca

SEQ ID NO: 6547 - DNA, 122 bp, Homo sapiens
ggttgcaggtaatgacagagtcaagctgttcccacagcaaagggctgttcctagcttccccgtctgccaaaattgacttcatttcttagatttgacatttttgaaccaatatgttcttctgg

SEQ ID NO: 6548 - DNA, 122 bp, Homo sapiens
ggctcccacactgctcagtgaccttgggcaagtcacattccctcagctactgcggcagttcgggccactcgttttgtgtatggttttttttcccctctgctaataatacctgccccagataa

SEQ ID NO: 6549 - DNA, 122 bp, Homo sapiens
caataacagtggctcagagtttggttccgtgtaaaggctgttgtcttattgcattaccagcgcccccccccaccaccccaccccctgactcacccactgggcatctgatggaaggagaggtt

SEQ ID NO: 6550 - DNA, 122 bp, Homo sapiens
attagtagccggctgagaaagttgctggaagttgtgcaactgctgcttaactttgaactgcgggattgttgtggctgctgcacctctggagacctgcccagcttcagcctcgaagaaggcgt

SEQ ID NO: 6551 - DNA, 122 bp, Homo sapiens
tccctggtcttggaagcacacaatcctaatttccccagcctacattctctcattaaggcacgttattttgttttggatctcagcacacagctgccaaatagaatgcttttcccctagtgtcc

SEQ ID NO: 6552 - DNA, 122 bp, Homo sapiens
ggtctcacctatgtgtcatctcctcagaaaggccccactaataacattacccttttatcacgctaccctattttctatcgatcacagtacttatctgtcttacgtacacttacctgcttatt

SEQ ID NO: 6553 - DNA, 122 bp, Homo sapiens
agaggagctgtgaagacttttccacagagttccagagtcttccaatgttacagtgaacatcggaatcatctaagttcttaacccacaccagtgtagccctagtaaatttaaaaagggagaga

SEQ ID NO: 6554 - DNA, 122 bp, Homo sapiens
caccccatggcacccaggatctggtctcggtggtccttccccgcaggcaggtgtcaggaccggcctaataaacatgtgtggcctcctcctctcgcttgctgggcgggcctttccgggggcgg

SEQ ID NO: 6555 - DNA, 122 bp, Homo sapiens
tgctccatgcttgctctggaagggcagagtgccgctcacctccttttagccaaagtaacgcgtgcactgaatggagagagaagacattctgggtgcactttggccatgccaaataacagcca

SEQ ID NO: 6556 - DNA, 122 bp, Homo sapiens
accacagtaaccgaagccacgcccagttcctgaaccacgtcggctcccctcccccaacaccgttcggaatccttgggtcaaccgcctccgtctccacagcaacggagtttcagagcgcgcgg

SEQ ID NO: 6557 - DNA, 122 bp, Homo sapiens
ggagacaaagctgggccgtggtcctgccgccgagcgccctgaccacctacgggaagttcgcgaaggagttagggagactgcaagaccgcctttcttggtcctggagaggtgaaggcttatgt

SEQ ID NO: 6558 - DNA, 122 bp, Homo sapiens
gcgccgggtagcgggggctgcaggaagcggctctgaggtcgggcaaggtgtgcgcagggccgggctccggcggagcaaggtcccgcccggttccctgaggtcggagggccacctgggacctc

SEQ ID NO: 6559 - DNA, 122 bp, Homo sapiens
ggagcaacggtggagggtgaggaacagcacactttaccaatgaaagtcgtgaccaggccacgttagtttagtggtaaaaataataacattaaagaaaatgtttacaacaggaatagaaaatg

SEQ ID NO: 6560 - DNA, 122 bp, Homo sapiens
gcccgccgtagccgggcctttgagcagtttttgggtcacctgcaggcagtgcctgagctgcgccatgccccggacctgcaggacttcttcgtgctgccggagctgcggcgggcacagagcct

SEQ ID NO: 6561 - DNA, 122 bp, Homo sapiens
tgtgcatcagggagctgcccggcgccctggcccacaccgccacacgcgtttctctcaacccgcagtttggctttgtggagggttccccatggactttgggctcaggtgacttgggctttgtt

SEQ ID NO: 6562 - DNA, 122 bp, Homo sapiens
cagcggggcgccccgctttctcacccggcccaaggccttcgtggtgtcggtgggcaaggacgccaccctcagctgccagatcgtgggtaatcccacgccacaggtgagctgggagaaggacc

SEQ ID NO: 6563 - DNA, 122 bp, Homo sapiens
cctgcgccgccgtgcgcgcgccctgccagaacaggaggggacgaggcgggcgcgcggcgccggcagcctagctcagccgggacaccgccctagtcccagcccagggggccgctctcgccggc

SEQ ID NO: 6564 - DNA, 122 bp, Homo sapiens
acctggtggtccgcctgcctcggcctcccagagtgctgggattacaggcgtaagccaccacgcctggccaagaaaatcaagatttacctggtttatgtgttgaccagctatacacagagaat

SEQ ID NO: 6565 - DNA, 122 bp, Homo sapiens
atcgaatgccaggtccagaagttaagaggcagccaggttcaggtctcagatggtgtaatccgagtcttatttcttctccacaggtattctgtagacagcttctttcatgttgccaggaaaaa

SEQ ID NO: 6566 - DNA, 122 bp, Homo sapiens
ggctccgagctcccgaaggcggaagcggggggcgcggcccggggctgggggcggggcctgcgacctcaccttcgcgcccactccgcagagccgcaggctgaggccgggaagggtcgggggcg

SEQ ID NO: 6567 - DNA, 122 bp, Homo sapiens
agcatccacagacactagggcgtgagaggtcaggactgcatggaggcagccctggctgtgcgcaagcagctgagaatctggagacctccagaagactccagagctacagttctgtgttcctg

SEQ ID NO: 6568 - DNA, 122 bp, Homo sapiens
tgtttccttatcccagagactgtagtgatcactttatgcatctgtctcccaattagactgcgattcccttgaggataagggctatgtattccaagtctttcttaacacccagcagcgcgtgc

SEQ ID NO: 6569 - DNA, 122 bp, Homo sapiens
tctgctaccaccttctggatggctttgcctaccagcccagagccccctgtcactagaatccgcatggatccctggggttcacccatgtcagttgcacctgtaatgtcaaacagtgggaggct

SEQ ID NO: 6570 - DNA, 122 bp, Homo sapiens
atgtgaattctcattgacatgtgtgggttcagttgacaggcgggtcgagtctgaagaatccggcgatgaagaagggaagaaacacagcagtggcatcgtggccgacctcagtgaacagagcc

SEQ ID NO: 6571 - DNA, 122 bp, Homo sapiens
caagactcaccttctcaccccagtcagtgccccagctgttcttgatggcccaaaagggaacgtcagagcctggggtgcagtgcagagcgcaaggatcagggtccttaattctccaggcagag

SEQ ID NO: 6572 - DNA, 122 bp, Homo sapiens
tgctgaaagccccgggctgtttcagaacccggtcagggtaaccgtcaggcctgcggtcaccgcgctgcaatcccaggaggccttgcgtcagcggccattatatcaataaggaagtacaatca

SEQ ID NO: 6573 - DNA, 122 bp, Homo sapiens
cagcaatgggcgcatcatcctcagcaagaccttctgcgggtcggcagcatatgcagcccccgaggtgctgcagagcatcccctaccagcccaaggtgtatgacatctggagcctgggcgtga

SEQ ID NO: 6574 - DNA, 122 bp, Homo sapiens
gactaggataagaagacaccacacacccggacatcagcagagcatgtccagcacccagcacgcaaaggcctcctgcagctcatgaacccagagaagcagccgcctcacaccaccctgccccc

SEQ ID NO: 6575 - DNA, 122 bp, Homo sapiens
gctgggagcctgggaagcaggaggccagagggtggccccttcggttaagtgtctggggagcggcccgggagcccagaggggtcgtcgggggaagcgcggggcacgtgctcgcaggtgatgag

SEQ ID NO: 6576 - DNA, 122 bp, Homo sapiens
ggaacgcgggcgcctaagccatggcttcctcagggagagctgagctctgggcgctgaacccgctgcgcttgctgtggctcacgccggccgccgccttcctgctgaccctgctgttgcagctt

SEQ ID NO: 6577 - DNA, 122 bp, Homo sapiens
tcccacttcctgacttgtccttcacttcatatttactgggagcctgcaaacctgtgtcagcgctggcctgacggaccctgctgtgtggtaggggcagtttattaagaagtacatttggtaag

SEQ ID NO: 6578 - DNA, 122 bp, Homo sapiens
atgcaccctagatgtggatgtcatctcctgccccgccccagcccgactcctaggttgacacgtgcgagtataacgcatgctaaagaatgaagacaaacccaaaggcttatgatgaaatatgg

SEQ ID NO: 6579 - DNA, 122 bp, Homo sapiens
gagcccaagttcatcccagagcctgaaggagacccgaagaagcagcttagcggggaatggcgttcatgctagtcacaccaatgtccaaagctgactggtgggtcaaatttgcagatgcgctg

SEQ ID NO: 6580 - DNA, 122 bp, Homo sapiens
ctcccaggcaacgcgccgcgctcggttcagggctccgcccagggactcactccgcgtcagcgcgcgcccacctaggtgggctggcaaccagccaccagtttccaactctttctccaacaggg

SEQ ID NO: 6581 - DNA, 122 bp, Homo sapiens
agggtctgggttgctcgttcaactcaggaacttccccagattcctgagttttcctctagccgaggtcaggggcagccaagggaagggtcagccagctcatccagacctcgctctgcaacaaa

SEQ ID NO: 6582 - DNA, 122 bp, Homo sapiens
ccgaatgaggaaaacagatccatttgaaatatgtatgttttcggcttttgtttctgctgtcgttggcagtttcgcgtaatttttaatttctcgtgtgactttttttgtgtctctctgtcttt

SEQ ID NO: 6583 - DNA, 122 bp, Homo sapiens
atgcccagatttcccacccattcctacaggcagaccggctcgccctctccctccttcccgcgtcgtttactggtcagtagaagattgacatgtcatctggccaataggttggctcctctatg

SEQ ID NO: 6584 - DNA, 122 bp, Homo sapiens
acaaaagccaaggtttggctatccagcgagcctgtcccccaattcacagtaaaccaccgtcggccaaaggagatggcgtgtctactctctgctaaaataacaagatgaagtacctgacaagg

SEQ ID NO: 6585 - DNA, 122 bp, Homo sapiens
ttgagaatttagaattgatagtaggacttggtgattaaccagatgtgcgaagtaaaacagcggaaggggtcaaaaataaatcttaaaagtttctggcttggatatgtgtatggatttaatta

SEQ ID NO: 6586 - DNA, 122 bp, Homo sapiens
ttcctcctcctggtttgatgagcaattctgttctataacgctctgggatgaaacaactcccgaggtaggcttcccagggctcggggaggaggtggtttaacaatgacagtgaggggagtcct

SEQ ID NO: 6587 - DNA, 122 bp, Homo sapiens
ggaagatcacacagctagtaagccacagggtcaagtttaaaccagatgtgttagcaccaccgcccacattcttggacctgcccttacatctcctactgtactgagtgcttatcaaaatcatt

SEQ ID NO: 6588 - DNA, 122 bp, Homo sapiens
cactgggggtcccaccaggccagggaggctgggctggggctgctgggaagcctcatcctgcgtggaatgcttccgggcccgtgcattggccgctgaggcatccgctccctgaccctgagcag

SEQ ID NO: 6589 - DNA, 122 bp, Homo sapiens
acaggcaaccacagagaagccggactgggccacgtctaggaagaggtaggaagggatcggcgcatcgtttctccaatgggaaaggatgtgtttgcgggccaataagtagccgagaataacac

SEQ ID NO: 6590 - DNA, 122 bp, Homo sapiens
gtgtgtttgtgtcagtctgtcagtcccaccggggaccgggctcgcttaccgagagagaagcgctaacttctgctccagcatcatctccagcttctggccctgtttggagatccagtggtcca

SEQ ID NO: 6591 - DNA, 122 bp, Homo sapiens
cttcatgggtactaggggacgtcgtgtggcattctgagtctgatccttcctgaaacaacgcgaatgaagaactgcacacaactcaacagagaagagagctgccctagaaagctttgggttaa

SEQ ID NO: 6592 - DNA, 122 bp, Homo sapiens
ccgagaggccctacgtgccgccgccgccgccgccccccgacggcctggaccgccgctactcgcacagtctgtacagcgagggcacccccggcttcgagcaggcctaccctgaccccggtccc

SEQ ID NO: 6593 - DNA, 122 bp, Homo sapiens
acaaaaccaaccattactccaaaaaaagggcactcaccgagccgttgatgcacgggacatcgtcataatgaagtgccgtcccgctggggtgggcatagccgttggaggtgccccctagatat

SEQ ID NO: 6594 - DNA, 122 bp, Homo sapiens
acgacttctccttgaaaaccacgactcctgacacagtagttccgcctcctcagaggcccccgggatgaagtgacccagcagaaataccagagaccggagacggaatggcccagggtcagcct

SEQ ID NO: 6595 - DNA, 122 bp, Homo sapiens
cccctccacctggtcctcagccctggtcccgcagtttgtcatcccgcagtttgtcagcatcgatgtgggactgggagaggaaggatattgccagttatggttgaatgtcattgtcaggggag

SEQ ID NO: 6596 - DNA, 122 bp, Homo sapiens
gcgcacacgcggggagggcggggccatggagaaggcactgcagggagcaccaggcagagccgggctgaggccggccggcactagggcgcgaggccccaccccaagccggcctctcctccaca

SEQ ID NO: 6597 - DNA, 122 bp, Homo sapiens
ggtggagtttgcctgcacctttgggacaaccatgacttttatcccagactccagccaccacgggatgaagtcacagatgctgcggcacagcccacatctgataacaatagacaagctgaccg

SEQ ID NO: 6598 - DNA, 122 bp, Homo sapiens
gcgccatgacgggccgctgccgctttctgccgccgcgcttggcgccccgggcctccgcaccgcctagtctccggcggccgctgctaccgccgccatcctccggctcccacggcggctggcgg

SEQ ID NO: 6599 - DNA, 122 bp, Homo sapiens
gcgcgtgctcggtgaatgaacatagcgtgggagaattgtgtgtgtgtggtgcccacgtggcgcgtgctcggtgaatgaacacagcgtgggaatgctccctgagtgaacacagcgtgggagag

SEQ ID NO: 6600 - DNA, 122 bp, Homo sapiens
tttggtaacacgtggacacacctaaggcacacagtatacttctctccactggtcattctgcgttgtgaactagtctcagtctagctagtggtctccttgcttctagaatctcacagagattt

SEQ ID NO: 6601 - DNA, 122 bp, Homo sapiens
tgcatctgacaaacacagcccaatactcaatccagtctgagttgctgcgcaattccttaacgctctaggcttctgggcttcctctggttgcattcctaaacataactgacaaacttctcccc

SEQ ID NO: 6602 - DNA, 122 bp, Homo sapiens
ggctctcagaaatagagccagaatcccaatatggcaaaacctgggactggtggaaacctccgttgtggtgtggcctgcgcttgacaggagcatcccgcattgcaaggggagcgtccagcgag

SEQ ID NO: 6603 - DNA, 122 bp, Homo sapiens
gggccgggtgtccggcctcggaggccgcctggctggcgtctgcgccctctcggagagggccggcaccttgggcagcatctctcttaacagtttagtgtgtagttgagaagatgagtgcagag

SEQ ID NO: 6604 - DNA, 122 bp, Homo sapiens
ggcccggccctcacagccttggcaggccaaggtcagaatgattggagttgggggatgggacgggggcatccctccaggaccagctctccaggaggcccacattctttctgcgggaaccactc

SEQ ID NO: 6605 - DNA, 122 bp, Homo sapiens
ctcattcattcattcaatatacattgagatctgttctatcccagtcactctgctagatgccggggacataatagcaaacagacagataaggccccagccaccatggagcttacatttccact

SEQ ID NO: 6606 - DNA, 122 bp, Homo sapiens
gctctcctgctcttccaagccttgctgcgtgttgcccccagggttttctgagatctgggacgaagagagtgatgtgcaaggttctgggtcccggtgcaggagtgaggggtacggctgtcgag

SEQ ID NO: 6607 - DNA, 122 bp, Homo sapiens
gagagcatgatattacgtttaatatcgcagtagctgtacacccacccggtgatattgatccgaatatcatctccagggggtggcgtatgaagttactcccaagatagcactgggtgtgcatc

SEQ ID NO: 6608 - DNA, 122 bp, Homo sapiens
gacccccagccgcggaaatccattcctagttccaccgtttagagcctctcctggggctgccgcgaaaattgggccggttggggtaacatctaacctggggtcccgcgaaagagcccatcagt

SEQ ID NO: 6609 - DNA, 122 bp, Homo sapiens
aggccggaaatgcccaactaccagcaagcagagcatgattacaacctcccaaagaaagttcggacactgcatccatacctgattcttttgtgatctagaagggcacccagagttgtgataga

SEQ ID NO: 6610 - DNA, 122 bp, Homo sapiens
ccggctctccggctctccacagaggggcccgtattgcaggcctgcggggagggctgggcccgccgagtttgcacctttttacccggcatctgtccctgggatcaggagagccgggaggctgg

SEQ ID NO: 6611 - DNA, 122 bp, Homo sapiens
gaagagcgcctctgcccagccgcgaccccgtctgggaactgaggagtgtctttgccccgccgccaccctgtctgggaggtaaggagcatctctgaccggccgccccgtctgagaagtgagga

SEQ ID NO: 6612 - DNA, 122 bp, Homo sapiens
ctcctccccccaccccggggcggccgcggccaggccccgcctcaccagcagttgagcttgcgcacgctgtgcagctccgaggccttggcccgggtcagaaccatcttccgcgtcagcttcat

SEQ ID NO: 6613 - DNA, 122 bp, Homo sapiens
gcgtgcctgagcgacccctccttgggcacccactgctacgtgcggatcaaggtgaagggccgcgcgggcctggcgggagcgggagggagcgtgaccgccgcgagggtggggggctccgggct

SEQ ID NO: 6614 - DNA, 122 bp, Homo sapiens
ggttcatctcactagggagtgccagacagtgggcgcagctcagtgggtgcatgcaacgtgcgcgagctgaagcacggcaaggcattgcctcacttgggaagcgcaaggggtcagggagttcc

SEQ ID NO: 6615 - DNA, 122 bp, Homo sapiens
cagctgagcatcacggaaactagtcagtgtctatcctaaaaacagctggacccctgctggcgagctcacctgtattctaggagcatggggtctgattcccttcctcagtgaatcaggaaagc

SEQ ID NO: 6616 - DNA, 122 bp, Homo sapiens
cgaaaagcagagctggagcagtggaccacggggacccacaggcaccaggatcagccttcccgtgccacccccatgccactcactgagcccctccctgctgtctccaccttcatttctgatgg

SEQ ID NO: 6617 - DNA, 122 bp, Homo sapiens
ccaagacgcaccccccaacctgacggcttctctctttacacacagtgaagttcaagtcctcggcgaccccttccccgttgttaacccttcgtacacttcttcgtttgtcctcacctgcccgg

SEQ ID NO: 6618 - DNA, 122 bp, Homo sapiens
agaacgtgtgtgttgccataggggcttggtggcaacctcagttataggcctggacagacacgggtagttacaatgcaagccctctcccctcccctttctgtccccagtctagtagttcagaa

SEQ ID NO: 6619 - DNA, 122 bp, Homo sapiens
ttgggaggccgaggcaggccgttcacaaggtcaggagatcaagaccatcctggcgaacatcgtgaaaccccattctactaaaaatacaaaaaattagccgggtgtggtggtgggcacctgta

SEQ ID NO: 6620 - DNA, 122 bp, Homo sapiens
atgcgaccacttgcattgctatcactctggtacgagcctccatcatctctgccagggtatcgccttgtgaagtttatgcttatctttgatggaaatggataatgctaaagtatattttacca

SEQ ID NO: 6621 - DNA, 122 bp, Homo sapiens
agttttccaaacctccttccccaccctatctaaagtgttccttacctttcatgggcccagcgagggtagaattcagaatagagagttatactcctgcatacatgctctccctctcattgaaa

SEQ ID NO: 6622 - DNA, 122 bp, Homo sapiens
cacaaacgccttgcaaagaattctgaattttagaagctctttgcagaacccccttcagcccgctccaagctgccttgggtccctttctaggctgtcagacttcgccttcctttcctccttgt

SEQ ID NO: 6623 - DNA, 122 bp, Homo sapiens
acacgataacctcacctgaagtgttcccaccccgtaaatgcattgtcaccctgtgtcttgcgtgttttttttatgggcctgtgatcagccacccactcccccttctccctacctttgcatat

SEQ ID NO: 6624 - DNA, 122 bp, Homo sapiens
gacaatttttcggatgtggctgcagccagcagaccagacctgggcagcaatggatgctgccgcgggtgcacgagctgctgttcagtgccctcctccctccgctggccagtggtgggatactc

SEQ ID NO: 6625 - DNA, 122 bp, Homo sapiens
gttctgaccccctgcacctgccacagggcgacccggcagaagaagaccatgaagctgtcccgggccctctctgacctggtgaagtacaccaagtccgtggccacccacgacatagagatgga

SEQ ID NO: 6626 - DNA, 122 bp, Homo sapiens
agtgccatacacagaacaggagtcacactctgcggcctgccgaccctgcggagagaccagcggcccacgatgcccgttccctgctcctagcctgcccactcccttgggggccccccagcagg

SEQ ID NO: 6627 - DNA, 122 bp, Homo sapiens
gctacgctcgttgggaggaggacggggcgcctcctgcccacgaggaaccagaggtttcagcggggacgacccctgcccagggcgccctctgcccagcggacccacttcccgaggcaggcgaa

SEQ ID NO: 6628 - DNA, 122 bp, Homo sapiens
tgatccccatgtgaaaggctacagttctgggcatgctcagggcccaccgaaaacagagtccgcccaggcaccctctgcctgtgcaagggaacaggtgtcacaatcaagtgcacaagctgctc

SEQ ID NO: 6629 - DNA, 122 bp, Homo sapiens
gaagaccaacgccggcatccggcgcccggagaagccgccctattcctacatcgcgctcatcgtcatggccatccagagttcacccaccaagcgcctgacgctgagcgagatctaccagttcc

SEQ ID NO: 6630 - DNA, 122 bp, Homo sapiens
gttcagccccccggcccaggtggagttagatcacagctggggggatcctggggcagagctcggggccacatgcccccttcccacacaggtggcccattgttcccacgggagactgcgctgaa

SEQ ID NO: 6631 - DNA, 122 bp, Homo sapiens
gcttccccaagaacgtgggcaaccccctgcttggaagatgaaagagaaagtcctcccgcccgaagcccaggatcggagtgaggtgtggggtttgttgctttactacccaaagggaggcatta

SEQ ID NO: 6632 - DNA, 122 bp, Homo sapiens
tcctcccgttccctgggggtgtgagtcaggcatcctcccgttccctggtggtgtgagtcccgcatcctcccgttccctgggggtgtgagtcccgcatccccccatgctccaggggtgtgagt

SEQ ID NO: 6633 - DNA, 122 bp, Homo sapiens
agccggacgctggtgggcactgaagctgcaggtctggagggagtccgaggagcgaggctgcgtgggattactgctggtgctagggcaggcacctgccatctggacgggagtggaaggaagtc

SEQ ID NO: 6634 - DNA, 122 bp, Homo sapiens
tcctggagcctggctccctgtggtaagccaggcttgcagaggtggctcctgacatcaatccgcgggcatgtggctgctgcgggaggcacacactggctcaggacaaagggcaagggctcacg

SEQ ID NO: 6635 - DNA, 122 bp, Homo sapiens
ttgtccagccttggcacaggccagtagtcccagctgctcaggagggcaacgcaggaagatcgcttcagcccagaatttggaggccagcctgtgcaacatagcatgaccctgactctattaaa

SEQ ID NO: 6636 - DNA, 122 bp, Homo sapiens
gctggaaagatcatgatggtggcccagccttgggatgtcatgtgggactgtatcctagggcgatccagttgtgcagccttctgaccatcagccaagggaagcaggcctctgatggagcaggc

SEQ ID NO: 6637 - DNA, 122 bp, Homo sapiens
cagccaaataaatgccacttcagtaagttattgctgcctggggccagctttaacttgcatcgtcaacttttttcctgtctaaagttctactgtaagttttgcattcataaaccatattccct

SEQ ID NO: 6638 - DNA, 122 bp, Homo sapiens
cccgctcttcggtgtggcttccgaacgcaatggcgccatttcatcgaggggaaggctgagcgcctttaatgaggtgcgcaggactctaaagatccaagctcacaaaacactccaaatccacc

SEQ ID NO: 6639 - DNA, 122 bp, Homo sapiens
acccagatcccattagcaaagtgcagccgaagagtcaagctaagttcactgtgtcccttgcggcattgccttcctcagtgctggctgccatcatacaaccccatagcttgtgtggcttaaac

SEQ ID NO: 6640 - DNA, 122 bp, Homo sapiens
tgggctgtggaaacgctgcctctgtggaagtctctcctcgcgggggtggacgggtcgctgcgcgcccagcgttcttctgcggttctcacagcccgccgccgccgccgcctcggggacctttg

SEQ ID NO: 6641 - DNA, 122 bp, Homo sapiens
ccgtgtccctcaggcccacaagaacacagcctgcagcagggagggagccgggggctgagccggagccccagctctgtgatctgcgatctggggaatcttggacatatccggacttcagtttt

SEQ ID NO: 6642 - DNA, 122 bp, Homo sapiens
caccagactaactgaaatctgaaaaacgtgaacaatgcaacaaactgcaaaaactacaaccgcatgggaagtttctgcactgcattctaggtgtttaggaagacaacaaaataaatatccca

SEQ ID NO: 6643 - DNA, 122 bp, Homo sapiens
cccaggctcagctgttttcctagccattggcttcaagacattgggaaatcttggcctagccggattttaacagtgctcaccttgctttgcaaagcgtttcttacgcctcattttggtccggt

SEQ ID NO: 6644 - DNA, 122 bp, Homo sapiens
cccttgttccttgcctcccggacaccttgacatcaggggtcacagtgatttccgaggttgcggcattcggatctcctgtctgtttaccaggacagatcgattactgattgattaacagagac

SEQ ID NO: 6645 - DNA, 122 bp, Homo sapiens
ccacaaggaaagaccaatgcagcagaaccgtccctgaagcagcgaaacgtggtcaggagccgtccgtcagtgagagccatccctttggaagttcttcacaggacgatacgtcttagaatttt

SEQ ID NO: 6646 - DNA, 122 bp, Homo sapiens
gaacgtgattgaggtgccccaggaaactaccttgctatgcaaagtatggtccccaacctgcggcattggaaccttcattttaacaagatccccagatcctgaagcactgccttagagtataa

SEQ ID NO: 6647 - DNA, 122 bp, Homo sapiens
aagccattgctagaactctggccttttaaattaacagctgagagctcttacctattgttgcggtaatagtgattctgcagggtgtagggtatgcactgggggtttaaccgtttgctgtcagc

SEQ ID NO: 6648 - DNA, 122 bp, Homo sapiens
ctaatgtccaaaagcattcctaataccaagcataaagaatgtttcttaattcaccagactcgccaataagatagtgacatacactaagtcttcctggttatttaaaaaaggaggggaggggg

SEQ ID NO: 6649 - DNA, 122 bp, Homo sapiens
cggcgagggccgccactgagcaccggctcccttccaggagaggcctcggccccagtttgccgcctcagcccccatgacagccccgaaccccatcacgggtgaggacgagccctacttccctg

SEQ ID NO: 6650 - DNA, 122 bp, Homo sapiens
gcgtctccctgtgagttctgggcggctgtggggcggccgctgcctgccctgggatacagacgctgctggccgcctgccgttctcattcttgaagttgcaagcccgggccgaggctgctgggc

SEQ ID NO: 6651 - DNA, 122 bp, Homo sapiens
atccatcagcacctgcctcatcaatcaggtgtgtcagtcactctctgatgacacaccctgcgtccaagaacaaacgtcactctttcttccctgaattggaaatatctctctcacacaaaaga

SEQ ID NO: 6652 - DNA, 122 bp, Homo sapiens
cacgctcggagaagggtccttggcagccgggggctgggagcccaggtctcctggggcccccgctggcgcgggctcggtagccatgggctcctcggctctatccctgtttctgctggcctcct

SEQ ID NO: 6653 - DNA, 122 bp, Homo sapiens
gccttgtgcatccccatggcctgaccccgggaacagtcagaggaaggggtcccgccctcccgccagaggcctggacccaagggaacggcagtcagagactacagtccagacgtttgtgtcta

SEQ ID NO: 6654 - DNA, 122 bp, Homo sapiens
agttggagagaaattagatttatttacacgctgttctgttgctgatgaagcacaagctatcgggaagctttctcattaaccctcgtttacagggtgtgtgctcttttgtgcctctacgaacc

SEQ ID NO: 6655 - DNA, 122 bp, Homo sapiens
tttcacaatctgagaagtctcaggcagcaagacacctccattttccagtctgccaaccagcgcagactcttcacatggtcacagagcagcactgcacaagccaaggtcctggaagtgcttcc

SEQ ID NO: 6656 - DNA, 122 bp, Homo sapiens
actttgagaaacgtgttcactcatgacgctggcaaaagagcttcacttgaaagacagatccgcaaaaatgcatcagagatagaatatgggaccctgcctagggagaggtgagtcacctaagc

SEQ ID NO: 6657 - DNA, 122 bp, Homo sapiens
acttaggttcacgcgccgcttccgcctcccccggccccgccccgaccccgccccggcgttcgccccacgcctcggccctccccgtacagccccgcgcttagggccactccccgcgcctcgcg

SEQ ID NO: 6658 - DNA, 122 bp, Homo sapiens
agagccacgccttcatccccgagtcagtgcccaattactgttcgaagagccctgaggacgcggtcgggattggtcatcccgtcgcccgacctggccgcaacaagttagggtgagtggcagtt

SEQ ID NO: 6659 - DNA, 122 bp, Homo sapiens
cgcgtccgtcccctgccccagtccttcaacaggtccccacagacctcaggataagatgaacgcggaattcagggcctggtctcaaccgccctctcccttttcctctcacttagacgaccctg

SEQ ID NO: 6660 - DNA, 122 bp, Homo sapiens
gcccgcagcgcccgcacatgctgtttaccgcggccgcggggagtgctggaggctcaggtgcgccccgggcgctcgctccgctcgcggctccgcggcgccggggatgtcccccttgccccagc

SEQ ID NO: 6661 - DNA, 122 bp, Homo sapiens
ctcagatacagtgtttttgtaaaaaagatcttcataacctcaaaaagtgagtcatcaatacgaggcttttagaaacgattccaggatgacagtagaaatacatgtgtacagccaggcacggt

SEQ ID NO: 6662 - DNA, 122 bp, Homo sapiens
gggcgtcttgttggtagcttgaaatcagccatgctaggagtatgccttccccccccaccccgccccactggaacaccactaggggctgaacaagaggtaactgataatcctttaaaaatggt

SEQ ID NO: 6663 - DNA, 122 bp, Homo sapiens
ggcccgcgcgcccagtgagcctgcgcggagggcgggggccgagcgtcgcggggaggggctcgcggcgcctgcgcagagcggcggcttctctcgcgaggacggacgccattatcgcatctccc

SEQ ID NO: 6664 - DNA, 122 bp, Homo sapiens
ccgccgcccgcgggggcaaaatctgggggcgagggggacccgggcgctgaggccgctgcccgcctatggggacgcggctgggaccgtggcccggctgcgggtttcagtagcgacatttacgc

SEQ ID NO: 6665 - DNA, 122 bp, Homo sapiens
tggagctccacgagccggtgctgcacacggcagaatcccctcgacgtgggcccgcagagccggggacagagagagtctgagctctgttaacagtggtgctgacttggaaggtgcctcgtgtg

SEQ ID NO: 6666 - DNA, 122 bp, Homo sapiens
gcttaccctaaaatgaaaactcatccaaatcagacgcagttgagaatcccactcctcagacgcacttgccacaaggcgaaggctcagcaaccccacagggcagtggctgccatggcgcacca

SEQ ID NO: 6667 - DNA, 122 bp, Homo sapiens
gaacacacactatgtgccagcactgttctgagccctgaggcaggagagatgacagttcagcggggacacagccagataactaaatcccctccaaagtctgagggttacaaagggaatcacag

SEQ ID NO: 6668 - DNA, 122 bp, Homo sapiens
ggaggagggggttgcagtgagccgagattgcgccactgcacttcagcctggatgacagagcgaggtcctgtctcaagaaacaaacaaaaaccatgtttgggaatacatgtgaagagcgaggg

SEQ ID NO: 6669 - DNA, 122 bp, Homo sapiens
taatattttcagattttatggctggctttggggaaaaggaattgtggtttctataacccacgttggggaacagggattctagtttcttatagctagcctcaggggaaaatgagactgagagg

SEQ ID NO: 6670 - DNA, 122 bp, Homo sapiens
catagtcttcacgactaccctgttgtgaaggcattattgttcccatttgaaatgtgaggacgctgaggctctcggggagtgtgtatgtatccgctatgcaaagagattgagagatctttgta

SEQ ID NO: 6671 - DNA, 122 bp, Homo sapiens
tgcagactaacaactccagggaatttatcagggtaagtggaagagccatgcctgcctttacgtggagccatctgtcctgccacactcacagcttgcatttccatctcttgcaaaacagctcc

SEQ ID NO: 6672 - DNA, 122 bp, Homo sapiens
gcggcgagggggtggctggacttcctcgggagcgcagatctgtgtcctcgcggagatcatcgttctgcacagaggaagtctgtgacgtgcgctgccacccgttgctcctggcagcagtgagg

SEQ ID NO: 6673 - DNA, 122 bp, Homo sapiens
ggataaggggggactgctctgcctcacagggtcattggggggcttaaacgggagaatgcacgcaagcacttagcacagcgcctggatgacagccaatgtttggtaatcctgaaaataacagc

SEQ ID NO: 6674 - DNA, 122 bp, Homo sapiens
tcgcttccaccgccgccgccgccccccggttacctcggccccagccgccgccgtggccgccgctgccgctgttagggactctcagtctcagacacttgcttcgctgagaagtcgctgccagc

SEQ ID NO: 6675 - DNA, 122 bp, Homo sapiens
aaaattcctcgagtggtagagatgcctcagctaggatgacagcgtggggacggccggcggcgtcccctgccccaggccgcggtggcggcgccgcgaccccgccctctcgcgcctgtccttcc

SEQ ID NO: 6676 - DNA, 122 bp, Homo sapiens
cctgcaccctgaggagttatcttgcgttccctgcaggggcacctcactgtgagatggctacgttagagaatcttctcaggaagggctcttttggaaaaacaatgtaaagtgtaaaatactct

SEQ ID NO: 6677 - DNA, 122 bp, Homo sapiens
ttcttatatatggttggctttctttcaaggtcaattgcacagtctgttctttgggggcaccgcatagccctatagcatgcttaaaatgcataaagcttagaggaagactagttctctggaga

SEQ ID NO: 6678 - DNA, 122 bp, Homo sapiens
gtcccactgttcgtgattttaatctgcttttgtggcgcaggaagaaagaaaattaattttcgcccgtctgtgtgtagggagcatttcagtggaaacccggtttgaaatgcatgttctgttga

SEQ ID NO: 6679 - DNA, 122 bp, Homo sapiens
tggagctgcttccggagaagtggaggatcctctggccaacggcctgaggagagcggggcacggggtctctttagcttttacaagttttaggattttttcaagcagggatcaatcccgtggcc

SEQ ID NO: 6680 - DNA, 122 bp, Homo sapiens
ctgtctcaaaaaaaaaaaaaaaaaaaaaaaaaaaggcaactcagtaggcttgttcctctacgctagtgattcagtgctgtgctggcacctgctggtcacctgtggtgcagcagccctggtcc

SEQ ID NO: 6681 - DNA, 122 bp, Homo sapiens
ggactgagacacaggaagggtctggagccttctccctcacaactccaagatgagatgcaccggggcttggggtcaggtgggggaggggagggacaacagcagaagaggaaaatgaggaggag

SEQ ID NO: 6682 - DNA, 122 bp, Homo sapiens
acagaggatgacgatgaaggccgaggccacctggcgggaggtcgtctcctgcgtttccagcgtctccttggtataattatagtgttcctggaccttgttggggttcaggtactccgagtaca

SEQ ID NO: 6683 - DNA, 122 bp, Homo sapiens
gtttcctctgttctcctgggcttaaggagaggccatctctctcctgtgtctacggtgagccgggaagaatcggctccctgcactggtctgcccggcctaggccctcctcgcccatcacgcac

SEQ ID NO: 6684 - DNA, 122 bp, Homo sapiens
ctggcaggtgctctaatgtgggcccacaggccacgcggcggactggcaggtactctaatgcgggcccacaggccacatagtggactgcgttttcatctccaggatccagcagcttcctgcgt

SEQ ID NO: 6685 - DNA, 122 bp, Homo sapiens
ccctgggttgatggggagcgctcactgtaaacatgtccttacctctgtaataggcggaggcggttgcagctcggccagaggcaatgcagggagagagaaagccaactccgccgacctggaac

SEQ ID NO: 6686 - DNA, 122 bp, Homo sapiens
attcatcaggactagtctgatgcccaacaatatgcatctttaaaattacccagaggaggccgggcgcagtggctcacgcttgtaatcccagcactctgggaggctgaggcaggcggatcacg

SEQ ID NO: 6687 - DNA, 122 bp, Homo sapiens
cttctccgggcgcatccagggaactcgctcggtcctccttaagcggggaagctcggaaagcgtctccccgactccgcccccagggttgcctttcccttagaaggccaagccccaagcccagc

SEQ ID NO: 6688 - DNA, 122 bp, Homo sapiens
ggctccccagggtgagcctttcctggtccgactcactggcatcaccatgaggaggcctggcggcagctctgccctgtgcacaccgtggtaacctggcaacaggaacatttgccaccctgcaa

SEQ ID NO: 6689 - DNA, 122 bp, Homo sapiens
accacagtgactgcggctggctagggacctggggtctgtgctgcgaggactcagacgcagcgcgccaggttgtgcagccgctgtaaacaaggcgcccaggggctgcacgctctgggaggatc

SEQ ID NO: 6690 - DNA, 122 bp, Homo sapiens
agggcggccagtccatcgagccagcagagggcgctgaaacgcggcccagtgaactagggacgtccagggccagcgctgaccactggtggtgcccgagctcccagggctctgatgcccggctg

SEQ ID NO: 6691 - DNA, 122 bp, Homo sapiens
gagtacagggctgctggcggtcagtgatgagatcctcgaggtcaatggcattgaagtagccgggaagaccttggaccaagtgacggacatgatggttgccaacagccataacctcattgtca

SEQ ID NO: 6692 - DNA, 122 bp, Homo sapiens
ccacgtgcagagctggtttggcctccacaagaccctgcagcctctggtgaagcgggtctgcgacactgaccgcctggcctgcagcaagacctgcttgaactcggctgacattggcttcgtca

SEQ ID NO: 6693 - DNA, 122 bp, Homo sapiens
tccgggcatgatctgagtagtacggagtagtcaagaccaacaccacccacattctgaccacgctataccttgtaaaggagcttgaggggcaaaaccatgactgctggtcagactgcaagcca

SEQ ID NO: 6694 - DNA, 122 bp, Homo sapiens
cacatctaggggatccggcgcaaggaggggcacccctagcacatctgggttactccatcgcgccagccggtgtctgcagcctgaaaatcgcgtctctggtcttgttccccagcgagccgttc

SEQ ID NO: 6695 - DNA, 122 bp, Homo sapiens
ctgtggcaccaaccagtggtgctcattctattgtttaaaaatggccttcttggctgggcgcggtggctcactcctgtaatcccagcactttggtaggccgaggtggacggatcacccgaggt

SEQ ID NO: 6696 - DNA, 122 bp, Homo sapiens
cggcgccagggccggcaaaggaaacgcccaggcctccgggcaggccgatggtgggccgcccggctccgggagcccgagtccctctcgggtttcagcagcggcaaatctcagcgagcccaggg

SEQ ID NO: 6697 - DNA, 122 bp, Homo sapiens
aaggcctggccagtaagcgcgcctctttggcccgaatcaacatggaaacctaaggaaaaacgtctgacctgcggaggtagtttgggtggctacttggtgttggacttggctaaataaatacc

SEQ ID NO: 6698 - DNA, 122 bp, Homo sapiens
agctatgctctcagctgttggtgaaaacttccctggcaccactcgggacctgggcccctccgcaagcactgcgttgtagtgaccatggtttttcctgtgcctgtggttcctgtgtgtgtccc

SEQ ID NO: 6699 - DNA, 122 bp, Homo sapiens
tgaggcggggcgcctgccaccattcgtgattttccgtgactcaccctctcaacagtgtcccgtcagcccccgctttctggaattaagatgattttccatgggcattatagtcagaggaggtt

SEQ ID NO: 6700 - DNA, 122 bp, Homo sapiens
gcttcgaggtggtgggtggtgaggacgaaccccttgcggtcaatgctgcccccgccgcgccggccatatcaacaccccttcccgggaagggtggtgctcgccctgcctccttcccaaggtgg

SEQ ID NO: 6701 - DNA, 122 bp, Homo sapiens
aatacactgcacatacgacaacaaaggacagtagtcctcaagagatggcaaacaggtgaacggggccctacagcttcccagctgctcccctgagtttcccaaccatggcccagaaggaggta

SEQ ID NO: 6702 - DNA, 122 bp, Homo sapiens
tatagaggacagaggacttgcctcattaatttacaagttttcaaattgagagaaaatcagcggagctacaattgaagtgctacacccaagaaaactcatccacacctggaactcctatacct

SEQ ID NO: 6703 - DNA, 122 bp, Homo sapiens
gtatgttctgcccgcactccagtgggcggtcttgtgcacagcccacttgggaggcctcggcgctcaggtgtggtaagagctgggcggtgcagagcacagagaaaggacatctgcgaggaaag

SEQ ID NO: 6704 - DNA, 122 bp, Homo sapiens
caggctcgggaaggagtcggcgagggccgctcggctgcgtcctggggctccagtagctggcgcgggctggggtgggctgggctggcctgggaccgcctcgatgggacaggctcgggtttccc

SEQ ID NO: 6705 - DNA, 122 bp, Homo sapiens
ggcctggacaccgatactaggctcttctgtacagccctccagcaataccttccggggccccgcttgctgcctcctggggctcagcttccctgctgggggcaggcatgtcagagcgcggatgc

SEQ ID NO: 6706 - DNA, 122 bp, Homo sapiens
cctcccgcggaaaggcgggcgcgaggcatcctgggagtcgcagtcggcggtcgactcacccgccctcacagaggaggtggggacgccatgaagaactacagctcccagggagccgcgcgcgg

SEQ ID NO: 6707 - DNA, 122 bp, Homo sapiens
acccgagccctgttccaggcggaactggattcgggcagttctcaggggtcgcgctcccagcgccctcgtgttccagagaggggagtctgagcctccagctccaagatttggaggtccgtggt

SEQ ID NO: 6708 - DNA, 122 bp, Homo sapiens
tatgaattctgtattcaaaaaactagatagggttattagtggacaaacaaattcaggagccgtggctgttataagtactttgacaacttcacatagtaaagattctccagatattttttatc

SEQ ID NO: 6709 - DNA, 122 bp, Homo sapiens
tggacacagcgtccctgaaccaagggggcagtgctctcgtcacagagcagagggccgcaccgcccgtgtttgtctttcccattgcagcttctcaggccctaggccaggcctcgttcccatca

SEQ ID NO: 6710 - DNA, 122 bp, Homo sapiens
gcttctgagaatctctgccctcgggcctgccacgtcagctggctgctcttcctggccccacgtgttcccacggagcccaccagtatgggggttctctccagggaggtgtgcctggctttctg

SEQ ID NO: 6711 - DNA, 122 bp, Homo sapiens
gtggcctcatgcataccaatggtttttgtcatttatggctgggcaagatttatgactcggcgccccaaagctgtaaacagagcacaaaacagcaaacacttgctccttatggcatattgcag

SEQ ID NO: 6712 - DNA, 122 bp, Homo sapiens
cttccaagtgtgtgcagagtcacatgcgggtgatcctaggcgtgcatccgcctgtgagcacgtgggagagtgcgccacccgtgtgtgtggtccgtgagcatccaccaggtgcatacacacca

SEQ ID NO: 6713 - DNA, 122 bp, Homo sapiens
agctgggttctgcaagccactgctgccccgtaaaccagcattgttccacctgaacttaaccgtgaccttggccctggggccacctgcctgagcctgtcaaggagacagggttgggctgggca

SEQ ID NO: 6714 - DNA, 122 bp, Homo sapiens
aagtacatggacgtgtcaggcctggcgagcagcagcgtaccggccaacgaggtgccagcgcgagccaaggaggtatccttctaccagggctatacgagcccttaccagcacgtgcccggcta

SEQ ID NO: 6715 - DNA, 122 bp, Homo sapiens
aaagagaaaaggtgagacagcgggaaccataaacagaaggcctaacttacccgtgcccaccgtgggggtgaccgcgagctccttagcggggcgcctcctgcatggagtggggccaccgccgt

SEQ ID NO: 6716 - DNA, 122 bp, Homo sapiens
gtccttctgggctctgagcaggaccaacaaattggatctcttaatagttactttgggtttcgaccccacttttttctttcttgttcaaacaggtaaaaaacaaggagtccctgaaaatcgca

SEQ ID NO: 6717 - DNA, 122 bp, Homo sapiens
atccaggtacagaacattcccatcgttgcagaaggttctatcagctagcactgggttggacgacacttgccaagacgagctggctagaggatggttctccggacctggtcccacgtggttcc

SEQ ID NO: 6718 - DNA, 122 bp, Homo sapiens
cacctgtggctcatcccggagaccgccccctcccccgcgacccgggcggggcctggggggcgtggctcccgtctcgctcagccaatcagtgccccggggccgcctcccgccccctcctgagg

SEQ ID NO: 6719 - DNA, 122 bp, Homo sapiens
cccaactgctcccctcactccagttgctcagcccgccgctgagcacagccaatccgcggccgtccactcactgtttcggccaatcaccgagcagacggcccggaagctcgagaggctcgtgc

SEQ ID NO: 6720 - DNA, 122 bp, Homo sapiens
gccaggcacgtgccgtcggcctctcccctgcccgcctggcccaggaggcgcccacacctgcgccctcacttgccgagacttttacctgtgcagtccccggcggcgcctgcagccgcgcaggt

SEQ ID NO: 6721 - DNA, 122 bp, Homo sapiens
gcagtgccgacaccgtgatgcttttgagcttgcactccagctccttggatggatccacgtcgccggcggccgtggccagcaccgccgccggcccccagcagcaggcgagcagggcgcagagc

SEQ ID NO: 6722 - DNA, 122 bp, Homo sapiens
ggcaaagtccctgaaccgtcctgactccagccaccagccggtgtttggtggatcaggtcccggagctccgcagcctgggagccccacaccaggccggcccctacggccgctcagaaaacgcg

SEQ ID NO: 6723 - DNA, 122 bp, Homo sapiens
cctgggggcagaaagctccagctgcctagggaatctctgtgtgggtgcccatgtggggggcgggcccttctgcctgccagggatgctgtgccaggaggccacggtggctggatggaggaagc

SEQ ID NO: 6724 - DNA, 122 bp, Homo sapiens
tcacccaggtcttggtggggcccaagctgatactcagctgtcctcgctccctgaaagcttcgcttattacagctagcagcgtaagggatccacttagccatctcggcctccccagtcctaaa

SEQ ID NO: 6725 - DNA, 122 bp, Homo sapiens
cagcttctgctaaggaggggctctgcgtaggagcggcagtcgggggagcgctccacaacccggcgctccaagagagcccaggcgtccggagcacaacaccagcctccattccttcctgctgg

SEQ ID NO: 6726 - DNA, 122 bp, Homo sapiens
atgacctagaaaccacatgctaggtgctccatctctgcagcttccagcgttgcttacaaacgagcactttatttcattaaataatcatgagtctgtttcctgggggtttctgagctcccaca

SEQ ID NO: 6727 - DNA, 122 bp, Homo sapiens
actagtcacaaaaaccctgactatcacctgatagattgcttgtgctgcctgataattactcgcacttttcccaggctagtgcaaatcttcaggggccgtccaggactacagagctgtttcac

SEQ ID NO: 6728 - DNA, 122 bp, Homo sapiens
tcgactgttccggacgcccgggcggaggactcccgtgagggggaacggcccgtgaacgcgcgcggagctgctcgcgccaaaaattccaaaccggcctcgaggctcctccccctccccagtgc

SEQ ID NO: 6729 - DNA, 122 bp, Homo sapiens
ggtgtgagacacacttgagtgagtccagagcagctgcttcccttccctgggctggtccttcgggagaagattctcgagggagagaaggtaagcctggctctggcaggagccttcaggggtgg

SEQ ID NO: 6730 - DNA, 122 bp, Homo sapiens
gtactcagactctgggaagacagagataatgaacttccttttcaccccagtgattgcctccgagttcagaactctgtgccctcgcatcaggctgtggctgagcctccaacttgctttgctcc

SEQ ID NO: 6731 - DNA, 122 bp, Homo sapiens
cgatagccgggcgcccatctccagtagccagagtcctgcaggtcgagaggggtcggtaggcgggtcagcgcagccaggccaccccctccctaccttgtcccccagggcgcaaggcccctgct

SEQ ID NO: 6732 - DNA, 122 bp, Homo sapiens
ggaggctgcggtgtgggggtggggctcgggcgaaggggcggggcttttgcgcaggcgccgcggccggggaagcggagcccgcgctgcgtcgcgtccgtgggggtggggaggacggctcgcgg

SEQ ID NO: 6733 - DNA, 122 bp, Homo sapiens
gttttggtgtcgctttttgtgtttagttaaaaaaaaaaaaaaaaaaaaaaaaaagcaatccgggagtagtcttatgtattttttaattgtaatttctgcactgccacagttcttggcccgag

SEQ ID NO: 6734 - DNA, 122 bp, Homo sapiens
ctgggacctggccaccctgcagcaggtggggtttggcaggggcagcacggcagggagggccgggaggtcctgaagctggggtttgtcagcgggggtgagaggggcctatagggacctggact

SEQ ID NO: 6735 - DNA, 122 bp, Homo sapiens
aggacaactgactttttaagtggcaataacaatgagcagcggaggagttctcttctcactcgagagagcagaggaggtttctgaactttaccttgacttccagcctacaaactgttccttca

SEQ ID NO: 6736 - DNA, 122 bp, Homo sapiens
actgatgagaacaatctcttgtaacccaggtgttcatctataaagttcacagagtcttatcggacctcaactattgccagaagagttggctggctggaatcctagcagtgaactacttcccc

SEQ ID NO: 6737 - DNA, 122 bp, Homo sapiens
gggaaaagccggaatctctcggtcccaggtggtcatgtggcccaggccggacaagcgtcccgaaagccccgggagagactaagaagcaatcctcccacgcgctttctcccaccctcgggcca

SEQ ID NO: 6738 - DNA, 122 bp, Homo sapiens
actaaatgagggaaagtacctaaagtacttgaaacagagttggtgtgtacaatccttgtgcgtcctgagcttatccaagagagtaagttatcgtttggacattaaaaaaaaaaaaaaaaaaa

SEQ ID NO: 6739 - DNA, 122 bp, Homo sapiens
ccatcagcccatcagtcaaatgaaggttatgcaggtgctcggagcctgagcacacccggccgcccaggagctcaccttgccctgcaccgatgcaacggcgaccctagcggcggtgacttttt

SEQ ID NO: 6740 - DNA, 122 bp, Homo sapiens
ggatggcactctctccttgagtgaacaggaagtctctgtaaacaccagcaattatgactgcgcagcctccgggcacgcttgggcaccatcacccagggacagggaggagaggtgcttccagt

SEQ ID NO: 6741 - DNA, 122 bp, Homo sapiens
cagaaataggattttctccataatattaagagccctacaggaagaggctaacacctttttcgttgagctgggagtttctggtgcagaaacaggacctgaggagtcagtggcaggagctcggg

SEQ ID NO: 6742 - DNA, 122 bp, Homo sapiens
gctttttgacgccgcggctttttgcccccaccccccggtgccgcggttatttgcctgccgcggctttttgcccccgactgccgcggctttttgcccctcgctgccacggctttttgcccccc

SEQ ID NO: 6743 - DNA, 122 bp, Homo sapiens
agattttttaaaaccctatatacccaaaataatgtttaaattatcctctaaaagaatgaacgtatcatatatatgactataatagtaactgttttgtgatattttaacagtactcaacagct

SEQ ID NO: 6744 - DNA, 122 bp, Homo sapiens
gccttgaattaagttagacgtgcatgactaaagaggtccaatttaggagttagaattacacgctccaagattagttaacattttgtaggggccagtgaagaggaaaaggatttcaagatcat

SEQ ID NO: 6745 - DNA, 122 bp, Homo sapiens
attaataacaaattcacaggctgggtgaacagcctgcgatgctggaattattatcctctccgcctctatccccccctggctcttaggacccccattgcaagggggtgaggcaccccccgcga

SEQ ID NO: 6746 - DNA, 122 bp, Homo sapiens
cttccacagaaaattaccaaaagggtggcatgaaagtggggtcagaatcgacctcagttccgcaggatgaaggtgaccctgagccggcctcaggatgcagggaagcgcggacatacctcgaa

SEQ ID NO: 6747 - DNA, 122 bp, Homo sapiens
acattacgagcttccaaactaggcaatggggcattcaaggatttgcaacaagaaagcaaacggcctgaggtaggggttttggggtaccctgcagaacgacctggcagtacccatgagtctgg

SEQ ID NO: 6748 - DNA, 122 bp, Homo sapiens
tataactgaatacattgttattttgtaaatgattacagcctggaattgaatagggggaaacggaagcagttgttacaatcattatcaatttgaaagtgaagacttcttttctctctcttttt

SEQ ID NO: 6749 - DNA, 122 bp, Homo sapiens
gattatttttgaagttatgtagtgacggtccttcggccacagatttcaagtcccaagcagcgtgggctggtggggtgggcaagataggtgggaaggggcagaagacacaagtggttgggctg

SEQ ID NO: 6750 - DNA, 122 bp, Homo sapiens
aaacaataagaagaaagttttccttgtccgccttcaccaggctcacaaacacttagctcgcgctccctctggctcttctcccgctcgctggggttaagccactctcttcctcagccctgccc

SEQ ID NO: 6751 - DNA, 122 bp, Homo sapiens
gtttctgtccgcccgtcaataagttcatcatctgtggtttctgcgagctccagaggccttcggagtgcaccagcggccccagatattcaggaggactccacaacactcccctcccccaagct

SEQ ID NO: 6752 - DNA, 122 bp, Homo sapiens
cagggcactccgtgtgctctagtcctttttagatgagaatgagccatcttcctcctactccggggcctttgcacatgcaaatgcttctgtgtgaatcaaccttcctttagcccaagtaaatt

SEQ ID NO: 6753 - DNA, 122 bp, Homo sapiens
ttatttcatggagagtgtatgggaaagaagatccaactacttcccggcaggaactctgcccgagtaatgcctactgagaagctaatgaggacagtagtttctgtcaaagcatctagtatttc

SEQ ID NO: 6754 - DNA, 122 bp, Homo sapiens
ctgttgtctaaaagaaaagaacgcacttccctttagagtgttaccgtgtgagaaaagcaacgttgaagctgatgctgatcttggtaataagtttgcagagcctgcttatcatcagacttgga

SEQ ID NO: 6755 - DNA, 122 bp, Homo sapiens
gtggctgctcccggatacggacgcacgcgagggatgcaggagtcatctttcactaatcaccggaatcccctttccaatcagggcaaggcagtgtctcaggttgctttgggatctccttttat

SEQ ID NO: 6756 - DNA, 122 bp, Homo sapiens
aagccaaagggtgggacccacagctctcggggcaagaggagccaggaacagggcagagctcgtagcctgatgcaggctgggagccacacagggcagtaaaattccccagtgaggagctggga

SEQ ID NO: 6757 - DNA, 122 bp, Homo sapiens
ccaagggaaaaacctctcaataccaggtccaggagcagctggatgggatcactcagaacccggccgagagctaattccctcttggcttcaaaatccatcctatgcttggagatgctggggct

SEQ ID NO: 6758 - DNA, 122 bp, Homo sapiens
ctccaggtgccctggctccctgcctgcctattacagcaacatctctgtcctccacatgggcgggactggagaaaggagagagttttttggctttgaaggatgtagggctcctgagaatacca

SEQ ID NO: 6759 - DNA, 122 bp, Homo sapiens
gcggccgggggcagggccagggctgagtcacgtggcttggttgcctacgcgctggtgggccgtgggaagatggcggacggaaagggagacgccgccgctgtcgccggggctggggctgaggc

SEQ ID NO: 6760 - DNA, 122 bp, Homo sapiens
tttgtggaggagggggcatttttatttataccttgttatttggaagcaactcagatattacgtcaataaatctgtaaatatttcagtatgtaatggtaaaagataaggactctaaaaagctg

SEQ ID NO: 6761 - DNA, 122 bp, Homo sapiens
gctgccgcgcgggtaaatccaatgcggggaagccccggacccgcaccccggaggtcagagcgcacttgtgtgtgccgtggtcactaggaagccacacgcctttttcgcagggggttcgagga

SEQ ID NO: 6762 - DNA, 122 bp, Homo sapiens
tgaactcctgacctcaaatgatccacctgccttggcctcccaaagtgctgggattacaggcgtgagccaccatgcccggccatttgttattgttatgattgtcttggctctccaactaaagg

SEQ ID NO: 6763 - DNA, 122 bp, Homo sapiens
aggtaatcctaacgtaggtagtcggtggcccacacgttcagtaaccatggtgtggacaaacgggttttagtcccttcttgcttcaaaccttccttaacctccccaggcggagttgagcacat

SEQ ID NO: 6764 - DNA, 122 bp, Homo sapiens
gcggcgcgaaaaaggcgcgcatgcgtcctacgggagcgtgctggctcaccgaccgcattgcggcttggttttctcacccagtgcatgtggcaggagcggtgagatcactgcctcacggcgat

SEQ ID NO: 6765 - DNA, 122 bp, Homo sapiens
tttctagctggatgtgctgaataagaaccgtgcaaaacaaatacagttccccaggggcgccgtgcatgatttatttccagatttaatgaatggccacgtgcctgggttagtggaaaataacc

SEQ ID NO: 6766 - DNA, 122 bp, Homo sapiens
gagatggaagagagggtgggagaatgaagctgagagataaacgggacaaaaactaagaaacgcttattgagctaagtcaaggtacctatcactaatactattgaatagtatagaaaccttaa

SEQ ID NO: 6767 - DNA, 122 bp, Homo sapiens
tccccagggatggcaatctggtgttcctgtgtgcatagagcagtgaagatgaattgaaaacgcttgagataaattaggaatggctaagttaaaattgtctctgctccagactctctcatctg

SEQ ID NO: 6768 - DNA, 122 bp, Homo sapiens
tgcttgtcaaaggggccatgtgatttgtgtctgttgaatctgaatatcaataaggcaaagcgtagagcagctgccgttgaacaagacaacttggcattagcacacagtgttggataatctgg

SEQ ID NO: 6769 - DNA, 122 bp, Homo sapiens
tcccgggctagggagggggcgcagccaagttgtggagccctcggaggcccttccctctcccgcaggctccggcccctctcggacctcggtggccgcgtccgtgaaatggggacgcgggctct

SEQ ID NO: 6770 - DNA, 122 bp, Homo sapiens
tgcatttctgtgtgctaattaaatgagataatgctggtaagggcgttctgcagcacctggcgccagttgtattacattagcccttgtgtggtggccctgtgcctgggaagggattctgcagg

SEQ ID NO: 6771 - DNA, 122 bp, Homo sapiens
tgatgtagccatatctcagcaacgagaagtgaaaaatccccctgagaagtgagtctgtaacgttccctttgcttcagcttactcacttgtgggtgattcatttgcctatttcatagggttgg

SEQ ID NO: 6772 - DNA, 122 bp, Homo sapiens
aacagagcaagagacttggaacagctccctacagctgcacttctagaaggtcagcctgtccgattcttgtaacctggaggtccctccccatctgcagccccctgagctgcaggagcggcccc

SEQ ID NO: 6773 - DNA, 122 bp, Homo sapiens
tgactccctgactagtatctgtgctttgcctcttgcctgcagcattaaccagccttgattcgtatgcctcatccgtacactacaggaatctaaacattgcagccacatgccaaggaagcaga

SEQ ID NO: 6774 - DNA, 122 bp, Homo sapiens
cgggatgacctaaggaacaaggattcagacgcagactccacggtgaattggccttattcacgtgtgaacgaacgtccaggagaaaaccaaacccgaatgggccaggctctaaccagaggaga

SEQ ID NO: 6775 - DNA, 122 bp, Homo sapiens
ccgtgtggggggaccccaacatacccagaatcacagatatttttcccaactattcatgaacgtccagtttctttttcaccacctcccacctgcccaccgaaagtagccatttcccagcggcg

SEQ ID NO: 6776 - DNA, 122 bp, Homo sapiens
acgcggggcagagagaggggtttcgtttggggacaaacttttagaggggactccggctcgcgcggacccgcggggcccggccccggccccgaccccgacccggcggcaggcttggggcgccg

SEQ ID NO: 6777 - DNA, 122 bp, Homo sapiens
ccctctgggttctctagagcaacagcaatacccgcccggcaggggtgtggcttagagccccgcacctcctcgccgcgcggcgggcctgacttctagccacgggtctccgcagttggcccagc

SEQ ID NO: 6778 - DNA, 122 bp, Homo sapiens
gcaagcggagaccctaccttccatgctgaagctccgcacaatgttggacgctggcgtagtcgacttatcggacgtgtacctgttgtacaggtcaatcatgtactgcggcggctccaccctgg

SEQ ID NO: 6779 - DNA, 122 bp, Homo sapiens
atttgccctttctcttccttctaaacatgtgtctctcccacaggtcattctcctgtgacacgtgtactgcagagtgtttcaaaaccgggcaggcaattagcaatgggaaataagtggtccac

SEQ ID NO: 6780 - DNA, 122 bp, Homo sapiens
ggcagccaccctcggggcggctgtgtgtcggcttcaccacgaggagaggctcgcggccctcgtgcctgactgcaggctgaggcatgtcggccgcagcccctgtctgtctttcctttggtcca

SEQ ID NO: 6781 - DNA, 122 bp, Homo sapiens
gagccagccccggtgtctctcacagacgcaccagtgttccaggaatgggacacagaactccgggcaaacccggcttcagggaaaacagctgcctaaatagagggccttcctggaaggggtgg

SEQ ID NO: 6782 - DNA, 122 bp, Homo sapiens
gcacagtcaatgccgctgcgagtgcagtgaatgccacagcaagtgcagtgaccgtcacagcgggtgcggttactgctgcatctggtggtgtaacggccacaacaggcacggtgacaatggca

SEQ ID NO: 6783 - DNA, 122 bp, Homo sapiens
ctgactcaccgtcctccagggagcacaagggcatggctcagcccctaagcctcagggggacgtcctttggaggaaagtcaggccagggggaacaccgcctccttccctgccagtggctcagt

SEQ ID NO: 6784 - DNA, 122 bp, Homo sapiens
cacaggcttttcacaactgcctttttgcaccttttgttgactatgtctgtattcaattaacgcctattcacctactgatcaatttttaaaagtattatcaagcacttaccatgtgccagaca

SEQ ID NO: 6785 - DNA, 122 bp, Homo sapiens
tccggcgtgaactggtttatctctaacgcaatcctcagcctcttgttttgcagagttctccgcgccacggcaacttgacgagctaggccacgggccacatccccactaatctgattggttct

SEQ ID NO: 6786 - DNA, 122 bp, Homo sapiens
ttgggttaaggtcctagatttctacctcatttcacaatataaagcacagaagctaaactacgaataaatgagcccttgttttctcataaacaaaagttataaaaagtagagatcttaaacat

SEQ ID NO: 6787 - DNA, 122 bp, Homo sapiens
cctgggaggcatggtcagcatcgccagtgtacatatattctgtgcccatactaccactaacgcttccagctgaagaggaggcagaaaaccgttacattgcacagggccatgaaaggaaaggc

SEQ ID NO: 6788 - DNA, 122 bp, Homo sapiens
ctaccaggaggctacctagcttggaaaagaagaaaaaaaaatcacactatacaaagaaaacgctgaacagagaacttccaagaagtaggaaatatcttgctcaattttttttttcagaacat

SEQ ID NO: 6789 - DNA, 122 bp, Homo sapiens
tttgttttttttttctgaccagcagcccccaggccccttgcacgggctgagtctggcccccgcccctcccactgggtaaaggtaaacaagaggcatgtaagggggaaggacagagccctact

SEQ ID NO: 6790 - DNA, 122 bp, Homo sapiens
tcatccatgttgtcttgtgtagcagtagtttatttattctccttaatgtttttcattccacgtgtgcctgtaccacaattcatttatccattttactgttgatgatttatcaattagttatt

SEQ ID NO: 6791 - DNA, 122 bp, Homo sapiens
agtaaggcttagcacccgggccggcagctgcggagggtgcgccgggtcccccagcagtgccggcaggcgctcaaattctcacctggcctcagatgcctccccgcggggcagggctcgggacc

SEQ ID NO: 6792 - DNA, 122 bp, Homo sapiens
tgagttttggaaacaaggactctgaccgagctccaaaacttgagagtgattgaaaatccacgaacttggcttgcagcttcatttaggaacctgtactgaggaagaaaagccgctggaaaaga

SEQ ID NO: 6793 - DNA, 122 bp, Homo sapiens
gctgcttgtagctacagtaattagactgtcagtgcttgttagaggagagaggggaaaacacgcttctgacagcagattccaagactccccagtttgttaatttctaagagatctttaaagca

SEQ ID NO: 6794 - DNA, 122 bp, Homo sapiens
cctctattacaccccgctgtggacctgggacttgggtatttctagacgagattgggaaggcgcgtgtgttacactaagcagtgctcatgtttagctgaggaagaaggagcctcaagtgttcg

SEQ ID NO: 6795 - DNA, 122 bp, Homo sapiens
ttcctatctcctaaaatctcccagccccttagccatatccttcctaagcatttttaatgtcgtgtctcatcttgctcctatgcatatcttaatattttcactaagataatagattccttgag

SEQ ID NO: 6796 - DNA, 122 bp, Homo sapiens
ctccaaatctcatgctgacatgtggcctccagtattagagacaggcctcatgggaggtgtcgaggtcatggatgcagagtggcctccagtattagaggtggacctcatgggaggtgtcgagg

SEQ ID NO: 6797 - DNA, 122 bp, Homo sapiens
ttcatgggagtctcatggccccagtgtgagtgagtgtcggtgctggtggtgaccctgccacgggacggcgtctgtccaggctggtgtcagccttgtacctgagctgccagaacgggctcctg

SEQ ID NO: 6798 - DNA, 122 bp, Homo sapiens
cattaatccattaatctgtgaatggattcatctattcacgagggcactgccctcctgacccgatcacctcttaaaggccaactctcaatcctgccacactgggaattaagtttcaacatgag

SEQ ID NO: 6799 - DNA, 122 bp, Homo sapiens
caagaccagcccaggtgatgtgatgagatctcatctccacaaaaaaatcaaaaaattagccgaatgtggtggcacaggcctgtggttccagctacaaaagaggctgcggcaggaggatcact

SEQ ID NO: 6800 - DNA, 122 bp, Homo sapiens
acagaatagcaagcaaaagtggtcaaatattactcacggctttagaggtcccttcttggtcgccaaaatgttaccgggggggtccttgctcccagagctcccaagatggtggcgggctgctt

SEQ ID NO: 6801 - DNA, 122 bp, Homo sapiens
gaagcgaagtcgagacgtttgaccttcctccgtttccgtagttccgagttgcggtttctccgttagtgcttccgggttgcagccagggaagcctccgcggtggtgcaagtggaacccaagcc

SEQ ID NO: 6802 - DNA, 122 bp, Homo sapiens
ccctggaggcctcgacggttacaggcctagcctcccgcgagctaaggcacagtttaacttcgtgctgcggcttccttaggaaactttgagtatcttcgttttagcgtgggaggacatctttt

SEQ ID NO: 6803 - DNA, 122 bp, Homo sapiens
tgatcttagatcttcagtactcttcaacttgtgagaggtcaaaatctaccttaagtgatgcgcaacttaatcattatctatttgacctttgaaacagtaacaagcagctttgaaaacatcca

SEQ ID NO: 6804 - DNA, 122 bp, Homo sapiens
ctggaagacaagtaggcgtccatgaggcagactggatggacagggcatggcgggggaaggcgggcatctgagtggaggaccactgtgaagcctcaggagctaagcgggtcagtaccaagaca

SEQ ID NO: 6805 - DNA, 122 bp, Homo sapiens
gtccaatcataagcctcacgtgacctgccgcgtagggagggcacgaacagaaaggtgctgcgcatgcgtattgaaaaacctcacctactctcgcgggtcctcagcgttctcctgcggaacct

SEQ ID NO: 6806 - DNA, 122 bp, Homo sapiens
aagccccgggaagaggaagtctccgggctttgcccttcgctccggacggagtgttggggacgtggctctgccaggactcggagcagactctgagcattgttttggccccacttggcacctgc

SEQ ID NO: 6807 - DNA, 122 bp, Homo sapiens
tgggtgtgtgtgtgtgtacgtgagcacatgtgtgtatttttacttcccaggtccttgccccggtacctgcacaggaccccactctcagggccaagatgcggcttgtcccagccagctgactg

SEQ ID NO: 6808 - DNA, 122 bp, Homo sapiens
tcactccgtttttattacttccagtgtttttctttcaaacaccagctgtcttttgtaactcgttttaactctcatcctttaattttaactaaaagacgcgctttaggaaatgtaaacatcgt

SEQ ID NO: 6809 - DNA, 122 bp, Homo sapiens
gagcggcgtggccagcttttccatctcaaactcttgctcttgaagtcaatccggatggagcgctcatgtttccccgtcagggctggccctggagagggggcacgccgggaggcgtctcgttc

SEQ ID NO: 6810 - DNA, 122 bp, Homo sapiens
ggaaagaatggggaacgagtgacaccgggaccggagggcgagtcttccaggagcacgtctcggccttctttgcccggcccgaccggcccgacccgtgccgcagcgctcctccctccgctcct

SEQ ID NO: 6811 - DNA, 122 bp, Homo sapiens
gattatctccactttgcagaggaggaaactgagcctcagagagattacacatgacttactcgtggtcacacagttcctgggtgatggaactgggatagaagccctgctttgtggggccccac

SEQ ID NO: 6812 - DNA, 122 bp, Homo sapiens
cacccggcgccttgcgttcaaattagccgggcgggccggaccgtgcttcctattggtcagcgtccgtatcgctgattggctgtttcctaagtaacaaagtgttgcgagagccgttcacagtg

SEQ ID NO: 6813 - DNA, 122 bp, Homo sapiens
gctagggaccagacccccaggcgcgcgcgccagccaggtggtcacgtggcacgcggcgcgcgcgggcttctggaaactgtagtcctttgggtgttattcgtgcctccgccctcctagtacct

SEQ ID NO: 6814 - DNA, 122 bp, Homo sapiens
cctacgtaatgtaatttccatccaagaggtgattcatgtatcaatctaacctttattaagcgcctagtgtttgccagatactgggcaaagaactggagttacagggacggtgactgtatgat

SEQ ID NO: 6815 - DNA, 122 bp, Homo sapiens
gtgctagtaattaagagccttccacccttgcagcccaaggaacagcaggtggagcttgcacgtgggcagtggcgtcccagacctgcccctttgccccacacataacgcccttccagaaggaa

SEQ ID NO: 6816 - DNA, 122 bp, Homo sapiens
gcccctcaaccatcaaccctagaaccaggacccgggggttcagaggctccagctccacatcgccagtcccatgccccactgcctctggccatcacttacttgcggctgatgatcttcccaga

SEQ ID NO: 6817 - DNA, 122 bp, Homo sapiens
gaggaaaaaaatgagattcaaaccggattggccagcttctggccacgtgacggatatgtccgtttggccctggcggcacctgcgcaagactgcggctgcgtgagtaacgagaggcttctggg

SEQ ID NO: 6818 - DNA, 122 bp, Homo sapiens
ccggctcccctgccgcctcttcttcagagtctgcctgaagcctgggctctcagaggaggccgccgagtccccgtgcgccctgggcgcggcgctgagtgcgcgcggaccggtctacaccgagc

SEQ ID NO: 6819 - DNA, 122 bp, Homo sapiens
aaggtcactcagggtcggtggctgagccagaatttgaccccacattggtctaacatcaaacgcaaacccttctaaatgtaaaatagaagatgagatggaaagaaatctttctccatgggtaa

SEQ ID NO: 6820 - DNA, 122 bp, Homo sapiens
tttatttcaggtgctattatatctcacagaatttttcagtatcttcctgggctgtctctccgtctcctgtttctacaactttacacctgttttctcctctcctgcaggtttatttcaaatgc

SEQ ID NO: 6821 - DNA, 122 bp, Homo sapiens
gattggaggctctgcagtctgaggtcttgttacagggttaactgtctgctcggagctgcccgttagggaaactgtctcctcagggacagtcctgggtttactgggcattgagctccccttta

SEQ ID NO: 6822 - DNA, 122 bp, Homo sapiens
gaaggctggttgtcaaggagctagggagaaaccaggccctgcccacacctgccttgcaggcgtctgtggaatccagacccctttggtctcagtagccacctggctgtgcccacccatcctgc

SEQ ID NO: 6823 - DNA, 122 bp, Homo sapiens
gaatttaatccttgtcttcctcctcttctttgtcctggttaatctggaagtaatgtaattcgtaactctctttgctgttagcaactatgcgcagccaatattcttcaaatattttttgttga

SEQ ID NO: 6824 - DNA, 122 bp, Homo sapiens
ttctaatgacatttttttctttttcttttctgtaggagagagacgagagaccctgaaacacgcgccacctatctttgtggggagggataattgaagcgccctgagcgtgagcatcatgtgaa

SEQ ID NO: 6825 - DNA, 122 bp, Homo sapiens
tcaccaaaggcttctttccatttgagtgaatccctcccagcccccagcaagccctcggaacgagcccactcccaggcgctctctcctagtgtgggagtggccacgcccctgctgggagtgac

SEQ ID NO: 6826 - DNA, 122 bp, Homo sapiens
tggtgggaagtgtttcctttcactttcacatagtgacaagggcttcaagaaaccactcagcgcttgacagggagctcttggaatttggggtgtaatggacaggtgtctgattcaggctggag

SEQ ID NO: 6827 - DNA, 122 bp, Homo sapiens
tgtgaaatatttgaatattctaatgctcagaatgaaatatttttcatactgattaggcctcgaaactgcgtttgaatgaaaacattgtcaaacagaggttgtagtgcaaataatataaaaca

SEQ ID NO: 6828 - DNA, 122 bp, Homo sapiens
ccccgcaactgctcaacctctcgtgactgcctgtgttctggggttctgagagggaccgtgcgctgcctggggaagcaatgcaagtctccatagcctgcacagagcacaatttgaagagtcgg

SEQ ID NO: 6829 - DNA, 122 bp, Homo sapiens
taattctgtatcttcgggagtacaagacctagccacatagctcattgtcaatgcagagtgcgcatgtgaggctggcatactgtgaagaaggtttgacacaactattaacattctctctgatt

SEQ ID NO: 6830 - DNA, 122 bp, Homo sapiens
gccgggggctcccccggtcggtatggcctcatcttcctgcatcagacggcttccatccaccgagcgccgagtcttcttgggcatctgaatgggcagtggctggatcacctcgcctgggggac

SEQ ID NO: 6831 - DNA, 122 bp, Homo sapiens
gcaaggggggtgtcatcttttgagtgccatgtctgcattaggaatgctgcatttgtcttccgaggctgcggtgtggatctcgcactgcggccgcctcaccttggctggggagaacctcggtg

SEQ ID NO: 6832 - DNA, 122 bp, Homo sapiens
ccaggccacataggcacaggcaggggagctggctgatctcatttgtttgttttccgtgtccgttctcaggcagtgataggcatgctatcatctcaattcttaaataaaaccaagttgtatcg

SEQ ID NO: 6833 - DNA, 122 bp, Homo sapiens
cacgaatcctcaggggctcctcgagagggcgccagggagcagatgcatgcggacacctttcggccctctgcagccgccgtagctcctccctcacgccccgccccccccccccctcccggcag

SEQ ID NO: 6834 - DNA, 122 bp, Homo sapiens
tctctcttctccttctttcgcctattgaacctccgctcttaacctcaccccatgtgtgtccgtgtccttgatttccttggcatgaggcaatgacatgccaagacacgcccgggaccacaaca

SEQ ID NO: 6835 - DNA, 122 bp, Homo sapiens
gtgaaactcagcagaaaccaccttaaccaaccaattaaggtaaacaataagacatgtttacgtcctgaaccccttgatattttgcattgagaaagacccaacataatttctgtggtattctt

SEQ ID NO: 6836 - DNA, 122 bp, Homo sapiens
tctcctttaatccctttcattttttttcactgattagtgaatgcatattgtccactaaaacgcagaagatagtcattacacaaatagctgtgaaataccacctgacataaattctctattcc

SEQ ID NO: 6837 - DNA, 122 bp, Homo sapiens
ttagctttatgattaaaagttttattttgcccaaagactggacatattctaaataataaacgttacagtatagtagataatagctactatgtgattgtggttttcttttctttgctggagac

SEQ ID NO: 6838 - DNA, 122 bp, Homo sapiens
gtggtgatggccgcggcggcggcctcgccacgtgacccggacgggcggaagcggaagtgccggcctggagcccgctctaggtgggtgtcccctcggtgcttcccagctgccgtctgcaccag

SEQ ID NO: 6839 - DNA, 122 bp, Homo sapiens
gtctgctcttaggaagcaccctgggagcttttactgcaacacagaggcaccaagagctgccgctgggacgtggtgcgtgaaccagcctctgctcagctcgcctcgggaaaggcacaggtggg

SEQ ID NO: 6840 - DNA, 122 bp, Homo sapiens
acatgatggcagcccatgccaagggcagcctccctatcccacggcaggcctgtcccgggacgttgcagggcgtctatctgcccatccctgagaagcagcacttcttagtcactctgggtttg

SEQ ID NO: 6841 - DNA, 122 bp, Homo sapiens
gagcggagcggtgggccgggggctggaggacaggtttgtgcgctggacgcaagcaccaggcgcagcctcgctcgccgagacccggccaggtaaggccggtggccgcgcggtaggtgcggagc

SEQ ID NO: 6842 - DNA, 122 bp, Homo sapiens
gagaagcaactgggctgtgtgggacctctggctcacatttcctggtagtaaatgattgtccgccttcatatgggagcttgtgtcccggaatatcaggtcctttatctgtaaaacaagattag

SEQ ID NO: 6843 - DNA, 122 bp, Homo sapiens
tattccaggggacaagctgcacaaaggaatgttcttctatttattttaaacaaatgactgcgtgtactgaatctgactgtgtgaaataatctcagaatggcagcaccactggcatggcgatg

SEQ ID NO: 6844 - DNA, 122 bp, Homo sapiens
cagtgactccagacatcacacacgacactgtggtcaccggggaaaatgggctgtttctcccgaggcatctcttgttttgtggtgaaacaaaccttcttggatttgtcctcaccttcatgggc

SEQ ID NO: 6845 - DNA, 122 bp, Homo sapiens
ggtcctaaatccctaaacactcagttcctttgtcatatacagctgataacagtaactccccggtcagaggaccggcgacaattccttgagacaaggagcacagagcctggcacagtcagccc

SEQ ID NO: 6846 - DNA, 122 bp, Homo sapiens
accgccgctcaccccacagcggcagaatggcagcaagtgccacacaccaaagcaccggggcgggatatttgccctgcagctcccgccagcgcgctgctctgacgcaaacaaaacgcggggaa

SEQ ID NO: 6847 - DNA, 122 bp, Homo sapiens
acagcatgcttactcagtaaagaagcttaccacgcctttggttttcagggcgacacaccccgctcagaagaggaatgaacactcacttagatttaccaagcatggcaactaaattctcagct

SEQ ID NO: 6848 - DNA, 122 bp, Homo sapiens
gcagatgaggggcttccaccaacaagctgagagtactgtgtgcccctaaaggcttcatgccgtcagtgggctggacgagtggctccgggcagccccctcctccgcccactcccctccctgct

SEQ ID NO: 6849 - DNA, 122 bp, Homo sapiens
aaggacagagctttgaggtggtcacgtgttcctgcccagcctctggtcctgctctcctctcgttgatgtctagaaaaacattcttaccaaaaaaaaaaaaaaaaatacaatttgctaggaga

SEQ ID NO: 6850 - DNA, 122 bp, Homo sapiens
gcagcgccgggggcgtatgcgtgggggccggcggggagcgtgcgcggggacaggcaggggcggggcgctgggggcggtcgcgcgcgcggcggccgcgaggtcgccccgcccacgcctccggg

SEQ ID NO: 6851 - DNA, 122 bp, Homo sapiens
agggattgagggacaccctacccaagctagactattcagatgtgtcaacagtgaccagaacgtcaaaggcctggccacagatggagcttactcattccaggcatgggatgtagacaagactg

SEQ ID NO: 6852 - DNA, 122 bp, Homo sapiens
ctcaccctgaccacatggccttcggcacccagcttgagtgtcccatcctgtgaagccagccggttcccccaggcacaggggatacctcttccctttgggcacctgccctgcgtactgtgcca

SEQ ID NO: 6853 - DNA, 122 bp, Homo sapiens
gcaacaatatttatgaccagcaggcgatgagaaagtgttcgcccatcacgcgatccatctcgctcccctggctgattgccatcctggagaccatccaaccaccccccggtacccccgccccc

SEQ ID NO: 6854 - DNA, 122 bp, Homo sapiens
ttgtctatgttccactttaccaaagaaaaatgaatttcaagtagtgcataaagtaattctcgttaaaaaatgtgggaataaagagatcagtcctgggtactgggaatatatttatctcacag

SEQ ID NO: 6855 - DNA, 122 bp, Homo sapiens
ctgcctgcggctcggctacccagccgcgatcagagggggcgggggacgcaggaaccccggcgtccgggcggtgtgcagccgcagacctattccaagtttccacgtagttgcgagagcccaaa

SEQ ID NO: 6856 - DNA, 122 bp, Homo sapiens
cagggctcgaacccgaggcggggtgggccgctgctgcctacccttcttgaactggaagcccgccgtaccacccgggcgtcgcaggtggcgtggaaggccaggctgcgctggctctgggagtg

SEQ ID NO: 6857 - DNA, 122 bp, Homo sapiens
atactttcagaagcacaattttaaagggagaatacaaatttccgtcctcgcttggccgaacgcctccctgcaatcaactgcggaccttcgcatgctcaggactgaactgaggtttgtggttt

SEQ ID NO: 6858 - DNA, 122 bp, Homo sapiens
cagggaagagcctggcgtcaggttaccaggcagcgcccctctgctcggcccactggcaagcgctcccagcggcaggtataaaagctcaggctggcagtccttgaacactggtgctgaacccc

SEQ ID NO: 6859 - DNA, 122 bp, Homo sapiens
attttattgttcctggggtctctggaggcccattggtggggctgggtcactggctgcccccggaacagggcgctgctccatggctctgcttgtggtagtctgtggctatgtctcccagcaag

SEQ ID NO: 6860 - DNA, 122 bp, Homo sapiens
agatttgtggttcatagagttcctgaaaatgcacctaaaaatgttggcaagaatggtcatcgttgtatttagctccatggacttgttcaatgactggaactctgaaacacagagaagagcta

SEQ ID NO: 6861 - DNA, 122 bp, Homo sapiens
ccgtaataatgtacccgggctaggtggcttaaataacagaaatgtattgtctcagagttccggaggctgagaatccaagatcaaggtgtcagtgggtgtcggcagggttggttgcttctgag

SEQ ID NO: 6862 - DNA, 122 bp, Homo sapiens
gccaggcgccacgcgggggcgccgcacactcacctaagattagttcaaatctgccaggggcgccccatgccaccaggcccaccctatgtgccccagataacaaatataagacaacttaaaca

SEQ ID NO: 6863 - DNA, 122 bp, Homo sapiens
aaccattcgagttgttgccttctcttctccgtctgtcccttccttaagcacagagtacttcgggaacaccatcttgtcttcatcactatcttgggcatctatttattacaaacttggaattg

SEQ ID NO: 6864 - DNA, 122 bp, Homo sapiens
atcaactgttgtcagcacctcgttacagctaacagctaatgggctccctgagtccagagccgggagagctgcatggggctgcagaggtcagacaaagctccacggctgggaggagctgtgac

SEQ ID NO: 6865 - DNA, 122 bp, Homo sapiens
cctagaggccgtcaagtcggacttggattacagccagcagcaatgggacagcaagaagcgcgagctacagggccttctgcaaactttgcacactttggagctgacggtggcaccggatgggg

SEQ ID NO: 6866 - DNA, 122 bp, Homo sapiens
cgacaggttgtgggatggggctggcgactggggaacaagcgggagcccaggccaagagtccgagcgcttggggcccgcctagctgcccaccgcccttggcccggggatgcccaagacatttt

SEQ ID NO: 6867 - DNA, 122 bp, Homo sapiens
tgggcaatagcaggattgggttgggtcagcagggggtcaggaaagagccagacagatgtccgggtctgaattaagccagtgatttgggagccagaaaatgaagaccagggagtcagtagttg

SEQ ID NO: 6868 - DNA, 122 bp, Homo sapiens
tgtccgccctgctgggaaatattccaggctttggccaaggccagtgcagccccaggttcccgagcggcaggttgggtgcggaccatggcctctcacaagctgctggtgaccccccccaaggc

SEQ ID NO: 6869 - DNA, 122 bp, Homo sapiens
gagagcagacctccagctccccctctttctcctcttcctcgggatctacttggtcaccatcgtggggaacctgggcatgatcactctaatttgtctgaactctcagctgcacacccccatgt

SEQ ID NO: 6870 - DNA, 122 bp, Homo sapiens
atctagggctaacagtgctctgcactgtgaaaataggaactttcaagcaagcacgttcctcgatgtactactttgtggtcaaaaagacttgagtctgaatcctgttcttattgaatgaagat

SEQ ID NO: 6871 - DNA, 122 bp, Homo sapiens
aagccatggatatttaaatccattggccccgaaagactttcacctggacattcccatggccgtagctaacctggcaagccccaaacttggcactgcaactcacggtccaccttgactcctgt

SEQ ID NO: 6872 - DNA, 122 bp, Homo sapiens
tcgtctcccggatcactggggtgtgttgtttttaaagtgggggatttgcgtgttgagagacggtttgtgttcctcgggaggagtaagtgacttggagctggtttgtcaatggctggacggaa

SEQ ID NO: 6873 - DNA, 122 bp, Homo sapiens
tccagagacaccagctgcattctgcaggctcaggggtgaaaggtctataggctgatagctcggggctctactgcagttgagcctcgctcactgctaagctaagggaaggggatttttctctt

SEQ ID NO: 6874 - DNA, 122 bp, Homo sapiens
aagaatccctggctatgtatgtaacagatgcattccttggtagtgactacacacaatgcacgtaaacatgctcgcacgcagcctggcacacatcagggcctcagtaaattgggaatcatcat

SEQ ID NO: 6875 - DNA, 122 bp, Homo sapiens
agtttttgccaagtccatgtcctccctccctctgtgtcgggagcaggcctgggcactcagcgtggggatccaggggttcacaggctgcctttgtgtgagagaagctgctatctctgctcatg

SEQ ID NO: 6876 - DNA, 122 bp, Homo sapiens
gtccctgagaccctgggactaaagccaggcctgaagcagacaggctcttcatgtacacagcggatcaaccctttgtgatttaagttagtgtgaattgggttgtcttttacagcagaaagcac

SEQ ID NO: 6877 - DNA, 122 bp, Homo sapiens
agacggctaaactctcccattcttctttatagtggtgactattgtccttatttggtgtttcgcatacccagtaatgtttttatattttagtacttaggtttgtgctatttatatgcatttta

SEQ ID NO: 6878 - DNA, 122 bp, Homo sapiens
ccccagtggcagaggctgaaccagacagcccccagtaggtcgcctcgtagaaattcctctcggctaagcctgcatgtcggtcgccaatgcctttgaatgggtcaatgtgcataatcaaccca

SEQ ID NO: 6879 - DNA, 122 bp, Homo sapiens
atcctaaatgccacacatgttaaggtcacttgtgggcaattcctaaactctctgggtcaccgactttaagaatgtcccatcacacacagagaatcctcagaacatcttctgagatggacctg

SEQ ID NO: 6880 - DNA, 122 bp, Homo sapiens
gcagaggcagagaggaaagtctaaagcagcactgtccaacagaacttcttgtaatgaggccgcgcgcagtggctcacgcctgtaatcccagcactttgggaggctgaggcgggcggatcacg

SEQ ID NO: 6881 - DNA, 122 bp, Homo sapiens
ttgggagtagtggttgagctgagatgattatctgacccactaactgaccgaaccccaggacggaggttttgacttctctgtgtcaggagatggacagaatgatccttacctgcacgcatcaa

SEQ ID NO: 6882 - DNA, 122 bp, Homo sapiens
tcaaggcttaaggaaaggaaaaagttagcgctatgttttgacacagcaagtctgagaagccgattggacatctaatgaagatgctgagaagagatgtgtatctaagtctggagctcaggaga

SEQ ID NO: 6883 - DNA, 122 bp, Homo sapiens
ctcagaaaacaaaaaaatgtattcacagctctgagtcttccccgcttcccaggcttatttcgtttgaaaatactcagagttggagggagaaaaggtagaggaaacagagtccagcctgactc

SEQ ID NO: 6884 - DNA, 122 bp, Homo sapiens
gcctgccttccttcctctctctctctctctctctttctttgagactgaatttctgtctgtcgcccaggctacagtgcagtggcatgatcccagctcactgcaacctccgcctcccaggttca

SEQ ID NO: 6885 - DNA, 122 bp, Homo sapiens
aagtagactgcatgcccctctaccaaaagtgttgtttgttgactttcgatttttcgaaagcgagaaaagataaagagctcttgacctgttttgtaagctagatgtgtaatttgagtgttcat

SEQ ID NO: 6886 - DNA, 122 bp, Homo sapiens
caggtgcatgtttttgttctcaacctgcaacagaaatccaagtggtggtggggtcccttccgcaaggtgggaggcccgggcgcgcggtaaacgtgttttggcgggaagcagcgccgaggccc

SEQ ID NO: 6887 - DNA, 122 bp, Homo sapiens
cacagagagcgccttcgctgacacgctgacgcccgcgcgcctcagccaggcccgcttcagcgcctgcctgccgcccagcagccacgacgcggccaacttcgacaacaacgagctcgagaaca

SEQ ID NO: 6888 - DNA, 122 bp, Homo sapiens
gagagggcaggacagagagttcagaggtcaggtcgtgacgagagaaacagcaggcaggcgcgcggggcaggtggcgcgggcgggggcgactcccttcagggagcgtagccggggtcacctgg

SEQ ID NO: 6889 - DNA, 122 bp, Homo sapiens
ccggccgccgctattacagtcttcccccgcatcagaaggtgagccctagaccccccttctcgggaccccgttgtccttcagagctgactggatgcctgcaagatcctccttgagaggcctca

SEQ ID NO: 6890 - DNA, 122 bp, Homo sapiens
ggctcaccagtgctagcagaattcagtcagagcacccctgtgccacgactccctcgctctcggtgccctctgctgtgtcacttgcctgccctgtctaggggactagatggaggctactgcaa

SEQ ID NO: 6891 - DNA, 122 bp, Homo sapiens
tagtcgagcgtgcaattcagtttcaaacacttgggcctttaacccagggattatcagggccgactttctgtttggaattggacctcaggtctgatgtactttgggctgatctgtattttatc

SEQ ID NO: 6892 - DNA, 122 bp, Homo sapiens
tgagtggagacaggaaatcagagcctccttgctacccagaccaagctcctcacctctgagcgtcgctccagctcctttcaaagacgctgggaggcccctcgggggaagagcggacaccccaa

SEQ ID NO: 6893 - DNA, 122 bp, Homo sapiens
agccaagggcttggctggcacacagggggcttggtccttcacctctgtcccctctccctacggacacatataagaccctggtcacacctgggagaggaggagaggagagcatagcacctgca

SEQ ID NO: 6894 - DNA, 122 bp, Homo sapiens
tcctggacttgggagatctgtatgctgactcatagagccctaacagtgtcttaattgatacgcccagtggtttcttctcagtcaccagtgaactttgtagaataggatgcagctggttaccc

SEQ ID NO: 6895 - DNA, 122 bp, Homo sapiens
gatcccactacctccatgagtgctacagacaggatggggcccagagctgtgccgggtctgcggctggcactgctgttgctgctggtgctagggacacccaagtcaggggtacaggggcagga

SEQ ID NO: 6896 - DNA, 122 bp, Homo sapiens
ctccctcggcacctcacaatgtccgggcggctccctccctccgattggctgcggcggcagcgcggacctggctgcgctttcgccacaccacgcagcctgcgcatgctcagtgctggctaggg

SEQ ID NO: 6897 - DNA, 122 bp, Homo sapiens
cccattttgacatcaaggatgagttctgatgttccccctgcaggagcaggttcttgggagcgtgaggcaggaagacactaggtgctgaatctcctgcaaaactggctgcctggaggccctga

SEQ ID NO: 6898 - DNA, 122 bp, Homo sapiens
aacaagatgtatttccccaggagttacagatatgttctggtgcatagagagacagcagctcgggatccgggccagcccccacccgactgagcacaggactcacccccctccccccacccccg

SEQ ID NO: 6899 - DNA, 122 bp, Homo sapiens
aatgcggaaccaacaaaatctcgcgagctaaggtttcgctgcgccgggagggacttgtcgcgccccctttcgctccgcctcgtcctagaactcggccaatcatcgctctccaagccaggacc

SEQ ID NO: 6900 - DNA, 122 bp, Homo sapiens
aagtcaggctggcactgctaacaggatcagccactaggtgcagtggtcatagggcaacgtcgggggttacccaccagccatgcgggtcacaccaggcctggaacccaaatgtggaggtccat

SEQ ID NO: 6901 - DNA, 122 bp, Homo sapiens
aaatgtgaggcctatgagcatcggagaccttaactgtcttattctttgctgaattcctagcgtcaagaatgtacctggaaatagctgtgtgtggtggagggcgcctgtaatcctagctacta

SEQ ID NO: 6902 - DNA, 122 bp, Homo sapiens
cccgccctggcctcctgcccggggacatgcagagtcaccatgcgctctgaaacagcccctcggcagcttcacgacctcaccaagtgcccgccgctctcacgagagaggtggttatggttgcg

SEQ ID NO: 6903 - DNA, 122 bp, Homo sapiens
ccctcaccactgtgatggacttagccctgtttgaatagcagcagcctgcaaaaagctcatcgttgtcttcaccaagtgcagagtgttttcaatctggcaattctggcaacccagaaagtaat

SEQ ID NO: 6904 - DNA, 122 bp, Homo sapiens
ttcccggagggtactgaaaaggactaattcaagagaactcaatggaactcaatggaaagtcgcccttctttctcatagaggagagggaaggagagagagagaggagagagggagacagacag

SEQ ID NO: 6905 - DNA, 122 bp, Homo sapiens
atcccttctgctgccagctgtctgtccccagggctgacgcccctcatcccactctgcagccggatgggagagggcactcctgaacatcagtctcacctccccagcgctgtgcgtcctcgggt

SEQ ID NO: 6906 - DNA, 122 bp, Homo sapiens
ctttgtgactctaatggtgcccgtttcacctagtggcagtgtattggcttggggccccaccgcgcaccacatctgagccattcaagaggcgccaggcagctgttcctggcctaaccgacttt

SEQ ID NO: 6907 - DNA, 122 bp, Homo sapiens
gcaagcggcgagaggggagcgctccggcgttcaggcaacagctacccctagtgggagagccgcccggggccggcgccgccccgcgcccgctgccccgcgccccacgcccgtggcgccccgcg

SEQ ID NO: 6908 - DNA, 122 bp, Homo sapiens
catctttcctggatcttgtagtgggtgcacacgcgtgcactgggaccccacacagcaatacgagtccaacttaataaacacatttctggggttcctcaggctgagcatctctctctggcatg

SEQ ID NO: 6909 - DNA, 122 bp, Homo sapiens
ccccgtgtcccctctcactttcctcgccccaggggctgtgcgctgaaggacgctcgcggacgcagcaaactacacgcagcagggtgctgcagagaggaggggtgcacctccttcggagggat

SEQ ID NO: 6910 - DNA, 122 bp, Homo sapiens
aggaaggacctcctgggacacgtgagtaggtccttgagatgtttaccaggggtggctccacggcttcggggaccactcagcctggttggggacattccgccagagcctctggggcagccttt

SEQ ID NO: 6911 - DNA, 122 bp, Homo sapiens
gaacaaatttattcttgtttttgccagcactctgatctgcaagagctgagataaccagaccgagggttgtgagggacctgcatggtgcaacaaaccaaaataattacaaaaatgaaatatat

SEQ ID NO: 6912 - DNA, 122 bp, Homo sapiens
aggaatgtaggctgggtgaagttggcccagtgacacctgcgttcagaaaaacgttctttccgctcccaacgccccctctccaccgccacccgacccccgaaatagttttccccgagtgttgt

SEQ ID NO: 6913 - DNA, 122 bp, Homo sapiens
taggccactccctctcagctccacctgcagacagcagcagagacagaaagcaggacagatcgcaaagacgggcagaacacaggcagaagatcgaaaggaggccacacggaggtggcagacac

SEQ ID NO: 6914 - DNA, 122 bp, Homo sapiens
gcaataaagctgcctgaagtcagtctttagacttctttaactatttcccttagtggtacccgttaatgacaacaagcatttcttagagtgaaagactatcccaccacaaatgcattcaacat

SEQ ID NO: 6915 - DNA, 122 bp, Homo sapiens
gcagcccagcgggcggctggaccgccgcggtggggcggggacaatggggtacaaggacaacgacggcgaggaggaggagcgggagggcggcgccgcgggcccgcgggggtctagactgcccc

SEQ ID NO: 6916 - DNA, 122 bp, Homo sapiens
cctggtcctggggctgaggatggactagggggtggcacccacccaaggcaaatggctgagcggccccagggccaccctccatgtgaccacagctggactgcctgtggactcagctggggcac

SEQ ID NO: 6917 - DNA, 122 bp, Homo sapiens
aatacaattagtcttgttgttccagttccgctcttggctgatgaccgacagctggagattcgagggcagaggctgaaaacctttgggccagagcagctgccctcctcaaacctccccacaac

SEQ ID NO: 6918 - DNA, 122 bp, Homo sapiens
ctataagcattttgagcgggaactgcattttaaccccggccaaggagagattccaggaagcgcctgggccccgaggctgaacagtgaagctcatgggtactatctgagggtgcaaccaagca

SEQ ID NO: 6919 - DNA, 122 bp, Homo sapiens
gcctggtgtgggaccagggggcattcttgaagctgacgtcgaaggaggaagttaacgcctcggggacttagggtgacggcctcattttgcatcatgatcaggattttcctttatcccaaatt

SEQ ID NO: 6920 - DNA, 122 bp, Homo sapiens
gcaaaaccagtatgaggtggacccaagaagagcaacatctctctctataaaactcagaggcggatctgtgaaggaaagcatctgtttctccagtctaaggtgggacgattctatgctgccat

SEQ ID NO: 6921 - DNA, 122 bp, Homo sapiens
attgggaagttaggggacctgatgaatcagaaatatggtaatgatgatgggatggtaaagcgtctcaagctgaattcacccacaaagggtgaaggagaatgcccgagtcataagctgattta

SEQ ID NO: 6922 - DNA, 122 bp, Homo sapiens
aaagtgtaatgagctgctcagtgtgcctccctacatcgttagtccgaggagagggtccctcggtgcccagcacagtgcgtggcacagtcggtgctcagggagcgatagctagatgaaaccgt

SEQ ID NO: 6923 - DNA, 122 bp, Homo sapiens
ggagaccctggactcctaggaataaaccaacgttaaataattgcacgagtaaactggaaacgaagggatggaggacacaggagtccaggaggtcccgagagcagggctgacttcatgagcat

SEQ ID NO: 6924 - DNA, 122 bp, Homo sapiens
catcgccaggatccattttgaggattatgggtgagctgctgccccacacactcccccggccgccatcacttgggcaggccccctgggtgggatgataatgccatctggccttggtgagtgga

SEQ ID NO: 6925 - DNA, 122 bp, Homo sapiens
agcctcccagaactgggccctcttggatccactaacctagatcatagtgagaggtgacagcgttctggcagccctcgctcactcttggcgcctcctcagcctcggtgcccactctggccaca

SEQ ID NO: 6926 - DNA, 122 bp, Homo sapiens
tgggggcccggaagaaatcaggcaggtacagccacttgatgagtgcggagttcatggggacggcccggctccagcgccagggataatctgggggaaggggtgtcatgtcaggaagggccggg

SEQ ID NO: 6927 - DNA, 122 bp, Homo sapiens
ggacatcatgatgttctcactagttgctttctgctgagctggaggccaaggactcagactcggtttgactggttctgcctctgacctgctgggagacctggagcaggtcacttaacctctct

SEQ ID NO: 6928 - DNA, 122 bp, Homo sapiens
gatattctgaacagaggccatttttcttttgggcagattccacgggccatcgaagtgtttcgctgccatcttaaatcctggctgtggcctcaatcctgcagcgaagctgcccagatcatttt

SEQ ID NO: 6929 - DNA, 122 bp, Homo sapiens
ttctggcccgcggtctgtgtcactgggcgtggagcggtctgggtgttaggcagaggagagcggggtagaaaaatagtgtcatagcctaaactatttgctctccaatccaactgcgtctcggc

SEQ ID NO: 6930 - DNA, 122 bp, Homo sapiens
tgcgcccctcgcgcttgactgacgaggcttgcgggccaatcggaatgtagtcaaaggagccgctaggcgatccaataggtagtagggggcgggagagaggggccaatgagcctggagctggg

SEQ ID NO: 6931 - DNA, 122 bp, Homo sapiens
caaaatctcagtgctcacaatctattaaatgaaatatattagaatctgttcctgttactacggctgcataagaagtgccaaaacttagtggtataaaactaacatttattaagctcctagat

SEQ ID NO: 6932 - DNA, 122 bp, Homo sapiens
tcttggatcgcccgaggctggtgctcagcctccttcccccatcccacctccaccacccggcgacccccgtagacttgattggcaggccctgccccgacccctacccctccaggtccccgcct

SEQ ID NO: 6933 - DNA, 122 bp, Homo sapiens
tctgtgttgtggggacagcaggtgtgcgtgtgtgcctgtgtttgtgggtgcgtgctcagacgtgggtcctcaaggggtcccgggcctgccccttccttctctgggcctcagttgtctcctgg

SEQ ID NO: 6934 - DNA, 122 bp, Homo sapiens
aaacccagtgtaactaactgcaaggaaggactggcattcttgctgggcatatgtgttccccgggcattttcagtgccaaagtctccccaaagggaagagctagaactgttcccttcacccac

SEQ ID NO: 6935 - DNA, 122 bp, Homo sapiens
aaggagctaagctcagtctgctcgtgaaaaatgatggtgacatgccatgtgtgcccttcccgtttgacagacggcgatctcgatgtcgtgtttgcctcttcctctaagtgcggaaaggataa

SEQ ID NO: 6936 - DNA, 122 bp, Homo sapiens
ccactcacctgccgcgtccggagggcgcccccgggtccgcccgccacgtctacgcctaggcgcccccgacattgtgatcccagcccggcgtcccgcccccaactcaccgccaccgcgggcgg

SEQ ID NO: 6937 - DNA, 122 bp, Homo sapiens
tgctgcacccctgactatattataaaactccttacagggttttccaaagctataggaccacgtgatataactcccgtccacttctgccatctccccgcctaatctccctccacccaagctgt

SEQ ID NO: 6938 - DNA, 122 bp, Homo sapiens
gcagacctttcctcatcgtagacagaggtgtgccggggggaggggagggggacagagagacgcgcaaacagctgaaagccccactgggcagaagctgaatccgtgcaccgcgaagcagtccg

SEQ ID NO: 6939 - DNA, 122 bp, Homo sapiens
gagtgaaagccccagaaggcagcatgtagtgaaacagtaaagggattctgggaatacgggcgtgcacaaaacactgacagcatctgctgcctttttaactggattcttactacttcccggtt

SEQ ID NO: 6940 - DNA, 122 bp, Homo sapiens
atttcattttgattgggaacaaaaaatgtggcccatgagcttgttattttgttgaattggcgtttatgcctctgaggctgcccaccgagacctaaacctggcactcagttgcctaaggcaga

SEQ ID NO: 6941 - DNA, 122 bp, Homo sapiens
aatccctcttcttattttttctaccctctttacagtcaaggtggctcacagcagcctcaccgcctgctgcagcaggacaattggcggagtgaggaggccactgcctagtcccgggagagggt

SEQ ID NO: 6942 - DNA, 122 bp, Homo sapiens
tggaccctttcccgggagccaaaactcgaagcccccgggagcggcgctgtcagagggtgacgtcggggggcggtgcctgcgccatatatgggagcggccgcccctcgccgcgcccctcgccg

SEQ ID NO: 6943 - DNA, 122 bp, Homo sapiens
tgccctcacatgaaagtctacagaggaagctaccatatggtatatggattgacattctctcggtcctcacatcctggatttccacatctccataagctcctataggcatctaaaacttccct

SEQ ID NO: 6944 - DNA, 122 bp, Homo sapiens
caggagcacgggcgaaatcagtggaggcccctgctgagtgagtggacatacccaggcgcacgggcgaatctgcagaggcccctggtgagtgagtggacgcacccaggagcacgggcgaatca

SEQ ID NO: 6945 - DNA, 122 bp, Homo sapiens
gcaaatggccccgtgcgcgcagctgccccacacgggagagggcgagggcgcggaagagggcgctcccccgccgctggagccgcagggcgctgcttttcgctgactctgccaaacacgccatt

SEQ ID NO: 6946 - DNA, 122 bp, Homo sapiens
tagggtgtgggtcccgggtcctgagacagccggctttggacacatggcacctgctcaaggcgttcttgctctggggatgcaggatgcacagatatgctgggaacttgctcgagatttgagaa

SEQ ID NO: 6947 - DNA, 122 bp, Homo sapiens
gaagagccgggcccgtccggaggctaggagtgaacggagttcaggaagcgagaccgtgggcgctgaggaaggggcgcgacagccttcaggaagagggggcctaggagtcacggccgccatgg

SEQ ID NO: 6948 - DNA, 122 bp, Homo sapiens
tcgagatctctgcaaaggtcattgttttttgtaaaggtcattgtcttttcatgaaaaccccggcaaagcatgccaacgcaggaaagccaccagcttgccaaatgtccggtgtcccagtcacc

SEQ ID NO: 6949 - DNA, 122 bp, Homo sapiens
cggaaaccataaacgtcaccagattcagagcttgagcccacctctcccagaggttttgtccggtaaagggaagaggaacagggttcaactctcctggcagaactctatggatgccgcagaag

SEQ ID NO: 6950 - DNA, 122 bp, Homo sapiens
ggcgcatgctcccggccgcaccgcgcacccctcccccccagcctgtggttctggggcacgcgaccccgctaaccccagccagactgccaggtcaccaggccggatccaggagcgctcggacg

SEQ ID NO: 6951 - DNA, 122 bp, Homo sapiens
gctgggcctctgttttcagagacagcatgtggtgctaagtggacttgcctctcagcctcacgctgcctagtccagggaccctgggcagacaaaacaatgccatggtgtggcctgctcccact

SEQ ID NO: 6952 - DNA, 122 bp, Homo sapiens
gtgggcagaaaattcacatatttttttcctgcagccagaagccaagaaggcacagacagacgaataccaactcagatccttcaacaagctaataatcaataagaccttcctaaggagaacaa

SEQ ID NO: 6953 - DNA, 122 bp, Homo sapiens
acccgtggctcgacctctcatcgctaggcttctgctacctcatctacttcaacagcatgtcgcagatgaaccgccagacgcgccggcgccgccgcctgcgccgccgcctggacctcgcctac

SEQ ID NO: 6954 - DNA, 122 bp, Homo sapiens
ttactgctgagccactgtagagaggatcaagaaatgacgctcttggaaggagagaagctgcgggcaggacagtcacgtcagaggtccaagaggcttcagcggcccaaagaaagggaaggtgt

SEQ ID NO: 6955 - DNA, 122 bp, Homo sapiens
ccgggtgcggagtcctttgcggagctggtgttcgtcccaggggttaaggtcctgtcccgccgtccttacccgcagtaagcctccgggcttagagagagggacggggaaacagacgggcacag

SEQ ID NO: 6956 - DNA, 122 bp, Homo sapiens
cttctttccacgtactttctcagtgccttgcagagagaggagtagcttgctggctttgaacgcgtggcgtggcagatatttcagaaaggtaaaattactacacttgtggatttgacggatac

SEQ ID NO: 6957 - DNA, 122 bp, Homo sapiens
gtgcgcgcgtttctggcgcgagtgggaagtgtggggatccggcgggcccggtgtgaggggcgtgtttctggggcgagagtggggagtgagtgtgaggagcaagggtgaggggctgcagggag

SEQ ID NO: 6958 - DNA, 122 bp, Homo sapiens
tgagaggaggctcagaacaggatgacactggggcctctcaaacattaaggtgcatgccatcgccttagggatcttgctaaaatgcagcttccaactggtggtgttggaaacttctgcattca

SEQ ID NO: 6959 - DNA, 122 bp, Homo sapiens
cccgctagcgggaaggaaaccgaacagaaaacgcacaagcgcagaaaagaaactcctggccgtcggtcggcccccgctcaacagcccaataaacggaagagcttctagtcaccgcccacctt

SEQ ID NO: 6960 - DNA, 122 bp, Homo sapiens
ttgagccacaaattctgagctaaagcctttccttcctgctccggatagatttaggtggcccgtagccttcacagcttttcctgcttaataataccttgttgcctctgactcctcttaactgt

SEQ ID NO: 6961 - DNA, 122 bp, Homo sapiens
tgcgggcaactacagcgtcaatggcaactgcgagtggctcatcgagggtgagtggggccgcgtgggtcactcactaattcgctggtagttcattcatgtgtgcattcatccactcaccacat

SEQ ID NO: 6962 - DNA, 122 bp, Homo sapiens
cctggggctttttggagacggctcccaccgggtgtgctgcccttgccgtccagcaggtggcgcgcccgggcaggttccaaaggtcgtcaggcgtcccgcccacccccttttgcaggcgggga

SEQ ID NO: 6963 - DNA, 122 bp, Homo sapiens
atgcagcaggtggtaccctgacgggacctggatctgggcggggtggtgcgctcctcagggcggatgccaccgggttccccaggggaatacatgtccccagctctgggaggggtttgctactg

SEQ ID NO: 6964 - DNA, 122 bp, Homo sapiens
gtcatctggttgtgcccttcactctggctggaagtctagtgacaatttcctcctgttggtcgctttccgcctgtcccagaatgcctcactcttcctcgtaggctcccttaactccactcaca

SEQ ID NO: 6965 - DNA, 122 bp, Homo sapiens
gctatgtgggggggttagacttccggccaggctgatctggccctgggggctgtgagtcagcggaggttgagaggatgaggtcactcagagaactggagagtgacccagcgcccgcgtgtgcc

SEQ ID NO: 6966 - DNA, 122 bp, Homo sapiens
cactgtgtttgtaagtggcaggatttgaacccggcaggccctgagatctttctgcagtcccgtgctcccctcctttatgcggttttccttttccctttgaggaggggagggagagattcatc

SEQ ID NO: 6967 - DNA, 122 bp, Homo sapiens
gggggcgggctacgctaatgaggctactgcataatcatgagctctggcaaggagggctcgcgtctccggacacttaaggagggggacgggccaaagaaagggaggagctatgttaataaggg

SEQ ID NO: 6968 - DNA, 122 bp, Homo sapiens
gacgatgggacggtgctgctctccacggttacagcccagtttccaggggcgtgtgggcttcgctacaggaatccagtgtctcagtgtatgagaggtgtccggctggtagaaggaattctgca

SEQ ID NO: 6969 - DNA, 122 bp, Homo sapiens
ctctctcagctactcccggatttctggttaaacctgagggtgagcccgaaagaccgctgccgccggcggccaccccagcgcgggtccgctgagaatggaaacagcaagtgcgcgccggccag

SEQ ID NO: 6970 - DNA, 122 bp, Homo sapiens
cgaggaaaccgagaagcctctagtcccgggtcttcagaaaacgcagaggtggagccgcgccgcactcgggcactccccggcgtgggcgctcccggcgggcgggccttggccgagggcgctcg

SEQ ID NO: 6971 - DNA, 122 bp, Homo sapiens
ttgcatcctgtgggctgtcttttccctttctcgatggtgtcctttgaagcacaaagacgtcgtgattgttttctgggaagccttgttgttgtgttttctctctgttccttgtgctttggtgt

SEQ ID NO: 6972 - DNA, 122 bp, Homo sapiens
atgcctgggttcagccctaaccccagtgtgactgtataggtaattaagggtaagtaaggtcgtaagcgtaaggccctgatctgatggggacctcagccttatcagaggggcaaggggactgt

SEQ ID NO: 6973 - DNA, 122 bp, Homo sapiens
tatgaaaaagtcatgagttcccagaaatattgtaagcaatatgagaaaaaaagatccgagcgattgaatctcagtgccagtgcttgatagatccttagtaaatattccttgaatgaggaatg

SEQ ID NO: 6974 - DNA, 122 bp, Homo sapiens
ttcagggcctattcccatgtggggaacccagtcctgctgtgactctgggagggagagggccggggatacaatcgtacattcctggtaacagccctgtgattgtctgcttcaggttatcagtg

SEQ ID NO: 6975 - DNA, 122 bp, Homo sapiens
tttgagtgtgggaataaatatgtaaatgtgagaggtgacagcgtgctgtcagccctcgctcgctctaggcgcctcctcggcctctgtgcccactctggccgcacttgaagagcccttcatcc

SEQ ID NO: 6976 - DNA, 122 bp, Homo sapiens
cggcgctgcccgcggtcctgccctcgttccaagggcacggcgccggtacgaggacaccgacgctgtggcgcaactgccgtcccccgcagcaatcccggagcccggctcccggccgcccctcg

SEQ ID NO: 6977 - DNA, 122 bp, Homo sapiens
ccacactcaggcctcatccccgagggctcagccgtgcggttgctgccggcagccaggcctcgacccacccccgcccagatcccaacctcaaaaagtggccgcttctgtccagctccccgctc

SEQ ID NO: 6978 - DNA, 122 bp, Homo sapiens
agacttatttcgcgcggtcggagaatcagattgtgcccacaaggcggaaatgtacgacagcgggttccggtgaccacgaaggcggcaaaggcgacggaatggaggaggtgcctcacggtaag

SEQ ID NO: 6979 - DNA, 122 bp, Homo sapiens
catcaccacggaatccggggccgctgaatctgggacctccagccacaggcggccccaggccgactcattcagttccaggtgagccctggagagaggatataggcgtcgctaaagctccaggc

SEQ ID NO: 6980 - DNA, 122 bp, Homo sapiens
attacaagaaagcagcaacaggtctcttggggctgggaaaagacatcctggtcctcacaccggcacaggctccattagagatgctgggacagtgtcctcaaactggctgtcaataaagggat

SEQ ID NO: 6981 - DNA, 122 bp, Homo sapiens
tgtcactaaaaattgaacctcgactccctgcttgaagatctggccttgcccctgagtccacgggatgttcatggaaagcaggacagacagaattgtgtatgccttgcctatcacggtacagc

SEQ ID NO: 6982 - DNA, 122 bp, Homo sapiens
cagtggatacctttagacacatgtcctagtagggatgctcgggctttgcttctctgcggacggggctgtgagtctcagaggctccatctgcattccggggcaggggctaggctgctgagtat

SEQ ID NO: 6983 - DNA, 122 bp, Homo sapiens
cgctcccagcatactggaagccgagtgcatggcagtttaaaatttaacagccacaacaaacgaccagcaatcaccccccacccccaccctcttttaaaaaaaagtcagccaaagcaccgtcc

SEQ ID NO: 6984 - DNA, 122 bp, Homo sapiens
cttcagtctgtgtgtgcagcaccaagtcggggggaagttagaagaggtgggaagagccaccgagcaggcagctcaggagaagccaaaccttgcacagtggaacggaacgggcagtccatttg

SEQ ID NO: 6985 - DNA, 122 bp, Homo sapiens
ctgcaggtttcctaacagagttttagatccctggcgggggcctgccattggataaaaggccgaaacaggaaaatcacccagtgtcgttctcttcttccaagtgtctactgccctccaatatc

SEQ ID NO: 6986 - DNA, 122 bp, Homo sapiens
ggggtcccagccccatccccaggtgagaaagcctcaggccatcgtgggtcagggaccccccgctaaggtatcctgagcaccaacaccatgttccctcccccgtgctgttcccccaacccgtg

SEQ ID NO: 6987 - DNA, 122 bp, Homo sapiens
gccaccccaccccacctgggcagagccagtgggaacccagaggcacccaactggaggtgacgaggcggctgcgggtcctggctagtcctagctcctactcgggtcccagcacaccctgcagc

SEQ ID NO: 6988 - DNA, 122 bp, Homo sapiens
ccacctcccccttgccttgtccttgtcagtaaactcaacgtgattaacttccctagttaacgcatattctctcgtccgatttccagcttctgggaatccacaacttcttattcttaaagagc

SEQ ID NO: 6989 - DNA, 122 bp, Homo sapiens
ctgtgatcttcggaagcaagtggataaacgggagcatgtgaaatgcgaatctccacgaggcgttatttgtagctaaatattctattcaatgggtaagatggttttgagaaatcctagtttac

SEQ ID NO: 6990 - DNA, 122 bp, Homo sapiens
caaattggcttcaatgtcagagacaggaaacccagtatgcatctcccggtgcctggagagcgaggagataagagagcagagatgggctgcctcggccagcagcaccggagcagggacggtag

SEQ ID NO: 6991 - DNA, 122 bp, Homo sapiens
agggaccggggaagggggcgactgaacctatcagattgggtccagagtgggtttcctgcccgcgcggatccgcctgcccaccgcgcgtgccccgcctctctcccaagagctacgcggcggcg

SEQ ID NO: 6992 - DNA, 122 bp, Homo sapiens
tccgacttccggacatctccctgggagtcgcgcagagtggagtcaaaggcaaccagtgctcgctgcggtctctggggatcgggaccgcggcggcggcccgcgagcgggatgttccggggctt

SEQ ID NO: 6993 - DNA, 122 bp, Homo sapiens
cgtcttggccctacagccccagctgggcactaaactcgggccacggcggggcgagcgaggcgggctccggaggaagctgacggctgatgatggctcagtccaacatgctccccgtggctgat

SEQ ID NO: 6994 - DNA, 122 bp, Homo sapiens
cgcagcagcaactccccggacgcgcgcaggcctcaaagccccccagcttcagtgccccctcgaccctgaaacttggagcagggtgggggttcagtatgaagcccccggaccgccccgcccct

SEQ ID NO: 6995 - DNA, 122 bp, Homo sapiens
agcctactaagcaattcacttaaaaacaccctcagtacatgtgcaacaatgcctggaccacgcctcgtctgtgcggcccctgggccacctgagcaccggctgggggcgggggaggcaggcac

SEQ ID NO: 6996 - DNA, 122 bp, Homo sapiens
taactttgggtggtgtaatttttgtcaactcttcacaacctgaacaaatacttttaatcacgtccttctccgatattttcaatgaaaaggcaaagggcgctagaacttggaaaacggatgct

SEQ ID NO: 6997 - DNA, 122 bp, Homo sapiens
aggccagggtgtacaggggatcagttttggcttgggtggtgtggccgggacaatctggcacggggttgggaagccagatgcccacagacatccctgctgaccaggaacctctttgaactcag

SEQ ID NO: 6998 - DNA, 122 bp, Homo sapiens
cctggtcatcgatgtcatccacgaggtggcccacagttggttcggcaacgctgtcaccaacgccacgtgggaagagatgtggctgagcgagggcctggccacctatgcccagcgccgtatca

SEQ ID NO: 6999 - DNA, 122 bp, Homo sapiens
gccagccacggggcttcgcgcacccaccgggcccctgcaagatgaccaacctgcaggccgcgcagggccacgccagttgcctgtcaccggccaccccgtgctgcgccaagatgcactgcgag

SEQ ID NO: 7000 - DNA, 122 bp, Homo sapiens
ctgaggctggagggcagcgggtccccatcccgtgagttcctccgcttccgggccaggcagcggactgcagagacaatgagacagcgtgtggcccagccgtcagcaccctgcccgccctgctc

SEQ ID NO: 7001 - DNA, 122 bp, Homo sapiens
cttttcagtcgggccttttcagtgggtcttctccgcgactcttcttttggagaaatttctcgtagccgcgtcttggcctagctggatcattgagaaaacaagcccggagcgcgcgcaggtag

SEQ ID NO: 7002 - DNA, 122 bp, Homo sapiens
gccctcttagaattatgattcttaattttttttcttgccttcctttctttggaagcgaatcgccagtatggaaacacagtgtgtaaagcaagcttcgagagaggaaagagttaattggtttt

SEQ ID NO: 7003 - DNA, 122 bp, Homo sapiens
actggagtttctgggaaaccggttaactggaaagtaaggcccccagccttccccctggctcggaccatgctgaaggtgtgtcggctccagcttttacccccagaagtccatggaataaggac

SEQ ID NO: 7004 - DNA, 122 bp, Homo sapiens
aagctcttttcatgatcccagaccacgcccaagacctaggtcagacattccataaaaacacggagatggtcacagtgaggactgggcaagacagtgcagtgtctcaccaaaaatgccccttt

SEQ ID NO: 7005 - DNA, 122 bp, Homo sapiens
gatcagtgtcaacaggctcgaaagtgggttgtccaggctcagctagcccccagtcctccacgagaacctcacaggggctggtctggccacacagtgtttgattgttacactgttttaccact

SEQ ID NO: 7006 - DNA, 122 bp, Homo sapiens
agaaaatcgcggggagtctctggccgggagagtccaggtagcgctcggcgggcagcagtgcgcaggcccctcggcttcaaccgccacaatgctgccagcagcgccaggcaaggggcttggga

SEQ ID NO: 7007 - DNA, 122 bp, Homo sapiens
aactagggaggaagccaggctgcggcggacccagctgaccaaaggaactacagaagaggacgaagaaagcgagggggaaagggcgagggttattaactgagttgatggaataaggtagtggc

SEQ ID NO: 7008 - DNA, 122 bp, Homo sapiens
cccctcccgccgtcaacactccccggggcgggggctcacctgtgtggtctgggtcgcctccgaggccgagtccctcgttgccaagcccagcaggcctcgctcccccgtgactgcaccgccgg

SEQ ID NO: 7009 - DNA, 122 bp, Homo sapiens
ctgtgtcctcagtggtggtgtctagggatggggtacacagcccagcctctgcccagggctcggaagcccttggccaaatcccggctactccctgctccggcaggctgagcgatgcccgtgca

SEQ ID NO: 7010 - DNA, 122 bp, Homo sapiens
tcacgaacaggcgccctccatcacacccaattacgcgtgacctcaacagctctcacatcccgcagaaccgggtttcagttccactgtgcctgagcgttcagctcagcagaggtagggactaa

SEQ ID NO: 7011 - DNA, 122 bp, Homo sapiens
ttaataagttatgaaattctgatcctttggcactacccacttgagttctgctccagaatccgtaacaatggctcaagacatggtgtttcttcgctgatccctctgcctgggggatcatttct

SEQ ID NO: 7012 - DNA, 122 bp, Homo sapiens
ctgcaggagcgatgctgccgcctgtggatccggtgcagcctccttcgagagcagtgtctgcgcctatagtgagactggccatgggtcctctcgtagacctcgacgtgctccgggctcagccc

SEQ ID NO: 7013 - DNA, 122 bp, Homo sapiens
agtcctcgcagcaggagagggcaccagacagggagccgctgccgagaaagccaagagcaccgggccctgagaaccccagaaaaggccaccaggagtcccagatgccagaatgggcgtctttg

SEQ ID NO: 7014 - DNA, 122 bp, Homo sapiens
ggccgatggcggttacagctcatggaactgatgggcagggccgggtgcagctttgtagcacggctgctgctcacagattctcttccatttgactaaaaaccatgctgtccacaccaaacatc

SEQ ID NO: 7015 - DNA, 122 bp, Homo sapiens
ccgctcacctgcaatggcctcggccggccgggatggcaacagatggtgcgtgccggggaccgcgttagcagcagcactcttgagaaaccaggaaaagaggaaacatgcgcgcgcagcgggcg

SEQ ID NO: 7016 - DNA, 122 bp, Homo sapiens
ggtggggttttggctgggattgacctttctcccctaacagattggaaactcgtaatttcccgctttttggtgaaactcgttgacagacaccatctgctcgctactaccaggctgttgaaagc

SEQ ID NO: 7017 - DNA, 122 bp, Homo sapiens
agtttcctgtcttgctgagctggcttactcaatttccctcgtttgtccgctcagaccagacggggcaaagggcagccatcaaaggtgtctgggacgagcccggcggggtaatgggccgctag

SEQ ID NO: 7018 - DNA, 122 bp, Homo sapiens
tcttcgggaacgctgagttgtgagcatggaagattgtcacgcagcaaataccatttggcacggccctgctctgggaagacagggacaccgtaggtgggcatccctgggaaatcagagagaca

SEQ ID NO: 7019 - DNA, 122 bp, Homo sapiens
gtgctcaccgggccagagtacgaggcattggatgcactgcctgatgccgagcgcagggtgcgccgcctactgctgctggtgcagggcaagggcgaggccgcctgccaggagctgctacgctg

SEQ ID NO: 7020 - DNA, 122 bp, Homo sapiens
aggcgagagaaaatacggacgcccccgttacaggcggtgatggagcagttttaataatatcggaagaaaatggaccataaatgcctttccagctgtaccattaatctgcacattagcgatac

SEQ ID NO: 7021 - DNA, 122 bp, Homo sapiens
tgtgtaaaatgaaaagaaaactaaatttgccctaataccaaggcgctacgtttattgcctcgtcttattcactgacctttgtaatgatacacagtgaattctttttgacaaagagaaatgca

SEQ ID NO: 7022 - DNA, 122 bp, Homo sapiens
taagagccgcccacttgaggaccagcagggcaagcagcggaaccccagttctcagaatcccggctcccgctcccgtcattaatttatctcacgcgctgatatgatgaatgcgtgtgggtttt

SEQ ID NO: 7023 - DNA, 122 bp, Homo sapiens
ggggtcgggtgccgcgaacttgctctgagggggttagctgcgcctcggattgatctgcgtcgtgcctcgataggcagtaaccttcatcgctgcggttgcgtagcgtttacccatgcgccatt

SEQ ID NO: 7024 - DNA, 122 bp, Homo sapiens
aaagtcccacacccgtgtctttcattaagccagctgagtggttctccctctctagcccaacggaatgtcctgagtaccagctttaactgccaatttggtctgtggctcagatattaaccttg

SEQ ID NO: 7025 - DNA, 122 bp, Homo sapiens
taaaaacaggcttgcggtctccagtgggggcgcgtgaagcgggatcccaaccccgggccccggagcgaggcctggatcgccctatgccttcttgccattctcttaaatgcactgacacccct

SEQ ID NO: 7026 - DNA, 122 bp, Homo sapiens
cgcagtaccaatgtccacagtattttatgtgatgaatgacatcttaaatctggctgataacgatgctggtcttcaggattggtgacatgggtgattttggagaggacagtgcatcttgagaa

SEQ ID NO: 7027 - DNA, 122 bp, Homo sapiens
agaccgtcggcggtggtagcgagaggcggaggaaggagtgacaggagcccggcgttcttgcggcaaagcttggtccacccctggatttcaataaaaacagcagagtgaggtgtgactgtact

SEQ ID NO: 7028 - DNA, 122 bp, Homo sapiens
gcagtgatgcgagccgcatgttcctcgcctcacctgctcactttctgagcctcactgcagcgacaggaggcaggaagcacccccaacccccggttttaataaatcctcctgccattatcacg

SEQ ID NO: 7029 - DNA, 122 bp, Homo sapiens
gactatgattggaacgatggttgcacagccaccggcagcgttcaggggagcagagcagggcggcgggagatggggcggaaggggaaactcctccggagccccctcccacagggagctggtgg

SEQ ID NO: 7030 - DNA, 122 bp, Homo sapiens
agctgtgaccgcccccacccccgggggagccgcggcgggactgctgggcgccgaagcgcgcgttaatcattaaccctccgcggcccggctgcccaggtaacgcgtgaggatgccctcctcgc

SEQ ID NO: 7031 - DNA, 122 bp, Homo sapiens
cccgcatccgcgacgagggggcggggtcccacggcgcgctgagaaaggcgggcgagctggcgctcaggtgtgttcttccatagggcccgggcggcagagaggaccgcgtcccggcagtcgga

SEQ ID NO: 7032 - DNA, 122 bp, Homo sapiens
gggaatgctccggccccctgccgccgtctcccggcccggttctctttcactaaaaataggcgattctggcagcgcccctcctatggggccttgggggcaattggggttttgtcttagagccc

SEQ ID NO: 7033 - DNA, 122 bp, Homo sapiens
cgctcatgtatgtaggtttggcgccggtcttcagggctgagggtgcatgctgggtgtccccgcgcggccggacgcgctccagctgggttcagccgctcagctgctccggaggaaccccctcc

SEQ ID NO: 7034 - DNA, 122 bp, Homo sapiens
acctcggtagcccctggtgactctgtcacagcctctgttgacctatgatctgcagggagacgcacagccaggacatcctggaacctgggaaagggtgagtgtgcggggttgggcaacccgag

SEQ ID NO: 7035 - DNA, 122 bp, Homo sapiens
actagggtcctcagggcaggggcgggtagacggggcgcggcgagggacacgtggagcgtccgccggaggccacgtcggcgtcggctgtccacgtgacccggcacgccccgccctgtccaccg

SEQ ID NO: 7036 - DNA, 122 bp, Homo sapiens
cacacagccatccagactgaggaagacccggaaacttaggggccacgtgagccacggccacggccgcataggtaagtgccggcttcccctcggggtgggccttgggctctcttcgggtgctt

SEQ ID NO: 7037 - DNA, 122 bp, Homo sapiens
ccagcctgtcgcgcattaaaaccgtgtctctcccgcagctgtgggtgggccccggggcgccgcttgggggtcctgcagctggaggtggaggaggcccacaattctccccaaaccagagagag

SEQ ID NO: 7038 - DNA, 122 bp, Homo sapiens
gatgagtggttcacagagagcttggggagcccctccccgccctgcgccctcaggaagagacgcggctcgcctgacactactggtctctgtctcccgagagccagagccgagctccccgagtg

SEQ ID NO: 7039 - DNA, 122 bp, Homo sapiens
tgcggaactgctttctatgttcacgttaatgagctcctccctggatctattttaagcttacggccattattatttgctttagctgagggctggatttggacagcttcctgcccccacttcct

SEQ ID NO: 7040 - DNA, 122 bp, Homo sapiens
tgaaggaaaaaaagagatcgatcatatgattgttttgtagttcctaggacttaggctcttcgtaagattcttctttctgtttcttttttttttttttttttttaagacagagtctcgccctg

SEQ ID NO: 7041 - DNA, 122 bp, Homo sapiens
gtgtagaggaggagagaatttggggctttcaggctgggagcagctagggaagggccaagccggaaaagcagcatctgccaggctggtaagagacaaggctcaagtgcaggcactgcgaggaa

SEQ ID NO: 7042 - DNA, 122 bp, Homo sapiens
ctttggaaacttgaaagatctgctaacactggactaaaatttctgcataggaacaatcggcgactcctcagccagacccggagacagaatgggtgctgggaaaatatgacgtcctccctggg

SEQ ID NO: 7043 - DNA, 122 bp, Homo sapiens
tgtgaggagaggggaaaacagggctgatttctcttcagataattcgccggggctcaggagcgcacaggaaatggcaggcttgagcacaccaggcaatttgctgaatttcagggccggcggcg

SEQ ID NO: 7044 - DNA, 122 bp, Homo sapiens
gaagggcttaacaacctaatcaagcaataagaaacgcagaatgagctcctaaaaaataaacgagtaattataattattcaatcaatcaataagtattcactgatctgggagccagaagttac

SEQ ID NO: 7045 - DNA, 122 bp, Homo sapiens
cctcattaggtgagcaagcgcagaaaacgcattttcatcccccaggcttctgtatactctcgtgtggaataaaaactctattgctccggtctgcatgttgctgacgccccagaatcccgatg

SEQ ID NO: 7046 - DNA, 122 bp, Homo sapiens
tctgattagttttatgactttgccttcatgcctcaggagctcaactgatcacggctttcacgacaggctaaggtgggtgttggaggggcagcttgaaaataccctcaaaactctcctccagc

SEQ ID NO: 7047 - DNA, 122 bp, Homo sapiens
gaaatgtattctctcacggtcctggaggtcagcagtccacggtcaaggtgttggaagggtcggcttctcctggaagccctgagggagggtctttccctgccccttccagctgctggggactg

SEQ ID NO: 7048 - DNA, 122 bp, Homo sapiens
gcaacaccgtctagggcctacgagaaaaccagggggctcggctccgctggagcctctgcccgtggatttgtttagggaaggggagtcgaatatctatttttcttcttagtaaaattatctgc

SEQ ID NO: 7049 - DNA, 122 bp, Homo sapiens
gacccagcagctgactccttcttccacccctcttcttgctatctcctataccaataaatacgaagggctgtggaagatcagagcccttgttcacgagaagcaagaagccccctgaccccttg

SEQ ID NO: 7050 - DNA, 122 bp, Homo sapiens
ccacaggcttctcttatgaaccacctctgttaacccctttgtggctggctgcatcggtcacgggttcaaactcagcctttgttcagtagaattgcacttttctaattcttgattaattatgt

SEQ ID NO: 7051 - DNA, 122 bp, Homo sapiens
ctcagagtggctgacaggggctgaagagaatgaaccccattatcttcaacacacggcccacgattagcagggaaacaaaatcaacaacagctttgcttgaggataagcaaatttcaacccct

SEQ ID NO: 7052 - DNA, 122 bp, Homo sapiens
gcaaagtggagggctttgctgaagccatctcgattcttcctccctgcagctactaaaacacgcagcgctggcagctgaggggcgcgggccttagcattaccgcagaaactgtgaagggcaaa

SEQ ID NO: 7053 - DNA, 122 bp, Homo sapiens
cggcggggaccgggccgctggggaactgacggggtcgggtcggggccaggcggggggcggcggcggggcgctcctgcccggggggcggcctgagcccaggccgcggggcggaggtggcgggg

SEQ ID NO: 7054 - DNA, 122 bp, Homo sapiens
agttgcgatcagtttaacctgtctggcaagcaaggctggtagattctcctgttgacaaagcggcggccctgtgattcaaagaagtggagagtggactttttggtgctacaaaggtgggaccc

SEQ ID NO: 7055 - DNA, 122 bp, Homo sapiens
ggcgtgaaagcaaaggtcagcgcaaatgtatcttaatagagtgtctgtagtgaagtgtgccgcctttgaagcggccgctccccgcgcgtatttccatggcgagcctaacgcggcatgctgat

SEQ ID NO: 7056 - DNA, 122 bp, Homo sapiens
tcttcatttgacccagccatccttgactggcagcattctgacctcccactagtgatgtgccggtgggaaacacacaggaaggaaaggcgcgcgcgaggcctgcccccggaacgaacgacgcc

SEQ ID NO: 7057 - DNA, 122 bp, Homo sapiens
cccccagccctcggggagtacacctcggggggagcgagtgccccgagggcaggaggctgccggggcgccggaagctgctgtcccggcggagtcgcagcgggggctccggttccccgagactg

SEQ ID NO: 7058 - DNA, 122 bp, Homo sapiens
ccgagccgcccgcgggcttctgggagggaaaggaccggagggcccggcccccttctcagacgccgtagttcccgatgtgccggccgcaatgcctcctggggcttgaagtccacaccgcccag

SEQ ID NO: 7059 - DNA, 122 bp, Homo sapiens
acaaaccatctgtgtggttggagcttaaaaagcagttacttccggaaagtatagggtgaacgcagtagttctcaacagagggcaattttgcacaccccatgggacatttggcaaagtctaga

SEQ ID NO: 7060 - DNA, 122 bp, Homo sapiens
actgaccgtccacactcatatatgcgcatgtccacactgaccgtccacactaaatatgcgcgtgtccacactgaccgtccacactcaaacatgtgcgtgtccacactgactgtccacactca

SEQ ID NO: 7061 - DNA, 122 bp, Homo sapiens
aaaccaaagcctggagcttgtcatggcccgctggtctcccctctcggagggggctggccacgtgagaccctggtcaggtgagcggcgcccccgtgacttatcggcgaatcacgtgaccagag

SEQ ID NO: 7062 - DNA, 122 bp, Homo sapiens
accaaccacctctcagtcatcagtagccatgcaggtctcaggaagcaggctctatgggatcgcttgtcctaactccagaatgggaagaaactgtcagatgggaaaaatgttgtttagtcaat

SEQ ID NO: 7063 - DNA, 122 bp, Homo sapiens
agtacctggccgtgtgtgtgggacgatttctcgtgttgttctcattgggcggtacctggccgcatgtgggacgatttctcgggtggttactgtgccccgtttatctctaggtctccatgctg

SEQ ID NO: 7064 - DNA, 122 bp, Homo sapiens
acaataacggttattttcttttttcttagcttgcccagtttcgacaaagaaaagctcagtcggatgggcagagtccttccaagaagcagaaaaaaaagagaaaaacgtcaagcagtaaacat

SEQ ID NO: 7065 - DNA, 122 bp, Homo sapiens
ctgcggcccctgtggactcagggcccaaggctgggctggctccagaaaccacagagaccccggctggggcctcagaaacagcccaggccacagacctcagcttaagcccaggaggggaatca

SEQ ID NO: 7066 - DNA, 122 bp, Homo sapiens
aaatgtccagttcggctcatttggctatacttcatggctgctgctctgccctggcatcctcggataagctcgctgcccattagaggaaaaagggtttaatttacctgagtcctcgagtgaat

SEQ ID NO: 7067 - DNA, 122 bp, Homo sapiens
aatcggcgtatagttacggcagaaacaaagacgtcctagccaatgacagaggccgtacggcggaagtatagaaaaggactctctggaacatggcaacattaatctgaccacaagctgactgg

SEQ ID NO: 7068 - DNA, 122 bp, Homo sapiens
ccccagatgccgcaaaagcgcttccacgatgctgacctgctcaaatatggaatagtgatgcggtctcggtttgtcactgaagccaacgccaagaaatcaagggcaatcacccgatgaaacct

SEQ ID NO: 7069 - DNA, 122 bp, Homo sapiens
agtgacctgcctgccttgtccttcctgggttcggtggcagggagggccaagggtgccctgcgtcagtgatgagtcagtattttgtgtggatctcatcacctgtccatggagggaaagcaagc

SEQ ID NO: 7070 - DNA, 122 bp, Homo sapiens
tcatggaggtggcatttgtcttgactgacgcctactgagcatgtgctgtgtgccatcctgcgttaagcctggggtcttatttaatttttttttttttttttttgagacggagtcttactctg

SEQ ID NO: 7071 - DNA, 122 bp, Homo sapiens
tggagggaacaaggcgctgggagaggcccggggaagcggcgggccagactggcgcaggtgcggactgggcgcggggcaggggagggcgctgtggagcggctgtcgccccggggcacagttgc

SEQ ID NO: 7072 - DNA, 122 bp, Homo sapiens
gccggggctgcggggaatagaggccctcaccgcagatgccacctgccgtgccctgctctgcggccaacgccagcgctggacccggagctacccgcccccgacccggaactccctcgagtacc

SEQ ID NO: 7073 - DNA, 122 bp, Homo sapiens
tctgcgagggcaggacccaaagtcggcctggcctcccggctgcagcactcctttccctttcgaattaggttagagccctgggacgggaggtgccctgtagaccacccccctcaccaacttcc

SEQ ID NO: 7074 - DNA, 122 bp, Homo sapiens
gccaaggccaggtgtgggtttaatcggggtctgtcggtggcagggcagctgcagggaggccgtgttggtgatgcctgggccagggcacagtggtaaagtttaacccaggctcccctgtctac

SEQ ID NO: 7075 - DNA, 122 bp, Homo sapiens
aatgtagaatagaacaataattccaagtggaatttactgctttccagatatcaccaaatacgttctgtgagtagcatatgaaagccataaatgatgacgtctttaaagtcaaagccaaaggt

SEQ ID NO: 7076 - DNA, 122 bp, Homo sapiens
aacaaacatgtatcaaatgtgctataatctgggttacttttaaagtccattgttacgactcgtggcagtttgtgtttgcttttgcttcatccctgaatctatttgtaaaggcagttatcatt

SEQ ID NO: 7077 - DNA, 122 bp, Homo sapiens
ccggggtctgtgagtgcttgtgagtgggcttctccagtctccaggtaggctgggtgcccccggccaggtggagcccaggggggcaaataggctgggggctggcctggccccgggtggcacgg

SEQ ID NO: 7078 - DNA, 122 bp, Homo sapiens
ctgctgaccgccactacaggagcggttgaagccagacgaccaccttgtggagttaaactccgtaaccagggagcaccacttccgctgacgtcattacggcgacacgtggatccaagatggcg

SEQ ID NO: 7079 - DNA, 122 bp, Homo sapiens
ccgcacggagcaggaggcacttgtagctgagtgagggcatttcctttgtgcagtggtatgcgctgacagagagatggcaggctggctgaggcagggctggaagggatggccaggacttcctg

SEQ ID NO: 7080 - DNA, 122 bp, Homo sapiens
tgggtcccggcggagtggctggaccaggcctccccggaaggggcaccagccttgagtaaacggatgcccacagtgtctgggtgctcccagggcagggccgcagggcctcagggccatacccg

SEQ ID NO: 7081 - DNA, 122 bp, Homo sapiens
tgaagattaagtaaaaatagacacagtcatgatttgttacttagcgaggaataccagggccgcgctcaagccggcgccccgcacgtccaggctcttcccactggttcccacccctgctcctg

SEQ ID NO: 7082 - DNA, 122 bp, Homo sapiens
acttgtcactccccagcaggaaaaggcgtctcctggttctaaaactgcctgctctctgcccgcacccttcagatcctcttttgtgtcagctgagccaagcaatttccggttccctgaactga

SEQ ID NO: 7083 - DNA, 122 bp, Homo sapiens
gccaaaccagtggctgtttctgaaatgtgagcttccgccccaagctaaaaagtgttcacacgtgggtggtctggaaaagaccaaagagagagacctgagttgaatttgccaggcgggtaaac

SEQ ID NO: 7084 - DNA, 122 bp, Homo sapiens
gaccttagagagtccttgtggggtttcagcttctattgcagacaaattccaccccagcaacgtaccagtcgactttcctcacaggcaaccgccctgccccactcccctcaaaccaccgccgc

SEQ ID NO: 7085 - DNA, 122 bp, Homo sapiens
cgagcgtcactcctgcccacttggatttggccactacagtgtggtggatgtctgcatcttcgagacagtggttattgtgttgctgacatttctgatcattgctgggaatctaacagttatct

SEQ ID NO: 7086 - DNA, 122 bp, Homo sapiens
ctgaaatgaggtagaggcggcaggcacacagcactgtggatatacttaccgccaccgaatcgttcacttaaacctgggtaaattgatgttatgtgaatttcatctgaattaaaaaaaaaatc

SEQ ID NO: 7087 - DNA, 122 bp, Homo sapiens
ctggaggcggggccagtgtggagattgacagggggccgtcctgggaaagcgcccacgtggcgcagaattagaggcggagcctacacggtgacgcaagggccggaaggagggaccctgtgtct

SEQ ID NO: 7088 - DNA, 122 bp, Homo sapiens
aagacacgcgaccggcgcgaggagggggttgggagaggagcggggggagactgagtggcgcgtgccgctttttaaaggggcgcagcgccttcagcaaccggagaagcatagttgcacgcgac

SEQ ID NO: 7089 - DNA, 122 bp, Homo sapiens
agagaaatgctgccctgctgctgcgctgcagattgaactctggggaagaagaaatgagcacgaccgggagcggtccatctaaaccggtccatttagatggacaggttttagcagtccatcta

SEQ ID NO: 7090 - DNA, 122 bp, Homo sapiens
ttaatctctctccagctgaaagacaggttataaggaagagtcaacagttgggatgcattacgttttgactctgaaataaagcccatgcttcccctgacatttgtatatgttgccaccactaa

SEQ ID NO: 7091 - DNA, 122 bp, Homo sapiens
aggggcgtgcaaaggcctggcatactttccattccatccacaggatgcttcctgtgtaggcgtggctaaaagagggagcctaatctggagtccctttcagattgtgtgtggatagactgaca

SEQ ID NO: 7092 - DNA, 122 bp, Homo sapiens
gacagagtcaggtcacctgcttgacttcagctgagattcactgcttttaagtcccttttccgaggatgctcccatgtttgtgttgggtgccagaagcaccacgcaagtcctgaggaagatga

SEQ ID NO: 7093 - DNA, 122 bp, Homo sapiens
agaaatcttccttagctattagtctgcttcgttgattttttttttcttacgcctagctcacggggaaacgccagattattttctgtccaggtgagtaaaaattctgaacagcaggtcctagg

SEQ ID NO: 7094 - DNA, 122 bp, Homo sapiens
ctcaggggcagccgagtatccaccacgaccccagcctcaggggcagccgagtatccaccacgacctcagcctcaggggcagccgaggaggctctgagctgcccagacccgacggggcagaac

SEQ ID NO: 7095 - DNA, 122 bp, Homo sapiens
ccagactccatctcaaaaaagaaaaaaattcatttttaatttttctgggtacatagtaagcgtatatatttatgtgttacaagatattttgatacaatcatgcaatgtataataatcacaaa

SEQ ID NO: 7096 - DNA, 122 bp, Homo sapiens
gcagagccacgaacacgccgtcgacctgcgggcgggggatggcggcggggggatggggcgcggtgagtggagagaacacgggtttgaatcctggccccaccacctactagctgtgggaccca

SEQ ID NO: 7097 - DNA, 122 bp, Homo sapiens
agtgcctgaggccagaatctggctggggagcggcctcgggcttaggccatggcgagggagcgcccgcggccaccggggccggcgccaccccggaacccggcgggccgctcagcccccggccc

SEQ ID NO: 7098 - DNA, 122 bp, Homo sapiens
tgtaagcgcaggtgcagaggaaaagaaccatggatgctgacaagaggaaatggcagattccgctaaggagggagcatttgaagggaaccttgaaggacaagcaggatcctgaggcaacgcag

SEQ ID NO: 7099 - DNA, 122 bp, Homo sapiens
ctgaacccagggcagcagcgaatcccacgccccacgctccctcttcccaaacctcaatatcgttgcttaaaatcttccgggcttattgtgaagccaagggcgcttggcatgggaagagagcc

SEQ ID NO: 7100 - DNA, 122 bp, Homo sapiens
tatattcagttttgattccctgacttttcctgctggtagtaactgtgggcttctacctgtcgcgacatggtaatgtagagcctcctagttgtcgtgacgttccagcaatcatgactttaatt

SEQ ID NO: 7101 - DNA, 122 bp, Homo sapiens
ctcagtgttggttcttgtggtagtgctgatgtgtgggtaccactgaggccaggccacagtcgcatgtaccctcctctgggctgactcacgaggctacaggggacagcacacctaatgagcag

SEQ ID NO: 7102 - DNA, 122 bp, Homo sapiens
gctgcccggactgccgccgtggacggaagggaaggctgctgcgcggactgccgccgtggacggaagggaaggctgtacagagccttatcaccaatgggaaggaaaggctgcacggaggcttg

SEQ ID NO: 7103 - DNA, 122 bp, Homo sapiens
ccgcgcgcccaccacgcacgctgctctgggagcagggccggcggcgccgccgcctcgcagcgattggttgaaccggaggttgttgctaggctaccagtgcgccctgagcctggggccccgca

SEQ ID NO: 7104 - DNA, 122 bp, Homo sapiens
cacggcccccgcaccagacgaccccagcctgtggatgatgtttcactgccctcacataaacgccacccagaaatgcaagagtaagaatgttcacgaagaggggaggcaggagccccagctga

SEQ ID NO: 7105 - DNA, 122 bp, Homo sapiens
taaataatgggttatactctctttatgggaagaactgtttttgtttgttggttggtttttcgagacaggctcttgctctaacgcctagccgaagtgcaaaagcactatcattgctcactgca

SEQ ID NO: 7106 - DNA, 122 bp, Homo sapiens
ggtgcaggatataatctcctggtgcgccgttttttaagcccttgggaaaagtgcagtattcgggtgggagtaacccgattttccaggtgctgtctgtcacccctttctttgactaggaaagg

SEQ ID NO: 7107 - DNA, 122 bp, Homo sapiens
aaactaacaagcagcacgactccaaaatcagaaaacttgtaacgaccaaaaaagtgcaaacgtgccttaaatcagtcatgtgcgacaagcagctatagctagggtttggccgcaggctcaga

SEQ ID NO: 7108 - DNA, 122 bp, Homo sapiens
cctccgggacaggaactgggagtacgggggtgggttcatgcctggcaggaaggctctcttcgcccggcccagactgaccaggaagtgatactgaggagagtggtagacgtcgtacccgtttt

SEQ ID NO: 7109 - DNA, 122 bp, Homo sapiens
ccctccagtagccgggttggcagagcgggtctcagcaacccagcggtggctttgcagaggcgaaggcgcaatagacatgcgtgagaaatatgccaagaaccatttcacccgaggaaaaggaa

SEQ ID NO: 7110 - DNA, 122 bp, Homo sapiens
ctactaagaaactcgtctctgagaaatatcggtggttggaaggttgtagggtgcttccaccgagaaagcgcctacccagtgaaatacgcctgtgacagaaaaaccgaggccaagccctgcca

SEQ ID NO: 7111 - DNA, 122 bp, Homo sapiens
tcaggactagaagaccctgagctaagttttaataaaatttattgagcctctgctacatgtcggagcagagaccaagatacaattaagataaaagatctcctcattgagttcttgagttcttc

SEQ ID NO: 7112 - DNA, 122 bp, Homo sapiens
gcacgtaagcgggtgtgtgtcctcggggaggagggcaggggcgcgacctccgcctcgcgtcgaggtttccatccctggctctcagcattgcccgtcagcacagactctggaccctccatttc

SEQ ID NO: 7113 - DNA, 122 bp, Homo sapiens
cccacgtgagctgattgagattcaaggatatctgggctgatttggaaagggcatcatcttcggatggctatgaagtaataaagaagttcaaaatatgtcagctgggagtggccagaggacaa

SEQ ID NO: 7114 - DNA, 122 bp, Homo sapiens
ggaaaacaaatgcggctatccaggaaacagcagcggctcgtgacccgccagaaatggccccggacaccacacttgccaccaatcatgtggacaagtggaccctgaagaaactgaagaagtca

SEQ ID NO: 7115 - DNA, 122 bp, Homo sapiens
tacatacatgttcaatatgcatgtgccaaggctaccttcatgaatactcatagatcctcccgtaacctgttgaatatgtatatttagccaacttatttagcctaaagctcctacctcaagcc

SEQ ID NO: 7116 - DNA, 122 bp, Homo sapiens
gtgcaggcttgggggtagagaccagtgatggctctgcagagcttagcctcagagtaggggcgtggtccaggagaggccacgacagggacaagcagggcgttcgcatgctgttgaattccttc

SEQ ID NO: 7117 - DNA, 122 bp, Homo sapiens
gtggctagccaatgagcagagaggtgctggccggggcggggcttgcgcgcgggtgcggcgcgctgcggagcggccgacgcaggcagaagccggcggcgcgcggacagccagtcggcgccgcg

SEQ ID NO: 7118 - DNA, 122 bp, Homo sapiens
gtgcaaagatgtactttgctataacaagtgagaaaaaagtcagtttgttacacatatacacgaacagaatctgcttgtgttagctgaaaacctgtagaaaatacaatcaaacttgtttctgg

SEQ ID NO: 7119 - DNA, 122 bp, Homo sapiens
gtgttgtgggctctgtggtgggaatcctgaaatgagaagggagtggatggcaagaggggacgtccttcacggggcctatgcttgttcctcttgagcactaaggaccaaggtctgcagctttg

SEQ ID NO: 7120 - DNA, 122 bp, Homo sapiens
gattcctctacttttccaccagctggactagaccaaaatgggtgggcctggtcttagaaccgggaggaactccacttctgcctctaccacagaagtttgaagagtaccttgggtagtggtaa

SEQ ID NO: 7121 - DNA, 122 bp, Homo sapiens
gcctgctggatctcccggggagttacgctggtgagcgaaaccaatcccaaagatcacagacgggggatcaatttctccaaaggacagaggagagaaatgcaggactcattagctgtgcccag

SEQ ID NO: 7122 - DNA, 122 bp, Homo sapiens
atgggaaggagtcagtgcaatcttggaaactgagtgcttcctcagcacaactccagggggcgccattctcagaaagtacattgtgaatagcatcctctagaattgtgcaacagggcagctct

SEQ ID NO: 7123 - DNA, 122 bp, Homo sapiens
cacaatccagcatcctcccttgcacaggtgaggaaactcaggcacagcctgtcccaagtccggccagagccccgagagggggcctctcgaaggacccggcggctggaaggaggtggcgccag

SEQ ID NO: 7124 - DNA, 122 bp, Homo sapiens
aaactgaaaaagcatttgatgaaattcaatatcccttcatgctattaatcctcaaataaacgggtacagaagaaacataccacaacataatagaaactacaggaaagacacccaaagctaga

SEQ ID NO: 7125 - DNA, 122 bp, Homo sapiens
gtagggaagcaggtgttctggctgtgacattctgcaaggacttgggctctgtgctgggtgcggtgtgccctgggacctgggtcattgtggagtcgcggcttatttttgacctcttagctggc

SEQ ID NO: 7126 - DNA, 122 bp, Homo sapiens
gaatgcctatgttctgaagattcttccattttggtgaggttcccatgatcttttagggtccgtgctcctttgcaacctcagaatcaaaatcagcacagtaggaatgaagctgcttaatgtcc

SEQ ID NO: 7127 - DNA, 122 bp, Homo sapiens
ccgcggtgatattaacccgccggacgccggcccatagtagagccccagctcctacccccacgacctgctccccggtgcccagccctgagcagcggggcttccccagcctctgtccacgcgcc

SEQ ID NO: 7128 - DNA, 122 bp, Homo sapiens
aacaccaacaggtataatcacatgccctcagtcaggaagcaaagaaaaaaagtatgagcacgtgtgtgtttactttccaagaccaggcagaggctgttgattatttggaaaaccttggaaga

SEQ ID NO: 7129 - DNA, 122 bp, Homo sapiens
agaaagaaacctaatcaccggtctccaaaatcggcccaaacctctggcggccgcgtcactcggctccaccagtctgtgccgcctgcaagcgcccctagcggcctcgcagccatcgcgcctca

SEQ ID NO: 7130 - DNA, 122 bp, Homo sapiens
aggatcacctgagaacctgggctgccaccgccccctcccccactactaaatcagcaactccggagttgtggggcagaagtcagtattttaacaaggcctccaggtgattctgatgcgcgcta

SEQ ID NO: 7131 - DNA, 122 bp, Homo sapiens
ttcagccattatttagaccctatttttgcactgcaaatgggttgctgagctgaaaatgtacgattgtaatttcacagggcactcaatgagtaatggtataggaagaggaaaatacaaaagtg

SEQ ID NO: 7132 - DNA, 122 bp, Homo sapiens
ggccgcctcctccccctccccctccgcccctgcccaggccccggctcctccccgagccctcggcgtgggggcctccttgccacctgcccgctgcccatcccacatgcaaagcgtgaccgccg

SEQ ID NO: 7133 - DNA, 122 bp, Homo sapiens
gctctcagttcatgaatgcatatgactcctatctctgctgggcgcattcgcaggtgaccccgcacgctgggcctcagactctggagctacgtggggtcttggcatcgtgacccagcatcaag

SEQ ID NO: 7134 - DNA, 122 bp, Homo sapiens
ctggccgtggggtccaggatcttgtcgatctgcatctgtgccctgcggtacacccggtgtcgctccttagtgtcgcccgaggacaggtcgtctaccaccgggaactcgtagtgcccgcggcg

SEQ ID NO: 7135 - DNA, 122 bp, Homo sapiens
ccctgacactacatctccctcctcaaacccaaagggcagaggcatgtccctcctatgagacgcagaacaagtcgggccgcgtcccctttttctaactgggagcactgctgagggggcgtctg

SEQ ID NO: 7136 - DNA, 122 bp, Homo sapiens
cagcatttgtgagccccgcccctctctgagcccctccctcgccctccccgtgccgtcccccgactaggtgccctccgggtaactgaacccaccccaggcctcaagctcctcccctcgctagg

SEQ ID NO: 7137 - DNA, 122 bp, Homo sapiens
caggggaggcgccgagcccggagttcaccactctattgcgggtgttcatggttcacagcccgcgggtcccgggccgccgtcgctgcgggagggatgcggctgggacgcttagcgagtctcaa

SEQ ID NO: 7138 - DNA, 122 bp, Homo sapiens
gggaggcggagccgcagcagtagcggcagcagctgtaggagccgctgcagctgggagaagcgccagagaggccgggcctgctccggtcggaccggatccctcccctccccctccctcctccc

SEQ ID NO: 7139 - DNA, 122 bp, Homo sapiens
caaatatacacggaagtgaggcgggtcagggggcggtgccgttaaacggatgctggaaggcgtgtggattcccacgcccgccttggccaacgtcactgtactccttcgtgatgtcacgttcc

SEQ ID NO: 7140 - DNA, 122 bp, Homo sapiens
caccaggtttttctggactatggcttcccaccagtcttgcagcagtgggtgattgggcagcggctggcacgagaccaggagaccctgcactcccatggggtgcggcagaatggggacagtgc

SEQ ID NO: 7141 - DNA, 122 bp, Homo sapiens
tggccacctggagcctgggcaccgttcttcaaataatggcttttaattctcagacgagaacgtttaggattacaaaagaaaccggttctcttcacatccttatccttgtcatgtagcattcc

SEQ ID NO: 7142 - DNA, 122 bp, Homo sapiens
aatgagagaaagaggctccggggagatagcggaccagtgagggctgcccctcttttgaagcggttttcgtctctttccgccagtggcctcccagctcacgcaggggcgggtcccggtagcgc

SEQ ID NO: 7143 - DNA, 122 bp, Homo sapiens
tttgtattcttagtagagacggggtttcaccatggtggccaggtctcaatctgttgacctcgtgatctgcctgccttggcctcccgaagtgctgagattacaggcgtgagccaccgcgcccg

SEQ ID NO: 7144 - DNA, 122 bp, Homo sapiens
ccgcagcgcccctgatgccaattccagatgtgtgagttgggaggggcgggcctcccggcccgtgagcacccagccgctgccttcagagcgaagcatccagcacccaggttccagcgatcggg

SEQ ID NO: 7145 - DNA, 122 bp, Homo sapiens
ctggtctttctgactccaaagctcttacctgtagtgaggtctgcctatttccacactgcacgtgggtctccctgagtggagggagaggcaggggcctcccagcatcttacagaagaggaagc

SEQ ID NO: 7146 - DNA, 122 bp, Homo sapiens
ctgatatggtgagacgtcaaccgagcagcttagattccagatgccggagctgccgggattcgaatcccagctctacccgcgtagtgtgctgtgtgtccctgggcaagttccttaacctctct

SEQ ID NO: 7147 - DNA, 122 bp, Homo sapiens
tctcactttcatgaatttcacagtacatgtttgtccctgcaattaaagattgaatgttcccgggagtattttcattttatctgaagagtttgtagtcccagctcccttccccaccacccaac

SEQ ID NO: 7148 - DNA, 122 bp, Homo sapiens
cacatggaactgaaagtccagttatacctctttctttggtaaactgcccagactcgggtacgtctttatcagcagcatgaaaacagactaatggagtacgtaatcaatttagatgtgaaaat

SEQ ID NO: 7149 - DNA, 122 bp, Homo sapiens
gctatgcatccagttacttgcaaagcagttccagggctgggcatggggacatggcttgagcgcaggaggcggaggctgcagtgagctgtgattgtgtcaccacactccagcctaggcgacaa

SEQ ID NO: 7150 - DNA, 122 bp, Homo sapiens
cagaacaccgaataaataccagttcttacatgacatttcactccacggaaaaatctggagcgcacactgcaccgccgcccgtgtggcctgcccgcaacccggtggctctgcccggccccggc

SEQ ID NO: 7151 - DNA, 122 bp, Homo sapiens
gcggatgattgccaactgtagctgaatctatgagctgggatgtacccaagccagtgcaatcgctccaaatcagggcgggcggcactaagccggggagcaaacaccgctcccggcccgcccag

SEQ ID NO: 7152 - DNA, 122 bp, Homo sapiens
ggctccgcagcaggacagcagcagccaccgctggaccatggtgcacagtggagaggagctcgcgctgggcccggcaggcctgctgctgccatccatgcggctccaacggccggtcctgggtg

SEQ ID NO: 7153 - DNA, 122 bp, Homo sapiens
ttcctgggccagagcgtgcaacggagctcctgggaccaagtgttcgccgccttctggcagcggtacccgaatccctatagcaaacatgtcttgacggaagacgtagtacaccgggaggtaac

SEQ ID NO: 7154 - DNA, 122 bp, Homo sapiens
ttcgacgtggaaagagggagggaagcacattagcattaaggtaatcatggcaccctggctcgtggactattagattggctaccagtggtctctaatcttactgtttgcagagtcaagaatgg

SEQ ID NO: 7155 - DNA, 122 bp, Homo sapiens
acatgggacttagcaaccacactgagtgaggtaaaagcatttgatttcagatctaaaattcgtaacaacctaaatttgagaggtggctgaaatgtgatgaaaagcaatacgaaaagacaatg

SEQ ID NO: 7156 - DNA, 122 bp, Homo sapiens
ggccaagttatttgtgtgatgcacgtgaaccgcccgagctggtcactaatgaagtggattcgccctattcctggcgactctacaaggttggagacccccgtagacttcgcagccatcgcccc

SEQ ID NO: 7157 - DNA, 122 bp, Homo sapiens
gcgccgcgcccagcctttgctcgatgagggctgcaggatccggctgagaccaacccgcggcgcaggtggggctgcacagacgctgatggtgggcgcgccaccctctgttttccctcactcgc

SEQ ID NO: 7158 - DNA, 122 bp, Homo sapiens
tgggggcacagagagagcaagtaacttactaaaggtcacccagcaagttaggagcccagccggggcaagaacaatagtaataataatagtaacaacagcagcaaaagcaactgacatttgtt

SEQ ID NO: 7159 - DNA, 122 bp, Homo sapiens
ctggagtgtagtggtgcctctacactgcagctgaccctcctggctcaagcagtcctcccacgtcagcctccctcatagctggaactacagggactcaccaccactcctggctaacttttaat

SEQ ID NO: 7160 - DNA, 122 bp, Homo sapiens
ggttaaccaaactaagtcattcacaattacaagagatctaagacccatactactcaaattcggcaaaaatgtacaactcagagggaagagggggaagatccctgttaattagttgcctcgat

SEQ ID NO: 7161 - DNA, 122 bp, Homo sapiens
accgggagggatgcgggcctcagaggatcctcaccctgaggcaggtggggccctggatgccggcgctgctctgattttactttgaggccgcttctcctctctcagtttacccggccagggct

SEQ ID NO: 7162 - DNA, 122 bp, Homo sapiens
actgacacgtgaccaacataagtgattcacacatgattgacgtgaccgaggtttgtgacacgtgactcacgtgtgcgattgacatgattggcacatgacctatatcattggcacgtgattgg

SEQ ID NO: 7163 - DNA, 122 bp, Homo sapiens
tcagaagaagccttctcttcctcctgcctgtaggtgtcccagaagtgagaaggcagccttcgaagtcctgggcattgggtgagaaagtgatgctagttggggcatgcttttgtgcacactct

SEQ ID NO: 7164 - DNA, 122 bp, Homo sapiens
tcgcaaactgaaagatccccgagtttagaaagtgtcttgccgctctgcggacgctgtgtccgcggccccgctgtcgcgcagagctgggctgcgatcagaaagtccggctcccctggccccag

SEQ ID NO: 7165 - DNA, 122 bp, Homo sapiens
caatatcagcgccttcttcagagtcgctgggaggattaaatgagatgatgtatgcagagccgttaagacgctgtttggcacaaagttcagggcagctggtttagtttcctcgacttcactac

SEQ ID NO: 7166 - DNA, 122 bp, Homo sapiens
ttggcttagcgtgcagccgcgggggagccgtgtgtgggcacgtccctgtgctgccgcccccgctgccccagagacacagccataggcaggctggctcccctgggcctggctcacacgtggtg

SEQ ID NO: 7167 - DNA, 122 bp, Homo sapiens
ggttcctgccaccaaccctgcctagatagaacccacctggtctcttatttttaggagaaacgaggccttcgttaaaagttaatgtagtatctacaccagcttcatcgattcctgattggagg

SEQ ID NO: 7168 - DNA, 122 bp, Homo sapiens
cactctcaagtacttactcaataatactaatgcacactctaataaaccctggggctgtaacgaacgggctggtgtgacccagtccctcacccctcccacggcaagtgctgccgagcagaaac

SEQ ID NO: 7169 - DNA, 122 bp, Homo sapiens
ctcaagtgcgccggataaagaggctacaaaaacatggcagcccctaatgagatatttttgcgcttgggcgaacgaagggctgcttcaggaggctagtgacgaaaaacctgcctggcttttgt

SEQ ID NO: 7170 - DNA, 122 bp, Homo sapiens
agggggtattttagggccctattagggactcttcttcctatcttgtccgatgacggctctcggaggctcctggttttgatgtctggcattgcttttacccggtgggcttcagggagccgtcc

SEQ ID NO: 7171 - DNA, 122 bp, Homo sapiens
gtttctcgataacgactgtcagcaccagcagggctgcctgaggatgcacgccttggtcctcggccctgagagtcagcgtgagctcccgctgctcgcccgcgcccaggctgccgttgaggaac

SEQ ID NO: 7172 - DNA, 122 bp, Homo sapiens
ggcgcggcgggggtgacggggcgcgggcgcggggtgggctgggggcgcggatcagtgggacggagttcggggttcggctccgagcgggcgggctggaagtgggggatccctcagccgcctcc

SEQ ID NO: 7173 - DNA, 122 bp, Homo sapiens
atcaccatgtggtgtggagaataggcaggcagcacatcatcctggcccccaaaacccttgcgggctccattctccccccacccccaccctgtcacccaagttgtaagcctggactgggcctg

SEQ ID NO: 7174 - DNA, 122 bp, Homo sapiens
ggataattttatgaagctcaaaaacacccaaaattaaacaacatattctgtaagtacatacgtgggatatgtgataaaactaaaagggaatgatcagcaatccagaaccaattcatgactgt

SEQ ID NO: 7175 - DNA, 122 bp, Homo sapiens
taggaatcattacgcacgtcaagccgagtccattaagttgtagggagaaattagccttgacgggcagaatcaaactacaaatacacaggcctcgccttcaggaggccaagcggcggcactcg

SEQ ID NO: 7176 - DNA, 122 bp, Homo sapiens
ggtctcctcggtttaaggaagcctccgccttcttatacatctgccaaatatcatggtactcgttggggaagatgataaagtggcggggtcttctctcagcagtggttcatcctccacgccag

SEQ ID NO: 7177 - DNA, 122 bp, Homo sapiens
gagcgtgggacatgtcaccttccccacctgctcagagttcaagggtcctgggctgggccccgttctctcttctgccctggggagatcattcacgcttcctttaatccccgctgcagctgagg

SEQ ID NO: 7178 - DNA, 122 bp, Homo sapiens
ttcaccacaagactgtgggcgtggagccggcagccgaggacaaaggtgtggtggtggtcacgaagcagagatccggccagccgaagcctgccacctcctacgcgcggaccaccatcaacaag

SEQ ID NO: 7179 - DNA, 122 bp, Homo sapiens
taggctgcttagcgatcacaaagggtacactagaacccctcgctgtctgcttgaatagcacgatctgaagggtggctgaagccatacagggagttaaatccttcaggtgggtcttttcaaat

SEQ ID NO: 7180 - DNA, 122 bp, Homo sapiens
gcactgggactccaaaatccaggtgcagacccaccgcttctctctaagcaggtcactgaccgaggaaaccaagcctcatttcaaaataatatcgttttccaatgaagtcaactgtccaacta

SEQ ID NO: 7181 - DNA, 122 bp, Homo sapiens
gccactatgcctggctaaatttttttttttttttgtaaggattgggtttcaccatgttgccgagcctggtctgcaactcctcagctgaagcaatccacctgcctttgcctcccaaactattg

SEQ ID NO: 7182 - DNA, 122 bp, Homo sapiens
attattacctgggaggcatctggaggccaggcaactgctaggctgacgactcctgggctccggcatcctattttcctggacagactttggtccagagggttgaggggggtctagagttaacc

SEQ ID NO: 7183 - DNA, 122 bp, Homo sapiens
aggactctctcccattccttttctaagtcaagcaaatggcaggccagcaggtgaggggcccgagagggagaactgaggccacagcaaaagggctccgccccgaccgaggcccgtgtggccca

SEQ ID NO: 7184 - DNA, 122 bp, Homo sapiens
ctttcgacaggtcatggggcgtgagcaaaggcaacacctgcctgaaaaggttattagctccgcgaagcgagcaactcagcaaaaacgcctcctcccttctcaggcattcgcctctcagaagc

SEQ ID NO: 7185 - DNA, 122 bp, Homo sapiens
gagcgaaatgtaaaaaacaagggatggcaaaggtgccggagcagggttgcagggggacagcgaggcacagttaccgagcaattggcgggttcggaaacaggtccctttgctctggcgcctgc

SEQ ID NO: 7186 - DNA, 122 bp, Homo sapiens
gcttcagtaggtgggaatcaattatttgcatttctaataggtaatcagttgataatgatgcggccggtccggtacactcgaaaaaccactgttccaggatattccaagatgttccaagagtc

SEQ ID NO: 7187 - DNA, 122 bp, Homo sapiens
gtatgggggtcacttttctggctgccacagaaggacagtgtggccccatggagtcaccaccgctgcccagactcccctgattaggggcttgctgtgtctggtaggcatctgctgctgctgct

SEQ ID NO: 7188 - DNA, 122 bp, Homo sapiens
agaatttggccaaaccatattcaactgttctgtggaaacagaaattgtaagtaaggaactcggatactgagctgaggaggtatcgaagcaaagtgtcaaaggcaaagactagttttttgccg

SEQ ID NO: 7189 - DNA, 122 bp, Homo sapiens
gaaggtgtgcggcaccttgaccttggagagcagcatcttgtccagctcaatggggcggcccgtatacgatgaggcagaagaggaggaagaggatgacgggggacggcgaggcaggagttcgg

SEQ ID NO: 7190 - DNA, 122 bp, Homo sapiens
aaaacaactccacaattctgtgagttcactgggtgattcttctgctggtcttgcctgtggcggctgcattcagctgggggctgagctggggggctggtcttccctattaggcctctttggtc

SEQ ID NO: 7191 - DNA, 122 bp, Homo sapiens
ggacttgaagtcattcatccagctccaaagacccagccctggccatgtgccctgctgtcacgggagccccagaggagatgcctgggctggtagtggtgcctctactccagggcagggcctgc

SEQ ID NO: 7192 - DNA, 122 bp, Homo sapiens
ctgatcctcccagcatgcccctcccaggccccactgtcccctgccctctcacggtactcacggcctgctcgcactgcacatctagggcactagtagcctcatccaggatgaggacccgcggg

SEQ ID NO: 7193 - DNA, 122 bp, Homo sapiens
tgggtgtggttttcttgactttttcttctttctattcctgcctcagcttccccctataaccgctgcaagggtagtatatacctggtgttcgacttctgcgagcatgaccttgctgggctgtt

SEQ ID NO: 7194 - DNA, 122 bp, Homo sapiens
cagatcccatatggtttgtgggctgtaataagagtaccaaaacttacataccaggccaggcgcggtggctcacgcctggaatcccagcattttgggaggccaaggtgtgcggatcacttgag

SEQ ID NO: 7195 - DNA, 122 bp, Homo sapiens
ttgtggaggaactgacacccgctggagaaagtgtggagggaagcgagggctgcacctgcacgcaggatctgaggcaagcggctgttcccagctctcagtgcaaaagacatttgtcatctgag

SEQ ID NO: 7196 - DNA, 122 bp, Homo sapiens
tcaccccgccacccagagctcactagtgcgactatttttgtgcaatttcttttggcaacacgtttctcagctctcgggtgatctttaaggcagaagctggctctccgcctgtcggcgcgcgt

SEQ ID NO: 7197 - DNA, 122 bp, Homo sapiens
tagctgggattacaggggtgcaccaccatggctggctaagttttgtacttttagtagagacggggtttcaccatgttggccaggctcgtctcaaactcctgacctcaggtgatctgcccgcc

SEQ ID NO: 7198 - DNA, 122 bp, Homo sapiens
tggcgccgatccaagtctcccaagaagaaactcggggtgtcggtctccccgagccgggctcgaaggcgtcggaaaacatcagcctcgtcagcctctgcctctaattcctccaggtaaggagg

SEQ ID NO: 7199 - DNA, 122 bp, Homo sapiens
gcctgaatggggcgcctggaggctgcattgaggccgggctgtgtaaactgtagggtgcctcgccgactcggagccgcagagactggcggcgggtcaacttggaccactttgcattcacgctt

SEQ ID NO: 7200 - DNA, 122 bp, Homo sapiens
gattccatccttcagatgaactgatgagcagttctctttgactcccagtattaggaatcacgggggagtttctctcgtgcctgattctcagccccacaccaagagtttttggaggtctgact

SEQ ID NO: 7201 - DNA, 122 bp, Homo sapiens
tcctccactccttgcatacaaagagtttctcactggaatgaattttctgatgctgaataacgtttgaaccacaaatgaagcctttcccacaccccttacattcacatggttttacaccagca

SEQ ID NO: 7202 - DNA, 122 bp, Homo sapiens
gggggaaaaggcactcaggcctcatagcacctgctccaagatttaaattttccaaaagcccggctgctgagagggcctgctgtaaccctaagaccagttttccccagtagctgccatgactc

SEQ ID NO: 7203 - DNA, 122 bp, Homo sapiens
aaggggtggggcggagaccgggtaggtgccggcgtggggcgccaagaggactacaactcccggcgtgctcagcgcgcattacgtggtctggcgataacgcgctgcgtccgctcgggcggaac

SEQ ID NO: 7204 - DNA, 122 bp, Homo sapiens
tcttgaacttccctgccaagccccaccttggcctcccaatatgctgggattacaggcgcgcgcccccatgcctggttaatttttaaatttttggtaaagatggactcttgctgtgtggccca

SEQ ID NO: 7205 - DNA, 122 bp, Homo sapiens
ttcaccataaactgaggtttcctcatagtgatgccaagtcaggcaaacacattccttaagcgttccacctaactcccttcttcctggaagttacatgtaatagctgcctttatttacttatt

SEQ ID NO: 7206 - DNA, 122 bp, Homo sapiens
ggagagaaatcgaggcgatacattgaagtaacttggccaggattacacagtagtaagggccgagttatgattccaaatcagctggcacattctggagccagtacacactccagaatgtgtac

SEQ ID NO: 7207 - DNA, 122 bp, Homo sapiens
gaactttgccttgttcttgcggcatccccagtgccttggacagctccgggcccagagtcgcgacgcctccagcaggcccggctgccccactgcgcacatgggcacaggcttggcacacgcac

SEQ ID NO: 7208 - DNA, 122 bp, Homo sapiens
cataatccgcctgcctcggcctaccaaagtgctgggattacaggcgtgagacaccgcggccggctgaaatgttttaatattggtaaccactgccattatggtttctagtactaatttgttgc

SEQ ID NO: 7209 - DNA, 122 bp, Homo sapiens
ctgcaggaatctatacaggtccacttaaatcagtctgaagctgtgaaagcctccatcactcgtcgcccgggcccggccgcccaaacagagccccgggagggccagcgggggggtgcagggct

SEQ ID NO: 7210 - DNA, 122 bp, Homo sapiens
gttgctgtcagtacaacagcaccgtgacactctactgtgacgctaggacaggcaaagacacgggacaacctcatcatgtgtcctagtggggcatacccaagcattacccattgaaaacatgg

SEQ ID NO: 7211 - DNA, 122 bp, Homo sapiens
ttcctcagtttacctgtttgggacattcctatttggtgttaggcttttgtaaagagagggcgtacctgtgggggacctggcactgggtcatttccccaagatgccattgccgtgtcccccag

SEQ ID NO: 7212 - DNA, 122 bp, Homo sapiens
cctcaaagctttattattattatttttcttctcaaaacactgctttgctttgggggagcgcgggtccttggccagatcttgagtcttgagatatgtcttcagcatctcctgctcctccttgg

SEQ ID NO: 7213 - DNA, 122 bp, Homo sapiens
ccggggtaggcagcatccacgtgctccacagctgctggtgctgggcaggctggagactcacgggagaggcaggaggagaatcagcgtgttgagtccctcgctgtgttagtgtgaaaaattct

SEQ ID NO: 7214 - DNA, 122 bp, Homo sapiens
atcaatgtgtgtcgctagtataagaactggattaggcttggggggtcactgtgatacagacgggcttgggtgcaaagtgtacttggagttggagagctctgagtaagcagaaggcaggagag

SEQ ID NO: 7215 - DNA, 122 bp, Homo sapiens
cctttccgttcatgccttgcgctccatggccagcacagggctaggagtgagatgacaacccgaagtgccggccctgtgccgtttatgccgttcactggttacctgttccagttggacaatat

SEQ ID NO: 7216 - DNA, 122 bp, Homo sapiens
ggggcctttcggggaggacccgccctcccagatagacggccccgccccaccttgagagagcgggggacccctgatccccggtctgcgccacaaatctcccctcagccggcccctcctccaga

SEQ ID NO: 7217 - DNA, 122 bp, Homo sapiens
agttggcgacgctgccgtgggcggtgggcgctcgccctctgccggccgcgcgcggaaatgcggtctcgccgttgcctgggactgaccccgccccgccccgtcctgctccgggcagccccgcg

SEQ ID NO: 7218 - DNA, 122 bp, Homo sapiens
agtccctcccaaccctccacagccaccacctgtttaaacagtaactgctgtagactcgcccgtatgcagccacaggtgtggggaggctggatatgcctctccagagcaatagctcgggcaat

SEQ ID NO: 7219 - DNA, 122 bp, Homo sapiens
cacgagctctgcgtgtcctttgcctgctgcccccctgacctctgggcgaatggaaagtggcgatgaatcgcaggtgccagatggtgccggctgaggcacccgcccactgcctgtgcttgact

SEQ ID NO: 7220 - DNA, 122 bp, Homo sapiens
ctgctctgagcgaggtgcgtgggtgcctccctgcttttgagcggggatgcaaaggacccccgggctgctgcgcggaaaaaggcggacggggatccagggcgcaagcagggatggagggagag

SEQ ID NO: 7221 - DNA, 122 bp, Homo sapiens
gcgccacaggggacacgctgatcgacggcggggagcattactgggaggtgcgctacgagccggacagcaaggcgttcggcgtgggcgtggcctaccgcagcctgggccgcttcgagcaactg

SEQ ID NO: 7222 - DNA, 122 bp, Homo sapiens
gtcgcgggtcctcaggtacagactctgaggtgtgcagcccctggagcctgcacctaggagcgcccccggaacctgctgccctgagaactcacccctgggagccccgggaatagggctgggcc

SEQ ID NO: 7223 - DNA, 122 bp, Homo sapiens
ggggcggggcctcgaggtcaggggtcagcacctccctggttgccgtggcgactggaggcgcgcgacgcgggcgcaatggcggggacccggggcttgatgctgcttgggcctggcccagtggc

SEQ ID NO: 7224 - DNA, 122 bp, Homo sapiens
gccctgcagctgggctgcctggagctcaggtatgtggccctgaggcctctgctgggagggcgctgtgctgagctctgggcaggcccgacctttccccatgtccaagatgggaagcaggaatg

SEQ ID NO: 7225 - DNA, 122 bp, Homo sapiens
tgggggcgccgtgaaagcacccagcgtagtcatgctgctgtgtgcgatgggtgctgggcccgcagacttcggtgcttcaaaggcctcactgctgagcacgagacgccgcttttgatgtcgtc

SEQ ID NO: 7226 - DNA, 122 bp, Homo sapiens
cagcggccgccgggagtcgttctggggggccgggagaccagctgcctttctcctccattccgaccccccagctccgcgttgagagctgaacgcgaagggccggatgtggggatcctgggaag

SEQ ID NO: 7227 - DNA, 122 bp, Homo sapiens
ttctcctaaatctcaaacacagttgacaaaatctctgatgtttccattaaaaatcttcaacgacaaaagagctctaccacatcaaactacccagcatctattaaaatgagagtattctggct

SEQ ID NO: 7228 - DNA, 122 bp, Homo sapiens
aaagctgaaagatgggagaagatgcatggactatgcacacaaatctatgtacacacaaatcggcctgcacttgccgctctccgctgaggaaggaaggtagctttggagtcagaactaacaga

SEQ ID NO: 7229 - DNA, 122 bp, Homo sapiens
ggagctgcctgtcctcacggtgccagggacaagttgttcgccatgggccagcgccgctgacggctctcccagggccagggccagggccagggtttggcctgtggattcctcagggaccaagg

SEQ ID NO: 7230 - DNA, 122 bp, Homo sapiens
gattccaaatgactaaatatttaattgaatcattgcctatacttccagggatgactctggcgtttgctttttattgagggctccatgaaagccaggctctgcaatggctgctggggactgtg

SEQ ID NO: 7231 - DNA, 122 bp, Homo sapiens
gctgtggctgggaggagtggggcgggcactctaacgcgacccagctggacgagtcggggccgccaatgagacggagcgattggctctttctaagagagcagggaggaggggcggggcggggc

SEQ ID NO: 7232 - DNA, 122 bp, Homo sapiens
acttctgagagtcaaaggccactcacagtcagcttgtcctcgctcaggattccatctacccgcccagttccatattgaatggcaaacttggtcccattggcctggaaggagctagaggcttt

SEQ ID NO: 7233 - DNA, 122 bp, Homo sapiens
tagctgggattacaggcgagcgccaccaggcctggccaaattttgtatttttagcaaagacggggttttgccatttggccaggctggtcttgaactcctgacctcaggtgatctgcctgtct

SEQ ID NO: 7234 - DNA, 122 bp, Homo sapiens
gagctgcagcccgaccgcgagcgtgccaagcggcttcagcagctagcggagcggtggcggcggcccccctcaggacaccaccaggtaccgccgcgcccgcctcacgccgacccaggggccta

SEQ ID NO: 7235 - DNA, 122 bp, Homo sapiens
ggtttcacctcttcctttttaaatttaaattctgtttaaattgaagtgctactgcattcccgtggttggcagctcaaaaagcaagaaataaatcaggagaaaaagtctctcttctacctcca

SEQ ID NO: 7236 - DNA, 122 bp, Homo sapiens
ctctatctgctacctttgggtttctgaatttacataccactctcaagtatacagtattcacgatttctaagaactggagagtaaacctagtcctctaacaatggcattttatttgttgagtt

SEQ ID NO: 7237 - DNA, 122 bp, Homo sapiens
tcgctcaccgacacagatgtcccccagctgttccggcctcagattcacgtccttgagaaccgcggtcatgactgccgagagaagctcgtcgggggtggtgtcctgcagcagaaagagcagcc

SEQ ID NO: 7238 - DNA, 122 bp, Homo sapiens
ctgcaggccggggatcccaggccacggggcctcccccgacggtgggggcacggaggcggccgtctgttccccaggagcagcacagccatagcggtgagtaagcctccgttcttgtggacagt

SEQ ID NO: 7239 - DNA, 122 bp, Homo sapiens
cggtcccaggagtggccgacgctccctctcctgcccattccgcggatgggcaatcccaggcggaactcccttgagggtctcagaatatctgggagacctcgggctcttgatctccgagacac

SEQ ID NO: 7240 - DNA, 122 bp, Homo sapiens
acctttataatctggcaccaaaggagcttccgtctacactagcagtgagagaaagtgcaacgtggggttaaagcatgagctctggaatcaggccactggcctgtctttaagatgggataata

SEQ ID NO: 7241 - DNA, 122 bp, Homo sapiens
aagcacatggattctcaaaagacaccaggccagagaattctttcatcctagtcccaatctcgcccttgaaagcgtgggaggggcaaggctgcgccacgggaaataaatgagggctgccaaag

SEQ ID NO: 7242 - DNA, 122 bp, Homo sapiens
gattaccgctacgaggtgctcacggccgagcagattctacaacacatggtggaatgtatccgggaggtcaacgaggtcatccaggtgagggtggccgccgcgccagctggaccgggcccgac

SEQ ID NO: 7243 - DNA, 122 bp, Homo sapiens
accccacccaattgttctccacatcccaaggccgtcccagaagctcccatgagggtggctcgttcggagacagcacccgccatctcctccccctcccccgccccgggactcgccctcccccc

SEQ ID NO: 7244 - DNA, 122 bp, Homo sapiens
cctacatgccgagcattgggctaaatgctggggtgccagtagacaaggaagtcatggagccggtctaggagacaggccatgacaactccatatgaccaagtgaaggggcagcgacaggagga

SEQ ID NO: 7245 - DNA, 122 bp, Homo sapiens
agggtggcgaggaaaggcacgctccaaacaggagggcggcttttaagtttgtggtgtgaccgcagcagctgtcctgggagagactcagtctttctaaaaagaggatgctgaaaacgccgggg

SEQ ID NO: 7246 - DNA, 122 bp, Homo sapiens
taccctctttactctcctctatctatcccaaaactgttttccttctcctaccgctccagtcgcgctgctatctctccatcactgccaacaaccgcagcaaggcgagccgcgttcacgtggct

SEQ ID NO: 7247 - DNA, 122 bp, Homo sapiens
tgccatctctctaatgcacgcagtttatgttcagaaacgggcagcacagagaggaattagcggtgggggaaattttcatcaccaccggtgatgtgtgcaccgatggtagatggctatccaga

SEQ ID NO: 7248 - DNA, 122 bp, Homo sapiens
tcagacacaatctaacccaatgagtcaaagcaacagagtggtgacagaggaaaagcctatcgagtgcacagatctctcagcaagagcaggcccaggaagtcagaaaagctgagtggtgggaa

SEQ ID NO: 7249 - DNA, 122 bp, Homo sapiens
cgatgctccgggctggtgcaggcttgctgggggatgtcggctgatgcgagctggagagcgcgtgtggcggccgcggcgccagtgtttgtgtgtatgtgagaaagcaaggggcgagcgcgagt

SEQ ID NO: 7250 - DNA, 122 bp, Homo sapiens
tagcatatgggtctgattttaatgagtcctggaacgcagtctgcaagctcgctgaggtgacgatttgatgaaagcaagacttaatccctgcaaaacttggtctaacttcatgtcagggattg

SEQ ID NO: 7251 - DNA, 122 bp, Homo sapiens
ggctccggcccaccccgggccagggcgccgaccctccctgccggaccctctctagaaggccgcgggtctgggtctggctcatcccttaaagattccaagattgggcgcactctgagctcccc

SEQ ID NO: 7252 - DNA, 122 bp, Homo sapiens
agaaaaaaaagaggaaccatccctcccagttgtacctgaactccttggtgctccccagggcgggcgaggcagacaggctgcgagacttggcccggccccggatggggtggttgtaactccag

SEQ ID NO: 7253 - DNA, 122 bp, Homo sapiens
gagcacctttttcctgggagagctttccaaacagggaacaaacagagccaccctgggccccgctgagaggatcctaccagaagccctcaccactgtcttgctccacgctggtggtgacggtg

SEQ ID NO: 7254 - DNA, 122 bp, Homo sapiens
ggtgaagaagggatggctatctctcagcctccctccttctatcgtgtagatatgcctacccgatttgccctttgctcaaagtagttctatattctttccatgaggtttttaacaagcgagcc

SEQ ID NO: 7255 - DNA, 122 bp, Homo sapiens
tggacaagccagccccagctgacataatttacagaaaaaccaaggaaccctgcagacagccggaactgaggtcccaaaatacagcccagccaagccatgctgccatcgttagccattggtac

SEQ ID NO: 7256 - DNA, 122 bp, Homo sapiens
ccctataggggatattgggatggaagacgggggaaggaatctgagccatacctgaagatacgtgcaaggagtactgtttggtggggaggtggacacatcagcatgctactctggattttcag

SEQ ID NO: 7257 - DNA, 122 bp, Homo sapiens
tctaaatccaaggtgctaagttgatgggcggtctttgctctcacccctcgatttcgggcgcgtgtcttgaaagacaggagagaaaaaagaccacccagctgcaggaggcaaggctggagcga

SEQ ID NO: 7258 - DNA, 122 bp, Homo sapiens
aaaaatttgtgacgtaaacttgtggtttagtccgtttgcacactgctgtaaggacataaccgagcctgagtaatttataatggaaagaggtttaattaacttaccattctgcaaggctgcgg

SEQ ID NO: 7259 - DNA, 122 bp, Homo sapiens
aggatcacacctgaagactagggctggtcccacatctgtatttcatctcgtgcatctgagcgcagacttctttcccatgctcacccttgcaacctccagccccttctcagacttctaagacc

SEQ ID NO: 7260 - DNA, 122 bp, Homo sapiens
gggcagcaggtgtgggggccaggggactcggggacttcctctccggctgggcccgcctgacgtgggaggcagccagggttaatcatttccacgaagccttgaccccacctgccttggccgct

SEQ ID NO: 7261 - DNA, 122 bp, Homo sapiens
cccctcttctaggccaaccagcataccctgccccaggtttgcttttcagccttcctttttcgttctccaggtcagagttctggatgctccttgatgtaggaccctcatctctgcactctgaa

SEQ ID NO: 7262 - DNA, 122 bp, Homo sapiens
gacagacgtaggaattgcttaaaaacaagaagttctcccacccttgttggagcgaatgcgcgagtctgacagtgaaccttttgggaaagagccagcattgtaaccgtgctcggtgacttctc

SEQ ID NO: 7263 - DNA, 122 bp, Homo sapiens
gggttttcctttccaaatggctctaggaagtcagtgtgaaacggccttaggttccctgctcgcagaccctgttctcctgcctaactactagagtacagtgtgcacttcctaaaaacggaagc

SEQ ID NO: 7264 - DNA, 122 bp, Homo sapiens
ggctcttcgcggggagcgggcgggaggccttcctgttacatgtcgcagctgggacacagacggcagcgctccagggtccacttgccggcttcggttccctcaggcccaggaccaggctccac

SEQ ID NO: 7265 - DNA, 122 bp, Homo sapiens
aaggcggggaaggacctcgaagaaacggagggcgccgggctggcagttcaggctcagggccgctggggggagtttgcgcaaggctgggagccccgaggccccgggggaggtggggaggcaga

SEQ ID NO: 7266 - DNA, 122 bp, Homo sapiens
gttctctgacagatatttgaaaaccactgtgtttgagtgattgtagtgtcagcacttccccgggcacactgtgatccaagggtctccttgagtcaaagagccaggagaagggctgaaggagg

SEQ ID NO: 7267 - DNA, 122 bp, Homo sapiens
aggcgggtccgagttaacccttggaggaccaggtgccacctggtccaagttggcagggaacggcagtgaccctggagctcgggctgtccctgcagcctgcagtgtcccctggtggcagccaa

SEQ ID NO: 7268 - DNA, 122 bp, Homo sapiens
ttccatcataaacacacaaaagcccaagcttgcttactgtgtgggggacaacctcagcttcgcccatcagatgcatgcactctgaactctgatcggggagctaaggactccaagcacaaggg

SEQ ID NO: 7269 - DNA, 122 bp, Homo sapiens
ctgtagtggatgttccaagatcctgtgaaagctcctaatctctctcatggggtgagcgaccgagtcagtgggtgggatgctgagcagagcccccagaggctgctcaactaggtgaaccatct

SEQ ID NO: 7270 - DNA, 122 bp, Homo sapiens
cttggcttggcgttagtcgctttgcctggtgtttcttgcttggattggcgttttctccctcgcattcctttgctgggcctgaatttttctctgctgggtttggcattcccttgactgggctg

SEQ ID NO: 7271 - DNA, 122 bp, Homo sapiens
cgccaggtcgtcaggggcttacggccacggtggcgccaggtctgcaggggcttacggtcacggtggcgccaggtctgcagcccggaaacctctagttgtccttacaggtggaggatccctcc

SEQ ID NO: 7272 - DNA, 122 bp, Homo sapiens
ctcgcctcccccatcctgaggtacaggagactcacatgcccgattgacatttcagagagacgtcttcaaccagctgctgattcacgcggccttaaactgcacctccagcgtccataagaacg

SEQ ID NO: 7273 - DNA, 122 bp, Homo sapiens
agcagccgggggagcggggcgccgccgccgctctccccgcccgcgccccccgcccgggcgcgccccctagcccggcgggcgcccacccagcccctgacagcccccccgccggccgcccctgc

SEQ ID NO: 7274 - DNA, 122 bp, Homo sapiens
ctgaggcaggctacaggttcccaggcaaggcagtcacatccagcctcagccaggcagtaccgccagtcattggccttcactttgtctatttgagtttgcaaggttaacatgaaagaggctgt

SEQ ID NO: 7275 - DNA, 122 bp, Homo sapiens
tccccatcaccgcgagggtctgtgcatgggaatctgctccagaggctccctcaggcgccgcgccgcggggatacgcctttcaccgccccagcaattggagcgctgagtcgaagtcctgattc

SEQ ID NO: 7276 - DNA, 122 bp, Homo sapiens
agagttggaaaagaggcaggaggaggcagaaaccaatctccccgccagaagcagctgagtcggccacctgtgtatccagactggcacacacagaccccagtccagccatgtgtggtatagag

SEQ ID NO: 7277 - DNA, 122 bp, Homo sapiens
acagaaccaaggacaacatcttccttgcacttcctgtggccatgctggtttaacctgttacggcttctcagctttgtttcctgctggctgagctgggggctctccctctattgtgggttttc

SEQ ID NO: 7278 - DNA, 122 bp, Homo sapiens
cattttttgggctaatttgattctctgcacagaagcctgatgctctgggaagacctgagccgccacactcactccaacagcatctgtttctcaggctctcaccccgacggtccctggggagc

SEQ ID NO: 7279 - DNA, 122 bp, Homo sapiens
gcctaagcccaccccagattctgggtcattcggagccccagtgcagcagaagtccggctgcgggttcaccttgtcctccggcacagggcccggccaccaggcgccacgctggatagcctgcg

SEQ ID NO: 7280 - DNA, 122 bp, Homo sapiens
gcggcggagatccagggcaggaaaaggcgggggaagggggcggtgattattctaaatgctcggcccagtgggaggagtgaagcacctctctcaggcacctgagattcgacgggaaggggtgg

SEQ ID NO: 7281 - DNA, 122 bp, Homo sapiens
tggatgtcatgcgtgtgtgctgatgtcacatgtgtggatggcacacgtgtgctgatgtcacgcgtgtggatgtcacacgtgtgtgctgatgtcatgtgcgtggatgtcacgtgtgtgctggt

SEQ ID NO: 7282 - DNA, 122 bp, Homo sapiens
aaaagatgtgtggaaaggaaatttctctgcacacaggatctgccaatttgtgaaagttctcgactgtttataaacacaagggccgtaactctgctaatgacaaaagtggaaaactgtccaaa

SEQ ID NO: 7283 - DNA, 122 bp, Homo sapiens
ttgttatgagcatccacccgtcgagggcaggtcttgtgttactgagcgcagcctgacaatcgcatctgcaccgaggccctgccacggcggttcacggcaagggtctgtggctctcctgtgcg

SEQ ID NO: 7284 - DNA, 122 bp, Homo sapiens
cggccaagcggtcactcccggtgagtgggagcatgcccacagcagggtcagcccagggcccgcggcatccgattgttagctgagcgctcagggcctgcctggagctgggagccgcatttagc

SEQ ID NO: 7285 - DNA, 122 bp, Homo sapiens
aaaaatatccgtaggggaagctggatggcttgtgagggattccagggatccaaagtgattcgaaaaactaaagaggcaccatttgtccccattggaatggcaggttttgcagtagttgctgc

SEQ ID NO: 7286 - DNA, 122 bp, Homo sapiens
tgtgtggcagggctggctttcagggatgtggccccacccttggttgcccagtttggcccccgccgcctcccccttctcccctggccaccccctttccccacctcggctcccctacacctggc

SEQ ID NO: 7287 - DNA, 122 bp, Homo sapiens
gtccccgggacatggggctggggtcctgggatcgcaggactagcggcacaccctacgggccgcacgctgagggtgggtggccccacgcagtccccgccgccgcgggggcccctcgcatcaca

SEQ ID NO: 7288 - DNA, 122 bp, Homo sapiens
gggtttggtgagaaaggggttaaatctaagggagcttacagattaggtggtagaggagttcggggtctgtggctttaaattatggtttgcaccctatggacatttaaattcctattcctgta

SEQ ID NO: 7289 - DNA, 122 bp, Homo sapiens
gactatgcctggacctacttccaggttgaagaagcctcagcggaggcgatacggcctcctcgccaacactgaggaccccacggagatggcctcgctggacagcgacgaggagacggtgtttg

SEQ ID NO: 7290 - DNA, 122 bp, Homo sapiens
acaggcatgcaccaccacgcccagctaatttttgtatttttagtagagacaaggtttcaccgtgatggccaggctggtcttgaactccaggactcaagtgatgctcctgcctaggcctctca

SEQ ID NO: 7291 - DNA, 122 bp, Homo sapiens
atttcctggagttgtagctgcccgttgaaatgagaactctggatttaactgctgaggcagcgatccctaaatcactaaagaatgctttgttttctacctgtctactttttccctagaacgga

SEQ ID NO: 7292 - DNA, 122 bp, Homo sapiens
ggctattatccaaaagacaagtgttggtgagggtgtggggaaatagaagcctttgcccatcgttggaggtacagccattatggcaaacagtatggagtttcctcaaaaaaaacaaaactgga

SEQ ID NO: 7293 - DNA, 122 bp, Homo sapiens
atcagcaagaggttgcaggggtggcagctccagagcttccccgagcggctctagtgcctgcgggtccaggaagcggggctgggggtccaggagctgaggctccggctcgggcgatggtggct

SEQ ID NO: 7294 - DNA, 122 bp, Homo sapiens
cgtcatcaggtcccaccagggcaatgggaactttgtcggagttctctgtcatgtttgcggcgggaggagtgaggcacttggagactccctgggcaccctgggatctgtcccgctgccccgac

SEQ ID NO: 7295 - DNA, 122 bp, Homo sapiens
ccggttgtttaaaatctcctcggaaaggcttgctctggcctgcagctgatattggtgccacggtttgggcagccgagttccactctcacctttcagtccaaatgaggaaaacagaaccattt

SEQ ID NO: 7296 - DNA, 122 bp, Homo sapiens
agccggaatcgacacagcactttcaaaggttcctccatagctcccctgagatccggccagcgggaaaccccaactgagaactgcaatggcagggaaagtggaggctagatcctgttttttgt

SEQ ID NO: 7297 - DNA, 122 bp, Homo sapiens
gccgagctgcgagcaggaaaccaagaccctcctggggcagcttctaggctggggccaccacggatccgggcggagtcggagggaattgggtctctcgctgtcccctccccaccgctgactgg

SEQ ID NO: 7298 - DNA, 122 bp, Homo sapiens
tttgtagagacagtgtttcaccatgttgcccaggctggcactttttctttcaaagtcaagcggaaactccaaataaaaagattccttctgatatgaacaaagtttgatgaaattaatcatgg

SEQ ID NO: 7299 - DNA, 122 bp, Homo sapiens
ccacagcgatttccaatagatttctgcgtggccttgacacagacagctagtgtgaatccccgcccacagaggggcggcacgttggttgccgtacaacgtggtggttccctgcatctctgccc

SEQ ID NO: 7300 - DNA, 122 bp, Homo sapiens
ggggcagcaggccgaggccggctgacccgcccgcgcccccaggccccgagtccccgtacacgcactggaagcagacggtgttctacatggaggactacctgaccgtgaagacgggcgaggag

SEQ ID NO: 7301 - DNA, 122 bp, Homo sapiens
acttcgagcagctggcggagcgcgagggcgagatcgagcagggtgagcgccacggaactgcgcccctcccgcggacggcctccggaggacagccccgctccacagccgctcccccttcccca

SEQ ID NO: 7302 - DNA, 122 bp, Homo sapiens
gagcccacgctgccgccccagcagggatcaaatcacacagtgtgagataagcctcaagagcgggtggccttatgctgccactgagaactgattgggttcagttgcctcatcaaaatccctaa

SEQ ID NO: 7303 - DNA, 122 bp, Homo sapiens
agaactgtgaatgtgacacttcctgcaggcacccaaagaccgcctggtctcctgcaccaccgttctccagagccctctccacgggcgccagtgctcacacaaggtcacggccacctcaaaaa

SEQ ID NO: 7304 - DNA, 122 bp, Homo sapiens
cccagcggagccgcgaaggcccaccagaaatttcctgtcacctggccccaccccagcgaccgctcacccaatgaaaactggcgcccgcagcttagggccaatcacgagctgggagggcgggg

SEQ ID NO: 7305 - DNA, 122 bp, Homo sapiens
ggggcaggagtgggtaggaaaggctcccacctttgtccattcgcttctccgtgagctgcacggaacggcgtcggcgggcggctggctgcgggcactgaagttctgcagggcaggcggaccga

SEQ ID NO: 7306 - DNA, 122 bp, Homo sapiens
tgcaggaatttttttttttaatgtgttaaaacaaattttatttacaataacaggcagcagcgggatttggcctggggatggagcaaagtgaccccctgctgtagagcaaggtgagtgagtca

SEQ ID NO: 7307 - DNA, 122 bp, Homo sapiens
acttggcatttctcaccccaagccgctgagctggcatctgtgtggaatgacttctttctccgtttacacacgtgggtaatgcctgattgctttaaggcttgtccccagaagggctcaccttg

SEQ ID NO: 7308 - DNA, 122 bp, Homo sapiens
agccagccagtgcgcagagacgcagccccaacgcgctgctgctgctgcggacacctggggcgtggagccggggcacggggcagctgtccctctgcagccacacaccacaggggatgggcgcc

SEQ ID NO: 7309 - DNA, 122 bp, Homo sapiens
gcttcatcttccccttctcttgatgatgctcttcagccattagggtttcaaaagagtgggcgtgagcaagcgagaaaagccccttcaattctgggaaacttaaagacagtttcttccagcag

SEQ ID NO: 7310 - DNA, 122 bp, Homo sapiens
tggacctggcctgtgaccttgtggtgtggaccccacacagaaggcctttgggaggggctccggcttctgcaggacccccgcccccaaccaccaccaaaaagcaaagcctgtgcctccttccc

SEQ ID NO: 7311 - DNA, 122 bp, Homo sapiens
gcttccgtgtgacctgcagattggttcatgagttcattggttcatgagttctcagcagctcgaggacttagtggacagtgccctgcaggactgagcttatttcacagccttggcactgggtg

SEQ ID NO: 7312 - DNA, 122 bp, Homo sapiens
cctgttggcatttggcaccgccctctgaccatcgcctcggccacctcctcgtgccacccccgccccacccacacccgcctggcgcccccgagcgtgctctgcgtcgccccccttgcctggct

SEQ ID NO: 7313 - DNA, 122 bp, Homo sapiens
atctggaaggaaacagaaatgatctaaaccagtcattccacttaactcagggagtactggcggaatttcaccctaccaaccccctccccctaccaccccatcaccagctaagggtggcaggt

SEQ ID NO: 7314 - DNA, 122 bp, Homo sapiens
ctcatcctgtggagggtgggtcagggagcagggaggtccagtccggggtgtgtggtcggacggtgacaggcacccgcatcccacagaggagcagcggcagcaccccggcctgcagagccagg

SEQ ID NO: 7315 - DNA, 122 bp, Homo sapiens
atgattagaccagtatcctcaggcgatgtgaaatctagattgtttcagtacagttgaatgcgtcatctaaatttcccaggtgtgggaatcagtgtttagggtagagggatcacacaattggt

SEQ ID NO: 7316 - DNA, 122 bp, Homo sapiens
gacgccgcgagcccagacgaggtgggaggggaccgggagaaagccccccaatctgattcgcgcccagccagtcgtccgcgagccgcggagccgccttctgcacccagctaaagagcagcgat

SEQ ID NO: 7317 - DNA, 122 bp, Homo sapiens
aagccttgttttaggaatggcatcttacagacgtggagacagaggcacagagagagtaaacgtcttgcccaaggatgctcggctaatcggcggcagaaccatggctaagagccaggcctcct

SEQ ID NO: 7318 - DNA, 122 bp, Homo sapiens
caggcgtgagccaccgcgcccggcctaattttttgtattttagtagagagggggtttcaccgtgttgcccaggctggtcaagaacttctaaactcaggcaatctgcccatctcagcctccca

SEQ ID NO: 7319 - DNA, 122 bp, Homo sapiens
tgtaattttatgttaattgttattactttaaaacatatctaccatctgattggctggtaccgagagctgtgggtaaaatttgaaaattgtatttagaataagaaattttacattttaaaccc

SEQ ID NO: 7320 - DNA, 122 bp, Homo sapiens
ggtctagcctgggcctggagggacggatgtgggcataccctgagtttagacaggtagccccggcccctttcagagtttctctgtgagtccccttagagctttgtttcaaaggctgggaagct

SEQ ID NO: 7321 - DNA, 122 bp, Homo sapiens
cagccttcctctagttctaactcctctcgttctaaggagatccttcccattcctgcagaacgtctccccaacccttcttcttcacagttctccctcctatccctgaaccattgcaagaggtt

SEQ ID NO: 7322 - DNA, 122 bp, Homo sapiens
tagggactcaagctaggtagagcattacatcacatctgttagctggtacctctgattgggcgccaccactgacaggtacacagagttaccaccaatactgctttgttaccacctccttgctt

SEQ ID NO: 7323 - DNA, 122 bp, Homo sapiens
gaaggtttttcttggctttgaatacacctgtgcagatgtgggaagctacagcctgagcagcgctctctttagagtgccttgatggcagcccaggtggcctagattctctaggccttcctcat

SEQ ID NO: 7324 - DNA, 122 bp, Homo sapiens
ggcgctggggagggtatgtgcagtaataggatgtggccgaggatggtctattagcagcagcgcaaccgctgatgagccccctccctagccccttggcgtccccatccccgctcagccaggca

SEQ ID NO: 7325 - DNA, 122 bp, Homo sapiens
acctttgacccggaagttgagcgacccaggcggcggcctgggattggacaccaccaggcacgtaccaaggcgtccgcggcgcttgggggggagcccgcggcgcggcggcctaaggtgcgtaa

SEQ ID NO: 7326 - DNA, 122 bp, Homo sapiens
gaactgccagcttacagacgtgctcctgacatcctcattccttaatcagaaacccatgtacgttaacatgaagaaaatagttgaaattacatatgcttaaaacttgggtacaaatataagga

SEQ ID NO: 7327 - DNA, 122 bp, Homo sapiens
acaggaagaaacaattttttacatgaatggacttcataaccaggcatataggaactggcgcgaagttttaaaagttctagaaagcagtagaagttctagaaagaatgagagttccagaggaa

SEQ ID NO: 7328 - DNA, 122 bp, Homo sapiens
gcagcccacctcacagcaggaaggcagcagcagaacccacagggcagggcaggctgggcccgagccccacagccaccgagtcagcacagcccacggggccagaaggcacggccgttccctct

SEQ ID NO: 7329 - DNA, 122 bp, Homo sapiens
cgagtccagcgacctgttgcacatgagcgaggcggcgggggcccttcgtccctgccccggcgcttcccagccatgcatcctcgagccctgtcctggcccgtcctggcagggcccaaaggcag

SEQ ID NO: 7330 - DNA, 122 bp, Homo sapiens
atagaggaggatgtcgcattggacttggtgaccaggcagatactgaatgcaactcagtcacggtatttaaatcacattaagactgtcttttatttatggctctccttgtgattttgtctggc

SEQ ID NO: 7331 - DNA, 122 bp, Homo sapiens
acgcccacttcttggtgggcggggcacaggtgggcggggagcatgcaaaacagcccagggcggcggccaatcgcggcgcgcgccgggggtccaggccccggggatccgaggcgccgcccgcg

SEQ ID NO: 7332 - DNA, 122 bp, Homo sapiens
cagcagccagggcagccctggagctgtcgctggagtccgatcatgtgatcttcaacatggcgacgctcttggttccctacagaaaggggcggagcctggactggggggcaggctcagattca

SEQ ID NO: 7333 - DNA, 122 bp, Homo sapiens
tgcttgagcttctgagtgataattattcatgggctcctgcctcttgctctttctctagcacggtcccactctgcagactcagtgccttattcagtcttctctctcgctctctccgctgctgt

SEQ ID NO: 7334 - DNA, 122 bp, Homo sapiens
tcacctgcaagcgcacaggtcacagatcacaggtcaccttcaaatactccagctatggaacgtgttttatcaaaactgcttgtgaggattaagactttttaatgcttatgaaaaaattacct

SEQ ID NO: 7335 - DNA, 122 bp, Homo sapiens
tgcgtccccacctacactagcctggttgcaggcggcctccaagggcacagcgggaagctccgcccttgccatgcccccgccaccggggaaggcaagacaaatgtgcgtggcaccctcctcct

SEQ ID NO: 7336 - DNA, 122 bp, Homo sapiens
gtcagtggagggggcggggcccgaagcggaggcggagcttgggaaagcctggcgtgagggcggggcggggccagaggtgggctgaggccggatcaggcggtgggggcggtccccgtagcccc

SEQ ID NO: 7337 - DNA, 122 bp, Homo sapiens
gagggactacgtaactttctttctctccagatccatcccgggggaggctgggcgggcgggcggctgctccggtccaggggtggaggtcggggccctgacccgacgcagccaggcggaagcgc

SEQ ID NO: 7338 - DNA, 122 bp, Homo sapiens
aaccggcgctccttttctgaccggcttcgagtcacggtacttgacacacctggggagaggcggctgcgcccagatcaccagtgggcttcttgatgtccgactcaaagcgctttgccttttcc

SEQ ID NO: 7339 - DNA, 122 bp, Homo sapiens
tagacttctccgcctctacactcctggaaaacccgcagtggatttcaccaacttcaggatcggagcccaggcaggcgaacgtaccttattgcgcatgctcgctagcccctcccgctcggagc

SEQ ID NO: 7340 - DNA, 122 bp, Homo sapiens
gtccggcttggcttccaagccgctaaccaaccgctggatgctctgcagttcgctggtggccgcctctttctccgcgcagagtttgggcgacaaggacatggagctggaggagagcgtggagg

SEQ ID NO: 7341 - DNA, 122 bp, Homo sapiens
ctgcgccatggaggagggcgcagattacccagcacagaggatgcggccgctcaggcagggcgacagagacaactgacatcccagtggaagatgacagccaccctggcagaggcatgggcatg

SEQ ID NO: 7342 - DNA, 122 bp, Homo sapiens
aaggaaagtcatgctgggtaaactgtgcgatgttacagagcacattgagtctgtggtcatcgtggttcttctatcttcactgtcacctgtatcctgttacacatactcagttcctaattgta

SEQ ID NO: 7343 - DNA, 122 bp, Homo sapiens
ttgtaagagcaaaagcgactgtatcagcagcacaacaaaagaaggtgtactttaaattctcgggcagcttggaaaagctattcctattgtagaaatgaagagggggaaaaaagaaaacccga

SEQ ID NO: 7344 - DNA, 122 bp, Homo sapiens
cgtgtcggggatcggtccccaagggagcccccaaccccctgcccacgccgagatcacccccgtgccaacctcgagggctcggcctgcgggactccagctgcccctgcctggagggagggaag

SEQ ID NO: 7345 - DNA, 122 bp, Homo sapiens
aacttaaatataagcaggtaagaattaagtaggtcaacggaaataaattccaaatatagtcgtggtctaaatgtgggagttgttatttacaaagatattaaaacaaatatttcacttcttga

SEQ ID NO: 7346 - DNA, 122 bp, Homo sapiens
taagatactcttggaggctggctctgaactcgggtgtctgaatcacagggcaagggtaggcgtgggctgtggctaacagccagagtcacttccctggcctagcttggggacctggggaggag

SEQ ID NO: 7347 - DNA, 122 bp, Homo sapiens
ttttccttgaaaaattggcgccccgtggccatgggccgacctaggcagtttctgcagggacgagcgtgagttttgtaccgcggttaccacctactttccagctccaggtcttagtctaagag

SEQ ID NO: 7348 - DNA, 122 bp, Homo sapiens
taaacacaactcctcgagcagcatactcatttggagagagctgctgttgaaatgtcattgcgttgtttttaagagttttgagcctggtaaaaccattcacctggggaggcaacgtgtagtgg

SEQ ID NO: 7349 - DNA, 122 bp, Homo sapiens
cgcggggcggggaggaggtcccaggagccggttcgaaagctccctccgtgatgaagtaggcgagaagggaggaggtgaaggagggcgagctgagcacacgcgcttcatgccacaggagggtg

SEQ ID NO: 7350 - DNA, 122 bp, Homo sapiens
gtcatccagttcctgtccccggcaggctccggcccagaccaggcccccggcctctcaccccgacctcaggtttccgccacagcccccagcccaggccctggacacgcgtccggcccctgcct

SEQ ID NO: 7351 - DNA, 122 bp, Homo sapiens
aggagccttaggagtttgttgtcgtggtagacagactcccccgggagctttctctgactccgaaccctgccttgctctgacttcctgttggagatgatcgattcgagagagggaaagagccg

SEQ ID NO: 7352 - DNA, 122 bp, Homo sapiens
aggcaaacctcgtaatccgtaggatgagaatgttcttggagtggactgcttcatctctcccgtatgctctttctgctgtgtgtgagttagagagtggtagtgaaaatcccgcagaaggacgg

SEQ ID NO: 7353 - DNA, 122 bp, Homo sapiens
cctcccctcctcacctgtccactccgggtcgggattgtttccttccctacctctggtcaccggaagtggcgatctggggcccccaatgggagggctctttgatatcttcctcctcctcctcc

SEQ ID NO: 7354 - DNA, 122 bp, Homo sapiens
ataactgatctgggtctattctacactcaaaacgaacacagtgcaccttctacacataggcgcacaccacacacaagcacttcctcattccttaccatctctagctctacctagcctgtcag

SEQ ID NO: 7355 - DNA, 122 bp, Homo sapiens
ccgggaggggtacccagggctcctcttgggggaccagagcctgagcaggggcctgtcctgcggtcggcgtctaccccagggcctgggactgtcaggtcaaggtcagccacccacacactcag

SEQ ID NO: 7356 - DNA, 122 bp, Homo sapiens
ccccgagcgaaaagccggacaagctgggggcggcagagaggagtgagaaactcttgggggcggtgggcagaagagaccacgcgcctcagaattccgctcgacttcatccactcccagcatct

SEQ ID NO: 7357 - DNA, 122 bp, Homo sapiens
gggctgcaggtgtcaccgggccaaggcttggtcagctcctgacctcggcaggggagcacccgggggactctgggaaggcagcccccaaaagcaggaggacttcaatcatagggggcagggaa

SEQ ID NO: 7358 - DNA, 122 bp, Homo sapiens
caagtgcacggggcacagcggagtctgtcctgtgacgcgcaagtctgagggtctgggcggcgggcggctgggtctgtgcatttctggttgcaccgcggcgcttcccagcaccaacatgtaac

SEQ ID NO: 7359 - DNA, 122 bp, Homo sapiens
gggatccgcctgtccacgtgcagccgcctccgggcggcgtcggccatgctgctgccccaccgtggctctgtggctccagccggaatggcaaagcctggctccacagctgcctgggagcgtga

SEQ ID NO: 7360 - DNA, 122 bp, Homo sapiens
acctggcctattattactttttaagaaccaaaaccattcacttaattaaggaaaccaggacggagatggatagaatgagcaatttctccacaccttcaacacccccccccagacccccagca

SEQ ID NO: 7361 - DNA, 122 bp, Homo sapiens
tgggtggagctggggccacaagatttgatttccgtgccgtgggagacgcacaggtggggccgggtgcccccaggggcctgactctgtttgcccggttaatagacctgaggacgcaggggtcc

SEQ ID NO: 7362 - DNA, 122 bp, Homo sapiens
attatatttgtaatttgtttggaattagtcgttgcatctgtagagtccgggaagggattgcggagaatatgtaggcctatgccctcactctacagctgaggtcctgagagtgtaccaaggtc

SEQ ID NO: 7363 - DNA, 122 bp, Homo sapiens
tggcgcaccagcagctctccgagggcgagcactactgggaggtggatgttggcgacaagccgcgctgggcgctgggcgtgatcgcggccgaggccccccgccgcgggcgcctgcacgcggtg

SEQ ID NO: 7364 - DNA, 122 bp, Homo sapiens
gggcctgggccttcccaggggattttctgggaggccaaggcccagcgagagcctcgtcctcgccccgccctgagtagggagcagggccctgcgcgcctggaagcccctgtcggggtgggccg

SEQ ID NO: 7365 - DNA, 122 bp, Homo sapiens
ccccaggtaagcgttagtcccgccttcaggagtgcggagcctcccattggacgaggtctgcgtccgtctctccgccggctaatggcaagcggcggcagcacggggggcggttccaggaccgg

SEQ ID NO: 7366 - DNA, 122 bp, Homo sapiens
gtccaagattacccaactggttattactagaggcaggattaaaccccggtgcctttccaacgtgatgaaaccggtggaagaggaaaacgcattcattcactagggaaacatttactcatcct

SEQ ID NO: 7367 - DNA, 122 bp, Homo sapiens
ctgatactattaaactcgtgtctgtttggcagttctattgatttatcctaggtaaatacacgggtgttgagtatcagctttccttaagagcatgagaaacattcagcacaccatgtttctaa

SEQ ID NO: 7368 - DNA, 122 bp, Homo sapiens
gaccaaaaataccttggaagatttttggctgtccgtgtctaaacgttttagattcttttgcgtagtgtatatggataggttgagcctatgagtcacaataaactaaacttattggtcttgct

SEQ ID NO: 7369 - DNA, 122 bp, Homo sapiens
gtggtggatcatcgtctggaaatgtgtctggggttgcccctgctgcccctgcagggggctcgcgctcctcctcccggaacttagggtcttctggtggcgagaaggaagaaggcaaaaaggtc

SEQ ID NO: 7370 - DNA, 122 bp, Homo sapiens
tggtggataaagaaagcttcagatacgatatctttgtataaaattaaatgtacatgcacacggacacaaatgagttatacataaaattggggaaacctgaaaaagatcaactgcttatatca

SEQ ID NO: 7371 - DNA, 122 bp, Homo sapiens
cgcttggctccccaccaggtaggtccatcccgacagcacctgtgccgctcacctccccaccgggtaggtccatcccgacagcacctgtgccgctcacctccctgccgggtaggtccatcccg

SEQ ID NO: 7372 - DNA, 122 bp, Homo sapiens
gttcttatttttattcgagagctccctggggctttcttcgcagagccccccttggctcgccgcacccttctgagccaggggtaatttagcttggggcttctcttgagcttgtgcaacccaaa

SEQ ID NO: 7373 - DNA, 122 bp, Homo sapiens
acaaatgacttcacttctctatgagtcatctgtaaaatggggctctttgtgaagacttaacgataccacgtgtacaaagcactgaatacaacatgcacattaagctccccgaaattgaaact

SEQ ID NO: 7374 - DNA, 122 bp, Homo sapiens
ctccgcgctcagggggcgtgggtacggcccaccacgagggcagggctcggcgccagctctcggcaaaactaacaatatttgttaggccctaaacaaaaaggccctaacagcgataaatccat

SEQ ID NO: 7375 - DNA, 122 bp, Homo sapiens
tttgtgttggtctcctgttgtgacccatcccctgctatttctgctgggcctgaggtaaggcggacagggctgaccctgaaggcaaagcatcctgggggccactcttctggaagcgaattccc

SEQ ID NO: 7376 - DNA, 122 bp, Homo sapiens
acaagacagacagcttcgctgcccacccctgtagtccctcagcagcctaaggagcagttccgttgggcatcgccccacccatctaattttgcagatgaggagccaaggatgaggagccagct

SEQ ID NO: 7377 - DNA, 122 bp, Homo sapiens
catgggtcaactacactttgcagctcctgcagttaaatgcagtgtttttgttactctggccgtgtgaggaaataaatatcttctgctttaattcccctgccccgcaacctcctgcccaaact

SEQ ID NO: 7378 - DNA, 122 bp, Homo sapiens
aaacctccaggaggccaggcctttactagcttgtttctgagcccagcagctcaggacaatcggccccgcccacttcgagactggagcgcgaacgccccgcccgcgccgcgcacctggctgcc

SEQ ID NO: 7379 - DNA, 122 bp, Homo sapiens
tgcaggaatgtttttaatagggatcctttttacccccagctactctgcagcacaggagtacgactgtatttgaggaggcagcttgacttcatgctccagggagaagtcttttatttcctgtt

SEQ ID NO: 7380 - DNA, 122 bp, Homo sapiens
ggcgcggcctcgctcacctccagcttggcccgcgctccggtcctgctctggcgcccccagcggccgcttgaggaacaaggccgctcctcgagagggatgccccgccctttccgttagcgaac

SEQ ID NO: 7381 - DNA, 122 bp, Homo sapiens
gaaaaatagctaaggacgctccgagctcgacaaaccagaggtgagaagcctgtattcagacggggatgataggggaatgggagtcctggggcccggggcccttcagaggccagaggaggtga

SEQ ID NO: 7382 - DNA, 122 bp, Homo sapiens
ttgtcttgataaattacgcagccgccggtattcctttccagcaacacaaaggggctaaggcggtgacaacattcagaatatattcttcatttggggaatgagtattgactggcaaggaccac

SEQ ID NO: 7383 - DNA, 122 bp, Homo sapiens
ctagtgaaggttggggagcaagcttctgcgggaaagagggaggggttctccaggaaaagccgttgagaggaccatcacaccccaagcagcacaggttccagttacagccatcctttgtcata

SEQ ID NO: 7384 - DNA, 122 bp, Homo sapiens
atctcactctgtgtcccacacaaaactccttgcagttcttggaacctgtgcttcccagaacgtgatatgctctttgatatgctgtttgcatgatatgctttttctctccccttggatattca

SEQ ID NO: 7385 - DNA, 122 bp, Homo sapiens
acctcctgggatcttgctctaaggaagcccggtgcgaaggaggtggctttctcaggtggtcgcgctagatgtccaaggctttatgttcggtcagatgagctgtataataaaatgaaagtgtt

SEQ ID NO: 7386 - DNA, 122 bp, Homo sapiens
agccatctcatgcccatcgccactgccctggggcagctgaactgagcgtatgtgccacgccgcccaggagacccctctgctgcaccacttcatggtaagtgcccaggcccggtgtccccaga

SEQ ID NO: 7387 - DNA, 122 bp, Homo sapiens
ctcctctttccatccctacagagagggacagagaggcaaagttccttgcatccctcggggcgctgtccctgtgagctcccggtgtcctgcacacgtgggcccctgagtgaccgggcccgtgt

SEQ ID NO: 7388 - DNA, 122 bp, Homo sapiens
tcatgctccgctttgtgctcagaacatgacgaacaccgtggtgaggaccacgctgaggaacgacctgtcccaggagggcatcatccaccacctgaagatcctgagccccatctactgcgcct

SEQ ID NO: 7389 - DNA, 122 bp, Homo sapiens
cttcttctcaatgatatgtaatcctatttattatcaatgtcctttgtccattaatcctttcgagaaaatgtttagtggccccattgttgcaagccagttcttccccccatctcccgtgtttt

SEQ ID NO: 7390 - DNA, 122 bp, Homo sapiens
cgccgcaaccccaagcccggccccggagaagagtctcaggactaaaagggctgttccagccgtccgtgctggcgcctggggatccaggccagttcccggtacccgcccatgcccagcccggc

SEQ ID NO: 7391 - DNA, 122 bp, Homo sapiens
agaaggacagcccggcagcctgagagagcgactggggggcggtgaggagctccaagggggcgggtcggctgagctggcccagggtcagctagcggccgcggggccggggcggagaggtcgca

SEQ ID NO: 7392 - DNA, 122 bp, Homo sapiens
agaagctgggccagagaccccgcggggaacctgccgttgtttgtcaaaaaacgaggccagcgaggaagaagccaaccatgcctcccgctccactcgctttggaacccacagaatgttcaaca

SEQ ID NO: 7393 - DNA, 122 bp, Homo sapiens
tagccaggatggtctcgatctcctgacctcgtgatccacctgcctcggcctcccaaagtgcggggattacaggcgtaggccactgcgcccggcctataatttttaactggttatattaacct

SEQ ID NO: 7394 - DNA, 122 bp, Homo sapiens
ggcctgggtgctaagcccctcactgcccggggccgctctgagtgcggcccgcaaagcccacgcccacccagaactctagctgtcctgcaagcaccgcgcgcagccctggttcccacctgtgc

SEQ ID NO: 7395 - DNA, 122 bp, Homo sapiens
ctcgctgccccaataccagcgccggggccgcgagcccgccgctgattgggccgcaccgcccgtgacgttagcccggaccccacccctccggcggcaccgcccccgtccccattccgcacaca

SEQ ID NO: 7396 - DNA, 122 bp, Homo sapiens
atgtttactcgtcagttcatgttcctctcctgtgcagcttctaaatattaccgcctctctcggctcccaggcacagcccggctttcttcaacttgggctaacaagagtggtcatcgcttcct

SEQ ID NO: 7397 - DNA, 122 bp, Homo sapiens
ctggctgggcctcgcggggaagggctctctgggcggagtcggggcactcggggcctggggcgtggtcgccgggctgccgtgcgctcgggatcagtctttttatacatatatatatgtgtgta

SEQ ID NO: 7398 - DNA, 122 bp, Homo sapiens
ccgcctgtgaccgtgtctgcatctgtagacagatttaattgtgtgtgtgtgtgtgcgaggcgcctcgctcagcccaggaccacaaagcccagggggcctggctctcggtccagccttcggcc

SEQ ID NO: 7399 - DNA, 122 bp, Homo sapiens
tttattgtctggttagcgccaaggtgcaagcgtttgtcttcattcactccggaaacaaagcgcgttgcaccttcctgctccagcaaggattaacggcgcggacacaaaggttttgtcggagg

SEQ ID NO: 7400 - DNA, 122 bp, Homo sapiens
cctctagggaaatgggacattcagtcactaggaagaataagggccttgaaatcataactacgccagcgaacatttacttccaggaaagaagaattgcagggatgcctgtgagatgggaggtg

SEQ ID NO: 7401 - DNA, 122 bp, Homo sapiens
taattgatacacgagcctttctttcctttatggaaggcccagccccatacggaagacggacgcgtacataaactattaggatacaggaaaagcgcgatactactggcacatagaggaaatcg

SEQ ID NO: 7402 - DNA, 122 bp, Homo sapiens
ccccctctgactggtttgcactagggggctcgggagggagcgtgcggaagcactctggcgcgcggcacgggtcctacgcgtgaccttcccggagaccccgcgatcgaggtggggttcggagg

SEQ ID NO: 7403 - DNA, 122 bp, Homo sapiens
cgcagctgcgagctccgtggcagccgctgcactccttccggccctgccgcggcgtcacctcgcgcctgcgcacagcgccccctcccgactaaggacaggaagaaccatagaggcactccggg

SEQ ID NO: 7404 - DNA, 122 bp, Homo sapiens
tcataaaccagaaatgtgtatgatacagattgagcattattgtctctgagaaaatgaacccgagagagatcagcatacaatgtgtcaattccccaggcattcagcagaaaatgaatatgtat

SEQ ID NO: 7405 - DNA, 122 bp, Homo sapiens
gcagctgcctggagcttttgttctgtgctgctccttcagggaagaaagtggactttgccccgtgggttgactgaaagggtaaattctttggacctagcagtgggatctctagacttcagcgc

SEQ ID NO: 7406 - DNA, 122 bp, Homo sapiens
gcccgtggggcggggcaagaaaaggggaagagcccaacggtattaacccctcggcagccgcggcgctgctatgctgcagtctcccgcagagcccttgggaaaccatcccgctagccaattca

SEQ ID NO: 7407 - DNA, 122 bp, Homo sapiens
aaagcctgcctgccgagctctgtgaccctcaagttggggctcggggctgtggggtgaggtcgcttcccagagactcagagacccaaatctggacacagcagccccatcacacccgggagcag

SEQ ID NO: 7408 - DNA, 122 bp, Homo sapiens
tataggggaagctggggtggagactggagtttggacacctctgactctgtcttccctcgccgggcacctcccaggcagcacccagagcgccatgagcccaggctgggccagcacaggcgagg

SEQ ID NO: 7409 - DNA, 122 bp, Homo sapiens
gggagtactccttacagagaccggtcccctgtcctcatcctcactccatgaggagatccacgtacaacctcgggttctcagaccaaccagcccaaggaacatctcatgaatttcaaatcggg

SEQ ID NO: 7410 - DNA, 122 bp, Homo sapiens
agcgcgctagccgcattgcgagccgaacccgggagctggcgccatggtgaggagtggttgcggggcgcgggcgacgcgacggtgggggtttcggcctgcgttcgggccgcagacagggcctg

SEQ ID NO: 7411 - DNA, 122 bp, Homo sapiens
tacacttccccagttttacttgcactcatttatgtgtatgtatttagttctatgcaaatccgtgggtaaccatgctagactaaaataagattactaaccttccaaagtaaagcctatctatg

SEQ ID NO: 7412 - DNA, 122 bp, Homo sapiens
ctttgctccctagtccattcttttaaccctgtgcaggagacatcctggtcccagctgtgtcgctcatttccactgtgatcttggcaagtcacttcacctctttgagcctgtttttgcgcctt

SEQ ID NO: 7413 - DNA, 122 bp, Homo sapiens
gactgagggagggctggggcggtacgaagcgggggtgggctctgcgcgtaatggcagcgccgtggcctcgcgtccatctttgccgttctctcggacctgtcacaaaggagtcgcgccgccgc

SEQ ID NO: 7414 - DNA, 122 bp, Homo sapiens
aaaggccagagcaagctgggaggggatctgcggcatgaccctggaacctcacatcagaaacgacccctctgccaccctcagggaagccagttcacagggctcatgtctgcggcatttaagag

SEQ ID NO: 7415 - DNA, 122 bp, Homo sapiens
aaatagctgggtgtgtggagggcgccaggaatgcaaataaacaacctcaggctgggcacccgccatgcagcactcccatgcagggtagctcagcagccagcctcggtgtgggccccgtgaga

SEQ ID NO: 7416 - DNA, 122 bp, Homo sapiens
ggcttcaagtttgacccactgagggatgaaagaggaagaaatcatagtgacaaattgccccgagtgtggagaaagcaagactgcatccttcaccagtgtaccatgccagaatttacatttgg

SEQ ID NO: 7417 - DNA, 122 bp, Homo sapiens
ggtcatctccatggcagtgacgttccacggtgcgaatgggcagagagagccagtggcttccggccttacataaccttctcacctggtaggtaggtgagtttcccccagctcacacaccactc

SEQ ID NO: 7418 - DNA, 122 bp, Homo sapiens
caggctgcaggtgacctacagggatactcatctgacttcggtgccattcacatcacagtgcggtcatttggttttttcctctacattgtgaaagtgccacaaaacaaagagaatgagaaaag

SEQ ID NO: 7419 - DNA, 122 bp, Homo sapiens
ccctgagaatgggtagccaggagcatcactcaccacttctcctctttggcctgggtgtcccggcagcccatccttcccaggggggccctggaaggggttcagttgtcaggtgaactctcagc

SEQ ID NO: 7420 - DNA, 122 bp, Homo sapiens
agggagtatactgagtaaacgactttgaacctttacttcatcctcttcatttacatagggcgtacaccaagtaaccaatggaaacctctagagggtatttaagcccctgaaaactctgtaac

SEQ ID NO: 7421 - DNA, 122 bp, Homo sapiens
actcccggagtcacccacctgagggctccagggcaagcccggaggagcggcggaggagaacgcggctgggaggccggcggccagggccccgaagcggccggctccgggctgcggcaggagca

SEQ ID NO: 7422 - DNA, 122 bp, Homo sapiens
gaagcagttcgatgcctaccccaagactttggaggacttccgggtcaagacctgcgggggcgccaccggtaggccgcagcggggccggggtcgcgtggaggggggcgtcctagagcttagcc

SEQ ID NO: 7423 - DNA, 122 bp, Homo sapiens
ctctagcatgctcctgctccggccctggtcggtgaactctggggagccaaggcagatgggcgctgtggggctgccgtgccggaactgctggcgctgctgccactcgtagagctgccacacgg

SEQ ID NO: 7424 - DNA, 122 bp, Homo sapiens
cccagcgctcagacaatgacggcgcggggacccgcctggccgtcccgggccccgcggggacgccaaccacaaagtaacttgccgccgcgctccccgcccaactccgtacctgccgcgcgcgg

SEQ ID NO: 7425 - DNA, 122 bp, Homo sapiens
tagctttttttttttgagacagtcttgcgctgttgcccaggctggaatctcctgagttcacgcaattctcccaccacagcctcccaagtctctgagattacagacatatgccactatgcctg

SEQ ID NO: 7426 - DNA, 122 bp, Homo sapiens
cgtgtacctgttgtacaggtcaatcatgtactgcggcggctccaccctggttttgtcctgcgaagggaccccactcaggttaaggctgcgcaggaaatccaccttcacgttctccagaaaca

SEQ ID NO: 7427 - DNA, 122 bp, Homo sapiens
ggagtctgtccccgtcagagctccatcacgcggccggcggagaactggggagggaccggccgcaacagtgcccaggaaggcttcagtgccaggccattatcctaacaggccgccccccagag

SEQ ID NO: 7428 - DNA, 122 bp, Homo sapiens
atgagatttacttaaaagaacaattgaaagagattttgaattagtgtgggttactatttacgtggttaataatacatggttatacatgaacatcatcattagaataatttttttcaaggaag

SEQ ID NO: 7429 - DNA, 122 bp, Homo sapiens
gatcgtcaacattggcgcggtgctgagcacgcggaagcacgagcagatgttccgcgaggccgtgaaccaggccaacaagcggcacggctcctggaagattcagctcaatgccacctccgtca

SEQ ID NO: 7430 - DNA, 122 bp, Homo sapiens
cgaacaccgccccgaacgccaccctcacggcggtccccggccccgcctccgcggccatggcggccccagcccggcccccactcgcagctgggctccagcccccatcaccccgccggggactg

SEQ ID NO: 7431 - DNA, 122 bp, Homo sapiens
tgacaggctgccagccaccatgtgcctggcacgggagtgagctgctggcacagactgtgccgaggcctcccaactccagctgcctcacagccctacacatccaaggcttgctttaaatctcc

SEQ ID NO: 7432 - DNA, 122 bp, Homo sapiens
aaaaaaggattctgacgggggggccaagggcggtggctcacggctgtaattccagcactccgggagacagaggtgagtggatcacttgaggtcactagtgtgagaccagcctggccgacatg

SEQ ID NO: 7433 - DNA, 122 bp, Homo sapiens
gtcatttttggagagaaagtcttactctgttgccgaggctgcagtgcggtggcacgatctcggctcatgcaacctccacctcctgtgttcaagtgattctcctgcctcagcctcccgagtag

SEQ ID NO: 7434 - DNA, 122 bp, Homo sapiens
gctgccaggctgtggccccacgccagcctctgccatagggctgtgtaatcctggggaaggcgttcaacctctgtgcctcagtttcttcacctattaaatgtgagtgataatcgtgcatctcc

SEQ ID NO: 7435 - DNA, 122 bp, Homo sapiens
actgaagatgtagaacattttcaacattgcagtgttctattagctttggtctagaacctacgtacctcataataacaggtgttcaaggggggtgtcaatttaataaagattttttttttttt

SEQ ID NO: 7436 - DNA, 122 bp, Homo sapiens
ggaagctgaggtaggaggatcacgtgagtctgagtggtcaaggctgtagtgagctatgatcgtgccactgcactccagcctgtcccagcactttgggaggctgaggtgggtggatcatgagg

SEQ ID NO: 7437 - DNA, 122 bp, Homo sapiens
gaggaggacgaggagccccgagaggaaatcgcaaacagctcggaggccggccgggtggcgcggcgcggcttctggtcgctccgaacatcccccaccatcgagccctgctgttctgccggcgt

SEQ ID NO: 7438 - DNA, 122 bp, Homo sapiens
cggcttcctccagggccagcacctcttggtgctccgcggcttgaactgctgtaggaatcacgtgaagaagggtaccccctttctacagaagggggaagccctctttcttgtctgccaaccct

SEQ ID NO: 7439 - DNA, 122 bp, Homo sapiens
tagcgaagtctgtatttcaaatgagcccctcaacccaggtgacgcaggcggtgtggggaccgcatccggagggcgacctggagccgactgacttcacaaaggcctcctgccgcaaaccttca

SEQ ID NO: 7440 - DNA, 122 bp, Homo sapiens
tgattccctggggggaaccttggaacatcttccatccctgatagaccaggagagatgccccgggtccaggaaggagaagaatgacttctgtttcccttcctgaaggcttcttggtgcagtgt

SEQ ID NO: 7441 - DNA, 122 bp, Homo sapiens
agttttgaacattgagttttcttctaatgttttgtgcttatgaaaaccatttctgtgtaacgtgtttaagtagcttatttatctgaaagaactctaataatgaaaagaaataaaaagttttt

SEQ ID NO: 7442 - DNA, 122 bp, Homo sapiens
ggcgtagggttctccggaaaccatcactcacatctagcacttggaggcctccagggacagcggtgacccaccatctgggtaggaggctgaaaacactagaggaggaatatcccaaatctgtg

SEQ ID NO: 7443 - DNA, 122 bp, Homo sapiens
ggtggtaacagaaattacatgggaggttcctgacagcgccgtcaacaccagcctcacgcacgacactggcctcattattagcattggagacaacactccaggcagcccgcgttcaacgataa

SEQ ID NO: 7444 - DNA, 122 bp, Homo sapiens
aaacttcatgacgtgtctgaagattgttttcaaggctgttctcttggtctctgtccagcacgtcttcccataaacttaactgagcccggcattgggatgacaaagattaataaaataggatt

SEQ ID NO: 7445 - DNA, 122 bp, Homo sapiens
aaactttaccgggttccttagagaaaagcggacgccactgctgtccagtccagagacagccgtcagcgacccggatggagcgggcggggaagaacgggaggcaagcggggcggagagcacca

SEQ ID NO: 7446 - DNA, 122 bp, Homo sapiens
ccactgtaacccagtgaaaagcaaagcattaatttcattacaggtcatcaagaatgcaaccgtcaacataaactgcttatttaagagcagccattttctatcagaaaggactaatattaaaa

SEQ ID NO: 7447 - DNA, 122 bp, Homo sapiens
ttcaactatatactcagaatactcctactaccagagaactgctcactgagccgcctgagtcgtgcacatcttccattagaacctggcatgtgggcaacatcaaacctcaaatctgtccccag

SEQ ID NO: 7448 - DNA, 122 bp, Homo sapiens
ccccagggaggacacagaggactctgagtgctgacagttgcttggcaggggctgagctgccgggacccagcggggaaggggcttgctggagcagggacgtggaggattctcactggcttcac

SEQ ID NO: 7449 - DNA, 122 bp, Homo sapiens
cagccgcggccgcaagctctccagctcccccttcctttgtctctgccgctccctgcaccccgcctcgcacttcctctgacaaaccgtgcgattctgatggaaaattcattagtcggctggtc

SEQ ID NO: 7450 - DNA, 122 bp, Homo sapiens
ggtgtgaggagagggagagcccctgatgaggccagagtccaggcccagagagaccccgtccgctgtgccacacatgacatcatttttgtgtacttaacacaaggtaaacagggctggaaaaa

SEQ ID NO: 7451 - DNA, 122 bp, Homo sapiens
ttcctctcttctttcctaaagttacccatgaaaaaaaatctgtttatctcctcctcatttcgtgagcccaaaaactcaactcatggctgataaagattaagaataatattactggtatctac

SEQ ID NO: 7452 - DNA, 122 bp, Homo sapiens
cgaggcgtgggactgatggtagccctgcctccaggaagcaggcaggcggggacctctgggcgctcggaggggcagctccgagggcacagggtacagggagaatcagccagatccctccctgc

SEQ ID NO: 7453 - DNA, 122 bp, Homo sapiens
ctttaatgttagtgcaatctgctgccagtcaagccatgtaaaatgaaaaaacttctagcacggtataaaaactgtttaccccttttaattgaatgctggaccttgggatcttcgacaaacat

SEQ ID NO: 7454 - DNA, 122 bp, Homo sapiens
gctaggcgttggagggataacttggagagaaaactgacaaggttcctgctttcacggaggcgacagtctgggaaaagacagatattaaacacaccaccaaaaaatacatgtatagagaaaac

SEQ ID NO: 7455 - DNA, 122 bp, Homo sapiens
caataccacattagactggaaacagtggaggtgagcacatgatgccctgtgggtgtataccgttggtaactgctccagcctgggggttcagggaaggcttcctggaagaagaaacaggtgag

SEQ ID NO: 7456 - DNA, 122 bp, Homo sapiens
ggtcagtctgattctgctgctgagtggtgtgccattaccattgtccacctgcagcaagatcgggtcccgaccgggtggacaaccaaattaacagacggaggtggggactccgcttccggctc

SEQ ID NO: 7457 - DNA, 122 bp, Homo sapiens
ggaaaagctgctactggcatctagtaagtgctgcgaaacaacctacaatacacaggatgacggccccttacaatgaaagaattattcagcttacttctagaaagctagggaatttgattttt

SEQ ID NO: 7458 - DNA, 122 bp, Homo sapiens
ccctccttccaagctagtcgcccagggcagggtcgccctgtctggctagggtgctgcacccgcagctctcggtatcttaggtcagacgcctggaacgcgcaggccgtttctgttcctccgga

SEQ ID NO: 7459 - DNA, 122 bp, Homo sapiens
cccccggaaaagaagctgagtcgtgaggagaagaccaccacgactcttatcgagcccattcgtcttggaggcatctcttccacggttcgtgggctcttgccttaaccctcagaacttcccag

SEQ ID NO: 7460 - DNA, 122 bp, Homo sapiens
tcatttaagaaaaaaaaaaattgataataatgtggaactccctccaaaattagcctacaccgtgatataaattggttttctttgtgatctaaaattgactcgcagttgactagttagaaaat

SEQ ID NO: 7461 - DNA, 122 bp, Homo sapiens
aaaattacgaaggcagaattccagggagtctcccgggcctggtcctgaagcttgagaccccggatatatacgctccagggggctgcggtgcgctcttcgggtccccgagccctgtgtttagg

SEQ ID NO: 7462 - DNA, 122 bp, Homo sapiens
agtatagcaacgtgcaaagacctcacctgtgttgtcagcacaattgattacagctcctaccggaagacccaaggaaatccggaatttcgcaccagaggacccaccacgtcctgtggatataa

SEQ ID NO: 7463 - DNA, 122 bp, Homo sapiens
ctttacggtgaaaaaaggtaggggtcctacgggcagcagccagggcagccctggagctgtcgctggagtccgatcatgtgatcttcaacatggcgacgctcttggttccctacagaaagggg

SEQ ID NO: 7464 - DNA, 122 bp, Homo sapiens
tcgccggcgctccaccgtggctacccatccgtggtcccgacaacctccctgtcccttgcccgcccccaggaagggggaaatggggcatttggggcccagacctacacttggagcccaggtcc

SEQ ID NO: 7465 - DNA, 122 bp, Homo sapiens
caggggacccagtaaagaagatccgctctcttccctgcgggtgggcctcatccaacccatcgaggaaggcttcatagaacaaagcggcagaggaaaggcccattgtctctcttttctcctga

SEQ ID NO: 7466 - DNA, 122 bp, Homo sapiens
tcggggatgtggtttccgcccttcttcttggctgaggagcgtcctgaaaagtcgcgtctccggccccagccactgcggggatgatgccactggctcatgtgggtcccaagaagccgcccacc

SEQ ID NO: 7467 - DNA, 122 bp, Homo sapiens
tatcaatggttttaaacggcgtctgtctctctgcgtctctcctgacgtgaggcagtgaaacgcgttatcgaggaggcccggaaagtggctaagtgcgtttgacacacgccaactccctgcct

SEQ ID NO: 7468 - DNA, 122 bp, Homo sapiens
cccacccgcatctctcactgccatgttccaatgttaatgcctttgtacccaagggaaagccgaggtctgggcaagagagatgagttgtccagagtgtgggcagtgccagagccttctggagg

SEQ ID NO: 7469 - DNA, 122 bp, Homo sapiens
caatcaaatagctattatgttttcatttccatttcggcgtccggcttaatgagcaggagacggatgggcgcacgggtgtctgctggctgtgataaccaaggggctccgggcaccacaggggc

SEQ ID NO: 7470 - DNA, 122 bp, Homo sapiens
actcaacacatggaaaagaacaacccaagcatccaccaacagatagatggataaatgcaacgtgtatatccaggcaatggaatattattcagccctaaaaaggaaggacatcctgacacatg

SEQ ID NO: 7471 - DNA, 122 bp, Homo sapiens
aggaatgctgaagtcaggactgtttgaggggagccctgtgtttctcagactctcttgtaccgtttacatcaggatctggggcagtttttaaaaatatgcggattcatgattcctacccccca

SEQ ID NO: 7472 - DNA, 122 bp, Homo sapiens
gagggatccaaacctgggattttcagcacaaacatccttgccctcacttccggtaaccctcgtaatcaggtagcttccaggtagtttggatgcatgtggcagaagaccatctggcctttgct

SEQ ID NO: 7473 - DNA, 122 bp, Homo sapiens
gtttgctcattcatcatggggggacggttctgcctccattcaaaatcccacattcactggcgcgctttctcagccggaagatgatgtcacgctgggactttgctggcatcctgtgacacgca

SEQ ID NO: 7474 - DNA, 122 bp, Homo sapiens
tcagggccctgagggtccggctctccaggagaagctgggctctgaaccagggtgggtaaacgttgcagaagggctgtcaggacactcaggcgcccacacactccacgtagttggcagggtac

SEQ ID NO: 7475 - DNA, 122 bp, Homo sapiens
cgagcactccctgttctgaaggttttccctaaacacggagacaacactaaaaagctgtgccgcgtgagggctgaaagtcctgttttctccctagcttcagtgaagaaagcctgacggctccc

SEQ ID NO: 7476 - DNA, 122 bp, Homo sapiens
aggaactgtcaccttcagggtgagggtgaaggcactgccacctttataggcgggcttgtacgtgtggccacgcctccttccctggagcgagctgagatggagggagaagcagcctgaaccgg

SEQ ID NO: 7477 - DNA, 122 bp, Homo sapiens
ctaattcttaaaatctcagtctcctaaagtaactgaagtttatttctcactcatgatctacgtttcttacatgtctcttaagacctctgttttttgtaattaatcatgggccaggctgataa

SEQ ID NO: 7478 - DNA, 122 bp, Homo sapiens
agcagtaggaaacatatttcgaggctcctttcacgcctgtcctacaaaatgctgacatagcgtaggactgttaagcatgccttcgggtaaaactctccattgatagcaagaaacaggttctc

SEQ ID NO: 7479 - DNA, 122 bp, Homo sapiens
gcgagctttgaatgtgggtcctggtgcggcactgggttttaaaagatgagtacttgggttcggaatccagtgttgcgttgttattttagcatcatagagccgcctggtgttgctaaaccact

SEQ ID NO: 7480 - DNA, 122 bp, Homo sapiens
cacctcactgtgtaacatttacatcggaagccaatggaaccaactgaagtatttacaaaacgcccacaaataaataagaattatgctcaaatttgtgcactttctctttccttagtgcccat

SEQ ID NO: 7481 - DNA, 122 bp, Homo sapiens
ctatctgccgcctctctgaacttttcaaaaatgtctagcatttcagagcatacaacctctcgttcagttccaaaggaaggccttatattcctaccactatcctaatcgctccttttgagctt

SEQ ID NO: 7482 - DNA, 122 bp, Homo sapiens
gcaaatcccctccctcccgccaaaccgccgagtgggcccaggcgtccgacccgcccccggcgccatagcaacgcagaaggcttcgactcccagggggccttgcggctactcagccaggaggg

SEQ ID NO: 7483 - DNA, 122 bp, Homo sapiens
cagacctggggtaggggttccgcggctcccgcccccctgccgcgcctctgcgcatgcgtgcgcggtccgcccttcactgcgggtgtccctcccaccgcctccagctggtgcctccgccgggc

SEQ ID NO: 7484 - DNA, 122 bp, Homo sapiens
gtgcctgctgtctccgctcctgctgccgccgccgccgcccctgaaggctaagctccgacacgctgcgccgcaaagacaagttttctgagcgctccttgcctccagacccagctggggcccct

SEQ ID NO: 7485 - DNA, 122 bp, Homo sapiens
ggaggctgaggcacgaggatcagctgagtccaggaggcagaggttgcagtgagccaagatcgagccacggcactccagcctgggagacagagccagaccctggctcaaaagaaaaacaaaaa

SEQ ID NO: 7486 - DNA, 122 bp, Homo sapiens
gccaacaagataagtccatgaagtcaccagcaccgtccatgtttctcactgcttcctcggcgttcctccagaaccaagcgttacaccccaacacaggatgtgtgccataaatactggttgca

SEQ ID NO: 7487 - DNA, 122 bp, Homo sapiens
tcagcagatatttacagagactggcgagtggcgaggcccgagtacgcagagatgcgtgaccgccaccccctgcctttgcccggaccggctcccgactgctcccttctctttattcaggtctt

SEQ ID NO: 7488 - DNA, 122 bp, Homo sapiens
gggtctctgacgcgcgactccctcggcggcaccccccacccatccccttcgcccctcctccgctccctctgtgctcccgaggcgcagtgcgctccggcctttgaccttctcaggctccgctg

SEQ ID NO: 7489 - DNA, 122 bp, Homo sapiens
atccttcccagagcagcaggccggctggggctcccgtgaacaaatatcgccacgtgtgcgcgatcagagctgagtaacctgctccaaacccaggacactgtgtgtgagtcccacctccttcc

SEQ ID NO: 7490 - DNA, 122 bp, Homo sapiens
ccgtgactgtgctgccagggaagccacttgaccctggtgccgccaacgagggattcagcccgagccccacctctcccttagggacctccgcccaccctaccctcaagccaggatgcccggag

SEQ ID NO: 7491 - DNA, 122 bp, Homo sapiens
aagcactggcgtggtgtccttaagctttctccacgggagctgggcacctcgttcccattccgacttcttagttttaattaacaaaagggggaagtggtgggggcggggagggcagaggggag

SEQ ID NO: 7492 - DNA, 122 bp, Homo sapiens
aagccttgcctgattgctccaacctgtaatggtccctctgaattcccatagtatttaatacgtaccttttattgatattttaactatttcatacatgtgattccccagcaagattgtcagtt

SEQ ID NO: 7493 - DNA, 122 bp, Homo sapiens
aaggtcaatggctcccttgggctggagctgcagtagccgtacctgttctctgctgtgggccgtgggcgccccgccagctacctgtgggatctgggggacggtgggcggctcgagggtccgga

SEQ ID NO: 7494 - DNA, 122 bp, Homo sapiens
tgaaatatgtccgtctacttatcttttccatgtttgtgcccctcccctggcacttatctgcgctcttcctccacagcaggccagttgtagccatttgttgattgaatttgcagggagtgcac

SEQ ID NO: 7495 - DNA, 122 bp, Homo sapiens
tccccacccaaggcggcggcgggcaattccggcaccgcggcagacgggatgcgcggagcgcgttccctccgggtttccctcacgcctctggagagcgggaaccaacgaccttgacctcggag

SEQ ID NO: 7496 - DNA, 122 bp, Homo sapiens
gggcccgccgcggagtcttcctcacgaagccgcgcgctgccccgcgctggatgcctcttgcgccctcaagtccactggggccccagccccgcccaggcccctggctgggctacccgctcgcc

SEQ ID NO: 7497 - DNA, 122 bp, Homo sapiens
ggaggactgccccatattttcactcccaaaaaccccttagatgactccctgcctcacccccgccccccaggttctgaaagagccttcccgccagactgcattgattaaccattcattgcccc

SEQ ID NO: 7498 - DNA, 122 bp, Homo sapiens
gacccctggctgccaccgaatgctgcacactgcaaaggaagaagccagtttgagaaccaccgttctagaacacagcaatgattgcatttgagagcctaaaggggtgcattgtggaggacaag

SEQ ID NO: 7499 - DNA, 122 bp, Homo sapiens
ggactgactcgcatccttagaaacccaaaccctcaggaagccacctgagaggttatttaccgttatcagcaagcattgtagtgctgggaaagatgcattcacatttctggcccctaaacggt

SEQ ID NO: 7500 - DNA, 122 bp, Homo sapiens
tccagctgagggctggtgaacttgaaggtgggtaagaatccccagacggaagtccagagacgtctgctaagtcacagagtgttggcaatggagagactcttctgtaacaggaaacacagctc

SEQ ID NO: 7501 - DNA, 122 bp, Homo sapiens
tatctttagtctaccttcacattaattcatagtttgattgagtatagacttgtaggtttccgcttagaactgtgaaggcagtaaactgtcttctgactactggtgccattgttgagaaaacc

SEQ ID NO: 7502 - DNA, 122 bp, Homo sapiens
ctgagctgattttgaaaaatcaatcaatcaataaataacaatcaaagagccttgcctcaacgcaccgagttgctggtttcctgcaggtcagaggcgatgccacctccaccaacgaccttcca

SEQ ID NO: 7503 - DNA, 122 bp, Homo sapiens
atctcatcataagaggccaggagacatactggaaaagtgactttcccagcagacgaggcccgaaacagggagtgggatggggctgaagagtggtgatttggtggccccgatgtagttctgcc

SEQ ID NO: 7504 - DNA, 122 bp, Homo sapiens
cttgacaaccatgcttaacgtgtccctttccaggattggcaggctccggagcaaagaacccgggggtcctcccgactcgactcagtgctggctggcagcatgtcccggcctcagtgcctctg

SEQ ID NO: 7505 - DNA, 122 bp, Homo sapiens
gatatctcctgcccttctaagacaaagtccaagcactttggcataatttgaaaaactcaacgacctgaccccaatttcctttttaaaaaattattatatatttttttagagatagggtctct

SEQ ID NO: 7506 - DNA, 122 bp, Homo sapiens
cctgccgcggctgccacttctgggagattcatctctaaggcctcaggggacctgggggatcgggagacaggctgtaccatggcgtctccaccaccacacggtcccctccccgcctgcacccc

SEQ ID NO: 7507 - DNA, 122 bp, Homo sapiens
ccccctccccgcggtaccttgcacttttctccctccctgccccctctcgagtccaccctccgggccttctgcccctgatcgcttggttttccttgcagtcgcctgctgctgtcgtcgggagg

SEQ ID NO: 7508 - DNA, 122 bp, Homo sapiens
gtgggctactgaatcagcagtgcccatccctgctcctgcttgccacctcgccacacacctcgtacaggacgcagggccacacctgtacagaggccgtggccagcattgtgacctagaaatgg

SEQ ID NO: 7509 - DNA, 122 bp, Homo sapiens
gctgggcaagcaagacctccgatttgccgggacagctggagtgacccgcgctctccaagccggtagcttgcagcagttgcggctcctagccactaggtgtcagcctgccctcactgtggcgc

SEQ ID NO: 7510 - DNA, 122 bp, Homo sapiens
acgactttttctattggtgggcgctttcgccgacgcgctgacatcccccgacacaaaggccgtgcttcggcactgttccatgattggtgcatatctacgccgctgattggctgttaaagtgg

SEQ ID NO: 7511 - DNA, 122 bp, Homo sapiens
ggcactgtcttctcgctgagacggcacagggggcccaggtaaggtggaatccagaggccacgtacacaggccctgcacgggggcatggagctggggagcccggccaggcagaccttcttcac

SEQ ID NO: 7512 - DNA, 122 bp, Homo sapiens
cctccacaccctccacaggctgtagactgtggtagctggtggagagaatgttacacatctcggttggatactcaagtcctaaaaagtggcccagcccagagccaagtgaccaccttctagtt

SEQ ID NO: 7513 - DNA, 122 bp, Homo sapiens
gcgggaagtggcgggtgggagtcacccaagcgtgactgcccgaggcccctcctgccgcggcgaggaagctccataaaagccctgtcgcgacccgctctctgcaccccatccgctggctctca

SEQ ID NO: 7514 - DNA, 122 bp, Homo sapiens
tctcttcctgtctttcaaccctctctcctccctgcaaccctcagggtacagcctgttcctcgtggcagcccacgagtttggccacgccatggggctggagcactcccaagaccctggggccc

SEQ ID NO: 7515 - DNA, 122 bp, Homo sapiens
actgccgggcgggaggaaggggagagaggcgccatcggaacagaaacctgtcccatcttccggacacctgcgccgcccaggtcctgcagaagtcccactgacgcaaagcgttcgacattgaa

SEQ ID NO: 7516 - DNA, 122 bp, Homo sapiens
acccggaaagaaagagggaaaagtgtggtgggaaggacagaggggacccgaagttccccacgccagggaaatgacagggggttgccagtctgtttctgatggttgagcagtcaggggcccag

SEQ ID NO: 7517 - DNA, 122 bp, Homo sapiens
ctctcacctggggccacctgcagtggccgcaccttgtgtggagggccgcacagtgtgtcccgcctggcctgggccacccgcagtgggctgttatcccccgtggccctgaagtgggtattctg

SEQ ID NO: 7518 - DNA, 122 bp, Homo sapiens
aggtgggtttatcagcatcccaagcaaaccttctccttctctattgtctgcaaatggctccgacattttgccacccagaaaaaaaccctagcagtcattctggattccttcctctcaccatc

SEQ ID NO: 7519 - DNA, 122 bp, Homo sapiens
cctcagcaggcccagcaccccaagttttctgatctagctgttctatcagcctctaagagccgcggctgcccctgcttctcggagatgacgcggagccctgccattgccatccaggtccaagg

SEQ ID NO: 7520 - DNA, 122 bp, Homo sapiens
gtaaacagacagatgaaattaagagattatagcttgttttcactctctcccaattactatcgcttgaaaaataccggatatttcattattatcctgtccggagtcggcaaactacggtctac

SEQ ID NO: 7521 - DNA, 122 bp, Homo sapiens
agtgtaggaaagacagtcttgaattgctaatgccacccgtccctcatccccaggtggtagcggcatagtgcaaagagagaatttgaatgtacttagggaagggagagcacaatgattgtggg

SEQ ID NO: 7522 - DNA, 122 bp, Homo sapiens
cgggtgaggcgcatttccagggggagtgagtccggggcccttggcctgtaggctaagcagcgaggacaacagcgagggggctccgtggcattgcttggcggggtcaccgcgcatgcctactc

SEQ ID NO: 7523 - DNA, 122 bp, Homo sapiens
ctgcagtcggggcctgagaagcctgcccggcacacacacacgccctgcacgcagcgcccacggccttggcagtccccgggacaggatggccagccacagctggggccagtgtagccgggaaa

SEQ ID NO: 7524 - DNA, 122 bp, Homo sapiens
gatgggcgaatggggcccacaggggacctggagggcatggcaaggggccccaggggatgacgggtgtctggagaagatggtggggaatgagggagggtgtgaaatgaaggtgtggtgggagt

SEQ ID NO: 7525 - DNA, 122 bp, Homo sapiens
aaacagaactggatttccttacacttactttgagtcacatacagaagtggtgggcgcacccgatgatgctcagggtttctaaaggcctcactctgtgcctggtggtatggtcatttattcct

SEQ ID NO: 7526 - DNA, 122 bp, Homo sapiens
gccgcacgcagaccaatcacccgtgaggatgcgagtgtcgtgaagcgaagagcgagtgaacgccggggacacgtgaccttggtagcgcgtcctcctagcttctgttagcgggccttctgggg

SEQ ID NO: 7527 - DNA, 122 bp, Homo sapiens
tgtaggacagcgtcagctgcgcctgcacgtgctccagcgagcggatggagttgtggaggccggcgcaggccgatacgttttccctgatgtagatcagcggcaggatggggctgagggggtcg

SEQ ID NO: 7528 - DNA, 122 bp, Homo sapiens
cgtgagccaccgcgcccggcctcccagagtgctggggttacaggcctgagccaccacacccggcctggccagcatattttttgtggcgggaggtagatgttatctttcatcttctctcaggg

SEQ ID NO: 7529 - DNA, 122 bp, Homo sapiens
ccaactactggaacatggtgtatttatatggaactggagtgaatctcttcattgtgtgtgcgtatgggaaggcatgagcctcaccaacggcattcctcagccaaacctcggaagctagaatt

SEQ ID NO: 7530 - DNA, 122 bp, Homo sapiens
cctctcccttttaccttgcttgctacataaaactagttactctggctggacgtggtggcccgtgcctgtaattccagcactttgggaggcctaggagggagaatcacttgaagccaggagtt

SEQ ID NO: 7531 - DNA, 122 bp, Homo sapiens
agtcttcccgggattggctgcgggcctcgcgaccctcctgcttccctccccgccccgcgccgcctctctggtttgtgcgcccgtcgcaggtcgcaggcctctttgtcagctggagttgcgcg

SEQ ID NO: 7532 - DNA, 122 bp, Homo sapiens
gaccttgaatcctgctgcctagttttacattaagactttcaggtctggccccctggctggcgcctgtaatcccagcactttgggaggccaaggtgggaggattgcttgaggccaggagctcg

SEQ ID NO: 7533 - DNA, 122 bp, Homo sapiens
cattagcgtgatcgattttcatctaaagccattaaatcagttttatagcttccccaagaacgtgggcaaccccctgcttggaagatgaaagagaaagtcctcccgcccgaagcccaggatcg

SEQ ID NO: 7534 - DNA, 122 bp, Homo sapiens
ctatggttcttacagaactcagaaaggacacaggaaagaccagccagctcctttccgtcccggctgtcacaagatctactgcctttgggggggatgggcaactacggagtgacggattgaaa

SEQ ID NO: 7535 - DNA, 122 bp, Homo sapiens
acccaacgctgccacacaggctgggaaaagccatggctctccaacgggcatccacactcccggctaagcaaaggctctgcaaagctggggccagacagccactcagtgtctgctgtttcctc

SEQ ID NO: 7536 - DNA, 122 bp, Homo sapiens
ccgacatcacggccggggtctttgctgtttagacgcctgggttcccggatcccagacacgcgcacgggcaggaagttagaccggagacagcgagtatagacagcccttctggataggggcag

SEQ ID NO: 7537 - DNA, 122 bp, Homo sapiens
atacatagtagagctcttcactctagggaagcctctggagcagacaaccttccctgccaccgccacattttgaaaaaggctcctggcctggaggggcgggcccagaaagcggcccccgcagc

SEQ ID NO: 7538 - DNA, 122 bp, Homo sapiens
ccgggatggccaaaacactcagtccacacaaacaatggccgcagcccggctggaccgaaacggaagtcccaggtcttggagtagacactcgcagtgtttccatggatacgggaggggcgggg

SEQ ID NO: 7539 - DNA, 122 bp, Homo sapiens
gctcagagaagcatgtgtttgagcccatgcagcctgcagtggaaggtcaggatttgaaaacgggtcactctggctcctaagccaaagatgacccagggtactgaggcatgaagtttggcagt

SEQ ID NO: 7540 - DNA, 122 bp, Homo sapiens
gggtgtctcggttctgcctggaactgccgtttttcggagggtgggccgcaccccgcagtgcgtccaactctcccagctgcctagatgttccttgggcttgggacaaagcccccacagcttcc

SEQ ID NO: 7541 - DNA, 122 bp, Homo sapiens
gcaccgcggggcgcaggaccccagccccccgccacgccgcccccggagtgcccagaccgccgggaaggcgcccacccagagaccccgcgccccccgccccaaacccggcctcagcgccggcg

SEQ ID NO: 7542 - DNA, 122 bp, Homo sapiens
atgcctcttgactcttctaagctttggctacctgcttttacccaaggcctgccctgaaaacggagatagaagtgtctcccagctgcatcttccctggtgcttcagcctaggcagtgaggacg

SEQ ID NO: 7543 - DNA, 122 bp, Homo sapiens
aggctatttttcgcgggcattatcactcagacaccacgcactgaattattcgtcctcacccgagactcagtttgcccaccagagcgtagtatcgcccccatctgtcaccatagcgactagtg

SEQ ID NO: 7544 - DNA, 122 bp, Homo sapiens
aatcagccgctgacgcctcccccggcatctccacgtgcagcccctgccctgcgcgactggcgtggaaagggctctggtgcgtctcacactctgctatcatcagcctccttcctgctccagtt

SEQ ID NO: 7545 - DNA, 122 bp, Homo sapiens
agcagcctgcgagcacctgggccctgtcgttatcctccttagtgtttgtgaagagtcacacggaggggcgggagcccgggctccttctggtgccttccacactgggggcggagccctctgca

SEQ ID NO: 7546 - DNA, 122 bp, Homo sapiens
ctccagaaagaacttggcatgagcttccagggttttctgtgcctctgtggcaaggctgtgcgctggcttcagcttctcctgggctctgcccctcctcccctcacatcccaggggctgtgggg

SEQ ID NO: 7547 - DNA, 122 bp, Homo sapiens
agagcgaaacttcatctcaaaaaaaaaaaagaaggaaataaatgaaataagccacaagagcgatagaggagtaggacagatggagtgtaaagaaggagaagacattatatattttctctttt

SEQ ID NO: 7548 - DNA, 122 bp, Homo sapiens
gccagggccgccggggggcgaggcgcgggcccgagggctcagcggcagccaatgggagggcggcgcggggcggagcgatgtgaggcgatgccgatggtccgagcgcggatctgccattcggg

SEQ ID NO: 7549 - DNA, 122 bp, Homo sapiens
agattttgccgtagaagccgggtgggcaggtacaggagtagctgttctcgagatcctacacgatggagaggtcagaaaaggctttccaaagttgctccaaggagcccacacactccattcaa

SEQ ID NO: 7550 - DNA, 122 bp, Homo sapiens
cccaacagttagggcaggtgctttgaggtttggagcctgggaccccacaggaagtgacttcgtgctgagctaatgttgcttcatcctggcgccagtctcaggccaagagctgcaggctggca

SEQ ID NO: 7551 - DNA, 122 bp, Homo sapiens
ggttggcagaggtgtgcacactgcggaagcgcccccggcggtttggattcgggtcacgtgcgggtcactccggtgtgctggggatgggttgaaattaaaactttccgggatgcctggtgttc

SEQ ID NO: 7552 - DNA, 122 bp, Homo sapiens
tcaccgcatccgcaggtccccctccgtcagtcggcatcaccgcatccgcaggtccccctccgtcagtcggcatcactgcatccgcaggtcccgtccgtcagtcggcatcaccgcatccgcag

SEQ ID NO: 7553 - DNA, 122 bp, Homo sapiens
tagcagaggatggtttcgatccatcgacctctgggttatgggcccagcacgcttccgctgcgccactctgctgtctcgacagtccgctccgccactctgctgtttcaacattactcttgtca

SEQ ID NO: 7554 - DNA, 122 bp, Homo sapiens
ctgtctgtctcgtactcttatctcttcccttttctgtggccggcacccccacgacggcctcgcccccgcatccgggccccttcgcgattccggaggaatcccccagagccgcctgaccccgc

SEQ ID NO: 7555 - DNA, 122 bp, Homo sapiens
aaacaattaaaaataaaataaataaatccattgcctgattccatgtctccctccaattaccgccccatttctctgacactccttatagaataattccttagtcaattgtctcatgatgtttt

SEQ ID NO: 7556 - DNA, 122 bp, Homo sapiens
gagccgcagtgcagggcagtcgagggtccgctgcagggcggaggtcacagccgcgcaagtcgtcagtctccggtgcagggctgccgctgagtcttcaagagcgagttttattatggacaggc

SEQ ID NO: 7557 - DNA, 122 bp, Homo sapiens
gggattacagctgtgagccaccgcgcctggccatgaagttcaaaattcttaaatgtagcacgttccaaaagactggaaacaactgagatacccagaagcaggggaccagttaaatcagtcat

SEQ ID NO: 7558 - DNA, 122 bp, Homo sapiens
cttcctggtggctatctcatatcatttcattttctgttcatctccactgcattcccgcagcgggcgcctcctccatgcacagctgcgctggtctctggtttcgccacctctgttccctcttc

SEQ ID NO: 7559 - DNA, 122 bp, Homo sapiens
gtattttactaattacatcagcaccgaaataaattgagaaatagtaaaattatatgtgcacgacctactaagatcagactacagtcaatgcttggagagcatgcaggtttgatatccccata

SEQ ID NO: 7560 - DNA, 122 bp, Homo sapiens
ctttcaaatgttggaggtggaggagatggtgaagggcaatagagaggcaggaaggaggatcgaatgatcacttagcataaggccctgctacagacgtatatgccactcagagttgctaacct

SEQ ID NO: 7561 - DNA, 122 bp, Homo sapiens
aacagtgtcaggctccccccaccggcactgccgtgtccatcccgccgctgagaggccgctcgatggcacttagagaacaaaatgtgaagtccttcagctcccacatccggctcggagtgctc

SEQ ID NO: 7562 - DNA, 122 bp, Homo sapiens
ttctctagctacacagagcacagctgctcagatgacctgagccaatgggagcagacccagcggacgcataggaacacttcatggggcagtgctgggcagtgtttctggccaccagggacatg

SEQ ID NO: 7563 - DNA, 122 bp, Homo sapiens
aaaggaaggcttgacttcctgggtcatgggagtgaaggagtctgggtgacaggaagcaagcggcctgtcatgcctattgcctagctgccagattaaccttgccttgaaaataacgattgccc

SEQ ID NO: 7564 - DNA, 122 bp, Homo sapiens
ctcagaaaaagaaaactcgccccgcgcccccgggggccttccagcagcctggccgtcccccgtctttcctgactagggagcccggactgggcttcgccaatcccacaccagctccaaacatc

SEQ ID NO: 7565 - DNA, 122 bp, Homo sapiens
ttttgtattgggaaggggcgtcggcgtgtttctaaactccaggaataccttcttcctctacgcactgctctgggctaagctggaggctctgaggcccaggcactaggaattagaacatatgc

SEQ ID NO: 7566 - DNA, 122 bp, Homo sapiens
gtgcggctttgttcttcccttgattttaacttttcattcatgtttctgacttagaatgatcgaggctcaggccctggaaggaccgtaaacatttggccagcttggtttggatacctggcaga

SEQ ID NO: 7567 - DNA, 122 bp, Homo sapiens
cggttcacacactgatggcgcctggaggtttggcgaaatactgacaggatgcgacgtcaacgggagcgcagggccaaggtacaggccccgcccagtccggtcacatcccccggaattctcgc

SEQ ID NO: 7568 - DNA, 122 bp, Homo sapiens
actgaggcgaaggatgtttgcctaatggtggtggcaatggtgtctgtggaaggggaaaaccgggagacacaactggcgcccctccaggacctcagtgcaggtcccccacagaaacttttttt

SEQ ID NO: 7569 - DNA, 122 bp, Homo sapiens
gggaagggttgagggaagtgaggggagatactgggtgaggcgtaggagctactgtgcacccggcgtgagtcacccgcacacccccgccccgtacaggcgtgtctctctgtgacccgagtttg

SEQ ID NO: 7570 - DNA, 122 bp, Homo sapiens
tctacatctgtctctgggactccgactactccagtggagtcacacactatttgtccttcacgcctggcttttctccctcagcacaacgtcctccaggtccgttcacgtggtagcgcgcgtca

SEQ ID NO: 7571 - DNA, 122 bp, Homo sapiens
acctcaggtgatccgccgcctcagcctcccaaagtgcttaggattacaggcgggagccaccgcgcctggccaaggcggccttcttaagaagcgcgcgtaaaaccccaacttcctgctctggc

SEQ ID NO: 7572 - DNA, 122 bp, Homo sapiens
agaggaggtcggaagtgagggtaactcaagtccttgagataatcacaatctagactttgtcggcgaggagcacccatccggaggagacgcagtaggtcctggcatgtggaaggcaaaaaata

SEQ ID NO: 7573 - DNA, 122 bp, Homo sapiens
ctttgcagcctgtgcccttcagttcagtgaatctggttagccggaagctcttgtccaattcgtaactttcggggttaaaggactcacgcgtagacatggttcttgggtccgctctcctcaca

SEQ ID NO: 7574 - DNA, 122 bp, Homo sapiens
tttccgcgtatcaggctttgcttttattttgttttatttcaagtcatgcccaccccgtcccgccagcccagcccctccacggccaccgctcacctgcgtccacacagccgcttcctttccac

SEQ ID NO: 7575 - DNA, 122 bp, Homo sapiens
atgcaagaagtgtagtgggtctgctcacgtaggaataaataaaaagccgaacaaactgctcggcagctaccatgtgaaaagaaaagacctctagtggccacaggctgaattctttaaggaag

SEQ ID NO: 7576 - DNA, 122 bp, Homo sapiens
cgacagactggctccgacagcgcgcggtctcgtgatctgggtgtggtgctcggtgggagccgccatgtttagtactgataactgaagaccggatgattgcgttttggcgtgtgccccacctt

SEQ ID NO: 7577 - DNA, 122 bp, Homo sapiens
gccgctgttagggactctcagtctcagacacttgcttcgctgagaagtcgctgccagcagcgctcccaagactccactccaactgcagccgcctcctccgccgggcccggggcacgctccca

SEQ ID NO: 7578 - DNA, 122 bp, Homo sapiens
accggaacgagcgcactgggggctggacagggcctgcgtccatctgtccagagcgctaagcgggatgggaggcggagggagggcgcgggggctgcgagctcagtttagactttggttccaaa

SEQ ID NO: 7579 - DNA, 122 bp, Homo sapiens
gcaggagtgggtgagtcgtgctggagatgtgcaagagtttgttcttcagccctggctgcccgcttgagcacagcacaggatggcacggtggctctaagctcaggaggtctggtgcacctgga

SEQ ID NO: 7580 - DNA, 122 bp, Homo sapiens
ggcctcagcttcccctggggacagtacaagtgttgggccagatgctctctcaggtccctgcgtggcatccatttattgcagacctcccaccaccttgcagtgagggtggctctggctgctgg

SEQ ID NO: 7581 - DNA, 122 bp, Homo sapiens
gcttatctgagcgttagcactcacccagctgctgcgtgtctgacttcatcacccaggatgcgggtcctgtgtgtgtgggttggatgctgccacagcagcgagaagagaaacttcagccagga

SEQ ID NO: 7582 - DNA, 122 bp, Homo sapiens
tcaccacccagtcattgggcaagggccgctggggtgcatctgttatctcccaggcagtcccggggcagggacagctgtgagcggtgggccctttatagccagcaggtgctacgggactctgc

SEQ ID NO: 7583 - DNA, 122 bp, Homo sapiens
aaattaaagtcaatgcaacacccatgcaagctagagtgctagctgtttggtgaacaaggacgtgacatcagaacaagaagtctataagtcccaaactttacaagtgtgatcattttcaaact

SEQ ID NO: 7584 - DNA, 122 bp, Homo sapiens
gtctctaaaacaaacaaacaaagatgcacactgatgcctgttctccacttctctccacaacgctgcctcctaatgaggcgggtatctgggtccaccccggaaccccgaggctagaggccaag

SEQ ID NO: 7585 - DNA, 122 bp, Homo sapiens
cctgcaagtccctcttcttcccggccttagtctctcctgttgtgccaaggtccctggaggcggccctcacacgccaggattccaggaggcatcccccgggctcctccccagcccctagctgc

SEQ ID NO: 7586 - DNA, 122 bp, Homo sapiens
cacaccgccggcgtggtcctcaccgccaccgccgaccacaacctgttgctctacgaggctcgctccctgcggctgcagaaacaggtgcacacctgcccttgctcagtctggaggctgcgggc

SEQ ID NO: 7587 - DNA, 122 bp, Homo sapiens
gttgctgggagagttggagccctggatgcatttgccgtttagacttctattttctgggtccggctagtgggtgggggccaagctcggttcgcccttccaccctcgggaaggggtcagaggct

SEQ ID NO: 7588 - DNA, 122 bp, Homo sapiens
agggtcagtcacgtgggcccgcagccctctcctcgatttccctacaaggacttgggccgacgggccccgcccttcgccgtgccctggaatgtgcggccaggcaaagccacaggacggacgca

SEQ ID NO: 7589 - DNA, 122 bp, Homo sapiens
cactctggtgcagggtcaccaagccggtgcctgcggggggactcctgagcgtgctcctcacggccgagccccacagcacccccggccaccctgtgaagaaggagccagcagagcccacgtgc

SEQ ID NO: 7590 - DNA, 122 bp, Homo sapiens
ccccagctccatcttaatgcacagaggctcagacagccataaagacagccacttcaaaaccgcattgtcttctttgaccttccatatgagctcattaattcaaaagctaatttccttttgtc

SEQ ID NO: 7591 - DNA, 122 bp, Homo sapiens
tcccgtgccaaggaagtcgcgtcaacctgaggctctgggatcagacccaccggactcacgcgggctctgccacgtgttgcccgcagtctcggcccgttccctccgctttggtaacgggcact

SEQ ID NO: 7592 - DNA, 122 bp, Homo sapiens
gctgcccgctgtgcgcccgcaccttccggcagagcgcgctgctcttccaccaggcgcgggcgcaccccttggggacaacctctgaccctgctgccccaccccaccgctgcgcgcagtgcccg

SEQ ID NO: 7593 - DNA, 122 bp, Homo sapiens
tgaccctaagaataagcactgtgtgtttcaaggtgacctcctgctcttcagctgtgcaggcgcccaccccaggcaccagagggtctgcccctgccgggacttcatcaagggccaggtggctc

SEQ ID NO: 7594 - DNA, 122 bp, Homo sapiens
tttagaggatataaggtatataaaagggcctaacacggtgcatatctcatggcagatgcccgagaaaagtgatctcgtctgcttttttctttcagcatcagagctaggggtgttctcctgtt

SEQ ID NO: 7595 - DNA, 122 bp, Homo sapiens
tgacgtaagtgctttacttgggtcttctcatttcatcctcccagcaacccaaagagctggcggcgtcattcccattttacaaatgcgaacacgggctcagagatggagcgactcacgttgta

SEQ ID NO: 7596 - DNA, 122 bp, Homo sapiens
agccgtgggtcacggaagagaaccatggaacccagtgactagtgttcagctcgattaggacgaacccaggcacttaacgttgcaggaacaatggcaagcctttagcatgatcgggagtggca

SEQ ID NO: 7597 - DNA, 122 bp, Homo sapiens
gtttatgcctggaaagcctgttcatttttgtgatgtccttggagctgggccaggcattatcgagctaaatcttagcttttgtcagaataggggggtcattgagggaaatttccaaaggaagg

SEQ ID NO: 7598 - DNA, 122 bp, Homo sapiens
cgccgccacggccgcccgcatcgcgccgcaaccgcgccccagggcccgctgcgggccagccgggctccagcaggctgagcagtagcagccagattaggcccatcgtggcatcgcgcccgccc

SEQ ID NO: 7599 - DNA, 122 bp, Homo sapiens
tgtccctacctaactggctggaaggcggggccaagtggcgtgggaatgggcgggcctgaccggctcggcaggtgaaacactgaccacagcaagctctccttggaaaaggccggccaaacgtg

SEQ ID NO: 7600 - DNA, 122 bp, Homo sapiens
caggctctcgagggaggagggaggagggggccgggggcccggactcccgggtctctggtccgagggcctagagccagctcgctcacgtgccgctcagcccttccgcctcggcatctttctgc

SEQ ID NO: 7601 - DNA, 122 bp, Homo sapiens
ctttggccacagttcccggtcgggctcccccgggcggagggaagcgggtctgcggccgggcggctcttgtgaggtatctaggatgtgccaggacacaggcaccgcagtcctgggaaaggcgg

SEQ ID NO: 7602 - DNA, 122 bp, Homo sapiens
ggagggaggaggcgggggaccgctcagaagggcagggaaggaggagccggcgcggcgccgcgacacgtcccacagcctcagagcgccgggaccacaactcccggcatgccctgctttagccc

SEQ ID NO: 7603 - DNA, 122 bp, Homo sapiens
ctctgaggtgacgagaccacctggctgggtgaatgtccagagggtgggcagctgggctcccggtctcaagagttctccccagctccctgatcacatcccttttataaagcccggggtgacgt

SEQ ID NO: 7604 - DNA, 122 bp, Homo sapiens
tcctttttgagtgccctactaaatccatttccatttgtttctctttcagagaatctccaccggacttttggtaagttccggcatgtctaggccctcccaggtcaacttggtatttcactcta

SEQ ID NO: 7605 - DNA, 122 bp, Homo sapiens
ggcatctcttcctttctagtgggccggtcaggctggggcctgggtcagagcggtgctgcccgtgccgcctgaagagctgcagccagaacaggtggctgagctgtggggccggggtgaccgga

SEQ ID NO: 7606 - DNA, 122 bp, Homo sapiens
ctggacgcagaggctcttgtcagagggcacagaccggttggaacaaagtaaggatctgagcgaccccaactttgcagccgaggcctccagctccgaggtgcatagcaaccctagggttccgg

SEQ ID NO: 7607 - DNA, 122 bp, Homo sapiens
ctcggacgtggtgcttggcttcgccgagttggaaggtgggttgaactgtgccctgggctgcgagcaggccccaggcccacgctacatacctcccggatctagcgggccacttgcaatgcgag

SEQ ID NO: 7608 - DNA, 122 bp, Homo sapiens
actgtcgccatgccctgtgtggatgaagctgttctgcaggggctggctgatgtcctgggccgacaggccggccacggaggtcaccacgttgcgagggaagggccccacacacagcgtccgtg

SEQ ID NO: 7609 - DNA, 122 bp, Homo sapiens
ctgcgccccgcgttggagtgtggtcctcattaagggtccaagctcggacttctgagtctccgcatccggtcgctcacggcagcctccaccttccgccatctcctccgcggccccggcccagc

SEQ ID NO: 7610 - DNA, 122 bp, Homo sapiens
atagtacttgcctcacacagttgcttcaaggattagcaaaaaagataggcaacacccctgcgtggtactgctaccaccctgcaacacccgcccagtcatcagagagaattgggtggagcacc

SEQ ID NO: 7611 - DNA, 122 bp, Homo sapiens
cagccagtccaccccaccctccttgtagcccaagcctgggactgagcccccgactgcccccgcagctaggcaggaaggtctgagcactgcacagtccccagggcggctgcagctgcccaggg

SEQ ID NO: 7612 - DNA, 122 bp, Homo sapiens
gaaaggggtgacggacgcacctggaaaatcgggtcactcccacccgaatattgtgcttttcggaccggcttaaaaaactgcacaccacgagattatatcccgcacctggctcggagggtcct

SEQ ID NO: 7613 - DNA, 122 bp, Homo sapiens
aaaaaaaaacttgttaaaactataccatgaactgagaacacaactcgtattcagatttcacggttatgaagattaacaactgttatattcaactgttttcgacattgataaactcatacgga

SEQ ID NO: 7614 - DNA, 122 bp, Homo sapiens
ctgtccctctgcacccccagtgcgaagcggcccatgtaggctcagcacgagtgccgagtgcgtttggggaagtgggcagaattcccagctgagcaccccgcgaccccccatgttttttatga

SEQ ID NO: 7615 - DNA, 122 bp, Homo sapiens
tggaatcccgaagccggccccatggtcctctgtgccccctttcctgcaggccccgctccccgggtccctcctagacgtctctgtcccaaggagtcgcgtgcacctctcgagaagctcctcac

SEQ ID NO: 7616 - DNA, 122 bp, Homo sapiens
tctgctccagggagcctggggtccctggtgaaccatccagctcagacctgggaaggaggtcgttctctcacccaacctctctaccctagcggtgaggctgaagcccagagagggcatgggac

SEQ ID NO: 7617 - DNA, 122 bp, Homo sapiens
cgtggagagtggagacaaagatgctcaaaagccaggaaatcgcaggctcggaagcccccacgcatgcctctgaacgcagcgccatctcggggctgcggcgggaccaagcgggacgcttgcag

SEQ ID NO: 7618 - DNA, 122 bp, Homo sapiens
cctaattacacccgcgttccgccttcatctccacggcattgcgatgggcccacagatgggcgtgcaggtagatacaaccataagcgtggagatagctccatcactcaggtagccaagacttt

SEQ ID NO: 7619 - DNA, 122 bp, Homo sapiens
agccaaaccaaagcacaaatgaacagagaagtcaacacatccgaccccaaaccctcaggacgctggcttgggttacatgtggccctctctgtggtcagtttgtgagtagcctccccggaggg

SEQ ID NO: 7620 - DNA, 122 bp, Homo sapiens
tagcggacccagcacagccaggagcgtccgggatgagctcagccgcggccgaccactgggcgtggttgctggtgctcagcttcgtgtttggatgcaatgttcttaggatcctcctcccgtcc

SEQ ID NO: 7621 - DNA, 122 bp, Homo sapiens
gggggtcgagcaggcagtgtctgtgcgggatgcttgagaacgtcttccctgagtcggttccggccgcaaaggctttaacctcttcctccccgtgtcggggctgtggtggatctgacttgaca

SEQ ID NO: 7622 - DNA, 122 bp, Homo sapiens
ttgctgggcggagtcagagcagttcttgaggttcaaggaggcgggggagacctgagctcacgcttgctgagacagaagtcacagcaggattatgcccctcagggcaagaggaaggtgggagc

SEQ ID NO: 7623 - DNA, 122 bp, Homo sapiens
aaaaaattgacccacgttgaaccatgatgcttctccccactccagcgtcgagccaggcggcgataggccaccccgcacgcccgtcagccggcccggccccgcccagccagccggcggctcgc

SEQ ID NO: 7624 - DNA, 122 bp, Homo sapiens
cagggaatgaatggtggtctccccactcccggcagcactttaggcagcccataagctatgcgagaatgtgaacgctcaccttgctccgtcacggttctgacctaccacataaacaggaagaa

SEQ ID NO: 7625 - DNA, 122 bp, Homo sapiens
gggttgtggggggatggtcaggacatctggaaagcacatctggaatcggcctgctcctgtcgtcttgcggtaaagcaagaaccttctggaggggaaggggtcccagttcctcctgtcccctt

SEQ ID NO: 7626 - DNA, 122 bp, Homo sapiens
cctccaagtgggagaaacagactctcctccaaacgaagggaccggccgggcgcggcggctcggaggatccctggagcagctgagctcagcctgggaaacacagccaggccctgtctctgcaa

SEQ ID NO: 7627 - DNA, 122 bp, Homo sapiens
tctatttggccctgtgttcagggtctctctcccacttctaagagggtagtctatctcagccgctgcggggtcaccaacagagcctggacacaggaggcatctggcaaatacgcgctgcatga

SEQ ID NO: 7628 - DNA, 122 bp, Homo sapiens
tcgcagtcgagcttgtgcatccctcctccaaccaggagcctcacgctctcacccatgacgcgggcctgcaccgtcacgcgcacacaggtgccagtgccaccttcgcaggctagcagtatctc

SEQ ID NO: 7629 - DNA, 122 bp, Homo sapiens
gagtgagacagtgagctttctctgtgttccccacctgctgtccacacacagggtggtgggcgggaaccagagccttctgatttgctccctcacttccttccaacctagatgtgagtgctgtc

SEQ ID NO: 7630 - DNA, 122 bp, Homo sapiens
agcagccagagaatccaatagcacagatcctcacctgggcttgaactgtttgaaggtagccggtcagaacccttgagagttcggaagtgcacccggggccctgggggactctctccccgaag

SEQ ID NO: 7631 - DNA, 122 bp, Homo sapiens
ggcgtagctgcgttcatcgtccctgttcagtcagagtaggcagtgctggctgcacggtcacgaaaatcggggcggaaagggtgtcaggcagggtgacctcggaggcccctggattcgagaaa

SEQ ID NO: 7632 - DNA, 122 bp, Homo sapiens
ttctccctcctccgctatttccttaactacggggcaggcaggaggcggggccagcgtggtcgcgaagaagggacgggcgggcgtgagctgtcagtcagaagctccgcccccccccccccccc

SEQ ID NO: 7633 - DNA, 122 bp, Homo sapiens
ttttccaccgaagtactttaattcactaacacgtttcacgctgtcatgctgacccgaagccgggacgcaggagggccaaagaatccaagcaattttagaaaccccgttactgcccagcttga

SEQ ID NO: 7634 - DNA, 122 bp, Homo sapiens
ggtgaactcgccaaccccagcccaggcggaagctccgccccgtcctggccccgcgggcggcgcagaccgtgacgcataccccactattgcgcacctggccagcggcgcacgctacgcgaacg

SEQ ID NO: 7635 - DNA, 122 bp, Homo sapiens
tggctcttaaggacacccagaccctccttagccggcctataagggcccttgttgcgcgcgcgcagggacccacacagggcctgcccaggggtgcaaggctggtccctggcccctggccaact

SEQ ID NO: 7636 - DNA, 122 bp, Homo sapiens
accggcttcgaagggaggcgacggccgagacacacggtccggcgcgagccaggcgccccgcgacgtgcaattttattttgcaaaaggtgcacccaacgccagtcccggtagagttgaaccca

SEQ ID NO: 7637 - DNA, 122 bp, Homo sapiens
ttcactgaattgttttaatgccactgatcttacaccaagcattccagcaaaaatgctgctcgaatgttaaagggaagagactttggatctgaaggaaaaaatagtatccccttggcactcac

SEQ ID NO: 7638 - DNA, 122 bp, Homo sapiens
aagttgcccacaacagggcggagctcctgctctaattctctaacgtcccagggctatggacgggctcccttggcggccagttttgttgcgcgtagggaggcgttaggcgtgaaggtcttgag

SEQ ID NO: 7639 - DNA, 122 bp, Homo sapiens
ccgatctccctcaggtggaggagtggtcgggaggcacggcctgggggccctcaggctgggcgcgctggcaatcccaaggccgaccaggccatgcacttccagcccgcctgggcacccgagct

SEQ ID NO: 7640 - DNA, 122 bp, Homo sapiens
gccgcagtgaaagtgggacaaacgcgcctgtgtgcatcctggccgaggtgccggaggaagcgtggtcggggcagaagtgttaatgggcctccttcctgccgtgccctgcccgtgccagctcc

SEQ ID NO: 7641 - DNA, 122 bp, Homo sapiens
ccagctcctctctctaagcctactccaccttcatcagccactggcttttcctctccacttcgtgtaagtttggagttctggcctgtaaattaggtcatcaaccacttcaccttgaaaggaga

SEQ ID NO: 7642 - DNA, 122 bp, Homo sapiens
ggcgtgttccaggaagcgccctccagctgtccaggggcactgccactgggagagggctcccgcccagggggcctggataagggcaggggcccccagcccagcccaggccagcccagcccagc

SEQ ID NO: 7643 - DNA, 122 bp, Homo sapiens
aaaagagctttccctcatcaactgggaatgaaccacagaggcagtaacatgtcatatttgcgtgcctagtagaggtaaagctctttttcattttcaaaactgtcacttgagatagctactat

SEQ ID NO: 7644 - DNA, 122 bp, Homo sapiens
aggctggtcttgaactcaagtgatctgcccacctcggtctcccactgctgggattacaggcgtaagccaccacacctggctatacacagaattttgtaaagtttgtatttaatgtgatgggt

SEQ ID NO: 7645 - DNA, 122 bp, Homo sapiens
ttgggggaaagtgctgaaggaccctcacctgacacagtgagcctggccccgtggctgatccggatactggcgatgtttgaggccacacagtggaagatgccaccgtcctcagctcgaagtcc

SEQ ID NO: 7646 - DNA, 122 bp, Homo sapiens
gataggggaccaggaggaaccccagtcctagaccaggcctataggctgatgccaacaccccgggagagctggtggggccccatcctctaccaccttcaatgcatggccaaagggcacttcag

SEQ ID NO: 7647 - DNA, 122 bp, Homo sapiens
ccaatgtcatcactttcaaacatggttaaaaatacgtatcttagaattgaagcaacatgacgttcagatggagatgttgctctgggttgtaataagacaaataacatctccagagagcaaga

SEQ ID NO: 7648 - DNA, 122 bp, Homo sapiens
ttttagccaatccagaagtagtaaattcggaacagaccttcccagagatttaaagcaactcgtagtgagcaacaaaagctgttcaaacaaaatgaaacaggaaatagttacttcattttaag

SEQ ID NO: 7649 - DNA, 122 bp, Homo sapiens
agaccttgaagaatgacaggtgtgagtccttggatttccttatcaccccccaccccaccccgcccttaccctggatgaggcactgcagaagcctccaaccagaaaccaccagcaggcacaga

SEQ ID NO: 7650 - DNA, 122 bp, Homo sapiens
ccttagcctctgtgattccaaagcccaggctcagcatctggagcagcctcaggatgcagacgagcctcccttaatcctctgtgcacaggggacagggctgtggagtctggctgggatcccac

SEQ ID NO: 7651 - DNA, 122 bp, Homo sapiens
gaacgagcctggggctccgggcccagagatgagacgctctggctgggaagcaaggagcatcggcaccgacggatagaggccggtggccctcaggttgagcaggcggcttcggggcggggaga

SEQ ID NO: 7652 - DNA, 122 bp, Homo sapiens
ctgggtacctttgctggttgtccaggagatggcactgttgcttcaagggaatggcttccacgaggcccaggaagagagcctgggggcaaaggggttgagggttggggataatatacggcagt

SEQ ID NO: 7653 - DNA, 122 bp, Homo sapiens
actcttaaacaaaatgtcaggatccaacatttgttcatgggttaaagccttttggcgggccgtggtggctcatgcctgtaatcccagcactttgggaggctgaggcatgcggatcacaaggt

SEQ ID NO: 7654 - DNA, 122 bp, Homo sapiens
aagtttgagtggggatttgctttctggaattgactgtctcctgtcttcagatgactgccccgtgtcagcccggcggcaatcgttagtctccgggccaacccaggacgatgctttttggcgtt

SEQ ID NO: 7655 - DNA, 122 bp, Homo sapiens
cacgccggtgcccatggagcgcaggggccgtcgggtggagtacatgtgccgaacgtggaccggggccccgcccttccgcctagcccgcagtttcctacgcagccagcgagacgcccaggccg

SEQ ID NO: 7656 - DNA, 122 bp, Homo sapiens
ccttgagaatcaacctcgagatctagcatctattttgcaaacgaagacagcaggaacgggcgggctaaccgtcgcagtcactgcctcggcgctcctccccctccaaggccagcaagttgcgg

SEQ ID NO: 7657 - DNA, 122 bp, Homo sapiens
acagccagaccgctgggcttccagcttggctgggcatccgtccgtaacgaggagtgggcccggcctaaatttggagatgttagttggaaactcaagtgctgctaattcaggccttccaactt

SEQ ID NO: 7658 - DNA, 122 bp, Homo sapiens
acgcgcctcctgaccacagcaccccgtcggctttctaattctgtgagctgccctcgtgggcgtggcctccctgtggagctccccatgtgcctccccttggtccagcctgcagctaggaagtg

SEQ ID NO: 7659 - DNA, 122 bp, Homo sapiens
gacctggaggatcccctgggcctggccaagtcgtgttccctgaccagggcctggctgaggcgccgagtcaaggggctgagtccttcccggggctggcggaggatggggaacggcccttgggg

SEQ ID NO: 7660 - DNA, 122 bp, Homo sapiens
accaggcaatggcaggaaggtggagccttcctaagactgatggcttcctttctccaatcccggtgcagctattctccggccatagtctcggcgcccagcggagagcgacaggtgggagctgc

SEQ ID NO: 7661 - DNA, 122 bp, Homo sapiens
gcactagctgtggtgagcacatccgggtcccgctggatgcatgcaagaggtggttggtctcgtgggttgggtcgatgatgagaaccttatattttcctgaagagaggtgatgacttaaaaat

SEQ ID NO: 7662 - DNA, 122 bp, Homo sapiens
agattacaactttctgggtttgcttctgtcatctatcaaatatcacaattcatcctgcttcgctaaagtgaaactccaaggatttgtttttaaaggtgtccttctttctgtgaaatactaaa

SEQ ID NO: 7663 - DNA, 122 bp, Homo sapiens
ttgtgagagctggtcgtttaaaggtgtgtagcaccgcctccctcccccctccccccgaaacgctctcttgcacctactttgaccatgtgacaggcctctccagagggccaaacagatgccag

SEQ ID NO: 7664 - DNA, 122 bp, Homo sapiens
gtgccgggtcccccaaacctcgtcctccgggactatgtcttctcgcggtctctacccacccgggcctgtgaaggtcttgccggatcccgcctaacaaaagttacctcctctcctgaactccc

SEQ ID NO: 7665 - DNA, 122 bp, Homo sapiens
cagcagcacctggcaatcaattcaaattctactgaatagaagcaaacacctctctgaaggcgaaaggatctggtcagctaagcctcagatttctagcacactgagaacacttgtaatcatcg

SEQ ID NO: 7666 - DNA, 122 bp, Homo sapiens
cctgaagacgtgcctgcctcccccatctccgggacctctcccacctgggtgaagggggcacgtgagcctcacctgatcttgaccatctcagctaaaacactgaaccacccttggcacccacc

SEQ ID NO: 7667 - DNA, 122 bp, Homo sapiens
agaaggacggtgtgggtggaagcgctgatgcctgaagaagggcaccgtaggcagagagaccgcatggctggcttgcagggctgggcccgcacggagagacagatgtgcacagacacacacac

SEQ ID NO: 7668 - DNA, 122 bp, Homo sapiens
tttttgagacgaagtcttgcttcgtcgcccagggtggagtgtagtgttgtgatcacagctcgctgtggcctcaacctcctgggttcaagtgatcctcccacctcagcctctcaagtagcttg

SEQ ID NO: 7669 - DNA, 122 bp, Homo sapiens
ttcctgccacggaataagtgctcaatcagtgtttgcagggggacctaaatatttctaccccgctgtaaggttatttttttctgcctagtaatgtcttgttcactattcagctacacctagca

SEQ ID NO: 7670 - DNA, 122 bp, Homo sapiens
ctcctatcagcgctgggctccgtaccgccacacagcccacataccccgttccccaggagacgcccgcaggtgggcagcgtcactcccacccgccgagcacacgctgtccccgtctcgtgtcc

SEQ ID NO: 7671 - DNA, 122 bp, Homo sapiens
tgtgtgcctctgacattccgccagtactgggtccctccctctggtccagccctgagcccacggagcctgcgttcagtgctgactctcctagactaggaccccctggaagattggccctaggt

SEQ ID NO: 7672 - DNA, 122 bp, Homo sapiens
gtataaaaagacctggataatagcaattggttcacaggatgttagcaattattatgatcccgggtggttttagtcttgaggttcattttgctcagctgaaacataaatgtaagatatgcgcc

SEQ ID NO: 7673 - DNA, 122 bp, Homo sapiens
cttacaaacattatgatgcttcacacgagttgtgggtgaagtgaaggaattggaaagtcccggtctaaggccctgcaaaactgctgtctggtaaaaacaagtgactatggcaaggccctgaa

SEQ ID NO: 7674 - DNA, 122 bp, Homo sapiens
cctccttcccaaattcgccgccccaggctgtaatattacatgcagtgcgctgtaccggtgcgggagtccaggaaggctgcatgaccttccagcgaactccccctcggcttgggggatggagg

SEQ ID NO: 7675 - DNA, 122 bp, Homo sapiens
aggtgtcccagcagtggggccagagtgccgagcgcgccgcagccagcgggcagatcccatcgtgtccacagctccagctcccttaggggcagagttgctcagccttgagtgcccaaccgtga

SEQ ID NO: 7676 - DNA, 122 bp, Homo sapiens
gttatcaggaatttgaggagagtgcttgtcttccgagaaattctcagacttcagggcatgcgttggggaaggatgtggtcaagatgtctgtgccttgtcaagggcccttttctccgctgagc

SEQ ID NO: 7677 - DNA, 122 bp, Homo sapiens
cagggcctggagaggggaaatctgactccagtttcttgcaggccctcaagaactggagcccgtgcagtctggggcctctgctggtggcggttgcggttctccaacctgccaaatgatgagaa

SEQ ID NO: 7678 - DNA, 122 bp, Homo sapiens
gtggaaaataaattaaaaaggaagaaaatgttttgttgttgatacttaacttgattggtacggggacatctacccaaatggtgagctagggtaggactccttcaaataaaaatgcacagtaa

SEQ ID NO: 7679 - DNA, 122 bp, Homo sapiens
tactgcactagccatgcagggcaaatgaatcaatgtcattaaagcaagttgtttcccccccgaccccccaccctcagaatgctccactctttcacacacctgatagagaggtctttctaagg

SEQ ID NO: 7680 - DNA, 122 bp, Homo sapiens
gtggaaaggctgatgaagggaatacggcacacagtccccagccttgttactttatccccccgggatagcatcaatagcttacatgggagtgagcatcattcctgcttgcaccttcacgtccg

SEQ ID NO: 7681 - DNA, 122 bp, Homo sapiens
ataaaaaaacaaatgagggagactgattctgagaggggtcagggaaagctacaaaggtagcgatatttaagctgagctatattaataaattcaggttttccaggcagatgagaggaggagga

SEQ ID NO: 7682 - DNA, 122 bp, Homo sapiens
gcccggcgaggcggtgcagcagagagctccgccccggtttgcacgaacaaaagagcgcctcgcgggagtgagctggcctcccggccttactgaactcaggcattagttttcgtttgtggacc

SEQ ID NO: 7683 - DNA, 122 bp, Homo sapiens
cttgcaccccgtcttcgtcccgccccgcgccgtggccccgcccacacgccgtcagcttcgcgtctgtcctcgccccgccctgcatcatcgccccgccctgcatcatcgccccgcccacacgc

SEQ ID NO: 7684 - DNA, 122 bp, Homo sapiens
gaagtaaaaacacacacacacacacacacacacacacacacacagcaggtaatgcccatgcgtcttgtcagttggatgttttctcattagaaaaatgactatagttagggctgaattaaagg

SEQ ID NO: 7685 - DNA, 122 bp, Homo sapiens
ggagaacccttccctgtgctctgtccactttcccgggtccagcacagtgagcatggtgaccgggggttctgggaaccctgcgtgcccccctttcccctgcagcacaccctctttctccctgc

SEQ ID NO: 7686 - DNA, 122 bp, Homo sapiens
acttatctaaatctggcttgtgggcaaccgcaacgctgccgcagtgaactgtgggagttgcggttcacggcgtagcctcagtttttttcctgggggaagttccagaactacaaatcccgtga

SEQ ID NO: 7687 - DNA, 122 bp, Homo sapiens
ggtctgcactgcctggtcgcgacgacccaggccccgccggccctgcttaccctcctccagcgcttgctgcagttgcttctccaacagccggttccggcgctccagctcatgcaccttggcca

SEQ ID NO: 7688 - DNA, 122 bp, Homo sapiens
tttttttttttgtatttttagtaaagattgggtttcaccgtgatctcaatttcctgacctcgtgatctgcccgcctcggcctcccaaagtgctgggattacaggcgtgagccaccgcacccg

SEQ ID NO: 7689 - DNA, 122 bp, Homo sapiens
gaggatttggacttgatttgtgctgaaagagatataggatttaaattaatggaaaagatccgcagtagtaatgccaggaaacgtacctgggaactaataagtttaccacatttatttttcta

SEQ ID NO: 7690 - DNA, 122 bp, Homo sapiens
ccccctcccccgcgcgccacgcccacagtccgcccctgcgggcccgccgcgctcctcgcccggcctcgccacgcctacaacccgcctagccacgcccacatgcccctccccgtccacgtgga

SEQ ID NO: 7691 - DNA, 122 bp, Homo sapiens
tagaacactcctcatgcactcttcgtccggttaacaccgactcccttcaggatgtaacctcggagaggatcccatagagttgtcaagtttagcaaataaaaatacagtccgtctagttaaat

SEQ ID NO: 7692 - DNA, 122 bp, Homo sapiens
tcagatcaccaccttgcctggggctgcccagccaaatgcctgctgcccaccagggtgctgcgcctcactcgcctgtcgcctgagatcgtggagctcagcgagccgctgcaggttgttcgata

SEQ ID NO: 7693 - DNA, 122 bp, Homo sapiens
cccgggagcccttgcggaggcgtgggctggctcgggtgcgcaggcctggcccagcgggggcgccgggagagccggcccaattatgatgttgggagggatgttgtgatcctcggaggcggctc

SEQ ID NO: 7694 - DNA, 122 bp, Homo sapiens
gacaaacccaaaatgaaagaagttctaaaaaataacagtactcatcaaaaatgtcaaggtcgtgaaaaacaaaaactgaggaactgtcagagattggaggaaatgaagaagacacaacaact

SEQ ID NO: 7695 - DNA, 122 bp, Homo sapiens
tggccgcctgtgccgagggcaaaaacgtctacactgagatcaagtgcacctccctgctgccgctggaggacgtggtgtctgtggtgacgcatgaggactgcatcactgaggtggggatcggg

SEQ ID NO: 7696 - DNA, 122 bp, Homo sapiens
cggacttgtgacctcaagtgctccccctgcctctgcctcccaaattgctggaattacaagcgtgagccactgcacctggcccagaaaaacttttaaaactgagatcccaaccgtgatggaag

SEQ ID NO: 7697 - DNA, 122 bp, Homo sapiens
ttactgggagggggcttgctgtggccctgtcaggaagagtagagctctggtccagctccgcgcagggagggaggctgtcaccatgccggcctgctgcagctgcagtgatgttttccagtatg

SEQ ID NO: 7698 - DNA, 122 bp, Homo sapiens
caaagcgaagctgttccctggatctgttttaatgggcatctgcgacttttgtcctcagcacggctggagtacatcttctctgacacggctcccagccctccctattatcgagaaaagttctt

SEQ ID NO: 7699 - DNA, 122 bp, Homo sapiens
gaaaagagttgtcctggctcccctctaatcagtccacacctgggcttgtgcatctaatgccgggcattgcatttttgaggggcatccacaaacaaggttcgcagagagtgaggaatccagaa

SEQ ID NO: 7700 - DNA, 122 bp, Homo sapiens
gcctttcatcccacctcccacgcaggccgtggtgatgtttccttgctcacaaactttcagcgtctcctcgggatggttggacctctccctttgcctgacttccaagcttccttctgtgctgg

SEQ ID NO: 7701 - DNA, 122 bp, Homo sapiens
gcgctgaggcccgggccccgcctccgtccgcgcctggagccacaggccgtccttggtaggcgcttaactcaggttgggtgacattttcgctcgccagttcctggcatcagtgagtgctccgt

SEQ ID NO: 7702 - DNA, 122 bp, Homo sapiens
ctgaaatctcccacttcttctgtgacctcatgcccctgctgaagctctccggctcagacacgcacaccaacgagctggtgatctttgcttttggcattgtcgtgggcaccagcccattctcc

SEQ ID NO: 7703 - DNA, 122 bp, Homo sapiens
gcaagctaggggaccgcccttgcagttgttggaggagacaaattgggaaggacttaattccgggcaaaggaagcttcatgagtaaaagtagaaagtgaaaatggtcaggaaaagcaaggctt

SEQ ID NO: 7704 - DNA, 122 bp, Homo sapiens
gcaacacctgattcctctgctctgtggaaaactttttcttacacaaggatccactgtggacggttactttcatctgtttatttattgcccatgcagagctcttaaggtttacaggtgggagc

SEQ ID NO: 7705 - DNA, 122 bp, Homo sapiens
cgtggacaacgtccgcccgcgctgggacttcaccggcgccttctacttcgtgggcaccgtcgtttccaccataggtaagtgtgctggccggactcgctgacaacctccgggcggcctccact

SEQ ID NO: 7706 - DNA, 122 bp, Homo sapiens
cctcactgttttgcccatttctgagatggaaaatcaaggaacattgccccatctccaccccgggaatctatatgcccctcccataggcaagatggaagctagaccagaatgtgcagcttgtg

SEQ ID NO: 7707 - DNA, 122 bp, Homo sapiens
gccccactgtgtgtgggcgagagggccgggccagctgactcccgtctttctttgggaccacgtcatcaagcgggctggagccagaggctgggcccctctgtgccccggggatcctcaccccg

SEQ ID NO: 7708 - DNA, 122 bp, Homo sapiens
cacggtgcccgcctcacccttgggaagtgagcacgtgtgctgggattgggaagttgcacacgggcaagaaagcaagcacggcgtcagcaacatcagacacagaatcaggggcttcagtaaga

SEQ ID NO: 7709 - DNA, 122 bp, Homo sapiens
taaatgaggagttcctgaggacacaatgcacagacatgaatcacagcgctgagcacctgccgcatctgacagacattgaaggtgtaatgagtgcttgttaaatgaaggaagagaaagaaaat

SEQ ID NO: 7710 - DNA, 122 bp, Homo sapiens
aaagacattgttttccctttctttccgagttcttggcaaggttctttctgacagtcacatcgctggccctaagtcagatgtggaaaagaatgtttaatgcataaacacatttttaagctctt

SEQ ID NO: 7711 - DNA, 122 bp, Homo sapiens
atatactttgttataccatatcagaaatctcactgttaacaacatattcatataaacacacgttataaatctaatcgtcattctgtattccatcttgttataaacaattttaaaggaattat

SEQ ID NO: 7712 - DNA, 122 bp, Homo sapiens
aaaatgcggtttatagattgtgcaaacctgtactgaatccagaactatacatctgtaaagcgctggaaaaaaaaaaaaggctgtcaatctagaattctataaccaccaaaaacaaaacaaaa

SEQ ID NO: 7713 - DNA, 122 bp, Homo sapiens
agccccccgaaactagaagacgcagggaaggattcctggaaatcacttctaatccaaacacgctggcacaatgacacaccagggaaaaataattttaaatatagttacttatacgtaattca

SEQ ID NO: 7714 - DNA, 122 bp, Homo sapiens
ttgttgtagaactgtctatttctcccaccaattctgtcaattttgctttatatgttttggcgatctgttgttaggtatgaagatatttatgattggtatattttcttgatgatttgattgtt

SEQ ID NO: 7715 - DNA, 122 bp, Homo sapiens
cagtgccctcccttttcggccgcggcgcgtgactgggtaagtgggctcggaccttctggacgcaggagccgaccacgtggctccggggctaccccgtgcgcttcctaggcgcgcctctcgct

SEQ ID NO: 7716 - DNA, 122 bp, Homo sapiens
tggggaccccaaccacaggtcatgatgttgactcccccgatcccatgtggaataccacctcgcctgggctagggcccatgagggtgaaaccaaggctgtgttgtccactgaggttccccagc

SEQ ID NO: 7717 - DNA, 122 bp, Homo sapiens
ccttatatcaagagatttttcttctctaatcccttttgttcagaatgaggccacaagattcgcagtacttctgttaggactgggattcaatggtgctataaagggaaaaagctccagaggca

SEQ ID NO: 7718 - DNA, 122 bp, Homo sapiens
gcggcggggcggggagcgagagtgggccgcggaggccggccttcgggctccatggacgggcgccgcgtccctgcacagcccgccgcagaggtacggccggggcaggggcgcggggccaccgc

SEQ ID NO: 7719 - DNA, 122 bp, Homo sapiens
tctcgcctccttcctgcccctgctgctgggctggcacgagctgggccacgcacggccacccgtccctggccagtgccgcctgctggccagcctgccttttgtccttgtggcgtcgggcctca

SEQ ID NO: 7720 - DNA, 122 bp, Homo sapiens
gaatctaggaatatccccgcccatagaaagtactgattggagaaacatttgttttctctacggctggttggtgtaaggagtgtttcaccacacggagatgtggtcacgtgacttgtcaactt

SEQ ID NO: 7721 - DNA, 122 bp, Homo sapiens
tgctgtccttcctgccgtacgtgccattccactctcttcagctctcccctcaacagcatgcgagcccataccttctgcatttttccaggcctgtgagggatataggcctccccttggagcac

SEQ ID NO: 7722 - DNA, 122 bp, Homo sapiens
gtttttgcgctccctccaccgcaaaaaaaaaaaaaaaaaaattcctctgcttgttccattcgtacacagaatgtaacccaagcttgtgtcaaagataaatcatagccagccagtaagtaaag

SEQ ID NO: 7723 - DNA, 122 bp, Homo sapiens
acacaggtgtcccatgcttcagatgtccccagaggtcctggtccaggctctggcattggacggaagacccgaggtgggaggcaggaagtggtctctgctccttctctgctcccctctgggca

SEQ ID NO: 7724 - DNA, 122 bp, Homo sapiens
cctggactagcctattgttaaatgcttttcagaattccacttttctaaggtaatttataccggaattaatatcgagctgggagacttggttgaatatgtcattcaggcactttccaaacatc

SEQ ID NO: 7725 - DNA, 122 bp, Homo sapiens
agaggagggggtgaaggatggaatgtcctcatggtgagtgctgtcagaggcaggcctgaacgagaagacaggccgtggcaacggtcccgaggctgtgagtctaggcagcctgcctccgggac

SEQ ID NO: 7726 - DNA, 122 bp, Homo sapiens
tcgtggtccaggacctcggtcatcttctccagctcgtggaagaggttgaccaccatgtcccgctcatactgtagctgccggtcattctggatgatctcctgctccgtgaggtcgatgagcag

SEQ ID NO: 7727 - DNA, 122 bp, Homo sapiens
ttcctgactgacctgagcaaggtcttactaagcagtcccatctctgtgggaggcatgcaacgcgtgcagggagttcaggtgccggtcggcgtagccaggcctggaggccccccaggcaggag

SEQ ID NO: 7728 - DNA, 122 bp, Homo sapiens
catcctaagttgtgtaacttcaatcttgtagcattcttaagctaagaaagtcattaagatcgttgtcaaaagcttggttatgtagagatagcatgtgaaatgatatggcactaatttatcct

SEQ ID NO: 7729 - DNA, 122 bp, Homo sapiens
gcagaaatagtcctggataacaataagcttccattggcaggtttctgtcttcttggttagcgagagaaaaaaaaagcctttaaaataaatcatagcttgggaactgtttaccacccttcacc

SEQ ID NO: 7730 - DNA, 122 bp, Homo sapiens
tcccggaagctctaccgaccagtaagagacctgggtgctgagcacgtgaatcaacagatgcggatgactgtgtaggcgggcccaatgggagcacagcagcaggaagtaacttccagacagtg

SEQ ID NO: 7731 - DNA, 122 bp, Homo sapiens
gcccatttttctataggtaacctgtgctgcgcggggtggcactagttttcacccagcgggcgaggaggcagcgaagtcgcgggcccagcgtagcgcgcgcctccgaagggcttggtgcgggc

SEQ ID NO: 7732 - DNA, 122 bp, Homo sapiens
acctgtcagacgcccaatctcgcgagtgagcgagattcacgcggaacgcagaggtgagaacggggaaggccctcctcagcaggagtcccgccccctgaagggcatgggccaatcacaatgcc

SEQ ID NO: 7733 - DNA, 122 bp, Homo sapiens
acagtttcctttcagtgattctttctgcataactttaagaggcagtctccaacaggttcccgctgcatgtggctttccttcttgggataatttgccaatggcaattgcattccttatgcact

SEQ ID NO: 7734 - DNA, 122 bp, Homo sapiens
agctggggggttgttgtgtccttcctgcagaacccgattggcctgggtgagctgagggaacgggggcgtggtttgattccgcgggcgcgagccacgttggacgcgccgcagcgtcgccgaaa

SEQ ID NO: 7735 - DNA, 122 bp, Homo sapiens
ccacagggatcctgtgctatcaggcaagccagggtgcgggggagggtaagagagggcacacgcaatggcaaccacagtctgtaaccgacaccggaagcgagccccctcacctgtgccatgtt

SEQ ID NO: 7736 - DNA, 122 bp, Homo sapiens
tggctgcgctgccccgcggagcggccctgcgggctcgtctgccgctagcccggggctcggcgcccgcagccgccgctgaactttgcgagacctttcacttcccggccgccgccgccgcctcc

SEQ ID NO: 7737 - DNA, 122 bp, Homo sapiens
acacacactcttctcggaggaactatttgtcattcaccatggagccagccccacctacaacgctgaggaacatatttacatatttcaactccattgctggctgaagcactccagaaagtgat

SEQ ID NO: 7738 - DNA, 122 bp, Homo sapiens
gtgggatcttagctcctcactcctagataggaaggcacaaagggcgcaggagggacacgtcgcccccggggaaatggagaacaagaagatgctccgaggaacctgggacattgtcagaagaa

SEQ ID NO: 7739 - DNA, 122 bp, Homo sapiens
aggcggcgggccgacggtcgaggggcttcggagggcctgcttggactgcaacctgggcctcgtgatcagcgacccagggtgtggctggtggcgggcagcagggctcaccaggaagtgtcccc

SEQ ID NO: 7740 - DNA, 122 bp, Homo sapiens
tatctgtcttcttcaacatcacatccccagctacctagcagagtgccttgggctggtacacgcttaactacgtacatgaatgaatggagcagggctcaaaacatcaatgcctaccagagcct

SEQ ID NO: 7741 - DNA, 122 bp, Homo sapiens
gtggttatagcaaccagtgtggccagcctcttccccagcttatcctcctcccaatactcccgctctgtttttatgaggctgggaaaatagaacgaggaagtggtgacgcactgggctctcac

SEQ ID NO: 7742 - DNA, 122 bp, Homo sapiens
ccagccacgtcgttggcaagggtcagcgcaggatgaaaccgccggcccctggtctccggccgggccctccgtctctagagcagctcgcaccgctgcagcccctggacgccccgggctgtgga

SEQ ID NO: 7743 - DNA, 122 bp, Homo sapiens
agagtcctaggaggtactacttgccccccacagtgacgctgactgcttagtggtcgaagacggtgggcacgtactcctccgggaaggcttcgttggcatagctcatgagtgggcacgtcttg

SEQ ID NO: 7744 - DNA, 122 bp, Homo sapiens
ccgcgtccagccttgttattgtttttgagactgagtcttgctctgtggcccaggctggagcgcagtggcgtgatctcggctcactgcaacctccatctcccaggctcaagcaattctcctgc

SEQ ID NO: 7745 - DNA, 122 bp, Homo sapiens
ctcccccgaggtgctgtctgcatggggttgaataagatgaaccctgaggccctgctgcttcgcagtgtgtggccctgctccttgaggtgtgaaaggccagggaacagggtgcttgctgggga

SEQ ID NO: 7746 - DNA, 122 bp, Homo sapiens
ctggatcatcttaagtgagtcagtgcaccccatttggcctaagttttctcttctgcaaaacggtgtgctgtttctttcaaacctagggtaagggctttggagtaagttagacctaggttgga

SEQ ID NO: 7747 - DNA, 122 bp, Homo sapiens
tgtgtgtgtgtgtgtgtgtgtgtgtgtgtgcgcgcgcgcgcccgcgcgcccgtgcgcgcgcgcgactagtgtgcgtctccaaagtggatctcactcagagctgggaagcacaggaggaaaag

SEQ ID NO: 7748 - DNA, 122 bp, Homo sapiens
cagggctagttaacaaagtatatcttttacttagagacatcgacgaggaatatcttaggccgtccaataagaatgtaagcatttcatattttattccctataaagaaaaaagaatggaggcg

SEQ ID NO: 7749 - DNA, 122 bp, Homo sapiens
cggtccgtgggcgcacacaccctccccgcgcagccaatgggcgtgcgcacgtcactgatccggaggcccgcgggccggcagcccctcaataagccacattgttgcatgaaactccggcgcag

SEQ ID NO: 7750 - DNA, 122 bp, Homo sapiens
gcccttgtgggaggcctacagggcccgtgccctcccccgggcgccgccgccgccgccttccgctcccagcctcacccggccgcgaccgcagcccagtccgttaccctggtctcgggacctcc

SEQ ID NO: 7751 - DNA, 122 bp, Homo sapiens
ccgcgctcagtcctgcccgcggactcccgcctgttgccatggcgaccaggccccgctcctcggctgcgtcccccgccgtcgggccaatggaacactccccaagccgcctgcctccgcggtcc

SEQ ID NO: 7752 - DNA, 122 bp, Homo sapiens
aattttattataaaataaaagcagaaatatttcccgaagaacattcacatgagggcattacggggagacggcaagtcggcggctcggggggcgcgctcagccgggagcgctgtagtcacagt

SEQ ID NO: 7753 - DNA, 122 bp, Homo sapiens
ctgaaccgtacactcaaagatggttacgatggtcaattttatgttatctgcattgcaccacgataaaaaaagcctgtgctggacccctactgtgagggctggaaagagtcatatcacactgt

SEQ ID NO: 7754 - DNA, 122 bp, Homo sapiens
tctccccgcgtcctcaggggctggaaaccccagaaactgccgatagacttggcgcagccccggccctgcaggaggagagtcagcccggcctggaggcgaaaggagccggcaggtcctcccaa

SEQ ID NO: 7755 - DNA, 122 bp, Homo sapiens
cggacagaccctcgcgaaggagttctaaggcgaagtccatggaggcaaagcaaatccattcgcctttccttagattgtttgattttctcctactggtttgttgttgagcctgcgggcgctgg

SEQ ID NO: 7756 - DNA, 122 bp, Homo sapiens
ttatgtaagtttcagcaaacacctattactgtttggaccagtacctcttgtttctcaaaacgctgtcggggccacgggcgggacccggacggggcagggagggggcggggctacagcagggc

SEQ ID NO: 7757 - DNA, 122 bp, Homo sapiens
gatgtttgagaaactgactctgtattgcgacagctacatccagctcatccccatttccttcgtgctgggtgagttcccccttctggctgttccgggtccctgtggccgcccaggctccagac

SEQ ID NO: 7758 - DNA, 122 bp, Homo sapiens
tgcaagggagtaaattaataagtcaggagttaggacccagagatatgttttagacttacacgatctgacagctgactgcaaatcaatgaagtgcactttgagaagcggcacactcggcgaga

SEQ ID NO: 7759 - DNA, 122 bp, Homo sapiens
cggccacgttcgtgtgacctgattctctccggctttcaggacgtcctgaggctgcacccacgtggcaatggtgtctgtcgcgctgtcgcctggatccggcaccactagcggagccgagcaga

SEQ ID NO: 7760 - DNA, 122 bp, Homo sapiens
aagtctgtggatgccccctggtggccctaaatagaatggcttcaatggatggaaatttaacgtgctcgcatccccagcacgttaaattacccagaaaagtaagagaaaaagaacagacacat

SEQ ID NO: 7761 - DNA, 122 bp, Homo sapiens
tctaaaggaaaaaccagagacaaaccgctcatattccatgaaccttccttctgcataaaccgccacgtgtcgcttggcaaagccgtgggcctggcagtggggttagcctttcccactcagga

SEQ ID NO: 7762 - DNA, 122 bp, Homo sapiens
ctggcgggggcggttttgggggttgtgctaccccctagaggtttgggcggcagcagcgtccgccccctcccctgccaacagccagggcatctatcacaccagacaccgacgtcagctggagc

SEQ ID NO: 7763 - DNA, 122 bp, Homo sapiens
gagggcagtgggtgggggaaaccgggcgggggcaggcgagacctcagggctccagggcctcgtccccggactccgccgattcctcctcgatgcgggctgcggcctcggggtcgccgccctcc

SEQ ID NO: 7764 - DNA, 122 bp, Homo sapiens
tccacagtcctcactgggctttgtggccctcgtgctgagcacactgcacacgctcacctacggctggacccgcgccttcgaggagagccgctacaagttctacctgcctcccaccttcacgc

SEQ ID NO: 7765 - DNA, 122 bp, Homo sapiens
cggaggaacctgagctacacgtgccgcgccaaccggaactgtcccatcgaccagcaccatcgcaaccagtgccagtactgccgcctcaaaaagtgcctcaaagtgggcatgagacgggaagg

SEQ ID NO: 7766 - DNA, 122 bp, Homo sapiens
cagatcgttataagccatagtgttataaagaaaagtgcagtgtgctatggagaggatgatcggagagctgattcagattgggcttgggagaggaagcaacagatgtctgctggaaagtgacc

SEQ ID NO: 7767 - DNA, 122 bp, Homo sapiens
gctgccagtgctgagcctcgcggaagtaggagccctcctgggcctcgcagaagtagtggccgtactgctgcgccgtgaggttctcgatgaacaggatgcagttggggctctggtgaccaggt

SEQ ID NO: 7768 - DNA, 122 bp, Homo sapiens
ttccgtggactttttagcagcacaggggaccttatcgagccaggttttttcaggtttgggcgattatcagaattgtggcttgagggtaggggtcgtccgcgctctttttaaaaatctagatt

SEQ ID NO: 7769 - DNA, 122 bp, Homo sapiens
ccagcgccgcgggcaatgagtctcttgcttgaagccccaggtcatgtccgaggcagcagccgaggacacagctgggaacacacaagttctgaaggacagacaggcccatgcagtcccgggag

SEQ ID NO: 7770 - DNA, 122 bp, Homo sapiens
ctacatcaagaggtgggtggcctcgccgtgcgccctggcccgtcgcctggtacccgcagacgcctccacccggctgcggtctctgggagcctgggctgtcctcgctgcctgcgacaccgcgt

SEQ ID NO: 7771 - DNA, 122 bp, Homo sapiens
agcttcactcttgaggccagcgagaccacgaacccaccgggaggaaggagcaactccagacgtgccgcctaaagagctgtaacaccgcgaaggtccgcagcttcactcctgagccagcgaga

SEQ ID NO: 7772 - DNA, 122 bp, Homo sapiens
ccacgctctcttgagcctcggccaatcatcgcccttacaggaagtgacgttatcatgcctcgcccgacggaaaccagaatcgttttgggtctggtcgccaagatggcgtcctccgcctccgc

SEQ ID NO: 7773 - DNA, 122 bp, Homo sapiens
cacctcattcagtgctgaggtcaagagggaacctaggagttcacgcaaatccagggaaggcgtgggctcacctcctggggtcaggactcagggatccagtagcaggacactaccccaactaa

SEQ ID NO: 7774 - DNA, 122 bp, Homo sapiens
gacgtccatttacgacatcctttgctacctggctgaggcctgcacggtgtcgctggaccacggctccaccaagtagtttattgacgtcgatgggattcgccaggcctccgtggcaccaacac

SEQ ID NO: 7775 - DNA, 122 bp, Homo sapiens
caacagggctctggggcagaatcagcggaagccctgacgctcagagggccaagcagagggcgcaaccttagcatcggaggccagagagttaaccagagttaaactgccctattccgttgctg

SEQ ID NO: 7776 - DNA, 122 bp, Homo sapiens
ccccgccatccctcacctccatccgctgccactacccaagggcccggaaatagaaaaccacgaagggggaaaaaaatcagtaaaaagtaacaagaaaaaaatcaagaccctcatgtaattgg

SEQ ID NO: 7777 - DNA, 122 bp, Homo sapiens
cgaccaggaccctggggaaaggtgagtgctctccatggggtccgcgagctgggggcgccgcgtgacagaaaatgttggcttcggcggagctgcctggccttggcctgcagaccggcggggca

SEQ ID NO: 7778 - DNA, 122 bp, Homo sapiens
tattaacagaggtcagaatgcaggagagaagagggatggggagccagtcagagaaaggagcgcaggccttctctactcagcccaacctgcaggctcctcagtgatcccggttataccgcctg

SEQ ID NO: 7779 - DNA, 122 bp, Homo sapiens
gaggtctgagaagacagcggccaccggaaaaggtgctaatgtttgcagaccccgatccatcgacaccccaaggaaatgctgtgcacaaaattccaagagggccttttcgaatagacgcatga

SEQ ID NO: 7780 - DNA, 122 bp, Homo sapiens
acccgaccagagatatacagcaagacagaagccgtgaatggggctgcagcctggtggctccggcatgacaggtcatccatgagggtagagggctgactccttctgatcccccgagggacata

SEQ ID NO: 7781 - DNA, 122 bp, Homo sapiens
cactgcacttggctgtgattcatcagcatgaacccttcctggattttcttctaggcttctcggccggcactgagtacatggacctgcagaatgacctaggccaggtgagccacgagggatgg

SEQ ID NO: 7782 - DNA, 122 bp, Homo sapiens
aactcctaacccagcatgaaagataaactacaactcccggcaggccttgcttccgaactgcgtcttataacctcggctcaggcccaggcccagaccgctccccgcccccgccacccataaac

SEQ ID NO: 7783 - DNA, 122 bp, Homo sapiens
ttccactgcggcccagggtccacgtggacctggcggcgggagcccttggggttcgagtcccgtgcgccggctcccgaagctcccgcccagcacggtccccgggcccgggccgggaggggcag

SEQ ID NO: 7784 - DNA, 122 bp, Homo sapiens
taaaaaaaaaccctgagactcatgggctatagcgtctctctttgggggtagctactctgccggttccccagccccccaggtgtgttccagcaagctctattccactagggaagaaatgagtc

SEQ ID NO: 7785 - DNA, 122 bp, Homo sapiens
atgtaaatataaatatgaatatacacatgtccacctacttatgtgtgcactgagctgcaacgtaagatgaatttcttgtatctggttgatggtccaggtagtatgagaagcactgacttaga

SEQ ID NO: 7786 - DNA, 122 bp, Homo sapiens
gactttgacccctcaccgtcctcttcccgcgccgcgacctgcctgaaactctctgggcagcgctgcacccgcagccccgactctctcccagattgttcagggatgacagagggtcattagag

SEQ ID NO: 7787 - DNA, 122 bp, Homo sapiens
ggaatttggcagcgcggaggcttggagagaagccccatgctggctcccattcagccggcccgttttcctcgagctttggaagtttcactcagccgtgcactcaatggcttcacaaagctgat

SEQ ID NO: 7788 - DNA, 122 bp, Homo sapiens
tggtaacagatttaccactgtggataaattagaaataaagttgctccccatggtctggcccgtgcccacctgtccagcctcatcactcccctcttcacaaacacacacacacacacacacac

SEQ ID NO: 7789 - DNA, 122 bp, Homo sapiens
aacaagagcaggatgccgcctgctggtaaacaggccccccaaaacctggccataaactggcgtcagcgtaacaatgggacaagtgtgggctctggttcgttccaccttggaactttttcaca

SEQ ID NO: 7790 - DNA, 122 bp, Homo sapiens
acacaggcagacacaaagggcaggaggtcataccgatgtgtttcagatcctggcgtcatccgagctgtcctgggtaagtgatgccatctctccaatacccatgtgccttgcccataaaatgg

SEQ ID NO: 7791 - DNA, 122 bp, Homo sapiens
tccacttccaagcttcggagtttcctaaattctgggggcttgtctccctgtaccccaccccgactaattttcctcggtcgctggcgctgccccgtcccttaggtcgctcgggccgcccccct

SEQ ID NO: 7792 - DNA, 122 bp, Homo sapiens
accgggcccaggtgagtggacggtggcttcgcggttgccgcttccttgccagcgctgaggcggtttccgaagtgggtgggagcccaggtatcccctggatttgtcttcgcagtcgtcgttcg

SEQ ID NO: 7793 - DNA, 122 bp, Homo sapiens
aactgagctgacgacccggaagtgctcgcggaacctggaagtgacaccccgcccgagggacgggaggccccgcccagccctgctctcgcccgccactcaagccttgtcagggaagggcgtgg

SEQ ID NO: 7794 - DNA, 122 bp, Homo sapiens
cgttttgggtccctaaatccgttgagggttccgaatctgtcttcatcagccaggattacccgggatttaactaatgaataaaggttcctcagctcattattttctaaggaagatttccagcc

SEQ ID NO: 7795 - DNA, 122 bp, Homo sapiens
tctctacccaatagcaatttttctatattttgcagaatttatgccctaattccttttagccgtgggcttttgaagctcaaaagctcacgtttggaaactcacaatatgaggcatttgaaatt

SEQ ID NO: 7796 - DNA, 122 bp, Homo sapiens
cagcttctcacccacaccaagtcaaggatagcatgctttgaggcccaaaacaccctctgacgccattaaataatactctctgggtcctgtggccaagacaatttcaaaggcccccttcacag

SEQ ID NO: 7797 - DNA, 122 bp, Homo sapiens
gcggggcggggcctggagggtgccggggcggggccacagcgggcgggtcctggagcggctcgggagagcggagggtcggcgagggtgcctgcgcgcggctgggcctggggatgcaggttcca

SEQ ID NO: 7798 - DNA, 122 bp, Homo sapiens
ccatttgccctgtggttggttggttccttccctctgaatttaggtccatttggtttgtcccggagtgcttgtcaacccgtcagagggcctgggaacggagcatcctgggaaagatagttccc

SEQ ID NO: 7799 - DNA, 122 bp, Homo sapiens
ctagatagatatattccttcctcccaggagtattagactagctaatagtaaaggcctcaacgttattctttacttcatgttgaaaacaattactacagatatttcatccacctcagtattta

SEQ ID NO: 7800 - DNA, 122 bp, Homo sapiens
ggtgcggccaactcgggaccccctccgcccgcgcccgccgggacccccgcctgctgtccccgccccggccgcccttccgcagtcggtgacttctgcctgactccccaaagtggggggaggcg

SEQ ID NO: 7801 - DNA, 122 bp, Homo sapiens
tgggttctccctgctggattgaatgcatttccccctgttgaatgcaggggctcgagtcgtcgtgaaatttccttttgcctgttgtagatgttgtagacgctcaccagcccactgggcatttt

SEQ ID NO: 7802 - DNA, 122 bp, Homo sapiens
ccccgggtgccctctcctgcgcctgctcccctgggagagagtgcgctgctgctgactccacggtgtgctgacacacaggaagaaaggcctcaggcagtgcacactgagcccgggactgtttc

SEQ ID NO: 7803 - DNA, 122 bp, Homo sapiens
agacgggcggggcaggcgggcaagacacacggcagatgggcggggcaggcgggcaggctgcgggccacagggacacacacagaggccaccaggaggacgcagcacttggcaacacactcgag

SEQ ID NO: 7804 - DNA, 122 bp, Homo sapiens
ctgggagggtgggcacccgctcacttatagccctgtcgccctcccggcccagcccctcaacgctatatataacacaaattacagcctgcgggccgagggtgcggcccgccccttagccccca

SEQ ID NO: 7805 - DNA, 122 bp, Homo sapiens
caaagtcagctcttttcatgttgtgctcttcatgcaggagtcctgccacccaggtcctggcggctgactttggtggcagtactacagggcagatagtatttgcagaaacatggcttgagcct

SEQ ID NO: 7806 - DNA, 122 bp, Homo sapiens
agacctcggatcttttctgaatggcaggggagacccctatccccttttcctgaattccagcgaggcccagtcctcttctgagccccagccagggctctgttcttctccttctgtggatgccg

SEQ ID NO: 7807 - DNA, 122 bp, Homo sapiens
attctacccagcaactgctgagaaataaggttcgacaccattggctggttcactcacacccggccaatcctgggctctaaaatacttagggaactcttgggactgtggaagcccaggagacc

SEQ ID NO: 7808 - DNA, 122 bp, Homo sapiens
atacctgctgttcttgagtggggtagtctgtgggccttgctttgtagaaaggccattcctcgtgagtataatcataaacccactcacaaaaatggttcccaatgtcaaagcccctgggagaa

SEQ ID NO: 7809 - DNA, 122 bp, Homo sapiens
atcattaaccctgcaccaggtgccgagcctccggcctctgcagtaaattctgaggacaggcgagtgagggggctctcagcaccccggctttcatgcagtaaaacgagatgctgattgcaggg

SEQ ID NO: 7810 - DNA, 122 bp, Homo sapiens
tgtaaacacgacagtcactgtaagcacagtgggttcgtttcccggaaatggtgaaactggcgtgcctctaatcatgaaatatggcattgagctgggcactcatgactcgctcatgatgtgaa

SEQ ID NO: 7811 - DNA, 122 bp, Homo sapiens
agagcccggccaggcgcaggccccaggcgccacctggtggctgctttcaggaggggcggccgtcggtcccgagtcccccaccccatcctggacacccccacgcgcgcacacccgtggcgggg

SEQ ID NO: 7812 - DNA, 122 bp, Homo sapiens
tggtgagggcgggggaagccggcgctcgcgctccgccccggcccagggcggctccgcccccgcgcctccgccaccgcccactcacacagtgcagcacgagggcttcctactgcgcaagcgcg

SEQ ID NO: 7813 - DNA, 122 bp, Homo sapiens
tggcaccctgctggttctcgtgatgcgctcttctcgctgaacccctgaggggctcctgagcggtgaggcctcctgggcagccactaggattggaacttcctctccaccacaccagccccgga

SEQ ID NO: 7814 - DNA, 122 bp, Homo sapiens
tgcttgcggaggacgcttccttcctcagatgcaccgatcttcccgatactgcctttggagcggctagattgctagccttggctgctccattggcctgccttgccccttacctgccgattgca

SEQ ID NO: 7815 - DNA, 122 bp, Homo sapiens
ctccctgcggcagctggaggccatggtccagcaggaccccaggcactacctgcacgagagcgtgctcttcaacctgaccaccatgtacgagctggagtcctcacggagcatgcagaagaaac

SEQ ID NO: 7816 - DNA, 122 bp, Homo sapiens
ttccttctggggctggacccggaagctggcgcgcggtcccgcaagaggagctttctggggcgctgctgccagtgttgtgaggtctaaggtgtgcgttgaataaccaaagacactgggtgggt

SEQ ID NO: 7817 - DNA, 122 bp, Homo sapiens
tgatttacaggaactcacaccagcgatcaatcttccttaatttgtaactgggcagtgtcccgggccagccaatagctaagactgccccccccgcaccccaccctccctgaccctgggggact

SEQ ID NO: 7818 - DNA, 122 bp, Homo sapiens
cacttggcagtttttattggaagcctacttggagttctctgcagctttttctgaatgtgtcgccgtgtcatagcctgcgaccttctctttctcaggtttgacagccacttagccagcaaatc

SEQ ID NO: 7819 - DNA, 122 bp, Homo sapiens
cccaggaaccttcgcgcgaggccagggccttcttccagggtgcaagtgggtctcgccgcacggctctctgggattcgtagtcttgcagtgtcattcgggagttgtagttcctttcccacaat

SEQ ID NO: 7820 - DNA, 122 bp, Homo sapiens
cctgtgatcccacttcccctgagagggtctggggcgtcccgcagtctgagccattgaggccggcagtcctctttcttccccagtttccaaacccccggggggggacccgcagagggcctgcg

SEQ ID NO: 7821 - DNA, 122 bp, Homo sapiens
tcccaacccacccccaagcccccgccgccaactcctgtcttggcccctcaccctccaggtcgctcttgttctggcccccactcctgcaggccacgctgcggatggttcagagagagacgggg

SEQ ID NO: 7822 - DNA, 122 bp, Homo sapiens
ttgttttttattacaagacacattatccttttaattacaagctgtagacagggccaacttcgaaggtcttcgtggcggagtgatcttggatcattcagggggctgaaacccgatgccttctg

SEQ ID NO: 7823 - DNA, 122 bp, Homo sapiens
cgccccggaagtgactgtaacgcgacaggggccgaagccattttgcggctaaagcctttccgcccttaaaaggagaacttccgcccttaaaaggagaacttccgcccttaaaggagaacttc

SEQ ID NO: 7824 - DNA, 122 bp, Homo sapiens
acctgttattgcttttgtttctgtttgaaaggagatactgtatttttttgtatttccttacgtgtctgggcaagaggggaagataattctcccattagatgcttagaaattgttgagaaatt

SEQ ID NO: 7825 - DNA, 122 bp, Homo sapiens
atcttaattacctacgcttaattaggtgaatcttataccgtgcataatgttgctctgcagcgtgaaaatgtagacaatacattatgcgtttacacaaactatatgttaatacgtaattatac

SEQ ID NO: 7826 - DNA, 122 bp, Homo sapiens
aatcatcgccctgccgcaccagggcctgccggatggtgtccaggccgctcagcaccaccacgggtgtggagccaattcggatctgcagcacgtccccatactgctggctcatccttgacagt

SEQ ID NO: 7827 - DNA, 122 bp, Homo sapiens
tctcaccacctgccccgagcctcgcttcgccaaaggagcactgggtcctgcgcaacagctcggaggcgctggggtcctaagttcctggccccacggcgcacagcttccccaccgcacagccc

SEQ ID NO: 7828 - DNA, 122 bp, Homo sapiens
aagaagaattgacttccttctctgcagagccggctctggtctcttctcttgaagcagatgcgaaggtaggatgagaaggcatggctggccgttgcagcaggtcgttttaggagtgggggagt

SEQ ID NO: 7829 - DNA, 122 bp, Homo sapiens
tcacctcctcaccgcattccactcccgtttcggagacaagtggccggcagctactccccgcgcaggcagctcctccggcgccccagctgagctcccgccgcccctcaggctctgcttcccac

SEQ ID NO: 7830 - DNA, 122 bp, Homo sapiens
aacaatattacagataggaaaaacgtattcttttttgctttatcacctatgtagagaccacgaaaacaggctaattcctcatctcttctttctcagaacacaacatgttttgatatgggaaa

SEQ ID NO: 7831 - DNA, 122 bp, Homo sapiens
acaggaaatctggggtgcaagcggactgctgtctctcaaggaatagaagtctgtgacaaacgtatagaaatgagtttcatgttgaacaagatccgtttctgcgttcctccctcatccagcct

SEQ ID NO: 7832 - DNA, 122 bp, Homo sapiens
accagacctgaaagaagaatgaccttaacctaagtggtctagaggctattcctcggcagtcgcagatccagaaactcagtttggtcagggcactgattctattctaaacagatttatggaaa

SEQ ID NO: 7833 - DNA, 122 bp, Homo sapiens
ttgctcaagctggcctgcggaggcgacggagacactaccgagaaccagatgttcgccgcccgcgtggtcatcctgctgctgccgtttgccgtcatcctggcctcctacggtgccgtggcccg

SEQ ID NO: 7834 - DNA, 122 bp, Homo sapiens
gtggcgcgggacgtcgtttacctgggcgacgtccagccgcccttcccgcctctgcgcgtacgcaacctgcttggcgccactgacctggtgaggaggcttctttaaggccgtggacggttcct

SEQ ID NO: 7835 - DNA, 122 bp, Homo sapiens
tatgtctcaaaatgtaacacaactgtgttaatttcctagggaggccacaacacattactacgactgcgtggctttaaacaacagaaatttattcttctgcagttctgcaggctatgagtctg

SEQ ID NO: 7836 - DNA, 122 bp, Homo sapiens
cgttcccgggggtctcggtggcgggagccgccttcttgtgggacttgggggcacgtggcgcggggcggggacgcggacagacccctcccgcatcctaggaggcctgggagggtccgcgggga

SEQ ID NO: 7837 - DNA, 122 bp, Homo sapiens
gccccttcctgttctcccacccacagggtgccctaagcgcctcccctccacgagcctacacggggtgggggttgcactagttccctacctgcctgcagggcccctcaccgatctggatctca

SEQ ID NO: 7838 - DNA, 122 bp, Homo sapiens
cagctccaggagagacagaaaatcaccttttctctgtcttttccatgccatccatgcccccggccagttggatggatcccacctacgttgagggtagatgttccccactagtacactgactt

SEQ ID NO: 7839 - DNA, 122 bp, Homo sapiens
ctcacaaagcagctctggagggggtgctcagggcgaggggagagggctttttgccttccacggtggtgactttacaccagcaaagggcatatttcaatgtgggaggagggtgagtgtctggg

SEQ ID NO: 7840 - DNA, 122 bp, Homo sapiens
acaaaggccccgcaaaacccggaagccttccgcttcactctggctgcgtgcctgattggacggcttccagcccagcgtccctgattggataatgcttaaatccccgccccctcaggccctga

SEQ ID NO: 7841 - DNA, 122 bp, Homo sapiens
gtcagtcagacacttctctgcttccgttggcgggaaggcttcaggcgggtagcggggactcggtactgccccctcccaagctgggagcagggcgcgtgacgtctcagacatttgttgttggg

SEQ ID NO: 7842 - DNA, 122 bp, Homo sapiens
gagtgtctgcgagcgtggtctcgcgggcgggtgacgtcatcgaggcgagagaggcggagccgtggacagtgggcgggaggctgccaacggttttgagcgtagggggaggcgtgagaggggga

SEQ ID NO: 7843 - DNA, 122 bp, Homo sapiens
cagggaggtcctggtttatttttagagtcacattctttctgcagtgatattatttctttccggattgcagttacctctgaacattagcaggaggtcagctttggaagagtaatccagtgtaa

SEQ ID NO: 7844 - DNA, 122 bp, Homo sapiens
ccctggtcaggaagataggttatttggtgctgctatgttattttttattttgcctctttacggatgtaaggaagagacatgcccacgttacctgcgagccatctctcagtggcacagaatcc

SEQ ID NO: 7845 - DNA, 122 bp, Homo sapiens
ggaaagcccggcgtgtctggcctccccagtgctggacggtggccagtgtggttttccaggcgagtccgtgggctcctgggtgggtggtcgggctcgtggggagatcccaagcaatggttgta

SEQ ID NO: 7846 - DNA, 122 bp, Homo sapiens
cgtcgtcttcgtccttcgctcagcagcgcttcggggccatggggggaggcggcccctccgcggccggcgggggaactccccagcccaccgccacccccaccctcaaccaactgctcacgtcg

SEQ ID NO: 7847 - DNA, 122 bp, Homo sapiens
aagtcgagggtttggggcaagtcctatgaggatcagctggagccgggaagctggaatggccgggtttgcctcccggctctgcaggaaacacttgtgcttgatgttgaaagtcattggtggtc

SEQ ID NO: 7848 - DNA, 122 bp, Homo sapiens
atagatgaggaaactgaggcacacagagatgacaagcaaccaccgctatatgttaggattcgaaggagctccaggaaagtctcatagccccactggccagaatgggctaaatctcagagggg

SEQ ID NO: 7849 - DNA, 122 bp, Homo sapiens
gacccccgggcgaccccggcatcgcctggctgcgccgtcccggcgggccggccctctccacgccctctcctggggtttgcggtgggcacagctccctccagactgggtctctccactagcct

SEQ ID NO: 7850 - DNA, 122 bp, Homo sapiens
ggagacaccacttgtctttaggtgggtctcaaagatgatgtagaatttcctttaatttctcgcagtcttcctggaaaatattttcctttgagcagcaaatcttgtagggatatcagtgaagg

SEQ ID NO: 7851 - DNA, 122 bp, Homo sapiens
gcctgttgcttctttaaaaaggaacgtactccccatgtgtcctcatgtctctgacgggaacgtgctccccacatgtcctcaggactgatgggaacgtgccctcaccacatgtccttgggatt

SEQ ID NO: 7852 - DNA, 122 bp, Homo sapiens
ctcatcagtccgccggggccgcagcagcgcttctgggaagacgggcgatgaactgaagggcggctccgggcaggggggcacgatcttaaggacagtcgctccctgaacgcggagccggagga

SEQ ID NO: 7853 - DNA, 122 bp, Homo sapiens
cgcggaggcagtgatttaggtgccggcaccggagcgtgaaggtaaatggccacatttcaccgtcgggaggtgagccggaggcgcccgccctggcccttcccccaaggccccgggccggtggg

SEQ ID NO: 7854 - DNA, 122 bp, Homo sapiens
gggctcctgctactatttctctgtgccgaagaccacgtgggcagaggcgcagggccactgcgccgatgccagcgcacatctggcgatgtagggggcctgggggagcaggtgcgcaggaggag

SEQ ID NO: 7855 - DNA, 122 bp, Homo sapiens
agcaaatgatctgcgctcaaaaagcgagctgctttcaaagatattagtattttatagatgcgatgcaggagagtgaactcaagcagagcccagccgattgcctgcgttggcaaaatagaaca

SEQ ID NO: 7856 - DNA, 122 bp, Homo sapiens
gcgcttcgagaacgggagcttagagcctcggaaatgcattgagcacgcaggaaagccaaccgactgctcttttaagggcaggcaaatgtgtgttttcgcacagaggcttattggattaagta

SEQ ID NO: 7857 - DNA, 122 bp, Homo sapiens
tgaagtggcagcgcggcccataggggcagaagccgatggtatgaaaggtgcggcacagctcggtcttgtacttcggatggcgagtcaggctgcgcagctcgtggaagccatgcgcgaactgg

SEQ ID NO: 7858 - DNA, 122 bp, Homo sapiens
cggaagtctccatttacccaaaaatgcaagagccatgatcagtcatggcgacactgcaggcggtactgagtgaccatgtccagtccggctccgtccctcccacacgggggacaagcttctcc

SEQ ID NO: 7859 - DNA, 122 bp, Homo sapiens
gtggctcgcgaccacctattgtttaccgggccgggagccgtaggcaagtgaggtgcaggccgggggggggggctcgcgtttccacacctccccgcgcagttcgctcctcccaggagggtcga

SEQ ID NO: 7860 - DNA, 122 bp, Homo sapiens
tcctgactactctatatgctgcatagaacctggagaggatttttcaaagtaaatgaatctcgaaagctggattgcagagcaaacgagtgcagtcaattcagccaggggcttgcaagagggag

SEQ ID NO: 7861 - DNA, 122 bp, Homo sapiens
caacatgagggtgacacaattgtgacaagtcactgacatgtaactgacacgtgatggacacgtgtgacatgaccaacatgtgttacaggtgactgacgtgtgtaacacgtgtgacatatgac

SEQ ID NO: 7862 - DNA, 122 bp, Homo sapiens
gccagaccaaggtgtgcacagaggtcaggcactggccacgggagccaccccttcaatttacgtgttcagagttgcaaatggagcagaattttatttagaaaaggagttgaactaagctgcac

SEQ ID NO: 7863 - DNA, 122 bp, Homo sapiens
taccaaggcgtccgcggcgcttgggggggagcccgcggcgcggcggcctaaggtgcgtaacgccccatgaacgacatcttccggtgggttagggagagacacccccctgtgacttggtatca

SEQ ID NO: 7864 - DNA, 122 bp, Homo sapiens
gggcggcggcggcgagggcatctcccctgctcaggtcgccggccgagcagtccccgcggccgccttcctgggaaacaaggtcaccgcccagccggtccctccgaggaggcgcggagcccctg

SEQ ID NO: 7865 - DNA, 122 bp, Homo sapiens
tccggatccagagacgccccgccccacgcgtttgtgcagctcggaaggcgctgcctgtcccggagctccgcggccctggagaccctggcacagtgtcacttttgcacccttccttccccgcc

SEQ ID NO: 7866 - DNA, 122 bp, Homo sapiens
gctggcagagaccagagctgccaccaatgctgcttccaggagtgtgcatgtggcagctgccgctgatcccgcggcggaggatggcagggcttgttccagaaggcttgagggtccgcgagtgc

SEQ ID NO: 7867 - DNA, 122 bp, Homo sapiens
catgtttgtgcccttagtcaggccctgctaaattcttgctaatattcttccagcttagctcgttcatctcctccaatctaccctcaaagcctctgccttagagacttcactaccaacaatga

SEQ ID NO: 7868 - DNA, 122 bp, Homo sapiens
cacgaataatacccaggatagtaaccattctgtggcctgagctggccagacgtcatgccccgaaggagctaccaggtgtgggcgctgcaggacccctgcctggggccgcccgctcgggcccg

SEQ ID NO: 7869 - DNA, 122 bp, Homo sapiens
ggggagaggtataaggtgtgcggctaacaagtttatttttctagtcgcagaatttggactcgtgaaagattttagtctaatgcagtttgttcacaaatataaggaggggggcctcagactag

SEQ ID NO: 7870 - DNA, 122 bp, Homo sapiens
atcaacgttctaatttggaacacctcagagagcagattggaaccagaggcctgtcaatcccgtccgttctgtcctttccgaggcgcttccgctgtggtgggaggtttgggggggggtagagg

SEQ ID NO: 7871 - DNA, 122 bp, Homo sapiens
gttacggcctgggaagggagaggcggtgagcggcaaagcccggaacggatgaagctccggcgcctctgtccggaagaggagagccaagaacacgcgagcatgtccgaagcagaaagtcaaca

SEQ ID NO: 7872 - DNA, 122 bp, Homo sapiens
aggcagtggcgcagcaaagtctttcctgcagccttatgccccatcaggagcagcttgagccggggctgcaccgccggctgggaatgagccagttccttctggtaggctgcgatgtaggggat

SEQ ID NO: 7873 - DNA, 122 bp, Homo sapiens
ggagtgggtgcgccccaaaggccccgcccaaggaagggcacgcttgcgtgctcgcggcggcggccatcttggactcgggcagccgcccacttctaacctctatggcatcgctccgggaggga

SEQ ID NO: 7874 - DNA, 122 bp, Homo sapiens
gcgtagggcgcggccttggggcggggcccacccagtggcggagtcttctgaggggcgggtcgtgggcggggcctggaggcggagccggcgccgtcagtagtcggctgaggacggaggcgggg

SEQ ID NO: 7875 - DNA, 122 bp, Homo sapiens
aggcgcgcggcggcgactccggggtgacatcgagacagcctctgggctgggagagccctgcgggaagaagggagcccgcccggtccggaggggagcgaggcggttctgagggaggccggcgg

SEQ ID NO: 7876 - DNA, 122 bp, Homo sapiens
gcgttcagacttctggatggagggatcagcaggccttggtattggtggttctacctgcttcggttaagagtgaggactctggagccagactctctaaatcatagcactgacacttactatat

SEQ ID NO: 7877 - DNA, 122 bp, Homo sapiens
gatgaatgcacgaacaaaacataggtccatacaaaggaagtcattgcattgatccagattcgacctgggattgtcgcataaaacagggctgataaaaaccgtcgtgttttcaccctggaaac

SEQ ID NO: 7878 - DNA, 122 bp, Homo sapiens
acaaagatgcaagagtcacaggacagcacaggtggggcagggttccggttcaggcctcaccgtcaggagctcccttgctggcctctcattcttctcctccagttcttcaataagagcactaa

SEQ ID NO: 7879 - DNA, 122 bp, Homo sapiens
ggataggcccatcttgggccagatgtccgtctcaatctgacagacaacatgggagaataacgctactaaacacattttattcttttattttccaattacattaacaaagggcagcttgctgg

SEQ ID NO: 7880 - DNA, 122 bp, Homo sapiens
accaagttgccaaaaaaaaaaaacggtcccctcagataccatgcacggttactaactgcacgtctgggtacagagaaggaaaaatcatctggtcaaaagcccaaatgccgccccggcctacc

SEQ ID NO: 7881 - DNA, 122 bp, Homo sapiens
ccattccccgtgcactgccacaaatggtcgccaggtaattctcacctgcagcctggatgccgggatgaattcagagtccagtctcaacttggccaataaaggctcagtctcaacctccctat

SEQ ID NO: 7882 - DNA, 122 bp, Homo sapiens
tcaacgtcccagtataacttcaagggagcgcaactccagaggctccctggacgaagctaccgccccggaatcagggccttcccaattctgccttcggggagggaggatgggggtgggccgcg

SEQ ID NO: 7883 - DNA, 122 bp, Homo sapiens
cttccactctctactcccataagtttgagtgtcttcaggtaggtgagatcttagggtgctcggcttcatgcatctggcttatgtcacttaataccatgcattcagggttcagccctgctgcc

SEQ ID NO: 7884 - DNA, 122 bp, Homo sapiens
tgattgggcccggtggtgtgggcagggcaggttaggtgtgtccgctcctttcacactcaccggtggtcgggcggcggaggcggtgggagcgccggagttggatgtgcgcacatcgggtggtg

SEQ ID NO: 7885 - DNA, 122 bp, Homo sapiens
tccacgcgcaggggcccgggaaagggtcagaggcttcctaacgcagactcgagtgcgaagcgcgcagtcgccgggtgggtctctccccagcgacgatttgggtggtgagcgactgcgccttg

SEQ ID NO: 7886 - DNA, 122 bp, Homo sapiens
aaacatgcaggcacacatgtacacacaggtattcatgcacaaatgtgtcaagttattgctcgcttggtgccagcaaaagacacacccatggccgggcgaggtggctcacacctgaatcccag

SEQ ID NO: 7887 - DNA, 122 bp, Homo sapiens
tagccctgcacatgccacacctctgctgccccgaccctggtcccagcctccagcatctctcgctaggtagctaggctaacctcttaactagtctctgtctgccactcccatggtgggtcctc

SEQ ID NO: 7888 - DNA, 122 bp, Homo sapiens
tcaagggagcagattcaaatgatggaaagatccagaagttgggagccattcatgtggttccgttccatagatatgaagtagaagttttagaacagggtttgttgaagtgtggtttgtagacc

SEQ ID NO: 7889 - DNA, 122 bp, Homo sapiens
gcaatgaaatgagaaactttttcataatcggaaataggtggaaaccccacttgtttttaccgtaaccaaacacattctgaaagagtgaaataatgttttacttcctttctgcattgctcgaa

SEQ ID NO: 7890 - DNA, 122 bp, Homo sapiens
actggggtgaggatagtgtaggatgaagaactcactcaaagacacaggagttgactcccccgggcgccccgacgacagccaagaaggaggccatgtcccccggggctcccgagccacgcttc

SEQ ID NO: 7891 - DNA, 122 bp, Homo sapiens
cgcccgccctcagtgagatccccactgagggttcgcggtgacaaggctggagggatcccacgctcgccgcctccgcccggttccctcatcccggcgcctggcccgttcctcccttgccggcc

SEQ ID NO: 7892 - DNA, 122 bp, Homo sapiens
ctggcgacagagcaagactcccgtctcaaaaaaaaaaaagtttgtaagcattttggatttcggattttccgattagggattctcaacctgtagtttttgattttgggcaaattagttgactt

SEQ ID NO: 7893 - DNA, 122 bp, Homo sapiens
agcagcgggggagccttggccgaagagaaccatgcttggcaccgtctgtgtcccctcggccgctggacaccagaaagccacgtgggtccctggcgccctgcctttagccgtggggcccccac

SEQ ID NO: 7894 - DNA, 122 bp, Homo sapiens
attgagtcacgccatcatttatttcggtcagcctgattcacccgcgtttatttgacgcgtcgggttataagtcactccacttcattttcttgctgcaagtgtttcgccttcagccacaggaa

SEQ ID NO: 7895 - DNA, 122 bp, Homo sapiens
attttcttatactttcagtatactccatagaccaaagagcaaaatctatctgaacctggacgcaccctcactgtcagggtccctggggtcgcttgtgcgggcgggagggcaatggtggcaga

SEQ ID NO: 7896 - DNA, 122 bp, Homo sapiens
agaatcggggtgactggatgggccccaggagagggctctggtggttctgaactaggaacacgcagcctggcactgcagggcgtgcaccttgcagcttgacgtgcggagctcccaggtctttt

SEQ ID NO: 7897 - DNA, 122 bp, Homo sapiens
gccttaactagtctgccaacccattcttgagccaggaggcttagtttccttcacctacaccgtgagtgtgctgttgaatcataatggtgactaggtgatgaggatgaagaggaggtggggga

SEQ ID NO: 7898 - DNA, 122 bp, Homo sapiens
tacttagagcaaatgattagttttagaaggatggactataacattgaatcaattacaaaacgcggtttttgagcccattactgttggagctacagggagagaaacagaggaggagactgcaa

SEQ ID NO: 7899 - DNA, 122 bp, Homo sapiens
gacctcgggtgattcgccgcctcggcctcccaaagtgctaggattacaggcgtgagtcaccgcgcccggcctggagtgtgtattatcccaattttatggggagtaattgtgctcactcggct

SEQ ID NO: 7900 - DNA, 122 bp, Homo sapiens
acagctctcggttaataaccagtttctgcaagtagcagcagcagcagcagcgtagggtcacggttaggaatttgggcttgggcatccaagacttggccccaacttccagtgaattacttcat

SEQ ID NO: 7901 - DNA, 122 bp, Homo sapiens
aaatatacaaaaaattaatcagacatggtgatatgcgtctgtgggtcccacctatttgggcggctgaggtgggaggatcacttaagcccaggaagttgaggctgcagtgagctgtgatcgtg

SEQ ID NO: 7902 - DNA, 122 bp, Homo sapiens
tgccaacttcccacgggttgagctctctgggaacaggactgagagggacccaaccctaaccgcacgagccgcacactcagattggtgccatcgggcgcgcggcgtccttaagagctccctga

SEQ ID NO: 7903 - DNA, 122 bp, Homo sapiens
gcgtggacggtgtcgcctcgtgtgctcgtgctcgtggctctgtatccgtggcactgtctccgtggcactctgctcccttggcttgcctgtggcccatagccccagccctcctgtctgagctt

SEQ ID NO: 7904 - DNA, 122 bp, Homo sapiens
ggcgctggggagggcgaggcggaggcggcaaaacgggcggtcgagcagaacgtgtagccgcgtcccctccagtccgctccgggcaggtaagagtcccaggaagccatggtcccgcagcgagc

SEQ ID NO: 7905 - DNA, 122 bp, Homo sapiens
gttcctcgctcggcctcgcccagcaggagccagaccttttactttatttggttcaccacgcggtctctgctccagagagcgcgccggcggcggcgcactcgggccctcgcgcgcactcgcac

SEQ ID NO: 7906 - DNA, 122 bp, Homo sapiens
gcgaggagccgacggctccacctgatggagaagcgcggagagtccctagacctcggagtgcgctgcaagaggggagaggagagagaccgccgcccctgctggaagccttcgcgtccgggggc

SEQ ID NO: 7907 - DNA, 122 bp, Homo sapiens
ggagaggcagtttgagtaagggcagccgacagcaagcatggagctcgcacacagctctctcgccttccaggcgtggctcagtggcaccatccttgtggcctcctgtcttgtgaccatgagca

SEQ ID NO: 7908 - DNA, 122 bp, Homo sapiens
atggacatcgtggaacgggagctgcacctgctcatgtgccagctgagccaggagaagccccgggtccgcaagcgcaagggcaacttcaagcgcagccgcctgctcaagctgcgggaaggcgg

SEQ ID NO: 7909 - DNA, 122 bp, Homo sapiens
gctatccgactctggccgaaactcactgtccagcctgcccacctacagcaccggaggtgccgagccaaccaccagctccccaggcgggcacctgccttcccatggctctgggcgaggggcac

SEQ ID NO: 7910 - DNA, 122 bp, Homo sapiens
agggacactgcaggtgtactcggacagcctgctgacgctgcctgccattgtgggcattggcggaggcgggggtctcctgctgctggtcatcgtggctgtgctcatcgcctacaagcgcaagt

SEQ ID NO: 7911 - DNA, 122 bp, Homo sapiens
tgacagggggagagggcggtgagatctacaggagaactcagggcggatgtctgccgggtgcgcgttgggctttctggtcgcttctctgcgaacgcgcgcttgttcctgcggcggtgcctgcc

SEQ ID NO: 7912 - DNA, 122 bp, Homo sapiens
tacttaaagctaagtcttaagtcttaactttgcatttgtgtgtgtgtgtgtgtgtgcgcgcgtgtggccaaatatttcagggtggtggagccaaaactgaaaatttaggtttagcaagtaat

SEQ ID NO: 7913 - DNA, 122 bp, Homo sapiens
gcaccgaagctctggctggccctgagcctccccaccccacccgctcttttcgctggaacgcgtgtactttgggcagttgctgacgtggagacaggacgtatgtcttcatattttagtaaaac

SEQ ID NO: 7914 - DNA, 122 bp, Homo sapiens
caggggcctgggcgggacacgggaggggttggggccgagtgtcgcccttctttttcagcccgttcaggcctctagtctccctggaccccaacgacagagctcgcgaccgcagccctgagccg

SEQ ID NO: 7915 - DNA, 122 bp, Homo sapiens
tctagatgacactcttggaaatgcacaaacaatggataagaactatgaacaagaagattccgtaggattcaacctatcagagaggaccttgaagttctgctttatgagcctgcaggcaaaga

SEQ ID NO: 7916 - DNA, 122 bp, Homo sapiens
tgggattttagtaaaaatcagcttgcctaatttcatattcgtgttcataatgaagaaatgcgaagtggtggtagtcctcaggattaagtgtaaaggaaaatatgcaaggaaaaagtagcagt

SEQ ID NO: 7917 - DNA, 122 bp, Homo sapiens
agtagaagcgcttaagacttgcaaacacccttggtggggacctggaaccccgggagatgccgacgagcaagcaggtaagtggcggcgccctcccagtgggtgctcttcccaggcgcgagagt

SEQ ID NO: 7918 - DNA, 122 bp, Homo sapiens
attttaaaatgtaatttaaccaagactactttagctttcacctcagcttactttagacagcgcagactgcctctaggctcctgaaccagaacatttacttagagcatttactttagaaacct

SEQ ID NO: 7919 - DNA, 122 bp, Homo sapiens
tagaccatctttgtatctggtttttgctctctttgcttttgctctgagattctgcaacaccgatttatatgtgttgagacagtctaaaaaattccatttctccccttctacaattcctgcag

SEQ ID NO: 7920 - DNA, 122 bp, Homo sapiens
ggtagtagcgttagccgccatggctacgccggaagtggcctgccttcattgatggtgggacgactttgaaaagcgcgcttccgctttttccgcagcccaaacaggctcgaccaatctgaggc

SEQ ID NO: 7921 - DNA, 122 bp, Homo sapiens
ccccaggtgcctccccggagcgcgagcgcccccaccgcctacccgggccggcggttcccccgcactcaccatcgtggctgggccgccgcctcccccgccttgcgagcaaggagcgctggaga

SEQ ID NO: 7922 - DNA, 122 bp, Homo sapiens
aaggtaaactcaagtgctgtaagtggaaccagcctgcacagtcagtcaagggcaaatctccgtcaagttgtccatttgacatgtggctttgcacactctcactgggctagatgtcgggtcct

SEQ ID NO: 7923 - DNA, 122 bp, Homo sapiens
gcggaggtaattgtgatgccacgggtggaaccctcagtctccttggtccaccctcagggtcgatggaaccgcccgctcccgccccggcgtccgggtgggcgctggtccacgggctccagcca

SEQ ID NO: 7924 - DNA, 122 bp, Homo sapiens
agatcatcatctatgtatcaatcagacaccactgaggggtccctccctccagtttcatcccggtgcacttgccagagcactcacagactccccatccacactggtctgccctcctactggcc

SEQ ID NO: 7925 - DNA, 122 bp, Homo sapiens
tccccaccccgggcccgtggtaccttgcacaggcggatggcattcttgaaggcctgtgcccgggtgtagaagtgcaccgcctgcccgacctcctcctggctctcgtactggcgggcgaggtg

SEQ ID NO: 7926 - DNA, 122 bp, Homo sapiens
gtgcaattcaacgctgaatacagggttccaaatgcagttaacatcaactaaagaatttagcgaaagggtgtagcagagtgtaagttggaattaaatatgggtccttggtctgatagagaaca

SEQ ID NO: 7927 - DNA, 122 bp, Homo sapiens
ctgctccgcgcgtcggagctggccccggacctctcaggcgcgtccgcgggggggcagctgcggccacggaacctcgctgcccgtccccgcccagtctaagctggccccgggggcccgcccgc

SEQ ID NO: 7928 - DNA, 122 bp, Homo sapiens
acacgttggtcctaggtttctacgatgacgctccaccgcaggaccatttcctgacggacccggctttctctgagcctgcagacagcaccagggagggcagttccccagctctgagcaccctg

SEQ ID NO: 7929 - DNA, 122 bp, Homo sapiens
gctgtgatcttttttttttttgcagaaatattacaactccactgatgagaaaactcacttcgctttcagtcaaaaccagaaattagataacagaaatgccacactgtcaacaccgaccggga

SEQ ID NO: 7930 - DNA, 122 bp, Homo sapiens
aaaccttacagaaacatgaagccctcaaccatctgctactcagttattcggggctgacggcggcttctagaacatccaggtgttctgcagatgcgagaactcatcctgtagtcaccagatgg

SEQ ID NO: 7931 - DNA, 122 bp, Homo sapiens
catcatgtcactgtcgggggtcccagcccttctcagccttgggccagaccactccagccccgggatctgcctgtccaggctggctggaagctgttgtactgggtaaaagtgaaagatctgcc

SEQ ID NO: 7932 - DNA, 122 bp, Homo sapiens
gggccttcccgctggcaccttttcctaggtttccaaccttcctccccattcccgttcctacgggagattaacacacacacaagccttcgtcgtccagtgcatggtcacttgcacgtcttgtt

SEQ ID NO: 7933 - DNA, 122 bp, Homo sapiens
gcgtccctgcctagcgaggccctgccccgcgacctgccgcaccctcctccggcctgttcgcgacctctaaagataatacttctcactgtcgaaaacgtggaacagaaagcaaggaagcaagc

SEQ ID NO: 7934 - DNA, 122 bp, Homo sapiens
ctgaagccagataacccaaggtattcacagcaagatacagtgagtcttaaagttaagcaccgtgcaattagctttgcttccttgggtttttgaaacatgcatctgtataaacctgcctgtgc

SEQ ID NO: 7935 - DNA, 122 bp, Homo sapiens
ggatgagcgcggaggcggcggaccgggaggcggccacctccagccggccctgcaccccgccgcagacctgctggtttgagtttctgctggaggagtcactgttggagaaacatctgcgcaag

SEQ ID NO: 7936 - DNA, 122 bp, Homo sapiens
cgagcaggatttcctcccgtccttcctgtcaaaggacgggaagactttgttaccccaccgcgccccacctgcagaatggtggacagatacctccagatgccacttcccccaggacgcccgcc

SEQ ID NO: 7937 - DNA, 122 bp, Homo sapiens
atattaccctttttagcttgataaagatcaaagtcacgtaccaaatagtctcttggaaaccgtacatacaactcctggtcttctctggcagtaaaagtctgaaagctgtttttgaattctgc

SEQ ID NO: 7938 - DNA, 122 bp, Homo sapiens
accgacggctccagccgggccttcagctacaccgaggtggaagagtgcggctgcatgggccggcggtgccctgcgccgggcgacacccagcactcggaggaggcggaacccgagcccagcca

SEQ ID NO: 7939 - DNA, 122 bp, Homo sapiens
gacgcctgggtccttcgggctccgccccagggggtggggctatatgttcggaccaatgaccggccgtccctgcggtcccgccccctccccgcccccggagccgcggcctcgctgagtgccca

SEQ ID NO: 7940 - DNA, 122 bp, Homo sapiens
aagagccagtttgcagccagccggtcgcctctcgggtccaaacccgaggctggcccacggcgagtacccgggtggggccctaaaccacaggaggggccacctccaaaagaaaagagaaaaca

SEQ ID NO: 7941 - DNA, 122 bp, Homo sapiens
gcggggcgcgagggggcgctgtggctggggtgcggcccgggagggagcccggggccagggcggaggagccgggagctgagagaccgaacctgggacttctcagcactgaagccgcaggggca

SEQ ID NO: 7942 - DNA, 122 bp, Homo sapiens
ttagaaaatataggccaggtgcagtggcagtggctggcggatcacttgaggacaagagttcgagaccagcctggccaacatggtgaaatcccgtctttactaaaaatacaaaaattagccag

SEQ ID NO: 7943 - DNA, 122 bp, Homo sapiens
ccctccgccgaggacatgcctgttcgcggggaccctccgccgaggacacccctgcgctcgcggggaccctctgctgaggaaatgcattgtgttccaggtgggcactctggtgggcgtgaacc

SEQ ID NO: 7944 - DNA, 122 bp, Homo sapiens
ctacgtgtagcacagggagccagggcggcagctgcacctgcgagcagcgcaggcggcaggcgcggcctccgggcgtggtggtgggcgtggccgggcggcgggggcgtggccgggcggcgggg

SEQ ID NO: 7945 - DNA, 122 bp, Homo sapiens
agaaaccatctccatctcccttaccacctgaggggtcactggtgaccacacccatggaatcggctggatctcctgcggggctggacaatttgaccctcctcctccccaggccccgccccttc

SEQ ID NO: 7946 - DNA, 122 bp, Homo sapiens
tcctgatggcctcctggagctggagcttaggccaagccacagggcatcagggaggatggacgttcaagggctggatctgtttgccccagggtcctggcacccaacagaaaggaaagccaggc

SEQ ID NO: 7947 - DNA, 122 bp, Homo sapiens
tcttccaagagagaccagatgagccaattactcagtagtttagaggaaaacctcaatgttcgttctccctgagccattaggtttacaagtgacatttatttatttatttttgggatggagtc

SEQ ID NO: 7948 - DNA, 122 bp, Homo sapiens
tctggctctctctcatctaaaagaacccaggaaagagaagcctgcagaagcgagtgctgtcgaatctcacgtgtgatctccacagagcacagcacagccagccgcctgctcacgtaatgtac

SEQ ID NO: 7949 - DNA, 122 bp, Homo sapiens
ctgggttgggccgcgaaatatgggacctcaggcatggaattgtggctgcacaggtgatcacggcttcctagtccttcttagagcagaacctgtcccactccagcccacctctgcgccccctt

SEQ ID NO: 7950 - DNA, 122 bp, Homo sapiens
ggagggggcacgggcccaccccaacccacagcgacccacagagggcgaaaagaggacgaccgcagagagaaacggaaaggacaggccaacggaagcagtactgcaaggctggaaggagaaaa

SEQ ID NO: 7951 - DNA, 122 bp, Homo sapiens
tttgcatggtaagcagtcagggagctcatgagacagagcagccccctggcaaaggagatgcgtccccggcacactcattacttgtagctacaggaaaattctcaattacggcgtcctggctg

SEQ ID NO: 7952 - DNA, 122 bp, Homo sapiens
tggaggccacgctctgtgggaaagcacggggcatgcaaactcgaaatgaaagcccgggaacgccggaacaagcacaggtgtaagatttcccttttaaaacgtggagaataagaaatcagccc

SEQ ID NO: 7953 - DNA, 122 bp, Homo sapiens
gagcgcgcaacagtaagccgtgtcggcaccagactctgttggtcctactgacacctccagcgttagaatgactaaggctccactcctgacccaccggccttgaggaaagcgcaaacgtaaaa

SEQ ID NO: 7954 - DNA, 122 bp, Homo sapiens
tgctcaccagcacaatgatccagttccagcggaagtgcagcatcagctgcaccatggcctcgatgtggtggtcggcgctgggtgtggtacgcagcaaagccgggaagcgcaccttgtctcgc

SEQ ID NO: 7955 - DNA, 122 bp, Homo sapiens
cagagaccctgtttctaaagaaacaaagttctatggcttccgccttgtagttttggcccacgagccacacagaagtccttgcattgctctgggcctctcctttggggtaagcatcctcccct

SEQ ID NO: 7956 - DNA, 122 bp, Homo sapiens
ggggggccgggccgcggctgccgcgcagggcctccggagggtcggggggtcccagactcacgcattaacgtgctgaaggccacgacgccgagcagcccctgcaggaagatgccgaagctgtg

SEQ ID NO: 7957 - DNA, 122 bp, Homo sapiens
ggaatggaagacaggaagggtgtcccttctcagaggtcgcactttgtcagcagttcctctcgactgctctgccttccatttttcctttcctcagttcctggacaagcctcggaggaccaggc

SEQ ID NO: 7958 - DNA, 122 bp, Homo sapiens
caaacatgcctccttccttcccggggccctggaaggagctgcctgcctgaagcccggagacgccgcgccgcgctcagccccgccgccgcccgccggctctcgggctgtgctgcgctgccgac

SEQ ID NO: 7959 - DNA, 122 bp, Homo sapiens
tgcgccgctgcaaggtcggagctgagactggcgtgcgttgagacaggctgatggacggggcggggcctcagtgacggagggggcggggatcctggggcagggaccggcggagcctcccggga

SEQ ID NO: 7960 - DNA, 122 bp, Homo sapiens
taaataaataaataaataaatagcgaaaaaaagttctttctaacacctccctactgagaccgccatagtgccctatgacatgtatgagctctctctccctctctctttctttctctctctct

SEQ ID NO: 7961 - DNA, 122 bp, Homo sapiens
gcttctccgttcatcctccagctgtccagccacctcctcggtcgtgctggccgggcaacccggggtcaaagccacctcaccctttggaagacataccagttcccactcaggaaggctgagag

SEQ ID NO: 7962 - DNA, 122 bp, Homo sapiens
cccctagagggttcagagggagcatggccctgtggaccccttgatttcagacttctgagccgacagaactgtgagacaatacatgtttgtttggtacagccaccctaagaaatcaatgcacc

SEQ ID NO: 7963 - DNA, 122 bp, Homo sapiens
cccaggtccatggtcttttcaccgaggcttcttatcatccggggcccacacctggcgccccgtgtgctgccagcactccttcctgggcaaagtccaggctcaaccccaaatcggcctcataa

SEQ ID NO: 7964 - DNA, 122 bp, Homo sapiens
gcttgtccacaagtaaatctgaaccatgatgactctagaacccagggcttgatccttctccgtctcagaggggctacaattcaatccagtttttttgtgatcagcttcccccagaactggtg

SEQ ID NO: 7965 - DNA, 122 bp, Homo sapiens
tgtgtccatgcagatgcatgctctcacgcacatgtgcccacacactcagcactcacaccccgtcctgcaggctcagccccactcctgagccacctgcctgggctttgggggcccagccggca

SEQ ID NO: 7966 - DNA, 122 bp, Homo sapiens
cgaatgtcttccctgtgcgcagaagcaagggcgggggcgtgccatcctcacccggagcgccggccgagcctcccgcctcccaacgcctggccagggccccgtctcgccctctgcacatggga

SEQ ID NO: 7967 - DNA, 122 bp, Homo sapiens
caccccccactctcgcttcccctctcaaacttctcggactcaggtggaattctgctcctgcgctctgccctagggttggggggggagctggttgtggagctggggggaggcggagcctgggc

SEQ ID NO: 7968 - DNA, 122 bp, Homo sapiens
caaggttatttaccctgcgactgtaattcttggcacaaattctccctttacactcagacacgttttttcttttgttccaacttgcctttggaatcctgattagggcgttaagagagggaaat

SEQ ID NO: 7969 - DNA, 122 bp, Homo sapiens
tagcccggggccgcttggagtcgcccggacctgagaggctgctgcactgggtacgggggccgggaggaggaagggggctgggggcgggcggcgggaggggctggaccgcgtggagggtacct

SEQ ID NO: 7970 - DNA, 122 bp, Homo sapiens
ggtcaggccatcgccggtgaagccctcctgacaggtgcacgtcgtaacggcctcatcctccgtgcaggtggcattgctgtgacattcagagcaccatcctgtggacagaaaagcccagcttc

SEQ ID NO: 7971 - DNA, 122 bp, Homo sapiens
cctccgctatccccctgaccagtccggctccccgcagatgtacgtgactctcgtgttccgcgtgaagggctcccgcctggtcaaaccctcgctctgcctggccttgctgtgcccggccttcc

SEQ ID NO: 7972 - DNA, 122 bp, Homo sapiens
aaggaaccgaggttgggtgggcacttaccagaggtcagagcgtgggtgatggcggtgccccggccgtccgcggcgcttggcagaagcagcatgatggcgccgggtctagcccggtgggcgca

SEQ ID NO: 7973 - DNA, 122 bp, Homo sapiens
tcacctcctcacatatgtgctgcagtgcggtggtgcggtgcttctggctgtgtagcgctccgtgtgcgtgtctcctggtatgaggtgtgccagtggccccactacgctcgcgcttttggcct

SEQ ID NO: 7974 - DNA, 122 bp, Homo sapiens
catcaaagccctcctttgtgtgctcctgctctggagttcctgctcggccatgtggaagcccggctgtggggctgggatctgggccagtcccattccctcttttctctgccctctttctcctc

SEQ ID NO: 7975 - DNA, 122 bp, Homo sapiens
gaacacccctcccctcccctgagcaaatgctttcttttgactggaaacaaaacaggggctcggcgaaggctgaggtgaaatctgggtggcatgggcgccgcacaatggggccgctgttcccc

SEQ ID NO: 7976 - DNA, 122 bp, Homo sapiens
gcaccaggaggcaggtgtgagacggctgtgtccccagctcctgctgcagttggcccacagcgggcccctacgaggctgggcggtgaggggacggctcggaccgcccgcgccccaggacccct

SEQ ID NO: 7977 - DNA, 122 bp, Homo sapiens
ggatacctggctcaaatttctcagtccccaagcaggccacggggactgcagcaaacagagcggcagaaacaacccacccaccaattaaagtcaaaccagccccaaacccctcccccaggaga

SEQ ID NO: 7978 - DNA, 122 bp, Homo sapiens
ctctccagcagagggcgccttttccactgggtctcactgtgggctgctgggagttttattcggtttgggccgggaaggagctgtgctggatccgcgccccctgccttggcgccgcctctggc

SEQ ID NO: 7979 - DNA, 122 bp, Homo sapiens
ggcgtggccactgctgtcgtgggtggctcacgtggccacgttggatgttgttgagcatgacgatgtcactgtaaagctgacggcaggaggccacaggaccagacgcgcctggagtgtgtgtg

SEQ ID NO: 7980 - DNA, 122 bp, Homo sapiens
ctctgcgggccaagaaaggtgaccgggcttccttccggcttgctaagcagaggccggaagcggtggtttttagcggctctctgggtagcagggtggtgtgatagcggcagcgaggggctcgg

SEQ ID NO: 7981 - DNA, 122 bp, Homo sapiens
cgcgcgaagtgggcccagaaggccgggcagctcagcagcagcagcagctcagcaggaagccggggctgcaggggacgcccgcgggacggggcaggtgggccgggctcgaggctcgcgcactg

SEQ ID NO: 7982 - DNA, 122 bp, Homo sapiens
gcagggccgccctcgacccctgagggcgcagctcacctgatgggtgctgactcgtcgccgcggtccagccagtcctgcggggggatgatgtacatgcaccagaggccccagttgtagccatg

SEQ ID NO: 7983 - DNA, 122 bp, Homo sapiens
tcccttctccacctgggtctgcctcttggctcgctgactgcaagcctggcagcgcgcacgcgcacacttcctccaggtggccctcccagactaagcctgatatcaagtcgggcatcactgag

SEQ ID NO: 7984 - DNA, 122 bp, Homo sapiens
atttgatagccttgctaagtatttatctcctgcttcattgtaataattaggtaggtcttccgtgcttcagttactgtaattacattgcaaatgttaatgtgatacttgtaggctgctgctta

SEQ ID NO: 7985 - DNA, 122 bp, Homo sapiens
catgagtaggagctgcaacagggggctaagaggtgacctgtgcagtagaaggaaagcactcgcgttctcccaggtgcggaacgagcaaacgttgatgacaaatgactttgcctaccatcttg

SEQ ID NO: 7986 - DNA, 122 bp, Homo sapiens
ggatagtggcttctccggtcctggcttgggtgggagactgggccaccctggcctatggcacgaggtggagcggcccgtcgggcccttctgtgtgacctgggaagggccgcataccctccctg

SEQ ID NO: 7987 - DNA, 122 bp, Homo sapiens
ggggccagaaaccaggcacaggggactcgggcagctcctcctctccagtccatgcagcttcgggccagctacccagtgttctcccaattggggctctgactcatgcattagcaggtgatgaa

SEQ ID NO: 7988 - DNA, 122 bp, Homo sapiens
caagaattacaaaaatgtgacagacaaatacaaagtgagcacacgctgttggaaaaatggcgtgcaaagacttgcacaacacagggttgacataaatcttcaatatgttaaaaaaaaaaaac

SEQ ID NO: 7989 - DNA, 122 bp, Homo sapiens
gcctcgagagaggaggctaagtaagagtgagcccagttcaggaggtcactcagagagcctcgacctccgaaggccaaaccagcgcccagtaacccggcgggtagcgtggcgcgcggccgacg

SEQ ID NO: 7990 - DNA, 122 bp, Homo sapiens
tgaggccaagctgtaaacagaatgagtaatgaggtcagaagctggtggggaccagaatcacgtctagatgcagttcaaggaaacggaaatggtacaaggctgaggctgtgaattgaattata

SEQ ID NO: 7991 - DNA, 122 bp, Homo sapiens
gggggagggtgacctctgggtttggagaacaaacttgctatccgagggacctccagctctcgggactctcactatccccaccctgcctccagccaatgcgcggataagcgccatgcggtgcg

SEQ ID NO: 7992 - DNA, 122 bp, Homo sapiens
tcttaacagcacacagcagaggtgttgttataaaggtggaataagtacacccaccaaaagcgacaagatctaagaatgagtaggataaaaagatcttagtccatttaggctgctaacacaaa

SEQ ID NO: 7993 - DNA, 122 bp, Homo sapiens
gggccgggccgcagttttattgcgctcggaggattttctgctcctcctcccggtggctggcggccaatgcaggctctgggcgctcccagcagccccctcctccccctccgcccgcgcctccc

SEQ ID NO: 7994 - DNA, 122 bp, Homo sapiens
gggataaatgaatgaacgaactggctccggagggctgcagttcctccccggggcagcaggcgacgccagcgttacgcccgcctggccgccggcagttcttggtccctccggctgaccgtcca

SEQ ID NO: 7995 - DNA, 122 bp, Homo sapiens
cacactaatgcatctaagtgatccagcaattcatgatttttccaatgataatgaaatccacgaagaacaaaagagagagactgggaagggaggcagagagaaaggtgaaggggtatgctatt

SEQ ID NO: 7996 - DNA, 122 bp, Homo sapiens
ctatccgcagtgagggtggtggccatgggggaagggagctagaggctcaaagggcacccccgggtggggccacctgtcttcttggtgtatcagtgtgctgacaaccaaattgtggggtctgt

SEQ ID NO: 7997 - DNA, 122 bp, Homo sapiens
cagagcaagacctcatctctacaaaaaaacaaaattatccaggtattagtcccagctactcgggaagctgagtcaggaggactgcttgagcccaggagttcaaggctgcagtgattcatgat

SEQ ID NO: 7998 - DNA, 122 bp, Homo sapiens
aaactcaaattagcttttcttaattttaccttctaaacgtacaatatacatacacatttccgagtttgagcatcaggcacaaaggtggtccattgtcatgtaaacaatgaccttgtgttgcc

SEQ ID NO: 7999 - DNA, 122 bp, Homo sapiens
ggaccagaaaccctgctctccagccccgccgcttagaaaaaatccccctcccaaaggggccgcctccctgagtccaagccacccctgcccacagcaaaggagctgaggagagcctgggagct

SEQ ID NO: 8000 - DNA, 122 bp, Homo sapiens
cccgccatgggcaacatggtgaaattgcatctctacaaaatgtacgaaaaattagccaggcgtggttgcacgtgcctgtagtcccagctatctggaaggctggggtggaaggaccacctgta

SEQ ID NO: 8001 - DNA, 122 bp, Homo sapiens
ccacaaaggtctacggctttactcctgaagtcagtgaaaccacgaacccaccgggaggaacgaacaactccggacgcgccacctttaagatctgtaacactcactgtgaaggtctgcagctg

SEQ ID NO: 8002 - DNA, 122 bp, Homo sapiens
tggagcggtgtgggtctctaatcgtccagagccctgcggggccagtgacttcggcagagccgaggggagaggagatactgggggtcaaactgctggagagagcgcggagctggggctggggt

SEQ ID NO: 8003 - DNA, 122 bp, Homo sapiens
cattaagtgaagcaggagggcccacacttgtcagcagctactgctcactccagagcaatccgatcttcccgttaaaaacctctctctcctgccagggggatttgattcctttcctcgccact

SEQ ID NO: 8004 - DNA, 122 bp, Homo sapiens
tcgcagcgcgctccgcggaagccgggcgggcaggtgcactcgccggaggcggcgctgcagcggccccgcacacactcgcactgctgctggcattcgggaccccaccagcccggccggcaggc

SEQ ID NO: 8005 - DNA, 122 bp, Homo sapiens
agccagagaaactttaaaagcttgttgagccttgggtagcctaggtttctatcttgagaccgaacatcctccctgggcttctgagacactggcatgctgaggctctgcctggctcaaggagc

SEQ ID NO: 8006 - DNA, 122 bp, Homo sapiens
gtgagccatcattcccaggctaaacttcagcacattattattaacatatttttggccaggcgtggtggctcaagactgtaatcccaacactttggaaggctgaggaaggtggatcacctgag

SEQ ID NO: 8007 - DNA, 122 bp, Homo sapiens
ctgttctcagcctcctattaggggccatggggcataggggcccccactctggctcagccacgttctgttcctcctttccggggctctactccctgagacaacccccactctcatccagaaaa

SEQ ID NO: 8008 - DNA, 122 bp, Homo sapiens
atctacgttagctagagggtaaattccctaaggacatagactgatagcaaatttgctcagcgtggggagaagagaaatcactaaatacattttgttgaattaacccaacttagtgaattcat

SEQ ID NO: 8009 - DNA, 122 bp, Homo sapiens
ctgccctagggccctaacagtcacctttctccccgaggtccccaagcttctttaaggttccgcccttaggccccgccccagccttgactctcggccaccccgggcctcacctcccatccctg

SEQ ID NO: 8010 - DNA, 122 bp, Homo sapiens
gcatgcataaaattcttaaaacagcttagcaactctgatttctgtgtgtgttgttgttgtcgtcattattatcaagcatatatgctataccacattttggatagcagagaaggaaggggaaa

SEQ ID NO: 8011 - DNA, 122 bp, Homo sapiens
tcacccttcaaaacccagtgtggaaggttatttttgttagaataagattcttgactattccggccaaaggtaaccacctctcctgtgaatgggctctggggacacacttctaccactgcaca

SEQ ID NO: 8012 - DNA, 122 bp, Homo sapiens
gaggtgcgcctggtgccgcagcgcggcggccggcacggcggtgatgttggtgtgggtgaccgacagcgaggtcaggttcaggccccgcaggctgcccgccgccacctcctccagcagcggcc

SEQ ID NO: 8013 - DNA, 122 bp, Homo sapiens
gccccacccaacgccaaagccacccgcccattccatccctgtccctgtgggtccttgcaccggccaccttcaacacaggtgagatgagcccaggcttggggaaatagggggccctgagggaa

SEQ ID NO: 8014 - DNA, 122 bp, Homo sapiens
tgtcaagaaaaaaaaaacacaccaagaaacagcctttgcaaagttcacttaaaaacatctcgaatggatcactgtagccttcaataataaaaaagaagagaaaaacccagccaacactagaa

SEQ ID NO: 8015 - DNA, 122 bp, Homo sapiens
agcaaatggcgccgcgactctttgcgtcgcttttccccgcctcccgtcgccggctgggcccgcccccaggctttatgacgcaggcgtggccgactgactcctattgttagagccgagggaga

SEQ ID NO: 8016 - DNA, 122 bp, Homo sapiens
tatccagggacagcaccggggccgagaggccccaggactcgtggagtcctctgagtcctgcgcagcagcggccgtcgggggtcagctaggaagctgcaggattgcgttgcttcggtgcctgg

SEQ ID NO: 8017 - DNA, 122 bp, Homo sapiens
cgaccccatcattggccacaaaacgggcaaagatgcccatgccacccacctgcagagcaccgaggcgtctgtgccggccaagtcagggcccagtggtccagacaatgtacaaagcctgcccc

SEQ ID NO: 8018 - DNA, 122 bp, Homo sapiens
gaggagtgagcctgcctctccccgtgaagacgccatgcagcgcaggctgatttacagactcgtacccgggcgctggggaggggatagggaagctggccgcaggcctgtctccgctcctgtcc

SEQ ID NO: 8019 - DNA, 122 bp, Homo sapiens
gagggaccggaggaaaggagacggggcgctgcgccaagttatcaaggccgcgatcaaagtcggaccaaggcagcgagtcgacagcaggtttccagaagtgccctaacaggactgactagcag

SEQ ID NO: 8020 - DNA, 122 bp, Homo sapiens
tgttaaactggacaacaacttccagctgggagtgatgtgtgcaaactatgaacactttcacgataaaagtctgttccagatcatacattttggagaacaacagagaccactcacttctggta

SEQ ID NO: 8021 - DNA, 122 bp, Homo sapiens
ttcctcagaccgtccactgaggtgattgttctcacgcaggccatgggcgtgggcgaaaaacggggggaaaaaagccctgggaagccggtaccgtcgcggaagaaggccgcctgcgcatgctc

SEQ ID NO: 8022 - DNA, 122 bp, Homo sapiens
aggtactattgattatgagaaataaatgctgatgagaaatgtttctatagtttgtgatttcgtacctaaatggattctgtctcatatttgatggtaaacatgatgcatttgctttttctgat

SEQ ID NO: 8023 - DNA, 122 bp, Homo sapiens
agtgccagacagtgggcgcaggtcagtgggtgtgtgcaccgtgcgcgagcggaagcagggcgaggcattgcctcacttgggaagcgcaaggggtcagggagttccctttccgagtcaaagaa

SEQ ID NO: 8024 - DNA, 122 bp, Homo sapiens
aggaagtaggcgtaggcgactccccagcaggaagagcgacggccgttcggccaatagctacgaaggttggctggccgcctcaccaatcacagagcggcattggaagatggggccggggcgtg

SEQ ID NO: 8025 - DNA, 122 bp, Homo sapiens
ggcacgagccaccgcgcccggccctcggtaacattttgacttgatctgtcaaggcgctttcgtcagtgcttctgggccgcggccgccacctacagcctccacagtgcccggcgtcccggagc

SEQ ID NO: 8026 - DNA, 122 bp, Homo sapiens
cgctggcagagcacatgcgccgtacgtccatatgcagggactacaatccccagtatgcagcgcgggcctggcctcaaatcccacctgccctagcatgcacgtggtgtccttcgcgcatgtga

SEQ ID NO: 8027 - DNA, 122 bp, Homo sapiens
gggggcgctcccaactctacaacttgcccagacccgccctgatgtccgttagcgttataacggcaagagagaagcagccaccatcaccatggcaaccagtgacctctgccccttgttcccca

SEQ ID NO: 8028 - DNA, 122 bp, Homo sapiens
tgcccccaaagagggaatccctatgttccttcttctcaaacaagggtgctcttcagcctgcgtgcactgctgcacccatatcaattgtttttcagccaatgtctgtcctaattggtgggtac

SEQ ID NO: 8029 - DNA, 122 bp, Homo sapiens
tgcacccaccaaagctatcttcctgtggaatgaacacagttggagagtgagtttggactccggattctttataccttgtcctgtagtcttacttttcttatgccttgctgaggaaggcatca

SEQ ID NO: 8030 - DNA, 122 bp, Homo sapiens
ccagaaacagtatatggccttgtcaaagaaatgacgaattactatgttactttgtgttaacgaaaaggttacatttatgttcatatggaagagataattcactgaagaatttccaatttttc

SEQ ID NO: 8031 - DNA, 122 bp, Homo sapiens
gcttaagagggagcacgcaagccaagcaaaggcggcagggaagacggagaagaaaccacccgtgggccctggctctgtgtccagttgttccgtcacagatcaaatctgcctgcactaagagg

SEQ ID NO: 8032 - DNA, 122 bp, Homo sapiens
ccacattggagtcctggggcaagtggtttgggcctttctgtgcctcagtctcctcatctacgaaacggggattagaagagcccctttccaagggctaccatgaggattaaacaagtcaaaaa

SEQ ID NO: 8033 - DNA, 122 bp, Homo sapiens
tgttcattcaaccagcgtgtgtatgagggacgtgctcaggccagcatagcccaggccctccgggatctgctccttggtgagggagacaccccaaatcatgacgaggtaggaaccccacatgt

SEQ ID NO: 8034 - DNA, 122 bp, Homo sapiens
gctaagacctagatgcagctcctcctagctggagggtatcagggactgagtagccaggaacggagggatgtgtgaaggcttcttaggcaaggagcaggggaatagccccgatgaatggagag

SEQ ID NO: 8035 - DNA, 122 bp, Homo sapiens
gagggtcagagtcacaggaacaatctagggacagtgacttttccctccttctgggccttccgggagctcacaagccagtcccggaggctccctgtggccgctttacgggattggccttccca

SEQ ID NO: 8036 - DNA, 122 bp, Homo sapiens
cttgttatgtaaagggtcttttctcctggcttgcagagacgcgcgctccatggagcagttcgattctgctccttttgtataagatcgcgcgcgatcagaaccaggaatattgctgttattat

SEQ ID NO: 8037 - DNA, 122 bp, Homo sapiens
cggcccgcgagggatgcagcagccgccgccgccgccccagccaccgcccccgccccaagccggcctaccccagatcatccaaaagtaagaagggagaagggaacagggaccacgggtgcgcc

SEQ ID NO: 8038 - DNA, 122 bp, Homo sapiens
tggaaaaggaaatgagggctcctggggagaacctggagtctcagcccatgatccctactccggccccccagaaggggcatgtgagcctgtggaggtcccatcccccacccctcgtgacagca

SEQ ID NO: 8039 - DNA, 122 bp, Homo sapiens
gggcctttaggagcggacgacacacagcagtaaggacgacaccttgacctccgcgtgcagcgagagccaacggtcctaccacatcccggaagccgccctgtccgctccagctgcgtgcctga

SEQ ID NO: 8040 - DNA, 122 bp, Homo sapiens
atcctcctgctgcccagctagtggcagccccatggacgttctcgttcaatatcatattcacgtgcagcacaaagtacccgccatctcccatgatctgctctctcgtcctccctcagccccgc

SEQ ID NO: 8041 - DNA, 122 bp, Homo sapiens
tttctagagggggcattttggaagtggtattggtgcatacatttgacagggtggagaagccggccatgcagatatcccaggaaagagcattccaggctgagggaacaaccattgcaaagagc

SEQ ID NO: 8042 - DNA, 122 bp, Homo sapiens
gagttgacccatttagagcttagaactcagcgagccaatcccttaatagaaggaatctgtcgctaggcggagagagacgacagacccaatcgggaaacgggacagatgccgctcctcggcgc

SEQ ID NO: 8043 - DNA, 122 bp, Homo sapiens
gagaagtgtttgtctctcccaaccccaagcccccataaaatttattcattcctattatatcgttttgcctaatttcaggcggaaattggctgagaggtctgaggctagtctgaaggtgtcag

SEQ ID NO: 8044 - DNA, 122 bp, Homo sapiens
ccctttgcctcggccgccgctcccctccccgctgcccgcaccggtcccagcgccgctccccgcagccttcgctctcgcgcccccaccccgaccggcttgggctgtctctcttcagccgccgt

SEQ ID NO: 8045 - DNA, 122 bp, Homo sapiens
ccgttaccaaaagcgtttccgtgaatagcgtgattggaaacttgtgcgggccggagaccgcggcgcggctgctctttcaacaggcgatttgttctcctgtccgaggctcatttccatgcaaa

SEQ ID NO: 8046 - DNA, 122 bp, Homo sapiens
gtcatgtgtccttggacaattcaattaatatctttgaacttaagttgtaaagtacacttgcgcctcttattcattgcgtctcttcatccactgaagtctaagttcagtgtcttttcaacttt

SEQ ID NO: 8047 - DNA, 122 bp, Homo sapiens
ccccaaccaagtgtactacaggcccatggatgagtacagcaaccagaacaactttgtgcacgactgcgtcaatatcacaatcaagcagcacacggtcaccacaaccaccaagggggagaact

SEQ ID NO: 8048 - DNA, 122 bp, Homo sapiens
ctggcgggcgggcgcgcgcacacccgctgatctatcactctcgttcttgtagctcccagccgaggacgtcggatgtcatcgtccttgctgctttgccaccccattcccgtcaataaagtggt

SEQ ID NO: 8049 - DNA, 122 bp, Homo sapiens
cctctcttggtaccaggtaaactcatgtggatgttgaggacatgaggccacctgatgtcccgggggcatgtcccagctgtgcacctgtggccagcactcctgggccaccccctgctctgcct

SEQ ID NO: 8050 - DNA, 122 bp, Homo sapiens
tggcaacccagaggcaaggaggtgggcagaggcccacgaacctggccctgaccctcagctcgtccccagctcacagcacagccctcccctggctgcctccaaggagtctccagttactgagt

SEQ ID NO: 8051 - DNA, 122 bp, Homo sapiens
agctggggggcaagagcaaataaagagctcgagcttctgtggtctctggggagatgttcccgggaagcctgtctagagggcggagggcagctgttgagatggcgtggctccccggctcctgc

SEQ ID NO: 8052 - DNA, 122 bp, Homo sapiens
ggggtgagcgccgcgcggctgcagcatggtgagcaagccttgcttgtttcggcggccgagcgctgtggttttgcagaggccaggctgcttccggtaataccttggctactgcggcccgggtc

SEQ ID NO: 8053 - DNA, 122 bp, Homo sapiens
tctccagaggggacgtgagaggcaggcggccatgacggacgcggcagtgaggttcagcttcggcgtttgctcaccgaggagccccagcaagcactgtctgggcctcattccttcatcctgag

SEQ ID NO: 8054 - DNA, 122 bp, Homo sapiens
ctgcaacctccaaccccttctttctgaccaaccgggaccagagcagtgctggggccggggcgggtcaccgggtgaggaccggggcggagggtgttaagttacagggcaggagcccgggtccc

SEQ ID NO: 8055 - DNA, 122 bp, Homo sapiens
ctcaaggcctaagctgccactgagctatttgctaaacttaagttgctgtttttgaacacccggactcctaagaatcaatgaaaacccaagatgatcaacattagtcacagaaccaaataatc

SEQ ID NO: 8056 - DNA, 122 bp, Homo sapiens
cgggcagcagcgaggggctgggggcccggcggagcagagggggccgcatctcgaactccacgccctggaggtggcgggtggacgtggaggaggaggaggctgagggtgaggtggcccctggg

SEQ ID NO: 8057 - DNA, 122 bp, Homo sapiens
tccttctggaattcagcaatgaaacgcagggaaatgggttccaaatgcgaggctgactttcgtcctgggtttccttcttctccatcttcacctcatgtctgtttactgccatgttagcaatt

SEQ ID NO: 8058 - DNA, 122 bp, Homo sapiens
tgaacaggttcttgataacccgccatttctctccagagctgcttgaaagtccctcctggacgtgcagagttgcagtggcagttcccatgaagttgtaagctactacccaggatcaagtggtg

SEQ ID NO: 8059 - DNA, 122 bp, Homo sapiens
ttgtgacaccagatgtgtggggggtttccccaggcatcaagcaagcaattcattctgcagcggacactagctgggcgtcctccaattcaattctgacaccatctacccagagaagtgtcaca

SEQ ID NO: 8060 - DNA, 122 bp, Homo sapiens
tttccaaattgctcttctttctcagaatgacagctttggaacattagcgcaaatccccaccgagatttgcatccgtattcttggatcttattcagaacttagccctgctgaaaaatacacag

SEQ ID NO: 8061 - DNA, 122 bp, Homo sapiens
tgagggcaccgggggattgactaggtcctccccagcaagcctcacatgagtctttaagaccggcggcaggctctcgtggttccttaatcggccatcagatgcccagtgttttcgatagttct

SEQ ID NO: 8062 - DNA, 122 bp, Homo sapiens
ctacccccagccccccatttccagcactaaaatggatggagggctcagtgcaaggggcgtcgagaaggcgagccaggttcgcttcggggtgctccctcccctgcccccgccccggcccgctc

SEQ ID NO: 8063 - DNA, 122 bp, Homo sapiens
tctccttattgtcctgtctggaagggtcacattatttgagtgtaactcctgagagcctggcgggtcttttcacacagatgttgatggatgctttgcagtccctcccatcccagcagatttct

SEQ ID NO: 8064 - DNA, 122 bp, Homo sapiens
cctgacaagtgataattgtgacatgaaagaggctggaccggttgttacaacaattttttccgtctagaattcggcggtaaggtctgagacaacacctcagcttagatcagtgccttctctga

SEQ ID NO: 8065 - DNA, 122 bp, Homo sapiens
caggctggtgctcagacccccacccagcgcccccgcgcccccgcgcccgcgccgctctcccgggaagtccccaacagcctctggctttgctcggcttctcccagcagaaaccgagccccacg

SEQ ID NO: 8066 - DNA, 122 bp, Homo sapiens
ggggcttgcgctctggggctgtcgcttcggaacacttctccttcagtccattgctgcgctcgccctggctgctgaataaatggtttcggagtgaaaagcatctcactgaagaacttgtctgt

SEQ ID NO: 8067 - DNA, 122 bp, Homo sapiens
gtgtgtatatatatatatatatatatacacacatatatatatgttataaaattctaacttcggtggagtactttactttgatattccacttgcaaaacagaaccactgattccttcctgctt

SEQ ID NO: 8068 - DNA, 122 bp, Homo sapiens
ccggcccggcccccgagctccgttcctccgcgcccagcgccctccaggccgcggtgtgtccgcccctgccccatgctttgccttcggagctgctggagacaatttaatccaactctgcccat

SEQ ID NO: 8069 - DNA, 122 bp, Homo sapiens
gccgggcttgcccaacgagggggcaaacaccacgctcaggtggcgtggacaggtcgctgccgcctcggactacaccagagatctcagctatgagcctggacgcccgccccgccctcccgagg

SEQ ID NO: 8070 - DNA, 122 bp, Homo sapiens
ccccggccgccggcccgccccccgcccctgcccccacccggctcgcccggcccgcccccgcgcgccccacctgcggctgccacccgcacccgcagctggactggccccaaggcaccggcgcc

SEQ ID NO: 8071 - DNA, 122 bp, Homo sapiens
ttaatcttcctttggtcaatgccacaaaactaaccacatctatgttaactttcttttctccgccatctgcctcaacaaatgtcatgtccctcatctttctgatggctaatcactccctttgt

SEQ ID NO: 8072 - DNA, 122 bp, Homo sapiens
cggggagggacggagtggcggctgaccccggggatcgggagcttggagtgaggggctcggcgtgacccgtgaggagccccgcgggtagagcggcgctgccccttcgctccggggtgaactga

SEQ ID NO: 8073 - DNA, 122 bp, Homo sapiens
aggccctaggaggagccggtcgcccgggcaatgcctccctgaggccggcctccccagcctcgcgttggctcaggagctgctgagagaagagggcaccccacagaggcccacactctcccttt

SEQ ID NO: 8074 - DNA, 122 bp, Homo sapiens
agcgaaggcccggggtaggagtcctgtaggcccttccgcatggagtccaggaaggatccccggagccactccaagccccggaccgcagcctcggagtaaccgagcagctccacgccgcggta

SEQ ID NO: 8075 - DNA, 122 bp, Homo sapiens
ctgtcgtacagcaaggtggcaataaaggatcgacccttaacagtggtaggaatgcaccttcgatccttctactcctattggctgctcctctgtgggcgtctcccccgccgcatagcacagct

SEQ ID NO: 8076 - DNA, 122 bp, Homo sapiens
ctgggtcctagccccgccgcccccagtccgcccgcgcctccgggtcctaacgccgccgctcgccctccactgcgccctccccgagcgcggctccaggaccccgtcgacccggagcgctgtcc

SEQ ID NO: 8077 - DNA, 122 bp, Homo sapiens
ctttctccccgccaagagccttcatcaccacttagaacattgccatcttcctagtgcctccgatttctgaggcgagaggactgaggctgaaaactgcccggctgcaggtcaccctcaaggcc

SEQ ID NO: 8078 - DNA, 122 bp, Homo sapiens
ctcagcggggccctcccgcttggatgttccgggaaagtgatgtgggtaggacaggcggggcgagccgcaggtgccagaacacagattgtataaaaggctgggggctggtggggagcagggga

SEQ ID NO: 8079 - DNA, 122 bp, Homo sapiens
ctggggtctgcggggcctgcctgcgcccgcgccccccctccttcccggccagccagtgagcggtacccgccgccgttgccaggggaaactcgccgccccgttacccagcaacaagcctggcc

SEQ ID NO: 8080 - DNA, 122 bp, Homo sapiens
ccctccgtgctgggtccaggcgctcccactcctcccaggttagagacacagccgtgtcctcgaaagtcaccatcccctggaacaacacaagagccccattcagtacctgctgtccctgtaca

SEQ ID NO: 8081 - DNA, 122 bp, Homo sapiens
gcgtcccggatcaggacgcgaacatccctataccgcagacacccccactgcgccaggaagcggcagtcggccgtttccgcggagctctcggtcctcagacactttcccagtctccgtccctt

SEQ ID NO: 8082 - DNA, 122 bp, Homo sapiens
gtctttaatacgaatgaataaccacagagatttactcacagaggagtaagaggagaataacgattaaaaaacaaaaatggaccctttaggaaacaagagataattagggaacagatgagaac

SEQ ID NO: 8083 - DNA, 122 bp, Homo sapiens
gattcatcattcaagaaatgacaacagtgtcacattactatcgaatgttaatttctctctcgctcactctctgtgtgactttctttatctctgattctgtctctctcaaatttaggagtaca

SEQ ID NO: 8084 - DNA, 122 bp, Homo sapiens
tgcggatggaagtagtagacagcttgcggcgattcgaagtcgtccagcacgtacttgacgcggatggacacgtcggtgttgcgcgtgttgtagaaggcaggcagcagcaccgacgcgttctc

SEQ ID NO: 8085 - DNA, 122 bp, Homo sapiens
cggctttaatgggtattagtggatcttctgttttcactcaggttggatatatatcccctgcgtcatacccatatggccccaatctcacaggggaggaatgtgtccctcccccaggcagtgac

SEQ ID NO: 8086 - DNA, 122 bp, Homo sapiens
ctaaagagctttgtacttttgaactctgaaagaatttggctgaaatccagagagatttaccgtaactgaaaccaaaaaatggccttcccattaaagagctgagggaggtgaccaataggaac

SEQ ID NO: 8087 - DNA, 122 bp, Homo sapiens
tgggcagggcacggggccaaggaggctgcatgtgagcctgccccattaggacacaaggcccgaggagctctcgcgacagggttcccggggtgactgcctgtaaggggccacagctcagtgag

SEQ ID NO: 8088 - DNA, 122 bp, Homo sapiens
gaacgtgccgacaaggacctgtagggccccactccccctcctccctccctcggcgcagcccggcccaggggtctgtcctcccaggcccaggaaaggaggaaacccacttccgccgcgtccat

SEQ ID NO: 8089 - DNA, 122 bp, Homo sapiens
gcgcagcgcgagctggctgaggagtttggtgtgacggagtaccctacgctcaagttcttccgcaatgggaaccgcacgcacccggaggagtacacaggtgaggggcaggccggtcattgggg

SEQ ID NO: 8090 - DNA, 122 bp, Homo sapiens
agcggcggccgggttttgtttgccagatattgttatgtctaacgggtgcctcgccggagacgtgatttgtcagccgccttcgttttcactttagcagaaaatacggcagctgcgaggtgtcc

SEQ ID NO: 8091 - DNA, 122 bp, Homo sapiens
gtcctggggagactcccaggctgatgctgatggcgacagaggccggagctctggggacagcggaggggcaggcaatgttgtgcgcagttacccagggcaggcagcactggaatggaaatcac

SEQ ID NO: 8092 - DNA, 122 bp, Homo sapiens
tccatcgttttctctcgtgcaatggcgtccgggctggtaagattgctgcagcagggacatcgctgcctcctggctccagtcgcccccaagctggtccctccggttcggggagtgaagaaggg

SEQ ID NO: 8093 - DNA, 122 bp, Homo sapiens
acacggtctcgctccccagtgcctcatgcacgtcttagtaataccgagttttccgatccacgaacactgtctcgctccccagtgcctcatgcacgtcttagtaataccgagttttctgatcc

SEQ ID NO: 8094 - DNA, 122 bp, Homo sapiens
tctctcgggtccagccagagccggctgggctccctcgactgttcccactcattctccagccggaccgatctcaatcactggaatggtgctgggctgtcgggaactaactgtggagaccttca

SEQ ID NO: 8095 - DNA, 122 bp, Homo sapiens
cctccgttagtacgagttccggccaatgacgttcgccctcttaggtttttttttttagcccgccctccaaaagcgtgacagccgttgggtcataagtctacagggcagaatgttcacgtggc

SEQ ID NO: 8096 - DNA, 122 bp, Homo sapiens
tccactcttaattgttgtcttggtttaagtcaggggccagcacgagagggttctttattacggttttcagttaaccattcagccttatgcaggtcccttggaggagaagttgaagagattaa

SEQ ID NO: 8097 - DNA, 122 bp, Homo sapiens
attcaccatgctatctcagagtgaagtgtcaagctaaatgcatctctacttgctggatttcggctattagggatccaagcaagggatatacttggtcattaaaagagacttttctgggcccg

SEQ ID NO: 8098 - DNA, 122 bp, Homo sapiens
tgtgcgaagctgcggtgcagatcccgggccgtgggcatcttgagccaccactgagagtgacgccctttgtgtggcatcttctccagttggaggaaggagatgccagccgggccagtgactca

SEQ ID NO: 8099 - DNA, 122 bp, Homo sapiens
ggtctcctcgccaggacagcaacctctcccctggccctcatgggcaccgtcagctccaggcggtcctggtggccgctgccactgctgctgctgctgctgctgctcctgggtcccgcgggcgc

SEQ ID NO: 8100 - DNA, 122 bp, Homo sapiens
cctgggtgtgggccaggtcacatggattgggtgtgggaagtttcagtgttgcagaacagacgaggaagctcactgagaattatcctgagctgtgttaacaaactgacagaacacagaatttt

SEQ ID NO: 8101 - DNA, 122 bp, Homo sapiens
ctttctcaaggctgagaaactgggctagagcttgttgcctacaaatctgtcttcctagtacgcagagggccccaagcactgagcctgatcttatttctcctgattttctcagtacccaccgc

SEQ ID NO: 8102 - DNA, 122 bp, Homo sapiens
agacacaacataggtaggtaggtaggtaggtaggtagatactgctatccgtactattactcgatcattctatttttagtgcctgaaatctacctgatggtgtccagattttattgcttcttt

SEQ ID NO: 8103 - DNA, 122 bp, Homo sapiens
ccccacccaactctctttctccatttcttgcctttcagaagaacatgtgatcatccaggccgagttctatctgaatcctgaccaatcaggcgagtttatgtttgactttgatggtgatgaga

SEQ ID NO: 8104 - DNA, 122 bp, Homo sapiens
aatccctctgatccgagtttaaatattcccactcctcctgagagaagtctatggcaacatcgctgaatgtcaatggcacctgaaatgacaaacctgtgtattatttgtaaaagtaaagaaga

SEQ ID NO: 8105 - DNA, 122 bp, Homo sapiens
caggcgcagccccttccgaaccccgcctgggactgcagaggacaggggagctcacggggccgtctgccacgccacaaagggctccagcagctgggtttgcacgctaggcttcttcgacaaac

SEQ ID NO: 8106 - DNA, 122 bp, Homo sapiens
cgcgcagcttacacccgcggcgggtggagggagcaatgtgacgaaaccattgagcttgaccgaccttccctcatggagttggcttttagcctcacggccggtttctgttgggtgaaagccgc

SEQ ID NO: 8107 - DNA, 122 bp, Homo sapiens
tgccgggtctgtgggggtccatcgttgccggagactggaggttgggggccatgggagccccggggcgaacggtgcggacatgggccttgcggaaaggaggagtgaccgcctgagcgtgcagc

SEQ ID NO: 8108 - DNA, 122 bp, Homo sapiens
cgtccgcgggaaccaaaatcacggtttttccaggagaaaccattgcggagcccaatttgccggtatggttgccatagaaactgggacctggagcgtgcccattttcggaggttccgaggctg

SEQ ID NO: 8109 - DNA, 122 bp, Homo sapiens
catgaagatggccctgaggatgacccacagttggtaggcatcactgctcgtaacattccacgagggccccagttggctgcccagaacttgggcatcagcctggccaacttgttgctgagcaa

SEQ ID NO: 8110 - DNA, 122 bp, Homo sapiens
aggaagccggacgtgggcgggcagagaggtcggcttgctgatgggtccgggtggggcgcgcgtggactatgggcccgggaggtcccttactgtccccgagccgcgggttcctcttgtgcaaa

SEQ ID NO: 8111 - DNA, 122 bp, Homo sapiens
gagcgccagtagaaggaggaggtcggcacacctgctgttcctgcttccttcccaggaggccgattctctccatcccaactcgctccgtggctcctgcttgctcctgttccccctcccgactc

SEQ ID NO: 8112 - DNA, 122 bp, Homo sapiens
gcagcaagccttggaggttgcgtgggggccgggaattgcccgagcccccagccgaggagccgccgccgccgccccctgaagagcaaccctgggaggccgggggcagcgccaggggcaggcgg

SEQ ID NO: 8113 - DNA, 122 bp, Homo sapiens
cctgtggtgtcaagatgagcttctgggccgggaaatatttaggccgggtgtggtggctcacgctgtaatcccagcactttgggaggcagaggtgggcggatcatgaggtcaggagatcgaga

SEQ ID NO: 8114 - DNA, 122 bp, Homo sapiens
tggcttcattttctgtttttttctagggaggagagagaagagagcagggagctgctgcatcgtgcccctgtcacagctttccctggggactgaaagcccctgtacttttcctgcctgccacc

SEQ ID NO: 8115 - DNA, 122 bp, Homo sapiens
agtgaaagaggctgttggaacactgaggctgatgatcgtttgtaaaaggcaggcctgctgcgcgcatgcctgactcagagccttcccttcccatcggcaggcctcccctccctgcccacagt

SEQ ID NO: 8116 - DNA, 122 bp, Homo sapiens
ccgcgggccccgccaatgatgagctggattgcgtgggacgaagggtcgtcattggacaaccgccgcgggcgccctggtctctgctacctgtagctgagggcgctgttgatgggcagcgcggc

SEQ ID NO: 8117 - DNA, 122 bp, Homo sapiens
aggcgctgggttcccagaagtttctagaatgaatacggagggctacatatttcacatgcgcggggcggggaaactgctgggcgattacagattcccgatggagctggccccttcgtggcgac

SEQ ID NO: 8118 - DNA, 122 bp, Homo sapiens
ccgatgtccttaaaaaccagacctccccacgatccctctcattagattctctgcttctgtcgctgatgtccttaaaatagcatgagaattcttgttagtgatcatgagcgccaactcagaga

SEQ ID NO: 8119 - DNA, 122 bp, Homo sapiens
ctgcacaggtggccccgcgcctctcacacaggttcagctcccgccggtccctgtgcagagcgccccctgccggtccctcttggaggctgggccagcgttgcgagtcttgccagggacgcgcg

SEQ ID NO: 8120 - DNA, 122 bp, Homo sapiens
ccccaggaattttctggctttagttccgaaagttccatatgccagggaaacctcagtcctcggtaaaatgggacagcttatcaccctagatactgcagagccctgatggacacttccctact

SEQ ID NO: 8121 - DNA, 122 bp, Homo sapiens
aggcttaagagggcgggcggggccgcggggcatcgacaggtcgagggtagggaattgacccggcccacgcagatccccgcgtcgtcttctccccgcccaccgcagccattggccgactctcg

SEQ ID NO: 8122 - DNA, 122 bp, Homo sapiens
tgcagctctaggctttcatctgaggtttggagggctggcaggagatggggaaactgaggccggagtgaatataaggggaaacaggtgatgctttaaaaggaccagaaatcagacgactgtga

SEQ ID NO: 8123 - DNA, 122 bp, Homo sapiens
aagcccgaaccgaaggagcgggcatgaggcgctgcccgtgccgtgggagcctgaacgaggcggaggccggggcgctgcccgcggcggcccgcatgggactggaggcgccgcgaggagggcgg

SEQ ID NO: 8124 - DNA, 122 bp, Homo sapiens
ggcttctgtggcctggcaagaaggcttgctacctgaggaagactggaccctccaaaaggacgaggctaagagagcgagcaaaggggggtcctcaggcctgacctgctgacctgccacgctct

SEQ ID NO: 8125 - DNA, 122 bp, Homo sapiens
cccccagggctggtcagggctcaggcagagtccactgagcagtagagggttgctgggatgcgagcccctcccaggagccagggcccggctggagggtctgcatgccgctgcggcagaggaag

SEQ ID NO: 8126 - DNA, 122 bp, Homo sapiens
ccgcctcagccttggcgaggccgcgccctggccgtgtgagcccatatcccactctcacggcggtccccagagtgagggtcccttccacaacggagaaagacgtccctttcgcaaaagcgact

SEQ ID NO: 8127 - DNA, 122 bp, Homo sapiens
acacggcacacgccgatcacctcgttgtgcccgatgctgggggttggggtcagtgaggaccgtggagggtggtgggagggcctgtccccaccccagccctcctgcctgacccccgcccgggc

SEQ ID NO: 8128 - DNA, 122 bp, Homo sapiens
agctgcctagaagtcctgatggaccggagtgtaaacactttgggactctggccagtctggcggcccttgctgacactgaattccttcagggaatccttgaagtggcctcaagcacggtctag

SEQ ID NO: 8129 - DNA, 122 bp, Homo sapiens
ctgaccgattcaaatttactgctgcttaacaactcacccttacatttagtggctgaaaaccgcaatgtactatttgtcacaatcagggtagacaagatgcagatggtggttctgctggtctt

SEQ ID NO: 8130 - DNA, 122 bp, Homo sapiens
cccgggagcccggagctgggagcagacgcgaggatagagcgccggtgaggcggggcgaggcgccgtgtgcaccgcagcgaccaatcggagcgcagcaagtggccggccgggggcggggcggg

SEQ ID NO: 8131 - DNA, 122 bp, Homo sapiens
ggaagaagctaaaaggtaagtatgatgacaaaacctacctgcaaggagatggagaatgcccgtggcaatggtgggatataagcttcggcaaatgcaagcacaaagtccgatcaaagccccaa

SEQ ID NO: 8132 - DNA, 122 bp, Homo sapiens
ggcccagcccgcgggccggcccggggaacccccaagggaggcgggaagcttgggtgggagcggggcaggaggtctgttattagcataatgtatgcaaatagctggagcggccaccgtgattg

SEQ ID NO: 8133 - DNA, 122 bp, Homo sapiens
aaagccctcctttacagccctgttctagaactccactaaggacccccaaatttattaatccgaatttctccaacagcactcagacaacacaagactacaaaaatatttctgctttcaaattt

SEQ ID NO: 8134 - DNA, 122 bp, Homo sapiens
gtgtcgttgaaacagtatgttgctttccttctctggcccttagcttaactatctgtacagcgggaacattggcaaactcctacgtggaggagcttgcaggtccacttcaagttatcagactc

SEQ ID NO: 8135 - DNA, 122 bp, Homo sapiens
agcgctccccgccctgcagtccgagctacgacctcacgggcaaggtgggtgggcctcttccgtgagacccccgccctcctcggcgctagccccttcctggctgcgtctgggttggactcagc

SEQ ID NO: 8136 - DNA, 122 bp, Homo sapiens
cattttgtttatccattcaagcactgataaacgtggcttgtttctaccttttgactattgcgaatagtgctgctatgaatgtgtgtacatttggtttttttgaatatcagtttgcaattctt

SEQ ID NO: 8137 - DNA, 122 bp, Homo sapiens
tctagtcctgggtggccctaagtaggtgaccttgggaaagctcttatttcccagggcttccgtttccgtatttgcacagtgaagaagctgatctctaaagtcctaggtcattttaacaattg

SEQ ID NO: 8138 - DNA, 122 bp, Homo sapiens
agaaagaaggcaatactaacgcgtgctacaacggtgatgctgagtgagagaagccaggcgcggaggccacacggcataggattccatttctaggaaacgtccaggacaggcagacccgtgga

SEQ ID NO: 8139 - DNA, 122 bp, Homo sapiens
aggtcagaactaagatgtcctcagagatccccagttacgaagcaaagcgcgggcctacttcgggacctacgcgtccgggcgctgtgcgcggggaccgctcccgggcccagcgtcggggccgc

SEQ ID NO: 8140 - DNA, 122 bp, Homo sapiens
agctggcgctggcgggcgcagccgccgcctaccccggcaaaggggcggccccgtacgcgccgcccgcgccctcgcgcagtgccttagcccaccccatcagccttatgacgctgcccggcgag

SEQ ID NO: 8141 - DNA, 122 bp, Homo sapiens
atgtccccctcaaggctttcttctctttcctccaagtggaagtgaagtctcagtcctgggcgctctcctccctaagcctgcccaccactccttgcagtactcacctctctgcatggagactc

SEQ ID NO: 8142 - DNA, 122 bp, Homo sapiens
ggcagcagcgggactcagccgggcgccaggttcctgccaggcagcgccgggaagcgcgggcggccgagaactccttcctgctacttcgcccagcgccgctgcttcggcttcccagcgaagtg

SEQ ID NO: 8143 - DNA, 122 bp, Homo sapiens
ggagaaactagcccctcaggcaccttgatcttggccttccagtttccagaactgtgagaacgtaaacttctggttgagcctcccagtccttggtgttttgttctggcggccccagcgagcgg

SEQ ID NO: 8144 - DNA, 122 bp, Homo sapiens
ctgggggcttccggtcgccgcagaccctggtcgctttgccacactcgtctacactgcatacgatcactgcatagacatcgatgattccggaacctcagtcactgggagactgagaagatatg

SEQ ID NO: 8145 - DNA, 122 bp, Homo sapiens
aataataaaagaaaaagatttatcaaattctgggggttttttggattaatctatttggcacgtgtttcctgagttacttggtctgttccaggctctgtgctaggatctgtgaatacagagat

SEQ ID NO: 8146 - DNA, 122 bp, Homo sapiens
gagacttaggacctggaggtcattagcacagtcttgacaccagcctgcaaagtgagaggacggaaggctgaaagggtctctaagacactctaatttcccgacagcctggcttgcctgccacg

SEQ ID NO: 8147 - DNA, 122 bp, Homo sapiens
ccgtaccccagaaagcagaggaggcgtgtaaataatttctggaaagtgactgttgtgacccggagtcctcatcaagatgagcgcgctccatgagggagctgctcccaccctgcggacgcagg

SEQ ID NO: 8148 - DNA, 122 bp, Homo sapiens
cgggggcggggccgcgggcgtcggggaggtggcagtgggcgcagggcggggcgagctcagcggagggcgggtttgaatgtgccccggcgggagagggaagctgcagcgagagcgcgcggatc

SEQ ID NO: 8149 - DNA, 122 bp, Homo sapiens
aaaaagaaaaagaaaaaaaaagaaaggggggcatttgttaaagggtttggggtgagctcccgttcctgatgtgagcagggctctgccttgctcaaatttcctcacacaagcccaggggtgtg

SEQ ID NO: 8150 - DNA, 122 bp, Homo sapiens
ttacattactctcctagtttagcgtgtgtttgaaaatttcacaatgagaaaagtcaaatgcgggtgtttgagctatttcatgatgagaaaaggaaaatgagggtgctgccaatcagagtatg

SEQ ID NO: 8151 - DNA, 122 bp, Homo sapiens
agaggaggagacgcgctcccattggcggaaagttattcaggggcggggtcagtgaatctccgtaccccactcccctttccgcaacttccctcttcactttgtacctttctctcctcgactgt

SEQ ID NO: 8152 - DNA, 122 bp, Homo sapiens
cctctcttgtgtgattttgctgctcacacgtggcctgctgggagccgcccctggtactgccgggacacggccctgggattttgctgaggccagctttggaacaggggaggtgagtctggaga

SEQ ID NO: 8153 - DNA, 122 bp, Homo sapiens
aaggtcaggtagtcggggctcggagcgcaagccgctgggggcattgaactgggctgggggcgcaggggacaaagcccgaactaaaaaccttgcagcatggagcgctcggacaccagccctgc

SEQ ID NO: 8154 - DNA, 122 bp, Homo sapiens
ccggctccccctgtctctctcgttctctgtgtgggtctctgtctctctgctcaccaggttcgaaactccccaggtactgagaccgagtctgatgcacttgtccgcccacagcgctcagcgca

SEQ ID NO: 8155 - DNA, 122 bp, Homo sapiens
gtgagtcgaggcgatatgctgagcatgaagccatacagccccaccactttcaccaggcttcgcaagagcacattggcatttaaaggaagccagttactcatcagggtggtatccgagctcag

SEQ ID NO: 8156 - DNA, 122 bp, Homo sapiens
agtctgggcagtggcgacaaaatgtgtgaaaatccagatgtaaacttccccaacctctggcggccggggggcggggcggggcggtcccaggccctcttgcgaagtagacgtttgcaccccaa

SEQ ID NO: 8157 - DNA, 122 bp, Homo sapiens
gtgctccatcagcctggcagggaaagtgggcggggaggttagctttgaggctgcccctcccgccagcccccaattctccgccacccgggacgagcgcttaccagtccatcgcagcctcgatg

SEQ ID NO: 8158 - DNA, 122 bp, Homo sapiens
tttagagaacgtgctactgactctgaagaagaggcataaaaccgccttgaggaacggcatcgtctgtgctgaagcaggcagcgcccagctgacgactgtcaatgcagccctagcaaacacgg

SEQ ID NO: 8159 - DNA, 122 bp, Homo sapiens
cgtcgggcgctggtcctcaagatctcccggctctgcccttgcagagctcagtgggggagacgtgcgtgcgcttccctcgggcagggccgctgccctcctccgcccttcaccccagacaccct

SEQ ID NO: 8160 - DNA, 122 bp, Homo sapiens
gttccagaccgtggggtgcagaggttgcggccacgggcgagaatccccatctgagaggagcgttgctgttttcggtgcgtcagggtaaattaccttttctctctatgcaaaagaatgcaaat

SEQ ID NO: 8161 - DNA, 122 bp, Homo sapiens
acttccgcattcttaggtgaaatggggacttcatgtcctctctcctggcccatcccaagacgagggcaagtgccccacgctgtccccgtctgcatcgcccgtgccgggatgttggattcctg

SEQ ID NO: 8162 - DNA, 122 bp, Homo sapiens
gggctgcgcagggtgcttgtgggccagcgcgagttctggggtgagtgggctcggcggccccgcacttggagtggccagctggcccgcaagcctggggcagtgaggggcttagcacctgggcc

SEQ ID NO: 8163 - DNA, 122 bp, Homo sapiens
atacctctcccagtaaccctgctcaccatttctctcttaagctattattatgattagccacggtttgctatttaaatttaaatttaaataaaaatgtggcctttcagttatgctagccacat

SEQ ID NO: 8164 - DNA, 122 bp, Homo sapiens
atcccgattctttcatctgtgcattcagaatgtgaagaatacacttgcccgtgtggctgccgttggtagaggtcagtttttggcctgtttgattgatggggaaagctgtgcagccacctgtt

SEQ ID NO: 8165 - DNA, 122 bp, Homo sapiens
aggatctttcacagggggacgggcacaccccggagtgggggcgtgtgctggtgggagacgcgtgtcgggggctctgcgtcctccttccaggatcttcctccccaccccgagagagcaagggg

SEQ ID NO: 8166 - DNA, 122 bp, Homo sapiens
ctggaccaagcaatgtgctgtcaaattgtataagattaacggttttcgaggagggaaaaacgttttggcgatgggactagttgaggaaaaagcactctgaagtgctgattcccgttcagttc

SEQ ID NO: 8167 - DNA, 122 bp, Homo sapiens
gcttgtcatttcctatctggaaccacgaaccctagttccacccctgagtttcctaatgctcgacataagcctctgaagccaatctgcattgtgcattgcagatggtacagaatcctcttgta

SEQ ID NO: 8168 - DNA, 122 bp, Homo sapiens
tgagacaggtgaaaaatgaggtgggccgcagcggtgcctggaaggaccactggtggagcgcggtgcagccggagagaagaaatgccgcctcctccgaggaggccaaggccgaagaaacgggc

SEQ ID NO: 8169 - DNA, 122 bp, Homo sapiens
atagatgttgctcaaacacagcagcgtcgtgacagtgccaatagccagcagtctcctgtccgcgtgggttgcgagccccgggcgtggacggagttgggagcggagggcggcaggtgccagcg

SEQ ID NO: 8170 - DNA, 122 bp, Homo sapiens
aataaatgttatttttccaatagtttcagcctcaccctacttaaaattatattgaatgttcgtgacagttcaaattgacaaattttcagtttgcctcttctttttaccccacgttattctcc

SEQ ID NO: 8171 - DNA, 122 bp, Homo sapiens
taaaggctgcggcagtctcggtctcccggagctcttgggagcctggccccgcccctttcccggtgattgatgtgtgctgcctctttctgggtgatttacatgtaatgccccgcccctttcgg

SEQ ID NO: 8172 - DNA, 122 bp, Homo sapiens
agttgctgcacctgctttaggcgaattatggtagcactagaagttggtctcccctccctccgccgcttgctctctcgctccctcctccctcgctctccgcgcgctccctccttccctctcca

SEQ ID NO: 8173 - DNA, 122 bp, Homo sapiens
agggaagccgaggaggccagcgtgacgggggagcagagtggacatcccaggacacagctgcgcctgcctgctctttccctgtgctctggcggcctgtcctgggccttacaccaacgcgatga

SEQ ID NO: 8174 - DNA, 122 bp, Homo sapiens
gccagatgtggtagctggcacctatatccccagctacttgggaagctgagctagtataatcgcttgagcccaagagttggaggctgcagtgagccgtgttcacggcactgcgctcagcctgg

SEQ ID NO: 8175 - DNA, 122 bp, Homo sapiens
cgactcctagtctccccatcccttatccaaaggagggcccctagagtttccagcccctgccgcctacccccaagccctctgcgacttgatcgaggatcgcctgctgaaatgcccacgaaatc

SEQ ID NO: 8176 - DNA, 122 bp, Homo sapiens
cccgggacccgccgccggtcccaggacaaataccgtgactctatttcccatgagcctacgcgctccccaaatttaggagccatttgaaatgtctctatctggtctagcggttaagaggctct

SEQ ID NO: 8177 - DNA, 122 bp, Homo sapiens
tggacggggctcagtgaggacagctcatctctgccccatgaggtgctgcctggggtccctcgggcagtggcatttggctatggtggggcccaaaggcccaggaaagcactgtgccggctgtt

SEQ ID NO: 8178 - DNA, 122 bp, Homo sapiens
ttagttcctgatacttagtagctggatgactttgagcactctaaggttgtttcctaataacgtaaaatagggaagctaatcgtgatccggttgcctcacaggttgttgggccctggtcaaca

SEQ ID NO: 8179 - DNA, 122 bp, Homo sapiens
cgtgggggtggggaatggggaatggggtgtggtcacgtggggttagggccccctccaccccgcttgctcttcgcaacggaaattgctactggcctcagaattccctgagcaaacgttgcttc

SEQ ID NO: 8180 - DNA, 122 bp, Homo sapiens
atttgttcaatttgttcagatacactttaaaatactttcattttagccttacagggtaggcgttaatagcctcattatatagatgaggaactgaggctcaaaaaggataaacagcttgaggt

SEQ ID NO: 8181 - DNA, 122 bp, Homo sapiens
tcacagaacacgcagacattctgtgagcaccggcccagcaagcagtgtcagtggctgcgccgttcctgcttaaatgagcaaggccttcgggtgcttcccggcctccctggactccctgcagc

SEQ ID NO: 8182 - DNA, 122 bp, Homo sapiens
tgctcctcaattctctgctctcctgcttcataagctgttgctagaagatgttagctacaccgcacaaaatggaggatacaacagaaatacactgagtcagaggctgtctcaggccctttaca

SEQ ID NO: 8183 - DNA, 122 bp, Homo sapiens
ggggtttcaagtacaacacacacgataagtttatttgatttaagagagagaatacaggtgcggggctcagcatagccctcagtgcagagccagtacccagaagatgttattcattaggtacc

SEQ ID NO: 8184 - DNA, 122 bp, Homo sapiens
cttccaagtcgcgcaccgctcgctcgtagtctccgctgtagtaggcggccgcgccgctggcgtagagcaggtcgaagggctgcagaggcccgggctccagctccagctcccggcgtgggctg

SEQ ID NO: 8185 - DNA, 122 bp, Homo sapiens
cacccacaaaaaagccctcctctttgtcattttgggggatttttcacttaagatgtgagccgcgcgctgcgggtgcggcgaggctggccctataaaaatgtttctgtttctgacatcctcgt

SEQ ID NO: 8186 - DNA, 122 bp, Homo sapiens
gaagttcaggaacagttctgttgggatcaactggaaatccctgtggagataattcttaagcggctaagcaacataagaactgtgatattgagtaagcagtttactggagttcacagagacgc

SEQ ID NO: 8187 - DNA, 122 bp, Homo sapiens
gtttgtggataacagtaagaaggaaagtttgcacttggtttcagtgagaccccaggagggcgctgcggttaacacgggttatgtgactaggaggatatgagaaaccccagccagtattccat

SEQ ID NO: 8188 - DNA, 122 bp, Homo sapiens
tgtacaaaatgatcctggagcatcttattatatcaagaaagttatcaaaactactggggtcgccgggcgcagtggctcacgcctgtaatcccagcactttgggaggccgaggtgggcggatc

SEQ ID NO: 8189 - DNA, 122 bp, Homo sapiens
acagataattcaagtgcaggtctgacagggggtgaccctgggtgaatcactcaattgctgcgagcctccatcttccgtctgcacgaggtattgttagaagcatctacttcctggcgatgttg

SEQ ID NO: 8190 - DNA, 122 bp, Homo sapiens
agcgctgccctctaattctagagtctcagtgtcggatgttctgatttccacttgtctaagcgcagctcttctccgagttcacctgtctggagttcaccgagctccctggatgtaagatccgt

SEQ ID NO: 8191 - DNA, 122 bp, Homo sapiens
cctttcctgaccgcctctgtgtggaaagtgtgcttttctcccaaatcacatccccagaatcgctttacacctgtttctagacccagagaattttagctggggactccgactcctccctgtca

SEQ ID NO: 8192 - DNA, 122 bp, Homo sapiens
aatccccatggggccagggaaagcccgctgcagactggtttaccagaatatttttgtccacggctcccagaccaagctaaaaaataaaaaccgcacgagagaaaaggcctttgcgagtggaa

SEQ ID NO: 8193 - DNA, 122 bp, Homo sapiens
ctcccttcaggaatttgctcctctacataacaatgggcagctggtacccagagcacctgccgcatggcctggcctgccagatgcagataaggagagatgatgactccttgtcttgagtcacc

SEQ ID NO: 8194 - DNA, 122 bp, Homo sapiens
aatgagggccacctggcccggccactacaagggtgggggcaagggtggggtcagcaccctcgcgacgcccagaaaggccactaaggaagccgcagagcccaggccaccgagcacagcgggga

SEQ ID NO: 8195 - DNA, 122 bp, Homo sapiens
aggcggtcttgccaaaaaagccaaccagtttgagggaaggagaaacaagcaccaaacctccgagggagcagctccaaaaacacagtccttacaaacacagacaccttcaggagctccgaatt

SEQ ID NO: 8196 - DNA, 122 bp, Homo sapiens
tctctccctctagatgcaaagcacttttttggagcaattaaggaaaagcataaatcagtccggttttaaaagctcaggctgactttgtggattgctaaaattagcgtctccataaaggaaga

SEQ ID NO: 8197 - DNA, 122 bp, Homo sapiens
ataaattttctcatctgtaaaatgagaggagtaggcatgtgatcattaaatcctgggttacggtaggaggcatcaatatgaaatgtttagcttaatatagatacagatgggtaaatatagaa

SEQ ID NO: 8198 - DNA, 122 bp, Homo sapiens
ctgcactgtgtgtggccggatggccctggacaagccccttcccctgagccagaatctgctcgcctctggagcaccggctcctgcacgtgcttcccagcagaagaagcgccagatctgggacc

SEQ ID NO: 8199 - DNA, 122 bp, Homo sapiens
cagatcccaagtgcatgctgggatttgtggacaaacatctttacagaggactacaattcccgagatgctgaagaaccagcggtgaaggcgttgcattcagggaaatgtagttctcttaggtc

SEQ ID NO: 8200 - DNA, 122 bp, Homo sapiens
gtttccagtaattgaacaattaggttataaaacttaggaatatcaccactatcaaagtcccgtaattaattactttgctcagttagtcacatctaactttaagattagcaaaggcaaagtac

SEQ ID NO: 8201 - DNA, 122 bp, Homo sapiens
taagaaatggcccttcagccccctcccctcacctggctcggtcccacctgagggcaagagcggaggcaaaaacaaacaggcagggagggctgaccttgttgctaccgacagtggagcggcgc

SEQ ID NO: 8202 - DNA, 122 bp, Homo sapiens
gaaagccctgcggccgccgcgcccctagcccgctaagtgcggaaactccgggatgtcactcgggaaatgcttccctcggggaaccgcttccctggggagccggaccctctcccccgccaaag

SEQ ID NO: 8203 - DNA, 122 bp, Homo sapiens
agttatatacctattgaaatgaacatctatgtttaacaaaagacacatacatcggctgggcgcagtggctcacgcccataatccaagcactcaggccgaggcgggcagatcttgaggtcagg

SEQ ID NO: 8204 - DNA, 122 bp, Homo sapiens
acgctgctgcaacagatgattgctcggacctgcctctcagcagttctcagatgctcactgcggatgtttggggtttctgtgttgttttgcttgtttgttttttcacgcaaatgacttctatt

SEQ ID NO: 8205 - DNA, 122 bp, Homo sapiens
ctggatgcaaggaacccacatcattcccacacaaccggtagtgtttgttagtgggtgcttcgatatggaagggagataaggagtctcctaggcagagaatcccccgtaggagctgtcattcc

SEQ ID NO: 8206 - DNA, 122 bp, Homo sapiens
ggaggctgaggcaggagaatcgcttgaacccaggaggcggaggttgcggtgagccgagatcgtgcagttgcactccagcctggaaaacaagagcgaaactccgtctcaaaatacataaataa

SEQ ID NO: 8207 - DNA, 122 bp, Homo sapiens
caatggctcctgctgaaccaggattcgaacgtggggcaggcagcagcagctcctgctgtacggggatgcagatacggagcgggcagcaatgccccaatgccctgtggcctcttctgggcagc

SEQ ID NO: 8208 - DNA, 122 bp, Homo sapiens
gtacagaccatgcacatgaaccactggacgctggggtatcccaatgtgcacgagatcacccgctccaccatcacggagatggcggcggcgcagggcctcgtggacgcgcgcttccccttccc

SEQ ID NO: 8209 - DNA, 122 bp, Homo sapiens
ggtcaactcgggagacataggattctagttgaatgtggaggagtgacagaggaaggagtccggagctgctctgagggttctggccaggcctctgcagcacagctctcagggcagtctgagag

SEQ ID NO: 8210 - DNA, 122 bp, Homo sapiens
ctgtggcagcagaatctgtgctaggccttccttcgtgaaagaggacaagatcagggctcacgtgactggggccgctgtgactctgagcctctgcgttctgtcagatgagggtagtggtgctt

SEQ ID NO: 8211 - DNA, 122 bp, Homo sapiens
ctcaggccgtcgaagccacccaccgcgaacagctgcaagtgaggacatgggccggggagccgggtgccagggccttagggccctcggcctcatcgcttcagtccttacagtctttgagctgg

SEQ ID NO: 8212 - DNA, 122 bp, Homo sapiens
aaggccaacgtcagaaggatgtttctgcgaaagcttctgtttagttaggtgacgttatcccgtttccaacgaaatcctcagagaggtccaaatatccacctggtgagtctacagaaagtgtg

SEQ ID NO: 8213 - DNA, 122 bp, Homo sapiens
ctgggactgccggaaaacgacgtgagggaaaaactcagaggctacgaaaaggcgaacagacggagggcctgcctcaggggagctaagcagctcgcctgaagccccccatctggaaatgacgt

SEQ ID NO: 8214 - DNA, 122 bp, Homo sapiens
tcccagcatcccaggacagcccgccacgcgctgggagccacggccgagctccttccattccggttcacacccagaccgtccgagctctgcccatcagccaccacgcgctgggagccacggcc

SEQ ID NO: 8215 - DNA, 122 bp, Homo sapiens
gccgaggtcaccaccaacatcccaaagatggaagcagccaccaaccaagaccaagatgggcggacaacaaacgacatttcctttgggacatctgctgtgacacctgacatacctctcagagc

SEQ ID NO: 8216 - DNA, 122 bp, Homo sapiens
gaggcggcgccccccggcactgccgagagcgcgaacagggctggtgtggtggggaggccccgcccctgcaggggctgggggtctcccggcaaaaggtaggagggcctcgagggaaagctgag

SEQ ID NO: 8217 - DNA, 122 bp, Homo sapiens
gcgcatgcaggtggcgggcggcatggggccacgccccctgcaggcacaccctccccctcacggactgtccatggctgctgtggactcattgggtggctctctgaggcctctgtccccacgat

SEQ ID NO: 8218 - DNA, 122 bp, Homo sapiens
gcaggaagccggggaagggggcctcctggggtccccgagggtgcaggctgcagagacgcccgggtcctgcacctaggaggtcccgccccgctaactcgaaaggggcgggtctcctacttgtc

SEQ ID NO: 8219 - DNA, 122 bp, Homo sapiens
tcttccccacgggccagctgacctttgactgtgacgttggccacggtgcgcacccggccccgcatctcgcacaggtagataccatcatcgtctgccttcagcctgtggatgatgaggcgccg

SEQ ID NO: 8220 - DNA, 122 bp, Homo sapiens
cccagcgttgcatagcaacgtccctggagcctagcaaccgtcagtcacgccccctagcaacgtcatgcctaatcctcgctccaggcttctgccgagagagagaggggcaaggggctcgtgga

SEQ ID NO: 8221 - DNA, 122 bp, Homo sapiens
agattgtctctgtagaggcttctggatgtggttgtaggaagcatggactgtgcaagcttgcgctgaaggaggacgagaggatggacctacaaccttgaaacagagtgtttggaagagctgac

SEQ ID NO: 8222 - DNA, 122 bp, Homo sapiens
ccgggccctctgttggggcctccccttcctctccagggtggagtcgaggaggcggggctgcgggcctccttatctctagagccggccctggctctctggcgcggggccccttagtccgggct

SEQ ID NO: 8223 - DNA, 122 bp, Homo sapiens
cacgcgtgcgcttaggcgccgctgagcgctgactgggtgcgagtggggaagctgctaacccgacccggattggcgctgaggtggcccgtggggcaggtgagtgcggggcgggagtcagcgga

SEQ ID NO: 8224 - DNA, 122 bp, Homo sapiens
cgaggggcgatgcagacagaggctcctcagctgcacaagagaattttctctggctcaagtcggtccttcaacctgggaaacccatgtttgctaaagctggattcgctctaggagaaacaggg

SEQ ID NO: 8225 - DNA, 122 bp, Homo sapiens
taaaaattagaagaaattatccgggcgtggtggcaggcgcccgtaatcctagaggagaatcgcttgaacccgggaggcggaggttgcattgagccaagatcacgccattgcactccaccctg

SEQ ID NO: 8226 - DNA, 122 bp, Homo sapiens
tgagaggctgctggctgtgcccagagatgtcttggccacgaacccctcagtcactgccagcgggttctgcacgcgccttggagtcccgggcatccactgacatttcttcccccggccccacc

SEQ ID NO: 8227 - DNA, 122 bp, Homo sapiens
ctttaagaggcgtcggctccacccctctcagagtcgcggtctgacgcgagatgacagcaacgagttcggtatgtctatgcaaataagcgccctcttgtgggccaatggggagcggaggtgcc

SEQ ID NO: 8228 - DNA, 122 bp, Homo sapiens
gtatttatatatacatagtatttgtatatatttatagggtacatgtaatattttgttacacgcatagaatgtgtaatggtcaagccagaatatttagagtatccattaccttaagtatttat

SEQ ID NO: 8229 - DNA, 122 bp, Homo sapiens
aaaacatcagacttagaaggtagagtcagtgagtggaaggagtcttaggaattatttattcgtaatctctagtagaaaaggaaaacttgaactttagagaactttataataaaatgtgggat

SEQ ID NO: 8230 - DNA, 122 bp, Homo sapiens
caacagcagtggcagcagcgacggcaaagtggcggctgaggccgaggcacctcgtgggctcgtgtccatgccgggccagatgaagggaaaggccgggaagtggggagccgggggtgccctga

SEQ ID NO: 8231 - DNA, 122 bp, Homo sapiens
ttccttgtagcgaagggagctcccaggagaacagactgtaagggccagaccagcaggcaacggcagtggtccagaccacagatgatggtggcatgaccccaggggtggcagtagaggtggtg

SEQ ID NO: 8232 - DNA, 122 bp, Homo sapiens
tgcaaaacacacataatcccaattttaaaatgagcaaaggagtccgagcgcagtggctcacgcctgtaatctcagcactttgggaggctgaagtgggtggatcacttgaggtcaggagttcg

SEQ ID NO: 8233 - DNA, 122 bp, Homo sapiens
tgtgttggagcatgtaggtactgagcatgtgtgccaaccacaggcctgtctgcctttacacgcccgacctcgccgtatttcatgaacaggcacgcacagccaaccgcgggcctgtctgcctt

SEQ ID NO: 8234 - DNA, 122 bp, Homo sapiens
gcagggagggtctccatgacgcaatatctccacaccacggcagggggcgctgttcacgtgcgcgagaacgctccttagtgaccagagcctttgctccagggacaggagctgcctcagagcac

SEQ ID NO: 8235 - DNA, 122 bp, Homo sapiens
aagtggagaaatgacacactccgactcacaggagcagggccactgtgaaaagaacagttacgtagcaggtcatgggacagtgctagtgtcacaattcatgagtgacagtgtggtgggaacta

SEQ ID NO: 8236 - DNA, 122 bp, Homo sapiens
tgagcatccagggtgtctgcaagtgggaggttgaggggtgggaggcaggcctgagaccctcgtcagcacctcttctatatggctgtcccatggcagaaccatgcccatttggagggtgggag

SEQ ID NO: 8237 - DNA, 122 bp, Homo sapiens
cgggagatgagcccgcggcccaggaggactgagccccctgtgctcactggccccggcccacgcaggctgcatgccccatttctgctgccgcagccactcttgctccacgcctagtgccagtg

SEQ ID NO: 8238 - DNA, 122 bp, Homo sapiens
ctctctctcccgacctgtggatcccaacagcccaacccagggcatcgtgaacaaagctttcggcatcaacaccgactccctgtaccatgagctgtcgacggcagggtctgaggtcatcgggg

SEQ ID NO: 8239 - DNA, 122 bp, Homo sapiens
ggtgccctggcccagcctccttccggttggggttggacccgccctggcagccaggttttgcgtcacctgccccacccgccctgtaacctacttgcccaactgctatcccggtggccgtgagg

SEQ ID NO: 8240 - DNA, 122 bp, Homo sapiens
tggactgagtatctggaaagccagtctgcaggatgggttctgagggcagaacccagaggacgtgcagtgaggaagctggaagagagcacactccctgggttcctttggtttactgtcctatt

SEQ ID NO: 8241 - DNA, 122 bp, Homo sapiens
acccctcttatggaatcccgcgggaacagcaaaaggcagcgttgcaggagctgacgcgggcgcacgtggagtccttcaactacgctgtgcacgagggtctcggcctcgcggtgcaggtgagc

SEQ ID NO: 8242 - DNA, 122 bp, Homo sapiens
ccccgtcaaggagcggtttccagggacaccggctctcgggggcgccagtcctgtccttggcgcccagcacatgctactagtgacattcgcaagggtgggtctggttctcagcctccgacctg

SEQ ID NO: 8243 - DNA, 122 bp, Homo sapiens
aatgaatgaacgaacgaaagtggagtggtggagaggaccacagaagacgcggtcatccagcgcgtgaaccttcaccactgctgggctgtggaccctcacttccgccgccaggaagtttcggg

SEQ ID NO: 8244 - DNA, 122 bp, Homo sapiens
ggtgcctgcagccttgagtctgaacccagctggccctggctctctgcagccgcaagaggccggagctgcccagggcaccgtcgactccgaggatcaccacatttcctccggtgcctgtcacc

SEQ ID NO: 8245 - DNA, 122 bp, Homo sapiens
agattgcttaggacaaaacctgacaccgagcggtaacattttactcattcttaccctacccgccacccccttgagaaagtcaggtcccctggcctccaaggatgcaaacatggaaacccagt

SEQ ID NO: 8246 - DNA, 122 bp, Homo sapiens
gggtgggaatggcagaactgactgaccctccagccccggtgctgcccgacctgctggagtcgggagacctctgctggcaacagacagaagtgcacagctctcctccagagaacagcccggaa

SEQ ID NO: 8247 - DNA, 122 bp, Homo sapiens
cccgacgctaggggcctggcagggggcagcaagagaccgcggtgagcgcggggtattgaacgccaaagaaggggtttggagggtggggtggggcctgggactcccagtcgcctgggcagatg

SEQ ID NO: 8248 - DNA, 122 bp, Homo sapiens
atggcgaggggctcctccgccaatcgcagggccgtgctgcggcctcctgacgtggcgcgccgaaagctgctgcaaccatggacagcgcccagaagtgcgagccaagtgcaaggggctgctgc

SEQ ID NO: 8249 - DNA, 122 bp, Homo sapiens
tttatgttactgtcacgctgtgcaaacagggaaatgagaaaatgaccaagccacacaagacgtactttatgatacttagtcccaatatgggacttgatcagggttgttgggcctaggtcttt

SEQ ID NO: 8250 - DNA, 122 bp, Homo sapiens
tctttcatcaagaaaatggagaatatgtaaaagtttgacagataagcatctgaacattaacgtgcctggtatgtaatagtaaaggaagatgtgaatggtaatggagatacagaggagggagc

SEQ ID NO: 8251 - DNA, 122 bp, Homo sapiens
gagagcaggaggctgccagaaaagaactcaggtcaggggtgcataggcggctgaggagtgcgggacgggctgagagttggggtgcctccccgcccgcaggtgggtccgcagatcccgcgggc

SEQ ID NO: 8252 - DNA, 122 bp, Homo sapiens
tccaccacgtggctctgctggagtctcttaatctgctgtgattctgggggctgcccaattcgtgaaatcgttcactgctcaattaaactcctttaaatttaattcagcttaagtttttcttt

SEQ ID NO: 8253 - DNA, 122 bp, Homo sapiens
cggcgtggggagcgcgcgggggacgcaggccccgcttcacctgagccggcccggcgtgcgcgcctggggcggggcttttctcgcttcacaccggtacagacgaggaaacttgtgggggcggc

SEQ ID NO: 8254 - DNA, 122 bp, Homo sapiens
tctcttgtcttcagttattcttaggggtcatggggaatgtgttcccctctcccagcccagcgctctccagcctgacagaggtggggcctacactgcctgcatcctggggcaaccccagctcg

SEQ ID NO: 8255 - DNA, 122 bp, Homo sapiens
gaaggcagattcccgcaaaactgtccccagtttgccccaaagccctccaaatattccccccggagcatagggatacaaggcagaaactgccgccgggccccgcccatatctcctagttggcg

SEQ ID NO: 8256 - DNA, 122 bp, Homo sapiens
aagcagaaccttgaatttcctaatatatttctaacagataatggtcaccaccactaccctcgctgccactgctgtcttagaaggtagaaagaatatcaagtatctgccttaggaattctttt

SEQ ID NO: 8257 - DNA, 122 bp, Homo sapiens
aagaccattggcaatctcattgcaagaaaaaccgaacaggtaaatcacgtgcaaagcctccgtgacttggggcaccgtcatggtggatgctgacgtgtcctgctgtgagcctggcggtgcga

SEQ ID NO: 8258 - DNA, 122 bp, Homo sapiens
tcctggaggtggtctctgctgtggctctgcatgccaccaatgctctctgaccatctctaacggcagcctttgatctcaaaaatgccccagcctctaagtaacccatggcagtatgaagccaa

SEQ ID NO: 8259 - DNA, 122 bp, Homo sapiens
cgcctcggcctcccagagtgctgggattacaggcgtgagccactgcacccggccttacttcgaatattttctattgtagttggctgaatctgcagatgtggaactcacaaatacagagggct

SEQ ID NO: 8260 - DNA, 122 bp, Homo sapiens
caggaagcggaagcccaggtcaagacccacttggccctggctcgtttctccccttgggggcgttctgcaaccctctgcctggtgctgaggtccaccagatgccccagagcttccagactccc

SEQ ID NO: 8261 - DNA, 122 bp, Homo sapiens
gaggtgggtgaaatttggattcagagttactgaagaggcgtctgagggtgggcttctgtacgatgggtgggtgcttggttaacatggctagatgtctggcttttgccaaacccaaagcggct

SEQ ID NO: 8262 - DNA, 122 bp, Homo sapiens
ctgccccattggccacgtgcccggtcatcacctctcggaggccaacacgggaaactgaggcgtggaggagccctcctaagccccacagctctgggatgggagccaggcctagccacctgcag

SEQ ID NO: 8263 - DNA, 122 bp, Homo sapiens
cgtcgctccgctgacaggctgcgggcgggcaggcgggaggcgtagtgtgggtcgcggtggcggccccggccgccggccctggccgcggcatcatgaacatagacgtggagttccacatccgg

SEQ ID NO: 8264 - DNA, 122 bp, Homo sapiens
cctttcctaactctctttgcgactcccagaggactgcggaatagggaatccccggcaagtcgccttcaggagagacccatcacccgctgcggcctccataacctcctcccgagagattccgc

SEQ ID NO: 8265 - DNA, 122 bp, Homo sapiens
cacgggggccgcaccgctgtgtctattggctgacacggggcggggtttggggccccctaacgtccccctggggtcaaaggtgacagaaaaggcagaagctggggctttctggaggatttaac

SEQ ID NO: 8266 - DNA, 122 bp, Homo sapiens
acacacttcttgaatgttctaccccggcagggatgcgcattctcaggaaacacgtcccctcgccaggcccctgggaagagtcaaaaccacgatgcctgcccctgaagcgcccgcgcggctcc

SEQ ID NO: 8267 - DNA, 122 bp, Homo sapiens
agagaagggcaactctacgttggaaataactgatttgaaagcagagattaaagaaagtaacgactaggtaagagaggatctctttacctgcaaccaggagtctcataacttggaaccttgct

SEQ ID NO: 8268 - DNA, 122 bp, Homo sapiens
acttgatccagcaaccacactggggttatggggctgctggccataccaggattgccattacgtatcaaagcttaggaaataactgaagcactgacttttttttttttttttttttgagacag

SEQ ID NO: 8269 - DNA, 122 bp, Homo sapiens
agcgacccagcccgccctccgccaacgtttaaatagccccgcgcccacctccctccgcctcggattcggctcccagaataagcaacagctttacttccacacaggtgcacccacctgtggat

SEQ ID NO: 8270 - DNA, 122 bp, Homo sapiens
aggaaggttctttgtctcaattttgaaaagagaaaaagagagggagagatgaggagagaccgaggcagcttaccatatccatagacagaggccggagtgctcgcggagctggtctgaggtcc

SEQ ID NO: 8271 - DNA, 122 bp, Homo sapiens
tgcctccatagctcacagggaatgggtaaccacaactcccgagaaaattcctgccatagccgggatctccccacggagcagaagaccccttcctgtgggcctcagcatgtgaatcacacatc

SEQ ID NO: 8272 - DNA, 122 bp, Homo sapiens
taatgctggcccattctttgagaccttttctccttctctgcctccctcaagatgagtgcccgggcatgagaagcacatggttccatgagcaggacccatctctcttctgtgaagatgcgttg

SEQ ID NO: 8273 - DNA, 122 bp, Homo sapiens
acctgactcacccaagtgagaagggggaagagagaagcttcatccttgataacgcattaccggaacttccaggttctattctggcccaggtagtcagtgctccctgcctctgcaggcttgcg

SEQ ID NO: 8274 - DNA, 122 bp, Homo sapiens
tgacccagcaaccaggggcctgtgcagcgggatgtcctgagtggggtctggccaggacctcgtggagtgcgtcagcaatgcttcactctcagacgcttggcggaggccacaggcggcctgac

SEQ ID NO: 8275 - DNA, 122 bp, Homo sapiens
ctgttgcccgtggtaactgtgtgtgacgtcataaagcttccttgcaccttggcaaggccccgggagcagggaccttttctctcccactatacagatggggacactgaggcgctggttctcaa

SEQ ID NO: 8276 - DNA, 122 bp, Homo sapiens
tcagtgaccatctacaacaaatcagcaagaagcagggctcgcagctgaccaatggccgcccgccgggggtgggctgtcccggcccttttccaggcccaactgggtttgttaaagcgacaggc

SEQ ID NO: 8277 - DNA, 122 bp, Homo sapiens
atgcttcttacctggcctcgagcaatcttgaagggtgtggcattcaccatgtgctgcttccggataccactccacctggttcggtagtccacaatgtggcaggggggaagaatgtactcgtc

SEQ ID NO: 8278 - DNA, 122 bp, Homo sapiens
cggtccaggtcacccacggtccaggtcacacacggtccaggtcacccacggtccaggtcacgcacggtccaggtcacccacggtccaggtcacccacggtccaggtcacacacggtccaggt

SEQ ID NO: 8279 - DNA, 122 bp, Homo sapiens
cccccgcggtgggtcgtgctgttattgaccatggagacgatggccacgcccaggttgcagcggatgccaaagctgatgcagaagcccagaccactcatgatggcgataatgtagcggcgagg

SEQ ID NO: 8280 - DNA, 122 bp, Homo sapiens
tttgccacgttctggactgtcttctccctgcacaagccagggtgtgtctcggtagctgtgcgtggtgtggagtgtgtgtctttcctccctgaagctgtgcggagcgaactggcgcctccgag

SEQ ID NO: 8281 - DNA, 122 bp, Homo sapiens
ccagtcacactgcacacagcttctcattttcaccattagggaaaggtcaagttctcacaccgataaggcacagggaggttgcgggagaccttgggtctccggggatggttcctccagcgtcg

SEQ ID NO: 8282 - DNA, 122 bp, Homo sapiens
gcagtgtttatttctaagttgtgctctagaattcatagtgaatgctctggaattcaacttcggcctttagaaacactgaagtttaaatcagagcaacggtaggccaggtatgtctggtcttt

SEQ ID NO: 8283 - DNA, 122 bp, Homo sapiens
tctgacccaatcagacatctagcacccagtgggccttctttctgcacaggcccatgctgtcgcagatggtctagccaaccatgccttcctgcatttttcacttctcattgcaaacttaactc

SEQ ID NO: 8284 - DNA, 122 bp, Homo sapiens
cgggactaggagcctcggagtcaaggggcggagcgccctttgctaataagccaatcagaacgtgagacgctccggtggggcggtgcgcgtcgagcgcggggtggagtctgggtgacttggct

SEQ ID NO: 8285 - DNA, 122 bp, Homo sapiens
gtccagccagaaccagcatcttttctgcacggctggagttgggaattttccacagcttagcgcactgctccttagcttttcgctttgccacagtggaaagcagattttccaagaatcctggc

SEQ ID NO: 8286 - DNA, 122 bp, Homo sapiens
gggctatgcgaaagaaggcggggagagtggggtggggccgctccttggaacggaagcgcgcggcctcgaggcccttccggtgcgggagaaactactactcccataatgccccgcggtcccgc

SEQ ID NO: 8287 - DNA, 122 bp, Homo sapiens
gcgcgcggactcagtacgcgggcacctggtgctggggcagcagctggcagccgctgttgacgtggctgaggactttctgcttgagctgcgccacctgctcgcgcagcaggctcgccgtggac

SEQ ID NO: 8288 - DNA, 122 bp, Homo sapiens
cctggggatgtctgggccaccggaatgcttggaggcccagcaccctctagctcaaggatccggcactgatgagacattcacgttgcctggagagctttattttaaacaacgaaggagaaaga

SEQ ID NO: 8289 - DNA, 122 bp, Homo sapiens
gtgctgggattataggtgtgaacagccttgcccggccactgtctcctttctcagcatcttcgagtacaatgcctatggctgaagtactgttattatacatgttttttgtttgtttgtttgtg

SEQ ID NO: 8290 - DNA, 122 bp, Homo sapiens
cctttttgcttccactctgccttcatcactcccaagcgttcacttctctgggattacacacgtatacatactcatcagaatcatagctttctctctgccatttcctttccttttgcctaagg

SEQ ID NO: 8291 - DNA, 122 bp, Homo sapiens
ttttctatgcaggctggtttcgaactcttgagctcaagcaatctgccggccttagcctcccgaagtgctgggattgctgagaattaatatgtatgcactgatgatcctctcaacaatccaaa

SEQ ID NO: 8292 - DNA, 122 bp, Homo sapiens
gagaaggttctgtgtgtgtctcagtgtggagtctttgccactgcttggtgaaataggagtcgcatccatgcatggccctgatacttggaacaacgctctccctttacgtaacaggaggcaca

SEQ ID NO: 8293 - DNA, 122 bp, Homo sapiens
aaagagcgtagttctcagccagggggtgatcctgcccccagaggacccctgcaatggcagcggacatttgcaacagccatgattgggttacgccaagacaggggcagggggtgctcctggca

SEQ ID NO: 8294 - DNA, 122 bp, Homo sapiens
ctcggcaccccgggcccatacaggaccagggcagcagcattgagccacccccttggcaggcgatacggcagctctgtgcccttggccagcatgtggagtggaggagatgctgcccctgtggt

SEQ ID NO: 8295 - DNA, 122 bp, Homo sapiens
ttctttctccgagggacaagatatatacgcctagtggtttcatgtgctacgtttcatctccggacatcaatgaactgcagacacccccgcgcggccctgacttagccagagggattccctgg

SEQ ID NO: 8296 - DNA, 122 bp, Homo sapiens
tattgtggacatactttgaaggaagaaccaattggctaccctagagttatattctacttccgtttcccgtttcaccaagcatggaacctggacccagtccacagtgtgttttgttttgcttc

SEQ ID NO: 8297 - DNA, 122 bp, Homo sapiens
tgtgtgattccggcaggcgcccccccccacccccacgctgcaaagggccgccggacttagcggatgcaaagacaggacacgaggtacatgggaatttcaggtagaccctgaatcattttgta

SEQ ID NO: 8298 - DNA, 122 bp, Homo sapiens
ttaaagaaggaactaagtgagaaggtgactgagaaagaagtgtgatttcaaacattgcagcggctcacacagtgtttgttgcactttatttttcagtgggtttggtgatttggacggattaa

SEQ ID NO: 8299 - DNA, 122 bp, Homo sapiens
gtttcacaacctcaggccctggtgtaggcttctacatcagaaccctgggcgtcagcaaggcgctgcacaaagaggcctgcaacagaagccaaacacttgggtttaagtcctggaccggcaca

SEQ ID NO: 8300 - DNA, 122 bp, Homo sapiens
agccaaaaaaacacaactttttacaacaaacactaagtttctccatatgactctcagttacgaaaatatttaaagatatgcattagaaataaccttaaaaattactcttataaccaggacaa

SEQ ID NO: 8301 - DNA, 122 bp, Homo sapiens
ggaggaaaaatatctaccttctagaaggggtgccacggcagcgacagcacaaggcccgtgcgtctggggttcctgtaacaaaagaaaggcatatgaatgtatgatatttaatgtaagtttta

SEQ ID NO: 8302 - DNA, 122 bp, Homo sapiens
ttgggcgctggcctccattctctgagctgcttggtagggagtgcagagtagggtggcccacggctagggtgaggaccaaaaagcaggcttatttgagcctcctagacactatctggagctca

SEQ ID NO: 8303 - DNA, 122 bp, Homo sapiens
atggcggccgcctaagtcccacagagacgggagtcgggtgggatcccaggctgggccccgcggcgggtaagtgcctgggagaggcggcgggatagggtagggtgcagggaacctcctggcgc

SEQ ID NO: 8304 - DNA, 122 bp, Homo sapiens
atcccgaggtgattcacggagtttctggggattggcgcaggctggcgctgggaacccccgcgccggttacccctttcctcggtggtagaggccgggcggggcagcgcatgcgcgtggcgggc

SEQ ID NO: 8305 - DNA, 122 bp, Homo sapiens
aatgaagagacatcttgcccaaatgcttcatttgtagattagaaagctacagttaggatacgctacagttaggatacaagtgacttgcctaaggctggagcaccaagagttcttttttccca

SEQ ID NO: 8306 - DNA, 122 bp, Homo sapiens
tcactctgtctcagcataaaagaaaacattaattaggtgatttccaggtccctctagttacgacatttttcaatccaggttttgtagtctggtctgagagaggaaacagtccccaaaagatg

SEQ ID NO: 8307 - DNA, 122 bp, Homo sapiens
gcgatcatcacagcttcaatgagcacccacagtcccacagtcccacagccccctccccagcgcggctacaacaggctgcatcctagatgcgatcctgggaagggcccgaggtgatcatgctg

SEQ ID NO: 8308 - DNA, 122 bp, Homo sapiens
gctgggcgagtccgtagcggaagtcggagcggcagagcagtgattgggtgcggccggcaccgtctctgggcttcgacttccgggtgagaccgtgaaggtgtggcgcgacgttggagaccggg

SEQ ID NO: 8309 - DNA, 122 bp, Homo sapiens
ttattattctctgaacaatgaggtaattcgagatggaccttttcttccctaaaaggaatacggagtctttccaggtcccatttctgcatcctggatggtatcttcaccttagctgctgaagg

SEQ ID NO: 8310 - DNA, 122 bp, Homo sapiens
gccggcggactggcgggtctccgacaggtgcgcacactcggcgcaggctgtcgctgagcccggaattctgcaccgggagaaacttttcagcccgcagagcaaccgcagggcagtggacgggg

SEQ ID NO: 8311 - DNA, 122 bp, Homo sapiens
gctcagggccgcttccgtcccctcccgagtccgggaagcagctgcggcgaggggcggggccgaggccccaagtttgtagcgctcagccttgctgtgtgttgttttctgggtagctgtcgagg

SEQ ID NO: 8312 - DNA, 122 bp, Homo sapiens
ggaaactttgaaaccactggggacacatctgtctataggtattagcttgaatggtacatccgtgccgcgcgctttacaaatctctggcggggcgggggtaagggggtgagcaacccgacgcg

SEQ ID NO: 8313 - DNA, 122 bp, Homo sapiens
ttagaaaatttcctcagcaaaccgatgagagattgtggttgcaagcttcagtatttgcctcgcttcccttcccttttcatatttacagaattaaaacaacctcaagtacctcagactctgca

SEQ ID NO: 8314 - DNA, 122 bp, Homo sapiens
gtggaatggtggcttgggagacagcagagatgcaagttctaatcctggctctgtcactttcgatctctgtgtccttgggcatgttattttctctctctggtcttggtttcttcatccaggaa

SEQ ID NO: 8315 - DNA, 122 bp, Homo sapiens
ggagataggagccaccaccacctcggacagatggggaaactgaggccggcacaggcgagacggcttggttatcttggttattaaaaatcacacacccgattaagtacaaaatcaggacctgt

SEQ ID NO: 8316 - DNA, 122 bp, Homo sapiens
tccttaacgccaagccggcacgccaggcaaaagcggctcggacgccctcaccccaccttccgcactcagggccgaggctgtgcctggccacctgcttcccagcacatgcacacacgcgcgcg

SEQ ID NO: 8317 - DNA, 122 bp, Homo sapiens
tgacgccagcgtctgggaagacgcccgtggccaggcagacagactgtggtctagcggtagcgttaagtgtcaagggaaaacacccgctacttagcagacaggaaaagggagtcttcctttcc

SEQ ID NO: 8318 - DNA, 122 bp, Homo sapiens
tagtccgcgaggaggcacggcttcccccgcccctctcataaaccattagcaccgggagcgcgagcgagtcccagccgggagacagccccgcaccgccctcgcgctctcacctttcaaagcgc

SEQ ID NO: 8319 - DNA, 122 bp, Homo sapiens
acctcaaggactccagctaagaaaaacatgtggtgttagggcctccgatgcagtgccctgcgttccccgcgggtccaggtgacacgcatcctctccggtcggaaagaggagctttcaagtcc

SEQ ID NO: 8320 - DNA, 122 bp, Homo sapiens
gttactgtgaggcggcggctaagaaggcggctctggtggcggcggtggaggctgaggcggcggccgaggcggcgacggaggaaacagaagatggtgaggatggcctccaggcccccactccc

SEQ ID NO: 8321 - DNA, 122 bp, Homo sapiens
acaagatgacataggaagaccctgtgcagggagagtttcaaagacagtaagtagatatgacggtcctgaaagcaaagagcatgagtgaagtcaatgatgtatatagcttaatttgggtgagg

SEQ ID NO: 8322 - DNA, 122 bp, Homo sapiens
ggaggttgtcctaggctttcaagtcacatcagacactcattacactactgtgtattggctcgcgcctgtaatctcagcactttgggaggccgaggcgggcagatcacgaggtcaggaaatcg

SEQ ID NO: 8323 - DNA, 122 bp, Homo sapiens
ttgaggaatagggaagtcatgtatgttatcaaccacttcctaaatgatacctagttaacacgttaggggagggaatcgaatctgaaagtgatacccatttagtgaagccaagcaatgtagca

SEQ ID NO: 8324 - DNA, 122 bp, Homo sapiens
ctcagctgccgctgctgccgggaggtgccggccccacgcggcgcctgagcctccagagcgcgaagcctccaagcctgctgcaggccccgcctccttgtcagttgcgcgtccagcgccacctg

SEQ ID NO: 8325 - DNA, 122 bp, Homo sapiens
ccggcgtgcagcgcctcttgcccgcccctgcgtggggacgcggccgcccggggagaggcgcgcacagccactgtcgggctcctggcacgcagccccttgctctcccggccgcgacgacccgc

SEQ ID NO: 8326 - DNA, 122 bp, Homo sapiens
ctggtcctctgcatcctcagcagcaagcatcactgcacatctttagttctggccaccccacgggcgtcaggggcagctcgccgcagctgtgacgcacgtttccctggtggctgatggtgtca

SEQ ID NO: 8327 - DNA, 122 bp, Homo sapiens
tctctccactcctgcgggcggcgcagggcggggacccagctaggggcgcggtggtggcgacgctgtagcctctgcaccatgcgctaatagaaggcggaggagggggttgcacgacctgccat

SEQ ID NO: 8328 - DNA, 122 bp, Homo sapiens
cctgagtgacggagaccctgtcaccaaaacaaaaacaacaaagtggtaatacaggcatcacgagacagcagggaatctgactctgaggccagggtggcttgtgtgtactctagtattcttct

SEQ ID NO: 8329 - DNA, 122 bp, Homo sapiens
caggatcaccggagcttgtttaaagtcagtctacactgctgaatttcccatcatccccctcgggagcagccctgggcaaatggctgcactgacagctgtgactcaggcactggttcccagag

SEQ ID NO: 8330 - DNA, 122 bp, Homo sapiens
agctccagtctctcctcaggtcatttctggatggctgatctgctttgattctgatccacacgcatgggtcaggggtcagacagtgatgagggtagacagagtttggggatccttcctctttc

SEQ ID NO: 8331 - DNA, 122 bp, Homo sapiens
gctcgggggctgggggacagaacacaatgtacagcgtgccttctacaatttcggggttcacgcacccccaagcccacccagggccaggtcaaacgcgccttcgccgggttgctgtctacaat

SEQ ID NO: 8332 - DNA, 122 bp, Homo sapiens
cctagagaagcttccccacggaacgttccgcggggtcgtagcggggtttccgaaagtccccggggaaataagggcacatcttttgaggatgacccatgggtataatattaaaccacaaagaa

SEQ ID NO: 8333 - DNA, 122 bp, Homo sapiens
tatccgtttgaaaggcttgttcaaatagaaaaggacaaaggaccaagaaactggctgtgccgaattgtgcacgtcaatcaacatctttgtggagcctgcgatcggcgcgttgtggggaaggg

SEQ ID NO: 8334 - DNA, 122 bp, Homo sapiens
ccgacggcggcattacattctggggccacgaggaggcactcatcgtttcgttccaaccgccgccaacggccctggccctcgcgagctctggaactacagaggtcgcacggtgagttgccagg

SEQ ID NO: 8335 - DNA, 122 bp, Homo sapiens
cagttcacacagtcacctggggtaggccgaggtgtactttaacagctccctggatacagccgacaggtctgtgggaaaatgtccgacctctctattcatcaggaaatgcaaatgaaaacaca

SEQ ID NO: 8336 - DNA, 122 bp, Homo sapiens
tccgagggacgcggacgctcccccgctcgctcgccccggccccgggccccccggaccccccgcttggtcgcacaggccactcgactccggggccagcttgcccgcaaaccgatggcctcgcc

SEQ ID NO: 8337 - DNA, 122 bp, Homo sapiens
gaactaaccacttcggcaactccttggacactttccttcttgttaataatttgctttctccgcccctcaaaagcttgctgtttctgtaaatcattacctgtaagaggaaccgctgggagtcc

SEQ ID NO: 8338 - DNA, 122 bp, Homo sapiens
gggctccgggcgcatctaagccaatcagaaggagccaggtacggcgaccccaggagagagcgtgtgacgcacgcgccggaaaaagaggttacggggcgccggtgggacaaacgcagccagac

SEQ ID NO: 8339 - DNA, 122 bp, Homo sapiens
caagcaccccagggttacctcgggtgcttgagctggtcacaaacttcccccacaggcctgcggacattccacaaccccgaaaaccttcggacccccagctatgttagcacaaggacagtcac

SEQ ID NO: 8340 - DNA, 122 bp, Homo sapiens
tagctttttagatagagatcctttcaagtttgaagtgctgtatgtggtatggctttgtttcgtagagtgtgcagaaccaccaggccagctgtgtgagttagagttctttcattgtggtgctt

SEQ ID NO: 8341 - DNA, 122 bp, Homo sapiens
accgcatcctgggttcaagtgattcctgcctcagcctcccgagtagctggattacaggcacgtgccaccacgccccgctaattttggagttttagtagagacggggtttctccatgttggtc

SEQ ID NO: 8342 - DNA, 122 bp, Homo sapiens
tcatgggttttcgcagagtctgggggcaatttgtgtcctccagagaccagggaccagggccgaagctacggcaggggagacgcggccagggccgtggcttctagtgcgagctcggttcgcgt

SEQ ID NO: 8343 - DNA, 122 bp, Homo sapiens
accgaagtgaactggtgtttggaaacaactctctctctggcatcactgggatgttctgatcgtcgcctgtttcagtcggccagccttcctcaccgcactcaccggccccatcgcggatgtcc

SEQ ID NO: 8344 - DNA, 122 bp, Homo sapiens
ttcggtctctacagatctgggaactccagggacctcccaggagaggatcagacagggccccgcggcatgacgtccacacagctccttggtgctgtagcccgtgccagcatctctttcatttt

SEQ ID NO: 8345 - DNA, 122 bp, Homo sapiens
gcacatccattttcttcagaacccaaggaaaactagcccatcttgacagctctacttttgcgcctgttagtgctgccctgatccctgacaggaagagctggctaattttagataatctgtgc

SEQ ID NO: 8346 - DNA, 122 bp, Homo sapiens
gaaagagagaaaatgtttccaaatcatgtatctgagaatggatatccagaataaagaactcgaactcaacaacaaagaatcccaaacaattggatgttaaaatgagcaaaggacttgaatag

SEQ ID NO: 8347 - DNA, 122 bp, Homo sapiens
gtgaaacattctccctcttaacttacctttaaccacttttgtttgtttgtttttttcttacggcaactcaaagcaaagagctggaggagccagccattataattgcttactctcatcgctta

SEQ ID NO: 8348 - DNA, 122 bp, Homo sapiens
acttcctgtgaaaagtgttttaagttttctcctctagagctctgttgacatcggccatagcgaactctgtttatttttcctattatataaggaattacaagttggaatcagaagtaattggc

SEQ ID NO: 8349 - DNA, 122 bp, Homo sapiens
tgatgtagctgagggcagggccaaactgggagcagcactgtgagttccacctggctgactcgggagtgagtccacagcctagaggatcaaactcttcatgcagcggctcattttgtacaatc

SEQ ID NO: 8350 - DNA, 122 bp, Homo sapiens
taaactcaaagccttagtttcctcatctgtaaaatggggataactatgcctaactcacaacgtgattggatcgtgtatataaaattcaacatctggcacacaaaaagcactcaggagatgga

SEQ ID NO: 8351 - DNA, 122 bp, Homo sapiens
ttcaagacagaaatatgaatagcaccttctaaagactcggcactggataggaaaataagccgaaaggcgttgggacagggccggcctggctttcttgcgcaggacctgcaggccttggtccg

SEQ ID NO: 8352 - DNA, 122 bp, Homo sapiens
agtgccttttttgagtatggatcttgctggggaagctttctggaaggagctgttgcccttcgtccctctccaggggcaagaatgcatggttggctggaaagcaagggcttgattgacattgt

SEQ ID NO: 8353 - DNA, 122 bp, Homo sapiens
caacgccggctctgggcgggctctgggcgggctctggctgggctctggctgggctctgggcgggggcgggaggtttgtggcattggcgccagggttcttagccctcgcgacacagggccctt

SEQ ID NO: 8354 - DNA, 122 bp, Homo sapiens
tatcaaatttgacatctcctaactaaatgaaaatgacaatacactccatattaaaattgccgttatgaaatagaacagaggttcaacagaaaaataaaatgccctaaagaagaaaaatgttg

SEQ ID NO: 8355 - DNA, 122 bp, Homo sapiens
acccgctgtcgccgtcccccggctccgccgccgaccagtcccggactctatatacccgtccggcggaagcttccagagcccgccagccccctccagaaccttccgccccgcccgcccccgcg

SEQ ID NO: 8356 - DNA, 122 bp, Homo sapiens
tccatttggaaactggagtccacctgggaactggcatacacctaagacatagtgttgagccggtgtttgatgtccaatgttcaccaggctccaggtggacaccgggcctcaggttgacaccc

SEQ ID NO: 8357 - DNA, 122 bp, Homo sapiens
tttcctccctgtgctttgtaggcggagactaaaaccaagaaggcggcagagagcctgcggcgctcagtggaaaaatacaactcagcccgagctgactttgagcagaagatgctggactcagc

SEQ ID NO: 8358 - DNA, 122 bp, Homo sapiens
tgaactcctgggctcaagtgatccacctgccccggcttctcagagtgctgggattacatgcgtgagccactgtgcctagccctgactgaatttcaagctcttgccccagcctagttctcttc

SEQ ID NO: 8359 - DNA, 122 bp, Homo sapiens
ggccccgcggggccgaagtcctgataagccacctggcaggagtggctggcagaccggctgcgtctggggcaccgggcgccgcccctcccaggcccgaagcccccggcccgcgcagcagggac

SEQ ID NO: 8360 - DNA, 122 bp, Homo sapiens
tttctcatacatgactggttcattgagtgtaaggtctacaaccttagaattttacttccacgatgttccatagacgactaacctagaagataagtacttcaattctaagctgctcttacatc

SEQ ID NO: 8361 - DNA, 122 bp, Homo sapiens
cccatgaacaagatattggcatgggggttggccatgctgggctgtattagtccagtctcacgctgctaataaagacatacccaagacagggtaagtaatttataaaggaggctgggcatggt

SEQ ID NO: 8362 - DNA, 122 bp, Homo sapiens
cggaccacgagggagccacggctgccccattgtggcctcctggaccccacttcttccctgcgccagccacgaaggaccatgtggtccttttcgggtgctgtggtttctcgtcccacaccctg

SEQ ID NO: 8363 - DNA, 122 bp, Homo sapiens
gcgacaagccaggcggcagctccgagcggggagggcaagtgacccggatgtacagggtaacgacggggagggggaggagggaatgccaggaagtgagggcgccgcggacctgtccggccgtg

SEQ ID NO: 8364 - DNA, 122 bp, Homo sapiens
acaaaacaaaaccaggaaaaaaaaaaaaaaaacctttggtgctgacatcgcagatgaagccgggcccaaagatgggtggcccgaacaaggcatttttactgccccacagcgctgggtcagct

SEQ ID NO: 8365 - DNA, 122 bp, Homo sapiens
gaaagctgtggctggttgaggcgttgcctggcgacgtgttactcagtggcgcagtgcttccgtagaggccagctggttgctacgcagcaacaggaaacattccgcgctaccgagtactttct

SEQ ID NO: 8366 - DNA, 122 bp, Homo sapiens
acagcgccgggagagaccactgctgcgcggggggagcccggggtctcagtggcccgggcacgcggggtcgccgcgctccagcgcccgcgctgcccccgggtgaccctacgggcgcggtgtgg

SEQ ID NO: 8367 - DNA, 122 bp, Homo sapiens
ccgctcggttcggtgctgcggctgtcagtgcccagcaggggcggggtcagtggagccccgcgcgggggtcggagtagggaggattgacgaggtcggccagcacccaaccctccaggtcagag

SEQ ID NO: 8368 - DNA, 122 bp, Homo sapiens
ctcataagccttgcccctgtgagtttcaggccgtcttctcaaatagacttacccacccatcgtaaacaaactgcatcatgcgaactcattccttccaggcattactaattctctacaagtcc

SEQ ID NO: 8369 - DNA, 122 bp, Homo sapiens
tatggaagggactttccatagagggtctttggctgagagtctgcagcaggaacccagagtcggtgtcctgggggctccatgcaggacagcaaatgggccctgtcatttatttactccctcca

SEQ ID NO: 8370 - DNA, 122 bp, Homo sapiens
ggttggcgcaatcttgtgacctaaaaaagacgggtcctcattttttttcaaggggtcctgcgcagcaagcacttccggggtcagagggtacgcggggttgaaagcgggcttcccgccccgcc

SEQ ID NO: 8371 - DNA, 122 bp, Homo sapiens
ggcacaatcactaactcacaggcattaccttgtgcaggaaagacatggaacgcagtgactcgggagggagatgtgggcgtggcgtgtgctctgccgttttgtcttcaaagcatctttggagc

SEQ ID NO: 8372 - DNA, 122 bp, Homo sapiens
ggagactgcgccggggctgctgaaaactagccgaggagagccagggagccggagagatcgcgcgcctgccgccgccggagcctgcgagccgagaccgtaagcgcccggggccggccgggccc

SEQ ID NO: 8373 - DNA, 122 bp, Homo sapiens
tgggaggagggggctgcgcaggtgtgaggtccgcggcgcggtgagctggggcttgcgagccggggccccgcgtgcgtcctccgcgcccgcgcccgcgcccttccccgctccggccgccggcc

SEQ ID NO: 8374 - DNA, 122 bp, Homo sapiens
tgttccagccgcagccgctgcagccgctgcttccggtgcagcacccgcaccacccatccccgcctcagggaatgcacatgcctccccagctagagaccccaaggatgatgatgaccccgcca

SEQ ID NO: 8375 - DNA, 122 bp, Homo sapiens
ggcggagggggcatggagtgaggttcagaacagcagagccgggctgacggatgcttctttcgcgggaggcttggcttgcgggactccgggttggggccgcacgggctggcaggcgggctccg

SEQ ID NO: 8376 - DNA, 122 bp, Homo sapiens
gcagcgtcgttgagcctgagcagtaagaggctagtccgggcagcttgcgtgaagcagagccggagctgtcctctcagaggctcctggagctcctccatggcgacgagttcgagtgcaagcag

SEQ ID NO: 8377 - DNA, 122 bp, Homo sapiens
gggtcccaaccccgttcgtggaggcgcctcccactcccatcgcccagtcacaggacacaccgtgtctagcgggctctgatctttacacctcatcgcagattggcttgcataatggctcagct

SEQ ID NO: 8378 - DNA, 122 bp, Homo sapiens
agcatgttaaatacccatgtgaagcattgcctgctaattgccagagaggcagtgctgtcacggctttgtactggggaggtcactggggcctggcatagtagggaaagctttctggaagaaaa

SEQ ID NO: 8379 - DNA, 122 bp, Homo sapiens
gcctggctttggttgcaagtaatgtcaggccataaaccattctcagtgcccactggttcccgagcactgagtgtagaaatcgccactttctctttgccccgaggccacaggcacagcagagc

SEQ ID NO: 8380 - DNA, 122 bp, Homo sapiens
ctcctcctcgaagctctgggaccttcttcaagagaccatccaaaggctggcccttgataacgctgtgaagcaggcagaattcttcagtgcactcagtttctccttcaagacccagcccccac

SEQ ID NO: 8381 - DNA, 122 bp, Homo sapiens
atactcatcatctgatatttctcatttgtttgtttgctgattatctcttccttttggaagcgtgaattccatgaggccaagacattgcctgttatgactgactgtgtgactgatgctgacac

SEQ ID NO: 8382 - DNA, 122 bp, Homo sapiens
cagagagcgagcgccgcagccccagcagcgaggatgaccgggacgagcgcgagtcccgcgcggagatccagaacgccgaggactacaacgagatcttccagcccaagaacagcatcagtgag

SEQ ID NO: 8383 - DNA, 122 bp, Homo sapiens
cagccccggggagaccttgcctctaaagttgctgcttttgcagcctctgccacaaccgcgcgtcctcagagccagcccggaggagctagaaccttccccgcatttctttcagcagcctgagt

SEQ ID NO: 8384 - DNA, 122 bp, Homo sapiens
atctaagttagcaccattttcccattgactgttcacttttaattccaggttatcatcatccgttgtgtcttcttcaagcacagcagcctgatctttcatcattggcaagtgtccagtcaggg

SEQ ID NO: 8385 - DNA, 122 bp, Homo sapiens
acagtggctgcgaggaccaggctggcctcagacactaatgggactagacagtcaattcagcgctgcacccggaggccccgccaggaagctctgctgggcacctgcctcgggacgctgagcaa

SEQ ID NO: 8386 - DNA, 122 bp, Homo sapiens
ggaggaggtaccgtgccaatgctgggactgcctgagagaatgagctgaggctgaggctgacggggcaagggcgggtggcacgggtgtgcagtaaggctggtggcagcgagatccgaggcggc

SEQ ID NO: 8387 - DNA, 122 bp, Homo sapiens
gctgtggtcgcagccctggctcgctcttggcgcctcctcggtctcggcgcccactctggccgcgctcgaagagtccttcagcccccggctgcactgtgggagcccctttctgggctggccaa

SEQ ID NO: 8388 - DNA, 122 bp, Homo sapiens
gggcgcggggaaggcacttcctgagccgcctgccagggttataaaaaaacccccaaactgcgcgcggccagaaaccccgcccgcctgccgccgcccggcctgggccgcgggctggaccccag

SEQ ID NO: 8389 - DNA, 122 bp, Homo sapiens
cggacccctcgggctcccgtccctagggaaatgtgaagtatcccgggagaggtccgagggcggcggcggcggcggtgaaaagccccactcctccgcgtggaccgggatcctcaggggtgcgg

SEQ ID NO: 8390 - DNA, 122 bp, Homo sapiens
tcggattctactctcacccaagggtggaagggggtgacagggctcggatcttgccccaaacgctgcacaggcccgcaggagagcaaagaggtctcggacaggctgtccttccccagctctcg

SEQ ID NO: 8391 - DNA, 122 bp, Homo sapiens
gggactggggaggacgtgagaattgaaggccctgcagggcctgtcatctgctgttgataacgagacatcactagactatcagcgaaacataaacaaggcctacagatgagagaacaatgcct

SEQ ID NO: 8392 - DNA, 122 bp, Homo sapiens
agacttgcagcgcgggtggaatcaaaccacagattagggagtttgaaggctttattggtgcggaatctgagggcacagccaagcccccgccaactttgatcccggatcccagcgtcactcag

SEQ ID NO: 8393 - DNA, 122 bp, Homo sapiens
gaagggcgccgggaaagtttcagatccacggctgcgcgggccacgagcccacccgaacgccgaccactgctttccgtcgacttctatttcctgggaacgcgcgaaagcaaacccaagtcaga

SEQ ID NO: 8394 - DNA, 122 bp, Homo sapiens
cttcttcctgttttcttctccaaaaatcactctgcccacatctactattacctcaggatacggcatttcagtatcagtcttgagactctccatttcagcagcccctctgtgctccaaacaat

SEQ ID NO: 8395 - DNA, 122 bp, Homo sapiens
cccagaatctttagaaggctcttggacatgtagtagggccggtccagggagccgttgttccgctccaggtcttccactgagccgcaacagagaccggttagagcggaccctggggccaggaa

SEQ ID NO: 8396 - DNA, 122 bp, Homo sapiens
cggtgcatgcagcccccagtcacgcatcccctgcttgttcaatcgatcacgaccctctcacgtgcacccacttagagttgtgagcccttaaaaggaacagggattgctcactcggggagctc

SEQ ID NO: 8397 - DNA, 122 bp, Homo sapiens
taactcattttctcagtttggaatacattgtcagttttttgcaggagtgaatatagttgccgaagataaaagttgttttgacaatttagtaatggtttttgcactataagtgatattatttt

SEQ ID NO: 8398 - DNA, 122 bp, Homo sapiens
gagcacaaagccgagagaagagaaagcccggcaacagggaaactgaggcaaagaaaatcacggtgtcttgtgcgaccctcctgggtgaaggaagctccccaagccagtggaagaacctgccc

SEQ ID NO: 8399 - DNA, 122 bp, Homo sapiens
taaccatccagtcgaccaagcctgaaatatgggctttaacccttcatccttgttgttacccgttcatcttcacatcttagcttaaatattgcttcctcaaagaagccctccctacgtgcccc

SEQ ID NO: 8400 - DNA, 122 bp, Homo sapiens
cctggcggagacgggaggaggagcggagggagaagtaggttgcgagctcagcacaggctccggcgctggctcccgcagctgagtttgggagatgtctaagtgattttttttttttcccggaa

SEQ ID NO: 8401 - DNA, 122 bp, Homo sapiens
cccgcggaggcggtgaccctttggccgttaccacctgaggcctttgggcccggggccgggcgagtagcttagtccggctgggggaactggaacccgaagtctgagattctttcagttccgcg

SEQ ID NO: 8402 - DNA, 122 bp, Homo sapiens
cccgcccgggctgcggagcaggtggccggcaagcgagaagctcccgtcggccatggctggcgcgcagcccggcaggtgcatggggagcgccgggaggcgggagggcgctttggagacggaga

SEQ ID NO: 8403 - DNA, 122 bp, Homo sapiens
tgtgtagatctcttgtcttattcttttgtctataatactgtattgtgtagtccaagctctcggtagtccagccactgtgaaacatgctccctttagattaacctcgtggacgctcttgttgt

SEQ ID NO: 8404 - DNA, 122 bp, Homo sapiens
ggatttgaagcacttgttggcctacagaggtgtggcaagcagagcacctcagaactcaggcgtactgcccgccgcccgagccctgcgagggccgatagcgagggtgtggcccttatctgcac

SEQ ID NO: 8405 - DNA, 122 bp, Homo sapiens
ccctgctgggcttctgaactaagggagctaaatgcttccagcttccttagtgaggcagcacggtgctgtatgcttaaatccaaggccgtggagtctgacctgcgtttttatctaaactgtgt

SEQ ID NO: 8406 - DNA, 122 bp, Homo sapiens
ttctctgggtgtggggatctggtccttagactccccaccccacaaagcagcctatgactccgggggtgagtcctccagactcaagttggcaactgttaatctgggagtcttccacatctgtg

SEQ ID NO: 8407 - DNA, 122 bp, Homo sapiens
tttctccccctccctgcacgacgcctcttggcagacatccgggagaacccgaaaggcgctcgttgcctggttggatgcagggtacaaactacgttacccagaaatctgtgcccagctcattg

SEQ ID NO: 8408 - DNA, 122 bp, Homo sapiens
ctttgcattctttatctggatgtattattgagttaaaatatcctcattaaatctgttcttcgagtccacatcatggagccacctggtggaaagctggctcatcacaaggtcctgtgaatagc

SEQ ID NO: 8409 - DNA, 122 bp, Homo sapiens
aataactgagcacctagtatgtgcctggcacagagtatgcaacagtgactaaatagtatacggtctctgccctgctagaacttacagtgtagtgggggagatagaattgcaaacaaaaagta

SEQ ID NO: 8410 - DNA, 122 bp, Homo sapiens
acatggcattcacctgtggtttccttaatgcccaaaccagccagccaacctgttttctgccgtgttaacaaatggacaggacacaggcaccagaggttaaactttcttcctcttcccccatg

SEQ ID NO: 8411 - DNA, 122 bp, Homo sapiens
gagaccccagagcctggactttgcctgctgggggagctttccgcacagtcccgcagcctgcgcccagcggaggtgtagccggggccgcgcacccccgccccgcccttgcacgtgactcccac

SEQ ID NO: 8412 - DNA, 122 bp, Homo sapiens
tttttgtagagatggggtctctccatgttgctcaggttactctattatttattaatatctcgcattagtgtggtacatttgttacaattgatgaaccaatatggaaacattattattaagag

SEQ ID NO: 8413 - DNA, 122 bp, Homo sapiens
gaggaggaatggggattttacgtgcttggtggaggctgctcagttttgttgctgggcagacgtgcgaacatgaactaataatccctttgggtgtctggaatgcctgcccaggttgccaaggc

SEQ ID NO: 8414 - DNA, 122 bp, Homo sapiens
cgcagttcactcgcacgtccagaaaggttctgagaatgggtggtgggggcgatctcgcctcgctttctgcacccctcagaaaggtttccgctgcaggctagtggctgcaaactcatcgtcat

SEQ ID NO: 8415 - DNA, 122 bp, Homo sapiens
tgtgttggccaggctggtctccagctcctaaccgcgagtgatccgccagcctcggcctcccgaggtgccggggttgcagacagagtctggttcactcagtgctcaatggtgcccaggctgga

SEQ ID NO: 8416 - DNA, 122 bp, Homo sapiens
atcccatcacttttccattaaaatctgtcttttcaaatggcaactaagaattctcacctgcgcacacctgccaactccaccattgtaacgtcggaatggtacacactgtttctgtaaagtga

SEQ ID NO: 8417 - DNA, 122 bp, Homo sapiens
ccccgggcgggaaggctgcgccggctcccgccaagggggaggcgccaccccgccccggggcggttgtcttgctgggactcctgggccggtcacaaagcccctctccgctgacccggagggac

SEQ ID NO: 8418 - DNA, 122 bp, Homo sapiens
aggggcaggagtggactccaatccccgggaaattctgtagggctgggattatagcagggacgccgcctaccgccaaagcgagcaggagtcaaagggcagcccccagggtgcgcactggcagc

SEQ ID NO: 8419 - DNA, 122 bp, Homo sapiens
ccttgcctgttttcttggcctgaccaattcctactcacattttagggttttcctccagttcgaatcttcctctgcatctccttcaggaagagttttcatgcccctctggagtccagaatgtt

SEQ ID NO: 8420 - DNA, 122 bp, Homo sapiens
gctctgctgctcctgcgtgtggggtctcctcagcagcccctcagcagaggaggctgtgcccgccaccttccctgacctgcactttctggggacgctgaaaacagcgtgcgcttgtccaaggc

SEQ ID NO: 8421 - DNA, 122 bp, Homo sapiens
tcagcaccgcctggcaggtcgcgaaggggccctgggggttccggagctgcccgcaggcctcgttgctctcatagggtgcagtctcctctgccaagcacactgggcagccttggggcccgcag

SEQ ID NO: 8422 - DNA, 122 bp, Homo sapiens
aggggccggggtcgggggctgccctcacgctccccagattggccgctgggttgcagcccgcggctttcacgcagctctctcattagtgggccacgaaggtcaagggcagccgccgcctcctt

SEQ ID NO: 8423 - DNA, 122 bp, Homo sapiens
gaagcgcagggccccagagggacacatgcacagaggcgcacacacgggtcaggcaggaggcgcagagttcgggggcccgggactccaccaattccagtgcgatcctccccagacaataaccc

SEQ ID NO: 8424 - DNA, 122 bp, Homo sapiens
aacctggagacaaggacctggtccagcagggctggcgcagaggggttggggtcgcccagtcggacagtgcggggcttcccagtgctgctgtcactaccctgtgggggctgcatgggggagtc

SEQ ID NO: 8425 - DNA, 122 bp, Homo sapiens
tttaaaaggattagtcagactactgtgttaggaatggtttggggtgggaaggttcaggggcgaagctgggagacaatcagaaggctacaggagaaacctctgaacaggaggatgtggggtgt

SEQ ID NO: 8426 - DNA, 122 bp, Homo sapiens
ttgaaccatactttgtgggggaggcccgggtgattacctcctaaacaagacacatctgaacgcatttaactggctaggtatcaacttatatgtaatacaccggcatttggtttctttgtttt

SEQ ID NO: 8427 - DNA, 122 bp, Homo sapiens
gctgcctcttgtcatctccaatccagatccgtttcattgacttaactcctggctgaataccgccagttaattacagcaatcacagaccttcctgctccagccacgcggtgagaatgagggtt

SEQ ID NO: 8428 - DNA, 122 bp, Homo sapiens
tccggttccaggaaatccttcggtccccagcaaactaggccagttagttgttctgtttgccgagaggtaatgcgcaccctcctgtgccaggtcctagttggggagaaggcaaagaataaaac

SEQ ID NO: 8429 - DNA, 122 bp, Homo sapiens
aaacttgccagctttctaatccttgatgaaaagagtgaccattggttgaacaccccagtacgaatggtctctacaaaatgacgtgctccgacggtgcgggtcctggggagggtgttgctgtg

SEQ ID NO: 8430 - DNA, 122 bp, Homo sapiens
tccctacccccgccgccgccgcctcttcttccaccactgccaccgcctcctcttcatctgcggcccaccggcggcggccgccccgaagccccgccccctccatcgcctcctgcatcatcact

SEQ ID NO: 8431 - DNA, 122 bp, Homo sapiens
aggtagctgagcggctgcgagccggactgcggaaggggaggcagcgggtggctaactgcccggctcccggcccgtttgaggtgtgtctttggagaaggatacccattgcatccgttttgatc

SEQ ID NO: 8432 - DNA, 122 bp, Homo sapiens
tgtcaactccttttcatccaagaatcactgctattaagggtatcatacacctgtgagtggcgtatcaagaattggctgtgagatgttaaaacctgcacgaccttgactaaagtaaaaacatt

SEQ ID NO: 8433 - DNA, 122 bp, Homo sapiens
aaggtcctggaagagcagaattcagaacccgagctttgggcggcggagcaggacagggcgcgggtgggcgcggcctccgggaggccagcacgagggggagcggcggggcccggacacaccca

SEQ ID NO: 8434 - DNA, 122 bp, Homo sapiens
cagagcaagaccctgtctcaaaaaaaaaaaaaaaaaaaaaaaaagaatgttaagccttaccgtgctcagagtcagtcaggactgcttgaacaggccttcccagctgcccacagcagggaagc

SEQ ID NO: 8435 - DNA, 122 bp, Homo sapiens
tttaaagggggcggctcttctaagagccgagccgctcccagtccccaggaggccctggtccgacttcgggagactgaggagatgctgggcaagaaacaagagtacctggaaaatcgaatcca

SEQ ID NO: 8436 - DNA, 122 bp, Homo sapiens
gtgggagtatcaccaagatccttgaggctgactgcaccatctgctgccttaccatccacccggcctggatttctgctaggaaactcagaaacacattagatactcagggatgtttgtgtgaa

SEQ ID NO: 8437 - DNA, 122 bp, Homo sapiens
actgtctcaagaaaaaaaagaaaggtgtgctgttttctgagcccttccccacgtttcgcccggattattgtggcttactttgggtatagcattgaacattaaatgggacagtgggtctttta

SEQ ID NO: 8438 - DNA, 122 bp, Homo sapiens
cccacctccttccccttcaaagagcctgtcgactataccactcaactaaaatggcagcggcgactacgccacggagccccccgcagcaacgggcctggggtccggaggcggcgctgagcctc

SEQ ID NO: 8439 - DNA, 122 bp, Homo sapiens
gcgttgagtaggagctccccagttcgtgcctgggaaattaacagggaatggcacatcaatcgcggccaagcccccagcctccccggagtccgcagctccggctttctcttctctgctaagtg

SEQ ID NO: 8440 - DNA, 122 bp, Homo sapiens
cggtccccgcggcgctgatcctacgggagagccccaggtagctgatccgttaagctcttgcggtagccgcgcccaggaaggcccagatcgggctcgcacaaggctgtccttgctgcctgccg

SEQ ID NO: 8441 - DNA, 122 bp, Homo sapiens
accttgcgatccgcccgcctcggcctccgaaagtgctgggattacaggcgggagccaccgcgcgggccttaatttttattttagtttacttttgataaggagtctcgctctgtcgcccaggc

SEQ ID NO: 8442 - DNA, 122 bp, Homo sapiens
gctccgctccgctcccttccatcttgacttttgccgacgtggaaattttgggtttggagacgacctgcgctcttattggctgccggcgggcggggtcggaggtcacggctgctctcgctatt

SEQ ID NO: 8443 - DNA, 122 bp, Homo sapiens
agctaccactgtgagtttttatgtcaccattattttttaaagtccgctggtcctgtggaccgtgacagatatgtattacataatcctggatgtgtggcagaagctgcttctaagcagaggag

SEQ ID NO: 8444 - DNA, 122 bp, Homo sapiens
ggccgctccgaggctggggcagtctgacctccagtgctccatttgttggcagttagggcacgggtgtgttggcggcttggggtttgggcactgttttgcccaatgacctggattgccacact

SEQ ID NO: 8445 - DNA, 122 bp, Homo sapiens
ctccgctccgcgcccctcctgctccccgcccgagccccgcccaccagcggctgcggcaaacgcgagcccgccctccggccacgccccccagggcagccaatgcccgggctggggcggggtga

SEQ ID NO: 8446 - DNA, 122 bp, Homo sapiens
atttcagacaggagggaggagtgatgcagccacaggccgaggagagcaggcaacaaggatcggattctgcctgggtctccagaggcttcagccagcacaggcctcacacagcgcagcccatt

SEQ ID NO: 8447 - DNA, 122 bp, Homo sapiens
aggccatctggatgtatatgtgcagttcacaggggtcacaatggcttagctctggctcagcggcctgacactgacctcagatgatccacctgcctcggcctcccaaaatgctgggattacag

SEQ ID NO: 8448 - DNA, 122 bp, Homo sapiens
gctggcaccgcctcctctgccggcgtgtgtgtgtctgggggggggacccacacgaggccccgccccaccccgcccacagcgccgtcggccccggcccggtccaccttaagcggcggcggggc

SEQ ID NO: 8449 - DNA, 122 bp, Homo sapiens
tagtccattattagggaatggtaggccttgtcgccagggagagaattctaaacaaagccgcggtccttgtccttcagtagcagagttttccggggggctggactttgtacactgctggaact

SEQ ID NO: 8450 - DNA, 122 bp, Homo sapiens
cttcaggaagagaagagtgccaagggaagagcaggtacagaggaactggtgttcaccccccgaagacatctggggcaggcaaagggaaaatcagacaggtaggcaaagacaagggctgcaac

SEQ ID NO: 8451 - DNA, 122 bp, Homo sapiens
ccacctccccatttcaagcgattcttctgcctcagcctccagactagctgggattacaggcgtgcaccaccacacctggataattttggtactttcagtagagacaaggttttgccatgttg

SEQ ID NO: 8452 - DNA, 122 bp, Homo sapiens
ggccagcgccagttcctggtgggtgtgggctctgcggccccgcattcagagcggctggcccgcctgcaagccccgggcagtgaggggcttagcatctgggccagcagctgttgtgcttgatt

SEQ ID NO: 8453 - DNA, 122 bp, Homo sapiens
ctttctccccccttaggagcatccccaaaccaaggacagaacaggccccatgcacgccagcgcgcaccccctcaagtctccgggggagcctgagcgaagagcacctctcccgagcggccacg

SEQ ID NO: 8454 - DNA, 122 bp, Homo sapiens
aagcactccagttggttattacacgcagccggccttcaggagcacacagaagtgtctacccgtccaccgggatgtacacaccacctgtaaggtccgagttctgagccgagcagcgcaggcag

SEQ ID NO: 8455 - DNA, 122 bp, Homo sapiens
cttccatcttcacttttccccgcatggttacagagtggctgctaaagctccaggcattaccgtcctacatagcatgtccaaaaacaggaaggatgcttgctcctcatgtaacaccttctatt

SEQ ID NO: 8456 - DNA, 122 bp, Homo sapiens
gtggccccaggtccatggtcttttcaccgaggcttcttatcatccggggcccacacctggcgccccgtgtgctgccagcactccttcctgggcaaagtccaggctcaaccccaaatcggcct

SEQ ID NO: 8457 - DNA, 122 bp, Homo sapiens
agagacaatgagctgagtgaggagcccaggaacccgggttccgaacagctgcgtagaatgcgagcggccaaatggtggagaatctggccgggtaaaaggagacggaggactggggatcgaac

SEQ ID NO: 8458 - DNA, 122 bp, Homo sapiens
atgagagtgaatgaaaactagggtagtgcttacatatgtaaaactaagatggtaggtagtcggattcttacaatttataaggttctcataatctaagccttgatgagttgctactgcaaatt

SEQ ID NO: 8459 - DNA, 122 bp, Homo sapiens
cgtcccacggggccctgctacttcgcttttaaacaagcctcagggaggaaaccgggagcccgggccaagggaggaaaatggccactttctgctaaacagtctcaaggctagatagtattcca

SEQ ID NO: 8460 - DNA, 122 bp, Homo sapiens
ctgctccagctggttccagtgcttggcggtgtcctgctcggggacagaggccgtggatgtcggatggctggactcatacctctccgagagctcctccaggctcaagggctcggggctggcca

SEQ ID NO: 8461 - DNA, 122 bp, Homo sapiens
cgtggagacgctggagctgcgggccttcctggccagggtccgggaggccaaggaggtgagcggtgggtgggggcgaccgtggagggtccgggaggccagggaggggagcagtgggtgggagg

SEQ ID NO: 8462 - DNA, 122 bp, Homo sapiens
gtggttgcgacatgtgaggctgtagtctcggtggtcgttgttgtcccagtactcggcacccgccacttggtagcgcaccgcgaagtgcacgcgggagccgagctccagcaggaagggcggta

SEQ ID NO: 8463 - DNA, 122 bp, Homo sapiens
acgtaatttacaataaccaccaggattcctccgcgtcgcctaggaaacgaccgggcgaagcgactgccgcctcctccgagatcaaagccctgcagcagacccggaggctcctggcgaacgcc

SEQ ID NO: 8464 - DNA, 122 bp, Homo sapiens
tgactgtttgaccttgactccaggaggctgtcatctatatccattctcccttcccaggggcggtctctttgggatcacttctaatacccactctctgggaatcacgggagctccggggctga

SEQ ID NO: 8465 - DNA, 122 bp, Homo sapiens
gattttaatgaaggggggcggggttcttcgtattaacgattgcccgtggtcctcagcttgcgcgggctgcggctgcgggtgctgatctgcgtctttctttgccgtccggcctgcgcgacccg

SEQ ID NO: 8466 - DNA, 122 bp, Homo sapiens
cacacaggccactctgcgtcagccactctcgggctgccccgaagtgatgtcctggtggtccgtggagcacacaggaaagtccagcagacaaacatcatcaaggtcgggcattctgtcagctg

SEQ ID NO: 8467 - DNA, 122 bp, Homo sapiens
gcgttgtttggcgggttgcacacgccagggactaatttgtacaggcgttaattggtcctccgtttgttctgaagccaaacccagagggttcatctcctggtattgatgcaaatgaaacccaa

SEQ ID NO: 8468 - DNA, 122 bp, Homo sapiens
tcaactggcggaagagcatctccagctctagacccacatccagctttgttgggtcaaagacgacaaagatgaggtcagctctgtcgatgaaccactggcacacgtcgttgaaggggtagcct

SEQ ID NO: 8469 - DNA, 122 bp, Homo sapiens
tagcaaagtggcccgctgccaccgcgttattcacctagtggaggcggcctgatttactggcgacttcacaaacccaactccacgctggagcatttgcatggctctgttctcgcctcgaggag

SEQ ID NO: 8470 - DNA, 122 bp, Homo sapiens
cggaccaaccctacggtcatagattttccgagtgaagcttttgactaagtctcaggaaagcgttagctacagaattctagattcaaaagaaatccaccaaaaaacgctgtggaggactggtt

SEQ ID NO: 8471 - DNA, 122 bp, Homo sapiens
agtcacttctctgggctgccagaggcaccggaagccgggtgcctcaggccctggcagttccgtcactctccaacgcctcccccacagacttctttttgctaaatggtatcaagattttctca

SEQ ID NO: 8472 - DNA, 122 bp, Homo sapiens
ggcctgggagccgggctccccacgtgggagccgggtgggggaggggcgggaggggagaagcgggtcccagcctagggactccgagcatgggctaattggaaggggctgcagctccgggggca

SEQ ID NO: 8473 - DNA, 122 bp, Homo sapiens
tgtccgccttgggtacagaagcggcgagtggcccctttccaggaggcctgtttaccagcacgacaacggcaaattagtgcgcttaagaggcattcggcgtttatcccggcaaacatgcgcag

SEQ ID NO: 8474 - DNA, 122 bp, Homo sapiens
accccgcacagattatatgaaatggatcagagggtctacagataagtggcttggtgtggccggagtttgggtatggggaatagagtagcaggcaatgagcattttacagggggcccatacaa

SEQ ID NO: 8475 - DNA, 122 bp, Homo sapiens
atgcccgagggcgctgtgagcggggtggccttagctcgccgaggctggtgaggctgggcccgaacgggggcgctgacgagtagcaggggcctcagaggcgggtgaaagataaaggtccagag

SEQ ID NO: 8476 - DNA, 122 bp, Homo sapiens
ccaccttcccgttcccgtttcaggggggaagctgcagagttctggagctgtgagtagcaccgctgtcaccgcaaagcagaacccccagtgattagggacgctccacggacttcacggctgcg

SEQ ID NO: 8477 - DNA, 122 bp, Homo sapiens
gcggcgagttacacgccattgggtcgctggagctgggactgtgctccgggggcatctccccgtttttcatgatcttcttgatcttggatcttttgttctgaaaccagattttcacctgagtt

SEQ ID NO: 8478 - DNA, 122 bp, Homo sapiens
attcattgcggaccagctcgaccatctcaatgtcaccaagaaatggtcctaatcctgagtcgtcacccttggattttatggatcacggagctgaccatctttacctggtcctggaactgaaa

SEQ ID NO: 8479 - DNA, 122 bp, Homo sapiens
acggtgaccccatctgtgtcccatccacctgcccggaggagcccgacgtggtcccagagccgaaggtctcctcgctcctggctggggtcctgctcggtccccatcacgatggcgtcggcccc

SEQ ID NO: 8480 - DNA, 122 bp, Homo sapiens
tgtgggaacccaggaacggggaacctgtccctggagagggtggcccagtgaggccagagtcgggagaatttacaggagttaggaggagggggtccgcctgccccaggtctgcgtttcacagc

SEQ ID NO: 8481 - DNA, 122 bp, Homo sapiens
attgaaaataaacgacggaaaagtctggccttgcctctgtgcaagcttggaggcctgggtcgccgctgtggacaagcgtcttagtgtcatgcagaccagaaggcagctgcctgtcccagggc

SEQ ID NO: 8482 - DNA, 122 bp, Homo sapiens
gaccacagtgccctgaagggttactgtgcctcccggcccctcccttggcacactggatatcgagctctcgttttaccaggagagacgtggacaggccctgtgtggctctgctgatcccaaaa

SEQ ID NO: 8483 - DNA, 122 bp, Homo sapiens
cagactgcaactaggaggagggactaatccacgcattggctctgggtctcctaagggtcacgtcactgtgagctcagatttccaattaccattcacacccgcagtgcggcaggagggtgggg

SEQ ID NO: 8484 - DNA, 122 bp, Homo sapiens
ccacccactgacctctggccttttccaggccagtccctcgacaactcacacacatcatcccgggtaatccagggagtggtgaatgcagctcccgacctctgaggtcacccagtccactcccc

SEQ ID NO: 8485 - DNA, 122 bp, Homo sapiens
accctccacgggtgagtgcgacacgcgctgcgcgaaccagggtctagacaagaaagctgccgccactaggacttttgccctaagggacccactggccccacactttttcctgcttttcttct

SEQ ID NO: 8486 - DNA, 122 bp, Homo sapiens
ttggagagcagacagcaaaacaggctgtacctgtgagggttgggggttttgtttggagaacgcctagccactcggcaaaaagatcccttactcaaaaaggtttaaaacaaaagccattatgc

SEQ ID NO: 8487 - DNA, 122 bp, Homo sapiens
cttgtccgacttcctcatgttgcacatgaaaatactgaagcttggggcatctaaataacacgttcagaatgacagtagcagagcttgactttgaaacaagaaagagctctttccactgtact

SEQ ID NO: 8488 - DNA, 122 bp, Homo sapiens
agtaaaaaaaaaaaaaaaaaaatcagctggatacagtggcctatacctgtcatcccagcacgttgggaggttgaggcaggaggattgcttgaagccaggagttggagaccagcctggacaat

SEQ ID NO: 8489 - DNA, 122 bp, Homo sapiens
aaaaacttattcagtccagtgactggtgactaagggaacgatggagcacagggaattgggcgggatctagactcctaataatgcctccttagccaatgaaaagcatttcctattgagacccc

SEQ ID NO: 8490 - DNA, 122 bp, Homo sapiens
cttttatttaaatgattggaatataaatcctgtttttcagatctgatttcttgacatttgcggggaacactagcatatctgttgcttttgttttaggaacaaaagtaaactctgtagggagt

SEQ ID NO: 8491 - DNA, 122 bp, Homo sapiens
gacagagaggttctttctctttgtaagaaaaaaaaaaggaagcatgagaaatgatacatccgtggataaaaccaattggcaacccccaaaggaatgggggcgataaggcgaatccagcactt

SEQ ID NO: 8492 - DNA, 122 bp, Homo sapiens
gctggagtggatgacacccagtttgtacaccaggtctgattttctcacttaggtacctgccggctgcattagccatgaaagtttgcatcccttgccaaagcacccacgcctttgtcactttt

SEQ ID NO: 8493 - DNA, 122 bp, Homo sapiens
gctgggcggagctgagctgggcggagctgagctgggtggtagctgcaagggctctggacccggagacaggagccccagggtctaggaatgcccctgccagggcccagccatgcgaccgcaga

SEQ ID NO: 8494 - DNA, 122 bp, Homo sapiens
gctgcttcctggtctggcagggatgggtttgctttggaaatcctctaggaggctcctcctcgcatggcctgcagtctggcagcagccccgagttgtttcctcgctgatcgatttctttcctc

SEQ ID NO: 8495 - DNA, 122 bp, Homo sapiens
gcaggacaggagcgggggactacttccagcaccgggtcctcgaccccctccagcccgcctcgaccccaacgcctctgccaggccacgcccggtcctctgcgggccttgccttccttgcacac

SEQ ID NO: 8496 - DNA, 122 bp, Homo sapiens
gtgtattttttcagatcacagcagtggtttgtaaactttctcgttcttttccataggcaccggcccccaccatgaataattaaaatcaaagactctcctcacacttctaatgtattcaattc

SEQ ID NO: 8497 - DNA, 122 bp, Homo sapiens
tactatgcagatggggtctctacctggctggcactatgttgcctgcttttttactgcacacgtggtgataaagaaaagggaacatggtgaaaccccgtctctactaaaaatacaaaaaatta

SEQ ID NO: 8498 - DNA, 122 bp, Homo sapiens
agaatatgttatacatccctagggcctatttcagtgtctggcattgaataacaataaacacgtgtcaaatgcatcgagctaatactagtacctgcctaaaaggtggtggtgaggagcaaaga

SEQ ID NO: 8499 - DNA, 122 bp, Homo sapiens
ccaaggtgacctccttcaggaagggcaggcccttggccactgagagcccaggaggggtcccggccccgaccaccgagggtcgccgctggggctcttcaggccccgaggggctccccagggag

SEQ ID NO: 8500 - DNA, 122 bp, Homo sapiens
cttttctttttggatactttactgattgaaaaatatggctttgcagcctagcaaggctctcggtctgaggctgcgtccttctggtgtggctttcctcctgaattaggcgtggtgtggcagcg

SEQ ID NO: 8501 - DNA, 122 bp, Homo sapiens
ggaggaccctgtcagcaccgagcttatttaccgccaagtcctccgaggagtctggtctggcgagtacagcttcgagaaggtgaggggcctgagagccaggtccaccctaggctttgccatca

SEQ ID NO: 8502 - DNA, 122 bp, Homo sapiens
agcccccaacaccgcggcggtgggcgaagccagcggccccgccctattccctggcgctgccgttcactggcgtttcctagcaaggatctgcagggatcccgcctacagagtgcccctggggc

SEQ ID NO: 8503 - DNA, 122 bp, Homo sapiens
gcctccggctcagacttgggccagtggagctgggaagtgggcagtgcaccaaaggtcaagcggaattttctattggaagaaaaggtgagactttggggaagagactgcctaggaagatgatg

SEQ ID NO: 8504 - DNA, 122 bp, Homo sapiens
agcctcgagtctggtagattagtacgtagacgccacttaattgtgaacccctcggctctccggggccattaggcactgatttatttttctgttacattcctgctctgccatgaagattgctg

SEQ ID NO: 8505 - DNA, 122 bp, Homo sapiens
tttcttttccccacgtttcccccttttgtttttgacaaaaccgccatcgtcatcatggcccgttctcgatggttgctgtctcttcggagctgttgggtacacttccgagacggggcagcctg

SEQ ID NO: 8506 - DNA, 122 bp, Homo sapiens
tcaacctcaaggctttcgcctttttagacgcaacgccgccggttccaacagagacgcggccgctcactgaaatagagagccaaggagacacaggccccagctagtcccacgccagcttctcc

SEQ ID NO: 8507 - DNA, 122 bp, Homo sapiens
aggctggatggcaaccccatgcatactacccccaaggattctgggaccaccccccaaccccgggacagtagatggtttctcttgtgctcattaataagtgtgggcttggcagatactgttgc

SEQ ID NO: 8508 - DNA, 122 bp, Homo sapiens
gccccaggcagggtccagtgccagccctctgtggagacagccatccggggccgaggcagccgcccaccgcagggcctgcctatctgcagccagcccagccctcacaaaggaacaataacagg

SEQ ID NO: 8509 - DNA, 122 bp, Homo sapiens
ttttcatctgtcccgctgcgtgttttcctcttgatcgggaactcctgcttctccttgcctcgaaatggaccccaactgctcctgctcgcctggtaagggacacctagctccgcgccttggga

SEQ ID NO: 8510 - DNA, 122 bp, Homo sapiens
aggtggaacgggcggcagtcaagcgccggcgttctctgccgtcaccctttccttgccggccggcacttcggctgcagagttttgcccacgcttcgagacttagggagcaggtaaccgaggaa

SEQ ID NO: 8511 - DNA, 122 bp, Homo sapiens
gagagccgcgctgctgttttaaaaacaaaaagtgatttcctggtcctcttccccggatggcgtgtgcgatttccctcacgcccatgggaagtccttcagatccttcttatctggaaacctct

SEQ ID NO: 8512 - DNA, 122 bp, Homo sapiens
tctttgcctggacccagggctgtgctcgctccagccgtgatttctccggacaaatggccgcggtgctgacgaggccctggcacgactctgcctgcttgctgcgccctttctagaagcttctg

SEQ ID NO: 8513 - DNA, 122 bp, Homo sapiens
gagtccggacttgtcgcgcaatctgtctccttcggttccaccccaacctagctggactctcggtccggtccctgccctctggagactcagccattaaagttgaggtggggggatgaggatgt

SEQ ID NO: 8514 - DNA, 122 bp, Homo sapiens
agcttctcatggaagagcgagctggcagcagtggtctgcttattcctacagaaacacaagcgagtggaaccacgaggagctctgcaggggggcgtggcctctccggtcgcccgagtccccac

SEQ ID NO: 8515 - DNA, 122 bp, Homo sapiens
gaggcccgtctagcccctgcggctgtcaccgtggtgcctcctcactggccagtgcggtcgcgcctcagcttcgttaataggggagggggcctaagagttttcacgtccaggctcgggcagtg

SEQ ID NO: 8516 - DNA, 122 bp, Homo sapiens
gggctgcaagcccttatgagttggagacaagtggcccagccccaacacagtcagacaaatcgctgggcggccatctgctcctgagaccgttgctagagaaacaagacaacatccaagttctc

SEQ ID NO: 8517 - DNA, 122 bp, Homo sapiens
ctcaccccactcaggcagaggcacagtcggagagctggcagacgcccccatcccaaaatgcggacacgcccagcccagagacactcaagtagcctcagatgtgcacgtacaagcaaatacac

SEQ ID NO: 8518 - DNA, 122 bp, Homo sapiens
caattattttcatcagctgcttgctagcccgcgcccgactgctcctctttgcagaaccgacgggctttcaactctggaagtgaagcaggacgaattcctccatggagactccctccttggga

SEQ ID NO: 8519 - DNA, 122 bp, Homo sapiens
ctttctggaaccgtcaagtttcctttccttcctctgacctaagccgtgtgctgcactgaacgtgaaaggtcccgtcttcgctccagcacttccagagtttcctgcaggcgcctccgtcacca

SEQ ID NO: 8520 - DNA, 122 bp, Homo sapiens
ggtaatactcatgtcgcacacacagggtgtggtcacgatgaaaaaatggattattgaaagcgttcccagatactttgcctaaagagggcactaaaatttaaaattactgtattaatactttc

SEQ ID NO: 8521 - DNA, 122 bp, Homo sapiens
tagcttaaggaagagctccatgtcataactcttaacttaaagggcttactacttagattacggctgccaatcatcaattcacttttcatttttttcttaaagggacagcttacaaagcaaat

SEQ ID NO: 8522 - DNA, 122 bp, Homo sapiens
cttgggttcaagtgattctgcctcagcctcctgagtagctgggattacagatgaccgctacgacacctggctaatttttgtattttttgttgagatggcgtttcatcatgttggccaggcta

SEQ ID NO: 8523 - DNA, 122 bp, Homo sapiens
aatgatcaatgatgacacttattccaagttctcagcctcacagagcaataggagccagctcgcttaatttctctgtttccatatttgcaaaataaggattatctgtgattatctgtttccat

SEQ ID NO: 8524 - DNA, 122 bp, Homo sapiens
gctccgagcgaggatgaaaattagccagcccacaggtgggctctgcgcggccctgaaagtcgcactctgacctgaccctttccgcctctcgtttttccttccagcctcgcttcaaagttctg

SEQ ID NO: 8525 - DNA, 122 bp, Homo sapiens
catggcggatctgtgtcagggagcccaacctactgcagagtgttaattcctccccccgaccggagccagagggaggagcagcccgcgcccccgcccaagccgtgggggggggggagagatgg

SEQ ID NO: 8526 - DNA, 122 bp, Homo sapiens
agagaaagactgacatttcaaatttgaagtacatttcttccagaatgtgtactgctttcacgccatcacagctgaacaatcttaagtggaaccatcataagtcaggaaccatctgtatttga

SEQ ID NO: 8527 - DNA, 122 bp, Homo sapiens
catctcaaaggcaaactcatttttgggggagaaagcaagtgctgggctcctgggtgcccacgcagctgccatcacggcctatgccctgacactgaccaaggcgcctgtggacctgctcggtg

SEQ ID NO: 8528 - DNA, 122 bp, Homo sapiens
ggccaagtacgaagccttcgagatagcgttcttcttaccctacgtaaacacgcagtttcccgagctcgacaatcggctagccactcctgatagcgttcggcgctcgcctctcggcccttgct

SEQ ID NO: 8529 - DNA, 122 bp, Homo sapiens
agcgcacgcctcggggacgggctgcagtgggcggggaggccacgccttcctcctgtcccacgctccagcctgccgcggcgtttctgtttcttgcgaccaaagatccgtgagcaacgataaat

SEQ ID NO: 8530 - DNA, 122 bp, Homo sapiens
ctagtcccagctccccagctcggcactggctctctccgctgcagtgggaggaggaggaggcgccaccaccgccacccgagccagaggggggcgaactggacagtttctgcttcttcaccccg

SEQ ID NO: 8531 - DNA, 122 bp, Homo sapiens
aagcgtggcctgaggatgcctcagtgccaagtcacaccatgacctggacctgccttagtccgtgaatcaatgggtaacctcactgggaggagctggtctcagtcattcgcggcagccctctg

SEQ ID NO: 8532 - DNA, 122 bp, Homo sapiens
cttccaaatctgcagtggccagtcccccaagcacaggttccccccaacaagcacactcctcgggctctgctccaccatcccagttccaggccagcatggccacacctccctagctacgacaa

SEQ ID NO: 8533 - DNA, 122 bp, Homo sapiens
gacctcaaaaagtaaattaatgccgccagatccaattcttcacatcctttctgtcagtagcgcaggttcaagaaggcagctggacacactgcctggcacaaagtgggtgcctgcctccaggt

SEQ ID NO: 8534 - DNA, 122 bp, Homo sapiens
gaaattcatccagagggtccaggccatgaagagtcctgaccacaatggggaggacaacttcgcccgggacttcatggtgagtctctcccctcgctgtcgcgttttcttgccggcgccggagc

SEQ ID NO: 8535 - DNA, 122 bp, Homo sapiens
agagagggaggatacagaaacactctttgcacttcgtctcctaatgcagagtccatagctcggagttcctgtaaagcagccacaaaagatagaggctggggatcccagagagataggagggc

SEQ ID NO: 8536 - DNA, 122 bp, Homo sapiens
gcggcaagagacgatgaggaagaagcaaaagcggaaactcctgataaactcatcagatctcgtgagaggtactcactatcacgagaacagcacggcaagaccacccccttcccccccgcccg

SEQ ID NO: 8537 - DNA, 122 bp, Homo sapiens
tcctcttaccccggcattcaagcccccagtttgggttcctttggagttgtcatggaaacacggaggctagaccaggcgaggcgggtgggactaaggaaaggaaggaaggagaactctctgga

SEQ ID NO: 8538 - DNA, 122 bp, Homo sapiens
gtgagttctgaaaagactgacctggtgtgtggcctgggcagccaggcccccactgctctccgtctttcctggctcatctgctgctctagccagttctcccaggcccgtgagcactgcagccc

SEQ ID NO: 8539 - DNA, 122 bp, Homo sapiens
ggtagtgtgtctgagcgtgatctaatcagtggagaacgcagcggccgtcacgcctgggtacgctggcagcggagctcctcccggaggacccctccccctccccgccgattcctctcctgtct

SEQ ID NO: 8540 - DNA, 122 bp, Homo sapiens
acgcgtatccacaagaaagccccccactttacaggaagcatggaaacagttaggagccctcgaccctgctcaccagctcctctggctgctgccgtctgctcctgcagcgtggtggcctggga

SEQ ID NO: 8541 - DNA, 122 bp, Homo sapiens
tgtggaaatcactgatatgtaggtgatattttcaactgtaggaatgaatgatatcatctacgaagtctgtgtaaagtgagaatgatcatcaagaagagaaccataaggcatgtgaacattaa

SEQ ID NO: 8542 - DNA, 122 bp, Homo sapiens
gtggctttattagaagggtcaagactcttggtcaacaaggtctcaaggaacctgaggtgtcgctgctctacaatcacactccagtctccatctttggccagggacacaggtccttctgtgga

SEQ ID NO: 8543 - DNA, 122 bp, Homo sapiens
gggtgttcctgggtggggcctgctgtgagctagtggtcatgtttgaggtgctggaagccgcgattagggtcacgaggctgggagggagggccttggggtgggcaggctgtgggatttttctt

SEQ ID NO: 8544 - DNA, 122 bp, Homo sapiens
ggtgtccttcccggatcttgcgcgaagtcgcgggggcagggagagaaacgcgggtacccgcgcccctagaagtcaaatgtttggcaaatagcatttgggaattcgttggggtttttttgttt

SEQ ID NO: 8545 - DNA, 122 bp, Homo sapiens
agacctactcttctagggctgggctgtactttccattttgtccttggccccaaccagcaccgcttgaccacggaggctgcacagccagccccaaggggccttgctgcagaacccaagtcacc

SEQ ID NO: 8546 - DNA, 122 bp, Homo sapiens
ctcatgaaagttacccagttatccacccaagactccaagagtccttttatgtagacaacacgattgtgtttgcccttctgctccagtcttgaccttcagcagtctctaaagaggaaaagtgt

SEQ ID NO: 8547 - DNA, 122 bp, Homo sapiens
ggccagcgggcggggcagcgcgggaagcgctaggcgctcatgcactcggtaaccttcaggcgccccggccgcccgcctgcaacctgcggagcccgcgtcgcagcagcccggacaggaagatt

SEQ ID NO: 8548 - DNA, 122 bp, Homo sapiens
cgaaacccgcagcgcaacgcgcccggaggagccgcctgtgacgcccggtccgcgggccgccggctgagcgctattatcagttaattctacaacatcacaacatgcagcttggagcagccagc

SEQ ID NO: 8549 - DNA, 122 bp, Homo sapiens
ttggcgggaagcagagtcacctaaaccgcctgctgtgcacaccggtgttcggaagggcagcgcactgcacatcctggccaggctgcttcgtggccgtctctcccaccggggtctgcaggtgc

SEQ ID NO: 8550 - DNA, 122 bp, Homo sapiens
tgttgtttacagacaaaatctcactctctcatccaggagctctcactgcagccttgaactcgtgggctccagcgatcctccggcctcagcctctggagtagctgggactacagcaggtgcca

SEQ ID NO: 8551 - DNA, 122 bp, Homo sapiens
gacagagaatcccaagcaccaaaataacaaagttgattcccccatccagaccagaggggtcgtttccagtcctgtgtcctgaccactgtctctcatcatgacccctggtgttcacctccaga

SEQ ID NO: 8552 - DNA, 122 bp, Homo sapiens
gaagatcgcctctgcctaacttttgcagtaggccttgagtgaggattagaaactcatcagcgtgagaaggcaggggaagggatggaagcagagggctaagcttgggcagagagacagaagca

SEQ ID NO: 8553 - DNA, 122 bp, Homo sapiens
gttgcggttgcagatgccctcgttgatcaggtagcaggggtcccgcagcaccggctctagcgaatcctgccgcattatgctgttgagcttgtcggtattgaggttctcaaagaccagctttt

SEQ ID NO: 8554 - DNA, 122 bp, Homo sapiens
tgtactagcctttctccaggttcagggcgctgccacaccttcagccccgccccgccccgccgcaagcccaacccagaggttgcttatggtttccctaaggttcctgggctctggacatcagt

SEQ ID NO: 8555 - DNA, 122 bp, Homo sapiens
ggagcctggagccagcagctgggttctgtcaccctgactggggcggccctgttagtgtagcgtgacccctggcgcattcgcacagataataccggcacctcttttcactctaatctcctacc

SEQ ID NO: 8556 - DNA, 122 bp, Homo sapiens
tccaagtggttcatggtgggagtcggaacggctaggagagaagctgggcccggctcactgcgctctcattttgctccactgggctggaaaaacaagaaggggagaggctgtcacgtggtgca

SEQ ID NO: 8557 - DNA, 122 bp, Homo sapiens
cccccgcagttaacagttctggggcagaggctggtggagaggtccagagcccactcagaccgagatgaagatgaggaaaagcatgagcaggaagaggctggcggctgcggcggccacaggga

SEQ ID NO: 8558 - DNA, 122 bp, Homo sapiens
atccacgccaacctgtccttcgccgtgctggtggcccaggtcctgctgctcattagtttccgcctcgagccgggcacggtgagtgggcgcagctccgtgttcctgcgctgtccttcccttgc

SEQ ID NO: 8559 - DNA, 122 bp, Homo sapiens
cctcagccctacccctggttctctgtgacacagcgacttggatgctctccagggttttgtcggttggttagagaatgttttatcacattcataaatagtaacccaatgccctggaaaggtta

SEQ ID NO: 8560 - DNA, 122 bp, Homo sapiens
tcttcccttcctctccatgttattagggccataccaagaggagaggctgatttccctacacgtgtcagggaaagtcccaactctgcgcagtgaccctcgcttgccattttcgccggtctcta

SEQ ID NO: 8561 - DNA, 122 bp, Homo sapiens
cttgctggagacagtttagggtttgaaggctctggatgtcaggtctgcagccaccggaggcgtggggcacacagaagagaggcttcgccatggggcagcccgaggcacatggcgaggccagg

SEQ ID NO: 8562 - DNA, 122 bp, Homo sapiens
ccatcctgctggcgatgttgacggtgtctccccagatgtcgtacagcagcttggtggtgccgatgaccccggccgtgaggggcccatggttgaagccgacgcggagcttgaagttgaaccac

SEQ ID NO: 8563 - DNA, 122 bp, Homo sapiens
ctcctgaccagaatgtaggcccctgtgtccatttccaaggccacttccctgtgtctccaccggctccctgcccccttcctctgcagcagggtagacccaacctggcctctcacccttccatt

SEQ ID NO: 8564 - DNA, 122 bp, Homo sapiens
ttcctggagggtgggccttggctgggcggatcccaggagcctggcgtctcccaggggaggcgctcacctcagatcgggcctaagagggccctgcttgccacactgaccgccaagcctggcca

SEQ ID NO: 8565 - DNA, 122 bp, Homo sapiens
tgagttattctgtcaatcagctgtgtgaccatctgcaagtcacttaaccactctgagcctcggtttcatcatctgcaaaatgggggagtagcccctacttcatagttttgttgggaagataa

SEQ ID NO: 8566 - DNA, 122 bp, Homo sapiens
agcagctgaccttctggacctccatcagcggcctgcagccaggagctgaagccacagagacggtgtcttctcagctatgataacctcagtgcaaatgtaattgattgacttttgaatgccaa

SEQ ID NO: 8567 - DNA, 122 bp, Homo sapiens
cttcctctcatcccagttccaatgcttatggaccaagagcatagatctaggatttggcttcgtgttctcaaaagtggggacaattttgcctgcccctgctgctccatatggaaacagagaaa

SEQ ID NO: 8568 - DNA, 122 bp, Homo sapiens
gctgcaggaggttggccgacgtggggtcatgtttgaaaagcaggatcttgtcgtaaaggccgtagaagccacactcagggaactgaggggcgggagagggatgtggcgacggaaaagctcag

SEQ ID NO: 8569 - DNA, 122 bp, Homo sapiens
tcattctcttgaaatatcccagaatttgatcttaccttgcttacaaatctctttgcactacgtcacacaacctcaaagagttgatgtgttttcatggagccaaagttatggcaggggttggg

SEQ ID NO: 8570 - DNA, 122 bp, Homo sapiens
tgctacctgccgacgcatgcgcgctggcccaggaattcactccgccagctgcagtcccagcgccgcacagagctgacctgggaagtgatggatttatagccgcggcaatcttgccatcagct

SEQ ID NO: 8571 - DNA, 122 bp, Homo sapiens
ccaggacttccctttccctctttgaactctgccagagactattctgcatttgaggcctggcgatgctgggcaggggcgggtatgggtgaagcacagggtgggccgcggctggcgggtttggt

SEQ ID NO: 8572 - DNA, 122 bp, Homo sapiens
ccgtgctgggcgatggcttcctccagcctgctccaggggctgcccccgaccccccagcaccgctcatggacacaggcagcaccagggcggccggagacaggccccccagtgcccccggccgt

SEQ ID NO: 8573 - DNA, 122 bp, Homo sapiens
taaggacacagcagcagtggcagccttgggccataaatagctcaccagagaagcatcccccgttagaaagattttgggtagaaagttcagggagaagagtttgcccaggaaacatgcccagg

SEQ ID NO: 8574 - DNA, 122 bp, Homo sapiens
tcaacatgtcattccaaacaaatacactatgattagcagctgaatttaacagtatctttccgctttgaaaaacactttatatacctttacaaagaagccatagtatctcagggtagaaaaac

SEQ ID NO: 8575 - DNA, 122 bp, Homo sapiens
aagctggctggagaactaagtcagacattgtgagatgtgtccccatcctgcccagagccacgaccgggccagcctccgccctcccgaaagtgacccaaggactttgataagttagtgtcatg

SEQ ID NO: 8576 - DNA, 122 bp, Homo sapiens
gagcttagtctagccccaccctcatgttcttattggctaagtcactaggattctgcctggcgattggttattgcctttgtcatttaccaagggtgggtgctctggatattaagggccggaga

SEQ ID NO: 8577 - DNA, 122 bp, Homo sapiens
cgctgcgatgtatatcgtaatagcaagggaaggagagggggatgacattactccccgcatcgtggaggagtctatcacaaatcgggatactatccaccctctgggatatggggagtacaccc

SEQ ID NO: 8578 - DNA, 122 bp, Homo sapiens
ctacgtacttgaggcacaggacggccaacgccctggactgttgctgccaccccctccccacggatccaaggaaaggaatccagaatcaccaagcgaaaagaaggcctacacctagagcccgc

SEQ ID NO: 8579 - DNA, 122 bp, Homo sapiens
ccagtaagtcgctgactcaaatgggccctttaatccccaaacccaaactctttcctcgatcgaaccgctggcctcaacctacaagcctcctccaccgccaaaagtcgggaagggttggtcct

SEQ ID NO: 8580 - DNA, 122 bp, Homo sapiens
aaaagtctcaattatatatatagcctctgattgtcacctctcctccgtcccaccatttttcgtacttgtattgggtggcagggacacttttcaagagttctgtgttcgattgttcactctga

SEQ ID NO: 8581 - DNA, 122 bp, Homo sapiens
tgttaatttccaaattctcttttacactttcagagtctgcttcaatggcataggtgatgtcggcattggagccctcatcggcatcacttgcaagaactttaacgactgaagtccctttagca

SEQ ID NO: 8582 - DNA, 122 bp, Homo sapiens
atatcttgataaagtaaagctgttaccaaaaaaaatccacgttaactgtccttgaaaatacggaattctatttaaaacactttgcaatagcaactttattatcagatcaaaagagtcttcat

SEQ ID NO: 8583 - DNA, 122 bp, Homo sapiens
aattaaatagttggtattcaaggctatgctcgctcattgtttagtgacacacaaatccagcgatgtgtgccagcagacattttaagttgaatgttttctcctctacggtctttgtcatgaaa

SEQ ID NO: 8584 - DNA, 122 bp, Homo sapiens
cccctgagagcctgtctgcacagcctgcggttggtcggccgccttgtcatttagctgttccgagccagtgatcgggaggcagcacaaactgtggcatttgctgagcgtaaaaattcaattaa

SEQ ID NO: 8585 - DNA, 122 bp, Homo sapiens
ttaattggtattatcaaataccccttgtttcaaaaacagcatttctgtctaaatctctggcggttcagaacgctccattaatgtatctgggccttcacctggtattccaacttggtgcagca

SEQ ID NO: 8586 - DNA, 122 bp, Homo sapiens
gtcgccggcggggagagttcggggggctgcggcgcgctggggcgaaggtggctgctgggccgcgggctggcgcgggggcggagccggagctgcactcgcacccccggcccgcgtctggcctc

SEQ ID NO: 8587 - DNA, 122 bp, Homo sapiens
gggcgggcaggacaggcgaagctgagtgcggagctaggaacgagggtttagtgcaatccccgaggtctgtgtaagtgtcgcggtgggccgcagcccttgttcctacggaagtcccagagggc

SEQ ID NO: 8588 - DNA, 122 bp, Homo sapiens
gctgatcacagagtctgtgtgcttcctctggagccagtttcctcctcagcctccctaaatcgagtccaggaaaacctgccagctgtggaacactttcattaacacgagatcctggcactgcc

SEQ ID NO: 8589 - DNA, 122 bp, Homo sapiens
ggagctcctcttgagcgcgggggactcgggcacttttttctgcaagggccgccacgaggacgagagccgtacagtgcttcacgtgctgggggacaggacctattgcaaggcccccgggccta

SEQ ID NO: 8590 - DNA, 122 bp, Homo sapiens
ctgggagaccttgcgggaaggagactgagacccagcttgtctgtgaaagaggacggtgtgcgcgaatggggaagccgtgtgagcctgtgcatcagttgagattaggctcagccgtgagcaac

SEQ ID NO: 8591 - DNA, 122 bp, Homo sapiens
tgtttattctcaatcattctccttgctttaggtgacagaatcaactcagatttaatccaccgaatctgcttgccatggtgagtcggaggaaaagcagaaacacagaggccaggaggaagggc

SEQ ID NO: 8592 - DNA, 122 bp, Homo sapiens
ggggagagttggggggaagcggcccctgaggctgtctcattggcccggacccctcaaggccgcagctgagcagtgctctccctgcagtctcccttaggctttccggtataggaggggcctca

SEQ ID NO: 8593 - DNA, 122 bp, Homo sapiens
atagggcctggccaggccagctgaggggcgcgccgggctgcgcttccatcgaggaacctccgcacatgcaatcacggttgtctcgtcttctggcaaccctggatctccacaaactgatcttc

SEQ ID NO: 8594 - DNA, 122 bp, Homo sapiens
atcaaaagcagctgctaagggacctcgggggacctgcttggggccagcctgaggcctgaccgggcggaactgcgtcgggtgggcttgggcctacgtcggcccaggccccactggaggccagg

SEQ ID NO: 8595 - DNA, 122 bp, Homo sapiens
caaagagcaaacgattaaatcttccacagtgtggaaggggacccgagcgggttgccactgcggctggggcagcctgcttttattctcttatctggccccacccacatcctgctgattggtag

SEQ ID NO: 8596 - DNA, 122 bp, Homo sapiens
ctggaacaaaacaagttcttttcaagttctccgccttcggtcggcctttgttggtttggtcgtggcagtccccagcttggcagacttttcccttccaggagagggaggagaggtggagaccg

SEQ ID NO: 8597 - DNA, 122 bp, Homo sapiens
cgctttgtgagcagcaaggcgaaggctgctgtaggggtccccttacttgagctgggggtgcggaggtccccctgcagcggcggtggcgggtggcggcacgtcctggctgggtttctgggcca

SEQ ID NO: 8598 - DNA, 122 bp, Homo sapiens
ctatcccagaagcttccaggtctgtttttgacgagctgtagtgcctcaggctttggagcacggtgactgtgtctctgagggaagacccccacatatgaaaaccgaacagcagagtggcctgg

SEQ ID NO: 8599 - DNA, 122 bp, Homo sapiens
ggtgacaggccctgacctagagggaccgcggggtgtggggagtgcggagccctactggggcggggcgaggtgtccgtaggccccgcccaccagcccttcctccctcctgaggccccgccccc

SEQ ID NO: 8600 - DNA, 122 bp, Homo sapiens
ggctgaggcgctgggctgcgacagggacatcacggttctcctcctcagggagatggtgctcgtcgtgcacggcttcccgtcctccgtggccgcccttcgggtaaggaaggagaccgggcagc

SEQ ID NO: 8601 - DNA, 122 bp, Homo sapiens
ctgcagtccccgcagctgtgaagcggaaagagggaggaagcagcaggagcctaggggcaccggcacagtgtcactcagcaaagtgcgctgcgtccacacgccctcccgggcctgtgcataga

SEQ ID NO: 8602 - DNA, 122 bp, Homo sapiens
gggcggggtctgtagttagcggcgagagtgacaggaggacaggggttgtttcggcagtgacgcctggggagtgacgcaattgcacccctgtgcagtgatgtcacggcaggtgcggccagcgt

SEQ ID NO: 8603 - DNA, 122 bp, Homo sapiens
tgctgggtcaccaggagaatggacccttcctccacctcagctcagagcacagtgatgattcgtgactttcccaatagaacttcaaatctctgaggacggggggtggggggatgtgcttgagt

SEQ ID NO: 8604 - DNA, 122 bp, Homo sapiens
tctggtgccgcgccctctgcccagcgtgctccgtggagggtctcattgtcttcctccagacgtctctttactggcccattttacagaggcggaaccgaagcttggggtgttggccacagggc

SEQ ID NO: 8605 - DNA, 122 bp, Homo sapiens
gggatgtaaaaggagacttacctgcctactctttaaagtagcctctcaaggtccccttctcgtcgtggtatgagcctcatttcttgagactcttatttctttccaggatttatggcatattc

SEQ ID NO: 8606 - DNA, 122 bp, Homo sapiens
ttgcatattgtctgtctttttccactgaattgtcagccacatgtgggtaaggactttgtccgttttgctcactgctttatctctggagtctagcatagtacctggctcaacaaatacgcatt

SEQ ID NO: 8607 - DNA, 122 bp, Homo sapiens
ctagccatgttcattttggttgaagacgaagggagctgggtcatcttccctacactaggccgcttctaaaaggacatctttatgacaggagtggttgtggcataatatttatgtcatcatag

SEQ ID NO: 8608 - DNA, 122 bp, Homo sapiens
agcttgaaaccggagcatggtgaagagcccgtgaaatagctttgtcagctgcctcccactcgccactttccaattttagctccccatggccggtgcggggtgtccccagtgaggcctctgca

SEQ ID NO: 8609 - DNA, 122 bp, Homo sapiens
taggtgtctgggggtggtggcacctgcaaggcaaggcaggtttcaggggctggggtgtggcggcgggaggtgcaggcattttgctgaacgcatggggtctgcagaaatatggcactaaactc

SEQ ID NO: 8610 - DNA, 122 bp, Homo sapiens
ccgctggtccctgggtctgggtagggttgggatgacgagggctcggacgccaggacaaagcgatttccaccccgccctccaggacaaagagaaagtgtcagagctggaggcagtgatggaga

SEQ ID NO: 8611 - DNA, 122 bp, Homo sapiens
gagtgtatgtgtaatgcttgtgatgtctcagacatacaaagcaccttcttaaagaatgtccgtttcctttccatggtaagcggacataatttttcaccctttaatactactgtttcacggag

SEQ ID NO: 8612 - DNA, 122 bp, Homo sapiens
gcccttcattctggctggtgtcgggtcacaggtggccggatcccgttacccagcccaggacgttcggtttcattgaagaatacctttccctttctgtttccttgtgccgcagatgatttaca

SEQ ID NO: 8613 - DNA, 122 bp, Homo sapiens
tggtgcagctgacgtgttcctggatgtttatatgtggttgaattcttcgtgcattgaaaacgtgtggaagtctaaaaacattctgatagcaccttctgaaagcagtgaattggatgtgtcag

SEQ ID NO: 8614 - DNA, 122 bp, Homo sapiens
ggatgggtgcccttgtaacagagtcctgggaaacgggatgggtgcccttgtaacagagtccggggaaacgggatgggtgcccttgtaacagagtccggggaaacgggatgggtgcccttgta

SEQ ID NO: 8615 - DNA, 122 bp, Homo sapiens
cagatccagcaccgcccatttggatccagcaccgcccgtccggactctgcaccgcgcgtccggacccaacacagcaccacccatcggacccagcactgcccatttagatccagcagcgcgcg

SEQ ID NO: 8616 - DNA, 122 bp, Homo sapiens
ctttccccttagagcttgaaggagaccccacatacctacaggaaagccacctgggggcttcgtggacccacgtggtggctcagctctgccctcccgctgaggacctctgcctccctttatca

SEQ ID NO: 8617 - DNA, 122 bp, Homo sapiens
aatttccagaagtggccagtgggaaataacgggcactcagtagcaccgctgggcacaggtcgttgtctcgtggatgaaagagtggttggagaagggattttgtgagggaccaagctcagtct

SEQ ID NO: 8618 - DNA, 122 bp, Homo sapiens
gtagctgcagactctacggggtgataccctcaaagggtgaccagggcatgaccgacagctcgaaggaagcaaagaggctgctgctggtgaaagaagaagtgaagtgagagtgtggtgcctgg

SEQ ID NO: 8619 - DNA, 122 bp, Homo sapiens
gatgcctcttaactgggccgcctaataacgggagaccaagtgggctcaggagaaacgtggcggggggggggggagctttctttaaaaaattggggttctttctttctgtcctatatatggaa

SEQ ID NO: 8620 - DNA, 122 bp, Homo sapiens
ggcgacctcagctgttgggctccggctgctgggggctgtgcgtccagccgccctggaatccgcctgtgggtgggccgcttggctctcccacttcaccctcttgataacccagagcctccccc

SEQ ID NO: 8621 - DNA, 122 bp, Homo sapiens
tcacggaaaaataaaacagtatacccactgagcagtcactcctaactttcccttacccctcgtctctggcaaccaccaatttgctttctgcttctgcggatgtgcctattctggatatttca

SEQ ID NO: 8622 - DNA, 122 bp, Homo sapiens
ccgccgccgccgccgccgcccgagaaaaagtttcgcggaggggctcagtgaaaaaatgagcgagctagaggaagactttgccaagattctcatgctcaaggaggagaggatcaaagagctgg

SEQ ID NO: 8623 - DNA, 122 bp, Homo sapiens
cactggcttttgttacttggtgaaatgattttgttggtccatatagatactgctactctacggagcaacaaaaccatttcaccaattaaattaaccacctagcatcatgcatgtggtgatta

SEQ ID NO: 8624 - DNA, 122 bp, Homo sapiens
actagggattataacagaacctaggcctttgtgttgttgtgaggacagagtgagttcatgcgtgcaaagggctgaggacagcacctaacaccaaagtcaacaaatgtgggcatgaaaacagg

SEQ ID NO: 8625 - DNA, 122 bp, Homo sapiens
atttgcctaaggccacagaactagcaggtggcagagacagaattcgaacacaggccaagtcggtgagtcgacactctccaccacaatctgttctcctgtcactcaaggaagacataccctct

SEQ ID NO: 8626 - DNA, 122 bp, Homo sapiens
tttttcttgtcaagccatgtgaacatcttctggagaaaaagctgtgaatcactgaactgacgaacatatcgcagtatgtccctgcttgcaaattttatatattgcagtatgtccctgcttgc

SEQ ID NO: 8627 - DNA, 122 bp, Homo sapiens
tgtgtgtgtgtgtgtgtgtgtgtgtgtgtgtgtgtgtgtgtgttcgcgcgcgcgcgcgcgcgtgcgtgccaaaagggacatttttaaaggtcaaattcccatttataaagcaaagctgaatc

SEQ ID NO: 8628 - DNA, 122 bp, Homo sapiens
ctcaaacctgccaggaccctgtgtcccaacccctgttcaaacagctggctggagcctctgcggtggctaggaggccctgaaaggcgccctgcagccgctgggtctttcttccctttctgctc

SEQ ID NO: 8629 - DNA, 122 bp, Homo sapiens
caccaaggctcactgtgcagccagtgaggaggggagctcctgggggaggagggttggtctcgggcaaggtggacctccggcaggtcctctactgtgggatgcttccacctggagctgttttc

SEQ ID NO: 8630 - DNA, 122 bp, Homo sapiens
gtaagggaaaaagcaagtgcatttcaaggctcagctcacttcttaattagctgtgatacccggggcgtgtgactccgcctacaggatcctgtttccctgtccataaagcgcactaatgctgg

SEQ ID NO: 8631 - DNA, 122 bp, Homo sapiens
gacccacggggcagtgagaggggcagcctccgcgtcgggccagggtcacatcaagtttggcgggtgcggaaggtggggagggggtgcggcgggggaggcagtgggagccggaggggccgccg

SEQ ID NO: 8632 - DNA, 122 bp, Homo sapiens
acctagttctggttttcctgagatacttatttccattctttctgtctgtctcttcaggagcgagactcctccagtacctcccccaccaccctatctggccagttatccaggctttcctgaga

SEQ ID NO: 8633 - DNA, 122 bp, Homo sapiens
ctaggtcgagctgcctcagagccggcccgcagtagctgcagactccgcccgcgacgtgtgcgcgcttctctgggccagagcgagcctgttttgtgctcgggttaagagatttgtcccagcta

SEQ ID NO: 8634 - DNA, 122 bp, Homo sapiens
cttcatcccgcgtggagtctacccccaagcccttctcctcttcccaattcttgtcaccttcgaggaggccatggaaaccccaacacctttgccgcctgtacccgcctccccgacctgcaacc

SEQ ID NO: 8635 - DNA, 122 bp, Homo sapiens
ctgagaaggccaaagttcagagaggacaagtcgcaagacggcagccacagcgggtggggtcgtgtccgtgtcccactgctgctgggccttcccgggggggggctgggagagccgccgttagg

SEQ ID NO: 8636 - DNA, 122 bp, Homo sapiens
tgtggaaagtagaaaggcaggtgcatcccagcactgcggccgggggcaggaggccacccgcggggcattcggacccccgtgccccaaacacatcccgccgagcctcctgggaccaggcccct

SEQ ID NO: 8637 - DNA, 122 bp, Homo sapiens
ggctttggccactgctgtatgggaggaccaccggagcagctgagaatagattgtcaccggcgggtggtgaagccagtgcagagatgcggacctggatttacaaacacttttagctttgttct

SEQ ID NO: 8638 - DNA, 122 bp, Homo sapiens
aggaggtcccaagaaggggttaggggaggacggggtggcgggaggcaggtctgaagccaccgcaccctggtccaccccgctgctgggccacgccagccgaattcacacggtccttggggaca

SEQ ID NO: 8639 - DNA, 122 bp, Homo sapiens
aagcattcttttcctctgcagagctgttgttgataaggctcacctaaaaataaaaatagccgggcgcagtggtgtgtgcctgtagtcccaactactcaggaagctgaggtgggaagatcact

SEQ ID NO: 8640 - DNA, 122 bp, Homo sapiens
tcccttgggtggaagcgggacctggcgggccgtgaccgcagggcggggcgggtcggaatgcgcccggtaggcccgcttggggcggagtgggtctgagaccgggatttggtgtttactgcctc

SEQ ID NO: 8641 - DNA, 122 bp, Homo sapiens
gccacatgttgtatgattccattaataggaaatgccctgaatatgcaaatctatatatatcgaaagtaaaccggtggccgccaggggctgtcggaggggggaatgaggagtgactgctaatg

SEQ ID NO: 8642 - DNA, 122 bp, Homo sapiens
agagttctcttcaggtcagctggtagggctccagtcccttcttcttgatggttaatactccgtggcgtgggtgtgctgtcatttattctgctgttgtcttattgatggtaagtcacatcctg

SEQ ID NO: 8643 - DNA, 122 bp, Homo sapiens
aatagaatagacacttactgtctcataattaggaaggctagatgtccaaaatcagagtgtcgccagacccatgctcttctagcttcttgtttttactgacaaactttggcattccttggctt

SEQ ID NO: 8644 - DNA, 122 bp, Homo sapiens
tctgtcctgctctgtcgtgggaccaggtattgatggaaggcagcaatttccctaattggacgcaatggtagaaaagttagatttggtataattaagactataggaaattttcttttagattg

SEQ ID NO: 8645 - DNA, 122 bp, Homo sapiens
ccaggtctaagcccagaatgtgttaacgggagacaaggggagcctactgtgtagggacctcggagaaaacccttgatgactccattgcagggaggaagcagactccagactctaaggaagac

SEQ ID NO: 8646 - DNA, 122 bp, Homo sapiens
gccacttctattcgcaaaggccttccgccttgccaggggccaccccgggggctccagctccgaggaagggctgtcacccgctcctctggccgcctgtgcaggaccagccctggtggggaaag

SEQ ID NO: 8647 - DNA, 122 bp, Homo sapiens
aaggtaggcaaattatatttccatgttacagatgaagcaatggaagcacaggggttgagtcgctttgcccagggtcacacagctaagaagtggcagagctgaggtttgaacccagacatcct

SEQ ID NO: 8648 - DNA, 122 bp, Homo sapiens
gccgcggccgcgccagtgagaagctcccgaatcctgcggtaacttggtaacttggagactcggcccgcgccgcagccgcggggctccgggctgggggctgggagggcggggagggggagggg

SEQ ID NO: 8649 - DNA, 122 bp, Homo sapiens
aatactgagtaactctttgggttagccttccccggagagaaaaacaaacaaatgttttaacgattccagtagaatccaataggactaagggcctggctggaaaaagaaaaggaaagtttggg

SEQ ID NO: 8650 - DNA, 122 bp, Homo sapiens
ccgcccgcgtgttctctccctcttcccctcctcctccgaaaaaccctttgaaccccgtcccgggaattcactgcttttctgcaataacaatagtaataagcgtaatgaataaatgatgtgct

SEQ ID NO: 8651 - DNA, 122 bp, Homo sapiens
tgtatttttgtttctaactcaaatctatcttttaaaaaattaattttctctctctattgccggattacattttcatttaactttggtgccgtgccttgtaattagtttttcttgatctgttt

SEQ ID NO: 8652 - DNA, 122 bp, Homo sapiens
ggaagctcattgtatgcaccgtgccataaaacggtggcgatggcaggagctatcagtaggcgagggtagccctatcctacattgagtggctgttactgtttgacttctcatgtatgattcct

SEQ ID NO: 8653 - DNA, 122 bp, Homo sapiens
ggacgggcgggctgctgtgactcatgtccccagcgcacgcacgtctccaggcagaggggacgtgggcggggacgctcacccttggccgaggggaattacctggggaggccaggaaacaggcc

SEQ ID NO: 8654 - DNA, 122 bp, Homo sapiens
gccggtgcccaggtccgagtcgccttccgcctgcccccccccccccccaatcccccgccgcggcagccccagccaggtcccgccgccaggccggctcccgcccccgctccgcccccggagcc

SEQ ID NO: 8655 - DNA, 122 bp, Homo sapiens
cgggctggcgagggcgtgggcaggcagtgtcctgtggccacctccaccctcctgcccagccggctgtgtcacactcatatttttaaggtcaggttggttcctggtaaaaatgtccctccggg

SEQ ID NO: 8656 - DNA, 122 bp, Homo sapiens
gtgtctgcgtaatgggatttttacaaggagacatgggagagagaagactccagagatacacggtcttgcagcctcactggtggtttaggttgtgggctttggagccagacagttcgatttca

SEQ ID NO: 8657 - DNA, 122 bp, Homo sapiens
ggtcttgcaagtgggacaacagtgtgttctgccagtttgtgtcatcctgccacacctgcacgtcaggcatggagacgtgtccacaaggagcccgtgtctggtgctgagtctcctccaggacg

SEQ ID NO: 8658 - DNA, 122 bp, Homo sapiens
aacaactacaataaaaaggaaattcaaatggagttaataatgtaggtaagtcaggaaggacgtcctgaagacattgcatctaagtcaagacttgaaagataattgctattaatgttgggttg

SEQ ID NO: 8659 - DNA, 122 bp, Homo sapiens
cacattggtagcctgaggcagaaccggtttgcacggtgaccgcctaggcatggggctcggcgtttgggacccccaagacgtcctagaaccgcagagaaggcactgtgcctgcactccagggc

SEQ ID NO: 8660 - DNA, 122 bp, Homo sapiens
ctgttctttcttctgctttcttcaccataataaactttggacaaccaagcaagctctaaccgcaatgccagatggccttgtccgagggcctagtgtttgcacggcagtgggaactgggcctt

SEQ ID NO: 8661 - DNA, 122 bp, Homo sapiens
acacacacacgtcccttctgacctgatgattccactcccatcatctcagagactgtccagcgcccccctcccccggcttgggagcttgtcatgccagtgcagcagacaatccatgtacacac

SEQ ID NO: 8662 - DNA, 122 bp, Homo sapiens
aagaggatgcgtttgccactcccgtgtcgctagcaccggtctgacgactgaggcggctaccggcttccggaaacgatccgttgcgtttcaggaaccttcgcgaattttccggtcgcgcaggc

SEQ ID NO: 8663 - DNA, 122 bp, Homo sapiens
ggtgaacagtgtgggatggagcctcctggaagggaggcagagagctggtcatgagagagccgtgcacggccaggatgtgtatgtgcggcacgagcacacatgtctcccacacgccaacacca

SEQ ID NO: 8664 - DNA, 122 bp, Homo sapiens
aggtgaacacattcttgttcaaagtcctctcgaagcggcggtgtctccgcacggagagatcggacacggtgtcctcactgccatcctcgctgtcgctgctgtcgctgctgctctctctgtcc

SEQ ID NO: 8665 - DNA, 122 bp, Homo sapiens
acaattgtgtgtatgtggctgcacagcagcaggcaccaggttacagcattgccacttctacgtttgtcatttttacaaaaaagaagcaaagtctacctcccccagaaaaaagtacctgaacc

SEQ ID NO: 8666 - DNA, 122 bp, Homo sapiens
atgcccgggtgaccgacccgccgtggtccctgcgccgcctttgtgccgaggaggcgcgcgcggggacctaatccatcaaattgtctacaaattgtgaagaaaattcaaaaaccatatggtcg

SEQ ID NO: 8667 - DNA, 122 bp, Homo sapiens
acatccagaatgtgtctttgcgtttcttccagccaataccccacactccaggtttaaccacggttccgacctctatcaccatggcttcgttttgcctgttcttgaacttcatataaaataga

SEQ ID NO: 8668 - DNA, 122 bp, Homo sapiens
caagagcacagctgagagtcatgtgatgccctggcagctcactggaccatgggaaggcagcgggggctccgccgggcactcgtcggctggggtcacacgggccacggtgaggacacaggggt

SEQ ID NO: 8669 - DNA, 122 bp, Homo sapiens
gggctcctgcgtttgtgccctgtgtgggaggtgccacctcatttgcatgtggcccttccacgtctcctggccatgccagacaggtcctcaggattgttgggagatgagggcctcgcccagga

SEQ ID NO: 8670 - DNA, 122 bp, Homo sapiens
cacatcttgctgagacttgtctttttcctggagagctctcagtgcccatggatccacctacggacgtaggcagatgacctccatcttcacttcctcatggatgctaacaccagatgtgcact

SEQ ID NO: 8671 - DNA, 122 bp, Homo sapiens
ccttgtcctcccttttctgcttgtaggaattcagccctggtgagttgatgacctggagctcgcatgcacttcataatctcctaggagacctttggactctgtctccctttgggcttcctttc

SEQ ID NO: 8672 - DNA, 122 bp, Homo sapiens
ccatctcaaaaaaaaaaaaaaaaaaaaaaaacattatgagcaggaaaataaattgtgtctcgaagtgataatcattgttgtacttaccatgactgtcttctgaaatgcatctcaacccttga

SEQ ID NO: 8673 - DNA, 122 bp, Homo sapiens
cggagcacacggaacatcaggcccgcgcacagactgacaagagtgaacctgcccatgccgcgccgctactaccaccagagctaggccggtgaatgaccccggcctggggcgaaggtcacgac

SEQ ID NO: 8674 - DNA, 122 bp, Homo sapiens
gctgccctggcctacagtttgtaatctcatgggagacctggagacagaaccacccagccacgcatccccaaatccctttacctctaaaacctgtgggacaacaaatgtttattgcgttaaac

SEQ ID NO: 8675 - DNA, 122 bp, Homo sapiens
acgccatcgtttttacttgctcctaagaagggccttaccagctcctgcgattatctcacgcgatgattcttggtagctcgtgaaaaaaatgcataacaagatactggttctcaagggaccaa

SEQ ID NO: 8676 - DNA, 122 bp, Homo sapiens
tgggtcggcccttacggctttgggagtgtcgcaaccacatgggggcgccagagacccagacgccgcccgctggccttttatttcgtattgcacttcaggtgagtcattggtagggaggcgag

SEQ ID NO: 8677 - DNA, 122 bp, Homo sapiens
tacagctcccagcctgagcgacacagaagacggtgatttccgcatttccatctgaggtaccggcttcatctcactagggagtgccagacagtgggcgcaggtcagtgggtgcgcgcaccatg

SEQ ID NO: 8678 - DNA, 122 bp, Homo sapiens
tgtttcggccgcctccgccctcacccggtgtttgttgtctctggtctctgtgtttaccttcgcgcttcaccccgaagggcgacttggggtcttctgggagatgagccggtttacggcgacaa

SEQ ID NO: 8679 - DNA, 122 bp, Homo sapiens
ggctcagggtggcacggcctcgcggccgtgggaggcaggctggcggaggacagggcggggcggccgctcacccacctggttggtgacctgaaacggaagcagaaacacaatttagagaaaca

SEQ ID NO: 8680 - DNA, 122 bp, Homo sapiens
ttcttggagaatatcctttcagatagttgtctttgtaaatgtatacttttaatgttttttcgtttgcctttttaaaataaattttttgggggacagggtcttgctctgttacccaggctgta

SEQ ID NO: 8681 - DNA, 122 bp, Homo sapiens
gcctctttcctacttgctggttggcgaagctgacctccaagggcggtgcccggccatagccggtttgcttctgggattggctagagggggtggttccgctgaggcgtggtaggaagtggctg

SEQ ID NO: 8682 - DNA, 122 bp, Homo sapiens
gcgcgaggagcacgcggcctcggctcggctccccgacacccccaggccgccgcactcccgcggcccggggctcccccagtgtcctaggccgctctgtccccacccacgtgcgcgactcccct

SEQ ID NO: 8683 - DNA, 122 bp, Homo sapiens
gccctctcacgtgcccacttctgctgggcctttagccctagaacctgcaggtggtgggggcggctaccaagaaggaacagaggtctctggggaggagtctgggtggtccagccctgatgatt

SEQ ID NO: 8684 - DNA, 122 bp, Homo sapiens
gactgaggcctcttcctctcggattgcccagtgccttgcacgtagtaggtgcttagtaaacgctggcactgggtttggtcactttgttcccttaatgccagggcaggtagtagagcaaacgg

SEQ ID NO: 8685 - DNA, 122 bp, Homo sapiens
ccgagtgcaatccgttcataaataaaacgtacaaatacagaaaaagaaacccgacgcgtccgcaacccccccagggggctttacccgcaaagcgaagacagaggtgtgtagagggcagcgcc

SEQ ID NO: 8686 - DNA, 122 bp, Homo sapiens
cccttcccaggaccaggaaaagcatcttccttctcaagtggctgtggcccatcttgtggtcgggacagaagggtgttcccaagcctgaggacacagctcccctggctgtgtcctgttgggct

SEQ ID NO: 8687 - DNA, 122 bp, Homo sapiens
aaatctgacagacctgagggagattgcaggggaggcagcttcagttgagtgcatcccaagcgtgaaggtcctagatacagaaaccctgaggttcagggcctagggcaaagaagttaagaggc

SEQ ID NO: 8688 - DNA, 122 bp, Homo sapiens
aagcaagtaacctagctctttctctcttcctcccaggaagatacaagacaacagcttctgcgaaccagtaagagtggcctcattagacattggatttgccagtgacttgatcatggacttcc

SEQ ID NO: 8689 - DNA, 122 bp, Homo sapiens
cttgttacagcagagtggccgcgagaggcgggagatgggctccagcacccccttgctctccgtcggggtcctgggacgccggccccctccgtcgggaccccacacccagaccctgcccccca

SEQ ID NO: 8690 - DNA, 122 bp, Homo sapiens
aaaaagggagtaaaaatgtcaccctcctcctctggaacgtctgtgcggcctgagaccggccggcgagaaaagtcaaatcagaaaacggcttcggacgaaaggaaaaaacgctgagcgctgga

SEQ ID NO: 8691 - DNA, 122 bp, Homo sapiens
atgctaagcaagcaatgaactcagcccagatggacacacgcttccagtcaaactgtaaatcgttaacagcctttctggaggtcagtttagtactaggtatcaaaagccttaaaagtgagcac

SEQ ID NO: 8692 - DNA, 122 bp, Homo sapiens
cttgcacctctggcttttgcaaactgggggcccaagagctgcacccagggattttatagccgttcttatcggtcctcaggatcaaggaccaatcaggtccctcaactggtctggtgagccaa

SEQ ID NO: 8693 - DNA, 122 bp, Homo sapiens
tctggactcagcagtgtatatatttggagcaggcatttctaagttctctgcctgggctttcgatccttcctctgctgttaccctgttcccatggagagaacaacacaaagctttggggcaga

SEQ ID NO: 8694 - DNA, 122 bp, Homo sapiens
ctccctctcccaggactcccggtgcccgcaggcgccaaagacgagggaaggaaggaaaggcgcggggagcacaaacttttacaggaaccaccagcccttccgaggagcacagcccggtgaat

SEQ ID NO: 8695 - DNA, 122 bp, Homo sapiens
aatcccagtgccttgggaggtccaggtaggtggagttcaagaccaccttgggcaatatagcgcgaccctttctctacaaaaaatttaaaaattaactaggcatggtggtgtacacctgtagt

SEQ ID NO: 8696 - DNA, 122 bp, Homo sapiens
tcaagtctacagactgaaacagggctccagcctagttggtagggtggtatcctcctagtacggagaggtcaagaaagaactccccaaggcacccagcttggtccagaatggcagaggccact

SEQ ID NO: 8697 - DNA, 122 bp, Homo sapiens
ctatcctcccggttgtttgctgggtggcagctggctcccaggaacctgctggccgcctggcgccctcacctgcctatgccagacggccaggcagctgccacctggtggggacacgtgggaga

SEQ ID NO: 8698 - DNA, 122 bp, Homo sapiens
ggcccctcccccaggccctgtccgcccgccgcagtcccgacagttcccggacagcatcatcgtggtttccaggacaacaattcccgaccaatcagagggccggaagcgggcctgcgattggc

SEQ ID NO: 8699 - DNA, 122 bp, Homo sapiens
attcaccctgcgcatcccatcctctgcttcagccccgccgggctcgccctgcatgcaaggcggggctgggacccagggtctgagcttcgccctctggacatccggctcatcgcctgccaaag

SEQ ID NO: 8700 - DNA, 122 bp, Homo sapiens
cgtgaggccggtttcagggccctgcctgaggccacaagaggacccgctgccctcaggaagcggccatttggagcacctgccctcaagaagcccctagttgggtggccttgcccctctagaag

SEQ ID NO: 8701 - DNA, 122 bp, Homo sapiens
aaaaagccaacttcggtgtaattaagagatatcactgcccgtttttctcagtgatgaggccgcagctgactcagtcgataagggccgtgaaggagtggggcccagggcgcagtggggatgga

SEQ ID NO: 8702 - DNA, 122 bp, Homo sapiens
cctccggcgatgcacatgcgtacaccgccgcccgacgcgcatgcgtacaccgccgtccaacgctcctgccagctccgctcctctagtccaagtcctttaggtcctgtctggccacgtcacca

SEQ ID NO: 8703 - DNA, 122 bp, Homo sapiens
ggcattgcaggggctcaggccagcagctcagtgcagtactgagtggcctggcacctgcagcgtgctgggcatctatactgtccgagcctatggggctcctgggcagggacacatctgctctg

SEQ ID NO: 8704 - DNA, 122 bp, Homo sapiens
aaaaattaataataataataataaaataaagcttctttgatgaacggatccaaaattttccgatcagaaaatctagaaagaaggtattttaatttcagcatatgtgtaagtttcatggtttc

SEQ ID NO: 8705 - DNA, 122 bp, Homo sapiens
ttaatgagtgccctggtatcaggggctgccccagtagagaagtgcttcccaggagctttacgggggatggggctgaactcctcacccagtttctcccaaaccccatgacctttaaccttccc

SEQ ID NO: 8706 - DNA, 122 bp, Homo sapiens
cttctgcgctctgctggaggggcggggccagctcgcccagtgggggcggggccctgtggtcgggctccccgggaggggcggggccaggccgtgtcagctgaccggcctggccaatggcacct

SEQ ID NO: 8707 - DNA, 122 bp, Homo sapiens
gactggaggaaagtggggagggggatggagtggggagggggatggagtagaaagcgggctcgagactctggatgaaaaggagccttctctggaaaacaaataggtggactgagttgacatgt

SEQ ID NO: 8708 - DNA, 122 bp, Homo sapiens
gcagccagtgtctttcctgtctttccactctgagtcctcaggccaggccagctccatgtccgggtgccttagcacagcctttgcccccagccgtggggttgggaggcttcacaccactcgct

SEQ ID NO: 8709 - DNA, 122 bp, Homo sapiens
tcggaaacgggaacgcccagacacagaaccccagaaacttcctcctgcccagcctccgcacgccaggcctggcctgcaggtctcagctctgccctcatctgagatgctgcacagtccccgtc

SEQ ID NO: 8710 - DNA, 122 bp, Homo sapiens
gtctcctacgtggctccccggagccctgagaccaagcgagcagtttgcatgatcccagttcgcggacaagtgggtgtgtcagggccgttcccagagggccggggctccttcgcttggtcaaa

SEQ ID NO: 8711 - DNA, 122 bp, Homo sapiens
gggctcaggacgtgcagcccgccatgcctgagcctcccacccactccatgggctcctgtgcggccgagcctccctgacgagcgccaccccctgctccacggcgcccaatcccatcgaccacc

SEQ ID NO: 8712 - DNA, 122 bp, Homo sapiens
tacctggccctgagagctccccagggaagccatttcctcccaggaagcccctcctcttctcgcccctgcccttacaccaaggcatctgggcctactcttagggagagggtgatggtggagga

SEQ ID NO: 8713 - DNA, 122 bp, Homo sapiens
tttgaccttgtcgtcagtgagcagaggtgccttaagcacaaaagcctagtgccaggaccccgcatcccgcccactctgcactcggcctatcttgctgtcggccggcatggctaacaggcgtg

SEQ ID NO: 8714 - DNA, 122 bp, Homo sapiens
gttcctagcagcactcttaccatgacacttggtaaattctgtatagcaagtatttgtttccgtgtctcttttccacagtagatactgaaattcttccaagatgggactggtgttatttgtgt

SEQ ID NO: 8715 - DNA, 122 bp, Homo sapiens
gggggtgtccactgtatcccgcgtggtggttatcggagtgggggtgtccaccttatcccgcgtggtgtttatcggagtggggtgtccaccttatcccacgcggtgtttatcggagtgggggt

SEQ ID NO: 8716 - DNA, 122 bp, Homo sapiens
tgtgcttcgtgctcctgtgcggagtagtgggtgagtaggggccatggggtcctcagcacccgcccagcccgggggcgctcgctgcccgcggccacccaggaacaatggggcgtgggggaggg

SEQ ID NO: 8717 - DNA, 122 bp, Homo sapiens
gaggctgctgaagtctcaattcccctcgccctaggcctgcccaagggaagtcaggagccgcgccacgcccccttacatcaccgatagacgtaatccgggtcggccgcaaacgtgccgcaggc

SEQ ID NO: 8718 - DNA, 122 bp, Homo sapiens
cgcatgtaggaatcctttcctaaatccacatccacaatagtttcccttattatgggtcttcgtgcatcttatacctttcattatcatagtttcactttccatttaagcatctaataacgtca

SEQ ID NO: 8719 - DNA, 122 bp, Homo sapiens
cgcctaacatttccttgatactgccttgaaaaatcatgattatgacaaaaataataacgtcggagaatggagtgcttgttttctgctttgcaagtcaccaagcaagaaaacacttttgtctc

SEQ ID NO: 8720 - DNA, 122 bp, Homo sapiens
tccccaacccgccgatgggaggccctgggcagaggcgcgcactccagggggaccagtggtcgggtgccccgggcgcggtggctgaaccccagcaaacagaggaagaggactgccccctcccg

SEQ ID NO: 8721 - DNA, 122 bp, Homo sapiens
tggtggtttgtgtgaatctacacagacaaaacagcataaaactatacatgcaggttggagcggtggctcacccctgtaatcccagcactttgggaggccaaagtgggcagagcacttgaggc

SEQ ID NO: 8722 - DNA, 122 bp, Homo sapiens
tgcggaggcagaagcgcaggggcaggaggcacgagaagaggtacttgccccatcggatcacgcaggagaagcaccaactcagccgagtcatgctgaccccgagagtgggcgcctggggcgcg

SEQ ID NO: 8723 - DNA, 122 bp, Homo sapiens
ctctcttctgcagcagcgaagtacagagtagcatgctcttaatagcagtcctcagagggacgctatcaacaatctaattcaatactgccctccccttctctcccctttcccctcttgttcac

SEQ ID NO: 8724 - DNA, 122 bp, Homo sapiens
agcaatggtgagaaggactgctctaccgccctttggagatgtttaaaatcgagtgtcttccggcatgccccgtgatagtcattcaggctgactttgtctttcccggtaccacagaggccaca

SEQ ID NO: 8725 - DNA, 122 bp, Homo sapiens
taggattcagcttggggtggtccattgacttctccagggagctcctagcgtttgcggccgcgtcacatctccaacctttgcctcgccctgcctgtcatcccggttttctttcttgcccgcct

SEQ ID NO: 8726 - DNA, 122 bp, Homo sapiens
ttgggtggggcgtctcagcattcctccaacgggcaggtctcagcgctcctccccctgctccgctcctctgcagggcccaggcgcccttggccttaggacccaacttctcttaccgccatgga

SEQ ID NO: 8727 - DNA, 122 bp, Homo sapiens
ctgacccaagcgatttgcggatcccggggagaatctggccgcacacatggcggcctgaaacgttcctccgaagtctgacccgtctgtcagccttggagggcagccagcagtcccctgccagc

SEQ ID NO: 8728 - DNA, 122 bp, Homo sapiens
tttctctgggagggggcctctgcccagctgtcccctgtgcgtcatgtgcaggaggccaggcggctcgccttacagggacccggccacctctatatatagcccctcgaagacagctgctcagt

SEQ ID NO: 8729 - DNA, 122 bp, Homo sapiens
aaaacagaagccagtcttagcttaaggaaatgtgccacctgcgtgcagggatgaggtcatcgatcgacaggggaccagagacggcgctccacccctgcatggtagcagcgtgctcccagccc

SEQ ID NO: 8730 - DNA, 122 bp, Homo sapiens
attgctcttatctgatccaagttcagattttttttacatttgctaatgcacttgaataatcgggagagaaaatctgcctgtaattttaataggaaactgtctatattgactatacttttata

SEQ ID NO: 8731 - DNA, 122 bp, Homo sapiens
gaagaaagattacatttccagtccagtttctaatcccaagtatccatgcacccaggatggcgggaaaagggaaaaggcggtaccttaaatgagggaaggacatctcagtcttggccagttct

SEQ ID NO: 8732 - DNA, 122 bp, Homo sapiens
cacaggggctcccttgctccacctcctggccacgatgccacctccgctgcctggctcagccgtgcctttcatttcaaaactgcaaccaaggcagtgtcagaacatggccgatggtgtcggaa

SEQ ID NO: 8733 - DNA, 122 bp, Homo sapiens
gtgagccaccgcgcccggccatctaatatttatattaaactttctcagttcatattactccgtggcttctttctcctgattggatccagactgatgcagaatggatactagcagtggtattt

SEQ ID NO: 8734 - DNA, 122 bp, Homo sapiens
ttgattccagaaatgtcaaagcagcaaagccgtggttgaaaagcaggcagaagcctgtgccgcgtgggaggctctgcagcgcccgccccacacctggcgttccagccacctaccgaccagag

SEQ ID NO: 8735 - DNA, 122 bp, Homo sapiens
gcccaggttttgaaaatattaaacatgcatatacagtagatcctcattactcattgattacgtatttgcaaatttggctactccctaaaatgtatttgttatacatatagcaaatagcacta

SEQ ID NO: 8736 - DNA, 122 bp, Homo sapiens
tgggttgggagactcgcaggtgtggggcggggaggtaaggtgacccttgctcagcgaccgcgcccgcaagaaacgcattcccaggcctcccgcccggggtctgcaggtgacgggctgggggg

SEQ ID NO: 8737 - DNA, 122 bp, Homo sapiens
tcaaaggctaaaaaagatatagagccattgaatggtggggggaggagcattctaagcagacggaagagcctgcacaagttccttaagttggacggagctcaatgcgccagaggaaaggagag

SEQ ID NO: 8738 - DNA, 122 bp, Homo sapiens
gggctgcggtgcgcagcagggggtggccccggtcacacagtgtcccccatggaggggcctcgatggccgggctgcgcatggcacgtgtcgtgtgtggatccacagcagggccgctgccccca

SEQ ID NO: 8739 - DNA, 122 bp, Homo sapiens
gctaatttttttgtatttttaagtagagacaaggtttcaccatgttggccaggctggtctcgaactcctgacatcaggtgatctgcccacctcggcctcccaaggtgctcagattacaggtg

SEQ ID NO: 8740 - DNA, 122 bp, Homo sapiens
aggtgttctgggctgagaactcggggtgtggggcatctgcgtgtggatggtcacaggccacggggagcgtgtcctcaggtcacttcctaactgaattgggattagaggcatttgctggtaaa

SEQ ID NO: 8741 - DNA, 122 bp, Homo sapiens
acggattggggtcaatgggattgcactagtgattgctaagttctcttacagctaggattccgttattctattgtcctgatctgaaatctcccagccaaagctttaggaagccacctattctc

SEQ ID NO: 8742 - DNA, 122 bp, Homo sapiens
gccaccaggctggactgggtgcagcttacggacgtggcgcgtgctgtgggcgtcgggccgcggctcctccatgcagtacttacactgctgtctgcagatcgcacccaatcaggagggaatgg

SEQ ID NO: 8743 - DNA, 122 bp, Homo sapiens
ctctgcttccaagaccacctgaagttttcaggacaaaagggagattgtgatgatggatggcggacagctcagaatctgaagaatctgggttcccaaatgagagatttcaaacgttgcagatt

SEQ ID NO: 8744 - DNA, 122 bp, Homo sapiens
ggaccggcacccgacaaagcgcccggagaggcttggctcgctcgttggggtggccagagccgcaggcctctgttccccccgacggctggggggaggggggaagagggcgcgcgcccccctcc

SEQ ID NO: 8745 - DNA, 122 bp, Homo sapiens
gtgccttgtggtgtatacacaggcaatgagctctaaaaagcactttaatcgaacgaacaacggctgctttcagcagtaggatgagtcacaaacttaatgttgaaatcaagcagccagacaca

SEQ ID NO: 8746 - DNA, 122 bp, Homo sapiens
ctcctcccctcccccacgcggtggtctcccctcccacccggctcaggcagagccatgtctcggggtggctcctacccacacctgttgtgggacgtgaggaaaaggtccctcgggctggagga

SEQ ID NO: 8747 - DNA, 122 bp, Homo sapiens
aggccatggacagaacggagactaggttccgtaagaggggacagattacgggaaagatcacgaccagccgtcaaccgcaccgccagaatgagcagagtccccagcggagcacctcggggtac

SEQ ID NO: 8748 - DNA, 122 bp, Homo sapiens
actttggagtactaattaagttttatacaatgagcaggttaggtatgacttgacatcatccgtaacagccaaaatgatgtatcctccacctacatgttccagtatttcatttgttagtatta

SEQ ID NO: 8749 - DNA, 122 bp, Homo sapiens
ctgcactaggggctcatccctcacttgcaggatgggcgtgcagaggagctgggcagaaatcggtatttctaatgcccagtcactgggtcaacaaaggaaaacaacccaacccaaccatgagt

SEQ ID NO: 8750 - DNA, 122 bp, Homo sapiens
tctcctgtcagcatgtgggcggggtagggcggggaccagcagccgcagagccgtcctcggcggtggcgacgacgacgacgttgctcagtcttggggtgggctccgcggtgcaggccgagctg

SEQ ID NO: 8751 - DNA, 122 bp, Homo sapiens
atggagctggctgggtgtgccccaggcctctccctctcatctctaggcctcacctatcagcgcttccttcctgggcagggctgaggattcactcactgcccacggccggctgagcagggaca

SEQ ID NO: 8752 - DNA, 122 bp, Homo sapiens
ctccccgtccggagcttgcgtcccagtgaggacaccgggaggcgacccgtggggagcgcccgaccctgagacactgccgctcaccccacacccagcacagtttgcacgtgagacccccagcg

SEQ ID NO: 8753 - DNA, 122 bp, Homo sapiens
tggctctagcctggcgccctctgggcgttgacttcttctctgtggtctgggaggagatgtcgaggcccccgagggaggcggtggtgaaatcttggcttgcagcctccagcccgcccagagcc

SEQ ID NO: 8754 - DNA, 122 bp, Homo sapiens
atgggagcctccttaccccaactggagcttccagctcttgcagaacagagaggtaaacaacgcggtctccatgacaacaagtgacgcgttgccagggcaaagagggctggttccgccactga

SEQ ID NO: 8755 - DNA, 122 bp, Homo sapiens
tgtgctgtgattcggtgcgctcaggctccctctgtcccctaacccagacgccgcgatgcccggcccttggttgctgctcgctctggctttgaccctgaacctgaccggtgtccccggcggcc

SEQ ID NO: 8756 - DNA, 122 bp, Homo sapiens
cgggagcgcgcgggttgattcgtccttcctcagccgcgggtgatcgtagctcggaaatggcgggtaagttaccgggaaaagtttaccaaggggaggaggcggccagatcggggatagaacgc

SEQ ID NO: 8757 - DNA, 122 bp, Homo sapiens
gacagtatctctgtcctgtgattatggctgttttcaaggcctaccaataaaacaagcttgcgaaaggggtatgtacaaaagaaaaaaaaattctgcatacctgggcaagaattgaagagaaa

SEQ ID NO: 8758 - DNA, 122 bp, Homo sapiens
gtggaactcgtcctcctcgtacttcacgggggccttcaggccgatgttctccgaagcgaacggaccctcggggcttaagagctccgtcaccatcgcatcctcggggctgggcagcccgcccg

SEQ ID NO: 8759 - DNA, 122 bp, Homo sapiens
actcagaccgaccccccagaaccgggcggccttgcccgaggcatgaaggctttctaggcccgcttctaaaagctgtgtacaatggagactcctggaataggcacatatctctactgtaatca

SEQ ID NO: 8760 - DNA, 122 bp, Homo sapiens
tgaactcctgactttgggtgatctgcctgtctcggcctctgaatgtgctgggattacaggcgtgagccaccgcacctggctcatccactgttttgatctgggtgcctgtctaccttttctgc

SEQ ID NO: 8761 - DNA, 122 bp, Homo sapiens
gcgcggctaaatgacgcaagaggcctcgcgcgcacgcgcagtgccgcaccacgtacaccccgcccccggggctctctcccgccgggttccggttcctttacaaggccccagtcggctgagcg

SEQ ID NO: 8762 - DNA, 122 bp, Homo sapiens
ggaactcccaaaaaaggagttttttaacagcaaataaacctcagaccccccaccgaaaaacgttggaagatcagggatccctggaggaacaaggtcccagatttcagcaatcatcctaccag

SEQ ID NO: 8763 - DNA, 122 bp, Homo sapiens
tctgagaagctgagcaactctcttcctaccttagcagcttcaatgttgagcatgtagtatcggaggagctctgttagcttcaaatcttcatctgatgaaactcgaccctctactttctatat

SEQ ID NO: 8764 - DNA, 122 bp, Homo sapiens
acagctcccctgtgaggaccagagaggggatatgtgtgcgcccagttgcctcggagtcagcgtatgtccaaaatgtgagagtgtggggaacagagatcctctctgggctgactccgtaaaga

SEQ ID NO: 8765 - DNA, 122 bp, Homo sapiens
taccgaggtccttgcccctcgccctccccctaccccagctaccccaggctgcggggagctcgccccgcctgcaggacgggcgtctttacctgctcacaaaaggcactttgcatttaaaccat

SEQ ID NO: 8766 - DNA, 122 bp, Homo sapiens
aaagctgggagttgttagagattccgcagccgctctgagggcgagatcgggtttgtcccacgacctcggcgccaggaagctgtagaaagagacagaccccaattttctccccttggagttga

SEQ ID NO: 8767 - DNA, 122 bp, Homo sapiens
ttagagggggcgcagaaacgtaagctttatcagcatcccggcaaattcacctttgctgttcgcttcgctgggcacacccccatgtcccggccttgagctcctgccgcgctcaccacttcctc

SEQ ID NO: 8768 - DNA, 122 bp, Homo sapiens
tgcctacagacagaaagcaagatgtctaatattagacatacaagttgctgcctgttataacggtgaattatacctttgtgcatgcctaggatgtttgttgttttaattagctgcaatatata

SEQ ID NO: 8769 - DNA, 122 bp, Homo sapiens
atcgttccagttatttttgctcctatctaaaccagagctctcgaagtccttgtcgatctccgggtagctccaggtgtaaggggcgaactggatcccactgcagtcctccacgatggccctgc

SEQ ID NO: 8770 - DNA, 122 bp, Homo sapiens
agctctgcagggtgggggcgcacctgggctgggctgcgcggaggcggcggaagcactaggcgcggcgcccacaggcggacggctggcgctgagcgcgggcgcggggccgctacgtgcgcggg

SEQ ID NO: 8771 - DNA, 122 bp, Homo sapiens
ttgtacccacaggcccaacaggccacttggctatgaggccagagcgtcgccataggggcccgaacgctagcgtttagggaatccgcaggctagaagtggaggcgggacgccactggtcgtct

SEQ ID NO: 8772 - DNA, 122 bp, Homo sapiens
cctcctcaaacgactgcggtagaggatctctcagttctacctcagtgccgcgcccacatccggggctggttctcaccgcccctgagcctaccctataggtagagaggacgccaatctggatt

SEQ ID NO: 8773 - DNA, 122 bp, Homo sapiens
ccagccctatgtggaaaggtttgtgtggataacatcaggtttcccagtgcctctgttctacggcagtcttctgaatccaggcttgtatctcctccagctgaagtttttggtgcttataaggt

SEQ ID NO: 8774 - DNA, 122 bp, Homo sapiens
tgtaaaactgtttgattagctgatatatttgaacatattgaaaagggtttgcagttctgtcggaaagtttgctgctgatttagtgataaatacttaaaaactaagcagatttttaaaatgca

SEQ ID NO: 8775 - DNA, 122 bp, Homo sapiens
ttctttctagtattaggtaaatcagatctcaaatctgatctagccctgctattcagaccacgaattcctgtaaacatacctatctagaactgtgtgcaggcccctcttatgacaatggtctg

SEQ ID NO: 8776 - DNA, 122 bp, Homo sapiens
cgatgagcaggacgatggctgtgagggcccggcccgagctctggggcgtgggccggagcgcggttggccttgaccttcttggaaagcccttggcggcaggtgactccgcttagtcacggccc

SEQ ID NO: 8777 - DNA, 122 bp, Homo sapiens
gccaagctgctcggtgctcctagatgacgttgactgtccggcgccgtcgctccgcaataacgtaaaaggaggcgggcagaaaactggagcccaagctggatacacacctcctttcctacctg

SEQ ID NO: 8778 - DNA, 122 bp, Homo sapiens
ctcccgagttcggggctctgctgcaatgtctgcgaggctgactttgagcgcctcgctcaccgcccgcccgcagccgcgctcctccctccgccgccgagtccgccgcggcccagtccctcccc

SEQ ID NO: 8779 - DNA, 122 bp, Homo sapiens
aaaacaagtttggctttcaaggcgggctgggcgtggggagtgagaacggtgtgccctccgcggcagctccctggctcggtggctgctccgtgcacatgtgcgccgcaggtggcctctgccct

SEQ ID NO: 8780 - DNA, 122 bp, Homo sapiens
tccgccaccccaggaaggcagcgcctgcctctgggcggttctgacggaaactggctcctccgcctgcaggaaaactcacaactaaggggccaggagaaagcctctcagggtcccgccccttc

SEQ ID NO: 8781 - DNA, 122 bp, Homo sapiens
ctaatatattatctggcctggaaggtggcagcaaaaaccagccacagagaacgtggagcccgcctggatgtgtgggtgccccacccagagcctttgtctgcagaacttgccatccagccacg

SEQ ID NO: 8782 - DNA, 122 bp, Homo sapiens
gctttcaccatgttggctaggctggtctcgaactcctaacctcaagtgatccacccacctcggcctcccaaagtgctaggattaccaaagtcacccactgcgactgacctgttttctgactt

SEQ ID NO: 8783 - DNA, 122 bp, Homo sapiens
catagaaacttaggctaaatgagtctaaggagagaatggaatcagggctaacttcgactccggttttcaaagcttatgttggtgtggttgtcactggtagagaaatgtggaaagttggcctt

SEQ ID NO: 8784 - DNA, 122 bp, Homo sapiens
tggccaccgttaattttaatattgggtgtccttttgtcaaaggaaatttggggatctatacgtggctcttcccagagaaacctctttactgtggccctgaagatcctcttcaattccttcaa

SEQ ID NO: 8785 - DNA, 122 bp, Homo sapiens
gttgctcatgtctgtaatcccagaactttgggaggctgaggcgggaggatcacttgagcccgggggttcaagaccagcctgggccatatagtgcaaccccatctctgaaaaaaaatttaaaa

SEQ ID NO: 8786 - DNA, 122 bp, Homo sapiens
gattgccaaaactagggagcaaccaagatgtccttcagtaagtaaatggacaaataaacccgggtatatccagataatagaatagtcaagtgcaaaagaaaaaaaaaagctgtcaaaccgtg

SEQ ID NO: 8787 - DNA, 122 bp, Homo sapiens
cagcggggaggcatccagaaacagcccaaggtccaacataataacctgcatgtgcctccacgcacatgggatggccctttaaaagggagggcctggctgtgggaagccagagacagctgggc

SEQ ID NO: 8788 - DNA, 122 bp, Homo sapiens
cgccccacgtgaggacattctcctgtgtgtgaagctgctttcctttcctcgaaggtgggccgagcaaaggagagtgacgcaagagtgggctgtgtcctggatgctgcgagcgcctctgcctc

SEQ ID NO: 8789 - DNA, 122 bp, Homo sapiens
tccatgtgtcagcagcaaatggaagccttggtctgtctgtagaagtttgctctcctgtgccgtgcaggcaggaaacttgccctggtcctccgcagggaaaggatgtaatccactcgatgctt

SEQ ID NO: 8790 - DNA, 122 bp, Homo sapiens
gccctttcattcctatggatgtcccccacaccacccagccaccatttagaggcataagaacggggtccaagctaaaggtcaggtggttcccccacccccagtctcaaggagtccatgggaat

SEQ ID NO: 8791 - DNA, 122 bp, Homo sapiens
caagatgtgatataaagcgatgccaatgcgcagctatgtggttactggtgagcagacctccgggaagcacaggacacaccccacttacccaacagacgttctcatcccatatgcctttgtcc

SEQ ID NO: 8792 - DNA, 122 bp, Homo sapiens
cactgtctagaggggactggaccccagaggcatctccccagcccttcatggaaaagtgaccggcaccagtacctccatttccaagataagagtttgtgtccctggtcctagaggttccaggc

SEQ ID NO: 8793 - DNA, 122 bp, Homo sapiens
tgtgtatgcattggcgtcacggtcagttcctggcctgctgagggaagctgcgtggggctgcgggcggaaggttccctgccccaagcccgtgagagggaggacgggaagggcctcggccgggc

SEQ ID NO: 8794 - DNA, 122 bp, Homo sapiens
gagggaagctattttttgctccctacacccagcagacagatacccagggatgtgggcaaccgtgagaggtagagatgggctttgagggcaaggggtgtgggtgcggatggggaagggcatta

SEQ ID NO: 8795 - DNA, 122 bp, Homo sapiens
tgattactctgaagtctcagacctgtggtctctcctgtcttctcaagtggcctgccaccacggttgtccttagctatcccatcccatcccatcccatcccatcccatcccatcccatcccag

SEQ ID NO: 8796 - DNA, 122 bp, Homo sapiens
atgcattgctggtagacctcgtcctcagcacccaggcagccctggtcaggctttgtccaacgtgaaccgtttgctgccgcagaggtgccgaacgtcaggcttagcaagactcgaaatgaagt

SEQ ID NO: 8797 - DNA, 122 bp, Homo sapiens
attcttgtacatttcaagttatgggtctcatatacttgtagtgcctgcatgacgtcatagcgaaggggcagagggcggcaagcttgaattttacagctgtgcccagatgtcctttgttgggg

SEQ ID NO: 8798 - DNA, 122 bp, Homo sapiens
ttggtcagcacgctttttgtcatggccacatgcttgtgatttccagggagaatttgttaacgagtacgttggggagctgatcgacgaggaggagtgcatggcgagaatcaagcacgcacacg

SEQ ID NO: 8799 - DNA, 122 bp, Homo sapiens
ctgggggtggaacggagggcgcaacacgagtgtgggtgggctgtggagggctcctgcccgcgtccccctcagtgtcctgagcaccaacctcctgaagaaatcgcttgaggacactcgagacg

SEQ ID NO: 8800 - DNA, 122 bp, Homo sapiens
tttgttttgttttaggatctgtacgctaataattgatcctaaagaggcaggcagacaccccgacagcgacacctcgtctctcttctgggcgtccggctgagcttgcctcactgcagaagcaa

SEQ ID NO: 8801 - DNA, 122 bp, Homo sapiens
cccaggaatatgagctgacagggccacaggacctgcttggaagaggtcctgaccaggaaccgaatcatgccactagaacctctttaataaaatgaaagaaaactaaggccttgaaataggaa

SEQ ID NO: 8802 - DNA, 122 bp, Homo sapiens
cgcggggcgctggcagcgaggggagcccgggctcggagcacggaaagggccgggcggcggcgggtcttcgctagcgttccgctgcagcagcccccaccccccacaacccccaccccggctcg

SEQ ID NO: 8803 - DNA, 122 bp, Homo sapiens
ttcgggagctttgagctttccaggtttgagtttccggactttgggaggtgacactcaggacgggggctgggaggtcgctaattttgaggaagcagcctctaaggaagaacatgaaactggcc

SEQ ID NO: 8804 - DNA, 122 bp, Homo sapiens
cccccgcccgggcaccgccccggccgaaaaattaggagcccgtccggcccgcagcccccccgtttggggaagttaggagcgtctctgcccgggagccaccccaatcctggaaggaaggtggg

SEQ ID NO: 8805 - DNA, 122 bp, Homo sapiens
ttgagatctgcgtgaagcctgagggttcggggatcattatctgagaaaaaccgggcagttcggtgtagacaatttttatatttttggctttttttgaggtgtaacaaacacaactcgggatc

SEQ ID NO: 8806 - DNA, 122 bp, Homo sapiens
tccagttgctggttgcactccaatctgagcactgactgcttttactctgctctataagagcgagtaaattcttcgctttacattaagctttggccaacaacattcacaagagtctaataaaa

SEQ ID NO: 8807 - DNA, 122 bp, Homo sapiens
caggtacccatttgccccgggctccctgggtgccctgggcccagcccagccccatgcccccgcctggcccacctggccattcttgcagaggtctgcccacatactggtgccgtcgccgccgc

SEQ ID NO: 8808 - DNA, 122 bp, Homo sapiens
ttgaatcacggcctggagttccgatgcttcgtggccactctcctctccatgtgtggacatcgctgtctgtggccccggccataccgatggcttcaggtgcctcaggctgcacttggggtcat

SEQ ID NO: 8809 - DNA, 122 bp, Homo sapiens
ccaccccttcccccttcccttgatggcctatccatttcagagcccattaggtgctccctccggctccttctctggaaaagacagagcctctcctgaatccttagacttaactagggatacca

SEQ ID NO: 8810 - DNA, 122 bp, Homo sapiens
tactccccagggcagtacgtgcctgtccagcgggagccctggagacaaaatgcctggaaacgttccttttcctgtggccctagagccggtgtccacggtgggggctctctcacggtttctga

SEQ ID NO: 8811 - DNA, 122 bp, Homo sapiens
ctttcaggcttcccatactcacccacccacctatgaagaccttcacaatcagaaaacatgcggctctgttctggacctctccaagcaagcactctgcaattctttgaagctctctacaattc

SEQ ID NO: 8812 - DNA, 122 bp, Homo sapiens
atggaatcaatatgaatcacagtagctcatgatccaggtaggagtggccagctttctactcgccaaccttccttcctttgagtccccaactttgagccctgagtcctgctgctgccagctcc

SEQ ID NO: 8813 - DNA, 122 bp, Homo sapiens
cccaaaatgttgtagcccatccccttctagttagactcgtcttcgccttgctcctgtggccggcaggcacagcctgttattcagggctgggagtgtaaccaggcaactcctaagtgtgaaga

SEQ ID NO: 8814 - DNA, 122 bp, Homo sapiens
tgggagggcctgcgtggatgccatgttcatagcgcttggtcccacagacacctggacacccgctgtcggagctgagtaaggacctggcacaggtcgactgcgcgaaagcctctgctcaccct

SEQ ID NO: 8815 - DNA, 122 bp, Homo sapiens
tggcccctagacacaggaggagacctggcctaggcagcactgccctctggtgttctggtccgggtaagacctgaatgaccaagggggaccgagggtgttgggagcgtgtgccggactcactg

SEQ ID NO: 8816 - DNA, 122 bp, Homo sapiens
cgtctttggatcgggggacccaggctgcagccttgcaggtctgaaggaagccgggaggggcgccgaggcccgcgtaggggaacagggccgccgccccctccgcttgcgccctggccgctggg

SEQ ID NO: 8817 - DNA, 122 bp, Homo sapiens
aggctgttcttctttatgctctatggacaccatgggaaatcccatgggcatgactggccacgagctctcatctgcctagcacaggctacacacctatacctatcccctgggactttcttgat

SEQ ID NO: 8818 - DNA, 122 bp, Homo sapiens
ccgcaggcaagtcagtccgtcatctcatctggggaaactgtttgcctttttctgatactacgtagccagtccatttaagtcagctggccaactctgttaaatggatatgaagtgggtacgaa

SEQ ID NO: 8819 - DNA, 122 bp, Homo sapiens
cctcacttttcgccagctggcgctggactcccccaagggctgcggcgtcgtccggctctccggtcctccaaagggccgaggggtgtacgccccggaaaccctgcaaaccctacatccgctcc

SEQ ID NO: 8820 - DNA, 122 bp, Homo sapiens
ccgggcttccctgactcggctacctgttctggaggtcaggctttgggcccttgcagaggtcgccgaggggcccgcgccgccgccagagcctgggcccagtccccagtcttcagagacgccct

SEQ ID NO: 8821 - DNA, 122 bp, Homo sapiens
tcctgggaatggcagcaattgggctgggcttgccaagctgattagtgtgaactggtcgaccgaggaagggagagcaggcctgatgtacagaagagcagatgcagagagacaggcaggactgt

SEQ ID NO: 8822 - DNA, 122 bp, Homo sapiens
gcagaagtttctaagacagttttctacataccattacctgatgcataaatgtctctcacccggacagagatgtcttattcaggagttcacctccacattgaacaactccagacacactgaat

SEQ ID NO: 8823 - DNA, 122 bp, Homo sapiens
gctttcccagggccgtccgcccgcggaccctcccagctccccagagcccagtgaccctcgcgcagcaggagaaccccagacggaccccaggccctgcagcctgtcatgaacccgaggggctg

SEQ ID NO: 8824 - DNA, 122 bp, Homo sapiens
ttccccggcccctcgccggccccctaggccacgcccccagcccctcaccgcctcagaccccgccccctggcgcgatgccccacccctggcctcagtagaaactcctccgccttcccccatcc

SEQ ID NO: 8825 - DNA, 122 bp, Homo sapiens
ggaggagttgcaggggggatcgtcagggggacagaggccgagtgacgtcctaggagccaccgggcaagaggcggaggagacccagagaggccagagagacagcgggccccagcgcgcggctc

SEQ ID NO: 8826 - DNA, 122 bp, Homo sapiens
tggggaggcccagtgccaggcttagttggcatgttggggcacagaccaaatgaagccaaccgcagggcagagggagatgcccagggcgctcacatttgaggcacacacttcattaacccttt

SEQ ID NO: 8827 - DNA, 122 bp, Homo sapiens
attgcttgaacccgggaggtggaggaagttgcagtgagctgagattgctccactgcactccggcctgggcaacagagcaagacactgttgcaaaaaaaattttaccctactgcctacttttt

SEQ ID NO: 8828 - DNA, 122 bp, Homo sapiens
gagaaataatgcaataggacactatttctttggcctaatataaaatgtttgactttctaccgaacctaagaaagagtgccagcaaaataatttcttcccatctaaaacctgatttgttttgg

SEQ ID NO: 8829 - DNA, 122 bp, Homo sapiens
tcatcccctgcggaaaccattcgtatctgaagtctttaacagatgaccgcactgagctgccgttgttctgttatggggggcaggatgttttcctcaataacaagtatgaccgcgcgatggtg

SEQ ID NO: 8830 - DNA, 122 bp, Homo sapiens
agagaatcataaacctttcccgtgaaggcatttattttcatcagtgtaaccaactactagcgttaaataacatataccatgctattaacaatggaataagtagaaggagctgaccatgggtg

SEQ ID NO: 8831 - DNA, 122 bp, Homo sapiens
ttattcaggtagccacaggaatagactcttttgacacatctgaaaagatatgtccatggccgcttctctgtgggaggaaagtaaagggctctacttttctcagagaggttatttatttttca

SEQ ID NO: 8832 - DNA, 122 bp, Homo sapiens
ttttattttatttttgagacgtagtctggctctgtagcccaggctgggagggcagtggcgcgatcttggctcactgcaacctctacctcctgggttcaagagattttcctgcctcagcctcc

SEQ ID NO: 8833 - DNA, 122 bp, Homo sapiens
ctcaggtcgacaatggtttatgcctgcagtactactgctgggcaaaggacatagaaaatgcgaaaaggagagggccaagaaaagcaacaggagatgcaggaggacaataaggaacgatggaa

SEQ ID NO: 8834 - DNA, 122 bp, Homo sapiens
tgcttcctgcggcttagattagaggcccttgtaagacctcctagaggaggcggtagtccccgtgaagtggctttggcggccctggtgagatgacagatttctctagggaggtggctctagtg

SEQ ID NO: 8835 - DNA, 122 bp, Homo sapiens
gaccaaccccgcccccccgccagctgtggaacctccttggaccaccgccgtgagcctcctcggaccacccccgccccgcagctgtgtgagcctcctctggacccgcaggcgccacgagagcc

SEQ ID NO: 8836 - DNA, 122 bp, Homo sapiens
ccatggaacgcagggccctcactggctctggggactgggtgacgtcaggggtgagcctctcgtgattggctccatcaccctgcgtaagatcaaagggaagaaaggagagccccgacagccgg

SEQ ID NO: 8837 - DNA, 122 bp, Homo sapiens
gctattcctctgttgtgatgcatgagatgtaaatcccccaaagactggttgccagagcgacgggctggaattgagctcagctaaacaaagtccttcagctttgaagggagaagcgcttgttt

SEQ ID NO: 8838 - DNA, 122 bp, Homo sapiens
gtggctccctttatccagggcttctgtgacctccatctttttcctctgcagccttcatcccgcgtggagtctacccccaagcccttctcctcttcccaattcttgtcaccttcgaggaggcc

SEQ ID NO: 8839 - DNA, 122 bp, Homo sapiens
ccacgtgtgcgcatggggcggccagcagaggctcaccgatgttctctgggttgaatgcggcgacgaccagcaggaggggccaggccttccagtagagggtagagatggcgaggttcggaggc

SEQ ID NO: 8840 - DNA, 122 bp, Homo sapiens
gggctggaggccgaagggaagcagtgaaggaaagagcgaacaccctccccgggcggcccgcgggcacgaggcctggtttctgtgaggcctggagcttgcaccctccgcctcccgcctggagg

SEQ ID NO: 8841 - DNA, 122 bp, Homo sapiens
tctcttgatttagaaggaacgactttagactcacaaaagaaactctattgatatcacgggcgcattagccgatttttcatccccactggtgatagaaatattttttaccccacacttccaag

SEQ ID NO: 8842 - DNA, 122 bp, Homo sapiens
atttggggtcaagcattccagggagaggagtcagcctgggcaaaaccaaggcagcgctctcggtaggcctgggcctctggctagtggtttccttcaacccacacactgcgcatggaaccaca

SEQ ID NO: 8843 - DNA, 122 bp, Homo sapiens
gccagtcccagagtttagggccaggggccccgcctacctgagggcactggcctggcggaccgcgccgggggagcacttccgctggacgcacgcacttccggccccctggaaccaatgagagt

SEQ ID NO: 8844 - DNA, 122 bp, Homo sapiens
aggcccaagttggggtagggacgcttgcagcccgggagggtttctctcaccaactctttccgcaacccggtccagacccggccagcagagactggaggcggcttccccgccccgcactccct

SEQ ID NO: 8845 - DNA, 122 bp, Homo sapiens
gtggagcacataggatttgtctgtttacttggtgttgctataaatagcatgcctcagtgacgtccctatttggaagagcattttatacagtgaacttccagtggaattatgtcatattcaca

SEQ ID NO: 8846 - DNA, 122 bp, Homo sapiens
tcactcagataaaactgaacacacctctttcagatcttcagtttttcacagggccaatgccgctttctgtgcagaaagtttggaatttttttaaatgcaaatatttctcttctctatttaac

SEQ ID NO: 8847 - DNA, 122 bp, Homo sapiens
aaaggcgctccgggagcggctggcagggcaattcggcaggctgcaccgaagccgagtgcccggagggacttgccgcccggaagggggtgtgtgggggcgctgccgtgaagatggatgaggga

SEQ ID NO: 8848 - DNA, 122 bp, Homo sapiens
accccttgggcggttacaaatttgggggcttgtctggcattgcctttgtggctacctactcgtggttcagtggcccccctccagcaatggatccagaagcctgcccaagcggccacccagtt

SEQ ID NO: 8849 - DNA, 122 bp, Homo sapiens
ggggtgccaggagcggggcctccagtgggagctcgggggtcctcgcgggttcttctgggtcggttggtggctacccatccccagaagcctggctgcattcccctataaggaggcttcggagg

SEQ ID NO: 8850 - DNA, 122 bp, Homo sapiens
tacgtgcgtgcgtgagtgcgtgagtgcgtgcgtgcgtgcgttcggcgcgcggggcgtgggcgcggcacctgggcccgggcaccgccacctaggccctagctccgaccagtggtgttctataa

SEQ ID NO: 8851 - DNA, 122 bp, Homo sapiens
gaattatagacagagagacaaatattggctctcctcttccctgtggaatattccctttctcgctctcctgaactcttcctaattctatttctgttctctttctaaattaaactggtggctgg

SEQ ID NO: 8852 - DNA, 122 bp, Homo sapiens
gggcacggggaccccactggccaatgaacgactcagctctgcaggaggggcgcggcgccacgccacctggaagtgaaagagaatgtccatcgcttttatcagattattttattttcagaagt

SEQ ID NO: 8853 - DNA, 122 bp, Homo sapiens
aggctgagggaggagaatcacttgaacccaggaggtggatgctgcggtgagccaagacggcgccattgcactccagcctgggcaacaagattgaaactctgtctcaaaaaaagactggacat

SEQ ID NO: 8854 - DNA, 122 bp, Homo sapiens
ggacggtaaaccacagacgtgagaaacggaactttgcgaaaacgcagtcgttttatgtaccggctactcattggagttacaccagagactcactactggagttcatcagccaatccaaagtc

SEQ ID NO: 8855 - DNA, 122 bp, Homo sapiens
ctgtaaaaaaactaacagtaaaattcctttcttgagtttagggcatttgttttgtggcctcgtctttgtaaggaaggagaaagagcattgttatgttattatacctgtattgaaactatcat

SEQ ID NO: 8856 - DNA, 122 bp, Homo sapiens
agtttaaagagttaaggtttgcaagtgattttccacttaaaattaaataaattacctaaccgcattcaagtcaacccccattacaacttcactggatttcattccttgctatgctcattaga

SEQ ID NO: 8857 - DNA, 122 bp, Homo sapiens
ctacatgatgaatgtgtcggccactgaccaggccccgcccttcaaccagggcttctgcagcgtctacatcactctgctcaacgagctggacgaggccgtgcagttctccaatgcctcatacg

SEQ ID NO: 8858 - DNA, 122 bp, Homo sapiens
ggaacgagccgggtagggggcagcagggccagatgcccaggagacctgggctgagagaggcgtggctgagggaggctctggtgggccactcacttccagcagtgctccagggagctgtgggg

SEQ ID NO: 8859 - DNA, 122 bp, Homo sapiens
gctctcgtctgatccctgctggggacggttgcccgggcaggatcctttacgatcccttctcggtttctccgtcgtcacagggaataaatctcgctcgaaactcactggaccgctcctagaaa

SEQ ID NO: 8860 - DNA, 122 bp, Homo sapiens
gcctttcatgagatgttttaccttggccatttcatccttgctaaatctgttttccactggcgcatggtcccacattcaagattaatttgtttccacctcttctctccaggcagtttcctctg

SEQ ID NO: 8861 - DNA, 122 bp, Homo sapiens
agcagcggactcctcccctggaaactcctccggggctgggggaggctttggcgcatgctccgtacctagggcaggtttttgctgcgggtagcagggctcctgtcacaccggctggcgggttg

SEQ ID NO: 8862 - DNA, 122 bp, Homo sapiens
gcagcgtactcctattgcgcaggccccatgcgtcgtctccgctgcaaaccagtaggtggccggcctagagcccccaagacccctcaggcgccgccatcttgcttatcgtatccgtatggtgg

SEQ ID NO: 8863 - DNA, 122 bp, Homo sapiens
gcggggtctgccctggctggtcctgagccgccctgacagctgtgtcccccaccctgcagccgtcctgtttgagccaagccgccacgccgcctacatccttctgacaggcccggcagactcag

SEQ ID NO: 8864 - DNA, 122 bp, Homo sapiens
taaacggagggctaacagttccacttcgtagagctcagacattttaagaagcgaggaggccgcgtcctggaagggtgagcaaaaagcgcgaggtttgcgcacgaagggaaaggcgaggcccg

SEQ ID NO: 8865 - DNA, 122 bp, Homo sapiens
tcccgcagggcaggggtcggggaagggcttgaggagggcgtggccagcctctgcagcccgcgtgcaccctggacacccctgcttcggggacctgcattgttggttcccaaccaccttctggg

SEQ ID NO: 8866 - DNA, 122 bp, Homo sapiens
attatgttaagtgaaataagccagacacaaaagactacatcctgtatgaatttatttatacggagttccagaacaggaaaaactggtgaaaaaagatcacaagagtgattttgagggtgggt

SEQ ID NO: 8867 - DNA, 122 bp, Homo sapiens
ctcctgtcaccccttcacagtttgccccctcctacttccagaacgtaggaagcaccatggcgtccccaggcatgggaggggggtttgcaggctctgcgaggatggaggtgggagcaggcctg

SEQ ID NO: 8868 - DNA, 122 bp, Homo sapiens
tcggccacgcccccaagcgcggggccttgtgggagttgtggtcctgggcggtcgcctaggcgccgcggcaggaaggcggagccgctgaacgagaggactcgggaactacaactgcgaaggcc

SEQ ID NO: 8869 - DNA, 122 bp, Homo sapiens
gtccacaaaagagcacggctgaccgataccaagcagagaacccagtagggtatgtgaccacgttcagatcaacagaacgcaaagcagaacggtccgagtactgcctcctacagccactttcc

SEQ ID NO: 8870 - DNA, 122 bp, Homo sapiens
caatagtgcacagcagagacgatctgccggaagaagtgccgggtctccctctcactgaggcgtcgccgctcactgatgtaatcgtacagctcccctttgctggcatattccatgatgatcac

SEQ ID NO: 8871 - DNA, 122 bp, Homo sapiens
attccctggcacatctatttatcaatagctggaaaaacgtactgaataacaagaatcagacgtgttgctaagcatcctgggaaagagatatgcaaaattagcatttcgtcatcagggcgtct

SEQ ID NO: 8872 - DNA, 122 bp, Homo sapiens
gcgctggcccctgtgagctcgtctttgcctgcttagacgagagctccggaggctcagctgcgcacggctgtgggcagggctttccatgcgctggtccaggtgtaccctgcctggcctgctgt

SEQ ID NO: 8873 - DNA, 122 bp, Homo sapiens
aagcagacgggatgccgtctcctggtgtagaccagacggcgggtgttttgggaaggtgtccggagctggtgacacccatgagtacacactcaggtcaagtttgtcgatatcgcagaggcctc

SEQ ID NO: 8874 - DNA, 122 bp, Homo sapiens
ctccctctctcccccaacaagcagggatccttgggaccggtatccccggaccgtggaccacgtgctctttacacgataagctcctggtgagcggtggatactgaaggcctctgggggaagcc

SEQ ID NO: 8875 - DNA, 122 bp, Homo sapiens
ccacgtccgcgcgctggagggcggaagtgggtgagacctcgggcactccataccgccccccggtttctggccacgccccctctggttacacccactcgctctgtaaggcacgccccctccgc

SEQ ID NO: 8876 - DNA, 122 bp, Homo sapiens
taaaaccaggctcagcaggccgaggatgccgtctagtatagaaaaggcctcaaaggagcccgactaaagtttggtcacggagggcgtctgtcccggcggagttggggtgggtgggtctaagt

SEQ ID NO: 8877 - DNA, 122 bp, Homo sapiens
tcagtgaagtcactttgcaatcagcacctgtgtgtctgtagctgcgggccctgaggccttcgtgtatgtagcacagggagccagcagagggagctgtcgtcccagaactttcttagagctgc

SEQ ID NO: 8878 - DNA, 122 bp, Homo sapiens
ggaatttccctggcccgggggctccgggctttccagccccaaccatgcataaaaggggttcgcggatctcggagagccacagagcccgggccgcaggcacctcctcgccagctcttccgctc

SEQ ID NO: 8879 - DNA, 122 bp, Homo sapiens
ttcaagggcttgaaagatgcaggaactgagcaagaaggtacctatgcaaagacgtaggagcgctagaattaagaaggcagagaaagacatgaaaccccctgcgcctgccagcatatactttc

SEQ ID NO: 8880 - DNA, 122 bp, Homo sapiens
ttatgggccctggttacggaagccgaggaaggctgagcgcgggctctcaaggaaagtagtcgcggaatctcagttagcggtggagaggcagtatgtccggttcaatggcgactgcggaagct

SEQ ID NO: 8881 - DNA, 122 bp, Homo sapiens
tttcagcaatgttttatagttttggttagatttatttctaagttattttattatttttgacgctatggtaaatggaattgtttactgtgatattgtgaaatatatatttgctctttgatctc

SEQ ID NO: 8882 - DNA, 122 bp, Homo sapiens
ctagggtggcttagacatcacaaagcaccactgctgaccactccctgggcttgtgggggacggatgacaggggtgtagaggaaaccaaatgctgttgttgtttcagcatcccctgaagatgc

SEQ ID NO: 8883 - DNA, 122 bp, Homo sapiens
agctccaggagcatgcgttgggatgtccggatgaccggggtttaaaggttttcctattctcgataaagcctgtgcgcactgtacggggagtgggggtgaagcgtgttctctacataggcaac

SEQ ID NO: 8884 - DNA, 122 bp, Homo sapiens
ctctgccagaccgtgaatgtgaccctcgagccagcgcagcgtcaatgtgggcaaggagggcgcctcacaggatgccggtgtcccacagaggatactcagggtcaccccagaggagatagggg

SEQ ID NO: 8885 - DNA, 122 bp, Homo sapiens
aggcgcttccctgccccctggtggccggaggagggatttgtcatgaggctccgctcagagcgaacgacagctgggggtgcattttctgggctatttgagccatggagctgggcccaaaacat

SEQ ID NO: 8886 - DNA, 122 bp, Homo sapiens
ggagcctccaggcaacactaagcagcacagagagaacagaacagacatggggcctgccaccgtggataacatactgtgtgccatatgaaaagtcattacagaggaagcactgaaaacctgga

SEQ ID NO: 8887 - DNA, 122 bp, Homo sapiens
atctttctgaacatagtgctcgatttctttctgtgggtaccttccagctgcctgtgctgccgccacttgatctagatgcggggagagaagccgacatccaggcctcgcaccatctgccttcc

SEQ ID NO: 8888 - DNA, 122 bp, Homo sapiens
ggaagacgggcagctccccactctcattccagttttgcttctgaggggctcaggaggggccgcagcctgtgcccagtcatcaacatcaacaatcttattagtgggcagaaagccaagaggtg

SEQ ID NO: 8889 - DNA, 122 bp, Homo sapiens
gggggctgcgggggagatgggcaggggagggtggggcgggggggggggggggcggggccgcgccctagtccagcccccacccccagtcccaggcgtcggcgtaggggttctgggggcggaga

SEQ ID NO: 8890 - DNA, 122 bp, Homo sapiens
aagcgttgttttccaacacactggcctgcgcgccctacgctttatgcagatgagggatggcgcaagcacaggcctgcgcgcagggctttaggcagatgagggatgacgcaggcacaggcctg

SEQ ID NO: 8891 - DNA, 122 bp, Homo sapiens
caagaagggttggggggagaaggatgtatatttggaatggtgtttgacagggagaatgaacgcagacaccagaacaattatattacaatcccattgggaatgccagcaccaaatttagccag

SEQ ID NO: 8892 - DNA, 122 bp, Homo sapiens
aagcagagaatgaactggaaaatgagggggattaaaagtgaaggcctccagtcgccacggcgacagcaaaaggctttgtgcccagctggaaaagacaggtgcaaaggccccggaccccgaga

SEQ ID NO: 8893 - DNA, 122 bp, Homo sapiens
ctgccttggcctccctaagtgccaggattacaggtgcgagccaccacactcagcctaaaacgccttaaataaaggacaataacattgattttaagcctttccccccaacctttttttttttt

SEQ ID NO: 8894 - DNA, 122 bp, Homo sapiens
cacctgtgctgcactgtgactttacagatattaacgaagaatcctcaaggatctgtgtttcggaggcaatctggtgaccagcagcattctcagcattcaaatgatgaccctcaaaataggca

SEQ ID NO: 8895 - DNA, 122 bp, Homo sapiens
gaaaggtatattagagctataaggagccttaaatgtattccagccctttcattttaccgacgactacattaagatccctagaagaaaaatgatttaccaaggttgtataacaacattagtga

SEQ ID NO: 8896 - DNA, 122 bp, Homo sapiens
ctcccaaagccctgggattacaggtgtgagccaccgtgcctgtctcacttttgatgccagcggccaggctgcttattataaaaccccaatgggactctacctggggactgaaactcacactc

SEQ ID NO: 8897 - DNA, 122 bp, Homo sapiens
agcacatagcaaggtaataatacatgactgattgccaaacacaggacacacccgaccaagcgaaaagagcacgtctggagaaggtctaagagtggggctggtgtagtgagtttgatcggatc

SEQ ID NO: 8898 - DNA, 122 bp, Homo sapiens
gaggtgagggccggggtggggtatgggggccaatggagggcctcagggcagcagcagaggcggtgccagggggctgtagcgctggcaagttctcatccggggtcgcccggtcccccgaaggc

SEQ ID NO: 8899 - DNA, 122 bp, Homo sapiens
ccgctcctgactttcttggagctctgagtcgggacgatgtgtgggtcgtggcctgcctgtcggtctcctctggccgggtatgggcagaaccccacggggtgagacggggcccacggaaaccg

SEQ ID NO: 8900 - DNA, 122 bp, Homo sapiens
tggcaaagagtaagcgctcaaggaagatctgtgaacttgatgcatgctaaaaggaagccccgcgctctgccggggccctggaactcaggccaccggctccaggcggaagcgagcccaaagcc

SEQ ID NO: 8901 - DNA, 122 bp, Homo sapiens
tgtttataggagttgcccccagaaagggagtcaggatctccaaaccctaacacattttaacgctgaggttcacataactcccagcgctccttccgcacgaaccgcccctgcacagggaacct

SEQ ID NO: 8902 - DNA, 122 bp, Homo sapiens
gggaaacctgttacactggaaaagttatggaaaaaacaagagggagaacgagagggcccccggctccgttccctggatggctcagggcctgagatctgacaccctgggagagcctgagactt

SEQ ID NO: 8903 - DNA, 122 bp, Homo sapiens
gagaagagtgctgcaatttggccagggtacgcatacctaggcctctgggcattcagactgcggcagactggcttggattcccagaccttcccccgtgtgacccagggagacatgcttactcc

SEQ ID NO: 8904 - DNA, 122 bp, Homo sapiens
ttgaatacagcagatgtggagcatctgggtaccctcacgatcagtggaagctggggaaggcggcatgtcaggggagaggcagtgaaaatgttgatcaaagccatgtatcttcatggcaactg

SEQ ID NO: 8905 - DNA, 122 bp, Homo sapiens
acttaaaagcaaatttccttcagaaatcaggttgtacatcttttgaataaatcctttggtcgcatatgctaaaatggtattaggttcataagtaagtgatggtatagtgaagcaactctacc

SEQ ID NO: 8906 - DNA, 122 bp, Homo sapiens
tctagcacactctcaggtcaccctgagtcctctcactcccatgaccgaacatgtggggcacgtgaggtcctgagtcttgaaccctgctctatggagcagagtttaatgagcgccactcatgg

SEQ ID NO: 8907 - DNA, 122 bp, Homo sapiens
acacctcctagagctttgtcctaactagcagggtcggagctgggaccctggctagcagaacgcaagagttctccttcacgaagacgcgcagagtagcttctccagcctgagaaatccggtcc

SEQ ID NO: 8908 - DNA, 122 bp, Homo sapiens
gaatatttgctgaattgaactgagatgtaaattctgcaggagaacttagaatagacctgtcgtactagagtggttcacagcgtggactctggagtcaaataatcaggatttgcatcctgatt

SEQ ID NO: 8909 - DNA, 122 bp, Homo sapiens
cgtttctccgcctgtgcctctgtaaccactactagaatatgaactcctcaacttcaaggtcggggccgacctacttgcatacccaggaatctaaggcatttagcgcacagccggagttcaat

SEQ ID NO: 8910 - DNA, 122 bp, Homo sapiens
agcgcttcagacagaacgaggagaccatgtgctccatcttggaggcaatgttgctgaccacgatcacctggaagtggctcagggcctgctggataaactcctcctcctggatctcgtacaag

SEQ ID NO: 8911 - DNA, 122 bp, Homo sapiens
tccagagagaccgttgggtcagagggttcctgtggacccctggggcgagcttaatgtccccgaaaactgcgtgctccagtatcacttgaatgcccaccgggttccggaatcacgagtctcca

SEQ ID NO: 8912 - DNA, 122 bp, Homo sapiens
actaaatctgtggtacttcaggaggggtgccgcagggctgtggatttaggagggggcaaccgataaactgtagaactgaagagtttggaatatttgcataggggagcacttgggctttggat

SEQ ID NO: 8913 - DNA, 122 bp, Homo sapiens
agcccgagcacccctgaggccagtaacccccctacggggccagggcccggcacgaggcgtcggctgacctgtatggtttgtctgttgtagacttttaccacgtggaagttaaaactgtagat

SEQ ID NO: 8914 - DNA, 122 bp, Homo sapiens
cgactcggtgcaggcaggagacgtgctgccgggctgggctgcccgggggagatgactcctcgccaggagggcgcctctgggaagaagaccacgggggaagcaaagtttcagggcagctgagg

SEQ ID NO: 8915 - DNA, 122 bp, Homo sapiens
aggctggggcatcagccccctttgtgaggtggcctcagtgacaggggtgctatgaggtggcggctatcctactgcagctggctgcatcagatgtgccaggcctgccctctagctcccaacac

SEQ ID NO: 8916 - DNA, 122 bp, Homo sapiens
gagtgtttttaaaaaatgacacaagaccctgggtgctgcatgtctaacataagcatctcgcgaccttcggagaaacttccccaaacacctccaacagcagacagttaaactttttgtttttt

SEQ ID NO: 8917 - DNA, 122 bp, Homo sapiens
agaggttacggagggagcgggaagccggcaagagggtgggcagaggagctgggggacaggcgggtgccacaggagcccccgaggagcttcatttgatgagaaggtgaagaggcagaggggac

SEQ ID NO: 8918 - DNA, 122 bp, Homo sapiens
taatccgtgtggcgtccccagatcagccacagccaccacaagtacgtggcgacttggccgcgggcacattcatgcagatgaaatgggaatttaacaacgtctcagggcgaatgcctgttgtc

SEQ ID NO: 8919 - DNA, 122 bp, Homo sapiens
gtgcccagcgctctgagagcccgcggagcgcagcaggcgcagctagccccgcgcacccagcgcggccctcacgtggccccgccccgcacccgcccctggccccgccccgcacccgcccctgg

SEQ ID NO: 8920 - DNA, 122 bp, Homo sapiens
tgacctcggggaagtggcattctgtgcctcagtttccttatctggaaaacgggccttgctcgcggggacttccctccctaattctgcgcagtatgcatgcatagggcaggccctcaatgaac

SEQ ID NO: 8921 - DNA, 122 bp, Homo sapiens
aaatttgaagagtaaaccaatatttaacaatagaaaaaaactgcaaaagcatctttacctcggtagccttggcagctgggacaaaaactaaaagctcaactcattaattatgccatgtctct

SEQ ID NO: 8922 - DNA, 122 bp, Homo sapiens
accaagtgatatctgatcatcccgtactgccttcaacaagaatcctcagggtcctttaagcgagaatctcgctacccttgatgtcttcctcttagtaatttcccatccactgactctccaac

SEQ ID NO: 8923 - DNA, 122 bp, Homo sapiens
aagtggatcagaactgtaagaaaaagagcaaacctcttctgattaaattataacaattcccgattatagaacaattcttaactgagaaccaggaaatgactgggaagactacaacatctaat

SEQ ID NO: 8924 - DNA, 122 bp, Homo sapiens
aggaccctgggagtatccatggcgggcaagtggctgcgtctccccaggaggcggtggcggcggcgcaggacgcgcggggcacggagcggctggacagcggccggggcccggctcctcgggcg

SEQ ID NO: 8925 - DNA, 122 bp, Homo sapiens
ggcagccagaacggcttcatgcaggtgccactgaggacagcccaggcagcccagcacaagcgattctgcaggtgaaacccaagcctggccccaggaggggatgagggctcagcacacaagca

SEQ ID NO: 8926 - DNA, 122 bp, Homo sapiens
tagaatgtcttgtttttaaagaggatttgctggatgtgtaatactcttaagaaatgctgccgatgcttaccgttttgtggaatatcattctctgggtttttctagatactgctttatttctc

SEQ ID NO: 8927 - DNA, 122 bp, Homo sapiens
tagggggctgcagggagcctggcagggagtgggaggaggtcaactcagagaggtcatagacggctgggtcacactgggccttaaaggccactgtaggggactttggcttttctctgagtgaa

SEQ ID NO: 8928 - DNA, 122 bp, Homo sapiens
gggcggcccctcacctgagggccaccttgagggccttgggcccgtggtacttggtgctgacggccagcgcgttctccaggaagcgcagcgacaggtcgtactccatcaccccgtgcagcacc

SEQ ID NO: 8929 - DNA, 122 bp, Homo sapiens
gaatgtcctgtcccttgaaactattctataagggctaggctctgcagcctgcaaagcacacgttcctatgtcagaaacctgagcagagcctgcttgtttgcagtggaggttccactgggggt

SEQ ID NO: 8930 - DNA, 122 bp, Homo sapiens
gtatgttaatgtgttcacagtgatagaacaggcactcttggtggaacagtgtaatctgcacgactgtcgcccagaagagaaggtgatgcccgaaggagaggtgggaaactcccaaggtgatt

SEQ ID NO: 8931 - DNA, 122 bp, Homo sapiens
aatggtttgtatgacaccaactatgagaagtcatttcagagcttgatagagaaaacacaccgctctactgtctgcgtggacatgggctgcatcccacaccctcacgtggctctctccctcac

SEQ ID NO: 8932 - DNA, 122 bp, Homo sapiens
gacaaggtaaggtcttgagtgttggggcaaagaccgaggtccctctcccgctacgctgctcggagtggtcacctggagaagagatatccttttctgggtagatcttcctaatttaactcatc

SEQ ID NO: 8933 - DNA, 122 bp, Homo sapiens
ccgactcaagctacgcctcgccatccaggagatggtctcgctcacctcgccctcagcccccgcctcctcccgcactgtgagtgtccggcggccaattccagccttcgcttcctcagagcccc

SEQ ID NO: 8934 - DNA, 122 bp, Homo sapiens
ctgatccatccatccaatgggttctttaagaaaatgcaacttagaagtcaaagcaaccaacgaaaagttcgctctcctttcccagcaaaaataaaaagaaagagaagattcaaagtagccat

SEQ ID NO: 8935 - DNA, 122 bp, Homo sapiens
ctggttgactcacctactggccacattggcagctttgggtctgctttttagggtattcctcgtataggcaaaaaagatgaacttgcccttgtgtgacgatatctcatttggcttctctctca

SEQ ID NO: 8936 - DNA, 122 bp, Homo sapiens
gcactggctctggcacaggtaccaggccccaaagcaggtgctgagtgccatcggagctgccgccactccatcccgcacgccctggggcctgtcccgggggcagaggggcaacgtccccaata

SEQ ID NO: 8937 - DNA, 122 bp, Homo sapiens
ggccgtccatgtcatggttggtccacagggtccctggacacagacactggagagctcccccggggcccacagcaggactttcaactggcaaacccaccagtgtcgtcattagaggaagagcc

SEQ ID NO: 8938 - DNA, 122 bp, Homo sapiens
aaatgacaataaaacaagccagaatgtcttttgtgctggagtgtctgctggcatttgccccgtgcatgtatagcttggtcttgatttgattggcacccctacttgtaaccgcagaacatccc

SEQ ID NO: 8939 - DNA, 122 bp, Homo sapiens
aaaataaagtttaaagaacacaagctgcttaggtgtctcaagtgcaaagaactactgacacggataatgttaacgactttcaactgcctctcatctaatagtatctgtgcaataaagtccaa

SEQ ID NO: 8940 - DNA, 122 bp, Homo sapiens
agcggctgcccgaggtccagaggaagtgtgtggacagcgcggccttcctggccggtgagtcggccccgggtcgtggccggtgaggggaccctgagcttcacctgggctagcgcggggagtga

SEQ ID NO: 8941 - DNA, 122 bp, Homo sapiens
aaggtgactgcttgcttgcatttaaatacaaaagaagtttctctccaggcttcctgaggccgatggtgaatgttcaaagatcaacgaagctaacatgaatctaaaatgaattataaggctga

SEQ ID NO: 8942 - DNA, 122 bp, Homo sapiens
gaccaagctctccaacgaggtgctcaacatgctcatgatgacagctgtgaacggcgtggccgtcacggagtacgacccccagcccgccatccagcactggtacctgacctcctcaggccggc

SEQ ID NO: 8943 - DNA, 122 bp, Homo sapiens
gaactcaagtgatcttcccacctaagcctcccaaagtgctgggattacaggcatgagccacgactcccagcctgaaatatagattttaatcttcagcttgcattttgttctaaacaacttgt

SEQ ID NO: 8944 - DNA, 122 bp, Homo sapiens
ccttccccagagcttgggagtcatgggtttccagctcaagccccttctctgtgggccccacgcttgctggctacccccaccccacctaccctgcgccacagcccccacaaaatgaattgacg

SEQ ID NO: 8945 - DNA, 122 bp, Homo sapiens
gggaagcgttttagatcctgtcggagaggctcaaggccggcagaaggtttgcattaggatcgagaaagccgaccaacggacagatctacctaccttcctgcgggagtttgaggttgccaggg

SEQ ID NO: 8946 - DNA, 122 bp, Homo sapiens
cgggacgtccttagctcctggtgtgtgtggggggggcggtgagcgggacgtccttagctccgggtgtgtggggggaagggggacgtccttagctcccggtgtgggggcgggggggagcggga

SEQ ID NO: 8947 - DNA, 122 bp, Homo sapiens
ggcttggatgaccgttcctgttgggcatagtttccttctggataaaacagtcgccaacctcgtttttgtggtttctgtctcttggtgagatctagggtaacgactgagatggggactgtggg

SEQ ID NO: 8948 - DNA, 122 bp, Homo sapiens
aacacgagaaactgataaaaagctttcctcatttttaaacaacagtcgcacggaagttcccggcgggacaagggaacgtgggtgcccttgctactcccgtggacgcgggtagattgggacgc

SEQ ID NO: 8949 - DNA, 122 bp, Homo sapiens
tgcctgggccagggtctctttcctttcgcgggcacagtgaggagactgcgaggtgaggtgcgtccgggtggatcccgggctgcggcgactgtcacattctccccggccagaccggaggtgga

SEQ ID NO: 8950 - DNA, 122 bp, Homo sapiens
ctctgttaactccctggatagtggtgctggctgaggtcttgcaggcaagaaaggcaaatacgtatctggagtatgtgtctattttgggagaacaaatctctgacccttccaggatggcaggg

SEQ ID NO: 8951 - DNA, 122 bp, Homo sapiens
ctctcggaatccagccaaccagccagagagggctgtaagccagacctttcctgggaaggacgctttccaatgtagggggctgcatccaagcgatctggacttcgtttgcgggcgccatttaa

SEQ ID NO: 8952 - DNA, 122 bp, Homo sapiens
gcgtgaagacaaggcaggcctcagcttctccatttccctcattgggagttgtgttgtttacgagtgactcacacttcagggtaaccaaatccctgttctagaagctacagcagaaacagcat

SEQ ID NO: 8953 - DNA, 122 bp, Homo sapiens
tttttggcccctggaccctgatgaatagaaaaacgctgcagtctgcaaacccactgcaatcgccgcgtcagctcagagccgagatgcttcccaaatgaacacctggatggtgtaaatcaccc

SEQ ID NO: 8954 - DNA, 122 bp, Homo sapiens
tttgtctgggctcccctgtgatttcctttcttcttgtgtttcttagtactcctgtaagatcgtcagggtatttgggccagactatgaaattaaagtcctttacgcttagttttcttcctttc

SEQ ID NO: 8955 - DNA, 122 bp, Homo sapiens
tcttccgaccttccgtcagacattttgtgcccgccacgtgctagcctatcgcccagctcgcgcctcaaaacttgagaggctttcttggcttgagaaggtgtttattccagacttttccattg

SEQ ID NO: 8956 - DNA, 122 bp, Homo sapiens
cctccccgccatacgaacctccccgcggaggcttcccggctgcctcactcccaccccctgcgggccaggcctcacagcaggggcaggtggaccatccaggccatgctaagccccgagcaggt

SEQ ID NO: 8957 - DNA, 122 bp, Homo sapiens
caaaccaggaatttcaggttcaaagagtaaagggtccccccgctccccaggccatagaaccggctagtgggaaggagcaggaacttgagctcaagtcttgtgattccagacactacctgttc

SEQ ID NO: 8958 - DNA, 122 bp, Homo sapiens
gcaaaactgacccaggtcacaggttagtgagggagactgagcctgtcttccacagtgtcacggaagtgagcactaaacaaatactcccaggcatggatcattacaaatggaggtgagtgctg

SEQ ID NO: 8959 - DNA, 122 bp, Homo sapiens
cttaagggttctccagcccttcacacactcacatgatttataaaaggacctagttatattcgggagggaggcatcagttgtgactgaattcactcaaggaggctggaggaaacttaagggag

SEQ ID NO: 8960 - DNA, 122 bp, Homo sapiens
ccggggccagcaccacctgaggggccaggacctcctgctccgccaggagccggtgtccggcggctgcagcctgggctgtgtccagcagcaccaggtggcgccctcgcacccacgcccccgac

SEQ ID NO: 8961 - DNA, 122 bp, Homo sapiens
tgggaatggagtcaagccagcgccaggccgcgatcccctgacctgcgaccgcgaaggagacggcgagcccaagagcgcccacacgtctcccgagaagaagaaggtgagcatggccgaggcca

SEQ ID NO: 8962 - DNA, 122 bp, Homo sapiens
aagtccttgggaaaagcactattttggtgggagtgtcctgtttttccaggtagtctgtcacggcttaccttagctaggaaagggaaatcccccaatctcttacacttcctgggtgaggcgat

SEQ ID NO: 8963 - DNA, 122 bp, Homo sapiens
atcccctggagagaacgagaggaggggccggcccgcccagcgaccccttccctgccagggcgctgaactggccctgacccagtgaacgccggcagaggcaaagcacctcctcgccgcccgct

SEQ ID NO: 8964 - DNA, 122 bp, Homo sapiens
ggcaaaccattcctggaaacgcgtgatcattcccagttttgccctgcgagcctacaaacccggtaaaagaataagagacctcccaggggaaaaggagaggggtaaagcgcaaagtcaatcag

SEQ ID NO: 8965 - DNA, 122 bp, Homo sapiens
taagaccttttgagcctaggcccaaaactagcacaaaagctgtcatattcgcagttgatacggtctggctgtgtccccagccaaatctcaacttgaattgtatctcccagaattcccgtgtg

SEQ ID NO: 8966 - DNA, 122 bp, Homo sapiens
ccaggaggttccactctccaaagggccgggatctagctcctagctgcatcccgagctgtccgcatgattccctccaggtccggcttccctcagactgcacatgctgagccccagtccggtcg

SEQ ID NO: 8967 - DNA, 122 bp, Homo sapiens
acccaaactccttctcagccttgaaaacttcctacaggtgcaaaccctcctagtatcacccgcaggctcctgtacctgaggaaaatgagctccccttctcaaattctgattttaggcagaag

SEQ ID NO: 8968 - DNA, 122 bp, Homo sapiens
gacctaagtccaatgactcgtatcattatagaagaaatcaaaggaagatctgagacacatcgacagccatgtggagacagaggcagagacagagctcactggagctatgctgccacaagcca

SEQ ID NO: 8969 - DNA, 122 bp, Homo sapiens
ccaacatggtgaaatcctttctctactaaaaatgcacaattagccaggcatggtggcgggcgcctgtaatcccagctattcggaaggccgaggcaggagaatggcttgaacccgggaggcgg

SEQ ID NO: 8970 - DNA, 122 bp, Homo sapiens
gcccggacgcagactggccccgggagcttcctggcagctccctggcagctctacaggaggcggctctcgctgtacccagccgacatgttgtagcgagaggccaggcgagcctcgatgcaggc

SEQ ID NO: 8971 - DNA, 122 bp, Homo sapiens
gatctctgttccgtgacctgcgcccagccccacgccgtcctgtgtggccctcgtgccctgcgctcacacttacacatcccggggaggctgccttgccgtttggataaggaggctgacacacg

SEQ ID NO: 8972 - DNA, 122 bp, Homo sapiens
ggcttttcttcagtgtaatgccttcagcctaagggcaagagaccatacaagaaatggtcacgggccaggcgcaatggctcatgcctgtaatcccagcactttgggaggctgaggcatttggg

SEQ ID NO: 8973 - DNA, 122 bp, Homo sapiens
tcgcatgttttggtaaggtttacaaatttgtgttaggctgcattcaaagctgttctaggccgcatgcaggcccacgggtgggacaagctcagtctatgctcttagctgctactctgtatact

SEQ ID NO: 8974 - DNA, 122 bp, Homo sapiens
ctgggcctgtgccagcgctcctgggtggtgctgcctcctctggggtggctcaccgggccccggcaccgtgccccttcagccctgtctgccctggaggtcaatgcccataccggaccctcttc

SEQ ID NO: 8975 - DNA, 122 bp, Homo sapiens
gatgactcccccgtggctcctgggacctgaacttcggtgacagcccagggctggggcctccgtccctgctgtgcgcccccagcctccatggcaccggtgcctgtcagcaaagggccatgcag

SEQ ID NO: 8976 - DNA, 122 bp, Homo sapiens
cctggccgtcaggtttcccctgggatcctgggacggtatcaggcggggaatctgtgcggccgcggcgaggtaggtgaggtgaggcggggcgaggtgggcgaggggggcgaggtgaggcgggg

SEQ ID NO: 8977 - DNA, 122 bp, Homo sapiens
tctgagccctgaagttgttcacgcactttcccacattcacgccctcactcctggcaatgccgacactccccactggttgcgcgccactcctctggcttcctgtgtcgatttcatttttgttt

SEQ ID NO: 8978 - DNA, 122 bp, Homo sapiens
ttctccgagttggcagggctctcagggacccctgagggcctggtggtccgctgcattcagcgcctggctgagatgtgtcgctcactgcggggggcagcccgcctggtaggagagcctgtgct

SEQ ID NO: 8979 - DNA, 122 bp, Homo sapiens
aacccatgtacctctttctggccatgttggcaaccattgacttggttctttcttctacaacgctgcccaaaatgcttgccatattctggttcagggatcaggagatcaacttctttgcctgt

SEQ ID NO: 8980 - DNA, 122 bp, Homo sapiens
cagagagaggagaaaagcacaccctgaaccaaagaaaacacagaagaaaggaattagggccgaatcgaacagtgacagacactggagaaaagcttcccaccgcagcagtcgtctgacggtac

SEQ ID NO: 8981 - DNA, 122 bp, Homo sapiens
accacaatctcagaggagcaagctggggcacccagcaatggtagatgcagaccagttccacgttgccaagctggcaagtctcactgcccaagagaaactacagctgtagcagctctccttct

SEQ ID NO: 8982 - DNA, 122 bp, Homo sapiens
ccgggaggcgctgcggaagggaatcctggacactgagcagggccgtgggccatcagtgttcgcgggagacactggctttcccgcgcctccggcagcagaggcttccctaacttttgcggagg

SEQ ID NO: 8983 - DNA, 122 bp, Homo sapiens
aggagaagtctctgctgtgagagggcacactggtgacaccctgactcccaggtcctctcccgcaggggctggctttgacctacagcctccgggacagggaacgtggtggtggtcgtgcacag

SEQ ID NO: 8984 - DNA, 122 bp, Homo sapiens
ccgccagtcccccgtgcaattccattctctggaaaagtggaatcagctggcattgcccagcgtgatttgtgaggctgagccccaacagtccaaagaagcaaatgggatgccacctccgcggg

SEQ ID NO: 8985 - DNA, 122 bp, Homo sapiens
tgatcataacctccatgagcccatgtactatttcttagctatgttggcagctacagacctcggagtgacattgaccacaatgcccacagtgctaggtgttctgtggttagatcacagggaga

SEQ ID NO: 8986 - DNA, 122 bp, Homo sapiens
cccctccaggcattcctttgtcttccaaataccaactgaggtgcaggcttattacccttacgttactactggcacaagtaaaacttcttcctgcatataccttaagacgggggtctccagtc

SEQ ID NO: 8987 - DNA, 122 bp, Homo sapiens
actcatccaagcactcatcgcctgagcgctcatccaaggtctgttggtttatttgtccatcggctccctctagaaggtgagccctgggacagcagaggccttctcctgtccaccactgcagc

SEQ ID NO: 8988 - DNA, 122 bp, Homo sapiens
tcccttccaggcctgaggaatgagcgtgaggcaccaggcacgccccgggctcctggtgcacgggatgccgtacgcatccccacagtggacggccgcccccgaggcacctcagggatgggggc

SEQ ID NO: 8989 - DNA, 122 bp, Homo sapiens
tgagaaaagccagaccctggctatgttccaatagcaccaatcctcccatctgtccctgagcgtggggacgatcgggcaggagaaccgtgagactcatcattgagtatttcattgaaccttct

SEQ ID NO: 8990 - DNA, 122 bp, Homo sapiens
ataatagttcatcagtttgttttaacttacagttgaactataaagaaggcttgaaaatgtcgtaagccctgccaagactatagagattcaaaatagggatactgcctttataagagatatgg

SEQ ID NO: 8991 - DNA, 122 bp, Homo sapiens
cccacagcccccagagccagggtcagctggctgctgtctttcccagagttgagctggggccgtggcttccccccagggctctgaacagcaagctctcttcccagatgatgatccaccccaga

SEQ ID NO: 8992 - DNA, 122 bp, Homo sapiens
cgctcctctgcagtgacctgcagacccccagaaagggtgctccttgaagcaccagggcctcggcctcatcagccaccaccacattcacttgggtgagggtgatggcactgcccacctggcct

SEQ ID NO: 8993 - DNA, 122 bp, Homo sapiens
ctggctcgccgagacactaaccccaggcctgtccgacaagccacatcccgtacccacatacgtcaaaagaagaacgtggaccaagagaggatggcagatcagactcactgagtcagcttata

SEQ ID NO: 8994 - DNA, 122 bp, Homo sapiens
cactagatccccacccacctatgactgttcagtcctgctctcctaccaacccacctttcccggcccaagtcagcgcaccccgccgactccctgcccagtccaaactccgaggctgggcaagg

SEQ ID NO: 8995 - DNA, 122 bp, Homo sapiens
aaagtcattctcccctctcccatccacctcacccgcggccacaatcctgagacttccccccgggaggcacacttctcgctgccctgctgctcccacggaaaccctgtcctgcttctcacact

SEQ ID NO: 8996 - DNA, 122 bp, Homo sapiens
atacaaaccacacaaatcaacaatgatgggaagggcacccctatgtgacactcaacctgtcggattggaatcctagccaggagagggagaggaaagaaccacggggctagctgaaatctatg

SEQ ID NO: 8997 - DNA, 122 bp, Homo sapiens
acagccagtgtaaaaattagcaatatttcacaaacccacaactcaagggacagtgctcttcgactggactctgccccatgcccaagatcaatgccctgttcagttcctattcgcagtcccca

SEQ ID NO: 8998 - DNA, 122 bp, Homo sapiens
cagaacccaggctccatcccatccctgtggagacgcacgctggggtcacctgcgtccggccgcctgcctgtgcttctggtccctggatgggcaggttccattggaatcacaggtgcccccag

SEQ ID NO: 8999 - DNA, 122 bp, Homo sapiens
gtccgggaggctgggggcacgtgtgtgcaggcatgcagacttgcacatgtgtgtgcgtgacgggggcgggtctcgcgccggtgtggccccggatggcaggatttagtcaaaccccgttttac

SEQ ID NO: 9000 - DNA, 122 bp, Homo sapiens
tgtttcctgggaacggttgtgtgtataacttaccaagcaaaaagcaaacatacattggcacgtaccctccaatttttagctgataagagggcatagatgataaagtgtggagaagggccatg

SEQ ID NO: 9001 - DNA, 122 bp, Homo sapiens
gagagggcctggctgggaagtgtggcactcagtgcccctccccgtcccacccccagccagcgggggccaactccaccctgtcaggaaatgcctggggcccaggatcccgagctgtgggcttg

SEQ ID NO: 9002 - DNA, 122 bp, Homo sapiens
cttcaacctgaccctcaaggagatccacttcctcaagtggctggacatctactgcccccacgtccccttcattttcaaaggcgacgatgacgtcttcgtcaaccccaccaacctgctagaat

SEQ ID NO: 9003 - DNA, 122 bp, Homo sapiens
aagcaaatttcagttcagtatatgaaaattcatttatttagtgaaaccctgacattaaagcgtcccaacacaaagcagattcgaacataacaactggtgattggctcatctcacaggctcac

SEQ ID NO: 9004 - DNA, 122 bp, Homo sapiens
tcacaaagcagcccgcggctcccgcaagcgctgagatagctggagccagggccccgcggccgcctcctggggcagaatggaacagcctgggcccagggctccggatccctctctctgccacc

SEQ ID NO: 9005 - DNA, 122 bp, Homo sapiens
gcgatccaggcttagggctgggcccaggtgcctttttccatctctctctagcacctagctcggtacttgttgatccaatgattaacaaggcttgaagtgctggcatcacaactcagcatgaa

SEQ ID NO: 9006 - DNA, 122 bp, Homo sapiens
tgcgtcagccacaggcagcaggtgtgctgtgaagacagcacgcctggcttaggtgatgggcgttgatttgctgtgctatttttgtgctcatcagcacatcgaattcctttctaacctttccc

SEQ ID NO: 9007 - DNA, 122 bp, Homo sapiens
cacgtgaccgagagcaggccttcaccagcccgcccctttcggccgctgctgcccacttcccgctcggggtaagtaaaccgccgttttccgcaccgccccaaccccgcccttctcctttcccc

SEQ ID NO: 9008 - DNA, 122 bp, Homo sapiens
gagccaggcgaggtgggggccgaggctgtgagcgggtgtggaatgcgtctgagtggatggcgggctgtgccctaatgagaaattggtgctgccaatcaggcatggcccactgagcagcagtc

SEQ ID NO: 9009 - DNA, 122 bp, Homo sapiens
aatcaggaaaacaaagagacatttctctgtgccaaagagcctgtcagccaataatatttgcgaagcttaccacgcagcttacggtgtcatgtgttatgaagtggaaatttctggacaggcta

SEQ ID NO: 9010 - DNA, 122 bp, Homo sapiens
gacacggaggctgagggggagtttccaaggggcctggcctcacgctctgcccgtcacagccgccacccctcaccggccctccacccacccctaactccttaacctctcccggcctcggtttc

SEQ ID NO: 9011 - DNA, 122 bp, Homo sapiens
cttcagatattttcttctgctccattctgtttctcctgttcttctcagatcctggtaacacgaacattagatattttggaattgtctcacaggtgcctgaagttctgttcagctccccccag

SEQ ID NO: 9012 - DNA, 122 bp, Homo sapiens
tgcactgacttagggtagcaggtctctgcgggctggggacgcaggggttcggcctggctgcgggaagcctccctggatcctgcctctagatgtaggcttttgtagcctgccgggaggcacgt

SEQ ID NO: 9013 - DNA, 122 bp, Homo sapiens
ggaagtcagcgtgtagccgctgagttgtctggatagagactgagggctgtgctccttttgcggacaaagggaagcagtgctaccttctgcagatggctctggtctggactcggggctatctg

SEQ ID NO: 9014 - DNA, 122 bp, Homo sapiens
cctccctctcgcgggtccagcctcggcggcccgggacgccggtaggcggggcctgagcctcgccccgcccccgctgcccgccattcgggtcacctgacccacccgcggctcacgtgatccgt

SEQ ID NO: 9015 - DNA, 122 bp, Homo sapiens
ccccgccggaatccagggcactgttccctcctatttggaaggccccagggccctttcatccgcgccgcgcctcgctcccgcccccgtgactcgaggcgcagcgtgcgtggtgatcccggccc

SEQ ID NO: 9016 - DNA, 122 bp, Homo sapiens
aggagcaatgggctacaccaaacagcctaggtgtgtagtaggctataccatctaagtctgcgtaaatgcattctatgatgttcaatgatgaaattgactacttcatgacacatttctcaaaa

SEQ ID NO: 9017 - DNA, 122 bp, Homo sapiens
agcgcccttaaggttacacagcacaaaaacctgggatcaactcagttttatagaccctctcgatttcttttctttttctatttctttttcttttttgagaaggagtcttgctctgtcgccca

SEQ ID NO: 9018 - DNA, 122 bp, Homo sapiens
ggccgggtcctcaagatgtggcatgaggaagggggtctcactgagcccccaagcggctcccgcactgcgcacccctggctgcgtccctctgccagcctcaactcagccctctcctagccggc

SEQ ID NO: 9019 - DNA, 122 bp, Homo sapiens
gccatggcggtgtggacgcgggccaccaaagcggggctggtggagctgctcctgagggagcgctgggtccgagtggtggccgagctgagcggggagagcctgagcctgacgggcgacgccgc

SEQ ID NO: 9020 - DNA, 122 bp, Homo sapiens
ttgcagccctcctccccgcccctccttttggataagcctcagcttcgtggcctggcatgccggagaaactggttctacacacccagggggaaaatgacagcttttcaccgcaagctgctcag

SEQ ID NO: 9021 - DNA, 122 bp, Homo sapiens
cctcttcaggtacatttctccttttccatgctgcactgcaccctggaattggcctgtatgcgctgcatcgagatgctcttgccctctgactgccagctgggtttggtccatgtggagcctgg

SEQ ID NO: 9022 - DNA, 122 bp, Homo sapiens
tgccctgcgtctaggagccaaggcaattttctaaatgtggcaagtggagaaattgagggacggagaggcttagatggcttcccagaggtcatgtaagtctttgccttacaaatagagcattc

SEQ ID NO: 9023 - DNA, 122 bp, Homo sapiens
gaactgggtggggccacaagcaacactcataagggttcccacctccaggaccttaaacctcgcaccactcaggctggccctcaggcaagtagaagaatgagttccacctgggcggagttcca

SEQ ID NO: 9024 - DNA, 122 bp, Homo sapiens
agctgttctcagtatcgcctctttttcatcctgtttcagtcctggttcctctgataagatcgacaaaagaaacaacaaaatgagaagaagaggttcctcgaaaggggggagaagaaattttg

SEQ ID NO: 9025 - DNA, 122 bp, Homo sapiens
ggtttggttattccttaatggagctgtctcagtccaccagaggcaaagccttgaaaggcacgtggccttaccatggctgtcactcttgaatgcataggctttgctagctaaacttagagtta

SEQ ID NO: 9026 - DNA, 122 bp, Homo sapiens
atgtcatgaaagggttttaagcagggaagagaaattatcaatttcattgttttcaaaagtcgctgtgcttgcagagagtgaccaagaagttgaaggagtcccatgagaagggatacagcctg

SEQ ID NO: 9027 - DNA, 122 bp, Homo sapiens
ataatcaagtttaatattggagtatattttcagaaatggtggtgtccaatgatgtctccacgcagctggactttttcttggatgctcttttggttgacattgaatccacagagatttctggc

SEQ ID NO: 9028 - DNA, 122 bp, Homo sapiens
cacagtgaaccggtgcgctgcctgaggtgcagcctagacgcttcctgcaaagtgttggctcggcacggtagaggcgcaggtaaaggccaagccccgaaacgtggctccgggacagtcacgtt

SEQ ID NO: 9029 - DNA, 122 bp, Homo sapiens
aacttcttgcttgggatctccaacctcaccgcggctcgaaatggaccccaactgctcctgcgccactggtaagggatgctaggtttctggtccttaggatacctatttccccgccacaggat

SEQ ID NO: 9030 - DNA, 122 bp, Homo sapiens
aaattctctatcttatttcacaccctgccacctaatgactttcagttcagcgtcaagttccgtctctgaacaattctaaaatagtatcgttgagtaaatcaaagaaacaaaaaactatgcaa

SEQ ID NO: 9031 - DNA, 122 bp, Homo sapiens
tcgtgccactgtgagcccgggacacaagggctgactccagctgttggctttgagtatccccgcccgcgcccgtccttgctcgctgaccccaggcgaggcgcaaacaacccacgacgccacgt

SEQ ID NO: 9032 - DNA, 122 bp, Homo sapiens
gcagagcagaggagccaggtgaaccctaccttacagaaatcttgtactctggctgaaggacgggcagggaggggtcgtgaggaagcccctcgccgggatcaggaagcctaggtcagtccggg

SEQ ID NO: 9033 - DNA, 122 bp, Homo sapiens
ttgggggcacatgtgatataggtagctttttgagggacaaagacgaatcatttgattattcgacaaatattgatggagcatctgctctatactgggcagagggccaggtgctgggcttacag

SEQ ID NO: 9034 - DNA, 122 bp, Homo sapiens
agacctctctggtttggtgaagttacggacggcatttggatgctggtcccgcaaggctggcgaggccacgtgttgactgcttttcttccagaacacaacctcactcttcctcctgctctgcc

SEQ ID NO: 9035 - DNA, 122 bp, Homo sapiens
cttcccttccagcgggctggacacaggtgcgtgggcctcgcagcccggcgcgcacggttgcgcctttggatacctgcgacaggactcggccagaaccgtgtcccagggcagagaaaaccctg

SEQ ID NO: 9036 - DNA, 122 bp, Homo sapiens
cccacgccgcgtcggcattgcttgttccctcttcctgcgctttcctggagggtagaattgcgtccgattggccttcagttcccgaggagctgcttccatttaggaccttgtgactctcatag

SEQ ID NO: 9037 - DNA, 122 bp, Homo sapiens
aaccccaggaagagcggcctcttcttacctgggtggcagccacgtgattagaaaacagcgcgcaccatgtgacagtagaagaaggaccacctgcgcctccagagccagccaatcccgaccct

SEQ ID NO: 9038 - DNA, 122 bp, Homo sapiens
ccatacttaccgagctttgtatagatgcatgcacttggaaaccagcaaagctaaaaataccgcctcctcatacctaatttacttattttctgtaggttccttattctaaatttatagctcag

SEQ ID NO: 9039 - DNA, 122 bp, Homo sapiens
cctctctgaagccgctggaagctggggcgcaaggccggaaggggttcgcagacgcacttccgccagcggccaggcagggcgcagaggagctagttagagctgggctggagctgccacccagc

SEQ ID NO: 9040 - DNA, 122 bp, Homo sapiens
agtaattttcatagaaatgtactaaagttttgtaaaaccctttggaaaggcttagcaaatcgttagtaactaggaatagggatccctgttctgtctttttggagtcaggttgtcacaacttg

SEQ ID NO: 9041 - DNA, 122 bp, Homo sapiens
ggttttgttattccagaattctgctaacctcctggctcttcctgtctctctgtgtgtatacgtgtggtgttgacaagtggtacacgcatacacacacatggacacacacagacattttaacc

SEQ ID NO: 9042 - DNA, 122 bp, Homo sapiens
ccactagaaaaccgggaactgagaccgaagccccctctaaacccctttctgagagccgtgcggggaaactcaggccggcgggctacctacccgtaactgcgtattgttgatttagcagtttc

SEQ ID NO: 9043 - DNA, 122 bp, Homo sapiens
tgcagaaggtcaagtactttgtagccaaagaggatccatcatcccaggaggaggcccacacgccagaggcacccccaccccagcctccttcctcagagaggtgcctgggagagatgaaatgt

SEQ ID NO: 9044 - DNA, 122 bp, Homo sapiens
cctaccagggccagtgggtcggtggcatgcgccagggctacggcgtccggcagagcgtcccgtatggcatggccgcggtcatccgctcacccctgaggacgtccatcaactccctgcgcagc

SEQ ID NO: 9045 - DNA, 122 bp, Homo sapiens
actccttggggaacgtgggcaacggggggattgtatctgaagctttattcaggtcttcggcggcagcagagtggagaaccaggcccttagtgtgtagcggcctggggattttgggactcatc

SEQ ID NO: 9046 - DNA, 122 bp, Homo sapiens
gctgtgtctgagagaggccctgcctggagtttctgtctgcactgggcactggaggctgtccgaaaagggtccgaaaggggctgagtggcactgcctaggacaggcaccagggtcatgatgaa

SEQ ID NO: 9047 - DNA, 122 bp, Homo sapiens
tagacctttgccaggtagcgctcaaaatccgctaagactactcccaccgaaactcggtagcgcagttgtctttccgcagctgcttcagccagccccagcaagcccgagcgcccggcgccgcc

SEQ ID NO: 9048 - DNA, 122 bp, Homo sapiens
gggtccaagtggacatactttcaggggaataccattgaaccactatagagcctaagtggtcgatgagtgagaagaaggagagatttttctcttgactaaattattttggagctatggggagg

SEQ ID NO: 9049 - DNA, 122 bp, Homo sapiens
tggcactcaaggtaaagcttggcaaggccgggccggggggcggaggccgaggccactccccgggttttagggcaactttggcccattggggacctctgagccactggaccacctctttgccc

SEQ ID NO: 9050 - DNA, 122 bp, Homo sapiens
atgcccctgggaaagttgctatcaaaggagcccgccagcttgacagattaatgttctcagcgagagagcaaagtcagaagtaaaacatagtttgccaggcaggctgtggagtatgacttgat

SEQ ID NO: 9051 - DNA, 122 bp, Homo sapiens
tcaggaagtgactgggagtgaaagagcagctaatggggtgcaatgaagaaaaggtcacttcgtgaaacaacaggtaacatttggtcaaagacagagagaagggattgttaagaggaaagtga

SEQ ID NO: 9052 - DNA, 122 bp, Homo sapiens
tcttatgtgacaggagatatagtggagatagatgcaatagcagatggctttacataacagcgaaggtcaaagattgtttttaatcttgtttaaatccctggaaaaaaaaggcagagagataa

SEQ ID NO: 9053 - DNA, 122 bp, Homo sapiens
ctggagagtaaaggaaagaaatgaagttgcactaaccttcagccgagttacaggcgttttcgaggaaattaaaggtggacagtgtcgtaattcaatgaaggacaaagtttccaagattttta

SEQ ID NO: 9054 - DNA, 122 bp, Homo sapiens
taggtgggcctataggacccgcaggatctgcaggacgctctccgagagctggagcaagagcgccaagggcggggacggaatgtgggtttaagggaaacgggcgaaagaggggtgggcatgga

SEQ ID NO: 9055 - DNA, 122 bp, Homo sapiens
caaggagacataattactaaataaaccttaataacattacgaagatattactctcaagaacgaattacttatgtctacagacaaatagaaacacatctcatgctcatgaattggaagaatga

SEQ ID NO: 9056 - DNA, 122 bp, Homo sapiens
taaggcgagagagagaaaattgaggtctctagggcaacctccatggaaaaaggctggctgcgcccaggccagcgcgcccccctcgcatgcaccccgtatcaattagttccggggcctcctga

SEQ ID NO: 9057 - DNA, 122 bp, Homo sapiens
cgagggagggagctctcgggcttgaatgtgcccaaggttcaacctctacggtaggaaatgcgcccaagtttcaacctctacggtgggaaatgcgcccaagtttcaacctctacggtgggaaa

SEQ ID NO: 9058 - DNA, 122 bp, Homo sapiens
aggctgagacagaaggacagggccacaggtgctggatcagaatccaggtgtcctcacccccgggggcagagcgagagccaggaggggggcccctcccccaggccaattagcagtggctccag

SEQ ID NO: 9059 - DNA, 122 bp, Homo sapiens
ctctgaactctctcaaatgctgcaggctgatgcctgccgtgggcttcccctgaccacccccgctcctgggaagccctttgcccacatatccacaggctgctccccatcctcagcctctgctc

SEQ ID NO: 9060 - DNA, 122 bp, Homo sapiens
tgtcgtccaaacacttccttttttccttcaaaggtcgccgctcctgcctcacctcacatccgtttgtggctgccgagtgcttcctgggaattgtagtttctaagtggaaccgcccctccccg

SEQ ID NO: 9061 - DNA, 122 bp, Homo sapiens
gccccatgttctcactggtccataggagataaacacggaggggcggggcgctctgggacacgtattcggaatcacagactgaggcctcggaagggtggaggtgggagcgggagaggaatgag

SEQ ID NO: 9062 - DNA, 122 bp, Homo sapiens
ttccacaatgcaaacatacatcaaaacttcacattgtacctaagaaatatatacaattaccgtcggttgaaattattttgaaagaggccagattaagctgctgcaagtagggatgcagagtg

SEQ ID NO: 9063 - DNA, 122 bp, Homo sapiens
gggatgtgcatctggccttgctgtctaagttccatcaagggagccttccgttctctgtagcgacaagaaacaaggcaagttatgatcacacctctcaagattgaagattgccctggtggaga

SEQ ID NO: 9064 - DNA, 122 bp, Homo sapiens
gggatcggccgagcgccaggcgcaggacacggtcctccaaggtcgcagttttggtgttagcggggtgagaggctctcctgcccagcctccaggcaaggctgagattccagaagaatgagaag

SEQ ID NO: 9065 - DNA, 122 bp, Homo sapiens
ggcgctgtcgggagagccctgggtccaagtccagccgcggatccgcggaggaaaacaatgcgaccgcccggggctctgggctcggccccagtggccccgcccgcctcccagccgggcccacc

SEQ ID NO: 9066 - DNA, 122 bp, Homo sapiens
cgcacttcagggtggaagctggaagctgagacacaggttaggtggcgcgaggctgccctgcgctccgctttgctttgggattaatttattctgcatctgctgagaggggcaccccagccata

SEQ ID NO: 9067 - DNA, 122 bp, Homo sapiens
agatagtgatttggccagcgtcacaggcccagtaaaagggattgaaaatccaggtccgtccgaccctaaagcagggaactctgcctagtgtctcgctgtggaatgttagggatcctggggta

SEQ ID NO: 9068 - DNA, 122 bp, Homo sapiens
agcaaaaccttctccacatatgtgctattctaactttattgagttgtaggtttgcaggtgcgaacctgaagatgctgatagattttcatcggtgctttttgccaacaattttggtatactgc

SEQ ID NO: 9069 - DNA, 122 bp, Homo sapiens
attttatttgcgacggggtcttgctctgtcacccacgctggtgtgcagtggcatgattcacgtcttactgcagcctcaagttcctgcattcaatccatcctcttgcctcagcctcctgagta

SEQ ID NO: 9070 - DNA, 122 bp, Homo sapiens
tcagcttccccgcttttttttctcccggtctccaggtcagcaggtccaaggctcttccggcgccccctccccgtgccggcagggccccctacctcctcggagccccgcccctccgcggccga

SEQ ID NO: 9071 - DNA, 122 bp, Homo sapiens
gtgaaggaaggggaaagaaatccttctcttataaacatgagggatgcagacagcctttttcggacagtttgatgtgttctgtaaagcatgccttctccccagcaaaatggaataggaaaact

SEQ ID NO: 9072 - DNA, 122 bp, Homo sapiens
gtgagatctagggcgggcccttgagagggcttcatgaatgttctccttgaccaatcccgtcgccgcatgcaaactcaagaccaagccccgcccacaagccttcagccagccccaggtcctac

SEQ ID NO: 9073 - DNA, 122 bp, Homo sapiens
tcgggaggcttccctccggtctcgtggccagaattgtctcctgctcgtgtgagtcggtggcgggccaggcgaatggagctaccggggctgccgctttggactgctcggcatttgccccatgg

SEQ ID NO: 9074 - DNA, 122 bp, Homo sapiens
aataagaggatttagaacaggactgcttttcccctatgatttaaaaattccaatgactttcgcccttgggagaaatttccaaggaaatctctctcgctcgctctctccgttttcctttgtga

SEQ ID NO: 9075 - DNA, 122 bp, Homo sapiens
aggctgggacaaaaggctacaggcacctcaccagcgcaggtcccaataatgcagcaccatcgcctcagcctctggtcagagttcgaatcccacctcgaggatgttggctcttggggccttat

SEQ ID NO: 9076 - DNA, 122 bp, Homo sapiens
tcttctaagctaacctgtggttgcagagggaactcccagtcaggccatggacaagatgttcgtcatcactgttatgtgagacttctgttgtgtccaaataagtttttgcatcacattccgtg

SEQ ID NO: 9077 - DNA, 122 bp, Homo sapiens
cgcggcggggggtgggaaaagagaagcagagggaggagttgttgctgccgccgccgcagccgcagctactgtgacttctccgattgtgtgagctttgttggagcctgcgtacgtggatttat

SEQ ID NO: 9078 - DNA, 122 bp, Homo sapiens
ggttttgattacatgaggaggaggcacggaggcaagctgactgcctgcgattacaggtcccgaagtccgggaggagggaggatttccaaacggcatgcctttgaaaattcacctgcgtttag

SEQ ID NO: 9079 - DNA, 122 bp, Homo sapiens
gaaggcttaaagaactgacaacaaaatattaacatttggcttgtggaattcttacactctcgtaagcagaaaaaacaaatgttatggcaaaaaagtgtctcagacaaatccgtcttgggggg

SEQ ID NO: 9080 - DNA, 122 bp, Homo sapiens
caccactgaaagaatggactgagtgaggtggtgaggactctcttctgttccgggtcatgtcgtcgtcgctggtcacgtcactgttgttgtcgtctaagaggacaccggtcgccaagttacta

SEQ ID NO: 9081 - DNA, 122 bp, Homo sapiens
gcgaaggccattccgctgcccttccagcttcggaatcacccaatgcacggcaagatgtgccggcaagatgtgcctctcaggttttccgaggctttggagcctgcacaattgttctacaaaag

SEQ ID NO: 9082 - DNA, 122 bp, Homo sapiens
taagctaccacatgggacctagtattggactgcttctatgcccaccttccctggcctctccggtagacacaggatctaacacagcacaaagaaatcaaatcactgccattgcagggattata

SEQ ID NO: 9083 - DNA, 122 bp, Homo sapiens
gggtcccgaggcgcgccgggcggggagggctggggagcggccgggagcgggcgccagtgccggcctagggggacccctgtctgtcttcccgaaggttgcaggaggatcctccagccggagtc

SEQ ID NO: 9084 - DNA, 122 bp, Homo sapiens
ttgctgcattgtcaaggagagggcatgagagactcatgggtctggtcagccctgccgaagcgcctccgtattaagaaaaagtaattgctggaagggagtcgcctcttttggtgagccatgag

SEQ ID NO: 9085 - DNA, 122 bp, Homo sapiens
acttagctagcccccagaatgtaatcagcttggccgctgcgctgccgtgaggtgtccttgcgacttatttgttttctttctgccttgcaaattactcctcttgcaaggttgtttgtttagtg

SEQ ID NO: 9086 - DNA, 122 bp, Homo sapiens
caagaatcccactagatgagggtcgatgctctgttcatctcttttttgttgttgttcttgcgtatctgatcttttaaaatgtttgatattctttttctttttttggggggggtggtgtcttg

SEQ ID NO: 9087 - DNA, 122 bp, Homo sapiens
aaagagcctttagatcgaccacttaaaaatatgccttaggcccgctccccgcggatgcggcgggccaactggatgtccttgggcatgatggtcacgcgcttggcatggatggcgcacaggtt

SEQ ID NO: 9088 - DNA, 122 bp, Homo sapiens
gagcagcttagaccgctgggctgcggaaagggcagcagaggcatcgttagccccggttaacggggaccaggggtgtaccaggcatcaactaaccagggctggtgactgagccgggagtgcga

SEQ ID NO: 9089 - DNA, 122 bp, Homo sapiens
ccccaaaccctaatgcaaagagcaataaaaaattagccagccagcagcacatcaggctgccgtattggctgccctcaaagtcgcaggttctgttcattaatttttgtatcatatttattcaa

SEQ ID NO: 9090 - DNA, 122 bp, Homo sapiens
gtagcactgtgttaccaagattctcttggtttcacccttggactttgagcacgtcacttccgtacatgtctgttgttcaggcccctcatgttggggcattagccttccagagtttgtcgcgt

SEQ ID NO: 9091 - DNA, 122 bp, Homo sapiens
ctctaaaccgcaaggacctagtcctctttgtcaattgcgaccttgcaaaaagctctcagtcgtctgttgggatggtggtgatgatggtaagtgcgatgctgagaagctttgcatctgagact

SEQ ID NO: 9092 - DNA, 122 bp, Homo sapiens
gaatgctaggctctcctggagaagcaaacgtcctcattttcaagccctacaactgcccagcgctgtcctctgacagggacacccaaacttcaatggtgggcacagcacccaccttgaactcc

SEQ ID NO: 9093 - DNA, 122 bp, Homo sapiens
tctttacctggtcttgtgtccccaagtgtgtaatgtgaggtaagacccagggtctgtgtccgggagtcctggcccaaggcgggcgcagtctccagccgccccacccctggctgggggctctg

SEQ ID NO: 9094 - DNA, 122 bp, Homo sapiens
ccgggggagcggttcgggggctccgggcagtagaccatgccctggagctcggggggcctccgggatgttcgccaataggggtcctccccagctccaagcgtcctgaagcgctggagttgcag

SEQ ID NO: 9095 - DNA, 122 bp, Homo sapiens
ccccccgaaaaaaaaacccactaactacaaagcaagaaatagcgactgaagaatgcctaacgaactcgtactaaaacaaaatactgattgtagatggacatacggagtcatagaactatctg

SEQ ID NO: 9096 - DNA, 122 bp, Homo sapiens
cagtgcaccctgggcgaaggggccaagaagccgtaagatgtgcgtcccgaggaaatgcaccgtggttataaatacagcaaagagtgtttggatgaagctggtgtctgaaagtggagacagtc

SEQ ID NO: 9097 - DNA, 122 bp, Homo sapiens
aacttaccatttaggtgctgaggacaaaagccagacctctgggtatagctgacttcaccacgtggcggccggcagtcatggccaacactaagcgaatgcacgtggttgtgctctggtaaaat

SEQ ID NO: 9098 - DNA, 122 bp, Homo sapiens
cccattaaagagatataaagagaacacattctgtgtttattatttatttaggactgcaaacgcattatccttggaagttaaataaatggataagacacttgctgtccatgaactcatagcta

SEQ ID NO: 9099 - DNA, 122 bp, Homo sapiens
ggcgggcgccgccgcgccaggcctgggctccggcccgctctcggccaggcctttccctcgcgcttgggtccccgaggcccccggcccctccccgccgcgccaccgcctcccggggtggggga

SEQ ID NO: 9100 - DNA, 122 bp, Homo sapiens
cgaaagaacccaagaacccgggcgcgcattggcgccggtcccgggctcaaggggcagcaacgaggagacgctggacctggccgttcctcgcacacatctctaaccttctgtgcctctcaagg

SEQ ID NO: 9101 - DNA, 122 bp, Homo sapiens
gggaggatggggaatgggtcctgggggagcagagcctcccaaattaaggcctcccaagagcgcggccggtcatccgcggcggcgaagggaaggtgccctgtcggtgcgtccggaccccgcag

SEQ ID NO: 9102 - DNA, 122 bp, Homo sapiens
cctcagaggaggaagccaggcccaggagcctctacatccttgttagggccaacagggaaacgaaaaaaacacgtgggggctccctccaccctcttaccagccaccccttctccatccactct

SEQ ID NO: 9103 - DNA, 122 bp, Homo sapiens
tgggcagcaacctgggccgcctataaagcggcagcgccgtggggtttgaagcgctggcggcggcggcaggtggcgcgggaggtcgcggcgcgccatggggctcccggcgctgctggccagtg

SEQ ID NO: 9104 - DNA, 122 bp, Homo sapiens
acgctatagcggaagtgaaggcgggttccgctaggggcaaaagctgaaaccggaggactccggccctgagcttccggaagggacatctggggaaggtgggggggtggaaacgcgacaggttc

SEQ ID NO: 9105 - DNA, 122 bp, Homo sapiens
gagggggaaaagccacagccgtgggtcccctgcgcatctagagccctccccctcccacctcgtcacatcccgctcctatgctccttgtgcccccacaaggatcctgggcatcaggctagctg

SEQ ID NO: 9106 - DNA, 122 bp, Homo sapiens
ctggcatctgagaaacctcgatgagcatagagcagatttagaagcctcatcagtcccatacggctggcctagaacagagaccggcgatgacctaatcccggccagagccgctcatgttgccg

SEQ ID NO: 9107 - DNA, 122 bp, Homo sapiens
tctcctgacctctccagtgaattctgtggccccctgtgtccacgaatgtggtggagaaggcgggacctggggcagttcctctgcttcccccgcagggcccaccacgcctgcccagcggacca

SEQ ID NO: 9108 - DNA, 122 bp, Homo sapiens
tgccataactgtcacgcaatccattagggcccctgagtaaaggcagccattaatcaggcacgagatcagccccatagcctcacatgcgtgcggctctgaggggccctgacctgacatcattt

SEQ ID NO: 9109 - DNA, 122 bp, Homo sapiens
taggagcaactcccttcgtgcgcctagactagaggagctggggccaggccgcccacagagcgctttaacagagcgcttcaagggcccacaaggccggcaacgcaaaccctttcaagctggct

SEQ ID NO: 9110 - DNA, 122 bp, Homo sapiens
gatcgagaggaagcaagggctcatcaacttcctcaacaagcagctggagcggatggtctccgagctgggggtgaggtcccaggcagggagacgtggtccccggctgactgtggtgcctggtg

SEQ ID NO: 9111 - DNA, 122 bp, Homo sapiens
cccctttcgctaaggccgacgggatacgtagttctaaagcggtggaaagtcgcagagctccgcctcttagaaaccacatatcccaggaggcaatgcgcaggggagcacgggtaagagggcag

SEQ ID NO: 9112 - DNA, 122 bp, Homo sapiens
gtctctccccatgaggtccattgttttaatttttggctgccacaaataagtgagaacatgcgaagtttgtctctctgggcctggggcttatttcacttcacatgatgacctccagttctttg

SEQ ID NO: 9113 - DNA, 122 bp, Homo sapiens
gcgtgtatgcacccttcagaattcaaacagtgaggcacagggaagtccctctgcccgatccgccccacgccccggttccttgtgtgttcttctagatatttaccagcgcttacattcacatt

SEQ ID NO: 9114 - DNA, 122 bp, Homo sapiens
gctgggctcccgggagcctgttgctggtggagaacagggggcgcctggccaagggaccagcggcttgctgagactcaacatgacactcctggggtctgagcattccttgctgattaggagca

SEQ ID NO: 9115 - DNA, 122 bp, Homo sapiens
ctggtcatctgagaatgaacagtcaatcaatacagacttactggctcaggagtacctgaccgttgaacatggagatctgtgtaaggaattgcgtcctttgaagcaggcatttgaatccctgt

SEQ ID NO: 9116 - DNA, 122 bp, Homo sapiens
tccgcagaggccggcgcttcagcctggcaggtatggtctagccagctggcctggcagggtcgtaagaacagtgtccgtgggcctccaagatcccgggccatgatttatttgcacagtaggac

SEQ ID NO: 9117 - DNA, 122 bp, Homo sapiens
agctgtctcacaaatatgtgccctggcaaaaacagccgggcaatgagtctggcagatcaacgtacggtcatttatactagtagacagcattgcaaacttgtttatgaagtgtcactgatctc

SEQ ID NO: 9118 - DNA, 122 bp, Homo sapiens
gggtcgggaggagaggagcattgtccgaggcccccgggggaggccagggaaacctcagtccggcaggtccccgggttcccggcccccagggccttcttctcaacccacccccggcccctcca

SEQ ID NO: 9119 - DNA, 122 bp, Homo sapiens
ttcccagtttcctcagcttctttgcaatggaaatctgaaatccaaccttggggcaggaggcgcggagccggtggctctcccgggttccacaccgcctgcaccgctggctagcgcctgacttc

SEQ ID NO: 9120 - DNA, 122 bp, Homo sapiens
gggtgaatggcttccggcttccgcacaccgagacccacctgagcagcagagaatggcttccggcttccgcacaccgagacccgcctgagcagcagagaatggcttccggcttccgcacaccg

SEQ ID NO: 9121 - DNA, 122 bp, Homo sapiens
gatgctgggggctgaaggatcccggcgacaccaagcgtcaggtcaggcgtcagaatccagcgcgtttgctcctcgagaacagcgcgccacctgctcccaagtgtgtgaggggctgcagtgcc

SEQ ID NO: 9122 - DNA, 122 bp, Homo sapiens
cattccacaaaggctgcctctcactgtggccgccgtgtcaccagccagagctgtcaggtacgtcagtcatgctgctttgtggtcatgtcactggcataatcccaagattaggtggccacaaa

SEQ ID NO: 9123 - DNA, 122 bp, Homo sapiens
tacctcccctatagactggaagcttcgttcgggccgtgggcttggctgtcctgctcaccacggtgtccatgacttgggctcagatgtttcacaagagtttgttgaatgaatgtggggaaagg

SEQ ID NO: 9124 - DNA, 122 bp, Homo sapiens
gttagtatttgctcatcacaggcctgggtttcccaggatctcagggagcctggaaactgacgcctccatttctgggtgggagcaccaaagcctaaggacacctttcctctctcttcactgct

SEQ ID NO: 9125 - DNA, 122 bp, Homo sapiens
aggaaaaaagtaattattgaatcaggctccagagcaagaatcaggtttcaggtaaggaaacggaagcacaagaaggaatggggacttgctccaggtcactcagttaatgacagacagatgtc

SEQ ID NO: 9126 - DNA, 122 bp, Homo sapiens
atggtctaagaaactgcaagagtgtgatacaagttttcctcaacagcgagctgggactggcgacaatttcttaactcacagcctccgcagtcgccttagtcgacaaagagagcagcccacgc

SEQ ID NO: 9127 - DNA, 122 bp, Homo sapiens
tgtacaaactttgggttggtgtgtaaggaagagccatgcatttcatccgttagtcaacatcgaactgcatagttgggtcaactggtatcatgaaaagaaattagtatagttaaagtatgagg

SEQ ID NO: 9128 - DNA, 122 bp, Homo sapiens
agtggcccgaggggcgcggaatgcagccgcgcccaccccgccccgcgtcaccgcgtcttccggaagctccacgcccctgggtacttggtttccccgcatggttccggaagagcgcggcgcag

SEQ ID NO: 9129 - DNA, 122 bp, Homo sapiens
aacgccgcggtgtctcggcgcctctgcgcgcgggaagatggcggaacaggctaccaagtccgtgctgtttgtgtgtctgggtaagagggcgccgacttactcatgttctgacgtcctctgga

SEQ ID NO: 9130 - DNA, 122 bp, Homo sapiens
ttattacactgagagcttaaggtttcagttttcttttggttaatggttctttagaaaagccgcacaattaggacctcacaaaatagctctacctgggtaaatgtaccaccttcctgcgagaa

SEQ ID NO: 9131 - DNA, 122 bp, Homo sapiens
cagagaggcgtcaaaggaatatagttgggtcgtaaattaattgtggttcctgcccttcctcgaggtggtggcagtccagcagaaaagaaatagccagcaagcaaacacctagaccttaattt

SEQ ID NO: 9132 - DNA, 122 bp, Homo sapiens
gtgctcagaagggtcctgggaacggccagccacaggcaaaggcagctggagctgctgtaccggcctctcctccccgcagcctgttcccgtgtccataccggcctctcctccccacagcccgt

SEQ ID NO: 9133 - DNA, 122 bp, Homo sapiens
acaggtattattatccccacatttacttttagattacattagaatcacacagtagcaagtcgagcctaatgctaactgaggtcttctgatctcttaagccccagtcactttcccttcgtttt

SEQ ID NO: 9134 - DNA, 122 bp, Homo sapiens
ctttcctaccccctgcgtgaggtttcggagcgcacctgaaattcccagcttttcctccctcgccttccttgggtcggggtgggaggcttggggcggcaaaagggtcaaaaggcacacaccgt

SEQ ID NO: 9135 - DNA, 122 bp, Homo sapiens
taactgctggacctgactgtgttacacaggatgctgctctggtgcagaagttttggccatcgtatgcttggggacagacctgggcaaaagcccacagaggaagttgccacaaacacatgatc

SEQ ID NO: 9136 - DNA, 122 bp, Homo sapiens
cttttcccagctaattttacaacctgagcccaaccgaaaatagctcccttttagctgatccgacccggatccttctcgggagccgaggctggcggggggtggggggcatctcggtgccagcc

SEQ ID NO: 9137 - DNA, 122 bp, Homo sapiens
tctaaaatgtcaggacttaggagagcttgttatacatttcctggtaacagtaaattagaccgctatgactaagcgctagtgacagctgcgtagctaaagcaaaaccaaagccatcttctgtt

SEQ ID NO: 9138 - DNA, 122 bp, Homo sapiens
cttcatgaatcttttcagtgcagcagtgaaagtagcattattcaacccaagacttaggaccgaaatgggagcgaatgatagtgacatcagtgtggaagaacttcgatgtttacactgaataa

SEQ ID NO: 9139 - DNA, 122 bp, Homo sapiens
ccttccggtccccttcctacaagctggactccctcagcccaggtcttgggtcccagaagacgggggcgggaacggggctggggggagcttctttagctctaacttctctccttgaacgtcct

SEQ ID NO: 9140 - DNA, 122 bp, Homo sapiens
gaccggctccaaccagctccatgctcacctcctaggcccacagccgcccacagccgccaacggggcaggcacaacaactggccctgaaaggtaaaaaccctcctggcacaggcccagcctcg

SEQ ID NO: 9141 - DNA, 122 bp, Homo sapiens
tccggattcatggtctttttggaggggttaggaacccctctgagaatctagcacaatctacgagcatgcagaaatgcctgtgtatattcacattccagtccatttcagaggctcactggatc

SEQ ID NO: 9142 - DNA, 122 bp, Homo sapiens
cgccaggccagcggtgcaccagaggtggagagcgcagcagcctggcgctccagctgttcgcgttagagcaattgcacaagagcaccgctcagctctggaccccctcgttgccccccacctcc

SEQ ID NO: 9143 - DNA, 122 bp, Homo sapiens
tagcaacataaagcagcagccctggctagttgaagatctggtatcaccgtgtgtgaaaagcgacagcagcaccttgtgcttgtgtggaaatttcacttcccttgaagaaggcaattggcttt

SEQ ID NO: 9144 - DNA, 122 bp, Homo sapiens
cgggcttcgggaggaaggcccgggtgtcttctcaaggtgaggagctactgatgtccctgccgggagctgagctggggccgtggctattgcgtttcctgagaatgggcaggagccaccggcag

SEQ ID NO: 9145 - DNA, 122 bp, Homo sapiens
tctttttccttctcttctctattaaggacaatggaattaattttatgagcttcctgtgtgcgctgaagagaaggaagtgtagaccatgttaaggtttccagtgaattttaaaagttactgaa

SEQ ID NO: 9146 - DNA, 122 bp, Homo sapiens
ggagtttgggccgccactgtaggaaaagtaacttcagctgcagccccaaagcgagtgagccgagccggagccatggagggccagagcgtggaggagctgctcgcaaaggcagagcaggacga

SEQ ID NO: 9147 - DNA, 122 bp, Homo sapiens
ctatatccctttatgacttctgggaaaaaaaagaaagaaaagaaagccctagtggcctaccgtgatcagtgatcaaatgatcaattgtgtttccatggagagcagaagccgagggagggtct

SEQ ID NO: 9148 - DNA, 122 bp, Homo sapiens
aaaaattgtaaatcaaccctaccccttctttttccccattctccttttctcaaaacatcgcgcgtttaccctatatggaaaaagtttgtgtctagcccaaccaggatcagcttagattgtgc

SEQ ID NO: 9149 - DNA, 122 bp, Homo sapiens
gttttatagggtttgtgatgcagaacatgtgcagttgacccagtcctagaaatgcttgagcgggtgatgaacaacctgcctcaaggctgccagcattaggacagcacttttatactcacagg

SEQ ID NO: 9150 - DNA, 122 bp, Homo sapiens
tttgtgcaggaacagagaggcagaagggctaaacagagagaaacctcatgcttgagaagccgtgctctgaaagaatgctaaataatgtcagcatgggatcctgagattgtgattcctgccat

SEQ ID NO: 9151 - DNA, 122 bp, Homo sapiens
taataattttaatgtgcttcataagctctcatggactttcacgtatcaattagtaaaagacgtaactaagtgatctggctttcagtctcctagttctctacagtgtaccctcagttttccac

SEQ ID NO: 9152 - DNA, 122 bp, Homo sapiens
ctttaccaaaaataaaaatttaaaaactagactggtatagtagtgaacatctgtagtccccgctactagggaggctaaggctggtggatcacttgagcccaggaggaaggggttgcagtgag

SEQ ID NO: 9153 - DNA, 122 bp, Homo sapiens
ggccacctgcggggccgggagggaagaggtgcagagtcacggggcttgcggggcgagcgccggagcaaagaactctcacagggctcaggggaacccacggaatactctctaggtgcgaggag

SEQ ID NO: 9154 - DNA, 122 bp, Homo sapiens
acctcgtgatccgcccgcctcggcctcccaaagtgctgggattacaggcgtgagccatcgcgcccggccaggagtctttttcattgctagctctggatttgcatttggatttggcactatgt

SEQ ID NO: 9155 - DNA, 122 bp, Homo sapiens
cctcctgcagcccgagcctctcactgagattaagaggggctctggggcaggcggaggcggcggcagcgcccagcgacggatgcggccaccactgcagggcctgccgccggtgtggagagccc

SEQ ID NO: 9156 - DNA, 122 bp, Homo sapiens
aacttggctgctggggcgttagagattttaacaactacatcccagttctgagacttccaacgtatgtactcaaggggaagtttcagcggtctagactacatctgaaataggcttctccatgc

SEQ ID NO: 9157 - DNA, 122 bp, Homo sapiens
cctaccagctgagcagtctgcttaccaagggtcacttctgcttgttccaaaactcttttacgccagttgttcttattgttatgattaaagtgcaaaccaagaaaacttaagtgtagaactcc

SEQ ID NO: 9158 - DNA, 122 bp, Homo sapiens
catgatccacccacctcggcctcccaaagtgttgggatgacaggcatgagccgccgcgcccggcctcccattatattttaaggagaaccttgtacagaacggctcttgggttatgtacatgt

SEQ ID NO: 9159 - DNA, 122 bp, Homo sapiens
ggggttctggcccaagttgtactcagcttttatagggttttttttggggggggggcccgccggccctgcatacagtcagtcctagagagatggatgaaaacaggaagcctctgccgctgcct

SEQ ID NO: 9160 - DNA, 122 bp, Homo sapiens
agctctgacttgctcggttctattctgagcagggagccccacctctggggagggggaatacgaacattctttcagcacagattcaacccaggcacatgcttgcccagccccatccctcacat

SEQ ID NO: 9161 - DNA, 122 bp, Homo sapiens
tcagtgcctggcggttcccgtgggacataccgtccactcgccacgcccctccgcccgcggcgcaccccacgcaccgtgccctggccgcccgcctcacgcaccgctttcctctccgtccagcg

SEQ ID NO: 9162 - DNA, 122 bp, Homo sapiens
agccaagaactacatcgcgctggatgactttgtggagatcactaagaagtacgccaagggcgtcatccccagcagcctgttcctgcaggacgacgaagatgatgacgagctggcggggaaga

SEQ ID NO: 9163 - DNA, 122 bp, Homo sapiens
ggggagccgggcctcgggctgcaggtgcaggcttgtggcggtgaggcgactggagcggcacgggagcccgcccgtttcggggagagcccggggcgatcgcggggggaggccggcctggcgtc

SEQ ID NO: 9164 - DNA, 122 bp, Homo sapiens
gccgccgcacacgccctgctccacgccgaggagagctcagcaggagagggcgactctcctcgggcttcgagcccaacactcccttgtcgccagctcatccccagcttgccccgatcccctat

SEQ ID NO: 9165 - DNA, 122 bp, Homo sapiens
attctcatctcttccggggcttaatgttctgtggctgttttctcttttgtctgccctccccggcaaatctctttggtgcctcatgatatatttcactgctgaattttctcaattaccaagtg

SEQ ID NO: 9166 - DNA, 122 bp, Homo sapiens
ctgcagccacgcgcccccggaaccggacctatagagccgggtaagtgccgccagtcggggcgctttcccggtgacccccaacatattccggccttctgggaaatgtagttccccgtcaccgc

SEQ ID NO: 9167 - DNA, 122 bp, Homo sapiens
ggactgtggccgtgggggacatcgtctggggtaagatccatggttttccttggtggccggcgcgtgttcttgacatcagtctcggccagaaggaggacggagagccgtcttggcgagaagcg

SEQ ID NO: 9168 - DNA, 122 bp, Homo sapiens
agctcctgagttcttgctaccggctccagcgactgtctgctttccttttctccttagcgccgccatcacgggggtcctccccgcaagacctgcagagagtgggatgttgcccccttccctgc

SEQ ID NO: 9169 - DNA, 122 bp, Homo sapiens
gagacgaatttctcaaccatgtgcccacaggaaacctgtagctcagtatggattcaggggcgcctcagacgctcgcaggaacggaggggagacccttgcagttctggaggaactctaaggcg

SEQ ID NO: 9170 - DNA, 122 bp, Homo sapiens
ggtcctctgagcttgaggacagctgggttctgggattggagcaccatgctctgcttccctcgacccccaaaaaatcgtggggagaagccatgatcctaaagtcacacctgcaagcctcctac

SEQ ID NO: 9171 - DNA, 122 bp, Homo sapiens
gggactctaagggtgaataggcatggccaaaggccccggcagaggacctgcccatgaccacggtcaccaatactgtctgttcactacaccgtggcctcatgggggagaatggattggcagct

SEQ ID NO: 9172 - DNA, 122 bp, Homo sapiens
gttaagtggaagcttaactggaagctccatgaaggtaggccttcctttctgataacctagcgtaagatcaataaatgtttattaaatgaggcactttacttcacaaaggatatggcatttta

SEQ ID NO: 9173 - DNA, 122 bp, Homo sapiens
tatttatgaagaggaacctatggaaggtgtcctggagagggtgctcattaattaatatcccgcctccgaaggcctgcactgctcaagaccctgccttccatgtcccttctttcccctccccc

SEQ ID NO: 9174 - DNA, 122 bp, Homo sapiens
attcatcatgtacatgctctgcggggaccttgcccgttcccctggggatcatctgctacccgacatggttctgtggccaacatcctcgtgctgtattctgattgacctgtgtgaggatttcg

SEQ ID NO: 9175 - DNA, 122 bp, Homo sapiens
cctggctgggaaccctgctcggccctggagaggggccccccgagccgaggggaggagcggcgcatgcccacaagccccccgcgggaagtaggaaatcgaccgaccaggcggtgcgcttcgga

SEQ ID NO: 9176 - DNA, 122 bp, Homo sapiens
gacgaacccacgggaaaagctgcggttctccaggagtctggttgttcctcgcagccgggacggaatgctcaagtctgtcaccacacagctgtcagccaagggaggtgcagagctggaggtgg

SEQ ID NO: 9177 - DNA, 122 bp, Homo sapiens
ctgcaatcttgactttcaaccacacagcaccagagtagccaaacattgcttgtgtccaaacgctggctgccttgaagggtgaaagaataagcagttcccaaactcagctgaccttaatgtcc

SEQ ID NO: 9178 - DNA, 122 bp, Homo sapiens
ccatcaccagaagtctccccccgtggaacgcagccaccatcagaaatctctggccaactccgggggctgggtccccatcaaaggtgagcctgggactccacatcccctctcccagccccagg

SEQ ID NO: 9179 - DNA, 122 bp, Homo sapiens
atttcaatgctttaaaatgtgttatccaccaaagcacataaacaactgagcactatcacacgcaggcattaccagtgagaccaccaccatgtcagtgtgtcattcattataatctgaaccgt

SEQ ID NO: 9180 - DNA, 122 bp, Homo sapiens
gtttgcgaacatacacacacccgcatgcatacacacacacgcagacacacacacacacaccggcccgcctcagctgccatggcaggtggggctgtgcagtcatccctggatgtgacagcccc

SEQ ID NO: 9181 - DNA, 122 bp, Homo sapiens
tctcgcgcggttcccgaagggtgcgaagactgcgctgagcattttgaaggcctcccaaagcggctggaagacaccccgaagcggcctcccaaccagaatgatctgaaaatcccccaggctgg

SEQ ID NO: 9182 - DNA, 122 bp, Homo sapiens
gggggaataggggagctacattagccaaggcactatgacttgttgcttctctttccatgacgtgcatgtccacgtgagggggtgatggtggtggtgacactatttcaggcatgtcacacagc

SEQ ID NO: 9183 - DNA, 122 bp, Homo sapiens
tgggggtcctggtcgattagagcatctgagaagctctggaaaaacctgtcaggaaaacaacgacttcagcagggcccactaaccaaggaaaggggtataaaataaatagcaaagggaaggaa

SEQ ID NO: 9184 - DNA, 122 bp, Homo sapiens
ctcaagtgatccacctgcctcagcctcccaaagtgctgggattacaggtgtgagccaccacgcccggctgagatgggtattattattatctttgcttacggataaggacattgaggcacagg

SEQ ID NO: 9185 - DNA, 122 bp, Homo sapiens
caaacaaacgaacaaacaaacaaacaaaaaagttctctattgtgattgtagtcgtggttacgttgattcaaagaaacaaagaacccggccgggtgcaaaggctcacacctgtaatcccagca

SEQ ID NO: 9186 - DNA, 122 bp, Homo sapiens
taagataacagtctcccaatatcctttttatgaactacatagcactttctccgctgttcccgccttgcagatgggtgttttaaaaagtgccaagggccacaaaaggaaactcccactgactc

SEQ ID NO: 9187 - DNA, 122 bp, Homo sapiens
tgtgaatgttgacatgaaagctttttcccttaatgttttaattaaatacctagaagccaacgcttcttctcagttagtgtcagaacactgcttcttggtggataaatgtttacaacacaagc

SEQ ID NO: 9188 - DNA, 122 bp, Homo sapiens
aagggcgggtagccgctgagtaggatatacaagatgacgcccaggctccacaggtcgcagcgcttgtcgtagatgctagcctcctcgctgaaggcctccactacctccggggccatgtactc

SEQ ID NO: 9189 - DNA, 122 bp, Homo sapiens
aggccgaaagttaaaccggaaccagaaaccttctgactgccctaggcctgttgtccctatcgccacggcagctgccacgccgctgtctcccaacacgtgaccagagtgggccgggccgccaa

SEQ ID NO: 9190 - DNA, 122 bp, Homo sapiens
ctctggccctcggtttcctcagctgctcagtgaggccctgcccactcctgtggcctgtgacgccgtctgactgccccacttttctcccgcaggtgcccatctgcggtgaccagccagaagcc

SEQ ID NO: 9191 - DNA, 122 bp, Homo sapiens
tgcgatgacttcccgtctgacgctatcgtttcctgctgtgtgtgagttctcagaaccccacgcggcctccggagcagatgacatccatgtgaagtgccctgcacgtcgtagtaactgtggag

SEQ ID NO: 9192 - DNA, 122 bp, Homo sapiens
gcgggggacagcgttccgaggcagttggtcctctccgggatgccgtaggcatcagctgaccggcccagcccacgtgactacaggggcacttgatgggaatcatggcagcatccaggccattg

SEQ ID NO: 9193 - DNA, 122 bp, Homo sapiens
gcttccgcctgggaacgggggcgggtgctctagcccggcgctgctccgctctgaacccaccgctaccaagtttctattcagcaagtggctcaggcaaacatctgagcagcgataaggccggg

SEQ ID NO: 9194 - DNA, 122 bp, Homo sapiens
aacgtagtgagacccccatctcgacaaaaaagtaaagaattagccgggcatggtggcacacgcactttggtggtcccagcactttgggagtggtcccagcactttgagaggatcccctgagg

SEQ ID NO: 9195 - DNA, 122 bp, Homo sapiens
ctgctgaggaccttcccttgggctaaaatggtccgtggaagatgtaagcagggctgctttcgacttcttaacgtcacaagtaacagaggttttttttcttctttttctgcctctcttggtgc

SEQ ID NO: 9196 - DNA, 122 bp, Homo sapiens
tgaggaccaccccagcagtggcagcgacgacggtgaccgagaaacatttgatggggtctgcggggcccctgaggacatcgagtgcaggtcggtcaaggatccccacctcagcttggagcagc

SEQ ID NO: 9197 - DNA, 122 bp, Homo sapiens
gaaaaggtttttattaggctgccctttgcataatggagtctaagatcccagggagagccccgatctgcccctgagcaagggaagtacattccctcatggttaagggacagcaatgtggatga

SEQ ID NO: 9198 - DNA, 122 bp, Homo sapiens
ttgaagtagacatgagggtggcaccaagggtgtctcccagacatcctcttgaatggttgccgtgacatcatttcctgaggtcggaaattgggagctaaacttcaatttgaattcaatttgaa

SEQ ID NO: 9199 - DNA, 122 bp, Homo sapiens
ccagaatcaccaatataataactctgcatttctgttcctttctagagaattcaacctaaacgctctgcttatgtaaaaatagtgcgaggtacaccctccaccaaggagtccctataactttc

SEQ ID NO: 9200 - DNA, 122 bp, Homo sapiens
gacggactgcgcaggttaactacagctcccagcatgcctgaggggcgggctcagcggctgcgcagactggcgcgcgcggacggtcatgggacttcagcatggcggtgtttgcagatttggac

SEQ ID NO: 9201 - DNA, 122 bp, Homo sapiens
gttcctagaagagggtgttccctctttcgggggtcctcaccagaagaggttcttgggggtcgcccttctgaggaggctgcggctaacagggcccaggtgagaggcagctatctatctcctgg

SEQ ID NO: 9202 - DNA, 122 bp, Homo sapiens
cctcacacccgtgctgctgtgcccccagcaccccggggatggctcctcagggatgggccgcgggaaggaatcgcaccgcgcggatcctcccgatctgggcccctcttgcacggaggcccctg

SEQ ID NO: 9203 - DNA, 122 bp, Homo sapiens
gactaggaaggggaagaagttaggtcggttttaggaaaaacaccaagatgttggggggcacgttggccttcagtcagtggaaagagtggcattatacatccaatggaagtaatacattggcc

SEQ ID NO: 9204 - DNA, 122 bp, Homo sapiens
agtagggtggacgcttcacataagcttctctggtcgaacttacccgaatctccagatggccgcgctgcgtcgaatgctccacttgccgagcctgatgatggggacgtgccgcccctttgcgg

SEQ ID NO: 9205 - DNA, 122 bp, Homo sapiens
cagccctggggtcgaggggcagcccctctgagcagctggtgtgtgtgcagggaagacccccggatccatcgacacctggccagggcggcgaagtggcagcatgatcgtcattacctccatcc

SEQ ID NO: 9206 - DNA, 122 bp, Homo sapiens
ctcagcacttctggcactggggcagtttcatgagctatgtgcactgtgtcctggtcctcacgaaggtgacaagcagcttcacttaccttgttcatacactctgcctgcggaaaccctggact

SEQ ID NO: 9207 - DNA, 122 bp, Homo sapiens
aacggcctgccacctgctacctcctgtgtaacagcggccgaaaccatagttcttcaccttcgtcttttctgtcacattatagaacagtgtcatgaggataccaatagtcaacagatttgggg

SEQ ID NO: 9208 - DNA, 122 bp, Homo sapiens
aagagataagctatggactgggacaaaatatgtacaaaccacacatacacaaaagcctagcgtctagaacacataaacaacgagaaggcgcagctcggagcagggctgggaggatgagcaaa

SEQ ID NO: 9209 - DNA, 122 bp, Homo sapiens
taaccctgaaatagaagttagcacctctcagcccccaggctgaattttatacatcatctccgaagttcgcttcctagtcgagacagggagcaacccgagtgcgctgggtgaatctgtccgac

SEQ ID NO: 9210 - DNA, 122 bp, Homo sapiens
gtggttctgaagggtgaaacagaggggagcctagaagtcccagcaatcaggtcagtctcacgcagcacgaaaaccacaagctgagactccaaccttgggagaaacccaaagttaagggtcaa

SEQ ID NO: 9211 - DNA, 122 bp, Homo sapiens
caccaaggccctggctcagtccgacgggggcggggctcacgtgcctttgcccttgtgctacgcagccccgtgtgtggaagccgccttgcgccaatgggcaccgacccgtgggctgagggaaa

SEQ ID NO: 9212 - DNA, 122 bp, Homo sapiens
gattgttcccagccacagccgctctgtggggacgactttatagcgcagcccggccagtaccgacagggaaaatggcatttgggaagggtgggaactgccagcatcactcatgcctaaagccg

SEQ ID NO: 9213 - DNA, 122 bp, Homo sapiens
gttgataagacaaaaaacagaatttattgttgattgcagtaatggagaacaacacttcgacggagcgttggcaccttcacagagcaaagtgtcaaggcaaggttggaactgattgagaactg

SEQ ID NO: 9214 - DNA, 122 bp, Homo sapiens
acaaggacggagattcttccggtggcggatagagtagggggtcccaggatctgtctggttcgaactcagctggtgactttgcagagatactcaatttccttgggcctcagtttccccttctg

SEQ ID NO: 9215 - DNA, 122 bp, Homo sapiens
gagcggggggcagggccggcaagggcagtcgtggctgagcgtgcccgcgcaacgtctcaccgcggtccgctcggtctcttttgcccatggcagctacagcagcagagagaagatgaccccgc

SEQ ID NO: 9216 - DNA, 122 bp, Homo sapiens
ttgggaggacccaatgaactggaaggtgtgcggcaggtgagcgtactgcacgggggacaccggggtccctggctgcggggtggcgtacgcggcaggcagcgtggtggccacggggacagacc

SEQ ID NO: 9217 - DNA, 122 bp, Homo sapiens
ggtgccctcacagcccgcacggtgcccgcacagcacacacagcacggtgcccacacagcccgcacagtgcccacacagcacacacagcacacatggtgcccacacagcccgcacggtgcctg

SEQ ID NO: 9218 - DNA, 122 bp, Homo sapiens
tacatcgctggagcagagcattggacgggaaactctcccactgtggcacgtggtggcagccgaggtctccaactgaggctgtcaagggaaggaagagctagctccccacccgcgcccgcttc

SEQ ID NO: 9219 - DNA, 122 bp, Homo sapiens
gcaaggtcagctgttggccaagaccagcatgcctagctgaccaactgtcagccaactgcccgtggccacagaacaggggctcaagagagagggatggtgtctcaggagctcagtgatacatc

SEQ ID NO: 9220 - DNA, 122 bp, Homo sapiens
tgcaattatttctatgcctggtttcctccagcatgcttttctgtcatctgactcactcagcgctagactaacagtgggattaacatgcagtgggtacagttgtttcctggttactttgtctt

SEQ ID NO: 9221 - DNA, 122 bp, Homo sapiens
aggcgccctgaggcgatggagtgtcccggttaattttgtggtagccctcgggaaaggctacgtgcctacaggtctcagctgtgcagcagcggcaccgctcctggacccctactgccttctgg

SEQ ID NO: 9222 - DNA, 122 bp, Homo sapiens
gtgtgtgtcttattgcgatgctttccaaacgatgatgctcccttcgtcatctcgcttctgcggccgagaccagaaagtggctttttgtttgtacacaaaaattttccaggcacggtggtgca

SEQ ID NO: 9223 - DNA, 122 bp, Homo sapiens
atataaattgtatttctgaatccaagtcacctgtgggggtgtagccagcattaaaataatcgccaggacccatgcaggcatctatctctgaatgaggcagtgcagcatagcagttaagagct

SEQ ID NO: 9224 - DNA, 122 bp, Homo sapiens
aacttgcatttcccctaccctcaccgccccctttccttcccaaggcaatagtgtaggggacgcccagtaagttacggaaaaggcggagacagaggtttcgttcccgcccctccaattcagtc

SEQ ID NO: 9225 - DNA, 122 bp, Homo sapiens
ccgcatccccatgcgcttctcggtgctggtgaggacgggcgagggcgcgggcgagggtgccggcgcgggcgggcccgggcgggggcgtccgtcgaccccgcggctgtgacccgcgctccctt

SEQ ID NO: 9226 - DNA, 122 bp, Homo sapiens
gcaggggctgagggccggttccaggcgggtggtcgcagaccctagaaatgtgtgagcccgcgtggactgtgcccctggcaggagagcgactgcagcggaggaccctctttctctaataggtt

SEQ ID NO: 9227 - DNA, 122 bp, Homo sapiens
ctcaccaggtcactggctggaacccctgggggccaccattgcgggaatcagcctttgaaacgatggccaacagcagctaataataaaccagtaatttgggatagacgagtagcaagagggca

SEQ ID NO: 9228 - DNA, 122 bp, Homo sapiens
gtcttggagtaatcgaatccacggtgaacagtgtgtttcgactaactgtattttttctcacgttttgctttagaaaatctgaatctaataaaaatgtgaacatctgctacaaggaatatcca

SEQ ID NO: 9229 - DNA, 122 bp, Homo sapiens
ggaacagtaaaccttcccatgtcacggagggagagccaggcccagagacggaaagtcgtgcgcccaaggtcacacagtcagacacagacaagaacccaaagctcccaaacccagcccagagg

SEQ ID NO: 9230 - DNA, 122 bp, Homo sapiens
ccgcggtcccttagacgcgccctccgcctggcccgtgtggaccgtcccggccattgtttacgggggaagcctgtcccgacgcattgttttggccatttccaacttcccccggcccttcccgg

SEQ ID NO: 9231 - DNA, 122 bp, Homo sapiens
cccacatctgtaaagcagagaagacagcagcacttgcccgatgcggccatctcgaaggctcgccacccgcgggaggcaccggaaacggaactgccaggacccttttctcaagatggcgccca

SEQ ID NO: 9232 - DNA, 122 bp, Homo sapiens
cagctaaaaactcagactgtgtcctcttggccatatctaaaaatatcacatcagtcctgtcgcaatcccacttctgacacctcttcaagataatgatttcagctctgcttttgtcctcctct

SEQ ID NO: 9233 - DNA, 122 bp, Homo sapiens
gtaagatacgggtgcaagttgtacctactcaggtttgttgtgagaatcaaatatgaacagcgatgaaacagtaggcactcaaggaatttagtttattttattatccttgacactctttactc

SEQ ID NO: 9234 - DNA, 122 bp, Homo sapiens
gctcggactgcggggtgctcagagtgcggggctgccgatcccacgcccaccgggaactcgcgctggccccaagcgccaagcacgtggccccggttcccgctggcgcctctccctccacacct

SEQ ID NO: 9235 - DNA, 122 bp, Homo sapiens
ggtctgcttaaaatgcgcgtttggattcaggagaaaccagcacccaggtggcgccgaggtcgacagacgctggaatctcatccctgaattctcaacgtttgcttccctcaaatagacttagt

SEQ ID NO: 9236 - DNA, 122 bp, Homo sapiens
ggagttctgtgtccccatggtcatggttcccgctactgtgtccaacaatgtgccgggttccgatttcagcatcggggcagacaccgccctgaacactatcaccgacgtaagtccgtgtgcgc

SEQ ID NO: 9237 - DNA, 122 bp, Homo sapiens
cagggctggggacctgcagcccgacatgcctgagtctcccccacccgccatgggctcctgcgcgaactgagcctcctggacgagtgtcgccccctgctccacggtgcccggtcccatcgacc

SEQ ID NO: 9238 - DNA, 122 bp, Homo sapiens
tagcaagttcctgcctctggcattttctggtcatgttgctccttcctgggatgtgcttcacgcagatgtgggcagggtttgcttcctgtggcctttgtcaaatgtcatctcactgataagtc

SEQ ID NO: 9239 - DNA, 122 bp, Homo sapiens
caatctgcacaccctgcgcgcgagccccgcccctccctacccgcgcagggtgtgctagcgcgctcagccctctccggccggcttagtctagttcccgggcctcgctcggttccagaactttc

SEQ ID NO: 9240 - DNA, 122 bp, Homo sapiens
cctgccgggtggagaggaaggccctgaggccctgagagccaggacaccggctcacagtcacgagctggcaagcaaggatgcccgacgggagcctcgacctgggctgcaggccctggggtccg

SEQ ID NO: 9241 - DNA, 122 bp, Homo sapiens
gctttggggaaaattagctatcatgttgtgaggacaccaagcaacttatagagatgtccacgtagcaaggaactgaggcctcctgtcaacagccatattagtgtatcatcttggaagtggat

SEQ ID NO: 9242 - DNA, 122 bp, Homo sapiens
ggagcaggctgaactcactgggctccgcctggcaagcttggggttgaagtttaataaaatcgtccattcgtctatgacgcgcgccatagagaccaccgatatcatcagccggcacctgccag

SEQ ID NO: 9243 - DNA, 122 bp, Homo sapiens
ctatggggatttcatcgaattcctgggcaaggcccgggagaccttcctgctggcgcccgacgggcacctccagttctcacagttcttggagaacctcaaacagacctacaagggcaagaaga

SEQ ID NO: 9244 - DNA, 122 bp, Homo sapiens
ccactctggtgggagatattgataatgggagaagttgtgctggtatgggaacaggggatacgggggaaatctctgtattgtcagcttaattttgctgtgaacctgaaagtgctctataaaaa

SEQ ID NO: 9245 - DNA, 122 bp, Homo sapiens
ccgcaccctcaccacagttccatttgtacatccaggaagcccagtttgaaaaacaaaccacgcctgtaaactgagttggatgaaaagagctgccttgggggtgggaggctaaggaactgttc

SEQ ID NO: 9246 - DNA, 122 bp, Homo sapiens
accacggccacccaaaggtcccgcatccgagcagggacaggaacacaatcacgcacctgtcgcagcctcctcgccgcgcacaccgccgccttgtcctggcatcaaacacacacgcacaggtg

SEQ ID NO: 9247 - DNA, 122 bp, Homo sapiens
gatccctgaatctcacctggactcagaccgagtggcacgccccctccccagcaccttccgcgctgttcacacacgccaggctcgtcctcctaaccctaagtcctgtgcacagagccctgtag

SEQ ID NO: 9248 - DNA, 122 bp, Homo sapiens
gcacgtctgggctgccaggtaggcacacgccgccctcgggccagaagctgcggatgtcggcgtcccggtagccttggttcttgccagactgttccagaatgatcgccttggcggcggtgtcc

SEQ ID NO: 9249 - DNA, 122 bp, Homo sapiens
ctgtttcctgattgctatagggagtaatatcaaggggctgtgacgcaatgttatggaagccgccattttgtacggaagccaaagtccaatcacttccatagcaagcaatcgaaagaagatgg

SEQ ID NO: 9250 - DNA, 122 bp, Homo sapiens
accctagctccagcctaataagtaacacattaactgggttttcctatttatctatcctctcgcattacttctctgagtcagagcctcttctctctaagtcacgggaactgcccttgctactt

SEQ ID NO: 9251 - DNA, 122 bp, Homo sapiens
cgaggactgagcgagcccgggcgggcccgtaggcgaggcgagatgaggctggccagggggcggggcgggcccgggcgggaggggcggggcggggcgggcccgggcgggaggggcggggcggg

SEQ ID NO: 9252 - DNA, 122 bp, Homo sapiens
cgggctgactctgcttgtgttcgtggccacgctgctgatcgtcctgctgctgatggtgtgcggtgagtgggggcggtagccgcgaggcagttccacacgccgggtcgctgatctgctggggt

SEQ ID NO: 9253 - DNA, 122 bp, Homo sapiens
tgagctcagcggcacaaactcacagcccagcagtgtttgcagaggggaaggcccagaatgcgtggaggcttcgggatccatcctttgcagacatagagaattctcatgggggagggaggacc

SEQ ID NO: 9254 - DNA, 122 bp, Homo sapiens
aaccagttgggctgcttccctctgacgcacttgcttctcatccggggagcggggagtctccgtcttcacaagtgggcaggcttcactgagcccagaggcccctggggcagaaggtgaggtgt

SEQ ID NO: 9255 - DNA, 122 bp, Homo sapiens
gcggcgggccgttggggagggtgttgggatgaggagccccaaccagatggacgcgcaccccgcagcggcggaggcggcggcgaggcttgagcagtgagtgctcgggagccccggccagccct

SEQ ID NO: 9256 - DNA, 122 bp, Homo sapiens
gggtggacctggggcctgacgtcgcagaccatgccaagaagctgggccaggacacgctctcggtttctctgctgggagctctgcatgccctgcacctggcgccttgtagcctgctccacctc

SEQ ID NO: 9257 - DNA, 122 bp, Homo sapiens
gcatcatgtcctctcctcttcttctgccatttcgacttctactctgattgcccatgaagccgaacaatcccccaccaaaaatgtgagagaaaatatcatccatgccaccacctccgccgctg

SEQ ID NO: 9258 - DNA, 122 bp, Homo sapiens
gctcgacgagtggggcgtggccggcagggtgggcggggcctgactttggagagcggctggcggagggggcgttaccggtggagagggagggagcgtggctggcaggggagtggctgcattgt

SEQ ID NO: 9259 - DNA, 122 bp, Homo sapiens
gccctcaggagccctccctggagtggggacaaaaaggcggggactgggccgagaagggtccggcctttccgaagcccgccaccactgcgtatctccacacagagcctgaaagtggtaaggtg

SEQ ID NO: 9260 - DNA, 122 bp, Homo sapiens
acgcaagcctgagagccggcctcctcgtcctgcagcacaagccccagggccacgcaggggcggctggcccgaggtcacactgaccctgacgtcaggacaagcactggggccaggcctctcgg

SEQ ID NO: 9261 - DNA, 122 bp, Homo sapiens
cccgcagtccccccaccctgcagataagatgactgacacaaagatgggggatctgctcctcgtccttccacttttactcatcaatgccttcatcaccattatacttgtttactgagcacttc

SEQ ID NO: 9262 - DNA, 122 bp, Homo sapiens
gacactggctactttgtaactctaacactgtcagcaattaattcccaaaggtgaggtccccgtgggaagtgggaaaacccagcgaatcaccagggacccgcctgattccgaaaaggctggat

SEQ ID NO: 9263 - DNA, 122 bp, Homo sapiens
tgtgcagtgtgggcgaggtcacgccagaccaaggtgtgcacagaggtcaggcactggccacgggagccaccccttcaatttacgtgttcagagttgcaaatggagcagaattttatttagaa

SEQ ID NO: 9264 - DNA, 122 bp, Homo sapiens
ggaaggagagggctggcaagagagccgcggcagccgtggcagggtgtaggggacggtggacggccagggcccccccctctctctctttctctctctctctcttgcttggtttctgtaatgag

SEQ ID NO: 9265 - DNA, 122 bp, Homo sapiens
atccacgccgcctgggaagaccggctctggaggctggagggcttgaccagcactgccacccggtggccggcagcggaactgaccacaggcctggtgccctggagggaatgggccacaaacgc

SEQ ID NO: 9266 - DNA, 122 bp, Homo sapiens
tagcaaagctgtgggtgtctgtgtgtatatgagggctccttaccacagccaccaccaccccgaccagggtgatgaggaagaagggccccaacacatagcccaccatggagtcgctgttggcc

SEQ ID NO: 9267 - DNA, 122 bp, Homo sapiens
aacagcagtgactaaagaagcatctgcattctggaggagtggcataattcatctcgggtgcgtttttttgtgtgtttttttttttttttttttttttttcaggccagcaattactcaggagt

SEQ ID NO: 9268 - DNA, 122 bp, Homo sapiens
gcccaaggccggagaggtggggccctgcctggggattctgggcactcaccgtgcagccatcgacagtgacgctgtaggtgaagcggctgttgccctcggcgcggatctcgatctcgttggag

SEQ ID NO: 9269 - DNA, 122 bp, Homo sapiens
aaggcaggggatggaggcaagtgggggtcgcgcctggagcggagcctcggcctccggagccgcagctgcaggtggagtgggcaaggggacgaggtggcgaggggacggtgggccctgggctg

SEQ ID NO: 9270 - DNA, 122 bp, Homo sapiens
agcatgcccctgtagcagcaatgtgagaatcagaaaaggtgactgtgcatctcaagaagccgaatcaaaaagccaagccaaccacctaaccagtgattttcaaggtatgaactggtaggcca

SEQ ID NO: 9271 - DNA, 122 bp, Homo sapiens
aagcgaactcaggaatacatcccagcctcccggtaagggccccagaggcaggtgtcaggtcggaggaaggggacaaagtgggcccccgccctggagctcagtggctggtctcccccttctgc

SEQ ID NO: 9272 - DNA, 122 bp, Homo sapiens
aagttgaggccggcgctgcaggcagcggcggctgcgcggtgaacgaggcggcctgcgcggcggagtgctgagtcccgatccccggctctgtccggcccacggatcctcaagcccgggccccg

SEQ ID NO: 9273 - DNA, 122 bp, Homo sapiens
ggagaatgcttcacacctctcctgctgcttgtcccccgtgtctccagtcgtctctcaacacgcttattcaggaactaacgcgtgagcaaccgagacctgaatggctgccttctgcacacaca

SEQ ID NO: 9274 - DNA, 122 bp, Homo sapiens
gggcagtgagggtggggtttttatttttcatttaaaaaatcccaaataataaatccacaccgcccttcccaaataataataaaacagctggtgttgggcgtaagccggtgttgaaggtgtcg

SEQ ID NO: 9275 - DNA, 122 bp, Homo sapiens
tcctcccccctcagcttcccaagtcactgccagacatctttcttattgacatccccatctcgagaatccaagttagtattaactgagggattagactttgccttgccctgaaagagagaaaa

SEQ ID NO: 9276 - DNA, 122 bp, Homo sapiens
ggaggcagggatgagggcttttcctgtccttcacaggcagccctggactctgccatttaccggctgtgtgatctggatcaacgtacttaaattccctgcgctgcctcctaatcctcaaagtg

SEQ ID NO: 9277 - DNA, 122 bp, Homo sapiens
acaaaccgttcagctcagctgggaagaaatcggctcaagcccatcagagtgacagatacccggggaggctgggcgtgccaagctggaccggtccggccaggctggaagcccagctgcccgct

SEQ ID NO: 9278 - DNA, 122 bp, Homo sapiens
ttttcctttaactccagtgccttctgataaatctggaatgtgcattgaggaatgccggggcgggggggcatttcctgggttcgggggctgtgaagacctctccccaagcccctgcagagacc

SEQ ID NO: 9279 - DNA, 122 bp, Homo sapiens
cctccaggaagagcgcgtggcccgggtgcaggctggtgatgacggcgaaggcgctccagtcgtactcttccagcaccttgaacagcacctgcagctgctgctccagggacacgcccagctgc

SEQ ID NO: 9280 - DNA, 122 bp, Homo sapiens
ctttgcagttgaaaagcggcggtttgtgggtcattaatagtcgacggcgtctgctcctctcggggaaggcagtgagaccgagccttttactttcctgcgtatcggaacagcgctagtgtttc

SEQ ID NO: 9281 - DNA, 122 bp, Homo sapiens
gcactgagttagaccttggtgcttggcccacccttgaccatggtcctcctctctgaacaacggaggtgaggagaccagtagtaacagctgtgtcaggaacaggtcagcacccagggatccac

SEQ ID NO: 9282 - DNA, 122 bp, Homo sapiens
gggcagctccagggtgggcaaaacccaaagctctgagtccaggggcactaccagtccacacgtgcctggggcagctctcaagatccaagtgggcatggacacagagctggccctccttaggg

SEQ ID NO: 9283 - DNA, 122 bp, Homo sapiens
tcccacctgcctcggcctcccaaagtgctgggattacaggcgtaagccaccgcgcccggccgccaggctaatttttttatattttgtagggataaggtctcactgagaccagcccaggctga

SEQ ID NO: 9284 - DNA, 122 bp, Homo sapiens
cagccccaagcagtttgcctgcagagatcaaataacctgtatctcaaagggctggcggtgcgacggtgagagggactgcccagacggatctgacgaggcccctgagatttgtaagtaccttt

SEQ ID NO: 9285 - DNA, 122 bp, Homo sapiens
tcatatgaagtaggtccaatctgtggttgttgctgtaatcagtgtgtcagcacagagttccgcaatttcagtatctttctaaataaccgactgtggaatgtttgtaatcacacagcacatag

SEQ ID NO: 9286 - DNA, 122 bp, Homo sapiens
gatttcagtgatgaactggatttagcttttaggttgaacaggaaacgtcaatagaattttcggttttcatgtcagtgcagatctcgcaaaataaaaataaatgtggcattggctctaagggc

SEQ ID NO: 9287 - DNA, 122 bp, Homo sapiens
aggaagagggcggggagcgcggaccgggtgtgggaggccgaggtgacagcaggtgagggccgggtgcggatggggaagtgagacaagcaccgtgtgggtattactcattccgctctactaag

SEQ ID NO: 9288 - DNA, 122 bp, Homo sapiens
aatacaataccttttgttaagccactgtgatgagggcgggacggtatgtggcgtgattgccgcaaaaatcagactaacacaccatcttcaggtggagcctatgcccctttgaaagctttctc

SEQ ID NO: 9289 - DNA, 122 bp, Homo sapiens
ccccttcactgttaccctaggactatgtgttctgggcccagccttggtccctcctgcccccggtgagggctaaaagcaaagggagagaaccagaggcatctcgtgacactttaaactgaagc

SEQ ID NO: 9290 - DNA, 122 bp, Homo sapiens
tttcttctcggaattgcagggcgaccggcagcaccaagaaggagcgtgctggggcgtccacgccggctgactcctgcgggggcgacggctggtttccaggcgagggcgcggcgcccgaggac

SEQ ID NO: 9291 - DNA, 122 bp, Homo sapiens
attaccaagaaatgtcttaataagaccagagctctggatcctctgggcactctctagaggcgggatatatacagtctctgaattttaaaatagaaaacagtgggcagcggggaacggagtag

SEQ ID NO: 9292 - DNA, 122 bp, Homo sapiens
tgaccccttgcgcttcctgagtgaggcaatgcctcgccctgcttcggcttgcgcacggtgcgctgcacccactgtcctctgcccaccgtctggcactccctagtgggatgaacccggtacct

SEQ ID NO: 9293 - DNA, 122 bp, Homo sapiens
gccttttccttttgatccagctggctccctgaacccagagcacagtccttccctgaagctcgctactcaaaacagtcaaccttaaccttgtcctctcttctactcgctcttcaaatggtcca

SEQ ID NO: 9294 - DNA, 122 bp, Homo sapiens
cggcaagccccgcctgccttggggcaccgcctacctctgccagccacgcctcccctgcctcggggctccgcctaccccggccagccccatttccccgcctgcggcctaaggaaatctccctg

SEQ ID NO: 9295 - DNA, 122 bp, Homo sapiens
aacaatgagccactccggcaagtgctgagtttatcagtctctgcctgggaagggaggaaccgccttcactgctgtatgaaggcttataagctggcgtggcttaaaggaagggaaactccttg

SEQ ID NO: 9296 - DNA, 122 bp, Homo sapiens
ccccagctgctgctgcctgatgactacctggactgcctgggcaagcaggccgaggcgctgcggcccttcggggaggccccgagagagctgcgcctgcgggccacccgtgccttcgtggctgc

SEQ ID NO: 9297 - DNA, 122 bp, Homo sapiens
cacccacggggccggccaccctccctgtctgccctgagccggccttaacgcgccacacagcgcagccccttccactcacacaggcacccactgggatggggagagtgagggccaagggtcag

SEQ ID NO: 9298 - DNA, 122 bp, Homo sapiens
tcgaactcctgacctcaggtgattcacctgcctcagcctcccaaagtgctgggattacagcgggagccaccgcacctggccgcatgatctgttttaaataattactctggccaccttatgga

SEQ ID NO: 9299 - DNA, 122 bp, Homo sapiens
caccccaacccgggtccctcgggattctgcccgagcctacgccggcgcaagcgtgggcagcgaggaaccagctgagaggcaggatcaaagagcatgggagttgaagacaagggaaaactggg

SEQ ID NO: 9300 - DNA, 122 bp, Homo sapiens
tgggggagatgataaatgttagcagatgatgctgttgagaactaggctggcttgaactctcgctgtctactagaagaaaggcagaaagtagattggctcagattgaagctgatggtgtcagc

SEQ ID NO: 9301 - DNA, 122 bp, Homo sapiens
cggccactcaccggcccctgtccccacgccgccccgctccggggacaagcagcccttctgcgagcccagaaagccgaagctcgactgctggaagcggtcaaaatcacccaggggcagcgccc

SEQ ID NO: 9302 - DNA, 122 bp, Homo sapiens
gccagggcaacctcccacgggggttggcctcggtagattcctgaggatcaactggatcagcgtttttctttcccacggaccctgaagttagagcatcccagcatggcttggacaggcaaagc

SEQ ID NO: 9303 - DNA, 122 bp, Homo sapiens
gctcccgcgcccccagtctcagcgggttccggcttagtccggcaccctgggggaatgctgcgctctggctggcagcacgccctgcctgcgctcgccccgtctttgctcctggtcaccatgcg

SEQ ID NO: 9304 - DNA, 122 bp, Homo sapiens
ggactgacgcagcttccagatctatatcctgccagacgtctctggctcagcgtcccccaccggctgcctgccaccttccaaggagctctgaagccgatgccccgcccccttcacgtcccgcc

SEQ ID NO: 9305 - DNA, 122 bp, Homo sapiens
ctttatttcttccttctacatctgataataaatccgatgatttccattttcatgtcattgcgcctctactgttaacatataattatttatactttctatttttttttttttaactcttccac

SEQ ID NO: 9306 - DNA, 122 bp, Homo sapiens
agggagggatccctaagtgcagggcgcacacacggggcggagacctggaggcggcagcaccgcgcccccagggctctgcccagctagccactcgcagcacagagaagcgcgcccgcaagaca

SEQ ID NO: 9307 - DNA, 122 bp, Homo sapiens
ggaacggacccccggggctgcaaccgccagcgcctcaggggccgccgaggatggggcctgcggctgcctgcccaacccgggcacattcgaggagtgccaccggaagtgcaagggtgaggggc

SEQ ID NO: 9308 - DNA, 122 bp, Homo sapiens
ctcgtattaaatgaaaaagcatcagaacatagatgacacaaaaaccccatcccctgtcctcgagacatccaggtttagcattgtcctcagcccccagcagcatcccctcctgcagggggaaa

SEQ ID NO: 9309 - DNA, 122 bp, Homo sapiens
cacctctggcacggtgcctccagaaacccaacagggggagcgcctggaccccaggcaggacgccgcgtgggggacgctggctgtggacccctgtcccgagggcggccagaggctggctctga

SEQ ID NO: 9310 - DNA, 122 bp, Homo sapiens
tgggacgaccccccccgggcagaagtctcccagcgggcccttctgcactccccagtcccccgtctccctcgcgcaggagggcaccgcccagatctggaagaggcagtctcaggaagtggagg

SEQ ID NO: 9311 - DNA, 122 bp, Homo sapiens
aaagaattgtgtggcattactataacaaaactccattcattctcatctgctttttttatgcgaacaagttttctcaacacttatatccatggaattgaaaacttggaatagaactgatgctg

SEQ ID NO: 9312 - DNA, 122 bp, Homo sapiens
gacacggccagccggtcactgtttaaggcactgtgtaccattttactaacttaatcctcacggtgaccgcatttcccagctgggccaactggtgcggggttgactggaagcgaccggggttg

SEQ ID NO: 9313 - DNA, 122 bp, Homo sapiens
cacggctgcgactacgggcctgcaggaaatggccactggagggcgccagacgcccagccacgctcagaccacccgggccaggaggggcagagccacagggacctggcagggtgccacgggtg

SEQ ID NO: 9314 - DNA, 122 bp, Homo sapiens
gactggattagagagggagtcaaactttttaattaaagtccgtcccttcccactcttagacgcctgggctcttctgagtccccggagctcctgaatggatgtggttgccccggaggttcagt

SEQ ID NO: 9315 - DNA, 122 bp, Homo sapiens
gcgggtgatctcctggctcagggcccgcatgcgggagtagcaggtcgggggagtgggccgcgcggcgggggctcccgccaggagcagcagcagcacgggcagaggcccaggcgtcctcatgg

SEQ ID NO: 9316 - DNA, 122 bp, Homo sapiens
gcaacctgtaagacccatcctcagacattctgctattgcccccagacaatggaaggggggcgacagctgtccatgggggcactgctaagagggtgttgatcagcagatcaggactgtaactc

SEQ ID NO: 9317 - DNA, 122 bp, Homo sapiens
gttcagtgcttctggagtttaaagagcccggcgagggtcatgtcagatgacgccggtccacgagaaggagggtggattatatccttagagacgccatagagtgaggatataatggctctgta

SEQ ID NO: 9318 - DNA, 122 bp, Homo sapiens
aagcataaatgacatgaccagatttgcaattttaaaaagatcactctacttgctgtgtagcgaatgaattagagaagggcaagggggacaatgatttgtaagctacccaaacaacctaggca

SEQ ID NO: 9319 - DNA, 122 bp, Homo sapiens
atctggggtttttcaagactcactgagatgcacaaggaaccaaccctcaagtagccaactcgttcctgtttgcatgtgtcgactgaaaagaatcaaaataaacaaaatataactatttctaa

SEQ ID NO: 9320 - DNA, 122 bp, Homo sapiens
ctcacaggctgaggtcgcaattgatgctggtctgcagcaggtaggccttggcgttctgcacggccagctccagaggctcgggctcaggcacctgggcactgtagtgtgggaagcccagctca

SEQ ID NO: 9321 - DNA, 122 bp, Homo sapiens
ctggcaaggtgccaggctcagctcttctcggtaggtgagtcactgccctggcatctcccccggatgcagctgagtcacccagccatgcctgctaggcaggtgggcaccaggcttgtggtggg

SEQ ID NO: 9322 - DNA, 122 bp, Homo sapiens
ttggctctcctgacaacactgggcccatccagataacctccccttcctcaggtcagtgaccgggaacctgattccatctgcagcttccatcctgctgtgctatctaaggagacagtctctta

SEQ ID NO: 9323 - DNA, 122 bp, Homo sapiens
tcctgaggggggccctgatgccaaaatatgtccattctagtcaagcagtggtggttgaagcgggaggagtggacagggggctaggccagtggcccgtttcctctctgtgtgtctctgttcct

SEQ ID NO: 9324 - DNA, 122 bp, Homo sapiens
cccaatccctcccaggcccgacgctccccactccccagatgacacaactgtccccggcgtcgcctggtctcccagtacccagaccctggcgtggcttcgccatctacctcgagagactccgc

SEQ ID NO: 9325 - DNA, 122 bp, Homo sapiens
ccgtggagcagggggcggtggtcatcggggaggctccgactgcacaggagcccacggaggcggtggaggggggtgcgggtgggggctcaggcatggcgggctgcaggtcccaagctctaccc

SEQ ID NO: 9326 - DNA, 122 bp, Homo sapiens
cccacccttctggggagcccacctcaaagagaactccctggaggctcctacagtggcctccggctgaccaaagtgtgctgtgggcagaagcccctgcctccctcaccatgtacttcctcatc

SEQ ID NO: 9327 - DNA, 122 bp, Homo sapiens
gggagtgtcccgtgcctcgccttaaaggagggcgccaacgcaatttcagtatgtgggagacgggctgccccacccccgcgcgcaaaaccctggtttagcttaagggatggaggcggggaccc

SEQ ID NO: 9328 - DNA, 122 bp, Homo sapiens
ttattacagtatcaacgcatatttataaatgtccttcatttccaaaggtgctcacaatatcgacctgtaaatagaaaagctaccaacatcaacttgtaacagtcatcttcacaacaaacaaa

SEQ ID NO: 9329 - DNA, 122 bp, Homo sapiens
catcctgtcacaattattttactccctttggaaccattcaatgctggaaatctactttctcgttttattcaagtcattctcttctttgatagaagttgatatggtttggatctgtgtcccca

SEQ ID NO: 9330 - DNA, 122 bp, Homo sapiens
gaaactcatcgacaattgttcttggttggaagaaggggctgagagattgacaagaaacaccgctttctggtttcaataagcttgaatagccctcaaaataaggagaaggggacactccttcc

SEQ ID NO: 9331 - DNA, 122 bp, Homo sapiens
cctcagcgactccgcgggcgccgccattgttgggctgtcagggcgcatgtgcggggagggcgcactcccggaggccccgcccattctcggaggccccgcccattctcggaggccccgcctct

SEQ ID NO: 9332 - DNA, 122 bp, Homo sapiens
ggaggcagttggaataaatatacaggaacagaacttactttgatctttctaaaaggttaacgttggattttaatttctactctaagcaggaaatagaagtagagtttgcctaaaataatttg

SEQ ID NO: 9333 - DNA, 122 bp, Homo sapiens
gaaccctagtcaatgactgccatggaaatagataaaacccaggcatctaaccttggtcctcggtggaggattggattgtccaaagtctgttctcctggctctggctccctcctgggtccttc

SEQ ID NO: 9334 - DNA, 122 bp, Homo sapiens
gcaagcattagtttgtagtacgctattactgtatttcaccttgcactctctagtttccttcgtgctccctcaatatccaactcttaataaattcatggctcccggtgagcattcatcaattc

SEQ ID NO: 9335 - DNA, 122 bp, Homo sapiens
ctggttggaggagtttttggccagctctgacccccttgcctctggaaaggcagagtcctccgagtcccccatggcttccgctctcctggccaggacaaggacaggcctggccggatcctgtg

SEQ ID NO: 9336 - DNA, 122 bp, Homo sapiens
attctctgacctctcagagcctggggcctccctgagaaccactacaggcctgtagacattcgtgaaagatgtggggtgggggcagctggtctcctgccataccccaagctcaggcaagaacc

SEQ ID NO: 9337 - DNA, 122 bp, Homo sapiens
gcgacaggggccgaagccattttgcggctaaagcctttccgcccttaaaaggagaacttccgcccttaaaaggagaacttccgcccttaaaggagaacttccgcccttactatattaccgcc

SEQ ID NO: 9338 - DNA, 122 bp, Homo sapiens
tcaggccacccagtggccgggccctcctccgactggcctctgctgaactccgtgtcgtcccgtcatagatggcctgccggcgtctgctggtgtctgcccgtgtgttcttctgctgttgagtt

SEQ ID NO: 9339 - DNA, 122 bp, Homo sapiens
cggccccatcccaggagtcgcccggactggaaggcagtgcgagcactgggacacagcctccgagctcgagcgtgacgggaagttggggcaatttgttagttatccgccgccaccaagacgcg

SEQ ID NO: 9340 - DNA, 122 bp, Homo sapiens
tggggaagatgtggtcatgtcatattcacaaaatatatctgggtaatagtctatttctcccgtgattccaggcatatgcacccaacagtccatttcgttattgcttatcactgcccaaaagt

SEQ ID NO: 9341 - DNA, 122 bp, Homo sapiens
aggggagcaaggctcagttcaagtccaggtttctaagggattcagcaaagtggacaaggacgaggtgaggtgggaggatcagggaagcctcctccccgcgggtcgcccgggtcgtggcgggg

SEQ ID NO: 9342 - DNA, 122 bp, Homo sapiens
agatgctgggggtattgggtgtcctgcccaaccagggtccccagggccaggggctcctggcgtgccttcccgtgggactccgcatggggggctgggagggcgaggaaaatgggaaacatgat

SEQ ID NO: 9343 - DNA, 122 bp, Homo sapiens
agcctgatgcagggagtgaggagccggacagtgagggtgggaagcagcctgatctttgcacgggctgccaggcttctggttcatacagccccaggtcagtttccagaaccctcgctcttggg

SEQ ID NO: 9344 - DNA, 122 bp, Homo sapiens
ccccgccttccccagcgccctcacccccgacccggcccccgcgagccgcggcacgggagacgctccactcacctgagtttctccatgtctgcggcagaggcctgcgagaaaccaaacgagag

SEQ ID NO: 9345 - DNA, 122 bp, Homo sapiens
ccaagggaagtcaggagccgcgccacgcccccttacatcaccgatagacgtaatccgggtcggccgcaaacgtgccgcaggcctaggccccgcccagtgccccgcccctcccccaacacaca

SEQ ID NO: 9346 - DNA, 122 bp, Homo sapiens
atatcaaaaaaatgtttgccatatctgtcggttctctcagggaatatgaggagagaagcacgatggacgcatgactccgctgactttggcacggataatacagaacaaaaataacacagcag

SEQ ID NO: 9347 - DNA, 122 bp, Homo sapiens
ccacctccccaccaatggggtctcttacctgcggctacagcctggagcaggtccccccagcgctgggctggcagtggtgggcgactccgcccgaaagagagagagagattgagagagagaaa

SEQ ID NO: 9348 - DNA, 122 bp, Homo sapiens
ttaaatgtctacttccaacatccttgaatttgcaagtgaaggacaacaatctctgagagacgtgtggaagaggctgtgaaggtggggtttggggagcttggccgattcgtctatctgaaatg

SEQ ID NO: 9349 - DNA, 122 bp, Homo sapiens
acatggaggcggctctgcaaaagctgttaaacgcacaagccaacaaagagcaacgcccagcgcgtgccaggccccgagcaggggaggcgaacgccgcgcctcccgccggcgctgcagagggc

SEQ ID NO: 9350 - DNA, 122 bp, Homo sapiens
cttcacctgctgtttgagaggccccggccgcccccgtttctgggccctagcccaccagatcgctgtgctggcttcctggagccaacctggttggcagcacccccacgcctggcaaggccacc

SEQ ID NO: 9351 - DNA, 122 bp, Homo sapiens
cctgagctaggagatgcaggggcggggagtggggcacagcgctgccagcagaggctgagacgcacctgagaggggaggaagcttccgctcttctggcctcccggatccgccagggctcctgc

SEQ ID NO: 9352 - DNA, 122 bp, Homo sapiens
ggggagcaagcggattttcccagcaagatctccatgtacagctacatctttagggccgctcgggttaatatatgtcgtcagaggctcctcacgccaatcccggggcggcaggggcggcgcct

SEQ ID NO: 9353 - DNA, 122 bp, Homo sapiens
ggatcagcatctgacagtattcttgggagaaggggcgccagcctctcctggcctgctgtgcgctctgccaaagtcttcgctcgaccccgcacatcttgctccgttccctagtccagatccca

SEQ ID NO: 9354 - DNA, 122 bp, Homo sapiens
gcctccccgcgcccctcgtctttgtgtggaaagtaagtgcgggaggcgaacctacctcggcgcgcgcacaaaggcgcgcggctccctcccagctcgctcccggcgcccgcggcggcgcccag

SEQ ID NO: 9355 - DNA, 122 bp, Homo sapiens
aagccccgggtcaggggcctcagaggcaaagccatgatggtgcggggagccgggaaccagcgctgtcctcgctccctttcctggggcctggggtcacctcccctctctgggccaatcacctg

SEQ ID NO: 9356 - DNA, 122 bp, Homo sapiens
gccctggtcccgccctcgcgtcccgcgccagtcctcccgctttggtcccgccctgaggctcggcccggctcccccgccccggatttgaaatctaggtcttcctgagagtccgcgggcttccg

SEQ ID NO: 9357 - DNA, 122 bp, Homo sapiens
ccttccctcccctcccctcatgacctcgactcccttcccttctccctggaaggagcggggcggaagatcgagccccagcgctgccccacaaccaggctggatttaaagcctgtgcagtaggc

SEQ ID NO: 9358 - DNA, 122 bp, Homo sapiens
cgcccgcgcctccctcctcccagcgctgccgggaactggcagcctttcggctcccgcagccgcagcggacgccctcccagatccaactttgccgcttccccgagctcgcgctgtagccgcgg

SEQ ID NO: 9359 - DNA, 122 bp, Homo sapiens
gccctgcgccgctgcgcgctttggcacccgcttggggccctttgtgcgcatgcgcgctcgcgctcccgccctctagctgcgctcggctgagtcagtcagtctgtcggagtctgtcctcggag

SEQ ID NO: 9360 - DNA, 122 bp, Homo sapiens
aatgaatacatatttttccaggatatgggaaaagcatggtgagtggctgctgtgatcgggcgagggtgaattacgcatgaagtgttagctgctgtggctccgattccatagacacttcccca

SEQ ID NO: 9361 - DNA, 122 bp, Homo sapiens
agagctgacaatcagtttcgatgtgtgggatacagtgtgatagcagaagacagacagggacgagatggtagaatattttaacaacttcagagtgttacaaagagagctgaaggaaagcccaa

SEQ ID NO: 9362 - DNA, 122 bp, Homo sapiens
caagaggatgaattcaaccacacagctttgattttgtctttccattttcagtaatgaagtcgtgcattgattttatggacatagtatatacagaataaagccacagtccattagctaagagt

SEQ ID NO: 9363 - DNA, 122 bp, Homo sapiens
tgtaagtacaatacttactctaatacttcatagttagacttcttttctagtgcattgccccgcatctcccagtatgatcgcctaaaatcagggaagacatacatttatatgtatatataagg

SEQ ID NO: 9364 - DNA, 122 bp, Homo sapiens
catttattatatatatattttttctctagctgtttccaagttcctactctgggagcaagccgtacccagcacttcctcttctccctccctgtgtcccactgccactgagtgaagccacactc

SEQ ID NO: 9365 - DNA, 122 bp, Homo sapiens
tgctgcctccccggcagccgcggcgcgtccacctgcgcagccaccgcgccgccctgcccgcgctaccattggctcgctaaaaatgcctctctaatctgctctgctcggtgcacgcctcctcc

SEQ ID NO: 9366 - DNA, 122 bp, Homo sapiens
agacccgggcagccgcgggatcggcctccggagtcctgggacagcccagctcgccaggatcgcaagggaaacccggggaccagagcaggaattttcctacttgcttcagcgcggttatgcat

SEQ ID NO: 9367 - DNA, 122 bp, Homo sapiens
tgatgcctctgggtattcgtaaacgctaaaatcgttaaagaaattgggtaaattttccagcggggaaagggagaggaagggtcccttgagatgcaccaaaaagacagagaatttcctccaga

SEQ ID NO: 9368 - DNA, 122 bp, Homo sapiens
ctcagatggaaatgcagaaatcacccgccttctgcgtcgctcatgctgggagctgtagaccggagctgttcctattcggccaaacgtatgtttattgcggcactattcacaatagcaaagac

SEQ ID NO: 9369 - DNA, 122 bp, Homo sapiens
gctccgagccgcgggcggctgaccgcgggcctcgcgggctactcctggtaggggcctgcgcgagcctaaggtgtgtccccgcctgggttagcgctgcgctctgcactgtttcttttcctctt

SEQ ID NO: 9370 - DNA, 122 bp, Homo sapiens
tttggtgctcactctcttggtcttttcagctgtttcctttgagatgcaagagaaaataggcgtcatggaaatattaaacaactgttggaatttatctgttcctcaagactatatagcattgg

SEQ ID NO: 9371 - DNA, 122 bp, Homo sapiens
tcaaactcctgacctcaggtgatctgcccgcttcgacctcccaaagtgctgggattacaccgcacctggctgaggttgtgcaattcctgagagaccgaaagagactcgcatgtacattgtag

SEQ ID NO: 9372 - DNA, 122 bp, Homo sapiens
agggaaccagctactagatggttggattagtcttttgcccctatacccagatcagatgaccgatttgcacgtcaggaccactacagacccccaccagagtttcctctcgcttcgccctgccc

SEQ ID NO: 9373 - DNA, 122 bp, Homo sapiens
gccccaagccccacccgcaggatcttccagccacatgaggccatttaggtccaaagcagtcggatccccctcccctccagagctggacctggggagaggctgcttcagtttggagaaaccga

SEQ ID NO: 9374 - DNA, 122 bp, Homo sapiens
tcctgggtgctccccagcctacactcagctctgggtcctgaccctgtctccctaggcagccggttgcatcccctctgtgcagaatgtgaacccccaagcaaggccctgctccccctgggccc

SEQ ID NO: 9375 - DNA, 122 bp, Homo sapiens
ctgggtctcattagacgcttcctctgcttacagaggatgctaagtgcaaaatcctgctgccggctttcttatttctgtttttgagatgaaagggttccgatgataacgttcggattctaact

SEQ ID NO: 9376 - DNA, 122 bp, Homo sapiens
cgtgcggctcctggcattctgggtttcatacccgtagggctcgggtgcggtgagtatttccgatttccaggaagtctgttggaagttaccagcagggaaagagaagatgcttgctcctctct

SEQ ID NO: 9377 - DNA, 122 bp, Homo sapiens
gggcagcgacgtgggccagaggtaggggcgcgcgggcctgggaccccgcttgtcaaatcgcgcttgcatcctgctcgggctgcgctggctgggctgcacctgcgttgcctgcagcccgggga

SEQ ID NO: 9378 - DNA, 122 bp, Homo sapiens
cccccatacccttctctccctagtagggggtagttgctcccctccccgctcctgcgcacccgccaggtacccaggcgccagcagccctgcctcgcacctgccaggtaggtggcgcagtcagc

SEQ ID NO: 9379 - DNA, 122 bp, Homo sapiens
ctctgaggggcctgctcaagttgagatgggaccctaagaagtcagcctcaaggctgggcacggtggcttacacctgtaatcccagcactttgggaggccaaggcaggcagatcacttgaggt

SEQ ID NO: 9380 - DNA, 122 bp, Homo sapiens
ctgtggtgaccacacggcggctgaggctaagctggagccacggagcaagggccgcctcttcgcctgcccgggcccctctagccccatcttccctctgcccactgacatctgagaatccgccg

SEQ ID NO: 9381 - DNA, 122 bp, Homo sapiens
cgacctccgcaccctacccggtccgcagggcaccttcctcctctctctcaggcacgtcctcgacctcagttgccacgtgcacatgctggtgccttccaggtcggtctttctccaccagactc

SEQ ID NO: 9382 - DNA, 122 bp, Homo sapiens
ctcactgttttttttcccctccacactcccctcctcggagatgcagcctgaggctgaggccgcattgtttggtgaccttccctgctgtcccaggctgcctgcacattatcatatacaaatac

SEQ ID NO: 9383 - DNA, 122 bp, Homo sapiens
ccccttgcacaggtatgaggacaccctggccagtccgtggtgcaggctgatgaccctgggcgtgcctgcctaggggagatgtgtgttggggggagcctgggcatgggccgtgtggctctgcc

SEQ ID NO: 9384 - DNA, 122 bp, Homo sapiens
cacggaggccgtccctgccccgaaccgcactcaccggcgcagagtcgactcaggcagcggcggcggacagcgcgggctctcgggcgcgcgacctccggagaaaagcgctgcggcccctcccc

SEQ ID NO: 9385 - DNA, 122 bp, Homo sapiens
ccatattcacagcagtattattcacaatagccaaagggtggaagcaacccaggtatccaccgaaggatgaaaggatatatgaaatgcagcacatactcacaatggaattcagctttcaaaag

SEQ ID NO: 9386 - DNA, 122 bp, Homo sapiens
gagtctggcttccacgccaccctgatcttctcctcctcgcgtctacactgtcccgagggccgccactccatcacttgaatgggagctcacaactctctgggtcctcgcttttctcagcgctc

SEQ ID NO: 9387 - DNA, 122 bp, Homo sapiens
ctgagccagggcccacctgcgtccgaggccaggccaggggcaggcaccaggtcagagccgcgcccgacacacagggtctaacagccctgagcacctcgcaaggcagcggcggatctaagtcc

SEQ ID NO: 9388 - DNA, 122 bp, Homo sapiens
cagggcccagtgcttcctccaggctgccccgggctccctcctgagtggcaggcccaggcccggactctggccccaacccgcaggctcagaggcagccctgccttccacagaccaggccacga

SEQ ID NO: 9389 - DNA, 122 bp, Homo sapiens
atgcttaacaatcaataattccatcaccaggcagtatgaggctgggagttatgcaacaggcggaacagggcattactgctacatcattcaggagactccaaatatctgttgtgctcagaacc

SEQ ID NO: 9390 - DNA, 122 bp, Homo sapiens
atgaaagcctggctgccgggatcaatcttgcgggtcacctccctgcagcaaggcccaagccgacgtcacgtggcagaaggatcttcatgaagatgagcatggctacgacttgaacggtggtt

SEQ ID NO: 9391 - DNA, 122 bp, Homo sapiens
ctgaagcttcttgagcacagagaatagaggagcggcctgagtctttcccacaccagcgcccgcccaccaagggctcccgtaatcctgtgcggggctccacgtcgtccccattattgacagct

SEQ ID NO: 9392 - DNA, 122 bp, Homo sapiens
tgagttaggctgtcagaacagtgcgggctagaggcgcacacgtttcatctaggcttcgggcggggcgcagcaggtgggtgaggctgcggtggtggctgctgcccagggtgggaggctcaggg

SEQ ID NO: 9393 - DNA, 122 bp, Homo sapiens
ttttcatgtcataagactgtgatggtggaagcttctaacatggctctgtggatgtggcaccgctcacatgccaggtgctgggtgaatacagattctcatttaagcttcacaaaaatcctacg

SEQ ID NO: 9394 - DNA, 122 bp, Homo sapiens
aggggcgtgtgactgcagcccggccggcccggaggcccactcccgccctcgcccacccagcggggcaggctggcctttacctcctggaagagctccagactataggtgttgtcgtcgtcagc

SEQ ID NO: 9395 - DNA, 122 bp, Homo sapiens
gtgatccacacgccttggcctcccaaagtgctgggattacaggtgtgagccactgtgccccgccaaaagtaactgtttctgagtacttagtattttagggacatcaattattaagaggctac

SEQ ID NO: 9396 - DNA, 122 bp, Homo sapiens
ccccttcgctccgccaccccactccctgccacgcctcaacccagaggaccaagagaaccgcggccccaggaatcccccgcaggtacctccagccatggtgcgcgtagcaaccgcgagtctcc

SEQ ID NO: 9397 - DNA, 122 bp, Homo sapiens
ccagtgaggaaggcaggcatggttcagctcctgaaggcctgggcttagctctcaaggaaccgggcttggacacatttggcctgtggagggctgaccctcagctcctgcctcacactgccccc

SEQ ID NO: 9398 - DNA, 122 bp, Homo sapiens
gcctgcctgcctcgacctccgcatccccttgcaccgtccgctcgcgtgctgcggggcactcgcagcactaccttcggtggggccgcagcaccctgagctcccgggactcccccaccgccccc

SEQ ID NO: 9399 - DNA, 122 bp, Homo sapiens
tttctttttttccaacagcatctggaagaggctctgggagggtccaaacaacaaaccacgcggcgttctctggtggctgtgctgggacgagtgggcggaaacagccgcaggtctctctcttc

SEQ ID NO: 9400 - DNA, 122 bp, Homo sapiens
tatcagtacagggtcacttattttgggctgtcgttttagaaacgcttcttctttttttcccggccaaaatctattatgcaagtgatatatgctcttggagcaagaaaagagagagaacatat

SEQ ID NO: 9401 - DNA, 122 bp, Homo sapiens
cacccattcgggagaaacgaacagtagcactggctgtggtgaggtccggcctttgcattccgggcacccggggttgggaagttcctgctcacatctggggcccttgtgggggatggccctgg

SEQ ID NO: 9402 - DNA, 122 bp, Homo sapiens
aacgtggtcttgaaattcccccagaaagtggcaaaaatcaatgtggaacagctgcccactcgctcggatcatgatgttgtcgctgtgccgatcaccgatgcccagcacgtacgtggccacac

SEQ ID NO: 9403 - DNA, 122 bp, Homo sapiens
cgccgcttcaccgagcccgcgctgcgcatgttccagcgcttactggccctggagcccgagcgccgcggcccagccaaggaggtgttccgcttcctcaagcacgagctcacgtccgagctgcg

SEQ ID NO: 9404 - DNA, 122 bp, Homo sapiens
gccggggggcggggcctgagggaggggaccgggcagggccacagcggaaggcggtgtcgccgcaccgagaaggctcttgggaattgtagttctccggttgaagaaaaaagggattcattgtt

SEQ ID NO: 9405 - DNA, 122 bp, Homo sapiens
aagcagctggggccaggaggtggcagataccctcgagggagcagcagtgcatctgacagccgcttctccacagcaacgccggaagccggaggtcggcggcctcacgtcgaaagagggctgaa

SEQ ID NO: 9406 - DNA, 122 bp, Homo sapiens
tgaagaaactgataaagagaaagttcacctctctgactcagaaaggaaaatggacccagccgaagaggatacaaatgtgtatactgagaaacactcagacagtctgtttaaacggacagaag

SEQ ID NO: 9407 - DNA, 122 bp, Homo sapiens
aagctcagagagattgcaaaacattcatgtaaaaggaggatttgaagcaatggagaccagcgcaagggcattccaggtgaagggtatattctgaagaaaagcatagaggtaaaaatgatcat

SEQ ID NO: 9408 - DNA, 122 bp, Homo sapiens
cagaaagagagagggagagacaatactcttagaaaatactccaacagaaacatatgagatcgtttagatctgtaaattattaacattactttcattaacattatttgtcttcttcagcttta

SEQ ID NO: 9409 - DNA, 122 bp, Homo sapiens
ggtccctgcgggggcctggcctctccagaaaggtgtcagatggggagcgcccagggcccacgcacacagggtcactgagctacctgggtacctctccctggaaggagagccctagggactgc

SEQ ID NO: 9410 - DNA, 122 bp, Homo sapiens
ataaaacaaaagcctcattcctggcaactacagagtcattcctaagaaactaaccatacacggccgggtgcggtggctcacgcctgtaatcccagcactttgggaggccaaggcaggcggat

SEQ ID NO: 9411 - DNA, 122 bp, Homo sapiens
tctgttctgtgctgcctctagtggactgaccccttatccctccttcctgtgcctgcaacacggcttatggtgctgggcctcaggaaatggaggtccctcatctgcatccataagaagaaagc

SEQ ID NO: 9412 - DNA, 122 bp, Homo sapiens
ttcccgggccgaaccgggttgtggggggcgcggggcctgggccaggcggcagctaaggcccgcggtgacagcatgggtgaaggggagcggggcagaggaggccttgggctgttttcggcggc

SEQ ID NO: 9413 - DNA, 122 bp, Homo sapiens
taggggcggggcttcgccgagaccccggaggctttgggtgcgctgcagcggtctgcggcgcgcagctgtttcggtaactgctttgcctcccggctcccgcaggaggatgctggtggtggagg

SEQ ID NO: 9414 - DNA, 122 bp, Homo sapiens
ggaccgcccacaacccgccagcccccgcgcgtcccggaccacctgcatctcagctgcccccgcgcctctccagaccgcccacgtcccagctgccccctggcatctccgatcgccgacgtccc

SEQ ID NO: 9415 - DNA, 122 bp, Homo sapiens
tgggtctcccctcgggaccctattgcttgaaggggccggcaaggcccctggcgggcggggcggggtgggaccgggcccccctccccctattgctgtgaggaggggcccgccctccggcccct

SEQ ID NO: 9416 - DNA, 122 bp, Homo sapiens
tttttagtattttagaagcagtgttttgctgtcttgcccaggctcggcttgaactcctggcgtcaagctatcccacctcccaaagtgctgggattataggcaggagtgcccagccccagagt

SEQ ID NO: 9417 - DNA, 122 bp, Homo sapiens
atttatgtatttaatattttttagagacagggtcttgctatgttgcctcagctggactcacgggctgaagcgatcctcccaccataacctcttgagtagctgagattacaagtgcttgccac

SEQ ID NO: 9418 - DNA, 122 bp, Homo sapiens
ctgacagtgtctgtgtgtgaagttcttcttctaaggaggtcactgttttgacctcaccaccgacttcctgtagggcctcttctaagtcttgagcccgcagttcctgagagaagaaccctgag

SEQ ID NO: 9419 - DNA, 122 bp, Homo sapiens
ccaattcctgagcacttactaccggccaggtgctaggcctgggtcttggcacaaccataacgccaatgacaggggctggaagtacagcagtaacaccaagagtatctggaaacccagcagcc

SEQ ID NO: 9420 - DNA, 122 bp, Homo sapiens
ttctgtctgcctaccctttccagaaagttgtcccagtgcgaaggctcggagagcctgggtcggattcccgtgctgggcgtttcatcccttgcccagctcagcccctccctgggaaagcagga

SEQ ID NO: 9421 - DNA, 122 bp, Homo sapiens
gaagcagagggagagaaagatatcttacagcatactctatcattattggctaccatttaccgagggcttatctgtgccagccactattccactgtcctagcgcgtgtcaactcatttactat

SEQ ID NO: 9422 - DNA, 122 bp, Homo sapiens
tggcccagcttgtcctggagctgttgtactggctcagacaaatccctgctctctgggcctcggtgccccacctgggaagtggagggggtcctgggagccctcttgggccctgccaggcctgc

SEQ ID NO: 9423 - DNA, 122 bp, Homo sapiens
gtatactcgggcgagggctatggggcggctcttccctgaggccccaggcctggaccccgtcgcgctgtctggcagcgtgtgctgcatttccctctggaggattttcccaccggaacctgtgt

SEQ ID NO: 9424 - DNA, 122 bp, Homo sapiens
ctataggctgaagtatttaatgctgaaaccatatgatgctttctttaaaatacccccaaccggccgggcgctgtgactcaaacctgtaatcccagcactttgggaagccgaagcgggaggat

SEQ ID NO: 9425 - DNA, 122 bp, Homo sapiens
ggagagatcatgagttggtgaagcagttcttgtgggtggacgtctgggttgttgacgttgcgtgtctcccgtggaagctgcagctctggccctgagtctcctccatggcccccgaccctctc

SEQ ID NO: 9426 - DNA, 122 bp, Homo sapiens
atccgcctgtctcggcctcccaaagtgctgggattacaggcgtgagccaccgtgcctggccgcaaatgtcttatttctaattgctatcagatctggtaccaaaggagaatttggagagctgg

SEQ ID NO: 9427 - DNA, 122 bp, Homo sapiens
gacgctgcggctcagtgaagagcaggagaacaagaggagaatgggggacaggctgagtcacgagaggcaccagttccagagggacaaggaggccacccaggaggtgagcacccaccctgccc

SEQ ID NO: 9428 - DNA, 122 bp, Homo sapiens
gggctcactctcccgcccagggggccgggagccggggctggacggagctggggctgtggccgcgcgggaagtcgggaaggaaattcccccagtggcgcagggtccggcggcgccgaggggtg

SEQ ID NO: 9429 - DNA, 122 bp, Homo sapiens
ggggaaggtgaagctggcgctgctgctggccgccgtgggcgccacgctggcggtgctgtccgtgggcaccgagttctgggtggagctcaacacctacaaggccaacggcagcgccgtgtgcg

SEQ ID NO: 9430 - DNA, 122 bp, Homo sapiens
cgcggggaagggcggaagcatgctgacccccctggggggcagatgctgcggggcaaagatcggagggctccagggcgacccgcggacatagcctcccccgccatctgcaaaccggggagccc

SEQ ID NO: 9431 - DNA, 122 bp, Homo sapiens
ctcatacattcatcccttctccaagtcaaggtgcctgggaccaggcaatttcaagttactcgggagaagaaaaagtctagaagagacctggtgatggtccaaaaagatctggggtaagagcg

SEQ ID NO: 9432 - DNA, 122 bp, Homo sapiens
tggccctgctgccaggactttccgtgggtgggaacagggaggcaacccaccaagccaaggcgccaggctgctgtggggaagaaagctggtgcggctctgaaacccgtgggcggaatgaagcc

SEQ ID NO: 9433 - DNA, 122 bp, Homo sapiens
cagaccagctgctgtgctgggcacaatgcttctattgtcacggaaccctgcatccacgcccggccccgcttgcagatgggaaagctgagggtctggggctgcaggatgtgctcggcgccctg

SEQ ID NO: 9434 - DNA, 122 bp, Homo sapiens
tcttctctgctgagtcaaagaccccgagcctgggcggtgaacgcttgtgattttaggggccgtgcagctgaggggagcagagtaagagggttaaaaacgcagcaattcaccaaatgctcatc

SEQ ID NO: 9435 - DNA, 122 bp, Homo sapiens
cctagaggtgggccattacgacacacctgtttggcacatggggaaattgacgcacagagacggagctgggatttgaacacaggcactctggctctagagcccacactcttcaccactatgct

SEQ ID NO: 9436 - DNA, 122 bp, Homo sapiens
cccaccccacccggcgctgcggagaccaagatgcaagggtctgtgtacgtcctgctgggccgggccagggggtgaaagggaccggtaggggtgctctgcagccttggctcctcggctgcaca

SEQ ID NO: 9437 - DNA, 122 bp, Homo sapiens
cacgccctccacgtgttccactgcctcttctcttctcgcttgggaactccagtctcacctcggcttgcaatggaccccaactgctcctgcgaggctggtaaggaacgcccgggttctgtgcc

SEQ ID NO: 9438 - DNA, 122 bp, Homo sapiens
tcccctagccacactgtcaggtaaaatacctgtgtctgcgtactcctttcatccatcactcgaccagagtctgcaggatggacccagcatttgtatacatagtatgtttttattttatgcca

SEQ ID NO: 9439 - DNA, 122 bp, Homo sapiens
ccctgagcaaagcctagacccaggtgccagctgcccctgctgcatccttaggcccgtcgccgagtcactgagccagcatcaaagtggggaaagttgcccccagactctaaggcggtagaaac

SEQ ID NO: 9440 - DNA, 122 bp, Homo sapiens
ctgcggggttaatgacaccatattctggaaggatctctctatggctgatggtctcagttccggcatcagcctctgactgagaatcaggtctcacacaggagaagtcagatgaggagcaatcc

SEQ ID NO: 9441 - DNA, 122 bp, Homo sapiens
ttaaatcgtatgactgttaaaacatacggagctcagctgtgtggacgcagagtaactctgcgtggggtgtgaggtagggtgtgtgtttagaactctgcaagttgaagatttcagagacaagg

SEQ ID NO: 9442 - DNA, 122 bp, Homo sapiens
tctttacaaggaagcatttacaaggataacaatgttatttgggagtttttatagtaatttcgggcattggcataatgccaccattgagtcttgctatttacagacagatttgattaaccttg

SEQ ID NO: 9443 - DNA, 122 bp, Homo sapiens
gtccgcgtgcaggaacccgccgggctcagccggacgctagccccctgccgcccccggccccgccagccgcgcccactagcaacgtgctcgcgacctccagtgcccgctcagtgaagcttctg

SEQ ID NO: 9444 - DNA, 122 bp, Homo sapiens
agcctagcagagggagacagcagatgtgctgtgcagctctccggccaagaaacacccgagcgggcacaggcgtgctgaggcagtgggcggccgtggtgcctgcggcccaggcaggggacagg

SEQ ID NO: 9445 - DNA, 122 bp, Homo sapiens
gaaacagatatttctatatgcagtctcctaaggagacttgtctttttgtacacacataaacgagtaattacttctagtacacaaaagttcacactcatcaacagaagactctgccttaattc

SEQ ID NO: 9446 - DNA, 122 bp, Homo sapiens
tagggctaagactcaaagaagaactgcccaaggtggattcttgactgtgccagagctgaccgaggtctgtccaagacctaaggatgctacaaggtgttcatattgagcatggggtgcccagg

SEQ ID NO: 9447 - DNA, 122 bp, Homo sapiens
taatctctgatcttcctgtggggcttgaaggcgcggaggataagcagggcgggcagaagccgcaaccgcttcagcagcttctgttccttggagccaaagctggcgttacccatcgttgggat

SEQ ID NO: 9448 - DNA, 122 bp, Homo sapiens
ctgggctcctctgtcctctggaagctactgtaagttttagataaatgttactactagacacgaggaaagtgagtccatgattactggcattgaacaaatggttgcaccgcgttctccgtggt

SEQ ID NO: 9449 - DNA, 122 bp, Homo sapiens
tgacaagctccaacgcgtcaaaggcgttagatctgagggctgcagcagccttcgcggttccgcattgagctccttcctgcagccctctgcggaggtcacggccacgtgtgggcagggaaggc

SEQ ID NO: 9450 - DNA, 122 bp, Homo sapiens
cccgctctgaatgaagttcaggggtggtgtttacctaagcaacaaacccttgtcaacaatcgctatctctggcttgccagcggaggaggtgggggagtgaggctgttttgatcaaaatccaa

SEQ ID NO: 9451 - DNA, 122 bp, Homo sapiens
tagtggatatcgctaccatcgtcactgctatgcagaagaacggcagtcagcggaagactacgagaaggaagagagccatcggcagaggaggctgaaggagagagagaggattggggaattgg

SEQ ID NO: 9452 - DNA, 122 bp, Homo sapiens
agcgcatcaaaatttctgaaccattctgccagtaagtgtgaagatcccgtgtgccatgcccgagaagccctcattaattcaccagagggggtgatgtcatcctgtgaaaatacgccaggctg

SEQ ID NO: 9453 - DNA, 122 bp, Homo sapiens
ccccatgcacagaagataagggacctctgaggtcatataaaaagagcgagccagggccagcgtgagggccagccctcaggtggctctctccactgcacaggctgcagagaatgctggcacaa

SEQ ID NO: 9454 - DNA, 122 bp, Homo sapiens
agcaattcttctgcctcagccttttgagtagctgggactacaggcacaccccaccacacccggctaacttttttatttgtagagatgaggtctgtgttgcccagactggtctccaacccctg

SEQ ID NO: 9455 - DNA, 122 bp, Homo sapiens
cagcaccgatgaacccccctctccacgacgcacctcagcaccgatgaacccccctctccacgacgcacctcagcaccgatgaacgcccctctccacgacgcacctcagcaccgatgaacccc

SEQ ID NO: 9456 - DNA, 122 bp, Homo sapiens
gcccctactaccaccctgcaaaccaaggccccgcccactccgccattggggtgcaagccccgcccatcagccatcggagggcaagccacactccaccccgcccccgcgcacaggccccgccc

SEQ ID NO: 9457 - DNA, 122 bp, Homo sapiens
cgtggagtggagagtggtccacttgacttggtgaggtcagaagttcctgaagatccctgtcgtccccgttggcgggggagcccattgtggagctgtggggactgccacactcaccatgcacc

SEQ ID NO: 9458 - DNA, 122 bp, Homo sapiens
aattgtggaacagaaacagcgatggttacagcagctggcagagtgaggaagcagcggtctcgggagtcccagcccgaaggcagatttcctggccacaaaagcaccaacggacaagactccac

SEQ ID NO: 9459 - DNA, 122 bp, Homo sapiens
ccttactaaattctttctgagctgcaataacaatggcaatctcaaaagaaaaaaaaaagacgacgaaagtaagtaaaaaagaaacagcatctgatggacactggtggaggctatggctagaa

SEQ ID NO: 9460 - DNA, 122 bp, Homo sapiens
ctatgttggaagagctgaggggtggtggtttagcagtaagagatgaaaaatctgattaaacgtctcaggcacactatggatctcagggctgatggaggacaaggaggggacaagggaggacg

SEQ ID NO: 9461 - DNA, 122 bp, Homo sapiens
aggtcccccagcaccgcgggcacgtctgctacctgggcgtatgccggacccaccgcctggcggagatcatatactggattcgctgtctccaccaaggagccctcggggaaggccagccacga

SEQ ID NO: 9462 - DNA, 122 bp, Homo sapiens
atagagtttttggaatcaaactcggagcagtttttctacctaaaccaaaagcatgccccgcgcttcggctgaggtccttactcatcatttgagggtatttacaaagaggagtttaaaatcaa

SEQ ID NO: 9463 - DNA, 122 bp, Homo sapiens
cgtgaagccaccgctgtggcgggggccagagggagtgtggctgcgcacatcctacaccgtcgccgctggagtcaggagccccttctgcgtctcttccctccccttcaagggcagtgggctgc

SEQ ID NO: 9464 - DNA, 122 bp, Homo sapiens
ctctgccctgggggaggccttgcagacactgacaatcaattccaggtttcctgaatgtcccgagatgcacagagatggtgcaccaccaaactagtcagggggcagagtcaggaatcacttcc

SEQ ID NO: 9465 - DNA, 122 bp, Homo sapiens
gtttgcttctgcaccccgtggacaccgattatcctaacctgtcatgtgtaattctggccccgaagccgcctggaaacattggctttatggtaaatcttcttaataaacaagattagcaggaa

SEQ ID NO: 9466 - DNA, 122 bp, Homo sapiens
acccttttggaaatgttctctgttttttctctgataataatagcagccagtgttattgagcgcctactatctgtggggcacagagccaagcactgcatgtacccatcttatttaatcaacag

SEQ ID NO: 9467 - DNA, 122 bp, Homo sapiens
cactcatgtgatattatttgcaatatccaggggtcgataaaatgatattgctcccaatatcgcagggggtgcacacctttctgcaatattgttcgcaatttccaggggttgagaggatatta

SEQ ID NO: 9468 - DNA, 122 bp, Homo sapiens
tccaacagccagatgtccagggtggataaatggcgcaggctggatttcccccagcccaggcgatgtgacttcagacctgagctactgaacacactcttgccacatcagtgagacaaaattaa

SEQ ID NO: 9469 - DNA, 122 bp, Homo sapiens
cttcatagagagtgatctagaaagggcaggttacagagctcagggtcaggggcttctctccgtcagcgttggaggctggcgtctgggtcccaacaccctggatggaacccctactcccaggc

SEQ ID NO: 9470 - DNA, 122 bp, Homo sapiens
tttgaattaactcctttctccttaaaaagtagaaactactcatatacatcattgtctcagcgactttatttattttttttttttatttttatttatttttttttttttttgagacggagtct

SEQ ID NO: 9471 - DNA, 122 bp, Homo sapiens
tgtcactatcaaatacacatcagtggttttggccgtgactcctaagaggatggcaaatgccgctgccccactccccaaccacccccaagagagcatgagcacctctggctctgctgagagaa

SEQ ID NO: 9472 - DNA, 122 bp, Homo sapiens
agcttggcatggagcacctctgcgcgaccatggacctgctcacacagcccttctgcgcgccgtgggagctgcctctctgtgactcgcccctggacccaccgccccagcgcctgacccacctc

SEQ ID NO: 9473 - DNA, 122 bp, Homo sapiens
ggccccgtggtagccgcgcaggtagacgccgaaggcgcccaggccggcggggtaggcgggcgccaggcggccccgcaccacggccatatcctccagcagccgcgcccgcagcgcctccagct

SEQ ID NO: 9474 - DNA, 122 bp, Homo sapiens
acctcgggagagaaggtggaagccgcaggggctctaaaggcagccccaggttggctaaagcggttcctggtacggacaccaaggcccccgtgctcgggccctacccagcctggttcaggtga

SEQ ID NO: 9475 - DNA, 122 bp, Homo sapiens
tttatcctggaaggactgtctctggcctgagaccccagctctgaggggccgcccatggctcgaccctggtcccgcctctccttaccccgggccacatgctgggatctaccctctgccactgc

SEQ ID NO: 9476 - DNA, 122 bp, Homo sapiens
gggactgtattggagcgatgcattagagtatgaggtcgaggagtcccctaagccgggaatcgaacttggtgaggggggttgggacggccgatggccaaatatatgccccctggcctgtgttt

SEQ ID NO: 9477 - DNA, 122 bp, Homo sapiens
gcaggaagtttgtggggctgggggctggtcttctctggtcttcccctgggaagtgcctcccgctttccccaaactgccaagctaccaagccctctagtgaacaaatgagccatagtctggag

SEQ ID NO: 9478 - DNA, 122 bp, Homo sapiens
acacctccggcagcctagtggagcatcgactcgaaccgcttttgtctccacaggggctgtcgcgccgggaaagcggccagtgggcaacacctgccggggcgggaggcgccggggccctcccg

SEQ ID NO: 9479 - DNA, 122 bp, Homo sapiens
tggttccacggtcctcgccaccatctcccctggagatgtggtttaggggcggaggtggggcggggcggggcggggtggggtcggtgttgcagcggggtgagtgggccctgtcctttctcccc

SEQ ID NO: 9480 - DNA, 122 bp, Homo sapiens
aacttcacagggaaggtttgtaagacaataagcaacatatactctggtttctcttcaaaacgaatacatctttccccttttacaataagtaacatggctacagaaagcacatctgttttttt

SEQ ID NO: 9481 - DNA, 122 bp, Homo sapiens
ttcactcgccacatcttcaaccagaaggcaggcctatcacgtctcagaccaagtcgaggacgccatgttcacccgccgtctgtgtttgaacctgctctgcgcttcctggttggctgcttcag

SEQ ID NO: 9482 - DNA, 122 bp, Homo sapiens
ggacacctagcctggcttgccaggagaccggggtgggggcgcctccttccagggctgaaccggaagtggaggagagctgcaatggccttcccatgcccagaagctgcaggagcagacaatgg

SEQ ID NO: 9483 - DNA, 122 bp, Homo sapiens
agagaattccagggtgggtgtatcctgtgcattgtggaaatgctcagagcccctgggccccggggggaagatccacaggggagaggtgagccctgttgtcacctttgttggatgtccagcac

SEQ ID NO: 9484 - DNA, 122 bp, Homo sapiens
gcgtgtggggtttgctttgtcattcgtacccccggtgcgcgctgacgcggtcggcctggccgagctctccagcatccgcagaagggtccccggcgctgttcctgggatgctcccttacataa

SEQ ID NO: 9485 - DNA, 122 bp, Homo sapiens
gccaacccatgcaggaagccattcattgtctccattacaaacatggccaggaagtaaaagcgagactcagaaaggcatgtcaagccacagtcaggtgaggagccatgccctgttctctctct

SEQ ID NO: 9486 - DNA, 122 bp, Homo sapiens
gagggttttctacaaagtgttaggtccatccagcttgttgctttctttctagatcatcgccgcccaggaagaaatgctaaagaaagagcgagaactggaagaagcaaggaaaaaactggccc

SEQ ID NO: 9487 - DNA, 122 bp, Homo sapiens
ttctctcgcgcagggcccccgcggccggggcagtcccgcagccgagcgcagccgggcgcgcgccaccgcccactcgccctgtgcccgccgcagcccgaaactggccacggccgggagcggag

SEQ ID NO: 9488 - DNA, 122 bp, Homo sapiens
gccaggctgcaaactccgcctccggtcgctctggccgacggcctccacggcggcagggggcgacctctcggcaagactttccgccggggtcccagcccggcaggagcttccggagagatggc

SEQ ID NO: 9489 - DNA, 122 bp, Homo sapiens
ttgatggcatttctccttcggtgctcagaggcttgtgagagcacatcctatatgtggaaacgttaccgtcccttgtttactgatactactgtcttaaaatcctaacaatcaaggcccaccag

SEQ ID NO: 9490 - DNA, 122 bp, Homo sapiens
tgctgatttttactcagtgtgtctggcatacgaactctgcccctgagtgggactgccatgcgagccagtagtatagcttttttttttttttttttgatagttctggtatcacgcctctatct

SEQ ID NO: 9491 - DNA, 122 bp, Homo sapiens
atcgcacgagcaagtttattccaagactcgcgataaccctctggggccgggagcagggagcgagacgctgagcttctgcgcctgcgccctagcgccggctgcagcctcctcacttcgagagc

SEQ ID NO: 9492 - DNA, 122 bp, Homo sapiens
ggccaaaaaaaacccgcaccaaccgatctcactgcagccccagaagaaacgctcccaccccgctcctcaggccctgcctcaggaattgcatggcttccttccaaggagaccacacgtcattt

SEQ ID NO: 9493 - DNA, 122 bp, Homo sapiens
tcaggaagtcctgtctcttctgtgtggttgttgtaagagagatcactaacaggggtgcagcgcatgaagtccgctaccctcatcaataattgttttttgtaaatgaaaccagaggaggctgt

SEQ ID NO: 9494 - DNA, 122 bp, Homo sapiens
attcccagcggtgtgggcgggattcggaggcctttctgcatgtggacaggaagaccgcagcgaaggcaggcagtgtgaccgggcacatgagagctgggctgtggggcttttcccggcaggag

SEQ ID NO: 9495 - DNA, 122 bp, Homo sapiens
aaatgacccatcacccttaagccagtctcattttctcacctccagctaggaattaataagcgtgttgctgttgttgttgtcattaacagggaagttgaactgtttcgcaatcacttatttct

SEQ ID NO: 9496 - DNA, 122 bp, Homo sapiens
ggatggggctgacgcggtgttccccggaccaagcctggagccgcccgctgggtcctccggcgtcaaggccacagggaccctcaagcggcccaccagcctgagccgccacgccagcgcggctg

SEQ ID NO: 9497 - DNA, 122 bp, Homo sapiens
gcgagcagcaccttcctcagaatatggcagagctcaagggaggggtctctgtggtggggacgccgccagcctctgggaggaatacgttttccaacaccctcgggtctccttgaaagcttaaa

SEQ ID NO: 9498 - DNA, 122 bp, Homo sapiens
ggcccctcggtacttctggggaggactgtggggctgtggattcgtggcgttttctgttctcgatgcaactggtgctcgtgggggcaccgggtcctcttcacctcaactgcaaacactccaga

SEQ ID NO: 9499 - DNA, 122 bp, Homo sapiens
ctcaccgcggccggcggactggcgggtctccgacaggtgcgcacactcggcgcaggctgtcgctgagcccggaattctgcaccgggagaaacttttcagcccgcagagcaaccgcagggcag

SEQ ID NO: 9500 - DNA, 122 bp, Homo sapiens
atagttctggagttaactaacttaaaagtactgtaaaagagctacacagcaaattaaattcgctgtgcagcgcaaaggcaccctacacactgcgtgaacgcttcggctcctggagcgccggc

SEQ ID NO: 9501 - DNA, 122 bp, Homo sapiens
tagtttgaaggcaaaacacagaatccaggtaagtgggcttaccaggaaaagctggtgcgacgttgctccgcacaatggagggccttaggatggcaatggttaggttcctgctctcctgctgc

SEQ ID NO: 9502 - DNA, 122 bp, Homo sapiens
cacctcccacccccaacccctggtccctgaccccatccgtgcccatccccagaatgggaacgaccagacccgccgccgcctggctgtgtactgcctgaaggatgcctacctgccactgcggc

SEQ ID NO: 9503 - DNA, 122 bp, Homo sapiens
atgctggttagtcactagttcctgcactctccgtgtggttcaacagtgggaggaagaagacgtgactggagatgtcacctgtggaccctgcagcccttataaggtgggctgtacaggacgag

SEQ ID NO: 9504 - DNA, 122 bp, Homo sapiens
cggcttgtgttcctgggtgtgtgtcgcaggagccctggtggagctcaccccgacccccggcggcctggccctggtgagcccctaccacacccaccgggccggggaccccttagacctcgtgg

SEQ ID NO: 9505 - DNA, 122 bp, Homo sapiens
acgtcttagttcttacctccagtctcgactcaccgttcctacaaggaacactcacttctacgaaagctctattagacattcgagggagagcttatactgtagaaccagtgttattaggaaag

SEQ ID NO: 9506 - DNA, 122 bp, Homo sapiens
agtagagacggggtttcaccgtgttagccaggatggtctctatctcctgacctcgtgatccgcccgcctcggccaccgcgcccggccgaaaatctgaatattttaatggaaaactgggagtg

SEQ ID NO: 9507 - DNA, 122 bp, Homo sapiens
tttttttttttggtagagacaggtaatgcaagaattttaaaacactcaggtctgtctgtccgtccaaacatacatactagatatactacctcctctttctccaacagggaagttatgtcaag

SEQ ID NO: 9508 - DNA, 122 bp, Homo sapiens
aaataacatgattacatgtaaacaaaaaatagaatatgatcatttattcattcattcatccgttcaagaagcactaagtggccttggcttttactgctggcttgactcagctctgttgggca

SEQ ID NO: 9509 - DNA, 122 bp, Homo sapiens
agcctgggcaaccgagcaagactccttctccacaaaaaattaaaaaaattatttgggtatcgtggtttgtgcctgtagtccctgccacttgggaggcttaggtgagaggactgcttaagcct

SEQ ID NO: 9510 - DNA, 122 bp, Homo sapiens
aatgcctctaattcctgcgggggaggggtcccgcccagggaaggagagggccggctacaccggggatgcgcctttgtctacaggcacactttgccaaggtagctggggtaccaggaagagca

SEQ ID NO: 9511 - DNA, 122 bp, Homo sapiens
ttaaaaatgtcttctcagcgtgttccatatcaaatccacacccacaccccccgccgggcccgcttctcctgagactcagcggttggtcggctaacgggcatcttcaatgacgcagtgaagaa

SEQ ID NO: 9512 - DNA, 122 bp, Homo sapiens
gcccctaatgagatatttttgcgcttgggcgaacgaagggctgcttcaggaggctagtgacgaaaaacctgcctggcttttgtgcggagaaacggcaggccctttccatccttttctggggg

SEQ ID NO: 9513 - DNA, 122 bp, Homo sapiens
gaaccaactaaccttaccaccaccatggtatggacagttcttctcaagagaggacacctgcgtgcccagtaagacatgccctcagctggagttccgacatctgatctctaggaggaaagaag

SEQ ID NO: 9514 - DNA, 122 bp, Homo sapiens
cctaaaaatcctctgctctgcctattcattcttccctccagaatatttttaacacgatctcgaggccatagatgatatcagtaatttgcagtattgatgatagtggtgaaccggaggagaga

SEQ ID NO: 9515 - DNA, 122 bp, Homo sapiens
cacaaataaataaataaacagccaattttaaatataatagagtttttaatcatcaaataacgtatccatctggttaggtcaagacctatttgcaggatagaaaggctgtttagaagagttgt

SEQ ID NO: 9516 - DNA, 122 bp, Homo sapiens
agcctcataggagggagcaagacagggtgtgccaagtacacccctactttcacctactgacggtgttgtctcgcttcatttaaacatttatgtaactaggtgcggtggttcatacctgtaat

SEQ ID NO: 9517 - DNA, 122 bp, Homo sapiens
aaatctgggcagggcataggagactgcttcgtgatgaatatttaattcatgatagaaaatcgctttagtctctgggtgaggtgtatgaggagtaacatgaaaaacaatgaaaataaataaat

SEQ ID NO: 9518 - DNA, 122 bp, Homo sapiens
gtctgttcttggactggattcttcctgtaattccggccatcaattcttataagctgtggacgcagaacttccatgacactttctccaaatgatattccaattatgccctgaaaaatataatt

SEQ ID NO: 9519 - DNA, 122 bp, Homo sapiens
ggagagcccaggtgcgcgtggaaagtaccgcggcggcgtccttaaccttcgtaggaaatccggttccctttgaggatcggattcaaaccaggggcctctgccaggaaaacgcgtgtgcagat

SEQ ID NO: 9520 - DNA, 122 bp, Homo sapiens
tataggtcggaaggtggtaatacgtccacaatgtttggctcatggtacctgctccatagacgtcagccattgttatttttatcatctcacctggagtcctggccttggtgcgagatgcccag

SEQ ID NO: 9521 - DNA, 122 bp, Homo sapiens
cctcgcagcctaggactgggctcctgcgctgatgcgggaagtgcgagggcgcctgaggcccgtcagctcgttcccgtccctttgcctgcctctgcgcccaagtcccgggggccatggggagg

SEQ ID NO: 9522 - DNA, 122 bp, Homo sapiens
cattttttggggaaatgtggttaaagcagccataattatcaactgcttgaaatacttacccggtattttaaagaatattaataaggcctcatttaatttggttcgcagcttttagatgattg

SEQ ID NO: 9523 - DNA, 122 bp, Homo sapiens
tggctttatttttaggtaacaccaagaaggacgccatgagagcgaaggccggtgggtcaccgccctttgctctcgtgctgcgcgtctccctgccatcaaccgccgcaaccggcgctgggagc

SEQ ID NO: 9524 - DNA, 122 bp, Homo sapiens
ctgtagacgtgacctacgatggacaccctgtgcccgggagcccctacacagtggaggcctcgctgccaccagatcccagcaaggtcagcctttgcttttgtcccagaacttgtctcattgct

SEQ ID NO: 9525 - DNA, 122 bp, Homo sapiens
actacttatgctgtggctgatgtcactttgtgatcaccatggtctttcccactgatcccccgatgccaccctagaattctcaacacagcactccatagtggattagagctcagattctgaag

SEQ ID NO: 9526 - DNA, 122 bp, Homo sapiens
tgtccccgagagtggaagggcccctgggggtaactagcctttgagctcaaaggggcatttcgtgaggtcgccttttggttcggagagcgcgcggcgatcgggtggagggggcctggcgggaa

SEQ ID NO: 9527 - DNA, 122 bp, Homo sapiens
ggtgtgatggctcacgcctgtaatcccagcactttgagaggtcaaggtgggcgggtcactcgagcccagctcatgtggaccagctttgggcaacatggtaaaacctcatgtctacaaaaaaa

SEQ ID NO: 9528 - DNA, 122 bp, Homo sapiens
aatgtatacatgataaaaatttcttttatgaagcaaaatatgttttgttttgctcatgaacgtgaggtattttggaaaaatggtaaagaagtgcagagtcaagtcatagcgactaataatgg

SEQ ID NO: 9529 - DNA, 122 bp, Homo sapiens
tgccctgatcgggaaacaatgaagtatcgggagtcgctgttgaaagtctgtaatttccagcggaattgctgtttagtcatcatattgccgctgaatgacatagtggggctgggtggaaacta

SEQ ID NO: 9530 - DNA, 122 bp, Homo sapiens
gcttccgcccactgtgctgcccttcctcggacctgggctgtcgggagagctggaggtgagcgctcttgggagagcccagccaatttaaagagtacccctgagaagactttgcggaggaaaat

SEQ ID NO: 9531 - DNA, 122 bp, Homo sapiens
gccctcaggcagcagagaactggcccagagcccttggagtgttggtggagatcagagtgccgtggtggaggtctgggactatgtcagagtgtcctcactttggggcatgggtgggtccagga

SEQ ID NO: 9532 - DNA, 122 bp, Homo sapiens
cggtctccagcgaggccgggcccgccccggggccccttcccacgcgcaccccgctggccgcgaactcacccgggcccaccctggacttcaccttcagggcagacccgtcggccatcgggctg

SEQ ID NO: 9533 - DNA, 122 bp, Homo sapiens
acatatatcaagataacaaggggtgccctggatgttgcatgtgggttgaaattggccttccggacctctgagccctcaacctcagcccatcatggatgctccttgctctcctggcccagata

SEQ ID NO: 9534 - DNA, 122 bp, Homo sapiens
gtctgcacaaacgggaccttttcaccacttctccagatctgtgactgcactggagggcctcgatctttagtgtcactaagaaaagctgtcaattaaacagaacaacaaaaaaaaaggtttat

SEQ ID NO: 9535 - DNA, 122 bp, Homo sapiens
gattaatgccatgtgtactgatgatgctctaccacaattcagaattctgtggcgccatgacgcccctgttttatatggtggtttgccaagagaaaattacttaaaccaattgtgaatgcatt

SEQ ID NO: 9536 - DNA, 122 bp, Homo sapiens
acgtcagggagatgcgcagcgcggtgttgagcgagcccgtgctgttcctgaagccgtccacggcctacgcgcccgagggctcgcccatcctcatgcccgcgtacactcgcaacctgcaccac

SEQ ID NO: 9537 - DNA, 122 bp, Homo sapiens
gctgggagcttggccagggagcgccaaagacatagactaaccccacccgctagcgcccaccgaagttactgattaggaaggttcccctggcatcagcccatttgcttcacacactcttcctc

SEQ ID NO: 9538 - DNA, 122 bp, Homo sapiens
acaggaggggccatgaaggctctgcgagggcgagactcgacccccgccccaatcccacaccgccactcacaggatggcctcctgaaccggcagcgacaagtgcagccagcagtccacgtggc

SEQ ID NO: 9539 - DNA, 122 bp, Homo sapiens
actctctttcgaccactttggtcatctccacttcgatgggctgaatcattggatggggagcgaagacgaccagacgtatgactacggttactccgattgctcccgaggctgctgctcctctt

SEQ ID NO: 9540 - DNA, 122 bp, Homo sapiens
gcaaaaataatcagttatgtaaaggaggttgatctcaagctgaatatggaaaagtttaaccgaacagcttaaatgtaggaaattgaggacctgaagaaagtgaacatcaggcactagaggtc

SEQ ID NO: 9541 - DNA, 122 bp, Homo sapiens
aaggtggtatttctgcaggcgacaggttttcatccagcagagaccactgagaactgcaggcgacaggttttcatccagcagagaataaggcttgagaattgcaggtgacaggttttcatcca

SEQ ID NO: 9542 - DNA, 122 bp, Homo sapiens
ccctaacagtccacaggcaaacaaatggtacagtcataagagccatctgtcacggacccacgcccagaggaacgtgcagaaaaaagcagagctacatggctgtgggcaactataagccaaat

SEQ ID NO: 9543 - DNA, 122 bp, Homo sapiens
cgtcatctcctggctctcgggacctccgggacctgcgcgtggaaacaggttttcccaggtcgtcacacgggaaggcctgggctaaggagctgattaaacccagttacgattgaccgggcgcg

SEQ ID NO: 9544 - DNA, 122 bp, Homo sapiens
taagtcaattttacaatgttgatactgagttgaggcatataggctggcctgcctgccttccgtccttctgtccgtccgtccgtccttccttccttcctttcctttcctttcctttcctttct

SEQ ID NO: 9545 - DNA, 122 bp, Homo sapiens
gacctgccactggcggggcagcccctgcgccatccgacccgggcccggccgcggccgcgccgccagcaccaccaccgcccgccgccggggggcccccaggtgagcacccttcccccactccg

SEQ ID NO: 9546 - DNA, 122 bp, Homo sapiens
ttaaaagaaaaactgaacaaatgactcaggtgctattccacttgggcatttgatagtcaccgactttcatgatgcatgagaaaaggagctctgaaatgttatatttttctttatttcaataa

SEQ ID NO: 9547 - DNA, 122 bp, Homo sapiens
gcgggaaaagctaggggcaggcagcccacttttgcaattactctacattacagtgaactgcggtcctcacgtcttcttttcttcactccccttaacaaaataaaataaataatttcccttcc

SEQ ID NO: 9548 - DNA, 122 bp, Homo sapiens
cgcccccgccgcccaccctgtacgtgcagctccacggagagaccacccggcgcttggaggcggaggagaagccattgcagatccaaaatgactacctcttccaactgggatttggggagctg

SEQ ID NO: 9549 - DNA, 122 bp, Homo sapiens
aggctccccatcgtcctaccctccccgttcacggccaggcagccctagctctcatacctgcgtgggctggagaagggcaatacagagacttctggacccagcagccttaagaaaggacttgt

SEQ ID NO: 9550 - DNA, 122 bp, Homo sapiens
ggagcgacagaattggaagcgcgagcgagggcgggcgcgggactcttctctccagtctcacggaatcccagtggttgtaggtgttggaaactttacttaagatgtttcagctctgcctgtgc

SEQ ID NO: 9551 - DNA, 122 bp, Homo sapiens
gcagcccgccccacgccgcccacatccccggccctgcaacccggggcaggaaaccaccaacgtgtttatgaaagaggcaggcggcagctgctgctaacaggtgagcccttcccgagccgagc

SEQ ID NO: 9552 - DNA, 122 bp, Homo sapiens
atactagccacagaggggatggcagtggtggtgcaggggatggtgctaatgtggacgtggcgtagaatgaaacatcctggatttgctggcagaggacttgaatttgataagttgcctgggca

SEQ ID NO: 9553 - DNA, 122 bp, Homo sapiens
tgcttctatgaattaagtgagaggcttttgcagtccaaaaattggtacttccagtgtcctcgcaggctggagatggtggggtctcaggcttctgcatgtcctggccctgacagttctttttc

SEQ ID NO: 9554 - DNA, 122 bp, Homo sapiens
taggtaggtgtggccgagacagcggggagcggaagtgggcgtggcctggtggcgtgggcgcggggcgggggtgcggggggcgtgtccgcccgggcgcggcccagtgaggcggtggccgagtc

SEQ ID NO: 9555 - DNA, 122 bp, Homo sapiens
tgctggtcaagggtgactgaaactttgctgaaagacttactgcctggcttgtacagccaccgcttgtgtaataaggccatcccctcggactcaggtggttaaacatcaggccctgctgccca

SEQ ID NO: 9556 - DNA, 122 bp, Homo sapiens
gaccccgaccgcaggcgctaacccgtcttcggctttcttcttgacccgtacggtttgcaacgtctcttaaaacagtaactcaactctctacaaaccggggtaatatccggtgctgagatccc

SEQ ID NO: 9557 - DNA, 122 bp, Homo sapiens
aagacttgtgttaagaatttgaatacagccaggagattcagggagcaggtgaggctaagtcgctacccggtcccctgaccagcactttctttgtggtgattgagtaataggtcagttgagga

SEQ ID NO: 9558 - DNA, 122 bp, Homo sapiens
accttccacatgatattagtcatagttagcaattattattggctttgagcgttgaggaaccggatgagacaagactcataacgtggcaatgaccaataaactgaacttcagagaacgcagtg

SEQ ID NO: 9559 - DNA, 122 bp, Homo sapiens
agagtcttcaatgcccactattacttcacacagttggcctgtgacaggcaatcaggtcatcgtccacggctaccaggtgtttcatgtctactgtgacttccaggaccacaagcccttttgcg

SEQ ID NO: 9560 - DNA, 122 bp, Homo sapiens
atccagctcgctgtctgcgtgtctctgagccatggagcccactgtggctgacgtacacctcgtgcccaggacaaccaaggaagtccccgctctggatgccgcgtgctgtcgagcggccagca

SEQ ID NO: 9561 - DNA, 122 bp, Homo sapiens
taccccaccaaaaaaaaatgttggaaacagccctacccctgccaggctgtgggtgaatgacggagacatgcaggtggccgaggagttaaggccgctgctgcgcagccggccccacttcgtgg

SEQ ID NO: 9562 - DNA, 122 bp, Homo sapiens
agagagtggggccagggaggaatggaaaatgctcagactaaggacaccccaggcggacgtcgagacccccaggtctcaggggccctgcaggagtaagcaagccagggaagacaccagaggaa

SEQ ID NO: 9563 - DNA, 122 bp, Homo sapiens
agagcaggaatgttgtctttctgatagctcttccatcctcagcacccagtgtttattgaacgcttgctagtgtgagactggcaagtatttattctgacagaagaaaaaagaatgccaggcca

SEQ ID NO: 9564 - DNA, 122 bp, Homo sapiens
ggaaagaaaaatgcagcatctggcaatttggcttttccagctgtttggaatctggataaacgggactctgccataaacagatcatgattcttattgtaaatgatgacaatgttagtccatga

SEQ ID NO: 9565 - DNA, 122 bp, Homo sapiens
cttttgttgatagcagagccagctcctctcgcacgtgaataaacaaccataaatgagacacggcacatttgagcagtcttttaaaatcatttaagctttaaaaattatttaagacacgtttg

SEQ ID NO: 9566 - DNA, 122 bp, Homo sapiens
gcaagtgggcgcgggcagcgggggccagaggtcttcaggcagaaagccccagagctgccccgctgcccggctcctcctgccctgcccacctgcacctgcagctgctccgggcggactcaggt

SEQ ID NO: 9567 - DNA, 122 bp, Homo sapiens
ggccctgtctcttgcactggcctggagacacctgggagtaggtgattcccctgagatccgcgcatgtctctgtgaggcgagagtgggtgggcaagcggggctgcggcggccgcagcgggagg

SEQ ID NO: 9568 - DNA, 122 bp, Homo sapiens
ttcatttttctactataatactgccaaaggtcctaaggccaaagtcaagtaaaatacacacgcccactgccctggcccacgttgtccgatggaactttctccaacaacaggaacgttctgcc

SEQ ID NO: 9569 - DNA, 122 bp, Homo sapiens
gttgcctcctcagatcttgacttgaaattgccttgggggcgggctgggggtgcaggccgtcgaccctttccggcccgccgtggctggtttgtttggattttgagttggacgcccttctttgt

SEQ ID NO: 9570 - DNA, 122 bp, Homo sapiens
cctccaaccccgctggcccggtttataacatggacagccctgccctctagtgtctgcaaccgggagccctaaggcgccatcagctccagaatttctcttttataacctaagcaagacctgga

SEQ ID NO: 9571 - DNA, 122 bp, Homo sapiens
atacctcacctgagcagctaaacattgggtggtctttgtctgcagttgaacagtttaatccgttccttgtatacaagaaactgtgagctgaaacattacatcaaactgctagtctgcaccct

SEQ ID NO: 9572 - DNA, 122 bp, Homo sapiens
ctgaaattattgtttaaaagtaaactggttactaaaggataggagaagaggggtgaggggcgaaagggaaaggttggttaacagatacaaaattacagctagataggaggaataaattctag

SEQ ID NO: 9573 - DNA, 122 bp, Homo sapiens
ctcatccttggacagtcctgcactggtgttttgttcctcttggcattgaggaagcacccacgggccatagcttcagaccaaaccatccagaagttctcacagacatcctgtaaatccagcac

SEQ ID NO: 9574 - DNA, 122 bp, Homo sapiens
gtaagggttaatgcacacttctttctgcttggagccaaatgggaactcacagcactccagcggcttcagctcgtggtgggactgcagatccggccagcgccacacgcgacagtaaatcacat

SEQ ID NO: 9575 - DNA, 122 bp, Homo sapiens
cacacaaatatgtttctatgtcactgtattttatgctgcagaaagatggcattatgcctacgcttggctaactctaaataggcgttccactgacaggagcatctggagggaccttagaaatc

SEQ ID NO: 9576 - DNA, 122 bp, Homo sapiens
caatgtcagcccgaagccaccagatggcgcgcggaacccgcaatgcacgtgcgccagcctcgcgtttgtccccgcactggccccaggccttgggaaatgtgtctttccccagcctttttaca

SEQ ID NO: 9577 - DNA, 122 bp, Homo sapiens
taactcaggccaaagcggtttacaatctaaattacccaaatgctgggcagtcaggcacaccggcctactgcctaggtcgtggactcaggctgcgaaaccccactgcaggattgagattgagg

SEQ ID NO: 9578 - DNA, 122 bp, Homo sapiens
atttgagatgatggaaaggtgcctagctgagcacagccatcacacagcctgcagcctcctcgcaagtccctgcttttgaggtacatgtaaggaaccccttatgcaaaagtataacaaaactg

SEQ ID NO: 9579 - DNA, 122 bp, Homo sapiens
gaactcggaagaggagaagaagcggcgttcgcaaagcgtgcagcgcaggggcttctctgccgccgcacagtgggccagctggtgcttctgcagggccgacgcgcgcttgtaggccttgttgc

SEQ ID NO: 9580 - DNA, 122 bp, Homo sapiens
gttgtgattcccgagcaaatatttgtctgttttagtggcacagtcgagctgactgctgttcggaaaagggcaagctatcttgggaactaaacatataaggtgagagtagccagtgccgcagc

SEQ ID NO: 9581 - DNA, 122 bp, Homo sapiens
tgctctccggcggctcttttgcccggttctccttgttccctctggccttgctttctcccacgctgcagttgtggccctgtgtcccctcgctgtgcccttggctcctggcagcctgggagaac

SEQ ID NO: 9582 - DNA, 122 bp, Homo sapiens
ccaggaagcaagcgcgctctccgccccgcctggagggagggcccaaccacagcacagccgcgctcactcctcacccggacgtgacctagttctcacagaggcccggcctcttccgccacaac

SEQ ID NO: 9583 - DNA, 122 bp, Homo sapiens
aaggctcgggactggcccagcccccctggaggcagcgtgggggtgctctgtccttcgaggcgccctcaatgcagggggcttgtggggcagggatggcggtgactgtgggcaggacggggcgt

SEQ ID NO: 9584 - DNA, 122 bp, Homo sapiens
tcattaatgctcttttacaaaataacccggtgaagcagctgagcccgagccgcccgccagcggccccgcagcagctccaagaaggaactaagagaccaaggccttcctgctgcccggacccg

SEQ ID NO: 9585 - DNA, 122 bp, Homo sapiens
ggagagctgcagaacacaagtcccgcctcaagggggcagcaactgcccagagtccgctgacggccgctgggtgggactgcaagcccagggttgccagatctgtcagcttttttcaagataag

SEQ ID NO: 9586 - DNA, 122 bp, Homo sapiens
gacatcaccaagggcctggcaccaggtgcccagtcttccagttgcgagggcaagcaaacccgtcatgagcaactcccttccccatctctgctcaccatgtggacgctgaaatcgtccctggt

SEQ ID NO: 9587 - DNA, 122 bp, Homo sapiens
acagggcatttggggcctttagagggcgcacttgcggccagcaggctgaagaggctgccgcggagaaggctggggagcggagctgagctgagctggtgcagacagcataggagaaaaacaga

SEQ ID NO: 9588 - DNA, 122 bp, Homo sapiens
tgcgcggctgagagtggactttgcggagcgggtggccggtgctaccctttggaggtggcgcggctctaggcggagcaatgagccaggagtccgttttctagaatgttgacacaagggcattg

SEQ ID NO: 9589 - DNA, 122 bp, Homo sapiens
ttcagagcccggctgtttctctgaatctcgccctcagggtgatgttttcgacaaattcggcgctgggggcttcagggaggacagaggacaccggatggtgggggggaattccgcgcggcccg

SEQ ID NO: 9590 - DNA, 122 bp, Homo sapiens
ttcaatgtagagttacccattagctccagggctaaatttaaacctttaattaaattaatccgttgatctgaaacacattgcttctccctcaaaagtgcagcaggtttcttaggtgtcacaga

SEQ ID NO: 9591 - DNA, 122 bp, Homo sapiens
aacgttccctctgcagaaagagccttctccacattaaaaactgccaaagtgacttggaatcgtgcatctgcctcgggcaacctacctgcgtttcaagtagatgaaaagaaaagcaagttggt

SEQ ID NO: 9592 - DNA, 122 bp, Homo sapiens
cccagaccccacgtagcggcgaagttcccagaaggcacagcgctcgggggtgtggccagacgcatgggcggtgccaagcgtaggaagatggttgggaactgcgtctcccccaaggctccgca

SEQ ID NO: 9593 - DNA, 122 bp, Homo sapiens
gagggccacaaggccagtttctgcctggaggacagcacctgtgacttcggcaacctcaagcgctatgcatgcacctctcatacccaggttgggctggagagatggggtttggggcatgggag

SEQ ID NO: 9594 - DNA, 122 bp, Homo sapiens
tccgagcgcagcccagcggaaccccagctcgagcccgggctcacggagagcagcgctcggcgttagccgcacgagcaacaccccgggtgcccctgcccagggggcccgccatctcctccagg

SEQ ID NO: 9595 - DNA, 122 bp, Homo sapiens
caggtgaaccaggaaggcgaaggctgcgggatgccggcgggaggacatcatcggggtggacgctgcctgtgcctcccagcaaggcttgtaggctcaatgaaagggggctttagtggaaaccc

SEQ ID NO: 9596 - DNA, 122 bp, Homo sapiens
tgcaaacggactgcgctccaggtgggtggaaacgtccttctcctactttctgggctcactcggctccctgtgacgcgatcccgcttgcacccttgcccttcacgttgaccgcagtggctggt

SEQ ID NO: 9597 - DNA, 122 bp, Homo sapiens
cttccctactaggacgcccgcctgactcgccccattgcacaattcttaccgtggaacagccgcgtgactcggcgggagcccaaaagtttcccaggtttcctcagcctagaaaagcgtgggtg

SEQ ID NO: 9598 - DNA, 122 bp, Homo sapiens
gcaagtctccgggctcgcccggcacgctcgctctaccttgggctgctgtctgcacatgctcgtaacgacacccccagcaggggcccagcggcacgggcgaaccacaaagcccggcagcccgc

SEQ ID NO: 9599 - DNA, 122 bp, Homo sapiens
ggctgagatgccctaagattaggaagaaaacggcaatgggttaataggtaaggagaaagccgttcccgagagggcggtgtgccccgcccgaaggttgccccattcaacaacgtggacgctct

SEQ ID NO: 9600 - DNA, 122 bp, Homo sapiens
tagcgattcgagttgttttctgcttttcttctcccccagacagtgagtttgtggaagcctcgcccgcatcctacagcccagacgagttaggtaagtctgctcattttgtcttttatttcttg

SEQ ID NO: 9601 - DNA, 122 bp, Homo sapiens
gtttagagcagatgatcatgattacacaactggtgtgcagcacagccaggtgcccagatccgaatcccacaccctcctcccaccaccatgggcctcagggacatgcttctagcacagtcatg

SEQ ID NO: 9602 - DNA, 122 bp, Homo sapiens
tttttttttttttttgagatggagtttcactcttcttgcccaggctggagtgcagtggcacgatcttggctcaccacaacctccgcccccgagtgcaagcaattctcctgcctcagcctccc

SEQ ID NO: 9603 - DNA, 122 bp, Homo sapiens
ggaaggaattacattctgtctcccgcaggctgtgcggactctatatccacagctcatctccgggatgtccctggctttaggaacttgcacgtacagcacagcagcagaaaggcaacaatcaa

SEQ ID NO: 9604 - DNA, 122 bp, Homo sapiens
tagggactgtggagccgggcccgcggcggcagcgacggaggggctgggctgctggaggcccgggccccgccgactcagccttagggcgctgcggttgcctaccagctccctggcggccccat

SEQ ID NO: 9605 - DNA, 122 bp, Homo sapiens
cgcggcagtggggacggccgcaacgtctaccaggaggtggggcccccgcaggtccccgtgcgccccatggcctacacaccctgcttccagagtgactccaggagcaacctggataagatcgt

SEQ ID NO: 9606 - DNA, 122 bp, Homo sapiens
aacctcaggccgctcttcccgctgtgcccttctgcaggtaactaggatttctacctcaaccgcgagacctatgcaaggacggtgtggaccaactcgcgcccgcggcatggtgcccgccggcc

SEQ ID NO: 9607 - DNA, 122 bp, Homo sapiens
tcaattcttctgtttgtgaaacagcagagaacaaccctggaaatctttccttgggaagtccgtccgtgaaaaaaaaaacaaaaaaaaattaaatgccaaaacacctttaaagcgctgtattg

SEQ ID NO: 9608 - DNA, 122 bp, Homo sapiens
cgcgggattttctgaaacctcagttcctccgtctgtaagatgagattgtggggaggagggcggacctgtaagtgcccagccacgagggctgagagattcgaactcctttgctgccgcgaaga

SEQ ID NO: 9609 - DNA, 122 bp, Homo sapiens
ggagcccttggtttccagaatttctagagtgggtgggcatgattccagtcaatgggggaccgcccgtgtctaagcatgtgcaaaggagaggagggagatgaggtcattgtttgtcattgagt

SEQ ID NO: 9610 - DNA, 122 bp, Homo sapiens
cgcgtgtgcctggactctgagctacccggcacaagctccaagggcttctcggaggaggctcggggacggaaggcgtggggtgagtgggctggagatgcaggcgcgcccgtggctgtgcagcc

SEQ ID NO: 9611 - DNA, 122 bp, Homo sapiens
gcgcggtgacgtaccgggcgccatgttggagggttggtggtagcggcttggggaggtgctcgctctgtcggtcttgctctctcgcacgcttcccccggctcccttcgtttcccccccccggt

SEQ ID NO: 9612 - DNA, 122 bp, Homo sapiens
gcgcaacctggacattgaacgtcccacgtacaccaacctcaatcgcctgattgggcagatcgtgtcctccatcacagcctccctgcgatttgatggggccctgaatgtggacttgacggaat

SEQ ID NO: 9613 - DNA, 122 bp, Homo sapiens
agaacgttccgcggagtggagacgccggtcattcggccgttcgtcggttatggaacatttcgttcattttaatttttcagtattataatgctgcagtgaattacgtagctgtctctccgtgc

SEQ ID NO: 9614 - DNA, 122 bp, Homo sapiens
ggcgagggccagggagatggagccaggtgcggaaagggttgcagcctcgcgggctgaggccggagggtgaaggcgccgctccttgaagtgaggaaaactccggtgaggaagaggctctttcc

SEQ ID NO: 9615 - DNA, 122 bp, Homo sapiens
aggtgtggtccagggtaggcttcagctgtgagctcaatggaaatgcagaagctcaggccccgccccagacctaatgaatcaagatctccaatttaacgggaaccacaggtgattcctatgca

SEQ ID NO: 9616 - DNA, 122 bp, Homo sapiens
gatcccggctcaaccctaagactttgcccttcagctcttcattcaccaggtccacagactcgggtgactgcggggaagccgggtcgatggtgatgacaggcaggtcctccttcggctcatag

SEQ ID NO: 9617 - DNA, 122 bp, Homo sapiens
attagggggtgattagtcacgttgcaatccttcttcaaaggattctttaaaagctaaactcgttcatttaggtgtctgtttatagctcagtaacttccagacagagaggctgggaggcccca

SEQ ID NO: 9618 - DNA, 122 bp, Homo sapiens
ggatccctaaagagctctcggagagaaagtgttcctgatcttaaagaagaaacatgcaaccgagttgtttcaccactgctttgccagattatcttgaaaactgatcctgactcaggtctcta

SEQ ID NO: 9619 - DNA, 122 bp, Homo sapiens
ccacctgcgcccgcgagcctgcgcactggagctttgccctgcgccgcggccctctgcttgcgaggccgggagagacagaacctgcctctaccggtcttccaaggcactgagagcccatcgcc

SEQ ID NO: 9620 - DNA, 122 bp, Homo sapiens
gcatgactatctgcgtgtgcttctgtgactacgcggatgttgtgggcggctacatgcgtgcgggggcccggcgagctgggcaggtgccccctccggggccgtgggatctggtgagcttcccg

SEQ ID NO: 9621 - DNA, 122 bp, Homo sapiens
ctgtccttccatagcagccaaggcctagttttcggtgtagaatgggggttgacctccgagcggttagaggtggcaccacaaagccacttccacaccctggaatctaccttgacagccaacct

SEQ ID NO: 9622 - DNA, 122 bp, Homo sapiens
cccccccgtggaagaagtcaggactgtgatcaggtttgtgaccaataaaaccgacaagcacgtcaccaggccggtggtgtccctgccttccacgtcagaggctgcggcggcgtccgccttcc

SEQ ID NO: 9623 - DNA, 122 bp, Homo sapiens
caggactgacccccggcgtctcctccaggcccgcaaaagcagaagacagactgatggggacgggatcaggactgacccccagtgtctcctccaggcccgcgcaagcagaagacggactgacg

SEQ ID NO: 9624 - DNA, 122 bp, Homo sapiens
tctaagtaaacatatactattacactccttacggggaggaagaggaggagtgtgggatgtcgaagacagaggatgcaacttgtagagagtaagtgaatgaagggggaattccggcaaggaat

SEQ ID NO: 9625 - DNA, 122 bp, Homo sapiens
aagaagaggtcagacaccgggaaatggggcccaggcgcttggtctgttccacctgccactcgagtccccagtcccaagaggctgctcagacattggcatgatggggaaactcgattgatttt

SEQ ID NO: 9626 - DNA, 122 bp, Homo sapiens
tcacagagcagtctgtaaggttgcagaggagggatcagtgcctcccagcccctggctccccgccgcccgtgccccacctacccctgcccgcacatacactgggcctgggccatggtccccgg

SEQ ID NO: 9627 - DNA, 122 bp, Homo sapiens
tccctggtaaggcgtggggccaagagtttggggagccttggggacttgtttcttccctaccgccgcgccatccattcgtttatccgctggtcctctccctagcccgtcttccctgtcttccg

SEQ ID NO: 9628 - DNA, 122 bp, Homo sapiens
agcgcgagcgcgcttcagcttgtagcgatgattctggaaccagatcttgacctgcgtgggcgtgaggcgaagcaggctcgccagctgctcgcgctcgggcgcagacaggtaccgctgctgcc

SEQ ID NO: 9629 - DNA, 122 bp, Homo sapiens
ccaagcacacgcccaccagaggtctttcacacacacaccctcacccactgcagccacacacggccatagccaacagtggcccagccaggcacaggcacacatcatgcacaatgggtcaccct

SEQ ID NO: 9630 - DNA, 122 bp, Homo sapiens
tccccctaacccagaggggtttataatcagaaaagaacatctaaaatcagaactgaaaaccggaaagcaagtaaagaacttcgaaagctgggcaactgggaagctggatttggggaagggta

SEQ ID NO: 9631 - DNA, 122 bp, Homo sapiens
ggtaatccgcccgcctcggcctcccaaagtgttgggattacaggcgtgagccactgcgcccggccggaatccttttaatattccacagaaaatttgggggaaatgctgacatacaataagag

SEQ ID NO: 9632 - DNA, 122 bp, Homo sapiens
ccccaagccccctgcactgtttggcacgagagtgagcgctgtgtgcagtccctgaccccccgcctcccctgcgttcttttctaggaggagcgagctgggctggaggcctcactcctggcatg

SEQ ID NO: 9633 - DNA, 122 bp, Homo sapiens
ccagtgtgacatgaagccatcaccctgagctgtggcagctccagaacttctacccaggatcgactagtgagaggcagccttattggaaagagagccagaatcttcttcagtccgcactcaca

SEQ ID NO: 9634 - DNA, 122 bp, Homo sapiens
gaggagccgcgagcgaaaggcgcccggtagcagcgaggcgcggggtgcggggctagggatcgaggccggccgcagcggagcggggcggggcggggcggccggcgtcccgcaggtggggccgg

SEQ ID NO: 9635 - DNA, 122 bp, Homo sapiens
tccacctgccttggcatcccaaagtgctgggattacaggcatgagccaccgcacctggcccgtgccttggttttctgatgtgtaaaatgggaccacttctcaggggtgtggggatgaaatga

SEQ ID NO: 9636 - DNA, 122 bp, Homo sapiens
acacacccggcggccagaaagggtttccgccgggaaactgcctggggcccagaaggggcgcgcccttccttcaccttgtggaccaccagcgacctccccaggtcccacatttataattccac

SEQ ID NO: 9637 - DNA, 122 bp, Homo sapiens
cccgcgcgcagcccacgtgggctgagggactgagtattggccctcgggcagctgcaaccgcgcacagctggagctggcggggcggagggcgggccgggaccccgcggggaaggaggcttcct

SEQ ID NO: 9638 - DNA, 122 bp, Homo sapiens
gaatttttaggtacaaaataagtgctataccaggttttcctacatgctctacataaataacgtttctcacatttacaacaaggttttacggttgaacactctcccaggtccactgtattcgt

SEQ ID NO: 9639 - DNA, 122 bp, Homo sapiens
cagaatgtgaggtttctctcaaaggcatcttgcatcagcctgtggatgtatgcctaccaccgggctccttcaccagcaaagtggaaaaagaagcgtttcacaacaaattcttctttttgggt

SEQ ID NO: 9640 - DNA, 122 bp, Homo sapiens
agcacaccctccttgatgggccgctccaggctcgcccttcccgcattgtccgctgtgccgcgcagagtcagtaatggaagaccaagttagagacagctctgtctacttctgcagctcagtgg

SEQ ID NO: 9641 - DNA, 122 bp, Homo sapiens
tccaaactggattgtggggatggttgcactatacatgtactaaaaatcgtacacttaagacgggtgagaatgatacagtatgtaaatatgtcaagctgttaaaacatgctagacaggccgag

SEQ ID NO: 9642 - DNA, 122 bp, Homo sapiens
tatagcaatcccgggtctcctgatggtgttaaactgaaccaaaacggccgcatttatctacgggaagcctgaaggcaaacggggtcacttataaataaagtcctgcccaggcctcggctctg

SEQ ID NO: 9643 - DNA, 122 bp, Homo sapiens
actgccacctctaactcctgggctgaagggatcctccagcctcagcctcctgattagctgcgactacaggcacacactactgtgcccagctaatttttaaaatttttttattttgtagagac

SEQ ID NO: 9644 - DNA, 122 bp, Homo sapiens
agcctcaccaacccacaggtctaagcctgccctcgagtgccacccacacccacccgacctcggatcacccacccgctcgcacccaggccccaaaagcctggccgggctggggctcggtcagc

SEQ ID NO: 9645 - DNA, 122 bp, Homo sapiens
tctccattccttacggggcccggaatcaccacgtacctccagtctcgtcggtgaaaacaacgaaattctgtcccaccgatcgcgcgagccggcaccgagcttcacaccgccgccgccatgtt

SEQ ID NO: 9646 - DNA, 122 bp, Homo sapiens
caactacccagattttgtaattttcttgaatgccaagtaagaactcacctgaactgtgaccgactgcgcttatcatgggggaaaaaaagagttagaaggggattctagcctttgatagtttt

SEQ ID NO: 9647 - DNA, 122 bp, Homo sapiens
tatctgcgctgtgtgggtacagatgccctctcaccgtcgtatctgcgccgtgggtacagacgccctcccaccatgatatctgcactgtgggtacagacgccctcccaccatgatatctgcac

SEQ ID NO: 9648 - DNA, 122 bp, Homo sapiens
agtcagagcgagaagcccggaggttgcgctgagcttgcttgctcgctgggtcttggatgtcgggttcgaccacttggccgatgggaatggtctgtcacagtctgctcctttttttttgtccg

SEQ ID NO: 9649 - DNA, 122 bp, Homo sapiens
gcccaccaggccattccggggcccacaggctggccaggggctcttggggtcagaagacaccggctggaaatccccgtactcaggcttgggctcccgccagctcttggatggcagctccttgc

SEQ ID NO: 9650 - DNA, 122 bp, Homo sapiens
agctgattctgatgtgctgcaggtatggaaaacactgcaccatgacaaagggcttttgagcgcacgtctgaagatccggcctctaacttcagctatgctactaacagcccttctgatgcaga

SEQ ID NO: 9651 - DNA, 122 bp, Homo sapiens
tattttgtgagatgcagaagattcaactagcataatggcacaacatacatcatctagagtcgaagcatgccagtattagcaagaaaatgatcttgtagatgtttcacgaggttggacaatga

SEQ ID NO: 9652 - DNA, 122 bp, Homo sapiens
aagtattggttcaagtggtaaagtacttggcaaaatgtggagtgcgggcataaagcataacgggcactaaccatacaacagaaggtggagatattgggaaagaagtgtctgggagttcagag

SEQ ID NO: 9653 - DNA, 122 bp, Homo sapiens
tcctactactctttcaaacactgcagcaagttgcagcaaggcgggcaaataccgacagcgcgcgtgggggcgggcggcgggcgccgcggggcccaccccctccccggtctccccgcgccctc

SEQ ID NO: 9654 - DNA, 122 bp, Homo sapiens
gtggggggcagggtagagcactgcctcgggccagctgatggcccctccctcaacgatggccggggcaggaatggacaacagagactggaaagtgagaaaaatgatacaaagtggaaacagga

SEQ ID NO: 9655 - DNA, 122 bp, Homo sapiens
attacctttattacctgaggtgggataggcagtcaaggcagtgactatgttctcaggatgcggcaaccatggtgaccgtgcagtcaacaaaataagcctcagcatttgcattgtaattgagc

SEQ ID NO: 9656 - DNA, 122 bp, Homo sapiens
ttgctgtgtctcctctgattggttgcctttgaggctgctggtcgctgcttcatttctcgccggattcgtccgcccctgcctcgcccctcccctttcgctccaattggccctgttaccatcag

SEQ ID NO: 9657 - DNA, 122 bp, Homo sapiens
gcaaagcagcccagcccgttctcgtgctatagcaggagtcggggagagcaggcagaggcacgcatgtccctggaggcttaagctcagaactgggaatgtcattgctgtcacgttttattggc

SEQ ID NO: 9658 - DNA, 122 bp, Homo sapiens
aatatgccacaaagtgagccaggtgtggtggctccgcctgtaatggtagcactgggaggccgaggcaggtggatcacgaggtcaggagtttgagacgagcctggccaacatggcaaaacctg

SEQ ID NO: 9659 - DNA, 122 bp, Homo sapiens
aacaccgactcttgacttgattggccggttctgaagccatattaggaccaatgaaaaactcgttcttgaccccacccctaggaaagcttataaaggctttcctcttggttctctttcaatct

SEQ ID NO: 9660 - DNA, 122 bp, Homo sapiens
ctagcaacataactcaatctaatgctaaggtacccacaagatggcaaggctgatcaaagtcgtcatggaatcctgcaaccaaaagccatgggaatttggaagccctcaaatcccattcctaa

SEQ ID NO: 9661 - DNA, 122 bp, Homo sapiens
acccggacctgacccctcgtgctggttcgatccaaacaacatctgcggtggaggtgagggcgagcaccccagtccccactgagacaatcgccatggaccatccacaaagtgatgaaagagag

SEQ ID NO: 9662 - DNA, 122 bp, Homo sapiens
tatagaacattgaaatgacattaagaggacataaaatgtgaaaggcttcactttgggctgcgtcatcattatctggcagctaataaaagctttgtcagtaccacgcaggttgctcagttctt

SEQ ID NO: 9663 - DNA, 122 bp, Homo sapiens
caataacacagcaacatctcattagtgtgttggttagccacagaggctaatgttttcacacgtgtaaaaataagtttattttaattcttcaaagtatccataatcaccactttgaccatcac

SEQ ID NO: 9664 - DNA, 122 bp, Homo sapiens
ctaaggtgtaggtgtgattaacctcgttttactgatgaggacatgaagctcagggagtttcggtaccctgcctaagttagtgggatgtgtaggtttcaaacccagactggtctgaagccaga

SEQ ID NO: 9665 - DNA, 122 bp, Homo sapiens
tgagcttcctgcactggttgttagagacattggtctgacttcctaccagactgattggtacgtagcaggcaggctcctgggctgatcactgtagacagcaggctggcttcctaggttggtta

SEQ ID NO: 9666 - DNA, 122 bp, Homo sapiens
aattgccacagctttttggcccaagagagcaagaaggtgctggttgcacctggcagcaggcgggtgttttgtctcagcaggagctgcctgggggctgtaggcactgcctccccacccaccct

SEQ ID NO: 9667 - DNA, 122 bp, Homo sapiens
tgaggaggcccggagggagcgggttctggctgtgctggcactagccaggctggcaggctgcgtgggtacttctgtgattttcctctcaagtgcacgtggctttttcttgcactgtttcgtgt

SEQ ID NO: 9668 - DNA, 122 bp, Homo sapiens
tagccgcccctgtgagaggcactgagcccccatggtacgcagggttcgttgcgccctggtcgccagttggtgtggaagcctgatggtggtgactgggagcttcagttgcccattagctccca

SEQ ID NO: 9669 - DNA, 122 bp, Homo sapiens
cggagcggccgaggggcgcgcggggagaggcctgcgccggggtactttcaaactgaggcgcgcgcacacactcacacccacccacccactcacccacacacacacagacacacgcacgccca

SEQ ID NO: 9670 - DNA, 122 bp, Homo sapiens
aaatacttcaagtcctgagatgaatggagcaggaatgcctctggaatatcctgagaaacacgactccaaaccctgtcagctggttctaactgtgctcactcttataaacaggtaataaaata

SEQ ID NO: 9671 - DNA, 122 bp, Homo sapiens
tgctgcatttgcacaccagcctccctcccaggaaggctgaatcctctccgagaaatctttcggggccagcattatattagagctaaagtatatttcccaccaatttacccaactccctccct

SEQ ID NO: 9672 - DNA, 122 bp, Homo sapiens
cagtctgcctgccttggcctaagattacaggagtgctgggattacaggagtgagccaccacgcctggcctaaaacctttagagtattttgtgagcaataaactataaaatgttagttattag

SEQ ID NO: 9673 - DNA, 122 bp, Homo sapiens
gctgatacggggataaatatgctggttgggtagacaggcagtccttatgcttttggctgacgtagatgttacgtactatttcatgtgttatcacactctccagtaaacacgtaacataagag

SEQ ID NO: 9674 - DNA, 122 bp, Homo sapiens
cccagggagtgaagggcccatactgaggttggctatgcccagagctgctgttatgatgatcgtttttatggctggacaaccctgggccagtcacagaccagctggaggctcagctcaagcca

SEQ ID NO: 9675 - DNA, 122 bp, Homo sapiens
ccttcagaaaactctcaacaacgacctgggccccaactggcgggacaagttggaatacttcgaggagcggcccttcgccgccgcatccattgggcaggtgcacttggcccgaatgaagggcg

SEQ ID NO: 9676 - DNA, 122 bp, Homo sapiens
agtaagtgccctggatggccgggggcacaccgcacgcccgcctgtgggccgtggtgcctgcgttggccctgagggctccagcatggcccagcctgcaaggggcccactgacgatgggggctg

SEQ ID NO: 9677 - DNA, 122 bp, Homo sapiens
gttccagtctccaagagtccctgttctttcgcttccagggcccacttcagcagtttcttccggacccggacaccctcagggcggcgatcgggggtgaaacgcctcgggccgagcccctgggt

SEQ ID NO: 9678 - DNA, 122 bp, Homo sapiens
gctggcggggaccctgcaggccgggccgaggtgcggtgaggcctcctcccgacctggccgcgtcctcagagttcgctcggggcttcgtgtttgcagagcagcctcccgcctgcccggcttgc

SEQ ID NO: 9679 - DNA, 122 bp, Homo sapiens
aggcagcccgcttaaattgaccttcaggtcttcattcattttaacccctgtcctcttcaacgaaaagacaggctttttaatgtttaaatacagcagggtgacaatccaagatcatgcaaaaa

SEQ ID NO: 9680 - DNA, 122 bp, Homo sapiens
ttgaaggacaggcaggcgagggtactccagggaacagctaagcaaaggcggcgaagaccccgggggaagaggtctagactggcttggattcagggtccacctgggtgggaggtgaggcagca

SEQ ID NO: 9681 - DNA, 122 bp, Homo sapiens
tgtattcgaaacatagcgagactgggtttcgctgtgttgcccaggctggtctgacctccccggctcaaagcggtccaccctcctcagcgtttcaaagtactgggattacaggcgtgagccac

SEQ ID NO: 9682 - DNA, 122 bp, Homo sapiens
aggtgagtttccaaacggagggggtgggtgagtgactaaaggcctgaagaccggcccagacgagtttcccagtgggcgtcccctggctgctctgacagccacaataggaactcagtccagaa

SEQ ID NO: 9683 - DNA, 122 bp, Homo sapiens
tctctccccatctggcaaactcatccagtggaggtgggccagccctggtgtccccacttacgagcacggtgaccctgagtaagcctcccaccctctctgggccccatcccctccccgacgtc

SEQ ID NO: 9684 - DNA, 122 bp, Homo sapiens
ccttctttagacgatgcatctttcctctgggataacgctgggagtgaggctggggcttggcgggtagcttgggcccctggctctaaccgcgtgtatcccctccctaactcttccctggtgcc

SEQ ID NO: 9685 - DNA, 122 bp, Homo sapiens
cccggcggagagactacaactcccggagtgctctgggaacggagccacgggagctacaggcggagggacccgagggcgggctttccgggtgtgtgtttccggcgtcggcggccgcggccggg

SEQ ID NO: 9686 - DNA, 122 bp, Homo sapiens
tgagacgctgctgcggcagcatgaggctgagctgctcagggtcatcaagatcaaggacaacgagaaccagcggctgcaggcactgctcagtgccctgcgtgatggcggccccgaaaaggtca

SEQ ID NO: 9687 - DNA, 122 bp, Homo sapiens
catgcagggagtcccaggcctttagttgtagcgtgcagaagagcccaattcttcctcactcgcgagcaggaggacctttcacggggccgacgtacagagggccaggccccggtggcagatgt

SEQ ID NO: 9688 - DNA, 122 bp, Homo sapiens
attccctcatctgtaaactggaataataatagcgcccacctcacagagctgttctgagaacgaaattacataccctatgtacaatacctagaatactgccagatatttagtaggtgtctgat

SEQ ID NO: 9689 - DNA, 122 bp, Homo sapiens
taagtactttcgcagccccctccaccagctctgggatgacttctggcccacgtctcatggcggtgcctttgtgcttctaaccctgtgactgtgggttcacgtcaggtgtgtacgtccctggt

SEQ ID NO: 9690 - DNA, 122 bp, Homo sapiens
gtttccaggcagcgcgcgcctcctgccggcgcgcggggaacgcgcagcctgcggtgctcccgggagcccccaggaagtcctggcttgaggcccggtcttgccccacttttatctcaccaagt

SEQ ID NO: 9691 - DNA, 122 bp, Homo sapiens
tggcctcatgatccacctgcctcggtctcccaaactactgggattacagatgtgagccaccgcacctggccctgaaatcttaaagggagataggtactgtaaggtcctctaaagagtgtctt

SEQ ID NO: 9692 - DNA, 122 bp, Homo sapiens
gactgcgcgcttctaattcctcctaccccacatgctgtgcccaatgaaaagtatggtcagcgagcgaaggtttgcaaggagacagacgagggcgaaattaagccaggcggcttccctttaaa

SEQ ID NO: 9693 - DNA, 122 bp, Homo sapiens
caggggccccagcctcctggcctccacgcctgcgcggctagcggatgaggacgttaatctcggccacactggcctccagcacgttctcggccgtggtcttgccgtgttgctccttgaggtgc

SEQ ID NO: 9694 - DNA, 122 bp, Homo sapiens
gcagcaaggttggacgtatggggccaagaagcctcgctgccagcactaaagatggcgcgccggagtgggggtgggggtgttgggggaggcggggcgtgcgcgcgttctgattggccgaccgg

SEQ ID NO: 9695 - DNA, 122 bp, Homo sapiens
gcccgtcactccaccacggcaggtgaagctgccattttaaaacgatgacaagaaaacctgcgctgctcagcatcccattttgggtcacaggaatgaccccaatctggcctagaccaaaggag

SEQ ID NO: 9696 - DNA, 122 bp, Homo sapiens
ccggtagcaagagaggagcgcagcctgctaagcctagcgggccgggcaaaaggagcccagcggcgcaagcaatactcacacagagatgctgcagcccacacagctttctggctggcacagtg

SEQ ID NO: 9697 - DNA, 122 bp, Homo sapiens
cttggcagggacggaactcctattcagcagtttttgtggaaagcagtaatgcttgcaaaacgtgtgtgtcattcagcattttaagtggagactatgcatttcatagtatatttgacagatta

SEQ ID NO: 9698 - DNA, 122 bp, Homo sapiens
agcttccggtctttattgtttcgtccccggcggttcttacaacaaatcgctgcgcaatagcggggcatgactcgggtgaggcccctggagaccggggccggcgacggatgcagggcggccct

SEQ ID NO: 9699 - DNA, 122 bp, Homo sapiens
gttctgagataacttcccagaattttctgcagcagggccgtacatcagcaggatggcccccgcacctgtcgaaggtagcaaagtaggtgggttctgggacagtcccttgtagatttctgaaa

SEQ ID NO: 9700 - DNA, 122 bp, Homo sapiens
agcagctgctggcccaggtgctaagcccctcactgcccagggccggcagggatggcggggcggctggctgctctgagtgcgggacacgccgaacccatgcccacccggaactcgcgctggcc

SEQ ID NO: 9701 - DNA, 122 bp, Homo sapiens
gacgggggtttcaccttcttggccaggctggtcttgaactcctgacctcatgatccaccgcgcccagcctacatcataaatcttctaaatggtctgcctactgtgatctttctctcctccaa

SEQ ID NO: 9702 - DNA, 122 bp, Homo sapiens
gatgaaagccaaggtcatgagctcggtaataccagtagtctgaatccctctggagaaccacggcccctgcccaggccactgctacagctgtcccctggaagacagaggcctcaggttagcct

SEQ ID NO: 9703 - DNA, 122 bp, Homo sapiens
ccctgcgacagctctgaaggctcgagtccctgcagagcgtggacaccagccgtcttctcccgcccacggcgttacacccgtctcggctgctccgaagagacccctcgctgccatcgcagaaa

SEQ ID NO: 9704 - DNA, 122 bp, Homo sapiens
ctccggccttccatcaagatggctggggagaaggggaccagcccaggcagaaaccctcgccgaggtctttgaggtcgttctgagctcagtctaaacgcagccatactcagattcaattaacg

SEQ ID NO: 9705 - DNA, 122 bp, Homo sapiens
gcctcaagtgatccacccgcatcagcctcccagagtgttgggattacaggcgtgagccaccgtgcctggcccattttatgggatattatgcagctgtttttttgttttgttttgttttttaa

SEQ ID NO: 9706 - DNA, 122 bp, Homo sapiens
cagcctggtgattacctccaaaaagagagtaaaaggtgattagggctttacctcaatctgcgctgtaattcttaaattcagagtaatgggttcccaggtatatcatgttagctgtatttttt

SEQ ID NO: 9707 - DNA, 122 bp, Homo sapiens
acccagctctgtaaggggccggggcgcgggcccagtacaggtctgcgcgcccgcagtctccgaacgctcacaggaccaggccccgcccgccaccccgcgccagcccccgcccgccaccccgc

SEQ ID NO: 9708 - DNA, 122 bp, Homo sapiens
aagccagcccttgtgctgtccctgaatctgcatgtagcctgtgggaggcggagcagtgaccggcaggaattctgggcagctcaggcacctgtgggcctgagggtgccctctgcccccaccct

SEQ ID NO: 9709 - DNA, 122 bp, Homo sapiens
catggctttttgcccgccgcggctttgtgcccccccagcgccagggcttttagcccgccgcggcgttttgacccctcgccgctgcgaattttgccaccgcggctttttgccccccgccgctt

SEQ ID NO: 9710 - DNA, 122 bp, Homo sapiens
atctatgagtcattgtgataggtttctggattcagacacacctaagtcaccagaggcccccgcttttgacacacagcaaacccaggcagagagctcagggttgaaattttctagccagccag

SEQ ID NO: 9711 - DNA, 122 bp, Homo sapiens
cgtcctgccccgaaggagaacacaagagtggggcacgtgatccgaggccctcatgggggccggtggctgcagcctttactgtgctattgaaatgaaatagttaagagtcaaattaaaagata

SEQ ID NO: 9712 - DNA, 122 bp, Homo sapiens
aagggctctgccttacctgacgctgtaggaggcatggaggatgcccaggctgtgaggctccggggcggtggcaggagccccctccagggagctctgggagcctctgtttacttggagaccca

SEQ ID NO: 9713 - DNA, 122 bp, Homo sapiens
gtatatatatatatgcattattctcaatagccaaaatgtgtaagcaacccaggtggccatcgacagatgaatggataaataaaatgtggtccatccatcaaatggattattattcagcctca

SEQ ID NO: 9714 - DNA, 122 bp, Homo sapiens
atccggctgcgggaccctctcctcaccctcacagcacactccgttctaggaaccccactccgtctccactctccggaagcctgctcgcccagacctccatgtagcggcatctaaaggctggg

SEQ ID NO: 9715 - DNA, 122 bp, Homo sapiens
gtccaacgctcctgccagctccgctcctctagtccaagtcctttaggtcctgtctggccacgtcaccacctccccgcaacaccccgcccgggagtccctttccgggacccgccacactatcg

SEQ ID NO: 9716 - DNA, 122 bp, Homo sapiens
aataattgctgaagattcggggggcctggggtgggggtcgggagtgctggattgtgtacgcgtctgtgtgtgtctactaaggagacggaatgtctgttatgtatctggagatagggcgactt

SEQ ID NO: 9717 - DNA, 122 bp, Homo sapiens
gccctaaatcctttgtgatgccgcccacaagcagcgtgcgctgacacaaagcaacgccgccggccactgctgcctgcagacaagaggccgactcttgtcctcgtctcgggtcccaagaacgg

SEQ ID NO: 9718 - DNA, 122 bp, Homo sapiens
aatctctcgctggcagagatctgcaagcagctacaagccagcggctcacctgcagcaaaacgcctggaggcaggtccatgcaatgcccacgtcttgcatgtcattgtgcagttaaacagctc

SEQ ID NO: 9719 - DNA, 122 bp, Homo sapiens
tgtcatttaggagaaagtttgtttcctacagagactgcagttggcagctgcagccccagtcggttgcgagaaaagctccccacctggggaagcgaggccgctcccgtgtgcgctcggcgggg

SEQ ID NO: 9720 - DNA, 122 bp, Homo sapiens
acctgatgtctgcttaagctacctgctagactgagactttctgcgaagccggcgtgtctgcgagcagcactcgctaaggctctgcgtttaacagacactacctttgggaaggcgcttatcac

SEQ ID NO: 9721 - DNA, 122 bp, Homo sapiens
gggggacggggtggggaggacgtccctctgcagagggagctttgcaagtgacagtcactgcggattttgcaggcgtaaacattaagccggcatgccagcgggcaggggccgccttcgatttt

SEQ ID NO: 9722 - DNA, 122 bp, Homo sapiens
gctgagcattgcctgcgcctccgctcccagctcctctctctggggctctcctcctcccggcgtccgcatccaccgtaggaggaaatgaatgccttgcggtcttagtgcccgcacgtttgtcc

SEQ ID NO: 9723 - DNA, 122 bp, Homo sapiens
ttgcgggacggttggggagcgtcagttctcgcagccatggaaacgggttagccgcgcctgcgcagtgcggcctgggccccgcccctggaggtggctcgcgcctaaatccgggcgggtctcta

SEQ ID NO: 9724 - DNA, 122 bp, Homo sapiens
cgtcatggaccgggtccagaagagcaagctgtcgctctacaagaaggccatggaggtgagcgccagggcctggggccgcggccttccctcgaggagcagcgcaggtctcagggtgcgatcct

SEQ ID NO: 9725 - DNA, 122 bp, Homo sapiens
gacgctatttttaggcgtgtgagtcatcacagtgttccctgacaagagccagccccagcacgtgcacgacacccacagcgatgggctcgtggaaaacaagctcagcccggctcacggtgccc

SEQ ID NO: 9726 - DNA, 122 bp, Homo sapiens
ctttagaaaatagaaaacttcaaaataggtttcatccacattcctcctgcctgagaagctcgttcccttcttcaaatctttgctcaaatgtcacctcaatgaggcccacctggaccccttaa

SEQ ID NO: 9727 - DNA, 122 bp, Homo sapiens
aaccatcatgaggttagatactacatcccccctttttacagatgggcaggaaaggttacgcggcttgcagagttagttggtaaaataccagagccaggactggagcccaggtctgcaggact

SEQ ID NO: 9728 - DNA, 122 bp, Homo sapiens
ttttttttctgatgttgggctattttaagccacgctgcagggggtacccatgggcaccatcggtgtgtcctgtggggagtatttctaggtgcagagtgttagagtcactcactgggtcctga

SEQ ID NO: 9729 - DNA, 122 bp, Homo sapiens
tgaaggtgggtgctgggttccgctttggtggggagacctgttgcctacagcacccacccccgcccgacgcccccgcatgtccgtttatgtcaactctgcctttatcaatgtcttgcctcccg

SEQ ID NO: 9730 - DNA, 122 bp, Homo sapiens
cagtatgggtttttatccatccagtggttccaagacagtggctgtgatgaacggagttgccgcgagtctcgtggcatttggaccctgcaccgctcgagattcactgcgctgcacaccagggc

SEQ ID NO: 9731 - DNA, 122 bp, Homo sapiens
gggtccggccgtggggggccgagtgtgcgcgcgcgggcaggcgggggccgcacgggggtgcgtgacgtcaccggcattggttacacgacgttctagaactccgccccacgtgcgccggggag

SEQ ID NO: 9732 - DNA, 122 bp, Homo sapiens
gggcggtgccggcagcaccgccccctccctggccctgcccctagccccgccccgattcaccgctcaggcccaagcccagccccttgggctcgctgccttatgcagtcaccaaggttgaacat

SEQ ID NO: 9733 - DNA, 122 bp, Homo sapiens
tatttttttggtggagacggggtttcgctgtgttggccgggctggtctccagctcctaaccgcgagtgatctgccagcctcagcctcccgaagtgctggaattgcagacggagtctcgttca

SEQ ID NO: 9734 - DNA, 122 bp, Homo sapiens
cactgttttttatcctttactttgtgtgtctctcgatgtagcttctgtggtttttctactcgtatcttaattattgacatgcctcagctttggtcatgggctctctttctcctctcaatttg

SEQ ID NO: 9735 - DNA, 122 bp, Homo sapiens
ctaagaagaaccctaggaggatcctagggtatgagaagagccatgcaggatccagccatccggctgggtaactttttagtttctaagcttccttggtatgtggggaagagaaaattaggaag

SEQ ID NO: 9736 - DNA, 122 bp, Homo sapiens
atccccgttagtgagagtaatccagtgattttaaaaaagagaagtcaaactgaaatgcagcgtagtcacggcacaattaccctggaatagccacttcacatggaatgactgaggagcctttc

SEQ ID NO: 9737 - DNA, 122 bp, Homo sapiens
tgttgatatgaagcaaagcactatgggaggaacatgctaatagacttaattcagagactgcgaagggcttttgagagaaaagggatcaaaatcagggttctgttcacttggctccagattca

SEQ ID NO: 9738 - DNA, 122 bp, Homo sapiens
agagctaaggccaagcctcttgcaaggcggccagcgcacccctcctgcgcctgggacacccgcaccccgtgcccttggcctcaggagcctgaggggcggcctccaggctctgaaggcaggtc

SEQ ID NO: 9739 - DNA, 122 bp, Homo sapiens
tcagcatttcacaggcttctcctctattggtggaagagcagacgggagaggttggtagagcgctggggtattctaatgacagattcagaggggactgagccagggagcccagagcagaagac

SEQ ID NO: 9740 - DNA, 122 bp, Homo sapiens
cctcacagcaaaccctccgtggccacagcctgccctggccactcatgtctgaaaggtgatcggtgtccatgaagaagaggccatggggctgtggatgtcatgtggccaactgttagtggcct

SEQ ID NO: 9741 - DNA, 122 bp, Homo sapiens
ctgagtcccggattgcagatagggtgtgggagctcctcgcatttaccggttttcctcagccggcgcggcctctcctaggcctcgcccgagtagccataggccgggaaccagcggctcgccgg

SEQ ID NO: 9742 - DNA, 122 bp, Homo sapiens
actgcccgatgtcctgaccctggggaacacagcagcacttggggggagtttgaaggctttcgggaatcttcagccaagtctggacaattctcacagtcccttgaactcctcgagggacccac

SEQ ID NO: 9743 - DNA, 122 bp, Homo sapiens
tgttgccaaaatggcgacaaaaaagagaagttggcatgaactacaaagtccgaaatccagcgcctgtgctgacggaaatgaggaaagcataattgtagtttagcgtgaaatggcgcggtgta

SEQ ID NO: 9744 - DNA, 122 bp, Homo sapiens
cgcagagcaaagtccagtctcctctcctgggcgtccgtggcacccccccgctctgcccggcgcaccctctgcacactcctgcctccaggcctcgacacagcggctccctccacccagcaggc

SEQ ID NO: 9745 - DNA, 122 bp, Homo sapiens
accaacaactgcccgttcaggtcaaggtccccatctacaggagaaagggatgtgttctgtcgtaaccaagaaggaaatacacgcaggttcaggtcaaggtccccgtccacaggagaaaggga

SEQ ID NO: 9746 - DNA, 122 bp, Homo sapiens
tctatacctgatgaggaaactcagtgtttaagtgaaatcaagttcactctgctagttcgtcgaacacagagctggttctggaatgttgatagtggttaagttttatttctccaatgcttaag

SEQ ID NO: 9747 - DNA, 122 bp, Homo sapiens
ttcacctgacgcggcccctcgctcggcgcccccgaggccgccggctcgccgccccacgcccgcttcgtgcgctcagctgccccgggacccgcctgcctcctcgcgaacttgggacgagttgg

SEQ ID NO: 9748 - DNA, 122 bp, Homo sapiens
gggcagtcggcttctccgttcatcctccagctgtccagccacctcctcggtcgtgctggccgggcaacccggggtcaaagccacctcaccctttggaagacataccagttcccactcaggaa

SEQ ID NO: 9749 - DNA, 122 bp, Homo sapiens
actttgcacgtgtcaagcaaggtttggcctgctttgaagacagtaatttcagagccactccggtctctgcgtcacaagcgggcatcagggcagtggtggggcggcaggggatcctgagacct

SEQ ID NO: 9750 - DNA, 122 bp, Homo sapiens
aaacgtggcaccgagggcagggagccaggtgcaagaggttgccccccgtgtgactccgtccgcatgcaaggaacagaagaggcaagtccacgggggcaggaagtggattcgtggatgcaggg

SEQ ID NO: 9751 - DNA, 122 bp, Homo sapiens
ccggctaatttttctatttttagtagagacagggtttcaccatattggccaggctggtctcgaactcctgacctgaggtgatccacccaatgagggatgattttaataaggtagatgatacc

SEQ ID NO: 9752 - DNA, 122 bp, Homo sapiens
acaaaacccaaagaaataaataaaaaacaaaatggctaaatagtttaaaataggttaattcgaacacaggaaaggatctatttgttgtttcttttgtctggtctcctgagttgttaattagg

SEQ ID NO: 9753 - DNA, 122 bp, Homo sapiens
catccgcagcaagctaatgggcctctcttcagagctcagggctgagagggtcagctctcccgctccgtgcacttaatgtccaaatgtctgatttactgggagaggcccaggacatctccctc

SEQ ID NO: 9754 - DNA, 122 bp, Homo sapiens
acgaaggcgagcccagagctggacacagatgaccctgaggagcagccccctcccccggggcgaggggacctgttcagctgttggcacagcattcacttggggccagggaagccactcatcac

SEQ ID NO: 9755 - DNA, 122 bp, Homo sapiens
atctcacatcgaatccataaaaggacttgaaaatccaaaattgaatgtgtgccaggcacccggatatgtacttcaccatggtccccttgatctttgcaacaatcctatgagcaggtgtgatt

SEQ ID NO: 9756 - DNA, 122 bp, Homo sapiens
ctcccaggattgcagggggtgtaccccctctgcgatattgtttgtaatatcaaaggtggacgatgatactactctcagtgtcgcaggtggtgtacaccctctgtgatattgttcataatact

SEQ ID NO: 9757 - DNA, 122 bp, Homo sapiens
ctctagcctgggctatagagccagacgctgtcacaaacaaaagatttattataataaccacgggcctaatgggagtatcaggagaggtgatctccctctccggactttgtatgcttttgcaa

SEQ ID NO: 9758 - DNA, 122 bp, Homo sapiens
tcctgctgcaatgatcctttcctggttcagcatttcttttcctttctttctttctttttgcgtttgtacccttaaagtttgaggatggcttgcggcaggtgaaggggaagcaagctgcactt

SEQ ID NO: 9759 - DNA, 122 bp, Homo sapiens
atagttccggcccacatggtatcagtgggtgtgtccctcccaaaaaaccctctcattggccgtgaagaaacagcttctaataggctgtgattttggggggtagttaaactccacgcctccag

SEQ ID NO: 9760 - DNA, 122 bp, Homo sapiens
gggctggagtagaagtgggaagcagattggtcacaaaattaatagcaatgagtgagtacccggcaaaatacccaggaaaggctgccaataggcaagactagaagtatggaagtctgccacca

SEQ ID NO: 9761 - DNA, 122 bp, Homo sapiens
ggctgtgcctgggagcccccagaggaggcgtaccctgtggccagactgcccgtgcgtggacggagcagagggctatcaggaagtcacgttcacttggctgtgattttagaaataagttttgt

SEQ ID NO: 9762 - DNA, 122 bp, Homo sapiens
tcccgaggctgcagcgctgcctgccgtacgcacaccagttgctaggcgcccggggcctcgcgcctcagttccatagggcaaggggcccagtgttagggttcagggccatgacgggtgcttgg

SEQ ID NO: 9763 - DNA, 122 bp, Homo sapiens
gacactgtatcaaaaacaaaacaaaacaaaacgagaaggcatcgcggctctgtaacactccgtccagctctcgcactctcagatgcaaacttccacacaaactcctcggctcgccttgtccc

SEQ ID NO: 9764 - DNA, 122 bp, Homo sapiens
aggttctgtgagcatgcgcagcagggccccttgatccacgctgagcttcaagaaagagtgcggagaaaaccgccctaagcccagacgtggaggggaattggagctgtgcaagtcaagaatta

SEQ ID NO: 9765 - DNA, 122 bp, Homo sapiens
tgctttcccgggttcttgctgacacttggtgtcattgtacttttttgcattttcccaacccgataggtgagacacagattctctttctctaattttcattttcctgatgactaggaaggttg

SEQ ID NO: 9766 - DNA, 122 bp, Homo sapiens
tgaactcctgacctcaggtgatccacctgcctcggcctcccaaagtgctaggattacaggcgtgagccaccctaccaggttagttggcttatttatttaagctggaatgttatgtatcttag

SEQ ID NO: 9767 - DNA, 122 bp, Homo sapiens
ggggacccccgtggagagcgacggtgagtctcacagggcctgctccccctccccactatgcgggtcccatctcctggctgggagaaaggccatccgcccaaaccatctctgagtgccaggga

SEQ ID NO: 9768 - DNA, 122 bp, Homo sapiens
ttttctctactttgtaatttattgatcagtttctgttgggagacgggtgtcctttacccgcgggaagggggcggggcttccctcccgggccgcatgcggggagaggctgctccctccccttt

SEQ ID NO: 9769 - DNA, 122 bp, Homo sapiens
gcatcttagctggtttcccctcaagcgagcaacaaaggcttctgtgctagcggcgcctttcgggatggggccccgacgcatgtgtggggctctggagtggaggcgcagaggggctgagagcc

SEQ ID NO: 9770 - DNA, 122 bp, Homo sapiens
cctatgttgtccgaaatagtgggccgcagggaaaatctcaaaataaaatgggaaatttgacgattagaactctcgaaagtctcaagacagagacttaggccattcggcaagacaggcgggag

SEQ ID NO: 9771 - DNA, 122 bp, Homo sapiens
atcaggtccgggcacagccgtttgcaaggctctgaagggctctgcagcctctcgtggtgacggtcccccagccatggtgctgagggccgttcgtgtccacacaccctccccagcatttaacg

SEQ ID NO: 9772 - DNA, 122 bp, Homo sapiens
ggccatcttttgttgcgtgcctacactgtcgatgtcaggctggggacacacaggaccgaccgagcatggtgagatctagaatttatgcctcattcagttaatgttctttagatatttgttca

SEQ ID NO: 9773 - DNA, 122 bp, Homo sapiens
atttatcgtttacctgaaattcacatttaggtgggtatcctgcattttatctgacaaatccgggaaccctatttgcatatgctatcctctttgcgtcactcaaattgcccataatataacaa

SEQ ID NO: 9774 - DNA, 122 bp, Homo sapiens
acttgcagaaagcagaaccacctcccgcccccacctcgcctccagccgccggggttcaggcgtttgtgaaagacagaacctttgggctagggacccgggcactggtgcttcgaagtccgaat

SEQ ID NO: 9775 - DNA, 122 bp, Homo sapiens
gggcgcggaatccgggctgccgggtgacagtgaccagctgactctggagcctaccggaggcgcggcatcggaggccgtgcggaccactgccgaacagccgctggagacccgcagagaagggc

SEQ ID NO: 9776 - DNA, 122 bp, Homo sapiens
tgcacgagcagtccctggggtctgtagtggcctctggagagcccttctccccaggccaggcgggaaggcccccgctccggcctggttgaagtaggggaacgggtcccaacgcggggccgact

SEQ ID NO: 9777 - DNA, 122 bp, Homo sapiens
ttctagggacagcttccccaggatgcctttggctctgcagctgggagatccagcaacctccgggacacggcggggcaaagctgtgcacggggcacggggcaggggcgcgggctcccttcccc

SEQ ID NO: 9778 - DNA, 122 bp, Homo sapiens
cgggaaatgattgtcacaacggcggaccaataggcaacattagtatcactcttgaaggaccgttttccaattcagtttttttttttttgagggggagggactgaagagaggacagagggagg

SEQ ID NO: 9779 - DNA, 122 bp, Homo sapiens
gttagtatttttatcaaagtacttactgtcacagttgatctctgtgatttgaaaccctctcgtcgatagactgcagagatcttttcctagaggccactcaccagtcagaaacctttgtgttt

SEQ ID NO: 9780 - DNA, 122 bp, Homo sapiens
gatggcgtgcataccgtggaggatgcctccaggaagttggccgtcatggatagccagggccgagtctgggcacaggagatgctgctgcgagtgtctcccgaccatgtcacgctgctcgaccc

SEQ ID NO: 9781 - DNA, 122 bp, Homo sapiens
aagttacaggcctcaacccaggcctacagaatcaggaattcctgggggagggagaagaatcggggagcaatctgcaggtgattctgagacacgctaaggatctaaggatcaagaactctgtg

SEQ ID NO: 9782 - DNA, 122 bp, Homo sapiens
ctttttactagcaatatgaaagaccacgaccttacccttaaatttatttggcacctacagcgcatattccaagtaaagaccattaagttcaacttttaaagccttttaaactcagatacaaa

SEQ ID NO: 9783 - DNA, 122 bp, Homo sapiens
cggatttaaaggtcccgcggcctcgggccccgccccgccccggggcctcgagcgccaggccggcccggcgaaccccgcccaaggccaacaaggagccttgtccgcgcattccagcggcagaa

SEQ ID NO: 9784 - DNA, 122 bp, Homo sapiens
cagcaggctatagaatggggaatgctgattggttgggtcaggaataaaattatagggagtcgaagctgtcatcttatgctgagtcagtttctggagggggccacaagaccagatgagtcatt

SEQ ID NO: 9785 - DNA, 122 bp, Homo sapiens
aacactctccagtcccacctttattgcttttggtaacaataaaatcaaaataaacaggcacgcaaaacaaacgccaaacaaaaaatcggccgcgttacaatctactccctcggcattcccag

SEQ ID NO: 9786 - DNA, 122 bp, Homo sapiens
cacagccacgcgcacagcgaccgcgttaacacgccacccggcgctcccctttcttcccgccggacagatggtggttttacagtccttgcacaagtaccagccccgcctgcatgtggtggaag

SEQ ID NO: 9787 - DNA, 122 bp, Homo sapiens
cacatcgaggaggaatccaccatcaggtactcttggcaggatgaaatcgtgcaggggactcgaaggaggacacagaaggacggtgcagtgggcgagaaggttgtgaagcccttggatgtccc

SEQ ID NO: 9788 - DNA, 122 bp, Homo sapiens
tcgtcagtccgtgacacgccacgtgtgtgatgaggaggtgcttggagtggcactgctctgcgtgtggccacgcacttcgtttccattttcacacgtagttcagagctgggtgtccgacagag

SEQ ID NO: 9789 - DNA, 122 bp, Homo sapiens
aagtcctagagagaatttctccaaaatatttcctggatccccctgccaagggccctgtcccgcccttccagctcccaactggatgcctgcagacctctccccgggttccgaggctctggcct

SEQ ID NO: 9790 - DNA, 122 bp, Homo sapiens
caatgggaaaaaaattaaaagcaaaaggaatggaggtgccggggattgaacccggggcctcgtgcatgctaagcacgcgctctaccactgagctacacccccgtactgaaacggttctctcg

SEQ ID NO: 9791 - DNA, 122 bp, Homo sapiens
tctgctggagaggccatgctcccgatacactggcagggagcctggggacgggtgggggcacgtgagcatgctggcgaggctcggcgtgtttccagccagaagccgaaaggcctgactgtgca

SEQ ID NO: 9792 - DNA, 122 bp, Homo sapiens
ggcccctccccggggactgctctgccttttactaatttgtcctctcgcggaattggcccccggcctgcggagggaggggcggggagacaccgtgagtaagagatagtcagagaccgtgccgg

SEQ ID NO: 9793 - DNA, 122 bp, Homo sapiens
aaggtgccatctatgaaccaggactctggcccttaccagacacaaaacgggccgatgcctcgacttggactttccagcttctagaactgtgagaaatacatttctgttgtttatgtgccacc

SEQ ID NO: 9794 - DNA, 122 bp, Homo sapiens
ttcgatgtggcaacccccatcagccaggataatgatgaggcaggtacaatctatctagtacgcagcccccagactcccccctcccttcccacctccccatccaaccccccagctactctctg

SEQ ID NO: 9795 - DNA, 122 bp, Homo sapiens
gagttggtctgcacccctcactgtgcctgtggagaatgcgggagaagggaagtgtgtaaccgcatactttgagacagttttactctgcatgttcatgtcatgaatcctaagtgggtgaatga

SEQ ID NO: 9796 - DNA, 122 bp, Homo sapiens
cagaggagactcctggtcccctgtccggaccccgccccgaccaggtccagccccgcccaacggcaagttaagagccccccagtgccagacgctccagacagactgccactcttggggggcaa

SEQ ID NO: 9797 - DNA, 122 bp, Homo sapiens
atcaaagatgtcttaagctaagaacacagttgtctttctcagtgtgactcccgtttactgcgtatcaagctgcaggaagtccagctgatgtaaatagattaatatttaaaaagtaatacaga

SEQ ID NO: 9798 - DNA, 122 bp, Homo sapiens
ttacaggcgtgagccactgcacctggccaagaacaataaattttaaaagaaatgacaggacgaagaaaatctggctagggcagtaaaattttcaaggggagatctgtgtgggttgggggggc

SEQ ID NO: 9799 - DNA, 122 bp, Homo sapiens
cctgttttagtttatttaaaatagaccaagaactcaaaggtgctcatgaagcaatctgaacgcagaatcctagatatgtatggtttccctcgatcttttcttgctcccccaatgaatggaaa

SEQ ID NO: 9800 - DNA, 122 bp, Homo sapiens
cctgcgctccccttctccaccccctccggctgtgtgagaggtcagcagaggggcggtctgcggggacaacaatggcggggttctgggtcgggacagcaccgctggtcgctgccggacggcgt

SEQ ID NO: 9801 - DNA, 122 bp, Homo sapiens
cctggatcttcatgcctacagtgctgttctccttgcagacatttctgtagccaagagcatcgccgacgctccccagcaacatcgcagccttaaatttctccatcccaggaggcagctcctct

SEQ ID NO: 9802 - DNA, 122 bp, Homo sapiens
ctccctctcaaaaaaaaaaaaaaaaaagggggggggcaggtggcacctcctaatgggtggcgcccttagtttcccccaagaagagggaaatcaagtgaaggttctattgatgagctctattt

SEQ ID NO: 9803 - DNA, 122 bp, Homo sapiens
tgccgagtgaatcaagacagaaaattaccctagtgtgcagaaccttgttgaagaggtaaccgttgctagctttcaaggtgtttctgaaaaggaagctatcaccctccccaccaccctgcaaa

SEQ ID NO: 9804 - DNA, 122 bp, Homo sapiens
gatacattatgtaatttaagtcactaacacttgagggcaaaaaaacagaataaacacaaacgtgtgggataaggggatgctgaccccactgttagtgatcaccttggttggagacccaggtt

SEQ ID NO: 9805 - DNA, 122 bp, Homo sapiens
gggctgcgtcctgtgtgtcccttccaggatgtcacttgcatgaggttgtgggagcgtggccgctggcgtctgctctttcctctctgtgtcggaggctcatgcatggcacctgtgtctgcagc

SEQ ID NO: 9806 - DNA, 122 bp, Homo sapiens
gtccgaggctctggagccaagtccttgctcgttaacttacatcctgatcaggggaagaaacgcacataagaggagtgtgaatgtaccaggagagccatgtgatcgcacacaagagtgcctgg

SEQ ID NO: 9807 - DNA, 122 bp, Homo sapiens
ttaagctgttcacattattgtgttataaaaccagcacaccaaggctttttatgtttttatcgtgtgtggaaatgaagaaaatggctaggcaaacctacagtaggcagaacacaaatagctgg

SEQ ID NO: 9808 - DNA, 122 bp, Homo sapiens
gcacaccccccacaaagggccggggccggggtgggagtcggcttacagggcacagcgcggcgcaggcccgccctggaatggccgtgaacttgttgtttttccacgtcatttgctctcaaatg

SEQ ID NO: 9809 - DNA, 122 bp, Homo sapiens
gggtctaccccggccccacctaacctctcggtgcccggccttctaagcccccgtggggggcgtgtgcataaactcacctcagaacccacctcgcctgtcatgacttctgcctcccctgcgct

SEQ ID NO: 9810 - DNA, 122 bp, Homo sapiens
aacaattgagctccctgggagtcggagaaaccagacctatggtttccatggtgacagatccggctagtccggactcctggctctttatactgcgcaagcgcactgcgcaagcgcacacaact

SEQ ID NO: 9811 - DNA, 122 bp, Homo sapiens
cagcagcaaccacttccgaggtggaggcggcggtggaggcggcggcaatttcagaggcggcggcaggggaggatttggacgagggggtggccgcggaggctttaacaaaggccaagaccaag

SEQ ID NO: 9812 - DNA, 122 bp, Homo sapiens
cgactccgaagatttattttcagaaccatccttccagcacactccctctcccctctagcccgcacacagaggctgggcttagccttggggaagatctgcctttggactctcacacccctgtt

SEQ ID NO: 9813 - DNA, 122 bp, Homo sapiens
agtggctccggcctcggaagctctctgcatggcctttccgtgccaaggctgcatggctggcgctttctgttccccgaaagaagaatccgtttcaggaaaaggccgcaagaggaagagccagc

SEQ ID NO: 9814 - DNA, 122 bp, Homo sapiens
ggtcaatctaaaggattcttactattattggacaaaagacgagtcaatcacgcaaatggacggaacagaggtgaatctaggaatatccccgcccatagaaagtactgattggagaaacattt

SEQ ID NO: 9815 - DNA, 122 bp, Homo sapiens
caaacaattagggatctaaaaggattggtgtggaggccagagggctccggtccccgcgctcgctcccccgcgcaggcgtgggcaggcagtcgcggccactgtgccttcctgccctcttccca

SEQ ID NO: 9816 - DNA, 122 bp, Homo sapiens
aggacccacagaccggcactttcaaccaaacagagacactccggctcgtacacaaccagccgtgtggcttcctcagttgtgggctggaccctaggagcttaggggccactgtcagccccact

SEQ ID NO: 9817 - DNA, 122 bp, Homo sapiens
ttcactgcgtgggaaataccttgacagaaaacagtgagatggatcaaactattctgcccccgagtttattgtatacacccactagtttcatgcttggcatcaggaccttctttgaaaggtcc

SEQ ID NO: 9818 - DNA, 122 bp, Homo sapiens
ggggctctcctagaagagtaaccattccatttggttccccacctggagccaaagggccaacgaaatcccacccaggcttccttcccgagtccctcaagtactacctctgtttagcctctggc

SEQ ID NO: 9819 - DNA, 122 bp, Homo sapiens
ccgtgtgtgtcctcggtgacaggcatttgcaaagcacacacgtgatctcatccactcctccggtggcctgtgaggtacttactgttatccccgttgcacagattagcagcctaaggcacagg

SEQ ID NO: 9820 - DNA, 122 bp, Homo sapiens
gtacatgggtgtggatccacttatacgtgggtttggtctgcctgggagctattcctggtgcgtgattatcaagctaatagccattaaaaatctactaatcagctccatcccagaacttgctt

SEQ ID NO: 9821 - DNA, 122 bp, Homo sapiens
ctcttcctttcccaggctcctaagtgtcctggaaatgcaggtggctgcagcacatggctacggatggtgggaggaagaggaccctggaacaggaacgggaggtgggaagggcatgctcacca

SEQ ID NO: 9822 - DNA, 122 bp, Homo sapiens
cactagcactaagagggatgcgcaaagcaggcggggcgttggagttcagatgttcgctcccgggataggctgccccggagagggagaggcggggtcggctgtatcacgtggatctgctcccg

SEQ ID NO: 9823 - DNA, 122 bp, Homo sapiens
aaagtctttcacgttagcacagattttaggcatctcgtgttcaggaggttggatctgagacgtgttttgagttggtcatagtgaaggacgctaggtgtaaattctagtgagaacaatttcca

SEQ ID NO: 9824 - DNA, 122 bp, Homo sapiens
ttcaatgtcttcggtcacatggaagtggagcccctgagtgggacacatgtggtgtaaatgcgtactgcaactcagatgccagacttcagccttgctcggtggctaagggcatttttgcagtc

SEQ ID NO: 9825 - DNA, 122 bp, Homo sapiens
cactgctgcaggcgagaagaggcacgcgcggcacaggccggcctccgcttcccgggaagacggcgcactcctggccctgggttcttgctgctgcccaccctctgctccctgggatgggcccc

SEQ ID NO: 9826 - DNA, 122 bp, Homo sapiens
caataagtgtggtctagttggcctggctgccttgactacatatttgctgatgtgacagctcggtgatcactttctcttgaacaagactctgagccatgttgttcaaccttaatgtgggaatc

SEQ ID NO: 9827 - DNA, 122 bp, Homo sapiens
tgactcagagggcctaggtctctaccttccacttaggaatcaagccagaagctcctgaagcggaggtttgcccaaaaaaaagagtagtcagcgatagtcctctctgaatcataatttgataa

SEQ ID NO: 9828 - DNA, 122 bp, Homo sapiens
cagggaccggggaaaagtgtgtggtaggcgcgcgcggcgcaccgtggggttgggaccgggcggcgctgcgggccgcggtggggccggaaatgtcaggcggtccccactccgctctcggcgcc

SEQ ID NO: 9829 - DNA, 122 bp, Homo sapiens
ggtcaaggatagagcgattgcctcacactgctgctttggccgtttgtggggagcttggggcgggggagggtgcaggggagagtagggaggacagggccaggcgagggatggaggggagagaa

SEQ ID NO: 9830 - DNA, 122 bp, Homo sapiens
gagattacaggtgtgagtcatcatgcccagccaacaggttactcttgagagtacaaacctcgcaacatcaccagcacaaaaatccccaactcaggcttggcatccagggaatgtgatctatg

SEQ ID NO: 9831 - DNA, 122 bp, Homo sapiens
agctcacagcttgggactgctgaggggcaggcggctgcaggctaggggcggctcggagtccgctggccacccagctgagaggagaggcgcccccggggacggtgagagccgggcccgccgat

SEQ ID NO: 9832 - DNA, 122 bp, Homo sapiens
gcccgggtcttccagccgcaccttctattaagacatgcgcttgggggtcgcggccctctgcgctgtgcgcggggcctgtgacatctccatgtgcaaaccccgctgcttagacgagcgcaggc

SEQ ID NO: 9833 - DNA, 122 bp, Homo sapiens
acattcctggtctcctgactcaaagctacattcccacctccacccaggcttcttgaaacccgaacaagatgcactgtctggggttgggtgaaatgatgccatcaaaatgagctaaatcacaa

SEQ ID NO: 9834 - DNA, 122 bp, Homo sapiens
aataatctttatgtgtaatacatgactatgactctgacagacaaacctgagagcatagtacgacacttatcaccttcactcatgagccagatagtgtgaaatgagaagcagagatttgaaat

SEQ ID NO: 9835 - DNA, 122 bp, Homo sapiens
gagcccggtcagcagtgcctgcgggagccgacgctgctccggcaggattgagtggaattccgcccaggccgggagctccctcgggctggggaggcctcggggacctggctatgatggtgatc

SEQ ID NO: 9836 - DNA, 122 bp, Homo sapiens
cctgagttggatgaaggtgtgcacccactgggcgtgggctgccgcctgctgtggagctgccgctgcccctcgtaccctacacaggctcctcctaaagccagacccgcagccttcccagcatg

SEQ ID NO: 9837 - DNA, 122 bp, Homo sapiens
tcaggcctggcagacactggtcgcagccacgcagggagatgacggccggtgctctcagggcggcctctgctcctgtttgcatcttgtagggtttggagcgagtcagtggctgagaaactctc

SEQ ID NO: 9838 - DNA, 122 bp, Homo sapiens
gtctgccagcgcccccagcagagcagggatatgggcccacgttggcctgatgaggacactcgcctggctaatgggctttccagcccccaaaggcagaccatgaacaggtgcaggcccggggc

SEQ ID NO: 9839 - DNA, 122 bp, Homo sapiens
ttcactataaaggacagaataccgcactggttagaagctcagattctttacttgtccttacgagcaactcttttaactgtagagatgtaaaggatgagaataagtattatcctagagatccc

SEQ ID NO: 9840 - DNA, 122 bp, Homo sapiens
aaatgctgtgcataaaacacttggagtagttcaggcacaagacaaacccacctgaatggacgaggaacactgtctgttgccatggcagcctgatctaattacatgagtgatcaggactggag

SEQ ID NO: 9841 - DNA, 122 bp, Homo sapiens
aggctgcaggtgcccattggtattgcggccgtgcgcccggcgggcatgaattagctgtgccgcctggctgctgacgggacgcctcgcctcgactgaaaactacctggagctgctcacccagg

SEQ ID NO: 9842 - DNA, 122 bp, Homo sapiens
ccttctaccagtagccagcaaacccaaatggtctggagtcagatatattgagccatgccacgttagaaaactaaaatcctctgcctcttacacagtgacagcaaaggcataagtaaaaaact

SEQ ID NO: 9843 - DNA, 122 bp, Homo sapiens
gtcaccgtgctgaggaatctccttctgagctcaacaagggcaacaaatgaccttcatgtccggctttgctccctgcagccatcgactttctggagaagatcctgacctttaaccccatggat

SEQ ID NO: 9844 - DNA, 122 bp, Homo sapiens
ctatactcatcacaaaaaccagaaagttgaattttggtaacctcatgggggacattccctcgcagagtttcaggatagtcagggttttactttttattgttattgttattgcagtagaaccc

SEQ ID NO: 9845 - DNA, 122 bp, Homo sapiens
aggctgaaagcaggtggatcacttgagtccatgagctggagaccagcctgggcaacatagcgagaccctgttgtacagaaactaactgggcgtggcagtgagcgcttgtagtcccagctact

SEQ ID NO: 9846 - DNA, 122 bp, Homo sapiens
gcgttcacaaatgatgctttgcctgggctaggttcagacttcagtacctaaaacgttatgcgtctgggcagtccccaagagctatcgaaaggccagccttgctcaccccattggaaccagca

SEQ ID NO: 9847 - DNA, 122 bp, Homo sapiens
aagagggccgccagctggtaagacactccgaggcaacgaccggtctccctctccctagcccggtgtgcagtctgacccagcccccacagcagaccacccccagaccgggcgcccgagtctgc

SEQ ID NO: 9848 - DNA, 122 bp, Homo sapiens
cccgatagagacttaacacagtgttagtaagaggcaaatgtctggccgtgtgatcctgggcgacttcctgggaactagacttgccaagttccaagctttaaacgttggctgggtcaaggcac

SEQ ID NO: 9849 - DNA, 122 bp, Homo sapiens
ggcgcgagcttgcacaggcacctactgctcactgagtgtcgtaagctgctcacgattgtgcgtcttccccgagcacctcagacatgggcagattgaaaaggggtgggcataaaaccaacatt

SEQ ID NO: 9850 - DNA, 122 bp, Homo sapiens
actgcaggctgagacagctccaaagacttattgctgactgggcctagcggggctatttctcgtaaaacaatgccagtgatgtgattataattggccaagagaatagttactacagatcccac

SEQ ID NO: 9851 - DNA, 122 bp, Homo sapiens
gttgtcattttgcttcttggaaggattttcaaaatggctgcagctcctcaagcaccggggcggggatctctccgtaagacgagacctctggttgtgaagacgtcgttgaacaacccatacat

SEQ ID NO: 9852 - DNA, 122 bp, Homo sapiens
gttccggcaacagagctccgcgcgcagcaccactgcgcagccccgccccagcccgccccccgctgccctgcggaccgcagggccctgttccaattcctatagattttctcttagtaaattgt

SEQ ID NO: 9853 - DNA, 122 bp, Homo sapiens
tatgggaagcgcgcccccgtcctcctgcgcccaaccaacccacctgctagtccctaggaccggactgctacttccgcatgacaggactgctacttccgcatcccaggacgaaatcaaactcc

SEQ ID NO: 9854 - DNA, 122 bp, Homo sapiens
accgccgtgcctgcaggtcctcaacacgcccaagggcatcctgttcttcctgtgtgcggccgcattcctgcaggggatgactgtgaatggcttcatcaacacagtcatcacctccctggagc

SEQ ID NO: 9855 - DNA, 122 bp, Homo sapiens
acaacctcttccagctcagaccagcccctgggctgggacacccgtgtggcacgtcgcccacgctgctataaaaggggtcccgcgcgacttccaaactcagcgccaacccgcagaaccaggaa

SEQ ID NO: 9856 - DNA, 122 bp, Homo sapiens
tccaacagtgatcacctgactcctctgggaatgcactacccagccagccttcttacccagcgcatgcttcatgccacaaccgcagggttggggtagaactgcctaagtaatgttggaagagg

SEQ ID NO: 9857 - DNA, 122 bp, Homo sapiens
ggctcatggctgaggcccccatctgttaaaaaaggcaggttaataagagaaaagcatacacgtttcatgtaagttttctgtgacctgggaactttcaggagtgaagacccaaagaaacaagg

SEQ ID NO: 9858 - DNA, 122 bp, Homo sapiens
gttcagcgccggactgcccccggctgcctcctgcccggagaagtgcgccctgtttaacagcgtctcctccagcctctgcaaacagtgcacggagaagccttaaacacacccccgaaaaacac

SEQ ID NO: 9859 - DNA, 122 bp, Homo sapiens
ttccatggactttaactgctgaaccaatgatgcactgattttgtcacttgtaccagctaacgcatctgggaggcaacaaaacaatactctcctgaggtaacatcgaatttttagtaaattca

SEQ ID NO: 9860 - DNA, 122 bp, Homo sapiens
caaagagggccagccgcagcagcagtaccagggccgccagcaggtgggtccagacattcacggcctcgttgtgctgctggaacagcgtgcggaaatagaagcgccaggtctgatgcagcggc

SEQ ID NO: 9861 - DNA, 122 bp, Homo sapiens
agcatgtacctcacatttttaacttctgtcaaagagtgggccctgctctcatgagttcagcgctcagtgggagccaggtcccaaaagtgaacttcagggtcacgcgagaagcacgtgtacgc

SEQ ID NO: 9862 - DNA, 122 bp, Homo sapiens
aaacatccgaggctggagtgagccacgcggaggaggaagaacagcccgagctcacaggggcggggaagagttctagctcgcgacagcccctgggaggaaccctgcactatttgtggcgtcga

SEQ ID NO: 9863 - DNA, 122 bp, Homo sapiens
gagcccagaacgctcctggcgcagcaccgttggcgttggccgattgctgctggtggggggcgggggtgcaggccccagtctctatgcaaatcagggatcagaagatcggaatttccaccaat

SEQ ID NO: 9864 - DNA, 122 bp, Homo sapiens
gggatagggtgtggggaattcggaccgctgtgaagtgatctgacgttgggtgggagtctccggacttggggtggggaatctggatgggaactggggaattcggaccttgggtggggatcttt

SEQ ID NO: 9865 - DNA, 122 bp, Homo sapiens
gtgcgagccgctgcgcagcagtctgcgcttcgagtgcgctgtgttttaaggaggccccggcgcttgccccttgggctcgggggcttgggtgcgcaggtgggggctggcacgcagcccgttgg

SEQ ID NO: 9866 - DNA, 122 bp, Homo sapiens
cccagaattatggagcctaagaggcagcacctctgctttctgaagaggaagccgtagtgccgtggacttcaccacgtgcacagtggctgcatccagacctgaatgcccctctcattactcac

SEQ ID NO: 9867 - DNA, 122 bp, Homo sapiens
cccggaatagcctgcttgacgcgactgctcgaatcgccgtaaagctacgcttttgcgcctcgccccttcacgacttgtagagctctttacggctctgcggaggccctgccggattctctggg

SEQ ID NO: 9868 - DNA, 122 bp, Homo sapiens
gcgtctttcgtgtgtcatgttactcattactcataacacgaacaaaacaagactgctgggcgaggtaaatatcgttagcttttctaaatgaagaagttgaacactatggcatctgatcgaga

SEQ ID NO: 9869 - DNA, 122 bp, Homo sapiens
gcggcgcgccgggacaggacgggaccggagccggggtcggggtagcagccaggcgggctccgggcgggacgaggctgggccgggctcgggcctccgccgccgcctcgcgcccgccggacctg

SEQ ID NO: 9870 - DNA, 122 bp, Homo sapiens
gtcccgatagatctgtggattcctggcacctagctgctcactctgagtctaatgaatgagcgcgtagaccgaatggctgggaagcagcaagtgattccaggctgctgggggaggacggcgga

SEQ ID NO: 9871 - DNA, 122 bp, Homo sapiens
cccggcccctcctccgcgccaactgtgtaaatcagccgccgcagtcctctcgccgcgcatcgcaggcaaaatcccggcttaggaagcaaggaagcaagtgatctctctctctctctctctct

SEQ ID NO: 9872 - DNA, 122 bp, Homo sapiens
gccggggagccgaactcggtgccagccgcacccgggcgggttgctggtgcgccctcccctcgcccccgtccctggggtccttgacccaggctcttggggctagcctatcttctgaggagcac

SEQ ID NO: 9873 - DNA, 122 bp, Homo sapiens
cacgtacgttcttcgtgaaagggatgacgggagctgtatgaaagcggaagagttatagaccgctaacacctgtcactggccactggtttcccggagttagcggcaacgaccttgcagcctgg

SEQ ID NO: 9874 - DNA, 122 bp, Homo sapiens
gatctcccacttcagtcagcatttggcgttgcttccaggagtcgtcgctgaaagtcagcgcgcattcactgctaccgggcttcagcagagaagctggagacaaggcagacgggaacccgcaa

SEQ ID NO: 9875 - DNA, 122 bp, Homo sapiens
cgcgggcgccggtgcatgtttacgtcggggcgcgggaactagcacacactggggcggggtcgccagggcgtgaggcttcagcaccacagacagcaatccgacagtccggtcgagggcgctgc

SEQ ID NO: 9876 - DNA, 122 bp, Homo sapiens
acagagatgaagggtggggagaatggcttcagggacaccactcatttatcaaatatgcaccgagcacagacagtgggatgggcaccgtgctaggcaccaggagacagcactcagggaggccc

SEQ ID NO: 9877 - DNA, 122 bp, Homo sapiens
ttaacttacgcaccacccattttatcccctgcagagatgctgcccccacccccttaggcccgagggatcaggagctatgggaccagaggccctgtcatctttactgctgctgctcttggtgg

SEQ ID NO: 9878 - DNA, 122 bp, Homo sapiens
tcaattagagttgctagccaatagattgaagctatgttggcacaatatcctacatcctcccgatctactggctgagcccaaccccacctaagaaggacaataaagatctgtgttcagagtca

SEQ ID NO: 9879 - DNA, 122 bp, Homo sapiens
taagtggtgctcaggtctttgcccagcctggtagggggcaggcggacccgaggggagctgcggacaggtgccgagacccggtgctcctttcccctcctgctccctcgaggacccccgcccct

SEQ ID NO: 9880 - DNA, 122 bp, Homo sapiens
gttaaaattaaaaaatggacctaaagtggcttggctgacgtggctagcgggccactgagccgcgggtcccgggtcccaccctgctgtggggggagtccctgggccctggggcctcttggcac

SEQ ID NO: 9881 - DNA, 122 bp, Homo sapiens
gcttccccatgctgataacgctggtgggggcgccgcgaggctgcgcgcggacaaaggcctcgaatgccaagcaagcgctcattgtgcgccaggacaaagcagcctggtaaggaggggcccct

SEQ ID NO: 9882 - DNA, 122 bp, Homo sapiens
ggcccttttgtgcagttccaccccgcaccgtagggggcaggagcagcccttcctcgctcgcggttttcgacgctgctttggtctctgtcagacccaaccaagtcagtataaaaggggggaat

SEQ ID NO: 9883 - DNA, 122 bp, Homo sapiens
ctcctcaaattaagcatattcccggaaaacaaagcctcccctctggacttcccaaatggtcggatggtaccaacatctatccgtcatccaattcaaaagattgcctcatctctgtctactcg

SEQ ID NO: 9884 - DNA, 122 bp, Homo sapiens
gttcggggcgacctgctgcttccgagtgttcctgggctgcgccttcttctcctacttgggcggccgcgccaagcgcagaggccgcgggcgctccggggccagaggcgccttcggctcgggcc

SEQ ID NO: 9885 - DNA, 122 bp, Homo sapiens
cgaaccctcgtcgacctgggctccatctcgctctgtcccagctgctgcctgcagaatcagcgagtcaggtctccctggcctcagtttccccactgggagcaagcaagtgaaagttcctcacc

SEQ ID NO: 9886 - DNA, 122 bp, Homo sapiens
gattttgatttaaattgtacagtaatctctcaggctgttatgtggagaataaagtaggtgcgcaaagatagatctgggagactaggtgtctactgcaatagttcaagcaagaaatgatagta

SEQ ID NO: 9887 - DNA, 122 bp, Homo sapiens
gaggccccgtcgcggcgccaggagcaaccgagtcacgagggaaaagagccgcaccggccgcgttagagccatgtttcccttagtgcgggagaagcgcacatcagtgacgtcacggacgcgcc

SEQ ID NO: 9888 - DNA, 122 bp, Homo sapiens
gacccaaaatgtaaaggctcaaacacagtaaaagtccctttcttgtacacatatcagtcccgagcattgtttggtcattcgagcacccaaattgatggaggctccaccatcttcaacatgtg

SEQ ID NO: 9889 - DNA, 122 bp, Homo sapiens
ggtgattcctgttagccatgggcctctctaaagctctccagagggactaaggcctgagatcggtttgttttcttgtgtgaaccaaaaagcatctgagacaggtctcaatcaacttagaagtt

SEQ ID NO: 9890 - DNA, 122 bp, Homo sapiens
atcagggaactgatagcaatgacaaaattaggtacccccgacactaacccgtgccttatccgtctcttgcatgtttaccttgaaggtcagaactgcagtgatcgttttgtccaaactatgca

SEQ ID NO: 9891 - DNA, 122 bp, Homo sapiens
cctaggcagtgtgtgtgtgtgtgtgtgtgtgtgtgtgtgtgtgtgtgtgtgtatggctatcgtaaacaggactgcattcttgatttggctctctgctccaacattattggtatagaaacgct

SEQ ID NO: 9892 - DNA, 122 bp, Homo sapiens
ctgctgtcccgcagatgccactcggtgattggccgcgtctgaagccgcgccccggcgtcgcgttgcagccttaggtccagccgagcgccgactcacgccccagccccaattgggcggccggt

SEQ ID NO: 9893 - DNA, 122 bp, Homo sapiens
gaggaggtggcgccctccggagggctgggcgggagccccgctggcacccagggagggggccgcgccccttaccacgaccccacccgcgactggttccccgggactccccagagcgcccgcct

SEQ ID NO: 9894 - DNA, 122 bp, Homo sapiens
gcggctgagaactccacgagggaagcccaggtcggagtggcagccggctaccatggggggcgggcgggcaggcggcccccacacgaccattagatgggtgtggcctgggatggctcctccca

SEQ ID NO: 9895 - DNA, 122 bp, Homo sapiens
tgtacctgcttgccatcatgggcaactgcaccattctctttattataaagacagagccctcgcttcatgagcccatgtattatttccttgccatgttggctgtctctgacatgggcctgtcc

SEQ ID NO: 9896 - DNA, 122 bp, Homo sapiens
ctttttccttgggggtggagggatctttcttagacatccgcttcattagggcagaggccccggctcgagcttcccctcaggaataaactcagaggcagaacctaaaatcaaaatgtttattg

SEQ ID NO: 9897 - DNA, 122 bp, Homo sapiens
gccgcctccctcctgcacctgcacctgcctccttcccggcagccgccgccgccgctgctgcgaagcttgaggttgcaaacccgggagcggctcacttttcaggactgagcaggaaagcgcgc

SEQ ID NO: 9898 - DNA, 122 bp, Homo sapiens
ctgtgagaggctcactctcctcaaagcctcggaccgagaccacggtcacctcatagcgagcgcctgggatcagcccctggagtttctgggtccgggcctggccatccacctgcacactctga

SEQ ID NO: 9899 - DNA, 122 bp, Homo sapiens
tggctcagacgctcatggtaaggctccgggacgcggcccttccctgccctgccctctccgcgcccgctccattaaagttctccatccagtggagagccctggctggctggccctctggcaga

SEQ ID NO: 9900 - DNA, 122 bp, Homo sapiens
aaccggcgagaagctcctgcttgccactgggctggatggcagctatttgctgagggacagcgagagcgtgccaggcgtgtactgcctatgtgtgctgtgagtatgatacggtggacatgggc

SEQ ID NO: 9901 - DNA, 122 bp, Homo sapiens
agtgccggaggcagaagcaagccttagccagaccaggaccaactctcaggacaatatggacgtggcccaccagcctcgtgcctgtctgaggctacttcagacaccctcctgcagcctccatt

SEQ ID NO: 9902 - DNA, 122 bp, Homo sapiens
aaggtacagccccaccccatcacgaacaggaagcccactggacagagctacatctgacaccgtagggccctccctttcggtatcttccaaacggctcattgtcgattaaataggaaatcatt

SEQ ID NO: 9903 - DNA, 122 bp, Homo sapiens
cgatctgcaaagtcaaggccgggtgaggtgcggcgcgggagaggagaggatatgaacggacgtggaacgaagttctgtctgccaactccctccgtctgattcttggaatccggtggcatctt

SEQ ID NO: 9904 - DNA, 122 bp, Homo sapiens
gcatcttccggtgtgcccaaaggctgacattctgtggcacaccaccatgcacagaccttccggcagaatcgaagcgtggatacaggcctagacggtcgcggtagaagatggtaatattctgg

SEQ ID NO: 9905 - DNA, 122 bp, Homo sapiens
gacaacagctcccagagtcccttattttgcgatgtgtcttgctaattgggaagttcaacacgaggctttccctgcccatacaaggctggtatttcagagcgggaggagcagatggaaggggt

SEQ ID NO: 9906 - DNA, 122 bp, Homo sapiens
ccccacagcggggaagcccaggggctcctgccccatgaatgttcactcactgggtgccagcgcctctcctccctccccagatctcccctccagaccacccgacaggcaccacagtggcccgc

SEQ ID NO: 9907 - DNA, 122 bp, Homo sapiens
ggcagtgcaggttcgtttacaccaacaacaccacaaacatttgagtaatgtgttacgccacgacattatgatgagtatgacatcactagatgaataggaacttttcagctctgttgtaatct

SEQ ID NO: 9908 - DNA, 122 bp, Homo sapiens
aaaccggcggccttttatgaccaggcctggggggctgagggcaggcaggtccgactcaaacgcttcctccaggaaactggtccctgctttcccagccgcttcctccaatcaccaacttaagc

SEQ ID NO: 9909 - DNA, 122 bp, Homo sapiens
gacttacttgcgccccctggtgtttcacatgctgtgaatctctcacgaccgaggtctggccgcgcgccacctctctgagggaaggacagggtcagtggccaggaaggggcccacttcagacg

SEQ ID NO: 9910 - DNA, 122 bp, Homo sapiens
gcggccgacgagccggcgctgtgcctgcagtgcgatatgaacgactgctatagccgcctgcggaggctggtgcccaccatcccgcccaacaagaaagtcagcaaagtggagatcctgcagca

SEQ ID NO: 9911 - DNA, 122 bp, Homo sapiens
atgaactgttttctgaccctgttagcagatttcagcttggatgtcaatctggaggtgaaacgttgacttggaataggaagtttcagtgcagtaaatggacacagaagataaactaggaaagg

SEQ ID NO: 9912 - DNA, 122 bp, Homo sapiens
taaggggtaagagattgtccgatgtaccaacacatcccctgtatttagcacagtggtattcgttgaatgtatgaataataatgactcaaaataacagttaacataaatagcgcttattattg

SEQ ID NO: 9913 - DNA, 122 bp, Homo sapiens
cacttataatcccagctatttgggagtctgtggtggcagggtcacttgagcccaggagttcgagaccagactgagcaacaaagggagaccctgtctctacaacaatgtaagtaaaaaaattt

SEQ ID NO: 9914 - DNA, 122 bp, Homo sapiens
tgctccatgttgcttacaatgttgactttctcctttaattctcattcagggagactgcttcgcaggggatctgttcatgatcctcaccttagtgtcaccaacagaggtggccgtgggtgctt

SEQ ID NO: 9915 - DNA, 122 bp, Homo sapiens
atggattcttggaggtttttgaaggcattccaggagtcatacagtcaattctcaatctcacgtgagcagccaacagagattaaagtgcagctgagagccaagctaactagggattcaaaatt

SEQ ID NO: 9916 - DNA, 122 bp, Homo sapiens
aacagaagttgaattccagcatcactggctagtgagacagtttgaactctttcctgtctacggttatttcgccttcctctccccgtaccccttttccatccctttgctctctcctatttaca

SEQ ID NO: 9917 - DNA, 122 bp, Homo sapiens
ggcagggctcgggatctggagcccgcctgcgcctcccccgccactccgtgggctcctgcgcggccagagcctccccgaggagcgctgccccctgctccagggcgcccagtcccattgaccac

SEQ ID NO: 9918 - DNA, 122 bp, Homo sapiens
agctgtgagccattgcgtctggctcacaaatgatttaaacagacagagcacaatccaaagcgaggattttccaggcaactcccaagccctggcccagaaaaactcacacataaaaaacactc

SEQ ID NO: 9919 - DNA, 122 bp, Homo sapiens
cggtgttgacagacaccaggtgcgacacgaggagtagtagttgagggtaagagcaaatcccggcactctccaggtgcagcggcaaacatgggcaggctggagcactctcctcaaagaggacc

SEQ ID NO: 9920 - DNA, 122 bp, Homo sapiens
gtgggtttgaactcacatctaggaacagaaaactaggcctagggaggccgcgcttccgtccgggagcagcgccgcagcccccaccttgtcttgggaagacagcctttgtgcagccttgggag

SEQ ID NO: 9921 - DNA, 122 bp, Homo sapiens
ggtgtgtgaggattacgtgaatccttgcagaatgtggctcagtgcctgggacatagtaagcgctctacggcttctgctagcataacgctgttagtttctctcatcctcctacatctacctat

SEQ ID NO: 9922 - DNA, 122 bp, Homo sapiens
taatggaacagaaacaagcaccctgctgcccttgttttccagtggctcaccggggctctgcgaggtttattaatcttagcgtataatggaaaatgtgttgccatgtgaaatctagagcctct

SEQ ID NO: 9923 - DNA, 122 bp, Homo sapiens
cctgggaggccggtggcgggagcctcccctacagtgaggtgggtggggggcgccacacggcgtctcagggagaggggagaggcggcttctgttccgggaagagggaacggtggaggccgccg

SEQ ID NO: 9924 - DNA, 122 bp, Homo sapiens
tcaggaccgtgcgggtgctgcggcccctccgcgccatcaaccgcgtgcctagtaagtgaccggccccgactgggcttgagatcaacaggcttgcgtgtccgccagccctgcagagctctcaa

SEQ ID NO: 9925 - DNA, 122 bp, Homo sapiens
gcacggccggccagccgctcggagtgcaggccagcccaatccatgcccacccggaactcgcgttggcccgcaagcactctgcgcagccccagttctgctcgcgcctctcgctccacacctcc

SEQ ID NO: 9926 - DNA, 122 bp, Homo sapiens
ctttcccagcaaccccaaattctggctgcgggtctcagaaccgagtgaggtgtacattgccgtcctgcagagatccaggctgcacgcggcggactgggcaggccgggcccgggcactggtgg

SEQ ID NO: 9927 - DNA, 122 bp, Homo sapiens
aatgcgctactgcgacacaaagcaaagcaaggtgggcaagcaacactagttctttattcccgcacgccctaatccccaagtagctcttccgggtcactgcagtcttcacgggctccagactc

SEQ ID NO: 9928 - DNA, 122 bp, Homo sapiens
agcccgagcctgacgggtatccagggtaaccgcgagggggcggagcttcgggttaggtcccggcgaggttcttcccgcagccaataacgagccgtaaatccccagcccattgttgtttattg

SEQ ID NO: 9929 - DNA, 122 bp, Homo sapiens
gttcacgcgtcaccggccctccccgaggaaatagaaagcaggtggcagctccagggtgtgcgcgagtcccatggtatgacagcttctggacccctagcctgtggaccattcgtgctgctccc

SEQ ID NO: 9930 - DNA, 122 bp, Homo sapiens
cacactgccttccaccagcaggtgtctctctagggcccactcgagagtgggagcgtaggccgcaggggctgcacgtctgtatcagatcaaccgaatggtttcccaagtgccccagcagcgtc

SEQ ID NO: 9931 - DNA, 122 bp, Homo sapiens
ggtgccgtgagaaagtggagatgagcagagtctggacgcatgcgcggggccgggaggtgccggccgcagcctgcgccgtctcctaatgcggaaatctgcacccagggcggaactcgccggtg

SEQ ID NO: 9932 - DNA, 122 bp, Homo sapiens
ccctcaagctgggccaggggactcctccaggactctaggcactttcagcatcgcttatcccggctctgtgtggtcatcgcatggttatgtgtcctgtatacagtagggacttcataaatgtt

SEQ ID NO: 9933 - DNA, 122 bp, Homo sapiens
tgaattcattccttccacagagacagtgggggtgataatgccggccaggtgctgtggatccgtcctgtctgtcccctgctgtgtttgtggaagtccctgcttccctgggtctctgtccttcc

SEQ ID NO: 9934 - DNA, 122 bp, Homo sapiens
cgcgaccattggccccgcgctcggaggtggtacggaccaaccctacggtcatagattttccgagtgaagcttttgactaagtctcaggaaagcgttagctacagaattctagattcaaaaga

SEQ ID NO: 9935 - DNA, 122 bp, Homo sapiens
ggataatgctctgcaggtaagcccggttcatcagcagggtgggttccaagtgccctttctcgcgtgccttgctctccgcggcttcccgctcctccgtctcccgcttgcagtaggaatacctg

SEQ ID NO: 9936 - DNA, 122 bp, Homo sapiens
cactcttcaggacgtcaggccatcattgccggtgcgacgggtgccgcgctcagctcagtgcggccaggtccttgttctaatctgtccggtgcccactaattacagtccctcggtcagcgcct

SEQ ID NO: 9937 - DNA, 122 bp, Homo sapiens
gcgcggggtagggggtcttcctaggttcaatttcccctaggagatgtgactttgctagtgcgaagatttctgtccggcatctgactcaggtcccccagacggcagctagggcccaatgcctc

SEQ ID NO: 9938 - DNA, 122 bp, Homo sapiens
gaggcggaggtgggcggatcacttgaggtcaggcgttccagaccagcctagccaacagagcgaaaccacgtctctactaaaaaaatataaaaattagccaggcgtggtggcacatgcctgta

SEQ ID NO: 9939 - DNA, 122 bp, Homo sapiens
caacgtgggacgaagcttcgcctactgtttgactacgtgcgtgcagcctcccctcgatgtcggccctcgaaaagagcatgcacctcggccgccttccctctcgcccacctctacccggcagc

SEQ ID NO: 9940 - DNA, 122 bp, Homo sapiens
tagagattaacaaacaacagagttaggcgagattctgggggctaggcccaaaagttcttccggatgaaaagtacaaatctaggccaggcgtggtggctcacgtctgtaatccaggcacattg

SEQ ID NO: 9941 - DNA, 122 bp, Homo sapiens
tgagggcctgtggggccggcaagggaggtagcggggagaacgggagaaccgcacccccggcgaggcctggtctggcttgagagccgtctctggctccagcagctgcagccagcccgcaagct

SEQ ID NO: 9942 - DNA, 122 bp, Homo sapiens
aggtgatacagagaggtccctatttcccatgggggtgtgggagagatgcacggtctcatccgtggctgctgggcttggtaaagcactttggagagaaatctgacagcatgcattcaagttaa

SEQ ID NO: 9943 - DNA, 122 bp, Homo sapiens
catgtggaaagtgcaatgtggccacaaacaggtggacatagtcactgttcagaccaccctcgtaaatattctctgcgatgatcttgctgacgaaatttttgccggtgcctgtccacccgtgc

SEQ ID NO: 9944 - DNA, 122 bp, Homo sapiens
ccaacagtcacacaagttgaacgaattcggcaaccacctcattactattcattgcccatgcggatattcaaacgcagcacacagctctatcgcggctccactccacgaaaagtcccaagtat

SEQ ID NO: 9945 - DNA, 122 bp, Homo sapiens
gcagggaaggggggaacggacgtcgaccctagggatccctcacccgctcacgctccttggcgttggccacacgccgccgctccagcaccaactggaggttttcagtggacgagtagccgccc

SEQ ID NO: 9946 - DNA, 122 bp, Homo sapiens
tttactcacaaatagcccggcagccgagggaccatttggagtaaggccatccctccagggcgttctgagaagtcactacagtcataaatgggagggtgacacccagagaccggcaacggcaa

SEQ ID NO: 9947 - DNA, 122 bp, Homo sapiens
caccagacaggtgaggctcctgcggctgtgtccagagcagctctcgttggccggctcgagcgctgagtacagaacggggagagaggagagacctatgtcctgtggtggctgtgtgtgggctc

SEQ ID NO: 9948 - DNA, 122 bp, Homo sapiens
ggtgaagccggcactaaaagacggacagccctacagagaccgccaatccccagaagcagccgaggcaaccgcgtccaccccctgccgggggcccttcctgcacagctcggggatcccagccc

SEQ ID NO: 9949 - DNA, 122 bp, Homo sapiens
cggtaccctgcagcttggctccaggcccaccttccagggctcccctcgaagcctcctgtccgctcagccccaggtgcggcatccgcaggtcccgtgggttccaccttcccagcgcctctgag

SEQ ID NO: 9950 - DNA, 122 bp, Homo sapiens
tccccagccacttagtgggttagtcaggccctgccttctcttcagccagccctgcagtcccgggaatgtcttgagtgagccctggaatctctgcacagggtgagtttcctgttgtacatgct

SEQ ID NO: 9951 - DNA, 122 bp, Homo sapiens
acttcaatgccctacatagaactccctctgatttgtacactcttcaatgacaggtgctcacggtccaggcaggaggtttatccatggatggtgtgacattgggaatgaggagggcagaggtg

SEQ ID NO: 9952 - DNA, 122 bp, Homo sapiens
ggaatgtgggtggtccattaaaaacctactatgcttgattcaacattctcttctcctatccgctagtttgaataacggattctggggccctcggaatgataaacctacaaagtaaaagttgt

SEQ ID NO: 9953 - DNA, 122 bp, Homo sapiens
atcccgtgtcccttttcttccctttcaagagaaatgggcaaaaggaaatacttattttttcgcatagatcaattatgttttttaaattttgtactgttaagtatgatagtactactcaatgt

SEQ ID NO: 9954 - DNA, 122 bp, Homo sapiens
ctcttcacttttaacaaagagtagcaaaatgtttttccttacgtagaggtgactggcacacgagcacaaatttaggcttttaagcattactgaaagaaatatctcaggggattttaatttct

SEQ ID NO: 9955 - DNA, 122 bp, Homo sapiens
atactttggttagctttggggttctgagtgcctggatggctttttccattcattctcaggcggctcgcttctacattgtgagccagggcctggggatggatttttttttttttttttgagat

SEQ ID NO: 9956 - DNA, 122 bp, Homo sapiens
acctccccccttctgcctggctgttatttcccagctgggtggtgtctccaagttatccagcgggtggaaaccgcagctcagctagtccctcttgcccggtgccctatcacaggaaaacaggc

SEQ ID NO: 9957 - DNA, 122 bp, Homo sapiens
ccctgtgcactgggaccctatgtagtgacaaggagaaattgttgaggctgagcagtttcacgacctcacataatgccagttcttacctgtggttgtctgtgaagaagattagaatgaaaaat

SEQ ID NO: 9958 - DNA, 122 bp, Homo sapiens
caggacatcctcacaaagcagacgtttcctccccacgggtctggaggctgggggtgggggcgccccgtggtccggctctggtgagggtcctcttcctggcagatcctgggaacccgcctgag

SEQ ID NO: 9959 - DNA, 122 bp, Homo sapiens
cttccaaaaggaaaggagtgcgtagctctgttgcctgtacatcgtccacagcccctggctcggggcagggtcccctaggccgcccgggggtccacatgcagcccctggggggccggcgcggg

SEQ ID NO: 9960 - DNA, 122 bp, Homo sapiens
aacactgcagccagtgacagcttttaaataagcagcattcatcaagggatagctgtaaaccggtccagaggagtggaaaactggagtggctgtgactgttgcctgggagctcacacccagat

SEQ ID NO: 9961 - DNA, 122 bp, Homo sapiens
tttacaatcgcatgcctcagccagcgcactgctctgtggcctttgtcctcttttaccaaacgaggagggtggattccacaatcctaaaaccccttcagctctccataggtttctgggaggac

SEQ ID NO: 9962 - DNA, 122 bp, Homo sapiens
gtggaggtgtgtccaggggctggggaagccgagacgggcactccctctgccggccggcagcgtggccctgagcatggcaagggggtctgtctctgccgatgctccttccgcggcactgactc

SEQ ID NO: 9963 - DNA, 122 bp, Homo sapiens
cggaggagtgatctttcagagcaagaagccaaagttcagcctctagtccgttcccttccccgcctcgacggccctggtcgtctccatgaaaactcagtgtgggggatcgtgcccgcgaaaac

SEQ ID NO: 9964 - DNA, 122 bp, Homo sapiens
cccaagcaaacctcccacctcagcctcccgagtatctgggatcacaggcatgtgccaccacgcctgactaatttaaaaaacttttttgtacagatggggtcttgctatgtggcccaggctgg

SEQ ID NO: 9965 - DNA, 122 bp, Homo sapiens
caagtgttctggagacagaccacaagcaagtttcttagccttcctatgcctcagtttcctcgcgttgtaaaacagggatgataataatgcctactccacagggttactgtgtagcttcaatg

SEQ ID NO: 9966 - DNA, 122 bp, Homo sapiens
ggcagggtggacgcggggccacgtcttggccggcgttttgcggggtcttcctgttctgaacgcgcgtaacttttgcctcagtatctcacttcttggaatccggcggcgttcacgtgtgtgct

SEQ ID NO: 9967 - DNA, 122 bp, Homo sapiens
gcctttgtgaaaagctctgtcccagagctgttttgagggcacaaatgaatccttttcttccgcttatcctggtcctgaggggcagggatgagatggaagactaaatggaacaggaggatgaa

SEQ ID NO: 9968 - DNA, 122 bp, Homo sapiens
gattgctttggagacaagtatcaagatcgttatgattcagaccggtatcgcggtgggtatcgggaggggtatcaggatggcccacgctgggatatggatcgatatggcggccaggattgcta

SEQ ID NO: 9969 - DNA, 122 bp, Homo sapiens
ttttccgccaccaacgctcccgagaccccactcctgtcaccagttccccgaacattcctgcgagcaatgtcgcagatactgctcacagacgtccccataaccaacttcttcgccaccgcagc

SEQ ID NO: 9970 - DNA, 122 bp, Homo sapiens
tggcggacggtgcagagaggggagatggcggagggtgcagagcggggaggtggcggcgcgcggacatccggggatgagacactggggcgcccaaggtccttcccagcagcacatgcggctgc

SEQ ID NO: 9971 - DNA, 122 bp, Homo sapiens
gcgccagagagacatgatgcagcatcctctgacgggggccacctgcgtggcgctccccaacgtgggcatgtgtccccagctttcgtgtgccttgacttttatgtacttacagcaggtaaggc

SEQ ID NO: 9972 - DNA, 122 bp, Homo sapiens
gaagacttactcaacctcatacactctggaggatcaggaccgggagttcatggtttttgccgatgctcgctggacggcaccattgcgaagtgcattttctctattaacaagttcatccaatg

SEQ ID NO: 9973 - DNA, 122 bp, Homo sapiens
attgcttctcgttccctgccagactttaggatttaggaggagcagggctgtctctgccaccgagataaaagagacaagcccggtctgcttggcacagagaagacacccaatagatgtgagcc

SEQ ID NO: 9974 - DNA, 122 bp, Homo sapiens
tgaaatttgacctccattgttggaggtgggaactggtggtaggtgtttgggtcatgggggcggatccctcatgaatagcgccatggttggaggtgaatgagttctctcaccatgtgatctct

SEQ ID NO: 9975 - DNA, 122 bp, Homo sapiens
aacacaccaggagacgtctagctccataatcctgggaggtgaagatttttgtcctcctttcgcccataagggaagtgaggcttggagacccttcagtgttctcctcagagtaacacagctgg

SEQ ID NO: 9976 - DNA, 122 bp, Homo sapiens
agcaatccacctgcctcggcctcctaaagtgctgggatttcaggcatgagccactgcgcccggcctaaagtaatttcttacttgagattttatttcaggctactgtgtccatgcactgggca

SEQ ID NO: 9977 - DNA, 122 bp, Homo sapiens
acataagctgatccatcttgccaatgttaaaacaccagattgtacaagcacaagctgggacgcaatgtgtgtccctctatccctacattgactttgcgggggtggggatggggtgcggggtg

SEQ ID NO: 9978 - DNA, 122 bp, Homo sapiens
ccagctctgatacttactagctgtgtgacctccagcaagtatctgaacctctctgattctcggtttcttcatctgtaaaagggagatagaaacaggccttacttctgtgaggattaaatgta

SEQ ID NO: 9979 - DNA, 122 bp, Homo sapiens
tttggaggctctgggtcagggcagccagggctgtcggcagtcctgcctttccatactcaccgcgccggcaggaaatgtgtggcggatgcaactgtgcaaactgagatggggcgaaaggttga

SEQ ID NO: 9980 - DNA, 122 bp, Homo sapiens
cactttcttttcctcacacctgttcctcgccagcaggccttggctccttgaacttttggccgccatgtgcttcccgaaggtgagtgagaggctgcgtgtgcttttgtgggcatgtctgaaaa

SEQ ID NO: 9981 - DNA, 122 bp, Homo sapiens
aacagaccaacattttgtgccagaaatttaagagttccataggtggaggcgcagttctttcgaataaatgtgtaactttgaaattgtgttcatttgcactcggtgcagcggttatgcttatg

SEQ ID NO: 9982 - DNA, 122 bp, Homo sapiens
ctttaagtgcctagccacactccagattaaatttaggattccttcttgctgctctctgcccgccgtgcccccagtgcatgcttctgctgctgcacttgtaactacattagaattctcagttg

SEQ ID NO: 9983 - DNA, 122 bp, Homo sapiens
ggtctgactctcacgtgatttctcctctctgaactagaagcgagctccatcgggccgctgcgcttctatcagcttgagctgatgccctccgtgttcccacactggcagctgccgtctgcgct

SEQ ID NO: 9984 - DNA, 122 bp, Homo sapiens
ctccatcccccacagcccctaaagagtgggacggtctcaggaccgcgtcccggggtgaatcgtgctcctgaaatggggactgtggtgcacagtcacatcatcccttcacacggcggccacca

SEQ ID NO: 9985 - DNA, 122 bp, Homo sapiens
gagctttttaagtgaattttagtaacctcagaacttagcaagtgttcaatacatgtgtaccgtatgaatgaaatagtgaatgaatgaatagataaattgctgtatattactttatttgaaat

SEQ ID NO: 9986 - DNA, 122 bp, Homo sapiens
cgctggtgagtcactgcggaggagccgaacactgaccgcgccgtccccgccaggctcccgcgcggccggcaccgcggccctgagcgcaggcggccccgggtctcaggcctcaggcggaccgc

SEQ ID NO: 9987 - DNA, 122 bp, Homo sapiens
ggaaggggcgggggcctacaggaagtgggcggggctggctcgcagggcggagcctcgcctcgctctgtgcatcgcaggtgtgcttgctcccgggctggtggggccaccctgtggctgcctgg

SEQ ID NO: 9988 - DNA, 122 bp, Homo sapiens
acacacagtacaggatgaggcccaggaacacgaacacatagttgctctggtagtactccacgttgcgtacgaggcgctggcacagctctcccaggttgcggggccgtgagaagcgctgctgg

SEQ ID NO: 9989 - DNA, 122 bp, Homo sapiens
tctggcaaacagtccagcttttctgtcatccctaacctgaaagtttgtttttggagtcaacgtttattgtgtgttcagtttgcagccgtttggctgtctgtgtaccaggatgctcggtggct

SEQ ID NO: 9990 - DNA, 122 bp, Homo sapiens
ggcaataggaatgccaaaagatttttttaaatggtattaaatggtctgttcttttggaggcgaagaagttactgttctctatgttttagaaaatgaaagtatgttttatgtacttctgctac

SEQ ID NO: 9991 - DNA, 122 bp, Homo sapiens
tgtgcggggcctggaggggccccttcagatcgcagccgtcaccacagctgctgccgccagcgggagagcatgacataggggtggctttcccagctggctgccacgcaggagctctggatgct

SEQ ID NO: 9992 - DNA, 122 bp, Homo sapiens
tatcacccctgggtcaagcccatggtctcagtgggttagcaatgaatccttcctaagatgcgaacagatgggagctcaacatttgacccatccctggggttttagtttttttgtttgtttgt

SEQ ID NO: 9993 - DNA, 122 bp, Homo sapiens
agtaagcccgggagcctgtcgctggtcacttccaagtgcctcttcccgcactttccagggcgcctcaccagcctcagctgacaagttactaacaccccagaatgagtgtgcataatgtgtca

SEQ ID NO: 9994 - DNA, 122 bp, Homo sapiens
cagaggcaccgctcccggagcgtagcttcatttccgttagtttgcgagatttggaggcctcgcgtggggagagggccgcgtctgtggaggagcttggctccgcacctgctgggctggcgaac

SEQ ID NO: 9995 - DNA, 122 bp, Homo sapiens
caccctaagggaccaagggtctctaccagaaccctcgcccaaccaaccctccagaatatccggcctgtagctggagttccccatcaaagagcagggatgacctcaggtatcatctcattcaa

SEQ ID NO: 9996 - DNA, 122 bp, Homo sapiens
aaaatcagcctttcttcaatatggaggcgtaattacatgggtttactcatccaccctacgcgaaggtgcaatgctgtttttgagcatggtcgtttctgttcaacctacatatcccgggttgt

SEQ ID NO: 9997 - DNA, 122 bp, Homo sapiens
gtacagtttgacactgctggggcttagaggacaatactccaaaatgaaggcctcaatagccgcctcagaagcagaagtttttctctgaccctctcttgtcctcttgtcactcggttccattc

SEQ ID NO: 9998 - DNA, 122 bp, Homo sapiens
ctgtttcgcgcccctgccagccagcaggcagcttctctgggatggatggctggatgccagcgctcttcccccgcagcgcccctccgtttcctgcccaggctcccggtggcgcacttcccggc

SEQ ID NO: 9999 - DNA, 122 bp, Homo sapiens
atggtgaaggccctggggaggtctgggtgggcccatccaccacccaagatcctctctgcgcgggaggttggtggtggggggagagagagaaagagagaaagagagaaagagagagagaggcc

SEQ ID NO: 10000 - DNA, 122 bp, Homo sapiens
aagaatgcttggctttccttgagtttcttggggcaggacagcctccttcattgggagcaacggagggcctggctgcctccgggctgcatttggggtggagtgggtgtgtgccccccaccccc

SEQ ID NO: 10001 - DNA, 122 bp, Homo sapiens
aggttatttctctacctttcctcactggagctaccagaacagatactgggaccatggggacggtgtttctcctacgttggattgttgcttctcatctttaacatcgaaacatcatttcgtcc

SEQ ID NO: 10002 - DNA, 122 bp, Homo sapiens
ttatcagtttatctcactgaatttctcactcagcaccatgaacaaggaccattgtgatctcgtttttacagagaaagaaactgagactctgtaagggtgggtatgtgcctatgcttccaaga

SEQ ID NO: 10003 - DNA, 122 bp, Homo sapiens
tccgtggacccgcgcggccacgccagtgtgctgtgcacgggaaatgtggacgtgggagcacggaggcacccagtactgtggcgtggtgctcgtctggtcgtcagcgagcctcagcgtactta

SEQ ID NO: 10004 - DNA, 122 bp, Homo sapiens
gcggggtgccggtatcccgcgtacccggctgcagcaaggacccggggcgtcggttacccgcggtgcctgtcgtacccgctcacatttccagctcccgaaacctgcctcctgtgacccagacc

SEQ ID NO: 10005 - DNA, 122 bp, Homo sapiens
ccaacgtcggcacgtcgactcgtcgactccgggccctctgccccgcccgcgtgcgcgcgccgctccgcctcccgcctccagcctctagtccgctgggttcggaggagcagaggcggaaggtc

SEQ ID NO: 10006 - DNA, 122 bp, Homo sapiens
ccctgcaacctcctggctcctccacccttcatcttcatcctgcctgagctgccacagctccgattgtttttggagttgacctagaggactcagaattattagagaccccaggatcctctcct

SEQ ID NO: 10007 - DNA, 122 bp, Homo sapiens
agcaggctgcgttctgagtcggtcaccgaatatgtccccccttggacgggagtagcgcaacgatgtgcaggccagctcaggaagtaacgctgggagcttctagaaggtggagcgggatccag

SEQ ID NO: 10008 - DNA, 122 bp, Homo sapiens
taacagggaaggggggatggaagccagagaggctgagtccaacacaggttcacatcaactcgaggacgaatcttgaggcctccactggtctacacggacagaagcacgcctcaagacccgag

SEQ ID NO: 10009 - DNA, 122 bp, Homo sapiens
gacagagcacggtgtcgaccagcaggaggatggacctgaggatgccaggccgacagagcacggtgtcgaccaggaggaggatggacctgaggatgccagcctgacagagcacggtgtcgacc

SEQ ID NO: 10010 - DNA, 122 bp, Homo sapiens
ccattgagatctaccctctggccgaggctgagggggtccagatcagtggctgactctgcccgacttcctctttggcacctccattccctgttgctgaaggccctccagcatccccttaagca

SEQ ID NO: 10011 - DNA, 122 bp, Homo sapiens
ccacgccaagccccagccggcgtggggttccagccctttccggggaaggattggccgaggcgctcacctgtttgccctggtgaccaatgggctcgagctgcccgggctaggtcccgggctcg

SEQ ID NO: 10012 - DNA, 122 bp, Homo sapiens
tttgaactgcacccaattttccaggagcaccttagtgtaatatggcatattgatcacagacgatagacaagtcttaggcaggtttatgcaaaaaatgctgcaaccacccagtgatcatcgga

SEQ ID NO: 10013 - DNA, 122 bp, Homo sapiens
gtatcccactgatcagtctctcagtgcctgcctactgggcagctcatctgtccacttattcgtattaaatttgctttttatttaggtctctggagatggttgcgtggggaagagcccatgac

SEQ ID NO: 10014 - DNA, 122 bp, Homo sapiens
atctcagcccaccgcagccctccaggcccccgcctgagcccctgaggccctcatctgtaccgccagctttggtgttcattaaacatggtcttgctgcatcaactccagggctccaagctgag

SEQ ID NO: 10015 - DNA, 122 bp, Homo sapiens
tgtgtgtgtgtgtgtgtgttatcttcaactaatttttaaaaatgtgaacttctaccagctcgatgtctatttaataaaagtaattgatgtgttctgagcttgctgctcacaactccatgacc

SEQ ID NO: 10016 - DNA, 122 bp, Homo sapiens
tctgccatcagctcaggcaaatatttctcctcttccatagcgcggacttcggattgtccccgggcgaagcgcgaggttccgctcgctcggacgcaggcagggtcttggggcagcgcctggct

SEQ ID NO: 10017 - DNA, 122 bp, Homo sapiens
ctccgccttggctgcgatgttgctcactctgctcagggctctcccctctccgtccggtagcgcaccctggctttgcaatagcccctggctcggagccgctttccagcgagtgcaagaaccgg

SEQ ID NO: 10018 - DNA, 122 bp, Homo sapiens
ctgcctccctcttgcagctctctgacgatgcagcgaccgcggctggcggagattgagcaacggggaaagggtgagggaggggttgcggggcgcgcgtgtgcccggcgcactgaagctggcac

SEQ ID NO: 10019 - DNA, 122 bp, Homo sapiens
tcgatgaaacagaagagagaacctggaattggacccaggtaaatagacagatttattgtacgatcaagctggcattttatgtcagtggaagaaagctctcttgaagaaggcaaatgaaactc

SEQ ID NO: 10020 - DNA, 122 bp, Homo sapiens
gcgtcggagctgagatccggtaaacagtgtggttcccctccaccacccgcccgtcagcctcggtcttgcaggccttgataacttggtctttattgtcggggatataaagctcaaagcagttc

SEQ ID NO: 10021 - DNA, 122 bp, Homo sapiens
ccaggtctgtgtggccgcccggtgccccgggtgctgtgggaccctcgggggagccccgggcgttgagagcttggtacatctgaggcagccacctgcgaaaactgtctccacacgcctcctcc

SEQ ID NO: 10022 - DNA, 122 bp, Homo sapiens
aaatagagaggaaaaaatctctcactcacagggaataactccctggttcccctgtaactccggggtccttggtagaaggccagaaaggtgagaatgcaagagaagccatacctgctgaagaa

SEQ ID NO: 10023 - DNA, 122 bp, Homo sapiens
atcacacacataactgcactcacccactctgggaccactgagacttgccaattcacccagcgtgcatggctttgggatgtgggaggaaaccagaggacctggagaaaacccacatggggtga

SEQ ID NO: 10024 - DNA, 122 bp, Homo sapiens
ctcttccttcagctttgagccctgatgcaaccctctgagatgggggtaactgggggctcccgcgaaccgactgcctgacccatccccttcctcttctagaaagtgcacaagcgttaccccgg

SEQ ID NO: 10025 - DNA, 122 bp, Homo sapiens
acatcactgtacaactgcagtattctcttgtactataccttgtgcccccttggtctgaaacgcctcaagaacaagagccgtatctaaaattttcctcacacccctcagactgtaagacatta

SEQ ID NO: 10026 - DNA, 122 bp, Homo sapiens
ggcccctgagcagtcaggtgccagctgctactgccccaccagggaaggagcaggcagacccggcattttcacacaacccaaagacagatacggcagccacagtacagagcagcaggcagaca

SEQ ID NO: 10027 - DNA, 122 bp, Homo sapiens
cacccagagtcccccacaaaagcgcaagccgggggataggctatcttgtcctttccccaacgtttctttacagaagcggccggcagcaaacctcagggcccaacatcccctccccaccctat

SEQ ID NO: 10028 - DNA, 122 bp, Homo sapiens
ggacgactggcggacggtcgcgggcctggagacccagagcgagacggcctacttcgttctcgagccagcagaacgggttgaacgtgtcgacaaccccacccgccagtcagcggcgcgggcgt

SEQ ID NO: 10029 - DNA, 122 bp, Homo sapiens
catgccaggcacaccgagtggggcttggcctcctccccaagctaggagctctctagataccggagcaaagtggagggggacttttttccgtccagagagactgaactccgtatctgttccgc

SEQ ID NO: 10030 - DNA, 122 bp, Homo sapiens
aacatcctgtgttaatctcaatcccagaaccagaccacagaatgctgactacaccgctcacgggaaagactatgttttaggtgacccgtgtggcctttttgttgaggcctttaggatacaag

SEQ ID NO: 10031 - DNA, 122 bp, Homo sapiens
caacgcaatgtgtatcatctatgcttttcagttttgaacataaagcagtggctctgagcgcgactcggagggcgacgccgcggccgcagccatgggtgctgggcctgcaggggcgcgggggg

SEQ ID NO: 10032 - DNA, 122 bp, Homo sapiens
ccccgcccccgcccccgcccccgggccctttcaccgccgcggccccgccctatcctcctccgcccaccgcccccgtcccgcccctgctggacctcgccgtttcgcaagcatccgagttctcc

SEQ ID NO: 10033 - DNA, 122 bp, Homo sapiens
gccgtccaggatctgcttgaggaactgggtggcctcgtcctccgtcagcgactccttctccgccaggaagtcaaagagctccccgccagagaccagctccaggatgaggaccacgtccgtct

SEQ ID NO: 10034 - DNA, 122 bp, Homo sapiens
gacgaggaaggttaccaaaatagatggtcaggctcgagagcgcttccctgcaacctccaccgagctcaggtgtgagcttacccgcccccgcctcctcctcagttcacagaaatcagccaccg

SEQ ID NO: 10035 - DNA, 122 bp, Homo sapiens
acggggctctgggcgggcgaagctggctgcagcggggcgtggtctggggaggggccggaccggggcgggcggggcgtggtcggggcaggggcggggcgcgctggttccggccgccctccccg

SEQ ID NO: 10036 - DNA, 122 bp, Homo sapiens
atgtagtttacaggctcaataacaagcacggtccaagaagggaggggcgggggagcaaatcgatcttggcctcggaagaaaaagaacaaagaatcgctggcaacttgcgcgtcgcgtcgctg

SEQ ID NO: 10037 - DNA, 122 bp, Homo sapiens
ctccccgcgcgggccatgcctgcacagtgggtggggcgtcaggtggccccgccgaggaggcgaaggaaggccacccctcccccatcatcttttgcccgcccctcgccagcaggagccagccc

SEQ ID NO: 10038 - DNA, 122 bp, Homo sapiens
acagcactccctgcttcgagccttccgggaggcccccaatccaggatcaagacccagccccgtcacggcctggctcacgaggccccacttcaactgcccctgacctctctgcgccccctgct

SEQ ID NO: 10039 - DNA, 122 bp, Homo sapiens
cctggtttgttaagggggacagagcagctgctgggccccaccatccacttaaggactggccgtgattcttggcaagctccgcccgccaggccacctctcacccagccagggcaccccgggcg

SEQ ID NO: 10040 - DNA, 122 bp, Homo sapiens
aaaactgccaattgtttacatttaaaatcccatcatctcttattatgggtaattaagatgcgcaggaggggatattttggagcagtgtggtccaactcaaccttccgagatgatgaaaatat

SEQ ID NO: 10041 - DNA, 122 bp, Homo sapiens
gcacctgtatttgtgcttctgggtctttggcagaatctttgcctttttctgtctgcaccccgcatctggtacagagaggacaaggcacagtcgctctgaagcagatgtctaggagagtgggt

SEQ ID NO: 10042 - DNA, 122 bp, Homo sapiens
tttcagtattgcttttcctgcaggagcaaactatttcagaactcattcccaacccaagtccgttgaactgtcacagaatcacagaacagtgatctttcccatcatacattataagttgcctt

SEQ ID NO: 10043 - DNA, 122 bp, Homo sapiens
agtagaagcccccagactcaccgagggtctcagccacgaagtgattgtgtgcagcgtgtgcgcggaaccacaccttggccttgacggaaacgggctccgtgtttgcgtttggggaaaacaag

SEQ ID NO: 10044 - DNA, 122 bp, Homo sapiens
atgcctgtgggcgccgagtggccgagtgactctcgtctcctgactctgctccctgcgacccgagccacctgcagctgcagcccctgtgggcctggagcccgtttcgcaacacccccaccagc

SEQ ID NO: 10045 - DNA, 122 bp, Homo sapiens
cgcgatggtttcctgttgaagctgagcagtgggtggcttggcagaggctgtttctcttggcgttgtctctggtgacccaaagggcattcaaagccttccagaaaggaacaacttcctgcagg

SEQ ID NO: 10046 - DNA, 122 bp, Homo sapiens
tgatgcccctgaaagtctcccttctagggggcagctggtccatcttcagggagctcagcacgtgtctcagcctaggcagacacttggcccttgaacccggaagagtgtgtgtgtgagagaga

SEQ ID NO: 10047 - DNA, 122 bp, Homo sapiens
gaaactgcaagagtttgagccaaaaggatggactgttggagtagctgagggtgaagctgccggaactcctcaaagtggaacagcaaagccagcaccagagatggacaagaaaaacaaactat

SEQ ID NO: 10048 - DNA, 122 bp, Homo sapiens
gctgctgcttcccttgactcagcagttggctcctgggaatttatcccagaaaaatcatcccggcatgggcgggctcaggtcagcatgtcaaagatggcaagccatttatttttttaaatttt

SEQ ID NO: 10049 - DNA, 122 bp, Homo sapiens
tcggcggcgcgcgggcgccggttggctgggcgggcgcgtgacgcggcattacataatgggcgctgaggcggcggcggcgggcggggacacgtgaggccgctcggctccctgacccacattcc

SEQ ID NO: 10050 - DNA, 122 bp, Homo sapiens
cagaaagccctatatgatctgcctattcattacaaccactggcacttcatgtcctaccaccgtccccttcaatcatctactctgctcataatgccctccttgttcctgaacatgccaggcat

SEQ ID NO: 10051 - DNA, 122 bp, Homo sapiens
gcagctaatacagagaggtgttactggaaaaggaaccagaaagagtaaatatctcctaaacgtatgatgggacagaaagataaatgcctattacatatagttaatatctgtttgattagcct

SEQ ID NO: 10052 - DNA, 122 bp, Homo sapiens
cggccatagtacgcgcagcgcagtggggcctggacgcggctgcctggtttcaggtccacacgctccccagcactgccggccaggctccagcatgacgggggtcaggcctccacaaggccctg

SEQ ID NO: 10053 - DNA, 122 bp, Homo sapiens
cttgcagctgagcaccaccagggccatcattaaagcaaagggcaatgccattgggaatcccgaagatgctgctgggctggttgatgaggggtaacactgaaccttgggttgtaggttttctg

SEQ ID NO: 10054 - DNA, 122 bp, Homo sapiens
ggaagcagctttccccacacgccgcctttaacagcatttggattcgcgaagctgtgcacacgtcatttttatcgcaaaaatgaaacctgccggtgccgttttaaacagcagagttggctcag

SEQ ID NO: 10055 - DNA, 122 bp, Homo sapiens
ggtagtgatctctgtcctgaagatatgaggtctctgcactcctaagacctccgtcctagccggtggaagacaatgaaaagacaaattttaacagtagaatttccgatattggtaaatagtat

SEQ ID NO: 10056 - DNA, 122 bp, Homo sapiens
gcggagggagggactcccgggctcgccaaacagcggggcctcgggcaagagcgtcgctggcgcgtcctcattctgcgattgctgtcaggggaccatccatcagcgccgccctggacgctggg

SEQ ID NO: 10057 - DNA, 122 bp, Homo sapiens
ggcttccacctggcagggtgtgtttgtgtcagaaagacgattgtgcgtaactgttcaccgcgtccacgtcccgagagttgcgcacgcgtggagatctgcaaaacgctccctttcagctccgc

SEQ ID NO: 10058 - DNA, 122 bp, Homo sapiens
tgtataagggggatggggaggttcttcgcccggcaaaggcggactgtgggccctggggcgcggcgggtgtctccctcccactttcctctctattccccgctaattatcactttgaaatctag

SEQ ID NO: 10059 - DNA, 122 bp, Homo sapiens
tctatgatttgggccgggttctgcagggtcagctcatttctgctctacttggtatcagctcgtggaagcagcttaaagactggggactggaatcagaatgcccactgactcatgtcatgtat

SEQ ID NO: 10060 - DNA, 122 bp, Homo sapiens
ggggacagggaccgcagccgccaaatccgcggggccggggaacgaggagactttcctttccgcgttagccggggccacccccgccagagggaaagcaccaaaggaaaaaccaggacagggac

SEQ ID NO: 10061 - DNA, 122 bp, Homo sapiens
gtgcgcgcagaggatctggctctcgccggcgcctgccgcccttatattcagccggccgcccgcatggctaatgagatgcaaatcagcagccccccaatctggcgagagctgtcacaaaggag

SEQ ID NO: 10062 - DNA, 122 bp, Homo sapiens
tggagaacggtaaacgtatacaaatgtagtgagacgaggcacgcccatgtcctcatgacccgcgtcaaccatcatcagctcatggccaattatgtttcatataaacctctcacccctcccag

SEQ ID NO: 10063 - DNA, 122 bp, Homo sapiens
gcgtctcttgactccttggttgccatggctctgaagctccaagttagcaggtgtactaggcgttcagccctgaaccaggcagtccagtactttggctttctgcccagcaaaatgaagataaa

SEQ ID NO: 10064 - DNA, 122 bp, Homo sapiens
gcgagggcggggcgggaggcctgtggagaccaggcggaggctgcaatttttggtgccggccggcagagcaggttctggcggctgaggaaaatccggaccaataagttgattcaaacatcatc

SEQ ID NO: 10065 - DNA, 122 bp, Homo sapiens
cacttctgtcctgatcagtgaagctccctgaagcactgacatgtcacttggtcaaaggtccgttgccgatttggggctggaattgtgctaagtctggggataaagaggtgaacgagacgctg

SEQ ID NO: 10066 - DNA, 122 bp, Homo sapiens
ttatgaacccaggatgggcagcaaagaagatgcgggcaaggggtgtccggcggccggtggcgtctccagcttcaccatccagtccatcctgggcgggggcccctcggaggcaccgcgggagc

SEQ ID NO: 10067 - DNA, 122 bp, Homo sapiens
acgcccagcccagtgctgagcagaggcttggaggcaccatcctcaaagccccccgcccaccgcaccccaaggacaggatctgactaagggctggtgaagccctccaggaagtgagagagggg

SEQ ID NO: 10068 - DNA, 122 bp, Homo sapiens
ggtgttggcacctgtgtttggctacctgggtgacaggtacaatcggaagtatctcatgtgcgggggcattgccttctggtccctggtgacactggggtcatccttcatccccggagaggtga

SEQ ID NO: 10069 - DNA, 122 bp, Homo sapiens
ttgaaatggtcaagctgagaaacccaaattgagttctatgatcctggcactgaagattctcgggctaagtcataacatgctttgtggtctgtgtttcagagagatgaatgtaggtgagctgt

SEQ ID NO: 10070 - DNA, 122 bp, Homo sapiens
gtccacccttccccattcctttggtctggagcccctgcttggtccagcttccccaggccccgacacctttctgtggggtctgcctagctcctgcacgcacacagcatgggcctgatcctgtt

SEQ ID NO: 10071 - DNA, 122 bp, Homo sapiens
gctgctcggggagctgaggtctacgcggtcccgctgcggagcaggcggggtgaggagctgcggtctgtgagtcctctcccgccaatgggtggaccgcgctggcggccgcgagctcgcggagc

SEQ ID NO: 10072 - DNA, 122 bp, Homo sapiens
gcccggctcccggaagcaggctgtgaggggcgggagcgctgctggaacccgagccggagccggagccacagcggggagggtggcctggcggcctggagccggacgtgtccggggcgtccccg

SEQ ID NO: 10073 - DNA, 122 bp, Homo sapiens
cgggggccgaggaagtgtgccgagaatgcggcttctgctactgccgccgccatgccgaggcgcacaggcagaagttcctcagtcaccatctggccgaatacgtccacggctcccaggcctgg

SEQ ID NO: 10074 - DNA, 122 bp, Homo sapiens
aagcattgttgtctgtaacccctcttaatatagaatacatcttggtttaaatctcagacccgtaataacaagttaatcacatgacttgaataattcaagcccactccagtaacaaaactaaa

SEQ ID NO: 10075 - DNA, 122 bp, Homo sapiens
gcgctgtggcagggccgggcactgcggatccccccagtgggtccttccatcctgcactgccgcgttctacacgtggactacgcactcaaggtagggcatcctgctggccctgggggacagtg

SEQ ID NO: 10076 - DNA, 122 bp, Homo sapiens
gggtgcactgtttgcagaggcaggtggggcggtgatactgatatttctgcaggagggagccgggaggtccttgagcaggggccccagtaaatgcttcagagctagaatgtcctccctttcca

SEQ ID NO: 10077 - DNA, 122 bp, Homo sapiens
tgctgtagggccaggcgccagggtgagggtaagcacataccctgcctctgtcttcaggagcgacccagtcgaggcgtctcagccgaagttttccttttttgcccagatctgtttctatgctg

SEQ ID NO: 10078 - DNA, 122 bp, Homo sapiens
gtggggaaactcatttgtggagaccagccctctggcttggtgagtgaatctggtttacaccggctcctgccctgccttcactcttctcccctgattcaagactcctctgctttggactgaag

SEQ ID NO: 10079 - DNA, 122 bp, Homo sapiens
ccctggccagcggcagagccagaagccccgcaggccgcctgtgctctccacacctgaacacgggattctgcgggagagctggtgtcaagtcctgacccctctacttcgttccgaatctggga

SEQ ID NO: 10080 - DNA, 122 bp, Homo sapiens
gacccctaggagaggaaccggctcggtcgtggtgcagcccgcgaggagacgacctcagggcgtaatccgacgccgtgggttaagacatcagacctcaggcgcagtgcagccggcccctgggg

SEQ ID NO: 10081 - DNA, 122 bp, Homo sapiens
cactgctggatggcctggtgaagaaaatacagaaacagatgggtacaagaactaagaaaacggctaagaaagtgttttggtcctgactactaccatttcgctctgtgatttggggcaattca

SEQ ID NO: 10082 - DNA, 122 bp, Homo sapiens
acgccaccgtgggcctggagtcccctcaccctcgacctgggctcgcccccaccctggacccgggtcaggtggtaccaagcactatgggcactgtctcctcgcaggggatggtggacaccgca

SEQ ID NO: 10083 - DNA, 122 bp, Homo sapiens
gtcctgcttgcaccagctgtatgaggaaggtgccactgttgtcatttccatttctgcactcgtggaaacaagcgtagtgaggccagcctgagccacagagctgcaggtaggggaggcagctg

SEQ ID NO: 10084 - DNA, 122 bp, Homo sapiens
ccgggccccctgccctgtgcagatgtggatgaatgcacccagagcccaggcctgtgtggccgaggggcctgcaagaacctgcctggctctttccgctgtgtttgcccggctggcttccgggg

SEQ ID NO: 10085 - DNA, 122 bp, Homo sapiens
cagccggcatttcttggccggggagtcatgctgagggagcagtggctgcggctgcagctccggcaggagcgggaggcgctggggcgccgcgtcgctgccgcccactggaccccggctgcaga

SEQ ID NO: 10086 - DNA, 122 bp, Homo sapiens
gagtccgggaggagaggctccgcccccgagggcggggcctggatccccggcgccccctatcgcccacctcctgctttgccgtggcggcgctaaacgcacccccaaagctgccccataggaac

SEQ ID NO: 10087 - DNA, 122 bp, Homo sapiens
catgaaggaggaacctctgtggtcccggcgcgtgggccctggggttggaagtgcctcagacgcactttacattttccccgaattcacccttcgcagtccccatcaccccctctccagtggga

SEQ ID NO: 10088 - DNA, 122 bp, Homo sapiens
gtccttccccgcaggcaggtgtcaggaccggcctaataaacatgtgtggcctcctcctctcgcttgctgggcgggcctttccgggggcggggttttgaagctgaggcttctgaggcgcccgc

SEQ ID NO: 10089 - DNA, 122 bp, Homo sapiens
tggtcattttatccttctctaaccttttacgtgatcatcttgaatgtcccaggtttgtttcgcctgtgctatggggaatcaaagaaaagtcttttgccgcatttggaccaatgttaagggtc

SEQ ID NO: 10090 - DNA, 122 bp, Homo sapiens
aaaataaatgatttttttataagtgtggttaactttactgaggctaaaattgctaaacaccgcatgtattttcccccctaaaataaaagctttggggaattttgatctgcctcacatgaaaa

SEQ ID NO: 10091 - DNA, 122 bp, Homo sapiens
tccgtgatgatggtggtcagtctgacagtatttgtcccttaaaggcattttcagtggactcgacctactttgctttcactgtaagaagctcttcattgcggcgtggctgttgaaagaagcac

SEQ ID NO: 10092 - DNA, 122 bp, Homo sapiens
tcactccgggccttgggactcggagagcgtctggaggcggggcctggacttcacgcccggcgcgctcctcccctttaaggcgcgcggccgggcggggcccctatgacccctttaaggcgcgg

SEQ ID NO: 10093 - DNA, 122 bp, Homo sapiens
agtcgctggcgttcctctcaccgagggtccaggctgagggtgaaaccgcttctctgttgacgccgcccggcctgccgaaccgagtcagccgcctctggacctaggctcggtgacacctgcac

SEQ ID NO: 10094 - DNA, 122 bp, Homo sapiens
tggtggagcaggctgccatatagagaggccatgtggcaaggaactgagggtggcctcccccggcagccagcatgcagttgaagcctcagtcccatggccacaagtaactggatgctacaaca

SEQ ID NO: 10095 - DNA, 122 bp, Homo sapiens
taaaagggggtaggatgagataatcgaccattataaagatttaactattttatgctgaagcggccatattttcaagggatgacaccatcttgcacacaacaatgaaggtactcggccataga

SEQ ID NO: 10096 - DNA, 122 bp, Homo sapiens
tttgtataaaataatcaggagtccatggaacaaagatgattttaaaaagcacagatggatcggctcaaaatttggagtgaactctttccatagtagacacatgtgtgactttttaccatgtc

SEQ ID NO: 10097 - DNA, 122 bp, Homo sapiens
cgatcaaaagcctggtcggcaacaaagaccgcgcccgctttttccaccgtcctggtgtggcgagttgcggaatttcaataactgtgacaagggtgactgatttgtgaactagaaaaggtttg

SEQ ID NO: 10098 - DNA, 122 bp, Homo sapiens
agcggatcttgcacctttctagacgggggagggggcggggaggaggttgcttcaccgtctcgcccagcaaacaccagggatccgtgatcacctgctcgccaagacccgcggcgtggccagac

SEQ ID NO: 10099 - DNA, 122 bp, Homo sapiens
cagtttaagaatcttcacctcctttattttgcaaatagagaaattgttgtttcaggagaccggtctgttgatctgtctccctatgttgcccaggctggctggcctcgaactactaggctcaa

SEQ ID NO: 10100 - DNA, 122 bp, Homo sapiens
gcggtgccaggcccagcctcgcaggcggaagggcgcggaggaggtgacgcgataggccagcgccggcgtcgcggcagccgcttcagaggaagctcggcggctgtggccgcggcgaacaggcc

SEQ ID NO: 10101 - DNA, 122 bp, Homo sapiens
gcgctttaaaaatttaatctcatgtggaattacatgggggagattccaaggaaccacttgcgctggtgcgtccgcggccgtcgcgaggcgtccgtccttccccgagggcgagcgccgggcag

SEQ ID NO: 10102 - DNA, 122 bp, Homo sapiens
acggtaagcatttctctgcccagtatgctgaatgagggtgtctttcggatttccaagacccgcaaggagcagtttctcagctaaccactaatggcatggcgagttcctctcctagagtggat

SEQ ID NO: 10103 - DNA, 122 bp, Homo sapiens
gctgccctgcacggggtcccgccgcccgcacttaccgggccgcacggccgcttcctgccgcgctccgccatgttccgcacacaccgtcggtcccgcctctgccaatgagactcgcctcttcc

SEQ ID NO: 10104 - DNA, 122 bp, Homo sapiens
ttcccccacagcagcaggggccccagcagtaacaaagggtacctccaggggtttgggtagcgctgccctctggcagtcatgcaccgctgtctgccatagccgctctagggtcttggcagaat

SEQ ID NO: 10105 - DNA, 122 bp, Homo sapiens
tttctgtctctcgggcctgtggtgttaaaagcagcaagacaagatgggggcctggctagccgggactaagaagacagagagtagagaaatctgcccagagaggtgttctgcggaagtccacc

SEQ ID NO: 10106 - DNA, 122 bp, Homo sapiens
gctgctgggcggggcgacctgggatcccagagcctggcggcgcgagccgggcacccgggccgacgaaaaggcaggaagcgcctgacttcagacaccacccccgactgccagcgccgtgcggc

SEQ ID NO: 10107 - DNA, 122 bp, Homo sapiens
gagtccatcgtatccagtttgtgtgtgtgtgtgtgtgtgtgtgtgtgtgtgtgtgtatcccgctagtctagcccagcgtttattaatggtcaatataagccacagtgtttgcatagccctca

SEQ ID NO: 10108 - DNA, 122 bp, Homo sapiens
aacctctgctgcagaagcttggctgccacggccacggagttgaagtagcaaaagcccctgcgggagagaactgacgctggagacgaagcgcaggtgggcggtggccagtttctccacggccc

SEQ ID NO: 10109 - DNA, 122 bp, Homo sapiens
ggctgtgcaggggcgaggggagcagggcggggtgacgcccggagagcggcctggagagcgcgtgcttcagaaggcgtgggcaccctgtcccctttgcagatggggatgcaggccctggtggc

SEQ ID NO: 10110 - DNA, 122 bp, Homo sapiens
caggtgaggtatatcagggctttccctcctggccgagggcaggtgtacagagaaacatggcggacagaggagacctgcatttaccaacgtcctattcacagatgtttccggttcattcacag

SEQ ID NO: 10111 - DNA, 122 bp, Homo sapiens
aaccagggcttcccttcacgggttgcgaccgatccggagcccgcctggtgcgctggcccgcggtccccaggcaaaaggtaatcaagagtcactcctccaaaattcaaactccctccccaaac

SEQ ID NO: 10112 - DNA, 122 bp, Homo sapiens
gtgcgtctcacgttgagtcggggtgacaggtctcagtgagaactgcgctagctgcagtgccgcaccgcccttataggcggggggggggcggggcccgcgttccccgctcgcccactagaggc

SEQ ID NO: 10113 - DNA, 122 bp, Homo sapiens
ctcaacatgggagattcagcaaacaaacacagctggcattgggcaagatactactgtgggcgaggcacagagagagtataattagtgatgtgctccagtggactgtggggtaggtttaaaca

SEQ ID NO: 10114 - DNA, 122 bp, Homo sapiens
atattcagggggagaggatgatattactcccaatatctcaggggttgtacacacctcctgcgatacggggagtaagagccagcccctctctgcccctggctcttaggagccccatcgcaggg

SEQ ID NO: 10115 - DNA, 122 bp, Homo sapiens
cggaggagtgggcgccgccggagcagacagtgcgcggaccctgcaagcgaccccagcccgcgcccgtcgcgacgtcggacgcccagggcctcgaggccggggaagcccaccccctaaaaaga

SEQ ID NO: 10116 - DNA, 122 bp, Homo sapiens
acagtctccctccgatctggatagcttggacgggcggagccttaatgatgatggcagcagcgaccctagggatatcgaccaggacaaccgaagcacgtcccccagtatctacagccctggaa

SEQ ID NO: 10117 - DNA, 122 bp, Homo sapiens
cttttccttgtttgatatttacagctttctcttgtcctttgtatcctttgggtaacacaccgtgagtgagagcagaaaagctttccttataaaggtagcaattttattcaagattaaaatgc

SEQ ID NO: 10118 - DNA, 122 bp, Homo sapiens
tcatctccccatacccatcgagaaccctattctcctgtggcagactttaatgaatgtaaccgcagattatgtgttttctttctttggtgaacttagaggatgcataggccaggtgccaagtg

SEQ ID NO: 10119 - DNA, 122 bp, Homo sapiens
tgtacgtgcatttctgtgtccataaatagttgaagccagacagccagattccagatgtatcgcagggggctggatgacatggcccttgtcacctgtgtacctgtctgcctttctgaagcacg

SEQ ID NO: 10120 - DNA, 122 bp, Homo sapiens
ctccacttacggtgggacttccctagaaaacacctgaggtttaccaattttagaggggaccgagggagaggcaggaaatggtgcctggtgagagcacgctcccttcctgtctcagagggttg

SEQ ID NO: 10121 - DNA, 122 bp, Homo sapiens
aatagctgcctcgggccagcggctccgcggaacaaaagcgggtcctcccgggcaggccgacgccccgccctctgcctccgaccccgggccagggtccccccaagccaacttccctccaacct

SEQ ID NO: 10122 - DNA, 122 bp, Homo sapiens
gttgactcaaactccccattccctggacattcccattgggttcactgaagctcactgggtcgtccttgagcaaactgtatagactgactccaataacagaaaatgcttcctgtggggaagac

SEQ ID NO: 10123 - DNA, 122 bp, Homo sapiens
agcccatccatcaactctcaagctcacctttgtcatgcagagtggaccagcctggagctacgaatccccctcccccaacacccaacatcccaacacacacacacacacatatatatactgca

SEQ ID NO: 10124 - DNA, 122 bp, Homo sapiens
gagtccaagatgtcatccatcacctcctccgcaaaggccaggcgcttccgcagaggctcccgcttcttcaaccccgtgaggttgaccaggtggatcttgagccaatccaggccgcgcgggcc

SEQ ID NO: 10125 - DNA, 122 bp, Homo sapiens
ctcacctgcatgattattctggtggctgcaaagggcgataggcagtaggaggagacaccccgtgacaccaagagctgtgtccagacatgatcgtcttggcacagcttgagggttttctacag

SEQ ID NO: 10126 - DNA, 122 bp, Homo sapiens
gcatgcccagcatgcagactcgcttccatcgcgacacagaggacagcatggagcccagctcgagtgccgtccccccaccatgacagcgcagcatgggccttccaagccacagagccacaggg

SEQ ID NO: 10127 - DNA, 122 bp, Homo sapiens
tcactgccaccagcatgctcagcttcacccgcctggcctacattctgccggcccacgagtcgctgggcactctgcagatttccattggcaagatgattgaagacatgatccggtgcgtaccg

SEQ ID NO: 10128 - DNA, 122 bp, Homo sapiens
gtgtgctctccaacatccacttgcccgaaaaccattactccggcttccccctatctgtgccgcgtccccagcaaacacacgggttatcgggaagccaagtaaatgaccaataaatattttaa

SEQ ID NO: 10129 - DNA, 122 bp, Homo sapiens
gccccaccactctgattggaagtcataagcttgacaactgattggcctctgtcacccaagcgggtgtggggacactaggcccgcaggtgccactggaagaggcgttcagaagcactgcggtg

SEQ ID NO: 10130 - DNA, 122 bp, Homo sapiens
ctcccgcgcgggtctccgggccctgttccgtagccgcgatgctgcgctatttccaggctgcgagcggggacttcactgctctgctgtctcctgcaagaactggctcaagaaatttgcctcga

SEQ ID NO: 10131 - DNA, 122 bp, Homo sapiens
tgggcctcccagcagggaggctggttccagctcaggagcttgggaggggaactgggttcccgtcctcttgagaatgcataatgcctctctgggggggaattccaggcagcaggagcaattcg

SEQ ID NO: 10132 - DNA, 122 bp, Homo sapiens
gatcgcggtcgggagacgccgagtccgcattcctcagttctagagcttctcttggcagctcggcacaccttaagtttgcctctgtttgggttgtcttgggatgtgaggaggaaattaaaaga

SEQ ID NO: 10133 - DNA, 122 bp, Homo sapiens
ttcctatccattagtctatgtgacccagtgagtctctactttcctcataaatgtgctatacgttgactgctccattaatacctatatttgcttatcaatctaacagagtagatataagcatt

SEQ ID NO: 10134 - DNA, 122 bp, Homo sapiens
tgccacatgggagccacttgtcacttctggtgagaatcagaaaacgcttggaacagcatccggcccacactagcaagcacccagccccacacgtgcgactgtgcagcaaacgcattcaacag

SEQ ID NO: 10135 - DNA, 122 bp, Homo sapiens
gccatcagtcagtggcaggaatgggccaagctaaaaccaaccaaatatctcccatccagacggcactctcctgaccacagaacccactgcacacacccagcagccctgcacacacccagacc

SEQ ID NO: 10136 - DNA, 122 bp, Homo sapiens
tggcctgatgcagaccagctggtctagaaaggccttcacggcctcagggagcctgggaggcggcctgggggagaccatgaaacagcagatacaccagagaccagagatcagagagaaaacaa

SEQ ID NO: 10137 - DNA, 122 bp, Homo sapiens
cccagagacctaggacggaaaagcgaccgagaaacttggctccctgcccactctagagcgcgtctggccccggggcaccacccaggtggtgctgcctgggaggaaaggcggcggagctggga

SEQ ID NO: 10138 - DNA, 122 bp, Homo sapiens
atctgcttaaaatctctccctctgggaaacccttacctgattaagtaaggtccctgctatcgttcctatagaaccctgccctgtcagtgtcatacatgcaacattctctgtgtgttttccac

SEQ ID NO: 10139 - DNA, 122 bp, Homo sapiens
agatgaagactgagcggttgtggccgcgttgccgacctcaagcagtagttggcttctccacgtagaacccgggagtaggagactcagaattgaatctcttctccctgcccgctcctgtgaga

SEQ ID NO: 10140 - DNA, 122 bp, Homo sapiens
caccatgcggtgctgcttctctggcccccgtagctgctgtgtgaaatcttgttgaggcgccgccttgtcctcaagttgtcactcaagcctgtttgaatatgagcaaaagaggaaataatttg

SEQ ID NO: 10141 - DNA, 122 bp, Homo sapiens
cctcaagttttgcaatgagaggtctgttaatttcatgtgggtgatgcagccctgtgcaggcgccgacatccaggtgtgccgaagagttctctgcgacatccaggtgtgccgtagagttctct

SEQ ID NO: 10142 - DNA, 122 bp, Homo sapiens
gcaccatagcccttacttgtgaggagtagacttcaagaagtaagtgggtgcatgtgaacgcgcaggcagactaaaggctacaaaaggggatgaaatatggtttctcagggtgccaaattttt

SEQ ID NO: 10143 - DNA, 122 bp, Homo sapiens
tagtactttgtagttacaaagctaaaaattatgtttttcagttcaataaacatttcacaacgtagctttaagaaaatcaagtctatcatctacattctagagatggtaacagagtcagatgg

SEQ ID NO: 10144 - DNA, 122 bp, Homo sapiens
tgggcatgtgcctgtaatcccagctactcgggaggctgaggcaggagaatcgcttgaacccggaaggcggaggttgcagtgcaccaagactgcaccactgcactccaacccgggcaacagag

SEQ ID NO: 10145 - DNA, 122 bp, Homo sapiens
gggcgccccctgcaggctcccggcatcggtgccggagaagcacggtggactctgagctgccgccggttttgtgggtggctttgcctccctcacttctaaaacctccagcggtggcggtcccc

SEQ ID NO: 10146 - DNA, 122 bp, Homo sapiens
agacccctgacagtcccatatataatcttaccaaaagtctcagatcccttttctactctgcgaagtttccttccaacaggaaaacacacattccggaacctctggaacaacatgtcaccagg

SEQ ID NO: 10147 - DNA, 122 bp, Homo sapiens
tcttttaggagccccgaacccaaagctctttgaaaagctgccgaagctccaaggttcctccgcttcctgcccgcaggcggaaccttagagcttcagccatggaaattaacctcttccggttg

SEQ ID NO: 10148 - DNA, 122 bp, Homo sapiens
ggggacagaggttgcagtgagccgaagtcgtgccactgcacttcagcctgggcgacagagcgagactgtctcaaataaaaagggctatgggttgagcctggtgacagcctgtgtggtgattg

SEQ ID NO: 10149 - DNA, 122 bp, Homo sapiens
ccgtttccactcggctcaatcagcttccagcctcagaaaacgctcacccgtctctggctgcgaggcacccacgctgaccttaaccccttggcgtcctccaccctggtgtcctatctcgggat

SEQ ID NO: 10150 - DNA, 122 bp, Homo sapiens
ccctccgatccaccgcggccccccgatccctctccgcgtcgcagtcgtgcgccgcgccgccgaccccggccccggccccagacccggctccgtaccccgccgcagcctaggccccggccccc

SEQ ID NO: 10151 - DNA, 122 bp, Homo sapiens
acagggcacagttcagctcctctgtggatgcgtccccagatcgcaggatttccaagaaatcgagcctgtcccttgtgcacttgggaataattccccaagacagcacttcgggattccgggtt

SEQ ID NO: 10152 - DNA, 122 bp, Homo sapiens
ggctgggaatggatggcttctttatgaccctgaggaggtatggccaacaggaagcacagtcgctctcttctgagctcatttttcaccctggctggttttgctggagatgcaaccaaagctaa

SEQ ID NO: 10153 - DNA, 122 bp, Homo sapiens
gagccgggcgcgatctggtggccgcgccgggaactgcgcccctgcggggagcaggccaagcgcctagatctgaattttcccgcctgtgcccgcagtccaggtgcctgcctccattcccctcc

SEQ ID NO: 10154 - DNA, 122 bp, Homo sapiens
ctacccttgtgcttgcgttgcccacaagcttgtagtcagaagaactcgcctgggagggatcgctcctgggagatccgaacgcgggagggcctggagcgcggcggcagctggatagcattcgg

SEQ ID NO: 10155 - DNA, 122 bp, Homo sapiens
tccaggatgccctccattccaggctgcaatggcagtccagacctgcctgcttctgagagccgggacagtcctgaggtcttcagagatgggggtgtggtgtgtcagggccccaggctcggaac

SEQ ID NO: 10156 - DNA, 122 bp, Homo sapiens
ggtgctgccttccagctgggcgtgtgaagggcccgtgcaaagcctctgcctcccctaccccggctctcagggccctgaggagcttacgggctggaaatggccacttcctgaagaacggtaac

SEQ ID NO: 10157 - DNA, 122 bp, Homo sapiens
acgagctgaaaaggaggcggatggcccggacagaagaggcggggctttcagaccagagggcggagccaagagctgaaaagggtggtgatttggtccagaagaggaagaacttaggctccgga

SEQ ID NO: 10158 - DNA, 122 bp, Homo sapiens
gcggggagacaggcatttaacgacgactcacacgatcacttaaatacaactgtggtgaaccgcacaagagggacgcgcggcggtctgcggggaatgacgaggccgacctcgtctgcgaccca

SEQ ID NO: 10159 - DNA, 122 bp, Homo sapiens
acttgcacggagccctcgcggtgaggacccgccccaaattttagtttctccaatccccagcgcaggattaagtcgcagttacgctagtccccgccccatgaccttatccccgccccctgcaa

SEQ ID NO: 10160 - DNA, 122 bp, Homo sapiens
gtggcagcggcggtggctccagccccgcgttcccgggcaccttctgcctgcctagccccgcgccctccctgctttgcagcctggcgcagccacccgaggcgcccttcgtctacttcaagccg

SEQ ID NO: 10161 - DNA, 122 bp, Homo sapiens
gccaccaccatggccagcacacgcatggccctctgcgggcctgcctgcccgcccagaccacggttccggatggtgagcccaatgctcacaatagcaaagaggatgagcgccagtggcaggaa

SEQ ID NO: 10162 - DNA, 122 bp, Homo sapiens
agaagaggcgggagtggcgactctgcggacaggggcgccgagcgtcctggtcgttgttttcgtcgccgccgcgggccgtgcaacccccgaacgctgcgcccagcggccgcggcaccctcgtc

SEQ ID NO: 10163 - DNA, 122 bp, Homo sapiens
ttgggaggaagaatctgagaatccttgagaattgtgttcaaaacgttgggtatatgagagcgcgtgctttccaggggaagagcccacggttttcaccctatggacagcccccgaatccctaa

SEQ ID NO: 10164 - DNA, 122 bp, Homo sapiens
ttaacagcagccagtccttggaggcctgggcagggccacaacatagcagtacaaccaaaacgggttcaggccacacgctggaggtaggggctggaccagatctccagcttcagtcctcccca

SEQ ID NO: 10165 - DNA, 122 bp, Homo sapiens
tgtgtgtgggatcttggagcccctggtggaaggggcagcccgtgtgtccgcgtgtgtgttcgtgcccatgctcgtgtctcctgtgtgtcggtgccatgtgcacacgggggcccagttcctcg

SEQ ID NO: 10166 - DNA, 122 bp, Homo sapiens
aacgctggtgcttagcaacaaagaagtggtgcaacctggctggccagaagatcccatcctcggtgaagatgaggttgggggtaacaagatgctcagagcctcagctctctttcagagcaaca

SEQ ID NO: 10167 - DNA, 122 bp, Homo sapiens
gggatgtggacccaaaactacaagaaagagtgtcctcgaagcctatgtcctaccgccccacgctgctgccaggcccgcaggaagatgacaggcccggcctccactccttctaaggtcgtcgc

SEQ ID NO: 10168 - DNA, 122 bp, Homo sapiens
tggcggagggcagaaggcagagggcagaggtgagcgcagcctccagccaggggtgcggggcgccgggctccagcggggcctcacctgtgcgcttgaggtggaagcagacgtccttgagcgcc

SEQ ID NO: 10169 - DNA, 122 bp, Homo sapiens
ctggagacgggggaagtagagggtgcccgcggagatctgagcgcagagaccctaggagggcgggttccagatcccataaatgagataattaacgggatttacagcactcctaggcggggctc

SEQ ID NO: 10170 - DNA, 122 bp, Homo sapiens
ggaacccgaccgccctccgctctcaggtacctcctgaagccagctgtgccgtgtggatagcgttagattccgcagctttccacctgcgctgctgggaactcacctgaaagggaaattaacta

SEQ ID NO: 10171 - DNA, 122 bp, Homo sapiens
cagcgctcacgggctctcccacgcaggagccccagtgagatgggagccactgagtgccctcggcggtccctggaggggtcctgagggcgtcgtaacgtgtctgttttctcttttggtggctt

SEQ ID NO: 10172 - DNA, 122 bp, Homo sapiens
tggtaattcaaatcatgtgtcagattttgttaaagtgaggacatacatccacaggaatgccggtgggttttaggcgaaaaggcactattctgtgatttctagtactagtacttttatttttc

SEQ ID NO: 10173 - DNA, 122 bp, Homo sapiens
ttctggatcatcctgtccagagagaccgttgggtcagagggttcctgtggacccctggggcgagcttaatgtccccgaaaactgcgtgctccagtatcacttgaatgcccaccgggttccgg

SEQ ID NO: 10174 - DNA, 122 bp, Homo sapiens
atcaccctcgggcccgacccgggtagcgccgcgtctgcgccgcagctgcctatggcgcgacggaaaagtcccaccctcgggtcctagtggccctaggacggcgttgcgaagaatgaccgcgg

SEQ ID NO: 10175 - DNA, 122 bp, Homo sapiens
gctgcgggagggaccggcgcttatctgatgggcctggcctttctcacagctcggtggagccgccctgccaggcccatcttggccggtgggtcggggctccgcaggccccgtgggctcagcct

SEQ ID NO: 10176 - DNA, 122 bp, Homo sapiens
aacccctctcggaacacagttcacacccacacagcgctaggaacctggggaaacccctctcggaagacagttcacacccacacagtgctaggaacctgggaaaacccctctcggaacacagt

SEQ ID NO: 10177 - DNA, 122 bp, Homo sapiens
tgctggattacctgaactgacacattcacgttttcgtaaaatttactgcgaaagtcttaccgtcttgcagcttccttgcaaaactgtaacttccccaaaaccacaaccttgcagctccattt

SEQ ID NO: 10178 - DNA, 122 bp, Homo sapiens
gaggtctctggggatggggaggaaatgggtctcgctgaaggtgacaggctccttgggggacggccagctgtctggatcactgtccaggggctgtgtccagctcggatacctccgaggtgagt

SEQ ID NO: 10179 - DNA, 122 bp, Homo sapiens
cagtctcctccttcacgttcttggtgccgtccttgccaaagaagatgcactcatctaccacgcccgtcaccaccacgtccacgtggaagcctgacgctccgcagtcccgggcagggggcgga

SEQ ID NO: 10180 - DNA, 122 bp, Homo sapiens
agcagtgtcagccctgggaccagaggcacccgtttggaggtagagcagttaatacacgggcggattaggtggctcttaggcttcgccacaattagaaactcaggacgtttgaaatattaact

SEQ ID NO: 10181 - DNA, 122 bp, Homo sapiens
agattaagtaacttgcccaatattttactgcgaggagcaggcaggactggctggtaggtgcgtgaggacggctagggcagcagaccctcaacctcgaaggacgacgcgagcccgcctcccac

SEQ ID NO: 10182 - DNA, 122 bp, Homo sapiens
ggcatgaaaatccctcgattaaggaatacaaaaatgaaattttagaaatttatgaagtaacgtttaagatgtttaagtgtcatgcatggttacctaaaatagtactggtggcccagtgctgg

SEQ ID NO: 10183 - DNA, 122 bp, Homo sapiens
ttctggttttctgactagccattctaatggatgtgaaacactttttccttcaactggtaccggatgtgaggattccaattgcttggaatcagttgtcccggagagcctctgggtaaagaaag

SEQ ID NO: 10184 - DNA, 122 bp, Homo sapiens
ggaggcataacaaagtcgctttccattagaatgaattgaattttattaaaagcatcccatcgctcaaccatgtcatgagtggaggagtccttctccctgtcaaccccagaccatcccccaac

SEQ ID NO: 10185 - DNA, 122 bp, Homo sapiens
caatccttccaccaggcaaaacacatcatctaaggaaaagaagtgaggtcggaacaccaacgcatcatctcactgcatggccctggaggctctgccgtttaaagaccccagaaccttcccca

SEQ ID NO: 10186 - DNA, 122 bp, Homo sapiens
cagtcctccgagggctgggcttctggggcaggtcatggctattgcaaccaaagggaggcccgggtgccagtgggcggccgccgcggtgtggagggcgccagggcggtacggcgcagcgggcc

SEQ ID NO: 10187 - DNA, 122 bp, Homo sapiens
atagttaaccgatactgtgaaaatctgctaacagtggttgttttgctttttgggaagcagcgttccttgtctggctgctgttcccccctggtcacatgggcacactatgattaaatcattcc

SEQ ID NO: 10188 - DNA, 122 bp, Homo sapiens
ggggttttcagccctcgcgggtgggcagcgtcttgtcctcaggtgtagatgctccagtctcggctcagccaaacactgtcagggccccctggaaagcagaagccgagcttgagtgcccccag

SEQ ID NO: 10189 - DNA, 122 bp, Homo sapiens
gccgggttcccaggcaatagccagggcgccccgaggcacgccacgcctccgcttgccgcgcgcagaactgcctcagcaagactctcgcagtcccctcggctgggccccaaaactcgagtccg

SEQ ID NO: 10190 - DNA, 122 bp, Homo sapiens
cagtccctcattgtgaaggaggagctaccctctggggctgggaggactgcaattgggggacggtgatgggagcagaggctgggattcaccacagaatggcccctcctttaggggaggagggt

SEQ ID NO: 10191 - DNA, 122 bp, Homo sapiens
aaaacccctctatcatgtttcatttacagggggctgatggtaaaacgaagatcgccacaccgcggggagcagcccctccaggccagaagggccaggccaacgccaccaggattccagcaaaa

SEQ ID NO: 10192 - DNA, 122 bp, Homo sapiens
gagcacaaacaccagccctgcgcgccggggcaagcctaggcagacttcgctaccccaccccgaccactccgtacctgtcttccagggactgcccgcccctgggcgatccacctcgaagcccc

SEQ ID NO: 10193 - DNA, 122 bp, Homo sapiens
ccccgggcggaagctgtgtcagttgccggaagtcggcgtgaggtggggcttatgcggcggcgtggtgaaatagatatggcgaccgagggggatgtggagctggagttggagactgagaccag

SEQ ID NO: 10194 - DNA, 122 bp, Homo sapiens
tgttcccaaaatagcaccttccattttggtagcttcaactttgcagctgctgtgtctcttcgtcgtctgggaagaaaactttcacattaagagttgctgatgcggattttctttctttcctc

SEQ ID NO: 10195 - DNA, 122 bp, Homo sapiens
agcgtccggctgggttggcttatcgcgcaacccgcgggctccgagaaaagggggagaaggcgtctggtgaccccatctgagcagctctctcctgacgtttaacgcaccccaaagcaagcggg

SEQ ID NO: 10196 - DNA, 122 bp, Homo sapiens
aaggcacctggctgtgtgagtggcaggtagaagggagtgaggagacccgagggggtgaggcggccagcagggctgggccagccctgtcccccaagatacaggctgtctggacagcagatata

SEQ ID NO: 10197 - DNA, 122 bp, Homo sapiens
tgggactgcagggcttggggagggaagcagagtgagagctggaggcagagccagggtccccgggatgccctctgcctctgtgctcagctgcgcctgaatccagctgcatcacctgaatccag

SEQ ID NO: 10198 - DNA, 122 bp, Homo sapiens
tgccgtccgtcacccctttctttgattaggaaagggaactccctgaccccttgcgcttcccgagtgatgcaatgcctcaccctgcttcggctcgctcatggtgcacgcacccactgacctgc

SEQ ID NO: 10199 - DNA, 122 bp, Homo sapiens
aacctacagggtgccagggacacagctctgcatggcaggcaccaaggttaccccatttaccggggaggaaacactctaggcctcatagttaggaagcaggtgagtcaggatttcaaccctgg

SEQ ID NO: 10200 - DNA, 122 bp, Homo sapiens
gagttggtcagggagtttcgggtttgagctccaggagctccggcagtggcgataagagtccgacagtccgacttccagtgagggcccgcacagaccgggcatggcttggaaggaatgccggg

SEQ ID NO: 10201 - DNA, 122 bp, Homo sapiens
tctctgcaggctcccgcggcctcgggagcgctgttcttccgtctctgccgctgagtatgccgcgccgcggtcacctgaccaagtcggacttggaaaccggccacccttccccctctggggcg

SEQ ID NO: 10202 - DNA, 122 bp, Homo sapiens
ctaggccactaaccatggaattgacacagagctctctgcagttctaaagatggcaccatacggccagatgcggtggctgacacctgtaatcccagcactttgggaggccgaggtgggtggat

SEQ ID NO: 10203 - DNA, 122 bp, Homo sapiens
actgcagtgaattatcaaatatgcatctcactgttctccacattaaacatatttttgttgcgtaaattcatgttaagacgtctataacaattacactttggtaaaattgttggatgttaaca

SEQ ID NO: 10204 - DNA, 122 bp, Homo sapiens
cgaaattgctgcatccctttggactgggtctcattagcagaggttggagtggccactggccggcacacgacactttaggccagcagggggcgggtaagctccagggcactcgcccgagcagc

SEQ ID NO: 10205 - DNA, 122 bp, Homo sapiens
ggcgactgcagccctcgctacgtgagctcgatcacaccagcgccccggcgactgcgcaggcgccaagcccgtgcctccctgctgcccccacccgtggccggcccgtggagtctgaggccgag

SEQ ID NO: 10206 - DNA, 122 bp, Homo sapiens
ctggattcccattggtaaagcctgagctcaaataacagctaaagagcatctcctaagttacgtggccaccatgtggtagagctctgtgtctaccagactctaaaagcccaggcttttctaac

SEQ ID NO: 10207 - DNA, 122 bp, Homo sapiens
ggtggaaagaaatgccttctgcataaatctagttagtctgagtcgttttttgacaacttccgggaccagacttcaggcagtgctggaaattgttctctttaccatatctttttttttttaac

SEQ ID NO: 10208 - DNA, 122 bp, Homo sapiens
atgtatcaggaactttgcaacagaacaactaataacatcttaagctccatttgtctagctcgctagtcctcttggcagaggtcataccagcagtggttttgttgatttgctgcatcaaatgt

SEQ ID NO: 10209 - DNA, 122 bp, Homo sapiens
ctggtgtgtattttatttacacttatggcacatctcacttcggagtagccatatctcaagcgctcggtagccatatgtggctagtgagtaaagtattggatggtgcagttgggagcgtcagt

SEQ ID NO: 10210 - DNA, 122 bp, Homo sapiens
tgagctactccaaccacagtggcgcgccaagtaggaggcggtacctgaggaccacgcctgcgcgcggggttacgcaagcgcgcagcctttgcgcacgcgcacgaacgcacggccgcgcagca

SEQ ID NO: 10211 - DNA, 122 bp, Homo sapiens
atgagccaggcaggggtccagagaccaccagcctgcaatccggagaacccaagctaggcgcgagccggtgctgtgatcccgccaaaggagaagctgccttcccggggaaggggcagagaggg

SEQ ID NO: 10212 - DNA, 122 bp, Homo sapiens
tgacaaggttcccctattatcagtgacaatggtggaatgtggaggtgaagttaacaccttcgtggctacagagtttccttagcagagctgtggagtgtgacaatggtgtttgtgtctaaact

SEQ ID NO: 10213 - DNA, 122 bp, Homo sapiens
acaggacccaccttcgcgcctctccgcacttaggaaaacgcgccgcagcgcgctagctggcgttggaaagatctagcaacactgagagtctgtgtctgtcaccggaagaaaatctccacagc

SEQ ID NO: 10214 - DNA, 122 bp, Homo sapiens
acacggtgaaaccccgtctctactaaaaaatacaaaatattagccaggcatggtggaggacgcctgtagtccgagctacttgggaggctgaggcaggagaatggcgtgaacccgagaggcgg

SEQ ID NO: 10215 - DNA, 122 bp, Homo sapiens
gaaatgtctttgatgtgagttctgtaggtagtggcagtttcctctgctctcaaccaaattcgtttacaagcctcctttactcttaggtcacaggtggcttttctggctttgacctgagcggt

SEQ ID NO: 10216 - DNA, 122 bp, Homo sapiens
aaaaccaagctgcttgggtaggaaggtgcaatgcaagccaattgtttactgtatcttgtccgctcccagagctgcgcccgagctctcgcgttaactaggcaacatcgttgccacggtaactg

SEQ ID NO: 10217 - DNA, 122 bp, Homo sapiens
gtcttgagcaggactcctcagctgggggtccaagccttcgcctctccagcagtccagtgccggccttatatagcacagctggtggctcagcctgtggcagccagccagaggaagcagcagcg

SEQ ID NO: 10218 - DNA, 122 bp, Homo sapiens
caagggcctggaccgcctgtggtctccatggaaacccgccagccacagggggcgtgacgccgttgagacagacagagatattcacctatcagatcaaagttatctgggcagggcgaacaaac

SEQ ID NO: 10219 - DNA, 122 bp, Homo sapiens
gagcggagctgggacccgccagggtgggcgccgggctgggacccgcggacgtcgggaaaccggcctgcgcacctgttccccagggcccaagccgccttccagagacccataggtttgggaag

SEQ ID NO: 10220 - DNA, 122 bp, Homo sapiens
tgagtcactggaatagtcctgaaagagtgatctgaattagaatagcatcaatgaaggtgacggtgagtaaacagacttgaggtattcagtaaacagaaaccctaggacttggtgattggttg

SEQ ID NO: 10221 - DNA, 122 bp, Homo sapiens
cactttaggtagtctcatgacatctccatgaaaacatttccagagcaaagctccttttagcgaggtttgcctgagcatgatcaggtttgggaaaggtccagcatagtgtctggagccctgtg

SEQ ID NO: 10222 - DNA, 122 bp, Homo sapiens
tggttgaggcgccaccggtgcccagcaacctccccaggctgtggttgtgacctgaggacgcgtgtgtccccgccctcaggccaccgctacgcgaccctgagtgcaccttcaagaaggccggg

SEQ ID NO: 10223 - DNA, 122 bp, Homo sapiens
ctttcaaggggcatcgccttatcaccctcccctagatccttggcctttccgggcccagaacgctaaggaagcccagcagccaggaggagttgggctcccgctccacagtggcccggcagtca

SEQ ID NO: 10224 - DNA, 122 bp, Homo sapiens
ccatggcggacattgtatctgcaacccctctgtttacttttaggaaaccctgccacaccccggcccaggtgttaggacttcccattgtgttttcctgtctacatacagatgccacgggtctg

SEQ ID NO: 10225 - DNA, 122 bp, Homo sapiens
ggcgggcgcctcggcctccccgccccggaaccctgcaccgcccagagccgccacgcctcccggctgtaggctccgcatctgtaaaatgggccgatgaaccccaagggtcggctcagacccac

SEQ ID NO: 10226 - DNA, 122 bp, Homo sapiens
tcagaggtctgcgtttcagcacctgggtcagcgcttcccagggtcagcaccagggatagacgccattgtcgcttcgtgcccagacaactacccagattttgtaattttcttgaatgccaagt

SEQ ID NO: 10227 - DNA, 122 bp, Homo sapiens
attgggtttggagcattatgttttttaagagtgttaacttgtattcatttgtcttttacccgggagttattcaaaagtggggtttcagtgtgcaaaagtttatctctgtaatggatctctaa

SEQ ID NO: 10228 - DNA, 122 bp, Homo sapiens
gtcgaaccgagccgaggctaacagtgccttacctgacacgggcgaagagctagaaggccccgggcgagaagaccactaggcctcctccgcctggcctccccgaccccaacgctgcccggtca

SEQ ID NO: 10229 - DNA, 122 bp, Homo sapiens
caagaagaggtccgggaggatctatcaggagtgtgggggctggtggggcctgccctgtagcgaggcttagggtatgggcccctggggggtgagagaggacaagggatgagagttgggaggta

SEQ ID NO: 10230 - DNA, 122 bp, Homo sapiens
tcctcccaacacgcgcctcacccgtgcctccatgcacaatcctgagcctcggcatccccgcgaggtgcaggttccagctttgcccaccaccccaccacctacctacatggacacgtgtggtt

SEQ ID NO: 10231 - DNA, 122 bp, Homo sapiens
tccaaactacaaagtttctgaagaagtctccctagatagaaagacatctgtctacaagatcgagtgggatgcttctgtgtgtttctagggtggaaaagtctgtgaatttaataattaaaatc

SEQ ID NO: 10232 - DNA, 122 bp, Homo sapiens
ttccagccccatcccccctacggtaggaccagtgcggggctgagctgtggcgctggggtacgggccacacggcctgccccgctccggtcccggcctctttcgcggccctctgttgcctgccc

SEQ ID NO: 10233 - DNA, 122 bp, Homo sapiens
actctgtaaatgtgcacacaaaaccccctccaccgccaagtcttctcctgtaccccatcacgttcgtccttggcctcaggctaaacctcaactgcccaaacctggagctcagattcagagag

SEQ ID NO: 10234 - DNA, 122 bp, Homo sapiens
taggtgctaatagcagaagggcagccccgggcagcacggaccagacattgttatgaagaacgtccccgacaagggaaggtcagggcaggtggggtgggaggtggggagagggacatgccagc

SEQ ID NO: 10235 - DNA, 122 bp, Homo sapiens
cctgctcttgtctatggaacagccaaaataaataaaaataaataaataaataaaaaaagccgggcgccgtaaatcccagaactttggatctcttgagcccaggagttcgagaccagcctgtg

SEQ ID NO: 10236 - DNA, 122 bp, Homo sapiens
gagtcttcctgcctgtgcagcttctgatgctgcctccttctgcagcggaagatggagaaccgtgattaccgggatgcacaggagtttgctgctgatgtacggcttatgttctccaactgcta

SEQ ID NO: 10237 - DNA, 122 bp, Homo sapiens
ggggtcccatatggtcataatccagtatgactggtgtccttctaagatgggagagagagacgtggaggcagacagactatcatgtgacaatggaggcagagattagagtgataaatttacaa

SEQ ID NO: 10238 - DNA, 122 bp, Homo sapiens
ccacccccatgcctccttggaccaaccctggggagttctgacatgccccagggcgggggccggggcctgactctgaagttgcgtggcattgcgacagcctgcgttttaattcttcagggacc

SEQ ID NO: 10239 - DNA, 122 bp, Homo sapiens
aaattttaaacaacatatatggctcacatttgtggcttgcactagatttctactggacagcgctggtctagaaatcttctgaccttgagctaagtgtatctgctgtttcccagtctcttcca

SEQ ID NO: 10240 - DNA, 122 bp, Homo sapiens
tggagctgaggttccacccgggatccacagataggatgggcatggagtccacaaggtcagcgtcaggatcctggctttggggcgaggatcctgtgcccgaggcgcaaagctgccctacccct

SEQ ID NO: 10241 - DNA, 122 bp, Homo sapiens
ttacgtcatgtaaacactgtaataatggtgaaatgctgcagatcccttcatacagaaggacgctgggatgattcgtaagggaagagaatcccatgctgcctgccctcatttcctacccgcca

SEQ ID NO: 10242 - DNA, 122 bp, Homo sapiens
ctattttcaaataaaaacactaagcaatgccactagacaatctgtctttctctgctttatcgctgccctatcgccacgcattaaaattaaaaatacctttctgccttgcctttattgaataa

SEQ ID NO: 10243 - DNA, 122 bp, Homo sapiens
agcgtcgagtagtacatgtcaacattggggtggggaaaatctctcattgatctccataagcggcaaaaattaggatactagtttttcacaaaaccaaatgtatttggtgtaaagagttgtct

SEQ ID NO: 10244 - DNA, 122 bp, Homo sapiens
ccgggagctagagaagcgaaatgacatttcctttttaaatagctggagtcggggccccatcgagaaatggccgcgtcggcaggtgggtcgtgtggtggccagggcggcgtggagggaggtga

SEQ ID NO: 10245 - DNA, 122 bp, Homo sapiens
tggggaagtcccctttcctccccactcctgagtctcaacaggcctagtagagcatgaagccggccgcgtgtgctttgtgcgaaggcctgagaccttggaaagggtggctgaagacttatctg

SEQ ID NO: 10246 - DNA, 122 bp, Homo sapiens
gcagaccactgaaatcatttcactgtggaggtctcccaaagacggaaattgtcccaccagcgcctgtcctacctgcagtccccaccaggctgcgcaaacggccctccagccagactagcccc

SEQ ID NO: 10247 - DNA, 122 bp, Homo sapiens
ccctccccttcccgccagacaagggtgagaaatcctttgaaacaggctgcaaggcgcttccgaagcaggttaagttggggattgggaaggatcatctctgccctcgcctccctccagggaaa

SEQ ID NO: 10248 - DNA, 122 bp, Homo sapiens
gcactcgcccgggctctgccgaggatgtgggggctttggtctccgcagagctgggactcccgaaggccttaccagaaactcaggagcagccccagccctgcagagcccgcgagggtggagac

SEQ ID NO: 10249 - DNA, 122 bp, Homo sapiens
cgcacccaaagggtgccatctgaggttaggatcgaggggctgccggtgctggcaggtgctcgttctctcctgtaatgaggaggggctcagacagggacgacatcttcagggggagacagccg

SEQ ID NO: 10250 - DNA, 122 bp, Homo sapiens
aaggacacacccaggttcacacggggcattgtggaatgacacacccaggttcacacggaacgtcgtggaagggcacacccaggttcacacggaacgtcgtggaagggcacacccaggttcac

SEQ ID NO: 10251 - DNA, 122 bp, Homo sapiens
tcggacccgtttcctttccgccgcccggcacagtgaccgaagcattggtgacagcctgtgcggtgacccctcagggctgagacccagcaaggccggcctgccctgtgctgccccaacttcct

SEQ ID NO: 10252 - DNA, 122 bp, Homo sapiens
gctatgacgtcatggcaggcacgccagaggccgaaggatgcaaaagtggttttctgctttcgatgatgcaatcattcagcgacagtggcgggcaaacccctcccggggcgggggaggtgtga

SEQ ID NO: 10253 - DNA, 122 bp, Homo sapiens
tgggtcccacagtcttcatcagggcttacatcacctgactccactctaggccaccggcctcggcacataccagatatatctggcttcagggcttttgtcctggctggttcctccatctagag

SEQ ID NO: 10254 - DNA, 122 bp, Homo sapiens
ttctgctctctcacagtgacttgttctccctgcaggccatccagatcctcatcggcctgacgcacattttctctgcaattaaccctgtgctgtattactatccttttgtgacctggttgtca

SEQ ID NO: 10255 - DNA, 122 bp, Homo sapiens
ctctatcaagccagctacttgttttatccactagagggtagcattggcattggaatgacacgtagacatttacagtttttcaaattgaaagagctgcctgtgaaatgcagactattgccaaa

SEQ ID NO: 10256 - DNA, 122 bp, Homo sapiens
ctcgggcagtactgggaaccaattggacccagctgggggactttaaaaggtttagggctccgcggactgtctgataaacgagaggccgggcacctcccataggttacgcccttgcagcagac

SEQ ID NO: 10257 - DNA, 122 bp, Homo sapiens
agttcaggggatctggctggtagccaaataccttcagcgggaacacctcagcaaactgcacgaacagggcattctaggggtggcaaggaatgcctgttagcctcattgttcaacaaggatga

SEQ ID NO: 10258 - DNA, 122 bp, Homo sapiens
gcctggacaacagtgagacctcatctccgtaaataaaaattagccaggcacatgtggtggcgcatacttgtggtcccagctacctggaggcagaggtgggagaattgcttgagcctgggagg

SEQ ID NO: 10259 - DNA, 122 bp, Homo sapiens
gcagtgttttcaatgtttaataggcttctgttctcctccccacttctgttcccatgcacacgtttatagaacaccccatttaaacttgtttctattaattcttgttccttccttcctttctt

SEQ ID NO: 10260 - DNA, 122 bp, Homo sapiens
atcaagaggagtgtcctgtgctccaggagcctgagaggtggcaaagtccccggggggaggcgtgatggtagggaaggcttctgacatacctctgcaggggccagggccctgagtcccgggtc

SEQ ID NO: 10261 - DNA, 122 bp, Homo sapiens
cccagcctttgcctgggcctggtgctcccgtagggagcggtgccaagattgctcttgggccgtgaggcagctcctctcccaggactctgtcctgtccttatagggctctcgtgggtgggaaa

SEQ ID NO: 10262 - DNA, 122 bp, Homo sapiens
ggggatctccagggttgggaaggctctcatgagaccaagattttcccagagacactccagcgtctcagcgcacactgtgttccctctaagtctgctctgctcagcctagggaatccttttct

SEQ ID NO: 10263 - DNA, 122 bp, Homo sapiens
tcccaccaagtaggctgtgcggccctgggggctgactgtcctcaagcagccaggctccaccgcgcgccgcgctgcgccgaggtccgctctgccgcagggacgctggcagcccgttgaacacc

SEQ ID NO: 10264 - DNA, 122 bp, Homo sapiens
gagccgagattgcgccccaggctgggagacagagaccctgtctcaacaacaaaaacttcgcgttagatcttgcattatagaacccctacaaccggagggcagcttaagttgcctgttttact

SEQ ID NO: 10265 - DNA, 122 bp, Homo sapiens
gacagtgatgagcacattgcccggggaccaggggacgcaagggaggacacgacaggccagcgtggaagggtaggaccaggggctctgatgcgctgccggcatgaggcaaggcaggaaggcag

SEQ ID NO: 10266 - DNA, 122 bp, Homo sapiens
tagcctggatggcaaacccgccctgaatctggcattcagtggtaacaatggcatctccaccgagcccttctgacggtttggctggatagcctgcatacagtctttccatcttttgagtgatt

SEQ ID NO: 10267 - DNA, 122 bp, Homo sapiens
tcagccacaatgcccggcctagtcttgttccctggtttgtttccacttttccaattctctcggctcctgaccttggctttgtgtccagttttccactgtgaccctgacctttggacttggca

SEQ ID NO: 10268 - DNA, 122 bp, Homo sapiens
gctctgggaggaggaaatggggttcttgagggagctcgcgctccagctcgcctcctcctgcgaggacgccccctgcccggacacctgctgcccgagcgagcgtcggggccgggcctccccgc

SEQ ID NO: 10269 - DNA, 122 bp, Homo sapiens
ctgacctggaaaagcttcgggagcggcgacgggaaggcagcaggaggtggtgcggggacccgaggcgcctcgtacccggccgggctgacgcggccccgctacacacaaagcgcttcagctgc

SEQ ID NO: 10270 - DNA, 122 bp, Homo sapiens
gagctgaactgcgtctatttatggagaagcgggactccaggccgcgtttccggttccctgcgccgccccgtgattggtttagggccatagagtccattttacgtaatcggcgttgattatgg

SEQ ID NO: 10271 - DNA, 122 bp, Homo sapiens
cccttctaacaactatttgaccaagagaggcaatcagggggttgtatactgcactggattcgccagagaagggaaaatttaattagtgaaaaggaaagaacactaggaaacatttgagaacc

SEQ ID NO: 10272 - DNA, 122 bp, Homo sapiens
agtcttcagccatccttcacagtgaggaagaccttcctgttacactcacctgcctttagtcgacctgagtgattgcattcacattgaattcgatggctttcctgagggacccaggcaaccta

SEQ ID NO: 10273 - DNA, 122 bp, Homo sapiens
atggagatggagtcattattgacaagctcaccatcactactgatcacatttaagacacatcgagtgctggtgctacaaagagaaataaaacctcagccattaaaagatttaaaaaacagccc

SEQ ID NO: 10274 - DNA, 122 bp, Homo sapiens
gggaggcacgttcaggagtcgcgctttgcgtttccaccccgacaccagcggagcgcggagcggatgggttcacagcataggccactttgagaactctgcgtgacatctgggagttctctcgt

SEQ ID NO: 10275 - DNA, 122 bp, Homo sapiens
gacagctcttggtaataccggaaaggtgcttgagaaactctaaaaggtgtatcacgaggtcgcgttacaactactagtgagagtggctgaagccctagacattgtcaaccctgagactacac

SEQ ID NO: 10276 - DNA, 122 bp, Homo sapiens
gttttccccaaagaagggatttttggcacacaccaaataacatctcactataccaattaacgaaatcagtttgtgctttgtggaagattgccagttgttactcaaaatgtctttcccttctt

SEQ ID NO: 10277 - DNA, 122 bp, Homo sapiens
ttcctgacctgccctctgtaatacatatccccaacctttcaccttcagaaatagccagtacggggacaaagatggctaccacagctatggccatctggagccccgtgagctagaaaagacgg

SEQ ID NO: 10278 - DNA, 122 bp, Homo sapiens
ctgcctgctgcactgcccatccttactgtaatccgactcctccttgcgatgtccttgccgcgcctgtgacatcaggactgagagtactacaagcagacccctccaccccaccccaccccacc

SEQ ID NO: 10279 - DNA, 122 bp, Homo sapiens
attggtgcctgtccgtggcctgttagaagctgggccatacagcaggaggcaagcagtgggcgagggagggaagcttcctgtgtatttacggccactccccttgagggacacagagccagacc

SEQ ID NO: 10280 - DNA, 122 bp, Homo sapiens
tacctggagaaacattcagtggccctttattcacccttgctctcgggagtgctgacccggcggttctgtgatactcctccctgctaccaccccatggccccctgccctgtctgtccctgcat

SEQ ID NO: 10281 - DNA, 122 bp, Homo sapiens
agaggttagcgaagatggtcagcaccaggcagatcatgatggcggtgcgggagcgggatccgcggggcggggcggtggcgcccggggcggggcctgcgcttaaagaggcctggtcggggcgc

SEQ ID NO: 10282 - DNA, 122 bp, Homo sapiens
gaacccgcccctcgatgtccgggcccatcccagaggaggtcggtttcccggaggagcacacgagagacccaggagacacccagctttgagacagcgacaggccaggtcagggctggccggga

SEQ ID NO: 10283 - DNA, 122 bp, Homo sapiens
aatgcgtactcctcccacccttgcggccagagacagtacccgacgttacttccgtaaatgcgctcaatgaattgcggaaggctagagtcctgctagttactacctcttggaatagggtcccg

SEQ ID NO: 10284 - DNA, 122 bp, Homo sapiens
cacctgtgcctgcgcccacctgtacctgcacccacctgtgcctgcgcccacctgtacctgcgcccacctgtgcctgcgcccacctgtgcctgcgcccacctgtgcctgtgcccacctgtacc

SEQ ID NO: 10285 - DNA, 122 bp, Homo sapiens
gtttgctgtgctgtttgtaataaaataattccaccagccccttttggaaaaaccttcaaacggatccatgaatacaagccacttaagacacgcttttacactcacaaagacatactaggtaa

SEQ ID NO: 10286 - DNA, 122 bp, Homo sapiens
gagcccgccgagggctgccccgcctggctgtgtcagactgaagccccatccagcccgttccgcagggactagaggctttcggctttttgggacagcaactaccttgcttttggaaaatacat

SEQ ID NO: 10287 - DNA, 122 bp, Homo sapiens
tttgatcagcggggagtttctccagtgtccagagagatgtcaactgctggaattcagccccggaattgaggaagggtcatggctgaagccaaggaaatgtacctatggggcctcttatatct

SEQ ID NO: 10288 - DNA, 122 bp, Homo sapiens
accagtgccctgtctctgccgggctgggactccgcgagtcactcacctgtaggggaggtccgaggcccgcgcgggcgcaggggcggcgcctgtctcctcccagagcatggctcagctgggcg

SEQ ID NO: 10289 - DNA, 122 bp, Homo sapiens
cttaggtgatccacctgcctctgcctcccaaagtgctgagattacaggtctgaaccaccacgcccagccttgcactgctttcttcacagggctgtagagaggctcagagaagaggtgaaagg

SEQ ID NO: 10290 - DNA, 122 bp, Homo sapiens
ggccctgggagcctggccctcacccctcttctgatagcacctctcactcactctctattccggccacaggggcctcctggctgggcctcaggtgcccctggcatgctctggcctcttggcct

SEQ ID NO: 10291 - DNA, 122 bp, Homo sapiens
ccccgtgcgggaggcccacctatggcaggggaggagggcgggcccctcaagtgaccctaccgattggacaacactcgcctcaaccccgcctcccaagggacttcattggacaacgcctatca

SEQ ID NO: 10292 - DNA, 122 bp, Homo sapiens
attcacggggaatcagagggtggagagggcgtgggtgcctggagatgcctgggaacagaacggctgaggggactccattatctgtactcttcccggggtgggtctaggtctggctcctcctg

SEQ ID NO: 10293 - DNA, 122 bp, Homo sapiens
tcgaaataatggaactccgtgagttccagctccaccatctcgttcttcagctccaggatgcggcccatcaccccgtccaggactttcctgatcagtattcgtttctgggggtggacgaactg

SEQ ID NO: 10294 - DNA, 122 bp, Homo sapiens
gtctctgccaggggctctgtctaggcggctgtgagagtgaagaaatcctcttccaaccgacgatgttcctcagtgaaaaaggaaggaagggcattccaggtctatattttatcatttaaaaa

SEQ ID NO: 10295 - DNA, 122 bp, Homo sapiens
gctttttgatcttggttttggcactggacatcttgtagcactggggttttctggacaattcggttcttcagaaatatcaaagacgattaaaggtgccacatttgttggaagattgccagacg

SEQ ID NO: 10296 - DNA, 122 bp, Homo sapiens
tgacagccttcactggaaaccagacttctctcctaaacccctgcatttcctgggtgaccacgggggttgtgcagtgtggtctgagagtgccacagggacagggcagtccccacccagtcaag

SEQ ID NO: 10297 - DNA, 122 bp, Homo sapiens
gttaaaagtcgagggaattcgctgtccctccgcgctcggataattacccctaaatggccacggcagccccttgtgtttcctggagattagaaccccgcagtcatcaatggcagggccgagtg

SEQ ID NO: 10298 - DNA, 122 bp, Homo sapiens
gccaagccagaggccagcaagaggtttggagaggtggtgagcccccaccgggattccagccgctttggaaaccttggtggcttcaggcacagagccaagtgagatggctgagggtgtctgcc

SEQ ID NO: 10299 - DNA, 122 bp, Homo sapiens
gccttgcagaccagggaatgcagctgcaggcgtgggagtggcagagccggagcaggcagccgagacaaagacacacagtgtaagagagctgctgagtaaaaccatctttcaccggcctatgg

SEQ ID NO: 10300 - DNA, 122 bp, Homo sapiens
ttttttaaaaattgattaaagcccataagcccatattttattccagatgtccttagttttcgacctggtattcttttccattccaggatcctgtccggagtacatcaccatgtcttccaggc

SEQ ID NO: 10301 - DNA, 122 bp, Homo sapiens
caggacttttgtcaagcgctaaagacctagcaggaggcagagtaaatgcaaactgtatcccgagcccggctcccaaagctcctcacggggggaccaggttccctggaggaagcgggtcgcct

SEQ ID NO: 10302 - DNA, 122 bp, Homo sapiens
cccctggattgtgagtgacttaatcactcagcaaacattattgattgagtacctgttatacgtaatatccagataaattctacagggaagggaaatatagtaggatgaacctacaaaggtaa

SEQ ID NO: 10303 - DNA, 122 bp, Homo sapiens
ggaattggactgcgggaggggcgtttgggtggaatgggacctggcacgcctggaccttcccgtggctgctctgcgagagcctgagagatgggaggggaggctgaggtggggagggagcctag

SEQ ID NO: 10304 - DNA, 122 bp, Homo sapiens
cgccgccttctccgcgaggggcctccggggctgcacgggccgcagcgcctctgcgggctgcgcgctgctatctccctgcagcgctggctccaagcgctctgagcgcccggcccgggacctgc

SEQ ID NO: 10305 - DNA, 122 bp, Homo sapiens
ccatgttggccaggctgtctgatatgccttaagcctcttttaaacgcacttttccaggatcggggccacatcctggagctgttctgcctggccgggtgtatctctgggtccctgcctctgga

SEQ ID NO: 10306 - DNA, 122 bp, Homo sapiens
ggtactgtccacaccccaaagaagagctatttcttggacacaggagtgagttcagagtcccgaccagatcctgaaagtgaacttggcaccatttgggcagagcagtccagagttctgactac

SEQ ID NO: 10307 - DNA, 122 bp, Homo sapiens
cactcccctggagactgaccccttagagtgcccacctgtagccaaacacagatagcatcccggcgcaatgaattagcactctaagctgattagagcagctctgcacaactctattttattga

SEQ ID NO: 10308 - DNA, 122 bp, Homo sapiens
aaaactgtactgacctccttgccttttgccttctccatacttgtagaagaagcggagcctcgcaacatgcttccaaaatggcccctgccccaagattgctatttgcaaagtctcctcccact

SEQ ID NO: 10309 - DNA, 122 bp, Homo sapiens
cacaaaaactgcaccaggtgtggtttcaatgctcaacttttgaccccaattatgcaaatccgaattggccttcagtcttggactggagcaggcctaggttgggagttagcgcaccacagcct

SEQ ID NO: 10310 - DNA, 122 bp, Homo sapiens
caagtccgcgcggatccgttcagcctcagtggacacagctagaaaatgggctctgtactccgcggagctcttcccggcgggtgggggctcggtggaggcggagtccggcctccgggcagcac

SEQ ID NO: 10311 - DNA, 122 bp, Homo sapiens
gcgggctgggtgtgaaatcagaggaggccgcggctcccccggccaggattggaggctcctcgcgcaacctaatgcgggtgtccgggcccgagcgcttcccgcgcagccaggccttgtcggtg

SEQ ID NO: 10312 - DNA, 122 bp, Homo sapiens
ttgcgcttcagagaaacgcacttcagccacatattgtggctaggatcataacagaacatgcgcttactgttgagagcatagagatagtctcgaattaccattaggtcaaaggataaaaaaga

SEQ ID NO: 10313 - DNA, 122 bp, Homo sapiens
ggaggggcgcgggtccggctcagacctggcgggggcatcgcagagtacaagcggttgacgcgctgctgaaagggtggggagcataagatacatattaaatataattatatattctatatatt

SEQ ID NO: 10314 - DNA, 122 bp, Homo sapiens
agtcccactcctgcaaacttcagcggcgattggctgaacggaaggggcgtggagagcgcgcgccaaagcacaggaggcggggccggtggaaggggcggggctgagggcggggtgtgagacag

SEQ ID NO: 10315 - DNA, 122 bp, Homo sapiens
cccacatccacggccaatggccacacctgactggtcccaatggatgtggtgtgaaggaagcgcacgcgtcctccgtggaacacgccggccgtcggcgttaaacttgtaggacaaaccgccgg

SEQ ID NO: 10316 - DNA, 122 bp, Homo sapiens
gagctgtggccccagccttggggctcatgaaagcctctggcagagaggatggcctggcagcgggcggggtttccctgctgggagggaggcagggcccgactcctgctgcagtggctctgggg

SEQ ID NO: 10317 - DNA, 122 bp, Homo sapiens
ccgctcggctcctctcgaccccacaccgccggtcgacatgatccgctgcggcctggcctgcgagcgctgccgctggatcctgaccctgctcctactcagcgccatcgccttcgacatcatcg

SEQ ID NO: 10318 - DNA, 122 bp, Homo sapiens
cattttaattgcagcaagccaacattttttgagattatacaaaggcttagcaccacttgacgtgttatttattcttcataataattctgggaagaaggcactattactgccctcatttcaca

SEQ ID NO: 10319 - DNA, 122 bp, Homo sapiens
cctcctcctccaaacacctagggccctcactctcgggataaaggactgacgcttcagctccgtccctcagggcctcgggagtctttcgatcctcagtccctcactctcttagggggccgaac

SEQ ID NO: 10320 - DNA, 122 bp, Homo sapiens
cgcggggcgggcgttgcggccggtgcccagctgcagatccgcaggcgatcgcactcctggcggccccagctttaagcaggcagcggccgatccgccctgctcgagggctcagggctgaccca

SEQ ID NO: 10321 - DNA, 122 bp, Homo sapiens
cggcggcgaaggaacccgataagggtgagatcttggtcacgcgcaggcggcgggtgggtgcggttgcggtgtctctaggaaatgattcccccaggaacgcgaagtaggactcgttttagggg

SEQ ID NO: 10322 - DNA, 122 bp, Homo sapiens
ctactttttttctagaagaaaaaaaagcattttaaggcaaaaactcgtactgtactgttccgtgccactgtaataaagttctccagtgaatttagagaaaaggcattgccctgtgttttctc

SEQ ID NO: 10323 - DNA, 122 bp, Homo sapiens
cggtgccacactctgcacacacttcgtgtggcaccggtgagcgtgtgtgcagagatgcagcgacggtgagtgtgtgtgaagagggcagcgcggatgagtgtgtgtgaagagggcggcgcggg

SEQ ID NO: 10324 - DNA, 122 bp, Homo sapiens
gatggggctcagccttgcgcctcgggggtcgtaacagacggcaaggtggaggtggcttcccggccccgcagccggacctcggcaccccgagcccgttcaccggggccgggtcctggcgggcc

SEQ ID NO: 10325 - DNA, 122 bp, Homo sapiens
aaagtctgcacatgtctgttctaggtacgcggacgtatctgaccgtgtgggcttgcgatgcgcccaggtgttctcgtctgcgatgatctgtgtgtggggggcgtgggtaggtccgcattgcc

SEQ ID NO: 10326 - DNA, 122 bp, Homo sapiens
tcaccacgtggctgcctcttgaccctggcagagtctaagttccctttcttctctcagcaccgcagggcaaggcccgaggaactgctcttgcctgagctcctgtcgtgtacttcggagggccg

SEQ ID NO: 10327 - DNA, 122 bp, Homo sapiens
tcccagggaagcctctgcacgccctcccccgctgctctcggtcgcctcctcgccgccagccgccccgggtgcatcccggcttgctccgctccacgcgacccagattcctgccccgcccccgc

SEQ ID NO: 10328 - DNA, 122 bp, Homo sapiens
ccgccaggaggaggcacagcagagagacgctcagccccatgtaggtgatgacagtcagcacgggatcctcctcctgggacccggaaaagaagagttcacagtgatgctttcctgctctgggg

SEQ ID NO: 10329 - DNA, 122 bp, Homo sapiens
taccggctgctgaggcggccccggctgcagcgacagaggagccgctcccgcagccggacccggcctgccaggggtaggcgccaccccgacccctgacccctagaccctcctaaggccactaa

SEQ ID NO: 10330 - DNA, 122 bp, Homo sapiens
aattaaaaatactttgcttttcaggaaaaactactactcccaattccatacacttctcttcgaatctatattctggaaccaacaatttcacataaagtaaaggattaaaagtcactcaaaag

SEQ ID NO: 10331 - DNA, 122 bp, Homo sapiens
gagcccgttgtccctgccccttatgtgctaagaaggaccctcagtcacactctaactgtacgtctttctcaggacccttttgacaagaacctcccctcatgtgcatttcttcctgtgttttc

SEQ ID NO: 10332 - DNA, 122 bp, Homo sapiens
tcttttaagcagcataactgttcagctaaatcttggccagaaccataacacaggaaatagcgtttctgggtgaacaaggccagaacagggtaggggcttgcttcccttgagtgcttctcact

SEQ ID NO: 10333 - DNA, 122 bp, Homo sapiens
ccaaaactctaaccaacagcccagcaaaagctatgccatggcaggccttgttactcaccacgaggctgactttgcctctgtggaggtagaggtggccatctactgtgcagtcatcctcattc

SEQ ID NO: 10334 - DNA, 122 bp, Homo sapiens
aatgacaggactgcaaagcaagccatcaaagagcagtagcaaagagaacagcaaaaggggcggaaaaaaagtcctgtgaaggaccagaaatagagcagtggacaactggtattaaatacaca

SEQ ID NO: 10335 - DNA, 122 bp, Homo sapiens
gccccagctcttggaggtaagcggctgtgtgcgggtggtcgcggtgagtgtgcaaggccgcggtggccgcgtgacaagcctgcgctaccagtgcgcccgccggccaggagaacggagcttgt

SEQ ID NO: 10336 - DNA, 122 bp, Homo sapiens
aaccccgccttccaggtccgagctcagaactgggacgcactctgggcctgtgctgtctaccgaaagcgtggcttggccacgctccgaagccgcaaacccacgtgtgagaggctcccgcctct

SEQ ID NO: 10337 - DNA, 122 bp, Homo sapiens
caaggattcccaactctgggtccccagaagctgtcagctgggctcccttcttcccctgtgcgtaccctgctcaggctgggtacctgagggtgcccaatggcaacatgagcagggggcacggc

SEQ ID NO: 10338 - DNA, 122 bp, Homo sapiens
cccccgtgaaaggtagaggtggcttccagctctcttctctagctcggctaaatgcaaaggcgccttacctggagggcttgtcagagccaggactgaaggtgggatctgctgcttgtaacctg

SEQ ID NO: 10339 - DNA, 122 bp, Homo sapiens
cgctgcccgctcacactatgccctccccagggccgctggttctggcgagtccggcacaaccgcgtcctggacaactatcccatgcccatcgggcacttctggcgtggtctgcccggtgacat

SEQ ID NO: 10340 - DNA, 122 bp, Homo sapiens
aaacaccagctttgctttttcttcacaagcctttattaggttcttgggggaaagtgggagcgagatccatcattacagaaatgaggacggggtctcaggatggggctgacaggctcccaatc

SEQ ID NO: 10341 - DNA, 122 bp, Homo sapiens
cattcactgtcgcttagaactgaaaacttagggtcgtccatgcccagaacgtcggcagtgcggaccagccccaggaaggcctttctcactggcttctagaaggtggggccggcccccatgcc

SEQ ID NO: 10342 - DNA, 122 bp, Homo sapiens
ctctttcccgggaaagcctccctcggttcctgcgcggccgcacagcctggacgcagcgcacgcgggcaccggcctgactctcccaccccgaagcctgctcccaacctaagtccgccctgact

SEQ ID NO: 10343 - DNA, 122 bp, Homo sapiens
ccccccttggctcaggtccttcttaggtcgttctggggcaaacaccggacgggaagggggcgccgccaactcccccgcggggtttggaggtttcctcgcctccaagtcccgcagggcagggt

SEQ ID NO: 10344 - DNA, 122 bp, Homo sapiens
gttcctcgccctgggcgttttccttctcccgcctccacactcggggtgttctgctcaccgcgcgtgccctagacggccttgatgaggaagcccgccttctcctggatacctccttgatgccg

SEQ ID NO: 10345 - DNA, 122 bp, Homo sapiens
ttgaaaccaatcacatttttctattttataaaataatgagaccaagacagagtgcagccacgcgtacacctcagccccgggctgatggctcctgccctccagcctcctgccccagatggccc

SEQ ID NO: 10346 - DNA, 122 bp, Homo sapiens
taaatttttgttgtgtggccccggaatctggggtagactctgtgactcacattactgtcacgtttccttgtctttcaagtgagaaagctagcagttaaagtgactcctagtagaagtccatc

SEQ ID NO: 10347 - DNA, 122 bp, Homo sapiens
gaattgtcagtcgcgttcggactcgcccgcctggcggatatcggctttgggtagagcacgcgcctgtgggggatccccagggtacctgggaggtcccgttaccactgcagattgggttgcgt

SEQ ID NO: 10348 - DNA, 122 bp, Homo sapiens
ggctcacgctgctcggtgctgtgcacacgcgtccctaatcccagatgcctgggagagcaccggctcacgctgctcggtgctgtgcacacgcgtccctaaacccagacgcctgggagagcacc

SEQ ID NO: 10349 - DNA, 122 bp, Homo sapiens
caggcgccattctcccctcacctgcacggcccaggcttcaggtgagccacggggccaaggcggccaacagctgaggcgcagcccgtgaactgggggcccacttgtgcctagagggcgaggtc

SEQ ID NO: 10350 - DNA, 122 bp, Homo sapiens
ccgggtaactactttttgctactcgaaatcctagcaaaagcacttcccagtgcccacctccgctcctgggctagttcccttttcctgctgaagagtaattagcactccctgcaaatgcccgt

SEQ ID NO: 10351 - DNA, 122 bp, Homo sapiens
agaaaatctcttatctctgtagtagtttgagtaacttctcttatcagtaaagctgtcttacgcagctgtggttatgtatctatgcaagcacaaagcaccgccttttttgtttgcataactgt

SEQ ID NO: 10352 - DNA, 122 bp, Homo sapiens
ctgtcccctcaaatccggggacccctggccttccgccccttctgcggcgctgacagcccgcgattcgcctcctcaagattcgtctcaagtgccagcgtgcacctgcacccgtccgcctcggg

SEQ ID NO: 10353 - DNA, 122 bp, Homo sapiens
agggggtggggccgagagggccgaaggggccgggtggcctgggttaccctcctgctcaggcgcctgggtccactgggctgtctggaccccaagctaggggactggggaggagaaagacagct

SEQ ID NO: 10354 - DNA, 122 bp, Homo sapiens
gcccaagacgccgagggccttgggtctaaagcacagagctctgcagactctcagtggcagcgtggccacacacggagacccaggagttttcgcaaactccggcccaagaaagtcctgtgagg

SEQ ID NO: 10355 - DNA, 122 bp, Homo sapiens
ttgagcagcctctgcaccagcgtcttggccagcacggtgggtgtgaagagcacgggccggcggcgctcgcagtagaaggcgcgtaccaggctgtaggggatgaggctgaggttcttgcccag

SEQ ID NO: 10356 - DNA, 122 bp, Homo sapiens
agccgccccctcccgacgacgtacggtgtattcttaaccaccctccgaaggaggctggggcgcctgtcatgttagattaggattaaaaattgcggaccccaacatgggtccaatgtagttaa

SEQ ID NO: 10357 - DNA, 122 bp, Homo sapiens
caaggatgggctcatgtgctttgactcattaatgtaccactgctgaaaacagaacacagccgcagtcttgccagtaagagtgcagttactgtaattaatgaatttgctaattaagccatgat

SEQ ID NO: 10358 - DNA, 122 bp, Homo sapiens
aaactcagccatccaaaggtcagtgttggcctccacctcatttctggcaggcttgggaaccgtcccagggcctgaggggcagtctttcctgggagacacctgaggctggtctggctgtgtga

SEQ ID NO: 10359 - DNA, 122 bp, Homo sapiens
caaagcagagctagagagctgcaaagtatgaagtctgtctgtgaatcacctcacgggagacgggaaaaacccgctcctccccaacctgggctccgccccactgcctgcctcccccttcccac

SEQ ID NO: 10360 - DNA, 122 bp, Homo sapiens
acccatctgagacttggcggaagcaagtggctgcttgtgctgggggctccccgcgacctccgtcttcatgacctaggaggacccacagccaagattcattctagcaagaagatgacagcgaa

SEQ ID NO: 10361 - DNA, 122 bp, Homo sapiens
tgttgacgggcagccatgttcgccaagtcccctggtccccctggggcggcttccttctgccgggccttggctcatcagagttctggtttttgacagagccccatcttgggactatctaactt

SEQ ID NO: 10362 - DNA, 122 bp, Homo sapiens
aaaagggtgaatcctgcagagccagcagtcaccccctgatgtatgtttttcctgactcttcgtattttagaacggcccgcagtcaggcgcccttgctcccgctccctcatccttgcctgggc

SEQ ID NO: 10363 - DNA, 122 bp, Homo sapiens
tgccagctggagcccgaaaacccgtaggctggcaacatcctgcagtggctgggaacccaccgggatgctggccagaacaccggctctgcaccatccctcacccagaccgtagacaccaggga

SEQ ID NO: 10364 - DNA, 122 bp, Homo sapiens
actcactcactcactcactcactcactttctcttcagcaccttgccttgagatgctccagcgctgggcttttcctgctttaacctttccaaagcaaaaaaggtgtgctcattccttctcctg

SEQ ID NO: 10365 - DNA, 122 bp, Homo sapiens
ccgccctccaggttcttacaggtggccgggtcccagaagggtgataggcgcctgggtaaccgtgttgggcgcgccacggagtgtctcataaacggctccttcctttgaggcaagtctgagcg

SEQ ID NO: 10366 - DNA, 122 bp, Homo sapiens
agtactccacacaggctctcattcacagagagctaccactgactggttactgtatcacaccgtcccagtactccacacaggctctcattcacagagagctaccattgactggttactgtatc

SEQ ID NO: 10367 - DNA, 122 bp, Homo sapiens
cccgccgcaagtcctcccgcttcaagcctcggaccagggccccgaggttatctccggcctcggccctctccaggctcttgtggaacatctcaatgcctaggacggaaagggaaaaggagcag

SEQ ID NO: 10368 - DNA, 122 bp, Homo sapiens
ccaagtggagaaaggcggccgacactcacccacccgtttcccaccgagtgcccacccaggcggccgacactcactgaactcgcccctccactgccaggccatcttccgctggcagtttgctc

SEQ ID NO: 10369 - DNA, 122 bp, Homo sapiens
ctcactttatcaggaaactgctcatccctacaagagtaatagctggattacaaaaaattccggggttatttatgttttaaaaagaggttgggggagacaggaatagatagagcacgctgcta

SEQ ID NO: 10370 - DNA, 122 bp, Homo sapiens
atagcaggcaggcctttaattcagcaaaccttaagtaagatggcagaatgtccaccaatgcgctgttaggaaaggacaagaaaatgggataaacttactgttaacagagatcactcccttat

SEQ ID NO: 10371 - DNA, 122 bp, Homo sapiens
atttgtaacggacagaactttgcagcaactgttcaaccctctgggtcaggtgcccatggccggtgctaccacctgcagtgcctgtgaaaggggaagttcccttgttcccctcgcagggcgtg

SEQ ID NO: 10372 - DNA, 122 bp, Homo sapiens
tggctctggctgtgggggctgtgggtccagctgctgtgtgcccatctgctgctgcaagcccgtgtgctgctgtgtgccagcctgttcctgcaccagctgtggctcttgtgggggctccaagg

SEQ ID NO: 10373 - DNA, 122 bp, Homo sapiens
tgcctcctaccccagtacttgcgctagtggctgtcagccagccaggcagcagtgcctcatcggacttgtagtttttcagggagaggtggtggccaagagtgtcaggaggtgcagtgcccctt

SEQ ID NO: 10374 - DNA, 122 bp, Homo sapiens
ctgccggaggtcggcgctgagcttgcgatcaagtttgtgggggccccccttcccagttgccggcgagtctcgcctcgagaggggcgcccgaccccggggagggcggcaggccagggcgaagg

SEQ ID NO: 10375 - DNA, 122 bp, Homo sapiens
cgctgccagcgcccggagcaccaggggccgaaggggtccacagagcagccgcgggacccccggaaacccattgcgaccggccccaggagacccaccaccaggctcccactgtgccgagcttc

SEQ ID NO: 10376 - DNA, 122 bp, Homo sapiens
agcccctctccccagtcattcgctcggggctggctccgccccagaactgcgcaacctccccgcccacatccgcgtcctaaccaatgagcgctcgaaatttgggtccacacccccgtcacgcc

SEQ ID NO: 10377 - DNA, 122 bp, Homo sapiens
aaagggggcagctggcaatgtttacctctcaggagtgccctcacattatctaggaattagcgcaaaccccttgtctctgaatcacttaaactcttcataagctgagggatctattttttagc

SEQ ID NO: 10378 - DNA, 122 bp, Homo sapiens
gccacataggaactacactgattggaaacagaaagtggcctagaaactgtaaaaaatgaccgcagatgacttcttgatacactttgtgactaaggggcctggtgatgacatttttctggtat

SEQ ID NO: 10379 - DNA, 122 bp, Homo sapiens
tttcccaatactgtgtaagtgagtgacagaactgtagttttgggcaacagtcttcaaaaacgcttccatcccttcctggcggtggtagttgaaatccagcgcagctaccaaaggcagcaaca

SEQ ID NO: 10380 - DNA, 122 bp, Homo sapiens
gggggtaaatgatggtaccgtggtgtgtgcatgcaccccagtgtgtactgaggacgtgggcgtgcaggccagcatgagggggccagcctgggggtattgaggctgtgtatgttatgcatttg

SEQ ID NO: 10381 - DNA, 122 bp, Homo sapiens
ggtagtggacttgaggctgtcgggaaggaggggtgtggcctagaccactaagggccgtgacgtggtgccgctgagcttggaccccgaccagaagatagagattgaaacgatgaggaaaacga

SEQ ID NO: 10382 - DNA, 122 bp, Homo sapiens
cctgacccagagatggcagagtggatccaccccacatgctccagctcactagcctagcatcgcccaggattccagccatcatgtgaaacaacgtttcctgcttgtagtaaatgctaatccat

SEQ ID NO: 10383 - DNA, 122 bp, Homo sapiens
tcgggggcctcacctttcctcagggccatcctgcatgcagggcaggctgcaggcaggcagcgagggagggtacgtctgctgtgccggccacccctgccctctggatttccccactgcggggc

SEQ ID NO: 10384 - DNA, 122 bp, Homo sapiens
accctcaggaggctcacaggctccagggcctggatgttaggatgtgaggcctggggttaccgagatcccacacccaggagatgctcgcgtggagccttcgctcacagcggcctgcgcgaatg

SEQ ID NO: 10385 - DNA, 122 bp, Homo sapiens
agagacagtgcagcgcgagagggccgggagaggacgccggagggaaaggaagggggagcgcgcccagcaccgcttgggcctcctccacccgctcaggaggggaaacacgagagccgggagca

SEQ ID NO: 10386 - DNA, 122 bp, Homo sapiens
tcctaggtccctgcctgagatgctggagctgagcgtcccagccacgtgcgcatgctggagcggaggggctgtgcctggccagtgctgcgtatgggggggcgcctccgtttcatgtctggtca

SEQ ID NO: 10387 - DNA, 122 bp, Homo sapiens
cggcgagcgagctagagacgcgccagagattcatgggcagggagggctcaatggccgcgccgcgccggccggccggccgctcgggtcatgttacacggccggggccgcggcggccgcccagc

SEQ ID NO: 10388 - DNA, 122 bp, Homo sapiens
tctgtagcttggccctactcgctcttacaaggttcccaggtgatgccgatgctgccgctccgggatcacacctggagacctagtgccaaaccctcctaatcaaggcaccgactcagccggca

SEQ ID NO: 10389 - DNA, 122 bp, Homo sapiens
cagcctatcccaatcacatgcaaatgcaaacagacatctcccctctggagtggattctagcggatcctctagttgcctgaattacaaagttggtcccttggttaaagcattccttcactggc

SEQ ID NO: 10390 - DNA, 122 bp, Homo sapiens
aaaatatcaggtttggtagcacggcaagtctggaccaaaggaaacaggcttgctttatgccgacttcactcggccactgcatcccaggggctgccccagcagggctggtgctttctggcaga

SEQ ID NO: 10391 - DNA, 122 bp, Homo sapiens
ccaggcacttcataggcaaagcctgtcccccccactcaggattcccaaggtctggggtcccgctcaccccgctttcctctcatgcccagcctgaccccaggtttcagctgggagaggccact

SEQ ID NO: 10392 - DNA, 122 bp, Homo sapiens
gcctctcagccccacgcccactcatccacaggcagccgggatgctcacgcagccacgtcacggacctcatctcggcctcgctacgactctgccaacagggggcgctgcaggaggctacgcgg

SEQ ID NO: 10393 - DNA, 122 bp, Homo sapiens
tgtgctggtggtaacagaaagtcgtctgtagctttggaacaatggtgcgacgtgtccacacgtctttaaaaagcaaacacttaaaggcaaagggaggaaggaatagcagctgaggagggaag

SEQ ID NO: 10394 - DNA, 122 bp, Homo sapiens
ccccagaaagccagttcccgacaacgccaatactgcacgtttatcagctgcggcaagagccggccggaggcggtggcagcacctcaatgcccttgcctcgtcttcaagattcttctgtttga

SEQ ID NO: 10395 - DNA, 122 bp, Homo sapiens
actctgaaacccccctgccccagcgaggcctggcgaggaggaggggccctcctgggagggcgcgagctgcttcgctctggagagatccgcccctggcaaatgtgcagcccactggggtgggg

SEQ ID NO: 10396 - DNA, 122 bp, Homo sapiens
gccatggtacagatgaaagcctgaggctcagaggctcaacagcaataataagaggcaggccgggcacagtggctcaggcttgtaatcccagcgctttgggaggccgaggcaggaggactgct

SEQ ID NO: 10397 - DNA, 122 bp, Homo sapiens
tgggaagagtgtggcctttgagggcaggcagatggctctgcatttgggttctattgctgacgttggctaaaagtgacttgggccaagtcacttcacatctcagaactccactgaatctcatc

SEQ ID NO: 10398 - DNA, 122 bp, Homo sapiens
agcttctctgctagtggccacaggcagagcctgcctttgatgaggttacagaggcagccacgcctgtgctctttggactctggtgggtggggaggcttcctggtcactaaccgctcaacatc

SEQ ID NO: 10399 - DNA, 122 bp, Homo sapiens
cggatgttttcactcagccttggaatcctccccgagccgtaaatgttcttcagaaatagacgcactgtccttggctgactgttctgccgccctcctcagcgcagggcccgttctgcctcctg

SEQ ID NO: 10400 - DNA, 122 bp, Homo sapiens
ggtgcggcggtgcctcgcttattttccctcctctccgtgtgcagtatcccgaggtggctgcgcaaccagcagcttaggaaataaagggaaagtgcgagagtaagggagagttccagcctctc

SEQ ID NO: 10401 - DNA, 122 bp, Homo sapiens
acacacggtcacggcgtccccaccggagcacggtcacctgtgcctcatcagccacgtggccgccacagggaagagaactggatcgcaaggcaggtgtttcaagtctggtgaaacccagctct

SEQ ID NO: 10402 - DNA, 122 bp, Homo sapiens
ggtctgccctcataacctcaggctccaggtctgttccagcaccaggccagccccacaaagcgccaggcttcaggcttgtcccacagcctcaggcttcaggtcagcctctgcagtctcattct

SEQ ID NO: 10403 - DNA, 122 bp, Homo sapiens
ccacgcagacagcaggctcccagcagacagacaaaaacacgcacacagcagatccagacccggcacacagtcatccatgcagacatgctgcccctgcccaggagacaggcaggcaccactca

SEQ ID NO: 10404 - DNA, 122 bp, Homo sapiens
gatgcagactgggaaaagtgattagcagcaaatggtcaagatgaatgggtagagacaaaacgtggctcaccaggagggtggtgactcactaatcttcaagaatgtatggctaaagattcaaa

SEQ ID NO: 10405 - DNA, 122 bp, Homo sapiens
agtggacccaggactggtcagccctcattgtcaacgtcttgtaaatcttgaactagtggacgagtagggggaaagtgcaggtgcagcaacctacttcaaaagggctaacttgaggctgatta

SEQ ID NO: 10406 - DNA, 122 bp, Homo sapiens
gagacactgggtggcctttatgctgtcaacggtggcctcagaggccttctggcaggagcccgggggatccaggcagacatgcaaaccctcaggcaagaggctgcacggccctgtatcccctc

SEQ ID NO: 10407 - DNA, 122 bp, Homo sapiens
agccagaggaaaggaaggaaaaaaataaaaccttgaggataccaacattttttatggccccgtaaaaaaggagcagcccaagaaaagtgcaaacgaaggcaagttcagaaatcaggtagaga

SEQ ID NO: 10408 - DNA, 122 bp, Homo sapiens
ggttttacagaccgtccctctattgggatgtgtctcggtttttctccggggccagaagcacggaggtgaagtgcgcttctcaccccaccacgtgaagggtccgagctctcacccaccatgcg

SEQ ID NO: 10409 - DNA, 122 bp, Homo sapiens
cactcagtccctcccgcctggttccccgcggaggctgcagccacttgtgctgtgatgtggcggctcccggtgggcaggctcagaggtattcctgtagaaagtgcagcaacgtgacttcatag

SEQ ID NO: 10410 - DNA, 122 bp, Homo sapiens
gacataacctggcaccaggatgattgttcttaatgagacgcgcaggcctggggagacagccgtttctgctctggaaaacatctccagaaaaggtcccaaaacacgtctctgggcaacaggac

SEQ ID NO: 10411 - DNA, 122 bp, Homo sapiens
gactggtgttatttctcaagaagagagaaatttgaacacattgacacacagggggaatgccgtgtgatgtggtggcagagattggagtgatgtatctacaagccaaagtacatggaagattg

SEQ ID NO: 10412 - DNA, 122 bp, Homo sapiens
gctttgcctgaaacgcggaacctggtcttgacttttgagtgactgagccctcctggtgcccgcactctggccgggagtgccaagcagcgttctccctcccgccgcacgggggcacaatggga

SEQ ID NO: 10413 - DNA, 122 bp, Homo sapiens
cacccttcgggttgcggtctcgaaaccccgcctctcttcgtgacgtcagcacgccgggcgcggtaggctataaaagcctagtggccattgtgttcgttgctcttatcggttcccatcccagt

SEQ ID NO: 10414 - DNA, 122 bp, Homo sapiens
gtaaggcagagaagatgggtggacggccctgggaagaactagggtgccgaagcctgcaggcgggatggagtggaaggaggtgaggcaaaattaggcaagtacaggaaggagccagtgcagcg

SEQ ID NO: 10415 - DNA, 122 bp, Homo sapiens
gaggagaggggggacgaatggcgttgcgactcccagggaaaagctgggaggcaagcggggcgtggggaggaaaggccaaggcacacggctgggcgcccctcacagccttcctccgccgcctc

SEQ ID NO: 10416 - DNA, 122 bp, Homo sapiens
aaactgtttcgggatctctcattttcagcacagccggtcgcttattcagcagaaaacccacggccccatcttcacaccaaattacagtactctcccgtctcttccactgaaattgccactcg

SEQ ID NO: 10417 - DNA, 122 bp, Homo sapiens
gcggaaggctcggacccgggactcacggtctttgtgcggagacgggggcgggcctcggggcgcacggctttgctgatccctgcctcccgcggggtgcgccgtgcaccggcggcgagcgctca

SEQ ID NO: 10418 - DNA, 122 bp, Homo sapiens
gaaggagttttgtcccaatgagcagaactggcgtcagcacagggaggcctacgaggaggacgaagacgggccccaggctggagtgcagtgccagacggcatgacgtggtgcggggcagcgtg

SEQ ID NO: 10419 - DNA, 122 bp, Homo sapiens
ctcaggggatccgcccacctcggcctcccaaagtgctgagattacaggcgtaagccactgcgccctgcctgtttaatatcattgattgaaaaacaaagtggcagtaaaaaaggaaactctga

SEQ ID NO: 10420 - DNA, 122 bp, Homo sapiens
tacctgtgaacaccgccaccaccgggactagcgagcattgtcgcaaacaggcattagcagcgtatccaacacatccccaccagcaaggttattgagcttggtttgtgactgccccatgtgca

SEQ ID NO: 10421 - DNA, 122 bp, Homo sapiens
ttgatgctggaggtggggggagggcagggtcactccagcccagtcacacacgggtccttgcgcctcagctcgtgggcctccccagctggtgacccagccatggcgggtccttaccggctctc

SEQ ID NO: 10422 - DNA, 122 bp, Homo sapiens
ctgccccccggctattgggagagctggtcaaggttcttataatttttttattcttaaagacgggtgcacactgtcgcccaggctcagtgcagtggcgtgatcacagctcactgcagccctgt

SEQ ID NO: 10423 - DNA, 122 bp, Homo sapiens
tgcaagcagggccaattcactgttataaccagcccactctcgagataacgaacccactcccgcgatgatgacattaagtcattcatgagggcagagcctcacgacctcatcacctccccacc

SEQ ID NO: 10424 - DNA, 122 bp, Homo sapiens
aggatccgtcactcactggctgagtgaccttggacagggcgccaaacctgtttcctcatccgtaggatgggaatgataattgtgcacattttataggggtattggaaagatctatgggatgg

SEQ ID NO: 10425 - DNA, 122 bp, Homo sapiens
ccttctcaggtcttcttcttcatgccctctaacccactgaacaaatgtggttgtgtctgtcgttcctggtatggcttccagaagtggtccaacaattccattgcgaaaagccatttccagaa

SEQ ID NO: 10426 - DNA, 122 bp, Homo sapiens
aggatgcactacacgatgaacgtcggatcgaggacctcgtgtctctgaagtggttgccctcgccttatttgaatgggaataatcccaatgaaaattgatgtttgtgacccagagcagattct

SEQ ID NO: 10427 - DNA, 122 bp, Homo sapiens
ctgcttgcttgcttaatcggaggccgcaccccagttgtagcgaaggctggcatgtggtgtcggtttgaggactgggaaaggaggtgggatgagctggtgtcaggcccttggatgagcctgag

SEQ ID NO: 10428 - DNA, 122 bp, Homo sapiens
ggctgtggcgccctggccttggtcaaggcctgtcctggctgcactgggcttggggtacagcgaggcctgtggctgccatggccatggactagggaaaaagaggaccctgcgccaccctcaag

SEQ ID NO: 10429 - DNA, 122 bp, Homo sapiens
gggaagagcaggggcatcgagggggatgtcctggagagaagctaggacaacaggaaagcccggcccatctagggccatgctgggggcatcttggagaagaaaacaaccagctcttgtctgat

SEQ ID NO: 10430 - DNA, 122 bp, Homo sapiens
gtcagcccggggcatcctggctgtgctctccctgtcctgtggtgaggggctggggggctccgggatctggcccccaccttgcaggctctggggaggtttaatggggacagaatatggaaggc

SEQ ID NO: 10431 - DNA, 122 bp, Homo sapiens
ctgactgacatccactaaatgggttattctatccacctcattaaaatcctctgtggaggtcgccctttgataagcactcatgtgggaaataattatcttcacattctgggctgaagtccatc

SEQ ID NO: 10432 - DNA, 122 bp, Homo sapiens
aaacaacccccttccagagacacaagcacacccttaagggtgggaagcgctcacaaggaccggtctgtggcaagtgacaagtgacctttccaacccgaaggtctcctcggcagaagcccctt

SEQ ID NO: 10433 - DNA, 122 bp, Homo sapiens
aatgtctttataccactgaaggggtgtattgaattccatatcataaacagaaatacattccgtgcttaagtatttggtcttgtttttagggggtcagttaagcacacaaccaccacctacac

SEQ ID NO: 10434 - DNA, 122 bp, Homo sapiens
ctcaactacctccgccacgggaaactcatcatcactaaggagttggcagaagaaggtaagcgcactgtttgcattggggattttcaaaatgcaagtagaatctttaaagttgttttacagat

SEQ ID NO: 10435 - DNA, 122 bp, Homo sapiens
agtgagcttagccttagaaaggctgtagctaggattaatcagccgggctctgcagggctccgttacccagggcttaccctgtcactcagggctgaggggcggagcctggaaccccatccaat

SEQ ID NO: 10436 - DNA, 122 bp, Homo sapiens
gtgcctgggctgggccatcgcctctctccctcggctgggtttgtcatgctcagccagacccgctcccggtggagaggccgagggaccctcatttctacgtttgcatccctttcttccagggc

SEQ ID NO: 10437 - DNA, 122 bp, Homo sapiens
tgccactcaccttgctgcggtaccaggactcggcctcggcccggctgcgggtgacaatgtcgtcatactgtgccttaatctcggcaatgatgcagtccatgttcaggtcccggctgttgtcc

SEQ ID NO: 10438 - DNA, 122 bp, Homo sapiens
ggcaaacacagtccacataggtacatgttcagaaacaaactaagaaggacttgagttttacgtagggctgatgccttgactgagaacctgccgcacatataagttaatgactgtcatgacat

SEQ ID NO: 10439 - DNA, 122 bp, Homo sapiens
ccaggcttggccgggggcttggggtgggagtcagggcgcaggcagcagcctcactcggtccgggggccgcagcgagtgccactgggcaatgggccgccgcgggttggccagcatgtccgccc

SEQ ID NO: 10440 - DNA, 122 bp, Homo sapiens
ctcctggcgaccccctgcggcagggctggggcttgagcctgccagtgcgctgggatggggcgcgaagcgggggtgcggggagcccgccaccccgtacctctcaatcctccctctcgcctctc

SEQ ID NO: 10441 - DNA, 122 bp, Homo sapiens
cattctgtggatggtgtggtcatcctgagaaaaaggaagacactagcgacgggggctgtgcggacttcccggccagcggccgtttcactaagagcagccgtgtgtattttcaggcgggtccc

SEQ ID NO: 10442 - DNA, 122 bp, Homo sapiens
aacacacatgctcacacacatgcatgcacgctgggcagtacctgtcacgtccttcttgggcgactcagcccagctggacagccacacttccgagtccccgagagcaagcggcagcaggagag

SEQ ID NO: 10443 - DNA, 122 bp, Homo sapiens
agggcctctcacagtgccctgcagcctcagtcaattccgggggtgctcacaaggctaaaacgctggctgtaaaatcaagggcaagctggagggctggtttcctgtcttctaaatatactcct

SEQ ID NO: 10444 - DNA, 122 bp, Homo sapiens
tctgtctaggactcctccctgctctgccccactcctggagacatgatgcatgggaagctgcgtttgagtacacgcctcagcggcatccctaagcccaaagtgggcaggctcacctgcagggg

SEQ ID NO: 10445 - DNA, 122 bp, Homo sapiens
accttccgagtggtcccatcaaggctgggtcagcacccttgtgcctctgcccctccactgcgctgagcctcaggagggaggctgcctagccagcagtgtcacctgggccaggggctgccatc

SEQ ID NO: 10446 - DNA, 122 bp, Homo sapiens
actatagggtatttgcttgtcactctaaaattggaagccaagtttttcttcccctttttccggaagggatcgctttggtaaatcctcctgtcatgaacatgtaagtcaggggtctattctct

SEQ ID NO: 10447 - DNA, 122 bp, Homo sapiens
ccatctctgtcgggcaaatgcctgcccagccttcaagaccctcctcagatgccgcctccacgattaggcttctttcagacccctgagcctgtaacacgggctaccataactctccacctcag

SEQ ID NO: 10448 - DNA, 122 bp, Homo sapiens
actcaaacccgctccatctattaacgttctcttctgcccagccacgcccccggcgttctccgtggttgcgcacctgacgtacatcgttcaaaacgtgcccagtgtttccctccgagggcact

SEQ ID NO: 10449 - DNA, 122 bp, Homo sapiens
ctgccttcaggaagcccagattaaagcaagtgagacaagcacccttactggggctgatgccgcacagtgctgtggacagaaggtctgtgtgagcaccaggcatggattgggtgtgttagcct

SEQ ID NO: 10450 - DNA, 122 bp, Homo sapiens
ttgagccgccaagcgaggcttcgacccccgcgcctccctccccgggggagcagacgggcccggggcctcccagcacccctcccgggcgggctgcaccccccagcgtcctcgtcccttccctc

SEQ ID NO: 10451 - DNA, 122 bp, Homo sapiens
cggctccgcggggctcctggggccgatcccaccgccgaggcctcccttcccggcctcgggcggctgcggcggcacaaagggaagcagcatgtccgaccccagctactggacggcggtggcgg

SEQ ID NO: 10452 - DNA, 122 bp, Homo sapiens
aatggtggccaccctgacagcgcagtgaccagagggggatcggaggccttggggacaggtcggaaaacgtttgtcaggcccatagccgtgtgcacgtgatgctttgtggtgcacacttctgt

SEQ ID NO: 10453 - DNA, 122 bp, Homo sapiens
ggaagtgtgtctgacccctggaaagatctgaatgcatagtgggccattgtccctagtggacgtgaatggaaaactcaccccagaagcatcagcttagataagtgagatttttttcccagagc

SEQ ID NO: 10454 - DNA, 122 bp, Homo sapiens
atcaccactcactgtagctttgaactcctgggctcaagctatcctcctacctcagcctcccgaggagctgagactgctggtgtgtgctgccatgcatggctaatttttcagtagagacagag

SEQ ID NO: 10455 - DNA, 122 bp, Homo sapiens
gcgggggccgccggctgggtgagctgcagcccagtcccgtgttgccacgctgggaactggcgttctgtttacatatcttagagaacgatcagaaggacgtgctgtgtttgcagaagcccaaa

SEQ ID NO: 10456 - DNA, 122 bp, Homo sapiens
tccttactttgagcgagtttccagttagatgttgcctcatttcaaagcgtagatctggtgcggttgatttcacagctctgagagctggatgccaagctaagagcctggacaattgcccaatt

SEQ ID NO: 10457 - DNA, 122 bp, Homo sapiens
tgtgtttgtcagaggttgaaaagttctttattaagaacttccttcctaattaggagctatcgtccagcaaaagcatcaggggtaatatatgttgcagtgtaacagtgtggcccaagctgaaa

SEQ ID NO: 10458 - DNA, 122 bp, Homo sapiens
agccccgagagagatgcgctcacctggacagatgctgcctctgaggttctccagcaggtgcgtcatggtgccgaagtccggggcataggacacgtgcagttccgctggctccgaggcgatct

SEQ ID NO: 10459 - DNA, 122 bp, Homo sapiens
ccaattgtcccgcctatcttatcggaccaaaccactgtacaccttgcacatatcgattgacgtctcacgtctccctaaaatgtataaaagcaagctgtaccctgaccaccttgggcacatgt

SEQ ID NO: 10460 - DNA, 122 bp, Homo sapiens
tgttaaaaaaagtgtcacaaagcagcaccaaggagaaaacaacactgttttctgaatgttcgtgcttggaatttctttactacagggaaaatgagatgggggagggcccttcttatctattt

SEQ ID NO: 10461 - DNA, 122 bp, Homo sapiens
gttttacaataataggaaacaactcacggtacctgtgtccctgtggacaaacagtgtttccggggtgggtttgagccgccagcgtgtggtgaggcagagcgtcccgggtttgcggcttggct

SEQ ID NO: 10462 - DNA, 122 bp, Homo sapiens
cccaacgccaccccgcttcgcagtagacggacagaggagtcgtagcggtcgaggcttttgcggctccggcgtgccggaaagtgcgtgagtgccgccgccggggagttttgttccatttcccg

SEQ ID NO: 10463 - DNA, 122 bp, Homo sapiens
tacaagcacgccaacccccccggtgcccaagctcggcgctcacgcggctaggatgacgcccgtgggacgccccaggggccctgctcgcagccactctgctcagggtcatttatagtctctcc

SEQ ID NO: 10464 - DNA, 122 bp, Homo sapiens
agagagcagctcgttcccaacctctgaaaggcagacaagccctttattgctctattataacgcggagccagatggtcttttgggagttgcccccccgcgccccccgccgccgccctcattca

SEQ ID NO: 10465 - DNA, 122 bp, Homo sapiens
gccgccccagtctccttgctgtgggacgagcctctgccttcctgccagagatgtgactcccgcttgaaggggattttttttgttgttttgagatggaatgtgggagggctgaagctagctat

SEQ ID NO: 10466 - DNA, 122 bp, Homo sapiens
ctgccaaatttcagagagcaaagggaaatctacacaaatcaggatgcagtctctgcagatcgtatttgatagttggtaaccccaggccaaaaagagttcttgggtttgaggttggaactcga

SEQ ID NO: 10467 - DNA, 122 bp, Homo sapiens
tgtgtgagtcggcttgtttgtgtcagactcagataaactgcatttgcctttgctctctttcgaagggctcctacatagctaaggtgtcgctgggtgaagaattcccattgtaagaattggtg

SEQ ID NO: 10468 - DNA, 122 bp, Homo sapiens
ggtctcccccaacgcgcctcgccggatctgagggagaacaagaccgatcggcggccactgcgcccttaactgcatccagcctggggctgaggctgaggcactggcgaggagagggcgctcct

SEQ ID NO: 10469 - DNA, 122 bp, Homo sapiens
tctgccagcgcgctcctgattggtggctgagggccgggccccgctgcttctcaaagttggcgggaaagcggaggcggggcggaagggtgcggcgaggcggaatggcggcggctgcggactcg

SEQ ID NO: 10470 - DNA, 122 bp, Homo sapiens
atccatgagcgtgggagttgctagacaaaaactaaggtcctttccagccccaaaaggccacgattctaacctgtgaacctactcaatatttccttcaaggtaacacaaatccctaaaattta

SEQ ID NO: 10471 - DNA, 122 bp, Homo sapiens
gaaggttgtgggtttacgggagtgagggtgaggaacacctggcccgctcagggcgaaaaccgcttaaaggcattgttaagccacaaacaatgagcatgagcggtctgtgtcttaagggcgtg

SEQ ID NO: 10472 - DNA, 122 bp, Homo sapiens
ggacaagctgaccgggtctctgaggcgcggggggagatgcctgaagcggcagggcggcggcgtgggcaccatcctgagcaatgtgctcaagaagcgcagctgcatttcccggaccgcgcccc

SEQ ID NO: 10473 - DNA, 122 bp, Homo sapiens
tctgttggttggatacagccaagcccatccgccccggacactacccggcctcatctccaacggccgtccatgccattcgagggggaggaggcagctcttcaaattccactcactaccagaaa

SEQ ID NO: 10474 - DNA, 122 bp, Homo sapiens
ggagtgagggaagaatgtgaactgcatttggggaggatttctgaggaagctggctggactcggagaatgattgtaagtggtaatattaactagctagcttgataaaaagaagcgccaagatg

SEQ ID NO: 10475 - DNA, 122 bp, Homo sapiens
atttggcagatgaggaagccgacttggagagaaccctggatgtgtccacagtcactcctccgcccagtggagcgatccaggcagaaatcggggccctgagtctgaatccgggttctgcaacc

SEQ ID NO: 10476 - DNA, 122 bp, Homo sapiens
tacaccaccagcctggagatgatccatgacaccatggcgggcaggcgggcgggcgaggcccgggcggcgcggctcggctaggctgcgggcggcgcgggctgctgcggcgttcccggaacgtc

SEQ ID NO: 10477 - DNA, 122 bp, Homo sapiens
agcacagggaaccgcaggccccggcccaggacaccatggcctcccatgtgcaggggagagcggaggctcctagcacccgggcttgtgcctctcacaaccgctgacctgtctgcctgtctcca

SEQ ID NO: 10478 - DNA, 122 bp, Homo sapiens
gacgaactcctgcagcttcagttcgaacaccccagagctccagacctgcacgggggagggcgggggcgtgaggacgcgggtcccgcccgagctagggggcgtgaggcctgggtggggggtgt

SEQ ID NO: 10479 - DNA, 122 bp, Homo sapiens
tctacaacgtcaacaagcacccgggcggccggcagaaggcccgcatcctgcaggccggcacgccgctggggctcatggcctacctgtactccaggtgcgttgggagaaaagctcacccggaa

SEQ ID NO: 10480 - DNA, 122 bp, Homo sapiens
tggcttccccagagtctccagcctaactatacaacggaggacaagagtcttcaaatcttccggggagacaaccagccagctttgggaggggagcctgccaggcaggcaacgctccggccccc

SEQ ID NO: 10481 - DNA, 122 bp, Homo sapiens
aactaaacattatccgtacctcgcaccaagattccaggagcgagaggatgctcaagttaccgaccactgcctgctcaaccagcttcctatcgagagcatcatcccggtgaccatagacacgt

SEQ ID NO: 10482 - DNA, 122 bp, Homo sapiens
ccccttccactttgctcatttccttgcaaggtctagggttatgacagagcttgccatgttcgcctttggcttccttagtaacagaaataagcatggaggggcttctgcagtgatctagccct

SEQ ID NO: 10483 - DNA, 122 bp, Homo sapiens
gaccgcggtggagcacaggtggcaccaggctgccctgtctactgcacacatggtctgggacgcagggcatggatctcacaagtcgggggtgtggaaggaagcagaaggaccagggagggctg

SEQ ID NO: 10484 - DNA, 122 bp, Homo sapiens
gggctggctcaaaagtgattttgcctagatgaagctggcagctgggaaccactttccctccgcttgccctctgccggggaaactccatgacggagacaaggcagctggcagggagaagcctc

SEQ ID NO: 10485 - DNA, 122 bp, Homo sapiens
cccacagagtgacgtcaggtggcggtattgctacttaaggcgtcgtggcctcccctgccccgccttagctcccgcgctagagagaaacatgtatcgttttcgatcacagctcttcacgggga

SEQ ID NO: 10486 - DNA, 122 bp, Homo sapiens
aaaagggataaaagctttctggtcaaaatgtactctattatgctagcaatataagctattcgacatattctgttgtggaaattcccaagctcccaagattccgataaggaacgtgctgcacg

SEQ ID NO: 10487 - DNA, 122 bp, Homo sapiens
aaggtacaggagaggtgagacacaggatactgaagacagtcctgccacaacagcccaggccggattagatgctgcactaacctctgcacacaatcactcaactgagtctagccatggaagca

SEQ ID NO: 10488 - DNA, 122 bp, Homo sapiens
cacagaattatttttttcttttttaaggcagaaatgtgtatcaagtaaggacgttttgcccgttttaattgtagaagcacatacgtggcttttggtgtaagttgtgtctaggagtgaatttg

SEQ ID NO: 10489 - DNA, 122 bp, Homo sapiens
agaagacctcatccagacccagcagacccctgcctcagaacttggggaccctgaagaccccggagaggaggctgcagatggctcagacactgtggtcctcagtctctttccctgcacccctg

SEQ ID NO: 10490 - DNA, 122 bp, Homo sapiens
tgccccgtgggagcgcacatcgccatcctctcctataactcccacgccaggcaccttgtgcgcttctcagacgcctacaagaagagtcaacttctcagagaaattgaaactattccttatga

SEQ ID NO: 10491 - DNA, 122 bp, Homo sapiens
ctgcatccttcattggcttttaacactgagagggcggtctttttaggcggacaccaggcacgcaacttagtctcacacgccttggagagcaagcgagtcttgccattggataattccaccgt

SEQ ID NO: 10492 - DNA, 122 bp, Homo sapiens
ggacgccccaaacctggttgcacgcaaggtgtccgtgtccaggatgctctcgctgcccaacgacagctacatgttcaggcccgtggtgcctgcctcggcgccccacccccgcccgctgcagg

SEQ ID NO: 10493 - DNA, 122 bp, Homo sapiens
cgctggtggaggggtgctccgaacgctggtggagtggtgctccgacatagggcttctctccgttgtctccgcccggctcgaggctccctggcgggcgtgcctcacagggagcacaggcctgg

SEQ ID NO: 10494 - DNA, 122 bp, Homo sapiens
gatgggagaaattcctagaacctaggtgggagccagaatcttgcagagaagccccttatccgtctgcaccgaaagcaggtagagtggatgccgtaagattcctaaggacgcaggtagagcgc

SEQ ID NO: 10495 - DNA, 122 bp, Homo sapiens
tatagtgaggggagggaaggccacagaggtggccagaggacctggatttgcaggcagcatcgcacttactgtctctgcagtcgggctttgaggctgcctgggcctgggttccctcatttcca

SEQ ID NO: 10496 - DNA, 122 bp, Homo sapiens
ggggctctacgcaaagtgaaatactcacagttcccgaaacccacgttgcttgggcgcctccgtcccctcacttttcccgagaccgccggccgcagcagccccctgcgcgtcgcgacgtccgg

SEQ ID NO: 10497 - DNA, 122 bp, Homo sapiens
agcttcctgagatgtgcactgtagccaacatgctcctcatctcctggacatcagtgatgtcgtctccaagatcaaacgagtccagaaaattccgaaatcaatttctaacggggcaaccctaa

SEQ ID NO: 10498 - DNA, 122 bp, Homo sapiens
aagtgttcaccctaacggtttttattaacgctttggcttccgtcgctaagcaacgtgccacgttggggctcttcgccagactacacctgtacaaatgtcagcctcattctcctggctctgaa

SEQ ID NO: 10499 - DNA, 122 bp, Homo sapiens
gcttcttttattaggtccgcactaaacctgttctttcatctattgcactgaaaaattaggcgaaagaaaaatccttgccaacaatttcaccctacatttaaactctctttccaagcagagtt

SEQ ID NO: 10500 - DNA, 122 bp, Homo sapiens
cccggcagagcgccagacgctgactgccggcaccagaatgctcgcgatgaggaagacaggcggagcgctgcgagctagcgagccctcagctctcgtatccatgacgcctgctgcttcggggg

SEQ ID NO: 10501 - DNA, 122 bp, Homo sapiens
aaagtatagagaaagaaataagggggcccaggggaccagcgttcagcatatggaggatcccgccagcctctgagttcccttagtatttattgatcattcttgagtgcttcttcgagaggggg

SEQ ID NO: 10502 - DNA, 122 bp, Homo sapiens
cgcggcccccagggcaggctgccttcggggtccctcgcagcttccacagagaccctttcccgtggctgctttggaattgcctacctaggcagtgccaggtgtgacccttttgtgctgtcaac

SEQ ID NO: 10503 - DNA, 122 bp, Homo sapiens
ggccccagggactgcgttaagagcagtatgtccacacttagactctgtccatttccatcacgtgtggctttgagcaaagcaaagaaggatcatggttagaaacactctggggtatgctgtgc

SEQ ID NO: 10504 - DNA, 122 bp, Homo sapiens
cggctccgtgctgcccagcgatggcgccctggcggcgcggaagcccgcggccaaatgacacgacttgggggcaaaggaggacaacagttcccaccaggtaggcactgggggaaggaggccga

SEQ ID NO: 10505 - DNA, 122 bp, Homo sapiens
acgtgtcccccgaggggcaacattgcccctggttgagaacaattggtttccatagtaattcgcccagcttctgtggaagaaacttcaaaagcccttcataaaggacaacactaactgtcaaa

SEQ ID NO: 10506 - DNA, 122 bp, Homo sapiens
ttgtggcatggcaattaactagcataggggttctcaacctttaatacacccgaacatacccgaagcccatgccatactcacatcactatgactggctaaccagtaacaaccaaggtagtagg

SEQ ID NO: 10507 - DNA, 122 bp, Homo sapiens
agtcctggaagccggccggctgggatcaagaaggggacagcgccacctcttgtcagtgctcggctgtaaacagctctgtgtttctggggacaccagccatcatgtgcctggaaattaaaccc

SEQ ID NO: 10508 - DNA, 122 bp, Homo sapiens
tctaagtgtctttgaccccatggtacatgactaggaggaataagccttctctggttttgtcgatgcctcccgcagatactctgggcagggatggaagcctagatgcctcaccgcaaggagcg

SEQ ID NO: 10509 - DNA, 122 bp, Homo sapiens
ttttgcttagttgatcctggcccaagcctcttgtgcaatcgatggctcaggttggctgcgcggggagcggccagaggctcgctggcgcgcacgccgcggagtcatgaacgactttgacgagt

SEQ ID NO: 10510 - DNA, 122 bp, Homo sapiens
cttggaaggctaagtgtgatagtaatgctagctctaatgcatatttaaaggagactgcctcgcttttagaagacatctggtctgctctctgcatgaggcacagcagtaaagctctttgattc

SEQ ID NO: 10511 - DNA, 122 bp, Homo sapiens
aacgaccccttctccaggtgcgcgagccgctccggcggccgtgcacactgcgcccccttccgcccacctgcctggcctgcgtttctaaccacgcgggcggtcccgagacttcgcgcaaaagg

SEQ ID NO: 10512 - DNA, 122 bp, Homo sapiens
ctccctaggcatgcacatgctagagtccgtgcaagttttccatgcactcgggaaaaagatcgatatgaaaactggattctcttcctccaggaccctgggaagctcaagcaacacccaaaacc

SEQ ID NO: 10513 - DNA, 122 bp, Homo sapiens
acagtcatatggtgagggcctcttggagttcattcaaactttaagggagccccacagcaccggcatgatgggtaagtccaggcctaaggttaggaagcaaatcctggagcatgaggaaattg

SEQ ID NO: 10514 - DNA, 122 bp, Homo sapiens
cagtacccctaagtctgcagaaccttctgccaccacacctagtgatgctccgcagccccccgcaccccagcctgcccaagacaaggctccagagcccaggccagaaccagtccgagcctcca

SEQ ID NO: 10515 - DNA, 122 bp, Homo sapiens
ataaagggctgccctcccggggcagggcccctggagggccggaggggtggtgaacgccgtcgtggtgatggtgagggccttagcgaccaccacccgagtgaggccccctcaccttcaggccc

SEQ ID NO: 10516 - DNA, 122 bp, Homo sapiens
taggccgatcgggtgggcggggcctgggacggggcggggcttgtattagcataatccttacgccaggtgagaacccggtgctctggagctctggcgggttggccccatctcccttcccgtct

SEQ ID NO: 10517 - DNA, 122 bp, Homo sapiens
caccgctgacccattcctcctggcagagagtgatgaggccaaagtgcagcgggcagcagccggggttgggggcagcttgcgggcccaggtggagcgattgcgggtggagctgcagcgggagc

SEQ ID NO: 10518 - DNA, 122 bp, Homo sapiens
agactgctcatcaaacctccaggtgacgaagcacacacacgcgctgccacatcggagcgacggatgaagggagcggttatctgggggaaacagaaccaggctggcttaattttctcttccta

SEQ ID NO: 10519 - DNA, 122 bp, Homo sapiens
cacctgaggcagcaccattcactcagttttgggaacaaaaaacttggaatcctctttcaccgtcattcacttggtcagtcaccaagctctgttcatcccgccttctaagtattccccagggc

SEQ ID NO: 10520 - DNA, 122 bp, Homo sapiens
caaactcctgacctcaggtgatctgcccacatcgtcttcccaaagtgctgtgattacaggcgtgagccacctcacccagccaagcattgtagattttttaaggtgagaagtaacaggaagaa

SEQ ID NO: 10521 - DNA, 122 bp, Homo sapiens
aaactttgaaagaggattcattcttcagaggcaaggaatcggagtcctatgtctttctcgcgccttgaaggttacttagctaaagctaagatagcgagaaacagtacttttcaggtccttcc

SEQ ID NO: 10522 - DNA, 122 bp, Homo sapiens
gatactggctccgaccattcgtactccttgtcgtcaggcaccacggaggaggagctcctgcgcaagctgaatgagcagcgggacatcctggctctgatggaagtgaagatgaaagagatgaa

SEQ ID NO: 10523 - DNA, 122 bp, Homo sapiens
ctggttctgctggccaagccagcggatggctgtgggggtcccagctcagtcttccaagggcgagactgtacagccttgctgtggggggttgggggcagggttccctcccggggccctgttgg

SEQ ID NO: 10524 - DNA, 122 bp, Homo sapiens
aatctccagagggggagatgatattgctcacaatatggtaaagaggctgtgagtccaccgcggatcctaaaaaccagagggggaaaaggtgctggctcttactccccgcattgcggggggtg

SEQ ID NO: 10525 - DNA, 122 bp, Homo sapiens
tagaggctgggcggcccgcaggccacgcctcccgggagggtaagcggcccccccgaggggcggagcctggcctggtaccctccccaagctgcgcgggggtccctcacctgtcccgctgggat

SEQ ID NO: 10526 - DNA, 122 bp, Homo sapiens
cctctgacaccaaggaagaagtgggaagtagtagggatgggagtttcaggagaatgtaaacggtttgaaacagtcattgcagagtaatgtcattgcaaagtaatttgaaaaaaaaattattg

SEQ ID NO: 10527 - DNA, 122 bp, Homo sapiens
aaaccttctcctggggtgggagccagagggagacgcacccagtctgcagggtccggcccccgtgggcatgcccagtccctcagggtgtctacccatagccagcatgtggtctttccagagat

SEQ ID NO: 10528 - DNA, 122 bp, Homo sapiens
gaagacaaaattcagcatgatggaagactgctccctgagagggctgagatgcggattggccgagtgccttgcctggaaaaccatcccaatgcactggacaccttagaagctgtgaaaggagg

SEQ ID NO: 10529 - DNA, 122 bp, Homo sapiens
acctaaccatgtgtgaaataccagctcctattagccgctgaaagggactgcagtgagcagcgggcaccttgccattcccagagtccccactgtgctgacaggtgccatgccctgtcagctcc

SEQ ID NO: 10530 - DNA, 122 bp, Homo sapiens
ccaaaaacacaagctgacttatggggtccagccctccagcacttacaaagctcagccacccgcacgcctcccttcatcagcaccaccactctaaggaatgcggtccctttgacaggcgaaaa

SEQ ID NO: 10531 - DNA, 122 bp, Homo sapiens
ttttactctgactaccttttatgtatagacaacgccattattgacgagatcactcccaagcggattggagattgtcccaatacttagacctgtagcaaggccttgggagaaatggtggtgca

SEQ ID NO: 10532 - DNA, 122 bp, Homo sapiens
ctctaagacaagtccggaagcggtgtcgaaacttcataacccagaagacactgcagctctcggcggcacgacttacccaataaaggcttagaaggggacgtttgcgtgcgtgcgcaccgtcg

SEQ ID NO: 10533 - DNA, 122 bp, Homo sapiens
tgagcgtgcgtggatggaggcggtcggcttcagcacgcatgcgggttccggagcgggaggcgggaggacgccgcggctctgactcaatgcgcgtgcgcgcggttggggggttgagggtgggg

SEQ ID NO: 10534 - DNA, 122 bp, Homo sapiens
aacctgtcccccgtcgcgggtgtcgttagccgctgggctgttgggcagccccaaagccagcgtctggtccctgccgctcctgggctctgggaggctcccagcagccgaagggcgggatgctc

SEQ ID NO: 10535 - DNA, 122 bp, Homo sapiens
acatgcatgacctcatttgagatctctgatcatttcaacaagcagttactctggcccagacgcagccaactacagagatagacaagacctgtggtctctttccttagtgccagaatctccta

SEQ ID NO: 10536 - DNA, 122 bp, Homo sapiens
gccgtcgctagtgccagggccggaacccgggcacctggcaacgggcaaacgcccctcccccgggaagaggcctggctctaaggcagcaggttccagccaggcccatggcctttcatgagcag

SEQ ID NO: 10537 - DNA, 122 bp, Homo sapiens
cacgtcctccaccggccgcgcccacacgtcctccaccggccgcgccctcacgtcctccaccggactgtgcccactgtgcccaccggatgctggggctccttcaccaggggtggggggtttcc

SEQ ID NO: 10538 - DNA, 122 bp, Homo sapiens
tcccaggggtcctgtagctttacccaagggagatgcacccccattcctaatggagaaacacgggtctctccacacctcctccagcagtcccctgaaacaggtcaaagccccacaaaccaggc

SEQ ID NO: 10539 - DNA, 122 bp, Homo sapiens
aatgagactgggaaaccctcttcaataagacctgtgtgatgatagattgtgtcctgagcccgcaggtcaggctgaaagagtcaacaaccagcaaagtgaagatctaggagtctgttcccctt

SEQ ID NO: 10540 - DNA, 122 bp, Homo sapiens
tcgggctcctggtaaacaaggaccgggcagccaatgggagggatgtgcacgagggcagcacgagcctccgggccagcgctcgcgtggctcttctggcccgggctactatatagagacgtttc

SEQ ID NO: 10541 - DNA, 122 bp, Homo sapiens
gccggcctggcctccgggggcttcacgggctgagaaccgttcaagctgcgggaggagggccggctcctcctgcagagctaggccaggcccaacccagacccaagggagaactcctttgaggg

SEQ ID NO: 10542 - DNA, 122 bp, Homo sapiens
tgaacggggagtgctcctgcctgccgggctgggcgggcctccactgcaacgagagctgcccgcaggacacgcatgggccagggtgccaggagcactgtctctgcctgcacggtggcgtctgc

SEQ ID NO: 10543 - DNA, 122 bp, Homo sapiens
gggtctgcttgatcttctcctccacctgtggggtgaggtgctgccatcaggccctggctccgggaagctgggtgggtgggtgcgtccccagacgaagggggaccctctgctcccccaggact

SEQ ID NO: 10544 - DNA, 122 bp, Homo sapiens
ggagcatggtttgttgaagtacagtttgggggcctcctacactgagaataggccttttctcgtttctccaaagagtgggctggctcaagtagggcagagagagaagcctggggcagaggtta

SEQ ID NO: 10545 - DNA, 122 bp, Homo sapiens
gcgcccgggaccctgggttccgggtcctgcgtgccgtgctcgtccagagccgggaatgttcgcctccgggtggggccctgaagccatagcgggggtcgcccccctgtcgcctcctgagggcg

SEQ ID NO: 10546 - DNA, 122 bp, Homo sapiens
ccagctgttgcctgtgagcccttaggaccctcggatagaagccggagtcctgcggggacacgggacagcatgtcactccgggaagcctcccgttcaggtgtctggtccctgcctggggacat

SEQ ID NO: 10547 - DNA, 122 bp, Homo sapiens
acgccagaggctgcacgcgtgacaaggcagcaacgcagtgactcagccccacagtgctcacgccccacacaacacccatcttaatggcagagccatggcaaaacagctgccagcaccaggca

SEQ ID NO: 10548 - DNA, 122 bp, Homo sapiens
cccacccccagcctctatatggccaactgccgtgggaggagcacggcgcttgcgcagaggcggacaacgcggacgactctgggcttgcgcactcggaagccggccgcatgggggaggggaag

SEQ ID NO: 10549 - DNA, 122 bp, Homo sapiens
cagatactgcgtggtgagcgggccctgcaggaccaaggcaaagttggccaggaagaccagcggctctaccgggccccggcacagcacggcagccgcagggcgggcgcggggcttttccgggg

SEQ ID NO: 10550 - DNA, 122 bp, Homo sapiens
tccttagcagatttcctcaggccctcgctcaggggaatgccgactccgcaggaagacacccgcgaccaaggcctgccccaggccctcgctatctgaccgtggatcccacttgaatcctttcc

SEQ ID NO: 10551 - DNA, 122 bp, Homo sapiens
ataaaatggaactgatggtaggggaggagttaggaactaaataagatgatgccgtgaagacgtcacagtgagttcagaattgggtcttctcagaaaggggcatcttcctggtgtttctgatg

SEQ ID NO: 10552 - DNA, 122 bp, Homo sapiens
caatttggactagccatgtttcaaatgctcagcagccacatgcggctcattctagataggcggccatcgctcttaaatcctccctgaccttagccatgctctctcatccctcctcttcgcca

SEQ ID NO: 10553 - DNA, 122 bp, Homo sapiens
cacgtcatggacgccatctcccagtgcgagcagtacgccaaggagcagggcgcccaggagcgcaacgccccctggaggctcttcttccgcaaagaggtcttcacgccctggcacagcccctc

SEQ ID NO: 10554 - DNA, 122 bp, Homo sapiens
caaattattctctgtgcagctcagtcaggactcaggacttagggctatgcgagttgtcaacgctgtactttccctccacagagctgagaagctccagctgctgaaccaccggcctgtgactg

SEQ ID NO: 10555 - DNA, 122 bp, Homo sapiens
gcatctaacgaggtgaaggacacaaatgattgtgatttgtgacagaaggttcccacgatccgagggatttgggggttctctgctgccgccccgcaaagccgaagcacgggaaggagggcaca

SEQ ID NO: 10556 - DNA, 122 bp, Homo sapiens
ggggtgaagcgcttagggcacggctcttgtgaggattacggcggaggctgtggaccgcggcggcgctcgcagaggctgcagccattgcacagccgagcatcccacattcaacaggaggaacc

SEQ ID NO: 10557 - DNA, 122 bp, Homo sapiens
cccagtcttctcccactggcttcacgctagagggcgccatgcgctctgggtgaaatgagacgctggtgtggggtccccatgtagagaccctcaggtccctatccagagaccctccaggcagt

SEQ ID NO: 10558 - DNA, 122 bp, Homo sapiens
ggaaaagactggagcttcaagggcaatagagggtgacggggtggggcccacggggaaccccgggagctaagctgatcccctgtacctcctccatccctctcggcacccgggctgcctgccca

SEQ ID NO: 10559 - DNA, 122 bp, Homo sapiens
gagggcgcactcccggaggccccgcccattctcggaggccccgcccattctcggaggccccgcctctccctggccggccctgcccacggccgaaggccccacccacaccccgggaggccccg

SEQ ID NO: 10560 - DNA, 122 bp, Homo sapiens
agatcaaattgaaacagcatacttagcttttggaacgaaccacgaagcaggcaggaggaccggagattgcaacatactgaccttccgagtcctgtttgggtcagtttgttaaaattagtttg

SEQ ID NO: 10561 - DNA, 122 bp, Homo sapiens
ctccgggatgcacttgcgcagtttcacccgaggctggagtgacgccaacctgttaatgttcgttttcggattctggacttcgggttccgctgaggacggatttcggaataggcacagtggct

SEQ ID NO: 10562 - DNA, 122 bp, Homo sapiens
ggacaggcgggccttggccttggacaatggctagctagggtgggctagagctgcttcacccgcagctttggcgaggggagcgggaggccagggaagtccccaggaggagtggccacgctgtg

SEQ ID NO: 10563 - DNA, 122 bp, Homo sapiens
cacaatcgaaagagcagggccgcatctttgagcaagaaccagtccccaccgttaggtgggcgtttgttagggaagagccagccgccccgcctgttctttactccttatactctcgcgctgct

SEQ ID NO: 10564 - DNA, 122 bp, Homo sapiens
taaaattacagcataagccactgtaccaggccatatgactatttatgcgagagcaggcatcggcaaaattttttctgcaaatagcgaatcagtaaatattttaggtttttctggtcataagg

SEQ ID NO: 10565 - DNA, 122 bp, Homo sapiens
gtggctgaagaggcaggaggaacagtgtatccacagcgtgggaccatgccaggcacaaaacggtttcaacatgtcattgagaccccggagcctggcaagtgggaggtgagaccccttcttca

SEQ ID NO: 10566 - DNA, 122 bp, Homo sapiens
tggctcccagcacctgtcacccctggcgatctcaccccgcggccatcattcccgtcctcacggcccatttcagggacactgaggctcaaagagccacgtgatttattcaaagcagctcgagc

SEQ ID NO: 10567 - DNA, 122 bp, Homo sapiens
ccccccctcacagtcgcctctattatgttgtaccagaagctgggatccagcaccctcaaacgtagaggcttgtactagcaagagtcacatggacagtgggaaggtccattctaattattttg

SEQ ID NO: 10568 - DNA, 122 bp, Homo sapiens
gcttaagacaagtcactgtgccttagcacaggctcagtgccccctttcggctgcttctgtcgtcccgagtggaagcaggcctcggctttccgaggacggagtgaggcttggtggaaggagag

SEQ ID NO: 10569 - DNA, 122 bp, Homo sapiens
gggatagaaaagtcctgcgccctttttggctgaatttcatgggaagtccctgaactcggccgtggagaggggatgcaggacacccccattcctagaggtggaggagctgacaggggcagtag

SEQ ID NO: 10570 - DNA, 122 bp, Homo sapiens
attgccagaagatttaaaactgctaaaaattaaaaacaggcgggacgcggtggctcacgccggtaatccccgcactttgggaagctgaagcaggaagatcccttgagcccgggagttcagaa

SEQ ID NO: 10571 - DNA, 122 bp, Homo sapiens
aagctttctttcctgacaatacttgttgtctcagtgattggcttcctgtgccagtagcaacgggacctggaccaaatgtggggtttccataacaactatagcttttctccaacagtatacag

SEQ ID NO: 10572 - DNA, 122 bp, Homo sapiens
cgggaggggaaaagtgagcgatgacgcctgcgtattgtggctttttacgccatctttccacgcccaaaaagggaggtgcttttccttggcgtatttactttcgccaatgagctgagagctct

SEQ ID NO: 10573 - DNA, 122 bp, Homo sapiens
caggctctgctggagcaggggcgtccctgtctccgcttcccagcgcaggctgggtggggccgatggccattaaagccccgccccccgcggctcaccgccgcctggccccgtccccgaggcca

SEQ ID NO: 10574 - DNA, 122 bp, Homo sapiens
cccgagcgtttatccggctgcaggcgtcattcttggtcgcctgtgtgtccagagccccagcgcaggaagggagcgcaattcccaccgcgcccgctgggtggcgctagcgccgcaccgtgtcc

SEQ ID NO: 10575 - DNA, 122 bp, Homo sapiens
gaaaatttgcttcccgagtattccatccagcttcccttcctgcgcccacgtgagccatagcgccagcccatcggcaaggtctcagcgtttcctgctgctgcaatctgtaactcgattttgga

SEQ ID NO: 10576 - DNA, 122 bp, Homo sapiens
tgggcgggtccggggacgagccagctccgtggagggtgtggttctggcccggcttgcctccggggctgccccttgcccggtgttggggtctggtcggttcgtgcggagcccgcgggcccgcg

SEQ ID NO: 10577 - DNA, 122 bp, Homo sapiens
gccccgaatggctcctggcaggcagacccctatccctgtcgagagcactgatttccccagcgtcgggggaggcagccgcgccctcctggagcgaggcaatccagcggtcaggcggcggcgag

SEQ ID NO: 10578 - DNA, 122 bp, Homo sapiens
gcgtctactgcccgctctggaactgtgagcgacaaccggcactctctcccgggacggcgccgcacccaccttctgcacacctcggagacctcaacacctgcgccaaagccacccagtcacag

SEQ ID NO: 10579 - DNA, 122 bp, Homo sapiens
tttccttaaagactctctggtcccctgtcctcatttgtgaaatgaggacattctcaccggcgtctcaggggtgttctgaggtccaaacgtactagcttagtaaggcattagacttgagtgtg

SEQ ID NO: 10580 - DNA, 122 bp, Homo sapiens
ccctgggggcagtctggccttctgctaaattgtgtaggcctccgaggtcagcccttctctcgattaccacctgctgctcctgagaactgcctccgcccagggccccttgcccagtgcctcac

SEQ ID NO: 10581 - DNA, 122 bp, Homo sapiens
gtacaaacccgtcagcacctcttcatccttccatgcccctcgcacacgtgttcatcccgtcgtgttagtacctgccgcgcgttctttccgtcatttgtacgtccacaaatgtccactgggct

SEQ ID NO: 10582 - DNA, 122 bp, Homo sapiens
gagaggcctgtgctggttgctcagtgggggctgtgagtcccgtagtcaaggggaagttctcggtcactctctgactccctggggtttggctgctgagctggtgctcagggtttctcatgttc

SEQ ID NO: 10583 - DNA, 122 bp, Homo sapiens
atttttctacttctgtggctttctcatccctggtggacatttctgtccaattcattgaatcgtcatggaactggtttgttagatgtgactaggggacggaaaaaattgggagtttctgcgca

SEQ ID NO: 10584 - DNA, 122 bp, Homo sapiens
gggctctaatattttactgtcaatcactttcaaagcagtgggacattgtaggcaaaacaccggtctgggaaatgaaagacccaggagaactaagttttcatctgggtttatcagtggctgat

SEQ ID NO: 10585 - DNA, 122 bp, Homo sapiens
ttggccctggaggaagcagcccctcagtccgtcctctctgccccttctcctctgccggctcgctgggtgcagagttccctggcatttctggtgctccctcagtctgtcccagtatccagatg

SEQ ID NO: 10586 - DNA, 122 bp, Homo sapiens
ttccgtcccattacggatgatatggggtgagccccacaccatcccgctcaggccgcatgccgcccgccattccgagccgtgtcccgtcctctgtgtcgcctctcccagggctttccttccgc

SEQ ID NO: 10587 - DNA, 122 bp, Homo sapiens
taaagagaagcggggatacactggggtccttgcgtgggggccgcctgggagaccatgcaccgcccgggagtctctccgggcagggtcggggagggacttttttgccggtggccgtggaggaa

SEQ ID NO: 10588 - DNA, 122 bp, Homo sapiens
gggagcccttgagaagcaggccttgccctggaggataatttgacagtttgcaaagctccccgatccctgcttcaggagccttctcagcagccctgtatggagctaagtcctcatgtcaccag

SEQ ID NO: 10589 - DNA, 122 bp, Homo sapiens
cacgtgtgctcgagttctcacaggttcatacctggccacatctagcccaggccgaggagccgtaaaggggctctagttggcttccccaggcgagggttcgtacctggccacgtgtagcccag

SEQ ID NO: 10590 - DNA, 122 bp, Homo sapiens
gggtggagaacaccacctgtggattgccctttggggcctactcacatgggcccaatttctcgtaaaactagtatttagggtttcttttgaataaacatagaaattggcccaccctgtcttaa

SEQ ID NO: 10591 - DNA, 122 bp, Homo sapiens
tcttacctgggccgcaggagtctctctatctgtcctcaaagctccagttcctttatatcccgtttcccccaccctctgtctaaatttggagtccttccggagggaccctccctcccacctct

SEQ ID NO: 10592 - DNA, 122 bp, Homo sapiens
atgttgagacgctgcagcaacagcaggcgcttcccaccagctacagtcggagatttggagcgcttgtgtctgaggctcaatcccgtcaggtgccgcgcaactcagcggcgcattctctttgg

SEQ ID NO: 10593 - DNA, 122 bp, Homo sapiens
tggttccatttagactactttcctcttctattgttttttaaccttacaggtccccaacagcgatactgctgtttctcgaggtaagagattcagccatccaattggttttaggtcttgcatat

SEQ ID NO: 10594 - DNA, 122 bp, Homo sapiens
ttcctggcggtcctcggcggagcgggagcagtgggacgtttccgggggtcgggtgggtagcggcgagcgctgtgcggtcagggcggggctcctgtgccctgtcggtggcgcagggagctgga

SEQ ID NO: 10595 - DNA, 122 bp, Homo sapiens
cacagagtcgcctctaggtggcttatcgagagatcgctgcagcccctgagctcgctcgctcgctctggttcagcccacgtctgaaatgcctcagtcatccagccggggatcgagggaggagg

SEQ ID NO: 10596 - DNA, 122 bp, Homo sapiens
ggtgcacgggcttccagctggccgccaaatgggacttccacaggacacagattaaatacccgcttcattgcgggagacgaggggcggggacaggagagaaagaagggacaggcataagtcac

SEQ ID NO: 10597 - DNA, 122 bp, Homo sapiens
cagatgcattactgtgcacccccggcctctcctggtgtctcggtgcccagggactggagccgggccaagggcaggtcgtcattctgttgtggggaacaagcactgcccattggagtccacac

SEQ ID NO: 10598 - DNA, 122 bp, Homo sapiens
ctgggccggagggaccagccaccattgtctctgttcagccaagtgtgcaagtaggctgcccgccaagagggggcctctgctacccgctgctgcctgccggctgacacactgcctccccagcc

SEQ ID NO: 10599 - DNA, 122 bp, Homo sapiens
acgtccgggcgggtttttagtctcccaagcgagagcgtcgcattcacccgcgtgggtctgcgggcgccccagaccccagaggacccggcccccaacgcttacctgtcccctctcctgtccct

SEQ ID NO: 10600 - DNA, 122 bp, Homo sapiens
gtgttcttccgggcccagcaggcctcgctgtggccgtgggggatgtttgacctgcgatcgcgccactgtgatcctaaccgaggcccctctgtttggggcagcctgggtagcaaagggagctt

SEQ ID NO: 10601 - DNA, 122 bp, Homo sapiens
tttgcatcttccctgtttcttcctttagcatctaacaaaggaggctcaggctcattattccgggcacttctggagggcctggccctgccccaggagccctagggcaggaattcctttcttta

SEQ ID NO: 10602 - DNA, 122 bp, Homo sapiens
ctgccccatcccggctgctttgcctggtgctcttctaactgcatgtttatctatcctccccgcctagactgtagggcccgcgaggggagccgctagctgtgcttgtcagtgtgaccagcgct

SEQ ID NO: 10603 - DNA, 122 bp, Homo sapiens
cgacggccccagcacctgccctggctcgcacggccgcccggagacccccgcttccgtctccgcccccagccccggcccagtgccgcctacctggctctaggctggtgctcgtgcggcgcggc

SEQ ID NO: 10604 - DNA, 122 bp, Homo sapiens
gggctccgggcccttgggggcggcgtgtgggggggactttggcgacccgggtcagccggccgccccctgggctgctggtgggcgtcgggcggcggctcctcccccgggcacgggcgcgttac

SEQ ID NO: 10605 - DNA, 122 bp, Homo sapiens
cacattaaacctgtaccctcccgcccagacgcactccgagcagagcccggcggacacgagcgctcagaccgtctctggcaccgccacagtaagtggacgtgtttgctacgggtgggaggtta

SEQ ID NO: 10606 - DNA, 122 bp, Homo sapiens
cagcgccatgttggacggtcctcccacttcccaccttcccagtcctcccgctactctgaccgttctacctgtgattctcgctggtggagtcaacctggaatggattcccgccgaaccacgcc

SEQ ID NO: 10607 - DNA, 122 bp, Homo sapiens
agtactactggcgtctgccttctgggtccagaaaactcttcccacggagccgtccctcggcggtgcttagccctccggatacccccgagacatcccagatggccccagtccggtggcgaagg

SEQ ID NO: 10608 - DNA, 122 bp, Homo sapiens
gtgctctcttctagagtgttccagtgtcatcctggagacagaggttgaagtaaggagtgacgggtagtagagaaaactgacatgaagacccctttgaagagaagtgactaaaagacaaaaag

SEQ ID NO: 10609 - DNA, 122 bp, Homo sapiens
tgtcagaccatcaggcagggcctcggcaagctgggggagaaccgaatcctcccagaggcacggatgcagctgccttctcagacctcccaacacactgccattcgctggctcagagaatggca

SEQ ID NO: 10610 - DNA, 122 bp, Homo sapiens
taaacttaccttgaacttgcagtatcccccactgaggtgctggtggggggcagggattcccgagctgagcggcggcgaggctgcccccggccgggactcggcacttctgcagctctcccagc

SEQ ID NO: 10611 - DNA, 122 bp, Homo sapiens
atccgggaggcggggatacgttacgtcgacgcgggcgtgaccctgggcgagagggtttggcgggaattctgaaagccgctggcggaccgcgcgcagcggccagagaccgagccctaaggaga

SEQ ID NO: 10612 - DNA, 122 bp, Homo sapiens
tctaagctttttaccatgttatttatcatgggattacttttttcaggtgtcttctgaacacgcagttgtcccaccaaactttgacactgcccttgtgattaatttttgcctacattaatcac

SEQ ID NO: 10613 - DNA, 122 bp, Homo sapiens
atatgagctggctgagcttcagggaacttcaacagggaacagcaacagctcagggaagggcgggattatctgctggtccctgcttccccaggctggggagaaggaggtctcatgccaacagc

SEQ ID NO: 10614 - DNA, 122 bp, Homo sapiens
tctcttcaccaagcgtcttgccctgcatatgtcacacagtaggcacccagtgaatatttacgacggaatggaaaaaacaagggcctggagggagagacctgggttcaaaaccttatttgtac

SEQ ID NO: 10615 - DNA, 122 bp, Homo sapiens
agtccccttctccagctcctcctggatggctgtggcaagaatggggactctgtggggagacgtgggttgtggggggattgcgaggagggcacagctgagtgcggcatccataagttcaggtg

SEQ ID NO: 10616 - DNA, 122 bp, Homo sapiens
tgaccctgcgtggttgttttgggagcgcagtggctgaaggcgaaggaggtgggggtgtgtcgagacttgtggaccaggtgactgctgagaaggagaaaataagccaggtacacaactgcgga

SEQ ID NO: 10617 - DNA, 122 bp, Homo sapiens
aaaaactacctcagctgacagatttacaaacgagccagaggaccctgggactgtggcacacgccgcttgcatcaaggttttgcgccaggagagggaagctgggcgggtgctccgagggagga

SEQ ID NO: 10618 - DNA, 122 bp, Homo sapiens
agctgcggtccgaaaactgtctgtaggcgcacgatgcgtcgtgctgggagccaggcctatcggcggggtccagaagctgcggagaggccgtgtcggtcaagggacttccgccccactggctg

SEQ ID NO: 10619 - DNA, 122 bp, Homo sapiens
ctcagtcagatacaacagcatttggggccatggtacctgcacacctaaaacactaggccacgcatctgatctgtagtcacatgactaagccaagaggaaggagcaagactcaagacatgatt

SEQ ID NO: 10620 - DNA, 122 bp, Homo sapiens
tatgtggaaatgtccctcttctgagtagatgcagccttgaaagaaacacaaccacccttgcggccagccctgccaggcacttttctttccctgtgcctcatcggtatggaggacacagtttt

SEQ ID NO: 10621 - DNA, 122 bp, Homo sapiens
ggatctaagagcttcatcccctgtcccgggaacccattgcaagctccctgatattaagagcggcatctgggaaccacccccaggcaactccagcattaggtcaccacaattactattttggg

SEQ ID NO: 10622 - DNA, 122 bp, Homo sapiens
tggggggaaaaggagatacacataatggccaggaaaattgcagaattcctaatcagaaaacgtgggttctggcaatgacttgccatgggtcacatgctaacacagactatctatgataggtt

SEQ ID NO: 10623 - DNA, 122 bp, Homo sapiens
gggcagggcggaattccagcaactcctcctcctgctccaggacgtggtctcctcctccggcgactgggacctgccctcagctgagcgtctgagctgggggcctctgaggtgctgcccaggac

SEQ ID NO: 10624 - DNA, 122 bp, Homo sapiens
ggcacaaacctggtgtcgccgtgagaggccgtgtaccctgtgcctggccagcatcaggcgcgaaaccacacgatcctgccattgggtcagggccacggtcacagagggcaaggaggacacac

SEQ ID NO: 10625 - DNA, 122 bp, Homo sapiens
cgcgcgcagctcctcccgtgagcgcgccccagccctgggccggcccgacccgacccgcgacggggccacgcgtagtgccaggcaactcctgtgccctgtggccagccccgcgcgcgcactcg

SEQ ID NO: 10626 - DNA, 122 bp, Homo sapiens
tcctggcctccccgcccactttgccggtgggacagagtggctgacggcgtgtggcacaggcggggtgagcccggaagggtgagcatgcgcctgctgacgcttcgttcaccaagcggggggcc

SEQ ID NO: 10627 - DNA, 122 bp, Homo sapiens
cggaacagccggcagtgggtacaccctgcctggtgaattcgaccggggttttgggggacccgccacccaagggccgaagagcagggccgccctacgggcgctcccatttggccacctgagtg

SEQ ID NO: 10628 - DNA, 122 bp, Homo sapiens
actaaacctacaaattcttgtttaccacctttgccacaaagtgccaaggctccgtcggcgcgaataataaagtctaacttaatgtctgacagaggccttacagtctagtgggggagacacgg

SEQ ID NO: 10629 - DNA, 122 bp, Homo sapiens
cgtgccctgagccctgttttgcctgggctatttgtgggactcagactctgaccaggggggcgggatagtaacccagaagtgcttcaggggcttaacgcaagtcagagagtaggaattataaa

SEQ ID NO: 10630 - DNA, 122 bp, Homo sapiens
ttcaaggtggacaccaagagtctagccaggcaactggcagcctggagccctagaggtccccgcagacatcgccctccaagcccacccacacgcaacgtttccgccaacgggatggctccact

SEQ ID NO: 10631 - DNA, 122 bp, Homo sapiens
ataggcatgagccaccgtgcccggcttaggcccacaattttattataagaatgtgctggccgggcacggtggctcacacctgtcgtcccagcactttgggaggccaaggcgggcagatcaca

SEQ ID NO: 10632 - DNA, 122 bp, Homo sapiens
tggcggcgccagattgagacaaagaggcgccgccgccattttgtgacgttcagcacggggcggtggcgggggctcccggcccatcggagggtttcctagtcttggagtggaagtctttatat

SEQ ID NO: 10633 - DNA, 122 bp, Homo sapiens
aaaggcgcaggctctgctggagcgagagaccggccctgcagtgcaggatgctccggtggacgtggccgagcggctcccgggcagcgcggctttatatgccgcttctcctgtgcagggctgtc

SEQ ID NO: 10634 - DNA, 122 bp, Homo sapiens
gctcattcgcaatgcagccgatatctccatcatcgttatctacttcgtggtagtgatggccgtcggactgtgggtatgcagcgggttctgggatgcgggtggggagggtgcgcacagaggag

SEQ ID NO: 10635 - DNA, 122 bp, Homo sapiens
ggcggtgggggcaggcggggaggtggagccagttcagcacgaggagggttaactcggcgccgccgctgggaaatctcagcgtctacagcagccaagcgtggagcagttttgagggggaaatt

SEQ ID NO: 10636 - DNA, 122 bp, Homo sapiens
gagactgctctgtcctgcgctgtgagagcctgaccttgcgtgtgtgatggctgccagaggcggctcactgcagttgtttacagtaaatgactctatctaaaagctccacaagtgattctaac

SEQ ID NO: 10637 - DNA, 122 bp, Homo sapiens
gcagccccgctcctccctgacgtcgccaaagttgccagacgcccctcagcgacccggtcgcgccagatgcagttgcataaccttgccccccacctgcgaccgcaccgggtccgctcccggct

SEQ ID NO: 10638 - DNA, 122 bp, Homo sapiens
gcccagtgcgtggtctgtctgttgctgccgggggactgatgatggggtttctggcagtgacgggtttggacacactgtcctgcggcgggagggggaggtgagtgggagatgtagattcggcg

SEQ ID NO: 10639 - DNA, 122 bp, Homo sapiens
catgggtgctaagcacatctagatcaacgagatccagtccctgccctcaggggacaaacacggaatcacaggatctcatcagtgtggctggagcaaccacagagcatcctgggagcctgaga

SEQ ID NO: 10640 - DNA, 122 bp, Homo sapiens
cccggccccgcgcccgccgccgccgccgccgccgcccctgttgcgatggcgcagaaaccccgttgacaaggcactgctttttcatgacggtgagtttccctttgagtgtattataattttgt

SEQ ID NO: 10641 - DNA, 122 bp, Homo sapiens
ttaccttttgatttcttaattacattgtcctcacctgcagctcaacccgcctaggagaggcgctcgccgagctcgattctccgggtgccataaattaggacgccagtcgccggcgaacgctg

SEQ ID NO: 10642 - DNA, 122 bp, Homo sapiens
cggggtcgggaagtcggtggaccctgcaggccagtggggagggtacgcgagactgggggccgggagggctgacggctggtggcgcggggcgggtccgtggggaggaggcccggggctggtag

SEQ ID NO: 10643 - DNA, 122 bp, Homo sapiens
tcatgagacaccgagagaaggccctaacagactacatcctttaggtaggttcagcccttccgtaatctacaaggccctggccccacctccagccaggtcacaccctagcttggccaccccgc

SEQ ID NO: 10644 - DNA, 122 bp, Homo sapiens
gactcacctgcggaggcagtgggcggggctgaagctgcaggtctggcagagggcgggctgcggcagcgcctccagtggggagggataattctacctctcccccaagcttttgccaagaactt

SEQ ID NO: 10645 - DNA, 122 bp, Homo sapiens
cgtcctttccatcccggcgagggcgcaccttcagagggtcctgtcctccaaagaggtaggcgtggggcggccgagaccggggaagatggtccacggggaagcgcgcgggctgggcggcgggg

SEQ ID NO: 10646 - DNA, 122 bp, Homo sapiens
ctccaagttaataaaaggttcaaagccctctagttaactgggtggatttccagcccgttccgatgtgcttctcttgtatttctaggccgtagggacactcacatgcaacgagccaatgagag

SEQ ID NO: 10647 - DNA, 122 bp, Homo sapiens
caaaaagtgcatgtgaaagtttccttggaaagggccgagcatcacataggagtaaagccccggaagaaatgacttgtacaagcgtctcggcccttcagctcccctcccaaagatttccagct

SEQ ID NO: 10648 - DNA, 122 bp, Homo sapiens
ttggtgacaagtcaatattttgcatggatctcatcacgtgtccatggaggtgggggcaagcgtgagctggcacgcaccccattctccccatggagggtggtcacatgtactccacctgtgtc

SEQ ID NO: 10649 - DNA, 122 bp, Homo sapiens
gtataaaccgcagaagcagatggcttccggccgcagagcttaagagacccttcagcttctcggtgtaggtcaccagtcatgtcacgctcacaaccctttcgcctccctctaggtcaggcacc

SEQ ID NO: 10650 - DNA, 122 bp, Homo sapiens
gctgttggagagaacaaatgggagagaaaaagcagtgagagaatgagctgtcaccatagacggagaaataagaagtgagtgcagctatcagccatagatgtgattacctctgcgctctcagc

SEQ ID NO: 10651 - DNA, 122 bp, Homo sapiens
tgttctgccccgggccacagggcaggtggtcaccaggatgggcgggcgagggggtggccccgctgagaacagctgtgtgcctgagaagacagcatgcagccctgatgttcccagcacgagaa

SEQ ID NO: 10652 - DNA, 122 bp, Homo sapiens
tgcggaccctgagcggctactacaaccagagtgaggcctgtgagtgacaccggccgggggcgcaggtcactacccctccacatcccccacggaccgcccgggtctccccgagtctctgggtc

SEQ ID NO: 10653 - DNA, 122 bp, Homo sapiens
acagagagtccccagggccaggaggcacctgggaacccaaatggggctccacagaatacacgagcctccaaaaagtttagtattatgaagcatctgaatttttttctcttccagaatggctt

SEQ ID NO: 10654 - DNA, 122 bp, Homo sapiens
ctgtgtttgttgggaaccaggtcgttcctccctcagatatgtagtgagcacggtgcacggcgttctaggcactgcagaggcagagaagaaatgaaacatacatggagcttacggaatagctg

SEQ ID NO: 10655 - DNA, 122 bp, Homo sapiens
aacgaaaaaattgttgaatgaatgaatgaatgcatgaagaaatggataactatgaagcaccgtccaaggcggaaaaaacccgccctaaaccgcaccccaagcaaattgcacacacggctttc

SEQ ID NO: 10656 - DNA, 122 bp, Homo sapiens
ggacgcccctgtgtggctgtgcatttgcgcgaccctccaggcggttcccgagcagctcaccgaacaggctctgcagggccgctggaggtcatggaaaagttttaggcagcagattttacatt

SEQ ID NO: 10657 - DNA, 122 bp, Homo sapiens
agtttggggagagtgaacctccaaggtcatagaggtttgggggcagagatctggatgccccggctctacctgccggtaactgctgcctctggtcctggggcggggccaggcagtgggggaag

SEQ ID NO: 10658 - DNA, 122 bp, Homo sapiens
gaagagcatactacagatgtagtatccggatatcaagtttccccacttaaaaaatgggtgcgatcaaaggaaaagcaaggaacgggcaggagagcaagcgtgaaaggtgacaaacttgacaa

SEQ ID NO: 10659 - DNA, 122 bp, Homo sapiens
acagtaggagaccagataggtgggggcacacacaggcctggccactgcctctgctccatgcggagtgtggctgggccttcctgctgtggcttgagtcccggccagcaccggaaggcccaggc

SEQ ID NO: 10660 - DNA, 122 bp, Homo sapiens
ccgcggccggatgctcagagctaaaggccgcggaggacagatgtgcttcttcctccttcccgcgtctccccatacaagtactaccccgcacgtcccatcaggcttgcctgtgggccaggatt

SEQ ID NO: 10661 - DNA, 122 bp, Homo sapiens
ccaagaaaggccttagtggtctccagttctcatgtctcaaagccatttccatccttggtgcgaaacggtgggactggatcaggctctctggaggaagacatcttcaatggagcagggtaaaa

SEQ ID NO: 10662 - DNA, 122 bp, Homo sapiens
aaaaccatctcttgcctatttaagtctcccctgtcctccaagactaagcttaaatgtcaccgcctctcttatttcctaattattccagctgaaatttatctccagcttctgaattcccccta

SEQ ID NO: 10663 - DNA, 122 bp, Homo sapiens
cgattttatagatgagaatactgagggctagaaaagataagtaccttgtccaaggtgacacggccagtaagctgtggagtctggatttgaactaggctctcttggagtttggagcccggtct

SEQ ID NO: 10664 - DNA, 122 bp, Homo sapiens
cactgctcggctcaggtcggagagcgagaccccgcagatcggctacttccggaagaagttcggctcctgtcgggcaaccgctcggctatttccgtcgcagctcggccccacccccttttccg

SEQ ID NO: 10665 - DNA, 122 bp, Homo sapiens
aagaagaagctgggcctgagatagggtctgtggccaggcacccgctcccacctggccgggcgctggctcctccctcagttctctttggaaaacccccagctgtccacccatcccctgcccca

SEQ ID NO: 10666 - DNA, 122 bp, Homo sapiens
tgtgcagttcattaagttgtcatgtcaggggacagcggccatcggcgcggtgcggggaggcgcctgcggctccagctgctggaggaggctggccgagcgcctctctgataccagcatggtaa

SEQ ID NO: 10667 - DNA, 122 bp, Homo sapiens
cctcccagcacctctagcccccactgaaaaaccagcctgggtggccctgagagggcagaccgaaagccttggcacctcctccccaaccatccctctgaaggagagctgggggaggggacggc

SEQ ID NO: 10668 - DNA, 122 bp, Homo sapiens
actctttttggagaatctgcaagtggatatctggagatctttaaggatttcattggaaaccggaatatcttcaggtaaaatctagacagaggcattctcagaaacttcttcgtgatgtgcgt

SEQ ID NO: 10669 - DNA, 122 bp, Homo sapiens
gacttctggaaaattctccagctactccacaaactaggatcacaggccttgttcttaggtcgggagcaggagtttttgctgcctttagcatttgggaagtttgatgaatagagactgaattt

SEQ ID NO: 10670 - DNA, 122 bp, Homo sapiens
tctgttctcccctaggggctccctggtgttggcctcacaccttcagctgcccagactgcccgtcagcaccccaagatgcatcttgcccacagcaccctcaaacctgctgctcacctcattgg

SEQ ID NO: 10671 - DNA, 122 bp, Homo sapiens
ttccctacagaatcagctttactctcctgtgttttgccagaagaaacatttcataaaactcgtctttgaatctattggaaagatgttcttgagggtgtggcttcccactttccacagggtct

SEQ ID NO: 10672 - DNA, 122 bp, Homo sapiens
aacagtcagcgttgttgacgtcaccttctgggagggaggtcggcctcggggccaatggcccggagcttgtgtgtatggctctgtgtgcgtgtgcaatgcactcagcatctaagctacggtca

SEQ ID NO: 10673 - DNA, 122 bp, Homo sapiens
gtggcctcgtgttgtgttgggggtctcgcaccttctgtggaaggtgccctgcctggcatgcgcggtgtctgctgcctcatggctgagcttccatcgggccgtgtgcctgtgaccagcctcct

SEQ ID NO: 10674 - DNA, 122 bp, Homo sapiens
ggtggcaggggtggtagcggtggtggtaccggtgcccgcaggggagccgcagaaagcaggcggcggggcgggcggctgcggcggggacgcagccgccttggaccccgctgctgggaccccct

SEQ ID NO: 10675 - DNA, 122 bp, Homo sapiens
tttcccttccccgtgtggctgtcaggtgggctgtggcaccacactgttcttccttctctccgggagtcaggccagccttctagtcaattttaatgagagaacctggataccttgattgtcgg

SEQ ID NO: 10676 - DNA, 122 bp, Homo sapiens
gctggaattgcttgccccgcttttcagatggcaaagctaaggcctagggactgagtaactcgggaagatgcttagcgctggagtcctgtccagtgttctgactcctgggctgcatgtgactg

SEQ ID NO: 10677 - DNA, 122 bp, Homo sapiens
atttgttaagcttataaatagtaagcagaggaaatagccgaggaaagcacggatgaggtgcggaaagaacagagttctagatcaagtgccaacattaaaattagattcagggaaaccactaa

SEQ ID NO: 10678 - DNA, 122 bp, Homo sapiens
atgatggattcacctggaacattttcaccctcttcaggcccaccctgccccagaggcccacggaaaccctgcctgtactggggccgcagcgctgcccccacccatacgtaattacacggctc

SEQ ID NO: 10679 - DNA, 122 bp, Homo sapiens
gaaggagggatcctggagcggggcttggaggccaccgggtgggactctgagggtcgacagcgttaagttccagccggctccacccgttcacagaggaccgcgcttttcgcgtgcgcatcgcg

SEQ ID NO: 10680 - DNA, 122 bp, Homo sapiens
cgctgaggcccggggagcgaggatctgccgccgctcagcccggagcccgctcagaaacctcgttctgccgactcggacggcagccgccgttttggatcctgcattcatttcctcccaggctc

SEQ ID NO: 10681 - DNA, 122 bp, Homo sapiens
cacagaatcgcccagacacaccctcgcctgggcacaccctcacccgggcacagcctcacccgggcacaccctcacccagacacagcctcgcccgggcacaccctcgcccgggcacaccctcg

SEQ ID NO: 10682 - DNA, 122 bp, Homo sapiens
tgtggcggggagggaacctggacagggggcggcaggcggggtggggggctggcactcaggcggggactaggcaggggaagggctgcccccaggcctgttgaggagaaactgaggccagccct

SEQ ID NO: 10683 - DNA, 122 bp, Homo sapiens
agcacagccatgcacgctgcaggcaggagaccggctgtgagcagtaagccccgaaattcacggcctgagccaggctgtctcaatcatgggctgccgagacctattgagggggccgggttttc

SEQ ID NO: 10684 - DNA, 122 bp, Homo sapiens
tcaccaccttcatttaacgaggtaaacatgcctcatttgcagctgcttcagttcaatgaacgcagggggtactgtacctctttatataaattgttccatctcccttcaggtctcaccctttt

SEQ ID NO: 10685 - DNA, 122 bp, Homo sapiens
gcggctcctcaggtcccggggagtcgccaggagtggcttgccggtggccgtgggaatgagcgtgtcccgaggcggcagctgctgcgcgggataaacccggaagaagccgcgagacggactga

SEQ ID NO: 10686 - DNA, 122 bp, Homo sapiens
taaaaacactgtttttggttctgtcagcaggaaacggcagctttctttctatgtcacaaacgatggtggctcctggggtcacccagtcaacaacagctgcaagacaccagcttctcgaggca

SEQ ID NO: 10687 - DNA, 122 bp, Homo sapiens
taaaactcgcctaaaatgaaacggagatcactcgaggacagcccgaagtacctcggctcacggcccaaatctgaaaaagctagaggcaagaactgtccaagcctaaatgacgataaacaggc

SEQ ID NO: 10688 - DNA, 122 bp, Homo sapiens
gcagtacagaaagaggagcaaaacacacgtcatggcacgaggcggggacagcacgctgggcggtatagagagaggagcaagtcacacgccagagcatgaggcatggcgggggaggcggggac

SEQ ID NO: 10689 - DNA, 122 bp, Homo sapiens
tggcgcaggctggagttccacggggcccagggtccggctcccgtccttcgctcgctgcctcgtttgcttgttccagtacccacgcagctagccagtcacgtcgcagctcaccactttgtctg

SEQ ID NO: 10690 - DNA, 122 bp, Homo sapiens
cggataactgcgctgcctcccgacgcgccgccagccaggccacggcctcctagacacaagcgagcatgcgcagtcgccaacaacaagtccgcacgtccggtcccgcccccccttccccgcct

SEQ ID NO: 10691 - DNA, 122 bp, Homo sapiens
tggcacctgcctggacgctgcactgaggtccctggcgctgcactcctgcgaactcacagacgcagcaaaggggccccagcgtccagctcctgacaacgtgtggctgcagtgtcacccatggg

SEQ ID NO: 10692 - DNA, 122 bp, Homo sapiens
ccttgagcggcagcaacgcaaagctccaagtgtgaacaaaagcgaactttttcttgaggccgtgatagaggaatgaccgcctcctgggacctgtggttttcttcggcgcaggagaaggcgac

SEQ ID NO: 10693 - DNA, 122 bp, Homo sapiens
ggagcccagattttcccctaaccttaagaaggttgtagggggttgggtgattagccagttcgtattcctttgattacaggaagcagtggggttagttgttttttgttgttgtctttcctttt

SEQ ID NO: 10694 - DNA, 122 bp, Homo sapiens
tcctaggcccccgaatgcagcctggaaccccaattaagaatcgctgccagcatctggctccgttatggacacaaaatctatggctgttagggccagggagccatggtcctgcctcaggagtc

SEQ ID NO: 10695 - DNA, 122 bp, Homo sapiens
gtgagattgtctcaaaaaaaaaaaagaatgccctggtcggggtgagctgaagccaagccccgcttctgctgtgtctcagtatgaactccgggggattcacccaggaatgaagaacgcagggc

SEQ ID NO: 10696 - DNA, 122 bp, Homo sapiens
cacacacgcaccacgcatgcgggcgcgtggccccgcccccaaacaaggccacgcggcgtgcgctcacccgcctctcggggacagtaccaccagccccggcctgaggccccgacccctcagcg

SEQ ID NO: 10697 - DNA, 122 bp, Homo sapiens
atcctcgctggtaggaggcaggtcccaggcctggcaagggttgaccccggagggctgggccggggcggcaccccaggagcacctgcccacgaggcggctgcgcggacagacgttccagcccc

SEQ ID NO: 10698 - DNA, 122 bp, Homo sapiens
atcacacctgatctgtctagagcgctcttatttcagtcccagagaggaagcgcccagccccggactacagagctgtgaatgaacccacgcagggcgagtggagaatttattccaggggttag

SEQ ID NO: 10699 - DNA, 122 bp, Homo sapiens
aaacgcgcctcaaaataaaaccccgtgtttcacaagaatgcactaattcccgaagatatccgggcgcacgggatgcagtggggattggagatgcaggggccatgcaagtgagaaggaccctg

SEQ ID NO: 10700 - DNA, 122 bp, Homo sapiens
tgcacctgactgttggggctggagccttctaaccagtgcacctgtgtaggaatgtgtgctcgtgtgctcacaaaggtgtgtgcatgcatggggtgtgcagatgtgtgtaccagatgtgtatg

SEQ ID NO: 10701 - DNA, 122 bp, Homo sapiens
caggcctcgtgacagtgatgattcattcacccacttccctcgtgtctgttccatctcctccgaaagataaccagtatctccagatgacaaggaaccagacaaagcatctttctaggctgtcc

SEQ ID NO: 10702 - DNA, 122 bp, Homo sapiens
tctcgctgcagcagatcaacgcggtgtgcgacgagctccacatctactgctcgcgctgcacggccgaccagctggagatcctcaaagtcatgggcatcctgcccttctcggcgccctcgtgc

SEQ ID NO: 10703 - DNA, 122 bp, Homo sapiens
agccttgtcacctggcgggcgaatccgcaagcggagacttgtctttaaagggctttgggccgggcgcggtggctcatgcctggaatcccagcactttgggaggccgaggcggtggatcacga

SEQ ID NO: 10704 - DNA, 122 bp, Homo sapiens
cccagggtcccttgcagcctcgatggagcctggggtcccaggagctcccaaagcctcattcgccccggcggcgtcggctgtctccgccgcttgtctcgtcccccatggccgctgacggccct

SEQ ID NO: 10705 - DNA, 122 bp, Homo sapiens
gcctcctcctaaacatagcctcgtaaactaaacttggaagcatcagcttgcgtgtggtcccgagtgtgactttccaagcatgcactcccctgcaacgacaaaggctgatgactttgtcatca

SEQ ID NO: 10706 - DNA, 122 bp, Homo sapiens
atatggggcctctaatgcttcaaatcaaggaaaaaagaatgcttttttttttaaactacacgtgtgaagagtcacacaatcagctatgctatttctttgcacaagctggaaaaagaagagat

SEQ ID NO: 10707 - DNA, 122 bp, Homo sapiens
agatgaaagagtttaggacatttttgctctgttcttccactgttccagcatcacttctctcgcactagctgtgttccccataaatacaacccccaccaagctacaggatcatgattttcttc

SEQ ID NO: 10708 - DNA, 122 bp, Homo sapiens
aggaaatgctataaacgcctaattccttctcgttctttggggttgctgagctgacctcgccgcgaggggagagggggaaaaaaacgcgcactaatgattctgtttattgagttatatatgta

SEQ ID NO: 10709 - DNA, 122 bp, Homo sapiens
gagcaggatagattagaaagggactcaaggcctcatccccttattcctcagcccatgggccgcgaggcttcgggggaaacgtggtggcaagaggcagagaaagatggggcaggggagcaggg

SEQ ID NO: 10710 - DNA, 122 bp, Homo sapiens
tgtggggccacacagagcctgcccccaccccctgccccgcccacccccccggggcgcccccgcaccttggggttctgcagccacatctccagcttctgcaccgccagcagccgcacctcctt

SEQ ID NO: 10711 - DNA, 122 bp, Homo sapiens
ggccagcctcgagggcaaaaggcaaccccacccaggccggtgaggcgcgtcttcgggcgacgccaccatccagggtccgcggccgcagggagaactcgcctccccgccccggcacgggcact

SEQ ID NO: 10712 - DNA, 122 bp, Homo sapiens
tcataagattgtgtgagtgatcgctgttcgcctagctcaaagttcttcctgtctctcccacggaattggggagagttatatacagggcctacttaattactaatgacattttagttcttaaa

SEQ ID NO: 10713 - DNA, 122 bp, Homo sapiens
aaagatggctgctgtgcctactataaatgcggaatcggggctagctgaatccatctttatcgtgggcatgttgttagactagaagacaatatgcatgagtcaggagattaaacaggtttctc

SEQ ID NO: 10714 - DNA, 122 bp, Homo sapiens
cggcagccgcctcaccctggcctcggagctgcccggcgcgcccttccgcgtcgggggacgcggagctgaggacccgatttagatgcccggagccggcccaggtcccagccaggaccaaagtc

SEQ ID NO: 10715 - DNA, 122 bp, Homo sapiens
atacaagaaaagagaaaaaggcaaccgtgcataccaagaaacccaagaaagaaagggtgacgtggagaaataactaacccaggcccagttttccaagaaacattagaacccgcactgcgaat

SEQ ID NO: 10716 - DNA, 122 bp, Homo sapiens
ggaggcccctagtgaagccaagagttcgtagagcctgggcgccgctctatgctcggctctcgattgctcacgcctggcagcggcgagcggcgcacgcgacggctggggctctgcgctcgagg

SEQ ID NO: 10717 - DNA, 122 bp, Homo sapiens
gcaggcatccaaagactaactccccagattttttttcttaatttattggtttcccctcctcggtctccttgaaggttcttcattctcaacccatcctttggatgttcaaccccaaacctagg

SEQ ID NO: 10718 - DNA, 122 bp, Homo sapiens
agttacctttcccatctagagatgccattggctttttcttcacagccgtcagcattctatcgtggttactggggtagagcgacccttggcactcggggcaggacccagcggcagtcctgctg

SEQ ID NO: 10719 - DNA, 122 bp, Homo sapiens
acggccattagtgtcacagatacgtgtccccttgcatttccaggaaatgcccttggttggcgaactacagtcgtgacagtcgggccacagggcgttttgtgagttatcgtcttgggcaaatg

SEQ ID NO: 10720 - DNA, 122 bp, Homo sapiens
cattaacaggtgattctcatcattagccaagtttggaaaaccacaattaaaggtgaggttcgcagaggccctagtgcctcagtactttttcatggtacctcaggccaaaataaatagccaac

SEQ ID NO: 10721 - DNA, 122 bp, Homo sapiens
ttccagtcctgtttctcacatcagaaaaggatagaaattctgttctttccaaccccaccacgtcaatcaaatgaaaatgtcctgagccatgaatccagctcctggagtgaagaatctttgta

SEQ ID NO: 10722 - DNA, 122 bp, Homo sapiens
ccgggcgggcacccacgggcccccggacgaggagatcccagagactggctgataacggggcgctttggacatttgtcgctgcctggagagggctgggctcacactggcccggggtgcgctgg

SEQ ID NO: 10723 - DNA, 122 bp, Homo sapiens
ctggaggcatcttcggacctctgggcggcccagccctgcctggcgtctccccgccgcttgcggcctaccgccaagaagctatgccttaggcaaaccatggagctctggccccagagggcgcc

SEQ ID NO: 10724 - DNA, 122 bp, Homo sapiens
tcttaaagggacctcgcataggatagaggccagttccgtctcttcgcgtgttcttctgcccgtgagcccgtggaatcacattgggagacccttttaaaatatgcatgtacccagtccctcga

SEQ ID NO: 10725 - DNA, 122 bp, Homo sapiens
gaaaagggtggtttgagaaccaggggccaggcagaaggacagcccggcagcctgagagagcgactggggggcggtgaggagctccaagggggcgggtcggctgagctggcccagggtcagct

SEQ ID NO: 10726 - DNA, 122 bp, Homo sapiens
taatggaattttagatttaatcttccgaaatgcctgaccccagaacttcacaacgatcaccgctagctccagggcgcgtcacagatgacgcagctctcccgcgcagcgcgctcagaagccgc

SEQ ID NO: 10727 - DNA, 122 bp, Homo sapiens
catggcttctcgctctggcaggttcatgccccgggtagagattgtgcagaagcacaacaccgcagcccggcggctgtacatccggggacacaatggcaagatctacccatacctcgtcatga

SEQ ID NO: 10728 - DNA, 122 bp, Homo sapiens
gcttgggcacagccagagcctgggtgcagtcaaagggcaggctggtgagggaccagatgacggggtgcaccttctgcgtgatgttcagtgagatggccacaatggagcacgtgtcctgccgc

SEQ ID NO: 10729 - DNA, 122 bp, Homo sapiens
tgtggaggcgtgcttcctcgtctgtgatctgagcttctgtgatctgtgtatatggatgtgcgtctgtaagtctgtatgtgtgtctgtctgcatgtctgcgagtatctgctgtgcttgtgtcg

SEQ ID NO: 10730 - DNA, 122 bp, Homo sapiens
ctttgagaagagaagcgctaattaaatttaggatgccgcttcccccatctaacagtgacacgtgggctcttccagactggagcggggcggggcacagcatcccgctgcgcggctcctcaatc

SEQ ID NO: 10731 - DNA, 122 bp, Homo sapiens
agcgacagtgagactctgtatcaaaaaaaaaaaaagattaacaactaatttttctcactacgagtcacctggaacacaggaccaagggactgaagaagtcataaaatgccagaaaaagaagt

SEQ ID NO: 10732 - DNA, 122 bp, Homo sapiens
ccatgcgcctgggtggaggctcccgagagaagctggcctgcgggcgggccggacgagctgcgcggacggggcggggcgaaggaggccggcaggcggaggaggaagcggcggggcggaggcgg

SEQ ID NO: 10733 - DNA, 122 bp, Homo sapiens
gagcttgaaaacacctggcgtggttctcgagggccctagaggctcctgctacggactggtcggctctggggttgtaggcagaaggctctaagcggtcggaagggtttcctgtgtgtcagcaa

SEQ ID NO: 10734 - DNA, 122 bp, Homo sapiens
cggccacttccctgccatgccgcagagaccctgacctcctccgacatcatgctccggccccggcttctgtcctagctgtggctcgctggtctcgagatggctgccttgccccggctgtttca

SEQ ID NO: 10735 - DNA, 122 bp, Homo sapiens
catctcagatcatcagtattagattctcataagcggggcataacctagatccttcgcatgcgcagttcacgacaggattccactcctatgagaatctaatgccaccactgatctgacaggag

SEQ ID NO: 10736 - DNA, 122 bp, Homo sapiens
ttctgcaagcctggtggttgtgtgcaggctgccctggtggtcttagccccttggggcaggcggggtcctgtgcaggatgcagagactgggcgtggcttcctgcagatgttcagatgcttctg

SEQ ID NO: 10737 - DNA, 122 bp, Homo sapiens
caaaacctaaaactgagctatctaagggggagggtccccgcacctaccacttctgtttgccggtgggaaactcacagagcaggacgctctaggccaaatctatttttgtaaaaatgctcatg

SEQ ID NO: 10738 - DNA, 122 bp, Homo sapiens
cacactcactgctcttgccgttcgcccgtgacgagccacggggcacggtccctctccaggcgatgagtgcatcatccatcactcatacgacagccttcggagggcctggctcctggggttgg

SEQ ID NO: 10739 - DNA, 122 bp, Homo sapiens
tcctagtctctttttttctaagctccagcgctgacttttcacggtggagaaaagggcagacggctcctagaacttgggcggcgggtgggcaccagcctctccaattcttcctcctgaaccca

SEQ ID NO: 10740 - DNA, 122 bp, Homo sapiens
aaaaaaaaaaaaaaaaaaaggcactaaagcctggcccccatgatgacacaggaaactaatcgtcatggagactttatccacacttttgaatatatgttacatttcaacattaaaacacacac

SEQ ID NO: 10741 - DNA, 122 bp, Homo sapiens
aatccaaattacagaaataggcagtttaaaacaatgacgaaaggggataaggacttagaacgtggctcaacacagcttacataaatattgattaagagctgggttaattgaaaagccaaggt

SEQ ID NO: 10742 - DNA, 122 bp, Homo sapiens
ttttgggaaggtagaagcatttggcacagaagtgctgccaggagaaactaagttgctgaacgggtaagtactgcaaagagctcagcatgttgcaggtactctgttttaagctttgttatagc

SEQ ID NO: 10743 - DNA, 122 bp, Homo sapiens
tgagctggtccgcggtggcgcagaccaagcggaaggcggtggcagcggccagcaaggggccgggggtgctgcagaacctcttccagctcaacggcagcagcaagaagctgcgggcccgcgag

SEQ ID NO: 10744 - DNA, 122 bp, Homo sapiens
cgcgctgctgctggccgcacgcggggctgctgcccaaggtaagaggcgcccgccggcccccgcccgcccagaccccctgacccgtggccacccttccgccgtccagccgggcgcgggacacg

SEQ ID NO: 10745 - DNA, 122 bp, Homo sapiens
actgtttactaacgtgaagtttgtattctttgtttggaacgctgatgatgctcatcctcacgcgggagtactctcattccagtgctcttgtccaggtggcacaggaggttggctttttttgc

SEQ ID NO: 10746 - DNA, 122 bp, Homo sapiens
ccagtgttccgggtaaaagaccaaaagctgtttgtttcagaatccagaatgccagactctcggtttccgctagagggcgcgtccgatgcagatgttggagctaactccgtgttaacctacag

SEQ ID NO: 10747 - DNA, 122 bp, Homo sapiens
acactgttgtaggtattctattaacttacacagattcagtacttttactatcattttacacgaggaagaagttgaagcacaaagttactttgcccagtttatgcaggtggttaagtggcaga

SEQ ID NO: 10748 - DNA, 122 bp, Homo sapiens
aagggtaccggtgaccgctactgctgccggtgtttgcgtgtggcagggagccaggcctggcgagcggggtgtgtcgcgatgccggagctggcagtgcagaaggtggtggtccaccccctggt

SEQ ID NO: 10749 - DNA, 122 bp, Homo sapiens
ttgcgtttatcctgtcatagttgttcaccgacacattcgtctctctgactaaactgctgacgaacagtgcctgcgtccttcctccctgaatcctcagcgcccagcagagttcctagaatgct

SEQ ID NO: 10750 - DNA, 122 bp, Homo sapiens
aagtgtcataaaagtggacttaaatgttgataagcagctggttgggttccacacaggttgcgagctcaggatgcacgttggaggggacacagggccagagcaaggtgggaatgcgggtatta

SEQ ID NO: 10751 - DNA, 122 bp, Homo sapiens
gcagaggaatatgcagaggagttcaggacctacctggagggcgagtgcctggagttgctccgcagatacttggagaatgggaaggagacgctacagcgcgcaggtaccaggggccatgggcg

SEQ ID NO: 10752 - DNA, 122 bp, Homo sapiens
cgcgtctccgcccctgggcgcgggcccagggcggggctgggctgggcggggcggtgtgagcgcaggcgccaggctcggcccggtgcgaaccgttcctgccgccgagtccgccacggacggcg

SEQ ID NO: 10753 - DNA, 122 bp, Homo sapiens
tgcatttaaaggccggcgtgatctgcaccacgtacctatctcggattctcagtttcacttcgctggtgtctgccaccatctttaccacatcccggtagctacatttgtctaccgcttgagcc

SEQ ID NO: 10754 - DNA, 122 bp, Homo sapiens
gcttagccagagcaccatctgcaggttcgagtccctcacactgtcccacaataatatgatcgcgctcaaacccatcctgcaggcatggctcgaggaggccgagaagtcccaccgcgagaagc

SEQ ID NO: 10755 - DNA, 122 bp, Homo sapiens
cagatgaccagagatggaaacacaggagccaagtgcttcgtgccttgtagagtaagacttcgggtcagacccagtattggtatttttctttttctttttttgagacagagtctcactttgtc

SEQ ID NO: 10756 - DNA, 122 bp, Homo sapiens
aggcttgttgctaacaccctccagtgcgcaggacagccccagccccagccccagccccagcgaagatctggtccacaatgtcggtgagaaaccctgccctaaaggaaagtcctaaacagccc

SEQ ID NO: 10757 - DNA, 122 bp, Homo sapiens
ggtaacgcgccgcttgggctcggcgcccagccgatgacgtaacccgcgcttgcgtagtggcgccgccctgatgtgtagtctccaggccgccccgaacaccagcccagcgggtcctggacccc

SEQ ID NO: 10758 - DNA, 122 bp, Homo sapiens
gaatagagttcacagtccctatcaagagataccagcctccttctgcatcacatgtctcagcgtcaactatgaaactactttttcttgcccagacaactccacagatggtttcactgaggatt

SEQ ID NO: 10759 - DNA, 122 bp, Homo sapiens
acctgtttgctttcgccctgaagagcgtttgtgtctgctcctcccgcagagagggccgctcgtgcccctctgaagtggctaggccgagcccacaaagcaaagcgtgatagaatttcagtttt

SEQ ID NO: 10760 - DNA, 122 bp, Homo sapiens
cgtcccctgctggaggcgtggggacaccggaacataggccccgccccgccccgacgctcccgcatcccactgacctttctatagtgcaggttcagaacagagcctctcttctgcacgtgacc

SEQ ID NO: 10761 - DNA, 122 bp, Homo sapiens
cgcacctggacgtcgtgggctgcgccgcggcttggcgggcgcgccttctcggcatatccgcgctgcgggtaccctggccacctgggcagtccttgcagctgtcccttccctcccacccccct

SEQ ID NO: 10762 - DNA, 122 bp, Homo sapiens
cccatggtgctggggcagggggtgttagatctagcctcactcctgtagaatgggcctggacgctgagtacagctgggtgggcccacaaggggtggggcctagaaatctagccaaaatggggt

SEQ ID NO: 10763 - DNA, 122 bp, Homo sapiens
tgcctgcccggggcccctacctcctcagtgctgaggccaaagtcacagggcaccactgtgcggtacttgaagcgacagggcaggtcgtcgatgatgtcctcgtagtccagccggtaatactc

SEQ ID NO: 10764 - DNA, 122 bp, Homo sapiens
ggccggctcatgtcccacactcactcctgggcagctggactgggggagccgtcctgcattcgcttgttcgtttgttctgccagctcgcttgttcagcgagcctttcaagcagccacgctgta

SEQ ID NO: 10765 - DNA, 122 bp, Homo sapiens
tgtcggacaccctgggcactgtagagagtcaggaggggagcttggagaccagggcgggtccggacaacagtcagcagagagaaatctttgggaaatcctcctagtaaccgagagagatacac

SEQ ID NO: 10766 - DNA, 122 bp, Homo sapiens
tggatgtcggaaataaaggtgtgaaaaagaagaggaggaattgttttggctttaagacaccggaacctccaaggttcctacaaaaccgtttgcagcttttgcaaaccgccttaaagtcatca

SEQ ID NO: 10767 - DNA, 122 bp, Homo sapiens
ggaactcaggttgagaaacacagtgggtgttttggggtcggtgttttttcccggtcccatcgcggcatcttcctgcgcctcagccacgccctgcgtccgccccccggcgcgggggtcacagt

SEQ ID NO: 10768 - DNA, 122 bp, Homo sapiens
catcgcggacagccacgcccactcaagaaatttccgaaacagaaagtttgtctgcaacagcgcgccgtactgacgtagcagtgcgcaggcgcagtcccggctcctggcggcgtgttcctctt

SEQ ID NO: 10769 - DNA, 122 bp, Homo sapiens
aagcgctctgagaagagcctgtagggagccaacatctgtggcagaggctggctggggctgcgggagcagggacaggaggtgtctggtccctgctgagcgaaaaggagagttctgtaagatgg

SEQ ID NO: 10770 - DNA, 122 bp, Homo sapiens
gcgaatacacgaagctgcttttccacacttctctggaggtttctgtgtccccacagagctcgggaaacaaacagtcaacagggccacgctttcgggggccagagacgcatgagcaacaggcc

SEQ ID NO: 10771 - DNA, 122 bp, Homo sapiens
tcctgccgttctgagtcaccctgcctccccggaggaggaggaggatcagctgagccgccgcgctcacgtagtgtctggctgtctgcctgtctgcctcgctgtgagcagagtgggatgctgcc

SEQ ID NO: 10772 - DNA, 122 bp, Homo sapiens
gtgccggcccccccacgcccaccgccaggctcagcccagccgagaaggccggacgccgaccgcccgctcctccgagactcggcctggccctccccgacgcccgtccccgacgcccggccccg

SEQ ID NO: 10773 - DNA, 122 bp, Homo sapiens
tattttgccaacctgagcaactgtacaggtgcaaccagatgttgggggccacaggaaaagcgctttgctcatggcgagtgttcagtgagttttgttttccacaggagccgcccaggaggctc

SEQ ID NO: 10774 - DNA, 122 bp, Homo sapiens
agccagcgccccccccaacccccgtccctggctgcagggtcatccgctcatcctcccgcccgcagcagagcattcctggttggggcttgggccgggctacacacccagccccacgagggccg

SEQ ID NO: 10775 - DNA, 122 bp, Homo sapiens
ttttttttttttttcattcctagacaccacaaaagaccaatgctacagatgtctctctttcggctttaaatacttcaactgtgacaatgatagtgagacagactgcttcaggccctgtagct

SEQ ID NO: 10776 - DNA, 122 bp, Homo sapiens
taaattaaattaattaaatagaaattccaatattctgcccatcctagcagttctcctgcacgtccccttttggaggctatggctctaaagttgtattagagaaagaagtcagcatatgttat

SEQ ID NO: 10777 - DNA, 122 bp, Homo sapiens
ctaagaggaaacatttcacagactccaagcatatggtcaatttgggatgaagcagctcaccgtaactctcaacaacccactgcatctcttctaagaatcactggaggaatctgttctagaac

SEQ ID NO: 10778 - DNA, 122 bp, Homo sapiens
tagccccaagatgggggaataaaatgggcgttgaggttgctgagaggcccatccccaccacgggtgactggcacttgggtgagagctccttagaacccctttctgaagtctccaagcctcat

SEQ ID NO: 10779 - DNA, 122 bp, Homo sapiens
tccataggagcagggacaatgtcttactcctcagtttatacccagccctgggtacacaggcgctaatttagaacgaatgtccagaaaagcaacattcctgcctacctcccccacaaccgctg

SEQ ID NO: 10780 - DNA, 122 bp, Homo sapiens
agccggacctgagcagcagggggttaaagagcagtacccgggctgtccccgggtcagggtcgtttgcacgaaggcagagccgcggaagagggaaggaaatgccccgggtcccaggcggggcc

SEQ ID NO: 10781 - DNA, 122 bp, Homo sapiens
gctccaggctctgagaggaatgggttttcagtgcatgttcgccccagagatttcagtgcacgctcctctccgggaggctgagcagcaaatgcttgcggatctgcgtggggagcagacgccgc

SEQ ID NO: 10782 - DNA, 122 bp, Homo sapiens
tcatgtcctcggccagagtcgcaggaccctggtgtcctccgctcggctagagaggcccttcgaatgggcccaggactgcctggccatgtgatcagttcctccgctcagccattgttttccca

SEQ ID NO: 10783 - DNA, 122 bp, Homo sapiens
ttccacaggttagcaggggctttggtcatgggtaaatataatagtactccctcccttcagcgtcaaatgaccctaaaggtggcttgttagacaatgtcctagtccagggtgactaggtagaa

SEQ ID NO: 10784 - DNA, 122 bp, Homo sapiens
tctgcagggcggtctggccctgtgaccagaaggagatgtgttcggaggctctaggccaagcgagctccatccatactcagaggagaggctggagcgctgctctctcagccgttcctggggac

SEQ ID NO: 10785 - DNA, 122 bp, Homo sapiens
aaaatccaacacttgctctcagaaggaaatagaggagcaaagaaatgaaaataagatgggcgcagcattgctcactgttgaaactaagtaatgagggcatggtggcacacacctgtaaatcc

SEQ ID NO: 10786 - DNA, 122 bp, Homo sapiens
ccgggatggaactgggctgggttcaccctgagctgagggctggtgtgctcagggtgcagccgcaggcactgaggaggtccccaaggcgttcagcgagcgcggaccatgggaggccttgtgct

SEQ ID NO: 10787 - DNA, 122 bp, Homo sapiens
aagctgccgcctggaggtactgggtagccaggcagccttactgaaaacaactaaggttttcgagcgagcgttgtttttggcaagagggaggtgttaccggctgcttcctggggtgctggaag

SEQ ID NO: 10788 - DNA, 122 bp, Homo sapiens
ctggccggctccgggcggaggaagaagaggaggcgcccagactggatacccgcctggacccggagccgcggcaccacccccagcccgccccacgctcgccagcctcagacggccgcgccccg

SEQ ID NO: 10789 - DNA, 122 bp, Homo sapiens
ggtaaacacagacgccagagcactggtttgagacggggatgtagccgctgtgcagagactcgggtagggcaccggctatcgcggagtgaaaccctcagcacagtatccaggactgccttgtg

SEQ ID NO: 10790 - DNA, 122 bp, Homo sapiens
gcgcacccactgacctgcgcctactgtctggcactccctagtgagatgaacccggtacctcggatggaaatgcagaaatcacccatcttctgcgtcgctcaggctcggagctgtagaccgga

SEQ ID NO: 10791 - DNA, 122 bp, Homo sapiens
gcctataactaagtctgagtgtaggctgctaacacttagacctttaccttacagaatcttcgcagccagtgctgtgcattggaagttgcagatggggaaactgaggctcaggactgttaagt

SEQ ID NO: 10792 - DNA, 122 bp, Homo sapiens
gaaattgccgccaatggaaaggacttggtccagaaaaacgttagtttcatatggttcgcccggtacttaaatgttttattttctcccccaacagaaaactaaagcagctgcccccggcgtgg

SEQ ID NO: 10793 - DNA, 122 bp, Homo sapiens
aggggactcgggctcagctcagacatccccagattatgtcccagggggattcagactcaacgcaggaggctctacaccatcccagtggaccgcaggcccaccctaagggaacccagacaata

SEQ ID NO: 10794 - DNA, 122 bp, Homo sapiens
cagtatgaatgcttttattagtgaaatgggtcctcaactcaatctgggagccacgagctacggtgcagggctctcgggcatccccaccgtggtgcactgcagggagggagggagggtgggtg

SEQ ID NO: 10795 - DNA, 122 bp, Homo sapiens
gggagaggaggaaggacggtatggcacagttgggatttttctatcagagaagttaaaatacgatgttgcattcacttttatgtgtgcgtattaatgcagtgaatacaaccaggacaggctcc

SEQ ID NO: 10796 - DNA, 122 bp, Homo sapiens
agtcacacttggggcatctcaggcactgataaaggttcctgggctcccccagagatgttgcgggaagggtctcaaagcttgtttgtggaggtatctgaggctcatgtcacactctgggggta

SEQ ID NO: 10797 - DNA, 122 bp, Homo sapiens
ttcacaattgactatagttattctttcttttctgtcccttcatatcaaaagttttcaaaacgcttaagctggtagaccctatgagtgtgtggcattaggcatccccagcctagatttttgtt

SEQ ID NO: 10798 - DNA, 122 bp, Homo sapiens
gaggtcgcatctacaaccagagccagcgcttccccgccgccaccccttttcttggaatcccgctgcttagctacctgcgggtgtcattggccccgccccatttccccacgctttgaaggggg

SEQ ID NO: 10799 - DNA, 122 bp, Homo sapiens
ctcgtggggggccctgcgcggcgccgcttgggctccgggaacgcggccgagtaagcgacgcgcctgctgggccctgctgccgcccgtgccctgctgcttgggctgcctggccgaacgctgga

SEQ ID NO: 10800 - DNA, 122 bp, Homo sapiens
tacagaacaatctggcccttacaagccggcggagacgggtacgaattaccatgacaacagcgcgcgcctcgacattgtcggctcgcgcgttgtttgggaagaaaaagcctaggctgcgtgtt

SEQ ID NO: 10801 - DNA, 122 bp, Homo sapiens
cacacgctcgcgcccggaaagccggggaaccggaaccggcctaaagccaagataagagtccgctgatttgacgtcacaagcaggctgcctttctccggtcccgaggctccagccttgccgcc

SEQ ID NO: 10802 - DNA, 122 bp, Homo sapiens
gcctgaacggggtctggtcgggccgacggaaaggaccctaaagggatctggagggcgtgccgggcgtggggcggggtgttggggttcctagctgaggccccagagggcgtgatgaggggggt

SEQ ID NO: 10803 - DNA, 122 bp, Homo sapiens
cctcaaaagttatcgggagccgcgggagggctgccgggggccgggctggctgggcggaggcggcccgcggcgccgctacatgctaattagcccgggcgggtcgctggctggcgggcggctcc

SEQ ID NO: 10804 - DNA, 122 bp, Homo sapiens
gggcccctcatctcaccccatctaggcctgtaggaggtcatggttatataaactcaggaccgccacaccattatttatgtctctaagccacaaggtggggaaaccagagaaaaggcagatgg

SEQ ID NO: 10805 - DNA, 122 bp, Homo sapiens
ccttcctttttgtgtatttatatccatctgccttccttgtcgtttcattattaggtgcctcgcagatttcactgctataaacataattttcatctaagctcagcgcttaggcttcctgaggg

SEQ ID NO: 10806 - DNA, 122 bp, Homo sapiens
ccagtgaggagcagcgccgtgcctctgagaccctctcaggcacgggctctgaggaggacacgcccgcctctgagccggcagcggccttgcccaggaagagcgggagggcagccgccaccagg

SEQ ID NO: 10807 - DNA, 122 bp, Homo sapiens
tctcctcgacccccatctcctggggtatcccccgctcggatccgccgcccagagtgaccccgcccctgctctccggcaggtgttccacgtggccatagcgtttgcgtcacaatgacctggcg

SEQ ID NO: 10808 - DNA, 122 bp, Homo sapiens
cttcctccccttcctccccttcctccccttcctcctcttcctgctcctggctccttccgacgagtttggtttgaacttttgaatccgccaatcagcgccgcgcgcccccactccgcgggtgc

SEQ ID NO: 10809 - DNA, 122 bp, Homo sapiens
aaatgaggttgggcagggatgtatatggcactagccacctggccaccaccaagatgtccccgtctctcatctcagcttttttctgcatcgcagcttcagtttgtcagacaccagctccataa

SEQ ID NO: 10810 - DNA, 122 bp, Homo sapiens
gggtcctggccaaactgagctcgcaacatcatgtccattttctccagcctcctcttgagccgcttggcctctcgctctcggatgagccgggcctgccgcttttccggggtttcattggcccg

SEQ ID NO: 10811 - DNA, 122 bp, Homo sapiens
atcactttcacggctgagctcctagtcagagggcactttgaagaaatagccaggccaagtcgctctcagcataggggcataatttaactctttttaaatttgctttaagggaaagatgaaaa

SEQ ID NO: 10812 - DNA, 122 bp, Homo sapiens
ctcgatctcatgacctcgtgatccacccaccgtggcctcccaaagtgttgggattacaggcgtgagccaccatgcccggaccctaagagagtttttggataaagctttccaatcagggagta

SEQ ID NO: 10813 - DNA, 122 bp, Homo sapiens
gactgcttaaaggttagttattatgatccctgatgctattactactcttactgatatcatcgtgcctcaggtctaactgctcccagagttacacaccagcatgtccaacagctggctgtata

SEQ ID NO: 10814 - DNA, 122 bp, Homo sapiens
tcctaaagcagatcctgaggcctgggcattgagaatcctgtgtcagggcactggtggagccgtttcccagccagtggctttggcggagcggatcctgccatggtcctgccctgtggattcgc

SEQ ID NO: 10815 - DNA, 122 bp, Homo sapiens
ccacaccgaagaaatccatgcacgttttcctgcaaacgcgcgcgcgcacacgtacttcggcgggcgcccacgtcctctgtctcaccaacagacacagacatttacacttctaggccaggaaa

SEQ ID NO: 10816 - DNA, 122 bp, Homo sapiens
ctgcgcctgcgtgggaggatccggcggaaggggcggggtcaggtggcacttccgtggcttcgggcgggtgagtatggggagtgcgcgcggcgtccaggagtcgggactgggctcccgcctac

SEQ ID NO: 10817 - DNA, 122 bp, Homo sapiens
cctgtgtgccacgtggcagctgctgcttggcttctggcccccttatctgcccccgccccacgcgccctggcagcaccatgagccgccagcttctgcctgtactgctgctgctgctgctcagg

SEQ ID NO: 10818 - DNA, 122 bp, Homo sapiens
agtgaggtactcatcccccagtggggagactgcctgagtctccttcccccgaccctgtcacgatcatgctgatggctgccatctagaacctgggccccctctgtagcacacattgcagacag

SEQ ID NO: 10819 - DNA, 122 bp, Homo sapiens
gggctaagagagggctatctgcaggcgtcctaggccccaggtggacccctgctccattggcgatagagccctggcagaaccctgccctggccacggcgaaaaaaaaaaaaagcgttgctctg

SEQ ID NO: 10820 - DNA, 122 bp, Homo sapiens
gagaagggggaggaggaagaaggaaaatgctaaaggaaccgcagccggcaccaagcggggcgctgacggtcacaactcgagtttgtaaagggttatctggtctgggcggatcctgggaggga

SEQ ID NO: 10821 - DNA, 122 bp, Homo sapiens
gccaggcgcctcaccgcctcggcggagaactggggcagccgccggccgccagcgcctttgcggagcacccgggccacgtctccttcggtccaggggaactcctccagctcggggagccgcgg

SEQ ID NO: 10822 - DNA, 122 bp, Homo sapiens
gttaagaagagcgtcagtctcccaccgcgtaagagtgtagtcggcgttgaaactcggcggcgactggtccagcagaaccagggacggggagaaggatcaagctagctcttcattggtccctt

SEQ ID NO: 10823 - DNA, 122 bp, Homo sapiens
aggagctgaaacacatggcatttgaaaaaaactggcgaacagaggaaactcttgcagcctcgcagccgccctggtccagtgccaacggcaggagcaccacaggaagggaccgcgcgggtgcg

SEQ ID NO: 10824 - DNA, 122 bp, Homo sapiens
caagaaattttaaaaatcgtgtccttaaacgggagcaagaatctatacaaggcaacaaggcgagagcgcagagctgtttatttatttatttatttatttttctacccagctcacagggccag

SEQ ID NO: 10825 - DNA, 122 bp, Homo sapiens
agcggagcctcgccacagtgagggtctctaggcttagaggacaattaagtcttctagaagcgggcgaggaggcggaaggggagaggaggtggcgcgcgcccacttaccattcctgagcagag

SEQ ID NO: 10826 - DNA, 122 bp, Homo sapiens
ggggcccgagcgcggcctcacgtcgcccggacgccccccgccccacccgggagactggagcgagccacggcctccctgggcgggcttggcccagccactccgctgtgtccgcgctgccaggg

SEQ ID NO: 10827 - DNA, 122 bp, Homo sapiens
ccaccattatccttaccacctcggctaggaatcttaaatcatctttgattccatcctttccggcttcagtcagttactaagttaattctacctttgaaaagtctcttctgtatataacccct

SEQ ID NO: 10828 - DNA, 122 bp, Homo sapiens
agactgggtttcaccatgctgaccaggctggtctcaaactcctggcatcaagtgatccaccggcctcagacttccaaaatgatggggctacaggtgtgaaccaccacacccagccatcagtg

SEQ ID NO: 10829 - DNA, 122 bp, Homo sapiens
tgtgaagaccacctcccaggtccgtcccaggcacatcaccagcctggaggtgatcaaggccggaccccactgccccactgcccaactcatgtgagtcctcgcactgcatcagttagtgctcc

SEQ ID NO: 10830 - DNA, 122 bp, Homo sapiens
gcggctggcccggcccctcctgggtctcttgatgtgggaccaaagctgttgcttcctctgcggcagaggcgatggagtccctcagagcccgcgaccgtcccctccgcactgcgggctgatag

SEQ ID NO: 10831 - DNA, 122 bp, Homo sapiens
agataatgcagctgctttggcagtggtgaaggctgcagtagctgcagcagctgatgcagccgctgcagctgctgcggttgcagctgccagggccgacctgggactgtcatctgaagaaggaa

SEQ ID NO: 10832 - DNA, 122 bp, Homo sapiens
aagaaggctggcctccttccctctgtctaaagtatcactaagatgctggatgggcctgaccgtgtaatggaccaatgatcctagaagtcttttggaagcactcatttgaacctgcatttgtg

SEQ ID NO: 10833 - DNA, 122 bp, Homo sapiens
agcctgtcctagggtgtctgagctccttcacttccaaattggttaagtagcttaacatctcggcatcttggcctctaatcatggcagacagctgtgggtggtggcggaaagcagtgacccag

SEQ ID NO: 10834 - DNA, 122 bp, Homo sapiens
gccaggagcaggagtgggtgcaggaaggacccagcccacccccacaagaaacgcccatgccggggaatctgcccacactgcaacaagcatcccaggtcctgaccttgacagggatgcagggc

SEQ ID NO: 10835 - DNA, 122 bp, Homo sapiens
ccctagtgttccctgaagaatactaggaagaaatggaaatcagtgttctgaagaacggcacggactcttaggcagttccatcagcaagaacctgagtttgaagtgacaacgtgctgtggaga

SEQ ID NO: 10836 - DNA, 122 bp, Homo sapiens
tgggtcaccacccctgcatcttccaagggcctggtgaggacaccaagctctgcggcccctcggccatgtggtcttgcttttgatttatggcttttttcaaaaggtagaatgagctctgatgt

SEQ ID NO: 10837 - DNA, 122 bp, Homo sapiens
ggccagtcccgccctcgctatctcaggtgtggccgggcagctgtgggagctgggcctaggcgggtgctgctgccagccccgggccgccctcgcctgcactgctttcccagctgagcggctgc

SEQ ID NO: 10838 - DNA, 122 bp, Homo sapiens
gagggagtggggggagccctgtgctgcgcccgggaggctggggagcgcagagctggagggcgtgcagggaaacgcagagctaggaggtgtgggcctcgggtgaggggagacccagctcttag

SEQ ID NO: 10839 - DNA, 122 bp, Homo sapiens
caggaagccattttctataagggtaatggtcctataagccttaaaaagccctgacagcaccgccctctcccagattaggttaaaaactgacctcgatattagtgcttcttactcatgttgga

SEQ ID NO: 10840 - DNA, 122 bp, Homo sapiens
atagcaggcgcaggtgggggtgctgactcagggatcaggcaagtacaaggggtcccatgccgccgagcctctcaggaggcagagagtaagagggtcctggagtttggggtcgcctgggcgcc

SEQ ID NO: 10841 - DNA, 122 bp, Homo sapiens
ccttaaatgagaaataaagacaatagatttgcccactgcagactgggataccagaaaagacgttctaagtctcgcctgagacaatattaacctgctatcttaagtcccaacttggatgactt

SEQ ID NO: 10842 - DNA, 122 bp, Homo sapiens
cgtggtggcagacgcctgtagtcctagctactctacaaaaaatacaaaaaattaaccgggcgtggtggcacacgcctgtagtcccagctactcgggaggctgaggcaggagaatggcgtgaa

SEQ ID NO: 10843 - DNA, 122 bp, Homo sapiens
ctaggtgtggacagggacaggcaaggcgacagcgaggagaaacgaaaatcacatcggtggcggttgctctgcacacaactcgctcgctaccgcacgctccacgctctgcactacgccgatcc

SEQ ID NO: 10844 - DNA, 122 bp, Homo sapiens
ctgcggagaggctgccccaccctcgggccccagcccctcccttcctgcctgggtcctgcccgctgccagccaagcctttggccagctctgggactgcctctgggtgcaaggggcccagggct

SEQ ID NO: 10845 - DNA, 122 bp, Homo sapiens
ttccttgcttattttaaattctgagtgggattttattcacacaagcatttcttcaagggtcgtaaggtctgggtaatacttgaaataccctttctggcaggaatcctcaatgcagggattgt

SEQ ID NO: 10846 - DNA, 122 bp, Homo sapiens
cacaaggcccttgttactttgggaaatagataatccatgccccactgttagggccagtcccgttagggccagctttgcaccttcacagggactcagcaggaacagatgggctctactctctg

SEQ ID NO: 10847 - DNA, 122 bp, Homo sapiens
gggtccttttttctaacacttgcagaagatttcagccccggccacgatgtttgctgtcagcggatggaaaagtcttcctcaattgatggttcataccccattcttctgaagtgctggttatg

SEQ ID NO: 10848 - DNA, 122 bp, Homo sapiens
cagttttattttcctgtagttggaactactaaaatttaggaaaatgctaagttcaagtttcgtaatgctttgaagtatttttatgctctgaatgtttaaatgttctcatcagtttcttgcca

SEQ ID NO: 10849 - DNA, 122 bp, Homo sapiens
tttcttattcacgtaactcaggatcaacagtaacttcatctaatgtgccatcagagcagtcgcaaattgaatgaaagtgatggccaccacaaaatcctttttctcctgaactctccataaag

SEQ ID NO: 10850 - DNA, 122 bp, Homo sapiens
gccccggggcaggcagggttagtcgtctggtcgggttccgctcggacccgccaagtccctcggagaaaccccagaggtagcgctcgccaaactctttgtcgtgaaagaggaatgccttttgg

SEQ ID NO: 10851 - DNA, 122 bp, Homo sapiens
atgaggttctacagctgcctgctgccctgcgcgcctgcccgcccctccgcaaggccttggcggtagatgctgccttccgagagggcaatgctgcccgcctgttccgtctgctccagaccctg

SEQ ID NO: 10852 - DNA, 122 bp, Homo sapiens
taccaagtgtcactgtgcttcgtactagagattctacttagtttactttctttcttttcccggtctttcttcccctctagaatccaggctgccgggggcaaggattcctgtctgcagggctc

SEQ ID NO: 10853 - DNA, 122 bp, Homo sapiens
gaggctctgtgcctttccattggtcggctcctcgaggggcggggcgggacgcgtggtgggcggagccggttgacctcagaccgtccgtctgtctttcctcctcctccaggttccccgaggaa

SEQ ID NO: 10854 - DNA, 122 bp, Homo sapiens
atcatgtcgtaactatgtgtttgacattttgaggaactgccagactcctccagtcctgttcgatttgaagatgaaactgggcttagagaaagtgggttgtgcaaggtcacacaataataatg

SEQ ID NO: 10855 - DNA, 122 bp, Homo sapiens
gccgccccctctagaggggactagggatgggaaagctcgggagccagcacctggccccgacgccccaccctgggctcaactccccggtcctgtgccggctctggcagtgaccctcccgcttg

SEQ ID NO: 10856 - DNA, 122 bp, Homo sapiens
ctgcagcacacacatctgcacaaagtcccaggggctacagcccccagactgcacgacccacggggcggggtgcccaggacacaggcatgcactgggactacagcccttccatctaaaggaca

SEQ ID NO: 10857 - DNA, 122 bp, Homo sapiens
caggggcccaggacagtggctgaatgtggcagagccttgggctccgtagtgagtgccccacgcactggcaattggtcgacttggggctgtgcgctagcgttagccgcctgtggttcagttcc

SEQ ID NO: 10858 - DNA, 122 bp, Homo sapiens
acatctaagttttgcttatgacgccaagggagggcaattgctgtcagtggtgtttctaaccggttcaagcaactgtgtctaggatgaattaggtgtcttggatggatggagtgaaatgctct

SEQ ID NO: 10859 - DNA, 122 bp, Homo sapiens
ggagggtggcagatggaaggacaggcagagggaggggatcagcagctggtccagctgccccgcccctgcagagaaggcctcccagccaggagggctgtccccagaggcctggccggccaggc

SEQ ID NO: 10860 - DNA, 122 bp, Homo sapiens
ccagtaagtgaccaaatgcccaccttggccaggtgccgtggctcacacctgtaatcccagcgctttgggaagatgaaacggatggatcacctgctagggaggccctggcttatgcctgtcat

SEQ ID NO: 10861 - DNA, 122 bp, Homo sapiens
aaaggtgatcaacgtttcacatgaagaactctgctgagatcattgaacattgtgcaagtccgggggtggggcgggggggtgtaaaaaaaaaaaaaaaacaagctagcaagttatggagaatt

SEQ ID NO: 10862 - DNA, 122 bp, Homo sapiens
cgtccacagccctttgcgcttgaggctggtctgataggcttggcaagggcaggatcacaccgagttcacgcggcagccccagtcacctggttgctccatctacagacttgataaccgagggc

SEQ ID NO: 10863 - DNA, 122 bp, Homo sapiens
cttcacctctgatggactgcgggccagtccttcatagggcgtagccaactgggggcctctcgagggcacccaggggtgttgccaagttctttagcttaataaacacgtgaattgaggggccc

SEQ ID NO: 10864 - DNA, 122 bp, Homo sapiens
ggtgctgctgctgctcagagcccagccgaaacctggccaacctgggggcgggggtgggggcggccccaggcgggtaatgggaagccggagcagatgttggcagttacaggcaggggtgccgc

SEQ ID NO: 10865 - DNA, 122 bp, Homo sapiens
agccctcctcctgatcctgtagtggtagtaagaatcagcagcgcgggcaaggagtacggacgggagtcagaggcagagcgagggtgtgtggagggccggcggggaccgccgggagcgcgcgg

SEQ ID NO: 10866 - DNA, 122 bp, Homo sapiens
cacgtcgccgacctcgccttgtaagcacgcgggaagcggtgccctggtggggcggatgtccgcaggggggcctgtcccctccccagccccactgccaggtcagaggtcaggcccgaccctgc

SEQ ID NO: 10867 - DNA, 122 bp, Homo sapiens
aggccatccatgcgtgggaccggccccctcagcttcatggaggtgaagggagtgaggaagcggtagctcacagccagggcctgggcccgctgccgcagccgctccttctccggttcatcgtc

SEQ ID NO: 10868 - DNA, 122 bp, Homo sapiens
cgtggagagggcccgggccctgtctctggacggcgagcagctcattgggaacaagcactacgcggtagactccatccgcccaaagtgccaggagctccggcacctctgtgaccagttctctg

SEQ ID NO: 10869 - DNA, 122 bp, Homo sapiens
ggagcctgagttgctctccttctgcgaagtcgaaggacaggaggattcctagaggtgtcgcggagggtggaggagaccctctgaggtcgtgcagacaacactgttcctcaaccccaccagaa

SEQ ID NO: 10870 - DNA, 122 bp, Homo sapiens
gaaatcactttgtgttgggtttttgttccttgtaactgaaaacatgctccactactctttcgtgcttcttgtctgtcaagatgcctaggagtatgatcctgccaacagacctgagccaatgg

SEQ ID NO: 10871 - DNA, 122 bp, Homo sapiens
tcaagggaggcgcagaagcaagggaggcgttcctgctggctgcctcttaaagaaggactgcggatgctgatattccagggagccaggaggaactgcaagcccgagggagtgtggaggggggc

SEQ ID NO: 10872 - DNA, 122 bp, Homo sapiens
ggctcggcgctcggtgctcttctggtgctgtcccctcaggtgctgctgaggaagcggagccggagcccgagctggcggctccgggagaagatgcagagccgcaggcggggccgtccgcgcgc

SEQ ID NO: 10873 - DNA, 122 bp, Homo sapiens
tgccaaggagaaaaatcaaggaagggggacagaagagttccttgtagggacaaacggattcgtgatgtttaaaagactgataactttgaggcattaactctaaagtattcgaaaaagggcgg

SEQ ID NO: 10874 - DNA, 122 bp, Homo sapiens
acaaggcactgactacataccttcttatgctttcgaaacaaagggtcaaagggtagagcacggtgataaaatctgcacctctgcctgctcctgccgttaattctacctcccatttcaggaag

SEQ ID NO: 10875 - DNA, 122 bp, Homo sapiens
acaattttattgttaacaacatgagtgaatggcttctctccaccccaggtgatgcttccacgggccacttcatgaagtgcatagacctgggggctcatgtcccagattcaggagagcctcag

SEQ ID NO: 10876 - DNA, 122 bp, Homo sapiens
gtactgactgacagtcaggagcaaggacttcaagcaggcagtggagtccattgcaccggccgcggcccggcttagggaccaccaccgcccagcgtgcgccggcctttagctttcgccgcgct

SEQ ID NO: 10877 - DNA, 122 bp, Homo sapiens
ttttctgagacaacaaagccacacttcccccaccacggtgggaggagcaggatgcagaagcgaacctagcaggcacactgagcacacatggagaggctgcggaagcctggagccttccagcc

SEQ ID NO: 10878 - DNA, 122 bp, Homo sapiens
gcccccaggcgctgcagcacctcctgcccccttccggctgctttggcccatccttgggggcgctctgagcctgaccttcgtgctggggctgctttctggctttttggtctggagacgatgcc

SEQ ID NO: 10879 - DNA, 122 bp, Homo sapiens
tttattcggcgtgttcacggtcagcagccccgttgtgcttggcgtgttcacgggcagccccgttagactttgggttttacctgtcaggctttttacatgttcacgtgttggaagcaaatggc

SEQ ID NO: 10880 - DNA, 122 bp, Homo sapiens
cccaaaaaaatctttttaaaaaaccccacttaattgaggttaagatccttttgaccacttcgcagacatccttttaaagctccttctgattggattaaaaactcctctggcaagcctctagc

SEQ ID NO: 10881 - DNA, 122 bp, Homo sapiens
tgctgggaaggcgctgccccttctgggaagggccttgatgcaagggcacacccccatgcccgcgccctgcacccccgcttccggcagccccggcggggctctcgggaaggcgcggggcgggg

SEQ ID NO: 10882 - DNA, 122 bp, Homo sapiens
tgcacattccacagaccagtccccttcagttcactcccacagggaggttcaaaacaccaccgaccctattcagacatccctttgcaaggccctgtcacctgtcttgcccaatgcccacctag

SEQ ID NO: 10883 - DNA, 122 bp, Homo sapiens
gaaagccaagcttttcgtagtcctcaggagtcatctggaagcagaggagcctgtcgtggccggcgtcctccagtgccccgggaggtggcggggcagggaggccggatgggctggggtctccc

SEQ ID NO: 10884 - DNA, 122 bp, Homo sapiens
ctaaacagcctttgggttttaatcaacctttcctctctcagcaggttagcgcaatggctgcgatttgcgaaagaatcttggaaatgggccccacgtttcgaattcatctccaggttaagaag

SEQ ID NO: 10885 - DNA, 122 bp, Homo sapiens
cgcttggacgtcgtcctgtctgggtgtcgcgggccggccccgcggggagcgcccccggcgcgatgcccttcaggaaaggtaggagtcccggtgacgcggcccacgcccccagcgcgcgcggg

SEQ ID NO: 10886 - DNA, 122 bp, Homo sapiens
cccacactgatatgtctgctgcttcagtcttgatgcctgcttgataaaccactgacgttccgtttctttttaaagctcttctgagaaatggtggcaaagacatctttctggagtttttgttt

SEQ ID NO: 10887 - DNA, 122 bp, Homo sapiens
gtggggtctgactcggaatagtggcacttccttctcggctagattatctgaaactgttgtcggttcttgagatgatactaccaccgaatgtctgtgtttcattgtctagtccaacctgtatt

SEQ ID NO: 10888 - DNA, 122 bp, Homo sapiens
ttgggagtatgccgttcaattcctcaaactcaaaattattttatcgatttctacagttaccgcggtgcactggctcaaaaaaagggttcattaattgagtgctttttactcccagctaagct

SEQ ID NO: 10889 - DNA, 122 bp, Homo sapiens
aaggggtgtgggagggcgcgtgtgagtgtgtgtgtccacgtgtgcgtgcccgcgcctacgcggctgttcactggaagggagtcacagcttgggacttaatgtgtttaagccgagagccactt

SEQ ID NO: 10890 - DNA, 122 bp, Homo sapiens
caacccacccacctgggataaaggacaaatggcccaggtggggtgaagccaggggagggacgggcagaaccacgtcaggttcaggacactgcgaagctcctatacccctggggccagggcca

SEQ ID NO: 10891 - DNA, 122 bp, Homo sapiens
aagtagggacctaaggctccacttgcatatagcacaccaggatgtggagaacgtcgtaggcgactgtccactatgtaccttgcctttgagagtagtggcaagggtctctttgagcaagtctg

SEQ ID NO: 10892 - DNA, 122 bp, Homo sapiens
ggcacacctgcctcctggactggcgatctcctggcctggtggcccaacccgcaggagttccgggcctgcttcctcaaggtgaagatccagggtccccaggagtatatggtccgctcccacaa

SEQ ID NO: 10893 - DNA, 122 bp, Homo sapiens
atgtgggcatccgagtatttacaaggtctggtggctcctgcagccgcgacacgggctgagcgcaagtgatgtgtgaggtgtccccaacagatggcacggggagcgcccacacccgccaccgc

SEQ ID NO: 10894 - DNA, 122 bp, Homo sapiens
gtcccccgcagcctctttttcgccacatgggccatcgaagggtccctgtacccagagcctcgtcagtgcggggacgcgggcgggagggtaacgtgcgacaagtgacagcgcgggaggcagag

SEQ ID NO: 10895 - DNA, 122 bp, Homo sapiens
ttgctcttcaaatagtctctccagctagactatcaactccaggagggcagagttcttcttcgcttccttcacccatgtgcccactgagtccagaactgtatagcagtttgattgaaaaaatc

SEQ ID NO: 10896 - DNA, 122 bp, Homo sapiens
aagccaacattgacagaaggtttcaggaactgaatctccgatctttatgttattttagtccgcctccccgcccccatcaggagctaggtttttcagttttacagagccacagtactgtcatt

SEQ ID NO: 10897 - DNA, 122 bp, Homo sapiens
ctccggcctccctgcagtagactccaaaatccgcggccaggagttctccttggcgcagctcggccctcagtccccttcagtcataagatggctgctgggctggcagccgggatcccgggcgt

SEQ ID NO: 10898 - DNA, 122 bp, Homo sapiens
gctcctgcactaggctctcagccagggatgatgcgctgctgccgccgccgctgctgctgccggcaaccaccccatgccctgaggccgttgctgttgctgcccctcggtgagtgcgggcatcc

SEQ ID NO: 10899 - DNA, 122 bp, Homo sapiens
tccctgtgggtggagcgaagtttgggcacttgggtcctaccgttgttattagtctttactcgtaattgatactaaagaacaaaattaaatgggtttatttttggtgaaaagttaattctcct

SEQ ID NO: 10900 - DNA, 122 bp, Homo sapiens
gggtctgactgactaatctgttagggtgggtaccataaatgaccgttttatctgcctgcccggggcgtggcaacagggcctccccgccccccagccctgcctgtcagctccttttgctttca

SEQ ID NO: 10901 - DNA, 122 bp, Homo sapiens
ctgttggcccaggtaaggcatcggcacctgcgggggtccccgctgcctccctcgacgctgcgggacagtgtcttcaactgcagccgcacaggtctcccccagaaccactggccctggtcgcc

SEQ ID NO: 10902 - DNA, 122 bp, Homo sapiens
attgtctgtaacacatagtgcatgccatgagccaggcaccatggggatcagactggaattcgctccagtgtgtaacaggcagatccagtgacaaagaaggagagaaataagccagccttggt

SEQ ID NO: 10903 - DNA, 122 bp, Homo sapiens
cgcctgcaggagggtgtggccaggcaaaaacgcggggaacggccccggaccagggtggggcgtggcaagggtttgaagggcgtgtcctacgaagaggtagggcttggcaaggacccacgggg

SEQ ID NO: 10904 - DNA, 122 bp, Homo sapiens
catatacatgagagcacagtcctgggagaaagccgaaagtggacatgaaatgttgcttcacgtgtagcatgtatcatgtagaactgtgtcatctcaagcaacagcctaccagaccatgcccc

SEQ ID NO: 10905 - DNA, 122 bp, Homo sapiens
cctccaggcctgcagccacgcttggcgctgtccgctagggccaggtgctgaagtgttggccgcgagcggagctgctgcagcgctggcttccccgggccgctgcgggtggacttggacaacat

SEQ ID NO: 10906 - DNA, 122 bp, Homo sapiens
tgtgggttctgcaccccgttccctcaccccagcgccccagttcttcatggtcaccccagacgtccgcagcccaaacccttcccgggcccccgtgcgcagcgcgactccgctccccacttccc

SEQ ID NO: 10907 - DNA, 122 bp, Homo sapiens
tgatgtcacacctcttcgtctgtctggaagacatttccccaagagcataccagcaacgtccgggaaacagaatccaactggtcgctgcaaaatttgctgctcccaatacgacaaggatggca

SEQ ID NO: 10908 - DNA, 122 bp, Homo sapiens
ctccctcagggctaacttcccaagacagtggcaggtaaaggtctaggctctccacttagacgccgtgggtgcaaagcagggtcaccgccttctggctttgaccttgggcaagtttcttcagt

SEQ ID NO: 10909 - DNA, 122 bp, Homo sapiens
cgcggccctgctgggtggtgctgcccacggaaagcgtgtggatgctgttggtgtagccgtcgcagttgcagttgtcgtagtgcaggccgccgttgcccgaggcccagatgaagagcgtgccc

SEQ ID NO: 10910 - DNA, 122 bp, Homo sapiens
ggtatcggtgatgtaaattcatgaattaaaattaaggattttgaaaagaacggggaagaacgcacttggatttaggttgtttttgaaaaggaaaaaccaaagaggaaatgatacgtttgcag

SEQ ID NO: 10911 - DNA, 122 bp, Homo sapiens
ggggatcagggcagcgtcctgggggttctaggttgggtctccagattgggtccccgacggcgctcgcgggcgctctttccagggagcgcgggctctcgtggggacgcgctcgaggcaggtga

SEQ ID NO: 10912 - DNA, 122 bp, Homo sapiens
gccctctgggggaggaggggtccgtggggacaaactcccaatggccacagcccctggcctcgcaggaggggtctgacctggcgccggcagctgacaggaaaacgtccggcccactgtcagac

SEQ ID NO: 10913 - DNA, 122 bp, Homo sapiens
ccccggctcccccacctctgggaaggcgctgggggtgtggccagggaccggtataaagtccgggggagccggtcccgggcagccgctcagccccctgcccctcgccgcccgccgcctgcctg

SEQ ID NO: 10914 - DNA, 122 bp, Homo sapiens
aattaatggcacatgtgcgagcatgacagcccgtgtgacgtggagatgcatgaatgtacacgcaagagtgtggagcctatagctatgggtattatgaataattgtgagggtatttctgataa

SEQ ID NO: 10915 - DNA, 122 bp, Homo sapiens
gactgggaacccactgggagggaggaacaactccagacgggagacacgaacaactctggacgcgccatctttatgaaccgtaaaagtcactgcgagggtctgcggcttcattcttgaagtca

SEQ ID NO: 10916 - DNA, 122 bp, Homo sapiens
caggactcctgtctcctagcctcatgggatacagggcaaagagcaggagcagtgtgggaacgtggggctgagccactccttactcaggcctccagatgggcagaggcgtgggcaccgagggc

SEQ ID NO: 10917 - DNA, 122 bp, Homo sapiens
ttctacagcctgaaagaagcccagggagccagcatgcttgtgcctttttcctgaggagtacgaaccagtgcagtggccatggtggctctgtgcaggaaagtggggggatggtgtttcttctg

SEQ ID NO: 10918 - DNA, 122 bp, Homo sapiens
cttcatttttttctacccaacatcactagccagaggacaatatattcccaatccaattttcgtgtgcatatattttagtcagaaccattgttttatttccaataaaaccgaggtacttcagt

SEQ ID NO: 10919 - DNA, 122 bp, Homo sapiens
cagccagcaggccctggatggccaggtgtgcagtggggaggcacagggggtgcaccaggacgcagccagacctgggccagttcgcgccgactcttctccattccagaggtccaggaagcacc

SEQ ID NO: 10920 - DNA, 122 bp, Homo sapiens
tgcgccgcagcagccggtagcgctcattcggccggatggccacgcggcgcccgtccttgccggtgtactcgaaggggtgctccaccagcacgtacacgtcccccaccacgtccgccgccatc

SEQ ID NO: 10921 - DNA, 122 bp, Homo sapiens
gtccactgtccccccggggtccgccctcctgcaatgcccgctccccgtccactgttcccccggggtccaccctcctgcaatgcccgctccccgtccactgttcccccggggtccaccctcct

SEQ ID NO: 10922 - DNA, 122 bp, Homo sapiens
ggaacttaaccaacgctagcttatttggattgactcggattccatattttcaaaactcctcggtgaggatccttagaagagacaaaacatggcagtgtccatgtagaaatgatcgtattgac

SEQ ID NO: 10923 - DNA, 122 bp, Homo sapiens
gcgagcgcgttttcgtggcgcctgccccgccccctcactccaagcccgcctccccggccccgcccgccatggcccaaccttcatccgctcagagataaatcagcgcgcgaaagtgggagcga

SEQ ID NO: 10924 - DNA, 122 bp, Homo sapiens
cacagccctcccttgtccctcctcttgatatttccagtaaaagcacctcgaacacaatctcgctgccacaaccctaattatgtgtgaaatcatttttttttagcttgaaaccaaagcaaaca

SEQ ID NO: 10925 - DNA, 122 bp, Homo sapiens
aaagaacttaaagtcccactcatcccaaaccccctgagtacgtggtaaaatggagaaatgcgcccagacccagctgaggagcccactggtcaacttttctcagtggctaccacaggactcca

SEQ ID NO: 10926 - DNA, 122 bp, Homo sapiens
ttagtgagttattgaggatgcagtgacaaggaaaacataagacactgtgcaatcgctgtccgagcccctttattctgaaggctcctagggcacatacgaacaggatacagaaagccactgtg

SEQ ID NO: 10927 - DNA, 122 bp, Homo sapiens
ggggcccttttgtcttccactcccgcagaagccagggcacctggggccgcttcatttacccgcatctctgcccccgatcctccgctggaagacaccggctgccggctaccgggcttcgctgc

SEQ ID NO: 10928 - DNA, 122 bp, Homo sapiens
gaccccttggccatactgagcgagatcagtaagtcggtcaaaccgaggctagcatccttccgcagccttcgaggcagccgtggggtaagtgaggcctcggggcaggaggaggtggtggccct

SEQ ID NO: 10929 - DNA, 122 bp, Homo sapiens
ctcctgacggcaaaatagtgagggtctgcagcaggcgtatggagcactcagctagggaagcgcccccgcccccattgccctcttccacgcatcctggaaggccccagtgctgcaggagagct

SEQ ID NO: 10930 - DNA, 122 bp, Homo sapiens
cttgtctccgcccggatcgtccaccgctcccggcccgctccgcccagagtccgatggcggcggcactgagggccccgacccaggtgagcgctgcgtcctcccggcctcctctgccctcccca

SEQ ID NO: 10931 - DNA, 122 bp, Homo sapiens
cccctcaatgccatctactggcacctctagaatccaggcactccttaatgtcatcttttacgcagcctgctgcacctccctcattttccttccgtctctgcagtggggaacgggtggcatct

SEQ ID NO: 10932 - DNA, 122 bp, Homo sapiens
ctgtaagagcaggagcaggagcaggtgattaggacgtctgcgcaggagccgtggcaaaaacgcttccagacaatggggaactcagacgtctggaagggacgggggcagaacgtcagcgccac

SEQ ID NO: 10933 - DNA, 122 bp, Homo sapiens
tgagaatttccttttctttggcgttcctgaaaccttgcctgccccatgcccggagaaatccgttgcacaccgtctcttggagccctgcttgcagcctctgtggccctcttcagggtgagcca

SEQ ID NO: 10934 - DNA, 122 bp, Homo sapiens
aatgccctaaaagacatcgaaagtcctgcggggggatttccagaagcacttctaggtgttcgacgtaaaaaccacccagggcgaagaagaatcaaggctttttccatacacttcttagaaag

SEQ ID NO: 10935 - DNA, 122 bp, Homo sapiens
ccggtgaaatcctgcaaaggggtgccggtgagcgaggctgagtgcacggccatggggctgcgcagcggcaacctgcgggacaggtacagcacagcgcgggcgcggggcagcgcggagcctgc

SEQ ID NO: 10936 - DNA, 122 bp, Homo sapiens
accaatggccctgaggaagagaggagggggttcccatggggtcacaggctcttctccacacggctcagagcaggttagaaatgcctcttgggaaccaaccgcagcctgcagcctgacaggag

SEQ ID NO: 10937 - DNA, 122 bp, Homo sapiens
gacaaaggtctggccccctcctgcactcggaacgcggaggacccgcagctcgtggattcgcgcctcagtgcccaagctggtgttgatgggggttgcggtttcctgccactcactccccatgg

SEQ ID NO: 10938 - DNA, 122 bp, Homo sapiens
tcagctatgtgctgtgcaactattggcaagctacttaacctttctgagcttcagtttactcgtttgcaaaaggagattacatgcctcagagttgcagagttaaacaagatgaaaaaatatat

SEQ ID NO: 10939 - DNA, 122 bp, Homo sapiens
ctgaaggtagttcacaacatgatgttttcatggtctcactggagtaggttcacaacacgacggtttcaatggacaaaccccagtacatgggcacttgtgaagtctgtttgtctcatgcttgc

SEQ ID NO: 10940 - DNA, 122 bp, Homo sapiens
gaggaagtacccgggaggcgggagggcgagggttggggaagcggagctgtgtggggtgggcgccagcccggcctcttagagctgccttgtatgtgggaccaaataggacagaatgtgtgcaa

SEQ ID NO: 10941 - DNA, 122 bp, Homo sapiens
taaacaagagctcctttgatttccttcctcctcactttaaaattttcttttgcctttgatcgttctcttatttttctcatcctgtctcaggaatgctctttcttcccaaggctatgccttcc

SEQ ID NO: 10942 - DNA, 122 bp, Homo sapiens
accgtgccaggaatggggtcttctggctggccctgcgagagccgagagctctgtctcctccgcctgctgctccgctttgtcgggcattcctgtgggcggctctccccatcccaggctcccca

SEQ ID NO: 10943 - DNA, 122 bp, Homo sapiens
cgtggcgtgcccgtccccagggctggctggtgccccacgcggggcctgtcatgtgaagctcgtgtcctgactttgtcttaagtgcattcacgcacttactcttggccttatgtacacagcct

SEQ ID NO: 10944 - DNA, 122 bp, Homo sapiens
ctgcctcccaggttcaagcaatccacctgccccagcctccccaataactgggattacaagcgtgcaccaccatgtgcagctagtttttgtatgttttagtagtatgtttttgtatgtttcac

SEQ ID NO: 10945 - DNA, 122 bp, Homo sapiens
gcccgcgttcatctgtgcagcccttcctgctgccctgcgggccccatgcactgcagaccccgctgcctcagacctgtgcctgcgtggctggcacacctgttccctgagtcggagacggcggc

SEQ ID NO: 10946 - DNA, 122 bp, Homo sapiens
cacagggcgtctgcagaattggtgggcagatggacggagggacgggccgtgcagtgcagccggcggggccagggccaggccgagggcgcgaggtggcagccggcccggggaggcggaggctg

SEQ ID NO: 10947 - DNA, 122 bp, Homo sapiens
gccaaggctgctgtgtgctggaggctgaggacactgtgatgggccaggcccagggcctgccgggaagtgcttctggctcagcagggggcaaggccctggctgggcaaaggctgcatggcatg

SEQ ID NO: 10948 - DNA, 122 bp, Homo sapiens
gggtgctctctgctgcttctcatgtgtgccactgtggggactcggccgcccaccccaccccgtggtgttaccttgcgtgtgtagttctgtgagctcagggctatggtctgccagaactaggg

SEQ ID NO: 10949 - DNA, 122 bp, Homo sapiens
caccgcgagcacagaggcggcctggacccacggacgggggctgtgacacagagagggcagcgagagcctgaaggtcacacagcaaaccagagagcacacacccgatgcgcagcacgcttcca

SEQ ID NO: 10950 - DNA, 122 bp, Homo sapiens
cctctggtgggggtgtcgctcctggggtgaccccctgagaaagagaggagcctggcctggcgtgggactcagcagtgaaaccccacaatcctgggccagcaggtcatgcctgtcttcccaaa

SEQ ID NO: 10951 - DNA, 122 bp, Homo sapiens
cctgattgacagttcccacgaacccgccccacgcccctgattggatagggcgtcaggtcccgccccctgagggctgattgacagaagaagcgatcttgcacagctgagtggagccggatgag

SEQ ID NO: 10952 - DNA, 122 bp, Homo sapiens
ggacgggcctccgggtcctggggccccaggagcagtccctcctgggaagtaatccgagcccgggttgccggccactgccgcgccgtcggtctcgttctggctcagtttcctcttgccctctg

SEQ ID NO: 10953 - DNA, 122 bp, Homo sapiens
taccatacacctcccctctccgctcggttccatccttctcccgttctcctctaggcttcacggtttgcaagcacccttgcaaataactcctagcccacccacaccgtctcgtccgcactttc

SEQ ID NO: 10954 - DNA, 122 bp, Homo sapiens
gcccgcgcccatcctggagaactgcatctgcgcaggcccagagtgtcctcctggagcaggcgagccaggatggcgcctcctcgctcccagcaggcgcccccacgcggcccgtgcggagccca

SEQ ID NO: 10955 - DNA, 122 bp, Homo sapiens
ggccctggtggccctggctctcctggctgccccgactctcctttctctccacgttccccgcgtggaccctgcagaacaagcggaggacacagatggcccagggaatcttgaagatcagggat

SEQ ID NO: 10956 - DNA, 122 bp, Homo sapiens
gccggccggccagtagggggctcacaggtagatctcgcgcttggccgtctgggcagatgccggtgtggctgcgggtgggaagtccgaggtctgggtcagggggatttcctccaaggtggccg

SEQ ID NO: 10957 - DNA, 122 bp, Homo sapiens
agacgaggggaaccagaaaactggattcccggctatggtgatagcatgaggtacccgcagcgtcctgggaacccagcccttctcagccggtaaccactgctgctgggacccggtgcgcgata

SEQ ID NO: 10958 - DNA, 122 bp, Homo sapiens
tcccgggcgcccactccgcacgcggagccgccccccgcacccgccgcggcggccgagccccgcccccggcccatcggcacgattcacctcgcccggtcctgaggtcccagggacgcagctgg

SEQ ID NO: 10959 - DNA, 122 bp, Homo sapiens
taggctgtttgtctgactcaccctgttgccaggtcagttgctcaaacatagctgggcaggcgggactcctgggcctcccagattctatccccacccatccctggtgactgagttctagacct

SEQ ID NO: 10960 - DNA, 122 bp, Homo sapiens
agggatgcaattaccacaagaggtatcagacacagggctggcacaaacaagagctatccacggcaccatcatgtaggcatgcagctggtccaccatgaagcaacctggctgctccgcaaaat

SEQ ID NO: 10961 - DNA, 122 bp, Homo sapiens
atcaaaactgctaaggggtcaccaggcatggtgaggggcctcacgggccaaaccctccctcggcctgtccttcaagcctcagcagctctgcggagtgagcgttatcatccccattctacaga

SEQ ID NO: 10962 - DNA, 122 bp, Homo sapiens
gctgtcctctcaggccccctgcgacagctgaagagtgtgcgggggaggggactaggggtccgggcggcgctggtcacaccctcgttgctctcactcagggcccccactcccagcccctcccc

SEQ ID NO: 10963 - DNA, 122 bp, Homo sapiens
tgggcagggctgcccgagagacccaggcggccattgcccgccctgcgtctgcgcctgcgccggagcctcctccacactgcgccagcgccgagtccggccgcctcctcattgcgccggcgccg

SEQ ID NO: 10964 - DNA, 122 bp, Homo sapiens
agagagcagcactcggagagggtgtttgccagtctgagtgtcccgcggtgcccgccaacccgcttcctgactgacctgagcaaggtcttactaagcagtcccatctctgtgggaggcatgca

SEQ ID NO: 10965 - DNA, 122 bp, Homo sapiens
cctccacagcagggtgtgcatctgacagcctgtgctctctctctctctctcctcttgccccgcagtgccaggcttcccgtatccagcagccaccgccgcggccgcctaccgaggggcgcacc

SEQ ID NO: 10966 - DNA, 122 bp, Homo sapiens
gccggcgcctccgggtcctgagcccctcgccgggtccctctccctcctggggctccttcccgttcaggtaggtttcctggacagcccgcaccacctgtccctcctgcaccccgggcagccaa

SEQ ID NO: 10967 - DNA, 122 bp, Homo sapiens
atttgaagctacttttgtgtttctgccacctctcaccttttgcctgtcttgagagcacctcgatcaggtatcagtcactcgttcctgtcactcccctccctgttgtcattagggtcaccaat

SEQ ID NO: 10968 - DNA, 122 bp, Homo sapiens
taaatcaataaatacaaaaacataactgccaaaggttcttccagaaatgcagcagttagtcgtatttctcccacttcacttctaacttgtctttcaatttttgtgtggtttgccttaactaa

SEQ ID NO: 10969 - DNA, 122 bp, Homo sapiens
atgggagaatcctactggtcatccagactcacaactgtgcattaggtccatgctcatcaccgaggctaacccagtccttgattccaatcatgaatggacaaacgttttccagatatttaagg

SEQ ID NO: 10970 - DNA, 122 bp, Homo sapiens
cctttatctgctgtcctgcccctcctcctcccccagcggcatcctctctctagcttctggcgctgcccactgtaacccgactccggcatttgcgtttggggcgccctccctgcgccgggggc

SEQ ID NO: 10971 - DNA, 122 bp, Homo sapiens
ggactcagagggcgttggggcagagggcacagaggacgtcggtgcagaggactcagaggacgtcagggcagagggcacggaggacgttggggcagaggacttggaggacgtcagggcagaag

SEQ ID NO: 10972 - DNA, 122 bp, Homo sapiens
ctcgacccaccagacccctcaaccacacaacccgagacgaattcccgcctcccgccccctcgactcccagcgcccaatagcccagcgagctcgaccaatcacccgccaaggccaggaatcaa

SEQ ID NO: 10973 - DNA, 122 bp, Homo sapiens
accttgcttagacacttagcttctctttttctcgttcattgctggcccctgccgatacagcgtgctgagcaggtaagagtcagcccatttctgattaggtggatttaggaggctgttgcact

SEQ ID NO: 10974 - DNA, 122 bp, Homo sapiens
tgaggggacagtttcatgggcatagtgatgtccttccaggtaatgccatgggtagcacctcgggcaccttgtgtcgggcgtccttttttgagcatttgtccttaagcgattaagaagagagg

SEQ ID NO: 10975 - DNA, 122 bp, Homo sapiens
agcacggagagctccctgcagccccaggcagggagcacgactctctcctcctcttcggggcgcagcttttacaatggggatcagaccatgtcttgaaagaggggctggccgagctgggagcc

SEQ ID NO: 10976 - DNA, 122 bp, Homo sapiens
gtatttcttttgcgtgtgcctgtgtgtgtcaaaattttatatgttcatcagtgctctacacgttcagagaaacgtttccaataacgaaccatagaatgatccctggagcataggatcccact

SEQ ID NO: 10977 - DNA, 122 bp, Homo sapiens
ttttagggaagcctctgcacatctttgattcctattgaattcactattgaactctccattcgtttttaactgtcctatcaaattaagaccacccataaaatagttttggacagttggctttt

SEQ ID NO: 10978 - DNA, 122 bp, Homo sapiens
ctcgcgcaagctttctctgccacgcgttccaacggccgctcaccggcatcgggctgaacacggtgcgcttcacctcggagttcccactccactccaaggatccaacagcgcacaagctgctc

SEQ ID NO: 10979 - DNA, 122 bp, Homo sapiens
ctactataaaagtgcttcaaatttcatgatgatgcaggaaccttaaggaataatattcaccggaagtgcttataattgcatcttttatttttaaaaactacaaaagggcaacagaaagaaag

SEQ ID NO: 10980 - DNA, 122 bp, Homo sapiens
cgccaggcttcggccgctttttgcgacgcttgcgaccggactcagatccccggtcgacgccggcatctgccccggacaagtaacgcttcagatactcggccttggaaagcggcggagctgcc

SEQ ID NO: 10981 - DNA, 122 bp, Homo sapiens
ctgacctcgtgatctgcccgccttggcatcccaaagtcttgggattacaggcgtgagccacggcgcctggccggtacacatattttgaaggctgttaatacatgctgccattttttccccat

SEQ ID NO: 10982 - DNA, 122 bp, Homo sapiens
ttaaatgaatgaaatcaagaagatggagatacagcagacaaccagagggtcactgtcccccgaggacacaggcagacacatgtggatgctcagacactcagcaggtgaggaggtccagagga

SEQ ID NO: 10983 - DNA, 122 bp, Homo sapiens
cctcacccatcggtgcctttatgtggcccctgcactggtccacgtggctgggcgtctttgcggccctgcacctcaccgcgctcttcctcaccgtgtacgagtggcgtagcccctacggcctc

SEQ ID NO: 10984 - DNA, 122 bp, Homo sapiens
cctaaactgagatgggccctccaggcaaggccagcattacctcagtcctcggaaatgcatcgctctgcttgggggaatggccacacgtggctgagccccaggtggtgccaaggacaggagga

SEQ ID NO: 10985 - DNA, 122 bp, Homo sapiens
ggctaaccaatgttgaagacctgaaaacagccacttgggactgcttttatgttcagctgtcggcttagaagcaaatgtctaagagaacctggacacagatcaaacgaatgtgccgggaaccg

SEQ ID NO: 10986 - DNA, 122 bp, Homo sapiens
ggtgccagtgaaggccgggtgcctggtccccccaggaggctggtcttggagcaggtggtccggtgctggtggtggaaggacagcagcttctctgctagtggccacaggcagagcctgccttt

SEQ ID NO: 10987 - DNA, 122 bp, Homo sapiens
cagcccccaaaaccaggcagcagaagaaggcatatcaagctgtcagcttgggctggtctgcgttctatgtgattgttggagtactccacaatgagcaatgcacggccggcagccagaattct

SEQ ID NO: 10988 - DNA, 122 bp, Homo sapiens
acaacctctcctgccgccgccttgcagtgaaagagagagagaaaagccccccgccggaaccggaaatacccgctcgaccatgcaaaatggcgagccccatgatacatttctgctcaagatgg

SEQ ID NO: 10989 - DNA, 122 bp, Homo sapiens
gcctacctgtaaaaccctgaattctatatttgagatttgatcatttgtcacttgaggtaacggttttgggacaagaaagagaacaaagacgcgtgtgactcaggatgcagtctcctggggca

SEQ ID NO: 10990 - DNA, 122 bp, Homo sapiens
acgctcggcgtctcggccatcttagctgtagatagaggcggcaacctcggaagtgcggagcgggtgggcctatatagatgttgaggtgcggaggccgtgggcttttgttgggcctggctgta

SEQ ID NO: 10991 - DNA, 122 bp, Homo sapiens
acccccagggcagcctttctcgggaattttcaagattcctgggggaggggctggcatctgcgccttcactgagcctacaggcaactggaagctttgagtcccctagggcagcgactgccctg

SEQ ID NO: 10992 - DNA, 122 bp, Homo sapiens
caggaagttccaggcctggggtggggcagagtgactcaggctcccacagaggcctgtccacgcaagggccaggaagagcagagaggccccagagccttggggagaggtagttaccaccactg

SEQ ID NO: 10993 - DNA, 122 bp, Homo sapiens
cgctgcgaatcctctgcggaaggggcccgagtgcgtagggggccgaggaaggcttcagggcgaaggagccacctctccgggtgtctgtagtatctgggacccgggtgtccagctccgcactc

SEQ ID NO: 10994 - DNA, 122 bp, Homo sapiens
ctatcacctgggacttactttcccttccatcctgcaatgacttccctgctttgtggatcacgtctcctgctttcttggtttacatctttgttttgatgaagtataatctctggtggcttcct

SEQ ID NO: 10995 - DNA, 122 bp, Homo sapiens
gtagcaattcacacaagcggggaggggacgaaactgctgaatccagcagatagcttgtggcggggtaatcctcggtccggccccatacaggacagaaataaaatcgccatttcagctccggg

SEQ ID NO: 10996 - DNA, 122 bp, Homo sapiens
atcaggcgccgctctcgcgagagctggggcgccgcgagcctcgggcctcgcccacacgcccggcccgccccgcctccagatcatgccccgcccacatgcccgccagtcttcttcctgtctat

SEQ ID NO: 10997 - DNA, 122 bp, Homo sapiens
caggcccggggctctgtccctcccggtcctggggtcccttcccgtcccgcggttccggaacgcctcgccagccctctctgggcgccccctgctgccgggcgccccctgctgccggccgcccc

SEQ ID NO: 10998 - DNA, 122 bp, Homo sapiens
gtggcaaagaagggacagggagcagaagaagagggcctcaaatgcctgactgagcgagtgcgagccacgggtgccaagcagagggaaccccttcagaaaggggagccagggtcagtaccttt

SEQ ID NO: 10999 - DNA, 122 bp, Homo sapiens
tgtgggcactagaagccgattctgaaatgcacttaaaagagtgagcttccaggctgggcacggtggctcatgcctgtaatctcagcactttgggaggccgaggtgggtggatcacctgaggt

SEQ ID NO: 11000 - DNA, 122 bp, Homo sapiens
cagcagcttggaggcctccaaaaaggtctccggggtgttctggcagagctcagccacggccggggacgccgagcctgaggagctgcccaatgccgccgccgccatgcttgagcgccagcggg

SEQ ID NO: 11001 - DNA, 122 bp, Homo sapiens
cctctccaggcaccgccgttcccttcctctcttctggggtaaagtgggacgcgcccgcctcggcagccacctctgggtcgtgggggctgtcacctacctgtcctgtccctggccttcccctg

SEQ ID NO: 11002 - DNA, 122 bp, Homo sapiens
gcggccggggaggcggcggagggaggagggatgcggggaagagacttaactccttccctgcgggaagatggccacctaggccgggccccagccgcagtcccgccctcctgccctccgtgaag

SEQ ID NO: 11003 - DNA, 122 bp, Homo sapiens
tgggagctcccagggcgggggctttctaacagctctgcctagctcgggcctgccctcaaccgcagcatgcagggcagccacagacaacctctctgcaacttctgatgcctccgtgcccccat

SEQ ID NO: 11004 - DNA, 122 bp, Homo sapiens
aactcttcaatgaaaagaaccatctacattgttgtttttttttttccctgagtgtactcccgagtataaatggcacaggatagctagaacttgagcagaaagccccagccttttttggcttg

SEQ ID NO: 11005 - DNA, 122 bp, Homo sapiens
agatggggagagaggctagatgtacttggaacaaaattcaccttgtatttattacctgggcgctggtgttttttgaaaaaagcaaacaagataaccatattagtctgatgctgagactatgc

SEQ ID NO: 11006 - DNA, 122 bp, Homo sapiens
ggcaggaagccaggtagggccctcgtgctcgcacatctcttggcctggcccctgccggggcgctcccaggcagtcccctggtcaccttggagccctggaagggaaggtcaccccctcctcct

SEQ ID NO: 11007 - DNA, 122 bp, Homo sapiens
taactggggctcctggaacggcaagagccaagaggggacgtatttaaggaccctgcttcccgtccattgagcccttggagttcctgcccaggaagtttgcgtgacaagaaaaaaaaatattc

SEQ ID NO: 11008 - DNA, 122 bp, Homo sapiens
agtgcgtgcgtgcgtgcgttcggcgcgcggggcgtgggcgcggcacctgggcccgggcaccgccacctaggccctagctccgaccagtggtgttctataaacgcttattacatcattgtgca

SEQ ID NO: 11009 - DNA, 122 bp, Homo sapiens
ggaaatctttcctgaaggaggagttaagttttttgtgttagctgtttctctttagaaaaacgctctggagaagtggtagctttggttgattgtgatcacccagtgttctttgactctttagg

SEQ ID NO: 11010 - DNA, 122 bp, Homo sapiens
aggcacagagtgacttttcttaaactcttatattcctcctattttatcttcctggttccccgaaagaagcatgttgtgaagtatttgtgtcatacacctgtgtcagtcattgtaaactgagc

SEQ ID NO: 11011 - DNA, 122 bp, Homo sapiens
ttgaactcggtaaaagtctttctgtttatgctcaatgaacattgaaccaaaatgagcacccgtgccagtttaaaagcaggtagaaattgtttgtatataagcaccttgacagttgtgagtgg

SEQ ID NO: 11012 - DNA, 122 bp, Homo sapiens
attgttctgattcactgaactaagcgaacacgccggggcactctccggcgcacccccgcccgccagcgcctagtccagccctcccgtcccagggccccgcagcacgctgggaattgtagttc

SEQ ID NO: 11013 - DNA, 122 bp, Homo sapiens
gagaaccttgggaggggaggtgacctcactgacgagggcaagggaggagggtgaatcacacgctggagttttccaccaagtacctgccctctgtggcttctaggcaaggccctggaccttca

SEQ ID NO: 11014 - DNA, 122 bp, Homo sapiens
cacggtgaatttatcaggtgcatcatgtgatatcagttagacctgtcttcccggctaaaccgtgagtttcatctttgtattcccagtgcctggtggtatacctgactctgagtagggttgat

SEQ ID NO: 11015 - DNA, 122 bp, Homo sapiens
aatagaatcgcggggtaggtggggtcgtctggaggtagctggctccgcccggcccgcgggcgagtccggaatacagttacccacctcagttgcccaccggaaagcaaagggagaggaacccg

SEQ ID NO: 11016 - DNA, 122 bp, Homo sapiens
actatctaataaataattgtttcaactcaccttttttctcttcggccatttccagtgtcccggaaaccttttgcaaaagggttgttgtctatttttaactgggttatctattggaagagaca

SEQ ID NO: 11017 - DNA, 122 bp, Homo sapiens
ctgctacaggcaatctcccctcccccacgctgtcaatgatttgtgggattcttaggcaggcggggcaggccgagcccagggaatgcacgctgagtcctagacacagagccaggccgggtgga

SEQ ID NO: 11018 - DNA, 122 bp, Homo sapiens
gtttaatatgcaaacacctctgagctactttaaaacaaacatgactaacccagaaataaacgtatccaggaaaggagaaaaacctgttaaaacacggtttctcaggtctcacatccaatgtg

SEQ ID NO: 11019 - DNA, 122 bp, Homo sapiens
gtcccaaaggtcccagctggtcctctgaagacccgggatcacaactccacatcgtcacctcggggtcccaaaggtcccagctgatcctctgaagacccgggatcacaactccacatcgtcac

SEQ ID NO: 11020 - DNA, 122 bp, Homo sapiens
agcttgggcaacagagggcgactctgtctcaaaaaacaaagcaaaacgaaagaaacaggacgtcctgtttctgtgtttagtatagtatctgtgttagtatccactcttgctgtgcccccgct

SEQ ID NO: 11021 - DNA, 122 bp, Homo sapiens
agcttcacagccccaccccagacctactaaatcagattgggattcagcagtgattgggcccgggaatctgtgttttgacaagatccctaggtgacttgtaagtgcattaaagtttgagaagt

SEQ ID NO: 11022 - DNA, 122 bp, Homo sapiens
caggcaagaccttcactctcacgttcagattctgtcctgtcagggagtccgcttggcctccgcgaagagctgggaaaagcgagcctcccacccccactctcaagtagtaaaatcaaagcgga

SEQ ID NO: 11023 - DNA, 122 bp, Homo sapiens
tccttccaggcgagcacgacctcagcgagcacgacggggatgagcagagccggcgggtggcgcaggtcatcatccccagcacgtacgtcccgggcaccaccaaccacgacatcgcgctgctc

SEQ ID NO: 11024 - DNA, 122 bp, Homo sapiens
ataaattattaggagcagaagttttctttttagattttttttttggcaggggacggggggcgggggggtgtccagtaaactgtacccttctgggttagaccagaacttctaagtagttgtgg

SEQ ID NO: 11025 - DNA, 122 bp, Homo sapiens
ctgccttctctaaaaaggctgttaaccaactgcatgcaagtgcagcaatcaggaagcccacggtagaatccaagaccctggtgacttcgtcccaatctcatttaacgcctcaacagcagtaa

SEQ ID NO: 11026 - DNA, 122 bp, Homo sapiens
ccaggacccacagaggccgctgacctgcctcaaagactccctgggacaggagggaggagacgagggctcgccaggggcagccagcagctcacccgagccagctcttcctcgtccgcctccga

SEQ ID NO: 11027 - DNA, 122 bp, Homo sapiens
ggggaggaagggtgaaaaacaacaaacaaaagaacaatcctggaaaatatacataggccacgttattctgaagtccatacatcagtaggcaggtatgaaagtggcttatgcgtgtaaatagg

SEQ ID NO: 11028 - DNA, 122 bp, Homo sapiens
gcacctttgggggtgccagggagatctgtttctgcctgattcacaatcaacccacaggcacgaaatcacaagggctgaaatgtgagcaactagggggaagccaggagacttcgtttccagag

SEQ ID NO: 11029 - DNA, 122 bp, Homo sapiens
tgagctgtcttattaattatgaaaggattcacctgatccctgccagggaacacagcctctcggcccctctgctggagcccttaatggcggttccttcgcaagctgcctctggccaccgcaca

SEQ ID NO: 11030 - DNA, 122 bp, Homo sapiens
agtttcaaggggtggggttctgtcagactgtgatactgccttccttacagacagctgaaacggaaagttaagttgccaggagacctgcagctccctgggagcttgttgtatctctgtgtttg

SEQ ID NO: 11031 - DNA, 122 bp, Homo sapiens
ggacaccctggttcacagcactggcaaagccgggttcccggggcgtctttctgctgcggtcgcctccgaggaagaggagaaggaaggtagcggcgccctccacaccaacttagggacttgtt

SEQ ID NO: 11032 - DNA, 122 bp, Homo sapiens
agctgtgacttaaatgtcatcaaggagactccagcaggagtccagaggccacagtgagggcgggcgcacggcaggcagggagagagagaggagggcaggacctgggtgaggagggaaccaga

SEQ ID NO: 11033 - DNA, 122 bp, Homo sapiens
tcagcaattccacttctgggtatagccccaaaagaattgaaagcaggttgttgggccgggcgcagtggctcatgcctgtaatcccagcactttgggaggccggggcgggcggatcacctgag

SEQ ID NO: 11034 - DNA, 122 bp, Homo sapiens
tacacaccacagttagaaagcccaagaccctgaaaagacctgcacccacccccaaaggggcggggctggtgggcggagaggaggcggggcgcgctccttcagccccgcccaccagccctgga

SEQ ID NO: 11035 - DNA, 122 bp, Homo sapiens
ccctgtccaataatagtagccgctagtcacataaatccatagagcattgaaaatgcaaaccgtccaacttgaggtgcgttcttaagtgtaaaacacacacaggatttcaaagacgtactgtg

SEQ ID NO: 11036 - DNA, 122 bp, Homo sapiens
gatgaggtgaggagagggctgcaaggcggcggcctggaccacgggcggctgcagcgggggcgggggtcggcgcgggggtctgcgcgatggctgcccggggcatccgtcccgcgcccggcgct

SEQ ID NO: 11037 - DNA, 122 bp, Homo sapiens
tataatttaactaattttttttcctcgctagctataacaaaatacatctttgcacatcaacgtacttctgtatctattgccaccttcagtggtcacatattattccatcctatggatgcaac

SEQ ID NO: 11038 - DNA, 122 bp, Homo sapiens
gtcagctttccttactcatcaagcacccctgagtgtgcagagagagtgccaaggcagcctcgccagctgcaagtcacgtgagttcgcggctgccaaatggcagtgcagaggagcacgcagca

SEQ ID NO: 11039 - DNA, 122 bp, Homo sapiens
tttgatgaccaagttgattggcctggagagagataggggaactaggtgtaagtgtcacgacggatcgtcaggctagctcacccacatgctggaaacacaaggcaatgcctgcttcccctcag

SEQ ID NO: 11040 - DNA, 122 bp, Homo sapiens
gttccatggcgcctgagggaaaccggctgtctctcgggggtttcgggctggttgggtcctcgtgggtccgagctcctcagaaaagctgggaggcggggtgggcacagcgctccccaggcatt

SEQ ID NO: 11041 - DNA, 122 bp, Homo sapiens
tcccgggacggcagcaggtgggctgcacacggactctgggacaagtcgagctgaaaaccgcggagctaggggtggggtggagacgcccgcgacgccaaggctggggtcccggaacacgctgg

SEQ ID NO: 11042 - DNA, 122 bp, Homo sapiens
gctttcacaaaagaaaaactgttcaaaactttaaagtattaccactgcaactaggaggaacgccacaaaactatatttctggttcattttttttaatgaagaatcgcacctttttttttttt

SEQ ID NO: 11043 - DNA, 122 bp, Homo sapiens
tgggcactgaccccaacaacaggcctgggcacaggtccagcacttaactcagagggatgccgtgtgctgctgcatggtctgttaccaacatctcatagaagagagcagaaaccacttaggaa

SEQ ID NO: 11044 - DNA, 122 bp, Homo sapiens
aactcctgagctcaagcgatcctcctgcctcggcctcccagagtgctgagatcacaggtgcgagcctctgcacccgacctgtttcctcatctggaaaatggcagggaaacgttctgccagct

SEQ ID NO: 11045 - DNA, 122 bp, Homo sapiens
aataataccaactctttcaccaacaatataattttaccaaaaaagtttcagggccgcacacgatggctcatgcctgtagtttcagcagtttgggaggctgaggcaggcagatcgcttcagcc

SEQ ID NO: 11046 - DNA, 122 bp, Homo sapiens
gagcgtcagaggctgcggatgagcagacttggaggactccaggccagagactaggctgggcgaagagtcgagcgtgaagggggctccgggccagggtgacaggaggcgtgcttgagaggaag

SEQ ID NO: 11047 - DNA, 122 bp, Homo sapiens
ccttccttctatgacttatctcagaatgacgttacaattgttattgtgtttgagtgccgacgctgaggcattggctagaaacttctataattaggtgttttctgacactagacaaaattatt

SEQ ID NO: 11048 - DNA, 122 bp, Homo sapiens
ctccacccatccccgcttcatgaaggagactgcagaagtccagagggcagtgcaagtgcacgtgaaaaaatcgatgtgtgcaagagagtgtgagcccgagtgtgactaggggtgtgcttttg

SEQ ID NO: 11049 - DNA, 122 bp, Homo sapiens
tgggggccggacgcagtggctcatgcctgtaatcccagcactttgggaggctgacgtggacggatggcttgagcccagaaggaggctgcagtaagctaggatcacattactgtactccagcc

SEQ ID NO: 11050 - DNA, 122 bp, Homo sapiens
gggggccctgagactgagtggtccctatcccacttctctctggggcggcgctgtagccagcggctgacaggcgcagcgaaaggcagccctctgctgtaaggaggaaaactgaggcctgggag

SEQ ID NO: 11051 - DNA, 122 bp, Homo sapiens
gtaggccacgctccgggggcggggctccagtgaggatactgcatcccatggtgccttgcgcgccagcgcagccattggtccggctactctgtctctttttcaaattgaggcgccgagtcgtt

SEQ ID NO: 11052 - DNA, 122 bp, Homo sapiens
cgctcccgagaggggcaatgaattgcctgagtaatgcggcagggcagttaaagaagtcctcgggctcccgagtcagtgctcttctttacccttggctgacttcccagttagatttagtatct

SEQ ID NO: 11053 - DNA, 122 bp, Homo sapiens
aggtggtcagttactcaccttcctagttgaagaccatgttccaggtgtttggtcagttttcgttttagtccatttccagcatttccagtcctcaaagcccttggcccgggtggtgggtgctg

SEQ ID NO: 11054 - DNA, 122 bp, Homo sapiens
cgagaaatcaggcatggggcaagaacacaaaaacaagcgggggaagaacaagatacagggcggaaagtgggaatcactagctgatttctccctgggacctagcggctgtgtcggagcaagtc

SEQ ID NO: 11055 - DNA, 122 bp, Homo sapiens
aatatccaaactggcatgcaccactgataagccaaagatactggcaaagcttgtctgcctcgctttcagtgttaaagcctcattgcttctactgggaaaactaataacataacaaatgcaac

SEQ ID NO: 11056 - DNA, 122 bp, Homo sapiens
ggtggcccggcgtgcctggaaggccggggtgccccgggcagaggctggggatcttgttgtcgtccagtgggggcgagccggccgccaggcccaggagcagcaggacgaggagtggcctcata

SEQ ID NO: 11057 - DNA, 122 bp, Homo sapiens
ccgcgactcccgctgcctcggccccacccgggacccaatgccgcggtcacgcccccggcgcgccccactgccaatcgcagccgtctccggccccctgggccacgcccccaagcccctctcct

SEQ ID NO: 11058 - DNA, 122 bp, Homo sapiens
gccgctgggcccacccagtcccatccaaccagagcaacgggctgggagtcctcccggacacgccatggggcaagtcagacctggagtgttcccagggaacacggccagccttgcctcatgga

SEQ ID NO: 11059 - DNA, 122 bp, Homo sapiens
gacttgatgtttatgttatttcctttttaaaatgacctttaaaaagttataaattagaaacgtggaaagtagaatggtttcatgcaagaaatactggaataagatccctgttctggccccaa

SEQ ID NO: 11060 - DNA, 122 bp, Homo sapiens
aacctggatcacatgtggaaagggatttggactaatgtgtttcctaagctcaggcacccacggaggttgcagaaactgacacctcatagttcctaaaagggattttgtggaaagtagagtga

SEQ ID NO: 11061 - DNA, 122 bp, Homo sapiens
cacccgcatacggggggcacgtggacactgcccccgccccgccatcatcttgcatgaaaacgtcaggaacaatgacaaacaacttaggtgtccagcaaccaaagaaatgaagaaaaaaaaaa

SEQ ID NO: 11062 - DNA, 122 bp, Homo sapiens
gagcctgactttcagggccctggcacgcggtgctgacgcgcatgcttcggaaggcagccccgagctcccccagaggtggccttagggcactcgcaaaaacaataatcaacgcgtaaatgaca

SEQ ID NO: 11063 - DNA, 122 bp, Homo sapiens
ctcacacggcagagcctcctcagagttgcggctgcggatgcaatgacttagccaggttaacgccgatcccatgttttccgaaacctggcacctaagcatctaacatggaaggccgactccct

SEQ ID NO: 11064 - DNA, 122 bp, Homo sapiens
cttccatgttgtgctggtcactacccaccaagggggttcagacgcaggcacgatgcaggacggttgtctctgaacctgcgtcttggttatcatggagctggactgggcctggtgacagggcc

SEQ ID NO: 11065 - DNA, 122 bp, Homo sapiens
aatcccacctagagagaaagtccggctgtggttggcacctggcggcccacctaggagggacggtggacctggaggccacagagccgaggcccaccgtcctgaccagccaggaggcatgggca

SEQ ID NO: 11066 - DNA, 122 bp, Homo sapiens
ggggagtccacaagctgtaaatctaacatgcagccagccgtgcggcttctggccgccccacgtctgagtaaagccttcactgtgactagcagggagaggagactgactggagccagagaatg

SEQ ID NO: 11067 - DNA, 122 bp, Homo sapiens
tctcttctcccccctcccatctccaaagccgtgagcagaagtgtgtgaagtgcaaggaagcgcagcccgttgtggtgatacgagccggagatgccttctgcaggtgaggcctggaggtggct

SEQ ID NO: 11068 - DNA, 122 bp, Homo sapiens
agatggcagctcagagctaggatggctctctggacctgtctctcctaccagaggtccccccgtctggtgtggctcttcctggacctggcatcctctgctttttttttttttccacctccaag

SEQ ID NO: 11069 - DNA, 122 bp, Homo sapiens
cacgtggccggctgctgcctctttgtggctcccgcgagagtccgccttccgccgcagttgcgacccggcagcttgcggttagccgttctttccgcccagttctttacttccaattaattagc

SEQ ID NO: 11070 - DNA, 122 bp, Homo sapiens
cactgcccctcctctcagcccctggaaaccccagttctacctctgtgtctctgaatttgacgactctgggtccttcctctgagtggaatcatgcacttgtgactggcttagcataacgtcct

SEQ ID NO: 11071 - DNA, 122 bp, Homo sapiens
cctgacccagcagccactattcaaaacttcattttcttgttcagcttctctgtcttttgccgactgctatggtctgaatgtttgtgtccctccaaaattcatatgttgaaatctaatcccca

SEQ ID NO: 11072 - DNA, 122 bp, Homo sapiens
agaacagagcaggaagtaaacgagttgtttgtttatcattcgctttctggtaggatgttccgggggatatgctttgaagatgcagggagctaacaatagacagaactaatctcaaattcctt

SEQ ID NO: 11073 - DNA, 122 bp, Homo sapiens
cattttgggggaggtcacggggacgtcctggcctctggatgccggaaggggtctcgctgacgtcagggcctcaggattcccgcgggtgggaggtcctgggaaagttgtggccgcgaggtact

SEQ ID NO: 11074 - DNA, 122 bp, Homo sapiens
tgcctaagaactacaattcggagttgctgcctagtgaagttgagggggtcggtggagccccgctgggaggccaagggctcaatctgttgagcccttctatgatgctacatatttcatcgtat

SEQ ID NO: 11075 - DNA, 122 bp, Homo sapiens
attccgcgggaagggccctgggacctcacacttctagtcgcgggagctgcaggtcttacccggagagacgctgcacgtggagccctcgccgctgccgttctcagccggctctggagtgcggg

SEQ ID NO: 11076 - DNA, 122 bp, Homo sapiens
tgattatggaataatgaatgcgacaattcctggggcgtggtggcttacgcctgtaatctgcgtggatcataggatgtcccataaaataaagcttttcattatcacatgatcctgggcatgaa

SEQ ID NO: 11077 - DNA, 122 bp, Homo sapiens
acacgagatgggaggaaatgagccgaggtcgtctacgaagactgaagagcgtgccggctgcggctgggatacacggctcctgcaacagtgtccacaggtgtttccgggagtgggattctcca

SEQ ID NO: 11078 - DNA, 122 bp, Homo sapiens
gttcagagatcacatctgtcagccgatgcttcttgccttaaggtcctgcacggcgatgaccgctcatttaggaaggaattcatggcctgtggataccttagctctgagtcctgccacctagg

SEQ ID NO: 11079 - DNA, 122 bp, Homo sapiens
cacgtgacccggtgcagcgcgcgcccgggacgctacccagccgagcatcccgcaccgccccggccccggccccggccgaaaccctgctcttcgggccctacaacccgacttctttagaagcc

SEQ ID NO: 11080 - DNA, 122 bp, Homo sapiens
gtcccctacacgcacctggcgtccaggccccaagtcacccccaaggcggcccgcgggaggcgctgggcccctccctgggggcctcgctgcaagggctgctgcaggatcattgggttttgggg

SEQ ID NO: 11081 - DNA, 122 bp, Homo sapiens
acccagccaggctacacccaccctctacagctgcagctcagctggctctcccacctgggacgcacccagaacacccccagctcaggtgcctctgcacacctgcctgacacctgtgctgtcca

SEQ ID NO: 11082 - DNA, 122 bp, Homo sapiens
taattaattcatctatcatttaaaaattagacacgtgaatgccagccgttctcataaacccgagataaccagagttgaagttgcaggcacttagtatcaatccagcaaaagcaaaggaagtt

SEQ ID NO: 11083 - DNA, 122 bp, Homo sapiens
ttttcttccattcaacaaatcacttgttgaatgcttactaggggccaggcattcacagaacgacttatccttattctccagcttcagaccatcagtgctgctttaatggcaagggaacaaag

SEQ ID NO: 11084 - DNA, 122 bp, Homo sapiens
ataaggcagtagttaagaagtaggaagaagtaaaggcagctaccccagagaagctaaggtcgggagaggtggaggctcccactgcacccccctggcccataccataggggaggtttccccca

SEQ ID NO: 11085 - DNA, 122 bp, Homo sapiens
agccgggtcatcagctccgatgccgagaagcgcctccgctcaggaccttcgaggctcactcgggtggacccagacaactccaccctgggctcctctgtgctcagggcctgctcttgcactac

SEQ ID NO: 11086 - DNA, 122 bp, Homo sapiens
aagacaaagccttcagctgcccttcaaacctgagtgctgctcctaaacctgtcccccatacgcattaggcagcttccaaaggggccaaaccttggaccatcccctggagcctcagccgcctc

SEQ ID NO: 11087 - DNA, 122 bp, Homo sapiens
taaaagaaccagtggcctctgtgcagctgcctaaggccacaccacagaggggctctccaacggaacaaggctcagggaatgcctgtgcctgtagccagacccctctgcccatcccccaggct

SEQ ID NO: 11088 - DNA, 122 bp, Homo sapiens
ttggctgattccaaatctcgcgaggctgtggtccgggtgccgtggcaaccgcacctgtttcgccccgcccctcgtagggaggctcgcgaaagtgctgcggttaggaaggcgaggagcgggcg

SEQ ID NO: 11089 - DNA, 122 bp, Homo sapiens
gtttccactgtgcaaatactaagaagcgcctgcgcctggctctgttctaggcactagagccgaggatctgaaatctacggattcctgtacatgtgatggctgcataggcttcagaagggaag

SEQ ID NO: 11090 - DNA, 122 bp, Homo sapiens
ctttttcatctgggacctcggaaactgtggtgacccataggtgctgggcttcttggctctcgtcctgagaaagtgctcacagtgctttgcagtagccgaggagggtgtttagaatcatatat

SEQ ID NO: 11091 - DNA, 122 bp, Homo sapiens
agggaatgagatgcccataaaggggattgaaaagccttaatatactccagaaagttccgacggccacatgcatgcatagatgtgggcatgacaagtgctgcatatatgctttgaacagacct

SEQ ID NO: 11092 - DNA, 122 bp, Homo sapiens
gtgtggccgtgggccggttccaccctccacgctgttttcccgagtgtgtatgaagagggtcggttggccccgctctcaggctggtgacccgacacaaacttccaggatgaagtcctgaaggg

SEQ ID NO: 11093 - DNA, 122 bp, Homo sapiens
ttcctgatcctcagttcagaagtttatcaatgaagaccgactgccacacttgcttctctacggtcccccagggacaggcaagacatctaccatcctagcctgtgcgaaacagctatataaag

SEQ ID NO: 11094 - DNA, 122 bp, Homo sapiens
cgggaaacggctcagagaaaaccaccgccaccagacggccacctacaggccgacgggaaacggctcagagaaaaccaacgccaccagacggccacctacaggccagagaaaaggcctcaaaa

SEQ ID NO: 11095 - DNA, 122 bp, Homo sapiens
aggaagggctggacttgcccatggaccaccaacgatccacagcctgggttctataggccgcggctgccatcagacatatgggagacaactggtccaaaaattttgaccactgaacatggcag

SEQ ID NO: 11096 - DNA, 122 bp, Homo sapiens
ttccgccgcgtcggaactcgctccgggcgtggattggcggcttgctggcgggggcggaaccggaagttccgtgttgtggggctcagctggttcatttatgttgtttttcctgtacctaagtt

SEQ ID NO: 11097 - DNA, 122 bp, Homo sapiens
tttggaagaggggagagtgtccctttttaagacgtcccctagagtggggtggtcattcttcgggtctgagctaacttgtttttctcgaatgttgccccttgggggaaattgcttccccagtg

SEQ ID NO: 11098 - DNA, 122 bp, Homo sapiens
agcataacatgctatactctaaagaaatcagaaacattactttctgattgcatattacaccggaaagaagaaaaagactgtcaccatagacatcagcccttctgatttaaaaatgaaaaatt

SEQ ID NO: 11099 - DNA, 122 bp, Homo sapiens
tcggaccgaacgaagcggttcgggacgcgggtctgtccgtgactccgccgttcccggcctcggcttcctgctgcctacaccgccctagcccaggcccccttagtgagcgcttggggagagaa

SEQ ID NO: 11100 - DNA, 122 bp, Homo sapiens
ccccggctgggagtgggatcgctgagaacagctcgctcccgaagaaggagcaacccagcgcgcaggcctccgagacgtggaaacgcaacaattaccgtcaagacaaatccacacccgctctc

SEQ ID NO: 11101 - DNA, 122 bp, Homo sapiens
tccccaccccagaccccgtcgctgcagctgggtgagcagggctgagtgagctcagggaatcggagctcggcgagacgaggggagctcttggccgtgtgaagagcacttggaggcctcctgct

SEQ ID NO: 11102 - DNA, 122 bp, Homo sapiens
tggcccctctccccatgcaaagcagacccccgaagaagccatgccaggctgagggacagacgccggggctcgaagctccgggcagattcagaaagaggcgtcgctgcagaaaggacgcatca

SEQ ID NO: 11103 - DNA, 122 bp, Homo sapiens
agggggggctgttggaacttggcggggctggaccagcccggccgtgggaggtgcgggccgcggcggctgcagcggcggggtggctgcgctgagcaaacagcggccccttccggccgcaccgc

SEQ ID NO: 11104 - DNA, 122 bp, Homo sapiens
gaattggggttttcagctactcaggaaccgcagataatccctgacagcttccctggcggacgatccggtctcggctcccagaccggaataccacctacttcgtcttccctaacgtaagacgc

SEQ ID NO: 11105 - DNA, 122 bp, Homo sapiens
tggggagggccatttccagcctcattctgggctgcaggccaggggtaaagggcctccacacggggtaccgggggtgggggagagtgcctctgaccacaagtaggccgcctgcctgcacaacc

SEQ ID NO: 11106 - DNA, 122 bp, Homo sapiens
ctcccgtgagctgcacgtggacccctgtgtgaagcgtagcagggcacagagcaggcgagacgtttgcatctcacagcgggagggccggcgacatcacatgaagtgacaggcaggcccttgga

SEQ ID NO: 11107 - DNA, 122 bp, Homo sapiens
gcagtgggcgggaggctcagagtgactgacagctctcagaggcaatagctgcgagctgcccgtgctgggcgggcaaatgaaggagatctgagaaggcaggaggcccaatgaaacgcgagtgc

SEQ ID NO: 11108 - DNA, 122 bp, Homo sapiens
ctcgcgccccatgaccctctcctaaaacacgcgcagtctcctctctcttccccttcctctcgtgtcttccttgcctaccagcctcacctgatgggctcgtgttctctccgtccccgatccac

SEQ ID NO: 11109 - DNA, 122 bp, Homo sapiens
ctatggtttgcagacaccggcaaaggaaagagatattgctgacccatgaacaggagggcacgcacatcccaggggagaaagctgctgaaaagctgtttttcaagttagttttctgaagctca

SEQ ID NO: 11110 - DNA, 122 bp, Homo sapiens
cggcaggtgagacaggaggtggccggtgcggcgccgccaggccgggccgggtcggggggccgggagccatcaagtctgcacgtccgcagcctggccgctcggcttcagcaggaagcaccgaa

SEQ ID NO: 11111 - DNA, 122 bp, Homo sapiens
accaagcctcgcctggcgcggggtcgaggggctcggcggaggcgcgtgttcaggtggaggcggtgggcccgggctgcggcccttcgctcgattttatttatttatttatttatttatttatt

SEQ ID NO: 11112 - DNA, 122 bp, Homo sapiens
tactcaaaggggcttatcaggccagtggtgagggagtgtggtctgtacaaccacaggaagcgggttggcctgttggagcatgagctctttttttgctttgtagatcttggtatttgttcttc

SEQ ID NO: 11113 - DNA, 122 bp, Homo sapiens
tgccgtcactggggttgtaagcctccaggtagctgagcgactgtcggaagtagccgcccgcggtgtagatcaggcggcccaccttgggcgcccggcagggcatcacctgcgtgggcttgtgc

SEQ ID NO: 11114 - DNA, 122 bp, Homo sapiens
ctgaggccagggccttctcgttcttcaaccacgacacctccggaggcgggtctccccacacgttgcaagtgagattaagggcctgcaagacaggttttatgggagagaagaagataaattag

SEQ ID NO: 11115 - DNA, 122 bp, Homo sapiens
gaaatgtaaggttgccaatgaaatctaaaagcaaacaaacaatttgtcctactcacctgccggttctgaatctttatcctcaccagccagcttctggctgtccatccctctctccgactggg

SEQ ID NO: 11116 - DNA, 122 bp, Homo sapiens
ccggccgcgcggagccgggatgcactgttcctgctgtgggtcctcatcatggagaccaaacgggtggagattcccggcagcgtcctggacgatttctgcaggtaccgcgctacccgaccccc

SEQ ID NO: 11117 - DNA, 122 bp, Homo sapiens
acggaccccaggggctgagaagctgttgttcaggtcgacggccacacggtggcgatgttgcgccgttccagggcgtgggcgctcacgggtggggcggggtgtccggggccgtctgttgttgg

SEQ ID NO: 11118 - DNA, 122 bp, Homo sapiens
aagccttaagggagggaggtgaagggggctgcaggtgaagaaactaaaatggagtctgtccggcgctctctctgctacgagaaggtcacttaggttaaaacaaggttgggtatcacactggg

SEQ ID NO: 11119 - DNA, 122 bp, Homo sapiens
cccaatagctccccgggagcaggtggagaagcggagctcctgcgctcgaattctgaataccgtcccctaaaataatgacagcaactcaaccaggtgcagaggcagggagatttcatacagaa

SEQ ID NO: 11120 - DNA, 122 bp, Homo sapiens
cagcccagcgtctatttgcgcttaagagccagcaaggaagctccaggggccccagctggccgtgctcccccgggatgcaagtccctgcgctgacgcccggcagcggctggcacgggcgcggc

SEQ ID NO: 11121 - DNA, 122 bp, Homo sapiens
ttcttccaaagaggaagaaggaggagcaagctgaggatgtggcctaatgagctcaccactcgcattagtgcaggtgagaaggccatgtgaccatggagcagagactgaagtgtcacagctgc

SEQ ID NO: 11122 - DNA, 122 bp, Homo sapiens
tgagcacccgtttccggagccaatggacacgcaggaggcgccgacagccgaggagacctccgcctgctgtgccccgcgccccgccaaagtcagccgcaaacgacgcagcagcagcctgagcg

SEQ ID NO: 11123 - DNA, 122 bp, Homo sapiens
caccgtagtaacacataaagtaaatgctacctctgatcaaagcaccttgaatggaaggtccgagtctttttagtgttttgcaagggaatgaatccattattctattttagacttttaacttc

SEQ ID NO: 11124 - DNA, 122 bp, Homo sapiens
aagtgccacagggtgccagcgaggaggggctctttgtggggttgggacagtcctggctgacgccggcctctgctctgtaaatcatccctgtgggacaccccctccccctgcctgccacctct

SEQ ID NO: 11125 - DNA, 122 bp, Homo sapiens
ggtactggggtcgcggtgggagtcttagcagaaccgcggtggagcctactacccgagggacggggtagggggcgcggctgaggcaggtcggggtgtgaggggtgggaggcgcggctgaagtg

SEQ ID NO: 11126 - DNA, 122 bp, Homo sapiens
gagaaacaagagagagatatacgtacacacacaaacgcacaaagacatacagcagtggcacggtaacacctacccccaggtagcccctgaattttcagggttctgctctccacgactacaac

SEQ ID NO: 11127 - DNA, 122 bp, Homo sapiens
tcacccagcacatgcccaccttgaggacttcacagtgctctttcatctgcctaacagattcgtgcacagttccagcctcacttcatttccctgctctgtcatccaggctggagtgtagtggc

SEQ ID NO: 11128 - DNA, 122 bp, Homo sapiens
atagttgattctgctcacagggcggcttgactgaaagcttgcagaacttactgctcaaaccggggatactcctgccttctgcctcttgcctctgcttccctcttccttttcctcttcctact

SEQ ID NO: 11129 - DNA, 122 bp, Homo sapiens
ttggggactttccagccggcctttactctccatggaaagcggtctttccacaaacctccacggtgggaattactgcaaaggcatcggctctcccggcctagaatatctcgcgggatctcagc

SEQ ID NO: 11130 - DNA, 122 bp, Homo sapiens
tccccaccgaggtgactaaaatcccagtgatgctgattatttggatttcctgggcagggccgggcacccgccgctggtggggctttggatgcaacaataattagtattttgacgatgcgatt

SEQ ID NO: 11131 - DNA, 122 bp, Homo sapiens
catggggagggcccaggcgctttggcaagctctgcccagaaggcctggaggtcattagtgcgccagggggtcccggggcacccagcggagcaggtggtgggaaatgtggtggctggcttaac

SEQ ID NO: 11132 - DNA, 122 bp, Homo sapiens
ccgttgaccagcaaatatttcaagacgatccaggctttgaccctccccacactcacgccccgccctaggcctagccaccgccacccggcctcggtcactgcagcagcgtcccacccacctcc

SEQ ID NO: 11133 - DNA, 122 bp, Homo sapiens
atatgttgtgcggtgtttctgaaagcgaggtccacggatgacctaacatttgtattgccacgggactgtgaaaatcgactctagacgtactaaataggagtctttaaggggggagcagggcc

SEQ ID NO: 11134 - DNA, 122 bp, Homo sapiens
tttactttctcccagaacaacagttgtgatatgatctgttttggggcccttcctgcgctccgccctgggccagagtatgtaaagctcgtgggtctctgtgtgtgtctgagcagctgctctgc

SEQ ID NO: 11135 - DNA, 122 bp, Homo sapiens
aaggcggaaggggaagtgggcaccattagggttcattgcttagagtgagtcacgtggccacgtctggcttccaagaggcagtgcagacaaccctgtgatggaagtgggcgggctgggacctg

SEQ ID NO: 11136 - DNA, 122 bp, Homo sapiens
ttattacatgttatcactttacttgatgccgtgccgtactttacacgagaaccagcttcccgttggggactttacagagctttcggcagggacagtaatgggggcggcccctgggaagctgt

SEQ ID NO: 11137 - DNA, 122 bp, Homo sapiens
gccttacctatccttctagaagttttcctggtccatacaaacagcacagccatccactcacgtttatttctttcttttttttgagacggagtctctgttgcccaggctggagtgcagtgctg

SEQ ID NO: 11138 - DNA, 122 bp, Homo sapiens
ctctctcatctcagggtcgcagaagggcaagacgccgctcaatggttgccaagggcaacgcgggacgccggctagcgaggccttttgttctctgggctggggctcgccggctccagccttag

SEQ ID NO: 11139 - DNA, 122 bp, Homo sapiens
taagagctgtaacactcaccgtgaaggtctgtggcttcactgctgaagtcagtgagaccacgaacccagtgggaggaatgaacaactcccgacgggctacctttaagagctgtaacacttgc

SEQ ID NO: 11140 - DNA, 122 bp, Homo sapiens
acgccggcacaccagcaggccactgaccggcagaaggacgcagagtttggccagggcgatcggagaagagtccggccagccagtggacgactccagaggaaaaccatctcctttccggctcc

SEQ ID NO: 11141 - DNA, 122 bp, Homo sapiens
agacgacttcgggttccttatctttgctgtcagccacgaaccgatggtgctgcgggagcgcgcgagagggagtcaatggcatgcacgctccagggcccgccccgccctgctcccttaggcag

SEQ ID NO: 11142 - DNA, 122 bp, Homo sapiens
ctgagctggttcaggtccgatggcggggcctgcccttatgaatcattcatgatctggccccgcccatacgcgaacgacgcgcgcgttcacgccggagagggggcgcggctcgcccccgggct

SEQ ID NO: 11143 - DNA, 122 bp, Homo sapiens
tagggggagggttaataagtttcagcagcagttgcattgcctccagaaatccctggcacccgttcacaccttataaaatgcactttatgccaggtttatcctgatttgggaaggtaagtgtg

SEQ ID NO: 11144 - DNA, 122 bp, Homo sapiens
tcagttatgatgattgtggctgaaagggtctgcttttcccgggcatggtccgggaagctccgttccacagctgtgagctccgtggagcttcctcccgagcctcctgcccggctctgccggtg

SEQ ID NO: 11145 - DNA, 122 bp, Homo sapiens
attctaattttggctcctgcactaactagtagacaagactccctgggcctttgtctcaaccgtaaaacaaaaatgatgtcctagttgatccctaaatccccatatatctctaaaattatgag

SEQ ID NO: 11146 - DNA, 122 bp, Homo sapiens
ccgctggccccagccgcggggccaccgccagacagacagaccggggatcctgcctggcggcgtgaccttgggttagtcctagagccgcttctagcccggtttcctccgccccaggttaggac

SEQ ID NO: 11147 - DNA, 122 bp, Homo sapiens
tccctgttttagctagtcctcaatttggtcctcaatctggtgtccaagccccacctctggcgttaagtcctgactcctacctgtttcaccatcactgcagttttaagagtaacgaatttggg

SEQ ID NO: 11148 - DNA, 122 bp, Homo sapiens
ggggactctgcaagttgctaacccagcgtccattctctttcctccgtactaacagaaccccggtgcctctgcccagttccaatagcgggcagacgagagccatgtcctgggctcccttgcag

SEQ ID NO: 11149 - DNA, 122 bp, Homo sapiens
gtttcactgaagagaggagatccaacttagtctgcccagtgcagtaattctaatgtgaggcgcatgcgcacggcgtaccaaaacatcaaaggggaagcggcggctgccggggaccgagcaga

SEQ ID NO: 11150 - DNA, 122 bp, Homo sapiens
gatgaaaggagttgtccaagaaatgactatctcagagggaaattttccttcaggtcattacgtgagtctctttaaagcatggcggactgtagcattaggttttcagttattaggtatattaa

SEQ ID NO: 11151 - DNA, 122 bp, Homo sapiens
ccgcagggcggggcaataacagtgttgtatgggagggtggcggtgggggtgcaaatgggacgtttgtgggccagagcctggcaacagatgaaatatttaccaaatatatacctgcagcaaac

SEQ ID NO: 11152 - DNA, 122 bp, Homo sapiens
aggtcaaggggcttccgaggtcattttgtggttctaatactgagctaatcgcctagaaaacgtggcctctccatgaactctctctcctgccagcctcccgcctccaaaccctaagtgaggcc

SEQ ID NO: 11153 - DNA, 122 bp, Homo sapiens
tgccaggtggggtaggcccttctctcccttccgattctcagaagctgctgggggtgggggcgtcctgggcctcagggcacagagctgcaaatccttcctgatccaggcctctcccctgccac

SEQ ID NO: 11154 - DNA, 122 bp, Homo sapiens
ctgcacccctgtctctgctctgccgctcgcaagctctgtgaccttggggaattcactcaacgttcctgagcctccatttccttctctgtagaatggggatgacggcagcagtgacatcacag

SEQ ID NO: 11155 - DNA, 122 bp, Homo sapiens
aggtgcgtgccaccacactcggctaatttttctatttttagtaaagacagcgttttatcacgttcgccaggctggtcttgaacttctgtcctcaagtggtccatccaccttggcctcccaaa

SEQ ID NO: 11156 - DNA, 122 bp, Homo sapiens
aagccttcctgccgctttgggctggaccctgtgatcccgaagcgcttcgtgggcaaaaaccggtgatgcccaggttcccctgggtcccacgcatgtgcgatgtggaggcactttcgcccgtg

SEQ ID NO: 11157 - DNA, 122 bp, Homo sapiens
agacctcgagactgtcaagaggagcaagaggagtcgggatttagcgtcagtgatgaggtgcgccactcactgtgtgacttcagagtgtttctggggaaagaaaatgaagtcctgtgaagtat

SEQ ID NO: 11158 - DNA, 122 bp, Homo sapiens
gggatcctccagaggactccacaggggaccgagggcctgcagggattcgaaaaccagtgccggacgcagccttcctcccttacagcaagagctaggagataaaacaggcaggccgggagagc

SEQ ID NO: 11159 - DNA, 122 bp, Homo sapiens
tgtgggtgattccgtggtcttagtttgagaatccttgcagggagaaggctacatggagatcggtgtgggattcatccaccgacccgcagaaacctaccctccaacgctccccgcaggctccg

SEQ ID NO: 11160 - DNA, 122 bp, Homo sapiens
ttgtggtttttaaatgcctgcatttctgtctgaccaaggccgaggccctcgcacatcacccgtgcctgcggcttctaggaccgtggtcctttgtgtccaaagatgagtagaacattaaacgg

SEQ ID NO: 11161 - DNA, 122 bp, Homo sapiens
atgacccatccctggcctctagctggggatttggaaaagtaaacattccttgtgacactgcgtgactagtactttaacaaaggtaggcactatgatgagcagtggggatcctaaggaggggt

SEQ ID NO: 11162 - DNA, 122 bp, Homo sapiens
tgtaggtctgtcgtgggtcctgagaatctgcattcccaatgaggccctaggggaggctgacgctgctggtccagggatcacatttttaaaaccactggtgcagggagactccaaggactact

SEQ ID NO: 11163 - DNA, 122 bp, Homo sapiens
gagaaaaaaatgcatggacagtgttggcaacagtgcaagtttcagaacaaactttggtcacgtaaatctttgggaagtaagtccagtacctcattccatcattctgtggtcaggaaactact

SEQ ID NO: 11164 - DNA, 122 bp, Homo sapiens
gacttgctctgacttcgcgcggttctcgcggcttccccggttcccgggttctgcacagcgcggctattaaagtgcatggagaagtgcagtccttgccccgcatcccgcagggaaatctcatt

SEQ ID NO: 11165 - DNA, 122 bp, Homo sapiens
ctcatgagttcagctccatcaatctcctacctctccctatcgcccccgaccctccctcaacgcatccagcttacagtgaggggtaatggaaaggattcttgaatcaaatctcctccctgctc

SEQ ID NO: 11166 - DNA, 122 bp, Homo sapiens
cccagagcctgactgcaccgtcccgctgccctgagggcctgggaggggcgcccctgagaacgagccctgtcttggcccttttacagtacaccaggggccagccagccacaggggccggggcc

SEQ ID NO: 11167 - DNA, 122 bp, Homo sapiens
ccaataagaatattgaggaatagaggtaacaaaggatagtgaagatcagacattttcaagcgattcatccaatgaagctttactgggtacctgccaagtgagtgaaaccctgagatgtatat

SEQ ID NO: 11168 - DNA, 122 bp, Homo sapiens
tggccgatctgatggttttataaggggcttttccccctttggctcagcacttctgtctcccgcagtcatgagaaggacatgtttgcttccccttccaccatgactgtaagtttcctgaggcc

SEQ ID NO: 11169 - DNA, 122 bp, Homo sapiens
cggagtcagtcccccacccccagctccacggctcctgctattcccatcggtgagggcagccgggacagggaccatcccgccctgggctggagtttcagctcggagacaccacccgccggtcg

SEQ ID NO: 11170 - DNA, 122 bp, Homo sapiens
cagagtcttgaaggggtgggttgcccctccacacctgtgggtgtttctcgttaggtggaacgagagacttggaaaagaaaaagacacaaagtatagagaaagtaataaggggacccagggaa

SEQ ID NO: 11171 - DNA, 122 bp, Homo sapiens
gtggtgccctcggaccgcggcaactacacctgcgtcgtggagaacaagtttggcagcatccggcagacgtacacgctggacgtgctgggtgagggccctggggcggcgcgggggtgggggcg

SEQ ID NO: 11172 - DNA, 122 bp, Homo sapiens
caacacatgcagcggccactctcacagcggccccggccacgacagtccccaggacagctgcgcacaccgcagtcctcgccgctgtagcccgcattgcaaacacacacgccgttctcgcagcg

SEQ ID NO: 11173 - DNA, 122 bp, Homo sapiens
aaacgtgagcatcaggccagctgagctccaaggagaaatgcgtcctcctgagaaattgcacgcaggagtctgaactcagaaaacatgagcatcagcagctgagctccgaggagaaacgcgtc

SEQ ID NO: 11174 - DNA, 122 bp, Homo sapiens
tcagaactcgcagtgattggaggtggacgcagcggctggaccgggagcgcgaaactgctgcgctctccccaggatctgcgccctgcagctacagaggggacatgttctcaaggtggtgaggc

SEQ ID NO: 11175 - DNA, 122 bp, Homo sapiens
tcctctgatgctctaatttttcccctccccagaggctggtggggtacggatcagataggacgtatgatttttggcattcaccttatttggaagggataacaaaaaaagagaggcatcttcca

SEQ ID NO: 11176 - DNA, 122 bp, Homo sapiens
gaccgtcaagtccaacgctcgctgcagacatctagtggacccggcgctcgcggacggaagcggacagacctagttggatccttatcccaccaatctggcccacctttgctgccatctaactc

SEQ ID NO: 11177 - DNA, 122 bp, Homo sapiens
ggtttagttggaagaagggatgcagtggctgatggggcaaaccactcacaaggcagaactcggtgccagctctgaaggtggttgtcgtgtccagagacaacaggcctaaaacgtctgcaaaa

SEQ ID NO: 11178 - DNA, 122 bp, Homo sapiens
tccgggccggcagcggacagccactcgattatggaaatacgatttaaaatagcacatcaacgtccgcagcaactccccgggaaggaaaatatgtccggggaggtggcgctggagaggagtag

SEQ ID NO: 11179 - DNA, 122 bp, Homo sapiens
cattgtttccagaaaatatgcccttttcccctggattcctttacaggtgcttccttcacgcggtgtcccggattcctgcaccggcgcacagctcagcaccgcggccccgatctgcccaggac

SEQ ID NO: 11180 - DNA, 122 bp, Homo sapiens
tcaaatgctgtgagggagatccacccccactccacagctggggccacattccaagaggagcggactctctgaggccctggaggcagaggggaaggggccaggacctggccctgcacaccaga

SEQ ID NO: 11181 - DNA, 122 bp, Homo sapiens
tgcagtatctcttcctccagtacaatctcatccgcgagattcagtctggaacttttgacccggtcccaaacctccagctgctattcttgaataacaacctcctgcaggccatgccctcaggc

SEQ ID NO: 11182 - DNA, 122 bp, Homo sapiens
aagagcctgtgatgctctctggaaaatcagcgccaggctctgatgggcagcagcctttcccggatcccatccctggctgacctcattccagatccaggaagcctgatgacttcctggttgcc

SEQ ID NO: 11183 - DNA, 122 bp, Homo sapiens
tgccagagaaaccagaaccagacccagtttaacacagacgatgagtacacaggctgcagccgcatgacagacatggccccacggccccacagcccccagactcctctctttagataataggc

SEQ ID NO: 11184 - DNA, 122 bp, Homo sapiens
tttgttaagaagtcccccacccaggcgcccccctcgtcctcctcaagtgccctcggaaagcggaccagactcacctactgccaggcagatgggcagcagcagcctgaagatgagcccgcaca

SEQ ID NO: 11185 - DNA, 122 bp, Homo sapiens
cccttctccctttcctggggacacctgagcagcgccacggtgatggcaggcttgtgcacgcgtcatgcagatacatccttattttcttcccactcttcgtcgtcccctgcccgcccaccctc

SEQ ID NO: 11186 - DNA, 122 bp, Homo sapiens
gcagtgtctaggggtgaatgcttacagttcctgaagccccaatgggtgtgtgttacagagcgctcttttagttttgctatctgtaggcagcttgtgttaatcagctcgattagatcctctgc

SEQ ID NO: 11187 - DNA, 122 bp, Homo sapiens
ttgtcacgaatttagtttgtttcagagcggcaggactcgtagctagagaacgaggacccacgacgcgtacgcgttacagtcctgtttccctagaaacggagctgccggcgcggaggtggctt

SEQ ID NO: 11188 - DNA, 122 bp, Homo sapiens
catcgatgagcccggtgatcactgactccataccacccatctgcacacagagcacagggtcgggctgcaggctggcggcgctcctgaccgcagcctgggccaagacctacttgtcacccagt

SEQ ID NO: 11189 - DNA, 122 bp, Homo sapiens
gttgctttttgtttttgctttgctttgccttggaagtgaagaagagattctcatttaaaccgttatcttgaagtattgaagtatctttgtgagctagggtgcaattatttcctctgtccttg

SEQ ID NO: 11190 - DNA, 122 bp, Homo sapiens
gtgcactttctatttcttgcctcattgccaggaataaagattcagcaatctctgcctaaccgacaatgttgtcagtgacacctgaggcaaagtaaaaacagctcagcagttctgcagccgct

SEQ ID NO: 11191 - DNA, 122 bp, Homo sapiens
aatgctccaataggcggagagctggtcagcgctcacagcctattggctcggaggagctgccgctccgcgcctgggtcccgcccccctgcccctgtcgcgtagttgggttgcagcgcactaga

SEQ ID NO: 11192 - DNA, 122 bp, Homo sapiens
tgaggcacgtccatgagtgtggggcacacctgtgaggcgcgttcttgccggtcgctggggcggcagcacctggttcattcccagcgagcccggctctgagatcaagatggctcagagagctc

SEQ ID NO: 11193 - DNA, 122 bp, Homo sapiens
ttgttcaggtctgcaagtgtggcctttgtttgctttcaactcacagaacacttgtgtttgcgtaggtacaatagaaggtgacagtgattcgaaatgcatttttgagaggcaattacatacaa

SEQ ID NO: 11194 - DNA, 122 bp, Homo sapiens
cggggcggcctccgggaagtgggagacgctgcgggtcctgggcccaggccttgggatgggcgggaaggcttggccgcgccgggctgtgggcactgcaggaggcccctgtgcaggtggagatc

SEQ ID NO: 11195 - DNA, 122 bp, Homo sapiens
gataacttttcaatacaccaagacttctcagcttgccccaaattcactgagacatactggcgaactgctggttcaaccatttacacatccacccaccagacataagagtgctcatttcactg

SEQ ID NO: 11196 - DNA, 122 bp, Homo sapiens
gaaaacagcatatgacaccaagatatccccatatccaacgagacttgctgggtttatccccgtatccaacgagacttgctgggtttatccccgtatccaacgagacttgctgggtttatccc

SEQ ID NO: 11197 - DNA, 122 bp, Homo sapiens
cccgcgtgctcagccatgccatcgtttattctgaaaatatttactagtgtctcccaggcacggttccctatgctggggatacagagacgacaagagtagcaaaaagtgcacatgctcatagt

SEQ ID NO: 11198 - DNA, 122 bp, Homo sapiens
tgaggaggaaagaagagatgtgtggactccggggggcgtcagggctggaaaggaaagtgccgtgagaagtcacaccgcttcccagcccagcctcggacttctgggtgcagacctcgcggctc

SEQ ID NO: 11199 - DNA, 122 bp, Homo sapiens
ctatggtttctgtagatcatcgtcatcttgtatattccccacaaagccgttcgcagcttccgggagaaggggccagagcccggtggggccagtttctcacagagggaggaggtggcctttgt

SEQ ID NO: 11200 - DNA, 122 bp, Homo sapiens
ttgaactcttccagctgatccagggagtgtcaactgctgggccaccgcctggggctcaggcgacctgtccccaggcatgctgtggtcctctctgaaggaggaaggcactcttgtggctactc

SEQ ID NO: 11201 - DNA, 122 bp, Homo sapiens
gtgagccaccacacccggcctcaaattttcttattgcccttgagcaactgaaagtttttccgaacatgtaacattcaaattgggatccatactgaagagcaaatatatgtaaaaggcgaaca

SEQ ID NO: 11202 - DNA, 122 bp, Homo sapiens
gtctccttttaccccatctgcagatcagggttgggatcctttctgggtgatctccagcctcgtgagcactatgcttctgtttggatgccccatggcacggagagctcactgtctctcttcta

SEQ ID NO: 11203 - DNA, 122 bp, Homo sapiens
ccagaggcgcggcagggcctgtggaggcgcagggcccaggcaagcaggtggggctctcaccgagcgcgcccaggtggccgtaggtctcccgcatcacgtcccggtacagggccctctgcgcg

SEQ ID NO: 11204 - DNA, 122 bp, Homo sapiens
tgactgactctctgtagtttaattcttccttccagttattctgtgatgtttgatgtcccccgttcctgaaccacctggaaattctgtgtatggattgtgttgtctcttggcttttgtcattg

SEQ ID NO: 11205 - DNA, 122 bp, Homo sapiens
ctctgttcctaaattatggggtggtaggcttgtaacttacagactagtgaagggacagaccgcaacagaaaatcatgtagatcatgattacaattacaaaggagaagttcagggggctgtgc

SEQ ID NO: 11206 - DNA, 122 bp, Homo sapiens
gttatgggagggaatgtggctggagagataggtgggagctggatcacaaagggcaacaaacgccttgccaaggagttggggctaagcagttggagaccatcaaaagattttaagtagggatg

SEQ ID NO: 11207 - DNA, 122 bp, Homo sapiens
ccagacaaggcaaacggaaatctgcagcaggactcagcttggtgcacacaactccgccctcgccacacccactctgcagcgtctggcccggcaatacccatctgggcgcccctcctgcttcc

SEQ ID NO: 11208 - DNA, 122 bp, Homo sapiens
gacactgggaacgcctttggaatgttaaacaaagtggcttttattctggctgccttgctgcggcttcttcctcataatgaaggggccaattgtgctgttggtgggtgtatctgaaacgccct

SEQ ID NO: 11209 - DNA, 122 bp, Homo sapiens
ccctactgtttctctgcctgagggaccctccccctgatgagattctgctcctccctgagacgtgaaatgtctccccctcctcctccagccgccagcagaaagggctgctttcccttcagcgt

SEQ ID NO: 11210 - DNA, 122 bp, Homo sapiens
tgttcgctccctgtccacctccccactccccaggatggaataggcacccctatgtgagggcgcaggtgtgcaaagccaggacgggtgggggtggcctttgtagaatgtgctggcggggaggg

SEQ ID NO: 11211 - DNA, 122 bp, Homo sapiens
gctcagggtgatgcctgatacgcccttggttattggggggtgttcctctctccccacacccggagtttcccgggcctgccattgtggacccgccccctatgctttacacctagtctctttgc

SEQ ID NO: 11212 - DNA, 122 bp, Homo sapiens
tgccccgccgccacacacacacatgcacacacacacagttttcttctcctacttctctctcgcttggttgaattaccccactgacagagagaaaaacaacattcactggcctccagggaaag

SEQ ID NO: 11213 - DNA, 122 bp, Homo sapiens
gggctggggaggatttacggctctaaagccttccatataacgctttaacggtgggcagagcggtttctgttgcgtcccgtcctgtacttttcgcacccacctgtgagataggcgttaagcgt

SEQ ID NO: 11214 - DNA, 122 bp, Homo sapiens
ctgtttggggagcggcagaggagtcagggcggaggctgggcggcgctgggcggtggggcgcgctcactggctgccacctcacctagcaggcgtcacagggctcactcaagagctccagcaag

SEQ ID NO: 11215 - DNA, 122 bp, Homo sapiens
ggggacaggagcccgtgagaaaacttagctcgccgcgctctgctcagctctacccggctccgctctcaggcgtgtgctcagaacacaccgagatcctttagaaataaatgtaatcgagacta

SEQ ID NO: 11216 - DNA, 122 bp, Homo sapiens
gagggaacgatagcatccgcactcagaaggtttgtaaacattaacacctccatgctcctgcggagtccttgatactcttcccctcaatacttacatggaccctcattacaataagaacaggg

SEQ ID NO: 11217 - DNA, 122 bp, Homo sapiens
gacttctgcaattctgattgcgaacttcccaaatgcctaacaccaggccttagtcttaatcgctgctggggaagcgctggtccatcggagccgtgtggggttgtggaagcacctcggacaga

SEQ ID NO: 11218 - DNA, 122 bp, Homo sapiens
gcagaggagggcagctgtgatagtacatttcatcctgaaagcactacatgtggataatgacggtagtgatgatgccctaattttagtgtcatggcaacattttccaaggggatggaattggg

SEQ ID NO: 11219 - DNA, 122 bp, Homo sapiens
acgtcgggagtgtggttccatccactgcgaaagccccacacatctccccggcctttcatgcggagtccagcaggcgcccacccggcatctcagatttccctggaaatggaaactgcaggtgg

SEQ ID NO: 11220 - DNA, 122 bp, Homo sapiens
agggtgtgtcttaattagcactggctttagggaacaaggaaaagggagaacccgggagtacgggaaggaggctggggcagacaggagtcagaggcccattccagcccaaacgagaagccagt

SEQ ID NO: 11221 - DNA, 122 bp, Homo sapiens
tgcctcagtttctttctttcttttcttttaaaggctctggctctgttgcccacactagagcgcaggggtgtgatcctggctcactgcaaccttagcctacctggttcaggtaatcctcccac

SEQ ID NO: 11222 - DNA, 122 bp, Homo sapiens
tcaggaggcctcggcacttgcttggttacagaggagtccagtgggctgtgggtgtccttgcggtagtgagaatgcctgggatggcctctcggggccactcggccaaggccagggctgctggg

SEQ ID NO: 11223 - DNA, 122 bp, Homo sapiens
ctcacacagttcctcacacagcgcctcacatggggcaccagctgggggcagggctcctctcgaggggtcaccagctgtggggagtctgtcccttgcagacccctgacccaatgaccggtgaa

SEQ ID NO: 11224 - DNA, 122 bp, Homo sapiens
gcggccgcaccttacagatgccagtctgctcggctatgggccggatcttgtggatgaaagcgaaggggtccgcgaactcttcccagctgggttcgaagaccgggcactcgggtggaggcagg

SEQ ID NO: 11225 - DNA, 122 bp, Homo sapiens
cacacacacacacacacggtcaggcacatgctcagcgacactcttgcacacagaaacacacgtggacagacacacgcacagcgacactcttggagagcacatacacatggacaggcacacgc

SEQ ID NO: 11226 - DNA, 122 bp, Homo sapiens
cagcgccacattgaccgtgtctaccgggatgacacctttgttggccggtccacgggtacccgggccccaccattgacccggcccatgtccctagcagtgcctggattgacaggaggggcagg

SEQ ID NO: 11227 - DNA, 122 bp, Homo sapiens
attacagagagagggaggtgcgggccccccatatcccaccttgtccggagggcaaggccccgtcctactcagggaatgcagaccactagccccaagactggccatgaggcacagagaaggca

SEQ ID NO: 11228 - DNA, 122 bp, Homo sapiens
ggccaccgcgcccggccagaagatttttatggtaaaattttgtgatgggaaaactcatcccggaaaatgttgagacctgatgctgagtcctcagcagctcagagaatacgtacttctgtccc

SEQ ID NO: 11229 - DNA, 122 bp, Homo sapiens
ctgggcacttccatttactacagagtccgcagtatgcagttccctgaggacgctgctgcccgccgcctgggctctcccgtcctcctcagcgcgtggccgccaactcacactgacgttccggc

SEQ ID NO: 11230 - DNA, 122 bp, Homo sapiens
gtatccctagcatctagaccagtgtcttgtatatcagaatgttggcctcagaatcatgaccgttttatagtaagatggccacacttgcaagaagtgaagagacttgttcaggttcttcagtt

SEQ ID NO: 11231 - DNA, 122 bp, Homo sapiens
taaattcctaggtttatcaatacacagtcaaacattaaaatctctcatcttggctgggcacggtggctcacgcctgtaatcccagcactttgggaggccgaggcgggcggatcatgaggtca

SEQ ID NO: 11232 - DNA, 122 bp, Homo sapiens
ttcgagtcctggagcgggaggcgcaaagggcctcaggcaggacccacgctgggtcgagcccggagctgccctcccgccacctccggacggaccacgatccccaggagcccaggcgatgagaa

SEQ ID NO: 11233 - DNA, 122 bp, Homo sapiens
cgccggcgctgtgggaacccacgctgctggatgccatcgctaccccgtcgcgctccaatgcgtgtctttccagaggtgcccacatcaggccacagaaatctcaccacctgtacttgacatcc

SEQ ID NO: 11234 - DNA, 122 bp, Homo sapiens
gcgccgcccgcaccactctggcccaagcgccggaggggcaagggtccgccccctcccgtacgctctgagctcctcctccagaaaaagggcggaccttggagcccactgactgccgggaattg

SEQ ID NO: 11235 - DNA, 122 bp, Homo sapiens
ggagcctttgagtaaggtctaagcagcttttgctcttctgttgcaagattggaagggtaacgattttggtgcacaattaattagatgcctggaagttgatatgatatgtttgcttgtgtttt

SEQ ID NO: 11236 - DNA, 122 bp, Homo sapiens
tccaggggaggcacgctgggggaaccgaggcgtcttttggggcggaccagaggggtctgccgtttggcccccaattctgcctctttctaggccccgaggaccactggtccctgccctcaagt

SEQ ID NO: 11237 - DNA, 122 bp, Homo sapiens
cagatctttcttctagagttccaatgaataaatgtccaagagaggagggaaacagaaaatcgtcattagaacgcagtaataacccaaccaccgctggcaagatccggggatgaatgctaaat

SEQ ID NO: 11238 - DNA, 122 bp, Homo sapiens
cgttactgccctggcgtcagccagacactggggtgctgctgggcgtcgagagggctgctgcggggccgggctaagcctggggggctgcaggtgtcggggtggatgtgggcatagcggggctg

SEQ ID NO: 11239 - DNA, 122 bp, Homo sapiens
caaattattatttttttaagggcaaaccaaaaaactcagctcagaacaaaaacacagtcacggaggaaggtgttgacccacatacaatgagtcctgagcccagagaaaaatctgcacacaca

SEQ ID NO: 11240 - DNA, 122 bp, Homo sapiens
gtccgggaactaaggacggcgaccctggttcgggctggcccaagactcggttgctgtccacggaagataggtgctgaaaatgccttggtcctcagtgagttcagttccgtgcgccagggggc

SEQ ID NO: 11241 - DNA, 122 bp, Homo sapiens
gcgaccccggccggctgagcgtagggggacgccgtgtggataccgccaagttgctgcttccgccccggtcgcgcatcccggccccgcggcccgcgcccgcctacctgcatgccgggcaggcc

SEQ ID NO: 11242 - DNA, 122 bp, Homo sapiens
gtgtctggagatggccgggggatgactgcagaagcctgaaggggcgggggccgggcggcgcgcaggctacgggcggaggcaggagcgcgcgcctttttgtgcggctcctggcagctgtccga

SEQ ID NO: 11243 - DNA, 122 bp, Homo sapiens
gcgcactctgccggcaacgccgaggcgcttctgcatctgtgggccgaggtgtgtggcgagcgtccgagcggctggggaaagtggggtgtgggaacactgaggggtcccaaagaaaggggaga

SEQ ID NO: 11244 - DNA, 122 bp, Homo sapiens
gacctcccatcttggccttcgggcccaatcagggaggccctacctatccgaaacccggtccgttccccgcggaagaggggtggagtttcaaccttttaactccaccttggtctgtgcagcgc

SEQ ID NO: 11245 - DNA, 122 bp, Homo sapiens
agacccaggccatgatctgaagggtgggggcacggtggaagggtctcagctggggatggccgggccacatctgccctttgagaagccttgtgttccagcaaggagaactggaatgaagccag

SEQ ID NO: 11246 - DNA, 122 bp, Homo sapiens
aattctagtgtttactgggccttggccgctgggagcctcttcaaggtggttccattttgacgtaaggactggaggggtgcattgaagaattgtagagtgcaggtgaagggagggcctggaag

SEQ ID NO: 11247 - DNA, 122 bp, Homo sapiens
tgctgaatgggggctgccgaagcgccagcctgggacgacgtgaccacacctaaagacagacgaaggcaagaaagacctttgggcaggggacagcataagcaatgatggctgaggggccaggt

SEQ ID NO: 11248 - DNA, 122 bp, Homo sapiens
ctgtctctcatgctgtcttgggcctttcaccatgaggtgaccctccccatatgcaggcaccgtgctcttggacttcccaggctccacaactgtgagaaataaatttattttctttataaatt

SEQ ID NO: 11249 - DNA, 122 bp, Homo sapiens
tgcctccactgtccctacctctctgtaatacctgtaatacctacctctctctagagatcccgcccctaagagaaggaaagagactcatgtgcctgccccatccagccagggcccctgcaagt

SEQ ID NO: 11250 - DNA, 122 bp, Homo sapiens
ggcgcccatgcctccggccccgcgccgcggctgccctgacccggccgcgacctccctctgcgcaccacgccgcccgggcttctggggtgttccccaaccacggcccagccctgccacacccc

SEQ ID NO: 11251 - DNA, 122 bp, Homo sapiens
ctccactactttcgccagggatgcagggacgcaggatctgcccggagcgctgctacccaccgtcgccgctcgcgaccaaatcccgactcctcgctctgcgcctcttagccgcgtcgcagctg

SEQ ID NO: 11252 - DNA, 122 bp, Homo sapiens
aaaggatgaagaagccaagccacaggcattttttaaaaacatgtttactcataaaaattgcgtagcaaatccaactgtggggtgctgtttgtccagcaaactcctagttaaccagcaaacac

SEQ ID NO: 11253 - DNA, 122 bp, Homo sapiens
ctctctctctttattttcagtttttttgctgttatccagataattaataaaaaccaaccacgcaaaactgggtcccaccctctccttttgctcccagcctacctccccagttgtgggaacag

SEQ ID NO: 11254 - DNA, 122 bp, Homo sapiens
ctgtggggtgggctctgaaaggcaggtgtccgggtggtgggtcctgaataggagatgccacgaagggtctctgggtctttgtgggtggtgtaccacgcgggatgggaaggccaggactcggg

SEQ ID NO: 11255 - DNA, 122 bp, Homo sapiens
catcccattgagcacgggtggtgacagcaagacaggtacttgaaatggaagagtgtctcacgatttttggaaatgggcttcttctgtgcctgtttgatggagaggcagaaagttccctgtgg

SEQ ID NO: 11256 - DNA, 122 bp, Homo sapiens
agagccccccgcacacctaggccacacggcacggcccaccgcacagacacagaccggagccgcccgcacacctaggccacacggcacggcccaccgcgcagaaacagaccagagcccccgca

SEQ ID NO: 11257 - DNA, 122 bp, Homo sapiens
gagagctggaaggcgggacttagtgttgcctgatccacgccgattggacaacagcagtgtcgggggacgggccgctcgagcgggctagcaaccccccctcgatgggcggggagaagcgtggg

SEQ ID NO: 11258 - DNA, 122 bp, Homo sapiens
cctccccggggatgcccaagttgcacttgcagaaagtttgagcctggcctgcgcgcgcagcgccccgctcttccttgacgcacctcgcggagcgcgcgccggcacgcgggcagagggcgcgg

SEQ ID NO: 11259 - DNA, 122 bp, Homo sapiens
aaagagaattaacaaaacggccgccctcgcccagttgagaacatcggcatctctcacctccgaagttccgagggtgccgcaagatggaaaatgaaactttctgtaaagcaaactgagtaaaa

SEQ ID NO: 11260 - DNA, 122 bp, Homo sapiens
ttaattcatctacatgaaaggtcttggggttacccacttttatacatagctggtctggtccgtcgcagaatgtgtggaagtactaagtgccatcaatgacgcccatcaagttactgtgtcat

SEQ ID NO: 11261 - DNA, 122 bp, Homo sapiens
gggggaagcttgtaggccggctccggggacagttattgagcacgcgcagaggcggggcgtcgggtgcgcgcgagcgggcgggcgggccgacccggaggcgggcttcgggaaggggcggggcc

SEQ ID NO: 11262 - DNA, 122 bp, Homo sapiens
agagacctgcagggagctatggatgacctggacgctgacatgaaggaggcagagtccgtgcggaatggctggaagcccgtgggagacttactcattgactcgctgcaggatcacattgaaaa

SEQ ID NO: 11263 - DNA, 122 bp, Homo sapiens
ggtaccgtctccattctcgtccgtgcagtgggaagtgaaatgtcagcactgtatgatcatcgtgggtgggaaggccccgctcccctacttggagctgcatttcacagtggtcttctgtaggt

SEQ ID NO: 11264 - DNA, 122 bp, Homo sapiens
catcatctgagcagaagtccaagtcagaaaagcagtccctatcctagcagaagctggggccggagcagtaatcctcaacaaaacacaagtcagggccagagtgagagtccccaacttagcat

SEQ ID NO: 11265 - DNA, 122 bp, Homo sapiens
agtgactcttcagcagtttcagactatcccctcctccacagcccacaggtcaattgcattcgttctcaggtatgacagacatactttggtcccccataattaatttctacaggactgatttc

SEQ ID NO: 11266 - DNA, 122 bp, Homo sapiens
agaaaaagaaaactattgtaagaaatggaatactaaaagcccttgtaacagatccatttccgtaggcaaaatgacagaggaagtcagataataatcaaagattgcctggagagcaggaaatc

SEQ ID NO: 11267 - DNA, 122 bp, Homo sapiens
tccggctggcgggcgcggccggggcccgggagggcgcggtgcggcgagggcagagagctgcgggagaaccctgggatcccgcgatctcctcctgtgccttcctgactacccaggagaactcc

SEQ ID NO: 11268 - DNA, 122 bp, Homo sapiens
caaccggcagcgtccagctcccgcacctcgctgcacatcgcacctgagccccgccgcgaccgcatcgcgctcgctgcgacccattcagaccccccagaaacgccaagccgctcccgctctag

SEQ ID NO: 11269 - DNA, 122 bp, Homo sapiens
gcagcagcatgtgccctgctgttctgagaatccggaacacccgccccttgggaaaggccgcggctccaagagcccacatgggagacccagccgggagaaatcaactgtggcttgtcatgaga

SEQ ID NO: 11270 - DNA, 122 bp, Homo sapiens
actctccgactcaccgtaggtgaagtatgccacttccggcggaagcgagacattgtgcagcgtgtcgtcctgcacgtgctggtccacgtacagctgtgcctccgtggccttcaggaaggcca

SEQ ID NO: 11271 - DNA, 122 bp, Homo sapiens
aagaaagaaaaaacaacctggttctaggcggctctatctctcgtagtgttgattataccgcggaaggcgggaagagctgggaagtggcaacgaagcgaggcttgcaatgccagagccttcga

SEQ ID NO: 11272 - DNA, 122 bp, Homo sapiens
ttgtggaaaatttaaataatctgtagaaatttgtgaaaaagccactgagcaacaacaaatcgtggcataattacactgcataaaaacccaccactctcattaattacactgtaaccgaacgt

SEQ ID NO: 11273 - DNA, 122 bp, Homo sapiens
ggctgccaggctgcacagcggccgaacggggctgccgggctggacagccctttacaaaatcgctgcagagaaatgcagccccagcctggcagccccaccccaaccaaggcagaggctccacg

SEQ ID NO: 11274 - DNA, 122 bp, Homo sapiens
gcttgggtccacaatcagggagccccaaatagaaataacacggggcgctgattggttttccgccgctccagaccctgcgcttggtgcttcaagtgactcatccttatgttcacatgatcgcc

SEQ ID NO: 11275 - DNA, 122 bp, Homo sapiens
atggctgtgcccctacaggtgactgcttgggttccaattgctctcatttctggagggggacggcctcggctgcattgtggggtgtctttgtgtgtgcatgtgaggtatatttctggatggga

SEQ ID NO: 11276 - DNA, 122 bp, Homo sapiens
tgagaacgtccttgtgccggtccttgacggcgtggtagatgtgcaggaactggaggatcccgtgccgccgcacgtggtcggcatggcgcttggtttcctcccagctcagcggcgagccctgg

SEQ ID NO: 11277 - DNA, 122 bp, Homo sapiens
ctgtaagtaatttcttatgttaataagtgttcagaacccactactgcaaccagctctaaccggttccttgaggaatgtggctaggctgaaattttggaagtgttggttttggtggtgaccaa

SEQ ID NO: 11278 - DNA, 122 bp, Homo sapiens
gttattcagtacccgtcctcctgctgagtgggaagtttggctctggctgtgcccaggttacgacacagacatctacctgacagcaaagggtcagcatcggtggaggctcatcctaaaggagg

SEQ ID NO: 11279 - DNA, 122 bp, Homo sapiens
gaataactattgtcatgcagtagatgcctctaaaggaaatcgagtgtaatttacagtttccgctcactcctgcaaacactgcctacctactctagtcttggattcaggcaaccaccacagga

SEQ ID NO: 11280 - DNA, 122 bp, Homo sapiens
cccaggggttcgaggctacagtgagatgtggcaggatcacatctcactgtagcctcaaaccgctgggctcaagtgtttctcctgccttagcctccagagtagctggggaccacaggcaccac

SEQ ID NO: 11281 - DNA, 122 bp, Homo sapiens
cgagtgctccaagccctgcgcgcagcgccgggcttggaaggcggcgaatggctgcctagccgccgcccctactagtgacactcggccgccagcccccgcccaggatgtgcacatctgctggc

SEQ ID NO: 11282 - DNA, 122 bp, Homo sapiens
caatcttccgccaaacgaactttaccccggaggacccaggcagggcacctcgggagccttcgtcccgaccggggaccaccagctccacctccgtccccgccccgagcggaggtggtccggcc

SEQ ID NO: 11283 - DNA, 122 bp, Homo sapiens
cacacacacacgccacgcaccgtataaaagcctaaatgacacaccactgcagcgttcaaacgctgggaagaagactcccttgtggcaccggaaacccacgaggttggaagtgggaggggaag

SEQ ID NO: 11284 - DNA, 122 bp, Homo sapiens
agtctagttctgtggtggaggcggtgggggagctggaggcatcccgaagggcggcatgcccgccacccccatgcccatcatggtgacaaagttagaagggtccatgggaggcggaggaggag

SEQ ID NO: 11285 - DNA, 122 bp, Homo sapiens
tcatctcactagggagtgccagacagtgggtgcaggagagtgggtgcagcgcaccgtgcgcgagccaaagcagggtgaggcattgcctcactcgggaagcgcaaggggtcagggagttccct

SEQ ID NO: 11286 - DNA, 122 bp, Homo sapiens
taatggaaacaattctaaaatggaaaaaaaaaaaggcacgcacaatgctatcagttggctcggcttcctaaaagcactgcttaagtgctggcaataagccccgcactgtgctgtctatggtt

SEQ ID NO: 11287 - DNA, 122 bp, Homo sapiens
atgcctttccccccacaggcgacattgactacagcaccgtgctcctcggcatgctggtgacgcaggacgtgcagctcgggctcttcatggccgtcatgccgactctcatacaggcgggcgcc

SEQ ID NO: 11288 - DNA, 122 bp, Homo sapiens
tcgaccgcaggaaaaaagcacggccagcctcacttaccttatagacgtccccgtaggtgccgctgccgaccctctggacgagttcgtagtcctgctgcgggttccgcctcaggatgtccgcg

SEQ ID NO: 11289 - DNA, 122 bp, Homo sapiens
ccaggcagcttctaaatcacagaggtctgcagccacctgtaggtcaccttgctgcactcacgtgggcctgtttctcacagtaatagtttaactgtgtgtgggcacctagtgcttgtcttcac

SEQ ID NO: 11290 - DNA, 122 bp, Homo sapiens
cagggctccgcgcctggcaggagacggggacggcgacagagacgacacaggcggggactccgggcacgcaggccgcagaggcacggtggatccgggacggcagcgcacgcaggagcagcccg

SEQ ID NO: 11291 - DNA, 122 bp, Homo sapiens
aagccagctgtgtcccagtcatagagaataaactcgagactccacgcctgcccgcccctgcgttaccctccatctaaattgctgccgcggggcctgatccacttttccaatctatttcttgg

SEQ ID NO: 11292 - DNA, 122 bp, Homo sapiens
agaagggagagggttctcccaagcagatggtgctgttgtctgcgggacaggtgaaatgtgcgtgccgctgtccgctgcccacttagagaagcagggtctaccgctctgtgcctgacaatgac

SEQ ID NO: 11293 - DNA, 122 bp, Homo sapiens
ttaatggaaggacgacaggggtgggggcagggtgaaggggatcaacctgggtattgggaccggcagtgatgacaagacactgcaacttctgggctgaaagggcaatgggaaaatgcagtgtt

SEQ ID NO: 11294 - DNA, 122 bp, Homo sapiens
tgtgtggacttcttgtggcagctgtttggaggggaactccaattccttcctgaccacattcgttccttctggttttctgtccatatctccccacacctggggagtgacatcaaatgtcccct

SEQ ID NO: 11295 - DNA, 122 bp, Homo sapiens
ggagaaagggagggacggcccccgcctcttaaaggagacacgcaggttgttgttggagaacgggaacgcgggctggggaaaggaggcgtgaagatacgccctctgcgtcaagaaggggagag

SEQ ID NO: 11296 - DNA, 122 bp, Homo sapiens
ggtggggccacgtgctccctgggcggggccacctctgccttcacccctcctaagcgtcctcgctgcaagtaggcgggcttcactccaagccccctcagacactttgcaaatcttgtcctctc

SEQ ID NO: 11297 - DNA, 122 bp, Homo sapiens
tgtcggcatctcatggcagcggagacggtcgtttggggacggaggggcgagccccgcggccggggccagtggagctgggctcggagcccgcccaccatcctcccgcccaccaccgcggccgg

SEQ ID NO: 11298 - DNA, 122 bp, Homo sapiens
cggtctaggcaatgaatgacatcgtggtgcatgcacagtgcgagagggtgcactggttgccgctcacaggaatgtgtcctaagttcagcctttcaccaatagcagtttcagacaaaagtcag

SEQ ID NO: 11299 - DNA, 122 bp, Homo sapiens
ttctggcagaagcaatttgcgcggcgaggagcggagcggcaggaacccaataagctgcttcgcctcggagctgaagcccgtactcaagatggcggctccgggcgggcgtggccagtgactag

SEQ ID NO: 11300 - DNA, 122 bp, Homo sapiens
aatttcagaacccagtaggaaagtgagcccacatgtgggatatgttcctctcttggtagacgagtatgcagaattgctggtagaaacaagtaaggctcttcaagcttctgctcaaaaccagc

SEQ ID NO: 11301 - DNA, 122 bp, Homo sapiens
cgctgctctcggagataggggagtagctggccgtctacacactcggtagttcttccatctcgctctcctgactcagtggttcctccacctggctctcctgactcagtggttcctccacctcg

SEQ ID NO: 11302 - DNA, 122 bp, Homo sapiens
cagcaccttgcagtattgacaggaaagtcactgagtagcaaatgaatgcatgaatgagctcgtgttgttaatattgccaggcccacaggaagcacccaacaaagagcaatgattggtgttcg

SEQ ID NO: 11303 - DNA, 122 bp, Homo sapiens
ccttatgttacagatgaacttgagtcacaggggggtgtacctattggcccaaggtcacgccgtaactgataatgccttggctatgaactggcagtctgattccagagcctatacacttaacc

SEQ ID NO: 11304 - DNA, 122 bp, Homo sapiens
aggggcattccgccaggcgaccccagaagccagcctgcacctccccggctttcctgcaaccgggaaggggcgttaacagggccaccactccggggctccgccactccccagccgttccctcc

SEQ ID NO: 11305 - DNA, 122 bp, Homo sapiens
ccccaatccttcccttcttccaaccctcttctctttgttttcctactaggcctgcctttgcgaagtcccactgtagatcataaggaggctgcaagaactgatgagtggtccatttccttgca

SEQ ID NO: 11306 - DNA, 122 bp, Homo sapiens
tacacgagtaacatagcctatcattttcatttaattccagaatgtctttactatcatccccgttttacagacaggagaatagattcagcaagttcacagcagacctgcgttctcaaagccag

SEQ ID NO: 11307 - DNA, 122 bp, Homo sapiens
aattagatgaaataacgtgtggaagggacttaccctgggtcaggcgcacagtaggtacttcgttcatgacacccactaattccgatacccttccctagccaccccggacctcggcttcttca

SEQ ID NO: 11308 - DNA, 122 bp, Homo sapiens
ttctggaaccaaagactggggtgttgggaacccctccatctcccagatccgctttaactacgctgtagatagagaagccgggtcagcccagtgctggccgcctgcaaggggaaaggaacact

SEQ ID NO: 11309 - DNA, 122 bp, Homo sapiens
ggcggtcggctcccacggagaccgtgggcttggccctcagacacggggctgcaccagactcgcccaggaccatggcctgcataccttgttgttgttgttgttgttgagtattccctaaaagg

SEQ ID NO: 11310 - DNA, 122 bp, Homo sapiens
gctgcagccgccacggagacaatggacgcgggagccgccccgcagaagcacagtaggtgccgctcctgccgctgcgccgctgccaaccgggatgcgcgggtggacgcgcgggggcgccgcag

SEQ ID NO: 11311 - DNA, 122 bp, Homo sapiens
aaccgtcacgtgttcctcttccgcaaccacctggtaatctgcaagccccggcgagactcccgcaccgataccgtcagctacgtgttccggaacatgatgaaggtctgcaggctctgggctgc

SEQ ID NO: 11312 - DNA, 122 bp, Homo sapiens
ttactgtatatgaggcgcatgaaaagtgtaaaggcagtctcttgatttcttgctacagtacgtttttggtactcagctaccttatgaggtagttaactgttttacagatgagaaaacagggt

SEQ ID NO: 11313 - DNA, 122 bp, Homo sapiens
cctggacagcacgaaatccaggctctgcggggtgatagacgggatctgatcagatggtcgcgaggacccggtttaagctacagaaggcctggggccgacaactcccgcagacgccttggctt

SEQ ID NO: 11314 - DNA, 122 bp, Homo sapiens
cctcctttctctctgccaggaacagtagcccccctgcaaggccctccttttcctccagcccgcagcctgcggcctctccggttctgctccacagcccggctgccacacactcgcctctctct

SEQ ID NO: 11315 - DNA, 122 bp, Homo sapiens
ggcagatgagaagctcccgccgaggccaccaggatgcccaggccttggggctccaggaaacgtggtctccacgctcaatctcggctcagccttccccagaagatgcctctagccggacagag

SEQ ID NO: 11316 - DNA, 122 bp, Homo sapiens
gcgtgactcccttggccctggggttctgtggggaccacccagagccaggccctccctccacgctttccaggctggtctgggtgagtgcagcaatggctgcaggggacaccaggacctaactc

SEQ ID NO: 11317 - DNA, 122 bp, Homo sapiens
ctgtctgtactaaaaaatacaaaaattagccaggcgcagtggcccacaactgtagtcccacgtactcagcaggctgaggcaggagagttgcttgaacccgggaggtagaggttgcaatgagc

SEQ ID NO: 11318 - DNA, 122 bp, Homo sapiens
ggtctggaccacacctagtttttctcactgttacatctgccttgccaggcgcatggtaggcgcttagtaagtatttggtgaacgaatggcttgtttggtgacagtccaaaggctggaggaca

SEQ ID NO: 11319 - DNA, 122 bp, Homo sapiens
gactctctgatgccaaagcgggggccacaagaatgcctgggttctttttctgccggagctcgttcctgacatgttttaacttccttccctgtgtaatgcctaagaccagggtgagatggaga

SEQ ID NO: 11320 - DNA, 122 bp, Homo sapiens
tgtgtacaggggaggggtagctacctgctgtcctcacactgggccacccctgcacacaggcgccagcacacctgggccctggagctgagcaggtggcatcagagggcaagactgggcctagg

SEQ ID NO: 11321 - DNA, 122 bp, Homo sapiens
cttcctctcctttctcccgatcaatgcatatttgcaaaaggattaagccacagatttaagcgccgggagcccatttctgccttgcaaaggagaccggactgaaaaacctaaagccagctctg

SEQ ID NO: 11322 - DNA, 122 bp, Homo sapiens
ctttctccactcggatcccgccccgtttgggtcccggggagggagcggggccagaggcggcgccatggggactgtcagccccagcgacggatcggtcatctcccctggccaggcctgggcat

SEQ ID NO: 11323 - DNA, 122 bp, Homo sapiens
tgcatatctcagaggacagagcactcactaccttctgagtcagcccctccactaagagctcgtgatgcttattaggaagtccttcctggtgtcacaatgaaatccgcctccggggaagagca

SEQ ID NO: 11324 - DNA, 122 bp, Homo sapiens
gcggggacagagggaaagaaaccgctttgcatgttgggagtagtagtttgtgtaatatcgcgagctgtcctttagttgactgctctaacagtagaaattaattctcctggatttgatggtga

SEQ ID NO: 11325 - DNA, 122 bp, Homo sapiens
agcgcgggggtgggatcgaggcttgaggcagcccacctggataagcatacttcggatccccgcggtacagatcgatctctcacgctcacaaacctacctcccagacgggtccagctaagacc

SEQ ID NO: 11326 - DNA, 122 bp, Homo sapiens
tggtggagctgctcgtggcgcacggggccgacctgaacgcaaagtccctgatggacgagacgccccttggtgagcttgcggggcccacctccacctgggggagaggacaggcggggagggcg

SEQ ID NO: 11327 - DNA, 122 bp, Homo sapiens
ctccccagattctgcctgctggagcgtatacactcactaatgtaggacccagctgaggcccgagaatccactgctgcaatcactccatgctggaacttgaaggcgagcgtggtggtgccatg

SEQ ID NO: 11328 - DNA, 122 bp, Homo sapiens
gcagagggcccggtggaccacttggatcccaccttcagagaagaggcttcacctagcagccggtacttggcaaatccatctgtttcaggacttaacttgtgttcccaaagcctagaaagcac

SEQ ID NO: 11329 - DNA, 122 bp, Homo sapiens
ccccaggatccgcactcgcccccaacggcagtccggatcctcgacccggcacccacctcccgaagcagcttcaggtccccgtgctggatctcgtacagctgaatgacgccggtgccccgtgc

SEQ ID NO: 11330 - DNA, 122 bp, Homo sapiens
gaacaaaaaaattacacctcagggggcagaatcctgttaaagtcatgaaaggagactgttcgaagacttaaaaaccttttcgtacttaggaaacgccaggggcaaacgtttaaagggactag

SEQ ID NO: 11331 - DNA, 122 bp, Homo sapiens
ggggggtgcagctgctctaacagtgggaggagacaccgacgaaaagcattctgacggccgcgcttccagcgctaaggattcccgcgtagtgagcatttcccagaggtctctggggcatggct

SEQ ID NO: 11332 - DNA, 122 bp, Homo sapiens
cacaaagacggacctccagtaacacttgttctgtccactttaggacctggtcatcagctacgaagtcccagtagctaaccgtgagggtgagacccaactaggtctttgattataggcccact

SEQ ID NO: 11333 - DNA, 122 bp, Homo sapiens
tggcagccgcccgcggggcattgtgggccgtccgcgcgcccgtcccgtcgccgccgccgccgccgcagacccctcggtcttgctatgtcgagctcacccgtgaagcgtcagaggatggagtc

SEQ ID NO: 11334 - DNA, 122 bp, Homo sapiens
atctgctgatgccagccttccaaccatttcccagcttggccaagagccagctctggtattcgtgaaggaacagatcctgggtgaagctagagggaaggccgcagaggcaaaaggagagagga

SEQ ID NO: 11335 - DNA, 122 bp, Homo sapiens
cacggaatcttctacaaaatcttcataggaatctttcagttcctatgctatttaaactggcgcagagcaggaaaaaaaatgtgaaagcttcttaactcattgtaggttatttatttatttat

SEQ ID NO: 11336 - DNA, 122 bp, Homo sapiens
tctccggcttccaggtcctgatgccaaggctgcccctcccagaatccacgaggaggtcaccgtccccgctccgcaccagggaggggctccagaagcccggaggccagcgccgaggtccccgc

SEQ ID NO: 11337 - DNA, 122 bp, Homo sapiens
gctctggtggggctgccaggggagaccccgggagccggggaaggaggccgtccatcccgtcgacgtagaacctcgaggtttctcaaagaaatttccactcaggtctgttttccgaggcggcc

SEQ ID NO: 11338 - DNA, 122 bp, Homo sapiens
cagaccccctactcgctgccggcgaggagctttcccgactaacgacgacgaattaaatgacggcaacagtaataaatgcagctgggtttatgatggagcgtttcctccctgccagcctccca

SEQ ID NO: 11339 - DNA, 122 bp, Homo sapiens
gcgccgtgtgatcccaccctcgtcaagtgcgcgacttctgccgtcacttcctttgttcggcgtgctcaggttcgcgccaaactatcaccaatcagacgacgccttcatctaaagggctgtag

SEQ ID NO: 11340 - DNA, 122 bp, Homo sapiens
acccccgttcccagattttcagtccagtctcttgcagaccccatctccgtggctctcactcgctctccctccccgcccccaaatctcgcacccctgtcccgaggccgcacctctagcgctac

SEQ ID NO: 11341 - DNA, 122 bp, Homo sapiens
cgctcctccctcagcgcctccctctcagctccccaggggcctggcccccgccgtccagggcgcaaggaagccggggtccttttccgctgcgcctacctcagaggatgtggcggcgggctcgg

SEQ ID NO: 11342 - DNA, 122 bp, Homo sapiens
gttacaggtggttctagaaaccaggtaagaatgtcttaggaggctgggcaccgtggctcacgcctgtaatccctgcactttgggaggcgtggggggggggggggggtggatcacatgaggtc

SEQ ID NO: 11343 - DNA, 122 bp, Homo sapiens
gctcacggctgcggcgctcggctctctccgtgccccggcccgggggctctttccgaaggccgaattccgcagatctctgccgggccccgcccctatgggcaaggaccaatggtctctctctg

SEQ ID NO: 11344 - DNA, 122 bp, Homo sapiens
ggtcactcagagcacgcgggaaggggcaggagtgggaggtccctcctcggtgcccggctgcgccagctgctgccgtgttctggtgtaccaggccggaccttgcgcaatgcctttggggtaat

SEQ ID NO: 11345 - DNA, 122 bp, Homo sapiens
gctcgccccagtgcttgccacacacaccctggggtctcctcagaagcagtgcctgtgccccgagatgcacggccaccaccccgcccctgaggccctggatacacggccactaccccgccccc

SEQ ID NO: 11346 - DNA, 122 bp, Homo sapiens
ccaaccaaccttatttgtaactccaaaaccgaattcttaaccatgatgctattatgcgtccgagagtacatgaggtgtcccgatttttgttttattatggtcaccataataattacagacgt

SEQ ID NO: 11347 - DNA, 122 bp, Homo sapiens
gagcagggctgctgagcagctcccagggctgggcagggttcaggctctccggctggttgccgcatagcgggcagactgtgagtggggatgggctgcttactcacatcccggctgtgttcctg

SEQ ID NO: 11348 - DNA, 122 bp, Homo sapiens
ccgagcgagtgtgggacaggcagcaaatcagtgccccctggccaggcagaacgagtcgaacgtggaagtagggagcaggcggaggccggcgcggagctgcagttaagcaagccgggtctggc

SEQ ID NO: 11349 - DNA, 122 bp, Homo sapiens
aaggctgccagcacccaggcgcaggcccgagtgctcggagacctgggccgcctggagagacgccccttatgacgcagccacatctcattggtcgaggcctatgagcgcctcgcatcccaaga

SEQ ID NO: 11350 - DNA, 122 bp, Homo sapiens
gagctgtacagagaagcacctattgataaaaaggggaatttcaattacatcgagttcacacgcatcctgaaacatggagccaaagacaaagatgactgaaataacttcaaattccagccaaa

SEQ ID NO: 11351 - DNA, 122 bp, Homo sapiens
cctgcctgggttgtccctgaggcccgagagagcccttggccccttcttccctttttaatacgtcccttcatcttcctttaaaccatgctgcactttgacatgtagaggtgatcactctgaaa

SEQ ID NO: 11352 - DNA, 122 bp, Homo sapiens
ggggccctcgggccttttcccggcgtccatttagtggcgggaaaagcgaccttttctgagcgcgtttgcctgttgagtggtagcctttcccctcaaccagcaatggaggagcagccccagat

SEQ ID NO: 11353 - DNA, 122 bp, Homo sapiens
ttccaaacccgtcttttttgtcacattccgtcagcaagtgctccgtcagactggatatctcgaccacctggatttcgaaatacagagcaaagcatgttgctgagaaagcggcagcgccctcc

SEQ ID NO: 11354 - DNA, 122 bp, Homo sapiens
acgcaccaaaacatcagggctgtggtgagtgccgcctggcgccgtgatggtttcggtgaccgcacagcactccgggtgggctccgggccagaagcacatcttttcattcgcttttctgtgga

SEQ ID NO: 11355 - DNA, 122 bp, Homo sapiens
tcaactttgacaaagtgtgaaacgtctgtaaaaaggagttctctgatgtgtgagaggagacggaaccgagaagaaaaggccgtactctgccccccgcgggacccaggtccccgcctgctgca

SEQ ID NO: 11356 - DNA, 122 bp, Homo sapiens
cccacagccgcggaggcgtgggcgccgggcacggctttacccagaatgcctctggagggccggctccccgcgccccggccctgccgcccaacgctcccggccctggggccctgactgcccgc

SEQ ID NO: 11357 - DNA, 122 bp, Homo sapiens
ccccagctggtggcagttctgctgtcttcaactcacagtttctaagatcactttggtagtcgtcatcaccattccagcccctacaaaggaggaaagagcgtagagtagaatatttggagtct

SEQ ID NO: 11358 - DNA, 122 bp, Homo sapiens
ttggtgtctcttggtgttactgatcgatgtcttcctctgctttcagactgtctctctcagcgctatagtgttcacaggtgaaaactcaaaggtgtgctttttccttcacagcgatctaatta

SEQ ID NO: 11359 - DNA, 122 bp, Homo sapiens
aagggaacctctggcggaagaggcttccggaacggacccggaaggggcaggtcttgtgggcgggtccaatcggctgggagcctcgtggaggctgaggtgagtcctggaggtgcgtggttggg

SEQ ID NO: 11360 - DNA, 122 bp, Homo sapiens
atggccaggaggtcctgcctccacctgtagtttctgcaatttcttacacagagggtaaaacgagctctcctgcattctcacctaactccagtcactcacgctggtatgagtatatatccact

SEQ ID NO: 11361 - DNA, 122 bp, Homo sapiens
tgtgtgtgtgttgggtgggggggtccctgggtgctgagggcaggcgtgtgagtgtgtgtgcgttgggtgagggggtccctgtgtctgtccacgtgtctgcctgtgtgtccatctgtgtgtcc

SEQ ID NO: 11362 - DNA, 122 bp, Homo sapiens
tcttctgtcttgacccctcctcccctcactcctgcaggactggcgacatgtcctggcttacggggaaaggatcctgagctcacatgcagtagacttgggcaggcaaagggggcaccaagggc

SEQ ID NO: 11363 - DNA, 122 bp, Homo sapiens
cttggggctgatccaggtatagaaatgcctattaaacctctgtggttctccatgaattagcgtagctcccaggacttaagttgaagtgcattctagccagttttctttttttgagacgaagt

SEQ ID NO: 11364 - DNA, 122 bp, Homo sapiens
ccgccagctttctcagaagctaaagtccagcaaaatccagttcctttgcacttggttctgcggtttccaggcgtgttagtacatctcctaccagactcaacctcaaaaaggccttccctaga

SEQ ID NO: 11365 - DNA, 122 bp, Homo sapiens
caccgtgacctacatcagaaggaagtgggacggggcggtgggtggggaaaacgcaaatggcgctcgctgtgaatagcagtgttggagaacatcacagccagcagtcgaggatgaaaggcatt

SEQ ID NO: 11366 - DNA, 122 bp, Homo sapiens
attcttccactatgtgtttttgggactgggcatatcctctagatggtctcagcatctcaacggtgcataggttgtctgccatgttggaccagttaggaagagccagcccacagctctgggtc

SEQ ID NO: 11367 - DNA, 122 bp, Homo sapiens
ctggcctctgtcccaccgcccccggtgccaggaagcgcttttctctccccgagacccagacgcgccgaaagactcgcgcggtcagttccctaccccacgccctgggctgtgcgttttcttgc

SEQ ID NO: 11368 - DNA, 122 bp, Homo sapiens
cctcgaggggcccaggacaagctcggggcccaggtggccgggagggggccgcctgtgtctcgcccctcattctctgctctgacccgggctcgcacctcccctcgttctctgctctgacccgg

SEQ ID NO: 11369 - DNA, 122 bp, Homo sapiens
ctcaccgtgtacactgagatagagctcagggtcgaggtccggccggggcggcggttcccccggtccctggcgcaacagcagtgcaccgggtctcttggccaggccctttccgctcgcatcct

SEQ ID NO: 11370 - DNA, 122 bp, Homo sapiens
ggggcctgaggccagcagacccgggcggcctcctctcaggagaggtccccgtgggggccccggcctccgtcaggccgcgcaccccacctgggagccccacacattccaggtgggaagggaga

SEQ ID NO: 11371 - DNA, 122 bp, Homo sapiens
acagaaaaactgaacagaaagtacagagagttcccatatactacctctccccgctcccttcggttttccctgttaacatcttgcattagtgtggtacagtttttacagttcatttgggtaaa

SEQ ID NO: 11372 - DNA, 122 bp, Homo sapiens
gtttttgggtgagtgtggagtttctttttgattgttgcatgtggggaagggcagagtcgacgggaacagtcactgcgggcaccctagccctggtgcgtctactgtcctctgctcggctcccc

SEQ ID NO: 11373 - DNA, 122 bp, Homo sapiens
gagggaaactgaggtcccgacaggaccagggtcccacagcaaggcaggtataaggagagtcgggggcctgcatcagcatccagtctcagctccgctctgggtatctgggccaggctcctcct

SEQ ID NO: 11374 - DNA, 122 bp, Homo sapiens
caggtgatccgcccgcctcagcctcccaaagtgctgggattacaggcgcgagccaccatgcgcggtccctaaaatgtctttatatgtagatcatctagtccaatttggtcaatgtatatatg

SEQ ID NO: 11375 - DNA, 122 bp, Homo sapiens
ccacacacacctcccaggacgtcccaaggggcctcagcccaccacacacacctcccaggacgtcccaaggggcctcagcccaccacgcacacctcccaggacgtcccaaggggcctcagccc

SEQ ID NO: 11376 - DNA, 122 bp, Homo sapiens
gcatgggaggtttcccagtgacttcttcgtgcccccattcaggagagcctccagagctctcggcacaaagggcccctaactctgggtcccacacaggaggccacatctggaagctctattcc

SEQ ID NO: 11377 - DNA, 122 bp, Homo sapiens
gggtgccagcaatgagttggggccacagtgagtactgtctccattaccccagcctctgggcgaaggggcttgtcctaagtctcagggctggctgagtggcagctggctctggggactgctac

SEQ ID NO: 11378 - DNA, 122 bp, Homo sapiens
ctcaggggatgtttcctctgctcgcccagtggggatgttggaaggtggggatggatggatcgatggacagtgttgttgtttgtaccaggaagctcaggtacactctgggatcaaactgtccc

SEQ ID NO: 11379 - DNA, 122 bp, Homo sapiens
tctggatgtaggttgggttcctcggaagcacacgtccgcaggctcatttttctcttttcccggtgtgaagcgctgaaggtgattctcgtctgctttgagaggcagctcggaagccagtggta

SEQ ID NO: 11380 - DNA, 122 bp, Homo sapiens
ctttggtataaccatttatttactgtggccaacctatggagtgtattgtccctctcatgccgtgaattcattgtcactaaatgaattcatgatatgagaattcatctcaccaaatatgtttg

SEQ ID NO: 11381 - DNA, 122 bp, Homo sapiens
cgcgccctctgccaatgagcgaggtccgagaggcccgtcgcccagcccagtcccgatcggcgcacgccgctgttcgcgtgtctggttccaaataaagtttttcgcgactttgaatttttttt

SEQ ID NO: 11382 - DNA, 122 bp, Homo sapiens
gtgtgggggatgagggtcttgagggactggaatcccgcgttgatgctctgcatgcgtctccgctcgttgctgttggcgatctcccgccgaatccgccgctcctggtcccgctgagtctcggg

SEQ ID NO: 11383 - DNA, 122 bp, Homo sapiens
cgtgatccgcccgccccagccttccaaagtgctgggattacaggcgtgagccaccgcgcccggccccagcccagaatttttaaaattagttgttaggattctgctttcaccttggtgaaaac

SEQ ID NO: 11384 - DNA, 122 bp, Homo sapiens
gtgctcttatggaagtggtattttagtggaggagacacataataaataaatatcacatatcgtacatcacatatcagtgagtactaggaaggaaacagtgcggggaaggagaatggggaacg

SEQ ID NO: 11385 - DNA, 122 bp, Homo sapiens
atccaaaggatgacgtgttcaggccaattatttgatggtgtcaaggcacccagatgttaacgcccgtcagtacactgtacccagggcgcccacaccccgcctttagttaacgcccctcagta

SEQ ID NO: 11386 - DNA, 122 bp, Homo sapiens
tgagaagtgaggagcccctccgcccggcagccaccctgtctgggaagtgaggagcgtctccgcctggcagccaccccgtccagcagccgccccatccaggagggaggtggggggtcagcccc

SEQ ID NO: 11387 - DNA, 122 bp, Homo sapiens
ccgggccaccacgacccccagggaggggtggagtggacacagccccccaccgtcctctcccggcaggagcgggtcttcctcagcgtctccaattacatcttcacggccatcttcgtggcgga

SEQ ID NO: 11388 - DNA, 122 bp, Homo sapiens
cagacacacacagacacactcacacatagagtctctcacacagacactcacagatacactcgcatgctcacacagggacacacagatacagttgcacacacaaatacacacacagatactct

SEQ ID NO: 11389 - DNA, 122 bp, Homo sapiens
tttaggagtcatgaggctgagaacctcttcacagggcctgctgccccacccagggggaaacggaactgcctaaaatgggctggtccagtaatgtcccatccaaaatgcaaatttatccataa

SEQ ID NO: 11390 - DNA, 122 bp, Homo sapiens
ggaacacaaatcggctcatcggagagccagctgcttccttccaaggcggggaacgttgcacgacacgccgcctggaactgcgcggaggcagtaaaaatcaatgtttccatttgtggcccatc

SEQ ID NO: 11391 - DNA, 122 bp, Homo sapiens
gagagaaagctgagttttccagacaggggaatagcaatagagaaagggtttactgcaagtcgagctggctaaatgggaggcaggagttttattattactcaaatcagtttcccctacaattc

SEQ ID NO: 11392 - DNA, 122 bp, Homo sapiens
ctgaggaagtcctcggcgcgctgctggccgaggcgctggtccacggtgggctcggccgcccggctcttgttggtgttgttgttgcggttctcctgcgggtccaccaccagcggccggtccaa

SEQ ID NO: 11393 - DNA, 122 bp, Homo sapiens
aaggccaaggccagccaggacaccccctgggatcacactgagcttgccacatccccaaggcggccgaaccctccgcaaccaccagcccaggtcagtctcagcccccagagagcccccaccaa

SEQ ID NO: 11394 - DNA, 122 bp, Homo sapiens
gccggcttctaaggcggtttgagaccttaagaccctaaatccttggcgcgcgtgagcgcccgcgccgctccttacccactcccagggctaggggtgcgaggttcaccgacttgattctctcc

SEQ ID NO: 11395 - DNA, 122 bp, Homo sapiens
cccagtttccctagcctcagtctcctcatctgtaaaacggagaggctaacttgtgttgggcgtcaaatcaggtctcaacgacagtgcttcctttctctgtgattcaggcagggatgacctgg

SEQ ID NO: 11396 - DNA, 122 bp, Homo sapiens
ggcccgccgttcaagtggggagcccagaggtgctccgcgccgtgggcggggggcggttggcgcgcacaaggccggactccggcggggcgcacctccacacgcaccctcgcgggcagcgggtc

SEQ ID NO: 11397 - DNA, 122 bp, Homo sapiens
cccgcctctctggaccttggttttcttacacatattttgtatatttatatgctctctgtccgatctgtgcatgttatttttctttttccgtgagtcaaagtctgacctttattttcaacatc

SEQ ID NO: 11398 - DNA, 122 bp, Homo sapiens
gggcttgtatcaggaggaggaagttgacaggtgaaataaggggagggcatgcctgccaggcgaacagtctgtgattgggaagtgtccagtctgcaccatgaccccactgtccaccttcctga

SEQ ID NO: 11399 - DNA, 122 bp, Homo sapiens
aagaatatcaaaagggaaagcttggcttgcatggacgtaattaacctaaaagtctttaaacgtttctcccgagtgttggagtgactgtttgcacacatctgttgtgttttgcctgtgtgcat

SEQ ID NO: 11400 - DNA, 122 bp, Homo sapiens
ttaaagccactgtcagtggtgtttaaattggtctaactacacaatagagcaatttggcaacggctagtgaagtttaagatgcacctactctatgacccagaaattccacttctaggtatcca

SEQ ID NO: 11401 - DNA, 122 bp, Homo sapiens
tagcaggagactcctcttgggaagggatctgtggagatagagagagggagaaggaaaatccggtggggagccaccagcagccacctgacaagacccggctgcagcaatttttagagtgaccc

SEQ ID NO: 11402 - DNA, 122 bp, Homo sapiens
ggcctctatttctagtaactcactcatttcctgacttggacctggctggtgctgtatcctcgtggatggcatttgcgccagggcagaggttcagagcagttgtccgcttggcagaagtcagg

SEQ ID NO: 11403 - DNA, 122 bp, Homo sapiens
ttttcctagcttcacaaacaaaacccggatgtgacttggaaacggaaaaaaaaaaaggagcgggggtgcgcggagaacacaaagtaaaacttctgctgttcccagtcctgcagccccagccc

SEQ ID NO: 11404 - DNA, 122 bp, Homo sapiens
gagaggaaggggagagacatggaacttggctggtctgcagggaaatgccactgttttggccgggagtagggggcgggagtggcgggagagggggtggccggctggggaggagccagcctggt

SEQ ID NO: 11405 - DNA, 122 bp, Homo sapiens
ggtggccagggagggctgcagtagtggtgagcaggtgagctctgggcattcagaagccttcgggctgctaccaaccccaggacctcacagattgacaccatagcgtggggtggcaaagtgac

SEQ ID NO: 11406 - DNA, 122 bp, Homo sapiens
ctcgcctggctcctgcgcccgccgtccagggcccctgtccaagctcgcggacgccggcggcgttttccagctcgagtgctcagcctagggcaggctctgcgtgcgccccctcgagtgccggc

SEQ ID NO: 11407 - DNA, 122 bp, Homo sapiens
tctcctggttttcaaaactccctttcagccctgcttcccattaataactgtgagtgttgccggccacagagcctggcagaggctgagacaatggagctattggaggctggctcggagcgcac

SEQ ID NO: 11408 - DNA, 122 bp, Homo sapiens
cttcccaagaccctgcatttggacttcaggactacagagtctgctgtccagacacccaaccgagatgtagctccccgggcacccctggggccctgcccacggctagtgaggatcttggggga

SEQ ID NO: 11409 - DNA, 122 bp, Homo sapiens
tataggacagaagactcttcccaccaagcagtatttgtgatttaagtcaccttttcaactcggcagtggttttcagaaaccagacactaaaggataactggaaggaaagtgctttttcaaaa

SEQ ID NO: 11410 - DNA, 122 bp, Homo sapiens
caatcattcagcgacagtggcgggcaaacccctcccggggcgggggaggtgtgagcttcacgaaggaggttgacaccaacgtggccaccggcgcccctccacgccgccaacgagtccccggg

SEQ ID NO: 11411 - DNA, 122 bp, Homo sapiens
gcgggtccgggtccgctgcctggcgctgcgggcggcgggccatggtggtttggattgagccgggcccggccggggcgccgagtcggagggggtggcagtgagcggcggcagaggctacgggg

SEQ ID NO: 11412 - DNA, 122 bp, Homo sapiens
gagtgtgttgggagaatagccacgcgttgtctgtcctggaaggaacaagccagtgagagccggtttaatggggcggccggcgaaaggggcttggtgaggcccgcgctcctcggggtgggggc

SEQ ID NO: 11413 - DNA, 122 bp, Homo sapiens
ggtatttcatacagttattgtgggcattagacacagtaaccgaagtttcaggagtggaaccgctacgtggaagtagacgttagcacagtctctcgtttgtggggtgggaacagggtcatgtc

SEQ ID NO: 11414 - DNA, 122 bp, Homo sapiens
caacagaccagagaatgagtgccactggctttgaagagacagatctcacctaccaggtgtcggagtctgacagcagtggggagaccaaggtgtgtttgggttgcctatgtgagaggagggaa

SEQ ID NO: 11415 - DNA, 122 bp, Homo sapiens
ctgtaaattcctagcattctggggggccgattgcttgagcccaggggttcatgactagcccgtcttaaatagtgagaccccatctctacaaaaaataacaaaattagccaggcatggtggtg

SEQ ID NO: 11416 - DNA, 122 bp, Homo sapiens
cactgagccccacctggcagaaaatcagcattttccagatcttggctcccttgtggtagacgttcagcttcctctctatctcctctgtgggagagcgggtgtgagtgctgcggcccccaccc

SEQ ID NO: 11417 - DNA, 122 bp, Homo sapiens
gcaggctgtgggagccgctcagaggcgctcagcaacaagcccctggggggctgcggggtgcggggagagggcaggagaaggttcgcctgtgccaaggctcattaagcgccggtgttctgagg

SEQ ID NO: 11418 - DNA, 122 bp, Homo sapiens
agctggacgctagggtcttcaccctaacgcaaagcaaaagccgaacggaacgggagcaagcgaacagaacaggagcaagcagcacacacaggccagtgatgtgcaagaagcggagagaggtg

SEQ ID NO: 11419 - DNA, 122 bp, Homo sapiens
tgcctgtaatctcaacactttggggagccaacacaggaggactgcttgagtccatgagttcgagaccagcttggagacttagtgaaagccatctctacaaaaaaaatgtaaaaagtagctgt

SEQ ID NO: 11420 - DNA, 122 bp, Homo sapiens
ccagttctgcgaggccctgcaggatgcgtgttggagccgcctgggcgggggccggctgcccgtcgcctgtgcctcgctcccgacccaggaggatgggtactgtgtgctcattgggccggctg

SEQ ID NO: 11421 - DNA, 122 bp, Homo sapiens
gcgtgccttgcttttccttcaccctccagcatgattgtacatttcctgaggccaccttggcgtgcagaactatgagtcaattaaacctctttcctttataaattacccagtctcaggtagtt

SEQ ID NO: 11422 - DNA, 122 bp, Homo sapiens
gcttcatacctcctgcagaaggtcctcttcattattcatctcaacactttttaagttcagcgttagaaaccacaatatcctcaacaaatgcattcaacatgtatttatatgtgtacctacaa

SEQ ID NO: 11423 - DNA, 122 bp, Homo sapiens
catcagccaccttgctccccgtccaggactctaaccattggagttcaccttctggaagaacgtcgctgcccagttgaatagggggttgggcatactggagctcccacttgcagtggccaccg

SEQ ID NO: 11424 - DNA, 122 bp, Homo sapiens
taggggaggggctggctccgctcggcggccgcgacttgggctccgagacgcgcccagcgccgagactcccccgcgcgccggcacactctgcccctggcctccgccccttcccttcctccctc

SEQ ID NO: 11425 - DNA, 122 bp, Homo sapiens
cctgggcactgccaaacggttcaacgtccggagtggttacggattcaccaacaggaatgacgccaaggaagatgtcttcgttcactggacagctgttaaaagaaacaaccccaggaagtttc

SEQ ID NO: 11426 - DNA, 122 bp, Homo sapiens
gaggcggggacacgccggggagcacaggctgctgagccagagcctgagcacagtcggagccgagagcatcaggtgggcttaaggtttcttctgactcaaagcctgtaatttacaactgccca

SEQ ID NO: 11427 - DNA, 122 bp, Homo sapiens
catcgcgactcacttccctccagttctgtttctagtttttccttcacagcagagcttcatcgaagctctatgcccaccatcattagttccgctgtcttctcgcggcgaggtgtgatgcggga

SEQ ID NO: 11428 - DNA, 122 bp, Homo sapiens
aggagtgtcttcgtcacccaacttcccagccagggaaacaggctgtcccttcacagaagtcgcctattccgcttccattttagtaccaagcaaggaaggctctaaagcatttccaacggaat

SEQ ID NO: 11429 - DNA, 122 bp, Homo sapiens
ccccgacgggctgatggatgacggccggggtggctgcgtggtggagaaggaatgcccttgcgtccataacaacgacctgtattcttccggcgccaagatcaaggtggactgcaatacctggt

SEQ ID NO: 11430 - DNA, 122 bp, Homo sapiens
ataagcggtgagtgtttgcttgtgccacccgtgggtaaactgcccctcggtgtgtgtgcgcgcgcgcgcatgtgtttttgcttgtgtatctataaaatgtctgatttggtaaatgcatgctt

SEQ ID NO: 11431 - DNA, 122 bp, Homo sapiens
ccaagggttgagcaaggatagttgatgactccatgctctgccactctccaggtgactctgcgcaaggtgttgaattctttagctcaactttccttttctatagaatgggaagaatacccatc

SEQ ID NO: 11432 - DNA, 122 bp, Homo sapiens
aggaggcgggctctctggccaagctgattctaacagggagtccaggaaggcatgagggggcgggagaaggcctggaggggcggaggagaaagcggccggctatcagggtcgggagagggcgc

SEQ ID NO: 11433 - DNA, 122 bp, Homo sapiens
cgcagcctgcacgcgcgccccatggcgcaggatggggaggaagacgccacagagacctgccgacactcgtcatccctaagctgcctgcacccctgctttgggccaggcatgcctgagcgact

SEQ ID NO: 11434 - DNA, 122 bp, Homo sapiens
tcttctttttctttttgctcacagtaggatcaaaaatcatctcgtccccagacatggctgcggcttgagtgggcttggcacggacgggaagtcagacgggtcaaccccagaccccggctgca

SEQ ID NO: 11435 - DNA, 122 bp, Homo sapiens
ctctcatggacttggctctacccacctgagctggcagaggaaggggacggaaacccagaacgggggctccgtgagggggaggacagcaccatgtcctcctgcagcccctgggcagcggtctg

SEQ ID NO: 11436 - DNA, 122 bp, Homo sapiens
aagctcccggctcagcccctccacagtccacctcccaaacacccagctctccaagggtgccgggacctgggcatggcacccacctcgtccgccgcctccagcttggggtcaaactggcagaa

SEQ ID NO: 11437 - DNA, 122 bp, Homo sapiens
agacgctggggccgccctctcgcctcccagctgcccccgcccctgtcgccggccccacctcgagcactaccaccgacacgatggctgcctccgggctcagccaggggaagaggcgctgcagc

SEQ ID NO: 11438 - DNA, 122 bp, Homo sapiens
agacacggccaagcgcccgagtgggggccgttggttggtgcgcggctgaagggtgtggcgcgagcagcgtcgttggttggccggcggcgggccgggacgggcatggccctgctgctgtgcct

SEQ ID NO: 11439 - DNA, 122 bp, Homo sapiens
ctcatccctggtacgaggcgtgcgtctctcctccagcggccccgccttgctcgccggcctcgtgagtctagatctacctctcgacccactatgggagttcccccgggacaggtgcgctgagc

SEQ ID NO: 11440 - DNA, 122 bp, Homo sapiens
agccacgcctgagacctccatgccaggcattacaggcgctgccaggcattataggcacagcgtcggcagactctggcagggggtagcccctttcatcttcatcacagccccagaggtacata

SEQ ID NO: 11441 - DNA, 122 bp, Homo sapiens
gactgtctgtttatttgggatagcccggcgagggggcgctggagattatgggggtgggggcggtttcttggggaggcctgggtctatggagtggaaaccaatctttgatgaatttggtcaca

SEQ ID NO: 11442 - DNA, 122 bp, Homo sapiens
aggatgaagggcttccctgtggtaatcaacagggccctggcacaaacacttctgacaacacgcttctgtgtgacaatgatgaatgtctgtagactttagaaagggttgagaatttttggggt

SEQ ID NO: 11443 - DNA, 122 bp, Homo sapiens
tctcatcagatcgagactccgaatacgtgctcaatgccacagtgcatgccttgaccctaccgctggaggggagaacctgggcccagtgagcttaatcagtcctcacaaggtcggggccgctg

SEQ ID NO: 11444 - DNA, 122 bp, Homo sapiens
aactcttagtagggagaagtgaaaacattcctaacccagtaggtgcagggtttgtagccccgcagccccacatgcactcctggtatttgtaatttgcagtgatgacaaactgtgcctctggc

SEQ ID NO: 11445 - DNA, 122 bp, Homo sapiens
aacaagagatagtgcctataactgaaatatcaagaaagagcaaaacaagcacatttatttcgagatatggagataaatataaaatatagtcagttaaaggagttgaaaatgggtgcctctgc

SEQ ID NO: 11446 - DNA, 122 bp, Homo sapiens
ggtgctgaggcctggctggggacccacagtggagcagggagagccgcgaggggggtgccacgtggctctttgggagtgactctgtgtcctgagtcttatgggcatctggcagggtgagaggc

SEQ ID NO: 11447 - DNA, 122 bp, Homo sapiens
gaggcaaagtgtggccccggggctctacctactgatgtgtctcttatttgtttggcaagtcgctcatggaaaccattagtgtccatcagtcatcagaaggcggggtggggtggccatcctgg

SEQ ID NO: 11448 - DNA, 122 bp, Homo sapiens
tcttttgcctgcagtggagtgcccaacctccacaaacccttactaatcaacctttgatcacgcagcctgggctttcaccactgagcaggggtgaaggggacggtttgagcaaaggcctggag

SEQ ID NO: 11449 - DNA, 122 bp, Homo sapiens
acattaggctagtgagcaccattgttgtggggagatgtgatggaatattttgttggtggacggtttaagcctgaaatgaccttctcaagaccccttgatatgcaaatctgagagatggcatg

SEQ ID NO: 11450 - DNA, 122 bp, Homo sapiens
cttccccaagtcagctgggtgactcatacatctgtgagaccctccgtatggagaccggggcggggggtgttgcttaatgcttagaactgctgaaactaccagttcactgtctcagcactaat

SEQ ID NO: 11451 - DNA, 122 bp, Homo sapiens
agaatcacttgaacccaggaggcagcggttgccatgagccgagatggcgtcactgcactccggcctgggcaacagaacaagactctgtccccccaaaaaaaaatatatatattcatatgttc

SEQ ID NO: 11452 - DNA, 122 bp, Homo sapiens
ggagacttgaggcaatacagcttcagtcatgactcaggattttgcgagtgaaagcaagcacgtcaagtgatgtaagaaaattcccccattcctccaacccactggcttcctcctccctggag

SEQ ID NO: 11453 - DNA, 122 bp, Homo sapiens
cctgggaagcatccctggacacttcccaaaggaccccagtcactccagcctgttggctgccgctcactttgatgtctgcaggccagatgagggctccagatggcacattgtcagagggacac

SEQ ID NO: 11454 - DNA, 122 bp, Homo sapiens
cgagggtcaggggtgccccacgggagcgtgcggctcatattattaggaaggtgtccagtgcgtcgtgccccggccgggcgccaggtggcggcagaggccggtgcggcgcagcttcttcggcc

SEQ ID NO: 11455 - DNA, 122 bp, Homo sapiens
tgagaccctccgcgcgctgacccgagctctgagcagaacccatccccgccaccaccaccgcgcctagcctgcccctcagggcgcaccccgcccgcgtcctcaccttgaagcaccccggcgcc

SEQ ID NO: 11456 - DNA, 122 bp, Homo sapiens
acctcatgatccacccgcttcagcctcccaaagtgctggtattacaggcatgagccaccgcgtccggcctactgtttttatatctaagtagcatggtccatgatggtcaaggccatttataa

SEQ ID NO: 11457 - DNA, 122 bp, Homo sapiens
aaggatgccaggatggtgcgggagatggagaaaggtcttgcagctcctttttctggatgtcgttcagtctggaacaatctgagatttcatttgacctgcaggcaggagtatgtatgaaagag

SEQ ID NO: 11458 - DNA, 122 bp, Homo sapiens
tgggtggaaagctttctttgcccggaaactggctttctgaaaccaagggcttttgtgtcacgttcatggagagatggcagtgcgggttgaggcagaagtgctcagtcagaactgatgagtcc

SEQ ID NO: 11459 - DNA, 122 bp, Homo sapiens
ctaattcaaatgctctccgaagcaaataggcttttaagggcaagcctgagaaccaaaccacgatttatttcacagttcttctggaaaagagacttctaagaaccggatgcccaaatgagaag

SEQ ID NO: 11460 - DNA, 122 bp, Homo sapiens
cacttgtttatccattcattcctcaggtccaggatggcacccagttgtcgcaagcccttgcgggtgacctgtgttcccagccgtcgtctccatgatgggtccatcctgaccactgtttcctt

SEQ ID NO: 11461 - DNA, 122 bp, Homo sapiens
gaggcgactgctggaagctgcagggaacagctgcggtgctctgccatattgtgtcttccccggccggtccctcgcctcccggccgagctgacggtgagtcccgggcggagcggtcccctcca

SEQ ID NO: 11462 - DNA, 122 bp, Homo sapiens
atgtcatgctatgctctgccacctggtggttgcaatgtacactgctgtttctgttgctgccgcagttgcctcctacaaggtgcagaggttgggatttaagtctgcaggtgtgatgttcagtg

SEQ ID NO: 11463 - DNA, 122 bp, Homo sapiens
gagcacagacaattcgcactagaaccacgcaggagaaagcaagcactaagaaaacaaacacgaagtgaaggcgcacccagacccggagctgagtgctggccttcgttaattcctatttaacc

SEQ ID NO: 11464 - DNA, 122 bp, Homo sapiens
gaagttggttacaggagagattgtgaataatggatggaggtgggaaaggacaggatataacgcacacctgcagggcctagtcccagccaagggagctggagagtgtctattcttcccaagaa

SEQ ID NO: 11465 - DNA, 122 bp, Homo sapiens
actggatccgacaaacaaaaaatgttcattcctacctgcagcaggaggctggagctgagacgtgggtgttcctgcagctggggcctgtgctcccaggcactcatggcttctctggctggttc

SEQ ID NO: 11466 - DNA, 122 bp, Homo sapiens
cttggcgcttgagcatgcacgacggaaactcagtctggctcagggaggtggcggcggcggcggcggcggtggctgtgtgggccagggaccagatgcgcggcttagcctccaggcctgccgac

SEQ ID NO: 11467 - DNA, 122 bp, Homo sapiens
cggggccactgccctggctcttcccccagcactgcaggtgggagctgcttagttagatctcggctcagaagtcacccctgtgggggcctccaggcccactctgttacatcatcctatattat

SEQ ID NO: 11468 - DNA, 122 bp, Homo sapiens
tctgacttccaaccccagcccagcatccccacagcatccccagacttcctctgtgggatgcggaggagggccaatgggaggagcttctctccaggttggaattcctcagtagaatgcagacg

SEQ ID NO: 11469 - DNA, 122 bp, Homo sapiens
tgagaaataatatgcaaaatgcctagtatgagctgtgatctgtatttcactatattcccgcgaccaataagttgttcaataaatatgtttaataaatatgtaaattctgagtagacatttgt

SEQ ID NO: 11470 - DNA, 122 bp, Homo sapiens
ggcaggagtccacaccacggtcatatgcccagcaggcggccctggcaccaacatgcccagcgcaaaggcacagatgggcccaagtggaccctgggcagacctcccatcccccagcccctggg

SEQ ID NO: 11471 - DNA, 122 bp, Homo sapiens
tggcccttccggccacccctttaaccccagctttccctcccccttctttcgatcagagatcggcggagaccctcgaagtgcgcaaacttgacactcaccctgaccggtaaggaaagcgaggg

SEQ ID NO: 11472 - DNA, 122 bp, Homo sapiens
gacccttcctcactcttcccctctgtgggccgtgcgcattcctggcaaccagtgctctgtcggcttttgcagttgccactggctggctttctggaggcagcctctcgtctctgcctgggtcc

SEQ ID NO: 11473 - DNA, 122 bp, Homo sapiens
ggtcaggcgccgactgcgttcccgagtcacctgtgcgctggcctgcgtgctactggccttcgtgctctgctggctgcccagccaagcgttcacactctgaggggtgctgatcaaactgaacg

SEQ ID NO: 11474 - DNA, 122 bp, Homo sapiens
cctggccggtgattgtttggaagtggacacatgaccccagctaggcccatcagggtggagcgtgagctttcagctgggatgccggtgcaaggctactttctcttgctggaggcgaatcatga

SEQ ID NO: 11475 - DNA, 122 bp, Homo sapiens
aaatagggtagcgttcctaccctggtgtttaatgctctgggtaccacctaaacacgttttcgaaaaccattcccaggtccgacgctttggaacaccctcaagctaatagcatctcggctgat

SEQ ID NO: 11476 - DNA, 122 bp, Homo sapiens
gtggaattcttttgggggataacatttcacttaattggggctcccagttgtatttcctgtcgtcaattgatggtacatgttcacctttgaaaaaccttcctggctcacaaaaacaggcggcc

SEQ ID NO: 11477 - DNA, 122 bp, Homo sapiens
tcccaaccagaagcgtgcatcaggagatgtgatcgtcacgtgtggctccagagggttgctcgagacttgaagacaacgtgttctgtccacctcactgactataatagctcctcgggagccac

SEQ ID NO: 11478 - DNA, 122 bp, Homo sapiens
tcggaagtggcggctgggtgcgcccggcctgcgcgccgttttgttccgctccgcggaaggcgtgtcccgggccacgccaaccagtgggctttgcacactgcaccactccagggctgatgtca

SEQ ID NO: 11479 - DNA, 122 bp, Homo sapiens
catgggtggcacacagagagtgacatggtaggagaccagattggggagcagctaggggaacgggcacaagccaggtcacagaaagccacatatgcagaagtagggagtttggattttatcct

SEQ ID NO: 11480 - DNA, 122 bp, Homo sapiens
ggaaggtcacggcaccactgagacagcctggaagcttctgtgcttcacgaaagatctacgcgtgaagcccccgggaagccaagccccaggaagggcccattatgccgatgaagacacgagag

SEQ ID NO: 11481 - DNA, 122 bp, Homo sapiens
ctgggaggagtgagttccatctgcaggggagctcaggagactcttgaactggacttagcccgagtcctgcaggtagaaggcgccgacccccacctctgctccaagccactgcctcctgaggc

SEQ ID NO: 11482 - DNA, 122 bp, Homo sapiens
catgatccatctgccccggcctcccagtgtgctgggattacaggggtgagccaccacacccggcctctgtgggaactttaaggcccagcaattgaagatatattgctgcaaagaggagctcc

SEQ ID NO: 11483 - DNA, 122 bp, Homo sapiens
acatggccagcacgcagaaggagccctcccgggacccaggaccccccgtggtggactccgcggcacatgcttcccaaggtggtcccacggagggtgttactgggcaccagtggactcgcccc

SEQ ID NO: 11484 - DNA, 122 bp, Homo sapiens
aggctgaggtgggaggatcgctttagctcaggaggtcgaggctgcagcgacctctgatggcgccaccgctctccagcccgggagagagctcaacaacaacaacaacaaacaaacaaacaaaa

SEQ ID NO: 11485 - DNA, 122 bp, Homo sapiens
gacattcccgccagcagagcacgcgtgttccggtacctcccgccctcagcagccctagcccggtcggcgtttgtgtttttaattttggccattccattaggtgcaccgcgatttaatgtgcg

SEQ ID NO: 11486 - DNA, 122 bp, Homo sapiens
ccacgtggcctgccccggcacctgctccgccttacatgtcattatgcgtctccgagacagcgtctctcacatctcaccgtttaaatgagcgtctagcaagtattctatggagtgcaatgctt

SEQ ID NO: 11487 - DNA, 122 bp, Homo sapiens
tcacagtgcacgcatgtgatgccacacttgcagcagaacacacaaagagctcctgcaagccgatgatggcaggcaggcgccccatacagagcggggcaggacggacagccacctcccgcaag

SEQ ID NO: 11488 - DNA, 122 bp, Homo sapiens
ggtagatagtggtaatccacggtccatttgattctccctccactgtgtttcttagtctcccgaggatctcaggacgtgcaatgattcagagctttatctcctcatttgcaaaacttttatat

SEQ ID NO: 11489 - DNA, 122 bp, Homo sapiens
tctgcgtaggtgcgcggacccgggctcctgggttccatccccgccgcgcacctcggggtccgcacccggctcctgccgggcccttttcggccgcaccccgctcccgcaccccgctcctcccc

SEQ ID NO: 11490 - DNA, 122 bp, Homo sapiens
gattctccacccacgtcctgttcagagtcatccactttcctcccccaccccccagactcccggggcctctgcacctggggacactggacacatatgtgcccatgatgatgaggacggtgccc

SEQ ID NO: 11491 - DNA, 122 bp, Homo sapiens
atggggctgggggcccggaagtggtaggggcgtcggaaagggttggtgttcatccgcttgcggaggaaagccaagtacttcaacttgtttctgtagaaattgccagaaatgttgatgccttt

SEQ ID NO: 11492 - DNA, 122 bp, Homo sapiens
tgttttctggggccctggctctaaagtgaactcagaacttagagtagattctggactctccgttgtcagctgcggctctggaatgggctcttagctctggggttccaggctctggttccaga

SEQ ID NO: 11493 - DNA, 122 bp, Homo sapiens
gcagacaatgtgtgcacctatgtggaaggccaaggacatgggctgtggccaggcctgtcccgctcaggccccctgcccggcggccgtctgtgtgcggggcctccctcctggctgtccaggac

SEQ ID NO: 11494 - DNA, 122 bp, Homo sapiens
ccttaacaaaggctagaatgtgggactgatcaaacattagagaaagccccattgccctcacgggccacctgcctggcacacacctgtgtgcacttcccacatatttatggtgtttatcccag

SEQ ID NO: 11495 - DNA, 122 bp, Homo sapiens
agcgctagctctgagcagatgcggactctcttcggtttcctaggcaagatcgacgaactgcgcctcttcccgccggagtgagtatcgtccaccatcactgttcctgctaacgccgcctcagc

SEQ ID NO: 11496 - DNA, 122 bp, Homo sapiens
ataatgtggatagtttagatgcagatttcggggggttgctgatggttgttctagctgaaacggctgttaaatttggacttcatggagtatttgagaagtctaaatttgtgagacctgtttac

SEQ ID NO: 11497 - DNA, 122 bp, Homo sapiens
gagaagaagcagaagctggagacggacgccatgttccggctggagcatggcgaggccgaccgcagcacactcaagaaggcgctgcccacactgagccacatccaggaggcccagagcgcctg

SEQ ID NO: 11498 - DNA, 122 bp, Homo sapiens
agaagcacctggtctgagtctaagaaacatcagtgtttactaagcacttggtctctggaacgcctggctttccaaataccacatcttcccatccactccatcctgccacaggcagctactgt

SEQ ID NO: 11499 - DNA, 122 bp, Homo sapiens
gtttagccctctttatcaccccatccaggcccctttcccctttcactttattactgtctgcggtatagtggagttggtggtctgctttgccaggtgtcacatagatgctcagtaaattgtct

SEQ ID NO: 11500 - DNA, 122 bp, Homo sapiens
cctgatgcattgttaagaaaaactgcccatcagtgagctctgcacaccacattgtaagcacgatggcttatctcctttacattgggagctcggtttccagttccaaactgtatagcagcttt

SEQ ID NO: 11501 - DNA, 122 bp, Homo sapiens
cgaattcaaagtccccgactgccaacatggggagtctcaacgttagtgcctctgctggcccgtacaacaaagtcacttgggaattcctagcacttgcttgtgacttttgatcacttctaata

SEQ ID NO: 11502 - DNA, 122 bp, Homo sapiens
ccggccctactgtcgtgcctgggtctgcgacccccatggaaactggaatagcagagactccggaggggcgtcggaccagccggcgcaagcgggcgaaggtaaggctcgacccttccctcaaa

SEQ ID NO: 11503 - DNA, 122 bp, Homo sapiens
aaagcattccacgccgttttcattcaggtggcctccatttgactcccgacagcctgaactcgtcacgtaggtaagaaaactttttaaagaccatttggactttgctttgtttcagtgaaatg

SEQ ID NO: 11504 - DNA, 122 bp, Homo sapiens
tgtgaagtccttcccagtgtgaaaccgcaatccttcctgcttggggttcccctaagggaacggcttccgccacaggagacccagccaggacaatcgtgtgcttgtcgtttctccaccctgca

SEQ ID NO: 11505 - DNA, 122 bp, Homo sapiens
cgtccatctctcgcggcggggtgacagctgaaggctgccaggggcccccgggggagggcccggccccaaagactgccccttttgggatcatgttccttctgtggctgagacggtcggtgagg

SEQ ID NO: 11506 - DNA, 122 bp, Homo sapiens
cccgcgctccgctcttgaagggttccagtgtgtggtgtttccaactttctcatgtcccctcgggaatccattcgtatcccatgccataagtcgcgctgtctattcttgaccaggcccggcaa

SEQ ID NO: 11507 - DNA, 122 bp, Homo sapiens
ggcaggcatgaggaagtgtcccctagaggaaggaagtagaacctgggccttgaggagcctcgaatctggacaatgtcacctggccaggagaggcaaacgaggtgagatccatgaggccgact

SEQ ID NO: 11508 - DNA, 122 bp, Homo sapiens
cacccacccgccaccagtggggactgaccgcgggctgggcggggctgaagtgggcgcaagcgccggtcgagggtcagtagacacccagcgtggcttctctgcggtcccacaccctctggccg

SEQ ID NO: 11509 - DNA, 122 bp, Homo sapiens
tttggggttcatgtgtagaaacaggatctaaaactacaactggttcggcttgtttttcaccgtcaatgtattttttcctgcatccaatgctactgggaggcctatgagatgaagagttagac

SEQ ID NO: 11510 - DNA, 122 bp, Homo sapiens
aaaggtaaataaaaaaaacgcttacttggcaagttcattgtgacgaattatctacgacaccggaatggaaagtgctttacagattgcaaagcactccttacacatgagtaattagtgttcac

SEQ ID NO: 11511 - DNA, 122 bp, Homo sapiens
aaagatccttgtgctcagcccggaaaaccggaggatggataccaggccgaggggtccctccgtgccccaagagaaagttcaccaagtttagatcccagtgccccgcagcgggtgaaggtggt

SEQ ID NO: 11512 - DNA, 122 bp, Homo sapiens
gtggagagaacaaagagtgaagctgactgagcacacggtggatttgaactgttgcatgggcgggaggtggggtggatgagacagggaggggtcagggggatgctatggctggagctgaggtg

SEQ ID NO: 11513 - DNA, 122 bp, Homo sapiens
ctccggagctctgttctcgctcctgagcagctgctaggtttcccaagcgactgtctcaaccgcccggccgcctcccccgggcagccagagcttcacatctacctccagccgggacccgcccc

SEQ ID NO: 11514 - DNA, 122 bp, Homo sapiens
ttttaggagcaaggtttgttaattaagggagtaccctcaccttcttaccactgccctcttcgtctctcccagcctctatccccatcgtcccctcttctcagtcctagaatcactttatttcc

SEQ ID NO: 11515 - DNA, 122 bp, Homo sapiens
gaggggttgggcgctgccggcgggccgtgaacagtgccatagggaaagctgaatgcaaggcgagaagtgcagagtggacttaggggaggagtcgccacagccgggtggtgagaagcaacagc

SEQ ID NO: 11516 - DNA, 122 bp, Homo sapiens
tatataggattttatttaaagaccttatttctattttaggaaacccaagaaaacatataacgtctttgaaggaagctgtggatatgacctgccatggagagccatctctttataattcccta

SEQ ID NO: 11517 - DNA, 122 bp, Homo sapiens
gccccccgcgcgttgccgggagacggcgcccaaccttcctctgcagcgcccctaccgacccgcgctccgcagctcctgagggctttcgagcccagatggtcatctgagacgagaggtggcgg

SEQ ID NO: 11518 - DNA, 122 bp, Homo sapiens
gtactctgcgcacaggtacttcagcagcacagtcattaggaacgtaccgaatccggtccccgtggtgctgaggccctgggcgagggcgcgtctcttctggaaatacctgcccaccatgacca

SEQ ID NO: 11519 - DNA, 122 bp, Homo sapiens
ttctgttgggttccaggggaaacacagataagatagcaaaagtgtggagcacaacgggcccgcatgtaggtccaggttagactcttgccgttgctgattaccagccaggctcttcccatccc

SEQ ID NO: 11520 - DNA, 122 bp, Homo sapiens
cctaacctctcttcccgtctccttccaggtccagggagtcggtagtaagggatggcgggacgtcaccacctttttttcggggaaagcagagggccccttggacaggtatgctgtgtcccctc

SEQ ID NO: 11521 - DNA, 122 bp, Homo sapiens
ggaagagcggatgcttctgggaaggccccgtaagaagccgaggagtgcgcgggttctccacggctgccacggagactcccgtggaagtgtctgtgtgatgccgtaaagccggagcctgtccc

SEQ ID NO: 11522 - DNA, 122 bp, Homo sapiens
gaaagacctttctgcaaaagcgctgcttaaacccagaactagaggataagtgggctaccacgcaaagaagagatggaaaagcattctcagtgaagcaaagtggtatcatttgaattaccttt

SEQ ID NO: 11523 - DNA, 122 bp, Homo sapiens
agctgcctccttttataaggatacatattggattcagggcccaccctaagccaggatggtcgcatctctagatctttaccttaattatatctgcaaagacccttattccaaataagattgca

SEQ ID NO: 11524 - DNA, 122 bp, Homo sapiens
cttttcccactatgtttactttagaaacgcagtcacagaccacaggaaatctgcctggcacgccaatcactgccaacaggtacgctcaatcagcagtaagcccagacagctcatattgagag

SEQ ID NO: 11525 - DNA, 122 bp, Homo sapiens
ttcagaaggaagccctctctgcacagactggttaaggtttattagtccttaaaattccttcgagatgagttggtatttatttccctgcaaagcttatgtaaccgtaagaggatactggggct

SEQ ID NO: 11526 - DNA, 122 bp, Homo sapiens
gaagttcatctggcactgcccacaggtgaggaggtcatgatccccttctggagctcccaacgggccgtggtctggttcatcatctgtaagaatggcttcaagaggctcggctgtggttggag

SEQ ID NO: 11527 - DNA, 122 bp, Homo sapiens
gtggtgacacctcgcctggagactcagagctgcggaaactacaactcccacaaggctgcgcgtaccgcggctcccaagaagtggcttgtacccgcccccctcgcctgcgggcctcgcccctc

SEQ ID NO: 11528 - DNA, 122 bp, Homo sapiens
gcagtcggtaccaggcgagccgtggtctttgacctttgacacttgccaaagcatcgagtgcgattggaggggtgagtctttcggggggaagtgagctgggaaacggttcctgggcacctggg

SEQ ID NO: 11529 - DNA, 122 bp, Homo sapiens
aaccactagatttcgaagaatacaaaatgtattcaatggaagttcaagcccaggatggtgcggggctcatggctaaagttaaggtactgatcaaagttttggatgtaaatgataatgcccca

SEQ ID NO: 11530 - DNA, 122 bp, Homo sapiens
accttggatcattcctaaagtacaaattctgttctcgaaccacaaacaaggctaaaagatcggaggaaattcagtgaatatacaggattggggttgtgtatttttaaaagtattgagcttta

SEQ ID NO: 11531 - DNA, 122 bp, Homo sapiens
agccgacccaccctagagacactgtgatgggggcgggagcttgaacccattccaccctcacgtaaatggagatacagctggtgaggaccctgtacccacccacaggcctggcactacgtggg

SEQ ID NO: 11532 - DNA, 122 bp, Homo sapiens
caaggtctgggcacagccagtgggcgggcacagccagtgggcagccacagcagaggcctccgttatctgcagggcagagggctcggcctgtcccggggccccccagttcacccgccggcccg

SEQ ID NO: 11533 - DNA, 122 bp, Homo sapiens
atagtgagggagttctcatgagatttgatggtttaaaagtttggcacttcctcccttgctcgctctctcctgccaccatgtaagacatgccttgcttcccctttgccttctgtcatgattat

SEQ ID NO: 11534 - DNA, 122 bp, Homo sapiens
gtagcatgaaaggcttgagatgtatatccaggtgtgctttgtaaatgagaactccagagacgacatttaggatctgacaaaaagaaattttcagtgaaaatcaagcttcctggaaaggggat

SEQ ID NO: 11535 - DNA, 122 bp, Homo sapiens
ccctggggcccaaggagggctgccccaggcagtggtgtagacaggctctcagagcctccacgtggcccagacttgggctggagggactgaaggtgggggcgcagtggggccctggggaagcc

SEQ ID NO: 11536 - DNA, 122 bp, Homo sapiens
cgacttgtcccctcctccgctgctagggggagggggcgcccggcagccgcggctcgcgctcgcccaagttcaacaaccggtgcgagcgaagctgagcgcacgtccttcttctcttgcgtggc

SEQ ID NO: 11537 - DNA, 122 bp, Homo sapiens
tcgtgtgccaaacaatctacctctgcgcaagaactctccagaggattgggtggcaagcctcgtgacgccttgcaatttcgcaagaacacagacaatgtggaacagggccatctcccagacat

SEQ ID NO: 11538 - DNA, 122 bp, Homo sapiens
ggcaagagggaagctcgagaacaggttttgctgaggattccccccaagaaaagtgctccccgggaggccgttcctggcaccaagactggcggagccaccacacccgttaaagggatccacct

SEQ ID NO: 11539 - DNA, 122 bp, Homo sapiens
cgccgccgctggccgagcagcacacatggcgcaattgtccaagaagccagcggagcgccccgaacaagcactgtctccagtgcattcttttcacagggtcggagccatgggaaaacttcctc

SEQ ID NO: 11540 - DNA, 122 bp, Homo sapiens
gaggctctgttgcaaggccggcgggacaacgcccggcaggagggccgggtcattgctgcgcgttatatatggtacatatgataccctggccacaatcctccagtcccgcgatctcgactttg

SEQ ID NO: 11541 - DNA, 122 bp, Homo sapiens
ctctctcccgaaccggagaaaaccttcggcggggtccttccgggttttgtgtcgaatctgcggcggcgacccggcgccgcgtcacgcggtggtgaatgtgcggcagcacgcgcgccgcgtcg

SEQ ID NO: 11542 - DNA, 122 bp, Homo sapiens
gtccctggggaacggctgtgtgtctggcatcgacttggcctggacttggcttctctactgcgctcccgatcccaggtgtggggtcgattctgtcttgcgccgattggaggcctctgctgtgg

SEQ ID NO: 11543 - DNA, 122 bp, Homo sapiens
gcactgggcgtgagcagggctcactcagcagggcccactcagcaagtgctaggtcgtcaacgacctgtggaataaatagccagccctcccaagcagctgcctgcctccctcctcaaaaaagt

SEQ ID NO: 11544 - DNA, 122 bp, Homo sapiens
aataaaaggccaggcccaggcccgggtatggtttcatctttacatttaaatctgcaaccccgccgggcgcagtggctcacacctgtaatcccagcactttgggaggccgaggcaggcagacc

SEQ ID NO: 11545 - DNA, 122 bp, Homo sapiens
ttaaataaagaagataaaactgagatactgttccttttccagagtattgcagggagcccacggaatccacagacctcctcttttctcttccttccttccttcctttctttctctctctcttt

SEQ ID NO: 11546 - DNA, 122 bp, Homo sapiens
atacaccaaggacccatcaccaagggaccttggcacatagaaccctcctagccattcatccgacccacatacaaaacaaagagaagcttcatggtaacaaaaataaaggaaagaaatgacga

SEQ ID NO: 11547 - DNA, 122 bp, Homo sapiens
ggagtagagctcctcagaccccagtggcagcccttcctagcctaggcacctctggcaggccgggagggccctatgggaccccaatagcagatccccacttgtgtttatcagcgacagccact

SEQ ID NO: 11548 - DNA, 122 bp, Homo sapiens
aagggaagggtcccctagaatctctgacccgtcctacaagtgtttataccagatgttttgcgcagataagggagcttgcctaaacatgcctgcggtggaaaattccattccttaacacaagt

SEQ ID NO: 11549 - DNA, 122 bp, Homo sapiens
ccagcccgcctggccgtgcggctttcccgcaggaaagcggggctgggggcagcccggcagcgccgctcaacctagtgcgcgcccagttgtttccataggaaccgcgaccgcgccgggcccct

SEQ ID NO: 11550 - DNA, 122 bp, Homo sapiens
aattgggtttgccccctgcctgccaggacagcgccctcagcacccctgttggcagggccgcggtccagggcagacggccctcacctcccagggccttgcaggcagcaccttgtgctaaagtt

SEQ ID NO: 11551 - DNA, 122 bp, Homo sapiens
tcgctgccacccctcagcaaccccagtgcagctggtcatcctgtcagccgatcagtcagtcgcgtccccagcccggctcacacgcctcctccatcagtccctcagtcagtccctgcgtttcc

SEQ ID NO: 11552 - DNA, 122 bp, Homo sapiens
cacataaaatgtagcttagcaatcacatactaagccagtagatatctaataatgttagtccggctcatttgggaatttttgaggcttaggagtattcagcataattccatttgtttagcaaa

SEQ ID NO: 11553 - DNA, 122 bp, Homo sapiens
ccatcgagaaagcactgcagctggacctgggtctgagtcgcagttcctggctgtgagatgcgtctctccctctgtttattcatctgaaggacagggctgtgctgttctggggtcactgtgac

SEQ ID NO: 11554 - DNA, 122 bp, Homo sapiens
atgcactggcggactctggtcgcccttccttgtgaaggctgcctgggtagccgtagaggacgaggccactctaaagcctcgttttcccagcggaattttaactattctaaggatgtccttac

SEQ ID NO: 11555 - DNA, 122 bp, Homo sapiens
caactgggcgggggcacccgggcaggggtgccagatacagtattgtatctggcaacctcccggggcgctcagtgtggttttcccacccgggagtctggaagggtctcccgcagcccgcagga

SEQ ID NO: 11556 - DNA, 122 bp, Homo sapiens
atattttcaaaagcaaacaaggacatctggcttgatattcatattcagaagcctagtaaacgggaatgcccaggacatacagactcagttctcctaaaagactgaaccccaatcctagcagt

SEQ ID NO: 11557 - DNA, 122 bp, Homo sapiens
gccagggcctcggctgaccggggaggaagaaggggagcagagaaaaacatgagtcacagccgtgtgtcactggagcgcatttcaattccctgcatcacaggaggtgtggaaggccgcctcgg

SEQ ID NO: 11558 - DNA, 122 bp, Homo sapiens
aatccgggctgccgggtgacagtgaccagctgactctggagcctaccggaggcgcggcatcggaggccgtgcggaccactgccgaacagccgctggagacccgcagagaagggcgggccctg

SEQ ID NO: 11559 - DNA, 122 bp, Homo sapiens
gtacaagctgagagacctggatttgcaatgtaagaacccaggagaaataagtggaactgacggggtctaaaatgtcacggctattctgtaaagcaggtttgtccctgttccatccaagtgtc

SEQ ID NO: 11560 - DNA, 122 bp, Homo sapiens
atacaaatttttctcaactttgaaaaaactgacagaaatgagagcatagtgagggtaagacgagatgatgaagggaaggggaacattagtattctcattatataagtgagaagtaaagaatt

SEQ ID NO: 11561 - DNA, 122 bp, Homo sapiens
tctaaataaatctcttcaaatattttacagagtttcactcttctgttgacaaattcaatacgcatttactggagacctactgtgttttagccactggagagacaaaaacatattaagaaatg

SEQ ID NO: 11562 - DNA, 122 bp, Homo sapiens
cgggggctccggcagaaactcaccatgttttcccgggaatgtgtgggtatctttccaaaacgccaaagaccgcggagggtcttcccacgctaaccctaggctgcgctttgttcccgttcccc

SEQ ID NO: 11563 - DNA, 122 bp, Homo sapiens
atccaaatcccacgggagcctacgccacgccgaaacaggatggactccgtacgactctcgcgataatacgggcgggctgaaggctggtcacatcttccctgcctaaataatcgcgcccggcg

SEQ ID NO: 11564 - DNA, 122 bp, Homo sapiens
actaagatgaaggaatctattgcaagttacacgttactatcatcccctggtatgaaagagcgattttgaacctgaacatataaaagcattcaagatagtgtctggcacagtagaacagggat

SEQ ID NO: 11565 - DNA, 122 bp, Homo sapiens
ggggtcctgaagggcacgcaggatgctggggcactgggccggcggaaggctcctagtggccggccggggttcgagttcgaggtgggaattctgggtttaggcgattctgggttagcaggctt

SEQ ID NO: 11566 - DNA, 122 bp, Homo sapiens
gcggggctgggcactgccaggggctcagtaatgagaggcagctctcatttaggtgggcagcgggcagggggttgcaagcagggaccgcccatgtgttggggggggtgttgaaggtccttttc

SEQ ID NO: 11567 - DNA, 122 bp, Homo sapiens
gggaacacccctgggaatttgcccatgggtggtctcagcacccctcatggccccagtctccgcgcccacggccacgggtctgcgtctcgtttcagcccggtgtgagccaggcagccacagtg

SEQ ID NO: 11568 - DNA, 122 bp, Homo sapiens
acttaaagtttatcccaaacaaaactgtaattttaactggtccccgagttgagcctcactcgatgaatgacttccagggcctttggctctttgggactaaacgagaaaattatttttagcac

SEQ ID NO: 11569 - DNA, 122 bp, Homo sapiens
tagatcttaggttgaaagggctttctgccaatttccagcagaatttaatagacttgcacccgtagttaatggtacatctggacaatcagaagcctctgctgtgttccttctgggcaaaaagc

SEQ ID NO: 11570 - DNA, 122 bp, Homo sapiens
gggggctcaaccatttgtggcacgagacgaactcttgattccccaccccccttcctttttcgctaacgcgcctccattcctcactgggagcccggcgtcgtccctgctccttcctgtactga

SEQ ID NO: 11571 - DNA, 122 bp, Homo sapiens
tctgtcgcccaggctggagcgcaacggtgtgatctcggctcactgcaatctccgaatctccgcctcccaggttcaagcgattctcctgcctgagtctcccaagtagctgagactacagacgc

SEQ ID NO: 11572 - DNA, 122 bp, Homo sapiens
accagctccccaagccaccccttcagccatgaagttcctgctcctggtcttggcagccctcggattcctgacccaggtgatcccaggtaaactggataaataggaggaaaggaaaactggga

SEQ ID NO: 11573 - DNA, 122 bp, Homo sapiens
ggctccgtgtctcagagttctgggccttgggtgtctcatgggcctggtgctgggcagcagcgtggagctgccagcaagagcagcctcccttctgctctcaagactcaggccttgggaacaag

SEQ ID NO: 11574 - DNA, 122 bp, Homo sapiens
ccgcaactcccctcactctgcctggggtcccgccgcctcggctcccactgtcatgccccgcgccccggtgctctcacctcagacctgctgtcaccacccccgggcccggcgccgccgccgcc

SEQ ID NO: 11575 - DNA, 122 bp, Homo sapiens
gattcaaccgcgccaccgagcgcggagctgccctggaggacgcaggcgggtctagttgcccgggtcccccaaggcccccggattcacccaggcccgcgactccgacgtgcagcttaggtggg

SEQ ID NO: 11576 - DNA, 122 bp, Homo sapiens
cggccgtggcctatagagcaggcccctcggtgcatgaagccagcacagccctggaaatcccgtgcaacaaaaagcctctgttccacccagaagagctctgagcagagagggccccgccgagg

SEQ ID NO: 11577 - DNA, 122 bp, Homo sapiens
accacagggtacatgatgtgacagggagagctcaggctggatttcaactcccactaggcccgttaacacaatcctcctaggccaggcacaatttgctcaactggatatggtgaccctggctg

SEQ ID NO: 11578 - DNA, 122 bp, Homo sapiens
gcacacctgtgtccaaattttctttccttgtaagcacaccaaccctactggatttaggcccgtgttaaagacctcattttagcttaattacctcttcaaacaccttatctccaaatagggtt

SEQ ID NO: 11579 - DNA, 122 bp, Homo sapiens
ctttctcatgccctcgggattgccgaggggccgggccgggggcctctcctcaggaccccccgcacatccccctcggagagccccggaaagcctgccgatcccccgtgtgcgccctgaaaggt

SEQ ID NO: 11580 - DNA, 122 bp, Homo sapiens
tcctggcagccagcagcagctctaccgccctctcgtactgactgtgctcgatgaagaagtcggagcagcgggccaggagcgcagggtctgacgtctcatccaggtcctctgctatgagctgt

SEQ ID NO: 11581 - DNA, 122 bp, Homo sapiens
ccgggagccgggccgcgccccccatccacggcgcgggccgatcctagggcgggacgggggcgggagaaggaaaccgggctcccctgcccatcccccgccaggggctccccccgagagcctag

SEQ ID NO: 11582 - DNA, 122 bp, Homo sapiens
ggatcagactgaaaggacaggcatgctgatctccagcaggcaggggccaggagaaagtctcgtttgccaacacttgttactgaagcgcagaaaaagcagcaagtgacagtcacaaagtcttc

SEQ ID NO: 11583 - DNA, 122 bp, Homo sapiens
ggttgagctggcggatgaagctggtgaagctggtggttttgaagagctcgggctcggccccggcccccgcagtcccgccaccgccccccggcccgggcgggctgagcagctcggcctcgaag

SEQ ID NO: 11584 - DNA, 122 bp, Homo sapiens
gctctatgtggactgccggaaggtggctgagcggccccttggggagatgggcagcccacccgctgcgggcttcgtcacgctggggaggctggccaaggccaggggcccccggagcagttcgg

SEQ ID NO: 11585 - DNA, 122 bp, Homo sapiens
gtgtgtcatctctagtgtccagtggcgggagaccagttcctggtgcctgcccatgaggcccgcggaacccagagtgaagaccagcgcccagcaggcgcagcttcggagtcggagctccagga

SEQ ID NO: 11586 - DNA, 122 bp, Homo sapiens
cagccgggatgcgcccccgccggggtcaccgcggcggcgaacgtcccggacttcgcatcccggtgaccccttgggatgaaccgaagccggacccgcaccttggccgtaacaagcgcgctcca

SEQ ID NO: 11587 - DNA, 122 bp, Homo sapiens
gacaccgttcaccacagccaccatgtctcagcagcaccgtccaccacagccaccatgtctcggcagcaccgtccaccacagccaccatgtctcggcaccattcaccacagccaccatgtctc

SEQ ID NO: 11588 - DNA, 122 bp, Homo sapiens
tccaagggagaccctggatgcaactgcaaaaaactgaatggtagcaggggcaggctaccacggagttttaaatcctgccttacattaacacaaaggaaatacaggaattacccagatgccaa

SEQ ID NO: 11589 - DNA, 122 bp, Homo sapiens
ggatggatcatgataatatgggcctggctgcgggacaaatgacccatccatctggagaagcgagggcaaattctggatgcggcgatgccagagctgatgagcaggagttagctacgtaaccg

SEQ ID NO: 11590 - DNA, 122 bp, Homo sapiens
accgcctcggggccaaggcctagtatggcaggacccgcagggttggtcaggttcgaggaccgggccgggcctggccgccgccgcttaccgagcccgcggctcctcctctaccacccgcgccg

SEQ ID NO: 11591 - DNA, 122 bp, Homo sapiens
caggacagggtgtgtgcgtgagttaggggctgggtgcttgcagacactctggggactgcccggggcttgtgaaggccccagtggggacacagtctgcctgggctgtgggggctggcaggtgg

SEQ ID NO: 11592 - DNA, 122 bp, Homo sapiens
aaagacagctactcagctaagcgtggtttccgactgaactgcatcctttgtttcagtagacggccggtctcaggctgctacacgtattttgcatttggtcgtttctgccaaatttcctctgc

SEQ ID NO: 11593 - DNA, 122 bp, Homo sapiens
cgggagaggagtctcctctgagtgggctccgcgcggtgggatgcctgggggagtgtcctccggcccagtggcccccgctggacttctttggttctgattggacgcagatgtggaggacgcac

SEQ ID NO: 11594 - DNA, 122 bp, Homo sapiens
gaagggaaccacacaccacactcaaaaactcttgatgttttcttgctaaaggggctctctcgctcgcgctctctctcctccctcattccctccctccctccctttcacccccccacccccat

SEQ ID NO: 11595 - DNA, 122 bp, Homo sapiens
cgcccctcaggctagcagcttccaggggctgtgctcggaagacgccaaggttacggcacgcgcagccccgcgcctactgccccgtaggcatcccgggggacaaacgctgggtcgtcctgagt

SEQ ID NO: 11596 - DNA, 122 bp, Homo sapiens
gagaagggactcctaagccacagccagggggagctattttctttgggcttttgcataaatcgttccctctgcctgaaactcttcccagcatcaccctatggctaaatcttacccagccttct

SEQ ID NO: 11597 - DNA, 122 bp, Homo sapiens
ctcctcgactgggtttgtcaatcttcctataaagcaagatcaaagacggcggcaatgactcgggtcatcggtgggagcatttctgtccatttctatttatggttggtcattgcatcctatct

SEQ ID NO: 11598 - DNA, 122 bp, Homo sapiens
ctctagactgcactccaaccgtagcacttactaggcattcgactccaggaccttgacactcgcgctcgctggcggcgagccccgcctccccactgcgcctcatctcccagacaggccccgcc

SEQ ID NO: 11599 - DNA, 122 bp, Homo sapiens
atttttagtaaagccggatgttcaccatgttggccaggatggtctacgatctcctgacgtcgtaatccgctcgccttggcctcccaaagtgcggggattacaggcgtgagccaccgcgcctg

SEQ ID NO: 11600 - DNA, 122 bp, Homo sapiens
gtcacccccgagggatgtgtcctccacactcccttgatggtcacgtgggtcccgggagggcgcgtgtgactcttcccaggattgcagcgttggggcgttgtgccagcctggccccgtgggtg

SEQ ID NO: 11601 - DNA, 122 bp, Homo sapiens
ccctgtctcctttattaattgcacatattcctcttgacgaaagtgacatgccgatggcagcgttgtgggcttgaagacgagggtgcctttcgatctaagcctaaagtcacatttgtgacccg

SEQ ID NO: 11602 - DNA, 122 bp, Homo sapiens
tctgttccaactgtcaggcctaccgtcaagagagggagcggtggcgcagagcttctaaagcgctggtttcacaggagatacaaagagataattagaaccacgggtaagaagatcatagagcg

SEQ ID NO: 11603 - DNA, 122 bp, Homo sapiens
actggtgtgtagggaatctggtgtatgtgcgtgtgtcctactactactaattcttggccccgaggggctcctgggggttccccgggcccctgttagggaaccgcgtccacttctcgccctct

SEQ ID NO: 11604 - DNA, 122 bp, Homo sapiens
ccacatccctccctctgcaaagcctcacctgccccaggtgtgcttccagctgtgcccgttcgtctgtgggctgctgtaactgctggttagcatcaggggcttcacaccagctagataactga

SEQ ID NO: 11605 - DNA, 122 bp, Homo sapiens
gtactgccttatccatcctgctcattgctccatgcctcgcacctagcacagagcccagaacgcaaggacagacagcacaccttagttttcccaaagagtgctcccaattacaattctgaact

SEQ ID NO: 11606 - DNA, 122 bp, Homo sapiens
aacgcaaactacattatccagaaggaccctcgcggtgcctcagggctggccattggcagccgaggagacaggcacttccgggcggagtgtaagacgctggccaatcacagcctggcagcggg

SEQ ID NO: 11607 - DNA, 122 bp, Homo sapiens
cgtacccaggtgctacagcatcagcttcccttgccgcttcctgcggctgaagggatggtccgaccaaagcctcctgccctggggcagccgatgccactgcatgctttttcctgcgcttgggc

SEQ ID NO: 11608 - DNA, 122 bp, Homo sapiens
ctggccttcgccagagttcttgaaagcccagttgtccttccccagccacgtggaggcagacggatctctcctgggggcagcctgtagctgtctgtgcaaaggttcccaagactaaagtgtag

SEQ ID NO: 11609 - DNA, 122 bp, Homo sapiens
tgtgaaaaacccaagggcagaggggtcgggggtggagctagaggggactaggaatcaggtcgtgttcaggaggtggggcagagttaaactttgactttaaatgacccacataagcctccgtc

SEQ ID NO: 11610 - DNA, 122 bp, Homo sapiens
attctactttccaaaaacaggagctttttaaaagaaaaccacataacaacttttaaaaggcgctgggattcctctgcttctagatcaatgctgggctagaaaagtaaagtctgttctatcag

SEQ ID NO: 11611 - DNA, 122 bp, Homo sapiens
cgcaacaagccggccgtccttccgggggagcccggagcgagcccggttctcgcctcgtggcgtttctcgctggggcctccaaatgttgtacttgaatgagttagagaaaatgccacactttc

SEQ ID NO: 11612 - DNA, 122 bp, Homo sapiens
tcctgccccaaaatccaacccatcaacaagtgttgccaactgtattcctgaagttatccacgtctattttcagtttctgctttctctcgagccttcactgcctccgcaggagactccagaga

SEQ ID NO: 11613 - DNA, 122 bp, Homo sapiens
accattttcaattttacctgaaagttctggtctttttgctgcagctttaagcatccaacccggtattaccaagatgacttagagttcttgactcaagcatacagaagaaactacaagataat

SEQ ID NO: 11614 - DNA, 122 bp, Homo sapiens
ggtgtccactgagccgatctgtctcccgctcacccacagcagttgctccatggtcaccagcggctgcacctgtcatgggaggaggaagggtcaacaaagacaaacttgtcttgggggtttta

SEQ ID NO: 11615 - DNA, 122 bp, Homo sapiens
gagttcacttctgtcaagcgtctgttgctctgcactgtgccagcaggtgcaggaccaggccgacatgggacacttctgagcagccccgctgtcaccaggagaggagttctagctcccaacca

SEQ ID NO: 11616 - DNA, 122 bp, Homo sapiens
gatttccttccgtgaacgcttgttagttgtgaaactagcaaagttgcgcctctgagtttacgcagagccggctccggaatccgagttccgggttcgagcacagctccgccgctacctcgggc

SEQ ID NO: 11617 - DNA, 122 bp, Homo sapiens
gaggcttccgccttggccgccacctccccggccagctgcggtgttcgcggccagtgttgccgggcacttcctggttcccgcgcgccccgggtgcagctccctgcacccagtgctggcgctcc

SEQ ID NO: 11618 - DNA, 122 bp, Homo sapiens
ctttcacataaatcactacctgatacacatttcaacctgtgatatatcttttttccaagacggagtctcgctctgttgcttaggctggagtgcagtggcgcgatctcggctcactgcaacct

SEQ ID NO: 11619 - DNA, 122 bp, Homo sapiens
acccatctctagccccagaggcctctgcagaggctctgatgatggtgcctttcccatcaccggccctctctgatccccaaagacaccccagctaccaaccaactcctgcttccggcttcaac

SEQ ID NO: 11620 - DNA, 122 bp, Homo sapiens
agagcaggagacctaggaatgaaggccccggggctgggagtgcacctaagagtgtggccacgcagggtacgtgaaaccacagtgcactggctgagctccaagtctgctgcagggaagaaagc

SEQ ID NO: 11621 - DNA, 122 bp, Homo sapiens
tgaccccgtgatccgcccaccttggcctcccaaagggctgggattacaggcatgagccaccgcgcccggctgaactgatttttttttaatgaagtgcatcgtgttcccacttgcacttaaag

SEQ ID NO: 11622 - DNA, 122 bp, Homo sapiens
agcgagggcgcgtcagtacagaccgtgggctgcgtgtcacgtcactgctgagcgaccgcgcggttccctgctatttgtaccgcccaaggcagtcctagctccgcccctttacgctcgcaccg

SEQ ID NO: 11623 - DNA, 122 bp, Homo sapiens
ggacgccgctcgggggacgtgggaggggaggcgggaaacagcttagtgggtgtggggtcgcgcattttcttcaaccaggaggtgaggaggtttcgacatggcggtgcagccgaaggagacgc

SEQ ID NO: 11624 - DNA, 122 bp, Homo sapiens
gagcccctcattccctttttgtcctttaggtggctttggaatcacctagttaaggggaaacgccctcatattttgaaacgtataaacttaaaacaatgccacctttttctcggcaaaggttc

SEQ ID NO: 11625 - DNA, 122 bp, Homo sapiens
tgagctctctgaggcgtggggaagtggaaggcattggcccggggccctcccggctccctccgagcacccccacccccggacctgccgggccttctggggcggccccttagcaccagtgctcc

SEQ ID NO: 11626 - DNA, 122 bp, Homo sapiens
ggcctgggagcccgaagctgggtaggcccaggcgccgggagagcggagggatggatgctgcgctcgcaaaggtgatgaaatggcagcagcatcagcaccacgcactctgactcatcactgac

SEQ ID NO: 11627 - DNA, 122 bp, Homo sapiens
ccaacctactcaccatgcgcatgctcactttcaaaacgaaaaacttactgagaacaaatgcgcatgttccataaacggagagttttgttgtgtatatattttttcctattcagaaagattaa

SEQ ID NO: 11628 - DNA, 122 bp, Homo sapiens
tggaatgtctcccactttctgcctaacctgcacgtccatcagcacctcatcaatgagatacgactcctccggggagaatttccccctgcctggtccccttccctagagagcccttcgccaac

SEQ ID NO: 11629 - DNA, 122 bp, Homo sapiens
tcctaggagccatgaattggaatctcccggctgcctgacctcacctgagttcatttctctcgagggggtggaaagtcaagcccttgggctgtaaaaagaaatgacccatgaagctgagcaag

SEQ ID NO: 11630 - DNA, 122 bp, Homo sapiens
gcgtcccagttcatcctccccgatggagtgggcagtgccccagtgctccgcagctggtgccgtctgtctccagacgctcttccagcctgcattcaacaagccagtcgtatcagaaaatatta

SEQ ID NO: 11631 - DNA, 122 bp, Homo sapiens
cttggtcttgattttaggagcaactcttgctgagaacatgtctgtttgcaaggaaagtatcgtgttgtctttctactgaaaacagtcagtgtttctcaagggcttacctgagccaagactct

SEQ ID NO: 11632 - DNA, 122 bp, Homo sapiens
tttattactaatgaatgaagggccggacccacagatgagtcacacaagtgagccactgatcgatctgataacaatgaatggacaaatgaaagaaatgaatcaatgaatgaaatgctcagggc

SEQ ID NO: 11633 - DNA, 122 bp, Homo sapiens
gcgggggatttcgggcagggcggtgaagcagggcctgctctacagggggcttttcttcgccgcggtttcttcccctgtcgctgcccggcccccacctcctctctcctcccgcgcgcgctctg

SEQ ID NO: 11634 - DNA, 122 bp, Homo sapiens
gcacaggctcccggtgggagggcctgggctgcaggagactctccaggcagagctgtgctgcgcaccccaagtccccgcccgctgcgccgcacctgtgctgaggatcttgtccgccattttct

SEQ ID NO: 11635 - DNA, 122 bp, Homo sapiens
ccgcccctgagctcaggtcttgctgaataaggtcaccgcccagggggcagtcgatgaacacgcgcgcgagggctctgcgagtggcctcgtgactttgtccctaactccgggtgtcccctcct

SEQ ID NO: 11636 - DNA, 122 bp, Homo sapiens
aatattctctccactttgggggagagttcttgctctcgacctagtggtttctactctcaccgacttattctgatttcagaaataaaatgaaatgtcttattttggaaagttaacctttcaaa

SEQ ID NO: 11637 - DNA, 122 bp, Homo sapiens
cagaagagaaatccggaaacaagggacgcgcagcgtgattccgtgccacggcgtcaggagcggcatgtagcatcttttggtttgagagtaaaattccgcaatcagaaatgaaatccgagcaa

SEQ ID NO: 11638 - DNA, 122 bp, Homo sapiens
gaggcccaagtactgctcacccagctgggagcatctcgagagccagatgagaaaggtgggcgcagcagggtccctaaaatggcagccaggcctcacacccaaacagtgggcggggtggggcg

SEQ ID NO: 11639 - DNA, 122 bp, Homo sapiens
gcccagcaggtattcccacttgggagaggtggagcaggaagacaggctgcacttgggctgcgggggacaggggtcacattatggaaggctagctctgagtctgttataataggtggtggtga

SEQ ID NO: 11640 - DNA, 122 bp, Homo sapiens
attgagaccaagtaccgggaggggcgggaggtgtgtgagtcggagctgcgtgtgctgcgtcgggtgcgtcatgccaacatcatccagctggtggaggtgttcgagacacaggagcgggtgta

SEQ ID NO: 11641 - DNA, 122 bp, Homo sapiens
gaatatgaggggcagtgcaaagggtgggggttaaccgggcggtttccatggcgcccggggcgtgggggaggaatgcatcccgcaagctgtggcgaaacaactgctctgcccggaggaccggg

SEQ ID NO: 11642 - DNA, 122 bp, Homo sapiens
tggggtccgccacacagttgaggctggtgaaagccagtgagctgtggtatgcagaaaagacgcgctcctcgaagccgcagtcccaggggcggcccaggtagatggcgctgcgggacagcaag

SEQ ID NO: 11643 - DNA, 122 bp, Homo sapiens
gcgcctcgttttggtccaccgggtccggggctgggacaccgagggaaaacttcagagctccgggccaccgagcctggaagttacgcgtcccccagcccacgcgtccccaatcccggggtatt

SEQ ID NO: 11644 - DNA, 122 bp, Homo sapiens
atttgtcggggagagacagcaagagttcgaccagccagccactttagagattgtcaggggcgctcagctcatagggtggctcgagggccagtgcgaagctcccttagggacgaatttccaca

SEQ ID NO: 11645 - DNA, 122 bp, Homo sapiens
cgcagggcgtggagagcagccggttactcgagggtagggcgtctagagcagccggttacgcgagggtagggcgtggagagcagccggttacgcgagggtagggcgtggagagcagccggtta

SEQ ID NO: 11646 - DNA, 122 bp, Homo sapiens
gttccttctatgaggtctgtcaatggggtaaaagcccggatggtgcgcccaatgtcagcccgaagccaccagatggcgcgcggaacccgcaatgcacgtgcgccagcctcgcgtttgtcccc

SEQ ID NO: 11647 - DNA, 122 bp, Homo sapiens
actgcatttttaaaatttaccctgagacaacctctttgtcctatggattacttagaagtacgttttaactttctaagtgtttggaaattttcctgttacctttctgccattgatttgtagtt

SEQ ID NO: 11648 - DNA, 122 bp, Homo sapiens
aggtagcaagatggagggatggggctctctcctgggatgggggcaggtgttcctgaataccgacaggcctgctgggtaaatgactaggtggtaaggttctgccatgcctggtgacccaccat

SEQ ID NO: 11649 - DNA, 122 bp, Homo sapiens
gatttgttattgtgcaaacttcatagagcacacaaacacaaacctaaatggtgtagcctacgacacaccaaggctatatggtatagcctattgctcctagactacaaacccgtacagcatgt

SEQ ID NO: 11650 - DNA, 122 bp, Homo sapiens
atggaccaagcagggccccgactgtgcctccgatgctcagcggggcagacctgttcagagcgagctccctcctgggttcgtcagctggactcactgcctccagctccaaaaccttattttca

SEQ ID NO: 11651 - DNA, 122 bp, Homo sapiens
tggcccccgagcaccgcgcgcagcccgggttcccgcctgcgcctctccctccacacctcccggcaagctgagggagccggctcaggccagcccaggaagaggctcccacagtgcagcggcgg

SEQ ID NO: 11652 - DNA, 122 bp, Homo sapiens
ctggagttggtttctccggaaacctcccagagaacagtagggagttgaaacttaccagctcggggcctgacattgacaggcctgcccctcacccctctggactgcctcagccacctggtgcc

SEQ ID NO: 11653 - DNA, 122 bp, Homo sapiens
acgcttttatgcttttggtcccagctacttgggaggctgaggtgggaagatgcttgaggccgggaggttaagacaatcctgagcaacatagtgagacaccatctctacccaaaaaaaaaaaa

SEQ ID NO: 11654 - DNA, 122 bp, Homo sapiens
aaggtctgaaaaaataaaaccggaagattcagggatagtttccttttattcctagggatccgctctcactcttctctcttctgctctgtgccctaagttgacctgggatggatacatggact

SEQ ID NO: 11655 - DNA, 122 bp, Homo sapiens
gcatgtgctggcccagctgcagggcagtccgtgtcatctttggggactctgtgtcctcgtcgtcacagctcttttaacatggagctgaaacctcatggggttggtaaaaagcagatgaaata

SEQ ID NO: 11656 - DNA, 122 bp, Homo sapiens
cctgcgaggtgggacacaagttggcttacaagttggttcgacatagccaaatccgcgtgccgcatttccacgctatggagtgctagtcttcatgattgtgccccttgacatgacacaatagg

SEQ ID NO: 11657 - DNA, 122 bp, Homo sapiens
gaaaaaatgtaagataactcacatgggctggactacataatctttaataaaggttcttttcgatctggctgcttcctctgggtctaaaacagtaactggcacgtgttaagcactcaataaat

SEQ ID NO: 11658 - DNA, 122 bp, Homo sapiens
gtgcacgacctgaggggattccttatcatatacgctgatgaagtagaccgagccatcctccgtgcccacggctgcagagagggaggatggacagcaagccagaaccgttgcctgtttaaaat

SEQ ID NO: 11659 - DNA, 122 bp, Homo sapiens
acaatccgaggagaaagcctgacctggccagtgggcttggccgctgagaaacagtggcagcgaggtgagcacatgacaaggaagagctgcaaagccgatgttgcgaaggtggcgtcagccag

SEQ ID NO: 11660 - DNA, 122 bp, Homo sapiens
cccagttttccccgagcacctgcgggagagtggtaaaggcgccatcgggggccttcgctgcgtgaccccgagggcaggagggccaggtggggccaggccttgcctgactggagctacggtcc

SEQ ID NO: 11661 - DNA, 122 bp, Homo sapiens
ccctccacccccaccagtctcaagaaatgagggaaatgattatgaagggggtccccaagccgactaaaaagtttaatgatgctataaagggttttggtcggcttcgtctcctaggccctgag

SEQ ID NO: 11662 - DNA, 122 bp, Homo sapiens
tgttttgtgcatcgggatgagaaatgaagcacttcacgctggctttcctaagtcacggggcgtgtattgccgtggcttagtgcaaagcattctttctcagagcatttagaggcatgcgtggc

SEQ ID NO: 11663 - DNA, 122 bp, Homo sapiens
tcccggccccagtcccggccccctcccctgccgcgccgaggtcagcgagtcggggcgcggcgccagcccaggaaactttacgaacctgcttggggtcgcaggacagcagcggcaagggttcc

SEQ ID NO: 11664 - DNA, 122 bp, Homo sapiens
tcactgcagcctctacctcccgggctcaagccatcctcctacctcagtcattcaaaatgccgacattacaggcctcagccatcacgccccgccaagatcgtgtattcctgagtgctccgtgt

SEQ ID NO: 11665 - DNA, 122 bp, Homo sapiens
gtttcctgagtgctcctcgggccaaaagcagagcgcacaaattccagaagaaattaccaacggcgggactatttcagtgctccgagaagtatcaccagtaaccaatcagcaaaaagctctag

SEQ ID NO: 11666 - DNA, 122 bp, Homo sapiens
gtggaggaggggactggggacaagggggctgccaacacccagcgacggagacggggactccgacatggcacttgttggagggtctcacgaaactcaggaactggggtaagagggcttgcaac

SEQ ID NO: 11667 - DNA, 122 bp, Homo sapiens
tgcggtactggccgttgtgcaccaggccgatggccaggtgcttgttggccagcgtgatgtcgtaggtgaagtagtagatcccaggcacgccgcagacgaacttgccgctggaagcattgtag

SEQ ID NO: 11668 - DNA, 122 bp, Homo sapiens
agaacacggggctagcggaggaggcgcacctggagaagctgcatgtgcaggaccagccaacgggagcgaacgcagcatctccgaggaaaggcactggcacacacttccctcctcatggccac

SEQ ID NO: 11669 - DNA, 122 bp, Homo sapiens
aaagtaaatattctgcgtgatgtttagtgacagacggatttctttagacaaagtgaaggacggaggcctctccagggaggcaatgtttatccggaatctcaatgataaggagtcagccatgc

SEQ ID NO: 11670 - DNA, 122 bp, Homo sapiens
gttgtgggcgtgcagaacacgatcctggttgactttgatgcggtgacttggggtggcgggcggggggcggcgggaggcgcggagtcgaggagttcccgcgtcgcgagcatgcttgagagccg

SEQ ID NO: 11671 - DNA, 122 bp, Homo sapiens
caggtacctgctgggggctcccactggacaggccagggctgtctgcattcttattggtcacggtgaggacaaggtgggtccctgtggagtcggtgatgagggtgggaggtgcaacccccttg

SEQ ID NO: 11672 - DNA, 122 bp, Homo sapiens
atgcgttctaccctcgccttccctccttagtggctttaaattgtgtgtttctcttttcttcgtaccccggcatctcttgcctgtcttccctagcaccatccttttcggatgtcattcctaac

SEQ ID NO: 11673 - DNA, 122 bp, Homo sapiens
ctttccctctgcagttcggactgtgacgttgtggggggaaaaaactccaaactcggggctcgcgactccccaggatctgacagtctggttaatgtccgtcattggaaacgaccactgaccgg

SEQ ID NO: 11674 - DNA, 122 bp, Homo sapiens
aaattgtatctgtggcgactgactatatcaagcttatcaacacctccgccacctcatgtacgtgtgtgtgtggtgagaacatttacagtctactctcagcaaggtttaagttcagtcacccc

SEQ ID NO: 11675 - DNA, 122 bp, Homo sapiens
gtgaccaggtgcggccggcgctgcttacactcatgcgggctgtgcacccagacgggcctgcgccctcattcactcgcagcaggtggcgaggcttagggacatacaggtgacacacaggtctg

SEQ ID NO: 11676 - DNA, 122 bp, Homo sapiens
ccggcggcggagggtctgcgtccgactccacctatgcccatggcaatggttaccaggagacgggcggcggtcaccatagagacgggatgctgtacctgggctcccgagcctcgctggcggat

SEQ ID NO: 11677 - DNA, 122 bp, Homo sapiens
taatcatagagggtcatgttagggagtggggaacagattaaattaccacagtattagatacgggaaatgatttctgtcaaaaccatctttactgcaattataatatgttaattatgtatttc

SEQ ID NO: 11678 - DNA, 122 bp, Homo sapiens
ctccctctgcagcgggagggcctgctggggaaagtcccgaatcctctggcccagctctggcgacacagccaccggtttccggcactttctggtttcacatctaggggcacagaaatggctgg

SEQ ID NO: 11679 - DNA, 122 bp, Homo sapiens
agatttcccaagagacaactctcatagatcaatgtgcctgtcacggaggagcaaggagtacgcttggagaggaagaggcaatgggtagctatttaaattcattgtaaactgagaaaactgta

SEQ ID NO: 11680 - DNA, 122 bp, Homo sapiens
agaccctgcctcaaaaaaaaaaagatataatgatatatgaaatgtaagattttttttttgcgtgtctcaaataagtcaaagaagcatgggggagaataagaaaaaggagaggaggaagagga

SEQ ID NO: 11681 - DNA, 122 bp, Homo sapiens
catttccgaagtaccctgctctcagccaaatgctcatggcaatcagagatggaatgttaacgatcaggtgctttaatgtctacattatctagggacattcacattttaagaggagcattctg

SEQ ID NO: 11682 - DNA, 122 bp, Homo sapiens
aggcacccgctcccccggcaattctctatccacagctatcttctgaagcccatgccctcgcggaagaattctgttcctgtttgaatgttcccatgtaaatgctgctgctctcccatggaaat

SEQ ID NO: 11683 - DNA, 122 bp, Homo sapiens
cctggtctccatccacaaggctccagagggctggctttgccctgatgtgcagcagctatccggattctgaagcccctgacctacttccccacatggccaagactggctggcagatgaggctc

SEQ ID NO: 11684 - DNA, 122 bp, Homo sapiens
gaaactggggcctgcttcttgctgggagaatcttgaaagcagttggacagctggagtagccggcaaagttattgaagaaagtgagaattcacccatgggtttatttacacttctcttagttg

SEQ ID NO: 11685 - DNA, 122 bp, Homo sapiens
gcaacaaaagtagaagctggaatgggcctcctccttccggacggaccgttggccgggctccgccccggcgcttctgattggacaaggtacaaggccccgccccctcagaactgagtgacggc

SEQ ID NO: 11686 - DNA, 122 bp, Homo sapiens
ctcaagagtagcggacgttttgccaccatccttgtctgtgctactgtctgctgcagcttccgtgccccgttctcctggagcaggcaagacctggagtgaggtgcttgggtgcgctcgagaga

SEQ ID NO: 11687 - DNA, 122 bp, Homo sapiens
ctcaagcaacagtccagcgcaagtgaaatcacccaggaagctttggaaaattctcctgtgcgccactcccaggcattctgatttggttattctggagtggagctaagcattaggcctttttt

SEQ ID NO: 11688 - DNA, 122 bp, Homo sapiens
cccgggcggacgttttgccgccccggcgacgtcagcgcgtccggcgttgcttggctaccccgccgttcccccgtcccgctgctgctcacctccccgggtgaaactctgacgcagtcaccgcg

SEQ ID NO: 11689 - DNA, 122 bp, Homo sapiens
gcaagctggagaaactgcaagagtcgcctgacctggtctgcagcctgagaccaaacaacgcgagggcggccttacctcgcgaatcctcgggaccccacaacgcacccaaagccggcagggag

SEQ ID NO: 11690 - DNA, 122 bp, Homo sapiens
tcagccccatccagactcgctgaatctgaacctgccctttagtcagatccgcaggggttccgagcacgccgctgggctggaggcattccgaggcccctcgcagccctcagtctgtgatttcg

SEQ ID NO: 11691 - DNA, 122 bp, Homo sapiens
acagattaaaccttaatctgtttaaccttaaggaaacaactaccctttgagaatcacaaacggactgggaaaacaatgtaaacggaaacaaggaaaagtcctgctgattggtggaaactttg

SEQ ID NO: 11692 - DNA, 122 bp, Homo sapiens
gctaactatgccctttctgagtcttccacgcggtgggggcgaaggaggatggagctagaacgaagcctcagcgcgtgccccgcacaaacatggcagcattcccagcagccctaaaccgcccg

SEQ ID NO: 11693 - DNA, 122 bp, Homo sapiens
atccacccacctcggcctcccaaagtgctgggtatgataataggcatgatctaccgcgcccggcagactctctggtcttaaagcttgaagcttatacttgttttatcatagttccttcctca

SEQ ID NO: 11694 - DNA, 122 bp, Homo sapiens
accttggctggagcatgcatcaacccccaaagatggacttcttggtcgtgtgtgattcctcgcaaacacatagaagtacctttttcatttgttggttggtttatggtttgttcgttcctgtt

SEQ ID NO: 11695 - DNA, 122 bp, Homo sapiens
tgacttgtttctgctccatctctctagggggtctttcatggtttgggcacaaggattcgtcgccagaatagaactgaaagctcggaaatagacccgagaatacaagtatgccagaaaaaaaa

SEQ ID NO: 11696 - DNA, 122 bp, Homo sapiens
gacctcctgctcttcagctgtgcaggcgcccaccccaggcaccagagggtctgcccctgccgggacttcatcaagggccaggtggctctctgcaaagactgcctatagcagctacctgctca

SEQ ID NO: 11697 - DNA, 122 bp, Homo sapiens
gacacctgggaacaagagagggtggcggctgcagtggctgtggggcagccggaaatggggcgagacagacaggcggagcctcacctggggctgcccgccagcccagacaagctcagactggg

SEQ ID NO: 11698 - DNA, 122 bp, Homo sapiens
ggaagggctatgggagcacggcggtgtcctcagtgctggggctttcaggggccttggtaccgcgagttgactcttgggggcaggaggtcactccatgcaggggcagcaggtgctggccacca

SEQ ID NO: 11699 - DNA, 122 bp, Homo sapiens
aacagcatgggcgccctggagatgcacgagcaggtggagcagctgaagcagagcatccaccgcgtgcacctctactcccggggcgaggatcaacctctccccgtgctgggccctgggcgggg

SEQ ID NO: 11700 - DNA, 122 bp, Homo sapiens
ctgccaaaaagggggcctcggagttgggggtaatgtgcccaggagcagaaatctggcgaccgtggcgctgcaatcacagctttcccgtggtttcctaagtggtggcggtgatttgtttgcgg

SEQ ID NO: 11701 - DNA, 122 bp, Homo sapiens
gtctgcaaagaggcaggaacttcttcctggggtgatgggaatattctgtgtcatgaacatcgtgattgtggttacaagactatacttttgtcaaaactcatcaaattgtacacctaaaatgg

SEQ ID NO: 11702 - DNA, 122 bp, Homo sapiens
acagggaaggatttcgtgcgcatttagggcgatcctgtaggtgaggagggcgagttccgccgggaagaagggcagggagacgcagtcccactccgaccctggccttcttgtcccgcaggcct

SEQ ID NO: 11703 - DNA, 122 bp, Homo sapiens
aaatcacagaactggttctgccaacatgaaagtgtctctgccacattttggtgattcagtcgcattaactctcctacagtaatagagcccctggggtaggctctgctcgtgtgcacatacat

SEQ ID NO: 11704 - DNA, 122 bp, Homo sapiens
gtaaagtcaacctatcccgttttttttttcgccccgcatgaggggttacttcctataaaccgtcttgctattttaatgcatgttgggtaagctacaggtagaaattaactcaaggaaagtcc

SEQ ID NO: 11705 - DNA, 122 bp, Homo sapiens
gacagccacacagagggtgtgggggctggaggtcttcactcccctcccccagcactgctgcgaaactcggggaggtgtggggagcgtggagctggtgcagggggctgagtggggtgggccgg

SEQ ID NO: 11706 - DNA, 122 bp, Homo sapiens
tagaatcacagcggaaggtgaaacagaagcgtacacgtctcacgtagcagcaggcaagagcgagctggggaaaccgccatttatagaaccatcagctctcgtgagaattcactcactatcac

SEQ ID NO: 11707 - DNA, 122 bp, Homo sapiens
agcaggcccagcacaaagcccccgactccactcagcatcttgctctgtgcagattcagtccgtgtacctgagagaggaagccaggtttagtgatttttattccaaatttaacctctttaatt

SEQ ID NO: 11708 - DNA, 122 bp, Homo sapiens
agctacaagaccgttccctttgcttgcctccctcaaataggtctggagataagcaaacaacgcctcctttctggaaactactccttcatcccagacgccatgactgccactgagaaaatcct

SEQ ID NO: 11709 - DNA, 122 bp, Homo sapiens
tagtcacttcttgcagttttcctcggaaaagcctctctgaagtcaaggctgtggggaacacgggaaactcgctctcgctgtcggtttccacaggccgcccttcactgatgagttcgcttctc

SEQ ID NO: 11710 - DNA, 122 bp, Homo sapiens
cctcaatagtttatgccttaaggcttcttgcactctttgcttttcctatcaatcttaaaccgctgtatcagatcagagtccaaccctaatcaagccatcttcctccaacaccctcctaccct

SEQ ID NO: 11711 - DNA, 122 bp, Homo sapiens
caggtcctccggccaggcacaccgttaggtccttcacagcaacagcagcagggatggtcacggtcgcggcggctaagggctgcctggcagcactgttcacgcatcttccattgattcaccaa

SEQ ID NO: 11712 - DNA, 122 bp, Homo sapiens
ttcgtttgtttttggcccttggtttggttgtctttcctctaggccggcaggggcggggtgcgtgtttgcggatgtccttggtgttcttggcaggatcactgagggtcctggcaggatgcaaa

SEQ ID NO: 11713 - DNA, 122 bp, Homo sapiens
cattggccgtctttccctcccattatagtggcggactgccggcttgaggttggtgacagccgcgacagcagagagttggcagaagtagggctgagcgaagttgagcagcttaggaggagcgg

SEQ ID NO: 11714 - DNA, 122 bp, Homo sapiens
gagggagaggcgcggggggaatcggggctgcgcgcggtgcttgcaggacagcgcgagttacgggtgggcgtgggcttggcgggccccgcactgagagcggcgggcggccccgggcagtgagg

SEQ ID NO: 11715 - DNA, 122 bp, Homo sapiens
gaagagaaatgaatggactgaaaactttctaaactaaccacccttgttgctggccagcttcgctgatttcctgagccctgaggagctgggcacctagcactggggaaacaggaggagggggc

SEQ ID NO: 11716 - DNA, 122 bp, Homo sapiens
aggggcggaagtgtcgctctcgccccgcccataaactcaaactcagaactgccccacttccgctcactccatcttgatgagagttggtgtttgtgggttatttgtgaagccggaaagaagcc

SEQ ID NO: 11717 - DNA, 122 bp, Homo sapiens
ccagtggtacagtcacggctcactgcagcctcaaccacccaggctcaatcaatcctcccacgtcagcctcccaagtagctggaactacaagtgtacaccaccatgcccggctaatatttgtt

SEQ ID NO: 11718 - DNA, 122 bp, Homo sapiens
ctttttcagtgggtatttttctgtctcccaacctctactgtaaactttctggtccgagaacgagccgaacacagcgcgacgcagggactaggacggcccggtgaccgcgcggattcaggatt

SEQ ID NO: 11719 - DNA, 122 bp, Homo sapiens
cccgtgggtgcacgatgggccgggagacgaaaactcacttgcacttgccgtgacaacaggcggcagacagtagggagaccttgagtctttggcaaagaccttgttttcctcggtgtttcccc

SEQ ID NO: 11720 - DNA, 122 bp, Homo sapiens
gcgccggggacgggagcgacaggagggctggggagcaggggaccgagtgctgggactcaccggaatgtgcacgcgcagcgaacgcctcttctggctggcatttttcttgccgccgctcccgc

SEQ ID NO: 11721 - DNA, 122 bp, Homo sapiens
ccctccgcctgcaaagcctgcgctacttgctgacccaccgccagtcctcgccgcctgtcgcgtgctcattaccctctagtttgccatgagtacctgcgggccctcaaaggatggggaaagac

SEQ ID NO: 11722 - DNA, 122 bp, Homo sapiens
atctacctactctaacaccagggtgagggtatgaggcaactagagaccacccctgtaaatcgaagccaaccagaattattcagactagccagtactcagctgtttgctctgatctggcctag

SEQ ID NO: 11723 - DNA, 122 bp, Homo sapiens
cctttcccccaagcttctctattccagcccaagagacacatagggaagtttggcaagggtcggtgcgggagccatcaagggtggatgtgggcagattgtgctgtcatctccaaatgaagtaa

SEQ ID NO: 11724 - DNA, 122 bp, Homo sapiens
tcaggctgggcacacatggcctcctctccgagggtcctgatacaactgggtccaaggggccggaagctcaggaaggaaaggcccagagtcccccacaccggcctgtgcagccgttgctgctg

SEQ ID NO: 11725 - DNA, 122 bp, Homo sapiens
gaccacgcgatccaggagtcgctgcgaagggcagcgcaggagcgggctggccaggccctacgcgcaggtgggagagaggcgggagaagaagggggcggggcgctaagctcttgtggggggtt

SEQ ID NO: 11726 - DNA, 122 bp, Homo sapiens
ccctgctggctgacgtggggcacagggtacacaacacagcggccgtaatatgacgggaatcgcacggtggatccttctcatacaacttccttgcaatgcagcaccagtgccacaggaatatg

SEQ ID NO: 11727 - DNA, 122 bp, Homo sapiens
atagcaaatactcaaaaagtattcaataattcaatcaataaatataagtttcatcttacacgtaagatacaggtcttatctcctgatggtgtgtccattttgcctggtatataacagataat

SEQ ID NO: 11728 - DNA, 122 bp, Homo sapiens
cccgggaacgcgacctgggggttggacaggaaaccaggggtcggggcagcctgctgggggcgtctcgtgccccccaccctccattcctctgaaccagtccggaaggggggttcggctggcaa

SEQ ID NO: 11729 - DNA, 122 bp, Homo sapiens
ctaaaaagaggtctgaattaaagtcttttctccaggtctaagaccacagagggcccgtggcgagagcaaaggtcatgcaatggtgttgctaaagtgaagggattaattgagagggttgagcc

SEQ ID NO: 11730 - DNA, 122 bp, Homo sapiens
tcggatcggctgggacggcctgcagcccccgcgcgcggggaaagggtgagtgagagaccccggggctccgcagtcccgctaccgacttccacagccccccgaccctcgcgggcctccagaat

SEQ ID NO: 11731 - DNA, 122 bp, Homo sapiens
ggtagccgaggcggggagccccttcaagggcagcagcgctgaggcctgcgagctggttgtcggagaggtacaggtagatcaggcggcccagcccggccagggcgcccgcttccagctccgcg

SEQ ID NO: 11732 - DNA, 122 bp, Homo sapiens
tccatcgaggacctgtttctcactctagacccctgagcctgacagtaagaccctctcggacggggccagcacaggctgccctaggtctcctcccagggtccagcacagcctgctgtggccag

SEQ ID NO: 11733 - DNA, 122 bp, Homo sapiens
atgccgggagttgtaggcggtaactgctgcaaagccgaagccggcgcgcaaaccggctcccgaggcggcagctctgctgcaaccttttaatgggggaagagaggagactcagctacagatct

SEQ ID NO: 11734 - DNA, 122 bp, Homo sapiens
aaatagaaagtctaattatttggaaacaaaaacatgtgctgggtcagctgagtctgttctcgtgtaaccagagtcaattcgattactgagttgattgttttctgaaatatttgtcccagata

SEQ ID NO: 11735 - DNA, 122 bp, Homo sapiens
gacgggaactggttgtcgtaggtatttaacatgaagtcgctccagattgtgttacctgcccgagcagaccccgaaagccccatcctggacctggaccttcacctgcccttgctgtgcttcag

SEQ ID NO: 11736 - DNA, 122 bp, Homo sapiens
agattatcctcagtttcagatacttcataataccttgtgttgtgtggggtcatacatcatcgtgtttgtaagagaagatggtcattttattctctgtataaaacttagctctaaagcagaaa

SEQ ID NO: 11737 - DNA, 122 bp, Homo sapiens
ggagccctttgcccaggcccctccacggtggcgtcgtgcggaatcaccgcatggcgttcccgccagcacggccacagagacacagccacgcctcttgtcaggcctcctggtgtttcttgtac

SEQ ID NO: 11738 - DNA, 122 bp, Homo sapiens
aaaggaaggcagttatcaaaaggaacgcaggcaaagcaggtgatagcagatgaaactcggcgattattttcaaaagaaccagcaggctctgaagtctgcggatgcttctctggcacacccca

SEQ ID NO: 11739 - DNA, 122 bp, Homo sapiens
ccaccatcttgggggcgggactttgtcgagggggcgggacttttgccgagggggcggggccgccgagggggcggggccgccgagggggcggcctcgtaccctagggaccctgcgtagcccgg

SEQ ID NO: 11740 - DNA, 122 bp, Homo sapiens
actctctgcgtctctggagacaagggcactacacgcacttcagaatgaagagttgtaagtcgctgacctggggcggactggagggtggggtggggtgggtgttgaggggcacgcccgggctg

SEQ ID NO: 11741 - DNA, 122 bp, Homo sapiens
ctcaggagatacccaaagttctttgagggctcagctccgctcaatccgtccctgggccagcgtgctgcgcaagtctgttcccgcgcagaagtacacaccggcgacgggacagcgctatccct

SEQ ID NO: 11742 - DNA, 122 bp, Homo sapiens
cacttctcctgctgctgcacatgatgcatgtactccatcaccccaatcctcacaaccaagcgggctggggatgctgaggccttggaggctaggggcttgccccacaaccatggctcacaggc

SEQ ID NO: 11743 - DNA, 122 bp, Homo sapiens
catcacatactctctccctcttggtttatcagatataaaatgggcaaccaaatgtatcctcgtgtaatctgttagtgacagggaacgtatgacaattttgaaagcagtgatataactctagg

SEQ ID NO: 11744 - DNA, 122 bp, Homo sapiens
cgccggcccagctgcacatggtgggctcccggtccctgcccttaccatgtctggggctcgcgactcaggcagggtggcccctggggagattttggccactggagatgtcctgtgccctgctg

SEQ ID NO: 11745 - DNA, 122 bp, Homo sapiens
agggttttcatatacataaagctggtcattcaaaagttgtcttgggaattcttcacagtacgggaggtctgagcatttcatgatgtctagcatcccgcccaggttgacgaaatgccagtagc

SEQ ID NO: 11746 - DNA, 122 bp, Homo sapiens
cctgaggctggaagggagcccggggacaattggagttgcacacgctcggaaggcgggaggcggcaaggagaaggctgccttagaggtgaggggaattggggcatgatcatgggccgcgatgt

SEQ ID NO: 11747 - DNA, 122 bp, Homo sapiens
gttgattcattgatgaactggcgaatgaatcttgaatgggttggtagaagatctgattcacggacagccatatgtaaggatggatgaatgggtagataggtggataaatgaatacattcatg

SEQ ID NO: 11748 - DNA, 122 bp, Homo sapiens
cgcggtatgggcagtggaaactgcgcatgcgcggcgtcagggtcgggcggaagttgacgccgccgtgccgccgccgcgtgacgcatttcctgtttgttgttggagaaaggagagaaaggaaa

SEQ ID NO: 11749 - DNA, 122 bp, Homo sapiens
gttgggattgcgcttgcgcacagcgtgtcttgtacgttcccgcgcttttctggaatctttcgcccccggaagggcagcggcgggcgcctgtgtggaaggtggggtggccagagacacccgag

SEQ ID NO: 11750 - DNA, 122 bp, Homo sapiens
caccacactgcatccactcacccaagtccaggtcctgcccactgcaccaacgttattccacgctgctccccacgcccctcgaggggccagtatgctctgcccacctgagccacgtgaaccta

SEQ ID NO: 11751 - DNA, 122 bp, Homo sapiens
gggcctggggcggggctttgagcccgacccccgcacttgttcctgccgcgaccctccactcgaatgggccagtccctccagggcccctgctgggagctctggtctcaagatcctgcttggtg

SEQ ID NO: 11752 - DNA, 122 bp, Homo sapiens
cactgcccctcaccagcgtcatgggaggacagggcttgtatcatccggcctgcactccagcgaatctgataatcaggactactcaacatgtgcatgagcaagtccaggacccttgggtcctt

SEQ ID NO: 11753 - DNA, 122 bp, Homo sapiens
ccgcccctgtctctgggcaggcagccgttactaggcaacagaaaccggctggagaggatgcggtggttgctaggcaaccccatcccaggcctcacttgccactttcctaacatccccagttc

SEQ ID NO: 11754 - DNA, 122 bp, Homo sapiens
cggggctgttgtagagcagagtgtccatctgtgcacgctgtagccacaagcgccgctgggcgtcgccaagcagcacacgcagcgagtggcctggacggcaggcgggcagggctgcacagtgg

SEQ ID NO: 11755 - DNA, 122 bp, Homo sapiens
ccaaatgctgccttccatgggcccctataattatagattgactctgtttacattttttagcgtcatttctcccctccaggtagatgaatatcaaagctgactgcaaaataaattcattagag

SEQ ID NO: 11756 - DNA, 122 bp, Homo sapiens
caacacaaagatctcaataattatgagatgcagtgattttttcttttttttctcttcccccggccgcgcttggaggtatctctaggttagactcctctggggctggaatgacgtgaagggta

SEQ ID NO: 11757 - DNA, 122 bp, Homo sapiens
ggtgggggcagcccggggcccttcagcgggtagctgttgagcaaggcaggtaaccccaagcgaggattagcgggctctgaacgcagactccgcactgacgggacgggtgaagtaccccgacg

SEQ ID NO: 11758 - DNA, 122 bp, Homo sapiens
gaaaatagctcggcctgccgcaagttccccctgcggtttgcggagtggtcgggcccggcccgcccctgctggcttctctgcgtgtgtgtatttgtatgtgtactgtatgtaaaaggcgggga

SEQ ID NO: 11759 - DNA, 122 bp, Homo sapiens
tgaaaaagggcacggtcgtctttgccgcttctccaggactgttgctgccgctgccgccgccgcttcattgcacattcaagtggaaaattttcaggagtcagcagaaacattgtgtccaaaaa

SEQ ID NO: 11760 - DNA, 122 bp, Homo sapiens
cgtctgtgcgtctgtgctcagtgaatctctggaaggtgtggggtgggccctgctatactccgcaaggcccctgctgtgcaagacaatgtcccgtctcttctgcttgaaatgatgtttaacta

SEQ ID NO: 11761 - DNA, 122 bp, Homo sapiens
gttctggatcctttttcttaacagttccaatttgtgagaaaactcatttatttataaagtcgtgactgcccccacctcttccattctttgaagtcttggtttgtcttcaggacattccaccc

SEQ ID NO: 11762 - DNA, 122 bp, Homo sapiens
caatgtgtttttatgtaaaaatttgtcagttgtttagaatatttcactttgtttttgaaacggagtgacaaggcagatttttggttagaggacgggagttgatcactatcattactttttct

SEQ ID NO: 11763 - DNA, 122 bp, Homo sapiens
gaaatatcccccgctctatacgacaccaggagcaaaggtctagaacagcccctcaaggggcggtgggcgtttcgcttcacatattttctggatctgttcatcaaaagccctctgagccaatg

SEQ ID NO: 11764 - DNA, 122 bp, Homo sapiens
agagaagagttgaatacctgtagcaggaatcagaagtttataatcttaggtaggtcaggccgtgtgctgcagctcatggttgtaatcctagcactttgggaggatcacttgagtccaggagt

SEQ ID NO: 11765 - DNA, 122 bp, Homo sapiens
cccttggacccgtctgtccccataagcaagggccaggactaggatgaggacagagagccacgtagggcacaaatgaagggcacaaacagcaagtacacagccctgagggtgacagcctcctt

SEQ ID NO: 11766 - DNA, 122 bp, Homo sapiens
gggccctggagcagaagggcgcgccctcagcccctgttacatgggaccccacagggcgggcgacagtggccaggagccccagccgaaactgctccgtcccggctcccttttctgcgcatcct

SEQ ID NO: 11767 - DNA, 122 bp, Homo sapiens
agacccccttgtgcctctcttttggagctcagactctgcggtggagctgtggaagccaggcgcacaggatgcaagcagccaggcccagggaggcagcagctgcatcctcagagaggaagcca

SEQ ID NO: 11768 - DNA, 122 bp, Homo sapiens
tttttccatacaaattattctgtttcttctatcttccacttcagttgcatttgttaaaatcggggtacctgacatcggagaggctaaatttagtcccttacacgtgacaacattttacactt

SEQ ID NO: 11769 - DNA, 122 bp, Homo sapiens
tgctaagggagtagatttttggtgcccttgtaacaacaacaagaacaatgccaggcgtggcgctcatgcctgtaatcccagaactttgggaggctgaagtgggtggatcatttgaggtcagg

SEQ ID NO: 11770 - DNA, 122 bp, Homo sapiens
tgttcccaaatattctaaatcaattggggtcctgaacaagaacaacacagagcagcctgccgccgtgatgcccaaagagaatcattttagaccctgaaaatgtgaagaagctgaaaactgaa

SEQ ID NO: 11771 - DNA, 122 bp, Homo sapiens
gatggtccacacccaagtgcagggaacatcgtggcagtcggctgggtgcctgcgtccaggcgaggacacctcccgcatcagggaaacacacgtttctggagtgaggaggctgaaggcagggc

SEQ ID NO: 11772 - DNA, 122 bp, Homo sapiens
tagatgagcgtgcgctccacctgcaggggttctccgcgcacgcgcaagtccaggccgccgcggccctggaatagagactcgcccttgatgtccctctcgaagtagtaggcggcatcgccgat

SEQ ID NO: 11773 - DNA, 122 bp, Homo sapiens
ggcgggaggacttcctgtaattctgcaaagcaaaagcggcaccctcgagctgctctgccccgcagggccaaaacagagcctgtgctcccatctgctcccagagcctcagggcatggacccca

SEQ ID NO: 11774 - DNA, 122 bp, Homo sapiens
aacccatcgatggaaagtgactgaggctcccagggcctgatggggagtggggagggacaccgggaaccaggcccagcccacccagcccgcagcacaggaaagagctgcagggaggccctgag

SEQ ID NO: 11775 - DNA, 122 bp, Homo sapiens
cattctcggaggccccgcccattctcggaggccccgcctctccctggccggccctgcccacggccgaaggccccacccacaccccgggaggccccgctcacagtcccggaggcaccgccccc

SEQ ID NO: 11776 - DNA, 122 bp, Homo sapiens
acagtgtacaactataaaaatatgtgttgagcaagaaatactattaatgtatattgaaatcggtgaagtacaaagagatattgtacatacctgttacttctttggcttataataatgtagac

SEQ ID NO: 11777 - DNA, 122 bp, Homo sapiens
ggctatcgcagagctgtgcaatctgagagctggaaggcttcggttctgtcccagtacacgcggtgcaggaccacggttgagcagaaggtgcatctgcgtggcaccgtggcgctgaagtccag

SEQ ID NO: 11778 - DNA, 122 bp, Homo sapiens
ccgccggcctctcccttgagtgtgtctgatgtgcagactccagggctgcccttggtgctgcgtggcgttcccggtcagcccccgtcgcctgtcactgggagccaggagtctgtgtcatctcc

SEQ ID NO: 11779 - DNA, 122 bp, Homo sapiens
ccgcaggctccgcccccagtgggcccaaggtaggcggggccaagtcggccggtgggtgggcgcggcctgttgagaacgcagtggggccgcgagcggcaaaaaacaggcttgggaaaggcgaa

SEQ ID NO: 11780 - DNA, 122 bp, Homo sapiens
aaaagaaacgaaactccatctcaaaaaaaaaaaaaaaaaaaaaaaagctggatgccattacgaaggatgtgcaggacactaaaggaatatagaggaaaggagtcatctaagtccatatgaag

SEQ ID NO: 11781 - DNA, 122 bp, Homo sapiens
cttgcgtcctccagtgcagcgagttcggaagcgaccggccgagcgcgcatgtgcgggacccgacattgtgcttgtcccatccggtgctccgtagttagcctctgtgagctccacgtaggccg

SEQ ID NO: 11782 - DNA, 122 bp, Homo sapiens
gaggtgtggagggagaggcgtggacgggaaccggggctgtgctcagcgcttgcgggacagcgcgagttccgggtgggtgtgggctcagtggccctgcacttggagcggccagccgccccaga

SEQ ID NO: 11783 - DNA, 122 bp, Homo sapiens
cactcgcgctcgggctggcgcggccgcgggtcccggcggcggggtgggcgggggaggcagcgggtgacagatgtactcctctgacagctctcagtatcagcccagtggctccctgccattgg

SEQ ID NO: 11784 - DNA, 122 bp, Homo sapiens
cagtggcttcactggtgatcttacactctacatcttttctggattcctgccttttacagccgaggtgctcggtggagtcatggcagtgccctttgtggaagactgggacttggtgcaaaccc

SEQ ID NO: 11785 - DNA, 122 bp, Homo sapiens
ttactggcatccttagaagaagagaaaatctggacacagataggtacagagggaaggccacgggaacaagatggccacgtgcaagtgcaggagagatgctgcagtagaaatcaaccctgaca

SEQ ID NO: 11786 - DNA, 122 bp, Homo sapiens
gccatcgcgcacggggtcttctcgggctccctcaacatcttgctcaagttcctcatcagccgctaccagttctccttcctgaccctggtgcagtgcctgaccagctccaccgcggcgctgag

SEQ ID NO: 11787 - DNA, 122 bp, Homo sapiens
aaatcatgtgcatttatatgtactagttgcaatgtaaaatgtatttcttactgaggaccacggggaaaaaaagtttggaaaaattactgagaactttacttaagaacaatttgtatactcta

SEQ ID NO: 11788 - DNA, 122 bp, Homo sapiens
accgtgtggaatcagttatttgtagttgctccccaatttctgtttttcattgcaaggaatcgaagccataaagtctgagggggtgttacaggttgaggattagggagtgtctaaaccttgac

SEQ ID NO: 11789 - DNA, 122 bp, Homo sapiens
tgggcaagcgagcaagactccgtctcaaaaaaaaaagaaaaagaaaagaaaacacttaatcgctgccctaaaggatgccatctttgcccttaaggataattaggttagaaagagaagccata

SEQ ID NO: 11790 - DNA, 122 bp, Homo sapiens
tgccattgccctgagcccgttgcctgagcttactggttccgcatctctccgcctggctcgcgtcccgacgcagccagacagccacattaggagccgcgagacacctcgaccacctggtgaag

SEQ ID NO: 11791 - DNA, 122 bp, Homo sapiens
tggtgcctgtgtgtgtccactcacgtacacgtggggtgggggaaacgtgtctacagatgacgctaaatcagttggggtctactctaaacagcattgtgtgtaagaagcatcctcaagctccc

SEQ ID NO: 11792 - DNA, 122 bp, Homo sapiens
ggtgactcagggaggggcaggacacaccccagagggagagatgtaagccttagagaaaggcgactcctggcctattcagcagttggggacactccttggtcagggaccaagccagggttctg

SEQ ID NO: 11793 - DNA, 122 bp, Homo sapiens
agcgcggggctggtgagggctggggggtcggggccgtggctggaaagcacggagtggtggcggcggctctgggggctccactgatggccatcctggaagaggccatcagccggcagaaaggg

SEQ ID NO: 11794 - DNA, 122 bp, Homo sapiens
ttgcacttactccttgccggcctggaagctctgagtcagcaggagcagtgtgtgtgcccacgtgtgtgtgcactttcttgggtgtgtgtgtgtctgtgtaattggattccccacagcacatt

SEQ ID NO: 11795 - DNA, 122 bp, Homo sapiens
ggggcagggctgcctcagaccagagagccggccctgccagccatcggccgtcgaagaaggcgtgcagcttacgcagacctcgggtgattttggagcaaagctcccagcacttagctgaaacg

SEQ ID NO: 11796 - DNA, 122 bp, Homo sapiens
tgacttcgtgatccacccgtcttggcctcccaaagagctgggattacaggcgtgagccaccgcgcctggctaagggtgatttttacatttgtaaatggatttaaaaaatcaaaataacagtg

SEQ ID NO: 11797 - DNA, 122 bp, Homo sapiens
gatacccttcataagcaaaccacaatagagatctgtgtaaaatcgtcttactctgttagacgattctacacagttataaaatcccattactacgcagcttaaagtacaaatcacctcacacc

SEQ ID NO: 11798 - DNA, 122 bp, Homo sapiens
cccaatactggcctctgtagggagcaggggctttattcgtcccacccactcctgtgctcccgggacaaggcctggctcaagcagttcccaaacatgaacctcccttatccgggtcctcagag

SEQ ID NO: 11799 - DNA, 122 bp, Homo sapiens
aaactcaaacaacacagtatccgccatgccccctcctcgcacgcctaaagatgcgcccagcgcttccagctctcattggccaggcttggtaagccacgcctcttgcgtcatggcgcgagccc

SEQ ID NO: 11800 - DNA, 122 bp, Homo sapiens
acgatgagagagccgacttctccaagctgcactcctagctctctgggacccagcagggaccgctgccttccagccagcagtttgaagaaggacagctaccatcaaacacagacttacagcct

SEQ ID NO: 11801 - DNA, 122 bp, Homo sapiens
gacactctccactgtctcctttcattgctcatgttctcattgaatctcacaccaatctcgcgaggcagctgaagaaacccaggcccagaatggtgtgtggtttacccatggcctcccagggg

SEQ ID NO: 11802 - DNA, 122 bp, Homo sapiens
tgctttcccagcctattttattggtcttgataggataaggcacagccaaggaataagacacgtgaagatgtagtgctgctgttactacactcaccctgtaatgtgatgcttcctgtgataaa

SEQ ID NO: 11803 - DNA, 122 bp, Homo sapiens
atcactggcggcacctgccgcgtgtggtatctgagtggccgtgactcgtgcgtccgccctcgtgtgtcacacagtcacttaggcacaagcatctgacccttgtaacatcttagagaaacgct

SEQ ID NO: 11804 - DNA, 122 bp, Homo sapiens
ctttaaacaagttaaatctaataaagtttatttgcacgagcgcacgtgcacacacacacacgatttatgaggcattcatcaggcagcagcacttaacagggagaggttcagagagctctacc

SEQ ID NO: 11805 - DNA, 122 bp, Homo sapiens
cagcatccttccctccagacgcacggagacctccaggcaagcaggatgcgcgctcgccctcgcttgattgtttgctccccaggatgctggggaaagcggctgctgaaagagcaaactttctg

SEQ ID NO: 11806 - DNA, 122 bp, Homo sapiens
ccctctacctcggtgctgccttctcttttcatcacagtggaagggcatcttggggaccaccgagcaactttgctaggccagagccacaggtaccctctctgcccctgcactcaccttgctgc

SEQ ID NO: 11807 - DNA, 122 bp, Homo sapiens
ccttccataatcctgatgtgctccatattgccagactctttcaagtccttccccgccctgcggagaatccctactcacacctcaggaccagctcagacatggtctccaggagaccttttcta

SEQ ID NO: 11808 - DNA, 122 bp, Homo sapiens
gtttggaagtccaagatcaaggtgctgacagattctgtgtctggtgaaggcccagttcctcgttcataaatgattgcttttttgcagtgtcctaatgtgaaggaaggggcaggagagctctc

SEQ ID NO: 11809 - DNA, 122 bp, Homo sapiens
gcctcgggttcctcttctgcagaaagcagatgatgacgcctgcatcacggactgcatggtcgggatggcggagtgaccacaggctcgggaagtgacttgggacggtcactgtggctgagtta

SEQ ID NO: 11810 - DNA, 122 bp, Homo sapiens
attgctattgttaataataataatgaaaataatattattaggtctatattctaaacagaccgaggacactgagaagcctagatacagtgagactggccagttttgtttcctagagagtgtca

SEQ ID NO: 11811 - DNA, 122 bp, Homo sapiens
ccgggagcacacccagggcgggtcttggtgctcaggggccctcgcctcacttgcaggtttcgaggcggctggcagccgcccccccaccccatgccctttgggtggcacctgtgctggtggag

SEQ ID NO: 11812 - DNA, 122 bp, Homo sapiens
aactgtgtaggtaaattttaagtttccttaatttaaggaacgtgcgccccctaattctgccgcgccaggaaggagggcgatctggagtgtttagaatacaatagagcccaagtaagcgttga

SEQ ID NO: 11813 - DNA, 122 bp, Homo sapiens
tcgggtaccccccaccccacccgaatcccaggggcaggtagagtccggtgtgggcaggagcgaggccagtcctcccgcgagctgggcggggcggggcggggggcctggaggaaggagacggg

SEQ ID NO: 11814 - DNA, 122 bp, Homo sapiens
tcccgtcctacggctgtcagggaagggctccggttccggtagggtctgcatttggaaagccgggggcgatgcaagaccgccttggcgtcgtctccctctcagccccggctgagctgtcggat

SEQ ID NO: 11815 - DNA, 122 bp, Homo sapiens
gggcgggcggcagaagatggcgagggtgtgtaggcggcagcaatgctccgttgagagacgcggctttcggcaagaactggattcgtggcgccacaagctcattcactgtgtaggtgagaccc

SEQ ID NO: 11816 - DNA, 122 bp, Homo sapiens
ttctcaggatgatgggtgcctagctgcccacatttacgtaactgaaggagaccattcacacgattgttctaagaacaaagacttcctctaagaagattggctgcctcctcttgctagctggc

SEQ ID NO: 11817 - DNA, 122 bp, Homo sapiens
gcccgtctctccctgcgcaaaattccaagatgagcaaatactgggctcacggtggagcgccgcgggggcccccctgagccggggcgggtcgggggcgggaccagggtccggccggggcgtgc

SEQ ID NO: 11818 - DNA, 122 bp, Homo sapiens
aagcaagccggtgccccctcctcctgctgccaccgcccactgagctgcctgggctgcagacgccctggttggagcgtctggggccagatgttatagggcaagctaaaaataaccgggcaggc

SEQ ID NO: 11819 - DNA, 122 bp, Homo sapiens
gcggagcgcgaggaacaccccccagtgtcagcgctccccgggctgcacaggaagcgccagcgagacaaagagcccgcctgtgctcgctgacacggtgcccttccggccccacgcgggagagg

SEQ ID NO: 11820 - DNA, 122 bp, Homo sapiens
ggccagagccccagaccacacagaccgtgcgctcctccgccctcccggcgccgccggcctcgcccatgtctcagtacgcccctagcccggacttcaagagggctttggacagcagtcccgag

SEQ ID NO: 11821 - DNA, 122 bp, Homo sapiens
aagcctccagtactaagctacccagacagaaagcaacatccaggtcaaagcatcactgtccgaccacatgacccttctacacctgggccccgaaggcactgctaggagtcaacagctccacc

SEQ ID NO: 11822 - DNA, 122 bp, Homo sapiens
gggttccaactctattttgagaccctttcaagcaaacatcccaatgtatttggcctttgacgcaggtttccccacagtacagagaaagcctttgacccacccaccgggagagcaaaggctcc

SEQ ID NO: 11823 - DNA, 122 bp, Homo sapiens
acacctggagaatgtgtcttccacccaatttacatacacaaaatgagggaggtatagaagcgttgtcttctgcaatgtaaagcatgtgaaatttgcataattagtcacgaacaggtaaaaat

SEQ ID NO: 11824 - DNA, 122 bp, Homo sapiens
tccataacccaggaagcaaatctgtgtcgaagcctgggggcggggccagagccaaggcagcggggcgaaggaggggccaggctcagaggcggagctcaggccgggagcctctgctccagagg

SEQ ID NO: 11825 - DNA, 122 bp, Homo sapiens
gtcccattgaggcagaggctgcaattgaagcactggaaaaggttttcactccaataatgccggtactggttcttcctgcagccacacacggtgtcccggtccactgtgcaagaagagatctc

SEQ ID NO: 11826 - DNA, 122 bp, Homo sapiens
tgaacgggggcgacctcaagttccacatctaccacatgggccaggctggcttccccgaagcgcgggccgtcttctacgccgccgagatctgctgtggcctggaggacctgcaccgggagcgc

SEQ ID NO: 11827 - DNA, 122 bp, Homo sapiens
cactccattacccctgtgccccggtctttccagtcatcttgtcccctgcctcgcattggccggcagccccgtcaccctgaccctggtcaccccatcagctgggtcaccccgttacccccatg

SEQ ID NO: 11828 - DNA, 122 bp, Homo sapiens
ctcaaggaagaaaatattcattgagttgataatatgaaactcttctttgttttagttgtacggactaagccagaatcacttatctccccaggaatcagggtatttcacataagtcagtttag

SEQ ID NO: 11829 - DNA, 122 bp, Homo sapiens
cctcgcggtaccgccactcgctcgcagtgtcgccactcgctcgcagtgtcgccactcgctcgcagtgtttgaaagtcatgtgaggagacagcaggtttctgactcagtctcttggagtaata

SEQ ID NO: 11830 - DNA, 122 bp, Homo sapiens
gtcgcctcggcttgggagcggcgttatttccacgaagcgctagggccttggcagcctcggcgctacctgcccagggctcccggtggccagtgctcagcagcccgggactccccgcagccttc

SEQ ID NO: 11831 - DNA, 122 bp, Homo sapiens
tcagagtaacatctaaagtctatactattgcctacaagtcaccatgtgatgcagtcccttcgtacttttctgaactaatttccagccacccttctagttcatatcactccagctttattgtc

SEQ ID NO: 11832 - DNA, 122 bp, Homo sapiens
gactccgtctcaaaaaaaaaaaaagagagtcagtgtggagggaagtgtctctgttgggtccgggtgctctgtgggactctgaggaaaagctcgcaccaggtagatgctgttctgtccccatg

SEQ ID NO: 11833 - DNA, 122 bp, Homo sapiens
ccaaggaggcccgcctgacgactgaccagttgccatggcatcctactacgagatcctagacgtgccgcgaagtgcgtccgctgatgacatcaagaaggcgtaagtgcctccgtatgcaacag

SEQ ID NO: 11834 - DNA, 122 bp, Homo sapiens
taccccccaaaagtgatggtattaggaggtggggcattttggaaattgattaggttatgacgacagagtcctcataaatgagattagtgcccttttgttaatattataaaagaggcccaagg

SEQ ID NO: 11835 - DNA, 122 bp, Homo sapiens
gattgcagggaggagggagttgccgctaggcgaaagtggggaccgccacacagttggctgcggattaaaggtagggtgtgacgtgctgaagagggccaaagcgagcccctccctgccgcctg

SEQ ID NO: 11836 - DNA, 122 bp, Homo sapiens
gttttttggtcaaatcatccctcactcaactcattcctccgtgggtgttctgatttggatcgactttgcttgcagatgataaactccttagggctcaggcttttatttctctggcacactct

SEQ ID NO: 11837 - DNA, 122 bp, Homo sapiens
cagagaggaggacccagcgtcctcggctctgccgcaggccttcttggtctggtgggtactcgaggcagttgagaaccttgctgagctgagcgggcacctcgccttgcctgctggttcgacac

SEQ ID NO: 11838 - DNA, 122 bp, Homo sapiens
agaggccgcggggagagggagccgaggccgggggttcccccctggggctgggtctggcgtcggggcccggcttcaggaggggcgggggagggaggattcccgcccggaggaggagcggggct

SEQ ID NO: 11839 - DNA, 122 bp, Homo sapiens
acagggcgccgttctggcactggcaccggttgctgcagtggggcccccagtggtcgctgtcgcagcctgcaagagacgggacagtcagggatcaggagccccgaaggctctccttggggcag

SEQ ID NO: 11840 - DNA, 122 bp, Homo sapiens
cgcgcccctccccgcctgcctcccgggccgcagcgatgaattccgccgagcaaaccgttacgtggctcatcactctgggggtgctggagtcgcccaaaaaaaccatctcggacccggagggc

SEQ ID NO: 11841 - DNA, 122 bp, Homo sapiens
cgccgtttccacctcgcagttccagtgcaggcgggtgggactcagtggtgtgtgtgtgtgcggcgagtgcctgcctgtaggtggccccggccaagccagccccgccccaggaggaggctgaa

SEQ ID NO: 11842 - DNA, 122 bp, Homo sapiens
tacctttagcatggattcacaaccttctgcttgtttcagctaagacagaagtgtcagccacgtcagctccaccttaaggaggggcctggatcacaaactgtagttattagctcaagcagagg

SEQ ID NO: 11843 - DNA, 122 bp, Homo sapiens
actaaactggaaggagtacaattcacaatatcaagaagatttggacttcaagggtttcatcgaagtttgtgaccttaattagcttttacgttgttacagtttttatatttttagtagagctg

SEQ ID NO: 11844 - DNA, 122 bp, Homo sapiens
ctcgtaggtggaggagcgtgtacctaccgggggagtgctgcgcagtgcacctgacttccgcggcacacacccgtccccggacctaggtgtctcgtcgggcgcgatggcgggggcgaggcttg

SEQ ID NO: 11845 - DNA, 122 bp, Homo sapiens
acactctgaagccttcagagtcatatttcacaatagtattttcacagtgtctgcagagtccgtgtttataaaaacagattcaaaacaattaaaaaaacataactggaaactgaactccagcc

SEQ ID NO: 11846 - DNA, 122 bp, Homo sapiens
cgggcccctgtcggccatggccctgagtgcggtgtctggggcctggctccctgggctgctcgctgcccgctgcacaaggcctgggcagccgctgctctttggacatctgacccttgagcctc

SEQ ID NO: 11847 - DNA, 122 bp, Homo sapiens
gggcctgcgggagaagttacggagtgtatgctgctggagtggctgtggggcagggagcctcgggagcttggtttgtgggatgggggtgccactggggagtggcgacgagagaaaggcgtggg

SEQ ID NO: 11848 - DNA, 122 bp, Homo sapiens
gccgtccccttcccgttcctttcatttccctcccctgcgcagaaagatcgccccccttcgcgacccttcccaccagtcacacctgttcctggggacccacctggcaagcagagcgctggtcc

SEQ ID NO: 11849 - DNA, 122 bp, Homo sapiens
tctctttgtttctgcccattgaatttctcccattgctggcagtctcccgtgctgggattacggaaatctggtggaggggcatattggcagggctgcaggtggccaatccctgattggatgcc

SEQ ID NO: 11850 - DNA, 122 bp, Homo sapiens
gcgggcctgcgcgtgactttagcgcgcgcggctccgcccggaaggtcacctccttcatcacggattctatttgcatccggaatcgcatgtacatgaaaaatgtgtccgcgtgcggccccgac

SEQ ID NO: 11851 - DNA, 122 bp, Homo sapiens
gctcgataaaccgcacgtgttcaaagaggagcaggcaacacaatgcaaggaggaggacggcgtctacacgggagtaaaagcaggccagcccatcgggcgctggaagaaaaggcacccccgtg

SEQ ID NO: 11852 - DNA, 122 bp, Homo sapiens
gaccctgttgctcatgtaaacgggggtgcatgttttcccagggaggccagcagcagccaccggctccttgaccaccgtgcagaaatcctcatggactcagaggaatatattttgggtctttg

SEQ ID NO: 11853 - DNA, 122 bp, Homo sapiens
ccgcacggggagctgtgtgtgtccgagagacttggtcacgaagcaggttgtgctgctcctcgttgacgtttcgttgctgagtctccttatctcagattcttctgagctgttttcattctcaa

SEQ ID NO: 11854 - DNA, 122 bp, Homo sapiens
gcgaggcggcggcgcgcagtgcctactagcaattgtagtccttgccccaccttggcctggcgaagatcccgcccctggaactacgctcccgtcgtgctccgcggctccaggcggagacgagg

SEQ ID NO: 11855 - DNA, 122 bp, Homo sapiens
cttaacaaaaaaaggaaactgaaccccgattggcgaaatgtcttgctcaagtccataaagcgagaccaccggctgatctggacccttagaatctacccacccttctccacctcccctcccca

SEQ ID NO: 11856 - DNA, 122 bp, Homo sapiens
gcagagggggcggctctggtctccgatggctggagaaagcaagcaccaagcgtaggtagccgcgcgctggagtcgcgcgtttactcttttcccccttacttttaactagaggaggatggcaa

SEQ ID NO: 11857 - DNA, 122 bp, Homo sapiens
tggggcctgcttcgggggactagcggcccgggaggtatggaggtgccgctccggggggggcgaaagaaacgtggaaaggtcgcccaggagggagcctgtcccccagggtttccaggggcaac

SEQ ID NO: 11858 - DNA, 122 bp, Homo sapiens
aaaggcttggctgagctggggacgggtgggggtgctgggagtcccgatgtggccccaggacgggtcctggccctgctgatggggcctgagcccctgggctccgtcttgggttgctcctggga

SEQ ID NO: 11859 - DNA, 122 bp, Homo sapiens
aagaggaggggcgatggggtagtggggtagtgggaattcacacagcttcaaaccctgtggcgtgtccctctcctccttcctccatcctgtcctcatgtctatgcccccagctacatggattg

SEQ ID NO: 11860 - DNA, 122 bp, Homo sapiens
agaaaaccaatgtagaggggaggcagggcaggctggcagaggaaagaggtccagggggctcgggatggataataagggtccctacctcatcaggctgttgggagagccaagtgcatgtacgg

SEQ ID NO: 11861 - DNA, 122 bp, Homo sapiens
caacatggtgaaaccctgactctaccaaaaatacagaaaatagccaggtgtggtgatgtgcgcctgtaatcccagctatttgggaggctgaggcaggagaatcgcttgaacccaggagacag

SEQ ID NO: 11862 - DNA, 122 bp, Homo sapiens
ctttggatcgagatgtcctccaacagcaatacattcatagtaaccacgggcaggaccccgcggctctctcccctcttccctgaaacgtcggtttctaaaaaatagcttgtttgctgtacaca

SEQ ID NO: 11863 - DNA, 122 bp, Homo sapiens
tggcgggacggctgccggcctgtgtggtggactgtggcacggggtaagggggcttacgggcgggggtggggaaactgaggcggaggaaggaagatggcgggggagggaggaggccgggaaat

SEQ ID NO: 11864 - DNA, 122 bp, Homo sapiens
cctgggcgacagagtgagactccatctcaaaaaaaaaaaaaaaaagttctttatatattccggatactggtcttttaggcacacaggttatcctgtatattaaataatagtggctgtgccag

SEQ ID NO: 11865 - DNA, 122 bp, Homo sapiens
ataagcccccatctcctggactctcctatccacatcttttacttgaaaaagccaaagacacgcagctgcctctctccaactctctcccctcttcctagctggcctccaaaaacatgaagcac

SEQ ID NO: 11866 - DNA, 122 bp, Homo sapiens
cataataaaatgtgtgtaaatacatattcagaagcttcaagtataaaggaagattctaaccgccctaaagaggaaacaatgcttactattaaaaaatctacagtggtcttaggtgactgata

SEQ ID NO: 11867 - DNA, 122 bp, Homo sapiens
ctctttcttgccatcccttctccctcgccttccttccctctcgtgccggccagtccccgccgcccctgccctgtgcacacacacgcaccccaacccagtgtcttcagcccaagtgaaatgcc

SEQ ID NO: 11868 - DNA, 122 bp, Homo sapiens
gtgtcgaaatcaagcatgactagattgacgtcgccaaatcaccgtctggaggccactccacgccaggagcagcagggcttttcacacctgataggccctcactctatctacatcaagtcaca

SEQ ID NO: 11869 - DNA, 122 bp, Homo sapiens
ctaatcccctgagagaaaaagtacagagtttattgcagctttaaaatgccatgcccctcacggccaaaggcatctgaattaaggaagcagtattcacagctgctttctccagacattgagct

SEQ ID NO: 11870 - DNA, 122 bp, Homo sapiens
gcctccctaacgacttcggctgcccgggccctgcccctgaacctcgcacccctcctgcctcgttcaggaagctccgcacctatccggccgccaccctcagcacagccacggcagccgactcg

SEQ ID NO: 11871 - DNA, 122 bp, Homo sapiens
ctagagtaaaattgaggtggggaacctccatccctgggacatggagcacaggggcgaccccgcgccgcttggtcaaaggaggtccgaggccctgcaggaacagcccacagccggagcgagct

SEQ ID NO: 11872 - DNA, 122 bp, Homo sapiens
tgcacctcctgagtgaaccctgagctgccagagaccaggccggggctcggctgcacagcacggccacgggctgaggggaaggaaaagggtcccaggcagagcttgggaagagaggaaaggtg

SEQ ID NO: 11873 - DNA, 122 bp, Homo sapiens
ggagggggtgaaaatggcgcccagctcgaaatcggagcggaacagcggggctgggagcggcggcggcggccccgggggagccggagggaagcgggcagcagggcggcggcgggagcacgtcc

SEQ ID NO: 11874 - DNA, 122 bp, Homo sapiens
gaaaggggagggggagggcatcttattttaccaggtaaacaagggtcactaagaggcatgcgggaagactaaacccatccaccaatgctagtttgcaagtagcaatcacaaaaccaggacac

SEQ ID NO: 11875 - DNA, 122 bp, Homo sapiens
ccgttacctccgcgtcctgggaagtatcagcctttaccagctaccggaagtaactgcgcacgaaatctcccgcgggagctaagcctcttcgacaagaattctatagcgcgagcaaatcagta

SEQ ID NO: 11876 - DNA, 122 bp, Homo sapiens
tttctgtaaaatgagaaaaatgagatctctctcacagggttgttgtagaaataagcgaggcgtttcatctgctgcctggggcttaagtatacaataaatattaacaactaccattatttccc

SEQ ID NO: 11877 - DNA, 122 bp, Homo sapiens
tcacggaggttacattctagggctcgtagtcagacaataaactgataaataaacacaaaacgtggcagacgctgataggatgtgcagagaattagaccaacctgctgtgctggtggctctct

SEQ ID NO: 11878 - DNA, 122 bp, Homo sapiens
aggactgcccgggggttggcgccctgctgggttccaagccggtgggcgcggacagtgtggcgggaaggccgggcctggcgggtgggggcgcggcctggcggtgggggtggaccttcctgggg

SEQ ID NO: 11879 - DNA, 122 bp, Homo sapiens
tggcgaagagcaagcgtccccaggattggccagcttggcgccactagataggcttccgggcgtgattgggcgagcgggccagacttccggattcctgacaagccacgtgacccacccacctg

SEQ ID NO: 11880 - DNA, 122 bp, Homo sapiens
cgggagggcggggcctggagggggcgttcccagctttgccagtgccacgaggagccggttcgcccgccccgcctgggaccttccgtcctacccagtcctggccggttttctgggtcctcctg

SEQ ID NO: 11881 - DNA, 122 bp, Homo sapiens
aaggagcttctgggctgtctccttcaggaagtcctcctgccagccctccctctccagccccgagctgctctaaccaaacagttcagctttataatctgctgcctgtgctgtcgactgactaa

SEQ ID NO: 11882 - DNA, 122 bp, Homo sapiens
tgcaaggagcctaactggagagaaagaaagtcccttaattcattcaacacatatgaatcacgcaggcctgctttttggtgaaccccaggtttggttctggagatacactggggcaccagacc

SEQ ID NO: 11883 - DNA, 122 bp, Homo sapiens
gggtgagcaaggcgcaggcttttgtattgtagctctttatcagggcattgctgggactggcgcacgtgctcttaaaggtctcttcggataatcagtgtcactcccattgtagttggattcct

SEQ ID NO: 11884 - DNA, 122 bp, Homo sapiens
acttaaaacatcatccatcaagtttagaagagatgagcaaattgtggtatacgcataagacgacaatgccaaagaacaaactactccaggagcatgcatgaatctcagaaacactacgttag

SEQ ID NO: 11885 - DNA, 122 bp, Homo sapiens
ttctcatgggttggaagagatttggggtcacttactggctggtgaccttgagtgagttatcgcccttcataggctcaagtgttctgatgtctaaagtcagggaggtgggctggaacctaaac

SEQ ID NO: 11886 - DNA, 122 bp, Homo sapiens
gagtggggtttttttctgttgttttccatgagactactgtttttcccagctccgaattcccgaacaccttctcccactcactatcttagcgcttagaaagcccgaaataagccacattcagg

SEQ ID NO: 11887 - DNA, 122 bp, Homo sapiens
aacttacaaggcagttataggtacagcccctttgagacagtgccaacctgatatcttctgcgtgtttcctacaaacagggaccttctccagcacaaccacacacagccatcagtgtcagggc

SEQ ID NO: 11888 - DNA, 122 bp, Homo sapiens
gtgcagagctgccggcgcctgcgtgagaggagggtcgccagctgggccgtgtcctttgagcgcctgctgcaggaccccgtcggtgtccgctacttctctgtgagtagggaagggcccaggag

SEQ ID NO: 11889 - DNA, 122 bp, Homo sapiens
ggtcccgctcgtctttgtgtgcagactcctcttcccttctcggccgggggtctagggggccgctagtccgtgctcccgcctttgccgccgtggtgcagctcgggcggcgcccgggacggccg

SEQ ID NO: 11890 - DNA, 122 bp, Homo sapiens
tggggtggggccgggagaagagcagctgccatcactgtgtcatccatgagtcgtcccttccgcctctcgagttgagcctgtccatgagcctgctccatcccttgtcctgtctttcgagttgg

SEQ ID NO: 11891 - DNA, 122 bp, Homo sapiens
gggcattgctgctggctcagtgggcctggcaagagggcagcgttacccgcctgtggaaggcgatacacacggcccccgtggccaccatggccttcgaccccacctccactctgctagccaca

SEQ ID NO: 11892 - DNA, 122 bp, Homo sapiens
tcctttccccgtcagcctgtccctgaaatcagtcagcgcattaaagccctgaaccaggaacgggtggcagctgggctacctcccatcctcgtgcacacggatgctgcacaggccttggggaa

SEQ ID NO: 11893 - DNA, 122 bp, Homo sapiens
gttgaggtcctcgtccgggagacaggaggacaaggatccccgcctctcgtggggtgccagcggcatgagattattacacgtggtggagaaaatgcagcgcagtaaggggagagagcacccac

SEQ ID NO: 11894 - DNA, 122 bp, Homo sapiens
gccatcacagaccccctggtgggcctctgcatcagcaaatccccctggacctgcctgggtcgccttatgccctggtgagtagaatatgccccttcgaggtggcacaaggcaggacttccagc

SEQ ID NO: 11895 - DNA, 122 bp, Homo sapiens
cagggcggcctctggctccaggacccagcggcggctgcggcgggagccggccgcatgagacgctcccgcccattggcccgccgtatccgccaccgccattggcccgccccggccggccgcag

SEQ ID NO: 11896 - DNA, 122 bp, Homo sapiens
attagagggttgcttcaaaggtgaaaaatgaaactttgaaaaattacatgtttgtagatgcgtagaactaaacgggcaagccacactaggttttgtcaaacaatagttttatttgtgtcctg

SEQ ID NO: 11897 - DNA, 122 bp, Homo sapiens
acacacaaagagttacacaggaaagaagaaaaaaagggatttcttgctggtcctcaaattcgtttgtgcctctgactcttatcccaggagagacccagaagtgcctattgaatgtaacgttc

SEQ ID NO: 11898 - DNA, 122 bp, Homo sapiens
aatgcacgaatgcaggtacccagcgacagggaggtgctgtgggtggattcaccctggcttcgctgcggctgggagtgggcgctgctagtaagagatctcgcctccaagctccttccgtgggc

SEQ ID NO: 11899 - DNA, 122 bp, Homo sapiens
cttacaacacaaggcatttaaagcttcctggagccactgacctggtgacgctgtagtgcacgtctgcatttgaaagtaagcaagagaacagaaagcgagcaagagaaccgcaacctttacca

SEQ ID NO: 11900 - DNA, 122 bp, Homo sapiens
tctgctaactgaggaggcagattaggggcgcggagtctcttcccttgggtgcataggtcccggttggtagaggctttgagtcctcatcgccacagctgacggctgcgagggactaagagcag

SEQ ID NO: 11901 - DNA, 122 bp, Homo sapiens
ctcccgccgttggatttgcgcccggggcggcccccgactttgcgccccgtagttgagttccgtttatggtctgatttccggcctctcgcctgctcgccccgccgcccgcctgtcccgctccc

SEQ ID NO: 11902 - DNA, 122 bp, Homo sapiens
aacagctggcctcgggtccgacagttacaggtggggctttggggcttaggtctatgggagcgggaaacagtccagttgggtggaccctaacattccagccttttaacagatgatagagaagg

SEQ ID NO: 11903 - DNA, 122 bp, Homo sapiens
ctgctcgcgagcgctggggggctcaggagcccctgggcctggggcaggcgcctctgggcgcgcagagggtcgcaaaggcgcagataggaagatagaagcggtggaggtcatggcagctgcgc

SEQ ID NO: 11904 - DNA, 122 bp, Homo sapiens
ccagaccggaaagctcccacactccaggctgggcgggacccctcttcccatcccggcccccgaacttggcccaagccttggtcccccgcgccagacgcaaagtccgcgctgcgccccgggtg

SEQ ID NO: 11905 - DNA, 122 bp, Homo sapiens
cgttgccttattctggtagtcacagggtgacagccgagggagcggtaacctgtaatcagccggcggtgcgcagcccacacagcacgtggtccgcatcacaggctgcgttattgagtgagcca

SEQ ID NO: 11906 - DNA, 122 bp, Homo sapiens
cagcccagccgacccgccgcggggcttttccgtgacgtcagcgcccccgccgggagggggcggctctgcagcaaactcggagttgcagccacttggctaaatcagttactcgcagtcatgtg

SEQ ID NO: 11907 - DNA, 122 bp, Homo sapiens
acacgcaccccctcgcacacccgcgtgcacacacgggtctccgtgggcactgcgtacacacgaaccacagacactagcacctgtgtgcctgcattcacccacacaaaccgccctgctttcgg

SEQ ID NO: 11908 - DNA, 122 bp, Homo sapiens
gcgcagacccaagtgggacattcgctacattgttggcattccacgggcgtcacgtgaccccgcctcccgcgtcactctcggccgcataccagtccgggcggggcgcctgcggcccctgctcc

SEQ ID NO: 11909 - DNA, 122 bp, Homo sapiens
tggggggtggggtgctgccttggcagccggtgcctggtcgtggctgggttcagagccgagcggatgggcagacacactgtgtcattgtcacagaggtgctgctgcctctgccgcccagaagc

SEQ ID NO: 11910 - DNA, 122 bp, Homo sapiens
tgttccacagacgctcaaacccaccgccgctccaacccaccgccgctccctctcacgccccgcctcacccgatgctggtacagacagacgttcccgaagccgccggtgcccagccgctcccg

SEQ ID NO: 11911 - DNA, 122 bp, Homo sapiens
cttttgccttcgtaatgttaaccgtttcaggaccacgtttatagcttcaggacctggctacgtaattatacttaaaatatccactggacactgtgaaatacactaacaggatggctgggtag

SEQ ID NO: 11912 - DNA, 122 bp, Homo sapiens
agtgacctcagctaacataaccaaggaagcaggaggtgcccacctgacagatgaggaactcgaggctcaataatgagcagctgtccaagaccactcaggcaagaagcagagatgagaactca

SEQ ID NO: 11913 - DNA, 122 bp, Homo sapiens
gggcagccttaagactccaaggctcctcaaacgccctgcaaggcagagcctgttgagggccgagcataccaatgcatccttgtaccagttctcccatctctgtttcactccccttgtctttc

SEQ ID NO: 11914 - DNA, 122 bp, Homo sapiens
aacccgtttcgggactagaggttccgggggggcttcgacaccttctggatgttggggaagcgggtttagggtctcaagaggctaggatctcaacatttgggagtcacaggttgcatccccta

SEQ ID NO: 11915 - DNA, 122 bp, Homo sapiens
ggaaggaggagagaggcagagagagagagagagagagagagagagagagaagcgcgagagcggccctgtaattgagcagaaaggaaagggagaaaaatgaatcccaaactttgggcttacct

SEQ ID NO: 11916 - DNA, 122 bp, Homo sapiens
ccccggccaccctccgactcacagggacaccccgcccccgctcccactgcccccgagccgcgcgggaccctggtcctagcccaaacctcctcagctcgcctgcttgtcacactcgggctgaa

SEQ ID NO: 11917 - DNA, 122 bp, Homo sapiens
atcctgcatgcctaattggctatttaaggagctgttcaccagcagcccaggcagcacccccgtccccacatacaccagttcagagccaccttaaaagcaggaggcagttgtaaagtcgctgg

SEQ ID NO: 11918 - DNA, 122 bp, Homo sapiens
gcacctccacagacttcaagggtgccaaggaggcgctcttcaccaagggagactggctctcgccctttcccttttctcttcaagtggcgggcccagccccagggatgtccaatggctccctg

SEQ ID NO: 11919 - DNA, 122 bp, Homo sapiens
aatgtaatgaattcatgtatagttgagtatttgtccctctttcatgatagatttgtccctcgttcatgatcattttcatgtcaaaactgaaatttctttctaagaattcagtgattgctaaa

SEQ ID NO: 11920 - DNA, 122 bp, Homo sapiens
agcttctggatctgtgggcacgaattggctggactctggcctgtgtcttcccaagtatctcgatagcacagaaagtagctaggaggggagggagctgtaattagaagtgatcagcttcctag

SEQ ID NO: 11921 - DNA, 122 bp, Homo sapiens
gggtgaaggaggcatttaaaagcagcgcgtccgaggacttgggcctccttttcttcttcccggtccttgcaggggcggtatctgttgtgggcagaaacaatggcgagagctggatggccgag

SEQ ID NO: 11922 - DNA, 122 bp, Homo sapiens
agactgtgattctgggaggttcaggacagttgtcctggctgggcctgagccaggctttgccgtggatctgcccacctcaagaactggcacaggtgataggtagtcttcaaatctacatggca

SEQ ID NO: 11923 - DNA, 122 bp, Homo sapiens
ctgtagccattagaggaaaatgtcagaaccaaagactttcctctggggaaaacctataaccgatatatagattcacagctctttgtctgcaattctacaatcccaaaagctctgagaactta

SEQ ID NO: 11924 - DNA, 122 bp, Homo sapiens
cgtgtcggtgaacttttgtgccacggcccctaattctgcccatggtcatccacacctgcacgacttaggttccatgttccttggacgggaagagacaggcaggagtcggaatgatgaaccag

SEQ ID NO: 11925 - DNA, 122 bp, Homo sapiens
ggccggcagggcagggcacactcgggtggggaagcaagtgaggctgaggctgggcccacgcggcacctccagaggctctgcacacccgtggtggtaacttgtgttatcacccaggacaagcg

SEQ ID NO: 11926 - DNA, 122 bp, Homo sapiens
agcccgacgccgtcccattcaccttcaccacccacccggaaccggccttccagatacggccgagttaaaccacgttcagagggagccataaaactccagggtgagatgagatcacacgctga

SEQ ID NO: 11927 - DNA, 122 bp, Homo sapiens
ctttcttcgcagaaggggcctgtgcgggacaagaccccctttgtgtggggattcctgcctcggagcgcgagggaggcgcattcagccggccccagacagtctttgaaaggctctgtaacaga

SEQ ID NO: 11928 - DNA, 122 bp, Homo sapiens
taacctaattaggtatctgcctaagccaggggagtgacacatttttctggccaaagtaaccgtcccaagatcatgagcatgcctaacacatccgagtccagtgctcacagtggacatcactt

SEQ ID NO: 11929 - DNA, 122 bp, Homo sapiens
agcggcatgaagtaaagagcgacccgactccctttggtgtgcgaggtagagtggcaccctcgggcacggcacccactctgcgttggcaggaagcgcggcccagctggctgtcaggtggccgt

SEQ ID NO: 11930 - DNA, 122 bp, Homo sapiens
atttgacttttaaatgtcttcagcatcgttgccagcagctggttcctgcgatagcctgttcgggctcgtacgttttcatcacctcactacgtgttttcatgtttgtgccatttctttctcac

SEQ ID NO: 11931 - DNA, 122 bp, Homo sapiens
gctttctttcatgcaagttttttctaacgttcctgtgaaaagaattaacccggcaagtcccgtcccactcccccagctcagaggtcctttttactagagctgccctagagagttagctggag

SEQ ID NO: 11932 - DNA, 122 bp, Homo sapiens
gccgtgtcccccaggcgctgtgctagggcccctgccgtcactgagcagtgttcattctgacgttccggtgctggtcactgactcgacagggctgccacaggagcaaataagataacgtccat

SEQ ID NO: 11933 - DNA, 122 bp, Homo sapiens
gctgcagcagcggaactacctgcaaatgagaggacagaggacccggtgactgcctgaggccgggacacactggagacgaataggactgaccaccaagcagactgcaggcagcttaagagctc

SEQ ID NO: 11934 - DNA, 122 bp, Homo sapiens
aaaatgagagtgacagggcactcagggagttaaaggtaatgacactttactaggcagtatcgaagtaattcagtaccttaataaagagtaaaaccaagccagtgtgtctgggttgtgtgtgt

SEQ ID NO: 11935 - DNA, 122 bp, Homo sapiens
cagggtggggctgctgggctgggaccaccttgaactcagtgcctcccctcactgaggtgccgatgtcaacggcagtggggctgtcacaggcaggacgggctgaggcggcgatgtcaacggca

SEQ ID NO: 11936 - DNA, 122 bp, Homo sapiens
gagtggtgggctcgcgacttaggcctgtctgcctgatttcctgcagagcccccctccatgcgcctgaaggcccgacccagcagccctggcttttccgtgcttacctgcagcgccttctcctt

SEQ ID NO: 11937 - DNA, 122 bp, Homo sapiens
gcctcagtcccagtgggcacacttgctcgcctcctgcctgggtctctgacttcaggagggcggagggggcccgtgtcagagccttccgcgccccagcgcatcgctccctactccgcctctcg

SEQ ID NO: 11938 - DNA, 122 bp, Homo sapiens
aagtggaggaaggggaccccctggttggaacatatgttgccctggggtggcctgtgtctgcgcttgtgtgtcttgggtgcctggcgtgtctgcgtgtgggctgtctctccatgagtacgtgc

SEQ ID NO: 11939 - DNA, 122 bp, Homo sapiens
actcggagatggagggtgtgagtgcaggggctccgagagacccctagcggctaagccgcccggatcccaaggcccaggggacctcatttcctctcgggttaatcggaatcttccgagccctc

SEQ ID NO: 11940 - DNA, 122 bp, Homo sapiens
ataatttactaaggtcacagagctagtaaataacaaagctttattcagacctagctgtatcggatgccttttttaaaatcttcactacctgtttgctctttctgcttcaccctcatcttggt

SEQ ID NO: 11941 - DNA, 122 bp, Homo sapiens
tgtccagccctagaagagcctccgtacctagaagaaaacctcccctcctgggagtcacggcgcaaggctgggctcccatcctcgcagggaggggcggatgcacctgcccctgcagatctgcg

SEQ ID NO: 11942 - DNA, 122 bp, Homo sapiens
ctccggattcactcccaaaggagaacggccaggcggccaagtcctcccagctgaggggtgcggaggaagggatcagagcgctcccccaacaaaggctgcctctccgtcctgcacatcccctc

SEQ ID NO: 11943 - DNA, 122 bp, Homo sapiens
tgcccgtcctgctgatggggcaggcggtgctccaccccagcttccctgcctcccaaccatcgcccctgcagcctgcacaggcccggcagcagccaccgcagcactacctgcaggtgggtgcc

SEQ ID NO: 11944 - DNA, 122 bp, Homo sapiens
aggagtaaggggcgtggattcttcgtcccgccccttcttaaggaggcgggcagggagtaccgcatcggcggcgggcgagacctgcggaaggacgtgatagttggccaatcagagttcatcac

SEQ ID NO: 11945 - DNA, 122 bp, Homo sapiens
taagtggctgtcacacccactatcaagcagtgttaatgattcatgcagcactttccaaaccgttcctggatcttcaggtactccttggagtaaccaagttttagagtcagcaataaacccag

SEQ ID NO: 11946 - DNA, 122 bp, Homo sapiens
ttggcttgcagagcatttttagaatttacatttgaatttgtttacacaggctgctgtctccgggttccacagctggctctgctccctaaagcctcacaccaggtctccttacacccttcgca

SEQ ID NO: 11947 - DNA, 122 bp, Homo sapiens
tttgtgctttttctcatacagagtatctccctgtcatagaacctacacaaagcagtgtgccggcccccaagaagtctgaacacctgtggcagacagcagcgtcaagcagctgtggttaaagc

SEQ ID NO: 11948 - DNA, 122 bp, Homo sapiens
tcgaacccaggcccagccccggcccacctcccgcgcctcccaagcggcgccacgtaccggcgctgacatggatcttcttcatccaggggtacaccacgggctccttgcccttcaggcccagc

SEQ ID NO: 11949 - DNA, 122 bp, Homo sapiens
gtaccatctgaagtgccactcatgcggactctggcacgagtgggtgagagctggcgcccacgcaggggacagaaacttgggatcccagagctagaaacaggcgactctagaactttccgtgg

SEQ ID NO: 11950 - DNA, 122 bp, Homo sapiens
tcccggggggaatttcattccttccgctcccaccccacccctttggatatcccggggagacgggggctggattcaatctgtgaaatattccaggagtcacggtgtgggccacactggctact

SEQ ID NO: 11951 - DNA, 122 bp, Homo sapiens
tgtccatctggaatcattataataacaggtcatggcttgtgtgcataatacatgtatggtcgacactatggtaaactgtctgtatgagcctatcacttaatctgcacaaaatgcttataaag

SEQ ID NO: 11952 - DNA, 122 bp, Homo sapiens
tggccgggccgggggtgggccggagccgctgtggcggcggcggcggctgggggcggtgagcgcggcgtggggctgcccctccccggaggcggcgggggcggccggggccgcgccgcaccgca

SEQ ID NO: 11953 - DNA, 122 bp, Homo sapiens
atcagagactggctggctcacattgtgtccaccaatccacccaccacggcgagtgatgtccgtacagctcacaccgcatccatcaatccacccaccacggcgagtgatgtccgtacagctca

SEQ ID NO: 11954 - DNA, 122 bp, Homo sapiens
aatcagaagccaacacgacaaactagcgtccaagatggagcggcttcggcctccatgatccgcccgcgccgccccactaatccagctctgaccgtctcacctgccctcctcttccgcgatgg

SEQ ID NO: 11955 - DNA, 122 bp, Homo sapiens
aagtagccattgctgcccatgaggagcgtatggtccagagaagtaggcctggcacagaggcgggaaaccactggcacgcggtagaggctggagtctccctgaggtcccccaagtttttgagt

SEQ ID NO: 11956 - DNA, 122 bp, Homo sapiens
ggcttagcacccgagccagcggctgcggagggtgtactgggtcccccagcagtgccagcccgccggcgctgcgcttgatttctcacagggccttagctgccttcccgcagggcagggctcgg

SEQ ID NO: 11957 - DNA, 122 bp, Homo sapiens
cttaaagagacaggatcccatttttcagagggttttttaagggtgtgtggagggggagggcgagggatctacgtgtaaagtgaagtgaaactttcgcctgggctccagaaagagcggacaga

SEQ ID NO: 11958 - DNA, 122 bp, Homo sapiens
aaattttgccgtgtttgctttgtgtgtgtgtgtctacgtgtgtgagagaatgagtgcacacgtgtgagcaatcagagctttcctggtgtatatgagagagagacagggagagagcaatcaga

SEQ ID NO: 11959 - DNA, 122 bp, Homo sapiens
gattgggctcaacttagaacacagcctgggcaaatgggaatttgcagccaaggggtagggcggggtggtggggggattaaaaacgactaggaggaaacactggagtaaggggggttctggct

SEQ ID NO: 11960 - DNA, 122 bp, Homo sapiens
ttttcctgaaatggttcttcttgcttttttcttccaatgggtgattgttcaaaccatgttcgaaagattttacccattagtatccttctcctgtgccaaagagcagtatacagttgatcttc

SEQ ID NO: 11961 - DNA, 122 bp, Homo sapiens
acatggtgagagtaattatttctggcatgtagagtatgtaaggctgctagaaacacaaaacgcacaatggcaaaagtatttgcttttacttaagtgggaaacatttacagcttctggaatat

SEQ ID NO: 11962 - DNA, 122 bp, Homo sapiens
ggccgtagggggaaggcctggtctgatgacacaagtcagctgggaccagacaagcatgcccgggacgttccctcccttgacaagtacgccgaggagcgatgggaggtaagcacttgggagtg

SEQ ID NO: 11963 - DNA, 122 bp, Homo sapiens
gcccacaaggagtcccactccagtggcccctgggaaagccaggttgcttagtgactggcacgggcacctgtctgccccctacgtcctccccaactgctccatcctccgtctcctggctcctg

SEQ ID NO: 11964 - DNA, 122 bp, Homo sapiens
gacaccagaatctgggacttcattcattcatacattcattcattcatttttaaagagggtcgttgggaaggaaaaggggaggggacgccgggctgcagggctcctcgcaggacacacgctcc

SEQ ID NO: 11965 - DNA, 122 bp, Homo sapiens
gatgccaggtctgtctcaagggcggcaaactgtgcctctccctcctcctgcaaggagagtcgggttgttcataatgataggtactctatgccaggcttcctgccaagttaagaaccactttt

SEQ ID NO: 11966 - DNA, 122 bp, Homo sapiens
tggatcgaggcgcacgcgttgttgcaaagtctcgcacttagggattagaatgtgcctttgcgtttcgttttgttttgcaacaatacaggtgtgagggatcgcagccctggtccaggctctag

SEQ ID NO: 11967 - DNA, 122 bp, Homo sapiens
atagttaatagtacaaatactgttttctgcatagaaacatttggactgccaaacaaaatacgtttaaaggaacttcgatttttaaatgttgctgtctgtctaaacaggataagcaaccgtag

SEQ ID NO: 11968 - DNA, 122 bp, Homo sapiens
gtgggattggctcagaaacgggcgctagacacagaccaaggccctgccgcccaggctcaccggtctgcctctatcccgccccgatgcagccactcacgccctgggtgctagagaagggggct

SEQ ID NO: 11969 - DNA, 122 bp, Homo sapiens
gtcacctgttacctgtctcatggtaactgctacaatgactctgaggactagaggctggtgcgtatgtctctagctgtgagttccctaaggcacctctgtatcttcatgctcagaaatcactg

SEQ ID NO: 11970 - DNA, 122 bp, Homo sapiens
aattcaattgctgcttctccacaggcatgggaagctcacacccacacagctgatctttagcgcccaccaccatctggaagatgccttccagtgcagtttgggactctccccttgatggatac

SEQ ID NO: 11971 - DNA, 122 bp, Homo sapiens
gggcccccgacgggcaggcagcagccagcggcgtgcacaggaagcggctgaacaggggcccgggcggcagcgggtgcgcgctggccgcgggtgccccgggcagcgcggggggcccggctgaa

SEQ ID NO: 11972 - DNA, 122 bp, Homo sapiens
tggggccaaccagagaccccaggctggttccccacaaaaccagcacagcaagacctgcctcggtgcacagtctgggtctgggatgtgaagctgtctacaccaaggagccacccatcacctgc

SEQ ID NO: 11973 - DNA, 122 bp, Homo sapiens
tgagggccactcagcccagtggccctctgagctgttccttcttgaccggcacacacagctcgcttcttcactttcttttccatccactgccggacccaagccagccttccagggagcagcca

SEQ ID NO: 11974 - DNA, 122 bp, Homo sapiens
caacaggatttccatttgcagctgagacaggcagaggctggtccagatcaagaatctggtcgtgtgtaaatgtgcacgttcccagaactgatcaaagacagacgcacacacagatggtgact

SEQ ID NO: 11975 - DNA, 122 bp, Homo sapiens
gcagacatttccctgcctgcttcctcaagctcctcatcccgccgcccgtcccgcgcgctccgcccccagacgaacccgcccccgtgtgcccgctccatcaatcgaaagcctgtcttctccat

SEQ ID NO: 11976 - DNA, 122 bp, Homo sapiens
tgtctgttgagatttccccctttagtttccaaccttctccccaacccttggagctaaatgcgttgtaaaatattgccaaaatgaaaagtgttttgtaatactgcaataaaggctgcttgttt

SEQ ID NO: 11977 - DNA, 122 bp, Homo sapiens
agaggtatcttgaaggtccgtggcatggataataactaagtgttgcggtgcaagagaaagcgaaggaagaggcgagagcagcacgtcatctaagaagaacgagaagtagacagtggagatat

SEQ ID NO: 11978 - DNA, 122 bp, Homo sapiens
gggcggggaggggaggagcgggggcagactggcagcggatttgagggcaggacccgtgggcgcgcgctggccacagaccaccccttctactccgcgggagcgaggggcgcgcgtggctgcac

SEQ ID NO: 11979 - DNA, 122 bp, Homo sapiens
gggcccaacggagcggacggaagcacggggcgcggggctggacccccggacaccccgtcccgcgcccccaccccctgtaggcgccgcgcagcacctacctgcgccctcccggaccccgcgcg

SEQ ID NO: 11980 - DNA, 122 bp, Homo sapiens
gggtttcaagaggtacggtccccgaaaagcccagttctgagaggcctggtttggaaatctcgccctgaagattcctggatcccagggctcaggaccaggcgtctctggatctgaggatcctg

SEQ ID NO: 11981 - DNA, 122 bp, Homo sapiens
ttcttgtcacttcaaattctagaaatccaaagtggagtgaatattccacctccaagccaacggctggccacccatctgtctctgtcagggccaccaccaggccgcagagggacagtctggat

SEQ ID NO: 11982 - DNA, 122 bp, Homo sapiens
catccatcatttgcactctcactacatccagtgaacacattttagagatgaggacattgacgctcaggaaggatacatgagtaggctaaggtcacatggcaagtttgaggtaaggctcacct

SEQ ID NO: 11983 - DNA, 122 bp, Homo sapiens
ctcgaactcctgaccttgtgatccaactgccttggcctcccaaagtgctgggattacaggcgtgagccactgtgcccagccctctagggaatttcaatgtgacctatttgatggtaggatct

SEQ ID NO: 11984 - DNA, 122 bp, Homo sapiens
ctccctccctccctccgcttttctgttgttgctgctgtggcagacaaatgtgatgtggggcgcagggaattgccactgtcacaggcggcgtctgcgtctccctcgcccgccctcgctcactc

SEQ ID NO: 11985 - DNA, 122 bp, Homo sapiens
tgccaacgcgaccgccccagagaaggaccccgcctccccggctgtggtcccgagactcagcgcaaggacccggtgctgggactagggctgcccgaagatcgcctaacttaaaacctgcacac

SEQ ID NO: 11986 - DNA, 122 bp, Homo sapiens
gggcgcgatatgaacgacagtctcggcggggcaacgtcctaagtacctgtgcctgtgcgacgtcctaagtacctgtgcctgtgaagtacacgctgcagaagttgaactgctggcaccagaac

SEQ ID NO: 11987 - DNA, 122 bp, Homo sapiens
tacatttcccagctccccacccgggctcaccttcagaccagcggcagcgctcacccaccacgcctgccagggaagctcagtcccaacagaatccagagagggcccaccacatgtgcctgcct

SEQ ID NO: 11988 - DNA, 122 bp, Homo sapiens
tcaatgtttaggaaagtcgtaggagccctcactgggaggcacatttttagtccagaggcacgacatttgatggtttaatcttcacactacaaactagccttgggacgttatataaaccatgt

SEQ ID NO: 11989 - DNA, 122 bp, Homo sapiens
gtttctttacttctttaataaacttgctttcacttcactatatggactcatgattggcaacgctttctggtaacactgcccaggtttcctttgtcaagcgtgcctttctcagccctacatac

SEQ ID NO: 11990 - DNA, 122 bp, Homo sapiens
caggccgcgatgcaagtctgacgccgagtaaataggagaggcagagaggctgggtggaagcgccctggaccaccacgcagtccaacttggcaaagccggccggggagtcctggagcctgaga

SEQ ID NO: 11991 - DNA, 122 bp, Homo sapiens
tagaagcttgctgaatcgcggagcagcctcaggtgactttcctctaaagtgatgccggggcgcggcggggagtttgcaagcacctgttcttcagtgcgatgggctggggagtggggtcctag

SEQ ID NO: 11992 - DNA, 122 bp, Homo sapiens
cagaggggagcccaaggccacacaggccacactgcagcaggagggtggcctgatgtccaccgggcatcaggatttgaggatgagactcttggcggcaaggttaagccttcctctctcacctt

SEQ ID NO: 11993 - DNA, 122 bp, Homo sapiens
agactatttacctctcgcccccacccctcccctcttctttccttctctccctccctctctcgctggctccctcgctcgctctcgtgtgcctgttctgcagctcagtcaagtacagccgccct

SEQ ID NO: 11994 - DNA, 122 bp, Homo sapiens
ttacaggcgtgagccacctttcctggctggccttgggattttttttccccaaataatgcccgttcctacggcacttccttgaggagattttctgcatcttttttccttgtgccaataaaaaa

SEQ ID NO: 11995 - DNA, 122 bp, Homo sapiens
tggcgaggggctgcagaggtggcagctctgtcctccctctccactgttcaagcctgtccccgttggatgaggtgaatcctcaggtgagctcaacttcaggggtgggaaattcttcaatgggc

SEQ ID NO: 11996 - DNA, 122 bp, Homo sapiens
tggagactccattcatattcaaatatacacagtttaaaatgtggattcaagaaattatcacgctcatgggttctattttctagggacaagtgaatgaataaaactgggttgagttaaatata

SEQ ID NO: 11997 - DNA, 122 bp, Homo sapiens
ttctggcttcaaggagctttacccaggtggatgcaagtccatgcagctgagccccgaggccgcattggcaccctgtttgacacaagggaccctgaggcgcagggaatggaagtgactggcct

SEQ ID NO: 11998 - DNA, 122 bp, Homo sapiens
gaggggagacagccatctcaaagctctcctgggaccctggaggctgccaagggccacacgcggggcccaggagcccacctggcctccctcagggtgctgcctgcctccagggaggcgacgcc

SEQ ID NO: 11999 - DNA, 122 bp, Homo sapiens
gtccccacggtctcagcatccccatggtctcagctgtccccagggtctcaggagtccccacggtctcagccgtccccatggtctcagccgtccccagggtctcaggagtccccacggtctca

SEQ ID NO: 12000 - DNA, 122 bp, Homo sapiens
ggaggaaatgggccgaagcgggattcgaaccggcggattcgtttctctgcagcccggagccgcgtagccccgccccggtctccctagaaacaggcacccgtgtctccatagcaaccgctcca

SEQ ID NO: 12001 - DNA, 122 bp, Homo sapiens
caagcaatagggtagaaagaatgcaggctttaatgtcccatgattgcaattcaaatctgacgccaaccctgccacttattagtgtgaccattagaaaagtattaatttttctgagccttagt

SEQ ID NO: 12002 - DNA, 122 bp, Homo sapiens
gtacttgggaggatctcgcaagtgaggccccaaggccttggcctttatgctcctcagactcggaggcagtgcagttcctgcccaaaccgggcctttgggatttctagaccatgaggcatcac

SEQ ID NO: 12003 - DNA, 122 bp, Homo sapiens
caaggcttatttttaagcttttaaaaggctggtttagcggctgcctggagcggagcgctgcgagagctgcgcggcgcgcccaggttccagccggctccgctccgggtcccccagtgctcgct

SEQ ID NO: 12004 - DNA, 122 bp, Homo sapiens
gctacaatctccggaggcacgaagccatccacacgggagccaaggccggccgggtcccctcgggtgctatgaagatgccgaccatggtgcccctgagcctcctgagcgtgccccagctgagc

SEQ ID NO: 12005 - DNA, 122 bp, Homo sapiens
cagtagcggaatccgcggggtcgagggctttagtgtgcgcatgtgcaaccagagcggcggcgggaagtgttgcgcaggcgcatccgatcgactcggtaggtggggatctcttggagacggcg

SEQ ID NO: 12006 - DNA, 122 bp, Homo sapiens
agcaaggagacagtcagaggcatcgatgcagcctccacgtcgcacgttcccggctaggtacgtacatagtgatgtgactgtatagaaggcaagtcagagaaagtcttcaaagaagatgtgac

SEQ ID NO: 12007 - DNA, 122 bp, Homo sapiens
cccccatgtacttcttcctctccaacctgtccttggctgacatcggtttcacctccaccacggtccccaagatgattgtggacatgcaaactcacagcagagtcatctcctatgaaggctgc

SEQ ID NO: 12008 - DNA, 122 bp, Homo sapiens
cctggccacactccatctactatgggttgaaaccctcagattcaaaaatccaccctaagccgggcgctgtggctcacacctataatcccagcacttccggagaccaaggttgggggatcacc

SEQ ID NO: 12009 - DNA, 122 bp, Homo sapiens
ggccttgggctcttctctccttgccatcttcctgccttctagtacctgcttctgcacaggcgttctgccctcctcatttgctcccttgctttcttgcggcctcaggtcaaatatcatgattc

SEQ ID NO: 12010 - DNA, 122 bp, Homo sapiens
ccctcggaagaggccacgtgcgcgcacatcccgccccgggcccgcaccatcactatcctccgacgcacagacaggagatcccacacactctgccgccgcccgctgcaggtaccgcgccggtg

SEQ ID NO: 12011 - DNA, 122 bp, Homo sapiens
gaagccggccatcttttgtgtagcattctttctggttcctctaactttgcctctcctttacgccaaatacgtgtccttatatctgaatctacaccactattatagattcaccttctttgaga

SEQ ID NO: 12012 - DNA, 122 bp, Homo sapiens
ttccttcctcccaccatgggctgccctgggtgctgcgggcagcctgcacaccccaagccccgcatgtggcctgtggtttgggctgtttgggatcctcacagctgagactcatttcccagcct

SEQ ID NO: 12013 - DNA, 122 bp, Homo sapiens
cctcaagtgatccaccggccttggcctcccaaactgctgggattaacaggcatgagccaccgtgaccggcctcatctgccttttagcaccatagagaggtgccattaaccacctggtttata

SEQ ID NO: 12014 - DNA, 122 bp, Homo sapiens
gagccctaagggtgtacccaaccctccaaaggcaactgggggctggatggggcaggtttccgggattggagctcctgagagcaggtagacccagctcccttccccctcctctgctctgccca

SEQ ID NO: 12015 - DNA, 122 bp, Homo sapiens
ctgaacccaacgccacatcacgagaataagcctcaggcttggcgctctgtccttggtgggcgctcagcaaacactgctgaatgaatgaacgaatatagtccctggaagccaccagcagttac

SEQ ID NO: 12016 - DNA, 122 bp, Homo sapiens
tttccttattcttcttcaagtctaaacgtttattgaactgagacccatgaatgagttactcgactaggcttgtaggataaacttgccaggctttagatctatttgttcctttccatccccca

SEQ ID NO: 12017 - DNA, 122 bp, Homo sapiens
gtggccctgtcttggccggccctgtaccccgggttgcagggccagaacctggaagcagagcgcaggaccagccagatcccgccaggctctccagtgcctctgtgctgcctggagccaggcct

SEQ ID NO: 12018 - DNA, 122 bp, Homo sapiens
aaaaaaaaaaaaagtactcatatctctttttctgtaacttttaaaatccactcccaaatacgtcttgggggaacttcctatgtcagtatagcatggtagtccataactggattcttcaataa

SEQ ID NO: 12019 - DNA, 122 bp, Homo sapiens
acgtgttgtcatccaccgtctgcctccgcttttctcctcaaaaaaagtccgtttttcctccggagctcctagcagtccctccccggaaatgtgataagaagatgtacctcagattctgaaag

SEQ ID NO: 12020 - DNA, 122 bp, Homo sapiens
ccccccgggccagtggacctggcatgtgcctcccagcaggacagcttcccaggtcctgcccggccggcccctgagctgttcgcacccccgtttcgcagcgcttcacccgcgtcgggacccac

SEQ ID NO: 12021 - DNA, 122 bp, Homo sapiens
tctgagactcctgcaatgatgaggtctatgcagcaatctgaccctgcactgcagtaatggcggggaggcacacatgctggatgtcaggtctgtcccgtatttgtatattgtcatttgatggg

SEQ ID NO: 12022 - DNA, 122 bp, Homo sapiens
ggcggcgggtgtcgctggccggtagagagcttcggcctgacctagcgcaggtctggtgcgcgcagagaacaactccaagcgcaccgacgcccgcgagctccttccaaacaccgaacgggatc

SEQ ID NO: 12023 - DNA, 122 bp, Homo sapiens
gagtgtaggtctccccgtccacccagacgcctcctgcgctcggcgtttggatgctgcagacggagtggcaggaggctctcctcggtaagtcaaggatgactcatttctgactttctgtacct

SEQ ID NO: 12024 - DNA, 122 bp, Homo sapiens
tgctgtctctccgtcacagaagggaatgttagaatcccgagagagagctgttaagggtagcggctctgcagccgctcacgtgggttgaatctcagctcgtctagttttcccatctaaaatga

SEQ ID NO: 12025 - DNA, 122 bp, Homo sapiens
tgtaaaacttacttttcttttgccaaatctggcaacccgacaccagggacctgttgaatccgtgcttagtagagaccaacgtgggcatcagggggtccgctaactgagccaagcgcaggggc

SEQ ID NO: 12026 - DNA, 122 bp, Homo sapiens
gcttctggtggctaatgacatggccatcacccagcgtggacgtgggcaggaggggctctccgggagcatctggtctgctgtggagacacttgtcatctggaggctctgtggctctaatggag

SEQ ID NO: 12027 - DNA, 122 bp, Homo sapiens
ccggtcgtccaaggctccagagggtggccagatctgcaaggagtggtggggcgtgctgggcggagccccggggtagagctctacggaagtaggaagggcaggggcgccctcagggaaacctc

SEQ ID NO: 12028 - DNA, 122 bp, Homo sapiens
ggacaacaaaggtttcaggaaaacctctctgcacgcttccgggagccaactgaatgaagccgtgttgcccgagtgtgcgcacagagagccttgggtttttagggttatttcgagagtgtaat

SEQ ID NO: 12029 - DNA, 122 bp, Homo sapiens
ctgttctaccaccaggcgggtgagagccctgagcacggggccctggccccggggagcaggcggcacccggcccggcggcggcacctgctgaagggcgggtacattgcgggggcgctgccagg

SEQ ID NO: 12030 - DNA, 122 bp, Homo sapiens
ctgggacatgaacaggggaaacagcgttggcggtggagcaggtagacattcccttgacctcgtaagtcctggatgccacccggcgaactggcctgcgggctggaaatgatgcagctgaccca

SEQ ID NO: 12031 - DNA, 122 bp, Homo sapiens
ccctgatccaacggcatcatcttgggtaccagatttcttgaaaaatgacggccaggactccgtgacagtttagaccatcaattctctgcgggggaggggaaactggggagcgagaggggttt

SEQ ID NO: 12032 - DNA, 122 bp, Homo sapiens
tgtgaaagctggggccggcggatcgggtcgggactgccgctgtgatcacttttaggccagcgtcagcagaagcctgtgtgattgcaggcagatctacgctgtctttcaaacgtggtgacacc

SEQ ID NO: 12033 - DNA, 122 bp, Homo sapiens
ctgctgcctagcctctccccactgccggcgcctgcctggatctcggagcagggttggggccgtgccccagcactgacagcccggccaggtgtgtgcacacacggggcagtgctgatatgcca

SEQ ID NO: 12034 - DNA, 122 bp, Homo sapiens
cagcaacccgggtatcccgtgaggctgggctcagcgccctcaccccagatggcatcaccacgaggtaatcaatgctgctaatcaccaccagctgccctggagcctgcatgctgctgctgcat

SEQ ID NO: 12035 - DNA, 122 bp, Homo sapiens
aattgaaagccctttgaaaatacaaagggctgtaaaaggaaacccactgacaagatcaaacgccccccgccccgctgcagatgtggggattgggactctcacacgctgctggcaggagtgtc

SEQ ID NO: 12036 - DNA, 122 bp, Homo sapiens
tgagccaacacggatccactgcacacagccgctgggatacggcttgtggcctgacccagccgggatgagtgcccgccaaagtgaaaatgccaacattctcaagcgcgttctcgcagggctca

SEQ ID NO: 12037 - DNA, 122 bp, Homo sapiens
ctgccaatctgtcacctcacaggccactatacaagcatcctgatctcagaaatgagaaaccgagctctggattcctgggttatggtcagctgtgtctgtgccatgtgtgtctggccagcaga

SEQ ID NO: 12038 - DNA, 122 bp, Homo sapiens
atgctcgctgtacagacgcagctccgtgacagttctcagcggcctccactatcggactgccgccttgagcccctgccccagcaagctgccggagccgccgagcctgccgccttccctccatg

SEQ ID NO: 12039 - DNA, 122 bp, Homo sapiens
cggccctgcggaggaggagacaactccggtcagcggcgagcgggcgcgggaagtgagcggcggggccggcccctgcccgagggaaggttccgcgcggcgaagggctggcccgcgaggggtgg

SEQ ID NO: 12040 - DNA, 122 bp, Homo sapiens
cactggcaggtggggctgcagctgcgagagggggcgggcctgggaaccaccgcgggtgtgcgggccttgccattctcaagattcctgcggaaacgctgtgcgctggctgcgctccaggagca

SEQ ID NO: 12041 - DNA, 122 bp, Homo sapiens
aatcagattccctccccgaggttcaacttgtattagttagggtagccagcataatatattcgccagctacgctgcactcaacctgtgtgtgccggatcagcatgttaaaaacggtgtctgca

SEQ ID NO: 12042 - DNA, 122 bp, Homo sapiens
aggagagggaagaagcccgccaggcgcgggcaggtgctggcggcccgagcgcggcccggccgctctctccaggaaaagcggaatcaatcgggtgcaaggccgactcggcccgcggggcccgg

SEQ ID NO: 12043 - DNA, 122 bp, Homo sapiens
ctcaattgatccacccaccttggcctcccaaagtgctgggattacaggcgtgaaccaccacgcccggcctgaacatcctagttaaaattgacttctattttcactggctgggtgcagtggct

SEQ ID NO: 12044 - DNA, 122 bp, Homo sapiens
tacatgccagttttgcttgtgaattcttgcttttttcctctcatcagccttaagtttaggcgtttgttgttctccagtgatgtagacagttcccttcacaagtcacagttcttcccataaat

SEQ ID NO: 12045 - DNA, 122 bp, Homo sapiens
agcggacgccacctataaggcccatctcccccaccacgccccggtgtccgctccgccaggcgagattaacagccggccctgcccagcagaagccctgactgcacaaagactcactcctgagt

SEQ ID NO: 12046 - DNA, 122 bp, Homo sapiens
gaagcctgcggggaagctccctgggagcccattgccaaagcttccacctcatggagctggcgtgtacacagacaggcacagcctgccgtgctgggccaccatactggtgactggctgtgctc

SEQ ID NO: 12047 - DNA, 122 bp, Homo sapiens
acatagcagagggaaggaagctacacatgtttgtggtctgggtgacactgttccttgtggcgcacctgccaaggctggtggcttcacctgtctgagctgagtgaggaccctactgtataaga

SEQ ID NO: 12048 - DNA, 122 bp, Homo sapiens
ttttccttttctcacatattttgatggtacaaataatgaaacaaactagtgcttaaaagacgaccaatcttgaggaggctgatgtcagtgtaaaaaactaaatgagagtccagaaaggcacc

SEQ ID NO: 12049 - DNA, 122 bp, Homo sapiens
ggatgtgaatcattcctttgtccagtgtatctagactgtctgagtgacccagctgttagtcgcttaggagccatcttggtcatgagacccactttaacagtgtcacagtgcctgtattcaaa

SEQ ID NO: 12050 - DNA, 122 bp, Homo sapiens
ctccatggcctcctgctacaccggcagctctatggaacaaggctgcaggcacacagggggcgctggtgagggacccccacccattcctgctcagtcaatcactcaacaaacattgagtatct

SEQ ID NO: 12051 - DNA, 122 bp, Homo sapiens
ttatgacctccgtggggacccggctggtcagagccctgcacatgcacaaaggctgaggggcgggaagcgtgggctgtccccggagtcacaggttccaggccccctccgccacccgcggaccg

SEQ ID NO: 12052 - DNA, 122 bp, Homo sapiens
actttattttgaaacctcttggaatttcgggccattccctcccgcctggatgagcacactcgttttctgcctacctggcctttccgcctccacggtcttcactttcaatccttcctctatat

SEQ ID NO: 12053 - DNA, 122 bp, Homo sapiens
aggtgaaggagtgagtcctgcaggtatctggggacaacattccaggctgaaagaacagtccgtgcaaacctcctcaggaaggagcatgtctgtctggttggtttgaggcatagggaggaggc

SEQ ID NO: 12054 - DNA, 122 bp, Homo sapiens
taggacagcagaacagctggctctacccctcactcacgagctgtctgaccctgagcaagtcgcctgttctctctgggaggaaagcctggcggggcaggcacttcaggtgtgcccaggcctca

SEQ ID NO: 12055 - DNA, 122 bp, Homo sapiens
tttccccaaaagatgtgtcctttgtcatgaaagctctcgtagtatttaagtgctaatactcgacggccgccgacttctcagatgcaccctggagggtgtgctcttggcctgacacttattag

SEQ ID NO: 12056 - DNA, 122 bp, Homo sapiens
agagagagcacaagctctcttgtctcttatgataaaggtactaattccatcgtgacagcccgaccctcatgtccttatctaaacctaaataccttccagaggccccatctctagacaccatg

SEQ ID NO: 12057 - DNA, 122 bp, Homo sapiens
tatgaggtagctcagatggggaatgcagatgagacgcccatttgtttagaggtgccatcacgggtaactgttgataaccagggcgaaaagcctgtcttggtcaagacaccaggcagggaaaa

SEQ ID NO: 12058 - DNA, 122 bp, Homo sapiens
aatcagtatgacattatctctgccctcaagtatccacagtgagtatttagggtacctcaacgaattgatttttgactaatttttttttcctttttgagatggagtctcactctgtcacctag

SEQ ID NO: 12059 - DNA, 122 bp, Homo sapiens
cggcctctgaaggccatcgtgaggcggctggagctcctaggcgggtccgggttagaggagcgtccgtctgtagggagcctgccgcgtgggggcaggcggggcggtgggccggggagtggccc

SEQ ID NO: 12060 - DNA, 122 bp, Homo sapiens
gggaggagcgcggcgggcgggacccgcagctgggcttggcccgggagcggggaataagctcgctccgcgcctctcagtttagtggatgaagactactatcccagaagccgtttcgcctcggg

SEQ ID NO: 12061 - DNA, 122 bp, Homo sapiens
aaaggaatgtggatgagcagagcaggcgccactgtagggcttggctgtggaattctcaagcgtgaacgactcagtgctttgagtgccatccacaatctgttgcagtaattatgaccttggct

SEQ ID NO: 12062 - DNA, 122 bp, Homo sapiens
ccacatccccaggcctcaccatagcgggatgcgtagtcaggccggggcatgaagaggatccgctcgtagacccggcacagaccccgcatctcggccagctgtggccgggaggttgtcccaat

SEQ ID NO: 12063 - DNA, 122 bp, Homo sapiens
gcctttccgggactcgctggtttttaggttccatgaagggcatccagatctaggatgatacgaaaagtgcgtggtgggagagtggaatcaacctctactcttaggtccgatacaacccctcc

SEQ ID NO: 12064 - DNA, 122 bp, Homo sapiens
gagaaaagcgcttggctctccccaaatgggcccagcccgccgcctgctcaggctgccgcgcgctctcccgccgctcaggcacggcccagtggctgatgccccgcggatccagcctgcggcag

SEQ ID NO: 12065 - DNA, 122 bp, Homo sapiens
cacgtttcttttgttccccccttaaaaaacaaaaacaaaaaacttatagaaaaaaacccgcgagcttagaaaaaagaagcaattggtagaaggctttaattaaggcaaagagctgtaaggcg

SEQ ID NO: 12066 - DNA, 122 bp, Homo sapiens
catccattccattctctcattggttaacttccatacacttccaaacatgtcagaattttccgacctcttctgcaaaaaagcataagacgttcttacacataagtagcatatataaccttctg

SEQ ID NO: 12067 - DNA, 122 bp, Homo sapiens
ctgggttttagtcaccttacaaacacggcatctgtatgccagaccctgggccaggcttcacggtgttgggtagaagttatcctcattcagcagacatctaccgagtgcctgtgatggtggcg

SEQ ID NO: 12068 - DNA, 122 bp, Homo sapiens
ggtgagcacccagccggccagagctgtgctattggtttggcacaggtagaaagttgaccccgcacgtgccgtagaaggtcatttcgttcggttcatcagctatactcggactggctaaagga

SEQ ID NO: 12069 - DNA, 122 bp, Homo sapiens
cactgtcctaaaaatgccctgtgctcggcctagtcatccctctgaccctggggaccactacgttagtgacattttcagatccctctggcctgtttccatcagtgacacttctcacaccaaat

SEQ ID NO: 12070 - DNA, 122 bp, Homo sapiens
ttaaatcctaggctgtatgctgagctagatgccaccccaagctgctgattttatgaaagccgaacgcccatctgagcaatgtttatcttccctccgcggtgggcaatgctggccaacagtat

SEQ ID NO: 12071 - DNA, 122 bp, Homo sapiens
aaacagctacagagcaatttgccaaatgtaaggggcaggcccaggtgagcgccgctcacacgcagcgatcagggtcagcgtgacgcggtggtatctgtccttcacgggggctcctctgtggg

SEQ ID NO: 12072 - DNA, 122 bp, Homo sapiens
cggggtccgcggagaaggggcggctgggaacatgactccaaggagcagcgactaggacagcgagggatctggccgtcaggttgcagcctggcctgcgcgcggaacttaaacacctaagggaa

SEQ ID NO: 12073 - DNA, 122 bp, Homo sapiens
cgcgcgctccccctctcggaccgaggcgaccccagtccgtgagcggcttggatcctcgcccgttccctcctggtcgtttccgcagtaacctcttatcagagcgggcagctgtgagtggcgct

SEQ ID NO: 12074 - DNA, 122 bp, Homo sapiens
gcggggtgacgcagcacaccttgaggtcctgggtaacctgtctgcagtgggctgggctggcggagctcacctcccacctcccggcccaggaggccccaccttgcggcccgagaggccccgcc

SEQ ID NO: 12075 - DNA, 122 bp, Homo sapiens
cccctgggggatgggggacatttgcatctcagtgcagccccggctgtgcctggcaagcagcggatgctcaatcaatgttggctgaatggaattgtgttcaatgacttgctgccatgggtata

SEQ ID NO: 12076 - DNA, 122 bp, Homo sapiens
aaaagagagaaaaagagagagagattaagtgcctgcacaaacacagccacggcccatggacggtgcttatgccgagctaagccccctgcaatttaacacagacatcagtttattgcctagct

SEQ ID NO: 12077 - DNA, 122 bp, Homo sapiens
tgcttcttaaatgtactgggagtctgggttgaatgccaggtggcagcatgtgtcttgggacgtctttagtgtggcaccacaggcaattgtgtccgcctcctcctcaggacgctcccctctgc

SEQ ID NO: 12078 - DNA, 122 bp, Homo sapiens
tgctagaataatacgcagccattaactttttaaatatttaaggatgtgggggcatgatcacgatgtcatgctaagtgcaagactttggatgtcaaaaggtacatattgaatatagcaaaaca

SEQ ID NO: 12079 - DNA, 122 bp, Homo sapiens
ccgcttacgcagttcctcccggggtcggaggccgattcgccgtgtggcgggttcgagtcccgcctcctgactctggcctctagtccctgagtcccgggcgggctgcattcgtcggggaaacc

SEQ ID NO: 12080 - DNA, 122 bp, Homo sapiens
aagttttacaagcaatggtaataagtcgctgaggagaatggaccccggcatgttggaatccgtggttgcaagctgacactttgagggaatgttcttagcaaaacactcacttcaacggaaat

SEQ ID NO: 12081 - DNA, 122 bp, Homo sapiens
ataaatgggtgcaggggatcacgaaggggtcctcctcctgaaacagcacctccagattcccggggctgcttctctccagggtgccccgcctgcttgggtgaggtccggattgtagctgtagt

SEQ ID NO: 12082 - DNA, 122 bp, Homo sapiens
agccgctgggggcgccattcgacttcgctcctacggaaatggggcttcgatgtctttctgcgcttgcgcggcacggaaactcacttccggccctgcgcactcagggtctgaggcagctagta

SEQ ID NO: 12083 - DNA, 122 bp, Homo sapiens
tcgcggttctaagtgggcactgggggcccgcgtacagcaggcaagagtgcaaaccagcagcgccagaaagagcgacgaggtgagggaagaaaaaaggggcgggcaagagagagctgggaacc

SEQ ID NO: 12084 - DNA, 122 bp, Homo sapiens
tgcttggggcacgttctttccgcgctcttgactcctacgcgccggcctatgacagctcggcgggagcatacagacctgcctctagactgctaagtgatagctgtaatgaccaattaaaaact

SEQ ID NO: 12085 - DNA, 122 bp, Homo sapiens
gtctctttaaaatgcacagctgaccacatcactgctttgttcaaacatctttccatggcacgcaataatgtggctgaatctcacagacatattgagtgatagcagctgtgcgaaagagtgtg

SEQ ID NO: 12086 - DNA, 122 bp, Homo sapiens
cccccggctcatcgtgtatgtcatgggcggtgtggccatgtcagagatgagggccgcctacgaggtgaccagggccaccgagggcaagtgggaggtgctcattggtaagtcaccaggactgg

SEQ ID NO: 12087 - DNA, 122 bp, Homo sapiens
atttcccctgcccatgactgcacagcatccttggtcacagggaaatatcacatggaagctcgccaatgtgttggcaaatctattacttacatgataatttgcacttgaagatgaacattcaa

SEQ ID NO: 12088 - DNA, 122 bp, Homo sapiens
atgcatgaaatgttcagaacatggaagtgcttgtgcccccgccccgccccaggagcgtgacgaggccacttactggtggtgaagcagtggcggcaggcgtaccccttcagctcctgctcact

SEQ ID NO: 12089 - DNA, 122 bp, Homo sapiens
tctctataagccaagaaaataagaatttgtaggccacaagtggtcccctggtcatcggttcgtcacctgtagtctggacagattctgtgcataggaagcagttaggaaggtgcttggggtgg

SEQ ID NO: 12090 - DNA, 122 bp, Homo sapiens
ggcgtcctcgagtgacaggagaagcgcagaccctactgtgactccactataaagttgaggcggaccctgccccgccaagcctacgtgaaccaaggcgagaacctggagaccaaccagtggca

SEQ ID NO: 12091 - DNA, 122 bp, Homo sapiens
cggccaggttcagggtcatgctctgtttcaggatcttggggttactgtagccataaggtccgctctcggacgggaggaacgaggcgttgagggcatcgtcatagaaggtcgtttccatcttt

SEQ ID NO: 12092 - DNA, 122 bp, Homo sapiens
tggagggtgggagatgggagcctggagtggttgtctccgcgagccgtggtcgggtgtgctcgtgaaatgggtcattctgggctggggaggggcaaggaagcccctggctgtggccagagctg

SEQ ID NO: 12093 - DNA, 122 bp, Homo sapiens
gccctggcacccaagctggggcccccggaatctcacgttccctttactcgccaggcatttcggggcaaaacgaagcggagccccccaaacccccagacctaaccaagttcagagattcgcag

SEQ ID NO: 12094 - DNA, 122 bp, Homo sapiens
cagtctccccacctccccccaacactcgacattgttcctctctggctgttttttcctgttcgggtcccttcaaggcccaactgtgcccagccctctgcagctggggacactgagtgggttgg

SEQ ID NO: 12095 - DNA, 122 bp, Homo sapiens
tattgtttaatggagaatgcggcataacattcatttgtcttcttggttccgcgacctggccgctttgcagccacagacgctgggtacgggcgtgcgccagcgcccggccgttatggtcccca

SEQ ID NO: 12096 - DNA, 122 bp, Homo sapiens
gtgcccagtccccaggcaggaggcagtgccatccagaggagagtgctctgggctggaactcgccatctctgtttcctggctgtagctccagccctgcggctctctccatctgtaaaacaagg

SEQ ID NO: 12097 - DNA, 122 bp, Homo sapiens
catttgtgtcatccctactctggtcacagaacattcacatctttaattccaaatactgagcgtgatgtaaatgatgtaatcagtatctaacacgagtatatactttcttggtggccactgca

SEQ ID NO: 12098 - DNA, 122 bp, Homo sapiens
atctaggaccgttggatagggttcctttctgagcttccagctctgtagtatctatcagcccgctgatagggcagcctcccgacgccactcaaaacatcttaaaggccccaagccaaaccccg

SEQ ID NO: 12099 - DNA, 122 bp, Homo sapiens
ggctggatgcctgggtactgagcaggaagctgggttcctggtcagcccccccacgggccccgcccatccctgtcaacttcctccattctcttcccacccaaacagcttgttcagtctctctc

SEQ ID NO: 12100 - DNA, 122 bp, Homo sapiens
gcatctgcaacttgatgctttaagagcagtgagcaggctgggcgccatggctcacaggcccgtaattccaatactttgggagactgagattggaggataacttgggcccaggaatttgagac

SEQ ID NO: 12101 - DNA, 122 bp, Homo sapiens
acctctgaagtccacatgtgtatcctttccccctacatcactttggtcaaaatatatagacgcatgggtggaatggctgggttaataaagcactttaaaccttgttggtatatttatactga

SEQ ID NO: 12102 - DNA, 122 bp, Homo sapiens
agcgctgaagtttctcactgcccaacacacccggctctgccagcttccacacttcccaggcgccaggagccccacgccgagctttacacataactgggaaagaggctacgggagcattctcc

SEQ ID NO: 12103 - DNA, 122 bp, Homo sapiens
ataatgaggaacaaaggggttctatcatcttgttgccccagctggcagccagccaacagccgaatatatcatagtagctttcctaaccaatccagcacacagccaccttactcactgaccac

SEQ ID NO: 12104 - DNA, 122 bp, Homo sapiens
aggaccaggaaacctggctgagtagtgtggtctatggaggtgcatgggcttcagagacaacgttgatcctgagtccaagccagctgcttagtagatgtgggagagttttatacttacctgca

SEQ ID NO: 12105 - DNA, 122 bp, Homo sapiens
gcgaccctggtgatccccttgcccaggttgtctctcggagccctgaaaccacctgggcctcgctggagccatggcgccccctggtggaggcctgatattctgtccgattccaaccaaaattc

SEQ ID NO: 12106 - DNA, 122 bp, Homo sapiens
ctgcgcagcggggctgagttggagaacgtcttagactacaagttccgggaatcagcgcggcgaggcctgagaagaagacgtttgcgcctgcgcgtcgcgggcggggcctctggggcggagcg

SEQ ID NO: 12107 - DNA, 122 bp, Homo sapiens
gactgctttattggtggcagttactacaagtcaataaatattgatccccaaagaagagctcggttatttatcagattactggtccatagagagctgaatgaaactgaaccaagcgattgctg

SEQ ID NO: 12108 - DNA, 122 bp, Homo sapiens
agtaaccaagattggaatactgaccccttcaggaggcagcccatgccgttttttcccaaccgctctaatctgccccaaatgcttccttatatgaatccaaatttgtctctccttgacctcta

SEQ ID NO: 12109 - DNA, 122 bp, Homo sapiens
gaggtgaccccacagtcctgccttccagacctgccagcccatgtctccccagctgctccacgacccccgctgggccctgggccctgggcccgagcacatgtgcctgcctgcgaggggtggtg

SEQ ID NO: 12110 - DNA, 122 bp, Homo sapiens
taaccctccccagggagctcacctgcaaatgctcccatgggcccctggccaccctctgcccgcaacctggctcagccactcgcatgccctgggtggtccagtcccctacactccatgaccct

SEQ ID NO: 12111 - DNA, 122 bp, Homo sapiens
taggcatagaacctcagtccaaagtgcccaaggcaggggaagagctccatttccacctgccgggtggtggcattgtacatgccatggtacacagtgggcaggatccagcctttgctcttatt

SEQ ID NO: 12112 - DNA, 122 bp, Homo sapiens
gttaggatagaaacgagcccccctcctcacctcgcaagcccgcgccagtccagttttagccgttcttttggaagagcaagtcagttgaacgccatcgaagaggctcctgatttagatattaa

SEQ ID NO: 12113 - DNA, 122 bp, Homo sapiens
tcgtgcgcctcgacgggcagctctaccgcctcagcagctacatcaagaggtgggtggcctcgccgtgcgccctggcccgtcgcctggtacccgcagacgcctccacccggctgcggtctctg

SEQ ID NO: 12114 - DNA, 122 bp, Homo sapiens
cttggacaccgctgggaggctcagcctgagggtagcgtggagtggccagagggtttccgccgggagcaggggatacctgggcttctatttcaatactgtgctaacctgaagccctgaatcct

SEQ ID NO: 12115 - DNA, 122 bp, Homo sapiens
cttgtggttttcttgctttggcagagggaacgtcagctggagttgggggttcgaggcgtgcgcaagtaacagggttgtagctcgttgtcctttggattgtggaccttctgagtgctggaccc

SEQ ID NO: 12116 - DNA, 122 bp, Homo sapiens
attgcattcggccttaaaacaacattggaccctcgtgaaggaagcgtcgtgtggacgttgcgttctgccttaaaacaacgttgaacccacgtgaaggaagcgtcgtgtggatgttacattta

SEQ ID NO: 12117 - DNA, 122 bp, Homo sapiens
gtctgacagcaggtggaagcagcccctgtgtgtggagagccttccggagggcatgccccgcgccttcctggtcaggagtcggcgtccacagccccccaactggggccatctgcctgaccagc

SEQ ID NO: 12118 - DNA, 122 bp, Homo sapiens
ctgcctggaagtcccacagcacagagagagccgtgttagcaccgcactgaccccagcccccggaggctgaagggggagcaaaccacccctgccctcaggccaggccctggaaggacgcagcc

SEQ ID NO: 12119 - DNA, 122 bp, Homo sapiens
agcaatcccctcaccttggcttctcaaagtgctggaattataggcatgagccaccacacccggcccctcacagatgtttatacagctgggcactaatatacttcttgtgtgtgtatcaaagt

SEQ ID NO: 12120 - DNA, 122 bp, Homo sapiens
gtgtgtgtgtgggcatgtgtgtgttggctcagatcatcgcgggggctaattcccaagatccgcaagctggagacccaggaaagctcatggtatagttctagctgagtctaaaatcctgacaa

SEQ ID NO: 12121 - DNA, 122 bp, Homo sapiens
agaatgtccagactatctgaataaatcatccctgtaggaatgaacagtgctgctggagttcggttttatttaatgtggtggcatgtatgctaaactacgacttcaagaatgtggcaattgtg

SEQ ID NO: 12122 - DNA, 122 bp, Homo sapiens
agaggcaataaatacttttaagccaatgagtaaccaagttcctaccctgtgctggtgctgcgaacagaagagcagtctccctttgaaagctggttctctgagggagaaaacagtctctgacc

SEQ ID NO: 12123 - DNA, 122 bp, Homo sapiens
cctggtactaatagaatgcctttcatgaaaatgatgcataccacctgaagaatgctcacacggtttttcaaattcttttatatacatttgaatttcaccactaccctgacaggaataatgac

SEQ ID NO: 12124 - DNA, 122 bp, Homo sapiens
ctcacgcaggggcacgcggaccggcacacactcgtgtgcacacatccaaccgggcacccccgcgcgcacacgcccgtgcccacgtgtgcacgctcacacccttgcacacacccaggcgcgcg

SEQ ID NO: 12125 - DNA, 122 bp, Homo sapiens
ctcacggttttccaagggcaacggagcacccataaggcaggggagaggctggccgtggaccgggagacctagctagacctgacctctgtccctcagcaactgtgtgactccgaacaatttgt

SEQ ID NO: 12126 - DNA, 122 bp, Homo sapiens
cttaaaggagggcgccaacgcaatttcagtatgtgggagacgggctgccccacccccgcgcgcaaaaccctggtttagcttaagggatggaggcggggacccctgcgcaggcttgcggcgtg

SEQ ID NO: 12127 - DNA, 122 bp, Homo sapiens
aataaccctcaaaatggctgagaccacagctctcgaatgacctccctgacacacgggtgacgcagctgccctcaccagctcccgtggatgtgggctctgccgggtgttccttgcaaggcgcc

SEQ ID NO: 12128 - DNA, 122 bp, Homo sapiens
ggagcgcgcccgccggagtcacagccccctcctgccgcgacctcgcctgacccggctgtccgggcacccggaggcaactaaggccgccccctgcccagatgccggcctgcctctcagcttga

SEQ ID NO: 12129 - DNA, 122 bp, Homo sapiens
ccccgcgggcccgtgcccagggcgcaggagcagccgggttggcctaagggaccttagtgccgggcggaaaggggactttgggttggggattcatggggggagcccatctggagcttgtcagg

SEQ ID NO: 12130 - DNA, 122 bp, Homo sapiens
ctgcgccaggctctcaccttcttcctggacatcacctccccacccagccctcagctcttgcggctgctcagcaccttggcagaagagcccagggaacagcaggagctggaggccctcagcca

SEQ ID NO: 12131 - DNA, 122 bp, Homo sapiens
ccagccccattcttggcattcaccgcgtgccttaattgtatggacatttaaatcaaggtccgctgtgaacacggagagagaggcctttctcctgaggaaggaaaggaggaaggaaggaagga

SEQ ID NO: 12132 - DNA, 122 bp, Homo sapiens
gagaactctgtttatctacaattagcaccagatgtgaaataacaccttctcaggtgagagcgattgacagaagctggtgtgaaggttaagtaacaatcaagttatgaggaaacaacctcaag

SEQ ID NO: 12133 - DNA, 122 bp, Homo sapiens
cctgatttttagctgctacatttcattcctttgtaagaatgttctaaaatttgtttaacccgtctcttgttatgggcatttgggtgtttttttttaaattttctcccttataaataattcta

SEQ ID NO: 12134 - DNA, 122 bp, Homo sapiens
agggtaaggcggccagttggacccggtccttgtgttcggagaacagagtcacccaggcctcgaacgcctgcgatggtcggcgtctcttccctaggtgacgcaagacgcggagctcggctgca

SEQ ID NO: 12135 - DNA, 122 bp, Homo sapiens
attaagggacaagttacaaaataaccgacctgttttcttcaaatgtatcaaggtcatgaacgtcaaggaaagactggggaattgttccaggctgaagcagactagacagacataaagactca

SEQ ID NO: 12136 - DNA, 122 bp, Homo sapiens
tgcatgggagaacacagctaggctgctacgaggcacctggctccaggccaggcctcaggtcggtcatcccatgtcagaagacaggctttccgaaggctcccaccgatgtgaagatcccacac

SEQ ID NO: 12137 - DNA, 122 bp, Homo sapiens
ctgagcatacataatttattttaggaatgcaccagttctgccaacatttatcagaagtcacgtttttaaaaagctattctggaactgaagatgtcattggtttataagaggaaaatggaagc

SEQ ID NO: 12138 - DNA, 122 bp, Homo sapiens
gccaggaagactttcatcagatgaggaaggtgcatggctctaggttaaaagcacgacttccgaatcaaacttgatgaacacatctgcttctttatgtctaaacacatacagagcattaccac

SEQ ID NO: 12139 - DNA, 122 bp, Homo sapiens
cccaccccattcattcattcattcagcaaacagtgccgagctctcgctgtgcactgagcacgcagatacaacagagaacaaagcagatgggctgctctccacccacctggagctcaaggcct

SEQ ID NO: 12140 - DNA, 122 bp, Homo sapiens
ctccctcctgcggaagtgccctccccgtttcccaaagtcagaactggaaaagaccttggacgtcatttatttccatccccggctccattacttgtaagggaattggggtggggacagaccca

SEQ ID NO: 12141 - DNA, 122 bp, Homo sapiens
cacctacacaactttgtcactagagcattattaaaactataacaactcccggctggcgcacggtggctcacgcctgtactcccagcactttgggaggctgacgcgggcggatcatgagatca

SEQ ID NO: 12142 - DNA, 122 bp, Homo sapiens
ccggggaccaggcggtggaggggtgccctggtctggagggtggggcgcccaggtgagggccgctccgggccgacgccgccaccacacaaaggaccaggggctcccgccgccatattgaaaac

SEQ ID NO: 12143 - DNA, 122 bp, Homo sapiens
tgtttaaaaattttccaggctgcagtgagccatgatcatgctaccgcacttcagcttaggcgacatagtgagaccctgtctcaaaggaaaaagaaaactacaaatctttgcatgccataggt

SEQ ID NO: 12144 - DNA, 122 bp, Homo sapiens
aagaccacaatgagtttattatgtaaacacagtctcagctgtgattctcccttttcccttcgtcctttttctgccaagttctgcaaaatagcatgtattagctttatctctttttatttatt

SEQ ID NO: 12145 - DNA, 122 bp, Homo sapiens
tgttgcatattaaatatgctcaatttattatgggccttcaatttccacaaataaaatactcgtccagtatgtactgaaatacctatctgctaaatatttataaagtaacctttgtcagtact

SEQ ID NO: 12146 - DNA, 122 bp, Homo sapiens
tgctgagcagccctaccagtcaggctaggtacttgaagatgaatgaaccgccgcttttagcggatttcagaagctaaaagcctacgaagccaccgaaactggaaactctggcctgtcggcta

SEQ ID NO: 12147 - DNA, 122 bp, Homo sapiens
gacccccctcgctgctcgccatccagtcccatgaggttgtggccagcatcacaagggttccgtcaagtgaccgtgggccctggcatgacacgacgtcttcaagagagtccacggggcaggaa

SEQ ID NO: 12148 - DNA, 122 bp, Homo sapiens
tacttctgcagcattctgttttggccaagaagtaaaaaggtccagattcaaaggcagagacgcagacccccacacacaccccttatgggaggtgggtggaaggatgtggggggctgttgtgt

SEQ ID NO: 12149 - DNA, 122 bp, Homo sapiens
tggttccccgaggactttgcccgcttcatcaccagccgtgtggccgtggagggcaatgtccgcaggatggagcgtctgcgggtggagacggacgtgtagccctggcgaggccagccggcggc

SEQ ID NO: 12150 - DNA, 122 bp, Homo sapiens
agtgaatatgggacctgccaaaaatacttactggcttctggcatggtacttagaacagaacgtgttcttcatttgtatctaaaacttacttacaagtcagccctaacacttcagcttcctcg

SEQ ID NO: 12151 - DNA, 122 bp, Homo sapiens
cattctacagtacagataactttttggagtaggggaagaatgggaatgagaagtttatctcgaatggggctaatttgttgttgttgttatcacagggaccaaatttgaccttaaagtgttct

SEQ ID NO: 12152 - DNA, 122 bp, Homo sapiens
acccaagcgcctacccaagctggttctccgagcctcttgagtctgtttgcaccaggcctgcgctcctctacagacccagcagatcacgggcacgcattcgccacccaccgaacatgggcttg

SEQ ID NO: 12153 - DNA, 122 bp, Homo sapiens
gaggcgtggccggaaaggtcccaccctgctcccctggagtacttaagggagttggcggagcggctgcactcattgctccaaggctcggcctagtgagtgggtcgcctgcgctacttctgcgc

SEQ ID NO: 12154 - DNA, 122 bp, Homo sapiens
aagattggtcacaaaaatatcataaagttagcagctgcaggaagtagttaattgctcccacgtctaagggccagacgctgtggcttatgcctgtaatcccagcactttgggaggctgaggcg

SEQ ID NO: 12155 - DNA, 122 bp, Homo sapiens
cggcccagcttggggctggcattgagggacacgcaacaagtcagcgtgttccccatggggcgcctccgcccctctccgccgcctctggcgccttcgcttgcgccctactctgcctcgctcag

SEQ ID NO: 12156 - DNA, 122 bp, Homo sapiens
gcccatgaaatggcccttttcatccatggccatgctgtccttgggaaagatggtggtggccgccgtgtatgacgtcccttgttccagctgtgggtttagagaatccctcagatttcctctgg

SEQ ID NO: 12157 - DNA, 122 bp, Homo sapiens
caaccccaccccatcatgccatgcggcgtggcctctccttccaaatactgaacactctaacgtttggcgtgacagctatgtagtttaaaaatcaaatttccaccattatgtacaagagtcta

SEQ ID NO: 12158 - DNA, 122 bp, Homo sapiens
tccaaagttgcctgggtcttttggatccattacagtcaccagtgatttggtttcatttcccgggatgagaacaggctttgacctcaactcagacagcaaaagaggagaaataatggaaagaa

SEQ ID NO: 12159 - DNA, 122 bp, Homo sapiens
cccctcgcaggcggcgctgtgggccaaatcccctggggtactggcagggcagcctttcttcgatgccatatttacccaactcaactgccaagtctcctggttcctccccgagggatcgaagc

SEQ ID NO: 12160 - DNA, 122 bp, Homo sapiens
ctctctccatcgctataaacttcactgcggccctcaatgcactcatttctactccagagccgccctacctgtgccgagacccccatttgcagcatgagttactctatgaccttgggcccgct

SEQ ID NO: 12161 - DNA, 122 bp, Homo sapiens
cttggctttactcagtctggctgtgtgaccttaggacaatcatttgaccactttatgcctcggtttcctcatctgtaaaacaggaataaaaatgtggtagcatgtgtggggtggagtaagca

SEQ ID NO: 12162 - DNA, 122 bp, Homo sapiens
cgtaatccgcctgcctcagactcccaaactgatgggattaaaggcgtgagccaccgcgtccggccgttcgtgtctgatttctatatgtgctgccgaagcgagcactcgtgtctaatttttga

SEQ ID NO: 12163 - DNA, 122 bp, Homo sapiens
gagcttgccggtgagcctggacggaggcataggtgcagctaattaggataagacaggggccgcgctgtggtcagccgtgggaagccggcgaggggactggagttggggctacacttgcctcc

SEQ ID NO: 12164 - DNA, 122 bp, Homo sapiens
aggagggctgctgccaggactgtgagagtttgtacagtattgtggtgcaattgcaaaaggcgtgctttctcctggcaggtgcagcccccacacagggctcagcatgtggttagtggagaaca

SEQ ID NO: 12165 - DNA, 122 bp, Homo sapiens
cccccgtcacgcgccgccagcggccatgtgccaggccacgcccagccccccatggccacgcgccaggccacgccctatcacgtcctgccaattgccacgcaccaggccacgcccccgtcacg

SEQ ID NO: 12166 - DNA, 122 bp, Homo sapiens
atagcacatagtggccttgtcactgaggagctgccacttcacgtcccaccccacactccccgcaggacctcggccagttcaattaacaggcaagggtttacttctactgtcccgccgggctc

SEQ ID NO: 12167 - DNA, 122 bp, Homo sapiens
ttgaaggctgacatcagaaggagcacgcaccaagggaaatttcccacccccccgcgataccgcaaattcccagccgctggccgtttgggactctcctaccggaagtgaaaccgaagaaaacg

SEQ ID NO: 12168 - DNA, 122 bp, Homo sapiens
gccactcttccggcaggaagtctgtgcgtcaggaggccggccaggactcagctccagccccgcgctcgcgtgtagccctacgtaaagcgtgaggggtttcgcgacaacccaggccccgcccc

SEQ ID NO: 12169 - DNA, 122 bp, Homo sapiens
ggtgcccctggtggtggaggtgcccgtggtggtggaggtgctcgtggtggtggacgtgctcgtggtggtggtgctcgtggtggtggaggtgcccgtggtggtggaggtgcccgtggtggtgg

SEQ ID NO: 12170 - DNA, 122 bp, Homo sapiens
ggacacataactcaccaattgcaaaggccatccacatggaggtagctagaacaaggatggcgtctgagcagatccccttcatggtgacagaagaactgtggaaatatgcaacttttgatgta

SEQ ID NO: 12171 - DNA, 122 bp, Homo sapiens
acctgggcctgggagggaaggcccagcggggattcaggtaccacccaggagctggagacccgagggacggcagagaagttggggaaggtgggccaacctccccagaaatgatgagcaacggg

SEQ ID NO: 12172 - DNA, 122 bp, Homo sapiens
cctcggggggcgcagtcacgtggaatccctgctctccagaacccgtgtggcacagggtgtcggtctagggagtttcacacactcggggcacaagccgagtcttaactagagatgtacacaca

SEQ ID NO: 12173 - DNA, 122 bp, Homo sapiens
agatcagaaagcccatgtaattacatagtgtttccagcacaatctacaacgctctgacaccggatatcagcacaacaataagtaagggcaaaaagcttgtcagggaagtttggcaatgagta

SEQ ID NO: 12174 - DNA, 122 bp, Homo sapiens
gtagcggccgcgtcttcgggaagctttgtggcaaagccgagagccggaaggacggggtgccgctgagcaaggactatcggcttccgtaaaacatcatggcggcgccctctgctggctctcgg

SEQ ID NO: 12175 - DNA, 122 bp, Homo sapiens
acgagcaaaggccaccaggaggtagcacagcaaaaaaggccaagagcctgttttctttaccgatggctggcggcaaatattccgaaagaaacgtgtcaggcaagaagcgctagttcacgcct

SEQ ID NO: 12176 - DNA, 122 bp, Homo sapiens
gaagttgccttttgttgaaggaggtgttttacaaagggaaatagggtgtctcctgggcatcgcattagcaattaaatacatgtatcactgaaatgaaaagaaatgatgaaatgatgaaatga

SEQ ID NO: 12177 - DNA, 122 bp, Homo sapiens
atggaaaactcacacgcaaccaggcagccagccctcaccaagtacttgctatgcaccaggcgctgtgccaagcccctttcaagcaggaccacagccccatcacgtgggtgctgcagtcatcc

SEQ ID NO: 12178 - DNA, 122 bp, Homo sapiens
taggcaggctttcaggtggcacccaggggctttatggcctgcaggtaaggccccttcatccgggtcagacttagcaaataaaaatataggacactcaattaagtttgcattttggataaaca

SEQ ID NO: 12179 - DNA, 122 bp, Homo sapiens
tttcatacatagaaaatgtcagaagataggtcaatgaagacctgtattcctgcctgtagacgccacacttgtatttttttgagacggagtctcactctgtcacccaggctggggtgcagtgg

SEQ ID NO: 12180 - DNA, 122 bp, Homo sapiens
cctccgggcgggaccagctggtggttctccagctgcactggggccatggcggcgcaggaccgggcttggcgcaacggcacacgatgcggtcctcgagcctcccgggcgctcggtcaccgcgc

SEQ ID NO: 12181 - DNA, 122 bp, Homo sapiens
agcgaccgcgcggtggggccggcggggactggggctgcgcagcgcggcctggggtgggggcggcggggcccccaggagctcctgggaaccgagggtcctggggcggtcccgccccgcacagc

SEQ ID NO: 12182 - DNA, 122 bp, Homo sapiens
ggactctcaccccaagtctccttctcctgcaaagggcgctgaaggacgaggggaggacgacgggtcccacctgactctgcacctctgcaggctccctctgaaggacaactgctggcccctca

SEQ ID NO: 12183 - DNA, 122 bp, Homo sapiens
caccgatagttttaaccagcattgttgctctgatcgtcctaggacccagtgaggtcgtcacgtatatttctctgatacatgatttttctcttctcctttctctgaatttaaacttgtcactt

SEQ ID NO: 12184 - DNA, 122 bp, Homo sapiens
ctggggtggtcctgccgccacctctcctttgactcaggagcgccgcgccgcgtccgggcgcgttctcagtcgcgcgaagccagagaggaccctgggcgtgattctccctccctggcacagac

SEQ ID NO: 12185 - DNA, 122 bp, Homo sapiens
ttgtgagcgtgattacgggagcccattctcagtactggtgtgagtgtggttgtgggaccccgttctcagcactggtgtgagcgtgatcatgggagcccgttctcagcgctggtgcgagcgtg

SEQ ID NO: 12186 - DNA, 122 bp, Homo sapiens
gaggggccgggggccgcggtcagcttctctgagtgtcctggtcttggaggacacacgtcacgtgtgttggccaaggagccgggatcggggcctccatcaaacagtgttgcaaactggtaggg

SEQ ID NO: 12187 - DNA, 122 bp, Homo sapiens
acaggtggcccgaggccctcgagctgcgcggacagagcggccccggagtcgcgagcgtgacgggcttgcttggagggcacttggtggccggtagcaccataaaggccataatttggtgtgtg

SEQ ID NO: 12188 - DNA, 122 bp, Homo sapiens
gatgtttaaacaattttgttgctgaaacatgataatttccagaagccccttttctgtacacggtatcttttgctaagacccaccacaaagaaaatgagttgtaccagaagaatggcagaaga

SEQ ID NO: 12189 - DNA, 122 bp, Homo sapiens
gtccctgggctcctcgattcaattaggtttgaataggatgcatacttttcccactcactgcgtctctttttctttttgcagcctttctccaccaaaaaagtggagactcagagctgcggagg

SEQ ID NO: 12190 - DNA, 122 bp, Homo sapiens
gacaagctaccctcaggttacaggtcatctgggccatatggagagaacccaccctcaccacggcatcagagagagtcctgaacatccccccctggacagtacaggtgcacagctgtaattgt

SEQ ID NO: 12191 - DNA, 122 bp, Homo sapiens
gtgtgagggaaagcgccacgccagtgggggctgatacagctccagcctgtgcggggcaggcgttagactgcagaaggggagagcttaggataaccgcactcaggtggcgcaaggaagtcagc

SEQ ID NO: 12192 - DNA, 122 bp, Homo sapiens
gtggggcaggccgaggcctggggatgggcttgaaggctgattccactctggaatccggcgcgttagtattgattttgagttttgttttcctcttctgcattatcattcccttaggacagcct

SEQ ID NO: 12193 - DNA, 122 bp, Homo sapiens
agtagtttggcattttaataaagggtctctaagtaaattaaaatagaacactcggttggccgatctctgaatctctctacacctcggggagacctcactacaaagtaagggagagtgtgtag

SEQ ID NO: 12194 - DNA, 122 bp, Homo sapiens
gctgcgccggggtcgcgacctcactggcggagaggaaccgcacccgggggaggcgcttggcgagttttgcaaactcccatcttgggggattgatgctcgttcctactaatacgtccccttag

SEQ ID NO: 12195 - DNA, 122 bp, Homo sapiens
caagaggcatttctcttttcagaaaattaaaaacattaagtactccatccggacacaaagcgtctccatatgacagagttttgttactgtggggagaggacaaagcaccagccacacccctc

SEQ ID NO: 12196 - DNA, 122 bp, Homo sapiens
acgtgcgcgccttgcgcttcccccagctcctctgactggggcgtccgactggagctcagccgcgcttgtccggtgctaggtcatcctgccaaacacccgaggccccaaagatggtgcaaagt

SEQ ID NO: 12197 - DNA, 122 bp, Homo sapiens
agagtacaaaagtctttggaaggcagcagcatggcaaagtcaccaggaagtctgcatagacgaccagacgccatgacatgatggcccagatcatgccgcagccgtcatggatcagccagacc

SEQ ID NO: 12198 - DNA, 122 bp, Homo sapiens
acccttatcccaggagcacagcactcgtgccttgcgtggaggagaagtgtgccccatgggcggttgattggcctgatgactgtccttcagctcaggcaccactggaggctgagctctcactg

SEQ ID NO: 12199 - DNA, 122 bp, Homo sapiens
ggggttccaccgtagtactggggtccactcacccatagaccgtgcatctccagcttcatgcgcaggaatttccccatgccacagggccttttgctggggaagatgctggtctgcccaaagtc

SEQ ID NO: 12200 - DNA, 122 bp, Homo sapiens
ctgggctgatggcaaacccagccgggatggctgagccacactcacccccggctttcagagcggggtcagcagatgggcatcaggcgaaaatgttctgttcctggtacttgcgccggcgggca

SEQ ID NO: 12201 - DNA, 122 bp, Homo sapiens
atagctgcgcgccggctggcacttccgcttccggttgcgcacggcattaagtgtaggggccgagccccaagagctttggaatgaggatgatgtgaagctgagagaagagctggggccacctc

SEQ ID NO: 12202 - DNA, 122 bp, Homo sapiens
tggtctctcggatactagaactatctttcttgccttggaccagctaacgtgccttggttgcgccagtgtactgagccctgtggacatcacctcattaaatattcaataaatgttattttttt

SEQ ID NO: 12203 - DNA, 122 bp, Homo sapiens
gctcttaagtgtgggcgtttggtaaccggcatggctgctacctgtttctggctggagcctcggacactggctcactgcagttggtggtgtccacagagcggtaggagggcaactagtagcgg

SEQ ID NO: 12204 - DNA, 122 bp, Homo sapiens
tttatagataaaggttccttgtaacataccttttgaaaaaaaattgttctactaataacacgttttgaaaaagtctgaattagtccagggtatttattttacacatgggaaagtaaaatcca

SEQ ID NO: 12205 - DNA, 122 bp, Homo sapiens
gtttttaaaaaggtatttattcaataaatgtttattgagcctcttccctgtcccaggcagcgtactagactccaggaatgcgatgatgaatgaacaacagatctctcttaacagaggtccag

SEQ ID NO: 12206 - DNA, 122 bp, Homo sapiens
tttgatttggggttttctgatttgcctcctgagatcgggttctactttccctctctcgtacgcccacttggttttggcatcgaggttgtgtcactgcattttagaaactgggcataccatgt

SEQ ID NO: 12207 - DNA, 122 bp, Homo sapiens
ccaattcttgcagtataccacggcaagaaaccccgggatactgaaagccgtctgtgcttgcgataaggcagggggtctatttgagctgactaacaccagctgcctaccgagggctaaactaa

SEQ ID NO: 12208 - DNA, 122 bp, Homo sapiens
cattcgggagccggaggactggggcccctaccggcggcacaggaaccccagtacagcagacgcctataattcacatctcaaagaataaacaagcacctttgcatggcactcgctactccctg

SEQ ID NO: 12209 - DNA, 122 bp, Homo sapiens
gcaatatgtgaaggagcggttgtagccgcatttagcaatatgtgaaggagcggttgtagccgtatttagcaatatgtaaaggaggaattgcagccatatttagcctgtgggccaagatttgc

SEQ ID NO: 12210 - DNA, 122 bp, Homo sapiens
acaggggcagggtgtgtgagtgagttctcagaggtgtcttcctgctactctctgcatcctcgacaacttccagcattttgccctgctgatcttggggatttcactcttcctctgaaccggct

SEQ ID NO: 12211 - DNA, 122 bp, Homo sapiens
gtgggccaggtgctcagattgctaggatacagcagggggtgccgagatgaggcaaggggccgggttaggagtccctgctctagcacagcgatactagctgagtccatcgatgacctttaaac

SEQ ID NO: 12212 - DNA, 122 bp, Homo sapiens
gacgaggaggccgccgctttggccatactgtcctgtggctcctcgccctcgggccaaaggcgatcagtctgacactgggttgggggatccgcctcagagtttctgggcagcgtacagtgacg

SEQ ID NO: 12213 - DNA, 122 bp, Homo sapiens
ctggagcagccacagacctcccaacgccaaacctgctgagaccctgaagcccatgggcagcgccaagcctgatgagaacctgaaatccactagcaaagaagaactcaagaaagatattaaga

SEQ ID NO: 12214 - DNA, 122 bp, Homo sapiens
gctggggtgggacggggaggcggggcgcgagcgcgaaagtgtgagccgcccagtgagttgcggaaacctggagggtacttggagtttgggttcgcatcccctctccagctgcttagtggtcg

SEQ ID NO: 12215 - DNA, 122 bp, Homo sapiens
tgatagtgtgactgttagaaaaactccagctataccacaactctccccctccagacacggcggcctgtccaggtcctcctgtgggattcctgctcaccattggctcagggtccgccctgagt

SEQ ID NO: 12216 - DNA, 122 bp, Homo sapiens
gctgaatggaagcccagagatccatttagatattttactgatgtctgaaacttactggagcgagaactaaattcactttgtctctcagactaatttttttcttgtttcccaaacagtgttaa

SEQ ID NO: 12217 - DNA, 122 bp, Homo sapiens
cagacagatgagtaggctcctttgtggagacctgatttgagcactggtgtgaaaaagacccgcgcaagccgacccgtgtgcctcccgccccgcccccaaccccccggccctgcacacctacc

SEQ ID NO: 12218 - DNA, 122 bp, Homo sapiens
ttgaggtcagcacattgtagagtgttgacattaaacatctatatcatgtggctgagcacacgcttcgcttagggccgcctcagtcttgcaacagccatctggccacttccaagtagtcatgc

SEQ ID NO: 12219 - DNA, 122 bp, Homo sapiens
gttctgaaaccaaaccttcagaggggaaaaatgaattggtttagtattttgaacagttaacgtcataatagaaaaaaacataacatggaattctatatgccactgagactttaaactgcaac

SEQ ID NO: 12220 - DNA, 122 bp, Homo sapiens
tttaattgcaacaaggttcgccaggttgcttagggttgggcaaactggagatcactgacacggaaaacaagaaaacccttattgtttatagctgttatgtatgaataggttattagccttag

SEQ ID NO: 12221 - DNA, 122 bp, Homo sapiens
tgtggatgtaacttttggcaaagaccgggaagtcgttcaagaactctcccaccgtcccgacgctggcgccgcgccccgcgaaccggggtccggccgcgcccaggctccgcagaggctcctct

SEQ ID NO: 12222 - DNA, 122 bp, Homo sapiens
aaacaatcatttctcgctgctactcattttggcccttcaagaccttattatctaatcaaacgggactactgacctcttctgaacatgcccaatcacatctttgctcaaaaagttctttccat

SEQ ID NO: 12223 - DNA, 122 bp, Homo sapiens
atgcccttgaagtgttgccgggtgaaagccgggaagggattgccgtctgccccttccctccggggccacagggcctgagttcctgggaaaactgtggagccagtccctgcctcagcaccagc

SEQ ID NO: 12224 - DNA, 122 bp, Homo sapiens
cagaacctcttccccccctgtgtcttagaacttccatcgcagcgggggaggcactcctcacgaggcggtgactgagagccagaccctcccacccccggctcttaggacccacatcgtagtgg

SEQ ID NO: 12225 - DNA, 122 bp, Homo sapiens
tgcgaaaagcagtccacaggctcttggtattgaggcaaaaccaatccaaagaaccagctgcgaatgctgatagtccccagaccaactgacagctggatgttcgctggcctcagcggtgtgca

SEQ ID NO: 12226 - DNA, 122 bp, Homo sapiens
aaacatagcaaacgtgcttccctaacataagcagacccatgtggcaattcacaacataaccgagacaagcacaataaataaacacatacataatcattccacagcactgaggcaggcggggg

SEQ ID NO: 12227 - DNA, 122 bp, Homo sapiens
tggctgctcgggcgaatgttgtttttctccgcagccatgtgtcgaagggcgattaacattcgctcgacaaaaccctgtcccgggccatttgggagttgcacgcgttcacacccggggctcag

SEQ ID NO: 12228 - DNA, 122 bp, Homo sapiens
ttgcttctgaggggacacactgaagacgtctataggtgaagtcacaaggcttctaacttacggagataaggacatgacaatgaaggagagctgggctgctcaggccataggatttccaagtt

SEQ ID NO: 12229 - DNA, 122 bp, Homo sapiens
tgagggtgacctttgacctttctttccaatacacctgacacaaagggcttagaaaagacccgtttcgggtgcggggtgctgatgctgcttttttgttgttcgtttgcgctcgcgctcgctct

SEQ ID NO: 12230 - DNA, 122 bp, Homo sapiens
ctcagggatcgcgggggcccaaggactccgggtcttcttcccgggggaaggaataagtcgcgcagcatagaggccctagccccggcacctcgtcgagccgccaagtttctgttttcctttct

SEQ ID NO: 12231 - DNA, 122 bp, Homo sapiens
actgggggtgcaggctggccctgtcattgtcactccccacacaagtgatgcaggcaggaacgcacggagccctgggggcagggagaggccagagtgggagagaacggggacacaggagcaca

SEQ ID NO: 12232 - DNA, 122 bp, Homo sapiens
cgggacccctcccggtccgggcgtctcatctccctcctcccggtccccacccgatgcgggcgcccaggaataaagggttcctggcctccaaggctgctgcggatgggggtgcctgaaatgag

SEQ ID NO: 12233 - DNA, 122 bp, Homo sapiens
ggggccacgtcccagggctgtgggcagcagggccagcctgccggcccgaggtagctgacacgtgtctcatgctgcagcgggtctgcccgccacccgggcgtgtgaaccccaggtcgggcccc

SEQ ID NO: 12234 - DNA, 122 bp, Homo sapiens
cttccctaggcactggcagccgttgggggcgatccaggcggacgaggccggcggagtggccgcgctcgggccggcgatcgggaccgccaccgtggacgacaaggtgctcggcggctgggctg

SEQ ID NO: 12235 - DNA, 122 bp, Homo sapiens
gtctcaaactcctggcctcaagtgatccccctgcctcagcctcccaaagtgctgggattacgggtgtgagccaccacatcaggccagatatgcacatttttaaatgtatgttatacatccaa

SEQ ID NO: 12236 - DNA, 122 bp, Homo sapiens
cggtgacccaccacacgttgcccagccgtgtggctgggatggtcggtacccatggccgtgcggtcgagccttgatgctccaggacagtcctggaaggcttcctggcagatccgtgggaagaa

SEQ ID NO: 12237 - DNA, 122 bp, Homo sapiens
tccccacggtcgttgctctcattaatgtaggcaccgccttctagcaaaagtcttgtgaggcgaagccggctctgatggactgctttgatcaaggaatttccttcacttgaaatttccatacc

SEQ ID NO: 12238 - DNA, 122 bp, Homo sapiens
ctttctaccacattcccacccatcctccatagatacccaatcttgttagtttctggtttacgcttcttggattttcttttctcaaatgagaatgtacatattttctttttcacattttctaa

SEQ ID NO: 12239 - DNA, 122 bp, Homo sapiens
acctactttaagtccccgcgcgcgccaccagtaacggtcgcgacccaggtggagcgactgcgtgtgccgaaaaagagcttatttgctgattggcttctgccgctgtctttcacaaccgcagc

SEQ ID NO: 12240 - DNA, 122 bp, Homo sapiens
aatcaagcagctgtgaagacaaaatgagatacggccgagtttccaagcatgtggggcacacggcactgacatacacagatgattttaggtgactcgtggataaagtattagacaacactgac

SEQ ID NO: 12241 - DNA, 122 bp, Homo sapiens
agtgtctgcttaccagtgcactgccagggtcagggatggctaagcctctcaccctaggagcgctgtggctcctacaattagcgcaggcccagagggttcagaagggacctcagggtgattct

SEQ ID NO: 12242 - DNA, 122 bp, Homo sapiens
agacaataaagggaactccagctggcctgatgggtgttttggaactcaaacagctgcttccggatgtatcattcccacctttcacagcctttcagcggaaatacttattggctcactcagag

SEQ ID NO: 12243 - DNA, 122 bp, Homo sapiens
aaaacaggagggtggtatgtgtgtctagcattctgccttttcagggggcttcctgagggacgagtttttgcctcatctgattcagagtcctaatgggaaaccaacataccttgtttgcttag

SEQ ID NO: 12244 - DNA, 122 bp, Homo sapiens
acccgggtggagccgatgtccatcatcacctcctcgaaggccgccgtctcctcggcctgacgctgcttctgcagcgcaatcttctcactaaatttgcgcggattggaagccgaggccgtggc

SEQ ID NO: 12245 - DNA, 122 bp, Homo sapiens
catgctctgctctgtaaagatgccgggagttcagtcccctggaccagctcttccagggtccgtgggtcctcgcctgtcccagaagccccagcctgggtagatgatctccagacactgagcag

SEQ ID NO: 12246 - DNA, 122 bp, Homo sapiens
agtagaggttggtgctgggattgaagaggcgctgagctgggatctggaagcgccagcggccgtagggggagtcctgcgggggctggcccgtgttgaactccgtgttgcagctgaagaagacc

SEQ ID NO: 12247 - DNA, 122 bp, Homo sapiens
gcccaattgtaggggcctgttcagtgcatttctgcgcgatccggggtcccgggctgagaccgcggccagggccagggctgggccttcgtgcccgggcggcgtaggtctagagtccaggggcc

SEQ ID NO: 12248 - DNA, 122 bp, Homo sapiens
gaagctcacaaagttgcggccatggcgggaggaagcaagtgtctcgtccaggtagacagacgggaagagggccgtgctctcagcccacagccaggccagctggtcattgcgggccacctcaa

SEQ ID NO: 12249 - DNA, 122 bp, Homo sapiens
tccagaactcctcatcttccagccggaagctctgaccccgtgaacacttgccccctcccccggccccggccccggcccccaccatgccacctgctgtctgtgaatgtgactccactagagac

SEQ ID NO: 12250 - DNA, 122 bp, Homo sapiens
tccggtgcgctccgtagggcttcggggtcactgacttcgtatcgaggggccctcggctctcgccccttctgttttccccacctcctctagtacttctaacgcaaattgctctcgggcctgca

SEQ ID NO: 12251 - DNA, 122 bp, Homo sapiens
ggacaacacagcgagacctcatctctacaaaaaatttttaaaattagctggatgtggtggcgcctgtattcccagctcctagggaatctgagaccagaggatcagttgagcccagggatttg

SEQ ID NO: 12252 - DNA, 122 bp, Homo sapiens
aacttcctgcattcgatagcatttaccaaaggcatagaagacctaagaattttgtcttttcgctgtcactccactttagcccttgcccagagagggtaggattttttcctgatccactgcat

SEQ ID NO: 12253 - DNA, 122 bp, Homo sapiens
ttttctttcattaaggtttcttaaatcttagagtttattcacagaaccagacacttgacccggaatgaatgcttaaccggactccttttttttttttcaaggaatttgtccacggtgaaaga

SEQ ID NO: 12254 - DNA, 122 bp, Homo sapiens
gccgcccacctgctccccggaccagtttgcatgtgccacaggggagatcgactgtatccccggggcctggcgctgtgacggctttcccgagtgcgatgaccagagcgacgaggagggctgcc

SEQ ID NO: 12255 - DNA, 122 bp, Homo sapiens
tggcgctccctcttgcttcccggtgacccagactttggtcagaagagtaccacagcccaacggggctgcggacggcaggcgtggagcacgccttggcgtttcccctcaaccctactcctcta

SEQ ID NO: 12256 - DNA, 122 bp, Homo sapiens
tagggctttggccacagttaatataggcatttcggaaaggcggagcgagagcctccagggcgggcggcgccaagacgcggattccggaacaccgcgaacaccctggaccgggtcccggagcc

SEQ ID NO: 12257 - DNA, 122 bp, Homo sapiens
aaagttctttttgcttcctgaaatttccggcagccaaaagatctatagcgagtggcagtccgatccagcaagagccaatgaaagatccactccacagtgaagaaggacatgcagatgaagtg

SEQ ID NO: 12258 - DNA, 122 bp, Homo sapiens
tgctttctagacggacagatgcagggcagactcgggaacaagtgccagagggtctcaacccgcgtgggatttgcgcaagtttttgcttccacaggctgtgaacacaaacctaccccaagccc

SEQ ID NO: 12259 - DNA, 122 bp, Homo sapiens
acgcccttgggccccgcgcccctcccagcagcgccgcgctcacctccacggcctggcccgcgggacccgccagctcgaccaacaacggcctgcagccgcacctccgcaagctcctcttttcc

SEQ ID NO: 12260 - DNA, 122 bp, Homo sapiens
agccgagccccaacctagacacggtctgagctccaaccttggctggctatacttcaagggcgggtagggccggcatggggctggagggagtcagcccactattgcagattccacacaaagaa

SEQ ID NO: 12261 - DNA, 122 bp, Homo sapiens
ggagcgagctaagagcagtggggagatcaaagaggagcaggcgcagacagggcagcccgccggactgagccagccaccggccccgccacagatttacccgtggatgaccaaactgcacatga

SEQ ID NO: 12262 - DNA, 122 bp, Homo sapiens
tctttctctccagcgaaaccgaggcctccggagagcctagtagagagtgtgggcagtgagcgcttgtagccgctagagggagcgctgggcacagtgcacgagagacaataaaggctgattat

SEQ ID NO: 12263 - DNA, 122 bp, Homo sapiens
agggtcccccagtgctcgatcctggggccccgaccttgatgccaggcccccagactcacccgggggcccccagacgctcaccaaaaatgtcatcctgctcacctaggtcctacctaatctgc

SEQ ID NO: 12264 - DNA, 122 bp, Homo sapiens
tacccaatgatccttatcctaggcggggcctaatgggaacgtatggccaatcagcggcggcgtttcttttgcggctccacgtcggcaccagctgcggggcaagatggaggcgctgattttgg

SEQ ID NO: 12265 - DNA, 122 bp, Homo sapiens
ttcttctcccatgttcgcgacccccgcgcgggttcccgggacgcgaagggagcggccgcgcggccgagcccgcagcctgcaccgtggctcgcgaccacctattgtttaccgggccgggagcc

SEQ ID NO: 12266 - DNA, 122 bp, Homo sapiens
gcaccctcatgaagcagaggacctgggcttaaaactcattcagtatcaggaaaagagcgccgagcacgggcctattatgccaaagcttctgaaaggggcaccacgttttttgctctatgggg

SEQ ID NO: 12267 - DNA, 122 bp, Homo sapiens
actctctctaacagctgtggtggaaccagggctcactgcaaaccccctttcctgttgggacgcctcatgggctggaccccatgagggctcttcagaaaggtgagaacacgcagtaagacctt

SEQ ID NO: 12268 - DNA, 122 bp, Homo sapiens
aagatggacagtgagttgtcagtccgtaggggtggggccatggcactgaggtgtagacatcgcacctgcgcatggcattctcagagttacaagcacctggtaaaagggctgacatttctaac

SEQ ID NO: 12269 - DNA, 122 bp, Homo sapiens
cagcagggtctaacaagttcacgtgccacctggaggcagtggtagtcatccatgccttctcggtgaggcactgtacgccagagtgactttaaagtatgaggaagccattagcactgctccag

SEQ ID NO: 12270 - DNA, 122 bp, Homo sapiens
cccggtgcgcgctgacgcggtcggcctggccgagctctccagcatccgcagaagggtccccggcgctgttcctgggatgctcccttacataatgacgcgactggctgaagcgcacgtcagcg

SEQ ID NO: 12271 - DNA, 122 bp, Homo sapiens
gcactgtcctagacggagtggccaagaaaggtctctgaggtggtggtccagtgcagcaagcgggcaagccacgcagtggagcagcctgtggacagaccgtccacgtggtcagaaaagtggcc

SEQ ID NO: 12272 - DNA, 122 bp, Homo sapiens
gtgtgtgggtgagtgtctgcacatacgtgtaccttggctccttgcactgtaacagaagctcgcgtgtatttccagaacattgcagaacaaattgactgctttaaaacacgatactgcacctc

SEQ ID NO: 12273 - DNA, 122 bp, Homo sapiens
tcctttcagcagtgggcctgatgcatacgtggccttcacctgctctaggtcggctcccagcgctgggcggaaggcgtttaagtctatttgactgtccctgtcatcgtaaggtttacggatgg

SEQ ID NO: 12274 - DNA, 122 bp, Homo sapiens
gaaccaccacgcccgtccagctctttcttatggtctgagttccctcacacaccaggaagccgcacactcagttccttgctgggaaatgttcccggctgggacagcttcaaccagttctgcta

SEQ ID NO: 12275 - DNA, 122 bp, Homo sapiens
ggagcaaagatattgcatttttcatactgaatcctttgcatcttggggatggctgacaggcggaggtgaatcatagggctcaaggctggagggtagccacagcagcaaggaagaagggggtg

SEQ ID NO: 12276 - DNA, 122 bp, Homo sapiens
agcccagccggagggagagccagagctaggcgcaaaagaagggccagcacattacatcatcgcttggcctggaatcaaatgggaaggatatgactcactcaagctagttaagctttggctca

SEQ ID NO: 12277 - DNA, 122 bp, Homo sapiens
gcctgctccggcatctcccaccctgagacactgccctggagccagatggaagtgcacgggcgcctctcctgcggctgctgtctcggcactggccgacagctccctagagcggggactccaac

SEQ ID NO: 12278 - DNA, 122 bp, Homo sapiens
attctggtcctacaggtcactgagaggagtttggatttaagactgagtgagctggggagccggtggagggtattatgcaggagtgactggatctggtcaattcttagtaagagttctggctg

SEQ ID NO: 12279 - DNA, 122 bp, Homo sapiens
ctcaaagcccggcacctccagacagagcagaggtgagccatttggctgagggttctgagccgggtcaggcggcggtggggtgacggtcctgagccgggtcaggcggcggtggggtgacggtc

SEQ ID NO: 12280 - DNA, 122 bp, Homo sapiens
tttcttactgcctagtcaaaaggaagttttctcctgtcaggaatgtattcaatactgtagcggataggattataaatgcactttaagtattttctttattgatgggaaccacacagactaaa

SEQ ID NO: 12281 - DNA, 122 bp, Homo sapiens
gtatcttggttccaggccctaatctgtcagatcctatgttcatgtatatccttatgatggcgtctatcaggctttctcattcagatgccattaatgcttgaattatatgaggcagaaactta

SEQ ID NO: 12282 - DNA, 122 bp, Homo sapiens
tcctcccacttcccaccttcccagtcctcccgctactctgaccgttctacctgtgattctcgctggtggagtcaacctggaatggattcccgccgaaccacgcctccctttcctggttcgcc

SEQ ID NO: 12283 - DNA, 122 bp, Homo sapiens
ggcactacggcctctgggtgccacattccctggacctattttccacctggcattggggtccgaaggccagattgtggtacagagctcagcgtgggaacgtcctggggcccaggtatggggaa

SEQ ID NO: 12284 - DNA, 122 bp, Homo sapiens
caggtgcgagctgcggctgaagctgcggccgcactcgctgcacacgaatggtcgctcacccgtgtggatcttctggtgcctcagcaggttgctgcgttggctgaacaccttgccacatacat

SEQ ID NO: 12285 - DNA, 122 bp, Homo sapiens
agccttgatagcctctgtacttctctcttcaaactacggtttaaagaatgactataaaatcgggagcgtattgaaggtttttaagtgaggcgacactcacataatatggaactagccgttct

SEQ ID NO: 12286 - DNA, 122 bp, Homo sapiens
tatgaaaagagagttgagagttgaaatgaacaggaatctcaaaaactgattagaacctaacgataggagtgttcaagttgtttttcctagatcagagactcacaagggcctcattcaggtaa

SEQ ID NO: 12287 - DNA, 122 bp, Homo sapiens
gagagccaaaacgagcgtcttaaaatagagagccaggcagaggagcgcgagacaccagagcgggaggcagcgactgagagccgccgggcactaggcgcgcaggtcggcgccggagtggcacg

SEQ ID NO: 12288 - DNA, 122 bp, Homo sapiens
cggagccgccccgcacccgccagggagagggagctctgcctgaccaccggctacgcaggacgccgaggcatgtggaaaacgtttttttaaacttcatttttggctattccaaaaaagcatat

SEQ ID NO: 12289 - DNA, 122 bp, Homo sapiens
ggtgacggagagagggggccgaaccctgctctgacacttccagcctcgcctctgtctccccggctctcacgaggaacccctacccccaagcaagcatgctggagcggctagagaaaggctag

SEQ ID NO: 12290 - DNA, 122 bp, Homo sapiens
aaggacggcaagagcagcggagacaaagcagcgaggcgaggtagctacaggccacagcggcgaacgcgcacggcgggggagagcgcgggccgccagcgaggcggggaaagctcggaccgcgg

SEQ ID NO: 12291 - DNA, 122 bp, Homo sapiens
agcagggcggaggctgctcctggtcttgtcaggtgagggttcacccctgtgcagcctccccgccatgcgggggagggccttcgccaaggccaccacactgcaggaggaggacagggagcatt

SEQ ID NO: 12292 - DNA, 122 bp, Homo sapiens
ggggggcgcgggcaggcccggaggcaggccccggggcacgcagtgggcccagcttgctggcgtgcaccttcatgtggttcttaaggaaccagggctccttgaagcagcggccgcacaccgga

SEQ ID NO: 12293 - DNA, 122 bp, Homo sapiens
taactgggctcatgtattttaccgggcaaccctaccccccggtcacagtgagactacacacggggtcttttggtcattttgcaagtgtaaaagactaacgggaacaccggcatttttcaaag

SEQ ID NO: 12294 - DNA, 122 bp, Homo sapiens
tcttcccgaaccccctgcccggtccgcacgccagtcccgagcataccagcagcgaggagacgaggactagcagcagacatctcgccagcagcagcatctcgcccatggaactgatgacttcc

SEQ ID NO: 12295 - DNA, 122 bp, Homo sapiens
cccacaggtgcctgtcatgcggctcctgcctgtttaatcctgtctcagtgttggcttccccgaggacctgggctgatgcagggatgtagagttgtcaggcctgagaggcaggggctcatctg

SEQ ID NO: 12296 - DNA, 122 bp, Homo sapiens
catgtcctgtctacacaagtgggtggcgatggacagctcagctgcaaggcggtggagtgccgttaggcaagccccagtgcagggcccgcacgtggaagcccagctgccttctgagtgcttgc

SEQ ID NO: 12297 - DNA, 122 bp, Homo sapiens
tcctggtctttctcagcccaaggtaatttttcaattaactcaattggctggaaaccggggcgccctggagtgtgggaaaacgtcccaggccggaagggccctcccctctgcccccactcatt

SEQ ID NO: 12298 - DNA, 122 bp, Homo sapiens
cacggcaggctcgcaggccgccccccccccccccccccaacccagggaccactcaggcgccggccgctggcgctgcctgctcttcgactgggcgagcttcctgccaatcagggcggaaccag

SEQ ID NO: 12299 - DNA, 122 bp, Homo sapiens
gcctcaggttagggaacgtccagtgcccaaaagctgccctgtgggaatcccattgtccaccgcctcttacctaatgtttcgttctggccttgccccatctcttcctgaggctgggttgttac

SEQ ID NO: 12300 - DNA, 122 bp, Homo sapiens
ggtcgcggcggaaggatgcgtctgtgctgcgtccccatagagacgaagtctataaagggccggcgggcggccacggcagccatttctactttgcccgcccacagatgtagttttctctgcgc

SEQ ID NO: 12301 - DNA, 122 bp, Homo sapiens
tttttaatgtaaaacaccagttcctcaatctttcattatttagtgctacagggctcaaaccgcttctgattacaagtacaaacaataataattgcaaaatgcccgaaaattttcaagaaaaa

SEQ ID NO: 12302 - DNA, 122 bp, Homo sapiens
atgaggatgttttttctcagacttctctacatacatgccccctctcttagtcttgaggagcggggaagatcgcaggccgacccctccaccaagcaccatttcctcaaatctagttcaggtta

SEQ ID NO: 12303 - DNA, 122 bp, Homo sapiens
gcaaaaagataaattttaaaattcgcgagagttgcttccactctcgtgagacctcctgcgcgttaagcctcacccgcgaaggctctccacgcaggaagaagatcaaggagtcacggataaag

SEQ ID NO: 12304 - DNA, 122 bp, Homo sapiens
tcaagtgtgctggaaagtgcggcattggaaaggctgatgtgataaaggagataacatgggcgaagctcctgacacatgcctgaaacctagtgtgggttcaacaagcatgaattctctctcac

SEQ ID NO: 12305 - DNA, 122 bp, Homo sapiens
aagaaagtgaaactaaaaacaagtatcagaccaaaagatcaacacagcacagacagccgccgtgccagcttccctgttttgcactgccaaaacagctccctcctgacctgcagctccgcaga

SEQ ID NO: 12306 - DNA, 122 bp, Homo sapiens
ccgactctttactatgcgtgtcaactgccatcaacttccttgcttgctggggactggggccgcgagggcatacccccgaggggtacggggctagggctaggcaggctgtgcggttgggcggg

SEQ ID NO: 12307 - DNA, 122 bp, Homo sapiens
ggtcaggaagaattctgccaagtatctttactgtcattctgaccatagcctctttgttcccgcattcgaacttttggttcttactttgctgctcgtttagtccctggggatttcagatctta

SEQ ID NO: 12308 - DNA, 122 bp, Homo sapiens
attatggtcctgagttgcagcctcctagatagtgtctgtctgcttactgtttgtgtgcttcgctggggaaaagggtggtacgcagtctccatttgtacatacgttatcagaggagagacaat

SEQ ID NO: 12309 - DNA, 122 bp, Homo sapiens
tcaccacggcttttctcagaggttttaacgcccctagacttcatttcccgacagggactgcgggtctggatattccgtcgtggactacgtttcccactgacgacggagaaaacttggtcctt

SEQ ID NO: 12310 - DNA, 122 bp, Homo sapiens
gaaagaggagacgggatggagggtcgtcttgccctgtggacgtgccctaaccacagcctccggcctctcctagcttctctggacggccgccctggggaccgggtgaatctctcctgcggagg

SEQ ID NO: 12311 - DNA, 122 bp, Homo sapiens
ctcgtgggcgcccgcattggtgctgacataatttcctgacctctgacccgtattgtctcgcgattaaaggtaaaaaacggggctttttcatcccactggggtaaaacgcccttttatttcta

SEQ ID NO: 12312 - DNA, 122 bp, Homo sapiens
ctgggccccggaagctcctttaacatggaatacgtgcctcctgcctcttcctctagagtccgtcgccggatgagtttttaattattggggtagggccccaagggtgggatgaaatgttgctt

SEQ ID NO: 12313 - DNA, 122 bp, Homo sapiens
ccgatgacctacatctcagggacgcagtaggatgttcattgataaacaaataaagcggctcgaagaaatattgtgcagagacatgattgaggtgtacaatcattaggatattgaattagttc

SEQ ID NO: 12314 - DNA, 122 bp, Homo sapiens
taccaggtatgaagctctctaggtgccatcttgagtgagggcacgctctccttagaggggcggaacagtttttggcaccttatcgcgagcggcagcttatgcaagagtgatttaaaaaagaa

SEQ ID NO: 12315 - DNA, 122 bp, Homo sapiens
agaaggcggtttggtgggaggtgccctgaagacgggagctaattggtctgggtggtggaccgtcccggggggattggtccgagccagaggccggcgcggcgttgggcgcggctggggagctg

SEQ ID NO: 12316 - DNA, 122 bp, Homo sapiens
ggccggctgggggactggggcgctgcctcgccatggtgcacaggctgagctcaaggcccccgggctgcacctgctgtgggcacctgctctaaacatggtgaacagtgtgggcctggggcgtg

SEQ ID NO: 12317 - DNA, 122 bp, Homo sapiens
agtctcagatgccaaccctgccccagggtttcctatcaagatgctgaattcaactctagtcggcactccacactgtgggccccctgggtgccaggtcctgagcgtgactctccagagtggat

SEQ ID NO: 12318 - DNA, 122 bp, Homo sapiens
cactgcgagccgctttgttacaagtgtatccaatgtccccagaacgagggacttgtggggcgcggctcatcccagcgccacttgctctgcagctcccagaggtggtggttgtgttacgaagg

SEQ ID NO: 12319 - DNA, 122 bp, Homo sapiens
cacagtgccccagaggatcccgaagatcgtccagaacaactccatgaagtaaccctgctgcgctttaggtgtgaagataacacagaagagctcccgggcgcagcactgtgcgacaggcaaca

SEQ ID NO: 12320 - DNA, 122 bp, Homo sapiens
tatccactcttaaggcttcaattaatatctctatgaagatgaccccatgagctctcttgtcgcattcagaaacagcatttcaaactcaattaaaccaaaatagacacttgctatcttagtct

SEQ ID NO: 12321 - DNA, 122 bp, Homo sapiens
ctctcggcgggttgcggggatgtggggacccggcgcgggacctagatcagtagggcgagccggaggaggtcagacactagagccgtgtgccctccttccctcccgtgcgctttgctctgcgg

SEQ ID NO: 12322 - DNA, 122 bp, Homo sapiens
tccccatgtacccgctccctgcaggctgagctggggacactgcactatttatgtggtcaccggggcaacagggagctcgtctggagccttgggacgctatcggtggcagctgaggacaatga

SEQ ID NO: 12323 - DNA, 122 bp, Homo sapiens
ggaaactgcgcgcaagcgcacaacagcgatttcacactgcctctttagactcctgatccgcgggaaaattccacttgtccgtgttttctccaagctctccgtaggtgcaagtcacctgttgc

SEQ ID NO: 12324 - DNA, 122 bp, Homo sapiens
acaactgagggcccaacatgccttgaagctgtgccttccatgatctcagcattctgtgtgcgcttatctataaaaaagagagaatccttatcctataaggttgtgatatgggtcagtgaagt

SEQ ID NO: 12325 - DNA, 122 bp, Homo sapiens
ggcaccgcctcctcctcctcaaagttaatccctaaatttcacaatgtgttgttctgtgggcgcagagagaagttcttcattggtggtggtggtgagatcatttcaacacccgaagatgagac

SEQ ID NO: 12326 - DNA, 122 bp, Homo sapiens
tcagtttagcttctgctgctaaacagtccacccttgggagagagactgaaaagggtggggcgagggcccatctcacttgagaaagtgcaagcctgacagctgaagggtcccagagcagcaaa

SEQ ID NO: 12327 - DNA, 122 bp, Homo sapiens
gggcgggggggggcatgaagccgctggagaaatttctgaagaagcagacgtcgcagctggcgggccgaacggtggcgggaggtcccggcgggggtctggggagctgcggtgggcctggaggg

SEQ ID NO: 12328 - DNA, 122 bp, Homo sapiens
ccccacgcaacactccaagatcacaagaatctatgtgaaacagctattaagaacaatacccgcttgcattctcaggctaaatgtgagaaaccaattttagtcacttgcttcagcaaagctat

SEQ ID NO: 12329 - DNA, 122 bp, Homo sapiens
ccggccacgaataccacttcagggtggtggccaagaatgagctgggggccagcaaaccctcggacaccagccagccctggtgcatcccccggcagcgcggtaagcagcccctgagagggagg

SEQ ID NO: 12330 - DNA, 122 bp, Homo sapiens
tgcatgcctaacttctctggggagcagtctgccctcattagggccacatgggcgccatctcggtcactctaacacgcccggggtttccccatctctgggtctttgtacttgctgtttccact

SEQ ID NO: 12331 - DNA, 122 bp, Homo sapiens
tcgcgatggaggagggctccgatccccacgtggccggggttggaggggtgcggaagcggccggccccgcccccaggccacgtgcgcgacccttcccccctcttctcccggcctggggccctg

SEQ ID NO: 12332 - DNA, 122 bp, Homo sapiens
ggatcatctgagtttgggaggttctggcagcagtgagccctgcaaatcagcctggttgaccgaatgagaccctattgaaatacaaatgaggcctggcgcgttggctcatgcctgtaatccca

SEQ ID NO: 12333 - DNA, 122 bp, Homo sapiens
gtgaggggatcgcccgggcacttgccgccctctccagtgggaacactgggccgaatctcccgactggcagcctggctcctcaagcttgccagtgggatatcaagaagggagggtttcagtcc

SEQ ID NO: 12334 - DNA, 122 bp, Homo sapiens
catgcagggctcggcctcccctgcaccacccaggacccccgctgtcctgcaagccccagccgctctgggccaggacccagggagtggaaggcattttccaagggcacagtggctccctgacg

SEQ ID NO: 12335 - DNA, 122 bp, Homo sapiens
gtctaacaccatattcaattctgagaagccactgtgctgtccctcccatctctgctcttgcgcatctggacttcctctgcctggaacgcagttcctctccttcaccacgcagcatcagtctt

SEQ ID NO: 12336 - DNA, 122 bp, Homo sapiens
ctgagtacaacccgactgaccctcatataaaaaacttgacactaacagcttgggcacacccgtgaagattcagggatggggacttcaaatggaaaggtggtcgtttaatcattctgcatttc

SEQ ID NO: 12337 - DNA, 122 bp, Homo sapiens
gtgctaaaatctctactggcccagcctgcaggagctgactcaaagggaaggccaggtcaccgtcaggaaatgtggtttttgtgtggaaacgtcaccatctggtggtttctagtgaaacagct

SEQ ID NO: 12338 - DNA, 122 bp, Homo sapiens
aatagaatacaaaccctctttttgtccggtgctaacagagtccagcagtcagaactccctcgcgtctcacgctggacctgacccggggcgccgccaagtgcgcaacgcacagtcacagttgg

SEQ ID NO: 12339 - DNA, 122 bp, Homo sapiens
cctcggaccggtgcctggtaccttcaagctgggcaagtacctgtcagaccgcagggagcccgggcctaagaaaaaggtattgaccattcagacctctgcccactgccattcgcctctcagtg

SEQ ID NO: 12340 - DNA, 122 bp, Homo sapiens
tgtgaaagaattaaaggaatgtaatgaacactaaaacccaagaacctgctggaaagttcccgtggttaggtacatgagaaatgagagataagcctgcaacccacagtgaaggcatctcctac

SEQ ID NO: 12341 - DNA, 122 bp, Homo sapiens
tttgagatgagatttgggtggggacacagagccacaccacatcacaaggtttagtagttacgtaaatttaagccagcgtttccagcaaggtttcagcataagtagctagcatgatacagatg

SEQ ID NO: 12342 - DNA, 122 bp, Homo sapiens
gggtgaagggatttggagactcaggtcatgcatgaccttgccccacctgtggcttcaatgcgatgtggctttgagtacaaagtgaaaaggctgacctgaaccaccggttcccaaagcgggtt

SEQ ID NO: 12343 - DNA, 122 bp, Homo sapiens
aagacacgtccctccctgggcgcaatttacgtccgtaaaatggggtaataacctctgctccgccttccctgtagtggttcctacactatagctcaaagaacgaaacaagtagagtgctttac

SEQ ID NO: 12344 - DNA, 122 bp, Homo sapiens
tggcacccggtgtcccgggagggagaatcggggtctgtcgcgggccctgcgaccaggaggcgactgtgccctcagcagctgccccgcgcccgccccgccctcaggccactagaggcaacctc

SEQ ID NO: 12345 - DNA, 122 bp, Homo sapiens
tctcccgcgtccgccattttgttgctgtggctattgggaacaagctgggcaaaagcaccccggaggcgcgacgctccttcgagttcggtgcctcgtgtgacggcgggggtcggtgaagaccc

SEQ ID NO: 12346 - DNA, 122 bp, Homo sapiens
gggtcagtgtgattcagctacgggaaaggcgatcgcagcgacgcgggaagcagagatcggcgactgctcaagaggcctcaggggacagggtgactcgccactgtgccctaccatacagtgcg

SEQ ID NO: 12347 - DNA, 122 bp, Homo sapiens
gacttggggcctttcctttgtctaacgggcaatatccttacatccgggacctgggggtgccgagcccgtgaacttcccttgcggcctgtggttggagacaaatagctgtgctggctccgttg

SEQ ID NO: 12348 - DNA, 122 bp, Homo sapiens
atcccctttccgcaaccgctagggtctctgtgcgggccctagaggaacgctcactcatcgcgcagctcaccagggaccccagcttggcagaaaccaggggctctctgcgggttctctcaaat

SEQ ID NO: 12349 - DNA, 122 bp, Homo sapiens
ctacaaatgacggcagccgggtgtgcttaaggctcagcagactcacagggacgtgcggaccgtggggcagagggaggctcggcagctcctctggtcatcacagagcttggacgtctggtctg

SEQ ID NO: 12350 - DNA, 122 bp, Homo sapiens
gtctgtcctcttaggcttctggtggcttgcaggtgcagccctccaatcctcctccccaagcggccttctgcctataaggacacgagtcatactggatgaggggcccactaattgatggcttc

SEQ ID NO: 12351 - DNA, 122 bp, Homo sapiens
agaaagcagcaggaagggagaccagatttgcctggacgacctctccaacagacttgcgctcggttgaaacttcctcactggtctgtgcacaccatggaatgttattctgctttaggaaggaa

SEQ ID NO: 12352 - DNA, 122 bp, Homo sapiens
ctcctggcctcagcttgcctggtgaggccacagcttacagtggggcaatgtctacatccacggggatccacagggctgggagctggagacaggtatgaggtccactgctgctcagagtccac

SEQ ID NO: 12353 - DNA, 122 bp, Homo sapiens
aattggccagaggagacaggggctgcgtctggggggagttgcgagggagggctacgcggccgcctcttcggaggaggaaacccgggccgggcgcgggcgcgggcgcggacgcgaggatcgca

SEQ ID NO: 12354 - DNA, 122 bp, Homo sapiens
cgcccctgtgaaattatccgtaacatccagagggtgaggggatgatattactccccatatcgcaggaagtgtaaaaccccgtgtgatattgtccataacatccggggggaagaggatgacat

SEQ ID NO: 12355 - DNA, 122 bp, Homo sapiens
tgcccaccaggggcattaggtatccgccggagcctggccatagggtagtctcgggagccgcgctgagatcttttgccacctgcattttagaagaacatggtctctgtctcctcggcccagcc

SEQ ID NO: 12356 - DNA, 122 bp, Homo sapiens
aatgggaatgtttgacccttttttaggtatccatttaggtaccctatccagaagcaaatacgttgttgatattgtaatgatcttttgtgtaaacttcaaaggacaaagaatattgaaggcta

SEQ ID NO: 12357 - DNA, 122 bp, Homo sapiens
cttagtactttgctatatggttgaccgatttattctgtatgtagatttcttctttcatctcgcttgatttaaaatcccactctaggtctcttacaataattctatttccttgcttgatttac

SEQ ID NO: 12358 - DNA, 122 bp, Homo sapiens
cttaaccagggttggccttagtcacctcgtctaaaaatgtcagtattagcaacctaaacccgaatcgttttaccggcataaactaaattgtctctagtggctcttccgggtcaaagatccac

SEQ ID NO: 12359 - DNA, 122 bp, Homo sapiens
tctgagctgtcctttcgctggccccgctgtccgcaggggcttcctacctgtgtgagaggtcgtagcgggagacagcaacagagagtaggcggctgggccacgtccttcacagggcgtcatgt

SEQ ID NO: 12360 - DNA, 122 bp, Homo sapiens
tatcctgctgcaagaaacgtgctgtggggacacgaaggatccggtcacaggggcggcctccggggaagatactgacagagacgccgccatccggggctccctgggcggggtgcgggcactgg

SEQ ID NO: 12361 - DNA, 122 bp, Homo sapiens
ttcagaaaacaatcagcttccaaccctgaaatgtttggagcattatcacaaattctctggcgatcaaaaactaggacatattatttttattgttttgaaaatcatcacaactgaacttttac

SEQ ID NO: 12362 - DNA, 122 bp, Homo sapiens
ttcctgaccacacaaggtcacaccttctcagaagttgcggggaggctcacacatcactaccgcgccgggcacacagcaggcgccggctccagccctcctgctcccgcccgcggagcctccag

SEQ ID NO: 12363 - DNA, 122 bp, Homo sapiens
cagctcgggccccttccgatgggtctgctggctcaggtgcgggcgatggccggggagccgcgccccgcacgtgactcagcactttccccagagcccggactgcggagaacaatatcctcctc

SEQ ID NO: 12364 - DNA, 122 bp, Homo sapiens
gctcccaccgggttctgggatgggcatcattccccagaagcagcggcctccgtgagtccacgcaagccgccacggtggcttcgcttgccagtcagaaagaaagaaattgcgggaagggtcag

SEQ ID NO: 12365 - DNA, 122 bp, Homo sapiens
gtgccgagaggccgtgggggtgaaaggccgggattcgtggagccgggcattcgagcccatcgcgctagggcagacacgggcccgcagccgggatcccgggccgatcggccaaccgtgccagg

SEQ ID NO: 12366 - DNA, 122 bp, Homo sapiens
tgtctcagaaccagtcctttagttcctgactctgtgtggatgagaggctcctccagaggtcgctgttccccaggaatccattactagcgtccgcaccgcgaggccagagctcccactgttcc

SEQ ID NO: 12367 - DNA, 122 bp, Homo sapiens
taacaagaacaggatgacagtcaagtcagtagctttttaataaaatgagcagaatcccatcgtaacagttctttgttacatgaattcaaatacacagcagaccaatcatgttccctgaaatt

SEQ ID NO: 12368 - DNA, 122 bp, Homo sapiens
ctggccctggcactacagagccaaggaacagcccatggggaagcccctgttgccacaagccgtgttgtcaaaccatttcccccggaacaaacaaggcctgaggacgcccgagaaccctgcag

SEQ ID NO: 12369 - DNA, 122 bp, Homo sapiens
cgcgcgacctccacgcacacttagagccgaggtgacaagggaaggcggcgggggtggagccgctctctggtggagcatgatcaatcactttaaagggttcaaaagttccaagttcccctttg

SEQ ID NO: 12370 - DNA, 122 bp, Homo sapiens
cccacggtggtgctcagcggaacgtcccaaggacagaaggcggtggtgctgattcacttccgaggcacaatcagaaacccaggtcctgcctggactctgaggcccccaaggcctgggctggt

SEQ ID NO: 12371 - DNA, 122 bp, Homo sapiens
ttgaggagaggaaagacctgagaactcggtgcggggaggctgctccctttgcgggggagccgttccccgttcccccagtgagcttccccagccggagggtctgggacggacggaggaggctg

SEQ ID NO: 12372 - DNA, 122 bp, Homo sapiens
agactggtggcagggacgtagacccttagctggccggtgaccccatgtcccaaaatagcacgaacaggattgtcgcctgcaaatggagaagactgcgcattaggattgactcttcatactcc

SEQ ID NO: 12373 - DNA, 122 bp, Homo sapiens
atccgcagtcaccgccacgtcggactccgtgggggcttccctgaccacgtggcacctgtccgttctcctctggaagctgttcagtccagcccaggctgtgtctcagccatccccagtccgga

SEQ ID NO: 12374 - DNA, 122 bp, Homo sapiens
ggagccaagggttgctgaaccttctgccctcttggcagtggtgagcttgtggggcctgggcgggctcacttcacttcctcccctccctcattgtgctctccaccggcaccccttggggcttc

SEQ ID NO: 12375 - DNA, 122 bp, Homo sapiens
tcctgcaaatgctcgtgcgtgtgcatttgcacgtggactcggtcaggcgtgtgcagacagcgcctgcaggtctgggtgggtgctgatctgagtgtctgcgcctgggccatgtttttgagcct

SEQ ID NO: 12376 - DNA, 122 bp, Homo sapiens
gctggctgcacctggtaagcgacggtcaggtcaggaggtgaacaaagaggatggccaggccgatgttcagcaggatcaccatgcagatgaggatggtgttggggacctgggagcagtggaga

SEQ ID NO: 12377 - DNA, 122 bp, Homo sapiens
ttcggagatgagcactttgcagaaaccagttattacttcgagggcggcctgcgtaaggtgcggccctattactttgacttccggacctactgcaaaggtcgctgggtgggccacagcttgct

SEQ ID NO: 12378 - DNA, 122 bp, Homo sapiens
catgtacacatgtgcttgtgcgcgcacgtgtgggagtgcgcgtgtacgcgcacctgtgagcgctcggcgcaggcccgcgacacgcccgagcccctcccgccgcgccccgctctcgcccacct

SEQ ID NO: 12379 - DNA, 122 bp, Homo sapiens
cggggagagaaggtatggagggaggcggtgccccgcgctgccccaccccggcgcgcggctcgaacctctgggcggcctgcgaccccggggacccagctggcttccaatacccgggaagccag

SEQ ID NO: 12380 - DNA, 122 bp, Homo sapiens
acaagacacaaggtaagcattcaagaattgtaaccatgcaatattcttatttcttacagtcgcctacaacagtcctggtgtttagtaaacggtctgacacacacacccatcaggggctgcgg

SEQ ID NO: 12381 - DNA, 122 bp, Homo sapiens
acaagcctgacggctggagcagcaccacgtgcatttccttaaagaacggaggtgcagatccgggcagggcgagctcagggttggttagttcaggagctctgcgcgtctcaggcagccaggac

SEQ ID NO: 12382 - DNA, 122 bp, Homo sapiens
gctgggtgggggcagcagggctgggacgggcctccctgggccctggaagcagaactgatccggctgcccctcggcctgtcagcgacacgtccagcccgagtccagggcgcaagctccctgct

SEQ ID NO: 12383 - DNA, 122 bp, Homo sapiens
gtcttcacctgagcccgcgggggaaccccccccccacccccggggaaccccccccacccccgccgccccccgcctgcaagttgttaccagtaaataaaagggatcctattttagcaagccac

SEQ ID NO: 12384 - DNA, 122 bp, Homo sapiens
caagaaggatggtgtcctggtgcggggagctttggggggcgccttctcacggtgccaacccgccagccccgccctttgccatctctgaaagcgctacccagaaaacctcctagcccagcgcc

SEQ ID NO: 12385 - DNA, 122 bp, Homo sapiens
acgcgcagggcctgcggccgagtcggggacccacccctgccttccgcgctcacgggagcgcgtcctgaccggcctctgccgatcaggtcttggtccgcaccccaggctaggtcctgccggaa

SEQ ID NO: 12386 - DNA, 122 bp, Homo sapiens
accgaactttgcaaatgcaattttaaaaatccctccccctattgcaaaatttgcagagttcgatggaaagcaatgcagaaggatggggggtggcgggagagaggtgaagggtagggtttgct

SEQ ID NO: 12387 - DNA, 122 bp, Homo sapiens
tctccaatgagatgtaagtgatagctatcagttctaagcaggcacctctctccttctctccgtttggcaactgtgcatcaaagggcattctcagtagggatggggatctctacctgggggac

SEQ ID NO: 12388 - DNA, 122 bp, Homo sapiens
gcctgggtaacagacagaggtgtgagatgtcttgagtcacatttctagctcctccccgctcggatttcagccacagcagcagtgacagttctgtgcaagctcagatttatgctgcctatatc

SEQ ID NO: 12389 - DNA, 122 bp, Homo sapiens
cttcccctcgtctcgctctccttggcagttcggacttcgggtcagtcccacactcgcgcccggctgtccctgctgcgctcctgtcactggcattgggaagccctccggccccctctctgcac

SEQ ID NO: 12390 - DNA, 122 bp, Homo sapiens
tagactggggagcaccgggggccaagatttgggagctgcggccagacggggcggggatggcggccgactggagacgaggggctgtcgggttcccggggacggggcagagcgggggtctgcgt

SEQ ID NO: 12391 - DNA, 122 bp, Homo sapiens
acccatgattaactaaaccttttatttaaagagccattgcttcttcaagccagtagttctcgatctcttaattatgagtaaccctttttaatgttaagaagtttctcggatacccaacaata

SEQ ID NO: 12392 - DNA, 122 bp, Homo sapiens
caggtagttctgcctcttgattggctccttcaaacttcagtccttacttgccccagtaaacgccttacgtactctctacccctgactcttattggttcactgacccgctcgtctccttcctt

SEQ ID NO: 12393 - DNA, 122 bp, Homo sapiens
tgcccatagagaacgctggagccctggctttgttcacggtgacctgctctgggcagtgggcgccagggccgggggtctcctccaggggtcgcggggcccggggccgccccagcatggtgaag

SEQ ID NO: 12394 - DNA, 122 bp, Homo sapiens
tgcccgccagtcctcaggcccatcctgtctctgtccacagtgccctcagccagcatgacccgcctggcacgctcccgcactgcatccctcaccagtgccagctcggtggatggcagccgccc

SEQ ID NO: 12395 - DNA, 122 bp, Homo sapiens
aagtaactgctgcccttcctgccacccccctgtggttaaaccttaggctctgcatctgggcggagctttcacagaactcctcccagtgccgtccccactctgggtcacttcactagagtacc

SEQ ID NO: 12396 - DNA, 122 bp, Homo sapiens
aggcgtgagccaccgcacccggcccagtatcttacatttttatataggaggcagaagtaacggagtgagactaatgctgtatttgttaataacagtcactggtgttagtcagaagaaagaaa

SEQ ID NO: 12397 - DNA, 122 bp, Homo sapiens
cctcctctctacccaacctgccacaggggcagtgaccagtgggacatccaagatgcctctcgtagcctctgagcccagacaccagcagcccaggctcctaggcactttggtctccattatcc

SEQ ID NO: 12398 - DNA, 122 bp, Homo sapiens
ggccctaggagaccccttctggccacaaaatcgagtatgacagaaaagggccagcgggggcgctttccttccagggccacttgccggaatgtaagagggacggagagacgtccggaaaaggc

SEQ ID NO: 12399 - DNA, 122 bp, Homo sapiens
tcgagtctctagggggcagcaacttggggagaagcaaacaactggcagaggaaggctgctcggtgaggcttgcccatgtgggttcctccagtaccatctccaggctgacagggtttgaaatt

SEQ ID NO: 12400 - DNA, 122 bp, Homo sapiens
gtttataggcgtgagccaccgcgcccggccaaaaaataagtttctaaattacccattatacgaaaaaagatgtgttttagtacaacaagcaggtaagagactcttaggaaaggaaactgacc

SEQ ID NO: 12401 - DNA, 122 bp, Homo sapiens
cgccgcgccccaccccggtaccccggcctttaagccccgcctacactcccagccccgtcccgccgtcccaggccctgagccccgcccacaatccgagccccggacacacgtcccccggccca

SEQ ID NO: 12402 - DNA, 122 bp, Homo sapiens
tggagggggtgggcctaggatgcggaggcggcagctcgcgtgggggcgtgaccatgctggcgggggcggggccggaggcgggcggtttagagagcggggcggtctgcggggtgggggcgggg

SEQ ID NO: 12403 - DNA, 122 bp, Homo sapiens
agctacgaggatttcaacatggagttcctgggcccctgcggactgcggctggtgggcgcccgcccattgctgccctactggctgctggtgttcctggctgccctcaatgccctgctgcagtg

SEQ ID NO: 12404 - DNA, 122 bp, Homo sapiens
accgctgcccgccttgctgttcaccagtccctgggcatcccgcatctggttgctgaggaacgcctgacgccgccttgtggatgaagccgcagagcagggagctgaggctgcggcccaggccc

SEQ ID NO: 12405 - DNA, 122 bp, Homo sapiens
gcccgggctcgtggctggaagtgcagaaccccgctggggggctccagagctcgctgcactcgggcgccccccaggcctcgctgcactcgcagctgggcacctacaaccccgacttcagctcg

SEQ ID NO: 12406 - DNA, 122 bp, Homo sapiens
gagcgagcggagctgagctcgggtaggccgcgcgaggtccctcctctccgggcgtccgtgcgcctagctctgcgctgggagcctcgcgccctttgacagcagttagttgctgactcggatgc

SEQ ID NO: 12407 - DNA, 122 bp, Homo sapiens
cccagttgactcccggcaacacctcccgccgccacaaggagacgcccgaggacttccctccgacaaagccaaaaacggtattgccacgtgacccgctccgcatacacgtgaccagcttcgca

SEQ ID NO: 12408 - DNA, 122 bp, Homo sapiens
aagagatgcggagataaattttgcgagccagaccccgacactttccccgtccgtttgcaccgtctccggaacaactggcggccagcagcactctccaccccggccgcaaccccagcgggtca

SEQ ID NO: 12409 - DNA, 122 bp, Homo sapiens
agctcaagtgagccacctgctttggcctccataagtgctgggattacaggtgtgagtcaccgcaccccgactgatttatgctttttaaacatcactctggcagctgtgtggagcctggacat

SEQ ID NO: 12410 - DNA, 122 bp, Homo sapiens
agccacgttgagtaaatgcatgtgcacggtcaggtcagaccccgggatcgggtgaaactccgttcacatttgcatacaggcggagtctcacaatgaaagcccatctgttcccgtctcggagt

SEQ ID NO: 12411 - DNA, 122 bp, Homo sapiens
aatcttgcctctcacctggctttgttggttgcctttctgtatagttttatgttttgctttcgtcttctgcattgattttaaaaattctatttgttcttcctctgccttttttgaggcagggt

SEQ ID NO: 12412 - DNA, 122 bp, Homo sapiens
taaattcccatgcaaattacccagtaaagaacaaatttaaaagctggtcacatcctgaaacgtcattatttattgaactgattaaattttgcacacgttccaggaagtgtttagatgcttta

SEQ ID NO: 12413 - DNA, 122 bp, Homo sapiens
ctgtctgcccgactgcccgccgggagcccctgcgtgtgtggagatggcaatgtgctttcccgggggctcagagctgctcctgctccccggcgacgggcttttccaggctgcggcatagggag

SEQ ID NO: 12414 - DNA, 122 bp, Homo sapiens
aaaacatgccccagctttcccaagataaccaagagtgcctccagaaacatttctccaggccgtctatatggacacagtttctgcccctgttcagggctcagagatataatacagacattcac

SEQ ID NO: 12415 - DNA, 122 bp, Homo sapiens
cagactaaatttgtataagtcaggcaggggacctagtcagggtcttgggagctaccttgtcgttgggaccagagcaaaatagtggagggcaggctagggaaatgtgggcacatcccccctcc

SEQ ID NO: 12416 - DNA, 122 bp, Homo sapiens
gcgttggagacagctgagaggcggttgataaaatctaattgccccatcgatccagcagagcggagggagccccacaatgattgagatattctgagccagcaggccctcccctgtgccttcac

SEQ ID NO: 12417 - DNA, 122 bp, Homo sapiens
ggatgatttttaaagagatttgacatggggtgtgccgggacatgagcacacgtcatggcacgcacctgtgcattcacagtggtcgagaagcgctactgtggattattttaagcccagatata

SEQ ID NO: 12418 - DNA, 122 bp, Homo sapiens
ctggtagctgggcgactggctgatgggcgagggagggcgagggagggcgccgcaacggaacgaggaacccggacagtgaaggaggaagaaacaaaggagccagcagcactagagagttccct

SEQ ID NO: 12419 - DNA, 122 bp, Homo sapiens
cactgccatcttggatcagggtaattcccgcctcttgggcgctcccggttacaacctcggcgccatcttggattagttcaatgtagccaccctctccaggcccgctgcttctgccagctgga

SEQ ID NO: 12420 - DNA, 122 bp, Homo sapiens
atgcaagactctcattcctgttctcacacagagctgtgtaacagagaaccttctctgcttcgagcacggcaggtgcccaagccttctgccctgctccccctctctaatccttgctatctggg

SEQ ID NO: 12421 - DNA, 122 bp, Homo sapiens
cgggctgcggcccagggggcgaggcgtgctcgggtctattccgggagcggctctgaggggcgggcgcgggcgcgggcggggcgggggctgccggcgagcatcctgtctgggggaggggaccg

SEQ ID NO: 12422 - DNA, 122 bp, Homo sapiens
gggtcagggatgtgcctgaggtcacatagtgggtctgtggcaggactcccattcccccaccgcctagccaggctgtccacctcctctcctgttcactcggccgaccgtgagctcatacctgc

SEQ ID NO: 12423 - DNA, 122 bp, Homo sapiens
tctcctctcccctccccacttctgcctcctgaccgacccagcgcttcctggggtggcctgcgtggcacgccgtacctcctgttctagaggcctgtgagtataaactttttcctccctgacaa

SEQ ID NO: 12424 - DNA, 122 bp, Homo sapiens
ctgtttaccgaccatatctgtcctcagaactgaatgaaagatccatgagaggggctggcacgtgacaagggtggcaaagaaaaacaacacaaatctgaacctagtctgagtcccagcattta

SEQ ID NO: 12425 - DNA, 122 bp, Homo sapiens
tgaagaatagaagtgtgtaacccagatgtccaggcctggtagatataattatgtggtccacgttgggtcatgatgttcccaaatatcaaacctcctaagacttccaacagactcacacttga

SEQ ID NO: 12426 - DNA, 122 bp, Homo sapiens
actggggaattccttttatggctcatttccgaaaccagcatggccagtacaggagtctgccgtttcccagttgcttagcaaccagctcctatgctctagtcactagaaaaagccgacagttt

SEQ ID NO: 12427 - DNA, 122 bp, Homo sapiens
gcgcgccttccacttcggctctggggagttagctcagccggcctgcccgggcctccgtctcgctcttacaagcgccgaaccctgtcgcccggggtcccgcccgaccactgcctccacccctc

SEQ ID NO: 12428 - DNA, 122 bp, Homo sapiens
cacaggcataccaaggaagcttattttgcctggcttccctttttaagcacggatgcataccggtgtgttggacatgactgatgaaccaagatttgaggaaggccacccactgagtgactgga

SEQ ID NO: 12429 - DNA, 122 bp, Homo sapiens
aatattaaatattttaaaaggacccagagctctgctatccctgaattctgctctaatattcggactttccctgtaattttctttcattcagacaccttttaaatacctagtaaagtgttttt

SEQ ID NO: 12430 - DNA, 122 bp, Homo sapiens
gagaaagggaagagaggctgagagtgagaaacataagaacacaaacatggtaagacacagcgggagtcagggcaaagcatgaaccgttaggtacagatggatgtaaaagaggaaattttcct

SEQ ID NO: 12431 - DNA, 122 bp, Homo sapiens
actactggcattgatgtaaataaagtttttctgcaacatagccagctcattcctttgagtcgatttaccacgagaacttatggaccacaaagcctaaaatatttactctccagccctttaag

SEQ ID NO: 12432 - DNA, 122 bp, Homo sapiens
aggatatcttctactgtggaaaactgtgggctacaaatcacaacccagagctggtctgcccgagcctagagaggatgctcaaggtcctccagctagattgtgtggatctttacatcactgaa

SEQ ID NO: 12433 - DNA, 122 bp, Homo sapiens
atgtggcccatggtaggatgaaggcctcctccaactcctgtgggatccaggctggactttcgccaattctcatgctgtcatcagggtcctctctaccagtttccaccagcccagctctgcct

SEQ ID NO: 12434 - DNA, 122 bp, Homo sapiens
ctcaggatgaggctggtgaaagtggtctttcattttccaaaccgccagtgtcaggatcttcgctgccatggtcttgtctttcagatgcgatggatgagcttggtccagggtggttggggatt

SEQ ID NO: 12435 - DNA, 122 bp, Homo sapiens
ggctctgggttcctggagggcctctccgggactcgaggaaaacgaccttttcccttgcagcggcgggagagggcgaagtggaggactgctgctcggttccgtatccaaaagagacccaaggc

SEQ ID NO: 12436 - DNA, 122 bp, Homo sapiens
ccaagtttaaataatctgaataactcagggaaaatctggagcagaaagcttactgaaatgcgaaaccttgtgctcagcttctgaagatgaactcattatatttcagctcaggtggacatgtt

SEQ ID NO: 12437 - DNA, 122 bp, Homo sapiens
ccggagggtcaggaaaggtgctccctgagaagggtcaaggaagggcaggagcccgactctcgttcagagacacctgggaaagacgctctcttcgtcagagtgggtcacctagggagaagccg

SEQ ID NO: 12438 - DNA, 122 bp, Homo sapiens
cttcggactttttcggaatggctcgggaaaccgagggtgggaagcctcttcggctctttccggagactgctaggggtcgggattcttcggagacgctcgggtgcgtcctcggccgccgttcg

SEQ ID NO: 12439 - DNA, 122 bp, Homo sapiens
ggctgagagccgagggcgatgcggccccaccaggccgggctcctggagctgcagaagagacgtcccgttccggggtcaggacaggaggaatgcgggggaggggccagcctgtcaaacactcc

SEQ ID NO: 12440 - DNA, 122 bp, Homo sapiens
gtggctgcaggaggtctccaacctgtcagagtggctgagtcccagccctgggccctgagccgggtccccttccgcaagcgcccaccgatccggaggctgcgggcagccgttatcccgtggtt

SEQ ID NO: 12441 - DNA, 122 bp, Homo sapiens
atctggtcctggggatggtggctcaggaccctcgagaaagcaggcggggagaaaactcagcgtggctaccattggggaccttgattagtaggtcataccgcagtgcccaccgcaagggtggc

SEQ ID NO: 12442 - DNA, 122 bp, Homo sapiens
agcctggactggaggagaaggaggaggcggggtgagtgggaggggcagagggagcagaggcgcctgcagcaaccgacacctgctccagccctgcctgtccactaccagtcaatccagagcct

SEQ ID NO: 12443 - DNA, 122 bp, Homo sapiens
atatggaaattggagtccaggtagacaggtgagtgtacaacctcttaagtgtggagccctcggaattcacaacactccccaaatcgcttcctgcgcaggcgcggagtcggaagggagtcgga

SEQ ID NO: 12444 - DNA, 122 bp, Homo sapiens
gcgtccggaagcataggggttggccgaggccgagggtcggcgttgacctgtcccctcttgcgcgcaggccgcggcccctccccgctcgcgggccctagcgcccggcagctcctggcgcggtt

SEQ ID NO: 12445 - DNA, 122 bp, Homo sapiens
ttcttacccagccccgccgcagctagccccaagtccatccgacagaatccaagccaatctcgtaatgtttacttccggcttttcgcctaattccggcggccactgcggtaacttccggatga

SEQ ID NO: 12446 - DNA, 122 bp, Homo sapiens
ttctcatagggagcatgcaacctatcctcacatgcgcagttcaaaataaggttcaagttccgatgagaatctgatgccaccgctgatctgacaggaggtggagctcaggcagtaatgcttgc

SEQ ID NO: 12447 - DNA, 122 bp, Homo sapiens
gtcaaagcctatcaaagcctctggtcatcactgtggacttgaggttgactaaaaatgcaccgcatagcttcctaatatgatagatgggaatgctgagctacaagggcttgcagtatctgagg

SEQ ID NO: 12448 - DNA, 122 bp, Homo sapiens
tccctcaggactgggcacctcgctgcccccgctgctgcccactctgcgactgtgcctgtacgtgccagctccccgactgccagagcctcaactgtctctgcttcgagatcaagctccgatga

SEQ ID NO: 12449 - DNA, 122 bp, Homo sapiens
ttgtagctccaggagagaatccttcttctcaactgaggaaaggagagaggagtataaagacgaccttgtgttgaaacttggatgccagctaagccacaatagaataggccaccaggcagagt

SEQ ID NO: 12450 - DNA, 122 bp, Homo sapiens
gaaatttcagttccaataatgttttcttcttcttttctagataagaaactatatgtatctcgtggatctgccagtaccagccttccaaatgaaagtaggtatctgggccagcctttgatggt

SEQ ID NO: 12451 - DNA, 122 bp, Homo sapiens
aggtggccgtgggctccctgcaggcccaggctccatttacggccagctgcctgctgtcctcgccctgctccggcatgctgtctttccacatccgttacccactgcgcgctcataatgctccc

SEQ ID NO: 12452 - DNA, 122 bp, Homo sapiens
tctgcacggcgctcttcccgttcttgccattcttgcctttgccgccacagctcctcgtcgcggcgctgcctgtcgcgctgttcaagtcgctcttgtttctcactttgctcctctccctcagc

SEQ ID NO: 12453 - DNA, 122 bp, Homo sapiens
tcattaccccatcttactgatgaggaagctgacgcacggaactggcccaagacccagggtcggctcaggccagccctaccgcggtgtggtggctgcccacgtggcgcccaggaagagaaaaa

SEQ ID NO: 12454 - DNA, 122 bp, Homo sapiens
tggacgcctggccacagctccaggactgcagggcccagcatcccccacccccggcccgtgcgaggctctcagattctgacgcgtgaccagcatgtggcctcctgcacccgaagtaacgtcct

SEQ ID NO: 12455 - DNA, 122 bp, Homo sapiens
cctcccctcttactcacacatcccctacacacggaaaaggaccactatccgtccagcctgcgctcgagggagaagtttataccttcgtcctagagatgccaaatgcagcagggaaggctgga

SEQ ID NO: 12456 - DNA, 122 bp, Homo sapiens
cctctgcgggagggcagctgccccagcaggcaggccccttacgtagctgctctgagtaaacgcggccagcgccccgtctcagcggggacactcccaccccggctgctcctgcaggcctggag

SEQ ID NO: 12457 - DNA, 122 bp, Homo sapiens
ggggctgaagctctgtatccacatcatctggtttgagagacagaacagccttgggtgaggcggttcctggtggcttggagcaacgcccaggcaataagatactgtgagccatccacctttga

SEQ ID NO: 12458 - DNA, 122 bp, Homo sapiens
ttttaaagcagcaatcatcatgttgttaatgaaagtgaattcaggaaatctgccaaaggccgactcattgttcactgattagtgagaccaaggacaatactgtaagcctcctgctaaagcca

SEQ ID NO: 12459 - DNA, 122 bp, Homo sapiens
cccggggcgcagggtggtgggagccaggcttcgagattaggccggcccaacggggcgtcccgactggagggagcagagctctcacagcagggagcggagcgccggctgcaggtgcccattgc

SEQ ID NO: 12460 - DNA, 122 bp, Homo sapiens
gttgccgccaaccgccctaacggccgaaacaatgttaatggctttcagagtctggcggcgcgttcccattatcatcttcctgtgacccttcctcattttacacggaggaggtggtctccaca

SEQ ID NO: 12461 - DNA, 122 bp, Homo sapiens
cgggagagggattttactgagcccacttatggagaacttgccacgtgccgaggaccgtgccggttcatcatcagttcctggagtcctcactgcacagcaggtacaagcggaggctgagagcc

SEQ ID NO: 12462 - DNA, 122 bp, Homo sapiens
cttgcggcgcggggcgcagtgcctaggccgcccgggtctcctgcgttgcggggagcgcagcgcaggctctcgcttgccatgagtcacctcttcgatccccggctgcctgccctggccgcctc

SEQ ID NO: 12463 - DNA, 122 bp, Homo sapiens
ccactggaaattcctgcaagagcaaaacaaaacgaagcctgagttcaacgtcggaaaagtcgaaggtaccctgcctcccaacgcacttgtgattcatcaatcaaaatacaagtgtgggatga

SEQ ID NO: 12464 - DNA, 122 bp, Homo sapiens
gcggggagccaggaggcacacggtcctgggctctggcagggctggagtgctcggcacggccgggagggtgggcttgtctcacggggctgccacagcaaagtgccacgaactgggtagctgac

SEQ ID NO: 12465 - DNA, 122 bp, Homo sapiens
gcggccacagcgcgctgggggcgtggagggggcgcggcggggtcggagcccggcgaggagcgtggccgggggcctctgggcgggcaagcggggaggaaacgcgcggcggccgcggcccgggc

SEQ ID NO: 12466 - DNA, 122 bp, Homo sapiens
cgcgggtatgaacagtatgcctacgatggcaaggattacctcgccctgaacgaggacctgcgctcctggaccgcagcggacactgcggctcagatctccaagcgcaagtgtgaggcggccaa

SEQ ID NO: 12467 - DNA, 122 bp, Homo sapiens
agggacaccccgaggtgtcggcagagatgggtcccagcttggagtggcagcaggcgctcccgtttgacaccccagttaccccttcgtgtggaatttctgcactgcctccagggacttgggga

SEQ ID NO: 12468 - DNA, 122 bp, Homo sapiens
taatgagtgatgagcatttactatgtattaacaacatgctacaaactgggatacaatgatcgagctattacagtgaataagactatagaacacaaaagaaaggttttaagggagtgtgtggt

SEQ ID NO: 12469 - DNA, 122 bp, Homo sapiens
caggcctccttgcgctccccgccccttgtcaggccgtgccgcccaccccgccccgctcctcgccaggctgctccacccgccccgccgctcgtcacgcttcctcgtccgccccgcccctcgct

SEQ ID NO: 12470 - DNA, 122 bp, Homo sapiens
cccctgggggtaactagcctttgagctcaaaggggcatttcgtgaggtcgccttttggttcggagagcgcgcggcgatcgggtggagggggcctggcgggaagaaagctggggcggggaagg

SEQ ID NO: 12471 - DNA, 122 bp, Homo sapiens
acgagacagcgagaggaacagcgtccggggcgacccccagtccaccgcgggggcctggcgcgcttggggcaaaggccctaggagaccccttctggccacaaaatcgagtatgacagaaaagg

SEQ ID NO: 12472 - DNA, 122 bp, Homo sapiens
gagtcaccaccgttcctttgatttagcagagggcatcactgccctctctttgtgggtaatcgggaaaggcctcgaaggcaaggcccaggctcccctgaagtcaacatctgctggtggctcaa

SEQ ID NO: 12473 - DNA, 122 bp, Homo sapiens
ggttccgctgtgcgtccacttagctgtggtgtcagctgtgtctccgctgatttcaggcaccgccggtaagcagggagcctccgcggagctcccgccgccgctcccccttggtgagtcctgcc

SEQ ID NO: 12474 - DNA, 122 bp, Homo sapiens
tgaaggagcagcatgggcacacctccagagatgtgaatgagcagggtctgttcaggagtacggactaggcaaaagggaaaagtgtgtggaggacgaggagggaagtaaggctggaagtagat

SEQ ID NO: 12475 - DNA, 122 bp, Homo sapiens
aaacagagggagccgccagcttgacctctaggcagggcgtctgcacgaggctggagagtccgtgctctgtccacctccaacaaaaacaggctgctgacttcatccagcttccagtcctttcc

SEQ ID NO: 12476 - DNA, 122 bp, Homo sapiens
tcagcaactccgcccggaggagagtgagccggggaagggggcggagagcgggctgcggggcgggttgccagctaatatttttccaccttgcagcgtggctcgttttccggctacttttggac

SEQ ID NO: 12477 - DNA, 122 bp, Homo sapiens
tgcgtgcggcgcagacctctgcgtcaaggtgctggggcggggccggactggggctggaggcggggccagggcccgggcggaagcggggctggagtccgaaccagcgcagcgcggggcggggc

SEQ ID NO: 12478 - DNA, 122 bp, Homo sapiens
ttacaattggcccattgttgtagcttatcaagaccttttggatttgatggtgttacttatcgcattcactgtcctttccaatgtaattgtcacccataaagttgatatgtctatccataata

SEQ ID NO: 12479 - DNA, 122 bp, Homo sapiens
actttgtcactagagcattattaaaactataacaactcccggctggcgcacggtggctcacgcctgtactcccagcactttgggaggctgacgcgggcggatcatgagatcaagagatcgag

SEQ ID NO: 12480 - DNA, 122 bp, Homo sapiens
gcaggaatgagcagggaggcggtgtgctggcgctgcggctgagcctcgccgggaactgtgcgcttctcatgtttgcagagatttcaggaaagatgaggatgatatgattgtcttatcgtgtt

SEQ ID NO: 12481 - DNA, 122 bp, Homo sapiens
ggaaggcgggacttagtgttgcctgatccacgccgattggacaacagcagtgtcgggggacgggccgctcgagcgggctagcaaccccccctcgatgggcggggagaagcgtgggctgcgct

SEQ ID NO: 12482 - DNA, 122 bp, Homo sapiens
cagtgagaccaggggagacagggtgcccagggcctgcccagggacatgctgctgaccccccgccaccctgcacccctggccacatgctagcgggcagctgatgagcagcagctgaccccaga

SEQ ID NO: 12483 - DNA, 122 bp, Homo sapiens
gacctgggactggagctggcggagctggtgccgcgcctgttccgggtggcgtccaagggccgcggaggccttctggaggtaaatctgcagaatggcattttgtttgtgaattctcggatcga

SEQ ID NO: 12484 - DNA, 122 bp, Homo sapiens
cgccgcgatcacgtcgcacaccgtgtcctgtcacctctgccaggcgtgagctggccttttcgccactgttctcctggcctatgtgcatgcctagccaacagctgctacgtaaataagcttgg

SEQ ID NO: 12485 - DNA, 122 bp, Homo sapiens
ggcacagcttctataggagcacagggcccagggaggtgccctcatccttggctggaaggccgaggcctggaggagtctggagaaagggtctcccttgtctggccttgcactgtgaggtgggg

SEQ ID NO: 12486 - DNA, 122 bp, Homo sapiens
ctccaattgaagttgagaggttgttttaatagcatttgtaaatactccatcttcactagccgcccctgtgagaggcactgagcccccatggtacgcagggttcgttgcgccctggtcgccag

SEQ ID NO: 12487 - DNA, 122 bp, Homo sapiens
aacagaggcagagtttggagtgatgcagccataagccaggaaatgtctgggggcaccagacgctggaagaggcaaggaaggattgttccctggtcttcagagggaggtggccctgctgacac

SEQ ID NO: 12488 - DNA, 122 bp, Homo sapiens
atgtcccttgggtatctccccccttggagtgtttgcagccggcgagcgccaggatgcccgcggcagcatactctaggcttatctccgtgtgtgtggccctgaacccagaacacccggaaata

SEQ ID NO: 12489 - DNA, 122 bp, Homo sapiens
aggccttgcttcggggcgctggttcatgaagctcgctctgacagcagggctgagtgtgggcggtcgaagcggcttttgcccgagacagaggccggtgccacggcctgctctgctctcgaagg

SEQ ID NO: 12490 - DNA, 122 bp, Homo sapiens
gtaagggtctggggacaaccggtagaatgataaaaggcagagtgcgctggccatgactaccgtatcacaccgtcagccacttttccatccgtgggtggttgcgtctgtgggacgcttgcagc

SEQ ID NO: 12491 - DNA, 122 bp, Homo sapiens
ggcctgtggccagtcctacctcctggaaagccggggtgcgtcagaggacctgatgcggagcggggaccccatcctctccgtgtctccccaagagccggcggcagaggctgcctgcgctcctt

SEQ ID NO: 12492 - DNA, 122 bp, Homo sapiens
tctccaattagaagctgcaactcacagcatggtttcaactctggacaattgcactctgggcggctttggttaaaggaggcgaagggtggaagcgacgggttgcacccacccccaagttagtc

SEQ ID NO: 12493 - DNA, 122 bp, Homo sapiens
acgcgcaccgtgggcaaccgggtgcggagcctgcaggatgggtgggacgcagacgtccagcgggaggagcatcccagagcagcctctgattcaagagcaaggtgctctagaggccccggctc

SEQ ID NO: 12494 - DNA, 122 bp, Homo sapiens
ttcaaacatgtctttggctaaatcaatgttggctctaaccgctcgtcctagagcgagtcccgccatcttgtggttgaagatgttgactgccacagagaatagcgggctttgacatcaacagt

SEQ ID NO: 12495 - DNA, 122 bp, Homo sapiens
gaggtgccggggaggtggggggagcgaagtgtgcgctgctgcgcaggcgcggtggtcggacgacagaccgtgtgtttccaaaatggcggcagcgatggatgtggataccccgagcggcacca

SEQ ID NO: 12496 - DNA, 122 bp, Homo sapiens
ggtaacaatttttacataatgctgtgagccaagctgttaattctgctaactaccataactcggtactttcaaataagaaaccctgcttctcttcgataaaatggagatagtatatccccaat

SEQ ID NO: 12497 - DNA, 122 bp, Homo sapiens
gggcctcccgcctgtcctggcgccgccgtcgcatggccagaacgtggcactgccaactcccggctgcccctctgcctggcctcccacagccaccgcttcttcagccggtcccgctcacaggc

SEQ ID NO: 12498 - DNA, 122 bp, Homo sapiens
agccgcacgactccaccaccatgtcctcgtactgcttgtagaccacattattgcccgcgtcgatgtatagaatgctgatgggagtcaatttggtgggcacgcagcagctgggcggggtggag

SEQ ID NO: 12499 - DNA, 122 bp, Homo sapiens
ccccgtcctccgccccgtcccggcccagacccccgcggaggaagcggagagagtccacctcggcagaagaggacatcattgatggatttgccatgaccagctttgtcacttttgaagcgctg

SEQ ID NO: 12500 - DNA, 122 bp, Homo sapiens
agaggaaggaggtggcatcaggagctgaaagcagaggtggaaatggttggggttagtgggcgctcaatttgccatgaagtgaacattttattagataggagatgaaacttgaaatgcatgca

SEQ ID NO: 12501 - DNA, 122 bp, Homo sapiens
tgcttcccttcctggcacttggataggctggggcgttatgcagatggcaacatggttctccgcacaatcctgaggcctgccttctccctctccccagcaggcctggcgttttcctcccacaa

SEQ ID NO: 12502 - DNA, 122 bp, Homo sapiens
acaaagctaagatgaggaagttctgtacagtttaggaaatagaggctttcaaagataattcgcagtgatgtgaaactggcctcccaagccctgataagtaagttaaataagagtaggagcca

SEQ ID NO: 12503 - DNA, 122 bp, Homo sapiens
gcactcctctgatggcagcctggacacggcacaaggggacgccctggaaagccctcggcacgcggtcgtggcggcatcaggcctcacgagccagggcccatcagaggcggaatctgacctgg

SEQ ID NO: 12504 - DNA, 122 bp, Homo sapiens
cgtctccgagcttcttaaacacaggccttgggcctacggctctgggggtacttgggggggcgggggcaggtctgatgagtaacccctccccccaggttccagaggaagaagcctccacatct

SEQ ID NO: 12505 - DNA, 122 bp, Homo sapiens
gcctcagacgagggcgggctgtgtggggcgggagtaccagaaagggtcggcgtgtgtccccgggatgctcgcagcttccctctgcccagactggggtggctttcggcgcaatctgtcaagct

SEQ ID NO: 12506 - DNA, 122 bp, Homo sapiens
ttcttttcttttttttgagatggagtctccctcttttgtccagcctggagtgcagtggtgcgatctcagctcactgaaacctctacctcccaggttcaagcaattctcttgcctcagcctct

SEQ ID NO: 12507 - DNA, 122 bp, Homo sapiens
cctccctcagcctcatgcctgcttgattgcaattaaggatgagaaccattgaatagggctcgaatggtgaattaataaccttatctcaccccagccaaatctggggccattgcgcacctctg

SEQ ID NO: 12508 - DNA, 122 bp, Homo sapiens
ttccagcctgggtgacagagcgagactctctctagaaaaaagaaaattataaacaaacaacgttgagcagtcccagagataaggaggagctggagcacaaattttgattttatcaaaggtta

SEQ ID NO: 12509 - DNA, 122 bp, Homo sapiens
tccatgccgcacaaccagttacctacggtccaaaacatgccaaagttttccgggctttcgcgcccacccgcatcgccagttttccggcgccagaaagcccgggagccacgtgggacggcccc

SEQ ID NO: 12510 - DNA, 122 bp, Homo sapiens
tcttgaaagaggaaggggtgcccgtataggagctcaaaggagctaaggcctgtggggcttcggggtgctgcccggagccgtgcgagggcaaagggaagtaaggttacccacggttggcgtgt

SEQ ID NO: 12511 - DNA, 122 bp, Homo sapiens
ccaccggtgctcttggtacgaagatccatgctaaattccccatcctgcagcagtgagtcccggatcaccgaacatttctggcccccaagtgtcagcccattcacgtaaaaacttgaccggtc

SEQ ID NO: 12512 - DNA, 122 bp, Homo sapiens
aaatacaaaaattagctggatgtggtataacctggctactccagaggctgaggtatgagacgcacttgattccgggaggcggaagttgcagtgagctgagatcacaccactgcactccagcc

SEQ ID NO: 12513 - DNA, 122 bp, Homo sapiens
gggaaagtcaagttccatgcaaagctagttcctttcggtagttcagtaaatagttgtaaccgatgaaatccagaaacacttttaatatgttgacaaagcacaggagcttcaaaccaacatac

SEQ ID NO: 12514 - DNA, 122 bp, Homo sapiens
tgcccgctgctgtgccaccgccgccgcggctgccctatttctgccgccgggaccggagcccgtgacgtcaccctctgggccccgcctgcccaatcgccgccacctgtgcgcgccgcccgccc

SEQ ID NO: 12515 - DNA, 122 bp, Homo sapiens
acggggcagcttcgagaggaaggagacagtggactgctggaggaatgtccgcgagaataccgaggctgatggaaatagaagatacccacgggcacaggattaagagtcaaagggaagaagag

SEQ ID NO: 12516 - DNA, 122 bp, Homo sapiens
ggtgacgatagttgggatagtaactcagactcacagctgcgtccatgtcttgcaaaatcacgtggtctcagttggtcctcacagtcctggaaattgtcatattcttgagctgtagggtggag

SEQ ID NO: 12517 - DNA, 122 bp, Homo sapiens
aagatttgaagataggtattacaatccccaagcctaggtgattatatagcccatatcacacgaatctcattcccttaaactcataaaaactaaagtcttagaaagtaccatactaagtactt

SEQ ID NO: 12518 - DNA, 122 bp, Homo sapiens
aagccgaggaaagttttaaaaagaacattccggggtctccagagatcatctctccaagtccgctcggcaccggcgcctgagctggggctaaggtcccgcgtctctggttctgtcctaataga

SEQ ID NO: 12519 - DNA, 122 bp, Homo sapiens
agcctgcggggcgcacggaggggcctcgagcgcgtggccctgcgcgtcccggggggcgcccgctgtccacagccgcctagggagctccgccaccacccctcggagatggaactcccatgaca

SEQ ID NO: 12520 - DNA, 122 bp, Homo sapiens
cgggagccgtgactctgaaagctaagacgggccagactggaaccctttctcacagggcctcgctctgcatttactggagaaacccaaccttcctgcctgtgggggcctgtcctaccccattc

SEQ ID NO: 12521 - DNA, 122 bp, Homo sapiens
cggtcccgccccatccaggcgggctgagtcaggcggcaggaactgggcggggggcggcgccgggaggagccgaagccgagccagagccgctgggagcgagcccggagcccagccgggcggct

SEQ ID NO: 12522 - DNA, 122 bp, Homo sapiens
ccggcccaccccgtacctgggggtgcacagaggacacggctgtgagctccacactgaacacgcccttgtgaccgtccacccagcgcatgcccggaagcgccacctgtgggagggaggcacca

SEQ ID NO: 12523 - DNA, 122 bp, Homo sapiens
aaagcagttcaagaaacctttaaatctcaggccacactgagctgagtattttacatgcatcgcttaatcggaggtatacaaggcagtgtagtatgtatgtgcgtactttttacagatgaaaa

SEQ ID NO: 12524 - DNA, 122 bp, Homo sapiens
ggacagtgttctgtgcccccttctagagcctaaatttgttgcccgagttcctccgggaagcgctccgggtagattctgggggccgggagctgagatccctgggcggggagctggggaaggga

SEQ ID NO: 12525 - DNA, 122 bp, Homo sapiens
aagtgtatgggaagctttgtagcaggagtgtgggcgggggctggtgcctggaggggccttcgagtgaggcagcattgtatggggaccatgtggtcactgaagtcctagcagaaggatgtggt

SEQ ID NO: 12526 - DNA, 122 bp, Homo sapiens
aacagaaagaaaggtataaaacagaatttgctcctgggatgctctcaattggaagagccacggatgctttctttttttttttttttttttttttttttttaaagcaatgggtagagtttgcc

SEQ ID NO: 12527 - DNA, 122 bp, Homo sapiens
agtctctctctctctctctctttctcattcagaggcaacgttttcaaaaaccggcaattgcgtgtgcgtttggggtgtgcaagtgtgagtgtagatgtgtgaaagttatttgtttcagcagt

SEQ ID NO: 12528 - DNA, 122 bp, Homo sapiens
ccaatctccaggctctaattttgagccactgaggcagaagttttcccatcagtgttgccccgtttaccctagattcctccctttctcctgcccgccccaaactccgcctgatggggcgggaa

SEQ ID NO: 12529 - DNA, 122 bp, Homo sapiens
actaagttaaaccagaactagcgctttcagcaatgatgtaatttgatctcttcgggccaccgtcgctgagcatgcgcaaataaacgtggcgggacgtatgtgtcatggcgctctccatctaa

SEQ ID NO: 12530 - DNA, 122 bp, Homo sapiens
gaaagagtttcaagaagttgtggtgagtggatgtattcccagacggatgcgggcggtccccgggcagggaccccgaatccggggtcgcagggtggtagagccggaagattggattccatctc

SEQ ID NO: 12531 - DNA, 122 bp, Homo sapiens
gtttcattccaaacaattagcctagtctgcaggattgcagtcgcggcttggacaccatcccggtgtctgtcccccgcagagggcttgctaccttgctgtatcagctggcccagcaggtctgg

SEQ ID NO: 12532 - DNA, 122 bp, Homo sapiens
aaaaaaggaagcgcgtaaagaccccctgcctcccacccaccaaagggaaagggaaagagacgcactggagagcttgcctagaaaaagtaggagaagggtcttgagcctgcccattgaagccc

SEQ ID NO: 12533 - DNA, 122 bp, Homo sapiens
tgcagggggtgtgctggggcccccagcagtgctggcccatgggtgctgcgctcgatttctcgtggtgccttagctgccttcccgtggggcagggctcgggacctgcagcccacgatgcctga

SEQ ID NO: 12534 - DNA, 122 bp, Homo sapiens
catcatccgcgaaggcaccatcgggaagaagatgtacttcatccagcacggcgtggtcagcgtgctcactaagggcaacaaggagatgaagctgtccgatggctcctacttcgggggtgagc

SEQ ID NO: 12535 - DNA, 122 bp, Homo sapiens
ttcaaaaccacaatgttcagcaagtcagtgagatttcatgcttttatctgaaacccagaccgacaaatgcatctcttgatgcaattcaggatctctgaatcttcgctaaagaaccgagctaa

SEQ ID NO: 12536 - DNA, 122 bp, Homo sapiens
gcatcccgataggaaaatcctacagctcacagcaagcagcagggaaacatttatctctggcggcactgatttaagcttaaaagatttggtatcgtttaaaaaaaaaaaaaagctgggtgggg

SEQ ID NO: 12537 - DNA, 122 bp, Homo sapiens
agatccagataaaggcctggagggaagccacaccacagtaaccacattaacttggggagccggccaggctccccaagtgcggtcagagtggactttacccttctctgttacgtttccattct

SEQ ID NO: 12538 - DNA, 122 bp, Homo sapiens
tgctgaatggtaaagggcttcggagctaagggaaatggtcaggaccccacctgaccccaacgcccacgggccaggggcagaggagaaaaacctgggtgggcagaaggaggcaatcttccagg

SEQ ID NO: 12539 - DNA, 122 bp, Homo sapiens
cccggtcgggtcaataagtacctgcgcggccaaagtgcctagcatggtgacaggaggagccgggccattcgaatcacctctccttccaaagctaaatggctactgaatgctgccctcggagc

SEQ ID NO: 12540 - DNA, 122 bp, Homo sapiens
tgaagcaatcataatgccggatgcttttgatttttgccatttcccctcctgtacagttatcgttcccatatcaaattcaacatttattttagctacttccttttattcagttcaaagcattc

SEQ ID NO: 12541 - DNA, 122 bp, Homo sapiens
tgcttatggcaaaagctgcaccaaggaaaaaatgctgcccctattctctctcctgcccttcgcaggagcctttgaccccagagctcccctgaaactgctcttgtcagtttcatgaagagccg

SEQ ID NO: 12542 - DNA, 122 bp, Homo sapiens
caagcattcctcccaccttagcctcccaagtagctgggcctacagacgtgcaccaccacacgtggctaattttttaaaaaaaattttgtagagaccttctgcccaggctggtctcaaactcc

SEQ ID NO: 12543 - DNA, 122 bp, Homo sapiens
ggcacccaggtcagcttccatggtagtgtccatttggggtccccagagtcctgctggacacggagtgggtgcctggtgaatcaatgatggtgtgaatgaccgagtatgggagagacggtgct

SEQ ID NO: 12544 - DNA, 122 bp, Homo sapiens
cagaatgagctctttgaacctgcccaggctacaccctggattgggaatgaagaggggaagcgaggttgggtggactgatgtaggctatgtttttgttcctgctgccccatgttgtcgttgga

SEQ ID NO: 12545 - DNA, 122 bp, Homo sapiens
agaattgggacccgtcacaagagctgagttcccgaccctcgagccccctgcactgcggcacggagagaaatgccagcaggctgctctcaccgtagaccagtccccagttttccactcgtagc

SEQ ID NO: 12546 - DNA, 122 bp, Homo sapiens
acacacaattttttttgttcccaaacctaggcctcagtcctatccttcaaaaaaacaagccgaactttgttttctgtttgccaaggaaagggattagtgtgtctgcacaaagaaaagtaatt

SEQ ID NO: 12547 - DNA, 122 bp, Homo sapiens
ggcacaggcaaggagacagcccccgaacggcgggaggtggtgacactgcgctgcaaccaccgcgatgcaagtatgttgggctcgctggcctacaatgtgctcctcatcgcgctctgcacgct

SEQ ID NO: 12548 - DNA, 122 bp, Homo sapiens
tgagccagcgtaggtgagactgccatgtgcataggacagagggggaaactgaggcccactcggcaagggacagcagagcagggagcagaacatgagattctggacttcccctaccttaggtc

SEQ ID NO: 12549 - DNA, 122 bp, Homo sapiens
tgtctctcccatggggcagactcggggttcaaaagccttctctctgatctttggccggcccggttccatctcccctctcccctccatcctaggatgtccctattcagctctgccctccttcc

SEQ ID NO: 12550 - DNA, 122 bp, Homo sapiens
ggagctgagtccctgcagaaaccaaggccacgtcggactctaccagtggtcagcaaggcccggcccttctcctcgggtcacagggctggaaatgcctcctgctcttctccggcagaatctca

SEQ ID NO: 12551 - DNA, 122 bp, Homo sapiens
ccgaccacagctgccaccgctcccactggcccggagtgcggggaggtgggctctgggtgccgcccaggaggccgccccgctcgggcctccttggcctccccctctcggggcctctccagggt

SEQ ID NO: 12552 - DNA, 122 bp, Homo sapiens
ccacacaacctggccccggaccccttggtcctcttttcctatcagtccctccagtcatcacgcagccctgtggtttctctacctgcatactccaggtgggcacagtgccccggccccactga

SEQ ID NO: 12553 - DNA, 122 bp, Homo sapiens
tcattgggcgcccagatccggaaccccagcctcgaagcttccggtggccgggaacaaagccggttttgctcactgtcgcctggcaaagcaggcgcttgttagcacccactgaatgcgcttat

SEQ ID NO: 12554 - DNA, 122 bp, Homo sapiens
gtgcaatctgaggaaggagggcccggtaagcaacccggtaatcacagcgctgggagagaacgcataaaagaagggtagctcaggagttgtggggcaccggaagagacataacagaaaacgca

SEQ ID NO: 12555 - DNA, 122 bp, Homo sapiens
tcacttggcatgaggaggtgattttagacagttgcagtctgactacccccttcaaatgtacgagaagactctcacccccatcccccgcagccaaggaataaggaacccactcacagggcttt

SEQ ID NO: 12556 - DNA, 122 bp, Homo sapiens
ccgaagtgcagaccactgggaataaatagctgcccggtcttccccactcctaaattctcccgacagaccccaaagcctctctgagagcctctctgaccgccctgcggcccaccccgagttcc

SEQ ID NO: 12557 - DNA, 122 bp, Homo sapiens
gttcccagctggtgctgttgctggtcctgaaatcacattttgaaaaccactgctctaaggcgtaacaggtgcccaaccttgacactggaaagtacagagctcagaacaagtgacttttgttg

SEQ ID NO: 12558 - DNA, 122 bp, Homo sapiens
accacctccaatgcactgccatttgtgccattctcatccgcaacaagccccaggagctctcgggggtcctggcctctagagactgaaacatctcagcggacactcgtgcctgcctctctgtg

SEQ ID NO: 12559 - DNA, 122 bp, Homo sapiens
tgagggttcaatttggcttccaactcccctggagctggccgtgtatattaagcgtgagcgcggggtctagtccttcaggttcttataaaggcagaccctaaggagaggctgctgctcccaga

SEQ ID NO: 12560 - DNA, 122 bp, Homo sapiens
gcacccagccttctgcatcatacactgccgacccagcctgcatcctctttaatagatgttcgccgtggaataagaattgttttcaggtccttcttctgcactcctgacttaggtaggctggg

SEQ ID NO: 12561 - DNA, 122 bp, Homo sapiens
cactccctggtttttcttctctggcagcaatgaagcagctgctgacccagctctagttttcgggaagtcagatgaccttttccctcccgcggctctctacctctcgccgcccctagggagga

SEQ ID NO: 12562 - DNA, 122 bp, Homo sapiens
agcgggagaagacgatgtggatgtaggccaggacgaagagcacaaacagggcctagggggcggccggcagtcagtggggcgccccagggccagctgcagccgacacccaagggcctacgtga

SEQ ID NO: 12563 - DNA, 122 bp, Homo sapiens
tcccctttcgtagcgaaagggccaggcgtattgagcggtcaggggagcgcgcacgcagaacgtcagccagtaagcgccgttcctccgggagatgtggaggaggggggcggcgtggaggaaga

SEQ ID NO: 12564 - DNA, 122 bp, Homo sapiens
agagagaacccggaggatctttgaccccagtgcgggagcggccagcccaccctagagaagcgagacaagggcaaccagaaggaaccgagtctgaggaagcgcttcctctgggcagggatatt

SEQ ID NO: 12565 - DNA, 122 bp, Homo sapiens
gctgggagggccgttacctcagagatacccgtggccggcatgttggttgaaaaagcttcccggaagggagacgaagagaaaggagaggagcagctcgtgatcatccccggtagcgagtacgc

SEQ ID NO: 12566 - DNA, 122 bp, Homo sapiens
ctctcagcagatgaggaagccagagggaaatggtttttccctggagtcaggccgggtcagcggccggggttctcctctgaaggcccccgccaaacgctgccttgtcccgaccgtggatggcc

SEQ ID NO: 12567 - DNA, 122 bp, Homo sapiens
catctgttagcccagctcagcctgagcgcgggtgggtgcagctggctcccaggaagtgaccgccgtcaggtcacctgcgccggccaagtcacaggccagaacctcgcagcccagcaaggcca

SEQ ID NO: 12568 - DNA, 122 bp, Homo sapiens
cgggcccggggcgggtgcagggcgcgggatcggggtagcgcaggagcaggcaggggctcgcggctcgcgtgggccccaggcgcgggatggcggcgtccagcagcgcgggtccgcgcagggcg

SEQ ID NO: 12569 - DNA, 122 bp, Homo sapiens
aacccctctcccgactcctgccaatcctttccatttgtgccctgagggtggggtccagtgcgtgaggcccggaggttaacccatcccccgaaacccgactctgtccccgcccgcctgaaagg

SEQ ID NO: 12570 - DNA, 122 bp, Homo sapiens
agccttggggactgctaggatgaagccctaaagaatgcaacctagtcaggttagctgaaccgacactcaaaacgctactgagtcacaataaagattgttttaaagagtaatattttgtcctc

SEQ ID NO: 12571 - DNA, 122 bp, Homo sapiens
aacagtgcataacactctggggacgggtctggtcctgggacaaacctgccagcagattatcgtcaggaagagtctgaatccaaatctaaattaagtctaatttaggcccaaactgggccgtc

SEQ ID NO: 12572 - DNA, 122 bp, Homo sapiens
cggaggcggatctagggtgtcctctcctattaaaccgtttctgctgcagccctcggcgtccgggtgcagtgacttgggctgcgaacctgtactggttccgccgcacaatctggggagaagcg

SEQ ID NO: 12573 - DNA, 122 bp, Homo sapiens
gaggagcctgtgaggcgttctggagctttaaggtcaggcgccttccgggagccgtagccccggccccgcccttctgcccgcgcgttcctcactgcgcatgtcgcgtttttgttcccctcccc

SEQ ID NO: 12574 - DNA, 122 bp, Homo sapiens
cacgcagtggcaggccatgagcttggctgcctcctcgggcaccgggcagctggggaagagcggcttgagcaggtaggtggcgaagaccagggccacgatgtactgcgatgaaggccggatga

SEQ ID NO: 12575 - DNA, 122 bp, Homo sapiens
ggcagcgccgcgcaccatgggctccattctcagccgccgcatcgcgggggtggaggacatcgacatccaggcgaactcggcctatcgctaccctccgaagtccggtgagcgcccggccccag

SEQ ID NO: 12576 - DNA, 122 bp, Homo sapiens
cccggccggccggcagcctccgcggtattcccggcgcgggcccctccaggggctcccctgcggctcctgggggcaggggtaccctgctgccctccaagactgaggctggatgtggcatctga

SEQ ID NO: 12577 - DNA, 122 bp, Homo sapiens
tacaaagacccttaaatcctccagacttcttaagcttaggaaagatttttgcttggttttcggttttctttttcttattttgagcagcagaccagcgtgactccacagtttcaaagagcaag

SEQ ID NO: 12578 - DNA, 122 bp, Homo sapiens
tggggcacaacacctggaatcgtcctttcgtcctcagcccggcctgctggtggggcagggcgggtccccagggctcctcaggcagctgcagtccaaacctcccctgccctcacccagctctg

SEQ ID NO: 12579 - DNA, 122 bp, Homo sapiens
acctggaggatggcgcggggcgggctcgggatgacagggaggagaggggacgggaggccccggggagatgcaggagcccccaggcctggcctaaggacatggactcacatggggacaccacc

SEQ ID NO: 12580 - DNA, 122 bp, Homo sapiens
gtggtgtccttgaaaatcgagtgattttcacccaggatttctgtagtgggtgtcaggcaccgtggatttctgtactgggtgtcagggaccgtggtacaccacggtgcttagaaaaatggatg

SEQ ID NO: 12581 - DNA, 122 bp, Homo sapiens
tggagtactgcatcaaagcccccctcaggggcatctcggttccgggacaccctctgtttccgaacttcctcattgaagctgtccactctgtctgtgagaggcagcagatggcggaacccaaa

SEQ ID NO: 12582 - DNA, 122 bp, Homo sapiens
ctggccagggcagcaagccttagccttggcttcttgtttctgctttttttctggctagaccgaagtgtactagccaaggagttgaagtttgtgactttggtaagtagacttttctcattgct

SEQ ID NO: 12583 - DNA, 122 bp, Homo sapiens
gcagtcgggtttatagcggggaacccgacaacgaggcgcagaccccgctgtctgtaagggcgaggactgtgtagaccttaaccgggcaatgctcctgagccactgggcttggggtggagcgc

SEQ ID NO: 12584 - DNA, 122 bp, Homo sapiens
ctgtgttttcggtctgtgtgtcctcctctctgtgtgctagtctttaggtgtatctatgagcgcgtgtgttttctgtctgcgcctctgttttctagctacgtctgtctccgaatgtaggtcca

SEQ ID NO: 12585 - DNA, 122 bp, Homo sapiens
tactttcacccctcttctttattttcctgcgaaggaatccatctgtacagatccgccaggcgggaggtggaggagggtgcgcgagggtgcgcgcgtgtgtgtgtgcgcgcgtggcggccgag

SEQ ID NO: 12586 - DNA, 122 bp, Homo sapiens
gaagagaggctttttgtgaatagcacactccctatataaactagcctgtcttgctggctgcgtagttgaacacatactctcccagtactggggaaaaggaccctttttagaatgtgcaagtc

SEQ ID NO: 12587 - DNA, 122 bp, Homo sapiens
tgaatgcaaggaaggggacctcggacctagtccagtgttcctaagccttgatacacatgccgttccagatctcaagagactctgccccaagtgcttaaagatacatactgcacagctctgta

SEQ ID NO: 12588 - DNA, 122 bp, Homo sapiens
catggagttgctgttacagggggcgggaaccaattggagaccggggccctgcctggcgtccgccttcggcagggctctggagagtgtcccatgcccactcacctgggctccccagtcttcgt

SEQ ID NO: 12589 - DNA, 122 bp, Homo sapiens
tcctaattaatgtgaactccacgaagaaagaactcccaccattttatgtgctctgggatgcggctgagtctttccaattgcagtctgtttactctttggacagctgcatctcctccttatct

SEQ ID NO: 12590 - DNA, 122 bp, Homo sapiens
ttcaacttggctcattatactgcactgatgtcatggtacataaactggctccgaattcaacgtgcatagaatcggctgtgtgcttgtatgtgctgagggtgtgcgggaggaggggcggggct

SEQ ID NO: 12591 - DNA, 122 bp, Homo sapiens
atgagcaaaaaaaactcaaaaagcctctaggtcccccccttgacactcctcccccggccccgtcatgtgtgctgattgtctgctgctcaccttgggggggccttatctgtgtccccttctgt

SEQ ID NO: 12592 - DNA, 122 bp, Homo sapiens
atatttgagagacaaaactgataatttggggtaagggaggtgaaggaggcagagggatcacggacgccctccttggtttctggtttaggctacttgacagatggcggagctatgcaattgag

SEQ ID NO: 12593 - DNA, 122 bp, Homo sapiens
ttgcgactaaagggagccaacgagcgcgtgagcgtttgagaccagctggctgagggacgccgaaaatcccgcgcggaggaaggcgggagagcgctaccgctgctaccaaggcggcggcgcgg

SEQ ID NO: 12594 - DNA, 122 bp, Homo sapiens
actaccaccagaaggcaactaaaaatccccacaactccaggtgtgtcctggctggtgtcacggagcctcacacacggctgaaccgcttaactcacatccagccacagaacggcctgccaggg

SEQ ID NO: 12595 - DNA, 122 bp, Homo sapiens
ttaaactttccgcgaaactaatatacctcagtattccatcatggtctgaaagtcaaacttcggcaaggcacggacgactgtgcagacacagcagcggcaagaagcgagaactgccctccccc

SEQ ID NO: 12596 - DNA, 122 bp, Homo sapiens
atacacaaccccaactcagagaagccaaagcgctgggaattcagctttaggcagaacccacgcaatcttatatccgtcgcgcagtgatgacgtagcgcgagcgctggcatgagggcggagcc

SEQ ID NO: 12597 - DNA, 122 bp, Homo sapiens
catttggatgatgattctacttgtatgaggaaatatccttattcagcccttatttcataacgttgattataaagaaaaagagtcaacaacaatcaactgaaagctttctcttaaatcaacat

SEQ ID NO: 12598 - DNA, 122 bp, Homo sapiens
ggtgcgggatattatctcctggtgtgccgttttttaagccagtcagaaaagcgcattattcgggtgggagtgacctgattttccaggtgccgtctgtcacacctttctttgattaggaaagg

SEQ ID NO: 12599 - DNA, 122 bp, Homo sapiens
tgatgtcgccgcacctttaccatcaggtgtatctcaccacggactcccgccgcagcgacccgctgctgaagaaacctggtgcagccagtccactggccagccgccagaacacgctgcggagc

SEQ ID NO: 12600 - DNA, 122 bp, Homo sapiens
gaaactaacgactagggcttccccgagcgagagaaccggtaaggtaacaggctaaaagggcgtcgttgatttcttggctgcagcgacagaggcgggagacacacccctagcgtcggtctgaa

SEQ ID NO: 12601 - DNA, 122 bp, Homo sapiens
ctgtcgctgctctggccgtaggcacagcggactctggaggacactggtttgtactgcatgcgtgtgaggatggctttcctcctggaaggtctcaaacggaaaatagtttcagtgtgacgagt

SEQ ID NO: 12602 - DNA, 122 bp, Homo sapiens
agcgggagccagacgcagcctcctcactctctccgctctgtaacattactctccagccagcgcggctcctattggctaccgccaactcacggggctcgctcattggcccgatacctcccatt

SEQ ID NO: 12603 - DNA, 122 bp, Homo sapiens
agctgggctttcggctgctgcgaggagaattccggcttctgaaatggtgacctcaacattcgtttcggggatggcaaataggtttgtctccatgggagggggcaggaggtgggaaggccagg

SEQ ID NO: 12604 - DNA, 122 bp, Homo sapiens
ttaaaacttgtataatttcaacactggtcacttcccccaaactcaccttattaaaatggtcgccagaggaaatgcttggttctagaatttcttgcatttttatgggctgaattgggctctga

SEQ ID NO: 12605 - DNA, 122 bp, Homo sapiens
actgcagttcgttgatataaacagaacgcgcctcctagttcactcaggccttgggccgagcggggagcagactttgtttaattttaaataataataaatgtcactgttgtcagtttattgag

SEQ ID NO: 12606 - DNA, 122 bp, Homo sapiens
agggcggcactgagatttttgtcctgggcggcagacgaccttgtgttgcacttcctcccccgccttctgcctctcccggggcggcggcggatgggcgcggaggcggatgggcgcggctccct

SEQ ID NO: 12607 - DNA, 122 bp, Homo sapiens
tatttcctgcctgtgcatgtccaagagggcgactccgtccttcctttccaagtctttgcacggcttccaacaagggaggctttgttggggctttctcagcttcagacttaggtgggtatgcc

SEQ ID NO: 12608 - DNA, 122 bp, Homo sapiens
caccggcgatccccgaggccctggcctggcccactccacccacccgcccagccccggccccgtgccatgccaacacctctatggtcacccacccggacttcgccacgcagccgcagcacgtt

SEQ ID NO: 12609 - DNA, 122 bp, Homo sapiens
ttcagaggcttcctagtccttgggaggagtgtcttttaaagcacctgccagccttaagttcgcgtgctttcggaaaggggccgacagggtgcgtctcaggggagccttttgaaatgtggatt

SEQ ID NO: 12610 - DNA, 122 bp, Homo sapiens
gccagccgccgccgcggagttgggtccgctgcgagaggcagaaacgccagcctcctccagcggatcccgctcctcgccaacacactttagctccccgggaactcggtccctctccgactccc

SEQ ID NO: 12611 - DNA, 122 bp, Homo sapiens
tgcagactgccttcatgcagacccctgactccagcacgtctgggctgccaggtaggcacacgccgccctcgggccagaagctgcggatgtcggcgtcccggtagccttggttcttgccagac

SEQ ID NO: 12612 - DNA, 122 bp, Homo sapiens
ggagagagacagagagagagacagagagagagagagagagagagagagagagagacagcgcgagccaccggtcattgacttagataaccagcaaaattaaaaaagaaaaaaaaaaattgtag

SEQ ID NO: 12613 - DNA, 122 bp, Homo sapiens
acttgttgtctgtggttgtgtcatagatcccggcgatagggaagctgtcatcaccgagcccgagagagaagctgggagagaagaaactggtgctctggggggccggggaggcgagcggggac

SEQ ID NO: 12614 - DNA, 122 bp, Homo sapiens
tgaacatgtcaggcattcattaagtactgcaccatcagggagaatttccctgctattaagcgtcgactccagccaaatcagattcacctgggcgtttctcaaagaaaagcctgtcagcatga

SEQ ID NO: 12615 - DNA, 122 bp, Homo sapiens
ctccacgaatctgagcggaaaagcccgggtctcctcacctgtaaagaaaataactgcagccggcaaatgtgaccacaggtgagaaggggcttcggaccagggcgcacacctctagagaggtg

SEQ ID NO: 12616 - DNA, 122 bp, Homo sapiens
ggttccctgcggtgctggccacccgctcccgagccgcagcttctcggacgtcgcacaccccgatgtgggcagagcggaatgttctcctcggcgctccttcactgtgctgcagtctacaccga

SEQ ID NO: 12617 - DNA, 122 bp, Homo sapiens
cccgtgggacgtggcccctttttgtgcagctcattagagctctcaggtaaaagcattcctcgattcaggctgatcctcaggagggctgacagtcgcttctcttttcctttgtattttgaagg

SEQ ID NO: 12618 - DNA, 122 bp, Homo sapiens
gctatttgctttatgcagccgcagggtgcgctaggaccgggagtaaattgcagagataaccggtctctccagagcaccgcctgcccccaccgccccccttcctttcatctcaggccccgagt

SEQ ID NO: 12619 - DNA, 122 bp, Homo sapiens
gctgaatacaaatcgggttctgctatgttcatccttctgtgtctggcctctttcacttagcgcaaggtttcaaggttcatgcacgtcatggtgaccagaacttcatttctttttatagctga

SEQ ID NO: 12620 - DNA, 122 bp, Homo sapiens
cttgatctcctgacctcgtgatctgccctcctcggcctcccaaagtgctgggattacaggcgtggtccaccacacctggtgaaaaatgtacactttaacagcaatgatcacattcactgggt

SEQ ID NO: 12621 - DNA, 122 bp, Homo sapiens
cacagccagacccacccagcccaccaggtcgaggtgactgtccctccagctcgcaagcggcgagtcggaagcacagagggcagaccctgccctgcccacgctcctgtggctcctgggccctg

SEQ ID NO: 12622 - DNA, 122 bp, Homo sapiens
gtaagaagcccggcttgctggcgtgtggagccgggtatggaatgtgagtgcctagtgggccgcttctggtaagcagacctggctctgcgggatgaaccgaatgccggattaaggtgcccaat

SEQ ID NO: 12623 - DNA, 122 bp, Homo sapiens
caattcccctaatcatttaaagcagtacagttgttatggaatgggcagctgaacttaatgcgtgtctggaccatctgttctagtatttagtcttaaagaagattgcttaagtgactacagtt

SEQ ID NO: 12624 - DNA, 122 bp, Homo sapiens
tcccgtcccgcgcctcctcaccctcttgcagctgggcacaggtaccaggtgtggctcttgcgaggtgcgcgggcgtctgcaaaccaggtgacagctggcgagtggctgcatgcatctctggc

SEQ ID NO: 12625 - DNA, 122 bp, Homo sapiens
cgcccaccttggtcctcgcagcagcccttgtacttgatgatgtgctcgtggtagagcgtgcgcagaatgtcaatctcctgcttccagcccgagcggtgctgggggccgcagtctgccttgag

SEQ ID NO: 12626 - DNA, 122 bp, Homo sapiens
actgagcgcgctcaccgatcttgacttgctcgcggtagctcttttcgttgaggcaaaccccgcggccgtgcagcagggcgtgcagcggcttctcctcgtcctgccgggggaggcagcgcagc

SEQ ID NO: 12627 - DNA, 122 bp, Homo sapiens
taatctcctggttcatgaaggcttccttgttcatgatgttttccaccatcatcctcaaatcgaacatctcgaggacctctgcgatctgagccaggcccaccaaatccttttccttttcatcc

SEQ ID NO: 12628 - DNA, 122 bp, Homo sapiens
ggctggggcatgaagcaccctggtatttacgctgggattggtctctcactagggttggggcgggctgtggtcacctggcccggcgcgccgcagaggctggctccggagaagacctgggggcg

SEQ ID NO: 12629 - DNA, 122 bp, Homo sapiens
gctgtgttggcccctcacgctcgctggactttctgccagcctgccctctttagcgctggtcgggctctgtggtggatatgtcgaaagttaggggaacattgagtcatctcctccctttcagc

SEQ ID NO: 12630 - DNA, 122 bp, Homo sapiens
ccccacgggtcagggctgctctagggtgcgggcaggcgagggcggcccaggggcgcggggcgaggggcgaaggagccaggaggctgagaactgcatggtagccctgcctgcctgccgcgctg

SEQ ID NO: 12631 - DNA, 122 bp, Homo sapiens
caccctcgcccctggaatcggcctccctagattcccttccctcttaaaatcatttggaaacgggctccaaggggcgaccctgcgcagaaaaccaaattccatccggggcgggcagggagtgc

SEQ ID NO: 12632 - DNA, 122 bp, Homo sapiens
gtccactgttcccccggggtccaccctcctgcaatacctgctccccgtccactgtccccccggggtccaccctcctgcaatgcccgctccccatccaccgtcccctggggtccgccctcctg

SEQ ID NO: 12633 - DNA, 122 bp, Homo sapiens
ctcgcgcgcgctctctccctgtctctctgtgtgtgtctttctctgtttttttttcctcctcgcacccccaacctgccagagcagccccacatcttcctcccgcccggcatctaccgccaccc

SEQ ID NO: 12634 - DNA, 122 bp, Homo sapiens
ccctcgctttcctttgtgctgtggccgggccgggctgagccgggcaggctgcgctggctccgctagctcggtccccgccccgtccccgcccggacctcgcccgctcgaaggtggcgaaggtg

SEQ ID NO: 12635 - DNA, 122 bp, Homo sapiens
ctgaccccgcatcccaattctgcatccccgcctctccctcacaatcccacccctgccggccgtagctccaccgcccagcatcatcctgcccagagacagggttgcctgcaccttctccgacc

SEQ ID NO: 12636 - DNA, 122 bp, Homo sapiens
ccacctccagcctgctcttactgtccagataatgttccaaatacatccccgcagccatctcgaagcaaaacaaagcaacttccgatccgccccggaagtgactgtaacgcgacaggggccga

SEQ ID NO: 12637 - DNA, 122 bp, Homo sapiens
ttccattttaactttctgaggaattgctaaaccattttctacagaggctgcaccattttacgttgccacccacaatgtacagagttcccattgctccacatccttgtcaatactcgtgtctt

SEQ ID NO: 12638 - DNA, 122 bp, Homo sapiens
gccacctttaagagctgtaacactcgctgtgaaggtctgcagcttcactcctgaactcagcgagaccacaaacccaccgggaggaagaaactccggacacatctgaacatccgaaggaacaa

SEQ ID NO: 12639 - DNA, 122 bp, Homo sapiens
ctcagtacacactgccaaaagtccactaaatagatttatgtaacaagtacacaagacttgcgtatgaccatccaaagattatgcggtcatccttatccagggaatttgagaatgaagggtgg

SEQ ID NO: 12640 - DNA, 122 bp, Homo sapiens
acaggcaggggctcacgaggcactcaacaggccccgccctccaaagcagccagcgctcttcggaactgcaagttgccatggtgcccatctcccaggctccatctggtgcccgcctggcatca

SEQ ID NO: 12641 - DNA, 122 bp, Homo sapiens
ccgggtgctgcaggtcccgcagtctgagaagttttcgcgggtttcagaagtttccttaggcgttctaagggctttactcaggtggagtctccattcaggcacttatttaaccacccatttct

SEQ ID NO: 12642 - DNA, 122 bp, Homo sapiens
tctaatagaaaaatttaacagatctcgggaggagccaagatggccgaataggaacagctccggtctacagctcccagcgtgagcgctcccagcgtgagctacgcagaagacggtgatttctg

SEQ ID NO: 12643 - DNA, 122 bp, Homo sapiens
gtacatacaaaagaaattgtcctttgattaaaaaagattcatcaccatttccagctctgtcgggagatctcagcttcttctaacccctcaaagaggaggtgacaatgtcgggctgaagataa

SEQ ID NO: 12644 - DNA, 122 bp, Homo sapiens
aagggaaagtggcaagagggctgcgcctgctattatgacattatgatggaggctcattagcgtgcagtggagccacttcttttcctcctctgccttggccacctggcccatctcctcgcttt

SEQ ID NO: 12645 - DNA, 122 bp, Homo sapiens
gaggaccgagggatcatattggaggcagatagggcagagaaaggtggaggaggtgggagtcgggtgtggctgtggaggaagctacttaaatccggatttgatctttgctagttcttatccct

SEQ ID NO: 12646 - DNA, 122 bp, Homo sapiens
ggaaaacgagaaggtcgccagaggtcctgttttcggggtgatctaaagcccccgccccagcgctacagcccaagccccccacaggctggggaccaggaacccggaggagcgggaggagggcg

SEQ ID NO: 12647 - DNA, 122 bp, Homo sapiens
gaccatctgtcgtgtatccactccacgtcccttctccccgtaatcccactctcagtgtgacggtcaagctgcgtttttcaggtgcttgtactttgggtctgttgagtgcgagtgacagaaac

SEQ ID NO: 12648 - DNA, 122 bp, Homo sapiens
agcagcagccggaagtgactgctttcagtgtgtagtggtgagtgctagctggcacccctgcgcctggcttcccagacactgtaacgcagggcaggggaggcagcgagggctgggtccccacg

SEQ ID NO: 12649 - DNA, 122 bp, Homo sapiens
tcatgaaccccatgcacagggttgtgtggggattaaatgaaataatatacatcaagtgcccggaacagtgtccgacgcaaagtgtgccatgaataattgttgctctgtggaattccttgctc

SEQ ID NO: 12650 - DNA, 122 bp, Homo sapiens
cagggctcctgtctgtgtgcccagggcaggcccagtacttgaaggagttctatggggacccggaaggatggaagggtgcagactgagggaagcgtgagggaggggtgggcagccttggccca

SEQ ID NO: 12651 - DNA, 122 bp, Homo sapiens
ctatcaggttggtgcaaagtcatcacagtttttgccattacttttaatgaactgcagcaccggctcctccctgctttttattgccattacttttaatggcaaaaaccgagattactgctgca

SEQ ID NO: 12652 - DNA, 122 bp, Homo sapiens
ccgccgccgcccttcgctcggcgcgcactccagccgggcccagccgccgccgcccgcccccggcccgccccccgcaccgccccccgcaccgccccccgcaccgccccccgcgccgccggccc

SEQ ID NO: 12653 - DNA, 122 bp, Homo sapiens
aaacataatcccattagggaactccttagaaccctgcagtgaccactttctaaaaaaagacgactgcaatattaataaggaacccctaacttacctgcttatcacctgggcttccaactctg

SEQ ID NO: 12654 - DNA, 122 bp, Homo sapiens
ggcggggcggagaggtgcgcggcttgggaagcccaggggaccctgctgtttgcgggtggtcggtagtgagtccggagccggacaggacctcccagaggcatttcctaagtttgagggaagcg

SEQ ID NO: 12655 - DNA, 122 bp, Homo sapiens
ccagccgcaggagtcccattaacgtacccatttagtcattcactcgtcaaaagtcccgtacgtgcccatttctcagccctactccctaaacccctaaacccaaccttctcgccccaagatga

SEQ ID NO: 12656 - DNA, 122 bp, Homo sapiens
tcacctagaactcatccacagacatttaaaaaggtggtatctttggagaaaacttgtagtcgatcacaagatcatccactagatttaattttatccagaaggctgacctgacattaaatgtc

SEQ ID NO: 12657 - DNA, 122 bp, Homo sapiens
gtaattgtgaggcctccccagccatgtggaactgtgagtcaatgcattagtctgttttcacgctgataaagacatacacgagactgggtaatttacaaaagaaagaagtttatgggacttac

SEQ ID NO: 12658 - DNA, 122 bp, Homo sapiens
cagacccctaagttccaagggctttgcaaaatcggcttctgttgtgaatgtcatttgtatcgattgaatactgtagcctgaggcgtcttggagatgtggaattgaaaatagtttttgctttc

SEQ ID NO: 12659 - DNA, 122 bp, Homo sapiens
ttctgtacctgctccgagtgtgcttagcgatggcctggaaatccggcggcgccagccactcggagctaatccacaatctccgcagtaagtgccacctccgcccgttgtagggcagctggggc

SEQ ID NO: 12660 - DNA, 122 bp, Homo sapiens
gctgtgtggttacagatgctgtgtggttagagatgtttgtgctggagctgccctgactgtcggttctgagcttggagctctaattagtgcccgacggggcatctcacccaccacgggagggc

SEQ ID NO: 12661 - DNA, 122 bp, Homo sapiens
ggtgggcacagccaggaacagctgctgtgttcctcttaggcgtaggagaacaacccctctcgcccctacacctcctccggccctgcccgctgggcgctcagagcttctcgtccagctccagg

SEQ ID NO: 12662 - DNA, 122 bp, Homo sapiens
agaacattacagtaatttctgttacaggtccatgggcgcaggtccctgagcccacagcttcgcgggggtctggccgagcatgcgtcacaacctacgcggccaagagcagtgcgcacgcgcaa

SEQ ID NO: 12663 - DNA, 122 bp, Homo sapiens
gaaggaaactcgtgtccagctgagagcagcagtgagcttttgttcactcagggaaaagtccgtgttctttatcttatttgattaacattttttttctctttggcactaggtatctcgttaat

SEQ ID NO: 12664 - DNA, 122 bp, Homo sapiens
ggttacccctggggttgaattggaaaaggttcagagtatttaaaagaatggttttgttgtcggtgggacagtagaatggaaaactctaaaccactagaatttggaaatcatcatgcaagaaa

SEQ ID NO: 12665 - DNA, 122 bp, Homo sapiens
ctcttcgccgctgcactgagcttctcactgtctccgctctccaaaatgcctaacactctccgtctcagtgccttgactcaaggtatggctgtagccatcactgctgcctctcacccctgaaa

SEQ ID NO: 12666 - DNA, 122 bp, Homo sapiens
ggtatctgtggaggatcagttccaggacctcctgcagataccaaaacccaacccagataccgacgccttaagtccctgatataaaatggcatagtatttgcacataacctataaacatcttc

SEQ ID NO: 12667 - DNA, 122 bp, Homo sapiens
ggaccttcggtcaccttgcttgctcccgggtggcaagaacgctctcaggcagctcacctccgaaagcgcccccacaggctttccctgaggctggggctttacagaacctgcaatctccaggg

SEQ ID NO: 12668 - DNA, 122 bp, Homo sapiens
tgcttacgtggaggtgtggaggcagagacgcaggcgggaactggggctgcgcgcagcgttcgcgggccagcgtgagttccgggtgggcgtggggctccgcgccccgcactcactcggagccg

SEQ ID NO: 12669 - DNA, 122 bp, Homo sapiens
gcaggactgagggacctcaccaagagcacttactctaagcttattatccaaaggttgtctcgtggtatggatttttgaagaactcagcgtaaagagcaacatcttgtttataaaggtcttgg

SEQ ID NO: 12670 - DNA, 122 bp, Homo sapiens
tgttgtttccttcgggcgggtgggttggagaagaagtccacgcgggattcttcaaaacggcgtacagggggattctagggccccatggttacttctttggaccccccggaggcgctgtccag

SEQ ID NO: 12671 - DNA, 122 bp, Homo sapiens
tgagggtgaccacaggaggtggtccgtcagctccacatggagcaaaggcacagccagccacgcctatcacagcgtgtcacggatggtttcatcggcgcgtttaactctctcacatacatgat

SEQ ID NO: 12672 - DNA, 122 bp, Homo sapiens
cgggctccccttctccccttcttccgtgcctctcaattatccacggaataaagctgaagtcgtgctaagcattaaagattatttccagatgagcttcaactacctttccggccgccgttttc

SEQ ID NO: 12673 - DNA, 122 bp, Homo sapiens
tgggctctcgagcagcctacacacaggtgtgagagctcaccccgctccccaccaactcaccgcacattagtccccaagaaatgagagccatgagaatgggctttctctcctatcaggagcga

SEQ ID NO: 12674 - DNA, 122 bp, Homo sapiens
tccggcccgaagcaaggggacgtttgcgaggagggagaaatttaaacccccttcgctccgcgccacctgggagcactttggcgccgcagactcaggagccgacgccatctccaggacggcct

SEQ ID NO: 12675 - DNA, 122 bp, Homo sapiens
gtgctgttcccccaagttcccatggctggctccttctcatccttcagggttcagctccagcgtcccccactcaaagcatccttccctgaccaccctgtccggtagccgctcactcactctcc

SEQ ID NO: 12676 - DNA, 122 bp, Homo sapiens
gctgggggaagaggcggctggcggtgcaggaaatcctggcggcgcaggaaattccggcggcgcggcgaggggtggggggaggcaggcgcaggaggcgggcgaagaggagggcgcagagtagc

SEQ ID NO: 12677 - DNA, 122 bp, Homo sapiens
tttttgatgtgtgttatttacttctaggtattaagttttctcccccaagagtgccatccgcgaatttgtagtgtttgtattctcactagctctgttagccctgttaaccaagtgaaatctcc

SEQ ID NO: 12678 - DNA, 122 bp, Homo sapiens
gttcatcttgtacttgtggtctggctccaggcccgagatggtgaccccatcctcgtgtcccggcacccgcaccgccttgggctgcccgtccccattcttaaactggaccaagaaatggtcaa

SEQ ID NO: 12679 - DNA, 122 bp, Homo sapiens
ggaaaccagtcctagcaacaatagcacgtggaatttgaggggcttgagaaaggcagccctcgaggaattagcttgctaggtagccagatcatttggccagctgtggaaaccatgttagtgga

SEQ ID NO: 12680 - DNA, 122 bp, Homo sapiens
tgcagcgcccccgggaagtgctctggcgttagcattccagtaaaaggaccccagcatcaacgttcttcctgcagggctgggttctcagagaaagaaaacgtgatgcagcagaggatgggatt

SEQ ID NO: 12681 - DNA, 122 bp, Homo sapiens
gggaggctcccgcagcacgggggacgggtttcgcattaccttcaggaagggaatgacaaacggccgcagagggaagttggtggcctcctgaagcttggaatgaaactcctcgatcgtcaatg

SEQ ID NO: 12682 - DNA, 122 bp, Homo sapiens
ggaagacggccggccaaggtttctgcagtgaaggtctctttccttcctaaagagacaacccggggcttgaacgccggctgcactagcactgctaaatgatcttgggcaagttcctgatctcc

SEQ ID NO: 12683 - DNA, 122 bp, Homo sapiens
cagttaaatatctacgtcccattccaggaggtgggactgcaaatggtttaggcctttagacgtaatgtaggcaatcagatttctagtaggaggcatttctgtagaaacagaaaaaaataaat

SEQ ID NO: 12684 - DNA, 122 bp, Homo sapiens
tggcagtggacaaacacccttcctccagcattcttgatggagtctggaaaaccaaaggagcggctggttacttgagagttcaggagaaccaccccaagcccaggtacagtgtatctgagaaa

SEQ ID NO: 12685 - DNA, 122 bp, Homo sapiens
cttcatttcttctgcaagaggcaccctcccagggaaggccaggattctcagggcagaaaccggagcctgggacccctcatggtaaggctccccattgtgtggctgagcttgcattcaggctt

SEQ ID NO: 12686 - DNA, 122 bp, Homo sapiens
tccttatgctctacatagaggtgtgtgcacacgtgtgtgcctttcccctgtaaatacagtcgtttgcattttgcagaactgcattgtgagttgagtttgttttaatctccccaatcccttct

SEQ ID NO: 12687 - DNA, 122 bp, Homo sapiens
accggtcctggtacaagcaccagcattaaggacattccctctacttggttctaaaatctacggtggattttaggttctaaaagatgaagccaaatatagcaaggaagtcagacagggaagac

SEQ ID NO: 12688 - DNA, 122 bp, Homo sapiens
atattgcttgggtgatgggtgcacacaaatttcacaaatcaccactaaagaacttacttacgtaaccaaacaccagctgttccccaatatcctatggaaataaaaatttttttttagaaaaa

SEQ ID NO: 12689 - DNA, 122 bp, Homo sapiens
aacctaagagcttctccacagcaaaagaaactcttcagagtgaacaggcaacctacagaacggggtaaaatttttgcaatctacccttctgacaaaggtctaatatccagaatatagaagga

SEQ ID NO: 12690 - DNA, 122 bp, Homo sapiens
tcctctgccatcatttgatcctctacccgctaaaaagcgggttttccttctgggacttggcgcaagcgctcctaggccaggcgcgcgcttaggtctgagaccggccgaggagcaggggcgcc

SEQ ID NO: 12691 - DNA, 122 bp, Homo sapiens
agggaggcggcggctcgggcgcttgggtgatgggttcagtgcgaggctgccctccagatccgatcccgccgggcggatgcctggccgagctgagcacgcctggccagccggtgccccagagc

SEQ ID NO: 12692 - DNA, 122 bp, Homo sapiens
ctgccgccctctggcctagagatatgaaagagctgaatattcaggaacctgtagggaagtcgtaatagctgaaacttgtagtccaaaaaggggctcagtgagagaagagacaaaacggtgat

SEQ ID NO: 12693 - DNA, 122 bp, Homo sapiens
gaagatgaggaagtaggaggctgagaaatggaggaggagactgagaaaggaaagcatttgcgctaagtcctggacagctgggctaaggaattgttattcttcaagacagaggacacaaaaag

SEQ ID NO: 12694 - DNA, 122 bp, Homo sapiens
ttctgagactgaagttgttactgggtattttttaacagcgctgtcttaaaaaatagatagcgtgtctctgtggccccgtctattcttgcggccacacgaacgtgcgtgtgtgtgtgcagctt

SEQ ID NO: 12695 - DNA, 122 bp, Homo sapiens
tggaaaggaaaatcagaaaggcggcctaaggggccccacccccaggaacgctaagataggcggccaggggtgagcgggcagggccggccagcaggccctgaaagcagccgggccaccagcgc

SEQ ID NO: 12696 - DNA, 122 bp, Homo sapiens
cagcccctgcggcgggaagccgtgaacacaaggctgagtttgcgcctctgatttgcgccacgtgatgggacttgccggggcctccctgcccgtgaagaggctgtttttgctttgagtctgcg

SEQ ID NO: 12697 - DNA, 122 bp, Homo sapiens
ggaaaactacaacaggccccgctgggattcgaacccaggatctcctgtttactagacaggcgctttaaccagctaagccacggagccaccatgcctgcggtggtacaaatgagcatagaaaa

SEQ ID NO: 12698 - DNA, 122 bp, Homo sapiens
cacaggcgctccaggcgggcgatgagactgctctgctgggtgacgagctgcgccagctcgcggaacttgacgtccagctggtggaaccgggcggctgcgcgctgagcctcggcggacgcgtt

SEQ ID NO: 12699 - DNA, 122 bp, Homo sapiens
ctgcaggcggctggggtctcgtgctcctcggggcggcaggaaggtctcgcagcaggcgagcgccggggaggcctgccggggctcggcgctgcagaagacccgggaaagggtgtcctccttgg

SEQ ID NO: 12700 - DNA, 122 bp, Homo sapiens
agcgggcctggcgaactgtaggggccgggccacattcactcgctttgaaaaaggctgcagcgcacctaaaggaggcccggctggccagcttcctaaagcacagctcggtgggaacaaacagc

SEQ ID NO: 12701 - DNA, 122 bp, Homo sapiens
gtctgaagaatgtgtttgggggttttcctacctgccccaggtttttgcccttcttactgccgccgaatgccagtccttggtacatgcccgcagatcgattggcggcctgaccaggcgtctcc

SEQ ID NO: 12702 - DNA, 122 bp, Homo sapiens
ggggaagcgtcgggaggccgagcgtgccacctcctcgcagagccctagccccaaacttaccgtccacttcctggtttcagaagcttccgttttgcctgactcgcgatcgatctcttcttgca

SEQ ID NO: 12703 - DNA, 122 bp, Homo sapiens
ctccgccagctagccggcccatcccttatctcgttccgcggggcaaagatgaggagagaccgaccctctgctcgcttcttcagctttgaggagcagccaccgaggcagcctctcagatgcca

SEQ ID NO: 12704 - DNA, 122 bp, Homo sapiens
ggcgcccgctcctccaagtcagaatcccaattgttaaagcccaagaataaacagctgaagcggccgtcggggggccgggaggggggctgaggtctgcatcggctcagtgtggtgttgtcaag

SEQ ID NO: 12705 - DNA, 122 bp, Homo sapiens
ggcggtggccggggcctcggccatgttcgcggggctgcaggacctgggcgtggccaacggcgaggacctgaaggagaccctgaccaactgcacggagccgctcaaggccatcgagcagttcc

SEQ ID NO: 12706 - DNA, 122 bp, Homo sapiens
cgacgggaaacgtctctgaattaggtgttccgctcgcctcttgtgcggtgtggagctgcgcgccccccgccgaggcgggcccaggtacaggctgccggtgagggcgggcccggggcgtgcgg

SEQ ID NO: 12707 - DNA, 122 bp, Homo sapiens
cactcgaaccctcaaacacccacctcctcttcccccaaaacatccagtgggcgctcttcacgccccttcaggcgacatagacccagctgacaacgggacacacatgtcccctcatgtcctcg

SEQ ID NO: 12708 - DNA, 122 bp, Homo sapiens
cccactgcagactcatcttcctcgtccgagtacaggctctccagccgcagggccgagtgccgatccttgaccagctgggcctgaggacaattgcaggagatagccttggtcccataggaaaa

SEQ ID NO: 12709 - DNA, 122 bp, Homo sapiens
tgccttctctcttagggtggtcagcacaggtggaagcagggaggtactgggctgaggcttcggttgtcagtgctagcttgacagcagttaagaattttttttgttttgttttttaaaattta

SEQ ID NO: 12710 - DNA, 122 bp, Homo sapiens
gtgaactccaccctccggctttcttcccggacgccgcccgccgccctcctcgggagcgctcgtagagcaagcgctcttggagattttgaccatttttccaaaaagggaccctttattttttt

SEQ ID NO: 12711 - DNA, 122 bp, Homo sapiens
tccttgctgcatttgttgcctttgagaaacatctcttatttggggcatccccaggcaccccgcagctccagttctttctctgtgccgtacccccctcagaagtctactatggtgaaggtgtg

SEQ ID NO: 12712 - DNA, 122 bp, Homo sapiens
gagcacaagaagtggtatttctgtgcacactaatcctggcttggtgaacctggggttggccggagagcatgggtttgagccacctggtccactcatcctcagggtcccatccaccctcagag

SEQ ID NO: 12713 - DNA, 122 bp, Homo sapiens
aactctgaatggtgccacttagcaagtagcaatgtctctaattttctgtaaaagatgcaacgttggcaatccattttctagcaagagcaaagagaaaggaagaggccttcacaagttgcagt

SEQ ID NO: 12714 - DNA, 122 bp, Homo sapiens
gcctcggcctcccaaagtgctggaattacaggcgtgagccaccgcccccggccctggcaccgtatttcaaggccgaaaattcgcatcctcagtgccagcaattctcctcgtggtcaaagagg

SEQ ID NO: 12715 - DNA, 122 bp, Homo sapiens
gctcatagtccggcaggatgtccctgcggctattcacgtcctccagcgccatctccaccgcgggctggcaggcctggccccctggccagcccccgctcatgggaaacagtgccccgatgtac

SEQ ID NO: 12716 - DNA, 122 bp, Homo sapiens
agtgccagacagtgggtgcaggtcagtgggtgcacgcaccctgcgcgagccaaagcagggcgaagcattgcctcacttgggaagtgcaaggggtcagggagttccctttcctagtcaaagaa

SEQ ID NO: 12717 - DNA, 122 bp, Homo sapiens
aagttactgtttgaatcggcatcgagcttactggggcggggtcttcccatgatttccatccggtcttttgctttcgagtctcccactatgctcagtgccttctgttacaaaatatgcatcat

SEQ ID NO: 12718 - DNA, 122 bp, Homo sapiens
tgtaagagcgcgtgtgtgtctaatgaagtttgggagtcgcgcgcaggggcgcgtagggtgcgagacccggaggtccccatcccctgtcctctccgcggtcgccgcatccggggctccagccg

SEQ ID NO: 12719 - DNA, 122 bp, Homo sapiens
ttggagaaggggaagcagacctgtgtggatttagaggttgttggggatgtacagcctgtccggtgataccagaactatctccaaagctatgtatgtgcagtttcacagatggcccagtcttg

SEQ ID NO: 12720 - DNA, 122 bp, Homo sapiens
gtgggcggaccgaggtgggctgaaggtgcgcttcgcgggaggcgtgagcccgggacttcccgcgcccggaccccgcccagcgcctctacctgccttcctcccggcggccgcgcctcgggaga

SEQ ID NO: 12721 - DNA, 122 bp, Homo sapiens
aatccctagcatgtctaatagccatcaaagctgtggtaggaggcccggtgcagtggctcacgactgtaatctcagtactttgggaggctgaggcaggcagatcacttgaggccaggagttcg

SEQ ID NO: 12722 - DNA, 122 bp, Homo sapiens
ccttgaatataatctggagaggaaaatgcagaaatccctagagtgggaaatggcaggccccgttagggccaaagttaccatactgaaatcagggggattaagtgaatgcatgaatactggat

SEQ ID NO: 12723 - DNA, 122 bp, Homo sapiens
acaaatttcaccaaatctcccaatactgaaatctttatatgcaaataaattaaggccaagcgcagtggctcacacctgtaatcccagcactttgggaggcagaggcgggcagatcacctgag

SEQ ID NO: 12724 - DNA, 122 bp, Homo sapiens
cccaggccccacctttagcccagggagaggccctgttcaccttgagagagggcacacccacggatccggtccagtcctacctggagaagtgtgctgcttgggggcaggatggcctcagctca

SEQ ID NO: 12725 - DNA, 122 bp, Homo sapiens
ccaggaaggcgagcgagcccagccagcccagccagcccagccagcccggaggtaaggaaacggtgctcgggcagcagctctgctcggaaagaaggcacggcttctgctcttaagccaagtgg

SEQ ID NO: 12726 - DNA, 122 bp, Homo sapiens
tgcactgtgtggctcttcaggtgttcctaagacactgaacaaccaaacccatggactgaccggatatgaaattgacgtgggaggagatcaggcaggtgctggggctgcctggcgcaatgcac

SEQ ID NO: 12727 - DNA, 122 bp, Homo sapiens
tctcccagtgcctggagccctcctgcgccacgtgtgtcagatggccggagagcctctgctcgaatacctctttgatggggagctcaactttttaaaagccaccagttgcatcgtaagccaac

SEQ ID NO: 12728 - DNA, 122 bp, Homo sapiens
ctggagtaagcagcactccttttcttttatggggtggagggggtcctctggacaccacaacggtgtcacgttgaggaaaaagtggctgcttctcaaccagggcacaggcagaagggagaaaa

SEQ ID NO: 12729 - DNA, 122 bp, Homo sapiens
gtattaaacaggcagcgggataaacgcctctggagcccaggagagagagagctaaagatacgaatttgatcttcctatagaaaatatttgaaataagactgaatgagctcacccagggtgag

SEQ ID NO: 12730 - DNA, 122 bp, Homo sapiens
acccctgtaaccctggggactaggaggaagggggcagagagagttatgaccccgagagggcgcacagaccaagcgtgagctccacgcgggtcgacagacctccctgtgttccgttcctaatt

SEQ ID NO: 12731 - DNA, 122 bp, Homo sapiens
tcaaggcgcacgggcgtgttaggtgctccaacgggcacgggtgtgttgccaacagcccaccgcaggcccagcacccttggttccacggcagcctctgagtgtgagctcctctgaggccccgg

SEQ ID NO: 12732 - DNA, 122 bp, Homo sapiens
atatttgcttgtatttgcagaaattctataagaatacatgagtattgaatgttatacaaacgcaggcgaccatataatcttccattgaaatggaacggtttctagaatgaaagggaggatgt

SEQ ID NO: 12733 - DNA, 122 bp, Homo sapiens
gaaagtcccctggagctgctgagttccttcaagatttggtaagtctgcagatgaggcctgcgggtggagcgggcgcctaagctgcggatcactcctgcgggcgctcgctctctccacgccgc

SEQ ID NO: 12734 - DNA, 122 bp, Homo sapiens
gtttatgggcatttcttggagggctgggggaccacagtcaagttgaggtgatccccgctccggggacggagtaaggcaaggaggcgggatcggaatgttggaggcagaaccgcaagctccca

SEQ ID NO: 12735 - DNA, 122 bp, Homo sapiens
cccgctggtggccgtgtattacaccaaccgggccttgtgctacctgaagatgcagcagcacgagcaggccctggccgactgccggcgcgccctggagctggacgggcagtctgtgaaggcgc

SEQ ID NO: 12736 - DNA, 122 bp, Homo sapiens
ggggctgggcatctggccccatgtctttaactggatggcttggagagggcaaggggttgacgtggcaggggaaggggtcggcagaagatgctccagccacaccaggatcctctgctaactgg

SEQ ID NO: 12737 - DNA, 122 bp, Homo sapiens
ccggagcccaggccgcctctgcatctgaatagagccaagctgccttcaggatctcacctgcgtggctgtgccttcggccgcccggccgtgcagagctgcgggccccttccccaccgagaagc

SEQ ID NO: 12738 - DNA, 122 bp, Homo sapiens
ttaaccgaaagcgtgagagccacccgccggctgttatctggggctgaaggctgcggtaatcgatgggttatttttacgcggtaatagggccctgtgattgctctattaacctttagacctgt

SEQ ID NO: 12739 - DNA, 122 bp, Homo sapiens
ttttaaagatgattgtaggtagaagcattttatacctgcagaattgaatcctaattttgacgttggtatacaacaaagattagtagcaggcttgtaggtgatcttagtgctgtacatgatga

SEQ ID NO: 12740 - DNA, 122 bp, Homo sapiens
aggcgtccgcggagctgcagagctgcgcgcccgacggcggcggcgctgctctgccggccgcgctcgaacccgctcgtggtctgccaatcggagctgtcagggcccctccgcctgcggcctcg

SEQ ID NO: 12741 - DNA, 122 bp, Homo sapiens
gcctgagcctcccaccccctccatgggcccctgtgcggcccgagcctccccgatgagtgccgccccctgctccacggcgcccagtcccattgccaagcggtgagacaatcgctgagcggtga

SEQ ID NO: 12742 - DNA, 122 bp, Homo sapiens
atctgctgcacccaggctctttgcacgttgtcttcctggagtcctggggtgcagtggaagcgtgggtgacggcctcccatttctgagggggactgtgaggcaggacaggaaggcgatgatgt

SEQ ID NO: 12743 - DNA, 122 bp, Homo sapiens
tgcatagaatagaacagtgatgacatggtccaaagctgacttttcctaaaagaccctatccgacaggcaaaagtgacttaaacactttaccccgtgtgttcatctgtttcagcaaaaggttc

SEQ ID NO: 12744 - DNA, 122 bp, Homo sapiens
ttctccgacaccgaatctggtgttgttcttgaatgtataaaggcatgaaatcccccttaccgtcatcatcattgtcatcatcatcaccatcgtcattatctagtgctaatataataactatt

SEQ ID NO: 12745 - DNA, 122 bp, Homo sapiens
tgtcctcaacatgtgttggtatcatgtgttttgcaggtattcgggtaaaaaaaaatgatacgggctctaccaataagtattggaatccatgagctttagcttaaccagttttctagtttaga

SEQ ID NO: 12746 - DNA, 122 bp, Homo sapiens
atgtttaaaaccctgtcaagtgtgacacctgggtatctcaaaaagcttgcccagatctgtcgctcagtaaggtgattgacatgttaagttacacctcacatagagaaaactgaggcacagag

SEQ ID NO: 12747 - DNA, 122 bp, Homo sapiens
taagatgtcttacaatttatagtaatcctgctgcaagcacaatactaaatccctgaaaatcgctttggtggaaaatttggagttgaggaatgttagacattaggatatcggctcttaattct

SEQ ID NO: 12748 - DNA, 122 bp, Homo sapiens
ggccgaaacacgggggaaatgctccagggctccaggagaagccgtctgtgcgtgcagccccggtgggatgtaggctggagacagccctgagtcaggaagtccggcgaggccatctgggtcca

SEQ ID NO: 12749 - DNA, 122 bp, Homo sapiens
aacactttagcccaggagttcgagatcagcctgggcaacatagtgagacactcgtctctacgaaaaattaactagacatagcgacgggcactgtggtcccagctgctcgggggattggggca

SEQ ID NO: 12750 - DNA, 122 bp, Homo sapiens
tcttctttccatcacgtcccctctctccccatggcctcctcaccccccgactcccacccgcgtccttgtctctggccacagaactccatccggcacaacctgtcgctgcacacccgtttcat

SEQ ID NO: 12751 - DNA, 122 bp, Homo sapiens
gcggtggagtacttcctccacgctatcaagtgtgagtcacacgaggggtcctcaggctgccgcactccagaggggagcggaggagagggggtggcgcacgagcctcacaggggcccctctgt

SEQ ID NO: 12752 - DNA, 122 bp, Homo sapiens
gatggaggcgctggctgcggagaccaacttgctcctggcccagaagcaacggctggagcgcgccctggacgccacagaggtgcccttctccatcaccactgacaacctgcagtgccgtgagc

SEQ ID NO: 12753 - DNA, 122 bp, Homo sapiens
tctctaagtataataccgagcctgatgcaatctacttcatcttttgttctggctctatttcgaaagtacctttgtactcctgtgttcctgcataacaatagctgatagttcctgctcacttg

SEQ ID NO: 12754 - DNA, 122 bp, Homo sapiens
cgcgccgagggggatgggggagaagcgcgctttggagagaagggtggcttctctgcggtccgggggaagcctgtttccccagctgcgcctgaggaacccagatagtcaacggttgggactgg

SEQ ID NO: 12755 - DNA, 122 bp, Homo sapiens
gggaggggtggggaagcagagaggtcggcagcccggggcctgcaggtctttttctcccgacgccggcccgcacctgctcatctttcccatcccacctgggcgcctggctagcgcatcccgga

SEQ ID NO: 12756 - DNA, 122 bp, Homo sapiens
actcctccctccgtccacctgtcacttcgggtagctgggaggccaggtgaggggcgcgcacgggggaggggcgtgcatagttgagacagaaacccggaagacccaactgtggcgcggcactg

SEQ ID NO: 12757 - DNA, 122 bp, Homo sapiens
agacgccatttgcaagctgcttccggtggctccggaaatgaaactgttcttaaaccctaccggctaaaacgcctacactcaaaatgagttccgcggaactcagacgaggagatctgcgcagt

SEQ ID NO: 12758 - DNA, 122 bp, Homo sapiens
tggcccatgtcactggcctgttcctgctgtaagtttcataacactgctgctagcataaaccgcttgggtatcagattgtgtctgcatttatctttgacacaaatcataccgaaggggagaag

SEQ ID NO: 12759 - DNA, 122 bp, Homo sapiens
aagttacactgcctctgagctgccttctctacatcgcagtggggtcagcttctaccggggcggcgtcccggggtcttggaactgcatgcagactgcctgcttgggaaacatacttctttata

SEQ ID NO: 12760 - DNA, 122 bp, Homo sapiens
gggggcccccgaggcccgcaccctcgccccgcccctcccgggggccggcgcgccccccctcgccccaaggggggctctgcatgcggcgaccactcacccagccccagagggccggccgggac

SEQ ID NO: 12761 - DNA, 122 bp, Homo sapiens
gagtgcccactggctgctgggtagcgcaggccgggcacaccacctccaagggtgtgcagacgcgctcccagacaagcatgttcaagccaggactgattctgtgggccccgtgtcctctccgg

SEQ ID NO: 12762 - DNA, 122 bp, Homo sapiens
gcagagaagacgccctggcaggaaggcctgtcccacctgtgggtcctggattcagcctcccgccccactcccacttactcggaacagggactttcccatgtggattcgtatgaccctacttt

SEQ ID NO: 12763 - DNA, 122 bp, Homo sapiens
gctggaatgtgaactaaggtctgtctcgcttcaaaatctgcattcttaacacctatgatgcgtgacctaacctggggcctggcgtttagtaggacctcagtgaatggtttctaagtgagctg

SEQ ID NO: 12764 - DNA, 122 bp, Homo sapiens
agtgacacagaaaaaacaagaggaagagagaaacaaatagaaatccatactggaaaaaaacgcaccgaaatgtatataaaatgtatctcctaaggagatgcaatttgtatgtccatttattt

SEQ ID NO: 12765 - DNA, 122 bp, Homo sapiens
ctgtcgcaggttagtttgttgtaaaactgttggtcaatgacgttgcccttttaattgcgtcgttagcgaccgagtggcatcgcccctttaaggccggtggcagctgcggttccgggggcggg

SEQ ID NO: 12766 - DNA, 122 bp, Homo sapiens
ctgtgagcaagagctgcctgcccactggcgggctccgaccactccgggaccaggaacctacggtctaacgccgggatggccacttggttctgcttcaactgcagccccaggggatgtggctg

SEQ ID NO: 12767 - DNA, 122 bp, Homo sapiens
cgcggggacggcgccgctccggccgctgggggtcccgggcccatcgcggcgccgggcccgcgccccccacccccgggctccgcggagggtaccctggccaggccttcttgggtgccgtgggg

SEQ ID NO: 12768 - DNA, 122 bp, Homo sapiens
ttctcttttctttgtgaagggcagggcgccctggaatgggttcgccccgagagaggggcccgtgccttggaaagcgtcgcggttctggcggcatccggtgagctctcgctggcccttgaaaa

SEQ ID NO: 12769 - DNA, 122 bp, Homo sapiens
ctaatctacttaacatttcctctttgcaaattagctgaaaaatgtgtatacaaatacatacgtttacaatggcttcaaacagccaacataagagaaaatataatctgaaagacaaatagagt

SEQ ID NO: 12770 - DNA, 122 bp, Homo sapiens
ctccctcacttttttggtaggaggccttgatgtgcagacgcgatggggcaacgatgagaccgaataaacaattgacatctaaccccagaagaagagcaaggacctgggacccagaaggaaga

SEQ ID NO: 12771 - DNA, 122 bp, Homo sapiens
gccttcctgccagctctggtgggcagccgcaggcaccgtgtggccttggatgatgaaactcggggcgatgactgcaccatccagcagcctgcgtcctcgcaggtgcgggcagtgagggcggt

SEQ ID NO: 12772 - DNA, 122 bp, Homo sapiens
gggcctacatcgtacagcagagcactgaggttcagagaggcatcagacacccagctccatcggctggaaaagcctaggcatctccactccagagggcaacaggcagtaggcctggtgaccac

SEQ ID NO: 12773 - DNA, 122 bp, Homo sapiens
cggcagggaacctgaccccacggggtccaggccaggcgggggatccgcgtgcgcgccctccgattctcgcacagtaagcgtcggttctgcaacacacttcacaaaggaacaagatacaaaca

SEQ ID NO: 12774 - DNA, 122 bp, Homo sapiens
cctcgcgaagccgcctctgcagctgtccctgctgctgccgcatgagctgcacgttccgctcgagctcctgcagtcgcttctcactctgggccgacagtgacaccagccgctccgtagcctgc

SEQ ID NO: 12775 - DNA, 122 bp, Homo sapiens
ggcaaaatgtgggctgcctctgtcggggcagaagtgccccactctagacccttaccaagtcgtcggctgtacatcgaaaacgggtgagccttatgtgtgtacgtgataccgcaataaacctg

SEQ ID NO: 12776 - DNA, 122 bp, Homo sapiens
tctctccatcccctctgtgcttgctgaccctcgccctcctgcctcacctgggcacccatccgtagccaagcctccagaacccttcctggtccctgtcgaagcagtccttcctctcacccacc

SEQ ID NO: 12777 - DNA, 122 bp, Homo sapiens
catttgagcaggtgaggcagctggctgccatcttcctttttaaatctctcctgggaagttcgcttgttgagactcaaagagtcactcaaactcataattgcgtgtgtgtgtctactcattct

SEQ ID NO: 12778 - DNA, 122 bp, Homo sapiens
gttagctgcgcctcggattgatctgcgtcgtgcctcgataggcagtaaccttcatcgctgcggttgcgtagcgtttacccatgcgccatttgaacttgtgcttaagggatttatctttgcct

SEQ ID NO: 12779 - DNA, 122 bp, Homo sapiens
gctttgcgtgtgtcctgtggtgaccggaggccccagtcctgccgggagccccagggagcgcgctgtggcctctccgctgagcagtgaggctggagggctcctacgtcctcccatgactgaac

SEQ ID NO: 12780 - DNA, 122 bp, Homo sapiens
taggttcactccttcaggatgtgggtttcagggggcgttttgatgtgatttaattccgaccgtgaaaacaattgctaggggctggctggattgctgttggtttttcccctcctggtggcttt

SEQ ID NO: 12781 - DNA, 122 bp, Homo sapiens
ctgttgtatagtgtcgacctggttggtggtggggtggtgtgttggcaaagggggcgggaccgccttccagcgcacatgcgcatcatggtctccaggacgaagcttttgttgggaaagcaggc

SEQ ID NO: 12782 - DNA, 122 bp, Homo sapiens
cttcccgcccatcgcactggtcctgcagagatagctgtccccttggggccccggggctcccgctggcgcatctgtctgaccaaccaccagcaggcgtgtgttcaaaggaccattttcaaaga

SEQ ID NO: 12783 - DNA, 122 bp, Homo sapiens
aacacctgctgcgtttcccatggagtgcagtgggcttgtgcttagacccagcgggggctccgtgtgcctctctccctccctccccagagggagccactgtccgaagctggagctttcttttc

SEQ ID NO: 12784 - DNA, 122 bp, Homo sapiens
agccgtgagctaccatgttaaaaggccaacttcctaaggaaaaatgatggaaagagatcccgagatcctatgaaatggaagagggaggacaacccagctatcccaacatcccagctgaggcc

SEQ ID NO: 12785 - DNA, 122 bp, Homo sapiens
aggctgggtaatttttattgtaggatggtcccgtgccctgtttagaatcacaaacaggttcgttcacagccattgggggtgacccttcccagtctttgcacagaggtcataagaggcagagg

SEQ ID NO: 12786 - DNA, 122 bp, Homo sapiens
aacacatcagggctttcccccgattcggtctccctggaactttcatcccttagatcttcacgactgtctacttattttgttgtctcagctgaatgtcactttctcaggtggagctccctaac

SEQ ID NO: 12787 - DNA, 122 bp, Homo sapiens
tgccagctcactttaagagcagctttgtgaaaaacaaccccagtgcgcaggcgcaggccgcggctgctgtccgccctccctgcgcgccccctcccgcgccgcgccgcgccgcgctcgctccc

SEQ ID NO: 12788 - DNA, 122 bp, Homo sapiens
ggattcgaggcctgatgcctctgcctggtgcaggagggatgttgtgctgagggtgttccccgtgctttggatgtaaaatttgggcatggagtttgtggtgtcttcagaggcagtcccgcctg

SEQ ID NO: 12789 - DNA, 122 bp, Homo sapiens
aaaactgacataagatgtattaacaagagaaaaggatacagattttatttactatttttacgtgtacacaggagtctgcaagaggaaaatgaagacctgaagaagcgttgggcccaaaagct

SEQ ID NO: 12790 - DNA, 122 bp, Homo sapiens
tgggcggagtcacgttgggggcgcccaggccacgccaacgcgggcgcagggctgagtatgcgggaagccacgcagcgactgggcgtactcctaagcttctggaaaggcattctcacgccctg

SEQ ID NO: 12791 - DNA, 122 bp, Homo sapiens
ccccgcaccccgaggcagagttgggaaagcagtggtcttagaccccccacctcgggcactcggaagagaacggcggagacaacccctcctcttccctggctggcgcagcgccagcctcgagc

SEQ ID NO: 12792 - DNA, 122 bp, Homo sapiens
aataatctggttggttctactggacttgtgatactggacaaacctctatgtccaagagctcgagtcattcccattggctcacctgggccacacactcttcgttgagtgcatcccaggatcac

SEQ ID NO: 12793 - DNA, 122 bp, Homo sapiens
actatgtatcaatgtaaacaggaacgtatcctccgcctctgcatctctggtgaatccgggcgatacgtggtgagacaccttaataaacacctagatagaccctgccgtggtgagcacctgcc

SEQ ID NO: 12794 - DNA, 122 bp, Homo sapiens
ccaaggccataggaggctggggcgcgttcggagtgcgttttttcgagacaatctccgtagcgctcacccctggccaccccgacccgcgctcctacctcgaggctgcggcgggctccgggcac

SEQ ID NO: 12795 - DNA, 122 bp, Homo sapiens
gtcccctttttcttacctgatgcagtggtcaggaccagggctgaaactccaagtactggacgccgggatgattcctaggcaataaactgtaactgtttttaaactttgttggaattcctaag

SEQ ID NO: 12796 - DNA, 122 bp, Homo sapiens
aacaacacaagatcttgacattagttcaatatgactaagcacttgggacaaaagatgacccgaaagatgatcctttcagttacacagtctataaatttacctgtaatacctaaagtcagttg

SEQ ID NO: 12797 - DNA, 122 bp, Homo sapiens
tgggtggtgtgtgtggatgtctggggggtgtgggggcgtccgcgggtatctgggggcttccgcgggggtgtgggggctcacgcgggtatctgggggcgtctgcgggggtgtgggggctcccg

SEQ ID NO: 12798 - DNA, 122 bp, Homo sapiens
cctcccagcgaggccaccgcatacacgcctccacatcccaggcctacagctgctatcccacgcaccctcccccgcaccccgaaggcgaccagcgcctggatgctgcctctctgcctccacac

SEQ ID NO: 12799 - DNA, 122 bp, Homo sapiens
tgagtggggggccagaggcttccgcgcggggtcacacccccaccgccgtgcaagttgcagcgcggccagagccgggccaagtttcccaaagcccgtgtctccgcagcaaagtctgcaagaag

SEQ ID NO: 12800 - DNA, 122 bp, Homo sapiens
ctctcccaggacccgcctggctgcgagatatgtaagccgcgatacttccgcgaccgcgctcgtcttggtttccgtggttgttgctggggcaacagcaggctcctcccctagctttgtactcg

SEQ ID NO: 12801 - DNA, 122 bp, Homo sapiens
tgggggtagggttggagttgtgagctgggcatggctttaaagttcaagatttagaattttcgatataaggtggcttttctcagaaaaataaagagagaaggaagcaatgttgaaatgacagt

SEQ ID NO: 12802 - DNA, 122 bp, Homo sapiens
cgccaggtcagcacccgccgcgcgcacagcagggccgggtggaaggaggccgggcctggccgtggctcaggcgccacctcactggggaaactgggaggtggtctcagcccccttctgggcct

SEQ ID NO: 12803 - DNA, 122 bp, Homo sapiens
atccgtcagctcggattcctagggctctgaaaaatgcactttccgaccgctaggtggttgcgctccgcatctctcggttgccaggtaaccgcctccccgtctctctccactgtttccatgga

SEQ ID NO: 12804 - DNA, 122 bp, Homo sapiens
ggtggtttaaccctatttggtgaaaaagaatcaaagctgtgaagcaagatgtacaaataccggtaagttctccacataggagggcaaactgcacatatttatgactaatagcagcacagtct

SEQ ID NO: 12805 - DNA, 122 bp, Homo sapiens
tgtcacaattgatgagccaggattgatgtgttagtgactaaagccatccttcatccttcacgtcaggggtcacgcttggcatggtccaccctgtgggtttggacgagtgtttaatggtgtgg

SEQ ID NO: 12806 - DNA, 122 bp, Homo sapiens
gtaataacaacagctcaccctacatagctcttaatcatatgtcaggcagtgcactaaacacgttacatgtactaactcatgtgattctcacaacaatcctatgaggtcaaaacttgttttta

SEQ ID NO: 12807 - DNA, 122 bp, Homo sapiens
aaaaattagtgaaaaaattaaggctcaagtccaggtctttgctgtaaccacgagcgccggcggcgcgcgcccccgaccccgcggcgccggctgagcccgcagggacccacacgcccagtgca

SEQ ID NO: 12808 - DNA, 122 bp, Homo sapiens
ccacaaaagggagcggagcacaatcccaacaccagcaccggattttcaacacagcaagaacgatggcaacagtgacacctcaggggccagctgcctgcccagagctcaacaaagtcagggcg

SEQ ID NO: 12809 - DNA, 122 bp, Homo sapiens
cactaatgccgacatgggaaccactgtaactgacattccacttgcagacatgctagggtacgctctaccggctagggagggagggtttctgtgggccagacccagtcagccaaccttaggaa

SEQ ID NO: 12810 - DNA, 122 bp, Homo sapiens
gggaacagagaggactatgctgagggcccgccctgctggtcaactgttctcctccagactcggggtttcagggaccttccagagccaatggcacaggacgggggaaggggtgggcactgaat

SEQ ID NO: 12811 - DNA, 122 bp, Homo sapiens
gacaagccgaaggagaggctgtggaccccgacttgggacgccgcgagagcagggctgatgcggggcctgggccgcagcgccctctgctggctacccccaggggcgggcccgggcttcgagga

SEQ ID NO: 12812 - DNA, 122 bp, Homo sapiens
agcagacttcacttgagaaaacattctttctcaggattccagtcacaacctgcaattgtgcggcaaagtgcagcaaagtatttcctaaatctgcaaacagaatggtctctctcttggcatct

SEQ ID NO: 12813 - DNA, 122 bp, Homo sapiens
gtgtatgtgggtttttattttgtttttggtgtctgtcactggccctttaaagtagtggtacgactatctataaagatgtagccaacaatggggtcttctacaatagggagtaaacaatgccc

SEQ ID NO: 12814 - DNA, 122 bp, Homo sapiens
agggggcagcgcgctgctggctctgtgcggggcactggctgcctgcgggtggctcctgggcgccgaagcccaggagcccggggcgcccgcggcgggcatgaggcggcgccggcggctgcagc

SEQ ID NO: 12815 - DNA, 122 bp, Homo sapiens
tttaacaaaataaaacactcataataacattaaataaaaacaccaggacacaaaactgtacgtgtgtatacaggacctcatttatgttaaaaataaagattagaaacaaaactggaagattt

SEQ ID NO: 12816 - DNA, 122 bp, Homo sapiens
cgcttttaactgcttgtggttgagtggcagcatgagcgagctctgcgtattccaacccggcgttaagaatccttcactagcttttcttcccgacgctgcttatttatctatcggtagcatga

SEQ ID NO: 12817 - DNA, 122 bp, Homo sapiens
gcctccatcctgaaggcggtgccctcctcggcactcgcacacaccaaggcctgtgctgcccgacccaagccacaggaaccctgccgcagcctctatggcacccggtaggtcagcgagccctc

SEQ ID NO: 12818 - DNA, 122 bp, Homo sapiens
ctccctggaggggcggtcatcaggggacgccatgcaggctggaacccctttgggcccaggcgttaaaccagccaccgcctccgccccacttcctccggctccgcttccctcgccttcccgct

SEQ ID NO: 12819 - DNA, 122 bp, Homo sapiens
tatgcctcaactccttcatactagtaggaaattattatgttcattccttgagtctcgcggcgtcgggaggtcacggcgtcaggcttcccagacagtcgtaaacgccatgtgtttacgcgact

SEQ ID NO: 12820 - DNA, 122 bp, Homo sapiens
agcagtcctgtatggagaccttggaccagcaggggaagatctatgggcatgggaggtgggcgttggaaaggctgagtaggaatggtgcctggcacccctgaaccatgatctgagcctccctg

SEQ ID NO: 12821 - DNA, 122 bp, Homo sapiens
atggggaaggacagctgttatcagtgctgtgagaagacggcctgagggcagcaacagccccgggggggctctgagtaaagcttcaggaataagtgacttctgagctgacgcttgcagattct

SEQ ID NO: 12822 - DNA, 122 bp, Homo sapiens
ggatcacctggtttaattattaggacacacctactatccccaaatgcctatcctgggttacgttttaatttattctttgggcttttttatttttattttttgtatccaaccatccattgtct

SEQ ID NO: 12823 - DNA, 122 bp, Homo sapiens
ctctccacccagtttaattggcttgcttttggccttgtaagatttctcatctgcgatgtgcgtatgcaaccacagcaagcctccctcagatgcattctgctgtgggtcacgtcacagacacg

SEQ ID NO: 12824 - DNA, 122 bp, Homo sapiens
ctaagccacctcacgggaaacgccagcgcgggctgcaagctgtgccgctgtgtgaaggcacggtcctgagcctgctatctgcagtggatcagcttcatgccattagtgaagaaaccatagca

SEQ ID NO: 12825 - DNA, 122 bp, Homo sapiens
gagagccgctctgagcaccgggggatgtgactgcctcagcggcagagctggaagggccctcgaatgccattcacaggaacagcccaggaacccagggacttcagaagggctggtttgtccga

SEQ ID NO: 12826 - DNA, 122 bp, Homo sapiens
gctcggctgtgaggtcctcccccagtgagatgaacacacgccctgagcctaagggtctcacgtctcccacacacgtggaacacaaacttctctggtggaatggtgacaggagtagcctctga

SEQ ID NO: 12827 - DNA, 122 bp, Homo sapiens
ataataataatagcaagcagagaggcttgtgaagactcatcaaatccgtcctcctgtcgccggtggcctggactctatagagaagtcatcctaaaaatcgggatcgccgtggggaggggagt

SEQ ID NO: 12828 - DNA, 122 bp, Homo sapiens
tagactcggatccagacggggaaggcgcagcatctcttgcagctgcagagagattgccaccgcaaactggagccatgtggttcgaataaagtcaacgtctcccagcttcctttccttaatcg

SEQ ID NO: 12829 - DNA, 122 bp, Homo sapiens
ttgaagaagatgcagactcccccgagcctgccaccctgcccaggtgagctggagtggggccgtggatccagccttctgagcagcatccccggcttgagttggaataagggcgtcgtgcctgt

SEQ ID NO: 12830 - DNA, 122 bp, Homo sapiens
tcgcaggccctttatcttttccttgctgtatgttaaatattcgggtaagattctgggttccgggcatggattctttaatccccttcatgattaactccccaaggtcctgcatattttctcaa

SEQ ID NO: 12831 - DNA, 122 bp, Homo sapiens
acagttttacccagggagatccatttgggaagattctgccttcagctaccaagcagaacacgaatgaggggctctgcagtgtccagcacggctgcaccagggctaggccttgcatgggggct

SEQ ID NO: 12832 - DNA, 122 bp, Homo sapiens
tcagagcctcatctcccggctctgccttcaccatggccgtcaccacagccgcctgctcctcggccaggtcccctactggctctggggcagcctcccagttccccgctgccccagcctgtgtg

SEQ ID NO: 12833 - DNA, 122 bp, Homo sapiens
gaaccccggcgtgcgtgggccgtgggccctcggggaaaggttccgtgcactcggggactccggtgaagcctgttcagccgtctgtgtcatgtggccatcttgagtctactctgtcgctcttg

SEQ ID NO: 12834 - DNA, 122 bp, Homo sapiens
taacaggactcagggccgcggctggcgggcaccccttacctgggaccacaccgttggtagcgatcgcactcatggaaatggcggtcagcattgtctgcaaaaagacaggcagccatctgagg

SEQ ID NO: 12835 - DNA, 122 bp, Homo sapiens
gccccactcccgagagggcgcagacacgtgtcctctggcaaaggggacttcttcagctgccgagggaggggaaggaggccctgacgaggcctgggcacgccgggagggacgctgggagcagg

SEQ ID NO: 12836 - DNA, 122 bp, Homo sapiens
tcctctctgattggtcagctaagtgcgcatgcgcatgcgggtgaaggaccttgggggccacgacccctgctgacacgccttccctctttccgtaagggaccacccatatttgctgtggactg

SEQ ID NO: 12837 - DNA, 122 bp, Homo sapiens
aggctgccgccgctgggaggcggcctgggcgccaggaccagtgtgggtcgaggtttggagcggacccccggagctgcaaccgccagtgctgcagggggtgccgaggatggggcctgccgctg

SEQ ID NO: 12838 - DNA, 122 bp, Homo sapiens
ccgctgcccctgggcagtgggctcggtaccgccacgcacccgtcctatgtgttacctggtcgctgctcactggagtgaaagccatttagtggctgatccaagggaagtatgagctagtggca

SEQ ID NO: 12839 - DNA, 122 bp, Homo sapiens
atctggcttttgttacactcctgctcagaagccagtgtgggcttcctgtgtggcttggaccgggaccacacaatctgccccacccagtagttatctcggaaagactaattcccaagctgtct

SEQ ID NO: 12840 - DNA, 122 bp, Homo sapiens
ttttatctgtaagtagagttggaattttcttctgtatcttcagcttcacatttccaaaatcggatcccttatcattcttggaaagtcttccaaaggctgtgtagtggttcacacctgtaatc

SEQ ID NO: 12841 - DNA, 122 bp, Homo sapiens
gtcagacaacatatgacaataaagtaggcataaaatatcaggaaaacaaatgtgcccctgcgtctgcactggatgcaaatgcacaaatggctgaactttaaaagcttccatgttcctaacaa

SEQ ID NO: 12842 - DNA, 122 bp, Homo sapiens
acatgccagcagtaccccttccctgccctgccgccacagctatgatacacaaaatgtctccggtcattgcaaaatagccaccagggcaaatctgtccctggttgagagccacggctttaata

SEQ ID NO: 12843 - DNA, 122 bp, Homo sapiens
cacacatctgcaaatatcattgctgaaaagaaatcattgcattaagtgctatagttaaagcgtataaacccaacactgaacacaaaggagggaaggactgggtctgacctggagagcagcag

SEQ ID NO: 12844 - DNA, 122 bp, Homo sapiens
ccaggcgccgccttggcagcagaaggtgacatctggtgactaatggccgcggctgcgcgccgcgctcctccctcccgcagcgcccggggcgcagctgccgcgccgcctcctccccactcttc

SEQ ID NO: 12845 - DNA, 122 bp, Homo sapiens
actcgagcgccccacccgcgcctgacctccccgagcccctccccgggccccgccccttcccggtacaggacccccaccttcgctcctgggagccccgctgcaccccaggagttccattccag

SEQ ID NO: 12846 - DNA, 122 bp, Homo sapiens
agaacccagaagcttcacgcctgcccgttgccacgcgaggtgtggtgtaagcaaggccggcgttggtggctaagccagaagctcagttcccatcaagaatgggtgtgtgttgggtcctcatt

SEQ ID NO: 12847 - DNA, 122 bp, Homo sapiens
atcacgaaacagctttcttggctgacagcacataaaccaaaacagtagatgtgctggttccggctgctgagggccagggtctgcagacctgccctgtgaagcttacgtggcctgccagactt

SEQ ID NO: 12848 - DNA, 122 bp, Homo sapiens
cgtcacgtggccgctttttaatgctgaaaaatcactctggctgcagggagtggaggctgtcgcccagagagagcgccgtcgggtgagaggagcagaaagccggaagccaacgctggggcagc

SEQ ID NO: 12849 - DNA, 122 bp, Homo sapiens
aagacagggaagaaaaagaatgtgctggcgtgttagacagtaatgcataccctggaacaccgagtgtgcagaaacgagaggacgcaggagtaagattgcacagatcttactcctgtgagata

SEQ ID NO: 12850 - DNA, 122 bp, Homo sapiens
ccaggctcctccgagtgccgggagccccagcggacgtcagaaaaccggagaggcaatccccgtccagtagccacgaaccagcctcatcgtcggagtcagagtgggggctctggccgtgggta

SEQ ID NO: 12851 - DNA, 122 bp, Homo sapiens
cggaccgtcgggggtggctcggcgtgctctgcaggtgagctggtgaagaagtgtttgtcacggcctgtgcacagctgtacaggttaccaaacgaggattgctctcaataacaactttcgata

SEQ ID NO: 12852 - DNA, 122 bp, Homo sapiens
ctgagcccccaggccctcccgcatctcaggttggggatggggacatggagaggaaggggccgcctactcctgcaaatgcttgtgacagatgccaggaggtagatgtgtgctggccaataaag

SEQ ID NO: 12853 - DNA, 122 bp, Homo sapiens
gcaccctgagaagctcctcagatggcgagaacagcgttcactaccagggaaagatggacacggccaacatacttggtaaaaactgcagaggagaacatacgtggtcacaagcacgtgcccgc

SEQ ID NO: 12854 - DNA, 122 bp, Homo sapiens
cggacaccgtaagtggtggtgccgcagcgacgtctgggaaatgaagtccggagggacaaacgctgcggttcagccagggaaacccgtcggctctccggcgcgcaggcgcagttgcgcccggc

SEQ ID NO: 12855 - DNA, 122 bp, Homo sapiens
taacaactctcaaggtcaacgcttctggtgatttacatatcactgtcatgaaaacaaccacgtgcagagagaagtacacggacttccaaaatccaataatgagtgtcaggccttacccaaag

SEQ ID NO: 12856 - DNA, 122 bp, Homo sapiens
acattagtaaatataccctttttatccctctcaagtactagtatagttacgttagtcactcgacccaaaccttaataggctgccaaaacgttttcataaacgaaatgaaatggaaataaaac

SEQ ID NO: 12857 - DNA, 122 bp, Homo sapiens
cacacagtactatagggtacacagtgaaaactaagactctctgctgtcctagacaaagttcgtctcccttagcaatcattaatattcattaacattttcttgtgactccttccagacataac

SEQ ID NO: 12858 - DNA, 122 bp, Homo sapiens
ttcgaaagctgaaagcgatttaagtctgcccccgcccccccccgccctccgccccgcccccgccctccgccccgcgtgtagggtcttgttgctctgttgcacaggctggaaggcagtagtgc

SEQ ID NO: 12859 - DNA, 122 bp, Homo sapiens
tgactggtgaggcccaaagccggtggccccgcagaggcgggagtggggccatggctgaggcgcctgggcccagtggcgaatcccgaggacactcagccactcagctgccagcggaaaaaact

SEQ ID NO: 12860 - DNA, 122 bp, Homo sapiens
acactctgaaataaaataggaaagtttgctctttaatacgattcccaactcctgctggggcgcaatatatccttttctggctttggggatcagaagtaccagcttctctcctggagccagac

SEQ ID NO: 12861 - DNA, 122 bp, Homo sapiens
gagcagaaccacatggttggcagagaaccaagatgcagctgctccgctgtgcctccccgacggagggaaacctgttacactggaaaagttatggaaaaaacaagagggagaacgagagggcc

SEQ ID NO: 12862 - DNA, 122 bp, Homo sapiens
agactgaagaaaacaaaaccaaaaccgcagcttccacacggcagggggtggtctccctcccgacagagcttgtttggcagctcacaggcccaggctccttccagcctaccgctccaccattc

SEQ ID NO: 12863 - DNA, 122 bp, Homo sapiens
aatactcaacacaacttctcagaactgtgaatgtgacacttcctgcaggcacccaaagaccgcctggtctcctgcaccaccgttctccagagccctctccacgggcgccagtgctcacacaa

SEQ ID NO: 12864 - DNA, 122 bp, Homo sapiens
ttccagacttcctcttaggtggccgtggagcagctggggacctacaggtacaaccccgggcggagacccagagcgagccttccctgcaaggatccaacgcagacccagatctgccccagacc

SEQ ID NO: 12865 - DNA, 122 bp, Homo sapiens
ggcgaggggcgctcccggccgcggcagcccctcagcctccgagccgacgatgcggtctctcggccactgacaacaggaagcggcgccccggcccctgacgccatcacgttggctcggcgctc

SEQ ID NO: 12866 - DNA, 122 bp, Homo sapiens
acaagcctgtcccacccggggagaatgccccggagtggcgtgcgggtcagccagggtctgcgcctcgcagccactgtggaaggagcgcggccggtccaggacacaggagaccactttgtgac

SEQ ID NO: 12867 - DNA, 122 bp, Homo sapiens
aggcctgatcggggcccttggagtcttggtcctgaacagcctcctgaaagtttacttcttcgtgggctgtgccaagtgagtgcccacctcatccccccagggaatgtggctgggggcacggg

SEQ ID NO: 12868 - DNA, 122 bp, Homo sapiens
gagtggtctcaagggggaaagagagagagcgcctctcaccgagtcaagcatattcgtccccggaaatgactccaagcaccgcctcttggccagcccctctgcgccgggccgtgagctctcct

SEQ ID NO: 12869 - DNA, 122 bp, Homo sapiens
ggaaatgtgactccatgtgctcactgttcaaatggattatgatttactgatgtttatcttcgttaaactcaaagatcagttccagcaatgttgccctcgtgcatctcttcaaggattggttt

SEQ ID NO: 12870 - DNA, 122 bp, Homo sapiens
gtctccacccactcctccatgagaaccgagttgggaatttccacgggaagtcgggggtggcggggagagacagggtagaaataaagagcgcatccttgagagggggtaggttctaggacaag

SEQ ID NO: 12871 - DNA, 122 bp, Homo sapiens
ataacgatctgggacgcgagctcaagtccctgttcccttgtcctccacagcagtgtgcagcgtggaactcggcggttcggggtccctgagtccctgagccactgtctaccccctgctccatc

SEQ ID NO: 12872 - DNA, 122 bp, Homo sapiens
caggatttgtttattgctttgataaagccacagcatttctcaagtgctctatgctgcaagcgtcaggaacacgctaggaaacccaaatgtttgctgacccactaactttttccaccaaagct

SEQ ID NO: 12873 - DNA, 122 bp, Homo sapiens
tgaccctctgactaaggatcaccgcagatacttaatcgccaagctgcccttgccttgggacggcacccaatcccaaagtaatctcttgctgctcctaaactggccacagccaagaacctcct

SEQ ID NO: 12874 - DNA, 122 bp, Homo sapiens
gggccgcagtgtgttctgcgcctgcccagagctgactcctgatttaaccgctggcgtaaccgcgggttgcacgcatgcgtgctgaaaagcctttcaccctcacgtggtttcttttttaacca

SEQ ID NO: 12875 - DNA, 122 bp, Homo sapiens
aagatccaatcccaccgcagagcggctcaagccggcgcccgggacccgcgggcctaggcgcgacccccagcagcctgtgaccgaagaggggagcccgggacccctccgcctctccgcagccc

SEQ ID NO: 12876 - DNA, 122 bp, Homo sapiens
ccaggcactggaagggctggagtctcccttttagccgatttcctgcttcccatggtctcgcggagctgttttagagtgcttgtctgaaatgacactatcacccaccgccaaaactgagacag

SEQ ID NO: 12877 - DNA, 122 bp, Homo sapiens
catggtgcaggctctaatccaatctggacccactatgagttaaaggagacactggctttccggggagccatgcacacagctagatgggtttctggggaactggaaatcgtggttccaccgcc

SEQ ID NO: 12878 - DNA, 122 bp, Homo sapiens
tacctttgattgtggcaaatcagaagatgaggtttgcaactgccaatcagcggaatgtaacgcaccccaagagctcccaggatcctaattagtatgtatgcccagtctctgccagggtgaag

SEQ ID NO: 12879 - DNA, 122 bp, Homo sapiens
ctgtgcgtgcgcctatggatgcgtgctttgtgtgtgcatgcccacgtatccatctgtgtgcgcgcccgcatgcccatgtgtgcacctgtatgcccgcccttcacgagcacctccacctacac

SEQ ID NO: 12880 - DNA, 122 bp, Homo sapiens
ccttccctcccccccgccgcccccccgccgccacagcacacacacccatttttctcctcccggcctttctgcaagcctctttgcttgcttcaattggccggaagaaccaacctgctggcagc

SEQ ID NO: 12881 - DNA, 122 bp, Homo sapiens
cacctcggggagacctcactacaaagtaagggagagtgtgtagggaggcaggaggagaaacgagaaaggccatagagaaacttagcagggaagggagagcatgatattaaacggcatggggt

SEQ ID NO: 12882 - DNA, 122 bp, Homo sapiens
gcaggaggaggcgggtggttcctgctaaagaagccagttttcttgaaaaaaagaaacgtgcggggaaacgtatccgacagcaaagaacttaccaaggactatgaacgtcttgctaacataga

SEQ ID NO: 12883 - DNA, 122 bp, Homo sapiens
aggcatccgtgttcccatcccaattgttctgtaaagcaggctggccctgggcccacagggcgtccctggttctcaccagcatcccccaccccacccagggatgcttctcactccctgaacgc

SEQ ID NO: 12884 - DNA, 122 bp, Homo sapiens
tttcctctcctccctcccagaagatagcctggcctttgtgttcccagccagcatgagggacgctttgtgtggctctgcaggaagtatccgttgccaggcacccagaagacacccctcctcct

SEQ ID NO: 12885 - DNA, 122 bp, Homo sapiens
catggccagagcgggcgccaacgctgaggaggcgcagagagcgagcgagggctgccagaacggtgtcacctctcagtcacaaataactacaaagcacatggagtctttgaacggcagctgag

SEQ ID NO: 12886 - DNA, 122 bp, Homo sapiens
gagatcgctcctgctgggactcttgtctaagaagttcctcaatggccacctgggaaaaaccgcccagcagctcgggttcccacgctccagggattatctagactcaccccaagctcgagccg

SEQ ID NO: 12887 - DNA, 122 bp, Homo sapiens
ctctcctgcctcggggttgtgtctgtagcaggctctcttgggcagcaggggtcaggagcacggagggcagacccaagacggaccaggcatctctggggaggcgacatcccctcccaccggca

SEQ ID NO: 12888 - DNA, 122 bp, Homo sapiens
taaataaatattaatggcaactcttgataaagaaattgtgactggttacagcacgctggtcgctgaaaagagatactagagggcagtaataaaacataggtaaagaaattaatttatcacac

SEQ ID NO: 12889 - DNA, 122 bp, Homo sapiens
gccagggcggcacctgtgcagacccagccacgtttagctgactgtgggcccgaaggaggccggccatggggcgtcggccgcctctgaaggaaccgatggcccacgcccacagtacctacccg

SEQ ID NO: 12890 - DNA, 122 bp, Homo sapiens
ggggcctgggagtaatagttttaaacgacgctagaatttttttttatcattaattgtaaacgtgcaaaatacctgctggtacttcactttagaagaatgtaattggcaaaaggaaaaaaagg

SEQ ID NO: 12891 - DNA, 122 bp, Homo sapiens
gagacaagcatatggttctgataggatcaaccaggtaggtagaaagcggcctctgggactcgcgaggatgagcccggcgtcccagttgcgagattgggcgcggcagggcgggcgatggggcg

SEQ ID NO: 12892 - DNA, 122 bp, Homo sapiens
gcagccccttaacggtccggtccgcgttcggaaccggcccggcgtcgcgaggggaatcggcgagccgagggcgcgggagcctctttactgcacactcatcctccgtcctcccgcccggctca

SEQ ID NO: 12893 - DNA, 122 bp, Homo sapiens
gggttttgttgtttttgttttgtgttttgttttgttttccttttccatatactacaggggcggtgtaagaactttcccgagccatcggaggcatcaacgggaatcactggaataataatatt

SEQ ID NO: 12894 - DNA, 122 bp, Homo sapiens
ttcagatgatccgcccgcctcggcctcccaaagtgctgggattacaggcgtgagcaaccgcgcccggcctagatttttgtcttcattcaagtggaagctcaaatgacagatgtcttcccaat

SEQ ID NO: 12895 - DNA, 122 bp, Homo sapiens
ggccccgaaggcgaacgactaagaaggagctgtcttctccgtcccacaggaaaagctctccgccgaggccaaagaccacgtttctcgtcagcaactgcggcggcggcgacgaaggcaacgac

SEQ ID NO: 12896 - DNA, 122 bp, Homo sapiens
gtgccaccgcgcccggcctagaggcaattttctatttctgacttgttaggctagtcagagcgagacgtctttacaggtttgggccggcagctggaaaaggcacacggccccgggctcctcct

SEQ ID NO: 12897 - DNA, 122 bp, Homo sapiens
agagaaagaaagagttggttagagttcgctcagctgggaggtgcacacggggtcttcctacgggactgccttagacgtgctgggctttggcctcagtgattcggatgggcgctgtccgcggt

SEQ ID NO: 12898 - DNA, 122 bp, Homo sapiens
gtaatgagagccaaaaaaagtgctataaacctaatttggctagagcaagttcacacgacacgaccgtgctttaaaaacttgctctccattatgtacttccttccatcaggttggggaaaaaa

SEQ ID NO: 12899 - DNA, 122 bp, Homo sapiens
aacacggtgagatccccatctctataaaaatacattttaaaaatttaaaaattagctgggcgtggtagcacacgcctgtagtcccagctactcgggagactgaagtgggaggatcacttaag

SEQ ID NO: 12900 - DNA, 122 bp, Homo sapiens
accgtttccggggtcagggcattccgtcccgccccgccgccggtgcagtgttggaagctccggttctcccggaagtggcccaggtctctctgtcggggtcccctccatctcgctgctgctga

SEQ ID NO: 12901 - DNA, 122 bp, Homo sapiens
acacggagtgtggagccagctgtcagtttctgggcaggctctggccgggaacgcatacaacgtcaaagcagtgaataagcgatttctgcagttcccgtagctgccagcctgtgcagtcctct

SEQ ID NO: 12902 - DNA, 122 bp, Homo sapiens
agaggaaattcgccttcaagaacccgaagtctggctccttgcagacgcccccgcagttcccggctactcacccagcactaggaccatctggccgcacaaacagtagtaaacatggaggggct

SEQ ID NO: 12903 - DNA, 122 bp, Homo sapiens
gggaaatgggcgggagtcggtggggtggagagggcagccgtggtcgcgagagcgaaggagcggtctgagaatccggcttgagtgttaaaggctaagcgtgtctagctggacccgtggccccg

SEQ ID NO: 12904 - DNA, 122 bp, Homo sapiens
cactcccaaatcctcactcccacactcatccttgcagccagtttttgaggaagaggagaacgtgtaaccccaatgcaagcttcaccctgactgagaggtagtggttcttcctgtagggaatg

SEQ ID NO: 12905 - DNA, 122 bp, Homo sapiens
gccgtggaacaggacggcagctcctccggcttcggcgccgctgctctccgctggactccacgtggctgttttaatcccataacagcattttaatgtcatggttgggaaaagctgcgcttgga

SEQ ID NO: 12906 - DNA, 122 bp, Homo sapiens
cattgtcttagtgacttgcgggtgtgcaggggttcactgtcttagtgacttccaagtgtgcggggggttcactgtcttagcagtgacttgcgggtgtgtgggggggtcactgtcttagtgac

SEQ ID NO: 12907 - DNA, 122 bp, Homo sapiens
tgctgctgcgcgatgctccataaactctcctgagtcctcaccactgaggaagcaaagggacgcccagcctccagccccaaatagggaggctgacttgggacgtcctatcaagagtctcacct

SEQ ID NO: 12908 - DNA, 122 bp, Homo sapiens
ctgccgtatctgctaactttgctaacactccccttcccctgccttgtaagtcactatttacgaccgcgtcgactcgcgctcacgcacgcctgcccttttctccagaagcctgaaagtggctg

SEQ ID NO: 12909 - DNA, 122 bp, Homo sapiens
cggcgctcggaccccttggcagccgcaggtgcctccccagcccagcccagctcagtccagcgcagcccagcccagcccagcccggcgctcgcagcctccgccgcttccgggcagataggtgc

SEQ ID NO: 12910 - DNA, 122 bp, Homo sapiens
gacttaacaaagaggaagtaagttaaaggcctgttttcaaagtgagattttttggcatctcgtgttgcaccttgtaaactgggacttgaaccttaactgtactattttagtaatctatatgt

SEQ ID NO: 12911 - DNA, 122 bp, Homo sapiens
cacacctgtgatatacttcctaatatccagcgggaaagaggctgctattactttcaatatcgcagtgggtgtacatcccccctgtggttttgctcctaatatccaggggggaagagatgata

SEQ ID NO: 12912 - DNA, 122 bp, Homo sapiens
cccaccgtgggtggatgaagccggtgggaacagaatgataggagttaaccactttttaggcgttattgggccttttcactttaatagcttaacagagacatctgtgatggcttgcatccaga

SEQ ID NO: 12913 - DNA, 122 bp, Homo sapiens
ctcttcttcgggctcctcggcagcgctccgggccagccggcccgtgccccaggcttgcagcgcccggcagcctcgtccttttgtggtctctgcacgggatccaaggtgccgcgcggaggagg

SEQ ID NO: 12914 - DNA, 122 bp, Homo sapiens
tcccttccaagtggcgtcacatagcaagcgtccagaaggaggcgggacttccgggccaagcgagccaattccggccgcgccggaagtctctactgaggaaagctatgaggatactctgttcg

SEQ ID NO: 12915 - DNA, 122 bp, Homo sapiens
gaatatcttgagtacaacttcagggaatttgaagactttctgaagtccatctcagcaccccgtggggtccaaacctcacaggtatgttgtttgaacaagtacagtttctggaatttattttt

SEQ ID NO: 12916 - DNA, 122 bp, Homo sapiens
tcaggctagaccttggactgtctacaacacgagtcaggcccaacccgccctggaaatcatcgtaggaggttccagctcagtgcccagagacagcccccacatcccaccccatcaggtcagct

SEQ ID NO: 12917 - DNA, 122 bp, Homo sapiens
gcgaggtctcacccgccccacgcccctcccgcagaatccagaaggtgtccaagatcacgccgcccgtgctcatcttccaggacacgaaatacgaggtgatggacttctcgcacgggctggcg

SEQ ID NO: 12918 - DNA, 122 bp, Homo sapiens
gcccccgctttggtggctgttgctgctgcggctctgctgcaggctaaccttgtttttgctcgggtgggaggctggccatggtgatctcattacagagctgcgtactggctcggaccaggcac

SEQ ID NO: 12919 - DNA, 122 bp, Homo sapiens
caggccagctgggtctcaaggaggcaggtggcagatgaaaaccaccgtcaacaccctgtgcgccctgagaacagctaaatcggttcagactcccacctcaccgtttccatagttggctcttt

SEQ ID NO: 12920 - DNA, 122 bp, Homo sapiens
acgaaaagaggatgtagatccaactggatccctttcctcctctcagggctgagttctctccggtatcccttctcatttcagcgctgtgttttcagttgcaagggatggtccagggtccagaa

SEQ ID NO: 12921 - DNA, 122 bp, Homo sapiens
aggatggcgtggggagggcgtacccctcctagatggacagagtgtgggtgaccctgtcaccggggtgcatcacgatgccagtggtacctccagaggcatacagggacagcacggcctggatg

SEQ ID NO: 12922 - DNA, 122 bp, Homo sapiens
gagaggcgcgcgcgtgctgcgttcgctgctccgggggctggtagaggggcctggggctagcgcgcacccgcgagggtggaaggtctggagatccgggatggggaactgggtccttcgtttta

SEQ ID NO: 12923 - DNA, 122 bp, Homo sapiens
agtctcttcacagacggggacctaatagcttccattagcagcctccacgtttgctgaacacgactacggggccagacccacaggaactccaatgtggttcagccgctcaactccagggacca

SEQ ID NO: 12924 - DNA, 122 bp, Homo sapiens
cacgctttcccagggctcttcaatcccggccagccggcagggcctgggagcgcggtccagcgcccagcccagattcgcccagttgggcaaggctggccaccccgcagcccgagtgtgcaccg

SEQ ID NO: 12925 - DNA, 122 bp, Homo sapiens
gaaacacctaaaagcaccatgacacttggccgttctgggggacgtctgccttacggtgttcggatgactgctatgggtagtagccccaatatagctagcagtggggttgctagtgacaccat

SEQ ID NO: 12926 - DNA, 122 bp, Homo sapiens
cctcgggccagcccagatcataccctgctgggcaaaggaggaagagccagaggatccagacgccttggaggacttggaacacctgtaacaggacaaggagttctgctcaggcacgtggccac

SEQ ID NO: 12927 - DNA, 122 bp, Homo sapiens
cgcgctgcaaagccagcaggtaactttggggaggtgcgggccaggccagcgagcagcactcggcccaggcgccgcggggcggacggattggaagccggatggaggcgtggccgggtgggggc

SEQ ID NO: 12928 - DNA, 122 bp, Homo sapiens
ggcaggtgcggcgcttccgcctctggtcccaaagcaaagactcccctgtgactgacagcccgtgttatgttaaatacattttgttggtttgtaattcaaatcccataaagcaggaggtagag

SEQ ID NO: 12929 - DNA, 122 bp, Homo sapiens
tgggaacggcgggaagtgggatggcggtacagggctggatgcggcagagcaggacaacgccgaagaggatcaggcaaatcacactccctctgagttggaagcccccagcccgacccgggtcc

SEQ ID NO: 12930 - DNA, 122 bp, Homo sapiens
gttatcacgccctggaactagcgctgcctgacactagcgcctcctctgggctgtctctgacggcacatcctgtcctgagaccctgtgctgccaagaaaccccattccgccctcaggctctgt

SEQ ID NO: 12931 - DNA, 122 bp, Homo sapiens
agtagctgggacttcaagtgcacactaccacacccagctaatttttgcggagacgaacctcggtatgtttcccacactggtctctaagtccttggctcactacagcctcaagcccctgggct

SEQ ID NO: 12932 - DNA, 122 bp, Homo sapiens
ggaagctctatctgctacctagaaaacctcttagtagggtacaagcacctactggaaagccgtgtgtgtgtgtgtgcgcacacacacatacacacacatacctgcacatgcacccttgacaa

SEQ ID NO: 12933 - DNA, 122 bp, Homo sapiens
ttggcccctttatggtctctctccaggaccaggaggatggctaccactgcctgtgtcctccgggctactatggcctgcattgtgaacacagcaccttgagctgcgccgactccccctgcttc

SEQ ID NO: 12934 - DNA, 122 bp, Homo sapiens
ctccagcggctgccacgtaggccaagccttaaaggggccgcgcgccgcccgggcccgccccggtgcgtcttaaaggggccacgcgccatccccagcctcccgacccatccgctcgaagccac

SEQ ID NO: 12935 - DNA, 122 bp, Homo sapiens
ggccccacagccttgctgccagcagccagacagcccagtgtggggccatggcgcacgccccggctctgagcttcaggccagctgtcctgctgagggaaaagacatggtcagaaatcacagcc

SEQ ID NO: 12936 - DNA, 122 bp, Homo sapiens
ggggccaggaagcttgaagaggtcaggaattaccacagcaaaagcagcccacaaggggctcggccacaccccaaccacctttgcccaaaacacagtgatgactcagaaaccctgcagcagcc

SEQ ID NO: 12937 - DNA, 122 bp, Homo sapiens
agcagcgacctcgggggctggtggggacggaagaccggacctcctggcccgaaggctgggcgcagcccccgcccgcccgcctcttcccgccggcgcctccccggggtggcagtgtggggaga

SEQ ID NO: 12938 - DNA, 122 bp, Homo sapiens
agccggcctaggccggaatgggcgcttccactcttggcccagcaggccagtgggcagggccgcgggaaggacgggcgctgcaggggctccgcgcgctcaaggtgctcgcgggctcccgggcc

SEQ ID NO: 12939 - DNA, 122 bp, Homo sapiens
cccggccgccctttaactgatctgtgggaactccagcatgccccgggccgcgccccagggcgcccccagagcccatcgccccaaagtcctgcagccaggacgctgtcaccagggccggcgcc

SEQ ID NO: 12940 - DNA, 122 bp, Homo sapiens
gccgactctggtagctgggacgctggtttatggcatcctgagacagttgcacagtgccagcggaggctgcactgagccttcatcgcccattgctttaggcctggagactttcatttttagtg

SEQ ID NO: 12941 - DNA, 122 bp, Homo sapiens
cccccagaacttgtttacgttaaaccctgtaaacttcctgccagggcctttgccatctctcgggaaatcggaacctgcgctttgaaaacggggccgcggggccaaataggcgggttttcagt

SEQ ID NO: 12942 - DNA, 122 bp, Homo sapiens
tactttggccaactaatgggttaatactgtcaagggaaattagccctgactaaacattgccgctggctcatgaatgcactaggcttggggcagtataaaaactcagagaaatcagtgtgtag

SEQ ID NO: 12943 - DNA, 122 bp, Homo sapiens
atgtcactacatacttattagaatgacggggaaaaataccctggcaacacatgcggaagacgtgaagcaactgctgatggtaatgcaaagttgtatagccagtttggaaagcaatttggcat

SEQ ID NO: 12944 - DNA, 122 bp, Homo sapiens
ctcaagtctaccactctgaaaaccacagttacagccctaagtgaaagccatttgaagagtcgttcacatgcacgttttgatgtgagaataccaattaaacaaactgccaatcacctttaggc

SEQ ID NO: 12945 - DNA, 122 bp, Homo sapiens
gaagcgcggagcaacggccgcggaaggggcgtggtctcgggaggggccccgaggggtgggcggggccgggagtgcgagccggacggggcgcagcgaggggaccggttggtgaggtcctggag

SEQ ID NO: 12946 - DNA, 122 bp, Homo sapiens
ggcatgaaccaggggatggaacagcttggttctggttttctcctagcagtcctgagaccccgagtgagtttctttataaaacaggaataacaaggccaagcttgtctttatcagtttttgag

SEQ ID NO: 12947 - DNA, 122 bp, Homo sapiens
gggcaagggagaaaggcagagaggctgggcggccaagggtggccgctccggcatctccctcggctgtgctgggccaaacccgctcccagattcccggcctgccagccactcacaatcccggg

SEQ ID NO: 12948 - DNA, 122 bp, Homo sapiens
ccttacctggaggctcgcgcgtccccaccccttgcgacccgcgcggcggccgggagctggcgccctctgctgggccaccaggcgggagcaccctcggactgggcaaggatcgggcggagagg

SEQ ID NO: 12949 - DNA, 122 bp, Homo sapiens
ttaagacccttattcacccactgagtctatgccctggccgttctgccaacccccgccgcgcgctgcaggagtataagccagccctgctctgcgcttccagctgcgtctgcccaagcgcggca

SEQ ID NO: 12950 - DNA, 122 bp, Homo sapiens
ggactggcccgggctcaaggtccgtgcaaactgcatgcactgcgcaggtgctccaggactcgcgcggggtcaaagtccatgcaagccgcacgcactgcacaggtgccccaggactggcacgg

SEQ ID NO: 12951 - DNA, 122 bp, Homo sapiens
aaattcaaggacctgtgctcttgagatcaatgaccatgaattaaactctcctctttccagcgtccaacacaagaaatgaagtcggggtttcccaaaacaccttcatgatttttgtttgcttg

SEQ ID NO: 12952 - DNA, 122 bp, Homo sapiens
ccgagacacctgagggcacggagccatgggaacgcaaccccacaacacgggatacaagcccgcccctgcccgcccctgccgctggcacccaagctgccacctcggcttctccggctcatggg

SEQ ID NO: 12953 - DNA, 122 bp, Homo sapiens
accctctctctttctctggtcccctagcctgggaaagggctcgggaccctggaaggggaccggggtggcgaggccgccgattggcagcgaggcgccatgtgaactgcactggttggctggcg

SEQ ID NO: 12954 - DNA, 122 bp, Homo sapiens
tgtgatctctaattaaggctctgctgagtctcctctttatctatagggagaatcctcaagcggggagacacacccttcctgcagaggcgtatcgccagccacgacaaggcgagccgcgtttc

SEQ ID NO: 12955 - DNA, 122 bp, Homo sapiens
ggaggaggcctcgcttagcggccgggtttcggggaactcctccccaccgcgcagcggccccgaggttcttggctgggagagtttgactttgtaaagcaatcgacaactggggcccttccccc

SEQ ID NO: 12956 - DNA, 122 bp, Homo sapiens
ccgctttctccgggctctgggtcgcaggccgggcgctttctgcgtccagcagcccctttccgcccaggctttttgaaaaggaaggtgcacacctgatccaccgcctttcctggagaaagctg

SEQ ID NO: 12957 - DNA, 122 bp, Homo sapiens
aacggctgggtgcctgagccaagcagctcccaacggctgcgtgccccgaggccgggcagacgcaggtgtcccaggaccaaaatagcagtcagatgatcataaggccccgtggcagggccccc

SEQ ID NO: 12958 - DNA, 122 bp, Homo sapiens
gtcacagcctcctttgttatggacctactctggaaaaatgcacagacaggtaaacctctgcggaagcctcacagactgccagcctacccagggatcccgggaggtccaagttcagaatccca

SEQ ID NO: 12959 - DNA, 122 bp, Homo sapiens
ttttcttgctctgagactttcctgaagccggcgtgtgttccctctcagtctgcttggccgcgactttgcagtgcagggaatgtgctttgggtgtagcccaagcacaggctgctgcatgctgg

SEQ ID NO: 12960 - DNA, 122 bp, Homo sapiens
gcatgataattgctgtcctgctttagctctgcattgtttattcggcggatatttactgagcgcccactgtgtgctaggcgctattctttagtctgagaattatagccatgcataaatgctgc

SEQ ID NO: 12961 - DNA, 122 bp, Homo sapiens
ttactcctgccaggcacaagagtagatgctttgcccattactttacctgcttaatctgcacgatagaagggtagatattgtagttctcatttaccagggtaggaggttaaggctaagggctg

SEQ ID NO: 12962 - DNA, 122 bp, Homo sapiens
cccagacagagcgcggaggcggcgggagccggctgccggacgggcgggtgggtaggcgggcggggccgcagccagcgctacgttccgaagaccctcgcccccaggcctacacacagctgtag

SEQ ID NO: 12963 - DNA, 122 bp, Homo sapiens
tgcacagcggaacacacgtgaacgccggcagggtggagagaaggaggtgacagctgctcccgtcgccccgccctttctgaaagctgatggggcagatcttaaagaccaaggtcctcaaattc

SEQ ID NO: 12964 - DNA, 122 bp, Homo sapiens
ccccccgacacgaggaagaaggtcagcatggcggtcagcggggcccggcccggcccggcccggcctccccgacccgcagccccgcagccccgcagcccagcagccccagcagtagccgcgcc

SEQ ID NO: 12965 - DNA, 122 bp, Homo sapiens
ccagccaatcgcgcaggatccgagtcgtgcctccggtccaccctcctcccagcgctcagccggtctgagctcaaggcctttaccaagcccacccaatcaacggcgggctctctcctacccca

SEQ ID NO: 12966 - DNA, 122 bp, Homo sapiens
gaatgaactaatatgatttcctttatatacagcactttagtatgagcaaactattcccttcgtagtgtaacatatagctttccactttttgttcctagtgtaaaattaagatttccccacct

SEQ ID NO: 12967 - DNA, 122 bp, Homo sapiens
cctgaagactgtgggtcattcctcagggctctgggtgagtctctgcccttctgggctgggcgactgagatgggggactgctcttctccgagtgagctggctgagtgtgaccgtgagtcacgc

SEQ ID NO: 12968 - DNA, 122 bp, Homo sapiens
tcagccccccagatccttccactagtaacaacctagtgatcaaaactacagctgttattacggcagatacgcatgggccaacacctggtctctgggtggctcacatggcgccctacagccca

SEQ ID NO: 12969 - DNA, 122 bp, Homo sapiens
gagactccgtctcgaaaaaaaataataaaataaataataaaataaataaaataaaataaacgttggcttatttcagtgtgaagtaaggcaataaacggagggctaacagttccacttcgtag

SEQ ID NO: 12970 - DNA, 122 bp, Homo sapiens
ggggcagcggcttatctctcccaggaggggggagctcactccaaacagctagtgcactggcgtgtgaaagcccctcaattagcactaatgatgcaatcagggagggaggaggagggaccgaa

SEQ ID NO: 12971 - DNA, 122 bp, Homo sapiens
gagcatgtgtgagtcagcaccccctgcctcctttcccgcatggaggcatgaggttctgttcggacacttttccctgtctctccagatggtgaccctgaaggaggacttgtgttgggcccaat

SEQ ID NO: 12972 - DNA, 122 bp, Homo sapiens
gctgataaggacgggaaaagctggagaaacagaggaaggcatgggggaggcaaggtgcgacggctctgtgtgtagaatacgcggagacccccagcatccctccctgccagccccctccagcg

SEQ ID NO: 12973 - DNA, 122 bp, Homo sapiens
ccgtggcacccaggcagccggggcaggactatcgcggggagatgcaatactactcagttacgaggtgtgtagtgctagcacgagaaacttggaggacgcgctgacaagccgggctgcagtct

SEQ ID NO: 12974 - DNA, 122 bp, Homo sapiens
tctccgagttccattagccacaagaagcgtgtccggaatctaaaagtgcagggacaagggcgctgcagagccggttcctgacagtgtgtccccatttcccaccccttccaccactgggaagc

SEQ ID NO: 12975 - DNA, 122 bp, Homo sapiens
tcggggtcccggcggagaccggccccaggcccacagcccccacccctccggcgtcgtccccgagtttacctccaagtcgcggcctttgttcttgaaattcttgagccgttggttgtccagtt

SEQ ID NO: 12976 - DNA, 122 bp, Homo sapiens
ctcactcggtccgtacccagtgggcatcttgggtatctgggcggtcttcgatcccccgcgcgtgtgtctgtctgtctgtctctgtgtcctatccgctgcctgcagcctgcctgccggtctta

SEQ ID NO: 12977 - DNA, 122 bp, Homo sapiens
gttttcgacataagtgggaaaaccgcaagacactgcgtaaccgctcaaaatggcggagagcgaagaacaaagccggtgcctggcaatgggccggacccgcgaattagcgcaaccaatcatct

SEQ ID NO: 12978 - DNA, 122 bp, Homo sapiens
tgaagcccccatttgtggagggatattacattgcctgaggaccccaggcagcctccctgacggccacgcattggggctgcatcaggcatttcaggacgtgggcgattgtccagttaacgttt

SEQ ID NO: 12979 - DNA, 122 bp, Homo sapiens
gcccttggccccgaagtctagaaccctgggccggccgcaaaggaaggtctgccgcgcatgcgcgccccggcgcagcctatccggagcgatccatctcgttacgtcaccaccagcctagctcg

SEQ ID NO: 12980 - DNA, 122 bp, Homo sapiens
tccacctctccggcctcagtttcccttggctgcagcggccgcggggcgctaggtgggagccgctgagcgctcccggggccccgcccaccgcgagcagccaatcgggcgccgccctccggggg

SEQ ID NO: 12981 - DNA, 122 bp, Homo sapiens
gatggtgagaactcgcggacccgccggcgatgcatgccgggagatgtagtcccgggccgacgcattacctcttgggagtcgtggtcttcgatctggtaaacagaagacggcaactcggttaa

SEQ ID NO: 12982 - DNA, 122 bp, Homo sapiens
cttccaggcaggctgcagtagcctggagcgccttatggatattaactccctcaaccctgacggcagcccagtggggagggtgcacttcccttcaagtcttacaggtgaggagacaaaagaca

SEQ ID NO: 12983 - DNA, 122 bp, Homo sapiens
ctgtgggtgtctgtgttgagctgctcattgtgaccccctgtgactatgatgtgtgaggtgcggcggtgcagcatgtgcggggcgactgctatgaaggttcgagtgtgtagagtgtgtgacac

SEQ ID NO: 12984 - DNA, 122 bp, Homo sapiens
gggcttcttcgggccacgcccattccgccctgctaagcctcgcccattacatccagactgcgccccccttgccagaaatcggcaccgcccagcgagcgctgcccaggcccacccagatctgg

SEQ ID NO: 12985 - DNA, 122 bp, Homo sapiens
acaccctcctccgcaaagcctcttgtgatctccagtctgactggacacggcttcttgctgcgcccgtgatcctaagcatggggtgtgggtggtagggaaaagcctggagcagggctgcttgg

SEQ ID NO: 12986 - DNA, 122 bp, Homo sapiens
gttgctctcgctgccctgagcccgggtccagctgccctgctctgtgtcccttccacatcacggaagttgtttgtgcccagccaggctctggggggccaccaagatgacagaatgggtcccca

SEQ ID NO: 12987 - DNA, 122 bp, Homo sapiens
atctttatttttcctgacatctttctcgggattccgggcgagagagccgctggttcgacccgaacccagcacagaccccctctgacctcctcggccgcttccggtgattctgccccatcctc

SEQ ID NO: 12988 - DNA, 122 bp, Homo sapiens
actggaccactcgaagatggcattgacagcggaaggggcacactgggcctagggagggctcgaagtcgcggtcatcaggaacttctgggcctatcccagaagcctcatcttctagcataaag

SEQ ID NO: 12989 - DNA, 122 bp, Homo sapiens
tcagagtagccagtcaaccgtcaactcctgataaacgaggtagtggaattgcccaattagcgctaggaatgccacgtggtatgagggtgggcacaatgggcgtccagaaaagccaatcaaca

SEQ ID NO: 12990 - DNA, 122 bp, Homo sapiens
tacccggctgcctcatctcccgctcctgcttaactgctggaagtctcagatttgggttcccgggcacacgggaactctccctccgcgctgtccggaccctaaaggcaagttgccggggaagg

SEQ ID NO: 12991 - DNA, 122 bp, Homo sapiens
aatagggacagaacttccggtttccagttctaagcattagcaatgcatggttctagcgaacgtttggattccggcagtggtgctcaccacaacagccctcttggcatggttggggctggata

SEQ ID NO: 12992 - DNA, 122 bp, Homo sapiens
actgtgggtaggacaaatgaatgaagaataaacagaaaaggatggcggcaatccactgcacgaggtgcattctgcctgtgcacagaggatgaagcctgtctctcttgaatgggctgtaagcc

SEQ ID NO: 12993 - DNA, 122 bp, Homo sapiens
ggtcataggttgattggtgcagcaagccaccacggcacacgtttgcctatttaacaaacacgcacatcctgcacatgtatcctagaacttaaaaaaaaaaaaaagaaaatgaaaattaaggg

SEQ ID NO: 12994 - DNA, 122 bp, Homo sapiens
tatcttgatcttctacctgatgacactgacaggaaacctgttcatcatcatcctgtcatacgtggactcccatctccacacaccaatgtacttcttcctttcaaacctctcatttctggatc

SEQ ID NO: 12995 - DNA, 122 bp, Homo sapiens
cacgccttcaccacaaaagcacacggcccggaacctgccacgctgagtggtctgagtgggcgcgaggaaggagcccagcccagccgaaggggcccagaggggcctctgcgtcggggagagag

SEQ ID NO: 12996 - DNA, 122 bp, Homo sapiens
ttaaagagttgagagcagaattaatcaagcctcttgaaagagagagtatagtgtagtaaccgtatggggtgttcgtgtcccagcttggcagcttaacaactctaattccctttttcttcttt

SEQ ID NO: 12997 - DNA, 122 bp, Homo sapiens
gagacgcaatctcccttggaagacgttagtctccatctctaacgctcccgagacacggttcgcaattaattatgacgtcacagccaatcgtcaacgcgaaagcctgacgctctagccggctc

SEQ ID NO: 12998 - DNA, 122 bp, Homo sapiens
tagtggaccctctgtctttacacgtgaggcggctgccctctaccagcgagggcgaagggtcggtgtgacagcattttgtatccacactcgtggctcctcagctcttgtctggcatccaggag

SEQ ID NO: 12999 - DNA, 122 bp, Homo sapiens
cccttcctctgcgagatctttttacccatctggcttccctgcctcagtgttgctcgggagcgtggatgacagcccgtagacctgcacgccccgctgcctccgctcgtgcctcacgccaccct

SEQ ID NO: 13000 - DNA, 122 bp, Homo sapiens
gaacttagtggcaaaatgaagctgcccaaatgaagcagctgaatttccttcctcagagcccgcatctgcctaggggctgggaaatgagtactttcgtggctcttagcccagaagaggcaggg

SEQ ID NO: 13001 - DNA, 122 bp, Homo sapiens
aaatttccccctcttcatctgtgattcttggtttaaagtatcaaaggtgctagggtagcccgcaactgttatccccgagggctgggctctgcctccacgcattcgagtgtcaggtcctgttc

SEQ ID NO: 13002 - DNA, 122 bp, Homo sapiens
tctggtctcatctacgaggagactcgcggggttctgaaggtgtttctggaaaacgtgattcgtgatgctgtgacttacacggagcacgccaaacgcaagacagtgacagcgatggatgtggt

SEQ ID NO: 13003 - DNA, 122 bp, Homo sapiens
ctttctgccctttccccctcattattaaatgtttctttttgccatcttgttctcctcagccgttactcctggtgggcccctgtcccccatgtttgacccgtttccactgctgtggacaaggc

SEQ ID NO: 13004 - DNA, 122 bp, Homo sapiens
ttctccgacgagaccctggacaaagtgcccaagtcagagggctactgcagccgtatcctgcgcgcccagggcacgcggcgcgagggctacaccgagttcagcctccgcgtggagggcgaccc

SEQ ID NO: 13005 - DNA, 122 bp, Homo sapiens
gtcagggcggttgtgctgaaggctggatgagggcacgtaggtgaagctcagtgcttggcacgaggtgctcatcagcagcatcgcccttgctttgggctggcctgttagtaattcgtttttag

SEQ ID NO: 13006 - DNA, 122 bp, Homo sapiens
cacaaatttcgcaaagtgaatgaaaacacatgaaggccactgaagggaataactaggggacgagatgtctgagcccctaaatcgagaaacatttgggcaccgtttgtgggactgtacatatg

SEQ ID NO: 13007 - DNA, 122 bp, Homo sapiens
cgcagttgggggcagggaaggacgtaggtgctccccctcccaccccgccggagcctcccgcgagcgccccctggtgcaccccacgcccggcattgttggggagcacgaaaagcggggagccc

SEQ ID NO: 13008 - DNA, 122 bp, Homo sapiens
attttcctttcagtatttgtatcccaaccaattattggtggttactatgtagaatgctgacgtattaataatctttgtctaagcatttgtttggtttagtctaaaatataagcttactatga

SEQ ID NO: 13009 - DNA, 122 bp, Homo sapiens
ggccaggccgggatccggtcgcggtcaggctccgggactggaaggggaaggccggccaggcgcccgcggcagacgcccacaccccacaggccacgtgtggcctggacgcctgggacggcgga

SEQ ID NO: 13010 - DNA, 122 bp, Homo sapiens
ataagaaaaatcaactgatagggggaaaaaaaaaagatctgtcatttgtcaacagatggacgaagacaagctattgactcaaagagaacctgccgcgagtcttagtctttggaaggtcagac

SEQ ID NO: 13011 - DNA, 122 bp, Homo sapiens
ccagcgcgccggggctggaacacaatgtcccgagcgggcgggcgggcgggcgagcgcgagcgagaacagcctgactcagcagctgggtaagtgggtgtgctcgctcaccagatcaaccgctc

SEQ ID NO: 13012 - DNA, 122 bp, Homo sapiens
cacggcacaactgcaagtgttcctacctagtttcagtatcattttaaacattttctagttcgacttggtcataaaaataaagtttagaaattactttgtgccctttttgtagaaaagaaata

SEQ ID NO: 13013 - DNA, 122 bp, Homo sapiens
tttgcttaacgtgattcccggccaagctaaacatgactaatcgtgtttacccggtgatcccgcgcctcctggcaggcggggctggggcccaggaggaaggaatgcctgcatgtgctggttca

SEQ ID NO: 13014 - DNA, 122 bp, Homo sapiens
taactacaaaaaggttagatagcaatttagtagcatttggaaggagatcatatcacctgacggattatctacaattgagctattatgagaaatttgtaaaaaagaaacatgttgttggctag

SEQ ID NO: 13015 - DNA, 122 bp, Homo sapiens
attttcccagactaccatgtggggagttgaacatacccaccctcaggtcggggacaggctcgtgacgatgctcagggtagtggtggagccccagaagcctccagtttccattttggacccac

SEQ ID NO: 13016 - DNA, 122 bp, Homo sapiens
aattcctggctctttttgttatcttctaccttaaaactgtgtctccactaatattctaggcgtttactaataattacattaaggtaataacactctgatccaattttacaagcaaacagata

SEQ ID NO: 13017 - DNA, 122 bp, Homo sapiens
gcacgacccatgccgtcagcagccctcgtgccagctgcttagaaactcgtgtctccagcacgatgtgctcgctgccaacagacaagagatgcacggcgtttccgctgcagagattctgtggt

SEQ ID NO: 13018 - DNA, 122 bp, Homo sapiens
ttgtgccaagcatttcacagcagggcccctcgcttccgtgatggagaacgaacagcatttcgtgcacgctccctgccttcctctcatcctttcctcccctcactctacccttgctaaattta

SEQ ID NO: 13019 - DNA, 122 bp, Homo sapiens
ccttccttccggactcgggatcgatctggaactccgggaatttccctggcccgggggctccgggctttccagccccaaccatgcataaaaggggttcgcggatctcggagagccacagagcc

SEQ ID NO: 13020 - DNA, 122 bp, Homo sapiens
cacctcacttaaccctttccagacccggaagggaaggcttggaactgggctctccttgggcgagtgtgagtctgaccttggggacagaagagtcttcggggtagctattcgccctctcagtc

SEQ ID NO: 13021 - DNA, 122 bp, Homo sapiens
tcgcgcctggtgggggcctgagagccaccgggctgcggtgcgcgagtgtggacaccgccccgccttctgcgtctacagccctgggttctgggacctttggaaaccgctttggacgaagctga

SEQ ID NO: 13022 - DNA, 122 bp, Homo sapiens
aagagaggtatactttcagaattctctcctggtggctccctctttcccttgggaaatcttcgcacaagtctcagattgtgcatgttcaactgctcatatctggagatactccagcaatgcct

SEQ ID NO: 13023 - DNA, 122 bp, Homo sapiens
tctctagttcttcagggtgtgtgctggggcctctgtcagtccaggcttcttggaggggtgcgggggtgggacgaggccaccctatctcaccattggtccaagtgactgtgccaaagtgattt

SEQ ID NO: 13024 - DNA, 122 bp, Homo sapiens
tccaggcaatctgctgtcaaagcttgcttatgacagaaattatcaacctgaacctgggtacgtcacctcacatgttgggactttgattttatcctctgtaaaatgagcatagtagtctagaa

SEQ ID NO: 13025 - DNA, 122 bp, Homo sapiens
ggtgaggtgtgtcaggcaagagcgggggcagagctccggtgacgcggtgctcacgtgacccgcccggcgcctacgtgggcaccagcccccgcgcccgcccgccagcccgcccagcggtcggg

SEQ ID NO: 13026 - DNA, 122 bp, Homo sapiens
cacacaagccccccatcttggccgccaggcccccgaagcccgggcaccaggctgcactctcggctgtgggcatgagacaagagcaccagatactgcagaccttttggaggcaaaggctcagg

SEQ ID NO: 13027 - DNA, 122 bp, Homo sapiens
ataccaagtggcagtgctcaaatcacataaagaggagccgttgttgcttgttcgctagtacgtgggtttgtatccccaaaccatgtcttttttacatgatactaattttgtctggaatattc

SEQ ID NO: 13028 - DNA, 122 bp, Homo sapiens
tgcattctgccatatcatgaaccagggctaggcgtacacatctgatcaggcaagaaatgtcgaataattacacagaattatatttactacaagttccttctctatactcttccaaagttata

SEQ ID NO: 13029 - DNA, 122 bp, Homo sapiens
tatccccctgcctctccccgcctggatattacgatccacggtggacacacagcgtgtttacgttatcgtgagtattgtcttttccgcctctggaaattaccagctgtgtcacctacgggtgt

SEQ ID NO: 13030 - DNA, 122 bp, Homo sapiens
gaggccacacaggtggatggccttcccttagagttactttccagagcctgggtgcttagccgctatgccccatgtttaatattcttgtgttccaatgtaacaactttaaaattacacaggat

SEQ ID NO: 13031 - DNA, 122 bp, Homo sapiens
cgcccactggcgctgccggctccgccccgactcgtccgggcgcgcaggcgccgcccgccccgctggtctgattagcataggaccccgggccccgccccctgctttgcatgcgcacggccggc

SEQ ID NO: 13032 - DNA, 122 bp, Homo sapiens
gagcacagctgcaaccatggcccagaacaactgctcagaaaccccacttccacctaggagcgcgacgcagcctcagacctggcttccaacacctcacctctctttccaaaaagtcaacctca

SEQ ID NO: 13033 - DNA, 122 bp, Homo sapiens
cgggcaccaggcttgggggctgaggcccagcggcccgagaccaactgggctgaccgaggccgcctccccgccagccctggggtccactgcccggggagcagctcccttcccaggtcagactc

SEQ ID NO: 13034 - DNA, 122 bp, Homo sapiens
cccggtggggggctgatctctgacctcctgtctggcgggctgtgctgcaccagccagggccgggaggtgcacgtggacccgtgtttattggaatcctgctgtgatcagacccgggggcgacg

SEQ ID NO: 13035 - DNA, 122 bp, Homo sapiens
agttgccattgtctcattccaccaaaaaacatctcagaccgcccgcggccaccccaaatacgcctgtccactgaagcctcactaaaaggaggaagcgctgatgtcagggttacttaaattcc

SEQ ID NO: 13036 - DNA, 122 bp, Homo sapiens
attcattgctaattttcgatttataatctgcatcaaataagagtttgtgctgcatagtatcggtagaaattaagccaggatcagtttgctaaatgttccatgccttttcactgcaagaaaga

SEQ ID NO: 13037 - DNA, 122 bp, Homo sapiens
caggcaggcccacagcatatcctatgcagatcagatcccaatgcagccggggaaacaggacgtgggacacgcacagtcctgctcctcttcctgggacccctgtctgctgggcgcacccctca

SEQ ID NO: 13038 - DNA, 122 bp, Homo sapiens
gggcaatctcagtatgtccctactgccccagctcctcaggcactggacatcagagggtatcggggtggagaaagaagacatggaaaggtattggggccggcatgaagagcctccatctttgc

SEQ ID NO: 13039 - DNA, 122 bp, Homo sapiens
agaggcttggcgggaaaaagaacggagggagggatcgcgctgagtataaaagccggttttcggggctttatctaactcgctgtagtaattccagcgagaggcagagggagcgagcgggcggc

SEQ ID NO: 13040 - DNA, 122 bp, Homo sapiens
aagcaaaggatttttctgaaaccaaaagcaaactgtcaaagaatgccagtaacctgtcatcgagctactctatgccctccactggcagccagaaatgagtctccctaaacccaagtgttgtg

SEQ ID NO: 13041 - DNA, 122 bp, Homo sapiens
aaataagagacggggctaggttgcctttcctcctttgaaccccctggtgcagccggagcccgcgccccttaaagtgatctccagttgtccgaaaggcccgccagggatctggcgaaacgggg

SEQ ID NO: 13042 - DNA, 122 bp, Homo sapiens
actgtgctcagcctaatgacagaaaacagcccaggcagggacccagcaatagtgagtagacggggagggggagtatggcctcatgtcagctttacgtatccttatcctcaggttctttcctt

SEQ ID NO: 13043 - DNA, 122 bp, Homo sapiens
gggagctgctgctggtgagtggcgttcctggcggtcctcggcggagcgggagcagtgggacgtttccgggggtcgggtgggtagcggcgagcgctgtgcggtcagggcggggctcctgtgcc

SEQ ID NO: 13044 - DNA, 122 bp, Homo sapiens
ggggcggggtgggcggagccggggggtgggaaggctggggccttcagtccctctccgcgccgcctgtgggtgcccaggaatttcaggacgctccctgagtcattccagtcaagtgcctgggt

SEQ ID NO: 13045 - DNA, 122 bp, Homo sapiens
cattgctacccttcctttccacagtttcagaacctggcagcaaacccacagagtcaaaaccgcacaggagctgcccagctatcgaaataactacgcttccagcccttcttcctcccattgct

SEQ ID NO: 13046 - DNA, 122 bp, Homo sapiens
aaatactcattctctaagacccagctctaatgcctcctcctcaggaaggcagcttggtgccgagggaagagcatgggtctgggagttggtactcacaggaggatcctgaagtaatgtccttg

SEQ ID NO: 13047 - DNA, 122 bp, Homo sapiens
agttgcgaatggaaatccacttctgtggggaatgtgggacagagagccggagtggccgtgcgttcctctgatgagggtctgtgctgtttgcagaaaatctggctaaagtgttcagcctgatg

SEQ ID NO: 13048 - DNA, 122 bp, Homo sapiens
aagtggaggaaggatggtagcagaggggagggcagagttataattcccactgaatggatgcggaaactgaaggaaggcaggacaacacagtcggccaagatggtaagcagagcccgccatca

SEQ ID NO: 13049 - DNA, 122 bp, Homo sapiens
gagcagcggccgcgtgacgcccacgcagcgctccacggccatgccacagcccagcagcagcgggcacaggccgaagaagaccatgcagccgcccaggaagtggcaggccccgccggccggag

SEQ ID NO: 13050 - DNA, 122 bp, Homo sapiens
gtgcgagagcgtggatgaggctgggggctccggtcctgctggcctccgtgcttccaccagcgacgggatcttacggggcaacggaacagggtacctaccgggcaggggtcgtgtgctgtctt

SEQ ID NO: 13051 - DNA, 122 bp, Homo sapiens
gctttccgcggctgcccgcctcgcgcgtcttccctgcccgggtctcctcgctgtcgccgccgctgccacaccatggccttcgtcaccaggcagttcatgcgttccgtgtcctcctcgtccac

SEQ ID NO: 13052 - DNA, 122 bp, Homo sapiens
gtgtttcctaagccactgttctatagaataagagcctgcggggtcccgagctgcaggggacgctgtcactcaggaggtgggagaccctgggcgttgctcacacacgcgtgagcggcctctct

SEQ ID NO: 13053 - DNA, 122 bp, Homo sapiens
ccggaggcaggcgagggtgtggtcgggagggaacgcgtgcttgatccctccttggtggtacggagacaggattgtggggccgcctgcttcctcctcactggacccgccctcttgcctaagca

SEQ ID NO: 13054 - DNA, 122 bp, Homo sapiens
gggacggccgggtagttcgggccttgaggagtcccacaccctgacagctggcgccccccacgccccgcctagctctcctcggcctggggacaccggctgccaggcctctccagtttcagcct

SEQ ID NO: 13055 - DNA, 122 bp, Homo sapiens
tccctgcccggagcctgcgcccccggagaggaaggggctcgaggggcttgggtgccgcagcgcgtccttccgtagaaaaggcttgcgtcagtatttcctgcttttacctcctgagtattgga

SEQ ID NO: 13056 - DNA, 122 bp, Homo sapiens
acctttaataatctatgaacctggctgaattttctcaaaaaacctgctgcatctacaccccgcaggaacagcctgttaagcagtttgggctaccagctctcagcctccaagacagccgccca

SEQ ID NO: 13057 - DNA, 122 bp, Homo sapiens
tagtaacaggacccacaaccttcagttattatgattaaattgactgggtacagtggctcacgcctgtaatcctagcacttagggaggccgaggcgggcgaatcacttgagctcaggagtttg

SEQ ID NO: 13058 - DNA, 122 bp, Homo sapiens
tgagtcaagcaaatgactgagaatcttacttctcccagaaaggaagcctaggagtctcctcgcaggcccaggcaggatggcacatacttgtcccactcccagcctggacccatccccacggg

SEQ ID NO: 13059 - DNA, 122 bp, Homo sapiens
agtttggtcagaatggactcttcgtattgggtggcatcttcgttctgctgaacgttttggcggtcttttttgggtttcacttcgttgagctgcattcccagcaatgggacaccagctgggga

SEQ ID NO: 13060 - DNA, 122 bp, Homo sapiens
gctggattcttgcagggctcctgggatctcaggtcatcttctgctagcagccttttagtacgggagtcagataacctcttgcagccttgctgcagctttcctctccttttgagcttcatctg

SEQ ID NO: 13061 - DNA, 122 bp, Homo sapiens
atgaggcccacgtggtctggctggttgctgatgagcagtgaggcctgaaggcacctagagcggccaggacggccgaggtcaagtgccttccccaccctaagcgcagctccgcttcacggctc

SEQ ID NO: 13062 - DNA, 122 bp, Homo sapiens
tgtgccccctccatgaccatatcagcttcctacagcttccatgacaaagcaccacaaaaccggaggcttaaacacagaaacgcagtcccccagctccgggcagaagctcgagacgagggtgt

SEQ ID NO: 13063 - DNA, 122 bp, Homo sapiens
agagaatgactcgggagccctcagactcaacggactttcttctcagggcagaaacgagggcgttcgtctgaactgtaggtttgctgaagattcctatggctggacgatgccccggcgaaata

SEQ ID NO: 13064 - DNA, 122 bp, Homo sapiens
aatggtggtaataatgatcctcatctccaggtagttgtgggactgggattaaataacatccgtgctggctgtgggcccctggatatgttattttgctttcctgtgcctcagctaacccatct

SEQ ID NO: 13065 - DNA, 122 bp, Homo sapiens
cgccagggccttcgtggggacgatgtccactgctgttgcccatgcccccaccagggccttcgtgaggacgatgcccaccacctccaaccatgcccccaccagggccccctcgtccatttggg

SEQ ID NO: 13066 - DNA, 122 bp, Homo sapiens
acgacacagacaagttgcccggcagcggagaaaacccgtttagccttgtagtgctgaaaccggagatgaatgagatctaatacagccccaaagcactgggtaaagaaaagcatcacaacttt

SEQ ID NO: 13067 - DNA, 122 bp, Homo sapiens
ctccctgctgcagagctggggcctggggtccagccaccctggaatcctgagcccacctgacgcaaaggcccttggaacagacctgcttgatggcctcttctgatgcagcctgtcctggaggg

SEQ ID NO: 13068 - DNA, 122 bp, Homo sapiens
tatgatatggagagaatctgcccagcacgtgacagtcagctcatgcaggaaatatgccagcgaggtttcaaaaaaagagagagagagagagactgagctggggattggttcaattccttcac

SEQ ID NO: 13069 - DNA, 122 bp, Homo sapiens
ctctgccttcatgacctaatcacctcccaaaggctccacttcttaatactatcacattggcgattacattccaatctatgaatctgaggtagggagggacacattcagaccatagaagaggg

SEQ ID NO: 13070 - DNA, 122 bp, Homo sapiens
ggcagaggccagactgcgcagggctggatatgcatggtaaggagtttcacttttgctccacgtacagtggaaacccaccaagggtttcaagtaggggcatgatatgtgtgatccgctctaca

SEQ ID NO: 13071 - DNA, 122 bp, Homo sapiens
cccttctgtcccctccccgacaggcactcatggtaccggcgccggcgcagctgtgactgtcgctgcagacggaaactgactggggtcaattcaagtcatgcaggctgtgagaaacgcggggt

SEQ ID NO: 13072 - DNA, 122 bp, Homo sapiens
gccccagcaattggattgggcagcccgtcttgacacaccactgtgctgagtgcttgaggacgtgtttcaacagatggttggggttagtgtgtgtcatcacattcgagtggggattaagagaa

SEQ ID NO: 13073 - DNA, 122 bp, Homo sapiens
cgtcttggctccatctagacggcactgggatgctggaatctgcatttgcgctgcactggacgctgggaagactttcaccgcagagcgggggctgctggaggggcgggtgggctgcggcccgg

SEQ ID NO: 13074 - DNA, 122 bp, Homo sapiens
tggtccttttagtaaatgatatccaacataggttataatactgttagaggggccaataagcgggttatgaaaatagcctattgattagaaaagttgtggtcaacattcaattcacatgagat

SEQ ID NO: 13075 - DNA, 122 bp, Homo sapiens
cctggcagcctgaagtgtacacctgacgcctgcactccctccctatgcagggtgcaaatccggccgcgatgaacgcgagcgccgcctcgctcaacgactcccaggtggtggtagtggcggcc

SEQ ID NO: 13076 - DNA, 122 bp, Homo sapiens
gacccggcacctctagccagggacgcgcgctcggtcccccgccgtgcgcccccggtcccgcgcccaggctcccgcccctggcctccttaccagccacttgtcgcccagctgcgaactggagc

SEQ ID NO: 13077 - DNA, 122 bp, Homo sapiens
ggttgtgtcctctttataacctggaggagaaaagagggacagagatgaagcaagcattcacgacaggatgacagcaaagaggtgcatttttaaattagttcattcattcattcaccaaatag

SEQ ID NO: 13078 - DNA, 122 bp, Homo sapiens
ggcatctacatcctgagggacgaccagcgcgtcaagatcgtcattaacgagatccccgaccgtgtgcgcggcttcgaggaggagttcatccacctgctctccaacatcactggggccattgt

SEQ ID NO: 13079 - DNA, 122 bp, Homo sapiens
gactgtcagctggtggagagggtacagatccagagacttagaaagcttagattttaatcccggttctcttgcaaaaaggaaaaagaaaagaaacaaaaaaatcttttggtaatatgcagtta

SEQ ID NO: 13080 - DNA, 122 bp, Homo sapiens
cttggtcgccagaggaggcggtggctgaggagagttgagtccactgctgaccctgttttacggtaggaggcacggctagctctaaatgggcaatttacttagtaaatttagacccgggtgcc

SEQ ID NO: 13081 - DNA, 122 bp, Homo sapiens
ttgtcaggctacaaggtaggctgcaaaattaaatctagacattcttttaatgccaccacacgtgttccgcttctctcttttaaagtatttataaaaatataaattgtacattttgtaaaata

SEQ ID NO: 13082 - DNA, 122 bp, Homo sapiens
atggcagagaaaagaaatgctctggtggacagcccaggggtgcagtgggcctgcagcacacgcctgcaggggacggggcatgggtctccactgaccaccccaaagccgagggctcccagtac

SEQ ID NO: 13083 - DNA, 122 bp, Homo sapiens
ctacattgctgtgctaaacctaaggcatttttgacctaaaaaattgaaatgtttgagcatcgtgaaagaactctttggaagcagtcctgctttctccctctttgccttaacttggcagtttt

SEQ ID NO: 13084 - DNA, 122 bp, Homo sapiens
ccagcgccggcgagcccggggaggaggcgccctatctggtgaaggtgcaccaggtgtgggcggtgaaagccgggggcttgaagaaggactcgctgctcaccgtgcgcctggggacctggggc

SEQ ID NO: 13085 - DNA, 122 bp, Homo sapiens
tatccaccttccaacggcttcagagaagacattaatatttccatcctgcaagtgagaaaacggaggctccagtagctgtggcagctgtcccagtggcagacctggccccccggggcctgcgg

SEQ ID NO: 13086 - DNA, 122 bp, Homo sapiens
aacatcaccgtgacatgcagggcttccagcttctatccccggaatatcacactgacctggcgtcaggatggggtatctttgagccacaacacccagcagtggggggatgtcctgcctgatgg

SEQ ID NO: 13087 - DNA, 122 bp, Homo sapiens
gaccacattttgtttctcaaagcaatccgatgatttctgaggtcctttgcagcttgaagacggaacgactgtggtgatcgagtagccaaaagttcacggaatgcactgtcacaattgtgatt

SEQ ID NO: 13088 - DNA, 122 bp, Homo sapiens
cgtgtgtgcacagatgctcttttcttttgggtaactgctcaggagggaatggctggatcacgtggtagatttgaagaaatgggcaaactggttttgaaagtaactgtgctgaattcccaccc

SEQ ID NO: 13089 - DNA, 122 bp, Homo sapiens
cctactcaggactttccccagcacttcacctaggtccacacactgtcctatctacatagacgcttcacatctccagtgccatgccggtacaaaacgggggctcagagaaagaattaatggat

SEQ ID NO: 13090 - DNA, 122 bp, Homo sapiens
tcatgaacgggattagtgtcataaaggatctcccagaaagctcccttgccctttctgccacgtgaggacacagggagaagatgccttccacgaaccagaagatagccctcaccagacaccaa

SEQ ID NO: 13091 - DNA, 122 bp, Homo sapiens
gtatacagatacatgtacgatgtgataaagtttgtgagatggtaattggattcccaaaaccggtatgttgaaggtgttttattctatctgcaaagagctctaagaaactcaaaagaaggctg

SEQ ID NO: 13092 - DNA, 122 bp, Homo sapiens
tgcgttttgaactccagtttgctctgtggatcccgctgcttagagcctgacatgccttcacgggtgtgtatttatcaccgccactttaagaacttctcacgacacttggacatctgtttttt

SEQ ID NO: 13093 - DNA, 122 bp, Homo sapiens
gacccacgcgtcctccccttcctcggggtttgtctggaggcagggactccccaagaggggcgctcgggccagacggctttggcgcccccagcggggaagatggccgcccctgcgcgccgctg

SEQ ID NO: 13094 - DNA, 122 bp, Homo sapiens
tacaccgtaacttatccgttccaatgttggcgggctctcggatgttcccaagttttggcgcgtccaaacagtgcagctctggtcgactgtcctctgttgggtgcatacccaggagagggacc

SEQ ID NO: 13095 - DNA, 122 bp, Homo sapiens
ccttgctgtcctgtactcaccgaatttcagagcagaggactctgactgacaggtgttccccgactcccagtggcgaaaggtcctcagggaaaacaggtgaacgctatcaaagtatgcttatc

SEQ ID NO: 13096 - DNA, 122 bp, Homo sapiens
gcagtttgatgccctgctgcagcaatcttgaaattcttagtaattttatctttgaatgctcgctttgtaagtgcaatctaaggatggtggcgtgagcatgactgaaggaagctggagatggt

SEQ ID NO: 13097 - DNA, 122 bp, Homo sapiens
ggagccccgcgtccgggcggtggcggcgggaggaggaggaggagcaggcggcggcggcggcgggaaaaaaaaaagagggaaaagttgccacttacgcggttgcttctccggcggcggcggct

SEQ ID NO: 13098 - DNA, 122 bp, Homo sapiens
ggaggggccgccccgagggaaccatgctgccttccaggctgacgtgtctgaggccagggccgccaggtgcctgctggaacaagtgcaggtgaacgctaggccactttccccctctaaagctc

SEQ ID NO: 13099 - DNA, 122 bp, Homo sapiens
aatagtttctgagatatccatcctaaagtggtggagtggctgcagtgggggaatgagcagcgttcccatgaatcatagccatctccagaggaaggtaaaatggaggttaaaaaattggaata

SEQ ID NO: 13100 - DNA, 122 bp, Homo sapiens
gtctgcccctctcccctgtgggatcgtgggcacctgcgttgctcactctcactgccgagccgcatctgcgtggggaggggttacgctgtgtttatcatccgccttctgatggactaactagg

SEQ ID NO: 13101 - DNA, 122 bp, Homo sapiens
tgctattggttaatggcagtaaagcccgcccatcagcgctggtctgctcctttaaaagaacgccatcgacgctcccctgtctttcagcgcctgcaggttccgggaggtcaggttgtattcct

SEQ ID NO: 13102 - DNA, 122 bp, Homo sapiens
aatgagctcccctcactctgactgctggctccttaacaccccaatgtaagtgaagggtcccgtggcttgatcaaatggtctcatccatggacagccctgctggtcagctaaggcccagggtc

SEQ ID NO: 13103 - DNA, 122 bp, Homo sapiens
gcttttcccccttttattgacttctgctcgggagccgacctttgtttcctaccccctgcccgcccagccaccgtgcccgcgccccgtgcccctgcccacgggtgcaggtttacctctttgcg

SEQ ID NO: 13104 - DNA, 122 bp, Homo sapiens
aaagtcagtgtagcttgatgaagcaagcgcaaatcctgtaccggccggtagtcctctgtccgtggcttgggaacaggcacgaggggagtgttccatggagaccgacaaggaacaataattcc

SEQ ID NO: 13105 - DNA, 122 bp, Homo sapiens
ctagattgatcagaaaagcacccgtggattttccttgatttctcaaaggaatgacagcaacgctccaccagatttcttcataggcccttctcacctattcagcactagtatcaaagaggtcc

SEQ ID NO: 13106 - DNA, 122 bp, Homo sapiens
cggggccatcctgggcactgcagggccctgccaggagctccctccaagtcgtgacaaccacggatgtctccaggcctcacacagggacccctgggggcagaatcaccccagggttagaggat

SEQ ID NO: 13107 - DNA, 122 bp, Homo sapiens
gccacagtgcctcctgtagggcagtctaagcttatcttccagataggcaggtttgaataccgatcctttttcttgaccttaaggaattcattcacccttttcaacctcattttccctgtttg

SEQ ID NO: 13108 - DNA, 122 bp, Homo sapiens
agcaggctgacatctcccaactccagaagcaggcctgctggagaatggcagtttggtgtacgctgtgcgcacgcgtgtgtgcgtgtgtgcgtgtgtgtgtgtgtgtgtgtgtgtgtaggggg

SEQ ID NO: 13109 - DNA, 122 bp, Homo sapiens
tgtgcacatgtactttgttaggagctttgggatatggaaagattaaaacagtgcagattccgcaaccacctagagcaatgccctggcctaggagagaacctgaaaggtggtagttattcaat

SEQ ID NO: 13110 - DNA, 122 bp, Homo sapiens
tatccgccctcctcctggagcactttcataggtgttggcaaagcaggtaccagtatttcacggaaggagaaggaagaaccgcccaggactgtgtataaatgtctatgggaatatttttaagg

SEQ ID NO: 13111 - DNA, 122 bp, Homo sapiens
caggtttcgagggggcaagcggcagccgccggggctggggggcgcacggcgcgctgctctcgcccaatggcgaggtctgtaaacaaaagcgggccccacgcgggtccccagccgggtggcga

SEQ ID NO: 13112 - DNA, 122 bp, Homo sapiens
gaggctgctgcagacaggacccagctgcctcaaatctgccgcctaacataagctgcggttcgaaaatcctgacagcacagggcttcctgggctctgcagagcaaactggaaagagctgggat

SEQ ID NO: 13113 - DNA, 122 bp, Homo sapiens
aacctggctccagaaagacaattaacaaaggctggagaccagccaccccctcgcggcgcacgcacgcaggcagctgcgtgggcatagccgcgcccgccagcgccctcggtgggcacagccac

SEQ ID NO: 13114 - DNA, 122 bp, Homo sapiens
acagccaagaaaactgggagcttctgcaaatcgttcttcttgccctcagattaccagacacgacgcagctggacttgtctcatgcctgcgatagggacggcccccaccctgacttgcatgga

SEQ ID NO: 13115 - DNA, 122 bp, Homo sapiens
gcaaacaccgcagctggcttttcgctgtcaaggagttctgctttcctctgtgatttctgccgcatcctgttcatttctgtctcagtcttggatttttcagctggaagggcatcacgcaccgt

SEQ ID NO: 13116 - DNA, 122 bp, Homo sapiens
cctgtgattatcaactttcctgtatgctgtggccccagacagcctagagccacgtgggtccggaattgaatcagcacccaccagagaaccacgtgccccacagcggcaataaccggcatcca

SEQ ID NO: 13117 - DNA, 122 bp, Homo sapiens
ccgctccgcagcgacaagggctagtcgcgcaagatcttctcaccattggtccctaaggaacggcggcctcctattggttaagtgccgggaaagggggcggacaatcgcgtgagtgctgcggg

SEQ ID NO: 13118 - DNA, 122 bp, Homo sapiens
aaccttggggtgcgcgaggaagcaaagacccagggggcacccccaccctcgcccaaggcccgagggtgggggacagctgaaatgtctttggtcttgtttgatgaccgcttggcggatctgct

SEQ ID NO: 13119 - DNA, 122 bp, Homo sapiens
aaagtgctgggattacaagcgtgagccaccgcacccggccttctcccaatttttaaaactcgctggctgggctgacagctacagggccaggaattcaaaacttagcctcaccagtctcccct

SEQ ID NO: 13120 - DNA, 122 bp, Homo sapiens
gaaaagttgtcagaaattcggattctcaggtcccacctcaaacttaatgaatcagaagttcgcagggtggggtttagtaatctgtgttattacaaactatcccagtgattccagcacacact

SEQ ID NO: 13121 - DNA, 122 bp, Homo sapiens
gtgacgccggggcgggcgctctaccagggcggacctgtgggcgggacagaactcagaggacgctattaaaagccggacgcttccggtggaagggagctgttgcggggcttgctgggatcatg

SEQ ID NO: 13122 - DNA, 122 bp, Homo sapiens
tgggaggagcaatgggggtcgggggcggcgcctgatctagagtaagagaggttcaagaggcgccaccacaaaacttaaactttgggccttgttaggaacctgtgtgttccatctgatggacg

SEQ ID NO: 13123 - DNA, 122 bp, Homo sapiens
cactgcctgcgcacttccgactatgcgccaggagcacttccggggcagagcctgagagcgcgcgcgcacgtggggccggggcggagagaggcgagcaccgggaaggggagcgtggggccgct

SEQ ID NO: 13124 - DNA, 122 bp, Homo sapiens
tttgccagacagttctcagaactcagaactggctgagctcattgactgtcccctctactgcgtcccacagaagggtccttccccaaggtgcgcagaagcagcggcacttacccaggggcatt

SEQ ID NO: 13125 - DNA, 122 bp, Homo sapiens
aggcccaaagaatcagggattgcacaagccagagcaatcgaacggttctgagtcatctgccggaagccttgccctcaatcaaggcggacgtgaagcatctacaaaggaggaatagtcaaagc

SEQ ID NO: 13126 - DNA, 122 bp, Homo sapiens
caagttttcatattcaaaaccgaggatgtcaagttaaagggaaacacacccgaggccctccgctctgcaggaggcaggttcttgtgcagagtccagaaaccatgggaagaaccaccttgaga

SEQ ID NO: 13127 - DNA, 122 bp, Homo sapiens
agaaaggacctttctactctcctggacacccgtcttcttagactgtttacactgtgtgatcgtgacttacagtcagaaaggggcttttggcttattggatagcataaaatctctattctatt

SEQ ID NO: 13128 - DNA, 122 bp, Homo sapiens
tccctaagactcagatcccacctccacagaatgggaacaatagcacctacctcctaaggtcgtttatttatttatttatttatttatttatttatttatttatttatttatttagagacggt

SEQ ID NO: 13129 - DNA, 122 bp, Homo sapiens
tcattttgtccctttcgtgaaccaccgtcggggccaaagacgtctgctgccacctggtggcgggacctggaatgacaagtctctgatccctgctgtctcccatttccagtatatctataaac

SEQ ID NO: 13130 - DNA, 122 bp, Homo sapiens
gcagcggcctccattggcgcctaaaaatggtcaggattcacattcaggtggattattccgcgccaggaacattctccacctgaaggctttgccggggtgttacaagataatactgaagggac

SEQ ID NO: 13131 - DNA, 122 bp, Homo sapiens
aggagaaagggaaaggaaaggagaaaggcatctctaaagggaaaggagatgcctgctgagcgtctactgtgtgccctgcgctgttccagaagttgaggatccaaaactaagtctaggctccc

SEQ ID NO: 13132 - DNA, 122 bp, Homo sapiens
tcgtcaccttgctccccgaaaagttccaggccccaggtgaggagccgtgtaggcccaatacgattggatgaaggagtgtacggggcaggaatcgtcagactggcctctggagaggagtttgc

SEQ ID NO: 13133 - DNA, 122 bp, Homo sapiens
aggccgtttaccttcgcgagcttcaccatgatggcggcggagtgtgaagcggacaagtggcgcagatgagtccagaagaagccaagcgacggcgatggcggccgcgggtgctgaagatcccg

SEQ ID NO: 13134 - DNA, 122 bp, Homo sapiens
cctcaagtgccagggctctgtcgcctccccacacccgggacacaccaaccgccggcctgccgccgcttacctccccgagcctatagtgtaccttccgcccagaagccactttacccgtatag

SEQ ID NO: 13135 - DNA, 122 bp, Homo sapiens
cctcccccgccctcgctttcctttgtgctgtggccgggccgggctgagccgggcaggctgcgctggctccgctagctcggtccccgccccgtccccgcccggacctcgcccgctcgaaggtg

SEQ ID NO: 13136 - DNA, 122 bp, Homo sapiens
cgaacggcgtgactaagccccgcccacacggcgctcctggcggccaatggaaatggcttacgagacgccttctccacgcgctatacttatacggaccaatgggtgcgccctgtggggagtgc

SEQ ID NO: 13137 - DNA, 122 bp, Homo sapiens
cgtgattcgcccacctcagcctcccaaagtgctggaattacgggtctgagccaccgcacccggcctcttttcagacattttaaagcacacttaggttgcatggtgcatagaaagttttaaaa

SEQ ID NO: 13138 - DNA, 122 bp, Homo sapiens
gccacgcccaccccctcgggccttggctctcgcagccgctcgggtggacgcagccggtggcgagtacccctcagtcggacccgtaccaccactacttccggcgtctgctccgcgccccccca

SEQ ID NO: 13139 - DNA, 122 bp, Homo sapiens
gagatggagtattatagtagagacaaaactgatgtggagtcaggaggcccgaggttccagcggcaccatttatagtggagtcttcatcatggtgcatttaacttacacacattttttttttc

SEQ ID NO: 13140 - DNA, 122 bp, Homo sapiens
tgcgcaggcagagctgccgagcacagctccgaacagtcgcagatgcctgtgggactaacacgtatggagaattaagacgaccgagatcatgcaaaacatgcgagtgggtactctgctctgga

SEQ ID NO: 13141 - DNA, 122 bp, Homo sapiens
tcccgctgccgtcggccatcacttcgcagctggacaaagcgtccatcatccgcctcaccacgagctacctgaagatgcgcgccgtcttccccgaaggtgaggcctcaggtgggcggccgggg

SEQ ID NO: 13142 - DNA, 122 bp, Homo sapiens
aaatgttattaagaaaatcataaggaagagaaaacactcgtcttcactatgaagtgcaagcggatcatcagaaaggtctttaccccattgtcctcacattgggttggtggaggaggaagagg

SEQ ID NO: 13143 - DNA, 122 bp, Homo sapiens
cagagggaggcagccatccatctgggatggtcctaagcatggaatcctaactcctgattccgtctcctatttcttgcttggctacgccagttcccaaatctggtagatgtccatgcccatgt

SEQ ID NO: 13144 - DNA, 122 bp, Homo sapiens
tctcaaactagcatgcattcaaatcaactggaggcttgtcaaaacacacaaggtttcatccgcaggtctgggccggggctagagagtgtacatttctaaaacgttcccaggtgatgctgctg

SEQ ID NO: 13145 - DNA, 122 bp, Homo sapiens
acctggcgggggtgaccttcggacgtgcgacccgctcggagaagggagggaactgtggcccgcaacaaagcagtgacaggcccgacatcccctgcagggcgatctttccctcagctgcctgc

SEQ ID NO: 13146 - DNA, 122 bp, Homo sapiens
tcttctatctaaatgttgacacaactttatatctagaaacttcggatttaaagctcagcccgagagaacccatcaaatgttggagctgcaaggggctagaaagcatcaccagacctggattc

SEQ ID NO: 13147 - DNA, 122 bp, Homo sapiens
ttgcaagttttctggcaatagggagcccccaggggcaggggagggcttggactgaaccctcggaaaggggcacagctgggctgggctcctctggttcccaatttctgagacttcaggaggag

SEQ ID NO: 13148 - DNA, 122 bp, Homo sapiens
gggtgaggggcacccagctccagaggctaggtgggcgtcgctggtgggtggactcctgggcgctgcgcggagccgcgccggctgggttagcgcgggcggggcgcttagtcccacccccagag

SEQ ID NO: 13149 - DNA, 122 bp, Homo sapiens
gggggatgccctggagacggccttggccataggtaactgggacagggtcgggggtgaggacgaaaggacccatccatcctttacgatggggggctgctaccaaagggaagcctccgcaaact

SEQ ID NO: 13150 - DNA, 122 bp, Homo sapiens
ctggctgccaaggagctcagacctgaacttgggactcacctgcatcaaagttgtagatcacgctggcatttccttctactcttttccaagactcactttcccagactccgaaaaaaaaaaaa

SEQ ID NO: 13151 - DNA, 122 bp, Homo sapiens
gtgaagaacgaggaggttaatttgaaaatcattcactcttgctcgggtctccggtgggcacgcccattgtgtggcacctactccattcccttcacgggaaggcgcggctgtcactccctcca

SEQ ID NO: 13152 - DNA, 122 bp, Homo sapiens
tagctatgtgtgggtgcacgcggagagcggcaagaggtacgcgttgcagccactggactacgaggagctggagctgctgcagttctaggtgagagcgcgcgacgcgggcatgccgcctctga

SEQ ID NO: 13153 - DNA, 122 bp, Homo sapiens
agagaaggatccagacaggatcaagccagagcacccatctcttcttccaggtctgcaccacggtaaaagcgttccggtctcctgctctgccccattctttaccacaagcccccagtgaacgc

SEQ ID NO: 13154 - DNA, 122 bp, Homo sapiens
ccacagtttgcaaagcatgtttgcaactaacagctcctctatgctgcccacagtgccatccggattcatcttcaggctttgtggacccagcaggccctggcctagccctcttctcctgcctc

SEQ ID NO: 13155 - DNA, 122 bp, Homo sapiens
tttggagaaacagctgggaagaactggatttgcaggtattgctggagccagagcgaagcccggccactgtcaccatgggctccagcctcgcctctctgggcctggtggtgagcggcttcagc

SEQ ID NO: 13156 - DNA, 122 bp, Homo sapiens
gtcacatcccatgtgatctctagttttactttcttaaggattttcatggaaaccctgcctcgaggcagaattacaagacgagtgatattgaaaaggagacaatctattatccacatgactgt

SEQ ID NO: 13157 - DNA, 122 bp, Homo sapiens
gaacagagccttccacttcctggtctggagagttcgccctctgctaggcagcttgagaggcgtgatggaccgagacggtgcaggccactgccctggaccagccaggtttgtgtgcctgtagc

SEQ ID NO: 13158 - DNA, 122 bp, Homo sapiens
catttgcatggtgttgttttgttagatatcagcccagaaacagaatgtcagagctttcagcgagttggagcaatcacctagctcaaccctcccttggagggcggggaatctgagactccgag

SEQ ID NO: 13159 - DNA, 122 bp, Homo sapiens
aagggcctttatgcaaagtgaacttggtctcctggggggtgccctggaatctgccttctgcgccactcagggtcgtttgtggccggagtgcatggggctctgactgccatgtgccagccacg

SEQ ID NO: 13160 - DNA, 122 bp, Homo sapiens
gccatcgccagttagtgctttggaaagcattgctatactcctgttcctccattcttacatcgtttccactttgggtctctgctctttagccacactaacctctcagttccttaaatgtgtta

SEQ ID NO: 13161 - DNA, 122 bp, Homo sapiens
gctaaagcatttttttattattaacgtttttaaataaaatcgacacgactaatgcacatacgctcttttttaaaagttacatattttatttgaacagtttgctcctgctaagatcatctgtc

SEQ ID NO: 13162 - DNA, 122 bp, Homo sapiens
cagatggactggaagtggagtggcagtgaccaaggaggaggaggtgtgataggcttcccacgcagggtagatccagagacaccagtgccacccataggcccctaggactgcagtggtcaccg

SEQ ID NO: 13163 - DNA, 122 bp, Homo sapiens
ttcccaggaggacgtatgggtttttcctgtcgctccagcttctctttcgcggcccttccacgcttgtcacttacctgagcgcagccaatcagcacctagaggttgggctactttcggccaaa

SEQ ID NO: 13164 - DNA, 122 bp, Homo sapiens
ccgggctgatgggagtgtggaggcggggatgtgttgaaggactcgggcgcttccctgcttcggctgcgggctccctttcggtcttccccggctgcggggctgattctcctttgcagccaaag

SEQ ID NO: 13165 - DNA, 122 bp, Homo sapiens
acctagcggctgggctctcacagccactagaaacccatcagcctttcccctgggtctatgcggggctcttcagccctcctgggagctcagtggctgggatgctgctttacagacagtgcacg

SEQ ID NO: 13166 - DNA, 122 bp, Homo sapiens
agccccgacagccagggacctcgacggccagaatccactacatccagaagcccttataaccgggaacctccatagccaggagcccctacagccaggagccccttcagccagggagccccgaa

SEQ ID NO: 13167 - DNA, 122 bp, Homo sapiens
caaggcatagctgcagttttctacagaccagttgctataagaagtttaaaatgagctctccggtaatagccacaattttcactctctctgaaaatggatagagtccagcactgacaatctcc

SEQ ID NO: 13168 - DNA, 122 bp, Homo sapiens
gccccacaggagggaacgggggctcaggaggcctggtggggcagagctgggacagctgggcgaaggggctgggtcctggctccgcgacgagggcccattcctgggtgagggagggtggggca

SEQ ID NO: 13169 - DNA, 122 bp, Homo sapiens
ctgaagagtcattttatcaagttgaaaccagaatccaggatgattcgatctcctgaatgccgggctggaaaacccagcaacgagctttgaaaacatatcacccggacaccaggggcagaggc

SEQ ID NO: 13170 - DNA, 122 bp, Homo sapiens
ggcgaagggtctaccgtgacctgtgagcaccccacgccgccactgcgccaaaggaaactccgtgaagaaggaaggacacccactcacggcttttcctgagaatttttaaatgcttataattt

SEQ ID NO: 13171 - DNA, 122 bp, Homo sapiens
tacgggccatttggcaaactaaggcacagagcctcaggcggaagctgggaaggcgccgcccggcttgtaccggccgaagggccatccgggtcaggcgcacagggcagcggcgctgccggagg

SEQ ID NO: 13172 - DNA, 122 bp, Homo sapiens
cgctcacgaagcccagcttgtgctgctccttggcgccctgcttgatcttgaggatgttgtcgtcggaggggttgaggtcgaaggtgaagagcttggccaggtcgccgcgcgtgtccagggag

SEQ ID NO: 13173 - DNA, 122 bp, Homo sapiens
gtcttgccatgcatctcaaacatccacccatggtagcagagaagcagcttcagggtttggcggaagaagaagatgcccgtcacccagacgcccgtggagaagatggccatgctgagaagtgc

SEQ ID NO: 13174 - DNA, 122 bp, Homo sapiens
ggaagggtcggagggaggacccggacgggagcaggttcccttcgcgcctctctggagggtcggcggggccctcaggctggtgctcacccgtaggaccgggacggtgttgtcacacttgtcac

SEQ ID NO: 13175 - DNA, 122 bp, Homo sapiens
ggaacacacgtgaacgccggcagggtggagagaaggaggtgacagctgctcccgtcgccccgccctttctgaaagctgatggggcagatcttaaagaccaaggtcctcaaattcctgagtcc

SEQ ID NO: 13176 - DNA, 122 bp, Homo sapiens
gggtggagcgtgtgataggtgcgtggggtctaagcggcggcctctgctcttgggcaccgtcgggccaattcccctctactccaggaccacacttccttcttccttgctggtgccggcactgt

SEQ ID NO: 13177 - DNA, 122 bp, Homo sapiens
tgggcaaccaacacagggccatgaatgcgcagtgtagagctgagagcatctgagctcagccgaatagggcatctctgggagacagcctggaacattctgtgaactattccccctgccagggc

SEQ ID NO: 13178 - DNA, 122 bp, Homo sapiens
agtcagcatcctggcactgcagcgcagatctcagctcctcccaagagccccagggtgtggcgagagaaaaggtcatgagcaaacacctctggctgaaagtagccggaaaggcctggctactt

SEQ ID NO: 13179 - DNA, 122 bp, Homo sapiens
agagaaacacacacaactttcagttggggaataatctccggcggctgcttctgccccactcgccccgggcccattctcttggccttgaaccctcacctctccctcccagtggactacactgg

SEQ ID NO: 13180 - DNA, 122 bp, Homo sapiens
aggcactacctccaaaccaatacaagtaagcagtcatcgtgttctgtatcatcacctactcgcagtaaaagcatggcagtttcaccttagaagtttcttgaagtaaaacaccttagttttat

SEQ ID NO: 13181 - DNA, 122 bp, Homo sapiens
tgagtctcttgccctatctggatattacagttgttctggacaaaatgtggcttccttcctcggaccctgcatctggggtaggtctgttttgggggctgagctgggtcacacttgcagcacca

SEQ ID NO: 13182 - DNA, 122 bp, Homo sapiens
agtaagtgttacagttcttaaagatggtgggtccggagtttgttccttctgatgttcggacgtgttcagactttcttccttctggtggattcgtggtctcgctggcttcaggagtgacgctg

SEQ ID NO: 13183 - DNA, 122 bp, Homo sapiens
aaattgacgtgtcctgtctactcaccttgactgaccacgttttaggcgtgaagatctccccgcagcccgtttgggcgctccttcaacgcctcacgctcctcctactcacccgtttttccctt

SEQ ID NO: 13184 - DNA, 122 bp, Homo sapiens
ctagtttgggaaacagtatttgggaatctggtctcctgcaaagccagctttaatcacccccgaaccctgcaaggaaaaacaaagttgagctgcccacatgcaccaccagatgaagccagtcc

SEQ ID NO: 13185 - DNA, 122 bp, Homo sapiens
taatgctctgaaagacgcccccggccgtggctgcccagacgtatttggcgtcgcagtagccgacaatggcggcctcctggcagcagccatcgcacatcaggttatccacgtagctctgccaa

SEQ ID NO: 13186 - DNA, 122 bp, Homo sapiens
gcgcggggcggtcgtgtggttgatcatcatacccggaggaagccctgagggccgtaggggcgtcttccccgtcgcaggctacccgcggacctggcccccaggtccccgccacctgtcgccag

SEQ ID NO: 13187 - DNA, 122 bp, Homo sapiens
cagctcctccggtccctcctccccctctgcactggatgcacctaggagctccccaccactcgcgcacgccctgaagataccgactaccctctgactcccctgcctggaagcccacacccgct

SEQ ID NO: 13188 - DNA, 122 bp, Homo sapiens
ctgctcccctccccgcccacccccccatccccccccaaccgccgtcctcccggacactaacgacacaattgttaagtgcacttgtacacttcagaaggatttgcattcgtgctgtgtgcagg

SEQ ID NO: 13189 - DNA, 122 bp, Homo sapiens
gaccagaaagccttggacaagaagcgcagggtcctgagtgtccattgcccacaggatactcggctcaggagctttgcggcgtttccttagaacaataatgcatcgaggccttggggactcaa

SEQ ID NO: 13190 - DNA, 122 bp, Homo sapiens
tgtagtgagagattttgtttcttttaaatagaaggggcgcaggtgtgaacgtgttatctgcggaagatgtggggtggccgtggctcctttgcatcccacagactcatctcgcagcctccctc

SEQ ID NO: 13191 - DNA, 122 bp, Homo sapiens
cacagtgttccctgacaagagccagccccagcacgtgcacgacacccacagcgatgggctcgtggaaaacaagctcagcccggctcacggtgcccggagatccacctggcacccatcagtga

SEQ ID NO: 13192 - DNA, 122 bp, Homo sapiens
ccgaggccccttctcagcagacagaacgaggacacaagtctcagggcagatacgcgcatccgcaagtgtagacaggaaaaaccgtgaatttacttgaaaggcaaaggccgcatgagctggct

SEQ ID NO: 13193 - DNA, 122 bp, Homo sapiens
tccatatcggtgtttgatcatcccagtcccggggaaaggtctttccctctgctttagtctcggctcattggagttgctgtgtggggcccgcagagctctctggagacggactggctgtggac

SEQ ID NO: 13194 - DNA, 122 bp, Homo sapiens
ggcgtcggcgcctgaagttggggctccgtcctgcctccctgcgggccgggaaaagggtctcgcacgtgcgccccccgcggtccgcgatccccagccgtcggcctagccccaggcgggtcgat

SEQ ID NO: 13195 - DNA, 122 bp, Homo sapiens
tcatccgacaccagccgcctccaccatgccgccgaagttccaccccaatgagatcaaagtcgtatacttcacgtgcactggagttgaagtcggtgccacttctgctctggcccccaagattg

SEQ ID NO: 13196 - DNA, 122 bp, Homo sapiens
ccgcggcgccccgcaggccgcccgctcaccgcgcaggggctgaaggcgtcccgcttggcgcgcaggaagttggagaggttgccgtacttgcagaactccacgatcaccatgagggggcctgc

SEQ ID NO: 13197 - DNA, 122 bp, Homo sapiens
cggccgccggaggcagttgggggcgcggggcccgggtgcgctgggtggagcgcggagcggcgggcggacgggcgcggcggctcccgcgagcctccgggccgttataaaggctagccccgccg

SEQ ID NO: 13198 - DNA, 122 bp, Homo sapiens
cgttcgtttatccaaccactctttgctgagcaacaaagatgtgccaggtacagctcaaggcgcttgcagtacttcgtgaacaaaatagacaaagatctctattctatctgtagctacaaaaa

SEQ ID NO: 13199 - DNA, 122 bp, Homo sapiens
aaaatattgtcatttcttttaattcacagcattactttcaagccgaacaaaggccagggccggggggaggcgggggaagggctcggctgtaatgaagcgcctctaaggcggaggtgctgccg

SEQ ID NO: 13200 - DNA, 122 bp, Homo sapiens
ctgtttcaaaagaaataataattttattctcttgtctatccattcggtagacaagtgtagcgttactgcctcctttttgcaaataataaggattttaggagacagacattatcagttcgaga

SEQ ID NO: 13201 - DNA, 122 bp, Homo sapiens
cgccccgggatgtggttcgtaggggtgtctgcgcccttctgctcgggttcaaactggtctcggattagtgtcccagaccctactcggtcacggactcacactttaggggatcattttcttcc

SEQ ID NO: 13202 - DNA, 122 bp, Homo sapiens
ggtaaagcaacctgacctttctttcagggaactgtcagcaacacaagccatgaataccaacgcaaaacagactctcactgtagatcacacgggaaaaaataaaataaaaaggtaaaatcctt

SEQ ID NO: 13203 - DNA, 122 bp, Homo sapiens
aacagtgagaacacaggcaatggatttgcggacgactcggatcttagagagcttggaggccgcaccgcctgtcactttggcgacgcgcagctgggacagctccaccttcaggtcgtccagct

SEQ ID NO: 13204 - DNA, 122 bp, Homo sapiens
gccctagaggcggtcgcacaagggcgagctggagcactagtggagttggcgggaaaggcacggctgcgggcgccccctgtccgcacggaggagccgaagtcccgcagggtggggtccccgcc

SEQ ID NO: 13205 - DNA, 122 bp, Homo sapiens
tagggagccccacccagcgcccgtggggattaaatattgcgcgtgctcagttctgttcagcggctgcaggctgctaagcggctccgggagctgatttggatagaggctgttgagcagggctg

SEQ ID NO: 13206 - DNA, 122 bp, Homo sapiens
gaagttcagaggtgccaggctgtgtcttgtttgtgcaaatgaaacagaggatgacaaggtcgggtgggcatttcgagctctgccccaagtctggtcggcttgagagtcaacctaggagcctc

SEQ ID NO: 13207 - DNA, 122 bp, Homo sapiens
tttcaacctttgctgttgcaaagtattaaagtcctgtgcagttttgcaaatatatctcaccgcagaaagatctcctttcctaagaagactgggaagaacggctttccacttgccagtaatgt

SEQ ID NO: 13208 - DNA, 122 bp, Homo sapiens
ttaccctgacatattcaaacatcttcatggtaggaaaggtcttgagggaagagacaaaaccgtctgggttacggaagccagcaacaacattcgggacccctgggaggaatgactgagcccac

SEQ ID NO: 13209 - DNA, 122 bp, Homo sapiens
ccgaatgcggtccggaaaccagaactagagaactctatgacccacctgagcttccgctcccgccccgctgaaacagaagagggcccttgtgggctggttttggctagtttggtttacttttc

SEQ ID NO: 13210 - DNA, 122 bp, Homo sapiens
agccccgcggcgtgagggaaggggagctcagcagttccccgcgcggggcccaggcgtcggcggcagggcgggcccctcaccgccagcgtgccagccccgcccctacccaccagtgtgccagc

SEQ ID NO: 13211 - DNA, 122 bp, Homo sapiens
cgtggaaaatagcaagagttactggggggttcccccgtaatctgggttgctgtccgagcccggggtccagctccgtacctgccggaggtgcctccaagccggagttcccgcgcagcgcgacc

SEQ ID NO: 13212 - DNA, 122 bp, Homo sapiens
agctcctgaacagacacaggatgcacacatctaagtgctttctggccccagatccacatgcgcagatgtagaaggggctttcagctgatcacgagggtgtggaaaggtctcaagggtgattc

SEQ ID NO: 13213 - DNA, 122 bp, Homo sapiens
ttaggaacttccaacaccttggccctcagtacctcattcaaaagcacttccttactcccacggaaaagaagtaatcccagaatgcgccgctccacgccggtctctatgcagtgcattctggg

SEQ ID NO: 13214 - DNA, 122 bp, Homo sapiens
cggggcgcgcccggggagcagggcagggggccgagttcctggcgcgggctgcctgcccggcggcctctggctccaggccggagaaggcaggtccagacccctccggaagcgggagcgtgggc

SEQ ID NO: 13215 - DNA, 122 bp, Homo sapiens
aagactccatggatgccactgatcaagtggtatacaagcattgcacagtgtctggccaaacggatgcagctaaaaacgctgctgcccctgcagcaagttctggctctgggaccagcaccccc

SEQ ID NO: 13216 - DNA, 122 bp, Homo sapiens
tgtgagtccagaacatctcctgaatacaaagaagcagggtttgttactgtctattgcaaccgggagcctgtagtcatcacctcaaagttgcgagggctccatgcagtcccaatgctcttcac

SEQ ID NO: 13217 - DNA, 122 bp, Homo sapiens
aacagggtgacacctcctctctaaaaataaacatttaaaaattaacgtggcatggtggtgcgctgtctgtagtcacagctactccgaaggctgagacaggaggatcacttgagcctgggagg

SEQ ID NO: 13218 - DNA, 122 bp, Homo sapiens
gggccatctgcttaagtcaaggggactggtaatggacaggataaccttcccaagagtgggcgttagaagagggggtacatgaaggtggccttcggtcacctaggaaggctccttgctgaccg

SEQ ID NO: 13219 - DNA, 122 bp, Homo sapiens
acaagctgggagcaggcagcagagagatctgtggcacatgctggtccctagcattgggcacgagggctccagatcagcacagcatttggaaacccactttagggtcagaactggacatttgt

SEQ ID NO: 13220 - DNA, 122 bp, Homo sapiens
accctccagctcaggtgagttcagagtgagaacgcaccgccaggcttggacaaaggcacccggcctacaccccagcggctccccgccggggcctacgtggacttcagcctccagccacaggg

SEQ ID NO: 13221 - DNA, 122 bp, Homo sapiens
aagcctgtcttcagagaaacagcagagccctgatccaattctttcctgtattcccaggtgcggtgtgcacttgcttcttgcaagacagcttttgtacctaaccacattcattttgatttggt

SEQ ID NO: 13222 - DNA, 122 bp, Homo sapiens
atgcggaggtaatgaagttgtcagcggcgccccgagtgtggcagagcctgatattcaaatcgccctgcccgctccgcctgctcccgcccgctggtcccgggagccccaggctgcgcgcgccc

SEQ ID NO: 13223 - DNA, 122 bp, Homo sapiens
ccagcgctgagcgttcacctggtgatcaggcgcatcccgggaagcaggccgaagccaccacgcccttgcagggccacaccggccaaccagctgttatctgcatggatgaggaacgcatttaa

SEQ ID NO: 13224 - DNA, 122 bp, Homo sapiens
tccgccactgcccccggcctccagcactgcactgcccacgagtttgcggggtgtgagcgccgaaggagaaccccggaccgcccagtctcagcctaaaaacttggatccaagagtcctacggt

SEQ ID NO: 13225 - DNA, 122 bp, Homo sapiens
acggagctccggcacagccaagtcctgaatgacatgcagccaattctcttgggccctttccgggtttgtctgtggtccttccttctgtgtttccaggctgagtcctaaggccctggtcctgt

SEQ ID NO: 13226 - DNA, 122 bp, Homo sapiens
gtcgcccccccgccctaagctcctggagaacagagacctcgtttgtctgtatgcagtgcccgggtcggcgctggccccgggatggaggcctgaagggcagacatgctgaggcaaccggagcg

SEQ ID NO: 13227 - DNA, 122 bp, Homo sapiens
atcaagcagcttcagcagacagtgagagacctggagtcgaaggacgaggtgcctggcagccgcctccacctaggttctgcccgcagggctgccggctcggatgcggaccacctccgggaaca

SEQ ID NO: 13228 - DNA, 122 bp, Homo sapiens
ggtgcccggtacctgggtgtcatcggcatgctccaccacggggaagccgttgtgattggacgccgtgtcgctcagcacgtccacaatgacgccgaccttctcacgccgcctcaggcaggtca

SEQ ID NO: 13229 - DNA, 122 bp, Homo sapiens
taacagctgtaacacacactgtgaaggtccacggcttcattcttgaagccagcgagaccacgaaccctctggaaggaaccaactctggacacagcaggacgtgagacttctacctgctcact

SEQ ID NO: 13230 - DNA, 122 bp, Homo sapiens
attcatggctaggcgtggtggctcacaccataatccagcactgtgggaggccaaggcgggcggatcacctgaggtcaggagttcgagaccagcctggccaacatggtgaaaccctgtctcta

SEQ ID NO: 13231 - DNA, 122 bp, Homo sapiens
gaatgaaatatctgcaaccattttgaaatttttaatggggtgtgtgtgtgtgtgcacgtgcgtgtgttgcgggtgtgtgtctccgaaacatgatttcttagaaatgcagcggtacttgtctg

SEQ ID NO: 13232 - DNA, 122 bp, Homo sapiens
tttccactggactgtaattgagatttaaagagttctctttgattcttccatctttcacctcgttagcctaacagatgttgcattaggtgaaaaatttccttaaactgctttttttccgtgtt

SEQ ID NO: 13233 - DNA, 122 bp, Homo sapiens
cgcctccctctcttcctcaactccgtgggtccatgcacaaagctttctcttcaaaaagtacgctctgaaaagaagcaacctaggcaggttcgttcaatggaaatattggatttttactgagt

SEQ ID NO: 13234 - DNA, 122 bp, Homo sapiens
tccctaagtcactttcctttctgatctagttcttgggtgatgaatgaaggtggaaagtagcgaaggttgctatgaaaagcttggactttattaccagggccactgcattttcaacaggagtg

SEQ ID NO: 13235 - DNA, 122 bp, Homo sapiens
gcaccacatcccaatggccccataatccagtctcccaggggaagtcactccagatgactccggttcaaccctctggttgttggtagaaattgcctgaattgcagctgaaatcttctcccaaa

SEQ ID NO: 13236 - DNA, 122 bp, Homo sapiens
cagcgatcttgcaaactggcctaagagtgagggacaaattctgttgggatgtgtgggggccggcacagggagaagacctcctagcagacacacactcacatttcaggtagaaaatcggcgcc

SEQ ID NO: 13237 - DNA, 122 bp, Homo sapiens
cctcaaccacagctctggcacaggtatgcttcatacaaagagaactacttccccagacaccgctggtgagagctggccagtgagttagccaacagaaaaggttgctggctcaaatggctggt

SEQ ID NO: 13238 - DNA, 122 bp, Homo sapiens
ttattattgatgtcaaaagcgccaggctttgcagggacaccagtgggaggtacataggtgcgtgtctgggacccgagaatctcagttctgtaacttcgtcctcagtccaaggtgcgctgctg

SEQ ID NO: 13239 - DNA, 122 bp, Homo sapiens
gccgcttcgctccggacctgcctggagcctacaaaaaacaagggctcgtccttgcactctcgccccccatggatcacccctagaaggtgctttccccaaccctcctggtgccaaggagagca

SEQ ID NO: 13240 - DNA, 122 bp, Homo sapiens
gttctagacgcagtatcctcagaagccaggggtccttacagtagccctcgcgggccccagcgcccacccagagcgaggggcctccgacttggccccggcctggcacaccgtcccggaggccc

SEQ ID NO: 13241 - DNA, 122 bp, Homo sapiens
gggaagacagctaaggaccaaaccttggtgaacatgaaccactaagggtcagagagaaaacgctccatgaaggagactgaagaagccgtggaggatgcaggagaagagcaacaccagcagta

SEQ ID NO: 13242 - DNA, 122 bp, Homo sapiens
gccagcaggatcatggtacctgcctccagggagggcaacgtccacccactgagtccagcccgcccaccccacccactccggagcacctggctctgccctcaggaactccctgagctttgcac

SEQ ID NO: 13243 - DNA, 122 bp, Homo sapiens
gtaaaatgatatgatatctggggtttgttgtgaatattttagcaaaaaataaataagggacggggtaaagaaatgtggcaaaatcttgataaatggttgcatctgtgtagtgcgtatatgca

SEQ ID NO: 13244 - DNA, 122 bp, Homo sapiens
taataaaaaaacttctgattttatctgaaaacggatgttccaaaccccaaaccaccaacccgggcttgctcgaaggccccttccctggtcggtgctggcgccgggtgctgggtgcagactgg

SEQ ID NO: 13245 - DNA, 122 bp, Homo sapiens
atacaaaaattagctgggcatggtggcccacacccataatctcagctactttggaggctgcggcaggagaattgcttgaacccgggaggtggaggttgcaatgaactgagattgccccactg

SEQ ID NO: 13246 - DNA, 122 bp, Homo sapiens
gaaggcctccgccaatggcagagctcccatcgcagagcctgcgggttaggttgtgaggcccgggccgggggcggggaggagccaagggggcgagcaagctcggtggctgggtgggttggggc

SEQ ID NO: 13247 - DNA, 122 bp, Homo sapiens
acccccatggccagctcctcagtcagccaagcctggctaaaacgagagaatgccccctcccgcccgttcacttactggtgcccagcaccgggcactcagtgaggccttgcaatacggttcac

SEQ ID NO: 13248 - DNA, 122 bp, Homo sapiens
aggcctgaggggcagacgtcagcaaaggcctgtaggacgcaggagtcaattcactcgccacggagaagggcaatccaggccgagggtgtggctacacggggaggggtggagagtgggtacag

SEQ ID NO: 13249 - DNA, 122 bp, Homo sapiens
tttgagaaatgggatgcaggcctaagttaagaatgctacagaaaaatatcgatccctaagcgtatttactgttatgtgaatgtgtgtgtcaaaggacttaggtgctttgggggagaggaggg

SEQ ID NO: 13250 - DNA, 122 bp, Homo sapiens
taaaaaggtgggcatggactttacagagggcaggaatgaggccatgacctctttcagacccgttatttcaggacaagccaactaaagcccagggaatgcagggacggccttcaggggcgggg

SEQ ID NO: 13251 - DNA, 122 bp, Homo sapiens
tcgtttcatgcccaggaagatgataatgaaggacttcttaccatcctgacgactgaaactcgagactccttccccttgctggatgtgttttgctttggaggtaaataaataaaagcaagtgc

SEQ ID NO: 13252 - DNA, 122 bp, Homo sapiens
ggagaaaggaagaggagggaagctggcggaagaacgagcttagaaggcgcttccgatgggcggagtttaggaggtgacgctatgcaccgaccgcctcttctagtgccttctctgtctagcgg

SEQ ID NO: 13253 - DNA, 122 bp, Homo sapiens
cacgtgagggctgcatcgccagtaagcttgggtccccaatttccactcccaccaagagtacgagccccctcctttacttccattcccatctcaccccaccacatcaggtcctgtcactcatt

SEQ ID NO: 13254 - DNA, 122 bp, Homo sapiens
aggcaccccggctcccttgtccgcgggcaggtgggcgccggctacccatccccgggaggacgcctctgttatgttttcaattaatttaacaaaccaatatagaagagagaaagaaaaattat

SEQ ID NO: 13255 - DNA, 122 bp, Homo sapiens
atcccgccaaagcccttaattgcacgcatctaagatggccgcccccgcccggtagcggggcggaaacgagcccctctagcttgctagccgagcccacactctttggcgaaggccgccgaact

SEQ ID NO: 13256 - DNA, 122 bp, Homo sapiens
gcgccatggcaaccaggggaaataaacactacgagtttcacagtccaagctctgccgtgacgtcatctccagctccagcctgctggggcctgtgctgactgtgccccagacagccttagctg

SEQ ID NO: 13257 - DNA, 122 bp, Homo sapiens
aaaatagcggacgtggtgcagtctcagacatctgctccctgagcccctgcttactgaggccgaggctgccgccccctatctactccctatctaccccctctctatcctttgccctcctcctg

SEQ ID NO: 13258 - DNA, 122 bp, Homo sapiens
gcaagccgcccgtttcctacctcccgtagaaaccccccgtccgtcccgcccccctaagggcgcacccctctcacggcgtgagcgccagccccgggagctccaggaactcaggagaaccccgc

SEQ ID NO: 13259 - DNA, 122 bp, Homo sapiens
gataaactctgatgtaggaagtatcaccctcatgagagtggaatttggtcatccagttgacgcagggcatattccatgtcttcttttctgagacacccaaccatccccactccatccttctg

SEQ ID NO: 13260 - DNA, 122 bp, Homo sapiens
ggctccttccgagtcccaggagcaggaaaggcccagaaccagaggctcccttgtcacagccgctcccgtggcctgctcggtgccctgtccttgcgtctctgcctgcaggtcgtcactcctta

SEQ ID NO: 13261 - DNA, 122 bp, Homo sapiens
ggcaagcgcctgcggggctgcgaaaagtaaaggcaacgaacaacgtgggggaaatcgtcgcgaatcgatcggccacaatagttggaatcccaggagcgctccaacttacccaaaatatgaca

SEQ ID NO: 13262 - DNA, 122 bp, Homo sapiens
cgctctattccagagaccgagtggcagggcggccactgtggcggggctctttccccgtttcgcctcagctacccctcagctccggtagtcgccagtccggggtcgtcgccgtttggggcggg

SEQ ID NO: 13263 - DNA, 122 bp, Homo sapiens
agcaggagttacactgggagcctgaggtcctcaccttcctctcagtaactacagagaggacgtttccctgtttagggaaagaaaaaacatcttcagatcataggtcctaaaaatacgggcaa

SEQ ID NO: 13264 - DNA, 122 bp, Homo sapiens
aactcatgacaccaggagtggcccctccagacctgcattctgcaggctgccctgcaggatcgcgtccaggggctctccaacctcccctgcccccagagaggccatctgactcctctgcagta

SEQ ID NO: 13265 - DNA, 122 bp, Homo sapiens
tggcacctgaaagagatggtttcccgggtcaagagcattaggatgccaggtggtggcttgcgcctgtaatctcagcactttgggaaggccaggcaggaggattgcttgagtccagaagctga

SEQ ID NO: 13266 - DNA, 122 bp, Homo sapiens
actgctgacgccactcagaggcttgtgcacgtgtcctgcttccaggcagagctgggaactcgcaccccgtcttctgcacgcggccgtggaatgtcgggatgccggcgcttccttcccgtgtg

SEQ ID NO: 13267 - DNA, 122 bp, Homo sapiens
aagcgggggcggaggagcgggtcgcgccgctgacattcgccaaggacaggatggggtgggcgcccgccggtggccgactccgccccgcctctcaggggtgcgagtcatcagcgcagcggcgg

SEQ ID NO: 13268 - DNA, 122 bp, Homo sapiens
actcacctacctcttttcaagccggcctagccccttcccggaacctcggctcccccccaacgaaactactgctaagccaactggactacacttcccagactgcttggagcctctctctccgc

SEQ ID NO: 13269 - DNA, 122 bp, Homo sapiens
tgtgggcatgcagctgggacacaaacccctcattgtgcctcttaaactcacacacatgcccgctgcaagtccggaaggagatacgctactcttcagaaaactcattggcagaacaaacccga

SEQ ID NO: 13270 - DNA, 122 bp, Homo sapiens
tccctcgatggcagtgttgtgggtgctgctccgcggtgctgctgtctcccgcactctggtcgcctgtgtctttgctttcccgtctgtgggtcagcctagatcacccccgttgactgtgtctg

SEQ ID NO: 13271 - DNA, 122 bp, Homo sapiens
tgtacagtgctgcctgcacagagcctgtggcatgcaggccccaaggccgtggggagagtccggggtcactgcagacccgagccccctttcttccatggagtcaggcctggcggggctggttc

SEQ ID NO: 13272 - DNA, 122 bp, Homo sapiens
ctttattgagggtccctctgctgcccatctgcctcctgagcccgggtcctgtctttgtcccgctttgcccctgtatctaggagggtccaacacactcagtaacaattagcgaggggcacctg

SEQ ID NO: 13273 - DNA, 122 bp, Homo sapiens
acccgagcccagtccattccagcccaggtcctggcctgaatgctggttcgcttctccacacgttgcgccagcccacctgcggagatcttgatagtcctatctgccatcccaaaccaagggct

SEQ ID NO: 13274 - DNA, 122 bp, Homo sapiens
tttttattcaaaagacatttgatgagttgactattgggggaaccttgaccccggtgactccgtgggacaggggatacccccggggtcccttataagcctgctgactcaccgcctgttctcca

SEQ ID NO: 13275 - DNA, 122 bp, Homo sapiens
cgtgccacaccagtctggcctgtaggcccgccccagcccgcccccgcccgcccccggctccgccctcaggctggcacccactccgcccccagcccaaccctcgggcccacctcagcccgacc

SEQ ID NO: 13276 - DNA, 122 bp, Homo sapiens
gaggggcgtcgaggtggggggggacgtggggctcctgcagccccgcagattgagcgcctccgcctctcccaggagtctagctttttgcccggcttgctgcagccactgctgcctccctctcc

SEQ ID NO: 13277 - DNA, 122 bp, Homo sapiens
ctatatattaggcttcaattgtttgctccactgttctcaataggataatcttatccttgacgatttgattttctatctatacagaataatcggaaagacactggaaagaactttactgctac

SEQ ID NO: 13278 - DNA, 122 bp, Homo sapiens
tgccctacccactttagctgtctgtagagaccatgaacgtgaacaccaggaggctgcgtgcgcctgaaattctggactttacagcctgaggtgcagctcaggcagctcaggtttatggaggc

SEQ ID NO: 13279 - DNA, 122 bp, Homo sapiens
agaggacactcgagccatggagcaggccatgggccttgacacgcagtaacacgccaggcacgtgcatgttttccctggtcccgctctcatcaaatgtagctttaaaagaaattaacaacctt

SEQ ID NO: 13280 - DNA, 122 bp, Homo sapiens
ggggagctgggagctcggctgaggggagctgggttaggcagggcatcctggagggggacacgaggtagtttacagtgctcttgagcaggaaaatcccagatatctgtattctagggtcagcc

SEQ ID NO: 13281 - DNA, 122 bp, Homo sapiens
cctggtgccaaaaaggttggggaccgctgacttaaatatctactcaagacaaaaatataccgttcgatactttggagtatttgttttcacatactctttacaaaaccaaaacctggtatgtt

SEQ ID NO: 13282 - DNA, 122 bp, Homo sapiens
tagaatgtaggtcaacttcaaataatgaggaagggagagcaaaactaaatgatagaaacacggataaccaggaaaagagagagagtgaatgtgagcaacccacattgtcactagacaacagg

SEQ ID NO: 13283 - DNA, 122 bp, Homo sapiens
gctccgggccagccccgcagggagactaccagggctggcggtagctgggcgtggtcgggtcgggggcggctgtgggcggccggcaggcagcgcgcggggcagccctcggcagacggccaatg

SEQ ID NO: 13284 - DNA, 122 bp, Homo sapiens
ctactctctaacttcccgccatcacactccacaaacagctagagctcaaaagttgcgtttcggtcttcccataaagcgacagagtagcacctggcatttgataagcgctacaaggggtcgtc

SEQ ID NO: 13285 - DNA, 122 bp, Homo sapiens
tgctagtgggaggggagagccgtgtcaaagtgacccgggagagcgcgcagcaagcgacgacgtgcgtgcgccgcgcggcgggcgggcggcgaggggctgggagcgctcggggaacggcatgc

SEQ ID NO: 13286 - DNA, 122 bp, Homo sapiens
gaaactcgagtccctgctcctgtcgtggtccttttcaggtgaaatgagttgttatttttacgcaaaaatcacgttatcatcctaaactgcaaactttactgaggatttacaatgagacaaaa

SEQ ID NO: 13287 - DNA, 122 bp, Homo sapiens
gagtgtcgcgggactccagaagtgggttgtgcaagacaaacttccagataaatctttgcccggatcctcctgcggtcaaagcatcagtcctgcccgtaacttcctaacgacatcttcttgga

SEQ ID NO: 13288 - DNA, 122 bp, Homo sapiens
tctgtgaaatgggctgatgttccggggcctgcctcctggagaatggacacagcatgaaggcgtggttttatggcattccgcctggcataggtccaggtgagctccaggaccgccccagccag

SEQ ID NO: 13289 - DNA, 122 bp, Homo sapiens
tctgctttacaaaccctagagaccacttggcacaaactcctgattttacaagtaagagaacgtgagctccaggcagtcagagccttgcacagaatccacttggaccaggcctgtgacggggc

SEQ ID NO: 13290 - DNA, 122 bp, Homo sapiens
ggtctctcatggtctctctctgactggagttggggaaggatatttggacacctggacatgcgtgtctgcatgcccctgggacgtgctctctagaaaagcactgggcacgttcatttatccac

SEQ ID NO: 13291 - DNA, 122 bp, Homo sapiens
tccggacgcccccagccagtgagcagaccccacatgcacagtctctgctgacaagaccctcgtgctctgtaaacgcagggctgccgtcagccaggcatccccggggaaccaagaggcacaca

SEQ ID NO: 13292 - DNA, 122 bp, Homo sapiens
cagaaccctctcttgcgctcaatgctcctcaccgagagttggaaggtatttcaggaataccgcagcgggcatagcgcttcccacatccggaatacgtcagaccccttggtccccagaaaaag

SEQ ID NO: 13293 - DNA, 122 bp, Homo sapiens
cacgtccctttccggcgcccagtggcgtcaggcactgcctgtggctccgcgaggggcgtccgcgcgtcgtcgggctgagtgttctcagtcacctagagctgcaccccctaacaccggcttcc

SEQ ID NO: 13294 - DNA, 122 bp, Homo sapiens
ggggagagtgggggactatccagtgaccctctcaatgggcgccggctccgtctcggctcccgggttcagggactgcacgtttctgagaccgagtttagggctccaaggctctcttcccaaag

SEQ ID NO: 13295 - DNA, 122 bp, Homo sapiens
cttaaaagatccccgcggggtcgtgggcaccgcacgtgggccctgcagggacctccaccgcgggagattccttgacgtttgacctgtctaatggagtgtggtcttcagccgcccaccgcagg

SEQ ID NO: 13296 - DNA, 122 bp, Homo sapiens
ccccaccctggggaccgagggcatcctggtgggaggccacgccacatcccagccagtggtcgcccctcatcttgccagcctggggcagtctgagctcccctttctcctggacatggggggag

SEQ ID NO: 13297 - DNA, 122 bp, Homo sapiens
cgtcggggaggggcgacgaggcgaaagccttgtggaccaggccgggattggtgggcgggacggaaatggagctgggagaggtgacgtcaccttccgcacctggctcagggcggaaatggggc

SEQ ID NO: 13298 - DNA, 122 bp, Homo sapiens
gggctgggttgatcctctgacctggctaagcttccaaggccctcctggagggccaggaatcgggccgggggttgggccaggctctgaggtgtgggggattcccccttgccccccgccgtatg

SEQ ID NO: 13299 - DNA, 122 bp, Homo sapiens
ggccctgagccagcttgccctgaatccactgatggagtggcagacaccatcacatgcattcgctttccccgtgccccgccctggagagcaggttcaccttccccagggacttctgaaaatct

SEQ ID NO: 13300 - DNA, 122 bp, Homo sapiens
cactgccacatagcacggaaagaaccagacaacccgatcctcagcagtgccgacagacctcggggcctccagaagacaccagcagagacaagcgcctgctagaggttccaagcgcagatggt

SEQ ID NO: 13301 - DNA, 122 bp, Homo sapiens
cggcacccgggggcgctcacctgtgaaggtgaggctgggtcttccgggccttgcgggaggcgcgccccacggagctggggagctgggtcgtcggtttgagtctgaaccccacttcctctgtc

SEQ ID NO: 13302 - DNA, 122 bp, Homo sapiens
gagacgggcccaaactactctgagcaatcatttattcacttcttgagaagcccctgtcttcgacctgtcaaatctcccagaatcgtcgcacaacctcaagttttatctccctgaagctggcg

SEQ ID NO: 13303 - DNA, 122 bp, Homo sapiens
acccaccgtcgccgctcgcgaccaaatcccgactcctcgctctgcgcctcttagccgcgtcgcagctgcagtgtcagcaagtgcagcctcagcaagcacaaccgctacctagacggcaacct

SEQ ID NO: 13304 - DNA, 122 bp, Homo sapiens
tgaactgggctgccttcggagggtctgaattcttcatcccagaaggcattcagatagattcgagatgcccactaagcagaaatatcacggaatggtatcaggagtaaaggagggttggggag

SEQ ID NO: 13305 - DNA, 122 bp, Homo sapiens
ttttcagtgtaggactcaatggttggtagcatatttgcagagtcgtgtaactgtcaccaccgtcttattttagaacagttccattccagaagaaactttgtattcatttgcagttatttctc

SEQ ID NO: 13306 - DNA, 122 bp, Homo sapiens
gtccacagtctcgcacgcacgcacaaagtcgtgcctaacaattggaaagtaaccctgacccgaaaccgggacaccaaggttgtgtccagtgctcaggggcaatcggccagcttggctggagc

SEQ ID NO: 13307 - DNA, 122 bp, Homo sapiens
ctgaagctcaggcccttcctgttgccctggtctcctgcattgagcttgggtgagcccatccggttgccactggatgcctaagcagggaggggggttccctgggttgggtcaatgatgagaac

SEQ ID NO: 13308 - DNA, 122 bp, Homo sapiens
aggggctgttgcctagcaaccctcgtggccccgctagcgggaaggaaaccgaacagaaaacgcacaagcgcagaaaagaaactcctggccgtcggtcggcccccgctcaacagcccaataaa

SEQ ID NO: 13309 - DNA, 122 bp, Homo sapiens
gcggagcttggaatgactgacaggaacgaggcctttagaaggcgagcgcgaaggacctggcgcggatggagggtggagactgaccggcgcggagtcgaaagggacattaattaagagggtcg

SEQ ID NO: 13310 - DNA, 122 bp, Homo sapiens
aagtcggttatcccgtgtccaggcaaccgcgggggcggcggcggcggcgtgaggagcgggcggctgctgctccggggcctcctggctcgagcccttagcccccgactcccggcgtttcggcg

SEQ ID NO: 13311 - DNA, 122 bp, Homo sapiens
tcagtaactgaaagagaagtaggatcatcaggttttgaaatgagtgttatttttctctctcggaggtcaagaaattaaaagaaagccttggtgtctttacagagcaagcacaggggagtcca

SEQ ID NO: 13312 - DNA, 122 bp, Homo sapiens
ggaccccgagctggtgaccaggggcgatgactgtgtgctggtcaccagggtgatggtggacgtggatgggctctgtgtgatctccttctgctggacagctaggaaggcaaagcatcctgatt

SEQ ID NO: 13313 - DNA, 122 bp, Homo sapiens
agcggatgtgggccagtgagggctggggtcctagtaacagaacttttacctctcctaaatcgtctttttccatctcctttttttcttcccaatccttgctgtagtcccactcaggaacccta

SEQ ID NO: 13314 - DNA, 122 bp, Homo sapiens
gtgcctcctgagtcaggcttctgcccctcctctagttgtggatggagggttgcatggaatcgtcactgctctccactgagctccctgtgtgacacagagctcagtctgacaagagagcatcg

SEQ ID NO: 13315 - DNA, 122 bp, Homo sapiens
ggggaggcctcaggaaacttacaatcatggcagaagggcaggtccgacttacatggtggccgcacagagagtggcaacatgtgaaggagcaactgtcaaacatgtataaaaccatcagatct

SEQ ID NO: 13316 - DNA, 122 bp, Homo sapiens
caggcggcacacctccctccccgggccgtgccaactttgtcgaaacacgcgcggaaagggcgcaggcagcccttacccgatccggaggtagaccatgcccaggctgagaaagaggtggccca

SEQ ID NO: 13317 - DNA, 122 bp, Homo sapiens
aagagagaacaagacaaagcccagcagaagcagaggcctgtggcagtctctttctcccaccgttggtctcaactctgccttactcaccaaaagtcctaataaccatgccacacaggctctgt

SEQ ID NO: 13318 - DNA, 122 bp, Homo sapiens
ccagtcagcgtgaagggcccaatcctcggggccgccgggggcccggggcccctcaggcagcggagtcccagggctgcaaaacccggcctggctcctgctgtgtgaaagtggagccaggccgc

SEQ ID NO: 13319 - DNA, 122 bp, Homo sapiens
cccaccttgacctccgggcctgggccttcccaggggattttctgggaggccaaggcccagcgagagcctcgtcctcgccccgccctgagtagggagcagggccctgcgcgcctggaagcccc

SEQ ID NO: 13320 - DNA, 122 bp, Homo sapiens
gaagtgcatgtcgcgggaggagaagccgggatgtgggcggagccatggggagggcccaggcgctttggcaagctctgcccagaaggcctggaggtcattagtgcgccagggggtcccggggc

SEQ ID NO: 13321 - DNA, 122 bp, Homo sapiens
cagagcgccaacccctgcccctggtaccattgctgtcagcaaggaggaggctgccagggacggcaccccagcgggtcccctgcccatgtggggtgaccacagagtgtcctgtgttctggatt

SEQ ID NO: 13322 - DNA, 122 bp, Homo sapiens
gccaagcgagaagacaggccgggctgagccgcgggtgcggtaccaccggcgctttgtcgacgttgtgcccatctttggcaagaagaagggccccaatgtccttcttaagtcctttgtaattc

SEQ ID NO: 13323 - DNA, 122 bp, Homo sapiens
tgacaatgattttgagtcagaccagacaacattaaagactccacaaaaatgggataaacacggaggctaaaacatcagcgccccctgacatttttgttttgttttgtttttttggtagagac

SEQ ID NO: 13324 - DNA, 122 bp, Homo sapiens
aaaacatcgatgtgtgtgagaactgccattatcccatagtcccactggatggcaagggcacggtaagaggcgagacaggggccttggtgagggagttgggtagagaatgcaacccaggagaa

SEQ ID NO: 13325 - DNA, 122 bp, Homo sapiens
cctggagtactcgccctgaagcatattgacgagcacatgcacacgacgccctggagtactcgccctgcagtacttgccctgcagagtatcaatgagcacatgcacacagcaccctggagtac

SEQ ID NO: 13326 - DNA, 122 bp, Homo sapiens
ccggccgcgcactccatgaagggcccattagcgcggcaggtgcctcccgggctgtaaattcgccccgatttatctccccggggacgaaataaatccagcttggatgggagtgtagttaggca

SEQ ID NO: 13327 - DNA, 122 bp, Homo sapiens
tgggtcctgagggcttttaatccagcagcagtgagctgtcacactgtgctctaggaggggcgggaaaggcagcacagccttccagatggacagagtcattccctggcctggaggatgaagaa

SEQ ID NO: 13328 - DNA, 122 bp, Homo sapiens
ggagggccctgtcagggggctcaggtctcgggaagccaggacacgctgggcagggggggccggcgggcagggtgcagggcccctggcagtcagggcctgtggtgggcacactcactgaggca

SEQ ID NO: 13329 - DNA, 122 bp, Homo sapiens
cactgttttggggactggcaagtttgaagtacgcagggctggctggaaggctggaaatcccggcacaagtcagtgttgtagtcttgagtccaacagcaatctggaggcagaatatatttttc

SEQ ID NO: 13330 - DNA, 122 bp, Homo sapiens
tcgtaagcccaggaggaagggctgtgtttcagggctgtgatcactagcacccagaaccgtcgactggcacagaacaggcacttagggaaccctcactgaatgaatgaatgaatgaatgaatg

SEQ ID NO: 13331 - DNA, 122 bp, Homo sapiens
ggatccactgagattcaggccctctgtgggccaccagggccagcaccctgctccaaactacggcttgccatttaaactcaagtcaacttgatccagataaacacttggagaatccgcttggt

SEQ ID NO: 13332 - DNA, 122 bp, Homo sapiens
gttgaacgcctaacttaggtctactaaggtgtagaaatacgcaaggctgcccctagagaacgtttgtctggggaataatgtaagtttttggagcggctctcctgagcatcgctgagcatact

SEQ ID NO: 13333 - DNA, 122 bp, Homo sapiens
ccggccaacgcgaggtgggtggctgcgggctcgggagcgcccagggaaatagggcgaatgcgccggagggtcgagcccttccagagagcgctgggctccagctaaacctgcggtcgagggaa

SEQ ID NO: 13334 - DNA, 122 bp, Homo sapiens
gcagatcgaacaaaaatcttgaaacgtggtcatccaactgcattattaagtaatctttagcggggaatagcccttgaaactagctccagatatttctgtggtcgctctggaataattagact

SEQ ID NO: 13335 - DNA, 122 bp, Homo sapiens
tgctttcagccatttcttcattcattcaatcaacaaactggctgagctgcaaccctgagccggggaattcagccactccagacacagcccctgccctccgggaagtctcgggagacctggct

SEQ ID NO: 13336 - DNA, 122 bp, Homo sapiens
gcgaagttcgaagcccgagaagtttggaggagcggccccaggcgcaggcgggtcccgcagcggggcccgtgccgcccaggcgatcagccccttcacttaacccgcttccctcctagcaggcc

SEQ ID NO: 13337 - DNA, 122 bp, Homo sapiens
gttttcgggggaggcgtttggggcctggacggcggcgcggggagggggcagctaggggcgcggcctgccagtgcctcctgcagtacagccctggagggcgtggggacttgggggcggtgaaa

SEQ ID NO: 13338 - DNA, 122 bp, Homo sapiens
cagggcgcagggatgtccatggcacaggcagggacagagatggccagagcaagctccgtgcgtgtgtcaggcgaggaggccagtgtgagaagcaccgggaccctagaccccttgttgcctct

SEQ ID NO: 13339 - DNA, 122 bp, Homo sapiens
ccggccccgccgccgccgcggccgccgctgccctgccagccccggaggcagcccagtgcgcgcagccgcactgcggcccggcgcagaccgcacaacacctaccgctccgccggggggcgtgg

SEQ ID NO: 13340 - DNA, 122 bp, Homo sapiens
caagtgccttcaccaaaaggccaagcctggagcggaggcacccagtgtccctttcaccaacgataggacgctcagcatctcaggtatcagctgaacgcgtctgcatagactcggagtgctga

SEQ ID NO: 13341 - DNA, 122 bp, Homo sapiens
ctcaccttgaacatgtcgctggcagcggaggctccggcagggtcaccccggcctcggccacgcccactatagagaggtgactacggaggcccggtagggccttgatttctccaaccgcaagc

SEQ ID NO: 13342 - DNA, 122 bp, Homo sapiens
ctgaaaattaccccaacttcaaccccacccccacctttccaccctcccattgggagatcccgcccccaaagcgtgcgcagatgaatctcggctctctcatccagaaacgccaggggcaggga

SEQ ID NO: 13343 - DNA, 122 bp, Homo sapiens
agggaacgaccccgccggcccatccgggccatgtcccaggacagggtcctgtccccggatcggggcctgccagatgagttcagcatgccctacgaccgcatcctgtccgacgagcagctgct

SEQ ID NO: 13344 - DNA, 122 bp, Homo sapiens
cgtgtcccgctcctctcacccgctccaaaatagaagccccttcccacccactgccgcggccgctcttccaaacactgctcgcccccacgctggctcccgacaagccccggcccccggagtca

SEQ ID NO: 13345 - DNA, 122 bp, Homo sapiens
ggcaccttggagcgctcccgcctggggtggagcgtgaggatgggtggagggcagcccccacgacagctctcccgtagcaacccccacccagcacacacacaccctggagagcttctagcatt

SEQ ID NO: 13346 - DNA, 122 bp, Homo sapiens
ctcatcaaccaagaaccccataaacaagggcagaatgctccctgcgtccagcactgagaccgagacccaagatgcaccaagagattgagaaactgagatccacagatgcacaaagacccaca

SEQ ID NO: 13347 - DNA, 122 bp, Homo sapiens
tcccccagtctcctccctccgctccggagactgctcgctgggcggcggggccggagtcgtcgcagccacctcattgcacaacccggcttcccaactgtttacacagcccggcctgtgagtgt

SEQ ID NO: 13348 - DNA, 122 bp, Homo sapiens
agtcccgctccccggcgtcgttcgcggtgtttctcatccgagcttctgagtcagaagcttcgcctcaccagcccgcctttccacggctccagtcagtatcttcctcacctccccccaagata

SEQ ID NO: 13349 - DNA, 122 bp, Homo sapiens
cgtccccgtcgatgtcgcaggctgtgaccccgatggcgttcccctgccggtcccgcagcgcgtagtagggtgagctgcgctcatcgaccgcgatgttcaccagccgcttctgggcccggtca

SEQ ID NO: 13350 - DNA, 122 bp, Homo sapiens
gcatttttaaggaatttcttcccaaacgaaagatgtgaattgtgttggacaaataaattccgccctggaacaatttaatacaattttgcttttgcaacatacagggataccttcattcactg

SEQ ID NO: 13351 - DNA, 122 bp, Homo sapiens
cggcggctggcctgtccggggttcaccctgagcattggcacacaacagctttgtcgtcggcggctggcctgtccagggttcaccctgagcatgggcacacaacggctttgtcgtcggcggct

SEQ ID NO: 13352 - DNA, 122 bp, Homo sapiens
tgagggtcacttcaaacacggccagtgtgcagcctcccaggtccctgaggtcggcgtctccgggtcaacccttagtgacatctccaggcccaggtggccttgaagtgtggacacaggtgggc

SEQ ID NO: 13353 - DNA, 122 bp, Homo sapiens
agcgaggcggggaacagctccgggaacaaagatcccccgggtggaggagcagtgcgaaggcgtctcggaacccgcggtagctcgggcgggccgcgtctgcccaggccctgagcgagccggac

SEQ ID NO: 13354 - DNA, 122 bp, Homo sapiens
tctcaatcactgatcagatttgaagtccttgactctttttggccagaatactaggtccagcggggacaaagtggtgccatcagctgcctctatcagaacttgcctctacacctgccaagtac

SEQ ID NO: 13355 - DNA, 122 bp, Homo sapiens
ggaggagaggacgtgcaaggtgtgcctggaccgcgccgtgtccatcgtctttgtgccgtgcggccacctggtctgtgctgagtgtgcccccggcctgcagctgtgccccatctgcagagccc

SEQ ID NO: 13356 - DNA, 122 bp, Homo sapiens
gcgtggatggatccctacctgcctctccgccctggctcctgcctgtcactggaaacatcccgttcccacatggtcacttgaggtctctgggtgtctagccgcctctctgagacatcttgatg

SEQ ID NO: 13357 - DNA, 122 bp, Homo sapiens
tccgccctggcctccccgcgtccggcttggggccgggtccctcccgggtcaaagctacgccgggtgcactgcgggctgggcagctctcccactacgcccaaagcccaggcggccgggaccgc

SEQ ID NO: 13358 - DNA, 122 bp, Homo sapiens
agatgctcctggatgcactgttgggggtttctggttcttgtggcgccccctggagtcagccgtgagccggggagagttggcccccgccgctctgtccctctcaggtcttcgtgagctctctg

SEQ ID NO: 13359 - DNA, 122 bp, Homo sapiens
cttttgggactatatccggctggcctgcagcaaagtgcccaacaactgtgtgagcagcatcgagaacatggagaacatcagcacagcccgggccaaggtgaggggcctgaagcaagcaactg

SEQ ID NO: 13360 - DNA, 122 bp, Homo sapiens
tctgcactctttggctgccctgacattcctcattccttaccagaaatgtccttctgactacggttctgctcacaaatcttcctatccctcctccaaagatcaggcccaatcagcttcctcca

SEQ ID NO: 13361 - DNA, 122 bp, Homo sapiens
cctctgtgtgttctgcagggagggtcccacgcaccaggcgcacaccgtggggttcctggacgaggccattcagccctaccgggtaagaagtgtagctttacctagggcctgtttggggcagg

SEQ ID NO: 13362 - DNA, 122 bp, Homo sapiens
ggacgccgggacgctgcaggtgggtccggagaggccgacttgaggaggttctgggcctggcgaggccgccggaagggaaaaactgggcctggaaaggccattgtgaggaatgagccccatgg

SEQ ID NO: 13363 - DNA, 122 bp, Homo sapiens
tacccgcggccccagctggccagtgtgtggcggagatgagaccctcgtgaagagactaagcggccacagcagggggaagggttgctcacataaccccatactgctcacactacgaggttaac

SEQ ID NO: 13364 - DNA, 122 bp, Homo sapiens
ccgttcccgctccagttgttccccgtagtgggcctggtagaaggcgtcaaagttgaacatcgtgcggttggcgccgggggaggcccgagaaccgtcgtgggtccgagaggtgggcggcgggg

SEQ ID NO: 13365 - DNA, 122 bp, Homo sapiens
cccaaagccagagacggcaccgggatccaccctgtgccagccactcggggccccctgccccgctcagcctgggacctgcggccacatagcaggcttgggaagaggctgctgcagcaggggcc

SEQ ID NO: 13366 - DNA, 122 bp, Homo sapiens
ccctgacgacagcccttgcagacacggctatgcccaggcccatcgcctggatcctgagcgcgtctggctctccacgccaacccattctgcccgctgactgcttgagtcctaagcccgacgac

SEQ ID NO: 13367 - DNA, 122 bp, Homo sapiens
agtacctacctcaccaagttatagtgcctggcttctaataaggattcaatgaccgtgagccgacattacctccacataactgttaccctcactgtcatgaaagggtaagacattcagtcact

SEQ ID NO: 13368 - DNA, 122 bp, Homo sapiens
cgactacagggggctggaaacagttcagtctttgattggttgctgagaggcggggctactcgactgctctggaggtagcggccgcggtgaggagagccatgggacgggcagtcaaggtgaca

SEQ ID NO: 13369 - DNA, 122 bp, Homo sapiens
gagaattagtaaggaaatcgccgctgcatctcccggtggcacaggggcgtggaggcgtggcgggccttccctcttgcaccactttggatcctgggtcctcacagcagtgttctctgcagggg

SEQ ID NO: 13370 - DNA, 122 bp, Homo sapiens
gcggggatgttgcaggccccgggcagggtgcagccgtggcagctggggggcacacagggccgggaggagcagctggtgcggcagctcaggctgggcaggccacaactgtaagacatggtgca

SEQ ID NO: 13371 - DNA, 122 bp, Homo sapiens
cacatggagaacgcccccaccagttcccacgtgcttctctttccgcaggtacattctgatcgactggctggtggaagttgccaccatgaaggacttcacaagcctgtgcctgcacctgaccg

SEQ ID NO: 13372 - DNA, 122 bp, Homo sapiens
tggaaccggaaggccctgcccagcactgcccagatcactgaggcccaggtggctgagaaccgcccgggagccttcatcaagcaaggccgcaagctcgacattgacttcggagccgagggcaa

SEQ ID NO: 13373 - DNA, 122 bp, Homo sapiens
gccggcccactgtcatcgtcttccctttatcgagaattgatcattttccaggtggcgtctcggctcctcttctgagaaattatagatccacggggagaaagtccacacccagaaagacccac

SEQ ID NO: 13374 - DNA, 122 bp, Homo sapiens
acaaatgaggcacaaagaggttagggaaacagaccaaccaaggtcatgtaacagccatgtcgcaaggcctaaatgaaaacccctatctagaactctaaaatccacattctttctgcggtttt

SEQ ID NO: 13375 - DNA, 122 bp, Homo sapiens
cactccacaggaagtagaccagagaaaagtctacaggatgagacgagttgcaatgaactgcgtagtcattaggaatttggcatcagaggcagggctaaagagtttaaatacagaagactctt

SEQ ID NO: 13376 - DNA, 122 bp, Homo sapiens
gccgcgcggcggccgcggggaacgatgcaacctgttggtgacgcttggcaactgcaggggcgcccgcggtccctgcccccacgccctccgcgcgggccccgccaccccggccccgacggcgc

SEQ ID NO: 13377 - DNA, 122 bp, Homo sapiens
ccaggccaacacacttcaccgcgtccgcctggggcaggtcagaaaagggacgcgaggcggcgctgtcacagcattctatgcgccccagcgccctgggccgcgctggtcttgtatcatttcag

SEQ ID NO: 13378 - DNA, 122 bp, Homo sapiens
gtgcgtgtgtcgtcgatcaggagggccaggtggcggcgagggcgggtcgttagtggcagccggagcggcagggaggcggcagccccgcttcacgggcggggagacatgctggccgggcggcg

SEQ ID NO: 13379 - DNA, 122 bp, Homo sapiens
tcttttctctctgtcttgagcttcactgcgtattcttaaccatgtggagctgggagctaacgcatcacagccaactgtatctggagtgcatttgctcatatagcccttattttattttttag

SEQ ID NO: 13380 - DNA, 122 bp, Homo sapiens
attctgtctttacaaaagaaagcctcttctctatgaaaaagtctttttggcatctgctcccggaaacctgccccgagaacacgttccccattgctttgcaagcatctctttttaaaagcaca

SEQ ID NO: 13381 - DNA, 122 bp, Homo sapiens
cttcattccctccggccgtccaggacgtcgagagagcggctggccagagctcagccccggcgcattcgcagggacgtgtcagctgggcaggctataatttgcattattccattaagttagga

SEQ ID NO: 13382 - DNA, 122 bp, Homo sapiens
acagctgttgcagaaaggcgaagtcgaggtacaatcggtgttaactacgtgtgcagccaccgtcttcttagtcctgttacaggtgcagaggcaatataagtgaaccactcacaagtcgtgtg

SEQ ID NO: 13383 - DNA, 122 bp, Homo sapiens
acctcttaaccacctcctgccgtgagcctcattccttccctccctttgtaactgggttcccgctatttgtcacgtcctcctgtaaccgcacatactggcgaaagcactgcccgggttatcag

SEQ ID NO: 13384 - DNA, 122 bp, Homo sapiens
tgagaattcgaagtcttgtgtcctggaaagttttgataagcaaatacggctgagctcccgcgctctcttcattggctgcttgttcaccgccagattttgacacaaataatcagattgaaaat

SEQ ID NO: 13385 - DNA, 122 bp, Homo sapiens
cccctctcccttctcaggtgatggcaaccccaaggaaagcagtcccttcatcaacagcaccgacacagagaagggaaaggagtatgatggcaagaacatggccttgtttgaggtgggctgct

SEQ ID NO: 13386 - DNA, 122 bp, Homo sapiens
taggcatttgctatattctttttaaaaatttaatggcagacatcaccctaggttccctaacgtttaaggagaacctctccttctaatgattctctcacacagcttattggaacaggagattg

SEQ ID NO: 13387 - DNA, 122 bp, Homo sapiens
cagccatcttgtctgccatcactgagcaaattacagatggactcaatacaaatttgcccacggggcttgcttgcaatactatttcacaaagctgactgtattcttcatcttcataaatggcc

SEQ ID NO: 13388 - DNA, 122 bp, Homo sapiens
agcattcaggctcaacggtcgctccactgcacccccagggccttccgcgtcctcctgttccggcaggagcagctcctcacccgggagcaccacctgacctagtactgtgcgtgcagcgcgcg

SEQ ID NO: 13389 - DNA, 122 bp, Homo sapiens
actgaggaagagcgcccgggagtggaggccgtcagtcacggagtccacccgggcagtcagcgactgaggaagagcgcccgcaagtggaggccctcagtcacggagtccacccgggcagtcag

SEQ ID NO: 13390 - DNA, 122 bp, Homo sapiens
cttaggagcagagcggaagtctcgcgagagtgactgctgcaggcagtggcggcgcgggcgcgcgcagagacggcctcgggcgcgcgcgcgcgcgcgcgcgctccccgcccccagccccggag

SEQ ID NO: 13391 - DNA, 122 bp, Homo sapiens
tccgtgtgacaatgcaagaagggcgagctctcttttccacctgtctcatctcagtgtgaacggcgccctggaaaacagaactgttcagggacttctgaggagctcggccaacgctcttgcct

SEQ ID NO: 13392 - DNA, 122 bp, Homo sapiens
gggaccacctgcccacaggcactgagggacggctgtggaactgtacagggcccggccctgcgctggggacctagcggtgaacaagcagcctgggaaaggaatgtttaaaagctcccgggcga

SEQ ID NO: 13393 - DNA, 122 bp, Homo sapiens
cacccaccagtgactgagtgactgggcttctgctgcctagggaagggttcttggcttggccgggcaaatcaattcccacagcaaaatcagaccgaaagcctgttatgagggactcaggcagt

SEQ ID NO: 13394 - DNA, 122 bp, Homo sapiens
tcaagactaagacctggaagggcacccacctcggtgatcatgcgtccccgggtcttgttgcgctcacggtatgtggcctgcttctgctgctgctgtagcactcgttcccggcaagtccgata

SEQ ID NO: 13395 - DNA, 122 bp, Homo sapiens
ctaccgccgcctgcagaactgggtctacaacgtgctggagcggccccgcggctgggccttcgtctaccacgtcttcatgtgagtttgcgaccccgcgcccttccgcgtttccccgcgcaagc

SEQ ID NO: 13396 - DNA, 122 bp, Homo sapiens
cgtccgggtctgactgtcttgcgtaactcccgccaactgtgggatgttctctttctgccccgaatccctggagcgggagcgagagcccgccgctctcagagataccgagataaccgcctgcg

SEQ ID NO: 13397 - DNA, 122 bp, Homo sapiens
gccccggcgagcccccgcctgtgctgctcctgcaggatgaccgccactccacgtcgtcctcggtgagctgccccatccgcggccgctgcccgccaccggcctgcccacctggggctgcgctc

SEQ ID NO: 13398 - DNA, 122 bp, Homo sapiens
ggtccttctggtggttggccacccggaagatgtagtagcccaccaggcccagcagcaggacgcccacggcgtgcggggtggacagctgcacggggtggtacaccaagtacagaccctggggg

SEQ ID NO: 13399 - DNA, 122 bp, Homo sapiens
tgacaaaacagtttatccagtgatttggcaaatggtgtttcaaccaaagtttacaatcatcgcagctcctcatgttcaaagtagaaggttctgagaatccagatctggtaagggtgtctgcg

SEQ ID NO: 13400 - DNA, 122 bp, Homo sapiens
ggagaggcagtgggatcttggcgcacctggtagctttgggcttcaccatctttctgacagcgctgtcccggccaggaaccagtgagtgtgcggggcggggttgcggaagggggcggagtgga

SEQ ID NO: 13401 - DNA, 122 bp, Homo sapiens
cacctcataactcactcagcacagcgcacacgcagagagctcgggcacttgatggggacacgggtggcagccacagcatcagtgctgatgcgcaaggaagggaactcttcagtaatcccaac

SEQ ID NO: 13402 - DNA, 122 bp, Homo sapiens
aataccactcttctatattctacaaactcaatttctctcctacccctacacctaattcctcgtcagcttcccacgtacaggctggggaggttgaatgtcttcatccttctgggaaatcaagg

SEQ ID NO: 13403 - DNA, 122 bp, Homo sapiens
cgaagtgctgggataacagacgtgagccgccacacccggccttcacatggtttgagccgccgcacccggcctctcacatggttcttctcacgggcgctccccacatgtgcggacccctcctt

SEQ ID NO: 13404 - DNA, 122 bp, Homo sapiens
tcatgtgaataagaggttgcccagctctaatggcaaaaaattgtgctgagaaaactagagcgatactagggtgatagaccatggcatattccttgtgccaaacttgaaggccaagttaagct

SEQ ID NO: 13405 - DNA, 122 bp, Homo sapiens
gcggcggcggcctcgccacgtgacccggacgggcggaagcggaagtgccggcctggagcccgctctaggtgggtgtcccctcggtgcttcccagctgccgtctgcaccagccatggactgct

SEQ ID NO: 13406 - DNA, 122 bp, Homo sapiens
agaaagcctaaactttccttttccttttttctgggctccaataggaagcagcatttacaacgtgtctggcttggtgggaggaagattgtcaattgaggtatcatgtgtgttcacctgcctct

SEQ ID NO: 13407 - DNA, 122 bp, Homo sapiens
gcgatggcgccggccgcgtccaggctgcgggccgaagccgggctcggggcgctgccgcggcgggcgctcgcccagtacctgctcttcctgcggctctacccggtgctcaccaaggcggccac

SEQ ID NO: 13408 - DNA, 122 bp, Homo sapiens
cggggtccgagggagggggcaggtggggtggaaccgctggcctccgggtcgcaggctgagcgcggagggcccgcgcgggtgcgagtcgcgggtctggagagcatacccgcacgcgggcctcg

SEQ ID NO: 13409 - DNA, 122 bp, Homo sapiens
tcagttactatgacagagatggtagtggtggtataaaattctcaggacataggttagatacgagaaggaatggggagattaagagggtctagtcagagctctgctatgttgattaatcaagc

SEQ ID NO: 13410 - DNA, 122 bp, Homo sapiens
ggtcagagacccactggctttttcatgctctggggctctcgggcagccaggccacaaccccgagcctgtcagtgtggagcatcctgtggggtctctggggtcttcctacctcgtttcccagc

SEQ ID NO: 13411 - DNA, 122 bp, Homo sapiens
accttgttaaactgtgtgacagtagctcggacagatgggcagaggtgagaatgtcctggccggtctctgtgaccccacaggcctcccaggcactgagaggggatcaaattgagaaaaagttc

SEQ ID NO: 13412 - DNA, 122 bp, Homo sapiens
ccgctgcctgccgagggtataagactcccccctcccttgatttatctggttacgtgtaatcgaggcgtgttttacgcgcatctctttgcaagtgggaagtcggcactggagcacacaacagt

SEQ ID NO: 13413 - DNA, 122 bp, Homo sapiens
gtgtgtgtatgtgtgtgtgtgcatttcagaatggaatgagtgatgaaaattatattctttcgtgcatagatatttgtagagggcctgctgtgtgccagatattaagcaattgcaattgagta

SEQ ID NO: 13414 - DNA, 122 bp, Homo sapiens
ggaggggagagtaggaggagccggtcaggaggctctggagagatgggggctcggtggcgccgcgcccaggccagcccaggccctcacctgagcgcagacaggatctgcgtgcaccagcgctt

SEQ ID NO: 13415 - DNA, 122 bp, Homo sapiens
atcgcagagcccacggccagccgagcgcgcgcgacgcaggtgcccgagccccggcgccgccgccatctctgccttcggtcgagttggacccccggatcaaggtgggacctgcttccctctcc

SEQ ID NO: 13416 - DNA, 122 bp, Homo sapiens
tttcaaacgttcagaacagataccatcatcctgcctttgttagctgctgtagggaaagtgcgttacagatgtctgctgacctcacaagagtgaaaagataaactgtgcatgtgtttccactt

SEQ ID NO: 13417 - DNA, 122 bp, Homo sapiens
gtgatattgttcgtcatatccagggaggcgcaggatgacattccattgaatttcgcgacacgcctacacgcacagtgtgatattgttcctaatatccaagaagggagaggatgatattactg

SEQ ID NO: 13418 - DNA, 122 bp, Homo sapiens
aaaaaaaggctttaaacctacagggtttgctcctccagggcttcagattagggcaaataacgcacttctgcctaccagctgttcaatactcatctcccaacccaaatccacaagttccacaa

SEQ ID NO: 13419 - DNA, 122 bp, Homo sapiens
tgcttcctgcgcacttgtccaggaactcgcgcagctcgcgacgcaccgcctcgcgcaacacgtttaggttcactcggccgtaggacagatgagccgccatcttgctccaccaccccctgccc

SEQ ID NO: 13420 - DNA, 122 bp, Homo sapiens
aagctcagaacccagatgcaaaaaatacagaactaattagaagaatcgctgagcattggacggaacttcccaattcagagaaaaaaaatatatgaagatgcttatagggtggactggcaggc

SEQ ID NO: 13421 - DNA, 122 bp, Homo sapiens
gctaacatgggtgctacccaagcacagaggcacacgggtggtttccgaagctgtgcggcacggtggggcctaagtctggatcttggtggaggtgggcacaggatgagccggagtatggatcg

SEQ ID NO: 13422 - DNA, 122 bp, Homo sapiens
gcaccaccgaaagctcatttgaagtacaatccatcatctgtgtccaacatgacagggaaccgggcagcgcacacgctccatcagatgctgtgattaaagggagggacgctgcggtttgtcac

SEQ ID NO: 13423 - DNA, 122 bp, Homo sapiens
tccccagttatgtataattaacaaccaccggatcacagctagataaggagaaatgctaggcgctactcagggggttaagcaaaaaatcagagggtcggaaatcagttttcaactacaagagt

SEQ ID NO: 13424 - DNA, 122 bp, Homo sapiens
gcggccccgggacaccgcgcctgcgcgttccggcccgagcgctagaagctttgggtgcgtcgggctccccgagggggccccccactcggttctccccagcgcgcccccacctcactttctcc

SEQ ID NO: 13425 - DNA, 122 bp, Homo sapiens
cgccgccatcgcacagagaggcctgggcggggcggaccggcgctgggcagccaggacagccgcggcagccgggtccgcagggcagcagccggcctctcccactgcagccctcccgcccgcct

SEQ ID NO: 13426 - DNA, 122 bp, Homo sapiens
tgtgggggtggagatggtgcggtttctgctgctgcggcccgggacacgcttggaaaggggcggggtgggggactgagagtgtggagtgtagaaagggaaaaggtgactcggctgtgtgacgg

SEQ ID NO: 13427 - DNA, 122 bp, Homo sapiens
gaggtaattgaatcatggggggcagtttccccaatgctgttcttgtgatagtgactctcacgagatctgatggttttatacgcatctggcatttcccctgcttgctctcactctctctcctg

SEQ ID NO: 13428 - DNA, 122 bp, Homo sapiens
gagcactggccgctcctgggtgccgttgccacaggttactgagcactgcagggggagagtcgccaggcagggttcacctcccacacagggcccgcactggcagagctggaggagcccacagt

SEQ ID NO: 13429 - DNA, 122 bp, Homo sapiens
gtccaccacctcaaaatggacgccgggccgcgcgctgccttttaagtgagctcctctcttcggcccccgcagggcccggctctccctgccgcctccgagaacccggctctttctttccagga

SEQ ID NO: 13430 - DNA, 122 bp, Homo sapiens
tattttcccaccaattgcctcttcctattgtcttttttatgctctagtatcagggggtggcgggggtgggggaaaaatagtttttcccacctgataaatttctttttatgagttataattgc

SEQ ID NO: 13431 - DNA, 122 bp, Homo sapiens
ccttcaatggaggaaggtcagatttctcagtcagattttgcttggagagcccagctatttcgttccattgaaataattggagaagttcttttttccacaggcatcctgcctgcacttcatcg

SEQ ID NO: 13432 - DNA, 122 bp, Homo sapiens
catcttattcttgactccctcctttggaagcctgtttgtttaatgtaagccttttgtgtgcgtgtgctttttttttttttcgggagggacagactcttgctctgtcacccaagctggagtgc

SEQ ID NO: 13433 - DNA, 122 bp, Homo sapiens
caggaacgtggcctggtgaggaggacagtgtcacatcctccctgcccactcctgtttccacgcgtgcatttcctcttctgcccctctcctaagccaggatgacccttctgaccgcgtggaac

SEQ ID NO: 13434 - DNA, 122 bp, Homo sapiens
gttatcagggactgtgctcgtgagcgccgacctccgctaggcgttatcagggactgtgctcgtgagcgcggacctccgctaggcgatatcagggactgtgctcatgagggcggactttcacc

SEQ ID NO: 13435 - DNA, 122 bp, Homo sapiens
cccaaatctgagccaagaccagagacccattaaagtcacgtgatgtggttaacagagccccggaattcacagcctataccaaaggggtaatgatggtggaagaattaatcaaggtctgactt

SEQ ID NO: 13436 - DNA, 122 bp, Homo sapiens
ccagcctcctgagactccggtgggctgccatgccctctttgtttccttatctccctcagacgcagagtttttagtttctctagaaattttgtttcatattaggaataaagtttattttgaag

SEQ ID NO: 13437 - DNA, 122 bp, Homo sapiens
ccccatcatcactgaccccgcccaggtagcagaggaacgtcgggttctggatccacagctcggaaagtctgctttgtgactggagagagtcaccgtcgaggagtggccattatcctgagcct

SEQ ID NO: 13438 - DNA, 122 bp, Homo sapiens
ctggccctgagggctttctgtggctccccaggtccatgtttccattctctttgctcccaccgttttttctcatgttctccttttcacacaatatttattgtcttgtcccctctgttctgtca

SEQ ID NO: 13439 - DNA, 122 bp, Homo sapiens
ctgcctaggatagcgatggctaggcaggggacataaaacagaagaggcagtgaccttctccgggtggggtctatggccctttactgggtacattctgtacacacaggcccctcctttgcctg

SEQ ID NO: 13440 - DNA, 122 bp, Homo sapiens
ggcagcagcagttaaaggaaccattgttatgagcaaaactcttacagagctgcatgggagcgagaggttgggggtaggcagaataaggggtggcacagatttcactggggcccacatcaaca

SEQ ID NO: 13441 - DNA, 122 bp, Homo sapiens
accttgccagttcctgcagaaaccaagatgaaagtttcaaaatcctgacctacaccagaacgttttgtttagaaaattgacagctaattaaactgcttctgtcactgcaattcatgtctgct

SEQ ID NO: 13442 - DNA, 122 bp, Homo sapiens
tcacgaggatggtgagatgtttattgtcatgaccgtatgtgtgtaaaaaaggagctgtgccgtttaacttcaaagtggatgtgaagagcagtgtatacatttgagagctgctgagacaaagc

SEQ ID NO: 13443 - DNA, 122 bp, Homo sapiens
gagcacggggcacaggctgagccaagggtaccttgatttccggcaccacgatcctcgactcggggttcttgtccagcatacgggtgatcaggtccttcaagtcctcagctatgtcgggcctg

SEQ ID NO: 13444 - DNA, 122 bp, Homo sapiens
cctgaaggtaatggatgagatttcctgggaaaagcctcctggaagctgtagggaccttcccgggcctcctcaggacagtactgttgtgaaaggagtgaacaaagtgaatttccttttttcct

SEQ ID NO: 13445 - DNA, 122 bp, Homo sapiens
tattcatacaaggaggggatgttactcagccacaaaaggaatggaacgctgacaggccaccgcatgggcgaaccttgaaagtgtgcagggtgaaccaagccagacacgaaaggccacatata

SEQ ID NO: 13446 - DNA, 122 bp, Homo sapiens
tagtagggccaggcagtcactcaaacactatcaggaataaagacactaagctcagacatccgcctcctgcacccccagctcctctagatgccgctctccccagagccccgagaccgacgtgg

SEQ ID NO: 13447 - DNA, 122 bp, Homo sapiens
cgactggtaacagggggcggagggctccgaagtctggttttgggcgggaattgaaaccgccgctgaagccaacaagaatttgagaactgtaaataccaagccttgaaagggaccatggtgcg

SEQ ID NO: 13448 - DNA, 122 bp, Homo sapiens
tggccccacccaacggtttcctggagaaattctaggggagtttgccctccagccgcgctccggaagcggaggctgcgttgggagcacgtggtttgccccgtcgcccaactaatctgaaatgt

SEQ ID NO: 13449 - DNA, 122 bp, Homo sapiens
aataggactgttcagagtaagtgaagtagcacactgggcgtcagggcacgttcggggccgcgccggcacgcagagaacctcgcccgctcggcattactgtctggaaacggcttgcggggacg

SEQ ID NO: 13450 - DNA, 122 bp, Homo sapiens
gtgtaaatgctttctgcaatccttttataataagccctcccaaataatcaaataagtctccgggatacagatataccttcagttgactagaaagtcacacactagaaaataatattccaact

SEQ ID NO: 13451 - DNA, 122 bp, Homo sapiens
cccgccccctgagacctggcaccggacgcgttgaggccccgcccactcccgtgctgggcgcgtgcaaggagcgtcttctgtcagcgtagtctgcatctaggctttctggagcatcttccagg

SEQ ID NO: 13452 - DNA, 122 bp, Homo sapiens
ccaagagatcaaaacccagatttttctgggatgctagtttgagattttccattctacaaacgtccagccactcacgagttctaacagatgactgatcttagctgagaagcatgacatagata

SEQ ID NO: 13453 - DNA, 122 bp, Homo sapiens
atttgcggagaatgggctgggtctgtctgcgctctcctcccgcgttgcccagagtccggtcgcagacttaggtacaaagcctcacacacctgggctgctgggactgaagggaccaccagcct

SEQ ID NO: 13454 - DNA, 122 bp, Homo sapiens
agctcaaaatcccagtgactcaagcaaagacgggggggggtaacccgggcctccgcattacgggtccgctcaatgccttccccagatacccacaccaattcacagaacgcttacttcctccc

SEQ ID NO: 13455 - DNA, 122 bp, Homo sapiens
ctctgtcctaggtcctggcccagctgactcatctctggaaagacaggctgtctgatggaccgggccatcgctgctgcgtctgggctgctgccgggcagtggcagcacctcagaaaggaggcc

SEQ ID NO: 13456 - DNA, 122 bp, Homo sapiens
cagagaactcatacaggagagaaaccctatcagtgtaatgaatgcggaaaagccttcagccggagtacaaaccttacacgacatcaaagaactcatacgtgaggaatgttttcactggccct

SEQ ID NO: 13457 - DNA, 122 bp, Homo sapiens
actttttagagttggtatataccagctctttaaaaaatctgtaagttgctttccatacctcgttgattaactggatctttagctacgtaggcaacatagtctgtagtatcctataaaaaagg

SEQ ID NO: 13458 - DNA, 122 bp, Homo sapiens
cacttgggagaggtggttttgaaaagggctacgtcacaggacagcggcaagggcaacacccgctcagcagggcacccggcagcatccacgtgaaaaggcaccatgccagcccccagcagtgc

SEQ ID NO: 13459 - DNA, 122 bp, Homo sapiens
ttaaactttgagttcttggtactcttattttcctcaacatctccagtgtctacccacaagcgtaggagtcatgccaggtacctatagtgctattgctcttctgcacataatcaccattcctg

SEQ ID NO: 13460 - DNA, 122 bp, Homo sapiens
gagaaattaagttttacaacaattggaactcaaaattccaaaatggaaaatgtacaaactcggtcccccagcagctctggccccgagaacggacagtcccgggcccggcgccttcccgctcg

SEQ ID NO: 13461 - DNA, 122 bp, Homo sapiens
aactgagactcgccacgacagccccgaggcctgagttgacccatcagctctgccgggacacgtctgtaccagcatggcccaggccctgcccacctcctggtctaggaacccagccactgctc

SEQ ID NO: 13462 - DNA, 122 bp, Homo sapiens
acaacctgtgtgttgcctcacaatcagccaagacagagttcaattttctgaacataaccccggaattggttcccgcgcaagatctcgtctgtgacaatgcctcttgggaacaaaatacaaat

SEQ ID NO: 13463 - DNA, 122 bp, Homo sapiens
gcagcaccagcaccgcgacgtggaggacgatgatactcagcaacaggaggagcattctggcggcaagttctgctcagcggagtttctgcctgcgaggagagcgctgggcgtgaggccgaacg

SEQ ID NO: 13464 - DNA, 122 bp, Homo sapiens
ctgtccctttagccctcctgcttttttcccctccttagtccttccagacccgagcttggtcggccctttctgttagcacccagcatggcatggatgctcaggaaatgctggttgacttttgg

SEQ ID NO: 13465 - DNA, 122 bp, Homo sapiens
aagcccacagctgcgactttctgttctggctaatggcacagccctaagtgttgctagcaacgtggtttttccagcgcgtttggtggaattgcacacgtgttgagttcatggagctctgcaga

SEQ ID NO: 13466 - DNA, 122 bp, Homo sapiens
gcagaaaagggccattaacgagatgtccgtcgagtgtaacttccgagagctgatcagctgcgaccagtgggaggtcatgcagtccgtgtgccgtgcgctaaagcccttcgaggctgcgagcc

SEQ ID NO: 13467 - DNA, 122 bp, Homo sapiens
taagctttcacttctatagtaaaacttaatccgcacactttagagctcttaatagctccccgactttctccatcgccaacccaccattccaggatgcagggagcagccttactgggaggtgc

SEQ ID NO: 13468 - DNA, 122 bp, Homo sapiens
gacagagacgtggccacagcacctggctcgtccggaaccgggatcaaagtgggatcgggtcgaggggaccggggtacaagggcgaggctggtcactaggcctgaaggagaaggcaggatagc

SEQ ID NO: 13469 - DNA, 122 bp, Homo sapiens
ggcaagttagggacagagttgggcctagacactctcccattcccctagaccaccctcaaccgttgcctcctgggtcccaggacaatgcgaatctacagacttcccagacctggggggctaga

SEQ ID NO: 13470 - DNA, 122 bp, Homo sapiens
tgatttcctggagatccatccaagttgttgcatgcaacaatggtttcttctttctgttgccgagtagtgtcccagcactactcagtgtttgtctcaatcacagtttgtttagccattcaccg

SEQ ID NO: 13471 - DNA, 122 bp, Homo sapiens
gggtgggggacactgtggtggctctgagggactttggcacttccctctccctttgatcttcgtagtctcgagagatagaccgggcccgccgagcagacatcagagaagccaacatgtacttc

SEQ ID NO: 13472 - DNA, 122 bp, Homo sapiens
ccacccatagactaaagctggcgtgtgaaaacaaagctggttgtttccatcttgcagaagcgcagatgacccacctgaggagccacgcacacgcctgggcttccggggccacaacaggcagc

SEQ ID NO: 13473 - DNA, 122 bp, Homo sapiens
tcccaggcccctgctcctctgcccccatactagcccctgcagcagcccagcctggagaaacgaggacccagcatggaaagaccccagcctcaaggaggcagagcacagccaggaagggaagc

SEQ ID NO: 13474 - DNA, 122 bp, Homo sapiens
tgctttccttcggcttccgttcttggtccatgtgagagaagctggctgctgaaatgactgcgaaccggcttgcagagaggtgaagggcaacgaggggaggggggattctgggtctcgttggg

SEQ ID NO: 13475 - DNA, 122 bp, Homo sapiens
tgacggagcactcctgggtgccatgggtgatgatggctgtggtactccaggttggagactcggccaacagttggtagagcccaactaactgttgggagtggaggctgaggcctgctgcagtc

SEQ ID NO: 13476 - DNA, 122 bp, Homo sapiens
tgtgaggcgggagataatccgggatggtgtgtggggggggtcttaacagcgcagacccttcgccggctttggtcagaaagatgtgaaatggaagaaaagagtctgcaaggcgcagcgtcact

SEQ ID NO: 13477 - DNA, 122 bp, Homo sapiens
tccgcccaccttggcctccacaagtgctgggattacaggtgtgagccaccgtgcctggcccgttactattcttgagctttgttttggatccagatacttggaaactgaaaatgttgactctt

SEQ ID NO: 13478 - DNA, 122 bp, Homo sapiens
aaaataaagagacattcccaaggttagccattaagttagtggcaaggttgagtgtagaaccgtgggtttctgacttctaaactagtgcttccctccactttccaaaagaaaaaaaatatctc

SEQ ID NO: 13479 - DNA, 122 bp, Homo sapiens
tctcatttccctttagacacaccaaacaaacaggcagatgtaactgagggtgatagacgtcggggtggctggcagttgcccttgggctgggtggtagcggtagtgactgcaggggcagaagg

SEQ ID NO: 13480 - DNA, 122 bp, Homo sapiens
tcttcaagtcgcccctccccatcaagaaaaagcacccaatctcccatccccttcttccagcgccctcatcctcaggccaagtgggcctgttcccttgacccttttagtctgtagtcacactc

SEQ ID NO: 13481 - DNA, 122 bp, Homo sapiens
ctcgggagggcaactgtgaatggcacagcatctgatatgaatttatcaccggctgctggtcgggagggggatcaagctaggggaaggggctgtgtttaatgcaccctgccacaacccaacag

SEQ ID NO: 13482 - DNA, 122 bp, Homo sapiens
gggcctttgcgacatcttgggggcgccttcggtgacgtcacaggggcgggccttctgccacgtcacaagggctgtacagttcctggagctgggcagtcttctcagagtggagcctggtaacc

SEQ ID NO: 13483 - DNA, 122 bp, Homo sapiens
aaatctgggaagcggctctggtgccccaggacctgggcctgcagggctgcagacatctcccgagctggccccagctcctctggtatcactagtgtcagggaggaaagcctgaaccaggtggg

SEQ ID NO: 13484 - DNA, 122 bp, Homo sapiens
ctaccacatttaattaaaaataaatgcagcctcagttgaaatcctaaatgctaatatgctcgtctgggttatttcttctgaactcgataaaacgtaaggaaaatttgactcaagtgaactga

SEQ ID NO: 13485 - DNA, 122 bp, Homo sapiens
tttcctttggccctggtagtatgcttcttagctttctcatattgcttttgaaattttctacgttcagtttatgggggtgggaggaggaggaataaagcaatttaggaaaaggaagcaagagg

SEQ ID NO: 13486 - DNA, 122 bp, Homo sapiens
ctggatgcaggaaactatggaaaaatatcttacacatttttccatgcatcagaagatattcgtaaaacatttgaaattaatccaatatctggggaagttaatttgagatcacccctggattt

SEQ ID NO: 13487 - DNA, 122 bp, Homo sapiens
caataaggttctgctcaccctccagcctcctggcctgactgtgttgtctgctctttactgcgtgccccccacgacaccctgttccacacgcatgcctgcctatgccataccgctcaatgacc

SEQ ID NO: 13488 - DNA, 122 bp, Homo sapiens
tactcaattcctcaccaatgtagaatgacttcatgcaaatttcacatgggctcagatgaccgggacctcactagctctcaccctatcccccaacaccataattgccacccccagaatgtcca

SEQ ID NO: 13489 - DNA, 122 bp, Homo sapiens
ttccttcaaggggtggctggaagatcagtaggcaaggcctgcggactgcgcaccttaaagcgcttcgggaccgtaagacagtgagtgctgagcgcgcggccgggaagaagcctggaggctct

SEQ ID NO: 13490 - DNA, 122 bp, Homo sapiens
tcggggccccatggaggtggagaggcccctgggtacctggaggttcaaggacttcgggaacggaattggaaggtggcctctcgcttcacagaatcctatggtagacccgggttcaaatccag

SEQ ID NO: 13491 - DNA, 122 bp, Homo sapiens
cgtctcttaaggagcgtggggagaggcggctgggagcaagctccgccgtgagaatgctttcgtttgagtgaaggcctccacaggcccctgccgtggattgcttatttaagttcaagaaataa

SEQ ID NO: 13492 - DNA, 122 bp, Homo sapiens
gggcgtggccttcccccgcttccccctccactcccccgcccgcccccggccccggctttccgatctcggcccagggaagagccttggtcgcgaatcaccagtttgcatttgcccctggggcg

SEQ ID NO: 13493 - DNA, 122 bp, Homo sapiens
acaagagaagtcataagataccccattctttctccacttccaactctcctcagagcagcacgggacattccagaccctctcaccaccccacccccgccccttgctcctgtcacgaggcccaa

SEQ ID NO: 13494 - DNA, 122 bp, Homo sapiens
agcttggcgccagccttgccactgctcgcttgaagccccttcctgcctcgcgtccccttccgccccagcctgggcctgcgcatggggatgtctgtgctcccaactcaacttttgagttcgcc

SEQ ID NO: 13495 - DNA, 122 bp, Homo sapiens
tgcacgccggggctgcacagagaggtggagcgcccgggccagagccacactgcgaggaggcggtgggaggggaccgggacccctgcgcccccttcctcttcccacctcccactcccctcagc

SEQ ID NO: 13496 - DNA, 122 bp, Homo sapiens
cctgtccctcacgtcgagggtattgtgtcccctctggacgcttctgtcgtcctagtcttgcggcttgggtccctctgcaggaaccaattccggcccctctccaacctaacccttcccaacat

SEQ ID NO: 13497 - DNA, 122 bp, Homo sapiens
taggtagaggatagacagaacaaaacctggtctcctcccctcagagaacactgcagctcccgcgcaggtcagacggctcccgggcaggtcaggcggctcccgggcaggtcaggcggctcccg

SEQ ID NO: 13498 - DNA, 122 bp, Homo sapiens
gcgaaagccgcatgttattgggtagagatcagctttccaggaacaggcatcagctgtgcacgagcccggcagcatctcgagacaagtgctagccggtgttggtgcaaaccaaagcttgctat

SEQ ID NO: 13499 - DNA, 122 bp, Homo sapiens
ttttgtatgccggatgctgcatgagtctgaaacaccaataaacggagactgcatgagactcgcctccaatctcggttggttcctgcgttcgtcccgccggcccggcggtgctgcctttctgg

SEQ ID NO: 13500 - DNA, 122 bp, Homo sapiens
aagaaaatggaaatctccttggctggcatttcagcttgcctgagggggcttgctttgctccgaggggaggtgactgtgctgaccttaaaatccaggtttcaggaagcaggagatgaaggtat

SEQ ID NO: 13501 - DNA, 122 bp, Homo sapiens
catgcgtgagggcaggcccttacggcgggctgctgtgcgctttagcggttcttggcgtcgcgttggtgtaggcctagtgcgcctgcgcgggttttatactctgctatatgtgtgtccgctgc

SEQ ID NO: 13502 - DNA, 122 bp, Homo sapiens
acccacagttccctgacgtgaccctctgggacctgccaggagccggctctccaggctgcccggctgacaagtacctaaagcaggtagacttcagccgctatgacttcttcctgctggtctcc

SEQ ID NO: 13503 - DNA, 122 bp, Homo sapiens
tacgtgtgtcgaaacaaattccaaacaaaaaagatgtaatattcaatttgccatgagtgacgacgttcggctgataacccacatagcccagggaaatcccttccaaatttggacgaagaaga

SEQ ID NO: 13504 - DNA, 122 bp, Homo sapiens
cccttcacttccctctctcttctttcgtatgtaaagatcagttacatttatcctttaagtcgtttgattttgcaacagtaaataacttctttcattactttgggacttctccaactctgttc

SEQ ID NO: 13505 - DNA, 122 bp, Homo sapiens
taacatgcacttttccaggctagatacacaggcggagaagcaaaccggcgaaataaaatccgacaagcaagatctggagcgcatcaggatgccaggtgaactcaaagacaggtcggaagtga

SEQ ID NO: 13506 - DNA, 122 bp, Homo sapiens
aggcggtgggtgccgctaggggccccaagtccgcgttcaacacaggggctggaatgagaccgctcctctgagcggccgcccaccgcaccagtgcgcatgggcgcacccggccaccgggccgc

SEQ ID NO: 13507 - DNA, 122 bp, Homo sapiens
tggcccaaccggtcagctcacttgcaagagagattctagacttcgtagcaaatgagttaccgaagttttgaaccagagttgggggagacaaaagaatagaaatgattcagagctgtgatcag

SEQ ID NO: 13508 - DNA, 122 bp, Homo sapiens
aagaaagtctacatgccttcataagccaaaactcgatgcactgattaaaatgtgattgcacgtacatcaactttttaaaaaacgtgtaagtttttgttttttttaaagtaataaatgtactg

SEQ ID NO: 13509 - DNA, 122 bp, Homo sapiens
ggagccgtgggccacgccacgtggctagggtgtgcactggacacaccgagtcggttcacacgagttcccacgacgacaaaatggcctaaggacgcgtttttcagaatgtgtccttgtcataa

SEQ ID NO: 13510 - DNA, 122 bp, Homo sapiens
tctgatgggacccagtccagacaaaaattgtatataacaaacccttgtaaaggtggtgctcgggtcagagggagggggcagccgggtgggaaggcttgtcccaggtctagcccaatagtgcg

SEQ ID NO: 13511 - DNA, 122 bp, Homo sapiens
ttttctgagccacacggtgagtgagcagcgatggagagatgatgggagccaccagagccccgtgtcaggcacaggagtgaccacagtgtcaggcttctgagggtggtctcttcatacagaca

SEQ ID NO: 13512 - DNA, 122 bp, Homo sapiens
accccggatgtcgtccccacttctcgctccaaggagcgcggggccggactctgaacgcctcgcccgccaattcaaagggttggccctaactttgaacgccccacccaccacgtggaatgttc

SEQ ID NO: 13513 - DNA, 122 bp, Homo sapiens
tctttccttagtaacctgggcgatagctggtgagtgtccttgacagggcctcgaggggcgcgtgtggtctgggtgccagagacccttactcagggacctctgggggacctcaggggaccaga

SEQ ID NO: 13514 - DNA, 122 bp, Homo sapiens
ccgcggcgcgtgtggttgagctgaatgagggccgagatgcagtgactcgggcagcgccagcgcgacgagaaagaggcggccgaggccgggaaagcggcggcggcggccccgggcgcgtcgcc

SEQ ID NO: 13515 - DNA, 122 bp, Homo sapiens
aatgctctgacctgccgcattcactttagatgctttccagccacccagcagcacggtgctcggggccaccacacccagctgccccgaagcaatgtgtgcaggaccccggccacggaggcaga

SEQ ID NO: 13516 - DNA, 122 bp, Homo sapiens
gggtagttatgtggacaccctccgaaaagagccggtgtgcttatataagagccaggaggtcgggcaagcctcctctgggagtgtctgggcgctggagcctctggccggctctgttcactgcg

SEQ ID NO: 13517 - DNA, 122 bp, Homo sapiens
agatcaaccccacacacacctgactgagacctaaggggtccacacatcctaacaccagcacgaggcaggacctcatcttcactggactgtcttttagaaaaatgaagccaagcgaaaataac

SEQ ID NO: 13518 - DNA, 122 bp, Homo sapiens
ccaaagtccaaatagcagcaggttctggcttgctgggcgcaaagcttctacctcccagtgcgccccagcccgcaatggatagccgggcctgtccggggccccacaggaggctggtcccgggt

SEQ ID NO: 13519 - DNA, 122 bp, Homo sapiens
tactgcaaagagctaaagaacaaagcttgcccagggcagaaggtgacccaaactggttgccggtgctggctctggcagccgcttttattcccttatctgaccccacccacatcctgctgatt

SEQ ID NO: 13520 - DNA, 122 bp, Homo sapiens
tcttgggagatcagtttccctgaagtaccaagaattagctgcacggactgtcatttactgcgtgtgtatttttaagacaaagtgatctttaaagcgtatttaagattccagggaataatttg

SEQ ID NO: 13521 - DNA, 122 bp, Homo sapiens
agactgaggactgaagatagaaacttcagcaacactgggatctaagaaacctgcagaagacggccaagaatccacaaatgaggctgggaagaaagaatgtgagaagttggggaaaactcaga

SEQ ID NO: 13522 - DNA, 122 bp, Homo sapiens
gtccagctcatggctcaagtgacaggaagatgtaggagctttctgtcttgaatgaggattcgaaccaaagggcttaggcccagctgtcttggagcaaagcagctgttgtggggtaagaaggg

SEQ ID NO: 13523 - DNA, 122 bp, Homo sapiens
cacgggctagcgctcgcgcctgcactcgcggggtcggccttccttgcctgtgggcggacccgtcgcgtcgactccttattggtggcgttactacgcctcaaggcgtttcttccctctttgct

SEQ ID NO: 13524 - DNA, 122 bp, Homo sapiens
ggcgaggtctcggtagagccaggctgtatcagtccgtgacactccagccagaggcgatgccgacggctgccggagaaagccgggcttagagcgccacagttccacgcccgccgccggcctct

SEQ ID NO: 13525 - DNA, 122 bp, Homo sapiens
agatgacaaaactgcgatttcaatgaaatttcatgcctgcagttactgagctagcagcagcggggtcagggctttgctgcaagtcagagcttccagtctttcaaaatcattatcaggctttg

SEQ ID NO: 13526 - DNA, 122 bp, Homo sapiens
gtgcaagagagtaagctgaggcctgcacagtgagaggaactagccatgcaaagagctgggcgtgtccagcagagaaaacagcaagggcaaaggccttgaggtgggagagtagatgtggggtt

SEQ ID NO: 13527 - DNA, 122 bp, Homo sapiens
gatgtgcccgaggagggtgccacgtaacagaatgtcaagcgacaacactctgtctcacgacgtacatccttccaaagtgacctaaggtgaacttcctcgcctcctgccaaagagctaaggca

SEQ ID NO: 13528 - DNA, 122 bp, Homo sapiens
cagagcaagattccatctcaaaagaaaaagaaaacatgaacttcaaatgcttggggaggtcgtagatttcatccacacagcctggttgaaccagagtcagccttgttagagtcgaatgttgc

SEQ ID NO: 13529 - DNA, 122 bp, Homo sapiens
tttacgcacccgtacctgcacctcctagccttgagtgtagacaccagatcctgagatgggcgatttttcgagaataatttttaccctaagtggattttcgtgccacgcatggacttggaact

SEQ ID NO: 13530 - DNA, 122 bp, Homo sapiens
gaggggctactgaacactctcatccctggcatctgatgctgtagaggtcagaggccaggtcggggccgggcagtagcctgagtcctgagggagcagtgctgacaacggcccctcaacccatc

SEQ ID NO: 13531 - DNA, 122 bp, Homo sapiens
atcagagtctgattcccgaccagaagaacagaggagggatttgagccaaaggacagagcccgtgtgccacagagttcgcagtgaaaataaagggaaaaagaaagacccctataaagccaggc

SEQ ID NO: 13532 - DNA, 122 bp, Homo sapiens
ttccccagaaaccacacaagccccattctggagagccccatggcaagatgagcaagtaaccgcctgcggccactgaggggccgccaccatctgggcccccttggcaggggccttgtggaagg

SEQ ID NO: 13533 - DNA, 122 bp, Homo sapiens
aggagcaccggccgcagaggtctgggagcttctaggatgggaagtggcccaggcagcctacgcggggcaggccgtcagtgagtggcggagcgcctgcagttacagggacagggaagggtggc

SEQ ID NO: 13534 - DNA, 122 bp, Homo sapiens
acgcgggggccacgcgtccgtgtttgctgccggcagccatcagcatccgcaggggtcccccgtctccgcgcacagctcacagccccgcatccaccccaggctcacagggagcccggctccct

SEQ ID NO: 13535 - DNA, 122 bp, Homo sapiens
cctggctcctggttgctctgcgaagagctaggaggcgcgagaggagaggctgggcggcggcgagcgctcagtgaagcgcttcggtctccaggctgagtggagccccagcccttcccagccag

SEQ ID NO: 13536 - DNA, 122 bp, Homo sapiens
tagagagctgtagctgaaagttagacatgaccctgaaccaccaggtgcctgctctaggcacggggtactgagtgggacatggctgagatgaacaaaaaggcatcactgcccagagttgggat

SEQ ID NO: 13537 - DNA, 122 bp, Homo sapiens
tctttaacttgaatctcaatgtctttctttttgcttttcaaatggttcccagtgctctcacgcagctatttgtgaggatgtcaattcttggctgatggtggacctgccagacatgtaaacag

SEQ ID NO: 13538 - DNA, 122 bp, Homo sapiens
gggagcacttcccccctttcttcttttcactaagtgtcagaggcatggacaagtgaaacacgtgaagaatgccaaagagagaaacagtgttttcagattccagaaaattcagaggcagaata

SEQ ID NO: 13539 - DNA, 122 bp, Homo sapiens
ctcccagtcactcaatcttgttggccctccggcgatctcccgttggatgaattgctcctgcggaaactcgagtcccctttgatttgcgcttcattaattattcatgattcaggttggaaggc

SEQ ID NO: 13540 - DNA, 122 bp, Homo sapiens
gccctactcataaatctccaccttcagacatactaagcaaaatatcttgaacttaacagacgtttgataaatatctgatgaattaaataggatcacataccacagactctaaggacattatg

SEQ ID NO: 13541 - DNA, 122 bp, Homo sapiens
gggtggtcaaggagggcttcctggaggaagtgatgtcttggggattgctgaagggcaagtcggcttatccagcaaaggtgaaacagatgaggaaggaaaaacaggcagaggaaaaccataca

SEQ ID NO: 13542 - DNA, 122 bp, Homo sapiens
ggtcagctgcccagtgtggccagtgctgccaagctcttgtcagccatgatgtctcaataccggggactggatctctgtgtggccactgccctctgcggctgggaccgctctggccctgagct

SEQ ID NO: 13543 - DNA, 122 bp, Homo sapiens
acagacacatacaaaactcttaaaaaccaaaatgatgctatttctgtgtaggtgatctcacgattccctggttttaaatcctttatactataaaatggtaaagttcataataaaccaaacaa

SEQ ID NO: 13544 - DNA, 122 bp, Homo sapiens
gtgtggctaagccaacaactccgtagacccttagcttcatttattttcttttactttcaacgtctaggatttaagaaatgtttgctgtaaatatgtgcatggttccaaagcagaattcacaa

SEQ ID NO: 13545 - DNA, 122 bp, Homo sapiens
ggcgcccgacccagcctctcggccttcccgcctgcgcccagtgttgggtgaagcccggggcgttgggccagccctgcaggttaaaggaagcggggtcagaaaaacgaaatctagatcctagg

SEQ ID NO: 13546 - DNA, 122 bp, Homo sapiens
gaagctgccgccgctgaggacctgctctcctcttggcgcctccaccgtggcttcccttcccgaccccagaagctgcctaggcacagacacagaggtgcccccagccccaaaattccatccgg

SEQ ID NO: 13547 - DNA, 122 bp, Homo sapiens
cccaacctagagcagtggactctgctgcagagacttacagaggggccaggaggaccgactcggccagcagcaccagggaaaccagtagcaccctggaaggagagaacataggaacagtcaga

SEQ ID NO: 13548 - DNA, 122 bp, Homo sapiens
tgcattatctcatctataacaatggtcacaacaacaaaatatagggccttttattaccatcgttttacagagggaaaaacaaacttagagaagctgcaggaaggactcaaacccagtgtttt

SEQ ID NO: 13549 - DNA, 122 bp, Homo sapiens
agccagcacccagctttcaacagtgccggggtcgccgcaccctgtggtcattctctagcccgggagaaataggaggctctgctggatggcccagccacactccagcctgagcatgtcccaca

SEQ ID NO: 13550 - DNA, 122 bp, Homo sapiens
ttggggggggggcagtggcgtccagtgacgcccagtgacgtccggtgaaatccaagatggcggcgctaggctgaccctcctgctggtgagggctctggcgccgggggggacgggatccagca

SEQ ID NO: 13551 - DNA, 122 bp, Homo sapiens
gtgcggggtgggggcggagccttatgagcggggcggggcaggggcgtggtcggggcggggcgcgcgggcgcccgcggcggccctcacttcctctggcgagcgcagccgggcggaagtgcgtc

SEQ ID NO: 13552 - DNA, 122 bp, Homo sapiens
gcagccggcattggtcaacaggaagggcccaattcttctccatgacaaagcccaaccgcacgtcacgcaaccaacacttcaaaagtggaaaaattgggctgcgaagttttgcctcatccgcc

SEQ ID NO: 13553 - DNA, 122 bp, Homo sapiens
ggtgcggctactttagccctgagcgtgctctgcggctgcctgcgggtctcagctagtgtccgacccctctcttcgcggactccacgccgagcagccaccctgagccaagagccggaagtccc

SEQ ID NO: 13554 - DNA, 122 bp, Homo sapiens
aaggcagggcagtcctggcccattcagcaaagatgctgaggtacacagagcatgctgatgcgtattctagggccagctgggagtcttggtttcccagcctggctgactgtagggagtggtca

SEQ ID NO: 13555 - DNA, 122 bp, Homo sapiens
cgttactgcactgtcacgactctctcagatggctctgtggtcctaaacggaggccgttcccggagggggaaactgaggggcccaccggagagcagagagtgggggaacgcgctgaaggggtg

SEQ ID NO: 13556 - DNA, 122 bp, Homo sapiens
cgcccgcagtcggtggttagcccacggcgatgcctctcccggcctcaggtaagcccggagcgccggcggaactttcccagcttgcgcaccccagacactggcacatactacccaccccccca

SEQ ID NO: 13557 - DNA, 122 bp, Homo sapiens
aggagactgctagagataagtccctctgcagcccctgcaaatgtgtgatgatctcagccacgagggccttcaagtcctgaagctggtccagggagcagacagaagggtgacgctggcagctg

SEQ ID NO: 13558 - DNA, 122 bp, Homo sapiens
gggtcagtccaaataattccaggacttggaatgactcaataggacatcaggggtagtaggcgccggggtagcgggagctggggtagaggacgctggggtagtgggcgccggggtagcggggt

SEQ ID NO: 13559 - DNA, 122 bp, Homo sapiens
agacttattgagatactgcctattgtccaaataataaccttcatagcaaaagaaaatccacgatcatagattgcattcagttgcatgtttagcctccagttatatttagcctccagttatat

SEQ ID NO: 13560 - DNA, 122 bp, Homo sapiens
aacaaagcactatcctcttgccttgcactcaaccctcctcttagctctcatgctgacatccgattgtatcagaccaacccctggcttgaagatgtttatccatagacagtcaagtattctag

SEQ ID NO: 13561 - DNA, 122 bp, Homo sapiens
gcagctcccataaaactgctaggaagcacactgcatctccttccaggacttgaaatgggtcgtgttatgcagaaagcaagttatttccagaaatatgcaatgttaagaaaataaatcacatt

SEQ ID NO: 13562 - DNA, 122 bp, Homo sapiens
tccagaacagcactgggagaagtcaaccagcacatgagctgtgtgtcttaggagtatgcccgtaatcctctgttattttacctatgaatttgtggatctaattccatgacccctttgtcctt

SEQ ID NO: 13563 - DNA, 122 bp, Homo sapiens
tgacacttatgaatcacatcctggtggtggccatcttgccatggccaaaccaaagagtaacgggtccgttctccactcgtaggagaaaattcaataacaccagctcccattttccgatgcct

SEQ ID NO: 13564 - DNA, 122 bp, Homo sapiens
tatatgggcagtccttctggtttacaagctcttgctgcattagaaacatacccatgggtacgcaagtaacaacgggcagacctcaggccgtccccagctcaccccagccatgcccctcctcc

SEQ ID NO: 13565 - DNA, 122 bp, Homo sapiens
tgcattgctgtcctgtccactgtggagccccgtgcagggctgtgttttcgccttgtcagacgcgttgcatgatctgtaactgagatctgctgaacgtgtctcttcgcatctttctcaccaag

SEQ ID NO: 13566 - DNA, 122 bp, Homo sapiens
aggggccgcgccagcagcccagatgcggtgggcgggagctgggggggcggcggggtcccgcgaagacctgcgacctggcgccctcgccggctgtgtcccggccagcccgctttccaggcgag

SEQ ID NO: 13567 - DNA, 122 bp, Homo sapiens
actcatgactaagctctgttgctgtttatcaagatacacactgactctcagaagttctagcgtgaaccaaatcctgcttcaaccccatgggctttcagtgtaggactttttctttttgttgg

SEQ ID NO: 13568 - DNA, 122 bp, Homo sapiens
ggacggcgacaagccccgggtgctctacagcctggagttcaccttcgacgccgatgcccgcgtggccatcaccatctactgccaggcatcggaggagttcctgaacggcagggcagtgtgag

SEQ ID NO: 13569 - DNA, 122 bp, Homo sapiens
aagtgaatggcacacaggacaagtccagacccaggaaggtccagtaacatgggagaagaacggaaggagttctaaaattcagggctcccttgggctcccctgtttaaaaatgtaggttttat

SEQ ID NO: 13570 - DNA, 122 bp, Homo sapiens
ccgcctcgcgccgactaccccgcggtctagctgcgctggaacttactgcagctgccgcgccggcctccgcctttattagtgctgaccacgcctcccggataacggtgacaaccccgcggccc

SEQ ID NO: 13571 - DNA, 122 bp, Homo sapiens
gccgcctgagcccttcaagatcagcatccggtcaagcggctgtgcagccgagaagcaacccgggactgcaagtctgcgtggcggggacggcgcaaccactcaccggcatgactgaggcagcg

SEQ ID NO: 13572 - DNA, 122 bp, Homo sapiens
tccccgcagccgggctatgttctgctccttcttcagtttccttgcacctccagtccaaatcgggaggggagcggggcggggggagcttctcgcttctccccggatcccgtccttctttttcc

SEQ ID NO: 13573 - DNA, 122 bp, Homo sapiens
aatttttcagcttctctaacttaggctgggggaaatttctgaagcaaatcagttgggcgtcgattatgccaatgtctgaacttgctgtagattataaaaatgttcccaaatcttcccacctc

SEQ ID NO: 13574 - DNA, 122 bp, Homo sapiens
aagaccagaactaacaggaagtaatgaaaaactgaagccatatttctctgtaagaaaatacgttgtgagttttgaataagtatcgccccagcttccgagtggcaaatcctattattggtaat

SEQ ID NO: 13575 - DNA, 122 bp, Homo sapiens
gaaatcaatgccctgaggggccaagtgggagaccaggtccatgtgagggtggattcagctcggacctgccaagatcctgagtgacaggcaaagccaatatgagatcatggccaagcagaact

SEQ ID NO: 13576 - DNA, 122 bp, Homo sapiens
ggaatcccctgaacacagcacacggccatggaggaggcagaacgcgtggatgtggccttgcgttgttggactcggggtggggtgggccgtgtggtgcagtctaatgactgtgtcgatatttc

SEQ ID NO: 13577 - DNA, 122 bp, Homo sapiens
cagacccaccgcacgggacccgcactcggagggctccacacagacccaccgcacgggacccgcactcggagggctccacactgacccaccgcacgggacccgcactcggagggctccacaca

SEQ ID NO: 13578 - DNA, 122 bp, Homo sapiens
tcctcacctgcccgagacagcagtctacaatgcgaacacagtcatgtccttccccttcagcggttccccactgcccccaatatgaaaaggagttagaaacccctgccttcccactcccaccg

SEQ ID NO: 13579 - DNA, 122 bp, Homo sapiens
agtggcccttatggctgagggagacagtgtcccctgggctgcaccagttggaagagaaggcggagttttcacagccctggttagaagtgggagggaagaggtcaggtcctcaagaggaagag

SEQ ID NO: 13580 - DNA, 122 bp, Homo sapiens
gggttggtcctcattttctgggtccctacttctattgggaaaggcaactagagtgcgacacgtggcagattaccttggtttaagtcttaatgtggcctgtggtgtttcccataagagaattg

SEQ ID NO: 13581 - DNA, 122 bp, Homo sapiens
cccgtctcgtctcgtcagtgccacccgcgcactgtccccagggtccgggccgccctggcccgcagtgagcaagggacccataggctgcggcccgggactgtttaacatttccctccacaggc

SEQ ID NO: 13582 - DNA, 122 bp, Homo sapiens
ccacaaccacatacacagaaactcaaaacacacggagagaacccacacaaccacccacaccgaagtccagcccgccgcctccgctgcactctgtaaacacgcactcacatccgccagtacag

SEQ ID NO: 13583 - DNA, 122 bp, Homo sapiens
ggccgggtccctgccccacggtaggttggcggcattgccccagggcctccggagtgggcgcgaggctgaggaggcctctggttccctgcatgtgtctcccccagcccccaggatcaaacggc

SEQ ID NO: 13584 - DNA, 122 bp, Homo sapiens
atagcattgactgtttagttttattagacaatataattagaaatctaaaggcactcatttcgatgaggaataataaaggctgatacatttccagtgttctgtatatcagaaaaaaatgaatt

SEQ ID NO: 13585 - DNA, 122 bp, Homo sapiens
gatgtaattcgaatgcttccacctctgcttgaagggtttaaataataaattaggccctgtcgtgccattatgggggtggtcataccctgtacccaggaaacaggcacggtagggctgagaca

SEQ ID NO: 13586 - DNA, 122 bp, Homo sapiens
aatgtactgaaagaagtgctgtcccccctggtcacttgttgtctgtcctcctctccaggtcgccgcctcctttattagattcatccccagagagcctggctgcaggcagaatctgattagct

SEQ ID NO: 13587 - DNA, 122 bp, Homo sapiens
gcacccattacccaagagcttacaaactcctgataggtgtcatatgccagctggtacaggcgacgggcgcggagcatagcgttgtcaaaaagcctggataagggaatggttgggaaggcact

SEQ ID NO: 13588 - DNA, 122 bp, Homo sapiens
aagaaaaaaagcatagaataaaagttgtgtagtatgatagcatttttgtaagaaaaaacacgtatacatgggaacaaggctaaaaggcttaataccaaattgtgatttactatggtttgtgg

SEQ ID NO: 13589 - DNA, 122 bp, Homo sapiens
cacaggaactacagacaactacatgcataatcctgtctttacaaagcttaaaaaatgggccggacacggtgtctcccgcctgtaatcctagcactttgtggggtcggggcgggtggatcacc

SEQ ID NO: 13590 - DNA, 122 bp, Homo sapiens
ctgggcttgggcttctggtgccctcgaggagccgccctgtgtgctcacacaggctcctggcggcgggcagcacagcactctcacttttggtcaccggtcctttcccgagggcagtctggcgg

SEQ ID NO: 13591 - DNA, 122 bp, Homo sapiens
aatccataaaagaagctttcacccacatgagtatttccttacagattactgaaatgatcccgatgggacacttgggggaccctgagggtgagcactgaatgtagtggggtccctgggaaggg

SEQ ID NO: 13592 - DNA, 122 bp, Homo sapiens
cttcatagctctggcctcatcagaagtggccattctcacagtgatgtcttatgacaggtacgcagcaatctgtcaaccacttcattatgagactattatggatccccgtgcctgtaggcatg

SEQ ID NO: 13593 - DNA, 122 bp, Homo sapiens
cactcctccatcccagggctcactcagccaatgcttattgattagtatagactgggaaaccgaggtgggagaggtgacaggagctgacacaggcccaggacgcacagatcactcccgtccgg

SEQ ID NO: 13594 - DNA, 122 bp, Homo sapiens
ggcctcttcccacccccagggagccactctcagaacctcaccttcttgttgatctcagtgcggtgatggtagcctttctgcccagcgcgtgccacagagaaggctacacgagcaggatgcca

SEQ ID NO: 13595 - DNA, 122 bp, Homo sapiens
agccacgccctggaaaggggccagagcaggacgaggaggatgagctgcatctctggcactcgggaacacagcattctagaaatctatctgtccttggctgcctccagcagctaaagaagtat

SEQ ID NO: 13596 - DNA, 122 bp, Homo sapiens
atgggatgctggccacaagctccaatgggtctcagtacagcggctccagggtggagactccggtgtcctacgtcggggaggacgacgaggaggacgatgacttcaacgagaatgacgaggac

SEQ ID NO: 13597 - DNA, 122 bp, Homo sapiens
ggctctcctgatcctcagaggagccctgggagacttagaaagattctgcaactggctgggcgcggtggctcacgcctgtaatcccagcactttgggaggccgacacgggcggatcacgaggt

SEQ ID NO: 13598 - DNA, 122 bp, Homo sapiens
caccgcgcgcttcggccatgagggcaggacctggggggacctgggcgccgctgccgggggcggcacccccagcaagggggtcaacttcgccgaggagcccatgcagtccgactccgaggacg

SEQ ID NO: 13599 - DNA, 122 bp, Homo sapiens
gtgcaaacagcgtcccgctgcccctttccctttgctgggggaaaatgaagttgtgggagccgctgagtaaactagacctagcagcgagggcacctgatgtggctgctgcctcccgggcaggt

SEQ ID NO: 13600 - DNA, 122 bp, Homo sapiens
tctccggccggagagtgtcctcagccccagcgcaagggagcccgctgtgaaagctcggagcgggaatcgcggggcgagagtgctcccagaggcctggggccgggcggtggagagaggagtcc

SEQ ID NO: 13601 - DNA, 122 bp, Homo sapiens
aggtatgtgaagacaactgggaatgccacagtggaccacctctccaagtacttggccctgcgcattgccctcgagcggaggcaacagcaggaagcaggggagccaggagggcctggaggggg

SEQ ID NO: 13602 - DNA, 122 bp, Homo sapiens
tgggtgtctgcggaggagctgggggcggaagcatgaggctaacggcttggcttcagtgaacgcaccgggatgtgcaggccgggaggtagaggcaggctgatgggggagggaacgagcagcct

SEQ ID NO: 13603 - DNA, 122 bp, Homo sapiens
gcggagcgtcccagaattgggggcggggtgatagtgaggaggcgggactttttcagggggcggggcttcctgaagctgcgcatgtctcccttggttccccagcccccaaaggacttatctgc

SEQ ID NO: 13604 - DNA, 122 bp, Homo sapiens
ggttccttcattgaggggtcttttacacagccagaggatggaggctcacaaaggggctagcggataggtaaataggggccatttattgacatagttgcaataaacaaatcttactgggcaag

SEQ ID NO: 13605 - DNA, 122 bp, Homo sapiens
tctctttcctcccctctcccccggacgccggggtatctccctctcgcaactttgccgccccgactttctctgctgtcaggccgggaaaaagtgtccgaacgcctcgtggactgcagcggggg

SEQ ID NO: 13606 - DNA, 122 bp, Homo sapiens
atgctattcacaaacatgacattgaataaaaggcaaaaccaatacaaaacaaaaaacaaccgtatttagtggccttctattcaaatgaatagaaataacaaccaaaacaaatttaggaatgc

SEQ ID NO: 13607 - DNA, 122 bp, Homo sapiens
tctgggttcccgccccaaaatgcaggcccggggcgcagccgggagagcgggaagtaggaacgtaggaccaggacgtctccccgaccctcggcgacactcccggccccgaacggcggagagcc

SEQ ID NO: 13608 - DNA, 122 bp, Homo sapiens
ctaattgtttatgtccagaaaaacacatcacgtttgtttgattttaatgaataccatcagcgaaggaagcagaaagccataggtgcaaaaagaattgaagggctaatttttccatattggct

SEQ ID NO: 13609 - DNA, 122 bp, Homo sapiens
tcgcgccgggcaaggactagcccttccggcgcataggcaatgacgcaactccgccctgcgcggccaaatggataaccggtagcggtcaccatggagatggctgaactaggggcggagacact

SEQ ID NO: 13610 - DNA, 122 bp, Homo sapiens
ggaagtaggaaaggttaagtactgacaccttcaataggactctgacttctacagacattacgagtaaaaaaagataagccctaaaaagcacactctatatgatctatttatataaaattcta

SEQ ID NO: 13611 - DNA, 122 bp, Homo sapiens
caggcaaaaacgcggggaacggccccggaccagggtggggcgtggcaagggtttgaagggcgtgtcctacgaagaggtagggcttggcaaggacccacggggcgtgtcctaggactcggtga

SEQ ID NO: 13612 - DNA, 122 bp, Homo sapiens
gcgacactggaaagccggcctgtcctagagaccaggaggctctagagtgtgaggggctgccgggcactgccccgcctctgactgctcttctgagtttgtgtactacccacaacgcgtcatac

SEQ ID NO: 13613 - DNA, 122 bp, Homo sapiens
gggcacggggtggcgcggggaggcgcgggccggggccaggccgggcggtcccggccctggcgaggtccctgccctgggccgagcggcgccaaaagcaagttttaactgaaaacctccagaat

SEQ ID NO: 13614 - DNA, 122 bp, Homo sapiens
cccctccctgggggcctcgctgcaagggctgctgcaggatcattgggttttggggtcctgcgggtgggatctgggcgacaggggaggagtctctgagggcgtggccaagagaggatgggcgt

SEQ ID NO: 13615 - DNA, 122 bp, Homo sapiens
gcagggcagcctagcggctcttgccttgggctccctgcgcaggcgcaatggcagtccagtcgtcctcaaatcaatcccgccagggcgctggacgtgaacgcgaaagggcgtggctagaagca

SEQ ID NO: 13616 - DNA, 122 bp, Homo sapiens
taagtggaaagaaaagcaggtagtcaccaactagggtccacggaatgcggttgatcacagcgcttccccccgcgattcccgcacgcatccaccgcgggcgccctccggagagtcgctctggc

SEQ ID NO: 13617 - DNA, 122 bp, Homo sapiens
cccccaaccttgagacgctccacgcggagtttctcctcctccacctcccggcgcgcggcgcggatctcctcctgcagccgccgcttctcctgcgcacagaggacccggagctgcccgccggc

SEQ ID NO: 13618 - DNA, 122 bp, Homo sapiens
tgaatgtaggatgtgagtaaaactcacagctgcgcctgctgccagaaggtttgctgagggcggtcactccctggcactggggtccttgaagttatctactgggaaatctagcgcctgttgtt

SEQ ID NO: 13619 - DNA, 122 bp, Homo sapiens
gcgtcaggctccagaggcgtgtgcgccaggccaaagccctcgtctgcgtcggccatggtgcgcccagggccctgtgcccgcgcaaggttctgctctgaggacaagaagcagggggagatggg

SEQ ID NO: 13620 - DNA, 122 bp, Homo sapiens
ggggaaggcctgcggcgctgtgaggcaggctgggcggggctgtgacgtcacacaaggcgccgtcccggagcgaccacccaggctggggcacgtggggcgtgggcgtttagtgctgtcgcagt

SEQ ID NO: 13621 - DNA, 122 bp, Homo sapiens
ccctttggccggaagggggggggccggcgcgcggggccggtcgcctaggcaacgggctcgcgtggcgtccaggcttctcagaaagcccaaaatccgggagctttgggagggtagaggggcga

SEQ ID NO: 13622 - DNA, 122 bp, Homo sapiens
tgcctggggcgggtgccgagggtcagtccaggaaacttctggaacaggtggaagtcctcccgggtagatgtgagctccatcgggaaaagggtgtcacaaaaacaggtgctcagaggcagggg

SEQ ID NO: 13623 - DNA, 122 bp, Homo sapiens
actgaggcagcctgtttacttctaagggactaacccacatgaaaagacccaggcctcctgcgccggcctcacggcccctacacgcgttatcaagcttggagtcaactggacgacctgctgtc

SEQ ID NO: 13624 - DNA, 122 bp, Homo sapiens
actcgccggcacagccgcatcttcctggtcttctttctcatttttcctcttcccttccagcgtgtcccaggatcaccttccaaagaggtgactcgaacccaaatccttgcctcagggtcttt

SEQ ID NO: 13625 - DNA, 122 bp, Homo sapiens
ctgcgagtacccagttgttgtttttttctccttccctgttctccaccccatgcacttttccgaggggcaagctccgcagttctcccatcaaggaggctctccaggctccctgccggccttcg

SEQ ID NO: 13626 - DNA, 122 bp, Homo sapiens
cacatcccctctaatgcctggaaatgtccagcatttattttgaatatatccctacagttgcgaaaaattgtagatggaaaaccacgtttaagattttttataagtttttttttttcaaatct

SEQ ID NO: 13627 - DNA, 122 bp, Homo sapiens
gcgcggggatggccaggggtctgggaggaatgggaggcatccagaacaagaaggaaaccacgcaaagcctgaatgacagcctggcggtcagagtaaggagtctggagactgagaaccggaag

SEQ ID NO: 13628 - DNA, 122 bp, Homo sapiens
gcgcgccgggggcgggcacagaccagtgtgcgcacctttccgggtgttgggcaggggtcccgtctcgcccaccgcgacactccggctccttacctctccatgctcagacctcggcacaggcg

SEQ ID NO: 13629 - DNA, 122 bp, Homo sapiens
cagagagtgttctaggtgcagggagcatagcagtgaaaaagcagacaacctgtttccttacggtgctacttgtcttgtagtgggaggtgcacaataaggtaaatacataatgaaaatgtaga

SEQ ID NO: 13630 - DNA, 122 bp, Homo sapiens
tggaggtggccggcaggacagctgcagcactactggaggcgggcgggcaccgactggcggcggccagggtaggagagccctgtcagtgtgaaattagcctgaagactggggcgtggtattag

SEQ ID NO: 13631 - DNA, 122 bp, Homo sapiens
ttgtcatgaaaactgcttcccagtttgttaaattcttatgcaggtctccagtgtcagaaacgctgagtatcactaatctcaagaccttctctctgctatacgagctctggcagagcttgtct

SEQ ID NO: 13632 - DNA, 122 bp, Homo sapiens
aacgaattcacgcgggggctggcaggttgtttgtgctgcatcttttctgagagataacggcgcctccctgtagcctccgttctcagctgatgagagagttgatttcacaccccgataattct

SEQ ID NO: 13633 - DNA, 122 bp, Homo sapiens
tcagcgggtcccggcttccttacatggtcacggccgggcttccagctcccggacgtcccccgccccccgcccccaccggacacggcccccgccctgttcgccccgcgccaccggcccgcgcc

SEQ ID NO: 13634 - DNA, 122 bp, Homo sapiens
ctgggcaccaagtgtgtcagacccctggttgctgggggagcaggactgtcattggaggtccgaatgaaacggggtggggccgtggggtccacctgtctcacagcagtgactggagtactggg

SEQ ID NO: 13635 - DNA, 122 bp, Homo sapiens
tggctggggaaactgaggcacagagcactgaggcagaggaatcctagttagaggcagagccggattccagatgctctgtgaggccaccagcatggaagaaggagctgcctccctgcttggag

SEQ ID NO: 13636 - DNA, 122 bp, Homo sapiens
aagaaatatttccacaagcccagagacaatgttcaggtgccactctgagctcatgacactcggaattacagcctggaggtgacttaatcctgacacaggagacaaagagggaacatgtagca

SEQ ID NO: 13637 - DNA, 122 bp, Homo sapiens
ctgacaggctttgtgccctttttattaaatggcctcacatcctgaatgcaggaatgtgttcgtttaaataaacattaatctttaatgttgaattctgaaaacacaaccataaatcatagttg

SEQ ID NO: 13638 - DNA, 122 bp, Homo sapiens
cctcactccggattctattaaaatcgtaatctctagaagatggattcagcaaatgccaggcgtggagccatgaatgtttccataagaaacaagaaaaatagaaagaatgtgtgttagccaga

SEQ ID NO: 13639 - DNA, 122 bp, Homo sapiens
gagtaaggaagtaggtatttgttcaccattgtgcactcagtgccagacgcaggtgtcaagcgaatgtttgataagatggttgaatgtcatcttaatatgaaaggctattgattaaaaccccg

SEQ ID NO: 13640 - DNA, 122 bp, Homo sapiens
gactaactggactaactgcgtggagctccgggagggcagggccaccaggggctggctcctcggcctctctcctttgtccagtgtggatgctgctggcctcttgcgagatggtttcttcattc

SEQ ID NO: 13641 - DNA, 122 bp, Homo sapiens
cgaaattaaggaccctcagccaacgatcgctttcctctgacacgctctgtctgctccgctcggcacagcggatttgcctgaagcctcagggctcgccctgcagcctgggacacatgggtgtc

SEQ ID NO: 13642 - DNA, 122 bp, Homo sapiens
cacaccctttacggacgcggcacctgcgacagggatgcgcgaggagtcagggggcctcgccggatcgaacctaagctggggaagagtatttcttgtatttttaggagaaattctcagcctcg

SEQ ID NO: 13643 - DNA, 122 bp, Homo sapiens
gcggctcccccctctccactcgctttctccgctcgccttcaggatgacgtcatgaacatccgtggccctgacaggccacccgtgggttggtctcagctttaaagcagctgttctcctctggc

SEQ ID NO: 13644 - DNA, 122 bp, Homo sapiens
tgaacttctgacctcaggtgatccacccgcctcggcctcccaaagcgctggaattacaggcgtgagccaccacgccctgggatcttatatgtagacagcatcctgagttcgaatgccctgtc

SEQ ID NO: 13645 - DNA, 122 bp, Homo sapiens
agcatatcgtgtcctcacaccggctggagcactggacgtcgccatgacagagctcaggggcgggactggaacagcagagtctcccattggtcagtcggtgatatatccggccaatggtgagc

SEQ ID NO: 13646 - DNA, 122 bp, Homo sapiens
tgctgaggtgggggcctttttcccccttctctgttttgtaccttttttatctttaaatagcgtttcttaaccagagttccacggcacagggtgccaaacattggtgagccagcagcccttag

SEQ ID NO: 13647 - DNA, 122 bp, Homo sapiens
aagctcttatcattctttattattcaacttgtcagaggttccccgagctagagaccactgcggaactctagattacttatcaacttatgatcatgttgactttttaaaatgtattttaattt

SEQ ID NO: 13648 - DNA, 122 bp, Homo sapiens
atcccacattaacaaggcccctgggagtgctctggaagcaccatctgtcaagtatttgttcgcacaacctgtgaccaaaacagccttttaacgtcattaccaataatgataatagcacctca

SEQ ID NO: 13649 - DNA, 122 bp, Homo sapiens
aactcagcccacctggcccgggctccggctaggagggcaagcgggaggtggcccaggctccgatggggcggcggggccgagcgtggatgggacaccgggcggcaggcggagagggcgcacca

SEQ ID NO: 13650 - DNA, 122 bp, Homo sapiens
gtgcttccgggtttgatcattcagccgtgcgctgctccggggcagggggcttcatctgctcgagccaccagctccccagcccctggctcgggctgcacccaccttgggctctgggtgcagat

SEQ ID NO: 13651 - DNA, 122 bp, Homo sapiens
aggatggtgctcaactttaaccgggtcggcgccctcgggagaaaatgcagcctgacgggtcgggtgagcgcgctcggccccgccccggcccggcccggccccgcccccggccccacccccgg

SEQ ID NO: 13652 - DNA, 122 bp, Homo sapiens
aagagtatgaaacttttcccccaacttggttgctaaagaggaaggaagacccctgaactgcgttcagggagaaaacaagaaactacggtctgattcgggaaggaggtttgcgggaggaagga

SEQ ID NO: 13653 - DNA, 122 bp, Homo sapiens
gccccccgggccctaggcggcggagcttgactgcgaccccccaaaaccgggacggcggggcgggctgcgacccccaccccagctcaggcccctccaggagcccccagtcccctcgaatgccg

SEQ ID NO: 13654 - DNA, 122 bp, Homo sapiens
tttggtgcagccatttgcacaaccgatgcgcaggcagtgtcacttggtgggtatgcacagcgcctcttatttagggtcccttcagtgactctcgataaggacaaggtcccccaggagacatg

SEQ ID NO: 13655 - DNA, 122 bp, Homo sapiens
cactatatttcttgcagtagtgggcggcgacctcggaggaggtgcagtacctccgcgtctcgtagttctcgtagaaactgctgactgccatccccagacagtggttgggcagcaccaggaac

SEQ ID NO: 13656 - DNA, 122 bp, Homo sapiens
cgggggtctcacttctggccgcccaacctcgctggctggaactgcagtttggggatgatccgatggatccagttgtggtgggcggtgacacggatgtagacacctgggcggttctggcgggc

SEQ ID NO: 13657 - DNA, 122 bp, Homo sapiens
agtttgttgatgacttttttctctttaaccctcctgttctggaaccagattgtgacctgccgctcagagagattcgtcgtggctgatatccgcctccgtttgtccttagtaatgaatttatt

SEQ ID NO: 13658 - DNA, 122 bp, Homo sapiens
ggggcagagggacgatatttgctcactacccggtgtctgccgctcattctcaggaggatccgcccgctgtgactgctgagagggagtcgctgttggccagggtgaaccggccggccgagcat

SEQ ID NO: 13659 - DNA, 122 bp, Homo sapiens
tgtggctccaaacatgttcccctcagcttcaatctccttcacttaggaaaacagagctctcgagggagcctttgcaagaaaaaaaccggggctaatgctgagcacgcattttgacagttaca

SEQ ID NO: 13660 - DNA, 122 bp, Homo sapiens
gctggatgacctggaacatctgaggacacaggtgggctcaggacagcgcacatgaggtctcgtggctgagcacgtgcaagagtccaccaggcacctggccgtcctcgccggagtcgtaagag

SEQ ID NO: 13661 - DNA, 122 bp, Homo sapiens
gctgctgtgttggtcacttgttctcatgctcttcaatgccccctcgtctctccacactcccgtgctaaaggagcaccttgaatgtttcagaaaggaagaaccagaaggaacacttgggggcc

SEQ ID NO: 13662 - DNA, 122 bp, Homo sapiens
gctccgccgttttccaccagggcgcgcgcctgcaccacttcccggagcagagcggccttgcgagtcccacctggctccctgtcctacccaggcgcccatttgaggcctgacaaaggctgcta

SEQ ID NO: 13663 - DNA, 122 bp, Homo sapiens
gcccatcctgcacccgccgcccgtgagcaagagcgacgtgaagcccgtgcctggcgtgcccggggtgtgccgcaagaccaagaagaagcaccttaaaaagagtacgccctccacgccctgcc

SEQ ID NO: 13664 - DNA, 122 bp, Homo sapiens
ccctatcttacagtgggccattgcttctactaacgtggaccactgggatgccaattgtaacgtcgtgaggctcctataagagctcattgttgcaggggtagccaatgatcatgaagactttg

SEQ ID NO: 13665 - DNA, 122 bp, Homo sapiens
cgagaacagcaatccagacctctctggagacgagaatgtaagtgcagcttctggcagttacgagactgcggagtgaaagttttaaattcttttaaaacggggggcgcggggacgagcgggct

SEQ ID NO: 13666 - DNA, 122 bp, Homo sapiens
ctgggcgctttcagaccaggttgtactccttgaggctgagctgcaggatggtgtccttcacggccgcgaacacgaagcggatgttcttcgtgtcggtggcgtacgtgaagtgggagtcgatg

SEQ ID NO: 13667 - DNA, 122 bp, Homo sapiens
tccgggctcccctcccccgaccggctggcggggcaacggccacgcccgcgaaccacactgcgaactgccgggcagagagatgactggagggatccacagagccagccaggaggagttcccct

SEQ ID NO: 13668 - DNA, 122 bp, Homo sapiens
gggtccggcctacaatctcttcttctgcccaagcgaaatccaggggagtgacactggaggcgtctgcacccacagggcagtgacgcgggcctcgactggggaaaagggcggaagggctgagt

SEQ ID NO: 13669 - DNA, 122 bp, Homo sapiens
cacaataaccactcttgaaattcatgaaggaatctggacatttagggggttcacagaatccgccgcttttagggaagattctctgcctgatgtgtgagcgctctaacctcttcatctgtgtt

SEQ ID NO: 13670 - DNA, 122 bp, Homo sapiens
agtcctatctctacaaaaattagcccatcatggtggcttgtgcctgtgttcccggctacacggtcccagctacccaggaggctgaggtgagaggatcactggagccgggaagtcaaggctgc

SEQ ID NO: 13671 - DNA, 122 bp, Homo sapiens
agtcctagccgctggcatcactatactactaacagaccgtaacctcaacaccaccttcttcgacccagccggaggaggagaccccattctataccaacacctattctgatttttcggtcacc

SEQ ID NO: 13672 - DNA, 122 bp, Homo sapiens
acatgaccagagaagttcgggggttcagagcatctccatcccccttttggggactcagagcgtctccatcccacttttggggattcagagcatcttggtgaaacctcgggggctcagagctc

SEQ ID NO: 13673 - DNA, 122 bp, Homo sapiens
accagtgagaaggagtggccgcgagtggcatgcacttggtccaattacctgcggccctgccggtcggcccgcgctggggccaatggaggtgcgaggcggggctcgggcgggggcaacggtca

SEQ ID NO: 13674 - DNA, 122 bp, Homo sapiens
cctgtcacagtcgcttgtcaactgcagtctgaggcctggggttcagctacaagtcccgcccgtgggcgactccccctgcgttactgtcctccctgccaaaagtgacagcgcgctgccaggga

SEQ ID NO: 13675 - DNA, 122 bp, Homo sapiens
tgccgggaacaggtggtggggccggcgtagcgccccgaattaggaactgtcgggaagcgccgcggccgctggctcgagcctccgatgcttgcccttttttagccagcggggccactgacggc

SEQ ID NO: 13676 - DNA, 122 bp, Homo sapiens
ctgacagtttactgagtttgtaaggaaggccaaataaaggcggggtttggattcctttggcgcacccaagccgaccgtggacttcctggatacaacaaccaatcaggatgcagaggaagggc

SEQ ID NO: 13677 - DNA, 122 bp, Homo sapiens
aaggggcgctggaagctgccaggccctacgtgggccacctcggtggggtccagacagctccgtgcaggacaccatgccggcaagaggagctggaccgcagccctcccctgttcgcggctggg

SEQ ID NO: 13678 - DNA, 122 bp, Homo sapiens
tagccccatcaatgcctcaccagtcatccagcgcactgcagtccgcagtcgccacctgagcgccagcacccctaaggcaggcgtgctgacgccaccagacctgggcccccacccaccgccac

SEQ ID NO: 13679 - DNA, 122 bp, Homo sapiens
ccgcaacccaaacctttctcctcacttcttcaaatcgctgctaaagaggccgaaggcccccgagggggaaatggttgaggtcgcctcctgacccagctccgtcgcctcccctcctccggact

SEQ ID NO: 13680 - DNA, 122 bp, Homo sapiens
gaaggcggcgggcactgcaggtggtttacgggaagtgctgcagccttggggtggggacagcgtggccagacccaccgcctcatctgcacacctgggctcaagcgctaatgacgacaggggac

SEQ ID NO: 13681 - DNA, 122 bp, Homo sapiens
agacgggtacagcgggtgatctggggtctcccttatgcttcgcccgggaggggggtctgccgataatctaaccccttctaggggcgcgtccgcagcggcgcggcccgcagcctgggcagggc

SEQ ID NO: 13682 - DNA, 122 bp, Homo sapiens
ccagactcacctggagccttctgaaaacatagatgtctgcacctctgcacttgcttgttacgtctccaaaggtgattttgttgtgcagtccctaggaaagacttaaaatggaaatgctgtct

SEQ ID NO: 13683 - DNA, 122 bp, Homo sapiens
ggagcagtaaaacattgcaaaggcaatgtttcagtcttgaaaagaagaagaatgaggagacgacattgattttgtgggtaaggcgggcatggtgaatcaccactaaattgaattgtattgtg

SEQ ID NO: 13684 - DNA, 122 bp, Homo sapiens
attttctggagtactttagagtcaatcactgggaaaaactatcaccacagctgattgatccggctgagtcctgctttggacgtcgtttaagactgcagtccatgggctacctctgtctctgc

SEQ ID NO: 13685 - DNA, 122 bp, Homo sapiens
tggtagcctgaaggcccttgccccagcctgtgacagcatcctccagggctgcctgagggtcgtcattctccactgcttcctggcctccatgtttctgattagaaatctggtggaaacattat

SEQ ID NO: 13686 - DNA, 122 bp, Homo sapiens
ggagcgccgcgatcatgggcaggtgcctgcgggcgcggtgagggcccagtcagccccggccggcgggctcacctggcgcacgtccccaggaaggccccactgcctgccccgggagccagacc

SEQ ID NO: 13687 - DNA, 122 bp, Homo sapiens
cggcgggaggttcgattgacccggtcttggcgggtcggtgagtcttggcggctgttaacgcgcgctttgggaacaggaaggttgagagagaggtgctggggtctgcgtctatctctgtcgct

SEQ ID NO: 13688 - DNA, 122 bp, Homo sapiens
acccagatcatctaggacaatctccctatccattagcaacctgaatttcacctgcagcctcgattccccttccctctggaccatcacacactcacagtttcggggagtagggtgtgcacgtt

SEQ ID NO: 13689 - DNA, 122 bp, Homo sapiens
gtaaagggctcattttgccctagggtgctaatcgttggtggtagagcgctttgcaatttgcggagttttctcataagtaataataaatatttgggggaagcagctgggcaaggagcgcgaat

SEQ ID NO: 13690 - DNA, 122 bp, Homo sapiens
ggcccgccacttcagggcggtcgaaagagccttgggggcacatctcggggtgcggtgacccgcccggcgcatttcgggggtcggggcgcatttgccaggggacatctggagcccggccctgc

SEQ ID NO: 13691 - DNA, 122 bp, Homo sapiens
tcctgggagatgaaagaacttgctaaaggccagtgtctgtccaggagatgacaatactgccgcttggcaagggcaggttttttgtggagaggtgtaatagggaaaaggtgaagcatggccaa

SEQ ID NO: 13692 - DNA, 122 bp, Homo sapiens
ggattctagtaaaaaggtgtggacacttacaaaagaaggtcatcggataacagtgagtaccgtgagtgaaccatccagccctttccattaggtgggacaaggttatattttattttcactgg

SEQ ID NO: 13693 - DNA, 122 bp, Homo sapiens
gtcgtcacacgggaaggcctgggctaaggagctgattaaacccagttacgattgaccgggcgcggtggctcccgcctggaatcccagcagtttgggaggccaagacgagtgggtcacctgag

SEQ ID NO: 13694 - DNA, 122 bp, Homo sapiens
agccgcgcccggagggtgcggaatgaggagcgcaaggtgggcagagcgtgaaaccttcaccgactgcacctccgccctcgctgccctaccggaatccccaggtgggaatccgctcccagtcc

SEQ ID NO: 13695 - DNA, 122 bp, Homo sapiens
agcggcgatggggcaaaaagccacggcggcgggggtaaaaagtcgctgcgggcaaaaagtcgcggcggcggggacaaaaaggcgcggcgggcaaaaagccgtggcgcaggggggacaaaaag

SEQ ID NO: 13696 - DNA, 122 bp, Homo sapiens
gagcaatttttttcatccacagaataagcataaaggaaagtgccttcatcatttcatcttcggccccacctagatttgcagcatcagcatgactaagtcatggaagcaagctgatttcatca

SEQ ID NO: 13697 - DNA, 122 bp, Homo sapiens
cctgggtgtgaccatctcactcggaccactgctcctcggggtctccacggagactgagtccgtggggcggcctcatctactactgcctgttaattcaacaggaaaaaaaaaaagttgcagcc

SEQ ID NO: 13698 - DNA, 122 bp, Homo sapiens
agttttgtatttttagtagagacgggtttttccatgttggtcaggctggtcttgaaatcccgacctcaggtgatccgcctgcctcagcctcccaaagtactgggattacaggcatcagccat

SEQ ID NO: 13699 - DNA, 122 bp, Homo sapiens
cctgggcccgctgcgcgaccagctgctgaccttgaaccagcacgtggagcagctgcgcggcgccttcgaccagacagtgtccctggccgtgggcttcattctgggcagcgcggccgccgagc

SEQ ID NO: 13700 - DNA, 122 bp, Homo sapiens
gcatcaacacctgagtcgatgtgatggcgtggcgagtggccacagactctgggagccagccggggagcacagcgtgcccggcagaaggaggtgatgctggctgagcagaaaggtcaccaggt

SEQ ID NO: 13701 - DNA, 122 bp, Homo sapiens
ctagggccggaaagagctactttaaggtagtcccaggggacccacaaccagaaacagggacggtccggttcatggcgagggtggctgggagccgaggccagatagatgcagcccacctcatc

SEQ ID NO: 13702 - DNA, 122 bp, Homo sapiens
tggccgccgcaggccagataccctggggtctcccgggcagatggcctccctgccccatcccgctcgcacttaccccagcccccgcccctggagtgcatcagctgttgtttgcctggaggtcc

SEQ ID NO: 13703 - DNA, 122 bp, Homo sapiens
ttggagagaacgctctggaccggtgagtgagccatgaggtcgggccacaggctctgaagtcgtgaagccttgggacggagcgggtggtgcttcgaggtcagtgtcacgggagggaggtcagg

SEQ ID NO: 13704 - DNA, 122 bp, Homo sapiens
gcaggagggcccacctgggctatgcatttttacaattagccatgctttgtacacctgggccggggaattccagagagcccaggaggccaagagagaagtgagggtcttgcgggtgagcaggc

SEQ ID NO: 13705 - DNA, 122 bp, Homo sapiens
ctcccagtgccttgctcgtagacaaccccacacctttcggaaatgcaaaggaagtgattgcgatcaaggactattgccccaccaacttcaccacactgaagttctccaagggcgaccatctc

SEQ ID NO: 13706 - DNA, 122 bp, Homo sapiens
tccctttgcagcaccgcgcttgttttggttgttgcgcggggttgttgttggtagtggtggcggtgtgtgtgtgtatttacacttaaaaaataactgcgcagtatcctttcctgggaagttgg

SEQ ID NO: 13707 - DNA, 122 bp, Homo sapiens
aagcgaatcactgagacaggccccgcaaagacagatttcacacgtagcacagcatccactcgctcactacaaatggtcttggaagcaagatgggtaagggagagatgggtctgacccagact

SEQ ID NO: 13708 - DNA, 122 bp, Homo sapiens
atgtgacgcaagagataggaaagtcccgcctttcccacgcggcactggacaggcctactgcgcacacgcgaaagtttcccgctgctagggtgtagttagtccgaggccggaccaaaactgca

SEQ ID NO: 13709 - DNA, 122 bp, Homo sapiens
gaggcggcatcttcacctatgggaattttttctgctccattgtgagacaaagagcatgtccgagttttcattttggccaggccgccccctagtttacgcactgtgggctaaactccagaagc

SEQ ID NO: 13710 - DNA, 122 bp, Homo sapiens
tcaaaaccaaactctgtctctcatcacaagcatggccttgggcaggtcttgtgacctcctcgtgcctcagtttccgcacctgtagaatgaatatgataacaagtcctgcctcacaaggttgc

SEQ ID NO: 13711 - DNA, 122 bp, Homo sapiens
gagaggctccgagtcaccagcccaagatccccaaggggccagtgcccagagccagtcctgcgagcatagccagaggatgatgtcagggcttcccaaagcaggtccttgtcatcacagccccg

SEQ ID NO: 13712 - DNA, 122 bp, Homo sapiens
tccaagagtcgccaaccttcccttgcagggcgcgacccaccctgcgtctgcccatctcctcgtctcagacccgagacatgacccagcagctccactcccgaccaccatctccacaggctgca

SEQ ID NO: 13713 - DNA, 122 bp, Homo sapiens
ggctcacgctttctccatcccaccccggactccaggcacctgtgtgccagcctggccaagcgtttcctccaaagtacaaacagctgaaaggtggtgtgctggccccacctgaatcactcgca

SEQ ID NO: 13714 - DNA, 122 bp, Homo sapiens
aaaatataagcaatcagttcatccataaattctggttccctggcaaatctagcactgcagcgtaacaaacggcttacaattcagggatataaaaatatcagctttaaaatctgaactgtaca

SEQ ID NO: 13715 - DNA, 122 bp, Homo sapiens
gctgtcgccggtcaccccggacggctcagggcaacacggaccgtggcgccccaggaaaggcgcccacagccacagccagcctggatggggcccctggagcgtggggtctcgaacaccacccg

SEQ ID NO: 13716 - DNA, 122 bp, Homo sapiens
ggcggtgctggctcatgtgctccaggaggtgctccttctgcttgaagtagatgctgcactcgatgcatgggaacacggccggctcctcgtcctcgtcctcatctgggctggccaccccttcg

SEQ ID NO: 13717 - DNA, 122 bp, Homo sapiens
tcgcggagcgcaaagcgctgtcacgactcggtggccgaggtgattaattagcggcgtggccgtgcgggggacgcgtgctggcctccacatctgccccgtgccagcaggggtcaatatgcggt

SEQ ID NO: 13718 - DNA, 122 bp, Homo sapiens
cgatcatctcagtctcagctctcctcggctacgttcggctggctgccgtcctctcggactcggctctcttcggttgagttcggcctactctccactaggagtcggcttccttcggctgcgtt

SEQ ID NO: 13719 - DNA, 122 bp, Homo sapiens
tcaaaagagtgggtgttgaaattgagacgtcactctgctcaaacaccagggagccgaggtcgacagctatgagccaagagctatgagacggcagaacacacaagaagaacaaggtgcggagg

SEQ ID NO: 13720 - DNA, 122 bp, Homo sapiens
ttggtgctgcctcagcacgatgtgaaggctgcgtgtgcaccgtcccatcccggagcctcccgacttctcttggggaggggatcatgatcacttcagtttagagataaggaaacaggcgtaga

SEQ ID NO: 13721 - DNA, 122 bp, Homo sapiens
gccgacaacacagaaacacactgtgtcccagttctggaggccaaagttcaatgtcagcatcgctggagcaaagcccctcaggggctcggggaccctcctcccctggtcccgctcctggggtg

SEQ ID NO: 13722 - DNA, 122 bp, Homo sapiens
gggccaggcgggcatcctgggccgcgcagctaccttacgtcagccgcctctcaaatcacacggctctggccagttcttttcagcagctttatgagattttctcaaatctcaacaatccggta

SEQ ID NO: 13723 - DNA, 122 bp, Homo sapiens
agctgttaagtggcagagacagggcttaaaagcaggtccttccttatccactgtgccagtcgtcctcaagtgtgaacttgaatattggaatcacctggaaggcttattgcactcagcttgct

SEQ ID NO: 13724 - DNA, 122 bp, Homo sapiens
ggcacagcctgcagggatcttaggagctggtctttctggcagacccccagcagctccaagcgtggggctcagtgggtgtgaagagcagagtgagagtgaggctggctgcgggcagctcatta

SEQ ID NO: 13725 - DNA, 122 bp, Homo sapiens
aggccccccctccacgcgggaccggccggaacatttcttagtccagatccctccacccagcgctggtcttctaagaccactcaccgtacggttgccagataaaatacaagacgcccagttaa

SEQ ID NO: 13726 - DNA, 122 bp, Homo sapiens
aggcagcggaggggaggggcctggggatctgggacggtgtaagggtgctgcacttgcgcgcgaagggaggggtggcgacgagtccgcggccgcctctccgcgtcccccttccaccacccggg

SEQ ID NO: 13727 - DNA, 122 bp, Homo sapiens
gcttcccgccgcgctaggcccgggcggtggggccgcgtgtaagcggcggagagaactggccgccgccgcgccccctcccccgtcgctggtcggaggaggaagccctggcggggcgcgtgccc

SEQ ID NO: 13728 - DNA, 122 bp, Homo sapiens
cacttcttcctggaaggggcctgggccctagagaagcggccacggaagacctgcgtggaccgggcgcccatggcacctggaaaggaatcggaggcaaggacacaacgggggtgttctgagcc

SEQ ID NO: 13729 - DNA, 122 bp, Homo sapiens
tgtcacccacagatacacggcccccgtgtcacccgcgtgttatttgcagatgcgctggttcgtgttttgttgaacgagccccagaatggctttgggagaagccagcaagtgggaaacgtggg

SEQ ID NO: 13730 - DNA, 122 bp, Homo sapiens
tcctccacagtgaccaaaaaaaccaacaacccgtggaacaagtttagcaggcagtgtacacgaccaccagagggaggcagagggctgctgagacctgccaggaaatatcaagaaagaggaca

SEQ ID NO: 13731 - DNA, 122 bp, Homo sapiens
caacaacgacctgggccccaactggcgggacaagttggaatacttcgaggagcggcccttcgccgccgcatccattgggcaggtgcacttggcccgaatgaagggcggccgcgaggtggcca

SEQ ID NO: 13732 - DNA, 122 bp, Homo sapiens
ggatggggccggtgaaggaggtcttgcttgctgggcggtaaaacagcttgaagccgccctcgtgctgggccagccggggccaaggctcccacagcagctgcaaggaggagctgcccaggact

SEQ ID NO: 13733 - DNA, 122 bp, Homo sapiens
aggtgaagcgcatacacccgttgctcctgaagcccagccaaagccgctgcgggaagagggcgcagggtctgagcagcccacagccccgccccctgccctgccccatagggccgtcccactcg

SEQ ID NO: 13734 - DNA, 122 bp, Homo sapiens
gttttgcactgtaaaaattctgcacccgggaaaggtcctggaaaaagccgaggtggcatgcgcgcggaactgccggaccagctgagcatcaggttgctcagacatcactggatcacttgcac

SEQ ID NO: 13735 - DNA, 122 bp, Homo sapiens
ttgaaagcaatgagtttgatgggatcctgcctgacacatacctcctggaattcactctgccgtgtggctgattatgtccggaacccattgataattcctcatgtcaacgttgggaatgcaag

SEQ ID NO: 13736 - DNA, 122 bp, Homo sapiens
attctttctaccttttgcttctaagagttgaatattactgcatatgccccagcagaatggcgggatcacagaacaagcacattaaaaattatcaaaggaaggcatacccctggttaatgaag

SEQ ID NO: 13737 - DNA, 122 bp, Homo sapiens
atatttgaacattacaatttaaaaatattttcaaagcattccctcatgtaatctgtgaatcggctccccgtgcagatggggtgaggcgtgcatgcttcattcttccagagaggaagcaaagg

SEQ ID NO: 13738 - DNA, 122 bp, Homo sapiens
ccctctctgaatgggaaggcaggggctgcatctccccctcagactgtggttccctgaggccggaggcgatacctccatctcaccctgagggcagacgctaaagcttcccttgtgtctgggag

SEQ ID NO: 13739 - DNA, 122 bp, Homo sapiens
catttctctttattctttcagcagcacttgatcaccaggctggtacaagtgacacagtttcgctgagtttacgatactcctgttgcaagcaagcttatgcaaaacattaagtatttgtccca

SEQ ID NO: 13740 - DNA, 122 bp, Homo sapiens
gattctgattcagggaccaagattctgcatttttagcaagttctcaagtgatgctaataccgccggtctgtggacaacactcacagtggtttggggctggagaccaggtgctttccctgtga

SEQ ID NO: 13741 - DNA, 122 bp, Homo sapiens
tcactgcaacctcggcttcctgggctcaagctattctcctgccttagcttcccaagtagccgggattataggcacgtgccgccacacccagcttttttttttttttttttttttttttgagg

SEQ ID NO: 13742 - DNA, 122 bp, Homo sapiens
gtaggactcaggttcctaccagggcccaccggggacctgtggtgtctgctccctgacagccgtcagcagccaccatgaatcctgcgagccgccacagtagtcctcaccttggttcgtgagca

SEQ ID NO: 13743 - DNA, 122 bp, Homo sapiens
cgcgccccgaccaagttcgagttgcacttccggggtcttcaggagattgatacgtcattacgcacttgacggcagcggcggcgacaacccggaaacgggcggggcgcgggccctgggtaggt

SEQ ID NO: 13744 - DNA, 122 bp, Homo sapiens
aagaaataaaactgcatcatgtgactcagcaaagatgcccggctactgtgccaagaatcccgtgggttgtgcagacaacactagggcccaggtcccatgagtaagccagaatggttgatagt

SEQ ID NO: 13745 - DNA, 122 bp, Homo sapiens
cacggagaaactacaatccccagaatgcttcgcggcgcggggctcgtgctccgcaaatcccggcctgcgtcattggagtctctttcactagagtcgttcattcattccgcacgcattcattg

SEQ ID NO: 13746 - DNA, 122 bp, Homo sapiens
tgacattcgcttgttagcggtcagttgccatactgttagcaacctttgtacgatctacctcgtgactgtggcggcatatttacctcgtgactgtggcggcatattgtccctaaaatagcttt

SEQ ID NO: 13747 - DNA, 122 bp, Homo sapiens
caccctgttccagccaacagtctccagcgtccctgacagatgtcgggaagttcttttccccgtaagatcccggagaatgtcctgaggctgccgtgtggaagctctggggcctttctcgtctc

SEQ ID NO: 13748 - DNA, 122 bp, Homo sapiens
gagagctggctgcggccgcctggctgggatacttggggggaaagccctccctagctcccccgaggctggctgctgcgaactgactgaagcgctcattacagggtgtccactctccccgggct

SEQ ID NO: 13749 - DNA, 122 bp, Homo sapiens
cagagtgataagtacccccactaagggtgtgtagctgagtgcagtggaggcacagatgagcgggctcatgcttgtgctcacaaaatggggcagatggctgtcacccttgggtgagggtgtcg

SEQ ID NO: 13750 - DNA, 122 bp, Homo sapiens
ccccgaggctgcgcaccccgcgccgctctacagtcccacgcggcccgtgagccgcgagcacgagaagcacaagtacttcgaacgcagcttcaacctgggctcgccggtctcggccgagtcct

SEQ ID NO: 13751 - DNA, 122 bp, Homo sapiens
ggcggggcacacctgtgcccggagtctgaggtcactcaccggctgaccctggtggtggtgcgggcccaggaacctcaggcccctcagtaacacattccctgcggtcttcgagaactttcctc

SEQ ID NO: 13752 - DNA, 122 bp, Homo sapiens
cagggtgtgtgcattcagcgtggctggcaggagaatgactccttaatactctgccgattacgctacttacttatttgtattatttattttttgagacggagtctagctctgtcacccaggct

SEQ ID NO: 13753 - DNA, 122 bp, Homo sapiens
gaggttggggggtgggtgtagaggcggagccccttcccgggagctcgcccccggatggtgcggggccccgaccctgggtggcaggtgatcagcaacccttctctaggcccccaggccgtgtg

SEQ ID NO: 13754 - DNA, 122 bp, Homo sapiens
aaaaggcctaggaataaggaaaaggaggaggaagaaacatttttttgaggacataccatgcggcaggcctgtgctgggcagtatacacgcattataggcaattgtagacagggcttcccttg

SEQ ID NO: 13755 - DNA, 122 bp, Homo sapiens
ctgtttctcgtgacctgaatgcagtgaacggtgagggcgtccaggggtgactgcggagtgcgggatagaatccacaccgccagggaggggcccaggtccggtccctcaaacgccccagccag

SEQ ID NO: 13756 - DNA, 122 bp, Homo sapiens
acgtgcccggccgtcccacgggcttccccgggcggcgatggggtctgtcctcctgacacccgccctgcccgagcacttccgcactgacggctcctcactctgcccccagcagtattacgaag

SEQ ID NO: 13757 - DNA, 122 bp, Homo sapiens
atcccagaagagcacgacctggagagtcagatccgcaaggagcgggagtggcggttcctgcgaaacagccgtgtcaggaggcaggcccagcaagtcattcagaagggtaagggcacccgcac

SEQ ID NO: 13758 - DNA, 122 bp, Homo sapiens
tttaggatgaactggaagcacccctacactcactcctattctccgggctggagtcggcatcgccttccttggcccgccttacctttaaggaaacggaaaggtgctgaccactagagggctgt

SEQ ID NO: 13759 - DNA, 122 bp, Homo sapiens
ggcagctccaggtacttccttgttgcttagtcagaggacaagtgtgatgaggactgttcacgaccaagaggaaaagagagccctggccaggactcacatagcaggaacaccagcatgtaggc

SEQ ID NO: 13760 - DNA, 122 bp, Homo sapiens
taagagggttacagggtgagagggcgagatggtgggagaaagaatagagggaaaaggaaacgaggagacagataattgcccgcctggagatcccagacactcagcggtaagaccagcaggat

SEQ ID NO: 13761 - DNA, 122 bp, Homo sapiens
caaactgtttactctgccttggacacaccaagttcctcaagcctttgcaaatactccttacgctcctagaacaatggatgtcaattcatcatttaggatccagcttacagtcatgctttcca

SEQ ID NO: 13762 - DNA, 122 bp, Homo sapiens
gctcatcagggaggctccgacagcacaggagcccacggtgcgggggaggctcgggcatggcgggctgcatgtccggagccccgtggggaggcagtagaggcccggcaagaattcgagcaaag

SEQ ID NO: 13763 - DNA, 122 bp, Homo sapiens
ggtagaagtagcacagacatataaaagccaggactctgggaggccaaggcaggcggatcacgaggtcaggagatcgagaccatcctggctaacacggtgaaactttgtctctactgaaaata

SEQ ID NO: 13764 - DNA, 122 bp, Homo sapiens
cgctcggcgtcggccgccgccatgggagtgcacgtggaaaccatctccccaggagactggcgcaccttcccgaagcgcagccagacctgcgtgatgcactacaccgggatgcttgaagatgg

SEQ ID NO: 13765 - DNA, 122 bp, Homo sapiens
ttcgagaactcggccaagcggctcatggtggtgaccccggccgggcacagcgacgtcaagcgcttttggaagcggcagaaacatagctcctgagagcgcgggacttggacacggacctcggc

SEQ ID NO: 13766 - DNA, 122 bp, Homo sapiens
cagggcctgccaggctctgctagagcttcctagaaaggacttcctagaattggttttaggcgagggacctggagtgcagcctcaggccctggccttgggcagagaatagaccacaatctccc

SEQ ID NO: 13767 - DNA, 122 bp, Homo sapiens
ctttcacaacatgaatcaggggttgaaatttctgcatatttttctcagatctgctccaggcgacttcctttcccatggctagttaaatggggactggagaaggcggagaaatactcacattt

SEQ ID NO: 13768 - DNA, 122 bp, Homo sapiens
cctgagtgtgttgtggtggaagggcacttggggaacctggcccaacaagtaaacctgacccgggccatcctggttctccaagcgctgccactccctaggctttcactggccttaaggggaag

SEQ ID NO: 13769 - DNA, 122 bp, Homo sapiens
gacgtcccagggctcaagcgcggaggacatgtggaactccactccaaaagcggcggcttgcggcggagctctctctagtgaggcggccagctggcgttcgtggcacacttgctgtcggctcc

SEQ ID NO: 13770 - DNA, 122 bp, Homo sapiens
agggcaggagctgtgggccgatgccaggctggccccatcagcaggaaacagcaagacaggcggctccaaattttgccaggctgggatggagccgagccgggaacggtgtttgcagagtgact

SEQ ID NO: 13771 - DNA, 122 bp, Homo sapiens
cctgggtaggaatgaggcctcatcatggcgatgcccagccatccctccatctccctgacccgggcactcttgcctcaggcagcctcaccaggaaaggcggaggcacattgatgagggccccc

SEQ ID NO: 13772 - DNA, 122 bp, Homo sapiens
ccgacgtgctagaactcacggacgacaacttcgagagtcgcatctccgacacgggctctgcgggcctcatgctcgtcgagttcttcgccccctggtgagtccattctgccgaggcgggggaa

SEQ ID NO: 13773 - DNA, 122 bp, Homo sapiens
gacagagaacaagaattttgttttgttcgctgctgtatccgcaaagctcccaaagtcctccgaatgccgcaggctctcagtaaagacctgcaggaagaaatagcgaatgaatgatgtacacg

SEQ ID NO: 13774 - DNA, 122 bp, Homo sapiens
aactgtgagggggctgctagagttcttctcctcgggtgtgtgagaagcagcctaggaccccgggttcggggagtcgcaaagaaggccgtaagggcttcacttccttctccggaggcctgcct

SEQ ID NO: 13775 - DNA, 122 bp, Homo sapiens
tccagtcctttcctgtccgaggccaatgcagagcggatcgtgcgcacgctctgcaaggtgcgtggtgcggcactcaagctgggccagatgctgagcatccagggtgagtgggcgcgggggct

SEQ ID NO: 13776 - DNA, 122 bp, Homo sapiens
gtggacaggcgaaactgcggatcccaggatgcagttccccccttcatcacctgtgtagcccggtcgctaccctcactgcattctgggaaatgtagtttcttatcagtaacgacaacgtctag

SEQ ID NO: 13777 - DNA, 122 bp, Homo sapiens
caactagccacaagtcagctgttgtgttataagcaactgtgcttgaagtaaattagctaacgccaagacagatagcagcatagtcttaggatccactaataatgcattattaagaccaaact

SEQ ID NO: 13778 - DNA, 122 bp, Homo sapiens
tgcggagatcccaccagacggtttcctggccccacccaacgctctcctggccccacccaacggtttcctggagaaattctaggggagtttgccctccagccgcgctccggaagcggaggctg

SEQ ID NO: 13779 - DNA, 122 bp, Homo sapiens
tcccacagctttttttgcatggtgattcatatattttaccacttgctctttttttcctaccgaattcattctccacactgctttagtagtaaatataggaaagtatatattgccttcaaatc

SEQ ID NO: 13780 - DNA, 122 bp, Homo sapiens
cgaaggaatcacagaagagcatttaatgcctgagaagctggacaccctgtttacactgagcgattattacataccgcatgcctgcatcatcatatttcacgtaacccacaaatatatacacc

SEQ ID NO: 13781 - DNA, 122 bp, Homo sapiens
aggaaagttggcgctcaccttttggactgggtctcggaggggttcctgtcgcgctgccggcggttcttgaaccagttgctgacctgggtgagggagaggccggtgatcttggccaggtgccg

SEQ ID NO: 13782 - DNA, 122 bp, Homo sapiens
tccccattctgccgacactgtctggagtaacagctgctgctgcatgtccgcacagcacagcgaggtaatacctgctttatctgtgcagctttaaagccctatgttcaggtgtcctgtggaga

SEQ ID NO: 13783 - DNA, 122 bp, Homo sapiens
atctgggggaagtttctgggtgaacagagagcgcggaggatgcgcgggtcatgctggaggcgggtcccagccagatgtgcacagcccgccccgccctccctcgctcaccccgtccagcttca

SEQ ID NO: 13784 - DNA, 122 bp, Homo sapiens
acgcgggccgggaaacgctcaggcccaagatgggctctgagcgcgaaccagggaagagcccggatgctgctcctttcccgccccggaccggcgcaggtccatccagaggcgcgaagcctgca

SEQ ID NO: 13785 - DNA, 122 bp, Homo sapiens
aagatgactgaagccagtcaaaatgtgtcttcacttttaatgacttttaaaaagacaactcgcatcttggatcaagttcctattaataattttccaaagattccaatatactccagaggtcc

SEQ ID NO: 13786 - DNA, 122 bp, Homo sapiens
tccccagtccaacctcctcttgccctaccctaggatggcacagattgctgtgagggagtccgagcccacagcatgaaaaccccaggaggaagcaggggaccctcacccatgggcaggttcac

SEQ ID NO: 13787 - DNA, 122 bp, Homo sapiens
cgttctgcccgggctggatggctcattctgctggctgcgcggtggcggcggctgtgtgtgcgccgcgccttgccgccccccctggccccccgagcccggggcgcgcgctcccgcccgggccg

SEQ ID NO: 13788 - DNA, 122 bp, Homo sapiens
accgagcccaccatccgcagctgcagactggacaacaacttccgcagcggctgcgacctgcggctggacgcagaggtggtctgctcaggtgaggctgccacctgatgttcccagtgaccctt

SEQ ID NO: 13789 - DNA, 122 bp, Homo sapiens
cttcctccaggagggcctccgggcttgggccgggccgacgccgccccgcgccgcgctcagcgaagctgaccttcttcagccggagcccgcagtccaggaggcccccttcctcgccctcctcc

SEQ ID NO: 13790 - DNA, 122 bp, Homo sapiens
atgctgggcgggggaggggagccctgccttagatgatattctcgtcctgacagtggaacgcggtggggcaagattccttcgcgtttttcctgggagcctcatccgagagggccctggccccg

SEQ ID NO: 13791 - DNA, 122 bp, Homo sapiens
ttggggtcaggtgggcagattgacagtaccactggccagtgaacaacgcctagggcgggtcgctcgtagggcttatcccgcctgtcccgccattctcgctagttcgatcggtagcgggagcg

SEQ ID NO: 13792 - DNA, 122 bp, Homo sapiens
taggggtcgctcttcggggggggtggggggcactaatcaacaaccctgcttacgcgcacgcgcattccttgctagggagaaagtgcgtgagccctaccttggggcgccagaggccgccacaa

SEQ ID NO: 13793 - DNA, 122 bp, Homo sapiens
tagaaatgcagccagcaaacttgggtattggatgaactgggcattgtgggtcactctgcccgtggacctgctggtggcaccgcagggaaaaggttagaaactgcatgttctctgccaggcag

SEQ ID NO: 13794 - DNA, 122 bp, Homo sapiens
ggctggcccctggtggagggttaaaggtcagcaaagccctgtacactcttgggtccccctcggccacgctgcggaccagtgcctggtaccattccacatcctcctccacactggactcacgg

SEQ ID NO: 13795 - DNA, 122 bp, Homo sapiens
aagtcctctctgccactcgctggctgggactgaggtcatgttctgtcaggttccaaagagcgccaggaagactctgagaccacagagcacggcctgctttctcccagcccctggtaaagatg

SEQ ID NO: 13796 - DNA, 122 bp, Homo sapiens
gcgatggggcggatgcttccaatattagtcaacccagagtgaaactctcttcttggagatcgtcagaccaactatttgtttttcctctttgaccacccctgggctagcagagcacagctagc

SEQ ID NO: 13797 - DNA, 122 bp, Homo sapiens
gcagggggtagatgggtcagctagggaggcctcccaggagagaggactcagccagtctcccgctcctcctgccaagcacgtgccgaggactttggaggctggggccaagaagaggaagggaa

SEQ ID NO: 13798 - DNA, 122 bp, Homo sapiens
gatggcagtaagtaattatgcttaccagtaaacattttagtaacagccttactctgctttcgggcagaacagagaagcaatagccatggtggaaagaactcatggtgaccagctaaaagtgc

SEQ ID NO: 13799 - DNA, 122 bp, Homo sapiens
ataaccggtgacgcgcttctgggagggatcctgtcgagcccatgggcaggacagtccagccgcggaccaatgggagtgttagggctccgccccctagcccccccgcctccgcgccgagcagg

SEQ ID NO: 13800 - DNA, 122 bp, Homo sapiens
tgccctcaccacggtcctggaaaggttgagccacgctgtcttcctcggtgccctcaccaccgtcctggaaaggttgagccacgctgtcttcctcggtgccctcaccacggtcctggaaaggt

SEQ ID NO: 13801 - DNA, 122 bp, Homo sapiens
ctggtgccaaggctgaaggggaacaacttggccagccgctctgtggccggcatcgtcacgcggcctccaagagctccggctgccctgcactggttcccagagactccctccttcccaggtcc

SEQ ID NO: 13802 - DNA, 122 bp, Homo sapiens
cggaggcgggctgccccgacagaagcagaactttaggggtcccgtcggccgggttcggcgcggctgccaccaccaccatagctccagactacgcaccgcgcaccgcgcgccgcagccgccca

SEQ ID NO: 13803 - DNA, 122 bp, Homo sapiens
ctaagcctgatgcagagaccgagaatctggctccaggggccctgtccacgggtgcctgcccgtgagtgttgtgtgtgcatagattctgtagtggcggaatggggtgaggaggcacaaagagc

SEQ ID NO: 13804 - DNA, 122 bp, Homo sapiens
tcagcctcgaggtggcggctctggtgggaccaagctgcgccggaaggaacagagctagggcggcacccgcgcggcgagtgtagacacactcggagcggtcaccccctcgctgcgagctccca

SEQ ID NO: 13805 - DNA, 122 bp, Homo sapiens
ctctcctcacacagccccttccacaccccaagcacaccagggtaggtggatgactgccggcgaggcccccgaacgcctgcttctatgctgtacagaagctcctcggcatcttactgcagcta

SEQ ID NO: 13806 - DNA, 122 bp, Homo sapiens
tgtcacacctggcgataatgggcatcagagagatatgccttgcgaggatgctgtgagctgcgtcaggtaaagcacctagggtcagaaagccacctctcctcctcttctccgcgaccccactt

SEQ ID NO: 13807 - DNA, 122 bp, Homo sapiens
ccagcgtggagccaggcctggccaagggggagcggaggctggggattgggccttgtcctgcgctcgccctggagacaggctgtgggcctcctggctgtgccccagctctgtgggaaggtcag

SEQ ID NO: 13808 - DNA, 122 bp, Homo sapiens
gtgactaagctcaagttctgttttattgcacattacccttagaattaacatacaaaacaacgccaaagtattatctatttgcctcagaaaagcatatcctgaagtttctgaaaatattgcaa

SEQ ID NO: 13809 - DNA, 122 bp, Homo sapiens
ctgctctgaatccttgacaaccgcagcccaaagaatgataaactacaaaggccggaaatgcgtcaccgcggcccgctctccgcgaaacagcggttccggctgtgttccttctaggaaggccg

SEQ ID NO: 13810 - DNA, 122 bp, Homo sapiens
tattatgatgctgttaaaaagaatgagatacttgcatgtactgatagaaaacatccaatgcgatttgttcttcagtcagaattttaaaagttaaggtgcctataaatgcacaggaagaaggc

SEQ ID NO: 13811 - DNA, 122 bp, Homo sapiens
aaagctattgtatcaagtataaactatgccaaaatgaacaagttttcccaacttctgaaccggcttatacatcaccattttgttttgacaaattaagtttaaaacattttgagtgattaaaa

SEQ ID NO: 13812 - DNA, 122 bp, Homo sapiens
tgtagggactccggattgcaaacccattctgcctcaacaaatctgtatcaactctctgaccgccccacatagccccttttccagaaccttcgggatatcctgccttcccccaccaggtgggg

SEQ ID NO: 13813 - DNA, 122 bp, Homo sapiens
tgttgtttccgtaaaggacttataaactggcgagggcggtggcttccaaaagcgcacaggcgtcccttttccaacttggtcttcttattttcccttcctgctccataactacaacgtgtttc

SEQ ID NO: 13814 - DNA, 122 bp, Homo sapiens
ccccgcgggagggggcggttgaggacccgggagggtggacagagggcgccggggatgccgcgcggggccgccgggcgcccccaagcagcggctgatgcggagcccgggcgggccaggcgagc

SEQ ID NO: 13815 - DNA, 122 bp, Homo sapiens
ccacctgcgctactggctccactatctacaccccatcttgaggcggcagcggctgcgctacggcgtctatgtcatcaaccaggtgcccatgcgggggtccatgtgcctgttggtgtatatat

SEQ ID NO: 13816 - DNA, 122 bp, Homo sapiens
tcccaggctctccggaaggagacccctcctcaccccctccgaggatcagccaggccgggccgagcccgaggccgcccctggctcctggtccctagcttgtgccagcatcctcggcggggcac

SEQ ID NO: 13817 - DNA, 122 bp, Homo sapiens
catcaagctggactggtctgagtcattctttggtctgttggctcctttcccagtttggggcggaggatgttctatacagtcctggatttttccccaaccaggaagagaactccttgtcctgc

SEQ ID NO: 13818 - DNA, 122 bp, Homo sapiens
cctcagggatgggagatcgagacccacctgttgtgacgaataaacctggactctcagcaacgcggggaagagagacttgcaatactgcggcgaccaggtaaactgcacagaccaaggtagaa

SEQ ID NO: 13819 - DNA, 122 bp, Homo sapiens
gaagtccctgtatggctttccagagtcccggaagcgccgagaggcggagtcctggaactccgtctcagagggaaagcagcctagattctcccaccggattccgctgctgatctttgatcagg

SEQ ID NO: 13820 - DNA, 122 bp, Homo sapiens
cggagcgagtcgtagccgatgaagggcttccaggtcttcttgtcctccttgtagaaccagcgtacctcctccgggcccagctccgtcactacctcatagcggtgccgggccgccgggccgcc

SEQ ID NO: 13821 - DNA, 122 bp, Homo sapiens
tcagccaggaataactccaattaaagcatgccaggtgctgccttctgagtacagtgccttcggagttccatgctttagtgagccctgtagttgctatgcaaaatgttgactgatttagattt

SEQ ID NO: 13822 - DNA, 122 bp, Homo sapiens
cttacagttacaggaaggggtcaaagcctcagctcctggggtggggaggacggtggggtccgtcacggccaggccctgcctccgcccacagccttgccctggctggcaggctggccttcagc

SEQ ID NO: 13823 - DNA, 122 bp, Homo sapiens
aaccgcaagctcccagggccacccaatcacagggccagtcatccgttgagaccctgcctccgcgcccggcagccactccgtatcttcctcgcattatcgcagggttgggccgaggcccgcgc

SEQ ID NO: 13824 - DNA, 122 bp, Homo sapiens
agccgagcccgccgcctaggggggcactcgaacccccgcgcaccggcaccgcctgcctcccgcttctagaaagagagagggtgtgatcgtgtgtttgcacttactttctctttctccacaaa

SEQ ID NO: 13825 - DNA, 122 bp, Homo sapiens
tttattacttgatcaaactttaacattttcgggtttcctaacaccttagccccaaatactcgaaatgaagcaaatcttaaattaaggagtctttccccaccacgctctgtcctcctccccac

SEQ ID NO: 13826 - DNA, 122 bp, Homo sapiens
ggacatgagggcggcagatgcagatcttatgaagattcaggcaggaagagctcggcagggcgatgcccaagacggggtagtggacggggacgaattggttcagagacgggtagcagatgggg

SEQ ID NO: 13827 - DNA, 122 bp, Homo sapiens
gccgctcgctctgctggtcaagtttgggcgacccgcgcggaggagggtcgggctgactgccgccgctgagctgtccccggacgggagcgcctgtccacggcactcaccccctccagcggtgg

SEQ ID NO: 13828 - DNA, 122 bp, Homo sapiens
tcaaatatttggggttagggggtgggatgggagagggtgtttgtttttaatctataaacccgtgtttatgaaaagcttgcctaaagaaggttttgcttctttggagccctcagggttggtaa

SEQ ID NO: 13829 - DNA, 122 bp, Homo sapiens
agtctctagggcgtccatcgcgggacccacgggaggcagaagtggaggccgtgcgcaccgcgagctcaacacagttgggggccaggtggccgcctcccagcaggttgtcggggttgagctgg

SEQ ID NO: 13830 - DNA, 122 bp, Homo sapiens
gggctgcccaccttgcctggctgtctgtccgtatgcctgtgccctgtacctctgtctgcccgcccgtcggttcacctgactcttcgactgcgtgtctgtctgtccgtgcgcccccttcctca

SEQ ID NO: 13831 - DNA, 122 bp, Homo sapiens
tttttagtagagactgggttttaccatgttagccaggatggtctcatctcctgatgatctcgtgatccaccggtctcggcctctcaaagtgctgggattacaggcatgagccaccgccccag

SEQ ID NO: 13832 - DNA, 122 bp, Homo sapiens
agctgattaggaagtatgggattcatacaggagtggagcagcaggctcataaaaacaccgcggggcattcaaaacttacctgagtaatggtggttttaactgtgccaatttgtttgggattg

SEQ ID NO: 13833 - DNA, 122 bp, Homo sapiens
ccgccccttgttgcagagcttgggctgggcggcttgctggggctcgggggtggggggcggcgatctgtcgccgggccccctcctcctcctcactcctcaccctccagggtagcggctaccgg

SEQ ID NO: 13834 - DNA, 122 bp, Homo sapiens
agaacctgcagcttctaatatgaacatcaaatgaccccaactcattccctgtgagggctccgtgtgtgatctcatccccatgcctcctctgcactgtcatcttggtttctgtctctccttct

SEQ ID NO: 13835 - DNA, 122 bp, Homo sapiens
atgtgctctttagtgtcttcttctgcagaacacgatgcttttcaaattcattaattctgtcgctttatccatggtttgtctttcattgctgaggagtattctactggacaaatatactacat

SEQ ID NO: 13836 - DNA, 122 bp, Homo sapiens
acccctgagcagcctggcctgccatgtccgggagaagacagtgagtactggggtttcctacgccggtctcgcatgttacggggttgaactgttgatccgttgtgccacggaggtggcagtgg

SEQ ID NO: 13837 - DNA, 122 bp, Homo sapiens
cagaataaagaaggtcccagccacacacgtcattactcggcagagggtgtccagcctggtcggccgacgtcacagtggatggccctgcgtggctgggacacagacagggagcaggcatggca

SEQ ID NO: 13838 - DNA, 122 bp, Homo sapiens
agaatgggagggatgagaggagcgggccaggaggacgaaggctgggcgagggagggagagcgctttgcactcgagagctgattgggaagcttattaaaagcagaatactccaggggcagtct

SEQ ID NO: 13839 - DNA, 122 bp, Homo sapiens
tgttgtttgtgtcttcgggcaatgacgtgaggaatgctggcaggaagagtgtctgtggctcgaccaatccttaaagttgttgaacctggatgtatgacaatgatgaagttgctctggatttg

SEQ ID NO: 13840 - DNA, 122 bp, Homo sapiens
ctgcagggaatgtgaactgaagagaaaggtgtcctctcttctcataaagagacccaaagacgaatgccccgcaggtaaaaccagtcacattttgccttccctgttggcccatttcctcaacc

SEQ ID NO: 13841 - DNA, 122 bp, Homo sapiens
atgatggccatccggagcgagtccttggggatgctctcgctgcatttcttgcaagaggcgcgcccgctcttggcgtactcgactcgatagagcttatccgaagactccgccatcctccccta

SEQ ID NO: 13842 - DNA, 122 bp, Homo sapiens
gcgcccgcaggccgcacagcagttgcctccgctcggcccgcgccggccgccgtgcgcctgcgtggcagaagcccctgctgagcatgcgcactggtgtgacccgcgtctcctccgtttgtgaa

SEQ ID NO: 13843 - DNA, 122 bp, Homo sapiens
gtacaggttgtgggtacatgtgccaggtatcttctgtcccatgaggaatattttccccaccgtccacatgtcctatctgccactctgctctgcctcacaccctatagggcccaggctcccct

SEQ ID NO: 13844 - DNA, 122 bp, Homo sapiens
gtggggctctcgctccagcagcggcttttttctcccccactttaatttaaacaaagacttcggagttcatcaacctcccactgaaattcacagctgctgaacaaactaatcccctctcccgg

SEQ ID NO: 13845 - DNA, 122 bp, Homo sapiens
gcaaatctttaatgataatcattctttgatgtatactgagcattttgttaaaaaaaaaagcgtaatcagtacacaaaatacattaaggaatgctactgaggatcgcacaaggagatttttta

SEQ ID NO: 13846 - DNA, 122 bp, Homo sapiens
cttctgaagctgaaactttgggcgcctaccagcgcgggcgggagcctagggggcggagggcggcttggtgcgggcctgcgggcgcccctcggcgcggacagccgggacgccgcggacggcat

SEQ ID NO: 13847 - DNA, 122 bp, Homo sapiens
cagtggggccccagcctccctgggataacaggcccagcagcccccaccccagggagtctgcggctctcacacctgccaacctgtcccattcaggagggagccttgggggcggccggcagctg

SEQ ID NO: 13848 - DNA, 122 bp, Homo sapiens
gggagagatggggaagaaaggtggagttgggggctggagtagaaagatcaagcttttagccgacctggggagccttccagaatgtaacttgcccagaggccaggcctcctaggtactagggt

SEQ ID NO: 13849 - DNA, 122 bp, Homo sapiens
acctctccatgagttcttctctcatctggaaaaacgggatgaggattgctattccctgggcggcagtgaggctgaagtgaaatcctatagtcacagtgtcctgcctggggcctggctccaag

SEQ ID NO: 13850 - DNA, 122 bp, Homo sapiens
caggtgcggcgggcagcacactccctagagccaggaccactagttccgtcaaatccggggcgggccattcaaacagctaagggaggcgtctcctagtgtgccttttcctgagtcatctctgc

SEQ ID NO: 13851 - DNA, 122 bp, Homo sapiens
cagaccgggacctggcgctcgaggcagatgttaaaatgcttcttctgcgaaggcttgaggcggcggaggggcacgcggatctccccaataaactcattgtgactcagcttgtcctcatcaca

SEQ ID NO: 13852 - DNA, 122 bp, Homo sapiens
tgcgtcggcggggggcataaagccggggcgggagaaacctgcggcggcggcaaaaacctgcggcggcggccaaaagccgcaaaaagccgcggcggcgggatcaaaaagccagctgctcccct

SEQ ID NO: 13853 - DNA, 122 bp, Homo sapiens
cttcatctgcagaggtcccctgttcagccaaggcagagtcttcagtgggggccaagggctcgaggggaggtgtggggatgggagtaggggggctgaagcctggctcagggggtagcacggtg

SEQ ID NO: 13854 - DNA, 122 bp, Homo sapiens
aaccctggcagcactcccagttccaccaccttgcggggcacgcctctgactcctctgggccggtgccccccaccccagctgctccacatggccacagctggggttggtgaggacaatactgg

SEQ ID NO: 13855 - DNA, 122 bp, Homo sapiens
caaactgccttccgagaggacgagcaccgaaaagtccatctcgcacagcacggcacacgtcgtccaggaggctggactgggatccccaaccatcgctccaaagacccgtccagtgcgcgggg

SEQ ID NO: 13856 - DNA, 122 bp, Homo sapiens
ctcaggccccggccttggctgagctctccaagagcacccagggcaccccagagtcttttacggcccaccccctgtctcccagctgcatggaaaccaaaggcctctggagccccctccctagg

SEQ ID NO: 13857 - DNA, 122 bp, Homo sapiens
agatttgagaagtgagaagttgtgaatgggaaaatggctggacagaaaaaattatagaatcgtgggggcaactccaggacctacttggagtttgtggtcatgagttggatgtgagacagcat

SEQ ID NO: 13858 - DNA, 122 bp, Homo sapiens
cgactgcgccttggcgtggggaaaccggcttacctgggggagttctgttcctttccctcccggcaccttggatgcgctgggactggtcctcgtggttgctgagcatgctgctctgaacggtt

SEQ ID NO: 13859 - DNA, 122 bp, Homo sapiens
ggcttcggcccgcagagggttcgtggcccggacgcggcgagagctgggcccaggacggtgcgtccggcctcgcccgcggctgctcgcaccaacaagtttgaacaatgatcaccgtcaacccc

SEQ ID NO: 13860 - DNA, 122 bp, Homo sapiens
gtagtggcaacccagattcacacgcagtagttattctgatcctaagtatgtgctctggaccgctacatcctaaggcctcctctttagggactgatctcccaaggctcagagaagagccctgt

SEQ ID NO: 13861 - DNA, 122 bp, Homo sapiens
gggtgaaaaaaggaaagcgccgcgcggggaggatgcgggaaccgttccgcggagaagctacggaggaaactggctctcatgcccttggacacgcttcctggcctgagcctgacctgttttct

SEQ ID NO: 13862 - DNA, 122 bp, Homo sapiens
ggctcccattgcggagctggcagccgagccgtggaaaggggggggctctcgtgcagccggcgcgctgcctcatgggtaggctccgggtcagcctccccgtgtccgagctccctgtcttctcg

SEQ ID NO: 13863 - DNA, 122 bp, Homo sapiens
gcgagtttgccgggtggaggcagccggccagtcctgggtctgtgcacggctggccagaggcggccagtgtgtgcgctgctggcccacatgaatccatgcgtgtgtgcatgtgtgtgtgtgtg

SEQ ID NO: 13864 - DNA, 122 bp, Homo sapiens
agtgctggattacaggtgtgagccaccatgctgggctgaaattcttaataatgtaatcttcgaatgtgtgttttgtaagtgatgggacagtgtgatgtgcaccaggggcttggggcctaagt

SEQ ID NO: 13865 - DNA, 122 bp, Homo sapiens
tggcaatttttaaaagcaaagcaactggttaggtgaggaatgcataaacaaccccaaaagcggcactgaatacttttctttggctgtatacgactgaaaaactgccaagttcatttcgataa

SEQ ID NO: 13866 - DNA, 122 bp, Homo sapiens
gctcctccgtagcgccaaggctgctctggcggttgctgcagtaacctcggccacaacaaacgctggagaagacgcagcattccgtttggaacctgaatccctaacgggcaaccggagcgtac

SEQ ID NO: 13867 - DNA, 122 bp, Homo sapiens
gctgggcagcaacgtcggcgtctacacgacagaggccctggaaaggtgcggcaggctgggcgcccccgcccccaggggccctccctccccaagccccccggacgcgcctcacccacgttcct

SEQ ID NO: 13868 - DNA, 122 bp, Homo sapiens
ctattatcctttttgtttgatagatttaattttctcaatttttttttactttatataattcgaggctttggtggtaatgttatagtaccagtgaaatgaatttttcatcattataaagtttc

SEQ ID NO: 13869 - DNA, 122 bp, Homo sapiens
tctaatttattttttccttcattgcttgtggtttggatgccatgtctacgaaactatcaccgcctagtcatgaaaatttacacctatgttttctcttaggagttttttagctcctacattta

SEQ ID NO: 13870 - DNA, 122 bp, Homo sapiens
atcgagttgtgcctggagtgatgtttaagccaatgtcagggcaaggcaacagtccctggccgtcctccagcacctttgtaatgcatatgagctcgggagaccagtacttaaagttggaggcc

SEQ ID NO: 13871 - DNA, 122 bp, Homo sapiens
gaagagaactccttgtcctgcagtgttcctcttgcgccctctcctgacaaagcttaacttcggagctggagcaagtcgtatccggcattgcagggaagagtgaatttggcctgtgatccaat

SEQ ID NO: 13872 - DNA, 122 bp, Homo sapiens
tgcttcagactttcagcaggtctcaaaggatcagcattatttgaaactctgttgaacacacgtgaaaaacttatgtatcaaatttatctgcaatgatatgcaacttaaagtactgctataaa

SEQ ID NO: 13873 - DNA, 122 bp, Homo sapiens
atctgttgcccacaagaaatacattttgcctgtaatgacacacacagactgaaaataaagcgatgagaaaagataatccatgcaaagggaaaccaaaaaagggcaggagtagctatacttat

SEQ ID NO: 13874 - DNA, 122 bp, Homo sapiens
agccacgtatgagatcatgtgtatccctccatcagagttcacttctataatctgaaaactcgtgtctttaaattcagaaatacccacagtccttatcactcaataccacctcttcctcattc

SEQ ID NO: 13875 - DNA, 122 bp, Homo sapiens
tctatgagaatctaatgccaccactgatctttcaggatgcggagctcaggtggtaatgctcgctctcctgctgctcacctcctgctgtgtggcccagttcctaacaggccatagaccagtac

SEQ ID NO: 13876 - DNA, 122 bp, Homo sapiens
ggtgcctgcggtgcctgagctgagtgaggccgaggccgggaggccgtgcccggaggtgagcgtcccggggccgcgccgcgtccggcggggtgagggcggggcggggcggtcgcctgccggct

SEQ ID NO: 13877 - DNA, 122 bp, Homo sapiens
gggcagctgccggtggcgtcccgaacccagactcgccccgccccagagactgcgcctgcgcgggcacgagacaacctctccgcgatgactgtgagtggtccagggacccccgagccccggcc

SEQ ID NO: 13878 - DNA, 122 bp, Homo sapiens
caacctaaggaactaaatacacaggagtatttcaggtgaataaactttaaaaagtgtctccgcgaggagaccctactcctgggacttctctcttgaccaattttacctctgcagaaaagcag

SEQ ID NO: 13879 - DNA, 122 bp, Homo sapiens
ggacaccttgacctctcagcctcctttctgtcatcagtaaaatggccttaataggaccaacgcaatagggttgtgaggattaaatgagatcgctcacgtaaagtgctttggcaccagcctat

SEQ ID NO: 13880 - DNA, 122 bp, Homo sapiens
gaaagcacccgtgaccgtcccctgcgcccgttatccctgcgccccgcacccctgtatccccggcttctctgcagctgtacaccctgcactgcggcgccccccagtcccgctgtccgctccat

SEQ ID NO: 13881 - DNA, 122 bp, Homo sapiens
gacgtggtggacacgtgtataacgtgacatgtgactgacaggtttgtgatgtgaccaacacgtgactgacatgtgtgacatgtgattgatgtgacacgtggctgacatgtgtgacacgtgac

SEQ ID NO: 13882 - DNA, 122 bp, Homo sapiens
agcccctcctccctggggacctggctctcagccatctccctaggtccagctgttatttctcgccctttagaacatgcgggcggaatgtggggcggccctgtggtctgatgtctcccggagcc

SEQ ID NO: 13883 - DNA, 122 bp, Homo sapiens
tgacagtgccgggaggtcaggtgcgcctggtgatgacagttccgggaggtcaggtgcgcgcggtgatgacagtgccgggaggtcaggtgcgcgcggtcgtgacagtgccgggaggtcaggtg

SEQ ID NO: 13884 - DNA, 122 bp, Homo sapiens
cgatgcggggctgctggaggcggagaggcacggaggagccgctggggctgccgccacggccgcccggaggtgagcgggcgcggggccactgtcgccgccgcgcagtcccgcgggagggggcg

SEQ ID NO: 13885 - DNA, 122 bp, Homo sapiens
gaggtacttggccttgacacggacggggggggcggtcccaggccgaggccgccccgcccccgccccgctatacccggcgccgcctcccggcgtctgagctgacacctccttagcgctggccg

SEQ ID NO: 13886 - DNA, 122 bp, Homo sapiens
cgggcgccctgcagggcagcagagaacccaccccaggatgccgggcagcgacggagcaggcgactctgcacgttctcctcaaagccccaaaccagaccacgggcatgaccgggaagggcaca

SEQ ID NO: 13887 - DNA, 122 bp, Homo sapiens
gcgcctctgagcgcagcacgcgggtcagaaggagcaaccgacctgctggtgaccagagaacggagattttaagaggacccgacccaaagaggaagaacatttctgggtgcgcgccccaggtc

SEQ ID NO: 13888 - DNA, 122 bp, Homo sapiens
gtggtcaaggtgctacagcagctcagcagggtggatatgagatcccagcaaggttgcggacgttgcacaacctggtgatccagtacgcagcccaaggtcgctatgaggtggccgtgccactc

SEQ ID NO: 13889 - DNA, 122 bp, Homo sapiens
gcccccagcaggagacacattccgtgcttcgctccacccggcacccgtagctcggcgccgcggctcaaggcccgcccaccggccactctcattggatagttctcaccttcggacttctcatt

SEQ ID NO: 13890 - DNA, 122 bp, Homo sapiens
gaacttgggcccgagaccatagcctctctgactcttcctccttaggaatgatgaggatcacgacatctgtctttagggctcctgggagcttcctagaatctgtgggtcctgagccttgactc

SEQ ID NO: 13891 - DNA, 122 bp, Homo sapiens
agtttggcagcactgatacagcctgccccggacaggttcatgtactgtattacctcatgtcgtccccagctccagtcaagacttacctgcaggacagcacaacctctagattgggagggaca

SEQ ID NO: 13892 - DNA, 122 bp, Homo sapiens
gtttgacctctggccctggctccagcctgatgaggggtcaccctaggaggggtttttgatcggctccgtgcgaacgtccattattccttggctgtttgaagccagacacggcccagctgggt

SEQ ID NO: 13893 - DNA, 122 bp, Homo sapiens
aaggggatgcccaggctggtggctgggatggaaactagccttgctgaccccccaccaccacgccccccaagcccagcaccgtctccggctccgcccctgcgcggcgctctcctccccttctc

SEQ ID NO: 13894 - DNA, 122 bp, Homo sapiens
aaacatggcctgaagcacccaggcacaggtgggagatggcaagcagaggcaggttcaaaacgtggggccaggactggtctgaaagatagtcgttaaatagcactgaggagagggagtgagag

SEQ ID NO: 13895 - DNA, 122 bp, Homo sapiens
gtgggtgtcgggtactgggcgggggacagagctaggtcacagtcgaggttttcactgacccgagtgggcgggggtaaagggaattcgtaaaaagtttctttcttcattaatggccttttttc

SEQ ID NO: 13896 - DNA, 122 bp, Homo sapiens
tcttgtatacatatcgtgtgtgcatatatatatatatacacaagatacacacacacaaaacgtaatgaatgaaggagactgagtgctacttttgttagggaaagtttctctgagtttgagct

SEQ ID NO: 13897 - DNA, 122 bp, Homo sapiens
ctcactgacttcaagaatgaagccgcgaacgctcgcggtgaatgtcacagttcttaaaggcggtgtgtccggagtttgttccttctgatgttcggatgtgtttggagattcttccttctggt

SEQ ID NO: 13898 - DNA, 122 bp, Homo sapiens
ctacaatgatataaaggacttcaacgcgaaataagggtcaacttattttagttcgatcctcggagataaagatgaaacagacagataatacataaatagcttgatacttgaagaaggtacaa

SEQ ID NO: 13899 - DNA, 122 bp, Homo sapiens
gtgtcttgtccccttaatccttcagaggatgaacccccacccttcgccggccttcttgggcgtggtctggtagataactggagctgggagaggctgaagacagtcaaagctgctctcctctt

SEQ ID NO: 13900 - DNA, 122 bp, Homo sapiens
ctctgttgcccaaggtagagtgcagtggcgtgatctctgctcattgcaactgccgcctcccgggttcaagcaattctcatgcatcagcctcccaagtacctgggactacaggcgtgagctac

SEQ ID NO: 13901 - DNA, 122 bp, Homo sapiens
actatttggtttgagatgttacttttttttctcatagggggaacggtgtatttttaacaacgggaatcagtaactggaagtacaagattggttatttaataatgttaaaaatgaggctttga

SEQ ID NO: 13902 - DNA, 122 bp, Homo sapiens
gccgacgcccgcgtcagcaaagagcggagctgagggtacccggtttgaagtcgtgcgggtcggaggactgccgcctccgctaccgtcttggacccctgcttaccggccgccgcggggacgag

SEQ ID NO: 13903 - DNA, 122 bp, Homo sapiens
cacagctccatgggcccctctgctgtccctggcaggaccgaagctatgtggcctcccggacgccagggaccccggccacgcccgctccaggcactgagtggccagccaagcgctcgggcccg

SEQ ID NO: 13904 - DNA, 122 bp, Homo sapiens
tcccttccagctttaaattccctcttgtgtcacttgctggacttgttctactggacctggcgctcccctgctcctcccttagctgctacgtccgcatcccgcaccagagggcgccacaggct

SEQ ID NO: 13905 - DNA, 122 bp, Homo sapiens
ttcatgcagtaggaaccccatatatcggatgcagccacatgcttcctgtgatgggaaccccgtataccagacacaggcacattcttcctgtgatgggaacctggtataccagatgcagccac

SEQ ID NO: 13906 - DNA, 122 bp, Homo sapiens
gtctcacagttgagggagaaaacaatccaaaaagttttccactgcttcaacagtacaagacgaagagaattatccagaaggtgctccctggcacatcccaggcacagagctgatctagggtc

SEQ ID NO: 13907 - DNA, 122 bp, Homo sapiens
tgtgccattttccaatcactcactcctcattcattcctcaactcacccagcctctactttcggccaggtcattccgacatttgcctcgctgtgtaatctgattgtggattgacaacttattg

SEQ ID NO: 13908 - DNA, 122 bp, Homo sapiens
cgatgggtccccacctgaaagggcgagaggaaccagagaggtgagcaggaaccggaggtgcgacagctatttccagaggccaagaggacctgatgaaggctggcttttcaaaaaccatactc

SEQ ID NO: 13909 - DNA, 122 bp, Homo sapiens
aatggataccctttctagggccatgtctggttataatctgttcactttgttcagtacaaacgatcacttccagagcagaggctggggtggagagtttggaatttaagttttaacacgtccta

SEQ ID NO: 13910 - DNA, 122 bp, Homo sapiens
gggcctttgccacttgctcataggcgagctcgatctcctcatcatctggacaggtggaagcgaattcttcccgggcgtaggcattgctcaagtaccgatgcactccccggaaggcctcgggg

SEQ ID NO: 13911 - DNA, 122 bp, Homo sapiens
tgacctcgtgatccgcccgcgtcggcctcccaaagtgctgggattatagtcgtgagtcaccgcacctggcccaaatttatatttttaaaagatctctgaggctgtcatgaatcaattcaagg

SEQ ID NO: 13912 - DNA, 122 bp, Homo sapiens
aatataaggctggtaaagtaagaccttgtgaataaatcggaaaagcaaaataggcaactacgacagctaaagacatgtattttcagggggtaaagaagaaactagagagattctgcactcat

SEQ ID NO: 13913 - DNA, 122 bp, Homo sapiens
gtattgaaatatgctggtaaatctatttcagatactttaagtgaattgccattgattctacgattaagttctgtgaataggacattatatcatttaagctgttttgtcaatttgatttttat

SEQ ID NO: 13914 - DNA, 122 bp, Homo sapiens
gatagatagatagataatagagaaatagaagataggtagatagatagagaaagaagcttgcgtgtgtttgtttcaaagaatggggtcagttttcttacagccacctattctctcgcctggac

SEQ ID NO: 13915 - DNA, 122 bp, Homo sapiens
tggactagatagagcctgcagagagattggtgaataaaacagacatatttcctgccctggcggagcatataatcaactgggagaagaaagggggaaaatatataattacaagtagtagtaag

SEQ ID NO: 13916 - DNA, 122 bp, Homo sapiens
gattgtggtgtgatgaaatgacattacttcccggtacttaaaacagcctctggcactcatcgagcattagctgttattgttgctgccgctttttgttatctttagtatgggcaacgtgtgtc

SEQ ID NO: 13917 - DNA, 122 bp, Homo sapiens
ggacatccccttgctggtttagctcaagcccaaaaggactctgaattcatgcctgaggctcgcacccagggcacgggtgttggttcagatgaatgcgtggaagtgtgggaacggggatggtg

SEQ ID NO: 13918 - DNA, 122 bp, Homo sapiens
gagccccactgaaccccaacacccagcctagcagcaaaagtgaagcttccaggagagccacgtgcgtttgccaaagtggagaaataaactgcgggcacctagaattaggtcaggtccaagga

SEQ ID NO: 13919 - DNA, 122 bp, Homo sapiens
ctgttctgcagcatcccacactcatgtctgggcctccttcctgtctctgctctctggtcacgctgtcacttgtagactgttctgcctagaagccatgtgtgggccagcttgcacctaacaga

SEQ ID NO: 13920 - DNA, 122 bp, Homo sapiens
aaataacccacttgctcccaatattcctttctatatctctaccccagctcgcctgctgctcgtagaaacaaatatactacacgtacgctgtcctaggatgacacaacaccctcactactgca

SEQ ID NO: 13921 - DNA, 122 bp, Homo sapiens
ccccaacctggcaagcctggcttcccgggcgctgaaaaccccgtggctcagggatcgccgcgtagcacgctctggctctactcgggccctgggaccttgcccagtttcaatcccggcagcct

SEQ ID NO: 13922 - DNA, 122 bp, Homo sapiens
ggcgaggcctgcctagcgggccgggcccccgggccatgtctccggccagagagccggccccggtagccgcaagccagctccgcccggctccgcggccatcccacaccctatcatggaacttt

SEQ ID NO: 13923 - DNA, 122 bp, Homo sapiens
cagagacggaggaggagatggagaggagggaggttggagaggagaaggtctcctcaaaaccgagcctgagcctccgagcccacagtctgtccaccctccagaaagacggagccaaacaggct

SEQ ID NO: 13924 - DNA, 122 bp, Homo sapiens
tcaggtatgtggccctgaggcctctgctgggagggcgctgtgctgagctctgggcaggcccgacctttccccatgtccaagatgggaagcaggaatgagtgtgtgggagccaggaaggggag

SEQ ID NO: 13925 - DNA, 122 bp, Homo sapiens
gtttactgatgagggcaaacacaattttctttgtttttgttttattgggaagagttggtacgttatataattcacagacacagcataagacatttgcttaggattgggtaaggaagaagaag

SEQ ID NO: 13926 - DNA, 122 bp, Homo sapiens
acagcccgctgcaagccggcagcgctgacatgagggctatgcttggcatgactcctatgccgccgcttcctcttcccgcaggaggccgagcatgctcactgcgccgcgctgccgaggcaggg

SEQ ID NO: 13927 - DNA, 122 bp, Homo sapiens
cggtgtcaggacatgttaggatccgtccccagcgctgccgtcctcgtccccacagcgccccgggacacctgtcccccacagcccagctgctcctgcagcccctggagaaatctgtacattcc

SEQ ID NO: 13928 - DNA, 122 bp, Homo sapiens
agagtgtggcgagaacccccagggaccccctcccagggctggccttccaccctccgcccccgccaaccccacccgcattccagcgggatcagggggattaaagggcacagcatgtgtgggca

SEQ ID NO: 13929 - DNA, 122 bp, Homo sapiens
ctaattttttatttttagtaagagacggggtttcaccatgatggtcaggctggtctcgaacgagactcaagcagtcctcccaacttggcctgccaaagtgtggggattataggaatgagcca

SEQ ID NO: 13930 - DNA, 122 bp, Homo sapiens
gtcgggggcagacccgcggagctgggggcagccggggttctggttcgggaggaggtcgggcgggtgtcccagccctgccttgtggggacccagaggccgaggcccacagagcgacggtgcca

SEQ ID NO: 13931 - DNA, 122 bp, Homo sapiens
ctaactcaagatgaaaattcataaaaattctttggcaaaaacaccttagtattctcaatacggtaactgacttttttttttttgcgttatgaaataactagatactaccgtgcgttgctttt

SEQ ID NO: 13932 - DNA, 122 bp, Homo sapiens
acatacaggaaaccaggatttgtgtgggatatgaaacttatttctgagcctttctgagagcgtgattgggacagttaactttgcccagcacatgaataatttgactgtcttttctaggccca

SEQ ID NO: 13933 - DNA, 122 bp, Homo sapiens
gcgtcccgggctcccgccccagaacctgtgggcagatgtttcctccacgcagtaccctcccggggctctgcctccaggctcgcgtcccagcaccctaggcagaggtttcccccactctgtcc

SEQ ID NO: 13934 - DNA, 122 bp, Homo sapiens
acataaaaagccaaaaaagtgagtccttcacagcatgaggatacttttagctgttggacacggagaaggttttctcttggtcttttattcaatcattcacagaaagggacatcctgtgacct

SEQ ID NO: 13935 - DNA, 122 bp, Homo sapiens
gccgcccgcccggccgcgcctgctgcgccacagctccccctgccagggaaaaggaaagagcggtcgcggtccccagtccattcatatctcgctgccctaagcgttgaaagtatcagggtctc

SEQ ID NO: 13936 - DNA, 122 bp, Homo sapiens
agaataagatataatattcgacatcattttaaatacttaactcacaggaaagtgtacccacgtaccaaaaccaaacaagaaactaaaaccagaggcattggtttggactgaggacctcagct

SEQ ID NO: 13937 - DNA, 122 bp, Homo sapiens
taaagagaatcttaacagcagcaaataattcatctttatgaattcatcttttttccctcacgagaattcaatgtgctatatgaagaacatatgaaattcttattttgagtggaagaactgag

SEQ ID NO: 13938 - DNA, 122 bp, Homo sapiens
ttaggggaacaaacatctaaattacagcacaggccaaccacatgcatgcattaccaatcacgtaaataattttgaagttaaatgcagaaaactgcaaacttttgaggctgatatccagggcc

SEQ ID NO: 13939 - DNA, 122 bp, Homo sapiens
tgcccatggcttcagcaaacttccctctccctgaaaactagaaaaacaaggacaaaaccacgaaaaatcagcatgctcagggtactgcagaatttcagaaaggtgttccaaggtgggaatgc

SEQ ID NO: 13940 - DNA, 122 bp, Homo sapiens
attaatttcctgtcatgaattccacatacggcttgtgaaagtgtcttgtggatgaagaggcgcatccattcatactgttgttaacaatatttaagagaagaaagttaagtttttaagtaact

SEQ ID NO: 13941 - DNA, 122 bp, Homo sapiens
atgatttggaaggggaatactgtcccctctcctaggccagtccaaatttcacaacccatccggaaaacaaaaggctgaagacagaaaaagaagacatttactattccacttcttccttttac

SEQ ID NO: 13942 - DNA, 122 bp, Homo sapiens
actcggtgctcggggacggacgctctctctgtcctccccatgccctggccttcggctccccgcggtgactggctgcccagaagagaggctgcagctccatcatccccatcgctccctcctgg

SEQ ID NO: 13943 - DNA, 122 bp, Homo sapiens
atccttctcctgcggcgagcccggccacatgtcgttcacgtagttggacatcttcacctgcggctttagcctgcgctttctccggaaaggatcccgcaagcctcaactcaggacttcctaaa

SEQ ID NO: 13944 - DNA, 122 bp, Homo sapiens
tatgcctaggggtggcgcggctgggccctgtggaaactgcttcacttctgaggacccacccgactttttcacagcactgcagcctttcacagcccaccggctgcgtggggggggccacaatc

SEQ ID NO: 13945 - DNA, 122 bp, Homo sapiens
gacagacagacagacagacacctgcagctgggtgcccacgagaaagcaaaagtgttcacccggcaaaggaaaccagttgcaggaagaaggcagatatagaagaatatacatatttcaggaca

SEQ ID NO: 13946 - DNA, 122 bp, Homo sapiens
gctttgaggtttaattctagacttacatataagagtactggccttatttgacagaccaaacgtgtgtcggtttccttgtgtgcacataatagctgttctccatgaagatcctgccaagtctt

SEQ ID NO: 13947 - DNA, 122 bp, Homo sapiens
acttcccctttcatgactccctacacccagagtaaggttcaaagtttgtaattccacatacggactctccatgacttggcctttgcttgctggagtcctgggctttactgacacttcctgtc

SEQ ID NO: 13948 - DNA, 122 bp, Homo sapiens
tctccggcatgtgtgtaaagaatccgtctctccggcatgtgtgtaaagaatccgtctctccggcatgtgtgtaaagaatctgtctctccagcatgtgtgtaaagacttccagaggcacagga

SEQ ID NO: 13949 - DNA, 122 bp, Homo sapiens
gcagcgtgcggggagctgggggcggggcgcggccgcagctccgtttccggtggctcgtcgcgctcgctcactccagctgcagccactctcgcccgtggctgcttcctccatcctggtatttt

SEQ ID NO: 13950 - DNA, 122 bp, Homo sapiens
ttcaagggtacccggcccgcctgccctccccaagagccgagtttgcgctcctcccggaatcgtttgagagaaggacaaacttttggcaggatggaaatctagatgagcctgtccggagcagg

SEQ ID NO: 13951 - DNA, 122 bp, Homo sapiens
aatgatcaagagacctggagtcccagctatgcaactcactagctatgagatcttggacagcgttatgtagccactaagcctcagtatccttcgtaaaatgggaacagtaatagtatctaatt

SEQ ID NO: 13952 - DNA, 122 bp, Homo sapiens
aagtacataaagtcactaaaagtaagcgcagccacatcagcagattctctgctctcttgtcgtctttctccacccatcccaatgcacaactgtcaactgtgcttatagaccacctccagacc

SEQ ID NO: 13953 - DNA, 122 bp, Homo sapiens
tcttcctgtggccgctagggggtccccgctccaggtgagcgccaagctctagccccaggtcgctcccttatgcttcaagcaagctttgcagcgcagccaattgccaggggctgtcccgccta

SEQ ID NO: 13954 - DNA, 122 bp, Homo sapiens
cgagaacgacccccgaaccaaccaaagcccgcgcgccgctgcatccggcgcccacgcccacgtcccactgccgtcgccaccgccgccgagatcatttccaagagaaaggctgaaggggatac

SEQ ID NO: 13955 - DNA, 122 bp, Homo sapiens
aattcctactttaaaaatagtgctttcctagtctgactccaaggcctgacgctggaaggacgtgctgtttctctctcatccagtgctaatgataatcgccgtgatgatatcaatatgactgg

SEQ ID NO: 13956 - DNA, 122 bp, Homo sapiens
tctccccgaggcagagtcatgggggtgctggcgcctggacgctgtctcatcccggggagccgctttcccaccggctccctgggctccagccgccccacgcgagcccccggctggttctgggg

SEQ ID NO: 13957 - DNA, 122 bp, Homo sapiens
cctaccaccacaagataaactccagaagggcgagaaccatgtgttttctttgccactatacgtgtagcatccatttcaatacctcaggtgagctgggtagagtgacacgtacatgtagttcc

SEQ ID NO: 13958 - DNA, 122 bp, Homo sapiens
ctctggcaggggctttcgggggctcacgctgaaggatcgcggggcactcgtgagacctgccgcctggtctgtgcgtcaggccgccctggcttctagtaattgggagagtacaaagcatccct

SEQ ID NO: 13959 - DNA, 122 bp, Homo sapiens
gggtgcctgtgaaggaaatctgcgtcccgcagaacgcaacacgccgttgggatactggaccgtcctttgtgagatgccaccattgggggaaaccggatatgcatggctccaaggaaaaagtt

SEQ ID NO: 13960 - DNA, 122 bp, Homo sapiens
aaggttgggggctgggcagacaagaccatccagggccccggctggtcacccaggctgaaacggaacacatctgtttctctacactctaaacactttgcaccaaatgtgcgggattttcacac

SEQ ID NO: 13961 - DNA, 122 bp, Homo sapiens
caagccctgacagcaccgccaagcccctagctcggagcaacagcctccaccgcttctcctcgctaaacctagagaaccctgaggactccccactggggctgagcccctcccgccctcaacag

SEQ ID NO: 13962 - DNA, 122 bp, Homo sapiens
agggccggacccaggaaggtattttcagtccctatttctgcccgtgctggcaagagagcacgggagccggactcagcgtgggtcggggccctgccgctaaaaccgtcaaagcaggcctaact

SEQ ID NO: 13963 - DNA, 122 bp, Homo sapiens
gtaaaggacagggccctggaaacgcgggtctgccgggagcaggggacaggaaggagaccgcggctctcccagtcctgctgccccgggcctccagacggccagactctccccacaccggcctg

SEQ ID NO: 13964 - DNA, 122 bp, Homo sapiens
gaggtccctaattttttaaggggagggtgcggggagaaggggtagtatgcggaaacagagcgggtatgaagctggctaacgccgcgcgccccctcccaggacccgctcctgccccgcgccgg

SEQ ID NO: 13965 - DNA, 122 bp, Homo sapiens
tcttaactcggctctgacccaccccaacctccctctgtacttcaacacacagctcccacccgctcaaggccccgtactccaaaacgcttacacagtaaccagcctaggattgagaaagcatc

SEQ ID NO: 13966 - DNA, 122 bp, Homo sapiens
ccatgagccaccacactgggccactttctaggtaccgttcgctgtgtcaaaaaatttatacggaaagatcctaaaattatctcctttttatagataaggaaactgaggcttataaaggctaa

SEQ ID NO: 13967 - DNA, 122 bp, Homo sapiens
gtgaaagccgcctccttcccgttatgccccccatacaggagcctcggtttttcagcaaaacgcggccagtccccttctccactgctgcctcccagcagagggccccaggatctccaaggtcc

SEQ ID NO: 13968 - DNA, 122 bp, Homo sapiens
tcccaggctggcgtctcgctccagatgagcgcaactcccctgagggtgcccccatttggtcgctctgttttgccccctgcgctggcgctgttgggaactattttatgctcttgggaactatt

SEQ ID NO: 13969 - DNA, 122 bp, Homo sapiens
gatgatgaggacttttcatggtggcttctctctaaagcaggagtaagacagggttaaccacgtggtgaacattctgaatcacctgtggtttgcctccaggccactctacctcttcctggttt

SEQ ID NO: 13970 - DNA, 122 bp, Homo sapiens
attctaacccgactctaaaaataacccagtggcacaaacctgggaggagacgccgcagaacgtcctgccctggccgttgtccgcagcaggggaatcacaaaggattcattttccttgcgact

SEQ ID NO: 13971 - DNA, 122 bp, Homo sapiens
gcagcactgatcagccagcggcagccgcctggggccctcatgaaaagcaccctgtgggttcggcaccaggtccctaatatccccccaatatgaggactgtgtgcttcccatctgcaccccgc

SEQ ID NO: 13972 - DNA, 122 bp, Homo sapiens
gcgcagaccggatggaagccggggccactggcagcctgtaactggttcccctgggaaggccgctctggtgatgaactcagctcctcacctggggcctggcagtccgatcacggaaacgagaa

SEQ ID NO: 13973 - DNA, 122 bp, Homo sapiens
gggcctctctctagagccgcatcccctgcccgtgttggctcatcaagttggcactgaagtcggatctctaaaatgttcgccaagaaagccaactccttcatgtacttttaatacttaaagca

SEQ ID NO: 13974 - DNA, 122 bp, Homo sapiens
tccccccgccccatgtcgcgctgacacacatcagctccagtctggaatgtgagatcaaggcgtgtgcgccgagcggtgggtttggcccctgccccctccccctccgagtcaacactgcttgt

SEQ ID NO: 13975 - DNA, 122 bp, Homo sapiens
tttgctttggtttcatggccggttttatcagcagttactggacaggaccagcagtcgcagcgttcacggcttgagctttagcgtcgggtattgaaggagagtgagtctgtggacagggtgcg

SEQ ID NO: 13976 - DNA, 122 bp, Homo sapiens
gggcatccggggaggtggtcgtggagcatcgggcggtccgggaatctggtcgtggagcatcgggcggtccggggagctggtcgtgaagcatcgggcggtccggggagctggtcgtggagcat

SEQ ID NO: 13977 - DNA, 122 bp, Homo sapiens
gaagtcggaatctgcgatcgtaacccaatgctggcctcgccaacgtgttttcggtattgtcgggataattgaaagtccagacaaatttggctatcagggctccaggcagcggaatcccatgg

SEQ ID NO: 13978 - DNA, 122 bp, Homo sapiens
tctcgcttttcccacagacactggagagcagcgtcctgtgccaggagaaaggcttgggcgcgcgggacctggcccaggacgctcagatcaccagcctgcctgcccttatcagggagattgtc

SEQ ID NO: 13979 - DNA, 122 bp, Homo sapiens
ctcctcatcagatgagatattctggaggaactggagagcgggagaaggatgtatctaggacgttcttactttgggatctattgagtggatggagttttatatttcaccctaatgatgtcaac

SEQ ID NO: 13980 - DNA, 122 bp, Homo sapiens
gtattctcacatctatctccagagcccacacagagcctggcacagagtgggatttttatacgtgttggtcaaagaaccagtgatccgtccatcctctttctagtccacttgaatgtgtaatg

SEQ ID NO: 13981 - DNA, 122 bp, Homo sapiens
acatgtattggtggcgacatctcccagccaatcaggaggcgggctgggactgtgtgcgcacgtccacttggagctgcagaggctgggttcttccctccccaaccttggcgaaagcaaagtct

SEQ ID NO: 13982 - DNA, 122 bp, Homo sapiens
tccgcacttcaacaaattggggagcgacttggccaagacaggtttcaatcttacatttctcgtctgccctctgccctgaggagacactacaatcgccgcctggagtcccagtttggaagtca

SEQ ID NO: 13983 - DNA, 122 bp, Homo sapiens
atccttagtccgagatcgcggaccctgaccggaaccggaagttccggacacagcagccctcgcgacaacacccagaatttggagataagggtgagagcgcaccaagccccgcccagcgcaag

SEQ ID NO: 13984 - DNA, 122 bp, Homo sapiens
gattcctttttccatgcaggccaggaccccacaggtgtaaggcacaaggacaaaggcacacgagcctaagtgtgaagggcagcagcctggagcacacactcccctaggaagccacagcctct

SEQ ID NO: 13985 - DNA, 122 bp, Homo sapiens
agtgtgggtacgagtggaggagtgagcttcccagagccgccgggctccccgaaagtggagcgccgccgccgccgccgcccaagctcacagctgaaagcactgcggaggagccggcgcgggcg

SEQ ID NO: 13986 - DNA, 122 bp, Homo sapiens
tgcagtgcgcaggcgcatcaatgaggtactgcaatgtcccggaccgtatagtttccaggacgtctcgccgcgcgcatgcgcagaaacactgggcacagggggaggtaactgcagtaagtccc

SEQ ID NO: 13987 - DNA, 122 bp, Homo sapiens
aaaaatgggaaaaacaaaacaaaacgggtgtggcgatgcgcaactgtagtctcagctactcgggaggctaaggcgggaggatggtttgagctcaggagttcaaggctgcagtgagccgagat

SEQ ID NO: 13988 - DNA, 122 bp, Homo sapiens
gcggctgcggcagaggagagggccagccacagcatggtgtccgcgccctgggcctcggagcgcaggcggtccccgaacctggcgtggaaccccggcatcgcctgcctcacacctgggagaag

SEQ ID NO: 13989 - DNA, 122 bp, Homo sapiens
gtctgactcctccagtttcaccacctcttccggagctctccccgccttgctgccttccatcgcttcatcctcggtgcttcctgagttttaaaatcgcctatctacgcttccaagttccaatg

SEQ ID NO: 13990 - DNA, 122 bp, Homo sapiens
gttaagacaaaagccgtataacaactggctgctcagaaccattgctccccagcggcaccgcgttgcgcaaggcaaggcctgagcactgagtggctggtgaaacagaggcagatgtcctcctc

SEQ ID NO: 13991 - DNA, 122 bp, Homo sapiens
cctatttatcaccaccacttccctctagagtttgcagcaagcatcatcagctgccttcctcgcatggggaagcaggagacccctcaggtgtgtcataggggcttgctgagatcctctgagaa

SEQ ID NO: 13992 - DNA, 122 bp, Homo sapiens
ggagggaggcctggcagccatgactcaccagtcttggccaccacagactcgggccccacacgctgcctgccacgaagcccgtagaggttcatcttatacttccggtcgggatccaggccggg

SEQ ID NO: 13993 - DNA, 122 bp, Homo sapiens
cccctgcgatgggggtcctaagagccggggtggggggtagaggggctggctctcactccccgcatcgcggggggtgtgtacaacccctgcgatattgggagtaatatcatcctctctccctg

SEQ ID NO: 13994 - DNA, 122 bp, Homo sapiens
gctgatgaagctggtgcggccaccctattcctactcggctctcatcgccatggccatccacggggcacccgacaagcgcctcactctcagccagatctaccagtacgtggccgacaacttcc

SEQ ID NO: 13995 - DNA, 122 bp, Homo sapiens
agaaagtgtcagtgttcttttagtttgcttaaactgtgtgggtacttgagtccttttaaacgattaacgctgggaagaggcaccatttaattaattaatttgttctggaagggatcagtgta

SEQ ID NO: 13996 - DNA, 122 bp, Homo sapiens
tccgtctcgaatccatctgcaaatcacaggcgagctccataaagatcccactctaagccccgccccacccgcggccccgcccacatcccgccccgccttcctccctggtctactggggttcc

SEQ ID NO: 13997 - DNA, 122 bp, Homo sapiens
gcaagcagtcgacctcagcctagctggggaacgccagaatggaggggggctgcaggtcctcgggtcccactcgacctccgagtaccgagtacttcgtgggttttccaggagaatgtcggagc

SEQ ID NO: 13998 - DNA, 122 bp, Homo sapiens
acctcgtgatcctcctgcctcggtctcccaaagtgctgagattacaggtgtgagcctctgcgcccggcccactatataaatgtttaagaattaacatgtataaaggttgggactttcccaag

SEQ ID NO: 13999 - DNA, 122 bp, Homo sapiens
tcccggctctgctggtgtccacgtagcgcgctgcgcgcccgcgcggaaacaccgtccagccgctgccacccaggccctgggccccacaggtctgcaagacaccctgctcttccttcctgtgg

SEQ ID NO: 14000 - DNA, 122 bp, Homo sapiens
tgtcttatgtagagctggagacaaagcagggaagaagagaagcaaacctgttaagtcccacgtagtctacaactccatcaggtatatgggatgagcaggaacagaaagctgttttctttaga

SEQ ID NO: 14001 - DNA, 122 bp, Homo sapiens
acccgcaagctcggtttgtgcgctactgtgcaatctgtcttttgcctgcagacgcccagccgctcgccctgcgcgggtctcggaatgtccaggggtccctactggggatcacaacccggcga

SEQ ID NO: 14002 - DNA, 122 bp, Homo sapiens
gaagtgaaacctgaagaaggtcagaaagactcacatctggcttagaaacttaaaacattgcgaaaatgagtactggtggctaaaagaccacattctcagaattaaggcctttgatgcagcta

SEQ ID NO: 14003 - DNA, 122 bp, Homo sapiens
agcttcattaaaatggatttttctagagtaaccaccagatcacctcccccactctcagtccgttttccagtcaaaccatttgttacttgattcagttccaaatataatgtgtgtctgctact

SEQ ID NO: 14004 - DNA, 122 bp, Homo sapiens
gaaggaggagcagcagcagcccacagcctgtcaggccctttctcaccacgtttccttccccgcagtggccaccattggattctgtttagctcatggtcgggaactcgggcccttgaaaatga

SEQ ID NO: 14005 - DNA, 122 bp, Homo sapiens
ggtctacagttctgtcctagacttcgttcggctgatcgatgaaggagacaagctggcccacggggaggtcaatacaatcgatgcggacctcgacgaaacggaagaatctcgcaggttcctgc

SEQ ID NO: 14006 - DNA, 122 bp, Homo sapiens
ggcctgggtctctccctgcagtcccgtctccagaggcgccgccccctcgggcctgagcgccggagtgacagagccctgggcagggccctgagcagaccctcagtaaaggctgccaggggggt

SEQ ID NO: 14007 - DNA, 122 bp, Homo sapiens
gcgaacgccggctgctggatgcccaggggctggagcgcggggtgtgtggaggagcacggtcgctgtccgagggctgggctctggcccagcgggtggggggagggggggtgggataccagctg

SEQ ID NO: 14008 - DNA, 122 bp, Homo sapiens
ccgcctcattcactggctggagtctaggcgtcccacacaatggaataatcaatacccaggcgcccggggctgccccactgagcaggtgcagcgacccgcccgccgcggcgcatgccgggagt

SEQ ID NO: 14009 - DNA, 122 bp, Homo sapiens
cgtttggggactctcccctattcacctccccaaaaagccatgttctaagggtgttttccacggcatcagttcgcggtcgccaccgtagcagccggaggtgccgggcgtactcacgccggccc

SEQ ID NO: 14010 - DNA, 122 bp, Homo sapiens
acttaaatctaaaatgaaaacatattaaaaccttggacgataacctaggaaataccattgcggacataggacctggaaatgatcttcatgacaaagatgccaaaagtaattgcaagaaaaac

SEQ ID NO: 14011 - DNA, 122 bp, Homo sapiens
cccagtcccgcccagactagtggacagacctggtgtcaccagtttttcctagcatcagtccgaaccatgcgcccgccctgccccaactgtgtgctggtcctgctgtggccgaggggaccggg

SEQ ID NO: 14012 - DNA, 122 bp, Homo sapiens
gggtcaggggttccgcgggatgggggcacaccctcctaccctcctcagggaacagtttaccgggacggtttactgggaaactcattattgaaagcaggctctcctacacgctcctacacctt

SEQ ID NO: 14013 - DNA, 122 bp, Homo sapiens
gggctgggcagacgctcggagcctgggcacaggccccgctccggccctgcctggccgccgcgtgtctctggtgagaggatattcctttaaaacgaggtcctgccctgcacactccttggtct

SEQ ID NO: 14014 - DNA, 122 bp, Homo sapiens
cgggctgccagctccctgacaaccccgggctggcactcgggggcgagagaggtcacccagcgacgggcacacccctccagagcaacaccgtctccggcccgcttccgggggccaccaacccg

SEQ ID NO: 14015 - DNA, 122 bp, Homo sapiens
gctggtacggatctgtgcagagaggcttcctggccgctgctggagcgtgccattggcttgcgcaagaaagttacttggagtctgagagatgctggggaaagtttgcagttcacttcgcatgg

SEQ ID NO: 14016 - DNA, 122 bp, Homo sapiens
tgctacccccaccaggaggacctggtcctcccctagccccaggagagcctgaagggccttcgcttttggtggcttccttgcttcctccaccaccctcagaccttcttccacctccttcagca

SEQ ID NO: 14017 - DNA, 122 bp, Homo sapiens
aggctgtgcgcgcgtgtgtgtggagtggctgcgcggccggggaggatgtgcgctgcagggcggccgccgcagtgagcaacgcggcaaccggagcccggcgggcagccggggaggccgggact

SEQ ID NO: 14018 - DNA, 122 bp, Homo sapiens
ggagcctcggcaaggggccggcgcagaccttccggcggcccgcccgggagcaccctcccgcgtgcctgagcgacccctccttgggcacccactgctacgtgcggatcaaggtgaagggccgc

SEQ ID NO: 14019 - DNA, 122 bp, Homo sapiens
cattatggtcattatgttgcgggtggggccggggtccgcctgccttgctgactgaaacagcgtctcccggttgtctgccaccgcctgcttggccaggtagcgctcgcgcagttatcttggta

SEQ ID NO: 14020 - DNA, 122 bp, Homo sapiens
attcagccagacttcgtgctaggcaaaaaagttgcagagatgaataagacccagtctttgcgttggaggagcccacagtctgctgtgtaacttcagtatctgaagtttactcagcactttat

SEQ ID NO: 14021 - DNA, 122 bp, Homo sapiens
ctcccggggcgcctcctgggggaccgtagtctgggctgctggtggtgcctcgccggccaccgggctcagcttagctcgttggacccttgggccttcctgatgcagacccggatgcgcactgc

SEQ ID NO: 14022 - DNA, 122 bp, Homo sapiens
aagttggcactttttttcttctttaaaattttatttttctgtgtgcatttgttttataaacggggttctcgctatgttaaacaggccagcctcaagcaattctcccacatcagcctcccaaa

SEQ ID NO: 14023 - DNA, 122 bp, Homo sapiens
acccgcctgggggtgggaaagccccagccccatcacctcagcgcccccccgccgccccctcggcacccctgtgctcccttcacagacctcgcagcaactccgcctggcaaatctatctgcaa

SEQ ID NO: 14024 - DNA, 122 bp, Homo sapiens
cgcgggggtcagggggccccgggctgagggtttgcgtgcgggccgggtgcctgggggccccgggctgagggtgagcgcgccgcccaggtgccaggcggctccgggcagagagtgaacgcgcg

SEQ ID NO: 14025 - DNA, 122 bp, Homo sapiens
aggatctcgttgctttgcagcgatgcctggcaccccatagagataagttgcagggactgccgtgaagggcatgaagggtggcccactttagtcatgcatttattcaatcacccaacaggcac

SEQ ID NO: 14026 - DNA, 122 bp, Homo sapiens
tatgaacctattcttatccctgtcttacacacaaatgaacaggctttttgcaaaaggtaacggaactactaagttggtggagctggaagatggacccggtctgtttgactccactgccctgc

SEQ ID NO: 14027 - DNA, 122 bp, Homo sapiens
tcccgctgcccccaaaataaagcccaagccccgctgggtggcagacaaggcctctgcgtccgtctcccttaacactcagctcccagacaatctcctctaaaaagtctttcctgactctccga

SEQ ID NO: 14028 - DNA, 122 bp, Homo sapiens
gggtcatgggattcacgggcccctcctccagagccttcacgtacgcctcggggaaccaaccgctcctgtggggtagaggcagaggacaatgaccaaaagaagccaggcctggggacaatgac

SEQ ID NO: 14029 - DNA, 122 bp, Homo sapiens
gaggatccagagagacagccgggagcccagcagctgtggcagctgcccccaccaccaccccggggctggccaggtcccacctcctgacgccacacggtatgactgggccctcctggtcagtg

SEQ ID NO: 14030 - DNA, 122 bp, Homo sapiens
tgtgcgtagacatgtctgcgtttctcattgagtaaccacgtgcatgcgtacaggcaaacacgtgcatgttcgtaactatgtctacatgtttctcacggcataaccatgtgcatgcacataca

SEQ ID NO: 14031 - DNA, 122 bp, Homo sapiens
cggcatttgacacattgatcagtcttgaaatagtttcctcccttggcttctaggtcattacgtagttcacctcttcatttattacttctcgatttgctttgctggttcctcctaatctcccc

SEQ ID NO: 14032 - DNA, 122 bp, Homo sapiens
ttgagggccatctgactccaaagccacctgactctttcccatataccacagtttctaatacgatattataccaagctttaatatgagcacacctcctggatgatgctgtaaattagttgcct

SEQ ID NO: 14033 - DNA, 122 bp, Homo sapiens
ctagggtcagattacctgacttgctttttattttaccttttaaaacactttaattcatgccgttattcctctcattccctacaaaaagagatgttcaatatgggagaatcatcttcagttga

SEQ ID NO: 14034 - DNA, 122 bp, Homo sapiens
ggcgctgccgtcaaggccggggccgcctggccagaccctccctcagacgccccccggggccgccctcactcccgcacgtccctctgcagctgtcctcagccggtggggtcggcagtgaccgc

SEQ ID NO: 14035 - DNA, 122 bp, Homo sapiens
ttcactgccggggacctcagtttgcccatctgttaaaggagcatgttgaaccagaggacccgccaagccccttccgagtgcctacatgtaatcctccctcctctctcctggaccacagcgcc

SEQ ID NO: 14036 - DNA, 122 bp, Homo sapiens
caagtttcattttcattctctgaaagagtaacatggtgccacaccagttcaacaggacaccgagtggagctagagagcttagattttttttccacacaaaatttaagtgtgtgcttttgaaa

SEQ ID NO: 14037 - DNA, 122 bp, Homo sapiens
gcaccgctccgccgagggcgcctgggctgcggtggcggcgaagacggcgaccccgaccgtcggcctctttggcaagtggtttgtgcatcaggagaaactttccacctgcgagccgaaccggc

SEQ ID NO: 14038 - DNA, 122 bp, Homo sapiens
gccgtgcatctgcagctggggtctgatgtctcctgaaagtaaagcagaattttgtgtgtgcgtctgtcggatttctctggggagacagtgtgttcatctttctgggctttgagagattctca

SEQ ID NO: 14039 - DNA, 122 bp, Homo sapiens
gaaagtgagcgcgtggcacagggctcgctgctggaaccctgccagggcatgcagacgcaccgggctaggtgtgcctgccccgggctcctccagctgtctgctcggcatacctaaggaaaaga

SEQ ID NO: 14040 - DNA, 122 bp, Homo sapiens
gcttctgcgcggattgtgcgcagctgcagccaagcgtaagctgaaaattgtaaagttaagcgctggggaagcttgatttacgcccacgacgaggtcaggcagtctctgcgccctaaaggtcc

SEQ ID NO: 14041 - DNA, 122 bp, Homo sapiens
ccccactcccaccttgccaagtggccatttccccccactggggtgcaaggtggcagtacccgccctgtttttctcgcttggcttgtacaacccgtgcctgagtcagagccctggaggccacc

SEQ ID NO: 14042 - DNA, 122 bp, Homo sapiens
ttgagaacataagctggtgcggagggcgcgaggggagaggggtttgagggacaagcgtgccggaatccacgctgtcagtgaacatcactgggctgtaccagtacgtgtgactaccgaagctc

SEQ ID NO: 14043 - DNA, 122 bp, Homo sapiens
acacggcagccaccagcaaatgtgaggcttaccctaaaatgaaaactcatccaaatcagacgcagttgagaatcccactcctcagacgcacttgccacaaggcgaaggctcagcaaccccac

SEQ ID NO: 14044 - DNA, 122 bp, Homo sapiens
aggggtaattatttctttcgggcactctacctgcaatttgggtagctgcctctgggaaggcgattatgtaaatatagttgtctcccattcatcaacagcatcagcatcacctgggaacttgt

SEQ ID NO: 14045 - DNA, 122 bp, Homo sapiens
aacttagggggctcccgcctccccggccacgcgagcgggaacagtctcctccactcggagcggtaagggacccggaaatgcgcgggtgcccctacagagtcttgagttttccccgccctcac

SEQ ID NO: 14046 - DNA, 122 bp, Homo sapiens
ccagtattccgcagctcatttctcccttcaccccgatcccatgccccgtgtttggacgttcgctgagcctgctccgtgacgggtctgtaagttcctacatggggcgtcctctctatgagccc

SEQ ID NO: 14047 - DNA, 122 bp, Homo sapiens
attcttccggcctaaacctggtcagaagcaggcttaggctctcagagtattgcctgggcccggactttgtgcagggccccagcagcccatcgtgagggggaactaagatgtgtgtgccaggg

SEQ ID NO: 14048 - DNA, 122 bp, Homo sapiens
ttcccaccgcaaaagcccttgtggactttcctttataggttggttgcttagatgaacattcggtagtctcatctgggaaagtcctattaagtcccagaggactgtaggagctctggaaagaa

SEQ ID NO: 14049 - DNA, 122 bp, Homo sapiens
ctgccgtgcgggcgcgggccagagtcacgtggaggcaggcggagagggcgagggggcccccgtaaatcatcctgagggatttttggcccaagtccctgtttccgaaaggttgcgggacggct

SEQ ID NO: 14050 - DNA, 122 bp, Homo sapiens
gtctgactatggggcggagtgggccacgaagcacccgctccagcgcagagcgagagcgctcggggattcagcaccacgaggcggacagctccaggccctgaggtccccagaaaagctggagc

SEQ ID NO: 14051 - DNA, 122 bp, Homo sapiens
ttccctttgttctactacttgctgaggcagtctaaagcctggctcccttccggcctggcgcgctacggttcccgcaggcgctccgcttcagcaccgcgggcgtggacagctccggggcgcga

SEQ ID NO: 14052 - DNA, 122 bp, Homo sapiens
gttaggcttaggcggcaacagaaagcaaactgaacgcacacctctttagaacactgacaacgctggcccggtgtttttaatgcacgaacccggccacctcgagtgaatcccgcagatgccta

SEQ ID NO: 14053 - DNA, 122 bp, Homo sapiens
aagcaaggaatgccacagtcttggtctaattacagcttagcctaatgagtacacgctgagcggtataagcccaaatcaacaggccacccaccaagagagtaaaaagaagaccctgagtcctc

SEQ ID NO: 14054 - DNA, 122 bp, Homo sapiens
aatgcgcaacgactcccgcgatgcgcagtaattccgctggagatgcacaggcccttcgcccggatgagctccttggtcttcaaagactcccagaagccagggccacccctgagacccagaga

SEQ ID NO: 14055 - DNA, 122 bp, Homo sapiens
cctgcgggcagcagggagcaacaaaccacccactggctacaggttctgccaacaaagggccgctagcagcccctaattccaagatgtgcaatccctacgagcacctggatgagaccagagag

SEQ ID NO: 14056 - DNA, 122 bp, Homo sapiens
gacttcctccttcccgcagatccccaggcgtgcacagcaggcagaagctgtgggggagatcgcagcgcccgctgtgtcctcccggtgaccagctgtcacctgagcccagggcgcctgcccca

SEQ ID NO: 14057 - DNA, 122 bp, Homo sapiens
cagtgctttgtgtgaactggcagggggagaaacgacggctggggaacgaacggggttattcgtcccatcaatggcctcagaagcatccttatcacctgcttccagagctcccgacccaaatt

SEQ ID NO: 14058 - DNA, 122 bp, Homo sapiens
atatatgctaaacagaataattagactacaggctgctctagagataatcactaaccaaaccgccccagcgctggaaatgctcgcgtgacaacaaaaccaaacgcacccagcaatttatcaaa

SEQ ID NO: 14059 - DNA, 122 bp, Homo sapiens
acagtccctaccttgctcttctcccgccggctcgtcactttaggctccctccagattccgcgttccttgagcaaatggctcacccctgacgaatccggccttaaaaaagtcccggccttgaa

SEQ ID NO: 14060 - DNA, 122 bp, Homo sapiens
ctgatgtcctcagctccaggaagctctgggcttgcggcatgacagcagagagaagggccacgctgctcacgtcagcagtgccccactgagggggcccgatgcaggaagaggcagcccagagg

SEQ ID NO: 14061 - DNA, 122 bp, Homo sapiens
tatgaggtttctccagaatagaaacaatgaaactttgaagttgtgccctaccgtaatccccgttcatgtagactggaagttgtcaaactatgacctgatgggatttgttccctggtctagac

SEQ ID NO: 14062 - DNA, 122 bp, Homo sapiens
ttgagcttccagaaggcaggtctggatagtagattaggagggtggtccccatttcacaggcggtgatgagaggctctgagcctgagccagcatcgtgaggaagtcaacaatagacggaaaca

SEQ ID NO: 14063 - DNA, 122 bp, Homo sapiens
gtaattggtcaccagctgtcatccttggcttctcctactgtatctttgttacaagccctccgcaatccacagaactctctctccttccttccacctgtcagcttctctgcttctgagataag

SEQ ID NO: 14064 - DNA, 122 bp, Homo sapiens
gcctcgcagactgtgcgggccctgggcactgatgcctcatctcctttatttcacatcccacgcgggcgctggaggcgtctgtttcctgcctcctccaaagctctcccaaaagcccagggctg

SEQ ID NO: 14065 - DNA, 122 bp, Homo sapiens
cggccctgaagcgtcgggcagccgcgctcactgctgggccggtcagaggcctggagccctcggctggagcctcagcttcgcaagtcagctaccttgggacctctaggatcttccgacatccc

SEQ ID NO: 14066 - DNA, 122 bp, Homo sapiens
ccagttacctcaaagctccccaacttccacctccgcagagctatgacgtcatggcaggcacgccagaggccgaaggatgcaaaagtggttttctgctttcgatgatgcaatcattcagcgac

SEQ ID NO: 14067 - DNA, 122 bp, Homo sapiens
tggccctgctcccccgggtccgtgtctgcgcatcggtctgcactgggcagcgtctgactccgtttctgttctgggcctctgggcctgggcatctgcctgcctcctccgagttcacgcggggc

SEQ ID NO: 14068 - DNA, 122 bp, Homo sapiens
tctgtggttagggaggcacctccctactggtcactaattccccctgccgagccttctgcccgggcaactgctccacaatctccagctgcaccatgtgttttgaaaagcatttctccccgccc

SEQ ID NO: 14069 - DNA, 122 bp, Homo sapiens
ctctccttccccagagcttcaggaagagggctggattgcacggcataccctgcactattgcgtgctgcccgttggaccctggctttttgtgctcttcatcgccctctgggtatagttcgctt

SEQ ID NO: 14070 - DNA, 122 bp, Homo sapiens
gtttcctaggaaggttctgacagcctgtgagataatgcacatccatttccagagagcaggcgtgaggcagagcactggaaggaatgaaagctccagagaagctccaccttttatgttagcat

SEQ ID NO: 14071 - DNA, 122 bp, Homo sapiens
aacccctctcggaagacagttcacacccacacggagctaggaacctggggaaacccctctcggaagacagttcacacccacacaacgctaggaacctggggaaacccctctcggaacacagt

SEQ ID NO: 14072 - DNA, 122 bp, Homo sapiens
gtgaaaaccgaagcagctgatcagaatggcaatgacaatgagaacaacaggaaatgagcccggaacgcaggcccccatgtctctgtgcaaagcctccctgcttccctctgctgagtctaggg

SEQ ID NO: 14073 - DNA, 122 bp, Homo sapiens
actacatctcccagaattccgctcgccggatcccaccgcactgaagggactgcgcgtgcgcgagtcaggtgacgacccgcccctacaggccccagaacccccgagattccccgcgcttgcct

SEQ ID NO: 14074 - DNA, 122 bp, Homo sapiens
tttcttctctttcctttaacaatgcgcgatgcctccccagtgacaggagtgagacacaagcgggtgagccatttagggtcctaggaagataagaagcaatggcattaacccagagagacaca

SEQ ID NO: 14075 - DNA, 122 bp, Homo sapiens
caaaataacacgggtcatccgctgggaaagcccggaatgtttcccctcgaaatctcctcccggggagatgtgagcacagggtcttgctccctatttcaatgcaccttgagactgggcgctac

SEQ ID NO: 14076 - DNA, 122 bp, Homo sapiens
ccctcccggctgccgtggcctcacgtggacactgcagggcactaagccccggtcgaggctcggggaccctccgtgaccttagcagcgtcctcgaggctacaagtgacaaactgcttgtgctg

SEQ ID NO: 14077 - DNA, 122 bp, Homo sapiens
agatcagcccatcgccggagctccgccagcgcgtcccccccgcacccccggcccctcctccgcgccaactgtgtaaatcagccgccgcagtcctctcgccgcgcatcgcaggcaaaatcccg

SEQ ID NO: 14078 - DNA, 122 bp, Homo sapiens
aacatactctcttctttacattgcttagtgtcactagaaatatatcttggggcttgtcaacgatgacaggaaggaagcatgggtaagaataactatggggccagtgcacccaggatcacgga

SEQ ID NO: 14079 - DNA, 122 bp, Homo sapiens
gggacgctccaggtcctgctcggcctcaggcatgtcctcggctgccttgtcgaggctctgcgagctcatgctctgcttcacctcggccactatctggtcgatgtcctcctcctgctcgtagc

SEQ ID NO: 14080 - DNA, 122 bp, Homo sapiens
gagagcaatgttcggaattctcggaggatccacaaagccccgggatctaacccctctggacgtgcagttccctttgtctggaaggcgcctctccccgttctttttggctgacttttactctc

SEQ ID NO: 14081 - DNA, 122 bp, Homo sapiens
ggctccccttgaagagctgctgtagtctctgcttggcctctttgctcagcttcaccatggcgacggccgtgtggcgcagggaggaccccttacagcaaccacagcgtcgggaatccgaaagg

SEQ ID NO: 14082 - DNA, 122 bp, Homo sapiens
ctgtcgtcgcgcagcgatgacatcacccctaccgctctcctgaggggtcattttgaggcgcgcgtagaggactagaggactcattttaactttggtttggcgacagtgggaagcgggaaaat

SEQ ID NO: 14083 - DNA, 122 bp, Homo sapiens
tagacccatctatggtgggctcagcctgattctctctccctcattctctgcagcgctcctcgctactccaggatccagagtagtaagacgatgcttacgctgtgtgcttcctcaaagcgcct

SEQ ID NO: 14084 - DNA, 122 bp, Homo sapiens
taatgccacttccttagagaggacttttctaatcatgttctgcaaagtagtttcccttaccgttctgtttctcagctcccagtttctttccttcacaccacttgtaacggttagtagttttt

SEQ ID NO: 14085 - DNA, 122 bp, Homo sapiens
ttccaacctagaggggtccaaagcacaggtcccccaccttcttcctggaagagtgagccacggcctcctttagcccaggcccagcttaccattagccagttgtctctccttgggcagttgat

SEQ ID NO: 14086 - DNA, 122 bp, Homo sapiens
atttcgaaacatccagctgctggcagcaatagcagaacccaccatgaggctccaggcattcggatgccgccagcgaggccagcaagcccacctctccctgagctgcagttcggctttcttcc

SEQ ID NO: 14087 - DNA, 122 bp, Homo sapiens
ttgaaatctttacgtcgggacaatgggagagcggctaaaattaccctcttgggtcctgggcgggcaagattcctgagcccctacccccgcccccatctcatcctcctctaacccgggccttg

SEQ ID NO: 14088 - DNA, 122 bp, Homo sapiens
cagataaaagtgtaatttgtagatattctaaaatcccttatcttagccaatagtttcagccgtggcttaaaacaatatatctatctgtactttagcaaaatgggtggatttgcatttcacat

SEQ ID NO: 14089 - DNA, 122 bp, Homo sapiens
cagagtactgatggtcatccagtccccttccttcggtgtttgagaccacttcatctggaccgagctaaagtctaggaagaaataaagtttcaaacccagtagagttacctcaaagatacact

SEQ ID NO: 14090 - DNA, 122 bp, Homo sapiens
gtggcatctatggcaggcgctgtatccgggcgacgccgagagcttgcagggcgcgctgcgcgacatgctgcgttcgctcttccgctgcgacttctccgtgctgcggctgtacgcgccgccgg

SEQ ID NO: 14091 - DNA, 122 bp, Homo sapiens
aaagtaatggaaataactaaaaacattacacacatattgtcggccaggtgtgctgtgtcacgcttgtaatcccagcactttgggaagccgaggcaggtggatcacctgaggtcaggagttca

SEQ ID NO: 14092 - DNA, 122 bp, Homo sapiens
ccaaggacagtttgcggtaaactgccaccccggaagccagcacccaccatcctggtctcccggagtttgggtgacccctggcactgttacttctgcataaaagtagtggatttaacccctac

SEQ ID NO: 14093 - DNA, 122 bp, Homo sapiens
agtaccagggtgaaagtggagacgcaatctcccttggaagacgttagtctccatctctaacgctcccgagacacggttcgcaattaattatgacgtcacagccaatcgtcaacgcgaaagcc

SEQ ID NO: 14094 - DNA, 122 bp, Homo sapiens
ttcctccttctctgctggtctttcttggcaggccacagggccccacacaactctggatcccggggaaactgagtcaggagggatgcagggcggatggcttagttctggactatgatagcttt

SEQ ID NO: 14095 - DNA, 122 bp, Homo sapiens
caggttctttccctgcagtccttttctaaggcatggattctgccctgtgctgagacctggcgccccccgggggactttcccattcaagctcatacacaggattatgtccatttatgagtaat

SEQ ID NO: 14096 - DNA, 122 bp, Homo sapiens
cagcgtggcttgcctcactctcagtggttttcccaaaactactctgatggcctaggcaggcggatcatgaggtcaggagatcgagaccatcctggctaacacggtgaaaccccgtctctact

SEQ ID NO: 14097 - DNA, 122 bp, Homo sapiens
tgttacagttcttaaagatgctgtgtccgcagttttttccttcagatgttcagatgtgtccggagtttcttccttctggtgggttcatagtctcgctaagtttctttcttctggtgggttca

SEQ ID NO: 14098 - DNA, 122 bp, Homo sapiens
accagcatcatgtccatgagggaaagttggctcaggaggaagtacatgggcctgtggagccggtggtcccagtgaatcaggagaatcatgagggcattgctaaacagggaggtcaaaacggt

SEQ ID NO: 14099 - DNA, 122 bp, Homo sapiens
aacttgaaaagtgatactgatccggatcagccagggcactcaacaaaatcaggagtaccacggcgttgatgatcaggtaccagacacctaacaggatggtgctggtgcggacatggaggcac

SEQ ID NO: 14100 - DNA, 122 bp, Homo sapiens
ggcgttctaaggcctcccagcacccgcgcgtcgccgcttagaacccgcccctggtttgcgcgtcacaacacccgccaggcgccgactcagtctctaccctggctccgcccctgctgagcccc

SEQ ID NO: 14101 - DNA, 122 bp, Homo sapiens
tcttgggctgcaggacagacgcccccagggctgagctgtgtggtgcaggccaaacgctcccggctcccctgagcactggccttggaggtgaccacagagaaatgacctgatggccagaaaac

SEQ ID NO: 14102 - DNA, 122 bp, Homo sapiens
ggggaaagagtggcatggggagaccaaggaagaagcttggggtggggtgggtagtggggacggtcattgaaacgaatgacactacggcttgcaccaggttgaagcagtacctggcaaggaga

SEQ ID NO: 14103 - DNA, 122 bp, Homo sapiens
gtgtgcaaaaaaaaaaaaaagaaaccatcatcgtgcagcttagaattcaatttaatttttcgatagtatcctgtatgctacccagatatcttgcacagtactgggagcaaaataagtctcca

SEQ ID NO: 14104 - DNA, 122 bp, Homo sapiens
tgtagctagaaaaaagtctgtaaggctgttaacctctttaagggggagggggagaagggacgcaaggaaacaaggaccacacagtcaatgcttgaaaaccttgattttcacattatgaagac

SEQ ID NO: 14105 - DNA, 122 bp, Homo sapiens
cagtaaaagctgcctgatagccaagaacagtggcatttagttcaacggggattttagattcgtctttccagtgtcctcactcctgagtaagaagaaggacagagcacgttggtattttcctg

SEQ ID NO: 14106 - DNA, 122 bp, Homo sapiens
cccctacctgtccaacaggtaagtcatagggataccaagggaagggacagacgccttcaccggccagccaactcagcgtcaggcatgatgcttctttgggcttattcatccttgccccaaag

SEQ ID NO: 14107 - DNA, 122 bp, Homo sapiens
ggcggcggcggcgcagggcggggcggtaccgagcgatctggttccgtcggatatggtgcacgaagccgtggttcatgtccagccgccccccaggcttgcagcagtgccccggccggggatgc

SEQ ID NO: 14108 - DNA, 122 bp, Homo sapiens
gttactccttttttgctccaacattctccaaaactttctcaagcacagatatcgttccttcgtcatccccaaatctcctgtcacgcttttgtccccaagcgtcttctcaccccttcacgcca

SEQ ID NO: 14109 - DNA, 122 bp, Homo sapiens
acttacaattcacaatttgcataaacaatctcaattacataggtgatgcttgcaatagcccgtttgaagcatgacatcttcctggtgttcagaaaggttaagtgggacctgcccaaggttac

SEQ ID NO: 14110 - DNA, 122 bp, Homo sapiens
tctgcgctgcggctgccccttcgccccggcgcgggaggccagaccccaaccctccgctcccggccccacagccgcgtccacgcccgtcaccttgcgctagagaaaccgccgacctggggagg

SEQ ID NO: 14111 - DNA, 122 bp, Homo sapiens
cggggttagtgtaaggggcgtctcctgcttatgagtcgccgggacggggctgggagcgcacgaggagacacgattcctccccacccctaaatgcacactcaccccgccaccccccaacacac

SEQ ID NO: 14112 - DNA, 122 bp, Homo sapiens
cggagctccagattctgtggggacgcccggcggggtccccggagcagggtgtggcaggcccgccaggctgaggagccgcacccaccccgctgggggccggcggggcacgtgcgggagccggg

SEQ ID NO: 14113 - DNA, 122 bp, Homo sapiens
tgcttcgggcggcgccgctttccctccaaggctgcgggaccggccaggagcaccatcaggcgccccagaatggctacaaagtggatttttccaaagaaagctgattcctcgaatttcctcgg

SEQ ID NO: 14114 - DNA, 122 bp, Homo sapiens
ccagcagagctgttgtgaacatcaggaggaggagatgttcagcatgtagccagtgcctagcggccttctgtgcttgcttcagtaccagcatttgcagtaagtgaatctgaaatattaattca

SEQ ID NO: 14115 - DNA, 122 bp, Homo sapiens
tgtcaacgtttctcctttgccaacaagtgcaatgccaggctttgtcaacagagaacaaggcgggactgtgggaggtagtgtttctactttaactcctatggccagggccagtggcctgtgga

SEQ ID NO: 14116 - DNA, 122 bp, Homo sapiens
agaccgggttgcgggcggggccgaacgtggtataaaaggggcgggaggccaggctcgtgccgttttgcagacgccaccgccgaggaaaaccgtgtactattagccatggtcaaccccaccgt

SEQ ID NO: 14117 - DNA, 122 bp, Homo sapiens
gtcagggaaagctgaggaggaagggcagagaatcataaatcatggaaggtgctcctgagacgggtgggagagtcacatcctgtaaggaatttgcccaccacctcctcacctggcagacgaaa

SEQ ID NO: 14118 - DNA, 122 bp, Homo sapiens
tgatgttaacacatctattgagatgtagctctgaaattagaggtatccactacccttcttcgggagaatgtccaggtgggagagagacttgacccaggattcatggatgaatagcatcatag

SEQ ID NO: 14119 - DNA, 122 bp, Homo sapiens
cagcctgggggacagagtgtgactctctcaaaaacaaacaacaacaaaaatcacttatggcgtgcctgctccctggaaagcactgccagatatgtatttgctattgcagtgtctatacgcag

SEQ ID NO: 14120 - DNA, 122 bp, Homo sapiens
ggtcattagagaagatcggggacacatgtggggcgggcaggagctgccttataaccagcccgggaacccctagctcactcgctgctgaccaggctctgccggctccttcggcctcgccgcag

SEQ ID NO: 14121 - DNA, 122 bp, Homo sapiens
tgttaatgttggtggagttccagccactgcactttttttgaggcagactcactgtggctccggctggagtgcagtggcatggtcatagctcatggcagcccccaactcccgggctcatgtaa

SEQ ID NO: 14122 - DNA, 122 bp, Homo sapiens
tctggtgcatctggaggagtggggagatggggaggaaagagagggggagagtggcgcagccgtggttgcccaacttcaaagggttctcaacagtgcattttgccattgtattttaacatctc

SEQ ID NO: 14123 - DNA, 122 bp, Homo sapiens
aacccaaacgttaacttggacttagagctgcttgagctagttacttcacatctgtttcaacggagccagtaggagctgcctcacacagctagtaggagatgtgaatgaatcaggcatgggaa

SEQ ID NO: 14124 - DNA, 122 bp, Homo sapiens
ggggaccgcgggtcaccttctgaatttttaccttcataaacagcaaggactgcgctctttcgcacggcgccccgttttttcgtagagttccgtcggccaaaaccacttgaaactcgctcagc

SEQ ID NO: 14125 - DNA, 122 bp, Homo sapiens
tctgtctttggcagtacaggggcttaaggtctggttggttccttctgacacctcggaaggcggagttacagaggaaaagcaacaagttgtaggaagttaacttatctagtctcagacgctgg

SEQ ID NO: 14126 - DNA, 122 bp, Homo sapiens
ccatagaggatgatagggtcgctaagaattgggatttgattcgaggcacggtggaagccgcggaagggaacatgatttgatctgatttacctttaaaaattaacgacctcgccagatgcctt

SEQ ID NO: 14127 - DNA, 122 bp, Homo sapiens
gcggtgaggcgcttcatggagaacttcgggggaatctcgtccaggtaatagatgagcgtgcgctccacctgcaggggttctccgcgcacgcgcaagtccaggccgccgcggccctggaatag

SEQ ID NO: 14128 - DNA, 122 bp, Homo sapiens
tcgttcacacctcttaactgcctccccccacaagcttaggagctttatgggatgtgttgccgctggctgcttttctggtcctaggatacggcctttgccgacgtgttgccgccggctgcttt

SEQ ID NO: 14129 - DNA, 122 bp, Homo sapiens
tcgccgcagcgctcagcaatagatcaatgtgcctgccttcgcagggagggattgatgggccggattgaattgtctagcttttcctatcaagaagtttgtcaggtaatctgctggctgcagtg

SEQ ID NO: 14130 - DNA, 122 bp, Homo sapiens
tagaaatgtcggaggtgagcgacttctccaaggtcactcactcctcaccaaagtgggctccggctctgccatccaggcggccgttccattcttgagttgttctcggcatctcggcatctcgg

SEQ ID NO: 14131 - DNA, 122 bp, Homo sapiens
gggcttcttagctttagcggcgcctgccttcttggctttgggcttggcttccccggaggccgccttcttgttgagtttaaaggagccagaagcaccagtgcccttggtctgcaccagggtgc

SEQ ID NO: 14132 - DNA, 122 bp, Homo sapiens
ctgccacaattctgcgtagctcctccaggaccagccccaagtagggccgagcggtagcgccgggctcctccatagcgccaagctgctctggcggtcaccgcagttaacactggccacaacaa

SEQ ID NO: 14133 - DNA, 122 bp, Homo sapiens
gctcctcattcctgagaagtaggcaggcaaggtgggcttggcttaaggaggggcgaccctcggggaggcagcaacacttgcagcctctgagctagtctgaaagctcccttgttcccaggact

SEQ ID NO: 14134 - DNA, 122 bp, Homo sapiens
aaggtggaggttgcagtgagccgagattgcaccattgcactccagcctgggcaacaagagcgaaactctgtctcaaaaataagaagaagaggaaggaggatgttttcttctgaggaaggtaa

SEQ ID NO: 14135 - DNA, 122 bp, Homo sapiens
aatggcctcaacgcttcaaccggaagcagaaattgaccgcggcaggcgccatctaacggccgctggagcaaagctcctcctggaaattcgcaacaccggaaaaggtccggctgcttccggta

SEQ ID NO: 14136 - DNA, 122 bp, Homo sapiens
acaccaaaaagtggcgaatctgacaactgaaaatgcgagtcgggcctcgatgagtcgtcccggtcgaacgctggcgcaggctgcggcgttgcagaggacgcgtgtcccggagcgccctgcgg

SEQ ID NO: 14137 - DNA, 122 bp, Homo sapiens
acaaaaatgcagttttctgtgggaacattgaggtcatgcattccaaattacttaagggaacgatttttaaattttaggaatctagttctccaagatatcccggcttgggatatagatgaacg

SEQ ID NO: 14138 - DNA, 122 bp, Homo sapiens
ggcggggccagtgggggcctcacagaggacagcagcacccgaagaccccctgccaagccccggagacaccccagcaccaagctcagcatggtggggcctgggtctggggcagagacgccccc

SEQ ID NO: 14139 - DNA, 122 bp, Homo sapiens
tcctcattttacagtggaggaggccgagaccaaggtcacacagagagcaaggggtagagccgggtctgactccatccacagccaggacgctttaactcgtatttttcacttggcaggggctt

SEQ ID NO: 14140 - DNA, 122 bp, Homo sapiens
ttgtgcggtgcattgtgggagccgcgcgagcgggcgctcgggtcgtggagggggcggtgccgcgggatctctatggtcccgcccgcccgcgggctagagcggccggggcggtgcgcgggcgg

SEQ ID NO: 14141 - DNA, 122 bp, Homo sapiens
ttcccaggaaccaggacacatctgcctgaaggaagcacctctgtacttgtgtgcacccaacggcgggcgtgggatggacggagcggctcggagctccgggcccaccagcacctgccctcatt

SEQ ID NO: 14142 - DNA, 122 bp, Homo sapiens
gccagggagagaaggggagtgcggagccccgtctccctacccctcgagcacctgggccagcggctgagctgtacataccgtgtgcaaagtgtatatgaagttatttattcgtgacccatgag

SEQ ID NO: 14143 - DNA, 122 bp, Homo sapiens
caggggactcccaggtagctgggctcgagaggagcctgccccggcgccggccccccgccccgggcccccttacccgcctgcaccagcgcgaagcagacgcagcccagccacaggcggagcgc

SEQ ID NO: 14144 - DNA, 122 bp, Homo sapiens
acatcccgagagagggggaggggctggttggaaccgatcggaagtggctgtggctggactcgggcctccaaagtccgcggccccaagttctccttggcgcagctcggccctcagtcccccgc

SEQ ID NO: 14145 - DNA, 122 bp, Homo sapiens
agcacctgtcccagtcctgaggcgtagcagtgctcagcaagtgctgggagtatccatcgccgcccattttcactatgcctgctgactccttgccgcattcccacggaaagatcactttggaa

SEQ ID NO: 14146 - DNA, 122 bp, Homo sapiens
gaaggggctttgctgggataaagacggaggcggtgggggaaggaaaggcagagatgggggcggggtagacctaggaacttgggggtttcccagtcctgcctcatgggaatcccagagtttga

SEQ ID NO: 14147 - DNA, 122 bp, Homo sapiens
cgcacagccccgtcactcatctccgtcctctccaatctgagggcccacaagtggcatcatcgctttgcggttggagtttacccatcttcggttatttgggagggtctgtacccttcctttcc

SEQ ID NO: 14148 - DNA, 122 bp, Homo sapiens
cgcctggcccaatgggcgccagcgaggaagcgttaaagagtcaaggcagtttgtgggagtcgcgctggggacgttcaaggtgtctcctagccggtaaagtccctgggactgaccgggctggt

SEQ ID NO: 14149 - DNA, 122 bp, Homo sapiens
agcctcctggctgggccagctaactttgtacaacaggtgcaaagctcactccagcagggacgctgatcctggcccagcagcaagaggatgtggatggctttgatcatgccgtttccacttct

SEQ ID NO: 14150 - DNA, 122 bp, Homo sapiens
cagagtgacgcccttgttcactgacaaagagacctgtcccaggagtgtcctccaccgagccggtcagctgtgggtggttttcctgttacgacgctcagtagcctgtagcaataacaaactcg

SEQ ID NO: 14151 - DNA, 122 bp, Homo sapiens
ccccaccctcttgcgcaaacgcccagtagcggaatccgcggggtcgagggctttagtgtgcgcatgtgcaaccagagcggcggcgggaagtgttgcgcaggcgcatccgatcgactcggtag

SEQ ID NO: 14152 - DNA, 122 bp, Homo sapiens
cctgtcctgctgcccttccctgggagtcaagaggcacctctcagatagcacagaccaggtcgggcctaacagaggccctccattcctgtgtgcacctccaagaggaggtctttgtagtgcag

SEQ ID NO: 14153 - DNA, 122 bp, Homo sapiens
caggtaaacataacaaacttttgaggtaagaggtccccggggcagcccggctggtgtgcccgaggacggagatgtaggagcctgccctcggccctgacagcaaacagccacaggcgaggggg

SEQ ID NO: 14154 - DNA, 122 bp, Homo sapiens
acggtattctgcacggtgcacagcccgacggctgaccagctgcagtcaataccagctatccgcgcttgcacacgccaactgttttgactacacgcacttgttaaacacggagtttcaggtcc

SEQ ID NO: 14155 - DNA, 122 bp, Homo sapiens
ccccgccccaaggcaggtgggctaggagggggtgcatgtccatctcagccttctatgtgacgtggcctccgatccacctggacacctggaggctaagcctggattcccccttccctgactca

SEQ ID NO: 14156 - DNA, 122 bp, Homo sapiens
aagtcctgcggcaggggttggtaccgcctcccgcgcaggtatgtgacgtcatcgcgccgacgaaggcgcccgctaggccccgcctgctctatttaaacttctggactcaacctggccgctag

SEQ ID NO: 14157 - DNA, 122 bp, Homo sapiens
cttcctcaataccacaggcttctcattccaagactgccatgacagatgcctggccttcaccgatgtggccccccggggtgtggcttctggccagcgccgcagttggcttatcatacagcgct

SEQ ID NO: 14158 - DNA, 122 bp, Homo sapiens
gcagggcagggaaaatctgcctgactagatgggcccaggacatctgaacaggatgattcccggaccaagacgtggaggacgatcaaggatacattgaaacaaggctgaggccagagaaaggg

SEQ ID NO: 14159 - DNA, 122 bp, Homo sapiens
cccgcaggtaagcgggggtccccggggctgggcggggtcgagcggggcgcaccacgggttcgctctgtctaggccatagcttggcagtgccagggcgggggctctcagcctggcaggagagg

SEQ ID NO: 14160 - DNA, 122 bp, Homo sapiens
taagctgcccatcacagtgcccctgaggtggaaccgcggctacagaggtgcccaggccagcgcatgccccgcagggctgaagtgagctgtggacctgcatggcccctccagccccacagtgg

SEQ ID NO: 14161 - DNA, 122 bp, Homo sapiens
aaaacaaatctatgtaaatcggatcttgaaagagagaaagctttctccagttttgaaaggcgccatttttaactttgatcttgtaatgacaaataagaatgttgaatcggctggcttttttc

SEQ ID NO: 14162 - DNA, 122 bp, Homo sapiens
caggcactcagctccctcgctggctcccacaccgccgcagcgccgccaccttggaggggacgcactggccggctgcgcacgcaggctgttcccaagcccccggtcgcttttcttccacatca

SEQ ID NO: 14163 - DNA, 122 bp, Homo sapiens
cgctcactgtgtggcctgtcgagaacacagtgtcctctgcccctgatttcccaggagagtcgcacgtctgtgatggtggtctcccaggcacgcatggccatggagcacgggaacgtgtgcgc

SEQ ID NO: 14164 - DNA, 122 bp, Homo sapiens
gattgcagacagagtctcgttaactcagtgctcaatggtgcccaggctggagtgcagtggcgtgatctcggctccctgcagcctccacctcccagccgcctgccttggccccccacagtgcc

SEQ ID NO: 14165 - DNA, 122 bp, Homo sapiens
ccgggagcctcccgggggcagatctgtgctgaggttttgcagggatcagctggctgtctccgcccctgcacgtcccggctccttctcagctcaccctttcttgttgtgccatgacaggtggc

SEQ ID NO: 14166 - DNA, 122 bp, Homo sapiens
tctctcctcctctgtcttcacctcattggtatgaggacaccagtcactggacttagggcccgtcctgctccaatatgacttcgtcttaactatttaccactgcaaagaacctatttccatat

SEQ ID NO: 14167 - DNA, 122 bp, Homo sapiens
gcctgctctcctgcagtccggtctcacttgcccctcctgcacgcacatcagattgaaggacgttttgcttacaaatagggttcagatggcaaacaggcagggaacaggccgtggtaccatgg

SEQ ID NO: 14168 - DNA, 122 bp, Homo sapiens
actggctgagagggaggttgaggccgcccagtctggtcttcatacaggaagcggacaggtcggcccagctccaggcccagctgtcggacaccctgggcactgtagagagtcaggaggggagc

SEQ ID NO: 14169 - DNA, 122 bp, Homo sapiens
ctctggcccagaactcaagacgacaggggctcgctctgtgcggcacttcctgtgtctgcgcgggatgatgacgcataaaacagcgcttgctcaggtccaggactccaaaagaaactgcgccg

SEQ ID NO: 14170 - DNA, 122 bp, Homo sapiens
ttaagagctgtaacactcaccgcgaaggtctgcagcttcactcctgagccagcgagaccacgaacccaccagaaggaaaaaactccgaacacatctgaacatcagaagcaacaaactccgga

SEQ ID NO: 14171 - DNA, 122 bp, Homo sapiens
cttttatgcatgtgtttaaatgtttagcacttatgggctgagactttgataaagtaaaaacgttgtggtaatgtgaaaagtttctaagtactttaatgtaatgaccttgtcttgaacaagta

SEQ ID NO: 14172 - DNA, 122 bp, Homo sapiens
taaatcttcaggcaccaccacagacttggtcatctccagaaggagctgaagtgaagaagccggcagccagcagtccctccatggggccaaaggctcttgcagctccaccccggttgccagtg

SEQ ID NO: 14173 - DNA, 122 bp, Homo sapiens
tgccgcgggcggggaacaggggggaggacttccggggcagcgctccagcctccgcgacagcgactcaggagagggagaaacagagggacttccggtgaccagagcactagcgccgcaaacct

SEQ ID NO: 14174 - DNA, 122 bp, Homo sapiens
aaactgcatttgcagaatttttagaggcactcccgaagttttaagaggatgtttattacacgagtctgtagggcaacatttccaagttggtacacataaacgaaagaggaaacgatagttaa

SEQ ID NO: 14175 - DNA, 122 bp, Homo sapiens
atgtgtagagaagtggaatctcctcaactcctcccgcctccacctgccgagggcttcggccgtggccctggaagtgcaaaggcttaatgctctggacctcgaaaagaaaatcgggaagtcca

SEQ ID NO: 14176 - DNA, 122 bp, Homo sapiens
ggcggaggttgcagtgagctgagatcgtgccactgcactcctccagcctggaggacagagcgagactccgtcttaagaagaaaaagagaaagagagaaaaaaaggccagcaaaataaacagc

SEQ ID NO: 14177 - DNA, 122 bp, Homo sapiens
ccacgcctccctcctgccccggaggctccgggagcgccagctaaggtgggattaggctctcggggaaagggtagcagggtggggatggagcgctgcccttccgaggaacgtgggtgggggca

SEQ ID NO: 14178 - DNA, 122 bp, Homo sapiens
ctggaccaacgtgtcacttaaagggggtcaatgtgtcactctccaggggttttgttgccccgtttgagagtcaaatgtatttctctacgtaaaaattaacataacaacaacaaaaaggtggc

SEQ ID NO: 14179 - DNA, 122 bp, Homo sapiens
cacaatctagacccacctgggcatttcagcacatggtggtgggcttggcagaaaaacccacgagtccccaactcctaatccctgacctccccacctctctcaccaggctctgtgcttcctcc

SEQ ID NO: 14180 - DNA, 122 bp, Homo sapiens
taatatgatattgtcactcatccctatcatttcttattactgttataaacaggaagatttcgaatctaaaagtaagacttacttgtttgaacctgggattctggcccaaactatacccacca

SEQ ID NO: 14181 - DNA, 122 bp, Homo sapiens
gaatcccactcaccaggaaaacgagggcggaaacaaagccataatccaccgggcggctcacgggctccagggctggcccctcctctgaatgaagggacagatcatcccgctgggatcggggc

SEQ ID NO: 14182 - DNA, 122 bp, Homo sapiens
agcacagaaatgatgtggagcagagaagtaacggaagggggaaaattgaagtcaatcatccgcttcccatcctggaaagggaaggccatcggaatctagcttgctggcctcgaagtaaaaac

SEQ ID NO: 14183 - DNA, 122 bp, Homo sapiens
ctataagaatatatctaagcaagggtattggagataggtgcagagaccctagctgaaacccgttaatttacctataaacaaaggcattgttcctttggaagaggcaatgaagagtaagacgc

SEQ ID NO: 14184 - DNA, 122 bp, Homo sapiens
aactcgtggaaaccggttaatgacccgaggggacagcggattctcgcctaagcaagatcccgcagatgggagggcgtaggaagaggttccccgggccggctccaggccccagcgggcgtggg

SEQ ID NO: 14185 - DNA, 122 bp, Homo sapiens
ggcagagacatggatccaaaccatctcacaagacgaatacgccccgaggtctgctgcaggcgtggagcctcgtctccaagtcatgttgtgtgctaagagggtagatcttatgtaaaatgttc

SEQ ID NO: 14186 - DNA, 122 bp, Homo sapiens
ctgccttcctggcctagaggagtcgggcaggacgggtccgttcaccctttctgctggttccggcacccccagcactggtcatcaatctgacccctttccacggacccgtcgcctgctggagc

SEQ ID NO: 14187 - DNA, 122 bp, Homo sapiens
gttttgttgtcgttccccctgcttaaagcacttgatgcataactctgtctaccttcattccgtagtaagacagagacgcttggcttcagacattttcctttgggtattaatgtgtaagttgt

SEQ ID NO: 14188 - DNA, 122 bp, Homo sapiens
tgggggtgccaggatgaggtgggtgcggtcgcggacaggcgcacgaggagcccagcggagcgccacccggagcaggcgcggaggagggctggggagggccaccaaggcgacgagagccggtg

SEQ ID NO: 14189 - DNA, 122 bp, Homo sapiens
tgggtatctgagagttcagagcaggctggaggggcggagcttggagggacgctggcggcccgcgcctccggtaacctagcaaccgacgccctagcaacgcgagggggcgggaccgagggagg

SEQ ID NO: 14190 - DNA, 122 bp, Homo sapiens
ccagctacaggctgcctggcactgtactctccttgccaattagagccagtcagaccccatcgggggattcagtgagcagaagaatcagcgtcagtccagggtcaggctgctctcaaacacac

SEQ ID NO: 14191 - DNA, 122 bp, Homo sapiens
taaaaacttggttttgttacataagacattgcttaaagtcagtttccaggagcctatcatcgacattgaggatttctcacatgtacctaatttagttttgtgctcctttaatttgttcactt

SEQ ID NO: 14192 - DNA, 122 bp, Homo sapiens
agtctgaattcagtgttacctcctcaaagaggtcttgtcccaacactcactagcacagcacgtcgtcttccttgtagagagcacgcagcccctccagaccagagctggacttccacagggag

SEQ ID NO: 14193 - DNA, 122 bp, Homo sapiens
taaacttagtggcttaaaacaacaccagtttattcttccgggtctgtaggtcgtaagtcccgaatgggccgcactgggctaagatcaagtagcaaagggctggttccctctggaggcttcag

SEQ ID NO: 14194 - DNA, 122 bp, Homo sapiens
tcccggagcccacggaccttgcagagctgctggccctgggagagctcctcgaaaggataacgctgggtacacttggtgcaggcgtacagggccgaggccgccatcctgctcctcagtctcct

SEQ ID NO: 14195 - DNA, 122 bp, Homo sapiens
tctctgccagctcgtggggcttgaatggtatcacgggaggttcttcatcttgcggtgggacggtcgcctcctgctgatggctccgcgttttcattgaccacattcattacaaagagacattt

SEQ ID NO: 14196 - DNA, 122 bp, Homo sapiens
cacgccctcctcagcccaaccccccactgctgtcccgcccacgggggcgggagccgtgtgcgccacgccgaacactagtctacgcctcggcatattctattggctggaaggccgtgggaagc

SEQ ID NO: 14197 - DNA, 122 bp, Homo sapiens
tagtgtgctccataagcataatttaagaactactggttcagactattctattttaaacgacgttaccaagtttcccttagacactgtatctaggtgggtgtttgcgttgttcctaagtgttg

SEQ ID NO: 14198 - DNA, 122 bp, Homo sapiens
gacaacaagaaactaggagaatgggtaggcctttgtaaaattgacagagaggggaaaccccgtaaagtggttggttgcagttgtgtagtagttaaggtaagtcaccgtttattctagggatg

SEQ ID NO: 14199 - DNA, 122 bp, Homo sapiens
tggggtggcccagacctctgcaggggttgtcggggagaggtgggccctgtccctctcaggcgctcaggtccctgaagtcactcagcaggactccctgccagtgtgactccgtgaatcggggc

SEQ ID NO: 14200 - DNA, 122 bp, Homo sapiens
tgtgagatctttgtctagtttctttctcttcgcaccatccccaacctttggcccctcccccgtgggctttgactgacagggctgccttggccctgcccccagcccttggcccctcccttcag

SEQ ID NO: 14201 - DNA, 122 bp, Homo sapiens
aattctagaccataatacaaaaagtgagccgatgcccctgctgcggggagcttgcgctcacgaacaaggtccgttttggggaaaggcctcactcctatgtcccagctggacagtagcacggg

SEQ ID NO: 14202 - DNA, 122 bp, Homo sapiens
acctcctctgctgcccatactgagacccggtggctcaaccaagactttggaaggacaaaccggtggtcatgggtcacgtgcccaccgttcaaggccccaagaagccccctccattgctgctc

SEQ ID NO: 14203 - DNA, 122 bp, Homo sapiens
ctggcccatgcccaccatgacgccctgcaggggacgacccgtcagcctcgccggcgacaccgaacccaccccgcaacgcagaacccaggagccccgcggcgccatccactcacctggtgtct

SEQ ID NO: 14204 - DNA, 122 bp, Homo sapiens
agctaaatgtgtcacatgtctcttcagcaaagtccccacctcccccagactcaacccccacgctgttcttccgtgttcccagcctcagagatgagaatcagggttcgctcaggtgcccaaac

SEQ ID NO: 14205 - DNA, 122 bp, Homo sapiens
ccagtgacaaaggaaaatgcgggacagcttgtgcaaaaattattaaggatttcaagatggcgacagcagagcattaaacccagcacagggttcccagtgaaggcgttggttcacaggcccct

SEQ ID NO: 14206 - DNA, 122 bp, Homo sapiens
gctgcagtagatctaggtggacatcatcctggtgaagaccattgagaccatgatggtaggcgaggaggaggacaatgacaatgaagacggtggcaggggtggccataggcatagggtgtgac

SEQ ID NO: 14207 - DNA, 122 bp, Homo sapiens
tttctttctgaggagcgctgcctgtggtcctttaacagttgcatttctgcttccaatggccggacagcccaggtattcatcaaaaagtgcttatgaagggactcttcatttctaaatgttgg

SEQ ID NO: 14208 - DNA, 122 bp, Homo sapiens
ccggatggatcctggatgccagaatgcagcctcagcacggggctgcaggacaggagtgagcgaggggctgcagagccggcggccgcggtgggcaccatggagggggctgccctgggcagcac

SEQ ID NO: 14209 - DNA, 122 bp, Homo sapiens
gtggcgcgtgggggacggactccgcagcctgtgggatcggcagcatccagtgaggtggagcggggctcaggggcactcaggatgcagtgagcgcacagccctgcggtggcatgggtgggaga

SEQ ID NO: 14210 - DNA, 122 bp, Homo sapiens
cgggattaaggagtttgggggagacgagggacgcttggagatccctctaagtcagcggaacgcagggccgggctccagggaactacagctcccagcatgccccggggcccgcaaccgtccgc

SEQ ID NO: 14211 - DNA, 122 bp, Homo sapiens
tagtcccagaacagtggcctttctgagctcccagatagagggggcatgccttttccccaccgtgggtggtcccaggcccactctgaatctgaccccaagccagcctcatgttcaggggactt

SEQ ID NO: 14212 - DNA, 122 bp, Homo sapiens
agagagatgaatctcctctccacccacctgcagtgcacgatgatggggcaggagcggccccggtagcacttgttcaccttcctgcaacaagaaatgggtgtgagggccagtgggcaccagca

SEQ ID NO: 14213 - DNA, 122 bp, Homo sapiens
ccttaatcccctggctgtgctgcaccggtgcacacacccacctctcaactcccatgaacacgagtcagcgtaaacactcgtcccccgggctggggctaagccactcgcccctcctcgggcgc

SEQ ID NO: 14214 - DNA, 122 bp, Homo sapiens
ggagagaagagtttgggggcacaaaggagagaaagtattaggttggtgcaaaagtaaatgcggttttggccattacttttaatggccaaaaccacaattgtttatatactataaagagaagt

SEQ ID NO: 14215 - DNA, 122 bp, Homo sapiens
gtcagggcctcgctccactcagtcctgccaatagcctagaataagccaaaacccaaccagcggccctgggtccttagcactgactgtaaccccagcagggctgtggaatctgagagcagggc

SEQ ID NO: 14216 - DNA, 122 bp, Homo sapiens
cacttacttttagagagaggtggtttgtaaatagtaatcacacgtagtgaggggaagccgcgttgggaccgcaaggctttccctgtcacctggagcccatgtttgggccgcacagctttcct

SEQ ID NO: 14217 - DNA, 122 bp, Homo sapiens
agcggggctgccccacacacaatcaaagaaaatgctacgatttcacactggagtcagatccgtgcacataaccgagggatccgcactgcagcgaggctgagtgagcgctcacggaacaagaa

SEQ ID NO: 14218 - DNA, 122 bp, Homo sapiens
cctttgcacccagaggccagggcgtctcactcaccttcacatccaggcctcttaggggagcgcggctttggcttttccaggaaggaatggactccaacggacagggaaagaagaagtgtgga

SEQ ID NO: 14219 - DNA, 122 bp, Homo sapiens
cagccgggggtggcccgttcccctttaagagcaactgctctaagccaggagccagagattcgagccggcctcgcccagccagccctctccagcgaggggacccacaagcggcgcctcggccc

SEQ ID NO: 14220 - DNA, 122 bp, Homo sapiens
cccgctccagcgaggggaaccgattgttcgggattcactgaagtctctgtaactgcaagacgtgacttccaacccgcatgactgacagggcatgatggctggctgcttggagacagacattc

SEQ ID NO: 14221 - DNA, 122 bp, Homo sapiens
aggggaaccgtgggcgggttctgagcaggagtggccgtgagggggacggaccgtagggggcgggaagactgcaggcaagagctggtaattttaagatgcaaataacatttttctgcctgact

SEQ ID NO: 14222 - DNA, 122 bp, Homo sapiens
agcagggatcccctctgggggcgttgggtctctggagtgtaagagggaacagagctggcacggtgctacttgacgggttccaccaccaggaccttgcactcgcgcttggcaatcttgtccag

SEQ ID NO: 14223 - DNA, 122 bp, Homo sapiens
ctcttcactctgctccatccactctggcctccctgctcttccgggaacacagcaggccgccggatatctgtgtgggtggcttgcttggttccctctggcctttactcaaaaatcactgtagc

SEQ ID NO: 14224 - DNA, 122 bp, Homo sapiens
gacctccactgtcccagctaatggtttctgcgtgcctacctgctccagacccttcgcaagcgtcatttaatcctaaaaaaccagtgaggaaactgagacgtaaagaggttgaataacctgtt

SEQ ID NO: 14225 - DNA, 122 bp, Homo sapiens
ggaggagcgctccaacatcgtggacatgctctacctcaaggacttggccttcgtggatcccgaagactgcacgccgctcagcaccatcactcgtttctacaaccatccgctccacttcgtct

SEQ ID NO: 14226 - DNA, 122 bp, Homo sapiens
ttagaatgggcgagggcagctgtgtcgcagtgaccagaacgattactgcctttaaaaagtcgtgaaaatgatcgtgaactgtaccccacaacgagcgcgcgtctgccccccaagacggtgga

SEQ ID NO: 14227 - DNA, 122 bp, Homo sapiens
cccagtgagtactcaaggctagtggcttctattcatacttccgagacatgtcttgttgaccgcctcaggctccaccccatcctcagaacctgtttaggccccatgactttttgcttggactc

SEQ ID NO: 14228 - DNA, 122 bp, Homo sapiens
agggatcgtcgcgctcgcggctgacgggcggccgggatcagcagaagtgggcggggtggccgcctctcgcgacagcccgggcctgccgggcccgtcccccccccactgattggctcaggcgg

SEQ ID NO: 14229 - DNA, 122 bp, Homo sapiens
caacgtggtgaaaaccccatctctataaaaaatacaaaaatgagccgggctgttggcaagcgcctgtagccccagctacttgtggatgctgaggcaggaggcttgagcctgggaggtcgaga

SEQ ID NO: 14230 - DNA, 122 bp, Homo sapiens
ataagttttcaaaggtggtttcaccacctcacgaaggaattcaagaacaagtcggaaagtcgtgaaagtacagaggtttactgcaaagtacacactgaagaaagggcggactcaaaagaggg

SEQ ID NO: 14231 - DNA, 122 bp, Homo sapiens
cttgctaaatatttgaacaggattgcccagtgagtttgtgcacagttgtgtttgtggacacgtgtcttctgtagctctgggttgggaatgatttgtatccccaaatggctctctcatttggt

SEQ ID NO: 14232 - DNA, 122 bp, Homo sapiens
gcatcccgcgtgcaaaaatttattccagaattatgtacggcctgcttccgacaaagaatccgaagcctcttccaatacaagcatccgaaagtagagtttcgagcattcgatttaggagttaa

SEQ ID NO: 14233 - DNA, 122 bp, Homo sapiens
aaatataataataaattaaacaaacaaacaaacaaacaaacaaataagtaatctggccgacgcagatactgaacgttggttaacacaatcccaattcctaatccctttcctccttgactgct

SEQ ID NO: 14234 - DNA, 122 bp, Homo sapiens
gcggttgctaacagtgcagcgccaatcacccctgacgctcgttttcctaatgcaggcaaacgccacattcccggtgttggtgcaaaaagaaatcatcctactcctcccctcgcttaaacttt

SEQ ID NO: 14235 - DNA, 122 bp, Homo sapiens
acttcggcccgctctgcctgggctgggcccacttacgttctgggtggggctcaggaactgcgtgcgggcgtagcgggtgagcatgctgatgatgaccacctggccccactcctccacgtcga

SEQ ID NO: 14236 - DNA, 122 bp, Homo sapiens
ccccggccaacctcgtgccgccggctccctcccgctccctctgcgcccgcagagcggccgcgcactcaccggccctggcgcccgccagcagcagcagcagcagcgcaggcagcgccagcagc

SEQ ID NO: 14237 - DNA, 122 bp, Homo sapiens
aggctctcaaataaatattcgtgcaatgttttgagaagtagaaagtgctaggcacgtaggcgttcaggagacagtcacggtactcgtttccagacagaagtcatgaggaacaagagggaagg

SEQ ID NO: 14238 - DNA, 122 bp, Homo sapiens
tgcccgcccactctctccaggcggggctgggcctttggaggggcgctcttaagccctctccgcgcgtctcagctagtacctgggtaagggtagggggacgcgtaccctctggagaactccca

SEQ ID NO: 14239 - DNA, 122 bp, Homo sapiens
caggagcgcggccgttcccaggccctatgggatccgggtatggggggtcctggagtgcgacgggatttggggagggggcggcgagggccagtgtatgtcaggagggcggaggccaagagggg

SEQ ID NO: 14240 - DNA, 122 bp, Homo sapiens
tccagctgagtcctcagaagctccaaagaggttttaactctggtttctcagtcccatcaacggtttctacttaccttcatcttctgaaagtcatcagcccttccttattccagtgtttacag

SEQ ID NO: 14241 - DNA, 122 bp, Homo sapiens
aaacaaaaaaatatagacttagtaaatataaaaggacaaaaattttacacatcccatttccgggccataatgcaataaagttagaaagaacagaaacagaattggccgggtgctgtggctca

SEQ ID NO: 14242 - DNA, 122 bp, Homo sapiens
gtcccgcgcggagtggggagtgggggtgccgcagggtcgggctggcgcgaccctcgggtacgtggtttggggggaaaaaaaaaatgaaagaattttacagaagccgcctggggacaaaatcc

SEQ ID NO: 14243 - DNA, 122 bp, Homo sapiens
tccaagagcaccaaaaacctgcaggcaaaactttgcccagtctgagccaatgaaaataaccgtggaagcacattgggaaccttatcctgaccaatgggtgacatctgggttgagtttgtgtc

SEQ ID NO: 14244 - DNA, 122 bp, Homo sapiens
atcaagacaggcgggctcatggcactgtcgttggccctcaaggtgaaccactcactgctgcgcctggacctcgaccgtgaacccaagaaagaggcggtgagcaggggacggtcctgcagccc

SEQ ID NO: 14245 - DNA, 122 bp, Homo sapiens
cagagatacacacacacagatacagatacacacacacagatacacagagatacacagatccggatacatgatacacagatacacacacagacacacacagatatacacacacatacacagat

SEQ ID NO: 14246 - DNA, 122 bp, Homo sapiens
tccgctttctcgtcaggctcctgcgccccaggcatgaaccaaggtttctgaactactgggcgggagccaacgtctcttctttctcccgctctggcggaggctttgtcgctgcgggctgggcc

SEQ ID NO: 14247 - DNA, 122 bp, Homo sapiens
ttattcttatctgtttattattttctggggctttgtgggtgagttccctgattggactaacgggcttcccagttcgtttctcagcagaacccgttcagtcatccagcccctgtgtggggttc

SEQ ID NO: 14248 - DNA, 122 bp, Homo sapiens
ttttataaccggacccaggaggttccctgaagcccctggaattgttggcaaagggtcacgcgtatctggggagaggatcccaagcaagtgctcaaaccacaaaacagtgagaaccaccgccc

SEQ ID NO: 14249 - DNA, 122 bp, Homo sapiens
catccgcccaccggcgcctggccccaggccttgacactcatccagttggtgttcagtgttcgatgagtggataagtgaatgactcctttcccaatcctatttgaaggcatgggaggcagaat

SEQ ID NO: 14250 - DNA, 122 bp, Homo sapiens
tgtgttcatcaggctatacacctttggttcccagcgttggctgtacattgtaatcacctgcggtgataaaaattctgatgcctggtttccactcgagagatgctgactcagttggtctgggg

SEQ ID NO: 14251 - DNA, 122 bp, Homo sapiens
tgtggagcaaaggcctgtgttctgaccccacccagctacaagaatttcctccctcctgcccgcacatcttcaaagagtccctgagattccaggctggttgctacttccccaggggagcattg

SEQ ID NO: 14252 - DNA, 122 bp, Homo sapiens
gaacccctggcggcgcgggcgcctccaccccggcccagttcctcggaaactgggcggggccgggcaaggtccctggtggcctcgactgccctccctgcgctcccactacccggctgcggaag

SEQ ID NO: 14253 - DNA, 122 bp, Homo sapiens
actgtcctgccgaaggcgcacctggccgctcgccctcaggaagaacttaattatggatggcgttgggtctccgcttagaacgggcgggaggcttagcacccccgtgtggggcaggccgggca

SEQ ID NO: 14254 - DNA, 122 bp, Homo sapiens
atctttgcgcctgcgcacactcctgctcttacccgccggaaccctgggccacgcccggctcgcgtaatcacgcactgcgcaggcaccgcccgctctgctctaaggtccctctcactccttca

SEQ ID NO: 14255 - DNA, 122 bp, Homo sapiens
ctacctgaacctgtcgcaggagccggcgcaccccgccatggccctccacgcccgcttcgccgaggccgagtgcctggccgagagccaccagcacctctccaaggagtcgctggcggggaaca

SEQ ID NO: 14256 - DNA, 122 bp, Homo sapiens
ggtgcagggcggcctcagtcccggggcatcttgaactggtccttctccctgcgcacggcccgcatggtggtcaccgggtccgtctcacctgcgtgctgctgcaccgtcttctccctgcggag

SEQ ID NO: 14257 - DNA, 122 bp, Homo sapiens
tcaacgcacgcgtggcgctgctgcagtttggtggccccggcgagcagcaggtggccttcccgctgagccacaacctcacggccatccacgaggcgctggagaccacacaatacctgaactcc

SEQ ID NO: 14258 - DNA, 122 bp, Homo sapiens
ggatttgaggtaacttaggaaactgctctcaatacggaattttaaagttggtgaggaagtcgacagaaggggaagtcacagtaggaaaatcaaggtactatcaggatgaagtcagcacgcag

SEQ ID NO: 14259 - DNA, 122 bp, Homo sapiens
aacaatggtggtctctggggctgtgtggagcctacgccggcccaggagaaaccagcctcccgtaaacaccggcggcgagttgtagaaaagtccctccagggtcccagccctttgaaaaggtg

SEQ ID NO: 14260 - DNA, 122 bp, Homo sapiens
ggctgcaaagacaacatgactctcactgtagccagatccgaacataaagtctggtctcctcggtgatggaggaagagaagtgtcgtccatacaagatgaatttagtctctgaaccccaggag

SEQ ID NO: 14261 - DNA, 122 bp, Homo sapiens
cctcctgtgctacctcctgaccttgacgggcaactcggcgctggtgctgctggcggtgcgcgacccgcgcctgcacacgcccatgtactacttcctctgccacctggccttggtagacgcgg

SEQ ID NO: 14262 - DNA, 122 bp, Homo sapiens
ttccgcggaagaggaaacagagaaccagctccacgtgctcggatgctcagccctgaatgtcgcctttgagcttggaggtgacttcggggaggggaaggagttaggcaaattccaagtgaaga

SEQ ID NO: 14263 - DNA, 122 bp, Homo sapiens
gtatgaatgagtcactaaggccagccaggcttcaaggggggccacagacattaagacagtcgtgtcaaaggatttgggacatgatttaaaacctacacacagtaagattactcttcctttct

SEQ ID NO: 14264 - DNA, 122 bp, Homo sapiens
attgagtttatgcacagaacagatagtacctgtacttaaatgtagactcactggggagcacgtttcactccataagaaaaggggtaaaaattgtgcacaccataattgcaatattttacaag

SEQ ID NO: 14265 - DNA, 122 bp, Homo sapiens
tggagaaaatgaatgccaatctgcgaatcctgtgtgtgactggatatgtcgctgaggaggcggaacctcgggactggataatatggactgagtgtcatttcccctgtcagatagcaaataca

SEQ ID NO: 14266 - DNA, 122 bp, Homo sapiens
ttggccggagcagaatgtctagagcccagagccggagcctgcagagatgattacaggctccgccgtgagctggacaaatgaggttggggcagcatgtgaaagcccaagttgtaaatctctca

SEQ ID NO: 14267 - DNA, 122 bp, Homo sapiens
tcctccgtctgggagggtgggccggaggtctgacgggcggttgggtggatagactagctgcgggccgatggacagcaggatacctgggaaacagatggattgaccaacagtcttggtttgtt

SEQ ID NO: 14268 - DNA, 122 bp, Homo sapiens
gaccaagaagtgcaggctcagagagatgaagtaacttgtccaagcctagttggcaagtgtcggagccgggactacaaactagacctcccagagtgccacgctcagaacgcagcaatgcaaga

SEQ ID NO: 14269 - DNA, 122 bp, Homo sapiens
gcttgttagtcatgcctcaaaatattaaaaagcgtcacaaaaagctgtacctaacattaccgtgtttctagtttaacctagcatgcactgtgatgaagtccatcagcatgctatttccatgc

SEQ ID NO: 14270 - DNA, 122 bp, Homo sapiens
cgcctgtcgtagtcattccctccccttcatggaagcatcagggccgcacgccccgtgggacgtcatcttgttcccgccaggaagtgggcgtgacgccagcaggctgagctcaccctccgggt

SEQ ID NO: 14271 - DNA, 122 bp, Homo sapiens
atacaaaagcccgtgcagcgcagcgctgcttttgtatcgagctcatcctggaaggcgaggcgggaggctgcgcccagggagttctgcgcgctccgttggcggctcacgcaggtgctggggga

SEQ ID NO: 14272 - DNA, 122 bp, Homo sapiens
gaatctataaatttccctggtcagtttggccattttgaaaatattgcttcttcctgttcacgagcatggaatgtttttccatttgtgtcatctctgatttctttgggcagtgttttgtagtt

SEQ ID NO: 14273 - DNA, 122 bp, Homo sapiens
aacaaataaaatgagcattaaggaacttacagctcaaaacaaaatgtaggtcccttacaacgacttatgtcaaaatgtatgatacccctatcaacccactcaaggtaaccaacatcctaatc

SEQ ID NO: 14274 - DNA, 122 bp, Homo sapiens
ttctattttctctgattgctttagattttctgtatcaaaacttgaacagatcttgagcagcgtttagtacttttatgtacaacctactggtcttgagagtctctgatggtgaaattggacta

SEQ ID NO: 14275 - DNA, 122 bp, Homo sapiens
cgccacacccacctcggctcggtcccgcctctccccgcgcgccccgggctccacctaagccggcacgaggtccactcatggctccgcccccgactccccgcccacctcagcctgatcccgcc

SEQ ID NO: 14276 - DNA, 122 bp, Homo sapiens
cgaacttccggtcttcctgctttccaatatccccaggcttctggccttgtacacggttaacgtgtttcagctagtgctgagtgttgcattctgccccttcaaccagatcacttccgctgaaa

SEQ ID NO: 14277 - DNA, 122 bp, Homo sapiens
caaagatggggaggccaagtttttggctggctattggctggacatcagcctccactcctgcgatgtggcctctgcatagggcagctcacaacatggtgactgacttgcttcttcaaagcctg

SEQ ID NO: 14278 - DNA, 122 bp, Homo sapiens
caattcctcgcgtctatgatccacctgcaaaaaactacgattcccagaaggctttgggtccgggggcgggaagactgagctcagaaagaggtggactctaagagaaggtctttggtcgatta

SEQ ID NO: 14279 - DNA, 122 bp, Homo sapiens
ggcacgaaggaggctggggcgaagatgagtccaggggttgggttgagagcgctgcgcagccgggctgagaagagaagctgacgagtgactcccgacaagggacgggggagagggaacctggg

SEQ ID NO: 14280 - DNA, 122 bp, Homo sapiens
atacctgcgttcttggctttcaggatggagtagcagagggaggccgtgtcagagatgacgcgcaggaaaaatgtggggttcttccaaacttgctgatgaaatgggagctgcagcacacatgc

SEQ ID NO: 14281 - DNA, 122 bp, Homo sapiens
gtagtacatctagcacccaagtcttggtttctaaatcctatgctccaataagaggaaccacggctttttgacacaacctctggagaaaaggctgataccagggctggggctgtaaagtacaa

SEQ ID NO: 14282 - DNA, 122 bp, Homo sapiens
tctgcgatcaccgtgcacaggacccacagccccgcggccactgcggcccagacactcggccgcatctctgcttctgcagcaggcgagagacgtcagggaagccaaagagagggtccagcgcg

SEQ ID NO: 14283 - DNA, 122 bp, Homo sapiens
gcagcattcatcttgtgcatatccttcatgacaaaacaagtatgcacaaagcactgctgccgcacaccagacacagcggcctctggacaggaagcaccaatcttcagtcaaagaatgaccga

SEQ ID NO: 14284 - DNA, 122 bp, Homo sapiens
ccctcccgaaaacccaagcttctccggcacaacttcggtctctccagcctcattcctccccgcactccgccaaactgctcgccctgcccagcgcagcggatgcaagcgctccccgccccgag

SEQ ID NO: 14285 - DNA, 122 bp, Homo sapiens
ttgtcgatgaccacaggctggttggcgatgatgtcgtaggactccatggccgggccgcgccggccctgcccagcaggcgggctgcaggaggcaccggatgggcgggcgggcgggaggaccgg

SEQ ID NO: 14286 - DNA, 122 bp, Homo sapiens
gacaaaactgaggctcagagaggctgagagagacactgctgaggtcacacagccaggagtcggcaggaagccctgaacccaagcagggctggcctggctactagcctgggctcagtccttta

SEQ ID NO: 14287 - DNA, 122 bp, Homo sapiens
aagagggctctccgcaccgactctgtgactcaggcttctactaccaggctcatccgaggacggaggctgtcgttatacaacgcgcaagtgtggtctctgtcacagatgtggctgtcgcagag

SEQ ID NO: 14288 - DNA, 122 bp, Homo sapiens
taatagagacagggtttcaccatgttagccaggctggtctcagactcctgacctggctcacgcctgtaatcccaacactttgggaattaatctttagaactgggccattttccctaaccacc

SEQ ID NO: 14289 - DNA, 122 bp, Homo sapiens
ctggagcccccagtggccccggaggaacgaggcattgtgaaaatagggccagctgctggtcgggctctctgaccccagacctcgccctcccggataatgactccccaggactcacttctccc

SEQ ID NO: 14290 - DNA, 122 bp, Homo sapiens
cacaccccggggtgcctggctgacgcgtccctcagctcaaacgagaaaggcaacttcaggcggggcgggagcgtggacggtgggtgggaccggacgcgggcgggcaggggcggggcgcgggc

SEQ ID NO: 14291 - DNA, 122 bp, Homo sapiens
tatctgaaactgttctttaagcctgtcctcacaatctgtgtgctctctgaggtcagggaccgtgtctcctccttccttaggttctccatgcagggcttgggccagggttctgctttgaagga

SEQ ID NO: 14292 - DNA, 122 bp, Homo sapiens
gacgagccctcattttctttcccttcctttttccgcatctccttccttttcctgcatctccgttctctaaatacagaacttatcgagctggaagaattctttagatagcagccagggtgcaa

SEQ ID NO: 14293 - DNA, 122 bp, Homo sapiens
gatccacgtcatatcatgtgtcacaacttcattccttttgaaagctgagtaacactccatcgtatatatatatatcaccttttctttctccgttcatctacccatggacactggggctgttt

SEQ ID NO: 14294 - DNA, 122 bp, Homo sapiens
ccagaaagaaaaataaaacaaagagaaagacgtgaatcttcatgattgaagacagtcagccgaattagcagctctgcagtgtttgaataagagaaaggtggagagcacatctttttatactt

SEQ ID NO: 14295 - DNA, 122 bp, Homo sapiens
gcaggaggaccggggccgtgcaggggggcggtcagggacccctcgggtcagccttggggccgttctggggggtggtcagggacccctcgggtcagccttggggccgttccaggggggtggtc

SEQ ID NO: 14296 - DNA, 122 bp, Homo sapiens
gaatcagtatcagaaactgaatatgctaagaaactcagttccgagctgtgacctctacaacggaagaataataggttggttacccgaggcggaatctggaactgaaattctcactcatttga

SEQ ID NO: 14297 - DNA, 122 bp, Homo sapiens
aggtaaagtgctcctaaacttacagagaaaaacattaacagccctgccttcagatagcatcgtggctaaaacttcactctaatttcagagtggaaaagataataaggaagggatagagtgaa

SEQ ID NO: 14298 - DNA, 122 bp, Homo sapiens
cctgggcgggtgggggcggattcgttggtgtaatctcttttcggcttaaagagccagaagcgacaccacagactccggcgggtcacatgactccagtctagctcgcattgcggctcccgccc

SEQ ID NO: 14299 - DNA, 122 bp, Homo sapiens
tctgggactgatgtttaattgtaacacagatacaacagggtggccttgttgtgtataatacggtattatacccgcatgtgctctagcaaggataccaaggcaagcatacatgtagctggctt

SEQ ID NO: 14300 - DNA, 122 bp, Homo sapiens
ttttgaagtggacgttcgtgggaaagggttctccgagagcgttcactcggatgggagacacgatttcgtattcgctcagggtctctaataatttcactgcggagagaagcagaggtatatga

SEQ ID NO: 14301 - DNA, 122 bp, Homo sapiens
cttataatggtgacatctgttcagcaaaagtgtggagcccctatgttgtgctagagaccacgtatctaggacacacatgtgaataagaggaagtccccaccctgaggaaggaggaaagcagc

SEQ ID NO: 14302 - DNA, 122 bp, Homo sapiens
caaatgttcaatctaacatttaaagaaatttgaaaatactgaggcaagatgcccgatttccgatcagtaaatgtttcagaaccttagaggagcaaaatgccctggctatatgaacatgtaca

SEQ ID NO: 14303 - DNA, 122 bp, Homo sapiens
ccaaaacccccaaaactctcattgacccttatctcagatttcccgaatgcttaccaccctcgctacatcattcaagttcttggaaacatttaaagcatgtgaaacatttaaaacatttaagt

SEQ ID NO: 14304 - DNA, 122 bp, Homo sapiens
acaataaacacgagccaagaagcctggctaatttttaaattttctgtagagacagcctctcgttatgtttctgaggctggtctcaaacacctgacctcaggcaatccttccacctcagcctc

SEQ ID NO: 14305 - DNA, 122 bp, Homo sapiens
acatgcggtgggaggggtcatgggcggagcacgggcccagcaccagataggaaacacacacgcccttccctcagctctgatttgaaaatgccaagcacaggctgtgagacccgtttgctgtg

SEQ ID NO: 14306 - DNA, 122 bp, Homo sapiens
catgtgggtcccagcgcccgcgatgaggctgcctttgctcctttgccttcgcgtcgcagacgcagcacccctgccagtggcccagaagcccttggaggtgaagtcacagggaggttagctag

SEQ ID NO: 14307 - DNA, 122 bp, Homo sapiens
aattgaggcgaaaagcctctgcaggtgacggtacaggccaataccaggaggtcaagtcgccggtgtcccttcggcccttaagtccagggaaacgcacggcgagggacgaggggcgattcccg

SEQ ID NO: 14308 - DNA, 122 bp, Homo sapiens
gccgacggcatccaggtgaatgacgccggcgggtctgaggctggcacactcgcccgaagccgctctcacagccactgtgccgtgtgcagcctcggacactgggtatttcccctccctggagc

SEQ ID NO: 14309 - DNA, 122 bp, Homo sapiens
tcccgacctcggtggcagcactcccctccccgcccggctccctggcgtgccgctgctcttcggaggctggcagcctcgccctcaaccaccgccctcgggaaagtcctcgactgcctatcaaa

SEQ ID NO: 14310 - DNA, 122 bp, Homo sapiens
caaggtgagttactccaagagcagtctgcacctcaggcacatcacagcgagctgggcagccggggtggtcaggcagaaagagggctctggggctcagcattctggggtgccctcgaccttta

SEQ ID NO: 14311 - DNA, 122 bp, Homo sapiens
catgcctgtaatcccagcattttgggaggtgcaggctggcagatcacgaggtcaggagttcgagaccatcctggccagcatggtgaaaccctgtctctactaaaaatacaaaaaattgctgc

SEQ ID NO: 14312 - DNA, 122 bp, Homo sapiens
catggctggggaagcctcgggaaacttacaatcacgcagaaggcaaacgcaaagcgaacacgtctacaaggcggcaggagcgagagacagaactgggaagcgccggacttttaaaccatgag

SEQ ID NO: 14313 - DNA, 122 bp, Homo sapiens
agcacaaatgcaaagtgtaagagctgctctgctctaatcccacgaccttccccacagcgtcgccggcagggtgtgtcctcagacgtttgatttttgccaatgtgatggcagagaagtgtttc

SEQ ID NO: 14314 - DNA, 122 bp, Homo sapiens
gccagtgcctcctgcagtacagccctggagggcgtggggacttgggggcggtgaaatagccgctgtaggtccgcctctttcattgaagaaatttaagttcgtgtggttttaccttttccggg

SEQ ID NO: 14315 - DNA, 122 bp, Homo sapiens
agcctggatttgtgcctatttcttgttaattgcagacttttggaaagctcactttcttgacgaggcctttttgctccaaaatagtattactcctggtcacatggattgctaatgatgctcat

SEQ ID NO: 14316 - DNA, 122 bp, Homo sapiens
tattttctttactttgtgtttgaaataaaactgtttttttttttttgcagactggaagggcggcacccctatcagttagcaccgtttcaactggaggcggtatagccagttcccgcccctcc

SEQ ID NO: 14317 - DNA, 122 bp, Homo sapiens
atttccagtaagtgcgggtcataagcttgcctgaagtccctgccctatgtacacactgcccgcctctactactgataggatggtttagtgaggccctctgatcagccccgccgggtcagccc

SEQ ID NO: 14318 - DNA, 122 bp, Homo sapiens
aaggccgctccgaagctcacgttctggtgctctgtgctggggtgttcttttctcggagggcgcactcggggaaggtggaaaggtttcccccttcaggggtgaccaagacaagccgctaagcc

SEQ ID NO: 14319 - DNA, 122 bp, Homo sapiens
aacccacacccgcggggcggaggctcctgctgtgcacaagcccggggcgccggggtggggcggctgggtctgggcccaggtgtcccgaatccaaaagcatcccactgcgctgcctgtaaatt

SEQ ID NO: 14320 - DNA, 122 bp, Homo sapiens
ttttcccacccctgcttctccccgaggaggttgagctcttgagcaagttgggacttgggccggggcctggaagaatgattggctgggaggccgcgggagggaggccaggaggcccggaccag

SEQ ID NO: 14321 - DNA, 122 bp, Homo sapiens
ctcacgcgtcgggcccccatttactctcgttactgaggagacacggctccagttttgacccgactacggttgttttcttcgtgtgtaccgcgaaatgctgatgacgtccggttccgcgcagt

SEQ ID NO: 14322 - DNA, 122 bp, Homo sapiens
acacacatcatgatttgatgcttaacgcaattcatgaaatgagttaccactcacccccttcgtacgtgggtcctgcagggcacacgtgatggtgaaagctgaggcagcagcagagggtgagg

SEQ ID NO: 14323 - DNA, 122 bp, Homo sapiens
aaacccagatctgtaggccaaatctggcccgctgcctgtttttgtaaataaagttttattcgaacagacacactcctttgcttatgtacagtaatgtctatggccgctttcactctatgatg

SEQ ID NO: 14324 - DNA, 122 bp, Homo sapiens
cagctacgctttgcagggtttgagcaaacccctggatgatgggtgtgggggctctggccacgtcctctcctcatctaagggaccaggcctggggagacagcatgaggcagcagggcaccgtg

SEQ ID NO: 14325 - DNA, 122 bp, Homo sapiens
ggccagaaagctgtccagggctggaactggagctagtgggctgtgtggttaacgtggagacgtttgctgctcactggacttcgtttttggatatccagtaaaagcaagggtggccttcacct

SEQ ID NO: 14326 - DNA, 122 bp, Homo sapiens
ggggtcccagtgggaggtgggcagggtccagcctctaaggcccgatctgggtgccaggctcgaaggccccaaccccggtggggctctcagccggctctcggggactcgggaagagtttcctc

SEQ ID NO: 14327 - DNA, 122 bp, Homo sapiens
tcaggaccaaatcccaagtcagggccacagggggtcccgtcaccttttcccattaggcagcgggctgtgaggcgaatgtgcgtggcctgtggcttttatgctgtgtcgatgttaggtgtaat

SEQ ID NO: 14328 - DNA, 122 bp, Homo sapiens
tagacccgccacctgtcggctcgtcgtatcgcctgctccgcgctctagccaccgccggtccgaggtccccgtcagctacaaccccactcccaaggcgaggcgcggagctcctagccggttcg

SEQ ID NO: 14329 - DNA, 122 bp, Homo sapiens
gatgccgtatgtcagaactgactgactggaagtaactaaggcccactcaagcctggctcacggcagaaataggatgaatgctcatgtgcttgacagttcatccacttaatcccttcttgact

SEQ ID NO: 14330 - DNA, 122 bp, Homo sapiens
catctgccattttcttgtctgaccctctgtctagactggaagctctttcaggccgtggctcgggtctgacgtggctttgtactcccagtgtctagcgagtgccagatgtgtagcaggtacac

SEQ ID NO: 14331 - DNA, 122 bp, Homo sapiens
gctcgtgttctctccgtccccgatccactcgggctccggcagctgctgcttgggcgccttcggcatcgcggtggcagaactagaaacgagttacagatagaaactagaatatgctttttaaa

SEQ ID NO: 14332 - DNA, 122 bp, Homo sapiens
ccgcatctatcagatgagctctttctagtgctctttccccctcaaatctccagagaaacacgcacatttttgcaaacacacacgatgtatctatgactgcacacacaggttcatcaacacca

SEQ ID NO: 14333 - DNA, 122 bp, Homo sapiens
gggacttttttgccggtggccgtggaggaatcgtcccgttgagcaatgaccccggtgacgcggctgagggctataaaagcaaaagttgtggcaagtccagccggagttagcgacagggaggg

SEQ ID NO: 14334 - DNA, 122 bp, Homo sapiens
tgaccgggttgtcggggggtcagggactctgccctcagccactttggctgctggttctgccgagccactgcccgaacagcaccccggatgcacccgaggaggtgaggctctgcggaccgggt

SEQ ID NO: 14335 - DNA, 122 bp, Homo sapiens
cctcggtctaaagctccgctgcagctgctacctgctcatggcgcacagccgctgcaaacccggactccgcccgccgacaccagcggcctcgaaaccctagagccagactccacctagtggcc

SEQ ID NO: 14336 - DNA, 122 bp, Homo sapiens
ggtgggggtcgggcccaggggctcacacctctctcagggagctgaagctgaccaggaccacgctgatgatgaagagcagcatccccttccacagtgtgtccaggtagtattcgagcacgaag

SEQ ID NO: 14337 - DNA, 122 bp, Homo sapiens
gggcgatgaaggagtagctcttgttcctgcggtagttctcataggggtcatccagagccacgcccacgcctttatactggtcccacttatcccggacgtccccgcccttgatggggtcctgg

SEQ ID NO: 14338 - DNA, 122 bp, Homo sapiens
aattacagccagagtcagtgggccgaagtggtaacccatgcacagtaaacctgctttgcacgcctagtcctcgctggcagacagagctgtgacccagcatctgtgggttcgagaacttagat

SEQ ID NO: 14339 - DNA, 122 bp, Homo sapiens
actgcgcacagagaaatacgcaaactactgcctaatgcatggagccgaaggaaatttccacgcatggagcatcccgcacactaagtgcctagtcagccaggtctctgctagggacgatgact

SEQ ID NO: 14340 - DNA, 122 bp, Homo sapiens
taccactgacggcaccggtggcagactcaaatcagccatttctcaggcattcacagacaccgctgggctgatgatgctgttggaaaaaaagtcatctgcccttgcctgcctcccatattctt

SEQ ID NO: 14341 - DNA, 122 bp, Homo sapiens
ggtctactagggtctcgctcctccaagtgcagtctgaggaccagcagcatctgcatcacccggagcttgtcagacacgcagatgctcgggccccgcccaggcccgccaaatcaaaagctgca

SEQ ID NO: 14342 - DNA, 122 bp, Homo sapiens
gccttaggggaagagccaccctgaatgtctctgggcagccaggaacctgctcacagcctccgcgacctcatcgggaaagaggcaagactcatgagagtgaatggcccacggggagttactat

SEQ ID NO: 14343 - DNA, 122 bp, Homo sapiens
cttagctgttctggtcctttgagaactcggaagctcattccccatccccctcaaccagtgcgcctggcgttcagggaggggacgaaatcagccctggctgacaagtcccgggagcctggcgt

SEQ ID NO: 14344 - DNA, 122 bp, Homo sapiens
caagcaaagtattttcccaagttctgtgagttgctaaaacaaattatcaaaactgagaggcgttgtgagaattcccaaatttgaagtcagtggagcagaactgttggcagcctgggcacatc

SEQ ID NO: 14345 - DNA, 122 bp, Homo sapiens
tgggatggggagtccttctccggctggaggctgagggcaggagctctcggtgagaggctgcggccagcggtgctgtgagccgggcgggggtcagcgcgggcggccggggcgaggctgacagc

SEQ ID NO: 14346 - DNA, 122 bp, Homo sapiens
tctgctcatcagtctccttcctggggcgtcgtggaggggatgaccccatgcggctctcctcgaaggagcttgaaactggatcccaacaacagcccgatggccgccgtccagggaaacgcctg

SEQ ID NO: 14347 - DNA, 122 bp, Homo sapiens
taataggcttgagcaccgggtggcagatgttctatgcagtgtggttcaagtttctttgaccgcacttatatgcattgctaatatggaatttaagataccatacacagtctctcatggaccta

SEQ ID NO: 14348 - DNA, 122 bp, Homo sapiens
ccctctgagctggcctgtggggcacgggaagccccctggatgggaggcggggccacaggtcggctagagggtctccaccaggcccactgaacagaaccccacggctgccagaatgttccctg

SEQ ID NO: 14349 - DNA, 122 bp, Homo sapiens
tgcctggtacttccagccaacctcgtgcgccaggcgccccagataggcaaactttcttgtcggcttcagacgcacgaccttgagggcagcaggaaccaccatccgctttcttgtcgtagagc

SEQ ID NO: 14350 - DNA, 122 bp, Homo sapiens
gaataccacgcagcagtgaaaattaaactgcagtcagctgcaacgtggatgaaactgtcacggcgtcgaccaaaaagacacatgcacgccacacacaaaatacactatgataccatcacact

SEQ ID NO: 14351 - DNA, 122 bp, Homo sapiens
ttgctgattaaaggagcagatgaaagaacttagaagaaactgttccttgaatttgaggcccgaagagaaaagaactaaaaggcagcagatgttcacttaaccaagtcacacggggtagattt

SEQ ID NO: 14352 - DNA, 122 bp, Homo sapiens
tctgccctcagcggcctggtcaatgaggttggatcgttggcccagaaagccacttcctgccgcgactggagccagccgtcgttgtgaaaattccccccacggggaaggaagtggctcttggg

SEQ ID NO: 14353 - DNA, 122 bp, Homo sapiens
tagaagagcagagagagaggaaaagaagagggagaaaaaaataaagaaatgatagaaaagcgtaaaatttaggatctagaaaatattataaagagaggaaaacagatgggcagtcctacctt

SEQ ID NO: 14354 - DNA, 122 bp, Homo sapiens
gggacaggcgggttgtggtgaaagctgcagtcgtgaaaaaggctattgtttaatctaccccgtccctcgctgaagctatggcaacaaattccgttggtgaattaactatgtcattgtgcact

SEQ ID NO: 14355 - DNA, 122 bp, Homo sapiens
accatgcaaggggctgtcgactggggagagggggttgaagatgcgcaggacgcatcactgcgagccataaggttgcagacaaatggcattcgtcacggaattccctgggtggttcgcccgag

SEQ ID NO: 14356 - DNA, 122 bp, Homo sapiens
attctcctcccttgccctgccggggtcagagcagcagccccctcttcccattctgaggcccgggatgctccccctgggactggcggagcacacagtcaacttctgagatttttcctaccctc

SEQ ID NO: 14357 - DNA, 122 bp, Homo sapiens
gaccccgggggcccctggaggcatctcttctggaggagcaagactttcttccacgggttccgcttcaccatctgcggcatctttagtctgcaggggaagctccggcagggagaagggcccca

SEQ ID NO: 14358 - DNA, 122 bp, Homo sapiens
gctctttctccttaatcagagccccccatgccctttgcagctcagagtcgtcttcctcagcgccaggcgccctgtgatccactttcttcgtattcttttctttggtcttgggtgcagatcct

SEQ ID NO: 14359 - DNA, 122 bp, Homo sapiens
ccccttgctccccgcggcctcccgggtcagctggtgctggcgtcaggcgctgggcgggctcgccaggacctggcaaggcttgtttactatggccgatgatctggagcagcagtgagttaatc

SEQ ID NO: 14360 - DNA, 122 bp, Homo sapiens
tggctcaacaatatcatactttgcatttctcccccgagtcacacacggccattggcataccggcagccacatagcgtgtgcccagcaaacacctggtgtacctctactgggtctcactgtat

SEQ ID NO: 14361 - DNA, 122 bp, Homo sapiens
tgggcgagagcaccgagagggaacaggcgaaagggtcccaaggccgaaaataatgttcaacgcttgtttcaaccaggccaggggagattcctttttgggaagagggacaaagggttttttgg

SEQ ID NO: 14362 - DNA, 122 bp, Homo sapiens
agggggccgggctgttccaatctgctgtctacactggcggcggacaaaagttgtcctcttcgtggtaggaaaacgcaatcgcgttaatccgttgggccgctgtgaaagcctttcccccaccg

SEQ ID NO: 14363 - DNA, 122 bp, Homo sapiens
gattaacatttagacaactttggagctaattgcttacctaatttcttttgttttgattgtcgtaactgtttctagtacaaagaaaatcccttcaaagttacatagcttgctattacctgttc

SEQ ID NO: 14364 - DNA, 122 bp, Homo sapiens
tctaagctgagacaggcatcacagggtgacattgccagaggctgtcaccttatttacatacgtgcaattgcatatatgtatgtatacaacatagacatattatacatgcataatacaggtct

SEQ ID NO: 14365 - DNA, 122 bp, Homo sapiens
cacggcctacctcctcatccttgaggcctgctttgggaagcctgacttggtgccagcaggcgacatcaggtgctcctcacccctgcccctgtatactccactattaagtagcacatcacctt

SEQ ID NO: 14366 - DNA, 122 bp, Homo sapiens
cttataaacagccagtctacaagaggcgctagttgcaaagcttccggttctgggggaaggcgtggcttccgcgctctttgaaatgtccggcgccggaatgtctgggtgctttggttggagag

SEQ ID NO: 14367 - DNA, 122 bp, Homo sapiens
gcacacagtaggggctcagcacatattccttgcaggcaggagtcgttgctgtcagtcattcggaagctgtgtgctgcatgattctgtgcggaagctgatagtgctgtgtcctgagcgatgtt

SEQ ID NO: 14368 - DNA, 122 bp, Homo sapiens
cggatatgatgggtcacagactccccgtccgaggtgtcggtctgttcctctcgccgctcccggctcccgctgcggctgttggaactggagcgcagcccatcttgaagccctgcggggagggg

SEQ ID NO: 14369 - DNA, 122 bp, Homo sapiens
ggtcacgagcccgggctggtacagttggtgaattactacaggggtgctgacaaactgtgtcgcaaagcttctttagtgaagtaagtgttaagaccgctgttttccattttttacctaaatga

SEQ ID NO: 14370 - DNA, 122 bp, Homo sapiens
aatcccatttcctgtttctgctcctggaccgagggggcggggccgggtgcctccgaggggcggggctggtgcaactccaaaatggctgccgcggggagcggcgattagaacgggttccagtc

SEQ ID NO: 14371 - DNA, 122 bp, Homo sapiens
caggctgggtgcgggtatagattcacagccatcagtggctcaggcattccatcaggaagacgtgcagcccgcaccccggctttagcgcagccccagtgcccagtgcggggccgctgcctttg

SEQ ID NO: 14372 - DNA, 122 bp, Homo sapiens
ggggctagcgtgtaagcacagcagcacaccagccgcctcgcctgcggcctccgacagacccgcaggaagaaactgaccctggcaggagctctgcagagccaaatggcattctttctccatgc

SEQ ID NO: 14373 - DNA, 122 bp, Homo sapiens
agtctggcgggctggtctccaggctgctctcgtccgaggctagggacagcaaaggagacacgggtgggtgagacgccggaccctacgagggcctgctgcccttctggcgcgggcgtggaggc

SEQ ID NO: 14374 - DNA, 122 bp, Homo sapiens
ggcggacaccgcttcgccccggcaacagcctgagttctgcggtgattggttaagagacgccgtcactcgcggcataccgaccaaccttgggacagacaggcgccgtggggacagtggttgtt

SEQ ID NO: 14375 - DNA, 122 bp, Homo sapiens
gaggcggatggggccccggggggcttggggcaaccacgccaaacaaggcaaggaggggagcgatgtataaaaccgggcccagggctgagcacctgcctgcacccctactgtgccatccagaa

SEQ ID NO: 14376 - DNA, 122 bp, Homo sapiens
cttccccgccaagcgtttcaaaagtaacgacgcagcacgtcgtcaggtcctttgcgcaggcgcgacgagcctttaagcccagccccacgcagcggggacctgccctttctctcagccttcct

SEQ ID NO: 14377 - DNA, 122 bp, Homo sapiens
gcaacatgatgaaaccccatctctactaaaatacaacaacaaaaaattagccgggcgtggcggcgtgtgcctgtagtcccagctacttgggaggctgaggcaggagaactgcttgaacccgg

SEQ ID NO: 14378 - DNA, 122 bp, Homo sapiens
cagcccactgcaccggtctgctgccatttcccgcacgcatttcaggagggctggggacgccggcttctgcctgaggatttatggtccaggaaatgcattttaaatggatcccaggatgctcg

SEQ ID NO: 14379 - DNA, 122 bp, Homo sapiens
cgcagtacagctccccttctatgaagaagtagcccttttgcttgaggttgaggttgcagtcggcacacacgaagcactcagggtgccggtacttatcccgcgccttcaccacagcaccgctg

SEQ ID NO: 14380 - DNA, 122 bp, Homo sapiens
ctgcggactcgacatgatgcaggctccagcagcccttgcctttgcccttcagatccctggcgtccactggagccttccagggctcaggtctggcctttaaattcacctgctggggcagaaac

SEQ ID NO: 14381 - DNA, 122 bp, Homo sapiens
ttcagccggtgggtggcggggattaggcgtgaagcggttcagcaggcagaggttctcggacgccctccggcgaagccacctgttgatgcttttgactttctgtccttgttcctcgtcccatc

SEQ ID NO: 14382 - DNA, 122 bp, Homo sapiens
gagcaatactcattagcaacatacttttgtctttcttgtagccttgatttcaaatctagtcgcaaatcataagcttttgtgttgctcagatgttccttctttatcttaatgagaaaactttt

SEQ ID NO: 14383 - DNA, 122 bp, Homo sapiens
ggggccctttccgcattgcgtgtaaaggggaaattcggaacccagccgtgggcctttccgcgttgagtgtaaaggggaaactcggaacccagccgtgggcctttccacgttgcgtgtaaagg

SEQ ID NO: 14384 - DNA, 122 bp, Homo sapiens
ctcaaggcaacaactcctctggacttcttatgtgaggacaataaactttagtgtttttcacgttttttgttacatggagctaagtgatttctaacagtcacaggggataagaacaaagactg

SEQ ID NO: 14385 - DNA, 122 bp, Homo sapiens
gtgagtaaattctagtttcccactaggtttcccaggcccaccaagtcaatttcaagcaatcgcaaaatataattaatggcaacaaaaccaaaaggaaggaagggaaatgaaaaaatacttat

SEQ ID NO: 14386 - DNA, 122 bp, Homo sapiens
agacaagtagtagtttgccaagcacagaaatggaagaagaaagatactattctgagtagacgaaacagcaacacaagggcctagttcaggatgattgaaacatagaagtcccaaggataatt

SEQ ID NO: 14387 - DNA, 122 bp, Homo sapiens
tgctgagcgcagctgttgcgggtacggtcatgtccaactccttcccagctggaaacgctgcggcgggtggtatcaccagtggacaggcgaacttcaggccagagagtgccttcctccagggc

SEQ ID NO: 14388 - DNA, 122 bp, Homo sapiens
gaagaggtgttgactgctgtgttgaaggcaagaggcagttccgttgaagcccagtgctggcggagaggccctgcactggtgcgctcacacagccctgtgtttttgtgttttaggtcggtagg

SEQ ID NO: 14389 - DNA, 122 bp, Homo sapiens
gggggttaacccagatcgggactacgccagcggaggcctgagagaggcaccattcaactccgctcaggagtacccttggaagagtcgttagcctaaagccagactaccacgggatccagagg

SEQ ID NO: 14390 - DNA, 122 bp, Homo sapiens
ggctgagccggccggcggcgggcaaggatgcggaacttctgcgctgcccttaactgcacgcggaagagcacgcagtccgacctggccttcttcaagttcccgcgggacccggccagatgcca

SEQ ID NO: 14391 - DNA, 122 bp, Homo sapiens
ggttgtcctcttcgctgctccgtagtgacggggattgttgtgttgcagaaatccggcaatcgacctgaggacttgcgagccgctcagctcccgggacgtttggtgcgtcttctaagggcgtg

SEQ ID NO: 14392 - DNA, 122 bp, Homo sapiens
gaagctagggctcggggaccacatgggtgcccaaaggcctgaagatgctgcggggaggaacgatcagggtaggagaaggggatctgttgcttcctgtggggccaggatccactggtgaggga

SEQ ID NO: 14393 - DNA, 122 bp, Homo sapiens
ccttcgagtttgacgacggccaatgcgcccccaggtacagtctgctgcgccctccccacgcggggaggccccggtctaacctaagacccccaagttccccctcaggctcccgcaccctccag

SEQ ID NO: 14394 - DNA, 122 bp, Homo sapiens
cccctcccacctgggcgggcctctcctggcctctgcaagtcccgcctccactcccctgggcgcctcccacccaggtgcagactcaccagacagcgacacagacggcaggggtcagaggggtg

SEQ ID NO: 14395 - DNA, 122 bp, Homo sapiens
aaaatgacccatagaggaagatctacagatgacagaatactgggagatgaagagaaaggacgttttagtgagtgctttttttgcacatgaggcaatagatttcaaattcctgtggaagaaat

SEQ ID NO: 14396 - DNA, 122 bp, Homo sapiens
ccagagcctcgctgcccactctccttccaggttggaactcacatcggacttagcatccagcggcggctcgctggacgcctccatgggcagcgtctgggacttgcggcccggactcgagagaa

SEQ ID NO: 14397 - DNA, 122 bp, Homo sapiens
gataaacaaataatacaaataaactcgacctggaacagttgagtggatagaaacagcacacgtaagatcgggtgtgcacgaggagatgcgaacaccgggaacagtcgagtgggtagaaacag

SEQ ID NO: 14398 - DNA, 122 bp, Homo sapiens
ttgagaaatgaatataacagcagtcttcatagatgccatattcatggcaactctgtcccccgccaacaccacaccctggaaaaaaaccaactttctattgttggaatgaggtaacattttca

SEQ ID NO: 14399 - DNA, 122 bp, Homo sapiens
gggccacgaccttctgggagccgatgatgttgacagcctggcattcgtactggccctggtcgtggagggcaacaccagagattctaagtgttcccgatgacaggaccaggtgccgccggtcc

SEQ ID NO: 14400 - DNA, 122 bp, Homo sapiens
tcgtcactgcggagggcaaatggaagggtctgcagaaaacgtgattttgcacgtgccctacggacctaggaactccagtcctcagtatcgcccctcaacaaacacatacatgtgggctcacg

SEQ ID NO: 14401 - DNA, 122 bp, Homo sapiens
ccatcccccaagtctgcacggggagaagcggctgtgagcctcagcaccagggaaacgcagcgctggggcctgggcaggactgatcgctccagcctttatctcagctgtaacttcccagtcga

SEQ ID NO: 14402 - DNA, 122 bp, Homo sapiens
tggagggcttcttcccatccccggcgggggggtgagtgacgtctgctcccagaaagatgacgggctgctggaacaccggcggcctgcggagaggagtggcgtcaggggccacggtgagacac

SEQ ID NO: 14403 - DNA, 122 bp, Homo sapiens
aaaggatatctatgagtaattgtatttgataatcttagtgaaaggattattttaaacaaccgctgctaagaaggtgactgatttgagttcatctctgggcttcccctttggctaaaatgcta

SEQ ID NO: 14404 - DNA, 122 bp, Homo sapiens
cctttcctcagtaccttgacgtgctggctccttacgtgaaccaagtgaacctcatccgagcgggggtcccaaagatcgtgagtagatctcatttggccccctcgccccattcagagttcaga

SEQ ID NO: 14405 - DNA, 122 bp, Homo sapiens
ctaaaatttaccatcttaaccattttaagtatatagttttgtgacataaacatacctgggcgcggttgctcacacctgtaatcccagcactttgggaggccgaggtgggtggatcacctgag

SEQ ID NO: 14406 - DNA, 122 bp, Homo sapiens
cttccagtttctatcaagggtttcagaactctcatacttcctgtagcagtattccagcttcgcagtcatttagttcctcttctgtgtatctttttggaagtgttttttactggctggactgt

SEQ ID NO: 14407 - DNA, 122 bp, Homo sapiens
atttatatcttcttttcctcccagagggcaggaagttgccagattcatttctgggcttggcgccaggctcaaagtaggtccttgttagattcgctggctgagctggtgaggatgctgtattt

SEQ ID NO: 14408 - DNA, 122 bp, Homo sapiens
gagttggagtcggaaagagcagccccagtcgccggggaagcgggaggtcagtgcgggctccggcggcccccaggctccgagcgcccgcccgcggccccggcccggcccctagcccccgccgc

SEQ ID NO: 14409 - DNA, 122 bp, Homo sapiens
gggttgagccgggaagccgatggcggcggctgcggcggctccgattcctcgctgactgcccgtccgccctcctgcatcgagcgccatgttaccgacccaagctggggccgcggcggctctgg

SEQ ID NO: 14410 - DNA, 122 bp, Homo sapiens
actagtcaacaccaaactgaataaccactatgttgtgagaaagtgctgggctagctgactcggatcatctcctagagtttaggagaaataacaatcacaaagtttgaatttgcaaaaccttt

SEQ ID NO: 14411 - DNA, 122 bp, Homo sapiens
cagtgccttcgtgggctcggctggcaggggtggtccctgcagcctccgccctcccgtccccgcccaccctggccctgaccacacggggcttccaggtgcatgtgtgggtctcggtgggcaaa

SEQ ID NO: 14412 - DNA, 122 bp, Homo sapiens
tctccagccagtgattgctggagcgccggcgcgaaagcctgacgagaagtcgggagactgcgcggcctaggcgactcctgagggagcggtgccgcgccggggcgatcggcagtcgcggaacc

SEQ ID NO: 14413 - DNA, 122 bp, Homo sapiens
gactgacgtggacccgggccctcctcggaagcttgggaacctgtgagcccctcagctcctcgcctcactttgcctgtttgaaaaaaggagttgtttgagaggaagagttaaggctcaaaagg

SEQ ID NO: 14414 - DNA, 122 bp, Homo sapiens
tgaacatccaataccctctgacctttttctggtccatgggcaccactaaagatatgtagccgccctactggctccacgttacacctcaaggattcactggattgctctgtctcctcctcttc

SEQ ID NO: 14415 - DNA, 122 bp, Homo sapiens
tttctaaatgtggttattattattattattatctctcaacagggcccatttggaggccagcgctgagaagtggaacaggttgctgatgtccttagaagaactgatcaaatggctgaatatga

SEQ ID NO: 14416 - DNA, 122 bp, Homo sapiens
gcggcccaggcccgaggtcgcccacggccgaaggggggactcctctctgagaccgcagaacggggctgaggccctgaaccccgtgtgctcgtcctaaaactaggacgaatgtaccagacgac

SEQ ID NO: 14417 - DNA, 122 bp, Homo sapiens
cgggcccgggccgctgcggaggacctttctagtgcccgagatcaagtcgctggaccagtacgatttctcgcgggccaaggcggcggccagcctggcgtgggtgctgcgggccgcgttcgggg

SEQ ID NO: 14418 - DNA, 122 bp, Homo sapiens
tttgcggcttggctgacttctgagtcagcggctggggcatcggcttgtgctccgcaaggacgagcaggggtggcccctggccgagccaccgcacgctccccttccgcagttcctgacggcat

SEQ ID NO: 14419 - DNA, 122 bp, Homo sapiens
agagggcctggtacttaggggctgatccgcaatagcgaatggggatagcccgaagtgaggcggcagctgcgccggggtcgcgacctcactggcggagaggaaccgcacccgggggaggcgct

SEQ ID NO: 14420 - DNA, 122 bp, Homo sapiens
ttagcacttagaaacgggttaattgtgggcaacctggttgggtccccatccacccttccacgctgtggaagctttgttctttcactcttcacaataacccttgctaccgctcaaaaaaagaa

SEQ ID NO: 14421 - DNA, 122 bp, Homo sapiens
aggcacaagcctcccactgcccctttccccgccaagtcccgcaggtctcgcagtcgcgggcgcccccaccccacccctgcccaaggccagggtcgcagtcccaccgggtgacggcagtcgcg

SEQ ID NO: 14422 - DNA, 122 bp, Homo sapiens
cctacccaatgtcggtcctacgcaatgtcggtcctacccaatgtcggtcctacgcaatgtcggtcctaggcaatgtcggtcctacgcaatgtcggtcctacccaatgtcggtcctacgcaat

SEQ ID NO: 14423 - DNA, 122 bp, Homo sapiens
gtgaaggcaaagaccacctcgccctggtctatctggaattggctgaaggccgaggtgggccgcccgcccaccaggagatgcccatactggggtccctggatgaggcggtatgctgcctctgg

SEQ ID NO: 14424 - DNA, 122 bp, Homo sapiens
gcacagacccccaggcccttcaactcgaactccctgggcctgacacaataggcttctcttcgtgacagggatgtggaggaggaaggcagccgtgttggggagggggcggattctgggtgtag

SEQ ID NO: 14425 - DNA, 122 bp, Homo sapiens
ttaacggccttggactgttctcatggctcagtcttggtctctctccccagcagggcaaggcgccgggaaggcacccgagatgacagcgccgagccccataggcgctagtcccgccctggacg

SEQ ID NO: 14426 - DNA, 122 bp, Homo sapiens
gctaagatgcgggactgattggctggaacggggcagagactgctgaggtcaaccccgcctcgcccggcgtctcccgggcccggcttgtggagttcacgtaggagcttctcataccttcccgc

SEQ ID NO: 14427 - DNA, 122 bp, Homo sapiens
caggttggccagttagctgcagtcggctctgagggatggagacccaggatggggcagatccgaagggcagggaagggcacggaggggcactcctgaagggctgggcttgggagcagcagggg

SEQ ID NO: 14428 - DNA, 122 bp, Homo sapiens
tggtgggaaaggacttcggctcttccagccttgctggccacccttctgtggacatgcctccggcccagaaagagtggggtttgccaaggtcaaacacagtctagtccctgccgctgccactc

SEQ ID NO: 14429 - DNA, 122 bp, Homo sapiens
aaggtaggtgggcctggcccattttttcagagactggttacctgacgtgaggagggcagacgataccagggtgaagatgcgcctcctgttgaacctagcacagcaggggcctgcttggcctt

SEQ ID NO: 14430 - DNA, 122 bp, Homo sapiens
ctgcatccagcgacctcatggggtgttgtgagccccatgaggggtgcagggggcactgcccggcagatgtctgctcaataaatgagctgctcccggtcgggccccacagcttggctcccagg

SEQ ID NO: 14431 - DNA, 122 bp, Homo sapiens
atttatttcatttcatttttggtccaatgcattttgttttctgttttctacaagggagcccgaatcagggcctcagaaaaacaaggccgagctgccaactggaaatgtttgctctgggggcg

SEQ ID NO: 14432 - DNA, 122 bp, Homo sapiens
aagtccatggatgaaactgtaatcaggtttaaaaattaatatggcccttcaatccctttacgagtcccttgatcactgatctaatctgtttggtcagctttgaaaacaatggctgagggtag

SEQ ID NO: 14433 - DNA, 122 bp, Homo sapiens
ttgcgcaggtagctgaagagctcacagcccggaacatactccatgagcctgcagaggaagcgctagtcatgccccgtccagcacagcctgatgagaaacgggtggatgattccttcaggacg

SEQ ID NO: 14434 - DNA, 122 bp, Homo sapiens
agggaactccgaggttttacctgtctttaatttatgcagcattttccaattgtgccatcccggcaggtgtgaccgcttttttgcggagcctcagtgctattttacctgcttgagtctgtcaa

SEQ ID NO: 14435 - DNA, 122 bp, Homo sapiens
ttttcccgagcacctttatatacaacacactgcaggagacactgagtgctggctgtggcccgtggctgccgggttataatcaggatgtggcgggaaattgaggaggcaaagccaatgctgaa

SEQ ID NO: 14436 - DNA, 122 bp, Homo sapiens
acaggacattgcgatggggtgctggcctgccaggagcacagatacagagctagagcccagcgaggcctgtgctgcgaggggctgtgctgtgccaggggaggccccgcacccgggaagcccag

SEQ ID NO: 14437 - DNA, 122 bp, Homo sapiens
ctctggagagaagggtccaaggggtccaaggagtcggagttgccgcagccgccaggaacccgggctagaatctgcagctgctttcagccctggctgcccctggttagacgccgctgatgccc

SEQ ID NO: 14438 - DNA, 122 bp, Homo sapiens
gaaagggagctgggagagccactggtcctcggccacctgaggggcttggccagattctgccgggcagggtgggcccagcctgcatgctccctccccccagggcctgcagcttgtccccttcc

SEQ ID NO: 14439 - DNA, 122 bp, Homo sapiens
ggacagccctgcctcacaggctctgaaggagggtgacctaagatcaagcacgcagagcaccgcacagcgcccagcatgcatgtgtacaatgtcacattctacactgaaggaggctgagacag

SEQ ID NO: 14440 - DNA, 122 bp, Homo sapiens
ccgtttgctaagtagaagtacaatggacaattctacttcctttatctcatgagtcctcaccgcaaccctgtgtatgtcgccactttgcagacaattaaatgaagacacagaaaattaccgaa

SEQ ID NO: 14441 - DNA, 122 bp, Homo sapiens
cttttggtgtattgtaatgaaatacactgtatgaaaaatttactccccactgaaaattcacggaacagaagaacaagctattaccaaaatctgttgctcaatgctgccatctataggagagt

SEQ ID NO: 14442 - DNA, 122 bp, Homo sapiens
gtgtacttgaccaaagcgagcctgactgaccctggtagtaggcaaagaatttggcctttacgtttgtatagttaattaccaggctaacaatgcagcaaggatagtaaagcattttacccctc

SEQ ID NO: 14443 - DNA, 122 bp, Homo sapiens
cgggggcgcggggtccggacgcccctctcacgcgtgtcctgaatgcgggccacccggggacgagtctcgtccagctctgtcctgacccaggagacccggggacccggctcggagtttgcagc

SEQ ID NO: 14444 - DNA, 122 bp, Homo sapiens
aggctgggaagcgctcttgcccagggcaagaatccagctccgggtgaggacttgaaacagcgcgaggcgggaggacgcgtcagaaagggttttgctaaggaaagtttcgcgacaggaggtgt

SEQ ID NO: 14445 - DNA, 122 bp, Homo sapiens
agcgtgcctgccttagctcggtttactctgaacagctgcaggtcagtgcgtggttacagtcgccggaggtttcctacttaagagacgcccgtctcctgaaaagctaggtatgtctttgctaa

SEQ ID NO: 14446 - DNA, 122 bp, Homo sapiens
gattcattaacatgaagtaactttgcaagacaaatcctgacatctcagcctccagctgggcgcggaattcaccgaacagttcaccaactgctttggcgcagggagaagactgcacccccagg

SEQ ID NO: 14447 - DNA, 122 bp, Homo sapiens
cacatctgacgcccctttcccatggggcacagcacgcatgcgcgatgggcactccgggtgcgtcagctgattacctgatttcatctgggcagatgtgatggcacaagggcagtgaccctgtg

SEQ ID NO: 14448 - DNA, 122 bp, Homo sapiens
ccgcgccgcgcccactgcgcaagcgtcgcccgcccaggccccgccccttcctctcccggacgcccgcctcttagtgtcgtcacaaactcgtgacgtccccgcgtgacctcaccgctgcgggg

SEQ ID NO: 14449 - DNA, 122 bp, Homo sapiens
gtcaatggacatttgggctgagaagtcttacatgacagaatgcttcctaccctgatctgacgttatttccaaggattcaaaggtaactgcttcaaaattaaacaaattatagaaagccatca

SEQ ID NO: 14450 - DNA, 122 bp, Homo sapiens
cctttatgtatgtaccctgtgcgcctggagaacaaggactcagcaaacgcatcccagggccgagtgcagggcctcgcagtcaggaggcactctattaagctgagggcagagaacttggatgc

SEQ ID NO: 14451 - DNA, 122 bp, Homo sapiens
cgccaggccccgcccccaccccgccaggccccgcctctctctccgaccctggacagtccccgggacccaccccgcccccaggtcctgcccccgcccgcctccgcggggcctcccaccctccc

SEQ ID NO: 14452 - DNA, 122 bp, Homo sapiens
ctggcttcttttgaaacactggcacatccggcaacactgcctcgccttcctgcctgatgacgctgagctggagctgagtaatgctgcccctcccggtagcagatgtgtttgggagttcactg

SEQ ID NO: 14453 - DNA, 122 bp, Homo sapiens
gatgctgaagaggcaggggtcacacagaaggacggagtgatgaggctctcctggcaggggcgagaagaggcgctcaccaaaagtcactggccaagccctcctctggccttctaggccgtact

SEQ ID NO: 14454 - DNA, 122 bp, Homo sapiens
gaagccacaaaaggaatgtctgaaggactcagatgagcacaaatgctacattactactaacgaaggctgtccttatttgaaattattctattaaaaacgggaaaatgcacaagaatgactcc

SEQ ID NO: 14455 - DNA, 122 bp, Homo sapiens
ctggcctcaaggaatcctcctgcgtgggtcttctaaagattcagctgcttttggatcaaccgatcgccttaagaccctttaactcgaacaactgtcacatcctcggatccgcgaagggctga

SEQ ID NO: 14456 - DNA, 122 bp, Homo sapiens
tgaagagtcttctcagtatttaactgtgttcccaaatggaatcagccttaccaaaattcacggtgacttcttttgacattttgcaaaaagtaaataaataaattataagtatgacaagtgaa

SEQ ID NO: 14457 - DNA, 122 bp, Homo sapiens
gcaacccagagccaggccaagatccggccccggcctctggcacccgacgcagatgccaggcgcccacaccccgcgagcccgcacgctttacctgcgctgctgctgccaggatccacctgccc

SEQ ID NO: 14458 - DNA, 122 bp, Homo sapiens
cagtgaaaaggcactaaaattgctgtcttctcaatgttctcccattattagatttctttccgtggatgtgcggagggggaggggggcagagagaggcggcgggcgcagggtgggggtggggg

SEQ ID NO: 14459 - DNA, 122 bp, Homo sapiens
gccctgagacactaaatggcgggggggtggggggaggaaagggaaggcggcagagctccccgagccgggacagtcacttactctacaggcagtggggcccgacacagacagcgccgcccccg

SEQ ID NO: 14460 - DNA, 122 bp, Homo sapiens
tccatctgtgaaatgggtacgtggacagacctgtccagtagcctcccatgtgagaatcctcggactgagagggtactaggagggctaatacagcgcagccctgtgattccccacctctgtcc

SEQ ID NO: 14461 - DNA, 122 bp, Homo sapiens
ttcccctggaagctgctgcagtggtttccaccggcccttaaataaattctgaagtaatcacgtctttgctctcctcctcacgcacacgcgcccgcggatacactcgtctcccccagagccgc

SEQ ID NO: 14462 - DNA, 122 bp, Homo sapiens
ccggaagtgagatacaacctccccattctaggagaggtggtggcctggggccataggggccgccacccgctctggttccctttctcctggggctctgcttgaactgtgactggctctgggtc

SEQ ID NO: 14463 - DNA, 122 bp, Homo sapiens
gcaacagcactctaggcgcaggcgcagaggcgacctccaggcagggccaggtgggagggacggtggggggtagggtcgcgcggcgccctctgcgcctgcgccccggcacgaggtggggcggc

SEQ ID NO: 14464 - DNA, 122 bp, Homo sapiens
ttcttaacagtgcccccttttcttccatgactcatttattcacttggtgcctaatattgccgactcctcaactagaacataagaaatcatctctgaccaaaacaatctacaatcctaaggtg

SEQ ID NO: 14465 - DNA, 122 bp, Homo sapiens
aaaaaaaaaaaaaaaaagtacccaaagtgtatagcacaagtaccaatcacgaagtatgagcgtaggggactggtaagggtttgctgttttcacctaccttctttggaaatactggatcccaa

SEQ ID NO: 14466 - DNA, 122 bp, Homo sapiens
ttactcgggccctgacgttgtcaggaggccctgggggatcctgctgaagctgcgatttggcgcagagctgagatgtctgagctctagacacagggacctcagtgtcaaaagatttgggaaga

SEQ ID NO: 14467 - DNA, 122 bp, Homo sapiens
agtgacacacctcacccatgaaagacctgccagagatgagtttgatccccagcttgggggcgtccagtggtgaagtgggaagaggagtgacatgggtactggtgagcactgcatgatgatgc

SEQ ID NO: 14468 - DNA, 122 bp, Homo sapiens
aggcaagcaggagtgctctattaggataagcaagtttgacaggaagaagctactcttctccgaattacacagaggtgatgtgttcgtattgcacgtagacgtgtgtataacaggacctcctt

SEQ ID NO: 14469 - DNA, 122 bp, Homo sapiens
gtgtggtgaaacagaaaaaaacatgtttaataaacggagattgttcttttatcgctgtgccgactttcttaggcagggctctccagacctgtacggtggtaagatctgctttctgaaaggaa

SEQ ID NO: 14470 - DNA, 122 bp, Homo sapiens
tgattacggtaagatggaagaggaaagtatcttgaggcttaaaagctgtgtaattccattcgtaggaaccagtatggcttactaaatacagtgttgtcatttcctgtgaaagagagagcgag

SEQ ID NO: 14471 - DNA, 122 bp, Homo sapiens
aatcaattctgcaactgtatcatgaaagcagctatagattatatataaacaaatgaatgtcgttatgttccaatgaaactttgtttacagaaacagtgggctggccaggcacagtggctcaa

SEQ ID NO: 14472 - DNA, 122 bp, Homo sapiens
aaccacctcagggattgcgtgaaacaatcaattgttcagcgaaactaacctgaaattacacgtctactttctttcccaggctggcgctgagatgggcaggtgctgcagcagcccggctggaa

SEQ ID NO: 14473 - DNA, 122 bp, Homo sapiens
aggaagagaatgacagggtgtgctagagctgtactcaaattaaacctacaccaccctccccggccttgcccaccctgtgatggaaagtagtggttcctcacctgcggggctggggccgatac

SEQ ID NO: 14474 - DNA, 122 bp, Homo sapiens
cggctcgcgtggccgagtcccctgacgcccggcgcccgctccccgcagcgtggcagcacccgttcctcaacgtcttcagacacttccgggtggacgagtggaagcgctccgccaagcagggg

SEQ ID NO: 14475 - DNA, 122 bp, Homo sapiens
tcgctctggaatcccctctttggtgccagcccagccagcttacccaggatcgtccttgatcgcagacacccccagagcagtcgctggtagtcagagccctctccaactgacccccagggcct

SEQ ID NO: 14476 - DNA, 122 bp, Homo sapiens
tttatgagacacttagggcaaaaaggcaatcatcctcaaaaaagaaactgacaactgcagcggctacctgcttttgtaagtaaagttttattggcaccagggccaggattaaagggaggcaa

SEQ ID NO: 14477 - DNA, 122 bp, Homo sapiens
tccaatcaagatgatctgagagttgggggtgggggaaaggttggtgacagggagaaggaccgacacctgtaaggtctgtcggtctgcagccgccaccgatgctccctctgggcccggatagt

SEQ ID NO: 14478 - DNA, 122 bp, Homo sapiens
cagtgtttgacttccctgtagtgttgaccatttctttcctcccagaacttctgcctgggccgccatgactccatactctcctggtttttgtcaggcggtctctcacactggcaggcttccat

SEQ ID NO: 14479 - DNA, 122 bp, Homo sapiens
ggacaggacctacatgcttcccatcactgaaaccatacagggtcaccaggtatctgtggtcggattccaggccagagagggtgatgtcattccggtcacctcctatgcggaccatttggagt

SEQ ID NO: 14480 - DNA, 122 bp, Homo sapiens
tgcgcgcgctcgcaccctgccgcggcggccgggctgctgtttccaccaccactcctggcccggggtcgcagattcaaattttactgcactgcccctgtcgcagaagttcctggggaggcagg

SEQ ID NO: 14481 - DNA, 122 bp, Homo sapiens
agagccttttatacttccgggacagcagtgacttaatactgaggcctctcaggggaagaccgggataactgagtcctgctttacctatctcggcttgcaagaaacggtataggtggaggcct

SEQ ID NO: 14482 - DNA, 122 bp, Homo sapiens
gcgggaggcggcgccgccgcacaatcgccccggaatgcccgccagggcgcgcgtggggtgcggccgtccggccctgcaactcgagctgctgcccctggttaaaaataccccctgcccggccc

SEQ ID NO: 14483 - DNA, 122 bp, Homo sapiens
cttttttccttttcttttttctttcctttttcctttcctttcctttttgagatggggtcccgctctgtcacccaggctgaagtgcagtggtgcgatctcgactcaatgcaacctccacctcc

SEQ ID NO: 14484 - DNA, 122 bp, Homo sapiens
ttcagcccctgtcattggactctggcctcttgtgctcagtacagagggtcagaccttggccgcctgcctggacagggccaggtcaccaccacccacccccagctcccttgggttcccagcaa

SEQ ID NO: 14485 - DNA, 122 bp, Homo sapiens
gagccgtcccccgggtcccacgcagcgcagagctccatttcctcctccggactcgcagggcgcgcggcttcctcgcttcaaatccaggaacgcgctgtccccaccaatcaccgggcttcttc

SEQ ID NO: 14486 - DNA, 122 bp, Homo sapiens
ctcctcaagttcctcccagaaagttatacacatcactctcacgcacattcaattggccaccgcttctagcctccagagggcaggaaactgccaccctaccatgtgccaggaagtagaagtca

SEQ ID NO: 14487 - DNA, 122 bp, Homo sapiens
cctatgggggaggatgggcgagatggtcagcgggaggggtcttaggctggggttagcagacgcttggagaagcaggccagggcttgctactccctgtacggagcactggatggctccgtcac

SEQ ID NO: 14488 - DNA, 122 bp, Homo sapiens
cgaaataattacagtcttacaccaatttgtgttccaacgtaaattactaagtaagtcgaacggaggctaactccactcacaaagcccagaggcccacatggcaatttttctaagccctgcgc

SEQ ID NO: 14489 - DNA, 122 bp, Homo sapiens
tcttcccacggctccctccccactgggctgtgggatgggtgtggctgcatcctgttcagccgcagctggtcttgctccccttccagcagccttctgggctccagcagccctccccaccttac

SEQ ID NO: 14490 - DNA, 122 bp, Homo sapiens
cacattgtctaatggagtcacgggaataaggagaggctgggccagggggtctgcaggatgcggcaggagggggctgtcatgtgacatgatacagttcagggacctaatggttgccgtgtcat

SEQ ID NO: 14491 - DNA, 122 bp, Homo sapiens
cctgctacccaagagaagaagcccatcaggcgccggccccgggcagatgttgtggttgttcgtggcaaaatccggctttattccccatctggtttttttcttattttaggagtgctcatctc

SEQ ID NO: 14492 - DNA, 122 bp, Homo sapiens
tcggccacaatcagggttggaagtacctaagttgtcatctggaatctccctttggcctcacgactctcttgagtttcagaccctcctgtatagtgcctgtgaagggatcggattgtgtccac

SEQ ID NO: 14493 - DNA, 122 bp, Homo sapiens
agggtatccgccccaagcggagaatatcggcgcaagcgcggagtagccgtgtcacgcatgcgtgcgaacgcaccacattccggaacgggaagaaggagctgtctctctcttctgaggggtag

SEQ ID NO: 14494 - DNA, 122 bp, Homo sapiens
gcccaggcagagggagagtggagggggcggctgtggagtgaagggcggaagtgccctcgccgtcctgaggcctgggaccctcttgatggtaaatggcgctgttgagccccgatgcgcaggga

SEQ ID NO: 14495 - DNA, 122 bp, Homo sapiens
ggagggacgtggttaaggcgagttctgccattaacgtgtaattagacaacacttttaccccgcccctcctgtgaatgccaccattctctccaaaatttaacctcctctaccaagttaaaacg

SEQ ID NO: 14496 - DNA, 122 bp, Homo sapiens
gtcaggtcgaggcctctggagtcgggtcgttccccagtgactccagggcagcgcaccccgcgaatgcccacttcggcgatactcaccactcgagggtagagaaccctgcggctgcgctttcg

SEQ ID NO: 14497 - DNA, 122 bp, Homo sapiens
gttttcctctttttttctgtcctcctgcggcctcttgtctagttcctacccctacttcagcgcaggcggcttggaaagccccggccagaggctagtaactctcgcaagtgggagatgctctg

SEQ ID NO: 14498 - DNA, 122 bp, Homo sapiens
aagccagtttacacatctgtctctctctcgacagctggcatccagtctacccttcactaccgtctccccaatgctgagcccccaaggagcgttccataaatgttaagtggctggccgcggac

SEQ ID NO: 14499 - DNA, 122 bp, Homo sapiens
gcacccacatcaggcgagatcttctagtccctaactcttcccctaaaaccagcttctgctcgccaagccccactgggaatgaggaggaggggctctcggtgatgcaaatgagtgttgacttt

SEQ ID NO: 14500 - DNA, 122 bp, Homo sapiens
ccaacggaacattttaatgacggggatttgaggcacctcaggcagccctgaggcttcccccgggggtgagtaggggccggtcacggcagagcaagaggactgggtgcacagggtggcagtgc

SEQ ID NO: 14501 - DNA, 122 bp, Homo sapiens
gcgtaccttacagcacatgtcaatttggacaagccacatttcaagcgatcatgggccctgcgagtctgtgggtagcggctcaccctgctggactgcgcagatccagagaacgacacgagacc

SEQ ID NO: 14502 - DNA, 122 bp, Homo sapiens
ttccttctgatgttcagatgtgttcagagtttcttccttctggtgggttcgtggtctcgccggctcacgagtgagaatgcagaccttgcagtgagtgttacagctcttaaggcggcgcctct

SEQ ID NO: 14503 - DNA, 122 bp, Homo sapiens
ccagcagagcggccctggctgccttttgtttgggagccgaggccggtgccgcttgccagccgcgctgcctgctgaccttgggaagttaccatagaaaccagcgcatcgggctggggacccag

SEQ ID NO: 14504 - DNA, 122 bp, Homo sapiens
ctacaactatggcttgtctgagtcctgagccagcagagctcaggccacagcacctgcacccgttttctgctgctgcacacaagggctctgtgcattccgcatccaggtgtgcccctcctctt

SEQ ID NO: 14505 - DNA, 122 bp, Homo sapiens
atggggatgtctctgcaggtctaaggttccccttgggagtctaaacaaagactacggcagcgccgtcccctcccccgggaacccgacgccgcgcggccacagggggcctggaggggcgggca

SEQ ID NO: 14506 - DNA, 122 bp, Homo sapiens
ctggccccgaaatccttttggggtggcatttgcttttgtgataccataaacacagagattcgagttggtgctcagggagctgtcctgccaagatcattgtgtcagtgaggaaatagacatgc

SEQ ID NO: 14507 - DNA, 122 bp, Homo sapiens
aatgatggaagaggcggaggtggaggcgaccgagtgctgagaggaacctgcggaatcggccgagatggggtctggcgcgcgctttccctcggggacccttcgtgtccggtggttgctgttgc

SEQ ID NO: 14508 - DNA, 122 bp, Homo sapiens
tctcattccacacatctgtgtggacgtgtgagttagctcccgcttacgggtgagaatgtgcggtgtttgtctttctgtgtccgagttgtttcgcttaggatgatggcctctgtttgcatcca

SEQ ID NO: 14509 - DNA, 122 bp, Homo sapiens
gttacaggagatgggcttgttaagggacaagcagccagccagctcaagtccctggggccccggcccgaggccgcctcccccaacgcagggagccggggattgccccgcgcagaccctctccc

SEQ ID NO: 14510 - DNA, 122 bp, Homo sapiens
gatctgactgacagtttagccctagtggggctgtctgaagggccccaggtccctcagtcccgtactgtactcaccccctcctgtttctttgtcagatgagaatatccccgagttggcggctg

SEQ ID NO: 14511 - DNA, 122 bp, Homo sapiens
cgggctcgagtggcgacgtgggccgcggtcctggagggggagaagcgcccggcgggcaggcgcggggcagggaagccccggggaacccacagcccctccgcagacccagccagggggcgcgc

SEQ ID NO: 14512 - DNA, 122 bp, Homo sapiens
aaattattatttctgaaagagcatgatgcgatacctgagataagagttgtgagtagatgccgtgatgggaatattttctctgccattggcaaggtagtgaaaggatgagaacaccttctttc

SEQ ID NO: 14513 - DNA, 122 bp, Homo sapiens
gtccctcgccgcgtccgcgaagcctggagccggcgggagccccgcgctcgccatgtcgggcgagctcagcaacaggttccaaggtaggcgccgccgtccccgagcagccacctgtgcgcgcc

SEQ ID NO: 14514 - DNA, 122 bp, Homo sapiens
tccccctccaggacccacgcccttctcggagcgcaccagggtcagagccgggatggtccccgatcccccagcgcccccacgcctggtgaccttgggtcgggcgtcccctcacctgacgctcc

SEQ ID NO: 14515 - DNA, 122 bp, Homo sapiens
ctaaacctcattgcaccgaggggccctgccagggttcccgaatgttacagttacagatgccgaaactgaggctggggcaggccagtcgcttgcccgaggccacagtgccaggaagagccggg

SEQ ID NO: 14516 - DNA, 122 bp, Homo sapiens
ctccgcttgctatcccctcactcaactcggcttcagtagatggggttggtggggcgggagcgggaaagaagcaggggagtcaaaagggaaaacctgaaaagaaggagggagaagcaggggag

SEQ ID NO: 14517 - DNA, 122 bp, Homo sapiens
gggaagacagagtgacagtgagaaaggccccagggggctcaagccacaggaggccgctggcggtctgagagtgtggtctctgccatgcacaggcgggactgcaggcttcgaaggcaggcacc

SEQ ID NO: 14518 - DNA, 122 bp, Homo sapiens
cggcccgtgggtttgggggacaagctcctgttgtcaccgtggctccgcggtgcctcccctcgcagagtccctccaggtcaggctcagagccctctggatgtggaggagctgcatggggtggt

SEQ ID NO: 14519 - DNA, 122 bp, Homo sapiens
gccgggacctttgtttctaagctggccacagctagagcagccttaagtgtcccaatgacacgcctgctatcgagcgccctcccggcggcccctcctcagccagctgcccagcgggcgtcctc

SEQ ID NO: 14520 - DNA, 122 bp, Homo sapiens
gcccctgtccttgggccgagttgccgagctccctcggggacttgaaggtgaagggcgaggcgccggccggggccgcgggccgagccaagggcgagtctcgcatccggcgccttccaggtggg

SEQ ID NO: 14521 - DNA, 122 bp, Homo sapiens
tccagaactaaaccacatccccaggccaccagtggaatgagcaattcacgagatcctgggcgcccagaagacagcaatggtgccagtgccccctccagagcccaaagaccagtaccctccag

SEQ ID NO: 14522 - DNA, 122 bp, Homo sapiens
ggcgctgcaagcaggagcaggggcggccgcggcggggcgagcggcggcgggcggcagcaccgcctgctcggctcgctcaagacatttaattggattgatgggttgtgcagtgactcacagac

SEQ ID NO: 14523 - DNA, 122 bp, Homo sapiens
cacagtgagtttgtgtaaatccagttagaccaaaatgagcgaggtggagagcctcttaaccggatgctacgggtgatgactgggaggaggagaaaaattacctctttatcttgcatgaacat

SEQ ID NO: 14524 - DNA, 122 bp, Homo sapiens
ttttatctggatgagtttaaatgtaaacgatctgtgtgactggtgactcccacgctgccccgcgcagctctgggagcacaaacctcaggacgggtctctgcaggccccacctctcccatgag

SEQ ID NO: 14525 - DNA, 122 bp, Homo sapiens
ttccacacctgacatcccttagagggacatgtacacacccactctgaccatgtgcacaggcgccaagcagccatggggaccagagcgcttacggtcttggcctctggagccctgattttgag

SEQ ID NO: 14526 - DNA, 122 bp, Homo sapiens
tatacacaactatctgaaaaagctattaacatactcctcctttttccaattatataactgcgcaagatcaaattttcttcatattacttcaaccaaaagaatacatcccagcagactgaatg

SEQ ID NO: 14527 - DNA, 122 bp, Homo sapiens
gggtgtcagcttgggcctgggtggaaaccaggaggacggattgccgcctggggcgctcgccgccgcgcccgccctactgtcgaaaggtggggctgatttcgttggtgggcgggggtgggctt

SEQ ID NO: 14528 - DNA, 122 bp, Homo sapiens
cacacacactcgagaaggtggcacaccagctgggcgaacacacacacccacttgagaaggcgacgttccgctgggtgaacacacacacccactcaagaaggcgatgttccactgggcgaaca

SEQ ID NO: 14529 - DNA, 122 bp, Homo sapiens
cttatgcatgaacgaagcttacctaacacatgtatttctcccataaggcacatcatagcccgcttgcactaaaggacactagacagcactacagcactgatgcttgggggccattttaaaga

SEQ ID NO: 14530 - DNA, 122 bp, Homo sapiens
tttagggggccatttcctgggggtgggggagagggcttggaatcaatgctagattgaaaacgttgtaatagctttgccccagacttaacaccggttgggcaggaggagggtaatttttattt

SEQ ID NO: 14531 - DNA, 122 bp, Homo sapiens
gccctacccttagaggtacccagggttaacattttggtggtattgtcttatcaatttttccgttgatacattcagcaaatttggagcacattgaccatggagttttgtgtccaaatccaatc

SEQ ID NO: 14532 - DNA, 122 bp, Homo sapiens
aggagggtgcaggaactccctggtttgtgtgcagtgaaggcctggaagagcctagctgcacgtgcagtgcccaaggaaggtcatcttccgggtcagtgatgttagaggcaacagagttgggc

SEQ ID NO: 14533 - DNA, 122 bp, Homo sapiens
ctgagtagaatggtagagcagtgggtcttgagatcaaggtgtggtggggagagagacttgcgaaagatgccaccttatggctggctgggaagcaacttgactgatccaacccagggttcctg

SEQ ID NO: 14534 - DNA, 122 bp, Homo sapiens
ctctggaggctgtgagacctcccccaaggagggcaacggtatagtaatgccgtcgcctaacggctgtggcattaaagaccgggagcttaaaaaaagggtggtttccacaccctctgttaggg

SEQ ID NO: 14535 - DNA, 122 bp, Homo sapiens
gctgtctgggtttgcattgcatgaacctaccattgcttatttgactgttcttcagatggacgtttgctctgttctcagtttgagtctatgataatcagctgttctgcacatctttccccatg

SEQ ID NO: 14536 - DNA, 122 bp, Homo sapiens
gacattttacttttaggctgggcacagtggctgacgcccataatcccagcacttggaggccgaggtggatggatcacttgaggtcaggaatttgagaccagcctggccaacatggtgaaacc

SEQ ID NO: 14537 - DNA, 122 bp, Homo sapiens
gcttataacatgtctgcttggctggtttcaggttgttgctgatgtttggtcagagacattcgtttctaggtatgtgggcctctctgtaggggtacttcacaatgtggtagtttgcttccccc

SEQ ID NO: 14538 - DNA, 122 bp, Homo sapiens
gggtcccggcggcgctgggcgctgattggctgagcgtgtgtggaatcgggtgatgggaaacgcagcccggctctcccgtaccctcccgctccgctccctgccccccgtggcgaatgtgctgc

SEQ ID NO: 14539 - DNA, 122 bp, Homo sapiens
cctatgaagaacatttgggaaactgcacagggctttcactccagagggagtgggggcagtcgctgagattagcagcaagaatgcattctgagtcaaaagatccacctctttcctggctggtc

SEQ ID NO: 14540 - DNA, 122 bp, Homo sapiens
gtcgctgtattctttcagacacaaatttcaaagaagaagcagcttcaaaaactagacacacgtctggtgggaagagagagggagtatgttgcaagtcagcctttctcagtccttccaagtgg

SEQ ID NO: 14541 - DNA, 122 bp, Homo sapiens
ggcgccggcagcttcgcgccggcggctggaagcgggcgggctgcacgggcggctcgagtgcggggaccccagcccctcgccctcgtgagcgccgcccctgccacctgctgccaagtcaccgg

SEQ ID NO: 14542 - DNA, 122 bp, Homo sapiens
aaattaccagtgccctggagccggttgggttgagcgcccctgcccggggaaggtagcctgcgggctcttgccccgagcccgcggagcaggaggtctcttttccaagcgcactcacattattc

SEQ ID NO: 14543 - DNA, 122 bp, Homo sapiens
cggcccacctcctgctggatgaggcgggcactcagctgcagttctgcatccaggcggttccgttcttcccgcaactgctgcaactcaaggctcacgtctgtgaccggtggtggtaggggaca

SEQ ID NO: 14544 - DNA, 122 bp, Homo sapiens
agaatatattcacacattgataacaacctccagtttttgagctactgagtctacaccaggcgctgtaataaatacactccatatactttctcattttaatactctctataaaagacgatttt

SEQ ID NO: 14545 - DNA, 122 bp, Homo sapiens
cgtcctatgatgcaggaaatggtcttcatctgcactgttcaatatggtagccactagccacgtgtgcgcttgaaatggggttagtgtaaggaagtttttgttgttgttgttgtttgtttttt

SEQ ID NO: 14546 - DNA, 122 bp, Homo sapiens
tgtactctcatttgaaattactatcctggttctcaactctggctacatattaggatctcacggggtgctttaaaaactaccattgctggccaggcgtggtggctcatgcctgtaatcccagc

SEQ ID NO: 14547 - DNA, 122 bp, Homo sapiens
cgcctccgcctccgcctcctgcttagctcgcgcctactcggcccggcccgccctggctctcgctttaatctcaggaggcggtgtcccagggtccagggcgacacccccaagcgggtcgcggg

SEQ ID NO: 14548 - DNA, 122 bp, Homo sapiens
atttcttgacttccccttatgctgccagtcagagaaaattatctgctttcaaatggctcacgtgattagactgggcccctccaggaatctcccaaaacctgctttcttattgatacaaggtc

SEQ ID NO: 14549 - DNA, 122 bp, Homo sapiens
tctttctctatactttgtttctgtgtctttttctcttccaaagtctctcgttccacctaacgagaaacacccacaggtgtggaggggcaacccatcccttcagacaattgggaggtgagggc

SEQ ID NO: 14550 - DNA, 122 bp, Homo sapiens
gcttatggctgcatttggaatttctgctcacaacataagcacgaggagcctgactcagtgcgtcgggggcaggaagcaccaacctgagcattgacatcagcacccaaggacaccaaaagctc

SEQ ID NO: 14551 - DNA, 122 bp, Homo sapiens
gcacacacttaccacagaggacagataccacacagcgactcacaccacccgacgtgcacacgaaaacagacaaatcacacatcactgtgggcatgggttgcctcaatacactacacgatcac

SEQ ID NO: 14552 - DNA, 122 bp, Homo sapiens
ataaccagcgttagtgctcaggtccttttgactctgagcttagggctcttcctgtcccaccgtgtcaatccttaaaatgtgcctttccctgccaacaatggcttgtttgtaggctgggcagt

SEQ ID NO: 14553 - DNA, 122 bp, Homo sapiens
aatctacatttttctggaaacatctaagactttgtgtttttgatattctgaagttagtcacggtttgtctagcgatgtgtgttaagaattttatcctggttggtactcagtggattcagttt

SEQ ID NO: 14554 - DNA, 122 bp, Homo sapiens
aggcagataatcctaaccaggccgcggaatgggcagcatggatccgatgaaaatgcagaccgtccacaccttactttttaagtcaacaactccgtcgggtttgtacccagaccgtgcgtctc

SEQ ID NO: 14555 - DNA, 122 bp, Homo sapiens
gtttgctcatataacacccaattccaactacacacgtgatctaggtttttaagccacacccgtcgtattcttctcagactatcaaatcataaagaaatgggcaccgaaccagcactcaaaac

SEQ ID NO: 14556 - DNA, 122 bp, Homo sapiens
ctggatgtggaccctgagagccactggcagggaggtggggtcttccagttgtgaagacaccgtggccccggtgagcccctccccggcctccttcatgcctgcgttctgcgtaaccgtggcgc

SEQ ID NO: 14557 - DNA, 122 bp, Homo sapiens
gggcagcgagtgggacatcattgccagagtagctgaaacagccaaaaccttaggagattccgagggttctggataatgtatgaattagagggaagctgtctgccattgtccagccaaatatt

SEQ ID NO: 14558 - DNA, 122 bp, Homo sapiens
atttggggctcccggagccgcacctggccaggagggaggtgagggtgaggagattggcctcgggccacactctcccagagacggtgccagtcccattccgcggctatgagatcgaattgtcc

SEQ ID NO: 14559 - DNA, 122 bp, Homo sapiens
attctctctgagctgtcaggccattaaggaggtacacttcaaggtcagggttcctgacaacgcctgccatcccttctcctgtagggacagcatctgttcacgcttctaaacagctccagaaa

SEQ ID NO: 14560 - DNA, 122 bp, Homo sapiens
cccgccccgccccgcccccgtcactgcgcttctgttataccatctttgcctgactctctccggcttctccattgaatggctaatgtgtatgtgaaataaagaaataaagaaaaacaaacgcg

SEQ ID NO: 14561 - DNA, 122 bp, Homo sapiens
tgtgagatatccattactaatcttttatgctgactacattttgaaattataatcttgggccgggcgcagtggctcacgcctgtaatcccagcactttgggaagccgaggtgggcagatcacg

SEQ ID NO: 14562 - DNA, 122 bp, Homo sapiens
tgcatgtgtgtgctggggccaaggggaggggtttgacaattaggaaaaggtaatcggggtcgacacatagtaaatatttgtagaattgaattgaaatgctaaagagagcactttacaaatgt

SEQ ID NO: 14563 - DNA, 122 bp, Homo sapiens
gttcgcacaaaagggaggttgcataagaaattcattgtgtttctatccaaatttccccctcgaattgccacagatcagcatgtacttcactctttgccaccaattaaaatcataaatagatg

SEQ ID NO: 14564 - DNA, 122 bp, Homo sapiens
gtctagccctgggaccagggacttgactttggccctcagtgtttcaccggccagcggagccggggagttacctgggcagggctaccgtgaccccctggcagaccagtgacaggctagaggag

SEQ ID NO: 14565 - DNA, 122 bp, Homo sapiens
tcgagagggacttagagaaggcagacgcatcccgaactcgctggaggacaaggtgaggggcgttgatattggggttttatggaggtcagacagtggttccagacccctcgaacccatagcca

SEQ ID NO: 14566 - DNA, 122 bp, Homo sapiens
actctggcacctcaatgctagctttttaggacctaggactacccacactaaagccaagcccggcccaaccaagacagatgtttggtgggtggggctgcctgctggagcaacaggcctctgca

SEQ ID NO: 14567 - DNA, 122 bp, Homo sapiens
ggtaatttgtcctaggcctctcagatgaccagggccagggtcagagtgaggccccgagtccggagccgtggacggggccctaggcgacaccagggcgccctgactgcggcctcccactccga

SEQ ID NO: 14568 - DNA, 122 bp, Homo sapiens
gcgcgggcggccccgctccccgcgctcggggaccggctccgcgggtcctggccgcgcccccgacgtggcgacccccagccccggctacccaactacttcagcgagaggcgccgggacctctg

SEQ ID NO: 14569 - DNA, 122 bp, Homo sapiens
taagggtgagatgggaggaccagaaagttttcagccacaagagtgatgagatctgtctgccgtttgaaaagagtagctgtggctggctgctgcattcaaaacagactgcagggggtcaaagg

SEQ ID NO: 14570 - DNA, 122 bp, Homo sapiens
tcctgctcctggctccttccgacgagtttggtttgaacttttgaatccgccaatcagcgccgcgcgcccccactccgcgggtgcggccgggcgcaggccagggctcgaaggtggggccgcag

SEQ ID NO: 14571 - DNA, 122 bp, Homo sapiens
tatgttgttaatgagaagctctacaacttgctcaagaccacacaatgaatcagtgcagaacgaacatacaaacctctttcttgttcaccacatacaccattgatacccttgatatggacaca

SEQ ID NO: 14572 - DNA, 122 bp, Homo sapiens
tccttcttcttcgccgccgcctcaggagccgctgacaggggaagcaggaggctcgcggcccggccctggcggcacactcacagcgccctctgaggaggaggtctgctctctcgccgctcccg

SEQ ID NO: 14573 - DNA, 122 bp, Homo sapiens
actgagggacaccgggacagggaagggaacggtcatcggacactgtcactaaagaggcggcgggtggaaggatgagggagtaattccaaagtggttaagatgtagcaagtgctaccttttaa

SEQ ID NO: 14574 - DNA, 122 bp, Homo sapiens
gaggtgggtgggaatgtggcctacaggaaagcggggttagttttgggatcggagctctcgcgatatttcacggaacttgggcaaatgacaaatctgaaggcgccgcgttgatgctgatggcg

SEQ ID NO: 14575 - DNA, 122 bp, Homo sapiens
ggattggaggggccagggctgggggtggcacgggctcttgggccgctgggctcctctgggcgggctcagggctggaaggcgctgccagctgtagccaggctcatacttttcaatttgttgtc

SEQ ID NO: 14576 - DNA, 122 bp, Homo sapiens
gacccaggaggtcagagcggaaactctgcccgggtgcgtggaaccggagtccccggtgcgcggcgccaggtactcacctgtatggctgagcgccaggaccgcgcacagcagcagggcgcggg

SEQ ID NO: 14577 - DNA, 122 bp, Homo sapiens
gtaacattgtccttggcttggtggccgtgtgccgatcggcatcatcgtcatatctgtaaacgtgttggtccattttcattccagctctgttcttagccaggggagtctgaatccagcccagt

SEQ ID NO: 14578 - DNA, 122 bp, Homo sapiens
ccatcccaccccaccccactccaagccccagggagcccggtttataagagccactgccaccgtttgtccatcgctcactgggacgctgctttgtgataaacattttgcacagttacctcagt

SEQ ID NO: 14579 - DNA, 122 bp, Homo sapiens
cgctcggctactaggaccttctgcacttgcaccgagcaagcagcgaaatggctgtggcttcgtaccggtgactcgcgtcttggagattttaacactcctcaacgtccccaagggtgaggggg

SEQ ID NO: 14580 - DNA, 122 bp, Homo sapiens
gtggtcccaggggaaggggccaaccctctgacacggaaacacttccaggggtggacacaccggtgggggggtggggaggacagtgaagatcacaagtgcccgtagaggcaggagctgtgaca

SEQ ID NO: 14581 - DNA, 122 bp, Homo sapiens
tatatagcgagttctggaagggatgcctcagagtgggctgtgtcccagagtggatatgagcgattatatgtcataaataattaattatcattagcatgtctacttttagatgcacatgaatt

SEQ ID NO: 14582 - DNA, 122 bp, Homo sapiens
caatttgggacaacccccagccctgtatcttacctgcagaatctgtcccatcggcaagcacgctctgggttgatgctggcgccgggtccttgactccatgcacctgagcagcttcttcctgg

SEQ ID NO: 14583 - DNA, 122 bp, Homo sapiens
agctctgcctccgaggttcacgccattttcctgcctcagcctcccaaatagctgggactacgggcaccctccaccatgcccggctaatttttttgtattgtttttagtagagatggggtttc

SEQ ID NO: 14584 - DNA, 122 bp, Homo sapiens
tcctccccacatcttgctcaccacagtgacctaccagtgctggggagttgacagcagccacgttgtacccatactggaaggatgacccaaaggcagctatcagggttgccagggcaagcaca

SEQ ID NO: 14585 - DNA, 122 bp, Homo sapiens
agagcctgcctcggagctcggggaaacaattagataaacatcccgagtgagtgagagagccggtcagagacagacagacagacaaagcggtaggcgctgacagtgagaaaggtggggaagag

SEQ ID NO: 14586 - DNA, 122 bp, Homo sapiens
tgctctctagttccttttcatctccatccatcgactcctgcaaagaggggagcattgcggcggcctctgagcggccctgtgtctccgccaaaccgctcccctgctcccgtgcagccgtcggt

SEQ ID NO: 14587 - DNA, 122 bp, Homo sapiens
agacagcatgcaaaagctggagctgagtttgaattccacccatctcaactgtggagtctacgctcttgaccactatactaaactctttctatatgcagaactctgagacaaaagttccagtg

SEQ ID NO: 14588 - DNA, 122 bp, Homo sapiens
cgtcgtttggccagaaaaaatgccagcagcaagatggggaactgccttcccagctctctgcgaagactcttaaggcagaagcgaggcctgctgggagaaggctgatgtcagctcttaagagc

SEQ ID NO: 14589 - DNA, 122 bp, Homo sapiens
ggcctctgacgtcccagggctcaagcgcggaggacatgtggaactccactccaaaagcggcggcttgcggcggagctctctctagtgaggcggccagctggcgttcgtggcacacttgctgt

SEQ ID NO: 14590 - DNA, 122 bp, Homo sapiens
gcgtcctaacgctccgcccaacaaaccatagagtaccggaaaaagctcgagcagaggggtcggaaagggaaaacaactacggctgcggtgtggttggtggtgagatgacgaccttagtgctg

SEQ ID NO: 14591 - DNA, 122 bp, Homo sapiens
tctgtctgtgctgcgcctggctctgcccaggggtcatttttttagcattgtggtgtataacgttatgaaggttatgttcgtttataaaacacacacacacgttgttcacaaatggaagcaat

SEQ ID NO: 14592 - DNA, 122 bp, Homo sapiens
agttgggagccacaatttacattgcagtacccccgacccttgtgtgatgagaccttggaccgcttaaccattccgtgctgtttgcctcacctgtaaaatggagacaattacttctgggagca

SEQ ID NO: 14593 - DNA, 122 bp, Homo sapiens
attttagtgtacgaaataaactggcgacgaaggcgactcagttctgccatggtcaagggccgggtaaaccgcaagtgctctgtggtaccaggaagcgtgagcaagtccccggggacagcgct

SEQ ID NO: 14594 - DNA, 122 bp, Homo sapiens
tgcaggggctgctgaggggggtttcttcgctgtggcagaggggccacatcccggcttcgccgctgcaggtccccagtggccctctcggtgacggccagccgtttttcctctgcctgccgggg

SEQ ID NO: 14595 - DNA, 122 bp, Homo sapiens
catttgcctactctggccttccacaccatctgtaaaatgggctggatgctgctgcccagccgtaccagtatttgatgcctacagagcatttacactgcaccaggtgttgctctagggacttc

SEQ ID NO: 14596 - DNA, 122 bp, Homo sapiens
aatacccagagccatgccccttagcggaaactgtgagcaagagacaggcccgtcaatctgcgctagccatgggactaaagccatgccaggttgggagagtccctgaccagcaggtgaaaccc

SEQ ID NO: 14597 - DNA, 122 bp, Homo sapiens
acctcatgatctgcttgccttggcctcccaaagtgttgggattacaggcgtgagccaccgcgcccagccggtaggagggttttaatggtgattaaaccatctctgatccctagagagacaga

SEQ ID NO: 14598 - DNA, 122 bp, Homo sapiens
tgggaggttgcagagccctgcctggagctcccagctggccaaactgggatgaccagattccgttatttttcctgcctaccgaaaccagctctcaaagacgtccacaggcaggtcctgctctt

SEQ ID NO: 14599 - DNA, 122 bp, Homo sapiens
tctgcccccacgtgactctgcaggcctctcgccttctttgttggtgtttctcttcatttacgtctattttttcttcttctcctaaaagaaaaaaaatacccctatctatctgggggctgagg

SEQ ID NO: 14600 - DNA, 122 bp, Homo sapiens
ccccccgcaactccccaccctcctcctttcccagctgtgacttccaaaaatgtcttcagacgttgccaaatgtcccctggggtgcaaaatcacaccccactgagaaccactagtctagggat

SEQ ID NO: 14601 - DNA, 122 bp, Homo sapiens
atacaagcatacacagatctacacacactgaaatcccagtcatgaaaaattaagacattccggccataaactgtgcaacaagacacttccagttagtgtgtgctttagtgatcatggacagc

SEQ ID NO: 14602 - DNA, 122 bp, Homo sapiens
aaggctggacctgcttggcgaagaccgcgatgtcctcgttgaaggagtcggaggagcagacgtctccgccagccactccaggttcccggggagtgcaggtcgccagctcgcacttctcaaag

SEQ ID NO: 14603 - DNA, 122 bp, Homo sapiens
tgcagaaaacaggagccgactttgattagacatgaggtcacgctgggagagtcaaggaaacgctcttcttccggtaactgcctgccttccaattgcagccctctggcgccagggctgtagcg

SEQ ID NO: 14604 - DNA, 122 bp, Homo sapiens
gggtgctggttcccattctctcttctcttgacccatcctctgtagcatgagcattagccacgtgtcagaagagttacagtcactagaaagctacctagaaatcagaattccctcttctttca

SEQ ID NO: 14605 - DNA, 122 bp, Homo sapiens
ttaagagagctcttgacgatgacgaagatgtaaaagtgtgtgctggggatgatgtgcagacgggagggccaggagcagaagaaatgcgtataaacagctccaccgagaacagtgatgaagga

SEQ ID NO: 14606 - DNA, 122 bp, Homo sapiens
agtggcccagctgagattccaggatttcctcagtagagcacagagagaagaatccagcagcgtagagagccaggaatgccaaatggattcgtcagatgcaacccattggctgagtccctcat

SEQ ID NO: 14607 - DNA, 122 bp, Homo sapiens
agttaggcccataacacctgaagacctgcagccaaagaaagagaacccgggcacaacctgcgtttgcaagtggactgcctagtggctgtagccgctggctcctgtgcttcggggaaaagtcc

SEQ ID NO: 14608 - DNA, 122 bp, Homo sapiens
ttggggcatgtctacctccatacaggaaagtcagccaacatctccatcctgaagcacctccgtcttctggctcgtgataaagcttccttttcccacccactgtgctccctcctctccccagt

SEQ ID NO: 14609 - DNA, 122 bp, Homo sapiens
aagggacatgtggaagtaatagcgagcggtgcagtcacccaagctgaagatgcacgagagcgggtcgcgtagaagaactgcggcaatgggacccccagcgcagccccaggcgccctgttttc

SEQ ID NO: 14610 - DNA, 122 bp, Homo sapiens
atgcagccctcccgaagcacactgcgggcctccacaggccatcatagttcttctgctccacgccaggtgaccttccctcatcaggccacttgatgaaaagggtatctctcctgttcttccaa

SEQ ID NO: 14611 - DNA, 122 bp, Homo sapiens
acagcttcctgcaaatgcatcatcttgctctctagcctgccaccacgattacagctcagccgaggaagtcatcatgagccgtgcggtgttgcaaaggaaatcttgtcccattgatcaactca

SEQ ID NO: 14612 - DNA, 122 bp, Homo sapiens
ctgggggacctgggggctcgtggcctcccctgcacacagggctcctcctggcggggcctccgaacaccctcatttaggtgtcgctgcacgtggctcccaggtgtggacgtccccactctggc

SEQ ID NO: 14613 - DNA, 122 bp, Homo sapiens
acttggcctgacctaataaatattgatgagcttaaagaaactatgttttggagactcttacgtaggattagaaaattttggagagtgtgagatcttttctagtattaagggctatctaggtg

SEQ ID NO: 14614 - DNA, 122 bp, Homo sapiens
ccgtctcaaaaacacacaaaaaaccccccaaaatttgatcttcataccctgtttcttgcacgttagctcccaaaccccttggaagctctgaagtgaaaagagtttttgtatgctaatgagtt

SEQ ID NO: 14615 - DNA, 122 bp, Homo sapiens
ccctcaccaccccgcaatctcccataaatgggggtgacctgccagagtctccttcgtcaccgcgccggcatatatctgtgttctcccagtccgtgccctcctctgaaaaggccttctttcag

SEQ ID NO: 14616 - DNA, 122 bp, Homo sapiens
gtgaggccgcctgtgtggaactgcaggggggcagtggcgtgggtccccgggcctccctcccgccaggtgccctgaagcccctctgggcgcccactgtggcctggactccccgcatccacctt

SEQ ID NO: 14617 - DNA, 122 bp, Homo sapiens
cgcgaggctggagccacagcttccctgatgaaccatggaggcgggccagctcctgagctgcggttgccctggagacccacctaagcctctttgcctggagcagcattatctgtagagggagt

SEQ ID NO: 14618 - DNA, 122 bp, Homo sapiens
ggggtgtaggtgggcagaggctggcatcaggcctgaggaaccaaactgccccctcctcgtcgcggtggagacgcacgaggtgcggggaggaacatagccaggaagacgggccttcctgtggg

SEQ ID NO: 14619 - DNA, 122 bp, Homo sapiens
ctgaatccaccaggtgctgcagccctgttacagaccggtggaatccaccacacacagccacgccttccagaatcagagaattttgtctctggggccggcccttgagcaagatgcttgcccgt

SEQ ID NO: 14620 - DNA, 122 bp, Homo sapiens
gagggctgcccgtgctgcctaaatgtgttcagaatgaaggccgccctcccagctttaacccggggcaggccacggagcctcccgccgcccctaccccgcgtccccagcacccccgcgctccc

SEQ ID NO: 14621 - DNA, 122 bp, Homo sapiens
tctcgcgcgctttgaaagtgcgcgagctccgaccgagacctgggccggcggttggtcggccgaaaccatctgctacgttacgtggggggaggtcagctcctatacagccacacttttttcaa

SEQ ID NO: 14622 - DNA, 122 bp, Homo sapiens
attggggttgccctcgccccgaggccctggcctcaatctgccccctccaattggcggtgccggtcccccgctggggcttcccaagccaaagaagaggaaagagcccgtgaagatcgcggcgc

SEQ ID NO: 14623 - DNA, 122 bp, Homo sapiens
tttaaattaactctgctgctgtctgatgcagaggaatgtctgccaggcacggagagcagccggctccctgctgcccagtgcagcccctcaccctattacctgcccgggttagctggaggatt

SEQ ID NO: 14624 - DNA, 122 bp, Homo sapiens
cgtccaccctctctcaaacctctggcttttaggggtctccagtcgctctcgtgctacccccgtttcggggttctatccaggctgggcatccgcccaatggataccaaggagaatgggactca

SEQ ID NO: 14625 - DNA, 122 bp, Homo sapiens
ctctagcaatcctgaactgagcagagatgtgaaaacttacttctttccgctttctcgaagcgctccaggacgcaggtggcacgctcaacgcggggaggcgccacctacaggacagaggaaga

SEQ ID NO: 14626 - DNA, 122 bp, Homo sapiens
ttgtttttactattttaggactttgcataaaaaccatttttttttaactccatgcaaaatcgtcaaccttcctccacaaagaggtgtaatttttgtagttttctggagtgttttagaaaatt

SEQ ID NO: 14627 - DNA, 122 bp, Homo sapiens
actagaacagaacttaaattttacaaacttttgatcataatgcttttgcccatactgtctcgtccttagccccagtgacatgtgctgatcctcctgcctttagttctaaatggttctgaata

SEQ ID NO: 14628 - DNA, 122 bp, Homo sapiens
agcaaggtgtgaccaatcagagcccagagacgggaataaattatgcaaatcaccatctggcgatgggtcagatgactcccatacttttaaaaactacctctataggagcgtgacagcagcga

SEQ ID NO: 14629 - DNA, 122 bp, Homo sapiens
ttccgcatgactaatgtccctaagatcgtctctagaatttttgtccgaaagagttagcaacgtctcaggaatattggagaactgaaatggggtgtaatccttcttaagaaaatatctggcag

SEQ ID NO: 14630 - DNA, 122 bp, Homo sapiens
tctccccaccgccaacccccaccgcaaccattctcttctctctgtccctagagaaaagcccgctacatccatttggatttatgtaaggtggattagggacacaaaggaaacaataagaccca

SEQ ID NO: 14631 - DNA, 122 bp, Homo sapiens
aatgaggaaactggactaaagctaagcatgggtgcacggcagcaaatggttttgtatagtcggatccttgtgttgatagtgtgtaacttgcatgggaaaaagtggaactatggttttgttga

SEQ ID NO: 14632 - DNA, 122 bp, Homo sapiens
cacttgctggagataatagagcctactatgtagtaccaccaagaggtgcagcaggcactacgctccagaggcactgctattcctcctcccccaccttgctatccaccgaggcccccatgttc

SEQ ID NO: 14633 - DNA, 122 bp, Homo sapiens
cccggactaagccgggacggaaaaaaaatgtgaagggggcgttcccgatcgatttggccccgccccatagtgtgcccagagccttctgccacacttaacatggcggcggcggcgccctgccg

SEQ ID NO: 14634 - DNA, 122 bp, Homo sapiens
agaggatgaagagagagttcccgaacaagtcggaagcagctcacaacaccggacgccgcgcggcagggctgtggacctggggtggtttcgtgtcccagtcttaggaaactacgcgcgaggca

SEQ ID NO: 14635 - DNA, 122 bp, Homo sapiens
ccttcggcgaatagtgtctcttagcaacggctttgagtccctccgccaggggcggagcctcggaagccaccacggggaagctgtaaggggaagtgagtgagaccaatcggagacgaatctct

SEQ ID NO: 14636 - DNA, 122 bp, Homo sapiens
caagcaaaaatccatgcccccacagaacttacattctacctaggatataggacggggtggcggagatgataaactataaaaattagaataaataaattatatagtatgttgaaaagtgatac

SEQ ID NO: 14637 - DNA, 122 bp, Homo sapiens
gttgtctagaagttcctcttctcctgctgttcatctgccagcttacccttacctcccacccgctcacatacccagcattgcgctctatttctagaaataagtactgaagttagttttccatc

SEQ ID NO: 14638 - DNA, 122 bp, Homo sapiens
aggtcactctaaagatccataagttgtgcaacaggtgtcagctgctttgactgtggctgtcgttccgactccgacggtcccgtggcccctcagcaggagcgtcggctgctttgactgtggct

SEQ ID NO: 14639 - DNA, 122 bp, Homo sapiens
catgtgtgatgcaaagtgccctgactccccctcttagacataggtcctaaagggatacagcgatgaggtaaagtgatggggtgcagtgatgggctgaaatgtgtgctaaggatgaaaagtgt

SEQ ID NO: 14640 - DNA, 122 bp, Homo sapiens
ggcggcagtcgaagcttgagctctcgaagtgctgtcatgagttccttctgagtccttgcccgggctgactgttcactgctgcggggcccacagggaagaaagagataaagacattagtccca

SEQ ID NO: 14641 - DNA, 122 bp, Homo sapiens
aattaccatctaatctagcaattccatttctgagtatatacccaaaagaattgaaagcaccgtcttaaagagatatcttgcataccaatgttcatagctgcattactcacaacatctaaaac

SEQ ID NO: 14642 - DNA, 122 bp, Homo sapiens
cgctgtgtcccgtgaggctctctagctttgcgctttggggtcatcttgtccagtggacgacggcgtggtgtcgtctgcaccatccctgcagtgcctgacttgtgctcgctgaacagctgtag

SEQ ID NO: 14643 - DNA, 122 bp, Homo sapiens
ccaccctgttggatggcaggcctgcagggcagctcggctctggcagtgcctatactggagcgggcaggaagctgggggcacccaacttctcgctgacccctgactcattccctccccagatc

SEQ ID NO: 14644 - DNA, 122 bp, Homo sapiens
tggaaccctgcagtgtcatcgcagccaagtgtcttcacctcgcagggcccgagtcctcctcggtaaatgagtccactcggtcccatggggcggttgggtagctttaacaagccagtgagccc

SEQ ID NO: 14645 - DNA, 122 bp, Homo sapiens
aggtgttcgcctctgcgcgttcccccttctcctgggttcctgcccccgcctttctttccccggagccgtccaccccctcgccgggcgccggctttcaagcctcaaacttgggggatccccgg

SEQ ID NO: 14646 - DNA, 122 bp, Homo sapiens
attgagaaacagatcctggtgctgaagagctggggacaggagcctggtgatgggcagcctcggttccagggcaggccctgccaccaacgcactgtgtgaccttaagcagctgtgctcttccc

SEQ ID NO: 14647 - DNA, 122 bp, Homo sapiens
cagatttcgagaagtgatgataaatgcatacaatgaggtttactgagatatttaaatttccgtaagtgaaactaactgaaaaccaatacaacacatccccagtgaagatgcttcaaaccagg

SEQ ID NO: 14648 - DNA, 122 bp, Homo sapiens
ccgggggccccagacctgaatcaggcccgtcggttgcttgctggccagcggccctgcctgcgtttgttttcactgctcatcccacaggccccaggtctgggcttgtgaccccaggggcgagt

SEQ ID NO: 14649 - DNA, 122 bp, Homo sapiens
cccttctgttatggggttgtaaaatccctcaaaaatcacactagatcgccccgcagagtgcggtccacagcgccatctgctgctcaaaacatagaactgggtttatttgtctaagatctgga

SEQ ID NO: 14650 - DNA, 122 bp, Homo sapiens
ttacaggtgtgagccaccgcaccaagccctatttatcttttatagtacctcagagtattacgcacagatgagaatgttcattaaatgctcaggaccaactacactaaaaaggaaatcagtat

SEQ ID NO: 14651 - DNA, 122 bp, Homo sapiens
aagaactaaggactagacatgtttaagatggcagctccatcttcccttctctgccagccacgtgtattgtaaaggagcagacatgatggtgccaatcaactggaaagcccatttgcatagta

SEQ ID NO: 14652 - DNA, 122 bp, Homo sapiens
gccaccgccctctgcgcgatccgccgccggcgcagcctctcccggcccgccctggcctcgcgcccagcagcccagcctagagccgccgcggcagcctagagccccagccccggctctgggaa

SEQ ID NO: 14653 - DNA, 122 bp, Homo sapiens
ctgccacagcctgcgggagaagtgacgtttgcctctccttctttttcctcccttccgcgccgctggtctcccccaaggaagagggttttgatttttgttttgttttgttttttgttttgaac

SEQ ID NO: 14654 - DNA, 122 bp, Homo sapiens
acaacaaagtctttatacaagcctgcaacacgtgacaactgcggatcaggcatctgaacccggcctatctttccaccgtatcttcctacacttttctttatgtactttttatttctaccaga

SEQ ID NO: 14655 - DNA, 122 bp, Homo sapiens
cccagggctggcagggttgggtggtcgtctgtcttctaggcatagcctgtgccactgctccgccacctgcccctgggcagagcagagggagcctcttcaacaggctctccatcctgcctcat

SEQ ID NO: 14656 - DNA, 122 bp, Homo sapiens
gaactcctgccctcaatgtcatctgcccacttgggcctcccaaagtgctgggattacaggcgtgagccactgcgaccggcccaaagttaaccttctgtcgaacggtttatatctggaaaggt

SEQ ID NO: 14657 - DNA, 122 bp, Homo sapiens
ccctaacacccctggcacccagccctgcacacccagcccctccaccacaagctccacggccggcaccccctgcctggcacctggcgcctggcacacacacagcagggccgggccagtgcccg

SEQ ID NO: 14658 - DNA, 122 bp, Homo sapiens
cagcctgggcaacaagaccaaaactccgtctcaaaaaaaataaataaataaaaataaaagcggtttgtaaactgtaacaccttgcacagaaacacaagattactactattaaatattattta

SEQ ID NO: 14659 - DNA, 122 bp, Homo sapiens
ctcattggtttccagctaagattttggatctcaatcctgactatgagcaacaagacctttcggcttttttaaaagatagcatgcctgagccctagtccagttctgatttcctagatttggac

SEQ ID NO: 14660 - DNA, 122 bp, Homo sapiens
aaaagaaaagaaaaataaccaatatttgcaaaaatgtgaagaaattgaaacccttgtgaacgtaaatggtgctgctgctgtggaagacagtttggaggctcctcaaaaaggtgagcaaggcc

SEQ ID NO: 14661 - DNA, 122 bp, Homo sapiens
ttcggaggcagccggccgcccagcgccctgagggcggcaaatcgatcgccggtcagaggccgcctacagggtcacggactgaccagaaaataagcagagaatgaactggaaaatgaggggga

SEQ ID NO: 14662 - DNA, 122 bp, Homo sapiens
gctgtagtggagcagaccggcagcaaaccaccaaacactgaccataactctttttgggtgcgaatttggctttcggaagtgctttggagcttctcgatccaaccactgagctggtggtcgcc

SEQ ID NO: 14663 - DNA, 122 bp, Homo sapiens
agaggcgccggtgctagctgacccacaggaaacgagcgctgctgacctagtttgggacaccggaagtgggtgctggggagagggggagaccggcaggctgtccaggcttccgggccaggtgg

SEQ ID NO: 14664 - DNA, 122 bp, Homo sapiens
atttgcgtccttagagcggaagtacggccggaagcccgccatagagtttagtggccagagcgactcttcagggaggtggcaggaaaggcttggaacagctgccggaggtgacggagcggcgg

SEQ ID NO: 14665 - DNA, 122 bp, Homo sapiens
ccacccgattggtgaagcctctggcgtcggccaataggacgtggctttgttggcgtgtgccgcggccgcgcgagtcctggaaagcgttgttggcccggttgctctggagccgggtctcgggt

SEQ ID NO: 14666 - DNA, 122 bp, Homo sapiens
actttggggtaacggttccagcacagcacatccctttctcctcttttcactcatcgtcaccgctacctgaaaaccctggccgggtgctggggcttgaggagcagttcccacttcccagtctt

SEQ ID NO: 14667 - DNA, 122 bp, Homo sapiens
ttggatgcaaatataccatttaaaaacctctatgagtagagacagtgctgatctttgttacgttaagccagattttccaaaagtatattctgcagaaccctaattcctaatcacctggagaa

SEQ ID NO: 14668 - DNA, 122 bp, Homo sapiens
tcagacttgcagttcccaagtcagctggaaacctaggtgatgctgatgacacacaggagccgagaagtagccacagaagttgtgctgtgcttggtgactaaatgaccacactccttccacta

SEQ ID NO: 14669 - DNA, 122 bp, Homo sapiens
tgacttgtcccaagtaaaaatagtgtgcttttccccagtctaaggtctaagccatgaacacgcatttagctgttctttttaagggaagagattgttctcttcaaaaaatttcaaagtcaaga

SEQ ID NO: 14670 - DNA, 122 bp, Homo sapiens
caccatggggacagatgtgggggttaccttgagcaggcaggactccaggtgcaaagatgccgggtccctagagaggggtcccagccagcgccgccctctgggtgccgggagctgatcccgag

SEQ ID NO: 14671 - DNA, 122 bp, Homo sapiens
aagagggaagcacgaagttctgtcagttttgctgtcacatctcagacttgatcacaggtacgtacaggaaaaaacagcgcctggacaggattcgggactatccgcggcttcggcacctgctg

SEQ ID NO: 14672 - DNA, 122 bp, Homo sapiens
tcgactttctatgtacatcctaggggtgagggagtgcggggcaatgggtaggatataaagcgtaaaggacaaattgccgcagtcttctaattgatgcttccaaactcaggaagggcttatcc

SEQ ID NO: 14673 - DNA, 122 bp, Homo sapiens
ttttggcgctaaggaatctttggcactgtctggggacatttgcaacttgaggggtgctaccggcatctagtgagtagagtgctgggtgctgctaaacgtcctgtagttctccggatagcccc

SEQ ID NO: 14674 - DNA, 122 bp, Homo sapiens
agtaccgccatgtctgttgggcatccacagtctcccaccaggcattgtggtctccgctgacgctttgccatttcgccaccggtgccttccatgagaatgctggttacttctccagagtgctg

SEQ ID NO: 14675 - DNA, 122 bp, Homo sapiens
gttttttcaagttcgcagtctccggctgcagtttaagagactgacctccatccttatccccggggcactaagctttcaaagagaaagtttgacccctaggctttgatccactttcccttgaa

SEQ ID NO: 14676 - DNA, 122 bp, Homo sapiens
gaaacctcattcggttctctttttcttaaacgttccacagggagtccaggtccccacccacgcccaagggaaaggccttgccgcgccgcgggtcactgtcccggaagcgggaggttgccacg

SEQ ID NO: 14677 - DNA, 122 bp, Homo sapiens
gcgagtaaacggttctccggctgaaggctggctttttatcatcacttgtggatcctcccacgtctcaccctaggcagccaatccctgtcggagtttctatttctgcactctgcagtttcatt

SEQ ID NO: 14678 - DNA, 122 bp, Homo sapiens
aaattggcttcacaggactgcggaggatggcgagtccaaaattgcagagctggcacaggccggggtcccagggaagaactgatgcaaagacactctccaggcagaattccttcttcctccca

SEQ ID NO: 14679 - DNA, 122 bp, Homo sapiens
gaggatggatggtagcacagataggctgcagggcccctaatttgagttcctgcacaaaaacgaccataatatcaacattgtaccaaagccaagtgatctcagggagaaaaataaaagatgcc

SEQ ID NO: 14680 - DNA, 122 bp, Homo sapiens
acgtgttctcaggacttcctgagggctgtgtcaccggccatggtcactcatattgggatccgattaaaatatttcttcaaatattttagagtttgacttttttcatcaacatgatgaagcca

SEQ ID NO: 14681 - DNA, 122 bp, Homo sapiens
aaaagcttgggtgacatctgttccctggtccttagggaccgtcaccttcagtcctgagctcgcaggcggggttcacatgttgcctgttgtgggcattgtagctttaacgtttaattggcgga

SEQ ID NO: 14682 - DNA, 122 bp, Homo sapiens
gtctatgtgagtgcaattgcatcttttatgggctgttaagatgtgagacttctggccaggcgcagtggctcacgcctgtaatgccagcactttaggagactgaggcaggcagatcacctgag

SEQ ID NO: 14683 - DNA, 122 bp, Homo sapiens
tagctcctctttccccacactcctcccatcaccccttctcccactcctcccctactgaaacgccttgaatcttgaagcaactgtgggagaaagagagttaggagtagcataaatacaccttt

SEQ ID NO: 14684 - DNA, 122 bp, Homo sapiens
ctgaggtcccatgcatctgagtggcatcagtaagcgcagcccgtggtcagcaaagcctcccgtgctgaggcgaggcaagccatggctgtgtgcaccacgcggcggctacagaaactttcgtg

SEQ ID NO: 14685 - DNA, 122 bp, Homo sapiens
gaacgagggcgtggcctctcttgtgagcccgccctccccgtgtcgctcccgccttgagggcggggctctttcccaagtgccctctgtgagagccgggccgctctctccggggcgtggcgaag

SEQ ID NO: 14686 - DNA, 122 bp, Homo sapiens
gaggtcaggattccctcaatttacagatgaagacacggaggttcagaggctgggcgggctcgtgcctggcagacccaggacctcagtccggcctcctcccaccatcctgttctgcctgcagg

SEQ ID NO: 14687 - DNA, 122 bp, Homo sapiens
gtcgtccggcatccatgtagcgctggtgactggaggcaacaagggcatcggcttggccatcgtgcgcgacctgtgccggctgttctcgggggacgtggtgctcacggcgcgggacgtgacgc

SEQ ID NO: 14688 - DNA, 122 bp, Homo sapiens
gtggcaatatagttgtctggatcggtgtgataggaatccatttatcttttgttaacaagacgcaattggaaaaactggttattttcccgaggctttcactggaaggctatgcttctgtttaa

SEQ ID NO: 14689 - DNA, 122 bp, Homo sapiens
tcccggaaactcctcctggtgcctgcgaccgttctcactgagcatgtgcagacggcggtgcgcatgctctgttgcggtccgcttcggtttctgttgcgggacccggggtgtctcctagcgca

SEQ ID NO: 14690 - DNA, 122 bp, Homo sapiens
tctggctacttcctgtgccttagttctctgggcagcctagaggtaagaggtgcccaccttcggaaccaccagggtctgcccacctcccctgcccattcacggtgccctatgccaggtgcgct

SEQ ID NO: 14691 - DNA, 122 bp, Homo sapiens
gcgcttgcgggccagctggagtttcgggtgggcgtgggcttggcgggcccgcactcggagcggcccgcgggccctgctggccccgggcaatgaggggcttggcacccgggccagtggctgcg

SEQ ID NO: 14692 - DNA, 122 bp, Homo sapiens
accagttcttcgcaatccttgaagggaggaggggcccaggagctttgtggagggcgggagcggtgggggggggtgctcccagaaccctagtgagattaaaataaagagcccagggcaggcag

SEQ ID NO: 14693 - DNA, 122 bp, Homo sapiens
cagtgaggtccagtgaagaaggcagccgtcgggcgtccccaggcctttgctgggctgggccggggagcctggccgctcaccggccgcagcgctggggctccggcgccctctggtggcggcgc

SEQ ID NO: 14694 - DNA, 122 bp, Homo sapiens
gcctctgttttttccctttgacctattgcaagtccccagtctgtttctctggccactggacggcccccaacccctggctgtgtttttcctcctccactggactcactgggctccctggtgcc

SEQ ID NO: 14695 - DNA, 122 bp, Homo sapiens
acttctcttcggttaccaaggaacggctctgaggaaagtccaagtttcttttgtaacttgcgctccatgtgacagaaacatgagcgtttccaaaatgaaaacactgggggctttcgcctgga

SEQ ID NO: 14696 - DNA, 122 bp, Homo sapiens
ttttattcactcttcacatagagtctgtagcagcttttggatcttttctgtctactctgtcgtgattgagaggggttaagctggttgctagcaacctggctcctatctctctctctctaatc

SEQ ID NO: 14697 - DNA, 122 bp, Homo sapiens
cacgtaccgcgcatgctcaaggacgagcctgccttgagcatgcgtgaaaggtgctgtgaccgccctccgggttgtggctggtggccttcggtgtttcgggtttggcagttcactcaccaagg

SEQ ID NO: 14698 - DNA, 122 bp, Homo sapiens
gtcctctataaaaagatgtgagcccatcaaaagcaccgttttatgcacaatttagatcaacggcaaagcactgtcatctactcatcaaagctcctcagaatctactttgctagtctgggcat

SEQ ID NO: 14699 - DNA, 122 bp, Homo sapiens
caaacagaagtgattaacctccttatccaagtctacatagttctctggacagggacctatcggattgcccaacagcaccactctatcccaggagtagctttatgttttcatactgtttgctt

SEQ ID NO: 14700 - DNA, 122 bp, Homo sapiens
ctcgagggccggccggtttggcggcggctgcggagggtatctgaggctcggctgccaagccgaacgggctctggctcctcccagtggccggccggggcggaagcaggaggcgggggcagcgt

SEQ ID NO: 14701 - DNA, 122 bp, Homo sapiens
caattgatttctactatgggaatctaagaactcttcactgaggtagcatttgagcttcatcgtgaaaatgaatagaatgtctttggggagggaccaagggaaaattacatttataacaaaga

SEQ ID NO: 14702 - DNA, 122 bp, Homo sapiens
gaccagaaaactggagacttgaatatgaacagagatcaatggactagagacttcattttgcgtctccgagtgttggatgaggcatcctgagtccctccactgtacagacaggattgggctta

SEQ ID NO: 14703 - DNA, 122 bp, Homo sapiens
agggcgggacttctgcctgctccgtagagccggaggtggggtctacggctttggtttgggcggctgcagtagcacccggtgagttcccgacttaactcagaaggggccgggcttccaccggc

SEQ ID NO: 14704 - DNA, 122 bp, Homo sapiens
aggaaggagctatctgccagaggccagaaaaaccatgatgaattgtgaggcctcccaacacgtttgctgctattgcaataacatggtctcgaagaggaggaagacttgtacactgacaatgg

SEQ ID NO: 14705 - DNA, 122 bp, Homo sapiens
ggctacagagtcccgaggagtggacgggagcggggagggggtgctgtgggaagcccatgacggggttcactggctgctttgtgctgggcgtctgtgctagcctcacagccagccacttgcat

SEQ ID NO: 14706 - DNA, 122 bp, Homo sapiens
aaaaaaaaaagtcctgggcagcagttgctggaaagtctctgctaagccacctcccagcgccgctgtccctcccaagtcctctccgagtccggacgaggcagcggcggcagccagggccagct

SEQ ID NO: 14707 - DNA, 122 bp, Homo sapiens
ggctgtctgtgctgaaggcctggcacactaggcagcggaacaccttcagggacaggctgtcgtctgggggtggtgaggtgggcaggctgtcagatgaggaacccaggagctgacttggaggc

SEQ ID NO: 14708 - DNA, 122 bp, Homo sapiens
tgtgggggctgcagctgaggaagcgagcgcatgctgggctggtgtcactgagagggggcacgtacatagtctcagcagatggtcttgcttcttccctgtcaatgtccctgaaaggctcctgc

SEQ ID NO: 14709 - DNA, 122 bp, Homo sapiens
ccggctgccctatcaaagagccccttgggagctgcgagccgcaaccattggcgcctggggcgtgggcgggacggcagtaggtggggccgccgagtgggttgagcgttactgtggcagcgggc

SEQ ID NO: 14710 - DNA, 122 bp, Homo sapiens
agaaagcatcgcggtactccgccactgacttttagtttcctttctccgtcggcaaacttccgggttgggtgggcggggccaaaaaacttatccaatgagtacctttgtaggctgagaggaag

SEQ ID NO: 14711 - DNA, 122 bp, Homo sapiens
ctccacatacaccccagctatgctcctggcctggggcctggggggcgtgccggctcccagcgtggctgccatggctctgggtacactggcctgctctgtgctgttggtgcctgggacgggaa

SEQ ID NO: 14712 - DNA, 122 bp, Homo sapiens
actgagagagtctgctgaatttgagaaagtccactctgctttctggaaggactggcggggcgggagggcagggaggatgagtaagttagggacagagtgttctcgtgtttgtagaggatgtg

SEQ ID NO: 14713 - DNA, 122 bp, Homo sapiens
agtggcgctctctactgtcccggaattcttgaggccggaagaataacagggcaaaggtcacgtagacggcgcgccccgcccccgtacgcctaagttctcgcgcgactcccacttccgccctt

SEQ ID NO: 14714 - DNA, 122 bp, Homo sapiens
ccataaatggctggacctttccctcttcctccattcataaattattattattttttgagacggagtctggctctgtcgcccaggctggagtgcagtggcgcgatctcggctcactgcaagct

SEQ ID NO: 14715 - DNA, 122 bp, Homo sapiens
cggcccgtggtcgccccgccccggtcccgggctccgccccctcgccttctcggccgcccccggggccacgcctcccccggaggctgtaactttgcctcgcttcgcgcctcctttctttggcc

SEQ ID NO: 14716 - DNA, 122 bp, Homo sapiens
atgggcgagggccgggggaagggaaaagggaggaggaggaggttgcggctggtttgaaagcggcagtttcctggcagcttgggcaggcgttggtctccgcgctacagctccgcagcggccac

SEQ ID NO: 14717 - DNA, 122 bp, Homo sapiens
catctccaggtgtgaactcctgatggagtcctcaccaggctgagtcatctacagttcacacgggtacattcccaagtctaggctgtgatataatgtactatgaactctcggtgaaacaggtg

SEQ ID NO: 14718 - DNA, 122 bp, Homo sapiens
gtctggagtaaacgaatctgccttcctcccggggtgaaggcgatggtgaccgggttcacacgtgagctgcagtacagcagttctccgtggcctcggctggttcagaaacgagggtgctggga

SEQ ID NO: 14719 - DNA, 122 bp, Homo sapiens
ccgcacacgcgtaatccaggtgagtcccactcggcgacccgcaccgcgacccgtggcccgcgccagacactcaccaaagagagtgcagaacatgccccccaggatggggtcagggagcgagg

SEQ ID NO: 14720 - DNA, 122 bp, Homo sapiens
caggaagttgtgtggatgagtcaaggttgaatggagagccctaggcagtgttgtcccgcccgccctgactcacctgtcccccaaatcccctgatgccctcactgaagggtcaggtgcctgct

SEQ ID NO: 14721 - DNA, 122 bp, Homo sapiens
cggcgactgcccggcagcgtgaagctggtgtcagtggagcgtgtacacaatccccggcagcgtgttccctctgccctgccccggggaactccagaggccacctgattgagtgacgccccccg

SEQ ID NO: 14722 - DNA, 122 bp, Homo sapiens
ggccccctcccaggcgctttctgggagcttttagaactgcgctctgaagtttccagagagcgaggagcttttgcggcaggcagagacaatggaagaaaatgaaagccagaaatgtgagccgt

SEQ ID NO: 14723 - DNA, 122 bp, Homo sapiens
taagtggaagagctgagattcgaacccaaggagcctggttctaaaatccacagtcttcaccgcattggtatgctgtctctcaggccagttacaatgtaggactgaaggactgaagactaagg

SEQ ID NO: 14724 - DNA, 122 bp, Homo sapiens
tgagtcactgctggagataaacataaatatctatttgccagagcctccaattccctaaatcgtagctgatagagaaggatagattagctctgtttccagacacaagcctagggcaagtggca

SEQ ID NO: 14725 - DNA, 122 bp, Homo sapiens
gctctaaaaaagtagaagtaaatacatttttaattgactagaatgttttaaatgatctcccgtgtgtcatctacttgttcaaaatataaattacactggcagtttttgggtgtgtaatctac

SEQ ID NO: 14726 - DNA, 122 bp, Homo sapiens
ccgtgcgcctaaaataaaagttattttttaaaaaaacacggaacccttccccccgccccccgcccgatcccccgaccccccggccagaaacaaaaccagtctggcctcttttctgtgggaga

SEQ ID NO: 14727 - DNA, 122 bp, Homo sapiens
tttgggcggccgaggctgatggatcacctgaggtcaggagttccagaccagcttggccaacgtggtgaaaccgcttctccagtgaaaataaaaagaaattagccgggcatggtggcgggtaa

SEQ ID NO: 14728 - DNA, 122 bp, Homo sapiens
acgcatattactttccattggccatacttagttactgcattattattctttttaaaatcccgaattctatccatttacttaggttctgtgatggtcaaggaatgtcaggaattttcctttca

SEQ ID NO: 14729 - DNA, 122 bp, Homo sapiens
cgccagccaatgagcgccgcccggccgggcgtgcccccgcgccccaagcataaaccctggcgcgctcgcgggccggcactcttctggtccccacagactcagagagaacccaccatggtgct

SEQ ID NO: 14730 - DNA, 122 bp, Homo sapiens
gacattcaaacatgttcaataactggcccagggtccagtggtcaagccaggactggacttcggaccaccagttccaaacccacaccccttcccttgcaccacacgcttttgtgtggatgagc

SEQ ID NO: 14731 - DNA, 122 bp, Homo sapiens
agctgggacaggaacctccctgcggagcagtcagagaataatcatcctagctcaggcccacgtggtgcttactttgtggcagcccctgctctccgtgttttatgtatgttaattcattttct

SEQ ID NO: 14732 - DNA, 122 bp, Homo sapiens
tcaaagcctgtggcacagcaggaaggtcagggacctgcacggatgtctgcctcctgctcccgctgtcccccacagtgtgtgccccagtttacctgggagacacttgcagtggaaggctccag

SEQ ID NO: 14733 - DNA, 122 bp, Homo sapiens
tccttcctcccttgctccctttccagggcacaagagagagttggtctccggaagccagggcgcggagagtggggaggaaacggtgggagtccccgtcgggaaggggcccccgggccccgcga

SEQ ID NO: 14734 - DNA, 122 bp, Homo sapiens
agtagatggtgatcacctcccggccgccacccctgaccaggaggactctgttcagcccctcggtcaggacttcaagaaactccatgtctgtggtcaacagagttaaggccacagctgatctt

SEQ ID NO: 14735 - DNA, 122 bp, Homo sapiens
gtaacctcctggtgatggccagcacatgacatctggactacaattctgtcccaggccgggcgcagtggctcacaagaatccgaacactttgggagactgaggcaggcagatcacctgagatc

SEQ ID NO: 14736 - DNA, 122 bp, Homo sapiens
cgggtgccaggcacgagctaggtgagaacagaatcaggtagaaatctcagcctagccacacggaagctgtgtgatcttgggcaggctgcataccctttctgagcctcagtttgctcacctgt

SEQ ID NO: 14737 - DNA, 122 bp, Homo sapiens
caccaatagctgcccagcccctccctcccagcccacagtgggtcccccagtcgctcctgacgaacaaatctaggcagcacctttcagtcccgagggagctgtgccacttttgataccactga

SEQ ID NO: 14738 - DNA, 122 bp, Homo sapiens
cgcagcccagcagccccagcagccccagcagcccccgcagccccagcagcccccgcagcccgcatgcgcggcccacgttcccatgcactcgctcggagcccttacccagctggcaggtggcc

SEQ ID NO: 14739 - DNA, 122 bp, Homo sapiens
ttggctgtttttctggaactgtcaggctcactccgttctgccaaacacccgagtctgggtcgctgtcctccatctgtctgtggttctttccagtcaaaatggccatgaacagcagctgattc

SEQ ID NO: 14740 - DNA, 122 bp, Homo sapiens
gaccctgaactaagacgctgcagggcctccaggaaaggaccaatgtgagagacactgagacgagagttagggtgagcctgaaggtgatctgaacagtagtaattggaaactaacaaaaaaaa

SEQ ID NO: 14741 - DNA, 122 bp, Homo sapiens
tatatggcagacaggtggccaaggtcattttggggtgggtattttatccctatcccactccgcattgctgtacgtggttcctttcaataaaaatccactgtgtctcagtgataagaacactt

SEQ ID NO: 14742 - DNA, 122 bp, Homo sapiens
ggaaaaacagactttctcccttttcctttcccctctggagcagctgggaaaggcgtctctcggagcttccgccattcagaaagtgtttccccgcccctgacggccccagcttgatgtttacc

SEQ ID NO: 14743 - DNA, 122 bp, Homo sapiens
atacataatagatatgctttacatcagggagatgatgcagaaactcgagcagcaagcctacgcttgatgaatgggccttggaactttagagctaaagactggtgggtaaagattcaaagtta

SEQ ID NO: 14744 - DNA, 122 bp, Homo sapiens
cgaagtcccattccaggtgtggtgttcattgggttgtctgctatactctctgctgcctttcggatcccttgcgtgtgcccgcttttccccatgtggtgatgatttgtgaagatcgggtgggt

SEQ ID NO: 14745 - DNA, 122 bp, Homo sapiens
aaaagaaaagcaagttatttcttcctggcaaagtgtgttgaggcacttttgggaacctgtcgtatttggcagagtcctaatatgaggtctagagctcattatgccaggatttggagccagaa

SEQ ID NO: 14746 - DNA, 122 bp, Homo sapiens
aatggtgacgcgcctcacagggagtgagccgaacccggtgggtgcggctcggggcggggccgcggtctgcgggaggagcggctgcaggcccgggaatccggcccggctgcgtgcgtaccaag

SEQ ID NO: 14747 - DNA, 122 bp, Homo sapiens
accaggcgggcggtctccctgaaaagacagcttcgagatgcccgagagggggctcctgcgcggagctgggcatgaaagttatatcttgtgtccccagctggcagaaagccccatcccagtcc

SEQ ID NO: 14748 - DNA, 122 bp, Homo sapiens
aaaaggcaaagcagaattaacaaaaaaatgttccatagcctacctgactactcacataagcgattagattacagaatgtacatttacagttcatcgagaataaaaagtcaaatttgtgatga

SEQ ID NO: 14749 - DNA, 122 bp, Homo sapiens
cagcaaggagaaaacaaagatcctaaaacatttagagatgggggagaacattagaaatggcggagaagtgttaatcatgtaagaaatatcgagtagactagaatgagacttagcagtaacac

SEQ ID NO: 14750 - DNA, 122 bp, Homo sapiens
aaaaatgcgcccagtttcgagagcctatcacagctcacgtctgggcgcgcagtacccccccgacactgctcctgttgtgtcagatagtggcagtgttgagcccaggaatacgcgcggagccc

SEQ ID NO: 14751 - DNA, 122 bp, Homo sapiens
gcccatctgcggcctcagccaggccgggccccagagtcacgctcggcgacgaggaggccgcgccttaggagtattgtcccatttgaggcctcgcggccccccctacagcaggctgggcgggc

SEQ ID NO: 14752 - DNA, 122 bp, Homo sapiens
tgctcaccccaagctagggcttgtggcccccggccctgggggctgatttggaggtgagagcgcctcagtgcctctcagatcccaagaaggagggccagtggcctccaccatcccggcctgca

SEQ ID NO: 14753 - DNA, 122 bp, Homo sapiens
ggagtcctgacgggcaggtccctctttcccctggtgcgcaacactggttggtagcttttgcggaggtggtgaagaagggcaggaggcctgttgagcggaggagtccggggatccctaattat

SEQ ID NO: 14754 - DNA, 122 bp, Homo sapiens
agtgatctgcctgcctcggcctcccaaagtgctaggattacaagcatgagccaccgtacccggcccaagagtgtaatgagattctgagaccaaaatgtttaagaaccactattttgaatagt

SEQ ID NO: 14755 - DNA, 122 bp, Homo sapiens
ccgggaacaccgaatcggaacactagagggggctgaagtccctgatatgggggccttgatcgctctgccgggtctgcagctgcagccacagctaagcgctccctcgcgcgacggctgaagct

SEQ ID NO: 14756 - DNA, 122 bp, Homo sapiens
tgagaccacccgctgggtgagtgtgaggtgtgggggtggagaaacgccaccagatatgtgcgagaattggttgggacttcagaacgttcttactcgtcccattcggaggatgcttcgtaact

SEQ ID NO: 14757 - DNA, 122 bp, Homo sapiens
gctgcagcggctacttctgagcagagctcttaaccagactaacacgtgctcctggccacccgtggacttacggcaagagaagctcacaccagctcgggttcagcagcctccctctccacaca

SEQ ID NO: 14758 - DNA, 122 bp, Homo sapiens
atacatgaaatgttatgtatttacccacagctaactagataagcttgatataatccatcacggtgatgcagaagccaatatgctgcagtgatcttggcactaacgacattgcacgaagagta

SEQ ID NO: 14759 - DNA, 122 bp, Homo sapiens
tggcctcgggcaggtagcctcccctcgggttgcctcagtttcttctttggcacgcagaggcggggctccaggcctgggccgctccatggcggggagggcgcggggacgctgcactcggggtg

SEQ ID NO: 14760 - DNA, 122 bp, Homo sapiens
ctgtgggccacacctgcaccccctttccatttgttctagaatgaaaaacttcttgggatccgtgtgctggctgatgaacaactgcagacctgcccttcaggcccctctgccggtccttcctg

SEQ ID NO: 14761 - DNA, 122 bp, Homo sapiens
tttggtggagacactcactggggcaatctgaggtaatccaacagactgtggcggagggaccggaagcgccaggcagggacccggggtagatgctaaatccaaactgaaacgtacagggctgg

SEQ ID NO: 14762 - DNA, 122 bp, Homo sapiens
ggttatgaaaaagtttactactcacatgaggccttctagggaaagcaaagcgggcacccacgccagtctgttgggcttcagtgaaaggacgaacaagtggctctggtttttgttgtggttat

SEQ ID NO: 14763 - DNA, 122 bp, Homo sapiens
tgatcacatcctggcagtggaggccaccacttggtggagggtgcagcacccatccagactcggatggcagatccctggggtctgtcttgttattgtgggggctgaactatcgagttaaatgc

SEQ ID NO: 14764 - DNA, 122 bp, Homo sapiens
gcgacagccgcacgtggtccccctggatggttctgcgggcgaggtgggcggaggacgccccggtgagtgcttgccctccctggttacctcgccagtctccggatccccgcgcagcacgcgca

SEQ ID NO: 14765 - DNA, 122 bp, Homo sapiens
ctgcccctccccttgggccgggcacggagtaggcacctggcgggctccccaggtggcagacgctgtcgctgcgcacacctggcctctgtgccgcctgctccctgctcgtcctcccctcccca

SEQ ID NO: 14766 - DNA, 122 bp, Homo sapiens
tcctagcgaggttgtcacttgaccaatgtctcagcaggtatcagggactggtaggtgacacgccacatccccatagccacctcatcctccatgcatggaataaggaactctgctcactttga

SEQ ID NO: 14767 - DNA, 122 bp, Homo sapiens
gatgtgtgagagggaggtacagtgggtcccgggtaggctgcaggggtgtgtgcgcgcgaacgtgttgggtccgggagactgagagtgtgtgtgcaagatttcgggagggagctttttctccg

SEQ ID NO: 14768 - DNA, 122 bp, Homo sapiens
gccgggcaggccgacgctaaaccagatgcgcaccggctcgccggcgctgggcctggcaggcgggcctgtgggggcgcccctgggctccatgacctacagcgcctctctgcccctcccgctca

SEQ ID NO: 14769 - DNA, 122 bp, Homo sapiens
caagtctagagaggggctattctccacccactgaaaagataataaaacacatgctatgggcggcggggagatgattggggagtggaagccccacagacatgcagtgaaaaatgatcctttct

SEQ ID NO: 14770 - DNA, 122 bp, Homo sapiens
tcctttgaggaggaggctgattggtccaagtagttctataaactgcatccacccacatcacgctactccaaagacactttataatcacaaaagaaacaatccggaagattccagttgtcaat

SEQ ID NO: 14771 - DNA, 122 bp, Homo sapiens
gtggagcagggacgtggctttaattggagcactcggctgggctgcctggggagactcttccgtgcgttcttcctctggatagaaccaccacctcctgggcgtcactgacaagctccatctta

SEQ ID NO: 14772 - DNA, 122 bp, Homo sapiens
acttcgaagcccctttcgagcagcgggccagtctcaacccgcgcgccgaacatctggaatcgcctcagctggggggcaaagtgagtttccctgagacccccaagtccgacagccagaccccc

SEQ ID NO: 14773 - DNA, 122 bp, Homo sapiens
aaatggtgaaggagattggcgccaaaagggaacagtaacaaccgtggccgataatgacgtcgggattggctacaccagggccccctctagtcacggtcaagccctagttttcaagcacttct

SEQ ID NO: 14774 - DNA, 122 bp, Homo sapiens
aattgaggcgacccggggaggggcgggaccgcggactggatttcgacttccaaattcccacgaggtataggagtctgagggttgcacaggaccttatgcattgtttgactcctccagagcct

SEQ ID NO: 14775 - DNA, 122 bp, Homo sapiens
ctaactgagaaagctcgtgaagtaacccctgtgcttcttcgtgatctgattcctagatttcgacggcctttagggatcggctcagacaaggggcctgcgtttttggctgccttggtacagaa

SEQ ID NO: 14776 - DNA, 122 bp, Homo sapiens
atcctcaggctttgctttggggccaagaagcgacccccctacagtgacagagtgtggctccgggccggacgccccacgctggcctcccgttcccatatcccggccatgagagcacgcggccg

SEQ ID NO: 14777 - DNA, 122 bp, Homo sapiens
cttttaaataaagtttctttttctggagatgaacctttaaataagtcgtacgtttgggagcgagggacaggagaataattttgatccagaaccttggagattggagaagcaggtggaaaaat

SEQ ID NO: 14778 - DNA, 122 bp, Homo sapiens
cttagcagcaggtaagaggagaaagctgataatgggcgaagctggggggaatttggtcagcgaagttagtgtctcaaagcaacacttaattggggaggtactgatatgatagacaggtgtct

SEQ ID NO: 14779 - DNA, 122 bp, Homo sapiens
tgctccatggggatctgggagaggaaagggttcctctctaggcagctgctgaggcctcatcgatccagtatctacacaggggtccagtccagctcctaaaagtgcaaagtaattatagatgc

SEQ ID NO: 14780 - DNA, 122 bp, Homo sapiens
ggcaaaaatgagagacaaggaatcaggaaactcatgagtcaaaacacactgagccctgtacggggggaaaagtgccctgtatggggaaagtgctatggaaaaatgcgtgtaggggagggaag

SEQ ID NO: 14781 - DNA, 122 bp, Homo sapiens
gtgcctttaatggcaccttttttcttgctttttgaacaagggccttgcattttctttttgcgctcagccccacaaatcatgtagccagttttgcatgtaactctgttctcttttctgcagtc

SEQ ID NO: 14782 - DNA, 122 bp, Homo sapiens
acgatagctttattgagatataattcatatgccataaaagtcactcttttaaaatgtttccggtatattcacaaggctgtgcagccttccctgtccttgattccagtctgagtttttaactg

SEQ ID NO: 14783 - DNA, 122 bp, Homo sapiens
ggcgtgagtcttggtgactgtgtctgctggatattgggccttagagtcccctgtccctcccgcccctgcctgctgtggaagggagagtggcaggctggcccgatgctctgtcttcccagatc

SEQ ID NO: 14784 - DNA, 122 bp, Homo sapiens
aggaaaactgggatttaactgatttaccaccgcagccagctcttcaagccaggggcgggccggacggctggcgcgcaaggcctgctggggcttgtagtctagaccacttccgcgctcaggcg

SEQ ID NO: 14785 - DNA, 122 bp, Homo sapiens
ctgagaaaagcctactgtttacacagtgccctctggtggtcagaagatgctgtgctgtctcgttaggatgaatggattaaaatgtacttttcctcctctgcttctggagagggagagaggaa

SEQ ID NO: 14786 - DNA, 122 bp, Homo sapiens
ttttttttttgagacagggtcttgctgtcacccaggctgcctctatcctctgggatcaagcgatccccccacctcagcctcccaagtagctgggaccacaggttcgtgccaccatatctgat

SEQ ID NO: 14787 - DNA, 122 bp, Homo sapiens
gtgccctggtatttctggggtgaaacttttcaaaacagtgtgttcgttgccactttcttgcgatatgctgtggtgcttaatgccacctggctggtgaacagtgctgcccacctcttcggata

SEQ ID NO: 14788 - DNA, 122 bp, Homo sapiens
ccagcgggaggggcccgggtgggggtcagcggccagaaggatgcagccagcagcacagcccgttgggggggtgctgcaaaggggcaggaaacgcaaagtccccacaaggagaacggccgcgg

SEQ ID NO: 14789 - DNA, 122 bp, Homo sapiens
aaccaccatggctggtggggcgggggagcaggcagcaggctcgagagacccagggcgatgcgggtcagggtgtgtaggttccctgcaggtcgccccaggttttatcctgggaggcggaatgc

SEQ ID NO: 14790 - DNA, 122 bp, Homo sapiens
aatcacatgagggactcaggcctagagggcacagtgtgatcagtgcttcatatatgactccgtgtggtgcggggccctctgggttgccagataaggaattttccaaggaaaattctccatga

SEQ ID NO: 14791 - DNA, 122 bp, Homo sapiens
aggagcttcgctctcctccgtccggattggtccagccgcgtcgccgaagttgtcaggccacgcccctccccgaaggaccccgctgtgattggctgtggctgaggttctgctgccccgacccc

SEQ ID NO: 14792 - DNA, 122 bp, Homo sapiens
tccaggctgggcacgctacccgaccaactccttacttgagctcttcagccgaatacatcccgaaggaaatgccctgcagccgccgccagggcatgttcttggagatcaacatcctccaggtc

SEQ ID NO: 14793 - DNA, 122 bp, Homo sapiens
cggcggccgcgagcaaacgctccgacgtctgtggtgacgtctcgtattgatttagggacacggggcggctgtggctgtggcccacggctcgtggggagcccgagtctgtgcgcagggaacgc

SEQ ID NO: 14794 - DNA, 122 bp, Homo sapiens
actttcctatcctcccacccgacttcattttgtgatgctgcgattgtgtgtgtgtgtgtgcgtgcatgcacacaagcacacacatgcagaaaatttgaaagaattggatgaggtttctgcaa

SEQ ID NO: 14795 - DNA, 122 bp, Homo sapiens
ccagcaaaggtgtttaggatgacacagtgattggcattgggcccactttcccctaggctgcggtctcgcagatgccagtaagtgccctcccccacctgtttgtgcaatttcagatgagccag

SEQ ID NO: 14796 - DNA, 122 bp, Homo sapiens
cgcacgaaggtagctccgggcggggagcgaggcgctgtcctcggtgctgaaaggccgaggcgcgcggtgggcgcgacagccccggagacccgaggtctcgcggagggacagcggctacgggc

SEQ ID NO: 14797 - DNA, 122 bp, Homo sapiens
accacaggcatgcgccaccacacccagctaatttttcatttttttgtagagagggagtttcgccatgttgcccaggctggcccaatttccgattaactctagatttgattacttttcttagt

SEQ ID NO: 14798 - DNA, 122 bp, Homo sapiens
acgctctgtttgtaaagtctgtaagtggatattctgacatcttgtggccttcgttggaaacgggatttcttcctattctgctagacagatgaattctcagtaacttccttgtgttgtgtgta

SEQ ID NO: 14799 - DNA, 122 bp, Homo sapiens
gacatggtggcaagaaactgctagaagagaataagctcgaaatctaaagagcaggttttgcgttgctgctatgctcgggccccgggcttatataagccggcgctgccctgtgattggtggag

SEQ ID NO: 14800 - DNA, 122 bp, Homo sapiens
gttgacattgttaaaaatcattttacgtggaagataatgttattataattagcctgcattcgttgaatgcctatgttttggccatttattaggtattttatacatggtttatgattctcaca

SEQ ID NO: 14801 - DNA, 122 bp, Homo sapiens
cttagacctctgataagcagctgttgactcacctgagcccttgtggccttgcagaatcaacgattagaagatgactcatttggttagttctaaaatatgcccagatgttaagtcccatgtgt

SEQ ID NO: 14802 - DNA, 122 bp, Homo sapiens
catgttcccgtcccacggccgctgccctttttagctaccaccgctagggagcaccacctgcggctcgcactgctcaaaactgagcgcttctctcaacgcagtttactctctggagcaaggct

SEQ ID NO: 14803 - DNA, 122 bp, Homo sapiens
attaccactgctacaatgtttaaagccaattacctgagcacatcataaggattctcttaccggttgtcccagttaagtaatgttgattgatcaactccttgacaggagctgatggcaaagaa

SEQ ID NO: 14804 - DNA, 122 bp, Homo sapiens
tctccagccccacttcccaaatatgcctcagccccactagctggcaccaacttaattccacgggaccatctgctgaacattccccagtgccatggccagttgccaggccccagcgccagcca

SEQ ID NO: 14805 - DNA, 122 bp, Homo sapiens
tggcacagagcgaaggcctggcagtccaccccaggcctgcactgcacactgaagagctgtcgcccggggcacaggtgaggggcttcgctgggctgaggcatcaacaggtcaagcgcgtcatt

SEQ ID NO: 14806 - DNA, 122 bp, Homo sapiens
agacgcacaggccgacagcctgtagggtgatctgggtgggccaggcccaggagcatgtcccgcccactttccccaccccacctcccaggcaggcagggcggctgtcagtggcccactgcttt

SEQ ID NO: 14807 - DNA, 122 bp, Homo sapiens
atttaacctctatttttaaaaaacaaaataaaccgtgttgtcaaggtctgggacagcaagcgcacacaggtaacctgcctgcccatcagtggctctgtgcctagggtgtccacccacctgtg

SEQ ID NO: 14808 - DNA, 122 bp, Homo sapiens
cgagccaaacattcacacagccatgtccagatgccctgtcctgggtccttaatgcatctccgagtccactgtatccattcgtcccttgggctcagtcacgtgcacttgggcttcctcaacag

SEQ ID NO: 14809 - DNA, 122 bp, Homo sapiens
gccgggcaggctgcaagacaggcccgcggtcagggccacgggcccgagggtgggaggctgcgctggaatgctgtgtcgggccccgctctgaccctgttccggccagatttcccatctgggca

SEQ ID NO: 14810 - DNA, 122 bp, Homo sapiens
ggcatgtctgcataccaaccaggaggctggtatggaaggagatggactagaaggagaggacgaggaggtcagttcagagaataactgggaggcagtcatgaaggtccctggaagaactttga

SEQ ID NO: 14811 - DNA, 122 bp, Homo sapiens
tgtgatctgagcatcagttacacgggcggtgtctcctatgtgatctgagcatcagttacacgggcagcgactcctatgtgatctgagcatgagttacacgggcagcgtctcctgtgatctga

SEQ ID NO: 14812 - DNA, 122 bp, Homo sapiens
gacaagggtccggccgtagctggtcccgtcctggaagctgcttaagttcctggttcccaccggggccaagagtgatacctgatcctgggggattgtgaaatgacctcatgtggcagcccgcc

SEQ ID NO: 14813 - DNA, 122 bp, Homo sapiens
agacatcttcagccccaaacggagctggaagcgccagaggtaccggctgagcgcccaggccgagggcctgcagttgctgccaggtgggccctgccctcaccctaacccggctggttctctga

SEQ ID NO: 14814 - DNA, 122 bp, Homo sapiens
ccaaataacctagtcgaggccctctggtgtgttgccttcccttggaaacccctcagtgcccgtaacccagtcggccgggccccgcgcctccctaagccccggcccggtgacccgcccggctc

SEQ ID NO: 14815 - DNA, 122 bp, Homo sapiens
tgccgggaggaagaaggcggcgttaagtgggcagagctgagagtcactcctggactcctgcgcttggggcaccacgcactgatctgagtggaaccccagccagcccgaacaatgctgggagg

SEQ ID NO: 14816 - DNA, 122 bp, Homo sapiens
atagacatgtcatgtccattttatatgcaatatggtgaatcaggaggagccgtgaaaggacgactcactaagttactctcccaatgtttatgtttgtttagacagtgaccatcatgaccact

SEQ ID NO: 14817 - DNA, 122 bp, Homo sapiens
tccaaaatcaccttgcactctgaaagataccagccttcctcatctcctcaaaatccttcacggaatcctaattgctgtagaaatctgcgaatgactctttcttggttcagccacagcagact

SEQ ID NO: 14818 - DNA, 122 bp, Homo sapiens
ttcccggggctgagtcacccatgtgcctttcacctgtcctggagttagagcagtggcccccggcaagctggcagaccctgcctggccctctgggcttggcgggagaaaaggaagtaaggctt

SEQ ID NO: 14819 - DNA, 122 bp, Homo sapiens
cccggcgcgcgacaccagcagccagtcaggaagccctgcgttcatgcttccagccattgtcggagtgtcagccgtcacaaggcacttccagccagtcgcaacggcgggtcgccagcgccgca

SEQ ID NO: 14820 - DNA, 122 bp, Homo sapiens
ccacgcgcgcgtccgctagcccaggcccggcggaaatgactgtgagctcaaggtgtgaagcggggctaagaatgggaaagcgagtgacttccgccggagaagctgcagttgtcgcctgtaga

SEQ ID NO: 14821 - DNA, 122 bp, Homo sapiens
tccttcttgtcccagtcaccccactggcagggccgtggggcctccctgctgtggtcgcagcgcgctgaggctcccatgtaccacttatgctgggcgtgcccttggaaactcactgcagccct

SEQ ID NO: 14822 - DNA, 122 bp, Homo sapiens
atttaaagaatgtctgagtgttggagataaaacaatgaccaagacctgcttcttgtcttccgtaacagtcagtagagaaagacatgaaaataattacaaccaagtggtaatattgaccaagt

SEQ ID NO: 14823 - DNA, 122 bp, Homo sapiens
aagaatttccaaagatggggatatagaaccaaaagttttcacaagctccccaggtgaacccgggcaacacggcaaaactctatctctccaaaaggtacaaaaattagccgggtgtgttggtg

SEQ ID NO: 14824 - DNA, 122 bp, Homo sapiens
caaaatagccacatgtggcaagcctcattgacaggccaaaagcctcagtcaacatggccgcgaccggcttccattgcccttcactgcccgcagtaaggatggctccggtgacttccttcgaa

SEQ ID NO: 14825 - DNA, 122 bp, Homo sapiens
tgtgatctgcccgcctcggcctcccaaagtgctggaattacaggggtgaaccaccgcacccggccttgttgcccatttctagtacacttctgttttaggcctttgctatttcctctatccag

SEQ ID NO: 14826 - DNA, 122 bp, Homo sapiens
gaggcggcgggaaggaagggtgcagggatcttgggtggggggcgcgcagccccctctccccgtccccattttcgggacaggagcagaccgcccgtttctggaaagaccgaaagcgtggcaag

SEQ ID NO: 14827 - DNA, 122 bp, Homo sapiens
aaattatataatagtttgcagaagaaggttgcatgggcacaagcctcgatcatcagtccccgagaacggccctgcaaatacagccagatacgatcttcctctggaaccccatactcaaactg

SEQ ID NO: 14828 - DNA, 122 bp, Homo sapiens
tggctcggaggcaggcagcccgcgggttggggggtcgcggggagctagactcgggacgaacgtcccccagagtcctggccctgctgtgagctttcgcgggagtcccccacactcacggcaga

SEQ ID NO: 14829 - DNA, 122 bp, Homo sapiens
aaccagaggcgtggtcccctgggaggcttgcggcttcccccagccctgcgggcctgctagcgcgaaaccgggttgtccaaacgcaccttacctgctgggtgttccctgggggtgggatggga

SEQ ID NO: 14830 - DNA, 122 bp, Homo sapiens
tggcggtcgcccggggataggaagggagtgatgatgaccccaggtaactcttgagtgtgtcgctgatgccatcaccgcagcgctctgaccgccccctcggtccagcatttctcaggctcaac

SEQ ID NO: 14831 - DNA, 122 bp, Homo sapiens
tatagagtcgctggtaagcgtacgcccgaggccctgggcgtccccactggtagatggtggcgtgtggacgaacagcttagtccttgggcaaagcttgtgctggtcgagagtggcgagtctgg

SEQ ID NO: 14832 - DNA, 122 bp, Homo sapiens
aagggcccattagcgcggcaggtgcctcccgggctgtaaattcgccccgatttatctccccggggacgaaataaatccagcttggatgggagtgtagttaggcaaaggttttcatgcgaaat

SEQ ID NO: 14833 - DNA, 122 bp, Homo sapiens
cctccaggcctggggctaggtagggtacaggaaaaagcgactccaggcctggagggagggcgtccattcccagcttgatcaccaaaggaaaacgaggcctgaattccgcaagctctttactg

SEQ ID NO: 14834 - DNA, 122 bp, Homo sapiens
gggttccctgcgggcggcactgcgagttcctcacccgggcacgtcctcactccccgtgcccgggatgagggagaaaacagccctttggcgtttgagcaattgcagaaagtttcagcgagttc

SEQ ID NO: 14835 - DNA, 122 bp, Homo sapiens
gctacctccagggtgacctcagcgctgcgccccgaggcaggcaggctgggatggtgaattcgacaggcatagcgtgccccatgctgctcagtggtgactgggggcggctgcaagtgcccaga

SEQ ID NO: 14836 - DNA, 122 bp, Homo sapiens
gggtgtcccgggaaccccgcacagagccacggccataagacagagcggacttgcggcctccggtgacctcacagccgtgatggcctcctgcagctgtgaccgccgccccacagccgcgaccc

SEQ ID NO: 14837 - DNA, 122 bp, Homo sapiens
gagggaccaagtggccacactggccgcagagctgccctgcccggcggcgtcagtctgggacgccctgcacgcctgcccctgccaccaggctggcttccttctgagctgcctcggccggagac

SEQ ID NO: 14838 - DNA, 122 bp, Homo sapiens
agattgaaggagactcgagagccattgacacagacggcgcctgtggtcctgggcgggctccggggcctctgcatttggtggcatggtgtgacagtgcccacgtcctgatttgggcaggtcgg

SEQ ID NO: 14839 - DNA, 122 bp, Homo sapiens
gtaccatcaccgtggtgcgaggtggctgtgagtgaatacagctctgtgtgtatttcattccgaaagcactgggcgtgctgtctggagagggctcggcagctttcgtgttggcgtcgtaggtg

SEQ ID NO: 14840 - DNA, 122 bp, Homo sapiens
gcaccgccccctccgccggacacccgggcctggcgtcccgcctgcgccccgcaccctccgcgcctccgtcgcctgcctcctggggcccagagcccggccactcccgctgcccgcctcacgag

SEQ ID NO: 14841 - DNA, 122 bp, Homo sapiens
aaaaaggcaaatttgggagtccatggataccctattattttagattccaggacaaattgtcgaataagcacgtttcataaaaacaatcctccgcagcatcccgtgacagcagctggtccctc

SEQ ID NO: 14842 - DNA, 122 bp, Homo sapiens
cttctgggacgttgttaacacgagtgaccgtccaccctggcccgatcaccgaccactaaccgccacccactaatgccccggagaccccaggtacgtccgtccttgggggaggggagcaggga

SEQ ID NO: 14843 - DNA, 122 bp, Homo sapiens
tctcagcaccgatttaaaggagcccagtgaacgcccggctaaaaacagggaagaaacaggcgacgtttctttcaggcatatttcaggatgcctcactggagttttagcttactagacaccta

SEQ ID NO: 14844 - DNA, 122 bp, Homo sapiens
tgggggctgtcctgcaacgcctcctctagcaggagcttgtccacggcgggcatggtgcggcgcggctcagccgagggctgggttggaaggacagagggcaggagacgcggcggccgagagca

SEQ ID NO: 14845 - DNA, 122 bp, Homo sapiens
gggctgtgatctcatctcagcctttcttctctgcctcccattccaacctcccccttttctcgtactctaagcttcagccacaggggacactagctggtccccagcctttgcacatgcccttc

SEQ ID NO: 14846 - DNA, 122 bp, Homo sapiens
cgggcccaggcggaagcaccaggcatttctggtcccagccgaggtctgaggtctgtggagcgcagccagcacctccactgccaagatccccggcagggggggtggggggcgccggcggggac

SEQ ID NO: 14847 - DNA, 122 bp, Homo sapiens
tctgtcttttcgaagacatggggtcttgctatcttgcccaggcaggtcacaaagtcctggcgatcttcccatcccggcctcccaaagtgctgggacgacaggcgtgagccaccacgcccaac

SEQ ID NO: 14848 - DNA, 122 bp, Homo sapiens
gccgtgtctaaatcaaggctcggggcggtaccgacgggctgaatgacaaatggcagatgccgtgggctttgccgcccgcggcagccaagaggatggctgcgccgaggaggccgcgcgcaggc

SEQ ID NO: 14849 - DNA, 122 bp, Homo sapiens
tcctgggcatggccgctcaccacccacctgtgtgaatgcggacgtgccgctgcagagcgccggggtctgcaaactgtcgctggcagtggatgcacacgtagggcttctccccgctgtggatc

SEQ ID NO: 14850 - DNA, 122 bp, Homo sapiens
tttctaggttcaagattcagggaacgttgcaaggagcaaaatattaataaatgtggtccccgctttgctgaggttacatccccagctcatcctagtgggaggagaccaaaaccttaatgagc

SEQ ID NO: 14851 - DNA, 122 bp, Homo sapiens
cggagggatgattggcgtcttggcgcccaatgggcgctggcgggcggccttgagtacctgcgctgggcgggcgggaacggcgcgcggcgagctgagggtggcggcggtcgacatgttccagg

SEQ ID NO: 14852 - DNA, 122 bp, Homo sapiens
ctcagggaggaagccctgcctgaaaaggctgcagcctaggctatcactctttcttcactccgcccagcatttggtcatatcttctgtcactcagggcctgaaggggcgggcccttaaaccgt

SEQ ID NO: 14853 - DNA, 122 bp, Homo sapiens
agtgggtgtgcgcaccatgcatgagccgaagctgggcgaggcattgcctcactcgggaagcgaaaggggtcagggagttccctttcctagtcaaagaaaggggtgacagacggcacctggaa

SEQ ID NO: 14854 - DNA, 122 bp, Homo sapiens
tctcgatcctttaggctgcgccgccgcagagctggaacagcggtccattcctgccggaggcgccaccccagggctgcagggctgccctctagcctttgcgcgggtgcctgaggcctcccgct

SEQ ID NO: 14855 - DNA, 122 bp, Homo sapiens
gcgctagagagctggaaaggccgagggtgccatgggctggccagctagagaaggcttcctcgctttcatttttcagtcatcttctaagacccaaatggttcaggaggaagcgagtgccacac

SEQ ID NO: 14856 - DNA, 122 bp, Homo sapiens
gtttctctctgatactgaacggcttccaatttcaagtagaatgctacatcagaagaataacgatgggaagagaaccggtttcttgtgtaatccaacatgttttagtctgcgcattacaaacc

SEQ ID NO: 14857 - DNA, 122 bp, Homo sapiens
ctttgtatatttgtgcttctccacttctcagaatacttgaaaatagtgacatggttatttcggcatgaaaaactccaaatgtttccccctcgattcataacccaactacttccatttcaggc

SEQ ID NO: 14858 - DNA, 122 bp, Homo sapiens
ggacccatcaccaggcggaccgtgaaagtctctgtgactcaagaatcagctcaggcctcgcgcatgcgcattggctgcgccgacttaagctctgctcctgtaagtcaggctggggcctcttt

SEQ ID NO: 14859 - DNA, 122 bp, Homo sapiens
tccagaatttctgacagcccaagttaacaagcccccacaagtgaattcagagagcattaacgggaaagttctaaacagaacctctgctgtcatgtaagcagctcagaaaaaaacactcttct

SEQ ID NO: 14860 - DNA, 122 bp, Homo sapiens
ccccacgcgcaggaactctcggtgtgagggacggagcttccggctcgaggcggaagtgctcgcgcgtaaggcaggaagtctctccccacgccaatctccatggagacgggacgccgttcgag

SEQ ID NO: 14861 - DNA, 122 bp, Homo sapiens
agtgtagaagccaggatggaatgctcacagtcaggacaatcaggactgaaaaaaagcattcggtgggggtcaagggagacattttcaagggaaattgagtaggctttttcctaggcactagg

SEQ ID NO: 14862 - DNA, 122 bp, Homo sapiens
tccgatccaagcgccaaattcaaatttgcggccatcttgagcgggcggaattcagtcgcgcgcggtgcagtcgggaggtggaggcaccggctgcattgttttcgggatcgaggggtgagggc

SEQ ID NO: 14863 - DNA, 122 bp, Homo sapiens
actgagtcctcccaaggcggccaatacgtggcgctgcctgcttcgtggcagagtcaagaacgctgttcctcgaaggtcacgtcaggggctatttctggccacagggcctgggctcctcatga

SEQ ID NO: 14864 - DNA, 122 bp, Homo sapiens
gccacactgctcggcttgcggacggggaaacccgccatcgcgctcctgccgcctgccgagcgaggatcaccgctccactggggtcagcgggctgttgactccccgcctgggtgaaaccggag

SEQ ID NO: 14865 - DNA, 122 bp, Homo sapiens
cgggacggagcgcgagccccaatccctgtggctttaaaactccccggcgcttaggttattcgatgcccaccagccttaccgatttaggtaaaggagtaaataaattggcacctgtaagacaa

SEQ ID NO: 14866 - DNA, 122 bp, Homo sapiens
gtaggggggaactgcttggcatccagcttgtccttgtactggagctcaggggtagctaggcgctcacattcctcttggtcttgggggctcaatccactccgaagtatatagcccaaaacctt

SEQ ID NO: 14867 - DNA, 122 bp, Homo sapiens
ggtgtggagggagaggcacgggtgggaactggggctgcgtgccacgtttgcgggccagcgcgagttctgggagggggtggagttggcgggccccacacttggagcagccagccggcctgcaa

SEQ ID NO: 14868 - DNA, 122 bp, Homo sapiens
aggccgaagtgcagtggcgcgatctcagctcactgcaatgagctctgcctcctgggttcacgccattctcctgcctcagcctcccaagtagctgagactacaggtgcccaccaccacgcttg

SEQ ID NO: 14869 - DNA, 122 bp, Homo sapiens
aggcaggagctgggcctgtgggcgcagccatgagcaaatagctgggcccggagaggaggccggcaggcagcaactgggccgggggaggccgatttgaggaagttctgggcctggagatgtcg

SEQ ID NO: 14870 - DNA, 122 bp, Homo sapiens
ccccatacttcagtcacagaaaaccacgtaagccctctgaacacgccacaaagctttaagcgtctaaactttagcatattctccctgctctgcttggaatgccccttccagctcatcccctg

SEQ ID NO: 14871 - DNA, 122 bp, Homo sapiens
gcggtaatgccagcgtctgggaagatgccccttgccaagcggaccgtggtctagcagtagcggaccgggaaagggagtcttcctttccccgggggagtttagagaagactctactcctccac

SEQ ID NO: 14872 - DNA, 122 bp, Homo sapiens
cctgagaggaatggggacgacagccctggttcgggagcgcccgctctcggcccggtgctgcgctgggccccagaagttgcgaaagaaaggacctcggccctgtcctgagcccctgtgggccg

SEQ ID NO: 14873 - DNA, 122 bp, Homo sapiens
atgggcgcaggaaaggccttacctgcctggagaggtagaccacagccaccagggaggtctcggagtgtgagacgccggacttgtcgtacacagccatgagggcaccgtcctcgggaagctgg

SEQ ID NO: 14874 - DNA, 122 bp, Homo sapiens
agtcaaaggggagcagatgtcacatggccggagcaggagcaagagtgtggaggggccacacgcttttaaacaaccggatctcctgggaattcattcacgatcgtgaggacagcaccgggggt

SEQ ID NO: 14875 - DNA, 122 bp, Homo sapiens
ccccatgccaggacacccacccacaccacatagccattgccctaggaacctggacttgcccgtttcaaagactgggaggccaaagaaaaacctggccggctcaggacgctgacccatcgggg

SEQ ID NO: 14876 - DNA, 122 bp, Homo sapiens
gttgctgagtgaggacggggtgacgcctgcgccccctctcccgcgcggggtgcgccgcctcgccgccgaaaagttctcgactttagtttgtagaaatccgctttggtggtcccgacggcagg

SEQ ID NO: 14877 - DNA, 122 bp, Homo sapiens
tttccttgatttgcttttttttcctgcctgtgtcatttccttccctttgctcacacaggccggcctgtgagagttcccggggcttgctctccagccctgtgcgcgccccagcgcagggggga

SEQ ID NO: 14878 - DNA, 122 bp, Homo sapiens
tgctccctggggcgaggagcagccccctctgagtcccctcggccttggtctctgcccatccgcccctgctatggttcagagcctggcccagctactccagacttctatgccttggtggccca

SEQ ID NO: 14879 - DNA, 122 bp, Homo sapiens
aaaagggggctagtgacattcctgcccacagtgcagggctgcagtggtggaggaggttcccgggaagcatttgagaagcaaacagacctcttcctaagaaacagaagcgtctgcctaacccc

SEQ ID NO: 14880 - DNA, 122 bp, Homo sapiens
acgtcagggtgagaccccggcgagggcgacgtcaggaagagaccccagcgagggcgacgtcggggatatccaaagtgccccacagggaaaagattctgaagagatcggaacacgaaatttct

SEQ ID NO: 14881 - DNA, 122 bp, Homo sapiens
tgatttgtcgagcctttccaggatcactgatggaagttatatgtgttcccttccaggtatcgtgtccatacccagcccccagcctgcaggctagagactctgaagtggcatgaggccagcct

SEQ ID NO: 14882 - DNA, 122 bp, Homo sapiens
acagataccacaaatgctcacctttcttccagaattttcacatataaatagatgtttcttcgtttgctgtttgctcttaagaccatttcccaaggctttaaaaggtcaggggttttaacatt

SEQ ID NO: 14883 - DNA, 122 bp, Homo sapiens
ccagtcacagcgccttcctccgggctagaacctgtcgggggcccccagcctgtccagggccgctgtcttccaggaaagagagagctgtgcccagagaggagacagaactctttctccgtgaa

SEQ ID NO: 14884 - DNA, 122 bp, Homo sapiens
ggggaggggaggtggcgtggggggcggcgctgaggggccgcggccgggaggtcccggcgacgccttccctgtagtactatcaccattgtggtgggggtgagggtgggagaggagcgctgggg

SEQ ID NO: 14885 - DNA, 122 bp, Homo sapiens
cgctgtgaaagggggtggaatgatcatctctaccccgaaactgacaagttgccccactcccgccccctcttggtagatcctcccccactgagcgttcattagcataaaactggtctggctgg

SEQ ID NO: 14886 - DNA, 122 bp, Homo sapiens
gtggtgcccctctcactacatgaaatgcagctctgagggaccccattcagtcttatgtttcgggccttaggtgtaggctactgccttcctttctgccccttctactttatcgacttgttctt

SEQ ID NO: 14887 - DNA, 122 bp, Homo sapiens
gtccaaactttgaaaagggagcctactgatactcatggagggacaggcatgcaggggacccgtgtgcagcgtcagaaggtgtgaggctgccttgtcagtgtggtccccatctttgtgctagt

SEQ ID NO: 14888 - DNA, 122 bp, Homo sapiens
ccctacctctgcaggacccctgggaggctggggcctaccatgacaagaacttctccatggcgcccctgaggtggttccttgctgaggtccgagcagcacagggctgggcggctgtgatgtcc

SEQ ID NO: 14889 - DNA, 122 bp, Homo sapiens
ctctgtcacccaggctggagtgcagtggcatgattttggctcactgcaagctccacctcccgggttcacgccattctcctgcctgagagttgagtaactgggactacaggtgcccgccacga

SEQ ID NO: 14890 - DNA, 122 bp, Homo sapiens
tgtccaacttttatgagcacaactggtttgcattttcagtcaaattttatacccctccagcgggggactatttgcttttacacaacacggagcccaacagagagccagctagagataaagca

SEQ ID NO: 14891 - DNA, 122 bp, Homo sapiens
ccaaagcagttctgcccaaccctctggggtggaagctgagcagaggacccccattcagggcgcttatgctgtcagccagtctcctaggccctcaatcttcaggggtgcaagtaccccaaatg

SEQ ID NO: 14892 - DNA, 122 bp, Homo sapiens
gctgtgaagagcttaggatgatgtacttgtgtttatggcccgttccatttgaagtggtgtcgcactgcaggatggcgcgtaggtcagcgaggggccgcgggtgcgagggtggtcctgtgaga

SEQ ID NO: 14893 - DNA, 122 bp, Homo sapiens
gtcgctcaccccgaagctgccgtgggcaagttagaaggaaaccaaaacaagcgccgcgcccggagctgcccacgtgatcacaacacagcacgtctaacgccagggagccgggcgcccgggga

SEQ ID NO: 14894 - DNA, 122 bp, Homo sapiens
ggaacttaccagaaaggtaaaaataaatcactgcagaaaaattacggatctggggtggctcgcctcaaattggagcccagaaggccttgggcccatgggaggctgggaagtgaggacctgca

SEQ ID NO: 14895 - DNA, 122 bp, Homo sapiens
tactagggaggctgaggcaggagacttgcttgaacccaggaggcggaggttgcagtgagtcgaggtcatgccattacactccagcctggcggacaagagtgagacttcatctgaaaaaaaaa

SEQ ID NO: 14896 - DNA, 122 bp, Homo sapiens
aggcaccaggtgaccgccaagtgcttggacccaggcagtctggcctgggaagaaggtccccggggagcagaacagtctttgctgggcccagatccaccggctggaagacttggggtgaccct

SEQ ID NO: 14897 - DNA, 122 bp, Homo sapiens
gtgcgtcctctgggccgtgaagccaggggaagagggttcctctagacagctcgatgtgcccgggagagacacccacgctgaacctgcaagctggggtgctccaccagcgcgaacctctcgcc

SEQ ID NO: 14898 - DNA, 122 bp, Homo sapiens
gacgcttctagcacttctacatgcccttatccctccaaactccagggggcgatagcccagcgcctgactctctgcagccccacggcgctccttccaatcagcagagagaacacacgtccttg

SEQ ID NO: 14899 - DNA, 122 bp, Homo sapiens
agccggcctcgcgaatgcacatacgccagttgcggggcaccaggcacgagtggtgagctgcggctgtcgtcacagtgaacgccaccgttgcctggccacgggtccctgcggcttggcaaacc

SEQ ID NO: 14900 - DNA, 122 bp, Homo sapiens
ggtgaggaagccagtgtaggcaaatagcgagaggggagaagacagaaaggtaccgaaggtcgaccttttttaggtatcttatccaagttattgaggggaatgggtatttagccagttttttg

SEQ ID NO: 14901 - DNA, 122 bp, Homo sapiens
gggtgcccagcacaaaggcctggtgcaagagtggggttgcccacgtgggctggtcctggccgcgggtggaccctccccacgcgggcggtctcggagcttcctgccgcgcggtgtgtgtgtgt

SEQ ID NO: 14902 - DNA, 122 bp, Homo sapiens
tacagcatgagccaccatgcctggctgatttttgactttttaaatatccattctgactgccgtgagatggtatctcattgtggttttgatttgcatttctctgatgattagtgatgtggagg

SEQ ID NO: 14903 - DNA, 122 bp, Homo sapiens
gctgctgaatatgcatgagaggcagcaagagagagagcaggagaatgaacatgggggagacgcagagaagcacacagaggcatgactgataagggcagaggaggaaagaaggtctcggagac

SEQ ID NO: 14904 - DNA, 122 bp, Homo sapiens
agagaaaaacacataattatctccagatgagtcagcttggggaggcggaggcagcggcagcgcggcgagcgtgcagggaggccggagccctgcccggggcgggtcgcggggtgggcgggtga

SEQ ID NO: 14905 - DNA, 122 bp, Homo sapiens
tgaccccacgccccgaggtcggacctgcagaagtgggtcaggacccgactgagcatgctccgggcagtgccaggctgccgcacgcggctgcatctggttgcccaaggttgatgtagccgcgg

SEQ ID NO: 14906 - DNA, 122 bp, Homo sapiens
cgctgctcgcagagcacccgcatcttggtagagcagcggtagcacaccgggtggtcgcagcggccccagcgccgtggcctccaggtctccgcagcacagcacgcagctcccgccttcccgct

SEQ ID NO: 14907 - DNA, 122 bp, Homo sapiens
ggagtcaccggaacactgaggaagggcctggctcagagcagcatgggctcctgtttgctgcggccgtgatgactgcccgggctgctgtttgccgagtaccggccgagtgcctgccgctgctc

SEQ ID NO: 14908 - DNA, 122 bp, Homo sapiens
ctgaccagcgtccatcccacttctgcgcaccaccactctcgttttccttcaggaaatgaccgttctcccactttgagtctgcgtagtttgggcgaactgaccccacaccccatgtttgtttc

SEQ ID NO: 14909 - DNA, 122 bp, Homo sapiens
gacaggaagtcttcagacagggtcaaacttaccagcaaaacggtcagtagccagaaggtccgtcctgaggccgcctctgtcagcctgccagcttttgctggtatgggatgggaagtgggaga

SEQ ID NO: 14910 - DNA, 122 bp, Homo sapiens
ggacgggtagaagaagagagactgccgagggctctgggggcagagtcaggggtcacggggcggggcaggccccaagcactgcacatacctggggctgccagccctggtgggaggccctggac

SEQ ID NO: 14911 - DNA, 122 bp, Homo sapiens
tccttcactcaactgcaattaggaagagtcaagttccctttggcgcctaaaggagaacaacggccggcaatcccaggaatccgatcatagagaagagggctcagagtgcagcataaatcagt

SEQ ID NO: 14912 - DNA, 122 bp, Homo sapiens
ggctgatcctgcgctggcgagaagctcagccatttaggggaaagcgaaatcgaaagcggccgcctgctcactagataacgcctacttccaaaagtggcctgcccagactattttggtagcaa

SEQ ID NO: 14913 - DNA, 122 bp, Homo sapiens
gttgccctgcattccggcctgttcactccactagttactaacagcaatgcccttaatatgcgcccagctaggtggcctccgggaggcgcaaggactctcccaactgcagctgctggttcaca

SEQ ID NO: 14914 - DNA, 122 bp, Homo sapiens
tcctaagtagctgggattacaggtacccgccatcatgccctgctaaatttttatttttgtcgagacagggtttcaacatgttggccaggctggtctcgaactcctcagcctcccaaagtgct

SEQ ID NO: 14915 - DNA, 122 bp, Homo sapiens
gaattcacatctgtctcctttttatgttccagatctctggtgaaattcccatcattcccccgactttcttgaataatcaatcagttaccaaagtccctgcctcctgcctccagcatttaagt

SEQ ID NO: 14916 - DNA, 122 bp, Homo sapiens
tctgggactgggggcttgtggcccactaccaggctccgaggggcagtggtttggtgcagccgcggatccgtctactgcggctccgtctactccggctatgaaccgcagcagcggcggcggcg

SEQ ID NO: 14917 - DNA, 122 bp, Homo sapiens
ccccccttccggggaccaagggaagtcccgcctctgggtggggcgaggggtggggccaggcggcgggagggatcatcttccgggagcgtggctaggggcggagcgactgccgcgcgatagtc

SEQ ID NO: 14918 - DNA, 122 bp, Homo sapiens
cccgtgagccagtggcctgccgtctcccagcactctgctattccaaggcctctgctctgacggttcgaaaagggatggtccctgtttctgatgccaattgcacggttttgtcttaacctttc

SEQ ID NO: 14919 - DNA, 122 bp, Homo sapiens
aaaataaaataatgtttcaaggcgctactattgtctctgttagacacgtcaagtaggacacgcgtatttcgaaggaaatttcctgagtttctctattaacttagctggtagccaatgcccca

SEQ ID NO: 14920 - DNA, 122 bp, Homo sapiens
agcgctcagtatttgtttgtcagtctgatcctggacctccaaccagaattggggtttctacgctttagaaaccccaaatcaacttttttttgtacctctatgaagaaactgagcaaacccaa

SEQ ID NO: 14921 - DNA, 122 bp, Homo sapiens
gagtctttacaattcagccactccctgcaaggctgttatagcctggtgcattgaaaagtgcgaagagaatggaaaaggagagaagggcggggaagggagggcttaaaaagtgggggagagcc

SEQ ID NO: 14922 - DNA, 122 bp, Homo sapiens
ttgggggaaatccatggcctcctgttgccagtcgcccggcgcggaaagtggacagcccagcggccagtgagaagcaagagcaagaaagcaaaccttctgaagacccctctcctcgcccagct

SEQ ID NO: 14923 - DNA, 122 bp, Homo sapiens
ccacctcgcctcactcacacttactcacctgtcacacccacagcggacactgggcccacgcgctgcccctcgtggaggccgtacaggtgcatcttgtatttgcacccgggctccaggccccc

SEQ ID NO: 14924 - DNA, 122 bp, Homo sapiens
ctccctccctccttcagcccatccatcagttcagcgttgtggggtccttaccatggcagtcgtccctccagccctggagatccttcagggaagatgcaggtccatgctgcagggtggactca

SEQ ID NO: 14925 - DNA, 122 bp, Homo sapiens
ggagcggagggcccggggcctggcggtcgccctcggtgatctcctggtcctggtcttccgcgagctcagtgctgcacagcgccccgctagcctccgccctcacctgaacgcatctgcggctg

SEQ ID NO: 14926 - DNA, 122 bp, Homo sapiens
tccatagtgaacacacgcaaatgtcaaatggccatcatttagcatctgccctcgggcttccgggtccatcacgtggttactgacaggcaggccgcgcatgcgcgctgctactccgccgagcc

SEQ ID NO: 14927 - DNA, 122 bp, Homo sapiens
taaagactcgaaaggaagaagcaatcttcattaacaaacaaacaaaccaaagaggggagccgactcttactgaaactttaaacagaaccacatggaccctcccaggctagtaatccaagtct

SEQ ID NO: 14928 - DNA, 122 bp, Homo sapiens
cggacaggctcctaacgtgtttcagtctctgcgccctcctctgtagaacctggcagatagcgactgaggctgtctgccacgtagggagggggcctgtgctggagttgctctgaatgtcctgt

SEQ ID NO: 14929 - DNA, 122 bp, Homo sapiens
aattgcattgctcactagccaagctgtggcttccttgacacatgtagctggcatgggctccgcccacaagcaggcctggctgagcagaaggcagcttccaggaactccagggtacagttatt

SEQ ID NO: 14930 - DNA, 122 bp, Homo sapiens
gtgggcctgcaatctgcgcttttgcaggctctggggagtgctggctccaaagcaccccatcgcggccctctcccccacatcgctggtctgaggacagggtccctcctgcggagactgaggct

SEQ ID NO: 14931 - DNA, 122 bp, Homo sapiens
caccagtgtcaccgagcgcacccgcacagcagctaaccagtcaggcagcagaacgagtggcggcagtttgccggggcgtgcagacacacgacatgtttcccatcttggagactatctactgt

SEQ ID NO: 14932 - DNA, 122 bp, Homo sapiens
aaggccacaagcgccgcgccatggacgcagccatcttggaccgggaacaaggcggcacttcgtcccgcccactccgcgtttagaccaattgcaaggcagcgaacctgaccgtgacgagccaa

SEQ ID NO: 14933 - DNA, 122 bp, Homo sapiens
ttgattccacagtgccccggtggtgcagtcagtggaagcagctgtaatctatggggtcatcgttggcaggtgcccggcacagggcttgtcactgcttgtatattatctctagtcgcaaatgc

SEQ ID NO: 14934 - DNA, 122 bp, Homo sapiens
ttagttgaagctgtattgaggcaaacaactcattacttttatcaagacatgcaaagccaccgcttaagtgctaccttcactcccagctccaaaggacatctccacttaaaattgcttttatg

SEQ ID NO: 14935 - DNA, 122 bp, Homo sapiens
aaagctggagtatgggcccccagggcactgtttgtaaagactggtggccggcacaaaagacgggcacaaaagatgggcaggctgggagggagcgaggtagaggaaggagtcctgcctagaga

SEQ ID NO: 14936 - DNA, 122 bp, Homo sapiens
gccctgccccaccattccgctccctctacagctatgggttttacaaagaaggatgcagggcgccctgactgcggggtgaggggcaggcctgcccgcggtgtgggcattcgctgaagggggac

SEQ ID NO: 14937 - DNA, 122 bp, Homo sapiens
tcccggacccaataacgcgaccaagcaccgtgactcccaggaaaactagcggagtgagcgcggctgaggaaattactgacaccggaagtcacgtgagcggctgcccctaaggtcgctatctc

SEQ ID NO: 14938 - DNA, 122 bp, Homo sapiens
ataataaaaactagaaagcatgcagacctcgatctgaactggatgcaactaatttcaaaccgaaactatttttaaattgttttaaaaaaaaatctaacaaactctgaggtcaacgggaactt

SEQ ID NO: 14939 - DNA, 122 bp, Homo sapiens
cctggatgagcctctgacgtctcaagcagcattgttttaatgctttgatgaagctcagcacgctgccgaaatctcggcagtattttttcttttctttttgcatgtgagagaaaggacaacaa

SEQ ID NO: 14940 - DNA, 122 bp, Homo sapiens
ggacttcacatctccaagcctcagttttctcatcctttgaaatggggttatcacgatacccgcctcatggggccattgtgaggatactgtgagatcatacatgagaaaaacacataaccctg

SEQ ID NO: 14941 - DNA, 122 bp, Homo sapiens
ttaagaaggcaaaatatgctccccatcctgcaggattgaaggagcaatgtttggaggaagcgaaagaaaggagaggacacagagcacagagcagccaggcagagccaggagctgagaagggc

SEQ ID NO: 14942 - DNA, 122 bp, Homo sapiens
cggggtagagccgcgccgcaggacggagggtctggacactttggggtcacgtgctcattccgtttccctacctcccccaaccttatcccgcccctgggggttcgcgggcatttttcaggaac

SEQ ID NO: 14943 - DNA, 122 bp, Homo sapiens
agagtttcatcttttaaggcgagcatctgcctgccatgctgttgtcatttgcctggcaaacgcttattctgaatgggcatatagtcatggggcttattcctgatctaattttgcagtactct

SEQ ID NO: 14944 - DNA, 122 bp, Homo sapiens
cgcggtacaacgaagcctgattagatacagtgcggtactacgaagcctgattagacacaacgcggtactacgaagcctgattagacacaacgcggtactacgaagcctgcttagacacaatg

SEQ ID NO: 14945 - DNA, 122 bp, Homo sapiens
ctggggggaggggtagcgacaagaagattaaaagagggaagcagaggagttgggagctggcggtcgttcccggggaagaactgctaaaacatgagaccaaggcacagaccttactgtatgag

SEQ ID NO: 14946 - DNA, 122 bp, Homo sapiens
gagccctcagcccgtaccaagttttactttgaacagagctggtagggagacaggaaactgcgttttagccttgtgcccccaaaccaagctcatcctgctcagggtctatggtaggcagaata

SEQ ID NO: 14947 - DNA, 122 bp, Homo sapiens
gcccggccgcgcgcccccccaccccactcctcccgcctcgcgtcctgtcccggcgccttccgcgcaccggccaccgccagtctccgagccccgtgacctgcaggtcctccggccgcgactcc

SEQ ID NO: 14948 - DNA, 122 bp, Homo sapiens
tcctccttcgtaccaagctagtggtcttaggacttgtgcttagagagacccctgtccccgcgaataaaagggttacatcttggggcgggggctctctgcgggcttggaggcagaggactcga

SEQ ID NO: 14949 - DNA, 122 bp, Homo sapiens
atttgcataggccccacctacgggctccgccctggcgctgcatccctgagcagcggcacgcgtgaattctgctacctccttgctagggagcccagggcccccaggagggaggggttttcatg

SEQ ID NO: 14950 - DNA, 122 bp, Homo sapiens
tcaggtcatctagtttcaggctctgttccaagtccctccaagaagaagctgacctcccaccgccgggaccctgccttgccacagcctcccccgtcctccagcatgcccttgggctgccccac

SEQ ID NO: 14951 - DNA, 122 bp, Homo sapiens
tagagccgccattgcagagacaccggaaactaaaagaaacttaggccccagtctgcaggtcggcattcactcgctgaccaatgagagtgaagcctccggggagagccaatggggtccttcct

SEQ ID NO: 14952 - DNA, 122 bp, Homo sapiens
tttccatacttatgcaaatgagaccccgttaaagactctactacaggatctaaagctagccgctccccagtctggggctcaaatgttctcatctgtaaaataagggaaaagagaaagggtgg

SEQ ID NO: 14953 - DNA, 122 bp, Homo sapiens
agggtggaggggtgaacgtggagggacgtctgtgcacctggccccctgaagacccacgtgcgtctgggggcacattgcgggggaaggaacgtgatcttcacacagaaagggacagttttaac

SEQ ID NO: 14954 - DNA, 122 bp, Homo sapiens
ttccccacatttcccccttttcttttcgacaaaaccgccatcgtcatcatggcccgttctcgatggtcgctgtctcttcggagctgttgggtacacctgcagacatgtgataagtgaatcta

SEQ ID NO: 14955 - DNA, 122 bp, Homo sapiens
aaaaaagaatatagcggccatcacccaaatgcgtatgtttaacccagacaaccaagtattcgggttcagtcattgaaagccttcttgtaattgctgaagggtatttgtttgtaattgctgcg

SEQ ID NO: 14956 - DNA, 122 bp, Homo sapiens
agcggccggcttggagcccctgtgggacggagtggaggtggagcaagtgcccggagctctcggccatcatgtgcgaatgttttgctccgtgctgacgcctccctcggcaccgtcctgtctgt

SEQ ID NO: 14957 - DNA, 122 bp, Homo sapiens
catggctccaagcaggccaggagccatatccacctgcaataaagtcttcctttgcacacccgtcttgtgagcctgctactcagcagccctttaacacccaaacatttagggaccccatgcca

SEQ ID NO: 14958 - DNA, 122 bp, Homo sapiens
gctcagctttaggggacaggaatgcattctctggggagtggaccatgcagtgcctgctggcgaggtcggtcgcaaaccagagacccaagggcacgcgcaccgaccgtccctggccccagccg

SEQ ID NO: 14959 - DNA, 122 bp, Homo sapiens
gggctaggcttggggagggggtcctacccccaccagcacctgtccctgtgctccccgcttcgccatgcaaggagacaggcaggagaccctgagcaagtcctgtcctaataaagcaaaagcgg

SEQ ID NO: 14960 - DNA, 122 bp, Homo sapiens
caccagtcctgtcctctgggagccttgagccttttgaaggaggcagacataccctaagggcgtacacagagacagggcccggattcagagtagctggacagagctctggctgctggtgcttt

SEQ ID NO: 14961 - DNA, 122 bp, Homo sapiens
gggcatgtgcaggtgagagtccatcttaatgagggcaatgaggcttaagttccaggccaacgtcaggaggtagagccccagaaataacatgaaaaggaaaatcttcatttgaggatggtctg

SEQ ID NO: 14962 - DNA, 122 bp, Homo sapiens
gttcccttcgtcccatccctatatcctttctcccatctaatggaaactgatgcaagttatcgccccttgcagctcttcagcttccccttgccagcatctcaaattacatatagtgagtgcca

SEQ ID NO: 14963 - DNA, 122 bp, Homo sapiens
tccatagggcacccatggctgcagtaggaaaagagaaaggatcatagaaggctgatccaccgcctctgctggagactgtcctgggcagaagggcccactctcatgacaagggccacctggga

SEQ ID NO: 14964 - DNA, 122 bp, Homo sapiens
gaggtgagatccctgcagccccaacctggggtgctgacacccttgcacaccacccttgtgcgcagcccccagtgctcgcatgctttttgcatagagttgctcaccggctcgctccgaccagg

SEQ ID NO: 14965 - DNA, 122 bp, Homo sapiens
ctgcagtgcccagagcaccaagcacccatccgttgaccccgcatgcgtgacgctcacgcgcgcagtccccctggcttcttccaggaaggctgaagcggcctaatctcggccaaaagatcagg

SEQ ID NO: 14966 - DNA, 122 bp, Homo sapiens
gctgtggactccaaggagccgctccagacgcaaaccgcgtcactctccgcctccccttaacgcttgcagctccggctagatccgaggctgcttttgtattgctctgctctcttctctcctcg

SEQ ID NO: 14967 - DNA, 122 bp, Homo sapiens
ttaggaactgagactcattcatctttgtgtccccaggttcccagccctaggtcccatggccggcattcagtgtaagatctatgagtgaatgaatgggatcaggtactttagcaaaataacta

SEQ ID NO: 14968 - DNA, 122 bp, Homo sapiens
cgccggcgctgctggcgcctcgagtgggtggcactattggtgcagtcagtgagctggtgccgcgattggtgggtgcgggtcatgtggtggcgaaggtgcgcgcagtggacgccgactcgggc

SEQ ID NO: 14969 - DNA, 122 bp, Homo sapiens
gtgactgtaacttcattaactccaggccagattggatccttgtaccgactggtgagtaagcgaaccttcactacagacagctgtctttgctgatgactagctacttcatttttaaaattacg

SEQ ID NO: 14970 - DNA, 122 bp, Homo sapiens
aatgtgcaatcgagtccactttgggggaaggtggctgcatcaggaactgtgttcttgccacgactcctcttaggaaaacgcctgggggctagcatgtcagtccgttgtttaacacaaattac

SEQ ID NO: 14971 - DNA, 122 bp, Homo sapiens
agatccctccccctaggtcgggagagccaatcggaacgggtgcggagggtgggtctgtcacgtgacgggaggggcggggcaccggccgggggcgcgtgtgcggggcggggcccggcggtgag

SEQ ID NO: 14972 - DNA, 122 bp, Homo sapiens
gaggggggggtcacctcagcacatgggggccccgtcccaagcgggggcaacctcctaacccgagtcaggaccagttggccctgggggatgtgcacatcagcaactggactcctggcctgagc

SEQ ID NO: 14973 - DNA, 122 bp, Homo sapiens
ccggccgcatagctgtgagcagggcggccagaggcaggcaggccgggaggggcgtcggggcgcggcgcgggggggcctcgggcctcgtcgcccctgccccccgccggcctctcccttccccc

SEQ ID NO: 14974 - DNA, 122 bp, Homo sapiens
acgaagggtcaggtttcactctggaatccacagcaccataggaggagtctcttaagtgcccgggtgtttcctgaagttaattattccctcaacagccacatggtgacagtgggtgacagggc

SEQ ID NO: 14975 - DNA, 122 bp, Homo sapiens
gctcctgactcgaaagcctctcagtctccctcctccacacagtcctccgtggacttgtcacggcgaatcccattttagagatggacaaactgaggcttggcaagggcaatcaaggtcacaag

SEQ ID NO: 14976 - DNA, 122 bp, Homo sapiens
ccaccacacactacacacatccatccgagtcacgtctggctgcccacgtgagaagtaaaacgagatcagttttcagagcttcctggatttgagaatggcacagagcagactgtgaacctgaa

SEQ ID NO: 14977 - DNA, 122 bp, Homo sapiens
tttgtttgtgccaagccccttgctcccttagggccttcacactgcctggaacatgcctttcgcctaactcctactaattcccaatcctccagatcccagctatggtgcacttcctcagtccc

SEQ ID NO: 14978 - DNA, 122 bp, Homo sapiens
cggtgtgactctgccgcgtcccctctcttgttaggtgtctaataaggtcgctgaggatgtcgtgtcaggattgttgtgtggcgtcaagagtcgagctctcagtcgactccatgctctgggag

SEQ ID NO: 14979 - DNA, 122 bp, Homo sapiens
gggcgccgccgggaagcctgtaattgggctcctgggagctccgcggaggtgggcaggcgccggcccctcaagccctcgggttcggctggcctgctcgacacagcctgcgcacccaggctggg

SEQ ID NO: 14980 - DNA, 122 bp, Homo sapiens
tcccctgtgctttggtctcacaggcaaagccttctccagactgtcccctgggctgggaatcgcgcccagagtcacgggcggccagacccaccccatgtgttccccggcgcgctctccagtgg

SEQ ID NO: 14981 - DNA, 122 bp, Homo sapiens
gggcccggcgaggctcaaacctccccacctgctgcctaggcttcctttctagaatgcaaacgactcctggccccactcaggcgcaggggcaccagcctctctctttccagggcttctgcctg

SEQ ID NO: 14982 - DNA, 122 bp, Homo sapiens
ggagcaggaaggggcgtggttgagctggcctggcttcagtccggcttgtccccgccaggacgtttgcgtttaaaccgaatgtgttctttgcctcccatccattttaagtgttctcttcagta

SEQ ID NO: 14983 - DNA, 122 bp, Homo sapiens
ggccccgggcagcccgcggggagggtctgcgtggtgactcccccgcgctagcagcggccgcgtctcacctgtaggagctgctcactgcactcgccacctcctcgcggatttgccggttgagg

SEQ ID NO: 14984 - DNA, 122 bp, Homo sapiens
cctggcacatagtaagtggacacaaaatatttttcaaatggccacaatccaaatatgccacgaccctgggcaagttatccaaccctggcctttcttctgataccagccagtggttgcaagga

SEQ ID NO: 14985 - DNA, 122 bp, Homo sapiens
ctggaagtcaacagagtgagcgatgacaattctgacaggcccacccatgctcagagacctcggcatgacaatttaactcctagtcctactgcctctcccttcagaacagacccagaatagtc

SEQ ID NO: 14986 - DNA, 122 bp, Homo sapiens
aggtgcaggtgcaggagggccactctgctcagggactcaataccttgatgcaaaggctaccgacacgcagaacgctcactgtgagcccaccgggaccaggcaggcagagcagcggaggcccc

SEQ ID NO: 14987 - DNA, 122 bp, Homo sapiens
atgtttgcggcgggaggagtgaggcacttggagactccctgggcaccctgggatctgtcccgctgccccgacgtgcagggcatttcaacgccgcgcgcacacacggtgcacggtcccgcctg

SEQ ID NO: 14988 - DNA, 122 bp, Homo sapiens
ggcattcttccatcaagacagtgccgatgcccttcctggggctgagatcacaccaggagccggggaggagctggctaccttggcagagcctggatggcctggggtggcagcagctgaaagtg

SEQ ID NO: 14989 - DNA, 122 bp, Homo sapiens
aagcgaaccaatgacgagcgagctgtggcaggcctccagccaatgggcagtgaggcctgacgcggggggcggacgctggggccgagggtagcttgagcgcggcggcggcgttgttcagtcag

SEQ ID NO: 14990 - DNA, 122 bp, Homo sapiens
gccggtgtgtttttaatatagcacacacgggaaataaatattattgtctgaggtgggggacggggagagatttttaaaatgtactataaacataaaatccagaagaaagatggtctctattc

SEQ ID NO: 14991 - DNA, 122 bp, Homo sapiens
ctcattgtggcagggatggtgatagccacgccctttgtctgcatcctggcctcctatgctcgcatccttgtggccatcatgaaggtcccctctgcaggcggcaggaagaaagccttctccac

SEQ ID NO: 14992 - DNA, 122 bp, Homo sapiens
tcagcttgtcctctgatgcatttgttcacctcattgtactaaaacacaaagaaactgtctcgtataaaaatcagaaggaagtttagaaatcagaaagaagtttagaaaagtttagaaatcag

SEQ ID NO: 14993 - DNA, 122 bp, Homo sapiens
gttcccttacccgagcctctaaatcagctgagaccaatcattgttaacgctctccggggccgtcttgaggactcccagttggcaatctggaacgtgtccagaacttggtggggcgggggggg

SEQ ID NO: 14994 - DNA, 122 bp, Homo sapiens
gaggcgcaaacaacccacgacgccacgtttgaagggaggtctccgctttatgacagaagccgcacccggaaatgaaaccaccaggacctctgggatgcctggcggaagagaggcgctctagt

SEQ ID NO: 14995 - DNA, 122 bp, Homo sapiens
gccgtgtggggtggcggccgagagctgctgcggggggctgccgagggatgagagcccccccgtggccgggggcttcaggccgcctgggttgtgggtgcccagaggcggggagggcgacgagg

SEQ ID NO: 14996 - DNA, 122 bp, Homo sapiens
cgaggatcaaaggagcgaccttaggaggggccttacaggacagggtgcaaggcgagtgctcggtaaaccgcggtgatgacgagggtgataaagacggcggcggccagggacacccacccctt

SEQ ID NO: 14997 - DNA, 122 bp, Homo sapiens
agataaatgtaaaattacagctgtagtaagttctacaaaggagagttacatgggctatgacgatgtaagatagcaagaactgacattggcagggaggaaatgatgatgagtagaagtaaata

SEQ ID NO: 14998 - DNA, 122 bp, Homo sapiens
cacacggtcactcaccaagccaatatttcccctgccctaagtaacccgagggccaggtaccggacaagaaggggccacccctacagccctgagcctgccacaattgttcaaatagtccaatc

SEQ ID NO: 14999 - DNA, 122 bp, Homo sapiens
ttcccacctaccagcctgtgcctctgacttagctccctggttggccagaagcactcctgccggggccccaggacgagggtttgctgccctagtggggcagccctggcaaggtgacagtagat

SEQ ID NO: 15000 - DNA, 122 bp, Homo sapiens
gccggcaagacctcggccaggtaacgctgcgatctcctcctcttccattgcaaaccgctgcgctccttgcaaagttccttttgtggaaaatcgcccagcccaagggagcccggggtatttgc

SEQ ID NO: 15001 - DNA, 122 bp, Homo sapiens
ccctcctccaggcttccctccacgtgccaggcaggatactgaggacacagagctaggaaacgagaaaaaagtcatggaggcagctctcgctgccaggagctcaccttttcttctggggggct

SEQ ID NO: 15002 - DNA, 122 bp, Homo sapiens
agcagctctcataattatcaagaaatagcatgtcaccaccaagcccagggcaaaagtaaacgtgtttatcatccctttaatgttttaaattttgtcttttttttttttttttttttttttta

SEQ ID NO: 15003 - DNA, 122 bp, Homo sapiens
gattctcatttcttggccaagtcaggtgatctctattgatctgtctccttagctgcctagcggggagaaaaatcatttccctctgctgcctcttggggttgtcctgaggatatgatgagatc

SEQ ID NO: 15004 - DNA, 122 bp, Homo sapiens
cgagctgtttttatagcatctcagccaccagtgttcttaaaccatacaaatagccaaagacgttatctacaggtttgtaaacaaattacattcttcttttaggacataaataagttaaaata

SEQ ID NO: 15005 - DNA, 122 bp, Homo sapiens
tccctaggctcgtgggtttcgatattgggggagcggagattttctcttgggtgctggtcacgcccccttaagactcgggatcgtcactaagaaccccgctgtgaattgggggagcttcgggc

SEQ ID NO: 15006 - DNA, 122 bp, Homo sapiens
tcgctctcccctgctccccagactcaactcctccgaagctgctccaggttgaaatgtgaccgctaggccgactccctgggcccgcgagcagttctcgaaaggtgcggactgagccctttctg

SEQ ID NO: 15007 - DNA, 122 bp, Homo sapiens
cagttctttctttctagccgcctttcattgaggaagctgggccgccatctggaggcgcctcgcacgcgggacacgcatggaggacctgccaggtgcctgttggtggccgcctgtccccaggg

SEQ ID NO: 15008 - DNA, 122 bp, Homo sapiens
ggcggggggaggacccggcatgtttgtggacttgtttgtgactcaatcccttttgcacggcgtttcacagacagacctgcaagccttgtcaggaagagaaagaacttgggggcgggggaggc

SEQ ID NO: 15009 - DNA, 122 bp, Homo sapiens
ggagcgagcctgccttcggggcccacacaagggcctgttgttctgggtatcaactggggccggtgtggggttacaaagaggcctttcaaagagacaaagcgcctctggacaggctgagtgtc

SEQ ID NO: 15010 - DNA, 122 bp, Homo sapiens
cttgaaggcttgtgctcttcacctgcccacagcactgtctctgcagctgctgccactggacgtctcatcatttattgaccctataccatgtatctggcatcatgctgcttccaactcaccac

SEQ ID NO: 15011 - DNA, 122 bp, Homo sapiens
tcttttctttccttttttaagacggggtttcactctgtcgtctagggtggaatgcagtggcgctatcctggctcactacagcctctgcctcctaagttgaagcgattcttgtgcctcagcct

SEQ ID NO: 15012 - DNA, 122 bp, Homo sapiens
cctggggcagtgtctgggctacagttcacagcagcaaagggtgccatttcttcagcctcccggtcaaagtcaactgcaagcgagttatgtggagtttagacccagccaggtaacgtcctttt

SEQ ID NO: 15013 - DNA, 122 bp, Homo sapiens
tgctagagaagaggtacagaggcagcgaagacacgttgagggggaggacgagaccaactgcgagacgccgagtcccgggctctcaggacgctctcccgtacctgcgccctcgtcagcccatc

SEQ ID NO: 15014 - DNA, 122 bp, Homo sapiens
gccggacgtggtggcatgcacctgtaatcctaccactttgcaaggccaaggtgagaggatcgcttgaacccaggagttccagagcaacctgggcaacatagtgagatcctgtctctattttt

SEQ ID NO: 15015 - DNA, 122 bp, Homo sapiens
ttacttatccattccccctcttggaggggtgcttgagttgtttccattttgtggctactgcgaatgctgctgctattaaacctgattttgaccctgtggtggcataaggagctcatcagggt

SEQ ID NO: 15016 - DNA, 122 bp, Homo sapiens
cacccccatggctcacggagttagctgaatggcctctccgctgtccctagatggcagaaacggtggacacaagcgaaatggtcaacggcgctacagaacaaaggacgagctctaaagagtcc

SEQ ID NO: 15017 - DNA, 122 bp, Homo sapiens
gatgtgccgccttaagagctgtaacactcaccgtgaaggtctgcagcttcactcctgaagcgagcgagaccacgaacccaccagaagggaaaaactccgaacacatccgaacatcagaagga

SEQ ID NO: 15018 - DNA, 122 bp, Homo sapiens
cctgtgtatgacgtgtacacacactgctcctgtgtaaacgtgtggccgtgacatggcctccgttcagctccaggtgtcaagtgccagattccaggaagccccaggagtgggcccagaaggag

SEQ ID NO: 15019 - DNA, 122 bp, Homo sapiens
ccgcaaactctcagctgttgttggtactattgagcttaagtacagggcctcaaaaggagccggagtacagggctaagcgctcagtacacagggtacgaaccaatcaatgcaagaatgaacgt

SEQ ID NO: 15020 - DNA, 122 bp, Homo sapiens
gcgtgctgggcgaccgcgggtggcgagggatgcgcccctgcccgcactctgcgttctccgcggacgcgattggcctccccggctcggggcgccttttgcacctgcaaccccaggcgttgggc

SEQ ID NO: 15021 - DNA, 122 bp, Homo sapiens
gggcccctgcggccgctgtggagagggcagaccccggcagctagcccagggcccagcacccgtgagcgcacattacgtgccggtggactgggagcctcactccaatgcacctggggtccctg

SEQ ID NO: 15022 - DNA, 122 bp, Homo sapiens
taaaagcaatactttacttttcaattttttagtcttcagataactgagtagtgagagaagcgggtaggcaaagaataaaatcccttagcagaacacaaatagcacactaacgcaggcaaaat

SEQ ID NO: 15023 - DNA, 122 bp, Homo sapiens
tggaagccatcatgggagtactatgtcagagcgtatgtaactagctgtcaggtctttccccgttgcctcagcctttctacacagactggccttcaacttcccctgagtccagaagtagactc

SEQ ID NO: 15024 - DNA, 122 bp, Homo sapiens
agactgtgaccagaccaagcgacacggatcctgagagcgctcccgggtaggcatttgccccggtgggacacctcaccacagcagtgtgtggcaggcccccgtggagaatcaacgcagtggct

SEQ ID NO: 15025 - DNA, 122 bp, Homo sapiens
gggaggataatgcttttgcccaagcagagatgcagtatgaattttgagaaataaagcatacgcttatacagaaacttctgtctccaaggcagtgcctgtggagacaggtacagaattcagct

SEQ ID NO: 15026 - DNA, 122 bp, Homo sapiens
aatagggtgtaatttctcattcagagctgcagtccctttgataccctggggtgagcccttcgtgcccagctgcatcctgctgcccggctgactgtgggagaggaggagccggggggtgtgag

SEQ ID NO: 15027 - DNA, 122 bp, Homo sapiens
gtcgttttggtgttccctgtgcgaagcagcgcctggcactcagcaggtgcttaataaatgcgacttgagtgaatgaatggcgacacacgtgccccaggaggtgccccaggaggtgccgtctc

SEQ ID NO: 15028 - DNA, 122 bp, Homo sapiens
accaaacgaaatatcgtaacacaaggcgaggcaggcttgtgggaaccggtccccagcgggcggcggcagagcggggaggattggaggggccagggctgggggtggcacgggctcttgggccg

SEQ ID NO: 15029 - DNA, 122 bp, Homo sapiens
gcccccttctccacatctggataaataggaagccccgcggcctgagtctttatttgggtacgttttatctacagcggcggtgtttgcaggacagggccctgcggcccgcggccctcggccct

SEQ ID NO: 15030 - DNA, 122 bp, Homo sapiens
tttgtctcaccttccaatactaattctacagttctcctagtcagggctagtcccctaaaacggggaccatttccattttgttaaggggctgaacgcggttcaagcctagcagattggttcca

SEQ ID NO: 15031 - DNA, 122 bp, Homo sapiens
gggcccttggaggcgacggactgcatcctcaatttaaagtcagacgcgctcgtggcttttcgcttcaggattagattgagtgattgtgggtggatttttggtcttacccttgaaagtttatt

SEQ ID NO: 15032 - DNA, 122 bp, Homo sapiens
tttctatctctattgcctctacctcaattgttcccaaattggaacaactatcagaatcaccggaggatttgctaaagcacagatcactgggttctgtgcccagagttttaaattcagtaagt

SEQ ID NO: 15033 - DNA, 122 bp, Homo sapiens
agacagagacagagggaagctttgtgagctcctgagagaggctggactcctcctgactgccgcctccaatgagctgggaatgccaatagggctgaggctggagacaggagccctctggccca

SEQ ID NO: 15034 - DNA, 122 bp, Homo sapiens
gggcaattgtttcaagtcactttgtcccttactacctgcttcatccattttcatgttcttcgaatttgtgatacaaagaagaatgtatagccaatcaatagcttgttattgtaatgtaagtt

SEQ ID NO: 15035 - DNA, 122 bp, Homo sapiens
gggcggggtcccccggccttaggcgagtggtcgccgcagccccacccgaacgcccgtggccgagcctgcccatgagagccccgttctgcaccagctgggtcagggtccagcgcagccccaag

SEQ ID NO: 15036 - DNA, 122 bp, Homo sapiens
acctcaggtgatccgcctgcctcggcctcccaaagtgctgagattacaagcgtgagccaccgcacctggcctaattcttgtatttttggtggagacaaggtttcaccatattggccaggctg

SEQ ID NO: 15037 - DNA, 122 bp, Homo sapiens
atcgacctggacttcaagggccagctgtgcgagctgtcctgctccaccgactaccggatgcgctgaggcccggctctcccgccctgcacgagcccaggggctgagcgttcctaggcggtttc

SEQ ID NO: 15038 - DNA, 122 bp, Homo sapiens
actggggtaatgaggctgcggtgggcgcagtgcaggtcagttctctgcgcctttgtcccccgtggttctcacggtcacgggggcagcagaggacagggctcatagctggcggtccgtcttag

SEQ ID NO: 15039 - DNA, 122 bp, Homo sapiens
cagacacgcgccacttacctcccactccgcagacacgcgccacctcccactccacagacacgcgccacctacctcccactccgcagacacgtgcgctacctcccaggagggagacggtgcga

SEQ ID NO: 15040 - DNA, 122 bp, Homo sapiens
aggcatctcctctgtgacgatgtccacctgctgggcaggggcgatgtcctcgtcgctctccgtgggcagcgagctgtggcggcgcttgcccttcttctccttctccttcctctttttcctcc

SEQ ID NO: 15041 - DNA, 122 bp, Homo sapiens
cgcccagctgagacggggtttcaccatattgaccaggtctcgaactccatattgaccttgcgatcccagagaaagtgctgggattacaggcgtgagccaccgtgcctggttgagacagggtt

SEQ ID NO: 15042 - DNA, 122 bp, Homo sapiens
ggcagaggccgcgggaagtctccgcccacgccttggaatgtagccggggagtgtctgtgacgtcaccgaggaactcctcctgcttgagcgcggcccgctgtctgctgtcgcctacagctgac

SEQ ID NO: 15043 - DNA, 122 bp, Homo sapiens
catgtgccagcccagagcctcttcctgtccgcaccggtcggtgacgccaggcgcagacgccgagagatgacgtataccccacgtaccgcgcatgctcaaggacgagcctgccttgagcatgc

SEQ ID NO: 15044 - DNA, 122 bp, Homo sapiens
cttgaacacttcgcgggtcttccgccccgcgctagaggacgcactccgtgacgggaattgcggtctcggccgcccccggcctcaggctttccgggctctgctgcctccagaaaactacaagt

SEQ ID NO: 15045 - DNA, 122 bp, Homo sapiens
taacagtgttgaaggaacatactgtatcattggccatgatgcatgcctcctagaaagcagcgctgtacacagtgacatgatcacagcacccctgcaggactccagatgcacagtttcttctc

SEQ ID NO: 15046 - DNA, 122 bp, Homo sapiens
catcaccattttgttcccctaggacctcaaatagtggcatttcttttgttgttattgtttcgtggcagttggtaacctttctaaattgaatacactcagccatcttatctgagacaaaaata

SEQ ID NO: 15047 - DNA, 122 bp, Homo sapiens
ctgcactccagcctgaaagaaaaagcgagactccgtctcaaaagaaaaaaaaaaaagactcgacccagctctgcgcgtcgcattcctgcccgaacccccacttgtcgcctcacttttgctcc

SEQ ID NO: 15048 - DNA, 122 bp, Homo sapiens
acaggggagaaaccctacctctgtcctgaatgcggcaagggttttgctgacagctcagcccgagtcaagcacctccgcacccaccgtggtgaacgggcccggccaccaccaccatccactct

SEQ ID NO: 15049 - DNA, 122 bp, Homo sapiens
tgccagcctaagccctcaggtttcctttttctttttctacatcaggaaaagcacttttctcgccctgcctgcagagcgggccacccctagctgcaggtgagggacgggagaggagcctccca

SEQ ID NO: 15050 - DNA, 122 bp, Homo sapiens
actcatgactcattcccctcctggctttgatatgtgacaatatgcatagaggattaacaacgaggaaagctcctctgagcttcagtgttcacagtttttattggggcttcatgatgtaggca

SEQ ID NO: 15051 - DNA, 122 bp, Homo sapiens
tggccgcctcctccagcatagaaccgctcacctgcgaccccggcggcacctccccacggtcgccccaaggggggtaggaaaaaagatgcttcattgatcccccgcccactaactgggcccgc

SEQ ID NO: 15052 - DNA, 122 bp, Homo sapiens
ccttctgtctgcagcatccaggctgtctttgcaaacaattccagtcaaggtcaacagtcacgaatatgcccttaaatcagtctccatcacctccatgcttccaccttcagtattctttcctc

SEQ ID NO: 15053 - DNA, 122 bp, Homo sapiens
agcgagctgagcagaattcgaggttggaaagaatctgccagtagttgccaggacaaatgacgcaactgaacacagagtttccattggctctcaaggaagggataggaagggggcggagtgta

SEQ ID NO: 15054 - DNA, 122 bp, Homo sapiens
gttttctgtggtgagtgcgatgtaactttaataaaggagtatcagtttatcaccttccatcgcaatcagagagagacgtactgttacattctgtccaagatttcttctggcaatgacaagat

SEQ ID NO: 15055 - DNA, 122 bp, Homo sapiens
ggaagagggcggagggtagtgggatgggggtcccgcggcagcggtgaaactccgggtgggcgtccatggtgctgctgcgctgacagggctgtgagcagccggccttccgctctcaccagttc

SEQ ID NO: 15056 - DNA, 122 bp, Homo sapiens
gggttacgatcttagcactgcgcatatgtgtatttctctccctccaggaggacgctgctgcgcatgcggttgggaacaaatgggcggggatttccccggaagtctccctttatggagggttg

SEQ ID NO: 15057 - DNA, 122 bp, Homo sapiens
acagttgttttcttttttttcccaacaggctctattaattacaatttttagctctgtacacgcaatgattggctggttttctttttttttttctttttcctttttttttttcttacagtacc

SEQ ID NO: 15058 - DNA, 122 bp, Homo sapiens
cctcttctgcttgcttttcttctcaaggtcatcagttgacaatgaagttgggggaggggacgttggtggtttggggagaggaagtgtgaaaactcccaggacagtgcaatggtgaagggttg

SEQ ID NO: 15059 - DNA, 122 bp, Homo sapiens
agatgggttgagtaggcagaggtctcaggcaccggggacagaagacaaggacattcagcacgggcagccatgctcttcccagcacccagaaaaggcccagggcccggactcctgggtgtggt

SEQ ID NO: 15060 - DNA, 122 bp, Homo sapiens
cctaaaaaagatggtgagggcctcaagaaaagaaaagaaggcctcaaggccttctggcagcgggtgtcagaagcaatagacagagttcaggtcaaactcaaccctttgcagggcttgaaaac

SEQ ID NO: 15061 - DNA, 122 bp, Homo sapiens
tatgagcgtaagccaatgcacctggctttgacctttaaaacaagaaacctccccactgcccgtggaccccatatctccttccagttagttgccacctctctgcttccctctataatgaagca

SEQ ID NO: 15062 - DNA, 122 bp, Homo sapiens
ccgccgcatctgctgtcggagcgcgggagcctgggccaccgcagcgccgctgccgccgcgcgtctcgccccggctgggcccgccgcgcagccccccgcacacttccagccgggaaagtactt

SEQ ID NO: 15063 - DNA, 122 bp, Homo sapiens
aaagtccgccaggctctgggcccatatgcaccctgacccagcctgggttggagaagacctcgctaagaaaacagcttgtaaactgagccccaaggagaagtgggaagcagcagcaggagctg

SEQ ID NO: 15064 - DNA, 122 bp, Homo sapiens
tcgttttttcgctctctttgagaccttaacaaactctatagggctgggcacaatggctcacgtctataatcccagcatttttttctttttttctttttcttctttccttttcttttctcttc

SEQ ID NO: 15065 - DNA, 122 bp, Homo sapiens
ttcggattgagccttctccctccacccgcttccgtcggccgggcccctcccgcccggccccgcgggcctccccacccggccccggcgctccccaccgccccccctgcgcccgcccctccccc

SEQ ID NO: 15066 - DNA, 122 bp, Homo sapiens
ttcagcagcaacctcactgggtttgagagtccagagatactgatgcgaacacaaagctcacgctacctactgtgccatgaggcataaggtccactgtgtctgaatcagggtatctcctgcat

SEQ ID NO: 15067 - DNA, 122 bp, Homo sapiens
tctttataagcgtcccttccaacgttagcccttggagactcggtacaatgaccgcctgaacggtgcagagggtgaacttggaggagctctgctcttcagcatccggagcaatgcccgcactc

SEQ ID NO: 15068 - DNA, 122 bp, Homo sapiens
cggggtggaacgtgagccaccagctgcagtccgcaaaggatcgagggaaacgagctgtcccgggacgcaacgctagacaagctcagggacgcatttacagggacgcagaaagtgtacgcgtc

SEQ ID NO: 15069 - DNA, 122 bp, Homo sapiens
accgattcgtttaacacacctttctgagacagagcccccaccagccccagaagctgaggtcgacgtgtgtgtgacctctcttcgtctggccgtgaccccaagcatggtcccccttggtcgcc

SEQ ID NO: 15070 - DNA, 122 bp, Homo sapiens
agatatttaagattttattgtgtaaaaatctgtattcagcgtgaacaccggggccacctacgcacaaaaagaagtctttaccgcttttctttctttttactctcagccagtggaagatgaga

SEQ ID NO: 15071 - DNA, 122 bp, Homo sapiens
gaatacatgtttattaattaaatcaaatcacattcaagtgtgaacataaatggttaagcacgtatgtggatatttaataaagtgtatactcacatggaacagatcctttttggagagattgg

SEQ ID NO: 15072 - DNA, 122 bp, Homo sapiens
aaagtcttcacatgaaccattctattatggaacaaactgaaattacttataaagctttatcgtaattagcgttttggatacaagtgtaagggactgcactgatgtacttgtgaatacgaaat

SEQ ID NO: 15073 - DNA, 122 bp, Homo sapiens
ttccagctcacgcccttcgagatgctgatgcaggacatccgggcccggaactacaagctgcgcaaggtcatggtgagcggggcagacgcagaggggcagcctggatgcagaggtcgtggtga

SEQ ID NO: 15074 - DNA, 122 bp, Homo sapiens
accactcacccagcctgccgcccacacctcattcttcccacctaaataggtattctgttgcgagagcaagaagttagcagggacttggagacttttggcctgtatgggatatctggtttaag

SEQ ID NO: 15075 - DNA, 122 bp, Homo sapiens
atcctcagcctccacgcacggtctcccccatgtgcttcctggggtgtgcggggtgggggccgggtcttggcccttaaggttaagaagggccccctgaggagttccccagcactcctgtgggg

SEQ ID NO: 15076 - DNA, 122 bp, Homo sapiens
gaagagcgagatcgagcttggccccctcccccccctccttccctccctccttccttccgccgcaacatggctaacaacagccccgcgctgacaggcaactcgcagccgcagcaccaggcggc

SEQ ID NO: 15077 - DNA, 122 bp, Homo sapiens
ttcttttcattagaaggattcccattttgaaggtctgcgagggctgagtgagggatgctccggctgagcgtgtctggagagagcagctgcccacggccccagcacattcactgggttaccgc

SEQ ID NO: 15078 - DNA, 122 bp, Homo sapiens
catgcacagattggggccagaagtcgagattctgcgcgtcctctcccgccaccccactcccggtcccctagagtggcccagactcaggctaaagtctagggcttctttcctgggatgccctt

SEQ ID NO: 15079 - DNA, 122 bp, Homo sapiens
agctcatagctagtatgagacagttgatacttagtataaggctgagatggtagagaagaccgtcaggattcccactctctggtgccagaccggtcgtcacctggccaaatagaactttggtc

SEQ ID NO: 15080 - DNA, 122 bp, Homo sapiens
agctcaagactgcacagttagagaaacagcagagttaggacttgaactcagcactagtttcggccagtggctcttccagtggaaaggagtaagaagaaacagaacaggatggaagagaagag

SEQ ID NO: 15081 - DNA, 122 bp, Homo sapiens
ggctgtctaagaagtctgactaccccaagaccaccatgctggaaggaaacccgaaccacacggagaggcctgtgtagctaccctggtccacagccccagcaacagctggcgtcagttgcaag

SEQ ID NO: 15082 - DNA, 122 bp, Homo sapiens
aagttgaggcaggaggatctcccgagcccgggaagttgaggctgcagacagccatgactgcgccactgcactccagcctgggtgaaactctggcctgcctccggctcctagatgccacccag

SEQ ID NO: 15083 - DNA, 122 bp, Homo sapiens
ccgcagccaatgatttgattcttaattaatgccaagcctgacaaaggcgttggtgtctggcgcccctaggatgagaaactgaagagactttagcaaccacctaatccattctcccattagag

SEQ ID NO: 15084 - DNA, 122 bp, Homo sapiens
gaggtcccgttgggtctctctttcgtggacgttttttccaatgcgatgaaacctagttctcgctagatggcgctcaatagcaaaagaagcaagagtagacttcgggaatgacattttaagca

SEQ ID NO: 15085 - DNA, 122 bp, Homo sapiens
cccgctcccctgtcaatgtgggccggcctcccgctcccctgtgctgcgagctccacggcccgctctcagtggctgcctcagtgccacccctgctgtctcgagcctacctcccccttccttct

SEQ ID NO: 15086 - DNA, 122 bp, Homo sapiens
ctttcatctggcgcaccatcatgaccaagaactcctcgaagtcgatggtgccgctgcctgcgggcagcaggtggcagactgagcctgagcccagccgctgccgcctctccccaccatcccct

SEQ ID NO: 15087 - DNA, 122 bp, Homo sapiens
gggggggcgggggggtggtttggaaaaatgactcagtaagttcagcgcgcccgctccggccggccctgcgcctcccgccgcgcccgggatgtattcgtccccgctctgcctcacccaggtac

SEQ ID NO: 15088 - DNA, 122 bp, Homo sapiens
tgtggggttctaggaagaggccagccagccgtggaagtgtcctgggctctgtcccggagacgacgaacttggctccccacgagggcggcctattccccacagtgtcccccgggggccacacc

SEQ ID NO: 15089 - DNA, 122 bp, Homo sapiens
gagctggggctgcagggcgggagctgtgctcagacggtgagggagatgaagctgttgtaacgctgaatgttcctcttgaggatctcagagcagggccccagcacacgctcgaagcggggccg

SEQ ID NO: 15090 - DNA, 122 bp, Homo sapiens
tcatgatggacagaaaaatgtgtgtgctttctctgtctactgcctcaactgcacagaccccgggactgtagcagaaccatcttttgagcttgacaccgggaggcccaaattctagcacggga

SEQ ID NO: 15091 - DNA, 122 bp, Homo sapiens
gctgcctggctgagatggtgcattttctcctgacttcctcctgaagccctgggtcagctgcggggcggggggcggggagcggggggcggaggggtgggctggaggcttgagccagcacagca

SEQ ID NO: 15092 - DNA, 122 bp, Homo sapiens
tttttaggatcatctaaacttttactgtaccggcagcagcctggggaacttgatcctgtccgtcaagtgcgaggaagcagaggggatcgagtacctccgggtcatccttaggtagggctgtt

SEQ ID NO: 15093 - DNA, 122 bp, Homo sapiens
acgtaagaagccactcccaattctttgtacttacatgtactggcagtaagctaaggttagcgctaatgttaacatgaatgcaccaagcattgtaatttaaattgattttccaatcacaggaa

SEQ ID NO: 15094 - DNA, 122 bp, Homo sapiens
aggctctagagcctattctccggctttccttagaggctccttttctgaacagccccaaatcgctggctcatctgcctaccaaagactcgctaaaaacccatattacaagcaattcaaagcat

SEQ ID NO: 15095 - DNA, 122 bp, Homo sapiens
gctgggctgggctaggtggggagggctgtaaggagcgagtgctggagggaacctccgcaccgttagcctccaactgggagggcgaggccaggcccagggacccaacgttttctcttagcttg

SEQ ID NO: 15096 - DNA, 122 bp, Homo sapiens
tcatcctcctcgtcgatgtatttgaaataaggcacatcgaaggtaggcaagggcagctctcggtctgagagcgccgcggcggaatctttcctctccaaatgagggtcaaagaccctcagccg

SEQ ID NO: 15097 - DNA, 122 bp, Homo sapiens
cacctggagcctggctggaaagagtggtacgacatggcaggagagagaggcagagaaatgcggccctggaggaaagaaccggggcaggatgatcaagtcaggctcagcttccccccttttat

SEQ ID NO: 15098 - DNA, 122 bp, Homo sapiens
ccggcagaaattctgtggcatgttctgcccggtggaagggtcctcggagaacaagaccatcgacttcgactcgctgtcggtgggccggggctcggggcaggtggtggctcagcagcgggacg

SEQ ID NO: 15099 - DNA, 122 bp, Homo sapiens
ggagacgcaggcctggggacggacagttgggcagcaggcatggcacgggcatgggctgggcgggggccaatgcccccaaagtcaggaagatgcccccaaagttggggccgaggggccacgct

SEQ ID NO: 15100 - DNA, 122 bp, Homo sapiens
cacgcgcacctacctgggcgtggagagcttcgacgaggtgctgcggctctgcgacccctccgcacccctggccttcctgcaggccagcaagcagttcctgcagatgcggcgccagcagccgc

SEQ ID NO: 15101 - DNA, 122 bp, Homo sapiens
ggggtggcggcggcggttgcccgggtgacggctgcggaggtggcggccgggctgggatagcgcgagtgtccgcggccgagcagcaggtaagcgcgtccccggatgcagccgggccaccctcc

SEQ ID NO: 15102 - DNA, 122 bp, Homo sapiens
gcctcagctttcctcatatgtgaaatctaagtaataatggtacagatggtccccgatttgcgatggcttgtcttagaattttttaactttatattggtgcagaagcaatacacagtcagggg

SEQ ID NO: 15103 - DNA, 122 bp, Homo sapiens
gcggtgaacctggcggagcgctgagggcagcggctggctctgctctgcgggacagcgcggcgcccggactcacaaggtaagcgccactgctggaggctacaggggctcacgaggccggggcg

SEQ ID NO: 15104 - DNA, 122 bp, Homo sapiens
tgctctgtcttgatacattacccctctctccaacatcaacactacagcaattagtatgaacgccatcagatctatatccttttatcctcaaatctttaaaacattaaatatttaagtaatag

SEQ ID NO: 15105 - DNA, 122 bp, Homo sapiens
gccgacggaagaggtgccagagggtcacatgactcgcgttcagctgatccctttcaagggcggagccgccaaactatttgctttttaaaaaaatttcctttcgtcagcaccatttaatgtat

SEQ ID NO: 15106 - DNA, 122 bp, Homo sapiens
gacgcgccccggcctatggcgcactccctgtggggcttatcgtgccgtttgggagcggcacgggactcgatggaggacgggtggggctaatagtatcggcgcgccgagaggggctgaaacag

SEQ ID NO: 15107 - DNA, 122 bp, Homo sapiens
gttggtgcggactggaaccgcgtcccgggcggagttgggatgctttgacaagaagaagttcgggagtggggatattggcacggagtaaatcccgcccagccctgacctccccacagcggtca

SEQ ID NO: 15108 - DNA, 122 bp, Homo sapiens
agacagcccccgcaccgccccttttcgattcgtttgcatgatctacggcgcggtttccggcggcagagacatgttttccggtcgtcccttggctcgattttcttccggggcgggacttcctt

SEQ ID NO: 15109 - DNA, 122 bp, Homo sapiens
tcccggaagctgctgcagaacatagccctgaagtaggggctgctggaggccagcacgttgcggtggcaggggatctcccgggcaccggcacagatgctcacatcagtcaggatcctgctttg

SEQ ID NO: 15110 - DNA, 122 bp, Homo sapiens
cagctagagcggagttttattaaccagctgagggcggactaaagacttaacagacctgggcgaagaagcagcactcctacttactagggcaagactcatgaacagggggcgggggctccggg

SEQ ID NO: 15111 - DNA, 122 bp, Homo sapiens
cacttctttcatcactgtttataattttctacccatagatttttcacttctggcctgggacgcgcgcgtcttcagggtggaagcctggcgcgcgtccggaggtgctgaggagccaaccggcc

SEQ ID NO: 15112 - DNA, 122 bp, Homo sapiens
gggctggaagaccacgtcgttcctgggctcctcactcctccgtggaacgtggtataagaacgcctccaccaccgcggccagcagctggttgttcaggaagtcaatgaccgggccccgagggc

SEQ ID NO: 15113 - DNA, 122 bp, Homo sapiens
gtactcaacggccacaggtgcctaggagcgcagagaggcctcgggttcaaatcaccggcgcgcagggactggactcgcgggtagcgacccccccaacccccccccccccgccctacacacac

SEQ ID NO: 15114 - DNA, 122 bp, Homo sapiens
cgagccctcgactcggtgctcgtcctcccgacctgcgacgccaccggctctccgattctgcgcgagccctactggcagtcgacttctaacttggctcgggcatccatcgctctggcctgaac

SEQ ID NO: 15115 - DNA, 122 bp, Homo sapiens
cagccttcctaacttctcttctatcctctctccaatgaaactgtgtatatgaattgccaacgtgcttgtctttccaccagactataaaatcttctagtggtttttatgtaaagtctatataa

SEQ ID NO: 15116 - DNA, 122 bp, Homo sapiens
taacttcctaccagtcccctttaatgtaatggctgcacatctctggctccctgagttcagcgcacattagcaaagtgatgcatatgcaaagcaaagcgcatggcactgtgccaaaagactgg

SEQ ID NO: 15117 - DNA, 122 bp, Homo sapiens
agattgaggatgtgcctgtgacagcctctggagctcctgaggatctgtacccaaggtggtcggagcacagtttggttttatacattctagggacacaggagacatcagtcaacatatgtaag

SEQ ID NO: 15118 - DNA, 122 bp, Homo sapiens
cgaggagccaccttccccaagttcctgtttctaggggagcagctgctgccttgtcatgatcgtggagcaaaaggtttttctctggctttgtggcttagtcttgtccaaggaacacaggactg

SEQ ID NO: 15119 - DNA, 122 bp, Homo sapiens
tttgaaggcgtgatagacaggagagcatggtctggccccttggtgcctttctggttgcagcgagcatttcaaactacagagcaaggccagtggtctgttcagcactagagacatgcagcaag

SEQ ID NO: 15120 - DNA, 122 bp, Homo sapiens
cactgcctgaggctgccagctcgtgctctacctgcagccatcacctgcagtgggagaagccggaatcccctaatcacctccagcaaagcagcagataagcaccttgtagttcaacccaggag

SEQ ID NO: 15121 - DNA, 122 bp, Homo sapiens
ctagtccagccacttcactataaatgggaaaactgagtctcagaaggggccataagtggacgtggctgttgcagaaagtgagaggagattctgtgaggcatgagaagttcatattcatcttc

SEQ ID NO: 15122 - DNA, 122 bp, Homo sapiens
aactgaaaatgtgttaatccaaatcagtctgtgtcctgactgtctacttactattgaatacggactattagatgctttatttttcatgatttaaaggctttgccctgaaaatggttggcttt

SEQ ID NO: 15123 - DNA, 122 bp, Homo sapiens
ctgttgagcatctcccacacgcgggcccgctcatcttccaggacgcggtccttctgcacccggatcacttccttgtagatggtcttctcctgcgatttggctttctggaggacgtcaatctg

SEQ ID NO: 15124 - DNA, 122 bp, Homo sapiens
actttcccaaatggtggacttgagatttaatcgacttcaaaaccgtacacacagtcgcggcggtaatagcacttccctgccccctggcttttcgcaatagtaaatttgggtgcttttcatct

SEQ ID NO: 15125 - DNA, 122 bp, Homo sapiens
ggcggggccgccggatccagggacaatggggtggggcgggctttccctgggtgggcgcagcggcttcctgggtccccctcacgctctgggtcagagttcctttacaggcggacctgagaggc

SEQ ID NO: 15126 - DNA, 122 bp, Homo sapiens
gtgcgagtatggctcgcttcctttccttagtgggtagcatgctctctgcagtcattttgtcgagtaaagccaccttagaccatcacctgttgttaaagccttgagtggcaatacaggatttt

SEQ ID NO: 15127 - DNA, 122 bp, Homo sapiens
gttcatttctggctgcagtgataggttcagggatgtccctgtgaccccaccccctgcccccgcgagaggctaatcaggatcaacactggaattttgtgggatgtactggggaagagacacct

SEQ ID NO: 15128 - DNA, 122 bp, Homo sapiens
caaaatcaaagaagaacgctgggctattgggagtggaagagaataaaggcaagtggggcacgaaatgacagtcagatggagtgaagaagtatgcacatgtgaatggccatgaggctggagga

SEQ ID NO: 15129 - DNA, 122 bp, Homo sapiens
gacgcacccgcagaaggtaagggcagtgccgcgcgcagggaaggggggaggtgggcgggccgcactgaggccccgcccccacatggcagggtgtttttgtttttgtttttgttttttttcaa

SEQ ID NO: 15130 - DNA, 122 bp, Homo sapiens
ctagctggattccagccattgctgcagctgctccacagcccttttcaggacccaaacaaccgcagccgctgttcccaggatggtgatccgtgtatatattgcatcttcctctggctctacag

SEQ ID NO: 15131 - DNA, 122 bp, Homo sapiens
tgggctgtcgggccagggcgggagggctgcgcccaggtccgcgcgcctcgcccctgtccgcgtcgctgtgctggcctggaagagagacacctgtagaaagttctgcgggaaacttctctgcc

SEQ ID NO: 15132 - DNA, 122 bp, Homo sapiens
tgagctccaccacctggttctggaacaccatggtcatgggcatgctggtctcttccacctcgggccgcagcagcgtgggcccgaacacaatggccacgctctgcaccgacatgcggttctgc

SEQ ID NO: 15133 - DNA, 122 bp, Homo sapiens
tactcccgggctggaccttggggttcgcatatttgaaagcgtaaacttgaggaatgacggcggggtgatgggtattttatagagtgggactcaatcgtgctcagcaacagatttctccaaat

SEQ ID NO: 15134 - DNA, 122 bp, Homo sapiens
ggcagcccgcgttatcagcgtgctcatcttggcctcggcagggctgacgcgtggtggagacgccggagccctcgttacactagttttacctggcaggcagtgctaggtctgcgcaaagataa

SEQ ID NO: 15135 - DNA, 122 bp, Homo sapiens
gaaatgtccccgactcagttccgacaacccaacatttcaggagcttgaagctttaaagggcgtcgtgacccgggcacagccgcggggcttgtattttgcaggttcagaaagttgaaactggg

SEQ ID NO: 15136 - DNA, 122 bp, Homo sapiens
gttgccctgacactgcctgttgctgctcctctgagaaggaatgtgtattcacagatgaggcgctccattagtcatggtgcatttcctgggccctggagacatgggcatgacatcaccaaggg

SEQ ID NO: 15137 - DNA, 122 bp, Homo sapiens
ggaagggaacctggggtcagcacacgtggagttctgggtggggcgctgggcagagggactcggcttctagggctctgagccaggccgagggacagactgctgggaagtccccaaaagggcag

SEQ ID NO: 15138 - DNA, 122 bp, Homo sapiens
ctgactctcgctccacgccccttccctggccacaaacccgccgaggcccccctctctacccggcgcgcctaccacaggcgcgacacctgtcaagccttgggacaccgaaaccgtacctggga

SEQ ID NO: 15139 - DNA, 122 bp, Homo sapiens
atggggactcttgactgcagtgtggatgtgagctgattgggggtaggccagccttctgtgcgggacacttgggaactgaggggacacagccgccaccctgcactgctcagcctgagcacctc

SEQ ID NO: 15140 - DNA, 122 bp, Homo sapiens
gaacaataaaatgttcagggtagcagatgagagaggatgcaggaagactgaatccagcagcggcgacggcacacaggtaacttctacaggctagtgttccacttattaacttgtgtggtgat

SEQ ID NO: 15141 - DNA, 122 bp, Homo sapiens
tgacaactccggccatttggcccggagtaactcttaattctcccacgaggctccccaggccgggggactgtgtccacccgcacgccccccagcagacgacaggtacatccacaactgcgcag

SEQ ID NO: 15142 - DNA, 122 bp, Homo sapiens
tcccgctgggcctgggtctggatggtgggcgccatagcgacgaggcgacggcagcccggacggggtcctagcgggaccgaagggggacgcagaggggcgtgccgacttcaggggacgcctga

SEQ ID NO: 15143 - DNA, 122 bp, Homo sapiens
tagagaggcctcccccctcgtttaaatcctgctgttggagcgtttggacagcaggcagaccggtttggggtctgttctgaagaactaagaacgagatgggttccggaaaatagcagctcgct

SEQ ID NO: 15144 - DNA, 122 bp, Homo sapiens
cgacctacccagcggcgccggtaggaacgcgggagtggcggtagggagcgcgcgagggatcgcgggacttgtagttcgcagcgctgggaggagtcagtggctgcctgggacttgggcttagg

SEQ ID NO: 15145 - DNA, 122 bp, Homo sapiens
tgttctacacaggccctcctgatcacttgggagtgatctgcataatactcagccttttaacgcatcttcttttagagaactttctctttctcccttctttgtcattattcatacacattatt

SEQ ID NO: 15146 - DNA, 122 bp, Homo sapiens
ctggaccatctcccagagaaggatactgaggccaggagaggctagagagcttggcgggtgcgctgggcccagatacgcggctcctgcctgcctcatggcctgctcctctgtcggggcctgtc

SEQ ID NO: 15147 - DNA, 122 bp, Homo sapiens
gaggcagaggcgggcagatcacctgatgtcaggacttcaagactagcctggctaacatggcgaaaccctgtctctactaaaaatacaaaattagccaggcatggtggcatgtgcctgtaatc

SEQ ID NO: 15148 - DNA, 122 bp, Homo sapiens
ggtagaactgttctgattgaacaagtagctgtgtcaatcatttcaaccctagactcctggcgccgagaatttgggggcggcgcaacccgggggcggggcaagcggaggcgaggctcccagtg

SEQ ID NO: 15149 - DNA, 122 bp, Homo sapiens
ctgctaagtgtgagaggacccagggggtaattgccgggccgcaggcggccttaggaactccgcttcccgtgaggcttcgcggcggacggcgctggtgcgcaggcgcacgcacggcgtgcgtg

SEQ ID NO: 15150 - DNA, 122 bp, Homo sapiens
tcactggcctcaaaagagaaagtgctcacgaaggggacagtccctcgcatcgccagtaaccgcagcctcttctcatctgcacactggccctggctccctgacccacaaggttgaacagaatg

SEQ ID NO: 15151 - DNA, 122 bp, Homo sapiens
gagctctgctttccacacttaaccagagacaggtattcaatatgagctgggggcaagaagcgtgaacccctccaatttttatgcaaagttttgtgagcaagtatgagcatttgctggagcca

SEQ ID NO: 15152 - DNA, 122 bp, Homo sapiens
cctagggagagcatgcagtcgggcaggtagtagggagcgtgggctccaaccccaccgcagcgtctagggttgagtgtttacagttttcgaagccccggtgagcgtgtgttgcagcgtgcttt

SEQ ID NO: 15153 - DNA, 122 bp, Homo sapiens
agtatttgttcaattagctttggggaagaaatgccaaatccactttgaggatgagtcttacgacacagatccacccacatgttgctcttatctggaatttgggacaaagcaatgcacaggcc

SEQ ID NO: 15154 - DNA, 122 bp, Homo sapiens
acttgttccttgaggatccaggctccgaaaagccctgaggcaggacaggactccacaccgcgctgcgagaggaaagccagcctgcacctcacctgtcctggttctgcctggctgctgcgatg

SEQ ID NO: 15155 - DNA, 122 bp, Homo sapiens
acgagggaccgtttctgctgggtcggggcctggggagggaggccagatcccggggacccgcggtccccaccctggtctccggcgactgacccggggctcccgcacccggcctttgcgcaggg

SEQ ID NO: 15156 - DNA, 122 bp, Homo sapiens
gcccccacccagacccggcgcccgccactgcgcgggaggggccagggccgcgagagggctcgggtctgaccctccgccccctgaccgggtacttacagccctgtttttcgttactgttgccg

SEQ ID NO: 15157 - DNA, 122 bp, Homo sapiens
gtatggtggccaatgaaaccgggcctggctcattctgttgcttgtcttggcagtcggttccgtggcttgtattaccagctctggaacttaggggctgccaagctccatgtgcctgtgtatgt

SEQ ID NO: 15158 - DNA, 122 bp, Homo sapiens
caggagggaccttgaggaggaagggactcctcggtcataccaactcaggaagtggaactgcgtcacggtgcgcgtctcgttggtctgcaggttcttcagatagaagctcctcaccaggaagt

SEQ ID NO: 15159 - DNA, 122 bp, Homo sapiens
acaagaatctggatttttaggaaccagtgacctttgaagatgtaacactgggttttaccccggaagagtggggactgctggacctcaaacagaagtccctgtacagggaagtgatgctggag

SEQ ID NO: 15160 - DNA, 122 bp, Homo sapiens
agcagccacagcatgggtggcatggtggactggggctgtggcagtgggctggtgccaccccgaacattgtgaggtcacccatgaactctggcctcagccctgggcagtgggatgaattgcag

SEQ ID NO: 15161 - DNA, 122 bp, Homo sapiens
gtattctttaaagattaaaagtttcgaggatccgagtccgagtgggagaggcgcgcggtccgagtgggagaggctgagagtcaactccagggaagtctgtgtctgacacctgctcgctgctt

SEQ ID NO: 15162 - DNA, 122 bp, Homo sapiens
aggcgtgagccactgcgcccctccctgttgatgctttttgatgaaatacccaaacttgcacgtctcccagaatgtgaaggccaaggctgggaacaggcctgtcaaatgttccgggtggtttg

SEQ ID NO: 15163 - DNA, 122 bp, Homo sapiens
gcatgggataggatggaaactgtgctgaggttttatggaagccttgattcagcggaagggcgggcctgggtactgagcctcagccacattccccttgaccttcagaaggcagacaccatgac

SEQ ID NO: 15164 - DNA, 122 bp, Homo sapiens
cctcctgcctctcccctgtctagtggggccccagtgcacttgtaaagtggagagacctgacgaccccccacccccaagcgctccactcacgctgttgtgattcctaaaccatcgtgcccgga

SEQ ID NO: 15165 - DNA, 122 bp, Homo sapiens
ccggatgttgttgtatgtccgagagacacgtgaggttctgctacgtcattaccaggcacgcgcaggaaacatggcggcggcgggtgttgtgagcgggaaggtaggtaacggcctccaggaag

SEQ ID NO: 15166 - DNA, 122 bp, Homo sapiens
tatcataggtatgtatatataggaaaaaacatagtacacataaggtttggtactatccatcgtgtcaggcatccacttgggggtcttggaaagtagcccctgcaaatacaactgtatttgtt

SEQ ID NO: 15167 - DNA, 122 bp, Homo sapiens
gtaggcggttctaaaccgccggcggctaggcctatttccggtaggaatcagtggacttggcggcagaggcagtgcggatccggcgttctccactgatcttttccaaggctgtacagacatgg

SEQ ID NO: 15168 - DNA, 122 bp, Homo sapiens
ttggagtttcaaggacaggtgtccccttttcagacagccaggcgacaggaaagcagtactcggtaagagaccttccatccatcagcttcttggtctgtatatttaaacatttgcatcacctt

SEQ ID NO: 15169 - DNA, 122 bp, Homo sapiens
ttacaagttaaagtatacatgctgtaattttatgaattgtagctttaaacaatagtatgtcgttggtataggcagtctatgtgatgtgtgtatatatattcaagtgggtgaaaaactacact

SEQ ID NO: 15170 - DNA, 122 bp, Homo sapiens
ctccttagccaatcggggtcctagtgcccttaagtccctcctctttatgcaaataacctccgcatgctccgcgcgcccggcccttttttttttttttttaaactaaagacagccctggaagt

SEQ ID NO: 15171 - DNA, 122 bp, Homo sapiens
ggaagagtggttttaaagttaatttggaaaggagccggcaagcaaccttcagtcggtgtgcggtttttacagttgaactgtttccagccgctaattatgattgttttagcggttcgtcatct

SEQ ID NO: 15172 - DNA, 122 bp, Homo sapiens
ccccgcccacgtggcagcaaggatatggcccgcaaggtaaggctgatgcagaggtgcccacgggaatgtcccccttctcggacttggcccgcgcgccctgggctgtgccgtcgctgcggcct

SEQ ID NO: 15173 - DNA, 122 bp, Homo sapiens
gtttcaggaacacaaaaacaaacggaaaacacccacatcagctgtgaaacagacgctgggcgcttgggtcttggggggtcctgtgggccttgctggcttgcttggtgacaagtgcagcttta

SEQ ID NO: 15174 - DNA, 122 bp, Homo sapiens
ggcctttccccctatgccgtttcaggagaggcacatgatcatgcacaagcgcacccacaccggggagaagccttacgcctgcagccactgcgataagaccttccgccagaagcagcttctcg

SEQ ID NO: 15175 - DNA, 122 bp, Homo sapiens
aatgcctgggcgagatgcaagtccaggcccttctctggggtctcttcccaaaggctggtccgggtggggctactgggctcttttgcctccccctccctcccgcccgcggcgctccagctggc

SEQ ID NO: 15176 - DNA, 122 bp, Homo sapiens
tgccttctgaaaaagaagatggcactgggcacatcagaagccacgctgttccttccatggcgactacagctgtgaccagctgccccaattccgctgtgagccccgtgggagtcagctgtcac

SEQ ID NO: 15177 - DNA, 122 bp, Homo sapiens
tgggcagtgacgtctttttcaagggcaagcaacagggagagaacgcccttgtctcatcagcgggacctttctaggcacccgtcctcagacctgctcttaaccccgagtccaggaaccctctc

SEQ ID NO: 15178 - DNA, 122 bp, Homo sapiens
gaggccgcggggctgggcaccatggcagctctcgggaccaccgggcagcgcgcgtttccacgctgtctctctaggatgctcccagaaaggggctgggggagccacatcgattcgcttcacac

SEQ ID NO: 15179 - DNA, 122 bp, Homo sapiens
tgtcatctatgcagtctccctgctcttctgctcgctgccgctgctggactatgggcagtacgtccagtactgccccgggacctggtgcttcatccggcacgggcggaccgcttacctgcagc

SEQ ID NO: 15180 - DNA, 122 bp, Homo sapiens
ggaagttgcacttgaaatgcaggtcagaacaatgggatacgctggtcctgctgtcccaggcgggggagtcacgggagggctcgagtgccacaccacccacacgtcagccaccatgtgggttc

SEQ ID NO: 15181 - DNA, 122 bp, Homo sapiens
agctcatcatgaccttccagaattacgggcaagcgctgttcaaacccatgaagtaagtgccgaggcctgtgggctggggcgtgaggagctggagctgcaggcgagcaggcgccgggcttctg

SEQ ID NO: 15182 - DNA, 122 bp, Homo sapiens
acctttcccactgcttgtgaggctggcacaagggtggaatccacgaagactgggcgtgggcgcagaatgccttgcgggtggagaatgtgtcacactaaggtccttgtttgtggctcccctca

SEQ ID NO: 15183 - DNA, 122 bp, Homo sapiens
ggggttcttcactccaatctgtgttgagaggttgggagctgaactgcgggttgttggcagcgggtgttttctgctgcatcaactaagaagtagaaaagtctgatcatcagagagagaggagc

SEQ ID NO: 15184 - DNA, 122 bp, Homo sapiens
accccacccccgaaccccagcgcctggctgcccggaggtggctccacagcccgagggaaccgacgcccccgggccggctgtctgctcccccacggcacgggccccacccccaatccttccgg

SEQ ID NO: 15185 - DNA, 122 bp, Homo sapiens
gttgcccttgtctgtgttctggcggccccattcgtagccactgggggtcagcttgtaggccgtcagtgtacaggagcctggcgtgaagctgggggaggaacgaggacagagtaacagctcag

SEQ ID NO: 15186 - DNA, 122 bp, Homo sapiens
tgtctccgcacctctctaaagggcagcctgcccgtgagcttcaggcccagcatgaccatccgggccacccagaagaagaggatgtcatgaccggtctccagcagtgtcccggggtagaacac

SEQ ID NO: 15187 - DNA, 122 bp, Homo sapiens
tgattcaaagctggagcctagtaagaaaagtatattggtaggttcagagggtaagaaaatcgtagaaactgatagagcaaaggttgaaatgtcatccccaggagtatggggctacagagaaa

SEQ ID NO: 15188 - DNA, 122 bp, Homo sapiens
aggcgtgagccactgcacccggatgagttttacttttttaaataaaaatgtattttacaacgcagtgttgcttttgtttttaattacttgaaaggacaccataatcatttcactattagggc

SEQ ID NO: 15189 - DNA, 122 bp, Homo sapiens
aaagccgcagtgctgggctttggtgactgtccctgctcacctttcccttgaatgtgaatgcggtgatttaaaggcagggagagaggactggaaggagtccgggagccccatctgtgaggccc

SEQ ID NO: 15190 - DNA, 122 bp, Homo sapiens
tgagttgttgaggttttgcttgtgaatttctcattcttctttccctttttcgttccagagcgccgccctgtgctgggctgccgggagctcgtcttcaggaacctctccaagatcctccctgc

SEQ ID NO: 15191 - DNA, 122 bp, Homo sapiens
ccccccttttgcttagctgaatggatataaggaaaagaagacttgtgcttattaagggaacgtggaagtcacggtctccatttaatagatgaggactaagtagcaggtcttgactgaaacat

SEQ ID NO: 15192 - DNA, 122 bp, Homo sapiens
ttttgcctgttgctgctatacctcatcggggcggtgattgccgggtgaggaacagacactcgcagacaacggggcctgtgggtcagcctttgctggggggtgggagggggtgggggaagtgg

SEQ ID NO: 15193 - DNA, 122 bp, Homo sapiens
ggaagaaactctacaatcaaaactcatttagccactcacaacctactatagtttgaatagcgtacactcttttagccaataggattcatgttttgctgcccttccgctgggagactgattaa

SEQ ID NO: 15194 - DNA, 122 bp, Homo sapiens
cagaagctgaggtgctagtctgggagtgtgcgtggcgtgggctggtaggtccagtggtgtcgtcaccatgactatagtcaccactactgtagtgggatgccactcagacccatccagtccct

SEQ ID NO: 15195 - DNA, 122 bp, Homo sapiens
actactgaggccttcgaagaaaccacacggctgccttgggccccaaaagctgcggaaaagcgcagtattcagttaagcaaataactacttacactgtttattttggttacgattccttaagt

SEQ ID NO: 15196 - DNA, 122 bp, Homo sapiens
gctgtgctccatctctgatgtagcacagaagatagtgggggctgagaaaagaaagaatctcgcctctcagagatgtgcctgtctccatgcgcttcaaagatcttagccacgtcgtgcataat

SEQ ID NO: 15197 - DNA, 122 bp, Homo sapiens
tgggaggatggagctgcagtcccgagcatgtccagcagagtgcgccctgcagttcagaggcgcagagtgttcagggggtggcctcactgtgggctcccctgcatgccgactgccagataccc

SEQ ID NO: 15198 - DNA, 122 bp, Homo sapiens
gcctggcgcttccacagagtagcaggcactgctcagggtgccagggatgtatttttcaaacgggacaaaagcagtctctgtgatcttggcccttgtgacctgggtgcttttagaatgggtgg

SEQ ID NO: 15199 - DNA, 122 bp, Homo sapiens
agaccctagggggtaggctggggccctgtaccgaagcaaggggttttcaaggctgccacccggggctcatggcccttggcctctctgggagggaggagccccggccatccccaccctcgtgg

SEQ ID NO: 15200 - DNA, 122 bp, Homo sapiens
tgatcatttctacacatctataaatccatgaatgcccccacactctagaacataattgaccggggccagggtggatccagagatgagacaggtctggccacccaaactgggccagctccctg

SEQ ID NO: 15201 - DNA, 122 bp, Homo sapiens
aggtcactattctaccacttactattcacacttgtccttattttcatcttaatgaggtgtcgggtttcagcaattcaatcggcatctgctttcaatgtaaaatttcaagagatgataagatg

SEQ ID NO: 15202 - DNA, 122 bp, Homo sapiens
ggctgcttctgtgtgtgtctggctgtgcgtgccagcggggtgtgtgcagaacccagcagccgagggggtgtgagtgggcctgggacgcccagaggctcttgagtgaggttccgggtgagccg

SEQ ID NO: 15203 - DNA, 122 bp, Homo sapiens
ccctctgtggagactgcccccttgcccctctgtggagacattggggtggcggagcgccggcgcgggagccggggggctgttgtgtgggagcccaaggtaggggtgggaagaaccgtggaggg

SEQ ID NO: 15204 - DNA, 122 bp, Homo sapiens
gttgtgtgtatccccaatgcagtaacccttacagagataattctcccagtttagccaccacgaagtattgttctttgtttttccatagtgcttgtcaaaatgctatgacaactgactggttt

SEQ ID NO: 15205 - DNA, 122 bp, Homo sapiens
gccagaataatggtcacgcggaatactgatttaaccgaaactgtgacaaacctcatcagccgggcagggatgcgtgtggagcgagccgctggccaagtgctgccagatgccccaagtgaccc

SEQ ID NO: 15206 - DNA, 122 bp, Homo sapiens
gatccaagcacagggacccacgtgtgcaaaggcacaaaagtgtgaaatggcccagtgagtcggggattggatggaggaggcttgagtcaattctaggagtgggaaatggagttgtgctggga

SEQ ID NO: 15207 - DNA, 122 bp, Homo sapiens
gggtgcagactgcgagaatgcacgcccctccctgccgccgggtgtgggggagaagggggccgtgtgaatcccgttcccaaggcccggcactcatctgtcttaggtaccacaggctcaatact

SEQ ID NO: 15208 - DNA, 122 bp, Homo sapiens
cttggctggttgtctgtttgtgattggttgaaactccattcaaaatcaggtacaaggggccgggcgcggtggctcacacctgtaatcccagcactttgggaggctgaggcaggcggatcccc

SEQ ID NO: 15209 - DNA, 122 bp, Homo sapiens
aagcaccgagtcctttgtgtctagcccatttttattttcggttttaaccttcacgacagccgcggagcatctgagcgcttcttcctctttcctcttcccccgcgctcccctcccctgctggc

SEQ ID NO: 15210 - DNA, 122 bp, Homo sapiens
agccacccgccggaggtgttcttcgcagcattcagggaggcctgtgcccacagcactcctcgctcagctgctctgttcccagggaagtcactgaacagagcccccaggccagggagggccac

SEQ ID NO: 15211 - DNA, 122 bp, Homo sapiens
ttagaagaaaaactatttgaaggtattttttggttttccttaacatgtatccactgtaaacgtttgtcgtgtacaagctcagagcttggacagaattttttgtatttgtaaattggtttaaa

SEQ ID NO: 15212 - DNA, 122 bp, Homo sapiens
cggcacgttgtttttacacttcggggactctggtgggaccgcgggaagccaggaggcgggcgcgccccgggagccgataggaaagtgcaacagcgccatctagtggccgcgcggggaggctg

SEQ ID NO: 15213 - DNA, 122 bp, Homo sapiens
gaggctgctcctcaggggccctgacaagctgtctttaaggatgctctgagaagcttggaccgttgtctaatggcccaacatgcaaatcagctcagaaaagtttgagttgatgctcaaagggg

SEQ ID NO: 15214 - DNA, 122 bp, Homo sapiens
ccgtcctgtcctgggcgcggccaggcccctctcctgggaggaagcttcggctgaaggccacgtcttggccccctactgcctgggggccctccccatccaacaaggacttgtcttgggacttg

SEQ ID NO: 15215 - DNA, 122 bp, Homo sapiens
agggaaagctgtggctttctcgggggagcgagtgtctaggggaagggtgtggcaggcccacgggatgccatgccctagaacaacggcctgagcgcttgtggaattaaaatgggagatgtggg

SEQ ID NO: 15216 - DNA, 122 bp, Homo sapiens
gaagatgctgctttctcctctgcatgcctggggtccaacgagggtcatgggacccaggaacgtctctgcaactctgtctgtaaacatccaggagctaattgtgacctggaagtcattcagaa

SEQ ID NO: 15217 - DNA, 122 bp, Homo sapiens
ggttgtccacgacggccagggcagtggctggagagtggtacgcctggttgttgaacaaggcgttgacgaccgtgcgctctcccacatctctgaaggacgctgccacaaggcaccgctcatta

SEQ ID NO: 15218 - DNA, 122 bp, Homo sapiens
agtttaaagaagaaagcaggcggcttcctgtgatggtatattggttagtactctgcatcgcggccaagggtggaatcccagtcatggcagtgtccctcctggggcgtggcactcctcctttc

SEQ ID NO: 15219 - DNA, 122 bp, Homo sapiens
agtacccaggctaacacaggcacatagctaaatacttgcttgattgggctcggtggctcacgcctataatcccagcactttgagagaccgaggcgggcggatcacttgaggtcaggcattgg

SEQ ID NO: 15220 - DNA, 122 bp, Homo sapiens
taagtatgacttagatgggtccaggcaaataaactaaaaagaagtgaaggcaacatgtatcgtctggcagaactaaatcttggagtggggtgagggatgaaagactacatattgggtacagt

SEQ ID NO: 15221 - DNA, 122 bp, Homo sapiens
gtgctcggactgggagctttgggcctggtctggtggctgcacaggtgagcaggagggacccggcctcgttaaatggggagtgaccagaggtggaaggggcaggaccagaaccttcgcaaaag

SEQ ID NO: 15222 - DNA, 122 bp, Homo sapiens
cttcactgcccccagatttgctgtttaaaaaaccaccaacagcaaatatggtgaaaaaatcgcaatccctagtgtcaagtctgactgcctgtgtgcagagaattctgaggctgtattggagt

SEQ ID NO: 15223 - DNA, 122 bp, Homo sapiens
gaggggcccagccggagggcgctggggtatcctcatcaggaaagcctgaggcgccgagctcggagggttggcttacccaagtgcttggacaggaagagaaagaggtgcagattcccacgcac

SEQ ID NO: 15224 - DNA, 122 bp, Homo sapiens
ccaggcccgcagggagggggttcccgggtttggacccggactaggaggccgcatagggcacgcggccctacctgtgagggaggccagctggagactgaacccacactcgggaaggaggccca

SEQ ID NO: 15225 - DNA, 122 bp, Homo sapiens
gccacaagcccaccccctccatgtcttagatagtgcgggaggtcctcaaagagaggcccacgaggactgagtggaaacagaagctgggcctgtgtcccatttgctctgctgggccgacttcc

SEQ ID NO: 15226 - DNA, 122 bp, Homo sapiens
gctggcccctcatttcctgcctcgcctctgtgtggttgaggttaaggtttctcttgctcacgggcctctgcattccttaggggagctggagaagcagcagggaacaaagacactctccttca

SEQ ID NO: 15227 - DNA, 122 bp, Homo sapiens
  misc_feature 1: n = A,T,C or G
nattttaaaatacccagctccaccccttcctgttaggctttcgcgtgtcgcagctgtgcacgctgattggtcctctgctggccaatcaccactgcacttcatgacggctgtagttttcaaaa

SEQ ID NO: 15228 - DNA, 122 bp, Homo sapiens
cgctgacaacatgaatttcgataatcacactgcatcttttatgcttgggagttctctcctcgtacagaaagcctgagggcatgtcgttcattttgatggtggatcttaggctgatctgaaat

SEQ ID NO: 15229 - DNA, 122 bp, Homo sapiens
ttttcatcacagtttaaggagcatcagccgcttctcaagtgggtagggaaagcagaaaaacgtacgcaagaggacatggatccaaaatgatgatgaagcatctcccatggggaggtgatggt

SEQ ID NO: 15230 - DNA, 122 bp, Homo sapiens
gcttttgctcgcagagaaggtcagacaactgtcagagctggttccctctgcaggacttgccgtggtggagggggagacgactatacctgtggggggaggacagcgcttttgatgctgcagtg

SEQ ID NO: 15231 - DNA, 122 bp, Homo sapiens
tgccctttccactggggcggcacctgagcagccctgtgacactggatgtgccccgatccgcgatccgcagcacctcccctgtgcggcgccccaggtgccagcgcagtgagagctcgtgcagg

SEQ ID NO: 15232 - DNA, 122 bp, Homo sapiens
gcagggccagctccgtggggctcagcgggggcagagggagagcgaaagcgcgggaacccgcgcatctgaggaaagctaaacatttcacctgtagagtcggctgccctggccctcggaggccc

SEQ ID NO: 15233 - DNA, 122 bp, Homo sapiens
gccagaccggtcccaacctgtccctgggggaactagatcatttctggctgcaggagggggcgaggggcagccgcgacgcccgccaggccggcctaccagcagctcgctctgggctctcctat

SEQ ID NO: 15234 - DNA, 122 bp, Homo sapiens
aggcaaatgggatagactagccctcccgcccgggatcccgcgtctcggggaacggagacccgggcacacgccacttgcttgctgggaggttccttacaagttacatagagggggagcttttc

SEQ ID NO: 15235 - DNA, 122 bp, Homo sapiens
gtcaagtcgctccttcctgtttcaagcagctccacagaaactttcatgtcctgaaatggccggcactgcgcatactccttaatgattaactcattagataccactttttcctttttaaaatg

SEQ ID NO: 15236 - DNA, 122 bp, Homo sapiens
tcctgcgtcccgggtgcccaaaagagcagacgactaaatctggtgtccgctgcgctcaggcgtgacgttctccgacgtggtgagcgcgaccgagccgtgcaagccgtgcaccgagtgcgtgg

SEQ ID NO: 15237 - DNA, 122 bp, Homo sapiens
aaagcgtgaactgtgtgagtaagaaactttgtgaattggtgtgtccgaatccgtcaagcacgacgtcggagaatttgtatgcgtgagcgagagggacgcgctgacagtaggggcgccgcagg

SEQ ID NO: 15238 - DNA, 122 bp, Homo sapiens
cggtgtggcaggaggtcttccagctgcctcgagcccagaggtaggcggtggccacagcctcggcccagatgctcacggtgcccggacctcaggacgctagccctgtgtgcaggccagcacta

SEQ ID NO: 15239 - DNA, 122 bp, Homo sapiens
tctcccatcccagaaacccccagggctttccagtgcaggtggtggtttccggcttttgagcggagtgcctgtgtttatcgcggaagtcccccacaagcaaaaacggggccgcagggtggcgt

SEQ ID NO: 15240 - DNA, 122 bp, Homo sapiens
ggaggttttcccaggctcgcctcattgctcctgcacctgcagggttcgctggaccctgggcgtcccgctgcccggaacacaagggtagggaagggttgttactgggtttcttggctggggct

SEQ ID NO: 15241 - DNA, 122 bp, Homo sapiens
tgacctccccgggaaaggctgggcggtgcttccacaatgagggccacctgttaatttgcacgagaaagtgctgccgagggcccacacgtgcgaatccacctgtggagtgcgtcccctctctg

SEQ ID NO: 15242 - DNA, 122 bp, Homo sapiens
agcccccaagcgaggcatcagagctcacctttgaaggggtgcccatgacccacagccccacggatcccaggccagccaaggcagaagaaggaaagaacatcctggcagagagccagaaggaa

SEQ ID NO: 15243 - DNA, 122 bp, Homo sapiens
cacccgcccctcctcacacacggcagcctctgagggcgtcgagtccctcctgtctcattacgcttgctaccaggggtgcacagagacttaacgggtgaatgaagagaagcagcatatgggtg

SEQ ID NO: 15244 - DNA, 122 bp, Homo sapiens
gaaagactaaactggaaggcaggaggtttttctagccccagcactgctgcttgttgtctgcgtgacttagccagtggtttcacactacaccagtcagcttatctgcatcttagggggtggtc

SEQ ID NO: 15245 - DNA, 122 bp, Homo sapiens
cacctagaactctaatccacagttggccggagtgtagacccattcactcatgttgggaaacggtttggcaggatctactaacactactagctggatcttctctgactcagcaattccattgc

SEQ ID NO: 15246 - DNA, 122 bp, Homo sapiens
tctgctctcgccttctcccttgaaagagactccttgggggctccccaggtcagagtaccccgcccggggaatcatgctggtctctggggcgacccagctatcagagacgacagttctatttt

SEQ ID NO: 15247 - DNA, 122 bp, Homo sapiens
caaattctttcttccctttgtaaacgattatgctagtttaaacaccaaaagggagccagccggagagacattaaaatgagtagcttcagtaatgtaaataatccattacttcaactagttct

SEQ ID NO: 15248 - DNA, 122 bp, Homo sapiens
tttttttttttttttttttttaagcgatagatagcttgctctgtcgcccagagtcgattacggctcactgctgccttcccacttctaggctcaagccatcctcccgcctcagccttccgtgt

SEQ ID NO: 15249 - DNA, 122 bp, Homo sapiens
cgaactccttacctcaggtgatccacccacctcggcctcccaaagtgctgggattacaggcgtgagccaccacaccaaccagtggtttcttttattgagattcacggtgcttctgggaagcc

SEQ ID NO: 15250 - DNA, 122 bp, Homo sapiens
tctaacaacatatggagtctgctgggagataaaaacagcagttgttcctaaagggcaacgcgcttgttgcagatggactgtatgcctctcggggaaagggaagtaaatgagtttcctgtgtt

SEQ ID NO: 15251 - DNA, 122 bp, Homo sapiens
gtaaaaggatgaattttctctaaaattagctggcttttctgggacaatatgctgctgccacgtaatgctagaagactggaataggctgtggagatccaagcccaatggtttttcctagtcag

SEQ ID NO: 15252 - DNA, 122 bp, Homo sapiens
gacctatcccgccggcgtgtggaccgcactttcctcccaggggtcagctagaaaggagatcggttctagggaagttggatcctcgaaccccacacccatctcccgcccgcccctgccccctc

SEQ ID NO: 15253 - DNA, 122 bp, Homo sapiens
ctctgtcgtaaaccccacatggctgatgggttctgacgggcgcctcggcttgcttcggcccgactcttaacgttgcagccagcctgagactccacagcgcgaggctgctccccacctgccga

SEQ ID NO: 15254 - DNA, 122 bp, Homo sapiens
atgatcaaacgctgttcattggctttccctcctccgctaaggcggagcctacttctcttgcgctcccatttgggtcgtgccattctcaggggaaccaaccccaatacctaagggaggctggg

SEQ ID NO: 15255 - DNA, 122 bp, Homo sapiens
ccaggctagcggagctgccccgggaagctgggtgacgggttcgcggctgccgccggactgcggcctactccgccgcctctcagtgctattgtccctgggcctggccttgagcgggtccactg

SEQ ID NO: 15256 - DNA, 122 bp, Homo sapiens
caaggtttctccccatatgatagcctgagatatggcctcgtgggaagggaaagacctgaccgtcccctaccccgacacctgtaaagggtctctgctgaggaggatcagtaaaagaggaaggc

SEQ ID NO: 15257 - DNA, 122 bp, Homo sapiens
tttcgcggcctccgcgatggtaaatctggggtctccgtccacgccccgccgttccaagcacgccgaccgtcaaggaccttcgcacccagcttctggggcccacccaggcacgggcggtccag

SEQ ID NO: 15258 - DNA, 122 bp, Homo sapiens
ttcaagagatctattgcaccatatggtgaccatggttaataaaatgtattgtatgcttgacgattgctaagagagtaaattttaagtgctgtcaccacaaataaatgataaatatgtgaggt

SEQ ID NO: 15259 - DNA, 122 bp, Homo sapiens
gtccagtggaccagggatgaagcggggatgcgctaggcatcccggtttgtcaccagggggcgtgcgaggccctcagcttggcgggcggtgaggcgtggggtgacggggggatggcgggggcc

SEQ ID NO: 15260 - DNA, 122 bp, Homo sapiens
actccctgcagaaagagccctgcctgtcagcctctgcagcgggcagggtgcagccatcatcgcccagtccccgagggtcagcgggcgcagatgctgggtgttgcaggggccgaggaaggagg

SEQ ID NO: 15261 - DNA, 122 bp, Homo sapiens
gcattttgtcactatagattagatttgtctattctaagtgatgaacaaagtttaaacttgcgttttcttaatcttggatagtgttcatatatttgtattgtttcaatcaggtttcttagttg

SEQ ID NO: 15262 - DNA, 122 bp, Homo sapiens
gttatttatgactgcgtggttgggctgggggttcggggccggggagcagccgggatccgccgcctcttccatgatcttcccgggccgaaccacgggaccgctacgctgaaggtggcgtcgcg

SEQ ID NO: 15263 - DNA, 122 bp, Homo sapiens
gctgacccgcattctcctatcaggagccctccaaacggaaaatggctccagcagcaataccgccaacaaaaacacagccttgcagggcagctgcgtctgcgatgcgctcagcccagacccgc

SEQ ID NO: 15264 - DNA, 122 bp, Homo sapiens
agatggggccctgcaagggggctggagaaagaggctttatggagtccaggccagtgaggtcgctgggcaggcacctaaggaaagagaacctaaacccagatcttttgccacttggagctcat

SEQ ID NO: 15265 - DNA, 122 bp, Homo sapiens
cggtgaagatccgcttccacgtctccgtggtagtggaggcggtagctgacttcaaattcgcgattcaggaaccagaccaacaagagcaggagaaagaagacgagaaccacctcctggccgat

SEQ ID NO: 15266 - DNA, 122 bp, Homo sapiens
tttgaggccgcgtagtcggtgtttttgaactgactctacagcttctggcaggccgtgcggcgccctgacccggcctcaccatgttggtgctgtttgaaacgtctgtgggttacgccatcttt

SEQ ID NO: 15267 - DNA, 122 bp, Homo sapiens
ctccagggatcctcccacttcggcctcccaaagtgctgggcttacaggtatgagccaccgcgcccgaccgataaacatttttgctaacagatttaaactagcgtctcctgtaccttttttct

SEQ ID NO: 15268 - DNA, 122 bp, Homo sapiens
acgcaagggaggagaaaaggtggggcaggggtgatttgggtggatggataggagggcttccgacctgcgttaggcgggtcagttaatcttcagtaactccttgatgcgtttgatagtcctcc

SEQ ID NO: 15269 - DNA, 122 bp, Homo sapiens
cgctctccctgggatagatacagggtccagagaaatatctggtgcttgttttccaaccatcgccaccccaacctggggggaaggcagagctaatattatacaggtgaaagttgcttgaggag

SEQ ID NO: 15270 - DNA, 122 bp, Homo sapiens
agccaggagtaaagaactggcttacttggccgccactgggaaattctgggtaattcgagacgccctggaatttggacccactccgctgataggtggtggccagggttctagggaacacaaga

SEQ ID NO: 15271 - DNA, 122 bp, Homo sapiens
gcgcgttccaggtctctccgccaatacagctgccgacattgttcaagggcctctttatagcgacagacttcatgctcctcggccccaaaactgcgaacggtctgcagccctccaacggcttc

SEQ ID NO: 15272 - DNA, 122 bp, Homo sapiens
ctaggtgaatttctcctggttggtgagttttcattgtttacctctgctcacacagggactcgaggagggagactaggactcagagtcctccttcatcttgtcacttctctaaacaattactt

SEQ ID NO: 15273 - DNA, 122 bp, Homo sapiens
cctctgaaggcacacaatacacttttccaggcaacttgcagggggcctccacatgagggccgtcatcacacactgtctttacagacaagatgcaccttctccaggagcacaggtacgatact

SEQ ID NO: 15274 - DNA, 122 bp, Homo sapiens
ggacagatctagcaccagaaacaataccctgagaaaactgccttccaaggtcagagattccgtcggattccaaggcttctcccactgtagatgctgaagtaacccaggatcctggaggccct

SEQ ID NO: 15275 - DNA, 122 bp, Homo sapiens
tgaggacccaacacctattaaaacatccacactcctgagaacactaaaaaccaaccacctcgtcaggtcccacctccagtctagctgaatcaggaaacctcaggagaagcacctggaagcag

SEQ ID NO: 15276 - DNA, 122 bp, Homo sapiens
tcgggtctgttttgtctggttggcaagacttccgaagcctggttccctatagctgccacccggtcgctggcgtggaggagggagtccgggaagactggaccccagaattgtcccggctttct

SEQ ID NO: 15277 - DNA, 122 bp, Homo sapiens
cgctccagcgcggccccgccccgccagcgccgagccacgcccccgccgcagagctcgccacgccccctggagagcctagccccgcccctacgtagagctccgccccggccgcgccaccccct

SEQ ID NO: 15278 - DNA, 122 bp, Homo sapiens
tgcgctctcaccgctggcgatgggccctggctgcgtcagcagcagcagcagcaccaacagcgcgcacaaggagctcgaaggaccggggacacgggccgcgcggctggacaggaggctcatag

SEQ ID NO: 15279 - DNA, 122 bp, Homo sapiens
cctaagctctggcgctcctaagctcgccgccatcttccacactatctgggaccacgaggacggggcctggtgtgcatgtgggctttagcaccaggtctggtccacacctcaggcagcccgac

SEQ ID NO: 15280 - DNA, 122 bp, Homo sapiens
cgtgacgccaccccgtagtcccgcccccgggccccttccccgcccggagctcggcgcacgcgcagtgagcctggattctcgagcctgtcgacacgcaacccgctgccctcgctctctgcctt

SEQ ID NO: 15281 - DNA, 122 bp, Homo sapiens
tgggtgggtgggtgggggcccggggaaagtctagagcgtgctcgaaatctcttgaccctccggagtattgactttggtcccaagaaattgctcgcggttgctgggagagtactggcggtggg

SEQ ID NO: 15282 - DNA, 122 bp, Homo sapiens
tcgctcgccctgagcactgtatttattccccttactcagtcccagggacttctccagtagcgacaactctgcggccgccgccatcttccggccgtagctcctggcagacgcgagacctgcag

SEQ ID NO: 15283 - DNA, 122 bp, Homo sapiens
agctaagataaactcgcttttcttccggtaagtgcgcgattgagccgcgacaataggcggcgaggaggaggccgttgggtcaatagcctgcgtctctcccattgataggaaaagtcagtgcg

SEQ ID NO: 15284 - DNA, 122 bp, Homo sapiens
aaatgttccacgcagctcagtgggcattctctgatgctgattaccacggctcgattgacacgtttagctcctgtggggacagcgtcgctcatgatgaagagaatcaatcaaacttactttcc

SEQ ID NO: 15285 - DNA, 122 bp, Homo sapiens
ctacaaaaggcagtagctccgccgaacgttggatcgtcccttggtctggtgataccagaacgagagttgactgtgtgtctcagtcggttggtatgcttgcttccaagcctggaggtgggtgg

SEQ ID NO: 15286 - DNA, 122 bp, Homo sapiens
tgcgggtaaagccagggtagacttgggttttggtggaggggccgagggtgtcccattgctcgcccttgtcacttcgggagcttcgggaagtgccgaatgcagggaatcgcgactcttgtcgc

SEQ ID NO: 15287 - DNA, 122 bp, Homo sapiens
ggcagctctatcctgaattgcctccaggattttccaggagatcccccatcccctgggcttcgaggagccacctccttcaccaccacaaggccttggcaccatcatctttgctctgtcttcta

SEQ ID NO: 15288 - DNA, 122 bp, Homo sapiens
ttcttctatgatgtctctgtatagatacttatgtagcctctgactcaactctcctagtgacggggaactctaccgctcaaggctgcttcacagctggatagctacatattttgttggagtag

SEQ ID NO: 15289 - DNA, 122 bp, Homo sapiens
gtgaccaccgggccatcaccttgcggctgcctgatgtttactggtggtggggaaccctctcgggccccgctccacacgtgtgactgagagggacacctgacaggattgaacgcgtggcagat

SEQ ID NO: 15290 - DNA, 122 bp, Homo sapiens
aaggattctgttccatcaatgccccattaaattcacctcagatggctgatggcaccatgtcgaagtctcacccagtgtggctatgagttagtgaattgaccgtctgaagagcaatatatagt

SEQ ID NO: 15291 - DNA, 122 bp, Homo sapiens
cttttttatttttttttctcatgtcttgccttctctgtacagtattttaccatatatgtacgtttctctaaacaacattagttttacttggtttgaactttacaaaagtgttgttagacttc

SEQ ID NO: 15292 - DNA, 122 bp, Homo sapiens
cctgagccgggtggctcttgtgtttattgtaagactggacagcctcaccccaggcttgcccggggtgagagttacacgtgtggctataaacccttccgttgtgaggtttgtaactactctac

SEQ ID NO: 15293 - DNA, 122 bp, Homo sapiens
aggcaggaccctgcgcaagggaggcagtgctctcccaggactggagtgagcatttcttagcggcctcctctaaaacgcttgttttagaatctgtgccctgcattgctgtaagcagctcacaa

SEQ ID NO: 15294 - DNA, 122 bp, Homo sapiens
tgggaatcgtttcagtctaacctcagcagagcgcagatcacccatcttcctaatgaataacggctgggaatcgtttcagtctaacctcagcagagctcagatcccctcatcttcctaatgaa

SEQ ID NO: 15295 - DNA, 122 bp, Homo sapiens
gggagacggtggctcagacaagctgtcgcagctcaggctctccagccccaggaccaacagcggaaactaccaggcctttaccagagccatgcgaggccctgggcagaccacagcagcgcagg

SEQ ID NO: 15296 - DNA, 122 bp, Homo sapiens
atttctgcttctcttggaattttagcttcattctcccagactggcttcttgtgccttgctcgagtcctcaccactggcaactctaaaatgacgtcttcaacttcccctgtgccctcttcctt

SEQ ID NO: 15297 - DNA, 122 bp, Homo sapiens
ggacgatgcgtcacttcctggtcttttggggggagccgggatatataagggcggtgctcacgcagcgctctcgcttacacagtatggccggcgacattagctagcgctcgctctactctctc

SEQ ID NO: 15298 - DNA, 122 bp, Homo sapiens
atttacagttcgggcctttctagtaaccgctagacgctgcttctctatggttattcgtctcggcttggtgagtcagagccaacagcggagacgatctatatacgttcttctctatggttccg

SEQ ID NO: 15299 - DNA, 122 bp, Homo sapiens
ttcccaggctgaccgggccaccgacccgcggacgcacctcggtgcactcgtcccgctggtcgatgagcctccgcaggtggagcaccatgctcctcgacagggcctccagctcctccggagcc

SEQ ID NO: 15300 - DNA, 122 bp, Homo sapiens
aaataaacaataaaatgcttacagtagtgtgcctggcctcgtagcacatactgcactgggcgttcactgctattatgatcttcgaagaggtccaggaccctaacgttgtggggatctggttg

SEQ ID NO: 15301 - DNA, 122 bp, Homo sapiens
cacagaggggctttgaatttgaggcagaggaggaactgcagagagggggcggggagggctcgccgggaaatcaaacgtccatttacatcttgtcctgcaaagcttcatcaaaacttctttgc

SEQ ID NO: 15302 - DNA, 122 bp, Homo sapiens
gcgggcctctgagcaggtgcaggctgtggtgggccaggctggggctcgaggtctctcctccggagggaaagaccttctctccatgcccctcaagggccccacatgccctggacaggtcaggc

SEQ ID NO: 15303 - DNA, 122 bp, Homo sapiens
tcctctctgttaggacatcaagggagaaacagctgaaatccagggctgaacatttcctggcgcggctagatttgaagcttccagtatgtggagtatcaccttcattccctctgggggcgtct

SEQ ID NO: 15304 - DNA, 122 bp, Homo sapiens
aaaacaggccacacagtagggatcttcatcccgggaggtgaactgctgccctgccaggggcgtctggcatccggtacagaccagacattctcgatgccacggctgatcacggtatgtcactc

SEQ ID NO: 15305 - DNA, 122 bp, Homo sapiens
gcggcgccagccagcggaggttgccatggtttccgggggtcacgtgggcgcgctctcctgcgccccctcccgcgcaccgcggcggggcgggggcggggcgcccgggcgggggagaggcgcgg

SEQ ID NO: 15306 - DNA, 122 bp, Homo sapiens
aataaaataaaaataaagataagggctgctgcacatctagagcctgtgattcccactctgcgttagggcaaatgggtggtgaacaaaaatctaaaaagaaggtgtgggtttggattcagctg

SEQ ID NO: 15307 - DNA, 122 bp, Homo sapiens
aggacccacctgctgcaggtactggttaatggtaatgtgcgccatgggagcgccgccgaacggagagcgccaccccctacgcctcaagcgggccagctggcgtcacttccggccctcggtcc

SEQ ID NO: 15308 - DNA, 122 bp, Homo sapiens
gtagggaggaagctgccttatgcttggatctgcagcctttgcctggacctgtggagcctacgtggccagggtgagggagacagaaattagaacccaatgtattcagctaatcctcttcttgc

SEQ ID NO: 15309 - DNA, 122 bp, Homo sapiens
caggactgtggaactgggggataagttcacagctgctgtgagtgacagggtttccaagcacggggcacttaccaaactccatggaggccctggatagcacaatgatcaggatcttgtccctg

SEQ ID NO: 15310 - DNA, 122 bp, Homo sapiens
acagtgttaaccagagaaagaggtatgtgaggggcatttggattccagcagagaggagcacgtgcaaagatctggagggagggagcatgttccagtcgagtcactgaaggaaggtggtgtgg

SEQ ID NO: 15311 - DNA, 122 bp, Homo sapiens
tcacccagcagtaaaacgcatgcgcaaagcttcggtcaatgcgggctgtccatttctcaccgccgactccctacatcaactacgcatgcgttgcctgcctttctccaccgccggcctcgttt

SEQ ID NO: 15312 - DNA, 122 bp, Homo sapiens
gagccaccgcgcccggccttggggggagccttgaactctttttcctcctttctaggtttccggggagttggtgtctgtggcacatgcgctttctctcccagcagagtcgtatggcaacgatg

SEQ ID NO: 15313 - DNA, 122 bp, Homo sapiens
ctccatgcctcagcccccaccctcctccagctctgcacagctgtgggacaggggcaggaccgtgggcccagagctctgtcctggtgcttctaggccttggtttccttaacagcctaaaggga

SEQ ID NO: 15314 - DNA, 122 bp, Homo sapiens
acccactcttcccgcccactggcccgccgcagctccctccattggctcgcggcacctgtccgtttcctgggagagttcagcacctcccggcaggaagaggctccggcctcattgggtgcgtg

SEQ ID NO: 15315 - DNA, 122 bp, Homo sapiens
tgtgtacaccacgttttcttcatccgtgcatccagtgggggacacaggctgattccataacgtggccactgtgaacagtgccgcagtacacgtaggggtgccgagatctcttcagtgtactg

SEQ ID NO: 15316 - DNA, 122 bp, Homo sapiens
cccctgcccttgccagcctgcgccttcctgggcgcctgacgcacccctctgccccaaccacgttttctcaagagtgttgtctgtcccggccttccaaggagacccttagctcccgccggccg

SEQ ID NO: 15317 - DNA, 122 bp, Homo sapiens
gacttgattttctcagtttgggcagaggtttgcagacactttgcaggttgccagacccttcgtccagccacctgtcagctgggggtcatatggtatagaaagcagtcatttctatgcaaggt

SEQ ID NO: 15318 - DNA, 122 bp, Homo sapiens
gaacacctactatgcactagattattttacatacataagctctaattcctaaagatacaccgcaagatgtgggatcattatccccaatttacagatgaagacactgaggtttagagaggtta

SEQ ID NO: 15319 - DNA, 122 bp, Homo sapiens
tgagtgggaggccagccctgctcacacagggaccagcgcctgtgcccggtgggggtggggcggcttcccctcagcccactcctccatcttcagctcctgctaggcgccggggaaagtaccag

SEQ ID NO: 15320 - DNA, 122 bp, Homo sapiens
gtgctcagacccccgcctccctctctccgaagttttttatgaagtgagcctggacaacaacgtggagcctgcaccaggagtggccagggagggttctccccataacaaccccactgtacagc

SEQ ID NO: 15321 - DNA, 122 bp, Homo sapiens
taggagtcatggggatcttgagcccctctgtggatgtggacagccacggctgggcctctccgttgatcttagggggcccgacttcaccttctggttctggagagggcttccttttccttgct

SEQ ID NO: 15322 - DNA, 122 bp, Homo sapiens
ccacggcgccgagccctgattgacgttcagccaggccaatcatagcctgtgtctgaggcgcgcggagctggagcgcccagggcatgtccgccgatcccaaggaggcaatctgtcaggcgccg

SEQ ID NO: 15323 - DNA, 122 bp, Homo sapiens
ggcgtgaggagctggcccgctgagctgctggtgggcactggctggcggggaacctgcagccgctcttgtcctctcccgccgcttctcgggatcctgccccccggacccgggcccgcccgctc

SEQ ID NO: 15324 - DNA, 122 bp, Homo sapiens
aaaatctgtgtccactagaatctaagctccatgcaggaacattgtttactgctgcatgatcgtgaccttgaacaagtacctaagaaatagtggcttccctggaattgtttaacttgatagga

SEQ ID NO: 15325 - DNA, 122 bp, Homo sapiens
gcttacaagtgcgatgaatgcggcaaggccttcacctggagcaccaaccttctggagcaccggcgcatccacaccggcgagaagcccttcttctgcggcgagtgcgggaaggccttcagctg

SEQ ID NO: 15326 - DNA, 122 bp, Homo sapiens
cccccgtgagcaatactgctgggccaggagagggaggagggcagtgggcatagagaacagcgtccctgacgtgcacaacagcacactgcaggggtggaaggagacggtgacctggtgacctg

SEQ ID NO: 15327 - DNA, 122 bp, Homo sapiens
cgccccggccccgccccctcctcccggctgcacgcgccgctccccctttgtcccccaggccgcggggaccccgggcaccaacccctccagcacccgctgccccccagcccggtggacggccc

SEQ ID NO: 15328 - DNA, 122 bp, Homo sapiens
gcccgccccgccgccaggggctgtcgcaggagccaggcgtggattggtatgtgggtatgtcggcctctcttcataggccgcgcaggattgctcgagaggctttgattggctcaacaggcgct

SEQ ID NO: 15329 - DNA, 122 bp, Homo sapiens
gcctctgcccgagcgcgcccttcggcccctgcaattagcgccgggaggtcagcaggaacccggacgccttcacccgcggctcaaagcacagcaaaaggcgaccccatcccctcccctccgcg

SEQ ID NO: 15330 - DNA, 122 bp, Homo sapiens
tgcgagggcggcagggtcaaggcgggcgcggagcagagcgcgagcgagctgcgctgcaggcgcgtcggggtcgtcgtccaggcccagagccggatcagagttgcggggggcgccccagacgc

SEQ ID NO: 15331 - DNA, 122 bp, Homo sapiens
cctggggagctccggaagggactctggtcccatcggtgcattcatggtacccccttctctcggcagggctggacttcctgctggattgacctcacaagaggatagacagaggagagggcatc

SEQ ID NO: 15332 - DNA, 122 bp, Homo sapiens
cacgggctgggaggtggtggaggacccggggctttcggcagaaactcgggagggcggcggcggccggggctgcgggaggaccctacgccccgctcgccccgcagcgttcctcggtcccggcg

SEQ ID NO: 15333 - DNA, 122 bp, Homo sapiens
gctccggccccaccccgccatcccctggccctggctgactcgccacccccgacactgcagcgcctgccgacctcggggccccgccctctgccttcgctcgcgccgctctccttcagtctccc

SEQ ID NO: 15334 - DNA, 122 bp, Homo sapiens
acttggcgagagactcagtggatttaagtgaaaagaggaagaaaaggagacaggaaaggacggacacccaagcccagcaacaacctttccagtctgagtgcccttggtctgaccgacagact

SEQ ID NO: 15335 - DNA, 122 bp, Homo sapiens
cctccccaagacacctgtggggcacccaaggcgcgccacctttggcctgaggattctggccgtgtttggcaaatcatagctgagtagtgaatctgaaacctgggatgtggtttctgagacca

SEQ ID NO: 15336 - DNA, 122 bp, Homo sapiens
gaagaatgttgtgttctgtgtagccctcacactgtaagagttcacatggaagtaagtctgcgttggttctgaaagggcacagtgtcagttgagctgacatatactgggtggggtggaaggcg

SEQ ID NO: 15337 - DNA, 122 bp, Homo sapiens
taataaactccttttggcactaaatactgccctggaaaaaatggtcagcttcttcaactgcggctgcctttacgctaatgtaactgaggttcttagagttttataacttactgagcgaaata

SEQ ID NO: 15338 - DNA, 122 bp, Homo sapiens
tcatctgtccgctgacgctgccctggcagcttcagagttagtgctagagcacagtgctgccgccgcagcccagaactcagtgaggaagggggccgcacaaagggcttcagaggaatggagac

SEQ ID NO: 15339 - DNA, 122 bp, Homo sapiens
ccttccttgccccttttccttggcactctttccacaggccctgtgtggtctgggctctaccgagaggtccccaaggagagctggcgtgtcagtcagccaagaagcaagcaggcaggcaatgc

SEQ ID NO: 15340 - DNA, 122 bp, Homo sapiens
tccagggcggcggacgtggtggaaccgttagcccggtgccaacggtcctgaaacggggggcgggatctcggggcggggcctcggggcccggccaaggcgaaggtggagccagttcggacccc

SEQ ID NO: 15341 - DNA, 122 bp, Homo sapiens
ctgtggccacctgcccgtcacccccacctccaaccttctgaaggagcagagttcactccccgccaccctcattacagaatcttcctgtgatctcagaggatgatggaaattctctcctctga

SEQ ID NO: 15342 - DNA, 122 bp, Homo sapiens
gggaatgttttcccagcgattcactgacgggcctttcattcctccctccgcaatcaagggcggcaagtgcagcctgagagccctccacggcctgattgctgaaagaatttccaaaaggaaag

SEQ ID NO: 15343 - DNA, 122 bp, Homo sapiens
cctttgtcctggcctttgtgggacaagacagatggccctcctgtggggctgatgctatctcgaggctgccagtcagacgtgaggcaggaaccacccctgcctttgtgagcaggtgcagggca

SEQ ID NO: 15344 - DNA, 122 bp, Homo sapiens
gccacttaatgatgggccactttgtaaaataaaataaatacaacttgagaaagtggagcgcgaggcagcgcggcctcctccgcactgagccgggacagaaagctttttcctcacctttcctc

SEQ ID NO: 15345 - DNA, 122 bp, Homo sapiens
tctatgacaaatatgtcactactcttgccttggaatttctttaaggctaaagaggaaaatcggtaagtaatcacacgcagtggtcagtgaggattgaagaggtagccatttggtctaacctt

SEQ ID NO: 15346 - DNA, 122 bp, Homo sapiens
ggcctctgaggaggcagctgttgctatggtgaccaccgttacctggcaactaagccgcatcgtcctgggcacctgctgtctcttctctggagctgctggctggctctggggacagacctgtg

SEQ ID NO: 15347 - DNA, 122 bp, Homo sapiens
ggccaggctggcctcaggcgatccatccacctcagcctcccaaactgctgggattataggcgtgaaccaccatgcccagcctagttcaaaattcttttatagggttcattgaaggtcactat

SEQ ID NO: 15348 - DNA, 122 bp, Homo sapiens
cagcccaagaccaggcacgcagtccggggcggggcggaggcccgaactcccgggctgaggcggtgtcgccctcccgtacccggcctccagggtgagcctctctagcccctcgcgagccgccg

SEQ ID NO: 15349 - DNA, 122 bp, Homo sapiens
ggcattaaagagaggacactctagggctggagctggctcggcccctgaaacacagcagcacgtggggcggccagaggcgcaggctgcgtgcagggggaggggacacgctgttccgggcacag

SEQ ID NO: 15350 - DNA, 122 bp, Homo sapiens
taaagaagtaacaataaccctcaaaccaaactccctaatggtcaattaaatggagtcttccggtgaggcacggagaaggaactcctcatacgggaacagcaggtgctcgatttggggtgtgg

SEQ ID NO: 15351 - DNA, 122 bp, Homo sapiens
agtagctggccgggcggagctctgccaggagcgggtctgggagctccaggatgcctggggcgtgagcggagggagggagtaaagccgcgctcagttccctctctgccgctgcgcgtggtccg

SEQ ID NO: 15352 - DNA, 122 bp, Homo sapiens
ggaaaagtggtttcatgagccgggtctagggtccctgtgctgtgtgcagcctagggacttcgtgccctgcatcccagccactccagccatggctaaaaggggccaatgtaaagctctggtcg

SEQ ID NO: 15353 - DNA, 122 bp, Homo sapiens
cctccctggatctaccttcttccagggaccaagtcccacaaaacttgtaacttttggggccgaatctactcaattccagaatgccgagactcacccataacagcaccttcctctgtcctctg

SEQ ID NO: 15354 - DNA, 122 bp, Homo sapiens
gcttgacagatgctctctctgacagagcagaatttaacgtcactgcttggctgaatcccacgtgattgtttgcattcattttgactaaaaacctaaggtagggagaagcttagagattttgc

SEQ ID NO: 15355 - DNA, 122 bp, Homo sapiens
cccactgcatccagatcatgaaggtggaggagatcgcagccaacaagtgccgccgggccacgcttcaccaccaagaggcccaacatcttcttttaggtgcaggttcctcgccccgggtgtgc

SEQ ID NO: 15356 - DNA, 122 bp, Homo sapiens
cggagtcagcatctgaaatgctgctgccctaggagacaggcagacaggttcggcactgcccgggggccacgcgggtctccctctgggaggaggggacagctcagcgtggcagggcgggctta

SEQ ID NO: 15357 - DNA, 122 bp, Homo sapiens
cccaaagtgctgggattacaggcgtgagccaccatgcccggccaaaaataaaattttaaacgagctagtatgtatcaaaagtaatggcttgatgttgtgtggagcccagaaaaaatattttg

SEQ ID NO: 15358 - DNA, 122 bp, Homo sapiens
ataacacccttggtggacgatgagtggcagctccactaggaatgtaaggcaggccgtaggcgagacggcacgagttctagcagtgacatttaaaaagtaaaaaagcatatttttaaaagtaa

SEQ ID NO: 15359 - DNA, 122 bp, Homo sapiens
tccgaacgctgcttcccccgacctgcccccaagggtttgatccaacgggcggaggatcagcgattttacaagcttccctggcttctcctgagcagccagggcgcagaccactgcgttatcca

SEQ ID NO: 15360 - DNA, 122 bp, Homo sapiens
tccctcctcttctattttctggaagaggatgtgtagaattggtgttaatttttctttaaacgttttgtagaccctcctgtgaaaccatctggccctgaaatgtctttctggggagcgtttaa

SEQ ID NO: 15361 - DNA, 122 bp, Homo sapiens
ggccaatcctgaagcagcccagttccagtgattgttaaacaaaacaataaatgtccttggcgtgtaagctacttttggtggaatattctgttatttgcaggcaaaagcttccaaaagataca

SEQ ID NO: 15362 - DNA, 122 bp, Homo sapiens
gacgccacgtgggaagtgctgtgaggctggtgcggagagcaaacctcctgcaactcttagcgagtaaatgggcacatccacactggagttgaacacaggggcgccggccacgggttcaggct

SEQ ID NO: 15363 - DNA, 122 bp, Homo sapiens
gagggaactccacagttttccggaggagacagactcgtaaacaagaattcacagtgattccggttatgattttggacatacaggggggctgtgaatgcacagagaaaacagttaacctggat

SEQ ID NO: 15364 - DNA, 122 bp, Homo sapiens
cccaccctaatattatcatgctgcttgatctactttcaggtctctctttgtgcagtctcacgctgttccttccaccagggaatataatagcatttttcacaagggtaaattctactcatgta

SEQ ID NO: 15365 - DNA, 122 bp, Homo sapiens
gctgcactaaagaggtggtgctctgtctggctgtttgtgaagtgctgccttccgtccacacgcttggggctgtcgtccagacacacgtggaaacacatgcagaggggcacacagatagggtc

SEQ ID NO: 15366 - DNA, 122 bp, Homo sapiens
tcgtaaatgatctgtatggtgagagcggtctctgggggtcaccgcgggaccaagtttcgccggtggtgggaggagtgctctggcccgcggccctgggcgcgcgaagggatcccgggaggggc

(The sequence listing continues in the following parts.)

What is claimed is:

1. A method for diagnosing rheumatoid arthritis or osteoarthritis, determining a rheumatoid arthritis or osteoarthritis prognosis, or determining or predicting a response to treatment for rheumatoid arthritis or osteoarthritis in a subject comprising determining whether at least 2 nucleic acid loci or at least 2 genes in a sample from said subject have methylation states indicative of rheumatoid arthritis, osteoarthritis, a rheumatoid arthritis or osteoarthritis prognosis, or a response to treatment for rheumatoid arthritis or osteoarthritis.

2. The method of claim 1, further comprising comparing the methylation states of the at least 2 loci or at least 2 genes in the sample from said subject with the methylation states of the loci or the genes in normal tissue, tissue from a subject without said known rheumatoid arthritis or osteoarthritis prognosis, or tissue from a subject without said known response to treatment for rheumatoid arthritis or osteoarthritis.

3. The method of claim 1, wherein an increase or decrease in the extent of methylation of at least 2 loci or at least 2 genes compared to the extent of methylation of the loci or genes in normal tissue, tissue from a subject without said known rheumatoid arthritis or osteoarthritis prognosis, or tissue from a subject without said known response to treatment for rheumatoid arthritis or osteoarthritis is indicative of the presence or absence of rheumatoid arthritis, osteoarthritis, a rheumatoid arthritis or osteoarthritis prognosis, or response to treatment for rheumatoid arthritis or osteoarthritis for the subject.

4. The method of claim 1, wherein the methylation states of said at least 2 loci or at least 2 genes is determined in a cell from said subject selected from the group consisting of fibroblast, synoviocyte, fibroblast-like synoviocyte, macrophage, and peripheral blood cell.

5. The method of claim 4, wherein the fibroblast-like synoviocyte is selected from the group consisting of rheumatoid arthritis fibroblast-like synoviocyte and osteoarthritis fibroblast-like synoviocyte

6. The method of claim 4, wherein the peripheral blood cell is selected from the group consisting of white blood cell, neutrophil, eosinophil, basophil, lymphocyte, B cell, plasma cell, T cell, natural killer cell, monocyte, and dendritic cell.

7. The method of claim 1, wherein the sample is selected from the group consisting of a tissue sample, a frozen tissue sample, a biopsy specimen, a surgical specimen, a cytological specimen, whole blood, bone marrow, cerebral spinal fluid, peritoneal fluid, lymph fluid, serum, plasma, urine, stool, and nipple aspirate.

8. The method of claim 1, wherein the at least 2 loci or at least 2 genes are selected from the group consisting of SEQ ID NO.s 1-485512, the loci listed in TABLE 6, TABLE 7, or TABLE 8, and the genes listed in TABLE 3.

9. The method of claim 1, wherein the methylation states of at least 5 nucleic acid loci or at least 5 genes in said sample are determined.

10. The method of claim 1, wherein the subject is a human.

11. A method for diagnosing rheumatoid arthritis or osteoarthritis, determining a rheumatoid arthritis or osteoarthritis prognosis, or determining or predicting a response to treatment for rheumatoid arthritis or osteoarthritis in a subject comprising:
determining the methylation states of a plurality of nucleic acid loci or the methylation states of a plurality of genes in a sample of said subject to obtain a methylation profile; and
determining whether said methylation profile is indicative of rheumatoid arthritis, osteoarthritis, a rheumatoid arthritis or osteoarthritis prognosis, or a response to treatment for rheumatoid arthritis or osteoarthritis.

12. The method of claim 11, further comprising comparing the methylation state of the plurality of nucleic acid loci or the methylation state of the plurality of genes in the sample from said subject with the methylation state of the plurality of nucleic acid loci or the methylation state of the plurality of genes in normal tissue, tissue from a subject without said known rheumatoid arthritis or osteoarthritis prognosis, or tissue from a subject without said known response to treatment for rheumatoid arthritis or osteoarthritis.

13. The method of claim 12, wherein an increase or decrease in the extent of methylation of plurality of nucleic acid loci or of the methylation state of the plurality of genes compared to the extent of methylation of the plurality of nucleic acid loci or the extent of methylation of the plurality of genes in normal tissue, tissue from a subject without said known rheumatoid arthritis or osteoarthritis prognosis, or tissue from a subject without said known response to treatment for rheumatoid arthritis or osteoarthritis is indicative of the presence or absence of rheumatoid arthritis, osteoarthritis, a rheumatoid arthritis or osteoarthritis prognosis, or response to treatment for rheumatoid arthritis or osteoarthritis for the subject.

14. The method of claim 11, wherein the methylation state of said plurality of nucleic acid loci or said plurality of genes is determined in in a cell from said subject selected from the group consisting of fibroblast, synoviocyte, fibroblast-like synoviocyte, macrophage and peripheral blood cell.

15. The method of claim 14, wherein the fibroblast-like synoviocyte is selected from the group consisting of rheumatoid arthritis fibroblast-like synoviocyte and osteoarthritis fibroblast-like synoviocyte

16. The method of claim 14, wherein the peripheral blood cell is selected from the group consisting of white blood cell, neutrophil, eosinophil, basophil, lymphocyte, B cell, plasma cell, T cell, natural killer cell, monocyte, and dendritic cell.

17. The method of claim 11, wherein the sample is selected from the group consisting of a tissue sample, a frozen tissue sample, a biopsy specimen, a surgical specimen, a cytological specimen, whole blood, bone marrow, cerebral spinal fluid, peritoneal fluid, lymph fluid, serum, plasma, urine, stool, and nipple aspirate.

18. The method of claim 11, wherein the plurality of nucleic acid loci or the plurality of genes is selected from the group consisting of SEQ ID NO.s 1-485512, the loci listed in TABLE 6, TABLE 7, or TABLE 8, and the genes listed in TABLE 3.

19. The method of claim 11, wherein the methylation states of at least 5 nucleic acid loci or at least 5 genes in said sample are determined.

20. The method of claim 11, wherein the subject is a human.

21. A method of identifying a methylation profile indicative of rheumatoid arthritis, osteoarthritis, a rheumatoid arthritis or osteoarthritis prognosis, or a response to treatment for rheumatoid arthritis or osteoarthritis comprising:
determining the methylation states of a plurality of nucleic acid loci or the methylation states of a plurality of genes in a sample from a test subject with rheumatoid arthritis, osteoarthritis, a particular rheumatoid arthritis or osteoarthritis prognosis, or a particular response to treatment for rheumatoid arthritis or osteoarthritis;
determining the methylation states of said plurality of nucleic acid loci or said plurality of genes in a sample from a control subject without rheumatoid arthritis, without osteoarthritis, without said rheumatoid arthritis or osteoarthritis prognosis or without said response to treatment for rheumatoid arthritis or osteoarthritis; and
identifying loci or genes which are hypermethylated or hypomethylated in said sample from said test subject relative to said sample from said control subject to identify said methylation profile indicative of rheumatoid arthritis, osteoarthritis a rheumatoid arthritis or osteoarthritis prognosis, or a response to treatment for rheumatoid arthritis or osteoarthritis.

22. The method of claim 21, further comprising storing data representing said loci or said genes which are hypermethylated or hypomethylated in said sample from said test subject relative to said sample from said control subject on a non-transitory computer readable medium.

23. The method of claim 22, further comprising comparing the methylation states of a plurality of nucleic acid loci or the methylation states of a plurality of genes in a sample from a test subject with rheumatoid arthritis, osteoarthritis, a particular rheumatoid arthritis or osteoarthritis prognosis, or a particular response to treatment for rheumatoid arthritis or osteoarthritis with the methylation states of said plurality of nucleic acid loci or the methylation states of said plurality of genes in a sample from a control subject without rheumatoid arthritis, without osteoarthritis, without said rheumatoid arthritis or osteoarthritis prognosis or without said response to treatment for rheumatoid arthritis or osteoarthritis.

24. The method of claim 21, wherein the methylation state of said plurality of nucleic acid loci or said plurality of genes in a sample from said test subject or said control subject is determined in a cell from said subject or said control subject selected from the group consisting of fibroblast, synoviocyte, fibroblast-like synoviocyte, macrophage, and peripheral blood cell.

25. The method of claim 24, wherein the fibroblast-like synoviocyte is selected from the group consisting of rheumatoid arthritis fibroblast-like synoviocyte and osteoarthritis fibroblast-like synoviocyte

26. The method of claim 24, wherein the peripheral blood cell is selected from the group consisting of white blood cell, neutrophil, eosinophil, basophil, lymphocyte, B cell, plasma cell, T cell, natural killer cell, monocyte, and dendritic cell.

27. The method of claim 21, wherein the sample is selected from the group consisting of a tissue sample, a frozen tissue sample, a biopsy specimen, a surgical specimen, a cytological specimen, whole blood, bone marrow, cerebral spinal fluid, peritoneal fluid, lymph fluid, serum, plasma, urine, stool, and nipple aspirate.

28. The method of claim 21, wherein the methylation states of at least 5 nucleic acid loci or at least 5 genes are determined.

29. The method of claim 21, wherein the subject is a human.

30. A method of ameliorating rheumatoid arthritis or osteoarthritis comprising:
evaluating the methylation status of a plurality of human nucleic acid loci in a nucleic acid sample from a human subject having symptoms of rheumatoid arthritis or osteoarthritis, wherein said loci comprise at least 5 loci or at least 5 genes selected from the group consisting of SEQ ID NO.s 1-485512, the loci listed in TABLE 6, TABLE 7, or TABLE 8, and the genes listed in TABLE 3; and
administering a treatment for rheumatoid arthritis or osteoarthritis if said at least 5 loci or said at least 5 genes have a methylation status indicative of rheumatoid arthritis or osteoarthritis.
